United States Patent Application Publication US 2007/0042381 A1 - sequence listing, part 45

SEQ ID NO: 2017036 - RNA, 12 nt, Human
uguaacuauguu

SEQ ID NO: 2017037 - RNA, 13 nt, Human
uguaacuauguuu

SEQ ID NO: 2017038 - RNA, 17 nt, Human
uguaacuauguuuuauc

SEQ ID NO: 2017039 - RNA, 22 nt, Human
uguaacugcucuugggcaauau

SEQ ID NO: 2017040 - RNA, 23 nt, Human
uguaacugcucuugggcaauauu

SEQ ID NO: 2017041 - RNA, 14 nt, Human
uguaacuguuacca

SEQ ID NO: 2017042 - RNA, 17 nt, Human
uguaacuguuaccauug

SEQ ID NO: 2017043 - RNA, 20 nt, Human
uguaacuguuaccauuggaa

SEQ ID NO: 2017044 - RNA, 21 nt, Human
uguaacuguuuagaugaaugu

SEQ ID NO: 2017045 - RNA, 13 nt, Human
uguaaauuaacuu

SEQ ID NO: 2017046 - RNA, 14 nt, Human
uguaaauuaacuuu

SEQ ID NO: 2017047 - RNA, 15 nt, Human
uguaaauuaacuuuu

SEQ ID NO: 2017048 - RNA, 16 nt, Human
uguaaauuaacuuuua

SEQ ID NO: 2017049 - RNA, 17 nt, Human
uguaaauuaacuuuuau

SEQ ID NO: 2017050 - RNA, 18 nt, Human
uggguuuccaacaauuca

SEQ ID NO: 2017051 - RNA, 20 nt, Human
ugguagugguuguaucugug

SEQ ID NO: 2017052 - RNA, 17 nt, Human
ugguaguugaggaaagc

SEQ ID NO: 2017053 - RNA, 14 nt, Human
ugguaguuucugug

SEQ ID NO: 2017054 - RNA, 15 nt, Human
ugguaguuucugugg

SEQ ID NO: 2017055 - RNA, 14 nt, Human
uguaaacaaaucuu

SEQ ID NO: 2017056 - RNA, 19 nt, Human
uguaaacaaaucuuuccau

SEQ ID NO: 2017057 - RNA, 15 nt, Human
uguaccauuaaaaua

SEQ ID NO: 2017058 - RNA, 17 nt, Human
uguaccauuaaaauaug

SEQ ID NO: 2017059 - RNA, 19 nt, Human
uguaccauuaaaauaugca

SEQ ID NO: 2017060 - RNA, 23 nt, Human
uguaccauuaaaauaugcacuaa

SEQ ID NO: 2017061 - RNA, 15 nt, Human
uguaccgcaauguga

SEQ ID NO: 2017062 - RNA, 22 nt, Human
uguaccucuugagccuugaacu

SEQ ID NO: 2017063 - RNA, 14 nt, Human
uguaccucuugagc

SEQ ID NO: 2017064 - RNA, 23 nt, Human
uguaccucuugagccuugaacuu

SEQ ID NO: 2017065 - RNA, 20 nt, Human
uguaauguaggggaaaguuu

SEQ ID NO: 2017066 - RNA, 23 nt, Human
uguaauguaucaaauacauuuaa

SEQ ID NO: 2017067 - RNA, 15 nt, Human
uguaauguaacugcu

SEQ ID NO: 2017068 - RNA, 18 nt, Human
uguaauguaacugcucuu

SEQ ID NO: 2017069 - RNA, 12 nt, Human
uguaauguaacu

SEQ ID NO: 2017070 - RNA, 13 nt, Human
uguaauguaacug

SEQ ID NO: 2017071 - RNA, 14 nt, Human
uguaauguaacugc

SEQ ID NO: 2017072 - RNA, 12 nt, Human
uguaaugacagg

SEQ ID NO: 2017073 - RNA, 13 nt, Human
uguaccauuaaaa

SEQ ID NO: 2017074 - RNA, 14 nt, Human
uguaccauuaaaau

SEQ ID NO: 2017075 - RNA, 19 nt, Human
uguacuauaacauagaauu

SEQ ID NO: 2017076 - RNA, 18 nt, Human
uguacuaucuuaucucag

SEQ ID NO: 2017077 - RNA, 20 nt, Human
uguacuauaacauagaauug

SEQ ID NO: 2017078 - RNA, 12 nt, Human
uguacuccuccc

SEQ ID NO: 2017079 - RNA, 13 nt, Human
uguacuccuccca

SEQ ID NO: 2017080 - RNA, 17 nt, Human
uguacgucugacaggca

SEQ ID NO: 2017081 - RNA, 16 nt, Human
uguacgucugacaggc

SEQ ID NO: 2017082 - RNA, 17 nt, Human
uguagauaauacaguuc

SEQ ID NO: 2017083 - RNA, 13 nt, Human
ugucauagccagu

SEQ ID NO: 2017084 - RNA, 16 nt, Human
ugucaucaccauggaa

SEQ ID NO: 2017085 - RNA, 23 nt, Human
ugucauucgcuacuaugauuuaa

SEQ ID NO: 2017086 - RNA, 13 nt, Human
ugucauugcuucu

SEQ ID NO: 2017087 - RNA, 17 nt, Human
ugucauugcuucuucug

SEQ ID NO: 2017088 - RNA, 18 nt, Human
ugucauugcuucuucuga

SEQ ID NO: 2017089 - RNA, 22 nt, Human
ugucauuagugagacauauuua

SEQ ID NO: 2017090 - RNA, 24 nt, Human
ugucauuagugagacauauuuaca

SEQ ID NO: 2017091 - RNA, 23 nt, Human
ugucccaaaaagaaaggagggga

SEQ ID NO: 2017092 - RNA, 19 nt, Human
ugucccaugugagcugcug

SEQ ID NO: 2017093 - RNA, 20 nt, Human
ugucauacucgagucugagg

SEQ ID NO: 2017094 - RNA, 14 nt, Human
ugucaguguuuggu

SEQ ID NO: 2017095 - RNA, 17 nt, Human
ugucaguuguuauuuau

SEQ ID NO: 2017096 - RNA, 18 nt, Human
ugucaguuguuauuuauu

SEQ ID NO: 2017097 - RNA, 22 nt, Human
ugucaguuguuauuuauugaaa

SEQ ID NO: 2017098 - RNA, 14 nt, Human
ugucaguuuauguu

SEQ ID NO: 2017099 - RNA, 16 nt, Human
ugucaguuuauguuuu

SEQ ID NO: 2017100 - RNA, 22 nt, Human
ugucaguuuauguuuuggucca

SEQ ID NO: 2017101 - RNA, 20 nt, Human
ugucagugugacugaucucu

SEQ ID NO: 2017102 - RNA, 12 nt, Human
ugucagugugac

SEQ ID NO: 2017103 - RNA, 19 nt, Human
uguagcaaacccugucaaa

SEQ ID NO: 2017104 - RNA, 21 nt, Human
uguagcaaacccugucaaaca

SEQ ID NO: 2017105 - RNA, 22 nt, Human
uguagcaaacccugucaaacau

SEQ ID NO: 2017106 - RNA, 23 nt, Human
uguagcaaacccugucaaacauu

SEQ ID NO: 2017107 - RNA, 16 nt, Human
uguagauuugauuuuu

SEQ ID NO: 2017108 - RNA, 13 nt, Human
uguagauuugauu

SEQ ID NO: 2017109 - RNA, 15 nt, Human
uguagcaaacccugu

SEQ ID NO: 2017110 - RNA, 18 nt, Human
uguagcaaacccugucaa

SEQ ID NO: 2017111 - RNA, 20 nt, Human
uguauaauucaaagcaccaa

SEQ ID NO: 2017112 - RNA, 19 nt, Human
uguaucccaugagccucag

SEQ ID NO: 2017113 - RNA, 23 nt, Human
uguaucccaugagccucagcauc

SEQ ID NO: 2017114 - RNA, 19 nt, Human
uguauacguuucaaaaaca

SEQ ID NO: 2017115 - RNA, 12 nt, Human
uguauacaugug

SEQ ID NO: 2017116 - RNA, 17 nt, Human
uguauugcuuucuuuca

SEQ ID NO: 2017117 - RNA, 17 nt, Human
uguauuguaacuauguu

SEQ ID NO: 2017118 - RNA, 13 nt, Human
uguauugcuuucu

SEQ ID NO: 2017119 - RNA, 12 nt, Human
uguauuugaaag

SEQ ID NO: 2017120 - RNA, 13 nt, Human
uguauuugaaagu

SEQ ID NO: 2017121 - RNA, 14 nt, Human
uguaugcacuuugu

SEQ ID NO: 2017122 - RNA, 12 nt, Human
uguaugcauaau

SEQ ID NO: 2017123 - RNA, 17 nt, Human
uguaugcauaauaaucc

SEQ ID NO: 2017124 - RNA, 22 nt, Human
uguaugcauaauaauccugcaa

SEQ ID NO: 2017125 - RNA, 16 nt, Human
uguaugcaagcaguuu

SEQ ID NO: 2017126 - RNA, 18 nt, Human
uguaugcaagcaguuuca

SEQ ID NO: 2017127 - RNA, 19 nt, Human
uguaugcaagcaguuucaa

SEQ ID NO: 2017128 - RNA, 20 nt, Human
uguaugcaagcaguuucaau

SEQ ID NO: 2017129 - RNA, 19 nt, Human
uguauccuuucacacauuu

SEQ ID NO: 2017130 - RNA, 11 nt, Human
uguguguaugu

SEQ ID NO: 2017131 - RNA, 20 nt, Human
ugugugccucuagcugaauu

SEQ ID NO: 2017132 - RNA, 19 nt, Human
ugugugcggagucauuuug

SEQ ID NO: 2017133 - RNA, 16 nt, Human
uguguguccaaaacug

SEQ ID NO: 2017134 - RNA, 19 nt, Human
uguguguccaaaacugccu

SEQ ID NO: 2017135 - RNA, 15 nt, Human
ugugugauauuucag

SEQ ID NO: 2017136 - RNA, 16 nt, Human
ugugugauauuucaga

SEQ ID NO: 2017137 - RNA, 14 nt, Human
ugugugcagagcug

SEQ ID NO: 2017138 - RNA, 17 nt, Human
ugugugcagagcugaag

SEQ ID NO: 2017139 - RNA, 22 nt, Human
ugugugccgagcccuugcccau

SEQ ID NO: 2017140 - RNA, 16 nt, Human
ugugugccucuagcug

SEQ ID NO: 2017141 - RNA, 17 nt, Human
ugugugccucuagcuga

SEQ ID NO: 2017142 - RNA, 18 nt, Human
ugugugccucuagcugaa

SEQ ID NO: 2017143 - RNA, 14 nt, Human
ugugugcccagcuu

SEQ ID NO: 2017144 - RNA, 13 nt, Human
ugugugcccagcu

SEQ ID NO: 2017145 - RNA, 18 nt, Human
ugugugccgagcccuugc

SEQ ID NO: 2017146 - RNA, 20 nt, Human
ugugugccgagcccuugccc

SEQ ID NO: 2017147 - RNA, 21 nt, Human
ugugugccgagcccuugccca

SEQ ID NO: 2017148 - RNA, 14 nt, Human
uguguugugugugg

SEQ ID NO: 2017149 - RNA, 23 nt, Human
uguguugugugugggagugugua

SEQ ID NO: 2017150 - RNA, 19 nt, Human
uguguguccccuugcagcc

SEQ ID NO: 2017151 - RNA, 17 nt, Human
uguguuuacagagaugu

SEQ ID NO: 2017152 - RNA, 17 nt, Human
uguguuuagaauugaag

SEQ ID NO: 2017153 - RNA, 18 nt, Human
uguguuuagaauugaagg

SEQ ID NO: 2017154 - RNA, 15 nt, Human
uguguuuaugugugu

SEQ ID NO: 2017155 - RNA, 12 nt, Human
uguguuuauuca

SEQ ID NO: 2017156 - RNA, 14 nt, Human
uguguuuauucaaa

SEQ ID NO: 2017157 - RNA, 22 nt, Human
uguguuuauucaaacugaaaag

SEQ ID NO: 2017158 - RNA, 23 nt, Human
uguguuuauucaaacugaaaagc

SEQ ID NO: 2017159 - RNA, 13 nt, Human
uguguuuauuguc

SEQ ID NO: 2017160 - RNA, 12 nt, Human
uguguuuauucu

SEQ ID NO: 2017161 - RNA, 14 nt, Human
uguguuuauucuug

SEQ ID NO: 2017162 - RNA, 15 nt, Human
uguguuuauucuuga

SEQ ID NO: 2017163 - RNA, 20 nt, Human
uguguuuauucuugaugaaa

SEQ ID NO: 2017164 - RNA, 22 nt, Human
uguguuuagaauugaagguuuu

SEQ ID NO: 2017165 - RNA, 13 nt, Human
uguguuuaugugu

SEQ ID NO: 2017166 - RNA, 22 nt, Human
uguguuuaggaacuacugagga

SEQ ID NO: 2017167 - RNA, 13 nt, Human
uguguauuguugu

SEQ ID NO: 2017168 - RNA, 20 nt, Human
uguguauuguuguaaaaugu

SEQ ID NO: 2017169 - RNA, 23 nt, Human
uguguauuucaguuauugucccu

SEQ ID NO: 2017170 - RNA, 14 nt, Human
uguguauguggggg

SEQ ID NO: 2017171 - RNA, 13 nt, Human
uguguaugugggg

SEQ ID NO: 2017172 - RNA, 15 nt, Human
uguguauauuugauu

SEQ ID NO: 2017173 - RNA, 21 nt, Human
uguguauauuugauuuauuaa

SEQ ID NO: 2017174 - RNA, 23 nt, Human
uguguaugugggggucugugugu

SEQ ID NO: 2017175 - RNA, 15 nt, Human
uguucagcuccagcu

SEQ ID NO: 2017176 - RNA, 16 nt, Human
uguucagcuccagcuc

SEQ ID NO: 2017177 - RNA, 11 nt, Human
uguucagcugg

SEQ ID NO: 2017178 - RNA, 18 nt, Human
uguucagcuccagcucac

SEQ ID NO: 2017179 - RNA, 14 nt, Human
uguucagcuccagc

SEQ ID NO: 2017180 - RNA, 17 nt, Human
uguuagauuaagaaaua

SEQ ID NO: 2017181 - RNA, 20 nt, Human
uguuagauuaagaaauagac

SEQ ID NO: 2017182 - RNA, 13 nt, Human
uguuagaauguaa

SEQ ID NO: 2017183 - RNA, 19 nt, Human
uguuagaauguaagguaua

SEQ ID NO: 2017184 - RNA, 18 nt, Human
uguuaccauuggaaauuu

SEQ ID NO: 2017185 - RNA, 22 nt, Human
uguucaaaggagcaagaacuuu

SEQ ID NO: 2017186 - RNA, 14 nt, Human
uguuaguuuuccuu

SEQ ID NO: 2017187 - RNA, 16 nt, Human
uguguuugcuccccuu

SEQ ID NO: 2017188 - RNA, 22 nt, Human
uguguuuauucuugaugaaaag

SEQ ID NO: 2017189 - RNA, 23 nt, Human
uguguuuauucuugaugaaaagc

SEQ ID NO: 2017190 - RNA, 17 nt, Human
uguuaccauuggaaauu

SEQ ID NO: 2017191 - RNA, 16 nt, Human
uguuacugucuucagu

SEQ ID NO: 2017192 - RNA, 15 nt, Human
uguuacugucuucag

SEQ ID NO: 2017193 - RNA, 22 nt, Human
uguuacauuuuuaagugcugca

SEQ ID NO: 2017194 - RNA, 16 nt, Human
uguuaccauuggaaau

SEQ ID NO: 2017195 - RNA, 13 nt, Human
uguuacauuuuua

SEQ ID NO: 2017196 - RNA, 12 nt, Human
uguuacauguau

SEQ ID NO: 2017197 - RNA, 15 nt, Human
uguuacauguaucaa

SEQ ID NO: 2017198 - RNA, 20 nt, Human
uguucaugaaagauucaaug

SEQ ID NO: 2017199 - RNA, 13 nt, Human
uguucauaaauaa

SEQ ID NO: 2017200 - RNA, 12 nt, Human
uguucaguguua

SEQ ID NO: 2017201 - RNA, 17 nt, Human
uguucacuaaacucuga

SEQ ID NO: 2017202 - RNA, 18 nt, Human
uguucaggaaguccuuau

SEQ ID NO: 2017203 - RNA, 15 nt, Human
uguucacuaaacucu

SEQ ID NO: 2017204 - RNA, 17 nt, Human
uguucagcuuuuauucc

SEQ ID NO: 2017205 - RNA, 12 nt, Human
uguucuauagcu

SEQ ID NO: 2017206 - RNA, 21 nt, Human
uguucuccagucauuauguua

SEQ ID NO: 2017207 - RNA, 13 nt, Human
uguucucugagga

SEQ ID NO: 2017208 - RNA, 16 nt, Human
uguucucugaggacac

SEQ ID NO: 2017209 - RNA, 12 nt, Human
uguucucugccc

SEQ ID NO: 2017210 - RNA, 18 nt, Human
uguucucugaggacacua

SEQ ID NO: 2017211 - RNA, 11 nt, Human
uguugaaagau

SEQ ID NO: 2017212 - RNA, 16 nt, Human
uguugaaacuuuaaga

SEQ ID NO: 2017213 - RNA, 20 nt, Human
uguucuuucuggcuaugcau

SEQ ID NO: 2017214 - RNA, 22 nt, Human
uguucuuucuggcuaugcauuu

SEQ ID NO: 2017215 - RNA, 14 nt, Human
uguucuuucuggcu

SEQ ID NO: 2017216 - RNA, 17 nt, Human
uguucugcacacagcac

SEQ ID NO: 2017217 - RNA, 18 nt, Human
uguucugacccugcuuca

SEQ ID NO: 2017218 - RNA, 15 nt, Human
uguucugacccugcu

SEQ ID NO: 2017219 - RNA, 19 nt, Human
uguucucugcccuccaaga

SEQ ID NO: 2017220 - RNA, 19 nt, Human
uguugaagagguuuuaaag

SEQ ID NO: 2017221 - RNA, 14 nt, Human
uguugaacuguuag

SEQ ID NO: 2017222 - RNA, 15 nt, Human
uguugaacuguuaga

SEQ ID NO: 2017223 - RNA, 12 nt, Human
uguugaacaaaa

SEQ ID NO: 2017224 - RNA, 14 nt, Human
uguugaacaaaaua

SEQ ID NO: 2017225 - RNA, 15 nt, Human
uguugaacaaaauaa

SEQ ID NO: 2017226 - RNA, 18 nt, Human
uguugaacaaaauaaauu

SEQ ID NO: 2017227 - RNA, 19 nt, Human
uguugaacaaaauaaauug

SEQ ID NO: 2017228 - RNA, 18 nt, Human
uguugaagagcagcuccu

SEQ ID NO: 2017229 - RNA, 11 nt, Human
uguugaagagc

SEQ ID NO: 2017230 - RNA, 13 nt, Human
uguugaagagcag

SEQ ID NO: 2017231 - RNA, 22 nt, Human
uguugaggcuuauauuugugua

SEQ ID NO: 2017232 - RNA, 13 nt, Human
uguugcugccuca

SEQ ID NO: 2017233 - RNA, 14 nt, Human
uguugcugauuuua

SEQ ID NO: 2017234 - RNA, 16 nt, Human
uguugcugauuuuauu

SEQ ID NO: 2017235 - RNA, 11 nt, Human
uguuggccagg

SEQ ID NO: 2017236 - RNA, 14 nt, Human
uguugcugccucau

SEQ ID NO: 2017237 - RNA, 14 nt, Human
uguugcuuauguug

SEQ ID NO: 2017238 - RNA, 20 nt, Human
uguugcuuauguuguuuugu

SEQ ID NO: 2017239 - RNA, 14 nt, Human
uguuggccaggcug

SEQ ID NO: 2017240 - RNA, 13 nt, Human
uguuggccaggcu

SEQ ID NO: 2017241 - RNA, 18 nt, Human
uguuggccaggcugcucu

SEQ ID NO: 2017242 - RNA, 19 nt, Human
uguuguucuuggcaauaaa

SEQ ID NO: 2017243 - RNA, 23 nt, Human
uguuguucuuggcaauaaauuuu

SEQ ID NO: 2017244 - RNA, 13 nt, Human
uguuguuuaaugu

SEQ ID NO: 2017245 - RNA, 12 nt, Human
uguuguuuguau

SEQ ID NO: 2017246 - RNA, 12 nt, Human
uguuuaaaacac

SEQ ID NO: 2017247 - RNA, 20 nt, Human
uguuuaaaacaccuucuaua

SEQ ID NO: 2017248 - RNA, 14 nt, Human
uguuguuuuguaca

SEQ ID NO: 2017249 - RNA, 16 nt, Human
uguuguuuuguacaga

SEQ ID NO: 2017250 - RNA, 19 nt, Human
uguuguuuuguacagaugu

SEQ ID NO: 2017251 - RNA, 21 nt, Human
uguuuacagaggacaguauuu

SEQ ID NO: 2017252 - RNA, 17 nt, Human
uguuuacagauccccaa

SEQ ID NO: 2017253 - RNA, 14 nt, Human
uguuuacagaggac

SEQ ID NO: 2017254 - RNA, 15 nt, Human
uguuuaaugguaguu

SEQ ID NO: 2017255 - RNA, 14 nt, Human
uuaccagcagagca

SEQ ID NO: 2017256 - RNA, 19 nt, Human
uuacauuuguaauuuaagg

SEQ ID NO: 2017257 - RNA, 20 nt, Human
uuacauuuuuaagugcugca

SEQ ID NO: 2017258 - RNA, 21 nt, Human
uuacauuuuuaagugcugcau

SEQ ID NO: 2017259 - RNA, 22 nt, Human
uuacauuuuuaagugcugcauu

SEQ ID NO: 2017260 - RNA, 23 nt, Human
uuacauuuuuaagugcugcauuu

SEQ ID NO: 2017261 - RNA, 14 nt, Human
uuacauuuguaauu

SEQ ID NO: 2017262 - RNA, 18 nt, Human
uuacauuuguaauuuaag

SEQ ID NO: 2017263 - RNA, 19 nt, Human
uuaccuuuuuuauacauaa

SEQ ID NO: 2017264 - RNA, 20 nt, Human
uuaccuuuuuuauacauaaa

SEQ ID NO: 2017265 - RNA, 22 nt, Human
uuaccuuuuuuauacauaaaca

SEQ ID NO: 2017266 - RNA, 19 nt, Human
uuacgaaguucaagaucaa

SEQ ID NO: 2017267 - RNA, 20 nt, Human
uuacgaaguucaagaucaaa

SEQ ID NO: 2017268 - RNA, 16 nt, Human
uuacggaacucaaaua

SEQ ID NO: 2017269 - RNA, 20 nt, Human
uuacgguuuuccagguuuaa

SEQ ID NO: 2017270 - RNA, 15 nt, Human
uuacagaggacagua

SEQ ID NO: 2017271 - RNA, 16 nt, Human
uuacagagaugucucu

SEQ ID NO: 2017272 - RNA, 20 nt, Human
uuacagagacagaaagcaga

SEQ ID NO: 2017273 - RNA, 15 nt, Human
uuacaauguaacuuu

SEQ ID NO: 2017274 - RNA, 23 nt, Human
uuacaauaaaaucuugaaaaugc

SEQ ID NO: 2017275 - RNA, 13 nt, Human
uuacaauauuugu

SEQ ID NO: 2017276 - RNA, 15 nt, Human
uuacaauauuugugu

SEQ ID NO: 2017277 - RNA, 16 nt, Human
uuacaauauuugugug

SEQ ID NO: 2017278 - RNA, 18 nt, Human
uuacaauauuugugugcu

SEQ ID NO: 2017279 - RNA, 22 nt, Human
uuacaauauuugugugcuaaac

SEQ ID NO: 2017280 - RNA, 14 nt, Human
uuacauuuccuaaa

SEQ ID NO: 2017281 - RNA, 15 nt, Human
uuacauuucgauguu

SEQ ID NO: 2017282 - RNA, 13 nt, Human
uuacauuuguaau

SEQ ID NO: 2017283 - RNA, 23 nt, Human
uuacauggcuggagcuagaauuu

SEQ ID NO: 2017284 - RNA, 22 nt, Human
uuacauggcuggagcuagaauu

SEQ ID NO: 2017285 - RNA, 17 nt, Human
uuaaggaugcuuguaca

SEQ ID NO: 2017286 - RNA, 18 nt, Human
uuaaggaugcuuguacau

SEQ ID NO: 2017287 - RNA, 19 nt, Human
uuaaggaugcuuguacaua

SEQ ID NO: 2017288 - RNA, 20 nt, Human
uuaaggaugcuuguacauaa

SEQ ID NO: 2017289 - RNA, 21 nt, Human
uuaaggaagacaaugugaaaa

SEQ ID NO: 2017290 - RNA, 23 nt, Human
uuaaggaaauuuguaccauuuca

SEQ ID NO: 2017291 - RNA, 15 nt, Human
uuaaggacugacuga

SEQ ID NO: 2017292 - RNA, 16 nt, Human
uuaaggacugacugag

SEQ ID NO: 2017293 - RNA, 18 nt, Human
uuaaggacugacugaggc

SEQ ID NO: 2017294 - RNA, 17 nt, Human
uuaaggagaaucauguu

SEQ ID NO: 2017295 - RNA, 18 nt, Human
uuaaggagaaucauguuu

SEQ ID NO: 2017296 - RNA, 20 nt, Human
uuaaggagaaucauguuucu

SEQ ID NO: 2017297 - RNA, 21 nt, Human
uuaaggagaaucauguuucuu

SEQ ID NO: 2017298 - RNA, 22 nt, Human
uuaaggagaaucauguuucuuu

SEQ ID NO: 2017299 - RNA, 16 nt, Human
uuaauagguuuggaca

SEQ ID NO: 2017300 - RNA, 21 nt, Human
uuaauaauuagaaacaccaaa

SEQ ID NO: 2017301 - RNA, 22 nt, Human
uuaaggaugcuuguacauaaug

SEQ ID NO: 2017302 - RNA, 15 nt, Human
uuaaggccacaucca

SEQ ID NO: 2017303 - RNA, 14 nt, Human
uuaauggaaauguu

SEQ ID NO: 2017304 - RNA, 12 nt, Human
uuaauggaugaa

SEQ ID NO: 2017305 - RNA, 18 nt, Human
uuaauggaugaaaucaua

SEQ ID NO: 2017306 - RNA, 17 nt, Human
uuaaugucacaggcagg

SEQ ID NO: 2017307 - RNA, 22 nt, Human
uuaaugucaauucuugccaaau

SEQ ID NO: 2017308 - RNA, 18 nt, Human
uuaaugucacaggcaggu

SEQ ID NO: 2017309 - RNA, 22 nt, Human
uuaauguccucucaaaguaaaa

SEQ ID NO: 2017310 - RNA, 21 nt, Human
uuaauagguuuggacaaaaug

SEQ ID NO: 2017311 - RNA, 13 nt, Human
uuaauaugaaauu

SEQ ID NO: 2017312 - RNA, 14 nt, Human
uuaauaugaaauuu

SEQ ID NO: 2017313 - RNA, 23 nt, Human
uuaauaugaaauuuuuuuucaug

SEQ ID NO: 2017314 - RNA, 17 nt, Human
uuaaugcuaaucuugug

SEQ ID NO: 2017315 - RNA, 18 nt, Human
uuaaugcuaaucuuguga

SEQ ID NO: 2017316 - RNA, 22 nt, Human
uuaaugcuaaucuugugaaaau

SEQ ID NO: 2017317 - RNA, 23 nt, Human
uuaaugcuaaucuugugaaaaua

SEQ ID NO: 2017318 - RNA, 18 nt, Human
uuaaaagauaaauauuau

SEQ ID NO: 2017319 - RNA, 16 nt, Human
uuaaacuuaaucuaaa

SEQ ID NO: 2017320 - RNA, 18 nt, Human
uuaaacuuaaucuaaaug

SEQ ID NO: 2017321 - RNA, 15 nt, Human
uuaaaacauuaaaau

SEQ ID NO: 2017322 - RNA, 23 nt, Human
uuaaaacaucauuccuuuuuauu

SEQ ID NO: 2017323 - RNA, 16 nt, Human
uuaaaacaucauuccu

SEQ ID NO: 2017324 - RNA, 18 nt, Human
uuaaaacaucauuccuuu

SEQ ID NO: 2017325 - RNA, 11 nt, Human
uuaaagaugua

SEQ ID NO: 2017326 - RNA, 15 nt, Human
uuaaagauguagcaa

SEQ ID NO: 2017327 - RNA, 16 nt, Human
uuaaagauguagcaaa

SEQ ID NO: 2017328 - RNA, 21 nt, Human
uuaaagauguagcaaacccug

SEQ ID NO: 2017329 - RNA, 20 nt, Human
uuaaacuuaaucuaaaugga

SEQ ID NO: 2017330 - RNA, 14 nt, Human
uuaaagacuuuuau

SEQ ID NO: 2017331 - RNA, 16 nt, Human
uuaaaugcaccuggaa

SEQ ID NO: 2017332 - RNA, 17 nt, Human
uuaaaugcaccuggaau

SEQ ID NO: 2017333 - RNA, 18 nt, Human
uuaaaugcaccuggaaua

SEQ ID NO: 2017334 - RNA, 15 nt, Human
uuaaagcuuccauug

SEQ ID NO: 2017335 - RNA, 20 nt, Human
uuaaagcuuccauuguuguc

SEQ ID NO: 2017336 - RNA, 19 nt, Human
uuaaauagcuuuuuucucu

SEQ ID NO: 2017337 - RNA, 18 nt, Human
uuaaauaguaaaaauaaa

SEQ ID NO: 2017338 - RNA, 18 nt, Human
uuaaaugcccagccccuu

SEQ ID NO: 2017339 - RNA, 17 nt, Human
uuaaaugcccagccccu

SEQ ID NO: 2017340 - RNA, 20 nt, Human
uuaaaugcaguuacaaauua

SEQ ID NO: 2017341 - RNA, 18 nt, Human
uguuuuaaaaugagaaau

SEQ ID NO: 2017342 - RNA, 16 nt, Human
uguuuguugucagcug

SEQ ID NO: 2017343 - RNA, 17 nt, Human
uguuuguugucagcuga

SEQ ID NO: 2017344 - RNA, 22 nt, Human
uguuuccuggcacugcuuccag

SEQ ID NO: 2017345 - RNA, 21 nt, Human
uguuuccuggcacugcuucca

SEQ ID NO: 2017346 - RNA, 20 nt, Human
uguuuccuggcacugcuucc

SEQ ID NO: 2017347 - RNA, 15 nt, Human
uguuucucccgugcu

SEQ ID NO: 2017348 - RNA, 16 nt, Human
uguuucucccgugcuu

SEQ ID NO: 2017349 - RNA, 20 nt, Human
uguuuuguaaacuuugaaau

SEQ ID NO: 2017350 - RNA, 21 nt, Human
uguuuuguaaacuuugaaaua

SEQ ID NO: 2017351 - RNA, 16 nt, Human
uguuuuguaaacuuug

SEQ ID NO: 2017352 - RNA, 17 nt, Human
uguuuuguaaacuuuga

SEQ ID NO: 2017353 - RNA, 18 nt, Human
uguuuuguaaacuuugaa

SEQ ID NO: 2017354 - RNA, 19 nt, Human
uguuuuguaaacuuugaaa

SEQ ID NO: 2017355 - RNA, 13 nt, Human
uguuuuguaaacu

SEQ ID NO: 2017356 - RNA, 15 nt, Human
uguuuuguaaacuuu

SEQ ID NO: 2017357 - RNA, 22 nt, Human
uguuuuguaaacuuugaaauau

SEQ ID NO: 2017358 - RNA, 12 nt, Human
uguuuuucaguu

SEQ ID NO: 2017359 - RNA, 13 nt, Human
uguuuuucaguuc

SEQ ID NO: 2017360 - RNA, 14 nt, Human
uguuuuucaguuca

SEQ ID NO: 2017361 - RNA, 15 nt, Human
uguuuuucaguucaa

SEQ ID NO: 2017362 - RNA, 17 nt, Human
uguuuuucaguucaaag

SEQ ID NO: 2017363 - RNA, 19 nt, Human
uguuuuucaguucaaaguc

SEQ ID NO: 2017364 - RNA, 23 nt, Human
uguuuuaaaaugagaaaucuaaa

SEQ ID NO: 2017365 - RNA, 16 nt, Human
uguuuugccagcccau

SEQ ID NO: 2017366 - RNA, 17 nt, Human
uguuuugccagcccauu

SEQ ID NO: 2017367 - RNA, 17 nt, Human
uguuuugcuuccccucc

SEQ ID NO: 2017368 - RNA, 19 nt, Human
uguuuugcuuuugcucgau

SEQ ID NO: 2017369 - RNA, 21 nt, Human
uguuuuggauuuggagagaaa

SEQ ID NO: 2017370 - RNA, 22 nt, Human
uguuuuggauuuggagagaaau

SEQ ID NO: 2017371 - RNA, 13 nt, Human
uguuuuugucuua

SEQ ID NO: 2017372 - RNA, 14 nt, Human
uguuuuuguuuugu

SEQ ID NO: 2017373 - RNA, 17 nt, Human
uguuuuucgucauucca

SEQ ID NO: 2017374 - RNA, 13 nt, Human
uguuuuuugaagu

SEQ ID NO: 2017375 - RNA, 15 nt, Human
uguuuuuugaagugu

SEQ ID NO: 2017376 - RNA, 16 nt, Human
uguuuuuugaaguguu

SEQ ID NO: 2017377 - RNA, 17 nt, Human
uguuuuuugagucuuuu

SEQ ID NO: 2017378 - RNA, 13 nt, Human
uuaaaacacguuu

SEQ ID NO: 2017379 - RNA, 19 nt, Human
uuaaaacacguuuuaagga

SEQ ID NO: 2017380 - RNA, 21 nt, Human
uuaaaacacguuuuaaggacu

SEQ ID NO: 2017381 - RNA, 22 nt, Human
uuaaaacacguuuuaaggacug

SEQ ID NO: 2017382 - RNA, 23 nt, Human
uuaaaacacguuuuaaggacuga

SEQ ID NO: 2017383 - RNA, 9 nt, Human
uguuuuuug

SEQ ID NO: 2017384 - RNA, 18 nt, Human
uguuuuuguuuuguugca

SEQ ID NO: 2017385 - RNA, 14 nt, Human
ugggccuccugugu

SEQ ID NO: 2017386 - RNA, 23 nt, Human
ugggcauuacuguuuaagacacu

SEQ ID NO: 2017387 - RNA, 16 nt, Human
ugggccuccugugugu

SEQ ID NO: 2017388 - RNA, 22 nt, Human
ugggccuccugugugugcgccu

SEQ ID NO: 2017389 - RNA, 18 nt, Human
ugggccuucagggaguga

SEQ ID NO: 2017390 - RNA, 15 nt, Human
ugggccuucagggag

SEQ ID NO: 2017391 - RNA, 16 nt, Human
ugggagcuuuuguaga

SEQ ID NO: 2017392 - RNA, 24 nt, Human
ugggagcugccuguucagcuccag

SEQ ID NO: 2017393 - RNA, 18 nt, Human
ugggagcuggaguccacu

SEQ ID NO: 2017394 - RNA, 14 nt, Human
ugggcagucauuuu

SEQ ID NO: 2017395 - RNA, 17 nt, Human
ugggcgugagaccugcc

SEQ ID NO: 2017396 - RNA, 18 nt, Human
ugggcgugagaccugccc

SEQ ID NO: 2017397 - RNA, 19 nt, Human
ugggcgugagaccugcccc

SEQ ID NO: 2017398 - RNA, 18 nt, Human
ugggcuucaguggcagcu

SEQ ID NO: 2017399 - RNA, 19 nt, Human
ugggcuucaguggcagcug

SEQ ID NO: 2017400 - RNA, 19 nt, Human
ugggcuuggggaccagagc

SEQ ID NO: 2017401 - RNA, 20 nt, Human
ugggcuucaguggcagcugc

SEQ ID NO: 2017402 - RNA, 21 nt, Human
ugggcuuggggaccagagcug

SEQ ID NO: 2017403 - RNA, 16 nt, Human
uggggcagcuugaggg

SEQ ID NO: 2017404 - RNA, 21 nt, Human
ugggugucaagagggucugag

SEQ ID NO: 2017405 - RNA, 23 nt, Human
ugggugucaagagggucugagga

SEQ ID NO: 2017406 - RNA, 17 nt, Human
uggguccaggccuacuc

SEQ ID NO: 2017407 - RNA, 18 nt, Human
uggguccaggccuacucc

SEQ ID NO: 2017408 - RNA, 21 nt, Human
uggguccaggccuacuccugu

SEQ ID NO: 2017409 - RNA, 23 nt, Human
uggguccaggccuacuccugucu

SEQ ID NO: 2017410 - RNA, 14 nt, Human
uggguguggcgcag

SEQ ID NO: 2017411 - RNA, 23 nt, Human
uggguucaagcgauucuucugcu

SEQ ID NO: 2017412 - RNA, 16 nt, Human
uggguucacugcaacc

SEQ ID NO: 2017413 - RNA, 17 nt, Human
uggguuggaaaacagua

SEQ ID NO: 2017414 - RNA, 21 nt, Human
uggguuccuuccucugagccu

SEQ ID NO: 2017415 - RNA, 22 nt, Human
uggguuccuuccucugagccuu

SEQ ID NO: 2017416 - RNA, 21 nt, Human
uggguuccagcaauucuccug

SEQ ID NO: 2017417 - RNA, 17 nt, Human
ugggguggggaccucag

SEQ ID NO: 2017418 - RNA, 19 nt, Human
ugggguggggggggugcug

SEQ ID NO: 2017419 - RNA, 16 nt, Human
uggggcauccaugggg

SEQ ID NO: 2017420 - RNA, 22 nt, Human
ugggucaugaugcucuuuccca

SEQ ID NO: 2017421 - RNA, 17 nt, Human
uggguagggcucugaca

SEQ ID NO: 2017422 - RNA, 22 nt, Human
uggguagcuguaaggcaugaag

SEQ ID NO: 2017423 - RNA, 13 nt, Human
uggguagcuguaa

SEQ ID NO: 2017424 - RNA, 22 nt, Human
ugggguggggggggugcugggc

SEQ ID NO: 2017425 - RNA, 21 nt, Human
ugggguggggggggugcuggg

SEQ ID NO: 2017426 - RNA, 23 nt, Human
ugggagcugccuguucagcucca

SEQ ID NO: 2017427 - RNA, 13 nt, Human
ugggagccgggca

SEQ ID NO: 2017428 - RNA, 23 nt, Human
ugggagccgggcaaacuggccgc

SEQ ID NO: 2017429 - RNA, 16 nt, Human
ugggacaugggaaagg

SEQ ID NO: 2017430 - RNA, 16 nt, Human
ugggacagggcauggc

SEQ ID NO: 2017431 - RNA, 19 nt, Human
ugggacauccugucaucug

SEQ ID NO: 2017432 - RNA, 14 nt, Human
ugggacccaguggc

SEQ ID NO: 2017433 - RNA, 17 nt, Human
ugggacccaguggcagg

SEQ ID NO: 2017434 - RNA, 18 nt, Human
ugggacccaguggcaggg

SEQ ID NO: 2017435 - RNA, 19 nt, Human
ugggacccaguggcagggc

SEQ ID NO: 2017436 - RNA, 20 nt, Human
ugggacccaguggcagggca

SEQ ID NO: 2017437 - RNA, 21 nt, Human
ugggacccaguggcagggcac

SEQ ID NO: 2017438 - RNA, 22 nt, Human
ugggacccaguggcagggcaca

SEQ ID NO: 2017439 - RNA, 20 nt, Human
ugggaccacaggugcccgcc

SEQ ID NO: 2017440 - RNA, 22 nt, Human
ugggaaugaaugucagugugac

SEQ ID NO: 2017441 - RNA, 15 nt, Human
uggcuuuucacugcu

SEQ ID NO: 2017442 - RNA, 14 nt, Human
uggcuuuucacugc

SEQ ID NO: 2017443 - RNA, 14 nt, Human
ugggaauguauagu

SEQ ID NO: 2017444 - RNA, 20 nt, Human
ugggaauguauaguauuuga

SEQ ID NO: 2017445 - RNA, 21 nt, Human
ugggaauguauaguauuugaa

SEQ ID NO: 2017446 - RNA, 22 nt, Human
ugggaauguauaguauuugaaa

SEQ ID NO: 2017447 - RNA, 23 nt, Human
ugggaauguauaguauuugaaaa

SEQ ID NO: 2017448 - RNA, 22 nt, Human
uggcugguuagagguucccuuu

SEQ ID NO: 2017449 - RNA, 14 nt, Human
uggcugggggccuc

SEQ ID NO: 2017450 - RNA, 15 nt, Human
uggcugggggccuca

SEQ ID NO: 2017451 - RNA, 17 nt, Human
uggcuuuuacccuuuuu

SEQ ID NO: 2017452 - RNA, 20 nt, Human
uggcucagguggggucacuc

SEQ ID NO: 2017453 - RNA, 22 nt, Human
uggcucagguggggucacucug

SEQ ID NO: 2017454 - RNA, 13 nt, Human
uggcuccugccca

SEQ ID NO: 2017455 - RNA, 15 nt, Human
uggcuccugcccacu

SEQ ID NO: 2017456 - RNA, 15 nt, Human
uggcucuuccaggcu

SEQ ID NO: 2017457 - RNA, 13 nt, Human
uggcucuuccagg

SEQ ID NO: 2017458 - RNA, 12 nt, Human
uggcucuacaca

SEQ ID NO: 2017459 - RNA, 14 nt, Human
uggcucuacacaua

SEQ ID NO: 2017460 - RNA, 15 nt, Human
uggcucuacacauau

SEQ ID NO: 2017461 - RNA, 16 nt, Human
uggcucuuccaggcug

SEQ ID NO: 2017462 - RNA, 12 nt, Human
uggcugggggcc

SEQ ID NO: 2017463 - RNA, 21 nt, Human
uggccuugggauccaggcccc

SEQ ID NO: 2017464 - RNA, 18 nt, Human
uggccuugggauccaggc

SEQ ID NO: 2017465 - RNA, 17 nt, Human
uggccuucggccuccau

SEQ ID NO: 2017466 - RNA, 18 nt, Human
uggccuucggccuccauc

SEQ ID NO: 2017467 - RNA, 15 nt, Human
uggccagaugcacca

SEQ ID NO: 2017468 - RNA, 22 nt, Human
uggcgugcaguggugcgaucug

SEQ ID NO: 2017469 - RNA, 14 nt, Human
uggcgcugccccug

SEQ ID NO: 2017470 - RNA, 15 nt, Human
uggcgcugccccugg

SEQ ID NO: 2017471 - RNA, 18 nt, Human
uggcgcuagaggccaugg

SEQ ID NO: 2017472 - RNA, 13 nt, Human
uggagauguuuag

SEQ ID NO: 2017473 - RNA, 20 nt, Human
uggagaggcccggccucuca

SEQ ID NO: 2017474 - RNA, 14 nt, Human
uggagagauaggaa

SEQ ID NO: 2017475 - RNA, 16 nt, Human
uggagagcccagaguc

SEQ ID NO: 2017476 - RNA, 17 nt, Human
uggaauuauuuuaaaag

SEQ ID NO: 2017477 - RNA, 19 nt, Human
uggaauuauuuuaaaagau

SEQ ID NO: 2017478 - RNA, 12 nt, Human
uggacaggcaug

SEQ ID NO: 2017479 - RNA, 16 nt, Human
uggacaggcauguucu

SEQ ID NO: 2017480 - RNA, 13 nt, Human
uggagagaaauau

SEQ ID NO: 2017481 - RNA, 17 nt, Human
uggagacugucucaaga

SEQ ID NO: 2017482 - RNA, 13 nt, Human
uggauaccauuau

SEQ ID NO: 2017483 - RNA, 15 nt, Human
uggauaccauuauau

SEQ ID NO: 2017484 - RNA, 14 nt, Human
uggaggcucaaauu

SEQ ID NO: 2017485 - RNA, 22 nt, Human
uggaggcaugugaugagaggaa

SEQ ID NO: 2017486 - RNA, 23 nt, Human
uggcagcugcgguccacccagga

SEQ ID NO: 2017487 - RNA, 21 nt, Human
uggcagcugcgguccacccag

SEQ ID NO: 2017488 - RNA, 22 nt, Human
uggcagcugcgguccacccagg

SEQ ID NO: 2017489 - RNA, 18 nt, Human
uggcacugcuuccaguga

SEQ ID NO: 2017490 - RNA, 16 nt, Human
uggcacugcuuccagu

SEQ ID NO: 2017491 - RNA, 14 nt, Human
uggcacugcuucca

SEQ ID NO: 2017492 - RNA, 20 nt, Human
uggaugccacagcccagcuu

SEQ ID NO: 2017493 - RNA, 14 nt, Human
uggaugccuggugg

SEQ ID NO: 2017494 - RNA, 14 nt, Human
uggcagugggagcu

SEQ ID NO: 2017495 - RNA, 15 nt, Human
uggcagugggagcug

SEQ ID NO: 2017496 - RNA, 16 nt, Human
uggcagugggagcugc

SEQ ID NO: 2017497 - RNA, 19 nt, Human
uggcagugggagcugccug

SEQ ID NO: 2017498 - RNA, 12 nt, Human
uggcaggcaggg

SEQ ID NO: 2017499 - RNA, 11 nt, Human
uggcaggcagg

SEQ ID NO: 2017500 - RNA, 21 nt, Human
uggcaggcaggggcccugcag

SEQ ID NO: 2017501 - RNA, 13 nt, Human
uggcagggcacag

SEQ ID NO: 2017502 - RNA, 14 nt, Human
uggcagggcacagg

SEQ ID NO: 2017503 - RNA, 15 nt, Human
uggcagggcacaggg

SEQ ID NO: 2017504 - RNA, 16 nt, Human
uggcagggcacagggc

SEQ ID NO: 2017505 - RNA, 17 nt, Human
uggcagggcacagggcc

SEQ ID NO: 2017506 - RNA, 18 nt, Human
uggcagggcacagggccu

SEQ ID NO: 2017507 - RNA, 20 nt, Human
uggcagugggagcugccugu

SEQ ID NO: 2017508 - RNA, 21 nt, Human
uggcagggcacagggccuggc

SEQ ID NO: 2017509 - RNA, 19 nt, Human
uggcagggcacagggccug

SEQ ID NO: 2017510 - RNA, 20 nt, Human
uggcagggcacagggccugg

SEQ ID NO: 2017511 - RNA, 22 nt, Human
uggccacuccagaccccuggcu

SEQ ID NO: 2017512 - RNA, 18 nt, Human
ugcuuccagugaggcucu

SEQ ID NO: 2017513 - RNA, 13 nt, Human
ugcugccucaugc

SEQ ID NO: 2017514 - RNA, 14 nt, Human
ugcugccuccagaa

SEQ ID NO: 2017515 - RNA, 13 nt, Human
ugcugccucagga

SEQ ID NO: 2017516 - RNA, 15 nt, Human
ugcugccucaggaau

SEQ ID NO: 2017517 - RNA, 20 nt, Human
ugcuuccagugaggcucugc

SEQ ID NO: 2017518 - RNA, 19 nt, Human
ugcuuccagugaggcucug

SEQ ID NO: 2017519 - RNA, 21 nt, Human
ugcuuccagugaggcucugcc

SEQ ID NO: 2017520 - RNA, 12 nt, Human
ugcuucucacug

SEQ ID NO: 2017521 - RNA, 16 nt, Human
ugcuucuucagagacu

SEQ ID NO: 2017522 - RNA, 12 nt, Human
ugcuucugccac

SEQ ID NO: 2017523 - RNA, 13 nt, Human
ugcuucugccacc

SEQ ID NO: 2017524 - RNA, 18 nt, Human
ugcuucucugcccagcuu

SEQ ID NO: 2017525 - RNA, 14 nt, Human
ugcuuuccaaagcc

SEQ ID NO: 2017526 - RNA, 14 nt, Human
ugcuuuccauauuu

SEQ ID NO: 2017527 - RNA, 15 nt, Human
ugcuuuccauauuuu

SEQ ID NO: 2017528 - RNA, 21 nt, Human
ugcuuuccauauuuuuuuccu

SEQ ID NO: 2017529 - RNA, 22 nt, Human
ugcuuuccauauuuuuuuccuu

SEQ ID NO: 2017530 - RNA, 13 nt, Human
ugcuuuuuuugaa

SEQ ID NO: 2017531 - RNA, 15 nt, Human
ugcuuuuuuugaaac

SEQ ID NO: 2017532 - RNA, 20 nt, Human
ugcuuuuuuugaaacuuuga

SEQ ID NO: 2017533 - RNA, 21 nt, Human
ugcuuuagacuugaaaagaga

SEQ ID NO: 2017534 - RNA, 19 nt, Human
ugcuuuagacuugaaaaga

SEQ ID NO: 2017535 - RNA, 14 nt, Human
ugcuuguugacaga

SEQ ID NO: 2017536 - RNA, 14 nt, Human
ugcuugaacuuaca

SEQ ID NO: 2017537 - RNA, 18 nt, Human
ugcuuguuaacugagugc

SEQ ID NO: 2017538 - RNA, 12 nt, Human
uggaagacagcu

SEQ ID NO: 2017539 - RNA, 11 nt, Human
uggaagacagc

SEQ ID NO: 2017540 - RNA, 23 nt, Human
uggaacucuugacagcuauaauu

SEQ ID NO: 2017541 - RNA, 14 nt, Human
uggaacucucgagc

SEQ ID NO: 2017542 - RNA, 14 nt, Human
uggaaaaaaacauc

SEQ ID NO: 2017543 - RNA, 11 nt, Human
uggaaaauaaa

SEQ ID NO: 2017544 - RNA, 15 nt, Human
uggaaaauaaaucaa

SEQ ID NO: 2017545 - RNA, 16 nt, Human
uggaaaauaaauuauu

SEQ ID NO: 2017546 - RNA, 15 nt, Human
uggaaaauaaauuau

SEQ ID NO: 2017547 - RNA, 16 nt, Human
uggaauacucuuauau

SEQ ID NO: 2017548 - RNA, 21 nt, Human
uggaagugugggucugugugu

SEQ ID NO: 2017549 - RNA, 15 nt, Human
uggaagacagcucuu

SEQ ID NO: 2017550 - RNA, 14 nt, Human
uggaagacagcucu

SEQ ID NO: 2017551 - RNA, 23 nt, Human
uggaagugugggucugugugugu

SEQ ID NO: 2017552 - RNA, 21 nt, Human
uggaagugugugaucuguggg

SEQ ID NO: 2017553 - RNA, 16 nt, Human
uggaauaucuccguca

SEQ ID NO: 2017554 - RNA, 18 nt, Human
uggaaucauuguccagag

SEQ ID NO: 2017555 - RNA, 20 nt, Human
uggaaucauuguccagagcu

SEQ ID NO: 2017556 - RNA, 15 nt, Human
uggaauuauuuuaaa

SEQ ID NO: 2017557 - RNA, 22 nt, Human
uggaauuagaacccuugcacag

SEQ ID NO: 2017558 - RNA, 23 nt, Human
uggaauuagaacccuugcacagc

SEQ ID NO: 2017559 - RNA, 23 nt, Human
ugcacagcuaacauggaaguacu

SEQ ID NO: 2017560 - RNA, 20 nt, Human
ugcacagcuaacauggaagu

SEQ ID NO: 2017561 - RNA, 18 nt, Human
ugcacagcuaacauggaa

SEQ ID NO: 2017562 - RNA, 18 nt, Human
ugcacagugcaucucagc

SEQ ID NO: 2017563 - RNA, 12 nt, Human
ugcacaggcaga

SEQ ID NO: 2017564 - RNA, 23 nt, Human
ugcacaggcagagcccagacccu

SEQ ID NO: 2017565 - RNA, 19 nt, Human
ugcacagugcaucucagcc

SEQ ID NO: 2017566 - RNA, 20 nt, Human
ugcacagugcaucucagccc

SEQ ID NO: 2017567 - RNA, 18 nt, Human
ugcacauaaacucuuuua

SEQ ID NO: 2017568 - RNA, 13 nt, Human
ugcacaucuguuu

SEQ ID NO: 2017569 - RNA, 17 nt, Human
ugcacagcuaacaugga

SEQ ID NO: 2017570 - RNA, 23 nt, Human
ugcacagaguuguuacauuuuua

SEQ ID NO: 2017571 - RNA, 21 nt, Human
ugcacagaguuguuacauuuu

SEQ ID NO: 2017572 - RNA, 22 nt, Human
ugcacagaguuguuacauuuuu

SEQ ID NO: 2017573 - RNA, 22 nt, Human
ugaagucuuuguacagacaaca

SEQ ID NO: 2017574 - RNA, 17 nt, Human
ugaagucuguauuguaa

SEQ ID NO: 2017575 - RNA, 20 nt, Human
ugaagucuuuguacagacaa

SEQ ID NO: 2017576 - RNA, 17 nt, Human
ugaagucuuuguacaga

SEQ ID NO: 2017577 - RNA, 16 nt, Human
ugaaggcuggguucug

SEQ ID NO: 2017578 - RNA, 13 nt, Human
ugaaguccggaac

SEQ ID NO: 2017579 - RNA, 16 nt, Human
ugcagauaaacaguag

SEQ ID NO: 2017580 - RNA, 20 nt, Human
ugcagaguauuuuuguauuc

SEQ ID NO: 2017581 - RNA, 17 nt, Human
ugcagauaaacaguagu

SEQ ID NO: 2017582 - RNA, 19 nt, Human
ugcagaguucagggaagau

SEQ ID NO: 2017583 - RNA, 24 nt, Human
ugcagaguucagggaagauaaguu

SEQ ID NO: 2017584 - RNA, 20 nt, Human
ugcacuuuguucuggcucuu

SEQ ID NO: 2017585 - RNA, 19 nt, Human
ugcacuuuguucuggcucu

SEQ ID NO: 2017586 - RNA, 18 nt, Human
ugcacuuuguucuggcuc

SEQ ID NO: 2017587 - RNA, 15 nt, Human
ugcacuuuguucugg

SEQ ID NO: 2017588 - RNA, 22 nt, Human
ugcacuugggggcucagcaagg

SEQ ID NO: 2017589 - RNA, 19 nt, Human
ugcacuugggggcucagca

SEQ ID NO: 2017590 - RNA, 21 nt, Human
ugcacuugggggcucagcaag

SEQ ID NO: 2017591 - RNA, 17 nt, Human
ugcacuuggggcacagg

SEQ ID NO: 2017592 - RNA, 21 nt, Human
ugcacuuggggcacagggaga

SEQ ID NO: 2017593 - RNA, 21 nt, Human
ugcacuugcagacucuacaga

SEQ ID NO: 2017594 - RNA, 16 nt, Human
ugcacuugcagacucu

SEQ ID NO: 2017595 - RNA, 19 nt, Human
ugcacguacacacacauac

SEQ ID NO: 2017596 - RNA, 16 nt, Human
ugcacguacacacaca

SEQ ID NO: 2017597 - RNA, 14 nt, Human
ugcaggaccucagg

SEQ ID NO: 2017598 - RNA, 17 nt, Human
ugcaggaaauggcugug

SEQ ID NO: 2017599 - RNA, 22 nt, Human
ugcagcuuuaaaaaauuaaucu

SEQ ID NO: 2017600 - RNA, 17 nt, Human
ugcacaucuguuuugua

SEQ ID NO: 2017601 - RNA, 16 nt, Human
ugcaggaccucaggug

SEQ ID NO: 2017602 - RNA, 15 nt, Human
ugcaggaccucaggu

SEQ ID NO: 2017603 - RNA, 18 nt, Human
ugcaggaccucaggugag

SEQ ID NO: 2017604 - RNA, 14 nt, Human
ugcagcaauaaagc

SEQ ID NO: 2017605 - RNA, 15 nt, Human
ugcagcaauaaagca

SEQ ID NO: 2017606 - RNA, 16 nt, Human
ugcagcaauaaagcag

SEQ ID NO: 2017607 - RNA, 16 nt, Human
ugcagccacuuaggac

SEQ ID NO: 2017608 - RNA, 17 nt, Human
ugcagccacuuaggaca

SEQ ID NO: 2017609 - RNA, 13 nt, Human
ugcagcuuuaaaa

SEQ ID NO: 2017610 - RNA, 10 nt, Human
ugcccagccc

SEQ ID NO: 2017611 - RNA, 18 nt, Human
ugcccaccuggccucugc

SEQ ID NO: 2017612 - RNA, 17 nt, Human
ugcccaccuggccucug

SEQ ID NO: 2017613 - RNA, 15 nt, Human
ugcccaccuggccuc

SEQ ID NO: 2017614 - RNA, 16 nt, Human
ugccaucucugcucca

SEQ ID NO: 2017615 - RNA, 13 nt, Human
ugccaucucugcu

SEQ ID NO: 2017616 - RNA, 15 nt, Human
ugccaucucugcucc

SEQ ID NO: 2017617 - RNA, 19 nt, Human
ugccaagagcccgucugcu

SEQ ID NO: 2017618 - RNA, 23 nt, Human
ugccaagagcccgucugcuccug

SEQ ID NO: 2017619 - RNA, 22 nt, Human
ugccagggacagaggggguggc

SEQ ID NO: 2017620 - RNA, 11 nt, Human
ugccagggaca

SEQ ID NO: 2017621 - RNA, 14 nt, Human
ugccagucaccccg

SEQ ID NO: 2017622 - RNA, 22 nt, Human
ugccaguaccagccccacccug

SEQ ID NO: 2017623 - RNA, 23 nt, Human
ugccaguaccagccccacccugu

SEQ ID NO: 2017624 - RNA, 23 nt, Human
ugccaguaacacaggccacccug

SEQ ID NO: 2017625 - RNA, 24 nt, Human
ugccaguaacacaggccacccugu

SEQ ID NO: 2017626 - RNA, 24 nt, Human
ugccagguuuuuggucugacccac

SEQ ID NO: 2017627 - RNA, 15 nt, Human
ugcaucguuucaucu

SEQ ID NO: 2017628 - RNA, 17 nt, Human
ugcaucguuucaucuuc

SEQ ID NO: 2017629 - RNA, 16 nt, Human
ugcaugugucuuuaua

SEQ ID NO: 2017630 - RNA, 18 nt, Human
ugcauccuccgccucccg

SEQ ID NO: 2017631 - RNA, 21 nt, Human
ugcauccuccgccucccgggu

SEQ ID NO: 2017632 - RNA, 12 nt, Human
ugcaucaguucu

SEQ ID NO: 2017633 - RNA, 19 nt, Human
ugcaggcagccaggccaca

SEQ ID NO: 2017634 - RNA, 18 nt, Human
ugcaggcagccaggccac

SEQ ID NO: 2017635 - RNA, 17 nt, Human
ugcaggcagccaggcca

SEQ ID NO: 2017636 - RNA, 22 nt, Human
ugcaggagcaguaucaugaagc

SEQ ID NO: 2017637 - RNA, 16 nt, Human
ugcaggcagccaggcc

SEQ ID NO: 2017638 - RNA, 19 nt, Human
ugcauguuacauaagauaa

SEQ ID NO: 2017639 - RNA, 22 nt, Human
ugccaaaacccagcugcacccc

SEQ ID NO: 2017640 - RNA, 15 nt, Human
ugccaaccucgcucc

SEQ ID NO: 2017641 - RNA, 19 nt, Human
ugccaaccucgcuccaacu

SEQ ID NO: 2017642 - RNA, 21 nt, Human
ugccaaccucgcuccaacucc

SEQ ID NO: 2017643 - RNA, 18 nt, Human
ugccaacugaucuguuau

SEQ ID NO: 2017644 - RNA, 20 nt, Human
ugccaaaaaaagacagggcu

SEQ ID NO: 2017645 - RNA, 16 nt, Human
ugccaaaacccagcug

SEQ ID NO: 2017646 - RNA, 17 nt, Human
ugccaaaacccagcugc

SEQ ID NO: 2017647 - RNA, 18 nt, Human
ugccaaaacccagcugca

SEQ ID NO: 2017648 - RNA, 19 nt, Human
ugccaaaacccagcugcac

SEQ ID NO: 2017649 - RNA, 20 nt, Human
ugccaaaacccagcugcacc

SEQ ID NO: 2017650 - RNA, 21 nt, Human
ugccaaaacccagcugcaccc

SEQ ID NO: 2017651 - RNA, 22 nt, Human
ugccugaagucacacagugagu

SEQ ID NO: 2017652 - RNA, 18 nt, Human
ugccugaagucacacagu

SEQ ID NO: 2017653 - RNA, 17 nt, Human
ugccugaagucacacag

SEQ ID NO: 2017654 - RNA, 22 nt, Human
ugccuccuugauauuuguauuu

SEQ ID NO: 2017655 - RNA, 18 nt, Human
ugccuccuugauauuugu

SEQ ID NO: 2017656 - RNA, 14 nt, Human
ugccucugggacug

SEQ ID NO: 2017657 - RNA, 18 nt, Human
ugccuccuuugugaggaa

SEQ ID NO: 2017658 - RNA, 17 nt, Human
ugccuccuuugugagga

SEQ ID NO: 2017659 - RNA, 18 nt, Human
ugccuccccucuccuucc

SEQ ID NO: 2017660 - RNA, 16 nt, Human
ugccuccuuugugagg

SEQ ID NO: 2017661 - RNA, 11 nt, Human
ugcccagcccc

SEQ ID NO: 2017662 - RNA, 16 nt, Human
ugcccagaucagccag

SEQ ID NO: 2017663 - RNA, 17 nt, Human
ugcccagaucagccaga

SEQ ID NO: 2017664 - RNA, 20 nt, Human
ugcccagaucagccagaagc

SEQ ID NO: 2017665 - RNA, 23 nt, Human
ugcccaggcuggcgugcaguggu

SEQ ID NO: 2017666 - RNA, 22 nt, Human
ugcccagcccccuggucuuuga

SEQ ID NO: 2017667 - RNA, 19 nt, Human
ugccuaaggcugaacuugu

SEQ ID NO: 2017668 - RNA, 17 nt, Human
ugccuccccucuccuuc

SEQ ID NO: 2017669 - RNA, 20 nt, Human
ugccuaggauucacacccca

SEQ ID NO: 2017670 - RNA, 22 nt, Human
ugccuaggauucacaccccacc

SEQ ID NO: 2017671 - RNA, 23 nt, Human
ugccuaggauucacaccccaccu

SEQ ID NO: 2017672 - RNA, 13 nt, Human
ugcgcaggcuggc

SEQ ID NO: 2017673 - RNA, 16 nt, Human
ugcgcaggcuggcccu

SEQ ID NO: 2017674 - RNA, 17 nt, Human
ugcgcaggcuggcccug

SEQ ID NO: 2017675 - RNA, 19 nt, Human
ugcgcaggcuggcccugcc

SEQ ID NO: 2017676 - RNA, 23 nt, Human
ugcggugcuaucucccccagccc

SEQ ID NO: 2017677 - RNA, 13 nt, Human
ugcgccuacagga

SEQ ID NO: 2017678 - RNA, 13 nt, Human
ugccuucagcucu

SEQ ID NO: 2017679 - RNA, 17 nt, Human
ugccuucagcucuacag

SEQ ID NO: 2017680 - RNA, 18 nt, Human
ugccuucagcucuacagc

SEQ ID NO: 2017681 - RNA, 22 nt, Human
ugccuuauggaacacucugaga

SEQ ID NO: 2017682 - RNA, 21 nt, Human
ugccuuauggaacacucugag

SEQ ID NO: 2017683 - RNA, 20 nt, Human
ugccuuauggaacacucuga

SEQ ID NO: 2017684 - RNA, 18 nt, Human
ugccuuauggaacacucu

SEQ ID NO: 2017685 - RNA, 20 nt, Human
ugcucuuuggccugaugacc

SEQ ID NO: 2017686 - RNA, 23 nt, Human
ugcucuuuggccugaugaccaau

SEQ ID NO: 2017687 - RNA, 19 nt, Human
ugcuccuggcccacugcau

SEQ ID NO: 2017688 - RNA, 16 nt, Human
ugcuccuucccuugcu

SEQ ID NO: 2017689 - RNA, 23 nt, Human
ugcugaauacagaggcaacugca

SEQ ID NO: 2017690 - RNA, 18 nt, Human
ugcugaauacagaggcaa

SEQ ID NO: 2017691 - RNA, 22 nt, Human
ugcugaaaauugccuuucugug

SEQ ID NO: 2017692 - RNA, 22 nt, Human
ugcugaaugguuuucaaaauaa

SEQ ID NO: 2017693 - RNA, 18 nt, Human
ugcugaaugguuuucaaa

SEQ ID NO: 2017694 - RNA, 17 nt, Human
ugcugaaugguuuucaa

SEQ ID NO: 2017695 - RNA, 16 nt, Human
ugcugaaguccggaac

SEQ ID NO: 2017696 - RNA, 23 nt, Human
ugcugauggugcaaugaccuuuc

SEQ ID NO: 2017697 - RNA, 20 nt, Human
ugcugauggugcaaugaccu

SEQ ID NO: 2017698 - RNA, 13 nt, Human
ugcugcagauacu

SEQ ID NO: 2017699 - RNA, 16 nt, Human
ugcugcagggcuuuaa

SEQ ID NO: 2017700 - RNA, 21 nt, Human
ugcugcagggcuuuaaaauuc

SEQ ID NO: 2017701 - RNA, 16 nt, Human
ugcugcaguugccagu

SEQ ID NO: 2017702 - RNA, 15 nt, Human
ugcugcaguugccag

SEQ ID NO: 2017703 - RNA, 15 nt, Human
ugcugacagacacag

SEQ ID NO: 2017704 - RNA, 16 nt, Human
ugcugacagacacagg

SEQ ID NO: 2017705 - RNA, 19 nt, Human
ugcugacagacacaggccc

SEQ ID NO: 2017706 - RNA, 22 nt, Human
ugcugaugacccccccagcuuc

SEQ ID NO: 2017707 - RNA, 23 nt, Human
ugcugaugacccccccagcuuca

SEQ ID NO: 2017708 - RNA, 16 nt, Human
ugcugagucuguucug

SEQ ID NO: 2017709 - RNA, 19 nt, Human
ugcugagucuguucuggua

SEQ ID NO: 2017710 - RNA, 21 nt, Human
ugcugagucuguucugguaau

SEQ ID NO: 2017711 - RNA, 16 nt, Human
ugcucagcugucaagg

SEQ ID NO: 2017712 - RNA, 20 nt, Human
ugcucagcugucaaggcuca

SEQ ID NO: 2017713 - RNA, 14 nt, Human
ugcucaggagcccu

SEQ ID NO: 2017714 - RNA, 19 nt, Human
ugcuccucuccccagcaag

SEQ ID NO: 2017715 - RNA, 12 nt, Human
ugcuccugagcc

SEQ ID NO: 2017716 - RNA, 13 nt, Human
ugcuccugagccc

SEQ ID NO: 2017717 - RNA, 14 nt, Human
ugcuccugagcccc

SEQ ID NO: 2017718 - RNA, 15 nt, Human
ugcuccugagccccc

SEQ ID NO: 2017719 - RNA, 16 nt, Human
ugcuccugagccccca

SEQ ID NO: 2017720 - RNA, 21 nt, Human
ugcuccugagcccccagcuuc

SEQ ID NO: 2017721 - RNA, 20 nt, Human
ugcuagaacucccuuucaac

SEQ ID NO: 2017722 - RNA, 21 nt, Human
ugcuagaacucccuuucaaca

SEQ ID NO: 2017723 - RNA, 19 nt, Human
ugcuaggaacacuccuuca

SEQ ID NO: 2017724 - RNA, 17 nt, Human
ugcuaggaacacuccuu

SEQ ID NO: 2017725 - RNA, 16 nt, Human
ugcuaggaacacuccu

SEQ ID NO: 2017726 - RNA, 15 nt, Human
ugcgugcauaccacu

SEQ ID NO: 2017727 - RNA, 19 nt, Human
ugcuagaacucccuuucaa

SEQ ID NO: 2017728 - RNA, 18 nt, Human
ugcuagaacucccuuuca

SEQ ID NO: 2017729 - RNA, 13 nt, Human
ucuuaugcuucca

SEQ ID NO: 2017730 - RNA, 17 nt, Human
ucuuaugcuuccagaaa

SEQ ID NO: 2017731 - RNA, 20 nt, Human
ucuuaugcuuccagaaacac

SEQ ID NO: 2017732 - RNA, 15 nt, Human
ucuucaguaagccgu

SEQ ID NO: 2017733 - RNA, 13 nt, Human
ucuuaugggcugg

SEQ ID NO: 2017734 - RNA, 14 nt, Human
ucuuauacauuuga

SEQ ID NO: 2017735 - RNA, 15 nt, Human
ucuuauacauuugau

SEQ ID NO: 2017736 - RNA, 21 nt, Human
ucuuaguguugcguccugccu

SEQ ID NO: 2017737 - RNA, 23 nt, Human
ucuuaaaauggcaaguuuuccau

SEQ ID NO: 2017738 - RNA, 16 nt, Human
ucuuaguggauguucu

SEQ ID NO: 2017739 - RNA, 14 nt, Human
ucuuagugugugca

SEQ ID NO: 2017740 - RNA, 13 nt, Human
ucuuccaggcagc

SEQ ID NO: 2017741 - RNA, 14 nt, Human
ucuuccaggcuggg

SEQ ID NO: 2017742 - RNA, 16 nt, Human
ucuucaguaagccgug

SEQ ID NO: 2017743 - RNA, 21 nt, Human
ucuuccacaagagcccaggcc

SEQ ID NO: 2017744 - RNA, 22 nt, Human
ucuuccaaccauuuaucuugaa

SEQ ID NO: 2017745 - RNA, 21 nt, Human
ucuucuccacuuucuagccag

SEQ ID NO: 2017746 - RNA, 19 nt, Human
ucuucuccacuuucuagcc

SEQ ID NO: 2017747 - RNA, 13 nt, Human
ucuucuccacugg

SEQ ID NO: 2017748 - RNA, 12 nt, Human
ucuucuauuuau

SEQ ID NO: 2017749 - RNA, 18 nt, Human
ucuucuagcauaucuuuc

SEQ ID NO: 2017750 - RNA, 22 nt, Human
ucuucuauuuauuuauuuauuc

SEQ ID NO: 2017751 - RNA, 20 nt, Human
ucuugccucagcuuccccag

SEQ ID NO: 2017752 - RNA, 20 nt, Human
ucuugccuauauuuuccuga

SEQ ID NO: 2017753 - RNA, 19 nt, Human
ucuugccucagcuucccca

SEQ ID NO: 2017754 - RNA, 18 nt, Human
ucuugccucagcuucccc

SEQ ID NO: 2017755 - RNA, 19 nt, Human
ucuugccuauauuuuccug

SEQ ID NO: 2017756 - RNA, 15 nt, Human
ucuugaacugagcuu

SEQ ID NO: 2017757 - RNA, 17 nt, Human
ucuugaacucuuggccu

SEQ ID NO: 2017758 - RNA, 21 nt, Human
ucuugaauuguaaggaaugau

SEQ ID NO: 2017759 - RNA, 20 nt, Human
ucuugacagagccugcccca

SEQ ID NO: 2017760 - RNA, 14 nt, Human
ucuugacccugcac

SEQ ID NO: 2017761 - RNA, 15 nt, Human
ucuugacccugcacc

SEQ ID NO: 2017762 - RNA, 16 nt, Human
ucuugacccugcaccc

SEQ ID NO: 2017763 - RNA, 17 nt, Human
ucuugacccugcacccu

SEQ ID NO: 2017764 - RNA, 18 nt, Human
ucuugacccugcacccuc

SEQ ID NO: 2017765 - RNA, 19 nt, Human
ucuugacccugcacccucc

SEQ ID NO: 2017766 - RNA, 15 nt, Human
ucuugaccucugccu

SEQ ID NO: 2017767 - RNA, 15 nt, Human
ucuucuccaggcugu

SEQ ID NO: 2017768 - RNA, 16 nt, Human
ucuugaacuccuggcc

SEQ ID NO: 2017769 - RNA, 17 nt, Human
ucuugaacuccuggccu

SEQ ID NO: 2017770 - RNA, 18 nt, Human
ucuugaacuccuggccuc

SEQ ID NO: 2017771 - RNA, 13 nt, Human
ucuucuccaggcu

SEQ ID NO: 2017772 - RNA, 14 nt, Human
ucuucuccaggcug

SEQ ID NO: 2017773 - RNA, 12 nt, Human
ucuucuccaggc

SEQ ID NO: 2017774 - RNA, 16 nt, Human
ucuucuccacuggaug

SEQ ID NO: 2017775 - RNA, 12 nt, Human
ucuugcucuccu

SEQ ID NO: 2017776 - RNA, 15 nt, Human
ucuugcucucuuuua

SEQ ID NO: 2017777 - RNA, 12 nt, Human
ucuugcucugcu

SEQ ID NO: 2017778 - RNA, 13 nt, Human
ucuugcucugcug

SEQ ID NO: 2017779 - RNA, 11 nt, Human
ucuugcucugc

SEQ ID NO: 2017780 - RNA, 21 nt, Human
ucuugccugccuaacaaaaua

SEQ ID NO: 2017781 - RNA, 18 nt, Human
ucuuguuuuuuuuuucca

SEQ ID NO: 2017782 - RNA, 21 nt, Human
ucuuguuuuuuuuuuccacuu

SEQ ID NO: 2017783 - RNA, 17 nt, Human
ucuugugaaaauaauug

SEQ ID NO: 2017784 - RNA, 15 nt, Human
ucuugucuuccuauu

SEQ ID NO: 2017785 - RNA, 19 nt, Human
ucuugucuuccuauuucag

SEQ ID NO: 2017786 - RNA, 20 nt, Human
ucuugucuuccuauuucaga

SEQ ID NO: 2017787 - RNA, 15 nt, Human
ucuguguguuuaugu

SEQ ID NO: 2017788 - RNA, 16 nt, Human
ucuguguguuuaugug

SEQ ID NO: 2017789 - RNA, 22 nt, Human
ucuguguguguguauguggggg

SEQ ID NO: 2017790 - RNA, 19 nt, Human
ucuguguguuuaugugugu

SEQ ID NO: 2017791 - RNA, 20 nt, Human
ucuguguguuuaugugugug

SEQ ID NO: 2017792 - RNA, 20 nt, Human
ucuguguuuacagagauguc

SEQ ID NO: 2017793 - RNA, 12 nt, Human
ucuguguuuauu

SEQ ID NO: 2017794 - RNA, 17 nt, Human
ucuguguuuauucaaac

SEQ ID NO: 2017795 - RNA, 15 nt, Human
ucuguuaaaaugcau

SEQ ID NO: 2017796 - RNA, 13 nt, Human
ucuguuaaaaugc

SEQ ID NO: 2017797 - RNA, 14 nt, Human
ucuguuaaaaugca

SEQ ID NO: 2017798 - RNA, 19 nt, Human
ucuguuacacuuuuuggaa

SEQ ID NO: 2017799 - RNA, 22 nt, Human
ucuguuacaaaauguaacuguu

SEQ ID NO: 2017800 - RNA, 12 nt, Human
ucuguuacaaaa

SEQ ID NO: 2017801 - RNA, 14 nt, Human
ucuguuacaaaaug

SEQ ID NO: 2017802 - RNA, 16 nt, Human
ucuguuacaaaaugua

SEQ ID NO: 2017803 - RNA, 17 nt, Human
ucuguuacaaaauguaa

SEQ ID NO: 2017804 - RNA, 19 nt, Human
ucuguuacaaaauguaacu

SEQ ID NO: 2017805 - RNA, 20 nt, Human
ucuguuacaaaauguaacug

SEQ ID NO: 2017806 - RNA, 18 nt, Human
ucuuaaaaaguggaaaaa

SEQ ID NO: 2017807 - RNA, 12 nt, Human
ucuguuuucaau

SEQ ID NO: 2017808 - RNA, 22 nt, Human
ucuguuuucaaucucguauaga

SEQ ID NO: 2017809 - RNA, 14 nt, Human
ucuguucaggaagu

SEQ ID NO: 2017810 - RNA, 22 nt, Human
ucuguucaggaaguccuuaucu

SEQ ID NO: 2017811 - RNA, 14 nt, Human
ucuguucagcguuu

SEQ ID NO: 2017812 - RNA, 19 nt, Human
ucuguucagcguuuugcaa

SEQ ID NO: 2017813 - RNA, 20 nt, Human
ucuguucagcguuuugcaag

SEQ ID NO: 2017814 - RNA, 21 nt, Human
ucuguuauagguccuuuagaa

SEQ ID NO: 2017815 - RNA, 22 nt, Human
ucuguuauagguccuuuagaaa

SEQ ID NO: 2017816 - RNA, 23 nt, Human
ucuguuauagguccuuuagaaac

SEQ ID NO: 2017817 - RNA, 15 nt, Human
ucuguguguguguau

SEQ ID NO: 2017818 - RNA, 18 nt, Human
ucuguguguguguaugug

SEQ ID NO: 2017819 - RNA, 19 nt, Human
ucuguguguguguaugugg

SEQ ID NO: 2017820 - RNA, 21 nt, Human
ucuguguguguguaugugggg

SEQ ID NO: 2017821 - RNA, 22 nt, Human
ucugugucagguggggcagcuu

SEQ ID NO: 2017822 - RNA, 23 nt, Human
ucuguggguuucuaaagcugcca

SEQ ID NO: 2017823 - RNA, 12 nt, Human
ucugugguuggc

SEQ ID NO: 2017824 - RNA, 13 nt, Human
ucugugguuggcu

SEQ ID NO: 2017825 - RNA, 14 nt, Human
ucugugguuggcug

SEQ ID NO: 2017826 - RNA, 19 nt, Human
ucugugguuggcugggaaa

SEQ ID NO: 2017827 - RNA, 20 nt, Human
ucugugguuggcugggaaau

SEQ ID NO: 2017828 - RNA, 17 nt, Human
ucuguacgucugacagg

SEQ ID NO: 2017829 - RNA, 23 nt, Human
ucuguacagagccguaaaaacug

SEQ ID NO: 2017830 - RNA, 12 nt, Human
ucuguacauauu

SEQ ID NO: 2017831 - RNA, 19 nt, Human
ucuguccgagcuuugaaaa

SEQ ID NO: 2017832 - RNA, 18 nt, Human
ucuguacaucucuacuua

SEQ ID NO: 2017833 - RNA, 22 nt, Human
ucuguggguuucuaaagcugcc

SEQ ID NO: 2017834 - RNA, 16 nt, Human
ucuggcucuuccaggc

SEQ ID NO: 2017835 - RNA, 15 nt, Human
ucuggcucuuccagg

SEQ ID NO: 2017836 - RNA, 17 nt, Human
ucuggcucuuccaggcu

SEQ ID NO: 2017837 - RNA, 13 nt, Human
ucugggacacagu

SEQ ID NO: 2017838 - RNA, 17 nt, Human
ucugggaauguauagua

SEQ ID NO: 2017839 - RNA, 14 nt, Human
ucugggaauguaua

SEQ ID NO: 2017840 - RNA, 12 nt, Human
ucugggacacag

SEQ ID NO: 2017841 - RNA, 23 nt, Human
ucuguacagagcccacgccccca

SEQ ID NO: 2017842 - RNA, 22 nt, Human
ucuguacagagccguaaaaacu

SEQ ID NO: 2017843 - RNA, 22 nt, Human
ucuguaagcuguuugguuuuaa

SEQ ID NO: 2017844 - RNA, 23 nt, Human
ucuguaagcuguuugguuuuaaa

SEQ ID NO: 2017845 - RNA, 14 nt, Human
ucuggcuaugcauu

SEQ ID NO: 2017846 - RNA, 17 nt, Human
ucuggcuaugcauuuga

SEQ ID NO: 2017847 - RNA, 16 nt, Human
ucuggcucuacacaua

SEQ ID NO: 2017848 - RNA, 17 nt, Human
ucuggaggaccugcccg

SEQ ID NO: 2017849 - RNA, 14 nt, Human
ucuggagagcccag

SEQ ID NO: 2017850 - RNA, 23 nt, Human
ucuggagcccacuguacuugcuc

SEQ ID NO: 2017851 - RNA, 23 nt, Human
ugaaaugaggucagagccugcag

SEQ ID NO: 2017852 - RNA, 21 nt, Human
ugaaaugaggucagagccugc

SEQ ID NO: 2017853 - RNA, 22 nt, Human
ugaaaugaggucagagccugca

SEQ ID NO: 2017854 - RNA, 19 nt, Human
ugaaaugaggucagagccu

SEQ ID NO: 2017855 - RNA, 20 nt, Human
ugaaaugaggucagagccug

SEQ ID NO: 2017856 - RNA, 13 nt, Human
ugaaaugaacaca

SEQ ID NO: 2017857 - RNA, 14 nt, Human
ugaaaugaacacaa

SEQ ID NO: 2017858 - RNA, 17 nt, Human
ugaaaugaacacaaauu

SEQ ID NO: 2017859 - RNA, 18 nt, Human
ugaaaugaacacaaauua

SEQ ID NO: 2017860 - RNA, 22 nt, Human
ugaaaugaacacaaauuaugcu

SEQ ID NO: 2017861 - RNA, 17 nt, Human
ugaaaucuuuuugcuuu

SEQ ID NO: 2017862 - RNA, 18 nt, Human
ugaaaggcaaacauuuga

SEQ ID NO: 2017863 - RNA, 15 nt, Human
ugaaaucauucauuu

SEQ ID NO: 2017864 - RNA, 22 nt, Human
ugaaauccuggguuuucuuaac

SEQ ID NO: 2017865 - RNA, 15 nt, Human
ugaaagggcccagag

SEQ ID NO: 2017866 - RNA, 16 nt, Human
ugaaagggcccagaga

SEQ ID NO: 2017867 - RNA, 17 nt, Human
ugaaagggcccagagag

SEQ ID NO: 2017868 - RNA, 18 nt, Human
ugaaagggcccagagagg

SEQ ID NO: 2017869 - RNA, 13 nt, Human
ugaaaagaggugu

SEQ ID NO: 2017870 - RNA, 16 nt, Human
ugaaaagagacaggca

SEQ ID NO: 2017871 - RNA, 22 nt, Human
ugaaaagaggugugcaagagag

SEQ ID NO: 2017872 - RNA, 18 nt, Human
ugaaacccugucucuacu

SEQ ID NO: 2017873 - RNA, 22 nt, Human
ugaaagauggcugugccucugc

SEQ ID NO: 2017874 - RNA, 23 nt, Human
ugaaagauggcugugccucugcc

SEQ ID NO: 2017875 - RNA, 21 nt, Human
ugaaagauggcugugccucug

SEQ ID NO: 2017876 - RNA, 18 nt, Human
ugaaaccuaguacugccc

SEQ ID NO: 2017877 - RNA, 19 nt, Human
ugaaaccuaguacugcccc

SEQ ID NO: 2017878 - RNA, 18 nt, Human
ugaaagcagggacuugaa

SEQ ID NO: 2017879 - RNA, 19 nt, Human
ugaaagcagggacuugaac

SEQ ID NO: 2017880 - RNA, 23 nt, Human
ugaaagcagggacuugaacccau

SEQ ID NO: 2017881 - RNA, 17 nt, Human
ugaaaggaaagaggcuc

SEQ ID NO: 2017882 - RNA, 17 nt, Human
ugaaaggaauuuugcua

SEQ ID NO: 2017883 - RNA, 22 nt, Human
ugaaaggaauuuugcuaaguaa

SEQ ID NO: 2017884 - RNA, 13 nt, Human
ugaaagauucaau

SEQ ID NO: 2017885 - RNA, 12 nt, Human
ugaaaggaaaga

SEQ ID NO: 2017886 - RNA, 19 nt, Human
ugaaaacuuuaugcuaagu

SEQ ID NO: 2017887 - RNA, 16 nt, Human
ugaaaacuaaguucuc

SEQ ID NO: 2017888 - RNA, 15 nt, Human
ugaaaagaaaaauga

SEQ ID NO: 2017889 - RNA, 13 nt, Human
ugaaaacuuugua

SEQ ID NO: 2017890 - RNA, 16 nt, Human
ugaaaacuuuguagua

SEQ ID NO: 2017891 - RNA, 15 nt, Human
ucuuuuucuggacuc

SEQ ID NO: 2017892 - RNA, 16 nt, Human
ucuuuuugcuuugcuu

SEQ ID NO: 2017893 - RNA, 14 nt, Human
ucuuuuugaaucuu

SEQ ID NO: 2017894 - RNA, 14 nt, Human
ucuuuuugaaaugu

SEQ ID NO: 2017895 - RNA, 13 nt, Human
ucuuuuuuacaaa

SEQ ID NO: 2017896 - RNA, 18 nt, Human
ucuuuuuuacaaaggcug

SEQ ID NO: 2017897 - RNA, 19 nt, Human
ucuuuuuuacaaaggcugu

SEQ ID NO: 2017898 - RNA, 17 nt, Human
ucuuuuugcucuaaaau

SEQ ID NO: 2017899 - RNA, 20 nt, Human
ucuuuuugcucuaaaauauu

SEQ ID NO: 2017900 - RNA, 15 nt, Human
ucuuuuuuauuaauc

SEQ ID NO: 2017901 - RNA, 16 nt, Human
ucuuuuuuauuaauca

SEQ ID NO: 2017902 - RNA, 21 nt, Human
ucuuuuuuauuaaucacugug

SEQ ID NO: 2017903 - RNA, 24 nt, Human
ucuuuuuuauuaaucacuguguau

SEQ ID NO: 2017904 - RNA, 20 nt, Human
ucuuuugguuaugaauacuu

SEQ ID NO: 2017905 - RNA, 17 nt, Human
ucuuuugccguuauuaa

SEQ ID NO: 2017906 - RNA, 19 nt, Human
ucuuuugccguuauuaaaa

SEQ ID NO: 2017907 - RNA, 20 nt, Human
ucuuuucuuugccaucucug

SEQ ID NO: 2017908 - RNA, 19 nt, Human
ucuuuucugaaucuucuga

SEQ ID NO: 2017909 - RNA, 20 nt, Human
ucuuuucugaaucuucugaa

SEQ ID NO: 2017910 - RNA, 22 nt, Human
ucuuuucugaaucuucugaaac

SEQ ID NO: 2017911 - RNA, 18 nt, Human
ucuuuucuuugccaucuc

SEQ ID NO: 2017912 - RNA, 12 nt, Human
ucuuuucugaau

SEQ ID NO: 2017913 - RNA, 14 nt, Human
ucuuuucugaaucu

SEQ ID NO: 2017914 - RNA, 15 nt, Human
ucuuuucugaaucuu

SEQ ID NO: 2017915 - RNA, 18 nt, Human
ucuuuucugaaucuucug

SEQ ID NO: 2017916 - RNA, 22 nt, Human
ugaagacuuuucuuucagccaa

SEQ ID NO: 2017917 - RNA, 17 nt, Human
ugaagacuuuucuuuca

SEQ ID NO: 2017918 - RNA, 17 nt, Human
ugaagaccuaaccaggg

SEQ ID NO: 2017919 - RNA, 19 nt, Human
ugaagaccuaaccagggcc

SEQ ID NO: 2017920 - RNA, 22 nt, Human
ugaagaccuaaccagggccaga

SEQ ID NO: 2017921 - RNA, 23 nt, Human
ugaagaccuaaccagggccagaa

SEQ ID NO: 2017922 - RNA, 14 nt, Human
ugaagacuuuucuu

SEQ ID NO: 2017923 - RNA, 16 nt, Human
ugaacuuggaagcaca

SEQ ID NO: 2017924 - RNA, 15 nt, Human
ugaagacagcccgau

SEQ ID NO: 2017925 - RNA, 15 nt, Human
ugaagaccuaaccag

SEQ ID NO: 2017926 - RNA, 23 nt, Human
ugaagacagcccgauccuccccu

SEQ ID NO: 2017927 - RNA, 12 nt, Human
ugaacuugguuc

SEQ ID NO: 2017928 - RNA, 14 nt, Human
ugaacuuggcgcug

SEQ ID NO: 2017929 - RNA, 19 nt, Human
ugaacuggguacuugugga

SEQ ID NO: 2017930 - RNA, 16 nt, Human
ugaagacagagcuaca

SEQ ID NO: 2017931 - RNA, 14 nt, Human
ugaagacagagcua

SEQ ID NO: 2017932 - RNA, 22 nt, Human
ugaacuuguaaaggaauuuaaa

SEQ ID NO: 2017933 - RNA, 20 nt, Human
ugaaggagagcccuucauuu

SEQ ID NO: 2017934 - RNA, 18 nt, Human
ugaagaugggggccucuu

SEQ ID NO: 2017935 - RNA, 22 nt, Human
ugaagaugggggccucuuucag

SEQ ID NO: 2017936 - RNA, 15 nt, Human
ugaaggaugccaaga

SEQ ID NO: 2017937 - RNA, 20 nt, Human
ugaaggaggcuccaggcagc

SEQ ID NO: 2017938 - RNA, 21 nt, Human
ugaaggaggcuccaggcagca

SEQ ID NO: 2017939 - RNA, 22 nt, Human
ugaaggaggcuccaggcagcac

SEQ ID NO: 2017940 - RNA, 14 nt, Human
ugaaggaggccacc

SEQ ID NO: 2017941 - RNA, 16 nt, Human
ugaaggaggccaccuc

SEQ ID NO: 2017942 - RNA, 17 nt, Human
ugaaggaggccaccucc

SEQ ID NO: 2017943 - RNA, 18 nt, Human
ugaaggaggccaccuccu

SEQ ID NO: 2017944 - RNA, 20 nt, Human
ugaaggaggccaccuccuaa

SEQ ID NO: 2017945 - RNA, 21 nt, Human
ugaaggaggccaccuccuaaa

SEQ ID NO: 2017946 - RNA, 19 nt, Human
ugaaggaggcuccaggcag

SEQ ID NO: 2017947 - RNA, 20 nt, Human
ugaaggcucgagcaugccug

SEQ ID NO: 2017948 - RNA, 21 nt, Human
ugaaggcucgagcaugccugg

SEQ ID NO: 2017949 - RNA, 15 nt, Human
ugaacauacaaaugc

SEQ ID NO: 2017950 - RNA, 16 nt, Human
ugaacauacaaaugca

SEQ ID NO: 2017951 - RNA, 23 nt, Human
ugaacauacaaaugcaucuuuga

SEQ ID NO: 2017952 - RNA, 13 nt, Human
ugaacauguuuua

SEQ ID NO: 2017953 - RNA, 14 nt, Human
ugaacacauuucuu

SEQ ID NO: 2017954 - RNA, 12 nt, Human
ugaacacauuuc

SEQ ID NO: 2017955 - RNA, 12 nt, Human
ugaacacaaauu

SEQ ID NO: 2017956 - RNA, 14 nt, Human
ugaacacaaauuau

SEQ ID NO: 2017957 - RNA, 17 nt, Human
ugaacacaaauuaugcu

SEQ ID NO: 2017958 - RNA, 19 nt, Human
ugaaauggacuuuuguaca

SEQ ID NO: 2017959 - RNA, 16 nt, Human
ugaaaugcugaaaauu

SEQ ID NO: 2017960 - RNA, 17 nt, Human
ugaaaugcugaaaauug

SEQ ID NO: 2017961 - RNA, 19 nt, Human
ugaaaugcugaaaauugcc

SEQ ID NO: 2017962 - RNA, 17 nt, Human
ugaaaugcuaugucauu

SEQ ID NO: 2017963 - RNA, 18 nt, Human
ugaaaugcuaugucauuu

SEQ ID NO: 2017964 - RNA, 20 nt, Human
ugaaaugcuaugucauuuca

SEQ ID NO: 2017965 - RNA, 21 nt, Human
ugaaaugcuaugucauuucau

SEQ ID NO: 2017966 - RNA, 22 nt, Human
ugaaaugcuaugucauuucaug

SEQ ID NO: 2017967 - RNA, 15 nt, Human
ugaaaugcugaaaau

SEQ ID NO: 2017968 - RNA, 12 nt, Human
ugaacugagcuu

SEQ ID NO: 2017969 - RNA, 15 nt, Human
ugaacugagcuugga

SEQ ID NO: 2017970 - RNA, 13 nt, Human
ugaacugauaaag

SEQ ID NO: 2017971 - RNA, 11 nt, Human
ugaacugaagg

SEQ ID NO: 2017972 - RNA, 17 nt, Human
ugaacugaacucugaca

SEQ ID NO: 2017973 - RNA, 19 nt, Human
ugaacugaacucugacaac

SEQ ID NO: 2017974 - RNA, 16 nt, Human
ugaacugagcuuggaa

SEQ ID NO: 2017975 - RNA, 15 nt, Human
ugaacugauaaagau

SEQ ID NO: 2017976 - RNA, 20 nt, Human
ugaaccacaucuugcucugc

SEQ ID NO: 2017977 - RNA, 21 nt, Human
ugaaccacaucuugcucugcu

SEQ ID NO: 2017978 - RNA, 15 nt, Human
ugaacucuucaaucu

SEQ ID NO: 2017979 - RNA, 22 nt, Human
ugaaccacaucuugcucugcug

SEQ ID NO: 2017980 - RNA, 12 nt, Human
ugaacugaaagu

SEQ ID NO: 2017981 - RNA, 14 nt, Human
ugaacugaacucug

SEQ ID NO: 2017982 - RNA, 18 nt, Human
ugaacucuucaaucucuu

SEQ ID NO: 2017983 - RNA, 14 nt, Human
ugaacucuucucau

SEQ ID NO: 2017984 - RNA, 18 nt, Human
ugaacucuucucauuacu

SEQ ID NO: 2017985 - RNA, 21 nt, Human
ugaacucuucucauuacuugu

SEQ ID NO: 2017986 - RNA, 20 nt, Human
ucggaaccugugagcugcac

SEQ ID NO: 2017987 - RNA, 19 nt, Human
ucgcccaggcuggagugca

SEQ ID NO: 2017988 - RNA, 14 nt, Human
ucgcccagucccag

SEQ ID NO: 2017989 - RNA, 17 nt, Human
ucgcccagucccagcag

SEQ ID NO: 2017990 - RNA, 18 nt, Human
ucgcccagucccagcagc

SEQ ID NO: 2017991 - RNA, 19 nt, Human
ucgcccagucccagcagcc

SEQ ID NO: 2017992 - RNA, 21 nt, Human
ucgcccagucccagcagccag

SEQ ID NO: 2017993 - RNA, 12 nt, Human
ucgcccaggcug

SEQ ID NO: 2017994 - RNA, 14 nt, Human
ucgcccaggcugga

SEQ ID NO: 2017995 - RNA, 17 nt, Human
ucgcaauguaagacucg

SEQ ID NO: 2017996 - RNA, 21 nt, Human
ucgcacucuggcagcaccgcc

SEQ ID NO: 2017997 - RNA, 19 nt, Human
ucgcacucuggcagcaccg

SEQ ID NO: 2017998 - RNA, 13 nt, Human
ucgagucugaggc

SEQ ID NO: 2017999 - RNA, 22 nt, Human
uccuuuuuauuuauauguaugu

SEQ ID NO: 2018000 - RNA, 23 nt, Human
uccuuuuuauuuauauguaugug

SEQ ID NO: 2018001 - RNA, 17 nt, Human
ucgaguuacagacaaag

SEQ ID NO: 2018002 - RNA, 16 nt, Human
ucgaguggcccaacag

SEQ ID NO: 2018003 - RNA, 17 nt, Human
ucgaguuacagccuggg

SEQ ID NO: 2018004 - RNA, 15 nt, Human
ucgaguuacagacaa

SEQ ID NO: 2018005 - RNA, 14 nt, Human
ucgagugagacaga

SEQ ID NO: 2018006 - RNA, 23 nt, Human
ucgagugagacagacuagaaguu

SEQ ID NO: 2018007 - RNA, 14 nt, Human
ucgagucugaggcc

SEQ ID NO: 2018008 - RNA, 20 nt, Human
ucgagugccgcaucucacag

SEQ ID NO: 2018009 - RNA, 22 nt, Human
ucgagugccgcaucucacagcu

SEQ ID NO: 2018010 - RNA, 23 nt, Human
ucgagugccgcaucucacagcua

SEQ ID NO: 2018011 - RNA, 14 nt, Human
uccuuuuggaguca

SEQ ID NO: 2018012 - RNA, 23 nt, Human
uccuuuuggagucagacagaugu

SEQ ID NO: 2018013 - RNA, 13 nt, Human
uccuuuuuauuua

SEQ ID NO: 2018014 - RNA, 14 nt, Human
uccuuuuuauuuau

SEQ ID NO: 2018015 - RNA, 15 nt, Human
uccuuuuuauuuaua

SEQ ID NO: 2018016 - RNA, 18 nt, Human
uccuuuuuauuuauaugu

SEQ ID NO: 2018017 - RNA, 12 nt, Human
uccuuuuguguu

SEQ ID NO: 2018018 - RNA, 13 nt, Human
uccuuuuguguuc

SEQ ID NO: 2018019 - RNA, 16 nt, Human
uccuuuuguguuccaa

SEQ ID NO: 2018020 - RNA, 19 nt, Human
uccuuuuguguuccaaaca

SEQ ID NO: 2018021 - RNA, 17 nt, Human
uccugucaucugagaau

SEQ ID NO: 2018022 - RNA, 15 nt, Human
uccuuacaaaugauu

SEQ ID NO: 2018023 - RNA, 16 nt, Human
uccuuacaaaugauug

SEQ ID NO: 2018024 - RNA, 18 nt, Human
uccuuacaaaugauugcu

SEQ ID NO: 2018025 - RNA, 20 nt, Human
uccuuacaaaugauugcuuu

SEQ ID NO: 2018026 - RNA, 19 nt, Human
uccugucaagcaaucaaga

SEQ ID NO: 2018027 - RNA, 15 nt, Human
uccugucaucugaga

SEQ ID NO: 2018028 - RNA, 14 nt, Human
uccuuaccagcaga

SEQ ID NO: 2018029 - RNA, 16 nt, Human
uccuucaaagcaaaug

SEQ ID NO: 2018030 - RNA, 15 nt, Human
uccuuacauaaacau

SEQ ID NO: 2018031 - RNA, 17 nt, Human
uccuuaugcuugggccu

SEQ ID NO: 2018032 - RNA, 21 nt, Human
uccuucaacaaggcuugcugc

SEQ ID NO: 2018033 - RNA, 21 nt, Human
uccuuauggguagggcucuga

SEQ ID NO: 2018034 - RNA, 20 nt, Human
uccuucaacaaggcuugcug

SEQ ID NO: 2018035 - RNA, 19 nt, Human
uccuucaacaaggcuugcu

SEQ ID NO: 2018036 - RNA, 12 nt, Human
uccuucuguccu

SEQ ID NO: 2018037 - RNA, 19 nt, Human
uccuucuguccuacucugu

SEQ ID NO: 2018038 - RNA, 13 nt, Human
uccuucugggcau

SEQ ID NO: 2018039 - RNA, 14 nt, Human
uccuggucgaaagu

SEQ ID NO: 2018040 - RNA, 17 nt, Human
uccuggcccacugcauc

SEQ ID NO: 2018041 - RNA, 22 nt, Human
uccuggcaugggaaugaauguc

SEQ ID NO: 2018042 - RNA, 10 nt, Human
ucccucccuu

SEQ ID NO: 2018043 - RNA, 15 nt, Human
uccugguguggaaga

SEQ ID NO: 2018044 - RNA, 19 nt, Human
uccuguaggaguucuauuu

SEQ ID NO: 2018045 - RNA, 17 nt, Human
ucuacacuccagugaga

SEQ ID NO: 2018046 - RNA, 14 nt, Human
ucuacacugugcug

SEQ ID NO: 2018047 - RNA, 12 nt, Human
ucuacacugugc

SEQ ID NO: 2018048 - RNA, 19 nt, Human
ucuacugaggugcuauguu

SEQ ID NO: 2018049 - RNA, 18 nt, Human
ucuacugaggugcuaugu

SEQ ID NO: 2018050 - RNA, 15 nt, Human
ucuacacugugcuga

SEQ ID NO: 2018051 - RNA, 21 nt, Human
ucuacacugugcugagucuga

SEQ ID NO: 2018052 - RNA, 22 nt, Human
ucuagggaaaaaccagcgugug

SEQ ID NO: 2018053 - RNA, 16 nt, Human
ucuagaauuuuaagcc

SEQ ID NO: 2018054 - RNA, 19 nt, Human
ucuagggaaaaaccagcgu

SEQ ID NO: 2018055 - RNA, 17 nt, Human
ucuagggaccagaacca

SEQ ID NO: 2018056 - RNA, 22 nt, Human
ucuacugaggugcuauguucuu

SEQ ID NO: 2018057 - RNA, 24 nt, Human
ucuacugcauuuagggaguauucu

SEQ ID NO: 2018058 - RNA, 22 nt, Human
ucuaacuucaccauauuaccac

SEQ ID NO: 2018059 - RNA, 15 nt, Human
ucuaacuucaccaua

SEQ ID NO: 2018060 - RNA, 16 nt, Human
ucuaacuucaccauau

SEQ ID NO: 2018061 - RNA, 16 nt, Human
ucuaaauucuuucauu

SEQ ID NO: 2018062 - RNA, 22 nt, Human
ucuaaaucuccaaaauaaaacu

SEQ ID NO: 2018063 - RNA, 14 nt, Human
ucuaaaucugucca

SEQ ID NO: 2018064 - RNA, 21 nt, Human
ucuaaaucuguccaacugaga

SEQ ID NO: 2018065 - RNA, 21 nt, Human
ucucagaaucucaaauaacua

SEQ ID NO: 2018066 - RNA, 17 nt, Human
ucucagaaucucaaaua

SEQ ID NO: 2018067 - RNA, 18 nt, Human
ucucacuguugcccaggc

SEQ ID NO: 2018068 - RNA, 19 nt, Human
ucucacuguugcccaggcu

SEQ ID NO: 2018069 - RNA, 20 nt, Human
ucucacuguugcccaggcug

SEQ ID NO: 2018070 - RNA, 21 nt, Human
ucucacuguugcccaggcugg

SEQ ID NO: 2018071 - RNA, 18 nt, Human
ucucacucugucgcccag

SEQ ID NO: 2018072 - RNA, 22 nt, Human
ucucacucugucgcccagucug

SEQ ID NO: 2018073 - RNA, 17 nt, Human
ucucacucugucgccca

SEQ ID NO: 2018074 - RNA, 22 nt, Human
ucucaaacucuugaccucaggu

SEQ ID NO: 2018075 - RNA, 13 nt, Human
ucucaaacucuug

SEQ ID NO: 2018076 - RNA, 21 nt, Human
ucucaaacucuugaccucagg

SEQ ID NO: 2018077 - RNA, 22 nt, Human
ucucaacaaggcaaaaacaaag

SEQ ID NO: 2018078 - RNA, 14 nt, Human
ucucaacaugucuc

SEQ ID NO: 2018079 - RNA, 18 nt, Human
ucucaacaugucuccuac

SEQ ID NO: 2018080 - RNA, 15 nt, Human
ucuaguaauaaagac

SEQ ID NO: 2018081 - RNA, 17 nt, Human
ucuaguaauaaagacuc

SEQ ID NO: 2018082 - RNA, 19 nt, Human
ucuaguaauaaagacucua

SEQ ID NO: 2018083 - RNA, 14 nt, Human
ucuaguacugugaa

SEQ ID NO: 2018084 - RNA, 15 nt, Human
ucuaguacugugaau

SEQ ID NO: 2018085 - RNA, 13 nt, Human
ucuaguacuguga

SEQ ID NO: 2018086 - RNA, 14 nt, Human
ucuaguaauauauu

SEQ ID NO: 2018087 - RNA, 21 nt, Human
ucuaguaauauauuuaaaggg

SEQ ID NO: 2018088 - RNA, 15 nt, Human
ucucucgugaguaua

SEQ ID NO: 2018089 - RNA, 12 nt, Human
ucucucuccaag

SEQ ID NO: 2018090 - RNA, 17 nt, Human
ucucucucaauuuuugg

SEQ ID NO: 2018091 - RNA, 21 nt, Human
ucucucuauuucccccuuucu

SEQ ID NO: 2018092 - RNA, 14 nt, Human
ucucuauuccccac

SEQ ID NO: 2018093 - RNA, 17 nt, Human
ucucuauuccccacccu

SEQ ID NO: 2018094 - RNA, 23 nt, Human
ucucuauuucccccuuucuuccu

SEQ ID NO: 2018095 - RNA, 22 nt, Human
ucucucuuguucuuacuuuccu

SEQ ID NO: 2018096 - RNA, 13 nt, Human
ucucugaggacac

SEQ ID NO: 2018097 - RNA, 15 nt, Human
ucucuacaaaaagca

SEQ ID NO: 2018098 - RNA, 13 nt, Human
ucuccuguaccuc

SEQ ID NO: 2018099 - RNA, 21 nt, Human
ucuccugcguguucucagagg

SEQ ID NO: 2018100 - RNA, 18 nt, Human
ucucuaguuugauuaaau

SEQ ID NO: 2018101 - RNA, 19 nt, Human
ucucuaguuugauuaaauu

SEQ ID NO: 2018102 - RNA, 22 nt, Human
ucucagugguuaagauuccuaa

SEQ ID NO: 2018103 - RNA, 21 nt, Human
ucucagugucaaugcagcccc

SEQ ID NO: 2018104 - RNA, 16 nt, Human
ucucaggucugaguug

SEQ ID NO: 2018105 - RNA, 15 nt, Human
ucucaggucccugca

SEQ ID NO: 2018106 - RNA, 17 nt, Human
ucucccccagccccauc

SEQ ID NO: 2018107 - RNA, 15 nt, Human
ucucccccagcccca

SEQ ID NO: 2018108 - RNA, 14 nt, Human
ucucccccagcccc

SEQ ID NO: 2018109 - RNA, 21 nt, Human
ucuccccuuccauuucugccu

SEQ ID NO: 2018110 - RNA, 20 nt, Human
ucucccccagccccauccuc

SEQ ID NO: 2018111 - RNA, 18 nt, Human
ucucccccagccccaucc

SEQ ID NO: 2018112 - RNA, 22 nt, Human
ucucccccagccccauccucug

SEQ ID NO: 2018113 - RNA, 22 nt, Human
ucuccugaaaaaagcaguucuu

SEQ ID NO: 2018114 - RNA, 22 nt, Human
ucuccucuugccacugccucuu

SEQ ID NO: 2018115 - RNA, 16 nt, Human
ucucccgggacucugc

SEQ ID NO: 2018116 - RNA, 22 nt, Human
ucuccugccucagccucccaaa

SEQ ID NO: 2018117 - RNA, 19 nt, Human
ucuccugcguguucucaga

SEQ ID NO: 2018118 - RNA, 14 nt, Human
ucugaaauuuccug

SEQ ID NO: 2018119 - RNA, 17 nt, Human
ucugaaauauaaagucu

SEQ ID NO: 2018120 - RNA, 13 nt, Human
ucugaaagggacg

SEQ ID NO: 2018121 - RNA, 14 nt, Human
ucugaaaauguaug

SEQ ID NO: 2018122 - RNA, 23 nt, Human
ucugaaaauguauguguaaguau

SEQ ID NO: 2018123 - RNA, 15 nt, Human
ucucuuuucaaaaca

SEQ ID NO: 2018124 - RNA, 16 nt, Human
ucucuuuucaaaacau

SEQ ID NO: 2018125 - RNA, 14 nt, Human
ucucuuuucaagaa

SEQ ID NO: 2018126 - RNA, 16 nt, Human
ucugaaaauguaugug

SEQ ID NO: 2018127 - RNA, 21 nt, Human
ucucuuuuugcccccucuccu

SEQ ID NO: 2018128 - RNA, 11 nt, Human
ucucugcaggu

SEQ ID NO: 2018129 - RNA, 18 nt, Human
ucucuucacagucacauu

SEQ ID NO: 2018130 - RNA, 23 nt, Human
ucucuuccaaccauuuaucuuga

SEQ ID NO: 2018131 - RNA, 15 nt, Human
ucucuuccaggcagc

SEQ ID NO: 2018132 - RNA, 16 nt, Human
ucucuuccaggcagcc

SEQ ID NO: 2018133 - RNA, 18 nt, Human
ucucuuccaggcagccgc

SEQ ID NO: 2018134 - RNA, 12 nt, Human
ucucuuugaaac

SEQ ID NO: 2018135 - RNA, 14 nt, Human
ucucuuugaaacau

SEQ ID NO: 2018136 - RNA, 11 nt, Human
ucucuuugccc

SEQ ID NO: 2018137 - RNA, 13 nt, Human
ucucuucuccuua

SEQ ID NO: 2018138 - RNA, 14 nt, Human
ucucuucucugcca

SEQ ID NO: 2018139 - RNA, 18 nt, Human
ucucuucuccccuuccau

SEQ ID NO: 2018140 - RNA, 21 nt, Human
ucucuucuccccuuccauuuc

SEQ ID NO: 2018141 - RNA, 11 nt, Human
ucucuucuccu

SEQ ID NO: 2018142 - RNA, 12 nt, Human
ucucuucuccuu

SEQ ID NO: 2018143 - RNA, 13 nt, Human
ucucuucuccacu

SEQ ID NO: 2018144 - RNA, 14 nt, Human
ucucuucuccacug

SEQ ID NO: 2018145 - RNA, 15 nt, Human
ucucuucuccacugg

SEQ ID NO: 2018146 - RNA, 16 nt, Human
ucucuucuccacugga

SEQ ID NO: 2018147 - RNA, 11 nt, Human
ucucuucucca

SEQ ID NO: 2018148 - RNA, 20 nt, Human
ucugaacuuggcgcugcccc

SEQ ID NO: 2018149 - RNA, 21 nt, Human
ucugaacuuggcgcugccccu

SEQ ID NO: 2018150 - RNA, 14 nt, Human
ucugacccaugcug

SEQ ID NO: 2018151 - RNA, 18 nt, Human
ucugacccaugcugcccu

SEQ ID NO: 2018152 - RNA, 17 nt, Human
ucugacccaugcugccc

SEQ ID NO: 2018153 - RNA, 16 nt, Human
ucugacccaugcugcc

SEQ ID NO: 2018154 - RNA, 15 nt, Human
ucugacccaugcugc

SEQ ID NO: 2018155 - RNA, 20 nt, Human
ucugagcauuagauuucuca

SEQ ID NO: 2018156 - RNA, 22 nt, Human
ucugagcaagaggauuuugcgu

SEQ ID NO: 2018157 - RNA, 22 nt, Human
ucugagcauuagauuucucauu

SEQ ID NO: 2018158 - RNA, 16 nt, Human
ucugaggaauccagac

SEQ ID NO: 2018159 - RNA, 17 nt, Human
ucugaggaauccagacc

SEQ ID NO: 2018160 - RNA, 20 nt, Human
ucugaggacacuaaccacgc

SEQ ID NO: 2018161 - RNA, 23 nt, Human
ucugaggacacuaaccacgcugg

SEQ ID NO: 2018162 - RNA, 14 nt, Human
ucugaggacaagag

SEQ ID NO: 2018163 - RNA, 17 nt, Human
ucugaggacaagagaaa

SEQ ID NO: 2018164 - RNA, 17 nt, Human
ucugagcuuacguaguu

SEQ ID NO: 2018165 - RNA, 16 nt, Human
ucugagcuggccucuc

SEQ ID NO: 2018166 - RNA, 22 nt, Human
ucugagcuggccucucacugcc

SEQ ID NO: 2018167 - RNA, 19 nt, Human
ucugagcuuacguaguucu

SEQ ID NO: 2018168 - RNA, 23 nt, Human
ucugauucccaagcucugcuccu

SEQ ID NO: 2018169 - RNA, 18 nt, Human
ucugaggacaagagaaaa

SEQ ID NO: 2018170 - RNA, 14 nt, Human
ucugcacaagcugc

SEQ ID NO: 2018171 - RNA, 19 nt, Human
ucugcacaagcugcacccu

SEQ ID NO: 2018172 - RNA, 15 nt, Human
uccauggacuuuguu

SEQ ID NO: 2018173 - RNA, 14 nt, Human
uccauggacuuugu

SEQ ID NO: 2018174 - RNA, 23 nt, Human
uccauggcgaaaacaucuccuua

SEQ ID NO: 2018175 - RNA, 13 nt, Human
uccauggacuuug

SEQ ID NO: 2018176 - RNA, 21 nt, Human
ucccaaagugcugggauuaca

SEQ ID NO: 2018177 - RNA, 19 nt, Human
uccauggggucucucacag

SEQ ID NO: 2018178 - RNA, 22 nt, Human
uccauggggucucucacagaca

SEQ ID NO: 2018179 - RNA, 23 nt, Human
uccauggggucucucacagacag

SEQ ID NO: 2018180 - RNA, 21 nt, Human
uccauggguuccaguuucaga

SEQ ID NO: 2018181 - RNA, 23 nt, Human
uccagcucaccagccccagugcc

SEQ ID NO: 2018182 - RNA, 16 nt, Human
uccauccaggccauuc

SEQ ID NO: 2018183 - RNA, 20 nt, Human
ucccaaaugugugcccagcu

SEQ ID NO: 2018184 - RNA, 21 nt, Human
ucccaaaugugugcccagcuu

SEQ ID NO: 2018185 - RNA, 13 nt, Human
ucccaacucaccc

SEQ ID NO: 2018186 - RNA, 19 nt, Human
uccauguagccuuuaauau

SEQ ID NO: 2018187 - RNA, 15 nt, Human
uccauguaugcauaa

SEQ ID NO: 2018188 - RNA, 20 nt, Human
uccauguaugcauaauaauc

SEQ ID NO: 2018189 - RNA, 15 nt, Human
ucccaacucacccca

SEQ ID NO: 2018190 - RNA, 14 nt, Human
ucccaacucacccc

SEQ ID NO: 2018191 - RNA, 16 nt, Human
ucccaacucaccccag

SEQ ID NO: 2018192 - RNA, 17 nt, Human
ucccaagcucugcuccu

SEQ ID NO: 2018193 - RNA, 18 nt, Human
ucccaaggcucugagcaa

SEQ ID NO: 2018194 - RNA, 12 nt, Human
ucccaagcucug

SEQ ID NO: 2018195 - RNA, 13 nt, Human
ucccaagcucugc

SEQ ID NO: 2018196 - RNA, 14 nt, Human
ucccaagcucugcu

SEQ ID NO: 2018197 - RNA, 15 nt, Human
ucccaagcucugcuc

SEQ ID NO: 2018198 - RNA, 22 nt, Human
ucccaggcauuccccaggaggc

SEQ ID NO: 2018199 - RNA, 20 nt, Human
ucccaggcgccccuuccccc

SEQ ID NO: 2018200 - RNA, 18 nt, Human
ucccaggcgccccuuccc

SEQ ID NO: 2018201 - RNA, 21 nt, Human
ucccaggcgccccuucccccu

SEQ ID NO: 2018202 - RNA, 15 nt, Human
ucccaggcugagccu

SEQ ID NO: 2018203 - RNA, 13 nt, Human
ucccaggagccug

SEQ ID NO: 2018204 - RNA, 17 nt, Human
ucccaggagccugccca

SEQ ID NO: 2018205 - RNA, 18 nt, Human
ucccaggagccugcccag

SEQ ID NO: 2018206 - RNA, 21 nt, Human
ucccaggcauuccccaggagg

SEQ ID NO: 2018207 - RNA, 20 nt, Human
ucccaggcauuccccaggag

SEQ ID NO: 2018208 - RNA, 13 nt, Human
ucccaccucagcc

SEQ ID NO: 2018209 - RNA, 22 nt, Human
ucccaaggcucugagcaaaugu

SEQ ID NO: 2018210 - RNA, 16 nt, Human
ucccaagguucugggu

SEQ ID NO: 2018211 - RNA, 14 nt, Human
ucccaccucagccu

SEQ ID NO: 2018212 - RNA, 15 nt, Human
ucccaccucagccuc

SEQ ID NO: 2018213 - RNA, 20 nt, Human
ucccaucucacacaugagca

SEQ ID NO: 2018214 - RNA, 16 nt, Human
ucccaggcugagccuc

SEQ ID NO: 2018215 - RNA, 18 nt, Human
ucccaggcugagccucag

SEQ ID NO: 2018216 - RNA, 21 nt, Human
ucccaggcucucaacagggga

SEQ ID NO: 2018217 - RNA, 23 nt, Human
ucccaucucacacaugagcauca

SEQ ID NO: 2018218 - RNA, 12 nt, Human
ucccaugcccug

SEQ ID NO: 2018219 - RNA, 11 nt, Human
ucccauggugc

SEQ ID NO: 2018220 - RNA, 22 nt, Human
uccccagacuccaccaagccug

SEQ ID NO: 2018221 - RNA, 21 nt, Human
uccccagaacucugccugccc

SEQ ID NO: 2018222 - RNA, 17 nt, Human
uccccagaacucugccu

SEQ ID NO: 2018223 - RNA, 19 nt, Human
uccccagaacucugccugc

SEQ ID NO: 2018224 - RNA, 22 nt, Human
uccccacuugagaauuacccuu

SEQ ID NO: 2018225 - RNA, 16 nt, Human
ucccccuccaccugcu

SEQ ID NO: 2018226 - RNA, 17 nt, Human
ucccccaucucuucugg

SEQ ID NO: 2018227 - RNA, 14 nt, Human
ucccccucccccag

SEQ ID NO: 2018228 - RNA, 21 nt, Human
ucccccucccccagccacucc

SEQ ID NO: 2018229 - RNA, 13 nt, Human
ucccccucuggcu

SEQ ID NO: 2018230 - RNA, 13 nt, Human
ucccccugcccca

SEQ ID NO: 2018231 - RNA, 13 nt, Human
uccccaggaggcc

SEQ ID NO: 2018232 - RNA, 16 nt, Human
ucccccaguccccuuc

SEQ ID NO: 2018233 - RNA, 21 nt, Human
ucccccuuccauggacuuugu

SEQ ID NO: 2018234 - RNA, 11 nt, Human
ucccccuuucu

SEQ ID NO: 2018235 - RNA, 15 nt, Human
ucccccuuucuuccu

SEQ ID NO: 2018236 - RNA, 16 nt, Human
ucccccuuucuuccuc

SEQ ID NO: 2018237 - RNA, 21 nt, Human
ucccccuuucuuccucauucc

SEQ ID NO: 2018238 - RNA, 20 nt, Human
uccccgcacugggcuugggg

SEQ ID NO: 2018239 - RNA, 13 nt, Human
uccccugcuccug

SEQ ID NO: 2018240 - RNA, 21 nt, Human
uccccugcuggguguggcgca

SEQ ID NO: 2018241 - RNA, 20 nt, Human
uccccugcuggguguggcgc

SEQ ID NO: 2018242 - RNA, 15 nt, Human
uccccugcugggugu

SEQ ID NO: 2018243 - RNA, 14 nt, Human
uccccugcugggug

SEQ ID NO: 2018244 - RNA, 23 nt, Human
uccccuguccccgcacugggcuu

SEQ ID NO: 2018245 - RNA, 22 nt, Human
uccccuguagagugggagcuga

SEQ ID NO: 2018246 - RNA, 15 nt, Human
uccccuguucacucu

SEQ ID NO: 2018247 - RNA, 19 nt, Human
uccccugugccagcccaga

SEQ ID NO: 2018248 - RNA, 20 nt, Human
uccccugugccagcccagag

SEQ ID NO: 2018249 - RNA, 17 nt, Human
uccccugugccagccca

SEQ ID NO: 2018250 - RNA, 19 nt, Human
uccccuguagagugggagc

SEQ ID NO: 2018251 - RNA, 20 nt, Human
uccccuggaagcagugccca

SEQ ID NO: 2018252 - RNA, 21 nt, Human
uccccuggaagcagugcccag

SEQ ID NO: 2018253 - RNA, 22 nt, Human
uccccuggaagcagugcccagg

SEQ ID NO: 2018254 - RNA, 23 nt, Human
uccccuggaagcagugcccaggu

SEQ ID NO: 2018255 - RNA, 24 nt, Human
uccccugcuggguguggcgcagca

SEQ ID NO: 2018256 - RNA, 17 nt, Human
uccccuggaagcagugc

SEQ ID NO: 2018257 - RNA, 19 nt, Human
uccccuggaagcagugccc

SEQ ID NO: 2018258 - RNA, 13 nt, Human
uccccugcuggcc

SEQ ID NO: 2018259 - RNA, 15 nt, Human
ucccucccucuuucc

SEQ ID NO: 2018260 - RNA, 15 nt, Human
ucccuacuuccugug

SEQ ID NO: 2018261 - RNA, 16 nt, Human
ucccuacuuccuguga

SEQ ID NO: 2018262 - RNA, 17 nt, Human
ucccucccucuuucccu

SEQ ID NO: 2018263 - RNA, 12 nt, Human
ucccucccugcu

SEQ ID NO: 2018264 - RNA, 16 nt, Human
ucccucccugcuguca

SEQ ID NO: 2018265 - RNA, 15 nt, Human
ucccuacuguaauuu

SEQ ID NO: 2018266 - RNA, 13 nt, Human
ucccuaauaaagc

SEQ ID NO: 2018267 - RNA, 12 nt, Human
ucccuaauaaag

SEQ ID NO: 2018268 - RNA, 11 nt, Human
ucccuaauaaa

SEQ ID NO: 2018269 - RNA, 11 nt, Human
uccccuuccuu

SEQ ID NO: 2018270 - RNA, 19 nt, Human
uccccuuccuaccacccgg

SEQ ID NO: 2018271 - RNA, 21 nt, Human
uccccuuccuaauuccacagc

SEQ ID NO: 2018272 - RNA, 15 nt, Human
uccccuuccauuucu

SEQ ID NO: 2018273 - RNA, 12 nt, Human
uccccuucccag

SEQ ID NO: 2018274 - RNA, 16 nt, Human
uccccuuccccuuccu

SEQ ID NO: 2018275 - RNA, 18 nt, Human
uccccuuccccuuccuuc

SEQ ID NO: 2018276 - RNA, 22 nt, Human
uccccuuccuaauuccacagcu

SEQ ID NO: 2018277 - RNA, 18 nt, Human
uccccuucccgugaccug

SEQ ID NO: 2018278 - RNA, 16 nt, Human
uccccuuccuaccacc

SEQ ID NO: 2018279 - RNA, 12 nt, Human
uccaaagcagag

SEQ ID NO: 2018280 - RNA, 15 nt, Human
uccaaagcagagagc

SEQ ID NO: 2018281 - RNA, 17 nt, Human
uccaaagccaaugugaa

SEQ ID NO: 2018282 - RNA, 20 nt, Human
uccaagaagcccaggaaagg

SEQ ID NO: 2018283 - RNA, 14 nt, Human
uccaagaauuucua

SEQ ID NO: 2018284 - RNA, 22 nt, Human
uccaagaagcccaggaaaggcu

SEQ ID NO: 2018285 - RNA, 13 nt, Human
uccaagcaaaugu

SEQ ID NO: 2018286 - RNA, 19 nt, Human
uccaagaccuucuccuuca

SEQ ID NO: 2018287 - RNA, 16 nt, Human
uccaaacuggaaugag

SEQ ID NO: 2018288 - RNA, 17 nt, Human
uccaaacuggaaugagc

SEQ ID NO: 2018289 - RNA, 16 nt, Human
uccaaaauaaaacuuu

SEQ ID NO: 2018290 - RNA, 17 nt, Human
uccaaaauaaaacuuuu

SEQ ID NO: 2018291 - RNA, 19 nt, Human
uccaaacuaccuuccaguu

SEQ ID NO: 2018292 - RNA, 22 nt, Human
ucauucagauaugauucaaaug

SEQ ID NO: 2018293 - RNA, 24 nt, Human
ucauucaccaguacauucucaguu

SEQ ID NO: 2018294 - RNA, 20 nt, Human
ucauucauauuacaauauuu

SEQ ID NO: 2018295 - RNA, 22 nt, Human
ucauucauauuacaauauuugu

SEQ ID NO: 2018296 - RNA, 14 nt, Human
ucauucagcaucug

SEQ ID NO: 2018297 - RNA, 12 nt, Human
ucauucauauua

SEQ ID NO: 2018298 - RNA, 15 nt, Human
ucauucauauuacaa

SEQ ID NO: 2018299 - RNA, 19 nt, Human
ucauucauauuacaauauu

SEQ ID NO: 2018300 - RNA, 12 nt, Human
ucauuucugauu

SEQ ID NO: 2018301 - RNA, 14 nt, Human
uccaccuacaugag

SEQ ID NO: 2018302 - RNA, 15 nt, Human
uccaccguccccucc

SEQ ID NO: 2018303 - RNA, 14 nt, Human
uccaccguccccuc

SEQ ID NO: 2018304 - RNA, 12 nt, Human
uccaccugccag

SEQ ID NO: 2018305 - RNA, 14 nt, Human
uccacaagagccca

SEQ ID NO: 2018306 - RNA, 14 nt, Human
uccacaacacacag

SEQ ID NO: 2018307 - RNA, 17 nt, Human
uccagcaggagggacag

SEQ ID NO: 2018308 - RNA, 22 nt, Human
uccagcaggagggacagucuca

SEQ ID NO: 2018309 - RNA, 12 nt, Human
uccagcaggccc

SEQ ID NO: 2018310 - RNA, 13 nt, Human
uccagcaggccca

SEQ ID NO: 2018311 - RNA, 15 nt, Human
uccagcaggcccaug

SEQ ID NO: 2018312 - RNA, 22 nt, Human
uccagcaggcccaugggaggcu

SEQ ID NO: 2018313 - RNA, 23 nt, Human
uccagccaaagccuccuccagcc

SEQ ID NO: 2018314 - RNA, 12 nt, Human
uccagcaggagg

SEQ ID NO: 2018315 - RNA, 12 nt, Human
uccacuuggucu

SEQ ID NO: 2018316 - RNA, 13 nt, Human
uccacuuggucug

SEQ ID NO: 2018317 - RNA, 13 nt, Human
uccaccugccagg

SEQ ID NO: 2018318 - RNA, 13 nt, Human
uccaccucuggga

SEQ ID NO: 2018319 - RNA, 16 nt, Human
uccagaacucuuccuc

SEQ ID NO: 2018320 - RNA, 18 nt, Human
uccagaacucuuccucca

SEQ ID NO: 2018321 - RNA, 14 nt, Human
uccacuuggucugu

SEQ ID NO: 2018322 - RNA, 16 nt, Human
uccagaaaugucccuu

SEQ ID NO: 2018323 - RNA, 19 nt, Human
uccagaaaugucccuuucu

SEQ ID NO: 2018324 - RNA, 20 nt, Human
uccagaaaugucccuuucuu

SEQ ID NO: 2018325 - RNA, 22 nt, Human
uccagaaaugucccuuucuucu

SEQ ID NO: 2018326 - RNA, 21 nt, Human
ucaucucuagggaccagaacc

SEQ ID NO: 2018327 - RNA, 22 nt, Human
ucaucucuagggaccagaacca

SEQ ID NO: 2018328 - RNA, 16 nt, Human
ucaucuguaagcuguu

SEQ ID NO: 2018329 - RNA, 11 nt, Human
ucaucuguaag

SEQ ID NO: 2018330 - RNA, 15 nt, Human
ucauacccaccccca

SEQ ID NO: 2018331 - RNA, 14 nt, Human
ucauacccaccccc

SEQ ID NO: 2018332 - RNA, 20 nt, Human
ucauacccacccccacccaa

SEQ ID NO: 2018333 - RNA, 21 nt, Human
ucauacccacccccacccaag

SEQ ID NO: 2018334 - RNA, 19 nt, Human
ucaugcuccccugugccag

SEQ ID NO: 2018335 - RNA, 16 nt, Human
ucauuaggugugacug

SEQ ID NO: 2018336 - RNA, 23 nt, Human
ucauucaccaguacauucucagu

SEQ ID NO: 2018337 - RNA, 18 nt, Human
ucauuaggugugacugaa

SEQ ID NO: 2018338 - RNA, 21 nt, Human
ucauuaggugugacugaauuu

SEQ ID NO: 2018339 - RNA, 22 nt, Human
ucauuaggugugacugaauuuc

SEQ ID NO: 2018340 - RNA, 13 nt, Human
ucauaaugacuua

SEQ ID NO: 2018341 - RNA, 15 nt, Human
ucaguuacucuucag

SEQ ID NO: 2018342 - RNA, 19 nt, Human
ucaguuaugacauccacaa

SEQ ID NO: 2018343 - RNA, 23 nt, Human
ucaguuauugucccuggcuuccu

SEQ ID NO: 2018344 - RNA, 12 nt, Human
ucaguucaaagu

SEQ ID NO: 2018345 - RNA, 13 nt, Human
ucaguucaaaguc

SEQ ID NO: 2018346 - RNA, 16 nt, Human
ucaguucaaagucaug

SEQ ID NO: 2018347 - RNA, 20 nt, Human
ucaguucaaagucaugaugu

SEQ ID NO: 2018348 - RNA, 21 nt, Human
ucaguucaaagucaugauguu

SEQ ID NO: 2018349 - RNA, 22 nt, Human
ucaguucaaagucaugauguuu

SEQ ID NO: 2018350 - RNA, 17 nt, Human
ucaguuguuaguguguc

SEQ ID NO: 2018351 - RNA, 15 nt, Human
ucauaauuauuauuu

SEQ ID NO: 2018352 - RNA, 13 nt, Human
ucauacccacccc

SEQ ID NO: 2018353 - RNA, 17 nt, Human
ucagugugacugaucuc

SEQ ID NO: 2018354 - RNA, 13 nt, Human
ucagugugacuga

SEQ ID NO: 2018355 - RNA, 11 nt, Human
ucaguguacau

SEQ ID NO: 2018356 - RNA, 18 nt, Human
ucaguguacacucugagu

SEQ ID NO: 2018357 - RNA, 23 nt, Human
ucagugguuggcaauuguuucaa

SEQ ID NO: 2018358 - RNA, 15 nt, Human
ucagucuggcccuuc

SEQ ID NO: 2018359 - RNA, 20 nt, Human
ucaguggggcccauggaugu

SEQ ID NO: 2018360 - RNA, 24 nt, Human
ucagucugauucccaagcucugcu

SEQ ID NO: 2018361 - RNA, 20 nt, Human
ucacgccuguaauccuagca

SEQ ID NO: 2018362 - RNA, 16 nt, Human
ucacgcuccuuucuga

SEQ ID NO: 2018363 - RNA, 19 nt, Human
ucacgccuguaauccuagc

SEQ ID NO: 2018364 - RNA, 16 nt, Human
ucacgccacugcacua

SEQ ID NO: 2018365 - RNA, 13 nt, Human
ucacgccacugca

SEQ ID NO: 2018366 - RNA, 14 nt, Human
ucacgccacugcac

SEQ ID NO: 2018367 - RNA, 18 nt, Human
ucaccuuuguccccaccg

SEQ ID NO: 2018368 - RNA, 17 nt, Human
ucaccuuuguccccacc

SEQ ID NO: 2018369 - RNA, 15 nt, Human
ucaccuuugucccca

SEQ ID NO: 2018370 - RNA, 14 nt, Human
ucaccuuugucccc

SEQ ID NO: 2018371 - RNA, 22 nt, Human
ucaccuuuguccccaccgcaga

SEQ ID NO: 2018372 - RNA, 16 nt, Human
ucacgagucauccaga

SEQ ID NO: 2018373 - RNA, 23 nt, Human
ucacagggacugaaaaccucucc

SEQ ID NO: 2018374 - RNA, 14 nt, Human
ucacaggcugggcu

SEQ ID NO: 2018375 - RNA, 18 nt, Human
ucacaggcugggcugggc

SEQ ID NO: 2018376 - RNA, 19 nt, Human
ucacaggcugggcugggca

SEQ ID NO: 2018377 - RNA, 20 nt, Human
ucacaggcugggcugggcac

SEQ ID NO: 2018378 - RNA, 19 nt, Human
ucacaggccccaggaaagg

SEQ ID NO: 2018379 - RNA, 12 nt, Human
ucacaggcaggu

SEQ ID NO: 2018380 - RNA, 15 nt, Human
ucacaggcaggucca

SEQ ID NO: 2018381 - RNA, 14 nt, Human
ucaccucacucagc

SEQ ID NO: 2018382 - RNA, 15 nt, Human
ucaccucacucagca

SEQ ID NO: 2018383 - RNA, 16 nt, Human
ucaccucacucagcac

SEQ ID NO: 2018384 - RNA, 18 nt, Human
ucaccucacucagcacca

SEQ ID NO: 2018385 - RNA, 19 nt, Human
ucaccucacucagcaccac

SEQ ID NO: 2018386 - RNA, 20 nt, Human
ucaccucacucagcaccacu

SEQ ID NO: 2018387 - RNA, 21 nt, Human
ucaccucacucagcaccacuc

SEQ ID NO: 2018388 - RNA, 23 nt, Human
ucaccucacucagcaccacucaa

SEQ ID NO: 2018389 - RNA, 12 nt, Human
ucaccuuugucc

SEQ ID NO: 2018390 - RNA, 14 nt, Human
ucaccuuucccauc

SEQ ID NO: 2018391 - RNA, 15 nt, Human
ucaccuugguuccug

SEQ ID NO: 2018392 - RNA, 17 nt, Human
ucaccuugguuccuggg

SEQ ID NO: 2018393 - RNA, 13 nt, Human
ucaccuuuauucu

SEQ ID NO: 2018394 - RNA, 14 nt, Human
ucacucuccuuggu

SEQ ID NO: 2018395 - RNA, 12 nt, Human
ucacucuccuug

SEQ ID NO: 2018396 - RNA, 19 nt, Human
ucacucuacuuagcauguc

SEQ ID NO: 2018397 - RNA, 20 nt, Human
ucacucuacuuagcaugucc

SEQ ID NO: 2018398 - RNA, 11 nt, Human
ucacucucagg

SEQ ID NO: 2018399 - RNA, 13 nt, Human
ucacucuggcagc

SEQ ID NO: 2018400 - RNA, 12 nt, Human
ucacucuggcag

SEQ ID NO: 2018401 - RNA, 23 nt, Human
ucacucuccuuggugucgggcau

SEQ ID NO: 2018402 - RNA, 12 nt, Human
ucacucucagga

SEQ ID NO: 2018403 - RNA, 22 nt, Human
ucacucuggcagcucagagagg

SEQ ID NO: 2018404 - RNA, 20 nt, Human
ucacucuggcagcucagaga

SEQ ID NO: 2018405 - RNA, 19 nt, Human
ucacucuggcagcucagag

SEQ ID NO: 2018406 - RNA, 18 nt, Human
ucacucuggcagcucaga

SEQ ID NO: 2018407 - RNA, 17 nt, Human
ucacucuggcagcucag

SEQ ID NO: 2018408 - RNA, 16 nt, Human
ucacucuggcagcuca

SEQ ID NO: 2018409 - RNA, 15 nt, Human
ucacucuggcagcuc

SEQ ID NO: 2018410 - RNA, 14 nt, Human
ucacucuggcagcu

SEQ ID NO: 2018411 - RNA, 17 nt, Human
ucacggaagagccuugc

SEQ ID NO: 2018412 - RNA, 16 nt, Human
ucacggaagagccuug

SEQ ID NO: 2018413 - RNA, 14 nt, Human
ucacggaagagccu

SEQ ID NO: 2018414 - RNA, 13 nt, Human
ucacggcucacug

SEQ ID NO: 2018415 - RNA, 15 nt, Human
ucacggcucacugca

SEQ ID NO: 2018416 - RNA, 20 nt, Human
ucacggcucacugcagccuc

SEQ ID NO: 2018417 - RNA, 13 nt, Human
ucacuccuugaaa

SEQ ID NO: 2018418 - RNA, 14 nt, Human
ucacucuaagaugu

SEQ ID NO: 2018419 - RNA, 21 nt, Human
ucacucuaagauguuauauuu

SEQ ID NO: 2018420 - RNA, 22 nt, Human
ucacucuaagauguuauauuuu

SEQ ID NO: 2018421 - RNA, 15 nt, Human
ucacucuaagauguu

SEQ ID NO: 2018422 - RNA, 16 nt, Human
ucacucuaagauguua

SEQ ID NO: 2018423 - RNA, 17 nt, Human
ucacucuaagauguuau

SEQ ID NO: 2018424 - RNA, 18 nt, Human
ucacuccuaccugguaau

SEQ ID NO: 2018425 - RNA, 14 nt, Human
ucagaccagcucuu

SEQ ID NO: 2018426 - RNA, 22 nt, Human
ucagacauagaauuaacacaug

SEQ ID NO: 2018427 - RNA, 19 nt, Human
ucagacauagaauuaacac

SEQ ID NO: 2018428 - RNA, 17 nt, Human
ucagaaaugacuuuuug

SEQ ID NO: 2018429 - RNA, 20 nt, Human
ucagacagcugccugggauc

SEQ ID NO: 2018430 - RNA, 19 nt, Human
ucagacagcugccugggau

SEQ ID NO: 2018431 - RNA, 18 nt, Human
ucagacagcugccuggga

SEQ ID NO: 2018432 - RNA, 17 nt, Human
ucagacagcugccuggg

SEQ ID NO: 2018433 - RNA, 16 nt, Human
ucagacagcugccugg

SEQ ID NO: 2018434 - RNA, 15 nt, Human
ucagacagcugccug

SEQ ID NO: 2018435 - RNA, 18 nt, Human
ucagcacgauuucuguuu

SEQ ID NO: 2018436 - RNA, 22 nt, Human
ucagcaaggcgcuaacuugcuu

SEQ ID NO: 2018437 - RNA, 24 nt, Human
ucagcaaggcgcuaacuugcuuaa

SEQ ID NO: 2018438 - RNA, 18 nt, Human
ucagcaaggccaccucuu

SEQ ID NO: 2018439 - RNA, 23 nt, Human
ucagcaaggccaccucuuccugg

SEQ ID NO: 2018440 - RNA, 19 nt, Human
ucagcaaggcgcuaacuug

SEQ ID NO: 2018441 - RNA, 20 nt, Human
ucagcaaggcgcuaacuugc

SEQ ID NO: 2018442 - RNA, 12 nt, Human
ucagcaaggcca

SEQ ID NO: 2018443 - RNA, 13 nt, Human
ucagcaaggccac

SEQ ID NO: 2018444 - RNA, 14 nt, Human
ucagcaaggccacc

SEQ ID NO: 2018445 - RNA, 15 nt, Human
ucagcaaggccaccu

SEQ ID NO: 2018446 - RNA, 16 nt, Human
ucagcaaggccaccuc

SEQ ID NO: 2018447 - RNA, 17 nt, Human
ucagcaaggccaccucu

SEQ ID NO: 2018448 - RNA, 19 nt, Human
ucagcacgauuucuguuua

SEQ ID NO: 2018449 - RNA, 23 nt, Human
ucagagugcaagccccugcucca

SEQ ID NO: 2018450 - RNA, 22 nt, Human
ucagaguugaugguuguacaua

SEQ ID NO: 2018451 - RNA, 20 nt, Human
ucagcaaacuuguugaauuu

SEQ ID NO: 2018452 - RNA, 21 nt, Human
ucagaggggaauaaacuguug

SEQ ID NO: 2018453 - RNA, 12 nt, Human
ucagaggcccca

SEQ ID NO: 2018454 - RNA, 22 nt, Human
ucagaggccccaauaccccaug

SEQ ID NO: 2018455 - RNA, 15 nt, Human
ucacugcuuaacuuc

SEQ ID NO: 2018456 - RNA, 17 nt, Human
ucacugcuuaacuucac

SEQ ID NO: 2018457 - RNA, 18 nt, Human
ucacugcuuaacuucaca

SEQ ID NO: 2018458 - RNA, 20 nt, Human
ucacugcuuaacuucacaua

SEQ ID NO: 2018459 - RNA, 22 nt, Human
ucacucugucgcccagucugga

SEQ ID NO: 2018460 - RNA, 19 nt, Human
ucacucugucgcccagucu

SEQ ID NO: 2018461 - RNA, 12 nt, Human
ucacucugucgc

SEQ ID NO: 2018462 - RNA, 16 nt, Human
ucacucugucgcccag

SEQ ID NO: 2018463 - RNA, 13 nt, Human
ucacuggcauggu

SEQ ID NO: 2018464 - RNA, 21 nt, Human
ucacuggccacaguuguuuga

SEQ ID NO: 2018465 - RNA, 22 nt, Human
ucagaaauaauaaaaaauuuca

SEQ ID NO: 2018466 - RNA, 20 nt, Human
ucagaaagggcagaaguagg

SEQ ID NO: 2018467 - RNA, 17 nt, Human
ucagaaauacagauaaa

SEQ ID NO: 2018468 - RNA, 22 nt, Human
ucagaaauacagauaaaugauu

SEQ ID NO: 2018469 - RNA, 22 nt, Human
ucagaaacaaagcauuugacuu

SEQ ID NO: 2018470 - RNA, 17 nt, Human
ucagaaagccuuucauu

SEQ ID NO: 2018471 - RNA, 23 nt, Human
ucagaaagccuuucauuuugcuu

SEQ ID NO: 2018472 - RNA, 23 nt, Human
ucagaaaaaagguucuuugugua

SEQ ID NO: 2018473 - RNA, 10 nt, Human
ucagaaaaaa

SEQ ID NO: 2018474 - RNA, 12 nt, Human
ucacuuuuauuu

SEQ ID NO: 2018475 - RNA, 22 nt, Human
ucacuuuuauuuagcaccaggg

SEQ ID NO: 2018476 - RNA, 23 nt, Human
uauuucugaggagccugcaacau

SEQ ID NO: 2018477 - RNA, 11 nt, Human
uauuucuccuu

SEQ ID NO: 2018478 - RNA, 12 nt, Human
uauuucuccuuu

SEQ ID NO: 2018479 - RNA, 15 nt, Human
uauuucuccuuuugu

SEQ ID NO: 2018480 - RNA, 16 nt, Human
uauuuggaugcagagu

SEQ ID NO: 2018481 - RNA, 19 nt, Human
uauuuggaugcagaguuca

SEQ ID NO: 2018482 - RNA, 15 nt, Human
uauuuggaugcagag

SEQ ID NO: 2018483 - RNA, 14 nt, Human
uauuuggaauuaga

SEQ ID NO: 2018484 - RNA, 15 nt, Human
uauuuggaauuagaa

SEQ ID NO: 2018485 - RNA, 16 nt, Human
uauuuggaauuagaac

SEQ ID NO: 2018486 - RNA, 20 nt, Human
uauuuggaugcagaguucag

SEQ ID NO: 2018487 - RNA, 23 nt, Human
uauuuuaguggacccugaaaugu

SEQ ID NO: 2018488 - RNA, 21 nt, Human
uauuuuaguggacccugaaau

SEQ ID NO: 2018489 - RNA, 22 nt, Human
uauuuuaguggacccugaaaug

SEQ ID NO: 2018490 - RNA, 22 nt, Human
uauuuuagguguaaaauaauua

SEQ ID NO: 2018491 - RNA, 24 nt, Human
uauuuauuaaauuuuuuuguauga

SEQ ID NO: 2018492 - RNA, 21 nt, Human
uauuuauucugggaauguaua

SEQ ID NO: 2018493 - RNA, 12 nt, Human
uauuuauugaaa

SEQ ID NO: 2018494 - RNA, 16 nt, Human
uauuuauugaaaugau

SEQ ID NO: 2018495 - RNA, 20 nt, Human
uauuuauugaaaugauuuca

SEQ ID NO: 2018496 - RNA, 12 nt, Human
uauuuauugacu

SEQ ID NO: 2018497 - RNA, 15 nt, Human
uauuuauugacucuu

SEQ ID NO: 2018498 - RNA, 17 nt, Human
uauuuauugacucuuga

SEQ ID NO: 2018499 - RNA, 21 nt, Human
uauuuauugacucuugaguug

SEQ ID NO: 2018500 - RNA, 15 nt, Human
uauuuauuaaauuuu

SEQ ID NO: 2018501 - RNA, 23 nt, Human
uauuuauuaaaugcccagccccu

SEQ ID NO: 2018502 - RNA, 20 nt, Human
uaucugaaaauguaugugua

SEQ ID NO: 2018503 - RNA, 13 nt, Human
uaucugaaaguca

SEQ ID NO: 2018504 - RNA, 15 nt, Human
uaucugaaaauguau

SEQ ID NO: 2018505 - RNA, 14 nt, Human
uaucugaaaaugua

SEQ ID NO: 2018506 - RNA, 15 nt, Human
uauuuuuuuacuaau

SEQ ID NO: 2018507 - RNA, 12 nt, Human
uauuuuuuuccu

SEQ ID NO: 2018508 - RNA, 18 nt, Human
uauuuuuuuccuuacaua

SEQ ID NO: 2018509 - RNA, 19 nt, Human
uauuuuuuuccuuacauaa

SEQ ID NO: 2018510 - RNA, 16 nt, Human
uauuuuuuucugaaau

SEQ ID NO: 2018511 - RNA, 17 nt, Human
uauuuuuuucugaaauu

SEQ ID NO: 2018512 - RNA, 22 nt, Human
uauuuuuuucugaauuauuuuc

SEQ ID NO: 2018513 - RNA, 17 nt, Human
ucaaaaaggcuuauaaa

SEQ ID NO: 2018514 - RNA, 19 nt, Human
ucaaaaaggcuuauaaaac

SEQ ID NO: 2018515 - RNA, 20 nt, Human
ucaaaaaggcuuauaaaaca

SEQ ID NO: 2018516 - RNA, 21 nt, Human
ucaaaaaggcuuauaaaacag

SEQ ID NO: 2018517 - RNA, 14 nt, Human
ucaaacucuuaaaa

SEQ ID NO: 2018518 - RNA, 15 nt, Human
ucaaacgugaaaaug

SEQ ID NO: 2018519 - RNA, 16 nt, Human
ucaaacgugaaaaugc

SEQ ID NO: 2018520 - RNA, 22 nt, Human
ucaaaacgguuuuacugcagcu

SEQ ID NO: 2018521 - RNA, 23 nt, Human
ucaaacggccucacuaggcuucu

SEQ ID NO: 2018522 - RNA, 23 nt, Human
uauuuuauacucauggaagagau

SEQ ID NO: 2018523 - RNA, 16 nt, Human
uauuuuauguugcaua

SEQ ID NO: 2018524 - RNA, 15 nt, Human
uauuuuauguugcau

SEQ ID NO: 2018525 - RNA, 21 nt, Human
uauuuucaacgcagcccugcu

SEQ ID NO: 2018526 - RNA, 17 nt, Human
uauuuugaaauggaaau

SEQ ID NO: 2018527 - RNA, 21 nt, Human
uauuuugaagugagaaaauga

SEQ ID NO: 2018528 - RNA, 13 nt, Human
uauuuuuguuguu

SEQ ID NO: 2018529 - RNA, 13 nt, Human
ucaauaggaaaaa

SEQ ID NO: 2018530 - RNA, 14 nt, Human
ucaaguggcaaagc

SEQ ID NO: 2018531 - RNA, 19 nt, Human
ucaaguggcaaagcuguuc

SEQ ID NO: 2018532 - RNA, 22 nt, Human
ucaaguggcaaagcuguucuuc

SEQ ID NO: 2018533 - RNA, 14 nt, Human
ucaauaggaaaaac

SEQ ID NO: 2018534 - RNA, 23 nt, Human
ucaauagcccaggauauauuuua

SEQ ID NO: 2018535 - RNA, 14 nt, Human
ucaaugcacugaca

SEQ ID NO: 2018536 - RNA, 19 nt, Human
ucaaugguuuaacauauaa

SEQ ID NO: 2018537 - RNA, 22 nt, Human
ucaaugcuguuuggguuuccaa

SEQ ID NO: 2018538 - RNA, 18 nt, Human
ucaauuacaggaaguacu

SEQ ID NO: 2018539 - RNA, 13 nt, Human
ucaauuacaggaa

SEQ ID NO: 2018540 - RNA, 18 nt, Human
ucaaugcacugacauugu

SEQ ID NO: 2018541 - RNA, 17 nt, Human
ucaaugcuauaacuaug

SEQ ID NO: 2018542 - RNA, 22 nt, Human
ucaaugccccugaauuuaaaua

SEQ ID NO: 2018543 - RNA, 17 nt, Human
ucaaugcuggagaaaaa

SEQ ID NO: 2018544 - RNA, 15 nt, Human
ucaaugcuguuuggg

SEQ ID NO: 2018545 - RNA, 19 nt, Human
ucaauuacaggaaguacug

SEQ ID NO: 2018546 - RNA, 21 nt, Human
ucacacaguauuacuucugcu

SEQ ID NO: 2018547 - RNA, 22 nt, Human
ucacacaguauuacuucugcua

SEQ ID NO: 2018548 - RNA, 13 nt, Human
ucacacagugagu

SEQ ID NO: 2018549 - RNA, 21 nt, Human
ucacacaugagcaucaggcca

SEQ ID NO: 2018550 - RNA, 22 nt, Human
ucacacagugagucgaggacag

SEQ ID NO: 2018551 - RNA, 23 nt, Human
ucacacagugagucgaggacagg

SEQ ID NO: 2018552 - RNA, 14 nt, Human
ucacaggaaguaga

SEQ ID NO: 2018553 - RNA, 19 nt, Human
ucacaggaaguagaggagg

SEQ ID NO: 2018554 - RNA, 11 nt, Human
ucacaggcagg

SEQ ID NO: 2018555 - RNA, 16 nt, Human
ucaaacuuuacuaugg

SEQ ID NO: 2018556 - RNA, 15 nt, Human
ucaaacuuuacuaug

SEQ ID NO: 2018557 - RNA, 13 nt, Human
ucaaacuuuacua

SEQ ID NO: 2018558 - RNA, 22 nt, Human
ucaaacucuugaccucagguga

SEQ ID NO: 2018559 - RNA, 12 nt, Human
ucaaacugaaaa

SEQ ID NO: 2018560 - RNA, 21 nt, Human
ucaaacugaaaagcugagacc

SEQ ID NO: 2018561 - RNA, 18 nt, Human
ucaacuaaaguuguacuu

SEQ ID NO: 2018562 - RNA, 20 nt, Human
ucaacuaaaguuguacuuua

SEQ ID NO: 2018563 - RNA, 13 nt, Human
ucaaccuccuggg

SEQ ID NO: 2018564 - RNA, 14 nt, Human
ucaaccuccugggc

SEQ ID NO: 2018565 - RNA, 21 nt, Human
ucaacuaaaguuguacuuuaa

SEQ ID NO: 2018566 - RNA, 22 nt, Human
ucaacuaaaguuguacuuuaaa

SEQ ID NO: 2018567 - RNA, 15 nt, Human
ucaacuaaauccaaa

SEQ ID NO: 2018568 - RNA, 18 nt, Human
ucaagcuccaucuuauuu

SEQ ID NO: 2018569 - RNA, 19 nt, Human
ucaaggauccugagccaga

SEQ ID NO: 2018570 - RNA, 18 nt, Human
ucaaggauccugagccag

SEQ ID NO: 2018571 - RNA, 20 nt, Human
ucaaggauccugagccagau

SEQ ID NO: 2018572 - RNA, 23 nt, Human
ucaaggauccugagccagauuuc

SEQ ID NO: 2018573 - RNA, 22 nt, Human
ucaagugauucuccugccucag

SEQ ID NO: 2018574 - RNA, 22 nt, Human
ucaagccuagauguuuuauaca

SEQ ID NO: 2018575 - RNA, 15 nt, Human
ucaagcccaggaggg

SEQ ID NO: 2018576 - RNA, 15 nt, Human
ucaagcgauucucuu

SEQ ID NO: 2018577 - RNA, 16 nt, Human
ucaagcgauucuucug

SEQ ID NO: 2018578 - RNA, 17 nt, Human
ucaagcgauucuucugc

SEQ ID NO: 2018579 - RNA, 22 nt, Human
guuuucggugccaucagugccc

SEQ ID NO: 2018580 - RNA, 16 nt, Human
guuuucaguguacaug

SEQ ID NO: 2018581 - RNA, 17 nt, Human
guuuucaguguacaugg

SEQ ID NO: 2018582 - RNA, 22 nt, Human
guuuucaggugcucaaaaugca

SEQ ID NO: 2018583 - RNA, 16 nt, Human
guuuguugugaggauu

SEQ ID NO: 2018584 - RNA, 18 nt, Human
guuuguucuuguuuuuaa

SEQ ID NO: 2018585 - RNA, 10 nt, Human
guuuguuuca

SEQ ID NO: 2018586 - RNA, 20 nt, Human
guuuuuaaaaucuuauuaaa

SEQ ID NO: 2018587 - RNA, 13 nt, Human
guuuuuaaaaucu

SEQ ID NO: 2018588 - RNA, 15 nt, Human
guuuuuaaaaucuua

SEQ ID NO: 2018589 - RNA, 16 nt, Human
guuuuguuuuuugagu

SEQ ID NO: 2018590 - RNA, 14 nt, Human
guuuuuaaaaauua

SEQ ID NO: 2018591 - RNA, 15 nt, Human
guuuuuaaaaauuag

SEQ ID NO: 2018592 - RNA, 19 nt, Human
guuuuuauggcuuuugugc

SEQ ID NO: 2018593 - RNA, 22 nt, Human
guuuuuauggcuuuugugcauu

SEQ ID NO: 2018594 - RNA, 23 nt, Human
guuuuuauggcuuuugugcauua

SEQ ID NO: 2018595 - RNA, 19 nt, Human
guuuugugaaauuuuucau

SEQ ID NO: 2018596 - RNA, 20 nt, Human
guuuugugaaauuuuucaua

SEQ ID NO: 2018597 - RNA, 22 nt, Human
guuuugugaaauuuuucauauu

SEQ ID NO: 2018598 - RNA, 23 nt, Human
guuuugugaaauuuuucauauuu

SEQ ID NO: 2018599 - RNA, 13 nt, Human
guuuugugaaauu

SEQ ID NO: 2018600 - RNA, 14 nt, Human
guuuugugaaauuu

SEQ ID NO: 2018601 - RNA, 18 nt, Human
guuuugugaaauuuuuca

SEQ ID NO: 2018602 - RNA, 13 nt, Human
guuuuguuuuuug

SEQ ID NO: 2018603 - RNA, 19 nt, Human
guuuucucuugagagggug

SEQ ID NO: 2018604 - RNA, 12 nt, Human
guuuucucuuga

SEQ ID NO: 2018605 - RNA, 13 nt, Human
guuuucucucuau

SEQ ID NO: 2018606 - RNA, 16 nt, Human
guuuuuauuucuccuu

SEQ ID NO: 2018607 - RNA, 17 nt, Human
guuuuuauuucuccuuu

SEQ ID NO: 2018608 - RNA, 21 nt, Human
guuuuucaguucaaagucaug

SEQ ID NO: 2018609 - RNA, 20 nt, Human
guuuuucaguucaaagucau

SEQ ID NO: 2018610 - RNA, 12 nt, Human
guuuuucaguuc

SEQ ID NO: 2018611 - RNA, 12 nt, Human
uaaaaaaaagaa

SEQ ID NO: 2018612 - RNA, 14 nt, Human
uaaaaaaaagaaaa

SEQ ID NO: 2018613 - RNA, 20 nt, Human
uaaaaaaaacucuuuaacuu

SEQ ID NO: 2018614 - RNA, 11 nt, Human
uaaaaaaaaga

SEQ ID NO: 2018615 - RNA, 17 nt, Human
uaaaaaaaagaaaaaag

SEQ ID NO: 2018616 - RNA, 15 nt, Human
uaaaaaaaagaaaaa

SEQ ID NO: 2018617 - RNA, 16 nt, Human
uaaaaaaaagaaaaaa

SEQ ID NO: 2018618 - RNA, 14 nt, Human
uaaaaaaacagcuu

SEQ ID NO: 2018619 - RNA, 10 nt, Human
uaaaaaaaga

SEQ ID NO: 2018620 - RNA, 11 nt, Human
uaaaaaaagaa

SEQ ID NO: 2018621 - RNA, 14 nt, Human
uaaaaaaagaaaaa

SEQ ID NO: 2018622 - RNA, 15 nt, Human
uaaaaaaagaaaaaa

SEQ ID NO: 2018623 - RNA, 11 nt, Human
uaaaaaacacu

SEQ ID NO: 2018624 - RNA, 14 nt, Human
uaaaaacugaaguu

SEQ ID NO: 2018625 - RNA, 15 nt, Human
uaaaaacugaaguuc

SEQ ID NO: 2018626 - RNA, 16 nt, Human
uaaaaacugaaguucu

SEQ ID NO: 2018627 - RNA, 17 nt, Human
uaaaaagaaaacaaaac

SEQ ID NO: 2018628 - RNA, 21 nt, Human
uaaaaagaaaacaaaaccaaa

SEQ ID NO: 2018629 - RNA, 15 nt, Human
uaaaaacaaaaggca

SEQ ID NO: 2018630 - RNA, 21 nt, Human
uaaaaaauuuaaaaagcccaa

SEQ ID NO: 2018631 - RNA, 14 nt, Human
uaaaaaaugacaaa

SEQ ID NO: 2018632 - RNA, 15 nt, Human
uaaaaaagcugugug

SEQ ID NO: 2018633 - RNA, 21 nt, Human
uaaaaaacuuucuacucauuu

SEQ ID NO: 2018634 - RNA, 23 nt, Human
uaaaaaacugcugacuguuuucu

SEQ ID NO: 2018635 - RNA, 20 nt, Human
uaaaaaacugcugacuguuu

SEQ ID NO: 2018636 - RNA, 12 nt, Human
uaaaaaacacug

SEQ ID NO: 2018637 - RNA, 20 nt, Human
guuuccuggcacugcuucca

SEQ ID NO: 2018638 - RNA, 16 nt, Human
guuuccuggcacugcu

SEQ ID NO: 2018639 - RNA, 14 nt, Human
guuuccugcaggcc

SEQ ID NO: 2018640 - RNA, 13 nt, Human
guuuccugcccug

SEQ ID NO: 2018641 - RNA, 17 nt, Human
guuuccugcccugggag

SEQ ID NO: 2018642 - RNA, 22 nt, Human
guuuccuggcacugcuuccagu

SEQ ID NO: 2018643 - RNA, 21 nt, Human
guuuccuggcacugcuuccag

SEQ ID NO: 2018644 - RNA, 16 nt, Human
guuuccuuauauuaug

SEQ ID NO: 2018645 - RNA, 16 nt, Human
guuuccugcaggccag

SEQ ID NO: 2018646 - RNA, 22 nt, Human
guuuccugcccugggaggcagu

SEQ ID NO: 2018647 - RNA, 23 nt, Human
guuucagguagaggugcaugccu

SEQ ID NO: 2018648 - RNA, 14 nt, Human
guuucagaaaugug

SEQ ID NO: 2018649 - RNA, 18 nt, Human
guuucagaaauguguuau

SEQ ID NO: 2018650 - RNA, 19 nt, Human
guuucagguagaggugcau

SEQ ID NO: 2018651 - RNA, 16 nt, Human
guuuaguaaucauauu

SEQ ID NO: 2018652 - RNA, 17 nt, Human
guuuagauuuuguguuu

SEQ ID NO: 2018653 - RNA, 22 nt, Human
guuuagauuuuguguuuauucu

SEQ ID NO: 2018654 - RNA, 12 nt, Human
guuuagauuugc

SEQ ID NO: 2018655 - RNA, 22 nt, Human
guuuagauuugccauagaguac

SEQ ID NO: 2018656 - RNA, 14 nt, Human
guuuagauuuugug

SEQ ID NO: 2018657 - RNA, 18 nt, Human
guuuagaugaaugucagu

SEQ ID NO: 2018658 - RNA, 17 nt, Human
guuuagaugaaugucag

SEQ ID NO: 2018659 - RNA, 20 nt, Human
guuuaggauguugaaaaagu

SEQ ID NO: 2018660 - RNA, 19 nt, Human
gguugggagaaugucagua

SEQ ID NO: 2018661 - RNA, 23 nt, Human
gguugggacccaguggcagggca

SEQ ID NO: 2018662 - RNA, 16 nt, Human
guuuacucacagccag

SEQ ID NO: 2018663 - RNA, 17 nt, Human
guuuacucacagccagc

SEQ ID NO: 2018664 - RNA, 13 nt, Human
guuuacuuuaacu

SEQ ID NO: 2018665 - RNA, 14 nt, Human
guuuacuuuaacuu

SEQ ID NO: 2018666 - RNA, 13 nt, Human
guuuagaaagcuu

SEQ ID NO: 2018667 - RNA, 17 nt, Human
guuuagaaagcuugccc

SEQ ID NO: 2018668 - RNA, 21 nt, Human
gguuggccccugcccggcugc

SEQ ID NO: 2018669 - RNA, 19 nt, Human
gguuggcugggaaaucgag

SEQ ID NO: 2018670 - RNA, 19 nt, Human
gguugggacccaguggcag

SEQ ID NO: 2018671 - RNA, 21 nt, Human
gguugggacccaguggcaggg

SEQ ID NO: 2018672 - RNA, 22 nt, Human
gguugggacccaguggcagggc

SEQ ID NO: 2018673 - RNA, 18 nt, Human
guuuguuccccaagacau

SEQ ID NO: 2018674 - RNA, 19 nt, Human
guuuguggaaaaugaaaau

SEQ ID NO: 2018675 - RNA, 17 nt, Human
guuuguaaauuaacuuu

SEQ ID NO: 2018676 - RNA, 16 nt, Human
guuugguuuuaaaaua

SEQ ID NO: 2018677 - RNA, 17 nt, Human
guuugguuuuaaaauac

SEQ ID NO: 2018678 - RNA, 14 nt, Human
guuugguuuuuauu

SEQ ID NO: 2018679 - RNA, 22 nt, Human
guuugguuuuuauuucuccuuu

SEQ ID NO: 2018680 - RNA, 15 nt, Human
guuuguaaaaaugua

SEQ ID NO: 2018681 - RNA, 19 nt, Human
guuuguaaauuaacuuuua

SEQ ID NO: 2018682 - RNA, 13 nt, Human
guuugucucuucu

SEQ ID NO: 2018683 - RNA, 14 nt, Human
guuugucucuucug

SEQ ID NO: 2018684 - RNA, 15 nt, Human
guuugucucuucugg

SEQ ID NO: 2018685 - RNA, 18 nt, Human
guuugaggaaauuugcag

SEQ ID NO: 2018686 - RNA, 22 nt, Human
guuugaggauuaguuuagaaca

SEQ ID NO: 2018687 - RNA, 14 nt, Human
guuugauaaauagu

SEQ ID NO: 2018688 - RNA, 15 nt, Human
guuugauaaauagug

SEQ ID NO: 2018689 - RNA, 13 nt, Human
guuugaucuuccu

SEQ ID NO: 2018690 - RNA, 21 nt, Human
guuugaucuuccucugcuaaa

SEQ ID NO: 2018691 - RNA, 22 nt, Human
guuugaucuuccucugcuaaau

SEQ ID NO: 2018692 - RNA, 17 nt, Human
guuugauuaaauucuug

SEQ ID NO: 2018693 - RNA, 19 nt, Human
guuugauuaaauucuugca

SEQ ID NO: 2018694 - RNA, 22 nt, Human
guuugauuaaauucuugcaaag

SEQ ID NO: 2018695 - RNA, 20 nt, Human
guuugaugcauuaaaagaaa

SEQ ID NO: 2018696 - RNA, 14 nt, Human
guuucuuuguaaug

SEQ ID NO: 2018697 - RNA, 19 nt, Human
guuucuuucucugaggaca

SEQ ID NO: 2018698 - RNA, 20 nt, Human
guuucuuucucugaggacaa

SEQ ID NO: 2018699 - RNA, 12 nt, Human
guuucuuugaau

SEQ ID NO: 2018700 - RNA, 17 nt, Human
guuucuuuguaaugaaa

SEQ ID NO: 2018701 - RNA, 17 nt, Human
guuucuuugaauuuuca

SEQ ID NO: 2018702 - RNA, 18 nt, Human
guuucuuugaauuuucau

SEQ ID NO: 2018703 - RNA, 19 nt, Human
guuucuuugaauuuucauu

SEQ ID NO: 2018704 - RNA, 20 nt, Human
guuucuuugaauuuucauuu

SEQ ID NO: 2018705 - RNA, 16 nt, Human
guuugaaccaagaacu

SEQ ID NO: 2018706 - RNA, 21 nt, Human
guuucuuugaauuuucauuuu

SEQ ID NO: 2018707 - RNA, 20 nt, Human
guuucuuugaucaugaauaa

SEQ ID NO: 2018708 - RNA, 15 nt, Human
guuucuaaagcugcc

SEQ ID NO: 2018709 - RNA, 14 nt, Human
guuucuaaagcugc

SEQ ID NO: 2018710 - RNA, 16 nt, Human
guuucuaaagcugcca

SEQ ID NO: 2018711 - RNA, 20 nt, Human
guuucuaaagcugccagccg

SEQ ID NO: 2018712 - RNA, 13 nt, Human
guuuccuucccuc

SEQ ID NO: 2018713 - RNA, 21 nt, Human
guuuccuugaggggagccagg

SEQ ID NO: 2018714 - RNA, 21 nt, Human
uaaacacucuugaaaaaugca

SEQ ID NO: 2018715 - RNA, 11 nt, Human
uaaacacuguu

SEQ ID NO: 2018716 - RNA, 14 nt, Human
uaaacacuguguau

SEQ ID NO: 2018717 - RNA, 23 nt, Human
uaaacaagaccacguuucuaaag

SEQ ID NO: 2018718 - RNA, 16 nt, Human
uaaaauggcaacaaac

SEQ ID NO: 2018719 - RNA, 17 nt, Human
uaaaauggcaacaaacu

SEQ ID NO: 2018720 - RNA, 13 nt, Human
uaaaaugcaaaaa

SEQ ID NO: 2018721 - RNA, 15 nt, Human
uaaaaugcaaaaaau

SEQ ID NO: 2018722 - RNA, 17 nt, Human
uaaaaugcaaaaaaucu

SEQ ID NO: 2018723 - RNA, 18 nt, Human
uaaaaugcaaaaaaucuu

SEQ ID NO: 2018724 - RNA, 19 nt, Human
uaaaaugcaaaaaaucuua

SEQ ID NO: 2018725 - RNA, 20 nt, Human
uaaaaugcaaaaaaucuuaa

SEQ ID NO: 2018726 - RNA, 13 nt, Human
uaaacaaaucuuu

SEQ ID NO: 2018727 - RNA, 16 nt, Human
uaaacaaaucuuucca

SEQ ID NO: 2018728 - RNA, 18 nt, Human
uaaaauggcaacaaacug

SEQ ID NO: 2018729 - RNA, 20 nt, Human
uaaaauggcaacaaacugca

SEQ ID NO: 2018730 - RNA, 22 nt, Human
uaaaauggcaacaaacugcaca

SEQ ID NO: 2018731 - RNA, 19 nt, Human
uaaaauggcaaguuuucca

SEQ ID NO: 2018732 - RNA, 18 nt, Human
uaaacaagaccacguuuc

SEQ ID NO: 2018733 - RNA, 22 nt, Human
uaaacugcccccucugcccugc

SEQ ID NO: 2018734 - RNA, 23 nt, Human
uaaacugcccccucugcccugcg

SEQ ID NO: 2018735 - RNA, 20 nt, Human
uaaacugcccccucugcccu

SEQ ID NO: 2018736 - RNA, 21 nt, Human
uaaacugcccccucugcccug

SEQ ID NO: 2018737 - RNA, 22 nt, Human
uaaacuuuaccuuuuuuauaca

SEQ ID NO: 2018738 - RNA, 16 nt, Human
uaaacuuuaccuuuuu

SEQ ID NO: 2018739 - RNA, 14 nt, Human
uaaacuuaaucuaa

SEQ ID NO: 2018740 - RNA, 13 nt, Human
uaaacuuaaucua

SEQ ID NO: 2018741 - RNA, 18 nt, Human
uaaacuuaaucuaaaugg

SEQ ID NO: 2018742 - RNA, 19 nt, Human
uaaacuuaaucuaaaugga

SEQ ID NO: 2018743 - RNA, 21 nt, Human
uaaaagggacugagaaauuua

SEQ ID NO: 2018744 - RNA, 20 nt, Human
uaaaagggacugagaaauuu

SEQ ID NO: 2018745 - RNA, 19 nt, Human
uaaaagggacugagaaauu

SEQ ID NO: 2018746 - RNA, 17 nt, Human
uaaaagggacugagaaa

SEQ ID NO: 2018747 - RNA, 14 nt, Human
uaaaagcauuuugu

SEQ ID NO: 2018748 - RNA, 15 nt, Human
uaaaagcauuuugua

SEQ ID NO: 2018749 - RNA, 16 nt, Human
uaaaagcauuuuguaa

SEQ ID NO: 2018750 - RNA, 17 nt, Human
uaaaagcauuuuguaau

SEQ ID NO: 2018751 - RNA, 18 nt, Human
uaaaagcauuuuguaaua

SEQ ID NO: 2018752 - RNA, 12 nt, Human
uaaaagcccagg

SEQ ID NO: 2018753 - RNA, 19 nt, Human
uaaaagccuaggucuauuu

SEQ ID NO: 2018754 - RNA, 18 nt, Human
uaaaagcccaggagccca

SEQ ID NO: 2018755 - RNA, 19 nt, Human
uaaaagcccaggagcccau

SEQ ID NO: 2018756 - RNA, 14 nt, Human
uaaaagcccaggag

SEQ ID NO: 2018757 - RNA, 15 nt, Human
uaaaagcccaggagc

SEQ ID NO: 2018758 - RNA, 16 nt, Human
uaaaagcccaggagcc

SEQ ID NO: 2018759 - RNA, 17 nt, Human
uaaaagcccaggagccc

SEQ ID NO: 2018760 - RNA, 12 nt, Human
uaaaagccuugg

SEQ ID NO: 2018761 - RNA, 19 nt, Human
uaaaagccuuggccucaga

SEQ ID NO: 2018762 - RNA, 21 nt, Human
uaaaagccuuggccucagagg

SEQ ID NO: 2018763 - RNA, 16 nt, Human
uaaaagaugcaaugua

SEQ ID NO: 2018764 - RNA, 17 nt, Human
uaaaagcaggcuucuau

SEQ ID NO: 2018765 - RNA, 21 nt, Human
uaaaagcaggcuucuaugaaa

SEQ ID NO: 2018766 - RNA, 15 nt, Human
uaaaaaugguuuaaa

SEQ ID NO: 2018767 - RNA, 22 nt, Human
uaaaauauuuaugaagaaaaua

SEQ ID NO: 2018768 - RNA, 21 nt, Human
uaaaauauuuaugaagaaaau

SEQ ID NO: 2018769 - RNA, 12 nt, Human
uaaaaggcccag

SEQ ID NO: 2018770 - RNA, 13 nt, Human
uaaaaggcccaga

SEQ ID NO: 2018771 - RNA, 14 nt, Human
uaaaaggcccagag

SEQ ID NO: 2018772 - RNA, 16 nt, Human
uaaaaugagaaaucua

SEQ ID NO: 2018773 - RNA, 15 nt, Human
uaaaaugagaaaucu

SEQ ID NO: 2018774 - RNA, 15 nt, Human
uaaaaugauugaaaa

SEQ ID NO: 2018775 - RNA, 13 nt, Human
uaaaaugagaaau

SEQ ID NO: 2018776 - RNA, 17 nt, Human
uaaaaugaagaauuuaa

SEQ ID NO: 2018777 - RNA, 15 nt, Human
uaaaaugaagaauuu

SEQ ID NO: 2018778 - RNA, 16 nt, Human
uaaaaugaagaauuua

SEQ ID NO: 2018779 - RNA, 20 nt, Human
uaaacuuuuuucuuacuguc

SEQ ID NO: 2018780 - RNA, 17 nt, Human
uaaacuuugaaauauau

SEQ ID NO: 2018781 - RNA, 18 nt, Human
uaaacuuucuuaauauuu

SEQ ID NO: 2018782 - RNA, 11 nt, Human
uaaacuuugaa

SEQ ID NO: 2018783 - RNA, 12 nt, Human
uaaacuuugaaa

SEQ ID NO: 2018784 - RNA, 13 nt, Human
uaaacuuugaaau

SEQ ID NO: 2018785 - RNA, 14 nt, Human
uaaacuuugaaaua

SEQ ID NO: 2018786 - RNA, 15 nt, Human
uaaacuuugaaauau

SEQ ID NO: 2018787 - RNA, 16 nt, Human
uaaacuuugaaauaua

SEQ ID NO: 2018788 - RNA, 23 nt, Human
uaaagcauauccauucagaauga

SEQ ID NO: 2018789 - RNA, 14 nt, Human
uaaagcgaaaaacu

SEQ ID NO: 2018790 - RNA, 17 nt, Human
uaaagcgaaaaacucaa

SEQ ID NO: 2018791 - RNA, 14 nt, Human
uaaaggaauuuaaa

SEQ ID NO: 2018792 - RNA, 22 nt, Human
uaaaguguauuuuuuuacuaau

SEQ ID NO: 2018793 - RNA, 23 nt, Human
uaaaguguauuuuuuuacuaaua

SEQ ID NO: 2018794 - RNA, 21 nt, Human
uaaaguguauuuuuuuacuaa

SEQ ID NO: 2018795 - RNA, 20 nt, Human
uaaaguguauuuuuuuacua

SEQ ID NO: 2018796 - RNA, 13 nt, Human
uaaaguuucuguu

SEQ ID NO: 2018797 - RNA, 24 nt, Human
uaaaguuucaaaaaucugaagauu

SEQ ID NO: 2018798 - RNA, 12 nt, Human
uaaaguuugauc

SEQ ID NO: 2018799 - RNA, 15 nt, Human
uaaaguuugaucuuc

SEQ ID NO: 2018800 - RNA, 17 nt, Human
uaaaguuugaucuuccu

SEQ ID NO: 2018801 - RNA, 14 nt, Human
uaaaguuuguugaa

SEQ ID NO: 2018802 - RNA, 14 nt, Human
uaaauaaaacccuu

SEQ ID NO: 2018803 - RNA, 17 nt, Human
uaaauaaaaauaauccu

SEQ ID NO: 2018804 - RNA, 19 nt, Human
uaaauauguagauaaugga

SEQ ID NO: 2018805 - RNA, 14 nt, Human
uaaauauuaagcau

SEQ ID NO: 2018806 - RNA, 14 nt, Human
uaaauauucacacu

SEQ ID NO: 2018807 - RNA, 18 nt, Human
uaaauauucacacuugaa

SEQ ID NO: 2018808 - RNA, 19 nt, Human
uaaauauucacacuugaac

SEQ ID NO: 2018809 - RNA, 19 nt, Human
uaaaucagccguguaacca

SEQ ID NO: 2018810 - RNA, 20 nt, Human
uaaaucagacuaugaaguuu

SEQ ID NO: 2018811 - RNA, 19 nt, Human
uaaaucaaguuggcuucua

SEQ ID NO: 2018812 - RNA, 22 nt, Human
uaaaucauacuccuaugcuuua

SEQ ID NO: 2018813 - RNA, 22 nt, Human
uaaauauauuuuaagacgaaac

SEQ ID NO: 2018814 - RNA, 16 nt, Human
uaaauauauuuuaaga

SEQ ID NO: 2018815 - RNA, 22 nt, Human
uaaauaucccuuggacauuuua

SEQ ID NO: 2018816 - RNA, 18 nt, Human
uaaauauaugcuaagucu

SEQ ID NO: 2018817 - RNA, 21 nt, Human
uaaauauagcaguagucuuuu

SEQ ID NO: 2018818 - RNA, 20 nt, Human
uaacuuuuauaaacuuuacc

SEQ ID NO: 2018819 - RNA, 23 nt, Human
uaacuguccuuuuucuucccuua

SEQ ID NO: 2018820 - RNA, 17 nt, Human
uaacuggugauauaucu

SEQ ID NO: 2018821 - RNA, 18 nt, Human
uaacuggugauauaucuc

SEQ ID NO: 2018822 - RNA, 16 nt, Human
uaacuguaauuauuug

SEQ ID NO: 2018823 - RNA, 18 nt, Human
uaacuguaauuauuugaa

SEQ ID NO: 2018824 - RNA, 19 nt, Human
uaacuguaauuauuugaau

SEQ ID NO: 2018825 - RNA, 17 nt, Human
uaacugagugccuuuug

SEQ ID NO: 2018826 - RNA, 23 nt, Human
uaacugauuaguaagucuugccu

SEQ ID NO: 2018827 - RNA, 16 nt, Human
uaacugagugccuuuu

SEQ ID NO: 2018828 - RNA, 21 nt, Human
uaaccaagguagaaugaccuu

SEQ ID NO: 2018829 - RNA, 13 nt, Human
uaaccacagcucc

SEQ ID NO: 2018830 - RNA, 14 nt, Human
uaaccacagcuccu

SEQ ID NO: 2018831 - RNA, 17 nt, Human
uaaccacagcuccuuuu

SEQ ID NO: 2018832 - RNA, 18 nt, Human
uaaccacagcuccuuuuc

SEQ ID NO: 2018833 - RNA, 14 nt, Human
uaaccagcagaaau

SEQ ID NO: 2018834 - RNA, 19 nt, Human
uaaccacagcuccuuuucc

SEQ ID NO: 2018835 - RNA, 21 nt, Human
uaaccacagcuccuuuuccag

SEQ ID NO: 2018836 - RNA, 23 nt, Human
uaaccacagcuccuuuuccagag

SEQ ID NO: 2018837 - RNA, 16 nt, Human
uaaccagcagaaaugc

SEQ ID NO: 2018838 - RNA, 19 nt, Human
uaaccagcagaaaugccuu

SEQ ID NO: 2018839 - RNA, 16 nt, Human
uaaccagggccagaag

SEQ ID NO: 2018840 - RNA, 19 nt, Human
uaacaggcagauacaggaa

SEQ ID NO: 2018841 - RNA, 13 nt, Human
uaacaggcaaaca

SEQ ID NO: 2018842 - RNA, 15 nt, Human
uaacaggcaaacauu

SEQ ID NO: 2018843 - RNA, 20 nt, Human
uaacaggcaaacauuuucuc

SEQ ID NO: 2018844 - RNA, 22 nt, Human
uaacaggcaaacauuuucucuu

SEQ ID NO: 2018845 - RNA, 15 nt, Human
uaacagccgcuccag

SEQ ID NO: 2018846 - RNA, 16 nt, Human
uaacagccgcuccaga

SEQ ID NO: 2018847 - RNA, 18 nt, Human
uaacagccgcuccagagu

SEQ ID NO: 2018848 - RNA, 15 nt, Human
uaacagcaguuucag

SEQ ID NO: 2018849 - RNA, 17 nt, Human
uaacagcaguuucaggu

SEQ ID NO: 2018850 - RNA, 14 nt, Human
uaacagaaauguac

SEQ ID NO: 2018851 - RNA, 15 nt, Human
uaacagaaauguaca

SEQ ID NO: 2018852 - RNA, 12 nt, Human
uaacagaaaugu

SEQ ID NO: 2018853 - RNA, 13 nt, Human
uaacagaaaugua

SEQ ID NO: 2018854 - RNA, 14 nt, Human
uaaauuuaguauuu

SEQ ID NO: 2018855 - RNA, 23 nt, Human
uaaauugggguuuauuucagcaa

SEQ ID NO: 2018856 - RNA, 14 nt, Human
uaaauugucuuaau

SEQ ID NO: 2018857 - RNA, 15 nt, Human
uaaauugcuccuuga

SEQ ID NO: 2018858 - RNA, 19 nt, Human
uaaauugcucacaguuauu

SEQ ID NO: 2018859 - RNA, 24 nt, Human
uaaauugcucacaguuauuacaua

SEQ ID NO: 2018860 - RNA, 19 nt, Human
uaaauccacccauguuauc

SEQ ID NO: 2018861 - RNA, 12 nt, Human
uaaauugauguu

SEQ ID NO: 2018862 - RNA, 13 nt, Human
uaaauugauguug

SEQ ID NO: 2018863 - RNA, 14 nt, Human
uaaauugauguuga

SEQ ID NO: 2018864 - RNA, 15 nt, Human
uaaauugauguugau

SEQ ID NO: 2018865 - RNA, 18 nt, Human
uaaauugauguugaugca

SEQ ID NO: 2018866 - RNA, 19 nt, Human
uaaauugauguugaugcaa

SEQ ID NO: 2018867 - RNA, 20 nt, Human
uaaauugauguugaugcaau

SEQ ID NO: 2018868 - RNA, 20 nt, Human
uaaggaugcuuguacauaau

SEQ ID NO: 2018869 - RNA, 21 nt, Human
uaaggaugcuuguacauaaug

SEQ ID NO: 2018870 - RNA, 22 nt, Human
uaaggaugcuuguacauaaugc

SEQ ID NO: 2018871 - RNA, 23 nt, Human
uaaggaugcuuguacauaaugcg

SEQ ID NO: 2018872 - RNA, 18 nt, Human
uaaggaugcuuguacaua

SEQ ID NO: 2018873 - RNA, 15 nt, Human
uaaggcaaucauggu

SEQ ID NO: 2018874 - RNA, 13 nt, Human
uaaggcaugaagg

SEQ ID NO: 2018875 - RNA, 19 nt, Human
uaaggaugcuuguacauaa

SEQ ID NO: 2018876 - RNA, 21 nt, Human
uaagccuuuggaaacagcucg

SEQ ID NO: 2018877 - RNA, 21 nt, Human
uaagccuuuguugaacuguua

SEQ ID NO: 2018878 - RNA, 14 nt, Human
uaagccuuuggaaa

SEQ ID NO: 2018879 - RNA, 17 nt, Human
uaagccuuuggaaacag

SEQ ID NO: 2018880 - RNA, 13 nt, Human
uaagccaugagaa

SEQ ID NO: 2018881 - RNA, 20 nt, Human
uaagccagacaucaacagau

SEQ ID NO: 2018882 - RNA, 21 nt, Human
uaagccagacaucaacagaua

SEQ ID NO: 2018883 - RNA, 14 nt, Human
uaagccaugagaau

SEQ ID NO: 2018884 - RNA, 13 nt, Human
uaagccagacauc

SEQ ID NO: 2018885 - RNA, 21 nt, Human
uaagccaaaauuaagguguuu

SEQ ID NO: 2018886 - RNA, 17 nt, Human
uaagccaaaauuaaggu

SEQ ID NO: 2018887 - RNA, 19 nt, Human
uaagccaaaauuaaggugu

SEQ ID NO: 2018888 - RNA, 19 nt, Human
uaagaucucagugguuaag

SEQ ID NO: 2018889 - RNA, 13 nt, Human
uaagaucucagug

SEQ ID NO: 2018890 - RNA, 19 nt, Human
uaagaucgguuaacaaaua

SEQ ID NO: 2018891 - RNA, 16 nt, Human
uaagaucgguuaacaa

SEQ ID NO: 2018892 - RNA, 17 nt, Human
uaagaucgguuaacaaa

SEQ ID NO: 2018893 - RNA, 15 nt, Human
uaagcaugcacaaau

SEQ ID NO: 2018894 - RNA, 22 nt, Human
uaagcaugacagaaaauaugua

SEQ ID NO: 2018895 - RNA, 23 nt, Human
uaagcaucuaaggacaagguaag

SEQ ID NO: 2018896 - RNA, 17 nt, Human
uaagcaucuaaggacaa

SEQ ID NO: 2018897 - RNA, 19 nt, Human
uaacuuuuauaaacuuuac

SEQ ID NO: 2018898 - RNA, 21 nt, Human
uaacuuuuauaaacuuuaccu

SEQ ID NO: 2018899 - RNA, 22 nt, Human
uaacuuuuauaaacuuuaccuu

SEQ ID NO: 2018900 - RNA, 22 nt, Human
uaagaaccuuuugagugccuua

SEQ ID NO: 2018901 - RNA, 18 nt, Human
uaagaaauacuguacaau

SEQ ID NO: 2018902 - RNA, 15 nt, Human
uaagaaauacagacu

SEQ ID NO: 2018903 - RNA, 16 nt, Human
uaagaaauacuguaca

SEQ ID NO: 2018904 - RNA, 19 nt, Human
uaagaacugcuuucuuucg

SEQ ID NO: 2018905 - RNA, 13 nt, Human
uaagaaauaaauc

SEQ ID NO: 2018906 - RNA, 16 nt, Human
uaagaacuaaaauguu

SEQ ID NO: 2018907 - RNA, 22 nt, Human
uaagaacugcuuucuuucguuu

SEQ ID NO: 2018908 - RNA, 13 nt, Human
uaagaagaaacua

SEQ ID NO: 2018909 - RNA, 17 nt, Human
uaagagagucuauuuac

SEQ ID NO: 2018910 - RNA, 22 nt, Human
uaagaggcagggucucacucug

SEQ ID NO: 2018911 - RNA, 23 nt, Human
uaagagggagggagggcuccaga

SEQ ID NO: 2018912 - RNA, 22 nt, Human
uaagagggagggagggcuccag

SEQ ID NO: 2018913 - RNA, 12 nt, Human
uaagagggaggg

SEQ ID NO: 2018914 - RNA, 14 nt, Human
uaagauaaaugugc

SEQ ID NO: 2018915 - RNA, 21 nt, Human
uaagaucacuguuuagauuug

SEQ ID NO: 2018916 - RNA, 18 nt, Human
uaagaucacuguuuagau

SEQ ID NO: 2018917 - RNA, 20 nt, Human
uaagaucacuguuuagauuu

SEQ ID NO: 2018918 - RNA, 12 nt, Human
uaagaucacugu

SEQ ID NO: 2018919 - RNA, 13 nt, Human
uaagaucacuguu

SEQ ID NO: 2018920 - RNA, 14 nt, Human
uaagaucacuguuu

SEQ ID NO: 2018921 - RNA, 15 nt, Human
uaagaucacuguuua

SEQ ID NO: 2018922 - RNA, 17 nt, Human
uaagaucacuguuuaga

SEQ ID NO: 2018923 - RNA, 12 nt, Human
uaagauacuguu

SEQ ID NO: 2018924 - RNA, 16 nt, Human
uaagauauacuuguuu

SEQ ID NO: 2018925 - RNA, 23 nt, Human
uaagauauacuuguuuuuguaaa

SEQ ID NO: 2018926 - RNA, 17 nt, Human
uaagauaaaugugcuga

SEQ ID NO: 2018927 - RNA, 16 nt, Human
uaagauaaaugugcug

SEQ ID NO: 2018928 - RNA, 11 nt, Human
uaaucuaaaug

SEQ ID NO: 2018929 - RNA, 15 nt, Human
uaaugauaugcuugu

SEQ ID NO: 2018930 - RNA, 16 nt, Human
uaaugauaugcuugua

SEQ ID NO: 2018931 - RNA, 19 nt, Human
uaaugccacuaaauugaca

SEQ ID NO: 2018932 - RNA, 17 nt, Human
uaaugaugucguuugaa

SEQ ID NO: 2018933 - RNA, 23 nt, Human
uaaugaugucguuugaaucacag

SEQ ID NO: 2018934 - RNA, 18 nt, Human
uaaugauuccuauaaauc

SEQ ID NO: 2018935 - RNA, 12 nt, Human
uaaugauuguuu

SEQ ID NO: 2018936 - RNA, 22 nt, Human
uaauauauuuaaagggaaauug

SEQ ID NO: 2018937 - RNA, 18 nt, Human
uaauauauuuaaagggaa

SEQ ID NO: 2018938 - RNA, 19 nt, Human
uaauauauuuaaagggaaa

SEQ ID NO: 2018939 - RNA, 15 nt, Human
uaauauauuuaaagg

SEQ ID NO: 2018940 - RNA, 18 nt, Human
uaauauaauacacaaaau

SEQ ID NO: 2018941 - RNA, 13 nt, Human
uaaucgaccugcc

SEQ ID NO: 2018942 - RNA, 14 nt, Human
uaaucgaccugccu

SEQ ID NO: 2018943 - RNA, 16 nt, Human
uaaucgaccugccucg

SEQ ID NO: 2018944 - RNA, 16 nt, Human
uaaucguguccccuau

SEQ ID NO: 2018945 - RNA, 17 nt, Human
uaaucgggguauaauag

SEQ ID NO: 2018946 - RNA, 18 nt, Human
uaauauguuuccuucccu

SEQ ID NO: 2018947 - RNA, 17 nt, Human
uaauacacaaaaucaaa

SEQ ID NO: 2018948 - RNA, 14 nt, Human
uaauacacaaaauc

SEQ ID NO: 2018949 - RNA, 16 nt, Human
uaauacacaaaaucaa

SEQ ID NO: 2018950 - RNA, 21 nt, Human
uaauaguucagguaacaggca

SEQ ID NO: 2018951 - RNA, 16 nt, Human
uaauaauaaagaauag

SEQ ID NO: 2018952 - RNA, 11 nt, Human
uaauaauaaau

SEQ ID NO: 2018953 - RNA, 13 nt, Human
uaauaauaaauag

SEQ ID NO: 2018954 - RNA, 14 nt, Human
uaauaauaaauagu

SEQ ID NO: 2018955 - RNA, 15 nt, Human
uaauaauaaauaguu

SEQ ID NO: 2018956 - RNA, 18 nt, Human
uaauaauaaauaguucuu

SEQ ID NO: 2018957 - RNA, 14 nt, Human
uaauaaagacucua

SEQ ID NO: 2018958 - RNA, 15 nt, Human
uaauaaagacucuac

SEQ ID NO: 2018959 - RNA, 20 nt, Human
uaagugguacuaacuuuccu

SEQ ID NO: 2018960 - RNA, 15 nt, Human
uaaggcaugaaggau

SEQ ID NO: 2018961 - RNA, 22 nt, Human
uaaggccaaguacacugagagc

SEQ ID NO: 2018962 - RNA, 11 nt, Human
uaauaaagcug

SEQ ID NO: 2018963 - RNA, 17 nt, Human
uaauaaagcgaaaaacu

SEQ ID NO: 2018964 - RNA, 20 nt, Human
uaauaaagcgaaaaacucaa

SEQ ID NO: 2018965 - RNA, 15 nt, Human
uaauaaccagacaca

SEQ ID NO: 2018966 - RNA, 19 nt, Human
uaauaaccuuuaagucaga

SEQ ID NO: 2018967 - RNA, 18 nt, Human
uaauaagggaaaaaucaa

SEQ ID NO: 2018968 - RNA, 23 nt, Human
uaauaagggaaaaaucaaguauu

SEQ ID NO: 2018969 - RNA, 14 nt, Human
uaauaagggaaaaa

SEQ ID NO: 2018970 - RNA, 15 nt, Human
uaauaagggaaaaau

SEQ ID NO: 2018971 - RNA, 16 nt, Human
uaauaagggaaaaauc

SEQ ID NO: 2018972 - RNA, 17 nt, Human
uaauaagggaaaaauca

SEQ ID NO: 2018973 - RNA, 13 nt, Human
uaauaaccagaca

SEQ ID NO: 2018974 - RNA, 14 nt, Human
uaauaaccagacac

SEQ ID NO: 2018975 - RNA, 17 nt, Human
uaauuaaaacacaacau

SEQ ID NO: 2018976 - RNA, 14 nt, Human
uaaugcgugcauac

SEQ ID NO: 2018977 - RNA, 19 nt, Human
uaaugcgcaggcuggcccu

SEQ ID NO: 2018978 - RNA, 22 nt, Human
uaaugcgcaggcuggcccugcc

SEQ ID NO: 2018979 - RNA, 23 nt, Human
uaaugcgcaggcuggcccugccc

SEQ ID NO: 2018980 - RNA, 20 nt, Human
uaauguuuaaaauuucuuag

SEQ ID NO: 2018981 - RNA, 16 nt, Human
uaauguuuaagcagaa

SEQ ID NO: 2018982 - RNA, 22 nt, Human
uaauguuuaagcagaauuggaa

SEQ ID NO: 2018983 - RNA, 19 nt, Human
uaauucuuugaccuguugg

SEQ ID NO: 2018984 - RNA, 11 nt, Human
uaauucuuuaa

SEQ ID NO: 2018985 - RNA, 12 nt, Human
uaauucuuuaau

SEQ ID NO: 2018986 - RNA, 14 nt, Human
uaauucuuuaauga

SEQ ID NO: 2018987 - RNA, 11 nt, Human
uaauucuuugc

SEQ ID NO: 2018988 - RNA, 13 nt, Human
uaauucuuugcaa

SEQ ID NO: 2018989 - RNA, 14 nt, Human
uaauucuuugcaaa

SEQ ID NO: 2018990 - RNA, 16 nt, Human
uaauucuuugcaaaaa

SEQ ID NO: 2018991 - RNA, 17 nt, Human
uaauucuuugcaaaaau

SEQ ID NO: 2018992 - RNA, 21 nt, Human
uaauucuuugcaaaaauccaa

SEQ ID NO: 2018993 - RNA, 22 nt, Human
uaauucuuauuccauauuagaa

SEQ ID NO: 2018994 - RNA, 15 nt, Human
uaauucuuauuccau

SEQ ID NO: 2018995 - RNA, 16 nt, Human
uaauucuuauuccaua

SEQ ID NO: 2018996 - RNA, 17 nt, Human
uaauucuuauuccauau

SEQ ID NO: 2018997 - RNA, 19 nt, Human
uaauucuuauuccauauua

SEQ ID NO: 2018998 - RNA, 20 nt, Human
uaauugacaggauuauugga

SEQ ID NO: 2018999 - RNA, 15 nt, Human
uaauucuuuuuuauu

SEQ ID NO: 2019000 - RNA, 16 nt, Human
uaauucuuuuuuauua

SEQ ID NO: 2019001 - RNA, 17 nt, Human
uaauucuuuuuuauuaa

SEQ ID NO: 2019002 - RNA, 18 nt, Human
uaauucuuuuuuauuaau

SEQ ID NO: 2019003 - RNA, 19 nt, Human
uaauucuuuuuuauuaauc

SEQ ID NO: 2019004 - RNA, 20 nt, Human
uaauucuuuuuuauuaauca

SEQ ID NO: 2019005 - RNA, 21 nt, Human
uaauucuuuuuuauuaaucac

SEQ ID NO: 2019006 - RNA, 22 nt, Human
uaauugacaggauuauuggaaa

SEQ ID NO: 2019007 - RNA, 19 nt, Human
uaauugacaggcgaaagaa

SEQ ID NO: 2019008 - RNA, 15 nt, Human
uaauugaaagaaugu

SEQ ID NO: 2019009 - RNA, 17 nt, Human
uaauugaaagaauguaa

SEQ ID NO: 2019010 - RNA, 23 nt, Human
uaauucugaaguuauauuuccua

SEQ ID NO: 2019011 - RNA, 14 nt, Human
uaauucugaaguua

SEQ ID NO: 2019012 - RNA, 16 nt, Human
uaauucugaaguuaua

SEQ ID NO: 2019013 - RNA, 17 nt, Human
uaauucugaaguuauau

SEQ ID NO: 2019014 - RNA, 19 nt, Human
uaauucugaaguuauauuu

SEQ ID NO: 2019015 - RNA, 20 nt, Human
uaauucugaaguuauauuuc

SEQ ID NO: 2019016 - RNA, 18 nt, Human
uaauucuuagcucauucu

SEQ ID NO: 2019017 - RNA, 14 nt, Human
uaauucuuauucca

SEQ ID NO: 2019018 - RNA, 22 nt, Human
uaauuacagugccuaaaauaag

SEQ ID NO: 2019019 - RNA, 11 nt, Human
uaauuaauuuc

SEQ ID NO: 2019020 - RNA, 13 nt, Human
uaauuaauuucag

SEQ ID NO: 2019021 - RNA, 14 nt, Human
uaauuaauuucagu

SEQ ID NO: 2019022 - RNA, 16 nt, Human
uaauuacaauauuucu

SEQ ID NO: 2019023 - RNA, 18 nt, Human
uaauuacaauauuucuga

SEQ ID NO: 2019024 - RNA, 19 nt, Human
uaauuacaauauuucugau

SEQ ID NO: 2019025 - RNA, 19 nt, Human
uaauuacagugccuaaaau

SEQ ID NO: 2019026 - RNA, 19 nt, Human
uaauuugugauacaaugcu

SEQ ID NO: 2019027 - RNA, 22 nt, Human
uaauuugugauacaaugcugug

SEQ ID NO: 2019028 - RNA, 17 nt, Human
uaauuuguggugauuug

SEQ ID NO: 2019029 - RNA, 19 nt, Human
uaauuuggaccauuuuccu

SEQ ID NO: 2019030 - RNA, 14 nt, Human
uaauuuuauuuugu

SEQ ID NO: 2019031 - RNA, 22 nt, Human
uaauuuuccuuuaauaugaaau

SEQ ID NO: 2019032 - RNA, 15 nt, Human
uaauuuuauuccaga

SEQ ID NO: 2019033 - RNA, 15 nt, Human
uaauuugguuuucac

SEQ ID NO: 2019034 - RNA, 17 nt, Human
uaauuugguuuucacau

SEQ ID NO: 2019035 - RNA, 17 nt, Human
uaauuuggaccauuuuc

SEQ ID NO: 2019036 - RNA, 20 nt, Human
uaauuuggaccauuuuccug

SEQ ID NO: 2019037 - RNA, 18 nt, Human
uaauuugguuuucacauu

SEQ ID NO: 2019038 - RNA, 15 nt, Human
uaauuuguaagaaua

SEQ ID NO: 2019039 - RNA, 14 nt, Human
uaauuugugauaca

SEQ ID NO: 2019040 - RNA, 15 nt, Human
uaauuugugauacaa

SEQ ID NO: 2019041 - RNA, 18 nt, Human
uaauuugugauacaaugc

SEQ ID NO: 2019042 - RNA, 20 nt, Human
uaauugguuaucaugggaaa

SEQ ID NO: 2019043 - RNA, 20 nt, Human
uaauuggcuuuacuauuuuu

SEQ ID NO: 2019044 - RNA, 17 nt, Human
uaauugcauuugcuuuu

SEQ ID NO: 2019045 - RNA, 14 nt, Human
uaauugcacaacag

SEQ ID NO: 2019046 - RNA, 17 nt, Human
uaauugaucaguuuuca

SEQ ID NO: 2019047 - RNA, 16 nt, Human
uaauugcugaggcaug

SEQ ID NO: 2019048 - RNA, 22 nt, Human
uaauugugugauauuucagaaa

SEQ ID NO: 2019049 - RNA, 20 nt, Human
uaauugugugauauuucaga

SEQ ID NO: 2019050 - RNA, 21 nt, Human
uaauugugugauauuucagaa

SEQ ID NO: 2019051 - RNA, 12 nt, Human
uaauuguuccag

SEQ ID NO: 2019052 - RNA, 14 nt, Human
uaauuguugcauag

SEQ ID NO: 2019053 - RNA, 22 nt, Human
uaauugugcaagcuuuuccuaa

SEQ ID NO: 2019054 - RNA, 12 nt, Human
uaauuguauuuu

SEQ ID NO: 2019055 - RNA, 15 nt, Human
uaauuguauuuuugu

SEQ ID NO: 2019056 - RNA, 12 nt, Human
uaauugugugaa

SEQ ID NO: 2019057 - RNA, 19 nt, Human
uaauugugugaacuuggaa

SEQ ID NO: 2019058 - RNA, 20 nt, Human
uaauugugugaacuuggaag

SEQ ID NO: 2019059 - RNA, 21 nt, Human
uaauugugugaacuuggaagc

SEQ ID NO: 2019060 - RNA, 22 nt, Human
uaauugugugaacuuggaagca

SEQ ID NO: 2019061 - RNA, 15 nt, Human
uaauugugugauauu

SEQ ID NO: 2019062 - RNA, 19 nt, Human
uaauugugugauauuucag

SEQ ID NO: 2019063 - RNA, 16 nt, Human
uagaaaguguucuguu

SEQ ID NO: 2019064 - RNA, 19 nt, Human
uagaaaguguucuguuaca

SEQ ID NO: 2019065 - RNA, 22 nt, Human
uagaaagcuuuguugaaagaaa

SEQ ID NO: 2019066 - RNA, 22 nt, Human
uagaaaguguucuguuacaaaa

SEQ ID NO: 2019067 - RNA, 20 nt, Human
uagaaaguguucuguuacaa

SEQ ID NO: 2019068 - RNA, 21 nt, Human
uagaaaguguucuguuacaaa

SEQ ID NO: 2019069 - RNA, 23 nt, Human
uagaaagcugcugugaucccagu

SEQ ID NO: 2019070 - RNA, 13 nt, Human
uacuuuauagaag

SEQ ID NO: 2019071 - RNA, 15 nt, Human
uacuuuccaauucuc

SEQ ID NO: 2019072 - RNA, 14 nt, Human
uagaaacuggaaau

SEQ ID NO: 2019073 - RNA, 17 nt, Human
uagaaacuggaaauacu

SEQ ID NO: 2019074 - RNA, 18 nt, Human
uagaaacuggaaauacua

SEQ ID NO: 2019075 - RNA, 14 nt, Human
uacuuuauagaaga

SEQ ID NO: 2019076 - RNA, 16 nt, Human
uacuuuauagaagaau

SEQ ID NO: 2019077 - RNA, 18 nt, Human
uacuuuauagaagaaugc

SEQ ID NO: 2019078 - RNA, 19 nt, Human
uacuuuauagaagaaugca

SEQ ID NO: 2019079 - RNA, 13 nt, Human
uagaacagguuuu

SEQ ID NO: 2019080 - RNA, 12 nt, Human
uagaacagguuu

SEQ ID NO: 2019081 - RNA, 14 nt, Human
uagaacagguuuuu

SEQ ID NO: 2019082 - RNA, 15 nt, Human
uagaaauguuugcug

SEQ ID NO: 2019083 - RNA, 17 nt, Human
uagaaauguuugcugaa

SEQ ID NO: 2019084 - RNA, 17 nt, Human
uagaacaacauauacaa

SEQ ID NO: 2019085 - RNA, 23 nt, Human
uagaaauaucugaaaauguaugu

SEQ ID NO: 2019086 - RNA, 21 nt, Human
uagaaauaucugaaaauguau

SEQ ID NO: 2019087 - RNA, 20 nt, Human
uagaaauaucugaaaaugua

SEQ ID NO: 2019088 - RNA, 15 nt, Human
uagaaauauaauuga

SEQ ID NO: 2019089 - RNA, 17 nt, Human
uacugcauaugaaagga

SEQ ID NO: 2019090 - RNA, 21 nt, Human
uacuguaucaugacaaagacu

SEQ ID NO: 2019091 - RNA, 21 nt, Human
uacuguuuaagacacuuccgu

SEQ ID NO: 2019092 - RNA, 17 nt, Human
uacuuagcacuuggccu

SEQ ID NO: 2019093 - RNA, 21 nt, Human
uacuuagcacuuggccugaga

SEQ ID NO: 2019094 - RNA, 16 nt, Human
uacuugcacucuucua

SEQ ID NO: 2019095 - RNA, 21 nt, Human
uacuugcucuugaugccuggc

SEQ ID NO: 2019096 - RNA, 17 nt, Human
uacuugauaacaauguu

SEQ ID NO: 2019097 - RNA, 21 nt, Human
uacuugauaacaauguuuuaa

SEQ ID NO: 2019098 - RNA, 16 nt, Human
uacuugauaagggacu

SEQ ID NO: 2019099 - RNA, 14 nt, Human
uacuugcacucuuc

SEQ ID NO: 2019100 - RNA, 22 nt, Human
uacuuuaacuuaguuuugcaua

SEQ ID NO: 2019101 - RNA, 23 nt, Human
uacuuuaacuuaguuuugcauag

SEQ ID NO: 2019102 - RNA, 21 nt, Human
uacuuuaacuuaguuuugcau

SEQ ID NO: 2019103 - RNA, 19 nt, Human
uacuuguggacacagcucu

SEQ ID NO: 2019104 - RNA, 15 nt, Human
uacuuguggacacag

SEQ ID NO: 2019105 - RNA, 18 nt, Human
uacuuguggacacagcuc

SEQ ID NO: 2019106 - RNA, 15 nt, Human
uacuuggucacagcc

SEQ ID NO: 2019107 - RNA, 17 nt, Human
uacuuggucacagccag

SEQ ID NO: 2019108 - RNA, 18 nt, Human
uacuuggucacagccagg

SEQ ID NO: 2019109 - RNA, 19 nt, Human
uacuuggucacagccaggc

SEQ ID NO: 2019110 - RNA, 17 nt, Human
uacuacaguccucccau

SEQ ID NO: 2019111 - RNA, 12 nt, Human
uacuacaguccu

SEQ ID NO: 2019112 - RNA, 14 nt, Human
uacuacaauaugua

SEQ ID NO: 2019113 - RNA, 17 nt, Human
uacuacaauauguacau

SEQ ID NO: 2019114 - RNA, 13 nt, Human
uacuaacuuuccu

SEQ ID NO: 2019115 - RNA, 19 nt, Human
uacuaacuucuaaaacugu

SEQ ID NO: 2019116 - RNA, 20 nt, Human
uacuaacuucuaaaacugua

SEQ ID NO: 2019117 - RNA, 22 nt, Human
uacuaauaaaauuuaaaagucu

SEQ ID NO: 2019118 - RNA, 15 nt, Human
uacuaauagacaauu

SEQ ID NO: 2019119 - RNA, 17 nt, Human
uacuaauagacaauuua

SEQ ID NO: 2019120 - RNA, 19 nt, Human
uacuaaccagcagaaaugc

SEQ ID NO: 2019121 - RNA, 12 nt, Human
uacuaacuucua

SEQ ID NO: 2019122 - RNA, 17 nt, Human
uacuaacuucuaaaacu

SEQ ID NO: 2019123 - RNA, 18 nt, Human
uacuaacuucuaaaacug

SEQ ID NO: 2019124 - RNA, 17 nt, Human
uacuaaccagcagaaau

SEQ ID NO: 2019125 - RNA, 21 nt, Human
uacgacucuuuuccaaacaca

SEQ ID NO: 2019126 - RNA, 18 nt, Human
uacgaaguucaagaucaa

SEQ ID NO: 2019127 - RNA, 21 nt, Human
uacgacaaaggacgcucccag

SEQ ID NO: 2019128 - RNA, 18 nt, Human
uacuaaccagcagaaaug

SEQ ID NO: 2019129 - RNA, 22 nt, Human
uaccuuuuuuauacauaaacaa

SEQ ID NO: 2019130 - RNA, 16 nt, Human
uacgaaguucaagauc

SEQ ID NO: 2019131 - RNA, 17 nt, Human
uacgaaguucaagauca

SEQ ID NO: 2019132 - RNA, 18 nt, Human
uaccuuuuuuauacauaa

SEQ ID NO: 2019133 - RNA, 20 nt, Human
uaccuuugaauucaagaaca

SEQ ID NO: 2019134 - RNA, 19 nt, Human
uaccuuuuuuauacauaaa

SEQ ID NO: 2019135 - RNA, 20 nt, Human
uaccuuuuuuauacauaaac

SEQ ID NO: 2019136 - RNA, 20 nt, Human
uaccuuuguauucucuccug

SEQ ID NO: 2019137 - RNA, 19 nt, Human
uaccuuugacaaagguaaa

SEQ ID NO: 2019138 - RNA, 23 nt, Human
uaccuugcacacaucaucuguaa

SEQ ID NO: 2019139 - RNA, 19 nt, Human
uaccuugucauuuuggucu

SEQ ID NO: 2019140 - RNA, 16 nt, Human
uaccuugaacugaagg

SEQ ID NO: 2019141 - RNA, 21 nt, Human
uaccuugcacacaucaucugu

SEQ ID NO: 2019142 - RNA, 22 nt, Human
uacccaucccauaugccugggc

SEQ ID NO: 2019143 - RNA, 14 nt, Human
uacuaccuguaaug

SEQ ID NO: 2019144 - RNA, 17 nt, Human
uacuaccuccucuccug

SEQ ID NO: 2019145 - RNA, 15 nt, Human
uacuaccuccucucc

SEQ ID NO: 2019146 - RNA, 20 nt, Human
uacuacaguuuguuaguaug

SEQ ID NO: 2019147 - RNA, 20 nt, Human
uacuacaguccucccaucuc

SEQ ID NO: 2019148 - RNA, 12 nt, Human
uacucaccucac

SEQ ID NO: 2019149 - RNA, 14 nt, Human
uacucaccucaccc

SEQ ID NO: 2019150 - RNA, 15 nt, Human
uacucagggaaagca

SEQ ID NO: 2019151 - RNA, 17 nt, Human
uacucagggaaagcauu

SEQ ID NO: 2019152 - RNA, 21 nt, Human
uacucagggaaagcauuuaaa

SEQ ID NO: 2019153 - RNA, 16 nt, Human
uacucagaauucucua

SEQ ID NO: 2019154 - RNA, 22 nt, Human
uacucagaauucucuaguuuga

SEQ ID NO: 2019155 - RNA, 17 nt, Human
uacucccaucugugaaa

SEQ ID NO: 2019156 - RNA, 16 nt, Human
uacucccaucugugaa

SEQ ID NO: 2019157 - RNA, 14 nt, Human
uacucccaucugug

SEQ ID NO: 2019158 - RNA, 12 nt, Human
uacucccaucug

SEQ ID NO: 2019159 - RNA, 16 nt, Human
uacucauggaagagau

SEQ ID NO: 2019160 - RNA, 22 nt, Human
uacuccugucuucugcuuuguu

SEQ ID NO: 2019161 - RNA, 20 nt, Human
uacuccugucuucugcuuug

SEQ ID NO: 2019162 - RNA, 21 nt, Human
uacuccugucuucugcuuugu

SEQ ID NO: 2019163 - RNA, 13 nt, Human
uacuccugucuuc

SEQ ID NO: 2019164 - RNA, 15 nt, Human
uacuccugucuucug

SEQ ID NO: 2019165 - RNA, 17 nt, Human
uacuccugucuucugcu

SEQ ID NO: 2019166 - RNA, 19 nt, Human
uacuccugucuucugcuuu

SEQ ID NO: 2019167 - RNA, 21 nt, Human
uacugagcagugauauucuuu

SEQ ID NO: 2019168 - RNA, 22 nt, Human
uacugaggauauggacacuggu

SEQ ID NO: 2019169 - RNA, 14 nt, Human
uacugauggaauuu

SEQ ID NO: 2019170 - RNA, 15 nt, Human
uacugaggugcuaug

SEQ ID NO: 2019171 - RNA, 15 nt, Human
uacugagcagugaua

SEQ ID NO: 2019172 - RNA, 18 nt, Human
uacugagcagugauauuc

SEQ ID NO: 2019173 - RNA, 19 nt, Human
uacauaagauaaaugugcu

SEQ ID NO: 2019174 - RNA, 18 nt, Human
uacauaagauaaaugugc

SEQ ID NO: 2019175 - RNA, 18 nt, Human
uacaguuccuagguauaa

SEQ ID NO: 2019176 - RNA, 19 nt, Human
uacaguuacucagaauucu

SEQ ID NO: 2019177 - RNA, 23 nt, Human
uacaguuacucagaauucucuag

SEQ ID NO: 2019178 - RNA, 14 nt, Human
uacaguuacuuuuc

SEQ ID NO: 2019179 - RNA, 15 nt, Human
uacaguuacuuuucc

SEQ ID NO: 2019180 - RNA, 16 nt, Human
uacaguuacuuuuccu

SEQ ID NO: 2019181 - RNA, 17 nt, Human
uacaguuacuuuuccuu

SEQ ID NO: 2019182 - RNA, 22 nt, Human
uacauaagauaaaugugcugaa

SEQ ID NO: 2019183 - RNA, 21 nt, Human
uacaugagguacugagaguga

SEQ ID NO: 2019184 - RNA, 22 nt, Human
uacaugagguacugagagugaa

SEQ ID NO: 2019185 - RNA, 15 nt, Human
uacaugaugauuuca

SEQ ID NO: 2019186 - RNA, 17 nt, Human
uacaugaugauuucaga

SEQ ID NO: 2019187 - RNA, 22 nt, Human
uacaugaugauuucagaaacaa

SEQ ID NO: 2019188 - RNA, 12 nt, Human
uaccaacuuuca

SEQ ID NO: 2019189 - RNA, 13 nt, Human
uaccaacuuucaa

SEQ ID NO: 2019190 - RNA, 14 nt, Human
uaccaacuuucaag

SEQ ID NO: 2019191 - RNA, 15 nt, Human
uaccaacuuucaaga

SEQ ID NO: 2019192 - RNA, 21 nt, Human
uaccaacuuucaagaacuugu

SEQ ID NO: 2019193 - RNA, 17 nt, Human
uacauuuguaauuuaag

SEQ ID NO: 2019194 - RNA, 19 nt, Human
uacauuuguaauuuaaggu

SEQ ID NO: 2019195 - RNA, 18 nt, Human
uacauuuguauuuuucca

SEQ ID NO: 2019196 - RNA, 19 nt, Human
uacccacccccacccaagg

SEQ ID NO: 2019197 - RNA, 17 nt, Human
uacccacccccacccaa

SEQ ID NO: 2019198 - RNA, 23 nt, Human
uacccacccccacccaagggccu

SEQ ID NO: 2019199 - RNA, 15 nt, Human
uacccaaauuaagag

SEQ ID NO: 2019200 - RNA, 15 nt, Human
uacccacccccaccc

SEQ ID NO: 2019201 - RNA, 12 nt, Human
uacccaccccca

SEQ ID NO: 2019202 - RNA, 11 nt, Human
uacccacugcu

SEQ ID NO: 2019203 - RNA, 12 nt, Human
uacccacugcuc

SEQ ID NO: 2019204 - RNA, 13 nt, Human
uacccacugcucu

SEQ ID NO: 2019205 - RNA, 14 nt, Human
uacccacugcucug

SEQ ID NO: 2019206 - RNA, 16 nt, Human
uacccagcgagcccug

SEQ ID NO: 2019207 - RNA, 22 nt, Human
uacccaggugcuaggaacacuc

SEQ ID NO: 2019208 - RNA, 18 nt, Human
uacccagcgagcccuggu

SEQ ID NO: 2019209 - RNA, 19 nt, Human
uaccauuuccguaauucuu

SEQ ID NO: 2019210 - RNA, 20 nt, Human
uaccauuuccguaauucuua

SEQ ID NO: 2019211 - RNA, 13 nt, Human
uaccauuucagua

SEQ ID NO: 2019212 - RNA, 23 nt, Human
uaccauuuugggguacccacugc

SEQ ID NO: 2019213 - RNA, 22 nt, Human
uaccauuuccguaauucuuauu

SEQ ID NO: 2019214 - RNA, 15 nt, Human
uaccaccacgcccgg

SEQ ID NO: 2019215 - RNA, 20 nt, Human
uaccauuggaaauuucacgu

SEQ ID NO: 2019216 - RNA, 13 nt, Human
uaccauuggaaau

SEQ ID NO: 2019217 - RNA, 15 nt, Human
uaccauuggaaauuu

SEQ ID NO: 2019218 - RNA, 17 nt, Human
uaccauuggaaauuuca

SEQ ID NO: 2019219 - RNA, 19 nt, Human
uaccauuggaaauuucacg

SEQ ID NO: 2019220 - RNA, 13 nt, Human
uaccacagacaua

SEQ ID NO: 2019221 - RNA, 21 nt, Human
uaccaagaaaggaaccuguca

SEQ ID NO: 2019222 - RNA, 24 nt, Human
uacagcaaggagauuuacaacugg

SEQ ID NO: 2019223 - RNA, 13 nt, Human
uacagaauuuuau

SEQ ID NO: 2019224 - RNA, 17 nt, Human
uacacuguuucaaacuu

SEQ ID NO: 2019225 - RNA, 18 nt, Human
uacacuguuucaaacuuu

SEQ ID NO: 2019226 - RNA, 19 nt, Human
uacacuguuucaaacuuua

SEQ ID NO: 2019227 - RNA, 18 nt, Human
uacagaaaaguugaauuu

SEQ ID NO: 2019228 - RNA, 22 nt, Human
uacagaaaaguugaauuuuaca

SEQ ID NO: 2019229 - RNA, 13 nt, Human
uacacuuuaugca

SEQ ID NO: 2019230 - RNA, 21 nt, Human
uacagcuugaccgugaggcca

SEQ ID NO: 2019231 - RNA, 17 nt, Human
uacagcccaccuggcuu

SEQ ID NO: 2019232 - RNA, 22 nt, Human
uacagcuugaccgugaggccag

SEQ ID NO: 2019233 - RNA, 23 nt, Human
uacagcuugaccgugaggccaga

SEQ ID NO: 2019234 - RNA, 17 nt, Human
uacaggaaaagcugcug

SEQ ID NO: 2019235 - RNA, 18 nt, Human
uacaggaaaagcugcuga

SEQ ID NO: 2019236 - RNA, 19 nt, Human
uacaggaaaagcugcugac

SEQ ID NO: 2019237 - RNA, 16 nt, Human
uacaggcacccaccau

SEQ ID NO: 2019238 - RNA, 14 nt, Human
uacaggauuugaaa

SEQ ID NO: 2019239 - RNA, 17 nt, Human
uaauuuugaaaaacugc

SEQ ID NO: 2019240 - RNA, 13 nt, Human
uaauuuugaaaaa

SEQ ID NO: 2019241 - RNA, 12 nt, Human
uaauuuuguaau

SEQ ID NO: 2019242 - RNA, 19 nt, Human
uaauuuuguaauguaucaa

SEQ ID NO: 2019243 - RNA, 11 nt, Human
uaauuuugucu

SEQ ID NO: 2019244 - RNA, 18 nt, Human
uaauuuugauagugggac

SEQ ID NO: 2019245 - RNA, 20 nt, Human
uaauuuugauagugggacca

SEQ ID NO: 2019246 - RNA, 19 nt, Human
uacaagagcuuaacagugu

SEQ ID NO: 2019247 - RNA, 15 nt, Human
uacaagacacaguga

SEQ ID NO: 2019248 - RNA, 17 nt, Human
uacaagacaacauugua

SEQ ID NO: 2019249 - RNA, 18 nt, Human
uacaagacaacauuguaa

SEQ ID NO: 2019250 - RNA, 13 nt, Human
uacacaaaaucaa

SEQ ID NO: 2019251 - RNA, 20 nt, Human
uacacaaaaucaaauaauac

SEQ ID NO: 2019252 - RNA, 16 nt, Human
uacacugugcugaguc

SEQ ID NO: 2019253 - RNA, 14 nt, Human
uacacuguuucaaa

SEQ ID NO: 2019254 - RNA, 23 nt, Human
uacacuggcaaugguaguuucug

SEQ ID NO: 2019255 - RNA, 24 nt, Human
uacacuggcaaugguaguuucugu

SEQ ID NO: 2019256 - RNA, 18 nt, Human
uacacugccugccuuaag

SEQ ID NO: 2019257 - RNA, 21 nt, Human
uacacugccugccuuaaguga

SEQ ID NO: 2019258 - RNA, 18 nt, Human
uacacuggcaaugguagu

SEQ ID NO: 2019259 - RNA, 20 nt, Human
uacacuggcaaugguaguuu

SEQ ID NO: 2019260 - RNA, 22 nt, Human
uacacuggcaaugguaguuucu

SEQ ID NO: 2019261 - RNA, 22 nt, Human
uacacacugcauguuugugauu

SEQ ID NO: 2019262 - RNA, 16 nt, Human
uacacacgcugccuuc

SEQ ID NO: 2019263 - RNA, 17 nt, Human
uacacacgcugccuucg

SEQ ID NO: 2019264 - RNA, 17 nt, Human
uacacugccugccuuaa

SEQ ID NO: 2019265 - RNA, 23 nt, Human
uacacaaugguuuucuugugugu

SEQ ID NO: 2019266 - RNA, 21 nt, Human
uacacaaugguuuucuugugu

SEQ ID NO: 2019267 - RNA, 17 nt, Human
uacacaaugguuuucuu

SEQ ID NO: 2019268 - RNA, 21 nt, Human
uacacacacacgcgugcacac

SEQ ID NO: 2019269 - RNA, 15 nt, Human
uacacacacauacac

SEQ ID NO: 2019270 - RNA, 14 nt, Human
uacacacgcugccu

SEQ ID NO: 2019271 - RNA, 15 nt, Human
uacacacgcugccuu

SEQ ID NO: 2019272 - RNA, 17 nt, Human
uacacacugcauguuug

SEQ ID NO: 2019273 - RNA, 17 nt, Human
uaggaaggcacuucugc

SEQ ID NO: 2019274 - RNA, 19 nt, Human
uaggaaggcacuucugccu

SEQ ID NO: 2019275 - RNA, 21 nt, Human
uaggaaggcacuucugccuga

SEQ ID NO: 2019276 - RNA, 17 nt, Human
uaggaagacuuuggaaa

SEQ ID NO: 2019277 - RNA, 16 nt, Human
uaggaagacuuuggaa

SEQ ID NO: 2019278 - RNA, 15 nt, Human
uaggaagacuuugga

SEQ ID NO: 2019279 - RNA, 14 nt, Human
uaggaagacuuugg

SEQ ID NO: 2019280 - RNA, 13 nt, Human
uaggaagacuuug

SEQ ID NO: 2019281 - RNA, 13 nt, Human
uaggaacaaaucu

SEQ ID NO: 2019282 - RNA, 14 nt, Human
uaggaacacuccuu

SEQ ID NO: 2019283 - RNA, 13 nt, Human
uaggaacacuccu

SEQ ID NO: 2019284 - RNA, 15 nt, Human
uaggaacugcugggc

SEQ ID NO: 2019285 - RNA, 18 nt, Human
uaggaacugcugggcuug

SEQ ID NO: 2019286 - RNA, 21 nt, Human
uaggaacuuaaauaaugugaa

SEQ ID NO: 2019287 - RNA, 17 nt, Human
uaggaacacuccuucac

SEQ ID NO: 2019288 - RNA, 14 nt, Human
uaggaacaaaucuu

SEQ ID NO: 2019289 - RNA, 16 nt, Human
uaggaacaaaucuucc

SEQ ID NO: 2019290 - RNA, 22 nt, Human
uaggaacaaaucuuccuggucg

SEQ ID NO: 2019291 - RNA, 13 nt, Human
uaggccaugggac

SEQ ID NO: 2019292 - RNA, 17 nt, Human
uaggccguuccuucaaa

SEQ ID NO: 2019293 - RNA, 19 nt, Human
uaggccaaagacaaauagu

SEQ ID NO: 2019294 - RNA, 21 nt, Human
uaggaaguuagccuuuaucua

SEQ ID NO: 2019295 - RNA, 18 nt, Human
uaggccaaagacaaauag

SEQ ID NO: 2019296 - RNA, 18 nt, Human
uaggccaaucagaagcua

SEQ ID NO: 2019297 - RNA, 19 nt, Human
uaggccucaggugaaacuc

SEQ ID NO: 2019298 - RNA, 14 nt, Human
uaggccuggccaga

SEQ ID NO: 2019299 - RNA, 13 nt, Human
uaggccuggccag

SEQ ID NO: 2019300 - RNA, 23 nt, Human
uaggaauugacccacaagaaaug

SEQ ID NO: 2019301 - RNA, 20 nt, Human
uaggaauugacccacaagaa

SEQ ID NO: 2019302 - RNA, 14 nt, Human
uaggaauuguguuu

SEQ ID NO: 2019303 - RNA, 15 nt, Human
uaggaagguuaaugu

SEQ ID NO: 2019304 - RNA, 14 nt, Human
uaggaaggucauuu

SEQ ID NO: 2019305 - RNA, 16 nt, Human
uaggaaggucauuucc

SEQ ID NO: 2019306 - RNA, 18 nt, Human
uaggaaggucauuuccau

SEQ ID NO: 2019307 - RNA, 19 nt, Human
uaggaaggucauuuccaug

SEQ ID NO: 2019308 - RNA, 23 nt, Human
uaggaaggucauuuccauguaug

SEQ ID NO: 2019309 - RNA, 19 nt, Human
uaggaaguuaaaagcacaa

SEQ ID NO: 2019310 - RNA, 11 nt, Human
uagccucacgc

SEQ ID NO: 2019311 - RNA, 16 nt, Human
uagccccacaggaggu

SEQ ID NO: 2019312 - RNA, 13 nt, Human
uagccccauaauu

SEQ ID NO: 2019313 - RNA, 18 nt, Human
uagcccucacccuggggc

SEQ ID NO: 2019314 - RNA, 12 nt, Human
uagcccugcccg

SEQ ID NO: 2019315 - RNA, 20 nt, Human
uagcccaggauauauuuuau

SEQ ID NO: 2019316 - RNA, 21 nt, Human
uagcccaggauauauuuuauu

SEQ ID NO: 2019317 - RNA, 22 nt, Human
uagcccaggauauauuuuauuu

SEQ ID NO: 2019318 - RNA, 14 nt, Human
uagcccaaaaccaa

SEQ ID NO: 2019319 - RNA, 11 nt, Human
uagcugggacu

SEQ ID NO: 2019320 - RNA, 17 nt, Human
uagcucuguacaucuuu

SEQ ID NO: 2019321 - RNA, 18 nt, Human
uagcugggacuacaggug

SEQ ID NO: 2019322 - RNA, 22 nt, Human
uagcugggagaaagagagagcu

SEQ ID NO: 2019323 - RNA, 17 nt, Human
uagcuggagaggagccc

SEQ ID NO: 2019324 - RNA, 19 nt, Human
uagcuggagaggagcccug

SEQ ID NO: 2019325 - RNA, 23 nt, Human
uagcuggagaggagcccugccuc

SEQ ID NO: 2019326 - RNA, 12 nt, Human
uagcugggacua

SEQ ID NO: 2019327 - RNA, 20 nt, Human
uagcugggacuacaggcacc

SEQ ID NO: 2019328 - RNA, 21 nt, Human
uagcucuaggagggcuggcaa

SEQ ID NO: 2019329 - RNA, 17 nt, Human
uagccugccucuucucu

SEQ ID NO: 2019330 - RNA, 22 nt, Human
uagcucauucuccuuguguuac

SEQ ID NO: 2019331 - RNA, 19 nt, Human
uagaguagagguauaauug

SEQ ID NO: 2019332 - RNA, 19 nt, Human
uagaguaaaaagaaaacaa

SEQ ID NO: 2019333 - RNA, 13 nt, Human
uagaguacacugc

SEQ ID NO: 2019334 - RNA, 17 nt, Human
uagaguacacugccugc

SEQ ID NO: 2019335 - RNA, 21 nt, Human
uagaguacacugccugccuua

SEQ ID NO: 2019336 - RNA, 22 nt, Human
uagaguacacugccugccuuaa

SEQ ID NO: 2019337 - RNA, 21 nt, Human
uagagucauuguaauguugug

SEQ ID NO: 2019338 - RNA, 14 nt, Human
uagagucauuguaa

SEQ ID NO: 2019339 - RNA, 15 nt, Human
uagagucauuguaau

SEQ ID NO: 2019340 - RNA, 16 nt, Human
uagagucauuguaaug

SEQ ID NO: 2019341 - RNA, 19 nt, Human
uagagucauuguaauguug

SEQ ID NO: 2019342 - RNA, 19 nt, Human
uagagguucaaagauauuu

SEQ ID NO: 2019343 - RNA, 16 nt, Human
uagagguucaaagaua

SEQ ID NO: 2019344 - RNA, 21 nt, Human
uagagguucaaagauauuuug

SEQ ID NO: 2019345 - RNA, 17 nt, Human
uagaguaaaaagaaaac

SEQ ID NO: 2019346 - RNA, 16 nt, Human
uagagagagaccacuu

SEQ ID NO: 2019347 - RNA, 16 nt, Human
uagaacccuugcacag

SEQ ID NO: 2019348 - RNA, 12 nt, Human
uagaaccaggca

SEQ ID NO: 2019349 - RNA, 23 nt, Human
uagaaccaggcaacuugggaacu

SEQ ID NO: 2019350 - RNA, 20 nt, Human
uagacugccacaaggaagaa

SEQ ID NO: 2019351 - RNA, 22 nt, Human
uagacugccagcucuuccuagc

SEQ ID NO: 2019352 - RNA, 20 nt, Human
uagacuggccugaaccacag

SEQ ID NO: 2019353 - RNA, 22 nt, Human
uagacugccacaaggaagaaau

SEQ ID NO: 2019354 - RNA, 23 nt, Human
uagacugccacaaggaagaaauu

SEQ ID NO: 2019355 - RNA, 11 nt, Human
uagacugccag

SEQ ID NO: 2019356 - RNA, 12 nt, Human
uagacugccagc

SEQ ID NO: 2019357 - RNA, 13 nt, Human
uagacugccagcu

SEQ ID NO: 2019358 - RNA, 14 nt, Human
uagacugccagcuc

SEQ ID NO: 2019359 - RNA, 16 nt, Human
uagacugccagcucuu

SEQ ID NO: 2019360 - RNA, 17 nt, Human
uagacugccagcucuuc

SEQ ID NO: 2019361 - RNA, 23 nt, Human
uagacuuuuccaauaugugauuu

SEQ ID NO: 2019362 - RNA, 14 nt, Human
uagacuuuuccaau

SEQ ID NO: 2019363 - RNA, 20 nt, Human
uagacuuuuccaauauguga

SEQ ID NO: 2019364 - RNA, 14 nt, Human
uagacuugaaaaga

SEQ ID NO: 2019365 - RNA, 18 nt, Human
uagacuugaaaagagaca

SEQ ID NO: 2019366 - RNA, 19 nt, Human
uagacuugaaaagagacag

SEQ ID NO: 2019367 - RNA, 20 nt, Human
uagacuugaaaagagacagg

SEQ ID NO: 2019368 - RNA, 23 nt, Human
uagacuugaaaagagacaggcag

SEQ ID NO: 2019369 - RNA, 11 nt, Human
uagaugugugg

SEQ ID NO: 2019370 - RNA, 16 nt, Human
uagaugugcugcuuug

SEQ ID NO: 2019371 - RNA, 15 nt, Human
uagaugugagaaaac

SEQ ID NO: 2019372 - RNA, 13 nt, Human
uagauguaaauuu

SEQ ID NO: 2019373 - RNA, 14 nt, Human
uagauguaaauuuu

SEQ ID NO: 2019374 - RNA, 16 nt, Human
uagauguaauuuugug

SEQ ID NO: 2019375 - RNA, 12 nt, Human
uagauguauaua

SEQ ID NO: 2019376 - RNA, 18 nt, Human
uagauaauacaccacuac

SEQ ID NO: 2019377 - RNA, 15 nt, Human
uagauaauuaaccaa

SEQ ID NO: 2019378 - RNA, 21 nt, Human
uagauacaccucaacuaaauc

SEQ ID NO: 2019379 - RNA, 13 nt, Human
uagauguuuuaua

SEQ ID NO: 2019380 - RNA, 18 nt, Human
uagauuaaaucauacucc

SEQ ID NO: 2019381 - RNA, 16 nt, Human
uagcacuuugggaggc

SEQ ID NO: 2019382 - RNA, 19 nt, Human
uagcagagaaugaaagggc

SEQ ID NO: 2019383 - RNA, 23 nt, Human
uagcagagaaugaaagggcccag

SEQ ID NO: 2019384 - RNA, 15 nt, Human
uauauuuuucuuaaa

SEQ ID NO: 2019385 - RNA, 17 nt, Human
uauauuuuucuuaaaaa

SEQ ID NO: 2019386 - RNA, 18 nt, Human
uauauuuuucuuaaaaag

SEQ ID NO: 2019387 - RNA, 20 nt, Human
uauauuuuucuuaaaaagua

SEQ ID NO: 2019388 - RNA, 19 nt, Human
uauauuuuuuguuaaauga

SEQ ID NO: 2019389 - RNA, 17 nt, Human
uaucaggugcugccauc

SEQ ID NO: 2019390 - RNA, 23 nt, Human
uaucaggauuuccucuugaacca

SEQ ID NO: 2019391 - RNA, 16 nt, Human
uaucaggauuuccucu

SEQ ID NO: 2019392 - RNA, 16 nt, Human
uaucaugacaaagacu

SEQ ID NO: 2019393 - RNA, 16 nt, Human
uaucaugucaaacgug

SEQ ID NO: 2019394 - RNA, 11 nt, Human
uaucaugaagc

SEQ ID NO: 2019395 - RNA, 18 nt, Human
uauccugggcuuuuguuu

SEQ ID NO: 2019396 - RNA, 23 nt, Human
uauccugggcuuuuguuuugcuu

SEQ ID NO: 2019397 - RNA, 14 nt, Human
uauccuuuucugug

SEQ ID NO: 2019398 - RNA, 15 nt, Human
uauccuuuucugugu

SEQ ID NO: 2019399 - RNA, 16 nt, Human
uauccuuuucuguguu

SEQ ID NO: 2019400 - RNA, 17 nt, Human
uauccuuuucuguguuu

SEQ ID NO: 2019401 - RNA, 22 nt, Human
uaucaugugaaaucauucauuu

SEQ ID NO: 2019402 - RNA, 17 nt, Human
uaucaugugaaaucauu

SEQ ID NO: 2019403 - RNA, 21 nt, Human
uaucaugucaaacgugaaaau

SEQ ID NO: 2019404 - RNA, 15 nt, Human
uaucuaaauguugaa

SEQ ID NO: 2019405 - RNA, 19 nt, Human
uaucgucacugcuuaacuu

SEQ ID NO: 2019406 - RNA, 19 nt, Human
uaucgcccuggcaggcagg

SEQ ID NO: 2019407 - RNA, 20 nt, Human
uauauacuuguuguuuaaug

SEQ ID NO: 2019408 - RNA, 15 nt, Human
uauauaccguggggg

SEQ ID NO: 2019409 - RNA, 19 nt, Human
uauauaccugcgcuuguuu

SEQ ID NO: 2019410 - RNA, 19 nt, Human
uauaugcauauauauaugu

SEQ ID NO: 2019411 - RNA, 20 nt, Human
uauaugcucugcauguuaca

SEQ ID NO: 2019412 - RNA, 12 nt, Human
uauauuucaagu

SEQ ID NO: 2019413 - RNA, 18 nt, Human
uauauuuccuauaccauu

SEQ ID NO: 2019414 - RNA, 21 nt, Human
uauauuuccuauaccauuucc

SEQ ID NO: 2019415 - RNA, 22 nt, Human
uauauuuccuauaccauuuccg

SEQ ID NO: 2019416 - RNA, 14 nt, Human
uauauuuuaagacg

SEQ ID NO: 2019417 - RNA, 13 nt, Human
uauauuuuaagac

SEQ ID NO: 2019418 - RNA, 21 nt, Human
uauauuucccugaaggaacca

SEQ ID NO: 2019419 - RNA, 13 nt, Human
uauauguaugugu

SEQ ID NO: 2019420 - RNA, 12 nt, Human
uauauuuauuga

SEQ ID NO: 2019421 - RNA, 13 nt, Human
uauauuuauugac

SEQ ID NO: 2019422 - RNA, 21 nt, Human
uauauuuauugacucuugagu

SEQ ID NO: 2019423 - RNA, 20 nt, Human
uauauggugguaauaaggga

SEQ ID NO: 2019424 - RNA, 22 nt, Human
uauauggugguaauaagggaaa

SEQ ID NO: 2019425 - RNA, 15 nt, Human
uauauggucuaaugu

SEQ ID NO: 2019426 - RNA, 17 nt, Human
uauauggucuaauguuu

SEQ ID NO: 2019427 - RNA, 22 nt, Human
uauaugcauauauauaugugug

SEQ ID NO: 2019428 - RNA, 21 nt, Human
uaguuguaccgcaaugugacu

SEQ ID NO: 2019429 - RNA, 16 nt, Human
uaguuuacugagaaug

SEQ ID NO: 2019430 - RNA, 14 nt, Human
uaguuguuaaguuu

SEQ ID NO: 2019431 - RNA, 17 nt, Human
uaguuuauuuuaaaaca

SEQ ID NO: 2019432 - RNA, 12 nt, Human
uaguuugcaguu

SEQ ID NO: 2019433 - RNA, 23 nt, Human
uaguuugauuaaauucuugcaaa

SEQ ID NO: 2019434 - RNA, 13 nt, Human
uaguuucuccaag

SEQ ID NO: 2019435 - RNA, 14 nt, Human
uaguuucugugguu

SEQ ID NO: 2019436 - RNA, 15 nt, Human
uaguggauguucuga

SEQ ID NO: 2019437 - RNA, 15 nt, Human
uaguggauggaaggg

SEQ ID NO: 2019438 - RNA, 18 nt, Human
uaguggacccugaaaugu

SEQ ID NO: 2019439 - RNA, 19 nt, Human
uaguggacccugaaaugug

SEQ ID NO: 2019440 - RNA, 20 nt, Human
uaguggacccugaaaugugu

SEQ ID NO: 2019441 - RNA, 21 nt, Human
uaguggacccugaaaugugug

SEQ ID NO: 2019442 - RNA, 18 nt, Human
uaguggauggaaggggcu

SEQ ID NO: 2019443 - RNA, 21 nt, Human
uaguguagauuccauuuacug

SEQ ID NO: 2019444 - RNA, 13 nt, Human
uagugaugguucc

SEQ ID NO: 2019445 - RNA, 23 nt, Human
uagucaacaguacccugguugug

SEQ ID NO: 2019446 - RNA, 19 nt, Human
uagucaagacgaacaugua

SEQ ID NO: 2019447 - RNA, 12 nt, Human
uagugcugugaa

SEQ ID NO: 2019448 - RNA, 15 nt, Human
uaguggacccugaaa

SEQ ID NO: 2019449 - RNA, 17 nt, Human
uaguggacccugaaaug

SEQ ID NO: 2019450 - RNA, 17 nt, Human
uagugcugugaaaaaaa

SEQ ID NO: 2019451 - RNA, 13 nt, Human
uagugcugugaaa

SEQ ID NO: 2019452 - RNA, 16 nt, Human
uagugcugugaaaaaa

SEQ ID NO: 2019453 - RNA, 14 nt, Human
uagugaugguuccc

SEQ ID NO: 2019454 - RNA, 18 nt, Human
uagugaugguuccccugu

SEQ ID NO: 2019455 - RNA, 17 nt, Human
uauaauucuacuuugag

SEQ ID NO: 2019456 - RNA, 20 nt, Human
uauaauucacauuguauuca

SEQ ID NO: 2019457 - RNA, 15 nt, Human
uauaauguauucaua

SEQ ID NO: 2019458 - RNA, 18 nt, Human
uauaauguauucauauuu

SEQ ID NO: 2019459 - RNA, 19 nt, Human
uauaauguauucauauuug

SEQ ID NO: 2019460 - RNA, 20 nt, Human
uauaauguaagcucuacuga

SEQ ID NO: 2019461 - RNA, 19 nt, Human
uauaauguaagcucuacug

SEQ ID NO: 2019462 - RNA, 14 nt, Human
uauaauguaagcuc

SEQ ID NO: 2019463 - RNA, 18 nt, Human
uauaaugggauuggguuu

SEQ ID NO: 2019464 - RNA, 20 nt, Human
uauacucuuauagacaacau

SEQ ID NO: 2019465 - RNA, 17 nt, Human
uauacccccugcaaagc

SEQ ID NO: 2019466 - RNA, 20 nt, Human
uauaauguauucauauuugu

SEQ ID NO: 2019467 - RNA, 20 nt, Human
uauaaauugucuuaauggau

SEQ ID NO: 2019468 - RNA, 14 nt, Human
uauaaauuuauuua

SEQ ID NO: 2019469 - RNA, 15 nt, Human
uauaaauuuauuuac

SEQ ID NO: 2019470 - RNA, 16 nt, Human
uauaaauuuauuuacu

SEQ ID NO: 2019471 - RNA, 18 nt, Human
uauaaugaaugaaacauu

SEQ ID NO: 2019472 - RNA, 22 nt, Human
uauaaauuuauuuacugcuagu

SEQ ID NO: 2019473 - RNA, 20 nt, Human
uauaaugaaugaaacauuuu

SEQ ID NO: 2019474 - RNA, 11 nt, Human
uauaaugaaug

SEQ ID NO: 2019475 - RNA, 17 nt, Human
uauaaauugucuuaaug

SEQ ID NO: 2019476 - RNA, 17 nt, Human
uaguuugcauuucagaa

SEQ ID NO: 2019477 - RNA, 18 nt, Human
uaguuugcauuucagaaa

SEQ ID NO: 2019478 - RNA, 13 nt, Human
uaguuugcauuuc

SEQ ID NO: 2019479 - RNA, 16 nt, Human
uaguuugcauuucaga

SEQ ID NO: 2019480 - RNA, 19 nt, Human
uaguuuuacccuauaucua

SEQ ID NO: 2019481 - RNA, 21 nt, Human
ggcagcucaccucucccuugg

SEQ ID NO: 2019482 - RNA, 18 nt, Human
ggcagcucaccucucccu

SEQ ID NO: 2019483 - RNA, 22 nt, Human
ggcagcucaccucucccuugga

SEQ ID NO: 2019484 - RNA, 21 nt, Human
ggcagcuugaggguugggcug

SEQ ID NO: 2019485 - RNA, 19 nt, Human
ggcagcugcgguccaccca

SEQ ID NO: 2019486 - RNA, 14 nt, Human
ggcagguccccaga

SEQ ID NO: 2019487 - RNA, 19 nt, Human
ggcagguccccagacucca

SEQ ID NO: 2019488 - RNA, 23 nt, Human
ggcaggucuugaacuccuggccu

SEQ ID NO: 2019489 - RNA, 13 nt, Human
ggcagguccaggg

SEQ ID NO: 2019490 - RNA, 14 nt, Human
ggcaggaaggcuga

SEQ ID NO: 2019491 - RNA, 13 nt, Human
ggcagaucuccca

SEQ ID NO: 2019492 - RNA, 19 nt, Human
ggcagaucucccacaugcc

SEQ ID NO: 2019493 - RNA, 20 nt, Human
ggcagaugcagcucuuccug

SEQ ID NO: 2019494 - RNA, 21 nt, Human
ggcagaugcagcucuuccugg

SEQ ID NO: 2019495 - RNA, 15 nt, Human
ggcagaugcagcucu

SEQ ID NO: 2019496 - RNA, 18 nt, Human
ggcagaugcagcucuucc

SEQ ID NO: 2019497 - RNA, 13 nt, Human
ggcagcacccagg

SEQ ID NO: 2019498 - RNA, 19 nt, Human
ggcagcaccgccucuuccc

SEQ ID NO: 2019499 - RNA, 12 nt, Human
ggcagcaccgcc

SEQ ID NO: 2019500 - RNA, 17 nt, Human
ggcagaggaaagcaaag

SEQ ID NO: 2019501 - RNA, 21 nt, Human
ggcagaggagaacuugcugcc

SEQ ID NO: 2019502 - RNA, 22 nt, Human
ggcagaggagaacuugcugccu

SEQ ID NO: 2019503 - RNA, 23 nt, Human
ggcagaguugaagacagagcuac

SEQ ID NO: 2019504 - RNA, 23 nt, Human
ggcagauacaggaaaagcugcug

SEQ ID NO: 2019505 - RNA, 19 nt, Human
ggcaacugcauuggcuuug

SEQ ID NO: 2019506 - RNA, 15 nt, Human
ggcaaggcugucaau

SEQ ID NO: 2019507 - RNA, 18 nt, Human
ggcaacuugggaacuaga

SEQ ID NO: 2019508 - RNA, 23 nt, Human
ggcaacuugggaacuagacuccc

SEQ ID NO: 2019509 - RNA, 18 nt, Human
ggcaacugcauuggcuuu

SEQ ID NO: 2019510 - RNA, 12 nt, Human
ggauccccuucc

SEQ ID NO: 2019511 - RNA, 13 nt, Human
ggaucagcugagc

SEQ ID NO: 2019512 - RNA, 21 nt, Human
ggaucagucugauucccaagc

SEQ ID NO: 2019513 - RNA, 16 nt, Human
ggaucaggcucccagg

SEQ ID NO: 2019514 - RNA, 18 nt, Human
ggaucaggcucccaggag

SEQ ID NO: 2019515 - RNA, 12 nt, Human
ggauccaggccc

SEQ ID NO: 2019516 - RNA, 13 nt, Human
ggauccaggcccc

SEQ ID NO: 2019517 - RNA, 17 nt, Human
ggauccaggccccuccc

SEQ ID NO: 2019518 - RNA, 18 nt, Human
ggauccaggccccucccu

SEQ ID NO: 2019519 - RNA, 19 nt, Human
ggcaacccccagccugcua

SEQ ID NO: 2019520 - RNA, 19 nt, Human
ggauccaggccccucccuc

SEQ ID NO: 2019521 - RNA, 16 nt, Human
ggcaaggcugucaauu

SEQ ID NO: 2019522 - RNA, 16 nt, Human
ggcaaggggaaucugg

SEQ ID NO: 2019523 - RNA, 20 nt, Human
ggcaaguuuuccauauuuuu

SEQ ID NO: 2019524 - RNA, 22 nt, Human
ggcaauaaaagcccaggagccc

SEQ ID NO: 2019525 - RNA, 15 nt, Human
ggcaauaaauuuuga

SEQ ID NO: 2019526 - RNA, 16 nt, Human
ggcaaguuuucccuga

SEQ ID NO: 2019527 - RNA, 16 nt, Human
ggcaauaaaagcccag

SEQ ID NO: 2019528 - RNA, 17 nt, Human
ggcaauaaaagcccagg

SEQ ID NO: 2019529 - RNA, 20 nt, Human
ggcaauaaaagcccaggagc

SEQ ID NO: 2019530 - RNA, 17 nt, Human
ggcacccggccccugcu

SEQ ID NO: 2019531 - RNA, 15 nt, Human
ggcacccggccccug

SEQ ID NO: 2019532 - RNA, 16 nt, Human
ggcacccggccccugc

SEQ ID NO: 2019533 - RNA, 16 nt, Human
ggcagagcagagacca

SEQ ID NO: 2019534 - RNA, 15 nt, Human
ggcagagcagagacc

SEQ ID NO: 2019535 - RNA, 20 nt, Human
ggcagagcagagaccauccc

SEQ ID NO: 2019536 - RNA, 16 nt, Human
ggcaccucacaggccc

SEQ ID NO: 2019537 - RNA, 19 nt, Human
ggcaccucacaggccccag

SEQ ID NO: 2019538 - RNA, 12 nt, Human
ggcagagcagag

SEQ ID NO: 2019539 - RNA, 15 nt, Human
ggccccucccucucc

SEQ ID NO: 2019540 - RNA, 23 nt, Human
ggccccucccucuccagcaggcc

SEQ ID NO: 2019541 - RNA, 21 nt, Human
ggccccucagggucccuggug

SEQ ID NO: 2019542 - RNA, 20 nt, Human
ggccccucagggucccuggu

SEQ ID NO: 2019543 - RNA, 19 nt, Human
ggccccucagggucccugg

SEQ ID NO: 2019544 - RNA, 16 nt, Human
ggccccucaggguccc

SEQ ID NO: 2019545 - RNA, 17 nt, Human
ggccccugccacccugg

SEQ ID NO: 2019546 - RNA, 18 nt, Human
ggccccugccacccuggg

SEQ ID NO: 2019547 - RNA, 17 nt, Human
ggccccugccagacccc

SEQ ID NO: 2019548 - RNA, 19 nt, Human
ggccccugccagacccccu

SEQ ID NO: 2019549 - RNA, 13 nt, Human
ggccccugcccgg

SEQ ID NO: 2019550 - RNA, 13 nt, Human
ggccccugccacc

SEQ ID NO: 2019551 - RNA, 16 nt, Human
ggccccugccacccug

SEQ ID NO: 2019552 - RNA, 17 nt, Human
ggccccugagaucucug

SEQ ID NO: 2019553 - RNA, 21 nt, Human
ggccccugagaucucugcagg

SEQ ID NO: 2019554 - RNA, 12 nt, Human
ggccccugccac

SEQ ID NO: 2019555 - RNA, 12 nt, Human
ggcccccugccu

SEQ ID NO: 2019556 - RNA, 13 nt, Human
ggcccccugccug

SEQ ID NO: 2019557 - RNA, 17 nt, Human
ggcccccugccugcccu

SEQ ID NO: 2019558 - RNA, 15 nt, Human
ggccccgucucaggu

SEQ ID NO: 2019559 - RNA, 18 nt, Human
ggccccgucucaggucug

SEQ ID NO: 2019560 - RNA, 19 nt, Human
ggccccgucucaggucuga

SEQ ID NO: 2019561 - RNA, 12 nt, Human
ggccaggcuggu

SEQ ID NO: 2019562 - RNA, 15 nt, Human
ggccauggaggcagu

SEQ ID NO: 2019563 - RNA, 16 nt, Human
ggccaggcugcucuug

SEQ ID NO: 2019564 - RNA, 22 nt, Human
ggccaugggacagggaggacgc

SEQ ID NO: 2019565 - RNA, 13 nt, Human
ggccaugggccuc

SEQ ID NO: 2019566 - RNA, 13 nt, Human
ggcccccacaugg

SEQ ID NO: 2019567 - RNA, 17 nt, Human
ggccacaagacccuugu

SEQ ID NO: 2019568 - RNA, 16 nt, Human
ggccacaagacccuug

SEQ ID NO: 2019569 - RNA, 15 nt, Human
ggcauuccccaggag

SEQ ID NO: 2019570 - RNA, 22 nt, Human
ggccaccugcggugcuaucucc

SEQ ID NO: 2019571 - RNA, 16 nt, Human
ggccaccugcggugcu

SEQ ID NO: 2019572 - RNA, 17 nt, Human
ggccacacaagugcagu

SEQ ID NO: 2019573 - RNA, 16 nt, Human
ggccaaucagaagcua

SEQ ID NO: 2019574 - RNA, 15 nt, Human
ggcagguuggugggg

SEQ ID NO: 2019575 - RNA, 23 nt, Human
ggcauguucucugaggacacuaa

SEQ ID NO: 2019576 - RNA, 14 nt, Human
ggccaggccagagg

SEQ ID NO: 2019577 - RNA, 16 nt, Human
ggccaggccagaggga

SEQ ID NO: 2019578 - RNA, 22 nt, Human
ggccaggcugggucgcccugga

SEQ ID NO: 2019579 - RNA, 18 nt, Human
ggccaggcugggucgccc

SEQ ID NO: 2019580 - RNA, 17 nt, Human
ggccaggccagcugccu

SEQ ID NO: 2019581 - RNA, 15 nt, Human
ggccaggccagcugc

SEQ ID NO: 2019582 - RNA, 11 nt, Human
ggccaggcugg

SEQ ID NO: 2019583 - RNA, 14 nt, Human
ggccaggagccucc

SEQ ID NO: 2019584 - RNA, 16 nt, Human
ggccacugugaagaga

SEQ ID NO: 2019585 - RNA, 16 nt, Human
ggccaggagccuccug

SEQ ID NO: 2019586 - RNA, 11 nt, Human
ggccacuguga

SEQ ID NO: 2019587 - RNA, 11 nt, Human
ggagugacaga

SEQ ID NO: 2019588 - RNA, 16 nt, Human
ggagugacagaggcag

SEQ ID NO: 2019589 - RNA, 20 nt, Human
ggagucccaccuuggcugca

SEQ ID NO: 2019590 - RNA, 21 nt, Human
ggagucccaccuuggcugcag

SEQ ID NO: 2019591 - RNA, 14 nt, Human
ggaggggagacuuu

SEQ ID NO: 2019592 - RNA, 16 nt, Human
ggaggggagacuuuga

SEQ ID NO: 2019593 - RNA, 21 nt, Human
ggagucauuuuguguugaaga

SEQ ID NO: 2019594 - RNA, 16 nt, Human
ggagucauuucugauu

SEQ ID NO: 2019595 - RNA, 20 nt, Human
ggaguccaggacaggagaug

SEQ ID NO: 2019596 - RNA, 15 nt, Human
ggagggcuccagaca

SEQ ID NO: 2019597 - RNA, 14 nt, Human
ggagggcuccagac

SEQ ID NO: 2019598 - RNA, 17 nt, Human
ggagggcuccagacaca

SEQ ID NO: 2019599 - RNA, 14 nt, Human
ggauagaugugugg

SEQ ID NO: 2019600 - RNA, 15 nt, Human
ggauagaugugugga

SEQ ID NO: 2019601 - RNA, 13 nt, Human
ggauagaugugug

SEQ ID NO: 2019602 - RNA, 16 nt, Human
ggaucacagccucuga

SEQ ID NO: 2019603 - RNA, 17 nt, Human
ggagugacagaggcagc

SEQ ID NO: 2019604 - RNA, 18 nt, Human
ggagugacagaggcagcc

SEQ ID NO: 2019605 - RNA, 19 nt, Human
ggagugacagaggcagccc

SEQ ID NO: 2019606 - RNA, 21 nt, Human
ggagugacagaggcagcccca

SEQ ID NO: 2019607 - RNA, 12 nt, Human
ggagugagcugg

SEQ ID NO: 2019608 - RNA, 21 nt, Human
ggagugaguugauagcacaga

SEQ ID NO: 2019609 - RNA, 14 nt, Human
ggagugagcugguu

SEQ ID NO: 2019610 - RNA, 12 nt, Human
ggagggauuugg

SEQ ID NO: 2019611 - RNA, 12 nt, Human
ggagggagggcu

SEQ ID NO: 2019612 - RNA, 13 nt, Human
ggagggcuccaga

SEQ ID NO: 2019613 - RNA, 12 nt, Human
ggagggcuccag

SEQ ID NO: 2019614 - RNA, 21 nt, Human
ggaggaucucuugagccuggg

SEQ ID NO: 2019615 - RNA, 17 nt, Human
ggaggaucucuugagcc

SEQ ID NO: 2019616 - RNA, 23 nt, Human
ggaggaucacuugaguccagaag

SEQ ID NO: 2019617 - RNA, 13 nt, Human
ggagggacagucu

SEQ ID NO: 2019618 - RNA, 15 nt, Human
ggaggauguucuggg

SEQ ID NO: 2019619 - RNA, 19 nt, Human
ggaggacgcucucuggccu

SEQ ID NO: 2019620 - RNA, 20 nt, Human
ggagcccugccucuccgccc

SEQ ID NO: 2019621 - RNA, 20 nt, Human
ggaggacgcucucuggccuu

SEQ ID NO: 2019622 - RNA, 21 nt, Human
ggaggacgcucucuggccuuc

SEQ ID NO: 2019623 - RNA, 21 nt, Human
ggagccgggcaaacuggccgc

SEQ ID NO: 2019624 - RNA, 21 nt, Human
ggacccaguggcagggcacag

SEQ ID NO: 2019625 - RNA, 11 nt, Human
ggacccagugg

SEQ ID NO: 2019626 - RNA, 14 nt, Human
ggacccaguggcag

SEQ ID NO: 2019627 - RNA, 16 nt, Human
ggacccaguggcaggg

SEQ ID NO: 2019628 - RNA, 17 nt, Human
ggacccaguggcagggc

SEQ ID NO: 2019629 - RNA, 18 nt, Human
ggacccaguggcagggca

SEQ ID NO: 2019630 - RNA, 19 nt, Human
ggacccaguggcagggcac

SEQ ID NO: 2019631 - RNA, 15 nt, Human
ggaccucucccaggg

SEQ ID NO: 2019632 - RNA, 14 nt, Human
ggaccucucccagg

SEQ ID NO: 2019633 - RNA, 12 nt, Human
ggaccucuccca

SEQ ID NO: 2019634 - RNA, 17 nt, Human
ggaccagcuuggcucag

SEQ ID NO: 2019635 - RNA, 18 nt, Human
ggaccagcuuggcucagg

SEQ ID NO: 2019636 - RNA, 20 nt, Human
ggaagccagcaggcucucag

SEQ ID NO: 2019637 - RNA, 21 nt, Human
ggaccuucacucuaagauguu

SEQ ID NO: 2019638 - RNA, 22 nt, Human
ggaccuucacucuaagauguua

SEQ ID NO: 2019639 - RNA, 15 nt, Human
ggacuccucugucca

SEQ ID NO: 2019640 - RNA, 14 nt, Human
ggacuccucugucc

SEQ ID NO: 2019641 - RNA, 12 nt, Human
ggacuccucugu

SEQ ID NO: 2019642 - RNA, 13 nt, Human
ggacucuaaaguc

SEQ ID NO: 2019643 - RNA, 11 nt, Human
ggacucugccu

SEQ ID NO: 2019644 - RNA, 21 nt, Human
ggacucuucagcacaaaagga

SEQ ID NO: 2019645 - RNA, 10 nt, Human
ggacugccac

SEQ ID NO: 2019646 - RNA, 13 nt, Human
ggacugccaccuc

SEQ ID NO: 2019647 - RNA, 14 nt, Human
ggacugccaccucc

SEQ ID NO: 2019648 - RNA, 15 nt, Human
ggacugccaccuccc

SEQ ID NO: 2019649 - RNA, 17 nt, Human
ggacugccaccuccccu

SEQ ID NO: 2019650 - RNA, 21 nt, Human
ggacugccagucccccugccc

SEQ ID NO: 2019651 - RNA, 21 nt, Human
ggacugccaccuccccuugcc

SEQ ID NO: 2019652 - RNA, 23 nt, Human
ggacugccaccuccccuugccag

SEQ ID NO: 2019653 - RNA, 21 nt, Human
ggagaccccuuggggagcagg

SEQ ID NO: 2019654 - RNA, 21 nt, Human
ggagagcuagcagcagggagg

SEQ ID NO: 2019655 - RNA, 17 nt, Human
ggagagcuagcagcagg

SEQ ID NO: 2019656 - RNA, 20 nt, Human
ggagcaaaaucgaugcagug

SEQ ID NO: 2019657 - RNA, 12 nt, Human
ggagcccuggga

SEQ ID NO: 2019658 - RNA, 13 nt, Human
ggagcccugggag

SEQ ID NO: 2019659 - RNA, 12 nt, Human
ggagcccugccu

SEQ ID NO: 2019660 - RNA, 19 nt, Human
ggagcccugccucuccgcc

SEQ ID NO: 2019661 - RNA, 20 nt, Human
ggagauuuacaacuggggga

SEQ ID NO: 2019662 - RNA, 15 nt, Human
ggagaggggcacagg

SEQ ID NO: 2019663 - RNA, 14 nt, Human
ggagaugcugugcc

SEQ ID NO: 2019664 - RNA, 15 nt, Human
ggagaugcugugccc

SEQ ID NO: 2019665 - RNA, 23 nt, Human
ggagaugcugugccccuggccuu

SEQ ID NO: 2019666 - RNA, 24 nt, Human
ggagaugcugugccccuggccuug

SEQ ID NO: 2019667 - RNA, 16 nt, Human
gcugggacgcucugcu

SEQ ID NO: 2019668 - RNA, 20 nt, Human
gcugggacaugggaaagggg

SEQ ID NO: 2019669 - RNA, 17 nt, Human
gcuggccgggagccuga

SEQ ID NO: 2019670 - RNA, 13 nt, Human
gcuggcccugccc

SEQ ID NO: 2019671 - RNA, 12 nt, Human
gcuggcccugcc

SEQ ID NO: 2019672 - RNA, 17 nt, Human
gcugggacgcucugcug

SEQ ID NO: 2019673 - RNA, 19 nt, Human
gcugggacuacagguguga

SEQ ID NO: 2019674 - RNA, 13 nt, Human
gcugggacuacag

SEQ ID NO: 2019675 - RNA, 18 nt, Human
gcugggacuacaggcacc

SEQ ID NO: 2019676 - RNA, 19 nt, Human
gcugggacuacaggcaccc

SEQ ID NO: 2019677 - RNA, 20 nt, Human
gcugggacuacaggcaccca

SEQ ID NO: 2019678 - RNA, 22 nt, Human
gcugcuugggcuucauccuccu

SEQ ID NO: 2019679 - RNA, 17 nt, Human
gcugcuugggcuucauc

SEQ ID NO: 2019680 - RNA, 18 nt, Human
gcuggaccuugaacuggg

SEQ ID NO: 2019681 - RNA, 21 nt, Human
gcuggaccuugaacuggguac

SEQ ID NO: 2019682 - RNA, 22 nt, Human
gcuggaccuugaacuggguacu

SEQ ID NO: 2019683 - RNA, 16 nt, Human
gcugcuugggcuucau

SEQ ID NO: 2019684 - RNA, 22 nt, Human
gcugcuucaaggauccugagcc

SEQ ID NO: 2019685 - RNA, 21 nt, Human
gcugcuucaaggauccugagc

SEQ ID NO: 2019686 - RNA, 15 nt, Human
gcugcuucauguuug

SEQ ID NO: 2019687 - RNA, 20 nt, Human
gcugcuguguguggcuucug

SEQ ID NO: 2019688 - RNA, 23 nt, Human
gcugcuucaaggauccugagcca

SEQ ID NO: 2019689 - RNA, 20 nt, Human
gcugcucagggaaaagcagc

SEQ ID NO: 2019690 - RNA, 21 nt, Human
gcugcucagggaaaagcagcu

SEQ ID NO: 2019691 - RNA, 13 nt, Human
gcugcuucaagga

SEQ ID NO: 2019692 - RNA, 19 nt, Human
gcugcgguccacccaggag

SEQ ID NO: 2019693 - RNA, 17 nt, Human
gcugcgguccacccagg

SEQ ID NO: 2019694 - RNA, 18 nt, Human
gcugcgguccacccagga

SEQ ID NO: 2019695 - RNA, 22 nt, Human
gcuagcagcagggagggcuucu

SEQ ID NO: 2019696 - RNA, 18 nt, Human
gcugcccuggugcugcca

SEQ ID NO: 2019697 - RNA, 19 nt, Human
gcugcccuggugcugccac

SEQ ID NO: 2019698 - RNA, 11 nt, Human
gcugcccugug

SEQ ID NO: 2019699 - RNA, 20 nt, Human
gcugcccuggugcugccaca

SEQ ID NO: 2019700 - RNA, 22 nt, Human
gcugcccuggugcugccacacu

SEQ ID NO: 2019701 - RNA, 14 nt, Human
gcuagcacagcucc

SEQ ID NO: 2019702 - RNA, 15 nt, Human
gcuagcacagcuccc

SEQ ID NO: 2019703 - RNA, 24 nt, Human
gcuagaggccauggaggcaguagg

SEQ ID NO: 2019704 - RNA, 20 nt, Human
gcuagaggccauggaggcag

SEQ ID NO: 2019705 - RNA, 16 nt, Human
gcugcgguccacccag

SEQ ID NO: 2019706 - RNA, 14 nt, Human
gcugcccugugagu

SEQ ID NO: 2019707 - RNA, 12 nt, Human
gcugcccuguga

SEQ ID NO: 2019708 - RNA, 23 nt, Human
gcugcccuggugcugccacacuu

SEQ ID NO: 2019709 - RNA, 17 nt, Human
gcugcccuuucugggca

SEQ ID NO: 2019710 - RNA, 23 nt, Human
gcugggggaagaagcucucuccu

SEQ ID NO: 2019711 - RNA, 12 nt, Human
gcuggggccagu

SEQ ID NO: 2019712 - RNA, 19 nt, Human
gcuggggccaggcuggguc

SEQ ID NO: 2019713 - RNA, 16 nt, Human
gcuggggccaggcugg

SEQ ID NO: 2019714 - RNA, 18 nt, Human
gcugggcuucaguggcag

SEQ ID NO: 2019715 - RNA, 19 nt, Human
gcugggcuucaguggcagc

SEQ ID NO: 2019716 - RNA, 13 nt, Human
gcugggggccuca

SEQ ID NO: 2019717 - RNA, 15 nt, Human
gcuggucccacucag

SEQ ID NO: 2019718 - RNA, 19 nt, Human
gcuggucccacucagucca

SEQ ID NO: 2019719 - RNA, 19 nt, Human
gcugggggccucagugcca

SEQ ID NO: 2019720 - RNA, 20 nt, Human
gcugggggccucagugccac

SEQ ID NO: 2019721 - RNA, 18 nt, Human
gcugggggaugggccuga

SEQ ID NO: 2019722 - RNA, 19 nt, Human
gcugggggaugggccugag

SEQ ID NO: 2019723 - RNA, 18 nt, Human
gcugggagagccuuccag

SEQ ID NO: 2019724 - RNA, 17 nt, Human
gcugggagagccuucca

SEQ ID NO: 2019725 - RNA, 13 nt, Human
gcugggagagccu

SEQ ID NO: 2019726 - RNA, 12 nt, Human
gcugggagagcc

SEQ ID NO: 2019727 - RNA, 22 nt, Human
gcugggagagccuuccaggggu

SEQ ID NO: 2019728 - RNA, 19 nt, Human
gcugggagagccuuccagg

SEQ ID NO: 2019729 - RNA, 14 nt, Human
gcugggacugggaa

SEQ ID NO: 2019730 - RNA, 21 nt, Human
gcugggaugauuggagggggg

SEQ ID NO: 2019731 - RNA, 16 nt, Human
gcugggagcucugcag

SEQ ID NO: 2019732 - RNA, 15 nt, Human
gcugggagcucugca

SEQ ID NO: 2019733 - RNA, 17 nt, Human
gcugggcuucaguggca

SEQ ID NO: 2019734 - RNA, 21 nt, Human
gcugggauuacaggcuccugc

SEQ ID NO: 2019735 - RNA, 17 nt, Human
gcugggauuacaggcgu

SEQ ID NO: 2019736 - RNA, 18 nt, Human
gcugggauuacaggcgug

SEQ ID NO: 2019737 - RNA, 19 nt, Human
gcugggauuacaggcuccu

SEQ ID NO: 2019738 - RNA, 20 nt, Human
gcugggauuacaggcuccug

SEQ ID NO: 2019739 - RNA, 23 nt, Human
gcugucaauuacaggaaguacug

SEQ ID NO: 2019740 - RNA, 22 nt, Human
gcugucaauuacaggaaguacu

SEQ ID NO: 2019741 - RNA, 19 nt, Human
gcugucaauuacaggaagu

SEQ ID NO: 2019742 - RNA, 17 nt, Human
gcugucaauuacaggaa

SEQ ID NO: 2019743 - RNA, 21 nt, Human
gcugucccuuacgugaguccu

SEQ ID NO: 2019744 - RNA, 22 nt, Human
gcugucccuuacgugaguccug

SEQ ID NO: 2019745 - RNA, 19 nt, Human
gcugucccuuacgugaguc

SEQ ID NO: 2019746 - RNA, 17 nt, Human
gcugucuccauguuuga

SEQ ID NO: 2019747 - RNA, 23 nt, Human
gcugucuguuguauucauugugg

SEQ ID NO: 2019748 - RNA, 15 nt, Human
gcugucuggcacagc

SEQ ID NO: 2019749 - RNA, 19 nt, Human
gcugucuggcacagccugc

SEQ ID NO: 2019750 - RNA, 16 nt, Human
gcugucuuucuugcuc

SEQ ID NO: 2019751 - RNA, 17 nt, Human
gcugucuuucuugcucc

SEQ ID NO: 2019752 - RNA, 18 nt, Human
gcugucuuucuugcuccc

SEQ ID NO: 2019753 - RNA, 19 nt, Human
gcugucuuucuugcucccu

SEQ ID NO: 2019754 - RNA, 20 nt, Human
gcugucuuucuugcucccug

SEQ ID NO: 2019755 - RNA, 21 nt, Human
gcugguuagagguucccuuug

SEQ ID NO: 2019756 - RNA, 15 nt, Human
gcugguucaggguug

SEQ ID NO: 2019757 - RNA, 14 nt, Human
gcugucaaggcuca

SEQ ID NO: 2019758 - RNA, 16 nt, Human
gcugucaauuacagga

SEQ ID NO: 2019759 - RNA, 22 nt, Human
gcugguucaggguuggccccug

SEQ ID NO: 2019760 - RNA, 16 nt, Human
gcuggugucaccugaa

SEQ ID NO: 2019761 - RNA, 18 nt, Human
gcuggugucaccugaaga

SEQ ID NO: 2019762 - RNA, 20 nt, Human
gcuggucccacucaguccau

SEQ ID NO: 2019763 - RNA, 17 nt, Human
ggaacagacuggaagca

SEQ ID NO: 2019764 - RNA, 17 nt, Human
ggaaaucaaagugcuau

SEQ ID NO: 2019765 - RNA, 20 nt, Human
ggaaaucaaagugcuauuac

SEQ ID NO: 2019766 - RNA, 20 nt, Human
ggaaaguggcaccugucugc

SEQ ID NO: 2019767 - RNA, 14 nt, Human
ggaaaauaaauuau

SEQ ID NO: 2019768 - RNA, 17 nt, Human
ggaaaauaaaaaaagaa

SEQ ID NO: 2019769 - RNA, 19 nt, Human
ggaaaauaaaaaaagaaaa

SEQ ID NO: 2019770 - RNA, 20 nt, Human
ggaaaauaaaaaaagaaaaa

SEQ ID NO: 2019771 - RNA, 21 nt, Human
ggaaaauaaaaaaagaaaaaa

SEQ ID NO: 2019772 - RNA, 15 nt, Human
ggaaaagacuaagau

SEQ ID NO: 2019773 - RNA, 15 nt, Human
ggaaaaucagccugc

SEQ ID NO: 2019774 - RNA, 23 nt, Human
ggaaaguauucucuuuucaagaa

SEQ ID NO: 2019775 - RNA, 23 nt, Human
ggaaaguaagggaagcagaagga

SEQ ID NO: 2019776 - RNA, 21 nt, Human
ggaaaguacauuuuuugaaau

SEQ ID NO: 2019777 - RNA, 22 nt, Human
ggaaaguacauuuuuugaaaug

SEQ ID NO: 2019778 - RNA, 23 nt, Human
ggaacuagacucccaagcuggac

SEQ ID NO: 2019779 - RNA, 23 nt, Human
ggaacguagucggcacagccugg

SEQ ID NO: 2019780 - RNA, 17 nt, Human
ggaacagcacuggggag

SEQ ID NO: 2019781 - RNA, 21 nt, Human
ggaacagcacuggggagucuu

SEQ ID NO: 2019782 - RNA, 19 nt, Human
ggaacagacuggaagcaca

SEQ ID NO: 2019783 - RNA, 20 nt, Human
ggaacagacuggaagcacag

SEQ ID NO: 2019784 - RNA, 14 nt, Human
ggaagccagcaggc

SEQ ID NO: 2019785 - RNA, 13 nt, Human
ggaagccagcagg

SEQ ID NO: 2019786 - RNA, 18 nt, Human
ggaagccagcaggcucuc

SEQ ID NO: 2019787 - RNA, 17 nt, Human
ggaagccagcaggcucu

SEQ ID NO: 2019788 - RNA, 16 nt, Human
ggaagccagcaggcuc

SEQ ID NO: 2019789 - RNA, 15 nt, Human
ggaagccagcaggcu

SEQ ID NO: 2019790 - RNA, 22 nt, Human
ggaagcacaugccucucucagg

SEQ ID NO: 2019791 - RNA, 21 nt, Human
ggaagcacaugccucucucag

SEQ ID NO: 2019792 - RNA, 23 nt, Human
ggaagcacaugccucucucaggc

SEQ ID NO: 2019793 - RNA, 13 nt, Human
ggaagcagaagga

SEQ ID NO: 2019794 - RNA, 13 nt, Human
ggaagcagcuuuc

SEQ ID NO: 2019795 - RNA, 22 nt, Human
ggaagcagguuaaauguuuugu

SEQ ID NO: 2019796 - RNA, 14 nt, Human
ggaagcagugccca

SEQ ID NO: 2019797 - RNA, 15 nt, Human
ggaagcagugcccag

SEQ ID NO: 2019798 - RNA, 16 nt, Human
ggaagcagugcccagg

SEQ ID NO: 2019799 - RNA, 18 nt, Human
ggaagcagugcccaggug

SEQ ID NO: 2019800 - RNA, 13 nt, Human
ggaagagccuugc

SEQ ID NO: 2019801 - RNA, 16 nt, Human
ggaagauaaguuggaa

SEQ ID NO: 2019802 - RNA, 18 nt, Human
ggaagauaaguuggaaac

SEQ ID NO: 2019803 - RNA, 17 nt, Human
ggaagcacaugccucuc

SEQ ID NO: 2019804 - RNA, 15 nt, Human
ggaagcacaugccuc

SEQ ID NO: 2019805 - RNA, 14 nt, Human
ggaagcacaugccu

SEQ ID NO: 2019806 - RNA, 13 nt, Human
ggaagcacaugcc

SEQ ID NO: 2019807 - RNA, 17 nt, Human
ggaagcacagcuucauu

SEQ ID NO: 2019808 - RNA, 20 nt, Human
gcuuccagugaggcucugcc

SEQ ID NO: 2019809 - RNA, 19 nt, Human
gcuuccagugaggcucugc

SEQ ID NO: 2019810 - RNA, 21 nt, Human
gcuuccagugaggcucugccc

SEQ ID NO: 2019811 - RNA, 17 nt, Human
gcuucucacugccaugc

SEQ ID NO: 2019812 - RNA, 16 nt, Human
gcuucuaugaaagacu

SEQ ID NO: 2019813 - RNA, 17 nt, Human
gcuugcccuggugccuc

SEQ ID NO: 2019814 - RNA, 19 nt, Human
gcuugcccuggugccucac

SEQ ID NO: 2019815 - RNA, 17 nt, Human
gcuugccauuuuucaaa

SEQ ID NO: 2019816 - RNA, 18 nt, Human
gcuugccauuuuucaaaa

SEQ ID NO: 2019817 - RNA, 13 nt, Human
gcuuggaggaagg

SEQ ID NO: 2019818 - RNA, 15 nt, Human
gcuuggaggaaggaa

SEQ ID NO: 2019819 - RNA, 14 nt, Human
gcuuggaggaagga

SEQ ID NO: 2019820 - RNA, 19 nt, Human
gcuucuggugaccuuccaa

SEQ ID NO: 2019821 - RNA, 22 nt, Human
gcuugaggguugggcugguguc

SEQ ID NO: 2019822 - RNA, 16 nt, Human
gcuucuguugcugccu

SEQ ID NO: 2019823 - RNA, 21 nt, Human
gcuucugugcccagaauacug

SEQ ID NO: 2019824 - RNA, 15 nt, Human
gcuucugugcccaga

SEQ ID NO: 2019825 - RNA, 19 nt, Human
gcuucugugcccagaauac

SEQ ID NO: 2019826 - RNA, 22 nt, Human
gcuugcagagaugaggccgcca

SEQ ID NO: 2019827 - RNA, 14 nt, Human
gcuugcacucucuu

SEQ ID NO: 2019828 - RNA, 18 nt, Human
gcuugcacucucuuggcu

SEQ ID NO: 2019829 - RNA, 14 nt, Human
gcuuggcccuggca

SEQ ID NO: 2019830 - RNA, 15 nt, Human
gcuuggcccuggcag

SEQ ID NO: 2019831 - RNA, 17 nt, Human
gcuuggcccuggcagcc

SEQ ID NO: 2019832 - RNA, 15 nt, Human
gcuuggcccuuuccu

SEQ ID NO: 2019833 - RNA, 13 nt, Human
gcuuggcccaggg

SEQ ID NO: 2019834 - RNA, 14 nt, Human
gcuuggcccagggg

SEQ ID NO: 2019835 - RNA, 12 nt, Human
gcuuggcccugg

SEQ ID NO: 2019836 - RNA, 14 nt, Human
gcuuugggcugccc

SEQ ID NO: 2019837 - RNA, 19 nt, Human
gcuuuaauuccaugaaugu

SEQ ID NO: 2019838 - RNA, 20 nt, Human
gcuuuaauuccaugaauguu

SEQ ID NO: 2019839 - RNA, 14 nt, Human
ggaaaaacugauuu

SEQ ID NO: 2019840 - RNA, 13 nt, Human
ggaaaaauagccu

SEQ ID NO: 2019841 - RNA, 15 nt, Human
ggaaaacgauuuaau

SEQ ID NO: 2019842 - RNA, 13 nt, Human
ggaaaagaaaucu

SEQ ID NO: 2019843 - RNA, 14 nt, Human
ggaaaagaaaucua

SEQ ID NO: 2019844 - RNA, 15 nt, Human
ggaaaaauagccugc

SEQ ID NO: 2019845 - RNA, 22 nt, Human
ggaaaaccaagccguggcuucc

SEQ ID NO: 2019846 - RNA, 22 nt, Human
ggaaaaaguauuaauucucuuu

SEQ ID NO: 2019847 - RNA, 12 nt, Human
ggaaaaauaugu

SEQ ID NO: 2019848 - RNA, 13 nt, Human
ggaaaaauaugug

SEQ ID NO: 2019849 - RNA, 16 nt, Human
ggaaaaauaugugaag

SEQ ID NO: 2019850 - RNA, 17 nt, Human
gcuuuuacccuuuuucu

SEQ ID NO: 2019851 - RNA, 22 nt, Human
gcuuuuacccuuuuucuugaau

SEQ ID NO: 2019852 - RNA, 23 nt, Human
ggaaaaaauugcuuuugagagaa

SEQ ID NO: 2019853 - RNA, 14 nt, Human
gcuuuuacuuaaac

SEQ ID NO: 2019854 - RNA, 20 nt, Human
ggaaaaaauaacaaugaaag

SEQ ID NO: 2019855 - RNA, 15 nt, Human
gcuuugggcugcccu

SEQ ID NO: 2019856 - RNA, 16 nt, Human
gcuuugggcugcccug

SEQ ID NO: 2019857 - RNA, 13 nt, Human
gcuuuuacccuuu

SEQ ID NO: 2019858 - RNA, 18 nt, Human
gcuuuuaaggaaaggcaa

SEQ ID NO: 2019859 - RNA, 14 nt, Human
gcuuuuaaaacuac

SEQ ID NO: 2019860 - RNA, 20 nt, Human
gcuuuuaaaacuacuuagca

SEQ ID NO: 2019861 - RNA, 12 nt, Human
gcuuuuaaaauu

SEQ ID NO: 2019862 - RNA, 14 nt, Human
gcuuuuaaaauuuu

SEQ ID NO: 2019863 - RNA, 16 nt, Human
gcuuuuaaaauuuuaa

SEQ ID NO: 2019864 - RNA, 15 nt, Human
ggcugcuuuccaaag

SEQ ID NO: 2019865 - RNA, 23 nt, Human
ggcugcuucaaggauccugagcc

SEQ ID NO: 2019866 - RNA, 19 nt, Human
ggcugggagagccuuccag

SEQ ID NO: 2019867 - RNA, 16 nt, Human
ggcuggaaggggucca

SEQ ID NO: 2019868 - RNA, 23 nt, Human
ggcugggagagccuuccaggggu

SEQ ID NO: 2019869 - RNA, 20 nt, Human
ggcugggagagccuuccagg

SEQ ID NO: 2019870 - RNA, 14 nt, Human
ggcugggcagagga

SEQ ID NO: 2019871 - RNA, 13 nt, Human
ggcugggcagagg

SEQ ID NO: 2019872 - RNA, 19 nt, Human
ggcugggcagaggaaagca

SEQ ID NO: 2019873 - RNA, 15 nt, Human
ggcugggcagaggaa

SEQ ID NO: 2019874 - RNA, 18 nt, Human
ggcugggagagccuucca

SEQ ID NO: 2019875 - RNA, 22 nt, Human
ggcugcuucaaggauccugagc

SEQ ID NO: 2019876 - RNA, 14 nt, Human
ggcugcuucaagga

SEQ ID NO: 2019877 - RNA, 12 nt, Human
ggcugcuucaag

SEQ ID NO: 2019878 - RNA, 11 nt, Human
ggcugcuucaa

SEQ ID NO: 2019879 - RNA, 14 nt, Human
ggcugcugugaagc

SEQ ID NO: 2019880 - RNA, 17 nt, Human
ggcugcugaaggcucga

SEQ ID NO: 2019881 - RNA, 15 nt, Human
ggcugcugaaggcuc

SEQ ID NO: 2019882 - RNA, 18 nt, Human
ggcugcugaaggcucgag

SEQ ID NO: 2019883 - RNA, 12 nt, Human
ggcugcagggag

SEQ ID NO: 2019884 - RNA, 14 nt, Human
ggcugcugaaggcu

SEQ ID NO: 2019885 - RNA, 13 nt, Human
ggcugcagggagu

SEQ ID NO: 2019886 - RNA, 20 nt, Human
ggccccugccagacccccug

SEQ ID NO: 2019887 - RNA, 14 nt, Human
ggcucuggagccca

SEQ ID NO: 2019888 - RNA, 13 nt, Human
ggcucuggagccc

SEQ ID NO: 2019889 - RNA, 17 nt, Human
ggcucugccucccauca

SEQ ID NO: 2019890 - RNA, 20 nt, Human
ggccccugcccggcugcgga

SEQ ID NO: 2019891 - RNA, 16 nt, Human
ggccccugcccggcug

SEQ ID NO: 2019892 - RNA, 17 nt, Human
ggccccugcccggcugc

SEQ ID NO: 2019893 - RNA, 15 nt, Human
ggcugaggugggagg

SEQ ID NO: 2019894 - RNA, 13 nt, Human
ggcugagguggga

SEQ ID NO: 2019895 - RNA, 16 nt, Human
ggcugcagccaggcca

SEQ ID NO: 2019896 - RNA, 22 nt, Human
ggcugcagccaggccacuggcc

SEQ ID NO: 2019897 - RNA, 19 nt, Human
ggcugcaccggcuggccug

SEQ ID NO: 2019898 - RNA, 18 nt, Human
ggcugcaccggcuggccu

SEQ ID NO: 2019899 - RNA, 17 nt, Human
ggcugcaccggcuggcc

SEQ ID NO: 2019900 - RNA, 24 nt, Human
ggcugcaaaggguaucaggugcug

SEQ ID NO: 2019901 - RNA, 22 nt, Human
ggcugagugcaggcccacccug

SEQ ID NO: 2019902 - RNA, 18 nt, Human
ggcugagugcaggcccac

SEQ ID NO: 2019903 - RNA, 19 nt, Human
ggcugagugcaggcccacc

SEQ ID NO: 2019904 - RNA, 20 nt, Human
ggcugagugcaggcccaccc

SEQ ID NO: 2019905 - RNA, 21 nt, Human
ggcugagugcaggcccacccu

SEQ ID NO: 2019906 - RNA, 17 nt, Human
ggcugaguagcucugcc

SEQ ID NO: 2019907 - RNA, 13 nt, Human
ggcugagugcagg

SEQ ID NO: 2019908 - RNA, 15 nt, Human
ggcugagugcaggcc

SEQ ID NO: 2019909 - RNA, 16 nt, Human
ggcugagugcaggccc

SEQ ID NO: 2019910 - RNA, 17 nt, Human
ggcugagugcaggccca

SEQ ID NO: 2019911 - RNA, 22 nt, Human
ggcugcaaaggguaucaggugc

SEQ ID NO: 2019912 - RNA, 23 nt, Human
ggcugcaaaggguaucaggugcu

SEQ ID NO: 2019913 - RNA, 18 nt, Human
ggcugcaaaggguaucag

SEQ ID NO: 2019914 - RNA, 13 nt, Human
gggaaugaagaua

SEQ ID NO: 2019915 - RNA, 16 nt, Human
gggaagggggcuggga

SEQ ID NO: 2019916 - RNA, 14 nt, Human
gggaagggggcugg

SEQ ID NO: 2019917 - RNA, 18 nt, Human
gggaaggggggucagaag

SEQ ID NO: 2019918 - RNA, 17 nt, Human
gggaagggggcugggac

SEQ ID NO: 2019919 - RNA, 14 nt, Human
ggcuuuugugcauu

SEQ ID NO: 2019920 - RNA, 21 nt, Human
gggaaggauacaaaagcaugu

SEQ ID NO: 2019921 - RNA, 23 nt, Human
gggaaggauacaaaagcauguga

SEQ ID NO: 2019922 - RNA, 22 nt, Human
gggaaggcagggagggccuggg

SEQ ID NO: 2019923 - RNA, 13 nt, Human
gggaaggccugac

SEQ ID NO: 2019924 - RNA, 15 nt, Human
gggaaggccugacuu

SEQ ID NO: 2019925 - RNA, 20 nt, Human
gggaccccuggugguucacu

SEQ ID NO: 2019926 - RNA, 14 nt, Human
gggaccccugagcu

SEQ ID NO: 2019927 - RNA, 20 nt, Human
gggacaaguagccaccugag

SEQ ID NO: 2019928 - RNA, 20 nt, Human
gggacccuccaaggccaggc

SEQ ID NO: 2019929 - RNA, 24 nt, Human
gggacccuccaaggccaggccuug

SEQ ID NO: 2019930 - RNA, 15 nt, Human
gggacaaccuuggcu

SEQ ID NO: 2019931 - RNA, 20 nt, Human
gggacaaccuuggcuuggcc

SEQ ID NO: 2019932 - RNA, 15 nt, Human
gggaauggcagcugc

SEQ ID NO: 2019933 - RNA, 17 nt, Human
gggaauuucuucaacuc

SEQ ID NO: 2019934 - RNA, 23 nt, Human
gggacaaggacuaggguccuggg

SEQ ID NO: 2019935 - RNA, 15 nt, Human
gggaccucaggccug

SEQ ID NO: 2019936 - RNA, 13 nt, Human
gggaccucaggcc

SEQ ID NO: 2019937 - RNA, 12 nt, Human
gggaccucaggc

SEQ ID NO: 2019938 - RNA, 23 nt, Human
gggaccucucccagggucccugg

SEQ ID NO: 2019939 - RNA, 16 nt, Human
gggaccucucccaggg

SEQ ID NO: 2019940 - RNA, 12 nt, Human
gggaccucuccc

SEQ ID NO: 2019941 - RNA, 17 nt, Human
gggacuacaggcaccca

SEQ ID NO: 2019942 - RNA, 16 nt, Human
gggacucaaugcacug

SEQ ID NO: 2019943 - RNA, 16 nt, Human
ggcuuauauuugugua

SEQ ID NO: 2019944 - RNA, 14 nt, Human
ggcuuauaaaacag

SEQ ID NO: 2019945 - RNA, 21 nt, Human
ggcuuaauuauugauguuuuc

SEQ ID NO: 2019946 - RNA, 21 nt, Human
ggcuuagucacugagacagcc

SEQ ID NO: 2019947 - RNA, 18 nt, Human
ggcugggcuucaguggca

SEQ ID NO: 2019948 - RNA, 13 nt, Human
ggcugggcuucag

SEQ ID NO: 2019949 - RNA, 17 nt, Human
ggcugggcuucaguggc

SEQ ID NO: 2019950 - RNA, 17 nt, Human
ggcugggcucccuuccc

SEQ ID NO: 2019951 - RNA, 18 nt, Human
ggcugggcucccuuccca

SEQ ID NO: 2019952 - RNA, 12 nt, Human
ggcugggcuuca

SEQ ID NO: 2019953 - RNA, 10 nt, Human
ggcuuuugug

SEQ ID NO: 2019954 - RNA, 19 nt, Human
ggcuuuucacugcuggcug

SEQ ID NO: 2019955 - RNA, 22 nt, Human
ggcuuuucacugcuggcugccu

SEQ ID NO: 2019956 - RNA, 14 nt, Human
ggcuuuucacugcu

SEQ ID NO: 2019957 - RNA, 19 nt, Human
ggcuuuccugugccaggug

SEQ ID NO: 2019958 - RNA, 15 nt, Human
ggcuuuucacugcug

SEQ ID NO: 2019959 - RNA, 17 nt, Human
ggcuuuucacugcuggc

SEQ ID NO: 2019960 - RNA, 17 nt, Human
ggcuuuauuuuuuugaa

SEQ ID NO: 2019961 - RNA, 22 nt, Human
ggcuuuauuuuuuugaacucuu

SEQ ID NO: 2019962 - RNA, 23 nt, Human
ggcuuucaggagcuccauacaca

SEQ ID NO: 2019963 - RNA, 13 nt, Human
ggcuuguaguucu

SEQ ID NO: 2019964 - RNA, 16 nt, Human
ggcuugucauagccag

SEQ ID NO: 2019965 - RNA, 16 nt, Human
ggcuuguaguucuuua

SEQ ID NO: 2019966 - RNA, 14 nt, Human
ggcuuuaaaauucu

SEQ ID NO: 2019967 - RNA, 12 nt, Human
ggcuuuaaaauu

SEQ ID NO: 2019968 - RNA, 19 nt, Human
ggcuuggggaccagagcug

SEQ ID NO: 2019969 - RNA, 21 nt, Human
ggcuuggggaccagagcugcc

SEQ ID NO: 2019970 - RNA, 22 nt, Human
ggcuugaguuuaaauuguaaua

SEQ ID NO: 2019971 - RNA, 13 nt, Human
gggcaauggaaau

SEQ ID NO: 2019972 - RNA, 16 nt, Human
gggcaauauucucugu

SEQ ID NO: 2019973 - RNA, 19 nt, Human
gggcaauauucucuguaca

SEQ ID NO: 2019974 - RNA, 20 nt, Human
gggcaauauucucuguacau

SEQ ID NO: 2019975 - RNA, 23 nt, Human
gggcaauauucucuguacauauu

SEQ ID NO: 2019976 - RNA, 20 nt, Human
gggaugacaugcacucagcu

SEQ ID NO: 2019977 - RNA, 20 nt, Human
gggcaacccccagccugcua

SEQ ID NO: 2019978 - RNA, 18 nt, Human
gggcaacccuggugacca

SEQ ID NO: 2019979 - RNA, 23 nt, Human
gggauccuggaguucugguuccu

SEQ ID NO: 2019980 - RNA, 16 nt, Human
gggauccuccaggugc

SEQ ID NO: 2019981 - RNA, 15 nt, Human
gggauccuccaggug

SEQ ID NO: 2019982 - RNA, 14 nt, Human
gggauagaugugug

SEQ ID NO: 2019983 - RNA, 15 nt, Human
gggauaggggcagag

SEQ ID NO: 2019984 - RNA, 21 nt, Human
gggauaugauuuaaaucagcc

SEQ ID NO: 2019985 - RNA, 13 nt, Human
gggauagaugugu

SEQ ID NO: 2019986 - RNA, 13 nt, Human
gggauagagagag

SEQ ID NO: 2019987 - RNA, 13 nt, Human
gggacugagaaau

SEQ ID NO: 2019988 - RNA, 10 nt, Human
gggacucugc

SEQ ID NO: 2019989 - RNA, 17 nt, Human
gggaggugggauccucc

SEQ ID NO: 2019990 - RNA, 19 nt, Human
gggacugaaaaccucuccu

SEQ ID NO: 2019991 - RNA, 18 nt, Human
gggacugaaaaccucucc

SEQ ID NO: 2019992 - RNA, 16 nt, Human
gggaggugaccccagg

SEQ ID NO: 2019993 - RNA, 21 nt, Human
gggagugugguuucuuuuuga

SEQ ID NO: 2019994 - RNA, 11 nt, Human
gggagugugua

SEQ ID NO: 2019995 - RNA, 18 nt, Human
gggagugacagaggcagc

SEQ ID NO: 2019996 - RNA, 11 nt, Human
gggagugagcu

SEQ ID NO: 2019997 - RNA, 14 nt, Human
gggagugagcuggu

SEQ ID NO: 2019998 - RNA, 13 nt, Human
gggcacagggccu

SEQ ID NO: 2019999 - RNA, 14 nt, Human
gggcacagggccug

SEQ ID NO: 2020000 - RNA, 16 nt, Human
gggcacagggccuggc

SEQ ID NO: 2020001 - RNA, 23 nt, Human
gggcacacgcugcucugccccag

SEQ ID NO: 2020002 - RNA, 21 nt, Human
gggcacagaaaauggaagaca

SEQ ID NO: 2020003 - RNA, 20 nt, Human
gggcacagaaaauggaagac

SEQ ID NO: 2020004 - RNA, 13 nt, Human
gggcacacgcugc

SEQ ID NO: 2020005 - RNA, 16 nt, Human
gggcacacgcugcucu

SEQ ID NO: 2020006 - RNA, 18 nt, Human
gggcacacgcugcucugc

SEQ ID NO: 2020007 - RNA, 19 nt, Human
gggcacacgcugcucugcc

SEQ ID NO: 2020008 - RNA, 20 nt, Human
gggcacacgcugcucugccc

SEQ ID NO: 2020009 - RNA, 22 nt, Human
gggcacacgcugcucugcccca

SEQ ID NO: 2020010 - RNA, 18 nt, Human
gggcacagaaaauggaag

SEQ ID NO: 2020011 - RNA, 15 nt, Human
gggcacaccuccucc

SEQ ID NO: 2020012 - RNA, 17 nt, Human
gggcacaccuccuccca

SEQ ID NO: 2020013 - RNA, 23 nt, Human
gggcacaccgggcacucagaaga

SEQ ID NO: 2020014 - RNA, 16 nt, Human
gggcacucagaagaca

SEQ ID NO: 2020015 - RNA, 19 nt, Human
gggcacucagaagacacug

SEQ ID NO: 2020016 - RNA, 14 nt, Human
gggcaccggggccu

SEQ ID NO: 2020017 - RNA, 16 nt, Human
gggcacagggucucua

SEQ ID NO: 2020018 - RNA, 13 nt, Human
gggcacagggucu

SEQ ID NO: 2020019 - RNA, 18 nt, Human
gggcacagggccuggccc

SEQ ID NO: 2020020 - RNA, 20 nt, Human
gggcacagggccuggcccau

SEQ ID NO: 2020021 - RNA, 13 nt, Human
gggcacaggucag

SEQ ID NO: 2020022 - RNA, 15 nt, Human
gggcacaggucaggc

SEQ ID NO: 2020023 - RNA, 18 nt, Human
gggcagaaggaagacuuc

SEQ ID NO: 2020024 - RNA, 14 nt, Human
gggcagaaggaaga

SEQ ID NO: 2020025 - RNA, 20 nt, Human
gggcacucagaagacacuga

SEQ ID NO: 2020026 - RNA, 19 nt, Human
gggcacgugguugaguggg

SEQ ID NO: 2020027 - RNA, 16 nt, Human
gggcacugcucucacc

SEQ ID NO: 2020028 - RNA, 17 nt, Human
gggcacugcucucaccu

SEQ ID NO: 2020029 - RNA, 13 nt, Human
gggcacugguggc

SEQ ID NO: 2020030 - RNA, 16 nt, Human
gggcacugguggcccg

SEQ ID NO: 2020031 - RNA, 17 nt, Human
gggcagguugguggggg

SEQ ID NO: 2020032 - RNA, 12 nt, Human
gggcagagcaga

SEQ ID NO: 2020033 - RNA, 11 nt, Human
gggcagagagg

SEQ ID NO: 2020034 - RNA, 11 nt, Human
gggcagagcag

SEQ ID NO: 2020035 - RNA, 19 nt, Human
gggcaggggaggccaucug

SEQ ID NO: 2020036 - RNA, 20 nt, Human
gggcaggggaggccaucugg

SEQ ID NO: 2020037 - RNA, 14 nt, Human
gggcagagaggcug

SEQ ID NO: 2020038 - RNA, 18 nt, Human
gggcagagaggcuguggu

SEQ ID NO: 2020039 - RNA, 14 nt, Human
gggcagagcacagc

SEQ ID NO: 2020040 - RNA, 21 nt, Human
gggccccugccucucugcagg

SEQ ID NO: 2020041 - RNA, 19 nt, Human
gggccccugccucucugca

SEQ ID NO: 2020042 - RNA, 18 nt, Human
gggccccugccucucugc

SEQ ID NO: 2020043 - RNA, 17 nt, Human
gggccccugccucucug

SEQ ID NO: 2020044 - RNA, 13 nt, Human
gggccccugccag

SEQ ID NO: 2020045 - RNA, 15 nt, Human
gggccccugccucuc

SEQ ID NO: 2020046 - RNA, 13 nt, Human
gggccccugccuc

SEQ ID NO: 2020047 - RNA, 23 nt, Human
gggcccccagcgagagucccugc

SEQ ID NO: 2020048 - RNA, 14 nt, Human
gggccccagaggcu

SEQ ID NO: 2020049 - RNA, 12 nt, Human
gggccccaccug

SEQ ID NO: 2020050 - RNA, 22 nt, Human
gggccccaccugcagcucccuc

SEQ ID NO: 2020051 - RNA, 13 nt, Human
gggccuggccuga

SEQ ID NO: 2020052 - RNA, 13 nt, Human
gggcccugccucc

SEQ ID NO: 2020053 - RNA, 14 nt, Human
gggcccugcagcuc

SEQ ID NO: 2020054 - RNA, 21 nt, Human
gggcccugcagcucucaugcu

SEQ ID NO: 2020055 - RNA, 22 nt, Human
gggccccugccucucugcaggu

SEQ ID NO: 2020056 - RNA, 13 nt, Human
gggccuggcuccc

SEQ ID NO: 2020057 - RNA, 17 nt, Human
gggccuggcucaggugg

SEQ ID NO: 2020058 - RNA, 18 nt, Human
gggccuggccugagcugg

SEQ ID NO: 2020059 - RNA, 14 nt, Human
gggccuggccugag

SEQ ID NO: 2020060 - RNA, 15 nt, Human
gggccuggcucccuc

SEQ ID NO: 2020061 - RNA, 17 nt, Human
gggccuggcucccucac

SEQ ID NO: 2020062 - RNA, 23 nt, Human
gggcauccauggggucucucaca

SEQ ID NO: 2020063 - RNA, 14 nt, Human
gggcauccaugggg

SEQ ID NO: 2020064 - RNA, 12 nt, Human
gggcaugacacg

SEQ ID NO: 2020065 - RNA, 15 nt, Human
gggcauggccaggug

SEQ ID NO: 2020066 - RNA, 17 nt, Human
gggcauggccagguggc

SEQ ID NO: 2020067 - RNA, 20 nt, Human
gggcauggccagguggccac

SEQ ID NO: 2020068 - RNA, 13 nt, Human
gggcauucucucu

SEQ ID NO: 2020069 - RNA, 18 nt, Human
gggcauucucucuccaag

SEQ ID NO: 2020070 - RNA, 23 nt, Human
gggccacagagaaaguacuucuc

SEQ ID NO: 2020071 - RNA, 16 nt, Human
gggccacagagaaagu

SEQ ID NO: 2020072 - RNA, 20 nt, Human
gggccaaaagcuucccuccc

SEQ ID NO: 2020073 - RNA, 17 nt, Human
gggcccagagagggugg

SEQ ID NO: 2020074 - RNA, 21 nt, Human
gggcccacccaagcaggaggc

SEQ ID NO: 2020075 - RNA, 14 nt, Human
ggucccaccccaca

SEQ ID NO: 2020076 - RNA, 17 nt, Human
ggucccaccccacacac

SEQ ID NO: 2020077 - RNA, 19 nt, Human
ggucagguugacaggaggu

SEQ ID NO: 2020078 - RNA, 22 nt, Human
ggucucacucugucgcccaguc

SEQ ID NO: 2020079 - RNA, 23 nt, Human
ggucucacucugucgcccagucu

SEQ ID NO: 2020080 - RNA, 21 nt, Human
ggucucucacagacaggaccc

SEQ ID NO: 2020081 - RNA, 23 nt, Human
ggucucucacagacaggaccccu

SEQ ID NO: 2020082 - RNA, 19 nt, Human
ggucucggaucaggcuccc

SEQ ID NO: 2020083 - RNA, 16 nt, Human
ggucucuagugcugug

SEQ ID NO: 2020084 - RNA, 19 nt, Human
ggucucuagugcugugaaa

SEQ ID NO: 2020085 - RNA, 12 nt, Human
ggugacaguggc

SEQ ID NO: 2020086 - RNA, 21 nt, Human
ggugacagagugagacucugu

SEQ ID NO: 2020087 - RNA, 14 nt, Human
ggucugacccacug

SEQ ID NO: 2020088 - RNA, 21 nt, Human
ggucugaguuguuaccccaag

SEQ ID NO: 2020089 - RNA, 20 nt, Human
ggugaccuuccaagagccug

SEQ ID NO: 2020090 - RNA, 21 nt, Human
ggugaccuuccaagagccuga

SEQ ID NO: 2020091 - RNA, 19 nt, Human
ggugaccuuccaagagccu

SEQ ID NO: 2020092 - RNA, 22 nt, Human
ggugaccagcaccaucucuccu

SEQ ID NO: 2020093 - RNA, 22 nt, Human
gguggccucccaacucacccca

SEQ ID NO: 2020094 - RNA, 23 nt, Human
gguggccacuccagaccccuggc

SEQ ID NO: 2020095 - RNA, 20 nt, Human
gguggccacuccagaccccu

SEQ ID NO: 2020096 - RNA, 21 nt, Human
gguggccacuccagaccccug

SEQ ID NO: 2020097 - RNA, 22 nt, Human
gguggccacuccagaccccugg

SEQ ID NO: 2020098 - RNA, 22 nt, Human
gguggcgcuagaggccauggag

SEQ ID NO: 2020099 - RNA, 23 nt, Human
gguggccucccaacucaccccag

SEQ ID NO: 2020100 - RNA, 21 nt, Human
ggugcuaucucccccagcccc

SEQ ID NO: 2020101 - RNA, 18 nt, Human
ggugcugcaguauguugc

SEQ ID NO: 2020102 - RNA, 15 nt, Human
ggugcugccauccag

SEQ ID NO: 2020103 - RNA, 21 nt, Human
ggugcugccauccagguucag

SEQ ID NO: 2020104 - RNA, 19 nt, Human
gguggcagugggagcugcc

SEQ ID NO: 2020105 - RNA, 22 nt, Human
gguggcagugggagcugccugu

SEQ ID NO: 2020106 - RNA, 21 nt, Human
gguggcaucauuccaggcccg

SEQ ID NO: 2020107 - RNA, 20 nt, Human
ggugcuaucucccccagccc

SEQ ID NO: 2020108 - RNA, 19 nt, Human
ggugcuaucucccccagcc

SEQ ID NO: 2020109 - RNA, 17 nt, Human
ggugcuaucucccccag

SEQ ID NO: 2020110 - RNA, 16 nt, Human
ggugcuaucuccccca

SEQ ID NO: 2020111 - RNA, 15 nt, Human
ggugagaagcagagg

SEQ ID NO: 2020112 - RNA, 16 nt, Human
ggugagaggggaacag

SEQ ID NO: 2020113 - RNA, 19 nt, Human
ggugagcauuacaggcaag

SEQ ID NO: 2020114 - RNA, 15 nt, Human
ggugggugaaaggaa

SEQ ID NO: 2020115 - RNA, 15 nt, Human
gguggguuaauuaaa

SEQ ID NO: 2020116 - RNA, 16 nt, Human
gguggugaccucugcc

SEQ ID NO: 2020117 - RNA, 14 nt, Human
gguggugaccucug

SEQ ID NO: 2020118 - RNA, 15 nt, Human
gguggugaccucugc

SEQ ID NO: 2020119 - RNA, 18 nt, Human
gguguaaucaugaaggag

SEQ ID NO: 2020120 - RNA, 15 nt, Human
ggugguuuucuguuc

SEQ ID NO: 2020121 - RNA, 18 nt, Human
ggugguuuucuguucuuu

SEQ ID NO: 2020122 - RNA, 22 nt, Human
ggugguucacucuuggagccug

SEQ ID NO: 2020123 - RNA, 23 nt, Human
ggugguucacucuuggagccugc

SEQ ID NO: 2020124 - RNA, 21 nt, Human
ggugguuauggagaggguguc

SEQ ID NO: 2020125 - RNA, 17 nt, Human
ggugguuucagaaaugu

SEQ ID NO: 2020126 - RNA, 18 nt, Human
ggugguuucagaaaugug

SEQ ID NO: 2020127 - RNA, 19 nt, Human
ggugucaccugaagacuca

SEQ ID NO: 2020128 - RNA, 17 nt, Human
ggugucaguauccaggc

SEQ ID NO: 2020129 - RNA, 13 nt, Human
gguguccccacca

SEQ ID NO: 2020130 - RNA, 18 nt, Human
gguguccccaccaucugc

SEQ ID NO: 2020131 - RNA, 21 nt, Human
gguguccccaccaucugcugu

SEQ ID NO: 2020132 - RNA, 19 nt, Human
ggugucaagagggucugag

SEQ ID NO: 2020133 - RNA, 17 nt, Human
ggugucaagagggucug

SEQ ID NO: 2020134 - RNA, 13 nt, Human
gguuauggagagg

SEQ ID NO: 2020135 - RNA, 21 nt, Human
gguuaguggauggaaggggcu

SEQ ID NO: 2020136 - RNA, 22 nt, Human
gguuaguggauggaaggggcug

SEQ ID NO: 2020137 - RNA, 15 nt, Human
gguuauagugcaaua

SEQ ID NO: 2020138 - RNA, 17 nt, Human
gguuauagugcaauaua

SEQ ID NO: 2020139 - RNA, 17 nt, Human
gguuaggcauuguggga

SEQ ID NO: 2020140 - RNA, 18 nt, Human
gguuaccgauuucaaagu

SEQ ID NO: 2020141 - RNA, 14 nt, Human
gguuagauauagag

SEQ ID NO: 2020142 - RNA, 21 nt, Human
gguuacccaguuagcucucaa

SEQ ID NO: 2020143 - RNA, 13 nt, Human
gguuaacaaauaa

SEQ ID NO: 2020144 - RNA, 21 nt, Human
gguuaacaaauaacaacuuuu

SEQ ID NO: 2020145 - RNA, 12 nt, Human
gguuaaaaugga

SEQ ID NO: 2020146 - RNA, 13 nt, Human
gguuaaauguuuu

SEQ ID NO: 2020147 - RNA, 14 nt, Human
gguuaaauguuuug

SEQ ID NO: 2020148 - RNA, 13 nt, Human
gguucaaagauau

SEQ ID NO: 2020149 - RNA, 23 nt, Human
gguuauuuugauguaaagauguu

SEQ ID NO: 2020150 - RNA, 16 nt, Human
gguuauuuaaaaugua

SEQ ID NO: 2020151 - RNA, 18 nt, Human
gguuauuuaaaauguaaa

SEQ ID NO: 2020152 - RNA, 19 nt, Human
gguucacucuuggagccug

SEQ ID NO: 2020153 - RNA, 20 nt, Human
gguucacucuuggagccugc

SEQ ID NO: 2020154 - RNA, 16 nt, Human
gguucaccauugagac

SEQ ID NO: 2020155 - RNA, 21 nt, Human
gguucaaagauauuuugcuuu

SEQ ID NO: 2020156 - RNA, 17 nt, Human
gguucaaaccugugaag

SEQ ID NO: 2020157 - RNA, 13 nt, Human
gguucaaaugugu

SEQ ID NO: 2020158 - RNA, 21 nt, Human
gguucacucuuggagccugca

SEQ ID NO: 2020159 - RNA, 23 nt, Human
gguucacucuuggagccugcaga

SEQ ID NO: 2020160 - RNA, 14 nt, Human
gguucuuucuuccu

SEQ ID NO: 2020161 - RNA, 16 nt, Human
gguucuuucuuccucu

SEQ ID NO: 2020162 - RNA, 13 nt, Human
gguugagguuuca

SEQ ID NO: 2020163 - RNA, 18 nt, Human
gguucuuucauuugcuuu

SEQ ID NO: 2020164 - RNA, 16 nt, Human
ggggcaacccugguga

SEQ ID NO: 2020165 - RNA, 13 nt, Human
ggggcacagggag

SEQ ID NO: 2020166 - RNA, 12 nt, Human
ggggcucagcaa

SEQ ID NO: 2020167 - RNA, 14 nt, Human
ggggcucagcaagg

SEQ ID NO: 2020168 - RNA, 20 nt, Human
ggggcucccgccuccaaccc

SEQ ID NO: 2020169 - RNA, 15 nt, Human
ggggcucagcaaggc

SEQ ID NO: 2020170 - RNA, 20 nt, Human
ggggcucagcaaggccaccu

SEQ ID NO: 2020171 - RNA, 21 nt, Human
ggggcucagcaaggccaccuc

SEQ ID NO: 2020172 - RNA, 17 nt, Human
ggggcugaggugggagg

SEQ ID NO: 2020173 - RNA, 19 nt, Human
ggggaaaaucagccugcuc

SEQ ID NO: 2020174 - RNA, 17 nt, Human
ggggaaaaucagccugc

SEQ ID NO: 2020175 - RNA, 16 nt, Human
ggggaaaaucagccug

SEQ ID NO: 2020176 - RNA, 17 nt, Human
gggcuuuccugugccag

SEQ ID NO: 2020177 - RNA, 21 nt, Human
gggcuuuccugugccagguga

SEQ ID NO: 2020178 - RNA, 22 nt, Human
gggcuuggggaccagagcugcc

SEQ ID NO: 2020179 - RNA, 17 nt, Human
gggcuuguaguucuuua

SEQ ID NO: 2020180 - RNA, 17 nt, Human
gggcuugucauagccag

SEQ ID NO: 2020181 - RNA, 13 nt, Human
gggcuuuaaaauu

SEQ ID NO: 2020182 - RNA, 11 nt, Human
gggccugggcc

SEQ ID NO: 2020183 - RNA, 15 nt, Human
gggccugggccuggc

SEQ ID NO: 2020184 - RNA, 15 nt, Human
ggggaaaagagauga

SEQ ID NO: 2020185 - RNA, 21 nt, Human
ggggaaaaucagccugcucca

SEQ ID NO: 2020186 - RNA, 15 nt, Human
ggggaggccaucugg

SEQ ID NO: 2020187 - RNA, 14 nt, Human
ggggagggugacag

SEQ ID NO: 2020188 - RNA, 18 nt, Human
ggggaggggcugugggcg

SEQ ID NO: 2020189 - RNA, 22 nt, Human
ggggcugcaccggcuggccugg

SEQ ID NO: 2020190 - RNA, 21 nt, Human
ggggcugcaccggcuggccug

SEQ ID NO: 2020191 - RNA, 12 nt, Human
ggggcugcaccg

SEQ ID NO: 2020192 - RNA, 19 nt, Human
ggggcugaggugggaggau

SEQ ID NO: 2020193 - RNA, 23 nt, Human
ggggcugcaccggcuggccuggc

SEQ ID NO: 2020194 - RNA, 22 nt, Human
gggggaggugggauccuccagg

SEQ ID NO: 2020195 - RNA, 22 nt, Human
gggguggcccgaaagggucucc

SEQ ID NO: 2020196 - RNA, 17 nt, Human
gggguggggaccucagg

SEQ ID NO: 2020197 - RNA, 20 nt, Human
gggguggggggggugcuggg

SEQ ID NO: 2020198 - RNA, 18 nt, Human
ggggugcugggccccugc

SEQ ID NO: 2020199 - RNA, 12 nt, Human
gggguggccucc

SEQ ID NO: 2020200 - RNA, 12 nt, Human
gggucugaggaa

SEQ ID NO: 2020201 - RNA, 21 nt, Human
gggucugaggaauccagaccc

SEQ ID NO: 2020202 - RNA, 17 nt, Human
gggucuccucaggacca

SEQ ID NO: 2020203 - RNA, 15 nt, Human
gggucucuagugcug

SEQ ID NO: 2020204 - RNA, 20 nt, Human
gggucucuagugcugugaaa

SEQ ID NO: 2020205 - RNA, 18 nt, Human
gggucucucacagacagg

SEQ ID NO: 2020206 - RNA, 22 nt, Human
gggucucucacagacaggaccc

SEQ ID NO: 2020207 - RNA, 24 nt, Human
gggucucucacagacaggaccccu

SEQ ID NO: 2020208 - RNA, 11 nt, Human
gggguuuuucu

SEQ ID NO: 2020209 - RNA, 17 nt, Human
ggguaagugagagaggg

SEQ ID NO: 2020210 - RNA, 14 nt, Human
gggucucacucugu

SEQ ID NO: 2020211 - RNA, 17 nt, Human
gggugcugggccccugc

SEQ ID NO: 2020212 - RNA, 22 nt, Human
ggguucaagcgauucuucugcu

SEQ ID NO: 2020213 - RNA, 18 nt, Human
ggguuagacugccagcuc

SEQ ID NO: 2020214 - RNA, 18 nt, Human
ggguguuguauggggagg

SEQ ID NO: 2020215 - RNA, 23 nt, Human
ggguucaagcgauucuucugcuu

SEQ ID NO: 2020216 - RNA, 12 nt, Human
ggguucuaccca

SEQ ID NO: 2020217 - RNA, 20 nt, Human
ggguuccuuccucugagccu

SEQ ID NO: 2020218 - RNA, 21 nt, Human
ggguuccuuccucugagccuu

SEQ ID NO: 2020219 - RNA, 19 nt, Human
ggguuccuuccucugagcc

SEQ ID NO: 2020220 - RNA, 19 nt, Human
ggguucuuucuuccucugc

SEQ ID NO: 2020221 - RNA, 13 nt, Human
ggguuccuucugg

SEQ ID NO: 2020222 - RNA, 17 nt, Human
ggguucuuucuuccucu

SEQ ID NO: 2020223 - RNA, 16 nt, Human
ggguucuuucuuccuc

SEQ ID NO: 2020224 - RNA, 17 nt, Human
gggugcagcaucuggaa

SEQ ID NO: 2020225 - RNA, 20 nt, Human
gggugcugcuaauucuuugc

SEQ ID NO: 2020226 - RNA, 18 nt, Human
gggugaguccuccagaac

SEQ ID NO: 2020227 - RNA, 18 nt, Human
gggucuugcaaaauuccu

SEQ ID NO: 2020228 - RNA, 22 nt, Human
gggucuugcaaaauuccugacg

SEQ ID NO: 2020229 - RNA, 20 nt, Human
gggucuugguuccagccugc

SEQ ID NO: 2020230 - RNA, 11 nt, Human
gggucuuccua

SEQ ID NO: 2020231 - RNA, 19 nt, Human
gggugacagagcaagugag

SEQ ID NO: 2020232 - RNA, 17 nt, Human
gggugaagugaagacaa

SEQ ID NO: 2020233 - RNA, 18 nt, Human
gguagcauuuguguugaa

SEQ ID NO: 2020234 - RNA, 19 nt, Human
gguagcccccucuucccug

SEQ ID NO: 2020235 - RNA, 14 nt, Human
gguagaacgccagg

SEQ ID NO: 2020236 - RNA, 23 nt, Human
gguagaacgccagggaccccaga

SEQ ID NO: 2020237 - RNA, 18 nt, Human
gguagaaugaccuuguaa

SEQ ID NO: 2020238 - RNA, 20 nt, Human
gguagaaugaccuuguaaug

SEQ ID NO: 2020239 - RNA, 20 nt, Human
gguagaggugcaugccuaau

SEQ ID NO: 2020240 - RNA, 22 nt, Human
gguagaagcccuucuaccuucc

SEQ ID NO: 2020241 - RNA, 23 nt, Human
gguagaaauaucugaaaauguau

SEQ ID NO: 2020242 - RNA, 11 nt, Human
gguacccacug

SEQ ID NO: 2020243 - RNA, 16 nt, Human
gguacccacugcucug

SEQ ID NO: 2020244 - RNA, 13 nt, Human
gguacccacugcu

SEQ ID NO: 2020245 - RNA, 22 nt, Human
gguagaaauaucugaaaaugua

SEQ ID NO: 2020246 - RNA, 20 nt, Human
gguacuuguggacacagcuc

SEQ ID NO: 2020247 - RNA, 16 nt, Human
gguacuuguggacaca

SEQ ID NO: 2020248 - RNA, 17 nt, Human
gguacuuguggacacag

SEQ ID NO: 2020249 - RNA, 12 nt, Human
ggucacucuggc

SEQ ID NO: 2020250 - RNA, 22 nt, Human
ggucaccucacucagcaccacu

SEQ ID NO: 2020251 - RNA, 19 nt, Human
ggucaccucacucagcacc

SEQ ID NO: 2020252 - RNA, 21 nt, Human
ggucaccucacucagcaccac

SEQ ID NO: 2020253 - RNA, 16 nt, Human
ggucacaggacucugc

SEQ ID NO: 2020254 - RNA, 18 nt, Human
ggucacaggacucugccu

SEQ ID NO: 2020255 - RNA, 16 nt, Human
ggucaaaugcuagaaa

SEQ ID NO: 2020256 - RNA, 16 nt, Human
ggucccaccccacaca

SEQ ID NO: 2020257 - RNA, 15 nt, Human
ggucccaccccacac

SEQ ID NO: 2020258 - RNA, 17 nt, Human
ggucaggccgggcagag

SEQ ID NO: 2020259 - RNA, 11 nt, Human
ggucagagccu

SEQ ID NO: 2020260 - RNA, 15 nt, Human
ggucacuucuucugu

SEQ ID NO: 2020261 - RNA, 17 nt, Human
ggucagaagagagggug

SEQ ID NO: 2020262 - RNA, 19 nt, Human
gccuuacccucauguucuu

SEQ ID NO: 2020263 - RNA, 20 nt, Human
gccuuagaagucacacagua

SEQ ID NO: 2020264 - RNA, 17 nt, Human
gccuuagaaccuuucuu

SEQ ID NO: 2020265 - RNA, 16 nt, Human
gccuuagaaccuuucu

SEQ ID NO: 2020266 - RNA, 23 nt, Human
gccuuauggaacacucugagacu

SEQ ID NO: 2020267 - RNA, 22 nt, Human
gccuuauggaacacucugagac

SEQ ID NO: 2020268 - RNA, 21 nt, Human
gccuuauggaacacucugaga

SEQ ID NO: 2020269 - RNA, 15 nt, Human
gccuuagggaagcug

SEQ ID NO: 2020270 - RNA, 22 nt, Human
gccuuagggaagcuggccugag

SEQ ID NO: 2020271 - RNA, 15 nt, Human
gccugguggcagcug

SEQ ID NO: 2020272 - RNA, 18 nt, Human
gccuguaaucacagcuac

SEQ ID NO: 2020273 - RNA, 14 nt, Human
gccuggugguuuuc

SEQ ID NO: 2020274 - RNA, 16 nt, Human
gccuggugguuuucaa

SEQ ID NO: 2020275 - RNA, 16 nt, Human
gccugguggcagcugc

SEQ ID NO: 2020276 - RNA, 17 nt, Human
gccugguggcagcugcg

SEQ ID NO: 2020277 - RNA, 16 nt, Human
gccuuucagcaggcag

SEQ ID NO: 2020278 - RNA, 17 nt, Human
gccuuucagcaggcagc

SEQ ID NO: 2020279 - RNA, 18 nt, Human
gccuuucagcaggcagcc

SEQ ID NO: 2020280 - RNA, 22 nt, Human
gccuuugggugcuguuuugcca

SEQ ID NO: 2020281 - RNA, 17 nt, Human
gccuuugggugcuguuu

SEQ ID NO: 2020282 - RNA, 21 nt, Human
gccuuuuguucauuucauccu

SEQ ID NO: 2020283 - RNA, 18 nt, Human
gccuucggccuccauccu

SEQ ID NO: 2020284 - RNA, 13 nt, Human
gccuucagcucua

SEQ ID NO: 2020285 - RNA, 16 nt, Human
gccuucagcucuacag

SEQ ID NO: 2020286 - RNA, 19 nt, Human
gccuugggauccaggcccc

SEQ ID NO: 2020287 - RNA, 14 nt, Human
gccuugggcucugc

SEQ ID NO: 2020288 - RNA, 15 nt, Human
gccuugggcucugcu

SEQ ID NO: 2020289 - RNA, 16 nt, Human
gccuugggcucugcug

SEQ ID NO: 2020290 - RNA, 17 nt, Human
gccuugggcucugcuga

SEQ ID NO: 2020291 - RNA, 19 nt, Human
gccuucggccuccauccug

SEQ ID NO: 2020292 - RNA, 21 nt, Human
gccuuuaucuaccaacuuuca

SEQ ID NO: 2020293 - RNA, 22 nt, Human
gccuuuaucuaccaacuuucaa

SEQ ID NO: 2020294 - RNA, 15 nt, Human
gccuuggggacaacc

SEQ ID NO: 2020295 - RNA, 20 nt, Human
gcuaacuugcuuaaauguga

SEQ ID NO: 2020296 - RNA, 22 nt, Human
gcuaacuugcuuaaaugugaau

SEQ ID NO: 2020297 - RNA, 14 nt, Human
gcuaagaauauuug

SEQ ID NO: 2020298 - RNA, 16 nt, Human
gcuaagaauauuugaa

SEQ ID NO: 2020299 - RNA, 23 nt, Human
gcuaagaaaccaggaguaaaaga

SEQ ID NO: 2020300 - RNA, 18 nt, Human
gcuaacuugcuuaaaugu

SEQ ID NO: 2020301 - RNA, 19 nt, Human
gcuaacuugcuuaaaugug

SEQ ID NO: 2020302 - RNA, 22 nt, Human
gcuacacaggggaaaagaggag

SEQ ID NO: 2020303 - RNA, 14 nt, Human
gcuaacauggaagu

SEQ ID NO: 2020304 - RNA, 18 nt, Human
gcuaacauggaaguacua

SEQ ID NO: 2020305 - RNA, 17 nt, Human
gcuaacauggaaguacu

SEQ ID NO: 2020306 - RNA, 17 nt, Human
gcgucgcccucccaggc

SEQ ID NO: 2020307 - RNA, 16 nt, Human
gcgucgcccucccagg

SEQ ID NO: 2020308 - RNA, 14 nt, Human
gcgugagccacugc

SEQ ID NO: 2020309 - RNA, 16 nt, Human
gcgugagccacugcac

SEQ ID NO: 2020310 - RNA, 16 nt, Human
gcgugagaccugcccc

SEQ ID NO: 2020311 - RNA, 15 nt, Human
gcgugagccacugca

SEQ ID NO: 2020312 - RNA, 22 nt, Human
gcuagacgagcaggcuucuucc

SEQ ID NO: 2020313 - RNA, 21 nt, Human
gcuagacgagcaggcuucuuc

SEQ ID NO: 2020314 - RNA, 21 nt, Human
gcuacauuuccgccacauccc

SEQ ID NO: 2020315 - RNA, 20 nt, Human
gcuacauggggucugggugg

SEQ ID NO: 2020316 - RNA, 15 nt, Human
gcuacauuuccgcca

SEQ ID NO: 2020317 - RNA, 19 nt, Human
gcggaaugaaccacaucuu

SEQ ID NO: 2020318 - RNA, 21 nt, Human
gcgcuucacuuggguccaggc

SEQ ID NO: 2020319 - RNA, 16 nt, Human
gcggacagccacggcc

SEQ ID NO: 2020320 - RNA, 19 nt, Human
gcggacagccacggccagg

SEQ ID NO: 2020321 - RNA, 23 nt, Human
gcggacagccacggccaggccag

SEQ ID NO: 2020322 - RNA, 18 nt, Human
gcggggacagcuccuucu

SEQ ID NO: 2020323 - RNA, 16 nt, Human
gcggacaucagcuggu

SEQ ID NO: 2020324 - RNA, 19 nt, Human
gcggggacagcuccuucug

SEQ ID NO: 2020325 - RNA, 23 nt, Human
gcggggacagcuccuucuguccu

SEQ ID NO: 2020326 - RNA, 20 nt, Human
gcgguccacccaggagcccc

SEQ ID NO: 2020327 - RNA, 23 nt, Human
gcgguccacccaggagccccgag

SEQ ID NO: 2020328 - RNA, 22 nt, Human
gcgcuccgggacguggcaccuc

SEQ ID NO: 2020329 - RNA, 20 nt, Human
gcgccuacaggagugagcac

SEQ ID NO: 2020330 - RNA, 21 nt, Human
gcgccuacaggagugagcacu

SEQ ID NO: 2020331 - RNA, 14 nt, Human
gcgcugccccuggc

SEQ ID NO: 2020332 - RNA, 23 nt, Human
gcgcucgaaguugaucuccccag

SEQ ID NO: 2020333 - RNA, 17 nt, Human
gcgcugccccuggcagc

SEQ ID NO: 2020334 - RNA, 18 nt, Human
gcgccuacaggagugagc

SEQ ID NO: 2020335 - RNA, 14 nt, Human
gccucccugccagu

SEQ ID NO: 2020336 - RNA, 15 nt, Human
gccucucccaucacu

SEQ ID NO: 2020337 - RNA, 17 nt, Human
gccucucugcagguccc

SEQ ID NO: 2020338 - RNA, 16 nt, Human
gccucucugcaggucc

SEQ ID NO: 2020339 - RNA, 14 nt, Human
gccucucugcaggu

SEQ ID NO: 2020340 - RNA, 10 nt, Human
gccucucugc

SEQ ID NO: 2020341 - RNA, 12 nt, Human
gccucagccucc

SEQ ID NO: 2020342 - RNA, 14 nt, Human
gccucagccuccca

SEQ ID NO: 2020343 - RNA, 22 nt, Human
gccucagccucccaaagugcug

SEQ ID NO: 2020344 - RNA, 18 nt, Human
gccucccgaauagcuggg

SEQ ID NO: 2020345 - RNA, 19 nt, Human
gccucccgaauagcuggga

SEQ ID NO: 2020346 - RNA, 21 nt, Human
gccucccgaguagcugggacu

SEQ ID NO: 2020347 - RNA, 23 nt, Human
gccucccgaguagcugggacuac

SEQ ID NO: 2020348 - RNA, 20 nt, Human
gccucccgaauagcugggac

SEQ ID NO: 2020349 - RNA, 20 nt, Human
gccugcagagcugcgggcug

SEQ ID NO: 2020350 - RNA, 14 nt, Human
gccuggacccugug

SEQ ID NO: 2020351 - RNA, 11 nt, Human
gccugcccagg

SEQ ID NO: 2020352 - RNA, 12 nt, Human
gccugcccaggc

SEQ ID NO: 2020353 - RNA, 21 nt, Human
gccucugcacuccccugcugg

SEQ ID NO: 2020354 - RNA, 12 nt, Human
gccucugcauuc

SEQ ID NO: 2020355 - RNA, 15 nt, Human
gccucugcacucccc

SEQ ID NO: 2020356 - RNA, 15 nt, Human
gccucugcauucagg

SEQ ID NO: 2020357 - RNA, 16 nt, Human
gccugagaggggaagc

SEQ ID NO: 2020358 - RNA, 13 nt, Human
gccugagaugccu

SEQ ID NO: 2020359 - RNA, 14 nt, Human
gccugagaugccug

SEQ ID NO: 2020360 - RNA, 18 nt, Human
gccugaagaguccucuga

SEQ ID NO: 2020361 - RNA, 20 nt, Human
gccugaagaguccucugaau

SEQ ID NO: 2020362 - RNA, 15 nt, Human
gccugaagucacaca

SEQ ID NO: 2020363 - RNA, 20 nt, Human
gccucugcacuccccugcug

SEQ ID NO: 2020364 - RNA, 19 nt, Human
gccucugcacuccccugcu

SEQ ID NO: 2020365 - RNA, 18 nt, Human
gccucugcacuccccugc

SEQ ID NO: 2020366 - RNA, 17 nt, Human
gccucugcacuccccug

SEQ ID NO: 2020367 - RNA, 16 nt, Human
gccucugcacuccccu

SEQ ID NO: 2020368 - RNA, 16 nt, Human
gccucugacacacagc

SEQ ID NO: 2020369 - RNA, 15 nt, Human
gccucugacacacag

SEQ ID NO: 2020370 - RNA, 22 nt, Human
gccucaagugauucuccugccu

SEQ ID NO: 2020371 - RNA, 24 nt, Human
gccucaagugauucuccugccuca

SEQ ID NO: 2020372 - RNA, 19 nt, Human
gccucaaauccaggacccu

SEQ ID NO: 2020373 - RNA, 22 nt, Human
gccucaaauccaggacccugcc

SEQ ID NO: 2020374 - RNA, 18 nt, Human
gccucagcauccuggcac

SEQ ID NO: 2020375 - RNA, 17 nt, Human
gccucagcauccuggca

SEQ ID NO: 2020376 - RNA, 21 nt, Human
gccucagcauccuggcacccg

SEQ ID NO: 2020377 - RNA, 21 nt, Human
gccuaagauauacuuguuuuu

SEQ ID NO: 2020378 - RNA, 14 nt, Human
gccuaaggcugaac

SEQ ID NO: 2020379 - RNA, 17 nt, Human
gccuauuuuaauaaaca

SEQ ID NO: 2020380 - RNA, 21 nt, Human
gccuauuuucaugauuucuuu

SEQ ID NO: 2020381 - RNA, 15 nt, Human
gccucaaauccagga

SEQ ID NO: 2020382 - RNA, 16 nt, Human
gccucaaauccaggac

SEQ ID NO: 2020383 - RNA, 18 nt, Human
gccucaaauccaggaccc

SEQ ID NO: 2020384 - RNA, 14 nt, Human
gccucaaauccagg

SEQ ID NO: 2020385 - RNA, 23 nt, Human
gccgucuaccugaggggccucuu

SEQ ID NO: 2020386 - RNA, 22 nt, Human
gccgucuaccugaggggccucu

SEQ ID NO: 2020387 - RNA, 20 nt, Human
gccgucuaccugaggggccu

SEQ ID NO: 2020388 - RNA, 18 nt, Human
gccgucuaccugaggggc

SEQ ID NO: 2020389 - RNA, 15 nt, Human
gccuaaaaauaaagc

SEQ ID NO: 2020390 - RNA, 19 nt, Human
gccguugcugacuuagaau

SEQ ID NO: 2020391 - RNA, 18 nt, Human
gccguugccgcugauguu

SEQ ID NO: 2020392 - RNA, 17 nt, Human
gccguugcugacuuaga

SEQ ID NO: 2020393 - RNA, 18 nt, Human
gccguugcugacuuagaa

SEQ ID NO: 2020394 - RNA, 11 nt, Human
gccguggcuuc

SEQ ID NO: 2020395 - RNA, 12 nt, Human
gccguggcuucc

SEQ ID NO: 2020396 - RNA, 13 nt, Human
gccguggcuuccc

SEQ ID NO: 2020397 - RNA, 15 nt, Human
gccguggcuucccgc

SEQ ID NO: 2020398 - RNA, 13 nt, Human
gcccuucucucca

SEQ ID NO: 2020399 - RNA, 21 nt, Human
gcccuucggaggaccagggcu

SEQ ID NO: 2020400 - RNA, 22 nt, Human
gcccuuccucuccacugccuuc

SEQ ID NO: 2020401 - RNA, 13 nt, Human
gcccuuccucugc

SEQ ID NO: 2020402 - RNA, 14 nt, Human
gcccuuccucugcu

SEQ ID NO: 2020403 - RNA, 15 nt, Human
gcccuuccucugcuc

SEQ ID NO: 2020404 - RNA, 17 nt, Human
gcccuuccucugcuccc

SEQ ID NO: 2020405 - RNA, 16 nt, Human
gccgagauagccaagg

SEQ ID NO: 2020406 - RNA, 15 nt, Human
gcccuugcccaugcu

SEQ ID NO: 2020407 - RNA, 17 nt, Human
gccgagauagccaaggc

SEQ ID NO: 2020408 - RNA, 17 nt, Human
gccgcagcccugcagag

SEQ ID NO: 2020409 - RNA, 16 nt, Human
gccgcagcccugcaga

SEQ ID NO: 2020410 - RNA, 15 nt, Human
gccgcagcccugcag

SEQ ID NO: 2020411 - RNA, 14 nt, Human
gccgggcagagcac

SEQ ID NO: 2020412 - RNA, 17 nt, Human
gccgggcagagcacagc

SEQ ID NO: 2020413 - RNA, 16 nt, Human
gccgggcaaacuggcc

SEQ ID NO: 2020414 - RNA, 12 nt, Human
gcccggcuccag

SEQ ID NO: 2020415 - RNA, 19 nt, Human
gccccuucugacccaugcu

SEQ ID NO: 2020416 - RNA, 20 nt, Human
gccccuucugacccaugcug

SEQ ID NO: 2020417 - RNA, 18 nt, Human
gcccgggcucugccuccc

SEQ ID NO: 2020418 - RNA, 15 nt, Human
gcccgggcucugccu

SEQ ID NO: 2020419 - RNA, 14 nt, Human
gcccgggcucugcc

SEQ ID NO: 2020420 - RNA, 13 nt, Human
gcccgggcucugc

SEQ ID NO: 2020421 - RNA, 13 nt, Human
gcccggcuccagg

SEQ ID NO: 2020422 - RNA, 14 nt, Human
gcccggcuccaggc

SEQ ID NO: 2020423 - RNA, 12 nt, Human
gcccgggcucug

SEQ ID NO: 2020424 - RNA, 15 nt, Human
gcccggcuccaggcu

SEQ ID NO: 2020425 - RNA, 22 nt, Human
gcccuccucccucccagcucca

SEQ ID NO: 2020426 - RNA, 18 nt, Human
gcccuccucccucccagc

SEQ ID NO: 2020427 - RNA, 20 nt, Human
gcccuccucccucccagcuc

SEQ ID NO: 2020428 - RNA, 22 nt, Human
gcccucugcccacucccugcaa

SEQ ID NO: 2020429 - RNA, 20 nt, Human
gcccgggcucugccucccau

SEQ ID NO: 2020430 - RNA, 19 nt, Human
gcccgggcucugccuccca

SEQ ID NO: 2020431 - RNA, 21 nt, Human
gcccgggcucugccucccauc

SEQ ID NO: 2020432 - RNA, 15 nt, Human
gcccucccugccccu

SEQ ID NO: 2020433 - RNA, 19 nt, Human
gccccugcacuccagccug

SEQ ID NO: 2020434 - RNA, 23 nt, Human
gccccuggcagccccuguucugg

SEQ ID NO: 2020435 - RNA, 11 nt, Human
gccccugagcc

SEQ ID NO: 2020436 - RNA, 13 nt, Human
gccccugcacaaa

SEQ ID NO: 2020437 - RNA, 12 nt, Human
gccccugagccc

SEQ ID NO: 2020438 - RNA, 13 nt, Human
gccccugagccca

SEQ ID NO: 2020439 - RNA, 14 nt, Human
gccccugagcccac

SEQ ID NO: 2020440 - RNA, 15 nt, Human
gccccugagcccacu

SEQ ID NO: 2020441 - RNA, 16 nt, Human
gccccugagcccacug

SEQ ID NO: 2020442 - RNA, 17 nt, Human
gccccuucccccuccaa

SEQ ID NO: 2020443 - RNA, 23 nt, Human
gccccucaacucuccuccagagu

SEQ ID NO: 2020444 - RNA, 15 nt, Human
gccccguucuguuug

SEQ ID NO: 2020445 - RNA, 21 nt, Human
gccccucagggucccuggugg

SEQ ID NO: 2020446 - RNA, 19 nt, Human
gccccucagggucccuggu

SEQ ID NO: 2020447 - RNA, 22 nt, Human
gccccgaggccuucucugaagg

SEQ ID NO: 2020448 - RNA, 14 nt, Human
gccccgcccaggcu

SEQ ID NO: 2020449 - RNA, 22 nt, Human
gccccauucugccugcccaggc

SEQ ID NO: 2020450 - RNA, 23 nt, Human
gccccauucugccugcccaggcc

SEQ ID NO: 2020451 - RNA, 23 nt, Human
gccccgaggccuucucugaagga

SEQ ID NO: 2020452 - RNA, 21 nt, Human
gccccgucuacagcuccccca

SEQ ID NO: 2020453 - RNA, 13 nt, Human
gccccgucucagg

SEQ ID NO: 2020454 - RNA, 14 nt, Human
gccccgucucaggu

SEQ ID NO: 2020455 - RNA, 17 nt, Human
gccccgucucaggucug

SEQ ID NO: 2020456 - RNA, 17 nt, Human
gccccgugggguuccuc

SEQ ID NO: 2020457 - RNA, 17 nt, Human
gccccgucccccucugg

SEQ ID NO: 2020458 - RNA, 21 nt, Human
gccccgucccccucuggcucc

SEQ ID NO: 2020459 - RNA, 18 nt, Human
gccccgucuacagcuccc

SEQ ID NO: 2020460 - RNA, 15 nt, Human
gccccaggaaaggcc

SEQ ID NO: 2020461 - RNA, 17 nt, Human
gccccagcuugggcaga

SEQ ID NO: 2020462 - RNA, 22 nt, Human
gccccaggaaaggcccagccac

SEQ ID NO: 2020463 - RNA, 14 nt, Human
gccccagcgcugac

SEQ ID NO: 2020464 - RNA, 23 nt, Human
gccccagcgcugacgugucagga

SEQ ID NO: 2020465 - RNA, 22 nt, Human
gcccaucugggggccucuucug

SEQ ID NO: 2020466 - RNA, 15 nt, Human
gccccagugcccaca

SEQ ID NO: 2020467 - RNA, 16 nt, Human
gccccagugcccacag

SEQ ID NO: 2020468 - RNA, 17 nt, Human
gccccagugcccacagg

SEQ ID NO: 2020469 - RNA, 21 nt, Human
gccccagugcccacaggauca

SEQ ID NO: 2020470 - RNA, 23 nt, Human
gccccauccucuguacagagccc

SEQ ID NO: 2020471 - RNA, 17 nt, Human
gccccauucugccugcc

SEQ ID NO: 2020472 - RNA, 18 nt, Human
gccccauucugccugccc

SEQ ID NO: 2020473 - RNA, 20 nt, Human
gccccauucugccugcccag

SEQ ID NO: 2020474 - RNA, 21 nt, Human
gccccauucugccugcccagg

SEQ ID NO: 2020475 - RNA, 21 nt, Human
gcccacccugcuuggcccagg

SEQ ID NO: 2020476 - RNA, 22 nt, Human
gcccacccugcuuggcccaggg

SEQ ID NO: 2020477 - RNA, 23 nt, Human
gcccacccugcuuggcccagggg

SEQ ID NO: 2020478 - RNA, 18 nt, Human
gcccaggccuccuacagc

SEQ ID NO: 2020479 - RNA, 16 nt, Human
gcccaggaaaggcucc

SEQ ID NO: 2020480 - RNA, 15 nt, Human
gcccaggaaaggcuc

SEQ ID NO: 2020481 - RNA, 12 nt, Human
gcccaggaaagg

SEQ ID NO: 2020482 - RNA, 11 nt, Human
gcccaggcugg

SEQ ID NO: 2020483 - RNA, 17 nt, Human
gcccaggccugccuguu

SEQ ID NO: 2020484 - RNA, 23 nt, Human
gcccagcuuuucauugcugugac

SEQ ID NO: 2020485 - RNA, 16 nt, Human
gcccaggcuggcgugc

SEQ ID NO: 2020486 - RNA, 14 nt, Human
gcccaggcuggcgu

SEQ ID NO: 2020487 - RNA, 15 nt, Human
gcccaggcuggcgug

SEQ ID NO: 2020488 - RNA, 18 nt, Human
gcccauccccaggcaccu

SEQ ID NO: 2020489 - RNA, 22 nt, Human
gcccagucuggaaugcaguggu

SEQ ID NO: 2020490 - RNA, 18 nt, Human
gcccagucccagcagcca

SEQ ID NO: 2020491 - RNA, 19 nt, Human
gcccagucccagcagccag

SEQ ID NO: 2020492 - RNA, 20 nt, Human
gcccagucccagcagccagc

SEQ ID NO: 2020493 - RNA, 12 nt, Human
gcccagucccag

SEQ ID NO: 2020494 - RNA, 13 nt, Human
gcccagucccagc

SEQ ID NO: 2020495 - RNA, 14 nt, Human
gcccagucccagca

SEQ ID NO: 2020496 - RNA, 15 nt, Human
gcccagucccagcag

SEQ ID NO: 2020497 - RNA, 16 nt, Human
gcccagucccagcagc

SEQ ID NO: 2020498 - RNA, 17 nt, Human
gcccagucccagcagcc

SEQ ID NO: 2020499 - RNA, 18 nt, Human
gccaggaagccagcaggc

SEQ ID NO: 2020500 - RNA, 17 nt, Human
gccaggaagccagcagg

SEQ ID NO: 2020501 - RNA, 11 nt, Human
gccaggaagcc

SEQ ID NO: 2020502 - RNA, 15 nt, Human
gccaggaaccugucc

SEQ ID NO: 2020503 - RNA, 22 nt, Human
gccaggaaccuguccuaaggaa

SEQ ID NO: 2020504 - RNA, 19 nt, Human
gccaggaagccagcaggcu

SEQ ID NO: 2020505 - RNA, 20 nt, Human
gccaggaagccagcaggcuc

SEQ ID NO: 2020506 - RNA, 23 nt, Human
gccaggggaaaaucagccugcuc

SEQ ID NO: 2020507 - RNA, 22 nt, Human
gccaggggaaaaucagccugcu

SEQ ID NO: 2020508 - RNA, 21 nt, Human
gccaggggaaaaucagccugc

SEQ ID NO: 2020509 - RNA, 17 nt, Human
gccaggggaaaaucagc

SEQ ID NO: 2020510 - RNA, 17 nt, Human
gccaucccagccccaau

SEQ ID NO: 2020511 - RNA, 16 nt, Human
gccaucccagccccaa

SEQ ID NO: 2020512 - RNA, 15 nt, Human
gccaucccagcccca

SEQ ID NO: 2020513 - RNA, 14 nt, Human
gccaucccagcccc

SEQ ID NO: 2020514 - RNA, 13 nt, Human
gccaucccagccc

SEQ ID NO: 2020515 - RNA, 19 nt, Human
gccauccagguucagcuug

SEQ ID NO: 2020516 - RNA, 20 nt, Human
gccauccagguucagcuugu

SEQ ID NO: 2020517 - RNA, 13 nt, Human
gccauggaggcag

SEQ ID NO: 2020518 - RNA, 14 nt, Human
gccaugggacaggg

SEQ ID NO: 2020519 - RNA, 19 nt, Human
gccaugggacagggaggac

SEQ ID NO: 2020520 - RNA, 22 nt, Human
gccauuucuuccacaagagccc

SEQ ID NO: 2020521 - RNA, 20 nt, Human
gccauuucuuccacaagagc

SEQ ID NO: 2020522 - RNA, 17 nt, Human
gccauuucuuccacaag

SEQ ID NO: 2020523 - RNA, 16 nt, Human
gcccaaagaugcagcc

SEQ ID NO: 2020524 - RNA, 15 nt, Human
gcccaaagaugcagc

SEQ ID NO: 2020525 - RNA, 16 nt, Human
gccauuuguguuuaua

SEQ ID NO: 2020526 - RNA, 19 nt, Human
gcccacaggaucagucuga

SEQ ID NO: 2020527 - RNA, 13 nt, Human
gcccacaggauca

SEQ ID NO: 2020528 - RNA, 18 nt, Human
gcccacaggaucagucug

SEQ ID NO: 2020529 - RNA, 15 nt, Human
gcccaccccucaaca

SEQ ID NO: 2020530 - RNA, 20 nt, Human
gcccacccgguucaguguuu

SEQ ID NO: 2020531 - RNA, 20 nt, Human
gcccacccugcuuggcccag

SEQ ID NO: 2020532 - RNA, 14 nt, Human
gccacggccaggcc

SEQ ID NO: 2020533 - RNA, 15 nt, Human
gccacggccaggcca

SEQ ID NO: 2020534 - RNA, 20 nt, Human
gccacuauuguuagucucuu

SEQ ID NO: 2020535 - RNA, 21 nt, Human
gccacuauuguuagucucuug

SEQ ID NO: 2020536 - RNA, 22 nt, Human
gccacguucuuacuaguuuccc

SEQ ID NO: 2020537 - RNA, 14 nt, Human
gccacguuuucacc

SEQ ID NO: 2020538 - RNA, 16 nt, Human
gccacggccaggccag

SEQ ID NO: 2020539 - RNA, 15 nt, Human
gccagagacacaagc

SEQ ID NO: 2020540 - RNA, 12 nt, Human
gccagagacaca

SEQ ID NO: 2020541 - RNA, 18 nt, Human
gccagagggagugacaga

SEQ ID NO: 2020542 - RNA, 17 nt, Human
gccacugcaccgggcca

SEQ ID NO: 2020543 - RNA, 18 nt, Human
gccacugcaccgggccac

SEQ ID NO: 2020544 - RNA, 14 nt, Human
gccacucaggccca

SEQ ID NO: 2020545 - RNA, 22 nt, Human
gccacucaggcccaaagccucg

SEQ ID NO: 2020546 - RNA, 19 nt, Human
gccacuccagaccccuggc

SEQ ID NO: 2020547 - RNA, 16 nt, Human
gccacuccagaccccu

SEQ ID NO: 2020548 - RNA, 18 nt, Human
gccacuccagaccccugg

SEQ ID NO: 2020549 - RNA, 12 nt, Human
gccagccuugac

SEQ ID NO: 2020550 - RNA, 20 nt, Human
gccagccgagauagccaagg

SEQ ID NO: 2020551 - RNA, 21 nt, Human
gccagccgagauagccaaggc

SEQ ID NO: 2020552 - RNA, 17 nt, Human
gccagauucuuuccuga

SEQ ID NO: 2020553 - RNA, 15 nt, Human
gccagauguccuaau

SEQ ID NO: 2020554 - RNA, 16 nt, Human
gccagauucuuuccug

SEQ ID NO: 2020555 - RNA, 19 nt, Human
gccagagggagugacagag

SEQ ID NO: 2020556 - RNA, 20 nt, Human
gccagagggagugacagagg

SEQ ID NO: 2020557 - RNA, 15 nt, Human
gccagcugcuugggc

SEQ ID NO: 2020558 - RNA, 16 nt, Human
gccagcugcuugggcu

SEQ ID NO: 2020559 - RNA, 22 nt, Human
gccagcugcugagccgcagaga

SEQ ID NO: 2020560 - RNA, 13 nt, Human
gccagcugccucc

SEQ ID NO: 2020561 - RNA, 14 nt, Human
gccagcugcuuggg

SEQ ID NO: 2020562 - RNA, 15 nt, Human
gccagcugcugagcc

SEQ ID NO: 2020563 - RNA, 16 nt, Human
gccagcugcugagccg

SEQ ID NO: 2020564 - RNA, 18 nt, Human
gccagcugcugagccgca

SEQ ID NO: 2020565 - RNA, 19 nt, Human
gccagcugcugagccgcag

SEQ ID NO: 2020566 - RNA, 20 nt, Human
gccagcugcugagccgcaga

SEQ ID NO: 2020567 - RNA, 22 nt, Human
gccagccuugaccauucuccac

SEQ ID NO: 2020568 - RNA, 21 nt, Human
gccagccuugaccauucucca

SEQ ID NO: 2020569 - RNA, 20 nt, Human
gccagccuugaccauucucc

SEQ ID NO: 2020570 - RNA, 14 nt, Human
gccagccuugacca

SEQ ID NO: 2020571 - RNA, 19 nt, Human
gccagcgggaauggcagcu

SEQ ID NO: 2020572 - RNA, 11 nt, Human
gcaggucccua

SEQ ID NO: 2020573 - RNA, 10 nt, Human
gcaggucccu

SEQ ID NO: 2020574 - RNA, 23 nt, Human
gcagguccccagacuccaccaag

SEQ ID NO: 2020575 - RNA, 13 nt, Human
gcaggucccuaau

SEQ ID NO: 2020576 - RNA, 12 nt, Human
gcaggucccuaa

SEQ ID NO: 2020577 - RNA, 23 nt, Human
gcagugcuuccaaggauggacca

SEQ ID NO: 2020578 - RNA, 16 nt, Human
gcagugggagcugccu

SEQ ID NO: 2020579 - RNA, 20 nt, Human
gcaggauucuuccucccucc

SEQ ID NO: 2020580 - RNA, 14 nt, Human
gcagggagggccug

SEQ ID NO: 2020581 - RNA, 17 nt, Human
gcagggagggccugggc

SEQ ID NO: 2020582 - RNA, 16 nt, Human
gcagggagggcuucug

SEQ ID NO: 2020583 - RNA, 18 nt, Human
gcagggagggccugggcc

SEQ ID NO: 2020584 - RNA, 22 nt, Human
gcagggagggccugggccccag

SEQ ID NO: 2020585 - RNA, 12 nt, Human
gcagggcucagc

SEQ ID NO: 2020586 - RNA, 14 nt, Human
gcauauauauaugu

SEQ ID NO: 2020587 - RNA, 18 nt, Human
gcauauauauaugugugu

SEQ ID NO: 2020588 - RNA, 19 nt, Human
gcauauauuaaaagcaggc

SEQ ID NO: 2020589 - RNA, 21 nt, Human
gcauauauuaaagcaucagga

SEQ ID NO: 2020590 - RNA, 15 nt, Human
gcauauucaggaagc

SEQ ID NO: 2020591 - RNA, 23 nt, Human
gcauauuauuuuauguugcauag

SEQ ID NO: 2020592 - RNA, 18 nt, Human
gcauauuauuuuauguug

SEQ ID NO: 2020593 - RNA, 20 nt, Human
gcauauucaggaagcucagg

SEQ ID NO: 2020594 - RNA, 21 nt, Human
gcauauucuaguaauaaagac

SEQ ID NO: 2020595 - RNA, 18 nt, Human
gcauauucaggaagcuca

SEQ ID NO: 2020596 - RNA, 17 nt, Human
gcauauucaggaagcuc

SEQ ID NO: 2020597 - RNA, 21 nt, Human
gcaucaagaugugacauguuu

SEQ ID NO: 2020598 - RNA, 22 nt, Human
gcauauucuaguaauaaagacu

SEQ ID NO: 2020599 - RNA, 23 nt, Human
gcauauucuaguaauaaagacuc

SEQ ID NO: 2020600 - RNA, 15 nt, Human
gcagugggccuggcc

SEQ ID NO: 2020601 - RNA, 17 nt, Human
gcagugggagcugccug

SEQ ID NO: 2020602 - RNA, 18 nt, Human
gcagugggagcugccugu

SEQ ID NO: 2020603 - RNA, 13 nt, Human
gcaguuacaaauu

SEQ ID NO: 2020604 - RNA, 20 nt, Human
gcaguuacaaauuauaaugu

SEQ ID NO: 2020605 - RNA, 22 nt, Human
gcaguuaugugaccucacgugc

SEQ ID NO: 2020606 - RNA, 17 nt, Human
gcaguuccccuggaagc

SEQ ID NO: 2020607 - RNA, 23 nt, Human
gcaguuccccuggaagcagugcc

SEQ ID NO: 2020608 - RNA, 16 nt, Human
gcaguucgaccagcca

SEQ ID NO: 2020609 - RNA, 18 nt, Human
gcaguucgaccagccagg

SEQ ID NO: 2020610 - RNA, 16 nt, Human
gcauaggccugcuuug

SEQ ID NO: 2020611 - RNA, 22 nt, Human
gcauaggccugcuuugucuccu

SEQ ID NO: 2020612 - RNA, 23 nt, Human
gcauaggccugcuuugucuccuc

SEQ ID NO: 2020613 - RNA, 16 nt, Human
gcauauaacuuauauu

SEQ ID NO: 2020614 - RNA, 23 nt, Human
gcauauaacuuauauuguaagaa

SEQ ID NO: 2020615 - RNA, 15 nt, Human
gcauauaacuuauau

SEQ ID NO: 2020616 - RNA, 15 nt, Human
gcaugcugucccuua

SEQ ID NO: 2020617 - RNA, 21 nt, Human
gcaugcuguauuaugaaaucg

SEQ ID NO: 2020618 - RNA, 14 nt, Human
gcaugcuuuccaua

SEQ ID NO: 2020619 - RNA, 19 nt, Human
gcauggagaaugcaccaua

SEQ ID NO: 2020620 - RNA, 17 nt, Human
gcauguuugugauugac

SEQ ID NO: 2020621 - RNA, 20 nt, Human
gcauuagauuucucauuugc

SEQ ID NO: 2020622 - RNA, 17 nt, Human
gcauuagugggaaaaag

SEQ ID NO: 2020623 - RNA, 17 nt, Human
gcauuccagucaggcuc

SEQ ID NO: 2020624 - RNA, 15 nt, Human
gcauuaaaagaaaau

SEQ ID NO: 2020625 - RNA, 13 nt, Human
gcauguuuugcau

SEQ ID NO: 2020626 - RNA, 15 nt, Human
gcauguuuugcaugu

SEQ ID NO: 2020627 - RNA, 13 nt, Human
gcauuaaaagaaa

SEQ ID NO: 2020628 - RNA, 14 nt, Human
gcauuaaaagaaaa

SEQ ID NO: 2020629 - RNA, 22 nt, Human
gcaugccuggauggggcugcac

SEQ ID NO: 2020630 - RNA, 17 nt, Human
gcaugccuggauggggc

SEQ ID NO: 2020631 - RNA, 17 nt, Human
gcaugaauuugugaagg

SEQ ID NO: 2020632 - RNA, 23 nt, Human
gcaucaagaggugggagggcccu

SEQ ID NO: 2020633 - RNA, 23 nt, Human
gcaugaaguaauaugcacacauu

SEQ ID NO: 2020634 - RNA, 15 nt, Human
gcaugaauuugugaa

SEQ ID NO: 2020635 - RNA, 17 nt, Human
gcaucaggccaggcccu

SEQ ID NO: 2020636 - RNA, 16 nt, Human
gcaucaggccaggccc

SEQ ID NO: 2020637 - RNA, 15 nt, Human
gcaucaggccaggcc

SEQ ID NO: 2020638 - RNA, 13 nt, Human
gcaucaggccagg

SEQ ID NO: 2020639 - RNA, 20 nt, Human
gccaaaggaagcacaugccu

SEQ ID NO: 2020640 - RNA, 16 nt, Human
gccaaaggaagcacau

SEQ ID NO: 2020641 - RNA, 14 nt, Human
gccaaaggaagcac

SEQ ID NO: 2020642 - RNA, 12 nt, Human
gccaaagacaaa

SEQ ID NO: 2020643 - RNA, 14 nt, Human
gccaaagacaaaua

SEQ ID NO: 2020644 - RNA, 15 nt, Human
gccaaagacaaauag

SEQ ID NO: 2020645 - RNA, 19 nt, Human
gccaaacucaccugccccu

SEQ ID NO: 2020646 - RNA, 23 nt, Human
gccaaaauuaagguguuugaaaa

SEQ ID NO: 2020647 - RNA, 13 nt, Human
gccaaacacacag

SEQ ID NO: 2020648 - RNA, 14 nt, Human
gccaaacaggcccu

SEQ ID NO: 2020649 - RNA, 11 nt, Human
gccaaacauua

SEQ ID NO: 2020650 - RNA, 12 nt, Human
gccaaacauuaa

SEQ ID NO: 2020651 - RNA, 19 nt, Human
gccaaacauuaauguugau

SEQ ID NO: 2020652 - RNA, 21 nt, Human
gccaaacucaccugccccuca

SEQ ID NO: 2020653 - RNA, 24 nt, Human
gccaaacauuaauguugauuucua

SEQ ID NO: 2020654 - RNA, 22 nt, Human
gccaaacauuaauguugauuuc

SEQ ID NO: 2020655 - RNA, 23 nt, Human
gccaaacauuaauguugauuucu

SEQ ID NO: 2020656 - RNA, 15 nt, Human
gccaaaagcugcuca

SEQ ID NO: 2020657 - RNA, 14 nt, Human
gccaaaagcugcuc

SEQ ID NO: 2020658 - RNA, 14 nt, Human
gccaaaagcuuccc

SEQ ID NO: 2020659 - RNA, 15 nt, Human
gccaaaagcuucccu

SEQ ID NO: 2020660 - RNA, 20 nt, Human
gccaaaagcuucccucccug

SEQ ID NO: 2020661 - RNA, 22 nt, Human
gccaaaagcuucccucccugcu

SEQ ID NO: 2020662 - RNA, 14 nt, Human
gccaaaauuaaggu

SEQ ID NO: 2020663 - RNA, 21 nt, Human
gccaaaauuaagguguuugaa

SEQ ID NO: 2020664 - RNA, 12 nt, Human
gcauuuuguaau

SEQ ID NO: 2020665 - RNA, 13 nt, Human
gcauuuuggcgcu

SEQ ID NO: 2020666 - RNA, 13 nt, Human
gccaaaacccagc

SEQ ID NO: 2020667 - RNA, 16 nt, Human
gccaaaacccagcugc

SEQ ID NO: 2020668 - RNA, 19 nt, Human
gccaaaacccagcugcacc

SEQ ID NO: 2020669 - RNA, 20 nt, Human
gcauuuucccccuuggcucu

SEQ ID NO: 2020670 - RNA, 22 nt, Human
gcauuuugcuaaaugugaauga

SEQ ID NO: 2020671 - RNA, 17 nt, Human
gcauuuuacuguacaga

SEQ ID NO: 2020672 - RNA, 16 nt, Human
gcauuuuacuguacag

SEQ ID NO: 2020673 - RNA, 14 nt, Human
gcauuugcuuuugu

SEQ ID NO: 2020674 - RNA, 21 nt, Human
gcauuuggugguuucagaaau

SEQ ID NO: 2020675 - RNA, 23 nt, Human
gcauuugcugaauacagaggcaa

SEQ ID NO: 2020676 - RNA, 12 nt, Human
gcauuccccacu

SEQ ID NO: 2020677 - RNA, 12 nt, Human
gcauuccccagg

SEQ ID NO: 2020678 - RNA, 14 nt, Human
gcauucggagggag

SEQ ID NO: 2020679 - RNA, 13 nt, Human
gcauucucacucc

SEQ ID NO: 2020680 - RNA, 15 nt, Human
gcauucucacuccua

SEQ ID NO: 2020681 - RNA, 18 nt, Human
gcauucucacuccuaccu

SEQ ID NO: 2020682 - RNA, 23 nt, Human
gcauucucuccauuucacuggcu

SEQ ID NO: 2020683 - RNA, 14 nt, Human
gcauucucucucca

SEQ ID NO: 2020684 - RNA, 23 nt, Human
gcauugccaguaacacaggccac

SEQ ID NO: 2020685 - RNA, 14 nt, Human
gcagaagacaguau

SEQ ID NO: 2020686 - RNA, 19 nt, Human
gcagaacuugaagccugcu

SEQ ID NO: 2020687 - RNA, 14 nt, Human
gcagaaggaagacu

SEQ ID NO: 2020688 - RNA, 13 nt, Human
gcagaaggaagac

SEQ ID NO: 2020689 - RNA, 12 nt, Human
gcagaaggaaga

SEQ ID NO: 2020690 - RNA, 14 nt, Human
gcacugggcuuggg

SEQ ID NO: 2020691 - RNA, 23 nt, Human
gcacugggcuuggggaccagagc

SEQ ID NO: 2020692 - RNA, 22 nt, Human
gcacugggcuuggggaccagag

SEQ ID NO: 2020693 - RNA, 22 nt, Human
gcacugauauauuuaaaaacaa

SEQ ID NO: 2020694 - RNA, 17 nt, Human
gcacugaggaccagcca

SEQ ID NO: 2020695 - RNA, 19 nt, Human
gcacuaaggugugcucuga

SEQ ID NO: 2020696 - RNA, 18 nt, Human
gcacuaaggugugcucug

SEQ ID NO: 2020697 - RNA, 17 nt, Human
gcacuaaggugugcucu

SEQ ID NO: 2020698 - RNA, 18 nt, Human
gcacccggccccugcugg

SEQ ID NO: 2020699 - RNA, 14 nt, Human
gcaaugaccuuuca

SEQ ID NO: 2020700 - RNA, 13 nt, Human
gcaaugaccuuuc

SEQ ID NO: 2020701 - RNA, 19 nt, Human
gcacagcuaacauggaagu

SEQ ID NO: 2020702 - RNA, 20 nt, Human
gcacagcucccuucuguuga

SEQ ID NO: 2020703 - RNA, 14 nt, Human
gcacagcugcucug

SEQ ID NO: 2020704 - RNA, 19 nt, Human
gcacagcguuaugugucug

SEQ ID NO: 2020705 - RNA, 16 nt, Human
gcacagcuucauuucc

SEQ ID NO: 2020706 - RNA, 17 nt, Human
gcacaggcugagugcag

SEQ ID NO: 2020707 - RNA, 18 nt, Human
gcacaggcugagugcagg

SEQ ID NO: 2020708 - RNA, 19 nt, Human
gcacaggcugagugcaggc

SEQ ID NO: 2020709 - RNA, 20 nt, Human
gcacaggcugagugcaggcc

SEQ ID NO: 2020710 - RNA, 21 nt, Human
gcacaggcugagugcaggccc

SEQ ID NO: 2020711 - RNA, 13 nt, Human
gcacaggcugagu

SEQ ID NO: 2020712 - RNA, 15 nt, Human
gcacaggcagggcag

SEQ ID NO: 2020713 - RNA, 16 nt, Human
gcacaggcagggcagg

SEQ ID NO: 2020714 - RNA, 20 nt, Human
gcacaggcagggcaggacca

SEQ ID NO: 2020715 - RNA, 21 nt, Human
gcacaggcagggcaggaccag

SEQ ID NO: 2020716 - RNA, 11 nt, Human
gcacaggcaga

SEQ ID NO: 2020717 - RNA, 13 nt, Human
gcacaggcagggc

SEQ ID NO: 2020718 - RNA, 14 nt, Human
gcacaggcagggca

SEQ ID NO: 2020719 - RNA, 14 nt, Human
gcacccggccccug

SEQ ID NO: 2020720 - RNA, 16 nt, Human
gcacccauccaccguc

SEQ ID NO: 2020721 - RNA, 22 nt, Human
gcacccauccaccguccccucc

SEQ ID NO: 2020722 - RNA, 23 nt, Human
gcacccauccaccguccccuccc

SEQ ID NO: 2020723 - RNA, 15 nt, Human
gcacccggccccugc

SEQ ID NO: 2020724 - RNA, 17 nt, Human
gcacccggccccugcug

SEQ ID NO: 2020725 - RNA, 14 nt, Human
gcaccuccugccuc

SEQ ID NO: 2020726 - RNA, 15 nt, Human
gcaccuccugccucg

SEQ ID NO: 2020727 - RNA, 17 nt, Human
gcaccacucaagaccaa

SEQ ID NO: 2020728 - RNA, 18 nt, Human
gcaccacucaagaccaaa

SEQ ID NO: 2020729 - RNA, 13 nt, Human
gcaccacucaaga

SEQ ID NO: 2020730 - RNA, 19 nt, Human
gcaccacugcacuccagcc

SEQ ID NO: 2020731 - RNA, 13 nt, Human
gcaccacccuccu

SEQ ID NO: 2020732 - RNA, 15 nt, Human
gcaccacccuccuuc

SEQ ID NO: 2020733 - RNA, 16 nt, Human
gcaccacccuccuucc

SEQ ID NO: 2020734 - RNA, 17 nt, Human
gcaccacccuccuuccc

SEQ ID NO: 2020735 - RNA, 18 nt, Human
gcagaaggaagacuucau

SEQ ID NO: 2020736 - RNA, 15 nt, Human
gcagaagcccugaug

SEQ ID NO: 2020737 - RNA, 19 nt, Human
gcagagaaugaaagggccc

SEQ ID NO: 2020738 - RNA, 20 nt, Human
gcagagaaugaaagggccca

SEQ ID NO: 2020739 - RNA, 21 nt, Human
gcagagaaugaaagggcccag

SEQ ID NO: 2020740 - RNA, 21 nt, Human
gcagagaauucucuuauccaa

SEQ ID NO: 2020741 - RNA, 21 nt, Human
gcagagaagugacgguuccua

SEQ ID NO: 2020742 - RNA, 22 nt, Human
gcagagaaugaaagggcccaga

SEQ ID NO: 2020743 - RNA, 23 nt, Human
gcagagaaugaaagggcccagag

SEQ ID NO: 2020744 - RNA, 19 nt, Human
gcagagaccaucccugaag

SEQ ID NO: 2020745 - RNA, 17 nt, Human
gcagagaccaucccuga

SEQ ID NO: 2020746 - RNA, 15 nt, Human
gcagagaccaucccu

SEQ ID NO: 2020747 - RNA, 14 nt, Human
gcagagaccauccc

SEQ ID NO: 2020748 - RNA, 15 nt, Human
gcagaguugaagaca

SEQ ID NO: 2020749 - RNA, 19 nt, Human
gcagaugcaaugacucagg

SEQ ID NO: 2020750 - RNA, 13 nt, Human
gcagaugcaauga

SEQ ID NO: 2020751 - RNA, 14 nt, Human
gcagaugcagcucu

SEQ ID NO: 2020752 - RNA, 15 nt, Human
gcagaugcagcucuu

SEQ ID NO: 2020753 - RNA, 19 nt, Human
gcagaugcagcucuuccug

SEQ ID NO: 2020754 - RNA, 13 nt, Human
gcagaugccuggg

SEQ ID NO: 2020755 - RNA, 19 nt, Human
gcagauuuugcccuugaca

SEQ ID NO: 2020756 - RNA, 17 nt, Human
gcagaguugaagacaga

SEQ ID NO: 2020757 - RNA, 16 nt, Human
gcagaguugaagacag

SEQ ID NO: 2020758 - RNA, 19 nt, Human
gcagaguugaagacagagc

SEQ ID NO: 2020759 - RNA, 14 nt, Human
gcagaguucaggga

SEQ ID NO: 2020760 - RNA, 13 nt, Human
gcagaguuacuug

SEQ ID NO: 2020761 - RNA, 15 nt, Human
gcagaguuacuugau

SEQ ID NO: 2020762 - RNA, 16 nt, Human
gcagcaccgccucuuc

SEQ ID NO: 2020763 - RNA, 19 nt, Human
gcagcaccgccucuucccg

SEQ ID NO: 2020764 - RNA, 15 nt, Human
gcagcacagcugaga

SEQ ID NO: 2020765 - RNA, 21 nt, Human
gcagcacccagguuuugcacu

SEQ ID NO: 2020766 - RNA, 21 nt, Human
gcagcaaggucuugcucuccu

SEQ ID NO: 2020767 - RNA, 16 nt, Human
gcagauuuuggccaug

SEQ ID NO: 2020768 - RNA, 14 nt, Human
gcagcaacacacau

SEQ ID NO: 2020769 - RNA, 12 nt, Human
gcagcaauaaag

SEQ ID NO: 2020770 - RNA, 17 nt, Human
gcagcaaggucuugcuc

SEQ ID NO: 2020771 - RNA, 14 nt, Human
gcaggaccagccca

SEQ ID NO: 2020772 - RNA, 15 nt, Human
gcaggaccagcccac

SEQ ID NO: 2020773 - RNA, 16 nt, Human
gcaggaccagcccacg

SEQ ID NO: 2020774 - RNA, 18 nt, Human
gcaggaccagcccacgcu

SEQ ID NO: 2020775 - RNA, 19 nt, Human
gcaggaccagcccacgcug

SEQ ID NO: 2020776 - RNA, 20 nt, Human
gcaggaccuucgggcugugc

SEQ ID NO: 2020777 - RNA, 22 nt, Human
gcaggaccagcccacgcugacu

SEQ ID NO: 2020778 - RNA, 21 nt, Human
gcaggaguuucguuuucaaaa

SEQ ID NO: 2020779 - RNA, 20 nt, Human
gcaggaguuucguuuucaaa

SEQ ID NO: 2020780 - RNA, 11 nt, Human
gcaggaggaag

SEQ ID NO: 2020781 - RNA, 13 nt, Human
gcaggagcaguau

SEQ ID NO: 2020782 - RNA, 17 nt, Human
gcaggagcaguaucaug

SEQ ID NO: 2020783 - RNA, 22 nt, Human
gcaggagcaguaucaugaagcc

SEQ ID NO: 2020784 - RNA, 12 nt, Human
gcagcagggcag

SEQ ID NO: 2020785 - RNA, 14 nt, Human
gcagccgugccuuc

SEQ ID NO: 2020786 - RNA, 15 nt, Human
gcagccgugccuuca

SEQ ID NO: 2020787 - RNA, 17 nt, Human
gcagccgugccuucagc

SEQ ID NO: 2020788 - RNA, 19 nt, Human
gcagccucaaccuccuggg

SEQ ID NO: 2020789 - RNA, 20 nt, Human
gcagccucaaccuccugggc

SEQ ID NO: 2020790 - RNA, 18 nt, Human
gcagccgugccuucagcu

SEQ ID NO: 2020791 - RNA, 24 nt, Human
gcagccugccuugcccacuccugc

SEQ ID NO: 2020792 - RNA, 21 nt, Human
gcagccucaaccuccugggcu

SEQ ID NO: 2020793 - RNA, 22 nt, Human
gcagccucaaccuccugggcua

SEQ ID NO: 2020794 - RNA, 23 nt, Human
gcagccugcgccaccgcccagag

SEQ ID NO: 2020795 - RNA, 14 nt, Human
gcagccuggacccu

SEQ ID NO: 2020796 - RNA, 17 nt, Human
gauucaggcauuuuccc

SEQ ID NO: 2020797 - RNA, 20 nt, Human
gauucaggcauuuucccccu

SEQ ID NO: 2020798 - RNA, 15 nt, Human
gauucccaagcucug

SEQ ID NO: 2020799 - RNA, 18 nt, Human
gauucagacagcugccug

SEQ ID NO: 2020800 - RNA, 17 nt, Human
gauucagacagcugccu

SEQ ID NO: 2020801 - RNA, 14 nt, Human
gauucagacagcug

SEQ ID NO: 2020802 - RNA, 13 nt, Human
gauucagacagcu

SEQ ID NO: 2020803 - RNA, 13 nt, Human
gauuacaagcgug

SEQ ID NO: 2020804 - RNA, 21 nt, Human
gauuacaagcgugagccacug

SEQ ID NO: 2020805 - RNA, 14 nt, Human
gauguuugugcagu

SEQ ID NO: 2020806 - RNA, 21 nt, Human
gauguuuuaaggaugcuugua

SEQ ID NO: 2020807 - RNA, 18 nt, Human
gauguucuggauaccauu

SEQ ID NO: 2020808 - RNA, 18 nt, Human
gauguucuagcauggcug

SEQ ID NO: 2020809 - RNA, 16 nt, Human
gaugcuagaacucccu

SEQ ID NO: 2020810 - RNA, 18 nt, Human
gaugcgggcauggcagcc

SEQ ID NO: 2020811 - RNA, 15 nt, Human
gaugcgcaguugcug

SEQ ID NO: 2020812 - RNA, 17 nt, Human
gaugccugguggcagcu

SEQ ID NO: 2020813 - RNA, 20 nt, Human
gaugccugugaacugaacuc

SEQ ID NO: 2020814 - RNA, 17 nt, Human
gauugcaacaggcuggg

SEQ ID NO: 2020815 - RNA, 18 nt, Human
gauugcaacaggcugggc

SEQ ID NO: 2020816 - RNA, 22 nt, Human
gauuggauuuuauguugacauu

SEQ ID NO: 2020817 - RNA, 23 nt, Human
gauugcuguguguugccugggac

SEQ ID NO: 2020818 - RNA, 16 nt, Human
gauucccaagcucugc

SEQ ID NO: 2020819 - RNA, 17 nt, Human
gauucccaagcucugcu

SEQ ID NO: 2020820 - RNA, 19 nt, Human
gauucuuuccugaggcugg

SEQ ID NO: 2020821 - RNA, 17 nt, Human
gauuaauagcauucgaa

SEQ ID NO: 2020822 - RNA, 22 nt, Human
gauucuuuccugaggcugggcu

SEQ ID NO: 2020823 - RNA, 20 nt, Human
gauucuuuccugaggcuggg

SEQ ID NO: 2020824 - RNA, 16 nt, Human
gauugcaacaggcugg

SEQ ID NO: 2020825 - RNA, 13 nt, Human
gauuuaaacucug

SEQ ID NO: 2020826 - RNA, 14 nt, Human
gauuuaaacucuga

SEQ ID NO: 2020827 - RNA, 11 nt, Human
gauuguuuaaa

SEQ ID NO: 2020828 - RNA, 21 nt, Human
gauuguuuaucuagauguaaa

SEQ ID NO: 2020829 - RNA, 15 nt, Human
gauugggccccugcc

SEQ ID NO: 2020830 - RNA, 16 nt, Human
gauugggaauccgccc

SEQ ID NO: 2020831 - RNA, 22 nt, Human
gauuucuguuuagauaauacac

SEQ ID NO: 2020832 - RNA, 21 nt, Human
gauuucuguuuagauaauaca

SEQ ID NO: 2020833 - RNA, 17 nt, Human
gauuuaaacucugaauu

SEQ ID NO: 2020834 - RNA, 17 nt, Human
gauuuguugauucucuc

SEQ ID NO: 2020835 - RNA, 22 nt, Human
gcaacuuuguauaaaagggacu

SEQ ID NO: 2020836 - RNA, 16 nt, Human
gcaagauugauguuuc

SEQ ID NO: 2020837 - RNA, 17 nt, Human
gcaagauggcacagggc

SEQ ID NO: 2020838 - RNA, 19 nt, Human
gcaagauggcacagggcau

SEQ ID NO: 2020839 - RNA, 22 nt, Human
gcaagauggcacagggcaugaa

SEQ ID NO: 2020840 - RNA, 15 nt, Human
gcaagcaccuccugc

SEQ ID NO: 2020841 - RNA, 16 nt, Human
gcaagcaccuccugcc

SEQ ID NO: 2020842 - RNA, 18 nt, Human
gcaagcaagaaacacugg

SEQ ID NO: 2020843 - RNA, 15 nt, Human
gcaagcaccaucccc

SEQ ID NO: 2020844 - RNA, 18 nt, Human
gcaagcaccuccugccuc

SEQ ID NO: 2020845 - RNA, 20 nt, Human
gcaagcaccuccugccucga

SEQ ID NO: 2020846 - RNA, 22 nt, Human
gcaagcaguuucaauaaaguuu

SEQ ID NO: 2020847 - RNA, 17 nt, Human
gcaagcaccauccccuc

SEQ ID NO: 2020848 - RNA, 18 nt, Human
gcaagcaccauccccucc

SEQ ID NO: 2020849 - RNA, 14 nt, Human
gcaagcaguuucaa

SEQ ID NO: 2020850 - RNA, 15 nt, Human
gcaagcaguuucaau

SEQ ID NO: 2020851 - RNA, 20 nt, Human
gcaaggaagguaaaaaguua

SEQ ID NO: 2020852 - RNA, 18 nt, Human
gcaaggcugucaauuaca

SEQ ID NO: 2020853 - RNA, 14 nt, Human
gcaaggcugucaau

SEQ ID NO: 2020854 - RNA, 14 nt, Human
gcaagggaggccca

SEQ ID NO: 2020855 - RNA, 21 nt, Human
gcaagggaauuucuucaacuc

SEQ ID NO: 2020856 - RNA, 18 nt, Human
gcaagguccggcccaucc

SEQ ID NO: 2020857 - RNA, 15 nt, Human
gcaagggaggcccag

SEQ ID NO: 2020858 - RNA, 18 nt, Human
gcaaggucuugcucuccu

SEQ ID NO: 2020859 - RNA, 17 nt, Human
gcaauccugcaagaaca

SEQ ID NO: 2020860 - RNA, 13 nt, Human
gcaauccuuacaa

SEQ ID NO: 2020861 - RNA, 14 nt, Human
gcaauccuuacaaa

SEQ ID NO: 2020862 - RNA, 16 nt, Human
gcaauccuuacaaaug

SEQ ID NO: 2020863 - RNA, 19 nt, Human
gcaauccuuacaaaugauu

SEQ ID NO: 2020864 - RNA, 14 nt, Human
gcaaucuauaauau

SEQ ID NO: 2020865 - RNA, 14 nt, Human
gcaaauggccucau

SEQ ID NO: 2020866 - RNA, 12 nt, Human
gcaaaugugaau

SEQ ID NO: 2020867 - RNA, 18 nt, Human
gcaacugcauuggcuuug

SEQ ID NO: 2020868 - RNA, 19 nt, Human
gcaaagagacccagucaau

SEQ ID NO: 2020869 - RNA, 20 nt, Human
gcaaacuuuauuuuguguuu

SEQ ID NO: 2020870 - RNA, 14 nt, Human
gcaaagaacucuua

SEQ ID NO: 2020871 - RNA, 22 nt, Human
gcaaagaacucuuacccuggca

SEQ ID NO: 2020872 - RNA, 23 nt, Human
gcaaaguucccuacuuccuguga

SEQ ID NO: 2020873 - RNA, 21 nt, Human
gcaaaccaucauugaaaucuu

SEQ ID NO: 2020874 - RNA, 20 nt, Human
gcaaaccaucauugaaaucu

SEQ ID NO: 2020875 - RNA, 19 nt, Human
gcaaaccaucauugaaauc

SEQ ID NO: 2020876 - RNA, 17 nt, Human
gcaaaccaucauugaaa

SEQ ID NO: 2020877 - RNA, 16 nt, Human
gcaaaccaucauugaa

SEQ ID NO: 2020878 - RNA, 14 nt, Human
gauuuuaaaugugu

SEQ ID NO: 2020879 - RNA, 15 nt, Human
gauuuuaaaugugug

SEQ ID NO: 2020880 - RNA, 16 nt, Human
gauuuuaaauguguga

SEQ ID NO: 2020881 - RNA, 12 nt, Human
gauuuuaaaaug

SEQ ID NO: 2020882 - RNA, 13 nt, Human
gauuuuaaaaugu

SEQ ID NO: 2020883 - RNA, 18 nt, Human
gauuuuaaaauguacaug

SEQ ID NO: 2020884 - RNA, 21 nt, Human
gauuuuaaaauguacauguau

SEQ ID NO: 2020885 - RNA, 22 nt, Human
gauuuuaaaauguacauguauu

SEQ ID NO: 2020886 - RNA, 12 nt, Human
gauuuuaaaugu

SEQ ID NO: 2020887 - RNA, 18 nt, Human
gcaaacuuuauuuugugu

SEQ ID NO: 2020888 - RNA, 23 nt, Human
gcaaacuggccgcgggggcaggg

SEQ ID NO: 2020889 - RNA, 16 nt, Human
gcaaacucaagcuucu

SEQ ID NO: 2020890 - RNA, 21 nt, Human
gcaaacucaagcuucuucacu

SEQ ID NO: 2020891 - RNA, 15 nt, Human
gcaaacccugucaaa

SEQ ID NO: 2020892 - RNA, 19 nt, Human
gcaaacccugucaaacauu

SEQ ID NO: 2020893 - RNA, 20 nt, Human
gcaaacccugucaaacauua

SEQ ID NO: 2020894 - RNA, 19 nt, Human
gcaaaccuaauugcacaac

SEQ ID NO: 2020895 - RNA, 22 nt, Human
gcaaaccuuucuauaauuuuac

SEQ ID NO: 2020896 - RNA, 18 nt, Human
gauccuaggcauuugcug

SEQ ID NO: 2020897 - RNA, 23 nt, Human
gauccuaaugaaugcauaaaaug

SEQ ID NO: 2020898 - RNA, 20 nt, Human
gaucccuuccaccugcucug

SEQ ID NO: 2020899 - RNA, 22 nt, Human
gaucccuuccaccugcucugcu

SEQ ID NO: 2020900 - RNA, 23 nt, Human
gaucccuuccaccugcucugcug

SEQ ID NO: 2020901 - RNA, 14 nt, Human
gauccuccaggugc

SEQ ID NO: 2020902 - RNA, 16 nt, Human
gauccucccaccucag

SEQ ID NO: 2020903 - RNA, 17 nt, Human
gauccucccaccucagc

SEQ ID NO: 2020904 - RNA, 13 nt, Human
gaucccuuccacc

SEQ ID NO: 2020905 - RNA, 19 nt, Human
gaucccuuccaccugcucu

SEQ ID NO: 2020906 - RNA, 13 nt, Human
gaucauccacugu

SEQ ID NO: 2020907 - RNA, 22 nt, Human
gaucauaguuuuauuuauauuu

SEQ ID NO: 2020908 - RNA, 12 nt, Human
gaucauaguuuu

SEQ ID NO: 2020909 - RNA, 13 nt, Human
gaucauaguuuua

SEQ ID NO: 2020910 - RNA, 14 nt, Human
gaucauaguuuuau

SEQ ID NO: 2020911 - RNA, 15 nt, Human
gaucauaguuuuauu

SEQ ID NO: 2020912 - RNA, 16 nt, Human
gaucauaguuuuauuu

SEQ ID NO: 2020913 - RNA, 18 nt, Human
gaucauaguuuuauuuau

SEQ ID NO: 2020914 - RNA, 19 nt, Human
gaucauaguuuuauuuaua

SEQ ID NO: 2020915 - RNA, 20 nt, Human
gaucuaggaagacuuuggaa

SEQ ID NO: 2020916 - RNA, 18 nt, Human
gaucuaggaagacuuugg

SEQ ID NO: 2020917 - RNA, 14 nt, Human
gaucuaggaagacu

SEQ ID NO: 2020918 - RNA, 13 nt, Human
gaucuaggaagac

SEQ ID NO: 2020919 - RNA, 22 nt, Human
gauccuggguacugaaagccuu

SEQ ID NO: 2020920 - RNA, 12 nt, Human
gauccugagcca

SEQ ID NO: 2020921 - RNA, 16 nt, Human
gauccucccaggcuuc

SEQ ID NO: 2020922 - RNA, 15 nt, Human
gauccuccccuggac

SEQ ID NO: 2020923 - RNA, 17 nt, Human
gauccuccccuggacuc

SEQ ID NO: 2020924 - RNA, 18 nt, Human
gauccuccccuggacucc

SEQ ID NO: 2020925 - RNA, 16 nt, Human
gaugcagcucuuccug

SEQ ID NO: 2020926 - RNA, 16 nt, Human
gaugagaggaaaucac

SEQ ID NO: 2020927 - RNA, 20 nt, Human
gaugcagacagggggccaga

SEQ ID NO: 2020928 - RNA, 21 nt, Human
gaugcagacagggggccagaa

SEQ ID NO: 2020929 - RNA, 23 nt, Human
gaugcagacagggggccagaaca

SEQ ID NO: 2020930 - RNA, 14 nt, Human
gaugcagugcuucc

SEQ ID NO: 2020931 - RNA, 14 nt, Human
gaugccugguggca

SEQ ID NO: 2020932 - RNA, 15 nt, Human
gaugccugguggcag

SEQ ID NO: 2020933 - RNA, 16 nt, Human
gaugccugguggcagc

SEQ ID NO: 2020934 - RNA, 20 nt, Human
gaugaccuugaaugaugcca

SEQ ID NO: 2020935 - RNA, 20 nt, Human
gaugagaacagauaaagauu

SEQ ID NO: 2020936 - RNA, 23 nt, Human
gaugagaaauaaaguuucuguug

SEQ ID NO: 2020937 - RNA, 18 nt, Human
gaugaccuugaaugaugc

SEQ ID NO: 2020938 - RNA, 14 nt, Human
gaugagaggaaauc

SEQ ID NO: 2020939 - RNA, 14 nt, Human
gaugcaccagcccu

SEQ ID NO: 2020940 - RNA, 15 nt, Human
gaugcaccagcccuu

SEQ ID NO: 2020941 - RNA, 23 nt, Human
gaugcaccagcccuuagcaggga

SEQ ID NO: 2020942 - RNA, 22 nt, Human
gaucuucuguggguuucuaaag

SEQ ID NO: 2020943 - RNA, 19 nt, Human
gaucuucuuuauaauucua

SEQ ID NO: 2020944 - RNA, 17 nt, Human
gaucuuccucugcuaaa

SEQ ID NO: 2020945 - RNA, 18 nt, Human
gaucuuccucugcuaaau

SEQ ID NO: 2020946 - RNA, 15 nt, Human
gaugaaaugagguca

SEQ ID NO: 2020947 - RNA, 21 nt, Human
gaugaaaugaggucagagccu

SEQ ID NO: 2020948 - RNA, 18 nt, Human
gaugaccaauuuuaacuu

SEQ ID NO: 2020949 - RNA, 22 nt, Human
gaugaaugucaguuguuauuua

SEQ ID NO: 2020950 - RNA, 15 nt, Human
gaugaccccugccca

SEQ ID NO: 2020951 - RNA, 14 nt, Human
gaugaccccugccc

SEQ ID NO: 2020952 - RNA, 22 nt, Human
gaugaauaaauguuauagcugc

SEQ ID NO: 2020953 - RNA, 16 nt, Human
gaugaaauguaaauac

SEQ ID NO: 2020954 - RNA, 13 nt, Human
gauaucaaaggca

SEQ ID NO: 2020955 - RNA, 14 nt, Human
gaucacagccucug

SEQ ID NO: 2020956 - RNA, 16 nt, Human
gaucacauguggacuu

SEQ ID NO: 2020957 - RNA, 23 nt, Human
gaucacggcucacugcagccuca

SEQ ID NO: 2020958 - RNA, 20 nt, Human
gaucacggcucacugcagcc

SEQ ID NO: 2020959 - RNA, 14 nt, Human
gaucacugaaauaa

SEQ ID NO: 2020960 - RNA, 18 nt, Human
gaucacugaaauaaaagc

SEQ ID NO: 2020961 - RNA, 20 nt, Human
gaucacugaaauaaaagcua

SEQ ID NO: 2020962 - RNA, 14 nt, Human
gaucaggcucccag

SEQ ID NO: 2020963 - RNA, 15 nt, Human
gaucaggcucccagg

SEQ ID NO: 2020964 - RNA, 23 nt, Human
gauaguggggagacuucuuggcu

SEQ ID NO: 2020965 - RNA, 20 nt, Human
gauagugucccacggugccu

SEQ ID NO: 2020966 - RNA, 13 nt, Human
gauaggggcagag

SEQ ID NO: 2020967 - RNA, 14 nt, Human
gauauaaacagcuu

SEQ ID NO: 2020968 - RNA, 21 nt, Human
gauauagagucauuguaaugu

SEQ ID NO: 2020969 - RNA, 18 nt, Human
gauauaugcucugcaugu

SEQ ID NO: 2020970 - RNA, 17 nt, Human
gauaggaaggucauuuc

SEQ ID NO: 2020971 - RNA, 18 nt, Human
gauaggaaggucauuucc

SEQ ID NO: 2020972 - RNA, 16 nt, Human
gauacaaaagcaugug

SEQ ID NO: 2020973 - RNA, 17 nt, Human
gauaggucagugcaaau

SEQ ID NO: 2020974 - RNA, 23 nt, Human
gauaggaaggucauuuccaugua

SEQ ID NO: 2020975 - RNA, 21 nt, Human
gauaggaaggucauuuccaug

SEQ ID NO: 2020976 - RNA, 22 nt, Human
gauaggaaggucauuuccaugu

SEQ ID NO: 2020977 - RNA, 23 nt, Human
gauaauuaaccaagguagaauga

SEQ ID NO: 2020978 - RNA, 18 nt, Human
gauaauucuagcuuugag

SEQ ID NO: 2020979 - RNA, 22 nt, Human
gauaauuuuccuuuaauaugaa

SEQ ID NO: 2020980 - RNA, 17 nt, Human
gauaaccauagcauagg

SEQ ID NO: 2020981 - RNA, 20 nt, Human
gauaacagggauugauuuua

SEQ ID NO: 2020982 - RNA, 22 nt, Human
gauaacagggauugauuuuaaa

SEQ ID NO: 2020983 - RNA, 23 nt, Human
gauaacagggauugauuuuaaaa

SEQ ID NO: 2020984 - RNA, 14 nt, Human
gauaaccauagcau

SEQ ID NO: 2020985 - RNA, 13 nt, Human
gauaaguuggaaa

SEQ ID NO: 2020986 - RNA, 17 nt, Human
gauaaguuggaaacacu

SEQ ID NO: 2020987 - RNA, 18 nt, Human
gauaaguuggaaacacua

SEQ ID NO: 2020988 - RNA, 19 nt, Human
gauaaguuggaaacacuaa

SEQ ID NO: 2020989 - RNA, 22 nt, Human
gauaaguuggaaacacuaaaug

SEQ ID NO: 2020990 - RNA, 12 nt, Human
gauaauacacca

SEQ ID NO: 2020991 - RNA, 23 nt, Human
gauaauacaccacuacauucugu

SEQ ID NO: 2020992 - RNA, 24 nt, Human
gauaauacaccacuacauucuguu

SEQ ID NO: 2020993 - RNA, 22 nt, Human
gauaaauuaugguaaaauuuug

SEQ ID NO: 2020994 - RNA, 19 nt, Human
gauaacaauguuuuaacaa

SEQ ID NO: 2020995 - RNA, 22 nt, Human
gauaacaauguuuuaacaagaa

SEQ ID NO: 2020996 - RNA, 18 nt, Human
gauaaaccuagauaaaga

SEQ ID NO: 2020997 - RNA, 13 nt, Human
gaguucugguucc

SEQ ID NO: 2020998 - RNA, 13 nt, Human
gauaaacaguagu

SEQ ID NO: 2020999 - RNA, 13 nt, Human
gauaaaaucauaa

SEQ ID NO: 2021000 - RNA, 19 nt, Human
gauaaaaucauaaguauuu

SEQ ID NO: 2021001 - RNA, 23 nt, Human
gauaaaaucauaaguauuuggaa

SEQ ID NO: 2021002 - RNA, 18 nt, Human
gacuuccccaauaucuug

SEQ ID NO: 2021003 - RNA, 20 nt, Human
gacuuccccaauaucuugcu

SEQ ID NO: 2021004 - RNA, 17 nt, Human
gacuuccccaauaucuu

SEQ ID NO: 2021005 - RNA, 22 nt, Human
gacuuccugauugguuucucuu

SEQ ID NO: 2021006 - RNA, 21 nt, Human
gaguguguaauuuaaaauugu

SEQ ID NO: 2021007 - RNA, 22 nt, Human
gaguguguaauuuaaaauugug

SEQ ID NO: 2021008 - RNA, 21 nt, Human
gacuuccugauugguuucucu

SEQ ID NO: 2021009 - RNA, 22 nt, Human
gaauuuaaauagcuuuuuucuc

SEQ ID NO: 2021010 - RNA, 20 nt, Human
gaauuguuuagauuuugugu

SEQ ID NO: 2021011 - RNA, 22 nt, Human
gaauuguuuagauuuuguguuu

SEQ ID NO: 2021012 - RNA, 23 nt, Human
gaauuguguuuauaauuuuaaau

SEQ ID NO: 2021013 - RNA, 15 nt, Human
gaauuguguuuauaa

SEQ ID NO: 2021014 - RNA, 22 nt, Human
gaauuguaaggaaugauuaauu

SEQ ID NO: 2021015 - RNA, 15 nt, Human
gaauuuaucuuugau

SEQ ID NO: 2021016 - RNA, 16 nt, Human
gaauuuaucuuugaua

SEQ ID NO: 2021017 - RNA, 22 nt, Human
gaauuuaagccucaaauuugaa

SEQ ID NO: 2021018 - RNA, 20 nt, Human
gaauuuaaagaaaaaaaugu

SEQ ID NO: 2021019 - RNA, 22 nt, Human
gaauuuaaagaaaaaaauguca

SEQ ID NO: 2021020 - RNA, 21 nt, Human
gaauuuauuuuuaagaaagaa

SEQ ID NO: 2021021 - RNA, 15 nt, Human
gaauuucccaaagca

SEQ ID NO: 2021022 - RNA, 19 nt, Human
gaauugagccuaaaaauaa

SEQ ID NO: 2021023 - RNA, 14 nt, Human
gaauugaagcagga

SEQ ID NO: 2021024 - RNA, 14 nt, Human
gaauugaaaaacca

SEQ ID NO: 2021025 - RNA, 19 nt, Human
gaauucucuaguuugauua

SEQ ID NO: 2021026 - RNA, 21 nt, Human
gaaugucagugugacugaucu

SEQ ID NO: 2021027 - RNA, 20 nt, Human
gaaugucagugugacugauc

SEQ ID NO: 2021028 - RNA, 17 nt, Human
gaaugucaguuguuauu

SEQ ID NO: 2021029 - RNA, 21 nt, Human
gaaugucaguuguuauuuauu

SEQ ID NO: 2021030 - RNA, 18 nt, Human
gaauucaccacagacuuu

SEQ ID NO: 2021031 - RNA, 19 nt, Human
gaauucaccacagacuuua

SEQ ID NO: 2021032 - RNA, 17 nt, Human
gaauucucagaaucuca

SEQ ID NO: 2021033 - RNA, 17 nt, Human
gaauucucuaguuugau

SEQ ID NO: 2021034 - RNA, 18 nt, Human
gaauggcaauguuuugcu

SEQ ID NO: 2021035 - RNA, 15 nt, Human
gaauggacauuucua

SEQ ID NO: 2021036 - RNA, 14 nt, Human
gaauggugauuuua

SEQ ID NO: 2021037 - RNA, 16 nt, Human
gaauggugauuuuaaa

SEQ ID NO: 2021038 - RNA, 19 nt, Human
gaauggugauuuuaaaugu

SEQ ID NO: 2021039 - RNA, 21 nt, Human
gaauggugauuuuaaaugugu

SEQ ID NO: 2021040 - RNA, 16 nt, Human
gaauguaugcuucaua

SEQ ID NO: 2021041 - RNA, 18 nt, Human
gaauguaugcuucauaca

SEQ ID NO: 2021042 - RNA, 22 nt, Human
gaaugguuuucaaaauaaaaau

SEQ ID NO: 2021043 - RNA, 13 nt, Human
gaauguaaagcaa

SEQ ID NO: 2021044 - RNA, 21 nt, Human
gaauguaugcuucauacaggg

SEQ ID NO: 2021045 - RNA, 22 nt, Human
gaauguaagguauaucauucua

SEQ ID NO: 2021046 - RNA, 14 nt, Human
gaaugucaguguga

SEQ ID NO: 2021047 - RNA, 17 nt, Human
gaaugaagauacugaaa

SEQ ID NO: 2021048 - RNA, 18 nt, Human
gaaugaagauacugaaau

SEQ ID NO: 2021049 - RNA, 21 nt, Human
gaaugaagauacugaaauaaa

SEQ ID NO: 2021050 - RNA, 19 nt, Human
gaaugaagauacugaaaua

SEQ ID NO: 2021051 - RNA, 11 nt, Human
gaaugcagugg

SEQ ID NO: 2021052 - RNA, 14 nt, Human
gaaugcauaaaaug

SEQ ID NO: 2021053 - RNA, 14 nt, Human
gaaugaagguuuuu

SEQ ID NO: 2021054 - RNA, 21 nt, Human
gaaugaagguuuuuguaaaga

SEQ ID NO: 2021055 - RNA, 18 nt, Human
gaaugcaugcuuuccaua

SEQ ID NO: 2021056 - RNA, 21 nt, Human
gaaugcaugcuuuccauauuu

SEQ ID NO: 2021057 - RNA, 13 nt, Human
gaaugcuuuagga

SEQ ID NO: 2021058 - RNA, 22 nt, Human
gaaugaaccacaucuugcucug

SEQ ID NO: 2021059 - RNA, 18 nt, Human
gaaugaaccacaucuugc

SEQ ID NO: 2021060 - RNA, 17 nt, Human
gaaugaaccuucuggcc

SEQ ID NO: 2021061 - RNA, 16 nt, Human
gaaugaagaauucaga

SEQ ID NO: 2021062 - RNA, 15 nt, Human
gaaugaaccuucugg

SEQ ID NO: 2021063 - RNA, 23 nt, Human
gaaugaaccacaucuugcucugc

SEQ ID NO: 2021064 - RNA, 18 nt, Human
gaaucuuuaauuaaaacc

SEQ ID NO: 2021065 - RNA, 13 nt, Human
gaaucuuuaauua

SEQ ID NO: 2021066 - RNA, 16 nt, Human
gaauaaaaauuccaga

SEQ ID NO: 2021067 - RNA, 19 nt, Human
gaauaacauguaauuaagu

SEQ ID NO: 2021068 - RNA, 18 nt, Human
gaauaacauguaauuaag

SEQ ID NO: 2021069 - RNA, 20 nt, Human
gaaguuugauaaauaguguu

SEQ ID NO: 2021070 - RNA, 15 nt, Human
gaaguuugauaaaua

SEQ ID NO: 2021071 - RNA, 16 nt, Human
gaaguuugauaaauag

SEQ ID NO: 2021072 - RNA, 19 nt, Human
gaaguuugauaaauagugu

SEQ ID NO: 2021073 - RNA, 20 nt, Human
gaaguuugagaucagccugg

SEQ ID NO: 2021074 - RNA, 16 nt, Human
gaauaagcacuuuuua

SEQ ID NO: 2021075 - RNA, 17 nt, Human
gaauaagcacuuuuuaa

SEQ ID NO: 2021076 - RNA, 17 nt, Human
gaauaauacaguaucuc

SEQ ID NO: 2021077 - RNA, 20 nt, Human
gaauaagccauucugacuca

SEQ ID NO: 2021078 - RNA, 21 nt, Human
gaauacagaggcaacugcauu

SEQ ID NO: 2021079 - RNA, 17 nt, Human
gaauauuugaauguaug

SEQ ID NO: 2021080 - RNA, 15 nt, Human
gaauaccuguccccc

SEQ ID NO: 2021081 - RNA, 13 nt, Human
gaauaccuguccc

SEQ ID NO: 2021082 - RNA, 23 nt, Human
gaauagcugggacuacaggugug

SEQ ID NO: 2021083 - RNA, 22 nt, Human
gaauagcuuuaaugauaugcuu

SEQ ID NO: 2021084 - RNA, 18 nt, Human
gaauaggacuuguuuuug

SEQ ID NO: 2021085 - RNA, 19 nt, Human
gaauaggacuuguuuuugu

SEQ ID NO: 2021086 - RNA, 21 nt, Human
gaauaggacuuguuuuuguuu

SEQ ID NO: 2021087 - RNA, 20 nt, Human
gaauacucuuauaucuauau

SEQ ID NO: 2021088 - RNA, 19 nt, Human
gaauacucagggaaagcau

SEQ ID NO: 2021089 - RNA, 22 nt, Human
gaauagcugggacuacaggugu

SEQ ID NO: 2021090 - RNA, 14 nt, Human
gaagcggcuggcag

SEQ ID NO: 2021091 - RNA, 22 nt, Human
gaagggguaggauuacuaggug

SEQ ID NO: 2021092 - RNA, 19 nt, Human
gaagggggcugggacaugg

SEQ ID NO: 2021093 - RNA, 16 nt, Human
gaagggggcugggaca

SEQ ID NO: 2021094 - RNA, 22 nt, Human
gaaguaauaugcacacauuuuu

SEQ ID NO: 2021095 - RNA, 22 nt, Human
gaagguggccuuccugcuguua

SEQ ID NO: 2021096 - RNA, 18 nt, Human
gaaguacuauaauuuacc

SEQ ID NO: 2021097 - RNA, 15 nt, Human
gaaguacuggagaaa

SEQ ID NO: 2021098 - RNA, 16 nt, Human
gaaguaccuuaucaaa

SEQ ID NO: 2021099 - RNA, 12 nt, Human
gaaguagcacag

SEQ ID NO: 2021100 - RNA, 16 nt, Human
gaaguauccuucagcc

SEQ ID NO: 2021101 - RNA, 21 nt, Human
gaagucaugcuccccugugcc

SEQ ID NO: 2021102 - RNA, 14 nt, Human
gaaguauccuucag

SEQ ID NO: 2021103 - RNA, 16 nt, Human
gaaguaggggaagaau

SEQ ID NO: 2021104 - RNA, 21 nt, Human
gaaguaggggaagaauaauuu

SEQ ID NO: 2021105 - RNA, 18 nt, Human
gaaguagggguggcccga

SEQ ID NO: 2021106 - RNA, 14 nt, Human
gaaguagcuuugca

SEQ ID NO: 2021107 - RNA, 13 nt, Human
gaaguagcacagg

SEQ ID NO: 2021108 - RNA, 15 nt, Human
gaaguagcacaggcu

SEQ ID NO: 2021109 - RNA, 16 nt, Human
gaaguagcacaggcug

SEQ ID NO: 2021110 - RNA, 18 nt, Human
gaaguagcacaggcugag

SEQ ID NO: 2021111 - RNA, 20 nt, Human
gaaguuucugccgcagcccu

SEQ ID NO: 2021112 - RNA, 15 nt, Human
gaagucuuagaugua

SEQ ID NO: 2021113 - RNA, 21 nt, Human
gaaguuucugccgcagcccug

SEQ ID NO: 2021114 - RNA, 17 nt, Human
gaagaacucaugugauu

SEQ ID NO: 2021115 - RNA, 16 nt, Human
gaagaacugaaaggcu

SEQ ID NO: 2021116 - RNA, 13 nt, Human
gaagacuuuggaa

SEQ ID NO: 2021117 - RNA, 11 nt, Human
gaagacuuugg

SEQ ID NO: 2021118 - RNA, 23 nt, Human
gaacuuugaccucugcagcaaua

SEQ ID NO: 2021119 - RNA, 21 nt, Human
gaacucaucuagguaaauuac

SEQ ID NO: 2021120 - RNA, 20 nt, Human
gaacucaucuagguaaauua

SEQ ID NO: 2021121 - RNA, 21 nt, Human
gaacuuuguauaguuauguaa

SEQ ID NO: 2021122 - RNA, 12 nt, Human
gaacuuuguaua

SEQ ID NO: 2021123 - RNA, 15 nt, Human
gaacuuuguauaguu

SEQ ID NO: 2021124 - RNA, 16 nt, Human
gaagagcagcuccuuc

SEQ ID NO: 2021125 - RNA, 12 nt, Human
gaagagccccac

SEQ ID NO: 2021126 - RNA, 13 nt, Human
gaagagccccacu

SEQ ID NO: 2021127 - RNA, 15 nt, Human
gaagagccccacucu

SEQ ID NO: 2021128 - RNA, 20 nt, Human
gaagagccccacucucagag

SEQ ID NO: 2021129 - RNA, 16 nt, Human
gaagagccccacucuc

SEQ ID NO: 2021130 - RNA, 19 nt, Human
gaagagccccacucucaga

SEQ ID NO: 2021131 - RNA, 17 nt, Human
gaagagaagggcagggc

SEQ ID NO: 2021132 - RNA, 19 nt, Human
gaagagaaugcacaaacag

SEQ ID NO: 2021133 - RNA, 20 nt, Human
gaagacuuuucuuucagcca

SEQ ID NO: 2021134 - RNA, 17 nt, Human
gaagacuuuggaaagag

SEQ ID NO: 2021135 - RNA, 14 nt, Human
gaagacuuuggaaa

SEQ ID NO: 2021136 - RNA, 17 nt, Human
gaagccacccaaagcag

SEQ ID NO: 2021137 - RNA, 23 nt, Human
gaagcccuucuaccuuccugcaa

SEQ ID NO: 2021138 - RNA, 19 nt, Human
gaagcccaggaaaggcucc

SEQ ID NO: 2021139 - RNA, 16 nt, Human
gaagcccaggaaaggc

SEQ ID NO: 2021140 - RNA, 15 nt, Human
gaagcccaggaaagg

SEQ ID NO: 2021141 - RNA, 13 nt, Human
gaagcccaggaaa

SEQ ID NO: 2021142 - RNA, 22 nt, Human
gaagccagcaggcucucaggcc

SEQ ID NO: 2021143 - RNA, 21 nt, Human
gaagccagcaggcucucaggc

SEQ ID NO: 2021144 - RNA, 19 nt, Human
gaagccagcaggcucucag

SEQ ID NO: 2021145 - RNA, 20 nt, Human
gaagccagcaggcucucagg

SEQ ID NO: 2021146 - RNA, 17 nt, Human
gaagcauuuacuuugug

SEQ ID NO: 2021147 - RNA, 17 nt, Human
gaagauucuauguuaau

SEQ ID NO: 2021148 - RNA, 20 nt, Human
gaagauucuauguuaauauu

SEQ ID NO: 2021149 - RNA, 23 nt, Human
gaagauucuauguuaauauuuua

SEQ ID NO: 2021150 - RNA, 18 nt, Human
gaagcauuuacuuugugu

SEQ ID NO: 2021151 - RNA, 12 nt, Human
gaagagggcugc

SEQ ID NO: 2021152 - RNA, 20 nt, Human
gaagagguuuuaaagcuucc

SEQ ID NO: 2021153 - RNA, 20 nt, Human
gaagauaauauuaaggaaga

SEQ ID NO: 2021154 - RNA, 15 nt, Human
gaagauacugaaaua

SEQ ID NO: 2021155 - RNA, 14 nt, Human
gaagauaaguugga

SEQ ID NO: 2021156 - RNA, 14 nt, Human
gaagauacuuugua

SEQ ID NO: 2021157 - RNA, 15 nt, Human
gaagauacuuuguau

SEQ ID NO: 2021158 - RNA, 18 nt, Human
gaagauaaguuggaaaca

SEQ ID NO: 2021159 - RNA, 12 nt, Human
gaagauacuuug

SEQ ID NO: 2021160 - RNA, 13 nt, Human
gaagauacuuugu

SEQ ID NO: 2021161 - RNA, 18 nt, Human
gaagauguagaggagaaa

SEQ ID NO: 2021162 - RNA, 11 nt, Human
gaaccaaagcg

SEQ ID NO: 2021163 - RNA, 21 nt, Human
gaaccaaacccacccuuucua

SEQ ID NO: 2021164 - RNA, 22 nt, Human
gaaccaaacccacccuuucuac

SEQ ID NO: 2021165 - RNA, 14 nt, Human
gaacaucccuccug

SEQ ID NO: 2021166 - RNA, 15 nt, Human
gaacauugguucuuu

SEQ ID NO: 2021167 - RNA, 17 nt, Human
gaacauguggcuugaau

SEQ ID NO: 2021168 - RNA, 23 nt, Human
gaacauugcauauaacuuauauu

SEQ ID NO: 2021169 - RNA, 21 nt, Human
gaacauugcauauaacuuaua

SEQ ID NO: 2021170 - RNA, 21 nt, Human
gaaccuuuugagugccuuaca

SEQ ID NO: 2021171 - RNA, 19 nt, Human
gaaccuuuugagugccuua

SEQ ID NO: 2021172 - RNA, 18 nt, Human
gaaccuuuugagugccuu

SEQ ID NO: 2021173 - RNA, 18 nt, Human
gaacguuugguucaaaug

SEQ ID NO: 2021174 - RNA, 21 nt, Human
gaacguuugguucaaaugugu

SEQ ID NO: 2021175 - RNA, 13 nt, Human
gaacgccagggac

SEQ ID NO: 2021176 - RNA, 12 nt, Human
gaacgcccacuu

SEQ ID NO: 2021177 - RNA, 22 nt, Human
gaaccuuuugagugccuuacac

SEQ ID NO: 2021178 - RNA, 14 nt, Human
gaacuacugaggau

SEQ ID NO: 2021179 - RNA, 14 nt, Human
gaacauaauucuua

SEQ ID NO: 2021180 - RNA, 16 nt, Human
gaacauaauucuuauu

SEQ ID NO: 2021181 - RNA, 13 nt, Human
gaacauacaaaug

SEQ ID NO: 2021182 - RNA, 15 nt, Human
gaacauacaaaugca

SEQ ID NO: 2021183 - RNA, 17 nt, Human
gaacauacaaaugcauc

SEQ ID NO: 2021184 - RNA, 22 nt, Human
gaacauacaaaugcaucuuuga

SEQ ID NO: 2021185 - RNA, 23 nt, Human
gaacauacaaaugcaucuuugau

SEQ ID NO: 2021186 - RNA, 21 nt, Human
gaacaguguggccucuucuga

SEQ ID NO: 2021187 - RNA, 18 nt, Human
gaacagugcaccugggac

SEQ ID NO: 2021188 - RNA, 21 nt, Human
gaacagcggcuggacuuggag

SEQ ID NO: 2021189 - RNA, 16 nt, Human
gaacagugauuaccag

SEQ ID NO: 2021190 - RNA, 20 nt, Human
gaacagugauuaccagggac

SEQ ID NO: 2021191 - RNA, 15 nt, Human
gaacacucugagacu

SEQ ID NO: 2021192 - RNA, 20 nt, Human
gaaauuucacgucauaggaa

SEQ ID NO: 2021193 - RNA, 20 nt, Human
gaacagaugaccccugccca

SEQ ID NO: 2021194 - RNA, 22 nt, Human
gaacagaugaccccugcccaga

SEQ ID NO: 2021195 - RNA, 16 nt, Human
gaaauuguauuacaaa

SEQ ID NO: 2021196 - RNA, 19 nt, Human
gaaaauaguuuauuuuaaa

SEQ ID NO: 2021197 - RNA, 20 nt, Human
gaaaauaguuuauuuuaaaa

SEQ ID NO: 2021198 - RNA, 23 nt, Human
gaaaauaguuuauuuuaaaacaa

SEQ ID NO: 2021199 - RNA, 23 nt, Human
gaaaauaaaucaaugcuauaacu

SEQ ID NO: 2021200 - RNA, 19 nt, Human
gaaaauaggaacgacucua

SEQ ID NO: 2021201 - RNA, 16 nt, Human
gaaaauaguuauucag

SEQ ID NO: 2021202 - RNA, 13 nt, Human
gaaaauaguuuau

SEQ ID NO: 2021203 - RNA, 14 nt, Human
gaaaauaguuuauu

SEQ ID NO: 2021204 - RNA, 15 nt, Human
gaaaauaguuuauuu

SEQ ID NO: 2021205 - RNA, 15 nt, Human
gaaaauacuuaaaug

SEQ ID NO: 2021206 - RNA, 16 nt, Human
gaaaauacuuaaaugu

SEQ ID NO: 2021207 - RNA, 17 nt, Human
gaaaauacuuaaauguu

SEQ ID NO: 2021208 - RNA, 21 nt, Human
gaaaauacuuaaauguuaugu

SEQ ID NO: 2021209 - RNA, 14 nt, Human
gaacacucugagac

SEQ ID NO: 2021210 - RNA, 13 nt, Human
gaacacucugaga

SEQ ID NO: 2021211 - RNA, 21 nt, Human
gaaauuuauugaggaaaaaua

SEQ ID NO: 2021212 - RNA, 22 nt, Human
gaaauuuauugaggaaaaauau

SEQ ID NO: 2021213 - RNA, 11 nt, Human
gaaauuucacg

SEQ ID NO: 2021214 - RNA, 12 nt, Human
gaaauuucacgu

SEQ ID NO: 2021215 - RNA, 16 nt, Human
gaaauuucacgucaua

SEQ ID NO: 2021216 - RNA, 17 nt, Human
gaaauuuauaaacuuuu

SEQ ID NO: 2021217 - RNA, 16 nt, Human
gaaauuuauaaacuuu

SEQ ID NO: 2021218 - RNA, 18 nt, Human
gaaauuguauuacaaauc

SEQ ID NO: 2021219 - RNA, 18 nt, Human
gacuaaccccaccacacc

SEQ ID NO: 2021220 - RNA, 23 nt, Human
gacuaacuugucuuuggacccug

SEQ ID NO: 2021221 - RNA, 16 nt, Human
gacuaacuugucuuug

SEQ ID NO: 2021222 - RNA, 22 nt, Human
gacuaagaucgguuaacaaaua

SEQ ID NO: 2021223 - RNA, 23 nt, Human
gacuaagaucgguuaacaaauaa

SEQ ID NO: 2021224 - RNA, 15 nt, Human
gacguguuaugacuc

SEQ ID NO: 2021225 - RNA, 14 nt, Human
gacguguuaugacu

SEQ ID NO: 2021226 - RNA, 11 nt, Human
gacguguuaug

SEQ ID NO: 2021227 - RNA, 20 nt, Human
gaccuuucaauaggaaaaac

SEQ ID NO: 2021228 - RNA, 19 nt, Human
gaccuuucaauaggaaaaa

SEQ ID NO: 2021229 - RNA, 11 nt, Human
gaccuuucaau

SEQ ID NO: 2021230 - RNA, 22 nt, Human
gaccuuuaagagaaaugagcug

SEQ ID NO: 2021231 - RNA, 22 nt, Human
gacgcugugcugcccugcccac

SEQ ID NO: 2021232 - RNA, 21 nt, Human
gacgcugugcugcccugccca

SEQ ID NO: 2021233 - RNA, 18 nt, Human
gacgcuucacaggacagg

SEQ ID NO: 2021234 - RNA, 13 nt, Human
gacggagucccac

SEQ ID NO: 2021235 - RNA, 14 nt, Human
gacguggcaccucc

SEQ ID NO: 2021236 - RNA, 16 nt, Human
gacguggcaccuccuc

SEQ ID NO: 2021237 - RNA, 21 nt, Human
gacggcgagaaaugccucugg

SEQ ID NO: 2021238 - RNA, 22 nt, Human
gacggcacugagagagcgcagc

SEQ ID NO: 2021239 - RNA, 16 nt, Human
gaccuuccaagagccu

SEQ ID NO: 2021240 - RNA, 17 nt, Human
gaccuuccaagagccug

SEQ ID NO: 2021241 - RNA, 19 nt, Human
gaccuucacucuaagaugu

SEQ ID NO: 2021242 - RNA, 20 nt, Human
gaccuucacucuaagauguu

SEQ ID NO: 2021243 - RNA, 18 nt, Human
gaccuuccaagagccuga

SEQ ID NO: 2021244 - RNA, 22 nt, Human
gaccuucacucuaagauguuau

SEQ ID NO: 2021245 - RNA, 16 nt, Human
gaccuucgggcugugc

SEQ ID NO: 2021246 - RNA, 16 nt, Human
gaccuucuccuucacc

SEQ ID NO: 2021247 - RNA, 15 nt, Human
gaccuucuccuucac

SEQ ID NO: 2021248 - RNA, 18 nt, Human
gaccuucgggcugugccc

SEQ ID NO: 2021249 - RNA, 19 nt, Human
gaccuucgggcugugcccg

SEQ ID NO: 2021250 - RNA, 14 nt, Human
gaccuucuccuuca

SEQ ID NO: 2021251 - RNA, 21 nt, Human
gaccuucuccuucaccuuugu

SEQ ID NO: 2021252 - RNA, 20 nt, Human
gaccuucuccuucaccuuug

SEQ ID NO: 2021253 - RNA, 14 nt, Human
gaccuugaacuggg

SEQ ID NO: 2021254 - RNA, 18 nt, Human
gaccuguuaaaauuauac

SEQ ID NO: 2021255 - RNA, 14 nt, Human
gaccuuaaaugcaa

SEQ ID NO: 2021256 - RNA, 13 nt, Human
gaccuggucaggg

SEQ ID NO: 2021257 - RNA, 23 nt, Human
gacccuugccgucuaccugaggg

SEQ ID NO: 2021258 - RNA, 20 nt, Human
gacccuugccgucuaccuga

SEQ ID NO: 2021259 - RNA, 19 nt, Human
gacccuugccgucuaccug

SEQ ID NO: 2021260 - RNA, 15 nt, Human
gaccuggccugucug

SEQ ID NO: 2021261 - RNA, 16 nt, Human
gaccuggccugucugu

SEQ ID NO: 2021262 - RNA, 19 nt, Human
gaccuggggcugcugugaa

SEQ ID NO: 2021263 - RNA, 15 nt, Human
gacccuugugguccc

SEQ ID NO: 2021264 - RNA, 15 nt, Human
gacuuacuguacaug

SEQ ID NO: 2021265 - RNA, 16 nt, Human
gacuuacuguacauga

SEQ ID NO: 2021266 - RNA, 12 nt, Human
gacuuacuguac

SEQ ID NO: 2021267 - RNA, 18 nt, Human
gacuuacuguacaugaaa

SEQ ID NO: 2021268 - RNA, 23 nt, Human
gacuuacuguacaugaaaacaca

SEQ ID NO: 2021269 - RNA, 12 nt, Human
gacuuagaaucc

SEQ ID NO: 2021270 - RNA, 20 nt, Human
gacuuagaaucccuguguua

SEQ ID NO: 2021271 - RNA, 21 nt, Human
gacuuagaaucccuguguuaa

SEQ ID NO: 2021272 - RNA, 23 nt, Human
gacuuagaaucccuguguuaauu

SEQ ID NO: 2021273 - RNA, 15 nt, Human
gacuuagcugggaga

SEQ ID NO: 2021274 - RNA, 19 nt, Human
gacuuaguggacaggggag

SEQ ID NO: 2021275 - RNA, 20 nt, Human
gacuucaucccucuggggcu

SEQ ID NO: 2021276 - RNA, 12 nt, Human
gacuucaucccu

SEQ ID NO: 2021277 - RNA, 14 nt, Human
gacuucagcucugu

SEQ ID NO: 2021278 - RNA, 22 nt, Human
gacuucagggagucagcuguuu

SEQ ID NO: 2021279 - RNA, 23 nt, Human
gacuggccaagguuuggggaaga

SEQ ID NO: 2021280 - RNA, 17 nt, Human
gacuggauguaccacca

SEQ ID NO: 2021281 - RNA, 16 nt, Human
gacuggcaagaaaaga

SEQ ID NO: 2021282 - RNA, 16 nt, Human
gacugggaacagaacu

SEQ ID NO: 2021283 - RNA, 14 nt, Human
gacugcuccugagc

SEQ ID NO: 2021284 - RNA, 16 nt, Human
gacugcuccugagccc

SEQ ID NO: 2021285 - RNA, 19 nt, Human
gacugccagcucuuccuag

SEQ ID NO: 2021286 - RNA, 21 nt, Human
gacugccagcucuuccuagcu

SEQ ID NO: 2021287 - RNA, 17 nt, Human
gacugcuccugagcccc

SEQ ID NO: 2021288 - RNA, 19 nt, Human
gacugcuccugagccccca

SEQ ID NO: 2021289 - RNA, 16 nt, Human
gacugaggggagggga

SEQ ID NO: 2021290 - RNA, 18 nt, Human
gacugaguacguugugca

SEQ ID NO: 2021291 - RNA, 14 nt, Human
gacugacugaggca

SEQ ID NO: 2021292 - RNA, 15 nt, Human
gacugacugaggcag

SEQ ID NO: 2021293 - RNA, 16 nt, Human
gacugacugaggcagu

SEQ ID NO: 2021294 - RNA, 13 nt, Human
gacugagaaauuu

SEQ ID NO: 2021295 - RNA, 12 nt, Human
gacugaucucag

SEQ ID NO: 2021296 - RNA, 16 nt, Human
gacugauguuugugca

SEQ ID NO: 2021297 - RNA, 20 nt, Human
gacugccagucccccugccc

SEQ ID NO: 2021298 - RNA, 13 nt, Human
gacugccagcucu

SEQ ID NO: 2021299 - RNA, 14 nt, Human
gacugccagcucuu

SEQ ID NO: 2021300 - RNA, 15 nt, Human
gacugccagcucuuc

SEQ ID NO: 2021301 - RNA, 18 nt, Human
gacugccagcucuuccua

SEQ ID NO: 2021302 - RNA, 18 nt, Human
gacugccacaaggaagaa

SEQ ID NO: 2021303 - RNA, 19 nt, Human
gacugccacaaggaagaaa

SEQ ID NO: 2021304 - RNA, 12 nt, Human
gacugccaccuc

SEQ ID NO: 2021305 - RNA, 13 nt, Human
gacugccaccucc

SEQ ID NO: 2021306 - RNA, 14 nt, Human
gacugccaccuccc

SEQ ID NO: 2021307 - RNA, 15 nt, Human
gacugccaccucccc

SEQ ID NO: 2021308 - RNA, 16 nt, Human
gacugccaccuccccu

SEQ ID NO: 2021309 - RNA, 14 nt, Human
gacugccacaagga

SEQ ID NO: 2021310 - RNA, 21 nt, Human
gacuccugcaggcagccaggc

SEQ ID NO: 2021311 - RNA, 20 nt, Human
gacuccugcaggcagccagg

SEQ ID NO: 2021312 - RNA, 19 nt, Human
gacuccugcaggcagccag

SEQ ID NO: 2021313 - RNA, 18 nt, Human
gacuccugcaggcagcca

SEQ ID NO: 2021314 - RNA, 18 nt, Human
gacuacaggcacccacca

SEQ ID NO: 2021315 - RNA, 12 nt, Human
gacuacagggcc

SEQ ID NO: 2021316 - RNA, 13 nt, Human
gacuacaggcacc

SEQ ID NO: 2021317 - RNA, 15 nt, Human
gacuacaggcaccca

SEQ ID NO: 2021318 - RNA, 21 nt, Human
gacucuacagaggccaugggc

SEQ ID NO: 2021319 - RNA, 16 nt, Human
gacugaauuucuuuug

SEQ ID NO: 2021320 - RNA, 15 nt, Human
gacucuacagaggcc

SEQ ID NO: 2021321 - RNA, 15 nt, Human
gacucuaaagucugu

SEQ ID NO: 2021322 - RNA, 13 nt, Human
gacuacagggccg

SEQ ID NO: 2021323 - RNA, 11 nt, Human
gacugagaaau

SEQ ID NO: 2021324 - RNA, 18 nt, Human
gacucuacaugcuuguug

SEQ ID NO: 2021325 - RNA, 12 nt, Human
gacccaguggca

SEQ ID NO: 2021326 - RNA, 14 nt, Human
gacccaguggcagg

SEQ ID NO: 2021327 - RNA, 15 nt, Human
gacccaguggcaggg

SEQ ID NO: 2021328 - RNA, 16 nt, Human
gacccaguggcagggc

SEQ ID NO: 2021329 - RNA, 17 nt, Human
gacccaguggcagggca

SEQ ID NO: 2021330 - RNA, 18 nt, Human
gacccaguggcagggcac

SEQ ID NO: 2021331 - RNA, 19 nt, Human
gacccaguggcagggcaca

SEQ ID NO: 2021332 - RNA, 20 nt, Human
gacccaguggcagggcacag

SEQ ID NO: 2021333 - RNA, 22 nt, Human
gacccaguggcagggcacaggg

SEQ ID NO: 2021334 - RNA, 20 nt, Human
gacccaugcugcccugugag

SEQ ID NO: 2021335 - RNA, 19 nt, Human
gacccaugcugcccuguga

SEQ ID NO: 2021336 - RNA, 18 nt, Human
gacccaugcugcccugug

SEQ ID NO: 2021337 - RNA, 23 nt, Human
gacccaguggcagggcacagggc

SEQ ID NO: 2021338 - RNA, 13 nt, Human
gacccaugcugcc

SEQ ID NO: 2021339 - RNA, 20 nt, Human
gacccaaaaggcagaagcaa

SEQ ID NO: 2021340 - RNA, 19 nt, Human
gacccacuggacucaccuc

SEQ ID NO: 2021341 - RNA, 16 nt, Human
gaccagcccacgcuga

SEQ ID NO: 2021342 - RNA, 23 nt, Human
gaccagcccacgcugacuacagg

SEQ ID NO: 2021343 - RNA, 17 nt, Human
gaccagcagucugccug

SEQ ID NO: 2021344 - RNA, 11 nt, Human
gaccagccagg

SEQ ID NO: 2021345 - RNA, 23 nt, Human
gaccagccagggaaagacuggca

SEQ ID NO: 2021346 - RNA, 11 nt, Human
gaccagcccac

SEQ ID NO: 2021347 - RNA, 12 nt, Human
gaccagcccacg

SEQ ID NO: 2021348 - RNA, 14 nt, Human
gaccagcccacgcu

SEQ ID NO: 2021349 - RNA, 18 nt, Human
gacccaaaaggcagaagc

SEQ ID NO: 2021350 - RNA, 19 nt, Human
gacccaaaaggcagaagca

SEQ ID NO: 2021351 - RNA, 15 nt, Human
gacccccccagcuuc

SEQ ID NO: 2021352 - RNA, 12 nt, Human
gaccccagccuc

SEQ ID NO: 2021353 - RNA, 14 nt, Human
gaccccagccucaa

SEQ ID NO: 2021354 - RNA, 11 nt, Human
gaccccagaau

SEQ ID NO: 2021355 - RNA, 20 nt, Human
gacccaugggcaggagacug

SEQ ID NO: 2021356 - RNA, 17 nt, Human
gacccaugggcaggaga

SEQ ID NO: 2021357 - RNA, 18 nt, Human
gacccaugggcaggagac

SEQ ID NO: 2021358 - RNA, 14 nt, Human
gacccaugggcagg

SEQ ID NO: 2021359 - RNA, 15 nt, Human
gacccaugggcagga

SEQ ID NO: 2021360 - RNA, 16 nt, Human
gacccaugggcaggag

SEQ ID NO: 2021361 - RNA, 22 nt, Human
gacccugcccugugggccccca

SEQ ID NO: 2021362 - RNA, 20 nt, Human
gacccugcccugugggcccc

SEQ ID NO: 2021363 - RNA, 17 nt, Human
gacccugcccugugggc

SEQ ID NO: 2021364 - RNA, 16 nt, Human
gacccugaggcccaga

SEQ ID NO: 2021365 - RNA, 12 nt, Human
gacccugaggcc

SEQ ID NO: 2021366 - RNA, 11 nt, Human
gacccugaggc

SEQ ID NO: 2021367 - RNA, 12 nt, Human
gacccccuggag

SEQ ID NO: 2021368 - RNA, 10 nt, Human
gacccugagg

SEQ ID NO: 2021369 - RNA, 13 nt, Human
gaccagcacacuc

SEQ ID NO: 2021370 - RNA, 14 nt, Human
gaccagcacacucc

SEQ ID NO: 2021371 - RNA, 18 nt, Human
gaccagcacacucccgag

SEQ ID NO: 2021372 - RNA, 21 nt, Human
gaccagcaccaucucuccucc

SEQ ID NO: 2021373 - RNA, 20 nt, Human
gaccagcaccaucucuccuc

SEQ ID NO: 2021374 - RNA, 21 nt, Human
gaccagagcugccaccugccu

SEQ ID NO: 2021375 - RNA, 23 nt, Human
gaccagacaccuugacagggcac

SEQ ID NO: 2021376 - RNA, 24 nt, Human
gaccagacaccuugacagggcaca

SEQ ID NO: 2021377 - RNA, 16 nt, Human
gaccacugcagaagac

SEQ ID NO: 2021378 - RNA, 18 nt, Human
gaccacugcagaagacag

SEQ ID NO: 2021379 - RNA, 22 nt, Human
gaccagacaccuugacagggca

SEQ ID NO: 2021380 - RNA, 21 nt, Human
gaccagacaccuugacagggc

SEQ ID NO: 2021381 - RNA, 16 nt, Human
gaccacguuucuaaag

SEQ ID NO: 2021382 - RNA, 12 nt, Human
gaccaccagagg

SEQ ID NO: 2021383 - RNA, 19 nt, Human
gaccacaggugcccgccac

SEQ ID NO: 2021384 - RNA, 23 nt, Human
gaccacaggugcccgccaccaca

SEQ ID NO: 2021385 - RNA, 18 nt, Human
gaccaaggcucugaaaua

SEQ ID NO: 2021386 - RNA, 13 nt, Human
gacaucagcuggu

SEQ ID NO: 2021387 - RNA, 18 nt, Human
gaccacaaaacuuuucua

SEQ ID NO: 2021388 - RNA, 13 nt, Human
gaccaauuuuaac

SEQ ID NO: 2021389 - RNA, 14 nt, Human
gaccacacuccagc

SEQ ID NO: 2021390 - RNA, 16 nt, Human
gaccacacuccagcug

SEQ ID NO: 2021391 - RNA, 22 nt, Human
gaccacacuccagcugggauca

SEQ ID NO: 2021392 - RNA, 24 nt, Human
gacaggcaaugcuggcuguuggcu

SEQ ID NO: 2021393 - RNA, 23 nt, Human
gacaggcaaugcuggcuguuggc

SEQ ID NO: 2021394 - RNA, 20 nt, Human
gacaggcauguucucugagg

SEQ ID NO: 2021395 - RNA, 21 nt, Human
gacaggcauguucucugagga

SEQ ID NO: 2021396 - RNA, 20 nt, Human
gacaggcaagcaccuccugc

SEQ ID NO: 2021397 - RNA, 21 nt, Human
gacaggcaagcaccuccugcc

SEQ ID NO: 2021398 - RNA, 18 nt, Human
gacaggcaaugcuggcug

SEQ ID NO: 2021399 - RNA, 19 nt, Human
gacaggcaaugcuggcugu

SEQ ID NO: 2021400 - RNA, 13 nt, Human
gacaggcaagcac

SEQ ID NO: 2021401 - RNA, 22 nt, Human
gacagcagucuuaugcuuccag

SEQ ID NO: 2021402 - RNA, 23 nt, Human
gacagcagucuuaugcuuccaga

SEQ ID NO: 2021403 - RNA, 19 nt, Human
gacagcagucuuaugcuuc

SEQ ID NO: 2021404 - RNA, 17 nt, Human
gacaggcaagcaccucc

SEQ ID NO: 2021405 - RNA, 18 nt, Human
gacaggcaagcaccuccu

SEQ ID NO: 2021406 - RNA, 16 nt, Human
gacaucaacugcauca

SEQ ID NO: 2021407 - RNA, 23 nt, Human
gacaucaacugcaucaagaugug

SEQ ID NO: 2021408 - RNA, 13 nt, Human
gacaucacuggca

SEQ ID NO: 2021409 - RNA, 14 nt, Human
gacaguugugcagg

SEQ ID NO: 2021410 - RNA, 15 nt, Human
gacaggccagguggu

SEQ ID NO: 2021411 - RNA, 14 nt, Human
gacagggcauggcc

SEQ ID NO: 2021412 - RNA, 22 nt, Human
gacaggcauguucucugaggac

SEQ ID NO: 2021413 - RNA, 15 nt, Human
gacagggcauggcca

SEQ ID NO: 2021414 - RNA, 20 nt, Human
gacagggcauggccaggugg

SEQ ID NO: 2021415 - RNA, 22 nt, Human
gacagggcauggccagguggcc

SEQ ID NO: 2021416 - RNA, 18 nt, Human
gacaguucauucagggcc

SEQ ID NO: 2021417 - RNA, 19 nt, Human
gacaguucauucagggccg

SEQ ID NO: 2021418 - RNA, 16 nt, Human
gacagacagcccucca

SEQ ID NO: 2021419 - RNA, 20 nt, Human
gacagagcuacacaggggaa

SEQ ID NO: 2021420 - RNA, 12 nt, Human
gacagaggcagc

SEQ ID NO: 2021421 - RNA, 18 nt, Human
gacagagcgacagagcag

SEQ ID NO: 2021422 - RNA, 21 nt, Human
gacagagagagauacucuggg

SEQ ID NO: 2021423 - RNA, 13 nt, Human
gacagagccugcc

SEQ ID NO: 2021424 - RNA, 15 nt, Human
gacagagccugcccc

SEQ ID NO: 2021425 - RNA, 16 nt, Human
gacagagccugcccca

SEQ ID NO: 2021426 - RNA, 21 nt, Human
gacagagccugccccagcgcu

SEQ ID NO: 2021427 - RNA, 17 nt, Human
gacagagcgacagagca

SEQ ID NO: 2021428 - RNA, 13 nt, Human
gacagagggggug

SEQ ID NO: 2021429 - RNA, 23 nt, Human
gacagaggcagccccauucugcc

SEQ ID NO: 2021430 - RNA, 19 nt, Human
gacagagugagacucuguc

SEQ ID NO: 2021431 - RNA, 21 nt, Human
gacagagucucacuguugccc

SEQ ID NO: 2021432 - RNA, 16 nt, Human
gacagagugagacucu

SEQ ID NO: 2021433 - RNA, 18 nt, Human
gaauuucccaaagcagug

SEQ ID NO: 2021434 - RNA, 16 nt, Human
gaauuucccaaagcag

SEQ ID NO: 2021435 - RNA, 22 nt, Human
gaauuucccaaagcagugcaug

SEQ ID NO: 2021436 - RNA, 12 nt, Human
gaauuucacaag

SEQ ID NO: 2021437 - RNA, 22 nt, Human
gacacgaauauugcugauggug

SEQ ID NO: 2021438 - RNA, 16 nt, Human
gacacuagaagauuuu

SEQ ID NO: 2021439 - RNA, 17 nt, Human
gacagacacaggcccgg

SEQ ID NO: 2021440 - RNA, 20 nt, Human
gacagacacaggcccggcuc

SEQ ID NO: 2021441 - RNA, 22 nt, Human
gacagacacaggcccggcucca

SEQ ID NO: 2021442 - RNA, 19 nt, Human
cuugaguugauucagcucu

SEQ ID NO: 2021443 - RNA, 18 nt, Human
cuugaguugauucagcuc

SEQ ID NO: 2021444 - RNA, 20 nt, Human
cuugaguugauucagcucug

SEQ ID NO: 2021445 - RNA, 21 nt, Human
cuugaguugauucagcucugc

SEQ ID NO: 2021446 - RNA, 17 nt, Human
cuugaggggagccagga

SEQ ID NO: 2021447 - RNA, 20 nt, Human
cuugaggggagccaggaggg

SEQ ID NO: 2021448 - RNA, 15 nt, Human
cuugcaauggcagcc

SEQ ID NO: 2021449 - RNA, 16 nt, Human
cuugcaauggcagccu

SEQ ID NO: 2021450 - RNA, 17 nt, Human
cuugcaauggcagccuu

SEQ ID NO: 2021451 - RNA, 18 nt, Human
cuugcaauggcagccuug

SEQ ID NO: 2021452 - RNA, 21 nt, Human
cuugcagacucuacagaggcc

SEQ ID NO: 2021453 - RNA, 20 nt, Human
cuugcagacucuacagaggc

SEQ ID NO: 2021454 - RNA, 12 nt, Human
cuugcacauuug

SEQ ID NO: 2021455 - RNA, 13 nt, Human
cuugcacacauca

SEQ ID NO: 2021456 - RNA, 14 nt, Human
cuugcacacaucau

SEQ ID NO: 2021457 - RNA, 18 nt, Human
cuugcacacaucaucugu

SEQ ID NO: 2021458 - RNA, 19 nt, Human
cuugcacacaucaucugua

SEQ ID NO: 2021459 - RNA, 20 nt, Human
cuugcacacaucaucuguaa

SEQ ID NO: 2021460 - RNA, 23 nt, Human
cuugcacacaucaucuguaagcu

SEQ ID NO: 2021461 - RNA, 14 nt, Human
cuucuggccuccca

SEQ ID NO: 2021462 - RNA, 15 nt, Human
cuucuggccucccac

SEQ ID NO: 2021463 - RNA, 19 nt, Human
cuucuggccucccacagac

SEQ ID NO: 2021464 - RNA, 16 nt, Human
cuucuggccucccaca

SEQ ID NO: 2021465 - RNA, 17 nt, Human
cuucuggcacuuggaga

SEQ ID NO: 2021466 - RNA, 15 nt, Human
cuugagccugggagg

SEQ ID NO: 2021467 - RNA, 12 nt, Human
cuugagccuggg

SEQ ID NO: 2021468 - RNA, 15 nt, Human
cuugaggguugggcu

SEQ ID NO: 2021469 - RNA, 17 nt, Human
cuugaggguugggcugg

SEQ ID NO: 2021470 - RNA, 16 nt, Human
cuugaggggagccagg

SEQ ID NO: 2021471 - RNA, 18 nt, Human
cuugcccuggugccucac

SEQ ID NO: 2021472 - RNA, 17 nt, Human
cuugcccaugcugggcu

SEQ ID NO: 2021473 - RNA, 21 nt, Human
cuugcccaugcugggcucccg

SEQ ID NO: 2021474 - RNA, 14 nt, Human
cuugcaugaggcua

SEQ ID NO: 2021475 - RNA, 13 nt, Human
cuugcaugaggcu

SEQ ID NO: 2021476 - RNA, 17 nt, Human
cuugcaugaggcuagug

SEQ ID NO: 2021477 - RNA, 12 nt, Human
cuugccagucuu

SEQ ID NO: 2021478 - RNA, 18 nt, Human
cuugcucuugaugccugg

SEQ ID NO: 2021479 - RNA, 17 nt, Human
cuugcucuugaugccug

SEQ ID NO: 2021480 - RNA, 19 nt, Human
cuugcucuugaugccuggc

SEQ ID NO: 2021481 - RNA, 22 nt, Human
cuugcucugcugacagacacag

SEQ ID NO: 2021482 - RNA, 20 nt, Human
cuugcugcccugugcuccuc

SEQ ID NO: 2021483 - RNA, 20 nt, Human
cuuggaagcuccgcuuucua

SEQ ID NO: 2021484 - RNA, 14 nt, Human
cuuggaagcuccgc

SEQ ID NO: 2021485 - RNA, 20 nt, Human
cuugcuugauuguauggugg

SEQ ID NO: 2021486 - RNA, 17 nt, Human
cuuguagauuugauuuu

SEQ ID NO: 2021487 - RNA, 15 nt, Human
cuuguggucccaccc

SEQ ID NO: 2021488 - RNA, 14 nt, Human
cuuguucuuacuuu

SEQ ID NO: 2021489 - RNA, 12 nt, Human
cuuguucuucca

SEQ ID NO: 2021490 - RNA, 19 nt, Human
cuuguggucccaccccaca

SEQ ID NO: 2021491 - RNA, 16 nt, Human
cuuguggucccacccc

SEQ ID NO: 2021492 - RNA, 16 nt, Human
cuuguuaagauaguua

SEQ ID NO: 2021493 - RNA, 21 nt, Human
cuugugggugugagcagcacc

SEQ ID NO: 2021494 - RNA, 19 nt, Human
cuuuaccuuuuuuauacau

SEQ ID NO: 2021495 - RNA, 20 nt, Human
cuuuaccuuuuuuauacaua

SEQ ID NO: 2021496 - RNA, 12 nt, Human
cuuuagacuuga

SEQ ID NO: 2021497 - RNA, 13 nt, Human
cuuuagacuugaa

SEQ ID NO: 2021498 - RNA, 14 nt, Human
cuuuagacuugaaa

SEQ ID NO: 2021499 - RNA, 15 nt, Human
cuuuagacuugaaaa

SEQ ID NO: 2021500 - RNA, 17 nt, Human
cuuuaccuuuuuuauac

SEQ ID NO: 2021501 - RNA, 22 nt, Human
cuuuaaaaaauuaaucugggcc

SEQ ID NO: 2021502 - RNA, 22 nt, Human
cuuuaaaaaagcuauaaauuau

SEQ ID NO: 2021503 - RNA, 21 nt, Human
cuuuaaaaagcuccaaaugca

SEQ ID NO: 2021504 - RNA, 15 nt, Human
cuuuaaaaauuuacu

SEQ ID NO: 2021505 - RNA, 12 nt, Human
cuuguuucuccc

SEQ ID NO: 2021506 - RNA, 19 nt, Human
cuuuaaaaaagcuauaaau

SEQ ID NO: 2021507 - RNA, 13 nt, Human
cuuguucuuccaa

SEQ ID NO: 2021508 - RNA, 18 nt, Human
cuuguucuuccaaagcag

SEQ ID NO: 2021509 - RNA, 20 nt, Human
cuuguucuuccaaagcagag

SEQ ID NO: 2021510 - RNA, 15 nt, Human
cuuguugaauuuauu

SEQ ID NO: 2021511 - RNA, 12 nt, Human
cuuguugacaga

SEQ ID NO: 2021512 - RNA, 20 nt, Human
cuuguugccuauaagccaaa

SEQ ID NO: 2021513 - RNA, 18 nt, Human
cuugggccgagccugccu

SEQ ID NO: 2021514 - RNA, 13 nt, Human
cuugggcucugcu

SEQ ID NO: 2021515 - RNA, 14 nt, Human
cuugggcucugcug

SEQ ID NO: 2021516 - RNA, 18 nt, Human
cuugggcucugcugaguc

SEQ ID NO: 2021517 - RNA, 15 nt, Human
cuuggggccuaugca

SEQ ID NO: 2021518 - RNA, 15 nt, Human
cuugggggaaaauac

SEQ ID NO: 2021519 - RNA, 14 nt, Human
cuugguuuguaaau

SEQ ID NO: 2021520 - RNA, 15 nt, Human
cuugguuuguaaauu

SEQ ID NO: 2021521 - RNA, 13 nt, Human
cuuguaauguaac

SEQ ID NO: 2021522 - RNA, 14 nt, Human
cuuguaauguaacu

SEQ ID NO: 2021523 - RNA, 15 nt, Human
cuuguaauguaacug

SEQ ID NO: 2021524 - RNA, 20 nt, Human
cuuguaauguaacugcucuu

SEQ ID NO: 2021525 - RNA, 17 nt, Human
cuuguacuuuauuuucu

SEQ ID NO: 2021526 - RNA, 14 nt, Human
cuuguagauuugau

SEQ ID NO: 2021527 - RNA, 15 nt, Human
cuuguagauuugauu

SEQ ID NO: 2021528 - RNA, 20 nt, Human
cuugggccacugugaagaga

SEQ ID NO: 2021529 - RNA, 18 nt, Human
cuugggccacugugaaga

SEQ ID NO: 2021530 - RNA, 13 nt, Human
cuugggcaauauu

SEQ ID NO: 2021531 - RNA, 15 nt, Human
cuugggcaauauucu

SEQ ID NO: 2021532 - RNA, 19 nt, Human
cuugggcaauauucucugu

SEQ ID NO: 2021533 - RNA, 20 nt, Human
cuugggagugugguuucuuu

SEQ ID NO: 2021534 - RNA, 17 nt, Human
cuugggauccaggcccc

SEQ ID NO: 2021535 - RNA, 22 nt, Human
cuugggcaauauucucuguaca

SEQ ID NO: 2021536 - RNA, 20 nt, Human
cuugggcaauauucucugua

SEQ ID NO: 2021537 - RNA, 21 nt, Human
cuugggcaauauucucuguac

SEQ ID NO: 2021538 - RNA, 15 nt, Human
cuuggaagcuucugg

SEQ ID NO: 2021539 - RNA, 22 nt, Human
cuuggagccaauggagacuguc

SEQ ID NO: 2021540 - RNA, 14 nt, Human
cuuuuugcucuaaa

SEQ ID NO: 2021541 - RNA, 15 nt, Human
cuuuuugcucuaaaa

SEQ ID NO: 2021542 - RNA, 16 nt, Human
cuuuuugcucuaaaau

SEQ ID NO: 2021543 - RNA, 18 nt, Human
cuuuuugcucuaaaauau

SEQ ID NO: 2021544 - RNA, 14 nt, Human
cuuuuugaaauguc

SEQ ID NO: 2021545 - RNA, 13 nt, Human
cuuuuugaaucuu

SEQ ID NO: 2021546 - RNA, 15 nt, Human
cuuuuugaaucuuua

SEQ ID NO: 2021547 - RNA, 17 nt, Human
cuuuuugaaucuuuaau

SEQ ID NO: 2021548 - RNA, 18 nt, Human
cuuuuugaaucuuuaauu

SEQ ID NO: 2021549 - RNA, 21 nt, Human
cuuuuguuuuuugaaguguug

SEQ ID NO: 2021550 - RNA, 14 nt, Human
cuuuuguuuugcuu

SEQ ID NO: 2021551 - RNA, 15 nt, Human
cuuuuguuuugcuuu

SEQ ID NO: 2021552 - RNA, 13 nt, Human
cuuuuguuuuuug

SEQ ID NO: 2021553 - RNA, 17 nt, Human
cuuuuguuuuuugaagu

SEQ ID NO: 2021554 - RNA, 18 nt, Human
cuuuuguuuuuugaagug

SEQ ID NO: 2021555 - RNA, 19 nt, Human
cuuuuguuuuuugaagugu

SEQ ID NO: 2021556 - RNA, 22 nt, Human
cuuuuguucuugguuuguaaau

SEQ ID NO: 2021557 - RNA, 22 nt, Human
cuuuucuguguuuacagagaug

SEQ ID NO: 2021558 - RNA, 13 nt, Human
cuuuucuguguuu

SEQ ID NO: 2021559 - RNA, 18 nt, Human
cuuuucuguguuuacaga

SEQ ID NO: 2021560 - RNA, 15 nt, Human
cuuuucuguuugcua

SEQ ID NO: 2021561 - RNA, 21 nt, Human
cuuuguuuguugucagcugaa

SEQ ID NO: 2021562 - RNA, 17 nt, Human
cuuuguuuuacugucuu

SEQ ID NO: 2021563 - RNA, 17 nt, Human
cuuuguugugugccucu

SEQ ID NO: 2021564 - RNA, 18 nt, Human
cuuuguugugugccucua

SEQ ID NO: 2021565 - RNA, 19 nt, Human
cuuuguuuagucuuuauac

SEQ ID NO: 2021566 - RNA, 13 nt, Human
cuuuguugaaaga

SEQ ID NO: 2021567 - RNA, 16 nt, Human
cuuuguugaaagaaag

SEQ ID NO: 2021568 - RNA, 17 nt, Human
cuuuguugaacuguuag

SEQ ID NO: 2021569 - RNA, 22 nt, Human
cuuuguugaacuguuagaaugu

SEQ ID NO: 2021570 - RNA, 13 nt, Human
cuuuguugugugc

SEQ ID NO: 2021571 - RNA, 22 nt, Human
cuuuguugugugccucuagcug

SEQ ID NO: 2021572 - RNA, 16 nt, Human
cuuuuuuagaguugau

SEQ ID NO: 2021573 - RNA, 20 nt, Human
gaaaaauaucuguaagagug

SEQ ID NO: 2021574 - RNA, 12 nt, Human
gaaaaauaugug

SEQ ID NO: 2021575 - RNA, 13 nt, Human
cuuuuuuacaaag

SEQ ID NO: 2021576 - RNA, 20 nt, Human
gaaaaaucaaguauuauaaa

SEQ ID NO: 2021577 - RNA, 15 nt, Human
gaaaaauauuuaaug

SEQ ID NO: 2021578 - RNA, 16 nt, Human
gaaaaauauuuaaugu

SEQ ID NO: 2021579 - RNA, 20 nt, Human
gaaaaauauuuaauguugaa

SEQ ID NO: 2021580 - RNA, 21 nt, Human
gaaaaaucaaguauuauaaac

SEQ ID NO: 2021581 - RNA, 13 nt, Human
gaaaaauauguga

SEQ ID NO: 2021582 - RNA, 14 nt, Human
gaaaaauaugugaa

SEQ ID NO: 2021583 - RNA, 15 nt, Human
gaaaaauaugugaag

SEQ ID NO: 2021584 - RNA, 16 nt, Human
gaaaaauaugugaagg

SEQ ID NO: 2021585 - RNA, 10 nt, Human
gaaaaauauu

SEQ ID NO: 2021586 - RNA, 21 nt, Human
gaaaacacuguucucugcccu

SEQ ID NO: 2021587 - RNA, 20 nt, Human
gaaaacacuguucucugccc

SEQ ID NO: 2021588 - RNA, 16 nt, Human
gaaaacaugcuacaca

SEQ ID NO: 2021589 - RNA, 18 nt, Human
gaaaacaugcuacacacu

SEQ ID NO: 2021590 - RNA, 19 nt, Human
gaaaacacuguucucugcc

SEQ ID NO: 2021591 - RNA, 22 nt, Human
gaaaacaaaaccaaaaguuauu

SEQ ID NO: 2021592 - RNA, 18 nt, Human
gaaaaauuugaaaaugau

SEQ ID NO: 2021593 - RNA, 19 nt, Human
gaaaacaaaaccaaaaguu

SEQ ID NO: 2021594 - RNA, 18 nt, Human
gaaaaggugauaaaauca

SEQ ID NO: 2021595 - RNA, 19 nt, Human
gaaaaggugauaaaaucau

SEQ ID NO: 2021596 - RNA, 13 nt, Human
gaaaaccucuccu

SEQ ID NO: 2021597 - RNA, 15 nt, Human
gaaaaccuagaaaac

SEQ ID NO: 2021598 - RNA, 18 nt, Human
gaaaacgauuuaauuuau

SEQ ID NO: 2021599 - RNA, 17 nt, Human
gaaaacgauuuaauuua

SEQ ID NO: 2021600 - RNA, 14 nt, Human
gaaaacguggcugc

SEQ ID NO: 2021601 - RNA, 19 nt, Human
gaaaacaugcuacacacug

SEQ ID NO: 2021602 - RNA, 16 nt, Human
gaaaacauggaacagu

SEQ ID NO: 2021603 - RNA, 15 nt, Human
gaaaaccccuuccca

SEQ ID NO: 2021604 - RNA, 13 nt, Human
gaaaaccuagaaa

SEQ ID NO: 2021605 - RNA, 19 nt, Human
gaaaauaacaauaaaagac

SEQ ID NO: 2021606 - RNA, 22 nt, Human
gaaaagucaaggguaggguggg

SEQ ID NO: 2021607 - RNA, 14 nt, Human
gaaaaguaauauuu

SEQ ID NO: 2021608 - RNA, 16 nt, Human
gaaaaguaauauuuau

SEQ ID NO: 2021609 - RNA, 17 nt, Human
gaaaaguaauauuuauu

SEQ ID NO: 2021610 - RNA, 19 nt, Human
gaaaaguaauauuuauuaa

SEQ ID NO: 2021611 - RNA, 20 nt, Human
gaaaaguaauauuuauuaaa

SEQ ID NO: 2021612 - RNA, 23 nt, Human
cuuugugaggaagccgcuggggc

SEQ ID NO: 2021613 - RNA, 17 nt, Human
cuuugggccuggcuccc

SEQ ID NO: 2021614 - RNA, 16 nt, Human
cuuuggcacucugacu

SEQ ID NO: 2021615 - RNA, 23 nt, Human
cuuugggaggccaaggugggagg

SEQ ID NO: 2021616 - RNA, 15 nt, Human
cuuuguggugagaau

SEQ ID NO: 2021617 - RNA, 21 nt, Human
cuuuguucuggcucuuccagg

SEQ ID NO: 2021618 - RNA, 16 nt, Human
cuuuguucuggcucuu

SEQ ID NO: 2021619 - RNA, 19 nt, Human
cuuugugaggaagccgcug

SEQ ID NO: 2021620 - RNA, 12 nt, Human
cuuugugauuuu

SEQ ID NO: 2021621 - RNA, 13 nt, Human
cuuuguggcuucc

SEQ ID NO: 2021622 - RNA, 17 nt, Human
cuuugccaaaaagcaua

SEQ ID NO: 2021623 - RNA, 19 nt, Human
cuuugacaaagguaaauca

SEQ ID NO: 2021624 - RNA, 20 nt, Human
cuuugaauuuucauuuuaca

SEQ ID NO: 2021625 - RNA, 21 nt, Human
cuuugaauuuucauuuuacag

SEQ ID NO: 2021626 - RNA, 22 nt, Human
cuuugcauaacguauaaaagcc

SEQ ID NO: 2021627 - RNA, 19 nt, Human
cuuugacagcgcacagcug

SEQ ID NO: 2021628 - RNA, 20 nt, Human
cuuugacagcgcacagcugc

SEQ ID NO: 2021629 - RNA, 22 nt, Human
cuuugacagcgcacagcugcuc

SEQ ID NO: 2021630 - RNA, 14 nt, Human
cuuugcuugaaaga

SEQ ID NO: 2021631 - RNA, 23 nt, Human
cuuuggaaagacuuuuccaaccc

SEQ ID NO: 2021632 - RNA, 12 nt, Human
cuuuggaaagac

SEQ ID NO: 2021633 - RNA, 14 nt, Human
cuuucuucuuccca

SEQ ID NO: 2021634 - RNA, 12 nt, Human
cuuucuucuccc

SEQ ID NO: 2021635 - RNA, 13 nt, Human
cuuucuugcuccc

SEQ ID NO: 2021636 - RNA, 14 nt, Human
cuuucuugcucccu

SEQ ID NO: 2021637 - RNA, 15 nt, Human
cuuucuugcucccug

SEQ ID NO: 2021638 - RNA, 19 nt, Human
cuuucuugcucccugacug

SEQ ID NO: 2021639 - RNA, 15 nt, Human
cuuucuuuucuuucu

SEQ ID NO: 2021640 - RNA, 10 nt, Human
cuuucuuuuu

SEQ ID NO: 2021641 - RNA, 16 nt, Human
cuuugaaaauauauac

SEQ ID NO: 2021642 - RNA, 17 nt, Human
cuuugacaaagguaaau

SEQ ID NO: 2021643 - RNA, 19 nt, Human
cuuucuuuuuuuuuuuuga

SEQ ID NO: 2021644 - RNA, 14 nt, Human
cuuucugucucucu

SEQ ID NO: 2021645 - RNA, 13 nt, Human
cuuucuguguuua

SEQ ID NO: 2021646 - RNA, 19 nt, Human
cuuucuguguuuauucaaa

SEQ ID NO: 2021647 - RNA, 13 nt, Human
cuuucuguuaaaa

SEQ ID NO: 2021648 - RNA, 14 nt, Human
cuuucuguuaaaau

SEQ ID NO: 2021649 - RNA, 15 nt, Human
cuuucuguuaaaaug

SEQ ID NO: 2021650 - RNA, 16 nt, Human
cuuucuuccucugcug

SEQ ID NO: 2021651 - RNA, 16 nt, Human
cuuucuguuaaaaugc

SEQ ID NO: 2021652 - RNA, 19 nt, Human
cuuucuguuaaaaugcaug

SEQ ID NO: 2021653 - RNA, 17 nt, Human
cuuucugaucuucacua

SEQ ID NO: 2021654 - RNA, 21 nt, Human
cuuuaggcauaugcuucuuua

SEQ ID NO: 2021655 - RNA, 14 nt, Human
cuuuagcugacaga

SEQ ID NO: 2021656 - RNA, 14 nt, Human
cuuuagcuguguua

SEQ ID NO: 2021657 - RNA, 18 nt, Human
cuuuagcuuauuuuuaca

SEQ ID NO: 2021658 - RNA, 15 nt, Human
cuuuagcuuucugag

SEQ ID NO: 2021659 - RNA, 14 nt, Human
cuuuagagaagaug

SEQ ID NO: 2021660 - RNA, 20 nt, Human
cuuuagagaagauggauaug

SEQ ID NO: 2021661 - RNA, 17 nt, Human
cuuuagacuugaaaaga

SEQ ID NO: 2021662 - RNA, 21 nt, Human
cuuuagacuugaaaagagaca

SEQ ID NO: 2021663 - RNA, 19 nt, Human
cuuuccucaaaacuucaga

SEQ ID NO: 2021664 - RNA, 16 nt, Human
cuuuccucuuuggucu

SEQ ID NO: 2021665 - RNA, 13 nt, Human
cuuucugaaauaa

SEQ ID NO: 2021666 - RNA, 21 nt, Human
cuuucugagcaagaggauuuu

SEQ ID NO: 2021667 - RNA, 17 nt, Human
cuucuccaggcuguauc

SEQ ID NO: 2021668 - RNA, 16 nt, Human
cuucuccacccugcuc

SEQ ID NO: 2021669 - RNA, 14 nt, Human
cuucuccaggcugu

SEQ ID NO: 2021670 - RNA, 14 nt, Human
cuucuccacccugc

SEQ ID NO: 2021671 - RNA, 15 nt, Human
cuucuccacccugcu

SEQ ID NO: 2021672 - RNA, 22 nt, Human
cuucuccuucaccuuugucccc

SEQ ID NO: 2021673 - RNA, 20 nt, Human
cuucuccuuucacaaccuuc

SEQ ID NO: 2021674 - RNA, 22 nt, Human
cuucuccuuucacaaccuucug

SEQ ID NO: 2021675 - RNA, 14 nt, Human
cuucuccuuucaca

SEQ ID NO: 2021676 - RNA, 17 nt, Human
cuucuccuuucacaacc

SEQ ID NO: 2021677 - RNA, 11 nt, Human
cuucugcuuug

SEQ ID NO: 2021678 - RNA, 12 nt, Human
cuucugcuuugu

SEQ ID NO: 2021679 - RNA, 15 nt, Human
cuucugcuuuguugu

SEQ ID NO: 2021680 - RNA, 20 nt, Human
cuucugcuuuguugugugcc

SEQ ID NO: 2021681 - RNA, 22 nt, Human
cuucugcuuuguugugugccuc

SEQ ID NO: 2021682 - RNA, 18 nt, Human
cuucugcuucagccuccc

SEQ ID NO: 2021683 - RNA, 16 nt, Human
cuucugcuucagccuc

SEQ ID NO: 2021684 - RNA, 17 nt, Human
cuucugcuucagccucc

SEQ ID NO: 2021685 - RNA, 20 nt, Human
cuucugccauuucugagauc

SEQ ID NO: 2021686 - RNA, 21 nt, Human
cuucugccauauucuguuggc

SEQ ID NO: 2021687 - RNA, 15 nt, Human
cuucugccauauucu

SEQ ID NO: 2021688 - RNA, 17 nt, Human
cuucugccauauucugu

SEQ ID NO: 2021689 - RNA, 17 nt, Human
cuuccuugccagucuuu

SEQ ID NO: 2021690 - RNA, 18 nt, Human
cuuccuucuuugcccuuu

SEQ ID NO: 2021691 - RNA, 15 nt, Human
cuuccuucuuugccc

SEQ ID NO: 2021692 - RNA, 16 nt, Human
cuuccuucuuugcccu

SEQ ID NO: 2021693 - RNA, 14 nt, Human
cuuccuuccugcuu

SEQ ID NO: 2021694 - RNA, 14 nt, Human
cuuccuacucuucu

SEQ ID NO: 2021695 - RNA, 15 nt, Human
cuuccuacucuucuc

SEQ ID NO: 2021696 - RNA, 16 nt, Human
cuuccuacucuucucu

SEQ ID NO: 2021697 - RNA, 18 nt, Human
cuuccuacucuucucucu

SEQ ID NO: 2021698 - RNA, 19 nt, Human
cuuccuacucuucucucug

SEQ ID NO: 2021699 - RNA, 21 nt, Human
cuuccuacucuucucucugcu

SEQ ID NO: 2021700 - RNA, 22 nt, Human
cuuccuacucuucucucugcuc

SEQ ID NO: 2021701 - RNA, 23 nt, Human
cuuccuacucuucucucugcucu

SEQ ID NO: 2021702 - RNA, 14 nt, Human
cuuccuagccuugc

SEQ ID NO: 2021703 - RNA, 17 nt, Human
cuuccuagccuugcacu

SEQ ID NO: 2021704 - RNA, 20 nt, Human
cuuccuagcuggagaggagc

SEQ ID NO: 2021705 - RNA, 16 nt, Human
cuuccuaguucauccc

SEQ ID NO: 2021706 - RNA, 14 nt, Human
cuucgcuccugugu

SEQ ID NO: 2021707 - RNA, 15 nt, Human
cuucgcuccuguguc

SEQ ID NO: 2021708 - RNA, 13 nt, Human
cuucgcuccugug

SEQ ID NO: 2021709 - RNA, 14 nt, Human
cuucgggcugugcc

SEQ ID NO: 2021710 - RNA, 15 nt, Human
cuucgggcugugccc

SEQ ID NO: 2021711 - RNA, 21 nt, Human
cuucgggaggucgaggcagga

SEQ ID NO: 2021712 - RNA, 20 nt, Human
cuucgggaggucgaggcagg

SEQ ID NO: 2021713 - RNA, 18 nt, Human
cuucggccuccauccuga

SEQ ID NO: 2021714 - RNA, 19 nt, Human
cuucggccuccauccugag

SEQ ID NO: 2021715 - RNA, 17 nt, Human
cuucggccuccauccug

SEQ ID NO: 2021716 - RNA, 16 nt, Human
cuucgcuccugugucu

SEQ ID NO: 2021717 - RNA, 13 nt, Human
cuucggcauuuga

SEQ ID NO: 2021718 - RNA, 21 nt, Human
cuucuaaaacuguacuuugau

SEQ ID NO: 2021719 - RNA, 14 nt, Human
cuucuaaaacugua

SEQ ID NO: 2021720 - RNA, 18 nt, Human
cuucuaaaacuguacuuu

SEQ ID NO: 2021721 - RNA, 19 nt, Human
cuucuaaaacuguacuuug

SEQ ID NO: 2021722 - RNA, 20 nt, Human
cuucuaaaacuguacuuuga

SEQ ID NO: 2021723 - RNA, 18 nt, Human
cuuauuuuggagagauag

SEQ ID NO: 2021724 - RNA, 19 nt, Human
cuucaaaacaaacagaugc

SEQ ID NO: 2021725 - RNA, 11 nt, Human
cuucagcugac

SEQ ID NO: 2021726 - RNA, 14 nt, Human
cuucaggcucuucu

SEQ ID NO: 2021727 - RNA, 15 nt, Human
cuucaggcucuucuc

SEQ ID NO: 2021728 - RNA, 16 nt, Human
cuucaggcucuucucc

SEQ ID NO: 2021729 - RNA, 17 nt, Human
cuucaggcucuucuccu

SEQ ID NO: 2021730 - RNA, 18 nt, Human
cuucaggcucuucuccuu

SEQ ID NO: 2021731 - RNA, 15 nt, Human
cuuccaagagccuga

SEQ ID NO: 2021732 - RNA, 22 nt, Human
cuuccacaagagcccaggccuc

SEQ ID NO: 2021733 - RNA, 23 nt, Human
cuuccacaagagcccaggccucc

SEQ ID NO: 2021734 - RNA, 14 nt, Human
cuuccaagagccug

SEQ ID NO: 2021735 - RNA, 19 nt, Human
cuuccaaccauuuaucuug

SEQ ID NO: 2021736 - RNA, 21 nt, Human
cuuccaaccauuuaucuugaa

SEQ ID NO: 2021737 - RNA, 13 nt, Human
cuucauuuggaga

SEQ ID NO: 2021738 - RNA, 14 nt, Human
cuucauuuggagau

SEQ ID NO: 2021739 - RNA, 21 nt, Human
cuuccaaagcagagagcauua

SEQ ID NO: 2021740 - RNA, 12 nt, Human
cuucagugccuu

SEQ ID NO: 2021741 - RNA, 11 nt, Human
cuucagugccu

SEQ ID NO: 2021742 - RNA, 14 nt, Human
cuucagugccuuau

SEQ ID NO: 2021743 - RNA, 13 nt, Human
cuucagugccuua

SEQ ID NO: 2021744 - RNA, 18 nt, Human
cuucauuuccugugucuu

SEQ ID NO: 2021745 - RNA, 13 nt, Human
cuucccucccugc

SEQ ID NO: 2021746 - RNA, 14 nt, Human
cuucccucccugcu

SEQ ID NO: 2021747 - RNA, 16 nt, Human
cuucccucccugcugu

SEQ ID NO: 2021748 - RNA, 18 nt, Human
cuucccucccugcuguca

SEQ ID NO: 2021749 - RNA, 16 nt, Human
cuucccgcucagcccu

SEQ ID NO: 2021750 - RNA, 17 nt, Human
cuucccgcucagcccuc

SEQ ID NO: 2021751 - RNA, 15 nt, Human
cuucccgcucagccc

SEQ ID NO: 2021752 - RNA, 20 nt, Human
cuucccgccgcccagcccac

SEQ ID NO: 2021753 - RNA, 23 nt, Human
cuucccgccgcccagcccacccc

SEQ ID NO: 2021754 - RNA, 12 nt, Human
cuucccagggca

SEQ ID NO: 2021755 - RNA, 22 nt, Human
cuuccuaccacccgguccccac

SEQ ID NO: 2021756 - RNA, 23 nt, Human
cuuccuaccacccgguccccacu

SEQ ID NO: 2021757 - RNA, 15 nt, Human
cuuccagugaggcuc

SEQ ID NO: 2021758 - RNA, 13 nt, Human
cuucccacucugu

SEQ ID NO: 2021759 - RNA, 14 nt, Human
cuucccacucuucu

SEQ ID NO: 2021760 - RNA, 15 nt, Human
cuucccacucuucuc

SEQ ID NO: 2021761 - RNA, 16 nt, Human
cuucccacucuucuca

SEQ ID NO: 2021762 - RNA, 14 nt, Human
cuuccagugaggcu

SEQ ID NO: 2021763 - RNA, 24 nt, Human
cuuccaggggugggacacccugug

SEQ ID NO: 2021764 - RNA, 22 nt, Human
cuuccaggggugggacacccug

SEQ ID NO: 2021765 - RNA, 13 nt, Human
cuuccagcaggag

SEQ ID NO: 2021766 - RNA, 23 nt, Human
cuuccagcaggagggacagucuc

SEQ ID NO: 2021767 - RNA, 11 nt, Human
cuuccagcagg

SEQ ID NO: 2021768 - RNA, 12 nt, Human
cuuccagcagga

SEQ ID NO: 2021769 - RNA, 22 nt, Human
cuuaacugugguguugaggcuu

SEQ ID NO: 2021770 - RNA, 17 nt, Human
cuuaacuguauagcucu

SEQ ID NO: 2021771 - RNA, 12 nt, Human
cuuaacuucaca

SEQ ID NO: 2021772 - RNA, 14 nt, Human
cuuaacuucacaua

SEQ ID NO: 2021773 - RNA, 15 nt, Human
cuuaacuucacauau

SEQ ID NO: 2021774 - RNA, 16 nt, Human
cuuaacuucacauauu

SEQ ID NO: 2021775 - RNA, 17 nt, Human
cuuaacuucacauauug

SEQ ID NO: 2021776 - RNA, 22 nt, Human
cuuaacuucacauauugauuuc

SEQ ID NO: 2021777 - RNA, 22 nt, Human
cuuaaaugcaaccauuugaaac

SEQ ID NO: 2021778 - RNA, 12 nt, Human
cuuaaaugugaa

SEQ ID NO: 2021779 - RNA, 13 nt, Human
cuuaaaugugaau

SEQ ID NO: 2021780 - RNA, 14 nt, Human
cuuaaaugugaauu

SEQ ID NO: 2021781 - RNA, 16 nt, Human
cuuaaaugugaauuac

SEQ ID NO: 2021782 - RNA, 19 nt, Human
cuuaaaaaaaacucuuuaa

SEQ ID NO: 2021783 - RNA, 19 nt, Human
cuuaaauuaguacagcacu

SEQ ID NO: 2021784 - RNA, 17 nt, Human
cuuaaauguuauguaua

SEQ ID NO: 2021785 - RNA, 18 nt, Human
cuuaaauguuauguauau

SEQ ID NO: 2021786 - RNA, 17 nt, Human
cuuaaaugugaauuacu

SEQ ID NO: 2021787 - RNA, 19 nt, Human
cuuaaaugugaauuacuaa

SEQ ID NO: 2021788 - RNA, 22 nt, Human
cuuaaaugugaauuacuaacuu

SEQ ID NO: 2021789 - RNA, 16 nt, Human
cuuaaauguuauguau

SEQ ID NO: 2021790 - RNA, 15 nt, Human
cuuaacccagugucc

SEQ ID NO: 2021791 - RNA, 18 nt, Human
cuuaaucauuuuuuauau

SEQ ID NO: 2021792 - RNA, 22 nt, Human
cuuaaucauuuuuuauauauau

SEQ ID NO: 2021793 - RNA, 23 nt, Human
cuuaaucauuuuuuauauauaug

SEQ ID NO: 2021794 - RNA, 20 nt, Human
cuuaaugagcaauaucugcu

SEQ ID NO: 2021795 - RNA, 18 nt, Human
cuuaaugccacuaaauug

SEQ ID NO: 2021796 - RNA, 14 nt, Human
cuuaaucuaaaugg

SEQ ID NO: 2021797 - RNA, 16 nt, Human
cuuaaucuaaauggaa

SEQ ID NO: 2021798 - RNA, 14 nt, Human
cuuaauauuuuuac

SEQ ID NO: 2021799 - RNA, 15 nt, Human
cuuaauauuuuuaca

SEQ ID NO: 2021800 - RNA, 16 nt, Human
cuuaauauuuuuacau

SEQ ID NO: 2021801 - RNA, 12 nt, Human
cuuaaucauuuu

SEQ ID NO: 2021802 - RNA, 16 nt, Human
cuuaaguuuauacucu

SEQ ID NO: 2021803 - RNA, 19 nt, Human
cuuaaguuaguuccacuga

SEQ ID NO: 2021804 - RNA, 21 nt, Human
cuuaaguuaguuccacugaga

SEQ ID NO: 2021805 - RNA, 15 nt, Human
cuuaagaaauaaauc

SEQ ID NO: 2021806 - RNA, 16 nt, Human
cuuaagaacugcuuuc

SEQ ID NO: 2021807 - RNA, 11 nt, Human
cuuaagaaaaa

SEQ ID NO: 2021808 - RNA, 12 nt, Human
cuuaagaaauaa

SEQ ID NO: 2021809 - RNA, 20 nt, Human
cuuaagugaggaaaucaaag

SEQ ID NO: 2021810 - RNA, 21 nt, Human
cuuaagugaggaaaucaaagu

SEQ ID NO: 2021811 - RNA, 19 nt, Human
cuuaagugaggaaaucaaa

SEQ ID NO: 2021812 - RNA, 18 nt, Human
cuuaagugaggaaaucaa

SEQ ID NO: 2021813 - RNA, 23 nt, Human
cuguuuguuucugaaagggacgc

SEQ ID NO: 2021814 - RNA, 21 nt, Human
cuguuuguuucugaaagggac

SEQ ID NO: 2021815 - RNA, 21 nt, Human
cuguuuuauuuuaauucaguu

SEQ ID NO: 2021816 - RNA, 14 nt, Human
cuguuuucucuuga

SEQ ID NO: 2021817 - RNA, 13 nt, Human
cuguuuucucuug

SEQ ID NO: 2021818 - RNA, 14 nt, Human
cuguuuugccagcc

SEQ ID NO: 2021819 - RNA, 17 nt, Human
cuguuuugaguuccuau

SEQ ID NO: 2021820 - RNA, 17 nt, Human
cuguuuucucuugagag

SEQ ID NO: 2021821 - RNA, 18 nt, Human
cuguuuguuucugaaagg

SEQ ID NO: 2021822 - RNA, 17 nt, Human
cuguuucucagucucac

SEQ ID NO: 2021823 - RNA, 18 nt, Human
cuguuucucagucucaca

SEQ ID NO: 2021824 - RNA, 13 nt, Human
cuguuuacagugu

SEQ ID NO: 2021825 - RNA, 15 nt, Human
cuguuuacaguguuc

SEQ ID NO: 2021826 - RNA, 17 nt, Human
cugguugaugccuguga

SEQ ID NO: 2021827 - RNA, 12 nt, Human
cuguuuagauaa

SEQ ID NO: 2021828 - RNA, 18 nt, Human
cuguuuaucccuuaagaa

SEQ ID NO: 2021829 - RNA, 19 nt, Human
cuguuuaucccuuaagaau

SEQ ID NO: 2021830 - RNA, 18 nt, Human
cuuagacagucccugcca

SEQ ID NO: 2021831 - RNA, 17 nt, Human
cuuagacagucccugcc

SEQ ID NO: 2021832 - RNA, 19 nt, Human
cuuagacagucccugccaa

SEQ ID NO: 2021833 - RNA, 11 nt, Human
cuuagacaguc

SEQ ID NO: 2021834 - RNA, 21 nt, Human
cuuagaucauaguuuuauuua

SEQ ID NO: 2021835 - RNA, 22 nt, Human
cuuagaucauaguuuuauuuau

SEQ ID NO: 2021836 - RNA, 13 nt, Human
cuuagaucauagu

SEQ ID NO: 2021837 - RNA, 16 nt, Human
cuuagaucauaguuuu

SEQ ID NO: 2021838 - RNA, 17 nt, Human
cuuagaucauaguuuua

SEQ ID NO: 2021839 - RNA, 18 nt, Human
cuuagaucauaguuuuau

SEQ ID NO: 2021840 - RNA, 19 nt, Human
cuuagaucauaguuuuauu

SEQ ID NO: 2021841 - RNA, 14 nt, Human
cuuagaagguauua

SEQ ID NO: 2021842 - RNA, 21 nt, Human
cuuagaagguauuaagauuau

SEQ ID NO: 2021843 - RNA, 15 nt, Human
cuuagaaccuuucuu

SEQ ID NO: 2021844 - RNA, 17 nt, Human
cuuagaaauugcauuuc

SEQ ID NO: 2021845 - RNA, 21 nt, Human
cuuacuuuguaaauucugauu

SEQ ID NO: 2021846 - RNA, 15 nt, Human
cuuacuuuguaaauu

SEQ ID NO: 2021847 - RNA, 17 nt, Human
cuuacuuuguaaauucu

SEQ ID NO: 2021848 - RNA, 19 nt, Human
cuuacuuuguaaauucuga

SEQ ID NO: 2021849 - RNA, 20 nt, Human
cuuacuuuguaaauucugau

SEQ ID NO: 2021850 - RNA, 16 nt, Human
cuuagacagucccugc

SEQ ID NO: 2021851 - RNA, 15 nt, Human
cuuagacagucccug

SEQ ID NO: 2021852 - RNA, 14 nt, Human
cuuagacagucccu

SEQ ID NO: 2021853 - RNA, 15 nt, Human
cuuagaagucacaca

SEQ ID NO: 2021854 - RNA, 18 nt, Human
cuuacuuuccugaaaaua

SEQ ID NO: 2021855 - RNA, 11 nt, Human
cuuacuuugua

SEQ ID NO: 2021856 - RNA, 12 nt, Human
cuuacuuuguaa

SEQ ID NO: 2021857 - RNA, 14 nt, Human
cuuacuuuguaaau

SEQ ID NO: 2021858 - RNA, 16 nt, Human
cuuacuguacaugaaa

SEQ ID NO: 2021859 - RNA, 14 nt, Human
cuuaauggaugaaa

SEQ ID NO: 2021860 - RNA, 19 nt, Human
cuuaauggaugaaaucaua

SEQ ID NO: 2021861 - RNA, 19 nt, Human
cuuacuaguuucccuugca

SEQ ID NO: 2021862 - RNA, 15 nt, Human
cuuacgugaguccug

SEQ ID NO: 2021863 - RNA, 15 nt, Human
cuuauuuaaugaaag

SEQ ID NO: 2021864 - RNA, 23 nt, Human
cuuaugauagcaaauggccucau

SEQ ID NO: 2021865 - RNA, 14 nt, Human
cuuaugacuaugua

SEQ ID NO: 2021866 - RNA, 14 nt, Human
cuuaucuccaagac

SEQ ID NO: 2021867 - RNA, 13 nt, Human
cuuaucuccaaga

SEQ ID NO: 2021868 - RNA, 16 nt, Human
cuuaucuccaagacca

SEQ ID NO: 2021869 - RNA, 19 nt, Human
cuuaucaaaguagcaaaug

SEQ ID NO: 2021870 - RNA, 14 nt, Human
cuuauauuugugua

SEQ ID NO: 2021871 - RNA, 16 nt, Human
cuuaucaaaggacacc

SEQ ID NO: 2021872 - RNA, 14 nt, Human
cuuaucaaaggaca

SEQ ID NO: 2021873 - RNA, 20 nt, Human
cuuauauuuacaacacuuua

SEQ ID NO: 2021874 - RNA, 18 nt, Human
cuuauauuguaagaaaua

SEQ ID NO: 2021875 - RNA, 14 nt, Human
cuuauauuguaaga

SEQ ID NO: 2021876 - RNA, 17 nt, Human
cuuauauuguaagaaau

SEQ ID NO: 2021877 - RNA, 20 nt, Human
cuuauaaaacagaguaaucu

SEQ ID NO: 2021878 - RNA, 21 nt, Human
cuuauaaaacagaguaaucuu

SEQ ID NO: 2021879 - RNA, 17 nt, Human
cuuagguuggcaaaaag

SEQ ID NO: 2021880 - RNA, 20 nt, Human
cuuaggugauccacucgccu

SEQ ID NO: 2021881 - RNA, 17 nt, Human
cuuaggguuuucucucu

SEQ ID NO: 2021882 - RNA, 13 nt, Human
cuuauaauuuaaa

SEQ ID NO: 2021883 - RNA, 19 nt, Human
cuuauaggaauugacccac

SEQ ID NO: 2021884 - RNA, 15 nt, Human
cuuauacauuugaua

SEQ ID NO: 2021885 - RNA, 14 nt, Human
cuuauaauuuaaaa

SEQ ID NO: 2021886 - RNA, 12 nt, Human
cucuugggacau

SEQ ID NO: 2021887 - RNA, 15 nt, Human
cucuugggcaauauu

SEQ ID NO: 2021888 - RNA, 16 nt, Human
cucuugggcaauauuc

SEQ ID NO: 2021889 - RNA, 20 nt, Human
cucuugggcaauauucucug

SEQ ID NO: 2021890 - RNA, 22 nt, Human
cucuugggcaauauucucugua

SEQ ID NO: 2021891 - RNA, 14 nt, Human
cucuuggcuccacu

SEQ ID NO: 2021892 - RNA, 22 nt, Human
cucuuggagccugcagagcugc

SEQ ID NO: 2021893 - RNA, 19 nt, Human
cucuugguccugcugcagu

SEQ ID NO: 2021894 - RNA, 18 nt, Human
cucuugguccugcugcag

SEQ ID NO: 2021895 - RNA, 19 nt, Human
cucuugaacugagcuugga

SEQ ID NO: 2021896 - RNA, 13 nt, Human
cucuugacccugc

SEQ ID NO: 2021897 - RNA, 14 nt, Human
cucuugacccugca

SEQ ID NO: 2021898 - RNA, 15 nt, Human
cucuugacccugcac

SEQ ID NO: 2021899 - RNA, 16 nt, Human
cucuugacccugcacc

SEQ ID NO: 2021900 - RNA, 17 nt, Human
cucuugacccugcaccc

SEQ ID NO: 2021901 - RNA, 18 nt, Human
cucuugacccugcacccu

SEQ ID NO: 2021902 - RNA, 19 nt, Human
cucuugacccugcacccuc

SEQ ID NO: 2021903 - RNA, 21 nt, Human
cucuugacccugcacccuccu

SEQ ID NO: 2021904 - RNA, 16 nt, Human
cucuugaacugagcuu

SEQ ID NO: 2021905 - RNA, 17 nt, Human
cucuugaacugagcuug

SEQ ID NO: 2021906 - RNA, 18 nt, Human
cucuugaacuccugaccu

SEQ ID NO: 2021907 - RNA, 18 nt, Human
cucuucuggguuccuucc

SEQ ID NO: 2021908 - RNA, 16 nt, Human
cucuugaccucaggug

SEQ ID NO: 2021909 - RNA, 16 nt, Human
cucuugacucuugccu

SEQ ID NO: 2021910 - RNA, 13 nt, Human
cucuugaccucag

SEQ ID NO: 2021911 - RNA, 15 nt, Human
cucuugaccucaggu

SEQ ID NO: 2021912 - RNA, 17 nt, Human
cucuugucuuccuauuu

SEQ ID NO: 2021913 - RNA, 17 nt, Human
cucuuuccaucuacccu

SEQ ID NO: 2021914 - RNA, 11 nt, Human
cucuuucagug

SEQ ID NO: 2021915 - RNA, 15 nt, Human
cucuuucccacccag

SEQ ID NO: 2021916 - RNA, 21 nt, Human
cucuugucuuccuauuucaga

SEQ ID NO: 2021917 - RNA, 23 nt, Human
cucuugucuuccuauuucagaag

SEQ ID NO: 2021918 - RNA, 18 nt, Human
cucuuuggacacucacac

SEQ ID NO: 2021919 - RNA, 15 nt, Human
cucuuuggacacuca

SEQ ID NO: 2021920 - RNA, 17 nt, Human
cucuuucuauuguuucu

SEQ ID NO: 2021921 - RNA, 17 nt, Human
cucuuucccacccagcc

SEQ ID NO: 2021922 - RNA, 18 nt, Human
cucuuucccacccagccu

SEQ ID NO: 2021923 - RNA, 19 nt, Human
cucuuucccacccagccug

SEQ ID NO: 2021924 - RNA, 20 nt, Human
cucuuucccacccagccugg

SEQ ID NO: 2021925 - RNA, 10 nt, Human
cucuuucccu

SEQ ID NO: 2021926 - RNA, 19 nt, Human
cucuucaguuaagccuuug

SEQ ID NO: 2021927 - RNA, 20 nt, Human
cucuucaguuaagccuuugg

SEQ ID NO: 2021928 - RNA, 23 nt, Human
cucuucaguuaagccuuuggaaa

SEQ ID NO: 2021929 - RNA, 20 nt, Human
cucuuaaaagaggaaaauga

SEQ ID NO: 2021930 - RNA, 24 nt, Human
cucuuaaaacccaagugccuuagc

SEQ ID NO: 2021931 - RNA, 13 nt, Human
cucuuaaaaccca

SEQ ID NO: 2021932 - RNA, 19 nt, Human
cucuggcagcucagagagg

SEQ ID NO: 2021933 - RNA, 20 nt, Human
cucuggcagcucagagaggg

SEQ ID NO: 2021934 - RNA, 20 nt, Human
cucuguucugcacacagcac

SEQ ID NO: 2021935 - RNA, 21 nt, Human
cucuguucugcacacagcacg

SEQ ID NO: 2021936 - RNA, 19 nt, Human
cucuguucugcacacagca

SEQ ID NO: 2021937 - RNA, 18 nt, Human
cucuggcagcucagagag

SEQ ID NO: 2021938 - RNA, 17 nt, Human
cucuggcagcucagaga

SEQ ID NO: 2021939 - RNA, 15 nt, Human
cucuggagcccacug

SEQ ID NO: 2021940 - RNA, 14 nt, Human
cucuucuggaaugg

SEQ ID NO: 2021941 - RNA, 19 nt, Human
cucuucucucugcucugac

SEQ ID NO: 2021942 - RNA, 13 nt, Human
cucuucuccuuuc

SEQ ID NO: 2021943 - RNA, 15 nt, Human
cucuucuccuuucac

SEQ ID NO: 2021944 - RNA, 16 nt, Human
cucuucuccuuucaca

SEQ ID NO: 2021945 - RNA, 17 nt, Human
cucuucuccccuuccau

SEQ ID NO: 2021946 - RNA, 20 nt, Human
cucuucuccccuuccauuuc

SEQ ID NO: 2021947 - RNA, 21 nt, Human
cucuucuccccuuccauuucu

SEQ ID NO: 2021948 - RNA, 14 nt, Human
cucuucucucugcu

SEQ ID NO: 2021949 - RNA, 15 nt, Human
cucuucucucugcuc

SEQ ID NO: 2021950 - RNA, 17 nt, Human
cucuucucucugcucug

SEQ ID NO: 2021951 - RNA, 21 nt, Human
cucuuccaggcugggagagcc

SEQ ID NO: 2021952 - RNA, 22 nt, Human
cucuuccaggcugggagagccu

SEQ ID NO: 2021953 - RNA, 23 nt, Human
cucuuccaggcugggagagccuu

SEQ ID NO: 2021954 - RNA, 17 nt, Human
cucuucauauucagcuu

SEQ ID NO: 2021955 - RNA, 12 nt, Human
cucuucuccagg

SEQ ID NO: 2021956 - RNA, 19 nt, Human
cucuucuccacuggaugga

SEQ ID NO: 2021957 - RNA, 14 nt, Human
cucuucuccccuuc

SEQ ID NO: 2021958 - RNA, 16 nt, Human
cucuucuccccuucca

SEQ ID NO: 2021959 - RNA, 15 nt, Human
cucuucuccacugga

SEQ ID NO: 2021960 - RNA, 17 nt, Human
cucuucuccacuggaug

SEQ ID NO: 2021961 - RNA, 14 nt, Human
cucuucuccacugg

SEQ ID NO: 2021962 - RNA, 21 nt, Human
cucuuuggucuacacugugcu

SEQ ID NO: 2021963 - RNA, 19 nt, Human
cucuuuggucuacacugug

SEQ ID NO: 2021964 - RNA, 12 nt, Human
cucuuuggaaaa

SEQ ID NO: 2021965 - RNA, 13 nt, Human
cucuuuggaaaag

SEQ ID NO: 2021966 - RNA, 18 nt, Human
cucuuugggccuggcucc

SEQ ID NO: 2021967 - RNA, 21 nt, Human
cugaaccuggguaacuaggga

SEQ ID NO: 2021968 - RNA, 19 nt, Human
cugaaccugggaaagagau

SEQ ID NO: 2021969 - RNA, 20 nt, Human
cugaaccugggaaagagauu

SEQ ID NO: 2021970 - RNA, 21 nt, Human
cugaacuuggcgcugccccug

SEQ ID NO: 2021971 - RNA, 16 nt, Human
cugaacuuggcgcugc

SEQ ID NO: 2021972 - RNA, 15 nt, Human
cugaacuuggcgcug

SEQ ID NO: 2021973 - RNA, 13 nt, Human
cugaaccugucuu

SEQ ID NO: 2021974 - RNA, 14 nt, Human
cugaaccugucuuu

SEQ ID NO: 2021975 - RNA, 16 nt, Human
cugaaccugucuuuug

SEQ ID NO: 2021976 - RNA, 21 nt, Human
cugaagagaagggcagggcug

SEQ ID NO: 2021977 - RNA, 21 nt, Human
cugaagacucauucuucugua

SEQ ID NO: 2021978 - RNA, 16 nt, Human
cugaauacagaggcaa

SEQ ID NO: 2021979 - RNA, 16 nt, Human
cugaauaagcacuuuu

SEQ ID NO: 2021980 - RNA, 18 nt, Human
cugaauaagcacuuuuua

SEQ ID NO: 2021981 - RNA, 19 nt, Human
cugaauaagcacuuuuuaa

SEQ ID NO: 2021982 - RNA, 16 nt, Human
cugaauaccaguggag

SEQ ID NO: 2021983 - RNA, 24 nt, Human
cugaagucuuuguacagacaacaa

SEQ ID NO: 2021984 - RNA, 17 nt, Human
cugaagucacugcacag

SEQ ID NO: 2021985 - RNA, 16 nt, Human
cugaagucacugcaca

SEQ ID NO: 2021986 - RNA, 22 nt, Human
cugaagucacugcacagugcau

SEQ ID NO: 2021987 - RNA, 14 nt, Human
cugaagucacacag

SEQ ID NO: 2021988 - RNA, 15 nt, Human
cugaagucacacagu

SEQ ID NO: 2021989 - RNA, 16 nt, Human
cugaagucacacagug

SEQ ID NO: 2021990 - RNA, 22 nt, Human
cugaaugaaccuucuggccucc

SEQ ID NO: 2021991 - RNA, 20 nt, Human
cugaauucaccacagacuuu

SEQ ID NO: 2021992 - RNA, 13 nt, Human
cugaaucccugua

SEQ ID NO: 2021993 - RNA, 12 nt, Human
cugaaucuguac

SEQ ID NO: 2021994 - RNA, 14 nt, Human
cugaaucuguacag

SEQ ID NO: 2021995 - RNA, 15 nt, Human
cugaaucuguacaga

SEQ ID NO: 2021996 - RNA, 15 nt, Human
cugaaucuucugaaa

SEQ ID NO: 2021997 - RNA, 21 nt, Human
cugaauauugccauuaugcuu

SEQ ID NO: 2021998 - RNA, 17 nt, Human
cugaauccaaaagaaaa

SEQ ID NO: 2021999 - RNA, 19 nt, Human
cugaauccaaaagaaaaac

SEQ ID NO: 2022000 - RNA, 14 nt, Human
cugaauuuaaauag

SEQ ID NO: 2022001 - RNA, 18 nt, Human
cugaauuuaaauagcuuu

SEQ ID NO: 2022002 - RNA, 20 nt, Human
cugaauugagccuaaaaaua

SEQ ID NO: 2022003 - RNA, 21 nt, Human
cugaauugagccuaaaaauaa

SEQ ID NO: 2022004 - RNA, 22 nt, Human
cugaauugagccuaaaaauaaa

SEQ ID NO: 2022005 - RNA, 23 nt, Human
cugaauugagccuaaaaauaaag

SEQ ID NO: 2022006 - RNA, 21 nt, Human
cugaauuggaaugcacucaga

SEQ ID NO: 2022007 - RNA, 23 nt, Human
cugaauuuaaauagcuuuuuucu

SEQ ID NO: 2022008 - RNA, 14 nt, Human
cugaauuuaucuuu

SEQ ID NO: 2022009 - RNA, 16 nt, Human
cugaauuuaucuuuga

SEQ ID NO: 2022010 - RNA, 17 nt, Human
cugaauuuaucuuugau

SEQ ID NO: 2022011 - RNA, 19 nt, Human
cugacagacacaggcccgg

SEQ ID NO: 2022012 - RNA, 18 nt, Human
cugaauuuaucuuugaua

SEQ ID NO: 2022013 - RNA, 20 nt, Human
cugaauuuaucuuugauaac

SEQ ID NO: 2022014 - RNA, 16 nt, Human
cugacagagggaugga

SEQ ID NO: 2022015 - RNA, 11 nt, Human
cugacaggcaa

SEQ ID NO: 2022016 - RNA, 21 nt, Human
cugacagacacaggcccggcu

SEQ ID NO: 2022017 - RNA, 17 nt, Human
cugacagacagcccucc

SEQ ID NO: 2022018 - RNA, 19 nt, Human
cugacagacagcccuccau

SEQ ID NO: 2022019 - RNA, 17 nt, Human
cugacauuguuggccaa

SEQ ID NO: 2022020 - RNA, 20 nt, Human
cugacaggcaaugcuggcug

SEQ ID NO: 2022021 - RNA, 16 nt, Human
cugacaggcaaugcug

SEQ ID NO: 2022022 - RNA, 17 nt, Human
cugacaggcaaugcugg

SEQ ID NO: 2022023 - RNA, 18 nt, Human
cugacaggcaaugcuggc

SEQ ID NO: 2022024 - RNA, 19 nt, Human
cugacaggcaaugcuggcu

SEQ ID NO: 2022025 - RNA, 11 nt, Human
cugacccacug

SEQ ID NO: 2022026 - RNA, 18 nt, Human
cucucccaucacuucccu

SEQ ID NO: 2022027 - RNA, 14 nt, Human
cucucccaucacuu

SEQ ID NO: 2022028 - RNA, 20 nt, Human
cucucccaucacuucccuac

SEQ ID NO: 2022029 - RNA, 11 nt, Human
cucucccaggg

SEQ ID NO: 2022030 - RNA, 13 nt, Human
cucucccaucacu

SEQ ID NO: 2022031 - RNA, 12 nt, Human
cucuccagcagg

SEQ ID NO: 2022032 - RNA, 16 nt, Human
cucuccagcaggccca

SEQ ID NO: 2022033 - RNA, 13 nt, Human
cucuccagccccu

SEQ ID NO: 2022034 - RNA, 12 nt, Human
cucuccagcccc

SEQ ID NO: 2022035 - RNA, 22 nt, Human
cucuccauuuuggugucuuucu

SEQ ID NO: 2022036 - RNA, 16 nt, Human
cucuccacugccuucg

SEQ ID NO: 2022037 - RNA, 23 nt, Human
cucucaggccagcugcuugggcu

SEQ ID NO: 2022038 - RNA, 22 nt, Human
cucucaggccagcugcuugggc

SEQ ID NO: 2022039 - RNA, 12 nt, Human
cucuaauaauaa

SEQ ID NO: 2022040 - RNA, 13 nt, Human
cucuaauaauaaa

SEQ ID NO: 2022041 - RNA, 14 nt, Human
cucuaauaauaaau

SEQ ID NO: 2022042 - RNA, 15 nt, Human
cucuaauaauaaaua

SEQ ID NO: 2022043 - RNA, 16 nt, Human
cucuaauaauaaauag

SEQ ID NO: 2022044 - RNA, 18 nt, Human
cucuaauaauaaauaguu

SEQ ID NO: 2022045 - RNA, 18 nt, Human
cucuaaguguuugcugca

SEQ ID NO: 2022046 - RNA, 12 nt, Human
cucucucaggcc

SEQ ID NO: 2022047 - RNA, 19 nt, Human
cucucugaaggaggccacc

SEQ ID NO: 2022048 - RNA, 20 nt, Human
cucucugaaggaggccaccu

SEQ ID NO: 2022049 - RNA, 21 nt, Human
cucucugaaggaggccaccuc

SEQ ID NO: 2022050 - RNA, 17 nt, Human
cucucugaguauuuccu

SEQ ID NO: 2022051 - RNA, 16 nt, Human
cucucucacuccuuga

SEQ ID NO: 2022052 - RNA, 15 nt, Human
cucucucacuccuug

SEQ ID NO: 2022053 - RNA, 14 nt, Human
cucucucacuccuu

SEQ ID NO: 2022054 - RNA, 22 nt, Human
cucucugcaggucccuaauaaa

SEQ ID NO: 2022055 - RNA, 19 nt, Human
cucucugcaggucccuaau

SEQ ID NO: 2022056 - RNA, 17 nt, Human
cucucugcaggucccua

SEQ ID NO: 2022057 - RNA, 16 nt, Human
cucucugcaggucccu

SEQ ID NO: 2022058 - RNA, 14 nt, Human
cucucugcaggucc

SEQ ID NO: 2022059 - RNA, 13 nt, Human
cucucugcagguc

SEQ ID NO: 2022060 - RNA, 12 nt, Human
cucucugcaggu

SEQ ID NO: 2022061 - RNA, 22 nt, Human
cucuccuguaccucuugagccu

SEQ ID NO: 2022062 - RNA, 17 nt, Human
cucuccuguaccucuug

SEQ ID NO: 2022063 - RNA, 18 nt, Human
cucuccuguaccucuuga

SEQ ID NO: 2022064 - RNA, 13 nt, Human
cucuccuguaccu

SEQ ID NO: 2022065 - RNA, 14 nt, Human
cucuccuguaccuc

SEQ ID NO: 2022066 - RNA, 15 nt, Human
cucuccuguaccucu

SEQ ID NO: 2022067 - RNA, 13 nt, Human
cucuccccagcaa

SEQ ID NO: 2022068 - RNA, 20 nt, Human
cucugagacucgcgacaaug

SEQ ID NO: 2022069 - RNA, 14 nt, Human
cucucugcucugac

SEQ ID NO: 2022070 - RNA, 12 nt, Human
cucucugcccua

SEQ ID NO: 2022071 - RNA, 13 nt, Human
cucucugcccuaa

SEQ ID NO: 2022072 - RNA, 21 nt, Human
cucucugcccuaaugcgcagg

SEQ ID NO: 2022073 - RNA, 16 nt, Human
cucugagcaaaugugg

SEQ ID NO: 2022074 - RNA, 15 nt, Human
cucugagccuuggga

SEQ ID NO: 2022075 - RNA, 22 nt, Human
cucugcaagaauugaagcagga

SEQ ID NO: 2022076 - RNA, 16 nt, Human
cucugauguauuuugu

SEQ ID NO: 2022077 - RNA, 13 nt, Human
cucugauguauuu

SEQ ID NO: 2022078 - RNA, 17 nt, Human
cucugaugaagaggagu

SEQ ID NO: 2022079 - RNA, 17 nt, Human
cucugauacuuuuuuga

SEQ ID NO: 2022080 - RNA, 18 nt, Human
cucugauacuuuuuugaa

SEQ ID NO: 2022081 - RNA, 20 nt, Human
cucugauacuuuuuugaaau

SEQ ID NO: 2022082 - RNA, 22 nt, Human
cucugauacuuuuuugaaauca

SEQ ID NO: 2022083 - RNA, 10 nt, Human
cucugcacaa

SEQ ID NO: 2022084 - RNA, 16 nt, Human
cucugcaaaggaaaua

SEQ ID NO: 2022085 - RNA, 23 nt, Human
cucugcaggucccuaauaaagcu

SEQ ID NO: 2022086 - RNA, 19 nt, Human
cucugcaguacuugaugua

SEQ ID NO: 2022087 - RNA, 23 nt, Human
cucugcauacucauuaggauggc

SEQ ID NO: 2022088 - RNA, 13 nt, Human
cucuggacuuucu

SEQ ID NO: 2022089 - RNA, 21 nt, Human
cucuggacuuucucuaauaau

SEQ ID NO: 2022090 - RNA, 23 nt, Human
cucuggacuuucucuaauaauaa

SEQ ID NO: 2022091 - RNA, 12 nt, Human
cucuggagccca

SEQ ID NO: 2022092 - RNA, 14 nt, Human
cucuggacaggcau

SEQ ID NO: 2022093 - RNA, 14 nt, Human
cucuggaauuugaa

SEQ ID NO: 2022094 - RNA, 15 nt, Human
cucugcuuuggaaau

SEQ ID NO: 2022095 - RNA, 13 nt, Human
cucugccuuugcu

SEQ ID NO: 2022096 - RNA, 15 nt, Human
cucugccuuugcucu

SEQ ID NO: 2022097 - RNA, 18 nt, Human
cucugccuuugcucuggu

SEQ ID NO: 2022098 - RNA, 14 nt, Human
cucugccucugaca

SEQ ID NO: 2022099 - RNA, 15 nt, Human
cucugccuccucuuc

SEQ ID NO: 2022100 - RNA, 16 nt, Human
cucugccuccucuuca

SEQ ID NO: 2022101 - RNA, 16 nt, Human
cucugccucugacaca

SEQ ID NO: 2022102 - RNA, 23 nt, Human
cucugcccuccaagaccuucucc

SEQ ID NO: 2022103 - RNA, 16 nt, Human
cucugcccuccaagac

SEQ ID NO: 2022104 - RNA, 15 nt, Human
cucugcccuccaaga

SEQ ID NO: 2022105 - RNA, 14 nt, Human
cucugcccuccaag

SEQ ID NO: 2022106 - RNA, 12 nt, Human
cucugcccuugg

SEQ ID NO: 2022107 - RNA, 12 nt, Human
cucugcccugcg

SEQ ID NO: 2022108 - RNA, 14 nt, Human
cucugccuccucuu

SEQ ID NO: 2022109 - RNA, 23 nt, Human
cucugcccuaaugcgcaggcugg

SEQ ID NO: 2022110 - RNA, 11 nt, Human
cucugcccugc

SEQ ID NO: 2022111 - RNA, 13 nt, Human
cucugcccagcuu

SEQ ID NO: 2022112 - RNA, 14 nt, Human
cucugcccagcuuu

SEQ ID NO: 2022113 - RNA, 22 nt, Human
cucugcccagcuuuucauugcu

SEQ ID NO: 2022114 - RNA, 13 nt, Human
cucugccccagcu

SEQ ID NO: 2022115 - RNA, 15 nt, Human
cucugccccagcuug

SEQ ID NO: 2022116 - RNA, 21 nt, Human
cucugccccagcuugggcaga

SEQ ID NO: 2022117 - RNA, 21 nt, Human
cuccacucuccucuuccaggc

SEQ ID NO: 2022118 - RNA, 11 nt, Human
cuccacugccu

SEQ ID NO: 2022119 - RNA, 14 nt, Human
cuccagaccccugg

SEQ ID NO: 2022120 - RNA, 15 nt, Human
cuccagaccccuggc

SEQ ID NO: 2022121 - RNA, 17 nt, Human
cuccagaccccuggcuu

SEQ ID NO: 2022122 - RNA, 18 nt, Human
cuccagaccccuggcuuu

SEQ ID NO: 2022123 - RNA, 19 nt, Human
cuccagaccccuggcuuuu

SEQ ID NO: 2022124 - RNA, 20 nt, Human
cuccagaccccuggcuuuuc

SEQ ID NO: 2022125 - RNA, 19 nt, Human
cuccagcucaccagcccca

SEQ ID NO: 2022126 - RNA, 20 nt, Human
cuccagcucaccagccccag

SEQ ID NO: 2022127 - RNA, 14 nt, Human
cuccagcaggccca

SEQ ID NO: 2022128 - RNA, 22 nt, Human
cuccagcaggcccaugggaggc

SEQ ID NO: 2022129 - RNA, 11 nt, Human
cuccacccugc

SEQ ID NO: 2022130 - RNA, 20 nt, Human
cuccacauauuucagugagg

SEQ ID NO: 2022131 - RNA, 15 nt, Human
cuccaccugccaggg

SEQ ID NO: 2022132 - RNA, 17 nt, Human
cuccaccugccagggac

SEQ ID NO: 2022133 - RNA, 21 nt, Human
cuccaccugccagggacagag

SEQ ID NO: 2022134 - RNA, 18 nt, Human
cuccaccugccagggaca

SEQ ID NO: 2022135 - RNA, 12 nt, Human
cuccacccugcu

SEQ ID NO: 2022136 - RNA, 22 nt, Human
cucccaggcauuccccaggagg

SEQ ID NO: 2022137 - RNA, 14 nt, Human
cucccaggcgcccc

SEQ ID NO: 2022138 - RNA, 21 nt, Human
cucccaggcauuccccaggag

SEQ ID NO: 2022139 - RNA, 20 nt, Human
cucccaggcauuccccagga

SEQ ID NO: 2022140 - RNA, 19 nt, Human
cucccaggcauuccccagg

SEQ ID NO: 2022141 - RNA, 17 nt, Human
cucccaggcauucccca

SEQ ID NO: 2022142 - RNA, 17 nt, Human
cuccauugguguugaca

SEQ ID NO: 2022143 - RNA, 14 nt, Human
cuccaugugggcua

SEQ ID NO: 2022144 - RNA, 22 nt, Human
cucccaaggggcccaaauucuu

SEQ ID NO: 2022145 - RNA, 21 nt, Human
cucccaaggggcccaaauucu

SEQ ID NO: 2022146 - RNA, 15 nt, Human
cucccaggcauuccc

SEQ ID NO: 2022147 - RNA, 13 nt, Human
cuccagcuguuca

SEQ ID NO: 2022148 - RNA, 19 nt, Human
cuccagcuggguuggaaaa

SEQ ID NO: 2022149 - RNA, 23 nt, Human
cuccagccuggaaaccugucuga

SEQ ID NO: 2022150 - RNA, 19 nt, Human
cuccagcuguucagcuggu

SEQ ID NO: 2022151 - RNA, 18 nt, Human
cuccagcuguucagcugg

SEQ ID NO: 2022152 - RNA, 23 nt, Human
cuccauccugaggcuccacuugg

SEQ ID NO: 2022153 - RNA, 20 nt, Human
cuccaucgcugucaucucag

SEQ ID NO: 2022154 - RNA, 17 nt, Human
cuccaucuaaacugccc

SEQ ID NO: 2022155 - RNA, 18 nt, Human
cuccaucuaaacugcccc

SEQ ID NO: 2022156 - RNA, 13 nt, Human
cuccaucuccacu

SEQ ID NO: 2022157 - RNA, 21 nt, Human
cuccauccugaggcuccacuu

SEQ ID NO: 2022158 - RNA, 20 nt, Human
cuccauccugaggcuccacu

SEQ ID NO: 2022159 - RNA, 11 nt, Human
cuccaggcucc

SEQ ID NO: 2022160 - RNA, 12 nt, Human
cuaaaaggccca

SEQ ID NO: 2022161 - RNA, 13 nt, Human
cuaaaaggcccag

SEQ ID NO: 2022162 - RNA, 14 nt, Human
cuaaaaggcccaga

SEQ ID NO: 2022163 - RNA, 18 nt, Human
cuaaaaggcccagagaga

SEQ ID NO: 2022164 - RNA, 23 nt, Human
cuaaaaggcccagagagaagagc

SEQ ID NO: 2022165 - RNA, 12 nt, Human
cucagggucccu

SEQ ID NO: 2022166 - RNA, 12 nt, Human
cuaaaagcacac

SEQ ID NO: 2022167 - RNA, 23 nt, Human
cuaaaagguaugcaaucaaaucu

SEQ ID NO: 2022168 - RNA, 22 nt, Human
cguuuugcaagguaaaauuuua

SEQ ID NO: 2022169 - RNA, 14 nt, Human
cucagggucccugg

SEQ ID NO: 2022170 - RNA, 20 nt, Human
cucagguacuucucucuccu

SEQ ID NO: 2022171 - RNA, 17 nt, Human
cucaggucccugcaggg

SEQ ID NO: 2022172 - RNA, 18 nt, Human
cucaggucccugcagggc

SEQ ID NO: 2022173 - RNA, 23 nt, Human
cucagguggggucacucuggcag

SEQ ID NO: 2022174 - RNA, 22 nt, Human
cucagguggggucacucuggca

SEQ ID NO: 2022175 - RNA, 15 nt, Human
cucaggugucccugc

SEQ ID NO: 2022176 - RNA, 16 nt, Human
cucaggugucccugca

SEQ ID NO: 2022177 - RNA, 21 nt, Human
cucagugucuggcugcagagc

SEQ ID NO: 2022178 - RNA, 22 nt, Human
cucagugucuggcugcagagca

SEQ ID NO: 2022179 - RNA, 23 nt, Human
cucaggucccaggcuccuaugca

SEQ ID NO: 2022180 - RNA, 13 nt, Human
cucaggucugagu

SEQ ID NO: 2022181 - RNA, 17 nt, Human
cucaggugucccugcac

SEQ ID NO: 2022182 - RNA, 18 nt, Human
cucaggugucccugcacu

SEQ ID NO: 2022183 - RNA, 20 nt, Human
cucagugucuggcugcagag

SEQ ID NO: 2022184 - RNA, 14 nt, Human
cucaggugagaagc

SEQ ID NO: 2022185 - RNA, 19 nt, Human
cucaggugucccugcacuu

SEQ ID NO: 2022186 - RNA, 20 nt, Human
cucauaguaugguggcuggg

SEQ ID NO: 2022187 - RNA, 18 nt, Human
cucauaguaugguggcug

SEQ ID NO: 2022188 - RNA, 19 nt, Human
cucauaguaugguggcugg

SEQ ID NO: 2022189 - RNA, 14 nt, Human
cucauauuuucaug

SEQ ID NO: 2022190 - RNA, 12 nt, Human
cucaucauuuuu

SEQ ID NO: 2022191 - RNA, 17 nt, Human
cucauuaggauggcuag

SEQ ID NO: 2022192 - RNA, 18 nt, Human
cucauuaggauggcuagu

SEQ ID NO: 2022193 - RNA, 23 nt, Human
cucauuaggcaugguuuugggcu

SEQ ID NO: 2022194 - RNA, 14 nt, Human
cucauucagcaucu

SEQ ID NO: 2022195 - RNA, 15 nt, Human
cucauucagcaucug

SEQ ID NO: 2022196 - RNA, 21 nt, Human
cucauuagcauuuugcuaaau

SEQ ID NO: 2022197 - RNA, 17 nt, Human
cucaucuccccaucauu

SEQ ID NO: 2022198 - RNA, 21 nt, Human
cucaucuagguaaauuacagu

SEQ ID NO: 2022199 - RNA, 17 nt, Human
cucauuccagaggaagg

SEQ ID NO: 2022200 - RNA, 15 nt, Human
cucauuccagaggaa

SEQ ID NO: 2022201 - RNA, 21 nt, Human
cucauuccaccuucccaugcc

SEQ ID NO: 2022202 - RNA, 18 nt, Human
cucauuccaccuucccau

SEQ ID NO: 2022203 - RNA, 16 nt, Human
cucauucagcaucuga

SEQ ID NO: 2022204 - RNA, 13 nt, Human
cucauucuucugu

SEQ ID NO: 2022205 - RNA, 14 nt, Human
cucauucuucugua

SEQ ID NO: 2022206 - RNA, 20 nt, Human
cucauucccucgucuuuccc

SEQ ID NO: 2022207 - RNA, 21 nt, Human
cucauucccucgucuuuccca

SEQ ID NO: 2022208 - RNA, 15 nt, Human
cucauugaccugagg

SEQ ID NO: 2022209 - RNA, 13 nt, Human
cucauugaccuga

SEQ ID NO: 2022210 - RNA, 23 nt, Human
cucauucuucuguacgucugaca

SEQ ID NO: 2022211 - RNA, 16 nt, Human
cucauugaccugaggc

SEQ ID NO: 2022212 - RNA, 21 nt, Human
cuccuucaccuuuguccccac

SEQ ID NO: 2022213 - RNA, 19 nt, Human
cuccuucaccuuugucccc

SEQ ID NO: 2022214 - RNA, 16 nt, Human
cuccuucaccuuuguc

SEQ ID NO: 2022215 - RNA, 14 nt, Human
cuccuucaccuuug

SEQ ID NO: 2022216 - RNA, 14 nt, Human
cuccugugugugcg

SEQ ID NO: 2022217 - RNA, 21 nt, Human
cuccugcaggcagccaggcca

SEQ ID NO: 2022218 - RNA, 15 nt, Human
cuccugcaggcagcc

SEQ ID NO: 2022219 - RNA, 22 nt, Human
cuccugcaggcagccaggccac

SEQ ID NO: 2022220 - RNA, 15 nt, Human
cuccugugucuugca

SEQ ID NO: 2022221 - RNA, 11 nt, Human
cuccugccacc

SEQ ID NO: 2022222 - RNA, 23 nt, Human
cuccugugucuugcaauggcagc

SEQ ID NO: 2022223 - RNA, 11 nt, Human
cuccugugugu

SEQ ID NO: 2022224 - RNA, 21 nt, Human
cuccuugaaaacacuguucuc

SEQ ID NO: 2022225 - RNA, 11 nt, Human
cuccuucuucc

SEQ ID NO: 2022226 - RNA, 16 nt, Human
cucgaacuggcugcaa

SEQ ID NO: 2022227 - RNA, 15 nt, Human
cuccuugauauuugu

SEQ ID NO: 2022228 - RNA, 22 nt, Human
cuccuugauauuuguauuuauu

SEQ ID NO: 2022229 - RNA, 14 nt, Human
cuccuucuguccua

SEQ ID NO: 2022230 - RNA, 15 nt, Human
cuccuucuguccuac

SEQ ID NO: 2022231 - RNA, 20 nt, Human
cuccuucuguccuacucugu

SEQ ID NO: 2022232 - RNA, 23 nt, Human
cucggaaccugugagcugcacca

SEQ ID NO: 2022233 - RNA, 21 nt, Human
cucgcuauugucaccagggcu

SEQ ID NO: 2022234 - RNA, 19 nt, Human
cucgcuacauuuccgccac

SEQ ID NO: 2022235 - RNA, 18 nt, Human
cucggacuuagcugggag

SEQ ID NO: 2022236 - RNA, 19 nt, Human
cucggacuuagcugggaga

SEQ ID NO: 2022237 - RNA, 15 nt, Human
cucuaacaguggaca

SEQ ID NO: 2022238 - RNA, 19 nt, Human
cucuaacaguggacaaagu

SEQ ID NO: 2022239 - RNA, 13 nt, Human
cucuaaauucuuu

SEQ ID NO: 2022240 - RNA, 17 nt, Human
cucuaaauucuuucauu

SEQ ID NO: 2022241 - RNA, 22 nt, Human
cucuaaagucuguugauuaaag

SEQ ID NO: 2022242 - RNA, 23 nt, Human
cucggauccccuuccuaccaccc

SEQ ID NO: 2022243 - RNA, 18 nt, Human
cucggaucaggcucccag

SEQ ID NO: 2022244 - RNA, 15 nt, Human
cucggauccccuucc

SEQ ID NO: 2022245 - RNA, 22 nt, Human
cucggccucccaaagugcuggg

SEQ ID NO: 2022246 - RNA, 23 nt, Human
cucggccucccaaagugcuggga

SEQ ID NO: 2022247 - RNA, 20 nt, Human
cucgcccagucccagcagcc

SEQ ID NO: 2022248 - RNA, 18 nt, Human
cucgcccagucccagcag

SEQ ID NO: 2022249 - RNA, 19 nt, Human
cucgcccagucccagcagc

SEQ ID NO: 2022250 - RNA, 14 nt, Human
cucgcccaguccca

SEQ ID NO: 2022251 - RNA, 16 nt, Human
cucgcccagucccagc

SEQ ID NO: 2022252 - RNA, 14 nt, Human
cucgaugcagacag

SEQ ID NO: 2022253 - RNA, 15 nt, Human
cucgcgacaaugcaa

SEQ ID NO: 2022254 - RNA, 19 nt, Human
cucgcuauugucaccaggg

SEQ ID NO: 2022255 - RNA, 13 nt, Human
cucgcgacaaugc

SEQ ID NO: 2022256 - RNA, 19 nt, Human
cucgacauuuuauggaaag

SEQ ID NO: 2022257 - RNA, 20 nt, Human
cucgacacgugggcuccccu

SEQ ID NO: 2022258 - RNA, 22 nt, Human
cucgacacgugggcuccccucu

SEQ ID NO: 2022259 - RNA, 23 nt, Human
cucgacacgugggcuccccucuu

SEQ ID NO: 2022260 - RNA, 16 nt, Human
cucgaguuacagacaa

SEQ ID NO: 2022261 - RNA, 20 nt, Human
cucgaguuacagacaaagcg

SEQ ID NO: 2022262 - RNA, 12 nt, Human
cucgagucugag

SEQ ID NO: 2022263 - RNA, 21 nt, Human
cucgaaguugaucuccccagc

SEQ ID NO: 2022264 - RNA, 18 nt, Human
cucccaucucacacauga

SEQ ID NO: 2022265 - RNA, 15 nt, Human
cucccaucucacaca

SEQ ID NO: 2022266 - RNA, 14 nt, Human
cucccaucucacac

SEQ ID NO: 2022267 - RNA, 14 nt, Human
cucccaucacccgc

SEQ ID NO: 2022268 - RNA, 23 nt, Human
cucccuucccaccucucucacuc

SEQ ID NO: 2022269 - RNA, 10 nt, Human
cucccuuccu

SEQ ID NO: 2022270 - RNA, 12 nt, Human
cucccuucaacc

SEQ ID NO: 2022271 - RNA, 18 nt, Human
cucccuucaaccauuccc

SEQ ID NO: 2022272 - RNA, 19 nt, Human
cucccuucaaccauucccc

SEQ ID NO: 2022273 - RNA, 20 nt, Human
cucccuucaaccauucccca

SEQ ID NO: 2022274 - RNA, 13 nt, Human
cucccuuucaaca

SEQ ID NO: 2022275 - RNA, 20 nt, Human
cucccuuggauuguccccga

SEQ ID NO: 2022276 - RNA, 17 nt, Human
cucccuuggauuguccc

SEQ ID NO: 2022277 - RNA, 17 nt, Human
cucccuuucuucccuac

SEQ ID NO: 2022278 - RNA, 15 nt, Human
cuccuagggcauugu

SEQ ID NO: 2022279 - RNA, 23 nt, Human
cuccuagguagcccccucuuccc

SEQ ID NO: 2022280 - RNA, 23 nt, Human
cuccuaguagggguaccacugaa

SEQ ID NO: 2022281 - RNA, 13 nt, Human
cucccuuccucuu

SEQ ID NO: 2022282 - RNA, 14 nt, Human
cucccuuccucuuu

SEQ ID NO: 2022283 - RNA, 15 nt, Human
cucccuugaccugcu

SEQ ID NO: 2022284 - RNA, 14 nt, Human
cucccuucuguuga

SEQ ID NO: 2022285 - RNA, 17 nt, Human
cucccuugaccugcuga

SEQ ID NO: 2022286 - RNA, 16 nt, Human
cucccuucucuucaca

SEQ ID NO: 2022287 - RNA, 14 nt, Human
cuccugagccccca

SEQ ID NO: 2022288 - RNA, 17 nt, Human
cuccugagcccccagcu

SEQ ID NO: 2022289 - RNA, 19 nt, Human
cuccugagcccccagcuuc

SEQ ID NO: 2022290 - RNA, 20 nt, Human
cuccugagcccccagcuucc

SEQ ID NO: 2022291 - RNA, 21 nt, Human
cuccugagcccccagcuucca

SEQ ID NO: 2022292 - RNA, 22 nt, Human
cuccugagcccccagcuuccag

SEQ ID NO: 2022293 - RNA, 23 nt, Human
cuccugagcccccagcuuccagc

SEQ ID NO: 2022294 - RNA, 14 nt, Human
cuccugcaggcagc

SEQ ID NO: 2022295 - RNA, 13 nt, Human
cuccugcaggcag

SEQ ID NO: 2022296 - RNA, 12 nt, Human
cuccugcaggca

SEQ ID NO: 2022297 - RNA, 22 nt, Human
cuccugaguagcugggauuaca

SEQ ID NO: 2022298 - RNA, 17 nt, Human
cuccugaguagcuggga

SEQ ID NO: 2022299 - RNA, 14 nt, Human
cuccugaccucagg

SEQ ID NO: 2022300 - RNA, 14 nt, Human
cuccugaccuuagg

SEQ ID NO: 2022301 - RNA, 11 nt, Human
cuccugagccc

SEQ ID NO: 2022302 - RNA, 12 nt, Human
cuccugagcccc

SEQ ID NO: 2022303 - RNA, 13 nt, Human
cuccugagccccc

SEQ ID NO: 2022304 - RNA, 15 nt, Human
cuccugacaccccac

SEQ ID NO: 2022305 - RNA, 16 nt, Human
cuccugacaccccacu

SEQ ID NO: 2022306 - RNA, 19 nt, Human
cuccugacaccccacuuag

SEQ ID NO: 2022307 - RNA, 20 nt, Human
cuccugacaccccacuuagc

SEQ ID NO: 2022308 - RNA, 22 nt, Human
cuccucuauccugggcuuuugu

SEQ ID NO: 2022309 - RNA, 19 nt, Human
cuccucuugccacugccuc

SEQ ID NO: 2022310 - RNA, 22 nt, Human
cuccucggcuggcuguccaccc

SEQ ID NO: 2022311 - RNA, 17 nt, Human
cuccucuauccugggcu

SEQ ID NO: 2022312 - RNA, 15 nt, Human
cuccucggcuggcug

SEQ ID NO: 2022313 - RNA, 19 nt, Human
cuccucggcuggcugucca

SEQ ID NO: 2022314 - RNA, 20 nt, Human
cuccucggcuggcuguccac

SEQ ID NO: 2022315 - RNA, 21 nt, Human
cuccucggcuggcuguccacc

SEQ ID NO: 2022316 - RNA, 14 nt, Human
cuccucagaucuuc

SEQ ID NO: 2022317 - RNA, 12 nt, Human
cuccucagaucu

SEQ ID NO: 2022318 - RNA, 21 nt, Human
cuggagaggagcccugccucu

SEQ ID NO: 2022319 - RNA, 23 nt, Human
cuggagaggagcccugccucucc

SEQ ID NO: 2022320 - RNA, 17 nt, Human
cuggagaggagcccugc

SEQ ID NO: 2022321 - RNA, 18 nt, Human
cuggagaggagcccugcc

SEQ ID NO: 2022322 - RNA, 16 nt, Human
cuggagagcccagagu

SEQ ID NO: 2022323 - RNA, 17 nt, Human
cuggagagcccagaguc

SEQ ID NO: 2022324 - RNA, 23 nt, Human
cuggacuagagggaccucuccca

SEQ ID NO: 2022325 - RNA, 21 nt, Human
cuggacuagagggaccucucc

SEQ ID NO: 2022326 - RNA, 20 nt, Human
cuggacuagagggaccucuc

SEQ ID NO: 2022327 - RNA, 16 nt, Human
cuggacucaccucccc

SEQ ID NO: 2022328 - RNA, 20 nt, Human
cuggagcccacuguacuugc

SEQ ID NO: 2022329 - RNA, 17 nt, Human
cuggagcccacuguacu

SEQ ID NO: 2022330 - RNA, 16 nt, Human
cuggagcccacuguac

SEQ ID NO: 2022331 - RNA, 15 nt, Human
cuggagcccacugua

SEQ ID NO: 2022332 - RNA, 13 nt, Human
cuggagcccacug

SEQ ID NO: 2022333 - RNA, 16 nt, Human
cuggagcuagaauuug

SEQ ID NO: 2022334 - RNA, 17 nt, Human
cuggagcuagaauuuga

SEQ ID NO: 2022335 - RNA, 22 nt, Human
cuggagcuagaauuugauaugu

SEQ ID NO: 2022336 - RNA, 21 nt, Human
cuggagcccacuguacuugcu

SEQ ID NO: 2022337 - RNA, 20 nt, Human
cuggaggaccugcccggugg

SEQ ID NO: 2022338 - RNA, 15 nt, Human
cugcuuuccaaagcc

SEQ ID NO: 2022339 - RNA, 17 nt, Human
cugcuuuccaaagccaa

SEQ ID NO: 2022340 - RNA, 14 nt, Human
cugcucuuuggccu

SEQ ID NO: 2022341 - RNA, 12 nt, Human
cugcucugauga

SEQ ID NO: 2022342 - RNA, 15 nt, Human
cugcucuugggcaau

SEQ ID NO: 2022343 - RNA, 19 nt, Human
cugcucuugggcaauauuc

SEQ ID NO: 2022344 - RNA, 21 nt, Human
cugcuuugggcugcccuggug

SEQ ID NO: 2022345 - RNA, 22 nt, Human
cugcuuugggcugcccuggugc

SEQ ID NO: 2022346 - RNA, 23 nt, Human
cugcuuugggcugcccuggugcu

SEQ ID NO: 2022347 - RNA, 14 nt, Human
cugcuuugucuccu

SEQ ID NO: 2022348 - RNA, 17 nt, Human
cugcuuuguugugugcc

SEQ ID NO: 2022349 - RNA, 23 nt, Human
cugcuuuguugugugccucuagc

SEQ ID NO: 2022350 - RNA, 20 nt, Human
cugcuuuguugugugccucu

SEQ ID NO: 2022351 - RNA, 21 nt, Human
cugcuuuguugugugccucua

SEQ ID NO: 2022352 - RNA, 19 nt, Human
cugcuuugggcugcccugg

SEQ ID NO: 2022353 - RNA, 20 nt, Human
cugcuuugggcugcccuggu

SEQ ID NO: 2022354 - RNA, 18 nt, Human
cugcuuugggcugcccug

SEQ ID NO: 2022355 - RNA, 15 nt, Human
cuggaagcacagcuu

SEQ ID NO: 2022356 - RNA, 18 nt, Human
cuggaagcacagcuucau

SEQ ID NO: 2022357 - RNA, 14 nt, Human
cuggaagcagugcc

SEQ ID NO: 2022358 - RNA, 21 nt, Human
cuggaagugcuaauuuugaaa

SEQ ID NO: 2022359 - RNA, 19 nt, Human
cuggaagcagugcccaggu

SEQ ID NO: 2022360 - RNA, 20 nt, Human
cuggaagcagugcccaggug

SEQ ID NO: 2022361 - RNA, 15 nt, Human
cuggaagcagugccc

SEQ ID NO: 2022362 - RNA, 16 nt, Human
cuggaagcagugccca

SEQ ID NO: 2022363 - RNA, 17 nt, Human
cuggaagcagugcccag

SEQ ID NO: 2022364 - RNA, 18 nt, Human
cuggaagcagugcccagg

SEQ ID NO: 2022365 - RNA, 23 nt, Human
cuggaauaauccuaaacauauga

SEQ ID NO: 2022366 - RNA, 14 nt, Human
cuggaaugcagugg

SEQ ID NO: 2022367 - RNA, 15 nt, Human
cuggaaugcaguggu

SEQ ID NO: 2022368 - RNA, 17 nt, Human
cuggauuauauuaugaa

SEQ ID NO: 2022369 - RNA, 23 nt, Human
cuggauuauucaaaaugauguau

SEQ ID NO: 2022370 - RNA, 14 nt, Human
cuggauucagccuu

SEQ ID NO: 2022371 - RNA, 15 nt, Human
cuggauucagccuuc

SEQ ID NO: 2022372 - RNA, 17 nt, Human
cuggauucagccuucuu

SEQ ID NO: 2022373 - RNA, 18 nt, Human
cuggauucagccuucuuu

SEQ ID NO: 2022374 - RNA, 22 nt, Human
cuggauucagccuucuuuuucu

SEQ ID NO: 2022375 - RNA, 13 nt, Human
cuggauuaaacuu

SEQ ID NO: 2022376 - RNA, 23 nt, Human
cuggauuaaacuuaaucuaaaug

SEQ ID NO: 2022377 - RNA, 16 nt, Human
cuggauggggcugcac

SEQ ID NO: 2022378 - RNA, 15 nt, Human
cuggauguaccacca

SEQ ID NO: 2022379 - RNA, 15 nt, Human
cuggauggggcugca

SEQ ID NO: 2022380 - RNA, 21 nt, Human
cuggauggcggaagcugcuac

SEQ ID NO: 2022381 - RNA, 21 nt, Human
cuggauggaggaaaaccaagc

SEQ ID NO: 2022382 - RNA, 15 nt, Human
cuggaggcucaaauu

SEQ ID NO: 2022383 - RNA, 18 nt, Human
cuggaggcucaaauuuug

SEQ ID NO: 2022384 - RNA, 21 nt, Human
cuggaggcucaaauuuugagu

SEQ ID NO: 2022385 - RNA, 17 nt, Human
cuggaggagcugggccc

SEQ ID NO: 2022386 - RNA, 23 nt, Human
cuggcacuauaauguaagcucua

SEQ ID NO: 2022387 - RNA, 14 nt, Human
cuggcacugcuucc

SEQ ID NO: 2022388 - RNA, 13 nt, Human
cuggcacugcuuc

SEQ ID NO: 2022389 - RNA, 17 nt, Human
cuggcacagggcagugg

SEQ ID NO: 2022390 - RNA, 15 nt, Human
cuggcacagccugca

SEQ ID NO: 2022391 - RNA, 13 nt, Human
cuggcacagccug

SEQ ID NO: 2022392 - RNA, 14 nt, Human
cuggcacagccugc

SEQ ID NO: 2022393 - RNA, 12 nt, Human
cuggauuuaacu

SEQ ID NO: 2022394 - RNA, 22 nt, Human
cuggcaauggaugaacugaaag

SEQ ID NO: 2022395 - RNA, 12 nt, Human
cuggcacagccu

SEQ ID NO: 2022396 - RNA, 16 nt, Human
cuggcaaugguaguuu

SEQ ID NO: 2022397 - RNA, 21 nt, Human
cuggcaaugguaguuucugug

SEQ ID NO: 2022398 - RNA, 22 nt, Human
cuggcaaugguaguuucugugg

SEQ ID NO: 2022399 - RNA, 17 nt, Human
cuggccuagcauacgua

SEQ ID NO: 2022400 - RNA, 13 nt, Human
cuggcccacugca

SEQ ID NO: 2022401 - RNA, 12 nt, Human
cuggcccacugc

SEQ ID NO: 2022402 - RNA, 13 nt, Human
cuggccucucacu

SEQ ID NO: 2022403 - RNA, 23 nt, Human
cuggccuagcauacguacacauu

SEQ ID NO: 2022404 - RNA, 19 nt, Human
cuggccucccacagacuca

SEQ ID NO: 2022405 - RNA, 17 nt, Human
cuggccucccacagacu

SEQ ID NO: 2022406 - RNA, 22 nt, Human
cuggccucaagugauucuccug

SEQ ID NO: 2022407 - RNA, 22 nt, Human
cuggccagaugcaccagcccuu

SEQ ID NO: 2022408 - RNA, 21 nt, Human
cuggccagaugcaccagcccu

SEQ ID NO: 2022409 - RNA, 17 nt, Human
cuggccagaugcaccag

SEQ ID NO: 2022410 - RNA, 18 nt, Human
cuggccagaugcaccagc

SEQ ID NO: 2022411 - RNA, 19 nt, Human
cuggccagaugcaccagcc

SEQ ID NO: 2022412 - RNA, 20 nt, Human
cuggccagaugcaccagccc

SEQ ID NO: 2022413 - RNA, 16 nt, Human
cuggccaacgggguga

SEQ ID NO: 2022414 - RNA, 16 nt, Human
cuggccagaugcacca

SEQ ID NO: 2022415 - RNA, 16 nt, Human
cuggcacugcuuccag

SEQ ID NO: 2022416 - RNA, 15 nt, Human
cuggcacugcuucca

SEQ ID NO: 2022417 - RNA, 17 nt, Human
cuggcacugcuuccagu

SEQ ID NO: 2022418 - RNA, 20 nt, Human
cugggguggggauagggagc

SEQ ID NO: 2022419 - RNA, 13 nt, Human
cuggguagcugua

SEQ ID NO: 2022420 - RNA, 14 nt, Human
cuggguagcuguaa

SEQ ID NO: 2022421 - RNA, 15 nt, Human
cuggguagcuguaag

SEQ ID NO: 2022422 - RNA, 21 nt, Human
cuggguacuuguggacacagc

SEQ ID NO: 2022423 - RNA, 23 nt, Human
cuggguacuuguggacacagcuc

SEQ ID NO: 2022424 - RNA, 22 nt, Human
cugggguggggaccucaggccu

SEQ ID NO: 2022425 - RNA, 21 nt, Human
cugggguggggaccucaggcc

SEQ ID NO: 2022426 - RNA, 23 nt, Human
cugggguggggaccucaggccug

SEQ ID NO: 2022427 - RNA, 20 nt, Human
cuggguacuuguggacacag

SEQ ID NO: 2022428 - RNA, 19 nt, Human
cugggguggggaccucagg

SEQ ID NO: 2022429 - RNA, 18 nt, Human
cugggguggggaccucag

SEQ ID NO: 2022430 - RNA, 17 nt, Human
cugggguggggaccuca

SEQ ID NO: 2022431 - RNA, 13 nt, Human
cugggggccucag

SEQ ID NO: 2022432 - RNA, 17 nt, Human
cugggggccucagugcc

SEQ ID NO: 2022433 - RNA, 18 nt, Human
cugggggccucagugcca

SEQ ID NO: 2022434 - RNA, 18 nt, Human
cugggcuucaguggcagc

SEQ ID NO: 2022435 - RNA, 17 nt, Human
cugggcuucaguggcag

SEQ ID NO: 2022436 - RNA, 19 nt, Human
cugggcuucaguggcagcu

SEQ ID NO: 2022437 - RNA, 20 nt, Human
cugggcuucaguggcagcug

SEQ ID NO: 2022438 - RNA, 21 nt, Human
cugggcuucaguggcagcugc

SEQ ID NO: 2022439 - RNA, 22 nt, Human
cugggcuucaguggcagcugcu

SEQ ID NO: 2022440 - RNA, 13 nt, Human
cugggcuugggga

SEQ ID NO: 2022441 - RNA, 23 nt, Human
cugggcuucaguggcagcugcuu

SEQ ID NO: 2022442 - RNA, 20 nt, Human
cugggcuuggggaccagagc

SEQ ID NO: 2022443 - RNA, 17 nt, Human
cugggcuuggggaccag

SEQ ID NO: 2022444 - RNA, 21 nt, Human
cugggcuuggggaccagagcu

SEQ ID NO: 2022445 - RNA, 19 nt, Human
cugggcucccguguaucug

SEQ ID NO: 2022446 - RNA, 17 nt, Human
cugguccauagagagca

SEQ ID NO: 2022447 - RNA, 15 nt, Human
cugguccauagagag

SEQ ID NO: 2022448 - RNA, 13 nt, Human
cuggguuggaggg

SEQ ID NO: 2022449 - RNA, 13 nt, Human
cuggguuggaaaa

SEQ ID NO: 2022450 - RNA, 18 nt, Human
cuggguuggaaaacagua

SEQ ID NO: 2022451 - RNA, 19 nt, Human
cuggguucuacccaggugc

SEQ ID NO: 2022452 - RNA, 18 nt, Human
cugguccauagagagcaa

SEQ ID NO: 2022453 - RNA, 15 nt, Human
cuggucccacucagu

SEQ ID NO: 2022454 - RNA, 18 nt, Human
cuggucccacucagucca

SEQ ID NO: 2022455 - RNA, 14 nt, Human
cuggucgccuucca

SEQ ID NO: 2022456 - RNA, 19 nt, Human
cugguggcagugggagcug

SEQ ID NO: 2022457 - RNA, 23 nt, Human
cugguggcagugggagcugccug

SEQ ID NO: 2022458 - RNA, 19 nt, Human
cuggucuauaccuuaagaa

SEQ ID NO: 2022459 - RNA, 21 nt, Human
cuggucguaaacaucucagag

SEQ ID NO: 2022460 - RNA, 22 nt, Human
cuggucguaaacaucucagaga

SEQ ID NO: 2022461 - RNA, 15 nt, Human
cuggucgccuuccac

SEQ ID NO: 2022462 - RNA, 20 nt, Human
cuggucguaaacaucucaga

SEQ ID NO: 2022463 - RNA, 19 nt, Human
cuggcuugaauuggugaca

SEQ ID NO: 2022464 - RNA, 15 nt, Human
cuggcuuuucacugc

SEQ ID NO: 2022465 - RNA, 16 nt, Human
cuggcuuuucacugcu

SEQ ID NO: 2022466 - RNA, 19 nt, Human
cugggaacaccauagguca

SEQ ID NO: 2022467 - RNA, 17 nt, Human
cuggcuuuucacugcug

SEQ ID NO: 2022468 - RNA, 19 nt, Human
cuggcuuuucacugcuggc

SEQ ID NO: 2022469 - RNA, 20 nt, Human
cuggcuuuucacugcuggcu

SEQ ID NO: 2022470 - RNA, 22 nt, Human
cuggcuuuucacugcuggcugc

SEQ ID NO: 2022471 - RNA, 20 nt, Human
cuggcuguuggcugggggcc

SEQ ID NO: 2022472 - RNA, 18 nt, Human
cuggcuuacacuggcaau

SEQ ID NO: 2022473 - RNA, 14 nt, Human
cuggcuucacagau

SEQ ID NO: 2022474 - RNA, 14 nt, Human
cuggcuuacacugg

SEQ ID NO: 2022475 - RNA, 21 nt, Human
cuggcuggguggcaccagcag

SEQ ID NO: 2022476 - RNA, 22 nt, Human
cuggcuggguggcaccagcagc

SEQ ID NO: 2022477 - RNA, 19 nt, Human
cuggcuguuggcugggggc

SEQ ID NO: 2022478 - RNA, 19 nt, Human
cuggcucuuccaggcuggg

SEQ ID NO: 2022479 - RNA, 18 nt, Human
cuggcucuuccaggcugg

SEQ ID NO: 2022480 - RNA, 20 nt, Human
cuggcucuuccaggcuggga

SEQ ID NO: 2022481 - RNA, 13 nt, Human
cuggccugagcug

SEQ ID NO: 2022482 - RNA, 17 nt, Human
cuggcucuuccaggcug

SEQ ID NO: 2022483 - RNA, 15 nt, Human
cuggccucuucuaga

SEQ ID NO: 2022484 - RNA, 21 nt, Human
cuggccugaaccacaggagag

SEQ ID NO: 2022485 - RNA, 19 nt, Human
cuggccugagaggggaagc

SEQ ID NO: 2022486 - RNA, 14 nt, Human
cuggcugccuuaga

SEQ ID NO: 2022487 - RNA, 19 nt, Human
cuggcugccuuagaaccuu

SEQ ID NO: 2022488 - RNA, 12 nt, Human
cuggcugcgggg

SEQ ID NO: 2022489 - RNA, 18 nt, Human
cuggcugcggggcgggca

SEQ ID NO: 2022490 - RNA, 15 nt, Human
cuggcugggacuggg

SEQ ID NO: 2022491 - RNA, 17 nt, Human
cuggcugggacugggaa

SEQ ID NO: 2022492 - RNA, 16 nt, Human
cugggagcuuuuguag

SEQ ID NO: 2022493 - RNA, 14 nt, Human
cugggagcucugca

SEQ ID NO: 2022494 - RNA, 15 nt, Human
cugggagcucugcag

SEQ ID NO: 2022495 - RNA, 13 nt, Human
cugggagcucugc

SEQ ID NO: 2022496 - RNA, 15 nt, Human
cugggaacagaacuc

SEQ ID NO: 2022497 - RNA, 14 nt, Human
cugggaacagaacu

SEQ ID NO: 2022498 - RNA, 16 nt, Human
cugggaggcucuggag

SEQ ID NO: 2022499 - RNA, 15 nt, Human
cugggaggcucugga

SEQ ID NO: 2022500 - RNA, 14 nt, Human
cugggaggcaguga

SEQ ID NO: 2022501 - RNA, 16 nt, Human
cugggaggcagugaug

SEQ ID NO: 2022502 - RNA, 18 nt, Human
cugggaggucaaggcugc

SEQ ID NO: 2022503 - RNA, 22 nt, Human
cugggaggcucuggagcccacu

SEQ ID NO: 2022504 - RNA, 16 nt, Human
cugggagugagcuggu

SEQ ID NO: 2022505 - RNA, 13 nt, Human
cugggagugagcu

SEQ ID NO: 2022506 - RNA, 12 nt, Human
cugggagugagc

SEQ ID NO: 2022507 - RNA, 19 nt, Human
cugggauuacaggcuccug

SEQ ID NO: 2022508 - RNA, 20 nt, Human
cugggauuacaggcuccugc

SEQ ID NO: 2022509 - RNA, 21 nt, Human
cugggauuacaggcgugagcc

SEQ ID NO: 2022510 - RNA, 17 nt, Human
cugggauaggggcagag

SEQ ID NO: 2022511 - RNA, 21 nt, Human
cugggauuacaggcuccugcc

SEQ ID NO: 2022512 - RNA, 22 nt, Human
cugggauuacaggcuccugcca

SEQ ID NO: 2022513 - RNA, 23 nt, Human
cugggauuacaggcuccugccac

SEQ ID NO: 2022514 - RNA, 20 nt, Human
cugggcaaugugauaaaacc

SEQ ID NO: 2022515 - RNA, 10 nt, Human
cugggccccu

SEQ ID NO: 2022516 - RNA, 14 nt, Human
cugggcacacgcug

SEQ ID NO: 2022517 - RNA, 15 nt, Human
cugggcacacgcugc

SEQ ID NO: 2022518 - RNA, 16 nt, Human
cugggcacacgcugcu

SEQ ID NO: 2022519 - RNA, 18 nt, Human
cugggcacacgcugcucu

SEQ ID NO: 2022520 - RNA, 20 nt, Human
cugggcacacgcugcucugc

SEQ ID NO: 2022521 - RNA, 21 nt, Human
cugggcacacgcugcucugcc

SEQ ID NO: 2022522 - RNA, 17 nt, Human
cugggccccugccucuc

SEQ ID NO: 2022523 - RNA, 16 nt, Human
cugggccccugccucu

SEQ ID NO: 2022524 - RNA, 12 nt, Human
cugggccccugc

SEQ ID NO: 2022525 - RNA, 22 nt, Human
cugggcacacgcugcucugccc

SEQ ID NO: 2022526 - RNA, 14 nt, Human
cugagggcuuguag

SEQ ID NO: 2022527 - RNA, 17 nt, Human
cugagggcuuguaguuc

SEQ ID NO: 2022528 - RNA, 20 nt, Human
cugagggcuuguaguucuuu

SEQ ID NO: 2022529 - RNA, 14 nt, Human
cugaggggagacag

SEQ ID NO: 2022530 - RNA, 13 nt, Human
cugaguccgaccu

SEQ ID NO: 2022531 - RNA, 15 nt, Human
cugaggggagacaga

SEQ ID NO: 2022532 - RNA, 17 nt, Human
cugaggggagacagagc

SEQ ID NO: 2022533 - RNA, 16 nt, Human
cugagucugaaggcug

SEQ ID NO: 2022534 - RNA, 15 nt, Human
cugagucugaaggcu

SEQ ID NO: 2022535 - RNA, 14 nt, Human
cugagucugaaggc

SEQ ID NO: 2022536 - RNA, 13 nt, Human
cugagucugaagg

SEQ ID NO: 2022537 - RNA, 15 nt, Human
cugagugagagggga

SEQ ID NO: 2022538 - RNA, 16 nt, Human
cugagugagaggggag

SEQ ID NO: 2022539 - RNA, 20 nt, Human
cugagugagaggggaggcca

SEQ ID NO: 2022540 - RNA, 13 nt, Human
cugagugcaggcc

SEQ ID NO: 2022541 - RNA, 14 nt, Human
cugagugcaggccc

SEQ ID NO: 2022542 - RNA, 15 nt, Human
cugagugcaggccca

SEQ ID NO: 2022543 - RNA, 16 nt, Human
cugagugcaggcccac

SEQ ID NO: 2022544 - RNA, 17 nt, Human
cugagugcaggcccacc

SEQ ID NO: 2022545 - RNA, 20 nt, Human
cugagugcaggcccacccug

SEQ ID NO: 2022546 - RNA, 14 nt, Human
cugagugccuuuug

SEQ ID NO: 2022547 - RNA, 21 nt, Human
cugagugcaggcccacccugc

SEQ ID NO: 2022548 - RNA, 15 nt, Human
cugagugccuuuugg

SEQ ID NO: 2022549 - RNA, 16 nt, Human
cugagugccuuuuggu

SEQ ID NO: 2022550 - RNA, 22 nt, Human
cugagugggggaucacagccuc

SEQ ID NO: 2022551 - RNA, 13 nt, Human
cugauaaagauga

SEQ ID NO: 2022552 - RNA, 20 nt, Human
cugauccagcccugaguucc

SEQ ID NO: 2022553 - RNA, 21 nt, Human
cugauaaagaugagugagcau

SEQ ID NO: 2022554 - RNA, 19 nt, Human
cugauagcauaugacaaau

SEQ ID NO: 2022555 - RNA, 15 nt, Human
cugauacuuuuuuga

SEQ ID NO: 2022556 - RNA, 16 nt, Human
cugauacuuuuuugaa

SEQ ID NO: 2022557 - RNA, 22 nt, Human
cugauagcauaugacaaauguu

SEQ ID NO: 2022558 - RNA, 17 nt, Human
cugauagccccucuccc

SEQ ID NO: 2022559 - RNA, 14 nt, Human
cugaucucucguga

SEQ ID NO: 2022560 - RNA, 17 nt, Human
cugauguauuuugugag

SEQ ID NO: 2022561 - RNA, 20 nt, Human
cugauguguccucagggagc

SEQ ID NO: 2022562 - RNA, 16 nt, Human
cugauguguugccacu

SEQ ID NO: 2022563 - RNA, 16 nt, Human
cugauguucccuccgg

SEQ ID NO: 2022564 - RNA, 17 nt, Human
cugauguucccuccggu

SEQ ID NO: 2022565 - RNA, 13 nt, Human
cugauguuugugc

SEQ ID NO: 2022566 - RNA, 22 nt, Human
cugauuaguaagucuugccuau

SEQ ID NO: 2022567 - RNA, 22 nt, Human
cugauucccaagcucugcuccu

SEQ ID NO: 2022568 - RNA, 19 nt, Human
cugauucccaagcucugcu

SEQ ID NO: 2022569 - RNA, 20 nt, Human
cugauucccaagcucugcuc

SEQ ID NO: 2022570 - RNA, 17 nt, Human
cugauucccaagcucug

SEQ ID NO: 2022571 - RNA, 18 nt, Human
cugauucccaagcucugc

SEQ ID NO: 2022572 - RNA, 15 nt, Human
cugauucccaagcuc

SEQ ID NO: 2022573 - RNA, 21 nt, Human
cugcacaaagcccuuccaugu

SEQ ID NO: 2022574 - RNA, 18 nt, Human
cugcacaaagcccuucca

SEQ ID NO: 2022575 - RNA, 20 nt, Human
cugcacaaagcccuuccaug

SEQ ID NO: 2022576 - RNA, 13 nt, Human
cugcacaaagccc

SEQ ID NO: 2022577 - RNA, 22 nt, Human
cugcaccagguagaacgccagg

SEQ ID NO: 2022578 - RNA, 21 nt, Human
cugcacagugcaucucagccc

SEQ ID NO: 2022579 - RNA, 18 nt, Human
cugcacccucaggcaggu

SEQ ID NO: 2022580 - RNA, 17 nt, Human
cugcacccucaggcagg

SEQ ID NO: 2022581 - RNA, 16 nt, Human
cugcacaagcugcacc

SEQ ID NO: 2022582 - RNA, 15 nt, Human
cugcacaagcugcac

SEQ ID NO: 2022583 - RNA, 14 nt, Human
cugcacaagcugca

SEQ ID NO: 2022584 - RNA, 13 nt, Human
cugcacaagcugc

SEQ ID NO: 2022585 - RNA, 18 nt, Human
cugcacaagcugcacccu

SEQ ID NO: 2022586 - RNA, 18 nt, Human
cugcacagugcaucucag

SEQ ID NO: 2022587 - RNA, 20 nt, Human
cugcaccggcuggccuggcc

SEQ ID NO: 2022588 - RNA, 19 nt, Human
cugcaccggcuggccuggc

SEQ ID NO: 2022589 - RNA, 18 nt, Human
cugcaccggcuggccugg

SEQ ID NO: 2022590 - RNA, 17 nt, Human
cugcaccggcuggccug

SEQ ID NO: 2022591 - RNA, 14 nt, Human
cugcacuugcagac

SEQ ID NO: 2022592 - RNA, 16 nt, Human
cugcacuugcagacuc

SEQ ID NO: 2022593 - RNA, 17 nt, Human
cugcacuugcagacucu

SEQ ID NO: 2022594 - RNA, 12 nt, Human
cugcagagcugc

SEQ ID NO: 2022595 - RNA, 21 nt, Human
cugcagagcugcgggcugggu

SEQ ID NO: 2022596 - RNA, 23 nt, Human
cugcagagcugcgggcugggugu

SEQ ID NO: 2022597 - RNA, 21 nt, Human
cugcagagcaguaagggaaca

SEQ ID NO: 2022598 - RNA, 21 nt, Human
cugcagagcagugggccuggc

SEQ ID NO: 2022599 - RNA, 23 nt, Human
cugcagagcagugggccuggcca

SEQ ID NO: 2022600 - RNA, 18 nt, Human
cugcagagcagugggccu

SEQ ID NO: 2022601 - RNA, 20 nt, Human
cugcagagcaggaaacauga

SEQ ID NO: 2022602 - RNA, 13 nt, Human
cugcagaagacag

SEQ ID NO: 2022603 - RNA, 20 nt, Human
cugcagaacagcuucauguu

SEQ ID NO: 2022604 - RNA, 23 nt, Human
cugcagaagacaguauggcagcu

SEQ ID NO: 2022605 - RNA, 15 nt, Human
cugcagccaggccac

SEQ ID NO: 2022606 - RNA, 20 nt, Human
cugcagauacuacugaccag

SEQ ID NO: 2022607 - RNA, 21 nt, Human
cugcagauacuacugaccaga

SEQ ID NO: 2022608 - RNA, 16 nt, Human
cugcagccaggccacu

SEQ ID NO: 2022609 - RNA, 17 nt, Human
cugcagccaggccacug

SEQ ID NO: 2022610 - RNA, 22 nt, Human
cugcagccaggccacuggcccc

SEQ ID NO: 2022611 - RNA, 23 nt, Human
cugcagccaggccacuggccccu

SEQ ID NO: 2022612 - RNA, 11 nt, Human
cugcagccuca

SEQ ID NO: 2022613 - RNA, 22 nt, Human
cugcagccucaaccuccugggc

SEQ ID NO: 2022614 - RNA, 19 nt, Human
cugcagccucaaccuccug

SEQ ID NO: 2022615 - RNA, 20 nt, Human
cugcagccucaaccuccugg

SEQ ID NO: 2022616 - RNA, 22 nt, Human
cugcagggaguccgaaagggac

SEQ ID NO: 2022617 - RNA, 16 nt, Human
cugcagggccaagcac

SEQ ID NO: 2022618 - RNA, 15 nt, Human
cugcagggacugcca

SEQ ID NO: 2022619 - RNA, 17 nt, Human
cugcagggacugccagu

SEQ ID NO: 2022620 - RNA, 14 nt, Human
cugccucuucucua

SEQ ID NO: 2022621 - RNA, 23 nt, Human
cugccugaagucacacagugagu

SEQ ID NO: 2022622 - RNA, 13 nt, Human
cugccucuucucu

SEQ ID NO: 2022623 - RNA, 12 nt, Human
cugccucuuccu

SEQ ID NO: 2022624 - RNA, 14 nt, Human
cugccucucugcag

SEQ ID NO: 2022625 - RNA, 19 nt, Human
cugccucuccgccccugag

SEQ ID NO: 2022626 - RNA, 21 nt, Human
cugccucuccgccccugagcc

SEQ ID NO: 2022627 - RNA, 22 nt, Human
cugccucuccgccccugagccc

SEQ ID NO: 2022628 - RNA, 23 nt, Human
cugccucuccgccccugagccca

SEQ ID NO: 2022629 - RNA, 13 nt, Human
cugccucucugca

SEQ ID NO: 2022630 - RNA, 12 nt, Human
cugccucucugc

SEQ ID NO: 2022631 - RNA, 13 nt, Human
cugccugcccagg

SEQ ID NO: 2022632 - RNA, 14 nt, Human
cugccugcccaggc

SEQ ID NO: 2022633 - RNA, 15 nt, Human
cugccugcccaggcc

SEQ ID NO: 2022634 - RNA, 23 nt, Human
cugccugaggggcagccugccuu

SEQ ID NO: 2022635 - RNA, 20 nt, Human
cugccugaggggcagccugc

SEQ ID NO: 2022636 - RNA, 22 nt, Human
cugccugaggggcagccugccu

SEQ ID NO: 2022637 - RNA, 20 nt, Human
cugccugacagagggaugga

SEQ ID NO: 2022638 - RNA, 15 nt, Human
cugccuaagugcagc

SEQ ID NO: 2022639 - RNA, 13 nt, Human
cugccuauuuuaa

SEQ ID NO: 2022640 - RNA, 12 nt, Human
cugcccugggag

SEQ ID NO: 2022641 - RNA, 13 nt, Human
cugcccugggagg

SEQ ID NO: 2022642 - RNA, 11 nt, Human
cugcccuggga

SEQ ID NO: 2022643 - RNA, 15 nt, Human
cugcccugggaggca

SEQ ID NO: 2022644 - RNA, 22 nt, Human
cugcccugggaggcagugaugg

SEQ ID NO: 2022645 - RNA, 14 nt, Human
cugccucuccgccc

SEQ ID NO: 2022646 - RNA, 22 nt, Human
cugccucaggaggcaggaccuu

SEQ ID NO: 2022647 - RNA, 23 nt, Human
cugccucaggaggcaggaccuuc

SEQ ID NO: 2022648 - RNA, 14 nt, Human
cugccucagccucc

SEQ ID NO: 2022649 - RNA, 13 nt, Human
cugccucagccuc

SEQ ID NO: 2022650 - RNA, 20 nt, Human
cugcggaaugaaccacaucu

SEQ ID NO: 2022651 - RNA, 13 nt, Human
cugccuuaaguga

SEQ ID NO: 2022652 - RNA, 16 nt, Human
cugccuuaagugagga

SEQ ID NO: 2022653 - RNA, 15 nt, Human
cugcgguccacccag

SEQ ID NO: 2022654 - RNA, 21 nt, Human
cugcggaaugaaccacaucuu

SEQ ID NO: 2022655 - RNA, 17 nt, Human
cugcgguccacccagga

SEQ ID NO: 2022656 - RNA, 16 nt, Human
cugcgguccacccagg

SEQ ID NO: 2022657 - RNA, 16 nt, Human
cugcguguucucagag

SEQ ID NO: 2022658 - RNA, 17 nt, Human
cugcguguucucagagg

SEQ ID NO: 2022659 - RNA, 14 nt, Human
cugcuccagcuguu

SEQ ID NO: 2022660 - RNA, 22 nt, Human
cugcuaaauugauguugaugca

SEQ ID NO: 2022661 - RNA, 14 nt, Human
cugcuaaauugaug

SEQ ID NO: 2022662 - RNA, 17 nt, Human
cugcuaaauugauguug

SEQ ID NO: 2022663 - RNA, 18 nt, Human
cugcuaaauugauguuga

SEQ ID NO: 2022664 - RNA, 19 nt, Human
cugcuaaauugauguugau

SEQ ID NO: 2022665 - RNA, 22 nt, Human
cugcuaaggauuagucccuggc

SEQ ID NO: 2022666 - RNA, 18 nt, Human
cugcuccucuccccagca

SEQ ID NO: 2022667 - RNA, 16 nt, Human
cugcuccugagccccc

SEQ ID NO: 2022668 - RNA, 17 nt, Human
cugcuccugagccccca

SEQ ID NO: 2022669 - RNA, 18 nt, Human
cugcuccugagcccccag

SEQ ID NO: 2022670 - RNA, 20 nt, Human
cugcuccugagcccccagcu

SEQ ID NO: 2022671 - RNA, 16 nt, Human
cugcuccuucccuugc

SEQ ID NO: 2022672 - RNA, 17 nt, Human
cugcuccuucccuugcu

SEQ ID NO: 2022673 - RNA, 14 nt, Human
cugcuccuucccuu

SEQ ID NO: 2022674 - RNA, 15 nt, Human
cugcuccuguggccu

SEQ ID NO: 2022675 - RNA, 12 nt, Human
cugcuccuuccc

SEQ ID NO: 2022676 - RNA, 11 nt, Human
cugcucugacg

SEQ ID NO: 2022677 - RNA, 16 nt, Human
cugcuccucuccccag

SEQ ID NO: 2022678 - RNA, 17 nt, Human
cugcuccucuccccagc

SEQ ID NO: 2022679 - RNA, 14 nt, Human
cugcuccagcucug

SEQ ID NO: 2022680 - RNA, 19 nt, Human
cugcuccagcucuggcaug

SEQ ID NO: 2022681 - RNA, 17 nt, Human
cugcucccccuuuuccc

SEQ ID NO: 2022682 - RNA, 15 nt, Human
cugcuccagcuguuc

SEQ ID NO: 2022683 - RNA, 19 nt, Human
cugcuccccuaaagccuca

SEQ ID NO: 2022684 - RNA, 18 nt, Human
cugcucccccuuuucccu

SEQ ID NO: 2022685 - RNA, 19 nt, Human
cugcucccccuuuucccuc

SEQ ID NO: 2022686 - RNA, 22 nt, Human
cugcucccuccgggucuuccua

SEQ ID NO: 2022687 - RNA, 16 nt, Human
cugcccugcccaccug

SEQ ID NO: 2022688 - RNA, 15 nt, Human
cugcccugcccaccu

SEQ ID NO: 2022689 - RNA, 14 nt, Human
cugcccugcccacc

SEQ ID NO: 2022690 - RNA, 13 nt, Human
cugcccugcccac

SEQ ID NO: 2022691 - RNA, 22 nt, Human
cugcccuccacacccgcgcccc

SEQ ID NO: 2022692 - RNA, 11 nt, Human
cugcccggcug

SEQ ID NO: 2022693 - RNA, 23 nt, Human
cugccccugcuacugccaaccuc

SEQ ID NO: 2022694 - RNA, 19 nt, Human
cugcccuccaagaccuucu

SEQ ID NO: 2022695 - RNA, 15 nt, Human
cugcccggcugcgga

SEQ ID NO: 2022696 - RNA, 17 nt, Human
cugccccuggcagcccc

SEQ ID NO: 2022697 - RNA, 16 nt, Human
cugccccuggcagccc

SEQ ID NO: 2022698 - RNA, 15 nt, Human
cugccccuggcagcc

SEQ ID NO: 2022699 - RNA, 14 nt, Human
cugccccuggcagc

SEQ ID NO: 2022700 - RNA, 19 nt, Human
cugcccaggccugccuguu

SEQ ID NO: 2022701 - RNA, 18 nt, Human
cugcccaggccugccugu

SEQ ID NO: 2022702 - RNA, 13 nt, Human
cugcccaggcccc

SEQ ID NO: 2022703 - RNA, 19 nt, Human
cugcccaaccugcucuccu

SEQ ID NO: 2022704 - RNA, 20 nt, Human
cugcccagcuuuucauugcu

SEQ ID NO: 2022705 - RNA, 17 nt, Human
cugcccaaccugcucuc

SEQ ID NO: 2022706 - RNA, 16 nt, Human
cugccauuucugagau

SEQ ID NO: 2022707 - RNA, 23 nt, Human
cugccaugccaggaaccuguccu

SEQ ID NO: 2022708 - RNA, 19 nt, Human
cugccaggaagccagcagg

SEQ ID NO: 2022709 - RNA, 18 nt, Human
cugccaggaagccagcag

SEQ ID NO: 2022710 - RNA, 16 nt, Human
cugccaggaagccagc

SEQ ID NO: 2022711 - RNA, 15 nt, Human
cugccaggaagccag

SEQ ID NO: 2022712 - RNA, 19 nt, Human
cugccagccgagauagcca

SEQ ID NO: 2022713 - RNA, 19 nt, Human
cugccaugccagcuuaucu

SEQ ID NO: 2022714 - RNA, 22 nt, Human
cugccaggcacaggcagggcag

SEQ ID NO: 2022715 - RNA, 14 nt, Human
cugccaugccagga

SEQ ID NO: 2022716 - RNA, 16 nt, Human
cugccaugccaggaac

SEQ ID NO: 2022717 - RNA, 17 nt, Human
cugccaugccaggaacc

SEQ ID NO: 2022718 - RNA, 18 nt, Human
cugccaugccaggaaccu

SEQ ID NO: 2022719 - RNA, 22 nt, Human
cugccaugccaggaaccugucc

SEQ ID NO: 2022720 - RNA, 17 nt, Human
cugccaugccagcuuau

SEQ ID NO: 2022721 - RNA, 18 nt, Human
cugccaggcacaggcagg

SEQ ID NO: 2022722 - RNA, 19 nt, Human
cugccaggcacaggcaggg

SEQ ID NO: 2022723 - RNA, 20 nt, Human
cugccaggcacaggcagggc

SEQ ID NO: 2022724 - RNA, 21 nt, Human
cugccaggcacaggcagggca

SEQ ID NO: 2022725 - RNA, 13 nt, Human
cugccaggcacag

SEQ ID NO: 2022726 - RNA, 14 nt, Human
cugccaggcacagg

SEQ ID NO: 2022727 - RNA, 15 nt, Human
cugccaggcacaggc

SEQ ID NO: 2022728 - RNA, 16 nt, Human
cugccaggcacaggca

SEQ ID NO: 2022729 - RNA, 17 nt, Human
cugccaggcacaggcag

SEQ ID NO: 2022730 - RNA, 15 nt, Human
cugccacccugggga

SEQ ID NO: 2022731 - RNA, 16 nt, Human
cugccacccuggggag

SEQ ID NO: 2022732 - RNA, 20 nt, Human
cugccacccuggggagaaag

SEQ ID NO: 2022733 - RNA, 18 nt, Human
cugcagggcuuuaaaauu

SEQ ID NO: 2022734 - RNA, 19 nt, Human
cugcagggcuuuaaaauuc

SEQ ID NO: 2022735 - RNA, 13 nt, Human
cugccacacuuca

SEQ ID NO: 2022736 - RNA, 17 nt, Human
cugccacacuucaggcu

SEQ ID NO: 2022737 - RNA, 22 nt, Human
cugccacacuucaggcucuucu

SEQ ID NO: 2022738 - RNA, 19 nt, Human
cugccaccacgcccggcua

SEQ ID NO: 2022739 - RNA, 17 nt, Human
ccucaccuuucccaucu

SEQ ID NO: 2022740 - RNA, 16 nt, Human
ccucacgugcaaagcc

SEQ ID NO: 2022741 - RNA, 12 nt, Human
ccucaccccacu

SEQ ID NO: 2022742 - RNA, 22 nt, Human
ccucacaguccuuaccagcaga

SEQ ID NO: 2022743 - RNA, 20 nt, Human
ccucacaguccuuaccagca

SEQ ID NO: 2022744 - RNA, 15 nt, Human
ccucaccccacugug

SEQ ID NO: 2022745 - RNA, 19 nt, Human
ccuauguagacaauauaag

SEQ ID NO: 2022746 - RNA, 15 nt, Human
ccucacaggccccag

SEQ ID NO: 2022747 - RNA, 17 nt, Human
ccucacaguccuuacca

SEQ ID NO: 2022748 - RNA, 12 nt, Human
ccucaauuucaa

SEQ ID NO: 2022749 - RNA, 19 nt, Human
ccuaucaaaaagauaucaa

SEQ ID NO: 2022750 - RNA, 14 nt, Human
ccuauauuuuccug

SEQ ID NO: 2022751 - RNA, 16 nt, Human
ccuaucaaaaagauau

SEQ ID NO: 2022752 - RNA, 21 nt, Human
ccuagagagugugauguucac

SEQ ID NO: 2022753 - RNA, 17 nt, Human
ccuaucagaaguuucuc

SEQ ID NO: 2022754 - RNA, 23 nt, Human
ccgcuuucuacccagcgagcccu

SEQ ID NO: 2022755 - RNA, 22 nt, Human
ccgggaggcagagguugcagug

SEQ ID NO: 2022756 - RNA, 13 nt, Human
ccggcuggccugg

SEQ ID NO: 2022757 - RNA, 15 nt, Human
ccgggcacucagaag

SEQ ID NO: 2022758 - RNA, 12 nt, Human
ccggcuggccug

SEQ ID NO: 2022759 - RNA, 12 nt, Human
ccggcugcccuu

SEQ ID NO: 2022760 - RNA, 20 nt, Human
ccgggcacucagaagacacu

SEQ ID NO: 2022761 - RNA, 16 nt, Human
ccgggaugggagccgg

SEQ ID NO: 2022762 - RNA, 17 nt, Human
ccgggcaaacuggccgc

SEQ ID NO: 2022763 - RNA, 19 nt, Human
ccgggccuggagaacuaga

SEQ ID NO: 2022764 - RNA, 14 nt, Human
ccgugccuucagcu

SEQ ID NO: 2022765 - RNA, 15 nt, Human
ccgugccuucagcuc

SEQ ID NO: 2022766 - RNA, 16 nt, Human
ccgugccuucagcucu

SEQ ID NO: 2022767 - RNA, 17 nt, Human
ccgugccuucagcucua

SEQ ID NO: 2022768 - RNA, 21 nt, Human
ccuaaaccaaaaacugaaagu

SEQ ID NO: 2022769 - RNA, 11 nt, Human
ccuaaaaauaa

SEQ ID NO: 2022770 - RNA, 12 nt, Human
ccuaaaaauaaa

SEQ ID NO: 2022771 - RNA, 14 nt, Human
ccuaaaaauaaagc

SEQ ID NO: 2022772 - RNA, 15 nt, Human
ccuaaaaauaaagca

SEQ ID NO: 2022773 - RNA, 13 nt, Human
ccuaaaaauuggu

SEQ ID NO: 2022774 - RNA, 21 nt, Human
ccguuugauuugucacugcuu

SEQ ID NO: 2022775 - RNA, 23 nt, Human
ccguuugauuugucacugcuuca

SEQ ID NO: 2022776 - RNA, 15 nt, Human
ccguggcuucccgcu

SEQ ID NO: 2022777 - RNA, 21 nt, Human
ccguggcuucccgcucagccc

SEQ ID NO: 2022778 - RNA, 23 nt, Human
ccguggcuucccgcucagcccuc

SEQ ID NO: 2022779 - RNA, 13 nt, Human
ccuaauuccacag

SEQ ID NO: 2022780 - RNA, 16 nt, Human
ccuaaagauuuugauc

SEQ ID NO: 2022781 - RNA, 13 nt, Human
ccuaaagccucaa

SEQ ID NO: 2022782 - RNA, 19 nt, Human
ccuaaagccucaaaacaaa

SEQ ID NO: 2022783 - RNA, 12 nt, Human
ccuaaagagaua

SEQ ID NO: 2022784 - RNA, 15 nt, Human
ccuaaagauuuugau

SEQ ID NO: 2022785 - RNA, 14 nt, Human
ccuaauuccacagc

SEQ ID NO: 2022786 - RNA, 15 nt, Human
ccuaauuccacagcu

SEQ ID NO: 2022787 - RNA, 16 nt, Human
ccuaauuccacagcug

SEQ ID NO: 2022788 - RNA, 17 nt, Human
ccuaauuccacagcugc

SEQ ID NO: 2022789 - RNA, 17 nt, Human
ccuaauucuaugccugu

SEQ ID NO: 2022790 - RNA, 12 nt, Human
ccuaccugguaa

SEQ ID NO: 2022791 - RNA, 19 nt, Human
cccuuaccucggugccuuc

SEQ ID NO: 2022792 - RNA, 17 nt, Human
cccuuaccacugcucug

SEQ ID NO: 2022793 - RNA, 21 nt, Human
cccuuaccacugcucugauga

SEQ ID NO: 2022794 - RNA, 13 nt, Human
cccuuccucucca

SEQ ID NO: 2022795 - RNA, 15 nt, Human
cccuuccuccauccu

SEQ ID NO: 2022796 - RNA, 16 nt, Human
cccuuccucuccacug

SEQ ID NO: 2022797 - RNA, 17 nt, Human
cccuuccucuccacugc

SEQ ID NO: 2022798 - RNA, 20 nt, Human
cccuuccucuccacugccuu

SEQ ID NO: 2022799 - RNA, 18 nt, Human
cccuugccgucuaccuga

SEQ ID NO: 2022800 - RNA, 17 nt, Human
cccuugccgucuaccug

SEQ ID NO: 2022801 - RNA, 12 nt, Human
cccuugcagccg

SEQ ID NO: 2022802 - RNA, 22 nt, Human
cccuugccgucuaccugagggg

SEQ ID NO: 2022803 - RNA, 12 nt, Human
cccuuggcucuc

SEQ ID NO: 2022804 - RNA, 16 nt, Human
cccuuguggucccacc

SEQ ID NO: 2022805 - RNA, 14 nt, Human
cccuugugguccca

SEQ ID NO: 2022806 - RNA, 18 nt, Human
cccuuggggagcaggcuc

SEQ ID NO: 2022807 - RNA, 18 nt, Human
cccuuguggucccacccc

SEQ ID NO: 2022808 - RNA, 20 nt, Human
cccuuguggucccaccccac

SEQ ID NO: 2022809 - RNA, 20 nt, Human
cccuuugacgccaucccagc

SEQ ID NO: 2022810 - RNA, 13 nt, Human
cccuuucuuccuc

SEQ ID NO: 2022811 - RNA, 14 nt, Human
cccuuucuucuccc

SEQ ID NO: 2022812 - RNA, 17 nt, Human
cccuuucuucuccccca

SEQ ID NO: 2022813 - RNA, 21 nt, Human
cccuuucuucucccccauccu

SEQ ID NO: 2022814 - RNA, 18 nt, Human
cccuuucuacuuccaaga

SEQ ID NO: 2022815 - RNA, 12 nt, Human
cccuuucuuccu

SEQ ID NO: 2022816 - RNA, 22 nt, Human
cccuuucugggcaccggggccu

SEQ ID NO: 2022817 - RNA, 17 nt, Human
cccuuuguccuccugcu

SEQ ID NO: 2022818 - RNA, 21 nt, Human
cccuuuguccuccugcugcca

SEQ ID NO: 2022819 - RNA, 22 nt, Human
cccuuuguccuccugcugccag

SEQ ID NO: 2022820 - RNA, 13 nt, Human
cccuuuucuguuu

SEQ ID NO: 2022821 - RNA, 11 nt, Human
cccuuuuccuu

SEQ ID NO: 2022822 - RNA, 9 nt, Human
cccuuuucc

SEQ ID NO: 2022823 - RNA, 18 nt, Human
cccuuuuuuggcugcuga

SEQ ID NO: 2022824 - RNA, 17 nt, Human
cccuuuuuuggcugcug

SEQ ID NO: 2022825 - RNA, 22 nt, Human
ccgagauagccaaggccaaagg

SEQ ID NO: 2022826 - RNA, 19 nt, Human
ccgagauagccaaggccaa

SEQ ID NO: 2022827 - RNA, 18 nt, Human
ccgagauagccaaggcca

SEQ ID NO: 2022828 - RNA, 17 nt, Human
ccgagacggcacugaga

SEQ ID NO: 2022829 - RNA, 17 nt, Human
ccgagaaggaagccucc

SEQ ID NO: 2022830 - RNA, 19 nt, Human
cccuuuuuuggcugcugaa

SEQ ID NO: 2022831 - RNA, 20 nt, Human
ccgacuugugcacaggcaga

SEQ ID NO: 2022832 - RNA, 18 nt, Human
ccgacuugugcacaggca

SEQ ID NO: 2022833 - RNA, 19 nt, Human
ccgacuugugcacaggcag

SEQ ID NO: 2022834 - RNA, 17 nt, Human
ccgaggccuucucugaa

SEQ ID NO: 2022835 - RNA, 18 nt, Human
ccgagaucacgccacugc

SEQ ID NO: 2022836 - RNA, 15 nt, Human
ccgccccugagccca

SEQ ID NO: 2022837 - RNA, 16 nt, Human
ccgccccugagcccac

SEQ ID NO: 2022838 - RNA, 17 nt, Human
ccgccccugagcccacu

SEQ ID NO: 2022839 - RNA, 15 nt, Human
ccgaucgccagcaaa

SEQ ID NO: 2022840 - RNA, 17 nt, Human
ccgaugcaaacauugga

SEQ ID NO: 2022841 - RNA, 20 nt, Human
ccgaugcaaacauuggaaga

SEQ ID NO: 2022842 - RNA, 13 nt, Human
ccgccccugagcc

SEQ ID NO: 2022843 - RNA, 14 nt, Human
ccgccccugagccc

SEQ ID NO: 2022844 - RNA, 22 nt, Human
ccgagucucuucuccacuggau

SEQ ID NO: 2022845 - RNA, 19 nt, Human
ccgauccuccccuggacuc

SEQ ID NO: 2022846 - RNA, 20 nt, Human
ccgauccuccccuggacucc

SEQ ID NO: 2022847 - RNA, 22 nt, Human
ccgaguguguuucauccuuccc

SEQ ID NO: 2022848 - RNA, 23 nt, Human
ccgaguguguuucauccuuccca

SEQ ID NO: 2022849 - RNA, 20 nt, Human
ccccucagggucccuggugg

SEQ ID NO: 2022850 - RNA, 18 nt, Human
ccccucagggucccuggu

SEQ ID NO: 2022851 - RNA, 17 nt, Human
ccccucagggucccugg

SEQ ID NO: 2022852 - RNA, 19 nt, Human
ccccuaaagccucaaaaca

SEQ ID NO: 2022853 - RNA, 21 nt, Human
cccugguggcagugggagcug

SEQ ID NO: 2022854 - RNA, 21 nt, Human
cccugguuuccugcccuggga

SEQ ID NO: 2022855 - RNA, 15 nt, Human
cccugguggcagugg

SEQ ID NO: 2022856 - RNA, 16 nt, Human
cccugguggcaguggg

SEQ ID NO: 2022857 - RNA, 19 nt, Human
cccugguggcagugggagc

SEQ ID NO: 2022858 - RNA, 17 nt, Human
ccccucccccagccacu

SEQ ID NO: 2022859 - RNA, 18 nt, Human
ccccucccccagccacuc

SEQ ID NO: 2022860 - RNA, 16 nt, Human
cccugugggcccccaa

SEQ ID NO: 2022861 - RNA, 21 nt, Human
cccuguagagugggagcugag

SEQ ID NO: 2022862 - RNA, 22 nt, Human
cccugguuuccugcccugggag

SEQ ID NO: 2022863 - RNA, 23 nt, Human
cccugguuuccugcccugggagg

SEQ ID NO: 2022864 - RNA, 18 nt, Human
cccugugggcccccaaau

SEQ ID NO: 2022865 - RNA, 13 nt, Human
cccugugugaaug

SEQ ID NO: 2022866 - RNA, 13 nt, Human
cccuguguuaauu

SEQ ID NO: 2022867 - RNA, 16 nt, Human
cccuguguuaauuuaa

SEQ ID NO: 2022868 - RNA, 15 nt, Human
cccuguuuguuucug

SEQ ID NO: 2022869 - RNA, 16 nt, Human
cccuguuucagaggcu

SEQ ID NO: 2022870 - RNA, 19 nt, Human
cccuguuucagaggcucag

SEQ ID NO: 2022871 - RNA, 16 nt, Human
cccuguuuguuucuga

SEQ ID NO: 2022872 - RNA, 12 nt, Human
ccccccugucac

SEQ ID NO: 2022873 - RNA, 21 nt, Human
cccccgcugucagccauuccu

SEQ ID NO: 2022874 - RNA, 13 nt, Human
cccccucugcccu

SEQ ID NO: 2022875 - RNA, 14 nt, Human
cccccucugcccug

SEQ ID NO: 2022876 - RNA, 16 nt, Human
cccccucugcccugcg

SEQ ID NO: 2022877 - RNA, 13 nt, Human
ccccgucucaggu

SEQ ID NO: 2022878 - RNA, 21 nt, Human
ccccgucucugguuccucccc

SEQ ID NO: 2022879 - RNA, 16 nt, Human
ccccgucccccucugg

SEQ ID NO: 2022880 - RNA, 20 nt, Human
ccccgucccccucuggcucc

SEQ ID NO: 2022881 - RNA, 13 nt, Human
ccccccacuccca

SEQ ID NO: 2022882 - RNA, 12 nt, Human
ccccccagcuuc

SEQ ID NO: 2022883 - RNA, 11 nt, Human
cccccaggucu

SEQ ID NO: 2022884 - RNA, 16 nt, Human
cccccaucucuucugg

SEQ ID NO: 2022885 - RNA, 19 nt, Human
cccccagcuucacuucuga

SEQ ID NO: 2022886 - RNA, 14 nt, Human
cccccagcuuccag

SEQ ID NO: 2022887 - RNA, 18 nt, Human
cccccagcuuccagcagg

SEQ ID NO: 2022888 - RNA, 12 nt, Human
cccccagcccca

SEQ ID NO: 2022889 - RNA, 23 nt, Human
cccccaaccaaguggcucccaca

SEQ ID NO: 2022890 - RNA, 22 nt, Human
ccccaggaggccagccuugacc

SEQ ID NO: 2022891 - RNA, 21 nt, Human
ccccaggaggccagccuugac

SEQ ID NO: 2022892 - RNA, 15 nt, Human
ccccaggaggccagc

SEQ ID NO: 2022893 - RNA, 14 nt, Human
ccccaggaggccag

SEQ ID NO: 2022894 - RNA, 11 nt, Human
ccccagcuccc

SEQ ID NO: 2022895 - RNA, 10 nt, Human
ccccagcucc

SEQ ID NO: 2022896 - RNA, 18 nt, Human
ccccagcuucacuucuga

SEQ ID NO: 2022897 - RNA, 14 nt, Human
ccccagcuuccagc

SEQ ID NO: 2022898 - RNA, 16 nt, Human
ccccagcuuccagcag

SEQ ID NO: 2022899 - RNA, 17 nt, Human
ccccagcuuccagcagg

SEQ ID NO: 2022900 - RNA, 18 nt, Human
ccccagcuuccagcagga

SEQ ID NO: 2022901 - RNA, 19 nt, Human
ccccagcuuccagcaggag

SEQ ID NO: 2022902 - RNA, 21 nt, Human
ccccagcuuccagcaggaggg

SEQ ID NO: 2022903 - RNA, 21 nt, Human
ccccagcuucucagcucgcug

SEQ ID NO: 2022904 - RNA, 15 nt, Human
ccccagcuugggcag

SEQ ID NO: 2022905 - RNA, 13 nt, Human
ccccaggaggcca

SEQ ID NO: 2022906 - RNA, 20 nt, Human
ccccagcgcugacgugucag

SEQ ID NO: 2022907 - RNA, 19 nt, Human
ccccagcgagagucccugc

SEQ ID NO: 2022908 - RNA, 22 nt, Human
ccccagccucaaauccaggacc

SEQ ID NO: 2022909 - RNA, 20 nt, Human
ccccagcccuuccucugcuc

SEQ ID NO: 2022910 - RNA, 14 nt, Human
ccccacuggugaca

SEQ ID NO: 2022911 - RNA, 19 nt, Human
ccccagcccuccuuaucaa

SEQ ID NO: 2022912 - RNA, 18 nt, Human
ccccagcccuuccucugc

SEQ ID NO: 2022913 - RNA, 13 nt, Human
ccccacuggugac

SEQ ID NO: 2022914 - RNA, 12 nt, Human
ccccacugguga

SEQ ID NO: 2022915 - RNA, 20 nt, Human
ccugaggcccuucucuccag

SEQ ID NO: 2022916 - RNA, 19 nt, Human
ccugaggcccuucucucca

SEQ ID NO: 2022917 - RNA, 17 nt, Human
ccugaggcccuucucuc

SEQ ID NO: 2022918 - RNA, 16 nt, Human
ccugaggcccuucucu

SEQ ID NO: 2022919 - RNA, 22 nt, Human
ccugaggcccuucucuccagcc

SEQ ID NO: 2022920 - RNA, 21 nt, Human
ccugaggcccuucucuccagc

SEQ ID NO: 2022921 - RNA, 19 nt, Human
ccugaggcagguccccaga

SEQ ID NO: 2022922 - RNA, 23 nt, Human
ccugaggcccuucucuccagccc

SEQ ID NO: 2022923 - RNA, 16 nt, Human
ccugacaacacucauu

SEQ ID NO: 2022924 - RNA, 15 nt, Human
ccugacaacacucau

SEQ ID NO: 2022925 - RNA, 14 nt, Human
ccugacaacacuca

SEQ ID NO: 2022926 - RNA, 12 nt, Human
ccugacaacacu

SEQ ID NO: 2022927 - RNA, 14 nt, Human
ccugaggcccagag

SEQ ID NO: 2022928 - RNA, 13 nt, Human
ccugaggcccaga

SEQ ID NO: 2022929 - RNA, 18 nt, Human
ccugaggcagguccccag

SEQ ID NO: 2022930 - RNA, 12 nt, Human
ccugaggcccag

SEQ ID NO: 2022931 - RNA, 18 nt, Human
ccugaggcuccacuuggu

SEQ ID NO: 2022932 - RNA, 20 nt, Human
ccugaggcuccacuuggucu

SEQ ID NO: 2022933 - RNA, 14 nt, Human
ccugaugcuucuuc

SEQ ID NO: 2022934 - RNA, 18 nt, Human
ccugaugcuucuucagag

SEQ ID NO: 2022935 - RNA, 17 nt, Human
ccugaugcuucuucaga

SEQ ID NO: 2022936 - RNA, 23 nt, Human
ccugauugugucucuugguccug

SEQ ID NO: 2022937 - RNA, 19 nt, Human
ccugauguguccucaggga

SEQ ID NO: 2022938 - RNA, 21 nt, Human
ccugauguguccucagggagc

SEQ ID NO: 2022939 - RNA, 21 nt, Human
ccucuucccugguaagaaaaa

SEQ ID NO: 2022940 - RNA, 17 nt, Human
ccucuuaugggcugggu

SEQ ID NO: 2022941 - RNA, 22 nt, Human
ccucuuuggucuacacugugcu

SEQ ID NO: 2022942 - RNA, 11 nt, Human
ccucuuccucu

SEQ ID NO: 2022943 - RNA, 15 nt, Human
ccucuuccucccuca

SEQ ID NO: 2022944 - RNA, 16 nt, Human
ccucuuccucccucau

SEQ ID NO: 2022945 - RNA, 19 nt, Human
ccucuuccucccucauucc

SEQ ID NO: 2022946 - RNA, 10 nt, Human
ccucuuccuc

SEQ ID NO: 2022947 - RNA, 13 nt, Human
ccucuuccuccug

SEQ ID NO: 2022948 - RNA, 16 nt, Human
ccucuuccuccugaca

SEQ ID NO: 2022949 - RNA, 23 nt, Human
ccugaaagaggaaugaaguacuc

SEQ ID NO: 2022950 - RNA, 18 nt, Human
ccugaaagaggaaugaag

SEQ ID NO: 2022951 - RNA, 20 nt, Human
ccugaacaggauauucucac

SEQ ID NO: 2022952 - RNA, 17 nt, Human
ccugaacaacgagccuu

SEQ ID NO: 2022953 - RNA, 23 nt, Human
ccugaaccacaggagaggauggc

SEQ ID NO: 2022954 - RNA, 23 nt, Human
ccugaagcuaucguaaaauuaag

SEQ ID NO: 2022955 - RNA, 22 nt, Human
ccugaagcuaucguaaaauuaa

SEQ ID NO: 2022956 - RNA, 20 nt, Human
ccugaagcuaucguaaaauu

SEQ ID NO: 2022957 - RNA, 21 nt, Human
ccugaagacucauucuucugu

SEQ ID NO: 2022958 - RNA, 13 nt, Human
ccugaaggccccg

SEQ ID NO: 2022959 - RNA, 15 nt, Human
ccugaagucacacag

SEQ ID NO: 2022960 - RNA, 16 nt, Human
ccugaagucacacagu

SEQ ID NO: 2022961 - RNA, 17 nt, Human
ccugaagucacacagug

SEQ ID NO: 2022962 - RNA, 19 nt, Human
ccugaauccaaaagaaaaa

SEQ ID NO: 2022963 - RNA, 23 nt, Human
ccucuguacagagcccacgcccc

SEQ ID NO: 2022964 - RNA, 18 nt, Human
ccucuguacagagcccac

SEQ ID NO: 2022965 - RNA, 17 nt, Human
ccucuguacagagccca

SEQ ID NO: 2022966 - RNA, 16 nt, Human
ccucuguacagagccc

SEQ ID NO: 2022967 - RNA, 15 nt, Human
ccucuguacagagcc

SEQ ID NO: 2022968 - RNA, 14 nt, Human
ccucuguacagagc

SEQ ID NO: 2022969 - RNA, 17 nt, Human
ccucuguccaggcacug

SEQ ID NO: 2022970 - RNA, 14 nt, Human
ccucuuaugggcug

SEQ ID NO: 2022971 - RNA, 16 nt, Human
ccucuuaugggcuggg

SEQ ID NO: 2022972 - RNA, 15 nt, Human
ccucuuaugggcugg

SEQ ID NO: 2022973 - RNA, 14 nt, Human
ccucuuagaaaaac

SEQ ID NO: 2022974 - RNA, 21 nt, Human
ccucuguucugcacacagcac

SEQ ID NO: 2022975 - RNA, 21 nt, Human
ccucugcacuccccugcuggg

SEQ ID NO: 2022976 - RNA, 20 nt, Human
ccucugcacuccccugcugg

SEQ ID NO: 2022977 - RNA, 15 nt, Human
ccucugcacuccccu

SEQ ID NO: 2022978 - RNA, 19 nt, Human
ccucugcacuccccugcug

SEQ ID NO: 2022979 - RNA, 14 nt, Human
ccucugcacucccc

SEQ ID NO: 2022980 - RNA, 22 nt, Human
ccucugcacuccccugcugggu

SEQ ID NO: 2022981 - RNA, 16 nt, Human
ccucugcauaaauauu

SEQ ID NO: 2022982 - RNA, 19 nt, Human
ccucugcacaagcugcacc

SEQ ID NO: 2022983 - RNA, 17 nt, Human
ccucugcacaagcugca

SEQ ID NO: 2022984 - RNA, 20 nt, Human
ccucugcacaagcugcaccc

SEQ ID NO: 2022985 - RNA, 15 nt, Human
ccucugcacaagcug

SEQ ID NO: 2022986 - RNA, 11 nt, Human
ccucugcacaa

SEQ ID NO: 2022987 - RNA, 17 nt, Human
ccucugacacacagcuc

SEQ ID NO: 2022988 - RNA, 18 nt, Human
ccucugacacacagcucu

SEQ ID NO: 2022989 - RNA, 12 nt, Human
ccucugggacug

SEQ ID NO: 2022990 - RNA, 11 nt, Human
ccucugggccc

SEQ ID NO: 2022991 - RNA, 16 nt, Human
ccucuggcuccagcug

SEQ ID NO: 2022992 - RNA, 17 nt, Human
ccucuggcuccagcugg

SEQ ID NO: 2022993 - RNA, 16 nt, Human
ccucuggcucuacaca

SEQ ID NO: 2022994 - RNA, 18 nt, Human
ccuccuuaucaaaggaca

SEQ ID NO: 2022995 - RNA, 20 nt, Human
ccuccuuaucaaaggacacc

SEQ ID NO: 2022996 - RNA, 23 nt, Human
ccuccugugugugcgccuacagg

SEQ ID NO: 2022997 - RNA, 12 nt, Human
ccucucacugcc

SEQ ID NO: 2022998 - RNA, 14 nt, Human
ccucucacugccuc

SEQ ID NO: 2022999 - RNA, 12 nt, Human
ccucucccauca

SEQ ID NO: 2023000 - RNA, 12 nt, Human
ccucucccaggg

SEQ ID NO: 2023001 - RNA, 19 nt, Human
ccucuccacugccuucgau

SEQ ID NO: 2023002 - RNA, 12 nt, Human
ccucuccacugc

SEQ ID NO: 2023003 - RNA, 13 nt, Human
ccucuccacugcc

SEQ ID NO: 2023004 - RNA, 14 nt, Human
ccucuccacugccu

SEQ ID NO: 2023005 - RNA, 16 nt, Human
ccucuccacugccuuc

SEQ ID NO: 2023006 - RNA, 23 nt, Human
ccucugaaaaccaauguucucuc

SEQ ID NO: 2023007 - RNA, 16 nt, Human
ccucugacacacagcu

SEQ ID NO: 2023008 - RNA, 18 nt, Human
ccucuccccgcaguguuu

SEQ ID NO: 2023009 - RNA, 13 nt, Human
ccucucugcccua

SEQ ID NO: 2023010 - RNA, 15 nt, Human
ccucagucuggcccu

SEQ ID NO: 2023011 - RNA, 14 nt, Human
ccucagucucccuc

SEQ ID NO: 2023012 - RNA, 15 nt, Human
ccucagggucccugg

SEQ ID NO: 2023013 - RNA, 21 nt, Human
ccucagguaaucgaccugccu

SEQ ID NO: 2023014 - RNA, 16 nt, Human
ccucaggugagaagca

SEQ ID NO: 2023015 - RNA, 22 nt, Human
ccucagguaaucgaccugccuc

SEQ ID NO: 2023016 - RNA, 23 nt, Human
ccucagguaaucgaccugccucg

SEQ ID NO: 2023017 - RNA, 22 nt, Human
ccucaggugauccacccaccuc

SEQ ID NO: 2023018 - RNA, 17 nt, Human
ccucaggugauccaccc

SEQ ID NO: 2023019 - RNA, 19 nt, Human
ccucaggugauccacccac

SEQ ID NO: 2023020 - RNA, 16 nt, Human
ccucagcauccuggca

SEQ ID NO: 2023021 - RNA, 17 nt, Human
ccucagcauccuggcac

SEQ ID NO: 2023022 - RNA, 14 nt, Human
ccucagcauccugg

SEQ ID NO: 2023023 - RNA, 22 nt, Human
ccucacuaucccggcugcccuu

SEQ ID NO: 2023024 - RNA, 16 nt, Human
ccucagaaaaugagua

SEQ ID NO: 2023025 - RNA, 21 nt, Human
ccucacuaggcuucugguuga

SEQ ID NO: 2023026 - RNA, 21 nt, Human
ccucacuaucccggcugcccu

SEQ ID NO: 2023027 - RNA, 21 nt, Human
ccucaggccugggggcugggc

SEQ ID NO: 2023028 - RNA, 14 nt, Human
ccucaggccugggg

SEQ ID NO: 2023029 - RNA, 11 nt, Human
ccucaggccug

SEQ ID NO: 2023030 - RNA, 14 nt, Human
ccucagggucccug

SEQ ID NO: 2023031 - RNA, 22 nt, Human
ccuccucccacugcccacuggc

SEQ ID NO: 2023032 - RNA, 19 nt, Human
ccuccucccucccagcucc

SEQ ID NO: 2023033 - RNA, 13 nt, Human
ccucccugccagu

SEQ ID NO: 2023034 - RNA, 14 nt, Human
ccuccucccacugc

SEQ ID NO: 2023035 - RNA, 15 nt, Human
ccuccucccacugcc

SEQ ID NO: 2023036 - RNA, 16 nt, Human
ccucccucccucuuuc

SEQ ID NO: 2023037 - RNA, 15 nt, Human
ccucccucccucuuu

SEQ ID NO: 2023038 - RNA, 13 nt, Human
ccucccucccucu

SEQ ID NO: 2023039 - RNA, 16 nt, Human
ccucccggugcccaag

SEQ ID NO: 2023040 - RNA, 17 nt, Human
ccuccccucuccuuccu

SEQ ID NO: 2023041 - RNA, 17 nt, Human
ccucccggcccugccug

SEQ ID NO: 2023042 - RNA, 18 nt, Human
ccucccggcccugccugc

SEQ ID NO: 2023043 - RNA, 22 nt, Human
ccucccggcccugccugcuggu

SEQ ID NO: 2023044 - RNA, 13 nt, Human
ccucccggugccc

SEQ ID NO: 2023045 - RNA, 13 nt, Human
ccuccugccucga

SEQ ID NO: 2023046 - RNA, 22 nt, Human
ccuccugaguugaagucaugcu

SEQ ID NO: 2023047 - RNA, 14 nt, Human
ccuccuccuggacu

SEQ ID NO: 2023048 - RNA, 13 nt, Human
ccuccugugugug

SEQ ID NO: 2023049 - RNA, 18 nt, Human
ccuccuguggccugccag

SEQ ID NO: 2023050 - RNA, 15 nt, Human
ccuccugugugugcg

SEQ ID NO: 2023051 - RNA, 22 nt, Human
ccuccugugugugcgccuacag

SEQ ID NO: 2023052 - RNA, 17 nt, Human
ccuccugggaaugaagc

SEQ ID NO: 2023053 - RNA, 13 nt, Human
ccuccuggacucc

SEQ ID NO: 2023054 - RNA, 13 nt, Human
ccuccugggcuaa

SEQ ID NO: 2023055 - RNA, 23 nt, Human
ccugcgucucauacucaccucac

SEQ ID NO: 2023056 - RNA, 22 nt, Human
ccugcaaaguacagguacuuug

SEQ ID NO: 2023057 - RNA, 23 nt, Human
ccugcaaaguacagguacuuugu

SEQ ID NO: 2023058 - RNA, 20 nt, Human
ccugcaaccaaacucccauc

SEQ ID NO: 2023059 - RNA, 22 nt, Human
ccugcaaccaaacucccaucag

SEQ ID NO: 2023060 - RNA, 16 nt, Human
ccugcaaccugauugu

SEQ ID NO: 2023061 - RNA, 19 nt, Human
ccugcaacaccuuguuucc

SEQ ID NO: 2023062 - RNA, 15 nt, Human
ccugauuucuccugc

SEQ ID NO: 2023063 - RNA, 18 nt, Human
ccugcaacaccuuguuuc

SEQ ID NO: 2023064 - RNA, 19 nt, Human
ccugcaaagcccagcuuga

SEQ ID NO: 2023065 - RNA, 18 nt, Human
ccugauuuuaauugugaa

SEQ ID NO: 2023066 - RNA, 22 nt, Human
ccugcuccagcuguucagcugg

SEQ ID NO: 2023067 - RNA, 14 nt, Human
ccugcuccagcugu

SEQ ID NO: 2023068 - RNA, 13 nt, Human
ccugcuccagcug

SEQ ID NO: 2023069 - RNA, 12 nt, Human
ccugcuccagcu

SEQ ID NO: 2023070 - RNA, 17 nt, Human
ccugcuaauuccccaga

SEQ ID NO: 2023071 - RNA, 17 nt, Human
ccugcguguucucagag

SEQ ID NO: 2023072 - RNA, 20 nt, Human
ccugcuuuuuauggccugug

SEQ ID NO: 2023073 - RNA, 21 nt, Human
ccuggaaaaaaacaucagaaa

SEQ ID NO: 2023074 - RNA, 15 nt, Human
ccuggaaaccugucu

SEQ ID NO: 2023075 - RNA, 18 nt, Human
ccugcuuugggcugcccu

SEQ ID NO: 2023076 - RNA, 17 nt, Human
ccugcuuugggcugccc

SEQ ID NO: 2023077 - RNA, 15 nt, Human
ccugcuuggcccagg

SEQ ID NO: 2023078 - RNA, 12 nt, Human
ccugcuucucug

SEQ ID NO: 2023079 - RNA, 14 nt, Human
ccugcuucucugcc

SEQ ID NO: 2023080 - RNA, 15 nt, Human
ccugcuucucugccc

SEQ ID NO: 2023081 - RNA, 17 nt, Human
ccugcuucucugcccag

SEQ ID NO: 2023082 - RNA, 13 nt, Human
ccugcuuggccca

SEQ ID NO: 2023083 - RNA, 14 nt, Human
ccugcuuggcccag

SEQ ID NO: 2023084 - RNA, 13 nt, Human
ccugcugguucag

SEQ ID NO: 2023085 - RNA, 21 nt, Human
ccugcuggguguggcgcagca

SEQ ID NO: 2023086 - RNA, 22 nt, Human
ccugcucccuccgggucuuccu

SEQ ID NO: 2023087 - RNA, 15 nt, Human
ccugcuuccucagag

SEQ ID NO: 2023088 - RNA, 15 nt, Human
ccugcugucauugcu

SEQ ID NO: 2023089 - RNA, 20 nt, Human
ccugcugucauugcuucuuc

SEQ ID NO: 2023090 - RNA, 22 nt, Human
ccugcugucauugcuucuucug

SEQ ID NO: 2023091 - RNA, 19 nt, Human
ccugcugguucaggguugg

SEQ ID NO: 2023092 - RNA, 14 nt, Human
ccuggacccugugg

SEQ ID NO: 2023093 - RNA, 13 nt, Human
ccuggacccugug

SEQ ID NO: 2023094 - RNA, 20 nt, Human
ccuggacugugugcucagga

SEQ ID NO: 2023095 - RNA, 17 nt, Human
ccuggacugugugcuca

SEQ ID NO: 2023096 - RNA, 22 nt, Human
ccuggacuagagggaccucucc

SEQ ID NO: 2023097 - RNA, 15 nt, Human
ccuggacuagaggga

SEQ ID NO: 2023098 - RNA, 12 nt, Human
ccuggacucccg

SEQ ID NO: 2023099 - RNA, 17 nt, Human
ccuggacucccguguag

SEQ ID NO: 2023100 - RNA, 14 nt, Human
ccuggacuccugca

SEQ ID NO: 2023101 - RNA, 14 nt, Human
ccuggacaggccag

SEQ ID NO: 2023102 - RNA, 12 nt, Human
ccuggaccccag

SEQ ID NO: 2023103 - RNA, 13 nt, Human
ccuggaccccagc

SEQ ID NO: 2023104 - RNA, 14 nt, Human
ccuggaccccagcc

SEQ ID NO: 2023105 - RNA, 15 nt, Human
ccuggaccccagccu

SEQ ID NO: 2023106 - RNA, 16 nt, Human
ccuggaccccagccuc

SEQ ID NO: 2023107 - RNA, 17 nt, Human
ccuggaccccagccuca

SEQ ID NO: 2023108 - RNA, 17 nt, Human
ccuggcacugcuuccag

SEQ ID NO: 2023109 - RNA, 20 nt, Human
ccuggcacugcuuccaguga

SEQ ID NO: 2023110 - RNA, 17 nt, Human
ccuggcaugggaaugaa

SEQ ID NO: 2023111 - RNA, 16 nt, Human
ccuggcaugggaauga

SEQ ID NO: 2023112 - RNA, 12 nt, Human
ccuggcagccgu

SEQ ID NO: 2023113 - RNA, 18 nt, Human
ccuggcagccgugccuuc

SEQ ID NO: 2023114 - RNA, 19 nt, Human
ccuggcagccgugccuuca

SEQ ID NO: 2023115 - RNA, 14 nt, Human
ccuggcagccccug

SEQ ID NO: 2023116 - RNA, 16 nt, Human
ccuggcagccccuguu

SEQ ID NO: 2023117 - RNA, 21 nt, Human
ccuggcacugcuuccagugag

SEQ ID NO: 2023118 - RNA, 20 nt, Human
ccugggaucccucauccuca

SEQ ID NO: 2023119 - RNA, 16 nt, Human
ccugggaucccucauc

SEQ ID NO: 2023120 - RNA, 17 nt, Human
ccugggauaggggcaga

SEQ ID NO: 2023121 - RNA, 20 nt, Human
ccugggaggucaaggcugca

SEQ ID NO: 2023122 - RNA, 21 nt, Human
ccugggaggcucuggagccca

SEQ ID NO: 2023123 - RNA, 13 nt, Human
ccugggaggcucu

SEQ ID NO: 2023124 - RNA, 13 nt, Human
ccugggaggcagu

SEQ ID NO: 2023125 - RNA, 14 nt, Human
ccugggcagaagga

SEQ ID NO: 2023126 - RNA, 23 nt, Human
ccugggcacacgcugcucugccc

SEQ ID NO: 2023127 - RNA, 12 nt, Human
ccugggcagaag

SEQ ID NO: 2023128 - RNA, 15 nt, Human
ccugggcacacgcug

SEQ ID NO: 2023129 - RNA, 17 nt, Human
ccugggcacacgcugcu

SEQ ID NO: 2023130 - RNA, 18 nt, Human
ccugggcacacgcugcuc

SEQ ID NO: 2023131 - RNA, 19 nt, Human
ccugggcacacgcugcucu

SEQ ID NO: 2023132 - RNA, 18 nt, Human
ccugggauaggggcagag

SEQ ID NO: 2023133 - RNA, 23 nt, Human
ccugggauaggggcagaggaggc

SEQ ID NO: 2023134 - RNA, 16 nt, Human
ccuggccccucagggu

SEQ ID NO: 2023135 - RNA, 14 nt, Human
ccuggccccucagg

SEQ ID NO: 2023136 - RNA, 12 nt, Human
ccuggcggggug

SEQ ID NO: 2023137 - RNA, 15 nt, Human
ccuggcccccacaug

SEQ ID NO: 2023138 - RNA, 21 nt, Human
ccuggcccccacauggugaug

SEQ ID NO: 2023139 - RNA, 22 nt, Human
ccuggcagcccgcaucagcugc

SEQ ID NO: 2023140 - RNA, 18 nt, Human
ccuggcaugggaaugaau

SEQ ID NO: 2023141 - RNA, 19 nt, Human
ccugugauggggcccugcc

SEQ ID NO: 2023142 - RNA, 18 nt, Human
ccugugauggggcccugc

SEQ ID NO: 2023143 - RNA, 17 nt, Human
ccugugauggggcccug

SEQ ID NO: 2023144 - RNA, 21 nt, Human
ccugugauggggcccugccuc

SEQ ID NO: 2023145 - RNA, 20 nt, Human
ccugugauggggcccugccu

SEQ ID NO: 2023146 - RNA, 22 nt, Human
ccugugauggggcccugccucc

SEQ ID NO: 2023147 - RNA, 17 nt, Human
ccugugccucugggacu

SEQ ID NO: 2023148 - RNA, 15 nt, Human
ccugugccucuggga

SEQ ID NO: 2023149 - RNA, 19 nt, Human
ccugugccucugggacugg

SEQ ID NO: 2023150 - RNA, 14 nt, Human
ccugugccagccca

SEQ ID NO: 2023151 - RNA, 15 nt, Human
ccugugccagcccag

SEQ ID NO: 2023152 - RNA, 17 nt, Human
ccugugccagcccagag

SEQ ID NO: 2023153 - RNA, 19 nt, Human
ccugugccagcccagaggc

SEQ ID NO: 2023154 - RNA, 12 nt, Human
ccugugccaggu

SEQ ID NO: 2023155 - RNA, 14 nt, Human
ccugugccagguga

SEQ ID NO: 2023156 - RNA, 21 nt, Human
ccugugccaggugaaggaggc

SEQ ID NO: 2023157 - RNA, 22 nt, Human
ccugucaaacauuaguacuuua

SEQ ID NO: 2023158 - RNA, 18 nt, Human
ccuguccccgcacugggc

SEQ ID NO: 2023159 - RNA, 17 nt, Human
ccugucccccugacaac

SEQ ID NO: 2023160 - RNA, 16 nt, Human
ccugucccccugacaa

SEQ ID NO: 2023161 - RNA, 13 nt, Human
ccugugagcugca

SEQ ID NO: 2023162 - RNA, 14 nt, Human
ccugugagcugcac

SEQ ID NO: 2023163 - RNA, 16 nt, Human
ccugugagcugcacca

SEQ ID NO: 2023164 - RNA, 20 nt, Human
ccugugaguacuacaguccu

SEQ ID NO: 2023165 - RNA, 22 nt, Human
ccugugagcuaggaauuguguu

SEQ ID NO: 2023166 - RNA, 18 nt, Human
ccugugacuucagcucug

SEQ ID NO: 2023167 - RNA, 20 nt, Human
ccuguaauccuagcacuuug

SEQ ID NO: 2023168 - RNA, 23 nt, Human
ccuguaauuguuguuuguaugua

SEQ ID NO: 2023169 - RNA, 18 nt, Human
ccugguggcagcucaccu

SEQ ID NO: 2023170 - RNA, 17 nt, Human
ccugguggcagcucacc

SEQ ID NO: 2023171 - RNA, 16 nt, Human
ccugguggcagcucac

SEQ ID NO: 2023172 - RNA, 14 nt, Human
ccugguggcagcuc

SEQ ID NO: 2023173 - RNA, 12 nt, Human
ccugguggcagc

SEQ ID NO: 2023174 - RNA, 13 nt, Human
ccugguggcagcu

SEQ ID NO: 2023175 - RNA, 18 nt, Human
ccuggugcugccacacuu

SEQ ID NO: 2023176 - RNA, 21 nt, Human
ccuggugcugccacacuucag

SEQ ID NO: 2023177 - RNA, 15 nt, Human
ccuggugcugccaca

SEQ ID NO: 2023178 - RNA, 23 nt, Human
ccuguagagugggagcugagugg

SEQ ID NO: 2023179 - RNA, 19 nt, Human
ccuguagagugggagcuga

SEQ ID NO: 2023180 - RNA, 21 nt, Human
ccuguagagugggagcugagu

SEQ ID NO: 2023181 - RNA, 13 nt, Human
ccugucaaacauu

SEQ ID NO: 2023182 - RNA, 14 nt, Human
ccugucaaacauua

SEQ ID NO: 2023183 - RNA, 16 nt, Human
ccugucaaacauuagu

SEQ ID NO: 2023184 - RNA, 11 nt, Human
ccuuuggcuuc

SEQ ID NO: 2023185 - RNA, 13 nt, Human
ccuugacagggca

SEQ ID NO: 2023186 - RNA, 19 nt, Human
ccuuggauuguccccgacc

SEQ ID NO: 2023187 - RNA, 15 nt, Human
ccuugauauuuguau

SEQ ID NO: 2023188 - RNA, 22 nt, Human
ccuugaugaaauaacacagcag

SEQ ID NO: 2023189 - RNA, 23 nt, Human
ccuugaguugauucagcucugca

SEQ ID NO: 2023190 - RNA, 22 nt, Human
ccuugaguugauucagcucugc

SEQ ID NO: 2023191 - RNA, 21 nt, Human
ccuugaccauucuccaccugc

SEQ ID NO: 2023192 - RNA, 14 nt, Human
ccuugacaaacuuc

SEQ ID NO: 2023193 - RNA, 21 nt, Human
ccuugacaaagucaagccaca

SEQ ID NO: 2023194 - RNA, 23 nt, Human
ccuugacaaagucaagccacaug

SEQ ID NO: 2023195 - RNA, 14 nt, Human
ccuugacagggcac

SEQ ID NO: 2023196 - RNA, 14 nt, Human
ccuugacacauuac

SEQ ID NO: 2023197 - RNA, 20 nt, Human
ccuugaccauucuccaccug

SEQ ID NO: 2023198 - RNA, 19 nt, Human
ccuugaccauucuccaccu

SEQ ID NO: 2023199 - RNA, 15 nt, Human
ccuugacagggcaca

SEQ ID NO: 2023200 - RNA, 17 nt, Human
ccuugacagggcacacc

SEQ ID NO: 2023201 - RNA, 15 nt, Human
ccuugaaaacacugu

SEQ ID NO: 2023202 - RNA, 14 nt, Human
ccuucuuuuucuuc

SEQ ID NO: 2023203 - RNA, 16 nt, Human
ccuucuuuuucuucuu

SEQ ID NO: 2023204 - RNA, 16 nt, Human
ccuucuuugcccuuua

SEQ ID NO: 2023205 - RNA, 13 nt, Human
ccuucgcuccugu

SEQ ID NO: 2023206 - RNA, 14 nt, Human
ccuucgcuccugug

SEQ ID NO: 2023207 - RNA, 15 nt, Human
ccuucgcuccugugu

SEQ ID NO: 2023208 - RNA, 18 nt, Human
ccuucgcuccugugucuu

SEQ ID NO: 2023209 - RNA, 21 nt, Human
ccuugaaaacacuguucucug

SEQ ID NO: 2023210 - RNA, 19 nt, Human
ccuugaaaacacuguucuc

SEQ ID NO: 2023211 - RNA, 22 nt, Human
ccuugaaaacacuguucucugc

SEQ ID NO: 2023212 - RNA, 14 nt, Human
ccuugaacugggua

SEQ ID NO: 2023213 - RNA, 19 nt, Human
ccuugaacuuugaccucug

SEQ ID NO: 2023214 - RNA, 14 nt, Human
ccuucuuuuucugg

SEQ ID NO: 2023215 - RNA, 15 nt, Human
ccuucuuuuucugga

SEQ ID NO: 2023216 - RNA, 16 nt, Human
ccuucuuuuucuggac

SEQ ID NO: 2023217 - RNA, 21 nt, Human
ccuucuuuuucuggacucugg

SEQ ID NO: 2023218 - RNA, 23 nt, Human
ccuucuuuuucuggacucuggac

SEQ ID NO: 2023219 - RNA, 17 nt, Human
ccuugaaugaugccaug

SEQ ID NO: 2023220 - RNA, 17 nt, Human
ccuugaacuuugaccuc

SEQ ID NO: 2023221 - RNA, 16 nt, Human
ccuugaacuggguacu

SEQ ID NO: 2023222 - RNA, 19 nt, Human
ccuucagugccuuauggaa

SEQ ID NO: 2023223 - RNA, 17 nt, Human
ccuuagacagucccugc

SEQ ID NO: 2023224 - RNA, 16 nt, Human
ccuuagacagucccug

SEQ ID NO: 2023225 - RNA, 14 nt, Human
ccuuagaaccuuuc

SEQ ID NO: 2023226 - RNA, 15 nt, Human
ccuuagaaccuuucu

SEQ ID NO: 2023227 - RNA, 16 nt, Human
ccuuagaaccuuucuu

SEQ ID NO: 2023228 - RNA, 18 nt, Human
ccuuagaaccuuucuuac

SEQ ID NO: 2023229 - RNA, 19 nt, Human
ccuuagacagucccugcca

SEQ ID NO: 2023230 - RNA, 18 nt, Human
ccuuagacagucccugcc

SEQ ID NO: 2023231 - RNA, 18 nt, Human
ccuuagaagguauuaaga

SEQ ID NO: 2023232 - RNA, 21 nt, Human
ccuuagaagguauuaagauua

SEQ ID NO: 2023233 - RNA, 21 nt, Human
ccuuagacagucccugccaau

SEQ ID NO: 2023234 - RNA, 15 nt, Human
ccuucaaagcaaaug

SEQ ID NO: 2023235 - RNA, 19 nt, Human
ccuucaaagcaaaugucuu

SEQ ID NO: 2023236 - RNA, 14 nt, Human
ccuucaaccauucc

SEQ ID NO: 2023237 - RNA, 23 nt, Human
ccuucaacaaggcuugcugcaga

SEQ ID NO: 2023238 - RNA, 14 nt, Human
ccuucaacaaggcu

SEQ ID NO: 2023239 - RNA, 19 nt, Human
ccuucaacaaggcuugcug

SEQ ID NO: 2023240 - RNA, 15 nt, Human
ccuucaagcugcuuu

SEQ ID NO: 2023241 - RNA, 14 nt, Human
ccuuaccugccagg

SEQ ID NO: 2023242 - RNA, 20 nt, Human
ccuuaccucggugccuuccu

SEQ ID NO: 2023243 - RNA, 16 nt, Human
ccuuaccagcagagca

SEQ ID NO: 2023244 - RNA, 15 nt, Human
ccuuaccagcagagc

SEQ ID NO: 2023245 - RNA, 15 nt, Human
ccuguggccugccag

SEQ ID NO: 2023246 - RNA, 17 nt, Human
ccuuaccagcagagcac

SEQ ID NO: 2023247 - RNA, 14 nt, Human
ccuuaccagcagag

SEQ ID NO: 2023248 - RNA, 22 nt, Human
ccuuccaggggugggacacccu

SEQ ID NO: 2023249 - RNA, 18 nt, Human
ccuuccaggggugggaca

SEQ ID NO: 2023250 - RNA, 19 nt, Human
ccuuccaugucgccucugc

SEQ ID NO: 2023251 - RNA, 20 nt, Human
ccuuccaugucgccucugca

SEQ ID NO: 2023252 - RNA, 21 nt, Human
ccuuccaugucgccucugcau

SEQ ID NO: 2023253 - RNA, 23 nt, Human
ccuuccaugucgccucugcauuc

SEQ ID NO: 2023254 - RNA, 16 nt, Human
ccuuccagggguggga

SEQ ID NO: 2023255 - RNA, 15 nt, Human
ccuuccagggguggg

SEQ ID NO: 2023256 - RNA, 18 nt, Human
ccuuccaccugcucugcu

SEQ ID NO: 2023257 - RNA, 19 nt, Human
ccuuccaccugcucugcug

SEQ ID NO: 2023258 - RNA, 14 nt, Human
ccuuccucuuucca

SEQ ID NO: 2023259 - RNA, 12 nt, Human
ccuuccucugcu

SEQ ID NO: 2023260 - RNA, 14 nt, Human
ccuuccucugaggc

SEQ ID NO: 2023261 - RNA, 17 nt, Human
ccuuccauuucugccuu

SEQ ID NO: 2023262 - RNA, 15 nt, Human
ccuucgauacaccgg

SEQ ID NO: 2023263 - RNA, 13 nt, Human
ccuuccugcuuga

SEQ ID NO: 2023264 - RNA, 13 nt, Human
ccuuccucugcuc

SEQ ID NO: 2023265 - RNA, 20 nt, Human
ccuucgauacaccgggccug

SEQ ID NO: 2023266 - RNA, 22 nt, Human
ccuucgauacaccgggccugga

SEQ ID NO: 2023267 - RNA, 23 nt, Human
ccuucgauacaccgggccuggag

SEQ ID NO: 2023268 - RNA, 13 nt, Human
ccuucgccaccug

SEQ ID NO: 2023269 - RNA, 15 nt, Human
ccuucagugccuuau

SEQ ID NO: 2023270 - RNA, 20 nt, Human
ccuucagugccuuauggaac

SEQ ID NO: 2023271 - RNA, 17 nt, Human
ccuucaguuuuuguguu

SEQ ID NO: 2023272 - RNA, 16 nt, Human
ccuuccaccucuggga

SEQ ID NO: 2023273 - RNA, 17 nt, Human
ccuuccaccucugggag

SEQ ID NO: 2023274 - RNA, 15 nt, Human
ccuuccaccugcucu

SEQ ID NO: 2023275 - RNA, 16 nt, Human
ccuuccaccugcucug

SEQ ID NO: 2023276 - RNA, 17 nt, Human
ccuuccaccugcucugc

SEQ ID NO: 2023277 - RNA, 14 nt, Human
ccuucagugccuua

SEQ ID NO: 2023278 - RNA, 13 nt, Human
ccuucagugccuu

SEQ ID NO: 2023279 - RNA, 17 nt, Human
cguggcugcuucaagga

SEQ ID NO: 2023280 - RNA, 15 nt, Human
cguggcugcuucaag

SEQ ID NO: 2023281 - RNA, 14 nt, Human
cguggcugcuucaa

SEQ ID NO: 2023282 - RNA, 12 nt, Human
cguggcugcuuc

SEQ ID NO: 2023283 - RNA, 13 nt, Human
cgugccuucagcu

SEQ ID NO: 2023284 - RNA, 15 nt, Human
cgugccuucagcucu

SEQ ID NO: 2023285 - RNA, 16 nt, Human
cgugccuucagcucua

SEQ ID NO: 2023286 - RNA, 18 nt, Human
cgugccuucagcucuaca

SEQ ID NO: 2023287 - RNA, 12 nt, Human
cgugccuggcca

SEQ ID NO: 2023288 - RNA, 16 nt, Human
cgugccuggccacgcc

SEQ ID NO: 2023289 - RNA, 16 nt, Human
cguuuugcaagguaaa

SEQ ID NO: 2023290 - RNA, 20 nt, Human
cguuucuaugacacaugcaa

SEQ ID NO: 2023291 - RNA, 19 nt, Human
cguuucuaaaggcuaccuu

SEQ ID NO: 2023292 - RNA, 21 nt, Human
cguuucuaaaggcuaccuuug

SEQ ID NO: 2023293 - RNA, 22 nt, Human
cguuccuucaaagcaaaugucu

SEQ ID NO: 2023294 - RNA, 15 nt, Human
cguuuacucacagcc

SEQ ID NO: 2023295 - RNA, 12 nt, Human
cgugacaacacu

SEQ ID NO: 2023296 - RNA, 22 nt, Human
cgugaagauacuuuguauuguc

SEQ ID NO: 2023297 - RNA, 16 nt, Human
cgugaagauacuuugu

SEQ ID NO: 2023298 - RNA, 17 nt, Human
cgugaagauacuuugua

SEQ ID NO: 2023299 - RNA, 18 nt, Human
cgugaagauacuuuguau

SEQ ID NO: 2023300 - RNA, 19 nt, Human
cgugaagauacuuuguauu

SEQ ID NO: 2023301 - RNA, 21 nt, Human
cgugaagauacuuuguauugu

SEQ ID NO: 2023302 - RNA, 20 nt, Human
cgugcacacaccagagccca

SEQ ID NO: 2023303 - RNA, 21 nt, Human
cgugcacacaccagagcccac

SEQ ID NO: 2023304 - RNA, 19 nt, Human
cgugcauaccacuuuuguu

SEQ ID NO: 2023305 - RNA, 14 nt, Human
cgugcauaccacuu

SEQ ID NO: 2023306 - RNA, 18 nt, Human
cgugcauaccacuuuugu

SEQ ID NO: 2023307 - RNA, 22 nt, Human
cgugcacacaccagagcccacc

SEQ ID NO: 2023308 - RNA, 16 nt, Human
cgucgcccucccaggc

SEQ ID NO: 2023309 - RNA, 15 nt, Human
cgucgcccucccagg

SEQ ID NO: 2023310 - RNA, 14 nt, Human
cguccccugucccc

SEQ ID NO: 2023311 - RNA, 10 nt, Human
cguccccucc

SEQ ID NO: 2023312 - RNA, 11 nt, Human
cguccccuguc

SEQ ID NO: 2023313 - RNA, 22 nt, Human
cgucccccucuggcuccagcug

SEQ ID NO: 2023314 - RNA, 14 nt, Human
cgucuaccugaggg

SEQ ID NO: 2023315 - RNA, 17 nt, Human
cgucuaaccacagcucc

SEQ ID NO: 2023316 - RNA, 18 nt, Human
cgucuaaccacagcuccu

SEQ ID NO: 2023317 - RNA, 19 nt, Human
cgucuaaccacagcuccuu

SEQ ID NO: 2023318 - RNA, 21 nt, Human
cgucuaaccacagcuccuuuu

SEQ ID NO: 2023319 - RNA, 17 nt, Human
cgucuacagcuccccca

SEQ ID NO: 2023320 - RNA, 13 nt, Human
cgucuacagcucc

SEQ ID NO: 2023321 - RNA, 14 nt, Human
cgucuacagcuccc

SEQ ID NO: 2023322 - RNA, 17 nt, Human
cgucugcuccugcgagg

SEQ ID NO: 2023323 - RNA, 13 nt, Human
cgucugacaggca

SEQ ID NO: 2023324 - RNA, 14 nt, Human
cgucugacaggcaa

SEQ ID NO: 2023325 - RNA, 22 nt, Human
cguccacgugcguguuuucuga

SEQ ID NO: 2023326 - RNA, 14 nt, Human
cgucccccucuggc

SEQ ID NO: 2023327 - RNA, 21 nt, Human
cgucccccucuggcuccagcu

SEQ ID NO: 2023328 - RNA, 16 nt, Human
cgucaacucauauuuu

SEQ ID NO: 2023329 - RNA, 20 nt, Human
cgucaacucauauuuucaug

SEQ ID NO: 2023330 - RNA, 16 nt, Human
cgucacuaccuggcug

SEQ ID NO: 2023331 - RNA, 17 nt, Human
cgucacuuuauuucauu

SEQ ID NO: 2023332 - RNA, 15 nt, Human
cguauggcuuuauuu

SEQ ID NO: 2023333 - RNA, 22 nt, Human
cguauaugucucaggucccugc

SEQ ID NO: 2023334 - RNA, 14 nt, Human
cguauagaagucuu

SEQ ID NO: 2023335 - RNA, 16 nt, Human
cguauagaagucuuca

SEQ ID NO: 2023336 - RNA, 13 nt, Human
cguagcuugucug

SEQ ID NO: 2023337 - RNA, 18 nt, Human
cguagucggcacagccug

SEQ ID NO: 2023338 - RNA, 19 nt, Human
cguagucggcacagccugg

SEQ ID NO: 2023339 - RNA, 21 nt, Human
cguagucggcacagccugguc

SEQ ID NO: 2023340 - RNA, 15 nt, Human
cguagugcagcaggg

SEQ ID NO: 2023341 - RNA, 22 nt, Human
cguauaaaagccuguuuaagag

SEQ ID NO: 2023342 - RNA, 21 nt, Human
cguauaaaagccuguuuaaga

SEQ ID NO: 2023343 - RNA, 17 nt, Human
cguauaaaagccuguuu

SEQ ID NO: 2023344 - RNA, 16 nt, Human
cguauaaaagccuguu

SEQ ID NO: 2023345 - RNA, 23 nt, Human
cggugcuaucucccccagcccca

SEQ ID NO: 2023346 - RNA, 14 nt, Human
cggggccagcuccg

SEQ ID NO: 2023347 - RNA, 19 nt, Human
cggaaccugugagcugcac

SEQ ID NO: 2023348 - RNA, 18 nt, Human
cggaaccugugagcugca

SEQ ID NO: 2023349 - RNA, 20 nt, Human
cggaaugaaccacaucuugc

SEQ ID NO: 2023350 - RNA, 15 nt, Human
cggacagccacggcc

SEQ ID NO: 2023351 - RNA, 16 nt, Human
cggacagccacggcca

SEQ ID NO: 2023352 - RNA, 18 nt, Human
cggacagccacggccagg

SEQ ID NO: 2023353 - RNA, 17 nt, Human
cgcuauugucaccaggg

SEQ ID NO: 2023354 - RNA, 20 nt, Human
cgcuagguagagucugaggg

SEQ ID NO: 2023355 - RNA, 21 nt, Human
cgcuagguagagucugagggc

SEQ ID NO: 2023356 - RNA, 13 nt, Human
cgcuccugugucu

SEQ ID NO: 2023357 - RNA, 22 nt, Human
cgcucgaaguugaucuccccag

SEQ ID NO: 2023358 - RNA, 15 nt, Human
cggauugcaaagcaa

SEQ ID NO: 2023359 - RNA, 13 nt, Human
cggcacagccugg

SEQ ID NO: 2023360 - RNA, 16 nt, Human
cggcaauaaaagccca

SEQ ID NO: 2023361 - RNA, 17 nt, Human
cggcaauaaaagcccag

SEQ ID NO: 2023362 - RNA, 18 nt, Human
cggcaauaaaagcccagg

SEQ ID NO: 2023363 - RNA, 19 nt, Human
cggcaauaaaagcccagga

SEQ ID NO: 2023364 - RNA, 20 nt, Human
cggcaauaaaagcccaggag

SEQ ID NO: 2023365 - RNA, 22 nt, Human
cggcaauaaaagcccaggagcc

SEQ ID NO: 2023366 - RNA, 21 nt, Human
cggauccugcacugacucugg

SEQ ID NO: 2023367 - RNA, 22 nt, Human
cggauccugcacugacucugga

SEQ ID NO: 2023368 - RNA, 20 nt, Human
cggacagccacggccaggcc

SEQ ID NO: 2023369 - RNA, 18 nt, Human
cggcuggccuggccccuc

SEQ ID NO: 2023370 - RNA, 16 nt, Human
cggcuggccuggcccc

SEQ ID NO: 2023371 - RNA, 15 nt, Human
cggcuggccuggccc

SEQ ID NO: 2023372 - RNA, 15 nt, Human
cggccuuuggcuuca

SEQ ID NO: 2023373 - RNA, 20 nt, Human
cggcccauccccaggcaccu

SEQ ID NO: 2023374 - RNA, 14 nt, Human
cggccccagcuucu

SEQ ID NO: 2023375 - RNA, 19 nt, Human
cggccccagcuucucagcu

SEQ ID NO: 2023376 - RNA, 16 nt, Human
cggccuccauccugag

SEQ ID NO: 2023377 - RNA, 17 nt, Human
cggccuccauccugagg

SEQ ID NO: 2023378 - RNA, 13 nt, Human
cggccuuucccac

SEQ ID NO: 2023379 - RNA, 14 nt, Human
cggccuuucccacu

SEQ ID NO: 2023380 - RNA, 20 nt, Human
cgggaggauguucugggaca

SEQ ID NO: 2023381 - RNA, 22 nt, Human
cgggagccugaucaccugcccu

SEQ ID NO: 2023382 - RNA, 21 nt, Human
cgggagccugaucaccugccc

SEQ ID NO: 2023383 - RNA, 16 nt, Human
cgggaggucgaggcag

SEQ ID NO: 2023384 - RNA, 17 nt, Human
cgggaggucgaggcagg

SEQ ID NO: 2023385 - RNA, 22 nt, Human
cggggagggugacaguggccgc

SEQ ID NO: 2023386 - RNA, 15 nt, Human
cggggagggugacag

SEQ ID NO: 2023387 - RNA, 16 nt, Human
cgggcauggcagcccu

SEQ ID NO: 2023388 - RNA, 15 nt, Human
cgggcaugacacgaa

SEQ ID NO: 2023389 - RNA, 12 nt, Human
cgggcaugacac

SEQ ID NO: 2023390 - RNA, 15 nt, Human
cgggcaucauucucu

SEQ ID NO: 2023391 - RNA, 14 nt, Human
ccuuugacaaaggu

SEQ ID NO: 2023392 - RNA, 23 nt, Human
ccuuugacgccaucccagcccca

SEQ ID NO: 2023393 - RNA, 17 nt, Human
ccuuucuuuucuuucuu

SEQ ID NO: 2023394 - RNA, 12 nt, Human
ccuuucuguguu

SEQ ID NO: 2023395 - RNA, 11 nt, Human
ccuuucuuccu

SEQ ID NO: 2023396 - RNA, 12 nt, Human
ccuuucuuccuc

SEQ ID NO: 2023397 - RNA, 13 nt, Human
ccuuucuuccuca

SEQ ID NO: 2023398 - RNA, 15 nt, Human
ccuuucuuccucauu

SEQ ID NO: 2023399 - RNA, 19 nt, Human
ccuuucuuccucauucccu

SEQ ID NO: 2023400 - RNA, 12 nt, Human
ccuuucuucucc

SEQ ID NO: 2023401 - RNA, 17 nt, Human
ccuuucuucucccccau

SEQ ID NO: 2023402 - RNA, 15 nt, Human
ccuuugcagcucaga

SEQ ID NO: 2023403 - RNA, 16 nt, Human
ccuuugcuugaaagaa

SEQ ID NO: 2023404 - RNA, 13 nt, Human
ccuuuaagagaaa

SEQ ID NO: 2023405 - RNA, 18 nt, Human
ccuuuaaagaaacauggu

SEQ ID NO: 2023406 - RNA, 14 nt, Human
ccuuuaagagaaau

SEQ ID NO: 2023407 - RNA, 15 nt, Human
ccuuucugaucuuca

SEQ ID NO: 2023408 - RNA, 16 nt, Human
ccuuucugaucuucac

SEQ ID NO: 2023409 - RNA, 19 nt, Human
ccuuguggucccaccccac

SEQ ID NO: 2023410 - RNA, 16 nt, Human
ccuuguggucccaccc

SEQ ID NO: 2023411 - RNA, 20 nt, Human
ccuuguggucccaccccaca

SEQ ID NO: 2023412 - RNA, 14 nt, Human
ccuuggcugcaggg

SEQ ID NO: 2023413 - RNA, 12 nt, Human
ccuuggcugcag

SEQ ID NO: 2023414 - RNA, 13 nt, Human
ccuuggcugcagg

SEQ ID NO: 2023415 - RNA, 14 nt, Human
cgauccuccccugg

SEQ ID NO: 2023416 - RNA, 19 nt, Human
cgaucuggguucacugcaa

SEQ ID NO: 2023417 - RNA, 21 nt, Human
cgauugcaggagucccugcca

SEQ ID NO: 2023418 - RNA, 21 nt, Human
cgauucuucugcuucagccuc

SEQ ID NO: 2023419 - RNA, 13 nt, Human
cgauucuucugcu

SEQ ID NO: 2023420 - RNA, 19 nt, Human
cgauucuucugcuucagcc

SEQ ID NO: 2023421 - RNA, 22 nt, Human
cgcaagcaccauccccuccggc

SEQ ID NO: 2023422 - RNA, 18 nt, Human
cgcaagggaggcccagcg

SEQ ID NO: 2023423 - RNA, 23 nt, Human
cgauugcaggagucccugccauc

SEQ ID NO: 2023424 - RNA, 12 nt, Human
cgauuucuguuu

SEQ ID NO: 2023425 - RNA, 11 nt, Human
cgcaaugugac

SEQ ID NO: 2023426 - RNA, 15 nt, Human
ccuuuguauucucuc

SEQ ID NO: 2023427 - RNA, 18 nt, Human
ccuuuguauucucuccug

SEQ ID NO: 2023428 - RNA, 20 nt, Human
ccuuuguauucucuccugua

SEQ ID NO: 2023429 - RNA, 24 nt, Human
cgagcugggaccaguaccuggguc

SEQ ID NO: 2023430 - RNA, 18 nt, Human
cgaggccuucucugaagg

SEQ ID NO: 2023431 - RNA, 19 nt, Human
cgaggccuucucugaagga

SEQ ID NO: 2023432 - RNA, 13 nt, Human
cgaggacagggag

SEQ ID NO: 2023433 - RNA, 12 nt, Human
cgaggacaggga

SEQ ID NO: 2023434 - RNA, 14 nt, Human
cgcagacaggacca

SEQ ID NO: 2023435 - RNA, 13 nt, Human
cgcagacaggacc

SEQ ID NO: 2023436 - RNA, 13 nt, Human
cgcagaagcccug

SEQ ID NO: 2023437 - RNA, 15 nt, Human
cgcccccacugguga

SEQ ID NO: 2023438 - RNA, 12 nt, Human
cgcccaggcugg

SEQ ID NO: 2023439 - RNA, 19 nt, Human
cgcccaggcuggagugcaa

SEQ ID NO: 2023440 - RNA, 20 nt, Human
cgcccaggcuggagugcaau

SEQ ID NO: 2023441 - RNA, 13 nt, Human
cgcccucccaggc

SEQ ID NO: 2023442 - RNA, 12 nt, Human
cgcccucccagg

SEQ ID NO: 2023443 - RNA, 17 nt, Human
cgcgacaaugcaaacca

SEQ ID NO: 2023444 - RNA, 16 nt, Human
cgcgacaaugcaaacc

SEQ ID NO: 2023445 - RNA, 14 nt, Human
cgcuaagagggagg

SEQ ID NO: 2023446 - RNA, 16 nt, Human
cgcuaagagggaggga

SEQ ID NO: 2023447 - RNA, 15 nt, Human
cgcuaagagggaggg

SEQ ID NO: 2023448 - RNA, 21 nt, Human
cgcuaagagggagggagggcu

SEQ ID NO: 2023449 - RNA, 22 nt, Human
cgcuaacuugcuuaaaugugaa

SEQ ID NO: 2023450 - RNA, 20 nt, Human
cgcuacuaugauuuaauuug

SEQ ID NO: 2023451 - RNA, 15 nt, Human
cgcuagcacagcucc

SEQ ID NO: 2023452 - RNA, 16 nt, Human
cgcuagcacagcuccc

SEQ ID NO: 2023453 - RNA, 16 nt, Human
cgcgugcacacaccag

SEQ ID NO: 2023454 - RNA, 19 nt, Human
cgcgugcacacaccagagc

SEQ ID NO: 2023455 - RNA, 20 nt, Human
cgcgugcacacaccagagcc

SEQ ID NO: 2023456 - RNA, 21 nt, Human
cccacaaaggagagcuagcag

SEQ ID NO: 2023457 - RNA, 21 nt, Human
ccaugcuguuuucccuuugcc

SEQ ID NO: 2023458 - RNA, 16 nt, Human
ccaugcugucuggcac

SEQ ID NO: 2023459 - RNA, 18 nt, Human
ccaugcugucuggcacag

SEQ ID NO: 2023460 - RNA, 20 nt, Human
ccaugcugucuggcacagcc

SEQ ID NO: 2023461 - RNA, 21 nt, Human
ccaugcugucuggcacagccu

SEQ ID NO: 2023462 - RNA, 22 nt, Human
ccaugcugucuggcacagccug

SEQ ID NO: 2023463 - RNA, 23 nt, Human
ccaugcugucuggcacagccugc

SEQ ID NO: 2023464 - RNA, 16 nt, Human
ccauucuccaccugcc

SEQ ID NO: 2023465 - RNA, 15 nt, Human
ccauucuccaccugc

SEQ ID NO: 2023466 - RNA, 14 nt, Human
ccauggacuuuguu

SEQ ID NO: 2023467 - RNA, 13 nt, Human
ccauggacuuugu

SEQ ID NO: 2023468 - RNA, 21 nt, Human
ccauucugccugcccaggccc

SEQ ID NO: 2023469 - RNA, 14 nt, Human
ccauucuccaccug

SEQ ID NO: 2023470 - RNA, 19 nt, Human
ccauucugccugcccaggc

SEQ ID NO: 2023471 - RNA, 20 nt, Human
ccauucugccugcccaggcc

SEQ ID NO: 2023472 - RNA, 16 nt, Human
ccauucugccugccca

SEQ ID NO: 2023473 - RNA, 17 nt, Human
ccauucuccaccugcca

SEQ ID NO: 2023474 - RNA, 17 nt, Human
ccauucugccugcccag

SEQ ID NO: 2023475 - RNA, 18 nt, Human
ccauucugccugcccagg

SEQ ID NO: 2023476 - RNA, 17 nt, Human
cccaaaccaccagaagc

SEQ ID NO: 2023477 - RNA, 18 nt, Human
cccaaaccaccagaagcc

SEQ ID NO: 2023478 - RNA, 22 nt, Human
cccaaaccaccagaagcccaga

SEQ ID NO: 2023479 - RNA, 15 nt, Human
cccaaaccuuucccc

SEQ ID NO: 2023480 - RNA, 15 nt, Human
cccaaagaugcagcc

SEQ ID NO: 2023481 - RNA, 12 nt, Human
cccaaagaugca

SEQ ID NO: 2023482 - RNA, 16 nt, Human
cccaaagcagugcaug

SEQ ID NO: 2023483 - RNA, 22 nt, Human
ccauuuugggguacccacugcu

SEQ ID NO: 2023484 - RNA, 18 nt, Human
ccauuuuggugucuuucu

SEQ ID NO: 2023485 - RNA, 19 nt, Human
ccauuuuggugucuuucuc

SEQ ID NO: 2023486 - RNA, 23 nt, Human
ccauuuuggauucuuauggacaa

SEQ ID NO: 2023487 - RNA, 20 nt, Human
ccauuuugggguacccacug

SEQ ID NO: 2023488 - RNA, 13 nt, Human
cccaaaaggcaga

SEQ ID NO: 2023489 - RNA, 20 nt, Human
ccauuuuggugucuuucucu

SEQ ID NO: 2023490 - RNA, 21 nt, Human
ccauuuuggugucuuucucuu

SEQ ID NO: 2023491 - RNA, 22 nt, Human
ccauuuuggugucuuucucuuu

SEQ ID NO: 2023492 - RNA, 18 nt, Human
cccaaaaggcagaagcaa

SEQ ID NO: 2023493 - RNA, 20 nt, Human
ccauccucuguacagagccc

SEQ ID NO: 2023494 - RNA, 19 nt, Human
ccagugaggcucugcccuu

SEQ ID NO: 2023495 - RNA, 18 nt, Human
ccagugaggcucugcccu

SEQ ID NO: 2023496 - RNA, 17 nt, Human
ccagugaggcucugccc

SEQ ID NO: 2023497 - RNA, 20 nt, Human
ccagugaggcucugcccuug

SEQ ID NO: 2023498 - RNA, 12 nt, Human
ccauacuaauua

SEQ ID NO: 2023499 - RNA, 13 nt, Human
ccauacuaauuau

SEQ ID NO: 2023500 - RNA, 23 nt, Human
ccauacuaauuauacccccugca

SEQ ID NO: 2023501 - RNA, 14 nt, Human
ccauagugacuuuu

SEQ ID NO: 2023502 - RNA, 19 nt, Human
ccauauccauagugacuuu

SEQ ID NO: 2023503 - RNA, 19 nt, Human
ccauaguuaaagaagacau

SEQ ID NO: 2023504 - RNA, 17 nt, Human
ccauaguuacuguaaaa

SEQ ID NO: 2023505 - RNA, 18 nt, Human
ccauaguuacuguaaaau

SEQ ID NO: 2023506 - RNA, 18 nt, Human
ccauaguugacaguucca

SEQ ID NO: 2023507 - RNA, 13 nt, Human
ccauauagaaagc

SEQ ID NO: 2023508 - RNA, 18 nt, Human
ccauaucaaaagacacag

SEQ ID NO: 2023509 - RNA, 21 nt, Human
ccauaucaaaagacacagggg

SEQ ID NO: 2023510 - RNA, 13 nt, Human
ccaucaccagaca

SEQ ID NO: 2023511 - RNA, 19 nt, Human
ccauccucuguacagagcc

SEQ ID NO: 2023512 - RNA, 12 nt, Human
ccauccucugua

SEQ ID NO: 2023513 - RNA, 16 nt, Human
ccauccuccuccuucc

SEQ ID NO: 2023514 - RNA, 18 nt, Human
ccauccuccuccuuccua

SEQ ID NO: 2023515 - RNA, 22 nt, Human
ccaucugcugucuuuucuuugc

SEQ ID NO: 2023516 - RNA, 12 nt, Human
ccaucuggagag

SEQ ID NO: 2023517 - RNA, 19 nt, Human
ccaucuggagagcccagag

SEQ ID NO: 2023518 - RNA, 19 nt, Human
ccaucuccuuucucuggua

SEQ ID NO: 2023519 - RNA, 22 nt, Human
ccaucauugaaaucuuuuugcu

SEQ ID NO: 2023520 - RNA, 12 nt, Human
ccaucagcccaa

SEQ ID NO: 2023521 - RNA, 13 nt, Human
ccaucauuucugg

SEQ ID NO: 2023522 - RNA, 12 nt, Human
ccaucauuucug

SEQ ID NO: 2023523 - RNA, 21 nt, Human
ccauccaccguccccucccag

SEQ ID NO: 2023524 - RNA, 12 nt, Human
ccaugccagccg

SEQ ID NO: 2023525 - RNA, 14 nt, Human
ccaugccaggaacc

SEQ ID NO: 2023526 - RNA, 15 nt, Human
ccaugccaggaaccu

SEQ ID NO: 2023527 - RNA, 13 nt, Human
ccaugcugcccug

SEQ ID NO: 2023528 - RNA, 11 nt, Human
ccaugcugccc

SEQ ID NO: 2023529 - RNA, 14 nt, Human
ccaugcugcccugu

SEQ ID NO: 2023530 - RNA, 18 nt, Human
ccaugauguuuuccauga

SEQ ID NO: 2023531 - RNA, 21 nt, Human
ccaugauuaaccacuucagcu

SEQ ID NO: 2023532 - RNA, 19 nt, Human
ccaugauuaaccacuucag

SEQ ID NO: 2023533 - RNA, 14 nt, Human
ccaugaagauguag

SEQ ID NO: 2023534 - RNA, 22 nt, Human
ccaucuggagagcccagagucc

SEQ ID NO: 2023535 - RNA, 15 nt, Human
ccaguagcaggcccg

SEQ ID NO: 2023536 - RNA, 23 nt, Human
ccaguagcugggaccacaggugc

SEQ ID NO: 2023537 - RNA, 15 nt, Human
ccaguacauucucag

SEQ ID NO: 2023538 - RNA, 17 nt, Human
ccaguacauucucaguu

SEQ ID NO: 2023539 - RNA, 19 nt, Human
ccaguacauucucaguuuu

SEQ ID NO: 2023540 - RNA, 22 nt, Human
ccaguacauucucaguuuuucu

SEQ ID NO: 2023541 - RNA, 19 nt, Human
ccaguaccuggguccccag

SEQ ID NO: 2023542 - RNA, 23 nt, Human
ccaguaccuggguccccagcccu

SEQ ID NO: 2023543 - RNA, 20 nt, Human
ccagugaaaucaguuacucu

SEQ ID NO: 2023544 - RNA, 14 nt, Human
ccagguucagcuug

SEQ ID NO: 2023545 - RNA, 22 nt, Human
ccagguggugggcauucucucu

SEQ ID NO: 2023546 - RNA, 12 nt, Human
ccaguaacacag

SEQ ID NO: 2023547 - RNA, 20 nt, Human
ccaguaacacaggccacccu

SEQ ID NO: 2023548 - RNA, 17 nt, Human
ccaguacaagaucucag

SEQ ID NO: 2023549 - RNA, 21 nt, Human
ccaguaagaucacuguuuaga

SEQ ID NO: 2023550 - RNA, 14 nt, Human
ccaguaagaucacu

SEQ ID NO: 2023551 - RNA, 15 nt, Human
ccaguaagaucacug

SEQ ID NO: 2023552 - RNA, 16 nt, Human
ccaguaagaucacugu

SEQ ID NO: 2023553 - RNA, 17 nt, Human
ccaguaagaucacuguu

SEQ ID NO: 2023554 - RNA, 12 nt, Human
ccaguaagauca

SEQ ID NO: 2023555 - RNA, 19 nt, Human
ccaggugcuaggaacacuc

SEQ ID NO: 2023556 - RNA, 16 nt, Human
ccaggugaaggaggcu

SEQ ID NO: 2023557 - RNA, 20 nt, Human
ccaggugaaggaggcuccag

SEQ ID NO: 2023558 - RNA, 21 nt, Human
ccaggugaaggaggcuccagg

SEQ ID NO: 2023559 - RNA, 23 nt, Human
ccaggucuaccccucccggcccu

SEQ ID NO: 2023560 - RNA, 22 nt, Human
ccaggucccuuucauuugcuau

SEQ ID NO: 2023561 - RNA, 12 nt, Human
ccaggccccucc

SEQ ID NO: 2023562 - RNA, 16 nt, Human
ccaggccccucccucu

SEQ ID NO: 2023563 - RNA, 18 nt, Human
ccaggccccucccucucc

SEQ ID NO: 2023564 - RNA, 20 nt, Human
ccaggcuguaucccaugagc

SEQ ID NO: 2023565 - RNA, 19 nt, Human
ccaggcuggucucaaacuc

SEQ ID NO: 2023566 - RNA, 21 nt, Human
ccaggcuggucucgaacuccu

SEQ ID NO: 2023567 - RNA, 13 nt, Human
ccaggccccugcc

SEQ ID NO: 2023568 - RNA, 15 nt, Human
ccaggccccccuguc

SEQ ID NO: 2023569 - RNA, 16 nt, Human
ccaggccccccuguca

SEQ ID NO: 2023570 - RNA, 12 nt, Human
ccagggaagggg

SEQ ID NO: 2023571 - RNA, 19 nt, Human
ccaggcuuuuuuaucaugu

SEQ ID NO: 2023572 - RNA, 12 nt, Human
ccaggcuuucua

SEQ ID NO: 2023573 - RNA, 19 nt, Human
ccaggcuuucuagaaagaa

SEQ ID NO: 2023574 - RNA, 18 nt, Human
ccaggcuuuguacagagu

SEQ ID NO: 2023575 - RNA, 13 nt, Human
ccagggccaaaag

SEQ ID NO: 2023576 - RNA, 16 nt, Human
ccaggagcagccacau

SEQ ID NO: 2023577 - RNA, 15 nt, Human
ccaggagcagccaca

SEQ ID NO: 2023578 - RNA, 15 nt, Human
ccaggagccccgagg

SEQ ID NO: 2023579 - RNA, 13 nt, Human
ccaggaggccagc

SEQ ID NO: 2023580 - RNA, 14 nt, Human
ccaggaggccagcc

SEQ ID NO: 2023581 - RNA, 12 nt, Human
ccaggaggccag

SEQ ID NO: 2023582 - RNA, 13 nt, Human
ccaggagcccauu

SEQ ID NO: 2023583 - RNA, 11 nt, Human
ccaggagccca

SEQ ID NO: 2023584 - RNA, 12 nt, Human
ccaggagcccau

SEQ ID NO: 2023585 - RNA, 14 nt, Human
ccaggagccuccug

SEQ ID NO: 2023586 - RNA, 13 nt, Human
ccaggagccuccu

SEQ ID NO: 2023587 - RNA, 18 nt, Human
ccaggagccuccugcccu

SEQ ID NO: 2023588 - RNA, 19 nt, Human
ccaggagccuccugcccuu

SEQ ID NO: 2023589 - RNA, 22 nt, Human
ccaggcauuccccaggaggcca

SEQ ID NO: 2023590 - RNA, 23 nt, Human
ccaggcauuccccaggaggccag

SEQ ID NO: 2023591 - RNA, 24 nt, Human
ccaggcauuccccaggaggccagc

SEQ ID NO: 2023592 - RNA, 13 nt, Human
ccaggcauggugg

SEQ ID NO: 2023593 - RNA, 14 nt, Human
ccaggcauucccca

SEQ ID NO: 2023594 - RNA, 12 nt, Human
ccagcugccucc

SEQ ID NO: 2023595 - RNA, 18 nt, Human
ccagcugccuaggauuca

SEQ ID NO: 2023596 - RNA, 22 nt, Human
ccagcucugguccauagagagc

SEQ ID NO: 2023597 - RNA, 21 nt, Human
ccagcucugguccauagagag

SEQ ID NO: 2023598 - RNA, 17 nt, Human
ccagcucugguccauag

SEQ ID NO: 2023599 - RNA, 14 nt, Human
ccagcucuggucca

SEQ ID NO: 2023600 - RNA, 23 nt, Human
ccagcugcuugggcuucauccuc

SEQ ID NO: 2023601 - RNA, 23 nt, Human
ccagcugcugagccgcagagaag

SEQ ID NO: 2023602 - RNA, 20 nt, Human
ccagcugcuugggcuucauc

SEQ ID NO: 2023603 - RNA, 14 nt, Human
ccagcugcugagcc

SEQ ID NO: 2023604 - RNA, 15 nt, Human
ccagcugcugagccg

SEQ ID NO: 2023605 - RNA, 16 nt, Human
ccagcugcugagccgc

SEQ ID NO: 2023606 - RNA, 17 nt, Human
ccagcugcugagccgca

SEQ ID NO: 2023607 - RNA, 18 nt, Human
ccagcugcugagccgcag

SEQ ID NO: 2023608 - RNA, 19 nt, Human
ccagcugcugagccgcaga

SEQ ID NO: 2023609 - RNA, 20 nt, Human
ccagccuugaccauucucca

SEQ ID NO: 2023610 - RNA, 19 nt, Human
ccagccuugaccauucucc

SEQ ID NO: 2023611 - RNA, 21 nt, Human
ccagagcauuccagucaggcu

SEQ ID NO: 2023612 - RNA, 23 nt, Human
ccagagcauuccagucaggcucu

SEQ ID NO: 2023613 - RNA, 22 nt, Human
ccagagcccaccuuggcucaag

SEQ ID NO: 2023614 - RNA, 16 nt, Human
ccagagcccaccuugg

SEQ ID NO: 2023615 - RNA, 18 nt, Human
ccagagcauuccagucag

SEQ ID NO: 2023616 - RNA, 19 nt, Human
ccagagcauuccagucagg

SEQ ID NO: 2023617 - RNA, 13 nt, Human
ccagcucuggucc

SEQ ID NO: 2023618 - RNA, 12 nt, Human
ccagcucugguc

SEQ ID NO: 2023619 - RNA, 11 nt, Human
ccagcucuggu

SEQ ID NO: 2023620 - RNA, 22 nt, Human
ccagccuugaccauucuccacc

SEQ ID NO: 2023621 - RNA, 14 nt, Human
ccagcgagcccugg

SEQ ID NO: 2023622 - RNA, 15 nt, Human
ccagcgagcccuggu

SEQ ID NO: 2023623 - RNA, 16 nt, Human
ccagcgagcccuggug

SEQ ID NO: 2023624 - RNA, 22 nt, Human
ccaggaaguagcacaggcugag

SEQ ID NO: 2023625 - RNA, 20 nt, Human
ccaggaagccagcaggcucu

SEQ ID NO: 2023626 - RNA, 22 nt, Human
ccaggaagccagcaggcucuca

SEQ ID NO: 2023627 - RNA, 16 nt, Human
ccaggaaguagcacag

SEQ ID NO: 2023628 - RNA, 18 nt, Human
ccaggaaguagcacaggc

SEQ ID NO: 2023629 - RNA, 19 nt, Human
ccaggaaguagcacaggcu

SEQ ID NO: 2023630 - RNA, 21 nt, Human
ccaggaaguagcacaggcuga

SEQ ID NO: 2023631 - RNA, 23 nt, Human
ccagcuggggccaggcugggucg

SEQ ID NO: 2023632 - RNA, 22 nt, Human
ccagcuggggccaggcuggguc

SEQ ID NO: 2023633 - RNA, 21 nt, Human
ccagcuggggccaggcugggu

SEQ ID NO: 2023634 - RNA, 20 nt, Human
ccagcuggggccaggcuggg

SEQ ID NO: 2023635 - RNA, 19 nt, Human
ccagcuggggccaggcugg

SEQ ID NO: 2023636 - RNA, 18 nt, Human
ccagcuggggccaggcug

SEQ ID NO: 2023637 - RNA, 17 nt, Human
ccagcuggggccaggcu

SEQ ID NO: 2023638 - RNA, 20 nt, Human
ccaggacaggagaugcugug

SEQ ID NO: 2023639 - RNA, 22 nt, Human
ccccucagggucccugguggca

SEQ ID NO: 2023640 - RNA, 17 nt, Human
ccccaggaggccagccu

SEQ ID NO: 2023641 - RNA, 14 nt, Human
cccaugggcaggag

SEQ ID NO: 2023642 - RNA, 16 nt, Human
cccaugggcaggagac

SEQ ID NO: 2023643 - RNA, 23 nt, Human
cccauggccggcuuucaggagcu

SEQ ID NO: 2023644 - RNA, 16 nt, Human
cccaugggaggcugga

SEQ ID NO: 2023645 - RNA, 14 nt, Human
cccauggaccaugc

SEQ ID NO: 2023646 - RNA, 18 nt, Human
cccaugcugcccugugag

SEQ ID NO: 2023647 - RNA, 17 nt, Human
cccaugcugcccuguga

SEQ ID NO: 2023648 - RNA, 16 nt, Human
cccaugcugcccugug

SEQ ID NO: 2023649 - RNA, 15 nt, Human
cccaugcugcccugu

SEQ ID NO: 2023650 - RNA, 13 nt, Human
cccaguggcaggg

SEQ ID NO: 2023651 - RNA, 14 nt, Human
cccaguggcagggc

SEQ ID NO: 2023652 - RNA, 15 nt, Human
cccaguggcagggca

SEQ ID NO: 2023653 - RNA, 16 nt, Human
cccaguggcagggcac

SEQ ID NO: 2023654 - RNA, 17 nt, Human
cccaguggcagggcaca

SEQ ID NO: 2023655 - RNA, 20 nt, Human
cccaguggcagggcacaggg

SEQ ID NO: 2023656 - RNA, 22 nt, Human
cccaguggcagggcacagggcc

SEQ ID NO: 2023657 - RNA, 23 nt, Human
cccaguggcagggcacagggccu

SEQ ID NO: 2023658 - RNA, 17 nt, Human
cccagugccgagaagga

SEQ ID NO: 2023659 - RNA, 18 nt, Human
cccagugccgagaaggaa

SEQ ID NO: 2023660 - RNA, 15 nt, Human
cccagugcccacagg

SEQ ID NO: 2023661 - RNA, 20 nt, Human
cccagugcccacaggaucag

SEQ ID NO: 2023662 - RNA, 22 nt, Human
ccccaaauggaaaugggcagag

SEQ ID NO: 2023663 - RNA, 13 nt, Human
cccauucugccug

SEQ ID NO: 2023664 - RNA, 20 nt, Human
ccccacccaagggccuggcc

SEQ ID NO: 2023665 - RNA, 14 nt, Human
ccccacccaagggc

SEQ ID NO: 2023666 - RNA, 13 nt, Human
ccccaagccuggc

SEQ ID NO: 2023667 - RNA, 14 nt, Human
ccccaagccuggca

SEQ ID NO: 2023668 - RNA, 13 nt, Human
ccccaagcgcccu

SEQ ID NO: 2023669 - RNA, 13 nt, Human
ccccaccaucugc

SEQ ID NO: 2023670 - RNA, 14 nt, Human
ccccaccaucugcu

SEQ ID NO: 2023671 - RNA, 15 nt, Human
ccccaccaucugcug

SEQ ID NO: 2023672 - RNA, 18 nt, Human
ccccaccaucugcugucu

SEQ ID NO: 2023673 - RNA, 19 nt, Human
ccccaccaucugcugucuu

SEQ ID NO: 2023674 - RNA, 17 nt, Human
ccccaagcgcccuggcc

SEQ ID NO: 2023675 - RNA, 23 nt, Human
cccaggcauuccccaggaggcca

SEQ ID NO: 2023676 - RNA, 22 nt, Human
cccaggcauuccccaggaggcc

SEQ ID NO: 2023677 - RNA, 21 nt, Human
cccaggcauuccccaggaggc

SEQ ID NO: 2023678 - RNA, 20 nt, Human
cccaggcauuccccaggagg

SEQ ID NO: 2023679 - RNA, 17 nt, Human
cccaggcaggucuugaa

SEQ ID NO: 2023680 - RNA, 11 nt, Human
cccaggccccu

SEQ ID NO: 2023681 - RNA, 16 nt, Human
cccaggccccugccac

SEQ ID NO: 2023682 - RNA, 18 nt, Human
cccaggccccugccaccc

SEQ ID NO: 2023683 - RNA, 21 nt, Human
cccaggccccugccacccugg

SEQ ID NO: 2023684 - RNA, 22 nt, Human
cccaggccccugccacccuggg

SEQ ID NO: 2023685 - RNA, 11 nt, Human
cccaggcaggu

SEQ ID NO: 2023686 - RNA, 13 nt, Human
cccaggcaggucu

SEQ ID NO: 2023687 - RNA, 15 nt, Human
cccaggauauauuuu

SEQ ID NO: 2023688 - RNA, 17 nt, Human
cccaggauauauuuuau

SEQ ID NO: 2023689 - RNA, 10 nt, Human
cccaggaggg

SEQ ID NO: 2023690 - RNA, 22 nt, Human
cccaggaggccagccuugacca

SEQ ID NO: 2023691 - RNA, 13 nt, Human
cccaggaggccag

SEQ ID NO: 2023692 - RNA, 21 nt, Human
cccaggagccccgaggccuuc

SEQ ID NO: 2023693 - RNA, 19 nt, Human
cccaggagccugcccagcc

SEQ ID NO: 2023694 - RNA, 17 nt, Human
cccaggagccugcccag

SEQ ID NO: 2023695 - RNA, 19 nt, Human
cccaggaggacucccugcu

SEQ ID NO: 2023696 - RNA, 18 nt, Human
cccaggagccccgaggcc

SEQ ID NO: 2023697 - RNA, 18 nt, Human
cccaggccuccuacagcu

SEQ ID NO: 2023698 - RNA, 17 nt, Human
cccaggccuccuacagc

SEQ ID NO: 2023699 - RNA, 15 nt, Human
cccaggccugccugu

SEQ ID NO: 2023700 - RNA, 16 nt, Human
cccaggccugccuguu

SEQ ID NO: 2023701 - RNA, 18 nt, Human
cccaggcgccccuucccc

SEQ ID NO: 2023702 - RNA, 14 nt, Human
cccaggcugagccu

SEQ ID NO: 2023703 - RNA, 22 nt, Human
cccagggggcuuccugagggga

SEQ ID NO: 2023704 - RNA, 19 nt, Human
cccagggugagguggcaug

SEQ ID NO: 2023705 - RNA, 13 nt, Human
cccagugcccaca

SEQ ID NO: 2023706 - RNA, 20 nt, Human
cccagucuggaaugcagugg

SEQ ID NO: 2023707 - RNA, 21 nt, Human
cccagucaauuacauguuugg

SEQ ID NO: 2023708 - RNA, 13 nt, Human
cccagucccagca

SEQ ID NO: 2023709 - RNA, 14 nt, Human
cccagucccagcag

SEQ ID NO: 2023710 - RNA, 15 nt, Human
cccagucccagcagc

SEQ ID NO: 2023711 - RNA, 17 nt, Human
cccagucccagcagcca

SEQ ID NO: 2023712 - RNA, 19 nt, Human
cccagucccagcagccagc

SEQ ID NO: 2023713 - RNA, 22 nt, Human
cccaggugcuaggaacacuccu

SEQ ID NO: 2023714 - RNA, 23 nt, Human
cccaggugcuaggaacacuccuu

SEQ ID NO: 2023715 - RNA, 14 nt, Human
cccagguggcugug

SEQ ID NO: 2023716 - RNA, 15 nt, Human
cccagguggcugugg

SEQ ID NO: 2023717 - RNA, 18 nt, Human
cccagccccuucugaccc

SEQ ID NO: 2023718 - RNA, 19 nt, Human
cccagcccuuccucugcuc

SEQ ID NO: 2023719 - RNA, 12 nt, Human
cccagccugcua

SEQ ID NO: 2023720 - RNA, 16 nt, Human
cccagccucuuucccu

SEQ ID NO: 2023721 - RNA, 23 nt, Human
cccagccucaaauccaggacccu

SEQ ID NO: 2023722 - RNA, 15 nt, Human
cccagccucuuuccc

SEQ ID NO: 2023723 - RNA, 21 nt, Human
cccagccucaaauccaggacc

SEQ ID NO: 2023724 - RNA, 19 nt, Human
cccagcaagugagagcugg

SEQ ID NO: 2023725 - RNA, 20 nt, Human
cccagcaagugagagcuggg

SEQ ID NO: 2023726 - RNA, 21 nt, Human
cccagcaagugagagcugggu

SEQ ID NO: 2023727 - RNA, 22 nt, Human
cccagcaagugagagcugggug

SEQ ID NO: 2023728 - RNA, 23 nt, Human
cccagcaagugagagcugggugu

SEQ ID NO: 2023729 - RNA, 23 nt, Human
cccagauugcaacaggcugggcu

SEQ ID NO: 2023730 - RNA, 11 nt, Human
cccagccccuu

SEQ ID NO: 2023731 - RNA, 22 nt, Human
cccagcuaccucaaccaaugcc

SEQ ID NO: 2023732 - RNA, 14 nt, Human
cccagcuaccucaa

SEQ ID NO: 2023733 - RNA, 20 nt, Human
cccagcgugaagccagggcc

SEQ ID NO: 2023734 - RNA, 14 nt, Human
cccagcuccacccc

SEQ ID NO: 2023735 - RNA, 16 nt, Human
cccagcgagggcccca

SEQ ID NO: 2023736 - RNA, 21 nt, Human
cccagcgcugacgugucagga

SEQ ID NO: 2023737 - RNA, 19 nt, Human
cccagcgagcccugguggc

SEQ ID NO: 2023738 - RNA, 23 nt, Human
cccagcgagcccugguggcagug

SEQ ID NO: 2023739 - RNA, 17 nt, Human
cccagcgagcccuggug

SEQ ID NO: 2023740 - RNA, 18 nt, Human
cccagcgagcccuggugg

SEQ ID NO: 2023741 - RNA, 15 nt, Human
cccagcgagcccugg

SEQ ID NO: 2023742 - RNA, 18 nt, Human
cccagagggccugcaagg

SEQ ID NO: 2023743 - RNA, 20 nt, Human
cccagagggccugcaaggga

SEQ ID NO: 2023744 - RNA, 15 nt, Human
cccagagucccccca

SEQ ID NO: 2023745 - RNA, 20 nt, Human
cccagaguccccccacuccc

SEQ ID NO: 2023746 - RNA, 20 nt, Human
cccagauugcaacaggcugg

SEQ ID NO: 2023747 - RNA, 23 nt, Human
cccagauggcuggaaggggucca

SEQ ID NO: 2023748 - RNA, 14 nt, Human
cccagaucagccag

SEQ ID NO: 2023749 - RNA, 15 nt, Human
cccagaucagccaga

SEQ ID NO: 2023750 - RNA, 19 nt, Human
cccagaucagccagaagcc

SEQ ID NO: 2023751 - RNA, 21 nt, Human
cccagauugcaacaggcuggg

SEQ ID NO: 2023752 - RNA, 22 nt, Human
cccagauugcaacaggcugggc

SEQ ID NO: 2023753 - RNA, 16 nt, Human
cccagcaagugagagc

SEQ ID NO: 2023754 - RNA, 18 nt, Human
cccagcaagugagagcug

SEQ ID NO: 2023755 - RNA, 20 nt, Human
cccaaucccagcuaccucaa

SEQ ID NO: 2023756 - RNA, 17 nt, Human
cccaauaccccauggac

SEQ ID NO: 2023757 - RNA, 21 nt, Human
cccaaguuuugugaaauuuuu

SEQ ID NO: 2023758 - RNA, 16 nt, Human
cccaauaccccaugga

SEQ ID NO: 2023759 - RNA, 17 nt, Human
cccaaguuuugugaaau

SEQ ID NO: 2023760 - RNA, 19 nt, Human
cccaaguuuugugaaauuu

SEQ ID NO: 2023761 - RNA, 19 nt, Human
cccaaucccagcuaccuca

SEQ ID NO: 2023762 - RNA, 16 nt, Human
cccaauccaucagugc

SEQ ID NO: 2023763 - RNA, 23 nt, Human
cccaaugcacuuuguucuggcuc

SEQ ID NO: 2023764 - RNA, 19 nt, Human
cccaagggccuggccugag

SEQ ID NO: 2023765 - RNA, 18 nt, Human
cccaagggccuggccuga

SEQ ID NO: 2023766 - RNA, 23 nt, Human
cccaagggccuggccugagcugg

SEQ ID NO: 2023767 - RNA, 13 nt, Human
cccaacacgggua

SEQ ID NO: 2023768 - RNA, 17 nt, Human
cccaagggccuggccug

SEQ ID NO: 2023769 - RNA, 13 nt, Human
cccaacacaaaga

SEQ ID NO: 2023770 - RNA, 13 nt, Human
cccaaauuuaauu

SEQ ID NO: 2023771 - RNA, 21 nt, Human
cccaaauugucaccugcuucu

SEQ ID NO: 2023772 - RNA, 17 nt, Human
cccaaaugugugcccag

SEQ ID NO: 2023773 - RNA, 18 nt, Human
cccaaaugugugcccagc

SEQ ID NO: 2023774 - RNA, 19 nt, Human
cccaaaugugugcccagcu

SEQ ID NO: 2023775 - RNA, 23 nt, Human
cccaaauggaaaugggcagagca

SEQ ID NO: 2023776 - RNA, 15 nt, Human
ccaccccacacacgc

SEQ ID NO: 2023777 - RNA, 14 nt, Human
ccacgguguucugu

SEQ ID NO: 2023778 - RNA, 16 nt, Human
ccacggccuccuuucc

SEQ ID NO: 2023779 - RNA, 23 nt, Human
ccacggccaggccagagggagug

SEQ ID NO: 2023780 - RNA, 18 nt, Human
ccacgcuggagugcagug

SEQ ID NO: 2023781 - RNA, 19 nt, Human
ccacgcuggagugcaguga

SEQ ID NO: 2023782 - RNA, 16 nt, Human
ccacggccaggccaga

SEQ ID NO: 2023783 - RNA, 18 nt, Human
ccacggccaggccagagg

SEQ ID NO: 2023784 - RNA, 15 nt, Human
ccacccccacccaag

SEQ ID NO: 2023785 - RNA, 13 nt, Human
ccaccccauggcc

SEQ ID NO: 2023786 - RNA, 16 nt, Human
ccacgcuggagugcag

SEQ ID NO: 2023787 - RNA, 16 nt, Human
ccacuacauucuguua

SEQ ID NO: 2023788 - RNA, 17 nt, Human
ccacuacauucuguuaa

SEQ ID NO: 2023789 - RNA, 15 nt, Human
ccacuagacccacug

SEQ ID NO: 2023790 - RNA, 17 nt, Human
ccacuagacccacugga

SEQ ID NO: 2023791 - RNA, 11 nt, Human
ccacuacauuc

SEQ ID NO: 2023792 - RNA, 15 nt, Human
ccacuacauucuguu

SEQ ID NO: 2023793 - RNA, 14 nt, Human
ccacuacauucugu

SEQ ID NO: 2023794 - RNA, 18 nt, Human
ccacucaguccauagcag

SEQ ID NO: 2023795 - RNA, 20 nt, Human
ccacuccagaccccuggcuu

SEQ ID NO: 2023796 - RNA, 21 nt, Human
ccacuccagaccccuggcuuu

SEQ ID NO: 2023797 - RNA, 22 nt, Human
ccacuccagaccccuggcuuuu

SEQ ID NO: 2023798 - RNA, 17 nt, Human
ccagacagacaacacug

SEQ ID NO: 2023799 - RNA, 14 nt, Human
ccagaccccuggcu

SEQ ID NO: 2023800 - RNA, 15 nt, Human
ccagaccccuggcuu

SEQ ID NO: 2023801 - RNA, 16 nt, Human
ccagaccccuggcuuu

SEQ ID NO: 2023802 - RNA, 17 nt, Human
ccagaccccuggcuuuu

SEQ ID NO: 2023803 - RNA, 19 nt, Human
ccagaauuucccaaagcag

SEQ ID NO: 2023804 - RNA, 12 nt, Human
ccagaauuuccc

SEQ ID NO: 2023805 - RNA, 16 nt, Human
ccagaaugcuuuagga

SEQ ID NO: 2023806 - RNA, 23 nt, Human
ccagaauggucuuucuaaugugu

SEQ ID NO: 2023807 - RNA, 13 nt, Human
ccagaauuucaaa

SEQ ID NO: 2023808 - RNA, 14 nt, Human
ccagaauuauuuuu

SEQ ID NO: 2023809 - RNA, 21 nt, Human
ccagaauuucccaaagcagug

SEQ ID NO: 2023810 - RNA, 18 nt, Human
ccagaauuucccaaagca

SEQ ID NO: 2023811 - RNA, 21 nt, Human
ccagacaccuugacagggcac

SEQ ID NO: 2023812 - RNA, 15 nt, Human
ccagacaagcuguug

SEQ ID NO: 2023813 - RNA, 23 nt, Human
ccagacaagcuguugaccaggca

SEQ ID NO: 2023814 - RNA, 12 nt, Human
ccagacacaaac

SEQ ID NO: 2023815 - RNA, 18 nt, Human
ccagacacaaacugccaa

SEQ ID NO: 2023816 - RNA, 12 nt, Human
ccagaagcccag

SEQ ID NO: 2023817 - RNA, 13 nt, Human
ccagaagcccaga

SEQ ID NO: 2023818 - RNA, 20 nt, Human
ccagaagccacccaaagcag

SEQ ID NO: 2023819 - RNA, 22 nt, Human
ccagaagauagcuucaccccaa

SEQ ID NO: 2023820 - RNA, 14 nt, Human
ccagaagcccagaa

SEQ ID NO: 2023821 - RNA, 22 nt, Human
ccagaaguuugagaucagccug

SEQ ID NO: 2023822 - RNA, 22 nt, Human
ccagaauaaacuggcagcucag

SEQ ID NO: 2023823 - RNA, 23 nt, Human
ccagaaguuugagaucagccugg

SEQ ID NO: 2023824 - RNA, 24 nt, Human
ccagaaacuguucccaccugcugg

SEQ ID NO: 2023825 - RNA, 18 nt, Human
ccagaaaugucccuuucu

SEQ ID NO: 2023826 - RNA, 22 nt, Human
ccagaaaugucccuuucuucuc

SEQ ID NO: 2023827 - RNA, 14 nt, Human
ccacuucagcugac

SEQ ID NO: 2023828 - RNA, 13 nt, Human
ccacuucagcuga

SEQ ID NO: 2023829 - RNA, 21 nt, Human
ccacuuagaaauugcauuucc

SEQ ID NO: 2023830 - RNA, 20 nt, Human
ccacuuagccuuucuuuucu

SEQ ID NO: 2023831 - RNA, 15 nt, Human
ccacuucaaaacaaa

SEQ ID NO: 2023832 - RNA, 14 nt, Human
ccacuucaaaacaa

SEQ ID NO: 2023833 - RNA, 13 nt, Human
ccacugcagaaga

SEQ ID NO: 2023834 - RNA, 18 nt, Human
ccacugcagaagacagua

SEQ ID NO: 2023835 - RNA, 22 nt, Human
ccacucccagcaucgcacucug

SEQ ID NO: 2023836 - RNA, 19 nt, Human
ccacuuagaaauugcauuu

SEQ ID NO: 2023837 - RNA, 17 nt, Human
ccacccccacccaaggg

SEQ ID NO: 2023838 - RNA, 23 nt, Human
ccacccaggagccccgaggccuu

SEQ ID NO: 2023839 - RNA, 17 nt, Human
ccacccaagcaggaggc

SEQ ID NO: 2023840 - RNA, 21 nt, Human
ccacccaggagccccgaggcc

SEQ ID NO: 2023841 - RNA, 16 nt, Human
ccacccaaagcagugg

SEQ ID NO: 2023842 - RNA, 15 nt, Human
ccacccaagcaggag

SEQ ID NO: 2023843 - RNA, 13 nt, Human
ccacccaaagcag

SEQ ID NO: 2023844 - RNA, 16 nt, Human
ccaauauucauagcag

SEQ ID NO: 2023845 - RNA, 22 nt, Human
ccaauaugugauuuuuuuuccc

SEQ ID NO: 2023846 - RNA, 19 nt, Human
ccacacauuucacugucug

SEQ ID NO: 2023847 - RNA, 20 nt, Human
ccacacauuucacugucugu

SEQ ID NO: 2023848 - RNA, 20 nt, Human
ccacacagacuugggcaggg

SEQ ID NO: 2023849 - RNA, 13 nt, Human
ccacaccagcccc

SEQ ID NO: 2023850 - RNA, 14 nt, Human
ccacaccagcccca

SEQ ID NO: 2023851 - RNA, 20 nt, Human
ccacacccagcccacuucug

SEQ ID NO: 2023852 - RNA, 15 nt, Human
ccacacccagcccac

SEQ ID NO: 2023853 - RNA, 16 nt, Human
ccacacccucacugcu

SEQ ID NO: 2023854 - RNA, 21 nt, Human
ccacacccagcccacuucugc

SEQ ID NO: 2023855 - RNA, 22 nt, Human
ccacacccagcccacuucugcc

SEQ ID NO: 2023856 - RNA, 22 nt, Human
ccacacguaaugaaacuuggau

SEQ ID NO: 2023857 - RNA, 14 nt, Human
ccacagcugcucaa

SEQ ID NO: 2023858 - RNA, 12 nt, Human
ccacacuccagc

SEQ ID NO: 2023859 - RNA, 23 nt, Human
ccacaggcccuuccucuccacug

SEQ ID NO: 2023860 - RNA, 18 nt, Human
ccacaggcaugucccaug

SEQ ID NO: 2023861 - RNA, 17 nt, Human
ccacaggcccuuccucu

SEQ ID NO: 2023862 - RNA, 18 nt, Human
ccacaggcccuuccucuc

SEQ ID NO: 2023863 - RNA, 19 nt, Human
ccacaggcccuuccucucc

SEQ ID NO: 2023864 - RNA, 22 nt, Human
ccacaggcccuuccucuccacu

SEQ ID NO: 2023865 - RNA, 16 nt, Human
ccacaggcauguccca

SEQ ID NO: 2023866 - RNA, 15 nt, Human
ccacaggcccuuccu

SEQ ID NO: 2023867 - RNA, 16 nt, Human
ccacaggcccuuccuc

SEQ ID NO: 2023868 - RNA, 16 nt, Human
ccacaggaucagucug

SEQ ID NO: 2023869 - RNA, 21 nt, Human
ccaccaacauacucccaucug

SEQ ID NO: 2023870 - RNA, 21 nt, Human
ccaccaagccuggucagccca

SEQ ID NO: 2023871 - RNA, 15 nt, Human
ccaccaacccucaga

SEQ ID NO: 2023872 - RNA, 20 nt, Human
ccacaucuugcucugcugac

SEQ ID NO: 2023873 - RNA, 19 nt, Human
ccacaucuugcucugcuga

SEQ ID NO: 2023874 - RNA, 18 nt, Human
ccacaucuugcucugcug

SEQ ID NO: 2023875 - RNA, 17 nt, Human
ccacaucuugcucugcu

SEQ ID NO: 2023876 - RNA, 16 nt, Human
ccacauuccugaugcu

SEQ ID NO: 2023877 - RNA, 16 nt, Human
ccacaugugcacaugc

SEQ ID NO: 2023878 - RNA, 21 nt, Human
ccacauccggggccagcuccg

SEQ ID NO: 2023879 - RNA, 14 nt, Human
ccacaucccucucu

SEQ ID NO: 2023880 - RNA, 21 nt, Human
ccacaucccucucugcuggac

SEQ ID NO: 2023881 - RNA, 12 nt, Human
ccacauccacag

SEQ ID NO: 2023882 - RNA, 16 nt, Human
ccacauccacagucuc

SEQ ID NO: 2023883 - RNA, 21 nt, Human
ccacaguguaccauuaaaaua

SEQ ID NO: 2023884 - RNA, 19 nt, Human
ccacagucucccccacccu

SEQ ID NO: 2023885 - RNA, 14 nt, Human
ccacaggugcccgc

SEQ ID NO: 2023886 - RNA, 18 nt, Human
ccacagguaauuucuccu

SEQ ID NO: 2023887 - RNA, 16 nt, Human
ccaagaggcugcagcc

SEQ ID NO: 2023888 - RNA, 21 nt, Human
ccaagagguuuggcuccugcc

SEQ ID NO: 2023889 - RNA, 22 nt, Human
ccaagagguuuggcuccugccc

SEQ ID NO: 2023890 - RNA, 23 nt, Human
ccaagagguuuggcuccugccca

SEQ ID NO: 2023891 - RNA, 21 nt, Human
ccaagaguggccccaccuggc

SEQ ID NO: 2023892 - RNA, 13 nt, Human
ccaagaguggccc

SEQ ID NO: 2023893 - RNA, 15 nt, Human
ccaagaguggcccca

SEQ ID NO: 2023894 - RNA, 16 nt, Human
ccaagaguggccccac

SEQ ID NO: 2023895 - RNA, 18 nt, Human
ccaagaguggccccaccu

SEQ ID NO: 2023896 - RNA, 19 nt, Human
ccaagaguggccccaccug

SEQ ID NO: 2023897 - RNA, 20 nt, Human
ccaagaguggccccaccugg

SEQ ID NO: 2023898 - RNA, 14 nt, Human
ccaagaggcugcag

SEQ ID NO: 2023899 - RNA, 15 nt, Human
ccaagaggcugcagc

SEQ ID NO: 2023900 - RNA, 21 nt, Human
ccaagacuuauuuucacaugu

SEQ ID NO: 2023901 - RNA, 20 nt, Human
ccaagaagcccaggaaaggc

SEQ ID NO: 2023902 - RNA, 19 nt, Human
ccaagaagcccaggaaagg

SEQ ID NO: 2023903 - RNA, 19 nt, Human
ccaagaauagaugcugacu

SEQ ID NO: 2023904 - RNA, 20 nt, Human
ccaagaauagaugcugacug

SEQ ID NO: 2023905 - RNA, 17 nt, Human
ccaagaaguuuaaggaa

SEQ ID NO: 2023906 - RNA, 17 nt, Human
ccaaccccucgcccagu

SEQ ID NO: 2023907 - RNA, 18 nt, Human
ccaaccccucgcccaguc

SEQ ID NO: 2023908 - RNA, 22 nt, Human
ccaaccccucgcccagucccag

SEQ ID NO: 2023909 - RNA, 12 nt, Human
ccaacccucauc

SEQ ID NO: 2023910 - RNA, 15 nt, Human
ccaagaagcccagga

SEQ ID NO: 2023911 - RNA, 14 nt, Human
ccaacccucagagc

SEQ ID NO: 2023912 - RNA, 15 nt, Human
ccaacccucagagcc

SEQ ID NO: 2023913 - RNA, 23 nt, Human
ccaaaggaagcacaugccucucu

SEQ ID NO: 2023914 - RNA, 15 nt, Human
ccaaaggaagcacau

SEQ ID NO: 2023915 - RNA, 21 nt, Human
ccaaagcuaggccuggccaga

SEQ ID NO: 2023916 - RNA, 16 nt, Human
ccaaagcuaggccugg

SEQ ID NO: 2023917 - RNA, 17 nt, Human
ccaaagcuaggccuggc

SEQ ID NO: 2023918 - RNA, 17 nt, Human
ccaaagcgaauuuuaaa

SEQ ID NO: 2023919 - RNA, 15 nt, Human
ccaaagcuaggccug

SEQ ID NO: 2023920 - RNA, 20 nt, Human
ccaaacucaccugccccuca

SEQ ID NO: 2023921 - RNA, 17 nt, Human
ccaaacagugcuguuuc

SEQ ID NO: 2023922 - RNA, 14 nt, Human
ccaaagccaaugug

SEQ ID NO: 2023923 - RNA, 12 nt, Human
ccaaacauuaau

SEQ ID NO: 2023924 - RNA, 19 nt, Human
ccaaagcaguggagcccag

SEQ ID NO: 2023925 - RNA, 23 nt, Human
ccaaagcaguggagcccaggagu

SEQ ID NO: 2023926 - RNA, 22 nt, Human
ccaaagccuccuccagccgcca

SEQ ID NO: 2023927 - RNA, 17 nt, Human
ccaaagccuccuccagc

SEQ ID NO: 2023928 - RNA, 19 nt, Human
ccaaagcagugcaugcugu

SEQ ID NO: 2023929 - RNA, 23 nt, Human
ccaaagcagugcaugcugucccu

SEQ ID NO: 2023930 - RNA, 19 nt, Human
ccaaagccaaagcuaggcc

SEQ ID NO: 2023931 - RNA, 20 nt, Human
ccaacagccacucagaaaag

SEQ ID NO: 2023932 - RNA, 16 nt, Human
ccaacauacucccauc

SEQ ID NO: 2023933 - RNA, 20 nt, Human
ccaacauacucccaucugug

SEQ ID NO: 2023934 - RNA, 19 nt, Human
ccaacauacucccaucugu

SEQ ID NO: 2023935 - RNA, 18 nt, Human
ccaacauacucccaucug

SEQ ID NO: 2023936 - RNA, 17 nt, Human
ccaacauacucccaucu

SEQ ID NO: 2023937 - RNA, 22 nt, Human
ccaacauacucccaucugugaa

SEQ ID NO: 2023938 - RNA, 21 nt, Human
ccaacauacucccaucuguga

SEQ ID NO: 2023939 - RNA, 13 nt, Human
ccaacaucaacau

SEQ ID NO: 2023940 - RNA, 17 nt, Human
ccaacaggggcuccaug

SEQ ID NO: 2023941 - RNA, 20 nt, Human
ccaacagguagcauagcucu

SEQ ID NO: 2023942 - RNA, 20 nt, Human
ccaaccaaguggcucccaca

SEQ ID NO: 2023943 - RNA, 21 nt, Human
ccaaccacacuugucggcucc

SEQ ID NO: 2023944 - RNA, 20 nt, Human
ccaaaguacacuguuucaaa

SEQ ID NO: 2023945 - RNA, 15 nt, Human
ccaaaguacacuguu

SEQ ID NO: 2023946 - RNA, 18 nt, Human
ccaaaguacacuguuuca

SEQ ID NO: 2023947 - RNA, 19 nt, Human
ccaacaagaauaaaggcag

SEQ ID NO: 2023948 - RNA, 21 nt, Human
ccaacaagaauaaaggcagcu

SEQ ID NO: 2023949 - RNA, 17 nt, Human
ccaaggccaaaggaagc

SEQ ID NO: 2023950 - RNA, 22 nt, Human
ccaagcucccaggcauucccca

SEQ ID NO: 2023951 - RNA, 16 nt, Human
ccaagcucccaggcau

SEQ ID NO: 2023952 - RNA, 15 nt, Human
ccaagcucccaggca

SEQ ID NO: 2023953 - RNA, 14 nt, Human
ccaagcucccaggc

SEQ ID NO: 2023954 - RNA, 17 nt, Human
ccaagcgcccuggcccc

SEQ ID NO: 2023955 - RNA, 22 nt, Human
ccaagcgcccuggcccccacau

SEQ ID NO: 2023956 - RNA, 13 nt, Human
ccaagcgcccugg

SEQ ID NO: 2023957 - RNA, 14 nt, Human
ccaagcgcccuggc

SEQ ID NO: 2023958 - RNA, 16 nt, Human
ccaagcgcccuggccc

SEQ ID NO: 2023959 - RNA, 19 nt, Human
ccaagccuggucagcccaa

SEQ ID NO: 2023960 - RNA, 20 nt, Human
ccaagccuggucagcccaaa

SEQ ID NO: 2023961 - RNA, 19 nt, Human
ccaagccuuggcucuaccc

SEQ ID NO: 2023962 - RNA, 15 nt, Human
ccaagccuggcaagg

SEQ ID NO: 2023963 - RNA, 13 nt, Human
ccaagccguggcu

SEQ ID NO: 2023964 - RNA, 22 nt, Human
ccaagccuacuuuugccauuga

SEQ ID NO: 2023965 - RNA, 21 nt, Human
ccaaggccaaaggaagcacau

SEQ ID NO: 2023966 - RNA, 18 nt, Human
ccaaggccaaaggaagca

SEQ ID NO: 2023967 - RNA, 16 nt, Human
ccaaggccaggccuug

SEQ ID NO: 2023968 - RNA, 15 nt, Human
ccaagggccuggccu

SEQ ID NO: 2023969 - RNA, 18 nt, Human
ccaagggccuggccugag

SEQ ID NO: 2023970 - RNA, 16 nt, Human
ccaagggccuggccug

SEQ ID NO: 2023971 - RNA, 19 nt, Human
ccaagggccuggccugagc

SEQ ID NO: 2023972 - RNA, 22 nt, Human
ccaaggggaauguuugccucug

SEQ ID NO: 2023973 - RNA, 19 nt, Human
ccaagggguccccuccagg

SEQ ID NO: 2023974 - RNA, 20 nt, Human
ccaagguagaaugaccuugu

SEQ ID NO: 2023975 - RNA, 23 nt, Human
ccaagguuuggggaagaacgaag

SEQ ID NO: 2023976 - RNA, 13 nt, Human
ccaaggugggagg

SEQ ID NO: 2023977 - RNA, 18 nt, Human
ccaaggugggaggauugc

SEQ ID NO: 2023978 - RNA, 14 nt, Human
ccaaguacacugag

SEQ ID NO: 2023979 - RNA, 20 nt, Human
ccaagucaagugaaaaagga

SEQ ID NO: 2023980 - RNA, 22 nt, Human
ccaauaguuguugauuggcagg

SEQ ID NO: 2023981 - RNA, 14 nt, Human
ccaauaccccaugg

SEQ ID NO: 2023982 - RNA, 16 nt, Human
ccaauaccccauggac

SEQ ID NO: 2023983 - RNA, 17 nt, Human
ccaauaccccauggacc

SEQ ID NO: 2023984 - RNA, 12 nt, Human
ccaaguuuugug

SEQ ID NO: 2023985 - RNA, 16 nt, Human
ccaaguuuugugaaau

SEQ ID NO: 2023986 - RNA, 17 nt, Human
ccaaguuuugugaaauu

SEQ ID NO: 2023987 - RNA, 22 nt, Human
ccaaguuuugugaaauuuuuca

SEQ ID NO: 2023988 - RNA, 21 nt, Human
ccaaguccgcagaagcccuga

SEQ ID NO: 2023989 - RNA, 15 nt, Human
cacccaagggccugg

SEQ ID NO: 2023990 - RNA, 14 nt, Human
cacccaagggccug

SEQ ID NO: 2023991 - RNA, 15 nt, Human
cauuguagagcuucu

SEQ ID NO: 2023992 - RNA, 23 nt, Human
cauugccccaaauggauuccugu

SEQ ID NO: 2023993 - RNA, 22 nt, Human
cauugccccaaauggauuccug

SEQ ID NO: 2023994 - RNA, 16 nt, Human
cauuguagagcuucug

SEQ ID NO: 2023995 - RNA, 17 nt, Human
cauuguagagcuucugg

SEQ ID NO: 2023996 - RNA, 19 nt, Human
cauuguagagcuucuggca

SEQ ID NO: 2023997 - RNA, 21 nt, Human
cauuguagagcuucuggcacu

SEQ ID NO: 2023998 - RNA, 16 nt, Human
cauuguccagagcugc

SEQ ID NO: 2023999 - RNA, 18 nt, Human
cauuguccagagcugcuu

SEQ ID NO: 2024000 - RNA, 20 nt, Human
cauuguccagagcugcuucc

SEQ ID NO: 2024001 - RNA, 22 nt, Human
cauuguccagagcugcuucccc

SEQ ID NO: 2024002 - RNA, 19 nt, Human
cauugucccugaagagaag

SEQ ID NO: 2024003 - RNA, 14 nt, Human
cauuguccagagcu

SEQ ID NO: 2024004 - RNA, 15 nt, Human
cauuguccagagcug

SEQ ID NO: 2024005 - RNA, 23 nt, Human
cauuguauucagaguugaugguu

SEQ ID NO: 2024006 - RNA, 15 nt, Human
cauuguaucugucuu

SEQ ID NO: 2024007 - RNA, 16 nt, Human
cauuguaucugucuuu

SEQ ID NO: 2024008 - RNA, 17 nt, Human
cauuguaucugucuuuc

SEQ ID NO: 2024009 - RNA, 18 nt, Human
cauuguaucugucuuucc

SEQ ID NO: 2024010 - RNA, 18 nt, Human
cauuguuggccaaagcca

SEQ ID NO: 2024011 - RNA, 17 nt, Human
cauuguuggacauuugg

SEQ ID NO: 2024012 - RNA, 17 nt, Human
cauuguuggccaaagcc

SEQ ID NO: 2024013 - RNA, 16 nt, Human
cauuucuaauuccugu

SEQ ID NO: 2024014 - RNA, 18 nt, Human
cauuucuaauuccuguuu

SEQ ID NO: 2024015 - RNA, 12 nt, Human
cauuuccugugu

SEQ ID NO: 2024016 - RNA, 13 nt, Human
cauuuccuguguc

SEQ ID NO: 2024017 - RNA, 20 nt, Human
cauuuaaaacauuaaaauau

SEQ ID NO: 2024018 - RNA, 12 nt, Human
cauuuaaaagau

SEQ ID NO: 2024019 - RNA, 15 nt, Human
cauuuaaaagauaca

SEQ ID NO: 2024020 - RNA, 16 nt, Human
cauuuaaaagauacag

SEQ ID NO: 2024021 - RNA, 21 nt, Human
cauuuaaaacauuaaaauaua

SEQ ID NO: 2024022 - RNA, 13 nt, Human
cauuuaaaagaca

SEQ ID NO: 2024023 - RNA, 17 nt, Human
cauuuagggaguauucu

SEQ ID NO: 2024024 - RNA, 20 nt, Human
cauuuagggaguauucuaau

SEQ ID NO: 2024025 - RNA, 21 nt, Human
cauuuagggaguauucuaaua

SEQ ID NO: 2024026 - RNA, 17 nt, Human
cauuuaggccaugggac

SEQ ID NO: 2024027 - RNA, 15 nt, Human
cauuuccuaaauaua

SEQ ID NO: 2024028 - RNA, 13 nt, Human
cauuuccugacag

SEQ ID NO: 2024029 - RNA, 20 nt, Human
cauuuccugacagaaggacu

SEQ ID NO: 2024030 - RNA, 22 nt, Human
cauuugaaaauuuugauguuuu

SEQ ID NO: 2024031 - RNA, 20 nt, Human
cauuugaaaauuuugauguu

SEQ ID NO: 2024032 - RNA, 19 nt, Human
cauuugaaaccccuguagg

SEQ ID NO: 2024033 - RNA, 21 nt, Human
cauuugaaaccccuguaggcc

SEQ ID NO: 2024034 - RNA, 14 nt, Human
cauuugcuccuuuc

SEQ ID NO: 2024035 - RNA, 13 nt, Human
cauuugcuccuuu

SEQ ID NO: 2024036 - RNA, 17 nt, Human
cauuuguuugaacugau

SEQ ID NO: 2024037 - RNA, 13 nt, Human
cauuugcugaaua

SEQ ID NO: 2024038 - RNA, 20 nt, Human
cauuuguuugaacugauaaa

SEQ ID NO: 2024039 - RNA, 22 nt, Human
cauuuguuugaacugauaaaga

SEQ ID NO: 2024040 - RNA, 20 nt, Human
cauuugagcagggcucagcg

SEQ ID NO: 2024041 - RNA, 17 nt, Human
cauuugagcagggcuca

SEQ ID NO: 2024042 - RNA, 18 nt, Human
cauuugagcagggcucag

SEQ ID NO: 2024043 - RNA, 18 nt, Human
cauuuguuugguuauagu

SEQ ID NO: 2024044 - RNA, 16 nt, Human
cauuuuagcuaauuua

SEQ ID NO: 2024045 - RNA, 19 nt, Human
cauuuuagggguagcauuu

SEQ ID NO: 2024046 - RNA, 12 nt, Human
cauuuuguaaua

SEQ ID NO: 2024047 - RNA, 13 nt, Human
cauuuuguaauaa

SEQ ID NO: 2024048 - RNA, 16 nt, Human
cauuuuguaauaauaa

SEQ ID NO: 2024049 - RNA, 18 nt, Human
cauuuuguguugaagagc

SEQ ID NO: 2024050 - RNA, 21 nt, Human
cauuuuguguugaagagcagc

SEQ ID NO: 2024051 - RNA, 21 nt, Human
cauuuuucaaaaaguaaaaag

SEQ ID NO: 2024052 - RNA, 17 nt, Human
ccaaacucaccugcccc

SEQ ID NO: 2024053 - RNA, 19 nt, Human
ccaaacauccuacaagaca

SEQ ID NO: 2024054 - RNA, 20 nt, Human
ccaaacauccuacaagacac

SEQ ID NO: 2024055 - RNA, 16 nt, Human
ccaaacaggcccuccu

SEQ ID NO: 2024056 - RNA, 18 nt, Human
ccaaacaggcccuccucc

SEQ ID NO: 2024057 - RNA, 13 nt, Human
gauccuucacauu

SEQ ID NO: 2024058 - RNA, 19 nt, Human
gagggacccuccaccaccu

SEQ ID NO: 2024059 - RNA, 19 nt, Human
gagugcaggcccacccugc

SEQ ID NO: 2024060 - RNA, 19 nt, Human
gauaaaagacagugaaaga

SEQ ID NO: 2024061 - RNA, 15 nt, Human
gagagaaauauuuua

SEQ ID NO: 2024062 - RNA, 17 nt, Human
gagaggccucgacccac

SEQ ID NO: 2024063 - RNA, 19 nt, Human
gagccgggccuugucgcag

SEQ ID NO: 2024064 - RNA, 23 nt, Human
gacauggcucccccuccaccugc

SEQ ID NO: 2024065 - RNA, 16 nt, Human
gaccagagcugccacc

SEQ ID NO: 2024066 - RNA, 22 nt, Human
gaccagcuuggcucaggcugag

SEQ ID NO: 2024067 - RNA, 14 nt, Human
gaaaauuaguuccc

SEQ ID NO: 2024068 - RNA, 14 nt, Human
gaccccugaccccu

SEQ ID NO: 2024069 - RNA, 13 nt, Human
gaccucaggugau

SEQ ID NO: 2024070 - RNA, 17 nt, Human
gacgauggugaggagau

SEQ ID NO: 2024071 - RNA, 17 nt, Human
gacgcaccagcccagaa

SEQ ID NO: 2024072 - RNA, 14 nt, Human
gacuggaaggacca

SEQ ID NO: 2024073 - RNA, 21 nt, Human
cuggcucagguggggucacuc

SEQ ID NO: 2024074 - RNA, 20 nt, Human
cugggaggucaaggcugcag

SEQ ID NO: 2024075 - RNA, 18 nt, Human
cuugaguucucaacugag

SEQ ID NO: 2024076 - RNA, 19 nt, Human
cugugcgaucccacccgug

SEQ ID NO: 2024077 - RNA, 19 nt, Human
cuggggccaggcugggucg

SEQ ID NO: 2024078 - RNA, 16 nt, Human
gaugcuaucaguuuua

SEQ ID NO: 2024079 - RNA, 16 nt, Human
gcacagggccuggccc

SEQ ID NO: 2024080 - RNA, 14 nt, Human
gaugauuucagaaa

SEQ ID NO: 2024081 - RNA, 17 nt, Human
gcacucagaagacacug

SEQ ID NO: 2024082 - RNA, 24 nt, Human
gcagcccgggucaucuguaccucu

SEQ ID NO: 2024083 - RNA, 19 nt, Human
gcaggcccacccugcuugg

SEQ ID NO: 2024084 - RNA, 16 nt, Human
gcaucacaugaacuug

SEQ ID NO: 2024085 - RNA, 17 nt, Human
gcaucaguguuuuucaa

SEQ ID NO: 2024086 - RNA, 17 nt, Human
gcauugucuauuuuucu

SEQ ID NO: 2024087 - RNA, 16 nt, Human
gccaguaacacaggcc

SEQ ID NO: 2024088 - RNA, 17 nt, Human
gcccaggccuccuacag

SEQ ID NO: 2024089 - RNA, 12 nt, Human
gcccaggcucca

SEQ ID NO: 2024090 - RNA, 21 nt, Human
gcccagggcuuuaaaaagaau

SEQ ID NO: 2024091 - RNA, 15 nt, Human
gccggccuccagaac

SEQ ID NO: 2024092 - RNA, 15 nt, Human
gcccucccugccccu

SEQ ID NO: 2024093 - RNA, 22 nt, Human
gcccuccucccucccagcucca

SEQ ID NO: 2024094 - RNA, 15 nt, Human
gcccugcccaccugg

SEQ ID NO: 2024095 - RNA, 12 nt, Human
gcacacgcugcu

SEQ ID NO: 2024096 - RNA, 15 nt, Human
gauccaagcaaaugg

SEQ ID NO: 2024097 - RNA, 16 nt, Human
gauuugagauuuuuau

SEQ ID NO: 2024098 - RNA, 21 nt, Human
gauuugauuuuuuuuuuuaau

SEQ ID NO: 2024099 - RNA, 13 nt, Human
gcaauauauuuug

SEQ ID NO: 2024100 - RNA, 15 nt, Human
gcagaaccauuuuug

SEQ ID NO: 2024101 - RNA, 14 nt, Human
gcagaguauuuuug

SEQ ID NO: 2024102 - RNA, 17 nt, Human
gagcucccucugcccca

SEQ ID NO: 2024103 - RNA, 11 nt, Human
gaggccuccgg

SEQ ID NO: 2024104 - RNA, 17 nt, Human
gaggcucuggagcccac

SEQ ID NO: 2024105 - RNA, 21 nt, Human
gaguagcugggacuacaggca

SEQ ID NO: 2024106 - RNA, 15 nt, Human
gaggacaauuuccag

SEQ ID NO: 2024107 - RNA, 21 nt, Human
gagucucgcucuguugcccag

SEQ ID NO: 2024108 - RNA, 19 nt, Human
gaugugccugcuucagccu

SEQ ID NO: 2024109 - RNA, 23 nt, Human
gauuccagcacaaccuucaagcu

SEQ ID NO: 2024110 - RNA, 17 nt, Human
gagacagacuagaaguu

SEQ ID NO: 2024111 - RNA, 16 nt, Human
gagaccugugugccag

SEQ ID NO: 2024112 - RNA, 14 nt, Human
gagcauuacaggca

SEQ ID NO: 2024113 - RNA, 14 nt, Human
gacgcuucacagga

SEQ ID NO: 2024114 - RNA, 11 nt, Human
gacuccugcag

SEQ ID NO: 2024115 - RNA, 22 nt, Human
gacucuuuuccaaacacaggca

SEQ ID NO: 2024116 - RNA, 20 nt, Human
gacaagcuguugaccaggca

SEQ ID NO: 2024117 - RNA, 19 nt, Human
gaagauuauauauauuuuu

SEQ ID NO: 2024118 - RNA, 18 nt, Human
gaauggaagguggagaag

SEQ ID NO: 2024119 - RNA, 18 nt, Human
gaauuauaauuaguuccu

SEQ ID NO: 2024120 - RNA, 16 nt, Human
gacagaaggcuccugc

SEQ ID NO: 2024121 - RNA, 19 nt, Human
gacagccuggcacagggca

SEQ ID NO: 2024122 - RNA, 17 nt, Human
cuuauaucuauauuuua

SEQ ID NO: 2024123 - RNA, 14 nt, Human
gaacaaauuuacag

SEQ ID NO: 2024124 - RNA, 21 nt, Human
gaaccaccugccuauauuuuu

SEQ ID NO: 2024125 - RNA, 15 nt, Human
gaacuccugaccuca

SEQ ID NO: 2024126 - RNA, 14 nt, Human
gaacuccugaccuu

SEQ ID NO: 2024127 - RNA, 22 nt, Human
uucaccuacauuugagaauuau

SEQ ID NO: 2024128 - RNA, 23 nt, Human
uuccacaaguuaaauaaaucaua

SEQ ID NO: 2024129 - RNA, 16 nt, Human
uuccuaauccucuagg

SEQ ID NO: 2024130 - RNA, 20 nt, Human
uuacagucucagcaacaaca

SEQ ID NO: 2024131 - RNA, 21 nt, Human
uuauagaagaaugcaugcuuu

SEQ ID NO: 2024132 - RNA, 13 nt, Human
uuaugccugcuuu

SEQ ID NO: 2024133 - RNA, 21 nt, Human
uguccucccaccccugccccc

SEQ ID NO: 2024134 - RNA, 20 nt, Human
ugggcgugagaccugccccu

SEQ ID NO: 2024135 - RNA, 21 nt, Human
ugggucucucuugccccaccu

SEQ ID NO: 2024136 - RNA, 13 nt, Human
uguggccccaccc

SEQ ID NO: 2024137 - RNA, 23 nt, Human
uuaaaacaugcccccuggaaagg

SEQ ID NO: 2024138 - RNA, 23 nt, Human
uuagaauuaguggcacuugcuuu

SEQ ID NO: 2024139 - RNA, 16 nt, Human
uuagaugugcugcuuu

SEQ ID NO: 2024140 - RNA, 15 nt, Human
uuagcaguuugcuuu

SEQ ID NO: 2024141 - RNA, 22 nt, Human
ggucuccgaaaugcugucuuuc

SEQ ID NO: 2024142 - RNA, 17 nt, Human
gggugcugggccccugc

SEQ ID NO: 2024143 - RNA, 21 nt, Human
gggccgcuccgcuccccugcu

SEQ ID NO: 2024144 - RNA, 16 nt, Human
gggcgugagaccugcc

SEQ ID NO: 2024145 - RNA, 19 nt, Human
ggauucacaccccaccugc

SEQ ID NO: 2024146 - RNA, 16 nt, Human
ggcagggcacagggcc

SEQ ID NO: 2024147 - RNA, 11 nt, Human
ggaucucuuuu

SEQ ID NO: 2024148 - RNA, 12 nt, Human
ggaugccaccuc

SEQ ID NO: 2024149 - RNA, 23 nt, Human
ggagggagaagaaagaaagaagu

SEQ ID NO: 2024150 - RNA, 18 nt, Human
ggcugccccgccuggagg

SEQ ID NO: 2024151 - RNA, 19 nt, Human
ggcuggaagggguccagcc

SEQ ID NO: 2024152 - RNA, 13 nt, Human
ggccuccauccug

SEQ ID NO: 2024153 - RNA, 13 nt, Human
ggacugccaccuc

SEQ ID NO: 2024154 - RNA, 21 nt, Human
ggacuuuguuaguuucuccaa

SEQ ID NO: 2024155 - RNA, 11 nt, Human
ggagaaaguac

SEQ ID NO: 2024156 - RNA, 20 nt, Human
ggacauccccugcuggccgg

SEQ ID NO: 2024157 - RNA, 17 nt, Human
ggaccagagcugccacc

SEQ ID NO: 2024158 - RNA, 16 nt, Human
ggacccuccaaggcca

SEQ ID NO: 2024159 - RNA, 22 nt, Human
ggaagucucaaauaauauuuuu

SEQ ID NO: 2024160 - RNA, 12 nt, Human
ggaaauauuuua

SEQ ID NO: 2024161 - RNA, 20 nt, Human
ggaaauguuuucauauuuuu

SEQ ID NO: 2024162 - RNA, 13 nt, Human
gcugccugccccu

SEQ ID NO: 2024163 - RNA, 16 nt, Human
gcuuuacuauuuuuau

SEQ ID NO: 2024164 - RNA, 15 nt, Human
gcugcagcugggagc

SEQ ID NO: 2024165 - RNA, 16 nt, Human
gcucccucacucucag

SEQ ID NO: 2024166 - RNA, 16 nt, Human
gcuccgucuccugcgg

SEQ ID NO: 2024167 - RNA, 18 nt, Human
gcuccgucuccugcgggc

SEQ ID NO: 2024168 - RNA, 20 nt, Human
gcuaaauucuccacauuuug

SEQ ID NO: 2024169 - RNA, 16 nt, Human
gcuauaauaaagaagu

SEQ ID NO: 2024170 - RNA, 12 nt, Human
gggcuccccucu

SEQ ID NO: 2024171 - RNA, 12 nt, Human
gcgcggcugcuu

SEQ ID NO: 2024172 - RNA, 19 nt, Human
ggccgagccugccuccugc

SEQ ID NO: 2024173 - RNA, 21 nt, Human
ggcugcagccugcgccaccgc

SEQ ID NO: 2024174 - RNA, 13 nt, Human
ggcuccugccccc

SEQ ID NO: 2024175 - RNA, 19 nt, Human
ggccagcaccaucucuuua

SEQ ID NO: 2024176 - RNA, 15 nt, Human
ggccagcccuggagg

SEQ ID NO: 2024177 - RNA, 16 nt, Human
ggcccccgggaggacg

SEQ ID NO: 2024178 - RNA, 20 nt, Human
ggccaaacucaccugccccu

SEQ ID NO: 2024179 - RNA, 20 nt, Human
ggagagagaccacacgcagu

SEQ ID NO: 2024180 - RNA, 15 nt, Human
ggagccuccugcccu

SEQ ID NO: 2024181 - RNA, 21 nt, Human
ggaagaucccuuuguccacaa

SEQ ID NO: 2024182 - RNA, 15 nt, Human
ggacucaaugcacug

SEQ ID NO: 2024183 - RNA, 11 nt, Human
ggacugccacc

SEQ ID NO: 2024184 - RNA, 13 nt, Human
ggagaaaggaccc

SEQ ID NO: 2024185 - RNA, 16 nt, Human
gcuuuguauuuuuaau

SEQ ID NO: 2024186 - RNA, 16 nt, Human
gcuuuuuuuuuuuaau

SEQ ID NO: 2024187 - RNA, 23 nt, Human
ggaaugaacuuauuaauauuuuu

SEQ ID NO: 2024188 - RNA, 22 nt, Human
ggacaaccuuggcuuggcccug

SEQ ID NO: 2024189 - RNA, 20 nt, Human
ggacagccugagucaccugc

SEQ ID NO: 2024190 - RNA, 13 nt, Human
ggacaggugccag

SEQ ID NO: 2024191 - RNA, 21 nt, Human
ggacccugccaggcacaggca

SEQ ID NO: 2024192 - RNA, 15 nt, Human
gcugagccuggacaa

SEQ ID NO: 2024193 - RNA, 20 nt, Human
gcugcucugugaccagggac

SEQ ID NO: 2024194 - RNA, 16 nt, Human
gcuggcggccugcagc

SEQ ID NO: 2024195 - RNA, 14 nt, Human
gcuugcuucaaccc

SEQ ID NO: 2024196 - RNA, 20 nt, Human
gcuuuccauauuuuuuuccu

SEQ ID NO: 2024197 - RNA, 15 nt, Human
gcuggguuggaaaac

SEQ ID NO: 2024198 - RNA, 14 nt, Human
gugcuugucccugu

SEQ ID NO: 2024199 - RNA, 16 nt, Human
guggacuguucccuga

SEQ ID NO: 2024200 - RNA, 14 nt, Human
gugggcaaaagagu

SEQ ID NO: 2024201 - RNA, 19 nt, Human
gugugauccaguuuuucau

SEQ ID NO: 2024202 - RNA, 22 nt, Human
guuaaaaacagauuuggaaaga

SEQ ID NO: 2024203 - RNA, 21 nt, Human
guuaagagaggucuggaaagu

SEQ ID NO: 2024204 - RNA, 13 nt, Human
guauguccuuggu

SEQ ID NO: 2024205 - RNA, 15 nt, Human
gucucccccacccuu

SEQ ID NO: 2024206 - RNA, 17 nt, Human
gugaaaagaauagaagc

SEQ ID NO: 2024207 - RNA, 19 nt, Human
gugcagcgcggcgccgccc

SEQ ID NO: 2024208 - RNA, 23 nt, Human
gguugaagggcaguguucccugg

SEQ ID NO: 2024209 - RNA, 21 nt, Human
guaucaaauacauuuaaaaca

SEQ ID NO: 2024210 - RNA, 20 nt, Human
guacacucugagugaaagga

SEQ ID NO: 2024211 - RNA, 16 nt, Human
guacuuauaaagaagg

SEQ ID NO: 2024212 - RNA, 17 nt, Human
gucguaguuacucucag

SEQ ID NO: 2024213 - RNA, 12 nt, Human
gucagucuugac

SEQ ID NO: 2024214 - RNA, 15 nt, Human
gucaucuuugaguuu

SEQ ID NO: 2024215 - RNA, 19 nt, Human
uacacacacacgcgugcac

SEQ ID NO: 2024216 - RNA, 22 nt, Human
uacacacugcauguuugugauu

SEQ ID NO: 2024217 - RNA, 13 nt, Human
uaauacuguuauu

SEQ ID NO: 2024218 - RNA, 12 nt, Human
uaaccagcagaa

SEQ ID NO: 2024219 - RNA, 18 nt, Human
guuuauuuguuuuuccag

SEQ ID NO: 2024220 - RNA, 18 nt, Human
guuugaaaauauuuucau

SEQ ID NO: 2024221 - RNA, 19 nt, Human
guuuugugaaauuuuucau

SEQ ID NO: 2024222 - RNA, 21 nt, Human
guggcuuggacucuuucccau

SEQ ID NO: 2024223 - RNA, 18 nt, Human
guuaucagucucucuuuc

SEQ ID NO: 2024224 - RNA, 15 nt, Human
guuauguauauuuua

SEQ ID NO: 2024225 - RNA, 20 nt, Human
guuggcaauuguuucaacca

SEQ ID NO: 2024226 - RNA, 16 nt, Human
ucaacucccugccccc

SEQ ID NO: 2024227 - RNA, 14 nt, Human
ucaagaacuuguuu

SEQ ID NO: 2024228 - RNA, 13 nt, Human
uaguuaaagaaga

SEQ ID NO: 2024229 - RNA, 16 nt, Human
uaguucaaucuggauu

SEQ ID NO: 2024230 - RNA, 16 nt, Human
uaucaggauuuuucaa

SEQ ID NO: 2024231 - RNA, 17 nt, Human
uccugcaggccaggcca

SEQ ID NO: 2024232 - RNA, 16 nt, Human
uccugccaccacgccc

SEQ ID NO: 2024233 - RNA, 21 nt, Human
uccucaauuauuauucacauu

SEQ ID NO: 2024234 - RNA, 23 nt, Human
uccucuguacagagcccacgccc

SEQ ID NO: 2024235 - RNA, 15 nt, Human
ucccaucuuccaagg

SEQ ID NO: 2024236 - RNA, 20 nt, Human
ucacugcagccuccgcuucc

SEQ ID NO: 2024237 - RNA, 19 nt, Human
uccacagucucccccaccc

SEQ ID NO: 2024238 - RNA, 19 nt, Human
ucucuggccuucggccucc

SEQ ID NO: 2024239 - RNA, 22 nt, Human
ucugaaacugggcuccugcuuu

SEQ ID NO: 2024240 - RNA, 19 nt, Human
ucuucagagacuccugcag

SEQ ID NO: 2024241 - RNA, 22 nt, Human
ugccccucaacucuccuccaga

SEQ ID NO: 2024242 - RNA, 16 nt, Human
ugcagugcuuccaagg

SEQ ID NO: 2024243 - RNA, 17 nt, Human
ugcacaaauucaugugc

SEQ ID NO: 2024244 - RNA, 15 nt, Human
ugcacacucaugugc

SEQ ID NO: 2024245 - RNA, 14 nt, Human
ugaccauucuccac

SEQ ID NO: 2024246 - RNA, 20 nt, Human
ugacuauuauauuuccaaga

SEQ ID NO: 2024247 - RNA, 20 nt, Human
ugaacacaugguuggaaaga

SEQ ID NO: 2024248 - RNA, 15 nt, Human
ugaaccgaugagaaa

SEQ ID NO: 2024249 - RNA, 23 nt, Human
uggcccccgggaggacgggaccc

SEQ ID NO: 2024250 - RNA, 23 nt, Human
uggaccaugcugucuggcacagc

SEQ ID NO: 2024251 - RNA, 21 nt, Human
ugcugcaguugccagucaccc

SEQ ID NO: 2024252 - RNA, 20 nt, Human
ugcuuuggaaaacccagaua

SEQ ID NO: 2024253 - RNA, 18 nt, Human
uggcugcagccugcgcca

SEQ ID NO: 2024254 - RNA, 21 nt, Human
acuuuuauaaacuuuaccuuu

SEQ ID NO: 2024255 - RNA, 16 nt, Human
agaaauacagacugga

SEQ ID NO: 2024256 - RNA, 18 nt, Human
agacaauagcauuagaaa

SEQ ID NO: 2024257 - RNA, 14 nt, Human
agacagugaaagaa

SEQ ID NO: 2024258 - RNA, 16 nt, Human
agagcugugcaucagc

SEQ ID NO: 2024259 - RNA, 21 nt, Human
agacucgauagugguggugaa

SEQ ID NO: 2024260 - RNA, 18 nt, Human
agacuuggaaaugggaga

SEQ ID NO: 2024261 - RNA, 20 nt, Human
agagagacacagcugcagag

SEQ ID NO: 2024262 - RNA, 23 nt, Human
agcccaaccucuuccuccugaca

SEQ ID NO: 2024263 - RNA, 13 nt, Human
agcccaccccucu

SEQ ID NO: 2024264 - RNA, 22 nt, Human
agcccacgcugacuacagggcc

SEQ ID NO: 2024265 - RNA, 22 nt, Human
agaucuaaaaauaacuguaauu

SEQ ID NO: 2024266 - RNA, 20 nt, Human
agauucugaccuuaaaugca

SEQ ID NO: 2024267 - RNA, 15 nt, Human
agaacucaugugauu

SEQ ID NO: 2024268 - RNA, 16 nt, Human
agcaugacccagguca

SEQ ID NO: 2024269 - RNA, 13 nt, Human
agcucuccccuca

SEQ ID NO: 2024270 - RNA, 22 nt, Human
agcucugcagagcaggaaacau

SEQ ID NO: 2024271 - RNA, 20 nt, Human
aggacccugccaggcacagg

SEQ ID NO: 2024272 - RNA, 22 nt, Human
agccuccaauuuuuuaagugaa

SEQ ID NO: 2024273 - RNA, 19 nt, Human
aggccacuggccccugaga

SEQ ID NO: 2024274 - RNA, 14 nt, Human
aggcugggucgccc

SEQ ID NO: 2024275 - RNA, 20 nt, Human
aguuucugucguuaaaaaca

SEQ ID NO: 2024276 - RNA, 17 nt, Human
aguuuuguuuaaaagga

SEQ ID NO: 2024277 - RNA, 20 nt, Human
aggccuggccuuggagaacg

SEQ ID NO: 2024278 - RNA, 12 nt, Human
aguucauacuug

SEQ ID NO: 2024279 - RNA, 20 nt, Human
agugccccgucuacagcucc

SEQ ID NO: 2024280 - RNA, 15 nt, Human
aguggaugccacagc

SEQ ID NO: 2024281 - RNA, 16 nt, Human
aguggcagggcacagg

SEQ ID NO: 2024282 - RNA, 18 nt, Human
aguaaccacagaaaagca

SEQ ID NO: 2024283 - RNA, 18 nt, Human
agacaggugcgaaaggau

SEQ ID NO: 2024284 - RNA, 17 nt, Human
agagcugcuuccccguc

SEQ ID NO: 2024285 - RNA, 12 nt, Human
agaggcugcagc

SEQ ID NO: 2024286 - RNA, 20 nt, Human
agaaaaaaaaaaagaaagaa

SEQ ID NO: 2024287 - RNA, 14 nt, Human
agaauagaagcuaa

SEQ ID NO: 2024288 - RNA, 15 nt, Human
acuaagaggcaaacc

SEQ ID NO: 2024289 - RNA, 17 nt, Human
acucugugucccccguc

SEQ ID NO: 2024290 - RNA, 15 nt, Human
acuuggggggcugag

SEQ ID NO: 2024291 - RNA, 21 nt, Human
acaucucuauuccccacccuc

SEQ ID NO: 2024292 - RNA, 20 nt, Human
acauuauaaaugucucuuua

SEQ ID NO: 2024293 - RNA, 23 nt, Human
accaccaucaccagacaggugcg

SEQ ID NO: 2024294 - RNA, 20 nt, Human
accagcaccaucucuccucc

SEQ ID NO: 2024295 - RNA, 15 nt, Human
accagcuuggcucag

SEQ ID NO: 2024296 - RNA, 22 nt, Human
acaccauuggaccccacccagc

SEQ ID NO: 2024297 - RNA, 18 nt, Human
acaccuuguuucccucuc

SEQ ID NO: 2024298 - RNA, 13 nt, Human
acagcccaccugg

SEQ ID NO: 2024299 - RNA, 20 nt, Human
aaaggcccagccaccgaagc

SEQ ID NO: 2024300 - RNA, 19 nt, Human
acguuaugauaguguccca

SEQ ID NO: 2024301 - RNA, 18 nt, Human
aacaaagugcuaaaggaa

SEQ ID NO: 2024302 - RNA, 15 nt, Human
acuuggccucacccu

SEQ ID NO: 2024303 - RNA, 17 nt, Human
cccaccccauggccggc

SEQ ID NO: 2024304 - RNA, 18 nt, Human
uuugaccucugcagcaau

SEQ ID NO: 2024305 - RNA, 14 nt, Human
ccccaccuggcccu

SEQ ID NO: 2024306 - RNA, 15 nt, Human
ccgccuggaggagau

SEQ ID NO: 2024307 - RNA, 21 nt, Human
ccgcuccugcggaggaggugu

SEQ ID NO: 2024308 - RNA, 14 nt, Human
ccggcuccaggcuc

SEQ ID NO: 2024309 - RNA, 16 nt, Human
cccgccagccgcuccc

SEQ ID NO: 2024310 - RNA, 20 nt, Human
uuucaacgcagcccugcuuu

SEQ ID NO: 2024311 - RNA, 12 nt, Human
ccugcccaggcc

SEQ ID NO: 2024312 - RNA, 18 nt, Human
ccucugaccccugccugu

SEQ ID NO: 2024313 - RNA, 21 nt, Human
ccucaaccugcuguccuccag

SEQ ID NO: 2024314 - RNA, 23 nt, Human
ccuccugcuugcgggggccgccu

SEQ ID NO: 2024315 - RNA, 13 nt, Human
ccugcgaggcuau

SEQ ID NO: 2024316 - RNA, 18 nt, Human
ccugcuugaguucccaga

SEQ ID NO: 2024317 - RNA, 20 nt, Human
ccugucaagcaaucaagaaa

SEQ ID NO: 2024318 - RNA, 14 nt, Human
ccuguccugccugu

SEQ ID NO: 2024319 - RNA, 17 nt, Human
ccugugauggggcccug

SEQ ID NO: 2024320 - RNA, 18 nt, Human
ccuucucuccagccccug

SEQ ID NO: 2024321 - RNA, 16 nt, Human
cgcuccaacuccaaca

SEQ ID NO: 2024322 - RNA, 13 nt, Human
cgcucucuggccu

SEQ ID NO: 2024323 - RNA, 19 nt, Human
cgccagauucuuuccugag

SEQ ID NO: 2024324 - RNA, 20 nt, Human
cgcgucgcccucccaggcuc

SEQ ID NO: 2024325 - RNA, 21 nt, Human
ccuuuuugcuugaagcaaaca

SEQ ID NO: 2024326 - RNA, 12 nt, Human
ugcagacaggca

SEQ ID NO: 2024327 - RNA, 13 nt, Human
uuaaaacacaaca

SEQ ID NO: 2024328 - RNA, 12 nt, Human
uuagacugcuuu

SEQ ID NO: 2024329 - RNA, 16 nt, Human
uguccucacugcccca

SEQ ID NO: 2024330 - RNA, 23 nt, Human
ugugacaucucuauuccccaccc

SEQ ID NO: 2024331 - RNA, 17 nt, Human
uggcagcugccacgccg

SEQ ID NO: 2024332 - RNA, 15 nt, Human
uggccuucggcccca

SEQ ID NO: 2024333 - RNA, 14 nt, Human
uggcugggcugcuc

SEQ ID NO: 2024334 - RNA, 20 nt, Human
ugccaguaccagccccaccc

SEQ ID NO: 2024335 - RNA, 17 nt, Human
uggacucaccuccccca

SEQ ID NO: 2024336 - RNA, 15 nt, Human
ugcucuggacaggca

SEQ ID NO: 2024337 - RNA, 12 nt, Human
ccaucaaguacc

SEQ ID NO: 2024338 - RNA, 15 nt, Human
ccauggcuucccaga

SEQ ID NO: 2024339 - RNA, 20 nt, Human
cccaaaaacaaaucgcagcc

SEQ ID NO: 2024340 - RNA, 18 nt, Human
cccaauaucuugcuugaa

SEQ ID NO: 2024341 - RNA, 14 nt, Human
cccacaaaggagag

SEQ ID NO: 2024342 - RNA, 15 nt, Human
uuguaucuggaaaga

SEQ ID NO: 2024343 - RNA, 17 nt, Human
uucuagcauggcugcca

SEQ ID NO: 2024344 - RNA, 23 nt, Human
uugcugaauacagaggcaacugc

SEQ ID NO: 2024345 - RNA, 18 nt, Human
uuaggaaagaaaaaaagu

SEQ ID NO: 2024346 - RNA, 18 nt, Human
uuaggcauaugcuucuuu

SEQ ID NO: 2024347 - RNA, 23 nt, Human
uuauuauggcacaucagcacgau

SEQ ID NO: 2024348 - RNA, 12 nt, Human
uuauuggaaagg

SEQ ID NO: 2024349 - RNA, 23 nt, Human
gcucuggagcccacuguacuugc

SEQ ID NO: 2024350 - RNA, 16 nt, Human
gcugcguuuccugugc

SEQ ID NO: 2024351 - RNA, 12 nt, Human
gcuggacgucca

SEQ ID NO: 2024352 - RNA, 15 nt, Human
gcugggacugggaac

SEQ ID NO: 2024353 - RNA, 22 nt, Human
gcuucucugcccagcuuuucau

SEQ ID NO: 2024354 - RNA, 21 nt, Human
gcuucugccacugcugggcuc

SEQ ID NO: 2024355 - RNA, 15 nt, Human
gcuuugcuguuucau

SEQ ID NO: 2024356 - RNA, 15 nt, Human
gcuuuuaguuuuucu

SEQ ID NO: 2024357 - RNA, 10 nt, Human
gcgcuucacu

SEQ ID NO: 2024358 - RNA, 20 nt, Human
cgccagcucccgccagccgc

SEQ ID NO: 2024359 - RNA, 12 nt, Human
cgccuguccugc

SEQ ID NO: 2024360 - RNA, 11 nt, Human
cggccaccugc

SEQ ID NO: 2024361 - RNA, 18 nt, Human
cggccuggcgcuccgacu

SEQ ID NO: 2024362 - RNA, 19 nt, Human
ccuuccuaccacccggucc

SEQ ID NO: 2024363 - RNA, 17 nt, Human
gcuaaauauauauuuua

SEQ ID NO: 2024364 - RNA, 19 nt, Human
gcucccaggcauuccccag

SEQ ID NO: 2024365 - RNA, 19 nt, Human
ccuuuccuauaugaugauu

SEQ ID NO: 2024366 - RNA, 23 nt, Human
cgaagcaugaacagugcaccugg

SEQ ID NO: 2024367 - RNA, 18 nt, Human
ccgggcugggagcucugc

SEQ ID NO: 2024368 - RNA, 21 nt, Human
ccugcccacaagucccagcgc

SEQ ID NO: 2024369 - RNA, 12 nt, Human
ccugcuccagcu

SEQ ID NO: 2024370 - RNA, 12 nt, Human
ccuccuccagcc

SEQ ID NO: 2024371 - RNA, 17 nt, Human
cccagugagcauccacg

SEQ ID NO: 2024372 - RNA, 19 nt, Human
ccgccccucugaccccugc

SEQ ID NO: 2024373 - RNA, 14 nt, Human
cccccaacccccca

SEQ ID NO: 2024374 - RNA, 12 nt, Human
ccccugaccuca

SEQ ID NO: 2024375 - RNA, 21 nt, Human
cccggcuaugggggcacugag

SEQ ID NO: 2024376 - RNA, 17 nt, Human
cccugaggugagcauca

SEQ ID NO: 2024377 - RNA, 11 nt, Human
guaucucuuug

SEQ ID NO: 2024378 - RNA, 13 nt, Human
guauguuuuucag

SEQ ID NO: 2024379 - RNA, 19 nt, Human
guauucucuuuucaagaag

SEQ ID NO: 2024380 - RNA, 21 nt, Human
gguuccagcaauucuccugcc

SEQ ID NO: 2024381 - RNA, 17 nt, Human
gggaguggccacagaaa

SEQ ID NO: 2024382 - RNA, 22 nt, Human
ggucgccuguccugccuguggg

SEQ ID NO: 2024383 - RNA, 19 nt, Human
ggucuugguuccagccugc

SEQ ID NO: 2024384 - RNA, 11 nt, Human
uugcaacaaca

SEQ ID NO: 2024385 - RNA, 12 nt, Human
gucacugcacgu

SEQ ID NO: 2024386 - RNA, 23 nt, Human
uugaagggaaguugcuggaaaga

SEQ ID NO: 2024387 - RNA, 15 nt, Human
ggaccggcugccccg

SEQ ID NO: 2024388 - RNA, 15 nt, Human
ggacugugugcucag

SEQ ID NO: 2024389 - RNA, 14 nt, Human
ggacuguucuuuug

SEQ ID NO: 2024390 - RNA, 22 nt, Human
ggaucaaaccccgaccaccugc

SEQ ID NO: 2024391 - RNA, 20 nt, Human
ggcccagcaccacccuccuu

SEQ ID NO: 2024392 - RNA, 21 nt, Human
ggcacaggcagggcaggacca

SEQ ID NO: 2024393 - RNA, 15 nt, Human
ggcaccucacaggcc

SEQ ID NO: 2024394 - RNA, 16 nt, Human
ggcacuuugacagcgc

SEQ ID NO: 2024395 - RNA, 20 nt, Human
ggcugaagcuguguccucau

SEQ ID NO: 2024396 - RNA, 19 nt, Human
ggcucacugcauccuccgc

SEQ ID NO: 2024397 - RNA, 22 nt, Human
ggcuccgacuugugcacaggca

SEQ ID NO: 2024398 - RNA, 14 nt, Human
ggcccucuccugcc

SEQ ID NO: 2024399 - RNA, 18 nt, Human
ggcgugagccaccgugcc

SEQ ID NO: 2024400 - RNA, 21 nt, Human
ggcuaauuagcauggccacau

SEQ ID NO: 2024401 - RNA, 22 nt, Human
ggcugggcucccuucccaccuc

SEQ ID NO: 2024402 - RNA, 15 nt, Human
ggcugcagccugcgc

SEQ ID NO: 2024403 - RNA, 20 nt, Human
ggcugcucauguuggggcuc

SEQ ID NO: 2024404 - RNA, 23 nt, Human
gguauaaaggcauugauauuuua

SEQ ID NO: 2024405 - RNA, 22 nt, Human
gcaggcccacccugcuuggccc

SEQ ID NO: 2024406 - RNA, 19 nt, Human
gguuuccauggcuucccag

SEQ ID NO: 2024407 - RNA, 21 nt, Human
ggucucucuugccccaccugg

SEQ ID NO: 2024408 - RNA, 16 nt, Human
gccaccaacagccacu

SEQ ID NO: 2024409 - RNA, 16 nt, Human
gcauuugguuuuucac

SEQ ID NO: 2024410 - RNA, 19 nt, Human
gccaaacucaccugccccu

SEQ ID NO: 2024411 - RNA, 17 nt, Human
gccccaggcugcggcuu

SEQ ID NO: 2024412 - RNA, 13 nt, Human
gccuggccacgcc

SEQ ID NO: 2024413 - RNA, 22 nt, Human
gcccacgcuggagugcagugag

SEQ ID NO: 2024414 - RNA, 23 nt, Human
gcccagaauaaacuggcagcuca

SEQ ID NO: 2024415 - RNA, 14 nt, Human
gccaggcacaggca

SEQ ID NO: 2024416 - RNA, 15 nt, Human
gccccugcacuccag

SEQ ID NO: 2024417 - RNA, 12 nt, Human
gccccugccucu

SEQ ID NO: 2024418 - RNA, 22 nt, Human
gcuggaccaaagcagcugcagc

SEQ ID NO: 2024419 - RNA, 22 nt, Human
gcuaagaauuuuuuauuuuuug

SEQ ID NO: 2024420 - RNA, 14 nt, Human
gccuccauccugag

SEQ ID NO: 2024421 - RNA, 16 nt, Human
gcuguggguuuuuaau

SEQ ID NO: 2024422 - RNA, 16 nt, Human
gcucccgcuccugcgg

SEQ ID NO: 2024423 - RNA, 18 nt, Human
gcuccucucacuucccag

SEQ ID NO: 2024424 - RNA, 21 nt, Human
gccuggcugcagccugcgcca

SEQ ID NO: 2024425 - RNA, 13 nt, Human
gcggccuggcgcu

SEQ ID NO: 2024426 - RNA, 13 nt, Human
gcgugguggacau

SEQ ID NO: 2024427 - RNA, 23 nt, Human
ucagcaaggcgcuaacuugcuua

SEQ ID NO: 2024428 - RNA, 13 nt, Human
uauauuucccuga

SEQ ID NO: 2024429 - RNA, 14 nt, Human
gggugucugccccc

SEQ ID NO: 2024430 - RNA, 13 nt, Human
gguagguugggag

SEQ ID NO: 2024431 - RNA, 22 nt, Human
gguccgaguguguuucauccuu

SEQ ID NO: 2024432 - RNA, 18 nt, Human
gguccccagacuccacca

SEQ ID NO: 2024433 - RNA, 15 nt, Human
ucccaccccauccuc

SEQ ID NO: 2024434 - RNA, 11 nt, Human
uccccccaccu

SEQ ID NO: 2024435 - RNA, 14 nt, Human
uacuacaguccucc

SEQ ID NO: 2024436 - RNA, 22 nt, Human
uagacuuuuccaauaugugauu

SEQ ID NO: 2024437 - RNA, 12 nt, Human
uacaguguuccg

SEQ ID NO: 2024438 - RNA, 20 nt, Human
uagcugcauuugucuggccu

SEQ ID NO: 2024439 - RNA, 13 nt, Human
uagucucuugauu

SEQ ID NO: 2024440 - RNA, 19 nt, Human
uacaaaaccacuggaaagu

SEQ ID NO: 2024441 - RNA, 22 nt, Human
gugaacacauaaauauauuuuu

SEQ ID NO: 2024442 - RNA, 20 nt, Human
gugacuauuauauuuccaag

SEQ ID NO: 2024443 - RNA, 14 nt, Human
guggccccacccuu

SEQ ID NO: 2024444 - RNA, 16 nt, Human
guguuuuguugaguuu

SEQ ID NO: 2024445 - RNA, 15 nt, Human
guuaggucucaauac

SEQ ID NO: 2024446 - RNA, 19 nt, Human
guuuguuuuuuguuuuucu

SEQ ID NO: 2024447 - RNA, 16 nt, Human
gucugcauuggaaaga

SEQ ID NO: 2024448 - RNA, 14 nt, Human
uaaaaccugggauu

SEQ ID NO: 2024449 - RNA, 22 nt, Human
guuggaguuugagguuggaaaa

SEQ ID NO: 2024450 - RNA, 23 nt, Human
gcuuccugaggggagacagagca

SEQ ID NO: 2024451 - RNA, 17 nt, Human
gcuugcauauauuucau

SEQ ID NO: 2024452 - RNA, 16 nt, Human
gcuuuuaccuuuuucu

SEQ ID NO: 2024453 - RNA, 22 nt, Human
ggaaagacuggacucuaaaguc

SEQ ID NO: 2024454 - RNA, 17 nt, Human
ggaagacuuuggaaaga

SEQ ID NO: 2024455 - RNA, 14 nt, Human
ggaagaucccuuug

SEQ ID NO: 2024456 - RNA, 19 nt, Human
ggacugccagucccccugc

SEQ ID NO: 2024457 - RNA, 14 nt, Human
ggagcccugccucu

SEQ ID NO: 2024458 - RNA, 12 nt, Human
ggaggccaccuc

SEQ ID NO: 2024459 - RNA, 20 nt, Human
ggauacaggcuggaaaguaa

SEQ ID NO: 2024460 - RNA, 13 nt, Human
ggagcaagggcag

SEQ ID NO: 2024461 - RNA, 16 nt, Human
ggccacguucuuacua

SEQ ID NO: 2024462 - RNA, 22 nt, Human
ggccacuuggauccauuuccag

SEQ ID NO: 2024463 - RNA, 24 nt, Human
ggcccagcgcggacauccccugcu

SEQ ID NO: 2024464 - RNA, 17 nt, Human
ggcccauggggaggacg

SEQ ID NO: 2024465 - RNA, 22 nt, Human
ggccccaauaccccauggacca

SEQ ID NO: 2024466 - RNA, 19 nt, Human
ggccuccauccugaggcuc

SEQ ID NO: 2024467 - RNA, 12 nt, Human
ggccuuucccac

SEQ ID NO: 2024468 - RNA, 14 nt, Human
ggcucccacaggcc

SEQ ID NO: 2024469 - RNA, 13 nt, Human
gguuucuguuggc

SEQ ID NO: 2024470 - RNA, 18 nt, Human
ggcugcuucugccacugc

SEQ ID NO: 2024471 - RNA, 15 nt, Human
ggauugggccccugc

SEQ ID NO: 2024472 - RNA, 18 nt, Human
guagagcggagaaaggaa

SEQ ID NO: 2024473 - RNA, 17 nt, Human
guacacccaugaaagaa

SEQ ID NO: 2024474 - RNA, 17 nt, Human
ggcagauggccuggagg

SEQ ID NO: 2024475 - RNA, 17 nt, Human
guccacugguucuucuu

SEQ ID NO: 2024476 - RNA, 22 nt, Human
gucccaccuuggcugcagggag

SEQ ID NO: 2024477 - RNA, 14 nt, Human
gucaguauccaggc

SEQ ID NO: 2024478 - RNA, 20 nt, Human
guccaaaauuuaagucucca

SEQ ID NO: 2024479 - RNA, 16 nt, Human
gugcaaaaggcuugca

SEQ ID NO: 2024480 - RNA, 19 nt, Human
gugcccugcucgguggcag

SEQ ID NO: 2024481 - RNA, 22 nt, Human
uaaucaacauggcuacuugcuu

SEQ ID NO: 2024482 - RNA, 15 nt, Human
uagacuccaacaaca

SEQ ID NO: 2024483 - RNA, 17 nt, Human
guuuucauauuuuucaa

SEQ ID NO: 2024484 - RNA, 16 nt, Human
guuuucccuccuugga

SEQ ID NO: 2024485 - RNA, 23 nt, Human
uaaaagaaaaagaaaaaaaaagu

SEQ ID NO: 2024486 - RNA, 19 nt, Human
uaacagcaguuucagguag

SEQ ID NO: 2024487 - RNA, 20 nt, Human
guguuaaccaugguggggac

SEQ ID NO: 2024488 - RNA, 13 nt, Human
guaguuuuuucaa

SEQ ID NO: 2024489 - RNA, 15 nt, Human
guauacguuuuucag

SEQ ID NO: 2024490 - RNA, 22 nt, Human
guggcuguggaauaggaacgcu

SEQ ID NO: 2024491 - RNA, 23 nt, Human
guguauggguguuggugaacuug

SEQ ID NO: 2024492 - RNA, 21 nt, Human
gugccuuuugccauccccuca

SEQ ID NO: 2024493 - RNA, 13 nt, Human
gugcuguuucccg

SEQ ID NO: 2024494 - RNA, 21 nt, Human
guaagucuugccuauauuuuc

SEQ ID NO: 2024495 - RNA, 14 nt, Human
guaccaagaaagga

SEQ ID NO: 2024496 - RNA, 17 nt, Human
guacggacauaaaagca

SEQ ID NO: 2024497 - RNA, 14 nt, Human
gguuuauucacugu

SEQ ID NO: 2024498 - RNA, 16 nt, Human
gucgggcagcugcagg

SEQ ID NO: 2024499 - RNA, 13 nt, Human
gucuggcugcaga

SEQ ID NO: 2024500 - RNA, 19 nt, Human
gugaaaaucuacacuccag

SEQ ID NO: 2024501 - RNA, 20 nt, Human
gugaaauuuuucauauuuua

SEQ ID NO: 2024502 - RNA, 13 nt, Human
gucacacagugag

SEQ ID NO: 2024503 - RNA, 21 nt, Human
gucccacucaguccauagcag

SEQ ID NO: 2024504 - RNA, 21 nt, Human
gucccagaaugccuccugcag

SEQ ID NO: 2024505 - RNA, 21 nt, Human
guccuacucugugucaggugg

SEQ ID NO: 2024506 - RNA, 16 nt, Human
ucuuccccaccaaccc

SEQ ID NO: 2024507 - RNA, 15 nt, Human
ucuuuucugaaucuu

SEQ ID NO: 2024508 - RNA, 21 nt, Human
ugaaacugacuugcugugacu

SEQ ID NO: 2024509 - RNA, 12 nt, Human
ucagaaagaagu

SEQ ID NO: 2024510 - RNA, 18 nt, Human
ucacgaguucaggagauc

SEQ ID NO: 2024511 - RNA, 15 nt, Human
ucgggcugugcccgg

SEQ ID NO: 2024512 - RNA, 14 nt, Human
ucuaaacugccccc

SEQ ID NO: 2024513 - RNA, 16 nt, Human
ucuaaauaaaagaagu

SEQ ID NO: 2024514 - RNA, 15 nt, Human
ugagccaccacgccc

SEQ ID NO: 2024515 - RNA, 20 nt, Human
ugauaaauuugacuguuauu

SEQ ID NO: 2024516 - RNA, 19 nt, Human
ugcccaggcuggcgugcag

SEQ ID NO: 2024517 - RNA, 17 nt, Human
ugcccuggugcugccac

SEQ ID NO: 2024518 - RNA, 13 nt, Human
ugcacaaaaugua

SEQ ID NO: 2024519 - RNA, 21 nt, Human
ugcacaugcacgugugugcac

SEQ ID NO: 2024520 - RNA, 21 nt, Human
ugcagcucucaugcugccccu

SEQ ID NO: 2024521 - RNA, 24 nt, Human
ugggauuacaggcuccugccacca

SEQ ID NO: 2024522 - RNA, 16 nt, Human
ugugaagacuugccuu

SEQ ID NO: 2024523 - RNA, 18 nt, Human
ugucuuuccacuccuccu

SEQ ID NO: 2024524 - RNA, 22 nt, Human
uuaaaaaaaaaaaaaaaaaaga

SEQ ID NO: 2024525 - RNA, 17 nt, Human
uuaccagugccuuaaac

SEQ ID NO: 2024526 - RNA, 17 nt, Human
uggguguggucuccacu

SEQ ID NO: 2024527 - RNA, 16 nt, Human
uggucagcccaaacca

SEQ ID NO: 2024528 - RNA, 20 nt, Human
uggccuucggccuccauccu

SEQ ID NO: 2024529 - RNA, 13 nt, Human
uggcgcugccccu

SEQ ID NO: 2024530 - RNA, 17 nt, Human
uggcucccccuccaccu

SEQ ID NO: 2024531 - RNA, 17 nt, Human
uggcaaacucuccacca

SEQ ID NO: 2024532 - RNA, 15 nt, Human
uggccagguggccac

SEQ ID NO: 2024533 - RNA, 15 nt, Human
ugcugacuguacucc

SEQ ID NO: 2024534 - RNA, 15 nt, Human
uggacucugcccuca

SEQ ID NO: 2024535 - RNA, 20 nt, Human
uccugcaggcagccaggcca

SEQ ID NO: 2024536 - RNA, 16 nt, Human
ucagugagccaagauc

SEQ ID NO: 2024537 - RNA, 12 nt, Human
ucgcaucagcgc

SEQ ID NO: 2024538 - RNA, 18 nt, Human
ucuacuucuggagucuau

SEQ ID NO: 2024539 - RNA, 17 nt, Human
ucuccaagaccagagau

SEQ ID NO: 2024540 - RNA, 14 nt, Human
ucucugccauccuu

SEQ ID NO: 2024541 - RNA, 14 nt, Human
uucaaacggccuca

SEQ ID NO: 2024542 - RNA, 13 nt, Human
uuccuccauccuc

SEQ ID NO: 2024543 - RNA, 16 nt, Human
uugccauuaaaaugua

SEQ ID NO: 2024544 - RNA, 17 nt, Human
ucuuucccaucuccccu

SEQ ID NO: 2024545 - RNA, 21 nt, Human
ugaacuauguuuagugugauu

SEQ ID NO: 2024546 - RNA, 20 nt, Human
cgcuguuggggcugcucaug

SEQ ID NO: 2024547 - RNA, 20 nt, Human
cgggccuugucgcagcgcag

SEQ ID NO: 2024548 - RNA, 16 nt, Human
cgguccacccaggagc

SEQ ID NO: 2024549 - RNA, 16 nt, Human
cggucuugacagcuca

SEQ ID NO: 2024550 - RNA, 20 nt, Human
cgugguggacaugcacagcu

SEQ ID NO: 2024551 - RNA, 18 nt, Human
cguguaggaaccugcaca

SEQ ID NO: 2024552 - RNA, 22 nt, Human
cgugaacaggugggugucugcg

SEQ ID NO: 2024553 - RNA, 14 nt, Human
cuaaccacagcucc

SEQ ID NO: 2024554 - RNA, 17 nt, Human
cuuucugggguuuuucu

SEQ ID NO: 2024555 - RNA, 17 nt, Human
gaaaggauuucucuuua

SEQ ID NO: 2024556 - RNA, 21 nt, Human
gaaauguuacagcauauuuua

SEQ ID NO: 2024557 - RNA, 13 nt, Human
gaacagucucuug

SEQ ID NO: 2024558 - RNA, 20 nt, Human
gaaccaggcaacuugggaac

SEQ ID NO: 2024559 - RNA, 20 nt, Human
gacaaggaccgucuccugcg

SEQ ID NO: 2024560 - RNA, 22 nt, Human
gacacaguucaauucucauuug

SEQ ID NO: 2024561 - RNA, 18 nt, Human
gacaccauuggaccccac

SEQ ID NO: 2024562 - RNA, 19 nt, Human
gacauuguagagcuucugg

SEQ ID NO: 2024563 - RNA, 23 nt, Human
gaagaauuuacuuuggaaaguag

SEQ ID NO: 2024564 - RNA, 11 nt, Human
cugaggacaag

SEQ ID NO: 2024565 - RNA, 14 nt, Human
cugcagccuggagc

SEQ ID NO: 2024566 - RNA, 19 nt, Human
cucuuuuuauuuaguuccu

SEQ ID NO: 2024567 - RNA, 20 nt, Human
cuccuucaacaaggcuugcu

SEQ ID NO: 2024568 - RNA, 14 nt, Human
cuccuuggagacag

SEQ ID NO: 2024569 - RNA, 23 nt, Human
cucgaugcagacagggggccaga

SEQ ID NO: 2024570 - RNA, 23 nt, Human
cuguaauuccagcacuuugggag

SEQ ID NO: 2024571 - RNA, 16 nt, Human
cucauccccucacuug

SEQ ID NO: 2024572 - RNA, 16 nt, Human
cugccuaaggcugaac

SEQ ID NO: 2024573 - RNA, 20 nt, Human
cugcucaguguuucauauuc

SEQ ID NO: 2024574 - RNA, 16 nt, Human
cugcugcuucauguuu

SEQ ID NO: 2024575 - RNA, 18 nt, Human
cuguacgucugacaggca

SEQ ID NO: 2024576 - RNA, 18 nt, Human
uuugaaaaacugcucaua

SEQ ID NO: 2024577 - RNA, 16 nt, Human
uuugaaacauugcuuu

SEQ ID NO: 2024578 - RNA, 11 nt, Human
uuuuuuuucau

SEQ ID NO: 2024579 - RNA, 15 nt, Human
uugugugccucuagc

SEQ ID NO: 2024580 - RNA, 16 nt, Human
uuguacagacaacaaa

SEQ ID NO: 2024581 - RNA, 23 nt, Human
gccuggcugcagccugcgccacc

SEQ ID NO: 2024582 - RNA, 13 nt, Human
uuccuuuucccag

SEQ ID NO: 2024583 - RNA, 14 nt, Human
uucugucguuaaaa

SEQ ID NO: 2024584 - RNA, 17 nt, Human
uucuucaaccagcagau

SEQ ID NO: 2024585 - RNA, 15 nt, Human
gccacccuucuucag

SEQ ID NO: 2024586 - RNA, 20 nt, Human
gccuccauccugaggcucca

SEQ ID NO: 2024587 - RNA, 17 nt, Human
gccuccuguggccugcc

SEQ ID NO: 2024588 - RNA, 15 nt, Human
gccccucugaccccu

SEQ ID NO: 2024589 - RNA, 15 nt, Human
gccgcagcccugcag

SEQ ID NO: 2024590 - RNA, 14 nt, Human
gccgugaccccugc

SEQ ID NO: 2024591 - RNA, 18 nt, Human
gccuagccucacgcuccu

SEQ ID NO: 2024592 - RNA, 22 nt, Human
gccacagaaaauucuucuccac

SEQ ID NO: 2024593 - RNA, 16 nt, Human
gccaagaggcugcagc

SEQ ID NO: 2024594 - RNA, 19 nt, Human
gcagcccucggcgcuccgg

SEQ ID NO: 2024595 - RNA, 19 nt, Human
gcaggaccuucgggcugug

SEQ ID NO: 2024596 - RNA, 22 nt, Human
gcaagcuaauucuuugaccugu

SEQ ID NO: 2024597 - RNA, 18 nt, Human
gcacccucaggcaggugg

SEQ ID NO: 2024598 - RNA, 14 nt, Human
gcacaaacagaggc

SEQ ID NO: 2024599 - RNA, 21 nt, Human
gcaccaaggaaaaagcagaga

SEQ ID NO: 2024600 - RNA, 17 nt, Human
gcaguuaugugaccuca

SEQ ID NO: 2024601 - RNA, 17 nt, Human
gcaucaagaugugacau

SEQ ID NO: 2024602 - RNA, 13 nt, Human
gcaugggcuugcu

SEQ ID NO: 2024603 - RNA, 13 nt, Human
gcauggugguugg

SEQ ID NO: 2024604 - RNA, 19 nt, Human
gcauuggggauguuuuucu

SEQ ID NO: 2024605 - RNA, 19 nt, Human
gcauuuguguguuacaaug

SEQ ID NO: 2024606 - RNA, 13 nt, Human
gaggcuccaggca

SEQ ID NO: 2024607 - RNA, 16 nt, Human
gaguggccccaccugg

SEQ ID NO: 2024608 - RNA, 24 nt, Human
gagcauuccagucaggcucucugg

SEQ ID NO: 2024609 - RNA, 20 nt, Human
gagcccccagcuuccagcag

SEQ ID NO: 2024610 - RNA, 13 nt, Human
gaccucaggugag

SEQ ID NO: 2024611 - RNA, 14 nt, Human
gacgcagaccccac

SEQ ID NO: 2024612 - RNA, 22 nt, Human
gacuccagcuggguuggaaaac

SEQ ID NO: 2024613 - RNA, 16 nt, Human
gacuucugccagcaua

SEQ ID NO: 2024614 - RNA, 18 nt, Human
aaaagcaucuaugugaga

SEQ ID NO: 2024615 - RNA, 19 nt, Human
aaacuuucuuaauauuuuu

SEQ ID NO: 2024616 - RNA, 21 nt, Human
acaaacuucuuucacucacau

SEQ ID NO: 2024617 - RNA, 22 nt, Human
acaacgagccuuuucacccuuc

SEQ ID NO: 2024618 - RNA, 20 nt, Human
aauuauauaguuacccaaau

SEQ ID NO: 2024619 - RNA, 16 nt, Human
acacucaaaagcuggg

SEQ ID NO: 2024620 - RNA, 14 nt, Human
acagccccuccucc

SEQ ID NO: 2024621 - RNA, 22 nt, Human
acagccugagucaccugcagaa

SEQ ID NO: 2024622 - RNA, 14 nt, Human
aaggcuagaaccac

SEQ ID NO: 2024623 - RNA, 14 nt, Human
aaauuaaagcugaa

SEQ ID NO: 2024624 - RNA, 15 nt, Human
aacauuggcuccugu

SEQ ID NO: 2024625 - RNA, 18 nt, Human
aaccugcaggcguucucu

SEQ ID NO: 2024626 - RNA, 23 nt, Human
aagagcuaggcagggugucugcc

SEQ ID NO: 2024627 - RNA, 13 nt, Human
aaguucugcagau

SEQ ID NO: 2024628 - RNA, 18 nt, Human
aauaaaauuaaagcugaa

SEQ ID NO: 2024629 - RNA, 12 nt, Human
aacucaacaugg

SEQ ID NO: 2024630 - RNA, 11 nt, Human
aagauauuuua

SEQ ID NO: 2024631 - RNA, 21 nt, Human
aagauuuaggccaaucagaag

SEQ ID NO: 2024632 - RNA, 15 nt, Human
acccacccuccuuuc

SEQ ID NO: 2024633 - RNA, 11 nt, Human
accaaccuggg

SEQ ID NO: 2024634 - RNA, 13 nt, Human
accacgcccggcu

SEQ ID NO: 2024635 - RNA, 12 nt, Human
acacacagcucu

SEQ ID NO: 2024636 - RNA, 14 nt, Human
acacagcucuucuc

SEQ ID NO: 2024637 - RNA, 13 nt, Human
acacccacaggca

SEQ ID NO: 2024638 - RNA, 20 nt, Human
acaugccagccacugugaua

SEQ ID NO: 2024639 - RNA, 13 nt, Human
acaugccucucuc

SEQ ID NO: 2024640 - RNA, 22 nt, Human
accuaccccucccuccuggagg

SEQ ID NO: 2024641 - RNA, 23 nt, Human
accugcucugugcccacccucca

SEQ ID NO: 2024642 - RNA, 10 nt, Human
acccaccugc

SEQ ID NO: 2024643 - RNA, 18 nt, Human
acccaggguaaucuguac

SEQ ID NO: 2024644 - RNA, 15 nt, Human
acucugccuccucuu

SEQ ID NO: 2024645 - RNA, 20 nt, Human
agaaagcuuuguugaaagaa

SEQ ID NO: 2024646 - RNA, 21 nt, Human
uucccaacacggguaaaucua

SEQ ID NO: 2024647 - RNA, 15 nt, Human
uuccccacguuaaag

SEQ ID NO: 2024648 - RNA, 18 nt, Human
uuauauuccucuugcauu

SEQ ID NO: 2024649 - RNA, 22 nt, Human
uuaaaucauacuccuaugcuuu

SEQ ID NO: 2024650 - RNA, 15 nt, Human
uuccgugucuggcca

SEQ ID NO: 2024651 - RNA, 14 nt, Human
ugccaccucugcag

SEQ ID NO: 2024652 - RNA, 19 nt, Human
ucuuccaggcccccaaccc

SEQ ID NO: 2024653 - RNA, 15 nt, Human
ugacuagaaucgaca

SEQ ID NO: 2024654 - RNA, 23 nt, Human
ugccuaggauucacaccccaccu

SEQ ID NO: 2024655 - RNA, 15 nt, Human
ugaucucucgugauu

SEQ ID NO: 2024656 - RNA, 23 nt, Human
ucuguggguuucuaaagcugcca

SEQ ID NO: 2024657 - RNA, 17 nt, Human
ugacagagccugcccca

SEQ ID NO: 2024658 - RNA, 23 nt, Human
ugggcugcccuggugcugccaca

SEQ ID NO: 2024659 - RNA, 18 nt, Human
ugggucucucuugcccca

SEQ ID NO: 2024660 - RNA, 21 nt, Human
uggcuguuaaucuuucaaagu

SEQ ID NO: 2024661 - RNA, 22 nt, Human
uggcccgucaagugcugccccu

SEQ ID NO: 2024662 - RNA, 16 nt, Human
uggccugacuccccca

SEQ ID NO: 2024663 - RNA, 18 nt, Human
uggagaggcccggccucu

SEQ ID NO: 2024664 - RNA, 22 nt, Human
uggauuuccagccaaagccucc

SEQ ID NO: 2024665 - RNA, 17 nt, Human
uuacaaaugauugcuuu

SEQ ID NO: 2024666 - RNA, 14 nt, Human
uguuggggcugcuc

SEQ ID NO: 2024667 - RNA, 21 nt, Human
uguguguccaaaacugccuca

SEQ ID NO: 2024668 - RNA, 12 nt, Human
ugucggcugcuu

SEQ ID NO: 2024669 - RNA, 12 nt, Human
gaaaauauuuuc

SEQ ID NO: 2024670 - RNA, 12 nt, Human
cuggagcucugc

SEQ ID NO: 2024671 - RNA, 23 nt, Human
cuggagcugccucucucauccac

SEQ ID NO: 2024672 - RNA, 15 nt, Human
cuuuagaaaaaauga

SEQ ID NO: 2024673 - RNA, 14 nt, Human
cuuugaauuuucau

SEQ ID NO: 2024674 - RNA, 17 nt, Human
cugccaggcacaggcag

SEQ ID NO: 2024675 - RNA, 21 nt, Human
cugccaugccaggaaccuguc

SEQ ID NO: 2024676 - RNA, 17 nt, Human
cugccccaggcugcggc

SEQ ID NO: 2024677 - RNA, 22 nt, Human
cugccccucaacucuccuccag

SEQ ID NO: 2024678 - RNA, 18 nt, Human
cugccugaagucacacag

SEQ ID NO: 2024679 - RNA, 12 nt, Human
cugcaucaguuc

SEQ ID NO: 2024680 - RNA, 19 nt, Human
cucucaggcauggaugaau

SEQ ID NO: 2024681 - RNA, 22 nt, Human
cugaaaggcaguagucauuuuc

SEQ ID NO: 2024682 - RNA, 23 nt, Human
cggggcacccgccggaugcgcag

SEQ ID NO: 2024683 - RNA, 14 nt, Human
cgggggcucaagcu

SEQ ID NO: 2024684 - RNA, 16 nt, Human
cgucaucugguccugg

SEQ ID NO: 2024685 - RNA, 17 nt, Human
cgugccuggccacgccc

SEQ ID NO: 2024686 - RNA, 23 nt, Human
cgugguugaguggggggaacgcc

SEQ ID NO: 2024687 - RNA, 19 nt, Human
cgugugggacccgccgcgg

SEQ ID NO: 2024688 - RNA, 15 nt, Human
cuaaacaaaaaaagg

SEQ ID NO: 2024689 - RNA, 12 nt, Human
cgccagcagaca

SEQ ID NO: 2024690 - RNA, 15 nt, Human
cucugauucugucaa

SEQ ID NO: 2024691 - RNA, 14 nt, Human
cuaagcaggcgcaa

SEQ ID NO: 2024692 - RNA, 19 nt, Human
cucucucuaaggaggaugu

SEQ ID NO: 2024693 - RNA, 14 nt, Human
cucugaggcugaaa

SEQ ID NO: 2024694 - RNA, 14 nt, Human
cucgcccggaaccc

SEQ ID NO: 2024695 - RNA, 19 nt, Human
cuccugccaccacgcccgg

SEQ ID NO: 2024696 - RNA, 21 nt, Human
cuccugccaccacgcccggcu

SEQ ID NO: 2024697 - RNA, 22 nt, Human
cucaaccaaugccaaaaaaaga

SEQ ID NO: 2024698 - RNA, 14 nt, Human
cucaccagaauuau

SEQ ID NO: 2024699 - RNA, 21 nt, Human
cucacgccuguaauuccagca

SEQ ID NO: 2024700 - RNA, 16 nt, Human
cucacuuuuucauuuc

SEQ ID NO: 2024701 - RNA, 14 nt, Human
ccgccgugaccccu

SEQ ID NO: 2024702 - RNA, 16 nt, Human
ccgccgugaccccugc

SEQ ID NO: 2024703 - RNA, 19 nt, Human
cuucuggcacuuggagacu

SEQ ID NO: 2024704 - RNA, 15 nt, Human
ccuauucuccucauc

SEQ ID NO: 2024705 - RNA, 20 nt, Human
ccucaagcuaugugagcuca

SEQ ID NO: 2024706 - RNA, 17 nt, Human
ccgcggggcacccgccg

SEQ ID NO: 2024707 - RNA, 19 nt, Human
ccgcggggcacccgccgga

SEQ ID NO: 2024708 - RNA, 13 nt, Human
ccggacuccucuc

SEQ ID NO: 2024709 - RNA, 19 nt, Human
ccggucuuugauccgcagc

SEQ ID NO: 2024710 - RNA, 13 nt, Human
ccgucuccugcgg

SEQ ID NO: 2024711 - RNA, 13 nt, Human
cgccuguccucac

SEQ ID NO: 2024712 - RNA, 23 nt, Human
cgcgcugcgugugggacccgccg

SEQ ID NO: 2024713 - RNA, 14 nt, Human
cgcggccucaaccc

SEQ ID NO: 2024714 - RNA, 22 nt, Human
ccuucugacccaugcugcccug

SEQ ID NO: 2024715 - RNA, 17 nt, Human
cgaaaucccugcucacu

SEQ ID NO: 2024716 - RNA, 15 nt, Human
cgaccugccucggcc

SEQ ID NO: 2024717 - RNA, 22 nt, Human
cgcagcaggggccagacccugc

SEQ ID NO: 2024718 - RNA, 17 nt, Human
cagcccucccugccccu

SEQ ID NO: 2024719 - RNA, 20 nt, Human
cccauuuaaaaaaaaucccu

SEQ ID NO: 2024720 - RNA, 16 nt, Human
cccagucccgccccuc

SEQ ID NO: 2024721 - RNA, 13 nt, Human
cccacuggccggc

SEQ ID NO: 2024722 - RNA, 16 nt, Human
cccaggcugagccuca

SEQ ID NO: 2024723 - RNA, 10 nt, Human
ccaugucgua

SEQ ID NO: 2024724 - RNA, 18 nt, Human
ccagugagacagcucugc

SEQ ID NO: 2024725 - RNA, 16 nt, Human
ccauacacacgcugcc

SEQ ID NO: 2024726 - RNA, 13 nt, Human
ccuuccugggcac

SEQ ID NO: 2024727 - RNA, 16 nt, Human
ccuccgccucccgggu

SEQ ID NO: 2024728 - RNA, 15 nt, Human
ccucucucauccacu

SEQ ID NO: 2024729 - RNA, 15 nt, Human
ccugcaggccaggcc

SEQ ID NO: 2024730 - RNA, 14 nt, Human
ccuacugaggauau

SEQ ID NO: 2024731 - RNA, 16 nt, Human
cccugccucuccgccc

SEQ ID NO: 2024732 - RNA, 19 nt, Human
ccaccuccuaaaaggccca

SEQ ID NO: 2024733 - RNA, 22 nt, Human
ccaccugccagggacagagggg

SEQ ID NO: 2024734 - RNA, 22 nt, Human
ccagcgggaauggcagcugcca

SEQ ID NO: 2024735 - RNA, 12 nt, Human
ccaggagccucc

SEQ ID NO: 2024736 - RNA, 22 nt, Human
ccaacgagcagugccgcguggc

SEQ ID NO: 2024737 - RNA, 16 nt, Human
ccaagcaggacaugga

SEQ ID NO: 2024738 - RNA, 13 nt, Human
caggcgcaaggga

SEQ ID NO: 2024739 - RNA, 19 nt, Human
caggcgcuagcacagcucc

SEQ ID NO: 2024740 - RNA, 19 nt, Human
cagcugggagcuggcccgu

SEQ ID NO: 2024741 - RNA, 14 nt, Human
cagcuggggccagg

SEQ ID NO: 2024742 - RNA, 18 nt, Human
cagugucuggcugcagag

SEQ ID NO: 2024743 - RNA, 14 nt, Human
caguuguaucagca

SEQ ID NO: 2024744 - RNA, 17 nt, Human
caucuuucugcuccuga

SEQ ID NO: 2024745 - RNA, 21 nt, Human
caugaggaacaaggcaaggcu

SEQ ID NO: 2024746 - RNA, 23 nt, Human
caucaacuaaaguuguacuuuaa

SEQ ID NO: 2024747 - RNA, 15 nt, Human
caucagugccccguc

SEQ ID NO: 2024748 - RNA, 14 nt, Human
cugccggcgguggc

SEQ ID NO: 2024749 - RNA, 13 nt, Human
cugcucuccagcc

SEQ ID NO: 2024750 - RNA, 17 nt, Human
cugggcugcucucacau

SEQ ID NO: 2024751 - RNA, 14 nt, Human
cugguccucacacu

SEQ ID NO: 2024752 - RNA, 23 nt, Human
cuguaaucccagcuauuugggag

SEQ ID NO: 2024753 - RNA, 17 nt, Human
cuguugaugggaugauu

SEQ ID NO: 2024754 - RNA, 19 nt, Human
cuuaagaauuccaaaaaaa

SEQ ID NO: 2024755 - RNA, 20 nt, Human
cuuaaguacuguagaaaaga

SEQ ID NO: 2024756 - RNA, 13 nt, Human
cucugucgcccag

SEQ ID NO: 2024757 - RNA, 21 nt, Human
cuccacacacacaaaaaaaga

SEQ ID NO: 2024758 - RNA, 17 nt, Human
cugagacaaucauguac

SEQ ID NO: 2024759 - RNA, 16 nt, Human
cugagccuugggaccc

SEQ ID NO: 2024760 - RNA, 18 nt, Human
cugcaccgggccacagag

SEQ ID NO: 2024761 - RNA, 13 nt, Human
cugcacuccagcc

SEQ ID NO: 2024762 - RNA, 13 nt, Human
cggggacagcucc

SEQ ID NO: 2024763 - RNA, 19 nt, Human
cgggccacagagaaaguac

SEQ ID NO: 2024764 - RNA, 14 nt, Human
ccuguaaucccagc

SEQ ID NO: 2024765 - RNA, 18 nt, Human
cgcagcccugcagagggc

SEQ ID NO: 2024766 - RNA, 16 nt, Human
cgcccagucccagcag

SEQ ID NO: 2024767 - RNA, 16 nt, Human
cgcggggcacccgccg

SEQ ID NO: 2024768 - RNA, 15 nt, Human
cuccucuccccagca

SEQ ID NO: 2024769 - RNA, 20 nt, Human
cuaacaaaguuuucaugugc

SEQ ID NO: 2024770 - RNA, 16 nt, Human
cucacccaacaauccc

SEQ ID NO: 2024771 - RNA, 21 nt, Human
cucagcggggacagcuccuuc

SEQ ID NO: 2024772 - RNA, 22 nt, Human
cuauggucuuauauuuacaaca

SEQ ID NO: 2024773 - RNA, 18 nt, Human
cuaagauguuauauuuuu

SEQ ID NO: 2024774 - RNA, 22 nt, Human
cuaauccggaaaucagcaaacu

SEQ ID NO: 2024775 - RNA, 13 nt, Human
cagugcccagggc

SEQ ID NO: 2024776 - RNA, 22 nt, Human
cagacucucucugggaggccau

SEQ ID NO: 2024777 - RNA, 20 nt, Human
cauucagauaugauucaaau

SEQ ID NO: 2024778 - RNA, 19 nt, Human
cagggagcaagggcaggga

SEQ ID NO: 2024779 - RNA, 16 nt, Human
cagggcagcacacggc

SEQ ID NO: 2024780 - RNA, 16 nt, Human
caguauugagcugccu

SEQ ID NO: 2024781 - RNA, 19 nt, Human
caggcccaaagccucgaca

SEQ ID NO: 2024782 - RNA, 13 nt, Human
caggccugcgaga

SEQ ID NO: 2024783 - RNA, 17 nt, Human
cagcagaugcuguuuaa

SEQ ID NO: 2024784 - RNA, 16 nt, Human
cagaguccccccacuc

SEQ ID NO: 2024785 - RNA, 11 nt, Human
cagauauuuuu

SEQ ID NO: 2024786 - RNA, 23 nt, Human
cagaaaugacuuuuugaaaguaa

SEQ ID NO: 2024787 - RNA, 22 nt, Human
cagacauucuaauuauauuuua

SEQ ID NO: 2024788 - RNA, 16 nt, Human
cacugccccaggcugc

SEQ ID NO: 2024789 - RNA, 19 nt, Human
cacugccucuuccucccuc

SEQ ID NO: 2024790 - RNA, 21 nt, Human
cacauccggggccagcuccgg

SEQ ID NO: 2024791 - RNA, 22 nt, Human
caccagcuguguccggcccagu

SEQ ID NO: 2024792 - RNA, 22 nt, Human
cacccucuggcugaggagcugu

SEQ ID NO: 2024793 - RNA, 18 nt, Human
cacaaaaguuucucuuuu

SEQ ID NO: 2024794 - RNA, 16 nt, Human
cacagauuugagcuca

SEQ ID NO: 2024795 - RNA, 18 nt, Human
caaccccuggaccccagc

SEQ ID NO: 2024796 - RNA, 14 nt, Human
caauacagcaaacc

SEQ ID NO: 2024797 - RNA, 15 nt, Human
caaaaguagaacuuu

SEQ ID NO: 2024798 - RNA, 17 nt, Human
caagcucugcuccucuc

SEQ ID NO: 2024799 - RNA, 20 nt, Human
caagggaaaauaaaaaaaga

SEQ ID NO: 2024800 - RNA, 15 nt, Human
ccauuaggcuccuga

SEQ ID NO: 2024801 - RNA, 17 nt, Human
augauucauauauuuua

SEQ ID NO: 2024802 - RNA, 18 nt, Human
auuaaaaugaugaaggaa

SEQ ID NO: 2024803 - RNA, 19 nt, Human
auuaaauuuuuuuguauga

SEQ ID NO: 2024804 - RNA, 19 nt, Human
auuacucaaaguaaaagcg

SEQ ID NO: 2024805 - RNA, 14 nt, Human
auuauguuaaaaca

SEQ ID NO: 2024806 - RNA, 18 nt, Human
auuccagguggcaucagu

SEQ ID NO: 2024807 - RNA, 20 nt, Human
auucuucccaacuugccuuu

SEQ ID NO: 2024808 - RNA, 20 nt, Human
auugcugcuugaggcaacuc

SEQ ID NO: 2024809 - RNA, 15 nt, Human
auuuaagccucaaau

SEQ ID NO: 2024810 - RNA, 17 nt, Human
auuuacggaacucaaau

SEQ ID NO: 2024811 - RNA, 15 nt, Human
auuugucuggccuuu

SEQ ID NO: 2024812 - RNA, 22 nt, Human
cauauaauagguuugaaaguac

SEQ ID NO: 2024813 - RNA, 14 nt, Human
cagggccuggccca

SEQ ID NO: 2024814 - RNA, 16 nt, Human
caguauuuguggggag

SEQ ID NO: 2024815 - RNA, 14 nt, Human
cauccggggccagc

SEQ ID NO: 2024816 - RNA, 13 nt, Human
ccaccuucacauu

SEQ ID NO: 2024817 - RNA, 12 nt, Human
ccagagcugcca

SEQ ID NO: 2024818 - RNA, 16 nt, Human
ccagaggucuggcccu

SEQ ID NO: 2024819 - RNA, 20 nt, Human
ccaacuccugauucauguug

SEQ ID NO: 2024820 - RNA, 13 nt, Human
ccacaagagccca

SEQ ID NO: 2024821 - RNA, 23 nt, Human
ccaucugugaaaggaaagaggga

SEQ ID NO: 2024822 - RNA, 18 nt, Human
ccauggagggggcuugca

SEQ ID NO: 2024823 - RNA, 21 nt, Human
ccagccuccaagcuccaucuc

SEQ ID NO: 2024824 - RNA, 14 nt, Human
cagcccuggagggu

SEQ ID NO: 2024825 - RNA, 14 nt, Human
cagcugaaccuggg

SEQ ID NO: 2024826 - RNA, 23 nt, Human
caggaaaguggcaccugucugcu

SEQ ID NO: 2024827 - RNA, 14 nt, Human
caggauauauuuua

SEQ ID NO: 2024828 - RNA, 13 nt, Human
caggccugacucu

SEQ ID NO: 2024829 - RNA, 19 nt, Human
cagagaaugacagcaaaca

SEQ ID NO: 2024830 - RNA, 16 nt, Human
cagcaaacagaucacu

SEQ ID NO: 2024831 - RNA, 19 nt, Human
cagcagacaucagaacaca

SEQ ID NO: 2024832 - RNA, 18 nt, Human
auuuggcauuccccacuu

SEQ ID NO: 2024833 - RNA, 20 nt, Human
caagugcugccccugccugu

SEQ ID NO: 2024834 - RNA, 22 nt, Human
cacauuuuuuaaaugcaccugg

SEQ ID NO: 2024835 - RNA, 21 nt, Human
caccuaccaccacgcccggcu

SEQ ID NO: 2024836 - RNA, 21 nt, Human
cacgcuccuuucugaucuuca

SEQ ID NO: 2024837 - RNA, 19 nt, Human
cacguguggaccccugcgg

SEQ ID NO: 2024838 - RNA, 20 nt, Human
cacugccccaggcugcggcu

SEQ ID NO: 2024839 - RNA, 16 nt, Human
cacaguucucuccuuc

SEQ ID NO: 2024840 - RNA, 13 nt, Human
ccaaguccgcaga

SEQ ID NO: 2024841 - RNA, 12 nt, Human
ccaauugaguuu

SEQ ID NO: 2024842 - RNA, 17 nt, Human
ccaccccgcaagcacca

SEQ ID NO: 2024843 - RNA, 19 nt, Human
ccaucaaauugaucugcag

SEQ ID NO: 2024844 - RNA, 15 nt, Human
cccgcaggacauggc

SEQ ID NO: 2024845 - RNA, 13 nt, Human
cccgcuaagaggg

SEQ ID NO: 2024846 - RNA, 20 nt, Human
ccccaggucuuccaaguaca

SEQ ID NO: 2024847 - RNA, 16 nt, Human
cccccauuuccucggg

SEQ ID NO: 2024848 - RNA, 15 nt, Human
ccggguccgcggggc

SEQ ID NO: 2024849 - RNA, 14 nt, Human
ccgugcccugcucg

SEQ ID NO: 2024850 - RNA, 23 nt, Human
cagcccagaagugcagaacugca

SEQ ID NO: 2024851 - RNA, 20 nt, Human
cagaguccacggagcucgcg

SEQ ID NO: 2024852 - RNA, 16 nt, Human
cagaucauuaucagcc

SEQ ID NO: 2024853 - RNA, 21 nt, Human
cacuugugacuuuugcuuuaa

SEQ ID NO: 2024854 - RNA, 14 nt, Human
caagucccagcgcg

SEQ ID NO: 2024855 - RNA, 17 nt, Human
caagucccagcgcggcu

SEQ ID NO: 2024856 - RNA, 15 nt, Human
ccuaccaccacgccc

SEQ ID NO: 2024857 - RNA, 17 nt, Human
caacccaccugcgucuc

SEQ ID NO: 2024858 - RNA, 17 nt, Human
cacacccgcgccccgcg

SEQ ID NO: 2024859 - RNA, 22 nt, Human
cacaucaagcgaugaaacugga

SEQ ID NO: 2024860 - RNA, 16 nt, Human
caccaagccuggucag

SEQ ID NO: 2024861 - RNA, 21 nt, Human
caccuccacauaccuggcccu

SEQ ID NO: 2024862 - RNA, 18 nt, Human
cacagacaggaccccugc

SEQ ID NO: 2024863 - RNA, 16 nt, Human
cacucaggccugcgag

SEQ ID NO: 2024864 - RNA, 13 nt, Human
cacugaaccuggg

SEQ ID NO: 2024865 - RNA, 12 nt, Human
cacugcuccugu

SEQ ID NO: 2024866 - RNA, 17 nt, Human
ccaccucuuccuggccg

SEQ ID NO: 2024867 - RNA, 18 nt, Human
ccacggcuggagcugccu

SEQ ID NO: 2024868 - RNA, 15 nt, Human
ccaggccagcugccu

SEQ ID NO: 2024869 - RNA, 20 nt, Human
ccagcccuuucagcugcagc

SEQ ID NO: 2024870 - RNA, 15 nt, Human
caaauguggcuccug

SEQ ID NO: 2024871 - RNA, 14 nt, Human
caccgccuccuaca

SEQ ID NO: 2024872 - RNA, 17 nt, Human
caccggggccucggacu

SEQ ID NO: 2024873 - RNA, 23 nt, Human
cacgcccccacuggugacauguc

SEQ ID NO: 2024874 - RNA, 15 nt, Human
cacggccagccccgc

SEQ ID NO: 2024875 - RNA, 16 nt, Human
cacgguggcucacgcc

SEQ ID NO: 2024876 - RNA, 16 nt, Human
cacguccucgcucccg

SEQ ID NO: 2024877 - RNA, 18 nt, Human
cacuccauggagucugga

SEQ ID NO: 2024878 - RNA, 15 nt, Human
caccccaccugcgcu

SEQ ID NO: 2024879 - RNA, 10 nt, Human
caccccacug

SEQ ID NO: 2024880 - RNA, 19 nt, Human
caagagguuuggcuccugc

SEQ ID NO: 2024881 - RNA, 22 nt, Human
caagcugguggcucugugugcu

SEQ ID NO: 2024882 - RNA, 23 nt, Human
caagucaagugaaaaaggaggaa

SEQ ID NO: 2024883 - RNA, 17 nt, Human
caggccagggggccagu

SEQ ID NO: 2024884 - RNA, 17 nt, Human
caggcccaggcuccaga

SEQ ID NO: 2024885 - RNA, 19 nt, Human
caggaugcccacggcugga

SEQ ID NO: 2024886 - RNA, 19 nt, Human
cagauuuggaaagacugga

SEQ ID NO: 2024887 - RNA, 22 nt, Human
cagcccugcuuugggcugcccu

SEQ ID NO: 2024888 - RNA, 22 nt, Human
cagccgcuccccagcccugccg

SEQ ID NO: 2024889 - RNA, 18 nt, Human
cagaacagcuucauguuc

SEQ ID NO: 2024890 - RNA, 12 nt, Human
cagaauauuuua

SEQ ID NO: 2024891 - RNA, 14 nt, Human
caggugggaggugu

SEQ ID NO: 2024892 - RNA, 21 nt, Human
cagucauuuugcagaggcuau

SEQ ID NO: 2024893 - RNA, 11 nt, Human
cagugucugcu

SEQ ID NO: 2024894 - RNA, 18 nt, Human
cauauuuuuuuccuuaca

SEQ ID NO: 2024895 - RNA, 14 nt, Human
auuuccuuaaagca

SEQ ID NO: 2024896 - RNA, 17 nt, Human
caaacucaccugccccu

SEQ ID NO: 2024897 - RNA, 13 nt, Human
auuuuaagccuuu

SEQ ID NO: 2024898 - RNA, 13 nt, Human
auuuuuaaaagcc

SEQ ID NO: 2024899 - RNA, 17 nt, Human
caaauccaggacccugc

SEQ ID NO: 2024900 - RNA, 12 nt, Human
agaaagaaagaa

SEQ ID NO: 2024901 - RNA, 22 nt, Human
agacccaagcugccuccccucu

SEQ ID NO: 2024902 - RNA, 14 nt, Human
agacccccuggaga

SEQ ID NO: 2024903 - RNA, 16 nt, Human
agacucccaagcugga

SEQ ID NO: 2024904 - RNA, 15 nt, Human
agcauuguaaaagca

SEQ ID NO: 2024905 - RNA, 18 nt, Human
agcacacucauccccuca

SEQ ID NO: 2024906 - RNA, 22 nt, Human
agcagaauguucuggaaaugaa

SEQ ID NO: 2024907 - RNA, 20 nt, Human
agauauuuugcuuugugauu

SEQ ID NO: 2024908 - RNA, 16 nt, Human
agaugggacaggauca

SEQ ID NO: 2024909 - RNA, 19 nt, Human
aggggccaauucguucucu

SEQ ID NO: 2024910 - RNA, 20 nt, Human
aggagcccagcguccacucu

SEQ ID NO: 2024911 - RNA, 19 nt, Human
aggaucucuugagccuggg

SEQ ID NO: 2024912 - RNA, 17 nt, Human
aggccuggccuuggaga

SEQ ID NO: 2024913 - RNA, 20 nt, Human
agcccgcaucagcugcucag

SEQ ID NO: 2024914 - RNA, 15 nt, Human
agcccgggaaaggag

SEQ ID NO: 2024915 - RNA, 23 nt, Human
aggaaaugguauccagaauggaa

SEQ ID NO: 2024916 - RNA, 14 nt, Human
aguauuauaccuuu

SEQ ID NO: 2024917 - RNA, 23 nt, Human
aucaagagagguuaauaaaggaa

SEQ ID NO: 2024918 - RNA, 21 nt, Human
auaaucaagagccuuaaaaca

SEQ ID NO: 2024919 - RNA, 18 nt, Human
auaaucuggacuccucug

SEQ ID NO: 2024920 - RNA, 18 nt, Human
auacagggaugguguuca

SEQ ID NO: 2024921 - RNA, 15 nt, Human
aguuucuuagacuuu

SEQ ID NO: 2024922 - RNA, 14 nt, Human
aguuuuauaaaaga

SEQ ID NO: 2024923 - RNA, 15 nt, Human
auguauguguuuaga

SEQ ID NO: 2024924 - RNA, 14 nt, Human
augucaaacgugaa

SEQ ID NO: 2024925 - RNA, 21 nt, Human
caaacuuuacuauggcccugg

SEQ ID NO: 2024926 - RNA, 20 nt, Human
caaagccaccaacagccacu

SEQ ID NO: 2024927 - RNA, 18 nt, Human
caagaaggaaagauuuug

SEQ ID NO: 2024928 - RNA, 22 nt, Human
caagauuuaugagaaauauuug

SEQ ID NO: 2024929 - RNA, 16 nt, Human
caagcgcccuggcccc

SEQ ID NO: 2024930 - RNA, 14 nt, Human
caaaucugucugcu

SEQ ID NO: 2024931 - RNA, 17 nt, Human
caaauggauauauuuuc

SEQ ID NO: 2024932 - RNA, 21 nt, Human
caaauguaauguggcuucugg

SEQ ID NO: 2024933 - RNA, 14 nt, Human
caacucauauuuuc

SEQ ID NO: 2024934 - RNA, 19 nt, Human
augcuauaacuauguugau

SEQ ID NO: 2024935 - RNA, 14 nt, Human
auggggaggacaaa

SEQ ID NO: 2024936 - RNA, 23 nt, Human
auuacaguuuuguuuaaaaggaa

SEQ ID NO: 2024937 - RNA, 21 nt, Human
aaucuuuaauuaaaaccuggg

SEQ ID NO: 2024938 - RNA, 23 nt, Human
acaccuuagccugcccuccuuuc

SEQ ID NO: 2024939 - RNA, 18 nt, Human
acacuucaggcucuucuc

SEQ ID NO: 2024940 - RNA, 21 nt, Human
accacugcacuccagccuggg

SEQ ID NO: 2024941 - RNA, 16 nt, Human
accaggaggcggcagu

SEQ ID NO: 2024942 - RNA, 18 nt, Human
accaucugcugucuuuuc

SEQ ID NO: 2024943 - RNA, 14 nt, Human
acccaccugcgucu

SEQ ID NO: 2024944 - RNA, 15 nt, Human
acccgguccccacuu

SEQ ID NO: 2024945 - RNA, 14 nt, Human
acagcucugcauac

SEQ ID NO: 2024946 - RNA, 15 nt, Human
accugaagcuagacg

SEQ ID NO: 2024947 - RNA, 23 nt, Human
accuggcugaggcgccacccuuc

SEQ ID NO: 2024948 - RNA, 22 nt, Human
accgacggccagccgcugcgcu

SEQ ID NO: 2024949 - RNA, 19 nt, Human
accgccuccuacagcccac

SEQ ID NO: 2024950 - RNA, 18 nt, Human
accggguuccagcaccac

SEQ ID NO: 2024951 - RNA, 17 nt, Human
accuaaccagggccaga

SEQ ID NO: 2024952 - RNA, 16 nt, Human
acguguggaccccugc

SEQ ID NO: 2024953 - RNA, 22 nt, Human
ucucuugccucagcuuccccag

SEQ ID NO: 2024954 - RNA, 19 nt, Human
ucugaggagccugcaacau

SEQ ID NO: 2024955 - RNA, 17 nt, Human
ucuggccucccacagac

SEQ ID NO: 2024956 - RNA, 14 nt, Human
ucuggggcuguuca

SEQ ID NO: 2024957 - RNA, 21 nt, Human
ucaaaugaugugccugcuuca

SEQ ID NO: 2024958 - RNA, 20 nt, Human
uccaagccucauguccacug

SEQ ID NO: 2024959 - RNA, 19 nt, Human
uccacacccucacugcugu

SEQ ID NO: 2024960 - RNA, 14 nt, Human
ucucagugucaaug

SEQ ID NO: 2024961 - RNA, 14 nt, Human
ucucccccauccua

SEQ ID NO: 2024962 - RNA, 21 nt, Human
uaaaagaaaauaaaaaaaaga

SEQ ID NO: 2024963 - RNA, 15 nt, Human
uaaaauguaucaaca

SEQ ID NO: 2024964 - RNA, 19 nt, Human
uaaagaauaggacuuguuu

SEQ ID NO: 2024965 - RNA, 21 nt, Human
uaaauaaugugaaacuggauu

SEQ ID NO: 2024966 - RNA, 19 nt, Human
uaaggaaucuuucugcuuu

SEQ ID NO: 2024967 - RNA, 13 nt, Human
guuugguuuuuau

SEQ ID NO: 2024968 - RNA, 20 nt, Human
guuuuccacuaauuuugcau

SEQ ID NO: 2024969 - RNA, 17 nt, Human
uagguuugcaagccucc

SEQ ID NO: 2024970 - RNA, 20 nt, Human
uaugcaaucaaaucugcuuu

SEQ ID NO: 2024971 - RNA, 21 nt, Human
ucacccaacaaucccaaggcc

SEQ ID NO: 2024972 - RNA, 23 nt, Human
ucaggccacauggcuaaagaagg

SEQ ID NO: 2024973 - RNA, 22 nt, Human
ucauguugguguuggcaucagu

SEQ ID NO: 2024974 - RNA, 13 nt, Human
uccauccugaggc

SEQ ID NO: 2024975 - RNA, 23 nt, Human
uccaugucgccucugcauucagg

SEQ ID NO: 2024976 - RNA, 13 nt, Human
ucgggccccaccu

SEQ ID NO: 2024977 - RNA, 20 nt, Human
ucuaaauaucccuuggacau

SEQ ID NO: 2024978 - RNA, 21 nt, Human
ucccgcgcuccccgcgccccg

SEQ ID NO: 2024979 - RNA, 23 nt, Human
uccgacugcccucugaggccucc

SEQ ID NO: 2024980 - RNA, 23 nt, Human
guuuagaauugaagguuuuugau

SEQ ID NO: 2024981 - RNA, 19 nt, Human
guuucuaaaggcuaccuuu

SEQ ID NO: 2024982 - RNA, 15 nt, Human
guucauuucauccuu

SEQ ID NO: 2024983 - RNA, 22 nt, Human
guucuaaaaucuuauuuuucaa

SEQ ID NO: 2024984 - RNA, 17 nt, Human
gugcuguuacaguuuuc

SEQ ID NO: 2024985 - RNA, 14 nt, Human
guggacacagcucu

SEQ ID NO: 2024986 - RNA, 19 nt, Human
guuaucugguuuuaaaaga

SEQ ID NO: 2024987 - RNA, 17 nt, Human
gucuauuucaucagaac

SEQ ID NO: 2024988 - RNA, 22 nt, Human
gucgggaugucauguccuccag

SEQ ID NO: 2024989 - RNA, 21 nt, Human
gucucuuuaaugucacaggca

SEQ ID NO: 2024990 - RNA, 20 nt, Human
gugcacuuggggcacaggga

SEQ ID NO: 2024991 - RNA, 16 nt, Human
guccccucccagggag

SEQ ID NO: 2024992 - RNA, 17 nt, Human
gucccugaaaccuagua

SEQ ID NO: 2024993 - RNA, 22 nt, Human
guccugccuaaggcugaacuug

SEQ ID NO: 2024994 - RNA, 9 nt, Human
aaaaaaaga

SEQ ID NO: 2024995 - RNA, 15 nt, Human
agaacuuuguauagu

SEQ ID NO: 2024996 - RNA, 19 nt, Human
agacaaucauguacagaaa

SEQ ID NO: 2024997 - RNA, 17 nt, Human
agacaaugugaaaagaa

SEQ ID NO: 2024998 - RNA, 14 nt, Human
agacaugaagggaa

SEQ ID NO: 2024999 - RNA, 17 nt, Human
agacuaucaaacagaaa

SEQ ID NO: 2025000 - RNA, 16 nt, Human
aguccauugaaaggga

SEQ ID NO: 2025001 - RNA, 21 nt, Human
aggcuaggggguuggaggugg

SEQ ID NO: 2025002 - RNA, 11 nt, Human
agggaccagaa

SEQ ID NO: 2025003 - RNA, 16 nt, Human
agggagcaccugguga

SEQ ID NO: 2025004 - RNA, 14 nt, Human
agggaugaggcaac

SEQ ID NO: 2025005 - RNA, 15 nt, Human
agggaugcauggaga

SEQ ID NO: 2025006 - RNA, 16 nt, Human
agcaucacuuaaaaca

SEQ ID NO: 2025007 - RNA, 12 nt, Human
aggcaggaggau

SEQ ID NO: 2025008 - RNA, 22 nt, Human
aggccaugggacagggaggacg

SEQ ID NO: 2025009 - RNA, 16 nt, Human
aggcccauuccccucg

SEQ ID NO: 2025010 - RNA, 18 nt, Human
aggccugcagccuggagc

SEQ ID NO: 2025011 - RNA, 21 nt, Human
aagccuuucauuuugcuuuaa

SEQ ID NO: 2025012 - RNA, 21 nt, Human
agaugccacuaccccuugauu

SEQ ID NO: 2025013 - RNA, 21 nt, Human
agcaaaggagauuggaaggaa

SEQ ID NO: 2025014 - RNA, 22 nt, Human
agcacacugcuugugaaaggaa

SEQ ID NO: 2025015 - RNA, 19 nt, Human
agcacgaauguuccccuca

SEQ ID NO: 2025016 - RNA, 16 nt, Human
aucccacuuuugccag

SEQ ID NO: 2025017 - RNA, 16 nt, Human
auaggaauugacccac

SEQ ID NO: 2025018 - RNA, 16 nt, Human
aguuuauuuuaaaaca

SEQ ID NO: 2025019 - RNA, 18 nt, Human
agugucugcuggagacau

SEQ ID NO: 2025020 - RNA, 19 nt, Human
aguuaaaagcacaaaggaa

SEQ ID NO: 2025021 - RNA, 16 nt, Human
aguuuaauugaaagaa

SEQ ID NO: 2025022 - RNA, 19 nt, Human
auggccagguggccacucc

SEQ ID NO: 2025023 - RNA, 20 nt, Human
auggugugaccacugcagaa

SEQ ID NO: 2025024 - RNA, 17 nt, Human
auguccccagccccucu

SEQ ID NO: 2025025 - RNA, 15 nt, Human
augaaagacucaaaa

SEQ ID NO: 2025026 - RNA, 14 nt, Human
augcaauccuuaca

SEQ ID NO: 2025027 - RNA, 19 nt, Human
auguuaaguugauggugau

SEQ ID NO: 2025028 - RNA, 21 nt, Human
aacgugaugugcucaucagaa

SEQ ID NO: 2025029 - RNA, 18 nt, Human
aacucugcaugguccccu

SEQ ID NO: 2025030 - RNA, 14 nt, Human
aagcaccccuucau

SEQ ID NO: 2025031 - RNA, 19 nt, Human
accugcccaaccugcucuc

SEQ ID NO: 2025032 - RNA, 22 nt, Human
accugccccucaacucuccucc

SEQ ID NO: 2025033 - RNA, 22 nt, Human
accccugcagauagcaccgguc

SEQ ID NO: 2025034 - RNA, 14 nt, Human
accccugcggcagg

SEQ ID NO: 2025035 - RNA, 14 nt, Human
acccugaaagcccu

SEQ ID NO: 2025036 - RNA, 23 nt, Human
acucucuuggcugucacccgauc

SEQ ID NO: 2025037 - RNA, 23 nt, Human
acucugccuccucuucaacugac

SEQ ID NO: 2025038 - RNA, 21 nt, Human
accucccuuuccaaaugccca

SEQ ID NO: 2025039 - RNA, 12 nt, Human
acacgcuccuuc

SEQ ID NO: 2025040 - RNA, 16 nt, Human
acaggcccuuccucuc

SEQ ID NO: 2025041 - RNA, 21 nt, Human
acaggcuccugccaccacgcc

SEQ ID NO: 2025042 - RNA, 21 nt, Human
acaggugugagccaccacgcc

SEQ ID NO: 2025043 - RNA, 17 nt, Human
aaugaagauacugaaau

SEQ ID NO: 2025044 - RNA, 19 nt, Human
aaugacagcaaacagauca

SEQ ID NO: 2025045 - RNA, 16 nt, Human
aaaaacaaagagcguu

SEQ ID NO: 2025046 - RNA, 21 nt, Human
aaaaacaaagagcguugaagu

SEQ ID NO: 2025047 - RNA, 14 nt, Human
acuuggucugugag

SEQ ID NO: 2025048 - RNA, 19 nt, Human
augaucccugcuuaaaaga

SEQ ID NO: 2025049 - RNA, 16 nt, Human
augaggaaggaacagc

SEQ ID NO: 2025050 - RNA, 17 nt, Human
auaccaaggaacaggaa

SEQ ID NO: 2025051 - RNA, 21 nt, Human
agugccgagaaggaagccucc

SEQ ID NO: 2025052 - RNA, 21 nt, Human
auaggcaccuaccaccacgcc

SEQ ID NO: 2025053 - RNA, 17 nt, Human
aucaugaagcguggaga

SEQ ID NO: 2025054 - RNA, 19 nt, Human
augcccuggauccaucagg

SEQ ID NO: 2025055 - RNA, 17 nt, Human
augguaggaacugcugg

SEQ ID NO: 2025056 - RNA, 14 nt, Human
auguggcguggaga

SEQ ID NO: 2025057 - RNA, 16 nt, Human
agggcagcacacggcc

SEQ ID NO: 2025058 - RNA, 13 nt, Human
aguagcacaggcu

SEQ ID NO: 2025059 - RNA, 14 nt, Human
agucccgccccucu

SEQ ID NO: 2025060 - RNA, 23 nt, Human
aguuaagagaaaugagcuugacc

SEQ ID NO: 2025061 - RNA, 23 nt, Human
aguuugcauuucagaaagccuuu

SEQ ID NO: 2025062 - RNA, 15 nt, Human
auaaaagacaaggaa

SEQ ID NO: 2025063 - RNA, 14 nt, Human
agcugcucugugac

SEQ ID NO: 2025064 - RNA, 20 nt, Human
aggagcccauuuggagggcc

SEQ ID NO: 2025065 - RNA, 13 nt, Human
aggagccugcaac

SEQ ID NO: 2025066 - RNA, 20 nt, Human
aggccggcgccuuccccucg

SEQ ID NO: 2025067 - RNA, 17 nt, Human
agccaaggccaaaggaa

SEQ ID NO: 2025068 - RNA, 20 nt, Human
agcagaacagugauuaccag

SEQ ID NO: 2025069 - RNA, 15 nt, Human
agcaccauccccucc

SEQ ID NO: 2025070 - RNA, 23 nt, Human
agcacccauccaccguccccucc

SEQ ID NO: 2025071 - RNA, 16 nt, Human
gcacuggauguggccc

SEQ ID NO: 2025072 - RNA, 22 nt, Human
gccugcgccaccgcccagagac

SEQ ID NO: 2025073 - RNA, 22 nt, Human
gccuugaccauucuccaccugc

SEQ ID NO: 2025074 - RNA, 22 nt, Human
gccuugggauccaggccccucc

SEQ ID NO: 2025075 - RNA, 18 nt, Human
gcgaaaucccugcucacu

SEQ ID NO: 2025076 - RNA, 12 nt, Human
gcgaauauuuug

SEQ ID NO: 2025077 - RNA, 21 nt, Human
gccugaggagcccagcgucca

SEQ ID NO: 2025078 - RNA, 15 nt, Human
gccugauuuguuccu

SEQ ID NO: 2025079 - RNA, 16 nt, Human
gccaggcugggucgcc

SEQ ID NO: 2025080 - RNA, 15 nt, Human
gccgccuguggacag

SEQ ID NO: 2025081 - RNA, 22 nt, Human
gccggucgggggggacccucca

SEQ ID NO: 2025082 - RNA, 12 nt, Human
gccgugaacuuu

SEQ ID NO: 2025083 - RNA, 17 nt, Human
gccgugaccccugcaga

SEQ ID NO: 2025084 - RNA, 16 nt, Human
gccuccuuuccccucc

SEQ ID NO: 2025085 - RNA, 22 nt, Human
gccccaccuggcugaggcgcca

SEQ ID NO: 2025086 - RNA, 13 nt, Human
gccccacucucag

SEQ ID NO: 2025087 - RNA, 16 nt, Human
gaugccagggacccac

SEQ ID NO: 2025088 - RNA, 23 nt, Human
gcaaaagaguguaaaauauuuua

SEQ ID NO: 2025089 - RNA, 16 nt, Human
gcaagcuaauucuuug

SEQ ID NO: 2025090 - RNA, 19 nt, Human
gcaaguuuuccauauuuuu

SEQ ID NO: 2025091 - RNA, 19 nt, Human
gcacaaccuucaagcugcu

SEQ ID NO: 2025092 - RNA, 11 nt, Human
gcauaguuccc

SEQ ID NO: 2025093 - RNA, 12 nt, Human
gcagauauuuug

SEQ ID NO: 2025094 - RNA, 19 nt, Human
gcauggaaaaguuucccag

SEQ ID NO: 2025095 - RNA, 18 nt, Human
gagugugauccaguuuuu

SEQ ID NO: 2025096 - RNA, 16 nt, Human
gauaaauuauuuccag

SEQ ID NO: 2025097 - RNA, 24 nt, Human
gagucagucgccuuucagcaggca

SEQ ID NO: 2025098 - RNA, 21 nt, Human
gauacaccgggccuggagaac

SEQ ID NO: 2025099 - RNA, 20 nt, Human
gaucccuucuuacuuaaccu

SEQ ID NO: 2025100 - RNA, 20 nt, Human
gaucgugcuggcgcuguugg

SEQ ID NO: 2025101 - RNA, 19 nt, Human
gagaaaagaaaaaaaaaga

SEQ ID NO: 2025102 - RNA, 14 nt, Human
gagaaucacaggcu

SEQ ID NO: 2025103 - RNA, 15 nt, Human
gagaaugcacaaaca

SEQ ID NO: 2025104 - RNA, 15 nt, Human
gagccugcaacaugc

SEQ ID NO: 2025105 - RNA, 12 nt, Human
gagccugcagag

SEQ ID NO: 2025106 - RNA, 23 nt, Human
gagauccuuguguuuaucagaaa

SEQ ID NO: 2025107 - RNA, 14 nt, Human
gagccaauggagac

SEQ ID NO: 2025108 - RNA, 15 nt, Human
gaagcccuucuaccu

SEQ ID NO: 2025109 - RNA, 22 nt, Human
gaccugggaauuuucaacaugg

SEQ ID NO: 2025110 - RNA, 18 nt, Human
gacuacucccccaggugg

SEQ ID NO: 2025111 - RNA, 13 nt, Human
gacugagucuccc

SEQ ID NO: 2025112 - RNA, 15 nt, Human
gaaguagcacaggcu

SEQ ID NO: 2025113 - RNA, 20 nt, Human
gacaccuuucagucucuuuu

SEQ ID NO: 2025114 - RNA, 20 nt, Human
gacacuaauggggcggugag

SEQ ID NO: 2025115 - RNA, 14 nt, Human
gacagacacaggcc

SEQ ID NO: 2025116 - RNA, 14 nt, Human
cuugauaaagaaga

SEQ ID NO: 2025117 - RNA, 18 nt, Human
cuucugccagcauaauac

SEQ ID NO: 2025118 - RNA, 18 nt, Human
cugcccugguuuccugcc

SEQ ID NO: 2025119 - RNA, 12 nt, Human
cuucagcucugu

SEQ ID NO: 2025120 - RNA, 20 nt, Human
cuuuauuuuuuugaacucuu

SEQ ID NO: 2025121 - RNA, 22 nt, Human
gaaagcagggacuugaacccau

SEQ ID NO: 2025122 - RNA, 14 nt, Human
cuuuuuuuuuucau

SEQ ID NO: 2025123 - RNA, 17 nt, Human
cugccucugacacacag

SEQ ID NO: 2025124 - RNA, 19 nt, Human
cugcgugugggacccgccg

SEQ ID NO: 2025125 - RNA, 16 nt, Human
cuguucagcuccagcu

SEQ ID NO: 2025126 - RNA, 21 nt, Human
cuggcaagcaagccugggagc

SEQ ID NO: 2025127 - RNA, 13 nt, Human
cuggccgggagcc

SEQ ID NO: 2025128 - RNA, 16 nt, Human
cuggccucugcacucc

SEQ ID NO: 2025129 - RNA, 12 nt, Human
cugggacauggg

SEQ ID NO: 2025130 - RNA, 19 nt, Human
cugggcugacugggccagg

SEQ ID NO: 2025131 - RNA, 18 nt, Human
cucugccccagccagcgc

SEQ ID NO: 2025132 - RNA, 21 nt, Human
cucugcccuaaugcgcaggcu

SEQ ID NO: 2025133 - RNA, 23 nt, Human
cucccgccuccaaccccucgccc

SEQ ID NO: 2025134 - RNA, 18 nt, Human
cuccugccucagucuccc

SEQ ID NO: 2025135 - RNA, 14 nt, Human
cucagccucccgag

SEQ ID NO: 2025136 - RNA, 16 nt, Human
cuaugauuuggaaaau

SEQ ID NO: 2025137 - RNA, 23 nt, Human
cgugacccaaaaaagucaagaac

SEQ ID NO: 2025138 - RNA, 14 nt, Human
cgugcacacaccag

SEQ ID NO: 2025139 - RNA, 16 nt, Human
cgugcauguguguuca

SEQ ID NO: 2025140 - RNA, 20 nt, Human herpesvirus 5
ucguacgacgucugcucaaa

SEQ ID NO: 2025141 - RNA, 18 nt, Human herpesvirus 5
uaacaugucucuguuuuu

SEQ ID NO: 2025142 - RNA, 19 nt, Human herpesvirus 5
ggcaaagaguccaucugcu

SEQ ID NO: 2025143 - RNA, 13 nt, Human herpesvirus 5
uauguaguccgua

SEQ ID NO: 2025144 - RNA, 14 nt, Human herpesvirus 5
cgcaagggcugcuc

SEQ ID NO: 2025145 - RNA, 17 nt, Human herpesvirus 5
ucuuugccggcucuccu

SEQ ID NO: 2025146 - RNA, 18 nt, Human herpesvirus 5
cagggugagaaagaggag

SEQ ID NO: 2025147 - RNA, 18 nt, Human herpesvirus 5
ccuacggaccgcagcacc

SEQ ID NO: 2025148 - RNA, 18 nt, Human herpesvirus 5
acgcaggugaggcucucg

SEQ ID NO: 2025149 - RNA, 19 nt, Human herpesvirus 5
ucccgcugugcuggccgcc

SEQ ID NO: 2025150 - RNA, 16 nt, Human herpesvirus 5
gcagcaccucuuucca

SEQ ID NO: 2025151 - RNA, 15 nt, Human herpesvirus 5
cugauguaccugcag

SEQ ID NO: 2025152 - RNA, 15 nt, Human herpesvirus 5
ccuuuugcuggcugg

SEQ ID NO: 2025153 - RNA, 21 nt, Human herpesvirus 5
ccaggcgcguaaaacucccca

SEQ ID NO: 2025154 - RNA, 23 nt, Human herpesvirus 5
acuacucuguguugcuacaggga

SEQ ID NO: 2025155 - RNA, 22 nt, Human herpesvirus 5
aaccgugcccguuuucacagca

SEQ ID NO: 2025156 - RNA, 17 nt, Human herpesvirus 5
gcccugcugacgcuguu

SEQ ID NO: 2025157 - RNA, 19 nt, Human herpesvirus 5
ucggugacaucaccgccuc

SEQ ID NO: 2025158 - RNA, 21 nt, Human herpesvirus 5
gugucuagcuggcggccucuu

SEQ ID NO: 2025159 - RNA, 22 nt, Human herpesvirus 5
cucgaccuccgacccgaagaau

SEQ ID NO: 2025160 - RNA, 18 nt, Human herpesvirus 5
ccagccccgucaaaacac

SEQ ID NO: 2025161 - RNA, 14 nt, Human herpesvirus 5
gugccauggaccug

SEQ ID NO: 2025162 - RNA, 16 nt, Human herpesvirus 5
gauacuaucgggggag

SEQ ID NO: 2025163 - RNA, 15 nt, Human herpesvirus 5
ugccggaacccuucc

SEQ ID NO: 2025164 - RNA, 15 nt, Human herpesvirus 5
ccaggcuuaacacua

SEQ ID NO: 2025165 - RNA, 18 nt, Human herpesvirus 5
ccagcgccaccauagcca

SEQ ID NO: 2025166 - RNA, 18 nt, Human herpesvirus 5
aauugcgggcccugcuga

SEQ ID NO: 2025167 - RNA, 16 nt, Human herpesvirus 5
cucacccggcugcugg

SEQ ID NO: 2025168 - RNA, 14 nt, Human herpesvirus 5
ugcuuagcugcaca

SEQ ID NO: 2025169 - RNA, 17 nt, Human herpesvirus 5
gaggguggugacuuaca

SEQ ID NO: 2025170 - RNA, 23 nt, Human herpesvirus 5
cgggcucaccgcaguugcugccu

SEQ ID NO: 2025171 - RNA, 16 nt, Human herpesvirus 5
guccacacaccgcuuu

SEQ ID NO: 2025172 - RNA, 17 nt, Human herpesvirus 5
gcagcauucaccuccag

SEQ ID NO: 2025173 - RNA, 20 nt, Human herpesvirus 5
ucuagacucacuuuauugaa

SEQ ID NO: 2025174 - RNA, 20 nt, Human herpesvirus 5
cuaucaccaaacaacaccac

SEQ ID NO: 2025175 - RNA, 20 nt, Human herpesvirus 5
caucggugccggccagguag

SEQ ID NO: 2025176 - RNA, 17 nt, Human herpesvirus 5
cgaggagccaaacugcg

SEQ ID NO: 2025177 - RNA, 20 nt, Human herpesvirus 5
caguauuucuagagcacuga

SEQ ID NO: 2025178 - RNA, 23 nt, Human herpesvirus 5
caggacccguacugcgacggcag

SEQ ID NO: 2025179 - RNA, 22 nt, Human herpesvirus 5
gcccgcuucaacgccugcacca

SEQ ID NO: 2025180 - RNA, 14 nt, Human herpesvirus 5
gcagagccaccagg

SEQ ID NO: 2025181 - RNA, 14 nt, Human herpesvirus 5
ccuggccccggcca

SEQ ID NO: 2025182 - RNA, 16 nt, Human herpesvirus 5
agacagccuuacagcu

SEQ ID NO: 2025183 - RNA, 14 nt, Human herpesvirus 5
gcaccgcgacagcu

SEQ ID NO: 2025184 - RNA, 18 nt, Human herpesvirus 5
ccacucgcaccggcagca

SEQ ID NO: 2025185 - RNA, 13 nt, Human herpesvirus 5
caccaagaaacac

SEQ ID NO: 2025186 - RNA, 21 nt, Human herpesvirus 5
uaucuuuguagccucaagaau

SEQ ID NO: 2025187 - RNA, 12 nt, Human herpesvirus 5
aauccggcggcg

SEQ ID NO: 2025188 - RNA, 22 nt, Human herpesvirus 5
cugucagcgccgggugcgcgac

SEQ ID NO: 2025189 - RNA, 12 nt, Human herpesvirus 5
caccugcugccg

SEQ ID NO: 2025190 - RNA, 16 nt, Human herpesvirus 5
agcgucugcgccuuuu

SEQ ID NO: 2025191 - RNA, 14 nt, Human herpesvirus 5
cgaacgcgacuggc

SEQ ID NO: 2025192 - RNA, 17 nt, Human herpesvirus 5
ucaccacgcagcaggcu

SEQ ID NO: 2025193 - RNA, 22 nt, Human herpesvirus 5
cuugucgucauucgggccagga

SEQ ID NO: 2025194 - RNA, 13 nt, Human herpesvirus 5
gcccaggguacgg

SEQ ID NO: 2025195 - RNA, 20 nt, Human herpesvirus 5
gauucaggacgaggagccaa

SEQ ID NO: 2025196 - RNA, 16 nt, Human herpesvirus 5
uguuuuauugacgaag

SEQ ID NO: 2025197 - RNA, 21 nt, Human herpesvirus 5
guucuuccgagucgugucgcu

SEQ ID NO: 2025198 - RNA, 22 nt, Human herpesvirus 5
aaguauauaacgccgaucaugu

SEQ ID NO: 2025199 - RNA, 16 nt, Human herpesvirus 5
gugaaggccguggaga

SEQ ID NO: 2025200 - RNA, 14 nt, Human herpesvirus 5
ggcauagugccagc

SEQ ID NO: 2025201 - RNA, 19 nt, Human herpesvirus 5
caccguuuucaugcccguc

SEQ ID NO: 2025202 - RNA, 18 nt, Human herpesvirus 5
cgagcaccccgaacugga

SEQ ID NO: 2025203 - RNA, 20 nt, Human herpesvirus 5
ccccggcagcggucucaucu

SEQ ID NO: 2025204 - RNA, 18 nt, Human herpesvirus 5
gcacuuccuguacacauc

SEQ ID NO: 2025205 - RNA, 15 nt, Human herpesvirus 5
cguauacgcgcugga

SEQ ID NO: 2025206 - RNA, 17 nt, Human herpesvirus 5
guuccacggccagcgcc

SEQ ID NO: 2025207 - RNA, 13 nt, Human herpesvirus 5
cgccgcucagguc

SEQ ID NO: 2025208 - RNA, 16 nt, Human herpesvirus 5
cucacccgaguccugg

SEQ ID NO: 2025209 - RNA, 18 nt, Human herpesvirus 5
gcggccgcagugggccca

SEQ ID NO: 2025210 - RNA, 18 nt, Human herpesvirus 5
cacggagcacgggcugcu

SEQ ID NO: 2025211 - RNA, 16 nt, Human herpesvirus 5
acccgccggagcccgg

SEQ ID NO: 2025212 - RNA, 13 nt, Human herpesvirus 5
cuacgcgaccagc

SEQ ID NO: 2025213 - RNA, 14 nt, Human herpesvirus 5
acggaccgcagcac

SEQ ID NO: 2025214 - RNA, 23 nt, Human herpesvirus 5
augauccuuguacagauguaaau

SEQ ID NO: 2025215 - RNA, 20 nt, Human herpesvirus 5
gcucaccgcaguugcugccu

SEQ ID NO: 2025216 - RNA, 16 nt, Human herpesvirus 5
gcgcccacuggaguug

SEQ ID NO: 2025217 - RNA, 17 nt, Human herpesvirus 5
gcgcgguuucgccgccg

SEQ ID NO: 2025218 - RNA, 14 nt, Human herpesvirus 5
cagcugcaggcagg

SEQ ID NO: 2025219 - RNA, 14 nt, Human herpesvirus 5
cuaugagggccugc

SEQ ID NO: 2025220 - RNA, 14 nt, Human herpesvirus 5
cgccgcaacagcgg

SEQ ID NO: 2025221 - RNA, 18 nt, Human herpesvirus 5
ugaugggugagggucgug

SEQ ID NO: 2025222 - RNA, 12 nt, Human herpesvirus 5
acgccaccgccg

SEQ ID NO: 2025223 - RNA, 20 nt, Human herpesvirus 5
ucaacgacgagaugaaggaa

SEQ ID NO: 2025224 - RNA, 18 nt, Human herpesvirus 5
cggccgugguggccgugc

SEQ ID NO: 2025225 - RNA, 23 nt, Human herpesvirus 5
gacgagcucuugcgaggcuuuga

SEQ ID NO: 2025226 - RNA, 23 nt, Human herpesvirus 5
uucugucgccgacuaaauucaug

SEQ ID NO: 2025227 - RNA, 20 nt, Human herpesvirus 5
gucaugggcgacuuucaggg

SEQ ID NO: 2025228 - RNA, 17 nt, Human herpesvirus 5
cagcuggcaacgugcca

SEQ ID NO: 2025229 - RNA, 17 nt, Human herpesvirus 5
ugcuuacccuucaauuu

SEQ ID NO: 2025230 - RNA, 16 nt, Human herpesvirus 5
ucugggaugugcagca

SEQ ID NO: 2025231 - RNA, 13 nt, Human herpesvirus 5
aaagcuaacauuc

SEQ ID NO: 2025232 - RNA, 21 nt, Human herpesvirus 5
uuucaugucuuacaaaucaca

SEQ ID NO: 2025233 - RNA, 18 nt, Human herpesvirus 5
cgucggcgguccuccagc

SEQ ID NO: 2025234 - RNA, 17 nt, Human herpesvirus 5
acggcauagugccagcc

SEQ ID NO: 2025235 - RNA, 23 nt, Human herpesvirus 5
uggggacgagcaccggcgccugc

SEQ ID NO: 2025236 - RNA, 16 nt, Human herpesvirus 5
gugaggcgcuccguca

SEQ ID NO: 2025237 - RNA, 22 nt, Human herpesvirus 5
ugaagccgucagucauagagcc

SEQ ID NO: 2025238 - RNA, 14 nt, Human herpesvirus 5
augaugcaaauaaa

SEQ ID NO: 2025239 - RNA, 17 nt, Human herpesvirus 5
uacagauacgcaaugca

SEQ ID NO: 2025240 - RNA, 18 nt, Human herpesvirus 5
ucucacgaucgcuggugu

SEQ ID NO: 2025241 - RNA, 18 nt, Human herpesvirus 5
ugcgcgaauggcuggugu

SEQ ID NO: 2025242 - RNA, 19 nt, Human herpesvirus 5
caugugcaaaaacuugucc

SEQ ID NO: 2025243 - RNA, 21 nt, Human herpesvirus 5
gucggcugccuguuccugcug

SEQ ID NO: 2025244 - RNA, 15 nt, Human herpesvirus 5
cugcguaagcaccgu

SEQ ID NO: 2025245 - RNA, 15 nt, Human herpesvirus 5
gacggugacgagcgc

SEQ ID NO: 2025246 - RNA, 12 nt, Human herpesvirus 5
gucgcguccggg

SEQ ID NO: 2025247 - RNA, 18 nt, Human herpesvirus 5
guaccuagcuacuuugga

SEQ ID NO: 2025248 - RNA, 23 nt, Human herpesvirus 5
uuaacuauuccuccguguucuua

SEQ ID NO: 2025249 - RNA, 16 nt, Human herpesvirus 5
cccggucggucuuccu

SEQ ID NO: 2025250 - RNA, 15 nt, Human herpesvirus 5
auacgcaguguuguu

SEQ ID NO: 2025251 - RNA, 14 nt, Human herpesvirus 5
caggccgcgcaggc

SEQ ID NO: 2025252 - RNA, 14 nt, Human herpesvirus 5
ccacggugcuuuuc

SEQ ID NO: 2025253 - RNA, 23 nt, Human herpesvirus 5
gucgcaucaucaacagcagcaac

SEQ ID NO: 2025254 - RNA, 17 nt, Human herpesvirus 5
ggaggacucagagccac

SEQ ID NO: 2025255 - RNA, 15 nt, Human herpesvirus 5
agccggcuccgccgu

SEQ ID NO: 2025256 - RNA, 19 nt, Human herpesvirus 5
uccacugccaacccagcag

SEQ ID NO: 2025257 - RNA, 21 nt, Human herpesvirus 5
ggacgauauaaagaggcacgg

SEQ ID NO: 2025258 - RNA, 15 nt, Human herpesvirus 5
gacaggcggccagcu

SEQ ID NO: 2025259 - RNA, 13 nt, Human herpesvirus 5
ccgcagaaggcca

SEQ ID NO: 2025260 - RNA, 12 nt, Human herpesvirus 5
uugguggacucg

SEQ ID NO: 2025261 - RNA, 22 nt, Human herpesvirus 5
gggcgcaucacccgccucaugg

SEQ ID NO: 2025262 - RNA, 21 nt, Human herpesvirus 5
gaacugucgucgccggaagga

SEQ ID NO: 2025263 - RNA, 23 nt, Human herpesvirus 5
gcaggaggugggguggcucuugc

SEQ ID NO: 2025264 - RNA, 22 nt, Human herpesvirus 5
cgguggucgaugcugaucacgu

SEQ ID NO: 2025265 - RNA, 16 nt, Human herpesvirus 5
acaagcgggacgaaaa

SEQ ID NO: 2025266 - RNA, 22 nt, Human herpesvirus 5
gaauccuaaucgcauccugcau

SEQ ID NO: 2025267 - RNA, 13 nt, Human herpesvirus 5
ucacuagacagau

SEQ ID NO: 2025268 - RNA, 17 nt, Human herpesvirus 5
cagccucgucgugcccg

SEQ ID NO: 2025269 - RNA, 23 nt, Human herpesvirus 5
aguggaugcgcgaagcugcgcag

SEQ ID NO: 2025270 - RNA, 13 nt, Human herpesvirus 5
aacguaacagcaa

SEQ ID NO: 2025271 - RNA, 13 nt, Human herpesvirus 5
gugccgcgccgcc

SEQ ID NO: 2025272 - RNA, 22 nt, Human herpesvirus 5
ggaacugguuuucggacagagc

SEQ ID NO: 2025273 - RNA, 20 nt, Human herpesvirus 5
ccugggaacgcgcgcacggc

SEQ ID NO: 2025274 - RNA, 23 nt, Human herpesvirus 5
caguagcggguaauaaaaacaau

SEQ ID NO: 2025275 - RNA, 16 nt, Human herpesvirus 5
guaaucuuccauaaua

SEQ ID NO: 2025276 - RNA, 23 nt, Human herpesvirus 5
ggaccauuuccaugugcagcugg

SEQ ID NO: 2025277 - RNA, 21 nt, Human herpesvirus 5
accucaguggaccgucaauuu

SEQ ID NO: 2025278 - RNA, 17 nt, Human herpesvirus 5
cuaccuggcuggcgcag

SEQ ID NO: 2025279 - RNA, 13 nt, Human herpesvirus 5
uuucuuuccucgg

SEQ ID NO: 2025280 - RNA, 15 nt, Human herpesvirus 5
gcuaguuagacaggc

SEQ ID NO: 2025281 - RNA, 19 nt, Human herpesvirus 5
accucguuguccucuccuc

SEQ ID NO: 2025282 - RNA, 17 nt, Human herpesvirus 5
gucagucagaaguggau

SEQ ID NO: 2025283 - RNA, 18 nt, Human herpesvirus 5
gccaccauagccacuacc

SEQ ID NO: 2025284 - RNA, 14 nt, Human herpesvirus 5
cggcagccacggag

SEQ ID NO: 2025285 - RNA, 16 nt, Human herpesvirus 5
ccgaugcuccgcgacc

SEQ ID NO: 2025286 - RNA, 19 nt, Human herpesvirus 5
agccuuaggaacagggaag

SEQ ID NO: 2025287 - RNA, 14 nt, Human herpesvirus 5
cgcuguguggcgug

SEQ ID NO: 2025288 - RNA, 15 nt, Human herpesvirus 5
ggcgguccuccagca

SEQ ID NO: 2025289 - RNA, 16 nt, Human herpesvirus 5
uaccucggccuuuuca

SEQ ID NO: 2025290 - RNA, 22 nt, Human herpesvirus 5
caccuggacgggggggaccggg

SEQ ID NO: 2025291 - RNA, 16 nt, Human herpesvirus 5
gucgcgauuugcuuga

SEQ ID NO: 2025292 - RNA, 19 nt, Human herpesvirus 5
cgggaaacauguccccauc

SEQ ID NO: 2025293 - RNA, 20 nt, Human herpesvirus 5
gcguccucguguggcaaguu

SEQ ID NO: 2025294 - RNA, 22 nt, Human herpesvirus 5
cugcuuuuuugucuccugugga

SEQ ID NO: 2025295 - RNA, 13 nt, Human herpesvirus 5
ggcaccggcagcc

SEQ ID NO: 2025296 - RNA, 19 nt, Human herpesvirus 5
cucgucggccugggcugcu

SEQ ID NO: 2025297 - RNA, 12 nt, Human herpesvirus 5
cucugcugcugg

SEQ ID NO: 2025298 - RNA, 23 nt, Human herpesvirus 5
augggcuucccuccugcagcugc

SEQ ID NO: 2025299 - RNA, 21 nt, Human herpesvirus 5
gccuucgcaaugucucaggca

SEQ ID NO: 2025300 - RNA, 22 nt, Human herpesvirus 5
gccgucucuucgcgccccucug

SEQ ID NO: 2025301 - RNA, 17 nt, Human herpesvirus 5
cagcggaaaaugccgcc

SEQ ID NO: 2025302 - RNA, 20 nt, Human herpesvirus 5
ucgcagccuccucgcuggga

SEQ ID NO: 2025303 - RNA, 23 nt, Human herpesvirus 5
ggccaacaagagaaagacccauc

SEQ ID NO: 2025304 - RNA, 20 nt, Human herpesvirus 5
cuccacggccuccgacgagc

SEQ ID NO: 2025305 - RNA, 17 nt, Human herpesvirus 5
cuuuggcgugcccagcc

SEQ ID NO: 2025306 - RNA, 15 nt, Human herpesvirus 5
ucucggagccgccga

SEQ ID NO: 2025307 - RNA, 24 nt, Human herpesvirus 5
gauuuucaugaauccacaggcugc

SEQ ID NO: 2025308 - RNA, 14 nt, Human herpesvirus 5
cugggcugggugca

SEQ ID NO: 2025309 - RNA, 13 nt, Human herpesvirus 5
gagagucugaaac

SEQ ID NO: 2025310 - RNA, 12 nt, Human herpesvirus 5
ggcugccggucu

SEQ ID NO: 2025311 - RNA, 14 nt, Human herpesvirus 5
cgcagcgccagccu

SEQ ID NO: 2025312 - RNA, 11 nt, Human herpesvirus 5
guugcgccgca

SEQ ID NO: 2025313 - RNA, 18 nt, Human herpesvirus 5
gacgugauuuacgagguc

SEQ ID NO: 2025314 - RNA, 14 nt, Human herpesvirus 5
cugggucgccaggu

SEQ ID NO: 2025315 - RNA, 23 nt, Human herpesvirus 5
ggaucuggcguuugaagcgcggu

SEQ ID NO: 2025316 - RNA, 15 nt, Human herpesvirus 5
ucuggcccuccgcca

SEQ ID NO: 2025317 - RNA, 13 nt, Human herpesvirus 5
aguauagcaugca

SEQ ID NO: 2025318 - RNA, 23 nt, Human herpesvirus 5
cgauagagauggcgauauuggaa

SEQ ID NO: 2025319 - RNA, 14 nt, Human herpesvirus 5
aggccuccagcgcc

SEQ ID NO: 2025320 - RNA, 16 nt, Human herpesvirus 5
acgcccuguaugagcu

SEQ ID NO: 2025321 - RNA, 17 nt, Human herpesvirus 5
uguuggugccccaggau

SEQ ID NO: 2025322 - RNA, 21 nt, Human herpesvirus 5
gcucgaccaggagguguugag

SEQ ID NO: 2025323 - RNA, 14 nt, Human herpesvirus 5
cgaauggcuggugu

SEQ ID NO: 2025324 - RNA, 14 nt, Human herpesvirus 5
aaucuccugagaca

SEQ ID NO: 2025325 - RNA, 22 nt, Human herpesvirus 5
uggcauauagccaauaaagaga

SEQ ID NO: 2025326 - RNA, 13 nt, Human herpesvirus 5
aauugggaaagag

SEQ ID NO: 2025327 - RNA, 15 nt, Human herpesvirus 5
uccacuccaucacac

SEQ ID NO: 2025328 - RNA, 18 nt, Human herpesvirus 5
agcgccgcggcaccagag

SEQ ID NO: 2025329 - RNA, 12 nt, Human herpesvirus 5
accuugucuccc

SEQ ID NO: 2025330 - RNA, 12 nt, Human herpesvirus 5
acaccgcugcgg

SEQ ID NO: 2025331 - RNA, 21 nt, Human herpesvirus 5
cacggcaucaugcugggcgac

SEQ ID NO: 2025332 - RNA, 16 nt, Human herpesvirus 5
cggcgugacacagcac

SEQ ID NO: 2025333 - RNA, 15 nt, Human herpesvirus 5
ccccgucgcccgagg

SEQ ID NO: 2025334 - RNA, 23 nt, Human herpesvirus 5
acacagaagaaaaaaacacaucg

SEQ ID NO: 2025335 - RNA, 12 nt, Human herpesvirus 5
uuaaaguaaaua

SEQ ID NO: 2025336 - RNA, 13 nt, Human herpesvirus 5
ccgucacugccac

SEQ ID NO: 2025337 - RNA, 20 nt, Human herpesvirus 5
acccgcgucccuggggcugc

SEQ ID NO: 2025338 - RNA, 22 nt, Human herpesvirus 5
ggcccaugagguagaagggcug

SEQ ID NO: 2025339 - RNA, 17 nt, Human herpesvirus 5
agcuauauagccggugu

SEQ ID NO: 2025340 - RNA, 18 nt, Human herpesvirus 5
ggcgcuguacauucugcu

SEQ ID NO: 2025341 - RNA, 16 nt, Human herpesvirus 5
gcuauaagacagccuu

SEQ ID NO: 2025342 - RNA, 14 nt, Human herpesvirus 5
gaugugcagggaca

SEQ ID NO: 2025343 - RNA, 23 nt, Human herpesvirus 5
gugaccacgucaccgugccccac

SEQ ID NO: 2025344 - RNA, 22 nt, Human herpesvirus 5
gacgccaucauggaagagggcg

SEQ ID NO: 2025345 - RNA, 23 nt, Human herpesvirus 5
uguucgagaaugccucuacuugg

SEQ ID NO: 2025346 - RNA, 14 nt, Human herpesvirus 5
cgguuugaccacac

SEQ ID NO: 2025347 - RNA, 18 nt, Human herpesvirus 5
ccagagacagagaccgcc

SEQ ID NO: 2025348 - RNA, 21 nt, Human herpesvirus 5
acaacaccguguaaggaaaac

SEQ ID NO: 2025349 - RNA, 15 nt, Human herpesvirus 5
uggcccucgcagugc

SEQ ID NO: 2025350 - RNA, 17 nt, Human herpesvirus 5
uggccucgauccauccu

SEQ ID NO: 2025351 - RNA, 13 nt, Human herpesvirus 5
gagcaggcucgcg

SEQ ID NO: 2025352 - RNA, 21 nt, Human herpesvirus 5
cauugcccuucuggagcacac

SEQ ID NO: 2025353 - RNA, 23 nt, Human herpesvirus 5
aggucguagugcggcgugcugca

SEQ ID NO: 2025354 - RNA, 14 nt, Human herpesvirus 5
auggcgacggacgu

SEQ ID NO: 2025355 - RNA, 20 nt, Human herpesvirus 5
ugacgucccuuuuacuagua

SEQ ID NO: 2025356 - RNA, 18 nt, Human herpesvirus 5
caagacgcgccucucgga

SEQ ID NO: 2025357 - RNA, 13 nt, Human herpesvirus 5
gcgcaggccgccg

SEQ ID NO: 2025358 - RNA, 13 nt, Human herpesvirus 5
cacggcugcugau

SEQ ID NO: 2025359 - RNA, 19 nt, Human herpesvirus 5
uguguccgcccgagcaggu

SEQ ID NO: 2025360 - RNA, 14 nt, Human herpesvirus 5
cccuauccuccauc

SEQ ID NO: 2025361 - RNA, 20 nt, Human herpesvirus 5
ccgaaggcuacacgcuuuuc

SEQ ID NO: 2025362 - RNA, 17 nt, Human herpesvirus 5
gugcgggugccgggaca

SEQ ID NO: 2025363 - RNA, 15 nt, Human herpesvirus 5
cccagggucaguugc

SEQ ID NO: 2025364 - RNA, 23 nt, Human herpesvirus 5
auacuuguuucauuuucuuucua

SEQ ID NO: 2025365 - RNA, 16 nt, Human herpesvirus 5
gguguggcggcagcgg

SEQ ID NO: 2025366 - RNA, 15 nt, Human herpesvirus 5
uagcgaucgcaugcu

SEQ ID NO: 2025367 - RNA, 13 nt, Human herpesvirus 5
gcuuaucugccuc

SEQ ID NO: 2025368 - RNA, 17 nt, Human herpesvirus 5
aggaauuggcaggaaag

SEQ ID NO: 2025369 - RNA, 20 nt, Human herpesvirus 5
gucgcaagggcugcucggcg

SEQ ID NO: 2025370 - RNA, 14 nt, Human herpesvirus 5
gucgccuuccagcu

SEQ ID NO: 2025371 - RNA, 16 nt, Human herpesvirus 5
aggcggcucgcuggaa

SEQ ID NO: 2025372 - RNA, 15 nt, Human herpesvirus 5
ucgcgccuccuccug

SEQ ID NO: 2025373 - RNA, 13 nt, Human herpesvirus 5
ccucagucugccu

SEQ ID NO: 2025374 - RNA, 15 nt, Human herpesvirus 5
uacagggugccgcca

SEQ ID NO: 2025375 - RNA, 20 nt, Human herpesvirus 5
cuagacaggguaacagccuu

SEQ ID NO: 2025376 - RNA, 22 nt, Human herpesvirus 5
ucguuaccacaacggccgccga

SEQ ID NO: 2025377 - RNA, 20 nt, Human herpesvirus 5
gagcacgggcugcuggucuc

SEQ ID NO: 2025378 - RNA, 17 nt, Human herpesvirus 5
cagcagcuggugcauca

SEQ ID NO: 2025379 - RNA, 21 nt, Human herpesvirus 5
ggccgccgcucaagccgcggu

SEQ ID NO: 2025380 - RNA, 23 nt, Human herpesvirus 5
cuaccaauaaagauaaucugcca

SEQ ID NO: 2025381 - RNA, 15 nt, Human herpesvirus 5
cgaaggcuacucuau

SEQ ID NO: 2025382 - RNA, 14 nt, Human herpesvirus 5
cgcggcgguggccg

SEQ ID NO: 2025383 - RNA, 14 nt, Human herpesvirus 5
gcgcggcggcagcu

SEQ ID NO: 2025384 - RNA, 17 nt, Human herpesvirus 5
ggccugguauacgaggc

SEQ ID NO: 2025385 - RNA, 17 nt, Human herpesvirus 5
accacgucgaccaggug

SEQ ID NO: 2025386 - RNA, 17 nt, Human herpesvirus 5
cugguauaaccagucau

SEQ ID NO: 2025387 - RNA, 22 nt, Human herpesvirus 5
aagaccauuaacaauuccacgc

SEQ ID NO: 2025388 - RNA, 12 nt, Human herpesvirus 5
cgucaaaacaca

SEQ ID NO: 2025389 - RNA, 15 nt, Human herpesvirus 5
cuaccuagagaggcu

SEQ ID NO: 2025390 - RNA, 13 nt, Human herpesvirus 5
ccgaagaccucac

SEQ ID NO: 2025391 - RNA, 12 nt, Human herpesvirus 5
agccggcagcug

SEQ ID NO: 2025392 - RNA, 20 nt, Human herpesvirus 5
gccuuccccgaugugcaggg

SEQ ID NO: 2025393 - RNA, 15 nt, Human herpesvirus 5
agaacaagcgguggu

SEQ ID NO: 2025394 - RNA, 14 nt, Human herpesvirus 5
ggcagcgggccugu

SEQ ID NO: 2025395 - RNA, 18 nt, Human herpesvirus 5
caacaguuaucagcaaua

SEQ ID NO: 2025396 - RNA, 12 nt, Human herpesvirus 5
gccgcggcagca

SEQ ID NO: 2025397 - RNA, 22 nt, Human herpesvirus 5
auacaucuccgucucuggucuc

SEQ ID NO: 2025398 - RNA, 19 nt, Human herpesvirus 5
ggcgacaagcuguggcugc

SEQ ID NO: 2025399 - RNA, 18 nt, Human herpesvirus 5
cccgguugcggccccgua

SEQ ID NO: 2025400 - RNA, 16 nt, Human herpesvirus 5
cagcaucgcgugcgcc

SEQ ID NO: 2025401 - RNA, 14 nt, Human herpesvirus 5
ccaguacagcgccg

SEQ ID NO: 2025402 - RNA, 18 nt, Human herpesvirus 5
cacggccagcuccacgcu

SEQ ID NO: 2025403 - RNA, 14 nt, Human herpesvirus 5
cgcuggcgggccga

SEQ ID NO: 2025404 - RNA, 14 nt, Human herpesvirus 5
ggcgcgcaucgccg

SEQ ID NO: 2025405 - RNA, 16 nt, Human herpesvirus 5
ucaguccauugucagu

SEQ ID NO: 2025406 - RNA, 19 nt, Human herpesvirus 5
auacccagcuggggaagua

SEQ ID NO: 2025407 - RNA, 22 nt, Human herpesvirus 5
acgcggguccauuggagccgcc

SEQ ID NO: 2025408 - RNA, 12 nt, Human herpesvirus 5
ccaugagccuca

SEQ ID NO: 2025409 - RNA, 15 nt, Human herpesvirus 5
cauggagacaguuuc

SEQ ID NO: 2025410 - RNA, 20 nt, Human herpesvirus 5
cccgcgucccuggggcugcu

SEQ ID NO: 2025411 - RNA, 15 nt, Human herpesvirus 5
cugccgcagcugcug

SEQ ID NO: 2025412 - RNA, 19 nt, Human herpesvirus 5
aacaugaaucuuccccucu

SEQ ID NO: 2025413 - RNA, 12 nt, Human herpesvirus 5
caggcuaaagaa

SEQ ID NO: 2025414 - RNA, 12 nt, Human herpesvirus 5
uaacuguagcac

SEQ ID NO: 2025415 - RNA, 14 nt, Human herpesvirus 5
gcgcucggucagcu

SEQ ID NO: 2025416 - RNA, 14 nt, Human herpesvirus 5
cuaccgugccaccu

SEQ ID NO: 2025417 - RNA, 21 nt, Human herpesvirus 5
cgauggcaaggugcugcaccu

SEQ ID NO: 2025418 - RNA, 21 nt, Human herpesvirus 5
cuucggaaucgggcccgccgg

SEQ ID NO: 2025419 - RNA, 15 nt, Human herpesvirus 5
ccucgcccaggcugu

SEQ ID NO: 2025420 - RNA, 15 nt, Human herpesvirus 5
uucgcgccccucugc

SEQ ID NO: 2025421 - RNA, 18 nt, Human herpesvirus 5
gccaacuccgugcuguug

SEQ ID NO: 2025422 - RNA, 22 nt, Human herpesvirus 5
ucagccucuguguucccaacac

SEQ ID NO: 2025423 - RNA, 20 nt, Human herpesvirus 5
cucguuucgccggcgcgcca

SEQ ID NO: 2025424 - RNA, 13 nt, Human herpesvirus 5
gcguaccaacaua

SEQ ID NO: 2025425 - RNA, 19 nt, Human herpesvirus 5
ggcugagacaggacgaggc

SEQ ID NO: 2025426 - RNA, 20 nt, Human herpesvirus 5
ccgugcccguuuucacagca

SEQ ID NO: 2025427 - RNA, 17 nt, Human herpesvirus 5
ccguccugcagaccgag

SEQ ID NO: 2025428 - RNA, 20 nt, Human herpesvirus 5
ggcggcagccacggaggaga

SEQ ID NO: 2025429 - RNA, 14 nt, Human herpesvirus 5
ccgccccagcagac

SEQ ID NO: 2025430 - RNA, 23 nt, Human herpesvirus 5
caccguugucggaggaacccugc

SEQ ID NO: 2025431 - RNA, 13 nt, Human herpesvirus 5
gcaagggcugcuc

SEQ ID NO: 2025432 - RNA, 15 nt, Human herpesvirus 5
gaaauccggcggcgc

SEQ ID NO: 2025433 - RNA, 13 nt, Human herpesvirus 5
cgcagccaccggc

SEQ ID NO: 2025434 - RNA, 17 nt, Human herpesvirus 5
ccggcagcacaccugcc

SEQ ID NO: 2025435 - RNA, 14 nt, Human herpesvirus 5
ggcucacgccggca

SEQ ID NO: 2025436 - RNA, 15 nt, Human herpesvirus 5
cugcggcgacuggcg

SEQ ID NO: 2025437 - RNA, 19 nt, Human herpesvirus 5
cucgagcuuauugagcgca

SEQ ID NO: 2025438 - RNA, 18 nt, Human herpesvirus 5
uaagcgcgaccggcagca

SEQ ID NO: 2025439 - RNA, 13 nt, Human herpesvirus 5
cugccuguuccug

SEQ ID NO: 2025440 - RNA, 14 nt, Human herpesvirus 5
cauauuuguuuuca

SEQ ID NO: 2025441 - RNA, 12 nt, Human herpesvirus 5
ggcugaucugca

SEQ ID NO: 2025442 - RNA, 16 nt, Human herpesvirus 5
ggggcugcgucgccug

SEQ ID NO: 2025443 - RNA, 20 nt, Human herpesvirus 5
aucacgggacccgccgccgc

SEQ ID NO: 2025444 - RNA, 23 nt, Human herpesvirus 5
ggccgacggugguuuccgcgccc

SEQ ID NO: 2025445 - RNA, 12 nt, Human herpesvirus 5
cacaugcugcuu

SEQ ID NO: 2025446 - RNA, 19 nt, Human herpesvirus 5
agaauacuggaagcugcug

SEQ ID NO: 2025447 - RNA, 14 nt, Human herpesvirus 5
cgugaaacagcagc

SEQ ID NO: 2025448 - RNA, 22 nt, Human herpesvirus 5
cugaagccgccgucgagccacu

SEQ ID NO: 2025449 - RNA, 19 nt, Human herpesvirus 5
aaauuagugucgauacuuu

SEQ ID NO: 2025450 - RNA, 21 nt, Human herpesvirus 5
ugaacgagucgcucaucguca

SEQ ID NO: 2025451 - RNA, 22 nt, Human herpesvirus 5
ggcucguguggcagcuggcuug

SEQ ID NO: 2025452 - RNA, 23 nt, Human herpesvirus 5
gcugcaccucaacaagggcuggc

SEQ ID NO: 2025453 - RNA, 18 nt, Human herpesvirus 5
uaaagauaaucugccaau

SEQ ID NO: 2025454 - RNA, 14 nt, Human herpesvirus 5
ucccucgcgccgcc

SEQ ID NO: 2025455 - RNA, 14 nt, Human herpesvirus 5
acggaaaagcagug

SEQ ID NO: 2025456 - RNA, 22 nt, Human herpesvirus 5
aaucuguguguucugugauaac

SEQ ID NO: 2025457 - RNA, 18 nt, Human herpesvirus 5
gcauacaaugugcugcau

SEQ ID NO: 2025458 - RNA, 17 nt, Human herpesvirus 5
ggcucguguggcagcug

SEQ ID NO: 2025459 - RNA, 21 nt, Human herpesvirus 5
ucggcugccuguuccugcugc

SEQ ID NO: 2025460 - RNA, 19 nt, Human herpesvirus 5
cacuuuccacggcgccggu

SEQ ID NO: 2025461 - RNA, 22 nt, Human herpesvirus 5
cuggggcccuucgugggcaaga

SEQ ID NO: 2025462 - RNA, 17 nt, Human herpesvirus 5
aggacaaaaaguacacu

SEQ ID NO: 2025463 - RNA, 17 nt, Human herpesvirus 5
caucuuucagcuggcuu

SEQ ID NO: 2025464 - RNA, 16 nt, Human herpesvirus 5
ucauguucucccagga

SEQ ID NO: 2025465 - RNA, 15 nt, Human herpesvirus 5
uaugccgucuucacu

SEQ ID NO: 2025466 - RNA, 23 nt, Human herpesvirus 5
acacgcgcuacgaaacuuuucug

SEQ ID NO: 2025467 - RNA, 13 nt, Human herpesvirus 5
ugcagcugcgccu

SEQ ID NO: 2025468 - RNA, 18 nt, Human herpesvirus 5
cgacguaccagcugucca

SEQ ID NO: 2025469 - RNA, 16 nt, Human herpesvirus 5
ucuaccccgccgccgu

SEQ ID NO: 2025470 - RNA, 11 nt, Human herpesvirus 5
cgcuuucacac

SEQ ID NO: 2025471 - RNA, 17 nt, Human herpesvirus 5
aguaaccuggagcagcg

SEQ ID NO: 2025472 - RNA, 18 nt, Human herpesvirus 5
gaccgcagguuagcggcg

SEQ ID NO: 2025473 - RNA, 16 nt, Human herpesvirus 5
gcccgucgcgcacggc

SEQ ID NO: 2025474 - RNA, 15 nt, Human herpesvirus 5
gauuccagaacuuug

SEQ ID NO: 2025475 - RNA, 23 nt, Human herpesvirus 5
uugaaacgcgagaugaacuguuc

SEQ ID NO: 2025476 - RNA, 19 nt, Human herpesvirus 5
cuacgcuccuacgacaaca

SEQ ID NO: 2025477 - RNA, 14 nt, Human herpesvirus 5
ucgacgauaugucg

SEQ ID NO: 2025478 - RNA, 17 nt, Human herpesvirus 5
aaaauacuggacuuuug

SEQ ID NO: 2025479 - RNA, 17 nt, Human herpesvirus 5
auaaacgucacggaagu

SEQ ID NO: 2025480 - RNA, 14 nt, Human herpesvirus 5
auauaagaaaagac

SEQ ID NO: 2025481 - RNA, 17 nt, Human herpesvirus 5
acccugggcuauaugca

SEQ ID NO: 2025482 - RNA, 24 nt, Human herpesvirus 5
auacgacgauguuuuuugaaucau

SEQ ID NO: 2025483 - RNA, 16 nt, Human herpesvirus 5
cuucagaaucuauaaa

SEQ ID NO: 2025484 - RNA, 12 nt, Human herpesvirus 5
ccaggugaccag

SEQ ID NO: 2025485 - RNA, 18 nt, Human herpesvirus 5
cgccaccauagccacuac

SEQ ID NO: 2025486 - RNA, 19 nt, Human herpesvirus 5
agcuacgcgaccagcugcu

SEQ ID NO: 2025487 - RNA, 14 nt, Human herpesvirus 5
gagacgagcucuug

SEQ ID NO: 2025488 - RNA, 12 nt, Human herpesvirus 5
ggcgucggagag

SEQ ID NO: 2025489 - RNA, 18 nt, Human herpesvirus 5
gacugcggcgacuggcga

SEQ ID NO: 2025490 - RNA, 12 nt, Human herpesvirus 5
acuagcacagag

SEQ ID NO: 2025491 - RNA, 16 nt, Human herpesvirus 5
guugagagugguggga

SEQ ID NO: 2025492 - RNA, 20 nt, Human herpesvirus 5
gcgucuuuauuuacgaggua

SEQ ID NO: 2025493 - RNA, 15 nt, Human herpesvirus 5
ggaagaagaagaaca

SEQ ID NO: 2025494 - RNA, 16 nt, Human herpesvirus 5
ggcucuccuccucucc

SEQ ID NO: 2025495 - RNA, 17 nt, Human herpesvirus 5
ugcaccucgaccuccga

SEQ ID NO: 2025496 - RNA, 13 nt, Human herpesvirus 5
ccucugccugggc

SEQ ID NO: 2025497 - RNA, 16 nt, Human herpesvirus 5
gcgguuauggcuccgc

SEQ ID NO: 2025498 - RNA, 22 nt, Human herpesvirus 5
cuggggucaaaagccuggguac

SEQ ID NO: 2025499 - RNA, 18 nt, Human herpesvirus 5
aagucuacgaucgcugga

SEQ ID NO: 2025500 - RNA, 19 nt, Human herpesvirus 5
cagcgugcaccugcugccg

SEQ ID NO: 2025501 - RNA, 15 nt, Human herpesvirus 5
ggucagcuugaggcu

SEQ ID NO: 2025502 - RNA, 15 nt, Human herpesvirus 5
gggaugaugauaagu

SEQ ID NO: 2025503 - RNA, 23 nt, Human herpesvirus 5
gugcgacugcggcgacuggcgag

SEQ ID NO: 2025504 - RNA, 17 nt, Human herpesvirus 5
ucaccgcaguugcugcc

SEQ ID NO: 2025505 - RNA, 17 nt, Human herpesvirus 5
acgcgucgaugccuguu

SEQ ID NO: 2025506 - RNA, 15 nt, Human herpesvirus 5
guuuaugagaaaagg

SEQ ID NO: 2025507 - RNA, 23 nt, Human herpesvirus 5
uuccccugggaauucaugcugua

SEQ ID NO: 2025508 - RNA, 21 nt, Human herpesvirus 5
ugcacaucaauaaacuuuuuu

SEQ ID NO: 2025509 - RNA, 23 nt, Human herpesvirus 5
agcggcagccaccgcgaggccac

SEQ ID NO: 2025510 - RNA, 20 nt, Human herpesvirus 5
agguauuccgaaaccuguau

SEQ ID NO: 2025511 - RNA, 15 nt, Human herpesvirus 5
ggugcaucaucuggu

SEQ ID NO: 2025512 - RNA, 21 nt, Human herpesvirus 5
uccguccucgucgccuuccag

SEQ ID NO: 2025513 - RNA, 16 nt, Human herpesvirus 5
cucuguggacccugcg

SEQ ID NO: 2025514 - RNA, 22 nt, Human herpesvirus 5
ggcucuugcgcuucugcagcuc

SEQ ID NO: 2025515 - RNA, 22 nt, Human herpesvirus 5
cccaccgccgcuuucucaucuc

SEQ ID NO: 2025516 - RNA, 21 nt, Human herpesvirus 5
acccgggcaacgcguggcccu

SEQ ID NO: 2025517 - RNA, 16 nt, Human herpesvirus 5
ggcgugcaucugccga

SEQ ID NO: 2025518 - RNA, 13 nt, Human herpesvirus 5
ccagagacagaga

SEQ ID NO: 2025519 - RNA, 20 nt, Human herpesvirus 5
gcgacacacguucgacaugg

SEQ ID NO: 2025520 - RNA, 18 nt, Human herpesvirus 5
ccacgguuuaccacaggc

SEQ ID NO: 2025521 - RNA, 21 nt, Human herpesvirus 5
gucucgcgucuucgcgagguc

SEQ ID NO: 2025522 - RNA, 18 nt, Human herpesvirus 5
caaagaaaaaaaaaagga

SEQ ID NO: 2025523 - RNA, 14 nt, Human herpesvirus 5
accuggaucugccc

SEQ ID NO: 2025524 - RNA, 22 nt, Human herpesvirus 5
aaaccgucgaaaacaaccacac

SEQ ID NO: 2025525 - RNA, 19 nt, Human herpesvirus 5
acacgccuugcaccugggu

SEQ ID NO: 2025526 - RNA, 16 nt, Human herpesvirus 5
cacucgcaccggcagc

SEQ ID NO: 2025527 - RNA, 15 nt, Human herpesvirus 5
cgacguaccagcugu

SEQ ID NO: 2025528 - RNA, 13 nt, Human herpesvirus 5
cgcugcccgacca

SEQ ID NO: 2025529 - RNA, 17 nt, Human herpesvirus 5
ggccagcgccugguacu

SEQ ID NO: 2025530 - RNA, 23 nt, Human herpesvirus 5
ugccuuuuuaauaaagucugggu

SEQ ID NO: 2025531 - RNA, 14 nt, Human herpesvirus 5
acugggacgaggag

SEQ ID NO: 2025532 - RNA, 20 nt, Human herpesvirus 5
aaccagauacaacgucaugc

SEQ ID NO: 2025533 - RNA, 17 nt, Human herpesvirus 5
cgccugguugcugccgc

SEQ ID NO: 2025534 - RNA, 14 nt, Human herpesvirus 5
ucaccaccaucagc

SEQ ID NO: 2025535 - RNA, 17 nt, Human herpesvirus 5
ggagcugcugcucggcg

SEQ ID NO: 2025536 - RNA, 21 nt, Human herpesvirus 5
cucgcugccgcagcugcugga

SEQ ID NO: 2025537 - RNA, 21 nt, Human herpesvirus 5
gacccgcagucuggcuugggu

SEQ ID NO: 2025538 - RNA, 23 nt, Human herpesvirus 5
caugaaucuuccccucugcugcu

SEQ ID NO: 2025539 - RNA, 16 nt, Human herpesvirus 5
ccacguagguuucugu

SEQ ID NO: 2025540 - RNA, 14 nt, Human herpesvirus 5
cacaaccuguggug

SEQ ID NO: 2025541 - RNA, 20 nt, Human herpesvirus 5
cagcacauuagacacacggg

SEQ ID NO: 2025542 - RNA, 18 nt, Human herpesvirus 5
gcacgggcucgggugacg

SEQ ID NO: 2025543 - RNA, 22 nt, Human herpesvirus 5
gccgucucgucacacggcaaca

SEQ ID NO: 2025544 - RNA, 16 nt, Human herpesvirus 5
cuggccgauccacggg

SEQ ID NO: 2025545 - RNA, 21 nt, Human herpesvirus 5
uguggcccgaagauguacaca

SEQ ID NO: 2025546 - RNA, 10 nt, Human herpesvirus 5
uaauguacca

SEQ ID NO: 2025547 - RNA, 16 nt, Human herpesvirus 5
cauccugcccaccgcc

SEQ ID NO: 2025548 - RNA, 14 nt, Human herpesvirus 5
cgguggugacuggg

SEQ ID NO: 2025549 - RNA, 18 nt, Human herpesvirus 5
caaguacagcggcucgcc

SEQ ID NO: 2025550 - RNA, 14 nt, Human herpesvirus 5
caccacucccacca

SEQ ID NO: 2025551 - RNA, 13 nt, Human herpesvirus 5
agccaucacagcg

SEQ ID NO: 2025552 - RNA, 16 nt, Human herpesvirus 5
cuguucuuccaccagc

SEQ ID NO: 2025553 - RNA, 15 nt, Human herpesvirus 5
ucaaucacccacaga

SEQ ID NO: 2025554 - RNA, 20 nt, Human herpesvirus 5
cgccgugcucuuggcgccgc

SEQ ID NO: 2025555 - RNA, 14 nt, Human herpesvirus 5
cggcaagagccgga

SEQ ID NO: 2025556 - RNA, 15 nt, Human herpesvirus 5
aucgcagccuccucg

SEQ ID NO: 2025557 - RNA, 18 nt, Human herpesvirus 5
cggguccauuggagccgc

SEQ ID NO: 2025558 - RNA, 23 nt, Human herpesvirus 5
cacgcggaugagcgugcugcucu

SEQ ID NO: 2025559 - RNA, 15 nt, Human herpesvirus 5
cgucugacgcugucu

SEQ ID NO: 2025560 - RNA, 13 nt, Human herpesvirus 5
ggccgcgcaggcc

SEQ ID NO: 2025561 - RNA, 18 nt, Human herpesvirus 5
gaccacaagcucagcauc

SEQ ID NO: 2025562 - RNA, 17 nt, Human herpesvirus 5
cguccagcuucugguag

SEQ ID NO: 2025563 - RNA, 13 nt, Human herpesvirus 5
gggaacacaucgc

SEQ ID NO: 2025564 - RNA, 15 nt, Human herpesvirus 5
ugggcgguggcggcc

SEQ ID NO: 2025565 - RNA, 21 nt, Human herpesvirus 5
ucuuggguagcuucucucugg

SEQ ID NO: 2025566 - RNA, 17 nt, Human herpesvirus 5
caauuuuuucgcugcca

SEQ ID NO: 2025567 - RNA, 15 nt, Human herpesvirus 5
ucgcauccugcauca

SEQ ID NO: 2025568 - RNA, 15 nt, Human herpesvirus 5
uucucccgacgucac

SEQ ID NO: 2025569 - RNA, 20 nt, Human herpesvirus 5
ucaccaccuugucuccccgg

SEQ ID NO: 2025570 - RNA, 11 nt, Human herpesvirus 5
gcccgagcagg

SEQ ID NO: 2025571 - RNA, 18 nt, Human herpesvirus 5
auacuggaagcugcuggu

SEQ ID NO: 2025572 - RNA, 22 nt, Human herpesvirus 5
ucacgggcucguguggcagcug

SEQ ID NO: 2025573 - RNA, 13 nt, Human herpesvirus 5
ccgauucagaucu

SEQ ID NO: 2025574 - RNA, 16 nt, Human herpesvirus 5
cacggccagcuccacg

SEQ ID NO: 2025575 - RNA, 19 nt, Human herpesvirus 5
acaaauagcagugacuggg

SEQ ID NO: 2025576 - RNA, 18 nt, Human herpesvirus 5
ucaccaaggcgagccacu

SEQ ID NO: 2025577 - RNA, 12 nt, Human herpesvirus 5
uacaucauacaa

SEQ ID NO: 2025578 - RNA, 20 nt, Human herpesvirus 5
gaguaccgcauuacugggac

SEQ ID NO: 2025579 - RNA, 18 nt, Human herpesvirus 5
gcaccugucgucgacaug

SEQ ID NO: 2025580 - RNA, 21 nt, Human herpesvirus 5
aagcuucggccggcugcugca

SEQ ID NO: 2025581 - RNA, 20 nt, Human herpesvirus 5
cuuuaacccaaaaccaugcu

SEQ ID NO: 2025582 - RNA, 18 nt, Human herpesvirus 5
ggggcccguuuugcauaa

SEQ ID NO: 2025583 - RNA, 20 nt, Human herpesvirus 5
ggaaaaagguugggagaugc

SEQ ID NO: 2025584 - RNA, 19 nt, Human herpesvirus 5
gaugaacuguuccacggcc

SEQ ID NO: 2025585 - RNA, 22 nt, Human herpesvirus 5
cccccgggauccaagagacccg

SEQ ID NO: 2025586 - RNA, 14 nt, Human herpesvirus 5
gugcuuuucaucua

SEQ ID NO: 2025587 - RNA, 12 nt, Human herpesvirus 5
ccacggccagcg

SEQ ID NO: 2025588 - RNA, 20 nt, Human herpesvirus 5
ggacggugaugaugcugcug

SEQ ID NO: 2025589 - RNA, 20 nt, Human herpesvirus 5
cguggcguaggaguggcgcc

SEQ ID NO: 2025590 - RNA, 16 nt, Human herpesvirus 5
aggguagaaacgugag

SEQ ID NO: 2025591 - RNA, 16 nt, Human herpesvirus 5
caucuguuuuugcugc

SEQ ID NO: 2025592 - RNA, 16 nt, Human herpesvirus 5
ccacgcucgagggcuc

SEQ ID NO: 2025593 - RNA, 16 nt, Human herpesvirus 5
gcugcaugagaacacg

SEQ ID NO: 2025594 - RNA, 15 nt, Human herpesvirus 5
guuaaaaaaaccacg

SEQ ID NO: 2025595 - RNA, 14 nt, Human herpesvirus 5
gccucucauguucu

SEQ ID NO: 2025596 - RNA, 23 nt, Human herpesvirus 5
ggaucuacucaucggcauguucg

SEQ ID NO: 2025597 - RNA, 19 nt, Human herpesvirus 5
cccgaggcacgucggggcu

SEQ ID NO: 2025598 - RNA, 14 nt, Human herpesvirus 5
ccuccugcagcugc

SEQ ID NO: 2025599 - RNA, 16 nt, Human herpesvirus 5
ggagcguaccagggaa

SEQ ID NO: 2025600 - RNA, 19 nt, Human herpesvirus 5
caccacuuugaccacccug

SEQ ID NO: 2025601 - RNA, 14 nt, Human herpesvirus 5
acuauuguauacuc

SEQ ID NO: 2025602 - RNA, 15 nt, Human herpesvirus 5
gcugggucagugcca

SEQ ID NO: 2025603 - RNA, 13 nt, Human herpesvirus 5
gggccaacgguac

SEQ ID NO: 2025604 - RNA, 13 nt, Human herpesvirus 5
acaucauacugac

SEQ ID NO: 2025605 - RNA, 14 nt, Human herpesvirus 5
cgcaaaucuacaac

SEQ ID NO: 2025606 - RNA, 23 nt, Human herpesvirus 5
caccccuuuuggugugugucuau

SEQ ID NO: 2025607 - RNA, 16 nt, Human herpesvirus 5
ccgucgccggccgacg

SEQ ID NO: 2025608 - RNA, 19 nt, Human herpesvirus 5
cccugcugacgcuguugag

SEQ ID NO: 2025609 - RNA, 23 nt, Human herpesvirus 5
acaucaacaguuuacgaguacaa

SEQ ID NO: 2025610 - RNA, 22 nt, Human herpesvirus 5
cuggguuaccccucgcugggcu

SEQ ID NO: 2025611 - RNA, 13 nt, Human herpesvirus 5
gccgccuccgcgg

SEQ ID NO: 2025612 - RNA, 22 nt, Human herpesvirus 5
uacagcaccccccucacgcuug

SEQ ID NO: 2025613 - RNA, 18 nt, Human herpesvirus 5
acgcgcccgacagcugca

SEQ ID NO: 2025614 - RNA, 16 nt, Human herpesvirus 5
ucgcacaaagaagucu

SEQ ID NO: 2025615 - RNA, 21 nt, Human herpesvirus 5
aggccaccgggacggccuggg

SEQ ID NO: 2025616 - RNA, 19 nt, Human herpesvirus 5
gcacgcgauuggccagcac

SEQ ID NO: 2025617 - RNA, 18 nt, Human herpesvirus 5
gccagcguccgcgccugc

SEQ ID NO: 2025618 - RNA, 15 nt, Human herpesvirus 5
uagugcgcgccgccg

SEQ ID NO: 2025619 - RNA, 22 nt, Human herpesvirus 5
ccaaggaaccaccguagcacug

SEQ ID NO: 2025620 - RNA, 12 nt, Human herpesvirus 5
ggccgccucuuc

SEQ ID NO: 2025621 - RNA, 20 nt, Human herpesvirus 5
gacaacggccgccgcagcca

SEQ ID NO: 2025622 - RNA, 15 nt, Human herpesvirus 5
cauguucggcuccgu

SEQ ID NO: 2025623 - RNA, 15 nt, Human herpesvirus 5
gacuggucuggcccg

SEQ ID NO: 2025624 - RNA, 15 nt, Human herpesvirus 5
gucccuggccccggc

SEQ ID NO: 2025625 - RNA, 13 nt, Human herpesvirus 5
gccagcugccacc

SEQ ID NO: 2025626 - RNA, 23 nt, Human herpesvirus 5
aaugccaugcggauccagcugcu

SEQ ID NO: 2025627 - RNA, 16 nt, Human herpesvirus 5
gugcagggacagugcg

SEQ ID NO: 2025628 - RNA, 14 nt, Human herpesvirus 5
cucauaauaaagcu

SEQ ID NO: 2025629 - RNA, 13 nt, Human herpesvirus 5
aaucaagccuguu

SEQ ID NO: 2025630 - RNA, 17 nt, Human herpesvirus 5
cgcaucacccgccucau

SEQ ID NO: 2025631 - RNA, 16 nt, Human herpesvirus 5
gaaacacgguuucuuc

SEQ ID NO: 2025632 - RNA, 21 nt, Human herpesvirus 5
gaucgugggugguagaacuga

SEQ ID NO: 2025633 - RNA, 13 nt, Human herpesvirus 5
guccagccagcau

SEQ ID NO: 2025634 - RNA, 18 nt, Human herpesvirus 5
cagcgccagcggccuggc

SEQ ID NO: 2025635 - RNA, 17 nt, Human herpesvirus 5
cacggcaucaugcuggg

SEQ ID NO: 2025636 - RNA, 15 nt, Human herpesvirus 5
ugccaccgacaugga

SEQ ID NO: 2025637 - RNA, 23 nt, Human herpesvirus 5
acaagacggcuauccagcagcug

SEQ ID NO: 2025638 - RNA, 16 nt, Human herpesvirus 5
uguuccuauugggaag

SEQ ID NO: 2025639 - RNA, 14 nt, Human herpesvirus 5
gcgagcgcucggcg

SEQ ID NO: 2025640 - RNA, 18 nt, Human herpesvirus 5
aacagcagcaacagcagc

SEQ ID NO: 2025641 - RNA, 23 nt, Human herpesvirus 5
cccgccggagcccggucugagcu

SEQ ID NO: 2025642 - RNA, 22 nt, Human herpesvirus 5
cgcgcaggccgccgccgcucag

SEQ ID NO: 2025643 - RNA, 14 nt, Human herpesvirus 5
gacugcagcccacc

SEQ ID NO: 2025644 - RNA, 18 nt, Human herpesvirus 5
ggacugacacagcuccug

SEQ ID NO: 2025645 - RNA, 13 nt, Human herpesvirus 5
ucaucaacagcag

SEQ ID NO: 2025646 - RNA, 16 nt, Human herpesvirus 5
gacccagcgacagauc

SEQ ID NO: 2025647 - RNA, 22 nt, Human herpesvirus 5
gugaucggccgcggugcgcugc

SEQ ID NO: 2025648 - RNA, 14 nt, Human herpesvirus 5
gcugcaccaggagg

SEQ ID NO: 2025649 - RNA, 16 nt, Human herpesvirus 5
uucuuccucucaguca

SEQ ID NO: 2025650 - RNA, 22 nt, Human herpesvirus 5
caucaggaucuggugcaggcca

SEQ ID NO: 2025651 - RNA, 19 nt, Human herpesvirus 5
caucgugguagcgccgcga

SEQ ID NO: 2025652 - RNA, 18 nt, Human herpesvirus 5
gguggaaaucccucaccc

SEQ ID NO: 2025653 - RNA, 22 nt, Human herpesvirus 5
uacgaccuguuuaccucaugcg

SEQ ID NO: 2025654 - RNA, 19 nt, Human herpesvirus 5
gacgauuuuaugcgccgcc

SEQ ID NO: 2025655 - RNA, 15 nt, Human herpesvirus 5
uuuuucuacgugucu

SEQ ID NO: 2025656 - RNA, 15 nt, Human herpesvirus 5
aucugccacuuuucu

SEQ ID NO: 2025657 - RNA, 20 nt, Human herpesvirus 5
accugcucaaaguacuuguc

SEQ ID NO: 2025658 - RNA, 21 nt, Human herpesvirus 5
cauaaacuguuccgcccugcu

SEQ ID NO: 2025659 - RNA, 20 nt, Human herpesvirus 5
guuucagcuggcaacgugcc

SEQ ID NO: 2025660 - RNA, 21 nt, Human herpesvirus 5
guuggucacugacgugcagga

SEQ ID NO: 2025661 - RNA, 21 nt, Human herpesvirus 5
gcucagcuugaugguguagga

SEQ ID NO: 2025662 - RNA, 15 nt, Human herpesvirus 5
auucagaaccaugua

SEQ ID NO: 2025663 - RNA, 15 nt, Human herpesvirus 5
cccucgcugggcuac

SEQ ID NO: 2025664 - RNA, 23 nt, Human herpesvirus 5
ucccaugcaacuucuucuacuca

SEQ ID NO: 2025665 - RNA, 14 nt, Human herpesvirus 5
cggccgcagaaggc

SEQ ID NO: 2025666 - RNA, 19 nt, Human herpesvirus 5
cccguggacgacuggcuca

SEQ ID NO: 2025667 - RNA, 14 nt, Human herpesvirus 5
agagagucugaaac

SEQ ID NO: 2025668 - RNA, 19 nt, Human herpesvirus 5
cuggagaacaauaaagcgu

SEQ ID NO: 2025669 - RNA, 12 nt, Human herpesvirus 5
gugcgcgccgcc

SEQ ID NO: 2025670 - RNA, 12 nt, Human herpesvirus 5
aucacccacaga

SEQ ID NO: 2025671 - RNA, 14 nt, Human herpesvirus 5
gacgaugcuuuccu

SEQ ID NO: 2025672 - RNA, 15 nt, Human herpesvirus 5
ccccgaacuggagcu

SEQ ID NO: 2025673 - RNA, 21 nt, Human herpesvirus 5
acgcagcgggaaaccgcgucg

SEQ ID NO: 2025674 - RNA, 22 nt, Human herpesvirus 5
aauugcgaagccagcuacagcc

SEQ ID NO: 2025675 - RNA, 16 nt, Human herpesvirus 5
cuguuacgagaagaaa

SEQ ID NO: 2025676 - RNA, 16 nt, Human herpesvirus 5
cuccaagucuggugcg

SEQ ID NO: 2025677 - RNA, 20 nt, Human herpesvirus 5
uagcaauaaucccuguaauu

SEQ ID NO: 2025678 - RNA, 20 nt, Human herpesvirus 5
ggccgucgcaagggcugcuc

SEQ ID NO: 2025679 - RNA, 16 nt, Human herpesvirus 5
ccgacaaccugcugca

SEQ ID NO: 2025680 - RNA, 16 nt, Human herpesvirus 5
aggccacccacccggu

SEQ ID NO: 2025681 - RNA, 22 nt, Human herpesvirus 5
uacaagacggcuauccagcagc

SEQ ID NO: 2025682 - RNA, 17 nt, Human herpesvirus 5
cccgccgcacgcgcuua

SEQ ID NO: 2025683 - RNA, 15 nt, Human herpesvirus 5
ucagaccgcaacaac

SEQ ID NO: 2025684 - RNA, 16 nt, Human herpesvirus 5
ugaugucggauccggc

SEQ ID NO: 2025685 - RNA, 20 nt, Human herpesvirus 5
ccuuagcuuucuugacuggc

SEQ ID NO: 2025686 - RNA, 21 nt, Human herpesvirus 5
uauggacaauuccccucgccu

SEQ ID NO: 2025687 - RNA, 22 nt, Human herpesvirus 5
ucacgcgcggaacccacaaagg

SEQ ID NO: 2025688 - RNA, 21 nt, Human herpesvirus 5
cagaucgucuacggcuccaca

SEQ ID NO: 2025689 - RNA, 15 nt, Human herpesvirus 5
caggacgaggcaggg

SEQ ID NO: 2025690 - RNA, 20 nt, Human herpesvirus 5
acccggcugcacguggccug

SEQ ID NO: 2025691 - RNA, 20 nt, Human herpesvirus 5
gaucagcgaggccgaagccg

SEQ ID NO: 2025692 - RNA, 13 nt, Human herpesvirus 5
acaacacuacccu

SEQ ID NO: 2025693 - RNA, 11 nt, Human herpesvirus 5
uguauacugug

SEQ ID NO: 2025694 - RNA, 17 nt, Human herpesvirus 5
uguugccgcuggacuga

SEQ ID NO: 2025695 - RNA, 14 nt, Human herpesvirus 5
cguggaaggcaccg

SEQ ID NO: 2025696 - RNA, 19 nt, Human herpesvirus 5
cgccuaccuuagaccgaca

SEQ ID NO: 2025697 - RNA, 19 nt, Human herpesvirus 5
augugugggaccuggucaa

SEQ ID NO: 2025698 - RNA, 16 nt, Human herpesvirus 5
gagcuaucuguguccg

SEQ ID NO: 2025699 - RNA, 22 nt, Human herpesvirus 5
acuucgcuagucaauaaagaaa

SEQ ID NO: 2025700 - RNA, 18 nt, Human herpesvirus 5
ggcgcagucgcgagcuga

SEQ ID NO: 2025701 - RNA, 10 nt, Human herpesvirus 5
acgguuugac

SEQ ID NO: 2025702 - RNA, 21 nt, Human herpesvirus 5
guuucuggaacaagaaacaca

SEQ ID NO: 2025703 - RNA, 23 nt, Human herpesvirus 5
gcugauacuaucgggggagauga

SEQ ID NO: 2025704 - RNA, 19 nt, Human herpesvirus 5
ccgaccgggaaaccacgcc

SEQ ID NO: 2025705 - RNA, 20 nt, Human herpesvirus 5
cuguuugaauaccguaaaca

SEQ ID NO: 2025706 - RNA, 24 nt, Human herpesvirus 5
cccggucggucuuccugcugcgca

SEQ ID NO: 2025707 - RNA, 20 nt, Human herpesvirus 5
caccgagacgugcgaccugg

SEQ ID NO: 2025708 - RNA, 14 nt, Human herpesvirus 5
uggacaacuuuucc

SEQ ID NO: 2025709 - RNA, 15 nt, Human herpesvirus 5
cacgccgcgcgaacg

SEQ ID NO: 2025710 - RNA, 12 nt, Human herpesvirus 5
ggccgacgaggc

SEQ ID NO: 2025711 - RNA, 15 nt, Human herpesvirus 5
aggcacgucggggcu

SEQ ID NO: 2025712 - RNA, 18 nt, Human herpesvirus 5
ccgcgguucuauccccga

SEQ ID NO: 2025713 - RNA, 19 nt, Human herpesvirus 5
ccaugagguagaagggcug

SEQ ID NO: 2025714 - RNA, 20 nt, Human herpesvirus 5
accacccgacugcagcccac

SEQ ID NO: 2025715 - RNA, 18 nt, Human herpesvirus 5
gacggcagcgucacagag

SEQ ID NO: 2025716 - RNA, 12 nt, Human herpesvirus 5
ucgccgccggga

SEQ ID NO: 2025717 - RNA, 18 nt, Human herpesvirus 5
ggucacugacgugcagga

SEQ ID NO: 2025718 - RNA, 14 nt, Human herpesvirus 5
guauauucaaucau

SEQ ID NO: 2025719 - RNA, 18 nt, Human herpesvirus 5
ccacgucuucaaaguagc

SEQ ID NO: 2025720 - RNA, 17 nt, Human herpesvirus 5
gacccacggucugcgug

SEQ ID NO: 2025721 - RNA, 12 nt, Human herpesvirus 5
aacccagcagcc

SEQ ID NO: 2025722 - RNA, 12 nt, Human herpesvirus 5
ggcggccucuuu

SEQ ID NO: 2025723 - RNA, 14 nt, Human herpesvirus 5
cacagcagcaccag

SEQ ID NO: 2025724 - RNA, 12 nt, Human herpesvirus 5
gcgcacgccaaa

SEQ ID NO: 2025725 - RNA, 13 nt, Human herpesvirus 5
ucacuaucuucaa

SEQ ID NO: 2025726 - RNA, 24 nt, Human herpesvirus 5
gccaccacccgacugcagcccacc

SEQ ID NO: 2025727 - RNA, 19 nt, Human herpesvirus 5
gugaucgugggccaggacc

SEQ ID NO: 2025728 - RNA, 14 nt, Human herpesvirus 5
cgaggacgcgcuuc

SEQ ID NO: 2025729 - RNA, 15 nt, Human herpesvirus 5
ggccauggagcugca

SEQ ID NO: 2025730 - RNA, 14 nt, Human herpesvirus 5
gaaucagcagugag

SEQ ID NO: 2025731 - RNA, 17 nt, Human herpesvirus 5
gauaacaaacaaugaca

SEQ ID NO: 2025732 - RNA, 22 nt, Human herpesvirus 5
cucucugugagcuuuuuucccc

SEQ ID NO: 2025733 - RNA, 14 nt, Human herpesvirus 5
ggccaugagcggca

SEQ ID NO: 2025734 - RNA, 18 nt, Human herpesvirus 5
gacgagaugaaggaacgc

SEQ ID NO: 2025735 - RNA, 21 nt, Human herpesvirus 5
ucuacgugucugggccacagg

SEQ ID NO: 2025736 - RNA, 21 nt, Human herpesvirus 5
ugguucaaaaaguucaccgua

SEQ ID NO: 2025737 - RNA, 21 nt, Human herpesvirus 5
gacacguagaucccacuggca

SEQ ID NO: 2025738 - RNA, 20 nt, Human herpesvirus 5
cacuuuuaacagcucaugcc

SEQ ID NO: 2025739 - RNA, 17 nt, Human herpesvirus 5
caacaaauaccaacacu

SEQ ID NO: 2025740 - RNA, 21 nt, Human herpesvirus 5
cggcuaucuguacugcaagac

SEQ ID NO: 2025741 - RNA, 22 nt, Human herpesvirus 5
ugucacggaacauguccuggcg

SEQ ID NO: 2025742 - RNA, 13 nt, Human herpesvirus 5
cugcgcgacacgg

SEQ ID NO: 2025743 - RNA, 16 nt, Human herpesvirus 5
uucaaagggagcccca

SEQ ID NO: 2025744 - RNA, 13 nt, Human herpesvirus 5
cagcaccaugccg

SEQ ID NO: 2025745 - RNA, 20 nt, Human herpesvirus 5
cagcaacaguauuccccgcu

SEQ ID NO: 2025746 - RNA, 19 nt, Human herpesvirus 5
ucaaccauuggcaacauca

SEQ ID NO: 2025747 - RNA, 23 nt, Human herpesvirus 5
cucgccuauacuauguguaugau

SEQ ID NO: 2025748 - RNA, 23 nt, Human herpesvirus 5
cuccgugcggcccccagaggccc

SEQ ID NO: 2025749 - RNA, 15 nt, Human herpesvirus 5
cagcgaacgacgcag

SEQ ID NO: 2025750 - RNA, 23 nt, Human herpesvirus 5
gcgcugguggccgaacagcagcu

SEQ ID NO: 2025751 - RNA, 14 nt, Human herpesvirus 5
ccacagcgccaggc

SEQ ID NO: 2025752 - RNA, 21 nt, Human herpesvirus 5
cuguuaacccccgacgagcag

SEQ ID NO: 2025753 - RNA, 18 nt, Human herpesvirus 5
cgacucgcugccgcagcu

SEQ ID NO: 2025754 - RNA, 16 nt, Human herpesvirus 5
aggaccguacacgcac

SEQ ID NO: 2025755 - RNA, 13 nt, Human herpesvirus 5
cggcgccugguug

SEQ ID NO: 2025756 - RNA, 22 nt, Human herpesvirus 5
cauugagaaagcuaacauuccc

SEQ ID NO: 2025757 - RNA, 12 nt, Human herpesvirus 5
ccuccacugcca

SEQ ID NO: 2025758 - RNA, 14 nt, Human herpesvirus 5
cggcggcagcuugg

SEQ ID NO: 2025759 - RNA, 14 nt, Human herpesvirus 5
ccgcagugggccca

SEQ ID NO: 2025760 - RNA, 21 nt, Human herpesvirus 5
agcacagagacaccaauugcu

SEQ ID NO: 2025761 - RNA, 23 nt, Human herpesvirus 5
accagggaggagggguuaagagg

SEQ ID NO: 2025762 - RNA, 23 nt, Human herpesvirus 5
gacaguagcggguaauaaaaaca

SEQ ID NO: 2025763 - RNA, 14 nt, Human herpesvirus 5
acgacccaccgccg

SEQ ID NO: 2025764 - RNA, 17 nt, Human herpesvirus 5
caugucgcgacagagag

SEQ ID NO: 2025765 - RNA, 21 nt, Human herpesvirus 5
cgucacuagaucaccacccug

SEQ ID NO: 2025766 - RNA, 21 nt, Human herpesvirus 5
gagcacgucuagcaggcccag

SEQ ID NO: 2025767 - RNA, 23 nt, Human herpesvirus 5
cugguuuuugcccccucccuucu

SEQ ID NO: 2025768 - RNA, 22 nt, Human herpesvirus 5
cugccaccgacauggagcccac

SEQ ID NO: 2025769 - RNA, 16 nt, Human herpesvirus 5
cucgaccggcggcugc

SEQ ID NO: 2025770 - RNA, 17 nt, Human herpesvirus 5
caggggcuggacguggu

SEQ ID NO: 2025771 - RNA, 23 nt, Human herpesvirus 5
cucgugugcuguugaccugggua

SEQ ID NO: 2025772 - RNA, 18 nt, Human herpesvirus 5
acgucugcguguguguuu

SEQ ID NO: 2025773 - RNA, 21 nt, Human herpesvirus 5
auuuaucaauacaaugacacu

SEQ ID NO: 2025774 - RNA, 17 nt, Human herpesvirus 5
ccagcggccgcaguggg

SEQ ID NO: 2025775 - RNA, 18 nt, Human herpesvirus 5
auccugggacaccacggu

SEQ ID NO: 2025776 - RNA, 18 nt, Human herpesvirus 5
cggagcacgggcugcugg

SEQ ID NO: 2025777 - RNA, 18 nt, Human herpesvirus 5
gaggaggaugggggggac

SEQ ID NO: 2025778 - RNA, 13 nt, Human herpesvirus 5
agaccgacagcgg

SEQ ID NO: 2025779 - RNA, 12 nt, Human herpesvirus 5
gcaugucgccca

SEQ ID NO: 2025780 - RNA, 23 nt, Human herpesvirus 5
ccuuccccacccaguagacagac

SEQ ID NO: 2025781 - RNA, 15 nt, Human herpesvirus 5
ugaugaugcugcuga

SEQ ID NO: 2025782 - RNA, 13 nt, Human herpesvirus 5
cgcggcaccagga

SEQ ID NO: 2025783 - RNA, 17 nt, Human herpesvirus 5
ugcgcgauacauugccc

SEQ ID NO: 2025784 - RNA, 14 nt, Human herpesvirus 5
gaagcuguuuuguu

SEQ ID NO: 2025785 - RNA, 23 nt, Human herpesvirus 5
guccacccaucccgagcacucca

SEQ ID NO: 2025786 - RNA, 22 nt, Human herpesvirus 5
uguuugggaacuuugccgucau

SEQ ID NO: 2025787 - RNA, 13 nt, Human herpesvirus 5
gugugggaccugg

SEQ ID NO: 2025788 - RNA, 16 nt, Human herpesvirus 5
acauccgucagccucg

SEQ ID NO: 2025789 - RNA, 23 nt, Human herpesvirus 5
gugucucuaaacgccaccugcaa

SEQ ID NO: 2025790 - RNA, 18 nt, Human herpesvirus 5
gcccgucggcugccuguu

SEQ ID NO: 2025791 - RNA, 21 nt, Human herpesvirus 5
aggcaaagaaaaaaaaaagga

SEQ ID NO: 2025792 - RNA, 13 nt, Human herpesvirus 5
gggaugacgggga

SEQ ID NO: 2025793 - RNA, 17 nt, Human herpesvirus 5
cguugaugcggcgcgua

SEQ ID NO: 2025794 - RNA, 17 nt, Human herpesvirus 5
ggugacgucgguggugg

SEQ ID NO: 2025795 - RNA, 13 nt, Human herpesvirus 5
cauguccagccug

SEQ ID NO: 2025796 - RNA, 22 nt, Human herpesvirus 5
aacgccuggcgugaucacgccu

SEQ ID NO: 2025797 - RNA, 21 nt, Human herpesvirus 5
gcaccacgucgauucccaucu

SEQ ID NO: 2025798 - RNA, 14 nt, Human herpesvirus 5
ugagcgacagcagc

SEQ ID NO: 2025799 - RNA, 22 nt, Human herpesvirus 5
uguuugacauuuuuucggccgc

SEQ ID NO: 2025800 - RNA, 22 nt, Human herpesvirus 5
aaaacggacgggaaaggcuaac

SEQ ID NO: 2025801 - RNA, 16 nt, Human herpesvirus 5
gaaccagcugguaccu

SEQ ID NO: 2025802 - RNA, 13 nt, Human herpesvirus 5
ccaugugcauggg

SEQ ID NO: 2025803 - RNA, 20 nt, Human herpesvirus 5
gccuguugugguggcuggga

SEQ ID NO: 2025804 - RNA, 17 nt, Human herpesvirus 5
ccccgcaaacucccacu

SEQ ID NO: 2025805 - RNA, 11 nt, Human herpesvirus 5
ucccucagccu

SEQ ID NO: 2025806 - RNA, 13 nt, Human herpesvirus 5
gcgcuugucgcca

SEQ ID NO: 2025807 - RNA, 21 nt, Human herpesvirus 5
uggaggucuaucacgggcucg

SEQ ID NO: 2025808 - RNA, 14 nt, Human herpesvirus 5
uauacaacaggugu

SEQ ID NO: 2025809 - RNA, 22 nt, Human herpesvirus 5
cccacaaaggguaucuggggag

SEQ ID NO: 2025810 - RNA, 22 nt, Human herpesvirus 5
ccacggccuuauguggcugcgc

SEQ ID NO: 2025811 - RNA, 16 nt, Human herpesvirus 5
gacgggacggcggcgc

SEQ ID NO: 2025812 - RNA, 13 nt, Human herpesvirus 5
guggagggcgcgc

SEQ ID NO: 2025813 - RNA, 14 nt, Human herpesvirus 5
accaaggaaccacc

SEQ ID NO: 2025814 - RNA, 18 nt, Human herpesvirus 5
cgcagcgguggcuggaga

SEQ ID NO: 2025815 - RNA, 18 nt, Human herpesvirus 5
ugauacaucgcauaugac

SEQ ID NO: 2025816 - RNA, 15 nt, Human herpesvirus 5
gaggcuguggccagc

SEQ ID NO: 2025817 - RNA, 14 nt, Human herpesvirus 5
uguucgugguuggc

SEQ ID NO: 2025818 - RNA, 16 nt, Human herpesvirus 5
gccuuggcgcucugga

SEQ ID NO: 2025819 - RNA, 16 nt, Human herpesvirus 5
ggaaacauguccccau

SEQ ID NO: 2025820 - RNA, 19 nt, Human herpesvirus 5
gcggguccauuggagccgc

SEQ ID NO: 2025821 - RNA, 21 nt, Human herpesvirus 5
cccaucgucccccuuucucua

SEQ ID NO: 2025822 - RNA, 13 nt, Human herpesvirus 5
agugggccagccc

SEQ ID NO: 2025823 - RNA, 10 nt, Human herpesvirus 5
augcgccgcc

SEQ ID NO: 2025824 - RNA, 21 nt, Human herpesvirus 5
acucgcugccgcagcugcugg

SEQ ID NO: 2025825 - RNA, 13 nt, Human herpesvirus 5
ccgcugcacggca

SEQ ID NO: 2025826 - RNA, 23 nt, Human herpesvirus 5
accucguuguccucuccuccuuc

SEQ ID NO: 2025827 - RNA, 11 nt, Human herpesvirus 5
uccugcugcua

SEQ ID NO: 2025828 - RNA, 13 nt, Human herpesvirus 5
acaaacaaugaca

SEQ ID NO: 2025829 - RNA, 13 nt, Human herpesvirus 5
gugccucugaaag

SEQ ID NO: 2025830 - RNA, 20 nt, Human herpesvirus 5
gugugaagcgguggaaacca

SEQ ID NO: 2025831 - RNA, 21 nt, Human herpesvirus 5
ucugauaccgggcgccgggac

SEQ ID NO: 2025832 - RNA, 15 nt, Human herpesvirus 5
cgugcguagcuguau

SEQ ID NO: 2025833 - RNA, 16 nt, Human herpesvirus 5
gcaagaugggcaccgu

SEQ ID NO: 2025834 - RNA, 19 nt, Human herpesvirus 5
accacucccaccacgguuu

SEQ ID NO: 2025835 - RNA, 14 nt, Human herpesvirus 5
ugcgaggcuuugau

SEQ ID NO: 2025836 - RNA, 14 nt, Human herpesvirus 5
caaguugguggugg

SEQ ID NO: 2025837 - RNA, 18 nt, Human herpesvirus 5
ccgcuuaacaacgugucc

SEQ ID NO: 2025838 - RNA, 20 nt, Human herpesvirus 5
cucagcgacgucccgcgcgg

SEQ ID NO: 2025839 - RNA, 16 nt, Human herpesvirus 5
gucaccaucgugccgc

SEQ ID NO: 2025840 - RNA, 15 nt, Human herpesvirus 5
cugaucgccuggagc

SEQ ID NO: 2025841 - RNA, 18 nt, Human herpesvirus 5
aagaccaagagcaugcug

SEQ ID NO: 2025842 - RNA, 20 nt, Human herpesvirus 5
caucaggaucuggugcaggc

SEQ ID NO: 2025843 - RNA, 19 nt, Human herpesvirus 5
guaccgucuccaccacagu

SEQ ID NO: 2025844 - RNA, 18 nt, Human herpesvirus 5
ccggcguuggggaucuac

SEQ ID NO: 2025845 - RNA, 21 nt, Human herpesvirus 5
cacuaaauuguuauugccagu

SEQ ID NO: 2025846 - RNA, 20 nt, Human herpesvirus 5
caacucuaucgcgacagaca

SEQ ID NO: 2025847 - RNA, 14 nt, Human herpesvirus 5
ccgcgcccacugga

SEQ ID NO: 2025848 - RNA, 20 nt, Human herpesvirus 5
gacgcagugcguggccgcac

SEQ ID NO: 2025849 - RNA, 21 nt, Human herpesvirus 5
cugucguggugacugagcaca

SEQ ID NO: 2025850 - RNA, 21 nt, Human herpesvirus 5
agcuuuuuaauaaaaaacaag

SEQ ID NO: 2025851 - RNA, 20 nt, Human herpesvirus 5
cagccaccgcgaggccaccc

SEQ ID NO: 2025852 - RNA, 17 nt, Human herpesvirus 5
gccgcggugcaggccgc

SEQ ID NO: 2025853 - RNA, 12 nt, Human herpesvirus 5
aaaucuaccuga

SEQ ID NO: 2025854 - RNA, 14 nt, Human herpesvirus 5
ugucaaaaaucacu

SEQ ID NO: 2025855 - RNA, 19 nt, Human herpesvirus 5
cgggacagcgugccggcga

SEQ ID NO: 2025856 - RNA, 16 nt, Human herpesvirus 5
cgacuggauccgcuuc

SEQ ID NO: 2025857 - RNA, 16 nt, Human herpesvirus 5
ucccucagccucugug

SEQ ID NO: 2025858 - RNA, 18 nt, Human herpesvirus 5
aagggcgcgggcggccag

SEQ ID NO: 2025859 - RNA, 19 nt, Human herpesvirus 5
cgcacccuaaaacaccgug

SEQ ID NO: 2025860 - RNA, 18 nt, Human herpesvirus 5
cgcuucaacgccugcacc

SEQ ID NO: 2025861 - RNA, 20 nt, Human herpesvirus 5
gcucguguggcagcuggcuu

SEQ ID NO: 2025862 - RNA, 17 nt, Human herpesvirus 5
caugucccuacucacca

SEQ ID NO: 2025863 - RNA, 16 nt, Human herpesvirus 5
gcgucagcggccgccg

SEQ ID NO: 2025864 - RNA, 17 nt, Human herpesvirus 5
gcgggccgaccgccgcc

SEQ ID NO: 2025865 - RNA, 18 nt, Human herpesvirus 5
acacucuggcccugcugu

SEQ ID NO: 2025866 - RNA, 15 nt, Human herpesvirus 5
gcgggaacuggccug

SEQ ID NO: 2025867 - RNA, 19 nt, Human herpesvirus 5
ucacgggacccgccgccgc

SEQ ID NO: 2025868 - RNA, 17 nt, Human herpesvirus 5
cgagaugaaggaacgca

SEQ ID NO: 2025869 - RNA, 20 nt, Human herpesvirus 5
gaagaggacgaagugacgga

SEQ ID NO: 2025870 - RNA, 15 nt, Human herpesvirus 5
ggugcucgaccagga

SEQ ID NO: 2025871 - RNA, 18 nt, Human herpesvirus 5
gcggucgcggguggccgg

SEQ ID NO: 2025872 - RNA, 14 nt, Human herpesvirus 5
gccuggcggcgggu

SEQ ID NO: 2025873 - RNA, 17 nt, Human herpesvirus 5
gguguuucuccgugugu

SEQ ID NO: 2025874 - RNA, 18 nt, Human herpesvirus 5
acccgcggccguacccgc

SEQ ID NO: 2025875 - RNA, 19 nt, Human herpesvirus 5
ugcugauuacaaugauggc

SEQ ID NO: 2025876 - RNA, 15 nt, Human herpesvirus 5
acauguaucucacca

SEQ ID NO: 2025877 - RNA, 15 nt, Human herpesvirus 5
cuaaagcccccacga

SEQ ID NO: 2025878 - RNA, 14 nt, Human herpesvirus 5
ggcggcugaucugc

SEQ ID NO: 2025879 - RNA, 15 nt, Human herpesvirus 5
gcaucuccucgccca

SEQ ID NO: 2025880 - RNA, 14 nt, Human herpesvirus 5
gacauggacucuug

SEQ ID NO: 2025881 - RNA, 18 nt, Human herpesvirus 5
guucgcccugucugcagc

SEQ ID NO: 2025882 - RNA, 15 nt, Human herpesvirus 5
uggaggccaacaucu

SEQ ID NO: 2025883 - RNA, 15 nt, Human herpesvirus 5
cggcggcggugguga

SEQ ID NO: 2025884 - RNA, 14 nt, Human herpesvirus 5
cgcggcgugaccac

SEQ ID NO: 2025885 - RNA, 15 nt, Human herpesvirus 5
ccgccggccacgagc

SEQ ID NO: 2025886 - RNA, 11 nt, Human herpesvirus 5
ugcgcgccgcc

SEQ ID NO: 2025887 - RNA, 13 nt, Human herpesvirus 5
ggcuucgaacauc

SEQ ID NO: 2025888 - RNA, 19 nt, Human herpesvirus 5
acuuuguggggcugcucaa

SEQ ID NO: 2025889 - RNA, 18 nt, Human herpesvirus 5
uaaugugucgcuauacac

SEQ ID NO: 2025890 - RNA, 19 nt, Human herpesvirus 5
agaggaagucgaucuggaa

SEQ ID NO: 2025891 - RNA, 13 nt, Human herpesvirus 5
acgucaacgguuu

SEQ ID NO: 2025892 - RNA, 16 nt, Human herpesvirus 5
uuggugaaggccgugg

SEQ ID NO: 2025893 - RNA, 19 nt, Human herpesvirus 5
guagcuuuuuuuauacauc

SEQ ID NO: 2025894 - RNA, 20 nt, Human herpesvirus 5
cuggaggacgcgcuggcugu

SEQ ID NO: 2025895 - RNA, 14 nt, Human herpesvirus 5
gcugagcgugugga

SEQ ID NO: 2025896 - RNA, 13 nt, Human herpesvirus 5
gaccaugggcuac

SEQ ID NO: 2025897 - RNA, 15 nt, Human herpesvirus 5
ucaacgccugcacca

SEQ ID NO: 2025898 - RNA, 19 nt, Human herpesvirus 5
ucggccggcugcugcacca

SEQ ID NO: 2025899 - RNA, 20 nt, Human herpesvirus 5
gccaccgucccucagcgacg

SEQ ID NO: 2025900 - RNA, 15 nt, Human herpesvirus 5
caguaaccuggagca

SEQ ID NO: 2025901 - RNA, 20 nt, Human herpesvirus 5
acuggagagacuuucaauga

SEQ ID NO: 2025902 - RNA, 16 nt, Human herpesvirus 5
ccgacaaggcgcggcg

SEQ ID NO: 2025903 - RNA, 20 nt, Human herpesvirus 5
cggcucaccacgcagcaggc

SEQ ID NO: 2025904 - RNA, 12 nt, Human herpesvirus 5
aagaugauacau

SEQ ID NO: 2025905 - RNA, 13 nt, Human herpesvirus 5
accauccucaccc

SEQ ID NO: 2025906 - RNA, 23 nt, Human herpesvirus 5
cgcucacagucuaucccuauggc

SEQ ID NO: 2025907 - RNA, 20 nt, Human herpesvirus 5
ccgucaaggccgccucuucu

SEQ ID NO: 2025908 - RNA, 21 nt, Human herpesvirus 5
aucucgccguacggcaacgag

SEQ ID NO: 2025909 - RNA, 15 nt, Human herpesvirus 5
gaaacaaacgucacu

SEQ ID NO: 2025910 - RNA, 17 nt, Human herpesvirus 5
ugcgcucuugggcgaca

SEQ ID NO: 2025911 - RNA, 14 nt, Human herpesvirus 5
cguggacgacuggc

SEQ ID NO: 2025912 - RNA, 20 nt, Human herpesvirus 5
cucagccucuguguucccaa

SEQ ID NO: 2025913 - RNA, 18 nt, Human herpesvirus 5
acgcgcucuucacacacu

SEQ ID NO: 2025914 - RNA, 12 nt, Human herpesvirus 5
cuccacaaccug

SEQ ID NO: 2025915 - RNA, 13 nt, Human herpesvirus 5
cgucuucugaagc

SEQ ID NO: 2025916 - RNA, 14 nt, Human herpesvirus 5
ccagaacucucugc

SEQ ID NO: 2025917 - RNA, 18 nt, Human herpesvirus 5
cugcggacgccgacggcc

SEQ ID NO: 2025918 - RNA, 18 nt, Human herpesvirus 5
gcccguucuccccgugga

SEQ ID NO: 2025919 - RNA, 17 nt, Human herpesvirus 5
caagaucguacccacca

SEQ ID NO: 2025920 - RNA, 16 nt, Human herpesvirus 5
aucuccgucacgccuc

SEQ ID NO: 2025921 - RNA, 18 nt, Human herpesvirus 5
gaccgcaacgugcugcug

SEQ ID NO: 2025922 - RNA, 15 nt, Human herpesvirus 5
gaccguuguccccgc

SEQ ID NO: 2025923 - RNA, 14 nt, Human herpesvirus 5
gcgacccagcgaca

SEQ ID NO: 2025924 - RNA, 15 nt, Human herpesvirus 5
ccguuuucacagcag

SEQ ID NO: 2025925 - RNA, 16 nt, Human herpesvirus 5
aacgggugggcugggg

SEQ ID NO: 2025926 - RNA, 23 nt, Human herpesvirus 5
cccaucucaacgucaacgguuuc

SEQ ID NO: 2025927 - RNA, 19 nt, Human herpesvirus 5
uguacaaucucacgguuaa

SEQ ID NO: 2025928 - RNA, 19 nt, Human herpesvirus 5
ccuggacggcuacaugugu

SEQ ID NO: 2025929 - RNA, 20 nt, Human herpesvirus 5
caaucgacugccuaacugua

SEQ ID NO: 2025930 - RNA, 20 nt, Human herpesvirus 5
acgcacuuuuuauucuuggu

SEQ ID NO: 2025931 - RNA, 18 nt, Human herpesvirus 5
acaccugagacuggucug

SEQ ID NO: 2025932 - RNA, 22 nt, Human herpesvirus 5
cacugacaagucguuucagccc

SEQ ID NO: 2025933 - RNA, 12 nt, Human herpesvirus 5
cggagucauuau

SEQ ID NO: 2025934 - RNA, 23 nt, Human herpesvirus 5
guuccaccaggcucugcgccguc

SEQ ID NO: 2025935 - RNA, 16 nt, Human herpesvirus 5
gcccgaggcggaggag

SEQ ID NO: 2025936 - RNA, 18 nt, Human herpesvirus 5
gcacgcgcuagccuuucu

SEQ ID NO: 2025937 - RNA, 12 nt, Human herpesvirus 5
acguccccccgc

SEQ ID NO: 2025938 - RNA, 19 nt, Human herpesvirus 5
cucgggaggacucagagcc

SEQ ID NO: 2025939 - RNA, 18 nt, Human herpesvirus 5
ugcgggugccgggacagc

SEQ ID NO: 2025940 - RNA, 16 nt, Human herpesvirus 5
cauguuuuaggaauga

SEQ ID NO: 2025941 - RNA, 19 nt, Human herpesvirus 5
cacacaucugucaccucac

SEQ ID NO: 2025942 - RNA, 15 nt, Human herpesvirus 5
ccacgggccgcgcuc

SEQ ID NO: 2025943 - RNA, 17 nt, Human herpesvirus 5
accgucgccgucacugc

SEQ ID NO: 2025944 - RNA, 19 nt, Human herpesvirus 5
ggcaauugcaugucgccca

SEQ ID NO: 2025945 - RNA, 19 nt, Human herpesvirus 5
ggccgccucuucuggcccu

SEQ ID NO: 2025946 - RNA, 15 nt, Human herpesvirus 5
gccuucagcgucuca

SEQ ID NO: 2025947 - RNA, 16 nt, Human herpesvirus 5
ccgcuuuucagaccgc

SEQ ID NO: 2025948 - RNA, 17 nt, Human herpesvirus 5
accccauacacgguuuc

SEQ ID NO: 2025949 - RNA, 13 nt, Human herpesvirus 5
gcaucacccgccu

SEQ ID NO: 2025950 - RNA, 18 nt, Human herpesvirus 5
caccguguucucccgacg

SEQ ID NO: 2025951 - RNA, 22 nt, Human herpesvirus 5
cuucgcgccccucugcguucac

SEQ ID NO: 2025952 - RNA, 14 nt, Human herpesvirus 5
uacuacuaccaaua

SEQ ID NO: 2025953 - RNA, 12 nt, Human herpesvirus 5
aaacagcagcuc

SEQ ID NO: 2025954 - RNA, 21 nt, Human herpesvirus 5
cucggccuugcgcucccugcu

SEQ ID NO: 2025955 - RNA, 18 nt, Human herpesvirus 5
ucaccaucgugccgcucc

SEQ ID NO: 2025956 - RNA, 16 nt, Human herpesvirus 5
ggucaugaaguuguug

SEQ ID NO: 2025957 - RNA, 14 nt, Human herpesvirus 5
caccugagacuggu

SEQ ID NO: 2025958 - RNA, 14 nt, Human herpesvirus 5
ccagggagacuuag

SEQ ID NO: 2025959 - RNA, 18 nt, Human herpesvirus 5
ggcgccgggacucuggug

SEQ ID NO: 2025960 - RNA, 20 nt, Human herpesvirus 5
gaaaccguacuaagucuccc

SEQ ID NO: 2025961 - RNA, 14 nt, Human herpesvirus 5
ggcaacugcugccu

SEQ ID NO: 2025962 - RNA, 15 nt, Human herpesvirus 5
ucacacuuaagaaaa

SEQ ID NO: 2025963 - RNA, 16 nt, Human herpesvirus 5
ggcccgaacgcugcuu

SEQ ID NO: 2025964 - RNA, 18 nt, Human herpesvirus 5
aggccuccagcgccuccu

SEQ ID NO: 2025965 - RNA, 11 nt, Human herpesvirus 5
cucagagccac

SEQ ID NO: 2025966 - RNA, 20 nt, Human herpesvirus 5
cgcacuuuuuuuacuaguau

SEQ ID NO: 2025967 - RNA, 20 nt, Human herpesvirus 5
cgcgucgcaaacgcugcuug

SEQ ID NO: 2025968 - RNA, 22 nt, Human herpesvirus 5
ccucuucuuugccggcucuccu

SEQ ID NO: 2025969 - RNA, 17 nt, Human herpesvirus 5
cugagcguguggaggac

SEQ ID NO: 2025970 - RNA, 14 nt, Human herpesvirus 5
cagacugcccuuga

SEQ ID NO: 2025971 - RNA, 19 nt, Human herpesvirus 5
gcgccgggcgccacggcca

SEQ ID NO: 2025972 - RNA, 15 nt, Human herpesvirus 5
uuagcggucuguuca

SEQ ID NO: 2025973 - RNA, 13 nt, Human herpesvirus 5
ccugcagcugcac

SEQ ID NO: 2025974 - RNA, 21 nt, Human herpesvirus 5
cugggagugguggcggcagcc

SEQ ID NO: 2025975 - RNA, 14 nt, Human herpesvirus 5
uaagccggcagcug

SEQ ID NO: 2025976 - RNA, 16 nt, Human herpesvirus 5
acaucccaagcacgcc

SEQ ID NO: 2025977 - RNA, 19 nt, Human herpesvirus 5
aaucacuuuuaacagcuca

SEQ ID NO: 2025978 - RNA, 21 nt, Human herpesvirus 5
ccgucuggagguggccugcau

SEQ ID NO: 2025979 - RNA, 22 nt, Human herpesvirus 5
ucaagaucguacccaccaccuc

SEQ ID NO: 2025980 - RNA, 22 nt, Human herpesvirus 5
cugcaagucccuggccccggcc

SEQ ID NO: 2025981 - RNA, 21 nt, Human herpesvirus 5
uucagucagagagucugaaac

SEQ ID NO: 2025982 - RNA, 21 nt, Human herpesvirus 5
cguuggacgcuuaucgggcgc

SEQ ID NO: 2025983 - RNA, 15 nt, Human herpesvirus 5
ggcugaucgcggccu

SEQ ID NO: 2025984 - RNA, 22 nt, Human herpesvirus 5
gucgccuuccagcuuaccgcca

SEQ ID NO: 2025985 - RNA, 12 nt, Human herpesvirus 5
gcgggugcauga

SEQ ID NO: 2025986 - RNA, 13 nt, Human herpesvirus 5
gacugacacagcu

SEQ ID NO: 2025987 - RNA, 23 nt, Human herpesvirus 5
agcaggcuaaagaagaccaugac

SEQ ID NO: 2025988 - RNA, 23 nt, Human herpesvirus 5
gccuccguccucgucgccuucca

SEQ ID NO: 2025989 - RNA, 21 nt, Human herpesvirus 5
ucacacuaagaauaaagaaaa

SEQ ID NO: 2025990 - RNA, 13 nt, Human herpesvirus 5
gcacgggcugcug

SEQ ID NO: 2025991 - RNA, 23 nt, Human herpesvirus 5
caacauacaguacaacaguuauc

SEQ ID NO: 2025992 - RNA, 19 nt, Human herpesvirus 5
gacacacguucgacaugga

SEQ ID NO: 2025993 - RNA, 15 nt, Human herpesvirus 5
uggacugggacgagg

SEQ ID NO: 2025994 - RNA, 15 nt, Human herpesvirus 5
cggcccccuaccugc

SEQ ID NO: 2025995 - RNA, 21 nt, Human herpesvirus 5
guguucccaacacgucccccc

SEQ ID NO: 2025996 - RNA, 15 nt, Human herpesvirus 5
aucuuaccacaguug

SEQ ID NO: 2025997 - RNA, 20 nt, Human herpesvirus 5
acucgcugccgcagcugcug

SEQ ID NO: 2025998 - RNA, 22 nt, Human herpesvirus 5
agcuuaccgccaccgucgcccu

SEQ ID NO: 2025999 - RNA, 14 nt, Human herpesvirus 5
cggucuuccugcug

SEQ ID NO: 2026000 - RNA, 12 nt, Human herpesvirus 5
cucgcuggaagc

SEQ ID NO: 2026001 - RNA, 16 nt, Human herpesvirus 5
gcucucuauccggugg

SEQ ID NO: 2026002 - RNA, 12 nt, Human herpesvirus 5
ugaucugucauc

SEQ ID NO: 2026003 - RNA, 16 nt, Human herpesvirus 5
gcuugcuccucuucca

SEQ ID NO: 2026004 - RNA, 18 nt, Human herpesvirus 5
ugcccuauccgcgcggcu

SEQ ID NO: 2026005 - RNA, 12 nt, Human herpesvirus 5
gguggcggccuu

SEQ ID NO: 2026006 - RNA, 19 nt, Human herpesvirus 5
gaacgacgacucagggcug

SEQ ID NO: 2026007 - RNA, 14 nt, Human herpesvirus 5
gugcaaugccucau

SEQ ID NO: 2026008 - RNA, 17 nt, Human herpesvirus 5
uuaccaacguaacagca

SEQ ID NO: 2026009 - RNA, 21 nt, Human herpesvirus 5
gcccgaagccgcgcgagcgug

SEQ ID NO: 2026010 - RNA, 15 nt, Human herpesvirus 5
agagaaagagcagcg

SEQ ID NO: 2026011 - RNA, 13 nt, Human herpesvirus 5
gcaugauuagcaa

SEQ ID NO: 2026012 - RNA, 20 nt, Human herpesvirus 5
accauccgaagcuacagccg

SEQ ID NO: 2026013 - RNA, 19 nt, Human herpesvirus 5
caggcacgucauugacagc

SEQ ID NO: 2026014 - RNA, 19 nt, Human herpesvirus 5
uuccgcguuuggucgccug

SEQ ID NO: 2026015 - RNA, 14 nt, Human herpesvirus 5
gccgucgcaagggc

SEQ ID NO: 2026016 - RNA, 22 nt, Human herpesvirus 5
cauggagacaguuuccacgcag

SEQ ID NO: 2026017 - RNA, 16 nt, Human herpesvirus 5
cuauugcuuagcugca

SEQ ID NO: 2026018 - RNA, 15 nt, Human herpesvirus 5
gguacgccaguagcc

SEQ ID NO: 2026019 - RNA, 23 nt, Human herpesvirus 5
ccaucaggugacauccucgccca

SEQ ID NO: 2026020 - RNA, 12 nt, Human herpesvirus 5
cguaccagcugu

SEQ ID NO: 2026021 - RNA, 20 nt, Human herpesvirus 5
acagcgccgacgugcuucgc

SEQ ID NO: 2026022 - RNA, 17 nt, Human herpesvirus 5
cgccgacgaagaagaac

SEQ ID NO: 2026023 - RNA, 15 nt, Human herpesvirus 5
cgccgaggcuacugc

SEQ ID NO: 2026024 - RNA, 15 nt, Human herpesvirus 5
ugagacaggacgagg

SEQ ID NO: 2026025 - RNA, 18 nt, Human herpesvirus 5
auauuuuccauaaaucua

SEQ ID NO: 2026026 - RNA, 21 nt, Human herpesvirus 5
cggauggcuuuugcgucgccc

SEQ ID NO: 2026027 - RNA, 18 nt, Human herpesvirus 5
gugcgcguccacagcgug

SEQ ID NO: 2026028 - RNA, 21 nt, Human herpesvirus 5
ugcggcgcagacgucggcggu

SEQ ID NO: 2026029 - RNA, 15 nt, Human herpesvirus 5
cugcugcccacggaa

SEQ ID NO: 2026030 - RNA, 14 nt, Human herpesvirus 5
gcagcgugcugugc

SEQ ID NO: 2026031 - RNA, 13 nt, Human herpesvirus 5
ggaaugcggucag

SEQ ID NO: 2026032 - RNA, 14 nt, Human herpesvirus 5
cagcgguggcugga

SEQ ID NO: 2026033 - RNA, 13 nt, Human herpesvirus 5
guggggcugcuca

SEQ ID NO: 2026034 - RNA, 17 nt, Human herpesvirus 5
ucacuaucuucaaccuc

SEQ ID NO: 2026035 - RNA, 17 nt, Human herpesvirus 5
acaugcuauaagacagc

SEQ ID NO: 2026036 - RNA, 15 nt, Human herpesvirus 5
cuccaucaugaagga

SEQ ID NO: 2026037 - RNA, 14 nt, Human herpesvirus 5
acacgacacuagcc

SEQ ID NO: 2026038 - RNA, 16 nt, Human herpesvirus 5
aagaaaaaaugguguu

SEQ ID NO: 2026039 - RNA, 22 nt, Human herpesvirus 5
ccggggugguggugcugcugcu

SEQ ID NO: 2026040 - RNA, 23 nt, Human herpesvirus 5
augcaugcuaagaugaacgggug

SEQ ID NO: 2026041 - RNA, 14 nt, Human herpesvirus 5
uccgugccagcugg

SEQ ID NO: 2026042 - RNA, 17 nt, Human herpesvirus 5
caccuggacuucaaugu

SEQ ID NO: 2026043 - RNA, 14 nt, Human herpesvirus 5
cuccgucaauaaaa

SEQ ID NO: 2026044 - RNA, 13 nt, Human herpesvirus 5
uguguguuucuua

SEQ ID NO: 2026045 - RNA, 13 nt, Human herpesvirus 5
ggauugggcggac

SEQ ID NO: 2026046 - RNA, 16 nt, Human herpesvirus 5
ucugucguacuguccu

SEQ ID NO: 2026047 - RNA, 13 nt, Human herpesvirus 5
gcgacuccuggac

SEQ ID NO: 2026048 - RNA, 23 nt, Human herpesvirus 5
uaggcggcgcagcgccagccuua

SEQ ID NO: 2026049 - RNA, 15 nt, Human herpesvirus 5
acuauuguauacucu

SEQ ID NO: 2026050 - RNA, 16 nt, Human herpesvirus 5
gcagaacgaucccuuu

SEQ ID NO: 2026051 - RNA, 13 nt, Human herpesvirus 5
gcagucuggcuug

SEQ ID NO: 2026052 - RNA, 20 nt, Human herpesvirus 5
caccgcgccgggacccacgg

SEQ ID NO: 2026053 - RNA, 22 nt, Human herpesvirus 5
gagacccgcgucccuggggcug

SEQ ID NO: 2026054 - RNA, 14 nt, Human herpesvirus 5
auguaguugcagag

SEQ ID NO: 2026055 - RNA, 18 nt, Human herpesvirus 5
acuacagaauugauuuca

SEQ ID NO: 2026056 - RNA, 13 nt, Human herpesvirus 5
cagcgggcuuugc

SEQ ID NO: 2026057 - RNA, 22 nt, Human herpesvirus 5
uagugacgugucgggaaaggag

SEQ ID NO: 2026058 - RNA, 21 nt, Human herpesvirus 5
uacugcauccaucacaucacc

SEQ ID NO: 2026059 - RNA, 14 nt, Human herpesvirus 5
aauggaagccauac

SEQ ID NO: 2026060 - RNA, 21 nt, Human herpesvirus 5
gaucacgccuugcgcggccgu

SEQ ID NO: 2026061 - RNA, 16 nt, Human herpesvirus 5
ucccgugugugggggg

SEQ ID NO: 2026062 - RNA, 22 nt, Human herpesvirus 5
cuccgugcggcccccagaggcc

SEQ ID NO: 2026063 - RNA, 15 nt, Human herpesvirus 5
accaucuggcgcaga

SEQ ID NO: 2026064 - RNA, 21 nt, Human herpesvirus 5
guuauccggcgucgcuggcgc

SEQ ID NO: 2026065 - RNA, 14 nt, Human herpesvirus 5
gggagacggccugg

SEQ ID NO: 2026066 - RNA, 18 nt, Human herpesvirus 5
uuaccaacguaacagcaa

SEQ ID NO: 2026067 - RNA, 14 nt, Human herpesvirus 5
uccccgugugaugu

SEQ ID NO: 2026068 - RNA, 18 nt, Human herpesvirus 5
gguggcgaggugugagga

SEQ ID NO: 2026069 - RNA, 15 nt, Human herpesvirus 5
gugccuucggccagc

SEQ ID NO: 2026070 - RNA, 12 nt, Human herpesvirus 5
gucagacacagc

SEQ ID NO: 2026071 - RNA, 13 nt, Human herpesvirus 5
gacacccgcggcc

SEQ ID NO: 2026072 - RNA, 18 nt, Human herpesvirus 5
uggcgcaaaagcaccaug

SEQ ID NO: 2026073 - RNA, 15 nt, Human herpesvirus 5
uggagcaacgggcgg

SEQ ID NO: 2026074 - RNA, 20 nt, Human herpesvirus 5
agcggcggacuuggcagcgg

SEQ ID NO: 2026075 - RNA, 23 nt, Human herpesvirus 5
ucggagcacgggcgaaacgucag

SEQ ID NO: 2026076 - RNA, 14 nt, Human herpesvirus 5
gaaaaucugugugu

SEQ ID NO: 2026077 - RNA, 20 nt, Human herpesvirus 5
gugaucggccgcggugcgcu

SEQ ID NO: 2026078 - RNA, 21 nt, Human herpesvirus 5
gcggaggaggugaccuggcug

SEQ ID NO: 2026079 - RNA, 21 nt, Human herpesvirus 5
cagcggucguaagcggcagca

SEQ ID NO: 2026080 - RNA, 16 nt, Human herpesvirus 5
aaaacuaaaagaccua

SEQ ID NO: 2026081 - RNA, 14 nt, Human herpesvirus 5
gaccgaagacgccg

SEQ ID NO: 2026082 - RNA, 17 nt, Human herpesvirus 5
aggauccaaggccucca

SEQ ID NO: 2026083 - RNA, 16 nt, Human herpesvirus 5
ugucgcgacagagagg

SEQ ID NO: 2026084 - RNA, 22 nt, Human herpesvirus 5
uguacuaccgcgcccacuggag

SEQ ID NO: 2026085 - RNA, 22 nt, Human herpesvirus 5
cagguaggauuccaagccgcag

SEQ ID NO: 2026086 - RNA, 12 nt, Human herpesvirus 5
ccgagaaaggga

SEQ ID NO: 2026087 - RNA, 21 nt, Human herpesvirus 5
ccuaaguccaacaucguggua

SEQ ID NO: 2026088 - RNA, 22 nt, Human herpesvirus 5
gcucgccuuccccgaugugcag

SEQ ID NO: 2026089 - RNA, 22 nt, Human herpesvirus 5
acauuccccaccuucccucuag

SEQ ID NO: 2026090 - RNA, 23 nt, Human herpesvirus 5
acguugcuaggucccuuaacugu

SEQ ID NO: 2026091 - RNA, 15 nt, Human herpesvirus 5
agagccaugaagcgg

SEQ ID NO: 2026092 - RNA, 17 nt, Human herpesvirus 5
gcuacgcggcgcccgcg

SEQ ID NO: 2026093 - RNA, 12 nt, Human herpesvirus 5
cccgcuagaaug

SEQ ID NO: 2026094 - RNA, 19 nt, Human herpesvirus 5
aaucaccgucgagaaaacu

SEQ ID NO: 2026095 - RNA, 11 nt, Human herpesvirus 5
cacacgcagac

SEQ ID NO: 2026096 - RNA, 16 nt, Human herpesvirus 5
cuacgaaacuuuucug

SEQ ID NO: 2026097 - RNA, 20 nt, Human herpesvirus 5
cggcguguacagcuaccuca

SEQ ID NO: 2026098 - RNA, 13 nt, Human herpesvirus 5
cguggugcgcugc

SEQ ID NO: 2026099 - RNA, 16 nt, Human herpesvirus 5
cgcgcaucgccugcac

SEQ ID NO: 2026100 - RNA, 16 nt, Human herpesvirus 5
cggcgccgucagagca

SEQ ID NO: 2026101 - RNA, 18 nt, Human herpesvirus 5
ccacccgacugcagccca

SEQ ID NO: 2026102 - RNA, 18 nt, Human herpesvirus 5
ggcgguggucggcugccg

SEQ ID NO: 2026103 - RNA, 14 nt, Human herpesvirus 5
gcccauuguuuccu

SEQ ID NO: 2026104 - RNA, 12 nt, Human herpesvirus 5
gcgcgccccggc

SEQ ID NO: 2026105 - RNA, 17 nt, Human herpesvirus 5
gcuggcgguauggcugc

SEQ ID NO: 2026106 - RNA, 12 nt, Human herpesvirus 5
cgacgacccacc

SEQ ID NO: 2026107 - RNA, 13 nt, Human herpesvirus 5
ccacacacaucug

SEQ ID NO: 2026108 - RNA, 12 nt, Human herpesvirus 5
cacagcagcacc

SEQ ID NO: 2026109 - RNA, 18 nt, Human herpesvirus 5
gacaauacgcguaagaua

SEQ ID NO: 2026110 - RNA, 19 nt, Human herpesvirus 5
ccuggacacucuggcccug

SEQ ID NO: 2026111 - RNA, 16 nt, Human herpesvirus 5
cgagacuaucuacaac

SEQ ID NO: 2026112 - RNA, 19 nt, Human herpesvirus 5
gucgugccuucggccagcg

SEQ ID NO: 2026113 - RNA, 17 nt, Human herpesvirus 5
cauggcggcggccacgg

SEQ ID NO: 2026114 - RNA, 14 nt, Human herpesvirus 5
auuaaaaaaaaaac

SEQ ID NO: 2026115 - RNA, 14 nt, Human herpesvirus 5
cuguauuauauaca

SEQ ID NO: 2026116 - RNA, 22 nt, Human herpesvirus 5
gccaaacgcgugcgggugcaug

SEQ ID NO: 2026117 - RNA, 13 nt, Human herpesvirus 5
gcaggcuaaagaa

SEQ ID NO: 2026118 - RNA, 22 nt, Human herpesvirus 5
cuuuauucagaaagcaccagaa

SEQ ID NO: 2026119 - RNA, 14 nt, Human herpesvirus 5
ucgcgagcugagcu

SEQ ID NO: 2026120 - RNA, 18 nt, Human herpesvirus 5
guuacgccggaggccgcc

SEQ ID NO: 2026121 - RNA, 13 nt, Human herpesvirus 5
gucagucuauucu

SEQ ID NO: 2026122 - RNA, 13 nt, Human herpesvirus 5
ggcugacagucga

SEQ ID NO: 2026123 - RNA, 15 nt, Human herpesvirus 5
gguuguuucuccguc

SEQ ID NO: 2026124 - RNA, 18 nt, Human herpesvirus 5
ugcagggacagugcgcca

SEQ ID NO: 2026125 - RNA, 16 nt, Human herpesvirus 5
cgugggcuacuuugac

SEQ ID NO: 2026126 - RNA, 18 nt, Human herpesvirus 5
gcugcgaagaugcuaucc

SEQ ID NO: 2026127 - RNA, 15 nt, Human herpesvirus 5
cccagggcugcucca

SEQ ID NO: 2026128 - RNA, 16 nt, Human herpesvirus 5
ccacggcgucuuccuc

SEQ ID NO: 2026129 - RNA, 16 nt, Human herpesvirus 5
uucaauaaaaaccacc

SEQ ID NO: 2026130 - RNA, 21 nt, Human herpesvirus 5
gucucgggcucgcucggccuc

SEQ ID NO: 2026131 - RNA, 14 nt, Human herpesvirus 5
aaccugcugcacuu

SEQ ID NO: 2026132 - RNA, 14 nt, Human herpesvirus 5
gccccaucgggccc

SEQ ID NO: 2026133 - RNA, 16 nt, Human herpesvirus 5
cacagaccacgugccu

SEQ ID NO: 2026134 - RNA, 20 nt, Human herpesvirus 5
cuuuaggcggcgcagcgcca

SEQ ID NO: 2026135 - RNA, 15 nt, Human herpesvirus 5
cuggacgccugggcg

SEQ ID NO: 2026136 - RNA, 20 nt, Human herpesvirus 5
gacacaugcacaauacgaua

SEQ ID NO: 2026137 - RNA, 22 nt, Human herpesvirus 5
uaaaaugugcgaauuaggcaac

SEQ ID NO: 2026138 - RNA, 14 nt, Human herpesvirus 5
cauuuucuuucuag

SEQ ID NO: 2026139 - RNA, 15 nt, Human herpesvirus 5
gcaccaguuggccac

SEQ ID NO: 2026140 - RNA, 15 nt, Human herpesvirus 5
cuacuaccuccccua

SEQ ID NO: 2026141 - RNA, 22 nt, Human herpesvirus 5
cuggaaauucaauaaaaaccac

SEQ ID NO: 2026142 - RNA, 15 nt, Human herpesvirus 5
gccccaucauggccc

SEQ ID NO: 2026143 - RNA, 17 nt, Human herpesvirus 5
cucggugugcgacgcca

SEQ ID NO: 2026144 - RNA, 12 nt, Human herpesvirus 5
gggagccccauc

SEQ ID NO: 2026145 - RNA, 17 nt, Human herpesvirus 5
cggucccgacauggaga

SEQ ID NO: 2026146 - RNA, 15 nt, Human herpesvirus 5
acugcauccaucaca

SEQ ID NO: 2026147 - RNA, 16 nt, Human herpesvirus 5
gagcagccggagcccg

SEQ ID NO: 2026148 - RNA, 23 nt, Human herpesvirus 5
auuuugcgagagaugggccgcgg

SEQ ID NO: 2026149 - RNA, 21 nt, Human herpesvirus 5
ggccaacaagagaaagaccca

SEQ ID NO: 2026150 - RNA, 16 nt, Human herpesvirus 5
aaccaccgugucuccg

SEQ ID NO: 2026151 - RNA, 15 nt, Human herpesvirus 5
ggugaaggccgugga

SEQ ID NO: 2026152 - RNA, 16 nt, Human herpesvirus 5
aauauugcuucguaua

SEQ ID NO: 2026153 - RNA, 19 nt, Human herpesvirus 5
gcucggucagcuugaggcu

SEQ ID NO: 2026154 - RNA, 17 nt, Human herpesvirus 5
gcuacguaggccuccuc

SEQ ID NO: 2026155 - RNA, 23 nt, Human herpesvirus 5
gcagcccauccucguggaaggca

SEQ ID NO: 2026156 - RNA, 21 nt, Human herpesvirus 5
ccacggcgggucguuggcucc

SEQ ID NO: 2026157 - RNA, 15 nt, Human herpesvirus 5
cguuaucagaaagcu

SEQ ID NO: 2026158 - RNA, 13 nt, Human herpesvirus 5
gcgacggagagga

SEQ ID NO: 2026159 - RNA, 19 nt, Human herpesvirus 5
ccgccgucgcgccuuccuc

SEQ ID NO: 2026160 - RNA, 23 nt, Human herpesvirus 5
gaccacguagucgcgcgcgaagg

SEQ ID NO: 2026161 - RNA, 17 nt, Human herpesvirus 5
accagacauccaauuac

SEQ ID NO: 2026162 - RNA, 18 nt, Human herpesvirus 5
gggcagcagcggcggcua

SEQ ID NO: 2026163 - RNA, 18 nt, Human herpesvirus 5
ugcggcgcuucgagggcu

SEQ ID NO: 2026164 - RNA, 13 nt, Human herpesvirus 5
ugauccaggaggu

SEQ ID NO: 2026165 - RNA, 15 nt, Human herpesvirus 5
ggacacgguagacga

SEQ ID NO: 2026166 - RNA, 17 nt, Human herpesvirus 5
caacggccgccgcagcc

SEQ ID NO: 2026167 - RNA, 19 nt, Human herpesvirus 5
guuggcucccgcugugcug

SEQ ID NO: 2026168 - RNA, 13 nt, Human herpesvirus 5
cuucugcagcucc

SEQ ID NO: 2026169 - RNA, 13 nt, Human herpesvirus 5
cagugacugggua

SEQ ID NO: 2026170 - RNA, 14 nt, Human herpesvirus 5
gagagggucuuucu

SEQ ID NO: 2026171 - RNA, 15 nt, Human herpesvirus 5
auggacugucugcac

SEQ ID NO: 2026172 - RNA, 16 nt, Human herpesvirus 5
cauacacguugcuuuc

SEQ ID NO: 2026173 - RNA, 16 nt, Human herpesvirus 5
acgacguuuaaaguaa

SEQ ID NO: 2026174 - RNA, 17 nt, Human herpesvirus 5
gaucuugacgcugcugg

SEQ ID NO: 2026175 - RNA, 18 nt, Human herpesvirus 5
gcggcccuucaacggcac

SEQ ID NO: 2026176 - RNA, 19 nt, Human herpesvirus 5
gaucaucuguuuuugcugc

SEQ ID NO: 2026177 - RNA, 13 nt, Human herpesvirus 5
gugccagcuggcg

SEQ ID NO: 2026178 - RNA, 24 nt, Human herpesvirus 5
acgcgacuaugagggccugcggcg

SEQ ID NO: 2026179 - RNA, 18 nt, Human herpesvirus 5
ggcugccuguuccugcug

SEQ ID NO: 2026180 - RNA, 13 nt, Human herpesvirus 5
cgucggcugccug

SEQ ID NO: 2026181 - RNA, 23 nt, Human herpesvirus 5
ggaucggacacuuuaggcggcgc

SEQ ID NO: 2026182 - RNA, 18 nt, Human herpesvirus 5
aaccgcaugggaaaguac

SEQ ID NO: 2026183 - RNA, 15 nt, Human herpesvirus 5
ccucggccucuuccu

SEQ ID NO: 2026184 - RNA, 14 nt, Human herpesvirus 5
uccuccucccucgc

SEQ ID NO: 2026185 - RNA, 16 nt, Human herpesvirus 5
ugcugcugagacugag

SEQ ID NO: 2026186 - RNA, 13 nt, Human herpesvirus 5
ugcuccucuucca

SEQ ID NO: 2026187 - RNA, 18 nt, Human herpesvirus 5
guggggcugcucaacuuu

SEQ ID NO: 2026188 - RNA, 19 nt, Human herpesvirus 5
ccacgguuuguggcaaggc

SEQ ID NO: 2026189 - RNA, 17 nt, Human herpesvirus 5
cuuucucaucucagccu

SEQ ID NO: 2026190 - RNA, 20 nt, Human herpesvirus 5
acgagcaucgcaacaacagc

SEQ ID NO: 2026191 - RNA, 12 nt, Human herpesvirus 5
ggucggcugccg

SEQ ID NO: 2026192 - RNA, 21 nt, Human herpesvirus 5
ggagguccuuuggguccagcc

SEQ ID NO: 2026193 - RNA, 13 nt, Human herpesvirus 5
ugcaccugggugg

SEQ ID NO: 2026194 - RNA, 15 nt, Human herpesvirus 5
guauaacuaacgugu

SEQ ID NO: 2026195 - RNA, 16 nt, Human herpesvirus 5
augcucaagacagaca

SEQ ID NO: 2026196 - RNA, 17 nt, Human herpesvirus 5
cacguguggaagacaug

SEQ ID NO: 2026197 - RNA, 15 nt, Human herpesvirus 5
gauggccgacgaggc

SEQ ID NO: 2026198 - RNA, 13 nt, Human herpesvirus 5
aaguguugaccac

SEQ ID NO: 2026199 - RNA, 14 nt, Human herpesvirus 5
ggcgguggcugcgc

SEQ ID NO: 2026200 - RNA, 15 nt, Human herpesvirus 5
acgucccgcgcggau

SEQ ID NO: 2026201 - RNA, 19 nt, Human herpesvirus 5
ggcccugcugacgcuguug

SEQ ID NO: 2026202 - RNA, 21 nt, Human herpesvirus 5
cccuagcaacgcgacuacggu

SEQ ID NO: 2026203 - RNA, 23 nt, Human herpesvirus 5
gggaggacgaaccgcgacaacac

SEQ ID NO: 2026204 - RNA, 12 nt, Human herpesvirus 5
gcgucaaagcuc

SEQ ID NO: 2026205 - RNA, 14 nt, Human herpesvirus 5
ccgcuuccucagcu

SEQ ID NO: 2026206 - RNA, 16 nt, Human herpesvirus 5
gauguacgcgugccug

SEQ ID NO: 2026207 - RNA, 19 nt, Human herpesvirus 5
cgcacuuuuuuuacuagua

SEQ ID NO: 2026208 - RNA, 20 nt, Human herpesvirus 5
gacacagcagcaccaggcga

SEQ ID NO: 2026209 - RNA, 11 nt, Human herpesvirus 5
auucugacacg

SEQ ID NO: 2026210 - RNA, 12 nt, Human herpesvirus 5
uaucuggggagg

SEQ ID NO: 2026211 - RNA, 17 nt, Human herpesvirus 5
aaaaucggugguggugu

SEQ ID NO: 2026212 - RNA, 19 nt, Human herpesvirus 5
cccugugggcccaugacgc

SEQ ID NO: 2026213 - RNA, 18 nt, Human herpesvirus 5
uguauggaggucacuguc

SEQ ID NO: 2026214 - RNA, 18 nt, Human herpesvirus 5
aggcggcguggacuggga

SEQ ID NO: 2026215 - RNA, 17 nt, Human herpesvirus 5
gccgaacagcagcucuu

SEQ ID NO: 2026216 - RNA, 22 nt, Human herpesvirus 5
caucaguuucugcggcguaccu

SEQ ID NO: 2026217 - RNA, 15 nt, Human herpesvirus 5
agcacucggcgcugu

SEQ ID NO: 2026218 - RNA, 21 nt, Human herpesvirus 5
guugcguguuacgcggccgcc

SEQ ID NO: 2026219 - RNA, 16 nt, Human herpesvirus 5
ucuggucuucccuaca

SEQ ID NO: 2026220 - RNA, 23 nt, Human herpesvirus 5
guggcucuugcgcuucugcagcu

SEQ ID NO: 2026221 - RNA, 12 nt, Human herpesvirus 5
acgguggugugc

SEQ ID NO: 2026222 - RNA, 14 nt, Human herpesvirus 5
uccccugacccucc

SEQ ID NO: 2026223 - RNA, 19 nt, Human herpesvirus 5
cgagcuuauugagcgcagc

SEQ ID NO: 2026224 - RNA, 18 nt, Human herpesvirus 5
gugcccgaagaggacgaa

SEQ ID NO: 2026225 - RNA, 14 nt, Human herpesvirus 5
augaggaagcgggg

SEQ ID NO: 2026226 - RNA, 13 nt, Human herpesvirus 5
ugcagcugcacca

SEQ ID NO: 2026227 - RNA, 16 nt, Human herpesvirus 5
gcugcacgaccugcac

SEQ ID NO: 2026228 - RNA, 23 nt, Human herpesvirus 5
cuacgguggcgcgacggugaugc

SEQ ID NO: 2026229 - RNA, 22 nt, Human herpesvirus 5
gucucuguuuuuuuuuguuaac

SEQ ID NO: 2026230 - RNA, 15 nt, Human herpesvirus 5
gucccgugugugggg

SEQ ID NO: 2026231 - RNA, 17 nt, Human herpesvirus 5
cccgggccgccugagga

SEQ ID NO: 2026232 - RNA, 17 nt, Human herpesvirus 5
cucgggugcaccgcggc

SEQ ID NO: 2026233 - RNA, 21 nt, Human herpesvirus 5
ugagacccgcgucccuggggc

SEQ ID NO: 2026234 - RNA, 17 nt, Human herpesvirus 5
cgucaggaaucugggag

SEQ ID NO: 2026235 - RNA, 22 nt, Human herpesvirus 5
ugccggucuacagacugggcga

SEQ ID NO: 2026236 - RNA, 21 nt, Human herpesvirus 5
gcugacgcggacgaggaacag

SEQ ID NO: 2026237 - RNA, 22 nt, Human herpesvirus 5
cgaugugugggaccuggucaag

SEQ ID NO: 2026238 - RNA, 19 nt, Human herpesvirus 5
acuaacguguccgcggaca

SEQ ID NO: 2026239 - RNA, 17 nt, Human herpesvirus 5
guccuagcacgucagug

SEQ ID NO: 2026240 - RNA, 13 nt, Human herpesvirus 5
aaccuggagcagc

SEQ ID NO: 2026241 - RNA, 12 nt, Human herpesvirus 5
cacuagccgggc

SEQ ID NO: 2026242 - RNA, 19 nt, Human herpesvirus 5
cguggugacugagcacagc

SEQ ID NO: 2026243 - RNA, 20 nt, Human herpesvirus 5
cuaguaaaagggacgucaaa

SEQ ID NO: 2026244 - RNA, 23 nt, Human herpesvirus 5
gguguacgugcgguaacuggcag

SEQ ID NO: 2026245 - RNA, 21 nt, Human herpesvirus 5
cgaguacacguuaccgucgcc

SEQ ID NO: 2026246 - RNA, 21 nt, Human herpesvirus 5
aaaggauggacguacuggacc

SEQ ID NO: 2026247 - RNA, 12 nt, Human herpesvirus 5
agcuucggccgg

SEQ ID NO: 2026248 - RNA, 16 nt, Human herpesvirus 5
acuacaacagcggguc

SEQ ID NO: 2026249 - RNA, 15 nt, Human herpesvirus 5
ggcgcuucgagggcu

SEQ ID NO: 2026250 - RNA, 13 nt, Human herpesvirus 5
cucacgggaaggc

SEQ ID NO: 2026251 - RNA, 22 nt, Human herpesvirus 5
gggggaaccuacggcggcgguc

SEQ ID NO: 2026252 - RNA, 17 nt, Human herpesvirus 5
gguguuaaggauucuga

SEQ ID NO: 2026253 - RNA, 15 nt, Human herpesvirus 5
aaaguagguacuaac

SEQ ID NO: 2026254 - RNA, 17 nt, Human herpesvirus 5
gcgguggucgaugcuga

SEQ ID NO: 2026255 - RNA, 18 nt, Human herpesvirus 5
gcgcuuuugaccgcgagc

SEQ ID NO: 2026256 - RNA, 21 nt, Human herpesvirus 5
uugagaguggugggaaugcac

SEQ ID NO: 2026257 - RNA, 20 nt, Human herpesvirus 5
cagauauccacaacgacaaa

SEQ ID NO: 2026258 - RNA, 16 nt, Human herpesvirus 5
cacagcgucuggccag

SEQ ID NO: 2026259 - RNA, 18 nt, Human herpesvirus 5
gcucaggucgcccaggcu

SEQ ID NO: 2026260 - RNA, 17 nt, Human herpesvirus 5
uagcgcuugcggcacag

SEQ ID NO: 2026261 - RNA, 14 nt, Human herpesvirus 5
ccgcccaaacaucu

SEQ ID NO: 2026262 - RNA, 18 nt, Human herpesvirus 5
ccggcguggcggccgacg

SEQ ID NO: 2026263 - RNA, 23 nt, Human herpesvirus 5
uugggacacugggcguuguugag

SEQ ID NO: 2026264 - RNA, 18 nt, Human herpesvirus 5
uggauccgcuuccucagc

SEQ ID NO: 2026265 - RNA, 14 nt, Human herpesvirus 5
gcgcguuauaagca

SEQ ID NO: 2026266 - RNA, 18 nt, Human herpesvirus 5
cggcgguacugaagccgc

SEQ ID NO: 2026267 - RNA, 15 nt, Human herpesvirus 5
gcgcggaguccuggg

SEQ ID NO: 2026268 - RNA, 18 nt, Human herpesvirus 5
aaacaccguguggugguu

SEQ ID NO: 2026269 - RNA, 21 nt, Human herpesvirus 5
accgcgcccacuggaguugcu

SEQ ID NO: 2026270 - RNA, 17 nt, Human herpesvirus 5
cugucaucacgguacac

SEQ ID NO: 2026271 - RNA, 21 nt, Human herpesvirus 5
ugcccuuuacggugcugcguc

SEQ ID NO: 2026272 - RNA, 13 nt, Human herpesvirus 5
ccuaugaggacga

SEQ ID NO: 2026273 - RNA, 13 nt, Human herpesvirus 5
ccaugcagaccua

SEQ ID NO: 2026274 - RNA, 16 nt, Human herpesvirus 5
cgugaaacagcagcuc

SEQ ID NO: 2026275 - RNA, 18 nt, Human herpesvirus 5
acagcggcgacagacggc

SEQ ID NO: 2026276 - RNA, 22 nt, Human herpesvirus 5
cgacuggggucaaaagccuggg

SEQ ID NO: 2026277 - RNA, 18 nt, Human herpesvirus 5
agacaggcggccagcuuc

SEQ ID NO: 2026278 - RNA, 17 nt, Human herpesvirus 5
ccucaccgaccagcacu

SEQ ID NO: 2026279 - RNA, 19 nt, Human herpesvirus 5
aaucuuccccucugcugcu

SEQ ID NO: 2026280 - RNA, 23 nt, Human herpesvirus 5
cgcggaacgagagcgguccgccc

SEQ ID NO: 2026281 - RNA, 19 nt, Human herpesvirus 5
cucaaaacaucaccaccau

SEQ ID NO: 2026282 - RNA, 15 nt, Human herpesvirus 5
uaccgaggcgccgcc

SEQ ID NO: 2026283 - RNA, 20 nt, Human herpesvirus 5
agaccgcaacaacagcagca

SEQ ID NO: 2026284 - RNA, 14 nt, Human herpesvirus 5
aucaaugaagacuu

SEQ ID NO: 2026285 - RNA, 13 nt, Human herpesvirus 5
ucccaucuucuaa

SEQ ID NO: 2026286 - RNA, 20 nt, Human herpesvirus 5
gcgacgauaggucgaaagcc

SEQ ID NO: 2026287 - RNA, 21 nt, Human herpesvirus 5
agcagcaaugucguaguacaa

SEQ ID NO: 2026288 - RNA, 13 nt, Human herpesvirus 5
uaagcaccguggg

SEQ ID NO: 2026289 - RNA, 14 nt, Human herpesvirus 5
auccuuggaagagg

SEQ ID NO: 2026290 - RNA, 17 nt, Human herpesvirus 5
aucauaugcuaauauau

SEQ ID NO: 2026291 - RNA, 20 nt, Human herpesvirus 5
cuuuccauucuuccgugucc

SEQ ID NO: 2026292 - RNA, 21 nt, Human herpesvirus 5
gccugggaacgcgcgcacggc

SEQ ID NO: 2026293 - RNA, 15 nt, Human herpesvirus 5
cggguggagaugagg

SEQ ID NO: 2026294 - RNA, 15 nt, Human herpesvirus 5
gagcgccuucugcua

SEQ ID NO: 2026295 - RNA, 20 nt, Human herpesvirus 5
uccaucggcagauccggcaa

SEQ ID NO: 2026296 - RNA, 21 nt, Human herpesvirus 5
cuagcgacggcggccauggag

SEQ ID NO: 2026297 - RNA, 13 nt, Human herpesvirus 5
caguguagauuua

SEQ ID NO: 2026298 - RNA, 14 nt, Human herpesvirus 5
ccgggcggcuuugc

SEQ ID NO: 2026299 - RNA, 22 nt, Human herpesvirus 5
uucuacggaguuuucccucagc

SEQ ID NO: 2026300 - RNA, 22 nt, Human herpesvirus 5
gacaaacacuaccgucgccacc

SEQ ID NO: 2026301 - RNA, 15 nt, Human herpesvirus 5
cucugcuacuggccc

SEQ ID NO: 2026302 - RNA, 17 nt, Human herpesvirus 5
ucguauucgucauuugu

SEQ ID NO: 2026303 - RNA, 16 nt, Human herpesvirus 5
ucgacgcaucugucau

SEQ ID NO: 2026304 - RNA, 22 nt, Human herpesvirus 5
acuuuguagugcgcgccgccga

SEQ ID NO: 2026305 - RNA, 18 nt, Human herpesvirus 5
aacuuugccgucaugccu

SEQ ID NO: 2026306 - RNA, 15 nt, Human herpesvirus 5
aucugucaccucaca

SEQ ID NO: 2026307 - RNA, 23 nt, Human herpesvirus 5
gucccuuuuacuaguauccacgu

SEQ ID NO: 2026308 - RNA, 14 nt, Human herpesvirus 5
cccugcggcgccgu

SEQ ID NO: 2026309 - RNA, 18 nt, Human herpesvirus 5
uucaauaaaaaccaccgu

SEQ ID NO: 2026310 - RNA, 13 nt, Human herpesvirus 5
caacaauaaagcu

SEQ ID NO: 2026311 - RNA, 20 nt, Human herpesvirus 5
gcccugcugacgcuguugag

SEQ ID NO: 2026312 - RNA, 20 nt, Human herpesvirus 5
ggcgacgcgguuaagggaga

SEQ ID NO: 2026313 - RNA, 23 nt, Human herpesvirus 5
gaguuggugcagcugcgccugga

SEQ ID NO: 2026314 - RNA, 18 nt, Human herpesvirus 5
caggugacauccucgccc

SEQ ID NO: 2026315 - RNA, 22 nt, Human herpesvirus 5
ggcguggcggccgacggcagcg

SEQ ID NO: 2026316 - RNA, 14 nt, Human herpesvirus 5
aagaccgcugccuc

SEQ ID NO: 2026317 - RNA, 19 nt, Human herpesvirus 5
ggcuggcgacccgcagucu

SEQ ID NO: 2026318 - RNA, 16 nt, Human herpesvirus 5
cauacagcaacaccau

SEQ ID NO: 2026319 - RNA, 17 nt, Human herpesvirus 5
cgccucuucuggcccuc

SEQ ID NO: 2026320 - RNA, 23 nt, Human herpesvirus 5
gccucaaaaagcagguggaggac

SEQ ID NO: 2026321 - RNA, 18 nt, Human herpesvirus 5
ggccgauccacgggccgc

SEQ ID NO: 2026322 - RNA, 16 nt, Human herpesvirus 5
gaaugaaccuuguaau

SEQ ID NO: 2026323 - RNA, 23 nt, Human herpesvirus 5
cacagcggaaaaugccgccgcca

SEQ ID NO: 2026324 - RNA, 19 nt, Human herpesvirus 5
ccuacgacaacaucccucc

SEQ ID NO: 2026325 - RNA, 23 nt, Human herpesvirus 5
aucugucaccucacaagcgucaa

SEQ ID NO: 2026326 - RNA, 19 nt, Human herpesvirus 5
gcagccguuuccagagaac

SEQ ID NO: 2026327 - RNA, 20 nt, Human herpesvirus 5
ugaaacgcuuuaagcugcuc

SEQ ID NO: 2026328 - RNA, 20 nt, Human herpesvirus 5
gccgggaaagacgggcgaca

SEQ ID NO: 2026329 - RNA, 13 nt, Human herpesvirus 5
gcagcgggccugu

SEQ ID NO: 2026330 - RNA, 20 nt, Human herpesvirus 5
gccaacuccgugccagcugg

SEQ ID NO: 2026331 - RNA, 23 nt, Human herpesvirus 5
ccugugugaucugggcagcggcu

SEQ ID NO: 2026332 - RNA, 17 nt, Human herpesvirus 5
acuauuguauacucuau

SEQ ID NO: 2026333 - RNA, 18 nt, Human herpesvirus 5
uagacaggguaacagccu

SEQ ID NO: 2026334 - RNA, 16 nt, Human herpesvirus 5
uccgcgugcuccacca

SEQ ID NO: 2026335 - RNA, 13 nt, Human herpesvirus 5
uugacgcugcugg

SEQ ID NO: 2026336 - RNA, 13 nt, Human herpesvirus 5
agacgggccuggu

SEQ ID NO: 2026337 - RNA, 14 nt, Human herpesvirus 5
acuuuggcucuuuc

SEQ ID NO: 2026338 - RNA, 23 nt, Human herpesvirus 5
cucagcggcguguacagcuaccu

SEQ ID NO: 2026339 - RNA, 16 nt, Human herpesvirus 5
uugguaucuacaucag

SEQ ID NO: 2026340 - RNA, 16 nt, Human herpesvirus 5
cuggcccaaagaccgc

SEQ ID NO: 2026341 - RNA, 20 nt, Human herpesvirus 5
auugacgcgguuuaucauga

SEQ ID NO: 2026342 - RNA, 15 nt, Human herpesvirus 5
gagcuggccagcaaa

SEQ ID NO: 2026343 - RNA, 20 nt, Human herpesvirus 5
aguggggcaacugcugccuc

SEQ ID NO: 2026344 - RNA, 13 nt, Human herpesvirus 5
cuggaucugcccu

SEQ ID NO: 2026345 - RNA, 13 nt, Human herpesvirus 5
gaaaaguggcaga

SEQ ID NO: 2026346 - RNA, 19 nt, Human herpesvirus 5
cacuaauuuauccaagaua

SEQ ID NO: 2026347 - RNA, 19 nt, Human herpesvirus 5
cguggcccuggucuggccc

SEQ ID NO: 2026348 - RNA, 18 nt, Human herpesvirus 5
agcagccaccgacacagc

SEQ ID NO: 2026349 - RNA, 23 nt, Human herpesvirus 5
cugcagcacgcgauuggccagca

SEQ ID NO: 2026350 - RNA, 12 nt, Human herpesvirus 5
cacgcucgcucu

SEQ ID NO: 2026351 - RNA, 20 nt, Human herpesvirus 5
aaagugauuauaucuuucua

SEQ ID NO: 2026352 - RNA, 16 nt, Human herpesvirus 5
aaagagccauguuaug

SEQ ID NO: 2026353 - RNA, 19 nt, Human herpesvirus 5
cccgccaccaugcauccca

SEQ ID NO: 2026354 - RNA, 17 nt, Human herpesvirus 5
aaaaaucgauauuugaa

SEQ ID NO: 2026355 - RNA, 23 nt, Human herpesvirus 5
gcucagcggcguguacagcuacc

SEQ ID NO: 2026356 - RNA, 20 nt, Human herpesvirus 5
cgaguggggcaacugcugcc

SEQ ID NO: 2026357 - RNA, 18 nt, Human herpesvirus 5
ggucauguucucccagga

SEQ ID NO: 2026358 - RNA, 16 nt, Human herpesvirus 5
aucacgaaaggcaccg

SEQ ID NO: 2026359 - RNA, 16 nt, Human herpesvirus 5
cgguggugacugggga

SEQ ID NO: 2026360 - RNA, 22 nt, Human herpesvirus 5
cagccaccgcgaggccacccac

SEQ ID NO: 2026361 - RNA, 17 nt, Human herpesvirus 5
agcugcuuucuuuuugc

SEQ ID NO: 2026362 - RNA, 14 nt, Human herpesvirus 5
cgcaggccgccgcc

SEQ ID NO: 2026363 - RNA, 13 nt, Human herpesvirus 5
cgcguccgggcuu

SEQ ID NO: 2026364 - RNA, 16 nt, Human herpesvirus 5
uaaaaacaacgucccc

SEQ ID NO: 2026365 - RNA, 15 nt, Human herpesvirus 5
ccgcaagcgccgcca

SEQ ID NO: 2026366 - RNA, 15 nt, Human herpesvirus 5
cugucggggcgcaga

SEQ ID NO: 2026367 - RNA, 18 nt, Human herpesvirus 5
uccggcgucgcuggcgcu

SEQ ID NO: 2026368 - RNA, 13 nt, Human herpesvirus 5
uggauacuaguaa

SEQ ID NO: 2026369 - RNA, 17 nt, Human herpesvirus 5
ucacuuuauugaaaucu

SEQ ID NO: 2026370 - RNA, 17 nt, Human herpesvirus 5
ucuugauacagggcgaa

SEQ ID NO: 2026371 - RNA, 17 nt, Human herpesvirus 5
ccccucugcugcugguu

SEQ ID NO: 2026372 - RNA, 12 nt, Human herpesvirus 5
cccucaugacgc

SEQ ID NO: 2026373 - RNA, 13 nt, Human herpesvirus 5
gcuugcuggcuug

SEQ ID NO: 2026374 - RNA, 15 nt, Human herpesvirus 5
ggccuacggcugcau

SEQ ID NO: 2026375 - RNA, 12 nt, Human herpesvirus 5
uggggaugauga

SEQ ID NO: 2026376 - RNA, 12 nt, Human herpesvirus 5
ugaaccuucccc

SEQ ID NO: 2026377 - RNA, 20 nt, Human herpesvirus 5
agcgugcucagcugguggcu

SEQ ID NO: 2026378 - RNA, 19 nt, Human herpesvirus 5
gcacaccuuuaagguacgg

SEQ ID NO: 2026379 - RNA, 17 nt, Human herpesvirus 5
uugcugacgcuggaaac

SEQ ID NO: 2026380 - RNA, 17 nt, Human herpesvirus 5
cuggaagcagcaauguc

SEQ ID NO: 2026381 - RNA, 18 nt, Human herpesvirus 5
caugaggcgguggcugcg

SEQ ID NO: 2026382 - RNA, 19 nt, Human herpesvirus 5
gugacccgccccccggcag

SEQ ID NO: 2026383 - RNA, 13 nt, Human herpesvirus 5
acggcgguuugaa

SEQ ID NO: 2026384 - RNA, 23 nt, Human herpesvirus 5
cggagcccggucugagcuccgac

SEQ ID NO: 2026385 - RNA, 19 nt, Human herpesvirus 5
gacggcgguacugaagccg

SEQ ID NO: 2026386 - RNA, 19 nt, Human herpesvirus 5
cccgucgugcucuugacgg

SEQ ID NO: 2026387 - RNA, 23 nt, Human herpesvirus 5
gcucacgucacuacucugggaua

SEQ ID NO: 2026388 - RNA, 15 nt, Human herpesvirus 5
acuccgugcuguugg

SEQ ID NO: 2026389 - RNA, 15 nt, Human herpesvirus 5
aauaaagagaguugu

SEQ ID NO: 2026390 - RNA, 16 nt, Human herpesvirus 5
accgcaguugcugccu

SEQ ID NO: 2026391 - RNA, 22 nt, Human herpesvirus 5
gauccaaggccuccagcgccuc

SEQ ID NO: 2026392 - RNA, 15 nt, Human herpesvirus 5
gaccugcacgacauc

SEQ ID NO: 2026393 - RNA, 19 nt, Human herpesvirus 5
gccgcgugccugggaacgc

SEQ ID NO: 2026394 - RNA, 16 nt, Human herpesvirus 5
cccugacacguaauac

SEQ ID NO: 2026395 - RNA, 12 nt, Human herpesvirus 5
uggggggugagg

SEQ ID NO: 2026396 - RNA, 12 nt, Human herpesvirus 5
caggcgcgcaga

SEQ ID NO: 2026397 - RNA, 23 nt, Human herpesvirus 5
cugauuaaccauaucgugaacca

SEQ ID NO: 2026398 - RNA, 14 nt, Human herpesvirus 5
uuguugccgcugga

SEQ ID NO: 2026399 - RNA, 22 nt, Human herpesvirus 5
gaaagaggacguucgcucgggc

SEQ ID NO: 2026400 - RNA, 21 nt, Human herpesvirus 5
gcaacuaucaccaaacaacac

SEQ ID NO: 2026401 - RNA, 18 nt, Human herpesvirus 5
acgacggcgguuucagcu

SEQ ID NO: 2026402 - RNA, 19 nt, Human herpesvirus 5
cgacguuucgcgaggacaa

SEQ ID NO: 2026403 - RNA, 22 nt, Human herpesvirus 5
ucgccuuccagcuuaccgccac

SEQ ID NO: 2026404 - RNA, 20 nt, Human herpesvirus 5
ugcagaccgaggcgcuggac

SEQ ID NO: 2026405 - RNA, 12 nt, Human herpesvirus 5
acuuucaaugau

SEQ ID NO: 2026406 - RNA, 24 nt, Human herpesvirus 5
cacgcggcguacgucaccgcgcua

SEQ ID NO: 2026407 - RNA, 15 nt, Human herpesvirus 5
cgcguagccuccucc

SEQ ID NO: 2026408 - RNA, 17 nt, Human herpesvirus 5
ggguggcgaagcgggaa

SEQ ID NO: 2026409 - RNA, 20 nt, Human herpesvirus 5
augccggccucaucuguaaa

SEQ ID NO: 2026410 - RNA, 14 nt, Human herpesvirus 5
gguccgcccgccga

SEQ ID NO: 2026411 - RNA, 13 nt, Human herpesvirus 5
cugugccugucau

SEQ ID NO: 2026412 - RNA, 17 nt, Human herpesvirus 5
ugaagcggaugauucgc

SEQ ID NO: 2026413 - RNA, 13 nt, Human herpesvirus 5
gcggcgguggccg

SEQ ID NO: 2026414 - RNA, 12 nt, Human herpesvirus 5
gucucuacggca

SEQ ID NO: 2026415 - RNA, 12 nt, Human herpesvirus 5
auuugaagccag

SEQ ID NO: 2026416 - RNA, 15 nt, Human herpesvirus 5
aggguaucuggggag

SEQ ID NO: 2026417 - RNA, 21 nt, Human herpesvirus 5
ucaaacagcacauuagacaca

SEQ ID NO: 2026418 - RNA, 15 nt, Human herpesvirus 5
acaggcuaugggaag

SEQ ID NO: 2026419 - RNA, 19 nt, Human herpesvirus 5
uacccgccccagcagacca

SEQ ID NO: 2026420 - RNA, 12 nt, Human herpesvirus 5
ccgggaucacga

SEQ ID NO: 2026421 - RNA, 19 nt, Human herpesvirus 5
cgaggacaaccgcauccug

SEQ ID NO: 2026422 - RNA, 20 nt, Human herpesvirus 5
uagacauuccccaccuuccc

SEQ ID NO: 2026423 - RNA, 21 nt, Human herpesvirus 5
gugacauccucgcccaggcug

SEQ ID NO: 2026424 - RNA, 13 nt, Human herpesvirus 5
cuggaggcucugu

SEQ ID NO: 2026425 - RNA, 23 nt, Human herpesvirus 5
gucggugauuucuugcuugcccg

SEQ ID NO: 2026426 - RNA, 15 nt, Human herpesvirus 5
gcuaauuauugccau

SEQ ID NO: 2026427 - RNA, 15 nt, Human herpesvirus 5
acacaccgcuuuggu

SEQ ID NO: 2026428 - RNA, 16 nt, Human herpesvirus 5
acagguagguggccau

SEQ ID NO: 2026429 - RNA, 13 nt, Human herpesvirus 5
uggaagcugcugg

SEQ ID NO: 2026430 - RNA, 17 nt, Human herpesvirus 5
auuauucuuggaugcua

SEQ ID NO: 2026431 - RNA, 16 nt, Human herpesvirus 5
gcggcguggacuggga

SEQ ID NO: 2026432 - RNA, 18 nt, Human herpesvirus 5
cgaugguauuacgcccga

SEQ ID NO: 2026433 - RNA, 20 nt, Human herpesvirus 5
gucaggacuggaagugucac

SEQ ID NO: 2026434 - RNA, 18 nt, Human herpesvirus 5
ccgcucaggucgcccagg

SEQ ID NO: 2026435 - RNA, 22 nt, Human herpesvirus 5
uggaaaugcccgccaccaugca

SEQ ID NO: 2026436 - RNA, 14 nt, Human herpesvirus 5
cagcacauuagaca

SEQ ID NO: 2026437 - RNA, 15 nt, Human herpesvirus 5
ccaagccgcagcgcg

SEQ ID NO: 2026438 - RNA, 19 nt, Human herpesvirus 5
agacacgcgcuucuggucg

SEQ ID NO: 2026439 - RNA, 19 nt, Human herpesvirus 5
cucgccgcagaccauccuc

SEQ ID NO: 2026440 - RNA, 18 nt, Human herpesvirus 5
cgucccuggggcugcugc

SEQ ID NO: 2026441 - RNA, 17 nt, Human herpesvirus 5
ugucagcgccgggugcg

SEQ ID NO: 2026442 - RNA, 20 nt, Human herpesvirus 5
cucaccgugcucgugcccau

SEQ ID NO: 2026443 - RNA, 11 nt, Human herpesvirus 5
cuuuuugcaaa

SEQ ID NO: 2026444 - RNA, 16 nt, Human herpesvirus 5
auccuuuucaugcuca

SEQ ID NO: 2026445 - RNA, 15 nt, Human herpesvirus 5
ugcgugucgcugggc

SEQ ID NO: 2026446 - RNA, 12 nt, Human herpesvirus 5
cgaugauacauc

SEQ ID NO: 2026447 - RNA, 22 nt, Human herpesvirus 5
caucaucaacagcagcaacagc

SEQ ID NO: 2026448 - RNA, 14 nt, Human herpesvirus 5
cgcgugcuccacca

SEQ ID NO: 2026449 - RNA, 12 nt, Human herpesvirus 5
cgcucacagucu

SEQ ID NO: 2026450 - RNA, 19 nt, Human herpesvirus 5
cugcacgaccugcuccagu

SEQ ID NO: 2026451 - RNA, 22 nt, Human herpesvirus 5
cugcggcguaccuacggaccgc

SEQ ID NO: 2026452 - RNA, 12 nt, Human herpesvirus 5
aaggcacacggu

SEQ ID NO: 2026453 - RNA, 18 nt, Human herpesvirus 5
gcagaaaagccggcucca

SEQ ID NO: 2026454 - RNA, 18 nt, Human herpesvirus 5
uggucauguucucccagg

SEQ ID NO: 2026455 - RNA, 17 nt, Human herpesvirus 5
ggcucacguagcaggcc

SEQ ID NO: 2026456 - RNA, 15 nt, Human herpesvirus 5
cuccacgucuucaaa

SEQ ID NO: 2026457 - RNA, 16 nt, Human herpesvirus 5
ucguguccggacccca

SEQ ID NO: 2026458 - RNA, 17 nt, Human herpesvirus 5
cgccgaucauguccgag

SEQ ID NO: 2026459 - RNA, 22 nt, Human herpesvirus 5
gagccccaucauggcccaagga

SEQ ID NO: 2026460 - RNA, 12 nt, Human herpesvirus 5
gcgcagcgggcu

SEQ ID NO: 2026461 - RNA, 19 nt, Human herpesvirus 5
aaaagggacgucaaagcuc

SEQ ID NO: 2026462 - RNA, 12 nt, Human herpesvirus 5
cuccucugccug

SEQ ID NO: 2026463 - RNA, 23 nt, Human herpesvirus 5
guaaugccaugcggauccagcug

SEQ ID NO: 2026464 - RNA, 23 nt, Human herpesvirus 5
guaagguuuugcucuaaaaacac

SEQ ID NO: 2026465 - RNA, 23 nt, Human herpesvirus 5
uccaggcggagaugaggacgacg

SEQ ID NO: 2026466 - RNA, 13 nt, Human herpesvirus 5
cuggauacaagcu

SEQ ID NO: 2026467 - RNA, 16 nt, Human herpesvirus 5
cgagucggauggcuuu

SEQ ID NO: 2026468 - RNA, 18 nt, Human herpesvirus 5
gugcucgggcgugugggu

SEQ ID NO: 2026469 - RNA, 12 nt, Human herpesvirus 5
cugcuccagaag

SEQ ID NO: 2026470 - RNA, 17 nt, Human herpesvirus 5
cuguggaauacccagcu

SEQ ID NO: 2026471 - RNA, 14 nt, Human herpesvirus 5
ggaacggagcagcc

SEQ ID NO: 2026472 - RNA, 21 nt, Human herpesvirus 5
gacucagggcugggauccgcc

SEQ ID NO: 2026473 - RNA, 21 nt, Human herpesvirus 5
cgacagaugcggcgguuacac

SEQ ID NO: 2026474 - RNA, 14 nt, Human herpesvirus 5
guauccacgucacu

SEQ ID NO: 2026475 - RNA, 16 nt, Human herpesvirus 5
augccucuacaucacu

SEQ ID NO: 2026476 - RNA, 14 nt, Human herpesvirus 5
ugucugcagccggu

SEQ ID NO: 2026477 - RNA, 21 nt, Human herpesvirus 5
aggcucgcaaagacgugccac

SEQ ID NO: 2026478 - RNA, 12 nt, Human herpesvirus 5
cagcccagggau

SEQ ID NO: 2026479 - RNA, 20 nt, Human herpesvirus 5
cgcuggaggacgcgcuggcu

SEQ ID NO: 2026480 - RNA, 23 nt, Human herpesvirus 5
cgggccgcgugccugggaacgcg

SEQ ID NO: 2026481 - RNA, 22 nt, Human herpesvirus 5
gcacaccuauggcgccgugggu

SEQ ID NO: 2026482 - RNA, 14 nt, Human herpesvirus 5
ugcccugugggccc

SEQ ID NO: 2026483 - RNA, 20 nt, Human herpesvirus 5
ucgggcgcaucacccgccuc

SEQ ID NO: 2026484 - RNA, 22 nt, Human herpesvirus 5
cucgcuuacgucuacagcaugg

SEQ ID NO: 2026485 - RNA, 17 nt, Human herpesvirus 5
cugaucacguuguccuu

SEQ ID NO: 2026486 - RNA, 20 nt, Human herpesvirus 5
cuuuagccaggugaccagca

SEQ ID NO: 2026487 - RNA, 11 nt, Human herpesvirus 5
cccguggccca

SEQ ID NO: 2026488 - RNA, 12 nt, Human herpesvirus 5
ucccucagccuc

SEQ ID NO: 2026489 - RNA, 20 nt, Human herpesvirus 5
aaugcuaguuuguagaggcu

SEQ ID NO: 2026490 - RNA, 12 nt, Human herpesvirus 5
caugaacaaaaa

SEQ ID NO: 2026491 - RNA, 19 nt, Human herpesvirus 5
agucauuaugauuuccucc

SEQ ID NO: 2026492 - RNA, 18 nt, Human herpesvirus 5
ccgucacgacgcuccguc

SEQ ID NO: 2026493 - RNA, 22 nt, Human herpesvirus 5
cacgggcucguguggcagcugg

SEQ ID NO: 2026494 - RNA, 18 nt, Human herpesvirus 5
cugggcgcccccaccccc

SEQ ID NO: 2026495 - RNA, 13 nt, Human herpesvirus 5
gcgagcugggcga

SEQ ID NO: 2026496 - RNA, 21 nt, Human herpesvirus 5
ccgugacgucgcggcaccagg

SEQ ID NO: 2026497 - RNA, 19 nt, Human herpesvirus 5
ggacucuuuaaccgagcug

SEQ ID NO: 2026498 - RNA, 15 nt, Human herpesvirus 5
uaagauauaaagaau

SEQ ID NO: 2026499 - RNA, 16 nt, Human herpesvirus 5
gccgcgugccugggaa

SEQ ID NO: 2026500 - RNA, 18 nt, Human herpesvirus 5
gcgccguuuugcuguccu

SEQ ID NO: 2026501 - RNA, 23 nt, Human herpesvirus 5
ugcgggcaggcggguugcagcuu

SEQ ID NO: 2026502 - RNA, 18 nt, Human herpesvirus 5
cacgcugacaacccacuc

SEQ ID NO: 2026503 - RNA, 22 nt, Human herpesvirus 5
uuuaagguacgggucuaccaaa

SEQ ID NO: 2026504 - RNA, 16 nt, Human herpesvirus 5
ugcgcgccuccguccu

SEQ ID NO: 2026505 - RNA, 17 nt, Human herpesvirus 5
ucccuccugcagcugca

SEQ ID NO: 2026506 - RNA, 15 nt, Human herpesvirus 5
accaccuccugggua

SEQ ID NO: 2026507 - RNA, 19 nt, Human herpesvirus 5
uauaaagaaaccacgcguc

SEQ ID NO: 2026508 - RNA, 13 nt, Human herpesvirus 5
ccgugccacggaa

SEQ ID NO: 2026509 - RNA, 19 nt, Human herpesvirus 5
agccuccggaacccucugg

SEQ ID NO: 2026510 - RNA, 17 nt, Human herpesvirus 5
cggcaacuucuugguga

SEQ ID NO: 2026511 - RNA, 21 nt, Human herpesvirus 5
gaagucgaacuauaccgggcg

SEQ ID NO: 2026512 - RNA, 11 nt, Human herpesvirus 5
ugaccugggua

SEQ ID NO: 2026513 - RNA, 17 nt, Human herpesvirus 5
ugaggggcggcaugccg

SEQ ID NO: 2026514 - RNA, 15 nt, Human herpesvirus 5
aaaagggacgucaaa

SEQ ID NO: 2026515 - RNA, 17 nt, Human herpesvirus 5
cgacagucuccuccuga

SEQ ID NO: 2026516 - RNA, 14 nt, Human herpesvirus 5
uugacgcugcuggc

SEQ ID NO: 2026517 - RNA, 17 nt, Human herpesvirus 5
ccacguccacucagaca

SEQ ID NO: 2026518 - RNA, 14 nt, Human herpesvirus 5
gcgucuuccuccuc

SEQ ID NO: 2026519 - RNA, 16 nt, Human herpesvirus 5
cugggcgcccccaccc

SEQ ID NO: 2026520 - RNA, 23 nt, Human herpesvirus 5
gcgagcgggcaaucaaugcgucu

SEQ ID NO: 2026521 - RNA, 20 nt, Human herpesvirus 5
acguguuucaaacagcacau

SEQ ID NO: 2026522 - RNA, 20 nt, Human herpesvirus 5
cagggcugggauccgccgcc

SEQ ID NO: 2026523 - RNA, 13 nt, Human herpesvirus 5
ucuauauucugca

SEQ ID NO: 2026524 - RNA, 22 nt, Human herpesvirus 5
gccgucagcgucgucguccgug

SEQ ID NO: 2026525 - RNA, 19 nt, Human herpesvirus 5
gucgguaccgucuccacca

SEQ ID NO: 2026526 - RNA, 19 nt, Human herpesvirus 5
ccgaacuauguggcuccgc

SEQ ID NO: 2026527 - RNA, 11 nt, Human herpesvirus 5
uaacagccuuc

SEQ ID NO: 2026528 - RNA, 21 nt, Human herpesvirus 5
cgcugcuuucgcacgcaccug

SEQ ID NO: 2026529 - RNA, 19 nt, Human herpesvirus 5
cggcagcccauccucgugg

SEQ ID NO: 2026530 - RNA, 22 nt, Human herpesvirus 5
ccuccgaacgcucgugagcaac

SEQ ID NO: 2026531 - RNA, 19 nt, Human herpesvirus 5
gucccagcagggcgcgccg

SEQ ID NO: 2026532 - RNA, 21 nt, Human herpesvirus 5
ugagauucaggacgaggagcc

SEQ ID NO: 2026533 - RNA, 20 nt, Human herpesvirus 5
uugagcaggguaaaaaccac

SEQ ID NO: 2026534 - RNA, 20 nt, Human herpesvirus 5
cucaacgacuuucuggagca

SEQ ID NO: 2026535 - RNA, 22 nt, Human herpesvirus 5
auuaucaucaaucacccacaga

SEQ ID NO: 2026536 - RNA, 21 nt, Human herpesvirus 5
cagcuuuugcacggaucacga

SEQ ID NO: 2026537 - RNA, 17 nt, Human herpesvirus 5
cgacugcagcccaccgc

SEQ ID NO: 2026538 - RNA, 16 nt, Human herpesvirus 5
gacgcgcuggacucuu

SEQ ID NO: 2026539 - RNA, 17 nt, Human herpesvirus 5
cggccuugcgcucccug

SEQ ID NO: 2026540 - RNA, 16 nt, Human herpesvirus 5
ugcugcacgggcucga

SEQ ID NO: 2026541 - RNA, 13 nt, Human herpesvirus 5
acaaugucacugu

SEQ ID NO: 2026542 - RNA, 17 nt, Human herpesvirus 5
caaggccgccucuucug

SEQ ID NO: 2026543 - RNA, 13 nt, Human herpesvirus 5
guucaauaaucuc

SEQ ID NO: 2026544 - RNA, 16 nt, Human herpesvirus 5
uagcggcucgggcugg

SEQ ID NO: 2026545 - RNA, 20 nt, Human herpesvirus 5
gugucuacggauugcugacg

SEQ ID NO: 2026546 - RNA, 18 nt, Human herpesvirus 5
acaaggucguucuccucg

SEQ ID NO: 2026547 - RNA, 23 nt, Human herpesvirus 5
cugucguguuccagaccagcgcc

SEQ ID NO: 2026548 - RNA, 17 nt, Human herpesvirus 5
ggcccguucgaaggcua

SEQ ID NO: 2026549 - RNA, 12 nt, Human herpesvirus 5
gccgccgccucc

SEQ ID NO: 2026550 - RNA, 17 nt, Human herpesvirus 5
gcuguugaccuggguag

SEQ ID NO: 2026551 - RNA, 22 nt, Human herpesvirus 5
ugcaauacagaagggaauuugu

SEQ ID NO: 2026552 - RNA, 16 nt, Human herpesvirus 5
gacacgcgcuucuggu

SEQ ID NO: 2026553 - RNA, 23 nt, Human herpesvirus 5
cguacgcgagaccugaaaguuua

SEQ ID NO: 2026554 - RNA, 23 nt, Human herpesvirus 5
ccaugcugagcaaguacacgcgc

SEQ ID NO: 2026555 - RNA, 23 nt, Human herpesvirus 5
ugaacggcgcuacgucggccaac

SEQ ID NO: 2026556 - RNA, 12 nt, Human herpesvirus 5
cagggcugcucc

SEQ ID NO: 2026557 - RNA, 14 nt, Human herpesvirus 5
uuaugauugucugc

SEQ ID NO: 2026558 - RNA, 15 nt, Human herpesvirus 5
guggcugggcucacg

SEQ ID NO: 2026559 - RNA, 17 nt, Human herpesvirus 5
accugauuucuuuguua

SEQ ID NO: 2026560 - RNA, 22 nt, Human herpesvirus 5
ggcuucccuccugcagcugcac

SEQ ID NO: 2026561 - RNA, 13 nt, Human herpesvirus 5
acguaggccuccu

SEQ ID NO: 2026562 - RNA, 19 nt, Human herpesvirus 5
cuuguucucgaccacguag

SEQ ID NO: 2026563 - RNA, 13 nt, Human herpesvirus 5
cugccgcagcugc

SEQ ID NO: 2026564 - RNA, 20 nt, Human herpesvirus 5
ugaacaccagaugcucccgg

SEQ ID NO: 2026565 - RNA, 22 nt, Human herpesvirus 5
agcguaaauccccgugugaugu

SEQ ID NO: 2026566 - RNA, 22 nt, Human herpesvirus 5
uccggcaagaugcucgggauac

SEQ ID NO: 2026567 - RNA, 14 nt, Human herpesvirus 5
ggcucguguggcag

SEQ ID NO: 2026568 - RNA, 23 nt, Human herpesvirus 5
gacuaacccugggcuauaugcau

SEQ ID NO: 2026569 - RNA, 18 nt, Human herpesvirus 5
gcagcccauccucgugga

SEQ ID NO: 2026570 - RNA, 22 nt, Human herpesvirus 5
uugcuggcuuggcucgccuucc

SEQ ID NO: 2026571 - RNA, 20 nt, Human herpesvirus 5
aacagccuguggcaccgccu

SEQ ID NO: 2026572 - RNA, 16 nt, Human herpesvirus 5
gcuggagcuaucugug

SEQ ID NO: 2026573 - RNA, 14 nt, Human herpesvirus 5
auaaguaccagaca

SEQ ID NO: 2026574 - RNA, 17 nt, Human herpesvirus 5
agcacauuagacacacg

SEQ ID NO: 2026575 - RNA, 15 nt, Human herpesvirus 5
cguggaggcagcggg

SEQ ID NO: 2026576 - RNA, 14 nt, Human herpesvirus 5
augucgcccagaaa

SEQ ID NO: 2026577 - RNA, 18 nt, Human herpesvirus 5
cgcguacggacgagugga

SEQ ID NO: 2026578 - RNA, 20 nt, Human herpesvirus 5
cgccguggguuggcagcugg

SEQ ID NO: 2026579 - RNA, 13 nt, Human herpesvirus 5
ggacccguacugc

SEQ ID NO: 2026580 - RNA, 19 nt, Human herpesvirus 5
uccccgcaaacucccacuc

SEQ ID NO: 2026581 - RNA, 13 nt, Human herpesvirus 5
uaagcuguguacu

SEQ ID NO: 2026582 - RNA, 20 nt, Human herpesvirus 5
cgucugagccggggugccgc

SEQ ID NO: 2026583 - RNA, 14 nt, Human herpesvirus 5
gacugguggugaga

SEQ ID NO: 2026584 - RNA, 11 nt, Human herpesvirus 5
gcuggugucuc

SEQ ID NO: 2026585 - RNA, 23 nt, Human herpesvirus 5
cgcgcggucauauagccuccggc

SEQ ID NO: 2026586 - RNA, 20 nt, Human herpesvirus 5
gaugaacgggugggcugggg

SEQ ID NO: 2026587 - RNA, 18 nt, Human herpesvirus 5
auaaucgccguuucguaa

SEQ ID NO: 2026588 - RNA, 19 nt, Human herpesvirus 5
aggaccauuuccaugugca

SEQ ID NO: 2026589 - RNA, 12 nt, Human herpesvirus 5
guggcuggagaa

SEQ ID NO: 2026590 - RNA, 19 nt, Human herpesvirus 5
ccgcacgaccgcgacgagg

SEQ ID NO: 2026591 - RNA, 21 nt, Human herpesvirus 5
ccuguuggcuuacugccugcc

SEQ ID NO: 2026592 - RNA, 18 nt, Human herpesvirus 5
ccggauaucugcggggau

SEQ ID NO: 2026593 - RNA, 23 nt, Human herpesvirus 5
caggcuuaacacuagccaucaca

SEQ ID NO: 2026594 - RNA, 19 nt, Human herpesvirus 5
gccgcuccaucgcagccac

SEQ ID NO: 2026595 - RNA, 13 nt, Human herpesvirus 5
aguccauacagca

SEQ ID NO: 2026596 - RNA, 14 nt, Human herpesvirus 5
ccaaggccuccagc

SEQ ID NO: 2026597 - RNA, 17 nt, Human herpesvirus 5
agaaugccucuacuugg

SEQ ID NO: 2026598 - RNA, 17 nt, Human herpesvirus 5
gaaugauuuggcugggu

SEQ ID NO: 2026599 - RNA, 23 nt, Human herpesvirus 5
ggucgacugcguggggugcugga

SEQ ID NO: 2026600 - RNA, 13 nt, Human herpesvirus 5
cagcccagggauc

SEQ ID NO: 2026601 - RNA, 13 nt, Human herpesvirus 5
guccagucacauu

SEQ ID NO: 2026602 - RNA, 19 nt, Human herpesvirus 5
acgucauucguguugacag

SEQ ID NO: 2026603 - RNA, 17 nt, Human herpesvirus 5
cgggcguuggccugugg

SEQ ID NO: 2026604 - RNA, 14 nt, Human herpesvirus 5
ggacgaaagugggg

SEQ ID NO: 2026605 - RNA, 24 nt, Human herpesvirus 5
auacuaauauccgcguuaucagaa

SEQ ID NO: 2026606 - RNA, 22 nt, Human herpesvirus 5
cuacacuuggugcucgaccagg

SEQ ID NO: 2026607 - RNA, 15 nt, Human herpesvirus 5
cggccgucuccacca

SEQ ID NO: 2026608 - RNA, 20 nt, Human herpesvirus 5
cagauucaguaaccuggagc

SEQ ID NO: 2026609 - RNA, 23 nt, Human herpesvirus 5
ggcagauucaguaaccuggagca

SEQ ID NO: 2026610 - RNA, 13 nt, Human herpesvirus 5
ccgccgaagccug

SEQ ID NO: 2026611 - RNA, 15 nt, Human herpesvirus 5
gcacgcgauuggcca

SEQ ID NO: 2026612 - RNA, 22 nt, Human herpesvirus 5
uguuggaacccaucgaggaggc

SEQ ID NO: 2026613 - RNA, 23 nt, Human herpesvirus 5
uugcaacgcgcccgacagcugca

SEQ ID NO: 2026614 - RNA, 14 nt, Human herpesvirus 5
cugucaucuaccua

SEQ ID NO: 2026615 - RNA, 23 nt, Human herpesvirus 5
ucgagcgcgcucuugaggcgcuc

SEQ ID NO: 2026616 - RNA, 11 nt, Human herpesvirus 5
uccuucaucuc

SEQ ID NO: 2026617 - RNA, 19 nt, Human herpesvirus 5
cuccaggcggagaugagga

SEQ ID NO: 2026618 - RNA, 22 nt, Human herpesvirus 5
cacgcugcuauaagaaggccau

SEQ ID NO: 2026619 - RNA, 14 nt, Human herpesvirus 5
cgggcccugcugac

SEQ ID NO: 2026620 - RNA, 19 nt, Human herpesvirus 5
guugcguugggccgagccc

SEQ ID NO: 2026621 - RNA, 16 nt, Human herpesvirus 5
cggcuugggcagcagc

SEQ ID NO: 2026622 - RNA, 14 nt, Human herpesvirus 5
ccucuccuccuucu

SEQ ID NO: 2026623 - RNA, 14 nt, Human herpesvirus 5
cuaccucaugacgc

SEQ ID NO: 2026624 - RNA, 21 nt, Human herpesvirus 5
ccuggguagcaaguccuccaa

SEQ ID NO: 2026625 - RNA, 16 nt, Human herpesvirus 5
gcuacgaaacuuuucu

SEQ ID NO: 2026626 - RNA, 20 nt, Human herpesvirus 5
cggaggagacgagagaaccu

SEQ ID NO: 2026627 - RNA, 22 nt, Human herpesvirus 5
ucaaauuuuaucuuggauaaau

SEQ ID NO: 2026628 - RNA, 18 nt, Human herpesvirus 5
cgggcucugggaagcugc

SEQ ID NO: 2026629 - RNA, 12 nt, Human herpesvirus 5
gaccggcagcac

SEQ ID NO: 2026630 - RNA, 15 nt, Human herpesvirus 5
uggguauccccgauu

SEQ ID NO: 2026631 - RNA, 16 nt, Human herpesvirus 5
gcgugccgaauacaaa

SEQ ID NO: 2026632 - RNA, 16 nt, Human herpesvirus 5
uacccgccccagcaga

SEQ ID NO: 2026633 - RNA, 21 nt, Human herpesvirus 5
guaugccgcgucugcuggaag

SEQ ID NO: 2026634 - RNA, 19 nt, Human herpesvirus 5
cucgaccggcggcugcugu

SEQ ID NO: 2026635 - RNA, 20 nt, Human herpesvirus 5
gguggagaugaggcggcgug

SEQ ID NO: 2026636 - RNA, 18 nt, Human herpesvirus 5
ccgcagucuggcuugggu

SEQ ID NO: 2026637 - RNA, 21 nt, Human herpesvirus 5
caacggccgccgcagccacga

SEQ ID NO: 2026638 - RNA, 19 nt, Human herpesvirus 5
accgugcccguuuucacag

SEQ ID NO: 2026639 - RNA, 13 nt, Human herpesvirus 5
cugcgcgggcagc

SEQ ID NO: 2026640 - RNA, 18 nt, Human herpesvirus 5
ggcaauagcgcacacgag

SEQ ID NO: 2026641 - RNA, 20 nt, Human herpesvirus 5
acaugcccagcaucuccucg

SEQ ID NO: 2026642 - RNA, 14 nt, Human herpesvirus 5
cucgcgcccgcaga

SEQ ID NO: 2026643 - RNA, 21 nt, Human herpesvirus 5
agcggcgugauugcaaagccg

SEQ ID NO: 2026644 - RNA, 14 nt, Human herpesvirus 5
ucucccucugcugu

SEQ ID NO: 2026645 - RNA, 20 nt, Human herpesvirus 5
cacagcuccugaaugagcuc

SEQ ID NO: 2026646 - RNA, 12 nt, Human herpesvirus 5
guuuuuauucau

SEQ ID NO: 2026647 - RNA, 22 nt, Human herpesvirus 5
aaaguaccacauuuuuugacag

SEQ ID NO: 2026648 - RNA, 23 nt, Human herpesvirus 5
gucacuggagaacaauaaagcgu

SEQ ID NO: 2026649 - RNA, 11 nt, Human herpesvirus 5
ucuuaagaaac

SEQ ID NO: 2026650 - RNA, 20 nt, Human herpesvirus 5
uucgauucucuauacacaua

SEQ ID NO: 2026651 - RNA, 19 nt, Human herpesvirus 5
ccguuaccaguaccaccgc

SEQ ID NO: 2026652 - RNA, 18 nt, Human herpesvirus 5
uaagacagaaugaaccuu

SEQ ID NO: 2026653 - RNA, 18 nt, Human herpesvirus 5
ccgguguuggccaccaug

SEQ ID NO: 2026654 - RNA, 16 nt, Human herpesvirus 5
accgcggcaccuacca

SEQ ID NO: 2026655 - RNA, 13 nt, Human herpesvirus 5
ugcuggcggccgu

SEQ ID NO: 2026656 - RNA, 20 nt, Human herpesvirus 5
ggacaaccgcauccugccca

SEQ ID NO: 2026657 - RNA, 17 nt, Human herpesvirus 5
cggcaagccgagcggga

SEQ ID NO: 2026658 - RNA, 23 nt, Human herpesvirus 5
ggacaugauggaaaugcccgcca

SEQ ID NO: 2026659 - RNA, 22 nt, Human herpesvirus 5
cugcuuacccuucaauuuccac

SEQ ID NO: 2026660 - RNA, 14 nt, Human herpesvirus 5
uacacgucccccug

SEQ ID NO: 2026661 - RNA, 20 nt, Human herpesvirus 5
cagguggaggacaguauuua

SEQ ID NO: 2026662 - RNA, 23 nt, Human herpesvirus 5
cgcaaaucuacaacggccccugu

SEQ ID NO: 2026663 - RNA, 14 nt, Human herpesvirus 5
gccuguggauagau

SEQ ID NO: 2026664 - RNA, 16 nt, Human herpesvirus 5
agcguccgcuggaaau

SEQ ID NO: 2026665 - RNA, 21 nt, Human herpesvirus 5
gggaucauuuucuuggccgug

SEQ ID NO: 2026666 - RNA, 20 nt, Human herpesvirus 5
ugcccguuuucacagcagcc

SEQ ID NO: 2026667 - RNA, 18 nt, Human herpesvirus 5
acucaacauguuagcuuu

SEQ ID NO: 2026668 - RNA, 21 nt, Human herpesvirus 5
cggcggcuugggcagcagcgg

SEQ ID NO: 2026669 - RNA, 23 nt, Human herpesvirus 5
aggaccauuuccaugugcagcug

SEQ ID NO: 2026670 - RNA, 13 nt, Human herpesvirus 5
uaccgcuacaacg

SEQ ID NO: 2026671 - RNA, 13 nt, Human herpesvirus 5
agcacugacaggg

SEQ ID NO: 2026672 - RNA, 17 nt, Human herpesvirus 5
gcaucuucgacuuucug

SEQ ID NO: 2026673 - RNA, 14 nt, Human herpesvirus 5
uggagacaguuucc

SEQ ID NO: 2026674 - RNA, 13 nt, Human herpesvirus 5
gauaggcaccugg

SEQ ID NO: 2026675 - RNA, 18 nt, Human herpesvirus 5
guuggcucccgcugugcu

SEQ ID NO: 2026676 - RNA, 21 nt, Human herpesvirus 5
cgccacgcucgcucugacgcc

SEQ ID NO: 2026677 - RNA, 18 nt, Human herpesvirus 5
aagcugcggcggcuuggg

SEQ ID NO: 2026678 - RNA, 16 nt, Human herpesvirus 5
ccuuggcgcucuggau

SEQ ID NO: 2026679 - RNA, 13 nt, Human herpesvirus 5
cggccgccgcagc

SEQ ID NO: 2026680 - RNA, 16 nt, Human herpesvirus 5
guacaccgcuggagcu

SEQ ID NO: 2026681 - RNA, 19 nt, Human herpesvirus 5
ugccgcguggcgcugcaca

SEQ ID NO: 2026682 - RNA, 18 nt, Human herpesvirus 5
cuucggccggcugcugca

SEQ ID NO: 2026683 - RNA, 15 nt, Human herpesvirus 5
aucuuucagcuggcu

SEQ ID NO: 2026684 - RNA, 15 nt, Human herpesvirus 5
agcgugcugcucugc

SEQ ID NO: 2026685 - RNA, 18 nt, Human herpesvirus 5
uccagcggccgcaguggg

SEQ ID NO: 2026686 - RNA, 21 nt, Human herpesvirus 5
cggggugguggugcugcugcu

SEQ ID NO: 2026687 - RNA, 17 nt, Human herpesvirus 5
ucgugaaacagcagcuc

SEQ ID NO: 2026688 - RNA, 18 nt, Human herpesvirus 5
caacaacgguagaugagc

SEQ ID NO: 2026689 - RNA, 18 nt, Human herpesvirus 5
guagcgggcugucacauc

SEQ ID NO: 2026690 - RNA, 23 nt, Human herpesvirus 5
aguugcaacgcgcccgacagcug

SEQ ID NO: 2026691 - RNA, 18 nt, Human herpesvirus 5
guaaauaaaauguuuuua

SEQ ID NO: 2026692 - RNA, 12 nt, Human herpesvirus 5
gcgccuccuggu

SEQ ID NO: 2026693 - RNA, 17 nt, Human herpesvirus 5
cgugcucaagaggugag

SEQ ID NO: 2026694 - RNA, 16 nt, Human herpesvirus 5
caacagcagccaccga

SEQ ID NO: 2026695 - RNA, 14 nt, Human herpesvirus 5
cacucacgcggccg

SEQ ID NO: 2026696 - RNA, 21 nt, Human herpesvirus 5
cucagguuccccgagagggug

SEQ ID NO: 2026697 - RNA, 18 nt, Human herpesvirus 5
cacaucacccaacacugc

SEQ ID NO: 2026698 - RNA, 15 nt, Human herpesvirus 5
gaguggugaggagcg

SEQ ID NO: 2026699 - RNA, 16 nt, Human herpesvirus 5
acccaguagacagaca

SEQ ID NO: 2026700 - RNA, 12 nt, Human herpesvirus 5
cgcguccacggg

SEQ ID NO: 2026701 - RNA, 15 nt, Human herpesvirus 5
gucgcuuagccacca

SEQ ID NO: 2026702 - RNA, 13 nt, Human herpesvirus 5
aucacagaacaca

SEQ ID NO: 2026703 - RNA, 15 nt, Human herpesvirus 5
uguuacgugcccugu

SEQ ID NO: 2026704 - RNA, 16 nt, Human herpesvirus 5
caacaagagaaagacc

SEQ ID NO: 2026705 - RNA, 21 nt, Human herpesvirus 5
cgcacggaaaagcaguggcag

SEQ ID NO: 2026706 - RNA, 19 nt, Human herpesvirus 5
caagugccugcacgaccug

SEQ ID NO: 2026707 - RNA, 16 nt, Human herpesvirus 5
gcggcagccacggagg

SEQ ID NO: 2026708 - RNA, 17 nt, Human herpesvirus 5
aagcgccgugcucuugg

SEQ ID NO: 2026709 - RNA, 22 nt, Human herpesvirus 5
aaggccgccucuucuggcccuc

SEQ ID NO: 2026710 - RNA, 20 nt, Human herpesvirus 5
gccaugcggauccagcugcu

SEQ ID NO: 2026711 - RNA, 14 nt, Human herpesvirus 5
cgccugguugcugc

SEQ ID NO: 2026712 - RNA, 16 nt, Human herpesvirus 5
cccacuggaguugcuc

SEQ ID NO: 2026713 - RNA, 12 nt, Human herpesvirus 5
gcuacagggagu

SEQ ID NO: 2026714 - RNA, 19 nt, Human herpesvirus 5
gguacuucaguaugaaagu

SEQ ID NO: 2026715 - RNA, 14 nt, Human herpesvirus 5
gaagccauacuucu

SEQ ID NO: 2026716 - RNA, 17 nt, Human herpesvirus 5
ccccgggccaccagccg

SEQ ID NO: 2026717 - RNA, 14 nt, Human herpesvirus 5
ucucaacgacuuuc

SEQ ID NO: 2026718 - RNA, 16 nt, Human herpesvirus 5
agcacguacaccgcug

SEQ ID NO: 2026719 - RNA, 14 nt, Human herpesvirus 5
uacuaccuccccua

SEQ ID NO: 2026720 - RNA, 19 nt, Human herpesvirus 5
cacgagcaugaacugccac

SEQ ID NO: 2026721 - RNA, 19 nt, Human herpesvirus 5
gccuggagcgaguggggca

SEQ ID NO: 2026722 - RNA, 14 nt, Human herpesvirus 5
cagcggauugggua

SEQ ID NO: 2026723 - RNA, 17 nt, Human herpesvirus 5
cggaggagucugucgac

SEQ ID NO: 2026724 - RNA, 13 nt, Human herpesvirus 5
aucaacagcagca

SEQ ID NO: 2026725 - RNA, 23 nt, Human herpesvirus 5
aaacgcgagaugaacuguuccac

SEQ ID NO: 2026726 - RNA, 21 nt, Human herpesvirus 5
gcuacgcgaccagcugcugga

SEQ ID NO: 2026727 - RNA, 20 nt, Human herpesvirus 5
gguggcucuugcgcuucugc

SEQ ID NO: 2026728 - RNA, 17 nt, Human herpesvirus 5
uuugauaaccuaccugg

SEQ ID NO: 2026729 - RNA, 13 nt, Human herpesvirus 5
ccaauaacauguc

SEQ ID NO: 2026730 - RNA, 15 nt, Human herpesvirus 5
ugaaaccuaccuggg

SEQ ID NO: 2026731 - RNA, 13 nt, Human herpesvirus 5
cggguugcagcuu

SEQ ID NO: 2026732 - RNA, 12 nt, Human herpesvirus 5
aucagccgccgc

SEQ ID NO: 2026733 - RNA, 22 nt, Human herpesvirus 5
gauaccgggcgccgggacucug

SEQ ID NO: 2026734 - RNA, 13 nt, Human herpesvirus 5
ggacuuggcagcg

SEQ ID NO: 2026735 - RNA, 23 nt, Human herpesvirus 5
aaacauuuuauuuacaucuguac

SEQ ID NO: 2026736 - RNA, 21 nt, Human herpesvirus 5
ugcggauacgccgccgggcgc

SEQ ID NO: 2026737 - RNA, 19 nt, Human herpesvirus 5
aaaacaugcacauaaacaa

SEQ ID NO: 2026738 - RNA, 17 nt, Human herpesvirus 5
gauggccaucacgggca

SEQ ID NO: 2026739 - RNA, 19 nt, Human herpesvirus 5
ggcaccgcgacagcuaccg

SEQ ID NO: 2026740 - RNA, 14 nt, Human herpesvirus 5
ugggcuggggugcg

SEQ ID NO: 2026741 - RNA, 16 nt, Human herpesvirus 5
augaggcgguggcugc

SEQ ID NO: 2026742 - RNA, 17 nt, Human herpesvirus 5
ggaaauacaugaugaau

SEQ ID NO: 2026743 - RNA, 18 nt, Human herpesvirus 5
cgguggaauucgcugggc

SEQ ID NO: 2026744 - RNA, 16 nt, Human herpesvirus 5
cgcgccacacgcugag

SEQ ID NO: 2026745 - RNA, 19 nt, Human herpesvirus 5
augcgugucgccugccgaa

SEQ ID NO: 2026746 - RNA, 18 nt, Human herpesvirus 5
ccgacgccggguuggcac

SEQ ID NO: 2026747 - RNA, 13 nt, Human herpesvirus 5
cagcgcgugcgca

SEQ ID NO: 2026748 - RNA, 16 nt, Human herpesvirus 5
ggugaugaugcugcug

SEQ ID NO: 2026749 - RNA, 23 nt, Human herpesvirus 5
guggcugcacacggagcacgggc

SEQ ID NO: 2026750 - RNA, 21 nt, Human herpesvirus 5
cauugaacgcgguacaugugc

SEQ ID NO: 2026751 - RNA, 13 nt, Human herpesvirus 5
uggagcccacgcc

SEQ ID NO: 2026752 - RNA, 17 nt, Human herpesvirus 5
cugagcgcgcucagcua

SEQ ID NO: 2026753 - RNA, 16 nt, Human herpesvirus 5
ugacggcgacaucacg

SEQ ID NO: 2026754 - RNA, 17 nt, Human herpesvirus 5
cggaguggugagcgggu

SEQ ID NO: 2026755 - RNA, 22 nt, Human herpesvirus 5
acuggggucaaaagccugggua

SEQ ID NO: 2026756 - RNA, 16 nt, Human herpesvirus 5
cuaacucgcguuuaua

SEQ ID NO: 2026757 - RNA, 22 nt, Human herpesvirus 5
cagguaaaaacaacguguguga

SEQ ID NO: 2026758 - RNA, 13 nt, Human herpesvirus 5
ccgucaccaccgc

SEQ ID NO: 2026759 - RNA, 22 nt, Human herpesvirus 5
ccuggguacuuaugaggagcgc

SEQ ID NO: 2026760 - RNA, 20 nt, Human herpesvirus 5
ccagcuaucaggccagcugc

SEQ ID NO: 2026761 - RNA, 13 nt, Human herpesvirus 5
uggaaguaacauc

SEQ ID NO: 2026762 - RNA, 21 nt, Human herpesvirus 5
uugcccgcacgccccggggcg

SEQ ID NO: 2026763 - RNA, 22 nt, Human herpesvirus 5
gcucgcuuagacauuccccacc

SEQ ID NO: 2026764 - RNA, 22 nt, Human herpesvirus 5
uuuaaacgucguuguguucuua

SEQ ID NO: 2026765 - RNA, 17 nt, Human herpesvirus 5
uaccuggaggagauggc

SEQ ID NO: 2026766 - RNA, 12 nt, Human herpesvirus 5
agauagagaaac

SEQ ID NO: 2026767 - RNA, 16 nt, Human herpesvirus 5
accuggcuggcgcagu

SEQ ID NO: 2026768 - RNA, 20 nt, Human herpesvirus 5
uuggaacccaucgaggaggc

SEQ ID NO: 2026769 - RNA, 18 nt, Human herpesvirus 5
agucucuuucucugcuuc

SEQ ID NO: 2026770 - RNA, 12 nt, Human herpesvirus 5
ggcuucccuccu

SEQ ID NO: 2026771 - RNA, 15 nt, Human herpesvirus 5
gaagcugcgcaggcc

SEQ ID NO: 2026772 - RNA, 13 nt, Human herpesvirus 5
agucgaucuggaa

SEQ ID NO: 2026773 - RNA, 21 nt, Human herpesvirus 5
guggugaucgugggccaggac

SEQ ID NO: 2026774 - RNA, 21 nt, Human herpesvirus 5
gauccaguugcaccucgaccu

SEQ ID NO: 2026775 - RNA, 19 nt, Human herpesvirus 5
gggccggcccucggggugc

SEQ ID NO: 2026776 - RNA, 22 nt, Human herpesvirus 5
gccgcucaagccgcggugcagg

SEQ ID NO: 2026777 - RNA, 14 nt, Human herpesvirus 5
gagacccggcuggc

SEQ ID NO: 2026778 - RNA, 18 nt, Human herpesvirus 5
ccgccucggaucuacuca

SEQ ID NO: 2026779 - RNA, 22 nt, Human herpesvirus 5
caacuuaaccacaagaaacgcu

SEQ ID NO: 2026780 - RNA, 15 nt, Human herpesvirus 5
uauuuuucagcucac

SEQ ID NO: 2026781 - RNA, 22 nt, Human herpesvirus 5
cagcugguggcucaugccgcca

SEQ ID NO: 2026782 - RNA, 20 nt, Human herpesvirus 5
ccggcggcgccgucagagca

SEQ ID NO: 2026783 - RNA, 18 nt, Human herpesvirus 5
guuaaggauucugagggc

SEQ ID NO: 2026784 - RNA, 14 nt, Human herpesvirus 5
cugaaggacacggu

SEQ ID NO: 2026785 - RNA, 21 nt, Human herpesvirus 5
ccgucuggacaccggaaugca

SEQ ID NO: 2026786 - RNA, 21 nt, Human herpesvirus 5
cagccaaggugcgggagacua

SEQ ID NO: 2026787 - RNA, 14 nt, Human herpesvirus 5
gcacgggcugcugg

SEQ ID NO: 2026788 - RNA, 13 nt, Human herpesvirus 5
cggccgcggugcg

SEQ ID NO: 2026789 - RNA, 17 nt, Human herpesvirus 5
cccuggggcugcugcug

SEQ ID NO: 2026790 - RNA, 16 nt, Human herpesvirus 5
ucuaccuccugcagga

SEQ ID NO: 2026791 - RNA, 12 nt, Human herpesvirus 5
ggagcccacgcc

SEQ ID NO: 2026792 - RNA, 19 nt, Human herpesvirus 5
ggggcgcagaaacuuuucc

SEQ ID NO: 2026793 - RNA, 17 nt, Human herpesvirus 5
cagcagggcgcgccggc

SEQ ID NO: 2026794 - RNA, 17 nt, Human herpesvirus 5
gucgccgucacugccac

SEQ ID NO: 2026795 - RNA, 21 nt, Human herpesvirus 5
cgcgucccaccccccgggcca

SEQ ID NO: 2026796 - RNA, 14 nt, Human herpesvirus 5
caugcaucccacca

SEQ ID NO: 2026797 - RNA, 13 nt, Human herpesvirus 5
gcaguugcugccu

SEQ ID NO: 2026798 - RNA, 18 nt, Human herpesvirus 5
gcagcgugcaccugcugc

SEQ ID NO: 2026799 - RNA, 15 nt, Human herpesvirus 5
aguggucuuucacau

SEQ ID NO: 2026800 - RNA, 16 nt, Human herpesvirus 5
aaccauugagaaagcu

SEQ ID NO: 2026801 - RNA, 14 nt, Human herpesvirus 5
gccguccaugucgc

SEQ ID NO: 2026802 - RNA, 19 nt, Human herpesvirus 5
caccgucaccacucccacc

SEQ ID NO: 2026803 - RNA, 18 nt, Human herpesvirus 5
cuggccgagacggcguga

SEQ ID NO: 2026804 - RNA, 22 nt, Human herpesvirus 5
ucggcacgcuggcgggccgacc

SEQ ID NO: 2026805 - RNA, 15 nt, Human herpesvirus 5
ggcuuacugccugcc

SEQ ID NO: 2026806 - RNA, 22 nt, Human herpesvirus 5
cuauuucgcgauccgcucacca

SEQ ID NO: 2026807 - RNA, 14 nt, Human herpesvirus 5
ugacgaggagcuuc

SEQ ID NO: 2026808 - RNA, 13 nt, Human herpesvirus 5
aagggugugacug

SEQ ID NO: 2026809 - RNA, 20 nt, Human herpesvirus 5
ucaguguacacgcgcccaga

SEQ ID NO: 2026810 - RNA, 12 nt, Human herpesvirus 5
ccgacgccgggu

SEQ ID NO: 2026811 - RNA, 19 nt, Human herpesvirus 5
caagacgcugaauugcacg

SEQ ID NO: 2026812 - RNA, 14 nt, Human herpesvirus 5
acagaaugaaccuu

SEQ ID NO: 2026813 - RNA, 17 nt, Human herpesvirus 5
uuccgaagaugccgugu

SEQ ID NO: 2026814 - RNA, 15 nt, Human herpesvirus 5
uuacauaaaaccacc

SEQ ID NO: 2026815 - RNA, 15 nt, Human herpesvirus 5
cuaccauccuuuuca

SEQ ID NO: 2026816 - RNA, 15 nt, Human herpesvirus 5
ggaagagggaagcac

SEQ ID NO: 2026817 - RNA, 18 nt, Human herpesvirus 5
auggaccgucgaggaggu

SEQ ID NO: 2026818 - RNA, 22 nt, Human herpesvirus 5
ccuauuagccccacaugcugcu

SEQ ID NO: 2026819 - RNA, 16 nt, Human herpesvirus 5
gucacuacucugggau

SEQ ID NO: 2026820 - RNA, 14 nt, Human herpesvirus 5
guacaccgcuggag

SEQ ID NO: 2026821 - RNA, 14 nt, Human herpesvirus 5
gcgguaacuggcag

SEQ ID NO: 2026822 - RNA, 21 nt, Human herpesvirus 5
gacgaguaggcgcgcacccga

SEQ ID NO: 2026823 - RNA, 18 nt, Human herpesvirus 5
cccgauaaucggcucuca

SEQ ID NO: 2026824 - RNA, 14 nt, Human herpesvirus 5
uguuuuuuccuucc

SEQ ID NO: 2026825 - RNA, 14 nt, Human herpesvirus 5
gggccagcccgagu

SEQ ID NO: 2026826 - RNA, 18 nt, Human herpesvirus 5
cacacugggagacggccu

SEQ ID NO: 2026827 - RNA, 15 nt, Human herpesvirus 5
ggcuccacacgcauc

SEQ ID NO: 2026828 - RNA, 15 nt, Human herpesvirus 5
acgaucgcuggaaag

SEQ ID NO: 2026829 - RNA, 21 nt, Human herpesvirus 5
cgugcgauuuggaccuggagg

SEQ ID NO: 2026830 - RNA, 20 nt, Human herpesvirus 5
gccuguggauagauuucugc

SEQ ID NO: 2026831 - RNA, 17 nt, Human herpesvirus 5
ccgcuuuucagaccgca

SEQ ID NO: 2026832 - RNA, 20 nt, Human herpesvirus 5
ugcucgaaauguugacccag

SEQ ID NO: 2026833 - RNA, 23 nt, Human herpesvirus 5
gaccuguuuaccucaugcggcaa

SEQ ID NO: 2026834 - RNA, 15 nt, Human herpesvirus 5
accgacauggagccc

SEQ ID NO: 2026835 - RNA, 23 nt, Human herpesvirus 5
gcaacgcguggcccuggucuggc

SEQ ID NO: 2026836 - RNA, 14 nt, Human herpesvirus 5
gaacuuugcugcua

SEQ ID NO: 2026837 - RNA, 15 nt, Human herpesvirus 5
cagccaccggcgcag

SEQ ID NO: 2026838 - RNA, 21 nt, Human herpesvirus 5
aacuauuccuccguguucuua

SEQ ID NO: 2026839 - RNA, 17 nt, Human herpesvirus 5
cuggcgguauggcugcg

SEQ ID NO: 2026840 - RNA, 21 nt, Human herpesvirus 5
acagagacaccaauugcuuua

SEQ ID NO: 2026841 - RNA, 13 nt, Human herpesvirus 5
ucaucucagccuc

SEQ ID NO: 2026842 - RNA, 16 nt, Human herpesvirus 5
agcugcuggacgacgu

SEQ ID NO: 2026843 - RNA, 18 nt, Human herpesvirus 5
agugucucuaaacgccac

SEQ ID NO: 2026844 - RNA, 15 nt, Human herpesvirus 5
cguacggcaacgagc

SEQ ID NO: 2026845 - RNA, 20 nt, Human herpesvirus 5
ccgugguggccgugcugggc

SEQ ID NO: 2026846 - RNA, 20 nt, Human herpesvirus 5
accaugcaggcgcaggaggc

SEQ ID NO: 2026847 - RNA, 18 nt, Human herpesvirus 5
caacugcaccagcaacca

SEQ ID NO: 2026848 - RNA, 16 nt, Human herpesvirus 5
cucguguggcagcugg

SEQ ID NO: 2026849 - RNA, 18 nt, Human herpesvirus 5
cgcccgggccgccugagg

SEQ ID NO: 2026850 - RNA, 13 nt, Human herpesvirus 5
gcuucgcgacugg

SEQ ID NO: 2026851 - RNA, 21 nt, Human herpesvirus 5
aucugcaccucgaugaagccu

SEQ ID NO: 2026852 - RNA, 22 nt, Human herpesvirus 5
ugaggcggcguggacugggacg

SEQ ID NO: 2026853 - RNA, 16 nt, Human herpesvirus 5
gcuuacugccugccgc

SEQ ID NO: 2026854 - RNA, 19 nt, Human herpesvirus 5
ccuguuggcuuacugccug

SEQ ID NO: 2026855 - RNA, 21 nt, Human herpesvirus 5
gaccagccaccgucccucagc

SEQ ID NO: 2026856 - RNA, 18 nt, Human herpesvirus 5
ccgacgacgacagucucc

SEQ ID NO: 2026857 - RNA, 13 nt, Human herpesvirus 5
cgcgagcgggcaa

SEQ ID NO: 2026858 - RNA, 23 nt, Human herpesvirus 5
ggcccaaagaccgcugccucguu

SEQ ID NO: 2026859 - RNA, 14 nt, Human herpesvirus 5
ugucucuacgcucc

SEQ ID NO: 2026860 - RNA, 16 nt, Human herpesvirus 5
cagcaugggcgacacc

SEQ ID NO: 2026861 - RNA, 19 nt, Human herpesvirus 5
cagguucugaaucugcucc

SEQ ID NO: 2026862 - RNA, 23 nt, Human herpesvirus 5
auggcuuggcgcagcgggcuuug

SEQ ID NO: 2026863 - RNA, 19 nt, Human herpesvirus 5
gguucugaaucugcuccag

SEQ ID NO: 2026864 - RNA, 14 nt, Human herpesvirus 5
aucgucggcagagg

SEQ ID NO: 2026865 - RNA, 16 nt, Human herpesvirus 5
ucagcaugguggccaa

SEQ ID NO: 2026866 - RNA, 14 nt, Human herpesvirus 5
guagccgaugcuga

SEQ ID NO: 2026867 - RNA, 18 nt, Human herpesvirus 5
uucgccaagaugcugcgg

SEQ ID NO: 2026868 - RNA, 13 nt, Human herpesvirus 5
gugguaccugcaa

SEQ ID NO: 2026869 - RNA, 20 nt, Human herpesvirus 5
acacucuuuugccgcaccgc

SEQ ID NO: 2026870 - RNA, 17 nt, Human herpesvirus 5
gcauccugcccaccgcc

SEQ ID NO: 2026871 - RNA, 19 nt, Human herpesvirus 5
ucuugacguuuauaaaccg

SEQ ID NO: 2026872 - RNA, 12 nt, Human herpesvirus 5
aaauaccaacac

SEQ ID NO: 2026873 - RNA, 16 nt, Human herpesvirus 5
cgcgguuucgccgccg

SEQ ID NO: 2026874 - RNA, 15 nt, Human herpesvirus 5
agugacguggauacu

SEQ ID NO: 2026875 - RNA, 21 nt, Human herpesvirus 5
cgcuuuucagaccgcaacaac

SEQ ID NO: 2026876 - RNA, 14 nt, Human herpesvirus 5
auucguaggcagcg

SEQ ID NO: 2026877 - RNA, 15 nt, Human herpesvirus 5
cuggaagcugcuggu

SEQ ID NO: 2026878 - RNA, 10 nt, Human herpesvirus 5
auaacgugac

SEQ ID NO: 2026879 - RNA, 17 nt, Human herpesvirus 5
uucaacaaauaccaaca

SEQ ID NO: 2026880 - RNA, 17 nt, Human herpesvirus 5
ccaagccaugcagcacg

SEQ ID NO: 2026881 - RNA, 17 nt, Human herpesvirus 5
cguaauguagacagcgc

SEQ ID NO: 2026882 - RNA, 18 nt, Human herpesvirus 5
cacgucgauucccaucuc

SEQ ID NO: 2026883 - RNA, 18 nt, Human herpesvirus 5
cgucacgccucuguucag

SEQ ID NO: 2026884 - RNA, 14 nt, Human herpesvirus 5
accacgcagcaggc

SEQ ID NO: 2026885 - RNA, 13 nt, Human herpesvirus 5
gguuucagcuggc

SEQ ID NO: 2026886 - RNA, 15 nt, Human herpesvirus 5
caaagucaacaugua

SEQ ID NO: 2026887 - RNA, 22 nt, Human herpesvirus 5
ccggcggggaaaauaccgaggc

SEQ ID NO: 2026888 - RNA, 16 nt, Human herpesvirus 5
uuuaauguaccaagaa

SEQ ID NO: 2026889 - RNA, 12 nt, Human herpesvirus 5
gguaacagccuu

SEQ ID NO: 2026890 - RNA, 16 nt, Human herpesvirus 5
aaccuacgugcaacgc

SEQ ID NO: 2026891 - RNA, 13 nt, Human herpesvirus 5
ccacggcugcuga

SEQ ID NO: 2026892 - RNA, 21 nt, Human herpesvirus 5
cggcacgccguugccacgagc

SEQ ID NO: 2026893 - RNA, 12 nt, Human herpesvirus 5
gcacgacaugac

SEQ ID NO: 2026894 - RNA, 17 nt, Human herpesvirus 5
acguagaaaaagaggaa

SEQ ID NO: 2026895 - RNA, 17 nt, Human herpesvirus 5
cguuaccaguaccaccg

SEQ ID NO: 2026896 - RNA, 22 nt, Human herpesvirus 5
aaggccguggagaugcaggagg

SEQ ID NO: 2026897 - RNA, 20 nt, Human herpesvirus 5
uccuuggaagagggaagcac

SEQ ID NO: 2026898 - RNA, 12 nt, Human herpesvirus 5
gacgccgugggc

SEQ ID NO: 2026899 - RNA, 20 nt, Human herpesvirus 5
gaccggugguacugcugugg

SEQ ID NO: 2026900 - RNA, 20 nt, Human herpesvirus 5
caguucacggggagaagaaa

SEQ ID NO: 2026901 - RNA, 15 nt, Human herpesvirus 5
acugggccucggcgu

SEQ ID NO: 2026902 - RNA, 16 nt, Human herpesvirus 5
ugcaccucgaccuccg

SEQ ID NO: 2026903 - RNA, 19 nt, Human herpesvirus 5
caccgucgccgucacugcc

SEQ ID NO: 2026904 - RNA, 18 nt, Human herpesvirus 5
gccuguggauagauuucu

SEQ ID NO: 2026905 - RNA, 15 nt, Human herpesvirus 5
caauaaagagaguug

SEQ ID NO: 2026906 - RNA, 15 nt, Human herpesvirus 5
caucugccgaaacac

SEQ ID NO: 2026907 - RNA, 12 nt, Human herpesvirus 5
ucuucuggcccu

SEQ ID NO: 2026908 - RNA, 18 nt, Human herpesvirus 5
cugccuauguaaggcggc

SEQ ID NO: 2026909 - RNA, 23 nt, Human herpesvirus 5
cagucagacccacuaccuggagg

SEQ ID NO: 2026910 - RNA, 17 nt, Human herpesvirus 5
cucgaccggcggcugcu

SEQ ID NO: 2026911 - RNA, 21 nt, Human herpesvirus 5
agaccaagagcaugcuguggg

SEQ ID NO: 2026912 - RNA, 19 nt, Human herpesvirus 5
cacgucggggcugugucgc

SEQ ID NO: 2026913 - RNA, 16 nt, Human herpesvirus 5
gacacagcagcaccag

SEQ ID NO: 2026914 - RNA, 21 nt, Human herpesvirus 5
uacggcagaaaagccggcucc

SEQ ID NO: 2026915 - RNA, 13 nt, Human herpesvirus 5
aacggggugggag

SEQ ID NO: 2026916 - RNA, 23 nt, Human herpesvirus 5
cgucgugagcagcgugcaccugc

SEQ ID NO: 2026917 - RNA, 18 nt, Human herpesvirus 5
augaaguuguugaucugc

SEQ ID NO: 2026918 - RNA, 22 nt, Human herpesvirus 5
cgggacgauauaaagaggcacg

SEQ ID NO: 2026919 - RNA, 21 nt, Human herpesvirus 5
gccaacuccgugccagcuggc

SEQ ID NO: 2026920 - RNA, 17 nt, Human herpesvirus 5
cagccucgggugcaccg

SEQ ID NO: 2026921 - RNA, 14 nt, Human herpesvirus 5
cgcuccaucgcagc

SEQ ID NO: 2026922 - RNA, 13 nt, Human herpesvirus 5
ggaaacgacagua

SEQ ID NO: 2026923 - RNA, 13 nt, Human herpesvirus 5
cggaccgcagcac

SEQ ID NO: 2026924 - RNA, 13 nt, Human herpesvirus 5
gcugcaggcaggu

SEQ ID NO: 2026925 - RNA, 17 nt, Human herpesvirus 5
aggugcugcaccucaac

SEQ ID NO: 2026926 - RNA, 14 nt, Human herpesvirus 5
uacccacauuuugc

SEQ ID NO: 2026927 - RNA, 19 nt, Human herpesvirus 5
cggagcacgggcugcuggu

SEQ ID NO: 2026928 - RNA, 20 nt, Human herpesvirus 5
cgcggaaaccgagacggagg

SEQ ID NO: 2026929 - RNA, 20 nt, Human herpesvirus 5
gcgccguggguuggcagcug

SEQ ID NO: 2026930 - RNA, 22 nt, Human herpesvirus 5
uugccggugccgaugagauaaa

SEQ ID NO: 2026931 - RNA, 17 nt, Human herpesvirus 5
cccgcgucccuggggcu

SEQ ID NO: 2026932 - RNA, 15 nt, Human herpesvirus 5
ggggaaaaucacgaa

SEQ ID NO: 2026933 - RNA, 21 nt, Human herpesvirus 5
caguacaacaguuaucagcaa

SEQ ID NO: 2026934 - RNA, 19 nt, Human herpesvirus 5
auagcaugcauaagaagcc

SEQ ID NO: 2026935 - RNA, 19 nt, Human herpesvirus 5
aaccgcgcaaaaccacgcg

SEQ ID NO: 2026936 - RNA, 14 nt, Human herpesvirus 5
ccgaggcgccgcca

SEQ ID NO: 2026937 - RNA, 14 nt, Human herpesvirus 5
auaaaaacacagag

SEQ ID NO: 2026938 - RNA, 19 nt, Human herpesvirus 5
gcucaggccacccgccgga

SEQ ID NO: 2026939 - RNA, 16 nt, Human herpesvirus 5
gcccuauccgcgcggc

SEQ ID NO: 2026940 - RNA, 23 nt, Human herpesvirus 5
gcgacgagcgcugcgaagaugcu

SEQ ID NO: 2026941 - RNA, 13 nt, Human herpesvirus 5
acaaccugcugca

SEQ ID NO: 2026942 - RNA, 19 nt, Human herpesvirus 5
cgacgccggguuggcacga

SEQ ID NO: 2026943 - RNA, 16 nt, Human herpesvirus 5
aacgccgagcucuguc

SEQ ID NO: 2026944 - RNA, 17 nt, Human herpesvirus 5
uccccggugugucuauu

SEQ ID NO: 2026945 - RNA, 17 nt, Human herpesvirus 5
acaggacgaggcagggu

SEQ ID NO: 2026946 - RNA, 16 nt, Human herpesvirus 5
ugcugaugugccagcc

SEQ ID NO: 2026947 - RNA, 12 nt, Human herpesvirus 5
ggaugaccuggc

SEQ ID NO: 2026948 - RNA, 14 nt, Human herpesvirus 5
gguggugugugggg

SEQ ID NO: 2026949 - RNA, 21 nt, Human herpesvirus 5
cucagccucgucgugcccguc

SEQ ID NO: 2026950 - RNA, 14 nt, Human herpesvirus 5
cgcgagcuggccag

SEQ ID NO: 2026951 - RNA, 19 nt, Human herpesvirus 5
cuacgcgugcacgcgcugc

SEQ ID NO: 2026952 - RNA, 23 nt, Human herpesvirus 5
cacagguagguggccaugaugac

SEQ ID NO: 2026953 - RNA, 20 nt, Human herpesvirus 5
ugcuuauucuagcccucugg

SEQ ID NO: 2026954 - RNA, 16 nt, Human herpesvirus 5
uggccgaacagcagcu

SEQ ID NO: 2026955 - RNA, 17 nt, Human herpesvirus 5
gugaucugggcagcggc

SEQ ID NO: 2026956 - RNA, 16 nt, Human herpesvirus 5
gcgcccgacagcugca

SEQ ID NO: 2026957 - RNA, 21 nt, Human herpesvirus 5
accauuaacaauuccacgccg

SEQ ID NO: 2026958 - RNA, 14 nt, Human herpesvirus 5
ggugcgcgcagaag

SEQ ID NO: 2026959 - RNA, 11 nt, Human herpesvirus 5
auauguagcac

SEQ ID NO: 2026960 - RNA, 18 nt, Human herpesvirus 5
aaccgucgaaaacaacca

SEQ ID NO: 2026961 - RNA, 15 nt, Human herpesvirus 5
gccgccgcucaagcc

SEQ ID NO: 2026962 - RNA, 18 nt, Human herpesvirus 5
agaguagugguggggcug

SEQ ID NO: 2026963 - RNA, 14 nt, Human herpesvirus 5
ggccggcugcugca

SEQ ID NO: 2026964 - RNA, 17 nt, Human herpesvirus 5
uagcuuuuuuuauacau

SEQ ID NO: 2026965 - RNA, 15 nt, Human herpesvirus 5
cugaaucugcuccag

SEQ ID NO: 2026966 - RNA, 22 nt, Human herpesvirus 5
cgccgucggugcgcccaucugc

SEQ ID NO: 2026967 - RNA, 23 nt, Human herpesvirus 5
auaaaauaauaagccggcagcug

SEQ ID NO: 2026968 - RNA, 15 nt, Human herpesvirus 5
ugagacgaggccgcc

SEQ ID NO: 2026969 - RNA, 14 nt, Human herpesvirus 5
caaugggcuucccu

SEQ ID NO: 2026970 - RNA, 18 nt, Human herpesvirus 5
ucgcaucaucaacagcag

SEQ ID NO: 2026971 - RNA, 19 nt, Human herpesvirus 5
ccucgucggccugggcugc

SEQ ID NO: 2026972 - RNA, 20 nt, Human herpesvirus 5
cucgaccggcggcugcuguu

SEQ ID NO: 2026973 - RNA, 22 nt, Human herpesvirus 5
guacaauaaacuguugauuuug

SEQ ID NO: 2026974 - RNA, 17 nt, Human herpesvirus 5
auugcccuucuggagca

SEQ ID NO: 2026975 - RNA, 12 nt, Human herpesvirus 5
ucuuccuccucg

SEQ ID NO: 2026976 - RNA, 19 nt, Human herpesvirus 5
cuggcgacccgcagucugg

SEQ ID NO: 2026977 - RNA, 15 nt, Human herpesvirus 5
cguggccuguggccc

SEQ ID NO: 2026978 - RNA, 20 nt, Human herpesvirus 5
cuaucuucaaccucacguua

SEQ ID NO: 2026979 - RNA, 18 nt, Human herpesvirus 5
acacguaaaguagcuggu

SEQ ID NO: 2026980 - RNA, 20 nt, Human herpesvirus 5
cguaaaaagaauggccaugu

SEQ ID NO: 2026981 - RNA, 22 nt, Human herpesvirus 5
gugagauacauguucauaaacu

SEQ ID NO: 2026982 - RNA, 14 nt, Human herpesvirus 5
agcgccguccugca

SEQ ID NO: 2026983 - RNA, 18 nt, Human herpesvirus 5
ggugcucgaccaggaggu

SEQ ID NO: 2026984 - RNA, 20 nt, Human herpesvirus 5
cacaucggugccggccaggu

SEQ ID NO: 2026985 - RNA, 20 nt, Human herpesvirus 5
gcagcccaaguucagcagca

SEQ ID NO: 2026986 - RNA, 23 nt, Human herpesvirus 5
agacaaccaaaacgucaggaauc

SEQ ID NO: 2026987 - RNA, 23 nt, Human herpesvirus 5
ggaucacgacgacgcgcccccca

SEQ ID NO: 2026988 - RNA, 23 nt, Human herpesvirus 5
ggaaacagcguccacaguuuccg

SEQ ID NO: 2026989 - RNA, 14 nt, Human herpesvirus 5
aggucgaaagccac

SEQ ID NO: 2026990 - RNA, 21 nt, Human herpesvirus 5
cgcggagguuugucuggcggc

SEQ ID NO: 2026991 - RNA, 14 nt, Human herpesvirus 5
gaagaagagauggc

SEQ ID NO: 2026992 - RNA, 23 nt, Human herpesvirus 5
gccgcgauucgucugacgcugcu

SEQ ID NO: 2026993 - RNA, 12 nt, Human herpesvirus 5
ccgacgagcagg

SEQ ID NO: 2026994 - RNA, 21 nt, Human herpesvirus 5
gcaccgcgacagcuaccgagg

SEQ ID NO: 2026995 - RNA, 15 nt, Human herpesvirus 5
ucgcucgcuuuggag

SEQ ID NO: 2026996 - RNA, 17 nt, Human herpesvirus 5
gccugcgacguuggcuc

SEQ ID NO: 2026997 - RNA, 23 nt, Human herpesvirus 5
ugaaucuuccccucugcugcugg

SEQ ID NO: 2026998 - RNA, 20 nt, Human herpesvirus 5
gcgagaccgauuccagaacu

SEQ ID NO: 2026999 - RNA, 20 nt, Human herpesvirus 5
aggccaacaucuucugcacu

SEQ ID NO: 2027000 - RNA, 17 nt, Human herpesvirus 5
ccaagagcaugcugugg

SEQ ID NO: 2027001 - RNA, 19 nt, Human herpesvirus 5
ggaaauacaugaugaaugu

SEQ ID NO: 2027002 - RNA, 21 nt, Human herpesvirus 5
gcauacggggaggagacacag

SEQ ID NO: 2027003 - RNA, 22 nt, Human herpesvirus 5
gagauucaggacgaggagccaa

SEQ ID NO: 2027004 - RNA, 16 nt, Human herpesvirus 5
ucccacaggagucucu

SEQ ID NO: 2027005 - RNA, 17 nt, Human herpesvirus 5
gauucaguaaccuggag

SEQ ID NO: 2027006 - RNA, 22 nt, Human herpesvirus 5
uaugugcucccgacccacgguc

SEQ ID NO: 2027007 - RNA, 14 nt, Human herpesvirus 5
acucuggcccugcu

SEQ ID NO: 2027008 - RNA, 20 nt, Human herpesvirus 5
gcugucuguuugucugugcg

SEQ ID NO: 2027009 - RNA, 14 nt, Human herpesvirus 5
cggccugcucgcac

SEQ ID NO: 2027010 - RNA, 15 nt, Human herpesvirus 5
ccaaggccuccagcg

SEQ ID NO: 2027011 - RNA, 22 nt, Human herpesvirus 5
gccaccaugcaucccaccacgg

SEQ ID NO: 2027012 - RNA, 15 nt, Human herpesvirus 5
uucgaguccugcugu

SEQ ID NO: 2027013 - RNA, 21 nt, Human herpesvirus 5
acgguuaccuucuugcccacg

SEQ ID NO: 2027014 - RNA, 19 nt, Human herpesvirus 5
cgagcguugcgcucgcgcu

SEQ ID NO: 2027015 - RNA, 14 nt, Human herpesvirus 5
aaacaguacggaca

SEQ ID NO: 2027016 - RNA, 15 nt, Human herpesvirus 5
cgcgucuuagacgcg

SEQ ID NO: 2027017 - RNA, 18 nt, Human herpesvirus 5
ucgcgugccgaauacaaa

SEQ ID NO: 2027018 - RNA, 23 nt, Human herpesvirus 5
cguggcggccgacggcagcgugc

SEQ ID NO: 2027019 - RNA, 22 nt, Human herpesvirus 5
gcauguuggugccccaggauga

SEQ ID NO: 2027020 - RNA, 14 nt, Human herpesvirus 5
uccaugugcagcug

SEQ ID NO: 2027021 - RNA, 13 nt, Human herpesvirus 5
caucgucaaagcc

SEQ ID NO: 2027022 - RNA, 18 nt, Human herpesvirus 5
cgacuuuuuucugugaga

SEQ ID NO: 2027023 - RNA, 21 nt, Human herpesvirus 5
uccuccaacucgaccugccgc

SEQ ID NO: 2027024 - RNA, 12 nt, Human herpesvirus 5
aacgugugguga

SEQ ID NO: 2027025 - RNA, 14 nt, Human herpesvirus 5
gcagcggagguggg

SEQ ID NO: 2027026 - RNA, 20 nt, Human herpesvirus 5
agaaugcaacgcuuucagga

SEQ ID NO: 2027027 - RNA, 21 nt, Human herpesvirus 5
guuuucccucagccucugugu

SEQ ID NO: 2027028 - RNA, 14 nt, Human herpesvirus 5
auaauauucuauau

SEQ ID NO: 2027029 - RNA, 16 nt, Human herpesvirus 5
uggcucgggucggcug

SEQ ID NO: 2027030 - RNA, 13 nt, Human herpesvirus 5
acacggggauuuu

SEQ ID NO: 2027031 - RNA, 12 nt, Human herpesvirus 5
uuguccuccucg

SEQ ID NO: 2027032 - RNA, 15 nt, Human herpesvirus 5
cagcgcggcggcagc

SEQ ID NO: 2027033 - RNA, 18 nt, Human herpesvirus 5
cauguucucccaggacca

SEQ ID NO: 2027034 - RNA, 15 nt, Human herpesvirus 5
cucaggccacccgcc

SEQ ID NO: 2027035 - RNA, 18 nt, Human herpesvirus 5
aacaaugacuaacccugg

SEQ ID NO: 2027036 - RNA, 21 nt, Human herpesvirus 5
cuaagagauccugggacacca

SEQ ID NO: 2027037 - RNA, 21 nt, Human herpesvirus 5
guaacagccuucccuuguaag

SEQ ID NO: 2027038 - RNA, 13 nt, Human herpesvirus 5
ucuacugcaacug

SEQ ID NO: 2027039 - RNA, 17 nt, Human herpesvirus 5
cuacgaugcgagccacg

SEQ ID NO: 2027040 - RNA, 12 nt, Human herpesvirus 5
gucgccaccugg

SEQ ID NO: 2027041 - RNA, 18 nt, Human herpesvirus 5
uaacaauuuuucuuuuuc

SEQ ID NO: 2027042 - RNA, 19 nt, Human herpesvirus 5
cgcuacaacgcgcgccuga

SEQ ID NO: 2027043 - RNA, 20 nt, Human herpesvirus 5
augggcgguggucggcugcc

SEQ ID NO: 2027044 - RNA, 16 nt, Human herpesvirus 5
gggcugagacaggacg

SEQ ID NO: 2027045 - RNA, 14 nt, Human herpesvirus 5
gaggaggccgcacu

SEQ ID NO: 2027046 - RNA, 12 nt, Human herpesvirus 5
gcgacagacauc

SEQ ID NO: 2027047 - RNA, 21 nt, Human herpesvirus 5
ccucgcugggcuacaagugca

SEQ ID NO: 2027048 - RNA, 17 nt, Human herpesvirus 5
ggcccgcuggcucggcg

SEQ ID NO: 2027049 - RNA, 18 nt, Human herpesvirus 5
aguugcaaaagaagcugc

SEQ ID NO: 2027050 - RNA, 23 nt, Human herpesvirus 5
ugcugcugguuuuugcccccucc

SEQ ID NO: 2027051 - RNA, 14 nt, Human herpesvirus 5
acgggccgcgcucc

SEQ ID NO: 2027052 - RNA, 20 nt, Human herpesvirus 5
uauugggaagggugugacug

SEQ ID NO: 2027053 - RNA, 17 nt, Human herpesvirus 5
uguagcgggcugucaca

SEQ ID NO: 2027054 - RNA, 23 nt, Human herpesvirus 5
gcgaccgucuggagguggccugc

SEQ ID NO: 2027055 - RNA, 15 nt, Human herpesvirus 5
aaguccccccacgga

SEQ ID NO: 2027056 - RNA, 20 nt, Human herpesvirus 5
cgguauggcugcgcgccucc

SEQ ID NO: 2027057 - RNA, 15 nt, Human herpesvirus 5
cuguugaccugggua

SEQ ID NO: 2027058 - RNA, 16 nt, Human herpesvirus 5
ucgcgguggcggccgc

SEQ ID NO: 2027059 - RNA, 11 nt, Human herpesvirus 5
auaagcaccgu

SEQ ID NO: 2027060 - RNA, 17 nt, Human herpesvirus 5
agcaugcugugggccca

SEQ ID NO: 2027061 - RNA, 23 nt, Human herpesvirus 5
gccagugauaaguaccagacauc

SEQ ID NO: 2027062 - RNA, 18 nt, Human herpesvirus 5
acuuuuacaugaacaaaa

SEQ ID NO: 2027063 - RNA, 13 nt, Human herpesvirus 5
ccuuggcgcucug

SEQ ID NO: 2027064 - RNA, 16 nt, Human herpesvirus 5
ggcaacucgagauggu

SEQ ID NO: 2027065 - RNA, 23 nt, Human herpesvirus 5
gcgucguguaauccacgacucgc

SEQ ID NO: 2027066 - RNA, 19 nt, Human herpesvirus 5
gcggcgugauugcaaagcc

SEQ ID NO: 2027067 - RNA, 17 nt, Human herpesvirus 5
accggcgccugcugcuc

SEQ ID NO: 2027068 - RNA, 16 nt, Human herpesvirus 5
gcguucgcccugucug

SEQ ID NO: 2027069 - RNA, 17 nt, Human herpesvirus 5
cuccaucuauuggcaga

SEQ ID NO: 2027070 - RNA, 11 nt, Human herpesvirus 5
gguugcagcuu

SEQ ID NO: 2027071 - RNA, 11 nt, Human herpesvirus 5
ccgcagccacg

SEQ ID NO: 2027072 - RNA, 18 nt, Human herpesvirus 5
cgcaacaacagcagcaac

SEQ ID NO: 2027073 - RNA, 16 nt, Human herpesvirus 5
gcaucgccugcaccuc

SEQ ID NO: 2027074 - RNA, 21 nt, Human herpesvirus 5
augucauuguuguuuacugaa

SEQ ID NO: 2027075 - RNA, 19 nt, Human herpesvirus 5
auauauggaguuuguguaa

SEQ ID NO: 2027076 - RNA, 19 nt, Human herpesvirus 5
ugagccggaaaaaccgcag

SEQ ID NO: 2027077 - RNA, 22 nt, Human herpesvirus 5
caaaucuccgcggcgguggccg

SEQ ID NO: 2027078 - RNA, 20 nt, Human herpesvirus 5
cugcggcggcuugggcagca

SEQ ID NO: 2027079 - RNA, 23 nt, Human herpesvirus 5
ggcugacgcggacgaggaacagc

SEQ ID NO: 2027080 - RNA, 19 nt, Human herpesvirus 5
cguaagcggcagcaugggc

SEQ ID NO: 2027081 - RNA, 17 nt, Human herpesvirus 5
cuccuccgcgaacggcg

SEQ ID NO: 2027082 - RNA, 19 nt, Human herpesvirus 5
gccugaggaaggggaggag

SEQ ID NO: 2027083 - RNA, 12 nt, Human herpesvirus 5
ugaugcugcuga

SEQ ID NO: 2027084 - RNA, 18 nt, Human herpesvirus 5
ugggauaccgcccgcaug

SEQ ID NO: 2027085 - RNA, 16 nt, Human herpesvirus 5
cagcgucacagagggc

SEQ ID NO: 2027086 - RNA, 18 nt, Human herpesvirus 5
ucaauaaucuccugagac

SEQ ID NO: 2027087 - RNA, 20 nt, Human herpesvirus 5
uuuuaucgucucaauaaaag

SEQ ID NO: 2027088 - RNA, 16 nt, Human herpesvirus 5
uggaacaagaaacaca

SEQ ID NO: 2027089 - RNA, 14 nt, Human herpesvirus 5
aggaggcaaauaua

SEQ ID NO: 2027090 - RNA, 15 nt, Human herpesvirus 5
accaccgagacgugc

SEQ ID NO: 2027091 - RNA, 21 nt, Human herpesvirus 5
ggcgcuguucuggauguauau

SEQ ID NO: 2027092 - RNA, 12 nt, Human herpesvirus 5
gcugcgcaggcc

SEQ ID NO: 2027093 - RNA, 16 nt, Human herpesvirus 5
agacccacuaccugga

SEQ ID NO: 2027094 - RNA, 19 nt, Human herpesvirus 5
gaacgcuacuucccccucc

SEQ ID NO: 2027095 - RNA, 23 nt, Human herpesvirus 5
cugacuucuacggaguuuucccu

SEQ ID NO: 2027096 - RNA, 18 nt, Human herpesvirus 5
ugacuaccuuguuuuuua

SEQ ID NO: 2027097 - RNA, 23 nt, Human herpesvirus 5
gcguauguuaucaucauggagcu

SEQ ID NO: 2027098 - RNA, 14 nt, Human herpesvirus 5
cggcucgccgcaga

SEQ ID NO: 2027099 - RNA, 23 nt, Human herpesvirus 5
cuuucuugacuggccggacggca

SEQ ID NO: 2027100 - RNA, 15 nt, Human herpesvirus 5
cagccccgucaaaac

SEQ ID NO: 2027101 - RNA, 14 nt, Human herpesvirus 5
gaugugcagcaucg

SEQ ID NO: 2027102 - RNA, 14 nt, Human herpesvirus 5
cuggcaacgugcca

SEQ ID NO: 2027103 - RNA, 15 nt, Human herpesvirus 5
ugguaggaggcgcgc

SEQ ID NO: 2027104 - RNA, 15 nt, Human herpesvirus 5
acgcgcgucggccgc

SEQ ID NO: 2027105 - RNA, 20 nt, Human herpesvirus 5
cauccucguggaaggcaccg

SEQ ID NO: 2027106 - RNA, 15 nt, Human herpesvirus 5
uaauuguccuucucc

SEQ ID NO: 2027107 - RNA, 17 nt, Human herpesvirus 5
aaggccaugagcggcag

SEQ ID NO: 2027108 - RNA, 15 nt, Human herpesvirus 5
ggcuggcgugcuguu

SEQ ID NO: 2027109 - RNA, 18 nt, Human herpesvirus 5
cagcaccccgcgucacuu

SEQ ID NO: 2027110 - RNA, 16 nt, Human herpesvirus 5
ccuacucaccaaagcc

SEQ ID NO: 2027111 - RNA, 17 nt, Human herpesvirus 5
ccugcgacggcgggugg

SEQ ID NO: 2027112 - RNA, 22 nt, Human herpesvirus 5
cgccagcgcggucgccaccugg

SEQ ID NO: 2027113 - RNA, 17 nt, Human herpesvirus 5
gcgacguaccagcuguc

SEQ ID NO: 2027114 - RNA, 16 nt, Human herpesvirus 5
gagccacggcuuggac

SEQ ID NO: 2027115 - RNA, 22 nt, Human herpesvirus 5
agaaaguuguccgcgggcaauu

SEQ ID NO: 2027116 - RNA, 22 nt, Human herpesvirus 5
cggugucuccucgcgaggcuga

SEQ ID NO: 2027117 - RNA, 14 nt, Human herpesvirus 5
ccaaaaccaugcua

SEQ ID NO: 2027118 - RNA, 22 nt, Human herpesvirus 5
gccuccgaacgcucgugagcaa

SEQ ID NO: 2027119 - RNA, 14 nt, Human herpesvirus 5
aggccguggagaug

SEQ ID NO: 2027120 - RNA, 15 nt, Human herpesvirus 5
ucuguucuuccacca

SEQ ID NO: 2027121 - RNA, 13 nt, Human herpesvirus 5
cggugcaggccgc

SEQ ID NO: 2027122 - RNA, 13 nt, Human herpesvirus 5
ucugccucuuccu

SEQ ID NO: 2027123 - RNA, 16 nt, Human herpesvirus 5
gcccgucggcugccug

SEQ ID NO: 2027124 - RNA, 12 nt, Human herpesvirus 5
cgugggccagga

SEQ ID NO: 2027125 - RNA, 17 nt, Human herpesvirus 5
caguugggaccgcagcg

SEQ ID NO: 2027126 - RNA, 21 nt, Human herpesvirus 5
gccucgauccauccuggggaa

SEQ ID NO: 2027127 - RNA, 22 nt, Human herpesvirus 5
gcccgacgugauuuacgagguc

SEQ ID NO: 2027128 - RNA, 16 nt, Human herpesvirus 5
auauaaauugggaaag

SEQ ID NO: 2027129 - RNA, 15 nt, Human herpesvirus 5
uccuucaugauggag

SEQ ID NO: 2027130 - RNA, 17 nt, Human herpesvirus 5
agaaaccgcauguguug

SEQ ID NO: 2027131 - RNA, 10 nt, Human herpesvirus 5
gucacuuccc

SEQ ID NO: 2027132 - RNA, 21 nt, Human herpesvirus 5
acguguuucaaacagcacauu

SEQ ID NO: 2027133 - RNA, 13 nt, Human herpesvirus 5
cugggccacaggg

SEQ ID NO: 2027134 - RNA, 14 nt, Human herpesvirus 5
cugcgggucauggg

SEQ ID NO: 2027135 - RNA, 21 nt, Human herpesvirus 5
acgaugugagagccaccuugg

SEQ ID NO: 2027136 - RNA, 20 nt, Human herpesvirus 5
cggcggcuguucgacagcgg

SEQ ID NO: 2027137 - RNA, 12 nt, Human herpesvirus 5
gauaagcgcuuu

SEQ ID NO: 2027138 - RNA, 18 nt, Human herpesvirus 5
cggaggacgcagaauaaa

SEQ ID NO: 2027139 - RNA, 15 nt, Human herpesvirus 5
cuagcuacuuuggaa

SEQ ID NO: 2027140 - RNA, 18 nt, Human herpesvirus 5
gcacgcgauuggccagca

SEQ ID NO: 2027141 - RNA, 15 nt, Human herpesvirus 5
gugcuacgagaucag

SEQ ID NO: 2027142 - RNA, 13 nt, Human herpesvirus 5
cugcacgcucugu

SEQ ID NO: 2027143 - RNA, 13 nt, Human herpesvirus 5
aggaguggcugcu

SEQ ID NO: 2027144 - RNA, 23 nt, Human herpesvirus 5
caaguauuuaugacggacacgga

SEQ ID NO: 2027145 - RNA, 19 nt, Human herpesvirus 5
gcgccgccaacgcgagcug

SEQ ID NO: 2027146 - RNA, 15 nt, Human herpesvirus 5
ugagaagcacggaga

SEQ ID NO: 2027147 - RNA, 12 nt, Human herpesvirus 5
guaccuacggac

SEQ ID NO: 2027148 - RNA, 14 nt, Human herpesvirus 5
agaaugcugcucag

SEQ ID NO: 2027149 - RNA, 19 nt, Human herpesvirus 5
cgcggccugcugcgcaaua

SEQ ID NO: 2027150 - RNA, 21 nt, Human herpesvirus 5
aggaaccaccguagcacugcg

SEQ ID NO: 2027151 - RNA, 21 nt, Human herpesvirus 5
caaacgcgugcgggugcauga

SEQ ID NO: 2027152 - RNA, 15 nt, Human herpesvirus 5
gugucagacacagcc

SEQ ID NO: 2027153 - RNA, 15 nt, Human herpesvirus 5
augagcgugcugcuc

SEQ ID NO: 2027154 - RNA, 13 nt, Human herpesvirus 5
ccgacaaccugcu

SEQ ID NO: 2027155 - RNA, 15 nt, Human herpesvirus 5
gcugguuuccccugc

SEQ ID NO: 2027156 - RNA, 14 nt, Human herpesvirus 5
cgcccgcgccucac

SEQ ID NO: 2027157 - RNA, 17 nt, Human herpesvirus 5
ccgcugugcuggccgcc

SEQ ID NO: 2027158 - RNA, 15 nt, Human herpesvirus 5
gcaccaugccggagc

SEQ ID NO: 2027159 - RNA, 22 nt, Human herpesvirus 5
gcuggaaguggaagcggugcug

SEQ ID NO: 2027160 - RNA, 15 nt, Human herpesvirus 5
cgcaggagcugcugc

SEQ ID NO: 2027161 - RNA, 16 nt, Human herpesvirus 5
ugagccggggugccgc

SEQ ID NO: 2027162 - RNA, 13 nt, Human herpesvirus 5
uccucgucgccuu

SEQ ID NO: 2027163 - RNA, 24 nt, Human herpesvirus 5
ggaaugucagaugacgagcgccgg

SEQ ID NO: 2027164 - RNA, 16 nt, Human herpesvirus 5
agccaccgacacagca

SEQ ID NO: 2027165 - RNA, 14 nt, Human herpesvirus 5
gaacucagaggcca

SEQ ID NO: 2027166 - RNA, 14 nt, Human herpesvirus 5
caacggcuggagga

SEQ ID NO: 2027167 - RNA, 17 nt, Human herpesvirus 5
cucaagucgcguccggg

SEQ ID NO: 2027168 - RNA, 15 nt, Human herpesvirus 5
uucggcucuccuccg

SEQ ID NO: 2027169 - RNA, 15 nt, Human herpesvirus 5
uuaugaagcugaaca

SEQ ID NO: 2027170 - RNA, 16 nt, Human herpesvirus 5
uaaagaaucuaggaac

SEQ ID NO: 2027171 - RNA, 17 nt, Human herpesvirus 5
uaacccaaaaccaugcu

SEQ ID NO: 2027172 - RNA, 14 nt, Human herpesvirus 5
cgcggcgcguuguc

SEQ ID NO: 2027173 - RNA, 15 nt, Human herpesvirus 5
auugcgggcccugcu

SEQ ID NO: 2027174 - RNA, 16 nt, Human herpesvirus 5
cgggccucggcuuggc

SEQ ID NO: 2027175 - RNA, 15 nt, Human herpesvirus 5
guggagagggaaggu

SEQ ID NO: 2027176 - RNA, 22 nt, Human herpesvirus 5
uguuggccaccaugcugagcaa

SEQ ID NO: 2027177 - RNA, 14 nt, Human herpesvirus 5
agauucuaaagcca

SEQ ID NO: 2027178 - RNA, 16 nt, Human herpesvirus 5
gccgcgcgagcgugcg

SEQ ID NO: 2027179 - RNA, 19 nt, Human herpesvirus 5
cggcuaacaaagcccgggc

SEQ ID NO: 2027180 - RNA, 21 nt, Human herpesvirus 5
aagugcgucuacgaccaaagc

SEQ ID NO: 2027181 - RNA, 12 nt, Human herpesvirus 5
augcgagcgggg

SEQ ID NO: 2027182 - RNA, 17 nt, Human herpesvirus 5
ggugcgggugccgggac

SEQ ID NO: 2027183 - RNA, 22 nt, Human herpesvirus 5
ucccgcauagccucuacaaacu

SEQ ID NO: 2027184 - RNA, 15 nt, Human herpesvirus 5
gcgaccgucuggagg

SEQ ID NO: 2027185 - RNA, 18 nt, Human herpesvirus 5
cuucggucucgggcucgc

SEQ ID NO: 2027186 - RNA, 18 nt, Human herpesvirus 5
gccccucacgucaguguu

SEQ ID NO: 2027187 - RNA, 14 nt, Human herpesvirus 5
gcagcucgcgcugg

SEQ ID NO: 2027188 - RNA, 13 nt, Human herpesvirus 5
gucggcugccugu

SEQ ID NO: 2027189 - RNA, 12 nt, Human herpesvirus 5
ggcguucugcuc

SEQ ID NO: 2027190 - RNA, 21 nt, Human herpesvirus 5
ugcacccccgauaugggccgc

SEQ ID NO: 2027191 - RNA, 13 nt, Human herpesvirus 5
agaagcacggaga

SEQ ID NO: 2027192 - RNA, 15 nt, Human herpesvirus 5
ucaccacucccacca

SEQ ID NO: 2027193 - RNA, 13 nt, Human herpesvirus 5
cgcgcccacugga

SEQ ID NO: 2027194 - RNA, 20 nt, Human herpesvirus 5
guaccuagcuacuuuggaau

SEQ ID NO: 2027195 - RNA, 19 nt, Human herpesvirus 5
gcgcagcgccagccuuagc

SEQ ID NO: 2027196 - RNA, 14 nt, Human herpesvirus 5
aaaccgagcaagca

SEQ ID NO: 2027197 - RNA, 13 nt, Human herpesvirus 5
gauaaacgucacg

SEQ ID NO: 2027198 - RNA, 12 nt, Human herpesvirus 5
cggucuguucag

SEQ ID NO: 2027199 - RNA, 16 nt, Human herpesvirus 5
uaagcgcgaccggcag

SEQ ID NO: 2027200 - RNA, 14 nt, Human herpesvirus 5
gcugcgcaggccgc

SEQ ID NO: 2027201 - RNA, 19 nt, Human herpesvirus 5
uacagccuugagaaccugc

SEQ ID NO: 2027202 - RNA, 12 nt, Human herpesvirus 5
uaaaaaggcaau

SEQ ID NO: 2027203 - RNA, 14 nt, Human herpesvirus 5
caggagcugcugcu

SEQ ID NO: 2027204 - RNA, 20 nt, Human herpesvirus 5
aaagccgacaaccugcugca

SEQ ID NO: 2027205 - RNA, 19 nt, Human herpesvirus 5
cuuuuggugcgccacguag

SEQ ID NO: 2027206 - RNA, 14 nt, Human herpesvirus 5
agccugccgccggc

SEQ ID NO: 2027207 - RNA, 14 nt, Human herpesvirus 5
caaaagccugggua

SEQ ID NO: 2027208 - RNA, 15 nt, Human herpesvirus 5
gugacgucaaucaaa

SEQ ID NO: 2027209 - RNA, 15 nt, Human herpesvirus 5
cucguucccagcgcg

SEQ ID NO: 2027210 - RNA, 19 nt, Human herpesvirus 5
ccgccgaagccuggggcac

SEQ ID NO: 2027211 - RNA, 16 nt, Human herpesvirus 5
ugugcuuaagcagaaa

SEQ ID NO: 2027212 - RNA, 20 nt, Human herpesvirus 5
accaugugcaaaaacuuguc

SEQ ID NO: 2027213 - RNA, 15 nt, Human herpesvirus 5
acagcucaugccucu

SEQ ID NO: 2027214 - RNA, 20 nt, Human herpesvirus 5
cguuauguuucgaaaacuug

SEQ ID NO: 2027215 - RNA, 19 nt, Human herpesvirus 5
cgcggcaacucgagauggu

SEQ ID NO: 2027216 - RNA, 18 nt, Human herpesvirus 5
ggugcgggagacuagguc

SEQ ID NO: 2027217 - RNA, 21 nt, Human herpesvirus 5
ggcgauacgccggugcugccg

SEQ ID NO: 2027218 - RNA, 21 nt, Human herpesvirus 5
aguuguggcaaagagccaugu

SEQ ID NO: 2027219 - RNA, 12 nt, Human herpesvirus 5
gucgcagccccc

SEQ ID NO: 2027220 - RNA, 13 nt, Human herpesvirus 5
auaaccuaccugg

SEQ ID NO: 2027221 - RNA, 19 nt, Human herpesvirus 5
ccagcuuaccgccaccguc

SEQ ID NO: 2027222 - RNA, 18 nt, Human herpesvirus 5
ccaucuagacucacuuua

SEQ ID NO: 2027223 - RNA, 17 nt, Human herpesvirus 5
cgcggcgacaagcugug

SEQ ID NO: 2027224 - RNA, 15 nt, Human herpesvirus 5
uccagcacaaaaaac

SEQ ID NO: 2027225 - RNA, 22 nt, Human herpesvirus 5
cuaccuagaugcuagcaauaau

SEQ ID NO: 2027226 - RNA, 14 nt, Human herpesvirus 5
ucaccugcagcgcu

SEQ ID NO: 2027227 - RNA, 23 nt, Human herpesvirus 5
acgacccaccgccgcuuucucau

SEQ ID NO: 2027228 - RNA, 13 nt, Human herpesvirus 5
cacaugggcccgu

SEQ ID NO: 2027229 - RNA, 18 nt, Human herpesvirus 5
cgggcucaccgcaguugc

SEQ ID NO: 2027230 - RNA, 13 nt, Human herpesvirus 5
ggcgguccuccag

SEQ ID NO: 2027231 - RNA, 15 nt, Human herpesvirus 5
caacgucaugcauuc

SEQ ID NO: 2027232 - RNA, 19 nt, Human herpesvirus 5
uaccagacgcgauggcccg

SEQ ID NO: 2027233 - RNA, 24 nt, Human herpesvirus 5
aacgacagugucggugugguagcu

SEQ ID NO: 2027234 - RNA, 22 nt, Human herpesvirus 5
gaggucgcgcguacggacgagu

SEQ ID NO: 2027235 - RNA, 14 nt, Human herpesvirus 5
cagaggacggagga

SEQ ID NO: 2027236 - RNA, 15 nt, Human herpesvirus 5
uccuuaucugggugc

SEQ ID NO: 2027237 - RNA, 15 nt, Human herpesvirus 5
cgaggaggccgcacu

SEQ ID NO: 2027238 - RNA, 16 nt, Human herpesvirus 5
cuaacuagccuucccg

SEQ ID NO: 2027239 - RNA, 22 nt, Human herpesvirus 5
acguacgacugcgcggccugcu

SEQ ID NO: 2027240 - RNA, 14 nt, Human herpesvirus 5
aaaacauaagaaua

SEQ ID NO: 2027241 - RNA, 20 nt, Human herpesvirus 5
ucagcuggcuuucagcuucg

SEQ ID NO: 2027242 - RNA, 19 nt, Human herpesvirus 5
gccgccgucgcgccuuccu

SEQ ID NO: 2027243 - RNA, 20 nt, Human herpesvirus 5
aucugggagguggcugggcu

SEQ ID NO: 2027244 - RNA, 15 nt, Human herpesvirus 5
cccgggccgccgcca

SEQ ID NO: 2027245 - RNA, 20 nt, Human herpesvirus 5
guguacgccaucuucaucuu

SEQ ID NO: 2027246 - RNA, 21 nt, Human herpesvirus 5
gcuccgcgucgcuucgccgcc

SEQ ID NO: 2027247 - RNA, 15 nt, Human herpesvirus 5
ggagaaaagagauga

SEQ ID NO: 2027248 - RNA, 21 nt, Human herpesvirus 5
ccgccgaagcuucgcgcgccg

SEQ ID NO: 2027249 - RNA, 22 nt, Human herpesvirus 5
caaggagcgacguaccagcugu

SEQ ID NO: 2027250 - RNA, 14 nt, Human herpesvirus 5
gccgaucaugugcu

SEQ ID NO: 2027251 - RNA, 22 nt, Human herpesvirus 5
uuccaugacgcgccucauggcg

SEQ ID NO: 2027252 - RNA, 19 nt, Human herpesvirus 5
gugcaucgcuucgagguug

SEQ ID NO: 2027253 - RNA, 12 nt, Human herpesvirus 5
ucacccgccuca

SEQ ID NO: 2027254 - RNA, 17 nt, Human herpesvirus 5
gcacuugucauuaaaca

SEQ ID NO: 2027255 - RNA, 18 nt, Human herpesvirus 5
acgcaguugagcggggua

SEQ ID NO: 2027256 - RNA, 22 nt, Human herpesvirus 5
gacgucggugguggcuguaggc

SEQ ID NO: 2027257 - RNA, 23 nt, Human herpesvirus 5
guaucugagcggcggcgugaccg

SEQ ID NO: 2027258 - RNA, 12 nt, Human herpesvirus 5
ccggaggagcgu

SEQ ID NO: 2027259 - RNA, 15 nt, Human herpesvirus 5
gcuugcuccucuucc

SEQ ID NO: 2027260 - RNA, 20 nt, Human herpesvirus 5
cuccagcagcagcuggugca

SEQ ID NO: 2027261 - RNA, 17 nt, Human herpesvirus 5
agccggucaucuccgag

SEQ ID NO: 2027262 - RNA, 17 nt, Human herpesvirus 5
gacaucccccugcacgu

SEQ ID NO: 2027263 - RNA, 20 nt, Human herpesvirus 5
caaccauuggcaacaucacc

SEQ ID NO: 2027264 - RNA, 17 nt, Human herpesvirus 5
ugcaaaguuauccuguu

SEQ ID NO: 2027265 - RNA, 21 nt, Human herpesvirus 5
cggcgaauggaucaucuguuu

SEQ ID NO: 2027266 - RNA, 16 nt, Human herpesvirus 5
cgacguggccuccucg

SEQ ID NO: 2027267 - RNA, 23 nt, Human herpesvirus 5
ccagcuaucaggccagcugcguc

SEQ ID NO: 2027268 - RNA, 20 nt, Human herpesvirus 5
agcgccaggcggcugaucug

SEQ ID NO: 2027269 - RNA, 16 nt, Human herpesvirus 5
cgagaugguguacccg

SEQ ID NO: 2027270 - RNA, 20 nt, Human herpesvirus 5
ugacgucgcggcaccaggaa

SEQ ID NO: 2027271 - RNA, 15 nt, Human herpesvirus 5
uuccauaauaaaagu

SEQ ID NO: 2027272 - RNA, 20 nt, Human herpesvirus 5
cuacucacaauggaagccau

SEQ ID NO: 2027273 - RNA, 16 nt, Human herpesvirus 5
auacgcuagcagaaga

SEQ ID NO: 2027274 - RNA, 15 nt, Human herpesvirus 5
cucggaucugcggcu

SEQ ID NO: 2027275 - RNA, 20 nt, Human herpesvirus 5
gucggcaagccgagcgggag

SEQ ID NO: 2027276 - RNA, 15 nt, Human herpesvirus 5
cuccgcuugcugcga

SEQ ID NO: 2027277 - RNA, 13 nt, Human herpesvirus 5
ugcucucuuagug

SEQ ID NO: 2027278 - RNA, 14 nt, Human herpesvirus 5
gcgucacagagggc

SEQ ID NO: 2027279 - RNA, 13 nt, Human herpesvirus 5
acagcggcucgcc

SEQ ID NO: 2027280 - RNA, 17 nt, Human herpesvirus 5
agcgacgucaacggugg

SEQ ID NO: 2027281 - RNA, 19 nt, Human herpesvirus 5
ugaacaccuuuuugcugca

SEQ ID NO: 2027282 - RNA, 22 nt, Human herpesvirus 5
uccgguggcgcguagccaccug

SEQ ID NO: 2027283 - RNA, 13 nt, Human herpesvirus 5
ccaaggcgagcca

SEQ ID NO: 2027284 - RNA, 15 nt, Human herpesvirus 5
uagcgcuccuggauc

SEQ ID NO: 2027285 - RNA, 19 nt, Human herpesvirus 5
cuggggcugcugcugcacg

SEQ ID NO: 2027286 - RNA, 11 nt, Human herpesvirus 5
cuuugcugcua

SEQ ID NO: 2027287 - RNA, 16 nt, Human herpesvirus 5
uaaccgagcugaagga

SEQ ID NO: 2027288 - RNA, 19 nt, Human herpesvirus 5
uccaccacggcugcugauc

SEQ ID NO: 2027289 - RNA, 21 nt, Human herpesvirus 5
gcucagcugguggcucaugcc

SEQ ID NO: 2027290 - RNA, 23 nt, Human herpesvirus 5
gaacugguuuucggacagagcag

SEQ ID NO: 2027291 - RNA, 14 nt, Human herpesvirus 5
cgugacgcagucug

SEQ ID NO: 2027292 - RNA, 15 nt, Human herpesvirus 5
guagaucccacuggc

SEQ ID NO: 2027293 - RNA, 18 nt, Human herpesvirus 5
agucgcgccuugggacac

SEQ ID NO: 2027294 - RNA, 23 nt, Human herpesvirus 5
ugaggagcucacccggcugcugg

SEQ ID NO: 2027295 - RNA, 22 nt, Human herpesvirus 5
gguugaaacgcuuuaagcugcu

SEQ ID NO: 2027296 - RNA, 22 nt, Human herpesvirus 5
gccgcaaugggcuucccuccug

SEQ ID NO: 2027297 - RNA, 16 nt, Human herpesvirus 5
uggacaugauggaaau

SEQ ID NO: 2027298 - RNA, 19 nt, Human herpesvirus 5
acagcaacaacagucgcag

SEQ ID NO: 2027299 - RNA, 20 nt, Human herpesvirus 5
ccugcagcgcuacgugcgcg

SEQ ID NO: 2027300 - RNA, 14 nt, Human herpesvirus 5
ccggcguggcggcc

SEQ ID NO: 2027301 - RNA, 21 nt, Human herpesvirus 5
uggagaaaccgccguucggcu

SEQ ID NO: 2027302 - RNA, 20 nt, Human herpesvirus 5
cuggugagauacauguucau

SEQ ID NO: 2027303 - RNA, 16 nt, Human herpesvirus 5
uaucuggggaggaggu

SEQ ID NO: 2027304 - RNA, 11 nt, Human herpesvirus 5
gagcaggccau

SEQ ID NO: 2027305 - RNA, 20 nt, Human herpesvirus 5
acaucuccgucucuggucuc

SEQ ID NO: 2027306 - RNA, 13 nt, Human herpesvirus 5
cgccgcgcccguc

SEQ ID NO: 2027307 - RNA, 19 nt, Human herpesvirus 5
gcagcugcuggagcgcggc

SEQ ID NO: 2027308 - RNA, 17 nt, Human herpesvirus 5
cgcuaaaggugcaugac

SEQ ID NO: 2027309 - RNA, 15 nt, Human herpesvirus 5
cuccucugccugggc

SEQ ID NO: 2027310 - RNA, 23 nt, Human herpesvirus 5
ccagccccgucaaaacacacgcg

SEQ ID NO: 2027311 - RNA, 13 nt, Human herpesvirus 5
agcacaccugccu

SEQ ID NO: 2027312 - RNA, 19 nt, Human herpesvirus 5
gcaccccgaacuggagcuc

SEQ ID NO: 2027313 - RNA, 22 nt, Human herpesvirus 5
ugggcugugguucauguuucug

SEQ ID NO: 2027314 - RNA, 22 nt, Human herpesvirus 5
gauucugagggccgauggcugc

SEQ ID NO: 2027315 - RNA, 24 nt, Human herpesvirus 5
guaacacacggccagcuccacgcu

SEQ ID NO: 2027316 - RNA, 22 nt, Human herpesvirus 5
gaaaacguacgugaucacggac

SEQ ID NO: 2027317 - RNA, 18 nt, Human herpesvirus 5
auuuuaugcgccgccagc

SEQ ID NO: 2027318 - RNA, 18 nt, Human herpesvirus 5
aaacauuuguugagucau

SEQ ID NO: 2027319 - RNA, 17 nt, Human herpesvirus 5
aucgacugccuaacugu

SEQ ID NO: 2027320 - RNA, 15 nt, Human herpesvirus 5
aggcgccgcaaacau

SEQ ID NO: 2027321 - RNA, 14 nt, Human herpesvirus 5
gcgccugcugcucg

SEQ ID NO: 2027322 - RNA, 16 nt, Human herpesvirus 5
agcccguggcccagga

SEQ ID NO: 2027323 - RNA, 17 nt, Human herpesvirus 5
acgccaacuccgugcca

SEQ ID NO: 2027324 - RNA, 19 nt, Human herpesvirus 5
gccagcgcgagcgcucggc

SEQ ID NO: 2027325 - RNA, 19 nt, Human herpesvirus 5
agccuucccuuguaagaca

SEQ ID NO: 2027326 - RNA, 13 nt, Human herpesvirus 5
gcccgucggcugc

SEQ ID NO: 2027327 - RNA, 18 nt, Human herpesvirus 5
uuaucugccucuuccucg

SEQ ID NO: 2027328 - RNA, 18 nt, Human herpesvirus 5
ugguagcuagugcagccu

SEQ ID NO: 2027329 - RNA, 16 nt, Human herpesvirus 5
agagaaacccccaccc

SEQ ID NO: 2027330 - RNA, 13 nt, Human herpesvirus 5
cggacgggcagga

SEQ ID NO: 2027331 - RNA, 17 nt, Human herpesvirus 5
cgguaccgucuccacca

SEQ ID NO: 2027332 - RNA, 12 nt, Human herpesvirus 5
ucgcgagcccca

SEQ ID NO: 2027333 - RNA, 16 nt, Human herpesvirus 5
gccaacaugcccagca

SEQ ID NO: 2027334 - RNA, 17 nt, Human herpesvirus 5
gaggucuaucacgggcu

SEQ ID NO: 2027335 - RNA, 13 nt, Human herpesvirus 5
agccgagcgggag

SEQ ID NO: 2027336 - RNA, 22 nt, Human herpesvirus 5
cgcuggccgauccacgggccgc

SEQ ID NO: 2027337 - RNA, 20 nt, Human herpesvirus 5
ucuguaaaagcugcaugaaa

SEQ ID NO: 2027338 - RNA, 15 nt, Human herpesvirus 5
auguuacacauuacu

SEQ ID NO: 2027339 - RNA, 15 nt, Human herpesvirus 5
gaugaauuguuacca

SEQ ID NO: 2027340 - RNA, 12 nt, Human herpesvirus 5
gcaacauguguu

SEQ ID NO: 2027341 - RNA, 20 nt, Human herpesvirus 5
gcgagcggcggacuuggcag

SEQ ID NO: 2027342 - RNA, 13 nt, Human herpesvirus 5
auuuagaaacacc

SEQ ID NO: 2027343 - RNA, 23 nt, Human herpesvirus 5
aaaauaugggaauuccccugccu

SEQ ID NO: 2027344 - RNA, 14 nt, Human herpesvirus 5
gaccgaggcgcugg

SEQ ID NO: 2027345 - RNA, 14 nt, Human herpesvirus 5
aaaucuacacugaa

SEQ ID NO: 2027346 - RNA, 14 nt, Human herpesvirus 5
cuugucgccaugcu

SEQ ID NO: 2027347 - RNA, 22 nt, Human herpesvirus 5
cacuuuaggcggcgcagcgcca

SEQ ID NO: 2027348 - RNA, 16 nt, Human herpesvirus 5
ccuccgucgcggccag

SEQ ID NO: 2027349 - RNA, 15 nt, Human herpesvirus 5
ggugucuagcuggcg

SEQ ID NO: 2027350 - RNA, 14 nt, Human herpesvirus 5
gacccgccgccgcc

SEQ ID NO: 2027351 - RNA, 22 nt, Human herpesvirus 5
agaccgaugugugggaccuggu

SEQ ID NO: 2027352 - RNA, 20 nt, Human herpesvirus 5
aguggucuuucacaucgcca

SEQ ID NO: 2027353 - RNA, 15 nt, Human herpesvirus 5
uaaugcauuaucauc

SEQ ID NO: 2027354 - RNA, 13 nt, Human herpesvirus 5
gaagcugcgcagg

SEQ ID NO: 2027355 - RNA, 22 nt, Human herpesvirus 5
gcaacaacagucgcagcccccg

SEQ ID NO: 2027356 - RNA, 18 nt, Human herpesvirus 5
gucggccgaucgcgccgc

SEQ ID NO: 2027357 - RNA, 14 nt, Human herpesvirus 5
cugcgugcuccgau

SEQ ID NO: 2027358 - RNA, 13 nt, Human herpesvirus 5
cugucaccaccac

SEQ ID NO: 2027359 - RNA, 20 nt, Human herpesvirus 5
cgcccucagcgugcucagcu

SEQ ID NO: 2027360 - RNA, 21 nt, Human herpesvirus 5
caggaggcugugcgcgccggc

SEQ ID NO: 2027361 - RNA, 19 nt, Human herpesvirus 5
cacggucugcuugcuggcu

SEQ ID NO: 2027362 - RNA, 11 nt, Human herpesvirus 5
ucguccagcag

SEQ ID NO: 2027363 - RNA, 13 nt, Human herpesvirus 5
uaaggagcucuga

SEQ ID NO: 2027364 - RNA, 16 nt, Human herpesvirus 5
cccgcacacuggcugg

SEQ ID NO: 2027365 - RNA, 13 nt, Human herpesvirus 5
gggcgauucugug

SEQ ID NO: 2027366 - RNA, 15 nt, Human herpesvirus 5
gugcugggucagugc

SEQ ID NO: 2027367 - RNA, 23 nt, Human herpesvirus 5
accggccuccgacgacgccgagg

SEQ ID NO: 2027368 - RNA, 21 nt, Human herpesvirus 5
ugcacggcaucaugcugggcg

SEQ ID NO: 2027369 - RNA, 22 nt, Human herpesvirus 5
ggaaugcggucaguuggggagu

SEQ ID NO: 2027370 - RNA, 13 nt, Human herpesvirus 5
ccucgcgccgccc

SEQ ID NO: 2027371 - RNA, 21 nt, Human herpesvirus 5
cagcuaccgccgcaacagcgg

SEQ ID NO: 2027372 - RNA, 17 nt, Human herpesvirus 5
cgucgauucccaucuca

SEQ ID NO: 2027373 - RNA, 14 nt, Human herpesvirus 5
ccguuuugcugucc

SEQ ID NO: 2027374 - RNA, 16 nt, Human herpesvirus 5
ccugugguagaaugcu

SEQ ID NO: 2027375 - RNA, 19 nt, Human herpesvirus 5
ccacaagaaacgcuggaaa

SEQ ID NO: 2027376 - RNA, 16 nt, Human herpesvirus 5
gcgagagaugggccgc

SEQ ID NO: 2027377 - RNA, 13 nt, Human herpesvirus 5
gaguccuggucuu

SEQ ID NO: 2027378 - RNA, 17 nt, Human herpesvirus 5
agcagccgacacagcgg

SEQ ID NO: 2027379 - RNA, 17 nt, Human herpesvirus 5
gucaugccuuggcgcuc

SEQ ID NO: 2027380 - RNA, 16 nt, Human herpesvirus 5
cgggagucuaccuccu

SEQ ID NO: 2027381 - RNA, 12 nt, Human herpesvirus 5
ucgcgcgucacu

SEQ ID NO: 2027382 - RNA, 17 nt, Human herpesvirus 5
uccuccucuuccucagu

SEQ ID NO: 2027383 - RNA, 21 nt, Human herpesvirus 5
gguaucucacaccgucagcug

SEQ ID NO: 2027384 - RNA, 15 nt, Human herpesvirus 5
cugcacguggccugg

SEQ ID NO: 2027385 - RNA, 13 nt, Human herpesvirus 5
uagcgcucaaagg

SEQ ID NO: 2027386 - RNA, 18 nt, Human herpesvirus 5
gccgcucauaaugccguc

SEQ ID NO: 2027387 - RNA, 17 nt, Human herpesvirus 5
ucagaccgcaacaacag

SEQ ID NO: 2027388 - RNA, 23 nt, Human herpesvirus 5
gcaagacuacaugcuauaagaca

SEQ ID NO: 2027389 - RNA, 18 nt, Human herpesvirus 5
caugcuauaagacagccu

SEQ ID NO: 2027390 - RNA, 22 nt, Human herpesvirus 5
gaucgccgucacuaaggaccga

SEQ ID NO: 2027391 - RNA, 22 nt, Human herpesvirus 5
ggcggcgaucgcagccuccucg

SEQ ID NO: 2027392 - RNA, 16 nt, Human herpesvirus 5
aucuggcggccgccgg

SEQ ID NO: 2027393 - RNA, 16 nt, Human herpesvirus 5
acugggagacggccug

SEQ ID NO: 2027394 - RNA, 19 nt, Human herpesvirus 5
ucgcgcaucgccugcaccu

SEQ ID NO: 2027395 - RNA, 17 nt, Human herpesvirus 5
uccacgucuucaaagua

SEQ ID NO: 2027396 - RNA, 15 nt, Human herpesvirus 5
guucgucucugccuc

SEQ ID NO: 2027397 - RNA, 20 nt, Human herpesvirus 5
cagcggccgccggugcuucu

SEQ ID NO: 2027398 - RNA, 14 nt, Human herpesvirus 5
caauuccccucgcc

SEQ ID NO: 2027399 - RNA, 22 nt, Human herpesvirus 5
cggcgguggagggcgcgcggca

SEQ ID NO: 2027400 - RNA, 22 nt, Human herpesvirus 5
acuggacucgguuucgcuguag

SEQ ID NO: 2027401 - RNA, 19 nt, Human herpesvirus 5
gucauguucucccaggacc

SEQ ID NO: 2027402 - RNA, 14 nt, Human herpesvirus 5
ggcgcccgcgacgu

SEQ ID NO: 2027403 - RNA, 23 nt, Human herpesvirus 5
acaaugugcugcaugagaacacg

SEQ ID NO: 2027404 - RNA, 20 nt, Human herpesvirus 5
gcuccaagugcaagcgccgc

SEQ ID NO: 2027405 - RNA, 22 nt, Human herpesvirus 5
ggcuguucacgcggaggacagc

SEQ ID NO: 2027406 - RNA, 18 nt, Human herpesvirus 5
ugcuucuaccaccuuugu

SEQ ID NO: 2027407 - RNA, 21 nt, Human herpesvirus 5
uccccgcaaacucccacuccu

SEQ ID NO: 2027408 - RNA, 16 nt, Human herpesvirus 5
gcgaauaagcgcgacc

SEQ ID NO: 2027409 - RNA, 19 nt, Human herpesvirus 5
aggccgagacgcugcgcua

SEQ ID NO: 2027410 - RNA, 23 nt, Human herpesvirus 5
agaggaggaugggggggaccggg

SEQ ID NO: 2027411 - RNA, 22 nt, Human herpesvirus 5
ucacgaucgcuggugucucugc

SEQ ID NO: 2027412 - RNA, 15 nt, Human herpesvirus 5
uggcguccgggcucg

SEQ ID NO: 2027413 - RNA, 17 nt, Human herpesvirus 5
gaggagcgccggggaga

SEQ ID NO: 2027414 - RNA, 11 nt, Human herpesvirus 5
agauuucuguc

SEQ ID NO: 2027415 - RNA, 22 nt, Human herpesvirus 5
ggccgacggcagcgugcugugc

SEQ ID NO: 2027416 - RNA, 19 nt, Human herpesvirus 5
acgcuguugagcucggaca

SEQ ID NO: 2027417 - RNA, 17 nt, Human herpesvirus 5
agcuacgcgaccagcug

SEQ ID NO: 2027418 - RNA, 14 nt, Human herpesvirus 5
accucucgggccga

SEQ ID NO: 2027419 - RNA, 16 nt, Human herpesvirus 5
agcccuacuuuguguu

SEQ ID NO: 2027420 - RNA, 16 nt, Human herpesvirus 5
gaccgauuccagaacu

SEQ ID NO: 2027421 - RNA, 13 nt, Human herpesvirus 5
cgcuccucgagcc

SEQ ID NO: 2027422 - RNA, 13 nt, Human herpesvirus 5
uggcuuggcgcag

SEQ ID NO: 2027423 - RNA, 17 nt, Human herpesvirus 5
gcagaagaauguugcga

SEQ ID NO: 2027424 - RNA, 19 nt, Human herpesvirus 5
gaugaacguggugaggggc

SEQ ID NO: 2027425 - RNA, 18 nt, Human herpesvirus 5
cgcaucgccugcaccucg

SEQ ID NO: 2027426 - RNA, 20 nt, Human herpesvirus 5
cauaaguuuacgggaggaau

SEQ ID NO: 2027427 - RNA, 18 nt, Human herpesvirus 5
ccauuuucagcgacgacc

SEQ ID NO: 2027428 - RNA, 14 nt, Human herpesvirus 5
cugcuugcuggcuu

SEQ ID NO: 2027429 - RNA, 17 nt, Human herpesvirus 5
gucgccgccgucaccac

SEQ ID NO: 2027430 - RNA, 14 nt, Human herpesvirus 5
aucugucguacugu

SEQ ID NO: 2027431 - RNA, 18 nt, Human herpesvirus 5
guggaugagggcucuuca

SEQ ID NO: 2027432 - RNA, 21 nt, Human herpesvirus 5
cgguuucgcuguagcuguggu

SEQ ID NO: 2027433 - RNA, 23 nt, Human herpesvirus 5
ggaccggggugguggugcugcug

SEQ ID NO: 2027434 - RNA, 13 nt, Human herpesvirus 5
gcgcucccugcuc

SEQ ID NO: 2027435 - RNA, 16 nt, Human herpesvirus 5
agcucguccacacgcc

SEQ ID NO: 2027436 - RNA, 17 nt, Human herpesvirus 5
cccccacggaucucgcg

SEQ ID NO: 2027437 - RNA, 21 nt, Human herpesvirus 5
acuaccagcugggccuacacc

SEQ ID NO: 2027438 - RNA, 23 nt, Human herpesvirus 5
ggaccugaccugucagaaggcag

SEQ ID NO: 2027439 - RNA, 22 nt, Human herpesvirus 5
cggccgcccguguccgugauga

SEQ ID NO: 2027440 - RNA, 20 nt, Human herpesvirus 5
acgaagaugccgauguguga

SEQ ID NO: 2027441 - RNA, 20 nt, Human herpesvirus 5
gaccaagcuaguagcggccg

SEQ ID NO: 2027442 - RNA, 15 nt, Human herpesvirus 5
cgccggacgagcugg

SEQ ID NO: 2027443 - RNA, 18 nt, Human herpesvirus 5
aggaggccgagacgcugc

SEQ ID NO: 2027444 - RNA, 22 nt, Human herpesvirus 5
ggaacuuugccgucaugccuug

SEQ ID NO: 2027445 - RNA, 18 nt, Human herpesvirus 5
cacucuggcccugcugua

SEQ ID NO: 2027446 - RNA, 20 nt, Human herpesvirus 5
cugcgcgccuaccugacgcc

SEQ ID NO: 2027447 - RNA, 20 nt, Human herpesvirus 5
cugcgaggaccguacacgca

SEQ ID NO: 2027448 - RNA, 12 nt, Human herpesvirus 5
gaugcaggaggu

SEQ ID NO: 2027449 - RNA, 13 nt, Human herpesvirus 5
cuauguggcuccg

SEQ ID NO: 2027450 - RNA, 20 nt, Human herpesvirus 5
ugcaugucgcccagaaagaa

SEQ ID NO: 2027451 - RNA, 15 nt, Human herpesvirus 5
guuaucuucccugag

SEQ ID NO: 2027452 - RNA, 18 nt, Human herpesvirus 5
gacugcguggggugcugg

SEQ ID NO: 2027453 - RNA, 20 nt, Human herpesvirus 5
uguugcacgggcucggguga

SEQ ID NO: 2027454 - RNA, 14 nt, Human herpesvirus 5
gugggccggggccc

SEQ ID NO: 2027455 - RNA, 15 nt, Human herpesvirus 5
cugucauccacuugg

SEQ ID NO: 2027456 - RNA, 18 nt, Human herpesvirus 5
gccgcggugcaggccgcg

SEQ ID NO: 2027457 - RNA, 22 nt, Human herpesvirus 5
uuccccgccccaucaccucgcc

SEQ ID NO: 2027458 - RNA, 18 nt, Human herpesvirus 5
gaccggggugguggugcu

SEQ ID NO: 2027459 - RNA, 21 nt, Human herpesvirus 5
gcucgugcgugucgcugggcu

SEQ ID NO: 2027460 - RNA, 22 nt, Human herpesvirus 5
ugaggcgcucgugaaacagcag

SEQ ID NO: 2027461 - RNA, 17 nt, Human herpesvirus 5
cacgguacaaaccucua

SEQ ID NO: 2027462 - RNA, 16 nt, Human herpesvirus 5
ccgauccacgggccgc

SEQ ID NO: 2027463 - RNA, 15 nt, Human herpesvirus 5
cuaagaggauacauc

SEQ ID NO: 2027464 - RNA, 15 nt, Human herpesvirus 5
gccgacgaggccggc

SEQ ID NO: 2027465 - RNA, 11 nt, Human herpesvirus 5
acggccgccgc

SEQ ID NO: 2027466 - RNA, 20 nt, Human herpesvirus 5
uccacgggccgcgcuccagg

SEQ ID NO: 2027467 - RNA, 20 nt, Human herpesvirus 5
cgcaaugggcuucccuccug

SEQ ID NO: 2027468 - RNA, 14 nt, Human herpesvirus 5
gcgucccuggggcu

SEQ ID NO: 2027469 - RNA, 14 nt, Human herpesvirus 5
agcuucucucuggu

SEQ ID NO: 2027470 - RNA, 12 nt, Human herpesvirus 5
guggcugggcuc

SEQ ID NO: 2027471 - RNA, 21 nt, Human herpesvirus 5
ccgacccugcguccccgcacg

SEQ ID NO: 2027472 - RNA, 23 nt, Human herpesvirus 5
guccuccagcagcagcuggugca

SEQ ID NO: 2027473 - RNA, 23 nt, Human herpesvirus 5
gucugcaacaugcggcugugucg

SEQ ID NO: 2027474 - RNA, 17 nt, Human herpesvirus 5
guacggcaacgagcagg

SEQ ID NO: 2027475 - RNA, 20 nt, Human herpesvirus 5
acgggaggcugaucgcggcc

SEQ ID NO: 2027476 - RNA, 18 nt, Human herpesvirus 5
gcugccuguuccugcugc

SEQ ID NO: 2027477 - RNA, 18 nt, Human herpesvirus 5
cugugaaacgccaacucc

SEQ ID NO: 2027478 - RNA, 21 nt, Human herpesvirus 5
gaggaaugcauguggaagcug

SEQ ID NO: 2027479 - RNA, 14 nt, Human herpesvirus 5
acggcgaccgucug

SEQ ID NO: 2027480 - RNA, 14 nt, Human herpesvirus 5
gcagcaacagcccc

SEQ ID NO: 2027481 - RNA, 10 nt, Human herpesvirus 5
agacacaccg

SEQ ID NO: 2027482 - RNA, 22 nt, Human herpesvirus 5
cgcuacaacgcgcgccugaccc

SEQ ID NO: 2027483 - RNA, 15 nt, Human herpesvirus 5
gaccgcgacgagguc

SEQ ID NO: 2027484 - RNA, 13 nt, Human herpesvirus 5
gcuuugacgcacu

SEQ ID NO: 2027485 - RNA, 20 nt, Human herpesvirus 5
gcacaucggugccggccagg

SEQ ID NO: 2027486 - RNA, 14 nt, Human herpesvirus 5
gccgcggugcaggc

SEQ ID NO: 2027487 - RNA, 14 nt, Human herpesvirus 5
gugcucgugcccau

SEQ ID NO: 2027488 - RNA, 23 nt, Human herpesvirus 5
accuggguagcaaguccuccaac

SEQ ID NO: 2027489 - RNA, 13 nt, Human herpesvirus 5
gaccagcugcugg

SEQ ID NO: 2027490 - RNA, 13 nt, Human herpesvirus 5
uggccuacggcug

SEQ ID NO: 2027491 - RNA, 19 nt, Human herpesvirus 5
uucgagucggauggcuuuu

SEQ ID NO: 2027492 - RNA, 16 nt, Human herpesvirus 5
ccagcugcuucuggua

SEQ ID NO: 2027493 - RNA, 19 nt, Human herpesvirus 5
acaucugucaccucacaag

SEQ ID NO: 2027494 - RNA, 22 nt, Human herpesvirus 5
augucuuugggcgggcucuggg

SEQ ID NO: 2027495 - RNA, 22 nt, Human herpesvirus 5
gacgcgccucucggagccgccg

SEQ ID NO: 2027496 - RNA, 17 nt, Human herpesvirus 5
cgaugugaguuucugug

SEQ ID NO: 2027497 - RNA, 15 nt, Human herpesvirus 5
gugccucauuuguau

SEQ ID NO: 2027498 - RNA, 14 nt, Human herpesvirus 5
guagcaacuggcaa

SEQ ID NO: 2027499 - RNA, 17 nt, Human herpesvirus 5
augcuucaugucguccc

SEQ ID NO: 2027500 - RNA, 18 nt, Human herpesvirus 5
cacauuuuuugacagaug

SEQ ID NO: 2027501 - RNA, 13 nt, Human herpesvirus 5
ggccacgagccag

SEQ ID NO: 2027502 - RNA, 19 nt, Human herpesvirus 5
gacaacggcuggaaaugga

SEQ ID NO: 2027503 - RNA, 16 nt, Human herpesvirus 5
uuucgugcguggaaaa

SEQ ID NO: 2027504 - RNA, 13 nt, Human herpesvirus 5
cgccgucacuucc

SEQ ID NO: 2027505 - RNA, 17 nt, Human herpesvirus 5
auaagccggcagcugcu

SEQ ID NO: 2027506 - RNA, 21 nt, Human herpesvirus 5
cucgcgacgagggucugcgcg

SEQ ID NO: 2027507 - RNA, 22 nt, Human herpesvirus 5
cggaagcuuuggucgccugcac

SEQ ID NO: 2027508 - RNA, 13 nt, Human herpesvirus 5
caucauggcccaa

SEQ ID NO: 2027509 - RNA, 16 nt, Human herpesvirus 5
cucguaaacuuaugaa

SEQ ID NO: 2027510 - RNA, 14 nt, Human herpesvirus 5
guuccggcggcgug

SEQ ID NO: 2027511 - RNA, 23 nt, Human herpesvirus 5
uugaggcgcucgugaaacagcag

SEQ ID NO: 2027512 - RNA, 20 nt, Human herpesvirus 5
cgguuuaccacaggcgccgc

SEQ ID NO: 2027513 - RNA, 12 nt, Human herpesvirus 5
ucaaaguucaaa

SEQ ID NO: 2027514 - RNA, 15 nt, Human herpesvirus 5
auuggcaggaaagac

SEQ ID NO: 2027515 - RNA, 15 nt, Human herpesvirus 5
gcagggaauuuugaa

SEQ ID NO: 2027516 - RNA, 15 nt, Human herpesvirus 5
cgggcacggaccgca

SEQ ID NO: 2027517 - RNA, 15 nt, Human herpesvirus 5
cgaagcggcuguggc

SEQ ID NO: 2027518 - RNA, 23 nt, Human herpesvirus 5
cagccccgaagguuagcgccgcg

SEQ ID NO: 2027519 - RNA, 22 nt, Human herpesvirus 5
ccucgucgugcccgucggcugc

SEQ ID NO: 2027520 - RNA, 13 nt, Human herpesvirus 5
cccucgcugggcu

SEQ ID NO: 2027521 - RNA, 16 nt, Human herpesvirus 5
cucugcguugccacgc

SEQ ID NO: 2027522 - RNA, 19 nt, Human herpesvirus 5
cucggaacgacgacucagg

SEQ ID NO: 2027523 - RNA, 22 nt, Human herpesvirus 5
ugagaaccgcacggaguaauca

SEQ ID NO: 2027524 - RNA, 15 nt, Human herpesvirus 5
gcacgucagugguga

SEQ ID NO: 2027525 - RNA, 17 nt, Human herpesvirus 5
uuagacacacgggggcg

SEQ ID NO: 2027526 - RNA, 21 nt, Human herpesvirus 5
ugccgcacgcgcuagccuuuc

SEQ ID NO: 2027527 - RNA, 21 nt, Human herpesvirus 5
aggcgcuggacgccaucaugg

SEQ ID NO: 2027528 - RNA, 23 nt, Human herpesvirus 5
uauugagcaggguaaaaaccacg

SEQ ID NO: 2027529 - RNA, 13 nt, Human herpesvirus 5
cggcgcagcacca

SEQ ID NO: 2027530 - RNA, 20 nt, Human herpesvirus 5
ucuccaucaggaucuggugc

SEQ ID NO: 2027531 - RNA, 22 nt, Human herpesvirus 5
gagacaggacgaggcaggguga

SEQ ID NO: 2027532 - RNA, 19 nt, Human herpesvirus 5
cugcuauaagaaggccaug

SEQ ID NO: 2027533 - RNA, 22 nt, Human herpesvirus 5
gacacagcggaaaaugccgccg

SEQ ID NO: 2027534 - RNA, 18 nt, Human herpesvirus 5
uuucggauguuuacccuu

SEQ ID NO: 2027535 - RNA, 19 nt, Human herpesvirus 5
gggcauacgcgauaucugg

SEQ ID NO: 2027536 - RNA, 14 nt, Human herpesvirus 5
uccuuaucugggug

SEQ ID NO: 2027537 - RNA, 21 nt, Human herpesvirus 5
cggcgcguuguccucgcaccg

SEQ ID NO: 2027538 - RNA, 13 nt, Human herpesvirus 5
gccgacggcggcg

SEQ ID NO: 2027539 - RNA, 14 nt, Human herpesvirus 5
cguguuaucacaga

SEQ ID NO: 2027540 - RNA, 16 nt, Human herpesvirus 5
acaccguuuguggugu

SEQ ID NO: 2027541 - RNA, 12 nt, Human herpesvirus 5
uggcccugcugu

SEQ ID NO: 2027542 - RNA, 22 nt, Human herpesvirus 5
acgagugacgacgacgcugcuu

SEQ ID NO: 2027543 - RNA, 23 nt, Human herpesvirus 5
gccugcacgaccugcuccaguac

SEQ ID NO: 2027544 - RNA, 17 nt, Human herpesvirus 5
aggacagcaaggccgcc

SEQ ID NO: 2027545 - RNA, 13 nt, Human herpesvirus 5
gcggcaccaggaa

SEQ ID NO: 2027546 - RNA, 16 nt, Human herpesvirus 5
cgugucgggaaaggag

SEQ ID NO: 2027547 - RNA, 16 nt, Human herpesvirus 5
gucugcgacuccugga

SEQ ID NO: 2027548 - RNA, 14 nt, Human herpesvirus 5
caauaaaaaccacc

SEQ ID NO: 2027549 - RNA, 17 nt, Human herpesvirus 5
acgucguuuuggagcug

SEQ ID NO: 2027550 - RNA, 17 nt, Human herpesvirus 5
uccgcggacacccgcgg

SEQ ID NO: 2027551 - RNA, 14 nt, Human herpesvirus 5
uuucgguuccaacu

SEQ ID NO: 2027552 - RNA, 16 nt, Human herpesvirus 5
gccugcacgaccugcu

SEQ ID NO: 2027553 - RNA, 21 nt, Human herpesvirus 5
gugcucagcggcguguacagc

SEQ ID NO: 2027554 - RNA, 15 nt, Human herpesvirus 5
gcuuacugccugccg

SEQ ID NO: 2027555 - RNA, 13 nt, Human herpesvirus 5
gcugcgucgccug

SEQ ID NO: 2027556 - RNA, 18 nt, Human herpesvirus 5
uccggcggcgccgucaga

SEQ ID NO: 2027557 - RNA, 15 nt, Human herpesvirus 5
cgcacacuggcugga

SEQ ID NO: 2027558 - RNA, 16 nt, Human herpesvirus 5
gcaagugccugcacga

SEQ ID NO: 2027559 - RNA, 13 nt, Human herpesvirus 5
cggcugucauggg

SEQ ID NO: 2027560 - RNA, 15 nt, Human herpesvirus 5
ugcaacgccuggcgu

SEQ ID NO: 2027561 - RNA, 19 nt, Human herpesvirus 5
gcuuagacauuccccaccu

SEQ ID NO: 2027562 - RNA, 23 nt, Human herpesvirus 5
uucuucugucucgucgacgucau

SEQ ID NO: 2027563 - RNA, 16 nt, Human herpesvirus 5
aggcugugcgcgccgg

SEQ ID NO: 2027564 - RNA, 15 nt, Human herpesvirus 5
aucuucgacuuucug

SEQ ID NO: 2027565 - RNA, 20 nt, Human herpesvirus 5
uuccugcgcgccuaccugac

SEQ ID NO: 2027566 - RNA, 20 nt, Human herpesvirus 5
cagcggccgcagugggccca

SEQ ID NO: 2027567 - RNA, 13 nt, Human herpesvirus 5
cuguuccugcugc

SEQ ID NO: 2027568 - RNA, 19 nt, Human herpesvirus 5
cggugcgcugcagccggag

SEQ ID NO: 2027569 - RNA, 23 nt, Human herpesvirus 5
aggcggcgaggcgaaacuggugc

SEQ ID NO: 2027570 - RNA, 17 nt, Human herpesvirus 5
agagccaccuuggugga

SEQ ID NO: 2027571 - RNA, 21 nt, Human herpesvirus 5
acgcugcgucgcagucagacc

SEQ ID NO: 2027572 - RNA, 12 nt, Human herpesvirus 5
agcaccgccggc

SEQ ID NO: 2027573 - RNA, 17 nt, Human herpesvirus 5
cuggacccacaagcgcc

SEQ ID NO: 2027574 - RNA, 15 nt, Human herpesvirus 5
acuuuacauaaaacc

SEQ ID NO: 2027575 - RNA, 15 nt, Human herpesvirus 5
agggaagccgcgucc

SEQ ID NO: 2027576 - RNA, 12 nt, Human herpesvirus 5
cggccuuucuag

SEQ ID NO: 2027577 - RNA, 21 nt, Human herpesvirus 5
cgucugcacgccccggagugc

SEQ ID NO: 2027578 - RNA, 23 nt, Human herpesvirus 5
cccagcagggcgcgccggcgcca

SEQ ID NO: 2027579 - RNA, 23 nt, Human herpesvirus 5
cggucugcuugcuggcuuggcuc

SEQ ID NO: 2027580 - RNA, 17 nt, Human herpesvirus 5
caucaucaacagcagca

SEQ ID NO: 2027581 - RNA, 18 nt, Human herpesvirus 5
ggucugcuugcuggcuug

SEQ ID NO: 2027582 - RNA, 17 nt, Human herpesvirus 5
agcuggugaucggccgc

SEQ ID NO: 2027583 - RNA, 13 nt, Human herpesvirus 5
aagacgggccugg

SEQ ID NO: 2027584 - RNA, 17 nt, Human herpesvirus 5
guaaaagcugcaugaaa

SEQ ID NO: 2027585 - RNA, 18 nt, Human herpesvirus 5
agccagcuacagccacga

SEQ ID NO: 2027586 - RNA, 17 nt, Human herpesvirus 5
gccgacaaccugcugca

SEQ ID NO: 2027587 - RNA, 19 nt, Human herpesvirus 5
gcgccgucucuucgcgccc

SEQ ID NO: 2027588 - RNA, 13 nt, Human herpesvirus 5
cacagcagcacca

SEQ ID NO: 2027589 - RNA, 16 nt, Human herpesvirus 5
ccgcagcggcuuugug

SEQ ID NO: 2027590 - RNA, 17 nt, Human herpesvirus 5
ucagacccacuaccugg

SEQ ID NO: 2027591 - RNA, 11 nt, Human herpesvirus 5
uuauucaucau

SEQ ID NO: 2027592 - RNA, 23 nt, Human herpesvirus 5
cuuugacgucccuuuuacuagua

SEQ ID NO: 2027593 - RNA, 21 nt, Human herpesvirus 5
ggucaugaguuggugcagcug

SEQ ID NO: 2027594 - RNA, 16 nt, Human herpesvirus 5
agcacgucagugguga

SEQ ID NO: 2027595 - RNA, 18 nt, Human herpesvirus 5
gucggcgcccgggccgcc

SEQ ID NO: 2027596 - RNA, 20 nt, Human herpesvirus 5
uaugcaugucgcgacagaga

SEQ ID NO: 2027597 - RNA, 20 nt, Human herpesvirus 5
ggugugguagcuagugcagc

SEQ ID NO: 2027598 - RNA, 13 nt, Human herpesvirus 5
uuaugauucugca

SEQ ID NO: 2027599 - RNA, 13 nt, Human herpesvirus 5
ccccccaugccgg

SEQ ID NO: 2027600 - RNA, 11 nt, Human herpesvirus 5
auauacacaug

SEQ ID NO: 2027601 - RNA, 16 nt, Human herpesvirus 5
guccgucaugcuggca

SEQ ID NO: 2027602 - RNA, 13 nt, Human herpesvirus 5
gcccucgcagugc

SEQ ID NO: 2027603 - RNA, 16 nt, Human herpesvirus 5
guggauuugggcgugg

SEQ ID NO: 2027604 - RNA, 17 nt, Human herpesvirus 5
agggccgauggcugccc

SEQ ID NO: 2027605 - RNA, 16 nt, Human herpesvirus 5
ucgcgccuuccuccuc

SEQ ID NO: 2027606 - RNA, 14 nt, Human herpesvirus 5
accgcaacucggug

SEQ ID NO: 2027607 - RNA, 10 nt, Human herpesvirus 5
acaaaacaac

SEQ ID NO: 2027608 - RNA, 14 nt, Human herpesvirus 5
guggccgugcuggg

SEQ ID NO: 2027609 - RNA, 21 nt, Human herpesvirus 5
cuucauggcuuggcgcagcgg

SEQ ID NO: 2027610 - RNA, 23 nt, Human herpesvirus 5
ccagcggccgcagugggcccacg

SEQ ID NO: 2027611 - RNA, 21 nt, Human herpesvirus 5
ccuccgcgaacggcgacggca

SEQ ID NO: 2027612 - RNA, 19 nt, Human herpesvirus 5
ugcccgaccacgacacggu

SEQ ID NO: 2027613 - RNA, 15 nt, Human herpesvirus 5
guuguacauggguag

SEQ ID NO: 2027614 - RNA, 15 nt, Human herpesvirus 5
gcccgggccgccgcc

SEQ ID NO: 2027615 - RNA, 19 nt, Human herpesvirus 5
acucuauguuauacucugu

SEQ ID NO: 2027616 - RNA, 14 nt, Human herpesvirus 5
acagcguccacagu

SEQ ID NO: 2027617 - RNA, 16 nt, Human herpesvirus 5
gcagaaguuguugcaa

SEQ ID NO: 2027618 - RNA, 23 nt, Human herpesvirus 5
gucugcauguuggugccccagga

SEQ ID NO: 2027619 - RNA, 16 nt, Human herpesvirus 5
cagcacauuagacaca

SEQ ID NO: 2027620 - RNA, 19 nt, Human herpesvirus 5
ugcgggaacuggccuggcg

SEQ ID NO: 2027621 - RNA, 20 nt, Human herpesvirus 5
guuuuugucaggacuggaag

SEQ ID NO: 2027622 - RNA, 16 nt, Human herpesvirus 5
agacgugcgaccugga

SEQ ID NO: 2027623 - RNA, 18 nt, Human herpesvirus 5
guucagguggaugagggc

SEQ ID NO: 2027624 - RNA, 16 nt, Human herpesvirus 5
cgcguccagcuucugg

SEQ ID NO: 2027625 - RNA, 14 nt, Human herpesvirus 5
caaaagaagcugcc

SEQ ID NO: 2027626 - RNA, 16 nt, Human herpesvirus 5
ugcgcuucugcagcuc

SEQ ID NO: 2027627 - RNA, 15 nt, Human herpesvirus 5
gauaaccuaccuggu

SEQ ID NO: 2027628 - RNA, 15 nt, Human herpesvirus 5
ucggaggaacccugc

SEQ ID NO: 2027629 - RNA, 20 nt, Human herpesvirus 5
acggcguuuuggcgcccccc

SEQ ID NO: 2027630 - RNA, 14 nt, Human herpesvirus 5
guggccgcacaccu

SEQ ID NO: 2027631 - RNA, 13 nt, Human herpesvirus 5
gccuugcaccugg

SEQ ID NO: 2027632 - RNA, 12 nt, Human herpesvirus 5
uggggugggcgc

SEQ ID NO: 2027633 - RNA, 12 nt, Human herpesvirus 5
agcacaccugcc

SEQ ID NO: 2027634 - RNA, 20 nt, Human herpesvirus 5
aaucuaggaacacugaaaac

SEQ ID NO: 2027635 - RNA, 14 nt, Human herpesvirus 5
uagcccucugggcc

SEQ ID NO: 2027636 - RNA, 20 nt, Human herpesvirus 5
ucuuugcuuaucugccucuu

SEQ ID NO: 2027637 - RNA, 20 nt, Human herpesvirus 5
gauaagacggacuguuucau

SEQ ID NO: 2027638 - RNA, 21 nt, Human herpesvirus 5
ccgcgaucgaggcggcggcga

SEQ ID NO: 2027639 - RNA, 13 nt, Human herpesvirus 5
cgacgacucaggg

SEQ ID NO: 2027640 - RNA, 14 nt, Human herpesvirus 5
gccgcgcuccaggc

SEQ ID NO: 2027641 - RNA, 15 nt, Human herpesvirus 5
uacaagaaccacguu

SEQ ID NO: 2027642 - RNA, 19 nt, Human herpesvirus 5
ccgcgucgcuucgccgcca

SEQ ID NO: 2027643 - RNA, 18 nt, Human herpesvirus 5
gccggggaagccuccgga

SEQ ID NO: 2027644 - RNA, 16 nt, Human herpesvirus 5
gcugauaagacggacu

SEQ ID NO: 2027645 - RNA, 19 nt, Human herpesvirus 5
gcugcuuuggagcacggga

SEQ ID NO: 2027646 - RNA, 14 nt, Human herpesvirus 5
acaaccugcugcac

SEQ ID NO: 2027647 - RNA, 14 nt, Human herpesvirus 5
cgccggaggcugug

SEQ ID NO: 2027648 - RNA, 20 nt, Human herpesvirus 5
ccagacugcccuugaaugua

SEQ ID NO: 2027649 - RNA, 19 nt, Human herpesvirus 5
cugggauaccgcccgcaug

SEQ ID NO: 2027650 - RNA, 17 nt, Human herpesvirus 5
cacuauauuaucuuuua

SEQ ID NO: 2027651 - RNA, 22 nt, Human herpesvirus 5
acggccucugggcugagacagg

SEQ ID NO: 2027652 - RNA, 13 nt, Human herpesvirus 5
ucacacugggaga

SEQ ID NO: 2027653 - RNA, 23 nt, Human herpesvirus 5
gcucacagucuaucccuauggca

SEQ ID NO: 2027654 - RNA, 17 nt, Human herpesvirus 5
ucgcagccacgcgcugg

SEQ ID NO: 2027655 - RNA, 17 nt, Human herpesvirus 5
cugccucgaugcgccuc

SEQ ID NO: 2027656 - RNA, 15 nt, Human herpesvirus 5
auuacaguaacgcag

SEQ ID NO: 2027657 - RNA, 16 nt, Human herpesvirus 5
cucgggcuggcgugcu

SEQ ID NO: 2027658 - RNA, 17 nt, Human herpesvirus 5
gauccaguuucaccaag

SEQ ID NO: 2027659 - RNA, 17 nt, Human herpesvirus 5
guuguccucuccuccuu

SEQ ID NO: 2027660 - RNA, 12 nt, Human herpesvirus 5
agcccaccgccc

SEQ ID NO: 2027661 - RNA, 22 nt, Human herpesvirus 5
gccccgaagguuagcgccgcgg

SEQ ID NO: 2027662 - RNA, 22 nt, Human herpesvirus 5
aaauacagggaaugggaaaaac

SEQ ID NO: 2027663 - RNA, 18 nt, Human herpesvirus 5
gucccagcagggcgcgcc

SEQ ID NO: 2027664 - RNA, 12 nt, Human herpesvirus 5
guggcaaagagc

SEQ ID NO: 2027665 - RNA, 14 nt, Human herpesvirus 5
caacgcuuuggaaa

SEQ ID NO: 2027666 - RNA, 13 nt, Human herpesvirus 5
cgaagaagaacaa

SEQ ID NO: 2027667 - RNA, 16 nt, Human herpesvirus 5
acgucaccgugcccca

SEQ ID NO: 2027668 - RNA, 15 nt, Human herpesvirus 5
cagcauggacugucu

SEQ ID NO: 2027669 - RNA, 21 nt, Human herpesvirus 5
aagcgcggagguuugucuggc

SEQ ID NO: 2027670 - RNA, 12 nt, Human herpesvirus 5
acacauugcuga

SEQ ID NO: 2027671 - RNA, 15 nt, Human herpesvirus 5
cucugucggcgccgc

SEQ ID NO: 2027672 - RNA, 18 nt, Human herpesvirus 5
gccggaaacaccgcgagu

SEQ ID NO: 2027673 - RNA, 18 nt, Human herpesvirus 5
cugcaacugcaccagcaa

SEQ ID NO: 2027674 - RNA, 14 nt, Human herpesvirus 5
aucgugggccagga

SEQ ID NO: 2027675 - RNA, 11 nt, Human herpesvirus 5
aucacgugcca

SEQ ID NO: 2027676 - RNA, 13 nt, Human herpesvirus 5
auccgcaccuguc

SEQ ID NO: 2027677 - RNA, 18 nt, Human herpesvirus 5
cgugacgcagucugcccu

SEQ ID NO: 2027678 - RNA, 14 nt, Human herpesvirus 5
accucuuugagcac

SEQ ID NO: 2027679 - RNA, 15 nt, Human herpesvirus 5
gucucuucgcgcccc

SEQ ID NO: 2027680 - RNA, 18 nt, Human herpesvirus 5
guggcgcugcacaccuau

SEQ ID NO: 2027681 - RNA, 15 nt, Human herpesvirus 5
cugggcuacaagugc

SEQ ID NO: 2027682 - RNA, 15 nt, Human herpesvirus 5
cucgcacggccugug

SEQ ID NO: 2027683 - RNA, 14 nt, Human herpesvirus 5
aacuagccuucccg

SEQ ID NO: 2027684 - RNA, 19 nt, Human herpesvirus 5
cagcgccagcggccuggcc

SEQ ID NO: 2027685 - RNA, 14 nt, Human herpesvirus 5
caccaaagaugaag

SEQ ID NO: 2027686 - RNA, 18 nt, Human herpesvirus 5
gcagccguuuccagagaa

SEQ ID NO: 2027687 - RNA, 20 nt, Human herpesvirus 5
cguuagagaaagagcagcgc

SEQ ID NO: 2027688 - RNA, 23 nt, Human herpesvirus 5
gcggucaugaguuggugcagcug

SEQ ID NO: 2027689 - RNA, 15 nt, Human herpesvirus 5
caccgaugccggccu

SEQ ID NO: 2027690 - RNA, 19 nt, Human herpesvirus 5
gcguuguuugggaacuuug

SEQ ID NO: 2027691 - RNA, 15 nt, Human herpesvirus 5
ugaaccuccgcccuu

SEQ ID NO: 2027692 - RNA, 15 nt, Human herpesvirus 5
cgcgcagcgcgcuuu

SEQ ID NO: 2027693 - RNA, 20 nt, Human herpesvirus 5
ccgugacacuuuggcucuuu

SEQ ID NO: 2027694 - RNA, 21 nt, Human herpesvirus 5
uucuugcaagaggaaugcaug

SEQ ID NO: 2027695 - RNA, 22 nt, Human herpesvirus 5
cgaccacgacacggugcugcug

SEQ ID NO: 2027696 - RNA, 14 nt, Human herpesvirus 5
uaugagaaaaggga

SEQ ID NO: 2027697 - RNA, 12 nt, Human herpesvirus 5
ggacgaugagcc

SEQ ID NO: 2027698 - RNA, 21 nt, Human herpesvirus 5
gcguggucaacgcuuuggaaa

SEQ ID NO: 2027699 - RNA, 17 nt, Human herpesvirus 5
ucggggcgcagaaacuu

SEQ ID NO: 2027700 - RNA, 15 nt, Human herpesvirus 5
ggccacccacccggu

SEQ ID NO: 2027701 - RNA, 20 nt, Human herpesvirus 5
ugucagucucugaaggacag

SEQ ID NO: 2027702 - RNA, 16 nt, Human herpesvirus 5
cacccgaguccugguc

SEQ ID NO: 2027703 - RNA, 16 nt, Human herpesvirus 5
acagcguccacaguuu

SEQ ID NO: 2027704 - RNA, 23 nt, Human herpesvirus 5
gaguuggccucgauccauccugg

SEQ ID NO: 2027705 - RNA, 19 nt, Human herpesvirus 5
gaccuugcugaugugccag

SEQ ID NO: 2027706 - RNA, 22 nt, Human herpesvirus 5
ggcgcaucacccgccucaugga

SEQ ID NO: 2027707 - RNA, 13 nt, Human herpesvirus 5
ucuacgcuguacu

SEQ ID NO: 2027708 - RNA, 16 nt, Human herpesvirus 5
ugcgccuuccagucca

SEQ ID NO: 2027709 - RNA, 17 nt, Human herpesvirus 5
acggcgucuuccuccuc

SEQ ID NO: 2027710 - RNA, 14 nt, Human herpesvirus 5
cgcacgcuggagga

SEQ ID NO: 2027711 - RNA, 14 nt, Human herpesvirus 5
ucagguggaugagg

SEQ ID NO: 2027712 - RNA, 20 nt, Human herpesvirus 5
uccacgacucgcacggccug

SEQ ID NO: 2027713 - RNA, 15 nt, Human herpesvirus 5
uaauguaccaagaau

SEQ ID NO: 2027714 - RNA, 14 nt, Human herpesvirus 5
cgccgcgacaacgg

SEQ ID NO: 2027715 - RNA, 15 nt, Human herpesvirus 5
ugaauauacagacuu

SEQ ID NO: 2027716 - RNA, 22 nt, Human herpesvirus 5
aauaaucccuguaauuauucca

SEQ ID NO: 2027717 - RNA, 12 nt, Human herpesvirus 5
guuucaaaccca

SEQ ID NO: 2027718 - RNA, 18 nt, Human herpesvirus 5
cuuacgucuacagcaugg

SEQ ID NO: 2027719 - RNA, 13 nt, Human herpesvirus 5
gacgucaaugaca

SEQ ID NO: 2027720 - RNA, 16 nt, Human herpesvirus 5
cguuaagcguugagcc

SEQ ID NO: 2027721 - RNA, 19 nt, Human herpesvirus 5
gugcaccugcugccgccac

SEQ ID NO: 2027722 - RNA, 14 nt, Human herpesvirus 5
uaguuguugcagaa

SEQ ID NO: 2027723 - RNA, 16 nt, Human herpesvirus 5
aggaagucgaucugga

SEQ ID NO: 2027724 - RNA, 21 nt, Human herpesvirus 5
ugguaguugauacgcuagcag

SEQ ID NO: 2027725 - RNA, 21 nt, Human herpesvirus 5
gacaugguuuggccguguccu

SEQ ID NO: 2027726 - RNA, 22 nt, Human herpesvirus 5
ccaaagccgccgccgaagccug

SEQ ID NO: 2027727 - RNA, 16 nt, Human herpesvirus 5
cgguccaguggcaggc

SEQ ID NO: 2027728 - RNA, 13 nt, Human herpesvirus 5
gcgccgccuggag

SEQ ID NO: 2027729 - RNA, 17 nt, Human herpesvirus 5
ucaauaaagaaaaccac

SEQ ID NO: 2027730 - RNA, 19 nt, Human herpesvirus 5
gcugcuauaagaaggccau

SEQ ID NO: 2027731 - RNA, 20 nt, Human herpesvirus 5
cuuccauaauaaaaguaaaa

SEQ ID NO: 2027732 - RNA, 13 nt, Human herpesvirus 5
ggaggacuuuuuc

SEQ ID NO: 2027733 - RNA, 20 nt, Human herpesvirus 5
cucaagaggaccguuaagcu

SEQ ID NO: 2027734 - RNA, 21 nt, Human herpesvirus 5
gcgacauuuugggucagcggc

SEQ ID NO: 2027735 - RNA, 21 nt, Human herpesvirus 5
gcgcccgcgccucacgcugca

SEQ ID NO: 2027736 - RNA, 17 nt, Human herpesvirus 5
cggcuaccaugcgcaac

SEQ ID NO: 2027737 - RNA, 15 nt, Human herpesvirus 5
agguaugccgcgucu

SEQ ID NO: 2027738 - RNA, 22 nt, Human herpesvirus 5
ccaccgucgcccucagcgugcu

SEQ ID NO: 2027739 - RNA, 16 nt, Human herpesvirus 5
cgucugcgacuccugg

SEQ ID NO: 2027740 - RNA, 19 nt, Human herpesvirus 5
gcugccgcucagcgagcuc

SEQ ID NO: 2027741 - RNA, 16 nt, Human herpesvirus 5
gaagacaccuggaaag

SEQ ID NO: 2027742 - RNA, 14 nt, Human herpesvirus 5
cggugauuucuugc

SEQ ID NO: 2027743 - RNA, 17 nt, Human herpesvirus 5
gacuuagaaucucuugc

SEQ ID NO: 2027744 - RNA, 20 nt, Human herpesvirus 5
caacgcgcccgacagcugca

SEQ ID NO: 2027745 - RNA, 17 nt, Human herpesvirus 5
accgucgcccucagcgu

SEQ ID NO: 2027746 - RNA, 12 nt, Human herpesvirus 5
cacuuucucugg

SEQ ID NO: 2027747 - RNA, 18 nt, Human herpesvirus 5
ugcacgggcucgggugac

SEQ ID NO: 2027748 - RNA, 14 nt, Human herpesvirus 5
guaagcggcagcau

SEQ ID NO: 2027749 - RNA, 16 nt, Human herpesvirus 5
ccgccacgcugcuuca

SEQ ID NO: 2027750 - RNA, 18 nt, Human herpesvirus 5
ucccuccugcagcugcac

SEQ ID NO: 2027751 - RNA, 14 nt, Human herpesvirus 5
ugaagcggagugca

SEQ ID NO: 2027752 - RNA, 12 nt, Human herpesvirus 5
ccuucucccccu

SEQ ID NO: 2027753 - RNA, 19 nt, Human herpesvirus 5
gugcggcccccagaggccc

SEQ ID NO: 2027754 - RNA, 19 nt, Human herpesvirus 5
cgggcaacgcguggcccug

SEQ ID NO: 2027755 - RNA, 16 nt, Human herpesvirus 5
gaguaccccacgcaua

SEQ ID NO: 2027756 - RNA, 19 nt, Human herpesvirus 5
cuacgugcgcgccacggcg

SEQ ID NO: 2027757 - RNA, 12 nt, Human herpesvirus 5
cagcuggcuugu

SEQ ID NO: 2027758 - RNA, 17 nt, Human herpesvirus 5
aaaagugcgucaaagcu

SEQ ID NO: 2027759 - RNA, 15 nt, Human herpesvirus 5
cggccggcugcugca

SEQ ID NO: 2027760 - RNA, 14 nt, Human herpesvirus 5
cgcuuagccaccac

SEQ ID NO: 2027761 - RNA, 19 nt, Human herpesvirus 5
acaugcccagcaucuccuc

SEQ ID NO: 2027762 - RNA, 14 nt, Human herpesvirus 5
cgagcaggccaugg

SEQ ID NO: 2027763 - RNA, 19 nt, Human herpesvirus 5
cguguuucaaacagcacau

SEQ ID NO: 2027764 - RNA, 24 nt, Human herpesvirus 5
caaggcuccgaaaccgagcaagca

SEQ ID NO: 2027765 - RNA, 12 nt, Human herpesvirus 5
cguggcgcacac

SEQ ID NO: 2027766 - RNA, 14 nt, Human herpesvirus 5
ugggucccggcgcg

SEQ ID NO: 2027767 - RNA, 21 nt, Human herpesvirus 5
gccaugagcggcaggaaggcc

SEQ ID NO: 2027768 - RNA, 14 nt, Human herpesvirus 5
auguggaaaucacc

SEQ ID NO: 2027769 - RNA, 21 nt, Human herpesvirus 5
caaagcccgggccgccgccag

SEQ ID NO: 2027770 - RNA, 21 nt, Human herpesvirus 5
cucgugugcuguugaccuggg

SEQ ID NO: 2027771 - RNA, 19 nt, Human herpesvirus 5
uguuaucaucauggagcua

SEQ ID NO: 2027772 - RNA, 21 nt, Human herpesvirus 5
cacguagaucccacuggcaau

SEQ ID NO: 2027773 - RNA, 12 nt, Human herpesvirus 5
cgcacgacuggc

SEQ ID NO: 2027774 - RNA, 12 nt, Human herpesvirus 5
augaugcugcug

SEQ ID NO: 2027775 - RNA, 19 nt, Human herpesvirus 5
acgccgcgacaacggccgc

SEQ ID NO: 2027776 - RNA, 21 nt, Human herpesvirus 5
acacguaauacucgcgucacg

SEQ ID NO: 2027777 - RNA, 17 nt, Human herpesvirus 5
cuagacucacuuuauug

SEQ ID NO: 2027778 - RNA, 17 nt, Human herpesvirus 5
gacucuaacacccaggc

SEQ ID NO: 2027779 - RNA, 14 nt, Human herpesvirus 5
gucaggacuggaag

SEQ ID NO: 2027780 - RNA, 18 nt, Human herpesvirus 5
cgugauucguaggcagcg

SEQ ID NO: 2027781 - RNA, 18 nt, Human herpesvirus 5
agacugcgguuaacccua

SEQ ID NO: 2027782 - RNA, 20 nt, Human herpesvirus 5
gccaccaggugccggcgacu

SEQ ID NO: 2027783 - RNA, 12 nt, Human herpesvirus 5
aacaacagcagc

SEQ ID NO: 2027784 - RNA, 19 nt, Human herpesvirus 5
acgaucuuuaguccggagg

SEQ ID NO: 2027785 - RNA, 17 nt, Human herpesvirus 5
gacauggcgacuuuccg

SEQ ID NO: 2027786 - RNA, 22 nt, Human herpesvirus 5
gagccacucggccauaagaaag

SEQ ID NO: 2027787 - RNA, 15 nt, Human herpesvirus 5
gccgcagaaggccau

SEQ ID NO: 2027788 - RNA, 18 nt, Human herpesvirus 5
acgaugcuuuccuggaca

SEQ ID NO: 2027789 - RNA, 12 nt, Human herpesvirus 5
gcgcuggacucu

SEQ ID NO: 2027790 - RNA, 20 nt, Human herpesvirus 5
ccgcauccugcccaccgccu

SEQ ID NO: 2027791 - RNA, 15 nt, Human herpesvirus 5
ucauucguguugaca

SEQ ID NO: 2027792 - RNA, 23 nt, Human herpesvirus 5
aucacgugugugcguuuucuagu

SEQ ID NO: 2027793 - RNA, 22 nt, Human herpesvirus 5
acgugguuuuuuuaacagugug

SEQ ID NO: 2027794 - RNA, 19 nt, Human herpesvirus 5
cugucaugggucugcgcuu

SEQ ID NO: 2027795 - RNA, 14 nt, Human herpesvirus 5
cuacggcggaccgc

SEQ ID NO: 2027796 - RNA, 13 nt, Human herpesvirus 5
gaaaagagaugau

SEQ ID NO: 2027797 - RNA, 21 nt, Human herpesvirus 5
caccaguuccugcgcgccuac

SEQ ID NO: 2027798 - RNA, 22 nt, Human herpesvirus 5
acgccugcgacguuggcucucg

SEQ ID NO: 2027799 - RNA, 23 nt, Human herpesvirus 5
aaacucccacuccuguuggcuua

SEQ ID NO: 2027800 - RNA, 11 nt, Human herpesvirus 5
caacagcagca

SEQ ID NO: 2027801 - RNA, 20 nt, Human herpesvirus 5
uucccucuagagacagacga

SEQ ID NO: 2027802 - RNA, 15 nt, Human herpesvirus 5
cucugggaagcugcg

SEQ ID NO: 2027803 - RNA, 22 nt, Human herpesvirus 5
gagguccuuuggguccagccag

SEQ ID NO: 2027804 - RNA, 21 nt, Human herpesvirus 5
ccacaagcgccgucacuuccc

SEQ ID NO: 2027805 - RNA, 15 nt, Human herpesvirus 5
acaacggcuggaaau

SEQ ID NO: 2027806 - RNA, 21 nt, Human herpesvirus 5
ccacgcgucgaccccaaccuu

SEQ ID NO: 2027807 - RNA, 17 nt, Human herpesvirus 5
gccgcccucccucaaca

SEQ ID NO: 2027808 - RNA, 22 nt, Human herpesvirus 5
ccgagauaucagaggccaccca

SEQ ID NO: 2027809 - RNA, 13 nt, Human herpesvirus 5
cgcguagccaccu

SEQ ID NO: 2027810 - RNA, 20 nt, Human herpesvirus 5
caguccauugucaguauuuu

SEQ ID NO: 2027811 - RNA, 12 nt, Human herpesvirus 5
cccgcacacugg

SEQ ID NO: 2027812 - RNA, 23 nt, Human herpesvirus 5
cgucggcugccuguuccugcugc

SEQ ID NO: 2027813 - RNA, 11 nt, Human herpesvirus 5
cgaguuguagu

SEQ ID NO: 2027814 - RNA, 14 nt, Human herpesvirus 5
guauaaacuggggc

SEQ ID NO: 2027815 - RNA, 15 nt, Human herpesvirus 5
cucugcaacgccugg

SEQ ID NO: 2027816 - RNA, 20 nt, Human herpesvirus 5
gaggucugggaugugcagca

SEQ ID NO: 2027817 - RNA, 15 nt, Human herpesvirus 5
ugguggcucaugccg

SEQ ID NO: 2027818 - RNA, 14 nt, Human herpesvirus 5
aggccagcugccac

SEQ ID NO: 2027819 - RNA, 13 nt, Human herpesvirus 5
caguagacagaca

SEQ ID NO: 2027820 - RNA, 21 nt, Human herpesvirus 5
agcacgucuagcaggcccagg

SEQ ID NO: 2027821 - RNA, 15 nt, Human herpesvirus 5
cgcaagggcugcucg

SEQ ID NO: 2027822 - RNA, 15 nt, Human herpesvirus 5
cuuacaucucacgga

SEQ ID NO: 2027823 - RNA, 13 nt, Human herpesvirus 5
ucagcagcaccuc

SEQ ID NO: 2027824 - RNA, 20 nt, Human herpesvirus 5
acuagcgaaguacacaguuu

SEQ ID NO: 2027825 - RNA, 13 nt, Human herpesvirus 5
caaccgcgagcgg

SEQ ID NO: 2027826 - RNA, 20 nt, Human herpesvirus 5
cgaggcucucuauccggugg

SEQ ID NO: 2027827 - RNA, 12 nt, Human herpesvirus 5
ccuucuugccca

SEQ ID NO: 2027828 - RNA, 16 nt, Human herpesvirus 5
gcgggagacuaggucg

SEQ ID NO: 2027829 - RNA, 14 nt, Human herpesvirus 5
aaaagaagcugccc

SEQ ID NO: 2027830 - RNA, 14 nt, Human herpesvirus 5
uuucaacaaauacc

SEQ ID NO: 2027831 - RNA, 14 nt, Human herpesvirus 5
acggagcacgggcu

SEQ ID NO: 2027832 - RNA, 16 nt, Human herpesvirus 5
gguaacuggcagagcc

SEQ ID NO: 2027833 - RNA, 21 nt, Human herpesvirus 5
gucaagggucacggugccaug

SEQ ID NO: 2027834 - RNA, 21 nt, Human herpesvirus 5
ucagaccgcaacaacagcagc

SEQ ID NO: 2027835 - RNA, 16 nt, Human herpesvirus 5
cuuaacgcgcaagugc

SEQ ID NO: 2027836 - RNA, 15 nt, Human herpesvirus 5
cuugacgcugcuggc

SEQ ID NO: 2027837 - RNA, 15 nt, Human herpesvirus 5
aucgcgagcugggcg

SEQ ID NO: 2027838 - RNA, 19 nt, Human herpesvirus 5
aaacucccacuccuguugg

SEQ ID NO: 2027839 - RNA, 15 nt, Human herpesvirus 5
auggccgacgaggcc

SEQ ID NO: 2027840 - RNA, 14 nt, Human herpesvirus 5
gagugcaucucgag

SEQ ID NO: 2027841 - RNA, 16 nt, Human herpesvirus 5
ugggcgcgcuggagcu

SEQ ID NO: 2027842 - RNA, 21 nt, Human herpesvirus 5
guacgcgcuaaaggugcauga

SEQ ID NO: 2027843 - RNA, 14 nt, Human herpesvirus 5
aaagaccgcugccu

SEQ ID NO: 2027844 - RNA, 19 nt, Human herpesvirus 5
ucuugcgcuucugcagcuc

SEQ ID NO: 2027845 - RNA, 13 nt, Human herpesvirus 5
gcugauccgcagg

SEQ ID NO: 2027846 - RNA, 20 nt, Human herpesvirus 5
ggcgccgggacucuggugcu

SEQ ID NO: 2027847 - RNA, 18 nt, Human herpesvirus 5
ucaauacaucauaugcua

SEQ ID NO: 2027848 - RNA, 15 nt, Human herpesvirus 5
ccucuagagacagac

SEQ ID NO: 2027849 - RNA, 16 nt, Human herpesvirus 5
cacccgcaccagacuu

SEQ ID NO: 2027850 - RNA, 14 nt, Human herpesvirus 5
aacaaacaaugaca

SEQ ID NO: 2027851 - RNA, 21 nt, Human herpesvirus 5
aaagcgucaaucagacuuucg

SEQ ID NO: 2027852 - RNA, 16 nt, Human herpesvirus 5
augcagcacauuguau

SEQ ID NO: 2027853 - RNA, 13 nt, Human herpesvirus 5
cucucggucggcg

SEQ ID NO: 2027854 - RNA, 16 nt, Human herpesvirus 5
gacgcuucauauuagu

SEQ ID NO: 2027855 - RNA, 23 nt, Human herpesvirus 5
cgccguuugcccgaagcggcugu

SEQ ID NO: 2027856 - RNA, 18 nt, Human herpesvirus 5
cucagcggcguguacagc

SEQ ID NO: 2027857 - RNA, 14 nt, Human herpesvirus 5
uugcuuuugcauau

SEQ ID NO: 2027858 - RNA, 20 nt, Human herpesvirus 5
cuugcgcucggucagcuuga

SEQ ID NO: 2027859 - RNA, 21 nt, Human herpesvirus 5
gcgcccaaaccgcaggagcug

SEQ ID NO: 2027860 - RNA, 21 nt, Human herpesvirus 5
gcacauuagacacacgggggc

SEQ ID NO: 2027861 - RNA, 22 nt, Human herpesvirus 5
gcucggcgcccaaaccgcagga

SEQ ID NO: 2027862 - RNA, 17 nt, Human herpesvirus 5
gcugcuguugugggugc

SEQ ID NO: 2027863 - RNA, 22 nt, Human herpesvirus 5
ggccucuaucugcgccaguacg

SEQ ID NO: 2027864 - RNA, 17 nt, Human herpesvirus 5
ucaaacaccgcugcggc

SEQ ID NO: 2027865 - RNA, 19 nt, Human herpesvirus 5
cggcugccggucuacagac

SEQ ID NO: 2027866 - RNA, 22 nt, Human herpesvirus 5
ggcaggcggguugcagcuuuug

SEQ ID NO: 2027867 - RNA, 15 nt, Human herpesvirus 5
uuguugagcauaugu

SEQ ID NO: 2027868 - RNA, 22 nt, Human herpesvirus 5
ggaucaauugcgggcccugcug

SEQ ID NO: 2027869 - RNA, 21 nt, Human herpesvirus 5
gucaugucuccgaacucagag

SEQ ID NO: 2027870 - RNA, 20 nt, Human herpesvirus 5
cugacccuccccccaucccg

SEQ ID NO: 2027871 - RNA, 21 nt, Human herpesvirus 5
ugucaaggaacgcguguuuug

SEQ ID NO: 2027872 - RNA, 20 nt, Human herpesvirus 5
ucccucaccgaccagcacuc

SEQ ID NO: 2027873 - RNA, 13 nt, Human herpesvirus 5
cccgcgucccugg

SEQ ID NO: 2027874 - RNA, 18 nt, Human herpesvirus 5
aguuguagucgcgguggc

SEQ ID NO: 2027875 - RNA, 21 nt, Human herpesvirus 5
gggaucuaccagcccagggau

SEQ ID NO: 2027876 - RNA, 14 nt, Human herpesvirus 5
gcgcggccugcugc

SEQ ID NO: 2027877 - RNA, 13 nt, Human herpesvirus 5
gcucaucgucacg

SEQ ID NO: 2027878 - RNA, 18 nt, Human herpesvirus 5
uuauuguguucuccugcc

SEQ ID NO: 2027879 - RNA, 18 nt, Human herpesvirus 5
ccuccggaacccucuggc

SEQ ID NO: 2027880 - RNA, 12 nt, Human herpesvirus 5
cggcucucaggc

SEQ ID NO: 2027881 - RNA, 17 nt, Human herpesvirus 5
cuccccggugugucuau

SEQ ID NO: 2027882 - RNA, 20 nt, Human herpesvirus 5
cgcaucugcaagucccuggc

SEQ ID NO: 2027883 - RNA, 21 nt, Human herpesvirus 5
uaaccacgucgaccaggugcu

SEQ ID NO: 2027884 - RNA, 14 nt, Human herpesvirus 5
ccuccagcagcagc

SEQ ID NO: 2027885 - RNA, 21 nt, Human herpesvirus 5
cuuccguguccccugccaccu

SEQ ID NO: 2027886 - RNA, 13 nt, Human herpesvirus 5
gagaccggcggac

SEQ ID NO: 2027887 - RNA, 17 nt, Human herpesvirus 5
uggggaaguacaauauc

SEQ ID NO: 2027888 - RNA, 12 nt, Human herpesvirus 5
cuuauguuucug

SEQ ID NO: 2027889 - RNA, 18 nt, Human herpesvirus 5
caugaugcaaauaaagau

SEQ ID NO: 2027890 - RNA, 22 nt, Human herpesvirus 5
uuggacgaugcuuuccuggaca

SEQ ID NO: 2027891 - RNA, 23 nt, Human herpesvirus 5
aaagucuacgaucgcuggaaaga

SEQ ID NO: 2027892 - RNA, 15 nt, Human herpesvirus 5
gacggaguuggccuc

SEQ ID NO: 2027893 - RNA, 15 nt, Human herpesvirus 5
agacccacuaccugg

SEQ ID NO: 2027894 - RNA, 18 nt, Human herpesvirus 5
caccacacgucgugagca

SEQ ID NO: 2027895 - RNA, 12 nt, Human herpesvirus 5
ggaagcugcugg

SEQ ID NO: 2027896 - RNA, 21 nt, Human herpesvirus 5
ucagccucuguguucccaaca

SEQ ID NO: 2027897 - RNA, 12 nt, Human herpesvirus 5
ugccuguuccug

SEQ ID NO: 2027898 - RNA, 13 nt, Human herpesvirus 5
caggcggagauga

SEQ ID NO: 2027899 - RNA, 17 nt, Human herpesvirus 5
cgccgauagaggcgaca

SEQ ID NO: 2027900 - RNA, 15 nt, Human herpesvirus 5
caccgacacagcagc

SEQ ID NO: 2027901 - RNA, 16 nt, Human herpesvirus 5
gccgcugccgcucagc

SEQ ID NO: 2027902 - RNA, 19 nt, Human herpesvirus 5
gcuacgguggugugugggg

SEQ ID NO: 2027903 - RNA, 21 nt, Human herpesvirus 5
aagauagagaaaccgcaugug

SEQ ID NO: 2027904 - RNA, 18 nt, Human herpesvirus 5
caguguuggaucagacuc

SEQ ID NO: 2027905 - RNA, 16 nt, Human herpesvirus 5
ccucggugcccgcaca

SEQ ID NO: 2027906 - RNA, 17 nt, Human herpesvirus 5
caccugagacuggucug

SEQ ID NO: 2027907 - RNA, 19 nt, Human herpesvirus 5
gcgacguggaggagaccau

SEQ ID NO: 2027908 - RNA, 12 nt, Human herpesvirus 5
caucaggugaca

SEQ ID NO: 2027909 - RNA, 21 nt, Human herpesvirus 5
cggcugccuguuccugcugcu

SEQ ID NO: 2027910 - RNA, 20 nt, Human herpesvirus 5
gugcuaccagcugcaggcag

SEQ ID NO: 2027911 - RNA, 17 nt, Human herpesvirus 5
ggcggacuuggcagcgg

SEQ ID NO: 2027912 - RNA, 13 nt, Human herpesvirus 5
cuagagacagacg

SEQ ID NO: 2027913 - RNA, 14 nt, Human herpesvirus 5
ugggcgacaugcac

SEQ ID NO: 2027914 - RNA, 18 nt, Human herpesvirus 5
cauagcguaaauccccgu

SEQ ID NO: 2027915 - RNA, 23 nt, Human herpesvirus 5
acucgcugccgcagcugcuggag

SEQ ID NO: 2027916 - RNA, 17 nt, Human herpesvirus 5
ggcauacaaugugcugc

SEQ ID NO: 2027917 - RNA, 23 nt, Human herpesvirus 5
cgccgaggcuacugcugcuucug

SEQ ID NO: 2027918 - RNA, 14 nt, Human herpesvirus 5
ccaccauagccacu

SEQ ID NO: 2027919 - RNA, 18 nt, Human herpesvirus 5
ccgagcgggaggcgguga

SEQ ID NO: 2027920 - RNA, 18 nt, Human herpesvirus 5
ggugcuauggcugcucaa

SEQ ID NO: 2027921 - RNA, 18 nt, Human herpesvirus 5
ucccacaggagucucugg

SEQ ID NO: 2027922 - RNA, 15 nt, Human herpesvirus 5
uccgcuuccucagcu

SEQ ID NO: 2027923 - RNA, 22 nt, Human herpesvirus 5
cugcccuuuacggugcugcguc

SEQ ID NO: 2027924 - RNA, 16 nt, Human herpesvirus 5
gucggcgccccacagc

SEQ ID NO: 2027925 - RNA, 11 nt, Human herpesvirus 5
cgcgagcuggg

SEQ ID NO: 2027926 - RNA, 18 nt, Human herpesvirus 5
ccauacuuuuacaugaac

SEQ ID NO: 2027927 - RNA, 13 nt, Human herpesvirus 5
cuacgagcugggc

SEQ ID NO: 2027928 - RNA, 21 nt, Human herpesvirus 5
cgccagcguccgcgccugcac

SEQ ID NO: 2027929 - RNA, 14 nt, Human herpesvirus 5
cucaccaaagccgc

SEQ ID NO: 2027930 - RNA, 15 nt, Human herpesvirus 5
cgacaaccugcugca

SEQ ID NO: 2027931 - RNA, 22 nt, Human herpesvirus 5
gccgucacugccaccgacaugg

SEQ ID NO: 2027932 - RNA, 18 nt, Human herpesvirus 5
ccgcgucagcggccgccg

SEQ ID NO: 2027933 - RNA, 20 nt, Human herpesvirus 5
cuaccuuguaccaacugagc

SEQ ID NO: 2027934 - RNA, 12 nt, Human herpesvirus 5
aaacagcacauu

SEQ ID NO: 2027935 - RNA, 21 nt, Human herpesvirus 5
aggguucguacgcuucggcac

SEQ ID NO: 2027936 - RNA, 17 nt, Human herpesvirus 5
ucagcggcacgccgccg

SEQ ID NO: 2027937 - RNA, 19 nt, Human herpesvirus 5
uagacaucacaguucacca

SEQ ID NO: 2027938 - RNA, 12 nt, Human herpesvirus 5
gcacccgacggc

SEQ ID NO: 2027939 - RNA, 17 nt, Human herpesvirus 5
uuauuuacaucuguaca

SEQ ID NO: 2027940 - RNA, 19 nt, Human herpesvirus 5
uguccccgcaaacucccac

SEQ ID NO: 2027941 - RNA, 22 nt, Human herpesvirus 5
gcccgaggaucuggcggccgcc

SEQ ID NO: 2027942 - RNA, 16 nt, Human herpesvirus 5
gccacgcguacuggcu

SEQ ID NO: 2027943 - RNA, 23 nt, Human herpesvirus 5
gacucuuuaaccgagcugaagga

SEQ ID NO: 2027944 - RNA, 15 nt, Human herpesvirus 5
guauaaagauucacu

SEQ ID NO: 2027945 - RNA, 22 nt, Human herpesvirus 5
cugaguucacgcgcggaaccca

SEQ ID NO: 2027946 - RNA, 17 nt, Human herpesvirus 5
ucaccaaagccgccgcc

SEQ ID NO: 2027947 - RNA, 17 nt, Human herpesvirus 5
guuccucauucaaccug

SEQ ID NO: 2027948 - RNA, 20 nt, Human herpesvirus 5
agacgauuuuaugcgccgcc

SEQ ID NO: 2027949 - RNA, 18 nt, Human herpesvirus 5
guaacuggcagagccacg

SEQ ID NO: 2027950 - RNA, 18 nt, Human herpesvirus 5
acgccgucaaggccgccu

SEQ ID NO: 2027951 - RNA, 18 nt, Human herpesvirus 5
gcaucgcaacaacagcaa

SEQ ID NO: 2027952 - RNA, 22 nt, Human herpesvirus 5
aaagcacaauacacaugugguu

SEQ ID NO: 2027953 - RNA, 23 nt, Human herpesvirus 5
ggacggcuacauguguccgggca

SEQ ID NO: 2027954 - RNA, 15 nt, Human herpesvirus 5
auaagaaaagacaau

SEQ ID NO: 2027955 - RNA, 17 nt, Human herpesvirus 5
cuucucgaucuuuugga

SEQ ID NO: 2027956 - RNA, 16 nt, Human herpesvirus 5
augaauuccucuauug

SEQ ID NO: 2027957 - RNA, 18 nt, Human herpesvirus 5
acuggaccacguuguccg

SEQ ID NO: 2027958 - RNA, 13 nt, Human herpesvirus 5
gcagaaugaacaa

SEQ ID NO: 2027959 - RNA, 16 nt, Human herpesvirus 5
aggucguggaggcagc

SEQ ID NO: 2027960 - RNA, 17 nt, Human herpesvirus 5
gugcccgucggcugccu

SEQ ID NO: 2027961 - RNA, 13 nt, Human herpesvirus 5
gguggcggcagcc

SEQ ID NO: 2027962 - RNA, 14 nt, Human herpesvirus 5
gaagggugugacug

SEQ ID NO: 2027963 - RNA, 14 nt, Human herpesvirus 5
guucuguaaucuuc

SEQ ID NO: 2027964 - RNA, 19 nt, Human herpesvirus 5
cacagagucgccaguccau

SEQ ID NO: 2027965 - RNA, 15 nt, Human herpesvirus 5
caugcgguguuuccg

SEQ ID NO: 2027966 - RNA, 22 nt, Human herpesvirus 5
cauauguagcacucaacauguu

SEQ ID NO: 2027967 - RNA, 18 nt, Human herpesvirus 5
gcggcucgggcuggcgug

SEQ ID NO: 2027968 - RNA, 17 nt, Human herpesvirus 5
ucgguguuaaggauucu

SEQ ID NO: 2027969 - RNA, 16 nt, Human herpesvirus 5
agaguuguggcaaaga

SEQ ID NO: 2027970 - RNA, 23 nt, Human herpesvirus 5
gcggaggauccaaggccuccagc

SEQ ID NO: 2027971 - RNA, 23 nt, Human herpesvirus 5
auaaaaugcuguauuauauacaa

SEQ ID NO: 2027972 - RNA, 17 nt, Human herpesvirus 5
gcccucagcgugcucag

SEQ ID NO: 2027973 - RNA, 15 nt, Human herpesvirus 5
gccgcgccgccugga

SEQ ID NO: 2027974 - RNA, 19 nt, Human herpesvirus 5
ugucgcugcguccagcguc

SEQ ID NO: 2027975 - RNA, 18 nt, Human herpesvirus 5
gucuccaagucuggugcg

SEQ ID NO: 2027976 - RNA, 14 nt, Human herpesvirus 5
ugguggucuacaag

SEQ ID NO: 2027977 - RNA, 15 nt, Human herpesvirus 5
uggccgagcuaugcg

SEQ ID NO: 2027978 - RNA, 13 nt, Human herpesvirus 5
acuacgaagauau

SEQ ID NO: 2027979 - RNA, 22 nt, Human herpesvirus 5
gaaggcggcucgcuggaagccg

SEQ ID NO: 2027980 - RNA, 23 nt, Human herpesvirus 5
cuggaaggcguggaugagguacu

SEQ ID NO: 2027981 - RNA, 20 nt, Human herpesvirus 5
cucagguuccccgagagggu

SEQ ID NO: 2027982 - RNA, 15 nt, Human herpesvirus 5
cacgccggccugagc

SEQ ID NO: 2027983 - RNA, 20 nt, Human herpesvirus 5
caauggaagccauacuucuc

SEQ ID NO: 2027984 - RNA, 24 nt, Human herpesvirus 5
cuguaguacuaccguuaacuauuc

SEQ ID NO: 2027985 - RNA, 21 nt, Human herpesvirus 5
cggcuguggcuucucuggaga

SEQ ID NO: 2027986 - RNA, 13 nt, Human herpesvirus 5
ccaucuucaucuu

SEQ ID NO: 2027987 - RNA, 16 nt, Human herpesvirus 5
gcggucagaaaaagaa

SEQ ID NO: 2027988 - RNA, 14 nt, Human herpesvirus 5
aauacagaguccgu

SEQ ID NO: 2027989 - RNA, 14 nt, Human herpesvirus 5
gccaguugcuguug

SEQ ID NO: 2027990 - RNA, 17 nt, Human herpesvirus 5
cgugcgguaacuggcag

SEQ ID NO: 2027991 - RNA, 16 nt, Human herpesvirus 5
ugagacugguggugag

SEQ ID NO: 2027992 - RNA, 16 nt, Human herpesvirus 5
ucucaccgugcucgug

SEQ ID NO: 2027993 - RNA, 17 nt, Human herpesvirus 5
caauuuuucuuuuuccu

SEQ ID NO: 2027994 - RNA, 19 nt, Human herpesvirus 5
accgacgacgacagucucc

SEQ ID NO: 2027995 - RNA, 23 nt, Human herpesvirus 5
cgcugauacuaucgggggagaug

SEQ ID NO: 2027996 - RNA, 15 nt, Human herpesvirus 5
cuguggaauacccag

SEQ ID NO: 2027997 - RNA, 21 nt, Human herpesvirus 5
cuacuucacgugcggcugugu

SEQ ID NO: 2027998 - RNA, 20 nt, Human herpesvirus 5
guccggccgucgcaagggcu

SEQ ID NO: 2027999 - RNA, 13 nt, Human herpesvirus 5
gaucccacuggca

SEQ ID NO: 2028000 - RNA, 21 nt, Human herpesvirus 5
ccaaagaugaagacacccugc

SEQ ID NO: 2028001 - RNA, 19 nt, Human herpesvirus 5
gccgccgaagccuggggca

SEQ ID NO: 2028002 - RNA, 11 nt, Human herpesvirus 5
gggaagggugu

SEQ ID NO: 2028003 - RNA, 13 nt, Human herpesvirus 5
gcaaugacaugga

SEQ ID NO: 2028004 - RNA, 21 nt, Human herpesvirus 5
cggcccucucgcgcccgcaga

SEQ ID NO: 2028005 - RNA, 15 nt, Human herpesvirus 5
aagaacgugguuguu

SEQ ID NO: 2028006 - RNA, 20 nt, Human herpesvirus 5
gacggcuuuccaagcugucg

SEQ ID NO: 2028007 - RNA, 13 nt, Human herpesvirus 5
gcguccacgggcu

SEQ ID NO: 2028008 - RNA, 24 nt, Human herpesvirus 5
ccucgcucggaacgacgacucagg

SEQ ID NO: 2028009 - RNA, 21 nt, Human herpesvirus 5
aacugcugccucgaugcgccu

SEQ ID NO: 2028010 - RNA, 20 nt, Human herpesvirus 5
ggaagcgcugauguaccugc

SEQ ID NO: 2028011 - RNA, 14 nt, Human herpesvirus 5
gugaucugggcagc

SEQ ID NO: 2028012 - RNA, 17 nt, Human herpesvirus 5
cuagacgaagaggacac

SEQ ID NO: 2028013 - RNA, 18 nt, Human herpesvirus 5
aauaaaagcacuucagaa

SEQ ID NO: 2028014 - RNA, 13 nt, Human herpesvirus 5
cucuauacacaua

SEQ ID NO: 2028015 - RNA, 19 nt, Human herpesvirus 5
uaaggagcaaaaccgggua

SEQ ID NO: 2028016 - RNA, 14 nt, Human herpesvirus 5
gccuguggcaccgc

SEQ ID NO: 2028017 - RNA, 16 nt, Human herpesvirus 5
ccgcgucccuggggcu

SEQ ID NO: 2028018 - RNA, 17 nt, Human herpesvirus 5
gcuuaucugccucuucc

SEQ ID NO: 2028019 - RNA, 19 nt, Human herpesvirus 5
ccuauaaaaccgugcccgu

SEQ ID NO: 2028020 - RNA, 13 nt, Human herpesvirus 5
caaaguucaaagu

SEQ ID NO: 2028021 - RNA, 18 nt, Human herpesvirus 5
ugcaaagucaacauguag

SEQ ID NO: 2028022 - RNA, 18 nt, Human herpesvirus 5
cccccuaccugcgcgaua

SEQ ID NO: 2028023 - RNA, 14 nt, Human herpesvirus 5
ugacgcggacgagg

SEQ ID NO: 2028024 - RNA, 23 nt, Human herpesvirus 5
cagacgucggcgguccuccagca

SEQ ID NO: 2028025 - RNA, 14 nt, Human herpesvirus 5
cuuauucuagcccu

SEQ ID NO: 2028026 - RNA, 15 nt, Human herpesvirus 5
acaacagucgcagcc

SEQ ID NO: 2028027 - RNA, 17 nt, Human herpesvirus 5
cccugguauccaacuuc

SEQ ID NO: 2028028 - RNA, 20 nt, Human herpesvirus 5
cugcugugguguugccuucu

SEQ ID NO: 2028029 - RNA, 14 nt, Human herpesvirus 5
uuggcaacaucacc

SEQ ID NO: 2028030 - RNA, 15 nt, Human herpesvirus 5
gucaggacuggaagu

SEQ ID NO: 2028031 - RNA, 23 nt, Human herpesvirus 5
gaccagcaguaugacgugcgaug

SEQ ID NO: 2028032 - RNA, 20 nt, Human herpesvirus 5
gcaccugugugaucugggca

SEQ ID NO: 2028033 - RNA, 14 nt, Human herpesvirus 5
gagcaccggcgccu

SEQ ID NO: 2028034 - RNA, 20 nt, Human herpesvirus 5
ucucugaaggacaguguauu

SEQ ID NO: 2028035 - RNA, 19 nt, Human herpesvirus 5
ccacgcugacaacccacuc

SEQ ID NO: 2028036 - RNA, 21 nt, Human herpesvirus 5
gcggcaccagagacagagacc

SEQ ID NO: 2028037 - RNA, 21 nt, Human herpesvirus 5
cuuuuacggguaaugcaugcu

SEQ ID NO: 2028038 - RNA, 16 nt, Human herpesvirus 5
cucugcuucuuuucug

SEQ ID NO: 2028039 - RNA, 19 nt, Human herpesvirus 5
caacuaucaccaaacaaca

SEQ ID NO: 2028040 - RNA, 21 nt, Human herpesvirus 5
caguagcgguaccagacgcgg

SEQ ID NO: 2028041 - RNA, 15 nt, Human herpesvirus 5
cuuuauuugcaucau

SEQ ID NO: 2028042 - RNA, 13 nt, Human herpesvirus 5
aauaaaaaacagc

SEQ ID NO: 2028043 - RNA, 13 nt, Human herpesvirus 5
agcauacggggag

SEQ ID NO: 2028044 - RNA, 14 nt, Human herpesvirus 5
gagacacuugaaua

SEQ ID NO: 2028045 - RNA, 18 nt, Human herpesvirus 5
gucaacaucaucagcgcc

SEQ ID NO: 2028046 - RNA, 24 nt, Human herpesvirus 5
ugccgccgccaacgccgagcucug

SEQ ID NO: 2028047 - RNA, 13 nt, Human herpesvirus 5
auuguuucuuauu

SEQ ID NO: 2028048 - RNA, 11 nt, Human herpesvirus 5
cggguguccca

SEQ ID NO: 2028049 - RNA, 13 nt, Human herpesvirus 5
ucauggacccgcc

SEQ ID NO: 2028050 - RNA, 15 nt, Human herpesvirus 5
ugcuguccucguccg

SEQ ID NO: 2028051 - RNA, 18 nt, Human herpesvirus 5
acauuuuuugacagauga

SEQ ID NO: 2028052 - RNA, 19 nt, Human herpesvirus 5
cacccccgauaugggccgc

SEQ ID NO: 2028053 - RNA, 18 nt, Human herpesvirus 5
acgauacacccugucacc

SEQ ID NO: 2028054 - RNA, 14 nt, Human herpesvirus 5
caguaccaccgcug

SEQ ID NO: 2028055 - RNA, 22 nt, Human herpesvirus 5
ccgccccagcagaccagccacc

SEQ ID NO: 2028056 - RNA, 15 nt, Human herpesvirus 5
gccgucacugccacc

SEQ ID NO: 2028057 - RNA, 16 nt, Human herpesvirus 5
guaccaucuggcgcag

SEQ ID NO: 2028058 - RNA, 15 nt, Human herpesvirus 5
ucagcuugcccgacc

SEQ ID NO: 2028059 - RNA, 14 nt, Human herpesvirus 5
gguggcugggcuca

SEQ ID NO: 2028060 - RNA, 15 nt, Human herpesvirus 5
gcggacuuggcagcg

SEQ ID NO: 2028061 - RNA, 15 nt, Human herpesvirus 5
gcccgccacugcccg

SEQ ID NO: 2028062 - RNA, 17 nt, Human herpesvirus 5
gcaacggaccgcugucg

SEQ ID NO: 2028063 - RNA, 16 nt, Human herpesvirus 5
ccgcggaggugcuggc

SEQ ID NO: 2028064 - RNA, 22 nt, Human herpesvirus 5
cuguggaauacccagcugggga

SEQ ID NO: 2028065 - RNA, 18 nt, Human herpesvirus 5
acaggcucgucgugggcu

SEQ ID NO: 2028066 - RNA, 20 nt, Human herpesvirus 5
uggacacucuggcccugcug

SEQ ID NO: 2028067 - RNA, 17 nt, Human herpesvirus 5
agcgccguccugcagac

SEQ ID NO: 2028068 - RNA, 20 nt, Human herpesvirus 5
cgggucucuuugacacgagc

SEQ ID NO: 2028069 - RNA, 17 nt, Human herpesvirus 5
cgcugccgcagcugcug

SEQ ID NO: 2028070 - RNA, 17 nt, Human herpesvirus 5
cacccaggccgcggggu

SEQ ID NO: 2028071 - RNA, 17 nt, Human herpesvirus 5
cugcacgaccugcucca

SEQ ID NO: 2028072 - RNA, 16 nt, Human herpesvirus 5
caagcuuuagccaggu

SEQ ID NO: 2028073 - RNA, 16 nt, Human herpesvirus 5
aacucuuuccccgccc

SEQ ID NO: 2028074 - RNA, 23 nt, Human herpesvirus 5
gucaaggccgccucuucuggccc

SEQ ID NO: 2028075 - RNA, 20 nt, Human herpesvirus 5
guucgugauucguaggcagc

SEQ ID NO: 2028076 - RNA, 15 nt, Human herpesvirus 5
gcgccgccgacucgc

SEQ ID NO: 2028077 - RNA, 15 nt, Human herpesvirus 5
ccguuuugcuguccu

SEQ ID NO: 2028078 - RNA, 13 nt, Human herpesvirus 5
aagucacaggaaa

SEQ ID NO: 2028079 - RNA, 16 nt, Human herpesvirus 5
guuucccccacccgcc

SEQ ID NO: 2028080 - RNA, 18 nt, Human herpesvirus 5
aucucggcauaguggugu

SEQ ID NO: 2028081 - RNA, 22 nt, Human herpesvirus 5
cucaaagcagaccaaguacgac

SEQ ID NO: 2028082 - RNA, 13 nt, Human herpesvirus 5
gcucaacuuucua

SEQ ID NO: 2028083 - RNA, 12 nt, Human herpesvirus 5
uuucucaucuca

SEQ ID NO: 2028084 - RNA, 17 nt, Human herpesvirus 5
ggcucaucaccaacgug

SEQ ID NO: 2028085 - RNA, 16 nt, Human herpesvirus 5
uaaucgacaggaggcu

SEQ ID NO: 2028086 - RNA, 14 nt, Human herpesvirus 5
accgcaaaggccac

SEQ ID NO: 2028087 - RNA, 14 nt, Human herpesvirus 5
cgauauaggugaca

SEQ ID NO: 2028088 - RNA, 22 nt, Human herpesvirus 5
ccaguuucaccaaggcgagcca

SEQ ID NO: 2028089 - RNA, 16 nt, Human herpesvirus 5
uccuccuucuuccucg

SEQ ID NO: 2028090 - RNA, 18 nt, Human herpesvirus 5
gacacagcgccgcgcugg

SEQ ID NO: 2028091 - RNA, 21 nt, Human herpesvirus 5
cacuacguugggucugcgcug

SEQ ID NO: 2028092 - RNA, 20 nt, Human herpesvirus 5
aaucuuccauaauaaaagua

SEQ ID NO: 2028093 - RNA, 23 nt, Human herpesvirus 5
cucagggcugggauccgccgcca

SEQ ID NO: 2028094 - RNA, 21 nt, Human herpesvirus 5
cagcuucuuucucaccgugcu

SEQ ID NO: 2028095 - RNA, 20 nt, Human herpesvirus 5
ugacacauagcguaccccug

SEQ ID NO: 2028096 - RNA, 14 nt, Human herpesvirus 5
caaaaccggguaca

SEQ ID NO: 2028097 - RNA, 16 nt, Human herpesvirus 5
agccccaagcgguacg

SEQ ID NO: 2028098 - RNA, 18 nt, Human herpesvirus 5
ccguagcuagugcucggc

SEQ ID NO: 2028099 - RNA, 19 nt, Human herpesvirus 5
ucugcgguacgcgcacgcc

SEQ ID NO: 2028100 - RNA, 21 nt, Human herpesvirus 5
guaaacuuaugaauccggcug

SEQ ID NO: 2028101 - RNA, 16 nt, Human herpesvirus 5
ugcgccgucucuucgc

SEQ ID NO: 2028102 - RNA, 16 nt, Human herpesvirus 5
accacgguuaccuucu

SEQ ID NO: 2028103 - RNA, 17 nt, Human herpesvirus 5
auaaucggcucucaggc

SEQ ID NO: 2028104 - RNA, 20 nt, Human herpesvirus 5
ggcucaccacgcagcaggcu

SEQ ID NO: 2028105 - RNA, 15 nt, Human herpesvirus 5
ccgcagugggcccac

SEQ ID NO: 2028106 - RNA, 14 nt, Human herpesvirus 5
gccgcagcugcugg

SEQ ID NO: 2028107 - RNA, 17 nt, Human herpesvirus 5
gacgcgccgggcggcuu

SEQ ID NO: 2028108 - RNA, 19 nt, Human herpesvirus 5
cucgucaaucuugcguugc

SEQ ID NO: 2028109 - RNA, 23 nt, Human herpesvirus 5
gccacguucuugcguccuucauc

SEQ ID NO: 2028110 - RNA, 18 nt, Human herpesvirus 5
caugucuuacaaaucaca

SEQ ID NO: 2028111 - RNA, 22 nt, Human herpesvirus 5
uccacuuccgugauagccacga

SEQ ID NO: 2028112 - RNA, 17 nt, Human herpesvirus 5
acaaauaccaacacuau

SEQ ID NO: 2028113 - RNA, 22 nt, Human herpesvirus 5
caggaggaaaaaaaaacuagac

SEQ ID NO: 2028114 - RNA, 22 nt, Human herpesvirus 5
cucguuguacgcauuacacagg

SEQ ID NO: 2028115 - RNA, 14 nt, Human herpesvirus 5
agaguuacaugcaa

SEQ ID NO: 2028116 - RNA, 15 nt, Human herpesvirus 5
ccuggacgccugggc

SEQ ID NO: 2028117 - RNA, 20 nt, Human herpesvirus 5
cuacgaucgcuggaaagaca

SEQ ID NO: 2028118 - RNA, 21 nt, Human herpesvirus 5
uagcuagugcagccuuaggaa

SEQ ID NO: 2028119 - RNA, 14 nt, Human herpesvirus 5
cccuccuuuucccc

SEQ ID NO: 2028120 - RNA, 18 nt, Human herpesvirus 5
gccugcacgaccugcucc

SEQ ID NO: 2028121 - RNA, 13 nt, Human herpesvirus 5
caccgacccugcg

SEQ ID NO: 2028122 - RNA, 17 nt, Human herpesvirus 5
agcgucucuugcggcgc

SEQ ID NO: 2028123 - RNA, 14 nt, Human herpesvirus 5
gcggguggagauga

SEQ ID NO: 2028124 - RNA, 19 nt, Human herpesvirus 5
gugcaucuacguggucggg

SEQ ID NO: 2028125 - RNA, 21 nt, Human herpesvirus 5
cacugccaacccagcagccgg

SEQ ID NO: 2028126 - RNA, 14 nt, Human herpesvirus 5
caugugcagcuggu

SEQ ID NO: 2028127 - RNA, 17 nt, Human herpesvirus 5
cugcuauaagaaggcca

SEQ ID NO: 2028128 - RNA, 15 nt, Human herpesvirus 5
ccacaaccuguggaa

SEQ ID NO: 2028129 - RNA, 14 nt, Human herpesvirus 5
agaucgucuacggc

SEQ ID NO: 2028130 - RNA, 19 nt, Human herpesvirus 5
ugaaucgcgagcugggcga

SEQ ID NO: 2028131 - RNA, 21 nt, Human herpesvirus 5
agaacuuuguagugcgcgccg

SEQ ID NO: 2028132 - RNA, 16 nt, Human herpesvirus 5
gugauuuaucugccac

SEQ ID NO: 2028133 - RNA, 20 nt, Human herpesvirus 5
cuuccccacccaguagacag

SEQ ID NO: 2028134 - RNA, 19 nt, Human herpesvirus 5
cggugacgucggugguggc

SEQ ID NO: 2028135 - RNA, 23 nt, Human herpesvirus 5
cgcugguggccgaacagcagcuc

SEQ ID NO: 2028136 - RNA, 21 nt, Human herpesvirus 5
gguccuccagcagcagcuggu

SEQ ID NO: 2028137 - RNA, 22 nt, Human herpesvirus 5
acuuuccucgccaccacuacca

SEQ ID NO: 2028138 - RNA, 21 nt, Human herpesvirus 5
gcgccaguugucgcaggucca

SEQ ID NO: 2028139 - RNA, 21 nt, Human herpesvirus 5
cauggacauaaaaaagagaca

SEQ ID NO: 2028140 - RNA, 20 nt, Human herpesvirus 5
cagcgugcucagcugguggc

SEQ ID NO: 2028141 - RNA, 15 nt, Human herpesvirus 5
cucuugcgaggcuuu

SEQ ID NO: 2028142 - RNA, 14 nt, Human herpesvirus 5
cgaccgucuggagg

SEQ ID NO: 2028143 - RNA, 12 nt, Human herpesvirus 5
cggccgccgacg

SEQ ID NO: 2028144 - RNA, 20 nt, Human herpesvirus 5
guucaacacuuucucuggau

SEQ ID NO: 2028145 - RNA, 16 nt, Human herpesvirus 5
agggcgcgccggcgcc

SEQ ID NO: 2028146 - RNA, 21 nt, Human herpesvirus 5
cgagcuggacaaguacagcgg

SEQ ID NO: 2028147 - RNA, 17 nt, Human herpesvirus 5
ggcucuugcgcuucugc

SEQ ID NO: 2028148 - RNA, 18 nt, Human herpesvirus 5
agcugcuuuucgggccgc

SEQ ID NO: 2028149 - RNA, 19 nt, Human herpesvirus 5
accgcgaguaucgggccgu

SEQ ID NO: 2028150 - RNA, 17 nt, Human herpesvirus 5
acggaguuuucccucag

SEQ ID NO: 2028151 - RNA, 23 nt, Human herpesvirus 5
ggacacguagaucccacuggcaa

SEQ ID NO: 2028152 - RNA, 21 nt, Human herpesvirus 5
ggagcucacccggcugcuggc

SEQ ID NO: 2028153 - RNA, 22 nt, Human herpesvirus 5
agcguucaacacuuucucugga

SEQ ID NO: 2028154 - RNA, 21 nt, Human herpesvirus 5
cgcccgaggcggaggagccgg

SEQ ID NO: 2028155 - RNA, 20 nt, Human herpesvirus 5
acagccgggcguuggccugu

SEQ ID NO: 2028156 - RNA, 14 nt, Human herpesvirus 5
gccgcgggguacgg

SEQ ID NO: 2028157 - RNA, 22 nt, Human herpesvirus 5
cagagccaccaggugccggcga

SEQ ID NO: 2028158 - RNA, 23 nt, Human herpesvirus 5
ucccgacaggcucgucgugggcu

SEQ ID NO: 2028159 - RNA, 15 nt, Human herpesvirus 5
ucacgaggaccauuu

SEQ ID NO: 2028160 - RNA, 16 nt, Human herpesvirus 5
gucaaucagacuuucg

SEQ ID NO: 2028161 - RNA, 16 nt, Human herpesvirus 5
cacacugcuacccugc

SEQ ID NO: 2028162 - RNA, 20 nt, Human herpesvirus 5
cgacggcuuuccaagcuguc

SEQ ID NO: 2028163 - RNA, 15 nt, Human herpesvirus 5
acaguuuccacgcag

SEQ ID NO: 2028164 - RNA, 15 nt, Human herpesvirus 5
cgugcaacgccacca

SEQ ID NO: 2028165 - RNA, 23 nt, Human herpesvirus 5
gcaugacggugacuauguguacu

SEQ ID NO: 2028166 - RNA, 17 nt, Human herpesvirus 5
cggaucggacaucauac

SEQ ID NO: 2028167 - RNA, 22 nt, Human herpesvirus 5
cgcggaugagcgugcugcucug

SEQ ID NO: 2028168 - RNA, 16 nt, Human herpesvirus 5
cgccgccuccgcggcc

SEQ ID NO: 2028169 - RNA, 16 nt, Human herpesvirus 5
ggucagcggcacgccg

SEQ ID NO: 2028170 - RNA, 20 nt, Human herpesvirus 5
gcuucucucuggucuucccu

SEQ ID NO: 2028171 - RNA, 14 nt, Human herpesvirus 5
aaauacagaguccg

SEQ ID NO: 2028172 - RNA, 22 nt, Human herpesvirus 5
uugaccacacucgugacgucaa

SEQ ID NO: 2028173 - RNA, 20 nt, Human herpesvirus 5
gacgcgcguggccgcgcugg

SEQ ID NO: 2028174 - RNA, 13 nt, Human herpesvirus 5
cgucguuagccag

SEQ ID NO: 2028175 - RNA, 12 nt, Human herpesvirus 5
guggaaggcacc

SEQ ID NO: 2028176 - RNA, 17 nt, Human herpesvirus 5
cucacagucuaucccua

SEQ ID NO: 2028177 - RNA, 15 nt, Human herpesvirus 5
gcuguugaccugggu

SEQ ID NO: 2028178 - RNA, 18 nt, Human herpesvirus 5
gccuuaucgugcuaggca

SEQ ID NO: 2028179 - RNA, 17 nt, Human herpesvirus 5
ucccaugcaacuucuuc

SEQ ID NO: 2028180 - RNA, 17 nt, Human herpesvirus 5
guaccuaaagcccccac

SEQ ID NO: 2028181 - RNA, 18 nt, Human herpesvirus 5
cgcaccgguuggagcagc

SEQ ID NO: 2028182 - RNA, 17 nt, Human herpesvirus 5
gauuuucgcgcucuugu

SEQ ID NO: 2028183 - RNA, 16 nt, Human herpesvirus 5
gaaucucuugcgcccu

SEQ ID NO: 2028184 - RNA, 14 nt, Human herpesvirus 5
cugcggccggccgc

SEQ ID NO: 2028185 - RNA, 15 nt, Human herpesvirus 5
gcacgaccugcucca

SEQ ID NO: 2028186 - RNA, 15 nt, Human herpesvirus 5
gaguccuggucuuuc

SEQ ID NO: 2028187 - RNA, 16 nt, Human herpesvirus 5
ucaacaaacagcucuu

SEQ ID NO: 2028188 - RNA, 15 nt, Human herpesvirus 5
cgucgccuuccagcu

SEQ ID NO: 2028189 - RNA, 19 nt, Human herpesvirus 5
ugacgugcucaagagguga

SEQ ID NO: 2028190 - RNA, 15 nt, Human herpesvirus 5
gaaugcuaguuugua

SEQ ID NO: 2028191 - RNA, 20 nt, Human herpesvirus 5
ccaucgucccccuuucucua

SEQ ID NO: 2028192 - RNA, 15 nt, Human herpesvirus 5
ccccucugcugcugg

SEQ ID NO: 2028193 - RNA, 16 nt, Human herpesvirus 5
cgagcauggaucacgc

SEQ ID NO: 2028194 - RNA, 11 nt, Human herpesvirus 5
ugggugcaaug

SEQ ID NO: 2028195 - RNA, 18 nt, Human herpesvirus 5
ggcgguggccgucuuggg

SEQ ID NO: 2028196 - RNA, 14 nt, Human herpesvirus 5
cagcagccaccgac

SEQ ID NO: 2028197 - RNA, 23 nt, Human herpesvirus 5
gccgauucguaaucgacaggagg

SEQ ID NO: 2028198 - RNA, 22 nt, Human herpesvirus 5
caggccgccgcucaagccgcgg

SEQ ID NO: 2028199 - RNA, 22 nt, Human herpesvirus 5
gacgggaugcacagcgucuggc

SEQ ID NO: 2028200 - RNA, 22 nt, Human herpesvirus 5
cgcugauggccuacggcugcau

SEQ ID NO: 2028201 - RNA, 13 nt, Human herpesvirus 5
aacuuugcugcua

SEQ ID NO: 2028202 - RNA, 17 nt, Human herpesvirus 5
gccguugcggccgccgc

SEQ ID NO: 2028203 - RNA, 12 nt, Human herpesvirus 5
ggcagcuggcuu

SEQ ID NO: 2028204 - RNA, 16 nt, Human herpesvirus 5
gcaagggcugcucggc

SEQ ID NO: 2028205 - RNA, 23 nt, Human herpesvirus 5
uggcgcggucugcgugaugccug

SEQ ID NO: 2028206 - RNA, 16 nt, Human herpesvirus 5
gcgacagcagcaucag

SEQ ID NO: 2028207 - RNA, 18 nt, Human herpesvirus 5
ccuccagcagcagcuggu

SEQ ID NO: 2028208 - RNA, 11 nt, Human herpesvirus 5
acacagcagca

SEQ ID NO: 2028209 - RNA, 20 nt, Human herpesvirus 5
ucacgacgacgcgcccccca

SEQ ID NO: 2028210 - RNA, 21 nt, Human herpesvirus 5
guccaccucugcuacuggccc

SEQ ID NO: 2028211 - RNA, 15 nt, Human herpesvirus 5
aucgaccguuguccc

SEQ ID NO: 2028212 - RNA, 13 nt, Human herpesvirus 5
uauuuuacaggua

SEQ ID NO: 2028213 - RNA, 16 nt, Human herpesvirus 5
gggugccgccacgguu

SEQ ID NO: 2028214 - RNA, 20 nt, Human herpesvirus 5
cucagucaccgaguccauca

SEQ ID NO: 2028215 - RNA, 19 nt, Human herpesvirus 5
gccgcagccguugguggaa

SEQ ID NO: 2028216 - RNA, 17 nt, Human herpesvirus 5
cuuggccgaccugugcg

SEQ ID NO: 2028217 - RNA, 22 nt, Human herpesvirus 5
cgccaugaggcgguggcugcgc

SEQ ID NO: 2028218 - RNA, 10 nt, Human herpesvirus 5
aggccgccgc

SEQ ID NO: 2028219 - RNA, 22 nt, Human herpesvirus 5
ggaugcgcgaagcugcgcaggc

SEQ ID NO: 2028220 - RNA, 14 nt, Human herpesvirus 5
acggcgucuuccuc

SEQ ID NO: 2028221 - RNA, 17 nt, Human herpesvirus 5
gaucuggaaggcgugga

SEQ ID NO: 2028222 - RNA, 14 nt, Human herpesvirus 5
acccacgaccauuu

SEQ ID NO: 2028223 - RNA, 14 nt, Human herpesvirus 5
caaucacccacaga

SEQ ID NO: 2028224 - RNA, 13 nt, Human herpesvirus 5
cgccaccgguggc

SEQ ID NO: 2028225 - RNA, 22 nt, Human herpesvirus 5
ccggccccacgcugacaaccca

SEQ ID NO: 2028226 - RNA, 17 nt, Human herpesvirus 5
ugaaucgaugucaagga

SEQ ID NO: 2028227 - RNA, 12 nt, Human herpesvirus 5
aaacaacaccac

SEQ ID NO: 2028228 - RNA, 17 nt, Human herpesvirus 5
accacccgacugcagcc

SEQ ID NO: 2028229 - RNA, 21 nt, Human herpesvirus 5
ccgucgaggagguaguccccu

SEQ ID NO: 2028230 - RNA, 17 nt, Human herpesvirus 5
gacgacguggccuccuc

SEQ ID NO: 2028231 - RNA, 13 nt, Human herpesvirus 5
acucagaggccac

SEQ ID NO: 2028232 - RNA, 20 nt, Human herpesvirus 5
aaacgccaccugcaaaguua

SEQ ID NO: 2028233 - RNA, 19 nt, Human herpesvirus 5
agucagacccacuaccugg

SEQ ID NO: 2028234 - RNA, 16 nt, Human herpesvirus 5
cgcaugucgucucauc

SEQ ID NO: 2028235 - RNA, 18 nt, Human herpesvirus 5
cacgccguugccacgagc

SEQ ID NO: 2028236 - RNA, 18 nt, Human herpesvirus 5
ccuuccgcgugcuccacc

SEQ ID NO: 2028237 - RNA, 13 nt, Human herpesvirus 5
caacuuaaccaca

SEQ ID NO: 2028238 - RNA, 23 nt, Human herpesvirus 5
aagauaaucugccaaucgcaccu

SEQ ID NO: 2028239 - RNA, 18 nt, Human herpesvirus 5
aaccguaguugucggcgc

SEQ ID NO: 2028240 - RNA, 14 nt, Human herpesvirus 5
aucugggugcaaug

SEQ ID NO: 2028241 - RNA, 17 nt, Human herpesvirus 5
cgagcgggaggcgguga

SEQ ID NO: 2028242 - RNA, 16 nt, Human herpesvirus 5
gccgcggugcaggccg

SEQ ID NO: 2028243 - RNA, 14 nt, Human herpesvirus 5
aagagguuggugug

SEQ ID NO: 2028244 - RNA, 17 nt, Human herpesvirus 5
uuccgauccuuggaaga

SEQ ID NO: 2028245 - RNA, 20 nt, Human herpesvirus 5
acccugcguccccgcacgac

SEQ ID NO: 2028246 - RNA, 18 nt, Human herpesvirus 5
cagcugguggcucaugcc

SEQ ID NO: 2028247 - RNA, 22 nt, Human herpesvirus 5
guagccaccuguuggaacccau

SEQ ID NO: 2028248 - RNA, 20 nt, Human herpesvirus 5
cggccaguacggccucuggg

SEQ ID NO: 2028249 - RNA, 12 nt, Human herpesvirus 5
ugcagcccaccg

SEQ ID NO: 2028250 - RNA, 20 nt, Human herpesvirus 5
uugauuucaacaaauaccaa

SEQ ID NO: 2028251 - RNA, 17 nt, Human herpesvirus 5
acaagcgccgucacuuc

SEQ ID NO: 2028252 - RNA, 19 nt, Human herpesvirus 5
gaagggcgcgggcggccag

SEQ ID NO: 2028253 - RNA, 23 nt, Human herpesvirus 5
acggggcuggguggagagggaag

SEQ ID NO: 2028254 - RNA, 15 nt, Human herpesvirus 5
auuaugcaggagacg

SEQ ID NO: 2028255 - RNA, 17 nt, Human herpesvirus 5
cuccuccgagccaaaag

SEQ ID NO: 2028256 - RNA, 12 nt, Human herpesvirus 5
cggcccugugcu

SEQ ID NO: 2028257 - RNA, 15 nt, Human herpesvirus 5
gucugacgcugcucc

SEQ ID NO: 2028258 - RNA, 21 nt, Human herpesvirus 5
ggcuggugucacuagacagau

SEQ ID NO: 2028259 - RNA, 22 nt, Human herpesvirus 5
caguacggcuuucugcggaaug

SEQ ID NO: 2028260 - RNA, 12 nt, Human herpesvirus 5
uggggcugcugc

SEQ ID NO: 2028261 - RNA, 21 nt, Human herpesvirus 5
uccacagagccgcguggcugu

SEQ ID NO: 2028262 - RNA, 18 nt, Human herpesvirus 5
cugcacgaccugcuccag

SEQ ID NO: 2028263 - RNA, 22 nt, Human herpesvirus 5
cuggaccggugguacugcugug

SEQ ID NO: 2028264 - RNA, 19 nt, Human herpesvirus 5
ucgauggggucguggcuca

SEQ ID NO: 2028265 - RNA, 17 nt, Human herpesvirus 5
gugauccaggagguggu

SEQ ID NO: 2028266 - RNA, 17 nt, Human herpesvirus 5
ggcgacaagcuguggcu

SEQ ID NO: 2028267 - RNA, 12 nt, Human herpesvirus 5
cacuacucuggg

SEQ ID NO: 2028268 - RNA, 12 nt, Human herpesvirus 5
acgucaggaauc

SEQ ID NO: 2028269 - RNA, 14 nt, Human herpesvirus 5
gagaccgucgccac

SEQ ID NO: 2028270 - RNA, 18 nt, Human herpesvirus 5
acgccgucacgcagguga

SEQ ID NO: 2028271 - RNA, 22 nt, Human herpesvirus 5
gcugcucaaugccaccaugaac

SEQ ID NO: 2028272 - RNA, 21 nt, Human herpesvirus 5
acaacggccgccgcagccacg

SEQ ID NO: 2028273 - RNA, 16 nt, Human herpesvirus 5
ggcggcgauggucaug

SEQ ID NO: 2028274 - RNA, 20 nt, Human herpesvirus 5
accacgacacggugcugcug

SEQ ID NO: 2028275 - RNA, 17 nt, Human herpesvirus 5
uuucgaguccguccucg

SEQ ID NO: 2028276 - RNA, 23 nt, Human herpesvirus 5
ugacgacggcgugguauccacgc

SEQ ID NO: 2028277 - RNA, 13 nt, Human herpesvirus 5
cguggagaccacc

SEQ ID NO: 2028278 - RNA, 22 nt, Human herpesvirus 5
cgggcugcuggucuccauggcc

SEQ ID NO: 2028279 - RNA, 16 nt, Human herpesvirus 5
ugcgacgccaugcuca

SEQ ID NO: 2028280 - RNA, 12 nt, Human herpesvirus 5
agcucagcaucg

SEQ ID NO: 2028281 - RNA, 17 nt, Human herpesvirus 5
cucuggcccugcuguac

SEQ ID NO: 2028282 - RNA, 15 nt, Human herpesvirus 5
gucuucugaagccgu

SEQ ID NO: 2028283 - RNA, 20 nt, Human herpesvirus 5
cacggcggcggccugcucgc

SEQ ID NO: 2028284 - RNA, 20 nt, Human herpesvirus 5
ucugugaugaacgacacaug

SEQ ID NO: 2028285 - RNA, 21 nt, Human herpesvirus 5
ccgcugccgcucagcgagcuc

SEQ ID NO: 2028286 - RNA, 19 nt, Human herpesvirus 5
cggcacgccgccgaagcuu

SEQ ID NO: 2028287 - RNA, 20 nt, Human herpesvirus 5
gcucgaaauguugacccagg

SEQ ID NO: 2028288 - RNA, 20 nt, Human herpesvirus 5
gcuucuuucucaccgugcuc

SEQ ID NO: 2028289 - RNA, 21 nt, Human herpesvirus 5
gagcggcucgccgccgcgcca

SEQ ID NO: 2028290 - RNA, 14 nt, Human herpesvirus 5
gacauggauaacga

SEQ ID NO: 2028291 - RNA, 13 nt, Human herpesvirus 5
aagccggcagcug

SEQ ID NO: 2028292 - RNA, 14 nt, Human herpesvirus 5
acagcaaggccgcc

SEQ ID NO: 2028293 - RNA, 17 nt, Human herpesvirus 5
ccgcuccaucgcagcca

SEQ ID NO: 2028294 - RNA, 17 nt, Human herpesvirus 5
agcugucagccucucac

SEQ ID NO: 2028295 - RNA, 19 nt, Human herpesvirus 5
ugcggcggcuugggcagca

SEQ ID NO: 2028296 - RNA, 19 nt, Human herpesvirus 5
ggaucuuauucgcuuugaa

SEQ ID NO: 2028297 - RNA, 20 nt, Human herpesvirus 5
ucgucaaggcucgcaaagac

SEQ ID NO: 2028298 - RNA, 19 nt, Human herpesvirus 5
gaccaagagcaugcugugg

SEQ ID NO: 2028299 - RNA, 20 nt, Human herpesvirus 5
cgugcgacgcgacuaugagg

SEQ ID NO: 2028300 - RNA, 21 nt, Human herpesvirus 5
uucagaccgcaacaacagcag

SEQ ID NO: 2028301 - RNA, 20 nt, Human herpesvirus 5
ggagccaaacugcgagcagc

SEQ ID NO: 2028302 - RNA, 20 nt, Human herpesvirus 5
gcgacaccguaucagcuacc

SEQ ID NO: 2028303 - RNA, 13 nt, Human herpesvirus 5
cuaugaggacgac

SEQ ID NO: 2028304 - RNA, 13 nt, Human herpesvirus 5
gcagcccaccgcc

SEQ ID NO: 2028305 - RNA, 15 nt, Human herpesvirus 5
caacgcguggcccug

SEQ ID NO: 2028306 - RNA, 21 nt, Human herpesvirus 5
ucaacgguggaauucgcuggg

SEQ ID NO: 2028307 - RNA, 15 nt, Human herpesvirus 5
gcaucgcaacaacag

SEQ ID NO: 2028308 - RNA, 19 nt, Human herpesvirus 5
ccaacuccgugccagcugg

SEQ ID NO: 2028309 - RNA, 15 nt, Human herpesvirus 5
gucgcgcggucgccg

SEQ ID NO: 2028310 - RNA, 21 nt, Human herpesvirus 5
accggggugguggugcugcug

SEQ ID NO: 2028311 - RNA, 20 nt, Human herpesvirus 5
cgggcaaagaguccaucugc

SEQ ID NO: 2028312 - RNA, 22 nt, Human herpesvirus 5
ggucaacgcguccagcuucugg

SEQ ID NO: 2028313 - RNA, 14 nt, Human herpesvirus 5
cggcuugcaaaacu

SEQ ID NO: 2028314 - RNA, 16 nt, Human herpesvirus 5
gcguccgggcuuuccu

SEQ ID NO: 2028315 - RNA, 18 nt, Human herpesvirus 5
ccacggcgucuuccuccu

SEQ ID NO: 2028316 - RNA, 22 nt, Human herpesvirus 5
ggacagagcagccguuuccaga

SEQ ID NO: 2028317 - RNA, 12 nt, Human herpesvirus 5
cacgacuggcca

SEQ ID NO: 2028318 - RNA, 14 nt, Human herpesvirus 5
accagcccagggau

SEQ ID NO: 2028319 - RNA, 12 nt, Human herpesvirus 5
aacguucuguaa

SEQ ID NO: 2028320 - RNA, 18 nt, Human herpesvirus 5
ccggccguuacgccgacg

SEQ ID NO: 2028321 - RNA, 14 nt, Human herpesvirus 5
ggcgcguagccacc

SEQ ID NO: 2028322 - RNA, 13 nt, Human herpesvirus 5
aguugagcggggu

SEQ ID NO: 2028323 - RNA, 19 nt, Human herpesvirus 5
cuuuuacaugaacaaaaaa

SEQ ID NO: 2028324 - RNA, 15 nt, Human herpesvirus 5
uacaccgcuggagcu

SEQ ID NO: 2028325 - RNA, 17 nt, Human herpesvirus 5
cgccgcucaggucgccc

SEQ ID NO: 2028326 - RNA, 20 nt, Human herpesvirus 5
accgccguucggcucuccuc

SEQ ID NO: 2028327 - RNA, 17 nt, Human herpesvirus 5
cggcucgccgccgcgcc

SEQ ID NO: 2028328 - RNA, 14 nt, Human herpesvirus 5
cccuuccaugacgc

SEQ ID NO: 2028329 - RNA, 14 nt, Human herpesvirus 5
cucuagagacagac

SEQ ID NO: 2028330 - RNA, 15 nt, Human herpesvirus 5
cgcggugcaggccgc

SEQ ID NO: 2028331 - RNA, 16 nt, Human herpesvirus 5
cuaggaacacugaaaa

SEQ ID NO: 2028332 - RNA, 12 nt, Human herpesvirus 5
ucccucugcugu

SEQ ID NO: 2028333 - RNA, 17 nt, Human herpesvirus 5
augcgcgucgaccuuga

SEQ ID NO: 2028334 - RNA, 15 nt, Human herpesvirus 5
agaaaaaaaagagag

SEQ ID NO: 2028335 - RNA, 15 nt, Human herpesvirus 5
gcggcggacaggccu

SEQ ID NO: 2028336 - RNA, 18 nt, Human herpesvirus 5
cagccacgcgcugguggc

SEQ ID NO: 2028337 - RNA, 17 nt, Human herpesvirus 5
aaaguccgucaugcugg

SEQ ID NO: 2028338 - RNA, 23 nt, Human herpesvirus 5
uccccacccaguagacagacagg

SEQ ID NO: 2028339 - RNA, 18 nt, Human herpesvirus 5
agaacgaucccuuuaucc

SEQ ID NO: 2028340 - RNA, 17 nt, Human herpesvirus 5
ggaaugguaaagacauc

SEQ ID NO: 2028341 - RNA, 18 nt, Human herpesvirus 5
cgcgcaucgccugcaccu

SEQ ID NO: 2028342 - RNA, 19 nt, Human herpesvirus 5
cugcggcggcuugggcagc

SEQ ID NO: 2028343 - RNA, 13 nt, Human herpesvirus 5
cuacucugggaua

SEQ ID NO: 2028344 - RNA, 22 nt, Human herpesvirus 5
ccaccgaagccguauuccguuu

SEQ ID NO: 2028345 - RNA, 19 nt, Human herpesvirus 5
ccaugagcggcaggaaggc

SEQ ID NO: 2028346 - RNA, 19 nt, Human herpesvirus 5
caggaucuggugcaggcca

SEQ ID NO: 2028347 - RNA, 19 nt, Human herpesvirus 5
cuucaucuuucagcuggcu

SEQ ID NO: 2028348 - RNA, 21 nt, Human herpesvirus 5
gaccgcaacaacagcagcaac

SEQ ID NO: 2028349 - RNA, 14 nt, Human herpesvirus 5
uaucgcgacagaca

SEQ ID NO: 2028350 - RNA, 12 nt, Human herpesvirus 5
gcaacugcugcc

SEQ ID NO: 2028351 - RNA, 18 nt, Human herpesvirus 5
uuggcggucgggucuguc

SEQ ID NO: 2028352 - RNA, 16 nt, Human herpesvirus 5
cggugagacccgcguc

SEQ ID NO: 2028353 - RNA, 22 nt, Human herpesvirus 5
ccugcagaccgaggcgcuggac

SEQ ID NO: 2028354 - RNA, 13 nt, Human herpesvirus 5
gcucagucgccua

SEQ ID NO: 2028355 - RNA, 14 nt, Human herpesvirus 5
ugcguguccagaua

SEQ ID NO: 2028356 - RNA, 17 nt, Human herpesvirus 5
gucccagccccagagcg

SEQ ID NO: 2028357 - RNA, 18 nt, Human herpesvirus 5
guuuuuagcgcgugaccu

SEQ ID NO: 2028358 - RNA, 16 nt, Human herpesvirus 5
cuccagcagcagcugg

SEQ ID NO: 2028359 - RNA, 14 nt, Human herpesvirus 5
uucagaaccaugua

SEQ ID NO: 2028360 - RNA, 18 nt, Human herpesvirus 5
cagaucuaccaugucuuu

SEQ ID NO: 2028361 - RNA, 21 nt, Human herpesvirus 5
uagcgcguuuguugcgcggcg

SEQ ID NO: 2028362 - RNA, 22 nt, Human herpesvirus 5
gcgcaggccgccgccgcucagg

SEQ ID NO: 2028363 - RNA, 15 nt, Human herpesvirus 5
cggcagcgccagcgg

SEQ ID NO: 2028364 - RNA, 12 nt, Human herpesvirus 5
gcuucgccgcca

SEQ ID NO: 2028365 - RNA, 18 nt, Human herpesvirus 5
uaccuucuugcccacgcc

SEQ ID NO: 2028366 - RNA, 17 nt, Human herpesvirus 5
uaccuagcuacuuugga

SEQ ID NO: 2028367 - RNA, 17 nt, Human herpesvirus 5
gcugccgcucagcgagc

SEQ ID NO: 2028368 - RNA, 17 nt, Human herpesvirus 5
accgguuggagcagcuc

SEQ ID NO: 2028369 - RNA, 15 nt, Human herpesvirus 5
gcacgggcugcuggu

SEQ ID NO: 2028370 - RNA, 15 nt, Human herpesvirus 5
gcguggauggucaua

SEQ ID NO: 2028371 - RNA, 20 nt, Human herpesvirus 5
cgugcucgggcgugugggug

SEQ ID NO: 2028372 - RNA, 13 nt, Human herpesvirus 5
cacucuggcccug

SEQ ID NO: 2028373 - RNA, 19 nt, Human herpesvirus 5
gcagcaucgcguugcucag

SEQ ID NO: 2028374 - RNA, 18 nt, Human herpesvirus 5
aaaagugcgucaaagcuc

SEQ ID NO: 2028375 - RNA, 20 nt, Human herpesvirus 5
cucuugcgcccucucggugu

SEQ ID NO: 2028376 - RNA, 21 nt, Human herpesvirus 5
gugcugccgggcggcuuugcc

SEQ ID NO: 2028377 - RNA, 23 nt, Human herpesvirus 5
ugguguacgugcgguaacuggca

SEQ ID NO: 2028378 - RNA, 20 nt, Human herpesvirus 5
caugcgggaacuggccuggc

SEQ ID NO: 2028379 - RNA, 11 nt, Human herpesvirus 5
acagcagcucg

SEQ ID NO: 2028380 - RNA, 13 nt, Human herpesvirus 5
cgugacacuuugg

SEQ ID NO: 2028381 - RNA, 10 nt, Human herpesvirus 5
guauccacgu

SEQ ID NO: 2028382 - RNA, 22 nt, Human herpesvirus 5
aaggcggaggagagaacggaag

SEQ ID NO: 2028383 - RNA, 15 nt, Human herpesvirus 5
acuggaagcugcugg

SEQ ID NO: 2028384 - RNA, 11 nt, Human herpesvirus 5
aucucagccuc

SEQ ID NO: 2028385 - RNA, 19 nt, Human herpesvirus 5
caugagucgccgacgguca

SEQ ID NO: 2028386 - RNA, 16 nt, Human herpesvirus 5
uauaucuuucuacaag

SEQ ID NO: 2028387 - RNA, 23 nt, Human herpesvirus 5
ccucauggcggcggccacggccu

SEQ ID NO: 2028388 - RNA, 16 nt, Human herpesvirus 5
gcagcaacagcagcca

SEQ ID NO: 2028389 - RNA, 23 nt, Human herpesvirus 5
uugaagauuuccgcuacauuugu

SEQ ID NO: 2028390 - RNA, 16 nt, Human herpesvirus 5
gcggugcaggccgcgc

SEQ ID NO: 2028391 - RNA, 17 nt, Human herpesvirus 5
gacgaggccggcggcgg

SEQ ID NO: 2028392 - RNA, 12 nt, Human herpesvirus 5
cgcgcaggcagc

SEQ ID NO: 2028393 - RNA, 16 nt, Human herpesvirus 5
ccgcgucgcuucgccg

SEQ ID NO: 2028394 - RNA, 18 nt, Human herpesvirus 5
gggcgcaucacccgccuc

SEQ ID NO: 2028395 - RNA, 14 nt, Human herpesvirus 5
cccaagccaaaaac

SEQ ID NO: 2028396 - RNA, 15 nt, Human herpesvirus 5
uacuaacgucacauu

SEQ ID NO: 2028397 - RNA, 14 nt, Human herpesvirus 5
cggcuugggcagca

SEQ ID NO: 2028398 - RNA, 18 nt, Human herpesvirus 5
ccacuauguccuccgcac

SEQ ID NO: 2028399 - RNA, 22 nt, Human herpesvirus 5
cgccuccucgucggccugggcu

SEQ ID NO: 2028400 - RNA, 23 nt, Human herpesvirus 5
cguagaauacuggaagcugcugg

SEQ ID NO: 2028401 - RNA, 14 nt, Human herpesvirus 5
acgacauauguuuu

SEQ ID NO: 2028402 - RNA, 16 nt, Human herpesvirus 5
gucuacgaucgcugga

SEQ ID NO: 2028403 - RNA, 19 nt, Human herpesvirus 5
ucgacggcgguacugaagc

SEQ ID NO: 2028404 - RNA, 23 nt, Human herpesvirus 5
ggucgccgaggcuacugcugcuu

SEQ ID NO: 2028405 - RNA, 14 nt, Human herpesvirus 5
cugcagcugcacca

SEQ ID NO: 2028406 - RNA, 23 nt, Human herpesvirus 5
caguugcuguugcucuaccgcga

SEQ ID NO: 2028407 - RNA, 18 nt, Human herpesvirus 5
cuccucgucggccugggc

SEQ ID NO: 2028408 - RNA, 15 nt, Human herpesvirus 5
ggcagcacaccugcc

SEQ ID NO: 2028409 - RNA, 12 nt, Human herpesvirus 5
augucuccaagu

SEQ ID NO: 2028410 - RNA, 24 nt, Human herpesvirus 5
cugucagcgccgggugcgcgacac

SEQ ID NO: 2028411 - RNA, 17 nt, Human herpesvirus 5
gcugguggcucaugccg

SEQ ID NO: 2028412 - RNA, 23 nt, Human herpesvirus 5
caucgaagguaacuucagugggc

SEQ ID NO: 2028413 - RNA, 19 nt, Human herpesvirus 5
cuguccgggauggaucgca

SEQ ID NO: 2028414 - RNA, 14 nt, Human herpesvirus 5
accgcgacgagguc

SEQ ID NO: 2028415 - RNA, 15 nt, Human herpesvirus 5
cguuugcgccagugg

SEQ ID NO: 2028416 - RNA, 12 nt, Human herpesvirus 5
caguagacagac

SEQ ID NO: 2028417 - RNA, 15 nt, Human herpesvirus 5
uacaaguauguggaa

SEQ ID NO: 2028418 - RNA, 21 nt, Human herpesvirus 5
cucagggcugggauccgccgc

SEQ ID NO: 2028419 - RNA, 22 nt, Human herpesvirus 5
gugcucagcggcguguacagcu

SEQ ID NO: 2028420 - RNA, 22 nt, Human herpesvirus 5
guggugguuguacgaguacacg

SEQ ID NO: 2028421 - RNA, 19 nt, Human herpesvirus 5
uagagcauuaagcauaguc

SEQ ID NO: 2028422 - RNA, 13 nt, Human herpesvirus 5
auauaaagaaucu

SEQ ID NO: 2028423 - RNA, 16 nt, Human herpesvirus 5
guccgcggugucuccu

SEQ ID NO: 2028424 - RNA, 14 nt, Human herpesvirus 5
cugcugaaacugcg

SEQ ID NO: 2028425 - RNA, 17 nt, Human herpesvirus 5
ucuacuccgaauaacaa

SEQ ID NO: 2028426 - RNA, 17 nt, Human herpesvirus 5
uugaguaacgaggaggc

SEQ ID NO: 2028427 - RNA, 17 nt, Human herpesvirus 5
ugcucggcggccacggc

SEQ ID NO: 2028428 - RNA, 13 nt, Human herpesvirus 5
gacucgcucucgu

SEQ ID NO: 2028429 - RNA, 11 nt, Human herpesvirus 5
guagcuucucu

SEQ ID NO: 2028430 - RNA, 13 nt, Human herpesvirus 5
aggacgaguggcu

SEQ ID NO: 2028431 - RNA, 19 nt, Human herpesvirus 5
cccugaguuccgucagcac

SEQ ID NO: 2028432 - RNA, 13 nt, Human herpesvirus 5
gcuguaugggcag

SEQ ID NO: 2028433 - RNA, 16 nt, Human herpesvirus 5
cgcccgguaggucagc

SEQ ID NO: 2028434 - RNA, 19 nt, Human herpesvirus 5
augugccucauuuguauuu

SEQ ID NO: 2028435 - RNA, 18 nt, Human herpesvirus 5
cggcagccaccgcgaggc

SEQ ID NO: 2028436 - RNA, 20 nt, Human herpesvirus 5
acaccacgguuuaccacagg

SEQ ID NO: 2028437 - RNA, 16 nt, Human herpesvirus 5
acuuguccuugcgcgc

SEQ ID NO: 2028438 - RNA, 14 nt, Human herpesvirus 5
gauguaguugcaga

SEQ ID NO: 2028439 - RNA, 20 nt, Human herpesvirus 5
gauacauugcccuucuggag

SEQ ID NO: 2028440 - RNA, 21 nt, Human herpesvirus 5
auggccaacagccuguggcac

SEQ ID NO: 2028441 - RNA, 14 nt, Human herpesvirus 5
cgaggaacgagggc

SEQ ID NO: 2028442 - RNA, 16 nt, Human herpesvirus 5
aguauacuaaacucug

SEQ ID NO: 2028443 - RNA, 17 nt, Human herpesvirus 5
auggggucguggcucag

SEQ ID NO: 2028444 - RNA, 14 nt, Human herpesvirus 5
ucgcgagccccauc

SEQ ID NO: 2028445 - RNA, 17 nt, Human herpesvirus 5
ccggugguacugcugug

SEQ ID NO: 2028446 - RNA, 18 nt, Human herpesvirus 5
auagcaagccagauacua

SEQ ID NO: 2028447 - RNA, 19 nt, Human herpesvirus 5
gaaggccaugagcggcagg

SEQ ID NO: 2028448 - RNA, 12 nt, Human herpesvirus 5
acccguacugcg

SEQ ID NO: 2028449 - RNA, 22 nt, Human herpesvirus 5
cgugacggauaagcgcuuucug

SEQ ID NO: 2028450 - RNA, 19 nt, Human herpesvirus 5
guucuaucaaugguggaaa

SEQ ID NO: 2028451 - RNA, 14 nt, Human herpesvirus 5
ugaagguaaagccc

SEQ ID NO: 2028452 - RNA, 13 nt, Human herpesvirus 5
ccaagccgcagcg

SEQ ID NO: 2028453 - RNA, 16 nt, Human herpesvirus 5
ccggcgggcggcugcc

SEQ ID NO: 2028454 - RNA, 17 nt, Human herpesvirus 5
gcuuaaagaugucgaug

SEQ ID NO: 2028455 - RNA, 22 nt, Human herpesvirus 5
ugguuuuugcuuccgagcugug

SEQ ID NO: 2028456 - RNA, 14 nt, Human herpesvirus 5
guauccacgucaca

SEQ ID NO: 2028457 - RNA, 22 nt, Human herpesvirus 5
cuacaugcuauaagacagccuu

SEQ ID NO: 2028458 - RNA, 19 nt, Human herpesvirus 5
gaucgcggccuucagcguc

SEQ ID NO: 2028459 - RNA, 16 nt, Human herpesvirus 5
ucgcuucgccgccacc

SEQ ID NO: 2028460 - RNA, 15 nt, Human herpesvirus 5
ucuugcgcccucucg

SEQ ID NO: 2028461 - RNA, 19 nt, Human herpesvirus 5
ugcuggccgagacggcgug

SEQ ID NO: 2028462 - RNA, 20 nt, Human herpesvirus 5
guggacggguuucagcgucc

SEQ ID NO: 2028463 - RNA, 21 nt, Human herpesvirus 5
cuguacuacgacgggacggcg

SEQ ID NO: 2028464 - RNA, 12 nt, Human herpesvirus 5
acccggcugcug

SEQ ID NO: 2028465 - RNA, 15 nt, Human herpesvirus 5
ugguguuguagcaac

SEQ ID NO: 2028466 - RNA, 18 nt, Human herpesvirus 5
aggugcgccgcagcggcu

SEQ ID NO: 2028467 - RNA, 22 nt, Human herpesvirus 5
uggaacggucuuuauauauaca

SEQ ID NO: 2028468 - RNA, 12 nt, Human herpesvirus 5
gcaccggcagcc

SEQ ID NO: 2028469 - RNA, 23 nt, Human herpesvirus 5
ucuuuucgaugaaccuccgcccu

SEQ ID NO: 2028470 - RNA, 17 nt, Human herpesvirus 5
ccacuacuaccuccccu

SEQ ID NO: 2028471 - RNA, 20 nt, Human herpesvirus 5
ggcgcggucccgugauggag

SEQ ID NO: 2028472 - RNA, 17 nt, Human herpesvirus 5
cauuccccaccuucccu

SEQ ID NO: 2028473 - RNA, 15 nt, Human herpesvirus 5
aguaggcgcgcaccc

SEQ ID NO: 2028474 - RNA, 14 nt, Human herpesvirus 5
uuuccaaagccgac

SEQ ID NO: 2028475 - RNA, 16 nt, Human herpesvirus 5
uacagguggagauucu

SEQ ID NO: 2028476 - RNA, 20 nt, Human herpesvirus 5
guaucgggccgucgcuugcc

SEQ ID NO: 2028477 - RNA, 20 nt, Human herpesvirus 5
caguagcaccggccccacgc

SEQ ID NO: 2028478 - RNA, 20 nt, Human herpesvirus 5
ccuugcugaugugccagccg

SEQ ID NO: 2028479 - RNA, 12 nt, Human herpesvirus 5
acagcaaugaca

SEQ ID NO: 2028480 - RNA, 14 nt, Human herpesvirus 5
cugcgcgggcagcc

SEQ ID NO: 2028481 - RNA, 19 nt, Human herpesvirus 5
guguugccgacggcggcgc

SEQ ID NO: 2028482 - RNA, 21 nt, Human herpesvirus 5
ucagcuuuuuuuuuuguagua

SEQ ID NO: 2028483 - RNA, 14 nt, Human herpesvirus 5
ggcaggccgugggg

SEQ ID NO: 2028484 - RNA, 16 nt, Human herpesvirus 5
acccacgaccauuucc

SEQ ID NO: 2028485 - RNA, 11 nt, Human herpesvirus 5
gccgaaacacc

SEQ ID NO: 2028486 - RNA, 16 nt, Human herpesvirus 5
uacuaucguaauguag

SEQ ID NO: 2028487 - RNA, 16 nt, Human herpesvirus 5
gcuucccuccugcagc

SEQ ID NO: 2028488 - RNA, 13 nt, Human herpesvirus 5
caggccgcaaagc

SEQ ID NO: 2028489 - RNA, 18 nt, Human herpesvirus 5
ccgcaggagcugcuuuuc

SEQ ID NO: 2028490 - RNA, 16 nt, Human herpesvirus 5
cuguucgacagcggca

SEQ ID NO: 2028491 - RNA, 22 nt, Human herpesvirus 5
ggcgcuguacggcagcggggag

SEQ ID NO: 2028492 - RNA, 17 nt, Human herpesvirus 5
auacaucgcauaugacg

SEQ ID NO: 2028493 - RNA, 17 nt, Human herpesvirus 5
uauauucaaucauuacu

SEQ ID NO: 2028494 - RNA, 19 nt, Human herpesvirus 5
guuggaucagacucacguc

SEQ ID NO: 2028495 - RNA, 20 nt, Human herpesvirus 5
auauggaguuuguguaaugc

SEQ ID NO: 2028496 - RNA, 19 nt, Human herpesvirus 5
cucgugaaacagcagcucg

SEQ ID NO: 2028497 - RNA, 12 nt, Human herpesvirus 5
acauaaaaccac

SEQ ID NO: 2028498 - RNA, 19 nt, Human herpesvirus 5
uuaacccccgacgagcagg

SEQ ID NO: 2028499 - RNA, 14 nt, Human herpesvirus 5
ugcugccgggcggc

SEQ ID NO: 2028500 - RNA, 22 nt, Human herpesvirus 5
gccccccaccuacgagcaggcc

SEQ ID NO: 2028501 - RNA, 21 nt, Human herpesvirus 5
gugccguugcuuuggcggcag

SEQ ID NO: 2028502 - RNA, 17 nt, Human herpesvirus 5
uuuaacaagucacuaua

SEQ ID NO: 2028503 - RNA, 23 nt, Human herpesvirus 5
ccggcggcugcuguugcacgggc

SEQ ID NO: 2028504 - RNA, 14 nt, Human herpesvirus 5
gaccgcgagcggcg

SEQ ID NO: 2028505 - RNA, 20 nt, Human herpesvirus 5
ccgcuuucucaucucagccu

SEQ ID NO: 2028506 - RNA, 23 nt, Human herpesvirus 5
aaccgcgggccgcccaaacaucu

SEQ ID NO: 2028507 - RNA, 21 nt, Human herpesvirus 5
cuggucuucccuacagcgacu

SEQ ID NO: 2028508 - RNA, 23 nt, Human herpesvirus 5
guuacccugguauccaacuucac

SEQ ID NO: 2028509 - RNA, 23 nt, Human herpesvirus 5
ccgucaacacggucauguuucuc

SEQ ID NO: 2028510 - RNA, 17 nt, Human herpesvirus 5
cuuccccucugcugcug

SEQ ID NO: 2028511 - RNA, 19 nt, Human herpesvirus 5
gcaccggcgccugcugcuc

SEQ ID NO: 2028512 - RNA, 22 nt, Human herpesvirus 5
gucucuccaguccauauguugu

SEQ ID NO: 2028513 - RNA, 16 nt, Human herpesvirus 5
gucccuggggcugcug

SEQ ID NO: 2028514 - RNA, 18 nt, Human herpesvirus 5
gucuacagacugggcgac

SEQ ID NO: 2028515 - RNA, 15 nt, Human herpesvirus 5
cuuuggguccagcca

SEQ ID NO: 2028516 - RNA, 14 nt, Human herpesvirus 5
cuccguccucgucg

SEQ ID NO: 2028517 - RNA, 17 nt, Human herpesvirus 5
cagcaccaguuggccac

SEQ ID NO: 2028518 - RNA, 13 nt, Human herpesvirus 5
ucagccgugagaa

SEQ ID NO: 2028519 - RNA, 14 nt, Human herpesvirus 5
cgcauaaagggugg

SEQ ID NO: 2028520 - RNA, 13 nt, Human herpesvirus 5
acaacuuuuccau

SEQ ID NO: 2028521 - RNA, 15 nt, Human herpesvirus 5
cagugcgucgcuguu

SEQ ID NO: 2028522 - RNA, 17 nt, Human herpesvirus 5
ggcucaaacaccgcugc

SEQ ID NO: 2028523 - RNA, 17 nt, Human herpesvirus 5
cggaggugcuggcggcc

SEQ ID NO: 2028524 - RNA, 22 nt, Human herpesvirus 5
ugugguagcuagugcagccuua

SEQ ID NO: 2028525 - RNA, 20 nt, Human herpesvirus 5
guaaagagagucacacuuaa

SEQ ID NO: 2028526 - RNA, 17 nt, Human herpesvirus 5
gcgcucgcccccgguuu

SEQ ID NO: 2028527 - RNA, 19 nt, Human herpesvirus 5
acaggacaccgcaacucgg

SEQ ID NO: 2028528 - RNA, 12 nt, Human herpesvirus 5
aacgugccaggc

SEQ ID NO: 2028529 - RNA, 16 nt, Human herpesvirus 5
cggcgccggcgccugg

SEQ ID NO: 2028530 - RNA, 18 nt, Human herpesvirus 5
acacgccuugcaccuggg

SEQ ID NO: 2028531 - RNA, 20 nt, Human herpesvirus 5
caggacuuuuuaauggccaa

SEQ ID NO: 2028532 - RNA, 20 nt, Human herpesvirus 5
cacugugacguuagagaaag

SEQ ID NO: 2028533 - RNA, 18 nt, Human herpesvirus 5
gcgucccuggggcugcug

SEQ ID NO: 2028534 - RNA, 18 nt, Human herpesvirus 5
guggccgaacagcagcuc

SEQ ID NO: 2028535 - RNA, 14 nt, Human herpesvirus 5
caccguaccugcau

SEQ ID NO: 2028536 - RNA, 18 nt, Human herpesvirus 5
uacgugcgcgccacggcg

SEQ ID NO: 2028537 - RNA, 15 nt, Human herpesvirus 5
cgggacccgccgccg

SEQ ID NO: 2028538 - RNA, 21 nt, Human herpesvirus 5
guccauagugcgccaagccau

SEQ ID NO: 2028539 - RNA, 13 nt, Human herpesvirus 5
gcuacaugugucc

SEQ ID NO: 2028540 - RNA, 17 nt, Human herpesvirus 5
ccgucacugccaccgac

SEQ ID NO: 2028541 - RNA, 14 nt, Human herpesvirus 5
augauccugugguc

SEQ ID NO: 2028542 - RNA, 23 nt, Human herpesvirus 5
ggaaugugcuuucccggcauggg

SEQ ID NO: 2028543 - RNA, 15 nt, Human herpesvirus 5
cggucagaaaaagaa

SEQ ID NO: 2028544 - RNA, 19 nt, Human herpesvirus 5
auaaaacgccaugaugaca

SEQ ID NO: 2028545 - RNA, 14 nt, Human herpesvirus 5
cuaccagcugggcc

SEQ ID NO: 2028546 - RNA, 17 nt, Human herpesvirus 5
gaaaaaggguuucaagu

SEQ ID NO: 2028547 - RNA, 12 nt, Human herpesvirus 5
ucgucugcaugu

SEQ ID NO: 2028548 - RNA, 22 nt, Human herpesvirus 5
acacgcgcuacgaaacuuuucu

SEQ ID NO: 2028549 - RNA, 22 nt, Human herpesvirus 5
cgucuccaccaaucaagccugu

SEQ ID NO: 2028550 - RNA, 20 nt, Human herpesvirus 5
cgcagugcgccgagcggccg

SEQ ID NO: 2028551 - RNA, 18 nt, Human herpesvirus 5
gccaccgucgcccucagc

SEQ ID NO: 2028552 - RNA, 18 nt, Human herpesvirus 5
aucuuccccucugcugcu

SEQ ID NO: 2028553 - RNA, 11 nt, Human herpesvirus 5
auccaggaggu

SEQ ID NO: 2028554 - RNA, 22 nt, Human herpesvirus 5
uuaaagaugucgauggaggucu

SEQ ID NO: 2028555 - RNA, 19 nt, Human herpesvirus 5
ucagcgacgucccgcgcgg

SEQ ID NO: 2028556 - RNA, 12 nt, Human herpesvirus 5
uugucccggggg

SEQ ID NO: 2028557 - RNA, 18 nt, Human herpesvirus 5
gcugacgcggacgaggaa

SEQ ID NO: 2028558 - RNA, 12 nt, Human herpesvirus 5
ccccuaccuaga

SEQ ID NO: 2028559 - RNA, 20 nt, Human herpesvirus 5
aguaugaaagucccgugugu

SEQ ID NO: 2028560 - RNA, 15 nt, Human herpesvirus 5
ccacgucaccgugcc

SEQ ID NO: 2028561 - RNA, 20 nt, Human herpesvirus 5
cccaguagacagacaggaca

SEQ ID NO: 2028562 - RNA, 14 nt, Human herpesvirus 5
ccaugugcagcugg

SEQ ID NO: 2028563 - RNA, 17 nt, Human herpesvirus 5
cacgcugauggccuacg

SEQ ID NO: 2028564 - RNA, 14 nt, Human herpesvirus 5
gaaaacuuguuuua

SEQ ID NO: 2028565 - RNA, 15 nt, Human herpesvirus 5
aggaaugcaugugga

SEQ ID NO: 2028566 - RNA, 18 nt, Human herpesvirus 5
gaacuggccuggcggcgg

SEQ ID NO: 2028567 - RNA, 18 nt, Human herpesvirus 5
cugccuguuccugcugcu

SEQ ID NO: 2028568 - RNA, 16 nt, Human herpesvirus 5
gcagccggaggagcag

SEQ ID NO: 2028569 - RNA, 20 nt, Human herpesvirus 5
uuggugcucgaccaggaggu

SEQ ID NO: 2028570 - RNA, 16 nt, Human herpesvirus 5
agcugcgcaggccgcc

SEQ ID NO: 2028571 - RNA, 13 nt, Human herpesvirus 5
gaguugcugugca

SEQ ID NO: 2028572 - RNA, 14 nt, Human herpesvirus 5
agccgcagcgcgga

SEQ ID NO: 2028573 - RNA, 18 nt, Human herpesvirus 5
aaucagcagugaguacac

SEQ ID NO: 2028574 - RNA, 13 nt, Human herpesvirus 5
aaugcauuaucau

SEQ ID NO: 2028575 - RNA, 16 nt, Human herpesvirus 5
gccccacaugcugcuu

SEQ ID NO: 2028576 - RNA, 21 nt, Human herpesvirus 5
agccgcggccgcugccgccgc

SEQ ID NO: 2028577 - RNA, 23 nt, Human herpesvirus 5
uugacgaagaugccgauguguga

SEQ ID NO: 2028578 - RNA, 21 nt, Human herpesvirus 5
cacgugugugcguuuucuagu

SEQ ID NO: 2028579 - RNA, 14 nt, Human herpesvirus 5
cgcgauccgcucac

SEQ ID NO: 2028580 - RNA, 14 nt, Human herpesvirus 5
uucgucgagcaccc

SEQ ID NO: 2028581 - RNA, 16 nt, Human herpesvirus 5
gaaaguuggcugcgcc

SEQ ID NO: 2028582 - RNA, 14 nt, Human herpesvirus 5
cacgggugucccau

SEQ ID NO: 2028583 - RNA, 15 nt, Human herpesvirus 5
acacuacagcuugca

SEQ ID NO: 2028584 - RNA, 20 nt, Human herpesvirus 5
ccgaggagauccaguuacac

SEQ ID NO: 2028585 - RNA, 16 nt, Human herpesvirus 5
agccaccgucccucag

SEQ ID NO: 2028586 - RNA, 20 nt, Human herpesvirus 5
gugcgguaacuggcagagcc

SEQ ID NO: 2028587 - RNA, 13 nt, Human herpesvirus 5
auggcuggugugu

SEQ ID NO: 2028588 - RNA, 13 nt, Human herpesvirus 5
ucuuaugaagcug

SEQ ID NO: 2028589 - RNA, 22 nt, Human herpesvirus 5
uacaugcuauaagacagccuua

SEQ ID NO: 2028590 - RNA, 15 nt, Human herpesvirus 5
uuacaaugucacugu

SEQ ID NO: 2028591 - RNA, 12 nt, Human herpesvirus 5
aucauggagcua

SEQ ID NO: 2028592 - RNA, 13 nt, Human herpesvirus 5
ggcggaggagccg

SEQ ID NO: 2028593 - RNA, 15 nt, Human herpesvirus 5
acggccucugggcug

SEQ ID NO: 2028594 - RNA, 22 nt, Human herpesvirus 5
gaaugaaccuuguaaugcuuau

SEQ ID NO: 2028595 - RNA, 13 nt, Human herpesvirus 5
caugaagcggaug

SEQ ID NO: 2028596 - RNA, 14 nt, Human herpesvirus 5
gccuggacgccugg

SEQ ID NO: 2028597 - RNA, 21 nt, Human herpesvirus 5
cuccuguuggcuuacugccug

SEQ ID NO: 2028598 - RNA, 15 nt, Human herpesvirus 5
gcagcaacagcagcc

SEQ ID NO: 2028599 - RNA, 18 nt, Human herpesvirus 5
gucuacgaucgcuggaaa

SEQ ID NO: 2028600 - RNA, 23 nt, Human herpesvirus 5
gacucggguguccuacaaaggaa

SEQ ID NO: 2028601 - RNA, 18 nt, Human herpesvirus 5
cccuccgacuuccuccuc

SEQ ID NO: 2028602 - RNA, 19 nt, Human herpesvirus 5
acggcgguuucagcuggca

SEQ ID NO: 2028603 - RNA, 21 nt, Human herpesvirus 5
ccgacucgcugccgcagcugc

SEQ ID NO: 2028604 - RNA, 12 nt, Human herpesvirus 5
aacuuugcugcu

SEQ ID NO: 2028605 - RNA, 18 nt, Human herpesvirus 5
cggcggccacggccugcg

SEQ ID NO: 2028606 - RNA, 14 nt, Human herpesvirus 5
aagcugucagccuc

SEQ ID NO: 2028607 - RNA, 13 nt, Human herpesvirus 5
gaugcgcacggcc

SEQ ID NO: 2028608 - RNA, 15 nt, Human herpesvirus 5
cgugcccgaagagga

SEQ ID NO: 2028609 - RNA, 22 nt, Human herpesvirus 5
cuacucacguugguguuguagc

SEQ ID NO: 2028610 - RNA, 20 nt, Human herpesvirus 5
ugaccuggguagcaaguccu

SEQ ID NO: 2028611 - RNA, 18 nt, Human herpesvirus 5
gaaucgcgagcugggcga

SEQ ID NO: 2028612 - RNA, 14 nt, Human herpesvirus 5
acgggcugcugguc

SEQ ID NO: 2028613 - RNA, 18 nt, Human herpesvirus 5
gugucacuagacagauuc

SEQ ID NO: 2028614 - RNA, 18 nt, Human herpesvirus 5
uggguccagccagcaucg

SEQ ID NO: 2028615 - RNA, 19 nt, Human herpesvirus 5
ccaucaguacggcuuucug

SEQ ID NO: 2028616 - RNA, 16 nt, Human herpesvirus 5
cguccacgggcugcgc

SEQ ID NO: 2028617 - RNA, 23 nt, Human herpesvirus 5
gccaccacccgacugcagcccac

SEQ ID NO: 2028618 - RNA, 17 nt, Human herpesvirus 5
uccagcuuaccgccacc

SEQ ID NO: 2028619 - RNA, 15 nt, Human herpesvirus 5
agcccgggccgccgc

SEQ ID NO: 2028620 - RNA, 13 nt, Human herpesvirus 5
acgcucgagggcu

SEQ ID NO: 2028621 - RNA, 21 nt, Human herpesvirus 5
ugcagcacgcgauuggccagc

SEQ ID NO: 2028622 - RNA, 13 nt, Human herpesvirus 5
gccgcggcagcac

SEQ ID NO: 2028623 - RNA, 20 nt, Human herpesvirus 5
cggccgcggugcgcugcagc

SEQ ID NO: 2028624 - RNA, 19 nt, Human herpesvirus 5
gccgugcucuuggcgccgc

SEQ ID NO: 2028625 - RNA, 14 nt, Human herpesvirus 5
cgacauggacauga

SEQ ID NO: 2028626 - RNA, 14 nt, Human herpesvirus 5
cgcgcuuuugaccg

SEQ ID NO: 2028627 - RNA, 23 nt, Human herpesvirus 5
cacgggcucgaccggcggcugcu

SEQ ID NO: 2028628 - RNA, 18 nt, Human herpesvirus 5
ccaccacgaccaugaugg

SEQ ID NO: 2028629 - RNA, 19 nt, Human herpesvirus 5
ugugcaccgucaucggcac

SEQ ID NO: 2028630 - RNA, 22 nt, Human herpesvirus 5
gacucuauaaaaacccacgucc

SEQ ID NO: 2028631 - RNA, 17 nt, Human herpesvirus 5
ccgcuguggcugccgcu

SEQ ID NO: 2028632 - RNA, 16 nt, Human herpesvirus 5
cgagggcucgugcgug

SEQ ID NO: 2028633 - RNA, 18 nt, Human herpesvirus 5
cuccgacgacgccgagga

SEQ ID NO: 2028634 - RNA, 19 nt, Human herpesvirus 5
ugcucuacugcaacugcac

SEQ ID NO: 2028635 - RNA, 11 nt, Human herpesvirus 5
gauccaggagg

SEQ ID NO: 2028636 - RNA, 23 nt, Human herpesvirus 5
cagccacggaggagacgagagaa

SEQ ID NO: 2028637 - RNA, 16 nt, Human herpesvirus 5
gcuacugaucgccugg

SEQ ID NO: 2028638 - RNA, 16 nt, Human herpesvirus 5
guggugguggcucacg

SEQ ID NO: 2028639 - RNA, 19 nt, Human herpesvirus 5
ucacuugcgcgguuauggc

SEQ ID NO: 2028640 - RNA, 14 nt, Human herpesvirus 5
gcugcgucugucuu

SEQ ID NO: 2028641 - RNA, 19 nt, Human herpesvirus 5
gcagcccggcuccgcgcag

SEQ ID NO: 2028642 - RNA, 14 nt, Human herpesvirus 5
uuuguaacacuaca

SEQ ID NO: 2028643 - RNA, 22 nt, Human herpesvirus 5
ccccgauaaucggcucucaggc

SEQ ID NO: 2028644 - RNA, 22 nt, Human herpesvirus 5
ugcugcugguuuuugcccccuc

SEQ ID NO: 2028645 - RNA, 17 nt, Human herpesvirus 5
cucacccggcugcuggc

SEQ ID NO: 2028646 - RNA, 13 nt, Human herpesvirus 5
acccauuacagua

SEQ ID NO: 2028647 - RNA, 23 nt, Human herpesvirus 5
gcggcuuauguuucugggguggg

SEQ ID NO: 2028648 - RNA, 22 nt, Human herpesvirus 5
uaaaccgcccgugccucccgcg

SEQ ID NO: 2028649 - RNA, 22 nt, Human herpesvirus 5
cugagcuacgaugaccacgaag

SEQ ID NO: 2028650 - RNA, 20 nt, Human herpesvirus 5
acgucacuauccgaugguuu

SEQ ID NO: 2028651 - RNA, 16 nt, Human herpesvirus 5
aagacggacuguuuca

SEQ ID NO: 2028652 - RNA, 22 nt, Human herpesvirus 5
cacgucaagaucguacccacca

SEQ ID NO: 2028653 - RNA, 17 nt, Human herpesvirus 5
acgcgaccagcugcugg

SEQ ID NO: 2028654 - RNA, 19 nt, Human herpesvirus 5
gcucauccacaacgaggaa

SEQ ID NO: 2028655 - RNA, 15 nt, Human herpesvirus 5
gcugcuccucggagc

SEQ ID NO: 2028656 - RNA, 17 nt, Human herpesvirus 5
gguagcuagugcagccu

SEQ ID NO: 2028657 - RNA, 22 nt, Human herpesvirus 5
ccggagcuacgcgaccagcugc

SEQ ID NO: 2028658 - RNA, 22 nt, Human herpesvirus 5
ccgccguugcggccgccgcuca

SEQ ID NO: 2028659 - RNA, 15 nt, Human herpesvirus 5
ggccgucgcuugccg

SEQ ID NO: 2028660 - RNA, 11 nt, Human herpesvirus 5
ucaaguucagu

SEQ ID NO: 2028661 - RNA, 14 nt, Human herpesvirus 5
cucaucucagccuc

SEQ ID NO: 2028662 - RNA, 16 nt, Human herpesvirus 5
cuuugcuuaucugccu

SEQ ID NO: 2028663 - RNA, 15 nt, Human herpesvirus 5
gccacugggccucgg

SEQ ID NO: 2028664 - RNA, 16 nt, Human herpesvirus 5
ugcuucauccagcucc

SEQ ID NO: 2028665 - RNA, 12 nt, Human herpesvirus 5
ucgccccucacg

SEQ ID NO: 2028666 - RNA, 18 nt, Human herpesvirus 5
ggaaugcggucaguuggg

SEQ ID NO: 2028667 - RNA, 20 nt, Human herpesvirus 5
augcaugucgcgacagagag

SEQ ID NO: 2028668 - RNA, 13 nt, Human herpesvirus 5
cguaauguagaca

SEQ ID NO: 2028669 - RNA, 18 nt, Human herpesvirus 5
gaaaaaaugguguuacac

SEQ ID NO: 2028670 - RNA, 16 nt, Human herpesvirus 5
caaggcgacauggccc

SEQ ID NO: 2028671 - RNA, 14 nt, Human herpesvirus 5
aggccuccucuccg

SEQ ID NO: 2028672 - RNA, 16 nt, Human herpesvirus 5
cuugggcagcagcggc

SEQ ID NO: 2028673 - RNA, 16 nt, Human herpesvirus 5
gcguuccaaugcaccg

SEQ ID NO: 2028674 - RNA, 22 nt, Human herpesvirus 5
cgcgcccacgguccgggcacaa

SEQ ID NO: 2028675 - RNA, 21 nt, Human herpesvirus 5
gucugcgucaagacgggccug

SEQ ID NO: 2028676 - RNA, 13 nt, Human herpesvirus 5
guuggcugguguc

SEQ ID NO: 2028677 - RNA, 13 nt, Human herpesvirus 5
accgcaggagcug

SEQ ID NO: 2028678 - RNA, 22 nt, Human herpesvirus 5
caguuuuuuuccauccuggcca

SEQ ID NO: 2028679 - RNA, 13 nt, Human herpesvirus 5
cacgcgcuagccu

SEQ ID NO: 2028680 - RNA, 17 nt, Human herpesvirus 5
uagacauuccccaccuu

SEQ ID NO: 2028681 - RNA, 16 nt, Human herpesvirus 5
cguguaggcgacuggc

SEQ ID NO: 2028682 - RNA, 14 nt, Human herpesvirus 5
cuugcaagaggaau

SEQ ID NO: 2028683 - RNA, 14 nt, Human herpesvirus 5
uaauagacacaccg

SEQ ID NO: 2028684 - RNA, 23 nt, Human herpesvirus 5
ccuacucaccaaagccgccgccg

SEQ ID NO: 2028685 - RNA, 12 nt, Human herpesvirus 5
ccccucugcugc

SEQ ID NO: 2028686 - RNA, 15 nt, Human herpesvirus 5
auuuucuuucuagug

SEQ ID NO: 2028687 - RNA, 18 nt, Human herpesvirus 5
cccuguaauuauuccagc

SEQ ID NO: 2028688 - RNA, 15 nt, Human herpesvirus 5
ccgcagacaccaagc

SEQ ID NO: 2028689 - RNA, 23 nt, Human herpesvirus 5
cggcggacuuggcagcgggccug

SEQ ID NO: 2028690 - RNA, 16 nt, Human herpesvirus 5
cucggguuccucggcc

SEQ ID NO: 2028691 - RNA, 14 nt, Human herpesvirus 5
ucgucucaucacau

SEQ ID NO: 2028692 - RNA, 13 nt, Human herpesvirus 5
gggcgcagaaacu

SEQ ID NO: 2028693 - RNA, 18 nt, Human herpesvirus 5
cagggaaagguuauauaa

SEQ ID NO: 2028694 - RNA, 16 nt, Human herpesvirus 5
guccaguggcaggccc

SEQ ID NO: 2028695 - RNA, 13 nt, Human herpesvirus 5
ucacacuuaagaa

SEQ ID NO: 2028696 - RNA, 18 nt, Human herpesvirus 5
cgaccacgacacggugcu

SEQ ID NO: 2028697 - RNA, 22 nt, Human herpesvirus 5
acucgcugccgcagcugcugga

SEQ ID NO: 2028698 - RNA, 15 nt, Human herpesvirus 5
ggacgacguggccuc

SEQ ID NO: 2028699 - RNA, 16 nt, Human herpesvirus 5
acacgcagaccguggg

SEQ ID NO: 2028700 - RNA, 20 nt, Human herpesvirus 5
gauucccaucucaacgucaa

SEQ ID NO: 2028701 - RNA, 23 nt, Human herpesvirus 5
cugaacaauaaacuaaaacauuc

SEQ ID NO: 2028702 - RNA, 19 nt, Human herpesvirus 5
ccguuugcgccagugggug

SEQ ID NO: 2028703 - RNA, 11 nt, Human herpesvirus 5
guaccacauuu

SEQ ID NO: 2028704 - RNA, 19 nt, Human herpesvirus 5
ggcccguuucgacgaaauc

SEQ ID NO: 2028705 - RNA, 17 nt, Human herpesvirus 5
cggagccccugcgcgcc

SEQ ID NO: 2028706 - RNA, 13 nt, Human herpesvirus 5
ugaccggaggcua

SEQ ID NO: 2028707 - RNA, 13 nt, Human herpesvirus 5
gggacggugauga

SEQ ID NO: 2028708 - RNA, 20 nt, Human herpesvirus 5
ucgccacgguuuguggcaag

SEQ ID NO: 2028709 - RNA, 23 nt, Human herpesvirus 5
caugaggaagcggggguguauag

SEQ ID NO: 2028710 - RNA, 19 nt, Human herpesvirus 5
agguagguggccaugauga

SEQ ID NO: 2028711 - RNA, 23 nt, Human herpesvirus 5
ccgugcccguuuucacagcagcc

SEQ ID NO: 2028712 - RNA, 23 nt, Human herpesvirus 5
aacuacaauguauagauacacgu

SEQ ID NO: 2028713 - RNA, 21 nt, Human herpesvirus 5
gaccuccgcgucggucgccgc

SEQ ID NO: 2028714 - RNA, 16 nt, Human herpesvirus 5
uaauuggagacacaac

SEQ ID NO: 2028715 - RNA, 20 nt, Human herpesvirus 5
gcugcugcacgggcucgacc

SEQ ID NO: 2028716 - RNA, 14 nt, Human herpesvirus 5
gccgucgcuugccg

SEQ ID NO: 2028717 - RNA, 18 nt, Human herpesvirus 5
uaucaucuaaagacuaua

SEQ ID NO: 2028718 - RNA, 18 nt, Human herpesvirus 5
gcugccgcagcugcugga

SEQ ID NO: 2028719 - RNA, 18 nt, Human herpesvirus 5
gcguagccaccuguugga

SEQ ID NO: 2028720 - RNA, 17 nt, Human herpesvirus 5
ccgaauuugggcggugg

SEQ ID NO: 2028721 - RNA, 13 nt, Human herpesvirus 5
gaggguaacuaug

SEQ ID NO: 2028722 - RNA, 21 nt, Human herpesvirus 5
cacgucggagccccugcgcgc

SEQ ID NO: 2028723 - RNA, 23 nt, Human herpesvirus 5
uacggcccggcagcaccaugccg

SEQ ID NO: 2028724 - RNA, 15 nt, Human herpesvirus 5
cuuucgcgcagcgcg

SEQ ID NO: 2028725 - RNA, 15 nt, Human herpesvirus 5
agcacauuagacaca

SEQ ID NO: 2028726 - RNA, 22 nt, Human herpesvirus 5
aacagccuucccuuguaagaca

SEQ ID NO: 2028727 - RNA, 14 nt, Human herpesvirus 5
ucugacguccagca

SEQ ID NO: 2028728 - RNA, 20 nt, Human herpesvirus 5
aaggccgccucuucuggccc

SEQ ID NO: 2028729 - RNA, 12 nt, Human herpesvirus 5
cgcaagggcugc

SEQ ID NO: 2028730 - RNA, 19 nt, Human herpesvirus 5
acgcggugcagguucugaa

SEQ ID NO: 2028731 - RNA, 17 nt, Human herpesvirus 5
acauucaauacaucaua

SEQ ID NO: 2028732 - RNA, 20 nt, Human herpesvirus 5
ggcgcgcaucgccgucgagu

SEQ ID NO: 2028733 - RNA, 11 nt, Human herpesvirus 5
gccgugcucag

SEQ ID NO: 2028734 - RNA, 15 nt, Human herpesvirus 5
uaaagcccccacgac

SEQ ID NO: 2028735 - RNA, 14 nt, Human herpesvirus 5
cccucugcugcugg

SEQ ID NO: 2028736 - RNA, 17 nt, Human herpesvirus 5
cugaggaaggggaggag

SEQ ID NO: 2028737 - RNA, 19 nt, Human herpesvirus 5
cagcuaccgccgcaacagc

SEQ ID NO: 2028738 - RNA, 15 nt, Human herpesvirus 5
cgccgucaaggccgc

SEQ ID NO: 2028739 - RNA, 19 nt, Human herpesvirus 5
ccaugucuccaagucuggu

SEQ ID NO: 2028740 - RNA, 22 nt, Human herpesvirus 5
cgggccgcgcuccaggcggaga

SEQ ID NO: 2028741 - RNA, 14 nt, Human herpesvirus 5
aacugguuccugca

SEQ ID NO: 2028742 - RNA, 15 nt, Human herpesvirus 5
agaacuuugcugcua

SEQ ID NO: 2028743 - RNA, 13 nt, Human herpesvirus 5
ccaaucgacugcc

SEQ ID NO: 2028744 - RNA, 21 nt, Human herpesvirus 5
cacgcggcucacguagcaggc

SEQ ID NO: 2028745 - RNA, 13 nt, Human herpesvirus 5
cagcagcagcugg

SEQ ID NO: 2028746 - RNA, 16 nt, Human herpesvirus 5
gacgucggcgguccuc

SEQ ID NO: 2028747 - RNA, 10 nt, Human herpesvirus 5
cacagcagcc

SEQ ID NO: 2028748 - RNA, 15 nt, Human herpesvirus 5
agcacgggcugcugg

SEQ ID NO: 2028749 - RNA, 23 nt, Human herpesvirus 5
caaagcuggacagugagagcuca

SEQ ID NO: 2028750 - RNA, 15 nt, Human herpesvirus 5
cucgaggaggggccg

SEQ ID NO: 2028751 - RNA, 15 nt, Human herpesvirus 5
aggcuacugcugcuu

SEQ ID NO: 2028752 - RNA, 14 nt, Human herpesvirus 5
uaacaacacaucaa

SEQ ID NO: 2028753 - RNA, 18 nt, Human herpesvirus 5
cagcgugcaccugcugcc

SEQ ID NO: 2028754 - RNA, 15 nt, Human herpesvirus 5
caaggcgagccacuc

SEQ ID NO: 2028755 - RNA, 22 nt, Human herpesvirus 5
ccguuacgccgacgugauccag

SEQ ID NO: 2028756 - RNA, 17 nt, Human herpesvirus 5
gccaccgucgcccucag

SEQ ID NO: 2028757 - RNA, 17 nt, Human herpesvirus 5
gcggcgacaagcugugg

SEQ ID NO: 2028758 - RNA, 14 nt, Human herpesvirus 5
auacgauaauugcu

SEQ ID NO: 2028759 - RNA, 18 nt, Human herpesvirus 5
ugacugcaacgacaccuc

SEQ ID NO: 2028760 - RNA, 14 nt, Human herpesvirus 5
cuggggcugcugcu

SEQ ID NO: 2028761 - RNA, 18 nt, Human herpesvirus 5
cgccguucggcucuccuc

SEQ ID NO: 2028762 - RNA, 20 nt, Human herpesvirus 5
cuguuggagcaacgggcggc

SEQ ID NO: 2028763 - RNA, 13 nt, Human herpesvirus 5
agcugcuggagcg

SEQ ID NO: 2028764 - RNA, 22 nt, Human herpesvirus 5
guccucuccuccuucuuccucg

SEQ ID NO: 2028765 - RNA, 19 nt, Human herpesvirus 5
ucccgguauucggaaacag

SEQ ID NO: 2028766 - RNA, 17 nt, Human herpesvirus 5
ggcugccuguuccugcu

SEQ ID NO: 2028767 - RNA, 21 nt, Human herpesvirus 5
cgccguacggcaacgagcagg

SEQ ID NO: 2028768 - RNA, 18 nt, Human herpesvirus 5
gagcgacguaccagcugu

SEQ ID NO: 2028769 - RNA, 13 nt, Human herpesvirus 5
cgguggcggccgc

SEQ ID NO: 2028770 - RNA, 20 nt, Human herpesvirus 5
aggcggcgccggcgccuggu

SEQ ID NO: 2028771 - RNA, 19 nt, Human herpesvirus 5
gccaacuccgugccagcug

SEQ ID NO: 2028772 - RNA, 15 nt, Human herpesvirus 5
caacagcagcaacag

SEQ ID NO: 2028773 - RNA, 22 nt, Human herpesvirus 5
guccacacgccgucucgucaca

SEQ ID NO: 2028774 - RNA, 14 nt, Human herpesvirus 5
gcaagugcucgacu

SEQ ID NO: 2028775 - RNA, 23 nt, Human herpesvirus 5
acuccuguuggcuuacugccugc

SEQ ID NO: 2028776 - RNA, 23 nt, Human herpesvirus 5
cccucggggugcggguggcgggc

SEQ ID NO: 2028777 - RNA, 17 nt, Human herpesvirus 5
auaaaaaaagacacuca

SEQ ID NO: 2028778 - RNA, 17 nt, Human herpesvirus 5
cggcgacugacgccggc

SEQ ID NO: 2028779 - RNA, 13 nt, Human herpesvirus 5
ccgaacucagagg

SEQ ID NO: 2028780 - RNA, 13 nt, Human herpesvirus 5
cggaucuacucau

SEQ ID NO: 2028781 - RNA, 21 nt, Human herpesvirus 5
gcuggcugucgagcugguuaa

SEQ ID NO: 2028782 - RNA, 17 nt, Human herpesvirus 5
cgccggcuugcuccucu

SEQ ID NO: 2028783 - RNA, 14 nt, Human herpesvirus 5
cuccaguccauaug

SEQ ID NO: 2028784 - RNA, 15 nt, Human herpesvirus 5
ugcugggcugggugc

SEQ ID NO: 2028785 - RNA, 22 nt, Human herpesvirus 5
cuacgccggggaagccuccgga

SEQ ID NO: 2028786 - RNA, 21 nt, Human herpesvirus 5
cugcugcaccacagcgccagg

SEQ ID NO: 2028787 - RNA, 14 nt, Human herpesvirus 5
gcccgcagacacca

SEQ ID NO: 2028788 - RNA, 21 nt, Human herpesvirus 5
cgaguugcaaaagaagcugcc

SEQ ID NO: 2028789 - RNA, 13 nt, Human herpesvirus 5
ccgcgcuccaggc

SEQ ID NO: 2028790 - RNA, 18 nt, Human herpesvirus 5
uacgcgaccagcugcugg

SEQ ID NO: 2028791 - RNA, 17 nt, Human herpesvirus 5
ucaccaucgugccgcuc

SEQ ID NO: 2028792 - RNA, 18 nt, Human herpesvirus 5
gccgcagccguuggugga

SEQ ID NO: 2028793 - RNA, 17 nt, Human herpesvirus 5
gcuaccagcugcaggca

SEQ ID NO: 2028794 - RNA, 17 nt, Human herpesvirus 5
acgcuacgaccuggccu

SEQ ID NO: 2028795 - RNA, 14 nt, Human herpesvirus 5
acgcugauggccua

SEQ ID NO: 2028796 - RNA, 18 nt, Human herpesvirus 5
ggcauagugccagcccua

SEQ ID NO: 2028797 - RNA, 23 nt, Human herpesvirus 5
uuaacaugaugaagauggccauc

SEQ ID NO: 2028798 - RNA, 20 nt, Human herpesvirus 5
uacaugaugaaugucaucau

SEQ ID NO: 2028799 - RNA, 16 nt, Human herpesvirus 5
ucgcugccgcagcugc

SEQ ID NO: 2028800 - RNA, 16 nt, Human herpesvirus 5
acgcuuuaagcugcuc

SEQ ID NO: 2028801 - RNA, 13 nt, Human herpesvirus 5
uggggauuuuuga

SEQ ID NO: 2028802 - RNA, 17 nt, Human herpesvirus 5
cguagcgcgugucccug

SEQ ID NO: 2028803 - RNA, 13 nt, Human herpesvirus 5
ccgacacagcagc

SEQ ID NO: 2028804 - RNA, 21 nt, Human herpesvirus 5
acaacaccacggcacgacaua

SEQ ID NO: 2028805 - RNA, 17 nt, Human herpesvirus 5
cacuuuuaacagcucau

SEQ ID NO: 2028806 - RNA, 18 nt, Human herpesvirus 5
aaacucgucguuuccccc

SEQ ID NO: 2028807 - RNA, 17 nt, Human herpesvirus 5
cgggccgcgcuccaggc

SEQ ID NO: 2028808 - RNA, 16 nt, Human herpesvirus 5
gccggcgccugguugc

SEQ ID NO: 2028809 - RNA, 13 nt, Human herpesvirus 5
cggcgacaucacg

SEQ ID NO: 2028810 - RNA, 21 nt, Human herpesvirus 5
caucaauaaacuuuuuuuaac

SEQ ID NO: 2028811 - RNA, 17 nt, Human herpesvirus 5
acaggccagcugccacc

SEQ ID NO: 2028812 - RNA, 12 nt, Human herpesvirus 5
ucgaucucaugu

SEQ ID NO: 2028813 - RNA, 23 nt, Human herpesvirus 5
gaggcgcucgugaaacagcagcu

SEQ ID NO: 2028814 - RNA, 14 nt, Human herpesvirus 5
ggaaaaacaaagaa

SEQ ID NO: 2028815 - RNA, 17 nt, Human herpesvirus 5
agacggcgugacacagc

SEQ ID NO: 2028816 - RNA, 21 nt, Human herpesvirus 5
acugcuauguaucaucuuuau

SEQ ID NO: 2028817 - RNA, 19 nt, Human herpesvirus 5
uauccaacuucacuucaaa

SEQ ID NO: 2028818 - RNA, 13 nt, Human herpesvirus 5
ggcgguggccguc

SEQ ID NO: 2028819 - RNA, 17 nt, Human herpesvirus 5
guccucggugcccgcac

SEQ ID NO: 2028820 - RNA, 22 nt, Human herpesvirus 5
ccaccaggccgcaaagcuggac

SEQ ID NO: 2028821 - RNA, 19 nt, Human herpesvirus 5
ccguugccgccucagaacc

SEQ ID NO: 2028822 - RNA, 19 nt, Human herpesvirus 5
gcuguggcuucucuggaga

SEQ ID NO: 2028823 - RNA, 21 nt, Human herpesvirus 5
cggggcgugccgagcugccuu

SEQ ID NO: 2028824 - RNA, 14 nt, Human herpesvirus 5
ggcggcggugguga

SEQ ID NO: 2028825 - RNA, 16 nt, Human herpesvirus 5
uggucuucccuacagc

SEQ ID NO: 2028826 - RNA, 14 nt, Human herpesvirus 5
cccgaggcggagga

SEQ ID NO: 2028827 - RNA, 16 nt, Human herpesvirus 5
ggacggcaaggcggag

SEQ ID NO: 2028828 - RNA, 22 nt, Human herpesvirus 5
cccgcacacagacgacgcgccg

SEQ ID NO: 2028829 - RNA, 21 nt, Human herpesvirus 5
agggaaaacauaagaauagga

SEQ ID NO: 2028830 - RNA, 19 nt, Human herpesvirus 5
acgcagugcguggccgcac

SEQ ID NO: 2028831 - RNA, 19 nt, Human herpesvirus 5
gcuacguaggccuccucuc

SEQ ID NO: 2028832 - RNA, 18 nt, Human herpesvirus 5
ccuuaucugggugcaaug

SEQ ID NO: 2028833 - RNA, 13 nt, Human herpesvirus 5
cuuaccggggacc

SEQ ID NO: 2028834 - RNA, 20 nt, Human herpesvirus 5
accguggggucaucgaccga

SEQ ID NO: 2028835 - RNA, 17 nt, Human herpesvirus 5
acgccguugccacgagc

SEQ ID NO: 2028836 - RNA, 16 nt, Human herpesvirus 5
gcgucgucccagcagg

SEQ ID NO: 2028837 - RNA, 19 nt, Human herpesvirus 5
gccgcuggacugacacagc

SEQ ID NO: 2028838 - RNA, 15 nt, Human herpesvirus 5
cguccgggcuuuccu

SEQ ID NO: 2028839 - RNA, 15 nt, Human herpesvirus 5
ccaggcucugcgccg

SEQ ID NO: 2028840 - RNA, 21 nt, Human herpesvirus 5
auacuucucguacgacgucug

SEQ ID NO: 2028841 - RNA, 14 nt, Human herpesvirus 5
cacgccgugcucgc

SEQ ID NO: 2028842 - RNA, 18 nt, Human herpesvirus 5
gcgacuuuuuucugugag

SEQ ID NO: 2028843 - RNA, 16 nt, Human herpesvirus 5
gcaccgguuggagcag

SEQ ID NO: 2028844 - RNA, 22 nt, Human herpesvirus 5
cuaguaaaaaaagugcgucaaa

SEQ ID NO: 2028845 - RNA, 14 nt, Human herpesvirus 5
cguccgcuggaaau

SEQ ID NO: 2028846 - RNA, 17 nt, Human herpesvirus 5
gcacgagugggccagcc

SEQ ID NO: 2028847 - RNA, 20 nt, Human herpesvirus 5
ucagcuaccgccgcaacagc

SEQ ID NO: 2028848 - RNA, 16 nt, Human herpesvirus 5
gugugaucugggcagc

SEQ ID NO: 2028849 - RNA, 13 nt, Human herpesvirus 5
ucuuccccucugc

SEQ ID NO: 2028850 - RNA, 15 nt, Human herpesvirus 5
ccgcgugcuccacca

SEQ ID NO: 2028851 - RNA, 14 nt, Human herpesvirus 5
gugcgccaagccau

SEQ ID NO: 2028852 - RNA, 14 nt, Human herpesvirus 5
agacagacaggaca

SEQ ID NO: 2028853 - RNA, 12 nt, Human herpesvirus 5
gccaccgugggu

SEQ ID NO: 2028854 - RNA, 14 nt, Human herpesvirus 5
uuaacauguuaugu

SEQ ID NO: 2028855 - RNA, 18 nt, Human herpesvirus 5
ccagcggccgcagugggc

SEQ ID NO: 2028856 - RNA, 22 nt, Human herpesvirus 5
cgccacuauguccuccgcacuu

SEQ ID NO: 2028857 - RNA, 18 nt, Human herpesvirus 5
caacugguuccugcaggu

SEQ ID NO: 2028858 - RNA, 15 nt, Human herpesvirus 5
aacgaggagcggcaa

SEQ ID NO: 2028859 - RNA, 15 nt, Human herpesvirus 5
auuguguguacgaca

SEQ ID NO: 2028860 - RNA, 14 nt, Human herpesvirus 5
ucugcgagaggaag

SEQ ID NO: 2028861 - RNA, 22 nt, Human herpesvirus 5
auacauugcccuucuggagcac

SEQ ID NO: 2028862 - RNA, 23 nt, Human herpesvirus 5
gcggccccguaccgcucuucugg

SEQ ID NO: 2028863 - RNA, 17 nt, Human herpesvirus 5
cugcaacgccuggcgug

SEQ ID NO: 2028864 - RNA, 14 nt, Human herpesvirus 5
ggccgugguggccg

SEQ ID NO: 2028865 - RNA, 12 nt, Human herpesvirus 5
cagguucugaau

SEQ ID NO: 2028866 - RNA, 18 nt, Human herpesvirus 5
uggagacaguuuccacgc

SEQ ID NO: 2028867 - RNA, 13 nt, Human herpesvirus 5
ugccgcagcugcu

SEQ ID NO: 2028868 - RNA, 18 nt, Human herpesvirus 5
cuggacacucuggcccug

SEQ ID NO: 2028869 - RNA, 18 nt, Human herpesvirus 5
acugcguggggugcugga

SEQ ID NO: 2028870 - RNA, 19 nt, Human herpesvirus 5
caugggcgacaccgccucg

SEQ ID NO: 2028871 - RNA, 15 nt, Human herpesvirus 5
gaggcucuguggacc

SEQ ID NO: 2028872 - RNA, 13 nt, Human herpesvirus 5
cacgacgcaugca

SEQ ID NO: 2028873 - RNA, 16 nt, Human herpesvirus 5
ccgcggcaccagagac

SEQ ID NO: 2028874 - RNA, 19 nt, Human herpesvirus 5
gagacgagagaaccuaccu

SEQ ID NO: 2028875 - RNA, 22 nt, Human herpesvirus 5
ucugaccuugcugaugugccag

SEQ ID NO: 2028876 - RNA, 20 nt, Human herpesvirus 5
gcggcuuauguuucuggggu

SEQ ID NO: 2028877 - RNA, 19 nt, Human herpesvirus 5
ggcgugaaugggcacgccg

SEQ ID NO: 2028878 - RNA, 21 nt, Human herpesvirus 5
gccgcgguacgcacgucgccg

SEQ ID NO: 2028879 - RNA, 21 nt, Human herpesvirus 5
gucgcacaaagaagucucuuu

SEQ ID NO: 2028880 - RNA, 16 nt, Human herpesvirus 5
gaaccccguggaucag

SEQ ID NO: 2028881 - RNA, 21 nt, Human herpesvirus 5
ggagcuacgcgaccagcugcu

SEQ ID NO: 2028882 - RNA, 13 nt, Human herpesvirus 5
gucaaccugcuga

SEQ ID NO: 2028883 - RNA, 17 nt, Human herpesvirus 5
agcccauccucguggaa

SEQ ID NO: 2028884 - RNA, 16 nt, Human herpesvirus 5
cucuaccgcgacggcg

SEQ ID NO: 2028885 - RNA, 14 nt, Human herpesvirus 5
uugcaccugggugg

SEQ ID NO: 2028886 - RNA, 17 nt, Human herpesvirus 5
agcccgggccgccgcca

SEQ ID NO: 2028887 - RNA, 15 nt, Human herpesvirus 5
aucaucaacagcagc

SEQ ID NO: 2028888 - RNA, 20 nt, Human herpesvirus 5
aacaagccgacccccaccag

SEQ ID NO: 2028889 - RNA, 18 nt, Human herpesvirus 5
ccucuacacuuggugcuc

SEQ ID NO: 2028890 - RNA, 18 nt, Human herpesvirus 5
cgaagcugcgcaggccgc

SEQ ID NO: 2028891 - RNA, 20 nt, Human herpesvirus 5
ccugguauacgaggcucucu

SEQ ID NO: 2028892 - RNA, 21 nt, Human herpesvirus 5
ggcugacgcggacgaggaaca

SEQ ID NO: 2028893 - RNA, 18 nt, Human herpesvirus 5
ggcugucacaucaacucu

SEQ ID NO: 2028894 - RNA, 13 nt, Human herpesvirus 5
cacuccguaagga

SEQ ID NO: 2028895 - RNA, 21 nt, Human herpesvirus 5
caucggcaacuucuuggugau

SEQ ID NO: 2028896 - RNA, 16 nt, Human herpesvirus 5
cugcuuuucgggccgc

SEQ ID NO: 2028897 - RNA, 18 nt, Human herpesvirus 5
cucucuauccgguggcgc

SEQ ID NO: 2028898 - RNA, 15 nt, Human herpesvirus 5
acggcccggcagcac

SEQ ID NO: 2028899 - RNA, 14 nt, Human herpesvirus 5
cccgccggcgggcg

SEQ ID NO: 2028900 - RNA, 14 nt, Human herpesvirus 5
cauagugccagccc

SEQ ID NO: 2028901 - RNA, 13 nt, Human herpesvirus 5
caucaccgccucc

SEQ ID NO: 2028902 - RNA, 14 nt, Human herpesvirus 5
acaucauaaaaacc

SEQ ID NO: 2028903 - RNA, 14 nt, Human herpesvirus 5
aacguugagacuac

SEQ ID NO: 2028904 - RNA, 16 nt, Human herpesvirus 5
ucccuggggcugcugc

SEQ ID NO: 2028905 - RNA, 19 nt, Human herpesvirus 5
ccgcuggacugacacagcu

SEQ ID NO: 2028906 - RNA, 11 nt, Human herpesvirus 5
ugauggagaaa

SEQ ID NO: 2028907 - RNA, 13 nt, Human herpesvirus 5
ggccgcggaggug

SEQ ID NO: 2028908 - RNA, 18 nt, Human herpesvirus 5
uuggguaacgcuggcuca

SEQ ID NO: 2028909 - RNA, 21 nt, Human herpesvirus 5
acgauaaaaauccuauuguuu

SEQ ID NO: 2028910 - RNA, 21 nt, Human herpesvirus 5
cgggccugguauacgaggcuc

SEQ ID NO: 2028911 - RNA, 15 nt, Human herpesvirus 5
caauaaguaccucua

SEQ ID NO: 2028912 - RNA, 15 nt, Human herpesvirus 5
cuccgugccagcugg

SEQ ID NO: 2028913 - RNA, 14 nt, Human herpesvirus 5
ggagcgggucgccg

SEQ ID NO: 2028914 - RNA, 23 nt, Human herpesvirus 5
gccuuuuuaauaaagucuggguu

SEQ ID NO: 2028915 - RNA, 20 nt, Human herpesvirus 5
ugcgccuccucgucggccug

SEQ ID NO: 2028916 - RNA, 16 nt, Human herpesvirus 5
caagcguauccugguc

SEQ ID NO: 2028917 - RNA, 21 nt, Human herpesvirus 5
cucaacuuuggcgugcccagc

SEQ ID NO: 2028918 - RNA, 14 nt, Human herpesvirus 5
cgcgccuuccuccu

SEQ ID NO: 2028919 - RNA, 22 nt, Human herpesvirus 5
gguggugugugauggggugugg

SEQ ID NO: 2028920 - RNA, 18 nt, Human herpesvirus 5
uccgcuacucccgagcuc

SEQ ID NO: 2028921 - RNA, 17 nt, Human herpesvirus 5
ucaacgacgccacacac

SEQ ID NO: 2028922 - RNA, 20 nt, Human herpesvirus 5
ggugauucuauuacacucua

SEQ ID NO: 2028923 - RNA, 14 nt, Human herpesvirus 5
cgcagugggcccac

SEQ ID NO: 2028924 - RNA, 14 nt, Human herpesvirus 5
ugccacguucuugc

SEQ ID NO: 2028925 - RNA, 17 nt, Human herpesvirus 5
gacgcagugcguggccg

SEQ ID NO: 2028926 - RNA, 22 nt, Human herpesvirus 5
gcugcuccucggagcacgggcg

SEQ ID NO: 2028927 - RNA, 18 nt, Human herpesvirus 5
gaccuuccuagcgacggc

SEQ ID NO: 2028928 - RNA, 15 nt, Human herpesvirus 5
cgguuuccgaacacc

SEQ ID NO: 2028929 - RNA, 19 nt, Human herpesvirus 5
cugcgucgucaaggacggc

SEQ ID NO: 2028930 - RNA, 19 nt, Human herpesvirus 5
gcuguuuuuguucacaacu

SEQ ID NO: 2028931 - RNA, 17 nt, Human herpesvirus 5
ggcgcgcgucuggacgc

SEQ ID NO: 2028932 - RNA, 12 nt, Human herpesvirus 5
cucccuucucug

SEQ ID NO: 2028933 - RNA, 12 nt, Human herpesvirus 5
aaguaugugcuc

SEQ ID NO: 2028934 - RNA, 15 nt, Human herpesvirus 5
cccucugcugcuggu

SEQ ID NO: 2028935 - RNA, 17 nt, Human herpesvirus 5
cccgguguuggccacca

SEQ ID NO: 2028936 - RNA, 13 nt, Human herpesvirus 5
ccucgucggaagc

SEQ ID NO: 2028937 - RNA, 14 nt, Human herpesvirus 5
ugaucgugggccag

SEQ ID NO: 2028938 - RNA, 15 nt, Human herpesvirus 5
cuagcauucugguga

SEQ ID NO: 2028939 - RNA, 21 nt, Human herpesvirus 5
gcaccacggccuuauguggcu

SEQ ID NO: 2028940 - RNA, 21 nt, Human herpesvirus 5
caccgccgcuauggcggccau

SEQ ID NO: 2028941 - RNA, 16 nt, Human herpesvirus 5
uucggccggcugcugc

SEQ ID NO: 2028942 - RNA, 17 nt, Human herpesvirus 5
aggaggugaccuggcug

SEQ ID NO: 2028943 - RNA, 24 nt, Human herpesvirus 5
cugcacaccuauggcgccgugggu

SEQ ID NO: 2028944 - RNA, 15 nt, Human herpesvirus 5
aucuccgucucuggu

SEQ ID NO: 2028945 - RNA, 15 nt, Human herpesvirus 5
ccgcagucuggcuug

SEQ ID NO: 2028946 - RNA, 18 nt, Human herpesvirus 5
cgcggaggugcuggcggc

SEQ ID NO: 2028947 - RNA, 17 nt, Human herpesvirus 5
ccucuaccccgccgccg

SEQ ID NO: 2028948 - RNA, 20 nt, Human herpesvirus 5
cgcgucggcgcccgggccgc

SEQ ID NO: 2028949 - RNA, 14 nt, Human herpesvirus 5
cuucacgccccuga

SEQ ID NO: 2028950 - RNA, 14 nt, Human herpesvirus 5
cacgggcugcuggu

SEQ ID NO: 2028951 - RNA, 17 nt, Human herpesvirus 5
cugaguuccgucagcac

SEQ ID NO: 2028952 - RNA, 17 nt, Human herpesvirus 5
ccucaaaaagcaggugg

SEQ ID NO: 2028953 - RNA, 22 nt, Human herpesvirus 5
ugcucaacuuuggcgugcccag

SEQ ID NO: 2028954 - RNA, 14 nt, Human herpesvirus 5
gaccugccgcuuga

SEQ ID NO: 2028955 - RNA, 18 nt, Human herpesvirus 5
agcacguacaaauagcag

SEQ ID NO: 2028956 - RNA, 15 nt, Human herpesvirus 5
gccgcaacagcggcg

SEQ ID NO: 2028957 - RNA, 16 nt, Human herpesvirus 5
ccgccgacucgcugcc

SEQ ID NO: 2028958 - RNA, 20 nt, Human herpesvirus 5
gcaccggcgccugcugcucg

SEQ ID NO: 2028959 - RNA, 13 nt, Human herpesvirus 5
uccccucugcugc

SEQ ID NO: 2028960 - RNA, 22 nt, Human herpesvirus 5
gcugucccuuaucccguuacaa

SEQ ID NO: 2028961 - RNA, 15 nt, Human herpesvirus 5
ggcgccgucagagca

SEQ ID NO: 2028962 - RNA, 21 nt, Human herpesvirus 5
cgggaugcacagcgucuggcc

SEQ ID NO: 2028963 - RNA, 17 nt, Human herpesvirus 5
cuacugaucgccuggag

SEQ ID NO: 2028964 - RNA, 20 nt, Human herpesvirus 5
cacugggagacggccuggau

SEQ ID NO: 2028965 - RNA, 15 nt, Human herpesvirus 5
gccgccgcucagguc

SEQ ID NO: 2028966 - RNA, 15 nt, Human herpesvirus 5
gccgcagcugcugga

SEQ ID NO: 2028967 - RNA, 23 nt, Human herpesvirus 5
auguauccuggggaaaaaaauac

SEQ ID NO: 2028968 - RNA, 22 nt, Human herpesvirus 5
uuccaagccgcagcgcggaaac

SEQ ID NO: 2028969 - RNA, 16 nt, Human herpesvirus 5
uccgccuccacuuccg

SEQ ID NO: 2028970 - RNA, 16 nt, Human herpesvirus 5
ccaccuggacgggggg

SEQ ID NO: 2028971 - RNA, 18 nt, Human herpesvirus 5
gggcucguguggcagcug

SEQ ID NO: 2028972 - RNA, 21 nt, Human herpesvirus 5
aucaugcugggcgacacucag

SEQ ID NO: 2028973 - RNA, 14 nt, Human herpesvirus 5
agcgggcugucaca

SEQ ID NO: 2028974 - RNA, 21 nt, Human herpesvirus 5
ggcguagucggcuaacaaagc

SEQ ID NO: 2028975 - RNA, 21 nt, Human herpesvirus 5
uacuagggaaaacauaagaau

SEQ ID NO: 2028976 - RNA, 23 nt, Human herpesvirus 5
cacgucaccgugccccacucgcu

SEQ ID NO: 2028977 - RNA, 13 nt, Human herpesvirus 5
uggggcuucgccu

SEQ ID NO: 2028978 - RNA, 18 nt, Human herpesvirus 5
aucgcagccacgcgcugg

SEQ ID NO: 2028979 - RNA, 15 nt, Human herpesvirus 5
cgcuuucccaccgcg

SEQ ID NO: 2028980 - RNA, 10 nt, Human herpesvirus 5
guaccugcau

SEQ ID NO: 2028981 - RNA, 16 nt, Human herpesvirus 5
gugcaggccgcgcagg

SEQ ID NO: 2028982 - RNA, 17 nt, Human herpesvirus 5
uuguaaucauccuaauu

SEQ ID NO: 2028983 - RNA, 18 nt, Human herpesvirus 5
gcugcuauaagaaggcca

SEQ ID NO: 2028984 - RNA, 14 nt, Human herpesvirus 5
guuccacggccagc

SEQ ID NO: 2028985 - RNA, 20 nt, Human herpesvirus 5
cgcguagccuccuccaccac

SEQ ID NO: 2028986 - RNA, 14 nt, Human herpesvirus 5
gccgcgcaggccgc

SEQ ID NO: 2028987 - RNA, 22 nt, Human herpesvirus 5
caagagcaugcugugggcccac

SEQ ID NO: 2028988 - RNA, 22 nt, Human herpesvirus 5
cgcguggugaucgugggccagg

SEQ ID NO: 2028989 - RNA, 21 nt, Human herpesvirus 5
uccgcgucggucgccgccucc

SEQ ID NO: 2028990 - RNA, 16 nt, Human herpesvirus 5
cuccgugcggccccca

SEQ ID NO: 2028991 - RNA, 20 nt, Human herpesvirus 5
caagucgccgacgaagaaga

SEQ ID NO: 2028992 - RNA, 15 nt, Human herpesvirus 5
ucacccgccucaugg

SEQ ID NO: 2028993 - RNA, 19 nt, Human herpesvirus 5
gccgccaucaucauguggg

SEQ ID NO: 2028994 - RNA, 18 nt, Human herpesvirus 5
cuguggcuucucuggaga

SEQ ID NO: 2028995 - RNA, 16 nt, Human herpesvirus 5
ugauauuuuacaggua

SEQ ID NO: 2028996 - RNA, 19 nt, Human herpesvirus 5
gauacuaguaaaaaaagug

SEQ ID NO: 2028997 - RNA, 22 nt, Human herpesvirus 5
acggugccauggaccugaccug

SEQ ID NO: 2028998 - RNA, 18 nt, Human herpesvirus 5
gccacuuuucuccccgcu

SEQ ID NO: 2028999 - RNA, 15 nt, Human herpesvirus 5
ugcucucccgcaugg

SEQ ID NO: 2029000 - RNA, 13 nt, Human herpesvirus 5
acauggacucuug

SEQ ID NO: 2029001 - RNA, 20 nt, Human herpesvirus 5
gguggacuuccaggugcgca

SEQ ID NO: 2029002 - RNA, 16 nt, Human herpesvirus 5
acgcuuuuaugaaggu

SEQ ID NO: 2029003 - RNA, 14 nt, Human herpesvirus 5
ugucuucuccgggu

SEQ ID NO: 2029004 - RNA, 14 nt, Human herpesvirus 5
cugccaccagggcg

SEQ ID NO: 2029005 - RNA, 12 nt, Human herpesvirus 5
ugugauugacgu

SEQ ID NO: 2029006 - RNA, 12 nt, Human herpesvirus 5
caguacuuuggg

SEQ ID NO: 2029007 - RNA, 17 nt, Human herpesvirus 5
ucagaaagcugcaauca

SEQ ID NO: 2029008 - RNA, 12 nt, Human herpesvirus 5
gccggcugcugc

SEQ ID NO: 2029009 - RNA, 19 nt, Human herpesvirus 5
ccgggcggcuuccugcggc

SEQ ID NO: 2029010 - RNA, 16 nt, Human herpesvirus 5
ccagcuacagccacga

SEQ ID NO: 2029011 - RNA, 14 nt, Human herpesvirus 5
ggaugggggggacc

SEQ ID NO: 2029012 - RNA, 12 nt, Human herpesvirus 5
agcggugcugau

SEQ ID NO: 2029013 - RNA, 20 nt, Human herpesvirus 5
uuacagcuuuuuaauaaaaa

SEQ ID NO: 2029014 - RNA, 17 nt, Human herpesvirus 5
ggacgcgccacgcucgc

SEQ ID NO: 2029015 - RNA, 19 nt, Human herpesvirus 5
acacuaaauuguuauugcc

SEQ ID NO: 2029016 - RNA, 19 nt, Human herpesvirus 5
ucugcagccggugcgcgac

SEQ ID NO: 2029017 - RNA, 22 nt, Human herpesvirus 5
ucgucugcauguucaucacgua

SEQ ID NO: 2029018 - RNA, 21 nt, Human herpesvirus 5
auggaaauacaugaugaaugu

SEQ ID NO: 2029019 - RNA, 14 nt, Human herpesvirus 5
cagcagcaccaggc

SEQ ID NO: 2029020 - RNA, 19 nt, Human herpesvirus 5
aguacaauacaaaaagcuc

SEQ ID NO: 2029021 - RNA, 23 nt, Human herpesvirus 5
gccccgauaaucggcucucaggc

SEQ ID NO: 2029022 - RNA, 14 nt, Human herpesvirus 5
gccuucggccagcg

SEQ ID NO: 2029023 - RNA, 13 nt, Human herpesvirus 5
gugcagcugguga

SEQ ID NO: 2029024 - RNA, 15 nt, Human herpesvirus 5
ggccgacggcagcgu

SEQ ID NO: 2029025 - RNA, 12 nt, Human herpesvirus 5
agacacuugaau

SEQ ID NO: 2029026 - RNA, 16 nt, Human herpesvirus 5
uccaucgcagccacgc

SEQ ID NO: 2029027 - RNA, 16 nt, Human herpesvirus 5
ggaccgacacggagga

SEQ ID NO: 2029028 - RNA, 15 nt, Human herpesvirus 5
cgugcucgcgcacgu

SEQ ID NO: 2029029 - RNA, 12 nt, Human herpesvirus 5
uacuuuaccuag

SEQ ID NO: 2029030 - RNA, 14 nt, Human herpesvirus 5
ggagcucacccggc

SEQ ID NO: 2029031 - RNA, 12 nt, Human herpesvirus 5
acggagugguga

SEQ ID NO: 2029032 - RNA, 15 nt, Human herpesvirus 5
gaucacguuguccuu

SEQ ID NO: 2029033 - RNA, 15 nt, Human herpesvirus 5
acaccgucagcugcg

SEQ ID NO: 2029034 - RNA, 21 nt, Human herpesvirus 5
augaagccaagcguauccugg

SEQ ID NO: 2029035 - RNA, 20 nt, Human herpesvirus 5
aagugcucgacuuuacggug

SEQ ID NO: 2029036 - RNA, 16 nt, Human herpesvirus 5
guagugagcuuugacg

SEQ ID NO: 2029037 - RNA, 19 nt, Human herpesvirus 5
guggcgccccggcuucauu

SEQ ID NO: 2029038 - RNA, 18 nt, Human herpesvirus 5
cagcgaguugcugugcac

SEQ ID NO: 2029039 - RNA, 15 nt, Human herpesvirus 5
cuacggaccgcagca

SEQ ID NO: 2029040 - RNA, 13 nt, Human herpesvirus 5
cauccaauuacac

SEQ ID NO: 2029041 - RNA, 22 nt, Human herpesvirus 5
gucugcgucaagacgggccugg

SEQ ID NO: 2029042 - RNA, 15 nt, Human herpesvirus 5
cgccgugggcggcga

SEQ ID NO: 2029043 - RNA, 13 nt, Human herpesvirus 5
gccgugguggccg

SEQ ID NO: 2029044 - RNA, 22 nt, Human herpesvirus 5
cgccgccacccgcaccagacuu

SEQ ID NO: 2029045 - RNA, 21 nt, Human herpesvirus 5
cauguuucugguuuuuggacu

SEQ ID NO: 2029046 - RNA, 11 nt, Human herpesvirus 5
cacagaagaaa

SEQ ID NO: 2029047 - RNA, 15 nt, Human herpesvirus 5
ccgcagguuagcggc

SEQ ID NO: 2029048 - RNA, 22 nt, Human herpesvirus 5
cagagggucguuguccuccucg

SEQ ID NO: 2029049 - RNA, 13 nt, Human herpesvirus 5
guccagcuucugg

SEQ ID NO: 2029050 - RNA, 18 nt, Human herpesvirus 5
cuugcgcuucugcagcuc

SEQ ID NO: 2029051 - RNA, 23 nt, Human herpesvirus 5
uauccgaguccaccucugcuacu

SEQ ID NO: 2029052 - RNA, 21 nt, Human herpesvirus 5
ucauauacgguacacgucccc

SEQ ID NO: 2029053 - RNA, 23 nt, Human herpesvirus 5
aucauguuccuacacgccuugca

SEQ ID NO: 2029054 - RNA, 16 nt, Human herpesvirus 5
gaagaugccgaugugu

SEQ ID NO: 2029055 - RNA, 21 nt, Human herpesvirus 5
gggcuucccuccugcagcugc

SEQ ID NO: 2029056 - RNA, 15 nt, Human herpesvirus 5
uuuggcgugcccagc

SEQ ID NO: 2029057 - RNA, 15 nt, Human herpesvirus 5
gaggacagcaaggcc

SEQ ID NO: 2029058 - RNA, 23 nt, Human herpesvirus 5
gcuggcggccguggccuguggcc

SEQ ID NO: 2029059 - RNA, 17 nt, Human herpesvirus 5
uagcacgucagugguga

SEQ ID NO: 2029060 - RNA, 16 nt, Human herpesvirus 5
agcgccaggcggcuga

SEQ ID NO: 2029061 - RNA, 21 nt, Human herpesvirus 5
ggcucccagagcugcuaggaa

SEQ ID NO: 2029062 - RNA, 20 nt, Human herpesvirus 5
ccgagucgugucgcugcguc

SEQ ID NO: 2029063 - RNA, 18 nt, Human herpesvirus 5
cacaucugucaccucaca

SEQ ID NO: 2029064 - RNA, 15 nt, Human herpesvirus 5
cuggcggccgccggc

SEQ ID NO: 2029065 - RNA, 17 nt, Human herpesvirus 5
ugggagaugcggggugg

SEQ ID NO: 2029066 - RNA, 16 nt, Human herpesvirus 5
caccacccgacugcag

SEQ ID NO: 2029067 - RNA, 16 nt, Human herpesvirus 5
ccggugccgaugagau

SEQ ID NO: 2029068 - RNA, 21 nt, Human herpesvirus 5
auuauuaaggcgcuaacgccu

SEQ ID NO: 2029069 - RNA, 17 nt, Human herpesvirus 5
gaaggguguugugcgug

SEQ ID NO: 2029070 - RNA, 13 nt, Human herpesvirus 5
ccucuaccccgcc

SEQ ID NO: 2029071 - RNA, 16 nt, Human herpesvirus 5
cgccgaggcuacugcu

SEQ ID NO: 2029072 - RNA, 13 nt, Human herpesvirus 5
ugacguacauaua

SEQ ID NO: 2029073 - RNA, 18 nt, Human herpesvirus 5
guagacgaaagacaauga

SEQ ID NO: 2029074 - RNA, 22 nt, Human herpesvirus 5
gacgagcggcggccgaccccgc

SEQ ID NO: 2029075 - RNA, 15 nt, Human herpesvirus 5
ccgcgccgccuggag

SEQ ID NO: 2029076 - RNA, 16 nt, Human herpesvirus 5
gcuacgucgacaugaa

SEQ ID NO: 2029077 - RNA, 16 nt, Human herpesvirus 5
caacuguuguuaguuu

SEQ ID NO: 2029078 - RNA, 19 nt, Human herpesvirus 5
cggcgcugacagcccaagg

SEQ ID NO: 2029079 - RNA, 21 nt, Human herpesvirus 5
gucgccgcgucagcggccgcc

SEQ ID NO: 2029080 - RNA, 14 nt, Human herpesvirus 5
aaucgacaggaggc

SEQ ID NO: 2029081 - RNA, 20 nt, Human herpesvirus 5
auagauuagcagaaggaaua

SEQ ID NO: 2029082 - RNA, 23 nt, Human herpesvirus 5
acagucgcagcccccguggccgc

SEQ ID NO: 2029083 - RNA, 21 nt, Human herpesvirus 5
ucugcgccuuuugcuggcugg

SEQ ID NO: 2029084 - RNA, 16 nt, Human herpesvirus 5
uugaugguguaggaga

SEQ ID NO: 2029085 - RNA, 24 nt, Human herpesvirus 5
gcggcgguagaaacgucgcagcca

SEQ ID NO: 2029086 - RNA, 16 nt, Human herpesvirus 5
cuugcgcucggucagc

SEQ ID NO: 2029087 - RNA, 15 nt, Human herpesvirus 5
cuugagcgacagcag

SEQ ID NO: 2029088 - RNA, 23 nt, Human herpesvirus 5
ccuggacacucuggcccugcugu

SEQ ID NO: 2029089 - RNA, 21 nt, Human herpesvirus 5
cgcgguccuagcacgucagug

SEQ ID NO: 2029090 - RNA, 18 nt, Human herpesvirus 5
uggaaggcguggaugagg

SEQ ID NO: 2029091 - RNA, 17 nt, Human herpesvirus 5
gacuugcacgcuguccg

SEQ ID NO: 2029092 - RNA, 12 nt, Human herpesvirus 5
cucgcugggcua

SEQ ID NO: 2029093 - RNA, 18 nt, Human herpesvirus 5
gacgcgguaaggagcaaa

SEQ ID NO: 2029094 - RNA, 16 nt, Human herpesvirus 5
ccgcaaugggcuuccc

SEQ ID NO: 2029095 - RNA, 21 nt, Human herpesvirus 5
ucccaccgcgacccagcgaca

SEQ ID NO: 2029096 - RNA, 12 nt, Human herpesvirus 5
accgcgggccgc

SEQ ID NO: 2029097 - RNA, 14 nt, Human herpesvirus 5
gugacguggauacu

SEQ ID NO: 2029098 - RNA, 13 nt, Human herpesvirus 5
ccagcggccuggc

SEQ ID NO: 2029099 - RNA, 17 nt, Human herpesvirus 5
cgcagucagacccacua

SEQ ID NO: 2029100 - RNA, 17 nt, Human herpesvirus 5
aaggcgcgggugguguu

SEQ ID NO: 2029101 - RNA, 15 nt, Human herpesvirus 5
aacaugcccagcauc

SEQ ID NO: 2029102 - RNA, 18 nt, Human herpesvirus 5
cagacaggcggccagcuu

SEQ ID NO: 2029103 - RNA, 16 nt, Human herpesvirus 5
ccgggacggccugggc

SEQ ID NO: 2029104 - RNA, 16 nt, Human herpesvirus 5
ugcgucaagacgggcc

SEQ ID NO: 2029105 - RNA, 14 nt, Human herpesvirus 5
ccggcuugaccgcg

SEQ ID NO: 2029106 - RNA, 19 nt, Human herpesvirus 5
caucucgcguaacgugucu

SEQ ID NO: 2029107 - RNA, 21 nt, Human herpesvirus 5
gcuuuccaagcugucguggug

SEQ ID NO: 2029108 - RNA, 20 nt, Human herpesvirus 5
gccgcuuucucaucucagcc

SEQ ID NO: 2029109 - RNA, 19 nt, Human herpesvirus 5
gccgaugugaguuucugug

SEQ ID NO: 2029110 - RNA, 14 nt, Human herpesvirus 5
gacugacacagcuc

SEQ ID NO: 2029111 - RNA, 20 nt, Human herpesvirus 5
gguucacacgucguuagcca

SEQ ID NO: 2029112 - RNA, 13 nt, Human herpesvirus 5
gcaacacuaaauu

SEQ ID NO: 2029113 - RNA, 22 nt, Human herpesvirus 5
agcggggguguauagaccccaa

SEQ ID NO: 2029114 - RNA, 15 nt, Human herpesvirus 5
uggaaguaacaucau

SEQ ID NO: 2029115 - RNA, 14 nt, Human herpesvirus 5
ggcuugaccgcguu

SEQ ID NO: 2029116 - RNA, 20 nt, Human herpesvirus 5
ggcugccgccgcuguggcug

SEQ ID NO: 2029117 - RNA, 23 nt, Human herpesvirus 5
caacguggaaggcggcucgcugg

SEQ ID NO: 2029118 - RNA, 15 nt, Human herpesvirus 5
cgagugggccagccc

SEQ ID NO: 2029119 - RNA, 15 nt, Human herpesvirus 5
gcgaggcggcaacug

SEQ ID NO: 2029120 - RNA, 21 nt, Human herpesvirus 5
aagccuccggaacccucuggc

SEQ ID NO: 2029121 - RNA, 15 nt, Human herpesvirus 5
aggcaggcgaugcgc

SEQ ID NO: 2029122 - RNA, 23 nt, Human herpesvirus 5
uggagucgcgguucggccggacc

SEQ ID NO: 2029123 - RNA, 13 nt, Human herpesvirus 5
gccgcagcugcug

SEQ ID NO: 2029124 - RNA, 14 nt, Human herpesvirus 5
uugacccagggcug

SEQ ID NO: 2029125 - RNA, 19 nt, Human herpesvirus 5
gugccgaugagauaaaagu

SEQ ID NO: 2029126 - RNA, 21 nt, Human herpesvirus 5
agccccaucauggcccaagga

SEQ ID NO: 2029127 - RNA, 20 nt, Human herpesvirus 5
gacggugaugaugcugcuga

SEQ ID NO: 2029128 - RNA, 15 nt, Human herpesvirus 5
cggucgcgacgguga

SEQ ID NO: 2029129 - RNA, 16 nt, Human herpesvirus 5
cucuggcgaucugccu

SEQ ID NO: 2029130 - RNA, 19 nt, Human herpesvirus 5
gcuucggccggcugcugca

SEQ ID NO: 2029131 - RNA, 22 nt, Human herpesvirus 5
cguuguucgucucugccucucc

SEQ ID NO: 2029132 - RNA, 15 nt, Human herpesvirus 5
uccacguagguuucu

SEQ ID NO: 2029133 - RNA, 12 nt, Human herpesvirus 5
accgugucuccg

SEQ ID NO: 2029134 - RNA, 15 nt, Human herpesvirus 5
acuugaguacuuuca

SEQ ID NO: 2029135 - RNA, 17 nt, Human herpesvirus 5
accuucccucuccaccc

SEQ ID NO: 2029136 - RNA, 15 nt, Human herpesvirus 5
caguauuuuugugcu

SEQ ID NO: 2029137 - RNA, 10 nt, Human herpesvirus 5
ggguggaaac

SEQ ID NO: 2029138 - RNA, 22 nt, Human herpesvirus 5
gcgacaagcuguggcugcacac

SEQ ID NO: 2029139 - RNA, 15 nt, Human herpesvirus 5
ggccgaccgccgccg

SEQ ID NO: 2029140 - RNA, 13 nt, Human herpesvirus 5
gacagcgugccgg

SEQ ID NO: 2029141 - RNA, 23 nt, Human herpesvirus 5
caucaucagcgccgugcucagcg

SEQ ID NO: 2029142 - RNA, 15 nt, Human herpesvirus 5
agggcgcgggcggcc

SEQ ID NO: 2029143 - RNA, 24 nt, Human herpesvirus 5
ggcgaccgucuggagguggccugc

SEQ ID NO: 2029144 - RNA, 17 nt, Human herpesvirus 5
augucuuacaaaucaca

SEQ ID NO: 2029145 - RNA, 22 nt, Human herpesvirus 5
cguggacgacuggcucaacuuu

SEQ ID NO: 2029146 - RNA, 13 nt, Human herpesvirus 5
cugcauguuggug

SEQ ID NO: 2029147 - RNA, 19 nt, Human herpesvirus 5
caguagacagacaggacac

SEQ ID NO: 2029148 - RNA, 15 nt, Human herpesvirus 5
acauggagacaguuu

SEQ ID NO: 2029149 - RNA, 14 nt, Human herpesvirus 5
cugggcgcccccac

SEQ ID NO: 2029150 - RNA, 14 nt, Human herpesvirus 5
ucacgccagacuug

SEQ ID NO: 2029151 - RNA, 17 nt, Human herpesvirus 5
cuauguaaauguuuuua

SEQ ID NO: 2029152 - RNA, 20 nt, Human herpesvirus 5
cuucuuugccggcucuccuc

SEQ ID NO: 2029153 - RNA, 13 nt, Human herpesvirus 5
aaccuacgugcaa

SEQ ID NO: 2029154 - RNA, 19 nt, Human herpesvirus 5
cugacgcuguacaaucuca

SEQ ID NO: 2029155 - RNA, 13 nt, Human herpesvirus 5
ugggauugacgcg

SEQ ID NO: 2029156 - RNA, 19 nt, Human herpesvirus 5
uacuauagggaggacgaac

SEQ ID NO: 2029157 - RNA, 14 nt, Human herpesvirus 5
cauauagccaauaa

SEQ ID NO: 2029158 - RNA, 21 nt, Human herpesvirus 5
cgcauaagaacggagugguga

SEQ ID NO: 2029159 - RNA, 19 nt, Human herpesvirus 5
guguccgcucaacuuucua

SEQ ID NO: 2029160 - RNA, 13 nt, Human herpesvirus 5
cugaaaacaccau

SEQ ID NO: 2029161 - RNA, 22 nt, Human herpesvirus 5
gaccaccguuaccaguaccacc

SEQ ID NO: 2029162 - RNA, 19 nt, Human herpesvirus 5
gggccgcgcuccaggcgga

SEQ ID NO: 2029163 - RNA, 16 nt, Human herpesvirus 5
ugacccagggcugcuc

SEQ ID NO: 2029164 - RNA, 14 nt, Human herpesvirus 5
caugucgcgacaga

SEQ ID NO: 2029165 - RNA, 14 nt, Human herpesvirus 5
ucgcagccuccucg

SEQ ID NO: 2029166 - RNA, 17 nt, Human herpesvirus 5
cucaccgugcucgugcc

SEQ ID NO: 2029167 - RNA, 15 nt, Human herpesvirus 5
auguugacuaccuug

SEQ ID NO: 2029168 - RNA, 22 nt, Human herpesvirus 5
uuguacccucacggucugcuug

SEQ ID NO: 2029169 - RNA, 15 nt, Human herpesvirus 5
cauuuucuuucuagu

SEQ ID NO: 2029170 - RNA, 14 nt, Human herpesvirus 5
agcaugaacugcca

SEQ ID NO: 2029171 - RNA, 18 nt, Human herpesvirus 5
cagcgugacgcggugcag

SEQ ID NO: 2029172 - RNA, 20 nt, Human herpesvirus 5
gacgccaugcucaagacaga

SEQ ID NO: 2029173 - RNA, 14 nt, Human herpesvirus 5
cgaucuccucccgg

SEQ ID NO: 2029174 - RNA, 15 nt, Human herpesvirus 5
agagccaaaggugac

SEQ ID NO: 2029175 - RNA, 20 nt, Human herpesvirus 5
aggucagcgugucugauacc

SEQ ID NO: 2029176 - RNA, 20 nt, Human herpesvirus 5
cgccuuuugaucgccaccgc

SEQ ID NO: 2029177 - RNA, 14 nt, Human herpesvirus 5
ccgccgcagccacg

SEQ ID NO: 2029178 - RNA, 20 nt, Human herpesvirus 5
uaaucugucguacuguccuu

SEQ ID NO: 2029179 - RNA, 13 nt, Human herpesvirus 5
agagcgguccgcc

SEQ ID NO: 2029180 - RNA, 13 nt, Human herpesvirus 5
cagauguaaauaa

SEQ ID NO: 2029181 - RNA, 21 nt, Human herpesvirus 5
ggucccggauaauuguccuuc

SEQ ID NO: 2029182 - RNA, 19 nt, Human herpesvirus 5
caggcucgucgugggcuac

SEQ ID NO: 2029183 - RNA, 20 nt, Human herpesvirus 5
acacuaaauuguuauugcca

SEQ ID NO: 2029184 - RNA, 18 nt, Human herpesvirus 5
cggcugacgcggacgagg

SEQ ID NO: 2029185 - RNA, 22 nt, Human herpesvirus 5
uuaugaggagcgcgcacaaagg

SEQ ID NO: 2029186 - RNA, 16 nt, Human herpesvirus 5
gccaccaggugccggc

SEQ ID NO: 2029187 - RNA, 20 nt, Human herpesvirus 5
acaguauagcaugcauaaga

SEQ ID NO: 2029188 - RNA, 14 nt, Human herpesvirus 5
ucaccgaugccggc

SEQ ID NO: 2029189 - RNA, 14 nt, Human herpesvirus 5
agcgugcaccugcu

SEQ ID NO: 2029190 - RNA, 14 nt, Human herpesvirus 5
ccaccucugcuacu

SEQ ID NO: 2029191 - RNA, 18 nt, Human herpesvirus 5
gccgggacucuggugcua

SEQ ID NO: 2029192 - RNA, 14 nt, Human herpesvirus 5
ggcggccgcagaag

SEQ ID NO: 2029193 - RNA, 16 nt, Human herpesvirus 5
gcuccgcaagcgccgc

SEQ ID NO: 2029194 - RNA, 13 nt, Human herpesvirus 5
cgcugccgcagcu

SEQ ID NO: 2029195 - RNA, 15 nt, Human herpesvirus 5
cagaacccgacgcgg

SEQ ID NO: 2029196 - RNA, 18 nt, Human herpesvirus 5
auguggcuccgccggcac

SEQ ID NO: 2029197 - RNA, 20 nt, Human herpesvirus 5
gaguggggcaacugcugccu

SEQ ID NO: 2029198 - RNA, 20 nt, Human herpesvirus 5
gucuccaccaaucaagccug

SEQ ID NO: 2029199 - RNA, 18 nt, Human herpesvirus 5
ccccgugacgugcaagac

SEQ ID NO: 2029200 - RNA, 19 nt, Human herpesvirus 5
ucuaggcuacucugacugu

SEQ ID NO: 2029201 - RNA, 14 nt, Human herpesvirus 5
ccaacuucacuuca

SEQ ID NO: 2029202 - RNA, 12 nt, Human herpesvirus 5
gggcguuguuga

SEQ ID NO: 2029203 - RNA, 23 nt, Human herpesvirus 5
acgucguuagccagcgucggcau

SEQ ID NO: 2029204 - RNA, 16 nt, Human herpesvirus 5
ucgccaagaugcugcg

SEQ ID NO: 2029205 - RNA, 13 nt, Human herpesvirus 5
uuuggauguaugu

SEQ ID NO: 2029206 - RNA, 13 nt, Human herpesvirus 5
agccuggggcacc

SEQ ID NO: 2029207 - RNA, 16 nt, Human herpesvirus 5
caguauuccccgcugu

SEQ ID NO: 2029208 - RNA, 14 nt, Human herpesvirus 5
cuguuccugcugcu

SEQ ID NO: 2029209 - RNA, 18 nt, Human herpesvirus 5
ccaagagcaugcuguggg

SEQ ID NO: 2029210 - RNA, 16 nt, Human herpesvirus 5
cgaggacaaggcuccg

SEQ ID NO: 2029211 - RNA, 15 nt, Human herpesvirus 5
ccuauccgcgcggcu

SEQ ID NO: 2029212 - RNA, 21 nt, Human herpesvirus 5
ucauauagccuccggcuguca

SEQ ID NO: 2029213 - RNA, 15 nt, Human herpesvirus 5
ggccugcgggcaggc

SEQ ID NO: 2029214 - RNA, 23 nt, Human herpesvirus 5
caguacggccucugggcugagac

SEQ ID NO: 2029215 - RNA, 23 nt, Human herpesvirus 5
ggccaacagccuguggcaccgcc

SEQ ID NO: 2029216 - RNA, 19 nt, Human herpesvirus 5
caaagaaaagaaaaaaugg

SEQ ID NO: 2029217 - RNA, 15 nt, Human herpesvirus 5
uaccaucuggcgcag

SEQ ID NO: 2029218 - RNA, 16 nt, Human herpesvirus 5
gaugaacgcucucguc

SEQ ID NO: 2029219 - RNA, 17 nt, Human herpesvirus 5
ugagcaacagucggcag

SEQ ID NO: 2029220 - RNA, 16 nt, Human herpesvirus 5
ugggcaccgucuguuc

SEQ ID NO: 2029221 - RNA, 14 nt, Human herpesvirus 5
aaaauaauagauua

SEQ ID NO: 2029222 - RNA, 13 nt, Human herpesvirus 5
cacacaccgcuuu

SEQ ID NO: 2029223 - RNA, 17 nt, Human herpesvirus 5
cugaccugucagaaggc

SEQ ID NO: 2029224 - RNA, 17 nt, Human herpesvirus 5
gcggcucaaacaccgcu

SEQ ID NO: 2029225 - RNA, 22 nt, Human herpesvirus 5
cagucgacgggugguaccugca

SEQ ID NO: 2029226 - RNA, 18 nt, Human herpesvirus 5
cgucuaccggcgagggug

SEQ ID NO: 2029227 - RNA, 17 nt, Human herpesvirus 5
cagcugcaccacggccu

SEQ ID NO: 2029228 - RNA, 15 nt, Human herpesvirus 5
gccacccgccggagc

SEQ ID NO: 2029229 - RNA, 16 nt, Human herpesvirus 5
augaaaaacaucuuaa

SEQ ID NO: 2029230 - RNA, 16 nt, Human herpesvirus 5
gguaccgucuccacca

SEQ ID NO: 2029231 - RNA, 14 nt, Human herpesvirus 5
ucaacagcagcaac

SEQ ID NO: 2029232 - RNA, 14 nt, Human herpesvirus 5
ggcgcuucgagggc

SEQ ID NO: 2029233 - RNA, 18 nt, Human herpesvirus 5
uauagauagcggcacuuu

SEQ ID NO: 2029234 - RNA, 13 nt, Human herpesvirus 5
uauuucuagagca

SEQ ID NO: 2029235 - RNA, 17 nt, Human herpesvirus 5
guugaccguugugggga

SEQ ID NO: 2029236 - RNA, 17 nt, Human herpesvirus 5
uauccaauaaacccauc

SEQ ID NO: 2029237 - RNA, 21 nt, Human herpesvirus 5
cagcgccaccauagccacuac

SEQ ID NO: 2029238 - RNA, 13 nt, Human herpesvirus 5
gccucugggcuga

SEQ ID NO: 2029239 - RNA, 22 nt, Human herpesvirus 5
cggccgacggcagcgugcugug

SEQ ID NO: 2029240 - RNA, 16 nt, Human herpesvirus 5
ccgugcugggcugggu

SEQ ID NO: 2029241 - RNA, 17 nt, Human herpesvirus 5
ugccauggaccugaccu

SEQ ID NO: 2029242 - RNA, 15 nt, Human herpesvirus 5
gccaggugaccagca

SEQ ID NO: 2029243 - RNA, 21 nt, Human herpesvirus 5
acggccuuauguggcugcgcc

SEQ ID NO: 2029244 - RNA, 19 nt, Human herpesvirus 5
ggcucucaggcgcgcagac

SEQ ID NO: 2029245 - RNA, 15 nt, Human herpesvirus 5
auuugaagccaggcg

SEQ ID NO: 2029246 - RNA, 17 nt, Human herpesvirus 5
gcuggccagcaaagugg

SEQ ID NO: 2029247 - RNA, 13 nt, Human herpesvirus 5
gacuacaugcuau

SEQ ID NO: 2029248 - RNA, 17 nt, Human herpesvirus 5
gaugugaguuucugugu

SEQ ID NO: 2029249 - RNA, 22 nt, Human herpesvirus 5
cucggccuuucuaggcuacucc

SEQ ID NO: 2029250 - RNA, 17 nt, Human herpesvirus 5
ccucggguugccuggac

SEQ ID NO: 2029251 - RNA, 20 nt, Human herpesvirus 5
gccgugacacuuuggcucuu

SEQ ID NO: 2029252 - RNA, 21 nt, Human herpesvirus 5
caguauuucuagagcacugag

SEQ ID NO: 2029253 - RNA, 13 nt, Human herpesvirus 5
uucuggcgcuugg

SEQ ID NO: 2029254 - RNA, 13 nt, Human herpesvirus 5
gagcgccgacugg

SEQ ID NO: 2029255 - RNA, 18 nt, Human herpesvirus 5
cgcuacugaucgccugga

SEQ ID NO: 2029256 - RNA, 15 nt, Human herpesvirus 5
gaggcgcgcugcucc

SEQ ID NO: 2029257 - RNA, 12 nt, Human herpesvirus 5
auuuuauuggga

SEQ ID NO: 2029258 - RNA, 20 nt, Human herpesvirus 5
ggucgggcacucggcugugc

SEQ ID NO: 2029259 - RNA, 22 nt, Human herpesvirus 5
gcacgacaucuuccgcgagcac

SEQ ID NO: 2029260 - RNA, 23 nt, Human herpesvirus 5
gcaacagcagccaccgacacagc

SEQ ID NO: 2029261 - RNA, 16 nt, Human herpesvirus 5
ccacguccacccaucc

SEQ ID NO: 2029262 - RNA, 23 nt, Human herpesvirus 5
cgcgaaagcuucggccggcugcu

SEQ ID NO: 2029263 - RNA, 16 nt, Human herpesvirus 5
gccaccgccgccacca

SEQ ID NO: 2029264 - RNA, 18 nt, Human herpesvirus 5
uggcccuggucuggccca

SEQ ID NO: 2029265 - RNA, 14 nt, Human herpesvirus 5
aguuggcguugagc

SEQ ID NO: 2029266 - RNA, 21 nt, Human herpesvirus 5
gaggcacauacgggacuuaca

SEQ ID NO: 2029267 - RNA, 15 nt, Human herpesvirus 5
gcugcugcaccacag

SEQ ID NO: 2029268 - RNA, 15 nt, Human herpesvirus 5
gaacggagcaggaac

SEQ ID NO: 2029269 - RNA, 15 nt, Human herpesvirus 5
gugucgcugggcugg

SEQ ID NO: 2029270 - RNA, 16 nt, Human herpesvirus 5
uaacucacuguuugaa

SEQ ID NO: 2029271 - RNA, 22 nt, Human herpesvirus 5
uauucucaacacguaacgucuu

SEQ ID NO: 2029272 - RNA, 18 nt, Human herpesvirus 5
gccaccaugcaucccacc

SEQ ID NO: 2029273 - RNA, 13 nt, Human herpesvirus 5
cgucgaccuugag

SEQ ID NO: 2029274 - RNA, 19 nt, Human herpesvirus 5
gucugagcgccgacuggau

SEQ ID NO: 2029275 - RNA, 14 nt, Human herpesvirus 5
acgucaaccacccg

SEQ ID NO: 2029276 - RNA, 15 nt, Human herpesvirus 5
cgccuuccuccucug

SEQ ID NO: 2029277 - RNA, 17 nt, Human herpesvirus 5
ccuguuggcuuacugcc

SEQ ID NO: 2029278 - RNA, 14 nt, Human herpesvirus 5
ugaaguuguugauc

SEQ ID NO: 2029279 - RNA, 23 nt, Human herpesvirus 5
ggccaguacggccucugggcuga

SEQ ID NO: 2029280 - RNA, 20 nt, Human herpesvirus 5
ccaagccgcagcgcggaaac

SEQ ID NO: 2029281 - RNA, 16 nt, Human herpesvirus 5
accuagcuacuuugga

SEQ ID NO: 2029282 - RNA, 21 nt, Human herpesvirus 5
ccgucggcgucgcgucgcagg

SEQ ID NO: 2029283 - RNA, 22 nt, Human herpesvirus 5
uaaagcuuucuuucucagucug

SEQ ID NO: 2029284 - RNA, 16 nt, Human herpesvirus 5
ucgggcgugugguaga

SEQ ID NO: 2029285 - RNA, 17 nt, Human herpesvirus 5
ggccaguacggccucug

SEQ ID NO: 2029286 - RNA, 17 nt, Human herpesvirus 5
acggggcgucggagagu

SEQ ID NO: 2029287 - RNA, 22 nt, Human herpesvirus 5
agggcucuucacggucgggcac

SEQ ID NO: 2029288 - RNA, 17 nt, Human herpesvirus 5
cagcaacagcagccacc

SEQ ID NO: 2029289 - RNA, 15 nt, Human herpesvirus 5
uggggccgucugcac

SEQ ID NO: 2029290 - RNA, 21 nt, Human herpesvirus 5
auaaaggguggcgagguguga

SEQ ID NO: 2029291 - RNA, 14 nt, Human herpesvirus 5
gccgggacucuggu

SEQ ID NO: 2029292 - RNA, 20 nt, Human herpesvirus 5
cuaaccacuaccgcaacagc

SEQ ID NO: 2029293 - RNA, 15 nt, Human herpesvirus 5
aucaauacaaugaca

SEQ ID NO: 2029294 - RNA, 11 nt, Human herpesvirus 5
acggaggagac

SEQ ID NO: 2029295 - RNA, 15 nt, Human herpesvirus 5
ucggcgccccacagc

SEQ ID NO: 2029296 - RNA, 15 nt, Human herpesvirus 5
ggccacgagccagac

SEQ ID NO: 2029297 - RNA, 18 nt, Human herpesvirus 5
aacauggcucccagagcu

SEQ ID NO: 2029298 - RNA, 14 nt, Human herpesvirus 5
cugaaucugcucca

SEQ ID NO: 2029299 - RNA, 13 nt, Human herpesvirus 5
caguggcaggccc

SEQ ID NO: 2029300 - RNA, 21 nt, Human herpesvirus 5
ccacgcuauacauagcccgcu

SEQ ID NO: 2029301 - RNA, 21 nt, Human herpesvirus 5
ucuaaugugcuguuugaaaca

SEQ ID NO: 2029302 - RNA, 19 nt, Human herpesvirus 5
gaauuguuaccagaacucu

SEQ ID NO: 2029303 - RNA, 14 nt, Human herpesvirus 5
accuaccugggcug

SEQ ID NO: 2029304 - RNA, 16 nt, Human herpesvirus 5
ugccaguugcuguugc

SEQ ID NO: 2029305 - RNA, 22 nt, Human herpesvirus 5
caacagccuguggcaccgccuc

SEQ ID NO: 2029306 - RNA, 23 nt, Human herpesvirus 5
gcucacguagcaggccgacucgc

SEQ ID NO: 2029307 - RNA, 23 nt, Human herpesvirus 5
auggaaaugcccgccaccaugca

SEQ ID NO: 2029308 - RNA, 18 nt, Human herpesvirus 5
gcaggaaugcggcacccg

SEQ ID NO: 2029309 - RNA, 19 nt, Human herpesvirus 5
gucuuggguagcuucucuc

SEQ ID NO: 2029310 - RNA, 14 nt, Human herpesvirus 5
ccgaacagcagcuc

SEQ ID NO: 2029311 - RNA, 13 nt, Human herpesvirus 5
gcuuuagccaggu

SEQ ID NO: 2029312 - RNA, 11 nt, Human herpesvirus 5
ugcgcgcggcg

SEQ ID NO: 2029313 - RNA, 22 nt, Human herpesvirus 5
aagcugcugguggugacccagg

SEQ ID NO: 2029314 - RNA, 14 nt, Human herpesvirus 5
cuguuugucugugc

SEQ ID NO: 2029315 - RNA, 18 nt, Human herpesvirus 5
uaccgucgccaccaccgg

SEQ ID NO: 2029316 - RNA, 11 nt, Human herpesvirus 5
gccaugccuuc

SEQ ID NO: 2029317 - RNA, 19 nt, Human herpesvirus 5
gggagugguggcggcagcc

SEQ ID NO: 2029318 - RNA, 20 nt, Human herpesvirus 5
cgggcggcuuccugcggccg

SEQ ID NO: 2029319 - RNA, 23 nt, Human herpesvirus 5
cugcuagaugaccauguucagcu

SEQ ID NO: 2029320 - RNA, 15 nt, Human herpesvirus 5
cuacgaugcgagcca

SEQ ID NO: 2029321 - RNA, 23 nt, Human herpesvirus 5
gcugccggucuacagacugggcg

SEQ ID NO: 2029322 - RNA, 22 nt, Human herpesvirus 5
gcggucaugaguuggugcagcu

SEQ ID NO: 2029323 - RNA, 22 nt, Human herpesvirus 5
cauucgauacgcugcuuuuggc

SEQ ID NO: 2029324 - RNA, 18 nt, Human herpesvirus 5
gcugcuguugcacgggcu

SEQ ID NO: 2029325 - RNA, 20 nt, Human herpesvirus 5
ccaccguaccugcaucacgg

SEQ ID NO: 2029326 - RNA, 15 nt, Human herpesvirus 5
ugagcagcaaaacga

SEQ ID NO: 2029327 - RNA, 23 nt, Human herpesvirus 5
gaaagcuucggccggcugcugca

SEQ ID NO: 2029328 - RNA, 14 nt, Human herpesvirus 5
guggucgaugcuga

SEQ ID NO: 2029329 - RNA, 18 nt, Human herpesvirus 5
ucuauauauauuggucac

SEQ ID NO: 2029330 - RNA, 17 nt, Human herpesvirus 5
uccucuaccccgccgcc

SEQ ID NO: 2029331 - RNA, 17 nt, Human herpesvirus 5
accacgaguaacaccgu

SEQ ID NO: 2029332 - RNA, 17 nt, Human herpesvirus 5
ccuucucccccucaugu

SEQ ID NO: 2029333 - RNA, 17 nt, Human herpesvirus 5
gagagccaccuuggugg

SEQ ID NO: 2029334 - RNA, 17 nt, Human herpesvirus 5
aaccaccguagcacugc

SEQ ID NO: 2029335 - RNA, 20 nt, Human herpesvirus 5
ccgcuauugcuuagcugcac

SEQ ID NO: 2029336 - RNA, 20 nt, Human herpesvirus 5
aauaugggaauuccccugcc

SEQ ID NO: 2029337 - RNA, 17 nt, Human herpesvirus 5
aacgaggucguggaucu

SEQ ID NO: 2029338 - RNA, 21 nt, Human herpesvirus 5
uaugauagaaagucacaggaa

SEQ ID NO: 2029339 - RNA, 14 nt, Human herpesvirus 5
aaggcugguuuccc

SEQ ID NO: 2029340 - RNA, 17 nt, Human herpesvirus 5
cuaacacuccucucccc

SEQ ID NO: 2029341 - RNA, 18 nt, Human herpesvirus 5
ucuauaaacgguuucuca

SEQ ID NO: 2029342 - RNA, 16 nt, Human herpesvirus 5
ugcacgcgcugcuuuc

SEQ ID NO: 2029343 - RNA, 14 nt, Human herpesvirus 5
gucguaugccgcca

SEQ ID NO: 2029344 - RNA, 12 nt, Human herpesvirus 5
cucucgggccga

SEQ ID NO: 2029345 - RNA, 21 nt, Human herpesvirus 5
cgcaccggcagcacaccugcc

SEQ ID NO: 2029346 - RNA, 16 nt, Human herpesvirus 5
uugcgggcccugcuga

SEQ ID NO: 2029347 - RNA, 19 nt, Human herpesvirus 5
gugcaucugccgaaacacc

SEQ ID NO: 2029348 - RNA, 13 nt, Human herpesvirus 5
aguccaccucugc

SEQ ID NO: 2029349 - RNA, 22 nt, Human herpesvirus 5
augaaguuguugaucugcugaa

SEQ ID NO: 2029350 - RNA, 21 nt, Human herpesvirus 5
ugaaccgaacuauguggcucc

SEQ ID NO: 2029351 - RNA, 17 nt, Human herpesvirus 5
agucguuucagcccaag

SEQ ID NO: 2029352 - RNA, 13 nt, Human herpesvirus 5
gcgcggcuacacg

SEQ ID NO: 2029353 - RNA, 17 nt, Human herpesvirus 5
cgcugguuuggcugggu

SEQ ID NO: 2029354 - RNA, 20 nt, Human herpesvirus 5
cggauaagcgcuuucugaau

SEQ ID NO: 2029355 - RNA, 18 nt, Human herpesvirus 5
cgcucgugaaacagcagc

SEQ ID NO: 2029356 - RNA, 19 nt, Human herpesvirus 5
caggcgaugcgcacggccg

SEQ ID NO: 2029357 - RNA, 16 nt, Human herpesvirus 5
cuaccgccgcaacagc

SEQ ID NO: 2029358 - RNA, 17 nt, Human herpesvirus 5
ugggucagcggcacgcc

SEQ ID NO: 2029359 - RNA, 16 nt, Human herpesvirus 5
ggucugcgcuuuccca

SEQ ID NO: 2029360 - RNA, 16 nt, Human herpesvirus 5
gacaccaauugcuuua

SEQ ID NO: 2029361 - RNA, 19 nt, Human herpesvirus 5
acgucaggaaucugggagg

SEQ ID NO: 2029362 - RNA, 14 nt, Human herpesvirus 5
guuaccggucacug

SEQ ID NO: 2029363 - RNA, 15 nt, Human herpesvirus 5
cgggcguuggccugu

SEQ ID NO: 2029364 - RNA, 17 nt, Human herpesvirus 5
gacaaccugcugcacuu

SEQ ID NO: 2029365 - RNA, 23 nt, Human herpesvirus 5
gcgagagcacugacagggguggc

SEQ ID NO: 2029366 - RNA, 21 nt, Human herpesvirus 5
caacaguuaucagcaauaaaa

SEQ ID NO: 2029367 - RNA, 21 nt, Human herpesvirus 5
acagccacaucaacauacagu

SEQ ID NO: 2029368 - RNA, 19 nt, Human herpesvirus 5
uuucuaucauaaacuguuc

SEQ ID NO: 2029369 - RNA, 17 nt, Human herpesvirus 5
gguggccgugcugggcu

SEQ ID NO: 2029370 - RNA, 19 nt, Human herpesvirus 5
caauugcgggcccugcuga

SEQ ID NO: 2029371 - RNA, 11 nt, Human herpesvirus 5
gaauccggcug

SEQ ID NO: 2029372 - RNA, 14 nt, Human herpesvirus 5
gggcuucccuccug

SEQ ID NO: 2029373 - RNA, 22 nt, Human herpesvirus 5
gcgggcaauugcaugucgccca

SEQ ID NO: 2029374 - RNA, 16 nt, Human herpesvirus 5
cugauggccgacgagg

SEQ ID NO: 2029375 - RNA, 17 nt, Human herpesvirus 5
aagcccguggcccagga

SEQ ID NO: 2029376 - RNA, 20 nt, Human herpesvirus 5
gaggcaaauauacuagggaa

SEQ ID NO: 2029377 - RNA, 22 nt, Human herpesvirus 5
gaguacacguuaccgucgcccu

SEQ ID NO: 2029378 - RNA, 15 nt, Human herpesvirus 5
agaaagucacaggaa

SEQ ID NO: 2029379 - RNA, 15 nt, Human herpesvirus 5
ccugcacgaccugcu

SEQ ID NO: 2029380 - RNA, 19 nt, Human herpesvirus 5
gcgccggccgucuccacca

SEQ ID NO: 2029381 - RNA, 20 nt, Human herpesvirus 5
uccccacccaguagacagac

SEQ ID NO: 2029382 - RNA, 23 nt, Human herpesvirus 5
ccuaucauaaagaaugcaacgcu

SEQ ID NO: 2029383 - RNA, 18 nt, Human herpesvirus 5
cuccucccucgcgccgcc

SEQ ID NO: 2029384 - RNA, 15 nt, Human herpesvirus 5
augaagccuaucaau

SEQ ID NO: 2029385 - RNA, 17 nt, Human herpesvirus 5
agacccaucgcaccauc

SEQ ID NO: 2029386 - RNA, 19 nt, Human herpesvirus 5
augccuuggcgcucuggau

SEQ ID NO: 2029387 - RNA, 17 nt, Human herpesvirus 5
cuucuuccucucaguca

SEQ ID NO: 2029388 - RNA, 15 nt, Human herpesvirus 5
caaaagggguggaaa

SEQ ID NO: 2029389 - RNA, 15 nt, Human herpesvirus 5
gaugaaaacgagguc

SEQ ID NO: 2029390 - RNA, 22 nt, Human herpesvirus 5
cuccaucgcagccacgcgcugg

SEQ ID NO: 2029391 - RNA, 19 nt, Human herpesvirus 5
ccacggccugcgggcaggc

SEQ ID NO: 2029392 - RNA, 23 nt, Human herpesvirus 5
cgcgucgcuucgccgccaccuuc

SEQ ID NO: 2029393 - RNA, 11 nt, Human herpesvirus 5
uggagcccacg

SEQ ID NO: 2029394 - RNA, 13 nt, Human herpesvirus 5
gcaccgcgacagc

SEQ ID NO: 2029395 - RNA, 16 nt, Human herpesvirus 5
gaugagcaauugccuc

SEQ ID NO: 2029396 - RNA, 16 nt, Human herpesvirus 5
guuugcgccagugggu

SEQ ID NO: 2029397 - RNA, 22 nt, Human herpesvirus 5
guugcucuccucuaccccgccg

SEQ ID NO: 2029398 - RNA, 14 nt, Human herpesvirus 5
gcauacaaugugcu

SEQ ID NO: 2029399 - RNA, 22 nt, Human herpesvirus 5
gucucccgacaggcucgucgug

SEQ ID NO: 2029400 - RNA, 23 nt, Human herpesvirus 5
accccuuuuggugugugucuaua

SEQ ID NO: 2029401 - RNA, 14 nt, Human herpesvirus 5
cagcggucucaucu

SEQ ID NO: 2029402 - RNA, 16 nt, Human herpesvirus 5
gccauuuucagcgacg

SEQ ID NO: 2029403 - RNA, 15 nt, Human herpesvirus 5
cgcggcuagagcgcg

SEQ ID NO: 2029404 - RNA, 18 nt, Human herpesvirus 5
cguggcccuggucuggcc

SEQ ID NO: 2029405 - RNA, 19 nt, Human herpesvirus 5
ggcgguccaguggcaggcc

SEQ ID NO: 2029406 - RNA, 22 nt, Human herpesvirus 5
guugccgcuggacugacacagc

SEQ ID NO: 2029407 - RNA, 18 nt, Human herpesvirus 5
ggcgaaccgccgucgccg

SEQ ID NO: 2029408 - RNA, 23 nt, Human herpesvirus 5
aggccaccgggacggccugggcg

SEQ ID NO: 2029409 - RNA, 15 nt, Human herpesvirus 5
accaagaaacaccgg

SEQ ID NO: 2029410 - RNA, 18 nt, Human herpesvirus 5
aacccagcagccggagga

SEQ ID NO: 2029411 - RNA, 15 nt, Human herpesvirus 5
cgggccgccgccagc

SEQ ID NO: 2029412 - RNA, 23 nt, Human herpesvirus 5
ccugccgaagaccucaccaucuc

SEQ ID NO: 2029413 - RNA, 19 nt, Human herpesvirus 5
augaaggaacgcacgcugg

SEQ ID NO: 2029414 - RNA, 12 nt, Human herpesvirus 5
cgcguggcccug

SEQ ID NO: 2029415 - RNA, 20 nt, Human herpesvirus 5
auguuggugccccaggauga

SEQ ID NO: 2029416 - RNA, 23 nt, Human herpesvirus 5
caaggccgccucuucuggcccuc

SEQ ID NO: 2029417 - RNA, 20 nt, Human herpesvirus 5
cuacauccuuaucugggugc

SEQ ID NO: 2029418 - RNA, 22 nt, Human herpesvirus 5
uauauucaguccauugucagua

SEQ ID NO: 2029419 - RNA, 19 nt, Human herpesvirus 5
gaagacgccgucacgcagg

SEQ ID NO: 2029420 - RNA, 12 nt, Human herpesvirus 5
auuacacucuau

SEQ ID NO: 2029421 - RNA, 14 nt, Human herpesvirus 5
ucuucacuacguug

SEQ ID NO: 2029422 - RNA, 15 nt, Human herpesvirus 5
ucuuucuacaagaca

SEQ ID NO: 2029423 - RNA, 21 nt, Human herpesvirus 5
gggcucguguggcagcuggcu

SEQ ID NO: 2029424 - RNA, 20 nt, Human herpesvirus 5
agacuacaugcuauaagaca

SEQ ID NO: 2029425 - RNA, 13 nt, Human herpesvirus 5
guguugacagggc

SEQ ID NO: 2029426 - RNA, 20 nt, Human herpesvirus 5
caaugacacucgaagcaaca

SEQ ID NO: 2029427 - RNA, 18 nt, Human herpesvirus 5
gauggggucguggcucag

SEQ ID NO: 2029428 - RNA, 15 nt, Human herpesvirus 5
caguuugcggcgcag

SEQ ID NO: 2029429 - RNA, 13 nt, Human herpesvirus 5
cgagugggccagc

SEQ ID NO: 2029430 - RNA, 15 nt, Human herpesvirus 5
ccaccgucgccguca

SEQ ID NO: 2029431 - RNA, 14 nt, Human herpesvirus 5
ccgcagcugcugga

SEQ ID NO: 2029432 - RNA, 16 nt, Human herpesvirus 5
ucggggugcaucaucu

SEQ ID NO: 2029433 - RNA, 15 nt, Human herpesvirus 5
cacguucuugcgucc

SEQ ID NO: 2029434 - RNA, 14 nt, Human herpesvirus 5
caacaacagcaaca

SEQ ID NO: 2029435 - RNA, 18 nt, Human herpesvirus 5
accuaucauaaagaaugc

SEQ ID NO: 2029436 - RNA, 18 nt, Human herpesvirus 5
gcguuaugauaucuacag

SEQ ID NO: 2029437 - RNA, 14 nt, Human herpesvirus 5
gcgcccccgugugu

SEQ ID NO: 2029438 - RNA, 17 nt, Human herpesvirus 5
gcauaagcgcggagguu

SEQ ID NO: 2029439 - RNA, 13 nt, Human herpesvirus 5
gcagcugcuuucu

SEQ ID NO: 2029440 - RNA, 13 nt, Human herpesvirus 5
ugcacgccgccgu

SEQ ID NO: 2029441 - RNA, 13 nt, Human herpesvirus 5
ggcucgcucggcc

SEQ ID NO: 2029442 - RNA, 13 nt, Human herpesvirus 5
uacuuuuacauga

SEQ ID NO: 2029443 - RNA, 19 nt, Human herpesvirus 5
ucaagggucacggugccau

SEQ ID NO: 2029444 - RNA, 19 nt, Human herpesvirus 5
ucaucuuuauuugcaucau

SEQ ID NO: 2029445 - RNA, 13 nt, Human herpesvirus 5
gcaaagucaacau

SEQ ID NO: 2029446 - RNA, 12 nt, Human herpesvirus 5
uaucggaagcug

SEQ ID NO: 2029447 - RNA, 14 nt, Human herpesvirus 5
acgucaaagcucac

SEQ ID NO: 2029448 - RNA, 18 nt, Human herpesvirus 5
ggccuguggugcgacugc

SEQ ID NO: 2029449 - RNA, 23 nt, Human herpesvirus 5
aagcccuacuuuguguuucucgc

SEQ ID NO: 2029450 - RNA, 22 nt, Human herpesvirus 5
gacgcaugauuagcaauauuau

SEQ ID NO: 2029451 - RNA, 14 nt, Human herpesvirus 5
gcggguccauugga

SEQ ID NO: 2029452 - RNA, 17 nt, Human herpesvirus 5
cugcuguguugucuuua

SEQ ID NO: 2029453 - RNA, 20 nt, Human herpesvirus 5
cgcugcggucccgacaugga

SEQ ID NO: 2029454 - RNA, 15 nt, Human herpesvirus 5
ucucccgacgucacu

SEQ ID NO: 2029455 - RNA, 17 nt, Human herpesvirus 5
cgaguggugaggagcgc

SEQ ID NO: 2029456 - RNA, 15 nt, Human herpesvirus 5
gccggaggagcaggc

SEQ ID NO: 2029457 - RNA, 20 nt, Human herpesvirus 5
aggaacgcacgcuggaggac

SEQ ID NO: 2029458 - RNA, 20 nt, Human herpesvirus 5
cugaugccgaucaugugcuu

SEQ ID NO: 2029459 - RNA, 17 nt, Human herpesvirus 5
aacagguccagcuuaaa

SEQ ID NO: 2029460 - RNA, 22 nt, Human herpesvirus 5
cagccgcgcuugucgccaugcu

SEQ ID NO: 2029461 - RNA, 16 nt, Human herpesvirus 5
cgucgagggcccggcc

SEQ ID NO: 2029462 - RNA, 16 nt, Human herpesvirus 5
gaagcugcggcucugc

SEQ ID NO: 2029463 - RNA, 20 nt, Human herpesvirus 5
ccaccgugucuccgugacgg

SEQ ID NO: 2029464 - RNA, 13 nt, Human herpesvirus 5
auccgucagccuc

SEQ ID NO: 2029465 - RNA, 13 nt, Human herpesvirus 5
aacgggugggcug

SEQ ID NO: 2029466 - RNA, 19 nt, Human herpesvirus 5
gcuggccgauccacgggcc

SEQ ID NO: 2029467 - RNA, 18 nt, Human herpesvirus 5
cuucccugagcgagcgcg

SEQ ID NO: 2029468 - RNA, 18 nt, Human herpesvirus 5
gcucggacacagcgccgc

SEQ ID NO: 2029469 - RNA, 14 nt, Human herpesvirus 5
cgcgaccgccucaa

SEQ ID NO: 2029470 - RNA, 23 nt, Human herpesvirus 5
agaccgugggucgggagcacaua

SEQ ID NO: 2029471 - RNA, 20 nt, Human herpesvirus 5
cagcggaaaaugccgccgcc

SEQ ID NO: 2029472 - RNA, 13 nt, Human herpesvirus 5
ccaucccgccuuc

SEQ ID NO: 2029473 - RNA, 19 nt, Human herpesvirus 5
acggaguggugagcggguu

SEQ ID NO: 2029474 - RNA, 19 nt, Human herpesvirus 5
ggcagacggacggugcggg

SEQ ID NO: 2029475 - RNA, 17 nt, Human herpesvirus 5
aaugacauggauaacga

SEQ ID NO: 2029476 - RNA, 17 nt, Human herpesvirus 5
gcugcuuucuuuuugca

SEQ ID NO: 2029477 - RNA, 16 nt, Human herpesvirus 5
ggccgcucgggaacag

SEQ ID NO: 2029478 - RNA, 23 nt, Human herpesvirus 5
cuuuugcgucgcccucgacggcg

SEQ ID NO: 2029479 - RNA, 15 nt, Human herpesvirus 5
gccccagcagaccag

SEQ ID NO: 2029480 - RNA, 11 nt, Human herpesvirus 5
auacacacgga

SEQ ID NO: 2029481 - RNA, 19 nt, Human herpesvirus 5
cguccgcggaaacgacgga

SEQ ID NO: 2029482 - RNA, 20 nt, Human herpesvirus 5
gguagcuucucucuggucuu

SEQ ID NO: 2029483 - RNA, 16 nt, Human herpesvirus 5
guuaucacagaacaca

SEQ ID NO: 2029484 - RNA, 14 nt, Human herpesvirus 5
cgggaacuggccug

SEQ ID NO: 2029485 - RNA, 17 nt, Human herpesvirus 5
caccgucaccacuccca

SEQ ID NO: 2029486 - RNA, 19 nt, Human herpesvirus 5
cuuugacgugcucaagagg

SEQ ID NO: 2029487 - RNA, 19 nt, Human herpesvirus 5
cugucauggggagaaaaga

SEQ ID NO: 2029488 - RNA, 16 nt, Human herpesvirus 5
guuuauuucaauaaau

SEQ ID NO: 2029489 - RNA, 18 nt, Human herpesvirus 5
uauccaauacggcugcca

SEQ ID NO: 2029490 - RNA, 15 nt, Human herpesvirus 5
uguuaccgccgccgc

SEQ ID NO: 2029491 - RNA, 23 nt, Human herpesvirus 5
ggcggaggagagaacggaagaag

SEQ ID NO: 2029492 - RNA, 16 nt, Human herpesvirus 5
acuccgucuccagaca

SEQ ID NO: 2029493 - RNA, 14 nt, Human herpesvirus 5
gcuucugcagcucc

SEQ ID NO: 2029494 - RNA, 19 nt, Human herpesvirus 5
cuucuggagcacacugcua

SEQ ID NO: 2029495 - RNA, 17 nt, Human herpesvirus 5
acaugauggaaaugccc

SEQ ID NO: 2029496 - RNA, 13 nt, Human herpesvirus 5
ucgaugcugcaag

SEQ ID NO: 2029497 - RNA, 19 nt, Human herpesvirus 5
auuccaguagcaccggccc

SEQ ID NO: 2029498 - RNA, 16 nt, Human herpesvirus 5
aagggauaguggcucg

SEQ ID NO: 2029499 - RNA, 20 nt, Human herpesvirus 5
ccggugguacugcuguggug

SEQ ID NO: 2029500 - RNA, 22 nt, Human herpesvirus 5
cugcggaaugauuuggcugggu

SEQ ID NO: 2029501 - RNA, 11 nt, Human herpesvirus 5
guggaaggcac

SEQ ID NO: 2029502 - RNA, 15 nt, Human herpesvirus 5
acgaggaggccgaga

SEQ ID NO: 2029503 - RNA, 15 nt, Human herpesvirus 5
acuucccccuccccu

SEQ ID NO: 2029504 - RNA, 17 nt, Human herpesvirus 5
uaccaccgugacaccgg

SEQ ID NO: 2029505 - RNA, 17 nt, Human herpesvirus 5
cucgguaguggacaugg

SEQ ID NO: 2029506 - RNA, 21 nt, Human herpesvirus 5
gaaguuguugcaacuguuguu

SEQ ID NO: 2029507 - RNA, 17 nt, Human herpesvirus 5
ccagcugccaccagggc

SEQ ID NO: 2029508 - RNA, 15 nt, Human herpesvirus 5
ugauuucuugcuugc

SEQ ID NO: 2029509 - RNA, 17 nt, Human herpesvirus 5
caggaacgauaaccgug

SEQ ID NO: 2029510 - RNA, 14 nt, Human herpesvirus 5
auccagcagcugcg

SEQ ID NO: 2029511 - RNA, 16 nt, Human herpesvirus 5
ccgggccgccgccagc

SEQ ID NO: 2029512 - RNA, 16 nt, Human herpesvirus 5
gaccggcggcugcugu

SEQ ID NO: 2029513 - RNA, 16 nt, Human herpesvirus 5
uggccaucacgggcaa

SEQ ID NO: 2029514 - RNA, 16 nt, Human herpesvirus 5
cccaccccccgggcca

SEQ ID NO: 2029515 - RNA, 13 nt, Human herpesvirus 5
cacaauacacaug

SEQ ID NO: 2029516 - RNA, 15 nt, Human herpesvirus 5
cuuacaaaucacguu

SEQ ID NO: 2029517 - RNA, 19 nt, Human herpesvirus 5
cggcgcccaaaccgcagga

SEQ ID NO: 2029518 - RNA, 21 nt, Human herpesvirus 5
cguagaauacuggaagcugcu

SEQ ID NO: 2029519 - RNA, 12 nt, Human herpesvirus 5
acuucuacggag

SEQ ID NO: 2029520 - RNA, 15 nt, Human herpesvirus 5
gaggcggaggagccg

SEQ ID NO: 2029521 - RNA, 19 nt, Human herpesvirus 5
gcaccgguuggagcagcuc

SEQ ID NO: 2029522 - RNA, 14 nt, Human herpesvirus 5
augaggcacaugau

SEQ ID NO: 2029523 - RNA, 14 nt, Human herpesvirus 5
gaccgucuggaggu

SEQ ID NO: 2029524 - RNA, 13 nt, Human herpesvirus 5
caacgucacuucu

SEQ ID NO: 2029525 - RNA, 13 nt, Human herpesvirus 5
aaacgcugcuugg

SEQ ID NO: 2029526 - RNA, 15 nt, Human herpesvirus 5
gcgugucccugccag

SEQ ID NO: 2029527 - RNA, 12 nt, Human herpesvirus 5
agcgccgcggca

SEQ ID NO: 2029528 - RNA, 21 nt, Human herpesvirus 5
acagacugggcgacgaagugc

SEQ ID NO: 2029529 - RNA, 12 nt, Human herpesvirus 5
auguaguugcag

SEQ ID NO: 2029530 - RNA, 22 nt, Human herpesvirus 5
cugucguucuccgcuugcugcg

SEQ ID NO: 2029531 - RNA, 21 nt, Human herpesvirus 5
caacugagcuucggagguccu

SEQ ID NO: 2029532 - RNA, 15 nt, Human herpesvirus 5
acagccuugagaacc

SEQ ID NO: 2029533 - RNA, 16 nt, Human herpesvirus 5
agagggugaaggcaaa

SEQ ID NO: 2029534 - RNA, 17 nt, Human herpesvirus 5
cacgcaggugaggcucu

SEQ ID NO: 2029535 - RNA, 19 nt, Human herpesvirus 5
ugcuggcggccguggccug

SEQ ID NO: 2029536 - RNA, 12 nt, Human herpesvirus 5
gcgcuuucugaa

SEQ ID NO: 2029537 - RNA, 20 nt, Human herpesvirus 5
ugguggucuacaagcgcaac

SEQ ID NO: 2029538 - RNA, 13 nt, Human herpesvirus 5
ucacuacucuggg

SEQ ID NO: 2029539 - RNA, 20 nt, Human herpesvirus 5
gcggcgguggugacugggga

SEQ ID NO: 2029540 - RNA, 23 nt, Human herpesvirus 5
agcgcggucgccaccuggaucug

SEQ ID NO: 2029541 - RNA, 15 nt, Human herpesvirus 5
ugauguaguugcaga

SEQ ID NO: 2029542 - RNA, 12 nt, Human herpesvirus 5
gaggagcaggcu

SEQ ID NO: 2029543 - RNA, 11 nt, Human herpesvirus 5
cccucugcugc

SEQ ID NO: 2029544 - RNA, 15 nt, Human herpesvirus 5
acaaguaugaaaguu

SEQ ID NO: 2029545 - RNA, 14 nt, Human herpesvirus 5
agcgcgugaccugu

SEQ ID NO: 2029546 - RNA, 19 nt, Human herpesvirus 5
cggucguaagcggcagcau

SEQ ID NO: 2029547 - RNA, 15 nt, Human herpesvirus 5
acgcaggugaggcuc

SEQ ID NO: 2029548 - RNA, 13 nt, Human herpesvirus 5
gcuggccggcuug

SEQ ID NO: 2029549 - RNA, 12 nt, Human herpesvirus 5
cgagguggucaa

SEQ ID NO: 2029550 - RNA, 17 nt, Human herpesvirus 5
acacaggccagcugcca

SEQ ID NO: 2029551 - RNA, 22 nt, Human herpesvirus 5
uguccauagugcgccaagccau

SEQ ID NO: 2029552 - RNA, 15 nt, Human herpesvirus 5
cucggguugccugga

SEQ ID NO: 2029553 - RNA, 15 nt, Human herpesvirus 5
ggccgaccugugcgu

SEQ ID NO: 2029554 - RNA, 13 nt, Human herpesvirus 5
uguugauucugga

SEQ ID NO: 2029555 - RNA, 16 nt, Human herpesvirus 5
aguuggccaccaagaa

SEQ ID NO: 2029556 - RNA, 21 nt, Human herpesvirus 5
cccagcagaccagccaccguc

SEQ ID NO: 2029557 - RNA, 19 nt, Human herpesvirus 5
gguggaaccgugccguugc

SEQ ID NO: 2029558 - RNA, 16 nt, Human herpesvirus 5
cccgucggcugccugu

SEQ ID NO: 2029559 - RNA, 23 nt, Human herpesvirus 5
ggcgauggucauguucucccagg

SEQ ID NO: 2029560 - RNA, 12 nt, Human herpesvirus 5
cuccgucucugg

SEQ ID NO: 2029561 - RNA, 15 nt, Human herpesvirus 5
ggcucugggaagcug

SEQ ID NO: 2029562 - RNA, 17 nt, Human herpesvirus 5
cgacgacuaugaugaag

SEQ ID NO: 2029563 - RNA, 17 nt, Human herpesvirus 5
cgggcuuuuuugucccg

SEQ ID NO: 2029564 - RNA, 19 nt, Human herpesvirus 5
cccuucuggagcacacugc

SEQ ID NO: 2029565 - RNA, 21 nt, Human herpesvirus 5
gaggaugggggggaccggggu

SEQ ID NO: 2029566 - RNA, 23 nt, Human herpesvirus 5
acuggggacggugaugaugcugc

SEQ ID NO: 2029567 - RNA, 13 nt, Human herpesvirus 5
cucaucucagccu

SEQ ID NO: 2029568 - RNA, 16 nt, Human herpesvirus 5
aacuguuccacggcca

SEQ ID NO: 2029569 - RNA, 18 nt, Human herpesvirus 5
cguuggcucucgcagccc

SEQ ID NO: 2029570 - RNA, 22 nt, Human herpesvirus 5
ccccggggcgugccgagcugcc

SEQ ID NO: 2029571 - RNA, 18 nt, Human herpesvirus 5
ggagguggucgagcgcga

SEQ ID NO: 2029572 - RNA, 21 nt, Human herpesvirus 5
ggcgggcuuuuuugucccggg

SEQ ID NO: 2029573 - RNA, 14 nt, Human herpesvirus 5
cguacgucaccgcg

SEQ ID NO: 2029574 - RNA, 19 nt, Human herpesvirus 5
gucgcagcccccguggccg

SEQ ID NO: 2029575 - RNA, 14 nt, Human herpesvirus 5
cgaucuggaaggcg

SEQ ID NO: 2029576 - RNA, 22 nt, Human herpesvirus 5
agcgaguggggcaacugcugcc

SEQ ID NO: 2029577 - RNA, 21 nt, Human herpesvirus 5
cgcaacuuuuggccgccacac

SEQ ID NO: 2029578 - RNA, 22 nt, Human herpesvirus 5
gccgcuacugaucgccuggagc

SEQ ID NO: 2029579 - RNA, 18 nt, Human herpesvirus 5
ggaucuggcggccgccgg

SEQ ID NO: 2029580 - RNA, 15 nt, Human herpesvirus 5
auggcuauguacaca

SEQ ID NO: 2029581 - RNA, 22 nt, Human herpesvirus 5
uaaaucacgucagguucacacg

SEQ ID NO: 2029582 - RNA, 21 nt, Human herpesvirus 5
gcucugucggaugaggcaggc

SEQ ID NO: 2029583 - RNA, 17 nt, Human herpesvirus 5
gggagucaacacuacca

SEQ ID NO: 2029584 - RNA, 17 nt, Human herpesvirus 5
agcggcggacuuggcag

SEQ ID NO: 2029585 - RNA, 12 nt, Human herpesvirus 5
caggaaaguaug

SEQ ID NO: 2029586 - RNA, 23 nt, Human herpesvirus 5
gauggccaucacgggcaaagagu

SEQ ID NO: 2029587 - RNA, 20 nt, Human herpesvirus 5
guuggccaccaagaaacacc

SEQ ID NO: 2029588 - RNA, 23 nt, Human herpesvirus 5
gcuacauucgccgcaaugggcuu

SEQ ID NO: 2029589 - RNA, 23 nt, Human herpesvirus 5
cgcggucgccgcgucagcggccg

SEQ ID NO: 2029590 - RNA, 15 nt, Human herpesvirus 5
aaccuaccugggcug

SEQ ID NO: 2029591 - RNA, 22 nt, Human herpesvirus 5
caugcauucugguaccugcuaa

SEQ ID NO: 2029592 - RNA, 16 nt, Human herpesvirus 5
aaaagaccuaauacua

SEQ ID NO: 2029593 - RNA, 12 nt, Human herpesvirus 5
agacacacacca

SEQ ID NO: 2029594 - RNA, 20 nt, Human herpesvirus 5
cuggucucgugauguggggg

SEQ ID NO: 2029595 - RNA, 23 nt, Human herpesvirus 5
ggcccugugcuuuugcuuacugu

SEQ ID NO: 2029596 - RNA, 17 nt, Human herpesvirus 5
gauaaccuaccuggugu

SEQ ID NO: 2029597 - RNA, 20 nt, Human herpesvirus 5
agaguggugggaaugcacgu

SEQ ID NO: 2029598 - RNA, 17 nt, Human herpesvirus 5
gaacaccagaugcuccc

SEQ ID NO: 2029599 - RNA, 20 nt, Human herpesvirus 5
gucggaugaggcaggcgaug

SEQ ID NO: 2029600 - RNA, 19 nt, Human herpesvirus 5
ggcggccgacggcagcgug

SEQ ID NO: 2029601 - RNA, 18 nt, Human herpesvirus 5
cugcgguuaacccuagca

SEQ ID NO: 2029602 - RNA, 15 nt, Human herpesvirus 5
gcagcagcuggugca

SEQ ID NO: 2029603 - RNA, 21 nt, Human herpesvirus 5
auccacgcucguucaauaauc

SEQ ID NO: 2029604 - RNA, 15 nt, Human herpesvirus 5
gcuaggcgggcugga

SEQ ID NO: 2029605 - RNA, 18 nt, Human herpesvirus 5
gaacccuucccgaccucc

SEQ ID NO: 2029606 - RNA, 21 nt, Human herpesvirus 5
gucaucggcacgugcucuuuu

SEQ ID NO: 2029607 - RNA, 18 nt, Human herpesvirus 5
acuaucgacguguuauca

SEQ ID NO: 2029608 - RNA, 20 nt, Human herpesvirus 5
augguuugugccucugaaag

SEQ ID NO: 2029609 - RNA, 21 nt, Human herpesvirus 5
gccgagacggcgugacacagc

SEQ ID NO: 2029610 - RNA, 18 nt, Human herpesvirus 5
gccucaaaaagcaggugg

SEQ ID NO: 2029611 - RNA, 17 nt, Human herpesvirus 5
aaucuuccccucugcug

SEQ ID NO: 2029612 - RNA, 16 nt, Human herpesvirus 5
ccaugucgcgacacga

SEQ ID NO: 2029613 - RNA, 18 nt, Human herpesvirus 5
ugaauggaaauacaugau

SEQ ID NO: 2029614 - RNA, 22 nt, Human herpesvirus 5
cagcagcucuuccaaugguuga

SEQ ID NO: 2029615 - RNA, 17 nt, Human herpesvirus 5
ggugcaucaucugguag

SEQ ID NO: 2029616 - RNA, 22 nt, Human herpesvirus 5
cuauugcuuagcugcacaccag

SEQ ID NO: 2029617 - RNA, 23 nt, Human herpesvirus 5
cacagggaauaauaauaccacaa

SEQ ID NO: 2029618 - RNA, 22 nt, Human herpesvirus 5
cggaggaggugaccuggcugcu

SEQ ID NO: 2029619 - RNA, 20 nt, Human herpesvirus 5
gguccgucgagaccggcgga

SEQ ID NO: 2029620 - RNA, 13 nt, Human herpesvirus 5
guagguggccaug

SEQ ID NO: 2029621 - RNA, 17 nt, Human herpesvirus 5
gcuucgagggcucgugc

SEQ ID NO: 2029622 - RNA, 23 nt, Human herpesvirus 5
agcgaguggggcaacugcugccu

SEQ ID NO: 2029623 - RNA, 22 nt, Human herpesvirus 5
caucgcccacaguagcgguacc

SEQ ID NO: 2029624 - RNA, 14 nt, Human herpesvirus 5
cacgccaaaccgcg

SEQ ID NO: 2029625 - RNA, 14 nt, Human herpesvirus 5
ugaaaagguacuuu

SEQ ID NO: 2029626 - RNA, 16 nt, Human herpesvirus 5
gaggagugucagacac

SEQ ID NO: 2029627 - RNA, 17 nt, Human herpesvirus 5
cagaagaaaaaaacaca

SEQ ID NO: 2029628 - RNA, 22 nt, Human herpesvirus 5
gugaucacguacguuuuccaaa

SEQ ID NO: 2029629 - RNA, 13 nt, Human herpesvirus 5
gucuccaccacag

SEQ ID NO: 2029630 - RNA, 15 nt, Human herpesvirus 5
ggcggcuugggcagc

SEQ ID NO: 2029631 - RNA, 22 nt, Human herpesvirus 5
acacaaaaucuucuaaaacggu

SEQ ID NO: 2029632 - RNA, 19 nt, Human herpesvirus 5
ccugcugccgccacugggc

SEQ ID NO: 2029633 - RNA, 14 nt, Human herpesvirus 5
ucacuacucuggga

SEQ ID NO: 2029634 - RNA, 18 nt, Human herpesvirus 5
cguggcgguccaguggca

SEQ ID NO: 2029635 - RNA, 17 nt, Human herpesvirus 5
ugauuuuuuuuacaaua

SEQ ID NO: 2029636 - RNA, 14 nt, Human herpesvirus 5
uagcacugcgcaac

SEQ ID NO: 2029637 - RNA, 21 nt, Human herpesvirus 5
acgcugcuauaagaaggccau

SEQ ID NO: 2029638 - RNA, 20 nt, Human herpesvirus 5
cuuggguagcuucucucugg

SEQ ID NO: 2029639 - RNA, 17 nt, Human herpesvirus 5
cgcauagccucuacaaa

SEQ ID NO: 2029640 - RNA, 18 nt, Human herpesvirus 5
cgggucucuuugacacga

SEQ ID NO: 2029641 - RNA, 21 nt, Human herpesvirus 5
ggccuguggauagauuucugc

SEQ ID NO: 2029642 - RNA, 22 nt, Human herpesvirus 5
gccggagcccggucugagcucc

SEQ ID NO: 2029643 - RNA, 14 nt, Human herpesvirus 5
gcgcaagugccugc

SEQ ID NO: 2029644 - RNA, 13 nt, Human herpesvirus 5
uccaugugcagcu

SEQ ID NO: 2029645 - RNA, 14 nt, Human herpesvirus 5
gcgccuuccuccuc

SEQ ID NO: 2029646 - RNA, 16 nt, Human herpesvirus 5
cugcagaccgaggcgc

SEQ ID NO: 2029647 - RNA, 16 nt, Human herpesvirus 5
cccagcagaccagcca

SEQ ID NO: 2029648 - RNA, 17 nt, Human herpesvirus 5
uacgucgcuuuuuacuu

SEQ ID NO: 2029649 - RNA, 21 nt, Human herpesvirus 5
cauaaaaccaccguaccugca

SEQ ID NO: 2029650 - RNA, 17 nt, Human herpesvirus 5
ccagcagcagcuggugc

SEQ ID NO: 2029651 - RNA, 14 nt, Human herpesvirus 5
gggcgcgacggcaa

SEQ ID NO: 2029652 - RNA, 14 nt, Human herpesvirus 5
acggccagcuccac

SEQ ID NO: 2029653 - RNA, 15 nt, Human herpesvirus 5
ucaaaagccugggua

SEQ ID NO: 2029654 - RNA, 19 nt, Human herpesvirus 5
uuccuccucgucgucgccg

SEQ ID NO: 2029655 - RNA, 16 nt, Human herpesvirus 5
ggacauggacucgcca

SEQ ID NO: 2029656 - RNA, 18 nt, Human herpesvirus 5
ugcugugcaccucggccu

SEQ ID NO: 2029657 - RNA, 20 nt, Human herpesvirus 5
cacuaccagcugggccuaca

SEQ ID NO: 2029658 - RNA, 14 nt, Human herpesvirus 5
uucagcucacuguu

SEQ ID NO: 2029659 - RNA, 15 nt, Human herpesvirus 5
cuauagggaggacga

SEQ ID NO: 2029660 - RNA, 16 nt, Human herpesvirus 5
gcgggugccgggacag

SEQ ID NO: 2029661 - RNA, 13 nt, Human herpesvirus 5
ucaucagccaacu

SEQ ID NO: 2029662 - RNA, 15 nt, Human herpesvirus 5
gacgggcgacagcac

SEQ ID NO: 2029663 - RNA, 15 nt, Human herpesvirus 5
cgcuggaggccuccu

SEQ ID NO: 2029664 - RNA, 17 nt, Human herpesvirus 5
aaccgcccgugccuccc

SEQ ID NO: 2029665 - RNA, 19 nt, Human herpesvirus 5
gcaguaccucaacacauug

SEQ ID NO: 2029666 - RNA, 15 nt, Human herpesvirus 5
ggcuucccuccugca

SEQ ID NO: 2029667 - RNA, 21 nt, Human herpesvirus 5
ccggucgcuaacugauaacga

SEQ ID NO: 2029668 - RNA, 17 nt, Human herpesvirus 5
aaguacaauaucaaaga

SEQ ID NO: 2029669 - RNA, 18 nt, Human herpesvirus 5
gaagcacggagacugcgg

SEQ ID NO: 2029670 - RNA, 13 nt, Human herpesvirus 5
cagcgucacagag

SEQ ID NO: 2029671 - RNA, 15 nt, Human herpesvirus 5
aucggcguucugcuc

SEQ ID NO: 2029672 - RNA, 15 nt, Human herpesvirus 5
aacagcagcaacagc

SEQ ID NO: 2029673 - RNA, 19 nt, Human herpesvirus 5
cuguuggcuuacugccugc

SEQ ID NO: 2029674 - RNA, 13 nt, Human herpesvirus 5
gccugguugcugc

SEQ ID NO: 2029675 - RNA, 22 nt, Human herpesvirus 5
uaauaagccggcagcugcuuuc

SEQ ID NO: 2029676 - RNA, 14 nt, Human herpesvirus 5
gcgacguggaggag

SEQ ID NO: 2029677 - RNA, 12 nt, Human herpesvirus 5
cagagcugcuag

SEQ ID NO: 2029678 - RNA, 20 nt, Human herpesvirus 5
guugagcacgucuagcaggc

SEQ ID NO: 2029679 - RNA, 19 nt, Human herpesvirus 5
accgucgccgucacugcca

SEQ ID NO: 2029680 - RNA, 17 nt, Human herpesvirus 5
guaguuggcguugagca

SEQ ID NO: 2029681 - RNA, 14 nt, Human herpesvirus 5
ggcgccgcgguggu

SEQ ID NO: 2029682 - RNA, 17 nt, Human herpesvirus 5
gacacuuuaggcggcgc

SEQ ID NO: 2029683 - RNA, 14 nt, Human herpesvirus 5
ggcuacugcugcuu

SEQ ID NO: 2029684 - RNA, 21 nt, Human herpesvirus 5
gcgacugcggcgacuggcgag

SEQ ID NO: 2029685 - RNA, 17 nt, Human herpesvirus 5
gagugguggcggcagcc

SEQ ID NO: 2029686 - RNA, 13 nt, Human herpesvirus 5
agaaagagcagcg

SEQ ID NO: 2029687 - RNA, 16 nt, Human herpesvirus 5
ccgcucuucuggggcg

SEQ ID NO: 2029688 - RNA, 13 nt, Human herpesvirus 5
cuuuuacuaguau

SEQ ID NO: 2029689 - RNA, 19 nt, Human herpesvirus 5
cgaccuacgggacacgcug

SEQ ID NO: 2029690 - RNA, 22 nt, Human herpesvirus 5
cucgcugggcuacaagugcagc

SEQ ID NO: 2029691 - RNA, 22 nt, Human herpesvirus 5
aagugccugcacgaccugcucc

SEQ ID NO: 2029692 - RNA, 16 nt, Human herpesvirus 5
gaaucgcgagcugggc

SEQ ID NO: 2029693 - RNA, 20 nt, Human herpesvirus 5
acgguaccgcugggaugggu

SEQ ID NO: 2029694 - RNA, 16 nt, Human herpesvirus 5
gcccccgucgcccgag

SEQ ID NO: 2029695 - RNA, 22 nt, Human herpesvirus 5
gcugagcuacgaugaccacgaa

SEQ ID NO: 2029696 - RNA, 18 nt, Human herpesvirus 5
cgugcucagcugguggcu

SEQ ID NO: 2029697 - RNA, 15 nt, Human herpesvirus 5
cuugcuccucuucca

SEQ ID NO: 2029698 - RNA, 17 nt, Human herpesvirus 5
acacgcgggggaaaaac

SEQ ID NO: 2029699 - RNA, 20 nt, Human herpesvirus 5
auaguguguuccuguccggu

SEQ ID NO: 2029700 - RNA, 16 nt, Human herpesvirus 5
guguuuuuuccuuccu

SEQ ID NO: 2029701 - RNA, 18 nt, Human herpesvirus 5
agccaccgacacagcagc

SEQ ID NO: 2029702 - RNA, 17 nt, Human herpesvirus 5
gcaacaacgguagauga

SEQ ID NO: 2029703 - RNA, 16 nt, Human herpesvirus 5
cagcaaccaccguuuc

SEQ ID NO: 2029704 - RNA, 14 nt, Human herpesvirus 5
agggugaaggcaaa

SEQ ID NO: 2029705 - RNA, 15 nt, Human herpesvirus 5
cgcgcccgacagcug

SEQ ID NO: 2029706 - RNA, 18 nt, Human herpesvirus 5
ccuacgucuucaugacgg

SEQ ID NO: 2029707 - RNA, 13 nt, Human herpesvirus 5
cuacagucccgag

SEQ ID NO: 2029708 - RNA, 18 nt, Human herpesvirus 5
ccggaggaagcggcggua

SEQ ID NO: 2029709 - RNA, 22 nt, Human herpesvirus 5
ucggcugccuguuccugcugcu

SEQ ID NO: 2029710 - RNA, 12 nt, Human herpesvirus 5
ggcgcucuggau

SEQ ID NO: 2029711 - RNA, 15 nt, Human herpesvirus 5
cgacgagcaggcucg

SEQ ID NO: 2029712 - RNA, 13 nt, Human herpesvirus 5
cuccggcugucau

SEQ ID NO: 2029713 - RNA, 15 nt, Human herpesvirus 5
ugcgaaguguugacc

SEQ ID NO: 2029714 - RNA, 17 nt, Human herpesvirus 5
auggagccgcaagugcu

SEQ ID NO: 2029715 - RNA, 19 nt, Human herpesvirus 5
gaagucgaucuggaaggcg

SEQ ID NO: 2029716 - RNA, 20 nt, Human herpesvirus 5
cugcgugaugccuggaccca

SEQ ID NO: 2029717 - RNA, 20 nt, Human herpesvirus 5
ccgccgacucgcugccgcag

SEQ ID NO: 2029718 - RNA, 16 nt, Human herpesvirus 5
ucaccgugccccacuc

SEQ ID NO: 2029719 - RNA, 19 nt, Human herpesvirus 5
cugccgcuacugaucgccu

SEQ ID NO: 2029720 - RNA, 15 nt, Human herpesvirus 5
ucugaaucugcucca

SEQ ID NO: 2029721 - RNA, 14 nt, Human herpesvirus 5
accgcaacaacagc

SEQ ID NO: 2029722 - RNA, 18 nt, Human herpesvirus 5
aacagacccgauacaguc

SEQ ID NO: 2029723 - RNA, 18 nt, Human herpesvirus 5
ugcagcgcuacgugcgcg

SEQ ID NO: 2029724 - RNA, 22 nt, Human herpesvirus 5
aucuuuuggaggauguucugca

SEQ ID NO: 2029725 - RNA, 12 nt, Human herpesvirus 5
guguaugcaugu

SEQ ID NO: 2029726 - RNA, 20 nt, Human herpesvirus 5
cuccucgacgcgcggcggcg

SEQ ID NO: 2029727 - RNA, 14 nt, Human herpesvirus 5
ucuaggaacacuga

SEQ ID NO: 2029728 - RNA, 14 nt, Human herpesvirus 5
gccgaggcuacugc

SEQ ID NO: 2029729 - RNA, 16 nt, Human herpesvirus 5
cuugagaaccugcuca

SEQ ID NO: 2029730 - RNA, 15 nt, Human herpesvirus 5
cugcgcgccuccguc

SEQ ID NO: 2029731 - RNA, 17 nt, Human herpesvirus 5
caaacgcgugcgggugc

SEQ ID NO: 2029732 - RNA, 12 nt, Human herpesvirus 5
guggggcugcuc

SEQ ID NO: 2029733 - RNA, 12 nt, Human herpesvirus 5
acgguggugugu

SEQ ID NO: 2029734 - RNA, 15 nt, Human herpesvirus 5
caauugcaugucgcc

SEQ ID NO: 2029735 - RNA, 15 nt, Human herpesvirus 5
ggcucuacagugggu

SEQ ID NO: 2029736 - RNA, 14 nt, Human herpesvirus 5
cgcaguugcugccu

SEQ ID NO: 2029737 - RNA, 21 nt, Human herpesvirus 5
cggaggaggugaccuggcugc

SEQ ID NO: 2029738 - RNA, 19 nt, Human herpesvirus 5
gcgcgucaucggcaccauc

SEQ ID NO: 2029739 - RNA, 16 nt, Human herpesvirus 5
gcaggccgcgcaggcc

SEQ ID NO: 2029740 - RNA, 15 nt, Human herpesvirus 5
gucguggaggcagcg

SEQ ID NO: 2029741 - RNA, 15 nt, Human herpesvirus 5
acgcugacguggugc

SEQ ID NO: 2029742 - RNA, 15 nt, Human herpesvirus 5
cggccgcggaggugc

SEQ ID NO: 2029743 - RNA, 16 nt, Human herpesvirus 5
cguugggucugcgcug

SEQ ID NO: 2029744 - RNA, 17 nt, Human herpesvirus 5
cgccggcguugccgcca

SEQ ID NO: 2029745 - RNA, 22 nt, Human herpesvirus 5
cugcagguacggcccggcagca

SEQ ID NO: 2029746 - RNA, 19 nt, Human herpesvirus 5
caugaugaagauggccauc

SEQ ID NO: 2029747 - RNA, 22 nt, Human herpesvirus 5
agccaggugaccagcaguauga

SEQ ID NO: 2029748 - RNA, 17 nt, Human herpesvirus 5
cacacaggccagcugcc

SEQ ID NO: 2029749 - RNA, 15 nt, Human herpesvirus 5
ccaguaccaccgcug

SEQ ID NO: 2029750 - RNA, 20 nt, Human herpesvirus 5
cagaccgcaacaacagcagc

SEQ ID NO: 2029751 - RNA, 13 nt, Human herpesvirus 5
cuuggcggccgag

SEQ ID NO: 2029752 - RNA, 17 nt, Human herpesvirus 5
cucugucggcgccgccg

SEQ ID NO: 2029753 - RNA, 16 nt, Human herpesvirus 5
ccgccgucaccaccgc

SEQ ID NO: 2029754 - RNA, 14 nt, Human herpesvirus 5
accgucgcccucag

SEQ ID NO: 2029755 - RNA, 16 nt, Human herpesvirus 5
agcucccgcgguccga

SEQ ID NO: 2029756 - RNA, 13 nt, Human herpesvirus 5
ccgccacaccugu

SEQ ID NO: 2029757 - RNA, 19 nt, Human herpesvirus 5
ucauauaaaagucuguaua

SEQ ID NO: 2029758 - RNA, 14 nt, Human herpesvirus 5
cgagcuggccagca

SEQ ID NO: 2029759 - RNA, 20 nt, Human herpesvirus 5
ccauccuuuucaugcucaua

SEQ ID NO: 2029760 - RNA, 19 nt, Human herpesvirus 5
gccgcggugccggcggcua

SEQ ID NO: 2029761 - RNA, 21 nt, Human herpesvirus 5
ggcgauggcaaggugcugcac

SEQ ID NO: 2029762 - RNA, 21 nt, Human herpesvirus 5
uucacaaccguauauucuaca

SEQ ID NO: 2029763 - RNA, 14 nt, Human herpesvirus 5
ggcgugccgagcug

SEQ ID NO: 2029764 - RNA, 19 nt, Human herpesvirus 5
guaguauuuuuucauaguu

SEQ ID NO: 2029765 - RNA, 17 nt, Human herpesvirus 5
cuacggaguuuucccuc

SEQ ID NO: 2029766 - RNA, 15 nt, Human herpesvirus 5
gacgaagaggacacc

SEQ ID NO: 2029767 - RNA, 15 nt, Human herpesvirus 5
ucaacaaacagcucu

SEQ ID NO: 2029768 - RNA, 12 nt, Human herpesvirus 5
cccguggcccag

SEQ ID NO: 2029769 - RNA, 21 nt, Human herpesvirus 5
caccgguuggagcagcucuuu

SEQ ID NO: 2029770 - RNA, 16 nt, Human herpesvirus 5
gacuuagaaucucuug

SEQ ID NO: 2029771 - RNA, 12 nt, Human herpesvirus 5
ucugcuccccca

SEQ ID NO: 2029772 - RNA, 14 nt, Human herpesvirus 5
aauguugacccagg

SEQ ID NO: 2029773 - RNA, 12 nt, Human herpesvirus 5
aggccggcggcg

SEQ ID NO: 2029774 - RNA, 23 nt, Human herpesvirus 5
gcccgccggcgggcggcugccgg

SEQ ID NO: 2029775 - RNA, 18 nt, Human herpesvirus 5
uaaggaaaacgugacuuu

SEQ ID NO: 2029776 - RNA, 16 nt, Human herpesvirus 5
acggcgcucuuucagc

SEQ ID NO: 2029777 - RNA, 14 nt, Human herpesvirus 5
augggcuucccucc

SEQ ID NO: 2029778 - RNA, 17 nt, Human herpesvirus 5
guaacgccacggugcuu

SEQ ID NO: 2029779 - RNA, 13 nt, Human herpesvirus 5
ugaccaugggcua

SEQ ID NO: 2029780 - RNA, 13 nt, Human herpesvirus 5
aacaucuuaagaa

SEQ ID NO: 2029781 - RNA, 15 nt, Human herpesvirus 5
cuauguggcuccgcc

SEQ ID NO: 2029782 - RNA, 16 nt, Human herpesvirus 5
cacgggacccgccgcc

SEQ ID NO: 2029783 - RNA, 14 nt, Human herpesvirus 5
guccaucauguucg

SEQ ID NO: 2029784 - RNA, 13 nt, Human herpesvirus 5
gcugcugagacug

SEQ ID NO: 2029785 - RNA, 22 nt, Human herpesvirus 5
uugcuuuggcggcagcggaggu

SEQ ID NO: 2029786 - RNA, 13 nt, Human herpesvirus 5
gccgccuggaguc

SEQ ID NO: 2029787 - RNA, 14 nt, Human herpesvirus 5
cgacacagcagcac

SEQ ID NO: 2029788 - RNA, 21 nt, Human herpesvirus 5
gccugagcgcgcucagcuacc

SEQ ID NO: 2029789 - RNA, 18 nt, Human herpesvirus 5
cgacgucggucccaucgc

SEQ ID NO: 2029790 - RNA, 22 nt, Human herpesvirus 5
ucgcgagccccaucgggcccgc

SEQ ID NO: 2029791 - RNA, 18 nt, Human herpesvirus 5
gaugaccauguucagcuu

SEQ ID NO: 2029792 - RNA, 22 nt, Human herpesvirus 5
cguagaauacuggaagcugcug

SEQ ID NO: 2029793 - RNA, 18 nt, Human herpesvirus 5
gcgagaugaacuguucca

SEQ ID NO: 2029794 - RNA, 16 nt, Human herpesvirus 5
aaauuauaacggaaau

SEQ ID NO: 2029795 - RNA, 14 nt, Human herpesvirus 5
cugguauaaccagu

SEQ ID NO: 2029796 - RNA, 18 nt, Human herpesvirus 5
cgggugccgggacagcgu

SEQ ID NO: 2029797 - RNA, 19 nt, Human herpesvirus 5
ugccggcauguccggccgu

SEQ ID NO: 2029798 - RNA, 22 nt, Human herpesvirus 5
ugaaucuuccccucugcugcug

SEQ ID NO: 2029799 - RNA, 13 nt, Human herpesvirus 5
cgcgugucccugc

SEQ ID NO: 2029800 - RNA, 16 nt, Human herpesvirus 5
ucacccggcugcuggc

SEQ ID NO: 2029801 - RNA, 17 nt, Human herpesvirus 5
cugaaucugcuccagaa

SEQ ID NO: 2029802 - RNA, 17 nt, Human herpesvirus 5
ucgcgccuuccuccucu

SEQ ID NO: 2029803 - RNA, 15 nt, Human herpesvirus 5
aggagcuucuccccg

SEQ ID NO: 2029804 - RNA, 17 nt, Human herpesvirus 5
gggagacaaggugguga

SEQ ID NO: 2029805 - RNA, 19 nt, Human herpesvirus 5
gccaccaugcaucccacca

SEQ ID NO: 2029806 - RNA, 14 nt, Human herpesvirus 5
ugguuuuugcuucc

SEQ ID NO: 2029807 - RNA, 12 nt, Human herpesvirus 5
ggcagcacaccu

SEQ ID NO: 2029808 - RNA, 19 nt, Human herpesvirus 5
ggaagaaaccguguuucgc

SEQ ID NO: 2029809 - RNA, 21 nt, Human herpesvirus 5
acagacgccuauaaagaaacc

SEQ ID NO: 2029810 - RNA, 19 nt, Human herpesvirus 5
agccgcggugcaggccgcg

SEQ ID NO: 2029811 - RNA, 16 nt, Human herpesvirus 5
caacagcggcgacaga

SEQ ID NO: 2029812 - RNA, 13 nt, Human herpesvirus 5
ccuggagcagcgg

SEQ ID NO: 2029813 - RNA, 17 nt, Human herpesvirus 5
cuuugcuuaucugccuc

SEQ ID NO: 2029814 - RNA, 16 nt, Human herpesvirus 5
ucaccagacuuuuugc

SEQ ID NO: 2029815 - RNA, 18 nt, Human herpesvirus 5
gauaaccuaccugguguc

SEQ ID NO: 2029816 - RNA, 20 nt, Human herpesvirus 5
gccccgaagguuagcgccgc

SEQ ID NO: 2029817 - RNA, 23 nt, Human herpesvirus 5
cuuagacauuccccaccuucccu

SEQ ID NO: 2029818 - RNA, 11 nt, Human herpesvirus 5
gugcagcuggu

SEQ ID NO: 2029819 - RNA, 20 nt, Human herpesvirus 5
auguaucgcauaaagggugg

SEQ ID NO: 2029820 - RNA, 12 nt, Human herpesvirus 5
aaaaauacugac

SEQ ID NO: 2029821 - RNA, 14 nt, Human herpesvirus 5
cgcuaagagcuuug

SEQ ID NO: 2029822 - RNA, 18 nt, Human herpesvirus 5
acggcggcgcguugccac

SEQ ID NO: 2029823 - RNA, 20 nt, Human herpesvirus 5
auuagccccacaugcugcuu

SEQ ID NO: 2029824 - RNA, 14 nt, Human herpesvirus 5
cacgagugggccag

SEQ ID NO: 2029825 - RNA, 14 nt, Human herpesvirus 5
acaucgcauaugac

SEQ ID NO: 2029826 - RNA, 12 nt, Human herpesvirus 5
ggaaucugggag

SEQ ID NO: 2029827 - RNA, 12 nt, Human herpesvirus 5
cggaagaagaag

SEQ ID NO: 2029828 - RNA, 12 nt, Human herpesvirus 5
cuggagguggcc

SEQ ID NO: 2029829 - RNA, 15 nt, Human herpesvirus 5
ggaggugaccuggcu

SEQ ID NO: 2029830 - RNA, 14 nt, Human herpesvirus 5
gacgcgccucaugg

SEQ ID NO: 2029831 - RNA, 16 nt, Human herpesvirus 5
augacacgaacgugac

SEQ ID NO: 2029832 - RNA, 16 nt, Human herpesvirus 5
gucgccgucacugcca

SEQ ID NO: 2029833 - RNA, 23 nt, Human herpesvirus 5
cugauuuugaugguuugugccuc

SEQ ID NO: 2029834 - RNA, 19 nt, Human herpesvirus 5
gucagacccacuaccugga

SEQ ID NO: 2029835 - RNA, 12 nt, Human herpesvirus 5
cuggcagagcca

SEQ ID NO: 2029836 - RNA, 17 nt, Human herpesvirus 5
aacuacuaauacagaua

SEQ ID NO: 2029837 - RNA, 15 nt, Human herpesvirus 5
acccaucgcaccauc

SEQ ID NO: 2029838 - RNA, 14 nt, Human herpesvirus 5
cguagugagcuuug

SEQ ID NO: 2029839 - RNA, 14 nt, Human herpesvirus 5
gaugagauaaaagu

SEQ ID NO: 2029840 - RNA, 22 nt, Human herpesvirus 5
ccccacggcggcggccugcucg

SEQ ID NO: 2029841 - RNA, 19 nt, Human herpesvirus 5
gcugucguucuccgcuugc

SEQ ID NO: 2029842 - RNA, 13 nt, Human herpesvirus 5
gaugaaucaugug

SEQ ID NO: 2029843 - RNA, 23 nt, Human herpesvirus 5
gcgccacguagccgaugcugaug

SEQ ID NO: 2029844 - RNA, 20 nt, Human herpesvirus 5
caacguaacagcaaacgcua

SEQ ID NO: 2029845 - RNA, 19 nt, Human herpesvirus 5
gacggcagcuaucgugacu

SEQ ID NO: 2029846 - RNA, 17 nt, Human herpesvirus 5
gcacuucggucucgggc

SEQ ID NO: 2029847 - RNA, 23 nt, Human herpesvirus 5
gucaugggcgacuuucagggcau

SEQ ID NO: 2029848 - RNA, 15 nt, Human herpesvirus 5
ccucagucgccguca

SEQ ID NO: 2029849 - RNA, 15 nt, Human herpesvirus 5
uccacaaccugugga

SEQ ID NO: 2029850 - RNA, 16 nt, Human herpesvirus 5
ugcgacugcggcgacu

SEQ ID NO: 2029851 - RNA, 17 nt, Human herpesvirus 5
gcaaggucaacuacagc

SEQ ID NO: 2029852 - RNA, 13 nt, Human herpesvirus 5
aaagaaaaaagac

SEQ ID NO: 2029853 - RNA, 15 nt, Human herpesvirus 5
gcugguguugccgca

SEQ ID NO: 2029854 - RNA, 14 nt, Human herpesvirus 5
ucgaugugguucug

SEQ ID NO: 2029855 - RNA, 13 nt, Human herpesvirus 5
ccgugcugggcug

SEQ ID NO: 2029856 - RNA, 20 nt, Human herpesvirus 5
cugcgggcccacgguacgcc

SEQ ID NO: 2029857 - RNA, 20 nt, Human herpesvirus 5
ucuuuaaaaacacuggcugc

SEQ ID NO: 2029858 - RNA, 13 nt, Human herpesvirus 5
guauaugauuuug

SEQ ID NO: 2029859 - RNA, 13 nt, Human herpesvirus 5
aaaagcaccauga

SEQ ID NO: 2029860 - RNA, 22 nt, Human herpesvirus 5
guuguccucgcaccgggcuuug

SEQ ID NO: 2029861 - RNA, 19 nt, Human herpesvirus 5
uguuguagcaacuggcaaa

SEQ ID NO: 2029862 - RNA, 21 nt, Human herpesvirus 5
accgacgacgacagucuccuc

SEQ ID NO: 2029863 - RNA, 17 nt, Human herpesvirus 5
uacuucccccuccccuu

SEQ ID NO: 2029864 - RNA, 15 nt, Human herpesvirus 5
aaaauaauauacaca

SEQ ID NO: 2029865 - RNA, 23 nt, Human herpesvirus 5
accgcuacaacgcgcgccugacc

SEQ ID NO: 2029866 - RNA, 17 nt, Human herpesvirus 5
cacguagaucccacugg

SEQ ID NO: 2029867 - RNA, 13 nt, Human herpesvirus 5
gugcgggugcaug

SEQ ID NO: 2029868 - RNA, 13 nt, Human herpesvirus 5
cugcuccucggag

SEQ ID NO: 2029869 - RNA, 18 nt, Human herpesvirus 5
augaugaaucaugugguc

SEQ ID NO: 2029870 - RNA, 13 nt, Human herpesvirus 5
accgucagcugcg

SEQ ID NO: 2029871 - RNA, 19 nt, Human herpesvirus 5
cgcagugcguggccgcaca

SEQ ID NO: 2029872 - RNA, 18 nt, Human herpesvirus 5
cugagacugguggugaga

SEQ ID NO: 2029873 - RNA, 16 nt, Human herpesvirus 5
cauuacuaaacaaaaa

SEQ ID NO: 2029874 - RNA, 22 nt, Human herpesvirus 5
aaucugggagguggcugggcuc

SEQ ID NO: 2029875 - RNA, 19 nt, Human herpesvirus 5
cuuuuuuuaaccaauaaca

SEQ ID NO: 2029876 - RNA, 14 nt, Human herpesvirus 5
cagcgcccuggggc

SEQ ID NO: 2029877 - RNA, 16 nt, Human herpesvirus 5
aaugugcugcaugaga

SEQ ID NO: 2029878 - RNA, 16 nt, Human herpesvirus 5
ccguguucuuaaucuu

SEQ ID NO: 2029879 - RNA, 22 nt, Human herpesvirus 5
ccgcaacagcggcgacagacgg

SEQ ID NO: 2029880 - RNA, 12 nt, Human herpesvirus 5
gacgggccuggu

SEQ ID NO: 2029881 - RNA, 22 nt, Human herpesvirus 5
gaaccaagucuugccgugacgu

SEQ ID NO: 2029882 - RNA, 17 nt, Human herpesvirus 5
uuccgcgugcuccacca

SEQ ID NO: 2029883 - RNA, 13 nt, Human herpesvirus 5
cgaacggagcagg

SEQ ID NO: 2029884 - RNA, 16 nt, Human herpesvirus 5
uggcgguccaguggca

SEQ ID NO: 2029885 - RNA, 19 nt, Human herpesvirus 5
agugguggggcugcgucgc

SEQ ID NO: 2029886 - RNA, 18 nt, Human herpesvirus 5
uuguuagacuagcacaga

SEQ ID NO: 2029887 - RNA, 12 nt, Human herpesvirus 5
gccgugcucagc

SEQ ID NO: 2029888 - RNA, 16 nt, Human herpesvirus 5
cguccacacaccgcuu

SEQ ID NO: 2029889 - RNA, 13 nt, Human herpesvirus 5
gggcugggugcau

SEQ ID NO: 2029890 - RNA, 22 nt, Human herpesvirus 5
gggcugcaagguacggacucua

SEQ ID NO: 2029891 - RNA, 13 nt, Human herpesvirus 5
cugugcuggccgc

SEQ ID NO: 2029892 - RNA, 22 nt, Human herpesvirus 5
gaugaacuguuccacggccagc

SEQ ID NO: 2029893 - RNA, 22 nt, Human herpesvirus 5
gccguacccgccccagcagacc

SEQ ID NO: 2029894 - RNA, 17 nt, Human herpesvirus 5
cggugguuucgcuggga

SEQ ID NO: 2029895 - RNA, 20 nt, Human herpesvirus 5
acgguuacuccacaaccugu

SEQ ID NO: 2029896 - RNA, 20 nt, Human herpesvirus 5
aaguaccucuaacaacguca

SEQ ID NO: 2029897 - RNA, 19 nt, Human herpesvirus 5
guguacgccaucuucaucu

SEQ ID NO: 2029898 - RNA, 15 nt, Human herpesvirus 5
cagcuugcccgacca

SEQ ID NO: 2029899 - RNA, 21 nt, Human herpesvirus 5
ccccaucgggcccgccacugc

SEQ ID NO: 2029900 - RNA, 18 nt, Human herpesvirus 5
cgcguagccaccuguugg

SEQ ID NO: 2029901 - RNA, 19 nt, Human herpesvirus 5
cggccgcagaaggccauga

SEQ ID NO: 2029902 - RNA, 19 nt, Human herpesvirus 5
ccguaaccacgucgaccag

SEQ ID NO: 2029903 - RNA, 14 nt, Human herpesvirus 5
gaaggcaaagaaaa

SEQ ID NO: 2029904 - RNA, 15 nt, Human herpesvirus 5
agacgaagaggacac

SEQ ID NO: 2029905 - RNA, 17 nt, Human herpesvirus 5
acucccaccacgguuuc

SEQ ID NO: 2029906 - RNA, 15 nt, Human herpesvirus 5
gagcgcgagcgggca

SEQ ID NO: 2029907 - RNA, 17 nt, Human herpesvirus 5
cugcaccaggagggcuu

SEQ ID NO: 2029908 - RNA, 23 nt, Human herpesvirus 5
ggccgagacggcgugacacagca

SEQ ID NO: 2029909 - RNA, 21 nt, Human herpesvirus 5
cgugcucaagaggugagggua

SEQ ID NO: 2029910 - RNA, 20 nt, Human herpesvirus 5
gaauacuggaagcugcuggu

SEQ ID NO: 2029911 - RNA, 11 nt, Human herpesvirus 5
ggacaaguauu

SEQ ID NO: 2029912 - RNA, 20 nt, Human herpesvirus 5
accgugcccguuuucacagc

SEQ ID NO: 2029913 - RNA, 14 nt, Human herpesvirus 5
gcaucccaccacgg

SEQ ID NO: 2029914 - RNA, 20 nt, Human herpesvirus 5
ucugcgcgggcagcccaagu

SEQ ID NO: 2029915 - RNA, 21 nt, Human herpesvirus 5
gccugcgggcaggcggguugc

SEQ ID NO: 2029916 - RNA, 21 nt, Human herpesvirus 5
cggcggcgugaccggcggugc

SEQ ID NO: 2029917 - RNA, 15 nt, Human herpesvirus 5
cgcaggccgccgccg

SEQ ID NO: 2029918 - RNA, 15 nt, Human herpesvirus 5
guacccaccaccucc

SEQ ID NO: 2029919 - RNA, 20 nt, Human herpesvirus 5
cuagcuggcggccucuuuug

SEQ ID NO: 2029920 - RNA, 19 nt, Human herpesvirus 5
ggcgguacugaagccgccg

SEQ ID NO: 2029921 - RNA, 22 nt, Human herpesvirus 5
acagguagguggccaugaugac

SEQ ID NO: 2029922 - RNA, 14 nt, Human herpesvirus 5
ggaagcguccgcug

SEQ ID NO: 2029923 - RNA, 14 nt, Human herpesvirus 5
gccucauccuuaug

SEQ ID NO: 2029924 - RNA, 17 nt, Human herpesvirus 5
cgcggacacccgcggcc

SEQ ID NO: 2029925 - RNA, 22 nt, Human herpesvirus 5
acgaaccagcugguaccugaaa

SEQ ID NO: 2029926 - RNA, 20 nt, Human herpesvirus 5
ggcugcgcggguuucaggua

SEQ ID NO: 2029927 - RNA, 22 nt, Human herpesvirus 5
guggaucgucgcggacugccgg

SEQ ID NO: 2029928 - RNA, 14 nt, Human herpesvirus 5
guagcuagugcagc

SEQ ID NO: 2029929 - RNA, 16 nt, Human herpesvirus 5
caaggucaacuacagc

SEQ ID NO: 2029930 - RNA, 16 nt, Human herpesvirus 5
acggcaaggcggagga

SEQ ID NO: 2029931 - RNA, 21 nt, Human herpesvirus 5
aguacuucccaugcaacuucu

SEQ ID NO: 2029932 - RNA, 19 nt, Human herpesvirus 5
gaggaagucgaucuggaag

SEQ ID NO: 2029933 - RNA, 15 nt, Human herpesvirus 5
ccgugcucagcggcg

SEQ ID NO: 2029934 - RNA, 22 nt, Human herpesvirus 5
ggcuaacgcgcugcugcucucc

SEQ ID NO: 2029935 - RNA, 13 nt, Human herpesvirus 5
ugcuuagcugcac

SEQ ID NO: 2029936 - RNA, 16 nt, Human herpesvirus 5
ucccucguuacccccg

SEQ ID NO: 2029937 - RNA, 15 nt, Human herpesvirus 5
acgucacgccagacu

SEQ ID NO: 2029938 - RNA, 17 nt, Human herpesvirus 5
cgggcucguguggcagc

SEQ ID NO: 2029939 - RNA, 15 nt, Human herpesvirus 5
ccgccgacucgcugc

SEQ ID NO: 2029940 - RNA, 16 nt, Human herpesvirus 5
auauucaaucauuacu

SEQ ID NO: 2029941 - RNA, 22 nt, Human herpesvirus 5
accuccuccucccucgcgccgc

SEQ ID NO: 2029942 - RNA, 21 nt, Human herpesvirus 5
ccaccaaggcgacauggcccu

SEQ ID NO: 2029943 - RNA, 22 nt, Human herpesvirus 5
guuugcccgaagcggcuguggc

SEQ ID NO: 2029944 - RNA, 17 nt, Human herpesvirus 5
gguuugugccucugaaa

SEQ ID NO: 2029945 - RNA, 17 nt, Human herpesvirus 5
acgugauuuacgagguc

SEQ ID NO: 2029946 - RNA, 15 nt, Human herpesvirus 5
ccuguugcucuccuc

SEQ ID NO: 2029947 - RNA, 17 nt, Human herpesvirus 5
agggcugcucggcggcc

SEQ ID NO: 2029948 - RNA, 20 nt, Human herpesvirus 5
cgcaacagcggcgacagacg

SEQ ID NO: 2029949 - RNA, 13 nt, Human herpesvirus 5
uuuuaucuuuaaa

SEQ ID NO: 2029950 - RNA, 20 nt, Human herpesvirus 5
caacgacguuuaaaguaaau

SEQ ID NO: 2029951 - RNA, 13 nt, Human herpesvirus 5
gcggcgccgggaa

SEQ ID NO: 2029952 - RNA, 22 nt, Human herpesvirus 5
aggguuucaaguacccaccgau

SEQ ID NO: 2029953 - RNA, 19 nt, Human herpesvirus 5
gguaacgcuggcucacgcc

SEQ ID NO: 2029954 - RNA, 17 nt, Human herpesvirus 5
ccuugagcgacagcagc

SEQ ID NO: 2029955 - RNA, 17 nt, Human herpesvirus 5
cguagaauacuggaagc

SEQ ID NO: 2029956 - RNA, 22 nt, Human herpesvirus 5
ugccgccgcuguggcugccgcu

SEQ ID NO: 2029957 - RNA, 16 nt, Human herpesvirus 5
gaacccuucccgaccu

SEQ ID NO: 2029958 - RNA, 22 nt, Human herpesvirus 5
uuacucgagcuuauugagcgca

SEQ ID NO: 2029959 - RNA, 16 nt, Human herpesvirus 5
gucagagagucugaaa

SEQ ID NO: 2029960 - RNA, 21 nt, Human herpesvirus 5
accaucucacguacaggcaua

SEQ ID NO: 2029961 - RNA, 16 nt, Human herpesvirus 5
cgggacggccugggcg

SEQ ID NO: 2029962 - RNA, 11 nt, Human herpesvirus 5
uauucaacaau

SEQ ID NO: 2029963 - RNA, 15 nt, Human herpesvirus 5
ugcucuaaaaacacc

SEQ ID NO: 2029964 - RNA, 20 nt, Human herpesvirus 5
ugcggcccccagaggcccgc

SEQ ID NO: 2029965 - RNA, 13 nt, Human herpesvirus 5
gcacgacuggcca

SEQ ID NO: 2029966 - RNA, 21 nt, Human herpesvirus 5
cgagcuuauugagcgcagcca

SEQ ID NO: 2029967 - RNA, 15 nt, Human herpesvirus 5
cgggcgacagcacgu

SEQ ID NO: 2029968 - RNA, 20 nt, Human herpesvirus 5
ucaccguauggcugcgcgug

SEQ ID NO: 2029969 - RNA, 21 nt, Human herpesvirus 5
guuggaacccaucgaggaggc

SEQ ID NO: 2029970 - RNA, 22 nt, Human herpesvirus 5
gaguuggccucgauccauccug

SEQ ID NO: 2029971 - RNA, 15 nt, Human herpesvirus 5
ugcagcuuuugcacg

SEQ ID NO: 2029972 - RNA, 23 nt, Human herpesvirus 5
cccguauacgcgcuggaggcccu

SEQ ID NO: 2029973 - RNA, 23 nt, Human herpesvirus 5
cagcuaccgccgcaacagcggcg

SEQ ID NO: 2029974 - RNA, 13 nt, Human herpesvirus 5
ucaugucuuacaa

SEQ ID NO: 2029975 - RNA, 17 nt, Human herpesvirus 5
augccgaugugugacua

SEQ ID NO: 2029976 - RNA, 22 nt, Human herpesvirus 5
ggggaaaaucacgaaaggcacc

SEQ ID NO: 2029977 - RNA, 19 nt, Human herpesvirus 5
ucgcuccgcggucaggucc

SEQ ID NO: 2029978 - RNA, 13 nt, Human herpesvirus 5
ucuucuggcccuc

SEQ ID NO: 2029979 - RNA, 23 nt, Human herpesvirus 5
aggccgccgccgcucaggucgcc

SEQ ID NO: 2029980 - RNA, 16 nt, Human herpesvirus 5
acgacggaaauggcac

SEQ ID NO: 2029981 - RNA, 15 nt, Human herpesvirus 5
ucgcccagaaagaac

SEQ ID NO: 2029982 - RNA, 19 nt, Human herpesvirus 5
ccugucgucgacaugucgc

SEQ ID NO: 2029983 - RNA, 19 nt, Human herpesvirus 5
auccgcuacucccgagcuc

SEQ ID NO: 2029984 - RNA, 17 nt, Human herpesvirus 5
agcaggguaaaaaccac

SEQ ID NO: 2029985 - RNA, 15 nt, Human herpesvirus 5
ggcuaacgcgcugcu

SEQ ID NO: 2029986 - RNA, 16 nt, Human herpesvirus 5
ugcugauucgcgccgu

SEQ ID NO: 2029987 - RNA, 21 nt, Human herpesvirus 5
aagucacacaggccagcugcc

SEQ ID NO: 2029988 - RNA, 18 nt, Human herpesvirus 5
gacggccugggcgccccc

SEQ ID NO: 2029989 - RNA, 23 nt, Human herpesvirus 5
acacuuggugcucgaccaggagg

SEQ ID NO: 2029990 - RNA, 17 nt, Human herpesvirus 5
cucagcggcguguacag

SEQ ID NO: 2029991 - RNA, 17 nt, Human herpesvirus 5
gccuugagaaccugcuc

SEQ ID NO: 2029992 - RNA, 23 nt, Human herpesvirus 5
cuaucacgggcucguguggcagc

SEQ ID NO: 2029993 - RNA, 18 nt, Human herpesvirus 5
gugcgccguggugcuggg

SEQ ID NO: 2029994 - RNA, 14 nt, Human herpesvirus 5
gcacguggccuggc

SEQ ID NO: 2029995 - RNA, 22 nt, Human herpesvirus 5
ucgcgccuuccuccucugccug

SEQ ID NO: 2029996 - RNA, 19 nt, Human herpesvirus 5
uaaacccacgaccauuucc

SEQ ID NO: 2029997 - RNA, 14 nt, Human herpesvirus 5
uuaagcuggaccug

SEQ ID NO: 2029998 - RNA, 19 nt, Human herpesvirus 5
ugccagcccuauccuccau

SEQ ID NO: 2029999 - RNA, 18 nt, Human herpesvirus 5
accuucuugcccacgccg

SEQ ID NO: 2030000 - RNA, 19 nt, Human herpesvirus 5
gaguuggugcagcugcgcc

SEQ ID NO: 2030001 - RNA, 16 nt, Human herpesvirus 5
ccagcggccgcagugg

SEQ ID NO: 2030002 - RNA, 12 nt, Human herpesvirus 5
cccuucucuggu

SEQ ID NO: 2030003 - RNA, 14 nt, Human herpesvirus 5
ucuauguuauacuc

SEQ ID NO: 2030004 - RNA, 15 nt, Human herpesvirus 5
agauuucgcccgacu

SEQ ID NO: 2030005 - RNA, 20 nt, Human herpesvirus 5
cugagaacauguggaaauca

SEQ ID NO: 2030006 - RNA, 17 nt, Human herpesvirus 5
ccucauauacgguacac

SEQ ID NO: 2030007 - RNA, 23 nt, Human herpesvirus 5
cucggcgugcucaggccacccgc

SEQ ID NO: 2030008 - RNA, 22 nt, Human herpesvirus 5
cucacgucguugggaaugucca

SEQ ID NO: 2030009 - RNA, 20 nt, Human herpesvirus 5
cggccaacaaccacggcgaa

SEQ ID NO: 2030010 - RNA, 12 nt, Human herpesvirus 5
agcggccgccgg

SEQ ID NO: 2030011 - RNA, 22 nt, Human herpesvirus 5
ugcacccccgauaugggccgcu

SEQ ID NO: 2030012 - RNA, 18 nt, Human herpesvirus 5
gaggugaccuggcugcuu

SEQ ID NO: 2030013 - RNA, 14 nt, Human herpesvirus 5
uucggguuccgcgu

SEQ ID NO: 2030014 - RNA, 18 nt, Human herpesvirus 5
uccccggucgcuuaugcg

SEQ ID NO: 2030015 - RNA, 15 nt, Human herpesvirus 5
cucgacguuucugau

SEQ ID NO: 2030016 - RNA, 15 nt, Human herpesvirus 5
gcaccggcagcccau

SEQ ID NO: 2030017 - RNA, 13 nt, Human herpesvirus 5
gcgacggcagcgc

SEQ ID NO: 2030018 - RNA, 23 nt, Human herpesvirus 5
acgcugcuugguacccgaggucu

SEQ ID NO: 2030019 - RNA, 13 nt, Human herpesvirus 5
gccgcaagcggcg

SEQ ID NO: 2030020 - RNA, 14 nt, Human herpesvirus 5
uauagccaauaaag

SEQ ID NO: 2030021 - RNA, 16 nt, Human herpesvirus 5
aagcccguggcccagg

SEQ ID NO: 2030022 - RNA, 23 nt, Human herpesvirus 5
gcucgugcgugucgcugggcugg

SEQ ID NO: 2030023 - RNA, 17 nt, Human herpesvirus 5
uuccccgugacgugcaa

SEQ ID NO: 2030024 - RNA, 18 nt, Human herpesvirus 5
gcgcggucgccaccugga

SEQ ID NO: 2030025 - RNA, 15 nt, Human herpesvirus 5
ggucaaaagccuggg

SEQ ID NO: 2030026 - RNA, 14 nt, Human herpesvirus 5
agcacuaccagcug

SEQ ID NO: 2030027 - RNA, 14 nt, Human herpesvirus 5
cugaacaauaaacu

SEQ ID NO: 2030028 - RNA, 18 nt, Human herpesvirus 5
acggcgucuuccuccucg

SEQ ID NO: 2030029 - RNA, 13 nt, Human herpesvirus 5
cauaucgggcccu

SEQ ID NO: 2030030 - RNA, 14 nt, Human herpesvirus 5
cuccuccucccucg

SEQ ID NO: 2030031 - RNA, 14 nt, Human herpesvirus 5
cgcauccugcccac

SEQ ID NO: 2030032 - RNA, 16 nt, Human herpesvirus 5
caaagaagucucuuuc

SEQ ID NO: 2030033 - RNA, 15 nt, Human herpesvirus 5
gagcguaccagggaa

SEQ ID NO: 2030034 - RNA, 21 nt, Human herpesvirus 5
cguagccuccuccaccacggc

SEQ ID NO: 2030035 - RNA, 21 nt, Human herpesvirus 5
aacuugagcacaaaaauacug

SEQ ID NO: 2030036 - RNA, 18 nt, Human herpesvirus 5
ccgcggccgcugccgccg

SEQ ID NO: 2030037 - RNA, 13 nt, Human herpesvirus 5
gcaggccgcgcag

SEQ ID NO: 2030038 - RNA, 21 nt, Human herpesvirus 5
gccuuucugaccuugcugaug

SEQ ID NO: 2030039 - RNA, 12 nt, Human herpesvirus 5
acccuaaaacac

SEQ ID NO: 2030040 - RNA, 22 nt, Human herpesvirus 5
gaugagccccucagucuguuuc

SEQ ID NO: 2030041 - RNA, 23 nt, Human herpesvirus 5
caaucaaaccuguuccugucaau

SEQ ID NO: 2030042 - RNA, 20 nt, Human herpesvirus 5
gguguugccuucugcugccc

SEQ ID NO: 2030043 - RNA, 18 nt, Human herpesvirus 5
cuaacauuccccugggaa

SEQ ID NO: 2030044 - RNA, 18 nt, Human herpesvirus 5
agguacgggucuaccaaa

SEQ ID NO: 2030045 - RNA, 22 nt, Human herpesvirus 5
cgcaaugggcuucccuccugca

SEQ ID NO: 2030046 - RNA, 21 nt, Human herpesvirus 5
ugcuccucggagcacgggcga

SEQ ID NO: 2030047 - RNA, 20 nt, Human herpesvirus 5
gugaagagggugaaggcaaa

SEQ ID NO: 2030048 - RNA, 12 nt, Human herpesvirus 5
uaaaaaaaccac

SEQ ID NO: 2030049 - RNA, 19 nt, Human herpesvirus 5
acguuggcucucgcagccc

SEQ ID NO: 2030050 - RNA, 16 nt, Human herpesvirus 5
ugacgcugcuggccga

SEQ ID NO: 2030051 - RNA, 13 nt, Human herpesvirus 5
cuggcggccgugg

SEQ ID NO: 2030052 - RNA, 18 nt, Human herpesvirus 5
cacugccaacccagcagc

SEQ ID NO: 2030053 - RNA, 12 nt, Human herpesvirus 5
cgcagcugcugg

SEQ ID NO: 2030054 - RNA, 14 nt, Human herpesvirus 5
auuuuauugggaau

SEQ ID NO: 2030055 - RNA, 19 nt, Human herpesvirus 5
cugacaguucacggggaga

SEQ ID NO: 2030056 - RNA, 22 nt, Human herpesvirus 5
cagguacggcccggcagcacca

SEQ ID NO: 2030057 - RNA, 19 nt, Human herpesvirus 5
uagaacugaguuuagugcu

SEQ ID NO: 2030058 - RNA, 12 nt, Human herpesvirus 5
cacccgcggccg

SEQ ID NO: 2030059 - RNA, 13 nt, Human herpesvirus 5
cgcugaagcggau

SEQ ID NO: 2030060 - RNA, 11 nt, Human herpesvirus 5
gcuucuuuucu

SEQ ID NO: 2030061 - RNA, 12 nt, Human herpesvirus 5
cgacccaccgcc

SEQ ID NO: 2030062 - RNA, 17 nt, Human herpesvirus 5
cgguccuccagcagcag

SEQ ID NO: 2030063 - RNA, 15 nt, Human herpesvirus 5
cgccgaacagacuug

SEQ ID NO: 2030064 - RNA, 24 nt, Human herpesvirus 5
aucuguucuuccaccagcuacuuu

SEQ ID NO: 2030065 - RNA, 22 nt, Human herpesvirus 5
ucacacaggccagcugccacca

SEQ ID NO: 2030066 - RNA, 23 nt, Human herpesvirus 5
agcggcggcgguggugacugggg

SEQ ID NO: 2030067 - RNA, 20 nt, Human herpesvirus 5
acgagcuggacaaguacagc

SEQ ID NO: 2030068 - RNA, 20 nt, Human herpesvirus 5
ccugccuacgucuucaugac

SEQ ID NO: 2030069 - RNA, 17 nt, Human herpesvirus 5
uagaagcacccauuaca

SEQ ID NO: 2030070 - RNA, 14 nt, Human herpesvirus 5
caacagcgggucaa

SEQ ID NO: 2030071 - RNA, 15 nt, Human herpesvirus 5
aaaucuuaccacagu

SEQ ID NO: 2030072 - RNA, 21 nt, Human herpesvirus 5
gagucaccguaaucaccaaag

SEQ ID NO: 2030073 - RNA, 18 nt, Human herpesvirus 5
gcgcugcggucccgacau

SEQ ID NO: 2030074 - RNA, 17 nt, Human herpesvirus 5
gcuuccauaaacgcuuu

SEQ ID NO: 2030075 - RNA, 23 nt, Human herpesvirus 5
acaaggaagcguccgcuggaaau

SEQ ID NO: 2030076 - RNA, 15 nt, Human herpesvirus 5
acgcagucugcccug

SEQ ID NO: 2030077 - RNA, 23 nt, Human herpesvirus 5
accuguuggagcaacgggcggcc

SEQ ID NO: 2030078 - RNA, 18 nt, Human herpesvirus 5
ccgcgcccgucgcgcacg

SEQ ID NO: 2030079 - RNA, 23 nt, Human herpesvirus 5
auuaacaauuccacgccgcugcu

SEQ ID NO: 2030080 - RNA, 19 nt, Human herpesvirus 5
ccgcgccucacgcugcacg

SEQ ID NO: 2030081 - RNA, 15 nt, Human herpesvirus 5
uccaugugcagcugg

SEQ ID NO: 2030082 - RNA, 14 nt, Human herpesvirus 5
ccuguuccugcugc

SEQ ID NO: 2030083 - RNA, 16 nt, Human herpesvirus 5
acgcgcuggaggcccu

SEQ ID NO: 2030084 - RNA, 20 nt, Human herpesvirus 5
ccacgcucgagggcuccguc

SEQ ID NO: 2030085 - RNA, 14 nt, Human herpesvirus 5
gggcggucgacugg

SEQ ID NO: 2030086 - RNA, 13 nt, Human herpesvirus 5
cgcgacacccggg

SEQ ID NO: 2030087 - RNA, 15 nt, Human herpesvirus 5
aagacgucaaugaca

SEQ ID NO: 2030088 - RNA, 22 nt, Human herpesvirus 5
ggaagaagaagaacaagcggug

SEQ ID NO: 2030089 - RNA, 22 nt, Human herpesvirus 5
cgaguggugaggagcgccgggg

SEQ ID NO: 2030090 - RNA, 22 nt, Human herpesvirus 5
cgcggucauauagccuccggcu

SEQ ID NO: 2030091 - RNA, 21 nt, Human herpesvirus 5
gcagauucaguaaccuggagc

SEQ ID NO: 2030092 - RNA, 23 nt, Human herpesvirus 5
cgaaucgccggcuugcuccucuu

SEQ ID NO: 2030093 - RNA, 20 nt, Human herpesvirus 5
gugguggcuguaggcuaccg

SEQ ID NO: 2030094 - RNA, 14 nt, Human herpesvirus 5
acagcgucuggcca

SEQ ID NO: 2030095 - RNA, 18 nt, Human herpesvirus 5
aaacacgacgaaagcguu

SEQ ID NO: 2030096 - RNA, 22 nt, Human herpesvirus 5
ucgcuggaaagacaauaaacag

SEQ ID NO: 2030097 - RNA, 19 nt, Human herpesvirus 5
agcucuuccaaugguugaa

SEQ ID NO: 2030098 - RNA, 14 nt, Human herpesvirus 5
ccugcacgccgccg

SEQ ID NO: 2030099 - RNA, 12 nt, Human herpesvirus 5
uccgcuggaaau

SEQ ID NO: 2030100 - RNA, 20 nt, Human herpesvirus 5
ggcuugcuccucuuccaaau

SEQ ID NO: 2030101 - RNA, 22 nt, Human herpesvirus 5
uaucaucugucugcgagcaccu

SEQ ID NO: 2030102 - RNA, 15 nt, Human herpesvirus 5
cagcuccaaaacgac

SEQ ID NO: 2030103 - RNA, 20 nt, Human herpesvirus 5
ccggggagacaaggugguga

SEQ ID NO: 2030104 - RNA, 13 nt, Human herpesvirus 5
uacuucccccucc

SEQ ID NO: 2030105 - RNA, 16 nt, Human herpesvirus 5
ugggauggguguuuuu

SEQ ID NO: 2030106 - RNA, 13 nt, Human herpesvirus 5
uguguuugacauu

SEQ ID NO: 2030107 - RNA, 12 nt, Human herpesvirus 5
gggaggcgguga

SEQ ID NO: 2030108 - RNA, 18 nt, Human herpesvirus 5
ccgccggcacgucaguuu

SEQ ID NO: 2030109 - RNA, 14 nt, Human herpesvirus 5
ggugccgggacagc

SEQ ID NO: 2030110 - RNA, 22 nt, Human herpesvirus 5
caggugacauccucgcccaggc

SEQ ID NO: 2030111 - RNA, 23 nt, Human herpesvirus 5
ccagccuguuuaaugacaagugc

SEQ ID NO: 2030112 - RNA, 21 nt, Human herpesvirus 5
cucgguaaugcguguccagau

SEQ ID NO: 2030113 - RNA, 20 nt, Human herpesvirus 5
agccgugucgcgcacccggc

SEQ ID NO: 2030114 - RNA, 23 nt, Human herpesvirus 5
cggcgauggcggggcugguugcu

SEQ ID NO: 2030115 - RNA, 15 nt, Human herpesvirus 5
cgaacgcgacuggcg

SEQ ID NO: 2030116 - RNA, 13 nt, Human herpesvirus 5
cgccguuugcccg

SEQ ID NO: 2030117 - RNA, 15 nt, Human herpesvirus 5
gacgacucagggcug

SEQ ID NO: 2030118 - RNA, 14 nt, Human herpesvirus 5
uguuccuguccggu

SEQ ID NO: 2030119 - RNA, 15 nt, Human herpesvirus 5
uagcaaguccuccaa

SEQ ID NO: 2030120 - RNA, 15 nt, Human herpesvirus 5
ugcuggagcgcggcc

SEQ ID NO: 2030121 - RNA, 17 nt, Human herpesvirus 5
gccgagugggacggcaa

SEQ ID NO: 2030122 - RNA, 12 nt, Human herpesvirus 5
uguccgccccuc

SEQ ID NO: 2030123 - RNA, 20 nt, Human herpesvirus 5
gcacggcaucaugcugggcg

SEQ ID NO: 2030124 - RNA, 19 nt, Human herpesvirus 5
gucaucucauuugcuuuua

SEQ ID NO: 2030125 - RNA, 11 nt, Human herpesvirus 5
aaaauauguag

SEQ ID NO: 2030126 - RNA, 11 nt, Human herpesvirus 5
acgagcucuug

SEQ ID NO: 2030127 - RNA, 15 nt, Human herpesvirus 5
augugcucggaccgu

SEQ ID NO: 2030128 - RNA, 19 nt, Human herpesvirus 5
ggcggcggugguggaggag

SEQ ID NO: 2030129 - RNA, 16 nt, Human herpesvirus 5
cgaugcugcaaggccu

SEQ ID NO: 2030130 - RNA, 22 nt, Human herpesvirus 5
uaagugacguggauacuaguaa

SEQ ID NO: 2030131 - RNA, 13 nt, Human herpesvirus 5
gcagcagcuggug

SEQ ID NO: 2030132 - RNA, 20 nt, Human herpesvirus 5
aggcucucggaucugcggcu

SEQ ID NO: 2030133 - RNA, 10 nt, Human herpesvirus 5
gaugaaccuc

SEQ ID NO: 2030134 - RNA, 24 nt, Human herpesvirus 5
gcaggacgggauaucccagaggaa

SEQ ID NO: 2030135 - RNA, 18 nt, Human herpesvirus 5
agugcgccaagccaugca

SEQ ID NO: 2030136 - RNA, 14 nt, Human herpesvirus 5
ggcgcucuuucagc

SEQ ID NO: 2030137 - RNA, 14 nt, Human herpesvirus 5
gggcaacugcugcc

SEQ ID NO: 2030138 - RNA, 19 nt, Human herpesvirus 5
uagggaucauuuucuuggc

SEQ ID NO: 2030139 - RNA, 19 nt, Human herpesvirus 5
uggccgauccacgggccgc

SEQ ID NO: 2030140 - RNA, 23 nt, Human herpesvirus 5
cauccaucacaucacccaacacu

SEQ ID NO: 2030141 - RNA, 20 nt, Human herpesvirus 5
gggccgccaauuggcggcga

SEQ ID NO: 2030142 - RNA, 16 nt, Human herpesvirus 5
aauaaagucuggguuu

SEQ ID NO: 2030143 - RNA, 23 nt, Human herpesvirus 5
ccggcugcggcggcacucgcucc

SEQ ID NO: 2030144 - RNA, 14 nt, Human herpesvirus 5
gccuggacccacaa

SEQ ID NO: 2030145 - RNA, 13 nt, Human herpesvirus 5
ccuuuugcuggcu

SEQ ID NO: 2030146 - RNA, 19 nt, Human herpesvirus 5
ggagcgggucgccgaggcu

SEQ ID NO: 2030147 - RNA, 18 nt, Human herpesvirus 5
acuucagaaucuauaaau

SEQ ID NO: 2030148 - RNA, 22 nt, Human herpesvirus 5
gaacugucgucgccggaaggaa

SEQ ID NO: 2030149 - RNA, 19 nt, Human herpesvirus 5
cacuuuacauaaaaccacc

SEQ ID NO: 2030150 - RNA, 14 nt, Human herpesvirus 5
aggacgaggcaggg

SEQ ID NO: 2030151 - RNA, 20 nt, Human herpesvirus 5
cgaaucaccgucggcggggc

SEQ ID NO: 2030152 - RNA, 18 nt, Human herpesvirus 5
uggaggagaccauccuca

SEQ ID NO: 2030153 - RNA, 16 nt, Human herpesvirus 5
gggguacgcuaugugu

SEQ ID NO: 2030154 - RNA, 14 nt, Human herpesvirus 5
ccgucgccaccacc

SEQ ID NO: 2030155 - RNA, 14 nt, Human herpesvirus 5
cuaccaugcgcaac

SEQ ID NO: 2030156 - RNA, 15 nt, Human herpesvirus 5
uagacagacaggaca

SEQ ID NO: 2030157 - RNA, 15 nt, Human herpesvirus 5
cacgcugcacgaccu

SEQ ID NO: 2030158 - RNA, 19 nt, Human herpesvirus 5
cuuagucgagacuugcacg

SEQ ID NO: 2030159 - RNA, 14 nt, Human herpesvirus 5
cguguggcagcugg

SEQ ID NO: 2030160 - RNA, 20 nt, Human herpesvirus 5
gcaacaacgacgacuaugau

SEQ ID NO: 2030161 - RNA, 14 nt, Human herpesvirus 5
cagcggcgacagac

SEQ ID NO: 2030162 - RNA, 21 nt, Human herpesvirus 5
acuggggucaaaagccugggu

SEQ ID NO: 2030163 - RNA, 12 nt, Human herpesvirus 5
gcgcucccugcu

SEQ ID NO: 2030164 - RNA, 20 nt, Human herpesvirus 5
gaauaccguaaacauaauga

SEQ ID NO: 2030165 - RNA, 16 nt, Human herpesvirus 5
acaaccugugguguac

SEQ ID NO: 2030166 - RNA, 20 nt, Human herpesvirus 5
aacgacaguaguagcggcag

SEQ ID NO: 2030167 - RNA, 12 nt, Human herpesvirus 5
ucagagcaucaa

SEQ ID NO: 2030168 - RNA, 19 nt, Human herpesvirus 5
ggccgcacuggacgacguc

SEQ ID NO: 2030169 - RNA, 13 nt, Human herpesvirus 5
ugcugaucgccgu

SEQ ID NO: 2030170 - RNA, 18 nt, Human herpesvirus 5
cggcgaauggaucaucug

SEQ ID NO: 2030171 - RNA, 17 nt, Human herpesvirus 5
augcguguuaaacacua

SEQ ID NO: 2030172 - RNA, 14 nt, Human herpesvirus 5
gcagcagcuggugc

SEQ ID NO: 2030173 - RNA, 23 nt, Human herpesvirus 5
ucucguuguacgcauuacacagg

SEQ ID NO: 2030174 - RNA, 13 nt, Human herpesvirus 5
acaagguggugaa

SEQ ID NO: 2030175 - RNA, 14 nt, Human herpesvirus 5
uauaaagauucacu

SEQ ID NO: 2030176 - RNA, 22 nt, Human herpesvirus 5
gccugcacgccgccgugacugc

SEQ ID NO: 2030177 - RNA, 21 nt, Human herpesvirus 5
gccgccgaagccuggggcacc

SEQ ID NO: 2030178 - RNA, 16 nt, Human herpesvirus 5
caguagacagacagga

SEQ ID NO: 2030179 - RNA, 13 nt, Human herpesvirus 5
gcagcgaguugcu

SEQ ID NO: 2030180 - RNA, 17 nt, Human herpesvirus 5
cgccgggcggcuuccug

SEQ ID NO: 2030181 - RNA, 15 nt, Human herpesvirus 5
uggcaagaguucaaa

SEQ ID NO: 2030182 - RNA, 17 nt, Human herpesvirus 5
aagcuauaccaucaccu

SEQ ID NO: 2030183 - RNA, 22 nt, Human herpesvirus 5
ggcugagacaggacgaggcagg

SEQ ID NO: 2030184 - RNA, 19 nt, Human herpesvirus 5
cugcucgaccgcuggaggc

SEQ ID NO: 2030185 - RNA, 23 nt, Human herpesvirus 5
gacggucaccaucgugccgcucc

SEQ ID NO: 2030186 - RNA, 21 nt, Human herpesvirus 5
cuggcguucaccacgccggcc

SEQ ID NO: 2030187 - RNA, 17 nt, Human herpesvirus 5
uggggcaacugcugccu

SEQ ID NO: 2030188 - RNA, 13 nt, Human herpesvirus 5
aaaccgcuuucag

SEQ ID NO: 2030189 - RNA, 21 nt, Human herpesvirus 5
cuucuuugguaucuacaucag

SEQ ID NO: 2030190 - RNA, 12 nt, Human herpesvirus 5
augcguguccug

SEQ ID NO: 2030191 - RNA, 15 nt, Human herpesvirus 5
agcuguguauaguuu

SEQ ID NO: 2030192 - RNA, 18 nt, Human herpesvirus 5
ggugagggucguggcgcg

SEQ ID NO: 2030193 - RNA, 14 nt, Human herpesvirus 5
ucucagccucgucg

SEQ ID NO: 2030194 - RNA, 13 nt, Human herpesvirus 5
augagcgugcugc

SEQ ID NO: 2030195 - RNA, 18 nt, Human herpesvirus 5
ccuggccuucggcacgcu

SEQ ID NO: 2030196 - RNA, 14 nt, Human herpesvirus 5
uagcuacuuuggaa

SEQ ID NO: 2030197 - RNA, 13 nt, Human herpesvirus 5
cuuuaagcugcuc

SEQ ID NO: 2030198 - RNA, 15 nt, Human herpesvirus 5
cggcgcuucgagggc

SEQ ID NO: 2030199 - RNA, 20 nt, Human herpesvirus 5
gcuguacgucacgccagacu

SEQ ID NO: 2030200 - RNA, 22 nt, Human herpesvirus 5
gcgccucacgcugcacgaccug

SEQ ID NO: 2030201 - RNA, 14 nt, Human herpesvirus 5
acgcgccgggcggc

SEQ ID NO: 2030202 - RNA, 19 nt, Human herpesvirus 5
gauguaccugcagcucgaa

SEQ ID NO: 2030203 - RNA, 22 nt, Human herpesvirus 5
agucuagacaggguaacagccu

SEQ ID NO: 2030204 - RNA, 16 nt, Human herpesvirus 5
cgaggaggaggggccg

SEQ ID NO: 2030205 - RNA, 15 nt, Human herpesvirus 5
ccucgucgugcccgu

SEQ ID NO: 2030206 - RNA, 13 nt, Human herpesvirus 5
ugagguacugcag

SEQ ID NO: 2030207 - RNA, 14 nt, Human herpesvirus 5
cacuuuacauaaaa

SEQ ID NO: 2030208 - RNA, 23 nt, Human herpesvirus 5
cgggcucguguggcagcuggcuu

SEQ ID NO: 2030209 - RNA, 17 nt, Human herpesvirus 5
ugcacagcgucuggcca

SEQ ID NO: 2030210 - RNA, 16 nt, Human herpesvirus 5
gcacgcaccuguguga

SEQ ID NO: 2030211 - RNA, 15 nt, Human herpesvirus 5
cgcaccggcagcaca

SEQ ID NO: 2030212 - RNA, 15 nt, Human herpesvirus 5
aucugcaagucccug

SEQ ID NO: 2030213 - RNA, 19 nt, Human herpesvirus 5
cacagcgucgccacauugg

SEQ ID NO: 2030214 - RNA, 15 nt, Human herpesvirus 5
cauggucggugacau

SEQ ID NO: 2030215 - RNA, 13 nt, Human herpesvirus 5
ccgccgccgcccg

SEQ ID NO: 2030216 - RNA, 21 nt, Human herpesvirus 5
guaccugaaaccuaccugggc

SEQ ID NO: 2030217 - RNA, 15 nt, Human herpesvirus 5
ccauggagcugcacu

SEQ ID NO: 2030218 - RNA, 16 nt, Human herpesvirus 5
ucuugcgcccucucgg

SEQ ID NO: 2030219 - RNA, 20 nt, Human herpesvirus 5
ugcuccucggagcacgggcg

SEQ ID NO: 2030220 - RNA, 16 nt, Human herpesvirus 5
gcuucuuuucuggggu

SEQ ID NO: 2030221 - RNA, 18 nt, Human herpesvirus 5
cuucccgaccucccacga

SEQ ID NO: 2030222 - RNA, 19 nt, Human herpesvirus 5
ugggcgguggucggcugcc

SEQ ID NO: 2030223 - RNA, 15 nt, Human herpesvirus 5
uugaucugcugaaac

SEQ ID NO: 2030224 - RNA, 19 nt, Human herpesvirus 5
cgagaacuaauauugcaau

SEQ ID NO: 2030225 - RNA, 18 nt, Human herpesvirus 5
gggucguuguccuccucg

SEQ ID NO: 2030226 - RNA, 22 nt, Human herpesvirus 5
ucaccaccaucagcaaagcucc

SEQ ID NO: 2030227 - RNA, 17 nt, Human herpesvirus 5
caucauaaacuuaugau

SEQ ID NO: 2030228 - RNA, 21 nt, Human herpesvirus 5
cagcagcucgcgcuggcuuuc

SEQ ID NO: 2030229 - RNA, 14 nt, Human herpesvirus 5
ccaugcaucccacc

SEQ ID NO: 2030230 - RNA, 20 nt, Human herpesvirus 5
gccugccgaagaccucacca

SEQ ID NO: 2030231 - RNA, 20 nt, Human herpesvirus 5
ggugcuucuucuaccuggcu

SEQ ID NO: 2030232 - RNA, 14 nt, Human herpesvirus 5
gcuccgacgcagga

SEQ ID NO: 2030233 - RNA, 14 nt, Human herpesvirus 5
cgagaaaacuaaaa

SEQ ID NO: 2030234 - RNA, 13 nt, Human herpesvirus 5
cugcgcaggccgc

SEQ ID NO: 2030235 - RNA, 14 nt, Human herpesvirus 5
caucacgcaaagca

SEQ ID NO: 2030236 - RNA, 13 nt, Human herpesvirus 5
uaccgccccaccg

SEQ ID NO: 2030237 - RNA, 22 nt, Human herpesvirus 5
ccacgccggccugagcgcgcuc

SEQ ID NO: 2030238 - RNA, 14 nt, Human herpesvirus 5
cguugguggaaacu

SEQ ID NO: 2030239 - RNA, 20 nt, Human herpesvirus 5
gcugccgccgcuguggcugc

SEQ ID NO: 2030240 - RNA, 19 nt, Human herpesvirus 5
gcuauugggucacagccgc

SEQ ID NO: 2030241 - RNA, 17 nt, Human herpesvirus 5
uugagcgccuucugcua

SEQ ID NO: 2030242 - RNA, 14 nt, Human herpesvirus 5
acggccuguggugc

SEQ ID NO: 2030243 - RNA, 21 nt, Human herpesvirus 5
uuuuccguguugccgacggcg

SEQ ID NO: 2030244 - RNA, 21 nt, Human herpesvirus 5
ccgcaccgguuggagcagcuc

SEQ ID NO: 2030245 - RNA, 14 nt, Human herpesvirus 5
cugacacagcuccu

SEQ ID NO: 2030246 - RNA, 14 nt, Human herpesvirus 5
ugccucuacuugga

SEQ ID NO: 2030247 - RNA, 13 nt, Human herpesvirus 5
cgcauccugccca

SEQ ID NO: 2030248 - RNA, 20 nt, Human herpesvirus 5
acgucggcgguccuccagca

SEQ ID NO: 2030249 - RNA, 23 nt, Human herpesvirus 5
guaccuuaacaugaugaagaugg

SEQ ID NO: 2030250 - RNA, 23 nt, Human herpesvirus 5
cagccggagcccgcacacuggcu

SEQ ID NO: 2030251 - RNA, 15 nt, Human herpesvirus 5
ccuagcacgucagug

SEQ ID NO: 2030252 - RNA, 16 nt, Human herpesvirus 5
gcuaagagcuuugacg

SEQ ID NO: 2030253 - RNA, 15 nt, Human herpesvirus 5
cacgcggaugagcgu

SEQ ID NO: 2030254 - RNA, 18 nt, Human herpesvirus 5
gucgaacuauaccgggcg

SEQ ID NO: 2030255 - RNA, 19 nt, Human herpesvirus 5
cgagcaccggcgccugcug

SEQ ID NO: 2030256 - RNA, 15 nt, Human herpesvirus 5
cagcugcgccuggac

SEQ ID NO: 2030257 - RNA, 19 nt, Human herpesvirus 5
cuacggaguuuucccucag

SEQ ID NO: 2030258 - RNA, 15 nt, Human herpesvirus 5
gccgugguggccgug

SEQ ID NO: 2030259 - RNA, 19 nt, Human herpesvirus 5
caugaguuggugcagcugc

SEQ ID NO: 2030260 - RNA, 19 nt, Human herpesvirus 5
gggcacucggcugugccug

SEQ ID NO: 2030261 - RNA, 17 nt, Human herpesvirus 5
aggcucuguggacccug

SEQ ID NO: 2030262 - RNA, 22 nt, Human herpesvirus 5
aguuuaucgagcgcgcucuuga

SEQ ID NO: 2030263 - RNA, 20 nt, Human herpesvirus 5
guacacagccaaggugcggg

SEQ ID NO: 2030264 - RNA, 23 nt, Human herpesvirus 5
agcauacggggaggagacacaga

SEQ ID NO: 2030265 - RNA, 17 nt, Human herpesvirus 5
cugggagguggcugggc

SEQ ID NO: 2030266 - RNA, 17 nt, Human herpesvirus 5
ugaauugcgaagccagc

SEQ ID NO: 2030267 - RNA, 14 nt, Human herpesvirus 5
ggcgaagcgggaag

SEQ ID NO: 2030268 - RNA, 23 nt, Human herpesvirus 5
uauaagcguggauggucauauau

SEQ ID NO: 2030269 - RNA, 16 nt, Human herpesvirus 5
aucauuacuaaacaaa

SEQ ID NO: 2030270 - RNA, 15 nt, Human herpesvirus 5
cauuccccaccuucc

SEQ ID NO: 2030271 - RNA, 22 nt, Human herpesvirus 5
cacggcgccggugacccgcccc

SEQ ID NO: 2030272 - RNA, 12 nt, Human herpesvirus 5
aacaacgucacu

SEQ ID NO: 2030273 - RNA, 22 nt, Human herpesvirus 5
cagcaaccaccguuucuacaaa

SEQ ID NO: 2030274 - RNA, 14 nt, Human herpesvirus 5
cuccugcagcugca

SEQ ID NO: 2030275 - RNA, 21 nt, Human herpesvirus 5
gacgggccugguauacgaggc

SEQ ID NO: 2030276 - RNA, 15 nt, Human herpesvirus 5
caccccccgggccac

SEQ ID NO: 2030277 - RNA, 13 nt, Human herpesvirus 5
ccucuacuuggac

SEQ ID NO: 2030278 - RNA, 21 nt, Human herpesvirus 5
uccagauacgcgcugguucug

SEQ ID NO: 2030279 - RNA, 21 nt, Human herpesvirus 5
cggccugggcgcccccacccc

SEQ ID NO: 2030280 - RNA, 17 nt, Human herpesvirus 5
aggagccaaacugcgag

SEQ ID NO: 2030281 - RNA, 16 nt, Human herpesvirus 5
acugacacagcuccug

SEQ ID NO: 2030282 - RNA, 21 nt, Human herpesvirus 5
aagguugggagaugcggggug

SEQ ID NO: 2030283 - RNA, 15 nt, Human herpesvirus 5
gugacgcuaggcggc

SEQ ID NO: 2030284 - RNA, 15 nt, Human herpesvirus 5
gacguggaggagacc

SEQ ID NO: 2030285 - RNA, 21 nt, Human herpesvirus 5
gaugaaaaacaucuuaagaaa

SEQ ID NO: 2030286 - RNA, 15 nt, Human herpesvirus 5
cgcuucggcacccca

SEQ ID NO: 2030287 - RNA, 19 nt, Human herpesvirus 5
uacggcccggcagcaccau

SEQ ID NO: 2030288 - RNA, 13 nt, Human herpesvirus 5
gcagcccccgugg

SEQ ID NO: 2030289 - RNA, 20 nt, Human herpesvirus 5
acgugcuuggacugguacau

SEQ ID NO: 2030290 - RNA, 20 nt, Human herpesvirus 5
gaccagcgccaccauagcca

SEQ ID NO: 2030291 - RNA, 17 nt, Human herpesvirus 5
uguccucgcaccgggcu

SEQ ID NO: 2030292 - RNA, 22 nt, Human herpesvirus 5
gcauacggggaggagacacaga

SEQ ID NO: 2030293 - RNA, 15 nt, Human herpesvirus 5
cugccgcgguacgca

SEQ ID NO: 2030294 - RNA, 21 nt, Human herpesvirus 5
ggcuacguagcgcgugucccu

SEQ ID NO: 2030295 - RNA, 18 nt, Human herpesvirus 5
gaagucucuuucucugcu

SEQ ID NO: 2030296 - RNA, 23 nt, Human herpesvirus 5
ucagcggcguguacagcuaccuc

SEQ ID NO: 2030297 - RNA, 20 nt, Human herpesvirus 5
auauuugaaaauauggcaua

SEQ ID NO: 2030298 - RNA, 15 nt, Human herpesvirus 5
cgaggccggcggcgg

SEQ ID NO: 2030299 - RNA, 14 nt, Human herpesvirus 5
acgugcgaccugga

SEQ ID NO: 2030300 - RNA, 13 nt, Human herpesvirus 5
ccucacacugacg

SEQ ID NO: 2030301 - RNA, 16 nt, Human herpesvirus 5
acugucggggcgcaga

SEQ ID NO: 2030302 - RNA, 18 nt, Human herpesvirus 5
ugucuaagagauccuggg

SEQ ID NO: 2030303 - RNA, 16 nt, Human herpesvirus 5
uagccuuucugaccuu

SEQ ID NO: 2030304 - RNA, 20 nt, Human herpesvirus 5
uaguggucuuucacaucgcc

SEQ ID NO: 2030305 - RNA, 17 nt, Human herpesvirus 5
uggucggugacaucacc

SEQ ID NO: 2030306 - RNA, 16 nt, Human herpesvirus 5
gcaagccgagcgggag

SEQ ID NO: 2030307 - RNA, 14 nt, Human herpesvirus 5
uuacugccugccgc

SEQ ID NO: 2030308 - RNA, 16 nt, Human herpesvirus 5
cguacgauacacccug

SEQ ID NO: 2030309 - RNA, 13 nt, Human herpesvirus 5
cgguccuccagca

SEQ ID NO: 2030310 - RNA, 23 nt, Human herpesvirus 5
gcuacagccacgaccaagugucu

SEQ ID NO: 2030311 - RNA, 11 nt, Human herpesvirus 5
agcgccgccgc

SEQ ID NO: 2030312 - RNA, 15 nt, Human herpesvirus 5
gucggccugggcugc

SEQ ID NO: 2030313 - RNA, 17 nt, Human herpesvirus 5
gucaggcgcugcucuca

SEQ ID NO: 2030314 - RNA, 15 nt, Human herpesvirus 5
gcggauaggcaccug

SEQ ID NO: 2030315 - RNA, 15 nt, Human herpesvirus 5
uucaugucuuacaaa

SEQ ID NO: 2030316 - RNA, 14 nt, Human herpesvirus 5
gaagcgguggagga

SEQ ID NO: 2030317 - RNA, 18 nt, Human herpesvirus 5
aagcgccgcggcagcacc

SEQ ID NO: 2030318 - RNA, 15 nt, Human herpesvirus 5
ggcugccuguuccug

SEQ ID NO: 2030319 - RNA, 16 nt, Human herpesvirus 5
aggagcugcugcucgg

SEQ ID NO: 2030320 - RNA, 17 nt, Human herpesvirus 5
cacgucaccgugcccca

SEQ ID NO: 2030321 - RNA, 18 nt, Human herpesvirus 5
auuaaaaagcuguaaggu

SEQ ID NO: 2030322 - RNA, 13 nt, Human herpesvirus 5
acgacgacgcgcc

SEQ ID NO: 2030323 - RNA, 17 nt, Human herpesvirus 5
uccugcugcgcaucuac

SEQ ID NO: 2030324 - RNA, 12 nt, Human herpesvirus 5
agacggccugga

SEQ ID NO: 2030325 - RNA, 21 nt, Human herpesvirus 5
agcagcaucuggcgcggucug

SEQ ID NO: 2030326 - RNA, 23 nt, Human herpesvirus 5
guuccagaccagcgccaccauag

SEQ ID NO: 2030327 - RNA, 17 nt, Human herpesvirus 5
gccaccaugcaucccac

SEQ ID NO: 2030328 - RNA, 17 nt, Human herpesvirus 5
ccggaggacgacagcuc

SEQ ID NO: 2030329 - RNA, 16 nt, Human herpesvirus 5
cagcagcagcuggugc

SEQ ID NO: 2030330 - RNA, 11 nt, Human herpesvirus 5
acguggccugg

SEQ ID NO: 2030331 - RNA, 18 nt, Human herpesvirus 5
cuuugagcacaaacugcg

SEQ ID NO: 2030332 - RNA, 18 nt, Human herpesvirus 5
ggagaaaaguggcagaua

SEQ ID NO: 2030333 - RNA, 17 nt, Human herpesvirus 5
ccagcccuauccuccau

SEQ ID NO: 2030334 - RNA, 20 nt, Human herpesvirus 5
aaacgguacgcagucacugc

SEQ ID NO: 2030335 - RNA, 14 nt, Human herpesvirus 5
uggcagcuggcuug

SEQ ID NO: 2030336 - RNA, 16 nt, Human herpesvirus 5
ccgcagcugcuggagc

SEQ ID NO: 2030337 - RNA, 17 nt, Human herpesvirus 5
cggaagaagaagaacaa

SEQ ID NO: 2030338 - RNA, 14 nt, Human herpesvirus 5
uguucucccaggac

SEQ ID NO: 2030339 - RNA, 15 nt, Human herpesvirus 5
ugucgagcugguuaa

SEQ ID NO: 2030340 - RNA, 13 nt, Human herpesvirus 5
uggcucagcuuga

SEQ ID NO: 2030341 - RNA, 21 nt, Human herpesvirus 5
uguucuuacaguuuucaugua

SEQ ID NO: 2030342 - RNA, 21 nt, Human herpesvirus 5
ccaccgagacgugcgaccugg

SEQ ID NO: 2030343 - RNA, 20 nt, Human herpesvirus 5
aaccacgaguaacaccguca

SEQ ID NO: 2030344 - RNA, 13 nt, Human herpesvirus 5
ugcuccaacuuug

SEQ ID NO: 2030345 - RNA, 13 nt, Human herpesvirus 5
caggccagcugcc

SEQ ID NO: 2030346 - RNA, 21 nt, Human herpesvirus 5
gcucccugcuccgcaagcgcc

SEQ ID NO: 2030347 - RNA, 24 nt, Human herpesvirus 5
uacauugcccuucuggagcacacu

SEQ ID NO: 2030348 - RNA, 23 nt, Human herpesvirus 5
cgucgccacauuggugaaggccg

SEQ ID NO: 2030349 - RNA, 20 nt, Human herpesvirus 5
aagaaacccucaaaacauca

SEQ ID NO: 2030350 - RNA, 14 nt, Human herpesvirus 5
gacaccucaauguu

SEQ ID NO: 2030351 - RNA, 17 nt, Human herpesvirus 5
guuauguccgcucgugu

SEQ ID NO: 2030352 - RNA, 20 nt, Human herpesvirus 5
gcuacgcgaccagcugcugg

SEQ ID NO: 2030353 - RNA, 16 nt, Human herpesvirus 5
uguggcuguuguugac

SEQ ID NO: 2030354 - RNA, 15 nt, Human herpesvirus 5
ccuugagcgacagca

SEQ ID NO: 2030355 - RNA, 13 nt, Human herpesvirus 5
auuuuugggcaua

SEQ ID NO: 2030356 - RNA, 17 nt, Human herpesvirus 5
cccgaccacgacacggu

SEQ ID NO: 2030357 - RNA, 14 nt, Human herpesvirus 5
gggagucaacacua

SEQ ID NO: 2030358 - RNA, 18 nt, Human herpesvirus 5
ucguacgacgucugcuca

SEQ ID NO: 2030359 - RNA, 15 nt, Human herpesvirus 5
gccgugcugggcugg

SEQ ID NO: 2030360 - RNA, 16 nt, Human herpesvirus 5
agcguauccuggucaa

SEQ ID NO: 2030361 - RNA, 14 nt, Human herpesvirus 5
acaaguauuuauga

SEQ ID NO: 2030362 - RNA, 19 nt, Human herpesvirus 5
cgccgccaacgcgagcugg

SEQ ID NO: 2030363 - RNA, 19 nt, Human herpesvirus 5
agccaccgacacagcagca

SEQ ID NO: 2030364 - RNA, 23 nt, Human herpesvirus 5
cgagcaucgcaacaacagcaaca

SEQ ID NO: 2030365 - RNA, 20 nt, Human herpesvirus 5
ugugcuuuuuaucagggaga

SEQ ID NO: 2030366 - RNA, 16 nt, Human herpesvirus 5
ucagucuauucucaac

SEQ ID NO: 2030367 - RNA, 11 nt, Human herpesvirus 5
uccagccagca

SEQ ID NO: 2030368 - RNA, 15 nt, Human herpesvirus 5
ccugagaacaugugg

SEQ ID NO: 2030369 - RNA, 19 nt, Human herpesvirus 5
gucaauaaagaaaaccaca

SEQ ID NO: 2030370 - RNA, 13 nt, Human herpesvirus 5
ccaccgacacagc

SEQ ID NO: 2030371 - RNA, 21 nt, Human herpesvirus 5
cguuagagaaagagcagcgcg

SEQ ID NO: 2030372 - RNA, 20 nt, Human herpesvirus 5
cugggcgaccgucucuacca

SEQ ID NO: 2030373 - RNA, 21 nt, Human herpesvirus 5
ucacggcggcguguguuuuau

SEQ ID NO: 2030374 - RNA, 18 nt, Human herpesvirus 5
acaaccuguggaauaccc

SEQ ID NO: 2030375 - RNA, 15 nt, Human herpesvirus 5
gcgagcuggccagca

SEQ ID NO: 2030376 - RNA, 22 nt, Human herpesvirus 5
cgcggucgccgcgucagcggcc

SEQ ID NO: 2030377 - RNA, 22 nt, Human herpesvirus 5
uggcugcgccuccucgucggcc

SEQ ID NO: 2030378 - RNA, 23 nt, Human herpesvirus 5
cugccggucuacagacugggcga

SEQ ID NO: 2030379 - RNA, 15 nt, Human herpesvirus 5
ugcggcugugucggg

SEQ ID NO: 2030380 - RNA, 18 nt, Human herpesvirus 5
cuccaccgagacgcucac

SEQ ID NO: 2030381 - RNA, 22 nt, Human herpesvirus 5
cacacguguggaagacauggcg

SEQ ID NO: 2030382 - RNA, 14 nt, Human herpesvirus 5
uguugaucugcuga

SEQ ID NO: 2030383 - RNA, 12 nt, Human herpesvirus 5
gcggugucuccu

SEQ ID NO: 2030384 - RNA, 15 nt, Human herpesvirus 5
guccccuucugugga

SEQ ID NO: 2030385 - RNA, 21 nt, Human herpesvirus 5
cggcagauuuguucgggguga

SEQ ID NO: 2030386 - RNA, 14 nt, Human herpesvirus 5
cggcgccccacagc

SEQ ID NO: 2030387 - RNA, 15 nt, Human herpesvirus 5
gauacuaguaaaagg

SEQ ID NO: 2030388 - RNA, 16 nt, Human herpesvirus 5
cccacgguggccaaca

SEQ ID NO: 2030389 - RNA, 14 nt, Human herpesvirus 5
ggaacauguccugg

SEQ ID NO: 2030390 - RNA, 16 nt, Human herpesvirus 5
accgcaacaacagcag

SEQ ID NO: 2030391 - RNA, 17 nt, Human herpesvirus 5
uguggcaaguuggccac

SEQ ID NO: 2030392 - RNA, 18 nt, Human herpesvirus 5
ucaugaguuggugcagcu

SEQ ID NO: 2030393 - RNA, 20 nt, Human herpesvirus 5
gcgacggcggguggagauga

SEQ ID NO: 2030394 - RNA, 18 nt, Human herpesvirus 5
gcuggaggcccuggugga

SEQ ID NO: 2030395 - RNA, 17 nt, Human herpesvirus 5
cgguguuucggcucccg

SEQ ID NO: 2030396 - RNA, 20 nt, Human herpesvirus 5
gcaacaacagucgcagcccc

SEQ ID NO: 2030397 - RNA, 18 nt, Human herpesvirus 5
aggugggguggcucuugc

SEQ ID NO: 2030398 - RNA, 21 nt, Human herpesvirus 5
cucuggaugguacgucucuac

SEQ ID NO: 2030399 - RNA, 14 nt, Human herpesvirus 5
ccgugccagcuggc

SEQ ID NO: 2030400 - RNA, 19 nt, Human herpesvirus 5
cacgucgauucccaucuca

SEQ ID NO: 2030401 - RNA, 16 nt, Human herpesvirus 5
ugccuguuccugcugc

SEQ ID NO: 2030402 - RNA, 13 nt, Human herpesvirus 5
uaugagggccugc

SEQ ID NO: 2030403 - RNA, 17 nt, Human herpesvirus 5
ggucugcuugcuggcuu

SEQ ID NO: 2030404 - RNA, 17 nt, Human herpesvirus 5
cgugugacguggauacu

SEQ ID NO: 2030405 - RNA, 18 nt, Human herpesvirus 5
ccacgguacgccaguagc

SEQ ID NO: 2030406 - RNA, 20 nt, Human herpesvirus 5
ggaggagugucagacacagc

SEQ ID NO: 2030407 - RNA, 14 nt, Human herpesvirus 5
uggaugagggcucu

SEQ ID NO: 2030408 - RNA, 18 nt, Human herpesvirus 5
agacauggcgacuuuccg

SEQ ID NO: 2030409 - RNA, 16 nt, Human herpesvirus 5
augaaucuuccccucu

SEQ ID NO: 2030410 - RNA, 13 nt, Human herpesvirus 5
aagcuugguacac

SEQ ID NO: 2030411 - RNA, 18 nt, Human herpesvirus 5
cagcagcaacagcagcca

SEQ ID NO: 2030412 - RNA, 14 nt, Human herpesvirus 5
gcaucaugugccuc

SEQ ID NO: 2030413 - RNA, 18 nt, Human herpesvirus 5
uucgcgauccgcucacca

SEQ ID NO: 2030414 - RNA, 20 nt, Human herpesvirus 5
cuagccuuucugaccuugcu

SEQ ID NO: 2030415 - RNA, 22 nt, Human herpesvirus 5
ggccauaagaaagagaaacccc

SEQ ID NO: 2030416 - RNA, 14 nt, Human herpesvirus 5
ccacgcugcuucac

SEQ ID NO: 2030417 - RNA, 15 nt, Human herpesvirus 5
cgcacauauguagca

SEQ ID NO: 2030418 - RNA, 13 nt, Human herpesvirus 5
uagcgggcuguca

SEQ ID NO: 2030419 - RNA, 14 nt, Human herpesvirus 5
ugguggcucaugcc

SEQ ID NO: 2030420 - RNA, 15 nt, Human herpesvirus 5
ccguuagccugguca

SEQ ID NO: 2030421 - RNA, 16 nt, Human herpesvirus 5
ugacggggcugggugg

SEQ ID NO: 2030422 - RNA, 14 nt, Human herpesvirus 5
ucuccgagcccccg

SEQ ID NO: 2030423 - RNA, 22 nt, Human herpesvirus 5
guaccugaaaccuaccugggcu

SEQ ID NO: 2030424 - RNA, 15 nt, Human herpesvirus 5
gggcucgugcguguc

SEQ ID NO: 2030425 - RNA, 14 nt, Human herpesvirus 5
aaaaagcucccaug

SEQ ID NO: 2030426 - RNA, 15 nt, Human herpesvirus 5
ccucuaucugcgcca

SEQ ID NO: 2030427 - RNA, 21 nt, Human herpesvirus 5
gcucguguggcagcuggcuug

SEQ ID NO: 2030428 - RNA, 13 nt, Human herpesvirus 5
guguccucggugc

SEQ ID NO: 2030429 - RNA, 18 nt, Human herpesvirus 5
accgccgccgagaaaguc

SEQ ID NO: 2030430 - RNA, 17 nt, Human herpesvirus 5
caauguuacacauuacu

SEQ ID NO: 2030431 - RNA, 20 nt, Human herpesvirus 5
auagguguggcgaaagccuc

SEQ ID NO: 2030432 - RNA, 23 nt, Human herpesvirus 5
cuggguaucaaccccgcggcuga

SEQ ID NO: 2030433 - RNA, 21 nt, Human herpesvirus 5
cccguggaucagccgccgccu

SEQ ID NO: 2030434 - RNA, 18 nt, Human herpesvirus 5
uucggccggcugcugcac

SEQ ID NO: 2030435 - RNA, 23 nt, Human herpesvirus 5
gcggaagauaccgucggcgccgc

SEQ ID NO: 2030436 - RNA, 13 nt, Human herpesvirus 5
acgaaaggcaccg

SEQ ID NO: 2030437 - RNA, 14 nt, Human herpesvirus 5
guguaggcgacugg

SEQ ID NO: 2030438 - RNA, 20 nt, Human herpesvirus 5
gccuugcgcucccugcuccg

SEQ ID NO: 2030439 - RNA, 20 nt, Human herpesvirus 5
gucaaggccgccucuucugg

SEQ ID NO: 2030440 - RNA, 13 nt, Human herpesvirus 5
ccccaccuucccu

SEQ ID NO: 2030441 - RNA, 15 nt, Human herpesvirus 5
cuaaagcucgccaac

SEQ ID NO: 2030442 - RNA, 15 nt, Human herpesvirus 5
ucgggcccgccacug

SEQ ID NO: 2030443 - RNA, 16 nt, Human herpesvirus 5
cauggggagaaaagag

SEQ ID NO: 2030444 - RNA, 18 nt, Human herpesvirus 5
ugcacuuccuguacacau

SEQ ID NO: 2030445 - RNA, 15 nt, Human herpesvirus 5
ucggaagcuguuuug

SEQ ID NO: 2030446 - RNA, 19 nt, Human herpesvirus 5
gcgguucgcugacgaugag

SEQ ID NO: 2030447 - RNA, 13 nt, Human herpesvirus 5
cgcgaccuucccu

SEQ ID NO: 2030448 - RNA, 18 nt, Human herpesvirus 5
gguuauggauaugaggaa

SEQ ID NO: 2030449 - RNA, 19 nt, Human herpesvirus 5
ccacgcucgagggcuccgu

SEQ ID NO: 2030450 - RNA, 15 nt, Human herpesvirus 5
gacggcuccaagaaa

SEQ ID NO: 2030451 - RNA, 15 nt, Human herpesvirus 5
cuacguacgauacac

SEQ ID NO: 2030452 - RNA, 17 nt, Human herpesvirus 5
agccaggugaccagcag

SEQ ID NO: 2030453 - RNA, 15 nt, Human herpesvirus 5
ucuugacuggccgga

SEQ ID NO: 2030454 - RNA, 17 nt, Human herpesvirus 5
cacaaccguauauucua

SEQ ID NO: 2030455 - RNA, 15 nt, Human herpesvirus 5
aaccagauacaacgu

SEQ ID NO: 2030456 - RNA, 14 nt, Human herpesvirus 5
ccgaggcggaggag

SEQ ID NO: 2030457 - RNA, 20 nt, Human herpesvirus 5
ccucuacaaacuagcauucu

SEQ ID NO: 2030458 - RNA, 15 nt, Human herpesvirus 5
ggagagccgcacaga

SEQ ID NO: 2030459 - RNA, 16 nt, Human herpesvirus 5
aucgaggaggccgcac

SEQ ID NO: 2030460 - RNA, 16 nt, Human herpesvirus 5
acgacgcgccccccac

SEQ ID NO: 2030461 - RNA, 14 nt, Human herpesvirus 5
uccugguuuuucau

SEQ ID NO: 2030462 - RNA, 15 nt, Human herpesvirus 5
ccgcaguuacaccac

SEQ ID NO: 2030463 - RNA, 12 nt, Human herpesvirus 5
ugcgcugcagcc

SEQ ID NO: 2030464 - RNA, 22 nt, Human herpesvirus 5
ugcccgaccacgacacggugcu

SEQ ID NO: 2030465 - RNA, 11 nt, Human herpesvirus 5
guuuucuaguu

SEQ ID NO: 2030466 - RNA, 13 nt, Human herpesvirus 5
acaugaggaagcg

SEQ ID NO: 2030467 - RNA, 15 nt, Human herpesvirus 5
gaccgcaacgugcug

SEQ ID NO: 2030468 - RNA, 22 nt, Human herpesvirus 5
ggagcuacgcgaccagcugcug

SEQ ID NO: 2030469 - RNA, 20 nt, Human herpesvirus 5
cugucuaacuagccuucccg

SEQ ID NO: 2030470 - RNA, 21 nt, Human herpesvirus 5
cugggagagccgcacagacca

SEQ ID NO: 2030471 - RNA, 13 nt, Human herpesvirus 5
acagcagcaacag

SEQ ID NO: 2030472 - RNA, 15 nt, Human herpesvirus 5
gucgcuauacaccaa

SEQ ID NO: 2030473 - RNA, 13 nt, Human herpesvirus 5
ucgcggacgaaag

SEQ ID NO: 2030474 - RNA, 22 nt, Human herpesvirus 5
cuacauauuuuccauaaaucua

SEQ ID NO: 2030475 - RNA, 17 nt, Human herpesvirus 5
gccucuacacuuggugc

SEQ ID NO: 2030476 - RNA, 13 nt, Human herpesvirus 5
ccccucgcugggc

SEQ ID NO: 2030477 - RNA, 17 nt, Human herpesvirus 5
acgacgacgcgcccccc

SEQ ID NO: 2030478 - RNA, 18 nt, Human herpesvirus 5
agugccgcgccgccugga

SEQ ID NO: 2030479 - RNA, 19 nt, Human herpesvirus 5
cccucagcgugcucagcug

SEQ ID NO: 2030480 - RNA, 14 nt, Human herpesvirus 5
cugccugccgcacg

SEQ ID NO: 2030481 - RNA, 16 nt, Human herpesvirus 5
acgaucgcuggugucu

SEQ ID NO: 2030482 - RNA, 17 nt, Human herpesvirus 5
acaucccaagcacgcca

SEQ ID NO: 2030483 - RNA, 18 nt, Human herpesvirus 5
cgcagcagagccaccagg

SEQ ID NO: 2030484 - RNA, 12 nt, Human herpesvirus 5
ugacacagcucc

SEQ ID NO: 2030485 - RNA, 14 nt, Human herpesvirus 5
ucagccgccgccuc

SEQ ID NO: 2030486 - RNA, 17 nt, Human herpesvirus 5
agcuuucuugacuggcc

SEQ ID NO: 2030487 - RNA, 16 nt, Human herpesvirus 5
agagccaccaggugcc

SEQ ID NO: 2030488 - RNA, 22 nt, Human herpesvirus 5
gccgcacgcgcuagccuuucug

SEQ ID NO: 2030489 - RNA, 18 nt, Human herpesvirus 5
gaagacuuugauguaguu

SEQ ID NO: 2030490 - RNA, 11 nt, Human herpesvirus 5
cggcugcugca

SEQ ID NO: 2030491 - RNA, 22 nt, Human herpesvirus 5
cucgcucacgucguugggaaug

SEQ ID NO: 2030492 - RNA, 19 nt, Human herpesvirus 5
ggcuucccuccugcagcug

SEQ ID NO: 2030493 - RNA, 19 nt, Human herpesvirus 5
ccgcggugcaggccgcgca

SEQ ID NO: 2030494 - RNA, 22 nt, Human herpesvirus 5
gugcgcggcgacaagcuguggc

SEQ ID NO: 2030495 - RNA, 16 nt, Human herpesvirus 5
agcgacguaccagcug

SEQ ID NO: 2030496 - RNA, 19 nt, Human herpesvirus 5
uuagccccacaugcugcuu

SEQ ID NO: 2030497 - RNA, 21 nt, Human herpesvirus 5
gcgcagugcgccgagcggccg

SEQ ID NO: 2030498 - RNA, 17 nt, Human herpesvirus 5
ccuagcgaucgcaugcu

SEQ ID NO: 2030499 - RNA, 14 nt, Human herpesvirus 5
guaaccuggagcag

SEQ ID NO: 2030500 - RNA, 17 nt, Human herpesvirus 5
ggccaccaagaaacacc

SEQ ID NO: 2030501 - RNA, 14 nt, Human herpesvirus 5
gcugccuguuccug

SEQ ID NO: 2030502 - RNA, 14 nt, Human herpesvirus 5
gcugcaagguacgg

SEQ ID NO: 2030503 - RNA, 14 nt, Human herpesvirus 5
cuagacgaaauuca

SEQ ID NO: 2030504 - RNA, 15 nt, Human herpesvirus 5
auagaaagucacagg

SEQ ID NO: 2030505 - RNA, 16 nt, Human herpesvirus 5
ucacaccuaucauaaa

SEQ ID NO: 2030506 - RNA, 20 nt, Human herpesvirus 5
gaugguacuauaugcgugag

SEQ ID NO: 2030507 - RNA, 18 nt, Human herpesvirus 5
ggcggccguugccggcaa

SEQ ID NO: 2030508 - RNA, 22 nt, Human herpesvirus 5
gaaagugauuauaucuuucuac

SEQ ID NO: 2030509 - RNA, 13 nt, Human herpesvirus 5
caugugcagcugg

SEQ ID NO: 2030510 - RNA, 16 nt, Human herpesvirus 5
gucuccgaacucagag

SEQ ID NO: 2030511 - RNA, 13 nt, Human herpesvirus 5
gccaccacuacca

SEQ ID NO: 2030512 - RNA, 18 nt, Human herpesvirus 5
acacggagcacgggcugc

SEQ ID NO: 2030513 - RNA, 22 nt, Human herpesvirus 5
uaccaauaaagauaaucugcca

SEQ ID NO: 2030514 - RNA, 21 nt, Human herpesvirus 5
gcagcacgcgauuggccagca

SEQ ID NO: 2030515 - RNA, 21 nt, Human herpesvirus 5
gacucaccagacuuuuugcuu

SEQ ID NO: 2030516 - RNA, 11 nt, Human herpesvirus 5
cuaaugugcug

SEQ ID NO: 2030517 - RNA, 19 nt, Human herpesvirus 5
ugggcgggcucugggaagc

SEQ ID NO: 2030518 - RNA, 18 nt, Human herpesvirus 5
gcagcgaguugcugugca

SEQ ID NO: 2030519 - RNA, 18 nt, Human herpesvirus 5
uuggccgaccugugcgug

SEQ ID NO: 2030520 - RNA, 16 nt, Human herpesvirus 5
ugcacgagugggccag

SEQ ID NO: 2030521 - RNA, 14 nt, Human herpesvirus 5
cugcacgcucuguc

SEQ ID NO: 2030522 - RNA, 20 nt, Human herpesvirus 5
ggccgucugcacgccccgga

SEQ ID NO: 2030523 - RNA, 16 nt, Human herpesvirus 5
gucgucgccggaagga

SEQ ID NO: 2030524 - RNA, 14 nt, Human herpesvirus 5
uaccuggaggagau

SEQ ID NO: 2030525 - RNA, 17 nt, Human herpesvirus 5
agcuucggccggcugcu

SEQ ID NO: 2030526 - RNA, 22 nt, Human herpesvirus 5
accauuuccaugugcagcuggu

SEQ ID NO: 2030527 - RNA, 17 nt, Human herpesvirus 5
caacuucuaccaucucc

SEQ ID NO: 2030528 - RNA, 15 nt, Human herpesvirus 5
gaacccaucgaggag

SEQ ID NO: 2030529 - RNA, 14 nt, Human herpesvirus 5
cuacgacaacaucc

SEQ ID NO: 2030530 - RNA, 16 nt, Human herpesvirus 5
gucacggugccaugga

SEQ ID NO: 2030531 - RNA, 17 nt, Human herpesvirus 5
gaaugccucuacuugga

SEQ ID NO: 2030532 - RNA, 12 nt, Human herpesvirus 5
uacuauguguau

SEQ ID NO: 2030533 - RNA, 16 nt, Human herpesvirus 5
ggaguuuguguaaugc

SEQ ID NO: 2030534 - RNA, 15 nt, Human herpesvirus 5
cccaguagacagaca

SEQ ID NO: 2030535 - RNA, 14 nt, Human herpesvirus 5
caugccggcagaac

SEQ ID NO: 2030536 - RNA, 17 nt, Human herpesvirus 5
ggucggcaagagccgga

SEQ ID NO: 2030537 - RNA, 19 nt, Human herpesvirus 5
ucguccgccuccacuuccg

SEQ ID NO: 2030538 - RNA, 15 nt, Human herpesvirus 5
aauaauauacacacg

SEQ ID NO: 2030539 - RNA, 13 nt, Human herpesvirus 5
aguggaagggugc

SEQ ID NO: 2030540 - RNA, 18 nt, Human herpesvirus 5
guuacaaaagauagagaa

SEQ ID NO: 2030541 - RNA, 16 nt, Human herpesvirus 5
gcaacggcaucauguu

SEQ ID NO: 2030542 - RNA, 19 nt, Human herpesvirus 5
ggcucgaccggcggcugcu

SEQ ID NO: 2030543 - RNA, 19 nt, Human herpesvirus 5
cugcucaaaguacuugucg

SEQ ID NO: 2030544 - RNA, 20 nt, Human herpesvirus 5
acgugcuuuuggugcgccac

SEQ ID NO: 2030545 - RNA, 21 nt, Human herpesvirus 5
ggcgaugacgaguaggcgcgc

SEQ ID NO: 2030546 - RNA, 13 nt, Human herpesvirus 5
cgcgguagagcuc

SEQ ID NO: 2030547 - RNA, 23 nt, Human herpesvirus 5
ugcuggccgccgcugcacggcau

SEQ ID NO: 2030548 - RNA, 20 nt, Human herpesvirus 5
ugaacaccuuuuugcugcac

SEQ ID NO: 2030549 - RNA, 18 nt, Human herpesvirus 5
agcuagugcagccuuagg

SEQ ID NO: 2030550 - RNA, 22 nt, Human herpesvirus 5
gugaugguacuauaugcgugag

SEQ ID NO: 2030551 - RNA, 19 nt, Human herpesvirus 5
gccuuccuccucugccugg

SEQ ID NO: 2030552 - RNA, 17 nt, Human herpesvirus 5
gugguggccgugcuggg

SEQ ID NO: 2030553 - RNA, 16 nt, Human herpesvirus 5
uuauucccgucaguga

SEQ ID NO: 2030554 - RNA, 11 nt, Human herpesvirus 5
ccuccgcggcc

SEQ ID NO: 2030555 - RNA, 20 nt, Human herpesvirus 5
caauaaagacgucaaugaca

SEQ ID NO: 2030556 - RNA, 15 nt, Human herpesvirus 5
cuuaacaugaugaag

SEQ ID NO: 2030557 - RNA, 17 nt, Human herpesvirus 5
cauggccaaugcauauc

SEQ ID NO: 2030558 - RNA, 21 nt, Human herpesvirus 5
ggaaggcggcucgcuggaagc

SEQ ID NO: 2030559 - RNA, 20 nt, Human herpesvirus 5
acgggccugguauacgaggc

SEQ ID NO: 2030560 - RNA, 23 nt, Human herpesvirus 5
cugugguguugccuucugcugcc

SEQ ID NO: 2030561 - RNA, 16 nt, Human herpesvirus 5
acuacguugggucugc

SEQ ID NO: 2030562 - RNA, 13 nt, Human herpesvirus 5
aggcggaggagag

SEQ ID NO: 2030563 - RNA, 22 nt, Human herpesvirus 5
uuucugucgccgacuaaauuca

SEQ ID NO: 2030564 - RNA, 23 nt, Human herpesvirus 5
auguuuuuauauaauacacgugg

SEQ ID NO: 2030565 - RNA, 19 nt, Human herpesvirus 5
cagacccgauacagucagc

SEQ ID NO: 2030566 - RNA, 23 nt, Human herpesvirus 5
cggcuccaagugcaagcgccgcg

SEQ ID NO: 2030567 - RNA, 18 nt, Human herpesvirus 5
cuccgaacucagaggcca

SEQ ID NO: 2030568 - RNA, 16 nt, Human herpesvirus 5
uaagagauccugggac

SEQ ID NO: 2030569 - RNA, 16 nt, Human herpesvirus 5
gucaaaagccugggua

SEQ ID NO: 2030570 - RNA, 20 nt, Human herpesvirus 5
caccgucaccacucccacca

SEQ ID NO: 2030571 - RNA, 19 nt, Human herpesvirus 5
ucucugcaacgccuggcgu

SEQ ID NO: 2030572 - RNA, 15 nt, Human herpesvirus 5
uacacgccuugcacc

SEQ ID NO: 2030573 - RNA, 13 nt, Human herpesvirus 5
acuugaguaccaa

SEQ ID NO: 2030574 - RNA, 23 nt, Human herpesvirus 5
gccaccaggugccggcgacugac

SEQ ID NO: 2030575 - RNA, 15 nt, Human herpesvirus 5
caggagguguugagu

SEQ ID NO: 2030576 - RNA, 17 nt, Human herpesvirus 5
acccccguacugccugg

SEQ ID NO: 2030577 - RNA, 21 nt, Human herpesvirus 5
cucaccccgcgcgacguagaa

SEQ ID NO: 2030578 - RNA, 18 nt, Human herpesvirus 5
caguggcagcaggaccug

SEQ ID NO: 2030579 - RNA, 13 nt, Human herpesvirus 5
agaccuacagcac

SEQ ID NO: 2030580 - RNA, 14 nt, Human herpesvirus 5
accuggguagcaag

SEQ ID NO: 2030581 - RNA, 13 nt, Human herpesvirus 5
agguugcgccgca

SEQ ID NO: 2030582 - RNA, 22 nt, Human herpesvirus 5
ccccggacgggcaggacgucaa

SEQ ID NO: 2030583 - RNA, 22 nt, Human herpesvirus 5
cucgagcuuauugagcgcagcc

SEQ ID NO: 2030584 - RNA, 21 nt, Human herpesvirus 5
ccguguauaacuaacgugucc

SEQ ID NO: 2030585 - RNA, 13 nt, Human herpesvirus 5
ggcgacccgcagu

SEQ ID NO: 2030586 - RNA, 18 nt, Human herpesvirus 5
uaacaccaaaaauccaga

SEQ ID NO: 2030587 - RNA, 19 nt, Human herpesvirus 5
cagacgaugaaccuucccc

SEQ ID NO: 2030588 - RNA, 14 nt, Human herpesvirus 5
ccucuagagacaga

SEQ ID NO: 2030589 - RNA, 22 nt, Human herpesvirus 5
gcccguuguguaugcaugucgc

SEQ ID NO: 2030590 - RNA, 18 nt, Human herpesvirus 5
cucuugcgcuucugcagc

SEQ ID NO: 2030591 - RNA, 14 nt, Human herpesvirus 5
gagcacgggcugcu

SEQ ID NO: 2030592 - RNA, 15 nt, Human herpesvirus 5
caccacgcagcaggc

SEQ ID NO: 2030593 - RNA, 19 nt, Human herpesvirus 5
uacaaguauguggaacagc

SEQ ID NO: 2030594 - RNA, 16 nt, Human herpesvirus 5
ucgccgucacugccac

SEQ ID NO: 2030595 - RNA, 19 nt, Human herpesvirus 5
ccucccgguauucggaaac

SEQ ID NO: 2030596 - RNA, 15 nt, Human herpesvirus 5
gaguggcugcugugu

SEQ ID NO: 2030597 - RNA, 17 nt, Human herpesvirus 5
ccacgccaccgccgcca

SEQ ID NO: 2030598 - RNA, 23 nt, Human herpesvirus 5
cucgaugcgccuccgguggugcg

SEQ ID NO: 2030599 - RNA, 15 nt, Human herpesvirus 5
uggggcugcugcugc

SEQ ID NO: 2030600 - RNA, 12 nt, Human herpesvirus 5
ggggcugcucaa

SEQ ID NO: 2030601 - RNA, 23 nt, Human herpesvirus 5
ggagcuaauagauuaaugugucg

SEQ ID NO: 2030602 - RNA, 17 nt, Human herpesvirus 5
guaagcggcagcauggg

SEQ ID NO: 2030603 - RNA, 13 nt, Human herpesvirus 5
ccgccgcaacagc

SEQ ID NO: 2030604 - RNA, 20 nt, Human herpesvirus 5
cggccagcgugacgcggugc

SEQ ID NO: 2030605 - RNA, 16 nt, Human herpesvirus 5
ggcuugucauggucug

SEQ ID NO: 2030606 - RNA, 20 nt, Human herpesvirus 5
gccgcgaggugucauguucg

SEQ ID NO: 2030607 - RNA, 20 nt, Human herpesvirus 5
ggcagcgguacccgacgcgg

SEQ ID NO: 2030608 - RNA, 13 nt, Human herpesvirus 5
cgacagcugcaau

SEQ ID NO: 2030609 - RNA, 14 nt, Human herpesvirus 5
aguacuuucacaac

SEQ ID NO: 2030610 - RNA, 15 nt, Human herpesvirus 5
auugcuuagcugcac

SEQ ID NO: 2030611 - RNA, 14 nt, Human herpesvirus 5
ucccuacagcgacu

SEQ ID NO: 2030612 - RNA, 21 nt, Human herpesvirus 5
accguuguccccgcaaacucc

SEQ ID NO: 2030613 - RNA, 13 nt, Human herpesvirus 5
aucgucucaauaa

SEQ ID NO: 2030614 - RNA, 22 nt, Human herpesvirus 5
gggcgacacucaguacuuuggg

SEQ ID NO: 2030615 - RNA, 16 nt, Human herpesvirus 5
gccugguauacgaggc

SEQ ID NO: 2030616 - RNA, 14 nt, Human herpesvirus 5
ggacgugguaacga

SEQ ID NO: 2030617 - RNA, 19 nt, Human herpesvirus 5
aagccgacaaccugcugca

SEQ ID NO: 2030618 - RNA, 13 nt, Human herpesvirus 5
gucaaagcucacu

SEQ ID NO: 2030619 - RNA, 13 nt, Human herpesvirus 5
cggagcagagggu

SEQ ID NO: 2030620 - RNA, 20 nt, Human herpesvirus 5
uauuaauuuaacaagucacu

SEQ ID NO: 2030621 - RNA, 18 nt, Human herpesvirus 5
gcacgccaaaccgcgucc

SEQ ID NO: 2030622 - RNA, 20 nt, Human herpesvirus 5
auuuuuucggccgcggaggu

SEQ ID NO: 2030623 - RNA, 13 nt, Human herpesvirus 5
gucacugccaccg

SEQ ID NO: 2030624 - RNA, 15 nt, Human herpesvirus 5
gccgcggugcaggcc

SEQ ID NO: 2030625 - RNA, 19 nt, Human herpesvirus 5
ccgucgcggacgaaagugg

SEQ ID NO: 2030626 - RNA, 15 nt, Human herpesvirus 5
cuauaagacagccuu

SEQ ID NO: 2030627 - RNA, 17 nt, Human herpesvirus 5
gcagcggggagaaaagu

SEQ ID NO: 2030628 - RNA, 18 nt, Human herpesvirus 5
cgacggcuccaagaaaaa

SEQ ID NO: 2030629 - RNA, 16 nt, Human herpesvirus 5
aacgccacgucggagc

SEQ ID NO: 2030630 - RNA, 18 nt, Human herpesvirus 5
gugcucucuauaaaacuu

SEQ ID NO: 2030631 - RNA, 15 nt, Human herpesvirus 5
gacgcuuaucgggcg

SEQ ID NO: 2030632 - RNA, 15 nt, Human herpesvirus 5
uggggacggugauga

SEQ ID NO: 2030633 - RNA, 16 nt, Human herpesvirus 5
gucugacgcugcuccu

SEQ ID NO: 2030634 - RNA, 14 nt, Human herpesvirus 5
gacacaugcacaau

SEQ ID NO: 2030635 - RNA, 19 nt, Human herpesvirus 5
ucauuagcgcgcugguuug

SEQ ID NO: 2030636 - RNA, 17 nt, Human herpesvirus 5
agccaacagcagggagc

SEQ ID NO: 2030637 - RNA, 16 nt, Human herpesvirus 5
cucgggaaugccagag

SEQ ID NO: 2030638 - RNA, 15 nt, Human herpesvirus 5
gaccucguuguccuc

SEQ ID NO: 2030639 - RNA, 21 nt, Human herpesvirus 5
cccacaugcugcuuaauaaac

SEQ ID NO: 2030640 - RNA, 15 nt, Human herpesvirus 5
cuacagacugggcga

SEQ ID NO: 2030641 - RNA, 18 nt, Human herpesvirus 5
gccgcagagggcgcgccg

SEQ ID NO: 2030642 - RNA, 17 nt, Human herpesvirus 5
ccaccgacacagcagca

SEQ ID NO: 2030643 - RNA, 22 nt, Human herpesvirus 5
uuucuugccaagcuuuagccag

SEQ ID NO: 2030644 - RNA, 17 nt, Human herpesvirus 5
gaauugagcaacaaaca

SEQ ID NO: 2030645 - RNA, 17 nt, Human herpesvirus 5
accguuguggggauuuu

SEQ ID NO: 2030646 - RNA, 16 nt, Human herpesvirus 5
gcggccgacggcagcg

SEQ ID NO: 2030647 - RNA, 21 nt, Human herpesvirus 5
ugcacaccaguauugguucug

SEQ ID NO: 2030648 - RNA, 21 nt, Human herpesvirus 5
acucgcgacgcuucauauuag

SEQ ID NO: 2030649 - RNA, 17 nt, Human herpesvirus 5
uugcacauccucacgag

SEQ ID NO: 2030650 - RNA, 16 nt, Human herpesvirus 5
cggccgugcagcaaga

SEQ ID NO: 2030651 - RNA, 15 nt, Human herpesvirus 5
uaagccggcagcugc

SEQ ID NO: 2030652 - RNA, 15 nt, Human herpesvirus 5
agcagccgacacagc

SEQ ID NO: 2030653 - RNA, 19 nt, Human herpesvirus 5
guggccagcgccugguacu

SEQ ID NO: 2030654 - RNA, 20 nt, Human herpesvirus 5
gcccauugagcgagaacuaa

SEQ ID NO: 2030655 - RNA, 22 nt, Human herpesvirus 5
uccaccauccgaagcuacagcc

SEQ ID NO: 2030656 - RNA, 12 nt, Human herpesvirus 5
uuucgccgccgg

SEQ ID NO: 2030657 - RNA, 23 nt, Human herpesvirus 5
aggaggccgcacuggacgacguc

SEQ ID NO: 2030658 - RNA, 22 nt, Human herpesvirus 5
agaagagauggcguccgggcuc

SEQ ID NO: 2030659 - RNA, 12 nt, Human herpesvirus 5
ggacacugggcg

SEQ ID NO: 2030660 - RNA, 16 nt, Human herpesvirus 5
ucaauugcgggcccug

SEQ ID NO: 2030661 - RNA, 19 nt, Human herpesvirus 5
ucucaugucgcucuuggag

SEQ ID NO: 2030662 - RNA, 14 nt, Human herpesvirus 5
cgcgcccacuggag

SEQ ID NO: 2030663 - RNA, 16 nt, Human herpesvirus 5
gcgugcgggugcauga

SEQ ID NO: 2030664 - RNA, 16 nt, Human herpesvirus 5
accacgaguaacaccg

SEQ ID NO: 2030665 - RNA, 22 nt, Human herpesvirus 5
cuauggacaauuccccucgccu

SEQ ID NO: 2030666 - RNA, 14 nt, Human herpesvirus 5
ggacuuucuccuuu

SEQ ID NO: 2030667 - RNA, 14 nt, Human herpesvirus 5
ucggcgccgccucg

SEQ ID NO: 2030668 - RNA, 16 nt, Human herpesvirus 5
ggcccuucaacggcac

SEQ ID NO: 2030669 - RNA, 23 nt, Human herpesvirus 5
cagcagagccaccaggugccggc

SEQ ID NO: 2030670 - RNA, 14 nt, Human herpesvirus 5
cccccaucccgccu

SEQ ID NO: 2030671 - RNA, 13 nt, Human herpesvirus 5
gcacaugaugcaa

SEQ ID NO: 2030672 - RNA, 22 nt, Human herpesvirus 5
guaugggcgguggucggcugcc

SEQ ID NO: 2030673 - RNA, 20 nt, Human herpesvirus 5
cuuuuaccaacguaacagca

SEQ ID NO: 2030674 - RNA, 16 nt, Human herpesvirus 5
uaucaucaaucaccca

SEQ ID NO: 2030675 - RNA, 15 nt, Human herpesvirus 5
agguuagcgccgcgg

SEQ ID NO: 2030676 - RNA, 15 nt, Human herpesvirus 5
uggacuguguucgug

SEQ ID NO: 2030677 - RNA, 15 nt, Human herpesvirus 5
uguuauguuauuaua

SEQ ID NO: 2030678 - RNA, 16 nt, Human herpesvirus 5
gcgcaucgccugcacc

SEQ ID NO: 2030679 - RNA, 17 nt, Human herpesvirus 5
ccauacuuaccaccgug

SEQ ID NO: 2030680 - RNA, 15 nt, Human herpesvirus 5
cuggacuucaauguc

SEQ ID NO: 2030681 - RNA, 20 nt, Human herpesvirus 5
ugauggaaaugcccgccacc

SEQ ID NO: 2030682 - RNA, 17 nt, Human herpesvirus 5
cagcucguggaccucac

SEQ ID NO: 2030683 - RNA, 21 nt, Human herpesvirus 5
cccacccgguguuggccacca

SEQ ID NO: 2030684 - RNA, 16 nt, Human herpesvirus 5
agaagucucuuucucu

SEQ ID NO: 2030685 - RNA, 16 nt, Human herpesvirus 5
uuacggguaaugcaug

SEQ ID NO: 2030686 - RNA, 16 nt, Human herpesvirus 5
ugucccugccagucuc

SEQ ID NO: 2030687 - RNA, 14 nt, Human herpesvirus 5
gacgugaggcgcuc

SEQ ID NO: 2030688 - RNA, 13 nt, Human herpesvirus 5
gcaccggcagcac

SEQ ID NO: 2030689 - RNA, 22 nt, Human herpesvirus 5
cugaaugacguuaucauaaacu

SEQ ID NO: 2030690 - RNA, 13 nt, Human herpesvirus 5
accgcgacccagc

SEQ ID NO: 2030691 - RNA, 13 nt, Human herpesvirus 5
uuucuuucucagu

SEQ ID NO: 2030692 - RNA, 15 nt, Human herpesvirus 5
agcggcggcgguggu

SEQ ID NO: 2030693 - RNA, 17 nt, Human herpesvirus 5
gagacacgcagaccgug

SEQ ID NO: 2030694 - RNA, 11 nt, Human herpesvirus 5
ccacaguuucc

SEQ ID NO: 2030695 - RNA, 16 nt, Human herpesvirus 5
ccuguuggaacccauc

SEQ ID NO: 2030696 - RNA, 19 nt, Human herpesvirus 5
ccgcacuggacgacgucaa

SEQ ID NO: 2030697 - RNA, 17 nt, Human herpesvirus 5
uccucguccgggucuac

SEQ ID NO: 2030698 - RNA, 15 nt, Human herpesvirus 5
gcaacagcagccacc

SEQ ID NO: 2030699 - RNA, 17 nt, Human herpesvirus 5
guugccgcguggcgcug

SEQ ID NO: 2030700 - RNA, 15 nt, Human herpesvirus 5
acuuucuccuuuggu

SEQ ID NO: 2030701 - RNA, 19 nt, Human herpesvirus 5
uaccgcauuacugggacgc

SEQ ID NO: 2030702 - RNA, 12 nt, Human herpesvirus 5
cgagcucagccc

SEQ ID NO: 2030703 - RNA, 23 nt, Human herpesvirus 5
auacgcgcuggaggcccuggugg

SEQ ID NO: 2030704 - RNA, 15 nt, Human herpesvirus 5
agcucugaaacacag

SEQ ID NO: 2030705 - RNA, 19 nt, Human herpesvirus 5
cuaaaacgguacgggcccc

SEQ ID NO: 2030706 - RNA, 16 nt, Human herpesvirus 5
uggcccgacggcagcu

SEQ ID NO: 2030707 - RNA, 12 nt, Human herpesvirus 5
gcccucgccggc

SEQ ID NO: 2030708 - RNA, 15 nt, Human herpesvirus 5
auuuuuuguaacacu

SEQ ID NO: 2030709 - RNA, 15 nt, Human herpesvirus 5
gaccgguaaggcgga

SEQ ID NO: 2030710 - RNA, 17 nt, Human herpesvirus 5
ccacgucgaccaggugc

SEQ ID NO: 2030711 - RNA, 13 nt, Human herpesvirus 5
aggacgaggcagg

SEQ ID NO: 2030712 - RNA, 16 nt, Human herpesvirus 5
cgccgcggcagcacca

SEQ ID NO: 2030713 - RNA, 16 nt, Human herpesvirus 5
gucggaugaggcaggc

SEQ ID NO: 2030714 - RNA, 13 nt, Human herpesvirus 5
aagggcugcucgg

SEQ ID NO: 2030715 - RNA, 16 nt, Human herpesvirus 5
gacaacggcuggaaau

SEQ ID NO: 2030716 - RNA, 14 nt, Human herpesvirus 5
guuacaaugucacu

SEQ ID NO: 2030717 - RNA, 14 nt, Human herpesvirus 5
accaccuccugggu

SEQ ID NO: 2030718 - RNA, 13 nt, Human herpesvirus 5
gagguacugcagc

SEQ ID NO: 2030719 - RNA, 19 nt, Human herpesvirus 5
ccucgggaggacucagagc

SEQ ID NO: 2030720 - RNA, 20 nt, Human herpesvirus 5
gcuccacacgcaucugcaag

SEQ ID NO: 2030721 - RNA, 24 nt, Human herpesvirus 5
gcgcuacgaaacuuuucugcgggu

SEQ ID NO: 2030722 - RNA, 14 nt, Human herpesvirus 5
cuccucuaccccgc

SEQ ID NO: 2030723 - RNA, 17 nt, Human herpesvirus 5
caaccgcauccugccca

SEQ ID NO: 2030724 - RNA, 21 nt, Human herpesvirus 5
uccacaggcgcguuggacggg

SEQ ID NO: 2030725 - RNA, 19 nt, Human herpesvirus 5
cucgaccgcuggaggccuc

SEQ ID NO: 2030726 - RNA, 19 nt, Human herpesvirus 5
cugcugguuuuugcccccu

SEQ ID NO: 2030727 - RNA, 14 nt, Human herpesvirus 5
uggaccugaccugu

SEQ ID NO: 2030728 - RNA, 14 nt, Human herpesvirus 5
guucgcgauucuca

SEQ ID NO: 2030729 - RNA, 23 nt, Human herpesvirus 5
ucaccgugcucgugcccaucguc

SEQ ID NO: 2030730 - RNA, 21 nt, Human herpesvirus 5
uacaugcuauaagacagccuu

SEQ ID NO: 2030731 - RNA, 19 nt, Human herpesvirus 5
ucugcuugcuggcuuggcu

SEQ ID NO: 2030732 - RNA, 17 nt, Human herpesvirus 5
gucagcggcacgccgcc

SEQ ID NO: 2030733 - RNA, 17 nt, Human herpesvirus 5
caccccccgggccacca

SEQ ID NO: 2030734 - RNA, 20 nt, Human herpesvirus 5
aagaggaagccgcugcuaaa

SEQ ID NO: 2030735 - RNA, 16 nt, Human herpesvirus 5
guguugcuacagggag

SEQ ID NO: 2030736 - RNA, 20 nt, Human herpesvirus 5
cgccgaugcuccgcgaccgg

SEQ ID NO: 2030737 - RNA, 22 nt, Human herpesvirus 5
gucucgggcucgcucggccucg

SEQ ID NO: 2030738 - RNA, 19 nt, Human herpesvirus 5
cccuguaugagcuguuucg

SEQ ID NO: 2030739 - RNA, 19 nt, Human herpesvirus 5
cgcgguagcgaggcggcaa

SEQ ID NO: 2030740 - RNA, 16 nt, Human herpesvirus 5
ccaugagaagagaaaa

SEQ ID NO: 2030741 - RNA, 22 nt, Human herpesvirus 5
cugagaacauguggaaaucacc

SEQ ID NO: 2030742 - RNA, 20 nt, Human herpesvirus 5
cgaccuugagcgacagcagc

SEQ ID NO: 2030743 - RNA, 19 nt, Human herpesvirus 5
acaugaaucuuccccucug

SEQ ID NO: 2030744 - RNA, 17 nt, Human herpesvirus 5
ccucauggacccgccgc

SEQ ID NO: 2030745 - RNA, 12 nt, Human herpesvirus 5
ccgucagccucg

SEQ ID NO: 2030746 - RNA, 12 nt, Human herpesvirus 5
uauggugaccau

SEQ ID NO: 2030747 - RNA, 22 nt, Human herpesvirus 5
cuccgucguuaucuucccugag

SEQ ID NO: 2030748 - RNA, 22 nt, Human herpesvirus 5
acuccgaauaacaacacaucaa

SEQ ID NO: 2030749 - RNA, 19 nt, Human herpesvirus 5
cguucagucgcggcugagc

SEQ ID NO: 2030750 - RNA, 11 nt, Human herpesvirus 5
ccggcagcugc

SEQ ID NO: 2030751 - RNA, 23 nt, Human herpesvirus 5
acgcgccucauggcggcggccac

SEQ ID NO: 2030752 - RNA, 20 nt, Human herpesvirus 5
ugccccccgggauccaagag

SEQ ID NO: 2030753 - RNA, 14 nt, Human herpesvirus 5
cccgggccaccagc

SEQ ID NO: 2030754 - RNA, 13 nt, Human herpesvirus 5
ugcuucuuuucug

SEQ ID NO: 2030755 - RNA, 21 nt, Human herpesvirus 5
gcuggcuuuccucgggcgagu

SEQ ID NO: 2030756 - RNA, 19 nt, Human herpesvirus 5
ggagcccgcacacuggcug

SEQ ID NO: 2030757 - RNA, 15 nt, Human herpesvirus 5
cggaugaccuggccg

SEQ ID NO: 2030758 - RNA, 16 nt, Human herpesvirus 5
gugagcggguucccac

SEQ ID NO: 2030759 - RNA, 19 nt, Human herpesvirus 5
cggccgaccccgucacugu

SEQ ID NO: 2030760 - RNA, 21 nt, Human herpesvirus 5
cacuuccccuaguaauaccac

SEQ ID NO: 2030761 - RNA, 13 nt, Human herpesvirus 5
cuccgacagcgcg

SEQ ID NO: 2030762 - RNA, 14 nt, Human herpesvirus 5
auacuggaagcugc

SEQ ID NO: 2030763 - RNA, 17 nt, Human herpesvirus 5
guugggaccgcagcgug

SEQ ID NO: 2030764 - RNA, 15 nt, Human herpesvirus 5
gccuccagcgccucc

SEQ ID NO: 2030765 - RNA, 14 nt, Human herpesvirus 5
gaaaaaagaccgga

SEQ ID NO: 2030766 - RNA, 14 nt, Human herpesvirus 5
gugcuggcggccgu

SEQ ID NO: 2030767 - RNA, 18 nt, Human herpesvirus 5
gccugggcugcuguuggg

SEQ ID NO: 2030768 - RNA, 12 nt, Human herpesvirus 5
acuuugcugcua

SEQ ID NO: 2030769 - RNA, 17 nt, Human herpesvirus 5
cgggugccgggacagcg

SEQ ID NO: 2030770 - RNA, 20 nt, Human herpesvirus 5
uggugaccauggucggugac

SEQ ID NO: 2030771 - RNA, 19 nt, Human herpesvirus 5
ucgaccggcggcugcuguu

SEQ ID NO: 2030772 - RNA, 16 nt, Human herpesvirus 5
acaacagcagcaacag

SEQ ID NO: 2030773 - RNA, 19 nt, Human herpesvirus 5
gcaggucacacugggagac

SEQ ID NO: 2030774 - RNA, 14 nt, Human herpesvirus 5
caccgucagcugcg

SEQ ID NO: 2030775 - RNA, 21 nt, Human herpesvirus 5
ccaccgccgcuuucucaucuc

SEQ ID NO: 2030776 - RNA, 18 nt, Human herpesvirus 5
uggacauuuggguuucca

SEQ ID NO: 2030777 - RNA, 22 nt, Human herpesvirus 5
ccaagaauaaaaagugcgucua

SEQ ID NO: 2030778 - RNA, 22 nt, Human herpesvirus 5
gcuuucagcguacucauuagcg

SEQ ID NO: 2030779 - RNA, 17 nt, Human herpesvirus 5
augucuccgaacucaga

SEQ ID NO: 2030780 - RNA, 22 nt, Human herpesvirus 5
acggcagcgccagcggccuggc

SEQ ID NO: 2030781 - RNA, 12 nt, Human herpesvirus 5
uguuuugucuga

SEQ ID NO: 2030782 - RNA, 20 nt, Human herpesvirus 5
cgaagguuagcgccgcggca

SEQ ID NO: 2030783 - RNA, 18 nt, Human herpesvirus 5
agcccaaguucagcagca

SEQ ID NO: 2030784 - RNA, 15 nt, Human herpesvirus 5
uacgcgaccagcugc

SEQ ID NO: 2030785 - RNA, 20 nt, Human herpesvirus 5
cuguggcuucucuggagacg

SEQ ID NO: 2030786 - RNA, 21 nt, Human herpesvirus 5
uggacgccaucauggaagagg

SEQ ID NO: 2030787 - RNA, 15 nt, Human herpesvirus 5
gguaccuaaagcccc

SEQ ID NO: 2030788 - RNA, 19 nt, Human herpesvirus 5
gagcccgcacacuggcugg

SEQ ID NO: 2030789 - RNA, 23 nt, Human herpesvirus 5
gcgagcggaacccgggcucaccg

SEQ ID NO: 2030790 - RNA, 17 nt, Human herpesvirus 5
gaucgaggcggcggcga

SEQ ID NO: 2030791 - RNA, 16 nt, Human herpesvirus 5
gaacuggcgcguacgg

SEQ ID NO: 2030792 - RNA, 13 nt, Human herpesvirus 5
cgggcacugggga

SEQ ID NO: 2030793 - RNA, 16 nt, Human herpesvirus 5
uguugcuacagggagu

SEQ ID NO: 2030794 - RNA, 23 nt, Human herpesvirus 5
accgucgaaaacaaccacacaga

SEQ ID NO: 2030795 - RNA, 12 nt, Human herpesvirus 5
cugggugcaaug

SEQ ID NO: 2030796 - RNA, 15 nt, Human herpesvirus 5
uaacaacgucacuuc

SEQ ID NO: 2030797 - RNA, 16 nt, Human herpesvirus 5
cacgguuucuucccau

SEQ ID NO: 2030798 - RNA, 21 nt, Human herpesvirus 5
ggcugccgccgcuguggcugc

SEQ ID NO: 2030799 - RNA, 19 nt, Human herpesvirus 5
ugggaagaugggacguggu

SEQ ID NO: 2030800 - RNA, 17 nt, Human herpesvirus 5
caugcggcaaucggugc

SEQ ID NO: 2030801 - RNA, 20 nt, Human herpesvirus 5
gugcuacgagaucagccgug

SEQ ID NO: 2030802 - RNA, 14 nt, Human herpesvirus 5
gugcagcuggugau

SEQ ID NO: 2030803 - RNA, 23 nt, Human herpesvirus 5
cugcuuuuuugucuccuguggau

SEQ ID NO: 2030804 - RNA, 13 nt, Human herpesvirus 5
gguaacuggcaga

SEQ ID NO: 2030805 - RNA, 13 nt, Human herpesvirus 5
aaauauguaguau

SEQ ID NO: 2030806 - RNA, 17 nt, Human herpesvirus 5
acauggagcccacgccg

SEQ ID NO: 2030807 - RNA, 19 nt, Human herpesvirus 5
cgugucugggccacaggga

SEQ ID NO: 2030808 - RNA, 19 nt, Human herpesvirus 5
gcugccgcagcugcuggag

SEQ ID NO: 2030809 - RNA, 13 nt, Human herpesvirus 5
acacccugcggag

SEQ ID NO: 2030810 - RNA, 14 nt, Human herpesvirus 5
uguucuuacaguuu

SEQ ID NO: 2030811 - RNA, 16 nt, Human herpesvirus 5
uaugcuaauauaucca

SEQ ID NO: 2030812 - RNA, 19 nt, Human herpesvirus 5
cagcacggggaucuugguc

SEQ ID NO: 2030813 - RNA, 23 nt, Human herpesvirus 5
cacgcaucugcaagucccuggcc

SEQ ID NO: 2030814 - RNA, 13 nt, Human herpesvirus 5
gaagugacggacg

SEQ ID NO: 2030815 - RNA, 22 nt, Human herpesvirus 5
ugccgugacgucgcggcaccag

SEQ ID NO: 2030816 - RNA, 19 nt, Human herpesvirus 5
gucgcccgaggcggaggag

SEQ ID NO: 2030817 - RNA, 15 nt, Human herpesvirus 5
cggccgugguggccg

SEQ ID NO: 2030818 - RNA, 13 nt, Human herpesvirus 5
ccagccccagagc

SEQ ID NO: 2030819 - RNA, 15 nt, Human herpesvirus 5
auucacaaaaacacc

SEQ ID NO: 2030820 - RNA, 20 nt, Human herpesvirus 5
ugacgacggcgugguaucca

SEQ ID NO: 2030821 - RNA, 20 nt, Human herpesvirus 5
ccuucccucuagagacagac

SEQ ID NO: 2030822 - RNA, 16 nt, Human herpesvirus 5
ucguaguuguugcaga

SEQ ID NO: 2030823 - RNA, 13 nt, Human herpesvirus 5
gcaccugcugccg

SEQ ID NO: 2030824 - RNA, 18 nt, Human herpesvirus 5
gugacguggauacuagua

SEQ ID NO: 2030825 - RNA, 20 nt, Human herpesvirus 5
caagagcaugcugugggccc

SEQ ID NO: 2030826 - RNA, 18 nt, Human herpesvirus 5
gccgcuuucucaucucag

SEQ ID NO: 2030827 - RNA, 15 nt, Human herpesvirus 5
ccuaguaaugcauua

SEQ ID NO: 2030828 - RNA, 20 nt, Human herpesvirus 5
ccgcaccagacuuggagaca

SEQ ID NO: 2030829 - RNA, 18 nt, Human herpesvirus 5
uuccacgcagcgggaaac

SEQ ID NO: 2030830 - RNA, 13 nt, Human herpesvirus 5
gaaccuuccccac

SEQ ID NO: 2030831 - RNA, 14 nt, Human herpesvirus 5
ggaagcggugcuga

SEQ ID NO: 2030832 - RNA, 16 nt, Human herpesvirus 5
cucuuccaaaucuccg

SEQ ID NO: 2030833 - RNA, 21 nt, Human herpesvirus 5
guccccugccaccucagugga

SEQ ID NO: 2030834 - RNA, 15 nt, Human herpesvirus 5
auccagaccucaugu

SEQ ID NO: 2030835 - RNA, 20 nt, Human herpesvirus 5
aaacguugagacuaccacau

SEQ ID NO: 2030836 - RNA, 20 nt, Human herpesvirus 5
gaaagugauuauaucuuucu

SEQ ID NO: 2030837 - RNA, 14 nt, Human herpesvirus 5
cucgucgugcccgu

SEQ ID NO: 2030838 - RNA, 20 nt, Human herpesvirus 5
uccagauacgcguuggccag

SEQ ID NO: 2030839 - RNA, 14 nt, Human herpesvirus 5
uguaaauaaaaagc

SEQ ID NO: 2030840 - RNA, 18 nt, Human herpesvirus 5
cuuugcuuaucugccucu

SEQ ID NO: 2030841 - RNA, 22 nt, Human herpesvirus 5
ccaucaguacggcuuucugcgg

SEQ ID NO: 2030842 - RNA, 16 nt, Human herpesvirus 5
cugcgacguggaggag

SEQ ID NO: 2030843 - RNA, 23 nt, Human herpesvirus 5
gcggccacggccugcgggcaggc

SEQ ID NO: 2030844 - RNA, 21 nt, Human herpesvirus 5
caccaucgugguagcgccgcg

SEQ ID NO: 2030845 - RNA, 13 nt, Human herpesvirus 5
caacggccccugu

SEQ ID NO: 2030846 - RNA, 19 nt, Human herpesvirus 5
caugcuucaugucgucccg

SEQ ID NO: 2030847 - RNA, 13 nt, Human herpesvirus 5
augaugcugcuga

SEQ ID NO: 2030848 - RNA, 15 nt, Human herpesvirus 5
ccaaguucagcagca

SEQ ID NO: 2030849 - RNA, 24 nt, Human herpesvirus 5
agcgcgaguugcaaaagaagcugc

SEQ ID NO: 2030850 - RNA, 21 nt, Human herpesvirus 5
guuaacgucguuuuggagcug

SEQ ID NO: 2030851 - RNA, 23 nt, Human herpesvirus 5
ccgaguccaccucugcuacuggc

SEQ ID NO: 2030852 - RNA, 19 nt, Human herpesvirus 5
gucgccgcgucagcggccg

SEQ ID NO: 2030853 - RNA, 18 nt, Human herpesvirus 5
ccagcaucuccucgccca

SEQ ID NO: 2030854 - RNA, 18 nt, Human herpesvirus 5
guuagacuagcacagaga

SEQ ID NO: 2030855 - RNA, 16 nt, Human herpesvirus 5
aggauucugagggccg

SEQ ID NO: 2030856 - RNA, 16 nt, Human herpesvirus 5
uccaugucuccaaguc

SEQ ID NO: 2030857 - RNA, 22 nt, Human herpesvirus 5
cugccggucuacagacugggcg

SEQ ID NO: 2030858 - RNA, 18 nt, Human herpesvirus 5
augcuauaagacagccuu

SEQ ID NO: 2030859 - RNA, 23 nt, Human herpesvirus 5
aucuauaaauguucucugaaacc

SEQ ID NO: 2030860 - RNA, 21 nt, Human herpesvirus 5
ggugccccaggaugaagccaa

SEQ ID NO: 2030861 - RNA, 17 nt, Human herpesvirus 5
ucagcuaccgccgcaac

SEQ ID NO: 2030862 - RNA, 14 nt, Human herpesvirus 5
augccgccacuuug

SEQ ID NO: 2030863 - RNA, 12 nt, Human herpesvirus 5
ggcagaaacgag

SEQ ID NO: 2030864 - RNA, 17 nt, Human herpesvirus 5
ugacguggauacuagua

SEQ ID NO: 2030865 - RNA, 18 nt, Human herpesvirus 5
uggauuaguaauggaaag

SEQ ID NO: 2030866 - RNA, 18 nt, Human herpesvirus 5
cugcguucuguggugcgu

SEQ ID NO: 2030867 - RNA, 20 nt, Human herpesvirus 5
acgacggcgguuucagcugg

SEQ ID NO: 2030868 - RNA, 17 nt, Human herpesvirus 5
gacgggacggcugccuc

SEQ ID NO: 2030869 - RNA, 19 nt, Human herpesvirus 5
acgucaacgguuucuggaa

SEQ ID NO: 2030870 - RNA, 18 nt, Human herpesvirus 5
gaauacuggaagcugcug

SEQ ID NO: 2030871 - RNA, 16 nt, Human herpesvirus 5
uaccagcccagggauc

SEQ ID NO: 2030872 - RNA, 15 nt, Human herpesvirus 5
uauagacacacacca

SEQ ID NO: 2030873 - RNA, 21 nt, Human herpesvirus 5
acccagcuggggaaguacaau

SEQ ID NO: 2030874 - RNA, 13 nt, Human herpesvirus 5
ucccuccugcagc

SEQ ID NO: 2030875 - RNA, 17 nt, Human herpesvirus 5
ggcaccaucggacucgc

SEQ ID NO: 2030876 - RNA, 18 nt, Human herpesvirus 5
ccauccucacacugacgg

SEQ ID NO: 2030877 - RNA, 21 nt, Human herpesvirus 5
cuccggcugucaugggucugc

SEQ ID NO: 2030878 - RNA, 23 nt, Human herpesvirus 5
augcuuuccuggacacucuggcc

SEQ ID NO: 2030879 - RNA, 18 nt, Human herpesvirus 5
agcugcgcaggccgccgc

SEQ ID NO: 2030880 - RNA, 17 nt, Human herpesvirus 5
uggcuuuccucgggcga

SEQ ID NO: 2030881 - RNA, 12 nt, Human herpesvirus 5
accugaccuguc

SEQ ID NO: 2030882 - RNA, 22 nt, Human herpesvirus 5
agcccggucggucuuccugcug

SEQ ID NO: 2030883 - RNA, 14 nt, Human herpesvirus 5
ugucaugggucugc

SEQ ID NO: 2030884 - RNA, 18 nt, Human herpesvirus 5
ugcgagcgggguucaccu

SEQ ID NO: 2030885 - RNA, 23 nt, Human herpesvirus 5
ccgagcaagcagucaaaaaagaa

SEQ ID NO: 2030886 - RNA, 14 nt, Human herpesvirus 5
uaccccucgcuggg

SEQ ID NO: 2030887 - RNA, 18 nt, Human herpesvirus 5
cagguccaaucgcacuag

SEQ ID NO: 2030888 - RNA, 21 nt, Human herpesvirus 5
ccacguucuugcguccuucau

SEQ ID NO: 2030889 - RNA, 18 nt, Human herpesvirus 5
uaucgagcgguguagcau

SEQ ID NO: 2030890 - RNA, 20 nt, Human herpesvirus 5
cauggaggucuaucacgggc

SEQ ID NO: 2030891 - RNA, 23 nt, Human herpesvirus 5
gccaaggugcgggagacuagguc

SEQ ID NO: 2030892 - RNA, 20 nt, Human herpesvirus 5
ccuggacguaaauccagacc

SEQ ID NO: 2030893 - RNA, 17 nt, Human herpesvirus 5
cgucgacgcaucuguca

SEQ ID NO: 2030894 - RNA, 17 nt, Human herpesvirus 5
gcaacuuaacgcgcaag

SEQ ID NO: 2030895 - RNA, 15 nt, Human herpesvirus 5
ucuggagacggccgu

SEQ ID NO: 2030896 - RNA, 17 nt, Human herpesvirus 5
gaugaucauggagccgc

SEQ ID NO: 2030897 - RNA, 12 nt, Human herpesvirus 5
gccucuuccucg

SEQ ID NO: 2030898 - RNA, 18 nt, Human herpesvirus 5
aacggauggcguguauau

SEQ ID NO: 2030899 - RNA, 19 nt, Human herpesvirus 5
agcggcaggaaggccucgu

SEQ ID NO: 2030900 - RNA, 15 nt, Human herpesvirus 5
ucgccgccgcgccac

SEQ ID NO: 2030901 - RNA, 17 nt, Human herpesvirus 5
ccucguuguccucuccu

SEQ ID NO: 2030902 - RNA, 17 nt, Human herpesvirus 5
uccugcccaccgccucc

SEQ ID NO: 2030903 - RNA, 17 nt, Human herpesvirus 5
acaaagcccgggccgcc

SEQ ID NO: 2030904 - RNA, 23 nt, Human herpesvirus 5
gcugauaauaaaggcucucuguu

SEQ ID NO: 2030905 - RNA, 15 nt, Human herpesvirus 5
gcgugcaccugcugc

SEQ ID NO: 2030906 - RNA, 14 nt, Human herpesvirus 5
guucccagcgcggc

SEQ ID NO: 2030907 - RNA, 13 nt, Human herpesvirus 5
cagguaggauucc

SEQ ID NO: 2030908 - RNA, 20 nt, Human herpesvirus 5
gggcucguguggcagcuggc

SEQ ID NO: 2030909 - RNA, 13 nt, Human herpesvirus 5
cacagcgccaggc

SEQ ID NO: 2030910 - RNA, 14 nt, Human herpesvirus 5
acacguugcuuucg

SEQ ID NO: 2030911 - RNA, 12 nt, Human herpesvirus 5
gggcgugugggu

SEQ ID NO: 2030912 - RNA, 17 nt, Human herpesvirus 5
cgucacuacucugggau

SEQ ID NO: 2030913 - RNA, 17 nt, Human herpesvirus 5
gucugcauguucaucac

SEQ ID NO: 2030914 - RNA, 21 nt, Human herpesvirus 5
caucacccgccucauggaccc

SEQ ID NO: 2030915 - RNA, 20 nt, Human herpesvirus 5
cugcugcuacgcgguccguc

SEQ ID NO: 2030916 - RNA, 17 nt, Human herpesvirus 5
aagguacuuuaccuagc

SEQ ID NO: 2030917 - RNA, 20 nt, Human herpesvirus 5
ugaagccgccgucgagccac

SEQ ID NO: 2030918 - RNA, 18 nt, Human herpesvirus 5
gagcaugcugugggccca

SEQ ID NO: 2030919 - RNA, 15 nt, Human herpesvirus 5
ccgcgcacgacuggc

SEQ ID NO: 2030920 - RNA, 16 nt, Human herpesvirus 5
acaacggccgccgcag

SEQ ID NO: 2030921 - RNA, 18 nt, Human herpesvirus 5
aauacggcugccacuaca

SEQ ID NO: 2030922 - RNA, 19 nt, Human herpesvirus 5
aggccagcugccaccaggg

SEQ ID NO: 2030923 - RNA, 16 nt, Human herpesvirus 5
ugagcaacaaacacag

SEQ ID NO: 2030924 - RNA, 16 nt, Human herpesvirus 5
gucgccgacgaagaag

SEQ ID NO: 2030925 - RNA, 17 nt, Human herpesvirus 5
cucagugaauucuggca

SEQ ID NO: 2030926 - RNA, 15 nt, Human herpesvirus 5
cggcgcccgggccgc

SEQ ID NO: 2030927 - RNA, 14 nt, Human herpesvirus 5
aaaugagaccccau

SEQ ID NO: 2030928 - RNA, 16 nt, Human herpesvirus 5
ugcucgaccaggaggu

SEQ ID NO: 2030929 - RNA, 17 nt, Human herpesvirus 5
agacgaugaaccuuccc

SEQ ID NO: 2030930 - RNA, 20 nt, Human herpesvirus 5
gcguguguguuucuuaacua

SEQ ID NO: 2030931 - RNA, 16 nt, Human herpesvirus 5
agugaucuucauucac

SEQ ID NO: 2030932 - RNA, 22 nt, Human herpesvirus 5
uaucuguguccgcccgagcagg

SEQ ID NO: 2030933 - RNA, 17 nt, Human herpesvirus 5
caccccuuuuggugugu

SEQ ID NO: 2030934 - RNA, 18 nt, Human herpesvirus 5
cgcgagcggaacccgggc

SEQ ID NO: 2030935 - RNA, 23 nt, Human herpesvirus 5
aagacgggacggcugccucucau

SEQ ID NO: 2030936 - RNA, 20 nt, Human herpesvirus 5
aagaugggacgugguaacga

SEQ ID NO: 2030937 - RNA, 19 nt, Human herpesvirus 5
cggcgcuguacggcagcgg

SEQ ID NO: 2030938 - RNA, 14 nt, Human herpesvirus 5
cuggguauccccga

SEQ ID NO: 2030939 - RNA, 14 nt, Human herpesvirus 5
aaggguaggugcgc

SEQ ID NO: 2030940 - RNA, 20 nt, Human herpesvirus 5
acgcugucuugcuuaaugau

SEQ ID NO: 2030941 - RNA, 16 nt, Human herpesvirus 5
cgcgcaagugccugca

SEQ ID NO: 2030942 - RNA, 14 nt, Human herpesvirus 5
gcuuugguggauaa

SEQ ID NO: 2030943 - RNA, 12 nt, Human herpesvirus 5
cacccaggccgc

SEQ ID NO: 2030944 - RNA, 21 nt, Human herpesvirus 5
cggacuuggcagcgggccugu

SEQ ID NO: 2030945 - RNA, 22 nt, Human herpesvirus 5
ccucuuaacaagccgaccccca

SEQ ID NO: 2030946 - RNA, 18 nt, Human herpesvirus 5
augggaaacggacacuag

SEQ ID NO: 2030947 - RNA, 12 nt, Human herpesvirus 5
caucauggagcu

SEQ ID NO: 2030948 - RNA, 21 nt, Human herpesvirus 5
uuuuaaagucggucaugaagu

SEQ ID NO: 2030949 - RNA, 19 nt, Human herpesvirus 5
cugcauccaucacaucacc

SEQ ID NO: 2030950 - RNA, 13 nt, Human herpesvirus 5
gugcucaggccac

SEQ ID NO: 2030951 - RNA, 14 nt, Human herpesvirus 5
cuagccgggcagga

SEQ ID NO: 2030952 - RNA, 23 nt, Human herpesvirus 5
acguuggcucucgcagcccgagg

SEQ ID NO: 2030953 - RNA, 18 nt, Human herpesvirus 5
uccaggagguggucgagc

SEQ ID NO: 2030954 - RNA, 17 nt, Human herpesvirus 5
auguggcuccgccggca

SEQ ID NO: 2030955 - RNA, 23 nt, Human herpesvirus 5
cuggauacaguugauaacaaaca

SEQ ID NO: 2030956 - RNA, 23 nt, Human herpesvirus 5
aguccaccaggccgcaaagcugg

SEQ ID NO: 2030957 - RNA, 19 nt, Human herpesvirus 5
ccuguuccugucaaugucc

SEQ ID NO: 2030958 - RNA, 14 nt, Human herpesvirus 5
aaagacuguggugg

SEQ ID NO: 2030959 - RNA, 13 nt, Human herpesvirus 5
ccgcguagcgcuc

SEQ ID NO: 2030960 - RNA, 21 nt, Human herpesvirus 5
caagagcaugcugugggccca

SEQ ID NO: 2030961 - RNA, 16 nt, Human herpesvirus 5
gucccuacggaaccug

SEQ ID NO: 2030962 - RNA, 12 nt, Human herpesvirus 5
gacauggagccc

SEQ ID NO: 2030963 - RNA, 20 nt, Human herpesvirus 5
cugcucccccaacccaggga

SEQ ID NO: 2030964 - RNA, 16 nt, Human herpesvirus 5
ccgcggcgguggccgu

SEQ ID NO: 2030965 - RNA, 17 nt, Human herpesvirus 5
ggugaugcguguggccg

SEQ ID NO: 2030966 - RNA, 18 nt, Human herpesvirus 5
cuuuguagcgcucaaagg

SEQ ID NO: 2030967 - RNA, 13 nt, Human herpesvirus 5
cggccugagcgcg

SEQ ID NO: 2030968 - RNA, 23 nt, Human herpesvirus 5
guuuuccaaaacgugccaggcug

SEQ ID NO: 2030969 - RNA, 16 nt, Human herpesvirus 5
gcgccgccagcgcggu

SEQ ID NO: 2030970 - RNA, 19 nt, Human herpesvirus 5
caucugcggcagcgguacc

SEQ ID NO: 2030971 - RNA, 19 nt, Human herpesvirus 5
ccgcggugcgcugcagccg

SEQ ID NO: 2030972 - RNA, 12 nt, Human herpesvirus 5
cggugagacccg

SEQ ID NO: 2030973 - RNA, 20 nt, Human herpesvirus 5
cccgaugugcagggacagug

SEQ ID NO: 2030974 - RNA, 22 nt, Human herpesvirus 5
cgccgucgcgccuuccuccucu

SEQ ID NO: 2030975 - RNA, 20 nt, Human herpesvirus 5
gggaacuacguggguaagug

SEQ ID NO: 2030976 - RNA, 21 nt, Human herpesvirus 5
accagcaaggucaacuacagc

SEQ ID NO: 2030977 - RNA, 22 nt, Human herpesvirus 5
cccugcuccgcaagcgccgcca

SEQ ID NO: 2030978 - RNA, 13 nt, Human herpesvirus 5
cgucggucccauc

SEQ ID NO: 2030979 - RNA, 14 nt, Human herpesvirus 5
cggaacccuucccg

SEQ ID NO: 2030980 - RNA, 17 nt, Human herpesvirus 5
augagcgugcugcucug

SEQ ID NO: 2030981 - RNA, 23 nt, Human herpesvirus 5
auaugucaacaugaaucuucccc

SEQ ID NO: 2030982 - RNA, 19 nt, Human herpesvirus 5
ggcguuacuugcggcgcuu

SEQ ID NO: 2030983 - RNA, 14 nt, Human herpesvirus 5
cgcgguuaagggag

SEQ ID NO: 2030984 - RNA, 21 nt, Human herpesvirus 5
agacauuccccaccuucccuc

SEQ ID NO: 2030985 - RNA, 14 nt, Human herpesvirus 5
cggcgucaccacuu

SEQ ID NO: 2030986 - RNA, 22 nt, Human herpesvirus 5
cagaccgcaacaacagcagcaa

SEQ ID NO: 2030987 - RNA, 17 nt, Human herpesvirus 5
cgacguucuccaaggga

SEQ ID NO: 2030988 - RNA, 21 nt, Human herpesvirus 5
gcgcucuugugucucccgaca

SEQ ID NO: 2030989 - RNA, 20 nt, Human herpesvirus 5
cacgcguuauacgccgagug

SEQ ID NO: 2030990 - RNA, 13 nt, Human herpesvirus 5
cccgcugcugcug

SEQ ID NO: 2030991 - RNA, 17 nt, Human herpesvirus 5
ucgaggaggggccgcug

SEQ ID NO: 2030992 - RNA, 16 nt, Human herpesvirus 5
uaccaacgcuuccugc

SEQ ID NO: 2030993 - RNA, 22 nt, Human herpesvirus 5
aggccucguugcacgagugggc

SEQ ID NO: 2030994 - RNA, 23 nt, Human herpesvirus 5
ggcccguuuugcauaagcgcgga

SEQ ID NO: 2030995 - RNA, 14 nt, Human herpesvirus 5
cuuagcuuucuuga

SEQ ID NO: 2030996 - RNA, 14 nt, Human herpesvirus 5
ugcguggggugcug

SEQ ID NO: 2030997 - RNA, 20 nt, Human herpesvirus 5
gcgcuccaggcggagaugag

SEQ ID NO: 2030998 - RNA, 12 nt, Human herpesvirus 5
ccuggagcagcg

SEQ ID NO: 2030999 - RNA, 15 nt, Human herpesvirus 5
caagagcaugcugug

SEQ ID NO: 2031000 - RNA, 23 nt, Human herpesvirus 5
cugagccggggugccgccgcugc

SEQ ID NO: 2031001 - RNA, 18 nt, Human herpesvirus 5
acgugcgguaacuggcag

SEQ ID NO: 2031002 - RNA, 14 nt, Human herpesvirus 5
uccaaaacgugcca

SEQ ID NO: 2031003 - RNA, 20 nt, Human herpesvirus 5
cguccccacguccacccauc

SEQ ID NO: 2031004 - RNA, 18 nt, Human herpesvirus 5
acucacaauggaagccau

SEQ ID NO: 2031005 - RNA, 13 nt, Human herpesvirus 5
gcccgacagcugc

SEQ ID NO: 2031006 - RNA, 21 nt, Human herpesvirus 5
aaccaccguagcacugcgcaa

SEQ ID NO: 2031007 - RNA, 20 nt, Human herpesvirus 5
guaaccacgucgaccaggug

SEQ ID NO: 2031008 - RNA, 12 nt, Human herpesvirus 5
uugcgcauggua

SEQ ID NO: 2031009 - RNA, 13 nt, Human herpesvirus 5
uggagcagcucuu

SEQ ID NO: 2031010 - RNA, 15 nt, Human herpesvirus 5
ucguuguccuccucg

SEQ ID NO: 2031011 - RNA, 17 nt, Human herpesvirus 5
cgcgaguaucgggccgu

SEQ ID NO: 2031012 - RNA, 19 nt, Human herpesvirus 5
aaaagacuuaccaccuccu

SEQ ID NO: 2031013 - RNA, 22 nt, Human herpesvirus 5
uucaccuuugcgcauccccuga

SEQ ID NO: 2031014 - RNA, 17 nt, Human herpesvirus 5
ccacuaccaccacgacc

SEQ ID NO: 2031015 - RNA, 17 nt, Human herpesvirus 5
cgagcugaaggacacgg

SEQ ID NO: 2031016 - RNA, 23 nt, Human herpesvirus 5
ccgcugugcuggccgccgcugca

SEQ ID NO: 2031017 - RNA, 22 nt, Human herpesvirus 5
ggaggccgcacuggacgacguc

SEQ ID NO: 2031018 - RNA, 13 nt, Human herpesvirus 5
cugcggcgacugg

SEQ ID NO: 2031019 - RNA, 21 nt, Human herpesvirus 5
cccaugcgggaacuggccugg

SEQ ID NO: 2031020 - RNA, 19 nt, Human herpesvirus 5
cgguuuccacgccaccgcc

SEQ ID NO: 2031021 - RNA, 22 nt, Human herpesvirus 5
cucgagggcuccgucugcguca

SEQ ID NO: 2031022 - RNA, 17 nt, Human herpesvirus 5
gcucucgcggcccuuca

SEQ ID NO: 2031023 - RNA, 19 nt, Human herpesvirus 5
cgggcucguguggcagcug

SEQ ID NO: 2031024 - RNA, 17 nt, Human herpesvirus 5
uggggucugcuguuacu

SEQ ID NO: 2031025 - RNA, 18 nt, Human herpesvirus 5
gccguucgacgaucuuua

SEQ ID NO: 2031026 - RNA, 20 nt, Human herpesvirus 5
gucgccggccgacgcgcgcc

SEQ ID NO: 2031027 - RNA, 16 nt, Human herpesvirus 5
uaucagaaagcugcaa

SEQ ID NO: 2031028 - RNA, 16 nt, Human herpesvirus 5
aacuucuaccaucucc

SEQ ID NO: 2031029 - RNA, 20 nt, Human herpesvirus 5
cgcucgugaaacagcagcuc

SEQ ID NO: 2031030 - RNA, 17 nt, Human herpesvirus 5
ugcacgagugggccagc

SEQ ID NO: 2031031 - RNA, 22 nt, Human herpesvirus 5
cgcgagcggcggacuuggcagc

SEQ ID NO: 2031032 - RNA, 18 nt, Human herpesvirus 5
gugugaucugggcagcgg

SEQ ID NO: 2031033 - RNA, 20 nt, Human herpesvirus 5
gcgcuguacggcagcgggga

SEQ ID NO: 2031034 - RNA, 16 nt, Human herpesvirus 5
agcuuuagccagguga

SEQ ID NO: 2031035 - RNA, 23 nt, Human herpesvirus 5
acgcuacuuuccgauccuuggaa

SEQ ID NO: 2031036 - RNA, 14 nt, Human herpesvirus 5
ugcccgcgauuucu

SEQ ID NO: 2031037 - RNA, 19 nt, Human herpesvirus 5
cuugcggcgccgacuccuu

SEQ ID NO: 2031038 - RNA, 16 nt, Human herpesvirus 5
caugugcagcugguga

SEQ ID NO: 2031039 - RNA, 14 nt, Human herpesvirus 5
ucgaugaagccuau

SEQ ID NO: 2031040 - RNA, 16 nt, Human herpesvirus 5
gugcagcugcgccugg

SEQ ID NO: 2031041 - RNA, 22 nt, Human herpesvirus 5
uuuuucuaugauaugcgugucu

SEQ ID NO: 2031042 - RNA, 19 nt, Human herpesvirus 5
agugacguggauacuagua

SEQ ID NO: 2031043 - RNA, 16 nt, Human herpesvirus 5
accgcagcgguggcug

SEQ ID NO: 2031044 - RNA, 17 nt, Human herpesvirus 5
cguacaccgcuggagcu

SEQ ID NO: 2031045 - RNA, 20 nt, Human herpesvirus 5
gcucgugaaacagcagcucg

SEQ ID NO: 2031046 - RNA, 14 nt, Human herpesvirus 5
guguuccacuccau

SEQ ID NO: 2031047 - RNA, 15 nt, Human herpesvirus 5
caggguaacagccuu

SEQ ID NO: 2031048 - RNA, 19 nt, Human herpesvirus 5
aaugcgucugcaacggcau

SEQ ID NO: 2031049 - RNA, 14 nt, Human herpesvirus 5
ucugcaagucccug

SEQ ID NO: 2031050 - RNA, 13 nt, Human herpesvirus 5
auccauccugggg

SEQ ID NO: 2031051 - RNA, 16 nt, Human herpesvirus 5
aucgggcccgccggcc

SEQ ID NO: 2031052 - RNA, 15 nt, Human herpesvirus 5
cgaccagcugcugga

SEQ ID NO: 2031053 - RNA, 14 nt, Human herpesvirus 5
gccggaggcugugg

SEQ ID NO: 2031054 - RNA, 18 nt, Human herpesvirus 5
uggacgguacaguuuaug

SEQ ID NO: 2031055 - RNA, 13 nt, Human herpesvirus 5
gaggauguucugc

SEQ ID NO: 2031056 - RNA, 23 nt, Human herpesvirus 5
gucacacaggccagcugccacca

SEQ ID NO: 2031057 - RNA, 17 nt, Human herpesvirus 5
accgcaguugcugccuu

SEQ ID NO: 2031058 - RNA, 22 nt, Human herpesvirus 5
uguacgugcgguaacuggcaga

SEQ ID NO: 2031059 - RNA, 22 nt, Human herpesvirus 5
ucugggugcaaugccucauccu

SEQ ID NO: 2031060 - RNA, 23 nt, Human herpesvirus 5
ccgcgagcggcggacuuggcagc

SEQ ID NO: 2031061 - RNA, 20 nt, Human herpesvirus 5
gcuggcgguauggcugcgcg

SEQ ID NO: 2031062 - RNA, 16 nt, Human herpesvirus 5
ccuggaucuuggcggc

SEQ ID NO: 2031063 - RNA, 13 nt, Human herpesvirus 5
aagcguucagugu

SEQ ID NO: 2031064 - RNA, 15 nt, Human herpesvirus 5
uggacggguuucagc

SEQ ID NO: 2031065 - RNA, 20 nt, Human herpesvirus 5
ccaucucgcguaacgugucu

SEQ ID NO: 2031066 - RNA, 14 nt, Human herpesvirus 5
ggaugagggcucuu

SEQ ID NO: 2031067 - RNA, 15 nt, Human herpesvirus 5
guacggcccggcagc

SEQ ID NO: 2031068 - RNA, 20 nt, Human herpesvirus 5
cgcaucaucaacagcagcaa

SEQ ID NO: 2031069 - RNA, 21 nt, Human herpesvirus 5
gcuggugaucggccgcggugc

SEQ ID NO: 2031070 - RNA, 24 nt, Human herpesvirus 5
gugcagguucugaaucugcuccag

SEQ ID NO: 2031071 - RNA, 16 nt, Human herpesvirus 5
ggccgacgaggccggc

SEQ ID NO: 2031072 - RNA, 16 nt, Human herpesvirus 5
caucagcgcacggugg

SEQ ID NO: 2031073 - RNA, 12 nt, Human herpesvirus 5
gcugaugucugc

SEQ ID NO: 2031074 - RNA, 12 nt, Human herpesvirus 5
ggcggcagccac

SEQ ID NO: 2031075 - RNA, 19 nt, Human herpesvirus 5
accuggguggaacgagcgc

SEQ ID NO: 2031076 - RNA, 20 nt, Human herpesvirus 5
cgucgguaccgucuccacca

SEQ ID NO: 2031077 - RNA, 12 nt, Human herpesvirus 5
cgccacacgugu

SEQ ID NO: 2031078 - RNA, 23 nt, Human herpesvirus 5
agucauagagccaacgagacuau

SEQ ID NO: 2031079 - RNA, 21 nt, Human herpesvirus 5
guaaucuuccauaauaaaagu

SEQ ID NO: 2031080 - RNA, 13 nt, Human herpesvirus 5
guuuccacgccac

SEQ ID NO: 2031081 - RNA, 21 nt, Human herpesvirus 5
ucccgacaggcucgucguggg

SEQ ID NO: 2031082 - RNA, 14 nt, Human herpesvirus 5
auaauaaaaguaaa

SEQ ID NO: 2031083 - RNA, 12 nt, Human herpesvirus 5
ccaaguucagca

SEQ ID NO: 2031084 - RNA, 13 nt, Human herpesvirus 5
gagacagccacau

SEQ ID NO: 2031085 - RNA, 18 nt, Human herpesvirus 5
cucggaaacugugcguca

SEQ ID NO: 2031086 - RNA, 23 nt, Human herpesvirus 5
augcagaccuacagcaccccccu

SEQ ID NO: 2031087 - RNA, 13 nt, Human herpesvirus 5
ucacgcaggugag

SEQ ID NO: 2031088 - RNA, 14 nt, Human herpesvirus 5
ggacaaggcuccga

SEQ ID NO: 2031089 - RNA, 21 nt, Human herpesvirus 5
uggcgggccgaccgccgccgc

SEQ ID NO: 2031090 - RNA, 12 nt, Human herpesvirus 5
cggaggagcguc

SEQ ID NO: 2031091 - RNA, 18 nt, Human herpesvirus 5
gaugagccccucagucug

SEQ ID NO: 2031092 - RNA, 13 nt, Human herpesvirus 5
cuugcgcuucugc

SEQ ID NO: 2031093 - RNA, 15 nt, Human herpesvirus 5
caccgucgcccucag

SEQ ID NO: 2031094 - RNA, 15 nt, Human herpesvirus 5
gccucuuuugacaug

SEQ ID NO: 2031095 - RNA, 17 nt, Human herpesvirus 5
acgugaccgugggacaa

SEQ ID NO: 2031096 - RNA, 24 nt, Human herpesvirus 5
uggggcaacugcugccucgaugcg

SEQ ID NO: 2031097 - RNA, 16 nt, Human herpesvirus 5
aauacgauaauugcua

SEQ ID NO: 2031098 - RNA, 19 nt, Human herpesvirus 5
acgcuggcucacgccggca

SEQ ID NO: 2031099 - RNA, 15 nt, Human herpesvirus 5
caaauaccaacacua

SEQ ID NO: 2031100 - RNA, 17 nt, Human herpesvirus 5
cucuaucgcgacagaca

SEQ ID NO: 2031101 - RNA, 20 nt, Human herpesvirus 5
cacacggugugaugguacua

SEQ ID NO: 2031102 - RNA, 18 nt, Human herpesvirus 5
ucuacuccaucaugaagg

SEQ ID NO: 2031103 - RNA, 18 nt, Human herpesvirus 5
ucgacuggaggcucugug

SEQ ID NO: 2031104 - RNA, 16 nt, Human herpesvirus 5
cgaaagacaaugaaaa

SEQ ID NO: 2031105 - RNA, 16 nt, Human herpesvirus 5
gcugccuguuccugcu

SEQ ID NO: 2031106 - RNA, 12 nt, Human herpesvirus 5
ucgucugagccg

SEQ ID NO: 2031107 - RNA, 18 nt, Human herpesvirus 5
auaugcuaauauauccaa

SEQ ID NO: 2031108 - RNA, 17 nt, Human herpesvirus 5
cauuacuaaacaaaaaa

SEQ ID NO: 2031109 - RNA, 13 nt, Human herpesvirus 5
cuugcgcucccug

SEQ ID NO: 2031110 - RNA, 15 nt, Human herpesvirus 5
gucgagacggcuccg

SEQ ID NO: 2031111 - RNA, 16 nt, Human herpesvirus 5
cgcaucuugccggugc

SEQ ID NO: 2031112 - RNA, 20 nt, Human herpesvirus 5
cgugguggccgugcugggcu

SEQ ID NO: 2031113 - RNA, 17 nt, Human herpesvirus 5
gggaacgccguguggga

SEQ ID NO: 2031114 - RNA, 19 nt, Human herpesvirus 5
agcgccagcggccuggccu

SEQ ID NO: 2031115 - RNA, 18 nt, Human herpesvirus 5
acgacuggcucaacuuuc

SEQ ID NO: 2031116 - RNA, 14 nt, Human herpesvirus 5
cugggucagugcca

SEQ ID NO: 2031117 - RNA, 14 nt, Human herpesvirus 5
uuuauuaaagguuu

SEQ ID NO: 2031118 - RNA, 21 nt, Human herpesvirus 5
ggcugagauucgcgggaucgu

SEQ ID NO: 2031119 - RNA, 23 nt, Human herpesvirus 5
gacucgcugccgcagcugcugga

SEQ ID NO: 2031120 - RNA, 18 nt, Human herpesvirus 5
gcagaucgugccgcgagg

SEQ ID NO: 2031121 - RNA, 14 nt, Human herpesvirus 5
gcugacgaugagca

SEQ ID NO: 2031122 - RNA, 18 nt, Human herpesvirus 5
gagcaucgcaacaacagc

SEQ ID NO: 2031123 - RNA, 20 nt, Human herpesvirus 5
ggcucgaccggcggcugcug

SEQ ID NO: 2031124 - RNA, 16 nt, Human herpesvirus 5
gcaagcagucaaaaaa

SEQ ID NO: 2031125 - RNA, 21 nt, Human herpesvirus 5
aaccagcugguaccugaaacc

SEQ ID NO: 2031126 - RNA, 16 nt, Human herpesvirus 5
cuacgccggggaagcc

SEQ ID NO: 2031127 - RNA, 17 nt, Human herpesvirus 5
acacagcgccgcgcugg

SEQ ID NO: 2031128 - RNA, 20 nt, Human herpesvirus 5
gacagcacguuaguuacagc

SEQ ID NO: 2031129 - RNA, 16 nt, Human herpesvirus 5
aauuuuuucgcugcca

SEQ ID NO: 2031130 - RNA, 20 nt, Human herpesvirus 5
gcuuacccuucaauuuccac

SEQ ID NO: 2031131 - RNA, 13 nt, Human herpesvirus 5
accuaccugggcu

SEQ ID NO: 2031132 - RNA, 21 nt, Human herpesvirus 5
ugcugagacugagacuggugg

SEQ ID NO: 2031133 - RNA, 12 nt, Human herpesvirus 5
acgcuuucagga

SEQ ID NO: 2031134 - RNA, 18 nt, Human herpesvirus 5
aacgucguuguguucuua

SEQ ID NO: 2031135 - RNA, 14 nt, Human herpesvirus 5
gaccgcggcgcagg

SEQ ID NO: 2031136 - RNA, 15 nt, Human herpesvirus 5
ccucagguuccccga

SEQ ID NO: 2031137 - RNA, 23 nt, Human herpesvirus 5
ccaccgugaugucaacacugacg

SEQ ID NO: 2031138 - RNA, 22 nt, Human herpesvirus 5
ccgcagcugcuggagcgcggcc

SEQ ID NO: 2031139 - RNA, 16 nt, Human herpesvirus 5
gugucgcgcacccggc

SEQ ID NO: 2031140 - RNA, 12 nt, Human herpesvirus 5
ggucggugucuc

SEQ ID NO: 2031141 - RNA, 20 nt, Human herpesvirus 5
gggcuuuccuugucacguug

SEQ ID NO: 2031142 - RNA, 16 nt, Human herpesvirus 5
cucagcuugauggugu

SEQ ID NO: 2031143 - RNA, 16 nt, Human herpesvirus 5
gcguagcgcuccugga

SEQ ID NO: 2031144 - RNA, 22 nt, Human herpesvirus 5
ccgcugccguacagcgccgccg

SEQ ID NO: 2031145 - RNA, 17 nt, Human herpesvirus 5
uaaaaguaaaaaugccc

SEQ ID NO: 2031146 - RNA, 15 nt, Human herpesvirus 5
auauugaaaaugucg

SEQ ID NO: 2031147 - RNA, 18 nt, Human herpesvirus 5
cuguguuauucagaacca

SEQ ID NO: 2031148 - RNA, 19 nt, Human herpesvirus 5
uccaaggccuccagcgccu

SEQ ID NO: 2031149 - RNA, 13 nt, Human herpesvirus 5
ccuaacuguagca

SEQ ID NO: 2031150 - RNA, 19 nt, Human herpesvirus 5
ggcgcccaaaccgcaggag

SEQ ID NO: 2031151 - RNA, 19 nt, Human herpesvirus 5
ucgagucgcguguguuuug

SEQ ID NO: 2031152 - RNA, 17 nt, Human herpesvirus 5
cgccggccacgagccag

SEQ ID NO: 2031153 - RNA, 19 nt, Human herpesvirus 5
gguauccacgcucguucaa

SEQ ID NO: 2031154 - RNA, 21 nt, Human herpesvirus 5
uuuuaucgucucaauaaaagc

SEQ ID NO: 2031155 - RNA, 18 nt, Human herpesvirus 5
gucugagcgccgacugga

SEQ ID NO: 2031156 - RNA, 20 nt, Human herpesvirus 5
acgugcgauuuggaccugga

SEQ ID NO: 2031157 - RNA, 21 nt, Human herpesvirus 5
cagcagauacaugcgucguau

SEQ ID NO: 2031158 - RNA, 15 nt, Human herpesvirus 5
ggcugugcgcgccgg

SEQ ID NO: 2031159 - RNA, 15 nt, Human herpesvirus 5
cccgccggagcccgg

SEQ ID NO: 2031160 - RNA, 15 nt, Human herpesvirus 5
caggaaaacggaaug

SEQ ID NO: 2031161 - RNA, 23 nt, Human herpesvirus 5
agcgugacuuugagcggcucgcc

SEQ ID NO: 2031162 - RNA, 14 nt, Human herpesvirus 5
cgggcuccaugcug

SEQ ID NO: 2031163 - RNA, 14 nt, Human herpesvirus 5
cugucugcagccgg

SEQ ID NO: 2031164 - RNA, 15 nt, Human herpesvirus 5
ccagcgagcugcgcg

SEQ ID NO: 2031165 - RNA, 17 nt, Human herpesvirus 5
cgacugcggcgacuggc

SEQ ID NO: 2031166 - RNA, 18 nt, Human herpesvirus 5
cggcucaccacgcagcag

SEQ ID NO: 2031167 - RNA, 17 nt, Human herpesvirus 5
gcccgggggugacaagg

SEQ ID NO: 2031168 - RNA, 23 nt, Human herpesvirus 5
gucacuauccgaugguuucauua

SEQ ID NO: 2031169 - RNA, 20 nt, Human herpesvirus 5
cugagcuacgaugaccacga

SEQ ID NO: 2031170 - RNA, 16 nt, Human herpesvirus 5
guacagcggcucgccg

SEQ ID NO: 2031171 - RNA, 16 nt, Human herpesvirus 5
gugcggacggugcggg

SEQ ID NO: 2031172 - RNA, 21 nt, Human herpesvirus 5
guaugcaugucgcgacagaga

SEQ ID NO: 2031173 - RNA, 13 nt, Human herpesvirus 5
gcucgaccaggag

SEQ ID NO: 2031174 - RNA, 15 nt, Human herpesvirus 5
gcugcugcacgggcu

SEQ ID NO: 2031175 - RNA, 13 nt, Human herpesvirus 5
gggucaaaagccu

SEQ ID NO: 2031176 - RNA, 13 nt, Human herpesvirus 5
gcaagagccggaa

SEQ ID NO: 2031177 - RNA, 14 nt, Human herpesvirus 5
ccggugcugccgca

SEQ ID NO: 2031178 - RNA, 18 nt, Human herpesvirus 5
ucgaccggcggcugcugu

SEQ ID NO: 2031179 - RNA, 15 nt, Human herpesvirus 5
cuucggccggcugcu

SEQ ID NO: 2031180 - RNA, 19 nt, Human herpesvirus 5
cugagaaccuacgugcaac

SEQ ID NO: 2031181 - RNA, 16 nt, Human herpesvirus 5
gcgucggcgccccaca

SEQ ID NO: 2031182 - RNA, 18 nt, Human herpesvirus 5
gagucgcguguguuuuga

SEQ ID NO: 2031183 - RNA, 13 nt, Human herpesvirus 5
cagcugcgccugg

SEQ ID NO: 2031184 - RNA, 20 nt, Human herpesvirus 5
uucugcuuuuuugucuccug

SEQ ID NO: 2031185 - RNA, 12 nt, Human herpesvirus 5
uguacugaaggg

SEQ ID NO: 2031186 - RNA, 14 nt, Human herpesvirus 5
ccgccagcggaagc

SEQ ID NO: 2031187 - RNA, 14 nt, Human herpesvirus 5
cucaaacaccgcug

SEQ ID NO: 2031188 - RNA, 13 nt, Human herpesvirus 5
ucaugccgccacc

SEQ ID NO: 2031189 - RNA, 18 nt, Human herpesvirus 5
cgcgccucacgcugcacg

SEQ ID NO: 2031190 - RNA, 23 nt, Human herpesvirus 5
caguacgauccuccggcgcugag

SEQ ID NO: 2031191 - RNA, 16 nt, Human herpesvirus 5
gcucacguagcaggcc

SEQ ID NO: 2031192 - RNA, 24 nt, Human herpesvirus 5
ugguggccgaacagcagcucuucc

SEQ ID NO: 2031193 - RNA, 17 nt, Human herpesvirus 5
ccgaguaacgcgccguc

SEQ ID NO: 2031194 - RNA, 14 nt, Human herpesvirus 5
uaacggucaagaag

SEQ ID NO: 2031195 - RNA, 15 nt, Human herpesvirus 5
acggcuuuccaagcu

SEQ ID NO: 2031196 - RNA, 18 nt, Human herpesvirus 5
acggcaucaugcugggcg

SEQ ID NO: 2031197 - RNA, 22 nt, Human herpesvirus 5
agcggcuguggcuucucuggag

SEQ ID NO: 2031198 - RNA, 15 nt, Human herpesvirus 5
ugcugcaacggccgu

SEQ ID NO: 2031199 - RNA, 23 nt, Human herpesvirus 5
gaccggcagcaccaguuggccac

SEQ ID NO: 2031200 - RNA, 22 nt, Human herpesvirus 5
gcugcagccggaggaagcggcg

SEQ ID NO: 2031201 - RNA, 16 nt, Human herpesvirus 5
uccgugauagccacga

SEQ ID NO: 2031202 - RNA, 20 nt, Human herpesvirus 5
uuuuuaauaaaaaacaaggu

SEQ ID NO: 2031203 - RNA, 17 nt, Human herpesvirus 5
cugauccaguugcaccu

SEQ ID NO: 2031204 - RNA, 19 nt, Human herpesvirus 5
aagaaugcaacgcuuucag

SEQ ID NO: 2031205 - RNA, 23 nt, Human herpesvirus 5
uggcaauuacguggguugcaccc

SEQ ID NO: 2031206 - RNA, 19 nt, Human herpesvirus 5
uggaccggugguacugcug

SEQ ID NO: 2031207 - RNA, 15 nt, Human herpesvirus 5
aagaagaaccugccg

SEQ ID NO: 2031208 - RNA, 12 nt, Human herpesvirus 5
gguccagccagc

SEQ ID NO: 2031209 - RNA, 20 nt, Human herpesvirus 5
gacacucuggcccugcugua

SEQ ID NO: 2031210 - RNA, 20 nt, Human herpesvirus 5
aaagaaaaaaugguguuaca

SEQ ID NO: 2031211 - RNA, 22 nt, Human herpesvirus 5
ccgucggcgucgcgucgcaggc

SEQ ID NO: 2031212 - RNA, 14 nt, Human herpesvirus 5
cguaauguagacag

SEQ ID NO: 2031213 - RNA, 14 nt, Human herpesvirus 5
gagaaagagcagcg

SEQ ID NO: 2031214 - RNA, 17 nt, Human herpesvirus 5
gcugcuguugcacgggc

SEQ ID NO: 2031215 - RNA, 14 nt, Human herpesvirus 5
guggcuguuguuga

SEQ ID NO: 2031216 - RNA, 15 nt, Human herpesvirus 5
agcaugaacugccac

SEQ ID NO: 2031217 - RNA, 21 nt, Human herpesvirus 5
ccggucgucugcgacuccugg

SEQ ID NO: 2031218 - RNA, 17 nt, Human herpesvirus 5
aaaucaucguucgcaug

SEQ ID NO: 2031219 - RNA, 19 nt, Human herpesvirus 5
uuacacacuccuugguacu

SEQ ID NO: 2031220 - RNA, 18 nt, Human herpesvirus 5
gucuggagguggccugca

SEQ ID NO: 2031221 - RNA, 17 nt, Human herpesvirus 5
ccaguuacacucgcucu

SEQ ID NO: 2031222 - RNA, 14 nt, Human herpesvirus 5
uuguaucauuacag

SEQ ID NO: 2031223 - RNA, 20 nt, Human herpesvirus 5
ggcaagccaaaccacaaggc

SEQ ID NO: 2031224 - RNA, 20 nt, Human herpesvirus 5
cugccucagucucucggugc

SEQ ID NO: 2031225 - RNA, 18 nt, Human herpesvirus 5
gguguccggacggcgaag

SEQ ID NO: 2031226 - RNA, 14 nt, Human herpesvirus 5
ccuguugcucuccu

SEQ ID NO: 2031227 - RNA, 16 nt, Human herpesvirus 5
uccaauaaacccaucc

SEQ ID NO: 2031228 - RNA, 22 nt, Human herpesvirus 5
cacccgucaugguacagaucca

SEQ ID NO: 2031229 - RNA, 13 nt, Human herpesvirus 5
acgcucaaggaca

SEQ ID NO: 2031230 - RNA, 23 nt, Human herpesvirus 5
gaaaccguacuaagucucccgug

SEQ ID NO: 2031231 - RNA, 17 nt, Human herpesvirus 5
ggcaccgggaacuuaug

SEQ ID NO: 2031232 - RNA, 14 nt, Human herpesvirus 5
ugcugcaaggccuc

SEQ ID NO: 2031233 - RNA, 16 nt, Human herpesvirus 5
accgucgucgcucuag

SEQ ID NO: 2031234 - RNA, 12 nt, Human herpesvirus 5
cuacuuuggaau

SEQ ID NO: 2031235 - RNA, 20 nt, Human herpesvirus 5
uaacccccgacgagcaggcu

SEQ ID NO: 2031236 - RNA, 20 nt, Human herpesvirus 5
cuugaaagacggacccgcca

SEQ ID NO: 2031237 - RNA, 13 nt, Human herpesvirus 5
uguuacgaccugu

SEQ ID NO: 2031238 - RNA, 11 nt, Human herpesvirus 5
cgcgacacggu

SEQ ID NO: 2031239 - RNA, 23 nt, Human herpesvirus 5
gaggaccauuuccaugugcagcu

SEQ ID NO: 2031240 - RNA, 14 nt, Human herpesvirus 5
ugggcuacguaggc

SEQ ID NO: 2031241 - RNA, 17 nt, Human herpesvirus 5
accaacgcgaccaccgu

SEQ ID NO: 2031242 - RNA, 19 nt, Human herpesvirus 5
uuaguacgugcguguuuuu

SEQ ID NO: 2031243 - RNA, 20 nt, Human herpesvirus 5
ggagcgaguggggcaacugc

SEQ ID NO: 2031244 - RNA, 17 nt, Human herpesvirus 5
cagaagcugcggcucug

SEQ ID NO: 2031245 - RNA, 17 nt, Human herpesvirus 5
agaugaggcggcgugga

SEQ ID NO: 2031246 - RNA, 20 nt, Human herpesvirus 5
ugcuauaccucaguuauccc

SEQ ID NO: 2031247 - RNA, 12 nt, Human herpesvirus 5
gccgagcccaac

SEQ ID NO: 2031248 - RNA, 14 nt, Human herpesvirus 5
ugccgaaacaccgu

SEQ ID NO: 2031249 - RNA, 13 nt, Human herpesvirus 5
ggcuucucuggag

SEQ ID NO: 2031250 - RNA, 15 nt, Human herpesvirus 5
gcgguuauggcuccg

SEQ ID NO: 2031251 - RNA, 15 nt, Human herpesvirus 5
caaagaacgaaaaca

SEQ ID NO: 2031252 - RNA, 17 nt, Human herpesvirus 5
gagguugucguccgaau

SEQ ID NO: 2031253 - RNA, 15 nt, Human herpesvirus 5
gcgggagacuagguc

SEQ ID NO: 2031254 - RNA, 13 nt, Human herpesvirus 5
ugcaccugcugcc

SEQ ID NO: 2031255 - RNA, 22 nt, Human herpesvirus 5
uuuaucaauacaaugacacuaa

SEQ ID NO: 2031256 - RNA, 20 nt, Human herpesvirus 5
gucuccgaacucagaggcca

SEQ ID NO: 2031257 - RNA, 19 nt, Human herpesvirus 5
ucaugaguuggugcagcug

SEQ ID NO: 2031258 - RNA, 21 nt, Human herpesvirus 5
ggcaacgugccacgugacuca

SEQ ID NO: 2031259 - RNA, 21 nt, Human herpesvirus 5
ugaggcgguggcugcgccucc

SEQ ID NO: 2031260 - RNA, 13 nt, Human herpesvirus 5
cagaccagccacc

SEQ ID NO: 2031261 - RNA, 22 nt, Human herpesvirus 5
ggcucgccgcagaccauccuca

SEQ ID NO: 2031262 - RNA, 22 nt, Human herpesvirus 5
augcauuaucaucuaaagacua

SEQ ID NO: 2031263 - RNA, 18 nt, Human herpesvirus 5
aaguaagcauggcuuaca

SEQ ID NO: 2031264 - RNA, 22 nt, Human herpesvirus 5
auuugcgacaguugccggaacc

SEQ ID NO: 2031265 - RNA, 14 nt, Human herpesvirus 5
ggccgucuccacca

SEQ ID NO: 2031266 - RNA, 17 nt, Human herpesvirus 5
cuccgaacucagaggcc

SEQ ID NO: 2031267 - RNA, 13 nt, Human herpesvirus 5
uugcggccgccgc

SEQ ID NO: 2031268 - RNA, 15 nt, Human herpesvirus 5
agugucagacacagc

SEQ ID NO: 2031269 - RNA, 23 nt, Human herpesvirus 5
cggcauacaaugugcugcaugag

SEQ ID NO: 2031270 - RNA, 22 nt, Human herpesvirus 5
gcgcccgagacggcggcauccu

SEQ ID NO: 2031271 - RNA, 22 nt, Human herpesvirus 5
cgguucucaaaaacuguaaggu

SEQ ID NO: 2031272 - RNA, 13 nt, Human herpesvirus 5
cacucgcucgcuu

SEQ ID NO: 2031273 - RNA, 20 nt, Human herpesvirus 5
ccagauacaacgucaugcau

SEQ ID NO: 2031274 - RNA, 18 nt, Human herpesvirus 5
cuccuguguaugaggauc

SEQ ID NO: 2031275 - RNA, 13 nt, Human herpesvirus 5
cggaacccucugg

SEQ ID NO: 2031276 - RNA, 14 nt, Human herpesvirus 5
ccauccucguggaa

SEQ ID NO: 2031277 - RNA, 11 nt, Human herpesvirus 5
gccuccggcug

SEQ ID NO: 2031278 - RNA, 14 nt, Human herpesvirus 5
gacacggaggauga

SEQ ID NO: 2031279 - RNA, 18 nt, Human herpesvirus 5
gugcgccuuccaguccau

SEQ ID NO: 2031280 - RNA, 20 nt, Human herpesvirus 5
ccuguguaugaggaucagga

SEQ ID NO: 2031281 - RNA, 12 nt, Human herpesvirus 5
gauccagcugcu

SEQ ID NO: 2031282 - RNA, 18 nt, Human herpesvirus 5
caacaaugacuaacccug

SEQ ID NO: 2031283 - RNA, 15 nt, Human herpesvirus 5
aggaacaaaauaaua

SEQ ID NO: 2031284 - RNA, 17 nt, Human herpesvirus 5
cccgccguugcggccgc

SEQ ID NO: 2031285 - RNA, 19 nt, Human herpesvirus 5
gguccuccagcagcagcug

SEQ ID NO: 2031286 - RNA, 14 nt, Human herpesvirus 5
cggaagaagaagaa

SEQ ID NO: 2031287 - RNA, 14 nt, Human herpesvirus 5
cgugcacgcgcugc

SEQ ID NO: 2031288 - RNA, 14 nt, Human herpesvirus 5
gacccagggcugcu

SEQ ID NO: 2031289 - RNA, 19 nt, Human herpesvirus 5
gggcgaaaggcaccccgac

SEQ ID NO: 2031290 - RNA, 19 nt, Human herpesvirus 5
cccucaaaacaucaccacc

SEQ ID NO: 2031291 - RNA, 18 nt, Human herpesvirus 5
agcagaggguuggcuggu

SEQ ID NO: 2031292 - RNA, 12 nt, Human herpesvirus 5
ggcuccgccggc

SEQ ID NO: 2031293 - RNA, 15 nt, Human herpesvirus 5
auugcccuucuggag

SEQ ID NO: 2031294 - RNA, 18 nt, Human herpesvirus 5
gacuuacaucugcucccc

SEQ ID NO: 2031295 - RNA, 15 nt, Human herpesvirus 5
ggaacguaccuagcu

SEQ ID NO: 2031296 - RNA, 22 nt, Human herpesvirus 5
ucgugagcagcgugcaccugcu

SEQ ID NO: 2031297 - RNA, 21 nt, Human herpesvirus 5
cuuacaguuuucauguaauaa

SEQ ID NO: 2031298 - RNA, 22 nt, Human herpesvirus 5
acguggaaggcggcucgcugga

SEQ ID NO: 2031299 - RNA, 23 nt, Human herpesvirus 5
acugcuauguaucaucuuuauuu

SEQ ID NO: 2031300 - RNA, 18 nt, Human herpesvirus 5
acgccuugcaccugggug

SEQ ID NO: 2031301 - RNA, 15 nt, Human herpesvirus 5
cuuucuggagcagga

SEQ ID NO: 2031302 - RNA, 18 nt, Human herpesvirus 5
gcgacggcgaauggauca

SEQ ID NO: 2031303 - RNA, 21 nt, Human herpesvirus 5
ugauaggcggcgaggcgaaac

SEQ ID NO: 2031304 - RNA, 17 nt, Human herpesvirus 5
cucguuguccucuccuc

SEQ ID NO: 2031305 - RNA, 16 nt, Human herpesvirus 5
cacgcgucgucaaaaa

SEQ ID NO: 2031306 - RNA, 19 nt, Human herpesvirus 5
ggucguuguccuccucguc

SEQ ID NO: 2031307 - RNA, 23 nt, Human herpesvirus 5
cuguuacugaaucuucuuuucau

SEQ ID NO: 2031308 - RNA, 13 nt, Human herpesvirus 5
gcgcuggcucgcg

SEQ ID NO: 2031309 - RNA, 18 nt, Human herpesvirus 5
uggggucaaaagccuggg

SEQ ID NO: 2031310 - RNA, 22 nt, Human herpesvirus 5
aguguauuggcauauagccaau

SEQ ID NO: 2031311 - RNA, 21 nt, Human herpesvirus 5
uagacgauuuuaugcgccgcc

SEQ ID NO: 2031312 - RNA, 22 nt, Human herpesvirus 5
cgggaggacucagagccacuga

SEQ ID NO: 2031313 - RNA, 16 nt, Human herpesvirus 5
ggcacgcgcgucggcc

SEQ ID NO: 2031314 - RNA, 15 nt, Human herpesvirus 5
gacuuugauguaguu

SEQ ID NO: 2031315 - RNA, 13 nt, Human herpesvirus 5
gcggcgccgacuc

SEQ ID NO: 2031316 - RNA, 14 nt, Human herpesvirus 5
ugcucgaccaggag

SEQ ID NO: 2031317 - RNA, 16 nt, Human herpesvirus 5
guucuggucgggcgug

SEQ ID NO: 2031318 - RNA, 17 nt, Human herpesvirus 5
gcgucccuggggcugcu

SEQ ID NO: 2031319 - RNA, 21 nt, Human herpesvirus 5
ggcguuucguccggaggagcg

SEQ ID NO: 2031320 - RNA, 14 nt, Human herpesvirus 5
ggaggaugacgaua

SEQ ID NO: 2031321 - RNA, 14 nt, Human herpesvirus 5
cacuuuaggcggcg

SEQ ID NO: 2031322 - RNA, 12 nt, Human herpesvirus 5
agcagcucuuuu

SEQ ID NO: 2031323 - RNA, 19 nt, Human herpesvirus 5
aacacagacaggcggccag

SEQ ID NO: 2031324 - RNA, 17 nt, Human herpesvirus 5
uggucauguucucccag

SEQ ID NO: 2031325 - RNA, 20 nt, Human herpesvirus 5
ggaaggcggcucgcuggaag

SEQ ID NO: 2031326 - RNA, 23 nt, Human herpesvirus 5
gcgaaagcuucggccggcugcug

SEQ ID NO: 2031327 - RNA, 13 nt, Human herpesvirus 5
ucccccugaucug

SEQ ID NO: 2031328 - RNA, 13 nt, Human herpesvirus 5
ccgccuccacugc

SEQ ID NO: 2031329 - RNA, 14 nt, Human herpesvirus 5
aggaaggaaaaaac

SEQ ID NO: 2031330 - RNA, 16 nt, Human herpesvirus 5
uugagcacaaacugcg

SEQ ID NO: 2031331 - RNA, 18 nt, Human herpesvirus 5
aaugauauuuuacaggua

SEQ ID NO: 2031332 - RNA, 20 nt, Human herpesvirus 5
gacggugaugcguguggccg

SEQ ID NO: 2031333 - RNA, 17 nt, Human herpesvirus 5
gaacgggugggcugggg

SEQ ID NO: 2031334 - RNA, 13 nt, Human herpesvirus 5
ucccugccagucu

SEQ ID NO: 2031335 - RNA, 14 nt, Human herpesvirus 5
caccuacgagcagg

SEQ ID NO: 2031336 - RNA, 18 nt, Human herpesvirus 5
cguaguuguugcagaagu

SEQ ID NO: 2031337 - RNA, 15 nt, Human herpesvirus 5
cuaccagcccaggga

SEQ ID NO: 2031338 - RNA, 17 nt, Human herpesvirus 5
guuggcuuacugccugc

SEQ ID NO: 2031339 - RNA, 16 nt, Human herpesvirus 5
uuugcauccuccucau

SEQ ID NO: 2031340 - RNA, 15 nt, Human herpesvirus 5
uccccuaacgucacu

SEQ ID NO: 2031341 - RNA, 17 nt, Human herpesvirus 5
gccuggacgccugggcg

SEQ ID NO: 2031342 - RNA, 13 nt, Human herpesvirus 5
accguaaagagag

SEQ ID NO: 2031343 - RNA, 18 nt, Human herpesvirus 5
acgaccuggccuguggug

SEQ ID NO: 2031344 - RNA, 21 nt, Human herpesvirus 5
cggccaacaugcccagcaucu

SEQ ID NO: 2031345 - RNA, 19 nt, Human herpesvirus 5
aaacaggaaaggaauacaa

SEQ ID NO: 2031346 - RNA, 15 nt, Human herpesvirus 5
gguaggugcgccgca

SEQ ID NO: 2031347 - RNA, 13 nt, Human herpesvirus 5
acggucugcuugc

SEQ ID NO: 2031348 - RNA, 22 nt, Human herpesvirus 5
ucgaccuugagcgacagcagca

SEQ ID NO: 2031349 - RNA, 19 nt, Human herpesvirus 5
caccggcgccugcugcucg

SEQ ID NO: 2031350 - RNA, 17 nt, Human herpesvirus 5
cggcgugauugcaaagc

SEQ ID NO: 2031351 - RNA, 16 nt, Human herpesvirus 5
ggucgggcguguggua

SEQ ID NO: 2031352 - RNA, 21 nt, Human herpesvirus 5
ggaggugcuggcggccguggc

SEQ ID NO: 2031353 - RNA, 12 nt, Human herpesvirus 5
gguuuggccgug

SEQ ID NO: 2031354 - RNA, 16 nt, Human herpesvirus 5
ccgugcucgugcccau

SEQ ID NO: 2031355 - RNA, 14 nt, Human herpesvirus 5
gcuacgugcgcgcc

SEQ ID NO: 2031356 - RNA, 22 nt, Human herpesvirus 5
guuagcgccgcggcaccagaga

SEQ ID NO: 2031357 - RNA, 23 nt, Human herpesvirus 5
acgcggaugagcgugcugcucug

SEQ ID NO: 2031358 - RNA, 12 nt, Human herpesvirus 5
gcgugcuccacc

SEQ ID NO: 2031359 - RNA, 18 nt, Human herpesvirus 5
gagcguguggaggacggg

SEQ ID NO: 2031360 - RNA, 14 nt, Human herpesvirus 5
ucgucuccacguag

SEQ ID NO: 2031361 - RNA, 13 nt, Human herpesvirus 5
gccgacgcuggcg

SEQ ID NO: 2031362 - RNA, 19 nt, Human herpesvirus 5
cgucgggggggacuuggcu

SEQ ID NO: 2031363 - RNA, 12 nt, Human herpesvirus 5
gggucugugccc

SEQ ID NO: 2031364 - RNA, 20 nt, Human herpesvirus 5
cagaggucgccgcugauacu

SEQ ID NO: 2031365 - RNA, 13 nt, Human herpesvirus 5
auccggcggcgcc

SEQ ID NO: 2031366 - RNA, 21 nt, Human herpesvirus 5
aucagccgugagaacuuugua

SEQ ID NO: 2031367 - RNA, 16 nt, Human herpesvirus 5
accucagucaccgagu

SEQ ID NO: 2031368 - RNA, 20 nt, Human herpesvirus 5
auggcgacggacgucgggac

SEQ ID NO: 2031369 - RNA, 18 nt, Human herpesvirus 5
caggaggcugugcgcgcc

SEQ ID NO: 2031370 - RNA, 15 nt, Human herpesvirus 5
cugacgugaggcgcu

SEQ ID NO: 2031371 - RNA, 20 nt, Human herpesvirus 5
cgugagcagcgugcaccugc

SEQ ID NO: 2031372 - RNA, 19 nt, Human herpesvirus 5
caugcugugggcccacugc

SEQ ID NO: 2031373 - RNA, 16 nt, Human herpesvirus 5
agcgugcaccugcugc

SEQ ID NO: 2031374 - RNA, 17 nt, Human herpesvirus 5
auacuggaagcugcugg

SEQ ID NO: 2031375 - RNA, 13 nt, Human herpesvirus 5
gacuggagagacu

SEQ ID NO: 2031376 - RNA, 18 nt, Human herpesvirus 5
uacucguguuuuuuauuc

SEQ ID NO: 2031377 - RNA, 15 nt, Human herpesvirus 5
guacggccucugggc

SEQ ID NO: 2031378 - RNA, 18 nt, Human herpesvirus 5
ggugcgcugcagccggag

SEQ ID NO: 2031379 - RNA, 22 nt, Human herpesvirus 5
ccgucaucggcacgugcucuuu

SEQ ID NO: 2031380 - RNA, 15 nt, Human herpesvirus 5
cuacgugcaacgcca

SEQ ID NO: 2031381 - RNA, 20 nt, Human herpesvirus 5
cgcaacuucugucucggcac

SEQ ID NO: 2031382 - RNA, 23 nt, Human herpesvirus 5
cgcgguggcggccgcagaaggcc

SEQ ID NO: 2031383 - RNA, 17 nt, Human herpesvirus 5
ugcgccguuuugcuguc

SEQ ID NO: 2031384 - RNA, 18 nt, Human herpesvirus 5
cgcacuggacgacgucaa

SEQ ID NO: 2031385 - RNA, 15 nt, Human herpesvirus 5
cauggccaaugcaua

SEQ ID NO: 2031386 - RNA, 19 nt, Human herpesvirus 5
cgcaucacccgccucaugg

SEQ ID NO: 2031387 - RNA, 15 nt, Human herpesvirus 5
cagucagagagucug

SEQ ID NO: 2031388 - RNA, 18 nt, Human herpesvirus 5
aagaaucuaggaacacug

SEQ ID NO: 2031389 - RNA, 23 nt, Human herpesvirus 5
gcgaccgccucaaaaagcaggug

SEQ ID NO: 2031390 - RNA, 14 nt, Human herpesvirus 5
auggggugugguga

SEQ ID NO: 2031391 - RNA, 17 nt, Human herpesvirus 5
ccgacccccaccagcgu

SEQ ID NO: 2031392 - RNA, 19 nt, Human herpesvirus 5
ucuccucuaccccgccgcc

SEQ ID NO: 2031393 - RNA, 20 nt, Human herpesvirus 5
caccagcgucgcgguuacua

SEQ ID NO: 2031394 - RNA, 20 nt, Human herpesvirus 5
cauccuuuucaugcucauac

SEQ ID NO: 2031395 - RNA, 20 nt, Human herpesvirus 5
ccaguuggccacgaccacga

SEQ ID NO: 2031396 - RNA, 18 nt, Human herpesvirus 5
ucccgcuuguuggccacc

SEQ ID NO: 2031397 - RNA, 15 nt, Human herpesvirus 5
gugggcuacuuugac

SEQ ID NO: 2031398 - RNA, 11 nt, Human herpesvirus 5
uuuccacgcca

SEQ ID NO: 2031399 - RNA, 19 nt, Human herpesvirus 5
gauccuuggaagagggaag

SEQ ID NO: 2031400 - RNA, 14 nt, Human herpesvirus 5
ccgucggcgccgcc

SEQ ID NO: 2031401 - RNA, 20 nt, Human herpesvirus 5
cagaaucuauaaauugcucu

SEQ ID NO: 2031402 - RNA, 11 nt, Human herpesvirus 5
cacacggcuaa

SEQ ID NO: 2031403 - RNA, 18 nt, Human herpesvirus 5
aucugcucccgcugcugc

SEQ ID NO: 2031404 - RNA, 23 nt, Human herpesvirus 5
auaauagauuagcagaaggaaua

SEQ ID NO: 2031405 - RNA, 12 nt, Human herpesvirus 5
cgagcgacgcgg

SEQ ID NO: 2031406 - RNA, 20 nt, Human herpesvirus 5
cgucacucuuggcacgggga

SEQ ID NO: 2031407 - RNA, 14 nt, Human herpesvirus 5
guagaacugaguuu

SEQ ID NO: 2031408 - RNA, 17 nt, Human herpesvirus 5
cgcaggcaagccaaacc

SEQ ID NO: 2031409 - RNA, 22 nt, Human herpesvirus 5
gcgucccaccccccgggccacc

SEQ ID NO: 2031410 - RNA, 14 nt, Human herpesvirus 5
cuuaucugggugca

SEQ ID NO: 2031411 - RNA, 13 nt, Human herpesvirus 5
cuucgcgaggucu

SEQ ID NO: 2031412 - RNA, 20 nt, Human herpesvirus 5
uccgcgucggucgccgccuc

SEQ ID NO: 2031413 - RNA, 19 nt, Human herpesvirus 5
cggccuuauguggcugcgc

SEQ ID NO: 2031414 - RNA, 12 nt, Human herpesvirus 5
aacucuuucccc

SEQ ID NO: 2031415 - RNA, 15 nt, Human herpesvirus 5
aaaaagugcgucaaa

SEQ ID NO: 2031416 - RNA, 14 nt, Human herpesvirus 5
gcggccguggccug

SEQ ID NO: 2031417 - RNA, 17 nt, Human herpesvirus 5
ccaccccccgggccacc

SEQ ID NO: 2031418 - RNA, 14 nt, Human herpesvirus 5
accaucgugccgcu

SEQ ID NO: 2031419 - RNA, 19 nt, Human herpesvirus 5
uuuggcucuuuccugugca

SEQ ID NO: 2031420 - RNA, 18 nt, Human herpesvirus 5
gaggucguggaggcagcg

SEQ ID NO: 2031421 - RNA, 22 nt, Human herpesvirus 5
cuacggaguuuucccucagccu

SEQ ID NO: 2031422 - RNA, 21 nt, Human herpesvirus 5
gugguguugccuucugcugcc

SEQ ID NO: 2031423 - RNA, 17 nt, Human herpesvirus 5
cuugcaaacgguacgca

SEQ ID NO: 2031424 - RNA, 19 nt, Human herpesvirus 5
gcgaagcugcgcaggccgc

SEQ ID NO: 2031425 - RNA, 15 nt, Human herpesvirus 5
agguguaguuuuguu

SEQ ID NO: 2031426 - RNA, 17 nt, Human herpesvirus 5
gcccugucugcagccgg

SEQ ID NO: 2031427 - RNA, 18 nt, Human herpesvirus 5
aacgugccacgugacuca

SEQ ID NO: 2031428 - RNA, 17 nt, Human herpesvirus 5
agagacaccaauugcuu

SEQ ID NO: 2031429 - RNA, 18 nt, Human herpesvirus 5
uacgcgcuggaggcccug

SEQ ID NO: 2031430 - RNA, 20 nt, Human herpesvirus 5
cugcugagacugagacuggu

SEQ ID NO: 2031431 - RNA, 22 nt, Human herpesvirus 5
ugacaguauuaacgugugguga

SEQ ID NO: 2031432 - RNA, 17 nt, Human herpesvirus 5
gcaggucacacugggag

SEQ ID NO: 2031433 - RNA, 14 nt, Human herpesvirus 5
gugccugcacgacc

SEQ ID NO: 2031434 - RNA, 18 nt, Human herpesvirus 5
cgguggucggcugccgcc

SEQ ID NO: 2031435 - RNA, 14 nt, Human herpesvirus 5
uacauauacgugau

SEQ ID NO: 2031436 - RNA, 13 nt, Human herpesvirus 5
cgcagugggccca

SEQ ID NO: 2031437 - RNA, 14 nt, Human herpesvirus 5
cggcgguccuccag

SEQ ID NO: 2031438 - RNA, 23 nt, Human herpesvirus 5
cagcggcggcgguggugacuggg

SEQ ID NO: 2031439 - RNA, 12 nt, Human herpesvirus 5
uaugcgccgcca

SEQ ID NO: 2031440 - RNA, 13 nt, Human herpesvirus 5
uccgugccagcug

SEQ ID NO: 2031441 - RNA, 12 nt, Human herpesvirus 5
gucucaucacau

SEQ ID NO: 2031442 - RNA, 16 nt, Human herpesvirus 5
ggaauacccagcuggg

SEQ ID NO: 2031443 - RNA, 15 nt, Human herpesvirus 5
uggaaaucccucacc

SEQ ID NO: 2031444 - RNA, 18 nt, Human herpesvirus 5
gcgcuucuggucgguuuu

SEQ ID NO: 2031445 - RNA, 14 nt, Human herpesvirus 5
cggccgaccccgcc

SEQ ID NO: 2031446 - RNA, 16 nt, Human herpesvirus 5
ucgacacuaauuuauc

SEQ ID NO: 2031447 - RNA, 14 nt, Human herpesvirus 5
ccgacgaagaagaa

SEQ ID NO: 2031448 - RNA, 18 nt, Human herpesvirus 5
guccgucgaucgaccguu

SEQ ID NO: 2031449 - RNA, 22 nt, Human herpesvirus 5
ugacgcacuuuuuuuacuagua

SEQ ID NO: 2031450 - RNA, 12 nt, Human herpesvirus 5
cgauccuuggaa

SEQ ID NO: 2031451 - RNA, 15 nt, Human herpesvirus 5
cucuacgagcugggc

SEQ ID NO: 2031452 - RNA, 18 nt, Human herpesvirus 5
aggccgcaaagcuggaca

SEQ ID NO: 2031453 - RNA, 15 nt, Human herpesvirus 5
gucuuugucauaccc

SEQ ID NO: 2031454 - RNA, 22 nt, Human herpesvirus 5
uacauucgccgcaaugggcuuc

SEQ ID NO: 2031455 - RNA, 13 nt, Human herpesvirus 5
cuucggagguccu

SEQ ID NO: 2031456 - RNA, 15 nt, Human herpesvirus 5
gagcugcgcgucacc

SEQ ID NO: 2031457 - RNA, 11 nt, Human herpesvirus 5
augcaggaggu

SEQ ID NO: 2031458 - RNA, 21 nt, Human herpesvirus 5
cgccacggugcuuuucaucua

SEQ ID NO: 2031459 - RNA, 17 nt, Human herpesvirus 5
ccaagagacccggcugg

SEQ ID NO: 2031460 - RNA, 19 nt, Human herpesvirus 5
gacgugcgaccuggacggc

SEQ ID NO: 2031461 - RNA, 18 nt, Human herpesvirus 5
cggaggcgggguguuuuu

SEQ ID NO: 2031462 - RNA, 20 nt, Human herpesvirus 5
cacccguacgcgcaggcagc

SEQ ID NO: 2031463 - RNA, 13 nt, Human herpesvirus 5
gguaacguggacg

SEQ ID NO: 2031464 - RNA, 22 nt, Human herpesvirus 5
cgggcucaccgcaguugcugcc

SEQ ID NO: 2031465 - RNA, 12 nt, Human herpesvirus 5
gcaaacucccac

SEQ ID NO: 2031466 - RNA, 18 nt, Human herpesvirus 5
ucuaccagcccagggauc

SEQ ID NO: 2031467 - RNA, 16 nt, Human herpesvirus 5
cggccgucgcaagggc

SEQ ID NO: 2031468 - RNA, 22 nt, Human herpesvirus 5
cugccaacgccgucaaggccgc

SEQ ID NO: 2031469 - RNA, 15 nt, Human herpesvirus 5
ggcgccgggacucug

SEQ ID NO: 2031470 - RNA, 20 nt, Human herpesvirus 5
cgagagguagccaacagcag

SEQ ID NO: 2031471 - RNA, 18 nt, Human herpesvirus 5
gaauacccagcuggggaa

SEQ ID NO: 2031472 - RNA, 20 nt, Human herpesvirus 5
ucgcaucaucaacagcagca

SEQ ID NO: 2031473 - RNA, 11 nt, Human herpesvirus 5
cgauccuugga

SEQ ID NO: 2031474 - RNA, 15 nt, Human herpesvirus 5
cgcguccgaccggga

SEQ ID NO: 2031475 - RNA, 19 nt, Human herpesvirus 5
agcuggggaaguacaauau

SEQ ID NO: 2031476 - RNA, 20 nt, Human herpesvirus 5
guugggaccgcagcguggcc

SEQ ID NO: 2031477 - RNA, 21 nt, Human herpesvirus 5
caugaaguuguugaucugcug

SEQ ID NO: 2031478 - RNA, 16 nt, Human herpesvirus 5
cgccggcguugccgcc

SEQ ID NO: 2031479 - RNA, 23 nt, Human herpesvirus 5
cucgcguguuuugucugagcgcc

SEQ ID NO: 2031480 - RNA, 14 nt, Human herpesvirus 5
gacgacgcgccccc

SEQ ID NO: 2031481 - RNA, 18 nt, Human herpesvirus 5
gcuucggccggcugcugc

SEQ ID NO: 2031482 - RNA, 18 nt, Human herpesvirus 5
agcggccgugguggccgu

SEQ ID NO: 2031483 - RNA, 17 nt, Human herpesvirus 5
acgagcaucgcaacaac

SEQ ID NO: 2031484 - RNA, 10 nt, Human herpesvirus 5
guacugaagc

SEQ ID NO: 2031485 - RNA, 17 nt, Human herpesvirus 5
cacggacacgacaaaug

SEQ ID NO: 2031486 - RNA, 23 nt, Human herpesvirus 5
ccuggggcugcugcugcacgggc

SEQ ID NO: 2031487 - RNA, 16 nt, Human herpesvirus 5
cuccuguugcucuccu

SEQ ID NO: 2031488 - RNA, 15 nt, Human herpesvirus 5
aguggcgccccggcu

SEQ ID NO: 2031489 - RNA, 17 nt, Human herpesvirus 5
gacguaaauccagaccu

SEQ ID NO: 2031490 - RNA, 23 nt, Human herpesvirus 5
acuauuuuuuguaacacuacagc

SEQ ID NO: 2031491 - RNA, 12 nt, Human herpesvirus 5
ucuucuaccugg

SEQ ID NO: 2031492 - RNA, 13 nt, Human herpesvirus 5
aggccuccucucc

SEQ ID NO: 2031493 - RNA, 19 nt, Human herpesvirus 5
cggccgcagugggcccacg

SEQ ID NO: 2031494 - RNA, 14 nt, Human herpesvirus 5
cagacaccaagcau

SEQ ID NO: 2031495 - RNA, 23 nt, Human herpesvirus 5
gcuuuagccaggugaccagcagu

SEQ ID NO: 2031496 - RNA, 13 nt, Human herpesvirus 5
ccugcgcagcgcg

SEQ ID NO: 2031497 - RNA, 15 nt, Human herpesvirus 5
gaugucaacacugac

SEQ ID NO: 2031498 - RNA, 18 nt, Human herpesvirus 5
agcgucagaagacgagcu

SEQ ID NO: 2031499 - RNA, 14 nt, Human herpesvirus 5
caaaaaaacauggg

SEQ ID NO: 2031500 - RNA, 13 nt, Human herpesvirus 5
gcugaugugccag

SEQ ID NO: 2031501 - RNA, 17 nt, Human herpesvirus 5
acgcucgcucugacgcc

SEQ ID NO: 2031502 - RNA, 15 nt, Human herpesvirus 5
gguggcggcggugga

SEQ ID NO: 2031503 - RNA, 14 nt, Human herpesvirus 5
agccgccgccucca

SEQ ID NO: 2031504 - RNA, 18 nt, Human herpesvirus 5
ggcgccugguugcugccg

SEQ ID NO: 2031505 - RNA, 15 nt, Human herpesvirus 5
aauacuggacuuuug

SEQ ID NO: 2031506 - RNA, 15 nt, Human herpesvirus 5
acguugggaagacgg

SEQ ID NO: 2031507 - RNA, 13 nt, Human herpesvirus 5
cacgccgccguga

SEQ ID NO: 2031508 - RNA, 16 nt, Human herpesvirus 5
auccuggccaccaugu

SEQ ID NO: 2031509 - RNA, 16 nt, Human herpesvirus 5
gccuuccgcgugcucc

SEQ ID NO: 2031510 - RNA, 23 nt, Human herpesvirus 5
auuuacuacuucgauucucuaua

SEQ ID NO: 2031511 - RNA, 16 nt, Human herpesvirus 5
uugugccucugaaagc

SEQ ID NO: 2031512 - RNA, 19 nt, Human herpesvirus 5
cauggucggugacaucacc

SEQ ID NO: 2031513 - RNA, 16 nt, Human herpesvirus 5
cuaucuguguccgccc

SEQ ID NO: 2031514 - RNA, 15 nt, Human herpesvirus 5
ugcccugugggccca

SEQ ID NO: 2031515 - RNA, 22 nt, Human herpesvirus 5
cucggaucugcggcucaaacac

SEQ ID NO: 2031516 - RNA, 16 nt, Human herpesvirus 5
cacggccuuauguggc

SEQ ID NO: 2031517 - RNA, 13 nt, Human herpesvirus 5
agggacgagcagc

SEQ ID NO: 2031518 - RNA, 15 nt, Human herpesvirus 5
gccaucuagacucac

SEQ ID NO: 2031519 - RNA, 23 nt, Human herpesvirus 5
gggccucggcgugcucaggccac

SEQ ID NO: 2031520 - RNA, 20 nt, Human herpesvirus 5
caguaccuggacgcggugaa

SEQ ID NO: 2031521 - RNA, 17 nt, Human herpesvirus 5
ggcgcuguacggcagcg

SEQ ID NO: 2031522 - RNA, 19 nt, Human herpesvirus 5
ucuuauaaggaggcaaaua

SEQ ID NO: 2031523 - RNA, 23 nt, Human herpesvirus 5
ucuugucgucauucgggccagga

SEQ ID NO: 2031524 - RNA, 19 nt, Human herpesvirus 5
caggaacacgguggcuuuc

SEQ ID NO: 2031525 - RNA, 15 nt, Human herpesvirus 5
caaccguauauucua

SEQ ID NO: 2031526 - RNA, 14 nt, Human herpesvirus 5
cuccgucacgccuc

SEQ ID NO: 2031527 - RNA, 15 nt, Human herpesvirus 5
gcuaggauaaucaua

SEQ ID NO: 2031528 - RNA, 22 nt, Human herpesvirus 5
cuuucaugaugacggugaggag

SEQ ID NO: 2031529 - RNA, 16 nt, Human herpesvirus 5
uaccacgguaauugcg

SEQ ID NO: 2031530 - RNA, 19 nt, Human herpesvirus 5
acgacuguucgucgagcac

SEQ ID NO: 2031531 - RNA, 15 nt, Human herpesvirus 5
gacauccgucagccu

SEQ ID NO: 2031532 - RNA, 13 nt, Human herpesvirus 5
gcuacaccugaga

SEQ ID NO: 2031533 - RNA, 18 nt, Human herpesvirus 5
cucugcaacgccuggcgu

SEQ ID NO: 2031534 - RNA, 19 nt, Human herpesvirus 5
ggugguuuaugaugaaacc

SEQ ID NO: 2031535 - RNA, 15 nt, Human herpesvirus 5
cagugaguacacgca

SEQ ID NO: 2031536 - RNA, 20 nt, Human herpesvirus 5
cgucguuucccccacccgcc

SEQ ID NO: 2031537 - RNA, 12 nt, Human herpesvirus 5
gcggugguaagu

SEQ ID NO: 2031538 - RNA, 20 nt, Human herpesvirus 5
gccacauuggugaaggccgu

SEQ ID NO: 2031539 - RNA, 17 nt, Human herpesvirus 5
gaucggccgcggugcgc

SEQ ID NO: 2031540 - RNA, 22 nt, Human herpesvirus 5
gcagauucaguaaccuggagca

SEQ ID NO: 2031541 - RNA, 20 nt, Human herpesvirus 5
ucaccaccaucagcaaagcu

SEQ ID NO: 2031542 - RNA, 22 nt, Human herpesvirus 5
gcagcggggagaaaaguggcag

SEQ ID NO: 2031543 - RNA, 16 nt, Human herpesvirus 5
ugauaaccuaccuggu

SEQ ID NO: 2031544 - RNA, 15 nt, Human herpesvirus 5
acguaggccuccucu

SEQ ID NO: 2031545 - RNA, 16 nt, Human herpesvirus 5
caggguaaaaaccacg

SEQ ID NO: 2031546 - RNA, 23 nt, Human herpesvirus 5
ucggcguggucaacgcuuuggaa

SEQ ID NO: 2031547 - RNA, 17 nt, Human herpesvirus 5
auuggugaaggccgugg

SEQ ID NO: 2031548 - RNA, 11 nt, Human herpesvirus 5
uagagaggcug

SEQ ID NO: 2031549 - RNA, 13 nt, Human herpesvirus 5
agaccgccgccgc

SEQ ID NO: 2031550 - RNA, 21 nt, Human herpesvirus 5
accuacgucaaagcggucuca

SEQ ID NO: 2031551 - RNA, 22 nt, Human herpesvirus 5
cagggacagugcgccaacggca

SEQ ID NO: 2031552 - RNA, 14 nt, Human herpesvirus 5
gcagaacccgguug

SEQ ID NO: 2031553 - RNA, 16 nt, Human herpesvirus 5
accccucgcugggcua

SEQ ID NO: 2031554 - RNA, 13 nt, Human herpesvirus 5
aaacucuauggac

SEQ ID NO: 2031555 - RNA, 21 nt, Human herpesvirus 5
auaaaaaccauugagaaagcu

SEQ ID NO: 2031556 - RNA, 22 nt, Human herpesvirus 5
aggagauuauccguaucugcau

SEQ ID NO: 2031557 - RNA, 21 nt, Human herpesvirus 5
ggcucacgucacuacucuggg

SEQ ID NO: 2031558 - RNA, 18 nt, Human herpesvirus 5
ccuggaagcguguguggg

SEQ ID NO: 2031559 - RNA, 16 nt, Human herpesvirus 5
ggugccgccgcugccg

SEQ ID NO: 2031560 - RNA, 22 nt, Human herpesvirus 5
guccaagcgcguccuguuucau

SEQ ID NO: 2031561 - RNA, 12 nt, Human herpesvirus 5
cggcguggucaa

SEQ ID NO: 2031562 - RNA, 16 nt, Human herpesvirus 5
cgccgucucccucugc

SEQ ID NO: 2031563 - RNA, 19 nt, Human herpesvirus 5
ccuacgugcaacgccacca

SEQ ID NO: 2031564 - RNA, 15 nt, Human herpesvirus 5
caguauuccccgcug

SEQ ID NO: 2031565 - RNA, 22 nt, Human herpesvirus 5
ugaauaacaccaaaaauccaga

SEQ ID NO: 2031566 - RNA, 13 nt, Human herpesvirus 5
gaugaacuguucc

SEQ ID NO: 2031567 - RNA, 15 nt, Human herpesvirus 5
uccuguugcucuccu

SEQ ID NO: 2031568 - RNA, 15 nt, Human herpesvirus 5
cuagacagauucauc

SEQ ID NO: 2031569 - RNA, 16 nt, Human herpesvirus 5
gugccgaauacaaaag

SEQ ID NO: 2031570 - RNA, 14 nt, Human herpesvirus 5
caaggccgccgccg

SEQ ID NO: 2031571 - RNA, 22 nt, Human herpesvirus 5
cugcggcggcgcgaccuucccu

SEQ ID NO: 2031572 - RNA, 16 nt, Human herpesvirus 5
gcgacguaccagcugu

SEQ ID NO: 2031573 - RNA, 22 nt, Human herpesvirus 5
ugcccgggggugacaaggaagc

SEQ ID NO: 2031574 - RNA, 13 nt, Human herpesvirus 5
ccgaggaucuggc

SEQ ID NO: 2031575 - RNA, 22 nt, Human herpesvirus 5
cacgucgaccaggugcugucgc

SEQ ID NO: 2031576 - RNA, 19 nt, Human herpesvirus 5
gcucgggucggcuggucgg

SEQ ID NO: 2031577 - RNA, 17 nt, Human herpesvirus 5
cagcucgcgcuggcuuu

SEQ ID NO: 2031578 - RNA, 14 nt, Human herpesvirus 5
cacccgacugcagc

SEQ ID NO: 2031579 - RNA, 13 nt, Human herpesvirus 5
ugcccgucggcug

SEQ ID NO: 2031580 - RNA, 20 nt, Human herpesvirus 5
aucucacaccgucagcugcg

SEQ ID NO: 2031581 - RNA, 14 nt, Human herpesvirus 5
cagcgccagcggcc

SEQ ID NO: 2031582 - RNA, 19 nt, Human herpesvirus 5
gaggugugaggaugaaaca

SEQ ID NO: 2031583 - RNA, 15 nt, Human herpesvirus 5
ccuccugcagcugca

SEQ ID NO: 2031584 - RNA, 23 nt, Human herpesvirus 5
aucauggaagagggcgcgcgucu

SEQ ID NO: 2031585 - RNA, 12 nt, Human herpesvirus 5
cuccuccucccu

SEQ ID NO: 2031586 - RNA, 16 nt, Human herpesvirus 5
gacaaccugcugcacu

SEQ ID NO: 2031587 - RNA, 20 nt, Human herpesvirus 5
ccucagcuugcccgaccacg

SEQ ID NO: 2031588 - RNA, 18 nt, Human herpesvirus 5
gcaauaaucccuguaauu

SEQ ID NO: 2031589 - RNA, 15 nt, Human herpesvirus 5
ugacgcggucgccgc

SEQ ID NO: 2031590 - RNA, 16 nt, Human herpesvirus 5
uguugagaacauauau

SEQ ID NO: 2031591 - RNA, 10 nt, Human herpesvirus 5
acacuacagc

SEQ ID NO: 2031592 - RNA, 22 nt, Human herpesvirus 5
gacagcugcaauccgguaacgu

SEQ ID NO: 2031593 - RNA, 23 nt, Human herpesvirus 5
auuuugggucagcggcacgccgc

SEQ ID NO: 2031594 - RNA, 15 nt, Human herpesvirus 5
gcagcaacagccccg

SEQ ID NO: 2031595 - RNA, 23 nt, Human herpesvirus 5
gcaacggccguuaucaaggccac

SEQ ID NO: 2031596 - RNA, 16 nt, Human herpesvirus 5
ccgagcuugugcuucu

SEQ ID NO: 2031597 - RNA, 19 nt, Human herpesvirus 5
gucuaguucgcuucucacu

SEQ ID NO: 2031598 - RNA, 20 nt, Human herpesvirus 5
gcgcgccuaccugacgccga

SEQ ID NO: 2031599 - RNA, 16 nt, Human herpesvirus 5
cucuggcccugcugua

SEQ ID NO: 2031600 - RNA, 20 nt, Human herpesvirus 5
acgugauuauacaacaggug

SEQ ID NO: 2031601 - RNA, 17 nt, Human herpesvirus 5
aacuucugucucggcac

SEQ ID NO: 2031602 - RNA, 12 nt, Human herpesvirus 5
cccaccgccucc

SEQ ID NO: 2031603 - RNA, 15 nt, Human herpesvirus 5
gcggcuuauguuucu

SEQ ID NO: 2031604 - RNA, 15 nt, Human herpesvirus 5
caccucgaugaagcc

SEQ ID NO: 2031605 - RNA, 19 nt, Human herpesvirus 5
uguauuuuuaucgggaaug

SEQ ID NO: 2031606 - RNA, 12 nt, Human herpesvirus 5
ugcuacagggag

SEQ ID NO: 2031607 - RNA, 14 nt, Human herpesvirus 5
guggaaggcaccgc

SEQ ID NO: 2031608 - RNA, 14 nt, Human herpesvirus 5
agccagacugcccu

SEQ ID NO: 2031609 - RNA, 15 nt, Human herpesvirus 5
cgaugaaccuucccc

SEQ ID NO: 2031610 - RNA, 16 nt, Human herpesvirus 5
caggucgcccaggcuc

SEQ ID NO: 2031611 - RNA, 21 nt, Human herpesvirus 5
ggcucgcaaagacgugccacg

SEQ ID NO: 2031612 - RNA, 18 nt, Human herpesvirus 5
ugcgcaucuacauccuua

SEQ ID NO: 2031613 - RNA, 13 nt, Human herpesvirus 5
gcgggcccugcug

SEQ ID NO: 2031614 - RNA, 17 nt, Human herpesvirus 5
ccaguagacagacagga

SEQ ID NO: 2031615 - RNA, 19 nt, Human herpesvirus 5
gccgcucaagccgcggugc

SEQ ID NO: 2031616 - RNA, 17 nt, Human herpesvirus 5
cagcuaucgugacuggg

SEQ ID NO: 2031617 - RNA, 15 nt, Human herpesvirus 5
gacacggugcugcug

SEQ ID NO: 2031618 - RNA, 22 nt, Human herpesvirus 5
agcaucgcaacaacagcaacaa

SEQ ID NO: 2031619 - RNA, 19 nt, Human herpesvirus 5
ugugguucaaccugaacau

SEQ ID NO: 2031620 - RNA, 16 nt, Human herpesvirus 5
cagcaagaguugcaac

SEQ ID NO: 2031621 - RNA, 16 nt, Human herpesvirus 5
auggucguugcccacg

SEQ ID NO: 2031622 - RNA, 16 nt, Human herpesvirus 5
aguaauguauacuucc

SEQ ID NO: 2031623 - RNA, 14 nt, Human herpesvirus 5
ucuguauauucagu

SEQ ID NO: 2031624 - RNA, 16 nt, Human herpesvirus 5
gcaccaugagaagaga

SEQ ID NO: 2031625 - RNA, 15 nt, Human herpesvirus 5
acgugauccaggagg

SEQ ID NO: 2031626 - RNA, 13 nt, Human herpesvirus 5
guuccugcgcgcc

SEQ ID NO: 2031627 - RNA, 16 nt, Human herpesvirus 5
cauuggagaacagugc

SEQ ID NO: 2031628 - RNA, 12 nt, Human herpesvirus 5
gauccaggaggu

SEQ ID NO: 2031629 - RNA, 19 nt, Human herpesvirus 5
agucuccgcaguuacacca

SEQ ID NO: 2031630 - RNA, 16 nt, Human herpesvirus 5
cguuaccgccucuguc

SEQ ID NO: 2031631 - RNA, 13 nt, Human herpesvirus 5
uccacggcgccgg

SEQ ID NO: 2031632 - RNA, 15 nt, Human herpesvirus 5
agccggggugccgcc

SEQ ID NO: 2031633 - RNA, 14 nt, Human herpesvirus 5
cggccggcugcugc

SEQ ID NO: 2031634 - RNA, 18 nt, Human herpesvirus 5
ugaaaccuaccugggcug

SEQ ID NO: 2031635 - RNA, 20 nt, Human herpesvirus 5
agguuguugccgcuggacug

SEQ ID NO: 2031636 - RNA, 17 nt, Human herpesvirus 5
ggcguucggacgaccuc

SEQ ID NO: 2031637 - RNA, 15 nt, Human herpesvirus 5
ucccggccuugcugu

SEQ ID NO: 2031638 - RNA, 14 nt, Human herpesvirus 5
ucggaugaggcagg

SEQ ID NO: 2031639 - RNA, 21 nt, Human herpesvirus 5
ggcucaccgcaguugcugccu

SEQ ID NO: 2031640 - RNA, 23 nt, Human herpesvirus 5
cugcgagaggaagucgaucugga

SEQ ID NO: 2031641 - RNA, 21 nt, Human herpesvirus 5
acggaguuuucccucagccuc

SEQ ID NO: 2031642 - RNA, 23 nt, Human herpesvirus 5
gcagcacgcgauuggccagcacg

SEQ ID NO: 2031643 - RNA, 16 nt, Human herpesvirus 5
ggucugcgagaggaag

SEQ ID NO: 2031644 - RNA, 12 nt, Human herpesvirus 5
aauaaaaaccac

SEQ ID NO: 2031645 - RNA, 20 nt, Human herpesvirus 5
guagcaccggccccacgcug

SEQ ID NO: 2031646 - RNA, 16 nt, Human herpesvirus 5
uucgggccgacgucaa

SEQ ID NO: 2031647 - RNA, 19 nt, Human herpesvirus 5
gacuugggcgauucugugu

SEQ ID NO: 2031648 - RNA, 23 nt, Human herpesvirus 5
agucuagacaggguaacagccuu

SEQ ID NO: 2031649 - RNA, 16 nt, Human herpesvirus 5
gacaggaggcugugcg

SEQ ID NO: 2031650 - RNA, 20 nt, Human herpesvirus 5
gccaccgacauggagcccac

SEQ ID NO: 2031651 - RNA, 12 nt, Human herpesvirus 5
caacugcugccu

SEQ ID NO: 2031652 - RNA, 14 nt, Human herpesvirus 5
cacuggcugcgccg

SEQ ID NO: 2031653 - RNA, 23 nt, Human herpesvirus 5
agcgugcugugcuacgagaucag

SEQ ID NO: 2031654 - RNA, 12 nt, Human herpesvirus 5
cagcagcagcug

SEQ ID NO: 2031655 - RNA, 21 nt, Human herpesvirus 5
caacuuuggcgugcccagccc

SEQ ID NO: 2031656 - RNA, 23 nt, Human herpesvirus 5
uccguccucgucgccuuccagcu

SEQ ID NO: 2031657 - RNA, 18 nt, Human herpesvirus 5
caccucgugcgaggacaa

SEQ ID NO: 2031658 - RNA, 22 nt, Human herpesvirus 5
aaggggaaaaggaauagcaaga

SEQ ID NO: 2031659 - RNA, 15 nt, Human herpesvirus 5
aauucaauaaaaacc

SEQ ID NO: 2031660 - RNA, 16 nt, Human herpesvirus 5
cuccucugccugggca

SEQ ID NO: 2031661 - RNA, 22 nt, Human herpesvirus 5
gcaacagcagccaccgacacag

SEQ ID NO: 2031662 - RNA, 14 nt, Human herpesvirus 5
gcugcugcacgggc

SEQ ID NO: 2031663 - RNA, 15 nt, Human herpesvirus 5
caaaacgucaggaau

SEQ ID NO: 2031664 - RNA, 19 nt, Human herpesvirus 5
gcugagacaggacgaggca

SEQ ID NO: 2031665 - RNA, 23 nt, Human herpesvirus 5
aucuguucuuccaccagcuacuu

SEQ ID NO: 2031666 - RNA, 21 nt, Human herpesvirus 5
ccgcuuucucaucucagccuc

SEQ ID NO: 2031667 - RNA, 16 nt, Human herpesvirus 5
acucagagccacugau

SEQ ID NO: 2031668 - RNA, 13 nt, Human herpesvirus 5
gguggcugggcuc

SEQ ID NO: 2031669 - RNA, 12 nt, Human herpesvirus 5
cgcgagcugggc

SEQ ID NO: 2031670 - RNA, 17 nt, Human herpesvirus 5
gcagugggcccacggcu

SEQ ID NO: 2031671 - RNA, 20 nt, Human herpesvirus 5
gacaaggucguucuccucga

SEQ ID NO: 2031672 - RNA, 21 nt, Human herpesvirus 5
cgugcgccuuccaguccauac

SEQ ID NO: 2031673 - RNA, 14 nt, Human herpesvirus 5
caacaugcccagca

SEQ ID NO: 2031674 - RNA, 22 nt, Human herpesvirus 5
uauaggcuaagcuauaccauca

SEQ ID NO: 2031675 - RNA, 18 nt, Human herpesvirus 5
ucgagaacuacagcuucu

SEQ ID NO: 2031676 - RNA, 23 nt, Human herpesvirus 5
uugccgcaccgguuggagcagcu

SEQ ID NO: 2031677 - RNA, 16 nt, Human herpesvirus 5
ccgcuugcgcccgaga

SEQ ID NO: 2031678 - RNA, 16 nt, Human herpesvirus 5
cuaguaauaccaccgu

SEQ ID NO: 2031679 - RNA, 15 nt, Human herpesvirus 5
aagggagccccauca

SEQ ID NO: 2031680 - RNA, 18 nt, Human herpesvirus 5
ucuugcggcgccgacucc

SEQ ID NO: 2031681 - RNA, 15 nt, Human herpesvirus 5
gccgauggcugcccg

SEQ ID NO: 2031682 - RNA, 15 nt, Human herpesvirus 5
agguagguggccaug

SEQ ID NO: 2031683 - RNA, 17 nt, Human herpesvirus 5
ugacaacggcuggaaau

SEQ ID NO: 2031684 - RNA, 22 nt, Human herpesvirus 5
ugguacgcugacguggugcgcu

SEQ ID NO: 2031685 - RNA, 20 nt, Human herpesvirus 5
caucgaggaggccgcacugg

SEQ ID NO: 2031686 - RNA, 23 nt, Human herpesvirus 5
gggcuuuccggccaacaugccca

SEQ ID NO: 2031687 - RNA, 19 nt, Human herpesvirus 5
ugucucucgacguuucuga

SEQ ID NO: 2031688 - RNA, 22 nt, Human herpesvirus 5
ccugacaguuuaugagaaaagg

SEQ ID NO: 2031689 - RNA, 13 nt, Human herpesvirus 5
augauauaaagcg

SEQ ID NO: 2031690 - RNA, 19 nt, Human herpesvirus 5
gacauggagacaguuucca

SEQ ID NO: 2031691 - RNA, 15 nt, Human herpesvirus 5
cccaggacacauuuc

SEQ ID NO: 2031692 - RNA, 22 nt, Human herpesvirus 5
gacucgcugccgcagcugcugg

SEQ ID NO: 2031693 - RNA, 21 nt, Human herpesvirus 5
acggauaaccgcaaaggccac

SEQ ID NO: 2031694 - RNA, 18 nt, Human herpesvirus 5
cugcguucacgaggacca

SEQ ID NO: 2031695 - RNA, 17 nt, Human herpesvirus 5
gaaaguuggcugcgccc

SEQ ID NO: 2031696 - RNA, 20 nt, Human herpesvirus 5
caugauguacccgcuggugu

SEQ ID NO: 2031697 - RNA, 16 nt, Human herpesvirus 5
acuaccgugccaccug

SEQ ID NO: 2031698 - RNA, 16 nt, Human herpesvirus 5
uauugaaaucuaccug

SEQ ID NO: 2031699 - RNA, 18 nt, Human herpesvirus 5
uacacgcacgcugguuac

SEQ ID NO: 2031700 - RNA, 19 nt, Human herpesvirus 5
augucgcgacagagaggug

SEQ ID NO: 2031701 - RNA, 18 nt, Human herpesvirus 5
ugguuaccggucacugga

SEQ ID NO: 2031702 - RNA, 21 nt, Human herpesvirus 5
uaccuaugcgccguagguucu

SEQ ID NO: 2031703 - RNA, 15 nt, Human herpesvirus 5
ggaucgucaccacca

SEQ ID NO: 2031704 - RNA, 22 nt, Human herpesvirus 5
gcaccaucgugguagcgccgcg

SEQ ID NO: 2031705 - RNA, 13 nt, Human herpesvirus 5
ccaagucuugccg

SEQ ID NO: 2031706 - RNA, 20 nt, Human herpesvirus 5
cggcgcagacgucggcgguc

SEQ ID NO: 2031707 - RNA, 19 nt, Human herpesvirus 5
acaggggaucuauaaaugu

SEQ ID NO: 2031708 - RNA, 19 nt, Human herpesvirus 5
ggcucguguggcagcuggc

SEQ ID NO: 2031709 - RNA, 13 nt, Human herpesvirus 5
uaggcgggcugga

SEQ ID NO: 2031710 - RNA, 15 nt, Human herpesvirus 5
uuaagaggucacagg

SEQ ID NO: 2031711 - RNA, 16 nt, Human herpesvirus 5
ggcuacguacgacugc

SEQ ID NO: 2031712 - RNA, 14 nt, Human herpesvirus 5
ucacuaucuucaac

SEQ ID NO: 2031713 - RNA, 15 nt, Human herpesvirus 5
cugcugagacugaga

SEQ ID NO: 2031714 - RNA, 15 nt, Human herpesvirus 5
uuccuauugggaagg

SEQ ID NO: 2031715 - RNA, 20 nt, Human herpesvirus 5
cuguuagaaccgcgggccgc

SEQ ID NO: 2031716 - RNA, 20 nt, Human herpesvirus 5
gcgccuuuaagcuggaccug

SEQ ID NO: 2031717 - RNA, 22 nt, Human herpesvirus 5
ucaagaccgaugugugggaccu

SEQ ID NO: 2031718 - RNA, 19 nt, Human herpesvirus 5
ucguuguccucuccuccuu

SEQ ID NO: 2031719 - RNA, 23 nt, Human herpesvirus 5
cuacacgccuugcaccugggugg

SEQ ID NO: 2031720 - RNA, 17 nt, Human herpesvirus 5
acgggguuaaacuggau

SEQ ID NO: 2031721 - RNA, 13 nt, Human herpesvirus 5
gcaucaugugccu

SEQ ID NO: 2031722 - RNA, 19 nt, Human herpesvirus 5
cgcgccucacgcugcacga

SEQ ID NO: 2031723 - RNA, 13 nt, Human herpesvirus 5
aaucgucggcaga

SEQ ID NO: 2031724 - RNA, 21 nt, Human herpesvirus 5
cuggaggacgcgcuggcuguc

SEQ ID NO: 2031725 - RNA, 14 nt, Human herpesvirus 5
gcuuuuuugucccg

SEQ ID NO: 2031726 - RNA, 16 nt, Human herpesvirus 5
guucuuccaccagcua

SEQ ID NO: 2031727 - RNA, 13 nt, Human herpesvirus 5
ggcuccgccggca

SEQ ID NO: 2031728 - RNA, 17 nt, Human herpesvirus 5
gacaugauggaaaugcc

SEQ ID NO: 2031729 - RNA, 22 nt, Human herpesvirus 5
gccgcgacaacggccgccgcag

SEQ ID NO: 2031730 - RNA, 19 nt, Human herpesvirus 5
ucagaguaggugauccagu

SEQ ID NO: 2031731 - RNA, 17 nt, Human herpesvirus 5
cuccacgcucgagggcu

SEQ ID NO: 2031732 - RNA, 20 nt, Human herpesvirus 5
cgcuugcgcccgagacggcg

SEQ ID NO: 2031733 - RNA, 14 nt, Human herpesvirus 5
cuggggucaaaagc

SEQ ID NO: 2031734 - RNA, 16 nt, Human herpesvirus 5
gagugguggcggcagc

SEQ ID NO: 2031735 - RNA, 17 nt, Human herpesvirus 5
gcuggcuuuccucgggc

SEQ ID NO: 2031736 - RNA, 12 nt, Human herpesvirus 5
gcccccaccccc

SEQ ID NO: 2031737 - RNA, 16 nt, Human herpesvirus 5
aaguacacgccacacg

SEQ ID NO: 2031738 - RNA, 16 nt, Human herpesvirus 5
cgucggugcgcccauc

SEQ ID NO: 2031739 - RNA, 17 nt, Human herpesvirus 5
gcaacuucuucuacuca

SEQ ID NO: 2031740 - RNA, 17 nt, Human herpesvirus 5
guuccuguaaauaaaaa

SEQ ID NO: 2031741 - RNA, 17 nt, Human herpesvirus 5
ccgcaaugggcuucccu

SEQ ID NO: 2031742 - RNA, 22 nt, Human herpesvirus 5
aacgagacuaucuacaacacua

SEQ ID NO: 2031743 - RNA, 18 nt, Human herpesvirus 5
ccaaggaaccaccguagc

SEQ ID NO: 2031744 - RNA, 18 nt, Human herpesvirus 5
caccccgaacuggagcuc

SEQ ID NO: 2031745 - RNA, 19 nt, Human herpesvirus 5
acgguacgcagucacugcg

SEQ ID NO: 2031746 - RNA, 15 nt, Human herpesvirus 5
accggcgccugcugc

SEQ ID NO: 2031747 - RNA, 19 nt, Human herpesvirus 5
cgcgcaagugccugcacga

SEQ ID NO: 2031748 - RNA, 15 nt, Human herpesvirus 5
gguuauggcuccgcg

SEQ ID NO: 2031749 - RNA, 18 nt, Human herpesvirus 5
ccacguccacccaucccg

SEQ ID NO: 2031750 - RNA, 15 nt, Human herpesvirus 5
agagacagagaccgc

SEQ ID NO: 2031751 - RNA, 13 nt, Human herpesvirus 5
ccgcagcgguggc

SEQ ID NO: 2031752 - RNA, 18 nt, Human herpesvirus 5
guugacccagggcugcuc

SEQ ID NO: 2031753 - RNA, 13 nt, Human herpesvirus 5
cgucccuggggcu

SEQ ID NO: 2031754 - RNA, 18 nt, Human herpesvirus 5
ugcgauuuggaccuggag

SEQ ID NO: 2031755 - RNA, 14 nt, Human herpesvirus 5
uccuuuuggcgcag

SEQ ID NO: 2031756 - RNA, 12 nt, Human herpesvirus 5
ugcagcugguga

SEQ ID NO: 2031757 - RNA, 19 nt, Human herpesvirus 5
gggcgauggguccgagcug

SEQ ID NO: 2031758 - RNA, 19 nt, Human herpesvirus 5
acgagcgccguccugcaga

SEQ ID NO: 2031759 - RNA, 13 nt, Human herpesvirus 5
gaucaccacccug

SEQ ID NO: 2031760 - RNA, 20 nt, Human herpesvirus 5
caagucccuggccccggcca

SEQ ID NO: 2031761 - RNA, 13 nt, Human herpesvirus 5
gugagaguuuaug

SEQ ID NO: 2031762 - RNA, 19 nt, Human herpesvirus 5
gcgcugguggccgaacagc

SEQ ID NO: 2031763 - RNA, 17 nt, Human herpesvirus 5
gcuguggcuucucugga

SEQ ID NO: 2031764 - RNA, 14 nt, Human herpesvirus 5
gccgcgugccuggg

SEQ ID NO: 2031765 - RNA, 17 nt, Human herpesvirus 5
aguacccaccgauggca

SEQ ID NO: 2031766 - RNA, 13 nt, Human herpesvirus 5
acugcacuuccug

SEQ ID NO: 2031767 - RNA, 14 nt, Human herpesvirus 5
ugaugugccagccg

SEQ ID NO: 2031768 - RNA, 19 nt, Human herpesvirus 5
ccgaagaccucaccaucuc

SEQ ID NO: 2031769 - RNA, 21 nt, Human herpesvirus 5
gacccggcuggcgacccgcag

SEQ ID NO: 2031770 - RNA, 14 nt, Human herpesvirus 5
ccgaccugugcgug

SEQ ID NO: 2031771 - RNA, 15 nt, Human herpesvirus 5
guuccacggccagcg

SEQ ID NO: 2031772 - RNA, 15 nt, Human herpesvirus 5
ccacuaauccgcacc

SEQ ID NO: 2031773 - RNA, 16 nt, Human herpesvirus 5
cagcccauccucgugg

SEQ ID NO: 2031774 - RNA, 13 nt, Human herpesvirus 5
cccucugcugcug

SEQ ID NO: 2031775 - RNA, 20 nt, Human herpesvirus 5
ucugcauagaguuacaugca

SEQ ID NO: 2031776 - RNA, 19 nt, Human herpesvirus 5
aaagccgcgcucgcccccg

SEQ ID NO: 2031777 - RNA, 17 nt, Human herpesvirus 5
accggcucaccacgcag

SEQ ID NO: 2031778 - RNA, 15 nt, Human herpesvirus 5
uggacgacgcgcugg

SEQ ID NO: 2031779 - RNA, 19 nt, Human herpesvirus 5
cgucuucaaaguagcugug

SEQ ID NO: 2031780 - RNA, 22 nt, Human herpesvirus 5
gcucaaaguacuugucggcgug

SEQ ID NO: 2031781 - RNA, 20 nt, Human herpesvirus 5
cggaucaauugcgggcccug

SEQ ID NO: 2031782 - RNA, 12 nt, Human herpesvirus 5
ccagcgccacca

SEQ ID NO: 2031783 - RNA, 21 nt, Human herpesvirus 5
ccaaacgcgugcgggugcaug

SEQ ID NO: 2031784 - RNA, 13 nt, Human herpesvirus 5
ggcagcggaggug

SEQ ID NO: 2031785 - RNA, 13 nt, Human herpesvirus 5
uacauaaaaccac

SEQ ID NO: 2031786 - RNA, 16 nt, Human herpesvirus 5
cuucggaaucgggccc

SEQ ID NO: 2031787 - RNA, 14 nt, Human herpesvirus 5
ugagcgugcugcuc

SEQ ID NO: 2031788 - RNA, 17 nt, Human herpesvirus 5
cuuuguggggcugcuca

SEQ ID NO: 2031789 - RNA, 17 nt, Human herpesvirus 5
ucaacagcagcaacagc

SEQ ID NO: 2031790 - RNA, 16 nt, Human herpesvirus 5
uuuuaaucgucgaaaa

SEQ ID NO: 2031791 - RNA, 13 nt, Human herpesvirus 5
cuggcuuggcucg

SEQ ID NO: 2031792 - RNA, 22 nt, Human herpesvirus 5
ggugucucugcaacgccuggcg

SEQ ID NO: 2031793 - RNA, 18 nt, Human herpesvirus 5
guacggcagcggggagaa

SEQ ID NO: 2031794 - RNA, 12 nt, Human herpesvirus 5
gaugcgcacggc

SEQ ID NO: 2031795 - RNA, 15 nt, Human herpesvirus 5
ggcgugcgcacgccg

SEQ ID NO: 2031796 - RNA, 15 nt, Human herpesvirus 5
gcugcgcaggccgcc

SEQ ID NO: 2031797 - RNA, 14 nt, Human herpesvirus 5
aacgcguggcccug

SEQ ID NO: 2031798 - RNA, 23 nt, Human herpesvirus 5
cacagcuccugaaugagcucuuu

SEQ ID NO: 2031799 - RNA, 18 nt, Human herpesvirus 5
cuggggugucuagcuggc

SEQ ID NO: 2031800 - RNA, 17 nt, Human herpesvirus 5
caguggcaggcccgggu

SEQ ID NO: 2031801 - RNA, 12 nt, Human herpesvirus 5
cccucugcugcu

SEQ ID NO: 2031802 - RNA, 15 nt, Human herpesvirus 5
uaacaauuccacgcc

SEQ ID NO: 2031803 - RNA, 23 nt, Human herpesvirus 5
guacaccgcuggagcuaucugug

SEQ ID NO: 2031804 - RNA, 23 nt, Human herpesvirus 5
cugucggaugaggcaggcgaugc

SEQ ID NO: 2031805 - RNA, 15 nt, Human herpesvirus 5
gucgccaugcuucau

SEQ ID NO: 2031806 - RNA, 18 nt, Human herpesvirus 5
cugauaauaaaggcucuc

SEQ ID NO: 2031807 - RNA, 16 nt, Human herpesvirus 5
cuggucaaccugcuga

SEQ ID NO: 2031808 - RNA, 20 nt, Human herpesvirus 5
ggcgugcugcacgcucaccg

SEQ ID NO: 2031809 - RNA, 23 nt, Human herpesvirus 5
ugauaauaaccgcggugugcuuu

SEQ ID NO: 2031810 - RNA, 13 nt, Human herpesvirus 5
ccggcugcugcac

SEQ ID NO: 2031811 - RNA, 13 nt, Human herpesvirus 5
gccagcggccugg

SEQ ID NO: 2031812 - RNA, 19 nt, Human herpesvirus 5
caagccuguuagaaccgcg

SEQ ID NO: 2031813 - RNA, 19 nt, Human herpesvirus 5
cgaucuggaaggcguggau

SEQ ID NO: 2031814 - RNA, 18 nt, Human herpesvirus 5
gccgccgucaccaccgcc

SEQ ID NO: 2031815 - RNA, 18 nt, Human herpesvirus 5
uggcaaggugcugcaccu

SEQ ID NO: 2031816 - RNA, 22 nt, Human herpesvirus 5
caccguaucagcuaccgccgca

SEQ ID NO: 2031817 - RNA, 20 nt, Human herpesvirus 5
gcaccagacuuggagacaug

SEQ ID NO: 2031818 - RNA, 19 nt, Human herpesvirus 5
cgaccuugagcgacagcag

SEQ ID NO: 2031819 - RNA, 15 nt, Human herpesvirus 5
ugcugcgucugucuu

SEQ ID NO: 2031820 - RNA, 15 nt, Human herpesvirus 5
caucugcggcagcgg

SEQ ID NO: 2031821 - RNA, 18 nt, Human herpesvirus 5
gggcggccgugcagcaag

SEQ ID NO: 2031822 - RNA, 22 nt, Human herpesvirus 5
caaggacuguuuucucaaucug

SEQ ID NO: 2031823 - RNA, 21 nt, Human herpesvirus 5
acugaccaagcuaguagcggc

SEQ ID NO: 2031824 - RNA, 20 nt, Human herpesvirus 5
gcccaucgucugcauguuca

SEQ ID NO: 2031825 - RNA, 17 nt, Human herpesvirus 5
gcacccgucaugguaca

SEQ ID NO: 2031826 - RNA, 16 nt, Human herpesvirus 5
aguagugguggggcug

SEQ ID NO: 2031827 - RNA, 19 nt, Human herpesvirus 5
cgacgggugguaccugcaa

SEQ ID NO: 2031828 - RNA, 14 nt, Human herpesvirus 5
gcaacaacagucgc

SEQ ID NO: 2031829 - RNA, 14 nt, Human herpesvirus 5
cccaccacgggggc

SEQ ID NO: 2031830 - RNA, 18 nt, Human herpesvirus 5
gaguggggcaacugcugc

SEQ ID NO: 2031831 - RNA, 23 nt, Human herpesvirus 5
uccgccgucggugcgcccaucug

SEQ ID NO: 2031832 - RNA, 19 nt, Human herpesvirus 5
ugacgcuaggcggcgccgg

SEQ ID NO: 2031833 - RNA, 13 nt, Human herpesvirus 5
gcggcaggaaggc

SEQ ID NO: 2031834 - RNA, 12 nt, Human herpesvirus 5
ccccggcagcgg

SEQ ID NO: 2031835 - RNA, 12 nt, Human herpesvirus 5
acuaccuccccu

SEQ ID NO: 2031836 - RNA, 13 nt, Human herpesvirus 5
ucgccgccaccuu

SEQ ID NO: 2031837 - RNA, 14 nt, Human herpesvirus 5
ccgacauggagaca

SEQ ID NO: 2031838 - RNA, 14 nt, Human herpesvirus 5
ccgccuccacuucc

SEQ ID NO: 2031839 - RNA, 16 nt, Human herpesvirus 5
aucgcgagccccaucg

SEQ ID NO: 2031840 - RNA, 16 nt, Human herpesvirus 5
augaaaaauaaaaaac

SEQ ID NO: 2031841 - RNA, 15 nt, Human herpesvirus 5
guuggacuccugugu

SEQ ID NO: 2031842 - RNA, 16 nt, Human herpesvirus 5
uaccuggcuggcgcag

SEQ ID NO: 2031843 - RNA, 22 nt, Human herpesvirus 5
cggaaacagcguccacaguuuc

SEQ ID NO: 2031844 - RNA, 14 nt, Human herpesvirus 5
ccucagcuugcccg

SEQ ID NO: 2031845 - RNA, 15 nt, Human herpesvirus 5
ugcgucuggauuugu

SEQ ID NO: 2031846 - RNA, 20 nt, Human herpesvirus 5
gcccggucggucuuccugcu

SEQ ID NO: 2031847 - RNA, 14 nt, Human herpesvirus 5
auuuucuuucuagu

SEQ ID NO: 2031848 - RNA, 16 nt, Human herpesvirus 5
guauguggaacagcuc

SEQ ID NO: 2031849 - RNA, 21 nt, Human herpesvirus 5
gccagcugccaccagggcgac

SEQ ID NO: 2031850 - RNA, 19 nt, Human herpesvirus 5
agguugggagaugcggggu

SEQ ID NO: 2031851 - RNA, 23 nt, Human herpesvirus 5
cggagcggaggaggugaccuggc

SEQ ID NO: 2031852 - RNA, 17 nt, Human herpesvirus 5
cgggcacguucuuucca

SEQ ID NO: 2031853 - RNA, 14 nt, Human herpesvirus 5
gcgacggcagcgcc

SEQ ID NO: 2031854 - RNA, 21 nt, Human herpesvirus 5
gcggaugagcgugcugcucug

SEQ ID NO: 2031855 - RNA, 18 nt, Human herpesvirus 5
ggcgucgcgucgcaggcc

SEQ ID NO: 2031856 - RNA, 15 nt, Human herpesvirus 5
cagcaacaacagucg

SEQ ID NO: 2031857 - RNA, 14 nt, Human herpesvirus 5
guaaauaaaaagcu

SEQ ID NO: 2031858 - RNA, 15 nt, Human herpesvirus 5
cggcgaucgcgcuuu

SEQ ID NO: 2031859 - RNA, 18 nt, Human herpesvirus 5
agaccaugacgacgguga

SEQ ID NO: 2031860 - RNA, 16 nt, Human herpesvirus 5
cgguaccauuucuugg

SEQ ID NO: 2031861 - RNA, 22 nt, Human herpesvirus 5
gucccuggaagcgugugugggc

SEQ ID NO: 2031862 - RNA, 14 nt, Human herpesvirus 5
cguaaagagaguca

SEQ ID NO: 2031863 - RNA, 13 nt, Human herpesvirus 5
ccgcccgagcagg

SEQ ID NO: 2031864 - RNA, 16 nt, Human herpesvirus 5
cggcggccacggccug

SEQ ID NO: 2031865 - RNA, 17 nt, Human herpesvirus 5
cacgccguugccacgag

SEQ ID NO: 2031866 - RNA, 13 nt, Human herpesvirus 5
ccgcaaaggccac

SEQ ID NO: 2031867 - RNA, 15 nt, Human herpesvirus 5
ugcgcggcgacgagg

SEQ ID NO: 2031868 - RNA, 23 nt, Human herpesvirus 5
cgccgccgaagccuggggcaccu

SEQ ID NO: 2031869 - RNA, 16 nt, Human herpesvirus 5
ccucgucgccuuccag

SEQ ID NO: 2031870 - RNA, 20 nt, Human herpesvirus 5
gcgagcgggguucaccugca

SEQ ID NO: 2031871 - RNA, 18 nt, Human herpesvirus 5
aacaguacggacaaguau

SEQ ID NO: 2031872 - RNA, 14 nt, Human herpesvirus 5
ucaauaaaaaccac

SEQ ID NO: 2031873 - RNA, 15 nt, Human herpesvirus 5
cgcaggucacacugg

SEQ ID NO: 2031874 - RNA, 22 nt, Human herpesvirus 5
acgucgaucuugacgcugcugg

SEQ ID NO: 2031875 - RNA, 20 nt, Human herpesvirus 5
cucggucaacgcguccagcu

SEQ ID NO: 2031876 - RNA, 18 nt, Human herpesvirus 5
agaaacgucgcagccacc

SEQ ID NO: 2031877 - RNA, 12 nt, Human herpesvirus 5
gaucaugugcuu

SEQ ID NO: 2031878 - RNA, 18 nt, Human herpesvirus 5
gaagcgcugauguaccug

SEQ ID NO: 2031879 - RNA, 17 nt, Human herpesvirus 5
caagcgccgucacuucc

SEQ ID NO: 2031880 - RNA, 15 nt, Human herpesvirus 5
aauaauggucaauaa

SEQ ID NO: 2031881 - RNA, 13 nt, Human herpesvirus 5
ccagccgcgauuc

SEQ ID NO: 2031882 - RNA, 15 nt, Human herpesvirus 5
cagugucgguguggu

SEQ ID NO: 2031883 - RNA, 19 nt, Human herpesvirus 5
auuguuuuuauuacccgcu

SEQ ID NO: 2031884 - RNA, 13 nt, Human herpesvirus 5
ccuaccgccgccg

SEQ ID NO: 2031885 - RNA, 14 nt, Human herpesvirus 5
uccacggccuccga

SEQ ID NO: 2031886 - RNA, 20 nt, Human herpesvirus 5
uccgacgucggucccaucgc

SEQ ID NO: 2031887 - RNA, 17 nt, Human herpesvirus 5
cauuggaaguaacauca

SEQ ID NO: 2031888 - RNA, 23 nt, Human herpesvirus 5
gcuacuucccccuccccuucugu

SEQ ID NO: 2031889 - RNA, 14 nt, Human herpesvirus 5
guguacagcuaccu

SEQ ID NO: 2031890 - RNA, 19 nt, Human herpesvirus 5
uucuugcccacgccgucgc

SEQ ID NO: 2031891 - RNA, 23 nt, Human herpesvirus 5
cggcagcuaucgugacugggagu

SEQ ID NO: 2031892 - RNA, 20 nt, Human herpesvirus 5
gacaagucguuucagcccaa

SEQ ID NO: 2031893 - RNA, 15 nt, Human herpesvirus 5
cugagacagccacau

SEQ ID NO: 2031894 - RNA, 23 nt, Human herpesvirus 5
cacggccuuauguggcugcgccg

SEQ ID NO: 2031895 - RNA, 20 nt, Human herpesvirus 5
cuccgugcggcccccagagg

SEQ ID NO: 2031896 - RNA, 20 nt, Human herpesvirus 5
cagcgccagcggccuggccu

SEQ ID NO: 2031897 - RNA, 13 nt, Human herpesvirus 5
acgcgugcgggug

SEQ ID NO: 2031898 - RNA, 22 nt, Human herpesvirus 5
gcgaccgucuggagguggccug

SEQ ID NO: 2031899 - RNA, 12 nt, Human herpesvirus 5
acagggugccgc

SEQ ID NO: 2031900 - RNA, 20 nt, Human herpesvirus 5
ccgagacgugcgaccuggac

SEQ ID NO: 2031901 - RNA, 15 nt, Human herpesvirus 5
ugcuugaagauuucc

SEQ ID NO: 2031902 - RNA, 13 nt, Human herpesvirus 5
agugcgcgccgcc

SEQ ID NO: 2031903 - RNA, 17 nt, Human herpesvirus 5
gaagccgccagcggaag

SEQ ID NO: 2031904 - RNA, 16 nt, Human herpesvirus 5
auugccucuacacuug

SEQ ID NO: 2031905 - RNA, 13 nt, Human herpesvirus 5
gcaggccaugggu

SEQ ID NO: 2031906 - RNA, 18 nt, Human herpesvirus 5
gaugaaccuuccccaccc

SEQ ID NO: 2031907 - RNA, 23 nt, Human herpesvirus 5
acaccaguauugguucugggcgc

SEQ ID NO: 2031908 - RNA, 17 nt, Human herpesvirus 5
cgaugugagagccaccu

SEQ ID NO: 2031909 - RNA, 20 nt, Human herpesvirus 5
ucgacgaucuuuaguccgga

SEQ ID NO: 2031910 - RNA, 22 nt, Human herpesvirus 5
uuuaugacgcgcguggccgcgc

SEQ ID NO: 2031911 - RNA, 19 nt, Human herpesvirus 5
ccuguugugguggcuggga

SEQ ID NO: 2031912 - RNA, 13 nt, Human herpesvirus 5
ugugcgucaaugc

SEQ ID NO: 2031913 - RNA, 11 nt, Human herpesvirus 5
cgcggcggugg

SEQ ID NO: 2031914 - RNA, 14 nt, Human herpesvirus 5
ccguggccuguggc

SEQ ID NO: 2031915 - RNA, 15 nt, Human herpesvirus 5
acuuuaggcggcgca

SEQ ID NO: 2031916 - RNA, 22 nt, Human herpesvirus 5
aggggccgcagccguuggugga

SEQ ID NO: 2031917 - RNA, 12 nt, Human herpesvirus 5
gcucuagguuug

SEQ ID NO: 2031918 - RNA, 16 nt, Human herpesvirus 5
cgccuuccuccucugc

SEQ ID NO: 2031919 - RNA, 13 nt, Human herpesvirus 5
cugcaccagcaac

SEQ ID NO: 2031920 - RNA, 19 nt, Human herpesvirus 5
gcaccacggcuugcaaaac

SEQ ID NO: 2031921 - RNA, 17 nt, Human herpesvirus 5
ucucucuggucuucccu

SEQ ID NO: 2031922 - RNA, 16 nt, Human herpesvirus 5
ggacggcgacgaccgc

SEQ ID NO: 2031923 - RNA, 21 nt, Human herpesvirus 5
cuucaucaucaccacccgaga

SEQ ID NO: 2031924 - RNA, 11 nt, Human herpesvirus 5
agccggcagcu

SEQ ID NO: 2031925 - RNA, 15 nt, Human herpesvirus 5
gcuccuaccgccgcc

SEQ ID NO: 2031926 - RNA, 17 nt, Human herpesvirus 5
acguagaauacuggaag

SEQ ID NO: 2031927 - RNA, 15 nt, Human herpesvirus 5
ugcaguccgcuccgg

SEQ ID NO: 2031928 - RNA, 20 nt, Human herpesvirus 5
gacgugaugcgcgucgaccu

SEQ ID NO: 2031929 - RNA, 14 nt, Human herpesvirus 5
gucugcgcuuuccc

SEQ ID NO: 2031930 - RNA, 15 nt, Human herpesvirus 5
uggcugcgcgccucc

SEQ ID NO: 2031931 - RNA, 21 nt, Human herpesvirus 5
ccgcguuuggucgccugccua

SEQ ID NO: 2031932 - RNA, 21 nt, Human herpesvirus 5
uaucgcguguguucuauggcc

SEQ ID NO: 2031933 - RNA, 12 nt, Human herpesvirus 5
gcgaggcggcaa

SEQ ID NO: 2031934 - RNA, 13 nt, Human herpesvirus 5
uuucagucagaga

SEQ ID NO: 2031935 - RNA, 14 nt, Human herpesvirus 5
augugcuuaagcag

SEQ ID NO: 2031936 - RNA, 17 nt, Human herpesvirus 5
ccgauccuuggaagagg

SEQ ID NO: 2031937 - RNA, 20 nt, Human herpesvirus 5
acacgugcuuuuggugcgcc

SEQ ID NO: 2031938 - RNA, 20 nt, Human herpesvirus 5
cagagucgccaguccauggu

SEQ ID NO: 2031939 - RNA, 18 nt, Human herpesvirus 5
gacugagacuggugguga

SEQ ID NO: 2031940 - RNA, 20 nt, Human herpesvirus 5
ucgcucggccucgcucggaa

SEQ ID NO: 2031941 - RNA, 17 nt, Human herpesvirus 5
aucaacgacgccacaca

SEQ ID NO: 2031942 - RNA, 15 nt, Human herpesvirus 5
agauuagcagaagga

SEQ ID NO: 2031943 - RNA, 18 nt, Human herpesvirus 5
gccguuauguucaguguc

SEQ ID NO: 2031944 - RNA, 22 nt, Human herpesvirus 5
gacacggaggaugacgaggagc

SEQ ID NO: 2031945 - RNA, 19 nt, Human herpesvirus 5
cuaaucgcauccugcauca

SEQ ID NO: 2031946 - RNA, 16 nt, Human herpesvirus 5
aucgugccgcuccauc

SEQ ID NO: 2031947 - RNA, 22 nt, Human herpesvirus 5
ucgcggcccuucaacggcacca

SEQ ID NO: 2031948 - RNA, 13 nt, Human herpesvirus 5
cgucacaauaaca

SEQ ID NO: 2031949 - RNA, 15 nt, Human herpesvirus 5
acgugucuucuucgc

SEQ ID NO: 2031950 - RNA, 17 nt, Human herpesvirus 5
aucauggaagagggcgc

SEQ ID NO: 2031951 - RNA, 17 nt, Human herpesvirus 5
uccuccucugccugggc

SEQ ID NO: 2031952 - RNA, 14 nt, Human herpesvirus 5
gaagcggcuguggc

SEQ ID NO: 2031953 - RNA, 11 nt, Human herpesvirus 5
gacggcagcua

SEQ ID NO: 2031954 - RNA, 15 nt, Human herpesvirus 5
acagcuaccucauga

SEQ ID NO: 2031955 - RNA, 15 nt, Human herpesvirus 5
guuauuucgugcgug

SEQ ID NO: 2031956 - RNA, 16 nt, Human herpesvirus 5
cgcaaacucccacucc

SEQ ID NO: 2031957 - RNA, 16 nt, Human herpesvirus 5
cgccuuuugcuggcug

SEQ ID NO: 2031958 - RNA, 16 nt, Human herpesvirus 5
acguaggccuccucuc

SEQ ID NO: 2031959 - RNA, 19 nt, Human herpesvirus 5
auaauaagccggcagcugc

SEQ ID NO: 2031960 - RNA, 14 nt, Human herpesvirus 5
cguaggccuccucu

SEQ ID NO: 2031961 - RNA, 14 nt, Human herpesvirus 5
ccagcagccggagg

SEQ ID NO: 2031962 - RNA, 18 nt, Human herpesvirus 5
gccgugcgcgacgagauc

SEQ ID NO: 2031963 - RNA, 17 nt, Human herpesvirus 5
acucuauguuauacucu

SEQ ID NO: 2031964 - RNA, 17 nt, Human herpesvirus 5
ccgcccuugguggagac

SEQ ID NO: 2031965 - RNA, 18 nt, Human herpesvirus 5
acaagacggaggagacac

SEQ ID NO: 2031966 - RNA, 11 nt, Human herpesvirus 5
uccccugccua

SEQ ID NO: 2031967 - RNA, 18 nt, Human herpesvirus 5
ugcaaugccucauccuua

SEQ ID NO: 2031968 - RNA, 17 nt, Human herpesvirus 5
cugucuugcuuaaugau

SEQ ID NO: 2031969 - RNA, 15 nt, Human herpesvirus 5
agguugcgccgcaag

SEQ ID NO: 2031970 - RNA, 15 nt, Human herpesvirus 5
gaacuugagcacaaa

SEQ ID NO: 2031971 - RNA, 20 nt, Human herpesvirus 5
acgucgcuuuuuacuuugua

SEQ ID NO: 2031972 - RNA, 15 nt, Human herpesvirus 5
aaaccgcaggagcug

SEQ ID NO: 2031973 - RNA, 18 nt, Human herpesvirus 5
gcauccgcuacucccgag

SEQ ID NO: 2031974 - RNA, 17 nt, Human herpesvirus 5
uggcgcguagccaccug

SEQ ID NO: 2031975 - RNA, 20 nt, Human herpesvirus 5
cguugucuauccccaaaaaa

SEQ ID NO: 2031976 - RNA, 21 nt, Human herpesvirus 5
ggacgcucguccucucugucu

SEQ ID NO: 2031977 - RNA, 15 nt, Human herpesvirus 5
ugaggagggugguga

SEQ ID NO: 2031978 - RNA, 14 nt, Human herpesvirus 5
cuguugcucuaccg

SEQ ID NO: 2031979 - RNA, 21 nt, Human herpesvirus 5
guacuuuauuaggucagggau

SEQ ID NO: 2031980 - RNA, 12 nt, Human herpesvirus 5
ggggcugcugcu

SEQ ID NO: 2031981 - RNA, 21 nt, Human herpesvirus 5
uguguuauucagaaccaugua

SEQ ID NO: 2031982 - RNA, 17 nt, Human herpesvirus 5
ucccucagccucugugu

SEQ ID NO: 2031983 - RNA, 19 nt, Human herpesvirus 5
gacgcggugcagguucuga

SEQ ID NO: 2031984 - RNA, 16 nt, Human herpesvirus 5
uccccucugcugcugg

SEQ ID NO: 2031985 - RNA, 21 nt, Human herpesvirus 5
gcugcacacggagcacgggcu

SEQ ID NO: 2031986 - RNA, 23 nt, Human herpesvirus 5
caccuucccucuagagacagacg

SEQ ID NO: 2031987 - RNA, 16 nt, Human herpesvirus 5
uaugauaucuacagca

SEQ ID NO: 2031988 - RNA, 14 nt, Human herpesvirus 5
guuguguuuugcuu

SEQ ID NO: 2031989 - RNA, 22 nt, Human herpesvirus 5
gucaaagccgacaaccugcugc

SEQ ID NO: 2031990 - RNA, 17 nt, Human herpesvirus 5
gaagcgaauaagcgcga

SEQ ID NO: 2031991 - RNA, 17 nt, Human herpesvirus 5
cuugcggcgcuucgagg

SEQ ID NO: 2031992 - RNA, 20 nt, Human herpesvirus 5
gccgcucaggucgcccaggc

SEQ ID NO: 2031993 - RNA, 21 nt, Human herpesvirus 5
ucaauugcgggcccugcugac

SEQ ID NO: 2031994 - RNA, 20 nt, Human herpesvirus 5
uguuguacucguguuuuuua

SEQ ID NO: 2031995 - RNA, 17 nt, Human herpesvirus 5
gcgaccuggacggcuac

SEQ ID NO: 2031996 - RNA, 19 nt, Human herpesvirus 5
cguuuugagauuucugucg

SEQ ID NO: 2031997 - RNA, 17 nt, Human herpesvirus 5
aacaacagcaacaacag

SEQ ID NO: 2031998 - RNA, 18 nt, Human herpesvirus 5
ccuggaccggugguacug

SEQ ID NO: 2031999 - RNA, 16 nt, Human herpesvirus 5
ucaauaaucuccugag

SEQ ID NO: 2032000 - RNA, 15 nt, Human herpesvirus 5
cuaugauccuguggu

SEQ ID NO: 2032001 - RNA, 20 nt, Human herpesvirus 5
cucagcgugcucagcuggug

SEQ ID NO: 2032002 - RNA, 18 nt, Human herpesvirus 5
gaaaccacgcgucagggc

SEQ ID NO: 2032003 - RNA, 21 nt, Human herpesvirus 5
caaggagcgacguaccagcug

SEQ ID NO: 2032004 - RNA, 14 nt, Human herpesvirus 5
cggcugcugcacca

SEQ ID NO: 2032005 - RNA, 15 nt, Human herpesvirus 5
cggcagcggggagaa

SEQ ID NO: 2032006 - RNA, 18 nt, Human herpesvirus 5
gacccacgacccgagccg

SEQ ID NO: 2032007 - RNA, 17 nt, Human herpesvirus 5
acgacagucuccuccug

SEQ ID NO: 2032008 - RNA, 14 nt, Human herpesvirus 5
acugaaaacaccau

SEQ ID NO: 2032009 - RNA, 16 nt, Human herpesvirus 5
agacgggguugaucaa

SEQ ID NO: 2032010 - RNA, 16 nt, Human herpesvirus 5
cccgauaugggccgcu

SEQ ID NO: 2032011 - RNA, 16 nt, Human herpesvirus 5
cgugcccugugggccc

SEQ ID NO: 2032012 - RNA, 14 nt, Human herpesvirus 5
gucuccaccacagu

SEQ ID NO: 2032013 - RNA, 19 nt, Human herpesvirus 5
cgcguguaggcgacuggcu

SEQ ID NO: 2032014 - RNA, 20 nt, Human herpesvirus 5
agucgcuuagccaccaccug

SEQ ID NO: 2032015 - RNA, 22 nt, Human herpesvirus 5
cuacaauguauagauacacgug

SEQ ID NO: 2032016 - RNA, 14 nt, Human herpesvirus 5
gaacggagugguga

SEQ ID NO: 2032017 - RNA, 20 nt, Human herpesvirus 5
acgcggucaugaguuggugc

SEQ ID NO: 2032018 - RNA, 20 nt, Human herpesvirus 5
augccuuccgcgugcuccac

SEQ ID NO: 2032019 - RNA, 18 nt, Human herpesvirus 5
gcugcuuaaugacagcga

SEQ ID NO: 2032020 - RNA, 18 nt, Human herpesvirus 5
uugcauaagcgcggaggu

SEQ ID NO: 2032021 - RNA, 16 nt, Human herpesvirus 5
ugagauacauguucau

SEQ ID NO: 2032022 - RNA, 22 nt, Human herpesvirus 5
cugguagcgcuugcggcacagc

SEQ ID NO: 2032023 - RNA, 15 nt, Human herpesvirus 5
caaacgucacugaca

SEQ ID NO: 2032024 - RNA, 23 nt, Human herpesvirus 5
aggaaugcggcacccggcugcac

SEQ ID NO: 2032025 - RNA, 15 nt, Human herpesvirus 5
caggaaucugggagg

SEQ ID NO: 2032026 - RNA, 22 nt, Human herpesvirus 5
gugagggacccucgucggaagc

SEQ ID NO: 2032027 - RNA, 21 nt, Human herpesvirus 5
acgccggggaagccuccggaa

SEQ ID NO: 2032028 - RNA, 12 nt, Human herpesvirus 5
ucucgagcccca

SEQ ID NO: 2032029 - RNA, 23 nt, Human herpesvirus 5
gaccauuuccaugugcagcuggu

SEQ ID NO: 2032030 - RNA, 17 nt, Human herpesvirus 5
gcguguuuuauaaaaga

SEQ ID NO: 2032031 - RNA, 18 nt, Human herpesvirus 5
uaagcagccucuucgugg

SEQ ID NO: 2032032 - RNA, 12 nt, Human herpesvirus 5
acaagggcuggc

SEQ ID NO: 2032033 - RNA, 15 nt, Human herpesvirus 5
cgacugcgcggccug

SEQ ID NO: 2032034 - RNA, 20 nt, Human herpesvirus 5
uccucggguuccucggccuc

SEQ ID NO: 2032035 - RNA, 17 nt, Human herpesvirus 5
guuggcucucgcagccc

SEQ ID NO: 2032036 - RNA, 21 nt, Human herpesvirus 5
cauguagaagcacccauuaca

SEQ ID NO: 2032037 - RNA, 12 nt, Human herpesvirus 5
gcugagacagga

SEQ ID NO: 2032038 - RNA, 14 nt, Human herpesvirus 5
uugagacacgcgcu

SEQ ID NO: 2032039 - RNA, 17 nt, Human herpesvirus 5
aaccacaagaaacgcug

SEQ ID NO: 2032040 - RNA, 14 nt, Human herpesvirus 5
acugaucgccugga

SEQ ID NO: 2032041 - RNA, 18 nt, Human herpesvirus 5
gacacucuggcccugcug

SEQ ID NO: 2032042 - RNA, 23 nt, Human herpesvirus 5
ccuuccagcuuaccgccaccguc

SEQ ID NO: 2032043 - RNA, 18 nt, Human herpesvirus 5
cgacuggggucaaaagcc

SEQ ID NO: 2032044 - RNA, 11 nt, Human herpesvirus 5
aacucagggaa

SEQ ID NO: 2032045 - RNA, 14 nt, Human herpesvirus 5
ccacugggccucgg

SEQ ID NO: 2032046 - RNA, 15 nt, Human herpesvirus 5
gaccaggagguguug

SEQ ID NO: 2032047 - RNA, 18 nt, Human herpesvirus 5
auaucgagguacaugucc

SEQ ID NO: 2032048 - RNA, 19 nt, Human herpesvirus 5
gcgguuucguguugaaacc

SEQ ID NO: 2032049 - RNA, 15 nt, Human herpesvirus 5
aaucuccugagacac

SEQ ID NO: 2032050 - RNA, 14 nt, Human herpesvirus 5
uggugugucggcaa

SEQ ID NO: 2032051 - RNA, 20 nt, Human herpesvirus 5
ucagaccgcaacaacagcag

SEQ ID NO: 2032052 - RNA, 12 nt, Human herpesvirus 5
cggcugcugcac

SEQ ID NO: 2032053 - RNA, 16 nt, Human herpesvirus 5
ugguggcucaugccgc

SEQ ID NO: 2032054 - RNA, 20 nt, Human herpesvirus 5
auucuguguuacgaccuguu

SEQ ID NO: 2032055 - RNA, 15 nt, Human herpesvirus 5
cguaguuguugcaga

SEQ ID NO: 2032056 - RNA, 17 nt, Human herpesvirus 5
cccuguuccccgugacg

SEQ ID NO: 2032057 - RNA, 16 nt, Human herpesvirus 5
cuuuuggcgcagucgc

SEQ ID NO: 2032058 - RNA, 17 nt, Human herpesvirus 5
caucuccgucucugguc

SEQ ID NO: 2032059 - RNA, 16 nt, Human herpesvirus 5
aacauuccccugggaa

SEQ ID NO: 2032060 - RNA, 12 nt, Human herpesvirus 5
acaucuuaagaa

SEQ ID NO: 2032061 - RNA, 24 nt, Human herpesvirus 5
ugaugcgcgaacaggccgccaucc

SEQ ID NO: 2032062 - RNA, 17 nt, Human herpesvirus 5
cucagcccgcguaagaa

SEQ ID NO: 2032063 - RNA, 15 nt, Human herpesvirus 5
cagcacaccugccuc

SEQ ID NO: 2032064 - RNA, 17 nt, Human herpesvirus 5
ugcaacgccuggcguga

SEQ ID NO: 2032065 - RNA, 21 nt, Human herpesvirus 5
ggauccaaggccuccagcgcc

SEQ ID NO: 2032066 - RNA, 22 nt, Human herpesvirus 5
aacacugaaaacaccauuggaa

SEQ ID NO: 2032067 - RNA, 18 nt, Human herpesvirus 5
ucuacagcauggacuguc

SEQ ID NO: 2032068 - RNA, 17 nt, Human herpesvirus 5
ccgaguccaccucugcu

SEQ ID NO: 2032069 - RNA, 11 nt, Human herpesvirus 5
aacccaucccc

SEQ ID NO: 2032070 - RNA, 12 nt, Human herpesvirus 5
caagacgcauga

SEQ ID NO: 2032071 - RNA, 21 nt, Human herpesvirus 5
ugagcacaaacugcgacacgu

SEQ ID NO: 2032072 - RNA, 15 nt, Human herpesvirus 5
ggccugggcugcugu

SEQ ID NO: 2032073 - RNA, 14 nt, Human herpesvirus 5
agguacggacucua

SEQ ID NO: 2032074 - RNA, 15 nt, Human herpesvirus 5
guggcccuggucugg

SEQ ID NO: 2032075 - RNA, 23 nt, Human herpesvirus 5
augcauaagaagccaagggggug

SEQ ID NO: 2032076 - RNA, 20 nt, Human herpesvirus 5
ggcgcaggucacacugggag

SEQ ID NO: 2032077 - RNA, 12 nt, Human herpesvirus 5
agaccgcugccu

SEQ ID NO: 2032078 - RNA, 20 nt, Human herpesvirus 5
gggcuggggugcgcuuggua

SEQ ID NO: 2032079 - RNA, 23 nt, Human herpesvirus 5
gcggcgcuucgagggcucgugcg

SEQ ID NO: 2032080 - RNA, 17 nt, Human herpesvirus 5
ccugaguuccgucagca

SEQ ID NO: 2032081 - RNA, 19 nt, Human herpesvirus 5
ggagcuacgcgaccagcug

SEQ ID NO: 2032082 - RNA, 19 nt, Human herpesvirus 5
accccccgggccaccagcc

SEQ ID NO: 2032083 - RNA, 12 nt, Human herpesvirus 5
acaccuauggcg

SEQ ID NO: 2032084 - RNA, 16 nt, Human herpesvirus 5
uggggugucuagcugg

SEQ ID NO: 2032085 - RNA, 21 nt, Human herpesvirus 5
gcaugcugugggcccacugcg

SEQ ID NO: 2032086 - RNA, 16 nt, Human herpesvirus 5
ugagcgugcugcucug

SEQ ID NO: 2032087 - RNA, 14 nt, Human herpesvirus 5
cugacgcuggaaac

SEQ ID NO: 2032088 - RNA, 13 nt, Human herpesvirus 5
cugaacaauaaac

SEQ ID NO: 2032089 - RNA, 18 nt, Human herpesvirus 5
ucaggucgcccaggcuca

SEQ ID NO: 2032090 - RNA, 19 nt, Human herpesvirus 5
aaguggauuugggcgugga

SEQ ID NO: 2032091 - RNA, 16 nt, Human herpesvirus 5
gcacgagugggccagc

SEQ ID NO: 2032092 - RNA, 15 nt, Human herpesvirus 5
acgcgcggcuagagc

SEQ ID NO: 2032093 - RNA, 15 nt, Human herpesvirus 5
ccaucgggcccgcca

SEQ ID NO: 2032094 - RNA, 17 nt, Human herpesvirus 5
gaagccgccaauacagc

SEQ ID NO: 2032095 - RNA, 19 nt, Human herpesvirus 5
cugcagcucgaacgucucu

SEQ ID NO: 2032096 - RNA, 20 nt, Human herpesvirus 5
uuccccauaagcuguguacu

SEQ ID NO: 2032097 - RNA, 17 nt, Human herpesvirus 5
ggucggucagccgaccc

SEQ ID NO: 2032098 - RNA, 19 nt, Human herpesvirus 5
gggaggccacaggcggcgc

SEQ ID NO: 2032099 - RNA, 13 nt, Human herpesvirus 5
ugaucugggcagc

SEQ ID NO: 2032100 - RNA, 19 nt, Human herpesvirus 5
ggcacucggcugugccugu

SEQ ID NO: 2032101 - RNA, 12 nt, Human herpesvirus 5
acgucuucugaa

SEQ ID NO: 2032102 - RNA, 20 nt, Human herpesvirus 5
gccguguuuuugcucgagac

SEQ ID NO: 2032103 - RNA, 16 nt, Human herpesvirus 5
aucgugggccaggacc

SEQ ID NO: 2032104 - RNA, 13 nt, Human herpesvirus 5
ucuucagaaaaca

SEQ ID NO: 2032105 - RNA, 23 nt, Human herpesvirus 5
cacguccaugucgcgacacgacc

SEQ ID NO: 2032106 - RNA, 13 nt, Human herpesvirus 5
cucuggcccugcu

SEQ ID NO: 2032107 - RNA, 22 nt, Human herpesvirus 5
gcugcccgggggugacaaggaa

SEQ ID NO: 2032108 - RNA, 15 nt, Human herpesvirus 5
ugcuuaaugaucucc

SEQ ID NO: 2032109 - RNA, 12 nt, Human herpesvirus 5
aagcuguaaggu

SEQ ID NO: 2032110 - RNA, 20 nt, Human herpesvirus 5
gaugcgccuccgguggugcg

SEQ ID NO: 2032111 - RNA, 22 nt, Human herpesvirus 5
gguacggacucgaaggcgcccg

SEQ ID NO: 2032112 - RNA, 18 nt, Human herpesvirus 5
caacucuaucgcgacaga

SEQ ID NO: 2032113 - RNA, 18 nt, Human herpesvirus 5
uaugaugcuccgacuguc

SEQ ID NO: 2032114 - RNA, 16 nt, Human herpesvirus 5
uaagaucguccgagau

SEQ ID NO: 2032115 - RNA, 11 nt, Human herpesvirus 5
gccaugaugac

SEQ ID NO: 2032116 - RNA, 18 nt, Human herpesvirus 5
ggucugggaugugcagca

SEQ ID NO: 2032117 - RNA, 22 nt, Human herpesvirus 5
augaucuccaucgugugccuag

SEQ ID NO: 2032118 - RNA, 13 nt, Human herpesvirus 5
cggcgugcugcac

SEQ ID NO: 2032119 - RNA, 22 nt, Human herpesvirus 5
guccggccgucgcaagggcugc

SEQ ID NO: 2032120 - RNA, 16 nt, Human herpesvirus 5
uggccugcaucuuccc

SEQ ID NO: 2032121 - RNA, 19 nt, Human herpesvirus 5
gccguggccuguggcccga

SEQ ID NO: 2032122 - RNA, 17 nt, Human herpesvirus 5
cuguuggcuuacugccu

SEQ ID NO: 2032123 - RNA, 15 nt, Human herpesvirus 5
ccgcucacuuuccuc

SEQ ID NO: 2032124 - RNA, 19 nt, Human herpesvirus 5
uaaaagggacgucaaagcu

SEQ ID NO: 2032125 - RNA, 20 nt, Human herpesvirus 5
acgggccgcgcuccaggcgg

SEQ ID NO: 2032126 - RNA, 17 nt, Human herpesvirus 5
accgccgccgcccuccc

SEQ ID NO: 2032127 - RNA, 19 nt, Human herpesvirus 5
acacuaagaauaaagaaaa

SEQ ID NO: 2032128 - RNA, 20 nt, Human herpesvirus 5
gccgcaacuucuaccaucuc

SEQ ID NO: 2032129 - RNA, 16 nt, Human herpesvirus 5
acgcgccccccaccua

SEQ ID NO: 2032130 - RNA, 17 nt, Human herpesvirus 5
augggucggaucgccgu

SEQ ID NO: 2032131 - RNA, 15 nt, Human herpesvirus 5
aggccuccagcgccu

SEQ ID NO: 2032132 - RNA, 12 nt, Human herpesvirus 5
cgcagcgcacca

SEQ ID NO: 2032133 - RNA, 21 nt, Human herpesvirus 5
cgcaacaacagcagcaacagc

SEQ ID NO: 2032134 - RNA, 21 nt, Human herpesvirus 5
accuggucaagguagaggaac

SEQ ID NO: 2032135 - RNA, 18 nt, Human herpesvirus 5
ggccuugcgcucccugcu

SEQ ID NO: 2032136 - RNA, 15 nt, Human herpesvirus 5
ccuuccuccucugcc

SEQ ID NO: 2032137 - RNA, 13 nt, Human herpesvirus 5
agcacgcggauga

SEQ ID NO: 2032138 - RNA, 21 nt, Human herpesvirus 5
gcacgcucugucggaugaggc

SEQ ID NO: 2032139 - RNA, 19 nt, Human herpesvirus 5
ccgacugcagcccaccgcc

SEQ ID NO: 2032140 - RNA, 18 nt, Human herpesvirus 5
guggcccuggucuggccc

SEQ ID NO: 2032141 - RNA, 22 nt, Human herpesvirus 5
gauagucaucucauuugcuuuu

SEQ ID NO: 2032142 - RNA, 17 nt, Human herpesvirus 5
gagucacacuuaagaaa

SEQ ID NO: 2032143 - RNA, 14 nt, Human herpesvirus 5
aggacgcgcuggcu

SEQ ID NO: 2032144 - RNA, 13 nt, Human herpesvirus 5
ccuccgcggcccg

SEQ ID NO: 2032145 - RNA, 15 nt, Human herpesvirus 5
gaaucgcgagcuggg

SEQ ID NO: 2032146 - RNA, 19 nt, Human herpesvirus 5
ucucacaccgucagcugcg

SEQ ID NO: 2032147 - RNA, 17 nt, Human herpesvirus 5
caacaacagcagcaaca

SEQ ID NO: 2032148 - RNA, 19 nt, Human herpesvirus 5
ugagcggcaggaaggccuc

SEQ ID NO: 2032149 - RNA, 19 nt, Human herpesvirus 5
gaccagaaucagcagugag

SEQ ID NO: 2032150 - RNA, 15 nt, Human herpesvirus 5
cagcucguggaccuc

SEQ ID NO: 2032151 - RNA, 22 nt, Human herpesvirus 5
gcugcuagaugaccauguucag

SEQ ID NO: 2032152 - RNA, 17 nt, Human herpesvirus 5
ggcggcgccgggcgcca

SEQ ID NO: 2032153 - RNA, 23 nt, Human herpesvirus 5
acacgccauaacaaaccacggac

SEQ ID NO: 2032154 - RNA, 19 nt, Human herpesvirus 5
agcgugcuaccagcugcag

SEQ ID NO: 2032155 - RNA, 22 nt, Human herpesvirus 5
ccugcgcgccuaccugacgccg

SEQ ID NO: 2032156 - RNA, 19 nt, Human herpesvirus 5
aucgggcgcgcaucgccgu

SEQ ID NO: 2032157 - RNA, 18 nt, Human herpesvirus 5
gaccuguuuaccucaugc

SEQ ID NO: 2032158 - RNA, 21 nt, Human herpesvirus 5
gcgagccccaucgggcccgcc

SEQ ID NO: 2032159 - RNA, 17 nt, Human herpesvirus 5
cggcuguggcuucucug

SEQ ID NO: 2032160 - RNA, 20 nt, Human herpesvirus 5
accggcgcaguuugcggcgc

SEQ ID NO: 2032161 - RNA, 19 nt, Human herpesvirus 5
ccagugcgucgcuguugag

SEQ ID NO: 2032162 - RNA, 20 nt, Human herpesvirus 5
ugucacggaacauguccugg

SEQ ID NO: 2032163 - RNA, 16 nt, Human herpesvirus 5
guggccgagcuaugcg

SEQ ID NO: 2032164 - RNA, 13 nt, Human herpesvirus 5
caagagaagaaac

SEQ ID NO: 2032165 - RNA, 17 nt, Human herpesvirus 5
guggcuucucuggagac

SEQ ID NO: 2032166 - RNA, 17 nt, Human herpesvirus 5
gcagaccuacagcaccc

SEQ ID NO: 2032167 - RNA, 21 nt, Human herpesvirus 5
acagcagcaacagcagccacc

SEQ ID NO: 2032168 - RNA, 13 nt, Human herpesvirus 5
uugagcucggaca

SEQ ID NO: 2032169 - RNA, 19 nt, Human herpesvirus 5
ugagcaggguaaaaaccac

SEQ ID NO: 2032170 - RNA, 16 nt, Human herpesvirus 5
gcuggccgccgcugca

SEQ ID NO: 2032171 - RNA, 22 nt, Human herpesvirus 5
ccggccgucgcaagggcugcuc

SEQ ID NO: 2032172 - RNA, 16 nt, Human herpesvirus 5
ugaucgugggccagga

SEQ ID NO: 2032173 - RNA, 11 nt, Human herpesvirus 5
ucuccugugga

SEQ ID NO: 2032174 - RNA, 18 nt, Human herpesvirus 5
aguggauuugggcgugga

SEQ ID NO: 2032175 - RNA, 18 nt, Human herpesvirus 5
cccacaaaggguaucugg

SEQ ID NO: 2032176 - RNA, 12 nt, Human herpesvirus 5
uaccugggcugc

SEQ ID NO: 2032177 - RNA, 22 nt, Human herpesvirus 5
cucuauuguguguacgacagcc

SEQ ID NO: 2032178 - RNA, 21 nt, Human herpesvirus 5
accuccccuaacgucacuuca

SEQ ID NO: 2032179 - RNA, 15 nt, Human herpesvirus 5
agcuuuugcccgcac

SEQ ID NO: 2032180 - RNA, 15 nt, Human herpesvirus 5
ucuggcgaucugccu

SEQ ID NO: 2032181 - RNA, 15 nt, Human herpesvirus 5
cagcgucuggccagc

SEQ ID NO: 2032182 - RNA, 11 nt, Human herpesvirus 5
gggcggcaggg

SEQ ID NO: 2032183 - RNA, 13 nt, Human herpesvirus 5
cugugggcccacu

SEQ ID NO: 2032184 - RNA, 13 nt, Human herpesvirus 5
ucuccgucucugg

SEQ ID NO: 2032185 - RNA, 23 nt, Human herpesvirus 5
ucacuuuuaacagcucaugccuc

SEQ ID NO: 2032186 - RNA, 21 nt, Human herpesvirus 5
cggcacuuuacauaaaaccac

SEQ ID NO: 2032187 - RNA, 16 nt, Human herpesvirus 5
cgaugugcagggacag

SEQ ID NO: 2032188 - RNA, 16 nt, Human herpesvirus 5
guacugcgacggcagc

SEQ ID NO: 2032189 - RNA, 18 nt, Human herpesvirus 5
cauacaaaccccgugucc

SEQ ID NO: 2032190 - RNA, 15 nt, Human herpesvirus 5
cccucagccucugug

SEQ ID NO: 2032191 - RNA, 19 nt, Human herpesvirus 5
ccacggugcuuuucaucua

SEQ ID NO: 2032192 - RNA, 19 nt, Human herpesvirus 5
ggcaaacuccgacauucgc

SEQ ID NO: 2032193 - RNA, 23 nt, Human herpesvirus 5
gccuguggugcgacugcggcgac

SEQ ID NO: 2032194 - RNA, 18 nt, Human herpesvirus 5
cgacaucuuccgcgagca

SEQ ID NO: 2032195 - RNA, 22 nt, Human herpesvirus 5
ccgucgccauggcuauguacac

SEQ ID NO: 2032196 - RNA, 15 nt, Human herpesvirus 5
gagaaacccccaccc

SEQ ID NO: 2032197 - RNA, 14 nt, Human herpesvirus 5
cugcugagacugag

SEQ ID NO: 2032198 - RNA, 19 nt, Human herpesvirus 5
cugugucgcaugagaucca

SEQ ID NO: 2032199 - RNA, 16 nt, Human herpesvirus 5
aguaucaccuggaagg

SEQ ID NO: 2032200 - RNA, 19 nt, Human herpesvirus 5
caacgcgugaaacaagagc

SEQ ID NO: 2032201 - RNA, 14 nt, Human herpesvirus 5
cacguuaauuccag

SEQ ID NO: 2032202 - RNA, 14 nt, Human herpesvirus 5
acaagaaacacagg

SEQ ID NO: 2032203 - RNA, 19 nt, Human herpesvirus 5
acucgcacaaccuguggug

SEQ ID NO: 2032204 - RNA, 19 nt, Human herpesvirus 5
acucuaucgcgacagacau

SEQ ID NO: 2032205 - RNA, 20 nt, Human herpesvirus 5
aagccgacaaccugcugcac

SEQ ID NO: 2032206 - RNA, 16 nt, Human herpesvirus 5
agucaacacuaccaag

SEQ ID NO: 2032207 - RNA, 22 nt, Human herpesvirus 5
augccaugcggauccagcugcu

SEQ ID NO: 2032208 - RNA, 14 nt, Human herpesvirus 5
caccgucccucagc

SEQ ID NO: 2032209 - RNA, 13 nt, Human herpesvirus 5
gcggaggagguga

SEQ ID NO: 2032210 - RNA, 23 nt, Human herpesvirus 5
cuacggaguuuucccucagccuc

SEQ ID NO: 2032211 - RNA, 18 nt, Human herpesvirus 5
uucggccgcggaggugcu

SEQ ID NO: 2032212 - RNA, 13 nt, Human herpesvirus 5
ccgugccagcugg

SEQ ID NO: 2032213 - RNA, 17 nt, Human herpesvirus 5
ucugcgacuccuggacc

SEQ ID NO: 2032214 - RNA, 13 nt, Human herpesvirus 5
ucgugcgaggaca

SEQ ID NO: 2032215 - RNA, 20 nt, Human herpesvirus 5
ccucggguugccuggacgcc

SEQ ID NO: 2032216 - RNA, 17 nt, Human herpesvirus 5
cgaugcugcaaggccuc

SEQ ID NO: 2032217 - RNA, 14 nt, Human herpesvirus 5
ucuccgguuucaaa

SEQ ID NO: 2032218 - RNA, 12 nt, Human herpesvirus 5
uggcagagccac

SEQ ID NO: 2032219 - RNA, 16 nt, Human herpesvirus 5
gccgccaacgccgagc

SEQ ID NO: 2032220 - RNA, 23 nt, Human herpesvirus 5
gccgccuuccaagauacgcgguc

SEQ ID NO: 2032221 - RNA, 15 nt, Human herpesvirus 5
gaugagauaaaagua

SEQ ID NO: 2032222 - RNA, 18 nt, Human herpesvirus 5
acugggagacggccugga

SEQ ID NO: 2032223 - RNA, 14 nt, Human herpesvirus 5
cucugccugggcac

SEQ ID NO: 2032224 - RNA, 17 nt, Human herpesvirus 5
ggcgggcgcgggguggc

SEQ ID NO: 2032225 - RNA, 23 nt, Human herpesvirus 5
acccucaaaacaucaccaccauc

SEQ ID NO: 2032226 - RNA, 20 nt, Human herpesvirus 5
gcggugcgcugcagccggag

SEQ ID NO: 2032227 - RNA, 17 nt, Human herpesvirus 5
ggcgguuucagcuggca

SEQ ID NO: 2032228 - RNA, 24 nt, Human herpesvirus 5
caacuaccgugccaccugcgagga

SEQ ID NO: 2032229 - RNA, 18 nt, Human herpesvirus 5
gugauuauaucuuucuac

SEQ ID NO: 2032230 - RNA, 13 nt, Human herpesvirus 5
cucacuguuugaa

SEQ ID NO: 2032231 - RNA, 19 nt, Human herpesvirus 5
cggucccccccguccaggu

SEQ ID NO: 2032232 - RNA, 16 nt, Human herpesvirus 5
aucgcaacaacagcaa

SEQ ID NO: 2032233 - RNA, 13 nt, Human herpesvirus 5
aacgcuggcucac

SEQ ID NO: 2032234 - RNA, 22 nt, Human herpesvirus 5
gccgagcuaugcgagcggggac

SEQ ID NO: 2032235 - RNA, 14 nt, Human herpesvirus 5
cccccguggccgcu

SEQ ID NO: 2032236 - RNA, 13 nt, Human herpesvirus 5
uaccaagaauaaa

SEQ ID NO: 2032237 - RNA, 13 nt, Human herpesvirus 5
uaacgauaugucg

SEQ ID NO: 2032238 - RNA, 15 nt, Human herpesvirus 5
ggguuggcagcuggc

SEQ ID NO: 2032239 - RNA, 18 nt, Human herpesvirus 5
guccgcggacacccgcgg

SEQ ID NO: 2032240 - RNA, 22 nt, Human herpesvirus 5
acaccaguauugguucugggcg

SEQ ID NO: 2032241 - RNA, 20 nt, Human herpesvirus 5
ugacacagcuccugaaugag

SEQ ID NO: 2032242 - RNA, 17 nt, Human herpesvirus 5
cgccaacgcgagcuggc

SEQ ID NO: 2032243 - RNA, 21 nt, Human herpesvirus 5
gcuggacugacacagcuccug

SEQ ID NO: 2032244 - RNA, 21 nt, Human herpesvirus 5
cuuccuagcgacggcggccau

SEQ ID NO: 2032245 - RNA, 20 nt, Human herpesvirus 5
agcguauuuucuacuccgaa

SEQ ID NO: 2032246 - RNA, 12 nt, Human herpesvirus 5
aguagugguggg

SEQ ID NO: 2032247 - RNA, 14 nt, Human herpesvirus 5
uccccugccaccuc

SEQ ID NO: 2032248 - RNA, 17 nt, Human herpesvirus 5
cggcagcaugggcgaca

SEQ ID NO: 2032249 - RNA, 15 nt, Human herpesvirus 5
uuauaaggaggcaaa

SEQ ID NO: 2032250 - RNA, 21 nt, Human herpesvirus 5
agcauguuuuaggaaugacac

SEQ ID NO: 2032251 - RNA, 16 nt, Human herpesvirus 5
cugcagccggaggaag

SEQ ID NO: 2032252 - RNA, 14 nt, Human herpesvirus 5
ccuggucuggccca

SEQ ID NO: 2032253 - RNA, 23 nt, Human herpesvirus 5
ggccgccugaggaaggggaggag

SEQ ID NO: 2032254 - RNA, 16 nt, Human herpesvirus 5
cguaacgguggaauaa

SEQ ID NO: 2032255 - RNA, 16 nt, Human herpesvirus 5
uguaggcgacuggcua

SEQ ID NO: 2032256 - RNA, 20 nt, Human herpesvirus 5
gcguagucuggcagcguuau

SEQ ID NO: 2032257 - RNA, 15 nt, Human herpesvirus 5
agcuggugcaucacg

SEQ ID NO: 2032258 - RNA, 17 nt, Human herpesvirus 5
uaccaauacugcaucca

SEQ ID NO: 2032259 - RNA, 15 nt, Human herpesvirus 5
gcaucgucaaagccg

SEQ ID NO: 2032260 - RNA, 11 nt, Human herpesvirus 5
ccccgcugucg

SEQ ID NO: 2032261 - RNA, 17 nt, Human herpesvirus 5
uuuggaggauguucugc

SEQ ID NO: 2032262 - RNA, 12 nt, Human herpesvirus 5
gcaucacccgcc

SEQ ID NO: 2032263 - RNA, 20 nt, Human herpesvirus 5
gccggagcuacgcgaccagc

SEQ ID NO: 2032264 - RNA, 19 nt, Human herpesvirus 5
agugcgucuacgaccaaag

SEQ ID NO: 2032265 - RNA, 13 nt, Human herpesvirus 5
cgacucgcugccg

SEQ ID NO: 2032266 - RNA, 13 nt, Human herpesvirus 5
cggccgugcagca

SEQ ID NO: 2032267 - RNA, 13 nt, Human herpesvirus 5
ggcgacagacggc

SEQ ID NO: 2032268 - RNA, 23 nt, Human herpesvirus 5
gaaaccacgccggcgguuacaga

SEQ ID NO: 2032269 - RNA, 12 nt, Human herpesvirus 5
gguacugcugug

SEQ ID NO: 2032270 - RNA, 17 nt, Human herpesvirus 5
cagcccauccucgugga

SEQ ID NO: 2032271 - RNA, 12 nt, Human herpesvirus 5
gacauuccccac

SEQ ID NO: 2032272 - RNA, 16 nt, Human herpesvirus 5
gcugcauaaagggcga

SEQ ID NO: 2032273 - RNA, 19 nt, Human herpesvirus 5
uaaagucuggguuuccaga

SEQ ID NO: 2032274 - RNA, 21 nt, Human herpesvirus 5
gucagcgaacgacgcagugcg

SEQ ID NO: 2032275 - RNA, 20 nt, Human herpesvirus 5
cccuggaagcgugugugggc

SEQ ID NO: 2032276 - RNA, 13 nt, Human herpesvirus 5
gacgucaaagcuc

SEQ ID NO: 2032277 - RNA, 18 nt, Human herpesvirus 5
uacaaucauaauauucua

SEQ ID NO: 2032278 - RNA, 20 nt, Human herpesvirus 5
aacagccccgaagguuagcg

SEQ ID NO: 2032279 - RNA, 23 nt, Human herpesvirus 5
aacaaccuaugauauaaagcggu

SEQ ID NO: 2032280 - RNA, 18 nt, Human herpesvirus 5
aacaacgucacuucugcu

SEQ ID NO: 2032281 - RNA, 13 nt, Human herpesvirus 5
aacacgcaacacg

SEQ ID NO: 2032282 - RNA, 21 nt, Human herpesvirus 5
aacacguaacgucuucugaag

SEQ ID NO: 2032283 - RNA, 16 nt, Human herpesvirus 5
aacacuccucuccccg

SEQ ID NO: 2032284 - RNA, 14 nt, Human herpesvirus 5
aacacuggcugcgc

SEQ ID NO: 2032285 - RNA, 12 nt, Human herpesvirus 5
aacaccgcgagu

SEQ ID NO: 2032286 - RNA, 21 nt, Human herpesvirus 5
aacaccguguucucccgacgu

SEQ ID NO: 2032287 - RNA, 20 nt, Human herpesvirus 5
aaaccgcaggcccucggaag

SEQ ID NO: 2032288 - RNA, 23 nt, Human herpesvirus 5
aaaacaugcgguguuuccgaugg

SEQ ID NO: 2032289 - RNA, 23 nt, Human herpesvirus 5
aaaauuucguaaacgacgucguc

SEQ ID NO: 2032290 - RNA, 21 nt, Human herpesvirus 5
aaacccacgaccauuuccgug

SEQ ID NO: 2032291 - RNA, 20 nt, Human herpesvirus 5
aaacuagcauucuggugaga

SEQ ID NO: 2032292 - RNA, 18 nt, Human herpesvirus 5
aaagggcgaacguccucg

SEQ ID NO: 2032293 - RNA, 22 nt, Human herpesvirus 5
aacagacuugguacgcugacgu

SEQ ID NO: 2032294 - RNA, 14 nt, Human herpesvirus 5
cgcuggcucggcgc

SEQ ID NO: 2032295 - RNA, 18 nt, Human herpesvirus 5
cgcuggcucggcgcggcu

SEQ ID NO: 2032296 - RNA, 13 nt, Human herpesvirus 5
cgcugcugcucuc

SEQ ID NO: 2032297 - RNA, 20 nt, Human herpesvirus 5
cgcugcuucauccagcuccg

SEQ ID NO: 2032298 - RNA, 14 nt, Human herpesvirus 5
cgcccgagacggcg

SEQ ID NO: 2032299 - RNA, 15 nt, Human herpesvirus 5
cgcccgagacggcgg

SEQ ID NO: 2032300 - RNA, 16 nt, Human herpesvirus 5
cgcccgagacggcggc

SEQ ID NO: 2032301 - RNA, 15 nt, Human herpesvirus 5
cgcccgacugcggac

SEQ ID NO: 2032302 - RNA, 21 nt, Human herpesvirus 5
cgccgaacagacuugguacgc

SEQ ID NO: 2032303 - RNA, 15 nt, Human herpesvirus 5
cgcccucgacggcgg

SEQ ID NO: 2032304 - RNA, 16 nt, Human herpesvirus 5
cgcccucgacggcggu

SEQ ID NO: 2032305 - RNA, 24 nt, Human herpesvirus 5
cgcguguuuugucugagcgccgac

SEQ ID NO: 2032306 - RNA, 14 nt, Human herpesvirus 5
cgcccgggccgccu

SEQ ID NO: 2032307 - RNA, 18 nt, Human herpesvirus 5
cgcguuuaccgaggagau

SEQ ID NO: 2032308 - RNA, 18 nt, Human herpesvirus 5
cgcuaagagcuuugacgc

SEQ ID NO: 2032309 - RNA, 16 nt, Human herpesvirus 5
cgcuaggcggcgccgg

SEQ ID NO: 2032310 - RNA, 19 nt, Human herpesvirus 5
cgcguuuguugcgcggcga

SEQ ID NO: 2032311 - RNA, 16 nt, Human herpesvirus 5
cgcucagcgagcucgu

SEQ ID NO: 2032312 - RNA, 13 nt, Human herpesvirus 5
cgcuauggcggcc

SEQ ID NO: 2032313 - RNA, 15 nt, Human herpesvirus 5
cgcuauggcggccau

SEQ ID NO: 2032314 - RNA, 24 nt, Human herpesvirus 5
cgcuccuggaucuuggcggccgag

SEQ ID NO: 2032315 - RNA, 19 nt, Human herpesvirus 5
cgcuacgucggccaacaac

SEQ ID NO: 2032316 - RNA, 16 nt, Human herpesvirus 5
cgcucccugcuccgca

SEQ ID NO: 2032317 - RNA, 17 nt, Human herpesvirus 5
cccggcacccgagcacg

SEQ ID NO: 2032318 - RNA, 20 nt, Human herpesvirus 5
cccgcuucaacgccugcacc

SEQ ID NO: 2032319 - RNA, 13 nt, Human herpesvirus 5
ccgacgacgacga

SEQ ID NO: 2032320 - RNA, 13 nt, Human herpesvirus 5
ccgaccacgacac

SEQ ID NO: 2032321 - RNA, 17 nt, Human herpesvirus 5
ccgacgcgcgaccgcga

SEQ ID NO: 2032322 - RNA, 16 nt, Human herpesvirus 5
ccgacgcggcagcggc

SEQ ID NO: 2032323 - RNA, 20 nt, Human herpesvirus 5
ccgacgcuggcgcugcggcu

SEQ ID NO: 2032324 - RNA, 20 nt, Human herpesvirus 5
ccgacggccaaucgcguggc

SEQ ID NO: 2032325 - RNA, 16 nt, Human herpesvirus 5
ccgacgucgcgucggc

SEQ ID NO: 2032326 - RNA, 15 nt, Human herpesvirus 5
ccgagacggaggaau

SEQ ID NO: 2032327 - RNA, 14 nt, Human herpesvirus 5
ccgagcacguacac

SEQ ID NO: 2032328 - RNA, 19 nt, Human herpesvirus 5
ccgagcaggugcgcguggu

SEQ ID NO: 2032329 - RNA, 14 nt, Human herpesvirus 5
ccgagcccaacuuu

SEQ ID NO: 2032330 - RNA, 19 nt, Human herpesvirus 5
ccgagcccccgucgcccga

SEQ ID NO: 2032331 - RNA, 14 nt, Human herpesvirus 5
ccgaguaacgcgcc

SEQ ID NO: 2032332 - RNA, 16 nt, Human herpesvirus 5
ccgagucggacgacga

SEQ ID NO: 2032333 - RNA, 19 nt, Human herpesvirus 5
cgagcauggaucacgcgcu

SEQ ID NO: 2032334 - RNA, 15 nt, Human herpesvirus 5
cgagcccccgucgcc

SEQ ID NO: 2032335 - RNA, 22 nt, Human herpesvirus 5
cgauguuucggaguaccgagua

SEQ ID NO: 2032336 - RNA, 15 nt, Human herpesvirus 5
cgcaagacgcgccuc

SEQ ID NO: 2032337 - RNA, 14 nt, Human herpesvirus 5
cgcacccgacggcg

SEQ ID NO: 2032338 - RNA, 15 nt, Human herpesvirus 5
cgcaaaggccacgug

SEQ ID NO: 2032339 - RNA, 23 nt, Human herpesvirus 5
cgcaaugggcuucccuccugcag

SEQ ID NO: 2032340 - RNA, 20 nt, Human herpesvirus 5
cgcacaacugguuccugcag

SEQ ID NO: 2032341 - RNA, 14 nt, Human herpesvirus 5
cgcagucgcucauc

SEQ ID NO: 2032342 - RNA, 16 nt, Human herpesvirus 5
cgccaacgccgagcuc

SEQ ID NO: 2032343 - RNA, 15 nt, Human herpesvirus 5
cgcaugggaaaguac

SEQ ID NO: 2032344 - RNA, 15 nt, Human herpesvirus 5
cgccacaacgccguc

SEQ ID NO: 2032345 - RNA, 19 nt, Human herpesvirus 5
cgccaacuaccgugccacc

SEQ ID NO: 2032346 - RNA, 14 nt, Human herpesvirus 5
cgcagccuccucgc

SEQ ID NO: 2032347 - RNA, 17 nt, Human herpesvirus 5
cgcagcccggcuccgcg

SEQ ID NO: 2032348 - RNA, 22 nt, Human herpesvirus 5
augcguguucaguugggcggca

SEQ ID NO: 2032349 - RNA, 17 nt, Human herpesvirus 5
augcggucggucagccg

SEQ ID NO: 2032350 - RNA, 16 nt, Human herpesvirus 5
auggcuaacgucucgg

SEQ ID NO: 2032351 - RNA, 21 nt, Human herpesvirus 5
auggauugggcggacgugcgu

SEQ ID NO: 2032352 - RNA, 13 nt, Human herpesvirus 5
auggccaacagcc

SEQ ID NO: 2032353 - RNA, 13 nt, Human herpesvirus 5
auguaaggcggcg

SEQ ID NO: 2032354 - RNA, 23 nt, Human herpesvirus 5
caaacgccgcgacaacggccgcc

SEQ ID NO: 2032355 - RNA, 20 nt, Human herpesvirus 5
caaacgcgggcccggacgcg

SEQ ID NO: 2032356 - RNA, 14 nt, Human herpesvirus 5
caaacgcugcuugg

SEQ ID NO: 2032357 - RNA, 16 nt, Human herpesvirus 5
caaacacagacaggcg

SEQ ID NO: 2032358 - RNA, 17 nt, Human herpesvirus 5
caaacacagacaggcgg

SEQ ID NO: 2032359 - RNA, 22 nt, Human herpesvirus 5
caaaagacguuaucgaugcugc

SEQ ID NO: 2032360 - RNA, 14 nt, Human herpesvirus 5
caacaaaaaaaagg

SEQ ID NO: 2032361 - RNA, 19 nt, Human herpesvirus 5
caacaaaaaaaaggaggac

SEQ ID NO: 2032362 - RNA, 14 nt, Human herpesvirus 5
caaagaacgaaaac

SEQ ID NO: 2032363 - RNA, 20 nt, Human herpesvirus 5
caaagacgaugauaccgaag

SEQ ID NO: 2032364 - RNA, 22 nt, Human herpesvirus 5
caaaggacucgcucacgucguu

SEQ ID NO: 2032365 - RNA, 13 nt, Human herpesvirus 5
caagcuugguaca

SEQ ID NO: 2032366 - RNA, 16 nt, Human herpesvirus 5
caaggcuccgaaaccg

SEQ ID NO: 2032367 - RNA, 22 nt, Human herpesvirus 5
caaggugauuauuaaaccgccc

SEQ ID NO: 2032368 - RNA, 12 nt, Human herpesvirus 5
caagcggccgcc

SEQ ID NO: 2032369 - RNA, 21 nt, Human herpesvirus 5
caagcucguuucgccggcgcg

SEQ ID NO: 2032370 - RNA, 20 nt, Human herpesvirus 5
caagcgcccgaagccgcgcg

SEQ ID NO: 2032371 - RNA, 12 nt, Human herpesvirus 5
ccaagcacgcca

SEQ ID NO: 2032372 - RNA, 19 nt, Human herpesvirus 5
ccaaaccgcaggagcugcu

SEQ ID NO: 2032373 - RNA, 16 nt, Human herpesvirus 5
ccaaagccgccgccga

SEQ ID NO: 2032374 - RNA, 16 nt, Human herpesvirus 5
cauuggcaacaucacc

SEQ ID NO: 2032375 - RNA, 22 nt, Human herpesvirus 5
cagggaauuuugaaaaccgcgc

SEQ ID NO: 2032376 - RNA, 15 nt, Human herpesvirus 5
ccaaccgacguacga

SEQ ID NO: 2032377 - RNA, 13 nt, Human herpesvirus 5
ccaaccucgccgu

SEQ ID NO: 2032378 - RNA, 12 nt, Human herpesvirus 5
ccaacacguccc

SEQ ID NO: 2032379 - RNA, 15 nt, Human herpesvirus 5
cauguggcguacacg

SEQ ID NO: 2032380 - RNA, 17 nt, Human herpesvirus 5
cauguccggccgucgca

SEQ ID NO: 2032381 - RNA, 16 nt, Human herpesvirus 5
cagggcgcgccggcgc

SEQ ID NO: 2032382 - RNA, 17 nt, Human herpesvirus 5
caggggcuggacguggu

SEQ ID NO: 2032383 - RNA, 12 nt, Human herpesvirus 5
cagggcugcucc

SEQ ID NO: 2032384 - RNA, 17 nt, Human herpesvirus 5
cagggcugcuccaacuu

SEQ ID NO: 2032385 - RNA, 23 nt, Human herpesvirus 5
caggcgcaggaggcuaacgcgcu

SEQ ID NO: 2032386 - RNA, 15 nt, Human herpesvirus 5
caggccgacucgcgg

SEQ ID NO: 2032387 - RNA, 16 nt, Human herpesvirus 5
caggccagcugcgucg

SEQ ID NO: 2032388 - RNA, 16 nt, Human herpesvirus 5
caggcuguucacgcgg

SEQ ID NO: 2032389 - RNA, 17 nt, Human herpesvirus 5
ccccgauaugggccgcu

SEQ ID NO: 2032390 - RNA, 21 nt, Human herpesvirus 5
cccccgcugagcguuggcggc

SEQ ID NO: 2032391 - RNA, 14 nt, Human herpesvirus 5
ccccgauucccaca

SEQ ID NO: 2032392 - RNA, 19 nt, Human herpesvirus 5
cccgccguugcggccgccg

SEQ ID NO: 2032393 - RNA, 18 nt, Human herpesvirus 5
cccccgucgcccgaggcg

SEQ ID NO: 2032394 - RNA, 18 nt, Human herpesvirus 5
ccccgaauuugggcggug

SEQ ID NO: 2032395 - RNA, 16 nt, Human herpesvirus 5
ccccacccaguagaca

SEQ ID NO: 2032396 - RNA, 22 nt, Human herpesvirus 5
ccccaccuucccucuagagaca

SEQ ID NO: 2032397 - RNA, 21 nt, Human herpesvirus 5
cccaugacgcagucgcucauc

SEQ ID NO: 2032398 - RNA, 22 nt, Human herpesvirus 5
ccaggcugucaaucaugccggu

SEQ ID NO: 2032399 - RNA, 21 nt, Human herpesvirus 5
ccaggugucucuacgcuccua

SEQ ID NO: 2032400 - RNA, 12 nt, Human herpesvirus 5
ccaguugcuguu

SEQ ID NO: 2032401 - RNA, 20 nt, Human herpesvirus 5
ccaggauuucaccgccgcua

SEQ ID NO: 2032402 - RNA, 20 nt, Human herpesvirus 5
ucauaaauucugacacggcg

SEQ ID NO: 2032403 - RNA, 21 nt, Human herpesvirus 5
ucauacaaaccccguguccgc

SEQ ID NO: 2032404 - RNA, 19 nt, Human herpesvirus 5
ucaguguacacgcgcccag

SEQ ID NO: 2032405 - RNA, 15 nt, Human herpesvirus 5
uccaaccucgccguc

SEQ ID NO: 2032406 - RNA, 22 nt, Human herpesvirus 5
uccacugccaacccagcagccg

SEQ ID NO: 2032407 - RNA, 14 nt, Human herpesvirus 5
uccagcaccacguc

SEQ ID NO: 2032408 - RNA, 15 nt, Human herpesvirus 5
uccacgccaccgccg

SEQ ID NO: 2032409 - RNA, 15 nt, Human herpesvirus 5
ucgccugcgacggcg

SEQ ID NO: 2032410 - RNA, 21 nt, Human herpesvirus 5
uccacggccuccgacgagcgu

SEQ ID NO: 2032411 - RNA, 17 nt, Human herpesvirus 5
ucgcgccgugcgcgacg

SEQ ID NO: 2032412 - RNA, 12 nt, Human herpesvirus 5
ggcuggaggacu

SEQ ID NO: 2032413 - RNA, 17 nt, Human herpesvirus 5
gggcgcaucacccgccu

SEQ ID NO: 2032414 - RNA, 19 nt, Human herpesvirus 5
ggcguggaugagguacugc

SEQ ID NO: 2032415 - RNA, 16 nt, Human herpesvirus 5
ggcuccaugcugacgu

SEQ ID NO: 2032416 - RNA, 19 nt, Human herpesvirus 5
ggcugccuguuccugcugc

SEQ ID NO: 2032417 - RNA, 18 nt, Human herpesvirus 5
ggcugcgccuccucgucg

SEQ ID NO: 2032418 - RNA, 22 nt, Human herpesvirus 5
ggcugcgcgcucgucuccacgc

SEQ ID NO: 2032419 - RNA, 13 nt, Human herpesvirus 5
ggcugcugcacca

SEQ ID NO: 2032420 - RNA, 20 nt, Human herpesvirus 5
ggcucucggaucugcggcuc

SEQ ID NO: 2032421 - RNA, 15 nt, Human herpesvirus 5
ggcugaccgucgucc

SEQ ID NO: 2032422 - RNA, 21 nt, Human herpesvirus 5
ggccgccgccagcguccgcgc

SEQ ID NO: 2032423 - RNA, 11 nt, Human herpesvirus 5
ggccgccgccc

SEQ ID NO: 2032424 - RNA, 20 nt, Human herpesvirus 5
ggccgccggugcuucuucua

SEQ ID NO: 2032425 - RNA, 19 nt, Human herpesvirus 5
ggcgucuuccuccucgucg

SEQ ID NO: 2032426 - RNA, 21 nt, Human herpesvirus 5
ggcgugaccacgucaccgugc

SEQ ID NO: 2032427 - RNA, 22 nt, Human herpesvirus 5
ggcgguuucagcuggcaacgug

SEQ ID NO: 2032428 - RNA, 14 nt, Human herpesvirus 5
ggcgguggcugcgc

SEQ ID NO: 2032429 - RNA, 20 nt, Human herpesvirus 5
ggcgugcucaggccacccgc

SEQ ID NO: 2032430 - RNA, 17 nt, Human herpesvirus 5
gcgcgcgucuggacgcg

SEQ ID NO: 2032431 - RNA, 18 nt, Human herpesvirus 5
gcgcccgcgccucacgcu

SEQ ID NO: 2032432 - RNA, 19 nt, Human herpesvirus 5
gcgccccccaccuacgagc

SEQ ID NO: 2032433 - RNA, 19 nt, Human herpesvirus 5
gcgccaguacgauccuccg

SEQ ID NO: 2032434 - RNA, 23 nt, Human herpesvirus 5
gcgaggacaaggcuccgaaaccg

SEQ ID NO: 2032435 - RNA, 20 nt, Human herpesvirus 5
gcgcccgaagccgcgcgagc

SEQ ID NO: 2032436 - RNA, 13 nt, Human herpesvirus 5
gcgcccgcagaca

SEQ ID NO: 2032437 - RNA, 19 nt, Human herpesvirus 5
gcgcgcgguuucgccgccg

SEQ ID NO: 2032438 - RNA, 12 nt, Human herpesvirus 5
gcgcgcugcgug

SEQ ID NO: 2032439 - RNA, 24 nt, Human herpesvirus 5
ggcccgagcgguugccgugacgca

SEQ ID NO: 2032440 - RNA, 16 nt, Human herpesvirus 5
ggccgacggcagcgug

SEQ ID NO: 2032441 - RNA, 15 nt, Human herpesvirus 5
cuccgucacgccucu

SEQ ID NO: 2032442 - RNA, 14 nt, Human herpesvirus 5
cuccgucugcguca

SEQ ID NO: 2032443 - RNA, 14 nt, Human herpesvirus 5
cuccucguccucgu

SEQ ID NO: 2032444 - RNA, 14 nt, Human herpesvirus 5
cuccucgucgucgc

SEQ ID NO: 2032445 - RNA, 19 nt, Human herpesvirus 5
cuccucuuccaaaucuccg

SEQ ID NO: 2032446 - RNA, 22 nt, Human herpesvirus 5
cuccgcaguuacaccacacguc

SEQ ID NO: 2032447 - RNA, 22 nt, Human herpesvirus 5
cuccgcaagcgccgccaacgcg

SEQ ID NO: 2032448 - RNA, 22 nt, Human herpesvirus 5
cuccgaaggcggacggaggagu

SEQ ID NO: 2032449 - RNA, 17 nt, Human herpesvirus 5
cuccgacauucgcgucg

SEQ ID NO: 2032450 - RNA, 16 nt, Human herpesvirus 5
cuccgacuuccuccuc

SEQ ID NO: 2032451 - RNA, 16 nt, Human herpesvirus 5
cucgaccaggaggugu

SEQ ID NO: 2032452 - RNA, 15 nt, Human herpesvirus 5
cuccuccaccacggc

SEQ ID NO: 2032453 - RNA, 16 nt, Human herpesvirus 5
gcgcaagugccugcac

SEQ ID NO: 2032454 - RNA, 19 nt, Human herpesvirus 5
gcgauggcccgcuaucgca

SEQ ID NO: 2032455 - RNA, 16 nt, Human herpesvirus 5
gcgaguaucgggccgu

SEQ ID NO: 2032456 - RNA, 18 nt, Human herpesvirus 5
gcgagcggaacccgggcu

SEQ ID NO: 2032457 - RNA, 22 nt, Human herpesvirus 5
gcgagcgggguucaccugcagc

SEQ ID NO: 2032458 - RNA, 13 nt, Human herpesvirus 5
acgccacgucgga

SEQ ID NO: 2032459 - RNA, 16 nt, Human herpesvirus 5
acgccaugcucaagac

SEQ ID NO: 2032460 - RNA, 19 nt, Human herpesvirus 5
acgccaaguaccuaugcgc

SEQ ID NO: 2032461 - RNA, 23 nt, Human herpesvirus 5
acgccaaguaccuaugcgccgua

SEQ ID NO: 2032462 - RNA, 15 nt, Human herpesvirus 5
acgccgugggcggcg

SEQ ID NO: 2032463 - RNA, 16 nt, Human herpesvirus 5
acgccgugggcggcga

SEQ ID NO: 2032464 - RNA, 17 nt, Human herpesvirus 5
acgccgcgcgaacgacg

SEQ ID NO: 2032465 - RNA, 23 nt, Human herpesvirus 5
acgccggcggagacgacggcggu

SEQ ID NO: 2032466 - RNA, 13 nt, Human herpesvirus 5
acgccugggcgcg

SEQ ID NO: 2032467 - RNA, 18 nt, Human herpesvirus 5
acgccgaucauguccgag

SEQ ID NO: 2032468 - RNA, 15 nt, Human herpesvirus 5
acgcgacuggcgucg

SEQ ID NO: 2032469 - RNA, 14 nt, Human herpesvirus 5
acgcgccucauggc

SEQ ID NO: 2032470 - RNA, 18 nt, Human herpesvirus 5
acgcgccucauggcggcg

SEQ ID NO: 2032471 - RNA, 22 nt, Human herpesvirus 5
acgcgauuggccagcacgggga

SEQ ID NO: 2032472 - RNA, 21 nt, Human herpesvirus 5
acgcgcaagugccugcacgac

SEQ ID NO: 2032473 - RNA, 18 nt, Human herpesvirus 5
acgcggugaacgugcgcg

SEQ ID NO: 2032474 - RNA, 21 nt, Human herpesvirus 5
acgcgucagggcggugcggcg

SEQ ID NO: 2032475 - RNA, 23 nt, Human herpesvirus 5
acgcgucagggcggugcggcguu

SEQ ID NO: 2032476 - RNA, 15 nt, Human herpesvirus 5
acgcgcggcggcgga

SEQ ID NO: 2032477 - RNA, 22 nt, Human herpesvirus 5
acgcgcggcuagagcgcgaguu

SEQ ID NO: 2032478 - RNA, 23 nt, Human herpesvirus 5
acgcggaccgaucaccagaaggc

SEQ ID NO: 2032479 - RNA, 22 nt, Human herpesvirus 5
acgcgcgcacggcgcggucccg

SEQ ID NO: 2032480 - RNA, 17 nt, Human herpesvirus 5
acgcgcgcccgcgccuc

SEQ ID NO: 2032481 - RNA, 22 nt, Human herpesvirus 5
acgcgcgccugacccgcggcua

SEQ ID NO: 2032482 - RNA, 21 nt, Human herpesvirus 5
acguacaagaaccacguuguc

SEQ ID NO: 2032483 - RNA, 18 nt, Human herpesvirus 5
acguacgacugcgcggcc

SEQ ID NO: 2032484 - RNA, 22 nt, Human herpesvirus 5
acguacuguuuaaccacguugc

SEQ ID NO: 2032485 - RNA, 22 nt, Human herpesvirus 5
acguagaaaaguaacacacggc

SEQ ID NO: 2032486 - RNA, 21 nt, Human herpesvirus 5
acgucagguucacacgucguu

SEQ ID NO: 2032487 - RNA, 18 nt, Human herpesvirus 5
acgucaguuuaucgagcg

SEQ ID NO: 2032488 - RNA, 20 nt, Human herpesvirus 5
acguaguuccccuacgugac

SEQ ID NO: 2032489 - RNA, 20 nt, Human herpesvirus 5
acggugaugcguguggccgc

SEQ ID NO: 2032490 - RNA, 13 nt, Human herpesvirus 5
acggugcgcggcg

SEQ ID NO: 2032491 - RNA, 14 nt, Human herpesvirus 5
acggugcgcggcga

SEQ ID NO: 2032492 - RNA, 21 nt, Human herpesvirus 5
acggugcgcggcgacaagcug

SEQ ID NO: 2032493 - RNA, 14 nt, Human herpesvirus 5
acgguccgggcaca

SEQ ID NO: 2032494 - RNA, 23 nt, Human herpesvirus 5
acgguccguuauguccgcucgug

SEQ ID NO: 2032495 - RNA, 12 nt, Human herpesvirus 5
acgguggcggcg

SEQ ID NO: 2032496 - RNA, 20 nt, Human herpesvirus 5
acggugucgccaccguugac

SEQ ID NO: 2032497 - RNA, 16 nt, Human herpesvirus 5
acgguuuccacgccac

SEQ ID NO: 2032498 - RNA, 22 nt, Human herpesvirus 5
acgguacgcagucacugcgugu

SEQ ID NO: 2032499 - RNA, 14 nt, Human herpesvirus 5
acgggacggcggcg

SEQ ID NO: 2032500 - RNA, 22 nt, Human herpesvirus 5
acgggucucuuugacacgagcg

SEQ ID NO: 2032501 - RNA, 19 nt, Human herpesvirus 5
acgggggggaccgggggcg

SEQ ID NO: 2032502 - RNA, 21 nt, Human herpesvirus 5
acggccguuaucaaggccacu

SEQ ID NO: 2032503 - RNA, 17 nt, Human herpesvirus 5
acggcggaggagacggc

SEQ ID NO: 2032504 - RNA, 19 nt, Human herpesvirus 5
acggauugcgccaguuguc

SEQ ID NO: 2032505 - RNA, 15 nt, Human herpesvirus 5
acggccgccgacguc

SEQ ID NO: 2032506 - RNA, 19 nt, Human herpesvirus 5
acggcccccuaccugcgcg

SEQ ID NO: 2032507 - RNA, 14 nt, Human herpesvirus 5
acggcaacgagcag

SEQ ID NO: 2032508 - RNA, 15 nt, Human herpesvirus 5
acggagcacgggcug

SEQ ID NO: 2032509 - RNA, 13 nt, Human herpesvirus 5
acggagccguuac

SEQ ID NO: 2032510 - RNA, 22 nt, Human herpesvirus 5
acggagcucccacguuuacgcg

SEQ ID NO: 2032511 - RNA, 13 nt, Human herpesvirus 5
acggcgaaccgcc

SEQ ID NO: 2032512 - RNA, 15 nt, Human herpesvirus 5
acgcugcacgaccug

SEQ ID NO: 2032513 - RNA, 17 nt, Human herpesvirus 5
acgcguggcccuggucu

SEQ ID NO: 2032514 - RNA, 13 nt, Human herpesvirus 5
acgcggcagcggc

SEQ ID NO: 2032515 - RNA, 19 nt, Human herpesvirus 5
acgcggcguauccucaagu

SEQ ID NO: 2032516 - RNA, 18 nt, Human herpesvirus 5
acgcuguuagugguggcg

SEQ ID NO: 2032517 - RNA, 20 nt, Human herpesvirus 5
acgcuucauauuaguauacu

SEQ ID NO: 2032518 - RNA, 14 nt, Human herpesvirus 5
acgcuuccugcgcg

SEQ ID NO: 2032519 - RNA, 13 nt, Human herpesvirus 5
acgcuggaggacg

SEQ ID NO: 2032520 - RNA, 15 nt, Human herpesvirus 5
acggacggcaaggcg

SEQ ID NO: 2032521 - RNA, 17 nt, Human herpesvirus 5
acggacggcaaggcgga

SEQ ID NO: 2032522 - RNA, 23 nt, Human herpesvirus 5
agaccucauguacgccaccgauc

SEQ ID NO: 2032523 - RNA, 19 nt, Human herpesvirus 5
agacaucuuaugaagcuga

SEQ ID NO: 2032524 - RNA, 21 nt, Human herpesvirus 5
agacgaugauaccgaaggcga

SEQ ID NO: 2032525 - RNA, 12 nt, Human herpesvirus 5
agacgcugcgcu

SEQ ID NO: 2032526 - RNA, 21 nt, Human herpesvirus 5
agacggcgugacacagcacgc

SEQ ID NO: 2032527 - RNA, 15 nt, Human herpesvirus 5
agacugguggugaga

SEQ ID NO: 2032528 - RNA, 14 nt, Human herpesvirus 5
agacugugguggga

SEQ ID NO: 2032529 - RNA, 20 nt, Human herpesvirus 5
agagacguugauaauaaccg

SEQ ID NO: 2032530 - RNA, 16 nt, Human herpesvirus 5
caccgacccugcgucc

SEQ ID NO: 2032531 - RNA, 15 nt, Human herpesvirus 5
caccgacgacgacga

SEQ ID NO: 2032532 - RNA, 23 nt, Human herpesvirus 5
caccgacacagcagcaccaggcg

SEQ ID NO: 2032533 - RNA, 18 nt, Human herpesvirus 5
agagaaggguaggugcgc

SEQ ID NO: 2032534 - RNA, 12 nt, Human herpesvirus 5
acguguggcggg

SEQ ID NO: 2032535 - RNA, 22 nt, Human herpesvirus 5
acguguuucgcgaacuggcgcg

SEQ ID NO: 2032536 - RNA, 21 nt, Human herpesvirus 5
acgucggccaacaaccacggc

SEQ ID NO: 2032537 - RNA, 16 nt, Human herpesvirus 5
acgucguugaagacac

SEQ ID NO: 2032538 - RNA, 14 nt, Human herpesvirus 5
acgucuaugagaaa

SEQ ID NO: 2032539 - RNA, 18 nt, Human herpesvirus 5
acguggacguuacacggg

SEQ ID NO: 2032540 - RNA, 17 nt, Human herpesvirus 5
acguggguuucggugac

SEQ ID NO: 2032541 - RNA, 20 nt, Human herpesvirus 5
acgugguaacgauggcggcc

SEQ ID NO: 2032542 - RNA, 15 nt, Human herpesvirus 5
acguguccgcggaca

SEQ ID NO: 2032543 - RNA, 15 nt, Human herpesvirus 5
agaauggaccgucga

SEQ ID NO: 2032544 - RNA, 12 nt, Human herpesvirus 5
agaauguugcga

SEQ ID NO: 2032545 - RNA, 13 nt, Human herpesvirus 5
acggugacgagcg

SEQ ID NO: 2032546 - RNA, 16 nt, Human herpesvirus 5
acguaggccuccucuc

SEQ ID NO: 2032547 - RNA, 22 nt, Human herpesvirus 5
acgucgcagccaccggcgcagu

SEQ ID NO: 2032548 - RNA, 16 nt, Human herpesvirus 5
acgucucggacggacg

SEQ ID NO: 2032549 - RNA, 23 nt, Human herpesvirus 5
acgugcaggauguuacgcgaguc

SEQ ID NO: 2032550 - RNA, 23 nt, Human herpesvirus 5
caccugccucgacaucucgccgu

SEQ ID NO: 2032551 - RNA, 15 nt, Human herpesvirus 5
caccgaaagcgcgcu

SEQ ID NO: 2032552 - RNA, 21 nt, Human herpesvirus 5
cacgacggaguuugacuacga

SEQ ID NO: 2032553 - RNA, 12 nt, Human herpesvirus 5
cacgacggcucc

SEQ ID NO: 2032554 - RNA, 23 nt, Human herpesvirus 5
caccgcgaguaucgggccgucgc

SEQ ID NO: 2032555 - RNA, 19 nt, Human herpesvirus 5
caccgggacggccugggcg

SEQ ID NO: 2032556 - RNA, 20 nt, Human herpesvirus 5
caccgcuuuggucguagacg

SEQ ID NO: 2032557 - RNA, 22 nt, Human herpesvirus 5
caccggccuccgacgacgccga

SEQ ID NO: 2032558 - RNA, 14 nt, Human herpesvirus 5
caccgccuccgacg

SEQ ID NO: 2032559 - RNA, 18 nt, Human herpesvirus 5
caccgugccccacucgcu

SEQ ID NO: 2032560 - RNA, 23 nt, Human herpesvirus 5
caccgucgcguccgacgcgacgg

SEQ ID NO: 2032561 - RNA, 22 nt, Human herpesvirus 5
caccgucggcggggcggacugc

SEQ ID NO: 2032562 - RNA, 14 nt, Human herpesvirus 5
caccgugacaccgg

SEQ ID NO: 2032563 - RNA, 14 nt, Human herpesvirus 5
cacgaccgcgacga

SEQ ID NO: 2032564 - RNA, 17 nt, Human herpesvirus 5
cacgaccaagugucucu

SEQ ID NO: 2032565 - RNA, 14 nt, Human herpesvirus 5
cacgacgaccccgc

SEQ ID NO: 2032566 - RNA, 19 nt, Human herpesvirus 5
cacgaucgcuggugucucu

SEQ ID NO: 2032567 - RNA, 15 nt, Human herpesvirus 5
cacgcacgacaugac

SEQ ID NO: 2032568 - RNA, 23 nt, Human herpesvirus 5
cacgccccugaguucacgcgcgg

SEQ ID NO: 2032569 - RNA, 14 nt, Human herpesvirus 5
cacgccagacuugg

SEQ ID NO: 2032570 - RNA, 19 nt, Human herpesvirus 5
cacucacgcggccgucacg

SEQ ID NO: 2032571 - RNA, 23 nt, Human herpesvirus 5
cacuccacacgccauaacaaacc

SEQ ID NO: 2032572 - RNA, 17 nt, Human herpesvirus 5
cacugcuacccugcgcu

SEQ ID NO: 2032573 - RNA, 17 nt, Human herpesvirus 5
cacgccgaugcuccgcg

SEQ ID NO: 2032574 - RNA, 13 nt, Human herpesvirus 5
cacucgcaccggc

SEQ ID NO: 2032575 - RNA, 15 nt, Human herpesvirus 5
ccuaagacgucgcga

SEQ ID NO: 2032576 - RNA, 19 nt, Human herpesvirus 5
ccguguuuuugcucgagac

SEQ ID NO: 2032577 - RNA, 15 nt, Human herpesvirus 5
ccgcgucagcggccg

SEQ ID NO: 2032578 - RNA, 20 nt, Human herpesvirus 5
ccguggaucagccgccgccu

SEQ ID NO: 2032579 - RNA, 18 nt, Human herpesvirus 5
ccguguaaaaggcguccu

SEQ ID NO: 2032580 - RNA, 16 nt, Human herpesvirus 5
ccgugggucccggcgc

SEQ ID NO: 2032581 - RNA, 20 nt, Human herpesvirus 5
ccgcuuaacaacguguccag

SEQ ID NO: 2032582 - RNA, 21 nt, Human herpesvirus 5
ccguggagaugcaggaggugg

SEQ ID NO: 2032583 - RNA, 23 nt, Human herpesvirus 5
ccgcugauacuaucgggggagau

SEQ ID NO: 2032584 - RNA, 16 nt, Human herpesvirus 5
ccgcguagcgcuccug

SEQ ID NO: 2032585 - RNA, 14 nt, Human herpesvirus 5
ccuaugcgccguag

SEQ ID NO: 2032586 - RNA, 14 nt, Human herpesvirus 5
ccuauggcgccgug

SEQ ID NO: 2032587 - RNA, 16 nt, Human herpesvirus 5
ccuauccgcgcggcua

SEQ ID NO: 2032588 - RNA, 20 nt, Human herpesvirus 5
ccguuguguaugcaugucgc

SEQ ID NO: 2032589 - RNA, 23 nt, Human herpesvirus 5
ccuaucuccgacagcgcgacgag

SEQ ID NO: 2032590 - RNA, 16 nt, Human herpesvirus 5
ccucagcgugcucagc

SEQ ID NO: 2032591 - RNA, 19 nt, Human herpesvirus 5
ccucauguguauggcccug

SEQ ID NO: 2032592 - RNA, 13 nt, Human herpesvirus 5
cgcgagcggcgga

SEQ ID NO: 2032593 - RNA, 14 nt, Human herpesvirus 5
cgcgagcggcggac

SEQ ID NO: 2032594 - RNA, 18 nt, Human herpesvirus 5
cgcgagcuggccagcaaa

SEQ ID NO: 2032595 - RNA, 20 nt, Human herpesvirus 5
cgcgaggucugggaugugca

SEQ ID NO: 2032596 - RNA, 17 nt, Human herpesvirus 5
cgcgaggugucauguuc

SEQ ID NO: 2032597 - RNA, 17 nt, Human herpesvirus 5
cguguuuagucgcggcg

SEQ ID NO: 2032598 - RNA, 20 nt, Human herpesvirus 5
cguuaacuauuccacuagua

SEQ ID NO: 2032599 - RNA, 15 nt, Human herpesvirus 5
cguuacgccgacgug

SEQ ID NO: 2032600 - RNA, 19 nt, Human herpesvirus 5
cgcgcaagugccugcacga

SEQ ID NO: 2032601 - RNA, 15 nt, Human herpesvirus 5
cgcgcgcgaaggugu

SEQ ID NO: 2032602 - RNA, 22 nt, Human herpesvirus 5
cguucuccucgacgcgcggcgg

SEQ ID NO: 2032603 - RNA, 15 nt, Human herpesvirus 5
cguucgcaugucguc

SEQ ID NO: 2032604 - RNA, 18 nt, Human herpesvirus 5
cguucgcgugcacgcgcc

SEQ ID NO: 2032605 - RNA, 16 nt, Human herpesvirus 5
cguugcuuuggcggca

SEQ ID NO: 2032606 - RNA, 20 nt, Human herpesvirus 5
cguuguuucuguacggcguu

SEQ ID NO: 2032607 - RNA, 19 nt, Human herpesvirus 5
cguuccguggagucgucuc

SEQ ID NO: 2032608 - RNA, 19 nt, Human herpesvirus 5
cgcgagccccaucgggccc

SEQ ID NO: 2032609 - RNA, 21 nt, Human herpesvirus 5
cgcgcggucauauagccuccg

SEQ ID NO: 2032610 - RNA, 23 nt, Human herpesvirus 5
cguucacuuuuccguuuuacgug

SEQ ID NO: 2032611 - RNA, 13 nt, Human herpesvirus 5
cuacacuauguuc

SEQ ID NO: 2032612 - RNA, 19 nt, Human herpesvirus 5
cuaccaacgcuuccugcgc

SEQ ID NO: 2032613 - RNA, 21 nt, Human herpesvirus 5
ccgccacgacaaacacuaccg

SEQ ID NO: 2032614 - RNA, 18 nt, Human herpesvirus 5
ccgcggugcaggccgcgc

SEQ ID NO: 2032615 - RNA, 18 nt, Human herpesvirus 5
ccgcagcgaguugcugug

SEQ ID NO: 2032616 - RNA, 21 nt, Human herpesvirus 5
ccgcagcgaguugcugugcac

SEQ ID NO: 2032617 - RNA, 17 nt, Human herpesvirus 5
ccgcaacaacagcagca

SEQ ID NO: 2032618 - RNA, 13 nt, Human herpesvirus 5
ccgcagcgguggc

SEQ ID NO: 2032619 - RNA, 18 nt, Human herpesvirus 5
ccgcagcguggccggcgu

SEQ ID NO: 2032620 - RNA, 18 nt, Human herpesvirus 5
ccgcagcugcuggagcgc

SEQ ID NO: 2032621 - RNA, 15 nt, Human herpesvirus 5
ccgcaagcgccgcca

SEQ ID NO: 2032622 - RNA, 20 nt, Human herpesvirus 5
ccgcacgaccgcgacgaggu

SEQ ID NO: 2032623 - RNA, 18 nt, Human herpesvirus 5
ccgauccgcacgaccgcg

SEQ ID NO: 2032624 - RNA, 14 nt, Human herpesvirus 5
ccgaugcuccgcga

SEQ ID NO: 2032625 - RNA, 15 nt, Human herpesvirus 5
cagccgacacagcgg

SEQ ID NO: 2032626 - RNA, 13 nt, Human herpesvirus 5
cagcauacgggga

SEQ ID NO: 2032627 - RNA, 17 nt, Human herpesvirus 5
cagcauacggggaggag

SEQ ID NO: 2032628 - RNA, 19 nt, Human herpesvirus 5
cagcauacggggaggagac

SEQ ID NO: 2032629 - RNA, 21 nt, Human herpesvirus 5
cagcagggagccagauggcga

SEQ ID NO: 2032630 - RNA, 18 nt, Human herpesvirus 5
cagccaccgacacagcag

SEQ ID NO: 2032631 - RNA, 21 nt, Human herpesvirus 5
cagaccgcaacaacagcagca

SEQ ID NO: 2032632 - RNA, 18 nt, Human herpesvirus 5
cagcaguaugacgugcga

SEQ ID NO: 2032633 - RNA, 17 nt, Human herpesvirus 5
cagaaugaaccuuguaa

SEQ ID NO: 2032634 - RNA, 13 nt, Human herpesvirus 5
cagcccgaggugu

SEQ ID NO: 2032635 - RNA, 23 nt, Human herpesvirus 5
cagcgagcgcacccacucgucgc

SEQ ID NO: 2032636 - RNA, 18 nt, Human herpesvirus 5
cagcgagcucgaggaggg

SEQ ID NO: 2032637 - RNA, 14 nt, Human herpesvirus 5
cagcgagcugcgcg

SEQ ID NO: 2032638 - RNA, 17 nt, Human herpesvirus 5
cagcgacgucccgcgcg

SEQ ID NO: 2032639 - RNA, 21 nt, Human herpesvirus 5
aagccgccaauacagcacgua

SEQ ID NO: 2032640 - RNA, 16 nt, Human herpesvirus 5
aacuggccuggcggcg

SEQ ID NO: 2032641 - RNA, 13 nt, Human herpesvirus 5
aagaaacgcugga

SEQ ID NO: 2032642 - RNA, 20 nt, Human herpesvirus 5
aagaaucuaggaacacugaa

SEQ ID NO: 2032643 - RNA, 23 nt, Human herpesvirus 5
aagcaccguggggucaucgaccg

SEQ ID NO: 2032644 - RNA, 20 nt, Human herpesvirus 5
aagacaucgucacaccuauc

SEQ ID NO: 2032645 - RNA, 14 nt, Human herpesvirus 5
aacguguggugaga

SEQ ID NO: 2032646 - RNA, 19 nt, Human herpesvirus 5
aacgucaucucgccgacgu

SEQ ID NO: 2032647 - RNA, 17 nt, Human herpesvirus 5
agccgagcgggaggcgg

SEQ ID NO: 2032648 - RNA, 18 nt, Human herpesvirus 5
agccgccgacgcuggcgc

SEQ ID NO: 2032649 - RNA, 21 nt, Human herpesvirus 5
agccuguuagaaccgcgggcc

SEQ ID NO: 2032650 - RNA, 11 nt, Human herpesvirus 5
agcgacggcgg

SEQ ID NO: 2032651 - RNA, 20 nt, Human herpesvirus 5
agcgacgucccgcgcggauc

SEQ ID NO: 2032652 - RNA, 21 nt, Human herpesvirus 5
agccguguuuagucgcggcga

SEQ ID NO: 2032653 - RNA, 18 nt, Human herpesvirus 5
agccucaagaauccgucc

SEQ ID NO: 2032654 - RNA, 23 nt, Human herpesvirus 5
agccucgggugcaccgcggcacc

SEQ ID NO: 2032655 - RNA, 20 nt, Human herpesvirus 5
agcgucucauuugucuuuac

SEQ ID NO: 2032656 - RNA, 13 nt, Human herpesvirus 5
agcguuggcggcg

SEQ ID NO: 2032657 - RNA, 22 nt, Human herpesvirus 5
agcuacuuuggaaucacgcaga

SEQ ID NO: 2032658 - RNA, 21 nt, Human herpesvirus 5
agcuccauuaugcaggagacg

SEQ ID NO: 2032659 - RNA, 16 nt, Human herpesvirus 5
agcucgucgccagcgc

SEQ ID NO: 2032660 - RNA, 18 nt, Human herpesvirus 5
agcucguuucgccggcgc

SEQ ID NO: 2032661 - RNA, 14 nt, Human herpesvirus 5
agcucuacgagcug

SEQ ID NO: 2032662 - RNA, 18 nt, Human herpesvirus 5
aggucacacugggagacg

SEQ ID NO: 2032663 - RNA, 18 nt, Human herpesvirus 5
agcugcgcaggccgccgc

SEQ ID NO: 2032664 - RNA, 18 nt, Human herpesvirus 5
agcugcacucacgcggcc

SEQ ID NO: 2032665 - RNA, 16 nt, Human herpesvirus 5
agcugcccgccggcgg

SEQ ID NO: 2032666 - RNA, 14 nt, Human herpesvirus 5
agcucugucggcgc

SEQ ID NO: 2032667 - RNA, 20 nt, Human herpesvirus 5
agcucuuaaaggacgugaug

SEQ ID NO: 2032668 - RNA, 17 nt, Human herpesvirus 5
agguuugucuggcggcu

SEQ ID NO: 2032669 - RNA, 20 nt, Human herpesvirus 5
agguucuaagaccgcggcgc

SEQ ID NO: 2032670 - RNA, 21 nt, Human herpesvirus 5
aguaggcgcgcacccgacggc

SEQ ID NO: 2032671 - RNA, 20 nt, Human herpesvirus 5
aguaugaaaguuggcugcgc

SEQ ID NO: 2032672 - RNA, 12 nt, Human herpesvirus 5
aggucgcgcgua

SEQ ID NO: 2032673 - RNA, 20 nt, Human herpesvirus 5
aggucgucuuggaagccgau

SEQ ID NO: 2032674 - RNA, 12 nt, Human herpesvirus 5
agguggaggaca

SEQ ID NO: 2032675 - RNA, 13 nt, Human herpesvirus 5
agguguggcggca

SEQ ID NO: 2032676 - RNA, 14 nt, Human herpesvirus 5
aggugcuggcggcc

SEQ ID NO: 2032677 - RNA, 22 nt, Human herpesvirus 5
aucguuuacgggggauggcgau

SEQ ID NO: 2032678 - RNA, 20 nt, Human herpesvirus 5
aucuacaacuuaaccacaag

SEQ ID NO: 2032679 - RNA, 18 nt, Human herpesvirus 5
aucgucgcggacugccgg

SEQ ID NO: 2032680 - RNA, 15 nt, Human herpesvirus 5
aucgucuacgucguu

SEQ ID NO: 2032681 - RNA, 19 nt, Human herpesvirus 5
aucgcucgcuuuggagcgc

SEQ ID NO: 2032682 - RNA, 19 nt, Human herpesvirus 5
aguacaaaacaggaaagga

SEQ ID NO: 2032683 - RNA, 21 nt, Human herpesvirus 5
aucggcucucaggcgcgcaga

SEQ ID NO: 2032684 - RNA, 13 nt, Human herpesvirus 5
aguccggaggacg

SEQ ID NO: 2032685 - RNA, 16 nt, Human herpesvirus 5
agucgcgcggucgccg

SEQ ID NO: 2032686 - RNA, 16 nt, Human herpesvirus 5
agucgcucggaaacga

SEQ ID NO: 2032687 - RNA, 22 nt, Human herpesvirus 5
agucguaagaagcgcgaggacg

SEQ ID NO: 2032688 - RNA, 23 nt, Human herpesvirus 5
cauggacccgccgcuaccgucgc

SEQ ID NO: 2032689 - RNA, 23 nt, Human herpesvirus 5
caguguauuggcauauagccaau

SEQ ID NO: 2032690 - RNA, 19 nt, Human herpesvirus 5
cagugacgcuaggcggcgc

SEQ ID NO: 2032691 - RNA, 16 nt, Human herpesvirus 5
caguuaccaccgucgc

SEQ ID NO: 2032692 - RNA, 17 nt, Human herpesvirus 5
caguuaccaccgucgcc

SEQ ID NO: 2032693 - RNA, 20 nt, Human herpesvirus 5
cauaagaauaggaagaaacc

SEQ ID NO: 2032694 - RNA, 21 nt, Human herpesvirus 5
caguuuccgaagaugccgugu

SEQ ID NO: 2032695 - RNA, 20 nt, Human herpesvirus 5
cauaaugccgucaccgucgc

SEQ ID NO: 2032696 - RNA, 22 nt, Human herpesvirus 5
caucgguugccucuggguguug

SEQ ID NO: 2032697 - RNA, 21 nt, Human herpesvirus 5
caugcugagcaaguacacgcg

SEQ ID NO: 2032698 - RNA, 13 nt, Human herpesvirus 5
caucucacggaua

SEQ ID NO: 2032699 - RNA, 15 nt, Human herpesvirus 5
caugacgcacgccgg

SEQ ID NO: 2032700 - RNA, 15 nt, Human herpesvirus 5
augaccggacgugcu

SEQ ID NO: 2032701 - RNA, 18 nt, Human herpesvirus 5
augaggcgguggcugcgc

SEQ ID NO: 2032702 - RNA, 16 nt, Human herpesvirus 5
augaaucuuccccucu

SEQ ID NO: 2032703 - RNA, 15 nt, Human herpesvirus 5
aucuccgacagcgcg

SEQ ID NO: 2032704 - RNA, 21 nt, Human herpesvirus 5
aucugcccuauccgcgcggcu

SEQ ID NO: 2032705 - RNA, 15 nt, Human herpesvirus 5
aucugcugaaacugc

SEQ ID NO: 2032706 - RNA, 19 nt, Human herpesvirus 5
aucugggcagcggcugcgc

SEQ ID NO: 2032707 - RNA, 14 nt, Human herpesvirus 5
aucucaacgucaac

SEQ ID NO: 2032708 - RNA, 15 nt, Human herpesvirus 5
aucucaacgucaacg

SEQ ID NO: 2032709 - RNA, 24 nt, Human herpesvirus 5
aucucgccguacggcaacgagcag

SEQ ID NO: 2032710 - RNA, 23 nt, Human herpesvirus 5
cagcgccgggugcgcgacacggc

SEQ ID NO: 2032711 - RNA, 16 nt, Human herpesvirus 5
cagcgcuacgugcgcg

SEQ ID NO: 2032712 - RNA, 19 nt, Human herpesvirus 5
cagcggaaaaugccgccgc

SEQ ID NO: 2032713 - RNA, 18 nt, Human herpesvirus 5
cagcggaacucgaccucu

SEQ ID NO: 2032714 - RNA, 15 nt, Human herpesvirus 5
cagcgccaggcggcu

SEQ ID NO: 2032715 - RNA, 23 nt, Human herpesvirus 5
cagcgccaggcggcugaucugca

SEQ ID NO: 2032716 - RNA, 20 nt, Human herpesvirus 5
caguacaacaguuaucagca

SEQ ID NO: 2032717 - RNA, 17 nt, Human herpesvirus 5
caggguaaaaaccacgu

SEQ ID NO: 2032718 - RNA, 19 nt, Human herpesvirus 5
caggugugcgcgucggcgc

SEQ ID NO: 2032719 - RNA, 13 nt, Human herpesvirus 5
caguacgauccuc

SEQ ID NO: 2032720 - RNA, 16 nt, Human herpesvirus 5
caguauuuacuucacc

SEQ ID NO: 2032721 - RNA, 15 nt, Human herpesvirus 5
caguaugacgugcga

SEQ ID NO: 2032722 - RNA, 20 nt, Human herpesvirus 5
caguaccgacgacgacaguc

SEQ ID NO: 2032723 - RNA, 12 nt, Human herpesvirus 5
caguccgcuccg

SEQ ID NO: 2032724 - RNA, 21 nt, Human herpesvirus 5
cagcggucguuuuaaccgcag

SEQ ID NO: 2032725 - RNA, 21 nt, Human herpesvirus 5
cagcguauuuucuacuccgaa

SEQ ID NO: 2032726 - RNA, 20 nt, Human herpesvirus 5
cagcguucaaaggaauauua

SEQ ID NO: 2032727 - RNA, 13 nt, Human herpesvirus 5
cagcgucuggcca

SEQ ID NO: 2032728 - RNA, 16 nt, Human herpesvirus 5
cagcgcggaaaccgag

SEQ ID NO: 2032729 - RNA, 17 nt, Human herpesvirus 5
cagcggcggcgguggug

SEQ ID NO: 2032730 - RNA, 13 nt, Human herpesvirus 5
cagcggcugcgcg

SEQ ID NO: 2032731 - RNA, 12 nt, Human herpesvirus 5
cagcggaggugg

SEQ ID NO: 2032732 - RNA, 17 nt, Human herpesvirus 5
cagcggcgacagacggc

SEQ ID NO: 2032733 - RNA, 19 nt, Human herpesvirus 5
cggcacgccguugccacga

SEQ ID NO: 2032734 - RNA, 24 nt, Human herpesvirus 5
cggcacgccguugccacgagcaug

SEQ ID NO: 2032735 - RNA, 17 nt, Human herpesvirus 5
cggcaggaaggccucgu

SEQ ID NO: 2032736 - RNA, 18 nt, Human herpesvirus 5
cggcaggaaggccucguu

SEQ ID NO: 2032737 - RNA, 19 nt, Human herpesvirus 5
cggcagcggaacucgaccu

SEQ ID NO: 2032738 - RNA, 14 nt, Human herpesvirus 5
cggcaaucggugcg

SEQ ID NO: 2032739 - RNA, 21 nt, Human herpesvirus 5
cggcaaucggugcgauauccc

SEQ ID NO: 2032740 - RNA, 18 nt, Human herpesvirus 5
cggcaaggcggaggagag

SEQ ID NO: 2032741 - RNA, 20 nt, Human herpesvirus 5
cggcaccaucggacucgcca

SEQ ID NO: 2032742 - RNA, 15 nt, Human herpesvirus 5
cgccaccgauccgca

SEQ ID NO: 2032743 - RNA, 12 nt, Human herpesvirus 5
cgccagcgcgag

SEQ ID NO: 2032744 - RNA, 13 nt, Human herpesvirus 5
cgccagcggccug

SEQ ID NO: 2032745 - RNA, 14 nt, Human herpesvirus 5
cgccagcguccgcg

SEQ ID NO: 2032746 - RNA, 16 nt, Human herpesvirus 5
cgccacuauguccucc

SEQ ID NO: 2032747 - RNA, 21 nt, Human herpesvirus 5
cgccacauuggugaaggccgu

SEQ ID NO: 2032748 - RNA, 17 nt, Human herpesvirus 5
cgaugucaaggaacgcg

SEQ ID NO: 2032749 - RNA, 21 nt, Human herpesvirus 5
cgaugugugggaccuggucaa

SEQ ID NO: 2032750 - RNA, 18 nt, Human herpesvirus 5
cgaucuugacgcugcugg

SEQ ID NO: 2032751 - RNA, 19 nt, Human herpesvirus 5
cgaugaaccuuccccaccc

SEQ ID NO: 2032752 - RNA, 22 nt, Human herpesvirus 5
cgaugguauuacgcccgacgug

SEQ ID NO: 2032753 - RNA, 13 nt, Human herpesvirus 5
cgccaccgucgcc

SEQ ID NO: 2032754 - RNA, 16 nt, Human herpesvirus 5
cgaucaccagaaggcg

SEQ ID NO: 2032755 - RNA, 21 nt, Human herpesvirus 5
cgaucgcgcuuuugaccgcga

SEQ ID NO: 2032756 - RNA, 18 nt, Human herpesvirus 5
cgaucguaacccaggcgc

SEQ ID NO: 2032757 - RNA, 21 nt, Human herpesvirus 5
cgaucugugauccgugcgcuc

SEQ ID NO: 2032758 - RNA, 20 nt, Human herpesvirus 5
cgaguucggggugcaucauc

SEQ ID NO: 2032759 - RNA, 22 nt, Human herpesvirus 5
cgaguugcaaaagaagcugccc

SEQ ID NO: 2032760 - RNA, 18 nt, Human herpesvirus 5
cgaguuguagucgcggug

SEQ ID NO: 2032761 - RNA, 23 nt, Human herpesvirus 5
cgaguuguagucgcgguggcggc

SEQ ID NO: 2032762 - RNA, 15 nt, Human herpesvirus 5
cgaguccguccucga

SEQ ID NO: 2032763 - RNA, 15 nt, Human herpesvirus 5
cgccggcgggcggcu

SEQ ID NO: 2032764 - RNA, 17 nt, Human herpesvirus 5
cgccggggagacgacga

SEQ ID NO: 2032765 - RNA, 15 nt, Human herpesvirus 5
cgccgugggcggcga

SEQ ID NO: 2032766 - RNA, 18 nt, Human herpesvirus 5
cgccguguguuaccgccg

SEQ ID NO: 2032767 - RNA, 13 nt, Human herpesvirus 5
cgccguccugcag

SEQ ID NO: 2032768 - RNA, 19 nt, Human herpesvirus 5
cgccgucucgucacacggc

SEQ ID NO: 2032769 - RNA, 16 nt, Human herpesvirus 5
cgccgugacguccgcu

SEQ ID NO: 2032770 - RNA, 15 nt, Human herpesvirus 5
cgccgugcgcgacga

SEQ ID NO: 2032771 - RNA, 20 nt, Human herpesvirus 5
cgccucauggcggcggccac

SEQ ID NO: 2032772 - RNA, 17 nt, Human herpesvirus 5
cgccucacgcugcacga

SEQ ID NO: 2032773 - RNA, 19 nt, Human herpesvirus 5
cgccguugcggccgccgcu

SEQ ID NO: 2032774 - RNA, 20 nt, Human herpesvirus 5
cgccguuuugcuguccucgu

SEQ ID NO: 2032775 - RNA, 21 nt, Human herpesvirus 5
cgccucaaaaagcagguggag

SEQ ID NO: 2032776 - RNA, 13 nt, Human herpesvirus 5
cgcucggccucgc

SEQ ID NO: 2032777 - RNA, 15 nt, Human herpesvirus 5
cgccucuucuggccc

SEQ ID NO: 2032778 - RNA, 19 nt, Human herpesvirus 5
cgcucgcuuuggagcgcga

SEQ ID NO: 2032779 - RNA, 14 nt, Human herpesvirus 5
cgccuccgguggug

SEQ ID NO: 2032780 - RNA, 15 nt, Human herpesvirus 5
cgccuccguccucgu

SEQ ID NO: 2032781 - RNA, 15 nt, Human herpesvirus 5
cgcucugccggcugc

SEQ ID NO: 2032782 - RNA, 20 nt, Human herpesvirus 5
cgcucucgucaggcuuguca

SEQ ID NO: 2032783 - RNA, 16 nt, Human herpesvirus 5
cgcucugacgccgcgc

SEQ ID NO: 2032784 - RNA, 19 nt, Human herpesvirus 5
cgcucgucuccacgcucga

SEQ ID NO: 2032785 - RNA, 12 nt, Human herpesvirus 5
cggaucgcggua

SEQ ID NO: 2032786 - RNA, 23 nt, Human herpesvirus 5
cggaggaaucgucggcagagguc

SEQ ID NO: 2032787 - RNA, 23 nt, Human herpesvirus 5
cggagggccgccaauuggcggcg

SEQ ID NO: 2032788 - RNA, 18 nt, Human herpesvirus 5
cggagcagccgccagcga

SEQ ID NO: 2032789 - RNA, 22 nt, Human herpesvirus 5
cggagcaggaaccuccuccgcg

SEQ ID NO: 2032790 - RNA, 23 nt, Human herpesvirus 5
cggagcaggaaccuccuccgcga

SEQ ID NO: 2032791 - RNA, 18 nt, Human herpesvirus 5
cgcugauaacgacguggu

SEQ ID NO: 2032792 - RNA, 19 nt, Human herpesvirus 5
cgcugacagcauacgggga

SEQ ID NO: 2032793 - RNA, 20 nt, Human herpesvirus 5
cgcugacguugaugcggcgc

SEQ ID NO: 2032794 - RNA, 15 nt, Human herpesvirus 5
cgcugccgcucagcg

SEQ ID NO: 2032795 - RNA, 18 nt, Human herpesvirus 5
cgacagcgcgacgagcgc

SEQ ID NO: 2032796 - RNA, 12 nt, Human herpesvirus 5
cgaagugccgcg

SEQ ID NO: 2032797 - RNA, 15 nt, Human herpesvirus 5
cgaauuugggcggug

SEQ ID NO: 2032798 - RNA, 20 nt, Human herpesvirus 5
cgacacacguucgacaugga

SEQ ID NO: 2032799 - RNA, 20 nt, Human herpesvirus 5
cgacguuucgcgaggacaag

SEQ ID NO: 2032800 - RNA, 21 nt, Human herpesvirus 5
cgacuacgguuacuccacaac

SEQ ID NO: 2032801 - RNA, 22 nt, Human herpesvirus 5
cgacgugauuuacgaggucugc

SEQ ID NO: 2032802 - RNA, 17 nt, Human herpesvirus 5
cgagaugaaggaacgca

SEQ ID NO: 2032803 - RNA, 20 nt, Human herpesvirus 5
cgagggcccucgccggcggc

SEQ ID NO: 2032804 - RNA, 18 nt, Human herpesvirus 5
cgagucaccuagacgcaa

SEQ ID NO: 2032805 - RNA, 20 nt, Human herpesvirus 5
cgaguaccgcagcgaguugc

SEQ ID NO: 2032806 - RNA, 17 nt, Human herpesvirus 5
cgagagaugggccgcgg

SEQ ID NO: 2032807 - RNA, 22 nt, Human herpesvirus 5
cgagacggcgugacacagcacg

SEQ ID NO: 2032808 - RNA, 18 nt, Human herpesvirus 5
cgacuuuacggugcgcgg

SEQ ID NO: 2032809 - RNA, 17 nt, Human herpesvirus 5
cgacugcggcgacuggc

SEQ ID NO: 2032810 - RNA, 16 nt, Human herpesvirus 5
cgacuggcucaacuuu

SEQ ID NO: 2032811 - RNA, 14 nt, Human herpesvirus 5
ccacucccaccacg

SEQ ID NO: 2032812 - RNA, 20 nt, Human herpesvirus 5
ccacggaaguuccgacgcga

SEQ ID NO: 2032813 - RNA, 18 nt, Human herpesvirus 5
ccacguagucgcgcgcga

SEQ ID NO: 2032814 - RNA, 18 nt, Human herpesvirus 5
ccacggccugcgggcagg

SEQ ID NO: 2032815 - RNA, 17 nt, Human herpesvirus 5
ccacggcgaaccgccgu

SEQ ID NO: 2032816 - RNA, 20 nt, Human herpesvirus 5
ccacggcugcugaucgccgu

SEQ ID NO: 2032817 - RNA, 13 nt, Human herpesvirus 5
ccacgggccgcgc

SEQ ID NO: 2032818 - RNA, 20 nt, Human herpesvirus 5
caugaaguuguugaucugcu

SEQ ID NO: 2032819 - RNA, 21 nt, Human herpesvirus 5
ccacgcucgagggcuccgucu

SEQ ID NO: 2032820 - RNA, 23 nt, Human herpesvirus 5
ccacgcucgcucugacgccgcgc

SEQ ID NO: 2032821 - RNA, 17 nt, Human herpesvirus 5
ccagaggcccgccgaga

SEQ ID NO: 2032822 - RNA, 18 nt, Human herpesvirus 5
ccugggaacgcgcgcacg

SEQ ID NO: 2032823 - RNA, 20 nt, Human herpesvirus 5
cgaagacgccgucacgcagg

SEQ ID NO: 2032824 - RNA, 16 nt, Human herpesvirus 5
ccuggccuucggcacg

SEQ ID NO: 2032825 - RNA, 18 nt, Human herpesvirus 5
ccuggccuucggcacgcu

SEQ ID NO: 2032826 - RNA, 13 nt, Human herpesvirus 5
ccugcugcuacgc

SEQ ID NO: 2032827 - RNA, 20 nt, Human herpesvirus 5
ccugcagcgcuacgugcgcg

SEQ ID NO: 2032828 - RNA, 18 nt, Human herpesvirus 5
ccugccagucuccgcagu

SEQ ID NO: 2032829 - RNA, 20 nt, Human herpesvirus 5
ccugcacguccaugucgcga

SEQ ID NO: 2032830 - RNA, 17 nt, Human herpesvirus 5
ccugcagaccgaggcgc

SEQ ID NO: 2032831 - RNA, 22 nt, Human herpesvirus 5
ccagcagggcgcgccggcgcca

SEQ ID NO: 2032832 - RNA, 15 nt, Human herpesvirus 5
ccagauacgcguugg

SEQ ID NO: 2032833 - RNA, 21 nt, Human herpesvirus 5
ccugcacgacaucuuccgcga

SEQ ID NO: 2032834 - RNA, 18 nt, Human herpesvirus 5
ccugccgaagaccucacc

SEQ ID NO: 2032835 - RNA, 21 nt, Human herpesvirus 5
ccugccucgacaucucgccgu

SEQ ID NO: 2032836 - RNA, 19 nt, Human herpesvirus 5
ccugcgaggaccguacacg

SEQ ID NO: 2032837 - RNA, 20 nt, Human herpesvirus 5
gucgccagcgcgagcgcucg

SEQ ID NO: 2032838 - RNA, 13 nt, Human herpesvirus 5
gucgccugcgacg

SEQ ID NO: 2032839 - RNA, 15 nt, Human herpesvirus 5
gucgccuacacccgu

SEQ ID NO: 2032840 - RNA, 16 nt, Human herpesvirus 5
gucgcgcccacggucc

SEQ ID NO: 2032841 - RNA, 23 nt, Human herpesvirus 5
guccggaggagcguccgacgccg

SEQ ID NO: 2032842 - RNA, 13 nt, Human herpesvirus 5
guacgcgcacgcc

SEQ ID NO: 2032843 - RNA, 15 nt, Human herpesvirus 5
guccgugaucgccgc

SEQ ID NO: 2032844 - RNA, 16 nt, Human herpesvirus 5
guccgugaucgccgcg

SEQ ID NO: 2032845 - RNA, 16 nt, Human herpesvirus 5
guccucgcccggugag

SEQ ID NO: 2032846 - RNA, 20 nt, Human herpesvirus 5
guccgcucugagccggcucc

SEQ ID NO: 2032847 - RNA, 22 nt, Human herpesvirus 5
guccuucaucucuucgugacgg

SEQ ID NO: 2032848 - RNA, 22 nt, Human herpesvirus 5
gucgccgcgucagcggccgccg

SEQ ID NO: 2032849 - RNA, 12 nt, Human herpesvirus 5
gucgccgucacu

SEQ ID NO: 2032850 - RNA, 15 nt, Human herpesvirus 5
gucgcacaaagaagu

SEQ ID NO: 2032851 - RNA, 15 nt, Human herpesvirus 5
gucgcagucagaccc

SEQ ID NO: 2032852 - RNA, 18 nt, Human herpesvirus 5
gucgcaucaucaacagca

SEQ ID NO: 2032853 - RNA, 21 nt, Human herpesvirus 5
gucgcaucaucaacagcagca

SEQ ID NO: 2032854 - RNA, 14 nt, Human herpesvirus 5
gucgacgacgccgu

SEQ ID NO: 2032855 - RNA, 18 nt, Human herpesvirus 5
gucgaucuugacgcugcu

SEQ ID NO: 2032856 - RNA, 15 nt, Human herpesvirus 5
gucgaugccuguugg

SEQ ID NO: 2032857 - RNA, 18 nt, Human herpesvirus 5
gucgacuguugccgcgug

SEQ ID NO: 2032858 - RNA, 17 nt, Human herpesvirus 5
gucgagacuugcacgcu

SEQ ID NO: 2032859 - RNA, 14 nt, Human herpesvirus 5
gguuucggcgacgu

SEQ ID NO: 2032860 - RNA, 16 nt, Human herpesvirus 5
gguuucgggccgacgu

SEQ ID NO: 2032861 - RNA, 21 nt, Human herpesvirus 5
ggacucgguuucggcgacgug

SEQ ID NO: 2032862 - RNA, 14 nt, Human herpesvirus 5
ggagcucaaguacc

SEQ ID NO: 2032863 - RNA, 21 nt, Human herpesvirus 5
ggagcagcucuuuuccagcgu

SEQ ID NO: 2032864 - RNA, 18 nt, Human herpesvirus 5
gguuguuccggcggcgug

SEQ ID NO: 2032865 - RNA, 13 nt, Human herpesvirus 5
gguucgcugacga

SEQ ID NO: 2032866 - RNA, 17 nt, Human herpesvirus 5
gguuuucggacagagca

SEQ ID NO: 2032867 - RNA, 17 nt, Human herpesvirus 5
guaaaagcugcaugaaa

SEQ ID NO: 2032868 - RNA, 16 nt, Human herpesvirus 5
guaaagcccguggccc

SEQ ID NO: 2032869 - RNA, 11 nt, Human herpesvirus 5
guaaggcggcg

SEQ ID NO: 2032870 - RNA, 19 nt, Human herpesvirus 5
guacagcggcucgccgcag

SEQ ID NO: 2032871 - RNA, 19 nt, Human herpesvirus 5
guaccaacauagaggugag

SEQ ID NO: 2032872 - RNA, 21 nt, Human herpesvirus 5
gcucccacguuuacgcgaaac

SEQ ID NO: 2032873 - RNA, 19 nt, Human herpesvirus 5
gcucaucgucacgcucaag

SEQ ID NO: 2032874 - RNA, 14 nt, Human herpesvirus 5
gcucaugccgccac

SEQ ID NO: 2032875 - RNA, 22 nt, Human herpesvirus 5
gcuccaaaacgacguuaacgac

SEQ ID NO: 2032876 - RNA, 16 nt, Human herpesvirus 5
gcuccacacgcaucug

SEQ ID NO: 2032877 - RNA, 21 nt, Human herpesvirus 5
gcuccagaagauacucgaugg

SEQ ID NO: 2032878 - RNA, 20 nt, Human herpesvirus 5
gcuaucuguguccgcccgag

SEQ ID NO: 2032879 - RNA, 23 nt, Human herpesvirus 5
gcucacguugaugaaaacgaggu

SEQ ID NO: 2032880 - RNA, 21 nt, Human herpesvirus 5
gcuaugcgggaugcugcggcg

SEQ ID NO: 2032881 - RNA, 17 nt, Human herpesvirus 5
gcuaugggaagaaaccg

SEQ ID NO: 2032882 - RNA, 20 nt, Human herpesvirus 5
gcuacuuuccgauccuugga

SEQ ID NO: 2032883 - RNA, 15 nt, Human herpesvirus 5
ggacgaaacagcagg

SEQ ID NO: 2032884 - RNA, 21 nt, Human herpesvirus 5
ggacgacgcaccggccuccga

SEQ ID NO: 2032885 - RNA, 13 nt, Human herpesvirus 5
gcggccguggccu

SEQ ID NO: 2032886 - RNA, 16 nt, Human herpesvirus 5
gcggugggugguaaaa

SEQ ID NO: 2032887 - RNA, 20 nt, Human herpesvirus 5
gcggugggugguaaaaaccg

SEQ ID NO: 2032888 - RNA, 19 nt, Human herpesvirus 5
gcgguguuuccgauggugg

SEQ ID NO: 2032889 - RNA, 13 nt, Human herpesvirus 5
gcguacgguggac

SEQ ID NO: 2032890 - RNA, 17 nt, Human herpesvirus 5
gcgucagaagacgagcu

SEQ ID NO: 2032891 - RNA, 20 nt, Human herpesvirus 5
gcguaugguuaugaccaagc

SEQ ID NO: 2032892 - RNA, 15 nt, Human herpesvirus 5
gcguaggacgacgug

SEQ ID NO: 2032893 - RNA, 23 nt, Human herpesvirus 5
gcuacgguggcgcgacggugaug

SEQ ID NO: 2032894 - RNA, 18 nt, Human herpesvirus 5
gcuacguacgacugcgcg

SEQ ID NO: 2032895 - RNA, 20 nt, Human herpesvirus 5
gcccucgacggcgguacuga

SEQ ID NO: 2032896 - RNA, 11 nt, Human herpesvirus 5
gcccucgccgg

SEQ ID NO: 2032897 - RNA, 22 nt, Human herpesvirus 5
gcccuguaugagcuguuucgac

SEQ ID NO: 2032898 - RNA, 14 nt, Human herpesvirus 5
gccgcgacaacggc

SEQ ID NO: 2032899 - RNA, 19 nt, Human herpesvirus 5
gccgcgacaacggccgccg

SEQ ID NO: 2032900 - RNA, 13 nt, Human herpesvirus 5
gccgccgugacgu

SEQ ID NO: 2032901 - RNA, 15 nt, Human herpesvirus 5
gccgccccgugacga

SEQ ID NO: 2032902 - RNA, 15 nt, Human herpesvirus 5
gccgcccgacgccga

SEQ ID NO: 2032903 - RNA, 15 nt, Human herpesvirus 5
gccgccgcgccacac

SEQ ID NO: 2032904 - RNA, 14 nt, Human herpesvirus 5
gccgccgcggcguu

SEQ ID NO: 2032905 - RNA, 16 nt, Human herpesvirus 5
gcccguucuuccgagu

SEQ ID NO: 2032906 - RNA, 14 nt, Human herpesvirus 5
gcccgggccgccgc

SEQ ID NO: 2032907 - RNA, 19 nt, Human herpesvirus 5
gccgcgcaggccgccgccg

SEQ ID NO: 2032908 - RNA, 12 nt, Human herpesvirus 5
gccggggcccgu

SEQ ID NO: 2032909 - RNA, 15 nt, Human herpesvirus 5
gccggggagacgacg

SEQ ID NO: 2032910 - RNA, 17 nt, Human herpesvirus 5
gccggguuggcacgacg

SEQ ID NO: 2032911 - RNA, 16 nt, Human herpesvirus 5
gccgcggccgcugccg

SEQ ID NO: 2032912 - RNA, 18 nt, Human herpesvirus 5
gccgcggugcgcugcagc

SEQ ID NO: 2032913 - RNA, 18 nt, Human herpesvirus 5
gccggcggagacgacggc

SEQ ID NO: 2032914 - RNA, 14 nt, Human herpesvirus 5
gccggcggcggcgu

SEQ ID NO: 2032915 - RNA, 16 nt, Human herpesvirus 5
gccggcggcggcguca

SEQ ID NO: 2032916 - RNA, 22 nt, Human herpesvirus 5
gccggcuucgaacaucgcgucg

SEQ ID NO: 2032917 - RNA, 17 nt, Human herpesvirus 5
gccggcuugaccgcguu

SEQ ID NO: 2032918 - RNA, 21 nt, Human herpesvirus 5
gccggcguggcggccgacggc

SEQ ID NO: 2032919 - RNA, 13 nt, Human herpesvirus 5
gccgcgacacacg

SEQ ID NO: 2032920 - RNA, 15 nt, Human herpesvirus 5
gcggccgcagaaggc

SEQ ID NO: 2032921 - RNA, 17 nt, Human herpesvirus 5
gcggccgcagaaggcca

SEQ ID NO: 2032922 - RNA, 17 nt, Human herpesvirus 5
gcggugaacgugcgcga

SEQ ID NO: 2032923 - RNA, 18 nt, Human herpesvirus 5
gcgguauggcugcgcgcc

SEQ ID NO: 2032924 - RNA, 19 nt, Human herpesvirus 5
gcgguaugggucacggcgg

SEQ ID NO: 2032925 - RNA, 23 nt, Human herpesvirus 5
gcggucagaaaaagaaaacgccg

SEQ ID NO: 2032926 - RNA, 13 nt, Human herpesvirus 5
gcggcacccggcu

SEQ ID NO: 2032927 - RNA, 15 nt, Human herpesvirus 5
gcggcaccagagaca

SEQ ID NO: 2032928 - RNA, 21 nt, Human herpesvirus 5
gcggcaccaggaacacggugg

SEQ ID NO: 2032929 - RNA, 19 nt, Human herpesvirus 5
gcggccacggccugcgggc

SEQ ID NO: 2032930 - RNA, 13 nt, Human herpesvirus 5
gcggcaaucggug

SEQ ID NO: 2032931 - RNA, 19 nt, Human herpesvirus 5
gcggcagcggaacucgacc

SEQ ID NO: 2032932 - RNA, 13 nt, Human herpesvirus 5
gcgcuccucgagc

SEQ ID NO: 2032933 - RNA, 21 nt, Human herpesvirus 5
gcgcguuuguugcgcggcgac

SEQ ID NO: 2032934 - RNA, 15 nt, Human herpesvirus 5
gcgcuaacgccucgu

SEQ ID NO: 2032935 - RNA, 15 nt, Human herpesvirus 5
gcgcuacgugcgcgc

SEQ ID NO: 2032936 - RNA, 13 nt, Human herpesvirus 5
gcgacguggagga

SEQ ID NO: 2032937 - RNA, 18 nt, Human herpesvirus 5
gcgagccccaucgggccc

SEQ ID NO: 2032938 - RNA, 16 nt, Human herpesvirus 5
gccggggugccgccgc

SEQ ID NO: 2032939 - RNA, 14 nt, Human herpesvirus 5
gccgucaaggccgc

SEQ ID NO: 2032940 - RNA, 21 nt, Human herpesvirus 5
gccgucagagcaucaacgacg

SEQ ID NO: 2032941 - RNA, 17 nt, Human herpesvirus 5
gccgucgaguacgugcu

SEQ ID NO: 2032942 - RNA, 13 nt, Human herpesvirus 5
gccgugacgucgc

SEQ ID NO: 2032943 - RNA, 21 nt, Human herpesvirus 5
gccugggaacgcgcgcacggc

SEQ ID NO: 2032944 - RNA, 19 nt, Human herpesvirus 5
gccgugcucuuggcgccgc

SEQ ID NO: 2032945 - RNA, 22 nt, Human herpesvirus 5
gccuggauuaucacaucggugu

SEQ ID NO: 2032946 - RNA, 21 nt, Human herpesvirus 5
gccuguggugcgacugcggcg

SEQ ID NO: 2032947 - RNA, 20 nt, Human herpesvirus 5
gccuuccagcuuaccgccac

SEQ ID NO: 2032948 - RNA, 19 nt, Human herpesvirus 5
gccuugcgcucccugcucc

SEQ ID NO: 2032949 - RNA, 15 nt, Human herpesvirus 5
gcgaacggcgacggc

SEQ ID NO: 2032950 - RNA, 20 nt, Human herpesvirus 5
gcgaagccagcuacagccac

SEQ ID NO: 2032951 - RNA, 14 nt, Human herpesvirus 5
gcgacggguggcag

SEQ ID NO: 2032952 - RNA, 15 nt, Human herpesvirus 5
gcgacgagggucugc

SEQ ID NO: 2032953 - RNA, 12 nt, Human herpesvirus 5
gcgacacgugcu

SEQ ID NO: 2032954 - RNA, 20 nt, Human herpesvirus 5
gcgacaagcuguggcugcac

SEQ ID NO: 2032955 - RNA, 21 nt, Human herpesvirus 5
gcgacaccguaucagcuaccg

SEQ ID NO: 2032956 - RNA, 16 nt, Human herpesvirus 5
gcgaagguguggcggc

SEQ ID NO: 2032957 - RNA, 13 nt, Human herpesvirus 5
gcgaccagcugcu

SEQ ID NO: 2032958 - RNA, 19 nt, Human herpesvirus 5
gcgacgagaucuacgcugu

SEQ ID NO: 2032959 - RNA, 18 nt, Human herpesvirus 5
gccaaaaucugacgcugu

SEQ ID NO: 2032960 - RNA, 21 nt, Human herpesvirus 5
gcauggagucgcgcggucgcc

SEQ ID NO: 2032961 - RNA, 14 nt, Human herpesvirus 5
gcaguccgcuccgg

SEQ ID NO: 2032962 - RNA, 20 nt, Human herpesvirus 5
gcagugcaucuacguggucg

SEQ ID NO: 2032963 - RNA, 21 nt, Human herpesvirus 5
gcauaagaagccaagggggug

SEQ ID NO: 2032964 - RNA, 17 nt, Human herpesvirus 5
gcagcccgaggugugcg

SEQ ID NO: 2032965 - RNA, 18 nt, Human herpesvirus 5
gcaucaguuucugcggcg

SEQ ID NO: 2032966 - RNA, 22 nt, Human herpesvirus 5
gcauccugcccaccgccuccga

SEQ ID NO: 2032967 - RNA, 15 nt, Human herpesvirus 5
gcagcgcgugcgcau

SEQ ID NO: 2032968 - RNA, 15 nt, Human herpesvirus 5
gcagcggaacucgac

SEQ ID NO: 2032969 - RNA, 23 nt, Human herpesvirus 5
gcagcggaggugggccggggccc

SEQ ID NO: 2032970 - RNA, 14 nt, Human herpesvirus 5
gcagcggcugcgcg

SEQ ID NO: 2032971 - RNA, 15 nt, Human herpesvirus 5
gcagcggcugcgcgc

SEQ ID NO: 2032972 - RNA, 22 nt, Human herpesvirus 5
gcagcgggaaaccgcgucgucg

SEQ ID NO: 2032973 - RNA, 23 nt, Human herpesvirus 5
gcagcggggagaaaaguggcaga

SEQ ID NO: 2032974 - RNA, 17 nt, Human herpesvirus 5
gcagcgucacagagggc

SEQ ID NO: 2032975 - RNA, 22 nt, Human herpesvirus 5
gcagcguggccggcguggcggc

SEQ ID NO: 2032976 - RNA, 23 nt, Human herpesvirus 5
cugccucagucucucggugcgug

SEQ ID NO: 2032977 - RNA, 20 nt, Human herpesvirus 5
cugccugguuaguucgccgu

SEQ ID NO: 2032978 - RNA, 18 nt, Human herpesvirus 5
cugccuuacggcgaccgu

SEQ ID NO: 2032979 - RNA, 14 nt, Human herpesvirus 5
cugcgacacgugcu

SEQ ID NO: 2032980 - RNA, 20 nt, Human herpesvirus 5
cugccggcauguccggccgu

SEQ ID NO: 2032981 - RNA, 15 nt, Human herpesvirus 5
cugccggcugcggcg

SEQ ID NO: 2032982 - RNA, 23 nt, Human herpesvirus 5
cugcccuuuacggugcugcgucu

SEQ ID NO: 2032983 - RNA, 14 nt, Human herpesvirus 5
cugccgcacgcgcu

SEQ ID NO: 2032984 - RNA, 15 nt, Human herpesvirus 5
cugccucucauguuc

SEQ ID NO: 2032985 - RNA, 17 nt, Human herpesvirus 5
cugccucuccuccgucg

SEQ ID NO: 2032986 - RNA, 17 nt, Human herpesvirus 5
cugcgcaggccgccgcu

SEQ ID NO: 2032987 - RNA, 23 nt, Human herpesvirus 5
cugcgagaggaagucgaucugga

SEQ ID NO: 2032988 - RNA, 15 nt, Human herpesvirus 5
cucuaucugcgccag

SEQ ID NO: 2032989 - RNA, 19 nt, Human herpesvirus 5
cucucgagugcggucggug

SEQ ID NO: 2032990 - RNA, 17 nt, Human herpesvirus 5
cucucuauccgguggcg

SEQ ID NO: 2032991 - RNA, 19 nt, Human herpesvirus 5
cucugccugggcacgcgcg

SEQ ID NO: 2032992 - RNA, 14 nt, Human herpesvirus 5
cucguucccagcgc

SEQ ID NO: 2032993 - RNA, 14 nt, Human herpesvirus 5
cucgugcgugucgc

SEQ ID NO: 2032994 - RNA, 14 nt, Human herpesvirus 5
cucuaccgcgacgg

SEQ ID NO: 2032995 - RNA, 16 nt, Human herpesvirus 5
cucuaccgcgacggcg

SEQ ID NO: 2032996 - RNA, 15 nt, Human herpesvirus 5
cucgucgccagcgcg

SEQ ID NO: 2032997 - RNA, 21 nt, Human herpesvirus 5
cucgucgccagcgcgagcgcu

SEQ ID NO: 2032998 - RNA, 20 nt, Human herpesvirus 5
cucgucgcucuaucugcgcg

SEQ ID NO: 2032999 - RNA, 20 nt, Human herpesvirus 5
cucgucggugagacgaggcc

SEQ ID NO: 2033000 - RNA, 18 nt, Human herpesvirus 5
cucgucugagccggggug

SEQ ID NO: 2033001 - RNA, 17 nt, Human herpesvirus 5
cucggcggccacggcgu

SEQ ID NO: 2033002 - RNA, 17 nt, Human herpesvirus 5
cucgggccgaaccccgu

SEQ ID NO: 2033003 - RNA, 17 nt, Human herpesvirus 5
cucgggucggcuggucg

SEQ ID NO: 2033004 - RNA, 16 nt, Human herpesvirus 5
cucgggugcaccgcgg

SEQ ID NO: 2033005 - RNA, 16 nt, Human herpesvirus 5
cucggacggacguaga

SEQ ID NO: 2033006 - RNA, 18 nt, Human herpesvirus 5
cucggagccgccgacgcu

SEQ ID NO: 2033007 - RNA, 15 nt, Human herpesvirus 5
cugugaaacgccaac

SEQ ID NO: 2033008 - RNA, 15 nt, Human herpesvirus 5
cugugaucugcacgu

SEQ ID NO: 2033009 - RNA, 15 nt, Human herpesvirus 5
cugugcgcgccggcc

SEQ ID NO: 2033010 - RNA, 21 nt, Human herpesvirus 5
cuguaccguuauuucgugcgu

SEQ ID NO: 2033011 - RNA, 22 nt, Human herpesvirus 5
cuggucuggcccaaagaccgcu

SEQ ID NO: 2033012 - RNA, 13 nt, Human herpesvirus 5
cugcucgaccgcu

SEQ ID NO: 2033013 - RNA, 16 nt, Human herpesvirus 5
cugggcacgcgcgucg

SEQ ID NO: 2033014 - RNA, 21 nt, Human herpesvirus 5
cugggacgaggaggaggggcc

SEQ ID NO: 2033015 - RNA, 18 nt, Human herpesvirus 5
cuggguccguaaccacgu

SEQ ID NO: 2033016 - RNA, 20 nt, Human herpesvirus 5
cugggcuggcccucgcagug

SEQ ID NO: 2033017 - RNA, 14 nt, Human herpesvirus 5
cuggucaacugcgu

SEQ ID NO: 2033018 - RNA, 22 nt, Human herpesvirus 5
cugcgcgccuccguccucgucg

SEQ ID NO: 2033019 - RNA, 22 nt, Human herpesvirus 5
cugccgcucagcgagcucgucg

SEQ ID NO: 2033020 - RNA, 15 nt, Human herpesvirus 5
cugcgcccguuggug

SEQ ID NO: 2033021 - RNA, 18 nt, Human herpesvirus 5
cugcgccguuuugcuguc

SEQ ID NO: 2033022 - RNA, 16 nt, Human herpesvirus 5
cugcgccuccucgucg

SEQ ID NO: 2033023 - RNA, 22 nt, Human herpesvirus 5
cugcgcgucaccgaugccggcc

SEQ ID NO: 2033024 - RNA, 15 nt, Human herpesvirus 5
cugcuauaagaaggc

SEQ ID NO: 2033025 - RNA, 14 nt, Human herpesvirus 5
gcagagggcgcgcc

SEQ ID NO: 2033026 - RNA, 19 nt, Human herpesvirus 5
gcagcaauagcagccgaca

SEQ ID NO: 2033027 - RNA, 13 nt, Human herpesvirus 5
gcagaccauccuc

SEQ ID NO: 2033028 - RNA, 19 nt, Human herpesvirus 5
gcagaacccgguugcggcc

SEQ ID NO: 2033029 - RNA, 16 nt, Human herpesvirus 5
gcagccgacacagcgg

SEQ ID NO: 2033030 - RNA, 14 nt, Human herpesvirus 5
gcagccgccgcgug

SEQ ID NO: 2033031 - RNA, 21 nt, Human herpesvirus 5
gcagccaccgacacagcagca

SEQ ID NO: 2033032 - RNA, 22 nt, Human herpesvirus 5
gcagccacgagcaucgcaacaa

SEQ ID NO: 2033033 - RNA, 20 nt, Human herpesvirus 5
gcagcaccaugccggagcua

SEQ ID NO: 2033034 - RNA, 22 nt, Human herpesvirus 5
gcagcacgcggcucacguagca

SEQ ID NO: 2033035 - RNA, 20 nt, Human herpesvirus 5
gcagcagcuggugcaucacg

SEQ ID NO: 2033036 - RNA, 15 nt, Human herpesvirus 5
gcagcaucgcgugcg

SEQ ID NO: 2033037 - RNA, 22 nt, Human herpesvirus 5
gcagcaugggcgacaccgccuc

SEQ ID NO: 2033038 - RNA, 13 nt, Human herpesvirus 5
gcacgcggcucac

SEQ ID NO: 2033039 - RNA, 22 nt, Human herpesvirus 5
gcacgggcucgggugacggcga

SEQ ID NO: 2033040 - RNA, 13 nt, Human herpesvirus 5
gcacgggcugcug

SEQ ID NO: 2033041 - RNA, 13 nt, Human herpesvirus 5
gcacguugccggc

SEQ ID NO: 2033042 - RNA, 16 nt, Human herpesvirus 5
gcacguuuuggaaaac

SEQ ID NO: 2033043 - RNA, 16 nt, Human herpesvirus 5
gacgacccaccgccgc

SEQ ID NO: 2033044 - RNA, 23 nt, Human herpesvirus 5
gacgaccuacgggacacgcugau

SEQ ID NO: 2033045 - RNA, 19 nt, Human herpesvirus 5
gacgaagugccgcgccgcc

SEQ ID NO: 2033046 - RNA, 22 nt, Human herpesvirus 5
gacgacgguuuccacgccaccg

SEQ ID NO: 2033047 - RNA, 13 nt, Human herpesvirus 5
gaccgcggcgcag

SEQ ID NO: 2033048 - RNA, 21 nt, Human herpesvirus 5
gaccuugcggauacgccgccg

SEQ ID NO: 2033049 - RNA, 19 nt, Human herpesvirus 5
gacgauuuuaugcgccgcc

SEQ ID NO: 2033050 - RNA, 20 nt, Human herpesvirus 5
gacgauuuuaugcgccgcca

SEQ ID NO: 2033051 - RNA, 14 nt, Human herpesvirus 5
gacgagcaggcucg

SEQ ID NO: 2033052 - RNA, 17 nt, Human herpesvirus 5
gacgagcguugcgcucg

SEQ ID NO: 2033053 - RNA, 18 nt, Human herpesvirus 5
gacgagggucugcgcgac

SEQ ID NO: 2033054 - RNA, 15 nt, Human herpesvirus 5
gacgauaugucgcga

SEQ ID NO: 2033055 - RNA, 16 nt, Human herpesvirus 5
gacgaucccucgccgc

SEQ ID NO: 2033056 - RNA, 16 nt, Human herpesvirus 5
gcacgacgcggcguug

SEQ ID NO: 2033057 - RNA, 17 nt, Human herpesvirus 5
cuuaaaauuucguaaac

SEQ ID NO: 2033058 - RNA, 15 nt, Human herpesvirus 5
cuucaaccacgagua

SEQ ID NO: 2033059 - RNA, 19 nt, Human herpesvirus 5
cuucaaccucacguuaaac

SEQ ID NO: 2033060 - RNA, 15 nt, Human herpesvirus 5
cuguguccgcccgag

SEQ ID NO: 2033061 - RNA, 16 nt, Human herpesvirus 5
cuguggacccugcgcg

SEQ ID NO: 2033062 - RNA, 21 nt, Human herpesvirus 5
cuguggauagauuucugcgug

SEQ ID NO: 2033063 - RNA, 23 nt, Human herpesvirus 5
cuguggcaccgccuccgaacgcu

SEQ ID NO: 2033064 - RNA, 16 nt, Human herpesvirus 5
cugugcuggccgccgc

SEQ ID NO: 2033065 - RNA, 15 nt, Human herpesvirus 5
gaccggcggcugcug

SEQ ID NO: 2033066 - RNA, 16 nt, Human herpesvirus 5
gaccgggaucacgacg

SEQ ID NO: 2033067 - RNA, 20 nt, Human herpesvirus 5
gaccgggaucacgacgacgc

SEQ ID NO: 2033068 - RNA, 15 nt, Human herpesvirus 5
uuuuuauuacccgcu

SEQ ID NO: 2033069 - RNA, 20 nt, Human herpesvirus 5
uuuggcgcagucgcgagcug

SEQ ID NO: 2033070 - RNA, 14 nt, Human herpesvirus 5
uuuugcugcaccag

SEQ ID NO: 2033071 - RNA, 21 nt, Human herpesvirus 5
uuuugggucagcggcacgccg

SEQ ID NO: 2033072 - RNA, 16 nt, Human herpesvirus 5
uuucgcugccaacgcc

SEQ ID NO: 2033073 - RNA, 17 nt, Human herpesvirus 5
uuucugcgucggagcuc

SEQ ID NO: 2033074 - RNA, 23 nt, Human herpesvirus 5
ucguggaaggcaccgcgacagcu

SEQ ID NO: 2033075 - RNA, 13 nt, Human herpesvirus 5
ucgucgugcccgu

SEQ ID NO: 2033076 - RNA, 13 nt, Human herpesvirus 5
uuuaagcugcuca

SEQ ID NO: 2033077 - RNA, 17 nt, Human herpesvirus 5
uuuacgcgaaacgauga

SEQ ID NO: 2033078 - RNA, 15 nt, Human herpesvirus 5
ucgaccgacaaggcg

SEQ ID NO: 2033079 - RNA, 19 nt, Human herpesvirus 5
ucgaccuugagcgacagca

SEQ ID NO: 2033080 - RNA, 12 nt, Human herpesvirus 5
ucgacggcggua

SEQ ID NO: 2033081 - RNA, 20 nt, Human herpesvirus 5
ucgagaccgaagacgccguc

SEQ ID NO: 2033082 - RNA, 19 nt, Human herpesvirus 5
ucgagacuugcacgcuguc

SEQ ID NO: 2033083 - RNA, 21 nt, Human herpesvirus 5
ucgggcgugugguagaagagc

SEQ ID NO: 2033084 - RNA, 15 nt, Human herpesvirus 5
uccuguugcucuccu

SEQ ID NO: 2033085 - RNA, 19 nt, Human herpesvirus 5
ucggugaccacaaccacgu

SEQ ID NO: 2033086 - RNA, 21 nt, Human herpesvirus 5
ucccggauccaagggacgagc

SEQ ID NO: 2033087 - RNA, 18 nt, Human herpesvirus 5
uccgacagcgcgacgagc

SEQ ID NO: 2033088 - RNA, 23 nt, Human herpesvirus 5
uccgaccgggaaaccacgccggc

SEQ ID NO: 2033089 - RNA, 15 nt, Human herpesvirus 5
ucccgucccucuccu

SEQ ID NO: 2033090 - RNA, 14 nt, Human herpesvirus 5
ucccuacagcgacu

SEQ ID NO: 2033091 - RNA, 17 nt, Human herpesvirus 5
ucccuacuaccgucgug

SEQ ID NO: 2033092 - RNA, 12 nt, Human herpesvirus 5
ucccuccugcag

SEQ ID NO: 2033093 - RNA, 15 nt, Human herpesvirus 5
ucccucgcgccgccc

SEQ ID NO: 2033094 - RNA, 15 nt, Human herpesvirus 5
ucgaaaacaaccaca

SEQ ID NO: 2033095 - RNA, 14 nt, Human herpesvirus 5
ucgacgacgccguc

SEQ ID NO: 2033096 - RNA, 22 nt, Human herpesvirus 5
uccgacucgcugucgagacggc

SEQ ID NO: 2033097 - RNA, 14 nt, Human herpesvirus 5
uccgagcugcggua

SEQ ID NO: 2033098 - RNA, 20 nt, Human herpesvirus 5
uccuggaucuuggcggccga

SEQ ID NO: 2033099 - RNA, 16 nt, Human herpesvirus 5
ucgaaauaaccuacgu

SEQ ID NO: 2033100 - RNA, 13 nt, Human herpesvirus 5
uccccgugcccga

SEQ ID NO: 2033101 - RNA, 12 nt, Human herpesvirus 5
uccccuaacguc

SEQ ID NO: 2033102 - RNA, 21 nt, Human herpesvirus 5
uccccuaguaauaccaccguc

SEQ ID NO: 2033103 - RNA, 17 nt, Human herpesvirus 5
uccccgaauuugggcgg

SEQ ID NO: 2033104 - RNA, 17 nt, Human herpesvirus 5
uccccgacuccgcgguc

SEQ ID NO: 2033105 - RNA, 21 nt, Human herpesvirus 5
ucccacuacacuauguucgug

SEQ ID NO: 2033106 - RNA, 15 nt, Human herpesvirus 5
ucccaucucaacguc

SEQ ID NO: 2033107 - RNA, 14 nt, Human herpesvirus 5
uccaucgcagccac

SEQ ID NO: 2033108 - RNA, 13 nt, Human herpesvirus 5
ucccaccacgguu

SEQ ID NO: 2033109 - RNA, 21 nt, Human herpesvirus 5
uccauuucgcaggagcugcug

SEQ ID NO: 2033110 - RNA, 21 nt, Human herpesvirus 5
acugggugcugccgggcggcu

SEQ ID NO: 2033111 - RNA, 16 nt, Human herpesvirus 5
acuggugcuggcggcg

SEQ ID NO: 2033112 - RNA, 15 nt, Human herpesvirus 5
acuggccuggcggcg

SEQ ID NO: 2033113 - RNA, 21 nt, Human herpesvirus 5
acugucgccacuauguccucc

SEQ ID NO: 2033114 - RNA, 14 nt, Human herpesvirus 5
acugacacagcucc

SEQ ID NO: 2033115 - RNA, 19 nt, Human herpesvirus 5
acugcgacggcagcgccag

SEQ ID NO: 2033116 - RNA, 20 nt, Human herpesvirus 5
acugcgauaauaacggcgca

SEQ ID NO: 2033117 - RNA, 15 nt, Human herpesvirus 5
caccaauaggggagu

SEQ ID NO: 2033118 - RNA, 15 nt, Human herpesvirus 5
caccaauugcuuuaa

SEQ ID NO: 2033119 - RNA, 20 nt, Human herpesvirus 5
caccaccgagacgugcgacc

SEQ ID NO: 2033120 - RNA, 13 nt, Human herpesvirus 5
caccaaccgacgu

SEQ ID NO: 2033121 - RNA, 12 nt, Human herpesvirus 5
cacaucggugcc

SEQ ID NO: 2033122 - RNA, 17 nt, Human herpesvirus 5
cacauuagacacacggg

SEQ ID NO: 2033123 - RNA, 19 nt, Human herpesvirus 5
caccagacuuuuugcuuua

SEQ ID NO: 2033124 - RNA, 16 nt, Human herpesvirus 5
caccaggugccggcga

SEQ ID NO: 2033125 - RNA, 21 nt, Human herpesvirus 5
caccaucgugguagcgccgcg

SEQ ID NO: 2033126 - RNA, 18 nt, Human herpesvirus 5
cacccccgcgacccucgc

SEQ ID NO: 2033127 - RNA, 13 nt, Human herpesvirus 5
cacaguuaccacc

SEQ ID NO: 2033128 - RNA, 12 nt, Human herpesvirus 5
cacagcuccuga

SEQ ID NO: 2033129 - RNA, 15 nt, Human herpesvirus 5
cacagcagccgcgcu

SEQ ID NO: 2033130 - RNA, 14 nt, Human herpesvirus 5
acuucaaccacgag

SEQ ID NO: 2033131 - RNA, 23 nt, Human herpesvirus 5
cacacuggcuggaauacguggcg

SEQ ID NO: 2033132 - RNA, 15 nt, Human herpesvirus 5
acuauguggcuccgc

SEQ ID NO: 2033133 - RNA, 19 nt, Human herpesvirus 5
acuacguugggucugcgcu

SEQ ID NO: 2033134 - RNA, 21 nt, Human herpesvirus 5
acuacgacgggacggcggcgc

SEQ ID NO: 2033135 - RNA, 22 nt, Human herpesvirus 5
acucguugggauugacgcgguu

SEQ ID NO: 2033136 - RNA, 18 nt, Human herpesvirus 5
acucgcaccggcagcaca

SEQ ID NO: 2033137 - RNA, 14 nt, Human herpesvirus 5
acguucgucgugac

SEQ ID NO: 2033138 - RNA, 20 nt, Human herpesvirus 5
acguucuccaagggagacau

SEQ ID NO: 2033139 - RNA, 14 nt, Human herpesvirus 5
acguugaugcggcg

SEQ ID NO: 2033140 - RNA, 19 nt, Human herpesvirus 5
cacgguggccaacaagcgg

SEQ ID NO: 2033141 - RNA, 19 nt, Human herpesvirus 5
cacggcggcggccugcucg

SEQ ID NO: 2033142 - RNA, 18 nt, Human herpesvirus 5
cacggucgggcacucggc

SEQ ID NO: 2033143 - RNA, 23 nt, Human herpesvirus 5
cacggugacguagcagcacgcgg

SEQ ID NO: 2033144 - RNA, 14 nt, Human herpesvirus 5
cacgucgaccaggu

SEQ ID NO: 2033145 - RNA, 22 nt, Human herpesvirus 5
cacgucgaccaggugcugucgc

SEQ ID NO: 2033146 - RNA, 20 nt, Human herpesvirus 5
cacgucgccguccaugucgc

SEQ ID NO: 2033147 - RNA, 17 nt, Human herpesvirus 5
cacgucgcugauccgca

SEQ ID NO: 2033148 - RNA, 20 nt, Human herpesvirus 5
cacgucggagccccugcgcg

SEQ ID NO: 2033149 - RNA, 19 nt, Human herpesvirus 5
cacgucggcucgaagaggu

SEQ ID NO: 2033150 - RNA, 21 nt, Human herpesvirus 5
cacgucuagcaggcccaggcc

SEQ ID NO: 2033151 - RNA, 15 nt, Human herpesvirus 5
cacggcgaaccgccg

SEQ ID NO: 2033152 - RNA, 16 nt, Human herpesvirus 5
cacggcgaaccgccgu

SEQ ID NO: 2033153 - RNA, 19 nt, Human herpesvirus 5
cacggcgaaccgccgucgc

SEQ ID NO: 2033154 - RNA, 19 nt, Human herpesvirus 5
cacggcgccggugacccgc

SEQ ID NO: 2033155 - RNA, 22 nt, Human herpesvirus 5
cacgguacgauaaaaacaacgu

SEQ ID NO: 2033156 - RNA, 21 nt, Human herpesvirus 5
cacggcgucuuccuccucguc

SEQ ID NO: 2033157 - RNA, 16 nt, Human herpesvirus 5
cacggcuaccaugcgc

SEQ ID NO: 2033158 - RNA, 17 nt, Human herpesvirus 5
cagagaccgccgccgcg

SEQ ID NO: 2033159 - RNA, 18 nt, Human herpesvirus 5
cagagaccgccgccgcgc

SEQ ID NO: 2033160 - RNA, 18 nt, Human herpesvirus 5
cagacuuucgacgugcgc

SEQ ID NO: 2033161 - RNA, 14 nt, Human herpesvirus 5
cacguccaugucgc

SEQ ID NO: 2033162 - RNA, 19 nt, Human herpesvirus 5
cagagccaccaggugccgg

SEQ ID NO: 2033163 - RNA, 15 nt, Human herpesvirus 5
cagacgucggcgguc

SEQ ID NO: 2033164 - RNA, 11 nt, Human herpesvirus 5
cacgccggcgg

SEQ ID NO: 2033165 - RNA, 15 nt, Human herpesvirus 5
cacgccgugcucgcg

SEQ ID NO: 2033166 - RNA, 21 nt, Human herpesvirus 5
cacgcucgcucugacgccgcg

SEQ ID NO: 2033167 - RNA, 24 nt, Human herpesvirus 5
cacgcuugucauagucacgucgcu

SEQ ID NO: 2033168 - RNA, 19 nt, Human herpesvirus 5
cacggaacauguccuggcg

SEQ ID NO: 2033169 - RNA, 19 nt, Human herpesvirus 5
cacggccuccgacgagcgu

SEQ ID NO: 2033170 - RNA, 12 nt, Human herpesvirus 5
cacggccugcgg

SEQ ID NO: 2033171 - RNA, 19 nt, Human herpesvirus 5
cacggccugcgggcaggcg

SEQ ID NO: 2033172 - RNA, 14 nt, Human herpesvirus 5
cacgcgcgacuugg

SEQ ID NO: 2033173 - RNA, 15 nt, Human herpesvirus 5
cagcagccaccgaca

SEQ ID NO: 2033174 - RNA, 23 nt, Human herpesvirus 5
cagcagccaccgacacagcagca

SEQ ID NO: 2033175 - RNA, 13 nt, Human herpesvirus 5
cagcaaugucgua

SEQ ID NO: 2033176 - RNA, 21 nt, Human herpesvirus 5
cagaucguguuucggcggcug

SEQ ID NO: 2033177 - RNA, 17 nt, Human herpesvirus 5
cagaggucgccgcugau

SEQ ID NO: 2033178 - RNA, 20 nt, Human herpesvirus 5
cagaugacgagcgccggcga

SEQ ID NO: 2033179 - RNA, 16 nt, Human herpesvirus 5
cagaugcucccggcgc

SEQ ID NO: 2033180 - RNA, 20 nt, Human herpesvirus 5
cagauuuacagcccggcggu

SEQ ID NO: 2033181 - RNA, 23 nt, Human herpesvirus 5
cagcacauuguaugccgauacac

SEQ ID NO: 2033182 - RNA, 17 nt, Human herpesvirus 5
cuaggcuacuccgccgu

SEQ ID NO: 2033183 - RNA, 14 nt, Human herpesvirus 5
cuaguaaaaaaagu

SEQ ID NO: 2033184 - RNA, 19 nt, Human herpesvirus 5
cuaguuagauuuccugugu

SEQ ID NO: 2033185 - RNA, 14 nt, Human herpesvirus 5
cuacggcugcaucg

SEQ ID NO: 2033186 - RNA, 21 nt, Human herpesvirus 5
gaggagugucagacacagccg

SEQ ID NO: 2033187 - RNA, 18 nt, Human herpesvirus 5
gaggacauggacucgcca

SEQ ID NO: 2033188 - RNA, 18 nt, Human herpesvirus 5
gaggaacccugcggcgcc

SEQ ID NO: 2033189 - RNA, 15 nt, Human herpesvirus 5
gaggaagcgggggug

SEQ ID NO: 2033190 - RNA, 15 nt, Human herpesvirus 5
gaggacgacagcucg

SEQ ID NO: 2033191 - RNA, 14 nt, Human herpesvirus 5
gauucgguuacgaa

SEQ ID NO: 2033192 - RNA, 21 nt, Human herpesvirus 5
gauguaguacaucgcgugcga

SEQ ID NO: 2033193 - RNA, 19 nt, Human herpesvirus 5
gauuaccuacgucaaagcg

SEQ ID NO: 2033194 - RNA, 15 nt, Human herpesvirus 5
gauucaggacgagga

SEQ ID NO: 2033195 - RNA, 19 nt, Human herpesvirus 5
gaggccgagacgcugcgcu

SEQ ID NO: 2033196 - RNA, 18 nt, Human herpesvirus 5
gcaaaucacgugugugcg

SEQ ID NO: 2033197 - RNA, 23 nt, Human herpesvirus 5
gcaaaaacuuguccuugcgcgcg

SEQ ID NO: 2033198 - RNA, 17 nt, Human herpesvirus 5
cuacgcgugcacgcgcu

SEQ ID NO: 2033199 - RNA, 17 nt, Human herpesvirus 5
cuacgcuacgaccuggc

SEQ ID NO: 2033200 - RNA, 15 nt, Human herpesvirus 5
cuacucacguuggug

SEQ ID NO: 2033201 - RNA, 21 nt, Human herpesvirus 5
cuacucgcacaaccuguggug

SEQ ID NO: 2033202 - RNA, 15 nt, Human herpesvirus 5
cuagaaagaccaaga

SEQ ID NO: 2033203 - RNA, 16 nt, Human herpesvirus 5
cgugcucgugcccauc

SEQ ID NO: 2033204 - RNA, 18 nt, Human herpesvirus 5
cgugcugauucgcgccgu

SEQ ID NO: 2033205 - RNA, 22 nt, Human herpesvirus 5
cgugcugauucgcgccgugcgc

SEQ ID NO: 2033206 - RNA, 15 nt, Human herpesvirus 5
cuacccucaaguacg

SEQ ID NO: 2033207 - RNA, 15 nt, Human herpesvirus 5
cuaccgcgacggcga

SEQ ID NO: 2033208 - RNA, 16 nt, Human herpesvirus 5
cgugccugggaacgcg

SEQ ID NO: 2033209 - RNA, 18 nt, Human herpesvirus 5
cgugcgaccuggacggcu

SEQ ID NO: 2033210 - RNA, 14 nt, Human herpesvirus 5
cgugcgaggacaac

SEQ ID NO: 2033211 - RNA, 14 nt, Human herpesvirus 5
cgugcgcacgccgc

SEQ ID NO: 2033212 - RNA, 16 nt, Human herpesvirus 5
cgugcgcacgccgcgc

SEQ ID NO: 2033213 - RNA, 12 nt, Human herpesvirus 5
cgugccaccugc

SEQ ID NO: 2033214 - RNA, 20 nt, Human herpesvirus 5
cgugcccguuuucacagcag

SEQ ID NO: 2033215 - RNA, 13 nt, Human herpesvirus 5
cgugccgagcugc

SEQ ID NO: 2033216 - RNA, 17 nt, Human herpesvirus 5
cgugccaggcuguucac

SEQ ID NO: 2033217 - RNA, 20 nt, Human herpesvirus 5
cgugccaucaaucgcguccg

SEQ ID NO: 2033218 - RNA, 14 nt, Human herpesvirus 5
cgugauaggcggcg

SEQ ID NO: 2033219 - RNA, 18 nt, Human herpesvirus 5
cgugcaacggcgacgcgg

SEQ ID NO: 2033220 - RNA, 19 nt, Human herpesvirus 5
cgugcaacggcgacgcggu

SEQ ID NO: 2033221 - RNA, 14 nt, Human herpesvirus 5
cgugcaucugccga

SEQ ID NO: 2033222 - RNA, 21 nt, Human herpesvirus 5
cgucguuuuguucaccgucgc

SEQ ID NO: 2033223 - RNA, 22 nt, Human herpesvirus 5
cgucuccaugauugugccgcgu

SEQ ID NO: 2033224 - RNA, 15 nt, Human herpesvirus 5
cgucuggacgcgcgg

SEQ ID NO: 2033225 - RNA, 17 nt, Human herpesvirus 5
cgucuggacgcgcggcu

SEQ ID NO: 2033226 - RNA, 19 nt, Human herpesvirus 5
cgcgccacaacgccguccg

SEQ ID NO: 2033227 - RNA, 14 nt, Human herpesvirus 5
cgugacuuggggcg

SEQ ID NO: 2033228 - RNA, 18 nt, Human herpesvirus 5
cgugaaugggcacgccgu

SEQ ID NO: 2033229 - RNA, 20 nt, Human herpesvirus 5
ccgucgcuacauucgccgca

SEQ ID NO: 2033230 - RNA, 22 nt, Human herpesvirus 5
ccgucggaaacccgacgagaca

SEQ ID NO: 2033231 - RNA, 12 nt, Human herpesvirus 5
ccgucgccgcga

SEQ ID NO: 2033232 - RNA, 22 nt, Human herpesvirus 5
ccgucccucuccucccuccgcg

SEQ ID NO: 2033233 - RNA, 20 nt, Human herpesvirus 5
ccguacuaagucucccgugu

SEQ ID NO: 2033234 - RNA, 18 nt, Human herpesvirus 5
ccguacacgcacgcuggu

SEQ ID NO: 2033235 - RNA, 22 nt, Human herpesvirus 5
ccggugucuggcuuuaccgccg

SEQ ID NO: 2033236 - RNA, 16 nt, Human herpesvirus 5
ccggugcgcgaccgca

SEQ ID NO: 2033237 - RNA, 18 nt, Human herpesvirus 5
ccggucacuggacucggu

SEQ ID NO: 2033238 - RNA, 20 nt, Human herpesvirus 5
ccgguauucggaaacagcgu

SEQ ID NO: 2033239 - RNA, 20 nt, Human herpesvirus 5
ccgguaaaggaacaacccgu

SEQ ID NO: 2033240 - RNA, 19 nt, Human herpesvirus 5
ccgguaacguggacgacgc

SEQ ID NO: 2033241 - RNA, 19 nt, Human herpesvirus 5
cgcgccucauggcggcggc

SEQ ID NO: 2033242 - RNA, 15 nt, Human herpesvirus 5
cgcgccgggcggcuu

SEQ ID NO: 2033243 - RNA, 21 nt, Human herpesvirus 5
cgcgccucucggagccgccga

SEQ ID NO: 2033244 - RNA, 14 nt, Human herpesvirus 5
cgucggccaacaac

SEQ ID NO: 2033245 - RNA, 16 nt, Human herpesvirus 5
cgucggcggggcggac

SEQ ID NO: 2033246 - RNA, 11 nt, Human herpesvirus 5
cgucgguggaa

SEQ ID NO: 2033247 - RNA, 13 nt, Human herpesvirus 5
cgucgucccagca

SEQ ID NO: 2033248 - RNA, 15 nt, Human herpesvirus 5
cgucgugcccgucgg

SEQ ID NO: 2033249 - RNA, 14 nt, Human herpesvirus 5
cgcgcccgacagcu

SEQ ID NO: 2033250 - RNA, 23 nt, Human herpesvirus 5
cgcgcccucuucuuugccggcuc

SEQ ID NO: 2033251 - RNA, 13 nt, Human herpesvirus 5
cgcgcccgucgcg

SEQ ID NO: 2033252 - RNA, 15 nt, Human herpesvirus 5
ccgugaucgccgcgg

SEQ ID NO: 2033253 - RNA, 16 nt, Human herpesvirus 5
ccgugagugacgcggu

SEQ ID NO: 2033254 - RNA, 20 nt, Human herpesvirus 5
ccgugauaacggucaagaag

SEQ ID NO: 2033255 - RNA, 20 nt, Human herpesvirus 5
ccgugcucuuggcgccgcgg

SEQ ID NO: 2033256 - RNA, 14 nt, Human herpesvirus 5
gcaacucgguguug

SEQ ID NO: 2033257 - RNA, 19 nt, Human herpesvirus 5
gcaaucgcuucaccgucgc

SEQ ID NO: 2033258 - RNA, 21 nt, Human herpesvirus 5
gcaaggccucuaucugcgcca

SEQ ID NO: 2033259 - RNA, 21 nt, Human herpesvirus 5
gcacaccugccucgacaucuc

SEQ ID NO: 2033260 - RNA, 19 nt, Human herpesvirus 5
gcacaacugguuccugcag

SEQ ID NO: 2033261 - RNA, 17 nt, Human herpesvirus 5
gcacaaacugcgacacg

SEQ ID NO: 2033262 - RNA, 13 nt, Human herpesvirus 5
uuguagcaacugg

SEQ ID NO: 2033263 - RNA, 17 nt, Human herpesvirus 5
uugucauuaaacaggcu

SEQ ID NO: 2033264 - RNA, 13 nt, Human herpesvirus 5
uugcugcaacggc

SEQ ID NO: 2033265 - RNA, 16 nt, Human herpesvirus 5
uuccggucucggcucg

SEQ ID NO: 2033266 - RNA, 22 nt, Human herpesvirus 5
uucgacagcggcaacaacgacg

SEQ ID NO: 2033267 - RNA, 16 nt, Human herpesvirus 5
uucgaguccguccucg

SEQ ID NO: 2033268 - RNA, 19 nt, Human herpesvirus 5
uucgcgaggacaaggcucc

SEQ ID NO: 2033269 - RNA, 15 nt, Human herpesvirus 5
uucggacgaccuccg

SEQ ID NO: 2033270 - RNA, 15 nt, Human herpesvirus 5
uucggccggcugcug

SEQ ID NO: 2033271 - RNA, 12 nt, Human herpesvirus 5
uugcccgcaaaa

SEQ ID NO: 2033272 - RNA, 20 nt, Human herpesvirus 5
uugcaaaagaagcugcccgc

SEQ ID NO: 2033273 - RNA, 15 nt, Human herpesvirus 5
uucuucgccggaggc

SEQ ID NO: 2033274 - RNA, 14 nt, Human herpesvirus 5
uucuucgcggaggc

SEQ ID NO: 2033275 - RNA, 19 nt, Human herpesvirus 5
uuaucaucugcucccgcug

SEQ ID NO: 2033276 - RNA, 21 nt, Human herpesvirus 5
uuaucaucugcucccgcugcu

SEQ ID NO: 2033277 - RNA, 20 nt, Human herpesvirus 5
uuaugauaucuacagcagau

SEQ ID NO: 2033278 - RNA, 18 nt, Human herpesvirus 5
uuaugauucugcacagau

SEQ ID NO: 2033279 - RNA, 21 nt, Human herpesvirus 5
uuaccgccgccgcccgacgcc

SEQ ID NO: 2033280 - RNA, 13 nt, Human herpesvirus 5
uuauuacccgcua

SEQ ID NO: 2033281 - RNA, 22 nt, Human herpesvirus 5
uucacggggagaagaaacaaga

SEQ ID NO: 2033282 - RNA, 17 nt, Human herpesvirus 5
uucagaccgcaacaaca

SEQ ID NO: 2033283 - RNA, 18 nt, Human herpesvirus 5
uucaaccucacguuaaac

SEQ ID NO: 2033284 - RNA, 22 nt, Human herpesvirus 5
uuccaaagccgacgucccugau

SEQ ID NO: 2033285 - RNA, 10 nt, Human herpesvirus 5
uuccacgccg

SEQ ID NO: 2033286 - RNA, 17 nt, Human herpesvirus 5
uucagcguccggccucg

SEQ ID NO: 2033287 - RNA, 23 nt, Human herpesvirus 5
uucccaccgcgacccagcgacag

SEQ ID NO: 2033288 - RNA, 20 nt, Human herpesvirus 5
uuccccaccuucccucuaga

SEQ ID NO: 2033289 - RNA, 20 nt, Human herpesvirus 5
uggcggcgguggagggcgcg

SEQ ID NO: 2033290 - RNA, 19 nt, Human herpesvirus 5
uggcgcuuggugcgcgacg

SEQ ID NO: 2033291 - RNA, 16 nt, Human herpesvirus 5
uggcgcguagccaccu

SEQ ID NO: 2033292 - RNA, 22 nt, Human herpesvirus 5
uggcggcagcggaggugggccg

SEQ ID NO: 2033293 - RNA, 14 nt, Human herpesvirus 5
uggcugcgcgccuc

SEQ ID NO: 2033294 - RNA, 22 nt, Human herpesvirus 5
ugggaguuuuuagcgcgugacc

SEQ ID NO: 2033295 - RNA, 19 nt, Human herpesvirus 5
ugggcacgcgcgucggccg

SEQ ID NO: 2033296 - RNA, 22 nt, Human herpesvirus 5
uggccgcacaccuguuggagca

SEQ ID NO: 2033297 - RNA, 17 nt, Human herpesvirus 5
uggcccuggucuggccc

SEQ ID NO: 2033298 - RNA, 17 nt, Human herpesvirus 5
ugcgggaugcugcggcg

SEQ ID NO: 2033299 - RNA, 14 nt, Human herpesvirus 5
ugcggggucgacug

SEQ ID NO: 2033300 - RNA, 15 nt, Human herpesvirus 5
ugcgggguggugcuc

SEQ ID NO: 2033301 - RNA, 18 nt, Human herpesvirus 5
ugcggcguucgcgugcac

SEQ ID NO: 2033302 - RNA, 14 nt, Human herpesvirus 5
ugcgcuucugcagc

SEQ ID NO: 2033303 - RNA, 14 nt, Human herpesvirus 5
ugcggaucgcggua

SEQ ID NO: 2033304 - RNA, 14 nt, Human herpesvirus 5
ugcggcgcagacgu

SEQ ID NO: 2033305 - RNA, 14 nt, Human herpesvirus 5
ugcagacgguggug

SEQ ID NO: 2033306 - RNA, 13 nt, Human herpesvirus 5
ugcgcgucaaccg

SEQ ID NO: 2033307 - RNA, 13 nt, Human herpesvirus 5
ugcgcgucgaccu

SEQ ID NO: 2033308 - RNA, 15 nt, Human herpesvirus 5
ugcggcacagcgucg

SEQ ID NO: 2033309 - RNA, 13 nt, Human herpesvirus 5
uggggugggcgcg

SEQ ID NO: 2033310 - RNA, 18 nt, Human herpesvirus 5
uggucgagcgcgaccgcc

SEQ ID NO: 2033311 - RNA, 18 nt, Human herpesvirus 5
ugggucugcgcugccccg

SEQ ID NO: 2033312 - RNA, 13 nt, Human herpesvirus 5
ugggugaaaccga

SEQ ID NO: 2033313 - RNA, 19 nt, Human herpesvirus 5
ugggcauacgcgauaucug

SEQ ID NO: 2033314 - RNA, 13 nt, Human herpesvirus 5
uggggcugcgucg

SEQ ID NO: 2033315 - RNA, 11 nt, Human herpesvirus 5
uggggcugcug

SEQ ID NO: 2033316 - RNA, 23 nt, Human herpesvirus 5
ugggccaggacccguacugcgac

SEQ ID NO: 2033317 - RNA, 15 nt, Human herpesvirus 5
ugggcgcccccaccc

SEQ ID NO: 2033318 - RNA, 19 nt, Human herpesvirus 5
uguugacccagggcugcuc

SEQ ID NO: 2033319 - RNA, 13 nt, Human herpesvirus 5
uguggggcugcuc

SEQ ID NO: 2033320 - RNA, 16 nt, Human herpesvirus 5
uguacguaccacggua

SEQ ID NO: 2033321 - RNA, 23 nt, Human herpesvirus 5
ugguuuauaagaagacuccaccg

SEQ ID NO: 2033322 - RNA, 21 nt, Human herpesvirus 5
uguccgcggcgugaccacguc

SEQ ID NO: 2033323 - RNA, 14 nt, Human herpesvirus 5
uguccaccgacgcg

SEQ ID NO: 2033324 - RNA, 15 nt, Human herpesvirus 5
uguccucuccuccuu

SEQ ID NO: 2033325 - RNA, 22 nt, Human herpesvirus 5
ugucgccacuauguccuccgca

SEQ ID NO: 2033326 - RNA, 16 nt, Human herpesvirus 5
ugucgcgacaaucgcc

SEQ ID NO: 2033327 - RNA, 16 nt, Human herpesvirus 5
ugucgcguccacgggc

SEQ ID NO: 2033328 - RNA, 23 nt, Human herpesvirus 5
ugucggcgugaaugggcacgccg

SEQ ID NO: 2033329 - RNA, 16 nt, Human herpesvirus 5
ugucguccgaaucgcc

SEQ ID NO: 2033330 - RNA, 16 nt, Human herpesvirus 5
guggagaugaggcggc

SEQ ID NO: 2033331 - RNA, 14 nt, Human herpesvirus 5
guggcaccgccucc

SEQ ID NO: 2033332 - RNA, 21 nt, Human herpesvirus 5
guggcggcgguggagggcgcg

SEQ ID NO: 2033333 - RNA, 11 nt, Human herpesvirus 5
gugcuguugga

SEQ ID NO: 2033334 - RNA, 23 nt, Human herpesvirus 5
guggccgcgcuggcucgcgacga

SEQ ID NO: 2033335 - RNA, 15 nt, Human herpesvirus 5
gugcguggaccagac

SEQ ID NO: 2033336 - RNA, 22 nt, Human herpesvirus 5
gugcugauucgcgccgugcgcg

SEQ ID NO: 2033337 - RNA, 22 nt, Human herpesvirus 5
gugcucgacuuuacggugcgcg

SEQ ID NO: 2033338 - RNA, 16 nt, Human herpesvirus 5
uaccgaggcgccgcca

SEQ ID NO: 2033339 - RNA, 13 nt, Human herpesvirus 5
uaccgccccaccg

SEQ ID NO: 2033340 - RNA, 16 nt, Human herpesvirus 5
uaccgccccaccgccg

SEQ ID NO: 2033341 - RNA, 15 nt, Human herpesvirus 5
guucacacgucguua

SEQ ID NO: 2033342 - RNA, 19 nt, Human herpesvirus 5
guucacgcgcggaacccac

SEQ ID NO: 2033343 - RNA, 21 nt, Human herpesvirus 5
guucaucacguacacguuggg

SEQ ID NO: 2033344 - RNA, 17 nt, Human herpesvirus 5
guucaucgucuacgucg

SEQ ID NO: 2033345 - RNA, 19 nt, Human herpesvirus 5
guucaucgucuacgucguu

SEQ ID NO: 2033346 - RNA, 16 nt, Human herpesvirus 5
guguucuuacuccguc

SEQ ID NO: 2033347 - RNA, 18 nt, Human herpesvirus 5
guguuucgguccgaugua

SEQ ID NO: 2033348 - RNA, 17 nt, Human herpesvirus 5
guguuuucaccgacgug

SEQ ID NO: 2033349 - RNA, 20 nt, Human herpesvirus 5
guguuuuucccauucccugu

SEQ ID NO: 2033350 - RNA, 12 nt, Human herpesvirus 5
gugucgugacgu

SEQ ID NO: 2033351 - RNA, 15 nt, Human herpesvirus 5
guuacggcaacagcg

SEQ ID NO: 2033352 - RNA, 21 nt, Human herpesvirus 5
guuagcuuuugcccgcacgcc

SEQ ID NO: 2033353 - RNA, 22 nt, Human herpesvirus 5
guggggcugcgucgccugcgac

SEQ ID NO: 2033354 - RNA, 16 nt, Human herpesvirus 5
gugggaaugguaaaga

SEQ ID NO: 2033355 - RNA, 22 nt, Human herpesvirus 5
gugggcaagaugggcaccgucu

SEQ ID NO: 2033356 - RNA, 13 nt, Human herpesvirus 5
guggugacggugg

SEQ ID NO: 2033357 - RNA, 13 nt, Human herpesvirus 5
guggugaucgugg

SEQ ID NO: 2033358 - RNA, 13 nt, Human herpesvirus 5
guggucccggaua

SEQ ID NO: 2033359 - RNA, 17 nt, Human herpesvirus 5
guguaccaucuggcgca

SEQ ID NO: 2033360 - RNA, 18 nt, Human herpesvirus 5
guguagauuuauggaaaa

SEQ ID NO: 2033361 - RNA, 23 nt, Human herpesvirus 5
uagaccaaaccggacgcugccuc

SEQ ID NO: 2033362 - RNA, 22 nt, Human herpesvirus 5
uagccagcuguguauaguuugu

SEQ ID NO: 2033363 - RNA, 19 nt, Human herpesvirus 5
uacgagaucagccgugaga

SEQ ID NO: 2033364 - RNA, 18 nt, Human herpesvirus 5
guuaacccccgacgagca

SEQ ID NO: 2033365 - RNA, 13 nt, Human herpesvirus 5
uaccccgccgccg

SEQ ID NO: 2033366 - RNA, 14 nt, Human herpesvirus 5
uaccacuacuaccu

SEQ ID NO: 2033367 - RNA, 19 nt, Human herpesvirus 5
uacgcgccuuuugaucgcc

SEQ ID NO: 2033368 - RNA, 20 nt, Human herpesvirus 5
uacgauaauugcuacgucac

SEQ ID NO: 2033369 - RNA, 14 nt, Human herpesvirus 5
uacgcacgucgccg

SEQ ID NO: 2033370 - RNA, 14 nt, Human herpesvirus 5
ugccugggcacgcg

SEQ ID NO: 2033371 - RNA, 18 nt, Human herpesvirus 5
ugcgcaccuucggcggua

SEQ ID NO: 2033372 - RNA, 13 nt, Human herpesvirus 5
ugcgccuuccagu

SEQ ID NO: 2033373 - RNA, 14 nt, Human herpesvirus 5
ugcgcgacacggcu

SEQ ID NO: 2033374 - RNA, 20 nt, Human herpesvirus 5
ugccugcacgaccugcucca

SEQ ID NO: 2033375 - RNA, 20 nt, Human herpesvirus 5
ugccuggacgccugggcgcg

SEQ ID NO: 2033376 - RNA, 23 nt, Human herpesvirus 5
ugcgccgagcggccguugcccgg

SEQ ID NO: 2033377 - RNA, 17 nt, Human herpesvirus 5
ugcagcugcaccacggc

SEQ ID NO: 2033378 - RNA, 24 nt, Human herpesvirus 5
ugccggucuacagacugggcgacg

SEQ ID NO: 2033379 - RNA, 19 nt, Human herpesvirus 5
ugccgugacgucgcggcac

SEQ ID NO: 2033380 - RNA, 22 nt, Human herpesvirus 5
ugcagcgaauugagcaacaaac

SEQ ID NO: 2033381 - RNA, 23 nt, Human herpesvirus 5
ucugaccuugcugaugugccagc

SEQ ID NO: 2033382 - RNA, 19 nt, Human herpesvirus 5
ucugacgcugucuugcuua

SEQ ID NO: 2033383 - RNA, 14 nt, Human herpesvirus 5
ucuugcccacgccg

SEQ ID NO: 2033384 - RNA, 16 nt, Human herpesvirus 5
ucuugcccacgccguc

SEQ ID NO: 2033385 - RNA, 21 nt, Human herpesvirus 5
ucuugcgauguagcagaaaac

SEQ ID NO: 2033386 - RNA, 15 nt, Human herpesvirus 5
ugcaacgcgugaaac

SEQ ID NO: 2033387 - RNA, 22 nt, Human herpesvirus 5
ugcaccuggguggaacgagcgc

SEQ ID NO: 2033388 - RNA, 20 nt, Human herpesvirus 5
ucuggugcuauggcugcuca

SEQ ID NO: 2033389 - RNA, 23 nt, Human herpesvirus 5
ucugccggcugcggcggcacucg

SEQ ID NO: 2033390 - RNA, 12 nt, Human herpesvirus 5
ucucaccgugcu

SEQ ID NO: 2033391 - RNA, 13 nt, Human herpesvirus 5
ucucgcguucgug

SEQ ID NO: 2033392 - RNA, 19 nt, Human herpesvirus 5
ucuccuccgucgcggccag

SEQ ID NO: 2033393 - RNA, 14 nt, Human herpesvirus 5
ucucgcgcaucgcc

SEQ ID NO: 2033394 - RNA, 13 nt, Human herpesvirus 5
ucuacgcgugcac

SEQ ID NO: 2033395 - RNA, 17 nt, Human herpesvirus 5
ucuagcuggcggccucu

SEQ ID NO: 2033396 - RNA, 23 nt, Human herpesvirus 5
ucuauaggcgguacuuacgucac

SEQ ID NO: 2033397 - RNA, 13 nt, Human herpesvirus 5
ucuaucuguuggc

SEQ ID NO: 2033398 - RNA, 23 nt, Human herpesvirus 5
uaucagaggccacccacccggug

SEQ ID NO: 2033399 - RNA, 21 nt, Human herpesvirus 5
uauagcaaucuccgucacgcc

SEQ ID NO: 2033400 - RNA, 15 nt, Human herpesvirus 5
uaucgggauaucgcc

SEQ ID NO: 2033401 - RNA, 13 nt, Human herpesvirus 5
ucguguacuaccg

SEQ ID NO: 2033402 - RNA, 22 nt, Human herpesvirus 5
uauacaaucauaauauucuaua

SEQ ID NO: 2033403 - RNA, 16 nt, Human herpesvirus 5
uauacaucuccgucuc

SEQ ID NO: 2033404 - RNA, 19 nt, Human herpesvirus 5
uagguguggcgaaagccuc

SEQ ID NO: 2033405 - RNA, 22 nt, Human herpesvirus 5
uaguaauggaaaguaucgucac

SEQ ID NO: 2033406 - RNA, 12 nt, Human herpesvirus 5
uaggagacgagc

SEQ ID NO: 2033407 - RNA, 15 nt, Human herpesvirus 5
uaguauccacgucac

SEQ ID NO: 2033408 - RNA, 13 nt, Human herpesvirus 5
uaguauucugcgu

SEQ ID NO: 2033409 - RNA, 14 nt, Human herpesvirus 5
gccgaccgccgccg

SEQ ID NO: 2033410 - RNA, 11 nt, Human herpesvirus 5
gccgacgaggc

SEQ ID NO: 2033411 - RNA, 16 nt, Human herpesvirus 5
gccgcucagcgagcuc

SEQ ID NO: 2033412 - RNA, 21 nt, Human herpesvirus 5
gccgcucgggaacagacccga

SEQ ID NO: 2033413 - RNA, 18 nt, Human herpesvirus 5
gccgcuggacugacacag

SEQ ID NO: 2033414 - RNA, 14 nt, Human herpesvirus 5
gccgcugccgccgc

SEQ ID NO: 2033415 - RNA, 17 nt, Human herpesvirus 5
gccgcuuuucagaccgc

SEQ ID NO: 2033416 - RNA, 22 nt, Human herpesvirus 5
gccgcuuuucagaccgcaacaa

SEQ ID NO: 2033417 - RNA, 15 nt, Human herpesvirus 5
gccggacggcagcgu

SEQ ID NO: 2033418 - RNA, 22 nt, Human herpesvirus 5
gccguguaaugggggugggcga

SEQ ID NO: 2033419 - RNA, 20 nt, Human herpesvirus 5
gccguguguuaccgccgccg

SEQ ID NO: 2033420 - RNA, 21 nt, Human herpesvirus 5
gccguguguuaccgccgccgc

SEQ ID NO: 2033421 - RNA, 22 nt, Human herpesvirus 5
gccguguguuggcuacggcgga

SEQ ID NO: 2033422 - RNA, 16 nt, Human herpesvirus 5
gccuaccugacgccga

SEQ ID NO: 2033423 - RNA, 19 nt, Human herpesvirus 5
gccggccguuacgccgacg

SEQ ID NO: 2033424 - RNA, 16 nt, Human herpesvirus 5
gccggcggagacgacg

SEQ ID NO: 2033425 - RNA, 22 nt, Human herpesvirus 5
gccgugcucuuggcgccgcggu

SEQ ID NO: 2033426 - RNA, 18 nt, Human herpesvirus 5
gccggcgacugacgccgg

SEQ ID NO: 2033427 - RNA, 18 nt, Human herpesvirus 5
gccggcgagcgacgcggc

SEQ ID NO: 2033428 - RNA, 13 nt, Human herpesvirus 5
gccgacucgcugc

SEQ ID NO: 2033429 - RNA, 14 nt, Human herpesvirus 5
gccgagacgcugcg

SEQ ID NO: 2033430 - RNA, 13 nt, Human herpesvirus 5
gccgagacggcgu

SEQ ID NO: 2033431 - RNA, 14 nt, Human herpesvirus 5
gccgagacggcgug

SEQ ID NO: 2033432 - RNA, 15 nt, Human herpesvirus 5
gccgagacggcguga

SEQ ID NO: 2033433 - RNA, 14 nt, Human herpesvirus 5
gccgacaaccugcu

SEQ ID NO: 2033434 - RNA, 17 nt, Human herpesvirus 5
gcccuuuacggugcugc

SEQ ID NO: 2033435 - RNA, 19 nt, Human herpesvirus 5
gccgacgcgcgcccgcgcc

SEQ ID NO: 2033436 - RNA, 17 nt, Human herpesvirus 5
gccgauccacgggccgc

SEQ ID NO: 2033437 - RNA, 20 nt, Human herpesvirus 5
gccgauccacgggccgcgcu

SEQ ID NO: 2033438 - RNA, 11 nt, Human herpesvirus 5
gccgcaacagc

SEQ ID NO: 2033439 - RNA, 14 nt, Human herpesvirus 5
gccgcaacagcggc

SEQ ID NO: 2033440 - RNA, 18 nt, Human herpesvirus 5
gccgaggcuacugcugcu

SEQ ID NO: 2033441 - RNA, 12 nt, Human herpesvirus 5
gccgagucuccg

SEQ ID NO: 2033442 - RNA, 19 nt, Human herpesvirus 5
gccgagucuccgcgcaaca

SEQ ID NO: 2033443 - RNA, 16 nt, Human herpesvirus 5
gccgagcuaugcgagc

SEQ ID NO: 2033444 - RNA, 20 nt, Human herpesvirus 5
gccgcgucgcaaacgcugcu

SEQ ID NO: 2033445 - RNA, 14 nt, Human herpesvirus 5
gccgccaacgccga

SEQ ID NO: 2033446 - RNA, 15 nt, Human herpesvirus 5
gccgccaacgcgagc

SEQ ID NO: 2033447 - RNA, 17 nt, Human herpesvirus 5
gccgccaccacccgacu

SEQ ID NO: 2033448 - RNA, 22 nt, Human herpesvirus 5
gccgccaccacccgacugcagc

SEQ ID NO: 2033449 - RNA, 20 nt, Human herpesvirus 5
gccgcacgcgcuuaggacga

SEQ ID NO: 2033450 - RNA, 11 nt, Human herpesvirus 5
gugccaacaau

SEQ ID NO: 2033451 - RNA, 17 nt, Human herpesvirus 5
gugcaugacaacgggaa

SEQ ID NO: 2033452 - RNA, 22 nt, Human herpesvirus 5
gugcagcaagaguugcaacgcg

SEQ ID NO: 2033453 - RNA, 23 nt, Human herpesvirus 5
gugcagcaucgcgugcgccuccg

SEQ ID NO: 2033454 - RNA, 23 nt, Human herpesvirus 5
gugacgcagucugcccugcgcag

SEQ ID NO: 2033455 - RNA, 19 nt, Human herpesvirus 5
gugacgcuaggcggcgccg

SEQ ID NO: 2033456 - RNA, 13 nt, Human herpesvirus 5
gugaacgugcgcg

SEQ ID NO: 2033457 - RNA, 13 nt, Human herpesvirus 5
gugaauggaaaua

SEQ ID NO: 2033458 - RNA, 16 nt, Human herpesvirus 5
gugaauucuggcaaga

SEQ ID NO: 2033459 - RNA, 14 nt, Human herpesvirus 5
gugagcaacagucg

SEQ ID NO: 2033460 - RNA, 14 nt, Human herpesvirus 5
gucuuuugcacgcg

SEQ ID NO: 2033461 - RNA, 15 nt, Human herpesvirus 5
gucuggcccaaagac

SEQ ID NO: 2033462 - RNA, 20 nt, Human herpesvirus 5
gucuggcuuuaccgccgucg

SEQ ID NO: 2033463 - RNA, 17 nt, Human herpesvirus 5
gucguguccgugaucac

SEQ ID NO: 2033464 - RNA, 22 nt, Human herpesvirus 5
gucucuaccaacgcuuccugcg

SEQ ID NO: 2033465 - RNA, 14 nt, Human herpesvirus 5
gucugagcgccgac

SEQ ID NO: 2033466 - RNA, 20 nt, Human herpesvirus 5
gucuagauagucccacaggg

SEQ ID NO: 2033467 - RNA, 13 nt, Human herpesvirus 5
gucuccaccacag

SEQ ID NO: 2033468 - RNA, 22 nt, Human herpesvirus 5
gucuccaugauugugccgcguu

SEQ ID NO: 2033469 - RNA, 21 nt, Human herpesvirus 5
gucucgcgucuucgcgagguc

SEQ ID NO: 2033470 - RNA, 22 nt, Human herpesvirus 5
ggaaccaccguagcacugcgca

SEQ ID NO: 2033471 - RNA, 22 nt, Human herpesvirus 5
ggaagcuuuggucgccugcacu

SEQ ID NO: 2033472 - RNA, 21 nt, Human herpesvirus 5
ggaagccggucgucugcgacu

SEQ ID NO: 2033473 - RNA, 16 nt, Human herpesvirus 5
ggaagcgaauaagcgc

SEQ ID NO: 2033474 - RNA, 15 nt, Human herpesvirus 5
ggacaaguacagcgg

SEQ ID NO: 2033475 - RNA, 20 nt, Human herpesvirus 5
guagcgcuugcggcacagcg

SEQ ID NO: 2033476 - RNA, 20 nt, Human herpesvirus 5
ggacccguacugcgacggca

SEQ ID NO: 2033477 - RNA, 15 nt, Human herpesvirus 5
ggaccgacacggagg

SEQ ID NO: 2033478 - RNA, 16 nt, Human herpesvirus 5
ggacauggacucgcca

SEQ ID NO: 2033479 - RNA, 18 nt, Human herpesvirus 5
ggacauggacucgccacg

SEQ ID NO: 2033480 - RNA, 19 nt, Human herpesvirus 5
guacucgcaggugugcgcg

SEQ ID NO: 2033481 - RNA, 13 nt, Human herpesvirus 5
guaggaggcgcgc

SEQ ID NO: 2033482 - RNA, 14 nt, Human herpesvirus 5
guaggaguggcgcc

SEQ ID NO: 2033483 - RNA, 15 nt, Human herpesvirus 5
guaggaucuucgucg

SEQ ID NO: 2033484 - RNA, 16 nt, Human herpesvirus 5
guauccauuggagaac

SEQ ID NO: 2033485 - RNA, 12 nt, Human herpesvirus 5
guauggcugcgc

SEQ ID NO: 2033486 - RNA, 19 nt, Human herpesvirus 5
guauucccccggacgggca

SEQ ID NO: 2033487 - RNA, 19 nt, Human herpesvirus 5
guauucaucgggucgucuc

SEQ ID NO: 2033488 - RNA, 14 nt, Human herpesvirus 5
gucacgcaggugag

SEQ ID NO: 2033489 - RNA, 20 nt, Human herpesvirus 5
gucaccaguuccugcgcgcc

SEQ ID NO: 2033490 - RNA, 17 nt, Human herpesvirus 5
gucaccucucgggccga

SEQ ID NO: 2033491 - RNA, 19 nt, Human herpesvirus 5
gucacgcguuauacgccga

SEQ ID NO: 2033492 - RNA, 19 nt, Human herpesvirus 5
gucaacacuaccaaguacc

SEQ ID NO: 2033493 - RNA, 17 nt, Human herpesvirus 5
gucaacaucaucagcgc

SEQ ID NO: 2033494 - RNA, 20 nt, Human herpesvirus 5
gucaaccacccgccggaacg

SEQ ID NO: 2033495 - RNA, 14 nt, Human herpesvirus 5
gucaagacgcugaa

SEQ ID NO: 2033496 - RNA, 20 nt, Human herpesvirus 5
gucaaggcucgcaaagacgu

SEQ ID NO: 2033497 - RNA, 14 nt, Human herpesvirus 5
gucgcuccgcgucg

SEQ ID NO: 2033498 - RNA, 15 nt, Human herpesvirus 5
gucgcuucgccgcca

SEQ ID NO: 2033499 - RNA, 11 nt, Human herpesvirus 5
gucggaaacgg

SEQ ID NO: 2033500 - RNA, 18 nt, Human herpesvirus 5
gucgcgucggcguaacaa

SEQ ID NO: 2033501 - RNA, 15 nt, Human herpesvirus 5
gucgcguguaggcga

SEQ ID NO: 2033502 - RNA, 16 nt, Human herpesvirus 5
gucggcgguccuccag

SEQ ID NO: 2033503 - RNA, 18 nt, Human herpesvirus 5
gucggagccccugcgcgc

SEQ ID NO: 2033504 - RNA, 17 nt, Human herpesvirus 5
gucggccugggcugcug

SEQ ID NO: 2033505 - RNA, 13 nt, Human herpesvirus 5
gucggcgccgccg

SEQ ID NO: 2033506 - RNA, 13 nt, Human herpesvirus 5
gucggcgccgccu

SEQ ID NO: 2033507 - RNA, 19 nt, Human herpesvirus 5
gucggucccaucgcccaca

SEQ ID NO: 2033508 - RNA, 22 nt, Human herpesvirus 5
gucgugagcagcgugcaccugc

SEQ ID NO: 2033509 - RNA, 16 nt, Human herpesvirus 5
gucgugcucuugacgg

SEQ ID NO: 2033510 - RNA, 13 nt, Human herpesvirus 5
gucggugcgccca

SEQ ID NO: 2033511 - RNA, 17 nt, Human herpesvirus 5
gucgguggaaccgugcc

SEQ ID NO: 2033512 - RNA, 22 nt, Human herpesvirus 5
gucgguuuuuucaccgucgucg

SEQ ID NO: 2033513 - RNA, 14 nt, Human herpesvirus 5
gucgggccgucgcg

SEQ ID NO: 2033514 - RNA, 13 nt, Human herpesvirus 5
gccuccucgcugg

SEQ ID NO: 2033515 - RNA, 13 nt, Human herpesvirus 5
gccucggguugcc

SEQ ID NO: 2033516 - RNA, 17 nt, Human herpesvirus 5
gccuccgacgacgccga

SEQ ID NO: 2033517 - RNA, 19 nt, Human herpesvirus 5
gccuaggucuguugcguug

SEQ ID NO: 2033518 - RNA, 23 nt, Human herpesvirus 5
gccugccgcacgcgcuagccuuu

SEQ ID NO: 2033519 - RNA, 16 nt, Human herpesvirus 5
gccucgauccauccug

SEQ ID NO: 2033520 - RNA, 17 nt, Human herpesvirus 5
gccugcaccaaccgacg

SEQ ID NO: 2033521 - RNA, 16 nt, Human herpesvirus 5
gccugcacgaccugcu

SEQ ID NO: 2033522 - RNA, 19 nt, Human herpesvirus 5
gcgggcacuggggacggug

SEQ ID NO: 2033523 - RNA, 14 nt, Human herpesvirus 5
gcguggccggcgug

SEQ ID NO: 2033524 - RNA, 17 nt, Human herpesvirus 5
gcguggcggccgacggc

SEQ ID NO: 2033525 - RNA, 21 nt, Human herpesvirus 5
gcguucgugauucguaggcag

SEQ ID NO: 2033526 - RNA, 19 nt, Human herpesvirus 5
gcguggaccagacggcguc

SEQ ID NO: 2033527 - RNA, 14 nt, Human herpesvirus 5
gcguggacugggac

SEQ ID NO: 2033528 - RNA, 19 nt, Human herpesvirus 5
gcguguggaggacggggug

SEQ ID NO: 2033529 - RNA, 17 nt, Human herpesvirus 5
gcgugugggugaaaccg

SEQ ID NO: 2033530 - RNA, 21 nt, Human herpesvirus 5
gcgggggaaaaacaaagaagu

SEQ ID NO: 2033531 - RNA, 15 nt, Human herpesvirus 5
gcgguaucgcgcaca

SEQ ID NO: 2033532 - RNA, 17 nt, Human herpesvirus 5
gcgguacccgacgcggc

SEQ ID NO: 2033533 - RNA, 16 nt, Human herpesvirus 5
gcgguacugaagccgc

SEQ ID NO: 2033534 - RNA, 13 nt, Human herpesvirus 5
gcgguagagcucg

SEQ ID NO: 2033535 - RNA, 19 nt, Human herpesvirus 5
gcggguccauuggagccgc

SEQ ID NO: 2033536 - RNA, 16 nt, Human herpesvirus 5
gcguuguuuacccccg

SEQ ID NO: 2033537 - RNA, 15 nt, Human herpesvirus 5
gcuccucggagcacg

SEQ ID NO: 2033538 - RNA, 14 nt, Human herpesvirus 5
gcguuuggucgccu

SEQ ID NO: 2033539 - RNA, 17 nt, Human herpesvirus 5
gcuaagaugaacgggug

SEQ ID NO: 2033540 - RNA, 20 nt, Human herpesvirus 5
gcuaccucaugacgcacgcc

SEQ ID NO: 2033541 - RNA, 13 nt, Human herpesvirus 5
gcucgcucgcgcc

SEQ ID NO: 2033542 - RNA, 17 nt, Human herpesvirus 5
gcucgcucugacgccgc

SEQ ID NO: 2033543 - RNA, 18 nt, Human herpesvirus 5
gcucggacacagcgccgc

SEQ ID NO: 2033544 - RNA, 19 nt, Human herpesvirus 5
gcucggaccgugacggugg

SEQ ID NO: 2033545 - RNA, 18 nt, Human herpesvirus 5
gcugcucggcguggucaa

SEQ ID NO: 2033546 - RNA, 19 nt, Human herpesvirus 5
gcugcugagacugagacug

SEQ ID NO: 2033547 - RNA, 17 nt, Human herpesvirus 5
gcugccgcucagcgagc

SEQ ID NO: 2033548 - RNA, 20 nt, Human herpesvirus 5
gcugcgcaauaugacgcuga

SEQ ID NO: 2033549 - RNA, 19 nt, Human herpesvirus 5
gcuuuauccgacucgcugu

SEQ ID NO: 2033550 - RNA, 19 nt, Human herpesvirus 5
gcuuucgcgucuuuuuucu

SEQ ID NO: 2033551 - RNA, 17 nt, Human herpesvirus 5
gcuuuuggugcgccacg

SEQ ID NO: 2033552 - RNA, 20 nt, Human herpesvirus 5
ggaaaugcccgccaccaugc

SEQ ID NO: 2033553 - RNA, 17 nt, Human herpesvirus 5
ggaacaacccgucgucg

SEQ ID NO: 2033554 - RNA, 20 nt, Human herpesvirus 5
gcugcuguugugggugcgga

SEQ ID NO: 2033555 - RNA, 14 nt, Human herpesvirus 5
gcugcuucauccag

SEQ ID NO: 2033556 - RNA, 16 nt, Human herpesvirus 5
gcugcuuucgcacgca

SEQ ID NO: 2033557 - RNA, 17 nt, Human herpesvirus 5
cgggcgcgcaucgccgu

SEQ ID NO: 2033558 - RNA, 15 nt, Human herpesvirus 5
cggggugccgccgcu

SEQ ID NO: 2033559 - RNA, 20 nt, Human herpesvirus 5
cgguaugggucacggcggcg

SEQ ID NO: 2033560 - RNA, 13 nt, Human herpesvirus 5
cgguacacguccc

SEQ ID NO: 2033561 - RNA, 14 nt, Human herpesvirus 5
cgguaccacuacua

SEQ ID NO: 2033562 - RNA, 14 nt, Human herpesvirus 5
cgguaccagacgcg

SEQ ID NO: 2033563 - RNA, 22 nt, Human herpesvirus 5
cgguacgcagucacugcguguc

SEQ ID NO: 2033564 - RNA, 18 nt, Human herpesvirus 5
cgguacugaagccgccgu

SEQ ID NO: 2033565 - RNA, 13 nt, Human herpesvirus 5
cgggugacggcga

SEQ ID NO: 2033566 - RNA, 14 nt, Human herpesvirus 5
cgggugacggcgac

SEQ ID NO: 2033567 - RNA, 14 nt, Human herpesvirus 5
cgguaaaaccacgu

SEQ ID NO: 2033568 - RNA, 17 nt, Human herpesvirus 5
cgcgugcacgcgcugcu

SEQ ID NO: 2033569 - RNA, 17 nt, Human herpesvirus 5
cgggcucgaccggcggc

SEQ ID NO: 2033570 - RNA, 18 nt, Human herpesvirus 5
cgucaucucgccgacgug

SEQ ID NO: 2033571 - RNA, 20 nt, Human herpesvirus 5
cgucaucucgccgacguggu

SEQ ID NO: 2033572 - RNA, 21 nt, Human herpesvirus 5
cgucagccucgggugcaccgc

SEQ ID NO: 2033573 - RNA, 22 nt, Human herpesvirus 5
cgucacucuuggcacggggaau

SEQ ID NO: 2033574 - RNA, 16 nt, Human herpesvirus 5
cgucacuucaaccacg

SEQ ID NO: 2033575 - RNA, 16 nt, Human herpesvirus 5
cgucacaauugacgug

SEQ ID NO: 2033576 - RNA, 20 nt, Human herpesvirus 5
cgucccgcgcggaucggaca

SEQ ID NO: 2033577 - RNA, 21 nt, Human herpesvirus 5
cgucaugccuuggcgcucugg

SEQ ID NO: 2033578 - RNA, 20 nt, Human herpesvirus 5
cguccgggcuuuccuuguca

SEQ ID NO: 2033579 - RNA, 21 nt, Human herpesvirus 5
cguccgaaucgccggcuugcu

SEQ ID NO: 2033580 - RNA, 21 nt, Human herpesvirus 5
cggucugagcuccgacgcagg

SEQ ID NO: 2033581 - RNA, 22 nt, Human herpesvirus 5
cgguccgcggugucuccucgcg

SEQ ID NO: 2033582 - RNA, 22 nt, Human herpesvirus 5
cggugcguggaccagacggcgu

SEQ ID NO: 2033583 - RNA, 18 nt, Human herpesvirus 5
cggugaggaggacggcga

SEQ ID NO: 2033584 - RNA, 15 nt, Human herpesvirus 5
cggugcaggccgcgc

SEQ ID NO: 2033585 - RNA, 14 nt, Human herpesvirus 5
cggugagacgaggc

SEQ ID NO: 2033586 - RNA, 16 nt, Human herpesvirus 5
cgucgccgccgucgcg

SEQ ID NO: 2033587 - RNA, 14 nt, Human herpesvirus 5
cgucgacaugucgc

SEQ ID NO: 2033588 - RNA, 13 nt, Human herpesvirus 5
cgucgacggugaa

SEQ ID NO: 2033589 - RNA, 13 nt, Human herpesvirus 5
cucuugcgcccuc

SEQ ID NO: 2033590 - RNA, 18 nt, Human herpesvirus 5
cgucgccugcgacggcgg

SEQ ID NO: 2033591 - RNA, 22 nt, Human herpesvirus 5
cgucgaccuugagcgacagcag

SEQ ID NO: 2033592 - RNA, 14 nt, Human herpesvirus 5
cguccucguggcgg

SEQ ID NO: 2033593 - RNA, 19 nt, Human herpesvirus 5
cgucgcagccaccggcgca

SEQ ID NO: 2033594 - RNA, 20 nt, Human herpesvirus 5
cgucgcaucaucaacagcag

SEQ ID NO: 2033595 - RNA, 15 nt, Human herpesvirus 5
cgucgagcacccguc

SEQ ID NO: 2033596 - RNA, 14 nt, Human herpesvirus 5
cgucgagcggcgug

SEQ ID NO: 2033597 - RNA, 23 nt, Human herpesvirus 5
cugaccgguaaggcggaaaaaga

SEQ ID NO: 2033598 - RNA, 23 nt, Human herpesvirus 5
cugauggccgacgaggccggcgg

SEQ ID NO: 2033599 - RNA, 19 nt, Human herpesvirus 5
cugcaacggcaucauguuc

SEQ ID NO: 2033600 - RNA, 17 nt, Human herpesvirus 5
cugcaccaaccgacgua

SEQ ID NO: 2033601 - RNA, 18 nt, Human herpesvirus 5
cugcaccucgugcgagga

SEQ ID NO: 2033602 - RNA, 22 nt, Human herpesvirus 5
cugcacgacaucuuccgcgagc

SEQ ID NO: 2033603 - RNA, 23 nt, Human herpesvirus 5
cugcacgacaucuuccgcgagca

SEQ ID NO: 2033604 - RNA, 20 nt, Human herpesvirus 5
cugacguggugcgcugcguu

SEQ ID NO: 2033605 - RNA, 22 nt, Human herpesvirus 5
cugacguggugcgcugcguucg

SEQ ID NO: 2033606 - RNA, 20 nt, Human herpesvirus 5
cucuuggcgccgcggugguc

SEQ ID NO: 2033607 - RNA, 16 nt, Human herpesvirus 5
cugaagccgccgucga

SEQ ID NO: 2033608 - RNA, 18 nt, Human herpesvirus 5
cuuguucucgaccacgua

SEQ ID NO: 2033609 - RNA, 17 nt, Human herpesvirus 5
cuuuggcuacgguggug

SEQ ID NO: 2033610 - RNA, 21 nt, Human herpesvirus 5
cuuucacaccgauuuucgcgg

SEQ ID NO: 2033611 - RNA, 20 nt, Human herpesvirus 5
cuuggcggccgagucuccgc

SEQ ID NO: 2033612 - RNA, 12 nt, Human herpesvirus 5
cuugcccggcgu

SEQ ID NO: 2033613 - RNA, 19 nt, Human herpesvirus 5
cuugguacgcugacguggu

SEQ ID NO: 2033614 - RNA, 23 nt, Human herpesvirus 5
cuuggucacggcuauaaaaaaga

SEQ ID NO: 2033615 - RNA, 19 nt, Human herpesvirus 5
cuucuaccuggcuggcgca

SEQ ID NO: 2033616 - RNA, 14 nt, Human herpesvirus 5
cuugcccacgccgu

SEQ ID NO: 2033617 - RNA, 17 nt, Human herpesvirus 5
cuggcgcggucugcgug

SEQ ID NO: 2033618 - RNA, 14 nt, Human herpesvirus 5
cuucugcagcuccg

SEQ ID NO: 2033619 - RNA, 21 nt, Human herpesvirus 5
cuugcgcuucugcagcuccgc

SEQ ID NO: 2033620 - RNA, 22 nt, Human herpesvirus 5
cugcacgccgccgugacugcga

SEQ ID NO: 2033621 - RNA, 21 nt, Human herpesvirus 5
cuggacgcggugaacgugcgc

SEQ ID NO: 2033622 - RNA, 15 nt, Human herpesvirus 5
cuggacgcugcgucg

SEQ ID NO: 2033623 - RNA, 16 nt, Human herpesvirus 5
cugcagguacggcccg

SEQ ID NO: 2033624 - RNA, 15 nt, Human herpesvirus 5
cuggccgagacggcg

SEQ ID NO: 2033625 - RNA, 16 nt, Human herpesvirus 5
cuggccgagacggcgu

SEQ ID NO: 2033626 - RNA, 18 nt, Human herpesvirus 5
cugcuuuucgggccgcgg

SEQ ID NO: 2033627 - RNA, 17 nt, Human herpesvirus 5
cuggccgccgcugcacg

SEQ ID NO: 2033628 - RNA, 19 nt, Human herpesvirus 5
cuggagaagcgcagcgucg

SEQ ID NO: 2033629 - RNA, 16 nt, Human herpesvirus 5
cuggaucuuggcggcc

SEQ ID NO: 2033630 - RNA, 16 nt, Human herpesvirus 5
cuggcaacgugccacg

SEQ ID NO: 2033631 - RNA, 18 nt, Human herpesvirus 5
cuggcaacgugccacgug

SEQ ID NO: 2033632 - RNA, 17 nt, Human herpesvirus 5
cuggcaauuacgugggu

SEQ ID NO: 2033633 - RNA, 20 nt, Human herpesvirus 5
cuuuguuauuuuccucguaa

SEQ ID NO: 2033634 - RNA, 17 nt, Human herpesvirus 5
gaagauggccaucacgg

SEQ ID NO: 2033635 - RNA, 20 nt, Human herpesvirus 5
gaagcggagugcaucucgag

SEQ ID NO: 2033636 - RNA, 14 nt, Human herpesvirus 5
gaaggaacgcacgc

SEQ ID NO: 2033637 - RNA, 14 nt, Human herpesvirus 5
gacagcaaggccgc

SEQ ID NO: 2033638 - RNA, 19 nt, Human herpesvirus 5
gacagcaaggccgccgccg

SEQ ID NO: 2033639 - RNA, 23 nt, Human herpesvirus 5
gaagaccaugacgacggugacga

SEQ ID NO: 2033640 - RNA, 18 nt, Human herpesvirus 5
gaacuuuguagugcgcgc

SEQ ID NO: 2033641 - RNA, 13 nt, Human herpesvirus 5
gaagacggagcuc

SEQ ID NO: 2033642 - RNA, 23 nt, Human herpesvirus 5
gacagguaugggcgguggucggc

SEQ ID NO: 2033643 - RNA, 19 nt, Human herpesvirus 5
gacaggaggcugugcgcgc

SEQ ID NO: 2033644 - RNA, 15 nt, Human herpesvirus 5
gacaggcucgucgug

SEQ ID NO: 2033645 - RNA, 14 nt, Human herpesvirus 5
gacaucacggucac

SEQ ID NO: 2033646 - RNA, 17 nt, Human herpesvirus 5
gaccacguagucgcgcg

SEQ ID NO: 2033647 - RNA, 23 nt, Human herpesvirus 5
gaccaagugucucuaaacgccac

SEQ ID NO: 2033648 - RNA, 13 nt, Human herpesvirus 5
gaacgcgugcgcg

SEQ ID NO: 2033649 - RNA, 19 nt, Human herpesvirus 5
gacauuuuuucggccgcgg

SEQ ID NO: 2033650 - RNA, 18 nt, Human herpesvirus 5
gacauggagacaguuucc

SEQ ID NO: 2033651 - RNA, 17 nt, Human herpesvirus 5
gacauggagcccacgcc

SEQ ID NO: 2033652 - RNA, 16 nt, Human herpesvirus 5
gacccguacugcgacg

SEQ ID NO: 2033653 - RNA, 16 nt, Human herpesvirus 5
gaccgcaacaacagca

SEQ ID NO: 2033654 - RNA, 23 nt, Human herpesvirus 5
gacggcggcgcguugccacagcg

SEQ ID NO: 2033655 - RNA, 16 nt, Human herpesvirus 5
gacggcgacaucacgg

SEQ ID NO: 2033656 - RNA, 15 nt, Human herpesvirus 5
gccccacaugcugcu

SEQ ID NO: 2033657 - RNA, 13 nt, Human herpesvirus 5
gcccaaagaccgc

SEQ ID NO: 2033658 - RNA, 17 nt, Human herpesvirus 5
gcccagcaucuccucgc

SEQ ID NO: 2033659 - RNA, 22 nt, Human herpesvirus 5
gccaguacagcgccgacgugcu

SEQ ID NO: 2033660 - RNA, 14 nt, Human herpesvirus 5
gcccaccgccuccg

SEQ ID NO: 2033661 - RNA, 14 nt, Human herpesvirus 5
gcccacgaaggcgc

SEQ ID NO: 2033662 - RNA, 21 nt, Human herpesvirus 5
gacgggucucuuugacacgag

SEQ ID NO: 2033663 - RNA, 18 nt, Human herpesvirus 5
gacggugaugcguguggc

SEQ ID NO: 2033664 - RNA, 17 nt, Human herpesvirus 5
gacggcguuuuggcgcc

SEQ ID NO: 2033665 - RNA, 15 nt, Human herpesvirus 5
gacgugacgguguuu

SEQ ID NO: 2033666 - RNA, 18 nt, Human herpesvirus 5
gacggugguuuccgcgcc

SEQ ID NO: 2033667 - RNA, 15 nt, Human herpesvirus 5
gacgguuuccacgcc

SEQ ID NO: 2033668 - RNA, 17 nt, Human herpesvirus 5
gacgguuuccacgccac

SEQ ID NO: 2033669 - RNA, 20 nt, Human herpesvirus 5
gacgguuuccacgccaccgc

SEQ ID NO: 2033670 - RNA, 21 nt, Human herpesvirus 5
gacguagaaaaguaacacacg

SEQ ID NO: 2033671 - RNA, 16 nt, Human herpesvirus 5
gacguagguaccgacu

SEQ ID NO: 2033672 - RNA, 15 nt, Human herpesvirus 5
gacguugaugcggcg

SEQ ID NO: 2033673 - RNA, 23 nt, Human herpesvirus 5
gacguuagagaaagagcagcgcg

SEQ ID NO: 2033674 - RNA, 23 nt, Human herpesvirus 5
gacgugcgaugguauuacgcccg

SEQ ID NO: 2033675 - RNA, 20 nt, Human herpesvirus 5
gacuaugagggccugcggcg

SEQ ID NO: 2033676 - RNA, 13 nt, Human herpesvirus 5
aaaaaaaagagag

SEQ ID NO: 2033677 - RNA, 13 nt, Human herpesvirus 5
aaaaaaaggcguu

SEQ ID NO: 2033678 - RNA, 15 nt, Human herpesvirus 5
aaaaacacagagacg

SEQ ID NO: 2033679 - RNA, 19 nt, Human herpesvirus 5
aaaaacacgacgaaagcgu

SEQ ID NO: 2033680 - RNA, 14 nt, Human herpesvirus 5
caggaccacgucca

SEQ ID NO: 2033681 - RNA, 17 nt, Human herpesvirus 5
caggacgucaaccacgu

SEQ ID NO: 2033682 - RNA, 14 nt, Human herpesvirus 5
cacaagcgcccgaa

SEQ ID NO: 2033683 - RNA, 19 nt, Human herpesvirus 5
cagcugcuggagcgcggcc

SEQ ID NO: 2033684 - RNA, 19 nt, Human herpesvirus 5
cagcuggugaucggccgcg

SEQ ID NO: 2033685 - RNA, 14 nt, Human herpesvirus 5
cagcuuaccgccac

SEQ ID NO: 2033686 - RNA, 20 nt, Human herpesvirus 5
cagcuuaccgccaccgucgc

SEQ ID NO: 2033687 - RNA, 16 nt, Human herpesvirus 5
cacaccugccucgaca

SEQ ID NO: 2033688 - RNA, 14 nt, Human herpesvirus 5
cacacgcaucugca

SEQ ID NO: 2033689 - RNA, 15 nt, Human herpesvirus 5
cagcucgcgcuggcu

SEQ ID NO: 2033690 - RNA, 14 nt, Human herpesvirus 5
caauuccacgccgc

SEQ ID NO: 2033691 - RNA, 21 nt, Human herpesvirus 5
cacaacggccgccgacgucgc

SEQ ID NO: 2033692 - RNA, 23 nt, Human herpesvirus 5
cacacgguccgugggagacgcgg

SEQ ID NO: 2033693 - RNA, 18 nt, Human herpesvirus 5
aggccgcacuggacgacg

SEQ ID NO: 2033694 - RNA, 14 nt, Human herpesvirus 5
aggcgauccggacc

SEQ ID NO: 2033695 - RNA, 18 nt, Human herpesvirus 5
aggcggugacggcgcucu

SEQ ID NO: 2033696 - RNA, 11 nt, Human herpesvirus 5
aggcgcucgug

SEQ ID NO: 2033697 - RNA, 18 nt, Human herpesvirus 5
aggcggaggagccggcgg

SEQ ID NO: 2033698 - RNA, 19 nt, Human herpesvirus 5
agggcgcgcgucuggacgc

SEQ ID NO: 2033699 - RNA, 17 nt, Human herpesvirus 5
agggacacguagauccc

SEQ ID NO: 2033700 - RNA, 15 nt, Human herpesvirus 5
acgcaaacgcgggcc

SEQ ID NO: 2033701 - RNA, 19 nt, Human herpesvirus 5
acgaguaucucgacgacug

SEQ ID NO: 2033702 - RNA, 14 nt, Human herpesvirus 5
acgauaugucgcga

SEQ ID NO: 2033703 - RNA, 22 nt, Human herpesvirus 5
acgaucguaacccaggcgcgua

SEQ ID NO: 2033704 - RNA, 20 nt, Human herpesvirus 5
acgagcgccguccugcagac

SEQ ID NO: 2033705 - RNA, 11 nt, Human herpesvirus 5
acgaggaggag

SEQ ID NO: 2033706 - RNA, 21 nt, Human herpesvirus 5
acgagcaucgcaacaacagca

SEQ ID NO: 2033707 - RNA, 20 nt, Human herpesvirus 5
acgacgucguccagucguug

SEQ ID NO: 2033708 - RNA, 21 nt, Human herpesvirus 5
aucgccgauagagauggcgau

SEQ ID NO: 2033709 - RNA, 14 nt, Human herpesvirus 5
aucgccgcggacgc

SEQ ID NO: 2033710 - RNA, 17 nt, Human herpesvirus 5
caaccacgucggggcug

SEQ ID NO: 2033711 - RNA, 23 nt, Human herpesvirus 5
caacccguaucugagcggcggcg

SEQ ID NO: 2033712 - RNA, 15 nt, Human herpesvirus 5
aucaccuggcgacgu

SEQ ID NO: 2033713 - RNA, 16 nt, Human herpesvirus 5
aucaccuggcgacguc

SEQ ID NO: 2033714 - RNA, 16 nt, Human herpesvirus 5
auaugcaucggaaaau

SEQ ID NO: 2033715 - RNA, 22 nt, Human herpesvirus 5
aucagcuaccgccgcaacagcg

SEQ ID NO: 2033716 - RNA, 21 nt, Human herpesvirus 5
aucaguguacacgcgcccaga

SEQ ID NO: 2033717 - RNA, 18 nt, Human herpesvirus 5
aucaacagcagcaacagc

SEQ ID NO: 2033718 - RNA, 15 nt, Human herpesvirus 5
aucacaucacccaac

SEQ ID NO: 2033719 - RNA, 16 nt, Human herpesvirus 5
caacguucacgcugcu

SEQ ID NO: 2033720 - RNA, 15 nt, Human herpesvirus 5
caacgcgaccaccgu

SEQ ID NO: 2033721 - RNA, 21 nt, Human herpesvirus 5
caaguucgaucucaugucgcu

SEQ ID NO: 2033722 - RNA, 22 nt, Human herpesvirus 5
caaguuggugguggaaugcggu

SEQ ID NO: 2033723 - RNA, 17 nt, Human herpesvirus 5
caagugcaagcgccgcg

SEQ ID NO: 2033724 - RNA, 14 nt, Human herpesvirus 5
caagugccugcacg

SEQ ID NO: 2033725 - RNA, 18 nt, Human herpesvirus 5
caagaguugcaacgcgcc

SEQ ID NO: 2033726 - RNA, 22 nt, Human herpesvirus 5
aaggcagugacgcuaggcggcg

SEQ ID NO: 2033727 - RNA, 17 nt, Human herpesvirus 5
aaggccgugccgccgcg

SEQ ID NO: 2033728 - RNA, 13 nt, Human herpesvirus 5
aaggucguucucc

SEQ ID NO: 2033729 - RNA, 15 nt, Human herpesvirus 5
aaggcggcggccgca

SEQ ID NO: 2033730 - RNA, 18 nt, Human herpesvirus 5
aagggcaaggaggcggcg

SEQ ID NO: 2033731 - RNA, 18 nt, Human herpesvirus 5
aagggcgaaaacguuucg

SEQ ID NO: 2033732 - RNA, 14 nt, Human herpesvirus 5
aauaccaacguauc

SEQ ID NO: 2033733 - RNA, 16 nt, Human herpesvirus 5
acagacaggacaccgc

SEQ ID NO: 2033734 - RNA, 17 nt, Human herpesvirus 5
acacugcuacccugcgc

SEQ ID NO: 2033735 - RNA, 21 nt, Human herpesvirus 5
acacuugaauaaauaaaccgg

SEQ ID NO: 2033736 - RNA, 19 nt, Human herpesvirus 5
acaccuguuggagcaacgg

SEQ ID NO: 2033737 - RNA, 13 nt, Human herpesvirus 5
acacgacgaaagc

SEQ ID NO: 2033738 - RNA, 21 nt, Human herpesvirus 5
acacguuguuugucugcgacg

SEQ ID NO: 2033739 - RNA, 23 nt, Human herpesvirus 5
acacucgugacgucaaucaaauc

SEQ ID NO: 2033740 - RNA, 20 nt, Human herpesvirus 5
acagacuuuauaaaccguag

SEQ ID NO: 2033741 - RNA, 16 nt, Human herpesvirus 5
acagcaacaacagucg

SEQ ID NO: 2033742 - RNA, 17 nt, Human herpesvirus 5
aaucagcagugaguaca

SEQ ID NO: 2033743 - RNA, 22 nt, Human herpesvirus 5
acacggugacguagcagcacgc

SEQ ID NO: 2033744 - RNA, 15 nt, Human herpesvirus 5
acaggcgccgcaaac

SEQ ID NO: 2033745 - RNA, 17 nt, Human herpesvirus 5
acagcggcgacagacgg

SEQ ID NO: 2033746 - RNA, 16 nt, Human herpesvirus 5
acaucugucaccucac

SEQ ID NO: 2033747 - RNA, 13 nt, Human herpesvirus 5
accagacggcguc

SEQ ID NO: 2033748 - RNA, 18 nt, Human herpesvirus 5
accagaugcucccggcgc

SEQ ID NO: 2033749 - RNA, 19 nt, Human herpesvirus 5
accagcaguaugacgugcg

SEQ ID NO: 2033750 - RNA, 16 nt, Human herpesvirus 5
accacgucaccgugcc

SEQ ID NO: 2033751 - RNA, 18 nt, Human herpesvirus 5
accacguacaucggcguc

SEQ ID NO: 2033752 - RNA, 22 nt, Human herpesvirus 5
accacccuguuccccgugacgu

SEQ ID NO: 2033753 - RNA, 20 nt, Human herpesvirus 5
accacaacggccgccgacgu

SEQ ID NO: 2033754 - RNA, 15 nt, Human herpesvirus 5
acauguccuggcgcg

SEQ ID NO: 2033755 - RNA, 21 nt, Human herpesvirus 5
accaagucuugccgugacguc

SEQ ID NO: 2033756 - RNA, 17 nt, Human herpesvirus 5
acauuuuuucggccgcg

SEQ ID NO: 2033757 - RNA, 21 nt, Human herpesvirus 5
accaacugagcuucggagguc

SEQ ID NO: 2033758 - RNA, 16 nt, Human herpesvirus 5
accagcugcaggcagg

SEQ ID NO: 2033759 - RNA, 14 nt, Human herpesvirus 5
accgagacggagga

SEQ ID NO: 2033760 - RNA, 18 nt, Human herpesvirus 5
accgcagguuagcggcga

SEQ ID NO: 2033761 - RNA, 13 nt, Human herpesvirus 5
accgcgacggcga

SEQ ID NO: 2033762 - RNA, 14 nt, Human herpesvirus 5
accgcgagcggcgg

SEQ ID NO: 2033763 - RNA, 15 nt, Human herpesvirus 5
accgcgagcggcgga

SEQ ID NO: 2033764 - RNA, 13 nt, Human herpesvirus 5
accgcggcgcagg

SEQ ID NO: 2033765 - RNA, 20 nt, Human herpesvirus 5
accgccuccgaacgcucgug

SEQ ID NO: 2033766 - RNA, 17 nt, Human herpesvirus 5
accgccucggcgacguc

SEQ ID NO: 2033767 - RNA, 23 nt, Human herpesvirus 5
accgcaacaacagcagcaacagc

SEQ ID NO: 2033768 - RNA, 12 nt, Human herpesvirus 5
accgcugcggca

SEQ ID NO: 2033769 - RNA, 21 nt, Human herpesvirus 5
accgucgcguccgacgcgacg

SEQ ID NO: 2033770 - RNA, 20 nt, Human herpesvirus 5
accgucgcuacauucgccgc

SEQ ID NO: 2033771 - RNA, 16 nt, Human herpesvirus 5
accucgugcgaggaca

SEQ ID NO: 2033772 - RNA, 16 nt, Human herpesvirus 5
acgacgggacggcggc

SEQ ID NO: 2033773 - RNA, 12 nt, Human herpesvirus 5
accgggucgccu

SEQ ID NO: 2033774 - RNA, 19 nt, Human herpesvirus 5
accgcuacaacgcgcgccu

SEQ ID NO: 2033775 - RNA, 23 nt, Human herpesvirus 5
accgucgauguuggacgaaacgu

SEQ ID NO: 2033776 - RNA, 14 nt, Human herpesvirus 5
accgugcacgcgcu

SEQ ID NO: 2033777 - RNA, 14 nt, Human herpesvirus 5
accgugcucgugcc

SEQ ID NO: 2033778 - RNA, 17 nt, Human herpesvirus 5
cggaaguuccgacgcga

SEQ ID NO: 2033779 - RNA, 14 nt, Human herpesvirus 5
cggaaaaaccgcgc

SEQ ID NO: 2033780 - RNA, 12 nt, Human herpesvirus 5
cggaaacagcgu

SEQ ID NO: 2033781 - RNA, 19 nt, Human herpesvirus 5
cggacacuaggcguccgcg

SEQ ID NO: 2033782 - RNA, 17 nt, Human herpesvirus 5
cgcuuccucagcuugcc

SEQ ID NO: 2033783 - RNA, 18 nt, Human herpesvirus 5
cgcuucugcagcuccgcg

SEQ ID NO: 2033784 - RNA, 18 nt, Human herpesvirus 5
cgcuuuaagcugcucaug

SEQ ID NO: 2033785 - RNA, 13 nt, Human herpesvirus 5
cgcuuuccgccgc

SEQ ID NO: 2033786 - RNA, 15 nt, Human herpesvirus 5
cgcgugccugggaac

SEQ ID NO: 2033787 - RNA, 18 nt, Human herpesvirus 5
cgcgugccugggaacgcg

SEQ ID NO: 2033788 - RNA, 20 nt, Human herpesvirus 5
cgcgucggcguaacaacggc

SEQ ID NO: 2033789 - RNA, 22 nt, Human herpesvirus 5
cgcgucggucgccgccuccgcg

SEQ ID NO: 2033790 - RNA, 16 nt, Human herpesvirus 5
cgcgucuucgcgaggu

SEQ ID NO: 2033791 - RNA, 16 nt, Human herpesvirus 5
cgcguccgggcuuucc

SEQ ID NO: 2033792 - RNA, 14 nt, Human herpesvirus 5
cgcguagaaggcaa

SEQ ID NO: 2033793 - RNA, 15 nt, Human herpesvirus 5
cgcguacggacgagu

SEQ ID NO: 2033794 - RNA, 12 nt, Human herpesvirus 5
cgcguacggugg

SEQ ID NO: 2033795 - RNA, 16 nt, Human herpesvirus 5
cgcguagcgcuccugg

SEQ ID NO: 2033796 - RNA, 15 nt, Human herpesvirus 5
cgcguaggacgacgu

SEQ ID NO: 2033797 - RNA, 15 nt, Human herpesvirus 5
cgcggguggccggcg

SEQ ID NO: 2033798 - RNA, 17 nt, Human herpesvirus 5
cgcggguucacgcgucg

SEQ ID NO: 2033799 - RNA, 16 nt, Human herpesvirus 5
cgcguaagaaaccgcg

SEQ ID NO: 2033800 - RNA, 22 nt, Human herpesvirus 5
cgccgacgugauccaggaggug

SEQ ID NO: 2033801 - RNA, 21 nt, Human herpesvirus 5
cgcagcagagccaccaggugc

SEQ ID NO: 2033802 - RNA, 21 nt, Human herpesvirus 5
cgaggcggaggagccggcggc

SEQ ID NO: 2033803 - RNA, 17 nt, Human herpesvirus 5
cgccgacgugcuucgcg

SEQ ID NO: 2033804 - RNA, 18 nt, Human herpesvirus 5
cgccgcaacagcggcgac

SEQ ID NO: 2033805 - RNA, 11 nt, Human herpesvirus 5
cgccgcagacc

SEQ ID NO: 2033806 - RNA, 18 nt, Human herpesvirus 5
cgccgauagagauggcga

SEQ ID NO: 2033807 - RNA, 15 nt, Human herpesvirus 5
cgccgauagaggcga

SEQ ID NO: 2033808 - RNA, 16 nt, Human herpesvirus 5
cgccgcccgacgccga

SEQ ID NO: 2033809 - RNA, 18 nt, Human herpesvirus 5
cgccgccgaagcuucgcg

SEQ ID NO: 2033810 - RNA, 15 nt, Human herpesvirus 5
cgccgccgacucgcu

SEQ ID NO: 2033811 - RNA, 15 nt, Human herpesvirus 5
cgccgccagcgcggu

SEQ ID NO: 2033812 - RNA, 17 nt, Human herpesvirus 5
cgccgcgaucgaggcgg

SEQ ID NO: 2033813 - RNA, 21 nt, Human herpesvirus 5
cgccgcgaucgaggcggcggc

SEQ ID NO: 2033814 - RNA, 13 nt, Human herpesvirus 5
cgccgccgucacc

SEQ ID NO: 2033815 - RNA, 15 nt, Human herpesvirus 5
cgccgcgacaacggc

SEQ ID NO: 2033816 - RNA, 21 nt, Human herpesvirus 5
cgccgcgacaacggccgccgc

SEQ ID NO: 2033817 - RNA, 16 nt, Human herpesvirus 5
cgcggggacgcgugac

SEQ ID NO: 2033818 - RNA, 20 nt, Human herpesvirus 5
cgccgcgccguaguucuccg

SEQ ID NO: 2033819 - RNA, 22 nt, Human herpesvirus 5
cgccgcucauaaugccgucacc

SEQ ID NO: 2033820 - RNA, 12 nt, Human herpesvirus 5
cgccgcggcguu

SEQ ID NO: 2033821 - RNA, 22 nt, Human herpesvirus 5
cgcggcuacguacgacugcgcg

SEQ ID NO: 2033822 - RNA, 19 nt, Human herpesvirus 5
cgaggcgcuggacgccauc

SEQ ID NO: 2033823 - RNA, 13 nt, Human herpesvirus 5
cgcacgaccgcga

SEQ ID NO: 2033824 - RNA, 20 nt, Human herpesvirus 5
cgcacgaccgcgacgagguc

SEQ ID NO: 2033825 - RNA, 20 nt, Human herpesvirus 5
cgcacgacuggccagagguc

SEQ ID NO: 2033826 - RNA, 14 nt, Human herpesvirus 5
cgcacgagacgcga

SEQ ID NO: 2033827 - RNA, 23 nt, Human herpesvirus 5
cgcacgagacgcgacuccugcag

SEQ ID NO: 2033828 - RNA, 18 nt, Human herpesvirus 5
cgcacgcuggaggacgcg

SEQ ID NO: 2033829 - RNA, 16 nt, Human herpesvirus 5
cgagcggcggacuugg

SEQ ID NO: 2033830 - RNA, 17 nt, Human herpesvirus 5
cgagcguugcgcucgcg

SEQ ID NO: 2033831 - RNA, 14 nt, Human herpesvirus 5
cgaggaacccgcga

SEQ ID NO: 2033832 - RNA, 18 nt, Human herpesvirus 5
cgagcgcggcacgccguu

SEQ ID NO: 2033833 - RNA, 13 nt, Human herpesvirus 5
cgagcgcucggcg

SEQ ID NO: 2033834 - RNA, 20 nt, Human herpesvirus 5
cgagcucgucgccagcgcga

SEQ ID NO: 2033835 - RNA, 15 nt, Human herpesvirus 5
cgacgagcgcugcga

SEQ ID NO: 2033836 - RNA, 16 nt, Human herpesvirus 5
cgaccguuguccccgc

SEQ ID NO: 2033837 - RNA, 15 nt, Human herpesvirus 5
cgacgaaggacggga

SEQ ID NO: 2033838 - RNA, 16 nt, Human herpesvirus 5
cgacgcagugcguggc

SEQ ID NO: 2033839 - RNA, 13 nt, Human herpesvirus 5
cgacgccgucgcu

SEQ ID NO: 2033840 - RNA, 12 nt, Human herpesvirus 5
cgacgcgcgacc

SEQ ID NO: 2033841 - RNA, 16 nt, Human herpesvirus 5
cgacgcgcgaccgcga

SEQ ID NO: 2033842 - RNA, 14 nt, Human herpesvirus 5
cgacgcgcggcggc

SEQ ID NO: 2033843 - RNA, 22 nt, Human herpesvirus 5
cgacguacgaaaugaccguggc

SEQ ID NO: 2033844 - RNA, 14 nt, Human herpesvirus 5
cgacgggacggcgg

SEQ ID NO: 2033845 - RNA, 15 nt, Human herpesvirus 5
cgacgggacggcggc

SEQ ID NO: 2033846 - RNA, 19 nt, Human herpesvirus 5
cgacgggacggcggcgcgu

SEQ ID NO: 2033847 - RNA, 22 nt, Human herpesvirus 5
cgacggucaccaucgugccgcu

SEQ ID NO: 2033848 - RNA, 12 nt, Human herpesvirus 5
cgacggacgcga

SEQ ID NO: 2033849 - RNA, 22 nt, Human herpesvirus 5
cgacggcagcuaucgugacugg

SEQ ID NO: 2033850 - RNA, 19 nt, Human herpesvirus 5
cgacguagguuaccgcgug

SEQ ID NO: 2033851 - RNA, 20 nt, Human herpesvirus 5
cgacguagguuaccgcgugc

SEQ ID NO: 2033852 - RNA, 16 nt, Human herpesvirus 5
cgagcgcgaacgccgc

SEQ ID NO: 2033853 - RNA, 18 nt, Human herpesvirus 5
cgagcgcgaacgccgcgc

SEQ ID NO: 2033854 - RNA, 14 nt, Human herpesvirus 5
ccucccuccgcggc

SEQ ID NO: 2033855 - RNA, 16 nt, Human herpesvirus 5
ccuccgacgacgccga

SEQ ID NO: 2033856 - RNA, 16 nt, Human herpesvirus 5
ccuccgcgaacggcga

SEQ ID NO: 2033857 - RNA, 14 nt, Human herpesvirus 5
ccuccgcggcccgu

SEQ ID NO: 2033858 - RNA, 13 nt, Human herpesvirus 5
ccuccggcuguca

SEQ ID NO: 2033859 - RNA, 21 nt, Human herpesvirus 5
ccuccucgucgucgccgccgu

SEQ ID NO: 2033860 - RNA, 13 nt, Human herpesvirus 5
ccucggacaccgg

SEQ ID NO: 2033861 - RNA, 21 nt, Human herpesvirus 5
ccucugccugggcacgcgcgu

SEQ ID NO: 2033862 - RNA, 20 nt, Human herpesvirus 5
ccucuccuccgucgcggcca

SEQ ID NO: 2033863 - RNA, 17 nt, Human herpesvirus 5
ccucggagcacgggcga

SEQ ID NO: 2033864 - RNA, 15 nt, Human herpesvirus 5
ccugacccgcggcua

SEQ ID NO: 2033865 - RNA, 23 nt, Human herpesvirus 5
ccugguuaguucgccgucgccgc

SEQ ID NO: 2033866 - RNA, 15 nt, Human herpesvirus 5
ccugguugcugccgc

SEQ ID NO: 2033867 - RNA, 13 nt, Human herpesvirus 5
ccuugcgcgcggu

SEQ ID NO: 2033868 - RNA, 20 nt, Human herpesvirus 5
ccuugcgcucccugcuccgc

SEQ ID NO: 2033869 - RNA, 22 nt, Human herpesvirus 5
ccuugcgcucccugcuccgcaa

SEQ ID NO: 2033870 - RNA, 16 nt, Human herpesvirus 5
ccuucggcacgcuggc

SEQ ID NO: 2033871 - RNA, 21 nt, Human herpesvirus 5
ccuucugcuacgcggcgcccg

SEQ ID NO: 2033872 - RNA, 21 nt, Human herpesvirus 5
ccucggguugccuggacgccu

SEQ ID NO: 2033873 - RNA, 21 nt, Human herpesvirus 5
ccugucgucgacaugucgcga

SEQ ID NO: 2033874 - RNA, 19 nt, Human herpesvirus 5
ccuguugugucgcacgccc

SEQ ID NO: 2033875 - RNA, 15 nt, Human herpesvirus 5
ccuguuucggauguu

SEQ ID NO: 2033876 - RNA, 20 nt, Human herpesvirus 5
cgaaagcuucggccggcugc

SEQ ID NO: 2033877 - RNA, 13 nt, Human herpesvirus 5
cgaccggcggcug

SEQ ID NO: 2033878 - RNA, 14 nt, Human herpesvirus 5
cgaacguccucgga

SEQ ID NO: 2033879 - RNA, 15 nt, Human herpesvirus 5
cgaacggcgacggca

SEQ ID NO: 2033880 - RNA, 13 nt, Human herpesvirus 5
ccccguggccgcu

SEQ ID NO: 2033881 - RNA, 19 nt, Human herpesvirus 5
cccgcacgacgaccccgcu

SEQ ID NO: 2033882 - RNA, 23 nt, Human herpesvirus 5
cccgauaaucggcucucaggcgc

SEQ ID NO: 2033883 - RNA, 14 nt, Human herpesvirus 5
cccgagacggcggc

SEQ ID NO: 2033884 - RNA, 22 nt, Human herpesvirus 5
cccgaggucuuuugcacgcgcg

SEQ ID NO: 2033885 - RNA, 23 nt, Human herpesvirus 5
cccgaggucuuuugcacgcgcga

SEQ ID NO: 2033886 - RNA, 17 nt, Human herpesvirus 5
ccgacaaccugcugcac

SEQ ID NO: 2033887 - RNA, 17 nt, Human herpesvirus 5
ccgacauucgcgucggc

SEQ ID NO: 2033888 - RNA, 19 nt, Human herpesvirus 5
ccgaagguuagcgccgcgg

SEQ ID NO: 2033889 - RNA, 15 nt, Human herpesvirus 5
ccgaacgcgacuggc

SEQ ID NO: 2033890 - RNA, 22 nt, Human herpesvirus 5
ccgaacgcucgugagcaacagu

SEQ ID NO: 2033891 - RNA, 12 nt, Human herpesvirus 5
ccgaacgcugcu

SEQ ID NO: 2033892 - RNA, 14 nt, Human herpesvirus 5
ccgaacagacuugg

SEQ ID NO: 2033893 - RNA, 12 nt, Human herpesvirus 5
cccuccacaggc

SEQ ID NO: 2033894 - RNA, 15 nt, Human herpesvirus 5
cccuggucuggccca

SEQ ID NO: 2033895 - RNA, 20 nt, Human herpesvirus 5
cccucucgcgcccgcagaca

SEQ ID NO: 2033896 - RNA, 18 nt, Human herpesvirus 5
cccucuucuuugccggcu

SEQ ID NO: 2033897 - RNA, 23 nt, Human herpesvirus 5
cccucuucuuugccggcucuccu

SEQ ID NO: 2033898 - RNA, 19 nt, Human herpesvirus 5
cccugaguucacgcgcgga

SEQ ID NO: 2033899 - RNA, 15 nt, Human herpesvirus 5
cccugccagucuccg

SEQ ID NO: 2033900 - RNA, 17 nt, Human herpesvirus 5
cccuauggcacgucgcu

SEQ ID NO: 2033901 - RNA, 18 nt, Human herpesvirus 5
cccguggaucagccgccg

SEQ ID NO: 2033902 - RNA, 19 nt, Human herpesvirus 5
cccguggaucagccgccgc

SEQ ID NO: 2033903 - RNA, 17 nt, Human herpesvirus 5
cccgucaaaacacacgc

SEQ ID NO: 2033904 - RNA, 19 nt, Human herpesvirus 5
cccgucaaaacacacgcga

SEQ ID NO: 2033905 - RNA, 17 nt, Human herpesvirus 5
cccgccggagcccgguc

SEQ ID NO: 2033906 - RNA, 18 nt, Human herpesvirus 5
cccgccggcgggcggcug

SEQ ID NO: 2033907 - RNA, 14 nt, Human herpesvirus 5
cccgccguugcggc

SEQ ID NO: 2033908 - RNA, 20 nt, Human herpesvirus 5
cccguuacgccggaggccgc

SEQ ID NO: 2033909 - RNA, 20 nt, Human herpesvirus 5
cccaaaagaagaaaaaaggc

SEQ ID NO: 2033910 - RNA, 23 nt, Human herpesvirus 5
cccacgacuguucgucgagcacc

SEQ ID NO: 2033911 - RNA, 15 nt, Human herpesvirus 5
ccaugaugacggcga

SEQ ID NO: 2033912 - RNA, 16 nt, Human herpesvirus 5
ccaucgguacgaacgc

SEQ ID NO: 2033913 - RNA, 17 nt, Human herpesvirus 5
ccaugaagcggaugauu

SEQ ID NO: 2033914 - RNA, 18 nt, Human herpesvirus 5
ccaugccggagcuacgcg

SEQ ID NO: 2033915 - RNA, 15 nt, Human herpesvirus 5
ccaugccuuccgcgu

SEQ ID NO: 2033916 - RNA, 14 nt, Human herpesvirus 5
ccaugacgcgccuc

SEQ ID NO: 2033917 - RNA, 14 nt, Human herpesvirus 5
ccaugagcggcagg

SEQ ID NO: 2033918 - RNA, 15 nt, Human herpesvirus 5
ccaucucgcguaacg

SEQ ID NO: 2033919 - RNA, 15 nt, Human herpesvirus 5
ucgcccucgacggcg

SEQ ID NO: 2033920 - RNA, 18 nt, Human herpesvirus 5
ucgccgaggcuacugcug

SEQ ID NO: 2033921 - RNA, 18 nt, Human herpesvirus 5
ucgccgccgucgcgccuu

SEQ ID NO: 2033922 - RNA, 22 nt, Human herpesvirus 5
uccgugugcugugguacgucaa

SEQ ID NO: 2033923 - RNA, 15 nt, Human herpesvirus 5
uccguuaccacgguu

SEQ ID NO: 2033924 - RNA, 12 nt, Human herpesvirus 5
ucgagcgcgacc

SEQ ID NO: 2033925 - RNA, 19 nt, Human herpesvirus 5
ucgccaacuaccgugccac

SEQ ID NO: 2033926 - RNA, 17 nt, Human herpesvirus 5
ucgauuaccuacgucaa

SEQ ID NO: 2033927 - RNA, 20 nt, Human herpesvirus 5
ucgauccucucucacgcguc

SEQ ID NO: 2033928 - RNA, 16 nt, Human herpesvirus 5
ucgagccaagucgccg

SEQ ID NO: 2033929 - RNA, 22 nt, Human herpesvirus 5
uccucggacgaaggggaggacg

SEQ ID NO: 2033930 - RNA, 18 nt, Human herpesvirus 5
uccucggagcacgggcga

SEQ ID NO: 2033931 - RNA, 14 nt, Human herpesvirus 5
uccucggugcccgc

SEQ ID NO: 2033932 - RNA, 16 nt, Human herpesvirus 5
ggcgcguuguccucgc

SEQ ID NO: 2033933 - RNA, 15 nt, Human herpesvirus 5
uccgcggcccccacg

SEQ ID NO: 2033934 - RNA, 19 nt, Human herpesvirus 5
uccgcgucggucgccgccu

SEQ ID NO: 2033935 - RNA, 20 nt, Human herpesvirus 5
ggcgcguuauaagcaccgug

SEQ ID NO: 2033936 - RNA, 19 nt, Human herpesvirus 5
ggcggccgagucuccgcgc

SEQ ID NO: 2033937 - RNA, 14 nt, Human herpesvirus 5
ggcggcgaucgcgc

SEQ ID NO: 2033938 - RNA, 23 nt, Human herpesvirus 5
ggcggcgggguuaagcguccucg

SEQ ID NO: 2033939 - RNA, 16 nt, Human herpesvirus 5
uccgcaagcgccgcca

SEQ ID NO: 2033940 - RNA, 17 nt, Human herpesvirus 5
ggcgcccgggccgccug

SEQ ID NO: 2033941 - RNA, 14 nt, Human herpesvirus 5
gcgcguguacuugc

SEQ ID NO: 2033942 - RNA, 21 nt, Human herpesvirus 5
ggcgccuuuuucuucgccucg

SEQ ID NO: 2033943 - RNA, 13 nt, Human herpesvirus 5
gcgcguacggugg

SEQ ID NO: 2033944 - RNA, 14 nt, Human herpesvirus 5
gcgcgacacggugg

SEQ ID NO: 2033945 - RNA, 14 nt, Human herpesvirus 5
gcgcgguguuagac

SEQ ID NO: 2033946 - RNA, 21 nt, Human herpesvirus 5
gcgcgucaaccgccagcgagc

SEQ ID NO: 2033947 - RNA, 16 nt, Human herpesvirus 5
gcgcguccacagcgug

SEQ ID NO: 2033948 - RNA, 12 nt, Human herpesvirus 5
gcgcgcagacgc

SEQ ID NO: 2033949 - RNA, 16 nt, Human herpesvirus 5
gcgcgcacccgacggc

SEQ ID NO: 2033950 - RNA, 18 nt, Human herpesvirus 5
gcgcgcacccgacggcgg

SEQ ID NO: 2033951 - RNA, 14 nt, Human herpesvirus 5
gcgccguccugcag

SEQ ID NO: 2033952 - RNA, 15 nt, Human herpesvirus 5
gcgcgaacaggccgc

SEQ ID NO: 2033953 - RNA, 19 nt, Human herpesvirus 5
gcgccugguugcugccgcg

SEQ ID NO: 2033954 - RNA, 20 nt, Human herpesvirus 5
gcgccugguugcugccgcgu

SEQ ID NO: 2033955 - RNA, 16 nt, Human herpesvirus 5
gcgccguaguucuccg

SEQ ID NO: 2033956 - RNA, 14 nt, Human herpesvirus 5
gcgccgucagagca

SEQ ID NO: 2033957 - RNA, 15 nt, Human herpesvirus 5
gcgccgugcucagcg

SEQ ID NO: 2033958 - RNA, 20 nt, Human herpesvirus 5
gcgccgugcucagcggcgug

SEQ ID NO: 2033959 - RNA, 22 nt, Human herpesvirus 5
gcgccgugcucuuggcgccgcg

SEQ ID NO: 2033960 - RNA, 14 nt, Human herpesvirus 5
gagcgccggcgagc

SEQ ID NO: 2033961 - RNA, 20 nt, Human herpesvirus 5
gagcgccggggagacgacga

SEQ ID NO: 2033962 - RNA, 16 nt, Human herpesvirus 5
gagcgcgaccgccuca

SEQ ID NO: 2033963 - RNA, 18 nt, Human herpesvirus 5
gagcgggcggcgguggug

SEQ ID NO: 2033964 - RNA, 14 nt, Human herpesvirus 5
gagcguccgacgcc

SEQ ID NO: 2033965 - RNA, 22 nt, Human herpesvirus 5
gaugaacguggugaggggcgug

SEQ ID NO: 2033966 - RNA, 15 nt, Human herpesvirus 5
gaucgcgccgccucg

SEQ ID NO: 2033967 - RNA, 14 nt, Human herpesvirus 5
gaucgggcggucga

SEQ ID NO: 2033968 - RNA, 17 nt, Human herpesvirus 5
gaucguacccaccaccu

SEQ ID NO: 2033969 - RNA, 16 nt, Human herpesvirus 5
gaucgcagccuccucg

SEQ ID NO: 2033970 - RNA, 23 nt, Human herpesvirus 5
gaucgccgcggacgccugcgacg

SEQ ID NO: 2033971 - RNA, 13 nt, Human herpesvirus 5
gaucgccuggagc

SEQ ID NO: 2033972 - RNA, 20 nt, Human herpesvirus 5
gauccgcucaccacguacga

SEQ ID NO: 2033973 - RNA, 17 nt, Human herpesvirus 5
gauccacgggccgcgcu

SEQ ID NO: 2033974 - RNA, 17 nt, Human herpesvirus 5
gauccugggacaccacg

SEQ ID NO: 2033975 - RNA, 17 nt, Human herpesvirus 5
gaucagccgccgccucc

SEQ ID NO: 2033976 - RNA, 23 nt, Human herpesvirus 5
gaucaucuguuuuugcugcaacg

SEQ ID NO: 2033977 - RNA, 15 nt, Human herpesvirus 5
gaugacagcgagcuc

SEQ ID NO: 2033978 - RNA, 17 nt, Human herpesvirus 5
gaugcgcaccuucggcg

SEQ ID NO: 2033979 - RNA, 15 nt, Human herpesvirus 5
gaugcuauccgcugc

SEQ ID NO: 2033980 - RNA, 20 nt, Human herpesvirus 5
gaugcuauccgcugcgacua

SEQ ID NO: 2033981 - RNA, 18 nt, Human herpesvirus 5
gauggaaaugcccgccac

SEQ ID NO: 2033982 - RNA, 17 nt, Human herpesvirus 5
gauggaggucugcgaga

SEQ ID NO: 2033983 - RNA, 20 nt, Human herpesvirus 5
gagccgccgacgcuggcgcu

SEQ ID NO: 2033984 - RNA, 18 nt, Human herpesvirus 5
cucccgacaggcucgucg

SEQ ID NO: 2033985 - RNA, 13 nt, Human herpesvirus 5
cuccacggccucc

SEQ ID NO: 2033986 - RNA, 14 nt, Human herpesvirus 5
cucaggcgcgcaga

SEQ ID NO: 2033987 - RNA, 18 nt, Human herpesvirus 5
cucagucucucggugcgu

SEQ ID NO: 2033988 - RNA, 15 nt, Human herpesvirus 5
cucaucggcauguuc

SEQ ID NO: 2033989 - RNA, 16 nt, Human herpesvirus 5
cucaucucagccucgu

SEQ ID NO: 2033990 - RNA, 19 nt, Human herpesvirus 5
cucaccuggaccgguggua

SEQ ID NO: 2033991 - RNA, 17 nt, Human herpesvirus 5
cuauugccacacgcgcu

SEQ ID NO: 2033992 - RNA, 22 nt, Human herpesvirus 5
cuauuggcagaagcauagcgau

SEQ ID NO: 2033993 - RNA, 20 nt, Human herpesvirus 5
cgcgcuggcaaacuccgaca

SEQ ID NO: 2033994 - RNA, 14 nt, Human herpesvirus 5
cgcgcuggcucgcg

SEQ ID NO: 2033995 - RNA, 19 nt, Human herpesvirus 5
cgcgcuggcuuuccucggg

SEQ ID NO: 2033996 - RNA, 14 nt, Human herpesvirus 5
cgcgcuucuggucg

SEQ ID NO: 2033997 - RNA, 18 nt, Human herpesvirus 5
cgcgcuuugcgccgccgc

SEQ ID NO: 2033998 - RNA, 19 nt, Human herpesvirus 5
cgcgcuuuugaccgcgagc

SEQ ID NO: 2033999 - RNA, 15 nt, Human herpesvirus 5
cgcggaaacgacgga

SEQ ID NO: 2034000 - RNA, 16 nt, Human herpesvirus 5
cgcggaaacgacggac

SEQ ID NO: 2034001 - RNA, 17 nt, Human herpesvirus 5
cuauguggcuccgccgg

SEQ ID NO: 2034002 - RNA, 14 nt, Human herpesvirus 5
cgcgcugcuccucg

SEQ ID NO: 2034003 - RNA, 16 nt, Human herpesvirus 5
cgcgcugcuccucgga

SEQ ID NO: 2034004 - RNA, 19 nt, Human herpesvirus 5
cgcgcucuguaccguuauu

SEQ ID NO: 2034005 - RNA, 12 nt, Human herpesvirus 5
ccgcggaggugc

SEQ ID NO: 2034006 - RNA, 18 nt, Human herpesvirus 5
ccgcggacgccugcgacg

SEQ ID NO: 2034007 - RNA, 14 nt, Human herpesvirus 5
ccggcgcgguguua

SEQ ID NO: 2034008 - RNA, 22 nt, Human herpesvirus 5
ccggcgcgguguuagacauggg

SEQ ID NO: 2034009 - RNA, 13 nt, Human herpesvirus 5
ccggcggcgugca

SEQ ID NO: 2034010 - RNA, 13 nt, Human herpesvirus 5
ccggcuacgucga

SEQ ID NO: 2034011 - RNA, 15 nt, Human herpesvirus 5
ccggcguucagucgc

SEQ ID NO: 2034012 - RNA, 21 nt, Human herpesvirus 5
ccggcguugccgccaugucgc

SEQ ID NO: 2034013 - RNA, 14 nt, Human herpesvirus 5
ccggcgucgcuggc

SEQ ID NO: 2034014 - RNA, 13 nt, Human herpesvirus 5
ccggcuccgccgu

SEQ ID NO: 2034015 - RNA, 15 nt, Human herpesvirus 5
ccggcugcacguggc

SEQ ID NO: 2034016 - RNA, 18 nt, Human herpesvirus 5
ccgggccaccagccgcga

SEQ ID NO: 2034017 - RNA, 16 nt, Human herpesvirus 5
ccgggcaacgcguggc

SEQ ID NO: 2034018 - RNA, 18 nt, Human herpesvirus 5
ccgggcggcuuugccguc

SEQ ID NO: 2034019 - RNA, 15 nt, Human herpesvirus 5
cgccugcgacggcgg

SEQ ID NO: 2034020 - RNA, 16 nt, Human herpesvirus 5
cgccugcgacggcggg

SEQ ID NO: 2034021 - RNA, 19 nt, Human herpesvirus 5
cgccugguugcugccgcgu

SEQ ID NO: 2034022 - RNA, 13 nt, Human herpesvirus 5
cgcgaacgccgcg

SEQ ID NO: 2034023 - RNA, 12 nt, Human herpesvirus 5
cgcgaacggcga

SEQ ID NO: 2034024 - RNA, 13 nt, Human herpesvirus 5
cgcgacacggugg

SEQ ID NO: 2034025 - RNA, 16 nt, Human herpesvirus 5
cgcgacacacguucga

SEQ ID NO: 2034026 - RNA, 20 nt, Human herpesvirus 5
cgcgaccgggaucacgacga

SEQ ID NO: 2034027 - RNA, 23 nt, Human herpesvirus 5
cgcgaccagcugcuggacgacgu

SEQ ID NO: 2034028 - RNA, 20 nt, Human herpesvirus 5
cgcgacguguugcgggaccu

SEQ ID NO: 2034029 - RNA, 22 nt, Human herpesvirus 5
cgcgcgucuggucaacugcgug

SEQ ID NO: 2034030 - RNA, 14 nt, Human herpesvirus 5
ccgcgacccucgcg

SEQ ID NO: 2034031 - RNA, 14 nt, Human herpesvirus 5
ccgcgaacggcgac

SEQ ID NO: 2034032 - RNA, 20 nt, Human herpesvirus 5
ccgcgacaacggccgccgca

SEQ ID NO: 2034033 - RNA, 18 nt, Human herpesvirus 5
ccgccaugucgcuccgcg

SEQ ID NO: 2034034 - RNA, 18 nt, Human herpesvirus 5
ccgcgcccgucgcgcacg

SEQ ID NO: 2034035 - RNA, 17 nt, Human herpesvirus 5
ccgcgacccagcgacag

SEQ ID NO: 2034036 - RNA, 23 nt, Human herpesvirus 5
ccgccucggaucuacucaucggc

SEQ ID NO: 2034037 - RNA, 17 nt, Human herpesvirus 5
ccgccucuucuggcccu

SEQ ID NO: 2034038 - RNA, 17 nt, Human herpesvirus 5
ccgccguugcggccgcc

SEQ ID NO: 2034039 - RNA, 12 nt, Human herpesvirus 5
ccgccgcggcgu

SEQ ID NO: 2034040 - RNA, 19 nt, Human herpesvirus 5
ccgccccucuuuuccccgu

SEQ ID NO: 2034041 - RNA, 13 nt, Human herpesvirus 5
ccgccgccgcgcu

SEQ ID NO: 2034042 - RNA, 16 nt, Human herpesvirus 5
ccgccgccgcgcuggc

SEQ ID NO: 2034043 - RNA, 15 nt, Human herpesvirus 5
uggagcgggucgccg

SEQ ID NO: 2034044 - RNA, 19 nt, Human herpesvirus 5
uggagaaaacgccggcgga

SEQ ID NO: 2034045 - RNA, 14 nt, Human herpesvirus 5
uggagcccacgccg

SEQ ID NO: 2034046 - RNA, 12 nt, Human herpesvirus 5
uggaggucgacg

SEQ ID NO: 2034047 - RNA, 20 nt, Human herpesvirus 5
uggcacguuuuggaaaacgu

SEQ ID NO: 2034048 - RNA, 16 nt, Human herpesvirus 5
gcccccguggccgcuu

SEQ ID NO: 2034049 - RNA, 16 nt, Human herpesvirus 5
gccagcugcgucguca

SEQ ID NO: 2034050 - RNA, 18 nt, Human herpesvirus 5
gccacguucuugcguccu

SEQ ID NO: 2034051 - RNA, 22 nt, Human herpesvirus 5
gccagcgaacaccaucucgcgg

SEQ ID NO: 2034052 - RNA, 14 nt, Human herpesvirus 5
gccagcguccgcgc

SEQ ID NO: 2034053 - RNA, 21 nt, Human herpesvirus 5
gccccgaagguuagcgccgcg

SEQ ID NO: 2034054 - RNA, 21 nt, Human herpesvirus 5
gcccgacugcggacgccgacg

SEQ ID NO: 2034055 - RNA, 23 nt, Human herpesvirus 5
gcccgaggaucuggcggccgccg

SEQ ID NO: 2034056 - RNA, 15 nt, Human herpesvirus 5
gcagcuggugaucgg

SEQ ID NO: 2034057 - RNA, 16 nt, Human herpesvirus 5
gcaggccgcgcaggcc

SEQ ID NO: 2034058 - RNA, 19 nt, Human herpesvirus 5
gcaggucucgcgcaucgcc

SEQ ID NO: 2034059 - RNA, 15 nt, Human herpesvirus 5
gcaggugugcgcguc

SEQ ID NO: 2034060 - RNA, 20 nt, Human herpesvirus 5
gcaggggcuggacgugguua

SEQ ID NO: 2034061 - RNA, 18 nt, Human herpesvirus 5
gccaagaugcugcgggcc

SEQ ID NO: 2034062 - RNA, 12 nt, Human herpesvirus 5
gccacacgcgcu

SEQ ID NO: 2034063 - RNA, 16 nt, Human herpesvirus 5
gccaccaggugccggc

SEQ ID NO: 2034064 - RNA, 21 nt, Human herpesvirus 5
gcagcucuuuuccagcgugcg

SEQ ID NO: 2034065 - RNA, 23 nt, Human herpesvirus 5
gcaggagcugcuuuucgggccgc

SEQ ID NO: 2034066 - RNA, 15 nt, Human herpesvirus 5
gagaccgccgccgcg

SEQ ID NO: 2034067 - RNA, 15 nt, Human herpesvirus 5
gagacgugcgaccug

SEQ ID NO: 2034068 - RNA, 16 nt, Human herpesvirus 5
gagacgcucacccguu

SEQ ID NO: 2034069 - RNA, 21 nt, Human herpesvirus 5
gacuugaguaccaagugccgc

SEQ ID NO: 2034070 - RNA, 22 nt, Human herpesvirus 5
gacuugaguaccaagugccgcc

SEQ ID NO: 2034071 - RNA, 21 nt, Human herpesvirus 5
gagaacuuuguagugcgcgcc

SEQ ID NO: 2034072 - RNA, 18 nt, Human herpesvirus 5
cgguggucgaugcugauc

SEQ ID NO: 2034073 - RNA, 21 nt, Human herpesvirus 5
cgguggucggcugccgccgcu

SEQ ID NO: 2034074 - RNA, 15 nt, Human herpesvirus 5
cgguugcggcuuggu

SEQ ID NO: 2034075 - RNA, 14 nt, Human herpesvirus 5
cgguuuccacgcca

SEQ ID NO: 2034076 - RNA, 18 nt, Human herpesvirus 5
cggugcugcugcgcgaca

SEQ ID NO: 2034077 - RNA, 20 nt, Human herpesvirus 5
cgguggagggcgcgcggcaa

SEQ ID NO: 2034078 - RNA, 11 nt, Human herpesvirus 5
cgguggcggcc

SEQ ID NO: 2034079 - RNA, 13 nt, Human herpesvirus 5
cguauauucuaca

SEQ ID NO: 2034080 - RNA, 14 nt, Human herpesvirus 5
cguauccuggucaa

SEQ ID NO: 2034081 - RNA, 18 nt, Human herpesvirus 5
cguagugagcuuugacgu

SEQ ID NO: 2034082 - RNA, 20 nt, Human herpesvirus 5
cguauacaacaguucuauca

SEQ ID NO: 2034083 - RNA, 15 nt, Human herpesvirus 5
cguagcagcacgcgg

SEQ ID NO: 2034084 - RNA, 16 nt, Human herpesvirus 5
cguacgccguguacca

SEQ ID NO: 2034085 - RNA, 16 nt, Human herpesvirus 5
cguacugcgacggcag

SEQ ID NO: 2034086 - RNA, 22 nt, Human herpesvirus 5
cguacuucaugccccgaugaac

SEQ ID NO: 2034087 - RNA, 14 nt, Human herpesvirus 5
gaaacagcagcucg

SEQ ID NO: 2034088 - RNA, 21 nt, Human herpesvirus 5
gaaacagcguccacaguuucc

SEQ ID NO: 2034089 - RNA, 16 nt, Human herpesvirus 5
cguauuccguuugcgc

SEQ ID NO: 2034090 - RNA, 20 nt, Human herpesvirus 5
gaaaacgccggacgagcugg

SEQ ID NO: 2034091 - RNA, 15 nt, Human herpesvirus 5
gaaacuacgugcaac

SEQ ID NO: 2034092 - RNA, 22 nt, Human herpesvirus 5
gaaacuacgugcaacggcgacg

SEQ ID NO: 2034093 - RNA, 13 nt, Human herpesvirus 5
gaaaaagaaaccc

SEQ ID NO: 2034094 - RNA, 21 nt, Human herpesvirus 5
gaaaccguacuaagucucccg

SEQ ID NO: 2034095 - RNA, 18 nt, Human herpesvirus 5
gaaagcucuacgagcugg

SEQ ID NO: 2034096 - RNA, 14 nt, Human herpesvirus 5
gaaaguuguccgcg

SEQ ID NO: 2034097 - RNA, 19 nt, Human herpesvirus 5
gaacaaauucagcaacacu

SEQ ID NO: 2034098 - RNA, 23 nt, Human herpesvirus 5
gaacagugccgccuucgaaacgg

SEQ ID NO: 2034099 - RNA, 13 nt, Human herpesvirus 5
gaacauguccugg

SEQ ID NO: 2034100 - RNA, 15 nt, Human herpesvirus 5
gaaccgccgucgccg

SEQ ID NO: 2034101 - RNA, 21 nt, Human herpesvirus 5
gaaccgcucauauagaccaaa

SEQ ID NO: 2034102 - RNA, 20 nt, Human herpesvirus 5
gacggagccguuaccgccuc

SEQ ID NO: 2034103 - RNA, 12 nt, Human herpesvirus 5
gacggaggagac

SEQ ID NO: 2034104 - RNA, 13 nt, Human herpesvirus 5
gacucgaaggcgc

SEQ ID NO: 2034105 - RNA, 14 nt, Human herpesvirus 5
gacucgcggaugac

SEQ ID NO: 2034106 - RNA, 18 nt, Human herpesvirus 5
gacgcucggccuugcgcu

SEQ ID NO: 2034107 - RNA, 20 nt, Human herpesvirus 5
gacucuaacacccaggccgc

SEQ ID NO: 2034108 - RNA, 16 nt, Human herpesvirus 5
gacugcagcccaccgc

SEQ ID NO: 2034109 - RNA, 18 nt, Human herpesvirus 5
gacugcagcccaccgccc

SEQ ID NO: 2034110 - RNA, 18 nt, Human herpesvirus 5
gacgcgccccccaccuac

SEQ ID NO: 2034111 - RNA, 17 nt, Human herpesvirus 5
gacgcggaacgugacgg

SEQ ID NO: 2034112 - RNA, 13 nt, Human herpesvirus 5
gacaaccgcaucc

SEQ ID NO: 2034113 - RNA, 19 nt, Human herpesvirus 5
gacaacggccgccgcagcc

SEQ ID NO: 2034114 - RNA, 23 nt, Human herpesvirus 5
gacaccguaucagcuaccgccgc

SEQ ID NO: 2034115 - RNA, 22 nt, Human herpesvirus 5
gacaccgucgccgugcccgaag

SEQ ID NO: 2034116 - RNA, 15 nt, Human herpesvirus 5
gaaucaccgucggcg

SEQ ID NO: 2034117 - RNA, 22 nt, Human herpesvirus 5
gaagucuucaucaucgucgucg

SEQ ID NO: 2034118 - RNA, 15 nt, Human herpesvirus 5
gacagagaccgccgc

SEQ ID NO: 2034119 - RNA, 16 nt, Human herpesvirus 5
gacagagaccgccgcc

SEQ ID NO: 2034120 - RNA, 17 nt, Human herpesvirus 5
gacagagaccgccgccg

SEQ ID NO: 2034121 - RNA, 15 nt, Human herpesvirus 5
gacacggcgagaccg

SEQ ID NO: 2034122 - RNA, 19 nt, Human herpesvirus 5
gacacuaggcguccgcgcc

SEQ ID NO: 2034123 - RNA, 19 nt, Human herpesvirus 5
gacacggugcugcugcgcg

SEQ ID NO: 2034124 - RNA, 17 nt, Human herpesvirus 5
gacgccugggcgcgacg

SEQ ID NO: 2034125 - RNA, 14 nt, Human herpesvirus 5
gacagacgaugaac

SEQ ID NO: 2034126 - RNA, 13 nt, Human herpesvirus 5
gacagaugcggcg

SEQ ID NO: 2034127 - RNA, 13 nt, Human herpesvirus 5
cggccgccggcgg

SEQ ID NO: 2034128 - RNA, 13 nt, Human herpesvirus 5
cggccgaccccgc

SEQ ID NO: 2034129 - RNA, 16 nt, Human herpesvirus 5
cggccgacggcagcgu

SEQ ID NO: 2034130 - RNA, 16 nt, Human herpesvirus 5
cggccgagucuccgcg

SEQ ID NO: 2034131 - RNA, 22 nt, Human herpesvirus 5
cggccgucacgacgcuccgucg

SEQ ID NO: 2034132 - RNA, 18 nt, Human herpesvirus 5
cggccguuaucaaggcca

SEQ ID NO: 2034133 - RNA, 22 nt, Human herpesvirus 5
cggccgucgcaagggcugcucg

SEQ ID NO: 2034134 - RNA, 13 nt, Human herpesvirus 5
cggccgugcagca

SEQ ID NO: 2034135 - RNA, 18 nt, Human herpesvirus 5
cggcgacagacggcgucg

SEQ ID NO: 2034136 - RNA, 22 nt, Human herpesvirus 5
cggcgagcgaagguagaggagu

SEQ ID NO: 2034137 - RNA, 15 nt, Human herpesvirus 5
cggcgauaaccgccg

SEQ ID NO: 2034138 - RNA, 17 nt, Human herpesvirus 5
cggcgauggucauguuc

SEQ ID NO: 2034139 - RNA, 21 nt, Human herpesvirus 5
cggcgcaacuucugucucggc

SEQ ID NO: 2034140 - RNA, 19 nt, Human herpesvirus 5
cggcaugccguuggcggcg

SEQ ID NO: 2034141 - RNA, 19 nt, Human herpesvirus 5
cggcagucuuuuccgugac

SEQ ID NO: 2034142 - RNA, 15 nt, Human herpesvirus 5
cggcauagugccagc

SEQ ID NO: 2034143 - RNA, 13 nt, Human herpesvirus 5
cggcauccucggg

SEQ ID NO: 2034144 - RNA, 22 nt, Human herpesvirus 5
cggcauccucgggcuuuccggc

SEQ ID NO: 2034145 - RNA, 12 nt, Human herpesvirus 5
cggcgccguccg

SEQ ID NO: 2034146 - RNA, 16 nt, Human herpesvirus 5
cggcgccugcugcucg

SEQ ID NO: 2034147 - RNA, 20 nt, Human herpesvirus 5
cggcggcuguucgacagcgg

SEQ ID NO: 2034148 - RNA, 20 nt, Human herpesvirus 5
cggcgucuuccuccucgucg

SEQ ID NO: 2034149 - RNA, 20 nt, Human herpesvirus 5
cggcgugaaugggcacgccg

SEQ ID NO: 2034150 - RNA, 21 nt, Human herpesvirus 5
cggcgguggagggcgcgcggc

SEQ ID NO: 2034151 - RNA, 15 nt, Human herpesvirus 5
cggcguguuggacgc

SEQ ID NO: 2034152 - RNA, 15 nt, Human herpesvirus 5
cggcugcuguugcac

SEQ ID NO: 2034153 - RNA, 15 nt, Human herpesvirus 5
cgggaaaccacgccg

SEQ ID NO: 2034154 - RNA, 16 nt, Human herpesvirus 5
cgggaaaccacgccgg

SEQ ID NO: 2034155 - RNA, 17 nt, Human herpesvirus 5
cggcguucgcgugcacg

SEQ ID NO: 2034156 - RNA, 15 nt, Human herpesvirus 5
cggcucaccacgcag

SEQ ID NO: 2034157 - RNA, 18 nt, Human herpesvirus 5
guuucuggggugggcgcg

SEQ ID NO: 2034158 - RNA, 21 nt, Human herpesvirus 5
guuuccagagaacgcagcgca

SEQ ID NO: 2034159 - RNA, 20 nt, Human herpesvirus 5
guuucggaguaccgaguaga

SEQ ID NO: 2034160 - RNA, 15 nt, Human herpesvirus 5
guuucucgcuuacgu

SEQ ID NO: 2034161 - RNA, 15 nt, Human herpesvirus 5
guugugggugcggac

SEQ ID NO: 2034162 - RNA, 20 nt, Human herpesvirus 5
guugaagacaccuggaaaga

SEQ ID NO: 2034163 - RNA, 18 nt, Human herpesvirus 5
guucgcccugucugcagc

SEQ ID NO: 2034164 - RNA, 14 nt, Human herpesvirus 5
guucgccgucgccg

SEQ ID NO: 2034165 - RNA, 17 nt, Human herpesvirus 5
guucccggucgucgugu

SEQ ID NO: 2034166 - RNA, 18 nt, Human herpesvirus 5
guuccgcguuuggucgcc

SEQ ID NO: 2034167 - RNA, 15 nt, Human herpesvirus 5
guucugcacggcguc

SEQ ID NO: 2034168 - RNA, 18 nt, Human herpesvirus 5
guucuccugccgagacga

SEQ ID NO: 2034169 - RNA, 19 nt, Human herpesvirus 5
guugcagcaacgcgugcuc

SEQ ID NO: 2034170 - RNA, 13 nt, Human herpesvirus 5
uaacgccacggug

SEQ ID NO: 2034171 - RNA, 20 nt, Human herpesvirus 5
uaacuagccuucccgugaga

SEQ ID NO: 2034172 - RNA, 15 nt, Human herpesvirus 5
uaaccuacguccgug

SEQ ID NO: 2034173 - RNA, 11 nt, Human herpesvirus 5
uaaccgcaaag

SEQ ID NO: 2034174 - RNA, 18 nt, Human herpesvirus 5
uaaccacguugcgucgug

SEQ ID NO: 2034175 - RNA, 17 nt, Human herpesvirus 5
guuugcggcgcagacgu

SEQ ID NO: 2034176 - RNA, 11 nt, Human herpesvirus 5
guuugcgucuc

SEQ ID NO: 2034177 - RNA, 12 nt, Human herpesvirus 5
guucugggcgcg

SEQ ID NO: 2034178 - RNA, 15 nt, Human herpesvirus 5
uaaaacaccgacgcu

SEQ ID NO: 2034179 - RNA, 20 nt, Human herpesvirus 5
uacaccaguucguagaucac

SEQ ID NO: 2034180 - RNA, 21 nt, Human herpesvirus 5
uacaucacugacaagucguuu

SEQ ID NO: 2034181 - RNA, 15 nt, Human herpesvirus 5
uacagcccggcggug

SEQ ID NO: 2034182 - RNA, 19 nt, Human herpesvirus 5
uacacccugucaccgaaag

SEQ ID NO: 2034183 - RNA, 23 nt, Human herpesvirus 5
uacaaggagcgacguaccagcug

SEQ ID NO: 2034184 - RNA, 21 nt, Human herpesvirus 5
uaauaagccggcagcugcuuu

SEQ ID NO: 2034185 - RNA, 14 nt, Human herpesvirus 5
uaugggcggugguc

SEQ ID NO: 2034186 - RNA, 14 nt, Human herpesvirus 5
uaugggggaacgcc

SEQ ID NO: 2034187 - RNA, 13 nt, Human herpesvirus 5
uauguggcugcgc

SEQ ID NO: 2034188 - RNA, 22 nt, Human herpesvirus 5
ucaacacggcauucucuacgaa

SEQ ID NO: 2034189 - RNA, 17 nt, Human herpesvirus 5
ucaacacggucauguuu

SEQ ID NO: 2034190 - RNA, 20 nt, Human herpesvirus 5
ucaaccacgaguaacaccgu

SEQ ID NO: 2034191 - RNA, 17 nt, Human herpesvirus 5
uauugguucugggcgcg

SEQ ID NO: 2034192 - RNA, 19 nt, Human herpesvirus 5
ucacacaggccagcugcca

SEQ ID NO: 2034193 - RNA, 23 nt, Human herpesvirus 5
ucaaucagacuuucgacgugcgc

SEQ ID NO: 2034194 - RNA, 14 nt, Human herpesvirus 5
ucaccaccacggua

SEQ ID NO: 2034195 - RNA, 20 nt, Human herpesvirus 5
ucaccagaaugcuaguuugu

SEQ ID NO: 2034196 - RNA, 20 nt, Human herpesvirus 5
ucaccgaguccaucauguuc

SEQ ID NO: 2034197 - RNA, 18 nt, Human herpesvirus 5
ucaccuagacgcaaacgc

SEQ ID NO: 2034198 - RNA, 21 nt, Human herpesvirus 5
ucacgaaaggcaccggcagcc

SEQ ID NO: 2034199 - RNA, 18 nt, Human herpesvirus 5
ugcccauuccgcaacguc

SEQ ID NO: 2034200 - RNA, 16 nt, Human herpesvirus 5
ugagcuguuucgacgu

SEQ ID NO: 2034201 - RNA, 17 nt, Human herpesvirus 5
ugcgugcuguacgucac

SEQ ID NO: 2034202 - RNA, 11 nt, Human herpesvirus 5
ugccgccgcca

SEQ ID NO: 2034203 - RNA, 15 nt, Human herpesvirus 5
ugccggagcuacgcg

SEQ ID NO: 2034204 - RNA, 19 nt, Human herpesvirus 5
uggacgccugggcgcgacg

SEQ ID NO: 2034205 - RNA, 16 nt, Human herpesvirus 5
uggaccagacggcguc

SEQ ID NO: 2034206 - RNA, 17 nt, Human herpesvirus 5
uggaaacuacgugcaac

SEQ ID NO: 2034207 - RNA, 24 nt, Human herpesvirus 5
uggaaauucaauaaaaaccaccgu

SEQ ID NO: 2034208 - RNA, 16 nt, Human herpesvirus 5
uggaacgagcgccguc

SEQ ID NO: 2034209 - RNA, 14 nt, Human herpesvirus 5
uggaacgcgugcgc

SEQ ID NO: 2034210 - RNA, 21 nt, Human herpesvirus 5
uggaagcgaauaagcgcgacc

SEQ ID NO: 2034211 - RNA, 23 nt, Human herpesvirus 5
ugcugcaaggccucuaucugcgc

SEQ ID NO: 2034212 - RNA, 15 nt, Human herpesvirus 5
ugcucgcgcacguag

SEQ ID NO: 2034213 - RNA, 13 nt, Human herpesvirus 5
ugacacggcgguu

SEQ ID NO: 2034214 - RNA, 14 nt, Human herpesvirus 5
ugacagacgauaug

SEQ ID NO: 2034215 - RNA, 22 nt, Human herpesvirus 5
ucagcggcguguacagcuaccu

SEQ ID NO: 2034216 - RNA, 20 nt, Human herpesvirus 5
ucacgggaaggcuaguuaga

SEQ ID NO: 2034217 - RNA, 18 nt, Human herpesvirus 5
ucacgggacccgccgccg

SEQ ID NO: 2034218 - RNA, 13 nt, Human herpesvirus 5
ucagccgccgccu

SEQ ID NO: 2034219 - RNA, 13 nt, Human herpesvirus 5
ucagcgaggccga

SEQ ID NO: 2034220 - RNA, 18 nt, Human herpesvirus 5
ucacgccuugcgcggccg

SEQ ID NO: 2034221 - RNA, 21 nt, Human herpesvirus 5
ucagaaagcaccagaacccgu

SEQ ID NO: 2034222 - RNA, 22 nt, Human herpesvirus 5
ucagaaagcaccagaacccguc

SEQ ID NO: 2034223 - RNA, 19 nt, Human herpesvirus 5
ugagacagccacaucaaca

SEQ ID NO: 2034224 - RNA, 21 nt, Human herpesvirus 5
ugacggauaaacacgacaucc

SEQ ID NO: 2034225 - RNA, 20 nt, Human herpesvirus 5
ugacggcgcucuuucagcgu

SEQ ID NO: 2034226 - RNA, 15 nt, Human herpesvirus 5
ugacguggugcgcug

SEQ ID NO: 2034227 - RNA, 23 nt, Human herpesvirus 5
ugacuacgaugaagacgcgacuc

SEQ ID NO: 2034228 - RNA, 14 nt, Human herpesvirus 5
gugcgcguccacag

SEQ ID NO: 2034229 - RNA, 13 nt, Human herpesvirus 5
gugcgcgccgccg

SEQ ID NO: 2034230 - RNA, 17 nt, Human herpesvirus 5
gugcgcccaucugcggc

SEQ ID NO: 2034231 - RNA, 22 nt, Human herpesvirus 5
gugcgcgaccgcaaccgcgagc

SEQ ID NO: 2034232 - RNA, 13 nt, Human herpesvirus 5
gugccucccgcgc

SEQ ID NO: 2034233 - RNA, 13 nt, Human herpesvirus 5
gugcgacgccaug

SEQ ID NO: 2034234 - RNA, 14 nt, Human herpesvirus 5
gugcgcacgccgcg

SEQ ID NO: 2034235 - RNA, 18 nt, Human herpesvirus 5
gcggccgugguggccgug

SEQ ID NO: 2034236 - RNA, 19 nt, Human herpesvirus 5
gcgcuuucccaccgcgacc

SEQ ID NO: 2034237 - RNA, 16 nt, Human herpesvirus 5
gcgcuucugcagcucc

SEQ ID NO: 2034238 - RNA, 14 nt, Human herpesvirus 5
gcgcuugcggcaca

SEQ ID NO: 2034239 - RNA, 21 nt, Human herpesvirus 5
gcggaccgaucaccagaaggc

SEQ ID NO: 2034240 - RNA, 22 nt, Human herpesvirus 5
gcggacgccgucgguaccgucu

SEQ ID NO: 2034241 - RNA, 15 nt, Human herpesvirus 5
gcggacgccugcgac

SEQ ID NO: 2034242 - RNA, 20 nt, Human herpesvirus 5
gcgucgucaaggacggcgug

SEQ ID NO: 2034243 - RNA, 22 nt, Human herpesvirus 5
gcgugcaccugcugccgccacu

SEQ ID NO: 2034244 - RNA, 12 nt, Human herpesvirus 5
gcucuacgcgug

SEQ ID NO: 2034245 - RNA, 16 nt, Human herpesvirus 5
gcucucgcagcccgag

SEQ ID NO: 2034246 - RNA, 18 nt, Human herpesvirus 5
gcucucggaucugcggcu

SEQ ID NO: 2034247 - RNA, 15 nt, Human herpesvirus 5
gcucuuggcgccgcg

SEQ ID NO: 2034248 - RNA, 19 nt, Human herpesvirus 5
gcucggcggccacggcguc

SEQ ID NO: 2034249 - RNA, 21 nt, Human herpesvirus 5
gcucgggaacagacccgauac

SEQ ID NO: 2034250 - RNA, 16 nt, Human herpesvirus 5
gcggcgugcgcacgcc

SEQ ID NO: 2034251 - RNA, 23 nt, Human herpesvirus 5
gcggcuguauuauuagacgccgg

SEQ ID NO: 2034252 - RNA, 15 nt, Human herpesvirus 5
gcggcugcgcgcucg

SEQ ID NO: 2034253 - RNA, 14 nt, Human herpesvirus 5
gcguccgacgccgg

SEQ ID NO: 2034254 - RNA, 17 nt, Human herpesvirus 5
gcguccgacgccggguu

SEQ ID NO: 2034255 - RNA, 22 nt, Human herpesvirus 5
gcgucgccaguaccgacgacga

SEQ ID NO: 2034256 - RNA, 17 nt, Human herpesvirus 5
gcgucgcccucgacggc

SEQ ID NO: 2034257 - RNA, 22 nt, Human herpesvirus 5
gcgucgcccucgacggcgguac

SEQ ID NO: 2034258 - RNA, 19 nt, Human herpesvirus 5
gcgucgccugcgacggcgg

SEQ ID NO: 2034259 - RNA, 17 nt, Human herpesvirus 5
gcgucgaccccaaccuu

SEQ ID NO: 2034260 - RNA, 13 nt, Human herpesvirus 5
gcggcggcacucg

SEQ ID NO: 2034261 - RNA, 12 nt, Human herpesvirus 5
gcggcgguggag

SEQ ID NO: 2034262 - RNA, 15 nt, Human herpesvirus 5
gcggcgguggccguc

SEQ ID NO: 2034263 - RNA, 20 nt, Human herpesvirus 5
gcggcguaccuacggaccgc

SEQ ID NO: 2034264 - RNA, 11 nt, Human herpesvirus 5
gcggcgugcau

SEQ ID NO: 2034265 - RNA, 13 nt, Human herpesvirus 5
ggucgacugcgug

SEQ ID NO: 2034266 - RNA, 17 nt, Human herpesvirus 5
ggucguuguccuccucg

SEQ ID NO: 2034267 - RNA, 16 nt, Human herpesvirus 5
ggucucacugugacgu

SEQ ID NO: 2034268 - RNA, 17 nt, Human herpesvirus 5
ggucguagugcggcgug

SEQ ID NO: 2034269 - RNA, 21 nt, Human herpesvirus 5
ggucuucgacgucgcugccgu

SEQ ID NO: 2034270 - RNA, 14 nt, Human herpesvirus 5
ggugacauccucgc

SEQ ID NO: 2034271 - RNA, 16 nt, Human herpesvirus 5
gguuaccccucgcugg

SEQ ID NO: 2034272 - RNA, 15 nt, Human herpesvirus 5
gucacgucgggacga

SEQ ID NO: 2034273 - RNA, 18 nt, Human herpesvirus 5
gucacuaaggaccgacac

SEQ ID NO: 2034274 - RNA, 23 nt, Human herpesvirus 5
gucacuucugcugucaccaccac

SEQ ID NO: 2034275 - RNA, 15 nt, Human herpesvirus 5
gguggcgggcugcgu

SEQ ID NO: 2034276 - RNA, 18 nt, Human herpesvirus 5
ggugugcgugcuguacgu

SEQ ID NO: 2034277 - RNA, 20 nt, Human herpesvirus 5
ggugcggugaaacucuaugg

SEQ ID NO: 2034278 - RNA, 14 nt, Human herpesvirus 5
gguggcucuugcgc

SEQ ID NO: 2034279 - RNA, 19 nt, Human herpesvirus 5
gucccagcagggcgcgccg

SEQ ID NO: 2034280 - RNA, 16 nt, Human herpesvirus 5
gucccgcgcggaucgg

SEQ ID NO: 2034281 - RNA, 20 nt, Human herpesvirus 5
gucccgcgcggaucggacac

SEQ ID NO: 2034282 - RNA, 12 nt, Human herpesvirus 5
gucccgugaugg

SEQ ID NO: 2034283 - RNA, 21 nt, Human herpesvirus 5
gucccuacucaccaaagccgc

SEQ ID NO: 2034284 - RNA, 17 nt, Human herpesvirus 5
guccaaccucgccgucg

SEQ ID NO: 2034285 - RNA, 18 nt, Human herpesvirus 5
gucagcggcacgccgccg

SEQ ID NO: 2034286 - RNA, 13 nt, Human herpesvirus 5
gucagucagaagu

SEQ ID NO: 2034287 - RNA, 17 nt, Human herpesvirus 5
gucaguuuaucgagcgc

SEQ ID NO: 2034288 - RNA, 21 nt, Human herpesvirus 5
guccagauagcccggucgguc

SEQ ID NO: 2034289 - RNA, 21 nt, Human herpesvirus 5
guccagaucgucuacggcucc

SEQ ID NO: 2034290 - RNA, 19 nt, Human herpesvirus 5
gucccgaaaugauauccgu

SEQ ID NO: 2034291 - RNA, 14 nt, Human herpesvirus 5
guccgcggaaacga

SEQ ID NO: 2034292 - RNA, 12 nt, Human herpesvirus 5
guccgcggacac

SEQ ID NO: 2034293 - RNA, 21 nt, Human herpesvirus 5
guccgcggacacccgcggccg

SEQ ID NO: 2034294 - RNA, 21 nt, Human herpesvirus 5
guccgcgccugcacgccgccg

SEQ ID NO: 2034295 - RNA, 16 nt, Human herpesvirus 5
gugcccgucaucagcc

SEQ ID NO: 2034296 - RNA, 17 nt, Human herpesvirus 5
gugccgagaccgucgcc

SEQ ID NO: 2034297 - RNA, 15 nt, Human herpesvirus 5
gugccgccgcugccg

SEQ ID NO: 2034298 - RNA, 20 nt, Human herpesvirus 5
gcuguccauagugcgccaag

SEQ ID NO: 2034299 - RNA, 21 nt, Human herpesvirus 5
gcuguccauagugcgccaagc

SEQ ID NO: 2034300 - RNA, 13 nt, Human herpesvirus 5
gcuggcgggccga

SEQ ID NO: 2034301 - RNA, 21 nt, Human herpesvirus 5
gcuggcgguauggcugcgcgc

SEQ ID NO: 2034302 - RNA, 15 nt, Human herpesvirus 5
gcugugcaacgcgug

SEQ ID NO: 2034303 - RNA, 16 nt, Human herpesvirus 5
gcugggauccgccgcc

SEQ ID NO: 2034304 - RNA, 17 nt, Human herpesvirus 5
gcugggauccgccgcca

SEQ ID NO: 2034305 - RNA, 19 nt, Human herpesvirus 5
gcuuagacauuccccaccu

SEQ ID NO: 2034306 - RNA, 14 nt, Human herpesvirus 5
gcuguucacgcgga

SEQ ID NO: 2034307 - RNA, 18 nt, Human herpesvirus 5
gcuguuguugacgcugcu

SEQ ID NO: 2034308 - RNA, 18 nt, Human herpesvirus 5
gcuuaaaggcgcacuugu

SEQ ID NO: 2034309 - RNA, 14 nt, Human herpesvirus 5
gcugccaccagggc

SEQ ID NO: 2034310 - RNA, 16 nt, Human herpesvirus 5
gcugaucgccgucacu

SEQ ID NO: 2034311 - RNA, 16 nt, Human herpesvirus 5
gcugauucgcgccgug

SEQ ID NO: 2034312 - RNA, 18 nt, Human herpesvirus 5
gcugcccgucaagaccga

SEQ ID NO: 2034313 - RNA, 23 nt, Human herpesvirus 5
ggaggauccaaggccuccagcgc

SEQ ID NO: 2034314 - RNA, 20 nt, Human herpesvirus 5
ggaucauuuucuuggccgug

SEQ ID NO: 2034315 - RNA, 20 nt, Human herpesvirus 5
ggauccaaggccuccagcgc

SEQ ID NO: 2034316 - RNA, 19 nt, Human herpesvirus 5
ggauagguguggcgaaagc

SEQ ID NO: 2034317 - RNA, 16 nt, Human herpesvirus 5
ggagucuaccuccugc

SEQ ID NO: 2034318 - RNA, 19 nt, Human herpesvirus 5
ggaggugaccuggcugcuu

SEQ ID NO: 2034319 - RNA, 15 nt, Human herpesvirus 5
ggauugggcggacgu

SEQ ID NO: 2034320 - RNA, 19 nt, Human herpesvirus 5
ggauugggcggacgugcgu

SEQ ID NO: 2034321 - RNA, 13 nt, Human herpesvirus 5
ggaugacgagcgu

SEQ ID NO: 2034322 - RNA, 20 nt, Human herpesvirus 5
aaccucuaccucguccgccu

SEQ ID NO: 2034323 - RNA, 21 nt, Human herpesvirus 5
aaccaagucuugccgugacgu

SEQ ID NO: 2034324 - RNA, 14 nt, Human herpesvirus 5
aaccgugguccgcu

SEQ ID NO: 2034325 - RNA, 21 nt, Human herpesvirus 5
aacccaaguagcggcgcgccc

SEQ ID NO: 2034326 - RNA, 16 nt, Human herpesvirus 5
aaccccguguccgccc

SEQ ID NO: 2034327 - RNA, 19 nt, Human herpesvirus 5
aacccguaucugagcggcg

SEQ ID NO: 2034328 - RNA, 23 nt, Human herpesvirus 5
aacccugggcuauaugcaucgga

SEQ ID NO: 2034329 - RNA, 18 nt, Human herpesvirus 5
aacagccuucccuuguaa

SEQ ID NO: 2034330 - RNA, 22 nt, Human herpesvirus 5
aacagcggguguccucggugcc

SEQ ID NO: 2034331 - RNA, 14 nt, Human herpesvirus 5
accccgcgcgacgu

SEQ ID NO: 2034332 - RNA, 16 nt, Human herpesvirus 5
acccucgcgcggaguc

SEQ ID NO: 2034333 - RNA, 17 nt, Human herpesvirus 5
accgacaaggcgcggcg

SEQ ID NO: 2034334 - RNA, 18 nt, Human herpesvirus 5
accgacaaggcgcggcga

SEQ ID NO: 2034335 - RNA, 17 nt, Human herpesvirus 5
accgacauggagcccac

SEQ ID NO: 2034336 - RNA, 22 nt, Human herpesvirus 5
accucuuuccauucuuccgugu

SEQ ID NO: 2034337 - RNA, 15 nt, Human herpesvirus 5
accugagacuggucu

SEQ ID NO: 2034338 - RNA, 17 nt, Human herpesvirus 5
acccuguuccccgugac

SEQ ID NO: 2034339 - RNA, 13 nt, Human herpesvirus 5
accccaagccaaa

SEQ ID NO: 2034340 - RNA, 13 nt, Human herpesvirus 5
acccccacccgug

SEQ ID NO: 2034341 - RNA, 17 nt, Human herpesvirus 5
acccgacugcagcccac

SEQ ID NO: 2034342 - RNA, 18 nt, Human herpesvirus 5
acaaaaaaaaggaggaca

SEQ ID NO: 2034343 - RNA, 19 nt, Human herpesvirus 5
aauugcaacuuaacgcgca

SEQ ID NO: 2034344 - RNA, 20 nt, Human herpesvirus 5
aauugcucuacugcaacugc

SEQ ID NO: 2034345 - RNA, 11 nt, Human herpesvirus 5
acacccugcgg

SEQ ID NO: 2034346 - RNA, 20 nt, Human herpesvirus 5
accauccucaccccgcgcga

SEQ ID NO: 2034347 - RNA, 15 nt, Human herpesvirus 5
accaucuggcgcaga

SEQ ID NO: 2034348 - RNA, 23 nt, Human herpesvirus 5
acaccugccucgacaucucgccg

SEQ ID NO: 2034349 - RNA, 18 nt, Human herpesvirus 5
acaaccacggcgaaccgc

SEQ ID NO: 2034350 - RNA, 19 nt, Human herpesvirus 5
acaagcuguggcugcacac

SEQ ID NO: 2034351 - RNA, 13 nt, Human herpesvirus 5
agugucgauacuu

SEQ ID NO: 2034352 - RNA, 13 nt, Human herpesvirus 5
agugcgcgcggcg

SEQ ID NO: 2034353 - RNA, 14 nt, Human herpesvirus 5
agugcgcgcggcgc

SEQ ID NO: 2034354 - RNA, 17 nt, Human herpesvirus 5
agugacgcuaggcggcg

SEQ ID NO: 2034355 - RNA, 18 nt, Human herpesvirus 5
agugacgcuaggcggcgc

SEQ ID NO: 2034356 - RNA, 14 nt, Human herpesvirus 5
agugauacguuguu

SEQ ID NO: 2034357 - RNA, 20 nt, Human herpesvirus 5
agugccgcgccgccuggagu

SEQ ID NO: 2034358 - RNA, 18 nt, Human herpesvirus 5
aggacagcaaggccgccg

SEQ ID NO: 2034359 - RNA, 11 nt, Human herpesvirus 5
aggcacacggu

SEQ ID NO: 2034360 - RNA, 16 nt, Human herpesvirus 5
auaacaacacaucaac

SEQ ID NO: 2034361 - RNA, 23 nt, Human herpesvirus 5
aguugggucccagcgagcugcgc

SEQ ID NO: 2034362 - RNA, 15 nt, Human herpesvirus 5
aguuggugcagcugc

SEQ ID NO: 2034363 - RNA, 17 nt, Human herpesvirus 5
aguuggugcagcugcgc

SEQ ID NO: 2034364 - RNA, 22 nt, Human herpesvirus 5
aguuguagucgcgguggcggcc

SEQ ID NO: 2034365 - RNA, 14 nt, Human herpesvirus 5
aguucgccgucgcc

SEQ ID NO: 2034366 - RNA, 20 nt, Human herpesvirus 5
aguucaccguauggcugcgc

SEQ ID NO: 2034367 - RNA, 20 nt, Human herpesvirus 5
aguuaucagcaauaaaagca

SEQ ID NO: 2034368 - RNA, 21 nt, Human herpesvirus 5
aggacgggaugcacagcgucu

SEQ ID NO: 2034369 - RNA, 18 nt, Human herpesvirus 5
aggacucgcucacgucgu

SEQ ID NO: 2034370 - RNA, 21 nt, Human herpesvirus 5
agcgccgugcucagcggcgug

SEQ ID NO: 2034371 - RNA, 17 nt, Human herpesvirus 5
agcguagucuggcagcg

SEQ ID NO: 2034372 - RNA, 14 nt, Human herpesvirus 5
aggaagcggcggua

SEQ ID NO: 2034373 - RNA, 15 nt, Human herpesvirus 5
aggaauucaucuauc

SEQ ID NO: 2034374 - RNA, 15 nt, Human herpesvirus 5
aggagacaccgucgc

SEQ ID NO: 2034375 - RNA, 16 nt, Human herpesvirus 5
aggauguucugcacgg

SEQ ID NO: 2034376 - RNA, 16 nt, Human herpesvirus 5
agcgccguccugcaga

SEQ ID NO: 2034377 - RNA, 18 nt, Human herpesvirus 5
agcggcgcgccccggcgu

SEQ ID NO: 2034378 - RNA, 20 nt, Human herpesvirus 5
agcgcguuuguugcgcggcg

SEQ ID NO: 2034379 - RNA, 21 nt, Human herpesvirus 5
agcgcguuuguugcgcggcga

SEQ ID NO: 2034380 - RNA, 13 nt, Human herpesvirus 5
agcgcuacgugcg

SEQ ID NO: 2034381 - RNA, 18 nt, Human herpesvirus 5
agcuucugguaggaggcg

SEQ ID NO: 2034382 - RNA, 15 nt, Human herpesvirus 5
agcgguaccagacgc

SEQ ID NO: 2034383 - RNA, 18 nt, Human herpesvirus 5
agcggcucgccgcagacc

SEQ ID NO: 2034384 - RNA, 17 nt, Human herpesvirus 5
agcggcucgggcuggcg

SEQ ID NO: 2034385 - RNA, 18 nt, Human herpesvirus 5
agcaagaguugcaacgcg

SEQ ID NO: 2034386 - RNA, 21 nt, Human herpesvirus 5
agcaucaguuucugcggcgua

SEQ ID NO: 2034387 - RNA, 21 nt, Human herpesvirus 5
agcagaaggaauaauccgugc

SEQ ID NO: 2034388 - RNA, 13 nt, Human herpesvirus 5
agcagcucgcgcu

SEQ ID NO: 2034389 - RNA, 17 nt, Human herpesvirus 5
agcgcccgaagccgcgc

SEQ ID NO: 2034390 - RNA, 19 nt, Human herpesvirus 5
agcgcccgaagccgcgcga

SEQ ID NO: 2034391 - RNA, 14 nt, Human herpesvirus 5
agccacgcggcgua

SEQ ID NO: 2034392 - RNA, 17 nt, Human herpesvirus 5
agccacggaggagacga

SEQ ID NO: 2034393 - RNA, 14 nt, Human herpesvirus 5
agcgcggcggcagc

SEQ ID NO: 2034394 - RNA, 20 nt, Human herpesvirus 5
agaugcggggucgacugcgu

SEQ ID NO: 2034395 - RNA, 13 nt, Human herpesvirus 5
agaugcuauccgc

SEQ ID NO: 2034396 - RNA, 18 nt, Human herpesvirus 5
agagggcgcgcgucugga

SEQ ID NO: 2034397 - RNA, 22 nt, Human herpesvirus 5
accuugagcgacagcagcauca

SEQ ID NO: 2034398 - RNA, 22 nt, Human herpesvirus 5
acgaccuccgcgucggucgccg

SEQ ID NO: 2034399 - RNA, 12 nt, Human herpesvirus 5
acgacggcgguu

SEQ ID NO: 2034400 - RNA, 12 nt, Human herpesvirus 5
acgacgcggcgu

SEQ ID NO: 2034401 - RNA, 13 nt, Human herpesvirus 5
acgacgcggcguu

SEQ ID NO: 2034402 - RNA, 17 nt, Human herpesvirus 5
agagcucggucaacgcg

SEQ ID NO: 2034403 - RNA, 18 nt, Human herpesvirus 5
accuugucuccccggugu

SEQ ID NO: 2034404 - RNA, 24 nt, Human herpesvirus 5
accugugugaucugggcagcggcu

SEQ ID NO: 2034405 - RNA, 19 nt, Human herpesvirus 5
accuguuuaccucaugcgg

SEQ ID NO: 2034406 - RNA, 15 nt, Human herpesvirus 5
accuggacgcgguga

SEQ ID NO: 2034407 - RNA, 23 nt, Human herpesvirus 5
acgaagaagaacaagacggagga

SEQ ID NO: 2034408 - RNA, 13 nt, Human herpesvirus 5
acgaagaggacac

SEQ ID NO: 2034409 - RNA, 21 nt, Human herpesvirus 5
acgaagaugccgaugugugac

SEQ ID NO: 2034410 - RNA, 16 nt, Human herpesvirus 5
acgaacgacguacguc

SEQ ID NO: 2034411 - RNA, 21 nt, Human herpesvirus 5
acgacaucuuccgcgagcacc

SEQ ID NO: 2034412 - RNA, 17 nt, Human herpesvirus 5
caucgcagccacgcgcu

SEQ ID NO: 2034413 - RNA, 20 nt, Human herpesvirus 5
ccacaacgaggaacccgcga

SEQ ID NO: 2034414 - RNA, 13 nt, Human herpesvirus 5
ccaccgacaugga

SEQ ID NO: 2034415 - RNA, 14 nt, Human herpesvirus 5
ccaccgacgcgcga

SEQ ID NO: 2034416 - RNA, 16 nt, Human herpesvirus 5
ccaccgagacgugcga

SEQ ID NO: 2034417 - RNA, 14 nt, Human herpesvirus 5
ccacaggcgccgca

SEQ ID NO: 2034418 - RNA, 19 nt, Human herpesvirus 5
ccacagcgccaggcggcug

SEQ ID NO: 2034419 - RNA, 15 nt, Human herpesvirus 5
ccacagagccgcgug

SEQ ID NO: 2034420 - RNA, 22 nt, Human herpesvirus 5
ccaccgauccgcacgaccgcga

SEQ ID NO: 2034421 - RNA, 16 nt, Human herpesvirus 5
cauccugcccaccgcc

SEQ ID NO: 2034422 - RNA, 13 nt, Human herpesvirus 5
ccaccgucgccgu

SEQ ID NO: 2034423 - RNA, 16 nt, Human herpesvirus 5
ccacgagugacgacga

SEQ ID NO: 2034424 - RNA, 13 nt, Human herpesvirus 5
ccacgacaaacac

SEQ ID NO: 2034425 - RNA, 19 nt, Human herpesvirus 5
ccacgacgcagaaagaggg

SEQ ID NO: 2034426 - RNA, 17 nt, Human herpesvirus 5
ccacgccgaugcuccgc

SEQ ID NO: 2034427 - RNA, 13 nt, Human herpesvirus 5
auaauaccacaac

SEQ ID NO: 2034428 - RNA, 11 nt, Human herpesvirus 5
auacacacgga

SEQ ID NO: 2034429 - RNA, 15 nt, Human herpesvirus 5
auguggaacagcucg

SEQ ID NO: 2034430 - RNA, 11 nt, Human herpesvirus 5
auguggucgcg

SEQ ID NO: 2034431 - RNA, 18 nt, Human herpesvirus 5
auguccgcucguguucca

SEQ ID NO: 2034432 - RNA, 14 nt, Human herpesvirus 5
auugggcggacgug

SEQ ID NO: 2034433 - RNA, 22 nt, Human herpesvirus 5
auucaucgugcaguaccucaac

SEQ ID NO: 2034434 - RNA, 20 nt, Human herpesvirus 5
auucuaaagccacgcggcgu

SEQ ID NO: 2034435 - RNA, 22 nt, Human herpesvirus 5
auucugagggccgauggcugcc

SEQ ID NO: 2034436 - RNA, 16 nt, Human herpesvirus 5
caucaucagcgccgug

SEQ ID NO: 2034437 - RNA, 15 nt, Human herpesvirus 5
caucaccgacccugc

SEQ ID NO: 2034438 - RNA, 23 nt, Human herpesvirus 5
caucacgugccacguucuugcgu

SEQ ID NO: 2034439 - RNA, 18 nt, Human herpesvirus 5
cauccagcuccguucgcg

SEQ ID NO: 2034440 - RNA, 21 nt, Human herpesvirus 5
caucgccgucgaguacgugcu

SEQ ID NO: 2034441 - RNA, 20 nt, Human herpesvirus 5
auuuuccucguaaacuuaug

SEQ ID NO: 2034442 - RNA, 17 nt, Human herpesvirus 5
caaaaaaaaaucggugg

SEQ ID NO: 2034443 - RNA, 23 nt, Human herpesvirus 5
caucaccaacguuaccuccgacu

SEQ ID NO: 2034444 - RNA, 23 nt, Human herpesvirus 5
ucggcgugaaugggcacgccgug

SEQ ID NO: 2034445 - RNA, 17 nt, Human herpesvirus 5
ucggcgguccuccagca

SEQ ID NO: 2034446 - RNA, 22 nt, Human herpesvirus 5
ucggcacgcuggcgggccgacc

SEQ ID NO: 2034447 - RNA, 13 nt, Human herpesvirus 5
ucggccgaaacau

SEQ ID NO: 2034448 - RNA, 15 nt, Human herpesvirus 5
ucggccgaccccguc

SEQ ID NO: 2034449 - RNA, 18 nt, Human herpesvirus 5
ucggccggaccgugcacg

SEQ ID NO: 2034450 - RNA, 19 nt, Human herpesvirus 5
ucggccggaccgugcacgc

SEQ ID NO: 2034451 - RNA, 16 nt, Human herpesvirus 5
ucggaaucgggcccgc

SEQ ID NO: 2034452 - RNA, 18 nt, Human herpesvirus 5
ucggauacagggugccgc

SEQ ID NO: 2034453 - RNA, 21 nt, Human herpesvirus 5
ucggauacagggugccgccac

SEQ ID NO: 2034454 - RNA, 18 nt, Human herpesvirus 5
gggugggcgcgacggcaa

SEQ ID NO: 2034455 - RNA, 22 nt, Human herpesvirus 5
gguacaugucccgcauauuuug

SEQ ID NO: 2034456 - RNA, 13 nt, Human herpesvirus 5
gguacgcugacgu

SEQ ID NO: 2034457 - RNA, 19 nt, Human herpesvirus 5
gguccguuauguccgcucg

SEQ ID NO: 2034458 - RNA, 16 nt, Human herpesvirus 5
ucgcgguggcggccgc

SEQ ID NO: 2034459 - RNA, 15 nt, Human herpesvirus 5
ggcgacaccgccucg

SEQ ID NO: 2034460 - RNA, 23 nt, Human herpesvirus 5
ggccuccgacgacgccgaggacg

SEQ ID NO: 2034461 - RNA, 21 nt, Human herpesvirus 5
ggccugcaucuuccccgcgca

SEQ ID NO: 2034462 - RNA, 16 nt, Human herpesvirus 5
ggccgucggcgucgcg

SEQ ID NO: 2034463 - RNA, 22 nt, Human herpesvirus 5
ggccgucggcgucgcgucgcag

SEQ ID NO: 2034464 - RNA, 18 nt, Human herpesvirus 5
gggaaaaacaaagaaguc

SEQ ID NO: 2034465 - RNA, 22 nt, Human herpesvirus 5
gggaaacggacacuaggcgucc

SEQ ID NO: 2034466 - RNA, 15 nt, Human herpesvirus 5
ggcgcagucgcgagc

SEQ ID NO: 2034467 - RNA, 14 nt, Human herpesvirus 5
gggaccgcagcgug

SEQ ID NO: 2034468 - RNA, 14 nt, Human herpesvirus 5
gggguggugcgcga

SEQ ID NO: 2034469 - RNA, 19 nt, Human herpesvirus 5
gggcacggaccgcaacgug

SEQ ID NO: 2034470 - RNA, 20 nt, Human herpesvirus 5
gcgcgccacaacgccguccg

SEQ ID NO: 2034471 - RNA, 16 nt, Human herpesvirus 5
gcgcgcaucgccgucg

SEQ ID NO: 2034472 - RNA, 20 nt, Human herpesvirus 5
gcgcagacgucggcgguccu

SEQ ID NO: 2034473 - RNA, 16 nt, Human herpesvirus 5
gcgcacggcgcggucc

SEQ ID NO: 2034474 - RNA, 12 nt, Human herpesvirus 5
gcgcacggcguc

SEQ ID NO: 2034475 - RNA, 20 nt, Human herpesvirus 5
gcgcgccuaccugacgccga

SEQ ID NO: 2034476 - RNA, 13 nt, Human herpesvirus 5
ggcacgcgcgucg

SEQ ID NO: 2034477 - RNA, 14 nt, Human herpesvirus 5
gcgcgcggcgcguu

SEQ ID NO: 2034478 - RNA, 19 nt, Human herpesvirus 5
ggccaacaaccacggcgaa

SEQ ID NO: 2034479 - RNA, 22 nt, Human herpesvirus 5
ggcagcgucucuugcggcgccg

SEQ ID NO: 2034480 - RNA, 18 nt, Human herpesvirus 5
ggcagcccauccucgugg

SEQ ID NO: 2034481 - RNA, 21 nt, Human herpesvirus 5
ggcaccuaucuccgacagcgc

SEQ ID NO: 2034482 - RNA, 14 nt, Human herpesvirus 5
ggcagaggucgccg

SEQ ID NO: 2034483 - RNA, 19 nt, Human herpesvirus 5
gagggcgcgcggcaacucg

SEQ ID NO: 2034484 - RNA, 16 nt, Human herpesvirus 5
gagcaucgcaacaaca

SEQ ID NO: 2034485 - RNA, 17 nt, Human herpesvirus 5
gaggucgacgacgccgu

SEQ ID NO: 2034486 - RNA, 19 nt, Human herpesvirus 5
gagggucuuucuacgcccu

SEQ ID NO: 2034487 - RNA, 16 nt, Human herpesvirus 5
gagguacugcagcacg

SEQ ID NO: 2034488 - RNA, 19 nt, Human herpesvirus 5
gagcagcaaaacgaccaga

SEQ ID NO: 2034489 - RNA, 16 nt, Human herpesvirus 5
gagcaggucucgcgca

SEQ ID NO: 2034490 - RNA, 20 nt, Human herpesvirus 5
gcaccgagggcagaacuggu

SEQ ID NO: 2034491 - RNA, 22 nt, Human herpesvirus 5
gcaccacgucgauucccaucuc

SEQ ID NO: 2034492 - RNA, 18 nt, Human herpesvirus 5
gagucgcggggacgcgug

SEQ ID NO: 2034493 - RNA, 16 nt, Human herpesvirus 5
gauaacuacaacagcg

SEQ ID NO: 2034494 - RNA, 16 nt, Human herpesvirus 5
gauacagggugccgcc

SEQ ID NO: 2034495 - RNA, 18 nt, Human herpesvirus 5
gauacagggugccgccac

SEQ ID NO: 2034496 - RNA, 12 nt, Human herpesvirus 5
gauaucugcggg

SEQ ID NO: 2034497 - RNA, 22 nt, Human herpesvirus 5
gauaaaauuugauuacuccgug

SEQ ID NO: 2034498 - RNA, 17 nt, Human herpesvirus 5
gaguucaaagccgcgug

SEQ ID NO: 2034499 - RNA, 16 nt, Human herpesvirus 5
gcaccggccuccgacg

SEQ ID NO: 2034500 - RNA, 20 nt, Human herpesvirus 5
gcaccggccuccgacgacgc

SEQ ID NO: 2034501 - RNA, 13 nt, Human herpesvirus 5
gcaccuaucuccg

SEQ ID NO: 2034502 - RNA, 17 nt, Human herpesvirus 5
gcaccugcugccgccac

SEQ ID NO: 2034503 - RNA, 19 nt, Human herpesvirus 5
cucgcaaagacgugccacg

SEQ ID NO: 2034504 - RNA, 17 nt, Human herpesvirus 5
cguguucucccgacguc

SEQ ID NO: 2034505 - RNA, 19 nt, Human herpesvirus 5
cguguugccgacggcggcg

SEQ ID NO: 2034506 - RNA, 17 nt, Human herpesvirus 5
cgugucgucuccacgua

SEQ ID NO: 2034507 - RNA, 15 nt, Human herpesvirus 5
cgugucugauaccgg

SEQ ID NO: 2034508 - RNA, 16 nt, Human herpesvirus 5
cgugguagcgccgcga

SEQ ID NO: 2034509 - RNA, 23 nt, Human herpesvirus 5
cgugucgcugggcuggcccucgc

SEQ ID NO: 2034510 - RNA, 18 nt, Human herpesvirus 5
cgugugguagaagagcac

SEQ ID NO: 2034511 - RNA, 23 nt, Human herpesvirus 5
cgugugguagaagagcacgcgga

SEQ ID NO: 2034512 - RNA, 21 nt, Human herpesvirus 5
cguguguuggcuacggcggac

SEQ ID NO: 2034513 - RNA, 18 nt, Human herpesvirus 5
cguggacugggacgagga

SEQ ID NO: 2034514 - RNA, 20 nt, Human herpesvirus 5
cguggacugggacgaggagg

SEQ ID NO: 2034515 - RNA, 22 nt, Human herpesvirus 5
cgugcuuuuggugcgccacgua

SEQ ID NO: 2034516 - RNA, 18 nt, Human herpesvirus 5
cguggaccucacguugaa

SEQ ID NO: 2034517 - RNA, 19 nt, Human herpesvirus 5
cguggcuuucuccgacgug

SEQ ID NO: 2034518 - RNA, 15 nt, Human herpesvirus 5
cguggcgcgggcacg

SEQ ID NO: 2034519 - RNA, 19 nt, Human herpesvirus 5
cucgcuuacgucuacagca

SEQ ID NO: 2034520 - RNA, 16 nt, Human herpesvirus 5
cucgcucgcgcccgcu

SEQ ID NO: 2034521 - RNA, 19 nt, Human herpesvirus 5
cucgcucuacgcgugcacg

SEQ ID NO: 2034522 - RNA, 13 nt, Human herpesvirus 5
cucgcucucgucg

SEQ ID NO: 2034523 - RNA, 22 nt, Human herpesvirus 5
gagauccaguuacacucgcucu

SEQ ID NO: 2034524 - RNA, 16 nt, Human herpesvirus 5
gagcacaaacugcgac

SEQ ID NO: 2034525 - RNA, 17 nt, Human herpesvirus 5
gagcacaaacugcgaca

SEQ ID NO: 2034526 - RNA, 15 nt, Human herpesvirus 5
cucgccgacguggug

SEQ ID NO: 2034527 - RNA, 20 nt, Human herpesvirus 5
cucgcgucuuagacgcgcgg

SEQ ID NO: 2034528 - RNA, 21 nt, Human herpesvirus 5
cucgcgacgagggucugcgcg

SEQ ID NO: 2034529 - RNA, 16 nt, Human herpesvirus 5
cucgcgcccgcuccuu

SEQ ID NO: 2034530 - RNA, 22 nt, Human herpesvirus 5
ccggcgcaguuugcggcgcaga

SEQ ID NO: 2034531 - RNA, 22 nt, Human herpesvirus 5
ccggccgcggugccggcggcua

SEQ ID NO: 2034532 - RNA, 15 nt, Human herpesvirus 5
ccggccuugcugugu

SEQ ID NO: 2034533 - RNA, 18 nt, Human herpesvirus 5
ccggcgccugguugcugc

SEQ ID NO: 2034534 - RNA, 22 nt, Human herpesvirus 5
cgcgcgaagguguggcggcagc

SEQ ID NO: 2034535 - RNA, 12 nt, Human herpesvirus 5
cgcgcgaccgcg

SEQ ID NO: 2034536 - RNA, 12 nt, Human herpesvirus 5
cgcgcgcccgcg

SEQ ID NO: 2034537 - RNA, 13 nt, Human herpesvirus 5
cgcgcgcccgcgc

SEQ ID NO: 2034538 - RNA, 18 nt, Human herpesvirus 5
cgcggcccccacggcggc

SEQ ID NO: 2034539 - RNA, 13 nt, Human herpesvirus 5
cgcggccgucacg

SEQ ID NO: 2034540 - RNA, 14 nt, Human herpesvirus 5
cgcggcgacgagga

SEQ ID NO: 2034541 - RNA, 15 nt, Human herpesvirus 5
cgcggcgacgggugg

SEQ ID NO: 2034542 - RNA, 17 nt, Human herpesvirus 5
cgcggcgagguggucaa

SEQ ID NO: 2034543 - RNA, 14 nt, Human herpesvirus 5
cgcggcagcggcgc

SEQ ID NO: 2034544 - RNA, 17 nt, Human herpesvirus 5
cgcgccuuccuccucug

SEQ ID NO: 2034545 - RNA, 14 nt, Human herpesvirus 5
cgcgcgagcgugcg

SEQ ID NO: 2034546 - RNA, 17 nt, Human herpesvirus 5
cgcggacgccugcgacg

SEQ ID NO: 2034547 - RNA, 15 nt, Human herpesvirus 5
cgcggaggacagcaa

SEQ ID NO: 2034548 - RNA, 23 nt, Human herpesvirus 5
cgcggagguuugucuggcggcuu

SEQ ID NO: 2034549 - RNA, 15 nt, Human herpesvirus 5
ccggaaacaccgcga

SEQ ID NO: 2034550 - RNA, 20 nt, Human herpesvirus 5
ccggacgugcuuggacuggu

SEQ ID NO: 2034551 - RNA, 14 nt, Human herpesvirus 5
ccggaccgugcacg

SEQ ID NO: 2034552 - RNA, 17 nt, Human herpesvirus 5
ccggaacgcuguuacga

SEQ ID NO: 2034553 - RNA, 13 nt, Human
aagugguauagaa

SEQ ID NO: 2034554 - RNA, 17 nt, Human
aagugguauagaaaugc

SEQ ID NO: 2034555 - RNA, 15 nt, Human
aaguuguuaauaaaa

SEQ ID NO: 2034556 - RNA, 21 nt, Human
aagaaauuuccacucaggucu

SEQ ID NO: 2034557 - RNA, 16 nt, Human
aaagggaacugaacau

SEQ ID NO: 2034558 - RNA, 21 nt, Human
aaagggaacugaacauuccag

SEQ ID NO: 2034559 - RNA, 12 nt, Human
aaagugcuggga

SEQ ID NO: 2034560 - RNA, 23 nt, Human
aaagugagacuuugaggguguau

SEQ ID NO: 2034561 - RNA, 15 nt, Human
aacugaauuuugucu

SEQ ID NO: 2034562 - RNA, 14 nt, Human
aacugaauuuuguc

SEQ ID NO: 2034563 - RNA, 20 nt, Human
aacuuuuuuuuaaguuacac

SEQ ID NO: 2034564 - RNA, 14 nt, Human
aacuuuuuuuuaag

SEQ ID NO: 2034565 - RNA, 19 nt, Human
acgugauuuugcuguagaa

SEQ ID NO: 2034566 - RNA, 15 nt, Human
acuuauuuauauaaa

SEQ ID NO: 2034567 - RNA, 20 nt, Human
agaaaagggaacugaacauu

SEQ ID NO: 2034568 - RNA, 24 nt, Human
acaacuugcacguauuuuaauagc

SEQ ID NO: 2034569 - RNA, 17 nt, Human
auaugcaguuuuccuua

SEQ ID NO: 2034570 - RNA, 23 nt, Human
aguuguuaauaaaaguacauguu

SEQ ID NO: 2034571 - RNA, 16 nt, Human
aguccacaguggaacc

SEQ ID NO: 2034572 - RNA, 15 nt, Human
aucucucuucuuuuc

SEQ ID NO: 2034573 - RNA, 11 nt, Human
agccuccugag

SEQ ID NO: 2034574 - RNA, 19 nt, Human
agccuccugaguagcugga

SEQ ID NO: 2034575 - RNA, 20 nt, Human
agcccaaagugguauagaaa

SEQ ID NO: 2034576 - RNA, 23 nt, Human
agcccaaagugguauagaaaugc

SEQ ID NO: 2034577 - RNA, 20 nt, Human
agggacucaucauuuccauu

SEQ ID NO: 2034578 - RNA, 21 nt, Human
cucgugguaggacuguagaaa

SEQ ID NO: 2034579 - RNA, 20 nt, Human
cugaguagcuggauuacagg

SEQ ID NO: 2034580 - RNA, 19 nt, Human
cugaguagcuggauuacag

SEQ ID NO: 2034581 - RNA, 18 nt, Human
cgugauuuugcuguagaa

SEQ ID NO: 2034582 - RNA, 17 nt, Human
cgacugccaucuuggac

SEQ ID NO: 2034583 - RNA, 13 nt, Human
cuacaguguacag

SEQ ID NO: 2034584 - RNA, 14 nt, Human
cuacaguguacagu

SEQ ID NO: 2034585 - RNA, 14 nt, Human
cucaaacuccugac

SEQ ID NO: 2034586 - RNA, 13 nt, Human
cucaaacuccuga

SEQ ID NO: 2034587 - RNA, 23 nt, Human
ccgcaggauuugggcucuuggaa

SEQ ID NO: 2034588 - RNA, 11 nt, Human
cccagcuguuu

SEQ ID NO: 2034589 - RNA, 15 nt, Human
auuucagauuuguga

SEQ ID NO: 2034590 - RNA, 13 nt, Human
auuguacaguuuu

SEQ ID NO: 2034591 - RNA, 20 nt, Human
auuuuuaaagaaaaguuuug

SEQ ID NO: 2034592 - RNA, 13 nt, Human
auuuuuaaagaaa

SEQ ID NO: 2034593 - RNA, 22 nt, Human
caaguaauccaccugccucggc

SEQ ID NO: 2034594 - RNA, 14 nt, Human
cacauuuuucagau

SEQ ID NO: 2034595 - RNA, 18 nt, Human
cacauuuuucagauauaa

SEQ ID NO: 2034596 - RNA, 23 nt, Human
caccuacaguguacagucuugua

SEQ ID NO: 2034597 - RNA, 21 nt, Human
cagcuguuuaugcauagauaa

SEQ ID NO: 2034598 - RNA, 16 nt, Human
cauguuggccaggcug

SEQ ID NO: 2034599 - RNA, 14 nt, Human
cugguuuuucaguu

SEQ ID NO: 2034600 - RNA, 15 nt, Human
cugguuuuucaguuu

SEQ ID NO: 2034601 - RNA, 16 nt, Human
cugguuuuucaguuuu

SEQ ID NO: 2034602 - RNA, 14 nt, Human
cuuuuuuuuaaguu

SEQ ID NO: 2034603 - RNA, 14 nt, Human
ggauuuuugucuug

SEQ ID NO: 2034604 - RNA, 16 nt, Human
ggauuuuugucuugug

SEQ ID NO: 2034605 - RNA, 15 nt, Human
aaaaucugcuaggga

SEQ ID NO: 2034606 - RNA, 13 nt, Human
gguauagaaaugc

SEQ ID NO: 2034607 - RNA, 16 nt, Human
guaaagcuagaaauga

SEQ ID NO: 2034608 - RNA, 15 nt, Human
guaaagcuagaaaug

SEQ ID NO: 2034609 - RNA, 14 nt, Human
aaagcuagaaauga

SEQ ID NO: 2034610 - RNA, 16 nt, Human
aaagugguauagaaau

SEQ ID NO: 2034611 - RNA, 17 nt, Human
aaagugguauagaaaug

SEQ ID NO: 2034612 - RNA, 20 nt, Human
aaagugguauagaaaugcug

SEQ ID NO: 2034613 - RNA, 21 nt, Human
aaaguauccugcuucugauau

SEQ ID NO: 2034614 - RNA, 23 nt, Human
aagauggcacuuauaaccaaagc

SEQ ID NO: 2034615 - RNA, 13 nt, Human
guguuucuuuagu

SEQ ID NO: 2034616 - RNA, 16 nt, Human
guguuucuuuaguuuu

SEQ ID NO: 2034617 - RNA, 12 nt, Human
guuaauaaaagu

SEQ ID NO: 2034618 - RNA, 16 nt, Human
guucuuaagacgugau

SEQ ID NO: 2034619 - RNA, 14 nt, Human
aaguuacacauuuu

SEQ ID NO: 2034620 - RNA, 21 nt, Human
aagugauucuccugccucagc

SEQ ID NO: 2034621 - RNA, 20 nt, Human
uaaaaguacauguuaaacuu

SEQ ID NO: 2034622 - RNA, 23 nt, Human
gucuaggcaggaccuguggccaa

SEQ ID NO: 2034623 - RNA, 17 nt, Human
aaauuucucuacugucu

SEQ ID NO: 2034624 - RNA, 20 nt, Human
gucuuguguuucuuuaguuu

SEQ ID NO: 2034625 - RNA, 17 nt, Human
aacguuuuuccuguucu

SEQ ID NO: 2034626 - RNA, 19 nt, Human
gugaaguuuaauugacuua

SEQ ID NO: 2034627 - RNA, 19 nt, Human
aagaaagcccuuaggaaga

SEQ ID NO: 2034628 - RNA, 13 nt, Human
uaggacuguagaa

SEQ ID NO: 2034629 - RNA, 14 nt, Human
uaggacuguagaaa

SEQ ID NO: 2034630 - RNA, 21 nt, Human
uagcuuacaagccagcuggag

SEQ ID NO: 2034631 - RNA, 21 nt, Human
uagugaaucacguaaagcuag

SEQ ID NO: 2034632 - RNA, 14 nt, Human
aauugacuuauuua

SEQ ID NO: 2034633 - RNA, 19 nt, Human
uaauagcgucauaacuaga

SEQ ID NO: 2034634 - RNA, 13 nt, Human
aaugacacagucu

SEQ ID NO: 2034635 - RNA, 13 nt, Human
aaucuuucugcag

SEQ ID NO: 2034636 - RNA, 21 nt, Human
aauccuggggaacauagaacu

SEQ ID NO: 2034637 - RNA, 14 nt, Human
aauccuggggaaca

SEQ ID NO: 2034638 - RNA, 18 nt, Human
uaacauggugugcuucuu

SEQ ID NO: 2034639 - RNA, 12 nt, Human
uaacuagaacug

SEQ ID NO: 2034640 - RNA, 14 nt, Human
uaacuagaacugaa

SEQ ID NO: 2034641 - RNA, 17 nt, Human
uaacuagaacugaauuu

SEQ ID NO: 2034642 - RNA, 20 nt, Human
uaacuagaacugaauuuugu

SEQ ID NO: 2034643 - RNA, 12 nt, Human
aauauuccagag

SEQ ID NO: 2034644 - RNA, 14 nt, Human
aauauuguacaguu

SEQ ID NO: 2034645 - RNA, 15 nt, Human
aauauuguacaguuu

SEQ ID NO: 2034646 - RNA, 17 nt, Human
aauauuguacaguuuuu

SEQ ID NO: 2034647 - RNA, 23 nt, Human
aauauuguacaguuuuuauugcu

SEQ ID NO: 2034648 - RNA, 21 nt, Human
ucaccauguuggccaggcugg

SEQ ID NO: 2034649 - RNA, 15 nt, Human
ucaccauguuggcca

SEQ ID NO: 2034650 - RNA, 19 nt, Human
ucacguaaagcuagaaaug

SEQ ID NO: 2034651 - RNA, 20 nt, Human
ucacguaaagcuagaaauga

SEQ ID NO: 2034652 - RNA, 18 nt, Human
ucacguaaagcuagaaau

SEQ ID NO: 2034653 - RNA, 11 nt, Human
acauuuuguau

SEQ ID NO: 2034654 - RNA, 15 nt, Human
acauugcaauagaaa

SEQ ID NO: 2034655 - RNA, 16 nt, Human
acauugcaauagaaau

SEQ ID NO: 2034656 - RNA, 14 nt, Human
acauugcaauagaa

SEQ ID NO: 2034657 - RNA, 12 nt, Human
acccuucuuuuc

SEQ ID NO: 2034658 - RNA, 16 nt, Human
ucaguuuucaggagug

SEQ ID NO: 2034659 - RNA, 17 nt, Human
acguaaagcuagaaaug

SEQ ID NO: 2034660 - RNA, 18 nt, Human
acguaaagcuagaaauga

SEQ ID NO: 2034661 - RNA, 16 nt, Human
acugcaacuucugccu

SEQ ID NO: 2034662 - RNA, 14 nt, Human
acugcaacuucugc

SEQ ID NO: 2034663 - RNA, 13 nt, Human
acugaacauucca

SEQ ID NO: 2034664 - RNA, 16 nt, Human
acugaacauuccagag

SEQ ID NO: 2034665 - RNA, 22 nt, Human
agaaagcccuuaggaagaauuu

SEQ ID NO: 2034666 - RNA, 20 nt, Human
agaaagcccuuaggaagaau

SEQ ID NO: 2034667 - RNA, 16 nt, Human
ucuguugcccaggcug

SEQ ID NO: 2034668 - RNA, 19 nt, Human
ugacuauuuuucagaaucu

SEQ ID NO: 2034669 - RNA, 19 nt, Human
ugaccugccaggcacacug

SEQ ID NO: 2034670 - RNA, 16 nt, Human
ugaccugccaggcaca

SEQ ID NO: 2034671 - RNA, 16 nt, Human
agaucguucucugccu

SEQ ID NO: 2034672 - RNA, 22 nt, Human
agcaccuacaguguacagucuu

SEQ ID NO: 2034673 - RNA, 14 nt, Human
agcaccuacagugu

SEQ ID NO: 2034674 - RNA, 15 nt, Human
agcaccuacagugua

SEQ ID NO: 2034675 - RNA, 19 nt, Human
agcaccuacaguguacagu

SEQ ID NO: 2034676 - RNA, 21 nt, Human
agcaccuacaguguacagucu

SEQ ID NO: 2034677 - RNA, 23 nt, Human
ucuuuuuuuuuuuuuaaagacag

SEQ ID NO: 2034678 - RNA, 17 nt, Human
aguagcuggauuacagg

SEQ ID NO: 2034679 - RNA, 21 nt, Human
uguauuaaguuguuaauaaaa

SEQ ID NO: 2034680 - RNA, 18 nt, Human
ugucuuguguuucuuuag

SEQ ID NO: 2034681 - RNA, 21 nt, Human
ugucucgugguaggacuguag

SEQ ID NO: 2034682 - RNA, 18 nt, Human
ugucucgugguaggacug

SEQ ID NO: 2034683 - RNA, 19 nt, Human
ugucucgugguaggacugu

SEQ ID NO: 2034684 - RNA, 20 nt, Human
ugucucgugguaggacugua

SEQ ID NO: 2034685 - RNA, 15 nt, Human
agucuuuuccaugaa

SEQ ID NO: 2034686 - RNA, 13 nt, Human
agucuuuuccaug

SEQ ID NO: 2034687 - RNA, 15 nt, Human
uggugaacauugcaa

SEQ ID NO: 2034688 - RNA, 20 nt, Human
uggugaacauugcaauagaa

SEQ ID NO: 2034689 - RNA, 20 nt, Human
auaaccaaagcccaaagugg

SEQ ID NO: 2034690 - RNA, 17 nt, Human
aguguacagucuuguau

SEQ ID NO: 2034691 - RNA, 16 nt, Human
uguucuuaagacguga

SEQ ID NO: 2034692 - RNA, 13 nt, Human
aguguacagucuu

SEQ ID NO: 2034693 - RNA, 15 nt, Human
aguguacagucuugu

SEQ ID NO: 2034694 - RNA, 16 nt, Human
aguguacagucuugua

SEQ ID NO: 2034695 - RNA, 21 nt, Human
ugauuucagcaccuacagugu

SEQ ID NO: 2034696 - RNA, 20 nt, Human
ugauuucagcaccuacagug

SEQ ID NO: 2034697 - RNA, 13 nt, Human
ugauucuccugcc

SEQ ID NO: 2034698 - RNA, 17 nt, Human
ugccucagccuccugag

SEQ ID NO: 2034699 - RNA, 16 nt, Human
uggccaaguucuuagu

SEQ ID NO: 2034700 - RNA, 13 nt, Human
aggccaaaaaaau

SEQ ID NO: 2034701 - RNA, 22 nt, Human
aggccaacccaaaauaagcagg

SEQ ID NO: 2034702 - RNA, 13 nt, Human
auccaauuggaua

SEQ ID NO: 2034703 - RNA, 19 nt, Human
auccugcuucugauaugca

SEQ ID NO: 2034704 - RNA, 21 nt, Human
auccugcuucugauaugcagu

SEQ ID NO: 2034705 - RNA, 13 nt, Human
auauuguacaguu

SEQ ID NO: 2034706 - RNA, 14 nt, Human
auauuguacaguuu

SEQ ID NO: 2034707 - RNA, 12 nt, Human
auauuguacagu

SEQ ID NO: 2034708 - RNA, 16 nt, Human
aucaauucauaucuau

SEQ ID NO: 2034709 - RNA, 20 nt, Human
uucauaucuauuuauuaaau

SEQ ID NO: 2034710 - RNA, 22 nt, Human
uucagauauaaaagacugacca

SEQ ID NO: 2034711 - RNA, 15 nt, Human
uuucaguuuucagga

SEQ ID NO: 2034712 - RNA, 19 nt, Human
uuuauuaaauguagaaagu

SEQ ID NO: 2034713 - RNA, 13 nt, Human
uuuaaagaaaagu

SEQ ID NO: 2034714 - RNA, 15 nt, Human
uuuaaagaaaaguuu

SEQ ID NO: 2034715 - RNA, 17 nt, Human
uuuaaagaaaaguuuug

SEQ ID NO: 2034716 - RNA, 21 nt, Human
uuuaaagaaaaguuuuguaaa

SEQ ID NO: 2034717 - RNA, 19 nt, Human
uuuccuuaaauuaucuaaa

SEQ ID NO: 2034718 - RNA, 21 nt, Human
uuucuuuaguuuuugugaagu

SEQ ID NO: 2034719 - RNA, 14 nt, Human
uuucucaaagaaau

SEQ ID NO: 2034720 - RNA, 15 nt, Human
uuucucaaagaaauu

SEQ ID NO: 2034721 - RNA, 16 nt, Human
uuucucaaagaaauuu

SEQ ID NO: 2034722 - RNA, 18 nt, Human
augagccaccgcgcccag

SEQ ID NO: 2034723 - RNA, 21 nt, Human
augagccaccgcgcccagccu

SEQ ID NO: 2034724 - RNA, 13 nt, Human
aucuuucugcaga

SEQ ID NO: 2034725 - RNA, 17 nt, Human
auuuuacuuuuuccugg

SEQ ID NO: 2034726 - RNA, 16 nt, Human
auuuuacuuuuuccug

SEQ ID NO: 2034727 - RNA, 22 nt, Human
auuuccacucaggucuguuuuc

SEQ ID NO: 2034728 - RNA, 18 nt, Human
auucuccugccucagccu

SEQ ID NO: 2034729 - RNA, 14 nt, Human
uuuucaguuuucag

SEQ ID NO: 2034730 - RNA, 12 nt, Human
uuuucaguuuuc

SEQ ID NO: 2034731 - RNA, 20 nt, Human
uuuuaggccaaaaaaaugua

SEQ ID NO: 2034732 - RNA, 21 nt, Human
auguuaaacuuacuuaguguu

SEQ ID NO: 2034733 - RNA, 14 nt, Human
auuaaguuguuaau

SEQ ID NO: 2034734 - RNA, 19 nt, Human
auuaaguuguuaauaaaag

SEQ ID NO: 2034735 - RNA, 20 nt, Human
auuaaguuguuaauaaaagu

SEQ ID NO: 2034736 - RNA, 12 nt, Human
uuuuguuucaua

SEQ ID NO: 2034737 - RNA, 19 nt, Human
uuuuguuucauauugaugu

SEQ ID NO: 2034738 - RNA, 13 nt, Human
uuuugcuguagaa

SEQ ID NO: 2034739 - RNA, 14 nt, Human
uuuugcuguagaag

SEQ ID NO: 2034740 - RNA, 14 nt, Human
caauauuguacagu

SEQ ID NO: 2034741 - RNA, 14 nt, Human
caagccagcuggag

SEQ ID NO: 2034742 - RNA, 19 nt, Human
caaagugcugggauuacag

SEQ ID NO: 2034743 - RNA, 20 nt, Human
caaagugcugggauuacagg

SEQ ID NO: 2034744 - RNA, 16 nt, Human
cacugcaacuucugcc

SEQ ID NO: 2034745 - RNA, 17 nt, Human
cacugcaacuucugccu

SEQ ID NO: 2034746 - RNA, 16 nt, Human
cacucaggucuguuuu

SEQ ID NO: 2034747 - RNA, 23 nt, Human
cagagucucgcucuguugcccag

SEQ ID NO: 2034748 - RNA, 20 nt, Human
cagccuccugaguagcugga

SEQ ID NO: 2034749 - RNA, 18 nt, Human
cagcuggagaaauauggu

SEQ ID NO: 2034750 - RNA, 17 nt, Human
caggaccuguggccaag

SEQ ID NO: 2034751 - RNA, 16 nt, Human
cagucuuggcucacug

SEQ ID NO: 2034752 - RNA, 17 nt, Human
cagucuuguauuaaguu

SEQ ID NO: 2034753 - RNA, 17 nt, Human
caggaguggguugauuu

SEQ ID NO: 2034754 - RNA, 23 nt, Human
caggcuggucucaaacuccugac

SEQ ID NO: 2034755 - RNA, 14 nt, Human
cauguguuccaagg

SEQ ID NO: 2034756 - RNA, 22 nt, Human
cauuaaaaaaaaaaaaaaaagu

SEQ ID NO: 2034757 - RNA, 22 nt, Human
cauuuacccuucuuuucugacu

SEQ ID NO: 2034758 - RNA, 17 nt, Human
cauuuuacuuuuuccug

SEQ ID NO: 2034759 - RNA, 20 nt, Human
cauuuuacuuuuuccuggcu

SEQ ID NO: 2034760 - RNA, 22 nt, Human
cauuuuacuuuuuccuggcuca

SEQ ID NO: 2034761 - RNA, 20 nt, Human
cccaaagugguauagaaaug

SEQ ID NO: 2034762 - RNA, 21 nt, Human
cccaaagugguauagaaaugc

SEQ ID NO: 2034763 - RNA, 19 nt, Human
ccagccucaucucuuuguu

SEQ ID NO: 2034764 - RNA, 14 nt, Human
ccuuagaaguggaa

SEQ ID NO: 2034765 - RNA, 17 nt, Human
cccgucgacguagaacc

SEQ ID NO: 2034766 - RNA, 16 nt, Human
cuuagaaguggaagua

SEQ ID NO: 2034767 - RNA, 18 nt, Human
cuguucuuaagacgugau

SEQ ID NO: 2034768 - RNA, 17 nt, Human
cuuuauuaaauguagaa

SEQ ID NO: 2034769 - RNA, 13 nt, Human
cuuuaguuuuugu

SEQ ID NO: 2034770 - RNA, 15 nt, Human
cuuuaguuuuuguga

SEQ ID NO: 2034771 - RNA, 23 nt, Human
cuuguuggauuuuugucuugugu

SEQ ID NO: 2034772 - RNA, 21 nt, Human
cuuguguuucuuuaguuuuug

SEQ ID NO: 2034773 - RNA, 21 nt, Human
cuuguuggauuuuugucuugu

SEQ ID NO: 2034774 - RNA, 18 nt, Human
cuuuguucuaaagaugga

SEQ ID NO: 2034775 - RNA, 18 nt, Human
gaaguuuaauugacuuau

SEQ ID NO: 2034776 - RNA, 23 nt, Human
gaaaugcugguuuuucaguuuuc

SEQ ID NO: 2034777 - RNA, 20 nt, Human
cucuguugcccaggcuggag

SEQ ID NO: 2034778 - RNA, 22 nt, Human
cucuguugcccaggcuggagug

SEQ ID NO: 2034779 - RNA, 20 nt, Human
cucuuuguucuaaagaugga

SEQ ID NO: 2034780 - RNA, 15 nt, Human
cugaacauuccagag

SEQ ID NO: 2034781 - RNA, 21 nt, Human
cuccugccucagccuccugag

SEQ ID NO: 2034782 - RNA, 13 nt, Human
cuccuuagaagug

SEQ ID NO: 2034783 - RNA, 17 nt, Human
cuccuuagaaguggaag

SEQ ID NO: 2034784 - RNA, 20 nt, Human
cuccuuagaaguggaaguag

SEQ ID NO: 2034785 - RNA, 13 nt, Human
cucauuaaaaaaa

SEQ ID NO: 2034786 - RNA, 23 nt, Human
cuccaaguccacaguggaaccag

SEQ ID NO: 2034787 - RNA, 14 nt, Human
cucaagacuuccag

SEQ ID NO: 2034788 - RNA, 16 nt, Human
cucaagacuuccagag

SEQ ID NO: 2034789 - RNA, 20 nt, Human
gaggcggccccggccggggu

SEQ ID NO: 2034790 - RNA, 18 nt, Human
gagccaccgcgcccagcc

SEQ ID NO: 2034791 - RNA, 12 nt, Human
gaguagcuggau

SEQ ID NO: 2034792 - RNA, 21 nt, Human
gauggcacuuauaaccaaagc

SEQ ID NO: 2034793 - RNA, 17 nt, Human
gccaccgcgcccagccu

SEQ ID NO: 2034794 - RNA, 12 nt, Human
gccaaguucuua

SEQ ID NO: 2034795 - RNA, 14 nt, Human
gcuuguuggauuuu

SEQ ID NO: 2034796 - RNA, 20 nt, Human
gcuggucucaaacuccugac

SEQ ID NO: 2034797 - RNA, 19 nt, Human
gcuggucucaaacuccuga

SEQ ID NO: 2034798 - RNA, 21 nt, Human
ucagggagugggcuaagcacg

SEQ ID NO: 2034799 - RNA, 20 nt, Human
ucagccuccugaguagcugg

SEQ ID NO: 2034800 - RNA, 13 nt, Human
ucagccuccugag

SEQ ID NO: 2034801 - RNA, 21 nt, Human
ucagccuccugaguagcugga

SEQ ID NO: 2034802 - RNA, 18 nt, Human
ucagauauaaaagacuga

SEQ ID NO: 2034803 - RNA, 20 nt, Human
ucagauauaaaagacugacc

SEQ ID NO: 2034804 - RNA, 14 nt, Human
ucagauauaaaaga

SEQ ID NO: 2034805 - RNA, 17 nt, Human
ucagauauaaaagacug

SEQ ID NO: 2034806 - RNA, 19 nt, Human
uauugcuuguuggauuuuu

SEQ ID NO: 2034807 - RNA, 21 nt, Human
uauugcuugcacaaaccaauu

SEQ ID NO: 2034808 - RNA, 19 nt, Human
ucaagugauucuccugccu

SEQ ID NO: 2034809 - RNA, 18 nt, Human
ucaagugauucuccugcc

SEQ ID NO: 2034810 - RNA, 13 nt, Human
uauuuauauaaau

SEQ ID NO: 2034811 - RNA, 15 nt, Human
ucaaaugagaaaaug

SEQ ID NO: 2034812 - RNA, 12 nt, Human
ucaaagaaauuu

SEQ ID NO: 2034813 - RNA, 13 nt, Human
ucaaagaaauuuc

SEQ ID NO: 2034814 - RNA, 19 nt, Human
ucaaagaaauuuccacuca

SEQ ID NO: 2034815 - RNA, 20 nt, Human
ucaaagaaauuuccacucag

SEQ ID NO: 2034816 - RNA, 19 nt, Human
ucuucuuuuugcuucaaaa

SEQ ID NO: 2034817 - RNA, 21 nt, Human
ucucgugguaggacuguagaa

SEQ ID NO: 2034818 - RNA, 19 nt, Human
ucucgugguaggacuguag

SEQ ID NO: 2034819 - RNA, 16 nt, Human
ucgagguuucucaaag

SEQ ID NO: 2034820 - RNA, 22 nt, Human
ucgagguuucucaaagaaauuu

SEQ ID NO: 2034821 - RNA, 19 nt, Human
ucucaaagaaauuuccacu

SEQ ID NO: 2034822 - RNA, 21 nt, Human
ucucaaagaaauuuccacuca

SEQ ID NO: 2034823 - RNA, 22 nt, Human
ucucaaagaaauuuccacucag

SEQ ID NO: 2034824 - RNA, 14 nt, Human
uccugccucagccu

SEQ ID NO: 2034825 - RNA, 16 nt, Human
ucccguggaacguuuu

SEQ ID NO: 2034826 - RNA, 22 nt, Human
ucccguggaacguuuuuccugu

SEQ ID NO: 2034827 - RNA, 23 nt, Human
ucccguggaacguuuuuccuguu

SEQ ID NO: 2034828 - RNA, 13 nt, Human
uccccuucacucc

SEQ ID NO: 2034829 - RNA, 16 nt, Human
ugguuuuucaguuuuc

SEQ ID NO: 2034830 - RNA, 20 nt, Human
ugguggggcugccaggggag

SEQ ID NO: 2034831 - RNA, 17 nt, Human
ugucuaggcaggaccug

SEQ ID NO: 2034832 - RNA, 19 nt, Human
ugucuaggcaggaccugug

SEQ ID NO: 2034833 - RNA, 13 nt, Human
uggccuccaaguc

SEQ ID NO: 2034834 - RNA, 23 nt, Human
uggccuccaaguccacaguggaa

SEQ ID NO: 2034835 - RNA, 19 nt, Human
ugauaugcaguuuuccuua

SEQ ID NO: 2034836 - RNA, 21 nt, Human
ugcaaugacacagucuuggcu

SEQ ID NO: 2034837 - RNA, 19 nt, Human
ugauuuuuaaagaaaaguu

SEQ ID NO: 2034838 - RNA, 17 nt, Human
ugauuuugcuguagaag

SEQ ID NO: 2034839 - RNA, 19 nt, Human
ugauuuugcuguagaagau

SEQ ID NO: 2034840 - RNA, 14 nt, Human
ugauuuugcuguag

SEQ ID NO: 2034841 - RNA, 16 nt, Human
ugauuuugcuguagaa

SEQ ID NO: 2034842 - RNA, 13 nt, Human
ugcaacuucugcc

SEQ ID NO: 2034843 - RNA, 14 nt, Human
ugcaacuucugccu

SEQ ID NO: 2034844 - RNA, 15 nt, Human
uuuucagauauaaaa

SEQ ID NO: 2034845 - RNA, 12 nt, Human
uuuuucaguuuu

SEQ ID NO: 2034846 - RNA, 15 nt, Human
uuuuucaguuuucag

SEQ ID NO: 2034847 - RNA, 18 nt, Human
uuuuuaaguuacacauuu

SEQ ID NO: 2034848 - RNA, 17 nt, Human
uuuuuaauaaagacagg

SEQ ID NO: 2034849 - RNA, 20 nt, Human
uuuuuaauaaagacaggguu

SEQ ID NO: 2034850 - RNA, 19 nt, Human
uugcacguauuuuaauagc

SEQ ID NO: 2034851 - RNA, 21 nt, Human
uuggugaacauugcaauagaa

SEQ ID NO: 2034852 - RNA, 19 nt, Human
uuguguuucuuuaguuuuu

SEQ ID NO: 2034853 - RNA, 21 nt, Human
uuguuaauaaaaguacauguu

SEQ ID NO: 2034854 - RNA, 14 nt, Human
uuguuaauaaaagu

SEQ ID NO: 2034855 - RNA, 19 nt, Human
uuguuaauaaaaguacaug

SEQ ID NO: 2034856 - RNA, 18 nt, Human
uuuaaguuacacauuuuu

SEQ ID NO: 2034857 - RNA, 22 nt, Human
uuuaauagcgucauaacuagaa

SEQ ID NO: 2034858 - RNA, 21 nt, Human
uuuaauagcgucauaacuaga

SEQ ID NO: 2034859 - RNA, 14 nt, Human
uuucagauauaaaa

SEQ ID NO: 2034860 - RNA, 16 nt, Human
uuucagauauaaaaga

SEQ ID NO: 2034861 - RNA, 18 nt, Human
uuucagauauaaaagacu

SEQ ID NO: 2034862 - RNA, 23 nt, Human
uuucagcaccuacaguguacagu

SEQ ID NO: 2034863 - RNA, 22 nt, Human
uucugauaugcaguuuuccuua

SEQ ID NO: 2034864 - RNA, 14 nt, Human
uucuuaguugcugu

SEQ ID NO: 2034865 - RNA, 15 nt, Human
uucuuaguugcugua

SEQ ID NO: 2034866 - RNA, 23 nt, Human
uucuuaguugcuguaugucucgu

SEQ ID NO: 2034867 - RNA, 19 nt, Human
uucagauauaaaagacuga

SEQ ID NO: 2034868 - RNA, 14 nt, Human
uucagauauaaaag

SEQ ID NO: 2034869 - RNA, 15 nt, Human
uucagauauaaaaga

SEQ ID NO: 2034870 - RNA, 12 nt, Human
uucagauauaaa

SEQ ID NO: 2034871 - RNA, 13 nt, Human
uuccagagccuca

SEQ ID NO: 2034872 - RNA, 16 nt, Human
uuaugauuuuuaaaga

SEQ ID NO: 2034873 - RNA, 19 nt, Human
uuaugauuuuuaaagaaaa

SEQ ID NO: 2034874 - RNA, 14 nt, Human
acuauuuuucagaa

SEQ ID NO: 2034875 - RNA, 18 nt, Human
acuauuuuucagaaucuc

SEQ ID NO: 2034876 - RNA, 14 nt, Human
acacauuuuucaga

SEQ ID NO: 2034877 - RNA, 15 nt, Human
accagcccagacccu

SEQ ID NO: 2034878 - RNA, 17 nt, Human
aaauuuuuuuuguuuca

SEQ ID NO: 2034879 - RNA, 18 nt, Human
aaauuuuuuuuguuucau

SEQ ID NO: 2034880 - RNA, 19 nt, Human
aaagcccuuaggaagaauu

SEQ ID NO: 2034881 - RNA, 14 nt, Human
aaguccacagugga

SEQ ID NO: 2034882 - RNA, 19 nt, Human
aaguccacaguggaaccag

SEQ ID NO: 2034883 - RNA, 18 nt, Human
aaguauccugcuucugau

SEQ ID NO: 2034884 - RNA, 15 nt, Human
aaguaguggagcccc

SEQ ID NO: 2034885 - RNA, 13 nt, Human
aauguuuccuuua

SEQ ID NO: 2034886 - RNA, 12 nt, Human
aauguuuccuuu

SEQ ID NO: 2034887 - RNA, 16 nt, Human
aaugauccccagcugu

SEQ ID NO: 2034888 - RNA, 22 nt, Human
aaugauccccagcuguuuaugc

SEQ ID NO: 2034889 - RNA, 19 nt, Human
aaugauccccagcuguuua

SEQ ID NO: 2034890 - RNA, 20 nt, Human
aaugauccccagcuguuuau

SEQ ID NO: 2034891 - RNA, 16 nt, Human
aaucucuccauucccg

SEQ ID NO: 2034892 - RNA, 17 nt, Human
agacgugauuuugcugu

SEQ ID NO: 2034893 - RNA, 18 nt, Human
aggaguggguugauuuca

SEQ ID NO: 2034894 - RNA, 19 nt, Human
auaaauuuuuuuuguuuca

SEQ ID NO: 2034895 - RNA, 22 nt, Human
auaaauuuuuuuuguuucauau

SEQ ID NO: 2034896 - RNA, 11 nt, Human
auaaagacagg

SEQ ID NO: 2034897 - RNA, 16 nt, Human
aguuguuaauaaaagu

SEQ ID NO: 2034898 - RNA, 15 nt, Human
cucgugguaggacug

SEQ ID NO: 2034899 - RNA, 16 nt, Human
cucgugguaggacugu

SEQ ID NO: 2034900 - RNA, 17 nt, Human
cucgugguaggacugua

SEQ ID NO: 2034901 - RNA, 14 nt, Human
cuauuuuucagaau

SEQ ID NO: 2034902 - RNA, 22 nt, Human
cucaaagaaauuuccacucagg

SEQ ID NO: 2034903 - RNA, 21 nt, Human
cgagguuucucaaagaaauuu

SEQ ID NO: 2034904 - RNA, 20 nt, Human
cccaggcuggagugcaauga

SEQ ID NO: 2034905 - RNA, 21 nt, Human
ccucgagguuucucaaagaaa

SEQ ID NO: 2034906 - RNA, 14 nt, Human
ccucaaaugagaaa

SEQ ID NO: 2034907 - RNA, 22 nt, Human
cauagcuuacaagccagcugga

SEQ ID NO: 2034908 - RNA, 20 nt, Human
cagcaccuacaguguacagu

SEQ ID NO: 2034909 - RNA, 15 nt, Human
cagcaccuacagugu

SEQ ID NO: 2034910 - RNA, 14 nt, Human
auugcuugcacaaa

SEQ ID NO: 2034911 - RNA, 16 nt, Human
auugcuuguuggauuu

SEQ ID NO: 2034912 - RNA, 22 nt, Human
caaaugagaaaaugucuuuauu

SEQ ID NO: 2034913 - RNA, 20 nt, Human
cagaaagguuuucuucuuuu

SEQ ID NO: 2034914 - RNA, 12 nt, Human
caagauuucaga

SEQ ID NO: 2034915 - RNA, 15 nt, Human
gccccugcucuggug

SEQ ID NO: 2034916 - RNA, 9 nt, Human
aaagacaga

SEQ ID NO: 2034917 - RNA, 19 nt, Human
aaagacugaccaauauugu

SEQ ID NO: 2034918 - RNA, 15 nt, Human
guaauccaccugccu

SEQ ID NO: 2034919 - RNA, 16 nt, Human
aaaguacauguuaaac

SEQ ID NO: 2034920 - RNA, 14 nt, Human
guacucauuaaaaa

SEQ ID NO: 2034921 - RNA, 12 nt, Human
guagaagauggc

SEQ ID NO: 2034922 - RNA, 17 nt, Human
gacaggguuucaccaug

SEQ ID NO: 2034923 - RNA, 18 nt, Human
gcaccuacaguguacagu

SEQ ID NO: 2034924 - RNA, 19 nt, Human
gcaccuacaguguacaguc

SEQ ID NO: 2034925 - RNA, 21 nt, Human
gcaccuacaguguacagucuu

SEQ ID NO: 2034926 - RNA, 22 nt, Human
gauggaaaaaccacccccaaau

SEQ ID NO: 2034927 - RNA, 23 nt, Human
cuuggguucaagugauucuccug

SEQ ID NO: 2034928 - RNA, 15 nt, Human
cuuaggaagaauuuu

SEQ ID NO: 2034929 - RNA, 16 nt, Human
cuuacaagccagcugg

SEQ ID NO: 2034930 - RNA, 17 nt, Human
cuuacaagccagcugga

SEQ ID NO: 2034931 - RNA, 20 nt, Human
cuuacauuuuacuuuuuccu

SEQ ID NO: 2034932 - RNA, 19 nt, Human
cuguagaaaagggaacuga

SEQ ID NO: 2034933 - RNA, 15 nt, Human
aacugaacauuccag

SEQ ID NO: 2034934 - RNA, 17 nt, Human
aacuagaacugaauuuu

SEQ ID NO: 2034935 - RNA, 16 nt, Human
gucucaaacuccugac

SEQ ID NO: 2034936 - RNA, 16 nt, Human
aaccaaauauuccaga

SEQ ID NO: 2034937 - RNA, 16 nt, Human
aagcaagauuucagau

SEQ ID NO: 2034938 - RNA, 14 nt, Human
aacuuggaaauagu

SEQ ID NO: 2034939 - RNA, 15 nt, Human
aagaaaaguuuugua

SEQ ID NO: 2034940 - RNA, 16 nt, Human
aagaaaaguuuuguaa

SEQ ID NO: 2034941 - RNA, 21 nt, Human
aagaaaaguuuuguaaauuuc

SEQ ID NO: 2034942 - RNA, 22 nt, Human
aagaaaaguuuuguaaauuucu

SEQ ID NO: 2034943 - RNA, 19 nt, Human
uaaauuuuuuuuguuucau

SEQ ID NO: 2034944 - RNA, 13 nt, Human
uaaauaacuuuuu

SEQ ID NO: 2034945 - RNA, 19 nt, Human
uaaacccaguaguggugac

SEQ ID NO: 2034946 - RNA, 10 nt, Human
uaaagacaga

SEQ ID NO: 2034947 - RNA, 9 nt, Human
uaaagacag

SEQ ID NO: 2034948 - RNA, 13 nt, Human
uaaagauggaaaa

SEQ ID NO: 2034949 - RNA, 17 nt, Human
aaguuacacauuuuuca

SEQ ID NO: 2034950 - RNA, 14 nt, Human
aaguuuaauugacu

SEQ ID NO: 2034951 - RNA, 13 nt, Human
uacagucuuguau

SEQ ID NO: 2034952 - RNA, 12 nt, Human
uacagucuugua

SEQ ID NO: 2034953 - RNA, 18 nt, Human
uacaagccagcuggagaa

SEQ ID NO: 2034954 - RNA, 22 nt, Human
uaauuuuuguguuuuuaauaaa

SEQ ID NO: 2034955 - RNA, 13 nt, Human
uaauuuuuuacua

SEQ ID NO: 2034956 - RNA, 13 nt, Human
acaagccagcugg

SEQ ID NO: 2034957 - RNA, 15 nt, Human
acaagccagcuggag

SEQ ID NO: 2034958 - RNA, 18 nt, Human
uagaagauggcacuuaua

SEQ ID NO: 2034959 - RNA, 13 nt, Human
uagaacugaauuu

SEQ ID NO: 2034960 - RNA, 17 nt, Human
uagaacugaauuuuguc

SEQ ID NO: 2034961 - RNA, 22 nt, Human
uagaacugaauuuugucuuuau

SEQ ID NO: 2034962 - RNA, 21 nt, Human
uagaaccucgagguuucucaa

SEQ ID NO: 2034963 - RNA, 16 nt, Human
aauuucucuacugucu

SEQ ID NO: 2034964 - RNA, 15 nt, Human
acagucuuguauuaa

SEQ ID NO: 2034965 - RNA, 18 nt, Human
acagucuuguauuaaguu

SEQ ID NO: 2034966 - RNA, 22 nt, Human
acagucuuguauuaaguuguua

SEQ ID NO: 2034967 - RNA, 14 nt, Human
acagucuuguauua

SEQ ID NO: 2034968 - RNA, 11 nt, Human
uauuguacagu

SEQ ID NO: 2034969 - RNA, 12 nt, Human
uauuguacaguu

SEQ ID NO: 2034970 - RNA, 13 nt, Human
uauuguacaguuu

SEQ ID NO: 2034971 - RNA, 14 nt, Human
uauuguacaguuuu

SEQ ID NO: 2034972 - RNA, 15 nt, Human
uauuguacaguuuuu

SEQ ID NO: 2034973 - RNA, 17 nt, Human
uauuguacaguuuuuau

SEQ ID NO: 2034974 - RNA, 15 nt, Human
acuccugaccucaag

SEQ ID NO: 2034975 - RNA, 17 nt, Human
acucaagacuuccagag

SEQ ID NO: 2034976 - RNA, 20 nt, Human
acucaagacuuccagagccu

SEQ ID NO: 2034977 - RNA, 23 nt, Human
acuguagaaaagggaacugaaca

SEQ ID NO: 2034978 - RNA, 19 nt, Human
uccuguucuuaagacguga

SEQ ID NO: 2034979 - RNA, 19 nt, Human
uccugaguagcuggauuac

SEQ ID NO: 2034980 - RNA, 16 nt, Human
uccacaguggaaccag

SEQ ID NO: 2034981 - RNA, 20 nt, Human
uccacaguggaaccagccca

SEQ ID NO: 2034982 - RNA, 14 nt, Human
uccacagugacucc

SEQ ID NO: 2034983 - RNA, 20 nt, Human
ugacuuauuuauauaaauuu

SEQ ID NO: 2034984 - RNA, 17 nt, Human
ugacuuauuuauauaaa

SEQ ID NO: 2034985 - RNA, 21 nt, Human
ugacuuauuuauauaaauuuu

SEQ ID NO: 2034986 - RNA, 21 nt, Human
agcaaaaccaaauauuccaga

SEQ ID NO: 2034987 - RNA, 19 nt, Human
agaccuaacgagaaauaga

SEQ ID NO: 2034988 - RNA, 19 nt, Human
agacaggguuucaccaugu

SEQ ID NO: 2034989 - RNA, 21 nt, Human
agaacucaugacggaagaguu

SEQ ID NO: 2034990 - RNA, 15 nt, Human
ucugcagaaacagaa

SEQ ID NO: 2034991 - RNA, 15 nt, Human
agaaagaagaugaau

SEQ ID NO: 2034992 - RNA, 15 nt, Human
acuuuuuuuuaaguu

SEQ ID NO: 2034993 - RNA, 19 nt, Human
acuuugaggguguauauuu

SEQ ID NO: 2034994 - RNA, 12 nt, Human
ugcaguuuuccu

SEQ ID NO: 2034995 - RNA, 17 nt, Human
ugcacguauuuuaauag

SEQ ID NO: 2034996 - RNA, 17 nt, Human
agcuggagaaauauggu

SEQ ID NO: 2034997 - RNA, 17 nt, Human
uggaaguaguggagccc

SEQ ID NO: 2034998 - RNA, 14 nt, Human
uggaaguaguggag

SEQ ID NO: 2034999 - RNA, 21 nt, Human
uggcucacugcaacuucugcc

SEQ ID NO: 2035000 - RNA, 19 nt, Human
agguuucucaaagaaauuu

SEQ ID NO: 2035001 - RNA, 16 nt, Human
agguuucucaaagaaa

SEQ ID NO: 2035002 - RNA, 12 nt, Human
uguacaguuuuu

SEQ ID NO: 2035003 - RNA, 22 nt, Human
uguagugaaucacguaaagcua

SEQ ID NO: 2035004 - RNA, 13 nt, Human
uguuaauaaaagu

SEQ ID NO: 2035005 - RNA, 18 nt, Human
uguuaauaaaaguacaug

SEQ ID NO: 2035006 - RNA, 19 nt, Human
uguuaauaaaaguacaugu

SEQ ID NO: 2035007 - RNA, 14 nt, Human
agugguauagaaau

SEQ ID NO: 2035008 - RNA, 15 nt, Human
agugguauagaaaug

SEQ ID NO: 2035009 - RNA, 16 nt, Human
agugguauagaaaugc

SEQ ID NO: 2035010 - RNA, 18 nt, Human
agugguauagaaaugcug

SEQ ID NO: 2035011 - RNA, 19 nt, Human
agucucgcucuguugccca

SEQ ID NO: 2035012 - RNA, 13 nt, Human
auagaaaugcugg

SEQ ID NO: 2035013 - RNA, 19 nt, Human
auagaaaugcugguuuuuc

SEQ ID NO: 2035014 - RNA, 22 nt, Human
auagaaaugcugguuuuucagu

SEQ ID NO: 2035015 - RNA, 13 nt, Human
auacgauaaauaa

SEQ ID NO: 2035016 - RNA, 20 nt, Human
aguuuuuauugcuuguugga

SEQ ID NO: 2035017 - RNA, 16 nt, Human
uuaauaaaaguacaug

SEQ ID NO: 2035018 - RNA, 20 nt, Human
uuacagggaugagccaccgc

SEQ ID NO: 2035019 - RNA, 18 nt, Human
auaacuuuuuuuuaaguu

SEQ ID NO: 2035020 - RNA, 18 nt, Human
uuaguuuuugugaaguuu

SEQ ID NO: 2035021 - RNA, 21 nt, Human
uuaguuuuugugaaguuuaau

SEQ ID NO: 2035022 - RNA, 20 nt, Human
aucugcuagggaauaucaau

SEQ ID NO: 2035023 - RNA, 14 nt, Human
aucguucucugccu

SEQ ID NO: 2035024 - RNA, 23 nt, Human
uucccguggaacguuuuuccugu

SEQ ID NO: 2035025 - RNA, 21 nt, Human
uucuuaagacgugauuuugcu

SEQ ID NO: 2035026 - RNA, 23 nt, Human
uucuuaagacgugauuuugcugu

SEQ ID NO: 2035027 - RNA, 17 nt, Human
uucuucuuuuugcuuca

SEQ ID NO: 2035028 - RNA, 21 nt, Human
uucuucuuuuugcuucaaaaa

SEQ ID NO: 2035029 - RNA, 18 nt, Human
aucaguagccagcaucug

SEQ ID NO: 2035030 - RNA, 19 nt, Human
auguaugaggaauuucugu

SEQ ID NO: 2035031 - RNA, 19 nt, Human
augucucgugguaggacug

SEQ ID NO: 2035032 - RNA, 15 nt, Human
augucucgugguagg

SEQ ID NO: 2035033 - RNA, 16 nt, Human
augucucgugguagga

SEQ ID NO: 2035034 - RNA, 21 nt, Human
uuugucuuguguuucuuuagu

SEQ ID NO: 2035035 - RNA, 19 nt, Human
uuugucuuuggugaacauu

SEQ ID NO: 2035036 - RNA, 17 nt, Human
auguaaaagacuuuuuu

SEQ ID NO: 2035037 - RNA, 14 nt, Human
uuucugcagaaaca

SEQ ID NO: 2035038 - RNA, 19 nt, Human
auuaucuaaaaucugcuag

SEQ ID NO: 2035039 - RNA, 19 nt, Human
auuccagagcguguaguga

SEQ ID NO: 2035040 - RNA, 14 nt, Human
auuuuugucuugug

SEQ ID NO: 2035041 - RNA, 16 nt, Human
auuuuucagauauaaa

SEQ ID NO: 2035042 - RNA, 12 nt, Human
auuuugucuuua

SEQ ID NO: 2035043 - RNA, 18 nt, Human
auuuuguauauuuguauu

SEQ ID NO: 2035044 - RNA, 20 nt, Human
auuuugcuguagaagauggc

SEQ ID NO: 2035045 - RNA, 14 nt, Human
auuguacaguuuuu

SEQ ID NO: 2035046 - RNA, 15 nt, Human
auuguacaguuuuua

SEQ ID NO: 2035047 - RNA, 21 nt, Human
auuguacaguuuuuauugcuu

SEQ ID NO: 2035048 - RNA, 16 nt, Human
auuggauuugucuuug

SEQ ID NO: 2035049 - RNA, 16 nt, Human
auuuccacucaggucu

SEQ ID NO: 2035050 - RNA, 15 nt, Human
auuugucaacaaagu

SEQ ID NO: 2035051 - RNA, 13 nt, Human
auuugucaacaaa

SEQ ID NO: 2035052 - RNA, 14 nt, Human
caaugacacagucu

SEQ ID NO: 2035053 - RNA, 19 nt, Human
caaugacacagucuuggcu

SEQ ID NO: 2035054 - RNA, 21 nt, Human
caaugacacagucuuggcuca

SEQ ID NO: 2035055 - RNA, 16 nt, Human
caagugauucuccugc

SEQ ID NO: 2035056 - RNA, 22 nt, Human
caagugauucuccugccucagc

SEQ ID NO: 2035057 - RNA, 21 nt, Human
caagugauucuccugccucag

SEQ ID NO: 2035058 - RNA, 14 nt, Human
caagugauucuccu

SEQ ID NO: 2035059 - RNA, 14 nt, Human
ccaggcuggucuca

SEQ ID NO: 2035060 - RNA, 20 nt, Human
ccagagccucaaaugagaaa

SEQ ID NO: 2035061 - RNA, 23 nt, Human
ccagagccucaaaugagaaaaug

SEQ ID NO: 2035062 - RNA, 16 nt, Human
ccuacaguguacaguc

SEQ ID NO: 2035063 - RNA, 20 nt, Human
ccuacaguguacagucuugu

SEQ ID NO: 2035064 - RNA, 15 nt, Human
ccuacaguguacagu

SEQ ID NO: 2035065 - RNA, 22 nt, Human
cuccaaguccacaguggaacca

SEQ ID NO: 2035066 - RNA, 13 nt, Human
ccugccucagccu

SEQ ID NO: 2035067 - RNA, 19 nt, Human
gaaaaguuuuguaaauuuc

SEQ ID NO: 2035068 - RNA, 20 nt, Human
cuucuccuuagaaguggaag

SEQ ID NO: 2035069 - RNA, 16 nt, Human
cuguggccaaguucuu

SEQ ID NO: 2035070 - RNA, 18 nt, Human
cuguggccaaguucuuag

SEQ ID NO: 2035071 - RNA, 19 nt, Human
cuggcaguggaacuaagaa

SEQ ID NO: 2035072 - RNA, 21 nt, Human
gagccagcagccuggcucucc

SEQ ID NO: 2035073 - RNA, 18 nt, Human
gauuacagggaugagcca

SEQ ID NO: 2035074 - RNA, 20 nt, Human
gauuacagggaugagccacc

SEQ ID NO: 2035075 - RNA, 16 nt, Human
gauuuugcuguagaag

SEQ ID NO: 2035076 - RNA, 18 nt, Human
gauuacaggcaugugcca

SEQ ID NO: 2035077 - RNA, 20 nt, Human
gagguuucucaaagaaauuu

SEQ ID NO: 2035078 - RNA, 15 nt, Human
gaguggguugauuuc

SEQ ID NO: 2035079 - RNA, 20 nt, Human
ggagugcaaugacacagucu

SEQ ID NO: 2035080 - RNA, 16 nt, Human
gccucagccuccugag

SEQ ID NO: 2035081 - RNA, 18 nt, Human
gccucagccuccugagua

SEQ ID NO: 2035082 - RNA, 20 nt, Human
guagaaaagggaacugaaca

SEQ ID NO: 2035083 - RNA, 12 nt, Human
guacaguuuuua

SEQ ID NO: 2035084 - RNA, 13 nt, Human
guacaguuuuuau

SEQ ID NO: 2035085 - RNA, 16 nt, Human
guacagucuuguauua

SEQ ID NO: 2035086 - RNA, 13 nt, Human
guacagucuugua

SEQ ID NO: 2035087 - RNA, 14 nt, Human
guacagucuuguau

SEQ ID NO: 2035088 - RNA, 15 nt, Human
guaaaagacuuuuuu

SEQ ID NO: 2035089 - RNA, 19 nt, Human
guaagaucguucucugccu

SEQ ID NO: 2035090 - RNA, 14 nt, Human
ggugaacauugcaa

SEQ ID NO: 2035091 - RNA, 20 nt, Human
ggguuucaccauguuggcca

SEQ ID NO: 2035092 - RNA, 14 nt, Human
ggggcugccagggg

SEQ ID NO: 2035093 - RNA, 22 nt, Human
gucauaacuagaacugaauuuu

SEQ ID NO: 2035094 - RNA, 17 nt, Human
gucauaacuagaacuga

SEQ ID NO: 2035095 - RNA, 13 nt, Human
gucucgugguagg

SEQ ID NO: 2035096 - RNA, 13 nt, Human
gugauucuccugc

SEQ ID NO: 2035097 - RNA, 16 nt, Human
gugauuuugcuguaga

SEQ ID NO: 2035098 - RNA, 16 nt, Human
gugaaucacguaaagc

SEQ ID NO: 2035099 - RNA, 18 nt, Human
gugaaucacguaaagcua

SEQ ID NO: 2035100 - RNA, 16 nt, Human
gugagcuccuaagcca

SEQ ID NO: 2035101 - RNA, 22 nt, Human
guggaacguuuuuccuguucuu

SEQ ID NO: 2035102 - RNA, 14 nt, Human
guggccaaguucuu

SEQ ID NO: 2035103 - RNA, 12 nt, Human
uaugaauaacau

SEQ ID NO: 2035104 - RNA, 12 nt, Human
uaugauuuuuaa

SEQ ID NO: 2035105 - RNA, 23 nt, Human
uaugauuuuuaaagaaaaguuuu

SEQ ID NO: 2035106 - RNA, 23 nt, Human
uauauaaauuuuuuuuguuucau

SEQ ID NO: 2035107 - RNA, 18 nt, Human
uauacgauaaauaacuuu

SEQ ID NO: 2035108 - RNA, 18 nt, Human
uauguugguagauucuaa

SEQ ID NO: 2035109 - RNA, 15 nt, Human
uauuaaguuguuaau

SEQ ID NO: 2035110 - RNA, 22 nt, Human
uauugcagcgauuaauaacagg

SEQ ID NO: 2035111 - RNA, 15 nt, Human
uauugcuugcacaaa

SEQ ID NO: 2035112 - RNA, 14 nt, Human
uccuuagaagugga

SEQ ID NO: 2035113 - RNA, 14 nt, Human
ucgugguaggacug

SEQ ID NO: 2035114 - RNA, 15 nt, Human
ucgugguaggacugu

SEQ ID NO: 2035115 - RNA, 20 nt, Human
ucgugguaggacuguagaaa

SEQ ID NO: 2035116 - RNA, 12 nt, Human
ucuuguguuucu

SEQ ID NO: 2035117 - RNA, 18 nt, Human
ugaacauugcaauagaaa

SEQ ID NO: 2035118 - RNA, 16 nt, Human
ugcugguuuuucaguu

SEQ ID NO: 2035119 - RNA, 18 nt, Human
ugcugguuuuucaguuuu

SEQ ID NO: 2035120 - RNA, 12 nt, Human
ugcugguuuuuc

SEQ ID NO: 2035121 - RNA, 15 nt, Human
ugcugguuuuucagu

SEQ ID NO: 2035122 - RNA, 13 nt, Human
uggccaggcuggu

SEQ ID NO: 2035123 - RNA, 17 nt, Human
uggauuuuugucuugug

SEQ ID NO: 2035124 - RNA, 11 nt, Human
uuaaagacaga

SEQ ID NO: 2035125 - RNA, 12 nt, Human
uuaaagacagag

SEQ ID NO: 2035126 - RNA, 20 nt, Human
uguuucauauugaugugugu

SEQ ID NO: 2035127 - RNA, 22 nt, Human
uuaggccaaaaaaauguaagau

SEQ ID NO: 2035128 - RNA, 15 nt, Human
uucuaaagauggaaa

SEQ ID NO: 2035129 - RNA, 18 nt, Human
uuccacucaggucuguuu

SEQ ID NO: 2035130 - RNA, 19 nt, Human
uuauugcagcgauuaauaa

SEQ ID NO: 2035131 - RNA, 14 nt, Human
uuaugcauagauaa

SEQ ID NO: 2035132 - RNA, 13 nt, Human
uuaguugcuguau

SEQ ID NO: 2035133 - RNA, 15 nt, Human
uuaguugcuguaugu

SEQ ID NO: 2035134 - RNA, 21 nt, Human
uuugaggguguauauuuucug

SEQ ID NO: 2035135 - RNA, 17 nt, Human
uuuccacucaggucugu

SEQ ID NO: 2035136 - RNA, 19 nt, Human
uugucuuuggugaacauug

SEQ ID NO: 2035137 - RNA, 19 nt, Human
uugcagcgauuaauaacag

SEQ ID NO: 2035138 - RNA, 18 nt, Human
uugcagcgauuaauaaca

SEQ ID NO: 2035139 - RNA, 13 nt, Human
uucugugcagcca

SEQ ID NO: 2035140 - RNA, 16 nt, Human
auaugcaguuuuccuu

SEQ ID NO: 2035141 - RNA, 22 nt, Human
agacugaccaauauuguacagu

SEQ ID NO: 2035142 - RNA, 14 nt, Human
agagccucaaauga

SEQ ID NO: 2035143 - RNA, 17 nt, Human
agagccucaaaugagaa

SEQ ID NO: 2035144 - RNA, 11 nt, Human
agacagagucu

SEQ ID NO: 2035145 - RNA, 22 nt, Human
aggcuggucucaaacuccugac

SEQ ID NO: 2035146 - RNA, 16 nt, Human
aggaccuguggccaag

SEQ ID NO: 2035147 - RNA, 18 nt, Human
aaagcccaaagugguaua

SEQ ID NO: 2035148 - RNA, 15 nt, Human
aaguucuuaguugcu

SEQ ID NO: 2035149 - RNA, 22 nt, Human
aaguucuuaguugcuguauguc

SEQ ID NO: 2035150 - RNA, 17 nt, Human
aauagaaauggggaacu

SEQ ID NO: 2035151 - RNA, 16 nt, Human
aauagaaauccaauug

SEQ ID NO: 2035152 - RNA, 18 nt, Human
aauccaccugccucggcc

SEQ ID NO: 2035153 - RNA, 19 nt, Human
aauccaccugccucggccu

SEQ ID NO: 2035154 - RNA, 14 nt, Human
aacuuacuuagugu

SEQ ID NO: 2035155 - RNA, 12 nt, Human
acaguguacagu

SEQ ID NO: 2035156 - RNA, 13 nt, Human
acaguguacaguc

SEQ ID NO: 2035157 - RNA, 18 nt, Human
acaguguacagucuugua

SEQ ID NO: 2035158 - RNA, 15 nt, Human
acaguguacagucuu

SEQ ID NO: 2035159 - RNA, 17 nt, Human
acaguguacagucuugu

SEQ ID NO: 2035160 - RNA, 22 nt, Human
acugaccaauauuguacaguuu

SEQ ID NO: 2035161 - RNA, 20 nt, Human
acugaccaauauuguacagu

SEQ ID NO: 2035162 - RNA, 21 nt, Human
acugaccaauauuguacaguu

SEQ ID NO: 2035163 - RNA, 13 nt, Human
acuucugccucuu

SEQ ID NO: 2035164 - RNA, 17 nt, Human
acuauugcuugcacaaa

SEQ ID NO: 2035165 - RNA, 14 nt, Human
acuaaucuuucugc

SEQ ID NO: 2035166 - RNA, 18 nt, Human
accuguggccaaguucuu

SEQ ID NO: 2035167 - RNA, 19 nt, Human
accuguggccaaguucuua

SEQ ID NO: 2035168 - RNA, 14 nt, Human
cucagccuccugag

SEQ ID NO: 2035169 - RNA, 22 nt, Human
cucagccuccugaguagcugga

SEQ ID NO: 2035170 - RNA, 20 nt, Human
ccuucugaaaaaguauccug

SEQ ID NO: 2035171 - RNA, 23 nt, Human
cuagaaaugauccccagcuguuu

SEQ ID NO: 2035172 - RNA, 15 nt, Human
cuagaacugaauuuu

SEQ ID NO: 2035173 - RNA, 20 nt, Human
cuacaguguacagucuugua

SEQ ID NO: 2035174 - RNA, 15 nt, Human
cuacaguguacaguc

SEQ ID NO: 2035175 - RNA, 16 nt, Human
cuacaguguacagucu

SEQ ID NO: 2035176 - RNA, 17 nt, Human
cuacaguguacagucuu

SEQ ID NO: 2035177 - RNA, 17 nt, Human
cggcucuggccuccaag

SEQ ID NO: 2035178 - RNA, 20 nt, Human
ccugaguagcuggauuacag

SEQ ID NO: 2035179 - RNA, 15 nt, Human
ccugaguagcuggau

SEQ ID NO: 2035180 - RNA, 19 nt, Human
ccugaguagcuggauuaca

SEQ ID NO: 2035181 - RNA, 14 nt, Human
ccucagccuccuga

SEQ ID NO: 2035182 - RNA, 18 nt, Human
ccuccaaguccacagugg

SEQ ID NO: 2035183 - RNA, 21 nt, Human
ccuccaaguccacaguggaac

SEQ ID NO: 2035184 - RNA, 19 nt, Human
auuagcauuugucaacaaa

SEQ ID NO: 2035185 - RNA, 20 nt, Human
caccuacaguguacagucuu

SEQ ID NO: 2035186 - RNA, 13 nt, Human
caccuacagugua

SEQ ID NO: 2035187 - RNA, 16 nt, Human
caccuacaguguacag

SEQ ID NO: 2035188 - RNA, 17 nt, Human
caccuacaguguacagu

SEQ ID NO: 2035189 - RNA, 23 nt, Human
caccugccucggccucccaaagu

SEQ ID NO: 2035190 - RNA, 17 nt, Human
caaguccacaguggaac

SEQ ID NO: 2035191 - RNA, 19 nt, Human
ccaaagugguauagaaaug

SEQ ID NO: 2035192 - RNA, 22 nt, Human
ccaaagugguauagaaaugcug

SEQ ID NO: 2035193 - RNA, 22 nt, Human
ccaaagugcugggauuacaggg

SEQ ID NO: 2035194 - RNA, 11 nt, Human
gcuagaaauga

SEQ ID NO: 2035195 - RNA, 16 nt, Human
gccauguguuccaagg

SEQ ID NO: 2035196 - RNA, 15 nt, Human
gccauguguuccaag

SEQ ID NO: 2035197 - RNA, 17 nt, Human
ggaacugaacauuccag

SEQ ID NO: 2035198 - RNA, 13 nt, Human
gcuuacaagccag

SEQ ID NO: 2035199 - RNA, 19 nt, Human
gcuuacaagccagcuggag

SEQ ID NO: 2035200 - RNA, 22 nt, Human
gcuuacaagccagcuggagaaa

SEQ ID NO: 2035201 - RNA, 23 nt, Human
ggccuccaaguccacaguggaac

SEQ ID NO: 2035202 - RNA, 13 nt, Human
aaaaugucuuuau

SEQ ID NO: 2035203 - RNA, 19 nt, Human
gguuucaccauguuggcca

SEQ ID NO: 2035204 - RNA, 17 nt, Human
gauacgacaacuugcac

SEQ ID NO: 2035205 - RNA, 18 nt, Human
gauaugcaguuuuccuua

SEQ ID NO: 2035206 - RNA, 22 nt, Human
cuuuuuuuuuuuuuaaagacag

SEQ ID NO: 2035207 - RNA, 23 nt, Human
cuuuuuuuuuuuuuaaagacaga

SEQ ID NO: 2035208 - RNA, 13 nt, Human
cuggcucaucucu

SEQ ID NO: 2035209 - RNA, 22 nt, Human
aacuucuccccugguagaaaga

SEQ ID NO: 2035210 - RNA, 21 nt, Human
aaccucgagguuucucaaaga

SEQ ID NO: 2035211 - RNA, 22 nt, Human
aaccucgagguuucucaaagaa

SEQ ID NO: 2035212 - RNA, 16 nt, Human
gucuuuggugaacauu

SEQ ID NO: 2035213 - RNA, 22 nt, Human
guauauuuguauuuaaaugaaa

SEQ ID NO: 2035214 - RNA, 14 nt, Human
aaauguaagaucgu

SEQ ID NO: 2035215 - RNA, 22 nt, Human
aaauguaagaucguucucugcc

SEQ ID NO: 2035216 - RNA, 13 nt, Human
gucauaacuagaa

SEQ ID NO: 2035217 - RNA, 14 nt, Human
guuucucaaagaaa

SEQ ID NO: 2035218 - RNA, 17 nt, Human
guuucucaaagaaauuu

SEQ ID NO: 2035219 - RNA, 18 nt, Human
guuucucaaagaaauuuc

SEQ ID NO: 2035220 - RNA, 19 nt, Human
guuuuuccuguucuuaaga

SEQ ID NO: 2035221 - RNA, 14 nt, Human
guuuuucaguuuuc

SEQ ID NO: 2035222 - RNA, 18 nt, Human
aagugagacuuugagggu

SEQ ID NO: 2035223 - RNA, 21 nt, Human
aaguaauccaccugccucggc

SEQ ID NO: 2035224 - RNA, 13 nt, Human
uaaaagacuuuuu

SEQ ID NO: 2035225 - RNA, 16 nt, Human
aagaucguucucugcc

SEQ ID NO: 2035226 - RNA, 17 nt, Human
aagaucguucucugccu

SEQ ID NO: 2035227 - RNA, 23 nt, Human
aagacgugauuuugcuguagaag

SEQ ID NO: 2035228 - RNA, 16 nt, Human
aagacgugauuuugcu

SEQ ID NO: 2035229 - RNA, 22 nt, Human
aagacgugauuuugcuguagaa

SEQ ID NO: 2035230 - RNA, 16 nt, Human
aagacuuccagagccu

SEQ ID NO: 2035231 - RNA, 18 nt, Human
aagacuuccagagccuca

SEQ ID NO: 2035232 - RNA, 18 nt, Human
aauagcgucauaacuaga

SEQ ID NO: 2035233 - RNA, 21 nt, Human
aaucacguaaagcuagaaaug

SEQ ID NO: 2035234 - RNA, 20 nt, Human
aaucacguaaagcuagaaau

SEQ ID NO: 2035235 - RNA, 21 nt, Human
uaaguuacacauuuuucagau

SEQ ID NO: 2035236 - RNA, 18 nt, Human
aaugcugguuuuucaguu

SEQ ID NO: 2035237 - RNA, 20 nt, Human
aaugagaaaaugucuuuauu

SEQ ID NO: 2035238 - RNA, 21 nt, Human
uaugucucgugguaggacugu

SEQ ID NO: 2035239 - RNA, 16 nt, Human
acagaaagguuuucuu

SEQ ID NO: 2035240 - RNA, 14 nt, Human
uaggcaggaccugu

SEQ ID NO: 2035241 - RNA, 15 nt, Human
uaggcaggaccugug

SEQ ID NO: 2035242 - RNA, 16 nt, Human
acuagaacugaauuuu

SEQ ID NO: 2035243 - RNA, 17 nt, Human
acuagaacugaauuuug

SEQ ID NO: 2035244 - RNA, 18 nt, Human
acuagaacugaauuuugu

SEQ ID NO: 2035245 - RNA, 19 nt, Human
acuagaacugaauuuuguc

SEQ ID NO: 2035246 - RNA, 23 nt, Human
acuagaacugaauuuugucuuua

SEQ ID NO: 2035247 - RNA, 20 nt, Human
ucccaaagugcugggauuac

SEQ ID NO: 2035248 - RNA, 16 nt, Human
ucacagccacuuggga

SEQ ID NO: 2035249 - RNA, 17 nt, Human
ucaagcaagauuucaga

SEQ ID NO: 2035250 - RNA, 19 nt, Human
ucaaguaauccaccugccu

SEQ ID NO: 2035251 - RNA, 21 nt, Human
acauuuuucagauauaaaaga

SEQ ID NO: 2035252 - RNA, 18 nt, Human
acauuuuacuuuuuccug

SEQ ID NO: 2035253 - RNA, 15 nt, Human
ucauaacuagaacug

SEQ ID NO: 2035254 - RNA, 13 nt, Human
ucauaacuagaac

SEQ ID NO: 2035255 - RNA, 17 nt, Human
ucacugcaacuucugcc

SEQ ID NO: 2035256 - RNA, 18 nt, Human
ucacugcaacuucugccu

SEQ ID NO: 2035257 - RNA, 13 nt, Human
ucguucucugccu

SEQ ID NO: 2035258 - RNA, 21 nt, Human
ucgcucuguugcccaggcugg

SEQ ID NO: 2035259 - RNA, 23 nt, Human
acuuugaggguguauauuuucug

SEQ ID NO: 2035260 - RNA, 15 nt, Human
ucuccuuagaagugg

SEQ ID NO: 2035261 - RNA, 21 nt, Human
ucuccuuagaaguggaaguag

SEQ ID NO: 2035262 - RNA, 17 nt, Human
ucucgcucuguugccca

SEQ ID NO: 2035263 - RNA, 14 nt, Human
ucucuccauucccg

SEQ ID NO: 2035264 - RNA, 20 nt, Human
agaaaugcugguuuuucagu

SEQ ID NO: 2035265 - RNA, 21 nt, Human
agaaaugcugguuuuucaguu

SEQ ID NO: 2035266 - RNA, 21 nt, Human
agaacugaauuuugucuuuau

SEQ ID NO: 2035267 - RNA, 22 nt, Human
ugaaaaaguauccugcuucuga

SEQ ID NO: 2035268 - RNA, 21 nt, Human
ucuuucugcagaaacagaaag

SEQ ID NO: 2035269 - RNA, 16 nt, Human
ucuuuggugaacauug

SEQ ID NO: 2035270 - RNA, 22 nt, Human
ucuuuggugaacauugcaauag

SEQ ID NO: 2035271 - RNA, 16 nt, Human
ucuuuaugauuuuuaa

SEQ ID NO: 2035272 - RNA, 17 nt, Human
ucuuuauuaaauguaga

SEQ ID NO: 2035273 - RNA, 21 nt, Human
ucuuuauuaaauguagaaagu

SEQ ID NO: 2035274 - RNA, 22 nt, Human
ugacacagucuuggcucacugc

SEQ ID NO: 2035275 - RNA, 23 nt, Human
ugacacagucuuggcucacugca

SEQ ID NO: 2035276 - RNA, 14 nt, Human
agcaagauuucaga

SEQ ID NO: 2035277 - RNA, 19 nt, Human
ugauauguugguagauucu

SEQ ID NO: 2035278 - RNA, 13 nt, Human
ugaguagcuggau

SEQ ID NO: 2035279 - RNA, 12 nt, Human
agcuagaaauga

SEQ ID NO: 2035280 - RNA, 11 nt, Human
agcuagaaaug

SEQ ID NO: 2035281 - RNA, 19 nt, Human
ugauucuccugccucagcc

SEQ ID NO: 2035282 - RNA, 12 nt, Human
agccucaucucu

SEQ ID NO: 2035283 - RNA, 13 nt, Human
uggauuggauuug

SEQ ID NO: 2035284 - RNA, 13 nt, Human
ugcuucaaaaaca

SEQ ID NO: 2035285 - RNA, 21 nt, Human
ugcuucaaaaacauucuuaca

SEQ ID NO: 2035286 - RNA, 18 nt, Human
uggucucaaacuccugac

SEQ ID NO: 2035287 - RNA, 17 nt, Human
ugguacucauuaaaaaa

SEQ ID NO: 2035288 - RNA, 14 nt, Human
aguaauccaccugc

SEQ ID NO: 2035289 - RNA, 19 nt, Human
uguaagaucguucucugcc

SEQ ID NO: 2035290 - RNA, 20 nt, Human
uguaagaucguucucugccu

SEQ ID NO: 2035291 - RNA, 17 nt, Human
agugcugggauuacagg

SEQ ID NO: 2035292 - RNA, 19 nt, Human
ugugucuaggcaggaccug

SEQ ID NO: 2035293 - RNA, 20 nt, Human
ugugucuaggcaggaccugu

SEQ ID NO: 2035294 - RNA, 18 nt, Human
agugcaaugacacagucu

SEQ ID NO: 2035295 - RNA, 16 nt, Human
agugcaaugacacagu

SEQ ID NO: 2035296 - RNA, 22 nt, Human
agugauucuccugccucagccu

SEQ ID NO: 2035297 - RNA, 15 nt, Human
uguugcccaggcugg

SEQ ID NO: 2035298 - RNA, 14 nt, Human
uguugcccaggcug

SEQ ID NO: 2035299 - RNA, 21 nt, Human
uguugcccaggcuggagugca

SEQ ID NO: 2035300 - RNA, 16 nt, Human
aguggaaccagcccag

SEQ ID NO: 2035301 - RNA, 15 nt, Human
aguuuuuauugcuug

SEQ ID NO: 2035302 - RNA, 12 nt, Human
aguuuuguaaau

SEQ ID NO: 2035303 - RNA, 15 nt, Human
aguuuuguaaauuuc

SEQ ID NO: 2035304 - RNA, 21 nt, Human
uuaauugacuuauuuauauaa

SEQ ID NO: 2035305 - RNA, 18 nt, Human
aguuuaauugacuuauuu

SEQ ID NO: 2035306 - RNA, 14 nt, Human
aguuuaauugacuu

SEQ ID NO: 2035307 - RNA, 15 nt, Human
aguuuaauugacuua

SEQ ID NO: 2035308 - RNA, 18 nt, Human
auaaucucuccauucccg

SEQ ID NO: 2035309 - RNA, 15 nt, Human
uuugcuucaaaaaca

SEQ ID NO: 2035310 - RNA, 13 nt, Human
uuugcuguagaag

SEQ ID NO: 2035311 - RNA, 21 nt, Human
uuugcuguagaagauggcacu

SEQ ID NO: 2035312 - RNA, 16 nt, Human
auguuggccaggcugg

SEQ ID NO: 2035313 - RNA, 21 nt, Human
uuuuaaguuacacauuuuuca

SEQ ID NO: 2035314 - RNA, 22 nt, Human
uuuuaaguuacacauuuuucag

SEQ ID NO: 2035315 - RNA, 22 nt, Human
uuuucagauauaaaagacugac

SEQ ID NO: 2035316 - RNA, 19 nt, Human
uuuucagauauaaaagacu

SEQ ID NO: 2035317 - RNA, 21 nt, Human
uuuucagauauaaaagacuga

SEQ ID NO: 2035318 - RNA, 17 nt, Human
uuuucagauauaaaaga

SEQ ID NO: 2035319 - RNA, 19 nt, Human
auuuacccuucuuuucuga

SEQ ID NO: 2035320 - RNA, 12 nt, Human
auugcaauagaa

SEQ ID NO: 2035321 - RNA, 16 nt, Human
auauaaaagacugacc

SEQ ID NO: 2035322 - RNA, 14 nt, Human
augauuuuuaaaga

SEQ ID NO: 2035323 - RNA, 16 nt, Human
augauuuuuaaagaaa

SEQ ID NO: 2035324 - RNA, 15 nt, Human
augcaguuuuccuua

SEQ ID NO: 2035325 - RNA, 22 nt, Human
uuuaugggucagaguuccgacu

SEQ ID NO: 2035326 - RNA, 13 nt, Human
augcugguuuuuc

SEQ ID NO: 2035327 - RNA, 17 nt, Human
augagaaaaugucuuua

SEQ ID NO: 2035328 - RNA, 19 nt, Human
uugcacaaaccaauuaaac

SEQ ID NO: 2035329 - RNA, 16 nt, Human
uugaugugugucuagg

SEQ ID NO: 2035330 - RNA, 12 nt, Human
caaagaaauuuc

SEQ ID NO: 2035331 - RNA, 18 nt, Human
caaagaaauuuccacuca

SEQ ID NO: 2035332 - RNA, 19 nt, Human
caaagaaauuuccacucag

SEQ ID NO: 2035333 - RNA, 19 nt, Human
caauagauauuuaccuuuu

SEQ ID NO: 2035334 - RNA, 13 nt, Human
cacaguggaacca

SEQ ID NO: 2035335 - RNA, 19 nt, Human
cacaguggaaccagcccag

SEQ ID NO: 2035336 - RNA, 13 nt, Human
cauaacuagaacu

SEQ ID NO: 2035337 - RNA, 15 nt, Human
caguuuuuauugcuu

SEQ ID NO: 2035338 - RNA, 17 nt, Human
caguguacagucuugua

SEQ ID NO: 2035339 - RNA, 18 nt, Human
caguguacagucuuguau

SEQ ID NO: 2035340 - RNA, 12 nt, Human
caguguacaguc

SEQ ID NO: 2035341 - RNA, 15 nt, Human
caguguacagucuug

SEQ ID NO: 2035342 - RNA, 16 nt, Human
caguggaaccagccca

SEQ ID NO: 2035343 - RNA, 13 nt, Human
cauugcaauagaa

SEQ ID NO: 2035344 - RNA, 15 nt, Human
cauugcaauagaaau

SEQ ID NO: 2035345 - RNA, 14 nt, Human
cauugcaauagaaa

SEQ ID NO: 2035346 - RNA, 14 nt, Human
ccaauauuguacag

SEQ ID NO: 2035347 - RNA, 15 nt, Human
ccaauauuguacagu

SEQ ID NO: 2035348 - RNA, 16 nt, Human
ccaauauuguacaguu

SEQ ID NO: 2035349 - RNA, 18 nt, Human
ccaauauuguacaguuuu

SEQ ID NO: 2035350 - RNA, 23 nt, Human
ccauguuggccaggcuggucuca

SEQ ID NO: 2035351 - RNA, 23 nt, Human
ccucccaaagugcugggauuaca

SEQ ID NO: 2035352 - RNA, 11 nt, Human
cccuucuuuuu

SEQ ID NO: 2035353 - RNA, 20 nt, Human
cuaagcacgggccauaugaa

SEQ ID NO: 2035354 - RNA, 23 nt, Human
cuaagcacgggccauaugaauaa

SEQ ID NO: 2035355 - RNA, 15 nt, Human
cuaggcaggaccugu

SEQ ID NO: 2035356 - RNA, 16 nt, Human
cuaggcaggaccugug

SEQ ID NO: 2035357 - RNA, 20 nt, Human
cucacauagcuuacaagcca

SEQ ID NO: 2035358 - RNA, 20 nt, Human
cguggaacguuuuuccuguu

SEQ ID NO: 2035359 - RNA, 15 nt, Human
cguggaacguuuuuc

SEQ ID NO: 2035360 - RNA, 16 nt, Human
cgucgacguagaaccu

SEQ ID NO: 2035361 - RNA, 16 nt, Human
cgggguggauuggauu

SEQ ID NO: 2035362 - RNA, 22 nt, Human
cucccaaagugcugggauuaca

SEQ ID NO: 2035363 - RNA, 15 nt, Human
cugaccaauauugua

SEQ ID NO: 2035364 - RNA, 18 nt, Human
cugaccaauauuguacag

SEQ ID NO: 2035365 - RNA, 19 nt, Human
cugaccaauauuguacagu

SEQ ID NO: 2035366 - RNA, 20 nt, Human
cugaccaauauuguacaguu

SEQ ID NO: 2035367 - RNA, 21 nt, Human
cugaccaauauuguacaguuu

SEQ ID NO: 2035368 - RNA, 19 nt, Human
cucuuggguucaagugauu

SEQ ID NO: 2035369 - RNA, 20 nt, Human
cuguaugucucgugguagga

SEQ ID NO: 2035370 - RNA, 19 nt, Human
cuugcacguauuuuaauag

SEQ ID NO: 2035371 - RNA, 22 nt, Human
cuuguauuaaguuguuaauaaa

SEQ ID NO: 2035372 - RNA, 23 nt, Human
cuuguauuaaguuguuaauaaaa

SEQ ID NO: 2035373 - RNA, 13 nt, Human
cuuguauuaaguu

SEQ ID NO: 2035374 - RNA, 17 nt, Human
cuuguauuaaguuguua

SEQ ID NO: 2035375 - RNA, 24 nt, Human
cuuggcucacugcaacuucugccu

SEQ ID NO: 2035376 - RNA, 20 nt, Human
gaaauuuccacucaggucug

SEQ ID NO: 2035377 - RNA, 19 nt, Human
gaaauuuccacucaggucu

SEQ ID NO: 2035378 - RNA, 14 nt, Human
gcacguauuuuaau

SEQ ID NO: 2035379 - RNA, 15 nt, Human
gcacguauuuuaaua

SEQ ID NO: 2035380 - RNA, 16 nt, Human
gauaaauaacuuuuuu

SEQ ID NO: 2035381 - RNA, 21 nt, Human
gauaaauaacuuuuuuuuaag

SEQ ID NO: 2035382 - RNA, 14 nt, Human
gauccccagcuguu

SEQ ID NO: 2035383 - RNA, 20 nt, Human
gauuugucuuuggugaacau

SEQ ID NO: 2035384 - RNA, 22 nt, Human
gauuugucuuuggugaacauug

SEQ ID NO: 2035385 - RNA, 15 nt, Human
gauuuuugucuugug

SEQ ID NO: 2035386 - RNA, 15 nt, Human
gcccaggcuggagug

SEQ ID NO: 2035387 - RNA, 13 nt, Human
gccagcuggagaa

SEQ ID NO: 2035388 - RNA, 13 nt, Human
uuuugucuugugu

SEQ ID NO: 2035389 - RNA, 12 nt, Human
uuuuuaaagaaa

SEQ ID NO: 2035390 - RNA, 20 nt, Human
uuuuuaaagaaaaguuuugu

SEQ ID NO: 2035391 - RNA, 17 nt, Human
uuuuuaaagacagaguc

SEQ ID NO: 2035392 - RNA, 12 nt, Human
uuuuuuguuuca

SEQ ID NO: 2035393 - RNA, 13 nt, Human
uuuuuuguuucau

SEQ ID NO: 2035394 - RNA, 23 nt, Human
uuuggugaacauugcaauagaaa

SEQ ID NO: 2035395 - RNA, 22 nt, Human
uuuggugaacauugcaauagaa

SEQ ID NO: 2035396 - RNA, 15 nt, Human
uuuuaaagaaaaguu

SEQ ID NO: 2035397 - RNA, 14 nt, Human
uuuuaaagaaaagu

SEQ ID NO: 2035398 - RNA, 23 nt, Human
guauagaaaugcugguuuuucag

SEQ ID NO: 2035399 - RNA, 15 nt, Human
guauagaaaugcugg

SEQ ID NO: 2035400 - RNA, 22 nt, Human
guauagaaaugcugguuuuuca

SEQ ID NO: 2035401 - RNA, 14 nt, Human
guauagaaaugcug

SEQ ID NO: 2035402 - RNA, 16 nt, Human
guccacaguggaacca

SEQ ID NO: 2035403 - RNA, 19 nt, Human
guccacaguggaaccagcc

SEQ ID NO: 2035404 - RNA, 21 nt, Human
guccacaguggaaccagccca

SEQ ID NO: 2035405 - RNA, 22 nt, Human
guauuaaguuguuaauaaaagu

SEQ ID NO: 2035406 - RNA, 19 nt, Human
gucucgugguaggacugua

SEQ ID NO: 2035407 - RNA, 19 nt, Human
gugucuaggcaggaccugu

SEQ ID NO: 2035408 - RNA, 19 nt, Human
guuaaacuuacuuaguguu

SEQ ID NO: 2035409 - RNA, 16 nt, Human
guuacacauuuuucag

SEQ ID NO: 2035410 - RNA, 17 nt, Human
guuacacauuuuucaga

SEQ ID NO: 2035411 - RNA, 13 nt, Human
guguacagucuug

SEQ ID NO: 2035412 - RNA, 16 nt, Human
guguacagucuuguau

SEQ ID NO: 2035413 - RNA, 22 nt, Human
guguacagucuuguauuaaguu

SEQ ID NO: 2035414 - RNA, 14 nt, Human
gugguauagaaaug

SEQ ID NO: 2035415 - RNA, 12 nt, Human
gugggcuaagca

SEQ ID NO: 2035416 - RNA, 23 nt, Human
guucuaaagauggaaaaaccacc

SEQ ID NO: 2035417 - RNA, 17 nt, Human
guucuaaagauggaaaa

SEQ ID NO: 2035418 - RNA, 20 nt, Human
guucuaaagauggaaaaacc

SEQ ID NO: 2035419 - RNA, 14 nt, Human
guucuaaagaugga

SEQ ID NO: 2035420 - RNA, 23 nt, Human
guugauuucagcaccuacagugu

SEQ ID NO: 2035421 - RNA, 14 nt, Human
guuggauuuuuguc

SEQ ID NO: 2035422 - RNA, 20 nt, Human
guuggauuuuugucuugugu

SEQ ID NO: 2035423 - RNA, 16 nt, Human
guuucuuuaguuuuug

SEQ ID NO: 2035424 - RNA, 24 nt, Human
guuuucaggaguggguugauuuca

SEQ ID NO: 2035425 - RNA, 12 nt, Human
guuuuguaaauu

SEQ ID NO: 2035426 - RNA, 14 nt, Human
guuuuguaaauuuc

SEQ ID NO: 2035427 - RNA, 15 nt, Human
guuguuaauaaaagu

SEQ ID NO: 2035428 - RNA, 17 nt, Human
guuuuuaauaaagacag

SEQ ID NO: 2035429 - RNA, 16 nt, Human
uaaagaaaaguuuugu

SEQ ID NO: 2035430 - RNA, 22 nt, Human
uaaagaaaaguuuuguaaauuu

SEQ ID NO: 2035431 - RNA, 15 nt, Human
uaaauguagaaagug

SEQ ID NO: 2035432 - RNA, 11 nt, Human
uaauguuuccu

SEQ ID NO: 2035433 - RNA, 15 nt, Human
uaagccaugggagac

SEQ ID NO: 2035434 - RNA, 11 nt, Human
uauagaaaugc

SEQ ID NO: 2035435 - RNA, 23 nt, Human
ugaaucacguaaagcuagaaaug

SEQ ID NO: 2035436 - RNA, 17 nt, Human
ugaaucacguaaagcua

SEQ ID NO: 2035437 - RNA, 19 nt, Human
ugacucuuggcacagcaug

SEQ ID NO: 2035438 - RNA, 14 nt, Human
ugacucuuggcaca

SEQ ID NO: 2035439 - RNA, 20 nt, Human
ucugccucacauagcuuaca

SEQ ID NO: 2035440 - RNA, 20 nt, Human
ucagcaccuacaguguacag

SEQ ID NO: 2035441 - RNA, 21 nt, Human
ucagcaccuacaguguacagu

SEQ ID NO: 2035442 - RNA, 22 nt, Human
ucagcaccuacaguguacaguc

SEQ ID NO: 2035443 - RNA, 21 nt, Human
uggaacguuuuuccuguucuu

SEQ ID NO: 2035444 - RNA, 13 nt, Human
ugguauagaaaug

SEQ ID NO: 2035445 - RNA, 22 nt, Human
ugguauagaaaugcugguuuuu

SEQ ID NO: 2035446 - RNA, 14 nt, Human
ugguauagaaaugc

SEQ ID NO: 2035447 - RNA, 16 nt, Human
ugguauagaaaugcug

SEQ ID NO: 2035448 - RNA, 21 nt, Human
ugggauuacagggaugagcca

SEQ ID NO: 2035449 - RNA, 18 nt, Human
ugcccaggcuggagugca

SEQ ID NO: 2035450 - RNA, 20 nt, Human
ugcccaggcuggagugcaau

SEQ ID NO: 2035451 - RNA, 13 nt, Human
ugcccaggcugga

SEQ ID NO: 2035452 - RNA, 21 nt, Human
uguacagucuuguauuaaguu

SEQ ID NO: 2035453 - RNA, 15 nt, Human
uuaaauguagaaagu

SEQ ID NO: 2035454 - RNA, 20 nt, Human
uuaauagcgucauaacuaga

SEQ ID NO: 2035455 - RNA, 17 nt, Human
uuacacauuuuucagau

SEQ ID NO: 2035456 - RNA, 23 nt, Human
uuacacauuuuucagauauaaaa

SEQ ID NO: 2035457 - RNA, 15 nt, Human
uuacacauuuuucag

SEQ ID NO: 2035458 - RNA, 18 nt, Human
uuaaagaaaaguuuugua

SEQ ID NO: 2035459 - RNA, 22 nt, Human
ugugugucuaggcaggaccugu

SEQ ID NO: 2035460 - RNA, 15 nt, Human
uguguuuuuaauaaa

SEQ ID NO: 2035461 - RNA, 20 nt, Human
uguguuuuuaauaaagacag

SEQ ID NO: 2035462 - RNA, 15 nt, Human
aaagcccaaaguggu

SEQ ID NO: 2035463 - RNA, 22 nt, Human
aaaugcugguuuuucaguuuuc

SEQ ID NO: 2035464 - RNA, 15 nt, Human
aaucacguaaagcua

SEQ ID NO: 2035465 - RNA, 11 nt, Human
aauaaagacag

SEQ ID NO: 2035466 - RNA, 12 nt, Human
aauaaagacagg

SEQ ID NO: 2035467 - RNA, 13 nt, Human
aagcuagaaauga

SEQ ID NO: 2035468 - RNA, 12 nt, Human
aagacagagucu

SEQ ID NO: 2035469 - RNA, 20 nt, Human
acugauguaugaggaauuuc

SEQ ID NO: 2035470 - RNA, 17 nt, Human
accuguggccaaguucu

SEQ ID NO: 2035471 - RNA, 18 nt, Human
acaguggaaccagcccag

SEQ ID NO: 2035472 - RNA, 17 nt, Human
acauguuaaacuuacuu

SEQ ID NO: 2035473 - RNA, 22 nt, Human
aauuggauacgacaacuugcac

SEQ ID NO: 2035474 - RNA, 21 nt, Human
aauuuccacucaggucuguuu

SEQ ID NO: 2035475 - RNA, 19 nt, Human
agugauucuccugccucag

SEQ ID NO: 2035476 - RNA, 13 nt, Human
aguuacacauuuu

SEQ ID NO: 2035477 - RNA, 16 nt, Human
aguuacacauuuuuca

SEQ ID NO: 2035478 - RNA, 19 nt, Human
aguuacacauuuuucagau

SEQ ID NO: 2035479 - RNA, 15 nt, Human
agauauaaaagacug

SEQ ID NO: 2035480 - RNA, 18 nt, Human
agaagaugaaugagcaaa

SEQ ID NO: 2035481 - RNA, 19 nt, Human
agaagauggcacuuauaac

SEQ ID NO: 2035482 - RNA, 21 nt, Human
agacugaccaauauuguacag

SEQ ID NO: 2035483 - RNA, 12 nt, Human
agacugaccaau

SEQ ID NO: 2035484 - RNA, 22 nt, Human
aggcaugugccacccacccaac

SEQ ID NO: 2035485 - RNA, 17 nt, Human
cguaaagcuagaaauga

SEQ ID NO: 2035486 - RNA, 16 nt, Human
cguaaagcuagaaaug

SEQ ID NO: 2035487 - RNA, 19 nt, Human
cgcucuguugcccaggcug

SEQ ID NO: 2035488 - RNA, 22 nt, Human
cgcucuguugcccaggcuggag

SEQ ID NO: 2035489 - RNA, 22 nt, Human
cuaagaaagcccuuaggaagaa

SEQ ID NO: 2035490 - RNA, 16 nt, Human
ccucgagguuucucaa

SEQ ID NO: 2035491 - RNA, 15 nt, Human
ccucagccuccugag

SEQ ID NO: 2035492 - RNA, 20 nt, Human
caauuggauacgacaacuug

SEQ ID NO: 2035493 - RNA, 17 nt, Human
caauauuguacaguuuu

SEQ ID NO: 2035494 - RNA, 18 nt, Human
caauauuguacaguuuuu

SEQ ID NO: 2035495 - RNA, 15 nt, Human
caauauuguacaguu

SEQ ID NO: 2035496 - RNA, 16 nt, Human
caauauuguacaguuu

SEQ ID NO: 2035497 - RNA, 15 nt, Human
auuuauauaaauuuu

SEQ ID NO: 2035498 - RNA, 15 nt, Human
auuuuuuuuguuuca

SEQ ID NO: 2035499 - RNA, 22 nt, Human
cagauauaaaagacugaccaau

SEQ ID NO: 2035500 - RNA, 11 nt, Human
caguuuuccuu

SEQ ID NO: 2035501 - RNA, 15 nt, Human
gcucuggccuccaag

SEQ ID NO: 2035502 - RNA, 17 nt, Human
gcucuggccuccaaguc

SEQ ID NO: 2035503 - RNA, 15 nt, Human
gcugguuuuucaguu

SEQ ID NO: 2035504 - RNA, 14 nt, Human
gcugguuuuucagu

SEQ ID NO: 2035505 - RNA, 17 nt, Human
gcugggauuacagggau

SEQ ID NO: 2035506 - RNA, 13 nt, Human
ggccucccaaagu

SEQ ID NO: 2035507 - RNA, 18 nt, Human
aaaagggaacugaacauu

SEQ ID NO: 2035508 - RNA, 11 nt, Human
aaacuccugac

SEQ ID NO: 2035509 - RNA, 13 nt, Human
aaagcuagaaaug

SEQ ID NO: 2035510 - RNA, 11 nt, Human
gacuguagaaa

SEQ ID NO: 2035511 - RNA, 21 nt, Human
gaagggcuuggacucaagcaa

SEQ ID NO: 2035512 - RNA, 19 nt, Human
gagugcaaugacacagucu

SEQ ID NO: 2035513 - RNA, 18 nt, Human
gauucuccugccucagcc

SEQ ID NO: 2035514 - RNA, 18 nt, Human
gauguaaaagacuuuuuu

SEQ ID NO: 2035515 - RNA, 15 nt, Human
cuuuggugaacauug

SEQ ID NO: 2035516 - RNA, 18 nt, Human
cuuuuaggccaaaaaaau

SEQ ID NO: 2035517 - RNA, 16 nt, Human
cuuuuaggccaaaaaa

SEQ ID NO: 2035518 - RNA, 15 nt, Human
cugcaacuucugccu

SEQ ID NO: 2035519 - RNA, 14 nt, Human
cugcaacuucugcc

SEQ ID NO: 2035520 - RNA, 22 nt, Human
aaauuuccacucaggucuguuu

SEQ ID NO: 2035521 - RNA, 14 nt, Human
aaauuuccacucag

SEQ ID NO: 2035522 - RNA, 15 nt, Human
guaggacuguagaaa

SEQ ID NO: 2035523 - RNA, 17 nt, Human
guagcuggauuacaggc

SEQ ID NO: 2035524 - RNA, 14 nt, Human
aaaugaaagugaga

SEQ ID NO: 2035525 - RNA, 23 nt, Human
aaaugauccccagcuguuuaugc

SEQ ID NO: 2035526 - RNA, 17 nt, Human
aacauugcaauagaaau

SEQ ID NO: 2035527 - RNA, 14 nt, Human
aacauugcaauaga

SEQ ID NO: 2035528 - RNA, 15 nt, Human
aacauugcaauagaa

SEQ ID NO: 2035529 - RNA, 16 nt, Human
aacauugcaauagaaa

SEQ ID NO: 2035530 - RNA, 19 nt, Human
guucuuaguugcuguaugu

SEQ ID NO: 2035531 - RNA, 14 nt, Human
guucuucaucuaag

SEQ ID NO: 2035532 - RNA, 15 nt, Human
aagcaagauuucaga

SEQ ID NO: 2035533 - RNA, 19 nt, Human
guggaaguaguggagcccc

SEQ ID NO: 2035534 - RNA, 15 nt, Human
uacacauuuuucaga

SEQ ID NO: 2035535 - RNA, 17 nt, Human
uacacauuuuucagaua

SEQ ID NO: 2035536 - RNA, 21 nt, Human
uacacauuuuucagauauaaa

SEQ ID NO: 2035537 - RNA, 19 nt, Human
uacacauuuuucagauaua

SEQ ID NO: 2035538 - RNA, 14 nt, Human
aaugugacucaaga

SEQ ID NO: 2035539 - RNA, 21 nt, Human
uaauagcgucauaacuagaac

SEQ ID NO: 2035540 - RNA, 17 nt, Human
uaauaaaaguacauguu

SEQ ID NO: 2035541 - RNA, 13 nt, Human
aauauuguacagu

SEQ ID NO: 2035542 - RNA, 12 nt, Human
aauaacuuuuuu

SEQ ID NO: 2035543 - RNA, 15 nt, Human
aaguuuuguaaauuu

SEQ ID NO: 2035544 - RNA, 13 nt, Human
uacuuuuuccugg

SEQ ID NO: 2035545 - RNA, 21 nt, Human
aauugacuuauuuauauaaau

SEQ ID NO: 2035546 - RNA, 20 nt, Human
acagauguaaaagacuuuuu

SEQ ID NO: 2035547 - RNA, 10 nt, Human
uaguuuuugu

SEQ ID NO: 2035548 - RNA, 14 nt, Human
uauaaaagacugac

SEQ ID NO: 2035549 - RNA, 19 nt, Human
acacagucuuggcucacug

SEQ ID NO: 2035550 - RNA, 18 nt, Human
accaauauuguacaguuu

SEQ ID NO: 2035551 - RNA, 19 nt, Human
accaauauuguacaguuuu

SEQ ID NO: 2035552 - RNA, 15 nt, Human
accaauauuguacag

SEQ ID NO: 2035553 - RNA, 14 nt, Human
accaauauuguaca

SEQ ID NO: 2035554 - RNA, 16 nt, Human
accaauauuguacagu

SEQ ID NO: 2035555 - RNA, 17 nt, Human
accaauauuguacaguu

SEQ ID NO: 2035556 - RNA, 17 nt, Human
ucagaaucucucuucuu

SEQ ID NO: 2035557 - RNA, 16 nt, Human
acccccaaauuuucuu

SEQ ID NO: 2035558 - RNA, 15 nt, Human
ucaagacuuccagag

SEQ ID NO: 2035559 - RNA, 21 nt, Human
acauagcuuacaagccagcug

SEQ ID NO: 2035560 - RNA, 15 nt, Human
acaguuuuuauugcu

SEQ ID NO: 2035561 - RNA, 19 nt, Human
uccaaguccacaguggaac

SEQ ID NO: 2035562 - RNA, 17 nt, Human
uccacucaggucuguuu

SEQ ID NO: 2035563 - RNA, 14 nt, Human
uccagagacuggga

SEQ ID NO: 2035564 - RNA, 15 nt, Human
accuacaguguacag

SEQ ID NO: 2035565 - RNA, 16 nt, Human
accuacaguguacagu

SEQ ID NO: 2035566 - RNA, 17 nt, Human
accuacaguguacaguc

SEQ ID NO: 2035567 - RNA, 18 nt, Human
accuacaguguacagucu

SEQ ID NO: 2035568 - RNA, 20 nt, Human
accuacaguguacagucuug

SEQ ID NO: 2035569 - RNA, 21 nt, Human
uccuuuaauuuuuuacuauuu

SEQ ID NO: 2035570 - RNA, 16 nt, Human
agaaauuuccacucag

SEQ ID NO: 2035571 - RNA, 22 nt, Human
agaaauuuccacucaggucugu

SEQ ID NO: 2035572 - RNA, 15 nt, Human
agacuuccagagccu

SEQ ID NO: 2035573 - RNA, 22 nt, Human
ucuuucugcagaaacagaaagg

SEQ ID NO: 2035574 - RNA, 15 nt, Human
ucuuuaguuuuugug

SEQ ID NO: 2035575 - RNA, 17 nt, Human
ugaccaauauuguacag

SEQ ID NO: 2035576 - RNA, 18 nt, Human
ugaccaauauuguacagu

SEQ ID NO: 2035577 - RNA, 19 nt, Human
ugaccaauauuguacaguu

SEQ ID NO: 2035578 - RNA, 21 nt, Human
ugaccaauauuguacaguuuu

SEQ ID NO: 2035579 - RNA, 16 nt, Human
agcauuugucaacaaa

SEQ ID NO: 2035580 - RNA, 21 nt, Human
aggaccuguggccaaguucuu

SEQ ID NO: 2035581 - RNA, 17 nt, Human
uggagugcaaugacaca

SEQ ID NO: 2035582 - RNA, 13 nt, Human
agcuguuuaugca

SEQ ID NO: 2035583 - RNA, 15 nt, Human
agcuuacaagccagc

SEQ ID NO: 2035584 - RNA, 17 nt, Human
agcuuacaagccagcug

SEQ ID NO: 2035585 - RNA, 19 nt, Human
agcuuacaagccagcugga

SEQ ID NO: 2035586 - RNA, 18 nt, Human
uguaugucucgugguagg

SEQ ID NO: 2035587 - RNA, 23 nt, Human
uguagaaaagggaacugaacauu

SEQ ID NO: 2035588 - RNA, 18 nt, Human
uguagaaaagggaacuga

SEQ ID NO: 2035589 - RNA, 19 nt, Human
uguagaaaagggaacugaa

SEQ ID NO: 2035590 - RNA, 20 nt, Human
uguagaaaagggaacugaac

SEQ ID NO: 2035591 - RNA, 21 nt, Human
uguagaaaagggaacugaaca

SEQ ID NO: 2035592 - RNA, 14 nt, Human
aguacauguuaaac

SEQ ID NO: 2035593 - RNA, 13 nt, Human
uuaauaaagacag

SEQ ID NO: 2035594 - RNA, 14 nt, Human
uuaauaaagacagg

SEQ ID NO: 2035595 - RNA, 22 nt, Human
uuaaguuacacauuuuucagau

SEQ ID NO: 2035596 - RNA, 15 nt, Human
auaaaaguacauguu

SEQ ID NO: 2035597 - RNA, 21 nt, Human
auaaaaguacauguuaaacuu

SEQ ID NO: 2035598 - RNA, 19 nt, Human
auaacuagaacugaauuuu

SEQ ID NO: 2035599 - RNA, 12 nt, Human
auaaauaacuuu

SEQ ID NO: 2035600 - RNA, 14 nt, Human
auaaauaacuuuuu

SEQ ID NO: 2035601 - RNA, 20 nt, Human
aguucuuaguugcuguaugu

SEQ ID NO: 2035602 - RNA, 21 nt, Human
aguucuuaguugcuguauguc

SEQ ID NO: 2035603 - RNA, 15 nt, Human
uuaaauuucuaccgc

SEQ ID NO: 2035604 - RNA, 16 nt, Human
aguucuuaguugcugu

SEQ ID NO: 2035605 - RNA, 17 nt, Human
aguggaaguaguggagc

SEQ ID NO: 2035606 - RNA, 15 nt, Human
ugucuuguguuucuu

SEQ ID NO: 2035607 - RNA, 22 nt, Human
agucuuguauuaaguuguuaau

SEQ ID NO: 2035608 - RNA, 15 nt, Human
agucuuggcucacug

SEQ ID NO: 2035609 - RNA, 16 nt, Human
agucuuguauuaaguu

SEQ ID NO: 2035610 - RNA, 18 nt, Human
agucuuguauuaaguugu

SEQ ID NO: 2035611 - RNA, 18 nt, Human
uguggccaaguucuuagu

SEQ ID NO: 2035612 - RNA, 20 nt, Human
auauuuguauuuaaaugaaa

SEQ ID NO: 2035613 - RNA, 13 nt, Human
auauugaugugug

SEQ ID NO: 2035614 - RNA, 14 nt, Human
aucacguaaagcua

SEQ ID NO: 2035615 - RNA, 21 nt, Human
aucacguaaagcuagaaauga

SEQ ID NO: 2035616 - RNA, 20 nt, Human
uuccuguucuuaagacguga

SEQ ID NO: 2035617 - RNA, 20 nt, Human
auagcgucauaacuagaacu

SEQ ID NO: 2035618 - RNA, 18 nt, Human
auagcgucauaacuagaa

SEQ ID NO: 2035619 - RNA, 20 nt, Human
uucaagugauucuccugccu

SEQ ID NO: 2035620 - RNA, 22 nt, Human
auagcuuacaagccagcuggag

SEQ ID NO: 2035621 - RNA, 23 nt, Human
uucagcaccuacaguguacaguc

SEQ ID NO: 2035622 - RNA, 22 nt, Human
uucagcaccuacaguguacagu

SEQ ID NO: 2035623 - RNA, 17 nt, Human
auauaaauuuuuuuugu

SEQ ID NO: 2035624 - RNA, 22 nt, Human
auauaaauuuuuuuuguuucau

SEQ ID NO: 2035625 - RNA, 14 nt, Human
uuguaaauuucucu

SEQ ID NO: 2035626 - RNA, 16 nt, Human
augaaagugagacuuu

SEQ ID NO: 2035627 - RNA, 22 nt, Human
aucucuuuguucuaaagaugga

SEQ ID NO: 2035628 - RNA, 22 nt, Human
uugcaauagaaauccaauugga

SEQ ID NO: 2035629 - RNA, 15 nt, Human
uugcaauagaaaucc

SEQ ID NO: 2035630 - RNA, 20 nt, Human
uuuacccuucuuuucugacu

SEQ ID NO: 2035631 - RNA, 13 nt, Human
uuuaaaugaaagu

SEQ ID NO: 2035632 - RNA, 21 nt, Human
uuuaaaugaaagugagacuuu

SEQ ID NO: 2035633 - RNA, 13 nt, Human
auuaaguuguuaa

SEQ ID NO: 2035634 - RNA, 21 nt, Human
uuuugugaaguuuaauugacu

SEQ ID NO: 2035635 - RNA, 13 nt, Human
uuuguuucauauu

SEQ ID NO: 2035636 - RNA, 19 nt, Human
caccauguuggccaggcug

SEQ ID NO: 2035637 - RNA, 18 nt, Human
caaagugguauagaaaug

SEQ ID NO: 2035638 - RNA, 19 nt, Human
caaagugguauagaaaugc

SEQ ID NO: 2035639 - RNA, 17 nt, Human
caaauauuccagagacu

SEQ ID NO: 2035640 - RNA, 13 nt, Human
caaauauuccaga

SEQ ID NO: 2035641 - RNA, 19 nt, Human
caaagcccaaagugguaua

SEQ ID NO: 2035642 - RNA, 17 nt, Human
caaagcccaaaguggua

SEQ ID NO: 2035643 - RNA, 20 nt, Human
caagugauucuccugccuca

SEQ ID NO: 2035644 - RNA, 18 nt, Human
cauuuuucagauauaaaa

SEQ ID NO: 2035645 - RNA, 20 nt, Human
cauuuuucagauauaaaaga

SEQ ID NO: 2035646 - RNA, 17 nt, Human
ccaaauuuucuuuuuau

SEQ ID NO: 2035647 - RNA, 20 nt, Human
ccacaguggaaccagcccag

SEQ ID NO: 2035648 - RNA, 11 nt, Human
ccacucagguc

SEQ ID NO: 2035649 - RNA, 16 nt, Human
ccacucaggucuguuu

SEQ ID NO: 2035650 - RNA, 24 nt, Human
ccagcuggagaaauaugguacuca

SEQ ID NO: 2035651 - RNA, 14 nt, Human
cggccucccaaagu

SEQ ID NO: 2035652 - RNA, 14 nt, Human
cgucauaacuagaa

SEQ ID NO: 2035653 - RNA, 16 nt, Human
cgucauaacuagaacu

SEQ ID NO: 2035654 - RNA, 17 nt, Human
cgucauaacuagaacug

SEQ ID NO: 2035655 - RNA, 12 nt, Human
cguucucugccu

SEQ ID NO: 2035656 - RNA, 20 nt, Human
ccuguggccaaguucuuagu

SEQ ID NO: 2035657 - RNA, 18 nt, Human
cuggucucaaacuccuga

SEQ ID NO: 2035658 - RNA, 21 nt, Human
cuccugaguagcuggauuaca

SEQ ID NO: 2035659 - RNA, 17 nt, Human
cucgagguuucucaaag

SEQ ID NO: 2035660 - RNA, 15 nt, Human
cucaggucuguuuuc

SEQ ID NO: 2035661 - RNA, 24 nt, Human
cuccauucccguggaacguuuuuc

SEQ ID NO: 2035662 - RNA, 21 nt, Human
cucuccauucccguggaacgu

SEQ ID NO: 2035663 - RNA, 14 nt, Human
cuuacuuaguguua

SEQ ID NO: 2035664 - RNA, 15 nt, Human
cuuucugcagaaaca

SEQ ID NO: 2035665 - RNA, 18 nt, Human
gaaaagggaacugaacau

SEQ ID NO: 2035666 - RNA, 17 nt, Human
gaccaauauuguacagu

SEQ ID NO: 2035667 - RNA, 18 nt, Human
gaccaauauuguacaguu

SEQ ID NO: 2035668 - RNA, 19 nt, Human
gaccaauauuguacaguuu

SEQ ID NO: 2035669 - RNA, 21 nt, Human
gaccaauauuguacaguuuuu

SEQ ID NO: 2035670 - RNA, 21 nt, Human
gacugaccaauauuguacagu

SEQ ID NO: 2035671 - RNA, 22 nt, Human
gacugaccaauauuguacaguu

SEQ ID NO: 2035672 - RNA, 16 nt, Human
gacuuauuuauauaaa

SEQ ID NO: 2035673 - RNA, 19 nt, Human
gaccuguggccaaguucuu

SEQ ID NO: 2035674 - RNA, 17 nt, Human
gacgugauuuugcugua

SEQ ID NO: 2035675 - RNA, 16 nt, Human
gacgugauuuugcugu

SEQ ID NO: 2035676 - RNA, 12 nt, Human
gaacguuuuucc

SEQ ID NO: 2035677 - RNA, 15 nt, Human
gaacguuuuuccugu

SEQ ID NO: 2035678 - RNA, 13 nt, Human
gaacauugcaaua

SEQ ID NO: 2035679 - RNA, 15 nt, Human
gaacauugcaauaga

SEQ ID NO: 2035680 - RNA, 17 nt, Human
gaacauugcaauagaaa

SEQ ID NO: 2035681 - RNA, 23 nt, Human
gaaguaguggagccccugcucug

SEQ ID NO: 2035682 - RNA, 18 nt, Human
gauauaaaagacugacca

SEQ ID NO: 2035683 - RNA, 19 nt, Human
gcccaaagugguauagaaa

SEQ ID NO: 2035684 - RNA, 12 nt, Human
gccgggguggau

SEQ ID NO: 2035685 - RNA, 17 nt, Human
ggucucaaacuccugac

SEQ ID NO: 2035686 - RNA, 19 nt, Human
ggaaaaaccacccccaaau

SEQ ID NO: 2035687 - RNA, 16 nt, Human
gcuggauuacaggcau

SEQ ID NO: 2035688 - RNA, 12 nt, Human
ggccaaguucuu

SEQ ID NO: 2035689 - RNA, 17 nt, Human
uauaaauuuuuuuuguu

SEQ ID NO: 2035690 - RNA, 21 nt, Human
uauaaauuuuuuuuguuucau

SEQ ID NO: 2035691 - RNA, 22 nt, Human
uauccugcuucugauaugcagu

SEQ ID NO: 2035692 - RNA, 13 nt, Human
uacaguguacagu

SEQ ID NO: 2035693 - RNA, 22 nt, Human
uacaguguacagucuuguauua

SEQ ID NO: 2035694 - RNA, 15 nt, Human
uacaguguacagucu

SEQ ID NO: 2035695 - RNA, 16 nt, Human
uacaguguacagucuu

SEQ ID NO: 2035696 - RNA, 21 nt, Human
uacauuuuguauauuuguauu

SEQ ID NO: 2035697 - RNA, 14 nt, Human
uacgacaacuugca

SEQ ID NO: 2035698 - RNA, 15 nt, Human
uacgacaacuugcac

SEQ ID NO: 2035699 - RNA, 15 nt, Human
uagaaagaagaugaa

SEQ ID NO: 2035700 - RNA, 13 nt, Human
uaauaaagacagg

SEQ ID NO: 2035701 - RNA, 18 nt, Human
uaagaucguucucugccu

SEQ ID NO: 2035702 - RNA, 14 nt, Human
uaaagcuagaaaug

SEQ ID NO: 2035703 - RNA, 15 nt, Human
uaaagcuagaaauga

SEQ ID NO: 2035704 - RNA, 12 nt, Human
guuuuucaguuu

SEQ ID NO: 2035705 - RNA, 15 nt, Human
ucaaaaacauucuua

SEQ ID NO: 2035706 - RNA, 15 nt, Human
uccccagcuguuuau

SEQ ID NO: 2035707 - RNA, 14 nt, Human
uccccagcuguuua

SEQ ID NO: 2035708 - RNA, 21 nt, Human
ucccaaagugcugggauuaca

SEQ ID NO: 2035709 - RNA, 17 nt, Human
ucucuuuguucuaaaga

SEQ ID NO: 2035710 - RNA, 21 nt, Human
ucucuacugucucaguuuaca

SEQ ID NO: 2035711 - RNA, 14 nt, Human
ucucaaacuccuga

SEQ ID NO: 2035712 - RNA, 17 nt, Human
ucucaaagaaauuucca

SEQ ID NO: 2035713 - RNA, 13 nt, Human
ugaacauuccaga

SEQ ID NO: 2035714 - RNA, 14 nt, Human
ugaacauuccagag

SEQ ID NO: 2035715 - RNA, 15 nt, Human
ugaacauugcaauag

SEQ ID NO: 2035716 - RNA, 17 nt, Human
ugaacauugcaauagaa

SEQ ID NO: 2035717 - RNA, 16 nt, Human
ucuuuuuauacuauua

SEQ ID NO: 2035718 - RNA, 16 nt, Human
ucuuguauuaaguugu

SEQ ID NO: 2035719 - RNA, 18 nt, Human
ucuuguauuaaguuguua

SEQ ID NO: 2035720 - RNA, 22 nt, Human
ucuuguauuaaguuguuaauaa

SEQ ID NO: 2035721 - RNA, 20 nt, Human
uggaaaaaccacccccaaau

SEQ ID NO: 2035722 - RNA, 14 nt, Human
ugcuuguuggauuu

SEQ ID NO: 2035723 - RNA, 19 nt, Human
uggauacgacaacuugcac

SEQ ID NO: 2035724 - RNA, 14 nt, Human
uguuggccaggcug

SEQ ID NO: 2035725 - RNA, 20 nt, Human
uguuggauuuuugucuugug

SEQ ID NO: 2035726 - RNA, 17 nt, Human
uguuggauuuuugucuu

SEQ ID NO: 2035727 - RNA, 15 nt, Human
uguauuuaaaugaaa

SEQ ID NO: 2035728 - RNA, 17 nt, Human
uguacagucuuguauua

SEQ ID NO: 2035729 - RNA, 14 nt, Human
uguacagucuugua

SEQ ID NO: 2035730 - RNA, 15 nt, Human
uguacagucuuguau

SEQ ID NO: 2035731 - RNA, 12 nt, Human
uguacagucuug

SEQ ID NO: 2035732 - RNA, 17 nt, Human
ugguaggacuguagaaa

SEQ ID NO: 2035733 - RNA, 18 nt, Human
ugguaggacuguagaaaa

SEQ ID NO: 2035734 - RNA, 16 nt, Human
uuguacaguuuuuauu

SEQ ID NO: 2035735 - RNA, 12 nt, Human
uuguacaguuuu

SEQ ID NO: 2035736 - RNA, 13 nt, Human
uuguacaguuuuu

SEQ ID NO: 2035737 - RNA, 18 nt, Human
uuggauuuuugucuugug

SEQ ID NO: 2035738 - RNA, 20 nt, Human
uugcuguagaagauggcacu

SEQ ID NO: 2035739 - RNA, 13 nt, Human
uucucaaagaaau

SEQ ID NO: 2035740 - RNA, 15 nt, Human
uucucaaagaaauuu

SEQ ID NO: 2035741 - RNA, 19 nt, Human
uucucaaagaaauuuccac

SEQ ID NO: 2035742 - RNA, 20 nt, Human
uucucaaagaaauuuccacu

SEQ ID NO: 2035743 - RNA, 13 nt, Human
uucuaaagaugga

SEQ ID NO: 2035744 - RNA, 12 nt, Human
uucaguuuucag

SEQ ID NO: 2035745 - RNA, 13 nt, Human
uuuauugcuuguu

SEQ ID NO: 2035746 - RNA, 23 nt, Human
uuguauuuaaaugaaagugagac

SEQ ID NO: 2035747 - RNA, 19 nt, Human
ugaggaauuucuguucuuc

SEQ ID NO: 2035748 - RNA, 15 nt, Human
ucaaaugagaaaaug

SEQ ID NO: 2035749 - RNA, 22 nt, Human
guaaauucucuauuuuuuguaa

SEQ ID NO: 2035750 - RNA, 17 nt, Human
gcucuguugcccaggcu

SEQ ID NO: 2035751 - RNA, 18 nt, Human
uuugaugcuucuuugaaa

SEQ ID NO: 2035752 - RNA, 19 nt, Human
uucauaucacacuguuaaa

SEQ ID NO: 2035753 - RNA, 14 nt, Human
uuacauuuuguaua

SEQ ID NO: 2035754 - RNA, 22 nt, Human
uuuaaaaaauggacucuugaaa

SEQ ID NO: 2035755 - RNA, 13 nt, Human
ugcaauagaaauc

SEQ ID NO: 2035756 - RNA, 18 nt, Human
ucuggaaguuuguuuaaa

SEQ ID NO: 2035757 - RNA, 20 nt, Human
guauauuuguauuuaaauga

SEQ ID NO: 2035758 - RNA, 20 nt, Human
uaaaauuguacauuuggaga

SEQ ID NO: 2035759 - RNA, 23 nt, Human
uaaauguuccuuuccuuuguagu

SEQ ID NO: 2035760 - RNA, 17 nt, Human
gccaccgcgcccagccu

SEQ ID NO: 2035761 - RNA, 17 nt, Human
uuauauuuucuuuguaa

SEQ ID NO: 2035762 - RNA, 19 nt, Human
uuaaagaaaaguuuuguaa

SEQ ID NO: 2035763 - RNA, 16 nt, Human
uggaaauagugauuuc

SEQ ID NO: 2035764 - RNA, 12 nt, Human
auuuauauaaau

SEQ ID NO: 2035765 - RNA, 18 nt, Human
aguauccugcuucugaua

SEQ ID NO: 2035766 - RNA, 18 nt, Human
auuaucuaaaaucugcua

SEQ ID NO: 2035767 - RNA, 14 nt, Human
agugguauagaaau

SEQ ID NO: 2035768 - RNA, 21 nt, Human
gaaaaugucuuuauuaaaugu

SEQ ID NO: 2035769 - RNA, 19 nt, Human
gauaaugguguuuuuuaga

SEQ ID NO: 2035770 - RNA, 12 nt, Human herpesvirus 6
uuuuaauuccaa

SEQ ID NO: 2035771 - RNA, 19 nt, Human herpesvirus 6
aacaaaaagcuuuaaagca

SEQ ID NO: 2035772 - RNA, 16 nt, Human herpesvirus 6
uuaaaccucuguagau

SEQ ID NO: 2035773 - RNA, 24 nt, Human herpesvirus 6
agcagucugcuggaugcugaugaa

SEQ ID NO: 2035774 - RNA, 14 nt, Human herpesvirus 6
aggauaagaugauu

SEQ ID NO: 2035775 - RNA, 11 nt, Human herpesvirus 6
agcagaugcuu

SEQ ID NO: 2035776 - RNA, 22 nt, Human herpesvirus 6
uaaaauccacgaacguagacag

SEQ ID NO: 2035777 - RNA, 21 nt, Human herpesvirus 6
gcccuaucuccgauaacgaaa

SEQ ID NO: 2035778 - RNA, 14 nt, Human herpesvirus 6
gucugcaaaaaugu

SEQ ID NO: 2035779 - RNA, 14 nt, Human herpesvirus 6
uaaaugugaacauu

SEQ ID NO: 2035780 - RNA, 16 nt, Human herpesvirus 6
ugucggccgugaugca

SEQ ID NO: 2035781 - RNA, 21 nt, Human herpesvirus 6
cgccaagaaaaagaaauuaau

SEQ ID NO: 2035782 - RNA, 21 nt, Human herpesvirus 6
agcauacagauguguauuaug

SEQ ID NO: 2035783 - RNA, 17 nt, Human herpesvirus 6
uggcaaacguaugcagu

SEQ ID NO: 2035784 - RNA, 16 nt, Human herpesvirus 6
aaaacucgcaccucug

SEQ ID NO: 2035785 - RNA, 22 nt, Human herpesvirus 6
cugauuccuucaauguucuuca

SEQ ID NO: 2035786 - RNA, 18 nt, Human herpesvirus 6
uuugaauaacaaacuaua

SEQ ID NO: 2035787 - RNA, 20 nt, Human herpesvirus 6
caaauguaacuuuuuguauu

SEQ ID NO: 2035788 - RNA, 17 nt, Human herpesvirus 6
gcaacucaucaaauccu

SEQ ID NO: 2035789 - RNA, 21 nt, Human herpesvirus 6
guuccuccgcgggaccuggcg

SEQ ID NO: 2035790 - RNA, 15 nt, Human herpesvirus 6
uaugaaugagauguu

SEQ ID NO: 2035791 - RNA, 17 nt, Human herpesvirus 6
gacgucauguguggaca

SEQ ID NO: 2035792 - RNA, 14 nt, Human herpesvirus 6
ucuuauauuucaga

SEQ ID NO: 2035793 - RNA, 14 nt, Human herpesvirus 6
ggaaaccaccggcu

SEQ ID NO: 2035794 - RNA, 20 nt, Human herpesvirus 6
uuuaguaugggugagugcau

SEQ ID NO: 2035795 - RNA, 22 nt, Human herpesvirus 6
gcgcaauucuucucuacaucga

SEQ ID NO: 2035796 - RNA, 13 nt, Human herpesvirus 6
gaucauuauauca

SEQ ID NO: 2035797 - RNA, 16 nt, Human herpesvirus 6
agaaucugcagauuuu

SEQ ID NO: 2035798 - RNA, 20 nt, Human herpesvirus 6
caggaucguccccuuggcuc

SEQ ID NO: 2035799 - RNA, 16 nt, Human herpesvirus 6
gaggacggugagaaga

SEQ ID NO: 2035800 - RNA, 22 nt, Human herpesvirus 6
auucauauuauauuuaaaugaa

SEQ ID NO: 2035801 - RNA, 21 nt, Human herpesvirus 6
auacagauguguauuauguaa

SEQ ID NO: 2035802 - RNA, 14 nt, Human herpesvirus 6
uugccuuguaaauc

SEQ ID NO: 2035803 - RNA, 14 nt, Human herpesvirus 6
cuucgacuucaaac

SEQ ID NO: 2035804 - RNA, 22 nt, Human herpesvirus 6
gcggcaaccgcaguuccuguuu

SEQ ID NO: 2035805 - RNA, 17 nt, Human herpesvirus 6
uugcuaguuguaugacu

SEQ ID NO: 2035806 - RNA, 22 nt, Human herpesvirus 6
cccauccaccuucccucccacc

SEQ ID NO: 2035807 - RNA, 14 nt, Human herpesvirus 6
aauguguuuuucuu

SEQ ID NO: 2035808 - RNA, 13 nt, Human herpesvirus 6
cacaaaaacaggg

SEQ ID NO: 2035809 - RNA, 13 nt, Human herpesvirus 6
aguuaugugcugu

SEQ ID NO: 2035810 - RNA, 16 nt, Human herpesvirus 6
uugugcgucagcuuug

SEQ ID NO: 2035811 - RNA, 20 nt, Human herpesvirus 6
augcuuuuuaaaaaaacacu

SEQ ID NO: 2035812 - RNA, 11 nt, Human herpesvirus 6
cacccaucucc

SEQ ID NO: 2035813 - RNA, 20 nt, Human herpesvirus 6
ugggauguccauuucuucga

SEQ ID NO: 2035814 - RNA, 12 nt, Human herpesvirus 6
aauaacagauga

SEQ ID NO: 2035815 - RNA, 19 nt, Human herpesvirus 6
uucagaagagaugaaagac

SEQ ID NO: 2035816 - RNA, 17 nt, Human herpesvirus 6
ugaacgcacuggacauc

SEQ ID NO: 2035817 - RNA, 23 nt, Human herpesvirus 6
uuacaucaacuauuuaacaucca

SEQ ID NO: 2035818 - RNA, 22 nt, Human herpesvirus 6
gucgucgccuccccgggugcuc

SEQ ID NO: 2035819 - RNA, 14 nt, Human herpesvirus 6
auuguaaaagggaa

SEQ ID NO: 2035820 - RNA, 12 nt, Human herpesvirus 6
uaacaacaacaa

SEQ ID NO: 2035821 - RNA, 16 nt, Human herpesvirus 6
aaugcaauuuaaaaga

SEQ ID NO: 2035822 - RNA, 16 nt, Human herpesvirus 6
cuacugcacuuucgau

SEQ ID NO: 2035823 - RNA, 20 nt, Human herpesvirus 6
uucuuuggagaugauuccaa

SEQ ID NO: 2035824 - RNA, 14 nt, Human herpesvirus 6
cacgcccccaccuc

SEQ ID NO: 2035825 - RNA, 11 nt, Human herpesvirus 6
ugauuaacaaa

SEQ ID NO: 2035826 - RNA, 15 nt, Human herpesvirus 6
aaggacuaucugaga

SEQ ID NO: 2035827 - RNA, 14 nt, Human herpesvirus 6
ucagaauccaccaa

SEQ ID NO: 2035828 - RNA, 14 nt, Human herpesvirus 6
cuauagucaauguu

SEQ ID NO: 2035829 - RNA, 17 nt, Human herpesvirus 6
uuuuaguuuuuagagaa

SEQ ID NO: 2035830 - RNA, 14 nt, Human herpesvirus 6
gauucuuuaaagau

SEQ ID NO: 2035831 - RNA, 17 nt, Human herpesvirus 6
gaaaauguuuuucauaa

SEQ ID NO: 2035832 - RNA, 21 nt, Human herpesvirus 6
cuucaacauaucacuuguauu

SEQ ID NO: 2035833 - RNA, 19 nt, Human herpesvirus 6
aggugucucaaccuucauu

SEQ ID NO: 2035834 - RNA, 23 nt, Human herpesvirus 6
aauucucuggaugcuuuuagaug

SEQ ID NO: 2035835 - RNA, 20 nt, Human herpesvirus 6
gcugcgcugauccugacugg

SEQ ID NO: 2035836 - RNA, 12 nt, Human herpesvirus 6
gaugaaauugug

SEQ ID NO: 2035837 - RNA, 12 nt, Human herpesvirus 6
aguauugaagaa

SEQ ID NO: 2035838 - RNA, 16 nt, Human herpesvirus 6
cuguuuuucucauaaa

SEQ ID NO: 2035839 - RNA, 19 nt, Human herpesvirus 6
aaaacacagacggauucaa

SEQ ID NO: 2035840 - RNA, 14 nt, Human herpesvirus 6
ucccuaauaaaugu

SEQ ID NO: 2035841 - RNA, 18 nt, Human herpesvirus 6
guggucaugaucugcuug

SEQ ID NO: 2035842 - RNA, 19 nt, Human herpesvirus 6
agagcgagucuugugugaa

SEQ ID NO: 2035843 - RNA, 12 nt, Human herpesvirus 6
cccuguccccuc

SEQ ID NO: 2035844 - RNA, 20 nt, Human herpesvirus 6
gguaccgcgguuggggucuu

SEQ ID NO: 2035845 - RNA, 20 nt, Human herpesvirus 6
caucgguggcagaggggaag

SEQ ID NO: 2035846 - RNA, 13 nt, Human herpesvirus 6
guucguuaaaaac

SEQ ID NO: 2035847 - RNA, 14 nt, Human herpesvirus 6
aaagcacauaaggc

SEQ ID NO: 2035848 - RNA, 22 nt, Human herpesvirus 6
ucuauccaugaaacucuuugaa

SEQ ID NO: 2035849 - RNA, 15 nt, Human herpesvirus 6
ucagauuuggagaaa

SEQ ID NO: 2035850 - RNA, 22 nt, Human herpesvirus 6
gucuauaacgagucgaagagag

SEQ ID NO: 2035851 - RNA, 18 nt, Human herpesvirus 6
acugcgaauccgucuccg

SEQ ID NO: 2035852 - RNA, 21 nt, Human herpesvirus 6
aauuucuaaccauuuugaaaa

SEQ ID NO: 2035853 - RNA, 14 nt, Human herpesvirus 6
uuccugcccaggcg

SEQ ID NO: 2035854 - RNA, 16 nt, Human herpesvirus 6
accgcagcagcuagau

SEQ ID NO: 2035855 - RNA, 15 nt, Human herpesvirus 6
caggcgaacgaaaac

SEQ ID NO: 2035856 - RNA, 21 nt, Human herpesvirus 6
gaacuuuguccuuacaaaucu

SEQ ID NO: 2035857 - RNA, 23 nt, Human herpesvirus 6
cacccuacaaucuguccagcuug

SEQ ID NO: 2035858 - RNA, 22 nt, Human herpesvirus 6
uccaacggccuuucuguuuuaa

SEQ ID NO: 2035859 - RNA, 13 nt, Human herpesvirus 6
uccuauugguuug

SEQ ID NO: 2035860 - RNA, 14 nt, Human herpesvirus 6
cgcaguggacggcg

SEQ ID NO: 2035861 - RNA, 20 nt, Human herpesvirus 6
ugugauuccuucggggacag

SEQ ID NO: 2035862 - RNA, 13 nt, Human herpesvirus 6
gucgcucuuucua

SEQ ID NO: 2035863 - RNA, 24 nt, Human herpesvirus 6
ggcagcugcaugguccacagaugu

SEQ ID NO: 2035864 - RNA, 20 nt, Human herpesvirus 6
cccaggcaaacgagaacucu

SEQ ID NO: 2035865 - RNA, 20 nt, Human herpesvirus 6
ugauggguuuggccaugccg

SEQ ID NO: 2035866 - RNA, 21 nt, Human herpesvirus 6
uucucugacuauuucaaaaga

SEQ ID NO: 2035867 - RNA, 15 nt, Human herpesvirus 6
ugcauuaacccuggg

SEQ ID NO: 2035868 - RNA, 20 nt, Human herpesvirus 6
agggauggcagaucuugaaa

SEQ ID NO: 2035869 - RNA, 22 nt, Human herpesvirus 6
auacgaaccucaugaguguuua

SEQ ID NO: 2035870 - RNA, 15 nt, Human herpesvirus 6
uacggagaacgggca

SEQ ID NO: 2035871 - RNA, 21 nt, Human herpesvirus 6
ggagcggaggggcgcgagaca

SEQ ID NO: 2035872 - RNA, 18 nt, Human herpesvirus 6
guguuaugaucuagcuau

SEQ ID NO: 2035873 - RNA, 11 nt, Human herpesvirus 6
gucuuuccugc

SEQ ID NO: 2035874 - RNA, 20 nt, Human herpesvirus 6
ccacggggauuuaguacagu

SEQ ID NO: 2035875 - RNA, 14 nt, Human herpesvirus 6
cauuuauguuucuu

SEQ ID NO: 2035876 - RNA, 15 nt, Human herpesvirus 6
cggacaaugcagaac

SEQ ID NO: 2035877 - RNA, 15 nt, Human herpesvirus 6
ucgaaacgaaagcug

SEQ ID NO: 2035878 - RNA, 14 nt, Human herpesvirus 6
cgaagugcuucucu

SEQ ID NO: 2035879 - RNA, 18 nt, Human herpesvirus 6
cuccuacuauccgcccuc

SEQ ID NO: 2035880 - RNA, 14 nt, Human herpesvirus 6
uuguacaaacuuuu

SEQ ID NO: 2035881 - RNA, 18 nt, Human herpesvirus 6
aauauauuuauugaaaga

SEQ ID NO: 2035882 - RNA, 18 nt, Human herpesvirus 6
cuggcggacaccgagggc

SEQ ID NO: 2035883 - RNA, 17 nt, Human herpesvirus 6
uggcccuacuacagugg

SEQ ID NO: 2035884 - RNA, 12 nt, Human herpesvirus 6
aauuaauacaaa

SEQ ID NO: 2035885 - RNA, 13 nt, Human herpesvirus 6
cauguugcaguuu

SEQ ID NO: 2035886 - RNA, 13 nt, Human herpesvirus 6
cuaaauacauuca

SEQ ID NO: 2035887 - RNA, 20 nt, Human herpesvirus 6
cgugccuguuuuggugaaca

SEQ ID NO: 2035888 - RNA, 14 nt, Human herpesvirus 6
auuaauaaaucgcu

SEQ ID NO: 2035889 - RNA, 17 nt, Human herpesvirus 6
ggugccaaaggaaacca

SEQ ID NO: 2035890 - RNA, 18 nt, Human herpesvirus 6
uccuccccuguccccucg

SEQ ID NO: 2035891 - RNA, 17 nt, Human herpesvirus 6
cauaacauagaaaaaug

SEQ ID NO: 2035892 - RNA, 13 nt, Human herpesvirus 6
cgcuguccgccug

SEQ ID NO: 2035893 - RNA, 21 nt, Human herpesvirus 6
agcagaacggcgguaacgugg

SEQ ID NO: 2035894 - RNA, 13 nt, Human herpesvirus 6
uauuuccugccca

SEQ ID NO: 2035895 - RNA, 16 nt, Human herpesvirus 6
cccacgguggccuggc

SEQ ID NO: 2035896 - RNA, 13 nt, Human herpesvirus 6
uguguucaagaac

SEQ ID NO: 2035897 - RNA, 15 nt, Human herpesvirus 6
gacgcaaagagacca

SEQ ID NO: 2035898 - RNA, 17 nt, Human herpesvirus 6
aagaaugggauugugau

SEQ ID NO: 2035899 - RNA, 16 nt, Human herpesvirus 6
auaaaauaucccgcgu

SEQ ID NO: 2035900 - RNA, 20 nt, Human herpesvirus 6
uguuugaggcguugugcuga

SEQ ID NO: 2035901 - RNA, 16 nt, Human herpesvirus 6
agauuacggcaacaua

SEQ ID NO: 2035902 - RNA, 11 nt, Human herpesvirus 6
uuucuuuggag

SEQ ID NO: 2035903 - RNA, 21 nt, Human herpesvirus 6
uaaucgauuacaaaacaaucu

SEQ ID NO: 2035904 - RNA, 23 nt, Human herpesvirus 6
acacaccugccuagaauucuccc

SEQ ID NO: 2035905 - RNA, 13 nt, Human herpesvirus 6
ugaacuguuucca

SEQ ID NO: 2035906 - RNA, 16 nt, Human herpesvirus 6
uauuuaacauccaaaa

SEQ ID NO: 2035907 - RNA, 15 nt, Human herpesvirus 6
cgauuugcugguaaa

SEQ ID NO: 2035908 - RNA, 22 nt, Human herpesvirus 6
caucgcgcgcgacgugccaccg

SEQ ID NO: 2035909 - RNA, 23 nt, Human herpesvirus 6
auaaaugguagcuauuaugugaa

SEQ ID NO: 2035910 - RNA, 13 nt, Human herpesvirus 6
ggagggacccaca

SEQ ID NO: 2035911 - RNA, 23 nt, Human herpesvirus 6
acguuauaucuaaagucagagau

SEQ ID NO: 2035912 - RNA, 20 nt, Human herpesvirus 6
cuacaauacgguuugucucg

SEQ ID NO: 2035913 - RNA, 11 nt, Human herpesvirus 6
gugaagaucac

SEQ ID NO: 2035914 - RNA, 16 nt, Human herpesvirus 6
accgucugggacccac

SEQ ID NO: 2035915 - RNA, 13 nt, Human herpesvirus 6
aaaaaaacacuag

SEQ ID NO: 2035916 - RNA, 10 nt, Human herpesvirus 6
cuuuccugcc

SEQ ID NO: 2035917 - RNA, 12 nt, Human herpesvirus 6
cuuuuuguauua

SEQ ID NO: 2035918 - RNA, 23 nt, Human herpesvirus 6
gcagucaguaaugauauaaaaga

SEQ ID NO: 2035919 - RNA, 16 nt, Human herpesvirus 6
cuguaccauugucaac

SEQ ID NO: 2035920 - RNA, 16 nt, Human herpesvirus 6
caguucaacgcugucu

SEQ ID NO: 2035921 - RNA, 15 nt, Human herpesvirus 6
agguguuugcagaug

SEQ ID NO: 2035922 - RNA, 23 nt, Human herpesvirus 6
uuucacgugcacgagaucuguuc

SEQ ID NO: 2035923 - RNA, 22 nt, Human herpesvirus 6
aaacaccgguaagcaucugcug

SEQ ID NO: 2035924 - RNA, 15 nt, Human herpesvirus 6
auauaucaaagaugu

SEQ ID NO: 2035925 - RNA, 19 nt, Human herpesvirus 6
gauugcaacauuuuccucu

SEQ ID NO: 2035926 - RNA, 24 nt, Human herpesvirus 6
ccgucaaaucucgccgaacuagaa

SEQ ID NO: 2035927 - RNA, 19 nt, Human herpesvirus 6
aaagcauuuuuguugugau

SEQ ID NO: 2035928 - RNA, 20 nt, Human herpesvirus 6
gucuccgccuuuucuuauau

SEQ ID NO: 2035929 - RNA, 19 nt, Human herpesvirus 6
caaaacauaucgagccaaa

SEQ ID NO: 2035930 - RNA, 13 nt, Human herpesvirus 6
ggccuggcacggu

SEQ ID NO: 2035931 - RNA, 19 nt, Human herpesvirus 6
uauaauguguuggucauuu

SEQ ID NO: 2035932 - RNA, 18 nt, Human herpesvirus 6
auuguaaauagguaaacu

SEQ ID NO: 2035933 - RNA, 15 nt, Human herpesvirus 6
uucuauguacuuauu

SEQ ID NO: 2035934 - RNA, 15 nt, Human herpesvirus 6
uguaguuuuuaaauc

SEQ ID NO: 2035935 - RNA, 20 nt, Human herpesvirus 6
auaacgauauauaaaaaacu

SEQ ID NO: 2035936 - RNA, 22 nt, Human herpesvirus 6
augagggggagggacccacagg

SEQ ID NO: 2035937 - RNA, 20 nt, Human herpesvirus 6
gggaagaaaauccagcaaug

SEQ ID NO: 2035938 - RNA, 15 nt, Human herpesvirus 6
ucaugauauuccaga

SEQ ID NO: 2035939 - RNA, 20 nt, Human herpesvirus 6
ggcgcgagacagcggacagc

SEQ ID NO: 2035940 - RNA, 11 nt, Human herpesvirus 6
gccaaauguau

SEQ ID NO: 2035941 - RNA, 18 nt, Human herpesvirus 6
ugaagaaccugaaaucug

SEQ ID NO: 2035942 - RNA, 15 nt, Human herpesvirus 6
cuugauguuuccuga

SEQ ID NO: 2035943 - RNA, 18 nt, Human herpesvirus 6
cgacaagaaaauaaaaaa

SEQ ID NO: 2035944 - RNA, 12 nt, Human herpesvirus 6
gaaacaagaaag

SEQ ID NO: 2035945 - RNA, 20 nt, Human herpesvirus 6
auuacucaacauuaaaaaaa

SEQ ID NO: 2035946 - RNA, 22 nt, Human herpesvirus 6
auaacgauagcagcucugcaau

SEQ ID NO: 2035947 - RNA, 23 nt, Human herpesvirus 6
aacaguuuaccuauuuacaaugu

SEQ ID NO: 2035948 - RNA, 17 nt, Human herpesvirus 6
cagagacgguguuuuca

SEQ ID NO: 2035949 - RNA, 21 nt, Human herpesvirus 6
gacucauagauuucauacugu

SEQ ID NO: 2035950 - RNA, 18 nt, Human herpesvirus 6
gauuagaaauuacauaag

SEQ ID NO: 2035951 - RNA, 23 nt, Human herpesvirus 6
cgcgguuggggucuuuccugcac

SEQ ID NO: 2035952 - RNA, 18 nt, Human herpesvirus 6
ugauugugacaaggaaug

SEQ ID NO: 2035953 - RNA, 18 nt, Human herpesvirus 6
aauguuuuugacaaauaa

SEQ ID NO: 2035954 - RNA, 20 nt, Human herpesvirus 6
gacaucgaccgccggaggua

SEQ ID NO: 2035955 - RNA, 12 nt, Human herpesvirus 6
aaagcaaacaug

SEQ ID NO: 2035956 - RNA, 14 nt, Human herpesvirus 6
aucauuguuugaau

SEQ ID NO: 2035957 - RNA, 18 nt, Human herpesvirus 6
cucggauucaaagaaagu

SEQ ID NO: 2035958 - RNA, 16 nt, Human herpesvirus 6
uaguuuuuuuucuuua

SEQ ID NO: 2035959 - RNA, 17 nt, Human herpesvirus 6
auaucuugaaaucuacu

SEQ ID NO: 2035960 - RNA, 12 nt, Human herpesvirus 6
agcuggcugaca

SEQ ID NO: 2035961 - RNA, 22 nt, Human herpesvirus 6
gcuucgcaagacgccacgggca

SEQ ID NO: 2035962 - RNA, 21 nt, Human herpesvirus 6
auacauuccuuaagaaugaaa

SEQ ID NO: 2035963 - RNA, 23 nt, Human herpesvirus 6
gggucguacacgcauuugcaauu

SEQ ID NO: 2035964 - RNA, 13 nt, Human herpesvirus 6
auagaccuugauc

SEQ ID NO: 2035965 - RNA, 21 nt, Human herpesvirus 6
uuuaccaccagucaggaaaaa

SEQ ID NO: 2035966 - RNA, 15 nt, Human herpesvirus 6
acccaugaaaaucau

SEQ ID NO: 2035967 - RNA, 17 nt, Human herpesvirus 6
ucgggagaggaccaaga

SEQ ID NO: 2035968 - RNA, 14 nt, Human herpesvirus 6
auaaaagaaucauu

SEQ ID NO: 2035969 - RNA, 20 nt, Human herpesvirus 6
gaaugucgguaaacuuacca

SEQ ID NO: 2035970 - RNA, 23 nt, Human herpesvirus 6
uucaacauccuauugagauucuc

SEQ ID NO: 2035971 - RNA, 19 nt, Human herpesvirus 6
gacgugccaccgucuggga

SEQ ID NO: 2035972 - RNA, 20 nt, Human herpesvirus 6
cgagaacucuaaaagcugcu

SEQ ID NO: 2035973 - RNA, 13 nt, Human herpesvirus 6
aauaauaaaaagu

SEQ ID NO: 2035974 - RNA, 12 nt, Human herpesvirus 6
acgggaaaagau

SEQ ID NO: 2035975 - RNA, 17 nt, Human herpesvirus 6
ugaaacuccccagagaa

SEQ ID NO: 2035976 - RNA, 20 nt, Human herpesvirus 6
cgagacagcggacagcgggg

SEQ ID NO: 2035977 - RNA, 18 nt, Human herpesvirus 6
ggagaauaggaaaagaua

SEQ ID NO: 2035978 - RNA, 20 nt, Human herpesvirus 6
acguaucccuaauaaauguc

SEQ ID NO: 2035979 - RNA, 23 nt, Human herpesvirus 6
aaaaaguuagcggggagucucca

SEQ ID NO: 2035980 - RNA, 18 nt, Human herpesvirus 6
cagccgguagagaguggg

SEQ ID NO: 2035981 - RNA, 17 nt, Human herpesvirus 6
aacagucugacauggaa

SEQ ID NO: 2035982 - RNA, 19 nt, Human herpesvirus 6
gaaaucuacuguacaaaau

SEQ ID NO: 2035983 - RNA, 16 nt, Human herpesvirus 6
uaacaacaaccacagc

SEQ ID NO: 2035984 - RNA, 15 nt, Human herpesvirus 6
ggugaauguuucuga

SEQ ID NO: 2035985 - RNA, 18 nt, Human herpesvirus 6
aucaacugacuuauaagu

SEQ ID NO: 2035986 - RNA, 22 nt, Human herpesvirus 6
uaccacggggauuuaguacagu

SEQ ID NO: 2035987 - RNA, 15 nt, Human herpesvirus 6
uacauaagcaaaugu

SEQ ID NO: 2035988 - RNA, 14 nt, Human herpesvirus 6
uugcagaucuaauu

SEQ ID NO: 2035989 - RNA, 15 nt, Human herpesvirus 6
acucgacuucuuuca

SEQ ID NO: 2035990 - RNA, 21 nt, Human herpesvirus 6
augaucucacgucacaguuuu

SEQ ID NO: 2035991 - RNA, 13 nt, Human herpesvirus 6
uuaugauuucgga

SEQ ID NO: 2035992 - RNA, 16 nt, Human herpesvirus 6
aggggcgcgagacagc

SEQ ID NO: 2035993 - RNA, 20 nt, Human herpesvirus 6
guuuuaagagcagacaagga

SEQ ID NO: 2035994 - RNA, 16 nt, Human herpesvirus 6
uauaauuaaaauagaa

SEQ ID NO: 2035995 - RNA, 17 nt, Human herpesvirus 6
uuugcgucuucuauauu

SEQ ID NO: 2035996 - RNA, 15 nt, Human herpesvirus 6
acaaauaaaaaauuc

SEQ ID NO: 2035997 - RNA, 15 nt, Human herpesvirus 6
uuuaccgguuuggug

SEQ ID NO: 2035998 - RNA, 14 nt, Human herpesvirus 6
aagauguagcugga

SEQ ID NO: 2035999 - RNA, 20 nt, Human herpesvirus 6
aauuacgcuguccgccuguu

SEQ ID NO: 2036000 - RNA, 10 nt, Human herpesvirus 6
agagaggaaa

SEQ ID NO: 2036001 - RNA, 21 nt, Human herpesvirus 6
auugacuacagcugcaggggu

SEQ ID NO: 2036002 - RNA, 17 nt, Human herpesvirus 6
gcgaauuuguuaagcaa

SEQ ID NO: 2036003 - RNA, 20 nt, Human herpesvirus 6
augagggguaugucugugca

SEQ ID NO: 2036004 - RNA, 19 nt, Human herpesvirus 6
aguccgcugggaauugcau

SEQ ID NO: 2036005 - RNA, 19 nt, Human herpesvirus 6
caaccugaaacuccccaga

SEQ ID NO: 2036006 - RNA, 11 nt, Human herpesvirus 6
cucggaaaauu

SEQ ID NO: 2036007 - RNA, 22 nt, Human herpesvirus 6
aaaacacaaaccaucaauuuua

SEQ ID NO: 2036008 - RNA, 13 nt, Human herpesvirus 6
acauguuaacaau

SEQ ID NO: 2036009 - RNA, 22 nt, Human herpesvirus 6
uuaaugcauucacaaggaaugu

SEQ ID NO: 2036010 - RNA, 18 nt, Human herpesvirus 6
ggacgacgggcggggcgg

SEQ ID NO: 2036011 - RNA, 12 nt, Human herpesvirus 6
gucuuuccugca

SEQ ID NO: 2036012 - RNA, 19 nt, Human herpesvirus 6
guuacauucguauacuucc

SEQ ID NO: 2036013 - RNA, 16 nt, Human herpesvirus 6
ucuccugagaagcugg

SEQ ID NO: 2036014 - RNA, 20 nt, Human herpesvirus 6
aauuugaaauaucagaaaua

SEQ ID NO: 2036015 - RNA, 15 nt, Human herpesvirus 6
acucgugugucuuug

SEQ ID NO: 2036016 - RNA, 18 nt, Human herpesvirus 6
aucgccccugucugugau

SEQ ID NO: 2036017 - RNA, 13 nt, Human herpesvirus 6
uacuacacaaacg

SEQ ID NO: 2036018 - RNA, 15 nt, Human herpesvirus 6
uaaugauauaaaaga

SEQ ID NO: 2036019 - RNA, 16 nt, Human herpesvirus 6
agugcugugcucuuua

SEQ ID NO: 2036020 - RNA, 12 nt, Human herpesvirus 6
accgaucuguga

SEQ ID NO: 2036021 - RNA, 15 nt, Human herpesvirus 6
aauuuuccaaacauu

SEQ ID NO: 2036022 - RNA, 13 nt, Human herpesvirus 6
ccccgcagcuccu

SEQ ID NO: 2036023 - RNA, 13 nt, Human herpesvirus 6
caauacacagaaa

SEQ ID NO: 2036024 - RNA, 22 nt, Human herpesvirus 6
ucacaagcuguccaucuucaga

SEQ ID NO: 2036025 - RNA, 15 nt, Human herpesvirus 6
cauaugucuguuaua

SEQ ID NO: 2036026 - RNA, 17 nt, Human herpesvirus 6
uuuaccuuuggaaaaua

SEQ ID NO: 2036027 - RNA, 14 nt, Human herpesvirus 6
acucaauuuugaaa

SEQ ID NO: 2036028 - RNA, 19 nt, Human herpesvirus 6
uuagccuuuauucuguuuu

SEQ ID NO: 2036029 - RNA, 19 nt, Human herpesvirus 6
ggccuccgccacugcgagg

SEQ ID NO: 2036030 - RNA, 22 nt, Human herpesvirus 6
ugacggcgacaaccgccgccgc

SEQ ID NO: 2036031 - RNA, 14 nt, Human herpesvirus 6
cgcgcgccggugcg

SEQ ID NO: 2036032 - RNA, 21 nt, Human herpesvirus 6
ugcaagccaugacaagaaagg

SEQ ID NO: 2036033 - RNA, 14 nt, Human herpesvirus 6
ggaccuggcggaca

SEQ ID NO: 2036034 - RNA, 23 nt, Human herpesvirus 6
uagacacgcuaaaaacagacgaa

SEQ ID NO: 2036035 - RNA, 17 nt, Human herpesvirus 6
uccgccuuuucuuauau

SEQ ID NO: 2036036 - RNA, 17 nt, Human herpesvirus 6
aucgcgaagccuguccg

SEQ ID NO: 2036037 - RNA, 14 nt, Human herpesvirus 6
acauuaaacacuaa

SEQ ID NO: 2036038 - RNA, 12 nt, Human herpesvirus 6
aacgaaaaagaa

SEQ ID NO: 2036039 - RNA, 21 nt, Human herpesvirus 6
gcacacacaagaacagagaga

SEQ ID NO: 2036040 - RNA, 18 nt, Human herpesvirus 6
cggccggagugccguuga

SEQ ID NO: 2036041 - RNA, 22 nt, Human herpesvirus 6
uaaaccguuuaucgaugugcga

SEQ ID NO: 2036042 - RNA, 16 nt, Human herpesvirus 6
cggaaaacuaaaaguc

SEQ ID NO: 2036043 - RNA, 15 nt, Human herpesvirus 6
aacggcuucaagaau

SEQ ID NO: 2036044 - RNA, 11 nt, Human herpesvirus 6
cguauauugug

SEQ ID NO: 2036045 - RNA, 24 nt, Human herpesvirus 6
caucgcgcgcgacgugccaccguc

SEQ ID NO: 2036046 - RNA, 20 nt, Human herpesvirus 6
caaaguucaguaacauuuaa

SEQ ID NO: 2036047 - RNA, 15 nt, Human herpesvirus 6
acucgacuaaaagac

SEQ ID NO: 2036048 - RNA, 16 nt, Human herpesvirus 6
caacauuuauguuucu

SEQ ID NO: 2036049 - RNA, 18 nt, Human herpesvirus 6
aucaccuuacaaauaaua

SEQ ID NO: 2036050 - RNA, 17 nt, Human herpesvirus 6
uuuuucuucaggugucu

SEQ ID NO: 2036051 - RNA, 19 nt, Human herpesvirus 6
cuugucuuacacucuccac

SEQ ID NO: 2036052 - RNA, 13 nt, Human herpesvirus 6
agggacccacagg

SEQ ID NO: 2036053 - RNA, 16 nt, Human herpesvirus 6
gccaccgucugggacc

SEQ ID NO: 2036054 - RNA, 18 nt, Human herpesvirus 6
gagcacgguccacacgcc

SEQ ID NO: 2036055 - RNA, 22 nt, Human herpesvirus 6
uguaguuuaguaugggugagug

SEQ ID NO: 2036056 - RNA, 14 nt, Human herpesvirus 6
cauaacgauagcag

SEQ ID NO: 2036057 - RNA, 23 nt, Human herpesvirus 6
uauacgaaauaaucgauuacaaa

SEQ ID NO: 2036058 - RNA, 13 nt, Human herpesvirus 6
aggggaagggaau

SEQ ID NO: 2036059 - RNA, 23 nt, Human herpesvirus 6
aguuaggauuacacuuucuugua

SEQ ID NO: 2036060 - RNA, 18 nt, Human herpesvirus 6
gacgcaccuccuuuguau

SEQ ID NO: 2036061 - RNA, 13 nt, Human herpesvirus 6
caucugcaaaaaa

SEQ ID NO: 2036062 - RNA, 22 nt, Human herpesvirus 6
aguguaaaguucucgaauuguu

SEQ ID NO: 2036063 - RNA, 19 nt, Human herpesvirus 6
cugaucacagagcagagag

SEQ ID NO: 2036064 - RNA, 17 nt, Human herpesvirus 6
cagugaaggcugccaug

SEQ ID NO: 2036065 - RNA, 14 nt, Human herpesvirus 6
auguuauguaaaga

SEQ ID NO: 2036066 - RNA, 11 nt, Human herpesvirus 6
uacuaggaaag

SEQ ID NO: 2036067 - RNA, 16 nt, Human herpesvirus 6
cagaagaacagcuaau

SEQ ID NO: 2036068 - RNA, 14 nt, Human herpesvirus 6
cuguugaauuccag

SEQ ID NO: 2036069 - RNA, 12 nt, Human herpesvirus 6
cgcuuuuacuga

SEQ ID NO: 2036070 - RNA, 21 nt, Human herpesvirus 6
agaucgcuuuugaaauugaaa

SEQ ID NO: 2036071 - RNA, 20 nt, Human herpesvirus 6
aaucucgccgaacuagaaaa

SEQ ID NO: 2036072 - RNA, 11 nt, Human herpesvirus 6
ggcgggcagau

SEQ ID NO: 2036073 - RNA, 13 nt, Human herpesvirus 6
uuauuaacuguaa

SEQ ID NO: 2036074 - RNA, 15 nt, Human herpesvirus 6
ccucguuguuucaua

SEQ ID NO: 2036075 - RNA, 13 nt, Human herpesvirus 6
aaaguuuaaagau

SEQ ID NO: 2036076 - RNA, 18 nt, Human herpesvirus 6
aaaguuaagaaaacauga

SEQ ID NO: 2036077 - RNA, 15 nt, Human herpesvirus 6
gguauuuuagauaua

SEQ ID NO: 2036078 - RNA, 13 nt, Human herpesvirus 6
augucuugccucu

SEQ ID NO: 2036079 - RNA, 16 nt, Human herpesvirus 6
ucacaaggaaugugca

SEQ ID NO: 2036080 - RNA, 16 nt, Human herpesvirus 6
gccauauccuagcauu

SEQ ID NO: 2036081 - RNA, 13 nt, Human herpesvirus 6
caaucuuaaauau

SEQ ID NO: 2036082 - RNA, 22 nt, Human herpesvirus 6
aagacguuugcuguuuucacca

SEQ ID NO: 2036083 - RNA, 13 nt, Human herpesvirus 6
cuugaauguuuaa

SEQ ID NO: 2036084 - RNA, 16 nt, Human herpesvirus 6
caauguaauaauugau

SEQ ID NO: 2036085 - RNA, 15 nt, Human herpesvirus 6
cgaaucucaagcaca

SEQ ID NO: 2036086 - RNA, 16 nt, Human herpesvirus 6
ggcgcugauuccugua

SEQ ID NO: 2036087 - RNA, 19 nt, Human herpesvirus 6
gcaaucauuagcauacaga

SEQ ID NO: 2036088 - RNA, 14 nt, Human herpesvirus 6
uaauauacgaaaua

SEQ ID NO: 2036089 - RNA, 21 nt, Human herpesvirus 6
agaugaaaccuagauguaaau

SEQ ID NO: 2036090 - RNA, 16 nt, Human herpesvirus 6
cagcaauguaauaauu

SEQ ID NO: 2036091 - RNA, 16 nt, Human herpesvirus 6
accucugaaacacugu

SEQ ID NO: 2036092 - RNA, 18 nt, Human herpesvirus 6
uuccccacaauaagaaaa

SEQ ID NO: 2036093 - RNA, 15 nt, Human herpesvirus 6
ucacauauaugaugc

SEQ ID NO: 2036094 - RNA, 22 nt, Human herpesvirus 6
cguuccucucucggcugacaac

SEQ ID NO: 2036095 - RNA, 14 nt, Human herpesvirus 6
uguguauuauguaa

SEQ ID NO: 2036096 - RNA, 20 nt, Human herpesvirus 6
gggcuccgcgccguuucaaa

SEQ ID NO: 2036097 - RNA, 21 nt, Human herpesvirus 6
aaaucgcgucguucguuguau

SEQ ID NO: 2036098 - RNA, 15 nt, Human herpesvirus 6
uccaugcgaguagau

SEQ ID NO: 2036099 - RNA, 14 nt, Human herpesvirus 6
cagaaaaaaaucag

SEQ ID NO: 2036100 - RNA, 15 nt, Human herpesvirus 6
agauacauagauuuu

SEQ ID NO: 2036101 - RNA, 12 nt, Human herpesvirus 6
ggaauuucuucc

SEQ ID NO: 2036102 - RNA, 20 nt, Human herpesvirus 6
aagcacugaauuagaauaau

SEQ ID NO: 2036103 - RNA, 13 nt, Human herpesvirus 6
acugaauagguuu

SEQ ID NO: 2036104 - RNA, 14 nt, Human herpesvirus 6
agaucuaauucaca

SEQ ID NO: 2036105 - RNA, 14 nt, Human herpesvirus 6
cagcauguuuucuc

SEQ ID NO: 2036106 - RNA, 20 nt, Human herpesvirus 6
acgggucgggggucugcaaa

SEQ ID NO: 2036107 - RNA, 20 nt, Human herpesvirus 6
gaucuuuacaaaagacacaa

SEQ ID NO: 2036108 - RNA, 23 nt, Human herpesvirus 6
gcagaggggaagggaauaacaga

SEQ ID NO: 2036109 - RNA, 16 nt, Human herpesvirus 6
gcacaucuauguguau

SEQ ID NO: 2036110 - RNA, 23 nt, Human herpesvirus 6
ugggaucuucugcuaauucauag

SEQ ID NO: 2036111 - RNA, 15 nt, Human herpesvirus 6
ggcggauggagcccg

SEQ ID NO: 2036112 - RNA, 18 nt, Human herpesvirus 6
ugcauuaacccuggguga

SEQ ID NO: 2036113 - RNA, 17 nt, Human herpesvirus 6
uuaauaaaggauguuug

SEQ ID NO: 2036114 - RNA, 21 nt, Human herpesvirus 6
ucucugcgccaaccuucuaau

SEQ ID NO: 2036115 - RNA, 14 nt, Human herpesvirus 6
aucauauccugaaa

SEQ ID NO: 2036116 - RNA, 21 nt, Human herpesvirus 6
guuguugaucguguuguggac

SEQ ID NO: 2036117 - RNA, 17 nt, Human herpesvirus 6
guaaacacgaaauugcu

SEQ ID NO: 2036118 - RNA, 19 nt, Human herpesvirus 6
uuacaacccccgauucaga

SEQ ID NO: 2036119 - RNA, 16 nt, Human herpesvirus 6
guguuuuugaugugcc

SEQ ID NO: 2036120 - RNA, 16 nt, Human herpesvirus 6
guugaaguauguacaa

SEQ ID NO: 2036121 - RNA, 11 nt, Human herpesvirus 6
uuuaacauuuu

SEQ ID NO: 2036122 - RNA, 10 nt, Human herpesvirus 6
aauuaaaggu

SEQ ID NO: 2036123 - RNA, 23 nt, Human herpesvirus 6
auguguuuuucuuuuacaggaag

SEQ ID NO: 2036124 - RNA, 20 nt, Human herpesvirus 6
ugaaagacuuaaaauuuaug

SEQ ID NO: 2036125 - RNA, 22 nt, Human herpesvirus 6
gaacaugugacacgauuucuga

SEQ ID NO: 2036126 - RNA, 14 nt, Human herpesvirus 6
ggacggacaggggg

SEQ ID NO: 2036127 - RNA, 19 nt, Human herpesvirus 6
uucacugaccguuguaaga

SEQ ID NO: 2036128 - RNA, 17 nt, Human herpesvirus 6
cggagauuaaaacauca

SEQ ID NO: 2036129 - RNA, 21 nt, Human herpesvirus 6
aggaaaguguguucuuacaau

SEQ ID NO: 2036130 - RNA, 19 nt, Human herpesvirus 6
gcgcgagacagcggacagc

SEQ ID NO: 2036131 - RNA, 16 nt, Human herpesvirus 6
ucuccuauaaauacug

SEQ ID NO: 2036132 - RNA, 20 nt, Human herpesvirus 6
ggacacgcgcaguggacggc

SEQ ID NO: 2036133 - RNA, 15 nt, Human herpesvirus 6
cgcaaauucucucua

SEQ ID NO: 2036134 - RNA, 23 nt, Human herpesvirus 6
uucuggcacaggcauagcagcaa

SEQ ID NO: 2036135 - RNA, 13 nt, Human herpesvirus 6
aaguuucacauau

SEQ ID NO: 2036136 - RNA, 15 nt, Human herpesvirus 6
gcgcgacgugccacc

SEQ ID NO: 2036137 - RNA, 14 nt, Human herpesvirus 6
ugcuugucucacaa

SEQ ID NO: 2036138 - RNA, 21 nt, Human herpesvirus 6
ucuaccgagagauuuacuguu

SEQ ID NO: 2036139 - RNA, 13 nt, Human herpesvirus 6
uuacagauacaua

SEQ ID NO: 2036140 - RNA, 21 nt, Human herpesvirus 6
gauucuuaauucuuaaagcgu

SEQ ID NO: 2036141 - RNA, 17 nt, Human herpesvirus 6
cacucggaagaaaagcu

SEQ ID NO: 2036142 - RNA, 21 nt, Human herpesvirus 6
gcagcuuccacgcgacagauc

SEQ ID NO: 2036143 - RNA, 18 nt, Human herpesvirus 6
caaucgcaaaaacauguu

SEQ ID NO: 2036144 - RNA, 15 nt, Human herpesvirus 6
uuacaauacacagaa

SEQ ID NO: 2036145 - RNA, 22 nt, Human herpesvirus 6
uuccauugucgccucgaaacaa

SEQ ID NO: 2036146 - RNA, 17 nt, Human herpesvirus 6
gagaacucuaaaagcug

SEQ ID NO: 2036147 - RNA, 20 nt, Human herpesvirus 6
uucuuauuuaccuuccugag

SEQ ID NO: 2036148 - RNA, 20 nt, Human herpesvirus 6
gucgagaaccaccagagaca

SEQ ID NO: 2036149 - RNA, 20 nt, Human herpesvirus 6
cuaugcgcuuuuauuucugg

SEQ ID NO: 2036150 - RNA, 17 nt, Human herpesvirus 6
aacaacaucuuaaaaga

SEQ ID NO: 2036151 - RNA, 22 nt, Human herpesvirus 6
uuuaaccauucguuuuauugaa

SEQ ID NO: 2036152 - RNA, 16 nt, Human herpesvirus 6
cacuuagacacggccg

SEQ ID NO: 2036153 - RNA, 15 nt, Human herpesvirus 6
uguguauuauguaaa

SEQ ID NO: 2036154 - RNA, 15 nt, Human herpesvirus 6
aauaauuauccucuc

SEQ ID NO: 2036155 - RNA, 20 nt, Human herpesvirus 6
cgggcagguuaucggaagca

SEQ ID NO: 2036156 - RNA, 15 nt, Human herpesvirus 6
cgcuccuccccuguc

SEQ ID NO: 2036157 - RNA, 23 nt, Human herpesvirus 6
cagaggaagauagcagaauagag

SEQ ID NO: 2036158 - RNA, 14 nt, Human herpesvirus 6
aggcuuaaugaaug

SEQ ID NO: 2036159 - RNA, 18 nt, Human herpesvirus 6
ugaauucucauuugaaag

SEQ ID NO: 2036160 - RNA, 23 nt, Human herpesvirus 6
aggaaaacucgcaccucugaaac

SEQ ID NO: 2036161 - RNA, 20 nt, Human herpesvirus 6
ggcgaugaucucggcgccgg

SEQ ID NO: 2036162 - RNA, 19 nt, Human herpesvirus 6
acgccacgggcauuccucg

SEQ ID NO: 2036163 - RNA, 20 nt, Human herpesvirus 6
uacauguuuguugugaucuu

SEQ ID NO: 2036164 - RNA, 20 nt, Human herpesvirus 6
ucgcuaaguguugacugauc

SEQ ID NO: 2036165 - RNA, 13 nt, Human herpesvirus 6
gauauaaauaugg

SEQ ID NO: 2036166 - RNA, 15 nt, Human herpesvirus 6
aauucuuaccaagaa

SEQ ID NO: 2036167 - RNA, 16 nt, Human herpesvirus 6
ucacguauaccauucc

SEQ ID NO: 2036168 - RNA, 19 nt, Human herpesvirus 6
augcuuugguuucaguagu

SEQ ID NO: 2036169 - RNA, 21 nt, Human herpesvirus 6
uaaggaagauucagagugaau

SEQ ID NO: 2036170 - RNA, 18 nt, Human herpesvirus 6
uguaauaguauugucuga

SEQ ID NO: 2036171 - RNA, 15 nt, Human herpesvirus 6
cggggacggacaggg

SEQ ID NO: 2036172 - RNA, 21 nt, Human herpesvirus 6
aauuauccuauugguuugcau

SEQ ID NO: 2036173 - RNA, 21 nt, Human herpesvirus 6
cagggggaucgacgggcagga

SEQ ID NO: 2036174 - RNA, 19 nt, Human herpesvirus 6
agugauuauggugccucag

SEQ ID NO: 2036175 - RNA, 14 nt, Human herpesvirus 6
cagaacaacagcau

SEQ ID NO: 2036176 - RNA, 18 nt, Human herpesvirus 6
uguccucuuugaauuuua

SEQ ID NO: 2036177 - RNA, 17 nt, Human herpesvirus 6
uaagauaggcaaaccau

SEQ ID NO: 2036178 - RNA, 16 nt, Human herpesvirus 6
cggccauuuaacggaa

SEQ ID NO: 2036179 - RNA, 19 nt, Human herpesvirus 6
ucuguauuuuucuuugcag

SEQ ID NO: 2036180 - RNA, 15 nt, Human herpesvirus 6
ggugccaaaggaaac

SEQ ID NO: 2036181 - RNA, 13 nt, Human herpesvirus 6
gauguuugaagau

SEQ ID NO: 2036182 - RNA, 18 nt, Human herpesvirus 6
cuacguccuuauacacga

SEQ ID NO: 2036183 - RNA, 17 nt, Human herpesvirus 6
ccucuaaacccagaccu

SEQ ID NO: 2036184 - RNA, 18 nt, Human herpesvirus 6
acacgcgcaguggacggc

SEQ ID NO: 2036185 - RNA, 18 nt, Human herpesvirus 6
ugggugaguuuuaucacu

SEQ ID NO: 2036186 - RNA, 20 nt, Human herpesvirus 6
agacucgccgaugaaacugu

SEQ ID NO: 2036187 - RNA, 22 nt, Human herpesvirus 6
gucggacgacgggcggggcgga

SEQ ID NO: 2036188 - RNA, 17 nt, Human herpesvirus 6
ucgugauaacaaugcau

SEQ ID NO: 2036189 - RNA, 23 nt, Human herpesvirus 6
ggagggaugucggucagacagug

SEQ ID NO: 2036190 - RNA, 17 nt, Human herpesvirus 6
aaaccuagauguaaauu

SEQ ID NO: 2036191 - RNA, 22 nt, Human herpesvirus 6
ucagucuucaauaaaaacucaa

SEQ ID NO: 2036192 - RNA, 15 nt, Human herpesvirus 6
accggaaaagagaag

SEQ ID NO: 2036193 - RNA, 18 nt, Human herpesvirus 6
ggacaaaaaaaaaacguc

SEQ ID NO: 2036194 - RNA, 18 nt, Human herpesvirus 6
aaauaaaguuaaauugau

SEQ ID NO: 2036195 - RNA, 19 nt, Human herpesvirus 6
gggcgcgagacagcggaca

SEQ ID NO: 2036196 - RNA, 20 nt, Human herpesvirus 6
ugaccggagaaaaucaugca

SEQ ID NO: 2036197 - RNA, 19 nt, Human herpesvirus 6
acguaucccuaauaaaugu

SEQ ID NO: 2036198 - RNA, 12 nt, Human herpesvirus 6
aaucaugagagc

SEQ ID NO: 2036199 - RNA, 14 nt, Human herpesvirus 6
caagcuaacaagaa

SEQ ID NO: 2036200 - RNA, 11 nt, Human herpesvirus 6
ucugaaagaca

SEQ ID NO: 2036201 - RNA, 22 nt, Human herpesvirus 6
aaagacaucacauuauaagaca

SEQ ID NO: 2036202 - RNA, 20 nt, Human herpesvirus 6
uuguugcuauagauuagaaa

SEQ ID NO: 2036203 - RNA, 19 nt, Human herpesvirus 6
aucuucggauucgcaagcu

SEQ ID NO: 2036204 - RNA, 18 nt, Human herpesvirus 6
uucuccuaccauguugcu

SEQ ID NO: 2036205 - RNA, 15 nt, Human herpesvirus 6
cacgaucuacacacc

SEQ ID NO: 2036206 - RNA, 21 nt, Human herpesvirus 6
uagcaucuuaccuucaaagug

SEQ ID NO: 2036207 - RNA, 21 nt, Human herpesvirus 6
ccgagcggcggauggagcccg

SEQ ID NO: 2036208 - RNA, 17 nt, Human herpesvirus 6
cagagacgacucgcgga

SEQ ID NO: 2036209 - RNA, 19 nt, Human herpesvirus 6
ucuuuugucguuauaaaau

SEQ ID NO: 2036210 - RNA, 20 nt, Human herpesvirus 6
ggcuacgacacgcuggagca

SEQ ID NO: 2036211 - RNA, 19 nt, Human herpesvirus 6
cagggggggucucuguucu

SEQ ID NO: 2036212 - RNA, 14 nt, Human herpesvirus 6
cugaacuguuucca

SEQ ID NO: 2036213 - RNA, 14 nt, Human herpesvirus 6
caucucaaaaaaca

SEQ ID NO: 2036214 - RNA, 19 nt, Human herpesvirus 6
agcuuagcgauuaguuugu

SEQ ID NO: 2036215 - RNA, 23 nt, Human herpesvirus 6
aaauaaaguuuaaagauguguua

SEQ ID NO: 2036216 - RNA, 15 nt, Human herpesvirus 6
cagucugcuggaugc

SEQ ID NO: 2036217 - RNA, 15 nt, Human herpesvirus 6
cauaugcagacugcu

SEQ ID NO: 2036218 - RNA, 13 nt, Human herpesvirus 6
guucaguaacauu

SEQ ID NO: 2036219 - RNA, 20 nt, Human herpesvirus 6
caaauuaauuaagugcgcug

SEQ ID NO: 2036220 - RNA, 17 nt, Human herpesvirus 6
uaucuuuuucuguguuu

SEQ ID NO: 2036221 - RNA, 16 nt, Human herpesvirus 6
cguaagaaaaaaaacg

SEQ ID NO: 2036222 - RNA, 18 nt, Human herpesvirus 6
aaagcugacuauucaggc

SEQ ID NO: 2036223 - RNA, 16 nt, Human herpesvirus 6
gaaauaucagaaauaa

SEQ ID NO: 2036224 - RNA, 14 nt, Human herpesvirus 6
gccacgacgugcug

SEQ ID NO: 2036225 - RNA, 14 nt, Human herpesvirus 6
gucucucagcuggc

SEQ ID NO: 2036226 - RNA, 22 nt, Human herpesvirus 6
ucggaaaauuaaaagucagugg

SEQ ID NO: 2036227 - RNA, 22 nt, Human herpesvirus 6
uucagaccucauauaagaacca

SEQ ID NO: 2036228 - RNA, 12 nt, Human herpesvirus 6
guuguucuugga

SEQ ID NO: 2036229 - RNA, 19 nt, Human herpesvirus 6
uccagugagaacguauaaa

SEQ ID NO: 2036230 - RNA, 16 nt, Human herpesvirus 6
cggcggauggagcccg

SEQ ID NO: 2036231 - RNA, 11 nt, Human herpesvirus 6
aagcaaacaug

SEQ ID NO: 2036232 - RNA, 21 nt, Human herpesvirus 6
gaagaucuuuauggagggaau

SEQ ID NO: 2036233 - RNA, 23 nt, Human herpesvirus 6
cuugaucacaacauaaaaauaca

SEQ ID NO: 2036234 - RNA, 20 nt, Human herpesvirus 6
gcaugucgaacagcuuuuca

SEQ ID NO: 2036235 - RNA, 17 nt, Human herpesvirus 6
uguauugaacuuuguaa

SEQ ID NO: 2036236 - RNA, 18 nt, Human herpesvirus 6
aguacauagaauuucuaa

SEQ ID NO: 2036237 - RNA, 14 nt, Human herpesvirus 6
uagcgauaauuaag

SEQ ID NO: 2036238 - RNA, 14 nt, Human herpesvirus 6
cagggaacuugaug

SEQ ID NO: 2036239 - RNA, 14 nt, Human herpesvirus 6
aaaagcgccugccu

SEQ ID NO: 2036240 - RNA, 14 nt, Human herpesvirus 6
auacagauguguau

SEQ ID NO: 2036241 - RNA, 23 nt, Human herpesvirus 6
acaucaacuauuuaacauccaaa

SEQ ID NO: 2036242 - RNA, 15 nt, Human herpesvirus 6
gaaagccggugaccg

SEQ ID NO: 2036243 - RNA, 12 nt, Human herpesvirus 6
gauuuugugaau

SEQ ID NO: 2036244 - RNA, 15 nt, Human herpesvirus 6
ccuuacggggagcuu

SEQ ID NO: 2036245 - RNA, 17 nt, Human herpesvirus 6
cagaggaagauagcaga

SEQ ID NO: 2036246 - RNA, 14 nt, Human herpesvirus 6
aucgcccugcuccg

SEQ ID NO: 2036247 - RNA, 18 nt, Human herpesvirus 6
aggggagagacauccauu

SEQ ID NO: 2036248 - RNA, 18 nt, Human herpesvirus 6
cuuuuuucggauuuugaa

SEQ ID NO: 2036249 - RNA, 20 nt, Human herpesvirus 6
ucgcacacacaagaacagag

SEQ ID NO: 2036250 - RNA, 17 nt, Human herpesvirus 6
cgguccaaccccuccca

SEQ ID NO: 2036251 - RNA, 20 nt, Human herpesvirus 6
ggccuccgccacugcgaggc

SEQ ID NO: 2036252 - RNA, 13 nt, Human herpesvirus 6
ggccccagagacg

SEQ ID NO: 2036253 - RNA, 23 nt, Human herpesvirus 6
ucaugaucucacgucacaguuuu

SEQ ID NO: 2036254 - RNA, 14 nt, Human herpesvirus 6
cucggaacauaauu

SEQ ID NO: 2036255 - RNA, 18 nt, Human herpesvirus 6
ucggacagcaaggaacaa

SEQ ID NO: 2036256 - RNA, 16 nt, Human herpesvirus 6
aaucuguccagcuugc

SEQ ID NO: 2036257 - RNA, 13 nt, Human herpesvirus 6
cucuguucugcca

SEQ ID NO: 2036258 - RNA, 20 nt, Human herpesvirus 6
agucccaucuauacacccug

SEQ ID NO: 2036259 - RNA, 18 nt, Human herpesvirus 6
aagucacgggcagcugca

SEQ ID NO: 2036260 - RNA, 20 nt, Human herpesvirus 6
ucgauuugcugguaaauuuu

SEQ ID NO: 2036261 - RNA, 18 nt, Human herpesvirus 6
uggcgcgcauguugcagu

SEQ ID NO: 2036262 - RNA, 14 nt, Human herpesvirus 6
cgccuuguauuuca

SEQ ID NO: 2036263 - RNA, 18 nt, Human herpesvirus 6
aacgcagacuaauccaua

SEQ ID NO: 2036264 - RNA, 22 nt, Human herpesvirus 6
ucagcgacucccggcccagaga

SEQ ID NO: 2036265 - RNA, 22 nt, Human herpesvirus 6
aaaacaguuuaccuauuuacaa

SEQ ID NO: 2036266 - RNA, 13 nt, Human herpesvirus 6
cgugauguuuucc

SEQ ID NO: 2036267 - RNA, 13 nt, Human herpesvirus 6
aagcgccugccua

SEQ ID NO: 2036268 - RNA, 21 nt, Human herpesvirus 6
uuucuaugaguauauaaaaaa

SEQ ID NO: 2036269 - RNA, 12 nt, Human herpesvirus 6
uguauuauguaa

SEQ ID NO: 2036270 - RNA, 15 nt, Human herpesvirus 6
augcaacgcaucaca

SEQ ID NO: 2036271 - RNA, 17 nt, Human herpesvirus 6
uucgucgaguuguauua

SEQ ID NO: 2036272 - RNA, 18 nt, Human herpesvirus 6
aaugagcccgguuuaaga

SEQ ID NO: 2036273 - RNA, 12 nt, Human herpesvirus 6
ccaagugguggu

SEQ ID NO: 2036274 - RNA, 18 nt, Human herpesvirus 6
uacguuuuguguuaaaau

SEQ ID NO: 2036275 - RNA, 15 nt, Human herpesvirus 6
ccgcaagauacuggu

SEQ ID NO: 2036276 - RNA, 18 nt, Human herpesvirus 6
acaccucacaaucuaaua

SEQ ID NO: 2036277 - RNA, 22 nt, Human herpesvirus 6
aucguuugagauucuuuaacuu

SEQ ID NO: 2036278 - RNA, 19 nt, Human herpesvirus 6
accaccagucaggaaaaag

SEQ ID NO: 2036279 - RNA, 21 nt, Human herpesvirus 6
agaaauuacauaagcaaaugu

SEQ ID NO: 2036280 - RNA, 14 nt, Human herpesvirus 6
aauauaucuugaaa

SEQ ID NO: 2036281 - RNA, 20 nt, Human herpesvirus 6
cgguugagguguuuccugcc

SEQ ID NO: 2036282 - RNA, 16 nt, Human herpesvirus 6
uuuugggauacauaau

SEQ ID NO: 2036283 - RNA, 16 nt, Human herpesvirus 6
ggcggacaccgagggc

SEQ ID NO: 2036284 - RNA, 16 nt, Human herpesvirus 6
aagaaacauuauaccu

SEQ ID NO: 2036285 - RNA, 14 nt, Human herpesvirus 6
guuuccugcccagg

SEQ ID NO: 2036286 - RNA, 16 nt, Human herpesvirus 6
accuaauaaacugugu

SEQ ID NO: 2036287 - RNA, 23 nt, Human herpesvirus 6
uucaagauuguguuucugucuuu

SEQ ID NO: 2036288 - RNA, 17 nt, Human herpesvirus 6
ggagacggguuggaaau

SEQ ID NO: 2036289 - RNA, 12 nt, Human herpesvirus 6
guaauacaucaa

SEQ ID NO: 2036290 - RNA, 17 nt, Human herpesvirus 6
uugaaaaaccuuauaca

SEQ ID NO: 2036291 - RNA, 19 nt, Human herpesvirus 6
accgucuacugcacuuucg

SEQ ID NO: 2036292 - RNA, 14 nt, Human herpesvirus 6
cugucgaauauguu

SEQ ID NO: 2036293 - RNA, 13 nt, Human herpesvirus 6
uacccggaagcuu

SEQ ID NO: 2036294 - RNA, 20 nt, Human herpesvirus 6
aguagcacaaaccaaaauga

SEQ ID NO: 2036295 - RNA, 15 nt, Human herpesvirus 6
uuaaaauagaagucu

SEQ ID NO: 2036296 - RNA, 16 nt, Human herpesvirus 6
ccugaaacuccccaga

SEQ ID NO: 2036297 - RNA, 22 nt, Human herpesvirus 6
uagaugaaaccuagauguaaau

SEQ ID NO: 2036298 - RNA, 17 nt, Human herpesvirus 6
guggcagaggggaaggg

SEQ ID NO: 2036299 - RNA, 17 nt, Human herpesvirus 6
gucaaauugauuaugau

SEQ ID NO: 2036300 - RNA, 14 nt, Human herpesvirus 6
ucgcggaguggagu

SEQ ID NO: 2036301 - RNA, 14 nt, Human herpesvirus 6
ccucaauuaauaca

SEQ ID NO: 2036302 - RNA, 22 nt, Human herpesvirus 6
ccuguccgugacacacagaaua

SEQ ID NO: 2036303 - RNA, 16 nt, Human herpesvirus 6
gcacuguuugaaacug

SEQ ID NO: 2036304 - RNA, 16 nt, Human herpesvirus 6
aguggucguuggauua

SEQ ID NO: 2036305 - RNA, 15 nt, Human herpesvirus 6
ucacucagauuucag

SEQ ID NO: 2036306 - RNA, 22 nt, Human herpesvirus 6
cuguggcgcgaccgaccccugc

SEQ ID NO: 2036307 - RNA, 13 nt, Human herpesvirus 6
cuacggaaaaucu

SEQ ID NO: 2036308 - RNA, 13 nt, Human herpesvirus 6
agaaguuacaaga

SEQ ID NO: 2036309 - RNA, 22 nt, Human herpesvirus 6
uugucauuacgaagcuucgcaa

SEQ ID NO: 2036310 - RNA, 18 nt, Human herpesvirus 6
auacuguuguaaaauaua

SEQ ID NO: 2036311 - RNA, 17 nt, Human herpesvirus 6
uucaguaucuguuuuua

SEQ ID NO: 2036312 - RNA, 19 nt, Human herpesvirus 6
acgccguguuucgccaaga

SEQ ID NO: 2036313 - RNA, 13 nt, Human herpesvirus 6
agugaaauucaaa

SEQ ID NO: 2036314 - RNA, 19 nt, Human herpesvirus 6
uucaugcgcuucuguuuug

SEQ ID NO: 2036315 - RNA, 21 nt, Human herpesvirus 6
aaucugagcucuccugggcau

SEQ ID NO: 2036316 - RNA, 21 nt, Human herpesvirus 6
ugcauuauacgugucggugau

SEQ ID NO: 2036317 - RNA, 16 nt, Human herpesvirus 6
uaaaagucagugggua

SEQ ID NO: 2036318 - RNA, 12 nt, Human herpesvirus 6
aaccuaaauaca

SEQ ID NO: 2036319 - RNA, 20 nt, Human herpesvirus 6
auuaccgguaaagaacccau

SEQ ID NO: 2036320 - RNA, 13 nt, Human herpesvirus 6
auucaaagaaagu

SEQ ID NO: 2036321 - RNA, 17 nt, Human herpesvirus 6
uccugggagcucucccu

SEQ ID NO: 2036322 - RNA, 15 nt, Human herpesvirus 6
uaaauacauucacau

SEQ ID NO: 2036323 - RNA, 19 nt, Human herpesvirus 6
gaacuggugucugucuauu

SEQ ID NO: 2036324 - RNA, 19 nt, Human herpesvirus 6
caaaagauuacggcaacau

SEQ ID NO: 2036325 - RNA, 16 nt, Human herpesvirus 6
cuuuccugcacaggcg

SEQ ID NO: 2036326 - RNA, 16 nt, Human herpesvirus 6
cuaugaguucucugau

SEQ ID NO: 2036327 - RNA, 19 nt, Human herpesvirus 6
ggaaccuccaguuuggauu

SEQ ID NO: 2036328 - RNA, 12 nt, Human herpesvirus 6
uuuauaaugagu

SEQ ID NO: 2036329 - RNA, 14 nt, Human herpesvirus 6
ucaagcacaaaacc

SEQ ID NO: 2036330 - RNA, 15 nt, Human herpesvirus 6
gaacucuaaaagcug

SEQ ID NO: 2036331 - RNA, 12 nt, Human herpesvirus 6
uccugcacaggc

SEQ ID NO: 2036332 - RNA, 23 nt, Human herpesvirus 6
guuagaaauuuuaccuuuggaaa

SEQ ID NO: 2036333 - RNA, 23 nt, Human herpesvirus 6
uucacaguccccacccucuuuuu

SEQ ID NO: 2036334 - RNA, 17 nt, Human herpesvirus 6
aacuaagauugugcagu

SEQ ID NO: 2036335 - RNA, 16 nt, Human herpesvirus 6
aauguguucacagagc

SEQ ID NO: 2036336 - RNA, 17 nt, Human herpesvirus 6
ccuggcacggugccaaa

SEQ ID NO: 2036337 - RNA, 20 nt, Human herpesvirus 6
caaaaugguuaugacaaagg

SEQ ID NO: 2036338 - RNA, 16 nt, Human herpesvirus 6
ccggcuaacccuaacc

SEQ ID NO: 2036339 - RNA, 18 nt, Human herpesvirus 6
aguuuuuccgauacagca

SEQ ID NO: 2036340 - RNA, 16 nt, Human herpesvirus 6
cgcgaccgaccccugc

SEQ ID NO: 2036341 - RNA, 15 nt, Human herpesvirus 6
ggauaucucaaauuu

SEQ ID NO: 2036342 - RNA, 17 nt, Human herpesvirus 6
auaugaaaagcuggaaa

SEQ ID NO: 2036343 - RNA, 16 nt, Human herpesvirus 6
cguaucuuaaaguugg

SEQ ID NO: 2036344 - RNA, 17 nt, Human herpesvirus 6
cgugugcgauuuacugg

SEQ ID NO: 2036345 - RNA, 16 nt, Human herpesvirus 6
aaagggaagauuugua

SEQ ID NO: 2036346 - RNA, 14 nt, Human herpesvirus 6
uccaguauugaaga

SEQ ID NO: 2036347 - RNA, 15 nt, Human herpesvirus 6
ggacgacacgugggg

SEQ ID NO: 2036348 - RNA, 14 nt, Human herpesvirus 6
cgauguacaguuuc

SEQ ID NO: 2036349 - RNA, 14 nt, Human herpesvirus 6
acuaguuuucacac

SEQ ID NO: 2036350 - RNA, 22 nt, Human herpesvirus 6
uuauaacaagcacugaauuaga

SEQ ID NO: 2036351 - RNA, 20 nt, Human herpesvirus 6
aaguaauauagacauugcuu

SEQ ID NO: 2036352 - RNA, 24 nt, Human herpesvirus 6
gcaacaaaaagcuuuaaagcagcu

SEQ ID NO: 2036353 - RNA, 13 nt, Human herpesvirus 6
caaagagaccaau

SEQ ID NO: 2036354 - RNA, 17 nt, Human herpesvirus 6
auaucgagccaaagaaa

SEQ ID NO: 2036355 - RNA, 17 nt, Human herpesvirus 6
cagaucuaucacaggcg

SEQ ID NO: 2036356 - RNA, 22 nt, Human herpesvirus 6
guuuacccgggcgaguagacuc

SEQ ID NO: 2036357 - RNA, 19 nt, Human herpesvirus 6
uucgaauucuuaccaagaa

SEQ ID NO: 2036358 - RNA, 16 nt, Human herpesvirus 6
ccguucaucauuccag

SEQ ID NO: 2036359 - RNA, 15 nt, Human herpesvirus 6
augcguugcauuuug

SEQ ID NO: 2036360 - RNA, 22 nt, Human herpesvirus 6
gguaccgcgguuugggggucuu

SEQ ID NO: 2036361 - RNA, 21 nt, Human herpesvirus 6
guuuaagaagggcuuuaaaac

SEQ ID NO: 2036362 - RNA, 14 nt, Human herpesvirus 6
cgaaaucaaugagu

SEQ ID NO: 2036363 - RNA, 17 nt, Human herpesvirus 6
cggcagcuauauggcga

SEQ ID NO: 2036364 - RNA, 14 nt, Human herpesvirus 6
caccaucuguugau

SEQ ID NO: 2036365 - RNA, 15 nt, Human herpesvirus 6
cugccaucccuuccu

SEQ ID NO: 2036366 - RNA, 20 nt, Human herpesvirus 6
uauauucguggauaacgucg

SEQ ID NO: 2036367 - RNA, 11 nt, Human herpesvirus 6
aggaauugcuu

SEQ ID NO: 2036368 - RNA, 15 nt, Human herpesvirus 6
gcaacaauccauguu

SEQ ID NO: 2036369 - RNA, 17 nt, Human herpesvirus 6
uuuuugucagguuugaa

SEQ ID NO: 2036370 - RNA, 17 nt, Human herpesvirus 6
agauaaaaagagaggaa

SEQ ID NO: 2036371 - RNA, 18 nt, Human herpesvirus 6
uguaaaucaaaaaaauga

SEQ ID NO: 2036372 - RNA, 23 nt, Human herpesvirus 6
uccccucgguccaaccccuccca

SEQ ID NO: 2036373 - RNA, 14 nt, Human herpesvirus 6
cugagauucacucc

SEQ ID NO: 2036374 - RNA, 17 nt, Human herpesvirus 6
aucugaucgaaauacuu

SEQ ID NO: 2036375 - RNA, 17 nt, Human herpesvirus 6
auaauuccgacuguguu

SEQ ID NO: 2036376 - RNA, 14 nt, Human herpesvirus 6
cauaaacaccccga

SEQ ID NO: 2036377 - RNA, 20 nt, Human herpesvirus 6
ugacuguaccauugucaaca

SEQ ID NO: 2036378 - RNA, 13 nt, Human herpesvirus 6
uucuucugugacu

SEQ ID NO: 2036379 - RNA, 15 nt, Human herpesvirus 6
acugauuaguuuuca

SEQ ID NO: 2036380 - RNA, 15 nt, Human herpesvirus 6
gaccuggcggacacc

SEQ ID NO: 2036381 - RNA, 21 nt, Human herpesvirus 6
cuuugucacgagucgcuucua

SEQ ID NO: 2036382 - RNA, 18 nt, Human herpesvirus 6
aagacgaaaaauuuuacg

SEQ ID NO: 2036383 - RNA, 16 nt, Human herpesvirus 6
auaaccucacuacuga

SEQ ID NO: 2036384 - RNA, 15 nt, Human herpesvirus 6
aucguccccuuggcu

SEQ ID NO: 2036385 - RNA, 17 nt, Human herpesvirus 6
auuuuaauuuugaaaua

SEQ ID NO: 2036386 - RNA, 22 nt, Human herpesvirus 6
aggcuaugugucuccgccuuuu

SEQ ID NO: 2036387 - RNA, 22 nt, Human herpesvirus 6
cuuucuacgguaggcagggaaa

SEQ ID NO: 2036388 - RNA, 14 nt, Human herpesvirus 6
ucacucagauuuca

SEQ ID NO: 2036389 - RNA, 17 nt, Human herpesvirus 6
uucauaugaaaagcugg

SEQ ID NO: 2036390 - RNA, 18 nt, Human herpesvirus 6
ucugauucgacaaaucau

SEQ ID NO: 2036391 - RNA, 14 nt, Human herpesvirus 6
cagucaguaaugau

SEQ ID NO: 2036392 - RNA, 16 nt, Human herpesvirus 6
uuuacaauguucaauu

SEQ ID NO: 2036393 - RNA, 19 nt, Human herpesvirus 6
agauguguauuauguaaau

SEQ ID NO: 2036394 - RNA, 16 nt, Human herpesvirus 6
uuucgccgugugugua

SEQ ID NO: 2036395 - RNA, 20 nt, Human herpesvirus 6
cacguuaccgaagauuacuu

SEQ ID NO: 2036396 - RNA, 13 nt, Human herpesvirus 6
acgguggccuggc

SEQ ID NO: 2036397 - RNA, 16 nt, Human herpesvirus 6
ccaccaacacaccugc

SEQ ID NO: 2036398 - RNA, 20 nt, Human herpesvirus 6
ccgugcuucuggcacaggca

SEQ ID NO: 2036399 - RNA, 22 nt, Human herpesvirus 6
auuuaacaacaucuuaaaagac

SEQ ID NO: 2036400 - RNA, 20 nt, Human herpesvirus 6
cucaacauuaaaaaaaauag

SEQ ID NO: 2036401 - RNA, 15 nt, Human herpesvirus 6
cacaucuauguguau

SEQ ID NO: 2036402 - RNA, 16 nt, Human herpesvirus 6
gcugauuuuguuuucu

SEQ ID NO: 2036403 - RNA, 18 nt, Human herpesvirus 6
cggggggacgggcggagc

SEQ ID NO: 2036404 - RNA, 15 nt, Human herpesvirus 6
aaaacaguauaacgg

SEQ ID NO: 2036405 - RNA, 15 nt, Human herpesvirus 6
gcccggggacggaca

SEQ ID NO: 2036406 - RNA, 16 nt, Human herpesvirus 6
uaaaacaguaaauuca

SEQ ID NO: 2036407 - RNA, 19 nt, Human herpesvirus 6
ugucucacaagcuguccau

SEQ ID NO: 2036408 - RNA, 13 nt, Human herpesvirus 6
gccugcucagagc

SEQ ID NO: 2036409 - RNA, 18 nt, Human herpesvirus 6
gcuacgacacgcuggagc

SEQ ID NO: 2036410 - RNA, 17 nt, Human herpesvirus 6
ugauugucuuuucugga

SEQ ID NO: 2036411 - RNA, 18 nt, Human herpesvirus 6
gacauccagaaaagcaaa

SEQ ID NO: 2036412 - RNA, 16 nt, Human herpesvirus 6
aaauggauuugguauu

SEQ ID NO: 2036413 - RNA, 18 nt, Human herpesvirus 6
gggacccacgguggccug

SEQ ID NO: 2036414 - RNA, 20 nt, Human herpesvirus 6
gaaagaguguuuggauaaug

SEQ ID NO: 2036415 - RNA, 15 nt, Human herpesvirus 6
caaagaaacaguaaa

SEQ ID NO: 2036416 - RNA, 14 nt, Human herpesvirus 6
cguagacagucaca

SEQ ID NO: 2036417 - RNA, 18 nt, Human herpesvirus 6
augguucgauugcgcgau

SEQ ID NO: 2036418 - RNA, 21 nt, Human herpesvirus 6
cacgcuuggaguuuuuuaugc

SEQ ID NO: 2036419 - RNA, 15 nt, Human herpesvirus 6
uauuuacggacaaac

SEQ ID NO: 2036420 - RNA, 14 nt, Human herpesvirus 6
cuaauaugaacaau

SEQ ID NO: 2036421 - RNA, 11 nt, Human herpesvirus 6
gaucagugggu

SEQ ID NO: 2036422 - RNA, 23 nt, Human herpesvirus 6
gguaaaauggcugugcuaucuga

SEQ ID NO: 2036423 - RNA, 20 nt, Human herpesvirus 6
uaaaaagaaugggauuguga

SEQ ID NO: 2036424 - RNA, 15 nt, Human herpesvirus 6
ccaguagacaagaaa

SEQ ID NO: 2036425 - RNA, 20 nt, Human herpesvirus 6
aggagauuucagguaauauu

SEQ ID NO: 2036426 - RNA, 23 nt, Human herpesvirus 6
accucacuacugaaaccaaagca

SEQ ID NO: 2036427 - RNA, 15 nt, Human herpesvirus 6
ccggccggagugccg

SEQ ID NO: 2036428 - RNA, 21 nt, Human herpesvirus 6
uguuucgccaagaaaaagaaa

SEQ ID NO: 2036429 - RNA, 22 nt, Human herpesvirus 6
aauuaucacaguugauaaacau

SEQ ID NO: 2036430 - RNA, 15 nt, Human herpesvirus 6
uguaccuagcagcaa

SEQ ID NO: 2036431 - RNA, 18 nt, Human herpesvirus 6
cuugaucaaauaucugaa

SEQ ID NO: 2036432 - RNA, 15 nt, Human herpesvirus 6
ugaacuacugagugc

SEQ ID NO: 2036433 - RNA, 16 nt, Human herpesvirus 6
auucaggcuuuaacua

SEQ ID NO: 2036434 - RNA, 17 nt, Human herpesvirus 6
gagggggagggacccac

SEQ ID NO: 2036435 - RNA, 13 nt, Human herpesvirus 6
cgccauaauggaa

SEQ ID NO: 2036436 - RNA, 16 nt, Human herpesvirus 6
ccugaucacagagcag

SEQ ID NO: 2036437 - RNA, 21 nt, Human herpesvirus 6
cccaucccccuccccggagca

SEQ ID NO: 2036438 - RNA, 15 nt, Human herpesvirus 6
gacgacgggcggggc

SEQ ID NO: 2036439 - RNA, 17 nt, Human herpesvirus 6
ugcaauucgguucagcc

SEQ ID NO: 2036440 - RNA, 17 nt, Human herpesvirus 6
uuuagaaacauuugcug

SEQ ID NO: 2036441 - RNA, 22 nt, Human herpesvirus 6
uaauacgcaguugucuggcagc

SEQ ID NO: 2036442 - RNA, 16 nt, Human herpesvirus 6
ccagcuuucuuagaga

SEQ ID NO: 2036443 - RNA, 15 nt, Human herpesvirus 6
cgacacgcuggagca

SEQ ID NO: 2036444 - RNA, 16 nt, Human herpesvirus 6
auauucuucuguaaau

SEQ ID NO: 2036445 - RNA, 16 nt, Human herpesvirus 6
gaugccugcauaugca

SEQ ID NO: 2036446 - RNA, 18 nt, Human herpesvirus 6
gauggaguauuuguuuua

SEQ ID NO: 2036447 - RNA, 12 nt, Human herpesvirus 6
ggcuaacccuaa

SEQ ID NO: 2036448 - RNA, 15 nt, Human herpesvirus 6
ucggccgugaugcac

SEQ ID NO: 2036449 - RNA, 18 nt, Human herpesvirus 6
ugcuccguuuccuccucg

SEQ ID NO: 2036450 - RNA, 14 nt, Human herpesvirus 6
ucgcugacucgccu

SEQ ID NO: 2036451 - RNA, 10 nt, Human herpesvirus 6
ccugcccagg

SEQ ID NO: 2036452 - RNA, 16 nt, Human herpesvirus 6
ucucuguucugccacg

SEQ ID NO: 2036453 - RNA, 20 nt, Human herpesvirus 6
gaauuuguccguauacagcu

SEQ ID NO: 2036454 - RNA, 20 nt, Human herpesvirus 6
uggcggaaacgacggaacga

SEQ ID NO: 2036455 - RNA, 15 nt, Human herpesvirus 6
cccaggcgaacgaga

SEQ ID NO: 2036456 - RNA, 16 nt, Human herpesvirus 6
ccgucucugaagcaaa

SEQ ID NO: 2036457 - RNA, 19 nt, Human herpesvirus 6
aguuagaaauuuuaccuuu

SEQ ID NO: 2036458 - RNA, 13 nt, Human herpesvirus 6
gcccgauccgccc

SEQ ID NO: 2036459 - RNA, 14 nt, Human herpesvirus 6
accucucgccgacc

SEQ ID NO: 2036460 - RNA, 14 nt, Human herpesvirus 6
guauggagauguua

SEQ ID NO: 2036461 - RNA, 15 nt, Human herpesvirus 6
uaacacgugugacac

SEQ ID NO: 2036462 - RNA, 20 nt, Human herpesvirus 6
aauacauuuccaugcauauc

SEQ ID NO: 2036463 - RNA, 23 nt, Human herpesvirus 6
ggagugccguugagugccucaga

SEQ ID NO: 2036464 - RNA, 16 nt, Human herpesvirus 6
ucucugacuauuucaa

SEQ ID NO: 2036465 - RNA, 17 nt, Human herpesvirus 6
acugguuuacagcacuu

SEQ ID NO: 2036466 - RNA, 14 nt, Human herpesvirus 6
gaucuucugcuaau

SEQ ID NO: 2036467 - RNA, 16 nt, Human herpesvirus 6
uggaccgaggggacag

SEQ ID NO: 2036468 - RNA, 16 nt, Human herpesvirus 6
auuuuauaacgacaaa

SEQ ID NO: 2036469 - RNA, 17 nt, Human herpesvirus 6
augaucgacauuuguau

SEQ ID NO: 2036470 - RNA, 21 nt, Human herpesvirus 6
ucugagguuuccgucucgccu

SEQ ID NO: 2036471 - RNA, 15 nt, Human herpesvirus 6
aaaccauagguguuu

SEQ ID NO: 2036472 - RNA, 15 nt, Human herpesvirus 6
uugccgucacacucu

SEQ ID NO: 2036473 - RNA, 20 nt, Human herpesvirus 6
acgucgaaacgaaagcugau

SEQ ID NO: 2036474 - RNA, 20 nt, Human herpesvirus 6
gugaacgcaagucacgggca

SEQ ID NO: 2036475 - RNA, 16 nt, Human herpesvirus 6
guuuaaacuaugcaaa

SEQ ID NO: 2036476 - RNA, 12 nt, Human herpesvirus 6
acacacccagca

SEQ ID NO: 2036477 - RNA, 18 nt, Human herpesvirus 6
ugcacuccguuaaucuaa

SEQ ID NO: 2036478 - RNA, 15 nt, Human herpesvirus 6
ucuaacaucucguaa

SEQ ID NO: 2036479 - RNA, 18 nt, Human herpesvirus 6
agggugagucacauagau

SEQ ID NO: 2036480 - RNA, 15 nt, Human herpesvirus 6
gucacacguguuaaa

SEQ ID NO: 2036481 - RNA, 18 nt, Human herpesvirus 6
uacauuuauaauuaaaau

SEQ ID NO: 2036482 - RNA, 13 nt, Human herpesvirus 6
gcgcccauaccug

SEQ ID NO: 2036483 - RNA, 21 nt, Human herpesvirus 6
uuuuaacaaaaugguuaugac

SEQ ID NO: 2036484 - RNA, 22 nt, Human herpesvirus 6
ucgcgguccaacacagcaugca

SEQ ID NO: 2036485 - RNA, 16 nt, Human herpesvirus 6
ccacggaagaagagaa

SEQ ID NO: 2036486 - RNA, 13 nt, Human herpesvirus 6
gcaggaaucaugu

SEQ ID NO: 2036487 - RNA, 14 nt, Human herpesvirus 6
ggacucauagauuu

SEQ ID NO: 2036488 - RNA, 13 nt, Human herpesvirus 6
ggaucaacagaug

SEQ ID NO: 2036489 - RNA, 11 nt, Human herpesvirus 6
cagcuggcuga

SEQ ID NO: 2036490 - RNA, 13 nt, Human herpesvirus 6
auaaaaacucaca

SEQ ID NO: 2036491 - RNA, 18 nt, Human herpesvirus 6
acuuucuucgccuguaaa

SEQ ID NO: 2036492 - RNA, 19 nt, Human herpesvirus 6
ucacguuuugggaaaucug

SEQ ID NO: 2036493 - RNA, 18 nt, Human herpesvirus 6
cccacgguggccuggcac

SEQ ID NO: 2036494 - RNA, 15 nt, Human herpesvirus 6
acuagcgaaugaauu

SEQ ID NO: 2036495 - RNA, 15 nt, Human herpesvirus 6
aggaacgauaugcug

SEQ ID NO: 2036496 - RNA, 13 nt, Human herpesvirus 6
cuuugaaggacua

SEQ ID NO: 2036497 - RNA, 17 nt, Human herpesvirus 6
gauugaugaaagcuuca

SEQ ID NO: 2036498 - RNA, 20 nt, Human herpesvirus 6
uaugaacaggugcuucuuuu

SEQ ID NO: 2036499 - RNA, 18 nt, Human herpesvirus 6
uauuaacgcagcaacaau

SEQ ID NO: 2036500 - RNA, 17 nt, Human herpesvirus 6
cugauuccuucaauguu

SEQ ID NO: 2036501 - RNA, 23 nt, Human herpesvirus 6
guuuuuuaauccauauuuggaag

SEQ ID NO: 2036502 - RNA, 18 nt, Human herpesvirus 6
cacgaagacgaagaggaa

SEQ ID NO: 2036503 - RNA, 16 nt, Human herpesvirus 6
guauaaauuuaacuaa

SEQ ID NO: 2036504 - RNA, 17 nt, Human herpesvirus 6
uaauagccaaacaaggg

SEQ ID NO: 2036505 - RNA, 21 nt, Human herpesvirus 6
auaacuuuacauuaaacacua

SEQ ID NO: 2036506 - RNA, 21 nt, Human herpesvirus 6
cugcuaaaagcuauguaugaa

SEQ ID NO: 2036507 - RNA, 20 nt, Human herpesvirus 6
aauguuuuucauaaauggua

SEQ ID NO: 2036508 - RNA, 16 nt, Human herpesvirus 6
ccucauuguuucacuu

SEQ ID NO: 2036509 - RNA, 22 nt, Human herpesvirus 6
gacaccucaauuaauacaaaau

SEQ ID NO: 2036510 - RNA, 14 nt, Human herpesvirus 6
acuacguuuugugu

SEQ ID NO: 2036511 - RNA, 13 nt, Human herpesvirus 6
auaucauuaaauu

SEQ ID NO: 2036512 - RNA, 15 nt, Human herpesvirus 6
ggacguucugucugc

SEQ ID NO: 2036513 - RNA, 20 nt, Human herpesvirus 6
aaaaacaucguaauggcauu

SEQ ID NO: 2036514 - RNA, 12 nt, Human herpesvirus 6
auauuuccugcc

SEQ ID NO: 2036515 - RNA, 13 nt, Human herpesvirus 6
gucgaaauucacc

SEQ ID NO: 2036516 - RNA, 22 nt, Human herpesvirus 6
gaaaauauuuccaugacuguga

SEQ ID NO: 2036517 - RNA, 20 nt, Human herpesvirus 6
uuaacuaagauugugcaguu

SEQ ID NO: 2036518 - RNA, 21 nt, Human herpesvirus 6
gguggccuggcacggugccaa

SEQ ID NO: 2036519 - RNA, 12 nt, Human herpesvirus 6
guggccuggcac

SEQ ID NO: 2036520 - RNA, 20 nt, Human herpesvirus 6
cuuuaauggguuuguuuucu

SEQ ID NO: 2036521 - RNA, 12 nt, Human herpesvirus 6
aacuuuuaacuu

SEQ ID NO: 2036522 - RNA, 23 nt, Human herpesvirus 6
ccgcaguuccuguuuuucucgga

SEQ ID NO: 2036523 - RNA, 20 nt, Human herpesvirus 6
uccugggcauuaguguauaa

SEQ ID NO: 2036524 - RNA, 16 nt, Human herpesvirus 6
aucuucccuuuuacaa

SEQ ID NO: 2036525 - RNA, 17 nt, Human herpesvirus 6
ugugcaugaaaauauca

SEQ ID NO: 2036526 - RNA, 21 nt, Human herpesvirus 6
auguaguuaaugcugcugcug

SEQ ID NO: 2036527 - RNA, 14 nt, Human herpesvirus 6
caaaaauacugcag

SEQ ID NO: 2036528 - RNA, 12 nt, Human herpesvirus 6
aauaagauguug

SEQ ID NO: 2036529 - RNA, 13 nt, Human herpesvirus 6
ugaaagcagucag

SEQ ID NO: 2036530 - RNA, 16 nt, Human herpesvirus 6
aggcuaugugucuccg

SEQ ID NO: 2036531 - RNA, 17 nt, Human herpesvirus 6
aucggacaaugcagaac

SEQ ID NO: 2036532 - RNA, 22 nt, Human herpesvirus 6
gguggccuggcacggugccaaa

SEQ ID NO: 2036533 - RNA, 21 nt, Human herpesvirus 6
aaauuuugaugccaaagcuuu

SEQ ID NO: 2036534 - RNA, 22 nt, Human herpesvirus 6
uggacggcggggggacgggcgg

SEQ ID NO: 2036535 - RNA, 16 nt, Human herpesvirus 6
augaagaaguuaacua

SEQ ID NO: 2036536 - RNA, 22 nt, Human herpesvirus 6
ggauuucccuuguaaucaauca

SEQ ID NO: 2036537 - RNA, 20 nt, Human herpesvirus 6
gccuccgccacugcgaggcc

SEQ ID NO: 2036538 - RNA, 23 nt, Human herpesvirus 6
aaaaucaucucgugcaaaagcug

SEQ ID NO: 2036539 - RNA, 14 nt, Human herpesvirus 6
cggaaaacuaaaag

SEQ ID NO: 2036540 - RNA, 15 nt, Human herpesvirus 6
gggucuuuccugcac

SEQ ID NO: 2036541 - RNA, 14 nt, Human herpesvirus 6
gaacccuagacaca

SEQ ID NO: 2036542 - RNA, 19 nt, Human herpesvirus 6
cuucgaauacuuucaugau

SEQ ID NO: 2036543 - RNA, 14 nt, Human herpesvirus 6
cauagcgaauuuga

SEQ ID NO: 2036544 - RNA, 23 nt, Human herpesvirus 6
ccgcaguuccuguuuuucucaua

SEQ ID NO: 2036545 - RNA, 19 nt, Human herpesvirus 6
guuuggggucuuuccugca

SEQ ID NO: 2036546 - RNA, 16 nt, Human herpesvirus 6
gccagcgcaagauucu

SEQ ID NO: 2036547 - RNA, 19 nt, Human herpesvirus 6
ucaaugaaaaaaaaugaag

SEQ ID NO: 2036548 - RNA, 18 nt, Human herpesvirus 6
uaacccuaacccuaaccc

SEQ ID NO: 2036549 - RNA, 15 nt, Human herpesvirus 6
ugguuuacagcacuu

SEQ ID NO: 2036550 - RNA, 22 nt, Human herpesvirus 6
ucuuauuaauuuccugaucaca

SEQ ID NO: 2036551 - RNA, 19 nt, Human herpesvirus 6
cgcgacagggugagucaca

SEQ ID NO: 2036552 - RNA, 13 nt, Human herpesvirus 6
ugagcucuccugg

SEQ ID NO: 2036553 - RNA, 23 nt, Human herpesvirus 6
aaauauuuccaugacugugaggu

SEQ ID NO: 2036554 - RNA, 18 nt, Human herpesvirus 6
caucccccuccccggagc

SEQ ID NO: 2036555 - RNA, 17 nt, Human herpesvirus 6
cuacugaaaccaaagca

SEQ ID NO: 2036556 - RNA, 23 nt, Human herpesvirus 6
cuaguagccuaggccuucaccug

SEQ ID NO: 2036557 - RNA, 14 nt, Human herpesvirus 6
guggacgugccggg

SEQ ID NO: 2036558 - RNA, 17 nt, Human herpesvirus 6
auucuaaaauuguaauu

SEQ ID NO: 2036559 - RNA, 16 nt, Human herpesvirus 6
cggcccauccaccuuc

SEQ ID NO: 2036560 - RNA, 20 nt, Human herpesvirus 6
guucggagauaucauaaucu

SEQ ID NO: 2036561 - RNA, 19 nt, Human herpesvirus 6
augccccgguuaaaguaga

SEQ ID NO: 2036562 - RNA, 19 nt, Human herpesvirus 6
cuggguuucgaagaauccu

SEQ ID NO: 2036563 - RNA, 23 nt, Human herpesvirus 6
auacgacaaauaaaagcauuuuu

SEQ ID NO: 2036564 - RNA, 19 nt, Human herpesvirus 6
cuauuauaagcaaacaugu

SEQ ID NO: 2036565 - RNA, 18 nt, Human herpesvirus 6
uggcacggugccaaagga

SEQ ID NO: 2036566 - RNA, 16 nt, Human herpesvirus 6
cuauuuaaaauggacu

SEQ ID NO: 2036567 - RNA, 20 nt, Human herpesvirus 6
auauaacgcuucuaacaaua

SEQ ID NO: 2036568 - RNA, 17 nt, Human herpesvirus 6
gucuucaagcaaagaca

SEQ ID NO: 2036569 - RNA, 23 nt, Human herpesvirus 6
uacggggaagaucuaugggagug

SEQ ID NO: 2036570 - RNA, 22 nt, Human herpesvirus 6
ggaaaauuaaaggucagugggu

SEQ ID NO: 2036571 - RNA, 13 nt, Human herpesvirus 6
acuacagcuaaga

SEQ ID NO: 2036572 - RNA, 16 nt, Human herpesvirus 6
uccgcgauacccagcg

SEQ ID NO: 2036573 - RNA, 21 nt, Human herpesvirus 6
caaaauugacuacagcugcag

SEQ ID NO: 2036574 - RNA, 18 nt, Human herpesvirus 6
agaauaauuauggacaac

SEQ ID NO: 2036575 - RNA, 13 nt, Human herpesvirus 6
aucccccuccccg

SEQ ID NO: 2036576 - RNA, 19 nt, Human herpesvirus 6
cucacacccauggcgagaa

SEQ ID NO: 2036577 - RNA, 15 nt, Human herpesvirus 6
auucuucuguaaaua

SEQ ID NO: 2036578 - RNA, 20 nt, Human herpesvirus 6
aguuccaaaacuucuauaug

SEQ ID NO: 2036579 - RNA, 16 nt, Human herpesvirus 6
gucaucgguggcagag

SEQ ID NO: 2036580 - RNA, 18 nt, Human herpesvirus 6
aauuuguaaaaaaacauu

SEQ ID NO: 2036581 - RNA, 22 nt, Human herpesvirus 6
aaccaccggcuaacccuaaccc

SEQ ID NO: 2036582 - RNA, 17 nt, Human herpesvirus 6
aaaacguuuuuguuauu

SEQ ID NO: 2036583 - RNA, 13 nt, Human herpesvirus 6
ugucaaguuucac

SEQ ID NO: 2036584 - RNA, 15 nt, Human herpesvirus 6
aucuuauucaaaaau

SEQ ID NO: 2036585 - RNA, 15 nt, Human herpesvirus 6
agguuuugucguuug

SEQ ID NO: 2036586 - RNA, 20 nt, Human herpesvirus 6
cacucggauucaaagaaagu

SEQ ID NO: 2036587 - RNA, 14 nt, Human herpesvirus 6
caggcgaacgagaa

SEQ ID NO: 2036588 - RNA, 20 nt, Human herpesvirus 6
aaucaaaaaaauuuugaugc

SEQ ID NO: 2036589 - RNA, 16 nt, Human herpesvirus 6
gaagauaauaaaacaa

SEQ ID NO: 2036590 - RNA, 17 nt, Human herpesvirus 6
auaaguacauagaauuu

SEQ ID NO: 2036591 - RNA, 13 nt, Human herpesvirus 6
acguauaccuaga

SEQ ID NO: 2036592 - RNA, 20 nt, Human herpesvirus 6
acgugccaccgucugggacc

SEQ ID NO: 2036593 - RNA, 15 nt, Human herpesvirus 6
aacagauaguguuuu

SEQ ID NO: 2036594 - RNA, 14 nt, Human herpesvirus 6
aaacacagaugguu

SEQ ID NO: 2036595 - RNA, 19 nt, Human herpesvirus 6
aacauuuaauaaagaacau

SEQ ID NO: 2036596 - RNA, 15 nt, Human herpesvirus 6
ucagagugaauuccu

SEQ ID NO: 2036597 - RNA, 17 nt, Human herpesvirus 6
ggaaugcugagcugcag

SEQ ID NO: 2036598 - RNA, 20 nt, Human herpesvirus 6
acauuuaauaaagaacaugu

SEQ ID NO: 2036599 - RNA, 23 nt, Human herpesvirus 6
gucaaauguucgaugauuauucu

SEQ ID NO: 2036600 - RNA, 23 nt, Human herpesvirus 6
caaguuugaauuuauacugugug

SEQ ID NO: 2036601 - RNA, 12 nt, Human herpesvirus 6
cuuaccaagaaa

SEQ ID NO: 2036602 - RNA, 19 nt, Human herpesvirus 6
acagaauucuucugugacu

SEQ ID NO: 2036603 - RNA, 17 nt, Human herpesvirus 6
cuaaaauuguaauuuug

SEQ ID NO: 2036604 - RNA, 13 nt, Human herpesvirus 6
agaaaaacaacga

SEQ ID NO: 2036605 - RNA, 22 nt, Human herpesvirus 6
agaacguggccguuacaguuuc

SEQ ID NO: 2036606 - RNA, 17 nt, Human herpesvirus 6
gcagaacaacagcaugu

SEQ ID NO: 2036607 - RNA, 14 nt, Human herpesvirus 6
augcaauuuaaaag

SEQ ID NO: 2036608 - RNA, 15 nt, Human herpesvirus 6
uaacuaagauugugc

SEQ ID NO: 2036609 - RNA, 18 nt, Human herpesvirus 6
ucaugagccagcgcaaga

SEQ ID NO: 2036610 - RNA, 21 nt, Human herpesvirus 6
gcaaaccauaaaaaaucuugu

SEQ ID NO: 2036611 - RNA, 21 nt, Human herpesvirus 6
ggccacguccucgugcucugc

SEQ ID NO: 2036612 - RNA, 21 nt, Human herpesvirus 6
gccaaacuuguugcaagcagc

SEQ ID NO: 2036613 - RNA, 14 nt, Human herpesvirus 6
guaacgcugucguu

SEQ ID NO: 2036614 - RNA, 13 nt, Human herpesvirus 6
ucguaauggcauu

SEQ ID NO: 2036615 - RNA, 14 nt, Human herpesvirus 6
ccguuacaguuucc

SEQ ID NO: 2036616 - RNA, 18 nt, Human herpesvirus 6
acagagcgcaucuuuaac

SEQ ID NO: 2036617 - RNA, 15 nt, Human herpesvirus 6
uugcaguguguuuuu

SEQ ID NO: 2036618 - RNA, 13 nt, Human herpesvirus 6
acaaagcuuuacu

SEQ ID NO: 2036619 - RNA, 17 nt, Human herpesvirus 6
aacaguuauacuggcaa

SEQ ID NO: 2036620 - RNA, 21 nt, Human herpesvirus 6
caaacuacggaaaaucucaaa

SEQ ID NO: 2036621 - RNA, 18 nt, Human herpesvirus 6
auuuugaugccaaagcuu

SEQ ID NO: 2036622 - RNA, 16 nt, Human herpesvirus 6
auggaauggaauuucu

SEQ ID NO: 2036623 - RNA, 14 nt, Human herpesvirus 6
cuaaauuggucucu

SEQ ID NO: 2036624 - RNA, 22 nt, Human herpesvirus 6
ggggaucgggcccggggacgga

SEQ ID NO: 2036625 - RNA, 12 nt, Human herpesvirus 6
uuccugcacagg

SEQ ID NO: 2036626 - RNA, 21 nt, Human herpesvirus 6
ggaauaacagaugagggggag

SEQ ID NO: 2036627 - RNA, 20 nt, Human herpesvirus 6
augaucaacggccuggagua

SEQ ID NO: 2036628 - RNA, 15 nt, Human herpesvirus 6
ucagaccucauauaa

SEQ ID NO: 2036629 - RNA, 14 nt, Human herpesvirus 6
uagggaugguggau

SEQ ID NO: 2036630 - RNA, 17 nt, Human herpesvirus 6
caauuacucaacauuaa

SEQ ID NO: 2036631 - RNA, 15 nt, Human herpesvirus 6
auuaugguuaucauc

SEQ ID NO: 2036632 - RNA, 14 nt, Human herpesvirus 6
uguguuauaaggaa

SEQ ID NO: 2036633 - RNA, 18 nt, Human herpesvirus 6
caggauuauaaaaacaca

SEQ ID NO: 2036634 - RNA, 18 nt, Human herpesvirus 6
acaucaccgauaaaaacu

SEQ ID NO: 2036635 - RNA, 13 nt, Human herpesvirus 6
aaaaacucacaca

SEQ ID NO: 2036636 - RNA, 15 nt, Human herpesvirus 6
auugaauuguauaua

SEQ ID NO: 2036637 - RNA, 20 nt, Human herpesvirus 6
acgaauacuucucuuuauag

SEQ ID NO: 2036638 - RNA, 18 nt, Human herpesvirus 6
cggagguaacggagcccg

SEQ ID NO: 2036639 - RNA, 14 nt, Human herpesvirus 6
cuccgcgccccucg

SEQ ID NO: 2036640 - RNA, 23 nt, Human herpesvirus 6
uaaucgcgguccaacacagcaug

SEQ ID NO: 2036641 - RNA, 19 nt, Human herpesvirus 6
aguagaaacuauggggcug

SEQ ID NO: 2036642 - RNA, 15 nt, Human herpesvirus 6
aacaaccacaaacau

SEQ ID NO: 2036643 - RNA, 20 nt, Human herpesvirus 6
caccgcugacaaccuccgca

SEQ ID NO: 2036644 - RNA, 16 nt, Human herpesvirus 6
cuguuuuucucggaaa

SEQ ID NO: 2036645 - RNA, 22 nt, Human herpesvirus 6
acaaucgucggaucaacagaug

SEQ ID NO: 2036646 - RNA, 15 nt, Human herpesvirus 6
gauguucuaaaggau

SEQ ID NO: 2036647 - RNA, 12 nt, Human herpesvirus 6
aacucuaccugg

SEQ ID NO: 2036648 - RNA, 20 nt, Human herpesvirus 6
acucuucgauccaauaagaa

SEQ ID NO: 2036649 - RNA, 19 nt, Human herpesvirus 6
caauucauuguacgauaau

SEQ ID NO: 2036650 - RNA, 18 nt, Human herpesvirus 6
uaaucguuacaaaauuga

SEQ ID NO: 2036651 - RNA, 18 nt, Human herpesvirus 6
aacucuaaaagcugcuaa

SEQ ID NO: 2036652 - RNA, 14 nt, Human herpesvirus 6
uccugagaguaaau

SEQ ID NO: 2036653 - RNA, 14 nt, Human herpesvirus 6
uuucgucuccuggg

SEQ ID NO: 2036654 - RNA, 18 nt, Human herpesvirus 6
uacggcacgcucguuuuu

SEQ ID NO: 2036655 - RNA, 15 nt, Human herpesvirus 6
cucccggcccagaga

SEQ ID NO: 2036656 - RNA, 20 nt, Human herpesvirus 6
ccagauacauaaacaccccg

SEQ ID NO: 2036657 - RNA, 17 nt, Human herpesvirus 6
auaacgaugcuuuuauu

SEQ ID NO: 2036658 - RNA, 19 nt, Human herpesvirus 6
ggcccggggacggacaggg

SEQ ID NO: 2036659 - RNA, 24 nt, Human herpesvirus 6
aaaucaaacucaccgcauauauca

SEQ ID NO: 2036660 - RNA, 23 nt, Human herpesvirus 6
gggcgucaucgguggcagagggg

SEQ ID NO: 2036661 - RNA, 14 nt, Human herpesvirus 6
augaggauuugcuu

SEQ ID NO: 2036662 - RNA, 18 nt, Human herpesvirus 6
caucauauaauauuucca

SEQ ID NO: 2036663 - RNA, 16 nt, Human herpesvirus 6
aaaaaaucagaaucca

SEQ ID NO: 2036664 - RNA, 14 nt, Human herpesvirus 6
cccagcucaccacc

SEQ ID NO: 2036665 - RNA, 13 nt, Human herpesvirus 6
ggacgggcggagc

SEQ ID NO: 2036666 - RNA, 15 nt, Human herpesvirus 6
ucgcacacacaagaa

SEQ ID NO: 2036667 - RNA, 16 nt, Human herpesvirus 6
cuuacauuuuguacaa

SEQ ID NO: 2036668 - RNA, 18 nt, Human herpesvirus 6
ugugauucaguaucuguu

SEQ ID NO: 2036669 - RNA, 16 nt, Human herpesvirus 6
caccuacggccagaga

SEQ ID NO: 2036670 - RNA, 16 nt, Human herpesvirus 6
cgucaucgguggcaga

SEQ ID NO: 2036671 - RNA, 16 nt, Human herpesvirus 6
aauaaaaaguuugugc

SEQ ID NO: 2036672 - RNA, 11 nt, Human herpesvirus 6
ccaacacaccu

SEQ ID NO: 2036673 - RNA, 17 nt, Human herpesvirus 6
cauacauuuugggcagu

SEQ ID NO: 2036674 - RNA, 15 nt, Human herpesvirus 6
acugcacgcugggcu

SEQ ID NO: 2036675 - RNA, 16 nt, Human herpesvirus 6
uggaaaacuaugugca

SEQ ID NO: 2036676 - RNA, 21 nt, Human herpesvirus 6
accaccggcuaacccuaaccc

SEQ ID NO: 2036677 - RNA, 19 nt, Human herpesvirus 6
uaaaaaaugaaugugcuga

SEQ ID NO: 2036678 - RNA, 13 nt, Human herpesvirus 6
gcguuccucucuc

SEQ ID NO: 2036679 - RNA, 16 nt, Human herpesvirus 6
auggauaaacgugucu

SEQ ID NO: 2036680 - RNA, 15 nt, Human herpesvirus 6
acauccuaacaagac

SEQ ID NO: 2036681 - RNA, 18 nt, Human herpesvirus 6
auaguguuuucugauugu

SEQ ID NO: 2036682 - RNA, 17 nt, Human herpesvirus 6
ugcagacgcugaaauca

SEQ ID NO: 2036683 - RNA, 21 nt, Human herpesvirus 6
cuaacgcggcaaccgcaguuc

SEQ ID NO: 2036684 - RNA, 19 nt, Human herpesvirus 6
uguaaauagguaaacuguu

SEQ ID NO: 2036685 - RNA, 19 nt, Human herpesvirus 6
uaccgcgguuggggucuuu

SEQ ID NO: 2036686 - RNA, 12 nt, Human herpesvirus 6
ugaguaauugaa

SEQ ID NO: 2036687 - RNA, 20 nt, Human herpesvirus 6
aauaaucgauuacaaaacaa

SEQ ID NO: 2036688 - RNA, 16 nt, Human herpesvirus 6
uuucuaaaaucaaaaa

SEQ ID NO: 2036689 - RNA, 20 nt, Human herpesvirus 6
auggacaacgguguggagac

SEQ ID NO: 2036690 - RNA, 21 nt, Human herpesvirus 6
gcacuuccgcgauacccagcg

SEQ ID NO: 2036691 - RNA, 22 nt, Human herpesvirus 6
agaagcgguagaguggaguugu

SEQ ID NO: 2036692 - RNA, 18 nt, Human herpesvirus 6
gcggagcggaggggcgcg

SEQ ID NO: 2036693 - RNA, 16 nt, Human herpesvirus 6
uacgccaguguggaua

SEQ ID NO: 2036694 - RNA, 13 nt, Human herpesvirus 6
ccgugacacacag

SEQ ID NO: 2036695 - RNA, 13 nt, Human herpesvirus 6
ucuuuuuaacuag

SEQ ID NO: 2036696 - RNA, 20 nt, Human herpesvirus 6
acuuugguucggagagguuu

SEQ ID NO: 2036697 - RNA, 16 nt, Human herpesvirus 6
cggaggcgacgaaaga

SEQ ID NO: 2036698 - RNA, 18 nt, Human herpesvirus 6
cgugcugcaaggccgacu

SEQ ID NO: 2036699 - RNA, 22 nt, Human herpesvirus 6
ccgaggggcggauccgcuccgc

SEQ ID NO: 2036700 - RNA, 16 nt, Human herpesvirus 6
cuggaaaacgacacag

SEQ ID NO: 2036701 - RNA, 17 nt, Human herpesvirus 6
aaacucaauuuugaaau

SEQ ID NO: 2036702 - RNA, 14 nt, Human herpesvirus 6
uguuguuuuuugga

SEQ ID NO: 2036703 - RNA, 19 nt, Human herpesvirus 6
ccguauagguguuuuugga

SEQ ID NO: 2036704 - RNA, 21 nt, Human herpesvirus 6
gaaucuacugagaucauaaau

SEQ ID NO: 2036705 - RNA, 22 nt, Human herpesvirus 6
uauacgaaaauaaaaaaaacaa

SEQ ID NO: 2036706 - RNA, 16 nt, Human herpesvirus 6
accgauucagaaaguu

SEQ ID NO: 2036707 - RNA, 12 nt, Human herpesvirus 6
aagauuaaaugu

SEQ ID NO: 2036708 - RNA, 13 nt, Human herpesvirus 6
uaauagccaaaca

SEQ ID NO: 2036709 - RNA, 12 nt, Human herpesvirus 6
cgggcaggaauc

SEQ ID NO: 2036710 - RNA, 13 nt, Human herpesvirus 6
cuuugacauuuau

SEQ ID NO: 2036711 - RNA, 15 nt, Human herpesvirus 6
gucuuuccugcccaa

SEQ ID NO: 2036712 - RNA, 19 nt, Human herpesvirus 6
caguucaacgcugucuuuu

SEQ ID NO: 2036713 - RNA, 19 nt, Human herpesvirus 6
aaacuggucugcuugcaaa

SEQ ID NO: 2036714 - RNA, 20 nt, Human herpesvirus 6
gacccgagguccgacacgcc

SEQ ID NO: 2036715 - RNA, 23 nt, Human herpesvirus 6
ugucagauacugaucguuuuuua

SEQ ID NO: 2036716 - RNA, 16 nt, Human herpesvirus 6
gcaagucacgggcagc

SEQ ID NO: 2036717 - RNA, 21 nt, Human herpesvirus 6
uuguacaggaggcuauggcuu

SEQ ID NO: 2036718 - RNA, 14 nt, Human herpesvirus 6
agucauuaacgaga

SEQ ID NO: 2036719 - RNA, 14 nt, Human herpesvirus 6
cgccaguguggaua

SEQ ID NO: 2036720 - RNA, 13 nt, Human herpesvirus 6
uaaauuguuuuac

SEQ ID NO: 2036721 - RNA, 17 nt, Human herpesvirus 6
cccagcguggaauuugu

SEQ ID NO: 2036722 - RNA, 22 nt, Human herpesvirus 6
uauggaaacacuuucuucgccu

SEQ ID NO: 2036723 - RNA, 17 nt, Human herpesvirus 6
cgauucuaauaaaagac

SEQ ID NO: 2036724 - RNA, 17 nt, Human herpesvirus 6
uuaaauguuacugaacu

SEQ ID NO: 2036725 - RNA, 19 nt, Human herpesvirus 6
cucuauuccccauuccuag

SEQ ID NO: 2036726 - RNA, 21 nt, Human herpesvirus 6
cguggggcacacauguauuua

SEQ ID NO: 2036727 - RNA, 22 nt, Human herpesvirus 6
cuuauacacgaacuaaauaaga

SEQ ID NO: 2036728 - RNA, 20 nt, Human herpesvirus 6
cgccggagguaacggagccc

SEQ ID NO: 2036729 - RNA, 15 nt, Human herpesvirus 6
auguguucacagagc

SEQ ID NO: 2036730 - RNA, 22 nt, Human herpesvirus 6
agucgcacacacaagaacagag

SEQ ID NO: 2036731 - RNA, 16 nt, Human herpesvirus 6
uccgugacacacagaa

SEQ ID NO: 2036732 - RNA, 18 nt, Human herpesvirus 6
gaagauacgagaacaaaa

SEQ ID NO: 2036733 - RNA, 18 nt, Human herpesvirus 6
augacaccgauucagaaa

SEQ ID NO: 2036734 - RNA, 20 nt, Human herpesvirus 6
gaaacacugaguucuguggc

SEQ ID NO: 2036735 - RNA, 20 nt, Human herpesvirus 6
gugaucugauucgacaaauc

SEQ ID NO: 2036736 - RNA, 14 nt, Human herpesvirus 6
gaacucucacggcc

SEQ ID NO: 2036737 - RNA, 17 nt, Human herpesvirus 6
auggugaguaccuguac

SEQ ID NO: 2036738 - RNA, 14 nt, Human herpesvirus 6
auaaguacauagaa

SEQ ID NO: 2036739 - RNA, 16 nt, Human herpesvirus 6
acaaccgccgccgccg

SEQ ID NO: 2036740 - RNA, 18 nt, Human herpesvirus 6
uugcuauagauuagaaau

SEQ ID NO: 2036741 - RNA, 18 nt, Human herpesvirus 6
gcuagacuauacuuuucu

SEQ ID NO: 2036742 - RNA, 18 nt, Human herpesvirus 6
aaaaucuucuuugugcgu

SEQ ID NO: 2036743 - RNA, 13 nt, Human herpesvirus 6
uacauaaacaccc

SEQ ID NO: 2036744 - RNA, 23 nt, Human herpesvirus 6
auauuuaacaacaucuuaaaaga

SEQ ID NO: 2036745 - RNA, 16 nt, Human herpesvirus 6
accgacuuauaucgaa

SEQ ID NO: 2036746 - RNA, 14 nt, Human herpesvirus 6
acacaauauacgua

SEQ ID NO: 2036747 - RNA, 13 nt, Human herpesvirus 6
acaaaacaaucua

SEQ ID NO: 2036748 - RNA, 17 nt, Human herpesvirus 6
cguccucgugcucugcc

SEQ ID NO: 2036749 - RNA, 13 nt, Human herpesvirus 6
aaaagggagauga

SEQ ID NO: 2036750 - RNA, 16 nt, Human herpesvirus 6
ucgcgauagucaugca

SEQ ID NO: 2036751 - RNA, 19 nt, Human herpesvirus 6
cagucaaauugauuaugau

SEQ ID NO: 2036752 - RNA, 14 nt, Human herpesvirus 6
caauauaaaagauu

SEQ ID NO: 2036753 - RNA, 18 nt, Human herpesvirus 6
cacauaugccgaggcuua

SEQ ID NO: 2036754 - RNA, 17 nt, Human herpesvirus 6
aacuauauugcugcuag

SEQ ID NO: 2036755 - RNA, 15 nt, Human herpesvirus 6
cgcacaucgauaaac

SEQ ID NO: 2036756 - RNA, 15 nt, Human herpesvirus 6
uuguguuucugucuu

SEQ ID NO: 2036757 - RNA, 14 nt, Human herpesvirus 6
agagauguuucccg

SEQ ID NO: 2036758 - RNA, 11 nt, Human herpesvirus 6
uccugcccagg

SEQ ID NO: 2036759 - RNA, 15 nt, Human herpesvirus 6
ucccggcccagagac

SEQ ID NO: 2036760 - RNA, 15 nt, Human herpesvirus 6
uugugcgaauugugu

SEQ ID NO: 2036761 - RNA, 14 nt, Human herpesvirus 6
auagaggaauugcu

SEQ ID NO: 2036762 - RNA, 19 nt, Human herpesvirus 6
aaaugucaaagaaacagua

SEQ ID NO: 2036763 - RNA, 15 nt, Human herpesvirus 6
ccgguaacgcugucg

SEQ ID NO: 2036764 - RNA, 13 nt, Human herpesvirus 6
aaaugaauguguu

SEQ ID NO: 2036765 - RNA, 17 nt, Human herpesvirus 6
caguugucuggcagcua

SEQ ID NO: 2036766 - RNA, 13 nt, Human herpesvirus 6
ucuuuccugccca

SEQ ID NO: 2036767 - RNA, 16 nt, Human herpesvirus 6
cacgaucuacacaccg

SEQ ID NO: 2036768 - RNA, 19 nt, Human herpesvirus 6
uggaggccuucaugagcca

SEQ ID NO: 2036769 - RNA, 16 nt, Human herpesvirus 6
cauuaacccuggguga

SEQ ID NO: 2036770 - RNA, 21 nt, Human herpesvirus 6
guggugguuuugggcgcaauc

SEQ ID NO: 2036771 - RNA, 13 nt, Human herpesvirus 6
gucugggacccac

SEQ ID NO: 2036772 - RNA, 21 nt, Human herpesvirus 6
gaaaaaaaauugccuuguaaa

SEQ ID NO: 2036773 - RNA, 22 nt, Human herpesvirus 6
cggagaacguggccguuacagu

SEQ ID NO: 2036774 - RNA, 18 nt, Human herpesvirus 6
ucagaaauaaaauuucga

SEQ ID NO: 2036775 - RNA, 21 nt, Human herpesvirus 6
cauuaaauuguuuuacaaauu

SEQ ID NO: 2036776 - RNA, 14 nt, Human herpesvirus 6
uuuugaaaaaacag

SEQ ID NO: 2036777 - RNA, 23 nt, Human herpesvirus 6
aaaaaguuuucuaaaaggcucug

SEQ ID NO: 2036778 - RNA, 20 nt, Human herpesvirus 6
gagaauaggaaaagauaggc

SEQ ID NO: 2036779 - RNA, 13 nt, Human herpesvirus 6
cacauaacugcau

SEQ ID NO: 2036780 - RNA, 15 nt, Human herpesvirus 6
agccuuuauucuguu

SEQ ID NO: 2036781 - RNA, 19 nt, Human herpesvirus 6
uguugaguaauugaacauu

SEQ ID NO: 2036782 - RNA, 22 nt, Human herpesvirus 6
cacaggauuauaaaaacacacc

SEQ ID NO: 2036783 - RNA, 16 nt, Human herpesvirus 6
acucaacccaaaaugc

SEQ ID NO: 2036784 - RNA, 17 nt, Human herpesvirus 6
cuggagcagucugcugg

SEQ ID NO: 2036785 - RNA, 22 nt, Human herpesvirus 6
cgugguuuuuuuuuucuuacac

SEQ ID NO: 2036786 - RNA, 17 nt, Human herpesvirus 6
aagucagagauuauuca

SEQ ID NO: 2036787 - RNA, 13 nt, Human herpesvirus 6
cgguacucuuuuc

SEQ ID NO: 2036788 - RNA, 22 nt, Human herpesvirus 6
gacagauccgucucucagcugg

SEQ ID NO: 2036789 - RNA, 19 nt, Human herpesvirus 6
aggaucguccccuuggcuc

SEQ ID NO: 2036790 - RNA, 21 nt, Human herpesvirus 6
aaaucuauccgcuaaaacgac

SEQ ID NO: 2036791 - RNA, 14 nt, Human herpesvirus 6
uaacgcagcaacaa

SEQ ID NO: 2036792 - RNA, 17 nt, Human herpesvirus 6
ugagauguucuaaagga

SEQ ID NO: 2036793 - RNA, 14 nt, Human herpesvirus 6
uguaauaauugaug

SEQ ID NO: 2036794 - RNA, 18 nt, Human herpesvirus 6
cgcuaaggugagccagau

SEQ ID NO: 2036795 - RNA, 14 nt, Human herpesvirus 6
cgucauguguggac

SEQ ID NO: 2036796 - RNA, 23 nt, Human herpesvirus 6
auaacaacaaccacagcagcagc

SEQ ID NO: 2036797 - RNA, 13 nt, Human herpesvirus 6
aauaaaggucagu

SEQ ID NO: 2036798 - RNA, 15 nt, Human herpesvirus 6
uaauaaacuuuuaaa

SEQ ID NO: 2036799 - RNA, 16 nt, Human herpesvirus 6
gcaccucugaaacacu

SEQ ID NO: 2036800 - RNA, 15 nt, Human herpesvirus 6
aaagaaucaaugaaa

SEQ ID NO: 2036801 - RNA, 18 nt, Human herpesvirus 6
aggagacaacaacgaaaa

SEQ ID NO: 2036802 - RNA, 19 nt, Human herpesvirus 6
aaaacagacgaaucacauc

SEQ ID NO: 2036803 - RNA, 14 nt, Human herpesvirus 6
uacuauuuguuuaa

SEQ ID NO: 2036804 - RNA, 20 nt, Human herpesvirus 6
aggaaauaaaaacaccucua

SEQ ID NO: 2036805 - RNA, 22 nt, Human herpesvirus 6
uuuguacacuuuaucgauguag

SEQ ID NO: 2036806 - RNA, 21 nt, Human herpesvirus 6
ccuugaauuauuuauauugga

SEQ ID NO: 2036807 - RNA, 16 nt, Human herpesvirus 6
ggaagagaggaagaaa

SEQ ID NO: 2036808 - RNA, 23 nt, Human herpesvirus 6
uaucagcacccuaugcaagcuca

SEQ ID NO: 2036809 - RNA, 14 nt, Human herpesvirus 6
cucaaaaaacauau

SEQ ID NO: 2036810 - RNA, 22 nt, Human herpesvirus 6
aucagugaaggcugccaugaaa

SEQ ID NO: 2036811 - RNA, 13 nt, Human herpesvirus 6
gauaacuuuuguu

SEQ ID NO: 2036812 - RNA, 22 nt, Human herpesvirus 6
ucgcugcuaucgucuauaacaa

SEQ ID NO: 2036813 - RNA, 16 nt, Human herpesvirus 6
aucaacuauuuaacau

SEQ ID NO: 2036814 - RNA, 15 nt, Human herpesvirus 6
agguccgacacgccc

SEQ ID NO: 2036815 - RNA, 22 nt, Human herpesvirus 6
cuucugccugaaaaugaagaga

SEQ ID NO: 2036816 - RNA, 17 nt, Human herpesvirus 6
cggguaagcagcagaac

SEQ ID NO: 2036817 - RNA, 16 nt, Human herpesvirus 6
ggaacgauaugcugcc

SEQ ID NO: 2036818 - RNA, 17 nt, Human herpesvirus 6
ggauggcuagugugccu

SEQ ID NO: 2036819 - RNA, 23 nt, Human herpesvirus 6
agcgccaacgaaaagcaucucaa

SEQ ID NO: 2036820 - RNA, 12 nt, Human herpesvirus 6
auuauguaaaua

SEQ ID NO: 2036821 - RNA, 16 nt, Human herpesvirus 6
auuguauauauagcug

SEQ ID NO: 2036822 - RNA, 24 nt, Human herpesvirus 6
ugucgugguggucuuguuaucuua

SEQ ID NO: 2036823 - RNA, 22 nt, Human herpesvirus 6
gccagacaucgaccgccggagg

SEQ ID NO: 2036824 - RNA, 17 nt, Human herpesvirus 6
uaaacaugauuguaaua

SEQ ID NO: 2036825 - RNA, 13 nt, Human herpesvirus 6
ggccagagacgug

SEQ ID NO: 2036826 - RNA, 19 nt, Human herpesvirus 6
guggaaaaaagucaccugu

SEQ ID NO: 2036827 - RNA, 12 nt, Human herpesvirus 6
aucuuuaacaug

SEQ ID NO: 2036828 - RNA, 14 nt, Human herpesvirus 6
ugcaaacccgacaa

SEQ ID NO: 2036829 - RNA, 19 nt, Human herpesvirus 6
uuaacgcgucaacaaacaa

SEQ ID NO: 2036830 - RNA, 22 nt, Human herpesvirus 6
aagcgccugccuacacugcgaa

SEQ ID NO: 2036831 - RNA, 16 nt, Human herpesvirus 6
guuaaauaacucagau

SEQ ID NO: 2036832 - RNA, 21 nt, Human herpesvirus 6
uucccgugcuccguaagaaau

SEQ ID NO: 2036833 - RNA, 19 nt, Human herpesvirus 6
uuuuuaaugcaaguuugaa

SEQ ID NO: 2036834 - RNA, 14 nt, Human herpesvirus 6
agugcgcuggcuua

SEQ ID NO: 2036835 - RNA, 15 nt, Human herpesvirus 6
cuuagcauauuuugg

SEQ ID NO: 2036836 - RNA, 22 nt, Human herpesvirus 6
aacauaucgagccaaagaaaca

SEQ ID NO: 2036837 - RNA, 16 nt, Human herpesvirus 6
gcaauuuccugucaug

SEQ ID NO: 2036838 - RNA, 12 nt, Human herpesvirus 6
uuaauaagaaag

SEQ ID NO: 2036839 - RNA, 15 nt, Human herpesvirus 6
cucgugcucugccuc

SEQ ID NO: 2036840 - RNA, 13 nt, Human herpesvirus 6
acagacagaggaa

SEQ ID NO: 2036841 - RNA, 16 nt, Human herpesvirus 6
cucugcaaaacaaagg

SEQ ID NO: 2036842 - RNA, 23 nt, Human herpesvirus 6
auuucuguuacugcgagcccgua

SEQ ID NO: 2036843 - RNA, 18 nt, Human herpesvirus 6
cgaucuuauauuaaagau

SEQ ID NO: 2036844 - RNA, 15 nt, Human herpesvirus 6
aagaauuuuuguagc

SEQ ID NO: 2036845 - RNA, 17 nt, Human herpesvirus 6
uauuuccugcccaggca

SEQ ID NO: 2036846 - RNA, 21 nt, Human herpesvirus 6
caaaucuguaagauuaaaugu

SEQ ID NO: 2036847 - RNA, 23 nt, Human herpesvirus 6
acaaccuccgcauaucgccccca

SEQ ID NO: 2036848 - RNA, 18 nt, Human herpesvirus 6
gcuucaacuaaauauguu

SEQ ID NO: 2036849 - RNA, 14 nt, Human herpesvirus 6
accgauucagaaag

SEQ ID NO: 2036850 - RNA, 20 nt, Human herpesvirus 6
gaacaaaaugaggggaacac

SEQ ID NO: 2036851 - RNA, 20 nt, Human herpesvirus 6
acggcgacaaccgccgccgc

SEQ ID NO: 2036852 - RNA, 16 nt, Human herpesvirus 6
ccaaccucuuccuaga

SEQ ID NO: 2036853 - RNA, 19 nt, Human herpesvirus 6
cuggcgcgcauguugcagu

SEQ ID NO: 2036854 - RNA, 13 nt, Human herpesvirus 6
cacaggcggggau

SEQ ID NO: 2036855 - RNA, 16 nt, Human herpesvirus 6
caacaacaauaacaac

SEQ ID NO: 2036856 - RNA, 15 nt, Human herpesvirus 6
uuauuaaauguuacu

SEQ ID NO: 2036857 - RNA, 13 nt, Human herpesvirus 6
cuauuauauugua

SEQ ID NO: 2036858 - RNA, 14 nt, Human herpesvirus 6
uaaaauuguaauuu

SEQ ID NO: 2036859 - RNA, 19 nt, Human herpesvirus 6
aaguuuacauagaaauuac

SEQ ID NO: 2036860 - RNA, 22 nt, Human herpesvirus 6
ccgucgauaauaauucagucug

SEQ ID NO: 2036861 - RNA, 15 nt, Human herpesvirus 6
gaaacuccccagaga

SEQ ID NO: 2036862 - RNA, 18 nt, Human herpesvirus 6
aguaguugcuaaguguga

SEQ ID NO: 2036863 - RNA, 23 nt, Human herpesvirus 6
cucggauauauacuuacuugagu

SEQ ID NO: 2036864 - RNA, 23 nt, Human herpesvirus 6
auuuuuuuuuuauuuacaaaaaa

SEQ ID NO: 2036865 - RNA, 16 nt, Human herpesvirus 6
aaguucuacaaaaagu

SEQ ID NO: 2036866 - RNA, 20 nt, Human herpesvirus 6
cauauuguguaacucuuuuu

SEQ ID NO: 2036867 - RNA, 14 nt, Human herpesvirus 6
cuaguuuucacacg

SEQ ID NO: 2036868 - RNA, 22 nt, Human herpesvirus 6
gugccucagaggugaguaggag

SEQ ID NO: 2036869 - RNA, 21 nt, Human herpesvirus 6
cuguggacgugccgggacccc

SEQ ID NO: 2036870 - RNA, 13 nt, Human herpesvirus 6
uuaaucggaaugu

SEQ ID NO: 2036871 - RNA, 22 nt, Human herpesvirus 6
ggagaugauuccaagugguggu

SEQ ID NO: 2036872 - RNA, 19 nt, Human herpesvirus 6
aauaaugcccagaugugga

SEQ ID NO: 2036873 - RNA, 14 nt, Human herpesvirus 6
aauggaagaaggcu

SEQ ID NO: 2036874 - RNA, 18 nt, Human herpesvirus 6
cgccaaaaaaauacagua

SEQ ID NO: 2036875 - RNA, 16 nt, Human herpesvirus 6
cugggacccacggugg

SEQ ID NO: 2036876 - RNA, 21 nt, Human herpesvirus 6
agaugauuccaaguggugguu

SEQ ID NO: 2036877 - RNA, 19 nt, Human herpesvirus 6
uacugaaaccaaagcauac

SEQ ID NO: 2036878 - RNA, 14 nt, Human herpesvirus 6
cucauaaaauuaaa

SEQ ID NO: 2036879 - RNA, 16 nt, Human herpesvirus 6
cauagagcauggcgca

SEQ ID NO: 2036880 - RNA, 19 nt, Human herpesvirus 6
aggaacaacuauacgguga

SEQ ID NO: 2036881 - RNA, 15 nt, Human herpesvirus 6
agaaaaaaacuguga

SEQ ID NO: 2036882 - RNA, 19 nt, Human herpesvirus 6
uuaccuaucguccuuaaua

SEQ ID NO: 2036883 - RNA, 19 nt, Human herpesvirus 6
uuggccuucgguacaguga

SEQ ID NO: 2036884 - RNA, 20 nt, Human herpesvirus 6
agcuacgccaaaacuacaaa

SEQ ID NO: 2036885 - RNA, 15 nt, Human herpesvirus 6
acugaaaccaaagca

SEQ ID NO: 2036886 - RNA, 13 nt, Human herpesvirus 6
uuauuaaauguua

SEQ ID NO: 2036887 - RNA, 19 nt, Human herpesvirus 6
agucccaucuauacacccu

SEQ ID NO: 2036888 - RNA, 17 nt, Human herpesvirus 6
auggcagaucuugaaaa

SEQ ID NO: 2036889 - RNA, 19 nt, Human herpesvirus 6
ugucacugucgaauauguu

SEQ ID NO: 2036890 - RNA, 22 nt, Human herpesvirus 6
uugaaaagguguuguguuugag

SEQ ID NO: 2036891 - RNA, 20 nt, Human herpesvirus 6
ggggaucgggcccggggacg

SEQ ID NO: 2036892 - RNA, 20 nt, Human herpesvirus 6
uuguaagaagaaaaaaacac

SEQ ID NO: 2036893 - RNA, 15 nt, Human herpesvirus 6
uccugaucacagagc

SEQ ID NO: 2036894 - RNA, 17 nt, Human herpesvirus 6
ccaacgcgacaggguga

SEQ ID NO: 2036895 - RNA, 21 nt, Human herpesvirus 6
ucuacugcaguccagaagucc

SEQ ID NO: 2036896 - RNA, 21 nt, Human herpesvirus 6
aaaaacaccucuaaaacaaga

SEQ ID NO: 2036897 - RNA, 17 nt, Human herpesvirus 6
agaggaaauaaaaacac

SEQ ID NO: 2036898 - RNA, 13 nt, Human herpesvirus 6
ccaccaacacacc

SEQ ID NO: 2036899 - RNA, 12 nt, Human herpesvirus 6
uaaaguuuucau

SEQ ID NO: 2036900 - RNA, 21 nt, Human herpesvirus 6
ucggcgcugauuccuguaagg

SEQ ID NO: 2036901 - RNA, 15 nt, Human herpesvirus 6
agaucuuuauggagg

SEQ ID NO: 2036902 - RNA, 22 nt, Human herpesvirus 6
cuuuuuuaaaccucuguagauc

SEQ ID NO: 2036903 - RNA, 14 nt, Human herpesvirus 6
ccacccccgcucga

SEQ ID NO: 2036904 - RNA, 15 nt, Human herpesvirus 6
gggcggaaguugguu

SEQ ID NO: 2036905 - RNA, 11 nt, Human herpesvirus 6
cgacccacucc

SEQ ID NO: 2036906 - RNA, 16 nt, Human herpesvirus 6
agaaaauccagcaaug

SEQ ID NO: 2036907 - RNA, 21 nt, Human herpesvirus 6
gggggaucgacgggcaggaau

SEQ ID NO: 2036908 - RNA, 16 nt, Human herpesvirus 6
gacaugcauuuuguau

SEQ ID NO: 2036909 - RNA, 17 nt, Human herpesvirus 6
caugucuugccucuccg

SEQ ID NO: 2036910 - RNA, 22 nt, Human herpesvirus 6
acuacguuuuguguuaaaauaa

SEQ ID NO: 2036911 - RNA, 22 nt, Human herpesvirus 6
uuacuugaaaaaguaguugcua

SEQ ID NO: 2036912 - RNA, 13 nt, Human herpesvirus 6
gaaaaaaaucaga

SEQ ID NO: 2036913 - RNA, 13 nt, Human herpesvirus 6
augcauucacaag

SEQ ID NO: 2036914 - RNA, 23 nt, Human herpesvirus 6
cgggacaaaaccgaggcagagca

SEQ ID NO: 2036915 - RNA, 22 nt, Human herpesvirus 6
gagauaaaaagagaggaaagaa

SEQ ID NO: 2036916 - RNA, 14 nt, Human herpesvirus 6
caauaauugcauuc

SEQ ID NO: 2036917 - RNA, 16 nt, Human herpesvirus 6
aucuuccacugaagca

SEQ ID NO: 2036918 - RNA, 15 nt, Human herpesvirus 6
caccgucucugaagc

SEQ ID NO: 2036919 - RNA, 15 nt, Human herpesvirus 6
cuaggacguacagaa

SEQ ID NO: 2036920 - RNA, 20 nt, Human herpesvirus 6
gcgagucuugugugaaagua

SEQ ID NO: 2036921 - RNA, 22 nt, Human herpesvirus 6
uguagggugcuuugcuucagug

SEQ ID NO: 2036922 - RNA, 14 nt, Human herpesvirus 6
caaaggaaaccacc

SEQ ID NO: 2036923 - RNA, 21 nt, Human herpesvirus 6
gggauuaauaaaggauguuug

SEQ ID NO: 2036924 - RNA, 13 nt, Human herpesvirus 6
agauuguuauuag

SEQ ID NO: 2036925 - RNA, 16 nt, Human herpesvirus 6
aauuuuuuauuucuga

SEQ ID NO: 2036926 - RNA, 17 nt, Human herpesvirus 6
aaacaaauggaaacugg

SEQ ID NO: 2036927 - RNA, 16 nt, Human herpesvirus 6
ggggcggacggggacg

SEQ ID NO: 2036928 - RNA, 14 nt, Human herpesvirus 6
uaaccggaaaagag

SEQ ID NO: 2036929 - RNA, 18 nt, Human herpesvirus 6
uuacuguuuuaaccgaua

SEQ ID NO: 2036930 - RNA, 18 nt, Human herpesvirus 6
gaugauuauucugucuug

SEQ ID NO: 2036931 - RNA, 17 nt, Human herpesvirus 6
uaaauauaucaaagaug

SEQ ID NO: 2036932 - RNA, 21 nt, Human herpesvirus 6
gaacaggcggaagaacacgaa

SEQ ID NO: 2036933 - RNA, 20 nt, Human herpesvirus 6
uaaaauuugcuaacggggca

SEQ ID NO: 2036934 - RNA, 20 nt, Human herpesvirus 6
caugauuguaauaaaguguc

SEQ ID NO: 2036935 - RNA, 19 nt, Human herpesvirus 6
uccguuuuucucugcaaaa

SEQ ID NO: 2036936 - RNA, 20 nt, Human herpesvirus 6
gaucaucuccaauaaaauau

SEQ ID NO: 2036937 - RNA, 23 nt, Human herpesvirus 6
acgugccaccgucugggacccac

SEQ ID NO: 2036938 - RNA, 17 nt, Human herpesvirus 6
agcgaagugaagaauuu

SEQ ID NO: 2036939 - RNA, 20 nt, Human herpesvirus 6
accuaacgcgggauauuuua

SEQ ID NO: 2036940 - RNA, 11 nt, Human herpesvirus 6
agucagugggu

SEQ ID NO: 2036941 - RNA, 20 nt, Human herpesvirus 6
cauuuguuuuuuaaagcaca

SEQ ID NO: 2036942 - RNA, 19 nt, Human herpesvirus 6
aggcaugugauugucuuuu

SEQ ID NO: 2036943 - RNA, 17 nt, Human herpesvirus 6
gagcuuguuaggacacu

SEQ ID NO: 2036944 - RNA, 13 nt, Human herpesvirus 6
ugcaccuguuacu

SEQ ID NO: 2036945 - RNA, 15 nt, Human herpesvirus 6
uaacugguucagaau

SEQ ID NO: 2036946 - RNA, 20 nt, Human herpesvirus 6
acagagcgcaucuuuaacau

SEQ ID NO: 2036947 - RNA, 13 nt, Human herpesvirus 6
ugccaaaggaaac

SEQ ID NO: 2036948 - RNA, 21 nt, Human herpesvirus 6
ccacagaugucccggggggaa

SEQ ID NO: 2036949 - RNA, 19 nt, Human herpesvirus 6
uuuauuuucguauaaaaug

SEQ ID NO: 2036950 - RNA, 19 nt, Human herpesvirus 6
gugcuucuggcacaggcau

SEQ ID NO: 2036951 - RNA, 20 nt, Human herpesvirus 6
cacgacgugcugcaaggccg

SEQ ID NO: 2036952 - RNA, 17 nt, Human herpesvirus 6
ugugaaaguauuuuacu

SEQ ID NO: 2036953 - RNA, 18 nt, Human herpesvirus 6
ggccugacacaaucagaa

SEQ ID NO: 2036954 - RNA, 14 nt, Human herpesvirus 6
uaacuuauguuucu

SEQ ID NO: 2036955 - RNA, 20 nt, Human herpesvirus 6
gacccacgguggccuggcac

SEQ ID NO: 2036956 - RNA, 13 nt, Human herpesvirus 6
auucuaacgucug

SEQ ID NO: 2036957 - RNA, 13 nt, Human herpesvirus 6
aacaugaacauug

SEQ ID NO: 2036958 - RNA, 20 nt, Human herpesvirus 6
ccuuguggaggauuucugag

SEQ ID NO: 2036959 - RNA, 12 nt, Human herpesvirus 6
aaaguuuucuaa

SEQ ID NO: 2036960 - RNA, 16 nt, Human herpesvirus 6
aaucauggugucuuug

SEQ ID NO: 2036961 - RNA, 18 nt, Human herpesvirus 6
ucgacgaaauaauugaua

SEQ ID NO: 2036962 - RNA, 23 nt, Human herpesvirus 6
uucuuaacucaucgacuucuguc

SEQ ID NO: 2036963 - RNA, 21 nt, Human herpesvirus 6
auccaaucacaacaaaaaugc

SEQ ID NO: 2036964 - RNA, 13 nt, Human herpesvirus 6
gggccuccgccac

SEQ ID NO: 2036965 - RNA, 18 nt, Human herpesvirus 6
agaucuguucgaaaaagu

SEQ ID NO: 2036966 - RNA, 16 nt, Human herpesvirus 6
cuauguuauguaaaga

SEQ ID NO: 2036967 - RNA, 13 nt, Human herpesvirus 6
uucgcuucuuaua

SEQ ID NO: 2036968 - RNA, 21 nt, Human herpesvirus 6
gccacgacgugcugcaaggcc

SEQ ID NO: 2036969 - RNA, 20 nt, Human herpesvirus 6
uauaucaaacuuuuuuugaa

SEQ ID NO: 2036970 - RNA, 19 nt, Human herpesvirus 6
acauuuugguuucccucag

SEQ ID NO: 2036971 - RNA, 17 nt, Human herpesvirus 6
gugccaccgucugggac

SEQ ID NO: 2036972 - RNA, 19 nt, Human herpesvirus 6
cggauucaaagaaaguuuc

SEQ ID NO: 2036973 - RNA, 15 nt, Human herpesvirus 6
ucuaaaaggcucugu

SEQ ID NO: 2036974 - RNA, 21 nt, Human herpesvirus 6
ucacaaaguuuaaguuuucac

SEQ ID NO: 2036975 - RNA, 17 nt, Human herpesvirus 6
gcgcgcauguugcaguu

SEQ ID NO: 2036976 - RNA, 19 nt, Human herpesvirus 6
auuugcucgcacgaaauga

SEQ ID NO: 2036977 - RNA, 15 nt, Human herpesvirus 6
cccuaugcaagcuca

SEQ ID NO: 2036978 - RNA, 14 nt, Human herpesvirus 6
acaaauaaaagcau

SEQ ID NO: 2036979 - RNA, 15 nt, Human herpesvirus 6
acgcggcaaccgcag

SEQ ID NO: 2036980 - RNA, 22 nt, Human herpesvirus 6
gccaccgucugggacccacggu

SEQ ID NO: 2036981 - RNA, 18 nt, Human herpesvirus 6
aaacucuaaaagcugcua

SEQ ID NO: 2036982 - RNA, 18 nt, Human herpesvirus 6
uuuaaugagaggacaguc

SEQ ID NO: 2036983 - RNA, 20 nt, Human herpesvirus 6
caagccaugacaagaaaggu

SEQ ID NO: 2036984 - RNA, 18 nt, Human herpesvirus 6
auacaauaguaacuucuc

SEQ ID NO: 2036985 - RNA, 18 nt, Human herpesvirus 6
gggugaguuuuaucacuu

SEQ ID NO: 2036986 - RNA, 22 nt, Human herpesvirus 6
aagcaaaaacagauuaaauaua

SEQ ID NO: 2036987 - RNA, 12 nt, Human herpesvirus 6
aaaaaaaugaua

SEQ ID NO: 2036988 - RNA, 16 nt, Human herpesvirus 6
caagacgccacgggca

SEQ ID NO: 2036989 - RNA, 22 nt, Human herpesvirus 6
ucguacacgcauuugcaauugu

SEQ ID NO: 2036990 - RNA, 17 nt, Human herpesvirus 6
uucucugcaaaacaaag

SEQ ID NO: 2036991 - RNA, 17 nt, Human herpesvirus 6
ugagguguuuccugccc

SEQ ID NO: 2036992 - RNA, 18 nt, Human herpesvirus 6
aacgcgguaacgccacag

SEQ ID NO: 2036993 - RNA, 12 nt, Human herpesvirus 6
aaaaucucaaac

SEQ ID NO: 2036994 - RNA, 21 nt, Human herpesvirus 6
uggccauauuaggcugcagcc

SEQ ID NO: 2036995 - RNA, 22 nt, Human herpesvirus 6
ucuccucguggucauugguguu

SEQ ID NO: 2036996 - RNA, 23 nt, Human herpesvirus 6
uuaaagcagcuagagaaauugga

SEQ ID NO: 2036997 - RNA, 21 nt, Human herpesvirus 6
cgguccaaggauuaugaucau

SEQ ID NO: 2036998 - RNA, 18 nt, Human herpesvirus 6
agccacugcggaguuuua

SEQ ID NO: 2036999 - RNA, 14 nt, Human herpesvirus 6
auccgcccuccccg

SEQ ID NO: 2037000 - RNA, 23 nt, Human herpesvirus 6
caaagacgauugcuuuaguagug

SEQ ID NO: 2037001 - RNA, 15 nt, Human herpesvirus 6
ccccggaguacacgu

SEQ ID NO: 2037002 - RNA, 17 nt, Human herpesvirus 6
gagcuaauaugaacaau

SEQ ID NO: 2037003 - RNA, 21 nt, Human herpesvirus 6
uauuccaaacuacggaaaauc

SEQ ID NO: 2037004 - RNA, 23 nt, Human herpesvirus 6
gucgggaaauaaaaaauauuaau

SEQ ID NO: 2037005 - RNA, 20 nt, Human herpesvirus 6
ugaaaaaaaaugaaggggaa

SEQ ID NO: 2037006 - RNA, 11 nt, Human herpesvirus 6
ccuuguuuucu

SEQ ID NO: 2037007 - RNA, 19 nt, Human herpesvirus 6
uaucuugaaaucuacugua

SEQ ID NO: 2037008 - RNA, 21 nt, Human herpesvirus 6
gagacuuagcuagaugugucu

SEQ ID NO: 2037009 - RNA, 14 nt, Human herpesvirus 6
agccuaagaaauuu

SEQ ID NO: 2037010 - RNA, 16 nt, Human herpesvirus 6
agggacccacaggcgg

SEQ ID NO: 2037011 - RNA, 14 nt, Human herpesvirus 6
acccgcguccucca

SEQ ID NO: 2037012 - RNA, 14 nt, Human herpesvirus 6
ucugacgaaguuuu

SEQ ID NO: 2037013 - RNA, 15 nt, Human herpesvirus 6
uauaaaaaacuaaaa

SEQ ID NO: 2037014 - RNA, 15 nt, Human herpesvirus 6
guuaaugcugcugcu

SEQ ID NO: 2037015 - RNA, 16 nt, Human herpesvirus 6
gcuguccaucuucaga

SEQ ID NO: 2037016 - RNA, 18 nt, Human herpesvirus 6
caccuucccucccacccc

SEQ ID NO: 2037017 - RNA, 13 nt, Human herpesvirus 6
gcacaggcgaacg

SEQ ID NO: 2037018 - RNA, 22 nt, Human herpesvirus 6
gacgggcgucaucgguggcaga

SEQ ID NO: 2037019 - RNA, 19 nt, Human herpesvirus 6
uucuaagacgagauguuuc

SEQ ID NO: 2037020 - RNA, 15 nt, Human herpesvirus 6
uugauguauggagau

SEQ ID NO: 2037021 - RNA, 13 nt, Human herpesvirus 6
gcggauggagccc

SEQ ID NO: 2037022 - RNA, 12 nt, Human herpesvirus 6
guaaacuucugc

SEQ ID NO: 2037023 - RNA, 20 nt, Human herpesvirus 6
cgcgguuugggggucuuucc

SEQ ID NO: 2037024 - RNA, 18 nt, Human herpesvirus 6
ucaccgauaaaaacucac

SEQ ID NO: 2037025 - RNA, 15 nt, Human herpesvirus 6
auccgcuccgcgccc

SEQ ID NO: 2037026 - RNA, 20 nt, Human herpesvirus 6
aacaagauccaaucacaaca

SEQ ID NO: 2037027 - RNA, 22 nt, Human herpesvirus 6
agguggcaucagaauccagaaa

SEQ ID NO: 2037028 - RNA, 21 nt, Human herpesvirus 6
ucuacguaugaaaguccucaa

SEQ ID NO: 2037029 - RNA, 21 nt, Human herpesvirus 6
gcugugacgaagauggaugug

SEQ ID NO: 2037030 - RNA, 18 nt, Human herpesvirus 6
cuucugcuaauucauagu

SEQ ID NO: 2037031 - RNA, 12 nt, Human herpesvirus 6
agaaaugaccug

SEQ ID NO: 2037032 - RNA, 17 nt, Human herpesvirus 6
uaugaucauaugaggau

SEQ ID NO: 2037033 - RNA, 17 nt, Human herpesvirus 6
uaugcuuauacuguugu

SEQ ID NO: 2037034 - RNA, 17 nt, Human herpesvirus 6
cagaccucauauaagaa

SEQ ID NO: 2037035 - RNA, 17 nt, Human herpesvirus 6
cuaauaugaacaaugac

SEQ ID NO: 2037036 - RNA, 14 nt, Human herpesvirus 6
uucuacaaaaauac

SEQ ID NO: 2037037 - RNA, 17 nt, Human herpesvirus 6
uugacgguuuauaugca

SEQ ID NO: 2037038 - RNA, 21 nt, Human herpesvirus 6
ggaagaacaggcggaagaaca

SEQ ID NO: 2037039 - RNA, 23 nt, Human herpesvirus 6
gaaugcuauucguuuuuuuucuu

SEQ ID NO: 2037040 - RNA, 18 nt, Human herpesvirus 6
ggaugccugcauaugcag

SEQ ID NO: 2037041 - RNA, 21 nt, Human herpesvirus 6
cacuccgacucgccgcugcag

SEQ ID NO: 2037042 - RNA, 15 nt, Human herpesvirus 6
aguaaaacuauugac

SEQ ID NO: 2037043 - RNA, 18 nt, Human herpesvirus 6
ucaucaaauccucuacgu

SEQ ID NO: 2037044 - RNA, 14 nt, Human herpesvirus 6
uccgcccuccccga

SEQ ID NO: 2037045 - RNA, 22 nt, Human herpesvirus 6
uucagguucuucaaaaaaagaa

SEQ ID NO: 2037046 - RNA, 14 nt, Human herpesvirus 6
uuuacugcaugcua

SEQ ID NO: 2037047 - RNA, 15 nt, Human herpesvirus 6
cagguauaagaacug

SEQ ID NO: 2037048 - RNA, 14 nt, Human herpesvirus 6
aaagcagaucgagu

SEQ ID NO: 2037049 - RNA, 19 nt, Human herpesvirus 6
ucagauacugaucguuuuu

SEQ ID NO: 2037050 - RNA, 14 nt, Human herpesvirus 6
agcucuccugggca

SEQ ID NO: 2037051 - RNA, 22 nt, Human herpesvirus 6
ggcgaugaccgcuaaauugaua

SEQ ID NO: 2037052 - RNA, 12 nt, Human herpesvirus 6
cuggaaaacuau

SEQ ID NO: 2037053 - RNA, 20 nt, Human herpesvirus 6
aggaagaaacggacacgcgc

SEQ ID NO: 2037054 - RNA, 19 nt, Human herpesvirus 6
caccgagauccccaagagg

SEQ ID NO: 2037055 - RNA, 15 nt, Human herpesvirus 6
ccucgugcucugccu

SEQ ID NO: 2037056 - RNA, 12 nt, Human herpesvirus 6
aggcugaaauuu

SEQ ID NO: 2037057 - RNA, 18 nt, Human herpesvirus 6
auggcgcauaacggaaaa

SEQ ID NO: 2037058 - RNA, 14 nt, Human herpesvirus 6
ccaaucacaacaaa

SEQ ID NO: 2037059 - RNA, 16 nt, Human herpesvirus 6
aaauuguuuuacaaau

SEQ ID NO: 2037060 - RNA, 14 nt, Human herpesvirus 6
uccccacaauaaga

SEQ ID NO: 2037061 - RNA, 16 nt, Human herpesvirus 6
uguucaacgucuucaa

SEQ ID NO: 2037062 - RNA, 17 nt, Human herpesvirus 6
ucaagguggagguuucu

SEQ ID NO: 2037063 - RNA, 18 nt, Human herpesvirus 6
uguaagauuaaaugugaa

SEQ ID NO: 2037064 - RNA, 17 nt, Human herpesvirus 6
guuuaccuauuuacaau

SEQ ID NO: 2037065 - RNA, 22 nt, Human herpesvirus 6
gagcgugccguaaaucugcguc

SEQ ID NO: 2037066 - RNA, 22 nt, Human herpesvirus 6
cauuuauuucguauguuuggau

SEQ ID NO: 2037067 - RNA, 14 nt, Human herpesvirus 6
cugugucuguucaa

SEQ ID NO: 2037068 - RNA, 20 nt, Human herpesvirus 6
gcgaucgcugacucgccuuu

SEQ ID NO: 2037069 - RNA, 22 nt, Human herpesvirus 6
aaccgccgugcuucuggcacag

SEQ ID NO: 2037070 - RNA, 18 nt, Human herpesvirus 6
auuucaagagaacaugau

SEQ ID NO: 2037071 - RNA, 22 nt, Human herpesvirus 6
gcuaaaucaaaugauuuuacaa

SEQ ID NO: 2037072 - RNA, 14 nt, Human herpesvirus 6
aucgcgcaccgcug

SEQ ID NO: 2037073 - RNA, 18 nt, Human herpesvirus 6
acccacgguggccuggca

SEQ ID NO: 2037074 - RNA, 10 nt, Human herpesvirus 6
agagaggaag

SEQ ID NO: 2037075 - RNA, 23 nt, Human herpesvirus 6
gguuugaaacacugcaagguuuc

SEQ ID NO: 2037076 - RNA, 24 nt, Human herpesvirus 6
uuccacgaguggaucgaaugcuag

SEQ ID NO: 2037077 - RNA, 22 nt, Human herpesvirus 6
ggacccgagguccgacacgccc

SEQ ID NO: 2037078 - RNA, 18 nt, Human herpesvirus 6
ugugacgaagauggaugu

SEQ ID NO: 2037079 - RNA, 22 nt, Human herpesvirus 6
cugcccaggcgaacgagaacuc

SEQ ID NO: 2037080 - RNA, 18 nt, Human herpesvirus 6
cguuaguuuuuuguuuca

SEQ ID NO: 2037081 - RNA, 23 nt, Human herpesvirus 6
guguuaaaggaugcggacucuga

SEQ ID NO: 2037082 - RNA, 12 nt, Human herpesvirus 6
gaucagugggua

SEQ ID NO: 2037083 - RNA, 19 nt, Human herpesvirus 6
cagagccuagaccaagaau

SEQ ID NO: 2037084 - RNA, 19 nt, Human herpesvirus 6
ugcagacgcugaaaucauu

SEQ ID NO: 2037085 - RNA, 13 nt, Human herpesvirus 6
cggaguugcagug

SEQ ID NO: 2037086 - RNA, 20 nt, Human herpesvirus 6
agacugguugaguuuccugc

SEQ ID NO: 2037087 - RNA, 22 nt, Human herpesvirus 6
ucugcauuuauaucaaacuuuu

SEQ ID NO: 2037088 - RNA, 20 nt, Human herpesvirus 6
uugagagcuaauaugaacaa

SEQ ID NO: 2037089 - RNA, 15 nt, Human herpesvirus 6
caaagaaaagaugua

SEQ ID NO: 2037090 - RNA, 20 nt, Human herpesvirus 6
uauuguguguacaaugacug

SEQ ID NO: 2037091 - RNA, 16 nt, Human herpesvirus 6
auuaacaaauuacaau

SEQ ID NO: 2037092 - RNA, 15 nt, Human herpesvirus 6
gguuagagcugggga

SEQ ID NO: 2037093 - RNA, 20 nt, Human herpesvirus 6
uuucacgugaaauaaaguuu

SEQ ID NO: 2037094 - RNA, 21 nt, Human herpesvirus 6
augauuauaucgcaagcaaaa

SEQ ID NO: 2037095 - RNA, 20 nt, Human herpesvirus 6
agaaaaaaaaauaaguacau

SEQ ID NO: 2037096 - RNA, 17 nt, Human herpesvirus 6
uuggauucaggcuuuaa

SEQ ID NO: 2037097 - RNA, 19 nt, Human herpesvirus 6
gaauaacgguguugaguuu

SEQ ID NO: 2037098 - RNA, 20 nt, Human herpesvirus 6
gagucuggcaucugcggcuc

SEQ ID NO: 2037099 - RNA, 15 nt, Human herpesvirus 6
agauguuucccguau

SEQ ID NO: 2037100 - RNA, 13 nt, Human herpesvirus 6
cauaaacagacag

SEQ ID NO: 2037101 - RNA, 14 nt, Human herpesvirus 6
ugggggucuuuccu

SEQ ID NO: 2037102 - RNA, 19 nt, Human herpesvirus 6
ugcuacccacaugaaauca

SEQ ID NO: 2037103 - RNA, 13 nt, Human herpesvirus 6
gaccaggacaauc

SEQ ID NO: 2037104 - RNA, 16 nt, Human herpesvirus 6
uaaaucugagguuucc

SEQ ID NO: 2037105 - RNA, 14 nt, Human herpesvirus 6
ccuuuaaccauguu

SEQ ID NO: 2037106 - RNA, 19 nt, Human herpesvirus 6
aagguguuaaacgaaaacu

SEQ ID NO: 2037107 - RNA, 22 nt, Human herpesvirus 6
cugcccaggcaaacgagaacuc

SEQ ID NO: 2037108 - RNA, 17 nt, Human herpesvirus 6
aguguguucuuacaaug

SEQ ID NO: 2037109 - RNA, 13 nt, Human herpesvirus 6
agcuuagggccaa

SEQ ID NO: 2037110 - RNA, 14 nt, Human herpesvirus 6
gcagcaaauaaaua

SEQ ID NO: 2037111 - RNA, 18 nt, Human herpesvirus 6
auucaaaacgacaucgcg

SEQ ID NO: 2037112 - RNA, 12 nt, Human herpesvirus 6
uggcagagggga

SEQ ID NO: 2037113 - RNA, 15 nt, Human herpesvirus 6
agauguagcuggaua

SEQ ID NO: 2037114 - RNA, 17 nt, Human herpesvirus 6
uuaacagugucuguuuu

SEQ ID NO: 2037115 - RNA, 21 nt, Human herpesvirus 6
gagaggaagaaacggacacgc

SEQ ID NO: 2037116 - RNA, 15 nt, Human herpesvirus 6
cuccguuuccuccuc

SEQ ID NO: 2037117 - RNA, 21 nt, Human herpesvirus 6
acaccgauucagaaaguucua

SEQ ID NO: 2037118 - RNA, 17 nt, Human herpesvirus 6
uacaaagugaaagagac

SEQ ID NO: 2037119 - RNA, 20 nt, Human herpesvirus 6
augauagggaauauguuguu

SEQ ID NO: 2037120 - RNA, 15 nt, Human herpesvirus 6
cugccauaucacaca

SEQ ID NO: 2037121 - RNA, 14 nt, Human herpesvirus 6
agaacaaaaugagg

SEQ ID NO: 2037122 - RNA, 20 nt, Human herpesvirus 6
aucgaaaucguauacguuaa

SEQ ID NO: 2037123 - RNA, 22 nt, Human herpesvirus 6
agacuccuacaauacgguuugu

SEQ ID NO: 2037124 - RNA, 17 nt, Human herpesvirus 6
cuaugucgauguggaua

SEQ ID NO: 2037125 - RNA, 18 nt, Human herpesvirus 6
cagucacacacagggugc

SEQ ID NO: 2037126 - RNA, 17 nt, Human herpesvirus 6
uuaugcgacugcaagag

SEQ ID NO: 2037127 - RNA, 14 nt, Human herpesvirus 6
aaagcugcuaacgc

SEQ ID NO: 2037128 - RNA, 14 nt, Human herpesvirus 6
cagaccacaccccu

SEQ ID NO: 2037129 - RNA, 22 nt, Human herpesvirus 6
gaaauuacaagguacacaauau

SEQ ID NO: 2037130 - RNA, 13 nt, Human herpesvirus 6
uuuaaggauaaga

SEQ ID NO: 2037131 - RNA, 21 nt, Human herpesvirus 6
ucagaagagaugaaagacaga

SEQ ID NO: 2037132 - RNA, 14 nt, Human herpesvirus 6
caugucggccucug

SEQ ID NO: 2037133 - RNA, 21 nt, Human herpesvirus 6
accagcauguuuucuccucaa

SEQ ID NO: 2037134 - RNA, 21 nt, Human herpesvirus 6
uuuuucucguuccccaugucu

SEQ ID NO: 2037135 - RNA, 20 nt, Human herpesvirus 6
ggaaagaagauuuuccuagu

SEQ ID NO: 2037136 - RNA, 19 nt, Human herpesvirus 6
aacgcgucaacaaacaauu

SEQ ID NO: 2037137 - RNA, 22 nt, Human herpesvirus 6
ucggaaaacuaaaagucagugg

SEQ ID NO: 2037138 - RNA, 23 nt, Human herpesvirus 6
aacacgugggucagauaguugau

SEQ ID NO: 2037139 - RNA, 21 nt, Human herpesvirus 6
acaaauucuuacauuuuguac

SEQ ID NO: 2037140 - RNA, 18 nt, Human herpesvirus 6
aaacuuuuaaaacaggaa

SEQ ID NO: 2037141 - RNA, 16 nt, Human herpesvirus 6
cauauaauauuuccau

SEQ ID NO: 2037142 - RNA, 14 nt, Human herpesvirus 6
uauugucgaagaac

SEQ ID NO: 2037143 - RNA, 16 nt, Human herpesvirus 6
augaauguaacugguu

SEQ ID NO: 2037144 - RNA, 12 nt, Human herpesvirus 6
agaggaaagaau

SEQ ID NO: 2037145 - RNA, 14 nt, Human herpesvirus 6
aacacagcacauaa

SEQ ID NO: 2037146 - RNA, 19 nt, Human herpesvirus 6
cguuauucguaagugggua

SEQ ID NO: 2037147 - RNA, 18 nt, Human herpesvirus 6
cuuuaacuuauguuucua

SEQ ID NO: 2037148 - RNA, 22 nt, Human herpesvirus 6
gauuucaagauuguguuucugu

SEQ ID NO: 2037149 - RNA, 22 nt, Human herpesvirus 6
caaaauuugaaauaucagaaau

SEQ ID NO: 2037150 - RNA, 21 nt, Human herpesvirus 6
uaaugcgguucgacagagaua

SEQ ID NO: 2037151 - RNA, 19 nt, Human herpesvirus 6
uuaaugaaugugcuuugga

SEQ ID NO: 2037152 - RNA, 15 nt, Human herpesvirus 6
uccaaccccucccau

SEQ ID NO: 2037153 - RNA, 15 nt, Human herpesvirus 6
gcuaauaugaacaau

SEQ ID NO: 2037154 - RNA, 16 nt, Human herpesvirus 6
ggcaucugcggcucug

SEQ ID NO: 2037155 - RNA, 19 nt, Human herpesvirus 6
aaucuguaagauuaaaugu

SEQ ID NO: 2037156 - RNA, 20 nt, Human herpesvirus 6
agcguguuauuucgggacaa

SEQ ID NO: 2037157 - RNA, 15 nt, Human herpesvirus 6
ucugucugcagcuua

SEQ ID NO: 2037158 - RNA, 23 nt, Human herpesvirus 6
gggguguguaugcguggggugcg

SEQ ID NO: 2037159 - RNA, 20 nt, Human herpesvirus 6
uaauuuaguguuuaauguaa

SEQ ID NO: 2037160 - RNA, 20 nt, Human herpesvirus 6
ucauaaagauaaagaucagu

SEQ ID NO: 2037161 - RNA, 18 nt, Human herpesvirus 6
gagcgggcuaauguaugc

SEQ ID NO: 2037162 - RNA, 20 nt, Human herpesvirus 6
agacauugcuuucucuuuuu

SEQ ID NO: 2037163 - RNA, 14 nt, Human herpesvirus 6
ccgaugaauucugg

SEQ ID NO: 2037164 - RNA, 14 nt, Human herpesvirus 6
gaacaaaaugaggg

SEQ ID NO: 2037165 - RNA, 21 nt, Human herpesvirus 6
cggggcggacggggacgacac

SEQ ID NO: 2037166 - RNA, 18 nt, Human herpesvirus 6
gugauuucacgugaaaua

SEQ ID NO: 2037167 - RNA, 23 nt, Human herpesvirus 6
aacugguguaaauacccuggggu

SEQ ID NO: 2037168 - RNA, 23 nt, Human herpesvirus 6
aauaaggaaaaauaucgaaauaa

SEQ ID NO: 2037169 - RNA, 20 nt, Human herpesvirus 6
ggggucuuuccugcacaggc

SEQ ID NO: 2037170 - RNA, 13 nt, Human herpesvirus 6
uacuaauguggau

SEQ ID NO: 2037171 - RNA, 16 nt, Human herpesvirus 6
ucuaaaacaagacaga

SEQ ID NO: 2037172 - RNA, 17 nt, Human herpesvirus 6
gaagcgguagaguggag

SEQ ID NO: 2037173 - RNA, 14 nt, Human herpesvirus 6
uuauaaaaccgauc

SEQ ID NO: 2037174 - RNA, 16 nt, Human herpesvirus 6
acaagguucgucgaga

SEQ ID NO: 2037175 - RNA, 11 nt, Human herpesvirus 6
gaaaacaaugc

SEQ ID NO: 2037176 - RNA, 14 nt, Human herpesvirus 6
aagcacaaaaccag

SEQ ID NO: 2037177 - RNA, 18 nt, Human herpesvirus 6
gaucaacggccuggagua

SEQ ID NO: 2037178 - RNA, 15 nt, Human herpesvirus 6
ccaguauugaagaaa

SEQ ID NO: 2037179 - RNA, 15 nt, Human herpesvirus 6
guuugaaacacugca

SEQ ID NO: 2037180 - RNA, 15 nt, Human herpesvirus 6
gagacgaaacauagu

SEQ ID NO: 2037181 - RNA, 16 nt, Human herpesvirus 6
ccugggagcucucccu

SEQ ID NO: 2037182 - RNA, 18 nt, Human herpesvirus 6
uaaggaagauucagagug

SEQ ID NO: 2037183 - RNA, 20 nt, Human herpesvirus 6
caguuauuacauuuuuggau

SEQ ID NO: 2037184 - RNA, 14 nt, Human herpesvirus 6
caagaaaagaaaca

SEQ ID NO: 2037185 - RNA, 23 nt, Human herpesvirus 6
aggugacucuucucuaaaaacua

SEQ ID NO: 2037186 - RNA, 18 nt, Human herpesvirus 6
cguccgaguuagcagaag

SEQ ID NO: 2037187 - RNA, 19 nt, Human herpesvirus 6
agggugcuuugcuucagug

SEQ ID NO: 2037188 - RNA, 17 nt, Human herpesvirus 6
uguaauacaucaacaaa

SEQ ID NO: 2037189 - RNA, 19 nt, Human herpesvirus 6
gccuugucaucaugugugc

SEQ ID NO: 2037190 - RNA, 15 nt, Human herpesvirus 6
aagauguugcaauaa

SEQ ID NO: 2037191 - RNA, 17 nt, Human herpesvirus 6
agagcgcaucuuuaaca

SEQ ID NO: 2037192 - RNA, 22 nt, Human herpesvirus 6
uugucugauauggcaaauuuua

SEQ ID NO: 2037193 - RNA, 19 nt, Human herpesvirus 6
gucggacgacgggcggggc

SEQ ID NO: 2037194 - RNA, 22 nt, Human herpesvirus 6
ugacggaggcgacgaaagagga

SEQ ID NO: 2037195 - RNA, 14 nt, Human herpesvirus 6
gagaguggggacaa

SEQ ID NO: 2037196 - RNA, 15 nt, Human herpesvirus 6
acacgcuggagcagc

SEQ ID NO: 2037197 - RNA, 12 nt, Human herpesvirus 6
guaauacaucau

SEQ ID NO: 2037198 - RNA, 20 nt, Human herpesvirus 6
ccagcauguuuucuccucaa

SEQ ID NO: 2037199 - RNA, 22 nt, Human herpesvirus 6
uuaucgcccgguaaauuacuag

SEQ ID NO: 2037200 - RNA, 23 nt, Human herpesvirus 6
accgcaguuucuguuuuucucgg

SEQ ID NO: 2037201 - RNA, 20 nt, Human herpesvirus 6
uccaauccaauauaacuuua

SEQ ID NO: 2037202 - RNA, 20 nt, Human herpesvirus 6
uucgacaacggaccaggaca

SEQ ID NO: 2037203 - RNA, 22 nt, Human herpesvirus 6
uuggcgccaaaaaaauacagua

SEQ ID NO: 2037204 - RNA, 14 nt, Human herpesvirus 6
ccgcaguuccuguu

SEQ ID NO: 2037205 - RNA, 18 nt, Human herpesvirus 6
uaaaauuucgauguggag

SEQ ID NO: 2037206 - RNA, 16 nt, Human herpesvirus 6
acgugcuugucucaca

SEQ ID NO: 2037207 - RNA, 13 nt, Human herpesvirus 6
uaacuuuuuguau

SEQ ID NO: 2037208 - RNA, 21 nt, Human herpesvirus 6
augcuacccacaugaaaucac

SEQ ID NO: 2037209 - RNA, 15 nt, Human herpesvirus 6
uguaauaaaguguca

SEQ ID NO: 2037210 - RNA, 17 nt, Human herpesvirus 6
agucaguuuaauaguuu

SEQ ID NO: 2037211 - RNA, 18 nt, Human herpesvirus 6
cccagauuuguguucaag

SEQ ID NO: 2037212 - RNA, 15 nt, Human herpesvirus 6
ucugcauuuauauca

SEQ ID NO: 2037213 - RNA, 15 nt, Human herpesvirus 6
ugcaaguuugaauuu

SEQ ID NO: 2037214 - RNA, 20 nt, Human herpesvirus 6
ugugaugcguugcauuuugg

SEQ ID NO: 2037215 - RNA, 18 nt, Human herpesvirus 6
uucuuacacaaauugacc

SEQ ID NO: 2037216 - RNA, 21 nt, Human herpesvirus 6
uuaguaugggugagugcauua

SEQ ID NO: 2037217 - RNA, 18 nt, Human herpesvirus 6
aauauaacaguaggagau

SEQ ID NO: 2037218 - RNA, 19 nt, Human herpesvirus 6
gagacgacucgcggagugg

SEQ ID NO: 2037219 - RNA, 19 nt, Human herpesvirus 6
ggcuacgacacgcuggagc

SEQ ID NO: 2037220 - RNA, 19 nt, Human herpesvirus 6
cuuaaaaaaacacaguauu

SEQ ID NO: 2037221 - RNA, 16 nt, Human herpesvirus 6
agugaaagcagucagu

SEQ ID NO: 2037222 - RNA, 22 nt, Human herpesvirus 6
agucaggaaaaaguuaagaaaa

SEQ ID NO: 2037223 - RNA, 20 nt, Human herpesvirus 6
gguauaucucggacucauag

SEQ ID NO: 2037224 - RNA, 19 nt, Human herpesvirus 6
uggcgcgcauguugcaguu

SEQ ID NO: 2037225 - RNA, 13 nt, Human herpesvirus 6
ucagacauccaga

SEQ ID NO: 2037226 - RNA, 15 nt, Human herpesvirus 6
uuuucggauuuugaa

SEQ ID NO: 2037227 - RNA, 21 nt, Human herpesvirus 6
gcgccuuguguaucugugaac

SEQ ID NO: 2037228 - RNA, 15 nt, Human herpesvirus 6
ucgcuggacuuagug

SEQ ID NO: 2037229 - RNA, 18 nt, Human herpesvirus 6
ugucgaagucuucuuggg

SEQ ID NO: 2037230 - RNA, 23 nt, Human herpesvirus 6
guagaacggaaaaaaaaucuauc

SEQ ID NO: 2037231 - RNA, 16 nt, Human herpesvirus 6
auuguaauuuugaauu

SEQ ID NO: 2037232 - RNA, 22 nt, Human herpesvirus 6
caucucgugcaaaagcugacua

SEQ ID NO: 2037233 - RNA, 13 nt, Human herpesvirus 6
cggcggggggacg

SEQ ID NO: 2037234 - RNA, 18 nt, Human herpesvirus 6
acguugguaucaguggau

SEQ ID NO: 2037235 - RNA, 17 nt, Human herpesvirus 6
gcgcggagcacgcacga

SEQ ID NO: 2037236 - RNA, 14 nt, Human herpesvirus 6
aguaucgagauuuu

SEQ ID NO: 2037237 - RNA, 23 nt, Human herpesvirus 6
acuuuccccauauuguguaacuc

SEQ ID NO: 2037238 - RNA, 14 nt, Human herpesvirus 6
caauuaguccauua

SEQ ID NO: 2037239 - RNA, 23 nt, Human herpesvirus 6
auacggcagcggaagugaaagca

SEQ ID NO: 2037240 - RNA, 13 nt, Human herpesvirus 6
auguuuggauaau

SEQ ID NO: 2037241 - RNA, 21 nt, Human herpesvirus 6
gcggaauguuuguuuuuguca

SEQ ID NO: 2037242 - RNA, 13 nt, Human herpesvirus 6
ccgagggcggacg

SEQ ID NO: 2037243 - RNA, 15 nt, Human herpesvirus 6
ccgccggcccaucca

SEQ ID NO: 2037244 - RNA, 20 nt, Human herpesvirus 6
caucaauuccggccuaggac

SEQ ID NO: 2037245 - RNA, 12 nt, Human herpesvirus 6
ugugauaugcaa

SEQ ID NO: 2037246 - RNA, 17 nt, Human herpesvirus 6
acuauugacauaggaau

SEQ ID NO: 2037247 - RNA, 21 nt, Human herpesvirus 6
ugcuaagggugccguuauucc

SEQ ID NO: 2037248 - RNA, 17 nt, Human herpesvirus 6
aauucgucgaguuguau

SEQ ID NO: 2037249 - RNA, 15 nt, Human herpesvirus 6
augucggccucugcc

SEQ ID NO: 2037250 - RNA, 10 nt, Human herpesvirus 6
ugcacaggcg

SEQ ID NO: 2037251 - RNA, 14 nt, Human herpesvirus 6
agacgccacgggca

SEQ ID NO: 2037252 - RNA, 22 nt, Human herpesvirus 6
uauuuacugagcaaagaaauga

SEQ ID NO: 2037253 - RNA, 16 nt, Human herpesvirus 6
aggcgaacgagaacuc

SEQ ID NO: 2037254 - RNA, 18 nt, Human herpesvirus 6
gaaaaagguggcaucaga

SEQ ID NO: 2037255 - RNA, 14 nt, Human herpesvirus 6
uauuuccugcccag

SEQ ID NO: 2037256 - RNA, 12 nt, Human herpesvirus 6
gaccagccagau

SEQ ID NO: 2037257 - RNA, 16 nt, Human herpesvirus 6
cugacuguaccauugu

SEQ ID NO: 2037258 - RNA, 12 nt, Human herpesvirus 6
aucccuaauaaa

SEQ ID NO: 2037259 - RNA, 17 nt, Human herpesvirus 6
caugcauuuuguauuua

SEQ ID NO: 2037260 - RNA, 14 nt, Human herpesvirus 6
aaaacuaugugcau

SEQ ID NO: 2037261 - RNA, 21 nt, Human herpesvirus 6
cggguaaacgcgcgccggugc

SEQ ID NO: 2037262 - RNA, 13 nt, Human herpesvirus 6
ccaagaaaaagaa

SEQ ID NO: 2037263 - RNA, 23 nt, Human herpesvirus 6
ccuuucucugcgccaaccuucua

SEQ ID NO: 2037264 - RNA, 14 nt, Human herpesvirus 6
ugcauugugugggg

SEQ ID NO: 2037265 - RNA, 14 nt, Human herpesvirus 6
gaggggaacacgcc

SEQ ID NO: 2037266 - RNA, 23 nt, Human herpesvirus 6
augauaaauugaugaaauuguga

SEQ ID NO: 2037267 - RNA, 21 nt, Human herpesvirus 6
accucuaaaacaagacagacc

SEQ ID NO: 2037268 - RNA, 13 nt, Human herpesvirus 6
cguaacgcggcaa

SEQ ID NO: 2037269 - RNA, 17 nt, Human herpesvirus 6
auuuuauuggcaaccug

SEQ ID NO: 2037270 - RNA, 23 nt, Human herpesvirus 6
acgggcgucaucgguggcagagg

SEQ ID NO: 2037271 - RNA, 16 nt, Human herpesvirus 6
aaaaucuauugaagau

SEQ ID NO: 2037272 - RNA, 12 nt, Human herpesvirus 6
gcuuuaaagcag

SEQ ID NO: 2037273 - RNA, 19 nt, Human herpesvirus 6
ugacgccuugauguuuccu

SEQ ID NO: 2037274 - RNA, 19 nt, Human herpesvirus 6
ugauugucuuuucuggaaa

SEQ ID NO: 2037275 - RNA, 14 nt, Human herpesvirus 6
auuuuguacaguag

SEQ ID NO: 2037276 - RNA, 21 nt, Human herpesvirus 6
auuuuuuggaagaaauugcaa

SEQ ID NO: 2037277 - RNA, 14 nt, Human herpesvirus 6
guugauuacgucaa

SEQ ID NO: 2037278 - RNA, 14 nt, Human herpesvirus 6
cugugcucuuuaua

SEQ ID NO: 2037279 - RNA, 16 nt, Human herpesvirus 6
gguuggggucuuuccu

SEQ ID NO: 2037280 - RNA, 15 nt, Human herpesvirus 6
auuaacaaauuacaa

SEQ ID NO: 2037281 - RNA, 23 nt, Human herpesvirus 6
aauuuuauuaacuguaaaaagug

SEQ ID NO: 2037282 - RNA, 16 nt, Human herpesvirus 6
acauaucgagccaaag

SEQ ID NO: 2037283 - RNA, 15 nt, Human herpesvirus 6
ucaucacaaaguuua

SEQ ID NO: 2037284 - RNA, 22 nt, Human herpesvirus 6
accaucagcccccagcugaaau

SEQ ID NO: 2037285 - RNA, 16 nt, Human herpesvirus 6
gcagaucuaucacagg

SEQ ID NO: 2037286 - RNA, 16 nt, Human herpesvirus 6
aaccuguuuccagaau

SEQ ID NO: 2037287 - RNA, 19 nt, Human herpesvirus 6
aacagauaguguuuucuga

SEQ ID NO: 2037288 - RNA, 18 nt, Human herpesvirus 6
gaguaacggaaaacgagu

SEQ ID NO: 2037289 - RNA, 16 nt, Human herpesvirus 6
acagcagcagcauuaa

SEQ ID NO: 2037290 - RNA, 20 nt, Human herpesvirus 6
caaucaaucuucuggguggg

SEQ ID NO: 2037291 - RNA, 17 nt, Human herpesvirus 6
ccucgugcucugccucg

SEQ ID NO: 2037292 - RNA, 18 nt, Human herpesvirus 6
auagcucucccuuaaaga

SEQ ID NO: 2037293 - RNA, 19 nt, Human herpesvirus 6
ugucggucagacagugagu

SEQ ID NO: 2037294 - RNA, 17 nt, Human herpesvirus 6
auacugaaguuaauagg

SEQ ID NO: 2037295 - RNA, 23 nt, Human herpesvirus 6
uuuacauuaaacacuaaauuacc

SEQ ID NO: 2037296 - RNA, 16 nt, Human herpesvirus 6
agguguuuccugccca

SEQ ID NO: 2037297 - RNA, 21 nt, Human herpesvirus 6
gagcacgcacgacaacacgcc

SEQ ID NO: 2037298 - RNA, 19 nt, Human herpesvirus 6
accaccaacacaccugccu

SEQ ID NO: 2037299 - RNA, 13 nt, Human herpesvirus 6
aauauuuccugcc

SEQ ID NO: 2037300 - RNA, 18 nt, Human herpesvirus 6
uauucacggcuaauauga

SEQ ID NO: 2037301 - RNA, 18 nt, Human herpesvirus 6
agcccuaauguuaaauaa

SEQ ID NO: 2037302 - RNA, 13 nt, Human herpesvirus 6
uaagauuaaaugu

SEQ ID NO: 2037303 - RNA, 18 nt, Human herpesvirus 6
aguaauauaggauuuccc

SEQ ID NO: 2037304 - RNA, 15 nt, Human herpesvirus 6
cuuuaacuuuuugca

SEQ ID NO: 2037305 - RNA, 23 nt, Human herpesvirus 6
uaccacaucaccgauaaaaacuc

SEQ ID NO: 2037306 - RNA, 15 nt, Human herpesvirus 6
aaccuuauacagaug

SEQ ID NO: 2037307 - RNA, 21 nt, Human herpesvirus 6
uuguauauuuuuuuuuauuuu

SEQ ID NO: 2037308 - RNA, 15 nt, Human herpesvirus 6
ucuuuauuaaauguu

SEQ ID NO: 2037309 - RNA, 18 nt, Human herpesvirus 6
cuucugccugaaaaugaa

SEQ ID NO: 2037310 - RNA, 18 nt, Human herpesvirus 6
aauuacaagguacacaau

SEQ ID NO: 2037311 - RNA, 17 nt, Human herpesvirus 6
uuucgccaagaaaaaga

SEQ ID NO: 2037312 - RNA, 14 nt, Human herpesvirus 6
uucagucucagcaa

SEQ ID NO: 2037313 - RNA, 15 nt, Human herpesvirus 6
cuagcuuuucauaug

SEQ ID NO: 2037314 - RNA, 20 nt, Human herpesvirus 6
gguaauuuaguguuuaaugu

SEQ ID NO: 2037315 - RNA, 19 nt, Human herpesvirus 6
agugaaaaagguggcauca

SEQ ID NO: 2037316 - RNA, 16 nt, Human herpesvirus 6
uucaaugcguuucuuc

SEQ ID NO: 2037317 - RNA, 23 nt, Human herpesvirus 6
gcgguauaaugcaugauggugcg

SEQ ID NO: 2037318 - RNA, 13 nt, Human herpesvirus 6
aaaaaacaacuuu

SEQ ID NO: 2037319 - RNA, 22 nt, Human herpesvirus 6
uguauuguagcagcuggcgaaa

SEQ ID NO: 2037320 - RNA, 21 nt, Human herpesvirus 6
cauuguaaauagguaaacugu

SEQ ID NO: 2037321 - RNA, 15 nt, Human herpesvirus 6
cauagaaaaaugaga

SEQ ID NO: 2037322 - RNA, 15 nt, Human herpesvirus 6
cuuuuuaaucaugau

SEQ ID NO: 2037323 - RNA, 15 nt, Human herpesvirus 6
aaguaagcaccuuag

SEQ ID NO: 2037324 - RNA, 22 nt, Human herpesvirus 6
aggggaacacgccggggaccga

SEQ ID NO: 2037325 - RNA, 19 nt, Human herpesvirus 6
aguuccuguuuuucucgga

SEQ ID NO: 2037326 - RNA, 20 nt, Human herpesvirus 6
caggggaggagcguugccgu

SEQ ID NO: 2037327 - RNA, 21 nt, Human herpesvirus 6
aacuuuuuucggauuuugaau

SEQ ID NO: 2037328 - RNA, 19 nt, Human herpesvirus 6
gccuggcacggugccaaag

SEQ ID NO: 2037329 - RNA, 19 nt, Human herpesvirus 6
uggagcagcuuccacgcga

SEQ ID NO: 2037330 - RNA, 13 nt, Human herpesvirus 6
uggcagguaacca

SEQ ID NO: 2037331 - RNA, 24 nt, Human herpesvirus 6
gccuguuccacgcgcgugucggcu

SEQ ID NO: 2037332 - RNA, 18 nt, Human herpesvirus 6
caaugcagaacaacagca

SEQ ID NO: 2037333 - RNA, 21 nt, Human herpesvirus 6
aaauaaaaacaccucuaaaac

SEQ ID NO: 2037334 - RNA, 17 nt, Human herpesvirus 6
ucuucgauccaauaaga

SEQ ID NO: 2037335 - RNA, 12 nt, Human herpesvirus 6
gcuggagcagcu

SEQ ID NO: 2037336 - RNA, 20 nt, Human herpesvirus 6
gaagacauuaauacugguuu

SEQ ID NO: 2037337 - RNA, 13 nt, Human herpesvirus 6
uucuucuguaaau

SEQ ID NO: 2037338 - RNA, 21 nt, Human herpesvirus 6
aaucggacaaugcagaacaac

SEQ ID NO: 2037339 - RNA, 15 nt, Human herpesvirus 6
guuuauugucaaaua

SEQ ID NO: 2037340 - RNA, 20 nt, Human herpesvirus 6
cuaucauuuuuuugauuuac

SEQ ID NO: 2037341 - RNA, 19 nt, Human herpesvirus 6
aucaaaucggacaaugcag

SEQ ID NO: 2037342 - RNA, 14 nt, Human herpesvirus 6
aaucugagugaucu

SEQ ID NO: 2037343 - RNA, 17 nt, Human herpesvirus 6
auguuuaaguaaaacaa

SEQ ID NO: 2037344 - RNA, 14 nt, Human herpesvirus 6
aaucauuguuugaa

SEQ ID NO: 2037345 - RNA, 14 nt, Human herpesvirus 6
gaauugguuugcuu

SEQ ID NO: 2037346 - RNA, 12 nt, Human herpesvirus 6
cugcaaaacaaa

SEQ ID NO: 2037347 - RNA, 21 nt, Human herpesvirus 6
cuguucgauguacaguuucuc

SEQ ID NO: 2037348 - RNA, 14 nt, Human herpesvirus 6
uauaaauguagcau

SEQ ID NO: 2037349 - RNA, 21 nt, Human herpesvirus 6
uuuaguaugggugagugcauu

SEQ ID NO: 2037350 - RNA, 14 nt, Human herpesvirus 6
uggaucgaaugcua

SEQ ID NO: 2037351 - RNA, 16 nt, Human herpesvirus 6
aaauauggcagagcug

SEQ ID NO: 2037352 - RNA, 17 nt, Human herpesvirus 6
ucucgugguacaauaaa

SEQ ID NO: 2037353 - RNA, 22 nt, Human herpesvirus 6
aaugccucuccuauaaauacug

SEQ ID NO: 2037354 - RNA, 15 nt, Human herpesvirus 6
uggagggaauuguau

SEQ ID NO: 2037355 - RNA, 22 nt, Human herpesvirus 6
agcagcagaguccggcgcacgc

SEQ ID NO: 2037356 - RNA, 15 nt, Human herpesvirus 6
uucaguaucuguuuu

SEQ ID NO: 2037357 - RNA, 14 nt, Human herpesvirus 6
cagauaaccucacu

SEQ ID NO: 2037358 - RNA, 19 nt, Human herpesvirus 6
cgguccacacgccaguccg

SEQ ID NO: 2037359 - RNA, 24 nt, Human herpesvirus 6
uacaucaucgccuuuuacuuacau

SEQ ID NO: 2037360 - RNA, 18 nt, Human herpesvirus 6
auguucuuuauuaaaugu

SEQ ID NO: 2037361 - RNA, 14 nt, Human herpesvirus 6
aacugaauuugcau

SEQ ID NO: 2037362 - RNA, 14 nt, Human herpesvirus 6
agaaaaaacgauau

SEQ ID NO: 2037363 - RNA, 17 nt, Human herpesvirus 6
uacacgaaaaacauuuc

SEQ ID NO: 2037364 - RNA, 19 nt, Human herpesvirus 6
uguaauacaucaacaaaca

SEQ ID NO: 2037365 - RNA, 21 nt, Human herpesvirus 6
guguucguuaaaaaaaaugug

SEQ ID NO: 2037366 - RNA, 11 nt, Human herpesvirus 6
cucggaaaaua

SEQ ID NO: 2037367 - RNA, 15 nt, Human herpesvirus 6
ucgggcuuugugaaa

SEQ ID NO: 2037368 - RNA, 20 nt, Human herpesvirus 6
uaaaaucucguaacgcggca

SEQ ID NO: 2037369 - RNA, 14 nt, Human herpesvirus 6
auuuuuuauuucca

SEQ ID NO: 2037370 - RNA, 15 nt, Human herpesvirus 6
ucuaugagacuguuu

SEQ ID NO: 2037371 - RNA, 16 nt, Human herpesvirus 6
caugucggccucugcc

SEQ ID NO: 2037372 - RNA, 16 nt, Human herpesvirus 6
augucggccucugccg

SEQ ID NO: 2037373 - RNA, 14 nt, Human herpesvirus 6
auuugcugaugcga

SEQ ID NO: 2037374 - RNA, 22 nt, Human herpesvirus 6
gugccaccgucugggacccacg

SEQ ID NO: 2037375 - RNA, 20 nt, Human herpesvirus 6
acuuuguccuuacaaaucuu

SEQ ID NO: 2037376 - RNA, 15 nt, Human herpesvirus 6
aaaaauugacaauga

SEQ ID NO: 2037377 - RNA, 14 nt, Human herpesvirus 6
cauuguguggggug

SEQ ID NO: 2037378 - RNA, 18 nt, Human herpesvirus 6
aaugacugggagaauaag

SEQ ID NO: 2037379 - RNA, 18 nt, Human herpesvirus 6
uaggugggucagugcuua

SEQ ID NO: 2037380 - RNA, 12 nt, Human herpesvirus 6
cugccaucccuu

SEQ ID NO: 2037381 - RNA, 14 nt, Human herpesvirus 6
aagcuggaaaacua

SEQ ID NO: 2037382 - RNA, 21 nt, Human herpesvirus 6
acaucgagauucuuuaaagau

SEQ ID NO: 2037383 - RNA, 14 nt, Human herpesvirus 6
cauagaauuucuaa

SEQ ID NO: 2037384 - RNA, 19 nt, Human herpesvirus 6
cggcggggggacgggcgga

SEQ ID NO: 2037385 - RNA, 22 nt, Human herpesvirus 6
aggacuucguucuugacagaga

SEQ ID NO: 2037386 - RNA, 14 nt, Human herpesvirus 6
cuuuauuaaauguu

SEQ ID NO: 2037387 - RNA, 22 nt, Human herpesvirus 6
gaaucagaucacucagauuuca

SEQ ID NO: 2037388 - RNA, 17 nt, Human herpesvirus 6
gcguggaauuuguggaa

SEQ ID NO: 2037389 - RNA, 20 nt, Human herpesvirus 6
uaacaucucguaacgcggca

SEQ ID NO: 2037390 - RNA, 21 nt, Human herpesvirus 6
uaccuaauaauuacaauacaa

SEQ ID NO: 2037391 - RNA, 23 nt, Human herpesvirus 6
uccuucaugauauuccagacaau

SEQ ID NO: 2037392 - RNA, 18 nt, Human herpesvirus 6
gaagcgguuagagcuggg

SEQ ID NO: 2037393 - RNA, 13 nt, Human herpesvirus 6
uccauccucgaau

SEQ ID NO: 2037394 - RNA, 18 nt, Human herpesvirus 6
uauuguguaccuuguaau

SEQ ID NO: 2037395 - RNA, 13 nt, Human herpesvirus 6
aaacucaccgcau

SEQ ID NO: 2037396 - RNA, 22 nt, Human herpesvirus 6
cgcgauuuaaacaacacagcac

SEQ ID NO: 2037397 - RNA, 22 nt, Human herpesvirus 6
uuuagccuauuaagcagccgcg

SEQ ID NO: 2037398 - RNA, 19 nt, Human herpesvirus 6
aguuucuguuuuucucgga

SEQ ID NO: 2037399 - RNA, 21 nt, Human herpesvirus 6
aacggcgguaacguggauaaa

SEQ ID NO: 2037400 - RNA, 17 nt, Human herpesvirus 6
agcgugugauucaguau

SEQ ID NO: 2037401 - RNA, 13 nt, Human herpesvirus 6
aucuucuuugugc

SEQ ID NO: 2037402 - RNA, 18 nt, Human herpesvirus 6
cgaaaggugaaaugaaug

SEQ ID NO: 2037403 - RNA, 13 nt, Human herpesvirus 6
cugguuuacagca

SEQ ID NO: 2037404 - RNA, 22 nt, Human herpesvirus 6
cucgcuuaccguucaucauucc

SEQ ID NO: 2037405 - RNA, 13 nt, Human herpesvirus 6
ugccauaauuucu

SEQ ID NO: 2037406 - RNA, 22 nt, Human herpesvirus 6
aucuaaauuucuacaaaaauac

SEQ ID NO: 2037407 - RNA, 18 nt, Human herpesvirus 6
uaugugcgcguguuagaa

SEQ ID NO: 2037408 - RNA, 19 nt, Human herpesvirus 6
ccaggucuuauauuucaga

SEQ ID NO: 2037409 - RNA, 19 nt, Human herpesvirus 6
cucauguugccucuggaca

SEQ ID NO: 2037410 - RNA, 16 nt, Human herpesvirus 6
acauaguggcuaugaa

SEQ ID NO: 2037411 - RNA, 16 nt, Human herpesvirus 6
cuuaucguucacugac

SEQ ID NO: 2037412 - RNA, 13 nt, Human herpesvirus 6
aguauuaacuagu

SEQ ID NO: 2037413 - RNA, 18 nt, Human herpesvirus 6
cuuccaguauugaagaaa

SEQ ID NO: 2037414 - RNA, 16 nt, Human herpesvirus 6
cgaaggagauuucagg

SEQ ID NO: 2037415 - RNA, 18 nt, Human herpesvirus 6
aaauaaaaaauauuaauu

SEQ ID NO: 2037416 - RNA, 23 nt, Human herpesvirus 6
gacucuauggugaguaccuguac

SEQ ID NO: 2037417 - RNA, 14 nt, Human herpesvirus 6
acauuguagaaaga

SEQ ID NO: 2037418 - RNA, 22 nt, Human herpesvirus 6
cucucucggcugacaacaaagg

SEQ ID NO: 2037419 - RNA, 13 nt, Human herpesvirus 6
aaaaaucagaauc

SEQ ID NO: 2037420 - RNA, 13 nt, Human herpesvirus 6
cugagaacgggca

SEQ ID NO: 2037421 - RNA, 19 nt, Human herpesvirus 6
agucucacgcgaucuaaua

SEQ ID NO: 2037422 - RNA, 16 nt, Human herpesvirus 6
aaaccuuauacagaug

SEQ ID NO: 2037423 - RNA, 15 nt, Human herpesvirus 6
ccgaauguucucaga

SEQ ID NO: 2037424 - RNA, 16 nt, Human herpesvirus 6
agagcuggggaguugc

SEQ ID NO: 2037425 - RNA, 16 nt, Human herpesvirus 6
augggugagugcauua

SEQ ID NO: 2037426 - RNA, 20 nt, Human herpesvirus 6
ugacuguccgcaugagcgac

SEQ ID NO: 2037427 - RNA, 18 nt, Human herpesvirus 6
caauaucaccuuacaaau

SEQ ID NO: 2037428 - RNA, 16 nt, Human herpesvirus 6
cgacuaccacaucacc

SEQ ID NO: 2037429 - RNA, 14 nt, Human herpesvirus 6
cucuaaaagcugcu

SEQ ID NO: 2037430 - RNA, 21 nt, Human herpesvirus 6
gugauuccucaaaugaauuua

SEQ ID NO: 2037431 - RNA, 16 nt, Human herpesvirus 6
gcaaccuugacagaua

SEQ ID NO: 2037432 - RNA, 15 nt, Human herpesvirus 6
gagguguuuccugcc

SEQ ID NO: 2037433 - RNA, 17 nt, Human herpesvirus 6
acauuuugguuucccuc

SEQ ID NO: 2037434 - RNA, 19 nt, Human herpesvirus 6
ggucugcaaaaaugucugc

SEQ ID NO: 2037435 - RNA, 22 nt, Human herpesvirus 6
caagauuguguuucugucuuua

SEQ ID NO: 2037436 - RNA, 12 nt, Human herpesvirus 6
cgggcggggcgg

SEQ ID NO: 2037437 - RNA, 21 nt, Human herpesvirus 6
aacgagaacgcucuugccgaa

SEQ ID NO: 2037438 - RNA, 13 nt, Human herpesvirus 6
cuaaacuuuacau

SEQ ID NO: 2037439 - RNA, 20 nt, Human herpesvirus 6
ugagagaaugcaacauccug

SEQ ID NO: 2037440 - RNA, 21 nt, Human herpesvirus 6
cgaaaacucuaaaagcugcua

SEQ ID NO: 2037441 - RNA, 21 nt, Human herpesvirus 6
aucaaauaucugaaacacuga

SEQ ID NO: 2037442 - RNA, 18 nt, Human herpesvirus 6
uucggagugcguccguuu

SEQ ID NO: 2037443 - RNA, 16 nt, Human herpesvirus 6
ugccaccgucugggac

SEQ ID NO: 2037444 - RNA, 23 nt, Human herpesvirus 6
uaaaagacguuugcuguuuucac

SEQ ID NO: 2037445 - RNA, 16 nt, Human herpesvirus 6
cuaagauugugcaguu

SEQ ID NO: 2037446 - RNA, 16 nt, Human herpesvirus 6
auucacauuaccucug

SEQ ID NO: 2037447 - RNA, 17 nt, Human herpesvirus 6
gacccacgguggccugg

SEQ ID NO: 2037448 - RNA, 19 nt, Human herpesvirus 6
uaaguggguacaaugaaaa

SEQ ID NO: 2037449 - RNA, 20 nt, Human herpesvirus 6
agcgaucauaaaacugccaa

SEQ ID NO: 2037450 - RNA, 19 nt, Human herpesvirus 6
gacaguauuuacugagcaa

SEQ ID NO: 2037451 - RNA, 14 nt, Human herpesvirus 6
cugaaaccaaagca

SEQ ID NO: 2037452 - RNA, 19 nt, Human herpesvirus 6
uaaaaaaguguaacauccc

SEQ ID NO: 2037453 - RNA, 21 nt, Human herpesvirus 6
aauuguggauuuucagacaua

SEQ ID NO: 2037454 - RNA, 18 nt, Human herpesvirus 6
uacacgcauuugcaauug

SEQ ID NO: 2037455 - RNA, 16 nt, Human herpesvirus 6
gcuauggcuuccggaa

SEQ ID NO: 2037456 - RNA, 22 nt, Human herpesvirus 6
gaaucaaugaaaaaaaaugaag

SEQ ID NO: 2037457 - RNA, 21 nt, Human herpesvirus 6
aauacuucucuuuauagagca

SEQ ID NO: 2037458 - RNA, 15 nt, Human herpesvirus 6
uuuccagguagaguu

SEQ ID NO: 2037459 - RNA, 19 nt, Human herpesvirus 6
gcauugacuauuaaacuaa

SEQ ID NO: 2037460 - RNA, 19 nt, Human herpesvirus 6
uaauuaugcauuucuuggu

SEQ ID NO: 2037461 - RNA, 19 nt, Human herpesvirus 6
uuuaaugcaaguuugaauu

SEQ ID NO: 2037462 - RNA, 19 nt, Human herpesvirus 6
uccggcugagcggagugga

SEQ ID NO: 2037463 - RNA, 18 nt, Human herpesvirus 6
uauucaagcgaagugaag

SEQ ID NO: 2037464 - RNA, 21 nt, Human herpesvirus 6
cacgacaaaacaaucagccug

SEQ ID NO: 2037465 - RNA, 17 nt, Human herpesvirus 6
gucguuggauuaaauca

SEQ ID NO: 2037466 - RNA, 20 nt, Human herpesvirus 6
agacuggaaaacuaugugca

SEQ ID NO: 2037467 - RNA, 16 nt, Human herpesvirus 6
uuaauucuuaaagcgu

SEQ ID NO: 2037468 - RNA, 15 nt, Human herpesvirus 6
gcccccauacacacc

SEQ ID NO: 2037469 - RNA, 16 nt, Human herpesvirus 6
aaaauuaaaggucagu

SEQ ID NO: 2037470 - RNA, 15 nt, Human herpesvirus 6
aacaucugcuaacgc

SEQ ID NO: 2037471 - RNA, 13 nt, Human herpesvirus 6
cggagaacgggca

SEQ ID NO: 2037472 - RNA, 20 nt, Human herpesvirus 6
accgagagccggaaaacaau

SEQ ID NO: 2037473 - RNA, 14 nt, Human herpesvirus 6
acauuuauguuucu

SEQ ID NO: 2037474 - RNA, 14 nt, Human herpesvirus 6
caaaauugacuuac

SEQ ID NO: 2037475 - RNA, 20 nt, Human herpesvirus 6
gagaucuggugaauguuucu

SEQ ID NO: 2037476 - RNA, 15 nt, Human herpesvirus 6
gucaccuguauagau

SEQ ID NO: 2037477 - RNA, 23 nt, Human herpesvirus 6
ccgcagaggcggcgaccgcagcg

SEQ ID NO: 2037478 - RNA, 18 nt, Human herpesvirus 6
caaaacauaucgagccaa

SEQ ID NO: 2037479 - RNA, 19 nt, Human herpesvirus 6
ugcauugugacagaauucu

SEQ ID NO: 2037480 - RNA, 17 nt, Human herpesvirus 6
cgcgacgugccaccguc

SEQ ID NO: 2037481 - RNA, 18 nt, Human herpesvirus 6
cggauuuaaaauggauua

SEQ ID NO: 2037482 - RNA, 20 nt, Human herpesvirus 6
cugaagaugagcagcuuugg

SEQ ID NO: 2037483 - RNA, 16 nt, Human herpesvirus 6
cagucucgggagagga

SEQ ID NO: 2037484 - RNA, 15 nt, Human herpesvirus 6
uacuacagugacuuu

SEQ ID NO: 2037485 - RNA, 22 nt, Human herpesvirus 6
agguacaaaacauggacaacuu

SEQ ID NO: 2037486 - RNA, 16 nt, Human herpesvirus 6
auauuugccugccgac

SEQ ID NO: 2037487 - RNA, 17 nt, Human herpesvirus 6
aaugaauuuauuuucaa

SEQ ID NO: 2037488 - RNA, 16 nt, Human herpesvirus 6
caagauacugguuuac

SEQ ID NO: 2037489 - RNA, 21 nt, Human herpesvirus 6
ucuuccguacuguaaguaagc

SEQ ID NO: 2037490 - RNA, 21 nt, Human herpesvirus 6
gugaucugauucgacaaauca

SEQ ID NO: 2037491 - RNA, 21 nt, Human herpesvirus 6
agaaucaaugaaaaaaaauga

SEQ ID NO: 2037492 - RNA, 16 nt, Human herpesvirus 6
cuuguguaucugugaa

SEQ ID NO: 2037493 - RNA, 16 nt, Human herpesvirus 6
accgauuuuucagugu

SEQ ID NO: 2037494 - RNA, 21 nt, Human herpesvirus 6
aagauuguguuucugucuuua

SEQ ID NO: 2037495 - RNA, 18 nt, Human herpesvirus 6
ccgaacuagaaaaacaac

SEQ ID NO: 2037496 - RNA, 17 nt, Human herpesvirus 6
gaagaccuauauguguu

SEQ ID NO: 2037497 - RNA, 15 nt, Human herpesvirus 6
agcuggggaguugcu

SEQ ID NO: 2037498 - RNA, 18 nt, Human herpesvirus 6
ggacugugaaguaaaacu

SEQ ID NO: 2037499 - RNA, 15 nt, Human herpesvirus 6
gccgccguuacuguc

SEQ ID NO: 2037500 - RNA, 18 nt, Human herpesvirus 6
acaaaagacaaaacucau

SEQ ID NO: 2037501 - RNA, 19 nt, Human herpesvirus 6
ggcucuguuuucccaggua

SEQ ID NO: 2037502 - RNA, 16 nt, Human herpesvirus 6
aacuacgguagaagcu

SEQ ID NO: 2037503 - RNA, 15 nt, Human herpesvirus 6
cacauaagacuuaua

SEQ ID NO: 2037504 - RNA, 13 nt, Human herpesvirus 6
uuuuuaauuaaaa

SEQ ID NO: 2037505 - RNA, 13 nt, Human herpesvirus 6
auaugaaaagcug

SEQ ID NO: 2037506 - RNA, 21 nt, Human herpesvirus 6
ucgcccugcuccguuuccucc

SEQ ID NO: 2037507 - RNA, 15 nt, Human herpesvirus 6
auaaaguuuaaagau

SEQ ID NO: 2037508 - RNA, 22 nt, Human herpesvirus 6
gacgugccaccgucugggaccc

SEQ ID NO: 2037509 - RNA, 13 nt, Human herpesvirus 6
gccgucaaagaca

SEQ ID NO: 2037510 - RNA, 15 nt, Human herpesvirus 6
aaauacuagcuaaaa

SEQ ID NO: 2037511 - RNA, 23 nt, Human herpesvirus 6
agaucauaaauaaaugaauagau

SEQ ID NO: 2037512 - RNA, 17 nt, Human herpesvirus 6
cguuuuccaugugaauc

SEQ ID NO: 2037513 - RNA, 15 nt, Human herpesvirus 6
uugggauguccauuu

SEQ ID NO: 2037514 - RNA, 22 nt, Human herpesvirus 6
acggccuuucuguuuuaauuaa

SEQ ID NO: 2037515 - RNA, 11 nt, Human herpesvirus 6
uucccucccac

SEQ ID NO: 2037516 - RNA, 13 nt, Human herpesvirus 6
uaauucuuaaagc

SEQ ID NO: 2037517 - RNA, 17 nt, Human herpesvirus 6
ucacgaucuacacaccg

SEQ ID NO: 2037518 - RNA, 23 nt, Human herpesvirus 6
ggucgcguucuaacccaugaaaa

SEQ ID NO: 2037519 - RNA, 21 nt, Human herpesvirus 6
gaucuaaauuucuacaaaaau

SEQ ID NO: 2037520 - RNA, 21 nt, Human herpesvirus 6
aucauauccugaaaauaaaca

SEQ ID NO: 2037521 - RNA, 20 nt, Human herpesvirus 6
cuuuuguuguuuuuuggaau

SEQ ID NO: 2037522 - RNA, 14 nt, Human herpesvirus 6
cgaaaagcaucuca

SEQ ID NO: 2037523 - RNA, 17 nt, Human herpesvirus 6
aauguccgcaaguaaaa

SEQ ID NO: 2037524 - RNA, 12 nt, Human herpesvirus 6
uucagaggugcu

SEQ ID NO: 2037525 - RNA, 17 nt, Human herpesvirus 6
ucacaauauuucacaua

SEQ ID NO: 2037526 - RNA, 14 nt, Human herpesvirus 6
ccguuucaaauagu

SEQ ID NO: 2037527 - RNA, 12 nt, Human herpesvirus 6
uccgucauacaa

SEQ ID NO: 2037528 - RNA, 18 nt, Human herpesvirus 6
uaucccuaauaaauguca

SEQ ID NO: 2037529 - RNA, 23 nt, Human herpesvirus 6
uuguaaauagguaaacuguuuuu

SEQ ID NO: 2037530 - RNA, 18 nt, Human herpesvirus 6
gguuugggggucuuuccu

SEQ ID NO: 2037531 - RNA, 22 nt, Human herpesvirus 6
acauuguaaauagguaaacugu

SEQ ID NO: 2037532 - RNA, 22 nt, Human herpesvirus 6
aacgagaacucuaaaaucucgu

SEQ ID NO: 2037533 - RNA, 14 nt, Human herpesvirus 6
gaaaacuaaaaguc

SEQ ID NO: 2037534 - RNA, 16 nt, Human herpesvirus 6
cugugaauccagacua

SEQ ID NO: 2037535 - RNA, 23 nt, Human herpesvirus 6
cuuuauauuuucgguguguauuu

SEQ ID NO: 2037536 - RNA, 17 nt, Human herpesvirus 6
uccgcauaucgccccca

SEQ ID NO: 2037537 - RNA, 17 nt, Human herpesvirus 6
uacgacgaaaacuuuua

SEQ ID NO: 2037538 - RNA, 18 nt, Human herpesvirus 6
augcgaguagauucuccg

SEQ ID NO: 2037539 - RNA, 17 nt, Human herpesvirus 6
uuccuuaauucuaaaua

SEQ ID NO: 2037540 - RNA, 16 nt, Human herpesvirus 6
ugaacuuuguaaagaa

SEQ ID NO: 2037541 - RNA, 16 nt, Human herpesvirus 6
agacaguaaaaugugu

SEQ ID NO: 2037542 - RNA, 20 nt, Human herpesvirus 6
accuguuuuagaaacauuug

SEQ ID NO: 2037543 - RNA, 20 nt, Human herpesvirus 6
gacucaaucccuuucaguuc

SEQ ID NO: 2037544 - RNA, 19 nt, Human herpesvirus 6
ggaagauacacugcaagaa

SEQ ID NO: 2037545 - RNA, 18 nt, Human herpesvirus 6
acaggaggcuauggcuuc

SEQ ID NO: 2037546 - RNA, 18 nt, Human herpesvirus 6
uuguaauuucuauguaaa

SEQ ID NO: 2037547 - RNA, 12 nt, Human herpesvirus 6
ucaaagaaaguu

SEQ ID NO: 2037548 - RNA, 14 nt, Human herpesvirus 6
gcgaacgaaaacuc

SEQ ID NO: 2037549 - RNA, 15 nt, Human herpesvirus 6
uaagagugcaacaaa

SEQ ID NO: 2037550 - RNA, 19 nt, Human herpesvirus 6
ccacaugacaccucaauua

SEQ ID NO: 2037551 - RNA, 21 nt, Human herpesvirus 6
cgugccaccgucugggaccca

SEQ ID NO: 2037552 - RNA, 22 nt, Human herpesvirus 6
ucucucaguaauuuguguaauu

SEQ ID NO: 2037553 - RNA, 22 nt, Human herpesvirus 6
acccuacaaucuguccagcuug

SEQ ID NO: 2037554 - RNA, 15 nt, Human herpesvirus 6
uacauuuucaaauuu

SEQ ID NO: 2037555 - RNA, 17 nt, Human herpesvirus 6
uuuugggaaaucuggca

SEQ ID NO: 2037556 - RNA, 14 nt, Human herpesvirus 6
cugcaaaaaacaaa

SEQ ID NO: 2037557 - RNA, 15 nt, Human herpesvirus 6
cauaagcaaauguaa

SEQ ID NO: 2037558 - RNA, 16 nt, Human herpesvirus 6
auuaggggacagagcc

SEQ ID NO: 2037559 - RNA, 15 nt, Human herpesvirus 6
aguuugugugccuuu

SEQ ID NO: 2037560 - RNA, 12 nt, Human herpesvirus 6
cugcgucaaugc

SEQ ID NO: 2037561 - RNA, 16 nt, Human herpesvirus 6
cgcaguuccuguuuuu

SEQ ID NO: 2037562 - RNA, 15 nt, Human herpesvirus 6
uguuugcaucaguga

SEQ ID NO: 2037563 - RNA, 20 nt, Human herpesvirus 6
cugcuaguuuuuuuucuuua

SEQ ID NO: 2037564 - RNA, 22 nt, Human herpesvirus 6
ugucggaggguuuuuucaucau

SEQ ID NO: 2037565 - RNA, 14 nt, Human herpesvirus 6
uggcagucugcucg

SEQ ID NO: 2037566 - RNA, 22 nt, Human herpesvirus 6
acucaacgcguaucgauuuaac

SEQ ID NO: 2037567 - RNA, 13 nt, Human herpesvirus 6
cuugcgaccuggc

SEQ ID NO: 2037568 - RNA, 15 nt, Human herpesvirus 6
cugacaaccuccgca

SEQ ID NO: 2037569 - RNA, 22 nt, Human herpesvirus 6
accaagaaucguuaaaugagau

SEQ ID NO: 2037570 - RNA, 20 nt, Human herpesvirus 6
cuccccgggugcuccgccac

SEQ ID NO: 2037571 - RNA, 23 nt, Human herpesvirus 6
aacaaugaaaauucaguuuuuau

SEQ ID NO: 2037572 - RNA, 19 nt, Human herpesvirus 6
uguuuucgguuuucuuaca

SEQ ID NO: 2037573 - RNA, 12 nt, Human herpesvirus 6
caauaagaaaca

SEQ ID NO: 2037574 - RNA, 20 nt, Human herpesvirus 6
aucuacgccuauuccaaacu

SEQ ID NO: 2037575 - RNA, 16 nt, Human herpesvirus 6
acagcaccaucaauaa

SEQ ID NO: 2037576 - RNA, 18 nt, Human herpesvirus 6
agaucacguucaggauga

SEQ ID NO: 2037577 - RNA, 16 nt, Human herpesvirus 6
cccccggaguacacgu

SEQ ID NO: 2037578 - RNA, 19 nt, Human herpesvirus 6
gaaaauauuuccugcccag

SEQ ID NO: 2037579 - RNA, 12 nt, Human herpesvirus 6
auaugaugcugu

SEQ ID NO: 2037580 - RNA, 14 nt, Human herpesvirus 6
agaaaagaaacaau

SEQ ID NO: 2037581 - RNA, 21 nt, Human herpesvirus 6
cgcauuagucacagccuugau

SEQ ID NO: 2037582 - RNA, 22 nt, Human herpesvirus 6
acuuucauaggaaguaaauaca

SEQ ID NO: 2037583 - RNA, 21 nt, Human herpesvirus 6
caaucaugugcaugaaaauau

SEQ ID NO: 2037584 - RNA, 22 nt, Human herpesvirus 6
ggcagguaaccaaaaaaacgua

SEQ ID NO: 2037585 - RNA, 22 nt, Human herpesvirus 6
auguuggcgccaaaaaaauaca

SEQ ID NO: 2037586 - RNA, 21 nt, Human herpesvirus 6
uaaaugaauagauaauaauca

SEQ ID NO: 2037587 - RNA, 18 nt, Human herpesvirus 6
gcgauucuaauaaaagac

SEQ ID NO: 2037588 - RNA, 16 nt, Human herpesvirus 6
uaauaaagugucacuc

SEQ ID NO: 2037589 - RNA, 21 nt, Human herpesvirus 6
uaccuguaaacuggucugcuu

SEQ ID NO: 2037590 - RNA, 16 nt, Human herpesvirus 6
aaaacucuaaaagcug

SEQ ID NO: 2037591 - RNA, 20 nt, Human herpesvirus 6
ugacgccuugauguuuccug

SEQ ID NO: 2037592 - RNA, 20 nt, Human herpesvirus 6
uuaucgcaacacacagugaa

SEQ ID NO: 2037593 - RNA, 11 nt, Human herpesvirus 6
gagauuucagg

SEQ ID NO: 2037594 - RNA, 15 nt, Human herpesvirus 6
caaucacauaguuuc

SEQ ID NO: 2037595 - RNA, 19 nt, Human herpesvirus 6
gcgacucccggcccagaga

SEQ ID NO: 2037596 - RNA, 15 nt, Human herpesvirus 6
ccaugugcggagaaa

SEQ ID NO: 2037597 - RNA, 17 nt, Human herpesvirus 6
cgcggucauaaacagac

SEQ ID NO: 2037598 - RNA, 21 nt, Human herpesvirus 6
aaucugaucgaaauacuucuc

SEQ ID NO: 2037599 - RNA, 22 nt, Human herpesvirus 6
guaacgccacagccuguucuug

SEQ ID NO: 2037600 - RNA, 15 nt, Human herpesvirus 6
aauaaaucgcuuaaa

SEQ ID NO: 2037601 - RNA, 22 nt, Human herpesvirus 6
auuacauaagcaaauguaacuu

SEQ ID NO: 2037602 - RNA, 15 nt, Human herpesvirus 6
gcacggugccaaagg

SEQ ID NO: 2037603 - RNA, 12 nt, Human herpesvirus 6
uuugccaaagcu

SEQ ID NO: 2037604 - RNA, 22 nt, Human herpesvirus 6
agaugaaaccuagauguaaauu

SEQ ID NO: 2037605 - RNA, 22 nt, Human herpesvirus 6
cuucacuuugggcgauggaugu

SEQ ID NO: 2037606 - RNA, 16 nt, Human herpesvirus 6
uacuaguuuucacacg

SEQ ID NO: 2037607 - RNA, 12 nt, Human herpesvirus 6
cggaguugcagu

SEQ ID NO: 2037608 - RNA, 15 nt, Human herpesvirus 6
acugugucuguucaa

SEQ ID NO: 2037609 - RNA, 22 nt, Human herpesvirus 6
agaacaugugacacgauuucug

SEQ ID NO: 2037610 - RNA, 22 nt, Human herpesvirus 6
accgcggccguucucucuccuc

SEQ ID NO: 2037611 - RNA, 15 nt, Human herpesvirus 6
auauaaaagcuaaau

SEQ ID NO: 2037612 - RNA, 22 nt, Human herpesvirus 6
uucccgccaaggcuaugugucu

SEQ ID NO: 2037613 - RNA, 18 nt, Human herpesvirus 6
cgcugcggucgccgccuc

SEQ ID NO: 2037614 - RNA, 20 nt, Human herpesvirus 6
auucgacgaucgcgaagccu

SEQ ID NO: 2037615 - RNA, 16 nt, Human herpesvirus 6
aaggugaaaugaaugu

SEQ ID NO: 2037616 - RNA, 16 nt, Human herpesvirus 6
caaauguaacuuuuug

SEQ ID NO: 2037617 - RNA, 22 nt, Human herpesvirus 6
aauucgauggguuagugaaaaa

SEQ ID NO: 2037618 - RNA, 13 nt, Human herpesvirus 6
gacgaagaggaag

SEQ ID NO: 2037619 - RNA, 12 nt, Human herpesvirus 6
aucucuacuugu

SEQ ID NO: 2037620 - RNA, 18 nt, Human herpesvirus 6
acgccuugauguuuccug

SEQ ID NO: 2037621 - RNA, 23 nt, Human herpesvirus 6
aaccgcaguuccuguuuuucuca

SEQ ID NO: 2037622 - RNA, 12 nt, Human herpesvirus 6
auuuuuuaagag

SEQ ID NO: 2037623 - RNA, 17 nt, Human herpesvirus 6
cucuauugguuaaaagg

SEQ ID NO: 2037624 - RNA, 22 nt, Human herpesvirus 6
cucuaaccguuguucuuggaga

SEQ ID NO: 2037625 - RNA, 15 nt, Human herpesvirus 6
uuaaauccuguuuug

SEQ ID NO: 2037626 - RNA, 17 nt, Human herpesvirus 6
gugcuugucucacaagc

SEQ ID NO: 2037627 - RNA, 20 nt, Human herpesvirus 6
cagaaguuucggcaacugaa

SEQ ID NO: 2037628 - RNA, 13 nt, Human herpesvirus 6
uaacuuuacauua

SEQ ID NO: 2037629 - RNA, 14 nt, Human herpesvirus 6
cagaggguuuagaa

SEQ ID NO: 2037630 - RNA, 23 nt, Human herpesvirus 6
gagaccaauuuaugucauuucau

SEQ ID NO: 2037631 - RNA, 15 nt, Human herpesvirus 6
agauuucagguucuu

SEQ ID NO: 2037632 - RNA, 22 nt, Human herpesvirus 6
cguaacgcggcaaccgcaguuc

SEQ ID NO: 2037633 - RNA, 13 nt, Human herpesvirus 6
ccaccaaaacgac

SEQ ID NO: 2037634 - RNA, 15 nt, Human herpesvirus 6
ugaauguguucacag

SEQ ID NO: 2037635 - RNA, 16 nt, Human herpesvirus 6
uuccgauaguagauuu

SEQ ID NO: 2037636 - RNA, 20 nt, Human herpesvirus 6
ugaaaauaucauuaaauugu

SEQ ID NO: 2037637 - RNA, 14 nt, Human herpesvirus 6
ccugggaaaagggu

SEQ ID NO: 2037638 - RNA, 18 nt, Human herpesvirus 6
uuugaaacugaggaacug

SEQ ID NO: 2037639 - RNA, 16 nt, Human herpesvirus 6
agcagcuagagaaauu

SEQ ID NO: 2037640 - RNA, 17 nt, Human herpesvirus 6
auuaacuguaaaaagug

SEQ ID NO: 2037641 - RNA, 15 nt, Human herpesvirus 6
cgacagggugaguca

SEQ ID NO: 2037642 - RNA, 20 nt, Human herpesvirus 6
acugccgguaacgcugucgu

SEQ ID NO: 2037643 - RNA, 15 nt, Human herpesvirus 6
aacugcuggcugaga

SEQ ID NO: 2037644 - RNA, 24 nt, Human herpesvirus 6
uuuauuuugucagucaacgcaauu

SEQ ID NO: 2037645 - RNA, 15 nt, Human herpesvirus 6
ccaggcgaacgagaa

SEQ ID NO: 2037646 - RNA, 15 nt, Human herpesvirus 6
aaauaacucagauuc

SEQ ID NO: 2037647 - RNA, 15 nt, Human herpesvirus 6
gcacuccgugucgcu

SEQ ID NO: 2037648 - RNA, 17 nt, Human herpesvirus 6
ccucugcaauagcagaa

SEQ ID NO: 2037649 - RNA, 21 nt, Human herpesvirus 6
gaaacggacacgcgcagugga

SEQ ID NO: 2037650 - RNA, 16 nt, Human herpesvirus 6
gaaagaggacgggaag

SEQ ID NO: 2037651 - RNA, 20 nt, Human herpesvirus 6
aauccagaaacuugcuccug

SEQ ID NO: 2037652 - RNA, 13 nt, Human herpesvirus 6
gagcacacacgcc

SEQ ID NO: 2037653 - RNA, 17 nt, Human herpesvirus 6
ugaguuuaucgugcaau

SEQ ID NO: 2037654 - RNA, 12 nt, Human herpesvirus 6
aaaauuaaaagu

SEQ ID NO: 2037655 - RNA, 22 nt, Human herpesvirus 6
guaauuucuauguaaacuucug

SEQ ID NO: 2037656 - RNA, 23 nt, Human herpesvirus 6
cugaauggaguaaauuaaaguuu

SEQ ID NO: 2037657 - RNA, 23 nt, Human herpesvirus 6
gagauacguguuuuugaugugcc

SEQ ID NO: 2037658 - RNA, 10 nt, Human herpesvirus 6
uguggcucuc

SEQ ID NO: 2037659 - RNA, 19 nt, Human herpesvirus 6
agauucuaaugauaaauug

SEQ ID NO: 2037660 - RNA, 16 nt, Human herpesvirus 6
aaagaucgcuuuugaa

SEQ ID NO: 2037661 - RNA, 23 nt, Human herpesvirus 6
cuaacaucugcuaacgcggcaac

SEQ ID NO: 2037662 - RNA, 16 nt, Human herpesvirus 6
guuuaaagauguguua

SEQ ID NO: 2037663 - RNA, 22 nt, Human herpesvirus 6
uguaucggcaguguaaaguucu

SEQ ID NO: 2037664 - RNA, 16 nt, Human herpesvirus 6
uuucaaaauugaguuu

SEQ ID NO: 2037665 - RNA, 21 nt, Human herpesvirus 6
agaugaauugugcguguaauu

SEQ ID NO: 2037666 - RNA, 21 nt, Human herpesvirus 6
gacaauucaaaacgacaucgc

SEQ ID NO: 2037667 - RNA, 14 nt, Human herpesvirus 6
cuauuaugugaaug

SEQ ID NO: 2037668 - RNA, 20 nt, Human herpesvirus 6
uuuuaucaugcccgaaugug

SEQ ID NO: 2037669 - RNA, 22 nt, Human herpesvirus 6
acaguuuaccuauuuacaaugu

SEQ ID NO: 2037670 - RNA, 15 nt, Human herpesvirus 6
uaagauugugcaguu

SEQ ID NO: 2037671 - RNA, 19 nt, Human herpesvirus 6
guuaggacacuuucaaaau

SEQ ID NO: 2037672 - RNA, 21 nt, Human herpesvirus 6
uucuuguugaguuucagcaga

SEQ ID NO: 2037673 - RNA, 20 nt, Human herpesvirus 6
auuacacuuucuuguaguau

SEQ ID NO: 2037674 - RNA, 12 nt, Human herpesvirus 6
acagcggacagc

SEQ ID NO: 2037675 - RNA, 18 nt, Human herpesvirus 6
uguuuuauguauuaauuu

SEQ ID NO: 2037676 - RNA, 16 nt, Human herpesvirus 6
ucucuuuuuaauucca

SEQ ID NO: 2037677 - RNA, 13 nt, Human herpesvirus 6
aguuuucuaaaag

SEQ ID NO: 2037678 - RNA, 19 nt, Human herpesvirus 6
guaaacuuauugaggaaau

SEQ ID NO: 2037679 - RNA, 18 nt, Human herpesvirus 6
ccaaaggaaaccaccggc

SEQ ID NO: 2037680 - RNA, 23 nt, Human herpesvirus 6
uagggauacguauauuguguacc

SEQ ID NO: 2037681 - RNA, 13 nt, Human herpesvirus 6
cuguaaacugguc

SEQ ID NO: 2037682 - RNA, 18 nt, Human herpesvirus 6
gugccaaaggaaaccacc

SEQ ID NO: 2037683 - RNA, 18 nt, Human herpesvirus 6
ggcucuuugcugacugua

SEQ ID NO: 2037684 - RNA, 19 nt, Human herpesvirus 6
ucgauuuaaccuuuucacu

SEQ ID NO: 2037685 - RNA, 15 nt, Human herpesvirus 6
ccucuaaacccagac

SEQ ID NO: 2037686 - RNA, 14 nt, Human herpesvirus 6
gaucuugaucaaau

SEQ ID NO: 2037687 - RNA, 15 nt, Human herpesvirus 6
gucuuuccugcacag

SEQ ID NO: 2037688 - RNA, 13 nt, Human herpesvirus 6
acgagagcugacu

SEQ ID NO: 2037689 - RNA, 14 nt, Human herpesvirus 6
cccauggcgagaaa

SEQ ID NO: 2037690 - RNA, 16 nt, Human herpesvirus 6
uuuguacaaacuuuuu

SEQ ID NO: 2037691 - RNA, 18 nt, Human herpesvirus 6
cauaguugggaucuucug

SEQ ID NO: 2037692 - RNA, 18 nt, Human herpesvirus 6
uuucguuuacgaauucaa

SEQ ID NO: 2037693 - RNA, 20 nt, Human herpesvirus 6
cuuguccuuuuuuacuaguu

SEQ ID NO: 2037694 - RNA, 22 nt, Human herpesvirus 6
agauauauacuuucaaguguuu

SEQ ID NO: 2037695 - RNA, 16 nt, Human herpesvirus 6
ucuucaagcaaagaca

SEQ ID NO: 2037696 - RNA, 18 nt, Human herpesvirus 6
ucuuuauaaacuuaaaac

SEQ ID NO: 2037697 - RNA, 19 nt, Human herpesvirus 6
guugagaaugauuuuaagu

SEQ ID NO: 2037698 - RNA, 18 nt, Human herpesvirus 6
caggaucguccccuuggc

SEQ ID NO: 2037699 - RNA, 23 nt, Human herpesvirus 6
gacuuacagagcuuuuaaagaau

SEQ ID NO: 2037700 - RNA, 11 nt, Human herpesvirus 6
ugcgaccuggc

SEQ ID NO: 2037701 - RNA, 19 nt, Human herpesvirus 6
agucuuuccccagcacacc

SEQ ID NO: 2037702 - RNA, 17 nt, Human herpesvirus 6
agguguuuccugcccag

SEQ ID NO: 2037703 - RNA, 11 nt, Human herpesvirus 6
acgaaaaauuu

SEQ ID NO: 2037704 - RNA, 24 nt, Human herpesvirus 6
aagggcuuuucaagaucugccauc

SEQ ID NO: 2037705 - RNA, 18 nt, Human herpesvirus 6
gucuucuugggcuccgcg

SEQ ID NO: 2037706 - RNA, 17 nt, Human herpesvirus 6
acccacgguggccuggc

SEQ ID NO: 2037707 - RNA, 23 nt, Human herpesvirus 6
uuuccuacccaggcgaacgagaa

SEQ ID NO: 2037708 - RNA, 23 nt, Human herpesvirus 6
uuuccugcccaggcaaacgagaa

SEQ ID NO: 2037709 - RNA, 22 nt, Human herpesvirus 6
ucgaccuaaaaaaguguaacau

SEQ ID NO: 2037710 - RNA, 19 nt, Human herpesvirus 6
cacggggauuuaguacagu

SEQ ID NO: 2037711 - RNA, 15 nt, Human herpesvirus 6
cauuuugaaaaaaca

SEQ ID NO: 2037712 - RNA, 16 nt, Human herpesvirus 6
cuacaacagaaaaugc

SEQ ID NO: 2037713 - RNA, 21 nt, Human herpesvirus 6
uauaaaaaaagcaaauacuau

SEQ ID NO: 2037714 - RNA, 13 nt, Human herpesvirus 6
aggucagugggua

SEQ ID NO: 2037715 - RNA, 19 nt, Human herpesvirus 6
gaguuuuuaucggugaugu

SEQ ID NO: 2037716 - RNA, 15 nt, Human herpesvirus 6
uaaugcaaguuugaa

SEQ ID NO: 2037717 - RNA, 19 nt, Human herpesvirus 6
gaugcaaucgaugugacaa

SEQ ID NO: 2037718 - RNA, 16 nt, Human herpesvirus 6
uugaugccaaagcuuu

SEQ ID NO: 2037719 - RNA, 19 nt, Human herpesvirus 6
uuccacgcauagacaaacc

SEQ ID NO: 2037720 - RNA, 23 nt, Human herpesvirus 6
gcuccguguuacugauggcaggu

SEQ ID NO: 2037721 - RNA, 17 nt, Human herpesvirus 6
cuucaauaaaaacucaa

SEQ ID NO: 2037722 - RNA, 17 nt, Human herpesvirus 6
aaguaauauagacauug

SEQ ID NO: 2037723 - RNA, 20 nt, Human herpesvirus 6
cggugagaagaucugcguga

SEQ ID NO: 2037724 - RNA, 18 nt, Human herpesvirus 6
auuagccauuuuuuucuu

SEQ ID NO: 2037725 - RNA, 16 nt, Human herpesvirus 6
caucagaauccagaaa

SEQ ID NO: 2037726 - RNA, 17 nt, Human herpesvirus 6
uuacaagguacacaaua

SEQ ID NO: 2037727 - RNA, 22 nt, Human herpesvirus 6
cucaguaauuuguguaauuuaa

SEQ ID NO: 2037728 - RNA, 15 nt, Human herpesvirus 6
aguaaauuaaaguuu

SEQ ID NO: 2037729 - RNA, 15 nt, Human herpesvirus 6
gacucauagauuuca

SEQ ID NO: 2037730 - RNA, 20 nt, Human herpesvirus 6
aaccgguacgcuuuuacuga

SEQ ID NO: 2037731 - RNA, 14 nt, Human herpesvirus 6
caugacaagaaagg

SEQ ID NO: 2037732 - RNA, 14 nt, Human herpesvirus 6
uuuaucgauguaga

SEQ ID NO: 2037733 - RNA, 17 nt, Human herpesvirus 6
ugauuaugccaaaugua

SEQ ID NO: 2037734 - RNA, 19 nt, Human herpesvirus 6
agaacucuaaaagcugcua

SEQ ID NO: 2037735 - RNA, 21 nt, Human herpesvirus 6
gcagcaucauguucggagaua

SEQ ID NO: 2037736 - RNA, 14 nt, Human herpesvirus 6
agggucaaaaaacu

SEQ ID NO: 2037737 - RNA, 12 nt, Human herpesvirus 6
aaacauguuguu

SEQ ID NO: 2037738 - RNA, 17 nt, Human herpesvirus 6
cuaaauuauuuuuaaug

SEQ ID NO: 2037739 - RNA, 23 nt, Human herpesvirus 6
gaccacaccccuguacgcgcaua

SEQ ID NO: 2037740 - RNA, 20 nt, Human herpesvirus 6
acauauaaauccgauagcca

SEQ ID NO: 2037741 - RNA, 16 nt, Human herpesvirus 6
ccuuguguaucuguga

SEQ ID NO: 2037742 - RNA, 17 nt, Human herpesvirus 6
uugugcgucagcuuuga

SEQ ID NO: 2037743 - RNA, 21 nt, Human herpesvirus 6
gggucuuuccugcacaggcga

SEQ ID NO: 2037744 - RNA, 14 nt, Human herpesvirus 6
acaguaaaaugugu

SEQ ID NO: 2037745 - RNA, 13 nt, Human herpesvirus 6
guuucuguccaau

SEQ ID NO: 2037746 - RNA, 21 nt, Human herpesvirus 6
cgguuaaagaaucugcagauu

SEQ ID NO: 2037747 - RNA, 20 nt, Human herpesvirus 6
auuaucacaguugauaaaca

SEQ ID NO: 2037748 - RNA, 23 nt, Human herpesvirus 6
gauguaaauugauuagcaaucau

SEQ ID NO: 2037749 - RNA, 22 nt, Human herpesvirus 6
uacuguacaaaaucaaacucac

SEQ ID NO: 2037750 - RNA, 18 nt, Human herpesvirus 6
aggaucgaacucuucgau

SEQ ID NO: 2037751 - RNA, 17 nt, Human herpesvirus 6
augacaccgauucagaa

SEQ ID NO: 2037752 - RNA, 22 nt, Human herpesvirus 6
aguuguauuuaacuugauguau

SEQ ID NO: 2037753 - RNA, 14 nt, Human herpesvirus 6
uagagcaacucauc

SEQ ID NO: 2037754 - RNA, 15 nt, Human herpesvirus 6
guaaaaaaacauucu

SEQ ID NO: 2037755 - RNA, 22 nt, Human herpesvirus 6
cuauuuacaauguucaauuacu

SEQ ID NO: 2037756 - RNA, 20 nt, Human herpesvirus 6
ggucacguauaccauuccca

SEQ ID NO: 2037757 - RNA, 18 nt, Human herpesvirus 6
uagaucaauauaucgucu

SEQ ID NO: 2037758 - RNA, 14 nt, Human herpesvirus 6
gauauuaacacagu

SEQ ID NO: 2037759 - RNA, 22 nt, Human herpesvirus 6
gugggaggcauuacauuaugaa

SEQ ID NO: 2037760 - RNA, 21 nt, Human herpesvirus 6
acaccacucuguuuuuuugca

SEQ ID NO: 2037761 - RNA, 22 nt, Human herpesvirus 6
cgaugacggcgauacguuucug

SEQ ID NO: 2037762 - RNA, 13 nt, Human herpesvirus 6
uguuuccagaaua

SEQ ID NO: 2037763 - RNA, 17 nt, Human herpesvirus 6
cagcggacagcggggug

SEQ ID NO: 2037764 - RNA, 15 nt, Human herpesvirus 6
uauuuuuuauuucca

SEQ ID NO: 2037765 - RNA, 22 nt, Human herpesvirus 6
acaaucagccugcucagagcug

SEQ ID NO: 2037766 - RNA, 16 nt, Human herpesvirus 6
aucagucaaaaucuga

SEQ ID NO: 2037767 - RNA, 21 nt, Human herpesvirus 6
auuccaagacauguacaucaa

SEQ ID NO: 2037768 - RNA, 23 nt, Human herpesvirus 6
uucacugaccguuguaagaagaa

SEQ ID NO: 2037769 - RNA, 16 nt, Human herpesvirus 6
uuguccaacacuuuua

SEQ ID NO: 2037770 - RNA, 19 nt, Human herpesvirus 6
cuccugggagcucucccuc

SEQ ID NO: 2037771 - RNA, 17 nt, Human herpesvirus 6
uucuuaucaaaucgagu

SEQ ID NO: 2037772 - RNA, 20 nt, Human herpesvirus 6
cauaaacagagacugguuga

SEQ ID NO: 2037773 - RNA, 20 nt, Human herpesvirus 6
ucaccgauaaaaacucacac

SEQ ID NO: 2037774 - RNA, 16 nt, Human herpesvirus 6
cucuauauccugucgc

SEQ ID NO: 2037775 - RNA, 15 nt, Human herpesvirus 6
uccggccccagagac

SEQ ID NO: 2037776 - RNA, 12 nt, Human herpesvirus 6
uuccgaaaucaa

SEQ ID NO: 2037777 - RNA, 22 nt, Human herpesvirus 6
auacgccuugggacauguauau

SEQ ID NO: 2037778 - RNA, 17 nt, Human herpesvirus 6
gaaaacucuaaaagcug

SEQ ID NO: 2037779 - RNA, 18 nt, Human herpesvirus 6
aaaucuacuguacaaaau

SEQ ID NO: 2037780 - RNA, 14 nt, Human herpesvirus 6
cgacagaugugugu

SEQ ID NO: 2037781 - RNA, 19 nt, Human herpesvirus 6
ucacaguuuuuuuuuucau

SEQ ID NO: 2037782 - RNA, 15 nt, Human herpesvirus 6
cgacgauuguccugg

SEQ ID NO: 2037783 - RNA, 19 nt, Human herpesvirus 6
caagcacaaaaccaggaau

SEQ ID NO: 2037784 - RNA, 19 nt, Human herpesvirus 6
aaaucgguuaaagaaucug

SEQ ID NO: 2037785 - RNA, 18 nt, Human herpesvirus 6
uaaccucacuacugaaac

SEQ ID NO: 2037786 - RNA, 19 nt, Human herpesvirus 6
caaucuaucuccgcaaacc

SEQ ID NO: 2037787 - RNA, 23 nt, Human herpesvirus 6
ccgcaguuccuguucuucucaga

SEQ ID NO: 2037788 - RNA, 14 nt, Human herpesvirus 6
acaaucaugugcau

SEQ ID NO: 2037789 - RNA, 19 nt, Human herpesvirus 6
uauaagaacuggugucugu

SEQ ID NO: 2037790 - RNA, 19 nt, Human herpesvirus 6
gccgucacacucuuaacua

SEQ ID NO: 2037791 - RNA, 16 nt, Human herpesvirus 6
acagaagacgacauac

SEQ ID NO: 2037792 - RNA, 21 nt, Human herpesvirus 6
uaucgccccugucugugauuu

SEQ ID NO: 2037793 - RNA, 17 nt, Human herpesvirus 6
aauuuuauuaacuguaa

SEQ ID NO: 2037794 - RNA, 15 nt, Human herpesvirus 6
acucaauuuugaaau

SEQ ID NO: 2037795 - RNA, 19 nt, Human herpesvirus 6
gucugaucccuuagaagcu

SEQ ID NO: 2037796 - RNA, 15 nt, Human herpesvirus 6
gcacacauguauuua

SEQ ID NO: 2037797 - RNA, 23 nt, Human herpesvirus 6
ggggacagugauuagaauguuug

SEQ ID NO: 2037798 - RNA, 21 nt, Human herpesvirus 6
aacaacuuuuuagcuuuuuaa

SEQ ID NO: 2037799 - RNA, 15 nt, Human herpesvirus 6
cugggacccacggug

SEQ ID NO: 2037800 - RNA, 18 nt, Human herpesvirus 6
uggaaacacuuucuucgc

SEQ ID NO: 2037801 - RNA, 18 nt, Human herpesvirus 6
gccgcuucggacccgagg

SEQ ID NO: 2037802 - RNA, 19 nt, Human herpesvirus 6
caauuccuuaauucuaaau

SEQ ID NO: 2037803 - RNA, 16 nt, Human herpesvirus 6
agaaucguuaaaugag

SEQ ID NO: 2037804 - RNA, 18 nt, Human herpesvirus 6
acauuuauaauuaaaaua

SEQ ID NO: 2037805 - RNA, 21 nt, Human herpesvirus 6
ugucugcaguggucaugaucu

SEQ ID NO: 2037806 - RNA, 14 nt, Human herpesvirus 6
uucggccgacagca

SEQ ID NO: 2037807 - RNA, 14 nt, Human herpesvirus 6
ugccgauuaaugug

SEQ ID NO: 2037808 - RNA, 16 nt, Human herpesvirus 6
agugauuauggugccu

SEQ ID NO: 2037809 - RNA, 19 nt, Human herpesvirus 6
gauuucacuuaagccagcu

SEQ ID NO: 2037810 - RNA, 23 nt, Human herpesvirus 6
cuuaaucaacugguuuaguuugg

SEQ ID NO: 2037811 - RNA, 13 nt, Human herpesvirus 6
caacaaccacagc

SEQ ID NO: 2037812 - RNA, 14 nt, Human herpesvirus 6
guuuaauaguuuua

SEQ ID NO: 2037813 - RNA, 23 nt, Human herpesvirus 6
cuugaauguuuaaaguuuuguga

SEQ ID NO: 2037814 - RNA, 17 nt, Human herpesvirus 6
ugauggcagguaaccaa

SEQ ID NO: 2037815 - RNA, 21 nt, Human herpesvirus 6
ucucaagcacaaaaccaggaa

SEQ ID NO: 2037816 - RNA, 21 nt, Human herpesvirus 6
cuuuccgagcggugugcaguu

SEQ ID NO: 2037817 - RNA, 22 nt, Human herpesvirus 6
accgaccccugccgagccugug

SEQ ID NO: 2037818 - RNA, 15 nt, Human herpesvirus 6
gcggugcagaacauc

SEQ ID NO: 2037819 - RNA, 17 nt, Human herpesvirus 6
uuguaaucaaucaaggu

SEQ ID NO: 2037820 - RNA, 15 nt, Human herpesvirus 6
ccauccaccuucccu

SEQ ID NO: 2037821 - RNA, 15 nt, Human herpesvirus 6
aagcaaguuccauuu

SEQ ID NO: 2037822 - RNA, 13 nt, Human herpesvirus 6
uguaauaagaaaa

SEQ ID NO: 2037823 - RNA, 17 nt, Human herpesvirus 6
uuauagcucaguguuug

SEQ ID NO: 2037824 - RNA, 19 nt, Human herpesvirus 6
aagcuuuaaagcagcuaga

SEQ ID NO: 2037825 - RNA, 18 nt, Human herpesvirus 6
uauaucuucguaauggga

SEQ ID NO: 2037826 - RNA, 20 nt, Human herpesvirus 6
gagaacucuaaaagcugcua

SEQ ID NO: 2037827 - RNA, 14 nt, Human herpesvirus 6
cuaaugcaaagaug

SEQ ID NO: 2037828 - RNA, 16 nt, Human herpesvirus 6
uuaacagugucuguuu

SEQ ID NO: 2037829 - RNA, 20 nt, Human herpesvirus 6
aguuuuuauugaagacugaa

SEQ ID NO: 2037830 - RNA, 22 nt, Human herpesvirus 6
ugcagaacaacagcauguaaua

SEQ ID NO: 2037831 - RNA, 19 nt, Human herpesvirus 6
auaaacauuucauugaaua

SEQ ID NO: 2037832 - RNA, 16 nt, Human herpesvirus 6
uucaaaauaaauacua

SEQ ID NO: 2037833 - RNA, 18 nt, Human herpesvirus 6
caaagacauucaacauuc

SEQ ID NO: 2037834 - RNA, 14 nt, Human herpesvirus 6
caacugaauuugca

SEQ ID NO: 2037835 - RNA, 16 nt, Human herpesvirus 6
ugauuauucugucuug

SEQ ID NO: 2037836 - RNA, 13 nt, Human herpesvirus 6
aacagacuuuacu

SEQ ID NO: 2037837 - RNA, 14 nt, Human herpesvirus 6
gcgggaugccauaa

SEQ ID NO: 2037838 - RNA, 23 nt, Human herpesvirus 6
ucuuccaguauugaagaaaauug

SEQ ID NO: 2037839 - RNA, 20 nt, Human herpesvirus 6
uuuuuaaaaaaaaauaaaac

SEQ ID NO: 2037840 - RNA, 18 nt, Human herpesvirus 6
aacacgaagacgaagagg

SEQ ID NO: 2037841 - RNA, 19 nt, Human herpesvirus 6
uugcagacgcugaaaucau

SEQ ID NO: 2037842 - RNA, 20 nt, Human herpesvirus 6
augcuuugggaccuucagga

SEQ ID NO: 2037843 - RNA, 15 nt, Human herpesvirus 6
aucuaauucacauau

SEQ ID NO: 2037844 - RNA, 19 nt, Human herpesvirus 6
caaaggaaaccaccggcua

SEQ ID NO: 2037845 - RNA, 14 nt, Human herpesvirus 6
cauaugaaaagcug

SEQ ID NO: 2037846 - RNA, 16 nt, Human herpesvirus 6
cauucagucucagcaa

SEQ ID NO: 2037847 - RNA, 23 nt, Human herpesvirus 6
ggaagcgagcgggcuaauguaug

SEQ ID NO: 2037848 - RNA, 17 nt, Human herpesvirus 6
cuuuauagagcaacuca

SEQ ID NO: 2037849 - RNA, 21 nt, Human herpesvirus 6
ugacacgggucgggggucugc

SEQ ID NO: 2037850 - RNA, 19 nt, Human herpesvirus 6
agcaaguugcuaccgcugg

SEQ ID NO: 2037851 - RNA, 16 nt, Human herpesvirus 6
uuauaagauuuacaga

SEQ ID NO: 2037852 - RNA, 20 nt, Human herpesvirus 6
agcaauaggcaccuaucuag

SEQ ID NO: 2037853 - RNA, 17 nt, Human herpesvirus 6
aauuguauucuugaaaa

SEQ ID NO: 2037854 - RNA, 15 nt, Human herpesvirus 6
cagaaguuuacauag

SEQ ID NO: 2037855 - RNA, 23 nt, Human herpesvirus 6
ggcaacuccccauucaacauccu

SEQ ID NO: 2037856 - RNA, 18 nt, Human herpesvirus 6
gugaaagaccguagcaaa

SEQ ID NO: 2037857 - RNA, 18 nt, Human herpesvirus 6
auauuauuuucccacaga

SEQ ID NO: 2037858 - RNA, 21 nt, Human herpesvirus 6
uuguaaauagguaaacuguuu

SEQ ID NO: 2037859 - RNA, 14 nt, Human herpesvirus 6
agcagcucugcaau

SEQ ID NO: 2037860 - RNA, 12 nt, Human herpesvirus 6
aguugguuuaaa

SEQ ID NO: 2037861 - RNA, 11 nt, Human herpesvirus 6
acgaaaaccau

SEQ ID NO: 2037862 - RNA, 18 nt, Human herpesvirus 6
gaaaugaugaguaauaca

SEQ ID NO: 2037863 - RNA, 18 nt, Human herpesvirus 6
ugacaacaaaggagugag

SEQ ID NO: 2037864 - RNA, 14 nt, Human herpesvirus 6
guauugaagaaaau

SEQ ID NO: 2037865 - RNA, 16 nt, Human herpesvirus 6
ugacguauccucagaa

SEQ ID NO: 2037866 - RNA, 14 nt, Human herpesvirus 6
agaacaacagcaug

SEQ ID NO: 2037867 - RNA, 21 nt, Human herpesvirus 6
cauguucggagauaucauaau

SEQ ID NO: 2037868 - RNA, 18 nt, Human herpesvirus 6
cuuagacuuggugaugau

SEQ ID NO: 2037869 - RNA, 22 nt, Human herpesvirus 6
aacgagaacucuaacaucucgu

SEQ ID NO: 2037870 - RNA, 23 nt, Human herpesvirus 6
ucggcucuuugcugacuguacgc

SEQ ID NO: 2037871 - RNA, 19 nt, Human herpesvirus 6
aauuccuuaauucuaaaua

SEQ ID NO: 2037872 - RNA, 21 nt, Human herpesvirus 6
uugauguuuccugaauuaaaa

SEQ ID NO: 2037873 - RNA, 21 nt, Human herpesvirus 6
aagaacacgaagacgaagagg

SEQ ID NO: 2037874 - RNA, 13 nt, Human herpesvirus 6
uugguuguguaua

SEQ ID NO: 2037875 - RNA, 13 nt, Human herpesvirus 6
cauauaugaugcu

SEQ ID NO: 2037876 - RNA, 19 nt, Human herpesvirus 6
caguuuaccuauuuacaau

SEQ ID NO: 2037877 - RNA, 18 nt, Human herpesvirus 6
cugaagaugagcagcuuu

SEQ ID NO: 2037878 - RNA, 17 nt, Human herpesvirus 6
auaauucagucugcuaa

SEQ ID NO: 2037879 - RNA, 16 nt, Human herpesvirus 6
ugucaucaugugugcc

SEQ ID NO: 2037880 - RNA, 14 nt, Human herpesvirus 6
gucuagaugcaaau

SEQ ID NO: 2037881 - RNA, 21 nt, Human herpesvirus 6
gcaaucaaucuucuggguggg

SEQ ID NO: 2037882 - RNA, 14 nt, Human herpesvirus 6
caaucauguuuauu

SEQ ID NO: 2037883 - RNA, 17 nt, Human herpesvirus 6
uguacaauauaauuucu

SEQ ID NO: 2037884 - RNA, 16 nt, Human herpesvirus 6
gacgugccaccgucug

SEQ ID NO: 2037885 - RNA, 17 nt, Human herpesvirus 6
uaauaaguccugugcuc

SEQ ID NO: 2037886 - RNA, 23 nt, Human herpesvirus 6
acuuucguuuacgaauucaaugu

SEQ ID NO: 2037887 - RNA, 22 nt, Human herpesvirus 6
uguguauauugaauuguauaua

SEQ ID NO: 2037888 - RNA, 11 nt, Human herpesvirus 6
uuuccugccca

SEQ ID NO: 2037889 - RNA, 17 nt, Human herpesvirus 6
uccaccuucccucccac

SEQ ID NO: 2037890 - RNA, 21 nt, Human herpesvirus 6
agcuuugccacauacaggugg

SEQ ID NO: 2037891 - RNA, 15 nt, Human herpesvirus 6
caguauuaauguuuu

SEQ ID NO: 2037892 - RNA, 16 nt, Human herpesvirus 6
uguccuuacaaaucuu

SEQ ID NO: 2037893 - RNA, 14 nt, Human herpesvirus 6
gugagaagaucugc

SEQ ID NO: 2037894 - RNA, 19 nt, Human herpesvirus 6
gcugacaacaaaggaguga

SEQ ID NO: 2037895 - RNA, 18 nt, Human herpesvirus 6
augaucgccgcuaggcag

SEQ ID NO: 2037896 - RNA, 19 nt, Human herpesvirus 6
cagcuuccguaucacacuu

SEQ ID NO: 2037897 - RNA, 16 nt, Human herpesvirus 6
uccuauugguuugcau

SEQ ID NO: 2037898 - RNA, 14 nt, Human herpesvirus 6
gaaaauuaaaaguc

SEQ ID NO: 2037899 - RNA, 19 nt, Human herpesvirus 6
ucgaaaguucaucuuucaa

SEQ ID NO: 2037900 - RNA, 19 nt, Human herpesvirus 6
ugccaaaggaaaccaccgg

SEQ ID NO: 2037901 - RNA, 21 nt, Human herpesvirus 6
ccagcauaacuggaaucauga

SEQ ID NO: 2037902 - RNA, 14 nt, Human herpesvirus 6
acaaucaaaugggu

SEQ ID NO: 2037903 - RNA, 22 nt, Human herpesvirus 6
aucuucccuuuuacaauacaca

SEQ ID NO: 2037904 - RNA, 13 nt, Human herpesvirus 6
acccuaacccuaa

SEQ ID NO: 2037905 - RNA, 14 nt, Human herpesvirus 6
uuuaaccggaaaaa

SEQ ID NO: 2037906 - RNA, 18 nt, Human herpesvirus 6
uguuuccagagcauacau

SEQ ID NO: 2037907 - RNA, 16 nt, Human herpesvirus 6
ucuucaauaaaaacuc

SEQ ID NO: 2037908 - RNA, 13 nt, Human herpesvirus 6
guccacacgccag

SEQ ID NO: 2037909 - RNA, 15 nt, Human herpesvirus 6
aagaucuacagagua

SEQ ID NO: 2037910 - RNA, 20 nt, Human herpesvirus 6
acuaucguuuauaaaaauag

SEQ ID NO: 2037911 - RNA, 15 nt, Human herpesvirus 6
gcugcggucgccgcc

SEQ ID NO: 2037912 - RNA, 22 nt, Human herpesvirus 6
auucuucgaauaaaaaguuugu

SEQ ID NO: 2037913 - RNA, 15 nt, Human herpesvirus 6
cagaaaagcaaacau

SEQ ID NO: 2037914 - RNA, 16 nt, Human herpesvirus 6
aaagauguuugaagau

SEQ ID NO: 2037915 - RNA, 15 nt, Human herpesvirus 6
agaauuaagaugucu

SEQ ID NO: 2037916 - RNA, 20 nt, Human herpesvirus 6
gccaccgucugggacccacg

SEQ ID NO: 2037917 - RNA, 18 nt, Human herpesvirus 6
auuaaucguuacaaaauu

SEQ ID NO: 2037918 - RNA, 16 nt, Human herpesvirus 6
gggugucggacgacgg

SEQ ID NO: 2037919 - RNA, 13 nt, Human herpesvirus 6
acguuaauguuua

SEQ ID NO: 2037920 - RNA, 20 nt, Human herpesvirus 6
acuaaaaaaaaaaacacaaa

SEQ ID NO: 2037921 - RNA, 15 nt, Human herpesvirus 6
agaccuauauguguu

SEQ ID NO: 2037922 - RNA, 21 nt, Human herpesvirus 6
uaugcuuauacuguuguaaaa

SEQ ID NO: 2037923 - RNA, 17 nt, Human herpesvirus 6
accuggaaaaacugacu

SEQ ID NO: 2037924 - RNA, 21 nt, Human herpesvirus 6
gaaaacuaaaagucagugggu

SEQ ID NO: 2037925 - RNA, 13 nt, Human herpesvirus 6
acgcauagacaaa

SEQ ID NO: 2037926 - RNA, 22 nt, Human herpesvirus 6
augacuguacacaagagccgua

SEQ ID NO: 2037927 - RNA, 23 nt, Human herpesvirus 6
cuccccgagcacgguccacacgc

SEQ ID NO: 2037928 - RNA, 18 nt, Human herpesvirus 6
aacccuaaaauuugcuaa

SEQ ID NO: 2037929 - RNA, 16 nt, Human herpesvirus 6
uacaacugaaacuuca

SEQ ID NO: 2037930 - RNA, 15 nt, Human herpesvirus 6
gcuguccaucuucag

SEQ ID NO: 2037931 - RNA, 17 nt, Human herpesvirus 6
aauucaaaauaaauacu

SEQ ID NO: 2037932 - RNA, 17 nt, Human herpesvirus 6
auaaaucgcuuaaagcg

SEQ ID NO: 2037933 - RNA, 15 nt, Human herpesvirus 6
gaaaauauuuccugc

SEQ ID NO: 2037934 - RNA, 17 nt, Human herpesvirus 6
ucgaaacgaaagcugau

SEQ ID NO: 2037935 - RNA, 20 nt, Human herpesvirus 6
auaucugaaacacugaguuc

SEQ ID NO: 2037936 - RNA, 19 nt, Human herpesvirus 6
acggccaaccucuuccuag

SEQ ID NO: 2037937 - RNA, 17 nt, Human herpesvirus 6
gaauuuauuuucaauau

SEQ ID NO: 2037938 - RNA, 19 nt, Human herpesvirus 6
ggggucucuguucugccac

SEQ ID NO: 2037939 - RNA, 13 nt, Human herpesvirus 6
uaaggucaaauau

SEQ ID NO: 2037940 - RNA, 13 nt, Human herpesvirus 6
acaucgauccaaa

SEQ ID NO: 2037941 - RNA, 21 nt, Human herpesvirus 6
acaaugcaugucgaacagcuu

SEQ ID NO: 2037942 - RNA, 18 nt, Human herpesvirus 6
auuagucuuaaucaacug

SEQ ID NO: 2037943 - RNA, 21 nt, Human herpesvirus 6
uaagaagaaaaaaacacaaau

SEQ ID NO: 2037944 - RNA, 17 nt, Human herpesvirus 6
agcuguccaucuucaga

SEQ ID NO: 2037945 - RNA, 18 nt, Human herpesvirus 6
gacgcacucggaagaaaa

SEQ ID NO: 2037946 - RNA, 20 nt, Human herpesvirus 6
cugaaagaaaaauauuuugu

SEQ ID NO: 2037947 - RNA, 20 nt, Human herpesvirus 6
guaaacuggucugcuugcaa

SEQ ID NO: 2037948 - RNA, 12 nt, Human herpesvirus 6
uaugugcauucc

SEQ ID NO: 2037949 - RNA, 15 nt, Human herpesvirus 6
ccguucucucuccuc

SEQ ID NO: 2037950 - RNA, 16 nt, Human herpesvirus 6
agaaaacuauauugcc

SEQ ID NO: 2037951 - RNA, 19 nt, Human herpesvirus 6
augucguucuuaacucauc

SEQ ID NO: 2037952 - RNA, 17 nt, Human herpesvirus 6
cgugcuucuggcacagg

SEQ ID NO: 2037953 - RNA, 17 nt, Human herpesvirus 6
auaaccucacuacugaa

SEQ ID NO: 2037954 - RNA, 19 nt, Human herpesvirus 6
uggaaaucaguucuccggg

SEQ ID NO: 2037955 - RNA, 19 nt, Human herpesvirus 6
aauuacucaacauuaaaaa

SEQ ID NO: 2037956 - RNA, 16 nt, Human herpesvirus 6
agucaaauugauuaug

SEQ ID NO: 2037957 - RNA, 21 nt, Human herpesvirus 6
acaaugcagaacaacagcaug

SEQ ID NO: 2037958 - RNA, 19 nt, Human herpesvirus 6
ugcccacaccaucuucagc

SEQ ID NO: 2037959 - RNA, 16 nt, Human herpesvirus 6
auugaaagaguguuug

SEQ ID NO: 2037960 - RNA, 13 nt, Human herpesvirus 6
ugcacuguuugaa

SEQ ID NO: 2037961 - RNA, 23 nt, Human herpesvirus 6
aagcuauguaugaacaggugcuu

SEQ ID NO: 2037962 - RNA, 17 nt, Human herpesvirus 6
uaacgcggcaaccgcag

SEQ ID NO: 2037963 - RNA, 19 nt, Human herpesvirus 6
uuuuggaauauauaaauag

SEQ ID NO: 2037964 - RNA, 16 nt, Human herpesvirus 6
aacuuacuaaugugga

SEQ ID NO: 2037965 - RNA, 15 nt, Human herpesvirus 6
uucagagugaauucc

SEQ ID NO: 2037966 - RNA, 22 nt, Human herpesvirus 6
gaccccugccgagccuguggac

SEQ ID NO: 2037967 - RNA, 15 nt, Human herpesvirus 6
caacgcuccuccccu

SEQ ID NO: 2037968 - RNA, 20 nt, Human herpesvirus 6
aaucauuagcauacagaugu

SEQ ID NO: 2037969 - RNA, 11 nt, Human herpesvirus 6
guuaauguuua

SEQ ID NO: 2037970 - RNA, 13 nt, Human herpesvirus 6
uauaaauacugaa

SEQ ID NO: 2037971 - RNA, 19 nt, Human herpesvirus 6
aauguaaacacgaaauugc

SEQ ID NO: 2037972 - RNA, 16 nt, Human herpesvirus 6
guaaaaucacccgagg

SEQ ID NO: 2037973 - RNA, 15 nt, Human herpesvirus 6
guaauuuguguaauu

SEQ ID NO: 2037974 - RNA, 12 nt, Human herpesvirus 6
aucuguccagcu

SEQ ID NO: 2037975 - RNA, 19 nt, Human herpesvirus 6
aauuugaaauaucagaaau

SEQ ID NO: 2037976 - RNA, 15 nt, Human herpesvirus 6
accuaauuacaauuu

SEQ ID NO: 2037977 - RNA, 20 nt, Human herpesvirus 6
guaagauacgaaccucauga

SEQ ID NO: 2037978 - RNA, 17 nt, Human herpesvirus 6
accuauuagguguccuu

SEQ ID NO: 2037979 - RNA, 20 nt, Human herpesvirus 6
gagaauaagaucuacagagu

SEQ ID NO: 2037980 - RNA, 22 nt, Human herpesvirus 6
agccucgacguccaccuggaaa

SEQ ID NO: 2037981 - RNA, 17 nt, Human herpesvirus 6
auacuggcaaagcaaag

SEQ ID NO: 2037982 - RNA, 21 nt, Human herpesvirus 6
caaaauugggaaucaugugua

SEQ ID NO: 2037983 - RNA, 17 nt, Human herpesvirus 6
ugccaccgucugggacc

SEQ ID NO: 2037984 - RNA, 21 nt, Human herpesvirus 6
cuguacaaaaucaaacucacc

SEQ ID NO: 2037985 - RNA, 15 nt, Human herpesvirus 6
acaaaccaaaaugac

SEQ ID NO: 2037986 - RNA, 17 nt, Human herpesvirus 6
guuaaaaaaacggccaa

SEQ ID NO: 2037987 - RNA, 13 nt, Human herpesvirus 6
guuuagaaaugca

SEQ ID NO: 2037988 - RNA, 14 nt, Human herpesvirus 6
caugauugcaucaa

SEQ ID NO: 2037989 - RNA, 21 nt, Human herpesvirus 6
caaaaaaccuuuaacuuuuug

SEQ ID NO: 2037990 - RNA, 13 nt, Human herpesvirus 6
uuuuuuuuucaua

SEQ ID NO: 2037991 - RNA, 16 nt, Human herpesvirus 6
uggcacggugccaaag

SEQ ID NO: 2037992 - RNA, 14 nt, Human herpesvirus 6
acgguggccuggca

SEQ ID NO: 2037993 - RNA, 20 nt, Human herpesvirus 6
gauucgaucgagaaucuucc

SEQ ID NO: 2037994 - RNA, 13 nt, Human herpesvirus 6
cacaugaaaucac

SEQ ID NO: 2037995 - RNA, 19 nt, Human herpesvirus 6
uacagaaccagauaucucu

SEQ ID NO: 2037996 - RNA, 14 nt, Human herpesvirus 6
gcgacgugccaccg

SEQ ID NO: 2037997 - RNA, 17 nt, Human herpesvirus 6
ggcggacggggacgaca

SEQ ID NO: 2037998 - RNA, 21 nt, Human herpesvirus 6
gcuccguguuacugauggcag

SEQ ID NO: 2037999 - RNA, 19 nt, Human herpesvirus 6
gacucagguuuagaugcuu

SEQ ID NO: 2038000 - RNA, 20 nt, Human herpesvirus 6
uaauggcgcauaacggaaaa

SEQ ID NO: 2038001 - RNA, 20 nt, Human herpesvirus 6
gggagugaagagauguuucc

SEQ ID NO: 2038002 - RNA, 21 nt, Human herpesvirus 6
acaaauaaaaaauucuugaau

SEQ ID NO: 2038003 - RNA, 18 nt, Human herpesvirus 6
uguuauaacacaacaagu

SEQ ID NO: 2038004 - RNA, 14 nt, Human herpesvirus 6
cuccacaugacacc

SEQ ID NO: 2038005 - RNA, 19 nt, Human herpesvirus 6
agucaccuguauagauuua

SEQ ID NO: 2038006 - RNA, 17 nt, Human herpesvirus 6
agacuacagacucccca

SEQ ID NO: 2038007 - RNA, 22 nt, Human herpesvirus 6
agugguuuuuuggauaagcaga

SEQ ID NO: 2038008 - RNA, 20 nt, Human herpesvirus 6
caggcgguauaacuuccgga

SEQ ID NO: 2038009 - RNA, 12 nt, Human herpesvirus 6
guguacaaugac

SEQ ID NO: 2038010 - RNA, 23 nt, Human herpesvirus 6
ccagcgggcuccgucgccgcuuc

SEQ ID NO: 2038011 - RNA, 22 nt, Human herpesvirus 6
ucauaaagauaaagaucagugg

SEQ ID NO: 2038012 - RNA, 15 nt, Human herpesvirus 6
gagcggugugcaguu

SEQ ID NO: 2038013 - RNA, 14 nt, Human herpesvirus 6
ugguuaugacaaag

SEQ ID NO: 2038014 - RNA, 21 nt, Human herpesvirus 6
gauuucagguaauauuccgaa

SEQ ID NO: 2038015 - RNA, 17 nt, Human herpesvirus 6
aaggacuacaucccucu

SEQ ID NO: 2038016 - RNA, 19 nt, Human herpesvirus 6
cauccuaacaagacagaag

SEQ ID NO: 2038017 - RNA, 12 nt, Human herpesvirus 6
cuaaaaggcucu

SEQ ID NO: 2038018 - RNA, 14 nt, Human herpesvirus 6
gaaagaaaaauauu

SEQ ID NO: 2038019 - RNA, 21 nt, Human herpesvirus 6
aaacaguaauuuuagggaugg

SEQ ID NO: 2038020 - RNA, 21 nt, Human herpesvirus 6
uaagcaaauguaacuuuuugu

SEQ ID NO: 2038021 - RNA, 15 nt, Human herpesvirus 6
uacaauacacagaaa

SEQ ID NO: 2038022 - RNA, 16 nt, Human herpesvirus 6
acgagaacucuaaaag

SEQ ID NO: 2038023 - RNA, 22 nt, Human herpesvirus 6
acaucgcgcgcgacgugccacc

SEQ ID NO: 2038024 - RNA, 14 nt, Human herpesvirus 6
ggauaagcagaaga

SEQ ID NO: 2038025 - RNA, 11 nt, Human herpesvirus 6
ucgucuccugg

SEQ ID NO: 2038026 - RNA, 19 nt, Human herpesvirus 6
acacuuuaucgauguagau

SEQ ID NO: 2038027 - RNA, 16 nt, Human herpesvirus 6
auucagagugaauucc

SEQ ID NO: 2038028 - RNA, 15 nt, Human herpesvirus 6
uccgcgggaccuggc

SEQ ID NO: 2038029 - RNA, 22 nt, Human herpesvirus 6
augcaguaaaugaauguguuca

SEQ ID NO: 2038030 - RNA, 19 nt, Human herpesvirus 6
agugcgagacuggaaaacu

SEQ ID NO: 2038031 - RNA, 13 nt, Human herpesvirus 6
aggcuaugugucu

SEQ ID NO: 2038032 - RNA, 22 nt, Human herpesvirus 6
agcaaguugcuaccgcugggcc

SEQ ID NO: 2038033 - RNA, 13 nt, Human herpesvirus 6
gaagaucuaaauu

SEQ ID NO: 2038034 - RNA, 19 nt, Human herpesvirus 6
caaaguucaguaacauuua

SEQ ID NO: 2038035 - RNA, 16 nt, Human herpesvirus 6
cggucagacagugagu

SEQ ID NO: 2038036 - RNA, 15 nt, Human herpesvirus 6
cccgcagcuccuuuc

SEQ ID NO: 2038037 - RNA, 14 nt, Human herpesvirus 6
cgcccuccccgagc

SEQ ID NO: 2038038 - RNA, 15 nt, Human herpesvirus 6
cuuuacagucuuuaa

SEQ ID NO: 2038039 - RNA, 21 nt, Human herpesvirus 6
caaaacuacaaagugaaagag

SEQ ID NO: 2038040 - RNA, 13 nt, Human herpesvirus 6
ggacgggaagaac

SEQ ID NO: 2038041 - RNA, 16 nt, Human herpesvirus 6
gcgaccgaccccugcc

SEQ ID NO: 2038042 - RNA, 17 nt, Human herpesvirus 6
acauuuuguacaaacuu

SEQ ID NO: 2038043 - RNA, 14 nt, Human herpesvirus 6
agcagcuagagaaa

SEQ ID NO: 2038044 - RNA, 22 nt, Human herpesvirus 6
auuauuaaggccgucaaagaca

SEQ ID NO: 2038045 - RNA, 18 nt, Human herpesvirus 6
uacagauacauagauuuu

SEQ ID NO: 2038046 - RNA, 16 nt, Human herpesvirus 6
aagguaucaaagaaca

SEQ ID NO: 2038047 - RNA, 15 nt, Human herpesvirus 6
uauguuuucaaaaau

SEQ ID NO: 2038048 - RNA, 15 nt, Human herpesvirus 6
acauggugaaagacu

SEQ ID NO: 2038049 - RNA, 20 nt, Human herpesvirus 6
uuacacaccuuaaacaugua

SEQ ID NO: 2038050 - RNA, 16 nt, Human herpesvirus 6
gacuuuuuaacaaaau

SEQ ID NO: 2038051 - RNA, 20 nt, Human herpesvirus 6
gagccuguggacgugccggg

SEQ ID NO: 2038052 - RNA, 15 nt, Human herpesvirus 6
aaaaaguauccuaaa

SEQ ID NO: 2038053 - RNA, 19 nt, Human herpesvirus 6
gccgguagagaguggggac

SEQ ID NO: 2038054 - RNA, 18 nt, Human herpesvirus 6
uuuaaaugaagauaaaag

SEQ ID NO: 2038055 - RNA, 17 nt, Human herpesvirus 6
accgcaguuucuguuuu

SEQ ID NO: 2038056 - RNA, 17 nt, Human herpesvirus 6
guauaaugcaugauggu

SEQ ID NO: 2038057 - RNA, 15 nt, Human herpesvirus 6
aggcaugugauuguc

SEQ ID NO: 2038058 - RNA, 13 nt, Human herpesvirus 6
acgucugcgucgc

SEQ ID NO: 2038059 - RNA, 14 nt, Human herpesvirus 6
aacaucugcuaacg

SEQ ID NO: 2038060 - RNA, 17 nt, Human herpesvirus 6
uggggucuuuccugcac

SEQ ID NO: 2038061 - RNA, 18 nt, Human herpesvirus 6
agguccgacacgccccca

SEQ ID NO: 2038062 - RNA, 22 nt, Human herpesvirus 6
uuuuccgaaaggugaaaugaau

SEQ ID NO: 2038063 - RNA, 13 nt, Human herpesvirus 6
ugcucgcauuucu

SEQ ID NO: 2038064 - RNA, 12 nt, Human herpesvirus 6
augaauguguuc

SEQ ID NO: 2038065 - RNA, 21 nt, Human herpesvirus 6
gaaacaguucguagaacggaa

SEQ ID NO: 2038066 - RNA, 23 nt, Human herpesvirus 6
ucuuuauagagcaacucaucaaa

SEQ ID NO: 2038067 - RNA, 22 nt, Human herpesvirus 6
aggggagagacauccauugagu

SEQ ID NO: 2038068 - RNA, 21 nt, Human herpesvirus 6
uuucuaacagaggguuuagaa

SEQ ID NO: 2038069 - RNA, 21 nt, Human herpesvirus 6
uaucucaaauuuuccaaacau

SEQ ID NO: 2038070 - RNA, 14 nt, Human herpesvirus 6
auauuguguaacuc

SEQ ID NO: 2038071 - RNA, 16 nt, Human herpesvirus 6
uaacuaagauugugca

SEQ ID NO: 2038072 - RNA, 14 nt, Human herpesvirus 6
gaaagacagaggaa

SEQ ID NO: 2038073 - RNA, 19 nt, Human herpesvirus 6
uugcagaucuaauucacau

SEQ ID NO: 2038074 - RNA, 20 nt, Human herpesvirus 6
uuuaucgcaacacacaguga

SEQ ID NO: 2038075 - RNA, 21 nt, Human herpesvirus 6
agauuacggcaacauacccuu

SEQ ID NO: 2038076 - RNA, 19 nt, Human herpesvirus 6
gcauacguuugccaaagcu

SEQ ID NO: 2038077 - RNA, 23 nt, Human herpesvirus 6
gagauucuuuaacuuauguuucu

SEQ ID NO: 2038078 - RNA, 16 nt, Human herpesvirus 6
uccaugucuucuuggg

SEQ ID NO: 2038079 - RNA, 15 nt, Human herpesvirus 6
uuuaaugcaaguuug

SEQ ID NO: 2038080 - RNA, 22 nt, Human herpesvirus 6
cuaaaacgacuauacgaaauaa

SEQ ID NO: 2038081 - RNA, 20 nt, Human herpesvirus 6
acauguucuuuauuaaaugu

SEQ ID NO: 2038082 - RNA, 20 nt, Human herpesvirus 6
acccaucuccucaacacucu

SEQ ID NO: 2038083 - RNA, 22 nt, Human herpesvirus 6
cauaaggcgcgaguuggugcua

SEQ ID NO: 2038084 - RNA, 21 nt, Human herpesvirus 6
ucugcuauuuuuuuuaauguu

SEQ ID NO: 2038085 - RNA, 19 nt, Human herpesvirus 6
ugaucagcauucacucuuc

SEQ ID NO: 2038086 - RNA, 23 nt, Human herpesvirus 6
caucuaucgcgcaccgcuguggc

SEQ ID NO: 2038087 - RNA, 14 nt, Human herpesvirus 6
ggaauugcauccaa

SEQ ID NO: 2038088 - RNA, 17 nt, Human herpesvirus 6
uguaagaagaaaaaaac

SEQ ID NO: 2038089 - RNA, 16 nt, Human herpesvirus 6
auguaucguuugagau

SEQ ID NO: 2038090 - RNA, 17 nt, Human herpesvirus 6
acaaacugucacuuucc

SEQ ID NO: 2038091 - RNA, 20 nt, Human herpesvirus 6
cgucucucagcuggcugaca

SEQ ID NO: 2038092 - RNA, 14 nt, Human herpesvirus 6
cagucaggaaaaag

SEQ ID NO: 2038093 - RNA, 17 nt, Human herpesvirus 6
agacaaaccagcaaguu

SEQ ID NO: 2038094 - RNA, 18 nt, Human herpesvirus 6
cguagacaguaaaaugug

SEQ ID NO: 2038095 - RNA, 12 nt, Human herpesvirus 6
aucuaauucaca

SEQ ID NO: 2038096 - RNA, 23 nt, Human herpesvirus 6
gcggcaaccgcaguuccuguucu

SEQ ID NO: 2038097 - RNA, 13 nt, Human herpesvirus 6
caugaaaucacgu

SEQ ID NO: 2038098 - RNA, 15 nt, Human herpesvirus 6
ucuaaccauuuugaa

SEQ ID NO: 2038099 - RNA, 14 nt, Human herpesvirus 6
cggcaacgcuccuc

SEQ ID NO: 2038100 - RNA, 16 nt, Human herpesvirus 6
gcgguauaaugcauga

SEQ ID NO: 2038101 - RNA, 23 nt, Human herpesvirus 6
caauaaaaaccgacuuauaucga

SEQ ID NO: 2038102 - RNA, 16 nt, Human herpesvirus 6
auauuuccugcccagg

SEQ ID NO: 2038103 - RNA, 15 nt, Human herpesvirus 6
gugcugagacucuac

SEQ ID NO: 2038104 - RNA, 18 nt, Human herpesvirus 6
gaugaauuaccuguuuua

SEQ ID NO: 2038105 - RNA, 17 nt, Human herpesvirus 6
uagacauuuugugauuc

SEQ ID NO: 2038106 - RNA, 12 nt, Human herpesvirus 6
ccaauauugugg

SEQ ID NO: 2038107 - RNA, 15 nt, Human herpesvirus 6
acacguguuaaauaa

SEQ ID NO: 2038108 - RNA, 17 nt, Human herpesvirus 6
cugagaucauaaauaaa

SEQ ID NO: 2038109 - RNA, 17 nt, Human herpesvirus 6
aacaucaguaacaccgu

SEQ ID NO: 2038110 - RNA, 17 nt, Human herpesvirus 6
cuaugugucuccgccuu

SEQ ID NO: 2038111 - RNA, 15 nt, Human herpesvirus 6
auuucuauguaaacu

SEQ ID NO: 2038112 - RNA, 19 nt, Human herpesvirus 6
ucggcugacaacaaaggag

SEQ ID NO: 2038113 - RNA, 14 nt, Human herpesvirus 6
cuggaugcugauga

SEQ ID NO: 2038114 - RNA, 13 nt, Human herpesvirus 6
ccccucccauccc

SEQ ID NO: 2038115 - RNA, 23 nt, Human herpesvirus 6
uggagagaacugucuugcagcug

SEQ ID NO: 2038116 - RNA, 15 nt, Human herpesvirus 6
acguuugccaaagcu

SEQ ID NO: 2038117 - RNA, 16 nt, Human herpesvirus 6
aauucuaaaauuguaa

SEQ ID NO: 2038118 - RNA, 17 nt, Human herpesvirus 6
gugcuuuuaaaauuaug

SEQ ID NO: 2038119 - RNA, 22 nt, Human herpesvirus 6
aagauccaaucacaacaaaaau

SEQ ID NO: 2038120 - RNA, 19 nt, Human herpesvirus 6
acgugauuccucaaaugaa

SEQ ID NO: 2038121 - RNA, 21 nt, Human herpesvirus 6
acugguguaaauacccugggg

SEQ ID NO: 2038122 - RNA, 15 nt, Human herpesvirus 6
gacacgcuggagcag

SEQ ID NO: 2038123 - RNA, 12 nt, Human herpesvirus 6
ucacggauggag

SEQ ID NO: 2038124 - RNA, 19 nt, Human herpesvirus 6
cggggaggaggaggaggaa

SEQ ID NO: 2038125 - RNA, 15 nt, Human herpesvirus 6
uucaacgucuucaaa

SEQ ID NO: 2038126 - RNA, 23 nt, Human herpesvirus 6
ucgccuggccucccauguaugca

SEQ ID NO: 2038127 - RNA, 21 nt, Human herpesvirus 6
auuccacgugcuugucucaca

SEQ ID NO: 2038128 - RNA, 12 nt, Human herpesvirus 6
uuaaugcauuca

SEQ ID NO: 2038129 - RNA, 17 nt, Human herpesvirus 6
ugccuuguuuucuuaug

SEQ ID NO: 2038130 - RNA, 23 nt, Human herpesvirus 6
uaucccccguacaagcuuaauaa

SEQ ID NO: 2038131 - RNA, 17 nt, Human herpesvirus 6
uggaagaaccaaagaca

SEQ ID NO: 2038132 - RNA, 20 nt, Human herpesvirus 6
cggaggcgacgaaagaggac

SEQ ID NO: 2038133 - RNA, 17 nt, Human herpesvirus 6
caccagcauaacuggaa

SEQ ID NO: 2038134 - RNA, 20 nt, Human herpesvirus 6
cggucgagaauacgcugugu

SEQ ID NO: 2038135 - RNA, 21 nt, Human herpesvirus 6
gaaacucuuauaacaagcacu

SEQ ID NO: 2038136 - RNA, 17 nt, Human herpesvirus 6
uauauucgaauguugaa

SEQ ID NO: 2038137 - RNA, 19 nt, Human herpesvirus 6
uucagccugagaacgggca

SEQ ID NO: 2038138 - RNA, 15 nt, Human herpesvirus 6
gucuagauucuaaug

SEQ ID NO: 2038139 - RNA, 14 nt, Human herpesvirus 6
ugacaguucgagcc

SEQ ID NO: 2038140 - RNA, 16 nt, Human herpesvirus 6
uaaagaacaugugaca

SEQ ID NO: 2038141 - RNA, 15 nt, Human herpesvirus 6
aagcagucaguaaug

SEQ ID NO: 2038142 - RNA, 16 nt, Human herpesvirus 6
guucgaugauuauucu

SEQ ID NO: 2038143 - RNA, 21 nt, Human herpesvirus 6
guucugccacgacgugcugca

SEQ ID NO: 2038144 - RNA, 22 nt, Human herpesvirus 6
agaguuggauuuuuuuaauugg

SEQ ID NO: 2038145 - RNA, 19 nt, Human herpesvirus 6
auucuuaccaagaaaucau

SEQ ID NO: 2038146 - RNA, 19 nt, Human herpesvirus 6
ucauuuuuuugauuuacaa

SEQ ID NO: 2038147 - RNA, 15 nt, Human herpesvirus 6
aguccugugcuccac

SEQ ID NO: 2038148 - RNA, 22 nt, Human herpesvirus 6
auaucccgcguuagguguaaau

SEQ ID NO: 2038149 - RNA, 16 nt, Human herpesvirus 6
cuuuaacuuauguuuc

SEQ ID NO: 2038150 - RNA, 22 nt, Human herpesvirus 6
ucugggacccacgguggccugg

SEQ ID NO: 2038151 - RNA, 19 nt, Human herpesvirus 6
agcgguagaguggaguugu

SEQ ID NO: 2038152 - RNA, 14 nt, Human herpesvirus 6
ggaggaggaagaga

SEQ ID NO: 2038153 - RNA, 20 nt, Human herpesvirus 6
uucucuuuuuuuuaaugcaa

SEQ ID NO: 2038154 - RNA, 14 nt, Human herpesvirus 6
cacgguggccuggc

SEQ ID NO: 2038155 - RNA, 15 nt, Human herpesvirus 6
uuuuacaauacacag

SEQ ID NO: 2038156 - RNA, 19 nt, Human herpesvirus 6
gaaaaaacaacgacuauca

SEQ ID NO: 2038157 - RNA, 20 nt, Human herpesvirus 6
cugaucacagagaaaaaaca

SEQ ID NO: 2038158 - RNA, 18 nt, Human herpesvirus 6
ggacggcggggggacggg

SEQ ID NO: 2038159 - RNA, 13 nt, Human herpesvirus 6
uuucgcaauuugg

SEQ ID NO: 2038160 - RNA, 15 nt, Human herpesvirus 6
cgcaaaccaccccaa

SEQ ID NO: 2038161 - RNA, 22 nt, Human herpesvirus 6
ucgcccccauacacacccagca

SEQ ID NO: 2038162 - RNA, 18 nt, Human herpesvirus 6
acgucugcgucgcccccc

SEQ ID NO: 2038163 - RNA, 12 nt, Human herpesvirus 6
acuaauguggau

SEQ ID NO: 2038164 - RNA, 17 nt, Human herpesvirus 6
cgcgguaacgccacagc

SEQ ID NO: 2038165 - RNA, 13 nt, Human herpesvirus 6
gacccggccggag

SEQ ID NO: 2038166 - RNA, 17 nt, Human herpesvirus 6
gggccuccgccacugcg

SEQ ID NO: 2038167 - RNA, 13 nt, Human herpesvirus 6
uauauuaaauugu

SEQ ID NO: 2038168 - RNA, 23 nt, Human herpesvirus 6
cccacgaaaaauaaaauccacga

SEQ ID NO: 2038169 - RNA, 19 nt, Human herpesvirus 6
uauaaacaauuguauucuu

SEQ ID NO: 2038170 - RNA, 12 nt, Human herpesvirus 6
ccauuauugugu

SEQ ID NO: 2038171 - RNA, 18 nt, Human herpesvirus 6
aaaugaugaguaauacau

SEQ ID NO: 2038172 - RNA, 12 nt, Human herpesvirus 6
ucaucaguuucc

SEQ ID NO: 2038173 - RNA, 18 nt, Human herpesvirus 6
gacguuagcucgggguga

SEQ ID NO: 2038174 - RNA, 13 nt, Human herpesvirus 6
uccuagcauuucc

SEQ ID NO: 2038175 - RNA, 15 nt, Human herpesvirus 6
cccacgguggccugg

SEQ ID NO: 2038176 - RNA, 16 nt, Human herpesvirus 6
cggaaaauuaaaaguc

SEQ ID NO: 2038177 - RNA, 15 nt, Human herpesvirus 6
augcgaaucugccga

SEQ ID NO: 2038178 - RNA, 20 nt, Human herpesvirus 6
cauuucaagagaacaugauu

SEQ ID NO: 2038179 - RNA, 23 nt, Human herpesvirus 6
uugucagguuugaaacacugcaa

SEQ ID NO: 2038180 - RNA, 22 nt, Human herpesvirus 6
aacucacacaaccauccagaua

SEQ ID NO: 2038181 - RNA, 14 nt, Human herpesvirus 6
acaauauuucacau

SEQ ID NO: 2038182 - RNA, 21 nt, Human herpesvirus 6
ugcaaaacuguuaaaagagaa

SEQ ID NO: 2038183 - RNA, 17 nt, Human herpesvirus 6
gaugauuauucugucuu

SEQ ID NO: 2038184 - RNA, 21 nt, Human herpesvirus 6
acauccugcguguuaaugaau

SEQ ID NO: 2038185 - RNA, 23 nt, Human herpesvirus 6
acuggccauauuaggcugcagcc

SEQ ID NO: 2038186 - RNA, 20 nt, Human herpesvirus 6
acauguuguucuugucuuuu

SEQ ID NO: 2038187 - RNA, 18 nt, Human herpesvirus 6
aggaacaaaacuuucauc

SEQ ID NO: 2038188 - RNA, 15 nt, Human herpesvirus 6
aaaauaaguacauag

SEQ ID NO: 2038189 - RNA, 19 nt, Human herpesvirus 6
caguuuuuuuuuucauaug

SEQ ID NO: 2038190 - RNA, 20 nt, Human herpesvirus 6
cgagcggcggauggagcccg

SEQ ID NO: 2038191 - RNA, 12 nt, Human herpesvirus 6
aguaugcuuugg

SEQ ID NO: 2038192 - RNA, 19 nt, Human herpesvirus 6
ggaagaagauacgagaaca

SEQ ID NO: 2038193 - RNA, 14 nt, Human herpesvirus 6
auaaaguuaaaggu

SEQ ID NO: 2038194 - RNA, 19 nt, Human herpesvirus 6
auuuucggugcacauggaa

SEQ ID NO: 2038195 - RNA, 14 nt, Human herpesvirus 6
ccuacaagggcagg

SEQ ID NO: 2038196 - RNA, 23 nt, Human herpesvirus 6
uucucggaaaacuaaaagucagu

SEQ ID NO: 2038197 - RNA, 18 nt, Human herpesvirus 6
uuguggacaauauaaaag

SEQ ID NO: 2038198 - RNA, 16 nt, Human herpesvirus 6
uaccuauuuacaaugu

SEQ ID NO: 2038199 - RNA, 16 nt, Human herpesvirus 6
uucaggaugaagaaaa

SEQ ID NO: 2038200 - RNA, 23 nt, Human herpesvirus 6
ucgggaacauagagaaacgagag

SEQ ID NO: 2038201 - RNA, 17 nt, Human herpesvirus 6
uucuguuuugagagcua

SEQ ID NO: 2038202 - RNA, 14 nt, Human herpesvirus 6
guaugcaucaucaa

SEQ ID NO: 2038203 - RNA, 20 nt, Human herpesvirus 6
cgaaaacucuaaaagcugcu

SEQ ID NO: 2038204 - RNA, 16 nt, Human herpesvirus 6
uuuaacuauccauuuu

SEQ ID NO: 2038205 - RNA, 18 nt, Human herpesvirus 6
gggaggaggaggaggaag

SEQ ID NO: 2038206 - RNA, 20 nt, Human herpesvirus 6
uugcauauuauuaacaauga

SEQ ID NO: 2038207 - RNA, 12 nt, Human herpesvirus 6
uuauaauacacu

SEQ ID NO: 2038208 - RNA, 15 nt, Human herpesvirus 6
gccugcucagagcug

SEQ ID NO: 2038209 - RNA, 17 nt, Human herpesvirus 6
agaaacguuaauguuua

SEQ ID NO: 2038210 - RNA, 18 nt, Human herpesvirus 6
auuucaaacugguguaaa

SEQ ID NO: 2038211 - RNA, 17 nt, Human herpesvirus 6
gaagucuugcuuggaaa

SEQ ID NO: 2038212 - RNA, 17 nt, Human herpesvirus 6
acugaaucggaaacuga

SEQ ID NO: 2038213 - RNA, 13 nt, Human herpesvirus 6
aaacaguaaauuc

SEQ ID NO: 2038214 - RNA, 14 nt, Human herpesvirus 6
aucuauuauaagca

SEQ ID NO: 2038215 - RNA, 15 nt, Human herpesvirus 6
gauguuuuccuuuau

SEQ ID NO: 2038216 - RNA, 14 nt, Human herpesvirus 6
ccaucuucagacau

SEQ ID NO: 2038217 - RNA, 14 nt, Human herpesvirus 6
cucggaaaauuaaa

SEQ ID NO: 2038218 - RNA, 22 nt, Human herpesvirus 6
gaggcgacgaaagaggacggga

SEQ ID NO: 2038219 - RNA, 20 nt, Human herpesvirus 6
ccgcgguuggggucuuuccu

SEQ ID NO: 2038220 - RNA, 16 nt, Human herpesvirus 6
acucauacacaggauu

SEQ ID NO: 2038221 - RNA, 22 nt, Human herpesvirus 6
gacccacuccuacuauccgccc

SEQ ID NO: 2038222 - RNA, 16 nt, Human herpesvirus 6
cgcccccauacacacc

SEQ ID NO: 2038223 - RNA, 15 nt, Human herpesvirus 6
uuuaauaaggaaaaa

SEQ ID NO: 2038224 - RNA, 17 nt, Human herpesvirus 6
guccagaaguccuucau

SEQ ID NO: 2038225 - RNA, 22 nt, Human herpesvirus 6
augcauucacaaggaaugugca

SEQ ID NO: 2038226 - RNA, 22 nt, Human herpesvirus 6
gauccgucucucagcuggcuga

SEQ ID NO: 2038227 - RNA, 14 nt, Human herpesvirus 6
ugcuccggggaggg

SEQ ID NO: 2038228 - RNA, 15 nt, Human herpesvirus 6
caaauaaaagcauuu

SEQ ID NO: 2038229 - RNA, 22 nt, Human herpesvirus 6
aguuaugcgucuguuuauugcc

SEQ ID NO: 2038230 - RNA, 17 nt, Human herpesvirus 6
aagacagaccacacccc

SEQ ID NO: 2038231 - RNA, 15 nt, Human herpesvirus 6
uugaaaucacaccaa

SEQ ID NO: 2038232 - RNA, 15 nt, Human herpesvirus 6
caccucuaaaacaag

SEQ ID NO: 2038233 - RNA, 18 nt, Human herpesvirus 6
gccaaaggaaaccaccgg

SEQ ID NO: 2038234 - RNA, 12 nt, Human herpesvirus 6
ccugcacaggcg

SEQ ID NO: 2038235 - RNA, 21 nt, Human herpesvirus 6
caaaaaugcacaauuuagccu

SEQ ID NO: 2038236 - RNA, 18 nt, Human herpesvirus 6
ucuaaaaucucguaacgc

SEQ ID NO: 2038237 - RNA, 19 nt, Human herpesvirus 6
ucagaagagaugaaagaca

SEQ ID NO: 2038238 - RNA, 17 nt, Human herpesvirus 6
cacguuuugggaaaucu

SEQ ID NO: 2038239 - RNA, 14 nt, Human herpesvirus 6
aauuauuuugugau

SEQ ID NO: 2038240 - RNA, 16 nt, Human herpesvirus 6
agaauuuuuguagcaa

SEQ ID NO: 2038241 - RNA, 18 nt, Human herpesvirus 6
cuguagaaacguuaaugu

SEQ ID NO: 2038242 - RNA, 23 nt, Human herpesvirus 6
uuaauuuaucgcagcaucauguu

SEQ ID NO: 2038243 - RNA, 16 nt, Human herpesvirus 6
gauagguagaauuacu

SEQ ID NO: 2038244 - RNA, 18 nt, Human herpesvirus 6
aucgcgcgcgacgugcca

SEQ ID NO: 2038245 - RNA, 18 nt, Human herpesvirus 6
ggcgaaaagugcugugcu

SEQ ID NO: 2038246 - RNA, 15 nt, Human herpesvirus 6
acgugcuugucucac

SEQ ID NO: 2038247 - RNA, 13 nt, Human herpesvirus 6
cgggcggggcgga

SEQ ID NO: 2038248 - RNA, 14 nt, Human herpesvirus 6
agaaccaccagaga

SEQ ID NO: 2038249 - RNA, 20 nt, Human herpesvirus 6
auccacgaacguagacaguc

SEQ ID NO: 2038250 - RNA, 15 nt, Human herpesvirus 6
cuccuauaaauacug

SEQ ID NO: 2038251 - RNA, 23 nt, Human herpesvirus 6
ucagucaauuuuacuaaaaaagc

SEQ ID NO: 2038252 - RNA, 19 nt, Human herpesvirus 6
ccggagguaacggagcccg

SEQ ID NO: 2038253 - RNA, 19 nt, Human herpesvirus 6
gauaaaaaacucaacugcu

SEQ ID NO: 2038254 - RNA, 11 nt, Human herpesvirus 6
ccguuuaugcg

SEQ ID NO: 2038255 - RNA, 18 nt, Human herpesvirus 6
cgcggaguggaguccagu

SEQ ID NO: 2038256 - RNA, 20 nt, Human herpesvirus 6
uuaagcaacugauuaagauu

SEQ ID NO: 2038257 - RNA, 16 nt, Human herpesvirus 6
auguggagaagaucua

SEQ ID NO: 2038258 - RNA, 16 nt, Human herpesvirus 6
cacuuuuaaaauaccg

SEQ ID NO: 2038259 - RNA, 20 nt, Human herpesvirus 6
auuguacgauaauaaaaguu

SEQ ID NO: 2038260 - RNA, 13 nt, Human herpesvirus 6
auaacugcauacg

SEQ ID NO: 2038261 - RNA, 16 nt, Human herpesvirus 6
ucuaaauuggucucuu

SEQ ID NO: 2038262 - RNA, 21 nt, Human herpesvirus 6
acgcaacgcggagugaacuca

SEQ ID NO: 2038263 - RNA, 15 nt, Human herpesvirus 6
aaagaagauuuuccu

SEQ ID NO: 2038264 - RNA, 19 nt, Human herpesvirus 6
gacuauacgaaauaaucga

SEQ ID NO: 2038265 - RNA, 13 nt, Human herpesvirus 6
cuucaggugucuc

SEQ ID NO: 2038266 - RNA, 14 nt, Human herpesvirus 6
cccauccaccuucc

SEQ ID NO: 2038267 - RNA, 23 nt, Human herpesvirus 6
uaagcaaauguaacuuuuuguau

SEQ ID NO: 2038268 - RNA, 18 nt, Human herpesvirus 6
ccaccagaaaaguauagu

SEQ ID NO: 2038269 - RNA, 13 nt, Human herpesvirus 6
gagacgaaagcag

SEQ ID NO: 2038270 - RNA, 17 nt, Human herpesvirus 6
cuaaaagucagugggua

SEQ ID NO: 2038271 - RNA, 20 nt, Human herpesvirus 6
ucuugggacuaggaauacgu

SEQ ID NO: 2038272 - RNA, 12 nt, Human herpesvirus 6
cuaaaagucagu

SEQ ID NO: 2038273 - RNA, 15 nt, Human herpesvirus 6
uccgacacgccccca

SEQ ID NO: 2038274 - RNA, 21 nt, Human herpesvirus 6
auauaacgauauauaaaaaac

SEQ ID NO: 2038275 - RNA, 12 nt, Human herpesvirus 6
aaaaaucaacau

SEQ ID NO: 2038276 - RNA, 20 nt, Human herpesvirus 6
guacuaugauuuauagaauu

SEQ ID NO: 2038277 - RNA, 17 nt, Human herpesvirus 6
aaccuuuaacuuuuugc

SEQ ID NO: 2038278 - RNA, 17 nt, Human herpesvirus 6
auguuaacucagguggu

SEQ ID NO: 2038279 - RNA, 21 nt, Human herpesvirus 6
agauccgucucucagcuggcu

SEQ ID NO: 2038280 - RNA, 13 nt, Human herpesvirus 6
gacacacaaaaaa

SEQ ID NO: 2038281 - RNA, 14 nt, Human herpesvirus 6
uuugcgugugugua

SEQ ID NO: 2038282 - RNA, 21 nt, Human herpesvirus 6
cgacuucaaacaccucacaau

SEQ ID NO: 2038283 - RNA, 15 nt, Human herpesvirus 6
aucaaaaaaaugaua

SEQ ID NO: 2038284 - RNA, 20 nt, Human herpesvirus 6
cacuugaaccaagucaacaa

SEQ ID NO: 2038285 - RNA, 16 nt, Human herpesvirus 6
aacugugucuguucaa

SEQ ID NO: 2038286 - RNA, 17 nt, Human herpesvirus 6
uucgacuucaaacaccu

SEQ ID NO: 2038287 - RNA, 20 nt, Human herpesvirus 6
ugagaucgcauuagucacag

SEQ ID NO: 2038288 - RNA, 17 nt, Human herpesvirus 6
cccugccuauacaggca

SEQ ID NO: 2038289 - RNA, 14 nt, Human herpesvirus 6
ucucucgaugaaag

SEQ ID NO: 2038290 - RNA, 20 nt, Human herpesvirus 6
uugguuaaaaggaauagcag

SEQ ID NO: 2038291 - RNA, 16 nt, Human herpesvirus 6
uaucacggaugguuug

SEQ ID NO: 2038292 - RNA, 15 nt, Human herpesvirus 6
ugacaauaaacauga

SEQ ID NO: 2038293 - RNA, 13 nt, Human herpesvirus 6
auaaaaaaaagac

SEQ ID NO: 2038294 - RNA, 14 nt, Human herpesvirus 6
caaaaccgaggcag

SEQ ID NO: 2038295 - RNA, 13 nt, Human herpesvirus 6
gugcaaaagcuga

SEQ ID NO: 2038296 - RNA, 21 nt, Human herpesvirus 6
gauaaccguugcgauuuccuu

SEQ ID NO: 2038297 - RNA, 16 nt, Human herpesvirus 6
aaaacgacaucgcgcg

SEQ ID NO: 2038298 - RNA, 18 nt, Human herpesvirus 6
cuauuuguuuaaugcauu

SEQ ID NO: 2038299 - RNA, 16 nt, Human herpesvirus 6
gcgaggugacggaggc

SEQ ID NO: 2038300 - RNA, 12 nt, Human herpesvirus 6
gugccuuuguau

SEQ ID NO: 2038301 - RNA, 14 nt, Human herpesvirus 6
cauggugaaagacu

SEQ ID NO: 2038302 - RNA, 15 nt, Human herpesvirus 6
uaaagauagaauaau

SEQ ID NO: 2038303 - RNA, 20 nt, Human herpesvirus 6
cggaaucaccggaugucgac

SEQ ID NO: 2038304 - RNA, 18 nt, Human herpesvirus 6
cauauuauauuuaaauga

SEQ ID NO: 2038305 - RNA, 12 nt, Human herpesvirus 6
aacauuguaaau

SEQ ID NO: 2038306 - RNA, 13 nt, Human herpesvirus 6
uagagauuuugga

SEQ ID NO: 2038307 - RNA, 22 nt, Human herpesvirus 6
gucuuuccccagcacaccccau

SEQ ID NO: 2038308 - RNA, 18 nt, Human herpesvirus 6
accucaaaaaugcacaau

SEQ ID NO: 2038309 - RNA, 14 nt, Human herpesvirus 6
agaaaaguuuauuu

SEQ ID NO: 2038310 - RNA, 17 nt, Human herpesvirus 6
uacaagaaaagaaacaa

SEQ ID NO: 2038311 - RNA, 20 nt, Human herpesvirus 6
gcaauuucuuuugagggaau

SEQ ID NO: 2038312 - RNA, 14 nt, Human herpesvirus 6
cuuacguugaugau

SEQ ID NO: 2038313 - RNA, 15 nt, Human herpesvirus 6
ucuccauucuucgaa

SEQ ID NO: 2038314 - RNA, 14 nt, Human herpesvirus 6
gggacgggcggagc

SEQ ID NO: 2038315 - RNA, 13 nt, Human herpesvirus 6
uguuuuuucaaaa

SEQ ID NO: 2038316 - RNA, 18 nt, Human herpesvirus 6
guauuggugcaucaguga

SEQ ID NO: 2038317 - RNA, 10 nt, Human herpesvirus 6
aaugcugcug

SEQ ID NO: 2038318 - RNA, 19 nt, Human herpesvirus 6
cagcaaguugcuaccgcug

SEQ ID NO: 2038319 - RNA, 17 nt, Human herpesvirus 6
aaagaucaguggguacc

SEQ ID NO: 2038320 - RNA, 16 nt, Human herpesvirus 6
gugauugugacaagga

SEQ ID NO: 2038321 - RNA, 16 nt, Human herpesvirus 6
ucugaagcaaaagucu

SEQ ID NO: 2038322 - RNA, 23 nt, Human herpesvirus 6
ccgcgguuggggucuuuccugca

SEQ ID NO: 2038323 - RNA, 13 nt, Human herpesvirus 6
aaagcugcuaacg

SEQ ID NO: 2038324 - RNA, 16 nt, Human herpesvirus 6
caaccccgcacgcaua

SEQ ID NO: 2038325 - RNA, 17 nt, Human herpesvirus 6
uuaauguugaguaauug

SEQ ID NO: 2038326 - RNA, 18 nt, Human herpesvirus 6
aucaugcugugagagaau

SEQ ID NO: 2038327 - RNA, 20 nt, Human herpesvirus 6
augcuuuuagauggaaaauu

SEQ ID NO: 2038328 - RNA, 12 nt, Human herpesvirus 6
guguuuguaaau

SEQ ID NO: 2038329 - RNA, 20 nt, Human herpesvirus 6
ggcgucaucgguggcagagg

SEQ ID NO: 2038330 - RNA, 15 nt, Human herpesvirus 6
aaacuaugcaaacga

SEQ ID NO: 2038331 - RNA, 22 nt, Human herpesvirus 6
ugagauucacuccgcguaaaga

SEQ ID NO: 2038332 - RNA, 23 nt, Human herpesvirus 6
agggcagggggggucucuguucu

SEQ ID NO: 2038333 - RNA, 14 nt, Human herpesvirus 6
gugucaaguuucac

SEQ ID NO: 2038334 - RNA, 23 nt, Human herpesvirus 6
uuuccugcccaggcgaacgagaa

SEQ ID NO: 2038335 - RNA, 19 nt, Human herpesvirus 6
ggcgucaucgguggcagag

SEQ ID NO: 2038336 - RNA, 17 nt, Human herpesvirus 6
acacaaaccaucaauuu

SEQ ID NO: 2038337 - RNA, 22 nt, Human herpesvirus 6
agugccguugagugccucagag

SEQ ID NO: 2038338 - RNA, 15 nt, Human herpesvirus 6
aaaauuugcuaacgg

SEQ ID NO: 2038339 - RNA, 22 nt, Human herpesvirus 6
gacuguuuauuuucucgacauc

SEQ ID NO: 2038340 - RNA, 21 nt, Human herpesvirus 6
gcagggggggucucuguucug

SEQ ID NO: 2038341 - RNA, 16 nt, Human herpesvirus 6
cccagcugaaauagac

SEQ ID NO: 2038342 - RNA, 14 nt, Human herpesvirus 6
uacggaaaaaguau

SEQ ID NO: 2038343 - RNA, 18 nt, Human herpesvirus 6
augauuauucugucuuga

SEQ ID NO: 2038344 - RNA, 23 nt, Human herpesvirus 6
uggaaaacgacacagaacacauc

SEQ ID NO: 2038345 - RNA, 12 nt, Human herpesvirus 6
gcagguauaaga

SEQ ID NO: 2038346 - RNA, 13 nt, Human herpesvirus 6
aauucuaaauacg

SEQ ID NO: 2038347 - RNA, 15 nt, Human herpesvirus 6
uguuuuugcauguga

SEQ ID NO: 2038348 - RNA, 16 nt, Human herpesvirus 6
agcugcgcugauccug

SEQ ID NO: 2038349 - RNA, 22 nt, Human herpesvirus 6
uaaauguuuauuauccaaacau

SEQ ID NO: 2038350 - RNA, 16 nt, Human herpesvirus 6
gucuuuagaacagcuu

SEQ ID NO: 2038351 - RNA, 20 nt, Human herpesvirus 6
cagggucaaaaaacucagcc

SEQ ID NO: 2038352 - RNA, 20 nt, Human herpesvirus 6
cguuacccggaagcuucaag

SEQ ID NO: 2038353 - RNA, 21 nt, Human herpesvirus 6
uuucguuuacgaauucaaugu

SEQ ID NO: 2038354 - RNA, 23 nt, Human herpesvirus 6
aaguauguacaauauaauuucuu

SEQ ID NO: 2038355 - RNA, 13 nt, Human herpesvirus 6
aucaugcugugag

SEQ ID NO: 2038356 - RNA, 22 nt, Human herpesvirus 6
agagacgugauacuauaaacaa

SEQ ID NO: 2038357 - RNA, 11 nt, Human herpesvirus 6
uaccgcugggc

SEQ ID NO: 2038358 - RNA, 16 nt, Human herpesvirus 6
aaaguuucggaaaaug

SEQ ID NO: 2038359 - RNA, 16 nt, Human herpesvirus 6
caaacauguauccucg

SEQ ID NO: 2038360 - RNA, 14 nt, Human herpesvirus 6
acucuaaaagcugc

SEQ ID NO: 2038361 - RNA, 15 nt, Human herpesvirus 6
agguguuuccugccc

SEQ ID NO: 2038362 - RNA, 17 nt, Human herpesvirus 6
uucuucaaaaaaagaag

SEQ ID NO: 2038363 - RNA, 17 nt, Human herpesvirus 6
gguagagaguggggaca

SEQ ID NO: 2038364 - RNA, 15 nt, Human herpesvirus 6
uggucauuucauuug

SEQ ID NO: 2038365 - RNA, 15 nt, Human herpesvirus 6
aauaugauggacaaa

SEQ ID NO: 2038366 - RNA, 21 nt, Human herpesvirus 6
aauaucaccuuacaaauaaua

SEQ ID NO: 2038367 - RNA, 11 nt, Human herpesvirus 6
gcggacggacg

SEQ ID NO: 2038368 - RNA, 17 nt, Human herpesvirus 6
uugucagucaacgcaau

SEQ ID NO: 2038369 - RNA, 19 nt, Human herpesvirus 6
aaagaguugacguuccaaa

SEQ ID NO: 2038370 - RNA, 15 nt, Human herpesvirus 6
uguauauguaaauaa

SEQ ID NO: 2038371 - RNA, 16 nt, Human herpesvirus 6
aggccuacggcgccac

SEQ ID NO: 2038372 - RNA, 20 nt, Human herpesvirus 6
cuccugggagcucucccucg

SEQ ID NO: 2038373 - RNA, 18 nt, Human herpesvirus 6
auuuaaacucgacuucuu

SEQ ID NO: 2038374 - RNA, 19 nt, Human herpesvirus 6
acggguaagcagcagaaca

SEQ ID NO: 2038375 - RNA, 15 nt, Human herpesvirus 6
ugaucuuuacaaaag

SEQ ID NO: 2038376 - RNA, 23 nt, Human herpesvirus 6
aaacaccucuaaaacaagacaga

SEQ ID NO: 2038377 - RNA, 13 nt, Human herpesvirus 6
uccugcacaggcg

SEQ ID NO: 2038378 - RNA, 16 nt, Human herpesvirus 6
ugauacuauaaacaau

SEQ ID NO: 2038379 - RNA, 15 nt, Human herpesvirus 6
uugguucggagaggu

SEQ ID NO: 2038380 - RNA, 12 nt, Human herpesvirus 6
uaccuauaguca

SEQ ID NO: 2038381 - RNA, 20 nt, Human herpesvirus 6
aagugggccucguuguuuca

SEQ ID NO: 2038382 - RNA, 22 nt, Human herpesvirus 6
ggcgucaucgguggcagagggg

SEQ ID NO: 2038383 - RNA, 15 nt, Human herpesvirus 6
gaaugagauguucua

SEQ ID NO: 2038384 - RNA, 13 nt, Human herpesvirus 6
gcuaagcucguuc

SEQ ID NO: 2038385 - RNA, 14 nt, Human herpesvirus 6
aaacauguuguucu

SEQ ID NO: 2038386 - RNA, 20 nt, Human herpesvirus 6
gggcgcgagacagcggacag

SEQ ID NO: 2038387 - RNA, 20 nt, Human herpesvirus 6
ccucuaaaacaagacagacc

SEQ ID NO: 2038388 - RNA, 16 nt, Human herpesvirus 6
cuguauuaaugucacu

SEQ ID NO: 2038389 - RNA, 11 nt, Human herpesvirus 6
acugauggcag

SEQ ID NO: 2038390 - RNA, 13 nt, Human herpesvirus 6
uacacacccagca

SEQ ID NO: 2038391 - RNA, 17 nt, Human herpesvirus 6
gacgcagauuuacggca

SEQ ID NO: 2038392 - RNA, 17 nt, Human herpesvirus 6
gauuaauguguuuuucu

SEQ ID NO: 2038393 - RNA, 13 nt, Human herpesvirus 6
ccacaugaaauca

SEQ ID NO: 2038394 - RNA, 18 nt, Human herpesvirus 6
auaauuuauggaaauucg

SEQ ID NO: 2038395 - RNA, 20 nt, Human herpesvirus 6
gcagacuaauccauaugaaa

SEQ ID NO: 2038396 - RNA, 14 nt, Human herpesvirus 6
uucuuaucaaaucg

SEQ ID NO: 2038397 - RNA, 18 nt, Human herpesvirus 6
gaagaguuuuuuaagagu

SEQ ID NO: 2038398 - RNA, 16 nt, Human herpesvirus 6
cuaauaauuacaauac

SEQ ID NO: 2038399 - RNA, 13 nt, Human herpesvirus 6
uggcugugcuauc

SEQ ID NO: 2038400 - RNA, 18 nt, Human herpesvirus 6
cuauaaacaauuguauuc

SEQ ID NO: 2038401 - RNA, 22 nt, Human herpesvirus 6
aaacacacaauuaguccauuac

SEQ ID NO: 2038402 - RNA, 18 nt, Human herpesvirus 6
agaggaagauagcagaau

SEQ ID NO: 2038403 - RNA, 21 nt, Human herpesvirus 6
acuggcgcgcauguugcaguu

SEQ ID NO: 2038404 - RNA, 17 nt, Human herpesvirus 6
gcucgcucugaaauuug

SEQ ID NO: 2038405 - RNA, 23 nt, Human herpesvirus 6
ucacuccaauccaacgaauacuu

SEQ ID NO: 2038406 - RNA, 22 nt, Human herpesvirus 6
auuuuuauguugugaucaagug

SEQ ID NO: 2038407 - RNA, 12 nt, Human herpesvirus 6
uugauagacggc

SEQ ID NO: 2038408 - RNA, 22 nt, Human herpesvirus 6
ggcaaccugaaacuccccagag

SEQ ID NO: 2038409 - RNA, 23 nt, Human herpesvirus 6
cugacugguauccaauuaacaca

SEQ ID NO: 2038410 - RNA, 18 nt, Human herpesvirus 6
uccauaaguuaauuccag

SEQ ID NO: 2038411 - RNA, 19 nt, Human herpesvirus 6
uuugacugauacuugaaac

SEQ ID NO: 2038412 - RNA, 16 nt, Human herpesvirus 6
cugacaaauacgagag

SEQ ID NO: 2038413 - RNA, 23 nt, Human herpesvirus 6
agucaguaaugauauaaaagaaa

SEQ ID NO: 2038414 - RNA, 23 nt, Human herpesvirus 6
cauguguauauugaauuguauau

SEQ ID NO: 2038415 - RNA, 20 nt, Human herpesvirus 6
ucuccaaaagcgccugccua

SEQ ID NO: 2038416 - RNA, 20 nt, Human herpesvirus 6
acgcacgacaacacgccaga

SEQ ID NO: 2038417 - RNA, 21 nt, Human herpesvirus 6
agaauucuucugugacuauau

SEQ ID NO: 2038418 - RNA, 18 nt, Human herpesvirus 6
aauucaaaauaaauacua

SEQ ID NO: 2038419 - RNA, 20 nt, Human herpesvirus 6
uguaaauaugcuuauacugu

SEQ ID NO: 2038420 - RNA, 18 nt, Human herpesvirus 6
acuacugaaaccaaagca

SEQ ID NO: 2038421 - RNA, 22 nt, Human herpesvirus 6
cuccuacuauccgcccuccccg

SEQ ID NO: 2038422 - RNA, 14 nt, Human herpesvirus 6
acagucuuuaaaug

SEQ ID NO: 2038423 - RNA, 13 nt, Human herpesvirus 6
cguaaugugcaaa

SEQ ID NO: 2038424 - RNA, 14 nt, Human herpesvirus 6
guagaguggaguug

SEQ ID NO: 2038425 - RNA, 23 nt, Human herpesvirus 6
gguccaacacagcaugcauuugg

SEQ ID NO: 2038426 - RNA, 13 nt, Human herpesvirus 6
cuacuauccgccc

SEQ ID NO: 2038427 - RNA, 17 nt, Human herpesvirus 6
aucuuccuuauaacaca

SEQ ID NO: 2038428 - RNA, 20 nt, Human herpesvirus 6
cuugucgggcuuugugaaau

SEQ ID NO: 2038429 - RNA, 18 nt, Human herpesvirus 6
uccuuaauucuaaauacg

SEQ ID NO: 2038430 - RNA, 21 nt, Human herpesvirus 6
acauuauaaauuauuuuguga

SEQ ID NO: 2038431 - RNA, 14 nt, Human herpesvirus 6
ccggaguugcagug

SEQ ID NO: 2038432 - RNA, 17 nt, Human herpesvirus 6
cuggugaauguuucuga

SEQ ID NO: 2038433 - RNA, 13 nt, Human herpesvirus 6
gguuaaauuuauc

SEQ ID NO: 2038434 - RNA, 21 nt, Human herpesvirus 6
ucuggaugguugugugaguuu

SEQ ID NO: 2038435 - RNA, 20 nt, Human herpesvirus 6
aaacauguauauaaauuggu

SEQ ID NO: 2038436 - RNA, 20 nt, Human herpesvirus 6
cugagaugacaucugcaaaa

SEQ ID NO: 2038437 - RNA, 16 nt, Human herpesvirus 6
caaaaaaaugauagac

SEQ ID NO: 2038438 - RNA, 15 nt, Human herpesvirus 6
cuaggccuucaccug

SEQ ID NO: 2038439 - RNA, 16 nt, Human herpesvirus 6
aaauaucgaaauaacg

SEQ ID NO: 2038440 - RNA, 22 nt, Human herpesvirus 6
agcucaagaggguuuuuuacaa

SEQ ID NO: 2038441 - RNA, 17 nt, Human herpesvirus 6
aggggagagacauccau

SEQ ID NO: 2038442 - RNA, 14 nt, Human herpesvirus 6
cucgaaaaaacaac

SEQ ID NO: 2038443 - RNA, 14 nt, Human herpesvirus 6
aauauuuccugccc

SEQ ID NO: 2038444 - RNA, 20 nt, Human herpesvirus 6
uuaauuccaagacauguaca

SEQ ID NO: 2038445 - RNA, 18 nt, Human herpesvirus 6
ucaaacaccucacaaucu

SEQ ID NO: 2038446 - RNA, 16 nt, Human herpesvirus 6
aaaacagcuccgcauc

SEQ ID NO: 2038447 - RNA, 20 nt, Human herpesvirus 6
uuuguguuaaaauaaaguuc

SEQ ID NO: 2038448 - RNA, 20 nt, Human herpesvirus 6
uaacaucugcuaacgcggca

SEQ ID NO: 2038449 - RNA, 22 nt, Human herpesvirus 6
uacaagaaaagaaacaaugcuu

SEQ ID NO: 2038450 - RNA, 23 nt, Human herpesvirus 6
uggaagcgagcgggcuaauguau

SEQ ID NO: 2038451 - RNA, 22 nt, Human herpesvirus 6
cagaugguuuuaagagcagaca

SEQ ID NO: 2038452 - RNA, 12 nt, Human herpesvirus 6
cuauccaugaaa

SEQ ID NO: 2038453 - RNA, 20 nt, Human herpesvirus 6
cgaucucucucagaucgaga

SEQ ID NO: 2038454 - RNA, 20 nt, Human herpesvirus 6
cgcaagucacgggcagcugc

SEQ ID NO: 2038455 - RNA, 12 nt, Human herpesvirus 6
aaaggauguuug

SEQ ID NO: 2038456 - RNA, 19 nt, Human herpesvirus 6
auccgcccuccccgagcac

SEQ ID NO: 2038457 - RNA, 20 nt, Human herpesvirus 6
aucaaaugauuuuacaaaga

SEQ ID NO: 2038458 - RNA, 19 nt, Human herpesvirus 6
gcccccauacacacccagc

SEQ ID NO: 2038459 - RNA, 23 nt, Human herpesvirus 6
gggugucggacgacgggcggggc

SEQ ID NO: 2038460 - RNA, 16 nt, Human herpesvirus 6
gaucacaacauaaaaa

SEQ ID NO: 2038461 - RNA, 13 nt, Human herpesvirus 6
agguaaagaucug

SEQ ID NO: 2038462 - RNA, 22 nt, Human herpesvirus 6
agacaucacauuauaagacacu

SEQ ID NO: 2038463 - RNA, 15 nt, Human herpesvirus 6
acgagaaccugcagg

SEQ ID NO: 2038464 - RNA, 15 nt, Human herpesvirus 6
auaaaguaagcaccu

SEQ ID NO: 2038465 - RNA, 17 nt, Human herpesvirus 6
accauuguauauguguu

SEQ ID NO: 2038466 - RNA, 16 nt, Human herpesvirus 6
gaagauacgagaacaa

SEQ ID NO: 2038467 - RNA, 14 nt, Human herpesvirus 6
cuuuccugcccaag

SEQ ID NO: 2038468 - RNA, 17 nt, Human herpesvirus 6
auuauguaauacaucaa

SEQ ID NO: 2038469 - RNA, 20 nt, Human herpesvirus 6
guucagucuaugcagcgcca

SEQ ID NO: 2038470 - RNA, 13 nt, Human herpesvirus 6
agaagaucuaaau

SEQ ID NO: 2038471 - RNA, 17 nt, Human herpesvirus 6
ccucgcgcaccgccucc

SEQ ID NO: 2038472 - RNA, 13 nt, Human herpesvirus 6
aacuuuuaaaaca

SEQ ID NO: 2038473 - RNA, 14 nt, Human herpesvirus 6
uaucacucauacac

SEQ ID NO: 2038474 - RNA, 17 nt, Human herpesvirus 6
agcaauaggcaccuauc

SEQ ID NO: 2038475 - RNA, 17 nt, Human herpesvirus 6
gaccaauuuaugucauu

SEQ ID NO: 2038476 - RNA, 12 nt, Human herpesvirus 6
cuaauaaauguc

SEQ ID NO: 2038477 - RNA, 20 nt, Human herpesvirus 6
uugaucaaauaucugaaaca

SEQ ID NO: 2038478 - RNA, 22 nt, Human herpesvirus 6
agacaaaacuguccucuuugaa

SEQ ID NO: 2038479 - RNA, 20 nt, Human herpesvirus 6
aguuucaccauguccaggaa

SEQ ID NO: 2038480 - RNA, 16 nt, Human herpesvirus 6
uagaaauuacaaggua

SEQ ID NO: 2038481 - RNA, 20 nt, Human herpesvirus 6
cugaaauuugagaaaguugu

SEQ ID NO: 2038482 - RNA, 21 nt, Human herpesvirus 6
gugacuacguuuuguguuaaa

SEQ ID NO: 2038483 - RNA, 18 nt, Human herpesvirus 6
guccgugacacacagaau

SEQ ID NO: 2038484 - RNA, 13 nt, Human herpesvirus 6
uguggaaaaacug

SEQ ID NO: 2038485 - RNA, 23 nt, Human herpesvirus 6
ucuugaaaaaccuuauacagaug

SEQ ID NO: 2038486 - RNA, 19 nt, Human herpesvirus 6
ggcucgugauccuacaagg

SEQ ID NO: 2038487 - RNA, 14 nt, Human herpesvirus 6
accgucucugaagc

SEQ ID NO: 2038488 - RNA, 20 nt, Human herpesvirus 6
gugauccuacaagggcaggg

SEQ ID NO: 2038489 - RNA, 24 nt, Human herpesvirus 6
cugaguucuguggccgaagaagag

SEQ ID NO: 2038490 - RNA, 23 nt, Human herpesvirus 6
guaaaugaauguguucacagagc

SEQ ID NO: 2038491 - RNA, 17 nt, Human herpesvirus 6
gcagaguccggcgcacg

SEQ ID NO: 2038492 - RNA, 15 nt, Human herpesvirus 6
uaucauagacaaacc

SEQ ID NO: 2038493 - RNA, 17 nt, Human herpesvirus 6
agccaaagaaacagaua

SEQ ID NO: 2038494 - RNA, 12 nt, Human herpesvirus 6
aucuauaugcau

SEQ ID NO: 2038495 - RNA, 20 nt, Human herpesvirus 6
auguaaacacgaaauugcuu

SEQ ID NO: 2038496 - RNA, 18 nt, Human herpesvirus 6
ggcaccuaucuagaucaa

SEQ ID NO: 2038497 - RNA, 18 nt, Human herpesvirus 6
cacguggcagucugcucg

SEQ ID NO: 2038498 - RNA, 17 nt, Human herpesvirus 6
ggauaauuuauggaaau

SEQ ID NO: 2038499 - RNA, 17 nt, Human herpesvirus 6
aguuuaccuauuuacaa

SEQ ID NO: 2038500 - RNA, 18 nt, Human herpesvirus 6
caaagacaucgauuugcu

SEQ ID NO: 2038501 - RNA, 18 nt, Human herpesvirus 6
cucguucuaccaugugcg

SEQ ID NO: 2038502 - RNA, 17 nt, Human herpesvirus 6
auguuugggagaacuga

SEQ ID NO: 2038503 - RNA, 12 nt, Human herpesvirus 6
uauaaaaacuaa

SEQ ID NO: 2038504 - RNA, 22 nt, Human herpesvirus 6
cugcacaggcgaacgaaaacuc

SEQ ID NO: 2038505 - RNA, 18 nt, Human herpesvirus 6
caauuuaggucuuuaucc

SEQ ID NO: 2038506 - RNA, 16 nt, Human herpesvirus 6
acugaccguuguaaga

SEQ ID NO: 2038507 - RNA, 16 nt, Human herpesvirus 6
cagcuuuauucccaug

SEQ ID NO: 2038508 - RNA, 14 nt, Human herpesvirus 6
uuuguguuuguaaa

SEQ ID NO: 2038509 - RNA, 18 nt, Human herpesvirus 6
ugccaccgucugggaccc

SEQ ID NO: 2038510 - RNA, 15 nt, Human herpesvirus 6
ucaaaugauuuuaca

SEQ ID NO: 2038511 - RNA, 13 nt, Human herpesvirus 6
ccugaucacagag

SEQ ID NO: 2038512 - RNA, 15 nt, Human herpesvirus 6
ugcauuuuguauuua

SEQ ID NO: 2038513 - RNA, 17 nt, Human herpesvirus 6
uggucaugaucugcuug

SEQ ID NO: 2038514 - RNA, 21 nt, Human herpesvirus 6
ucaauaucaccuuacaaauaa

SEQ ID NO: 2038515 - RNA, 17 nt, Human herpesvirus 6
ugugacaaaucuguaag

SEQ ID NO: 2038516 - RNA, 14 nt, Human herpesvirus 6
guuuuguggcucuc

SEQ ID NO: 2038517 - RNA, 13 nt, Human herpesvirus 6
gccgacagcaagu

SEQ ID NO: 2038518 - RNA, 16 nt, Human herpesvirus 6
uaucgauucuguaauu

SEQ ID NO: 2038519 - RNA, 23 nt, Human herpesvirus 6
caguuauacuggcaaagcaaaga

SEQ ID NO: 2038520 - RNA, 18 nt, Human herpesvirus 6
ucuaacaucucguaacgc

SEQ ID NO: 2038521 - RNA, 22 nt, Human herpesvirus 6
gacggccuccggccccagagac

SEQ ID NO: 2038522 - RNA, 23 nt, Human herpesvirus 6
cacagcaugaacucucacggcca

SEQ ID NO: 2038523 - RNA, 14 nt, Human herpesvirus 6
caacgcaucacaca

SEQ ID NO: 2038524 - RNA, 16 nt, Human herpesvirus 6
cggccuggaguacaag

SEQ ID NO: 2038525 - RNA, 13 nt, Human herpesvirus 6
agguuagugggga

SEQ ID NO: 2038526 - RNA, 11 nt, Human herpesvirus 6
guguuuccaau

SEQ ID NO: 2038527 - RNA, 20 nt, Human herpesvirus 6
cgggcccggggacggacagg

SEQ ID NO: 2038528 - RNA, 15 nt, Human herpesvirus 6
uuacaagguacacaa

SEQ ID NO: 2038529 - RNA, 18 nt, Human herpesvirus 6
aaaaauuuugaugccaaa

SEQ ID NO: 2038530 - RNA, 16 nt, Human herpesvirus 6
cucaaagaaaagaugu

SEQ ID NO: 2038531 - RNA, 18 nt, Human herpesvirus 6
uauauugggggaaaauac

SEQ ID NO: 2038532 - RNA, 15 nt, Human herpesvirus 6
ugcaugguccacaga

SEQ ID NO: 2038533 - RNA, 16 nt, Human herpesvirus 6
uaaaggucagugggua

SEQ ID NO: 2038534 - RNA, 17 nt, Human herpesvirus 6
ucauuagcauacagaug

SEQ ID NO: 2038535 - RNA, 21 nt, Human herpesvirus 6
caaagaacaaaaucuucuuug

SEQ ID NO: 2038536 - RNA, 15 nt, Human herpesvirus 6
agcuaaaacuugaaa

SEQ ID NO: 2038537 - RNA, 15 nt, Human herpesvirus 6
aguucaacgcugucu

SEQ ID NO: 2038538 - RNA, 15 nt, Human herpesvirus 6
aauguuuuguggcuc

SEQ ID NO: 2038539 - RNA, 23 nt, Human herpesvirus 6
uuauggacaacgguguggagaca

SEQ ID NO: 2038540 - RNA, 15 nt, Human herpesvirus 6
uaucaugagagagca

SEQ ID NO: 2038541 - RNA, 17 nt, Human herpesvirus 6
acggugccaaaggaaac

SEQ ID NO: 2038542 - RNA, 18 nt, Human herpesvirus 6
gucuuuccugcacaggcg

SEQ ID NO: 2038543 - RNA, 23 nt, Human herpesvirus 6
uaucgcaagcaaaacacagacgg

SEQ ID NO: 2038544 - RNA, 22 nt, Human herpesvirus 6
uuucaugauucuuugucuaauu

SEQ ID NO: 2038545 - RNA, 17 nt, Human herpesvirus 6
agucugcuaaaaaucau

SEQ ID NO: 2038546 - RNA, 21 nt, Human herpesvirus 6
ccacgugcuugucucacaagc

SEQ ID NO: 2038547 - RNA, 14 nt, Human herpesvirus 6
agcagucaguaaug

SEQ ID NO: 2038548 - RNA, 16 nt, Human herpesvirus 6
uacauauagucaaugu

SEQ ID NO: 2038549 - RNA, 19 nt, Human herpesvirus 6
aguguucgcauuagaaaau

SEQ ID NO: 2038550 - RNA, 21 nt, Human herpesvirus 6
gucucuucuugcgaccuggcu

SEQ ID NO: 2038551 - RNA, 18 nt, Human herpesvirus 6
acauaagcaaauguaacu

SEQ ID NO: 2038552 - RNA, 15 nt, Human herpesvirus 6
agcagaagaacagcu

SEQ ID NO: 2038553 - RNA, 14 nt, Human herpesvirus 6
cccgcguccuccau

SEQ ID NO: 2038554 - RNA, 22 nt, Human herpesvirus 6
augaaaguccucaaacuuuuag

SEQ ID NO: 2038555 - RNA, 14 nt, Human herpesvirus 6
uccugcguguuaau

SEQ ID NO: 2038556 - RNA, 21 nt, Human herpesvirus 6
aagaaaaagcagcagaugcuu

SEQ ID NO: 2038557 - RNA, 20 nt, Human herpesvirus 6
uuucuaacagaggguuuaga

SEQ ID NO: 2038558 - RNA, 19 nt, Human herpesvirus 6
acagugauuagaauguuug

SEQ ID NO: 2038559 - RNA, 23 nt, Human herpesvirus 6
uauugccgcuucuauauaucaua

SEQ ID NO: 2038560 - RNA, 16 nt, Human herpesvirus 6
gcggagcccaagaaga

SEQ ID NO: 2038561 - RNA, 22 nt, Human herpesvirus 6
gcccgaaugugauuaugccaaa

SEQ ID NO: 2038562 - RNA, 19 nt, Human herpesvirus 6
uggauggauaaaauugaug

SEQ ID NO: 2038563 - RNA, 15 nt, Human herpesvirus 6
acccccgauucagac

SEQ ID NO: 2038564 - RNA, 13 nt, Human herpesvirus 6
ccaauaaaauauc

SEQ ID NO: 2038565 - RNA, 18 nt, Human herpesvirus 6
uguuucugauuuguucua

SEQ ID NO: 2038566 - RNA, 17 nt, Human herpesvirus 6
uccagguagaguugcgu

SEQ ID NO: 2038567 - RNA, 21 nt, Human herpesvirus 6
uggaugaucgccacaugugua

SEQ ID NO: 2038568 - RNA, 19 nt, Human herpesvirus 6
aguuuuuuuucuuuaccga

SEQ ID NO: 2038569 - RNA, 22 nt, Human herpesvirus 6
aacaggauucccuucagacauc

SEQ ID NO: 2038570 - RNA, 21 nt, Human herpesvirus 6
uuccucgcgguauaaugcaug

SEQ ID NO: 2038571 - RNA, 18 nt, Human herpesvirus 6
auguaguuaaugcugcug

SEQ ID NO: 2038572 - RNA, 18 nt, Human herpesvirus 6
caacaucuuaaaagacca

SEQ ID NO: 2038573 - RNA, 17 nt, Human herpesvirus 6
cguuuagaaugacagag

SEQ ID NO: 2038574 - RNA, 15 nt, Human herpesvirus 6
acguagcgaaccagg

SEQ ID NO: 2038575 - RNA, 16 nt, Human herpesvirus 6
uacgaaauaaucgauu

SEQ ID NO: 2038576 - RNA, 13 nt, Human herpesvirus 6
gacuacagcugca

SEQ ID NO: 2038577 - RNA, 13 nt, Human herpesvirus 6
ccgauucagaccu

SEQ ID NO: 2038578 - RNA, 16 nt, Human herpesvirus 6
ggcagaggggaaggga

SEQ ID NO: 2038579 - RNA, 13 nt, Human herpesvirus 6
uuagaauguuugg

SEQ ID NO: 2038580 - RNA, 23 nt, Human herpesvirus 6
aguucagaagagaugaaagacag

SEQ ID NO: 2038581 - RNA, 18 nt, Human herpesvirus 6
gucuccugggagcucucc

SEQ ID NO: 2038582 - RNA, 16 nt, Human herpesvirus 6
gagguuuuuguugguu

SEQ ID NO: 2038583 - RNA, 18 nt, Human herpesvirus 6
caguaaaucuucauuaaa

SEQ ID NO: 2038584 - RNA, 19 nt, Human herpesvirus 6
acccuaccauccuucggcc

SEQ ID NO: 2038585 - RNA, 14 nt, Human herpesvirus 6
uguuuccugcccag

SEQ ID NO: 2038586 - RNA, 21 nt, Human herpesvirus 6
ugaaagagacucuauggugag

SEQ ID NO: 2038587 - RNA, 21 nt, Human herpesvirus 6
acucuccacccaucuccucaa

SEQ ID NO: 2038588 - RNA, 14 nt, Human herpesvirus 6
ugaaauaucagaaa

SEQ ID NO: 2038589 - RNA, 17 nt, Human herpesvirus 6
agugauuagaauguuug

SEQ ID NO: 2038590 - RNA, 23 nt, Human herpesvirus 6
guuugcaaaacuguuaaaagaga

SEQ ID NO: 2038591 - RNA, 16 nt, Human herpesvirus 6
cagcaucaccuggguu

SEQ ID NO: 2038592 - RNA, 17 nt, Human herpesvirus 6
uggauggauaaaauuga

SEQ ID NO: 2038593 - RNA, 15 nt, Human herpesvirus 6
aacuaucggagagac

SEQ ID NO: 2038594 - RNA, 17 nt, Human herpesvirus 6
aaggauuaugaucauau

SEQ ID NO: 2038595 - RNA, 18 nt, Human herpesvirus 6
cggagaaaguugauagac

SEQ ID NO: 2038596 - RNA, 13 nt, Human herpesvirus 6
uacaacaauaaaa

SEQ ID NO: 2038597 - RNA, 17 nt, Human herpesvirus 6
gggcuggaaagagaacg

SEQ ID NO: 2038598 - RNA, 13 nt, Human herpesvirus 6
auuacaaaacaau

SEQ ID NO: 2038599 - RNA, 16 nt, Human herpesvirus 6
uaaaagcuauguauga

SEQ ID NO: 2038600 - RNA, 16 nt, Human herpesvirus 6
accuaaauacauucac

SEQ ID NO: 2038601 - RNA, 15 nt, Human herpesvirus 6
ugcccagauguggaa

SEQ ID NO: 2038602 - RNA, 16 nt, Human herpesvirus 6
gaaaguucaucuuuca

SEQ ID NO: 2038603 - RNA, 16 nt, Human herpesvirus 6
aaaaaauagcagcaau

SEQ ID NO: 2038604 - RNA, 14 nt, Human herpesvirus 6
uagcauacgacaaa

SEQ ID NO: 2038605 - RNA, 12 nt, Human herpesvirus 6
ugguuugcuucg

SEQ ID NO: 2038606 - RNA, 20 nt, Human herpesvirus 6
agaaguuuacauagaaauua

SEQ ID NO: 2038607 - RNA, 14 nt, Human herpesvirus 6
caugagagagcaaa

SEQ ID NO: 2038608 - RNA, 14 nt, Human herpesvirus 6
cgcuccuccccugu

SEQ ID NO: 2038609 - RNA, 19 nt, Human herpesvirus 6
uaacucuuuuuguugcuau

SEQ ID NO: 2038610 - RNA, 20 nt, Human herpesvirus 6
uuuuuauuuuauaauacacu

SEQ ID NO: 2038611 - RNA, 12 nt, Human herpesvirus 6
uccugcccaggc

SEQ ID NO: 2038612 - RNA, 19 nt, Human herpesvirus 6
ccccugccgagccugugga

SEQ ID NO: 2038613 - RNA, 14 nt, Human herpesvirus 6
uaggauuagaacaa

SEQ ID NO: 2038614 - RNA, 15 nt, Human herpesvirus 6
cagaccacaccccug

SEQ ID NO: 2038615 - RNA, 15 nt, Human herpesvirus 6
ugacuauuaaacuaa

SEQ ID NO: 2038616 - RNA, 12 nt, Human herpesvirus 6
guauugaagaaa

SEQ ID NO: 2038617 - RNA, 17 nt, Human herpesvirus 6
caucugcaaaaaacaaa

SEQ ID NO: 2038618 - RNA, 13 nt, Human herpesvirus 6
cugagacagucca

SEQ ID NO: 2038619 - RNA, 22 nt, Human herpesvirus 6
ucgcgcgcgacgugccaccguc

SEQ ID NO: 2038620 - RNA, 17 nt, Human herpesvirus 6
acagauuaaauauaccu

SEQ ID NO: 2038621 - RNA, 16 nt, Human herpesvirus 6
caucccuuaaaaaaac

SEQ ID NO: 2038622 - RNA, 17 nt, Human herpesvirus 6
cgggccuccgccacugc

SEQ ID NO: 2038623 - RNA, 16 nt, Human herpesvirus 6
accgccguucugcuua

SEQ ID NO: 2038624 - RNA, 19 nt, Human herpesvirus 6
aauguugaaguauguacaa

SEQ ID NO: 2038625 - RNA, 18 nt, Human herpesvirus 6
auguugaaguauguacaa

SEQ ID NO: 2038626 - RNA, 14 nt, Human herpesvirus 6
uucccuuuuacaau

SEQ ID NO: 2038627 - RNA, 22 nt, Human herpesvirus 6
uuguaguauaucuagauaaacg

SEQ ID NO: 2038628 - RNA, 16 nt, Human herpesvirus 6
uucuauguaaacuucu

SEQ ID NO: 2038629 - RNA, 16 nt, Human herpesvirus 6
gccaaaggaaaccacc

SEQ ID NO: 2038630 - RNA, 18 nt, Human herpesvirus 6
ccauguguauauugaauu

SEQ ID NO: 2038631 - RNA, 21 nt, Human herpesvirus 6
aauaaauacuagcuaaaacuu

SEQ ID NO: 2038632 - RNA, 12 nt, Human herpesvirus 6
uaucugaagacg

SEQ ID NO: 2038633 - RNA, 15 nt, Human herpesvirus 6
aacaaauggaaacug

SEQ ID NO: 2038634 - RNA, 17 nt, Human herpesvirus 6
gcgcgaggugacggagg

SEQ ID NO: 2038635 - RNA, 15 nt, Human herpesvirus 6
ucuaaaaucucguaa

SEQ ID NO: 2038636 - RNA, 16 nt, Human herpesvirus 6
cgucuauaacaauugu

SEQ ID NO: 2038637 - RNA, 17 nt, Human herpesvirus 6
agaaaauugcagaucua

SEQ ID NO: 2038638 - RNA, 14 nt, Human herpesvirus 6
aacacgcuguugcu

SEQ ID NO: 2038639 - RNA, 17 nt, Human herpesvirus 6
auacggaagcugaaaaa

SEQ ID NO: 2038640 - RNA, 16 nt, Human herpesvirus 6
aacugcuuaacuugca

SEQ ID NO: 2038641 - RNA, 11 nt, Human herpesvirus 6
gcccugcuccg

SEQ ID NO: 2038642 - RNA, 22 nt, Human herpesvirus 6
caugcaacacaacaaacauccu

SEQ ID NO: 2038643 - RNA, 21 nt, Human herpesvirus 6
aucuauuauaagcaaacaugu

SEQ ID NO: 2038644 - RNA, 15 nt, Human herpesvirus 6
augacucuaaauacg

SEQ ID NO: 2038645 - RNA, 13 nt, Human herpesvirus 6
auuuccugcccag

SEQ ID NO: 2038646 - RNA, 16 nt, Human herpesvirus 6
uuaaugagaggacagu

SEQ ID NO: 2038647 - RNA, 17 nt, Human herpesvirus 6
aauauguuuucaaaaau

SEQ ID NO: 2038648 - RNA, 22 nt, Human herpesvirus 6
ccgcgguuugggggucuuuccu

SEQ ID NO: 2038649 - RNA, 13 nt, Human herpesvirus 6
aaaccucuguaga

SEQ ID NO: 2038650 - RNA, 17 nt, Human herpesvirus 6
uaaaaacucacacaacc

SEQ ID NO: 2038651 - RNA, 14 nt, Human herpesvirus 6
uuaccuauagucaa

SEQ ID NO: 2038652 - RNA, 23 nt, Human herpesvirus 6
uguauauugaauuguauauauag

SEQ ID NO: 2038653 - RNA, 14 nt, Human herpesvirus 6
agcucucccuuaaa

SEQ ID NO: 2038654 - RNA, 20 nt, Human herpesvirus 6
ggacgggaagaacaggcgga

SEQ ID NO: 2038655 - RNA, 23 nt, Human herpesvirus 6
uacuauauaugcaagccaugaca

SEQ ID NO: 2038656 - RNA, 12 nt, Human herpesvirus 6
aagucagugggu

SEQ ID NO: 2038657 - RNA, 18 nt, Human herpesvirus 6
caggaacagucugacaug

SEQ ID NO: 2038658 - RNA, 17 nt, Human herpesvirus 6
ggaugcugaugaauuua

SEQ ID NO: 2038659 - RNA, 15 nt, Human herpesvirus 6
ggaccgagcggcgga

SEQ ID NO: 2038660 - RNA, 14 nt, Human herpesvirus 6
gcuccgcgccccuc

SEQ ID NO: 2038661 - RNA, 23 nt, Human herpesvirus 6
ugaauggaguaaauuaaaguuua

SEQ ID NO: 2038662 - RNA, 14 nt, Human herpesvirus 6
ggcaacgcuccucc

SEQ ID NO: 2038663 - RNA, 17 nt, Human herpesvirus 6
cggggcggacggggacg

SEQ ID NO: 2038664 - RNA, 15 nt, Human herpesvirus 6
caaauugauuaugau

SEQ ID NO: 2038665 - RNA, 15 nt, Human herpesvirus 6
uuauacuguuguaaa

SEQ ID NO: 2038666 - RNA, 16 nt, Human herpesvirus 6
ucugacauggaagaca

SEQ ID NO: 2038667 - RNA, 15 nt, Human herpesvirus 6
auccaccuucccucc

SEQ ID NO: 2038668 - RNA, 21 nt, Human herpesvirus 6
cgaggggcggauccgcuccgc

SEQ ID NO: 2038669 - RNA, 20 nt, Human herpesvirus 6
uaauuaccuauagucaaugu

SEQ ID NO: 2038670 - RNA, 19 nt, Human herpesvirus 6
caauuguaguuuguguccu

SEQ ID NO: 2038671 - RNA, 23 nt, Human herpesvirus 6
caaaucuucccuuuuacaauaca

SEQ ID NO: 2038672 - RNA, 18 nt, Human herpesvirus 6
ccgguuuaagaagggcuu

SEQ ID NO: 2038673 - RNA, 15 nt, Human herpesvirus 6
cauacacacccagca

SEQ ID NO: 2038674 - RNA, 22 nt, Human herpesvirus 6
gacagggggaucgacgggcagg

SEQ ID NO: 2038675 - RNA, 15 nt, Human herpesvirus 6
ugaauguuacagaua

SEQ ID NO: 2038676 - RNA, 22 nt, Human herpesvirus 6
ucuagcuauagcuaauguaaua

SEQ ID NO: 2038677 - RNA, 18 nt, Human herpesvirus 6
aucacauuauaagacacu

SEQ ID NO: 2038678 - RNA, 12 nt, Human herpesvirus 6
aaauuacauaag

SEQ ID NO: 2038679 - RNA, 14 nt, Human herpesvirus 6
acugugauaugcaa

SEQ ID NO: 2038680 - RNA, 16 nt, Human herpesvirus 6
gagauaucauaaucug

SEQ ID NO: 2038681 - RNA, 12 nt, Human herpesvirus 6
ccacauguguau

SEQ ID NO: 2038682 - RNA, 13 nt, Human herpesvirus 6
acgcauuugcaau

SEQ ID NO: 2038683 - RNA, 17 nt, Human herpesvirus 6
guaugaaaguccucaaa

SEQ ID NO: 2038684 - RNA, 21 nt, Human herpesvirus 6
aaauauguugaaucuuauuca

SEQ ID NO: 2038685 - RNA, 23 nt, Human herpesvirus 6
gucugggacccacgguggccugg

SEQ ID NO: 2038686 - RNA, 23 nt, Human herpesvirus 6
uuguugucucuuuauaaacuuaa

SEQ ID NO: 2038687 - RNA, 15 nt, Human herpesvirus 6
uucaaugcguuucuu

SEQ ID NO: 2038688 - RNA, 20 nt, Human herpesvirus 6
cagcggaccaauccaugcaa

SEQ ID NO: 2038689 - RNA, 16 nt, Human herpesvirus 6
uauguaauacaucaac

SEQ ID NO: 2038690 - RNA, 14 nt, Human herpesvirus 6
gaaaagggugacac

SEQ ID NO: 2038691 - RNA, 18 nt, Human herpesvirus 6
uucaacauuccaacuuuc

SEQ ID NO: 2038692 - RNA, 14 nt, Human herpesvirus 6
uaaaguuuugugau

SEQ ID NO: 2038693 - RNA, 19 nt, Human herpesvirus 6
acccugccuauacaggcaa

SEQ ID NO: 2038694 - RNA, 18 nt, Human herpesvirus 6
aaucauuguuugaauaac

SEQ ID NO: 2038695 - RNA, 16 nt, Human herpesvirus 6
augccugcauaugcag

SEQ ID NO: 2038696 - RNA, 13 nt, Human herpesvirus 6
ccuucggccgaca

SEQ ID NO: 2038697 - RNA, 15 nt, Human herpesvirus 6
auaucgagccaaaga

SEQ ID NO: 2038698 - RNA, 14 nt, Human herpesvirus 6
augacaucugcaaa

SEQ ID NO: 2038699 - RNA, 14 nt, Human herpesvirus 6
ucuccauccucgaa

SEQ ID NO: 2038700 - RNA, 14 nt, Human herpesvirus 6
gacuauuucaaaag

SEQ ID NO: 2038701 - RNA, 19 nt, Human herpesvirus 6
ggcggagccacuugcaaug

SEQ ID NO: 2038702 - RNA, 23 nt, Human herpesvirus 6
gacaaucgucggaucaacagaug

SEQ ID NO: 2038703 - RNA, 18 nt, Human herpesvirus 6
gugccaccgucugggacc

SEQ ID NO: 2038704 - RNA, 15 nt, Human herpesvirus 6
agcccuuacuugaaa

SEQ ID NO: 2038705 - RNA, 21 nt, Human herpesvirus 6
uaaagacgggccuccgccacu

SEQ ID NO: 2038706 - RNA, 14 nt, Human herpesvirus 6
uaaaguuauauucu

SEQ ID NO: 2038707 - RNA, 12 nt, Human herpesvirus 6
agaaaauugcag

SEQ ID NO: 2038708 - RNA, 16 nt, Human herpesvirus 6
augaaacucuuugaac

SEQ ID NO: 2038709 - RNA, 23 nt, Human herpesvirus 6
ucucggcgccggugguaccuguc

SEQ ID NO: 2038710 - RNA, 23 nt, Human herpesvirus 6
aaucucaagcacaaaaccaggaa

SEQ ID NO: 2038711 - RNA, 20 nt, Human herpesvirus 6
gaucaucgggaacauagaga

SEQ ID NO: 2038712 - RNA, 17 nt, Human herpesvirus 6
ggagguaacggagcccg

SEQ ID NO: 2038713 - RNA, 16 nt, Human herpesvirus 6
cccacaggcggggauc

SEQ ID NO: 2038714 - RNA, 14 nt, Human herpesvirus 6
ucuggcacaggcau

SEQ ID NO: 2038715 - RNA, 15 nt, Human herpesvirus 6
guauuuuuuaagagu

SEQ ID NO: 2038716 - RNA, 18 nt, Human herpesvirus 6
cccugccgagccugugga

SEQ ID NO: 2038717 - RNA, 16 nt, Human herpesvirus 6
aaaacgacacagaaca

SEQ ID NO: 2038718 - RNA, 23 nt, Human herpesvirus 6
uacgacacgcuggagcagcuucc

SEQ ID NO: 2038719 - RNA, 14 nt, Human herpesvirus 6
guucaucagccauu

SEQ ID NO: 2038720 - RNA, 14 nt, Human herpesvirus 6
aaacaaauggaaac

SEQ ID NO: 2038721 - RNA, 17 nt, Human herpesvirus 6
ucccccggaguacacgu

SEQ ID NO: 2038722 - RNA, 21 nt, Human herpesvirus 6
acaguaugucuccaaacagag

SEQ ID NO: 2038723 - RNA, 18 nt, Human herpesvirus 6
cacugugauaugcaaacu

SEQ ID NO: 2038724 - RNA, 22 nt, Human herpesvirus 6
auuaugugacucggaacauaau

SEQ ID NO: 2038725 - RNA, 15 nt, Human herpesvirus 6
gguuggaugccugca

SEQ ID NO: 2038726 - RNA, 22 nt, Human herpesvirus 6
aaaacugcauggugagcaaaau

SEQ ID NO: 2038727 - RNA, 15 nt, Human herpesvirus 6
aggaaaccaccggcu

SEQ ID NO: 2038728 - RNA, 19 nt, Human herpesvirus 6
cgccggaucguaaggcagu

SEQ ID NO: 2038729 - RNA, 22 nt, Human herpesvirus 6
caucccagauacauaaacaccc

SEQ ID NO: 2038730 - RNA, 22 nt, Human herpesvirus 6
acggaaaagaugagcgucagag

SEQ ID NO: 2038731 - RNA, 16 nt, Human herpesvirus 6
aggcaaacgagaacuc

SEQ ID NO: 2038732 - RNA, 13 nt, Human herpesvirus 6
auucuauguacuu

SEQ ID NO: 2038733 - RNA, 15 nt, Human herpesvirus 6
aaccuugacagauau

SEQ ID NO: 2038734 - RNA, 17 nt, Human herpesvirus 6
aacacacaucauauccu

SEQ ID NO: 2038735 - RNA, 21 nt, Human herpesvirus 6
ugaacuggcgcgcauguugca

SEQ ID NO: 2038736 - RNA, 16 nt, Human herpesvirus 6
ucuuguugaguuucag

SEQ ID NO: 2038737 - RNA, 16 nt, Human herpesvirus 6
gaaacuccccagagaa

SEQ ID NO: 2038738 - RNA, 13 nt, Human herpesvirus 6
aaagucagugggu

SEQ ID NO: 2038739 - RNA, 20 nt, Human herpesvirus 6
cuuuuauuuugggauacaua

SEQ ID NO: 2038740 - RNA, 19 nt, Human herpesvirus 6
acggcaacgcuccuccccu

SEQ ID NO: 2038741 - RNA, 23 nt, Human herpesvirus 6
aaucugcguuccucucucggcug

SEQ ID NO: 2038742 - RNA, 13 nt, Human herpesvirus 6
ugaagaugacagc

SEQ ID NO: 2038743 - RNA, 14 nt, Human herpesvirus 6
ggagacuccccgcu

SEQ ID NO: 2038744 - RNA, 16 nt, Human herpesvirus 6
agccaaugauucuuaa

SEQ ID NO: 2038745 - RNA, 20 nt, Human herpesvirus 6
uagguauuagaugaauuugu

SEQ ID NO: 2038746 - RNA, 13 nt, Human herpesvirus 6
agucugcuauuuu

SEQ ID NO: 2038747 - RNA, 15 nt, Human herpesvirus 6
cauuuccaugcauau

SEQ ID NO: 2038748 - RNA, 17 nt, Human herpesvirus 6
gacgggcggggcggacg

SEQ ID NO: 2038749 - RNA, 20 nt, Human herpesvirus 6
aaacaccucuaaaacaagac

SEQ ID NO: 2038750 - RNA, 12 nt, Human herpesvirus 6
aauguugcaugg

SEQ ID NO: 2038751 - RNA, 20 nt, Human herpesvirus 6
guucaccacugugauaugca

SEQ ID NO: 2038752 - RNA, 17 nt, Human herpesvirus 6
agacgggccuccgccac

SEQ ID NO: 2038753 - RNA, 22 nt, Human herpesvirus 6
uuuuaagagugcaacaaaaagc

SEQ ID NO: 2038754 - RNA, 18 nt, Human herpesvirus 6
accgucucugaagcaaaa

SEQ ID NO: 2038755 - RNA, 17 nt, Human herpesvirus 6
cacuuguauuaaaguuc

SEQ ID NO: 2038756 - RNA, 21 nt, Human herpesvirus 6
aucgcuuaaagcguuugcaaa

SEQ ID NO: 2038757 - RNA, 20 nt, Human herpesvirus 6
uucaagguggagguuucuuu

SEQ ID NO: 2038758 - RNA, 19 nt, Human herpesvirus 6
aaagagaauacuacaguga

SEQ ID NO: 2038759 - RNA, 14 nt, Human herpesvirus 6
ucugaaaauaaagu

SEQ ID NO: 2038760 - RNA, 21 nt, Human herpesvirus 6
acauugauuccaccuuuaucg

SEQ ID NO: 2038761 - RNA, 18 nt, Human herpesvirus 6
ugguagcuauuaugugaa

SEQ ID NO: 2038762 - RNA, 12 nt, Human herpesvirus 6
gacgggcaggaa

SEQ ID NO: 2038763 - RNA, 16 nt, Human herpesvirus 6
cugagaccuugucaau

SEQ ID NO: 2038764 - RNA, 19 nt, Human herpesvirus 6
ggcgggcagaucuaucaca

SEQ ID NO: 2038765 - RNA, 17 nt, Human herpesvirus 6
uucgcaaaaacguuuuu

SEQ ID NO: 2038766 - RNA, 22 nt, Human herpesvirus 6
cuuugggaccuucaggaacaaa

SEQ ID NO: 2038767 - RNA, 17 nt, Human herpesvirus 6
cagugucguuagaaugu

SEQ ID NO: 2038768 - RNA, 18 nt, Human herpesvirus 6
gcucuacacccucucucg

SEQ ID NO: 2038769 - RNA, 21 nt, Human herpesvirus 6
uaaagaaacagauuuccgccu

SEQ ID NO: 2038770 - RNA, 13 nt, Human herpesvirus 6
uccaccccucuuc

SEQ ID NO: 2038771 - RNA, 24 nt, Human herpesvirus 6
aauguugaguaauugaacauugua

SEQ ID NO: 2038772 - RNA, 21 nt, Human herpesvirus 6
aauuuuaucuucgccuuguau

SEQ ID NO: 2038773 - RNA, 13 nt, Human herpesvirus 6
cgggcuugcgaug

SEQ ID NO: 2038774 - RNA, 13 nt, Human herpesvirus 6
gcagaucaucaaa

SEQ ID NO: 2038775 - RNA, 20 nt, Human herpesvirus 6
uucuucgaguuuuuuuugaa

SEQ ID NO: 2038776 - RNA, 23 nt, Human herpesvirus 6
aaucagccugcucagagcugcgc

SEQ ID NO: 2038777 - RNA, 18 nt, Human herpesvirus 6
cuacggcaacgcuccucc

SEQ ID NO: 2038778 - RNA, 19 nt, Human herpesvirus 6
cgcgguuuggggucuuucc

SEQ ID NO: 2038779 - RNA, 10 nt, Human herpesvirus 6
aaaugugucu

SEQ ID NO: 2038780 - RNA, 15 nt, Human herpesvirus 6
auacuuuugucucug

SEQ ID NO: 2038781 - RNA, 17 nt, Human herpesvirus 6
uguuaaccaguagacaa

SEQ ID NO: 2038782 - RNA, 16 nt, Human herpesvirus 6
acgaaaacucuaaaag

SEQ ID NO: 2038783 - RNA, 16 nt, Human herpesvirus 6
acuggagcuagagaaa

SEQ ID NO: 2038784 - RNA, 15 nt, Human herpesvirus 6
cagagccgaucagau

SEQ ID NO: 2038785 - RNA, 23 nt, Human herpesvirus 6
cauaaguuaauuccagcuuucuu

SEQ ID NO: 2038786 - RNA, 15 nt, Human herpesvirus 6
caccucgcgcaccgc

SEQ ID NO: 2038787 - RNA, 19 nt, Human herpesvirus 6
gacagcaaguugcuaccgc

SEQ ID NO: 2038788 - RNA, 14 nt, Human herpesvirus 6
gacgugcugcaagg

SEQ ID NO: 2038789 - RNA, 19 nt, Human herpesvirus 6
cucaacacucucaguguaa

SEQ ID NO: 2038790 - RNA, 16 nt, Human herpesvirus 6
agcuuguuaggacacu

SEQ ID NO: 2038791 - RNA, 12 nt, Human herpesvirus 6
aaaauuugaaau

SEQ ID NO: 2038792 - RNA, 16 nt, Human herpesvirus 6
cccagcgggcuccguc

SEQ ID NO: 2038793 - RNA, 15 nt, Human herpesvirus 6
gcgagccgcggggag

SEQ ID NO: 2038794 - RNA, 16 nt, Human herpesvirus 6
auuaaauauaccugaa

SEQ ID NO: 2038795 - RNA, 24 nt, Human herpesvirus 6
aucuuauuaauuuccugaucacag

SEQ ID NO: 2038796 - RNA, 16 nt, Human herpesvirus 6
auuucuauguaaacuu

SEQ ID NO: 2038797 - RNA, 19 nt, Human herpesvirus 6
uguaccuagcagcaaauaa

SEQ ID NO: 2038798 - RNA, 18 nt, Human herpesvirus 6
uaaccagauguguacaac

SEQ ID NO: 2038799 - RNA, 20 nt, Human herpesvirus 6
cucaaacuuuuagagacuuu

SEQ ID NO: 2038800 - RNA, 16 nt, Human herpesvirus 6
gagcauucacauaaga

SEQ ID NO: 2038801 - RNA, 23 nt, Human herpesvirus 6
aauguaacugguucagaauuugu

SEQ ID NO: 2038802 - RNA, 20 nt, Human herpesvirus 6
gacgugccaccgucugggac

SEQ ID NO: 2038803 - RNA, 16 nt, Human herpesvirus 6
uuuuugucagguuuga

SEQ ID NO: 2038804 - RNA, 16 nt, Human herpesvirus 6
cacgaagacgaagagg

SEQ ID NO: 2038805 - RNA, 22 nt, Human herpesvirus 6
ucuacguaugaaaguccucaaa

SEQ ID NO: 2038806 - RNA, 22 nt, Human herpesvirus 6
agacauccagaaaagcaaacau

SEQ ID NO: 2038807 - RNA, 19 nt, Human herpesvirus 6
gaugaagcgguuagagcug

SEQ ID NO: 2038808 - RNA, 15 nt, Human herpesvirus 6
uuaaacuaugcaaac

SEQ ID NO: 2038809 - RNA, 17 nt, Human herpesvirus 6
acguuuuccaugugaau

SEQ ID NO: 2038810 - RNA, 13 nt, Human herpesvirus 6
guuuccugcccag

SEQ ID NO: 2038811 - RNA, 19 nt, Human herpesvirus 6
ggaacaaaacuuucauccu

SEQ ID NO: 2038812 - RNA, 21 nt, Human herpesvirus 6
cauccaccuucccucccaccc

SEQ ID NO: 2038813 - RNA, 14 nt, Human herpesvirus 6
cgcauguugcaguu

SEQ ID NO: 2038814 - RNA, 18 nt, Human herpesvirus 6
auauaaagagaccaauuu

SEQ ID NO: 2038815 - RNA, 16 nt, Human herpesvirus 6
aaccaaguguuuuaug

SEQ ID NO: 2038816 - RNA, 23 nt, Human herpesvirus 6
aaucuuauucaaaaauguugcau

SEQ ID NO: 2038817 - RNA, 23 nt, Human herpesvirus 6
aauaaaauuuacaguguuuccaa

SEQ ID NO: 2038818 - RNA, 17 nt, Human herpesvirus 6
gaacuagaaaaacaacg

SEQ ID NO: 2038819 - RNA, 19 nt, Human herpesvirus 6
uugguaucaguggauagga

SEQ ID NO: 2038820 - RNA, 19 nt, Human herpesvirus 6
cgucuccugggagcucucc

SEQ ID NO: 2038821 - RNA, 18 nt, Human herpesvirus 6
aaaaccuuauacagaugu

SEQ ID NO: 2038822 - RNA, 14 nt, Human herpesvirus 6
agguguuuccugcc

SEQ ID NO: 2038823 - RNA, 23 nt, Human herpesvirus 6
auuaaaguuuucauaaaaacgac

SEQ ID NO: 2038824 - RNA, 22 nt, Human herpesvirus 6
agguuuuauucguucagaaugu

SEQ ID NO: 2038825 - RNA, 20 nt, Human herpesvirus 6
agaaagagauaaaaagagag

SEQ ID NO: 2038826 - RNA, 20 nt, Human herpesvirus 6
uuccaagacauguacaucaa

SEQ ID NO: 2038827 - RNA, 15 nt, Human herpesvirus 6
agaacaucucagauc

SEQ ID NO: 2038828 - RNA, 22 nt, Human herpesvirus 6
acgccuccacaugacaccucaa

SEQ ID NO: 2038829 - RNA, 12 nt, Human herpesvirus 6
cuucccucuucc

SEQ ID NO: 2038830 - RNA, 18 nt, Human herpesvirus 6
aacuaaaagucagugggu

SEQ ID NO: 2038831 - RNA, 14 nt, Human herpesvirus 6
gaagauauggauga

SEQ ID NO: 2038832 - RNA, 15 nt, Human herpesvirus 6
aguaaauauuucuaa

SEQ ID NO: 2038833 - RNA, 16 nt, Human herpesvirus 6
caaaugcaguaaauga

SEQ ID NO: 2038834 - RNA, 15 nt, Human herpesvirus 6
gagacagcggacagc

SEQ ID NO: 2038835 - RNA, 14 nt, Human herpesvirus 6
uggugguaauuuag

SEQ ID NO: 2038836 - RNA, 23 nt, Human herpesvirus 6
gauuucacuuaagccagcuuucg

SEQ ID NO: 2038837 - RNA, 14 nt, Human herpesvirus 6
uaguuuuugcuuac

SEQ ID NO: 2038838 - RNA, 18 nt, Human herpesvirus 6
cgaugucggaaucuacug

SEQ ID NO: 2038839 - RNA, 12 nt, Human herpesvirus 6
uguuucugauuu

SEQ ID NO: 2038840 - RNA, 13 nt, Human herpesvirus 6
gaaaaaaaaucua

SEQ ID NO: 2038841 - RNA, 15 nt, Human herpesvirus 6
uguaucugugaacaa

SEQ ID NO: 2038842 - RNA, 16 nt, Human herpesvirus 6
aaugagauagaaguua

SEQ ID NO: 2038843 - RNA, 15 nt, Human herpesvirus 6
aaaagggaagauuug

SEQ ID NO: 2038844 - RNA, 20 nt, Human herpesvirus 6
auucuaaauacgauauuaac

SEQ ID NO: 2038845 - RNA, 22 nt, Human herpesvirus 6
agaccaauuuaugucauuucau

SEQ ID NO: 2038846 - RNA, 11 nt, Human herpesvirus 6
aaaaacauuuc

SEQ ID NO: 2038847 - RNA, 18 nt, Human herpesvirus 6
aagacucagcgacucccg

SEQ ID NO: 2038848 - RNA, 19 nt, Human herpesvirus 6
acguaauagccaaacaagg

SEQ ID NO: 2038849 - RNA, 23 nt, Human herpesvirus 6
uuacaauguucaauuacucaaca

SEQ ID NO: 2038850 - RNA, 16 nt, Human herpesvirus 6
acaaaacaaucuaucu

SEQ ID NO: 2038851 - RNA, 17 nt, Human herpesvirus 6
gguuuggggucuuuccu

SEQ ID NO: 2038852 - RNA, 14 nt, Human herpesvirus 6
guuauauuggauug

SEQ ID NO: 2038853 - RNA, 16 nt, Human herpesvirus 6
cuuagacgaaaauugu

SEQ ID NO: 2038854 - RNA, 20 nt, Human herpesvirus 6
gaaaauugaugauguucuuc

SEQ ID NO: 2038855 - RNA, 13 nt, Human herpesvirus 6
gaagaggaagaag

SEQ ID NO: 2038856 - RNA, 17 nt, Human herpesvirus 6
agaucuggugaauguuu

SEQ ID NO: 2038857 - RNA, 22 nt, Human herpesvirus 6
cagucuucaauaaaaacucaau

SEQ ID NO: 2038858 - RNA, 11 nt, Human herpesvirus 6
guauuguaaaa

SEQ ID NO: 2038859 - RNA, 22 nt, Human herpesvirus 6
gacgaaagcaguuuuacaucau

SEQ ID NO: 2038860 - RNA, 18 nt, Human herpesvirus 6
ugcagacugcuucuuaga

SEQ ID NO: 2038861 - RNA, 13 nt, Human herpesvirus 6
ugcaaccaauaaa

SEQ ID NO: 2038862 - RNA, 19 nt, Human herpesvirus 6
auucugcauuuauaucaaa

SEQ ID NO: 2038863 - RNA, 17 nt, Human herpesvirus 6
ugcagacuucacuuugg

SEQ ID NO: 2038864 - RNA, 14 nt, Human herpesvirus 6
agucgcgaagugcu

SEQ ID NO: 2038865 - RNA, 20 nt, Human herpesvirus 6
caaucauguuuauugucaaa

SEQ ID NO: 2038866 - RNA, 21 nt, Human herpesvirus 6
accuagcagcaaauaaauaca

SEQ ID NO: 2038867 - RNA, 22 nt, Human herpesvirus 6
uccugagaguaaauauuucuaa

SEQ ID NO: 2038868 - RNA, 16 nt, Human herpesvirus 6
agcccccagcugaaau

SEQ ID NO: 2038869 - RNA, 14 nt, Human herpesvirus 6
uugggacauguaua

SEQ ID NO: 2038870 - RNA, 16 nt, Human herpesvirus 6
gacucgccgaugaaac

SEQ ID NO: 2038871 - RNA, 17 nt, Human herpesvirus 6
auguguauuauguaaau

SEQ ID NO: 2038872 - RNA, 13 nt, Human herpesvirus 6
guuucguacugga

SEQ ID NO: 2038873 - RNA, 22 nt, Human herpesvirus 6
gcgcgaggugacggaggcgacg

SEQ ID NO: 2038874 - RNA, 19 nt, Human herpesvirus 6
aaauuacaagguacacaau

SEQ ID NO: 2038875 - RNA, 16 nt, Human herpesvirus 6
auguuuuccuuuauga

SEQ ID NO: 2038876 - RNA, 15 nt, Human herpesvirus 6
auauauuugcauaca

SEQ ID NO: 2038877 - RNA, 23 nt, Human herpesvirus 6
gagcacgcacgacaacacgccag

SEQ ID NO: 2038878 - RNA, 23 nt, Human herpesvirus 6
cauuuccggagauuaaaacauca

SEQ ID NO: 2038879 - RNA, 17 nt, Human herpesvirus 6
ccaccgucugggaccca

SEQ ID NO: 2038880 - RNA, 17 nt, Human herpesvirus 6
aauaaucgauuacaaaa

SEQ ID NO: 2038881 - RNA, 15 nt, Human herpesvirus 6
ccgaucucucucaga

SEQ ID NO: 2038882 - RNA, 20 nt, Human herpesvirus 6
gacaguccauuucuaaagau

SEQ ID NO: 2038883 - RNA, 15 nt, Human herpesvirus 6
caacaucuuaaaaga

SEQ ID NO: 2038884 - RNA, 14 nt, Human herpesvirus 6
ggugaguuugauuu

SEQ ID NO: 2038885 - RNA, 19 nt, Human herpesvirus 6
acuaaaaaaaaaaacacaa

SEQ ID NO: 2038886 - RNA, 13 nt, Human herpesvirus 6
cggauggagcccg

SEQ ID NO: 2038887 - RNA, 16 nt, Human herpesvirus 6
auucaaaacgacaucg

SEQ ID NO: 2038888 - RNA, 16 nt, Human herpesvirus 6
ucaaaccgcagagcaa

SEQ ID NO: 2038889 - RNA, 11 nt, Human herpesvirus 6
ggucagugggu

SEQ ID NO: 2038890 - RNA, 15 nt, Human herpesvirus 6
auaucuugaaaucua

SEQ ID NO: 2038891 - RNA, 19 nt, Human herpesvirus 6
caauuuguguuuauuugcc

SEQ ID NO: 2038892 - RNA, 13 nt, Human herpesvirus 6
gucgcccccccgc

SEQ ID NO: 2038893 - RNA, 17 nt, Human herpesvirus 6
ggaggaggaggaagaga

SEQ ID NO: 2038894 - RNA, 20 nt, Human herpesvirus 6
ucacugucgaaauucaccag

SEQ ID NO: 2038895 - RNA, 19 nt, Human herpesvirus 6
ugcuucucucgaugaaagu

SEQ ID NO: 2038896 - RNA, 19 nt, Human herpesvirus 6
uuguaaauagguaaacugu

SEQ ID NO: 2038897 - RNA, 20 nt, Human herpesvirus 6
aucuccucaacacucucagu

SEQ ID NO: 2038898 - RNA, 21 nt, Human herpesvirus 6
uuagucuauccaugaaacucu

SEQ ID NO: 2038899 - RNA, 11 nt, Human herpesvirus 6
aaauaaaguuu

SEQ ID NO: 2038900 - RNA, 22 nt, Human herpesvirus 6
aaauaauuuuauuaacuguaaa

SEQ ID NO: 2038901 - RNA, 18 nt, Human herpesvirus 6
ggcaaccgcaguuccugu

SEQ ID NO: 2038902 - RNA, 22 nt, Human herpesvirus 6
uuucaguauuaacuaguugcuu

SEQ ID NO: 2038903 - RNA, 21 nt, Human herpesvirus 6
agcuuuucauaugaaaagcug

SEQ ID NO: 2038904 - RNA, 23 nt, Human herpesvirus 6
auuguaauuauuagguaaacuga

SEQ ID NO: 2038905 - RNA, 15 nt, Human herpesvirus 6
ccgcugacaaccucc

SEQ ID NO: 2038906 - RNA, 16 nt, Human herpesvirus 6
uacugagcaaagaaau

SEQ ID NO: 2038907 - RNA, 19 nt, Human herpesvirus 6
aaucauuagcauacagaug

SEQ ID NO: 2038908 - RNA, 14 nt, Human herpesvirus 6
gauucuaauaaaag

SEQ ID NO: 2038909 - RNA, 19 nt, Human herpesvirus 6
acuuucuaagacgagaugu

SEQ ID NO: 2038910 - RNA, 22 nt, Human herpesvirus 6
aucgauucuguaauuuugaaau

SEQ ID NO: 2038911 - RNA, 22 nt, Human herpesvirus 6
ugcauaugcagacugcuucuua

SEQ ID NO: 2038912 - RNA, 16 nt, Human herpesvirus 6
auagauuagaaauuac

SEQ ID NO: 2038913 - RNA, 16 nt, Human herpesvirus 6
cacgcuaaaaacagac

SEQ ID NO: 2038914 - RNA, 22 nt, Human herpesvirus 6
ggaaucaugucggccucugccg

SEQ ID NO: 2038915 - RNA, 16 nt, Human herpesvirus 6
ucuugguuguguauau

SEQ ID NO: 2038916 - RNA, 18 nt, Human herpesvirus 6
augaaccacguuuuucca

SEQ ID NO: 2038917 - RNA, 18 nt, Human herpesvirus 6
aaggaaagacaugcauuu

SEQ ID NO: 2038918 - RNA, 16 nt, Human herpesvirus 6
uuucuuaaggugcuuu

SEQ ID NO: 2038919 - RNA, 16 nt, Human herpesvirus 6
guauaagucuaaugca

SEQ ID NO: 2038920 - RNA, 16 nt, Human herpesvirus 6
uccaauccaauauaac

SEQ ID NO: 2038921 - RNA, 12 nt, Human herpesvirus 6
ggaguugcagug

SEQ ID NO: 2038922 - RNA, 14 nt, Human herpesvirus 6
acgaagaauuauuu

SEQ ID NO: 2038923 - RNA, 22 nt, Human herpesvirus 6
ggccacguccucgugcucugcc

SEQ ID NO: 2038924 - RNA, 17 nt, Human herpesvirus 6
guuaugaaugagauguu

SEQ ID NO: 2038925 - RNA, 20 nt, Human herpesvirus 6
caacacuuuuaccaugcgcc

SEQ ID NO: 2038926 - RNA, 18 nt, Human herpesvirus 6
ggcgucaucgguggcaga

SEQ ID NO: 2038927 - RNA, 22 nt, Human herpesvirus 6
uaacgcaacucuaccuggaaac

SEQ ID NO: 2038928 - RNA, 15 nt, Human herpesvirus 6
gaaaaauucaaucag

SEQ ID NO: 2038929 - RNA, 18 nt, Human herpesvirus 6
cuggcaucugcggcucug

SEQ ID NO: 2038930 - RNA, 16 nt, Human herpesvirus 6
caauuacucaacauua

SEQ ID NO: 2038931 - RNA, 14 nt, Human herpesvirus 6
gauguuuccugaau

SEQ ID NO: 2038932 - RNA, 16 nt, Human herpesvirus 6
gaagaaccugaaaucu

SEQ ID NO: 2038933 - RNA, 19 nt, Human herpesvirus 6
ugaaagacagaggaaauaa

SEQ ID NO: 2038934 - RNA, 17 nt, Human herpesvirus 6
uccaguauugaagaaaa

SEQ ID NO: 2038935 - RNA, 14 nt, Human herpesvirus 6
uccaucuucagaca

SEQ ID NO: 2038936 - RNA, 14 nt, Human herpesvirus 6
ugaaguaaaacuau

SEQ ID NO: 2038937 - RNA, 15 nt, Human herpesvirus 6
agcaucugcugcuuu

SEQ ID NO: 2038938 - RNA, 22 nt, Human herpesvirus 6
uuuaauuacggaacaaggccaa

SEQ ID NO: 2038939 - RNA, 14 nt, Human herpesvirus 6
gaagugaaagcagu

SEQ ID NO: 2038940 - RNA, 12 nt, Human herpesvirus 6
aaagaacaugug

SEQ ID NO: 2038941 - RNA, 17 nt, Human herpesvirus 6
gaaaagguguuguguuu

SEQ ID NO: 2038942 - RNA, 18 nt, Human herpesvirus 6
uuuagaaacauuugcuga

SEQ ID NO: 2038943 - RNA, 20 nt, Human herpesvirus 6
cggggaggaggaggaggaag

SEQ ID NO: 2038944 - RNA, 22 nt, Human herpesvirus 6
cuuucuguuuuaauuaaaaaaa

SEQ ID NO: 2038945 - RNA, 16 nt, Human herpesvirus 6
auuuaaccuuuucacu

SEQ ID NO: 2038946 - RNA, 21 nt, Human herpesvirus 6
cgauguggagcggaaacauga

SEQ ID NO: 2038947 - RNA, 21 nt, Human herpesvirus 6
cgcugggaauugcauccaaag

SEQ ID NO: 2038948 - RNA, 15 nt, Human herpesvirus 6
aggaggaggaagaga

SEQ ID NO: 2038949 - RNA, 23 nt, Human herpesvirus 6
gcgucgcccccccgcagcuccuu

SEQ ID NO: 2038950 - RNA, 12 nt, Human herpesvirus 6
agaucagugggu

SEQ ID NO: 2038951 - RNA, 17 nt, Human herpesvirus 6
cugaaacuccccagaga

SEQ ID NO: 2038952 - RNA, 21 nt, Human herpesvirus 6
cgucauaccgaucccagcuca

SEQ ID NO: 2038953 - RNA, 18 nt, Human herpesvirus 6
ugcaguuuaaggauaaga

SEQ ID NO: 2038954 - RNA, 19 nt, Human herpesvirus 6
uauauuggauuggauggau

SEQ ID NO: 2038955 - RNA, 22 nt, Human herpesvirus 6
uaaauauguugaaucuuauuca

SEQ ID NO: 2038956 - RNA, 19 nt, Human herpesvirus 6
ggaugcaaucgaugugaca

SEQ ID NO: 2038957 - RNA, 13 nt, Human herpesvirus 6
uuuguugguuaaa

SEQ ID NO: 2038958 - RNA, 21 nt, Human herpesvirus 6
acucgugugucuuugugaaga

SEQ ID NO: 2038959 - RNA, 15 nt, Human herpesvirus 6
gccuguuuuagucua

SEQ ID NO: 2038960 - RNA, 14 nt, Human herpesvirus 6
aaaauuugcuaacg

SEQ ID NO: 2038961 - RNA, 16 nt, Human herpesvirus 6
accaacacaccugccu

SEQ ID NO: 2038962 - RNA, 15 nt, Human herpesvirus 6
auguagauaaauaua

SEQ ID NO: 2038963 - RNA, 22 nt, Human herpesvirus 6
caccgucugggacccacggugg

SEQ ID NO: 2038964 - RNA, 22 nt, Human herpesvirus 6
aacaauauagaagacgcaaaga

SEQ ID NO: 2038965 - RNA, 15 nt, Human herpesvirus 6
cgacaaccgccgccg

SEQ ID NO: 2038966 - RNA, 13 nt, Human herpesvirus 6
ucaugucggccuc

SEQ ID NO: 2038967 - RNA, 21 nt, Human herpesvirus 6
uauaugaggcgcuugaaacca

SEQ ID NO: 2038968 - RNA, 22 nt, Human herpesvirus 6
guuauugccgcuucuauauauc

SEQ ID NO: 2038969 - RNA, 23 nt, Human herpesvirus 6
acauccagaaaagcaaacaugca

SEQ ID NO: 2038970 - RNA, 14 nt, Human herpesvirus 6
caacaaccacagca

SEQ ID NO: 2038971 - RNA, 15 nt, Human herpesvirus 6
uucaugauauuccag

SEQ ID NO: 2038972 - RNA, 20 nt, Human herpesvirus 6
agaaaguucuaugucuagau

SEQ ID NO: 2038973 - RNA, 15 nt, Human herpesvirus 6
uaaaugguagcuauu

SEQ ID NO: 2038974 - RNA, 20 nt, Human herpesvirus 6
ccaauuuguguuuauuugcc

SEQ ID NO: 2038975 - RNA, 16 nt, Human herpesvirus 6
cgauuaguuuguguag

SEQ ID NO: 2038976 - RNA, 17 nt, Human herpesvirus 6
cuugacguauccucaga

SEQ ID NO: 2038977 - RNA, 22 nt, Human herpesvirus 6
uaaccauuuugaaaaaacaguu

SEQ ID NO: 2038978 - RNA, 12 nt, Human herpesvirus 6
cucugaaacacu

SEQ ID NO: 2038979 - RNA, 13 nt, Human herpesvirus 6
augugauugucuu

SEQ ID NO: 2038980 - RNA, 16 nt, Human herpesvirus 6
ccucaugaguguuuaa

SEQ ID NO: 2038981 - RNA, 14 nt, Human herpesvirus 6
uacuuucaugauuc

SEQ ID NO: 2038982 - RNA, 20 nt, Human herpesvirus 6
ugaauacgaggaggggagac

SEQ ID NO: 2038983 - RNA, 22 nt, Human herpesvirus 6
acccauuuccggaguugcagug

SEQ ID NO: 2038984 - RNA, 22 nt, Human herpesvirus 6
auggcuaacguacucaaagaaa

SEQ ID NO: 2038985 - RNA, 13 nt, Human herpesvirus 6
uguuuccugccca

SEQ ID NO: 2038986 - RNA, 12 nt, Human herpesvirus 6
gucuuuccugcc

SEQ ID NO: 2038987 - RNA, 15 nt, Human herpesvirus 6
uuaacauccaaaaua

SEQ ID NO: 2038988 - RNA, 22 nt, Human herpesvirus 6
ugggacccacgguggccuggca

SEQ ID NO: 2038989 - RNA, 17 nt, Human herpesvirus 6
cgugccgggaccccgac

SEQ ID NO: 2038990 - RNA, 15 nt, Human herpesvirus 6
uguaaauacccuggg

SEQ ID NO: 2038991 - RNA, 20 nt, Human herpesvirus 6
uuccaggcggcaugaauucc

SEQ ID NO: 2038992 - RNA, 22 nt, Human herpesvirus 6
uaauaaaggauguuugugacuc

SEQ ID NO: 2038993 - RNA, 22 nt, Human herpesvirus 6
uucuaccguagaccguuucuua

SEQ ID NO: 2038994 - RNA, 12 nt, Human herpesvirus 6
auauaaauagug

SEQ ID NO: 2038995 - RNA, 14 nt, Human herpesvirus 6
gcgacuauuugaaa

SEQ ID NO: 2038996 - RNA, 15 nt, Human herpesvirus 6
gucuccauccucgaa

SEQ ID NO: 2038997 - RNA, 16 nt, Human herpesvirus 6
aaguauccuaaauacc

SEQ ID NO: 2038998 - RNA, 16 nt, Human herpesvirus 6
aggucaucaugcugug

SEQ ID NO: 2038999 - RNA, 17 nt, Human herpesvirus 6
ccgguuacggaaaagau

SEQ ID NO: 2039000 - RNA, 16 nt, Human herpesvirus 6
ggguuggaaaucaguu

SEQ ID NO: 2039001 - RNA, 11 nt, Human herpesvirus 6
uccaauccuau

SEQ ID NO: 2039002 - RNA, 12 nt, Human herpesvirus 6
cuuuaaagcagc

SEQ ID NO: 2039003 - RNA, 17 nt, Human herpesvirus 6
acgacuucgacuucaaa

SEQ ID NO: 2039004 - RNA, 22 nt, Human herpesvirus 6
cauccaaauacacuuucauagg

SEQ ID NO: 2039005 - RNA, 18 nt, Human herpesvirus 6
uaaacauuuauaaaagga

SEQ ID NO: 2039006 - RNA, 15 nt, Human herpesvirus 6
auaauuuauggaaau

SEQ ID NO: 2039007 - RNA, 13 nt, Human herpesvirus 6
uucaguaucuguu

SEQ ID NO: 2039008 - RNA, 12 nt, Human herpesvirus 6
aauauagacuuu

SEQ ID NO: 2039009 - RNA, 14 nt, Human herpesvirus 6
cucugcaaaacaaa

SEQ ID NO: 2039010 - RNA, 16 nt, Human herpesvirus 6
agaaaauaaaaaaaag

SEQ ID NO: 2039011 - RNA, 17 nt, Human herpesvirus 6
uggggucuuuccugccc

SEQ ID NO: 2039012 - RNA, 20 nt, Human herpesvirus 6
cccgcucggucucgcacuuc

SEQ ID NO: 2039013 - RNA, 19 nt, Human herpesvirus 6
uaccgugucuuuaaugggu

SEQ ID NO: 2039014 - RNA, 20 nt, Human herpesvirus 6
cuuacaauguuuuugacaaa

SEQ ID NO: 2039015 - RNA, 19 nt, Human herpesvirus 6
ccuuuaacuuuuugcauuc

SEQ ID NO: 2039016 - RNA, 22 nt, Human herpesvirus 6
uuaacuagguagcguacaaguc

SEQ ID NO: 2039017 - RNA, 11 nt, Human herpesvirus 6
cuagaggugcc

SEQ ID NO: 2039018 - RNA, 17 nt, Human herpesvirus 6
aaaauuuuauaaugagu

SEQ ID NO: 2039019 - RNA, 12 nt, Human herpesvirus 6
uucagagugaau

SEQ ID NO: 2039020 - RNA, 16 nt, Human herpesvirus 6
gaccucauauaagaac

SEQ ID NO: 2039021 - RNA, 16 nt, Human herpesvirus 6
uauucucggucuugcu

SEQ ID NO: 2039022 - RNA, 22 nt, Human herpesvirus 6
cauacauuccuuaagaaugaaa

SEQ ID NO: 2039023 - RNA, 21 nt, Human herpesvirus 6
uagccauuuuuuucuuacacg

SEQ ID NO: 2039024 - RNA, 22 nt, Human herpesvirus 6
cugugucuguucaacgucuuca

SEQ ID NO: 2039025 - RNA, 23 nt, Human herpesvirus 6
guagccuaggccuucaccugucu

SEQ ID NO: 2039026 - RNA, 15 nt, Human herpesvirus 6
auguggcaucggcuu

SEQ ID NO: 2039027 - RNA, 16 nt, Human herpesvirus 6
uuuugaagguaucaaa

SEQ ID NO: 2039028 - RNA, 23 nt, Human herpesvirus 6
gcuuauacuguuguaaaauauag

SEQ ID NO: 2039029 - RNA, 20 nt, Human herpesvirus 6
agauuuggcauuaaaggacu

SEQ ID NO: 2039030 - RNA, 15 nt, Human herpesvirus 6
ucucuucgaaauuuu

SEQ ID NO: 2039031 - RNA, 22 nt, Human herpesvirus 6
auuauaaauguagcauacgaca

SEQ ID NO: 2039032 - RNA, 20 nt, Human herpesvirus 6
cuuauuaacgcagcaacaau

SEQ ID NO: 2039033 - RNA, 19 nt, Human herpesvirus 6
gcacgcacgacaacacgcc

SEQ ID NO: 2039034 - RNA, 20 nt, Human herpesvirus 6
caacaggcuugugaaagacc

SEQ ID NO: 2039035 - RNA, 16 nt, Human herpesvirus 6
acgacacgcuggagca

SEQ ID NO: 2039036 - RNA, 22 nt, Human herpesvirus 6
uguaaagaaguaucgagauuuu

SEQ ID NO: 2039037 - RNA, 14 nt, Human herpesvirus 6
ccugccuacacugc

SEQ ID NO: 2039038 - RNA, 17 nt, Human herpesvirus 6
cacgugaaauaaaguuu

SEQ ID NO: 2039039 - RNA, 20 nt, Human herpesvirus 6
ugauuaacaaauuacaauca

SEQ ID NO: 2039040 - RNA, 10 nt, Human herpesvirus 6
ucuacaaaaa

SEQ ID NO: 2039041 - RNA, 22 nt, Human herpesvirus 6
uucaaaagaguuacuagcaguu

SEQ ID NO: 2039042 - RNA, 11 nt, Human herpesvirus 6
cgauguuuuca

SEQ ID NO: 2039043 - RNA, 20 nt, Human herpesvirus 6
gucuucaauaaaaacucaau

SEQ ID NO: 2039044 - RNA, 18 nt, Human herpesvirus 6
uggccuucgguacaguga

SEQ ID NO: 2039045 - RNA, 15 nt, Human herpesvirus 6
acacaaaaaauugac

SEQ ID NO: 2039046 - RNA, 13 nt, Human herpesvirus 6
ucuauggaucuga

SEQ ID NO: 2039047 - RNA, 12 nt, Human herpesvirus 6
aaguauguacaa

SEQ ID NO: 2039048 - RNA, 14 nt, Human herpesvirus 6
gcaguggacggcgg

SEQ ID NO: 2039049 - RNA, 18 nt, Human herpesvirus 6
ucuucguacguacuacag

SEQ ID NO: 2039050 - RNA, 20 nt, Human herpesvirus 6
caaguguuuggugugacauu

SEQ ID NO: 2039051 - RNA, 22 nt, Human herpesvirus 6
cagauggugcgaucgagcaaca

SEQ ID NO: 2039052 - RNA, 16 nt, Human herpesvirus 6
uacuauaaacaauugu

SEQ ID NO: 2039053 - RNA, 20 nt, Human herpesvirus 6
uaaaugaauguguucacaga

SEQ ID NO: 2039054 - RNA, 17 nt, Human herpesvirus 6
gcuagauaauuaugcau

SEQ ID NO: 2039055 - RNA, 11 nt, Human herpesvirus 6
ccaaaggaaac

SEQ ID NO: 2039056 - RNA, 15 nt, Human herpesvirus 6
aacauagaaaaauga

SEQ ID NO: 2039057 - RNA, 10 nt, Human herpesvirus 6
cuuuccugca

SEQ ID NO: 2039058 - RNA, 22 nt, Human herpesvirus 6
uauuccccauuccuagaggugc

SEQ ID NO: 2039059 - RNA, 22 nt, Human herpesvirus 6
gguuucuugauuagagacgcac

SEQ ID NO: 2039060 - RNA, 22 nt, Human herpesvirus 6
uuaacaucgugauaacaaugca

SEQ ID NO: 2039061 - RNA, 13 nt, Human herpesvirus 6
augugucggccgu

SEQ ID NO: 2039062 - RNA, 18 nt, Human herpesvirus 6
ugcgucgcccccccgcag

SEQ ID NO: 2039063 - RNA, 15 nt, Human herpesvirus 6
uuagaacaauuauca

SEQ ID NO: 2039064 - RNA, 19 nt, Human herpesvirus 6
uacuuacaucgauccaaaa

SEQ ID NO: 2039065 - RNA, 13 nt, Human herpesvirus 6
aauaauugcauuc

SEQ ID NO: 2039066 - RNA, 18 nt, Human herpesvirus 6
aguugggacuuggaaacg

SEQ ID NO: 2039067 - RNA, 17 nt, Human herpesvirus 6
gcgaaugcucaaccuaa

SEQ ID NO: 2039068 - RNA, 23 nt, Human herpesvirus 6
cacccauuuccggaguugcagug

SEQ ID NO: 2039069 - RNA, 16 nt, Human herpesvirus 6
gucucuguucugccac

SEQ ID NO: 2039070 - RNA, 16 nt, Human herpesvirus 6
uguuagaucacguuca

SEQ ID NO: 2039071 - RNA, 17 nt, Human herpesvirus 6
gacgccuugauguuucc

SEQ ID NO: 2039072 - RNA, 18 nt, Human herpesvirus 6
ggacccacgguggccugg

SEQ ID NO: 2039073 - RNA, 20 nt, Human herpesvirus 6
cuauuaaacuaacauagcga

SEQ ID NO: 2039074 - RNA, 18 nt, Human herpesvirus 6
aaaguuucggaaaaugua

SEQ ID NO: 2039075 - RNA, 16 nt, Human herpesvirus 6
uaaaggucagugggug

SEQ ID NO: 2039076 - RNA, 16 nt, Human herpesvirus 6
agcauauuuuggcaaa

SEQ ID NO: 2039077 - RNA, 16 nt, Human herpesvirus 6
guguuuacauauacau

SEQ ID NO: 2039078 - RNA, 23 nt, Human herpesvirus 6
ugauaccgaaaucuccugagaag

SEQ ID NO: 2039079 - RNA, 20 nt, Human herpesvirus 6
uauuguguaacucuuuuugu

SEQ ID NO: 2039080 - RNA, 14 nt, Human herpesvirus 6
cgagcggugugcag

SEQ ID NO: 2039081 - RNA, 16 nt, Human herpesvirus 6
uuuccugcacaggcga

SEQ ID NO: 2039082 - RNA, 18 nt, Human herpesvirus 6
ugggggucuuuccugcac

SEQ ID NO: 2039083 - RNA, 17 nt, Human herpesvirus 6
auaucguggaauggcug

SEQ ID NO: 2039084 - RNA, 13 nt, Human herpesvirus 6
auuccuucaaugu

SEQ ID NO: 2039085 - RNA, 21 nt, Human herpesvirus 6
ccuggcggacaccgagggcgg

SEQ ID NO: 2039086 - RNA, 17 nt, Human herpesvirus 6
uauuuaugaaaauugcu

SEQ ID NO: 2039087 - RNA, 23 nt, Human herpesvirus 6
uagcgaaugaauuuacuguuuua

SEQ ID NO: 2039088 - RNA, 23 nt, Human herpesvirus 6
agaucuauuucucguucuccguu

SEQ ID NO: 2039089 - RNA, 19 nt, Human herpesvirus 6
agcagaaguuuacauagaa

SEQ ID NO: 2039090 - RNA, 17 nt, Human herpesvirus 6
aucgagaaucuuccuuu

SEQ ID NO: 2039091 - RNA, 12 nt, Human herpesvirus 6
gcuggaaagaga

SEQ ID NO: 2039092 - RNA, 21 nt, Human herpesvirus 6
aaaacauaucgagccaaagaa

SEQ ID NO: 2039093 - RNA, 13 nt, Human herpesvirus 6
cuugcgauacaug

SEQ ID NO: 2039094 - RNA, 12 nt, Human herpesvirus 6
guugaguuucag

SEQ ID NO: 2039095 - RNA, 20 nt, Human herpesvirus 6
agaaugcaacauccugcgug

SEQ ID NO: 2039096 - RNA, 12 nt, Human herpesvirus 6
aauuuuaaaugc

SEQ ID NO: 2039097 - RNA, 13 nt, Human herpesvirus 6
auaagacacugau

SEQ ID NO: 2039098 - RNA, 21 nt, Human herpesvirus 6
agauuuauugcgauucuaaua

SEQ ID NO: 2039099 - RNA, 17 nt, Human herpesvirus 6
guugagguguuuccugc

SEQ ID NO: 2039100 - RNA, 11 nt, Human herpesvirus 6
acgucuucaaa

SEQ ID NO: 2039101 - RNA, 14 nt, Human herpesvirus 6
augacaagaaaggu

SEQ ID NO: 2039102 - RNA, 13 nt, Human herpesvirus 6
uguguauuguaaa

SEQ ID NO: 2039103 - RNA, 20 nt, Human herpesvirus 6
cacguuuuuccaugucuucu

SEQ ID NO: 2039104 - RNA, 13 nt, Human herpesvirus 6
aaaaaaucuaucc

SEQ ID NO: 2039105 - RNA, 14 nt, Human herpesvirus 6
uuuccugcccaggc

SEQ ID NO: 2039106 - RNA, 14 nt, Human herpesvirus 6
acaaguuucaauau

SEQ ID NO: 2039107 - RNA, 17 nt, Human herpesvirus 6
cguccauacaguugugu

SEQ ID NO: 2039108 - RNA, 16 nt, Human herpesvirus 6
aagauuacggcaacau

SEQ ID NO: 2039109 - RNA, 22 nt, Human herpesvirus 6
guuugaguugggacuuggaaac

SEQ ID NO: 2039110 - RNA, 13 nt, Human herpesvirus 6
caugcaaaacaga

SEQ ID NO: 2039111 - RNA, 23 nt, Human herpesvirus 6
ggauaagcagaagaguuuuuuaa

SEQ ID NO: 2039112 - RNA, 21 nt, Human herpesvirus 6
cuuaaagcguuugcaaaacug

SEQ ID NO: 2039113 - RNA, 18 nt, Human herpesvirus 6
ggaagaggaagggauggc

SEQ ID NO: 2039114 - RNA, 20 nt, Human herpesvirus 6
aaaaagagaggaaagaauua

SEQ ID NO: 2039115 - RNA, 12 nt, Human herpesvirus 6
ucaaauccucua

SEQ ID NO: 2039116 - RNA, 19 nt, Human herpesvirus 6
caucagcccccagcugaaa

SEQ ID NO: 2039117 - RNA, 18 nt, Human herpesvirus 6
cuucgauccaauaagaaa

SEQ ID NO: 2039118 - RNA, 14 nt, Human herpesvirus 6
agauaagagaguuu

SEQ ID NO: 2039119 - RNA, 17 nt, Human herpesvirus 6
uugcaauaaaaaaugga

SEQ ID NO: 2039120 - RNA, 16 nt, Human herpesvirus 6
uaaucaucccaauaaa

SEQ ID NO: 2039121 - RNA, 16 nt, Human herpesvirus 6
aaagucaguggguacc

SEQ ID NO: 2039122 - RNA, 23 nt, Human herpesvirus 6
accgcaguuccuguuuuucucgg

SEQ ID NO: 2039123 - RNA, 19 nt, Human herpesvirus 6
cugaccguuguaagaagaa

SEQ ID NO: 2039124 - RNA, 13 nt, Human herpesvirus 6
aaaugcacuguuu

SEQ ID NO: 2039125 - RNA, 13 nt, Human herpesvirus 6
ucuauauccuguc

SEQ ID NO: 2039126 - RNA, 13 nt, Human herpesvirus 6
agagacugguuga

SEQ ID NO: 2039127 - RNA, 16 nt, Human herpesvirus 6
auggcgucgaaguauu

SEQ ID NO: 2039128 - RNA, 20 nt, Human herpesvirus 6
aaagcaucucaaaaaacaua

SEQ ID NO: 2039129 - RNA, 13 nt, Human herpesvirus 6
guguuuguucuuu

SEQ ID NO: 2039130 - RNA, 16 nt, Human herpesvirus 6
cuguucuucucagaaa

SEQ ID NO: 2039131 - RNA, 21 nt, Human herpesvirus 6
gaaaaaaacacaaaucuggau

SEQ ID NO: 2039132 - RNA, 14 nt, Human herpesvirus 6
ucuuacaauguuuu

SEQ ID NO: 2039133 - RNA, 23 nt, Human herpesvirus 6
ccccauacgauauaaaauuuaau

SEQ ID NO: 2039134 - RNA, 16 nt, Human herpesvirus 6
caaguuugugugccuu

SEQ ID NO: 2039135 - RNA, 23 nt, Human herpesvirus 6
gaauuuguggaacaauagacgaa

SEQ ID NO: 2039136 - RNA, 15 nt, Human herpesvirus 6
agucgacaaauuaua

SEQ ID NO: 2039137 - RNA, 16 nt, Human herpesvirus 6
auacaaaauuugaaau

SEQ ID NO: 2039138 - RNA, 15 nt, Human herpesvirus 6
gaaaucguauacguu

SEQ ID NO: 2039139 - RNA, 13 nt, Human herpesvirus 6
uccccacaauaag

SEQ ID NO: 2039140 - RNA, 20 nt, Human herpesvirus 6
gcccgccggcccauccaccu

SEQ ID NO: 2039141 - RNA, 21 nt, Human herpesvirus 6
caagaaugccgugaauugugu

SEQ ID NO: 2039142 - RNA, 20 nt, Human herpesvirus 6
cuuauugaggaaaugcagca

SEQ ID NO: 2039143 - RNA, 14 nt, Human herpesvirus 6
cccuacuacagugg

SEQ ID NO: 2039144 - RNA, 19 nt, Human herpesvirus 6
caucugcaaaaaacaaaug

SEQ ID NO: 2039145 - RNA, 14 nt, Human herpesvirus 6
guucgauugccaaa

SEQ ID NO: 2039146 - RNA, 23 nt, Human herpesvirus 6
ggacagggggaucgacgggcagg

SEQ ID NO: 2039147 - RNA, 20 nt, Human herpesvirus 6
uguaguuuaguaugggugag

SEQ ID NO: 2039148 - RNA, 14 nt, Human herpesvirus 6
cucugcggacggag

SEQ ID NO: 2039149 - RNA, 21 nt, Human herpesvirus 6
acugaccguuguaagaagaaa

SEQ ID NO: 2039150 - RNA, 19 nt, Human herpesvirus 6
gccaugaaacaggaacagu

SEQ ID NO: 2039151 - RNA, 17 nt, Human herpesvirus 6
caucucgugcaaaagcu

SEQ ID NO: 2039152 - RNA, 21 nt, Human herpesvirus 6
cggaaaaauuuuauaaugagu

SEQ ID NO: 2039153 - RNA, 19 nt, Human herpesvirus 6
cccucguccaaaucagacg

SEQ ID NO: 2039154 - RNA, 17 nt, Human herpesvirus 6
gaacaaaguaauaugau

SEQ ID NO: 2039155 - RNA, 19 nt, Human herpesvirus 6
ucaagacuacucuggcuga

SEQ ID NO: 2039156 - RNA, 11 nt, Human herpesvirus 6
uuaaggcauug

SEQ ID NO: 2039157 - RNA, 18 nt, Human herpesvirus 6
caaccugaaacuccccag

SEQ ID NO: 2039158 - RNA, 22 nt, Human herpesvirus 6
caggcgaacgaaaacucuaaaa

SEQ ID NO: 2039159 - RNA, 21 nt, Human herpesvirus 6
ccucgcgcaccgccuccgcca

SEQ ID NO: 2039160 - RNA, 13 nt, Human herpesvirus 6
caccaacacaccu

SEQ ID NO: 2039161 - RNA, 19 nt, Human herpesvirus 6
gucgcccccccgcagcucc

SEQ ID NO: 2039162 - RNA, 21 nt, Human herpesvirus 6
cccacgguggccuggcacggu

SEQ ID NO: 2039163 - RNA, 18 nt, Human herpesvirus 6
ugauuuuguuuucuacgu

SEQ ID NO: 2039164 - RNA, 14 nt, Human herpesvirus 6
cuauguaaacuucu

SEQ ID NO: 2039165 - RNA, 16 nt, Human herpesvirus 6
cgcgcauguugcaguu

SEQ ID NO: 2039166 - RNA, 20 nt, Human herpesvirus 6
uagacgaaaauuguaacuuc

SEQ ID NO: 2039167 - RNA, 14 nt, Human herpesvirus 6
uuucuuacacaaau

SEQ ID NO: 2039168 - RNA, 15 nt, Human herpesvirus 6
auuaucauagacaaa

SEQ ID NO: 2039169 - RNA, 11 nt, Human herpesvirus 6
uaaaaagagag

SEQ ID NO: 2039170 - RNA, 14 nt, Human herpesvirus 6
aggaacgauaugcu

SEQ ID NO: 2039171 - RNA, 23 nt, Human herpesvirus 6
uacccuaagugaaauucaaaaua

SEQ ID NO: 2039172 - RNA, 22 nt, Human herpesvirus 6
ucgaaauucaccagauucacug

SEQ ID NO: 2039173 - RNA, 19 nt, Human herpesvirus 6
cgaguucgccuugucauca

SEQ ID NO: 2039174 - RNA, 18 nt, Human herpesvirus 6
uccgccuguuccacgcgc

SEQ ID NO: 2039175 - RNA, 16 nt, Human herpesvirus 6
auaauggcaugcauua

SEQ ID NO: 2039176 - RNA, 21 nt, Human herpesvirus 6
aacuacugagugcgaccuguc

SEQ ID NO: 2039177 - RNA, 12 nt, Human herpesvirus 6
acuuucauccug

SEQ ID NO: 2039178 - RNA, 14 nt, Human herpesvirus 6
gcccagauguggaa

SEQ ID NO: 2039179 - RNA, 19 nt, Human herpesvirus 6
guaacggcaggcuuuuuaa

SEQ ID NO: 2039180 - RNA, 14 nt, Human herpesvirus 6
cauccaccuucccu

SEQ ID NO: 2039181 - RNA, 23 nt, Human herpesvirus 6
uagcagaauagagagaaagagau

SEQ ID NO: 2039182 - RNA, 15 nt, Human herpesvirus 6
ggugagucacauaga

SEQ ID NO: 2039183 - RNA, 15 nt, Human herpesvirus 6
auaugaugcuguaga

SEQ ID NO: 2039184 - RNA, 22 nt, Human herpesvirus 6
caggcaaccgccgugcuucugg

SEQ ID NO: 2039185 - RNA, 19 nt, Human herpesvirus 6
auguuuuucauaaauggua

SEQ ID NO: 2039186 - RNA, 21 nt, Human herpesvirus 6
gcagaguccggcgcacgcaca

SEQ ID NO: 2039187 - RNA, 14 nt, Human herpesvirus 6
augcaaaucucacu

SEQ ID NO: 2039188 - RNA, 13 nt, Human herpesvirus 6
auaaaguuaauuc

SEQ ID NO: 2039189 - RNA, 18 nt, Human herpesvirus 6
acgcccccaccucgcgca

SEQ ID NO: 2039190 - RNA, 17 nt, Human herpesvirus 6
gacaaguaagauugcag

SEQ ID NO: 2039191 - RNA, 13 nt, Human herpesvirus 6
cagguuugaaaca

SEQ ID NO: 2039192 - RNA, 20 nt, Human herpesvirus 6
cagcggaagugaaagcaguc

SEQ ID NO: 2039193 - RNA, 22 nt, Human herpesvirus 6
ggcggcgaguaacggaaaacga

SEQ ID NO: 2039194 - RNA, 13 nt, Human herpesvirus 6
acgcacuggacau

SEQ ID NO: 2039195 - RNA, 12 nt, Human herpesvirus 6
guuuuuuaagag

SEQ ID NO: 2039196 - RNA, 16 nt, Human herpesvirus 6
cucuuuuuaauuccaa

SEQ ID NO: 2039197 - RNA, 21 nt, Human herpesvirus 6
aaaaucauuaccaguagcaca

SEQ ID NO: 2039198 - RNA, 17 nt, Human herpesvirus 6
aaaccaccggcuaaccc

SEQ ID NO: 2039199 - RNA, 15 nt, Human herpesvirus 6
aaaaucuauugaaga

SEQ ID NO: 2039200 - RNA, 15 nt, Human herpesvirus 6
cauccguuaguaaau

SEQ ID NO: 2039201 - RNA, 12 nt, Human herpesvirus 6
ggagauuucagg

SEQ ID NO: 2039202 - RNA, 18 nt, Human herpesvirus 6
aggcaguaaagccgauga

SEQ ID NO: 2039203 - RNA, 17 nt, Human herpesvirus 6
cgccguccuauucagag

SEQ ID NO: 2039204 - RNA, 22 nt, Human herpesvirus 6
aguccauuucuaccgauaguuu

SEQ ID NO: 2039205 - RNA, 19 nt, Human herpesvirus 6
gauuaugccgucuuauucc

SEQ ID NO: 2039206 - RNA, 19 nt, Human herpesvirus 6
caccgucugggacccacgg

SEQ ID NO: 2039207 - RNA, 17 nt, Human herpesvirus 6
cuaaauuucuacaaaaa

SEQ ID NO: 2039208 - RNA, 21 nt, Human herpesvirus 6
guugcuauagauuagaaauua

SEQ ID NO: 2039209 - RNA, 18 nt, Human herpesvirus 6
gcugaugcgauguggagc

SEQ ID NO: 2039210 - RNA, 15 nt, Human herpesvirus 6
caccgaaguacccau

SEQ ID NO: 2039211 - RNA, 15 nt, Human herpesvirus 6
aacuagaaaaacaac

SEQ ID NO: 2039212 - RNA, 16 nt, Human herpesvirus 6
augauauuccagacaa

SEQ ID NO: 2039213 - RNA, 22 nt, Human herpesvirus 6
auagaucuucggcgcugauucc

SEQ ID NO: 2039214 - RNA, 14 nt, Human herpesvirus 6
aggcugccaugaaa

SEQ ID NO: 2039215 - RNA, 16 nt, Human herpesvirus 6
uccucgugcucugccu

SEQ ID NO: 2039216 - RNA, 15 nt, Human herpesvirus 6
cggcggauggagccc

SEQ ID NO: 2039217 - RNA, 21 nt, Human herpesvirus 6
cuggcggacaccgagggcgga

SEQ ID NO: 2039218 - RNA, 22 nt, Human herpesvirus 6
ugcuaggacuucguucuugaca

SEQ ID NO: 2039219 - RNA, 19 nt, Human herpesvirus 6
ugccauaauuucuguuuug

SEQ ID NO: 2039220 - RNA, 13 nt, Human herpesvirus 6
auuaauuaagugc

SEQ ID NO: 2039221 - RNA, 13 nt, Human herpesvirus 6
aacgcuccucccc

SEQ ID NO: 2039222 - RNA, 19 nt, Human herpesvirus 6
ggauagagagauagauaug

SEQ ID NO: 2039223 - RNA, 15 nt, Human herpesvirus 6
uauguaugaacaggu

SEQ ID NO: 2039224 - RNA, 18 nt, Human herpesvirus 6
aaccucauuaugaauaac

SEQ ID NO: 2039225 - RNA, 17 nt, Human herpesvirus 6
agagacguuguuugacc

SEQ ID NO: 2039226 - RNA, 16 nt, Human herpesvirus 6
caucugccauaucaca

SEQ ID NO: 2039227 - RNA, 21 nt, Human herpesvirus 6
aagagugggaugcauuauacu

SEQ ID NO: 2039228 - RNA, 19 nt, Human herpesvirus 6
cugucuauuaucuggccuc

SEQ ID NO: 2039229 - RNA, 18 nt, Human herpesvirus 6
gacacgcuaaaaacagac

SEQ ID NO: 2039230 - RNA, 23 nt, Human herpesvirus 6
acgaugugugggaaugcugagcu

SEQ ID NO: 2039231 - RNA, 16 nt, Human herpesvirus 6
aaagcagcagaugcuu

SEQ ID NO: 2039232 - RNA, 18 nt, Human herpesvirus 6
aaaguucaguaacauuua

SEQ ID NO: 2039233 - RNA, 21 nt, Human herpesvirus 6
cuguuauaacacaacaaguaa

SEQ ID NO: 2039234 - RNA, 21 nt, Human herpesvirus 6
acagacuccccaccgagaucc

SEQ ID NO: 2039235 - RNA, 16 nt, Human herpesvirus 6
acagaccgucaaaucu

SEQ ID NO: 2039236 - RNA, 16 nt, Human herpesvirus 6
auaaaggucagugggu

SEQ ID NO: 2039237 - RNA, 16 nt, Human herpesvirus 6
agcuaaacaccacuug

SEQ ID NO: 2039238 - RNA, 15 nt, Human herpesvirus 6
uucuauguuauguaa

SEQ ID NO: 2039239 - RNA, 17 nt, Human herpesvirus 6
ccucgcccgauccgccc

SEQ ID NO: 2039240 - RNA, 17 nt, Human herpesvirus 6
acggcgcggagcccaag

SEQ ID NO: 2039241 - RNA, 18 nt, Human herpesvirus 6
cgugccaccgucugggac

SEQ ID NO: 2039242 - RNA, 13 nt, Human herpesvirus 6
guguuauucggag

SEQ ID NO: 2039243 - RNA, 19 nt, Human herpesvirus 6
ugugacuacguuuuguguu

SEQ ID NO: 2039244 - RNA, 13 nt, Human herpesvirus 6
uaucaccuuacaa

SEQ ID NO: 2039245 - RNA, 21 nt, Human herpesvirus 6
accccucccaucccccucccc

SEQ ID NO: 2039246 - RNA, 15 nt, Human herpesvirus 6
auaugcaaacugacu

SEQ ID NO: 2039247 - RNA, 22 nt, Human herpesvirus 6
guuuuucauaaaugguagcuau

SEQ ID NO: 2039248 - RNA, 15 nt, Human herpesvirus 6
ggaauuuugagauuu

SEQ ID NO: 2039249 - RNA, 14 nt, Human herpesvirus 6
caucaaauccucua

SEQ ID NO: 2039250 - RNA, 21 nt, Human herpesvirus 6
gccaucuaucgcgcaccgcug

SEQ ID NO: 2039251 - RNA, 21 nt, Human herpesvirus 6
aauguaacuuuuuguauuaug

SEQ ID NO: 2039252 - RNA, 12 nt, Human herpesvirus 6
cuugacagagau

SEQ ID NO: 2039253 - RNA, 13 nt, Human herpesvirus 6
guaccuguacaag

SEQ ID NO: 2039254 - RNA, 12 nt, Human herpesvirus 6
uggauguuuucg

SEQ ID NO: 2039255 - RNA, 20 nt, Human herpesvirus 6
uguuucuaacagaggguuua

SEQ ID NO: 2039256 - RNA, 17 nt, Human herpesvirus 6
ccuaaauacauucacau

SEQ ID NO: 2039257 - RNA, 18 nt, Human herpesvirus 6
uaaugagaggacagucaa

SEQ ID NO: 2039258 - RNA, 23 nt, Human herpesvirus 6
ccucacuacugaaaccaaagcau

SEQ ID NO: 2039259 - RNA, 20 nt, Human herpesvirus 6
uaccgcgguuuggggucuuu

SEQ ID NO: 2039260 - RNA, 15 nt, Human herpesvirus 6
gauagaggaauugcu

SEQ ID NO: 2039261 - RNA, 12 nt, Human herpesvirus 6
caugaacucuca

SEQ ID NO: 2039262 - RNA, 18 nt, Human herpesvirus 6
uuaaaacaauggaaaagg

SEQ ID NO: 2039263 - RNA, 19 nt, Human herpesvirus 6
uaacaggauucccuucaga

SEQ ID NO: 2039264 - RNA, 20 nt, Human herpesvirus 6
agguccccccucggacagau

SEQ ID NO: 2039265 - RNA, 15 nt, Human herpesvirus 6
uuuacgguuucaggc

SEQ ID NO: 2039266 - RNA, 13 nt, Human herpesvirus 6
acaacaacaauaa

SEQ ID NO: 2039267 - RNA, 16 nt, Human herpesvirus 6
gggucuuuccugcaca

SEQ ID NO: 2039268 - RNA, 16 nt, Human herpesvirus 6
auccaccaaugacacc

SEQ ID NO: 2039269 - RNA, 16 nt, Human herpesvirus 6
ggggagggacccacag

SEQ ID NO: 2039270 - RNA, 21 nt, Human herpesvirus 6
aaauauuaaucguuacaaaau

SEQ ID NO: 2039271 - RNA, 16 nt, Human herpesvirus 6
cggacaccgagggcgg

SEQ ID NO: 2039272 - RNA, 18 nt, Human herpesvirus 6
agugguuuaauggaaacc

SEQ ID NO: 2039273 - RNA, 12 nt, Human herpesvirus 6
cuguuuuaaccg

SEQ ID NO: 2039274 - RNA, 16 nt, Human herpesvirus 6
guauuauguaauacau

SEQ ID NO: 2039275 - RNA, 23 nt, Human herpesvirus 6
auguguauuauguaaauaugcuu

SEQ ID NO: 2039276 - RNA, 20 nt, Human herpesvirus 6
uauuucugguuguguuaauc

SEQ ID NO: 2039277 - RNA, 15 nt, Human herpesvirus 6
acaaugacugggaga

SEQ ID NO: 2039278 - RNA, 19 nt, Human herpesvirus 6
guggauuaugaguaugaaa

SEQ ID NO: 2039279 - RNA, 18 nt, Human herpesvirus 6
ggauucccuucagacauc

SEQ ID NO: 2039280 - RNA, 16 nt, Human herpesvirus 6
cucguaacgcggcaac

SEQ ID NO: 2039281 - RNA, 14 nt, Human herpesvirus 6
aaccaccggcuaac

SEQ ID NO: 2039282 - RNA, 17 nt, Human herpesvirus 6
uagauuuuaauuuugaa

SEQ ID NO: 2039283 - RNA, 18 nt, Human herpesvirus 6
uucgauccaauaagaaac

SEQ ID NO: 2039284 - RNA, 12 nt, Human herpesvirus 6
ggugaaaugaau

SEQ ID NO: 2039285 - RNA, 23 nt, Human herpesvirus 6
cgucugggacccacgguggccug

SEQ ID NO: 2039286 - RNA, 22 nt, Human herpesvirus 6
guuuuagagaaaagugcaaggg

SEQ ID NO: 2039287 - RNA, 13 nt, Human herpesvirus 6
agguugagaauga

SEQ ID NO: 2039288 - RNA, 16 nt, Human herpesvirus 6
aaaaacguuuuuguua

SEQ ID NO: 2039289 - RNA, 20 nt, Human herpesvirus 6
auaacuuuacauuaaacacu

SEQ ID NO: 2039290 - RNA, 22 nt, Human herpesvirus 6
uggggucuuuccugcacaggcg

SEQ ID NO: 2039291 - RNA, 16 nt, Human herpesvirus 6
uuauauucuucuguaa

SEQ ID NO: 2039292 - RNA, 18 nt, Human herpesvirus 6
auccaacgaauacuucuc

SEQ ID NO: 2039293 - RNA, 19 nt, Human herpesvirus 6
cgcuccgcgccccucgccc

SEQ ID NO: 2039294 - RNA, 17 nt, Human herpesvirus 6
guaauauagacauugcu

SEQ ID NO: 2039295 - RNA, 20 nt, Human herpesvirus 6
aaaccaaagcauacucaacc

SEQ ID NO: 2039296 - RNA, 21 nt, Human herpesvirus 6
cgggcccggggacggacaggg

SEQ ID NO: 2039297 - RNA, 15 nt, Human herpesvirus 6
acaaauuuuuaacua

SEQ ID NO: 2039298 - RNA, 12 nt, Human herpesvirus 6
uuaaauauuaau

SEQ ID NO: 2039299 - RNA, 22 nt, Human herpesvirus 6
aauaacucagauucgcaagacu

SEQ ID NO: 2039300 - RNA, 18 nt, Human herpesvirus 6
ggcgcgcauguugcaguu

SEQ ID NO: 2039301 - RNA, 15 nt, Human herpesvirus 6
cgcaguggacggcgg

SEQ ID NO: 2039302 - RNA, 15 nt, Human herpesvirus 6
cccaucgucuccucc

SEQ ID NO: 2039303 - RNA, 17 nt, Human herpesvirus 6
ucaaagaaacaguaaau

SEQ ID NO: 2039304 - RNA, 12 nt, Human herpesvirus 6
cgcccccaccuc

SEQ ID NO: 2039305 - RNA, 21 nt, Human herpesvirus 6
ccaaauguauugaacuuugua

SEQ ID NO: 2039306 - RNA, 17 nt, Human herpesvirus 6
auugucugauauggcaa

SEQ ID NO: 2039307 - RNA, 16 nt, Human herpesvirus 6
cugcuggaugcugaug

SEQ ID NO: 2039308 - RNA, 23 nt, Human herpesvirus 6
uucucggaaaauuaaaagucagu

SEQ ID NO: 2039309 - RNA, 18 nt, Human herpesvirus 6
uugaauguuuaaaguuuu

SEQ ID NO: 2039310 - RNA, 14 nt, Human herpesvirus 6
uccggaguugcagu

SEQ ID NO: 2039311 - RNA, 14 nt, Human herpesvirus 6
gcacauaacugcau

SEQ ID NO: 2039312 - RNA, 14 nt, Human herpesvirus 6
guucaauuacucaa

SEQ ID NO: 2039313 - RNA, 21 nt, Human herpesvirus 6
cauacauucucguaguugcau

SEQ ID NO: 2039314 - RNA, 14 nt, Human herpesvirus 6
accuucccucccac

SEQ ID NO: 2039315 - RNA, 15 nt, Human herpesvirus 6
uucauuuguuuuuua

SEQ ID NO: 2039316 - RNA, 14 nt, Human herpesvirus 6
ucucagcuggcuga

SEQ ID NO: 2039317 - RNA, 13 nt, Human herpesvirus 6
auggaaauucgcu

SEQ ID NO: 2039318 - RNA, 13 nt, Human herpesvirus 6
ugcuguuuucacc

SEQ ID NO: 2039319 - RNA, 22 nt, Human herpesvirus 6
auauuaaucguuacaaaauuga

SEQ ID NO: 2039320 - RNA, 17 nt, Human herpesvirus 6
cguagacaguaaaaugu

SEQ ID NO: 2039321 - RNA, 19 nt, Human herpesvirus 6
ggaaaauauuuccugccca

SEQ ID NO: 2039322 - RNA, 15 nt, Human herpesvirus 6
uaacgaacaaaucuc

SEQ ID NO: 2039323 - RNA, 22 nt, Human herpesvirus 6
ucgcgcgcgcgggcccuccucg

SEQ ID NO: 2039324 - RNA, 21 nt, Human herpesvirus 6
cuaauaaaugucaaagaaaca

SEQ ID NO: 2039325 - RNA, 21 nt, Human herpesvirus 6
gcaaaucucacugucgaaauu

SEQ ID NO: 2039326 - RNA, 19 nt, Human herpesvirus 6
gauagcagaauagagagaa

SEQ ID NO: 2039327 - RNA, 14 nt, Human herpesvirus 6
ugacauucaaaguc

SEQ ID NO: 2039328 - RNA, 16 nt, Human herpesvirus 6
uaagcgugacuuauau

SEQ ID NO: 2039329 - RNA, 19 nt, Human herpesvirus 6
cgaaucucaagcacaaaac

SEQ ID NO: 2039330 - RNA, 20 nt, Human herpesvirus 6
cuaccaugugcggagaaagu

SEQ ID NO: 2039331 - RNA, 23 nt, Human herpesvirus 6
aaggacuaucugagacaguccau

SEQ ID NO: 2039332 - RNA, 20 nt, Human herpesvirus 6
uuuguuucagcguauucaga

SEQ ID NO: 2039333 - RNA, 23 nt, Human herpesvirus 6
cauuugcugaugcgauguggagc

SEQ ID NO: 2039334 - RNA, 14 nt, Human herpesvirus 6
aguguaacgagaau

SEQ ID NO: 2039335 - RNA, 16 nt, Human herpesvirus 6
ggccucccauguaugc

SEQ ID NO: 2039336 - RNA, 15 nt, Human herpesvirus 6
aucgcuuaaagaaaa

SEQ ID NO: 2039337 - RNA, 15 nt, Human herpesvirus 6
auuuugggacaagau

SEQ ID NO: 2039338 - RNA, 19 nt, Human herpesvirus 6
uacauuuuguacaaacuuu

SEQ ID NO: 2039339 - RNA, 23 nt, Human herpesvirus 6
gugggggguuccuccgcgggacc

SEQ ID NO: 2039340 - RNA, 20 nt, Human herpesvirus 6
ccacgcgacagauccgucuc

SEQ ID NO: 2039341 - RNA, 18 nt, Human herpesvirus 6
ucagccugagaacgggca

SEQ ID NO: 2039342 - RNA, 16 nt, Human herpesvirus 6
gccaauagauggugcu

SEQ ID NO: 2039343 - RNA, 17 nt, Human herpesvirus 6
gcagaauagagagaaag

SEQ ID NO: 2039344 - RNA, 20 nt, Human herpesvirus 6
uaaauuauuuugugauuaac

SEQ ID NO: 2039345 - RNA, 23 nt, Human herpesvirus 6
cuacauuaacagacgaggacgga

SEQ ID NO: 2039346 - RNA, 20 nt, Human herpesvirus 6
aaaacuccccucauuuucaa

SEQ ID NO: 2039347 - RNA, 20 nt, Human herpesvirus 6
gccuccccgggugcuccgcc

SEQ ID NO: 2039348 - RNA, 16 nt, Human herpesvirus 6
aaaauagauggcuuug

SEQ ID NO: 2039349 - RNA, 13 nt, Human herpesvirus 6
auugaagaaaauu

SEQ ID NO: 2039350 - RNA, 19 nt, Human herpesvirus 6
gcgaucauaaaacugccaa

SEQ ID NO: 2039351 - RNA, 18 nt, Human herpesvirus 6
acaacgguguggagacac

SEQ ID NO: 2039352 - RNA, 17 nt, Human herpesvirus 6
ccuuguguaucugugaa

SEQ ID NO: 2039353 - RNA, 23 nt, Human herpesvirus 6
cuuggacaccgguaaccucgcuc

SEQ ID NO: 2039354 - RNA, 14 nt, Human herpesvirus 6
cgggaccuggcgga

SEQ ID NO: 2039355 - RNA, 11 nt, Human herpesvirus 6
uuagucaguuu

SEQ ID NO: 2039356 - RNA, 18 nt, Human herpesvirus 6
ugacgccuugauguuucc

SEQ ID NO: 2039357 - RNA, 18 nt, Human herpesvirus 6
uugccgggaugagcuuua

SEQ ID NO: 2039358 - RNA, 20 nt, Human herpesvirus 6
aaucuguaagauuaaaugug

SEQ ID NO: 2039359 - RNA, 21 nt, Human herpesvirus 6
uuauucggaguuuucaagaug

SEQ ID NO: 2039360 - RNA, 17 nt, Human herpesvirus 6
gauaaagaucagugggu

SEQ ID NO: 2039361 - RNA, 15 nt, Human herpesvirus 6
cuucaauaaaaacuc

SEQ ID NO: 2039362 - RNA, 17 nt, Human herpesvirus 6
cauauagucaauguugu

SEQ ID NO: 2039363 - RNA, 21 nt, Human herpesvirus 6
uucuaccguagaccguuucuu

SEQ ID NO: 2039364 - RNA, 15 nt, Human herpesvirus 6
uacaaucaugugcau

SEQ ID NO: 2039365 - RNA, 22 nt, Human herpesvirus 6
acuuuuugccgaagauagcucu

SEQ ID NO: 2039366 - RNA, 18 nt, Human herpesvirus 6
acaaaaucuucuuugugc

SEQ ID NO: 2039367 - RNA, 14 nt, Human herpesvirus 6
ccgcgggaccuggc

SEQ ID NO: 2039368 - RNA, 22 nt, Human herpesvirus 6
aauucaaaaaccgccaagagau

SEQ ID NO: 2039369 - RNA, 20 nt, Human herpesvirus 6
uaacuuuuuguauuauguaa

SEQ ID NO: 2039370 - RNA, 14 nt, Human herpesvirus 6
cuucgguacaguga

SEQ ID NO: 2039371 - RNA, 13 nt, Human herpesvirus 6
uaauaugaacaau

SEQ ID NO: 2039372 - RNA, 13 nt, Human herpesvirus 6
augucgguaaacu

SEQ ID NO: 2039373 - RNA, 14 nt, Human herpesvirus 6
ccgaacuagaaaaa

SEQ ID NO: 2039374 - RNA, 13 nt, Human herpesvirus 6
aaagcgccugccu

SEQ ID NO: 2039375 - RNA, 14 nt, Human herpesvirus 6
acgguuuauaugca

SEQ ID NO: 2039376 - RNA, 11 nt, Human herpesvirus 6
acacacccagc

SEQ ID NO: 2039377 - RNA, 18 nt, Human herpesvirus 6
uuaacgcagcaacaaucc

SEQ ID NO: 2039378 - RNA, 14 nt, Human herpesvirus 6
aucuccaaaagcgc

SEQ ID NO: 2039379 - RNA, 16 nt, Human herpesvirus 6
gauucccuucagacau

SEQ ID NO: 2039380 - RNA, 19 nt, Human herpesvirus 6
ccgaggggacaggggagga

SEQ ID NO: 2039381 - RNA, 22 nt, Human herpesvirus 6
acacgacaaaacaaucagccug

SEQ ID NO: 2039382 - RNA, 20 nt, Human herpesvirus 6
ucgagccaaagaaacagaua

SEQ ID NO: 2039383 - RNA, 15 nt, Human herpesvirus 6
caacacaccugccua

SEQ ID NO: 2039384 - RNA, 18 nt, Human herpesvirus 6
auuagauaagagaguuuc

SEQ ID NO: 2039385 - RNA, 19 nt, Human herpesvirus 6
gugcgaucgagcaacagcg

SEQ ID NO: 2039386 - RNA, 12 nt, Human herpesvirus 6
uucgacagacga

SEQ ID NO: 2039387 - RNA, 17 nt, Human herpesvirus 6
aaucgauuacaaaacaa

SEQ ID NO: 2039388 - RNA, 15 nt, Human herpesvirus 6
ccaacacaccugccu

SEQ ID NO: 2039389 - RNA, 14 nt, Human herpesvirus 6
gaauaacagaugag

SEQ ID NO: 2039390 - RNA, 22 nt, Human herpesvirus 6
uauuuuaagcgugacuuauaua

SEQ ID NO: 2039391 - RNA, 15 nt, Human herpesvirus 6
caacauuuauguuuc

SEQ ID NO: 2039392 - RNA, 13 nt, Human herpesvirus 6
uggggucuuuccu

SEQ ID NO: 2039393 - RNA, 14 nt, Human herpesvirus 6
cuaaugauaaauug

SEQ ID NO: 2039394 - RNA, 19 nt, Human herpesvirus 6
aucacaccaauggucacac

SEQ ID NO: 2039395 - RNA, 12 nt, Human herpesvirus 6
uacacgaacuaa

SEQ ID NO: 2039396 - RNA, 23 nt, Human herpesvirus 6
acaagcacugaauuagaauaauu

SEQ ID NO: 2039397 - RNA, 15 nt, Human herpesvirus 6
acuuccgauaaagau

SEQ ID NO: 2039398 - RNA, 17 nt, Human herpesvirus 6
agaugacaucugcaaaa

SEQ ID NO: 2039399 - RNA, 17 nt, Human herpesvirus 6
gaccccugccgagccug

SEQ ID NO: 2039400 - RNA, 18 nt, Human herpesvirus 6
guuucgccaagaaaaaga

SEQ ID NO: 2039401 - RNA, 15 nt, Human herpesvirus 6
cccaugucuugccuc

SEQ ID NO: 2039402 - RNA, 14 nt, Human herpesvirus 6
cuaaaagcugcuaa

SEQ ID NO: 2039403 - RNA, 21 nt, Human herpesvirus 6
acagagaaggguaugaaacuu

SEQ ID NO: 2039404 - RNA, 22 nt, Human herpesvirus 6
auaacccuucaccgucucugaa

SEQ ID NO: 2039405 - RNA, 21 nt, Human herpesvirus 6
gcaacuacuuuuucaaguaag

SEQ ID NO: 2039406 - RNA, 18 nt, Human herpesvirus 6
cagucuucaauaaaaacu

SEQ ID NO: 2039407 - RNA, 20 nt, Human herpesvirus 6
caccccggggggugggagga

SEQ ID NO: 2039408 - RNA, 12 nt, Human herpesvirus 6
aaucacaaauau

SEQ ID NO: 2039409 - RNA, 16 nt, Human herpesvirus 6
gaggaaaugcagcagu

SEQ ID NO: 2039410 - RNA, 12 nt, Human herpesvirus 6
aucacaaaauuu

SEQ ID NO: 2039411 - RNA, 18 nt, Human herpesvirus 6
cgguccacacgccagucc

SEQ ID NO: 2039412 - RNA, 16 nt, Human herpesvirus 6
augccauaaagaacac

SEQ ID NO: 2039413 - RNA, 22 nt, Human herpesvirus 6
acugcauacguuugccaaagcu

SEQ ID NO: 2039414 - RNA, 15 nt, Human herpesvirus 6
uuauuaacaaugaaa

SEQ ID NO: 2039415 - RNA, 14 nt, Human herpesvirus 6
cccaccuaauaaac

SEQ ID NO: 2039416 - RNA, 20 nt, Human herpesvirus 6
caugagggacucggaaaagg

SEQ ID NO: 2039417 - RNA, 12 nt, Human herpesvirus 6
agagaaggaaaa

SEQ ID NO: 2039418 - RNA, 14 nt, Human herpesvirus 6
auauuccagacaau

SEQ ID NO: 2039419 - RNA, 23 nt, Human herpesvirus 6
cgacuaucaaaauaaaaauuuua

SEQ ID NO: 2039420 - RNA, 16 nt, Human herpesvirus 6
ugaacuacugagugcg

SEQ ID NO: 2039421 - RNA, 19 nt, Human herpesvirus 6
cuggaucggacggugaugg

SEQ ID NO: 2039422 - RNA, 15 nt, Human herpesvirus 6
ccuaaauaccauuuu

SEQ ID NO: 2039423 - RNA, 21 nt, Human herpesvirus 6
acacgcuggagcagcuuccac

SEQ ID NO: 2039424 - RNA, 16 nt, Human herpesvirus 6
uuaauacaaaauuuga

SEQ ID NO: 2039425 - RNA, 21 nt, Human herpesvirus 6
auuccuuaauucuaaauacga

SEQ ID NO: 2039426 - RNA, 19 nt, Human herpesvirus 6
acuauuuuagucacacauu

SEQ ID NO: 2039427 - RNA, 16 nt, Human herpesvirus 6
ccccugccgagccugu

SEQ ID NO: 2039428 - RNA, 20 nt, Human herpesvirus 6
ucacacccauggcgagaaac

SEQ ID NO: 2039429 - RNA, 15 nt, Human herpesvirus 6
cucacuacugaaacc

SEQ ID NO: 2039430 - RNA, 19 nt, Human herpesvirus 6
aacaugcguuguguuacac

SEQ ID NO: 2039431 - RNA, 22 nt, Human herpesvirus 6
agauuuauuagccgugauguuu

SEQ ID NO: 2039432 - RNA, 14 nt, Human herpesvirus 6
ggaggugagacauc

SEQ ID NO: 2039433 - RNA, 15 nt, Human herpesvirus 6
uuaaacaacacagca

SEQ ID NO: 2039434 - RNA, 17 nt, Human herpesvirus 6
uaguuuucacacguuau

SEQ ID NO: 2039435 - RNA, 13 nt, Human herpesvirus 6
gaaaacccagcgg

SEQ ID NO: 2039436 - RNA, 22 nt, Human herpesvirus 6
cauguuuucuccucaacuaaac

SEQ ID NO: 2039437 - RNA, 15 nt, Human herpesvirus 6
auucacauaagacuu

SEQ ID NO: 2039438 - RNA, 17 nt, Human herpesvirus 6
auuuacaaaacaaauau

SEQ ID NO: 2039439 - RNA, 15 nt, Human herpesvirus 6
aaauagcagcaauca

SEQ ID NO: 2039440 - RNA, 16 nt, Human herpesvirus 6
acaguuuccgcugccg

SEQ ID NO: 2039441 - RNA, 23 nt, Human herpesvirus 6
gccgcugcagaaaaacggcagcu

SEQ ID NO: 2039442 - RNA, 22 nt, Human herpesvirus 6
cuucauacccgaaguucucuca

SEQ ID NO: 2039443 - RNA, 12 nt, Human herpesvirus 6
cuaugcagcgcc

SEQ ID NO: 2039444 - RNA, 23 nt, Human herpesvirus 6
cggugccaaaggaaaccaccggc

SEQ ID NO: 2039445 - RNA, 14 nt, Human herpesvirus 6
gauuacaaaacaau

SEQ ID NO: 2039446 - RNA, 23 nt, Human herpesvirus 6
aggacuaucugagacaguccauu

SEQ ID NO: 2039447 - RNA, 16 nt, Human herpesvirus 6
agcagcagaguccggc

SEQ ID NO: 2039448 - RNA, 13 nt, Human herpesvirus 6
uucugaccagcaa

SEQ ID NO: 2039449 - RNA, 23 nt, Human herpesvirus 6
uucggcagaugcgcuauuguacc

SEQ ID NO: 2039450 - RNA, 17 nt, Human herpesvirus 6
auggaugugcacuuucu

SEQ ID NO: 2039451 - RNA, 20 nt, Human herpesvirus 6
gcgccugccuacacugcgaa

SEQ ID NO: 2039452 - RNA, 21 nt, Human herpesvirus 6
ugaaccaagucaacaacguca

SEQ ID NO: 2039453 - RNA, 14 nt, Human herpesvirus 6
cguuuuccauguga

SEQ ID NO: 2039454 - RNA, 21 nt, Human herpesvirus 6
aaaaacacuagccuacuauga

SEQ ID NO: 2039455 - RNA, 17 nt, Human herpesvirus 6
aagaugagcagcuuugg

SEQ ID NO: 2039456 - RNA, 18 nt, Human herpesvirus 6
acugcauacguuugccaa

SEQ ID NO: 2039457 - RNA, 19 nt, Human herpesvirus 6
caaggaaugugcagagugc

SEQ ID NO: 2039458 - RNA, 16 nt, Human herpesvirus 6
gagagacgcaccacgg

SEQ ID NO: 2039459 - RNA, 14 nt, Human herpesvirus 6
accucuaaaacaag

SEQ ID NO: 2039460 - RNA, 22 nt, Human herpesvirus 6
uuuaucccccguacaagcuuaa

SEQ ID NO: 2039461 - RNA, 18 nt, Human herpesvirus 6
cgcgguuggggucuuucc

SEQ ID NO: 2039462 - RNA, 16 nt, Human herpesvirus 6
aaguuuacauagaaau

SEQ ID NO: 2039463 - RNA, 21 nt, Human herpesvirus 6
guugagguguuuccugcccag

SEQ ID NO: 2039464 - RNA, 18 nt, Human herpesvirus 6
uauuaacacguacauaau

SEQ ID NO: 2039465 - RNA, 24 nt, Human herpesvirus 6
ugauccugacugguauccaauuaa

SEQ ID NO: 2039466 - RNA, 16 nt, Human herpesvirus 6
aacgaacaaaucucca

SEQ ID NO: 2039467 - RNA, 15 nt, Human herpesvirus 6
uucgcagaggacagu

SEQ ID NO: 2039468 - RNA, 18 nt, Human herpesvirus 6
guuucauuucaucuuguu

SEQ ID NO: 2039469 - RNA, 15 nt, Human herpesvirus 6
ugccaaaggaaacca

SEQ ID NO: 2039470 - RNA, 14 nt, Human herpesvirus 6
uugcaaccaauaaa

SEQ ID NO: 2039471 - RNA, 11 nt, Human herpesvirus 6
ucucugcaaaa

SEQ ID NO: 2039472 - RNA, 17 nt, Human herpesvirus 6
uacauauagucaauguu

SEQ ID NO: 2039473 - RNA, 13 nt, Human herpesvirus 6
uaacucuuuuugu

SEQ ID NO: 2039474 - RNA, 16 nt, Human herpesvirus 6
ucgguuaaaacaguaa

SEQ ID NO: 2039475 - RNA, 21 nt, Human herpesvirus 6
uuucguauguuuggauaauaa

SEQ ID NO: 2039476 - RNA, 14 nt, Human herpesvirus 6
gccgagccugugga

SEQ ID NO: 2039477 - RNA, 14 nt, Human herpesvirus 6
aauaaaaaauucuu

SEQ ID NO: 2039478 - RNA, 17 nt, Human herpesvirus 6
guaaaucaucaacguaa

SEQ ID NO: 2039479 - RNA, 14 nt, Human herpesvirus 6
guuccacgcgcgug

SEQ ID NO: 2039480 - RNA, 17 nt, Human herpesvirus 6
auacguuugccaaagcu

SEQ ID NO: 2039481 - RNA, 15 nt, Human herpesvirus 6
agggggggucucugu

SEQ ID NO: 2039482 - RNA, 20 nt, Human herpesvirus 6
cuuuuacaauacacagaaaa

SEQ ID NO: 2039483 - RNA, 15 nt, Human herpesvirus 6
ggaacgauuugcagu

SEQ ID NO: 2039484 - RNA, 16 nt, Human herpesvirus 6
acaccaucuucagcuc

SEQ ID NO: 2039485 - RNA, 16 nt, Human herpesvirus 6
uuguguuguuguauau

SEQ ID NO: 2039486 - RNA, 16 nt, Human herpesvirus 6
uacaagguacacaaua

SEQ ID NO: 2039487 - RNA, 20 nt, Human herpesvirus 6
uccaggucuuauauuucaga

SEQ ID NO: 2039488 - RNA, 20 nt, Human herpesvirus 6
agaucuggugaauguuucug

SEQ ID NO: 2039489 - RNA, 22 nt, Human herpesvirus 6
gaaacggcgcggagcccaagaa

SEQ ID NO: 2039490 - RNA, 13 nt, Human herpesvirus 6
acgcugaaaucau

SEQ ID NO: 2039491 - RNA, 22 nt, Human herpesvirus 6
acugccgguaacgcugucguua

SEQ ID NO: 2039492 - RNA, 13 nt, Human herpesvirus 6
ccaucuguucaau

SEQ ID NO: 2039493 - RNA, 20 nt, Human herpesvirus 6
acaaacgccuccacaugaca

SEQ ID NO: 2039494 - RNA, 16 nt, Human herpesvirus 6
ucugaauuuaaugcaa

SEQ ID NO: 2039495 - RNA, 17 nt, Human herpesvirus 6
ggucuuuccugcacagg

SEQ ID NO: 2039496 - RNA, 20 nt, Human herpesvirus 6
uggaugcugaugaauuuaug

SEQ ID NO: 2039497 - RNA, 13 nt, Human herpesvirus 6
ggauccgcuccgc

SEQ ID NO: 2039498 - RNA, 19 nt, Human herpesvirus 6
uuuacagucuuuaaaugag

SEQ ID NO: 2039499 - RNA, 23 nt, Human herpesvirus 6
aauggaguaaauuaaaguuuacu

SEQ ID NO: 2039500 - RNA, 21 nt, Human herpesvirus 6
ugcaauuuaaaagaauuuuug

SEQ ID NO: 2039501 - RNA, 20 nt, Human herpesvirus 6
uaauuacauauagucaaugu

SEQ ID NO: 2039502 - RNA, 13 nt, Human herpesvirus 6
gcauguugcaguu

SEQ ID NO: 2039503 - RNA, 20 nt, Human herpesvirus 6
cgccuguuccacgcgcgugu

SEQ ID NO: 2039504 - RNA, 22 nt, Human herpesvirus 6
gucuuuaccauuugacuccaac

SEQ ID NO: 2039505 - RNA, 16 nt, Human herpesvirus 6
uuucaagauggaccuc

SEQ ID NO: 2039506 - RNA, 18 nt, Human herpesvirus 6
gacaaaucaucacuacgu

SEQ ID NO: 2039507 - RNA, 20 nt, Human herpesvirus 6
caaaacaccgguaagcaucu

SEQ ID NO: 2039508 - RNA, 15 nt, Human herpesvirus 6
uaucauuaaauuguu

SEQ ID NO: 2039509 - RNA, 12 nt, Human herpesvirus 6
ugucuuagugua

SEQ ID NO: 2039510 - RNA, 18 nt, Human herpesvirus 6
auguuucauccaaauaca

SEQ ID NO: 2039511 - RNA, 17 nt, Human herpesvirus 6
uuccacguacuauuuuu

SEQ ID NO: 2039512 - RNA, 19 nt, Human herpesvirus 6
uaggauuacacuuucuugu

SEQ ID NO: 2039513 - RNA, 12 nt, Human herpesvirus 6
ucacugucuauu

SEQ ID NO: 2039514 - RNA, 20 nt, Human herpesvirus 6
aagcgucaacggcuucaaga

SEQ ID NO: 2039515 - RNA, 22 nt, Human herpesvirus 6
ggaaaacuaaaagucagugggu

SEQ ID NO: 2039516 - RNA, 13 nt, Human herpesvirus 6
guuaaugcugcug

SEQ ID NO: 2039517 - RNA, 24 nt, Human herpesvirus 6
ugcagacuucacuuugggcgaugg

SEQ ID NO: 2039518 - RNA, 15 nt, Human herpesvirus 6
auugacuacagcugc

SEQ ID NO: 2039519 - RNA, 14 nt, Human herpesvirus 6
cacuguuugaaacu

SEQ ID NO: 2039520 - RNA, 18 nt, Human herpesvirus 6
auaccaacgugagggaaa

SEQ ID NO: 2039521 - RNA, 12 nt, Human herpesvirus 6
uuuugaaaaggu

SEQ ID NO: 2039522 - RNA, 19 nt, Human herpesvirus 6
aauuacauaagcaaaugua

SEQ ID NO: 2039523 - RNA, 22 nt, Human herpesvirus 6
uccccuuggcucgugauccuac

SEQ ID NO: 2039524 - RNA, 21 nt, Human herpesvirus 6
ugaacuuuuuucggauuuuga

SEQ ID NO: 2039525 - RNA, 13 nt, Human herpesvirus 6
uuuuucauaaaug

SEQ ID NO: 2039526 - RNA, 19 nt, Human herpesvirus 6
cuuuuggaugcagcguugg

SEQ ID NO: 2039527 - RNA, 14 nt, Human herpesvirus 6
auuaaaguuuacug

SEQ ID NO: 2039528 - RNA, 16 nt, Human herpesvirus 6
auuuuaauuuugaaau

SEQ ID NO: 2039529 - RNA, 20 nt, Human herpesvirus 6
cccaggcgaacgagaacucu

SEQ ID NO: 2039530 - RNA, 22 nt, Human herpesvirus 6
ugaaugcauaccgccuccgcag

SEQ ID NO: 2039531 - RNA, 16 nt, Human herpesvirus 6
ucacauguucuuuauu

SEQ ID NO: 2039532 - RNA, 16 nt, Human herpesvirus 6
ucucggaaaauuaaag

SEQ ID NO: 2039533 - RNA, 21 nt, Human herpesvirus 6
cuuuauguacccuaagugaaa

SEQ ID NO: 2039534 - RNA, 13 nt, Human herpesvirus 6
ccuccgccacugc

SEQ ID NO: 2039535 - RNA, 23 nt, Human herpesvirus 6
ugacuguguguugaauguuacag

SEQ ID NO: 2039536 - RNA, 19 nt, Human herpesvirus 6
uucuuacaauguuuuugac

SEQ ID NO: 2039537 - RNA, 16 nt, Human herpesvirus 6
ucgggaacauagagaa

SEQ ID NO: 2039538 - RNA, 22 nt, Human herpesvirus 6
ggaaaauuaaaagucagugggu

SEQ ID NO: 2039539 - RNA, 20 nt, Human herpesvirus 6
aaaacuaauucggaacauug

SEQ ID NO: 2039540 - RNA, 15 nt, Human herpesvirus 6
uugauuuacaaggca

SEQ ID NO: 2039541 - RNA, 14 nt, Human herpesvirus 6
aauuucuuuugagg

SEQ ID NO: 2039542 - RNA, 22 nt, Human herpesvirus 6
ugacucuucucuaaaaacuaaa

SEQ ID NO: 2039543 - RNA, 14 nt, Human herpesvirus 6
aagcaucugcugcu

SEQ ID NO: 2039544 - RNA, 19 nt, Human herpesvirus 6
uuuguuuucuacguagaua

SEQ ID NO: 2039545 - RNA, 13 nt, Human herpesvirus 6
agugcuuuaucua

SEQ ID NO: 2039546 - RNA, 18 nt, Human herpesvirus 6
uaucaaacuuuuuuugaa

SEQ ID NO: 2039547 - RNA, 17 nt, Human herpesvirus 6
aaaagcuggaaaacuau

SEQ ID NO: 2039548 - RNA, 22 nt, Human herpesvirus 6
cggaaaaaaaaucuauccgcua

SEQ ID NO: 2039549 - RNA, 17 nt, Human herpesvirus 6
ucgaguaauuguggauu

SEQ ID NO: 2039550 - RNA, 15 nt, Human herpesvirus 6
uucucuaaaaacuaa

SEQ ID NO: 2039551 - RNA, 16 nt, Human herpesvirus 6
uucuuuauuaaauguu

SEQ ID NO: 2039552 - RNA, 23 nt, Human herpesvirus 6
aauauuuccauaaguuaauucca

SEQ ID NO: 2039553 - RNA, 15 nt, Human herpesvirus 6
acaugaacauugaaa

SEQ ID NO: 2039554 - RNA, 17 nt, Human herpesvirus 6
aacccuaacccuaaccc

SEQ ID NO: 2039555 - RNA, 11 nt, Human herpesvirus 6
agauuuacaga

SEQ ID NO: 2039556 - RNA, 21 nt, Human herpesvirus 6
cuaagucuuugggaacaugua

SEQ ID NO: 2039557 - RNA, 17 nt, Human herpesvirus 6
uccccgggugcuccgcc

SEQ ID NO: 2039558 - RNA, 14 nt, Human herpesvirus 6
accuaauaaacugu

SEQ ID NO: 2039559 - RNA, 23 nt, Human herpesvirus 6
cuugauaaucugaucgaaauacu

SEQ ID NO: 2039560 - RNA, 21 nt, Human herpesvirus 6
uccucaaacuuuuagagacuu

SEQ ID NO: 2039561 - RNA, 21 nt, Human herpesvirus 6
ugaguaauugaacauuguaaa

SEQ ID NO: 2039562 - RNA, 15 nt, Human herpesvirus 6
augacgcggaaucua

SEQ ID NO: 2039563 - RNA, 15 nt, Human herpesvirus 6
cacuguaccuuuagu

SEQ ID NO: 2039564 - RNA, 21 nt, Human herpesvirus 6
aacaugagggacucggaaaag

SEQ ID NO: 2039565 - RNA, 15 nt, Human herpesvirus 6
auacaucguuuguug

SEQ ID NO: 2039566 - RNA, 14 nt, Human herpesvirus 6
uauaucuaaaguca

SEQ ID NO: 2039567 - RNA, 23 nt, Human herpesvirus 6
ugggggucuuuccugcacaggcg

SEQ ID NO: 2039568 - RNA, 16 nt, Human herpesvirus 6
ucgccaagaaaaagaa

SEQ ID NO: 2039569 - RNA, 15 nt, Human herpesvirus 6
gaagauaauaaaaca

SEQ ID NO: 2039570 - RNA, 22 nt, Human herpesvirus 6
cuaaaaucaaaaaaauuuugau

SEQ ID NO: 2039571 - RNA, 18 nt, Human herpesvirus 6
uccaugcaacacaacaaa

SEQ ID NO: 2039572 - RNA, 19 nt, Human herpesvirus 6
uuagacuuggugaugauga

SEQ ID NO: 2039573 - RNA, 22 nt, Human herpesvirus 6
cacgauguuaacauaaaacaac

SEQ ID NO: 2039574 - RNA, 19 nt, Human herpesvirus 6
uguucagucuaugcagcgc

SEQ ID NO: 2039575 - RNA, 18 nt, Human herpesvirus 6
guccgacacgcccccacc

SEQ ID NO: 2039576 - RNA, 18 nt, Human herpesvirus 6
gcugcagucucgggagag

SEQ ID NO: 2039577 - RNA, 16 nt, Human herpesvirus 6
cacacaauuaguccau

SEQ ID NO: 2039578 - RNA, 16 nt, Human herpesvirus 6
uuuuuaaucaugauug

SEQ ID NO: 2039579 - RNA, 22 nt, Human herpesvirus 6
auguguuuuucuuuuacaggaa

SEQ ID NO: 2039580 - RNA, 18 nt, Human herpesvirus 6
ucgaauaauuauccucuc

SEQ ID NO: 2039581 - RNA, 17 nt, Human herpesvirus 6
aucacuuagacacggcc

SEQ ID NO: 2039582 - RNA, 23 nt, Human herpesvirus 6
aguaaaucucucgguagauugga

SEQ ID NO: 2039583 - RNA, 20 nt, Human herpesvirus 6
agaagaucugcgugaacgug

SEQ ID NO: 2039584 - RNA, 17 nt, Human herpesvirus 6
ugcuuuacaucgaauuu

SEQ ID NO: 2039585 - RNA, 14 nt, Human herpesvirus 6
ugaaauaaaguuua

SEQ ID NO: 2039586 - RNA, 23 nt, Human herpesvirus 6
aagagugauucaagguggagguu

SEQ ID NO: 2039587 - RNA, 16 nt, Human herpesvirus 6
gaguuuccgggcaugg

SEQ ID NO: 2039588 - RNA, 20 nt, Human herpesvirus 6
auagaaaaaaauauuuugaa

SEQ ID NO: 2039589 - RNA, 22 nt, Human herpesvirus 6
gcgacgugccaccgucugggac

SEQ ID NO: 2039590 - RNA, 16 nt, Human herpesvirus 6
uguucuagugcguauu

SEQ ID NO: 2039591 - RNA, 22 nt, Human herpesvirus 6
ggcuauuuuuccgaaaggugaa

SEQ ID NO: 2039592 - RNA, 14 nt, Human herpesvirus 6
ggaucgggcccggg

SEQ ID NO: 2039593 - RNA, 21 nt, Human herpesvirus 6
uaccgcgguuugggggucuuu

SEQ ID NO: 2039594 - RNA, 15 nt, Human herpesvirus 6
gcucgaaucuaaauu

SEQ ID NO: 2039595 - RNA, 23 nt, Human herpesvirus 6
uucaauccggaguuaaguaaacu

SEQ ID NO: 2039596 - RNA, 23 nt, Human herpesvirus 6
uccuguuuucccaccuaauaaac

SEQ ID NO: 2039597 - RNA, 18 nt, Human herpesvirus 6
acccuacaaucuguccag

SEQ ID NO: 2039598 - RNA, 17 nt, Human herpesvirus 6
aagucacgggcagcugc

SEQ ID NO: 2039599 - RNA, 17 nt, Human herpesvirus 6
gguccaaccccucccau

SEQ ID NO: 2039600 - RNA, 21 nt, Human herpesvirus 6
guuaauucaaaugcaguaaau

SEQ ID NO: 2039601 - RNA, 17 nt, Human herpesvirus 6
uguacgaugaacuacug

SEQ ID NO: 2039602 - RNA, 15 nt, Human herpesvirus 6
uacgaauucaauguc

SEQ ID NO: 2039603 - RNA, 19 nt, Human herpesvirus 6
ggagcagcuuccacgcgac

SEQ ID NO: 2039604 - RNA, 19 nt, Human herpesvirus 6
ggcagaucuaucacaggcg

SEQ ID NO: 2039605 - RNA, 13 nt, Human herpesvirus 6
auuaucauagaca

SEQ ID NO: 2039606 - RNA, 19 nt, Human herpesvirus 6
guaaauauuucuaaacaca

SEQ ID NO: 2039607 - RNA, 16 nt, Human herpesvirus 6
ucgaccauguguauau

SEQ ID NO: 2039608 - RNA, 14 nt, Human herpesvirus 6
aagaauucaaaaac

SEQ ID NO: 2039609 - RNA, 23 nt, Human herpesvirus 6
gagugguuuuuuggauaagcaga

SEQ ID NO: 2039610 - RNA, 19 nt, Human herpesvirus 6
aggcuaucacuuagacacg

SEQ ID NO: 2039611 - RNA, 15 nt, Human herpesvirus 6
guuuaacgcucauga

SEQ ID NO: 2039612 - RNA, 14 nt, Human herpesvirus 6
aaacagagacuggu

SEQ ID NO: 2039613 - RNA, 20 nt, Human herpesvirus 6
aagaaaguuucguacuggag

SEQ ID NO: 2039614 - RNA, 14 nt, Human herpesvirus 6
acggacacgcgcag

SEQ ID NO: 2039615 - RNA, 12 nt, Human herpesvirus 6
caccagccggua

SEQ ID NO: 2039616 - RNA, 14 nt, Human herpesvirus 6
augcgacugcaaga

SEQ ID NO: 2039617 - RNA, 22 nt, Human herpesvirus 6
cgacacgugggggguuccuccg

SEQ ID NO: 2039618 - RNA, 17 nt, Human herpesvirus 6
cuuauaacaagcacuga

SEQ ID NO: 2039619 - RNA, 23 nt, Human herpesvirus 6
cuuacacaaauugaccagccaga

SEQ ID NO: 2039620 - RNA, 23 nt, Human herpesvirus 6
aacaaagguaccacggggauuua

SEQ ID NO: 2039621 - RNA, 13 nt, Human herpesvirus 6
cugcgaggccauc

SEQ ID NO: 2039622 - RNA, 22 nt, Human herpesvirus 6
cuuugaaggacuaucugagaca

SEQ ID NO: 2039623 - RNA, 12 nt, Human herpesvirus 6
uuacuaguuuuc

SEQ ID NO: 2039624 - RNA, 16 nt, Human herpesvirus 6
gaggacgggaagaaca

SEQ ID NO: 2039625 - RNA, 22 nt, Human herpesvirus 6
aacuaauucggaacauuguucu

SEQ ID NO: 2039626 - RNA, 15 nt, Human herpesvirus 6
ccaaagaaacagaua

SEQ ID NO: 2039627 - RNA, 19 nt, Human herpesvirus 6
cuaaauauaucaaagaugu

SEQ ID NO: 2039628 - RNA, 19 nt, Human herpesvirus 6
aaaacauaccgacguaaua

SEQ ID NO: 2039629 - RNA, 16 nt, Human herpesvirus 6
ugacacacagaauaca

SEQ ID NO: 2039630 - RNA, 16 nt, Human herpesvirus 6
auuucuacaaaaauac

SEQ ID NO: 2039631 - RNA, 15 nt, Human herpesvirus 6
ugauuauucugucuu

SEQ ID NO: 2039632 - RNA, 17 nt, Human herpesvirus 6
gacucccggcccagaga

SEQ ID NO: 2039633 - RNA, 13 nt, Human herpesvirus 6
gcuaccgcugggc

SEQ ID NO: 2039634 - RNA, 20 nt, Human herpesvirus 6
cuaggacuucguucuugaca

SEQ ID NO: 2039635 - RNA, 17 nt, Human herpesvirus 6
aaaaugcguuugucauu

SEQ ID NO: 2039636 - RNA, 18 nt, Human herpesvirus 6
caucaccgauaaaaacuc

SEQ ID NO: 2039637 - RNA, 13 nt, Human herpesvirus 6
uuuuuaacuaggu

SEQ ID NO: 2039638 - RNA, 22 nt, Human herpesvirus 6
aacauccuauugagauucuccg

SEQ ID NO: 2039639 - RNA, 19 nt, Human herpesvirus 6
agauaucauaaucugcguu

SEQ ID NO: 2039640 - RNA, 22 nt, Human herpesvirus 6
uugaauaauaagccuaagaaau

SEQ ID NO: 2039641 - RNA, 11 nt, Human herpesvirus 6
acuauacuuuu

SEQ ID NO: 2039642 - RNA, 19 nt, Human herpesvirus 6
gaauucguuacaaucucug

SEQ ID NO: 2039643 - RNA, 14 nt, Human herpesvirus 6
uuucuguuuuaauu

SEQ ID NO: 2039644 - RNA, 14 nt, Human herpesvirus 6
aauguaauaauuga

SEQ ID NO: 2039645 - RNA, 13 nt, Human herpesvirus 6
auuacauuaucca

SEQ ID NO: 2039646 - RNA, 16 nt, Human herpesvirus 6
ucaaacugguguaaau

SEQ ID NO: 2039647 - RNA, 16 nt, Human herpesvirus 6
uaauguaaaguuauau

SEQ ID NO: 2039648 - RNA, 20 nt, Human herpesvirus 6
uccagaggcguggaaagacg

SEQ ID NO: 2039649 - RNA, 19 nt, Human herpesvirus 6
uuuccagguagaguugcgu

SEQ ID NO: 2039650 - RNA, 13 nt, Human herpesvirus 6
uguuagaauguau

SEQ ID NO: 2039651 - RNA, 19 nt, Human herpesvirus 6
cucgggaacgaccgcggcc

SEQ ID NO: 2039652 - RNA, 21 nt, Human herpesvirus 6
auaacgauauauaaaaaacug

SEQ ID NO: 2039653 - RNA, 20 nt, Human herpesvirus 6
uaaaagaauuuuuguagcaa

SEQ ID NO: 2039654 - RNA, 12 nt, Human herpesvirus 6
ccguagaggcgu

SEQ ID NO: 2039655 - RNA, 17 nt, Human herpesvirus 6
uguguguuauaaggaag

SEQ ID NO: 2039656 - RNA, 17 nt, Human herpesvirus 6
ugucguuguaguuuuua

SEQ ID NO: 2039657 - RNA, 13 nt, Human herpesvirus 6
ggagaggccggag

SEQ ID NO: 2039658 - RNA, 19 nt, Human herpesvirus 6
ccggcugagcggaguggag

SEQ ID NO: 2039659 - RNA, 23 nt, Human herpesvirus 6
auuucauuuguuuuuuaaagcac

SEQ ID NO: 2039660 - RNA, 16 nt, Human herpesvirus 6
gccgcugcagaaaaac

SEQ ID NO: 2039661 - RNA, 14 nt, Human herpesvirus 6
guucaucauuccag

SEQ ID NO: 2039662 - RNA, 17 nt, Human herpesvirus 6
agaagaaaagaaaaagc

SEQ ID NO: 2039663 - RNA, 15 nt, Human herpesvirus 6
acuuagcuagaugug

SEQ ID NO: 2039664 - RNA, 17 nt, Human herpesvirus 6
auaaacugugucuguuc

SEQ ID NO: 2039665 - RNA, 18 nt, Human herpesvirus 6
gggcucgcucugaaauuu

SEQ ID NO: 2039666 - RNA, 15 nt, Human herpesvirus 6
ggucuuuccugccca

SEQ ID NO: 2039667 - RNA, 15 nt, Human herpesvirus 6
aauuacauuaaaaca

SEQ ID NO: 2039668 - RNA, 20 nt, Human herpesvirus 6
gaauaacaaacuauauugcu

SEQ ID NO: 2039669 - RNA, 15 nt, Human herpesvirus 6
aaaaacugacugaca

SEQ ID NO: 2039670 - RNA, 14 nt, Human herpesvirus 6
gucggcgugucugu

SEQ ID NO: 2039671 - RNA, 17 nt, Human herpesvirus 6
uuagagaaaagugcaag

SEQ ID NO: 2039672 - RNA, 18 nt, Human herpesvirus 6
ggggaucgacgggcagga

SEQ ID NO: 2039673 - RNA, 15 nt, Human herpesvirus 6
aaaucucucgguaga

SEQ ID NO: 2039674 - RNA, 16 nt, Human herpesvirus 6
aauauuuccugcccag

SEQ ID NO: 2039675 - RNA, 20 nt, Human herpesvirus 6
uagcguucauucccaguguc

SEQ ID NO: 2039676 - RNA, 17 nt, Human herpesvirus 6
auauccuagcauuuccg

SEQ ID NO: 2039677 - RNA, 17 nt, Human herpesvirus 6
gaagaaggcuaucacuu

SEQ ID NO: 2039678 - RNA, 15 nt, Human herpesvirus 6
ugauuccuucaaugu

SEQ ID NO: 2039679 - RNA, 19 nt, Human herpesvirus 6
acuuauauauauaucagaa

SEQ ID NO: 2039680 - RNA, 14 nt, Human herpesvirus 6
uguuguguuuacau

SEQ ID NO: 2039681 - RNA, 18 nt, Human herpesvirus 6
gccggaucguaaggcagu

SEQ ID NO: 2039682 - RNA, 19 nt, Human herpesvirus 6
cggggagagaauugccgau

SEQ ID NO: 2039683 - RNA, 17 nt, Human herpesvirus 6
ucaaaugaauuuauuuu

SEQ ID NO: 2039684 - RNA, 15 nt, Human herpesvirus 6
ugccgagccugugga

SEQ ID NO: 2039685 - RNA, 13 nt, Human herpesvirus 6
gcgauacccagcg

SEQ ID NO: 2039686 - RNA, 20 nt, Human herpesvirus 6
ucugcauaguguagaaaaca

SEQ ID NO: 2039687 - RNA, 20 nt, Human herpesvirus 6
uuacucaccugcgucaaugc

SEQ ID NO: 2039688 - RNA, 14 nt, Human herpesvirus 6
agacacacaaaaaa

SEQ ID NO: 2039689 - RNA, 13 nt, Human herpesvirus 6
acaccucaggguc

SEQ ID NO: 2039690 - RNA, 19 nt, Human herpesvirus 6
aauuuaauaagaaagcagu

SEQ ID NO: 2039691 - RNA, 13 nt, Human herpesvirus 6
acguuuagaauga

SEQ ID NO: 2039692 - RNA, 13 nt, Human herpesvirus 6
ccgagccugugga

SEQ ID NO: 2039693 - RNA, 22 nt, Human herpesvirus 6
auuaauuaccuauagucaaugu

SEQ ID NO: 2039694 - RNA, 19 nt, Human herpesvirus 6
guucagaagagaugaaaga

SEQ ID NO: 2039695 - RNA, 15 nt, Human herpesvirus 6
auguaaaaguuguga

SEQ ID NO: 2039696 - RNA, 22 nt, Human herpesvirus 6
agagcaaaugccgacaagcuuu

SEQ ID NO: 2039697 - RNA, 17 nt, Human herpesvirus 6
cggacgacgggcggggc

SEQ ID NO: 2039698 - RNA, 19 nt, Human herpesvirus 6
uguuaacauaaaacaacaa

SEQ ID NO: 2039699 - RNA, 20 nt, Human herpesvirus 6
cuguccccucgguccaaccc

SEQ ID NO: 2039700 - RNA, 19 nt, Human herpesvirus 6
aaguagccaaugauucuua

SEQ ID NO: 2039701 - RNA, 15 nt, Human herpesvirus 6
agaugacaucugcaa

SEQ ID NO: 2039702 - RNA, 13 nt, Human herpesvirus 6
gaaacucuuauaa

SEQ ID NO: 2039703 - RNA, 13 nt, Human herpesvirus 6
gguaacgcugucg

SEQ ID NO: 2039704 - RNA, 14 nt, Human herpesvirus 6
ugacaucugcaaaa

SEQ ID NO: 2039705 - RNA, 16 nt, Human herpesvirus 6
cauagagaaacgagag

SEQ ID NO: 2039706 - RNA, 19 nt, Human herpesvirus 6
ggagagacgcaccacggcu

SEQ ID NO: 2039707 - RNA, 20 nt, Human herpesvirus 6
aucagaauccaccaaugaca

SEQ ID NO: 2039708 - RNA, 16 nt, Human herpesvirus 6
gcacacacaagaacag

SEQ ID NO: 2039709 - RNA, 17 nt, Human herpesvirus 6
acgucgacgaaauaauu

SEQ ID NO: 2039710 - RNA, 16 nt, Human herpesvirus 6
gcuguccgccuguucc

SEQ ID NO: 2039711 - RNA, 19 nt, Human herpesvirus 6
uaauuccagcuuucuuaga

SEQ ID NO: 2039712 - RNA, 19 nt, Human herpesvirus 6
acuugccucacaaauauug

SEQ ID NO: 2039713 - RNA, 14 nt, Human herpesvirus 6
gugacucuucucua

SEQ ID NO: 2039714 - RNA, 15 nt, Human herpesvirus 6
cgaaugguuaaaagu

SEQ ID NO: 2039715 - RNA, 14 nt, Human herpesvirus 6
cauuauugucugca

SEQ ID NO: 2039716 - RNA, 15 nt, Human herpesvirus 6
uggugcgaucgagca

SEQ ID NO: 2039717 - RNA, 16 nt, Human herpesvirus 6
cgucuccucauggaga

SEQ ID NO: 2039718 - RNA, 19 nt, Human herpesvirus 6
uaaaguuuugugauccugu

SEQ ID NO: 2039719 - RNA, 16 nt, Human herpesvirus 6
acaauauuucacauau

SEQ ID NO: 2039720 - RNA, 14 nt, Human herpesvirus 6
ucaaauauggcaga

SEQ ID NO: 2039721 - RNA, 15 nt, Human herpesvirus 6
guuauacauaaggca

SEQ ID NO: 2039722 - RNA, 13 nt, Human herpesvirus 6
aaggucagugggu

SEQ ID NO: 2039723 - RNA, 14 nt, Human herpesvirus 6
cguaaaucugcguc

SEQ ID NO: 2039724 - RNA, 12 nt, Human herpesvirus 6
aaaaaaacacag

SEQ ID NO: 2039725 - RNA, 17 nt, Human herpesvirus 6
aacgcaagucacgggca

SEQ ID NO: 2039726 - RNA, 19 nt, Human herpesvirus 6
acgugaaauaaaguuuaaa

SEQ ID NO: 2039727 - RNA, 22 nt, Human herpesvirus 6
auaaaugaauagauaauaauca

SEQ ID NO: 2039728 - RNA, 20 nt, Human herpesvirus 6
agaagaaaagaaaaagcagc

SEQ ID NO: 2039729 - RNA, 14 nt, Human herpesvirus 6
aaacaaucaaaugg

SEQ ID NO: 2039730 - RNA, 15 nt, Human herpesvirus 6
uccggaguugcagug

SEQ ID NO: 2039731 - RNA, 15 nt, Human herpesvirus 6
acgguggccuggcac

SEQ ID NO: 2039732 - RNA, 23 nt, Human herpesvirus 6
aaagaaucgguaaacuucagacc

SEQ ID NO: 2039733 - RNA, 13 nt, Human herpesvirus 6
cgcgagacagcgg

SEQ ID NO: 2039734 - RNA, 13 nt, Human herpesvirus 6
cuauccgcccucc

SEQ ID NO: 2039735 - RNA, 23 nt, Human herpesvirus 6
cacugcauuucauuccccgacca

SEQ ID NO: 2039736 - RNA, 15 nt, Human herpesvirus 6
uaaaaacucacacaa

SEQ ID NO: 2039737 - RNA, 18 nt, Human herpesvirus 6
cucuuaacuacuucuuuc

SEQ ID NO: 2039738 - RNA, 22 nt, Human herpesvirus 6
ucucggaaaacuaaaagucagu

SEQ ID NO: 2039739 - RNA, 14 nt, Human herpesvirus 6
accucgcgcaccgc

SEQ ID NO: 2039740 - RNA, 20 nt, Human herpesvirus 6
acaucgucuccuacauucuc

SEQ ID NO: 2039741 - RNA, 18 nt, Human herpesvirus 6
cgguccggcugagcggag

SEQ ID NO: 2039742 - RNA, 17 nt, Human herpesvirus 6
uauuucguauguuugga

SEQ ID NO: 2039743 - RNA, 23 nt, Human herpesvirus 6
guuaauuguguuguuguauaugu

SEQ ID NO: 2039744 - RNA, 13 nt, Human herpesvirus 6
cgagucgaagaga

SEQ ID NO: 2039745 - RNA, 12 nt, Human herpesvirus 6
ugccguaaaucu

SEQ ID NO: 2039746 - RNA, 13 nt, Human herpesvirus 6
auuuucuuaguaa

SEQ ID NO: 2039747 - RNA, 13 nt, Human herpesvirus 6
aaacacagauggu

SEQ ID NO: 2039748 - RNA, 18 nt, Human herpesvirus 6
acgagagaguccauuucu

SEQ ID NO: 2039749 - RNA, 22 nt, Human herpesvirus 6
uuuugugauuaacaaauuacaa

SEQ ID NO: 2039750 - RNA, 18 nt, Human herpesvirus 6
cuaguguuucgcagagga

SEQ ID NO: 2039751 - RNA, 19 nt, Human herpesvirus 6
cccauaccuguaaacuggu

SEQ ID NO: 2039752 - RNA, 17 nt, Human herpesvirus 6
uauacacgaacuaaaua

SEQ ID NO: 2039753 - RNA, 19 nt, Human herpesvirus 6
aauaaacuuuuuuggcucg

SEQ ID NO: 2039754 - RNA, 14 nt, Human herpesvirus 6
cuuuucguacggcg

SEQ ID NO: 2039755 - RNA, 14 nt, Human herpesvirus 6
aacaucccggaaau

SEQ ID NO: 2039756 - RNA, 22 nt, Human herpesvirus 6
cgaaaccaucgucauaaccuca

SEQ ID NO: 2039757 - RNA, 16 nt, Human herpesvirus 6
cagugauauggaaaca

SEQ ID NO: 2039758 - RNA, 19 nt, Human herpesvirus 6
uuuguguucagucuaugca

SEQ ID NO: 2039759 - RNA, 19 nt, Human herpesvirus 6
uugcaauuuccugucaugu

SEQ ID NO: 2039760 - RNA, 12 nt, Human herpesvirus 6
guggacaaugau

SEQ ID NO: 2039761 - RNA, 18 nt, Human herpesvirus 6
gagagacgcaccacggcu

SEQ ID NO: 2039762 - RNA, 17 nt, Human herpesvirus 6
ucauuguuuuugcaugu

SEQ ID NO: 2039763 - RNA, 15 nt, Human herpesvirus 6
acagacgaaucacau

SEQ ID NO: 2039764 - RNA, 13 nt, Human herpesvirus 6
gggagggacccac

SEQ ID NO: 2039765 - RNA, 22 nt, Human herpesvirus 6
cagucuacacacacgccgguua

SEQ ID NO: 2039766 - RNA, 15 nt, Human herpesvirus 6
cuguguguuauaagg

SEQ ID NO: 2039767 - RNA, 17 nt, Human herpesvirus 6
uggacacgguaccuguu

SEQ ID NO: 2039768 - RNA, 23 nt, Human herpesvirus 6
aaagauuagauuaggggagagac

SEQ ID NO: 2039769 - RNA, 23 nt, Human herpesvirus 6
ucacauguucuuuauuaaauguu

SEQ ID NO: 2039770 - RNA, 21 nt, Human herpesvirus 6
ugaagaucacgcccauauguu

SEQ ID NO: 2039771 - RNA, 15 nt, Human herpesvirus 6
auugcucuauugugu

SEQ ID NO: 2039772 - RNA, 19 nt, Human herpesvirus 6
uuaccauauauuggcaugu

SEQ ID NO: 2039773 - RNA, 19 nt, Human herpesvirus 6
gaaaguugauacgccagaa

SEQ ID NO: 2039774 - RNA, 14 nt, Human herpesvirus 6
aggaaguaaauaca

SEQ ID NO: 2039775 - RNA, 18 nt, Human herpesvirus 6
gcucugaaauuugagaaa

SEQ ID NO: 2039776 - RNA, 14 nt, Human herpesvirus 6
auugguuugcauaa

SEQ ID NO: 2039777 - RNA, 19 nt, Human herpesvirus 6
aacgcgucgguaaacaauu

SEQ ID NO: 2039778 - RNA, 21 nt, Human herpesvirus 6
uguacuuccgcauacuuuugu

SEQ ID NO: 2039779 - RNA, 21 nt, Human herpesvirus 6
ccgccgugcuucuggcacagg

SEQ ID NO: 2039780 - RNA, 14 nt, Human herpesvirus 6
uguccaucuucaga

SEQ ID NO: 2039781 - RNA, 19 nt, Human herpesvirus 6
uaauuguguuguuguauau

SEQ ID NO: 2039782 - RNA, 19 nt, Human herpesvirus 6
auuaggggagagacaucca

SEQ ID NO: 2039783 - RNA, 17 nt, Human herpesvirus 6
ccauggaaaacaaagaa

SEQ ID NO: 2039784 - RNA, 15 nt, Human herpesvirus 6
aaccaugucuugcaa

SEQ ID NO: 2039785 - RNA, 21 nt, Human herpesvirus 6
ccaaugacaccgauucagaaa

SEQ ID NO: 2039786 - RNA, 12 nt, Human herpesvirus 6
uaaagcagcuag

SEQ ID NO: 2039787 - RNA, 21 nt, Human herpesvirus 6
gugaucuuuacaaaagacaca

SEQ ID NO: 2039788 - RNA, 13 nt, Human herpesvirus 6
ccuaauaaauguc

SEQ ID NO: 2039789 - RNA, 19 nt, Human herpesvirus 6
uuacacuuucuuguaguau

SEQ ID NO: 2039790 - RNA, 15 nt, Human herpesvirus 6
accgcaguuucuguu

SEQ ID NO: 2039791 - RNA, 17 nt, Human herpesvirus 6
gacuauauuaucuuuca

SEQ ID NO: 2039792 - RNA, 22 nt, Human herpesvirus 6
auuguauauauagcuguaaaua

SEQ ID NO: 2039793 - RNA, 15 nt, Human herpesvirus 6
ugugcuaucugauuu

SEQ ID NO: 2039794 - RNA, 17 nt, Human herpesvirus 6
uuacugacgguuagguu

SEQ ID NO: 2039795 - RNA, 18 nt, Human herpesvirus 6
uaacguggauaaaacggc

SEQ ID NO: 2039796 - RNA, 21 nt, Human herpesvirus 6
aaaucuggaucaucaagcauc

SEQ ID NO: 2039797 - RNA, 22 nt, Human herpesvirus 6
agucugucgcuuauuucguuug

SEQ ID NO: 2039798 - RNA, 15 nt, Human herpesvirus 6
gccgaugaaacuguc

SEQ ID NO: 2039799 - RNA, 15 nt, Human herpesvirus 6
uucuuuuuaacuagg

SEQ ID NO: 2039800 - RNA, 14 nt, Human herpesvirus 6
ucgggagaggacca

SEQ ID NO: 2039801 - RNA, 13 nt, Human herpesvirus 6
cagacagaggaag

SEQ ID NO: 2039802 - RNA, 18 nt, Human herpesvirus 6
auuuuauaauacacuauu

SEQ ID NO: 2039803 - RNA, 15 nt, Human herpesvirus 6
auucuaauaaaagac

SEQ ID NO: 2039804 - RNA, 18 nt, Human herpesvirus 6
ugaucgacauuuguauuu

SEQ ID NO: 2039805 - RNA, 14 nt, Human herpesvirus 6
ugaguaggagaggc

SEQ ID NO: 2039806 - RNA, 15 nt, Human herpesvirus 6
cacuuccucacgcaa

SEQ ID NO: 2039807 - RNA, 23 nt, Human herpesvirus 6
guuugggauguccauuucuucga

SEQ ID NO: 2039808 - RNA, 20 nt, Human herpesvirus 6
uuggaugccugcauaugcag

SEQ ID NO: 2039809 - RNA, 21 nt, Human herpesvirus 6
gcggaaauaaaaaauauuaau

SEQ ID NO: 2039810 - RNA, 19 nt, Human herpesvirus 6
uaauacauauaaaagcuaa

SEQ ID NO: 2039811 - RNA, 17 nt, Human herpesvirus 6
ucggucaccuacauucg

SEQ ID NO: 2039812 - RNA, 21 nt, Human herpesvirus 6
caaucgaugugacaaaucugu

SEQ ID NO: 2039813 - RNA, 12 nt, Human herpesvirus 6
cauaaaauguuu

SEQ ID NO: 2039814 - RNA, 15 nt, Human herpesvirus 6
cagguuucuccgcac

SEQ ID NO: 2039815 - RNA, 14 nt, Human herpesvirus 6
uucaacgucuucaa

SEQ ID NO: 2039816 - RNA, 17 nt, Human herpesvirus 6
cugaucacagagaaaaa

SEQ ID NO: 2039817 - RNA, 22 nt, Human herpesvirus 6
cucgacuccagugcuuuaauca

SEQ ID NO: 2039818 - RNA, 17 nt, Human herpesvirus 6
ugauuauauauuugcau

SEQ ID NO: 2039819 - RNA, 13 nt, Human herpesvirus 6
uucauuucaucuu

SEQ ID NO: 2039820 - RNA, 13 nt, Human herpesvirus 6
guguuuucaucag

SEQ ID NO: 2039821 - RNA, 17 nt, Human herpesvirus 6
caauguuuuugacaaau

SEQ ID NO: 2039822 - RNA, 20 nt, Human herpesvirus 6
ggccuggcacggugccaaag

SEQ ID NO: 2039823 - RNA, 19 nt, Human herpesvirus 6
gacuacucuggcugaaaga

SEQ ID NO: 2039824 - RNA, 20 nt, Human herpesvirus 6
uaaugaguuuuucgcaauuu

SEQ ID NO: 2039825 - RNA, 16 nt, Human herpesvirus 6
cugagugcgaccuguc

SEQ ID NO: 2039826 - RNA, 13 nt, Human herpesvirus 6
aacaacaauaaca

SEQ ID NO: 2039827 - RNA, 16 nt, Human herpesvirus 6
gcagacgcugaaauca

SEQ ID NO: 2039828 - RNA, 21 nt, Human herpesvirus 6
ccucaaacuuuuagagacuuu

SEQ ID NO: 2039829 - RNA, 14 nt, Human herpesvirus 6
gagaugacggaaua

SEQ ID NO: 2039830 - RNA, 17 nt, Human herpesvirus 6
acuaagauugugcaguu

SEQ ID NO: 2039831 - RNA, 17 nt, Human herpesvirus 6
uuuguagcaaucuuaaa

SEQ ID NO: 2039832 - RNA, 11 nt, Human herpesvirus 6
uacuacaguga

SEQ ID NO: 2039833 - RNA, 20 nt, Human herpesvirus 6
ucggaaaauauuuccugccc

SEQ ID NO: 2039834 - RNA, 22 nt, Human herpesvirus 6
aucgggcccggggacggacagg

SEQ ID NO: 2039835 - RNA, 22 nt, Human herpesvirus 6
aguuaccgugaugugggugugg

SEQ ID NO: 2039836 - RNA, 16 nt, Human herpesvirus 6
augaaugugcugaugu

SEQ ID NO: 2039837 - RNA, 13 nt, Human herpesvirus 6
auuucuaaacaca

SEQ ID NO: 2039838 - RNA, 13 nt, Human herpesvirus 6
cauucacauuacc

SEQ ID NO: 2039839 - RNA, 22 nt, Human herpesvirus 6
uagguaucacccccccuucauc

SEQ ID NO: 2039840 - RNA, 20 nt, Human herpesvirus 6
agagaacugucuugcagcug

SEQ ID NO: 2039841 - RNA, 16 nt, Human herpesvirus 6
uuuagccuuuauucug

SEQ ID NO: 2039842 - RNA, 20 nt, Human herpesvirus 6
guuugggggucuuuccugca

SEQ ID NO: 2039843 - RNA, 13 nt, Human herpesvirus 6
ccagaaaaguaua

SEQ ID NO: 2039844 - RNA, 22 nt, Human herpesvirus 6
cucgcucacaauauuucacaua

SEQ ID NO: 2039845 - RNA, 19 nt, Human herpesvirus 6
gguuuuaagagcagacaag

SEQ ID NO: 2039846 - RNA, 20 nt, Human herpesvirus 6
caacugguuuugagaaagcc

SEQ ID NO: 2039847 - RNA, 12 nt, Human herpesvirus 6
ggcacggugcca

SEQ ID NO: 2039848 - RNA, 21 nt, Human herpesvirus 6
gguaccgcgguuuggggucuu

SEQ ID NO: 2039849 - RNA, 22 nt, Human herpesvirus 6
cugccauuauugauagcauuau

SEQ ID NO: 2039850 - RNA, 13 nt, Human herpesvirus 6
uugcgauucuaau

SEQ ID NO: 2039851 - RNA, 15 nt, Human herpesvirus 6
agucugaaugcgagu

SEQ ID NO: 2039852 - RNA, 14 nt, Human herpesvirus 6
accugucucugcuu

SEQ ID NO: 2039853 - RNA, 16 nt, Human herpesvirus 6
ucagguuuagaugcuu

SEQ ID NO: 2039854 - RNA, 22 nt, Human herpesvirus 6
agaaaaauaaaggucagugggu

SEQ ID NO: 2039855 - RNA, 21 nt, Human herpesvirus 6
agcgacucccggcccagagac

SEQ ID NO: 2039856 - RNA, 13 nt, Human herpesvirus 6
auuugcccugagc

SEQ ID NO: 2039857 - RNA, 15 nt, Human herpesvirus 6
ugagguacaaaacau

SEQ ID NO: 2039858 - RNA, 23 nt, Human herpesvirus 6
aauauucaagcgaagugaagaau

SEQ ID NO: 2039859 - RNA, 12 nt, Human herpesvirus 6
uuaaaagucagu

SEQ ID NO: 2039860 - RNA, 14 nt, Human herpesvirus 6
uguguuucugucuu

SEQ ID NO: 2039861 - RNA, 15 nt, Human herpesvirus 6
gcauaauccuuuucu

SEQ ID NO: 2039862 - RNA, 13 nt, Human herpesvirus 6
guuaucacgaugu

SEQ ID NO: 2039863 - RNA, 17 nt, Human herpesvirus 6
acucguuuuccuucccu

SEQ ID NO: 2039864 - RNA, 14 nt, Human herpesvirus 6
ccuucacuuuuuca

SEQ ID NO: 2039865 - RNA, 12 nt, Human herpesvirus 6
cacaaucagaaa

SEQ ID NO: 2039866 - RNA, 18 nt, Human herpesvirus 6
cuggccgaguuuggacau

SEQ ID NO: 2039867 - RNA, 13 nt, Human herpesvirus 6
uguuguguuugag

SEQ ID NO: 2039868 - RNA, 12 nt, Human herpesvirus 6
uuucucugcaaa

SEQ ID NO: 2039869 - RNA, 13 nt, Human herpesvirus 6
acaugcaauuuuu

SEQ ID NO: 2039870 - RNA, 16 nt, Human herpesvirus 6
auuucuaaacacagau

SEQ ID NO: 2039871 - RNA, 24 nt, Human herpesvirus 6
uuucguuacgacgaacaauauaga

SEQ ID NO: 2039872 - RNA, 22 nt, Human herpesvirus 6
auaaucuuauagcucaguguuu

SEQ ID NO: 2039873 - RNA, 19 nt, Human herpesvirus 6
cuuucucuuuuuaauucca

SEQ ID NO: 2039874 - RNA, 14 nt, Human herpesvirus 6
cgagaacucuaaaa

SEQ ID NO: 2039875 - RNA, 19 nt, Human herpesvirus 6
gaaaacccagcaugaugau

SEQ ID NO: 2039876 - RNA, 20 nt, Human herpesvirus 6
uaacucuuuuuguugcuaua

SEQ ID NO: 2039877 - RNA, 20 nt, Human herpesvirus 6
aucaagacuacucuggcuga

SEQ ID NO: 2039878 - RNA, 16 nt, Human herpesvirus 6
gugccaccgucuggga

SEQ ID NO: 2039879 - RNA, 12 nt, Human herpesvirus 6
auguaaagaaau

SEQ ID NO: 2039880 - RNA, 18 nt, Human herpesvirus 6
auaaaaucuauugaagau

SEQ ID NO: 2039881 - RNA, 22 nt, Human herpesvirus 6
agacaucgauuugcugguaaau

SEQ ID NO: 2039882 - RNA, 15 nt, Human herpesvirus 6
guaauuuugaaauug

SEQ ID NO: 2039883 - RNA, 21 nt, Human herpesvirus 6
gacuggaaaacuaugugcauu

SEQ ID NO: 2039884 - RNA, 21 nt, Human herpesvirus 6
guaacaacuaccgccauauua

SEQ ID NO: 2039885 - RNA, 18 nt, Human herpesvirus 6
cugauggcagguaaccaa

SEQ ID NO: 2039886 - RNA, 17 nt, Human herpesvirus 6
caagcuguccaucuuca

SEQ ID NO: 2039887 - RNA, 15 nt, Human herpesvirus 6
ugggggguuccuccg

SEQ ID NO: 2039888 - RNA, 23 nt, Human herpesvirus 6
cauuguucuaaagauuuuuauuc

SEQ ID NO: 2039889 - RNA, 17 nt, Human herpesvirus 6
uuauacgaaaauaaaaa

SEQ ID NO: 2039890 - RNA, 18 nt, Human herpesvirus 6
uucaaccuguuuccagaa

SEQ ID NO: 2039891 - RNA, 18 nt, Human herpesvirus 6
uuuacauagaaauuacaa

SEQ ID NO: 2039892 - RNA, 17 nt, Human herpesvirus 6
cauucgguacucuuuuc

SEQ ID NO: 2039893 - RNA, 12 nt, Human herpesvirus 6
ggaaugugucag

SEQ ID NO: 2039894 - RNA, 19 nt, Human herpesvirus 6
agaaugaaaaaaaaaauau

SEQ ID NO: 2039895 - RNA, 21 nt, Human herpesvirus 6
caaucagccugcucagagcug

SEQ ID NO: 2039896 - RNA, 19 nt, Human herpesvirus 6
auaucaaacuuuuuuugaa

SEQ ID NO: 2039897 - RNA, 14 nt, Human herpesvirus 6
guucguaaugugca

SEQ ID NO: 2039898 - RNA, 17 nt, Human herpesvirus 6
auuaaauguuacugaac

SEQ ID NO: 2039899 - RNA, 16 nt, Human herpesvirus 6
uuuuuuaacagugucu

SEQ ID NO: 2039900 - RNA, 13 nt, Human herpesvirus 6
cugacacaaucag

SEQ ID NO: 2039901 - RNA, 19 nt, Human herpesvirus 6
uggaaaacuaugugcauuc

SEQ ID NO: 2039902 - RNA, 13 nt, Human herpesvirus 6
gcaccgcuguggc

SEQ ID NO: 2039903 - RNA, 16 nt, Human herpesvirus 6
uauucagaggugcuga

SEQ ID NO: 2039904 - RNA, 18 nt, Human herpesvirus 6
cuauuacuauauauugga

SEQ ID NO: 2039905 - RNA, 22 nt, Human herpesvirus 6
guuaggacaauuagauaaacaa

SEQ ID NO: 2039906 - RNA, 18 nt, Human herpesvirus 6
accaucaauaaaaaucua

SEQ ID NO: 2039907 - RNA, 16 nt, Human herpesvirus 6
ccacauguguauugga

SEQ ID NO: 2039908 - RNA, 12 nt, Human herpesvirus 6
ugaaugugcuuu

SEQ ID NO: 2039909 - RNA, 21 nt, Human herpesvirus 6
auuuuauaacgacaaaagaca

SEQ ID NO: 2039910 - RNA, 19 nt, Human herpesvirus 6
ccaaugauucuuaauucuu

SEQ ID NO: 2039911 - RNA, 21 nt, Human herpesvirus 6
acauguucuuuauuaaauguu

SEQ ID NO: 2039912 - RNA, 19 nt, Human herpesvirus 6
auacauuuccaugcauauc

SEQ ID NO: 2039913 - RNA, 20 nt, Human herpesvirus 6
gaaacggcgcggagcccaag

SEQ ID NO: 2039914 - RNA, 17 nt, Human herpesvirus 6
ggagcacacacgccgac

SEQ ID NO: 2039915 - RNA, 17 nt, Human herpesvirus 6
gaaauaaaguuuaaaga

SEQ ID NO: 2039916 - RNA, 16 nt, Human herpesvirus 6
gauguauggagauguu

SEQ ID NO: 2039917 - RNA, 23 nt, Human herpesvirus 6
uuaaagaguuuucucacacccau

SEQ ID NO: 2039918 - RNA, 21 nt, Human herpesvirus 6
cuaacggggcaaccgcaguuc

SEQ ID NO: 2039919 - RNA, 17 nt, Human herpesvirus 6
uuuuugucggauuuaaa

SEQ ID NO: 2039920 - RNA, 19 nt, Human herpesvirus 6
uugauuauauauuugcaua

SEQ ID NO: 2039921 - RNA, 14 nt, Human herpesvirus 6
agcuagagugacau

SEQ ID NO: 2039922 - RNA, 23 nt, Human herpesvirus 6
gccgccguccuauucagaggugc

SEQ ID NO: 2039923 - RNA, 13 nt, Human herpesvirus 6
uuaauccacugca

SEQ ID NO: 2039924 - RNA, 21 nt, Human herpesvirus 6
ugaucugauucgacaaaucau

SEQ ID NO: 2039925 - RNA, 23 nt, Human herpesvirus 6
agccucgacguccaccuggaaaa

SEQ ID NO: 2039926 - RNA, 23 nt, Human herpesvirus 6
ggccauauuaggcugcagcccca

SEQ ID NO: 2039927 - RNA, 16 nt, Human herpesvirus 6
cacgcauagacaaacc

SEQ ID NO: 2039928 - RNA, 13 nt, Human herpesvirus 6
auuucuuguugag

SEQ ID NO: 2039929 - RNA, 16 nt, Human herpesvirus 6
uuccccagcuguguuu

SEQ ID NO: 2039930 - RNA, 22 nt, Human herpesvirus 6
auuggcgucuaguaccuguagc

SEQ ID NO: 2039931 - RNA, 14 nt, Human herpesvirus 6
acggaccgagagcc

SEQ ID NO: 2039932 - RNA, 20 nt, Human herpesvirus 6
cugggacccacgguggccug

SEQ ID NO: 2039933 - RNA, 17 nt, Human herpesvirus 6
gcaggauaauuuaugga

SEQ ID NO: 2039934 - RNA, 23 nt, Human herpesvirus 6
ggcaaccugaaacuccccagaga

SEQ ID NO: 2039935 - RNA, 17 nt, Human herpesvirus 6
gacaaaaccuaaauaca

SEQ ID NO: 2039936 - RNA, 16 nt, Human herpesvirus 6
cgccacugcgaggcca

SEQ ID NO: 2039937 - RNA, 23 nt, Human herpesvirus 6
acacagaugguuuuaagagcaga

SEQ ID NO: 2039938 - RNA, 20 nt, Human herpesvirus 6
uguuugggagaacugaggac

SEQ ID NO: 2039939 - RNA, 11 nt, Human herpesvirus 6
cuccaauaaaa

SEQ ID NO: 2039940 - RNA, 13 nt, Human herpesvirus 6
aaacggccaaccu

SEQ ID NO: 2039941 - RNA, 18 nt, Human herpesvirus 6
cuuuccugcacaggcgaa

SEQ ID NO: 2039942 - RNA, 18 nt, Human herpesvirus 6
acgaaagcaguuuuacau

SEQ ID NO: 2039943 - RNA, 15 nt, Human herpesvirus 6
ggccguucucucucc

SEQ ID NO: 2039944 - RNA, 20 nt, Human herpesvirus 6
ggaucgacgggcaggaauca

SEQ ID NO: 2039945 - RNA, 19 nt, Human herpesvirus 6
uagccuauuaagcagccgc

SEQ ID NO: 2039946 - RNA, 18 nt, Human herpesvirus 6
gaagauuuguaaggacaa

SEQ ID NO: 2039947 - RNA, 22 nt, Human herpesvirus 6
auuuggaagcgaaucgcuuaaa

SEQ ID NO: 2039948 - RNA, 13 nt, Human herpesvirus 6
caaagaaacagua

SEQ ID NO: 2039949 - RNA, 20 nt, Human herpesvirus 6
auuaccaccagaaaaguaua

SEQ ID NO: 2039950 - RNA, 14 nt, Human herpesvirus 6
cuuacagagcuuuu

SEQ ID NO: 2039951 - RNA, 13 nt, Human herpesvirus 6
uuuauaaacuuaa

SEQ ID NO: 2039952 - RNA, 23 nt, Human herpesvirus 6
uaagucuuugggaacauguaacu

SEQ ID NO: 2039953 - RNA, 20 nt, Human herpesvirus 6
agacccugccuauacaggca

SEQ ID NO: 2039954 - RNA, 18 nt, Human herpesvirus 6
uaggugauugggagcuca

SEQ ID NO: 2039955 - RNA, 16 nt, Human herpesvirus 6
uuguugaguuucagca

SEQ ID NO: 2039956 - RNA, 15 nt, Human herpesvirus 6
caaaagcgccugccu

SEQ ID NO: 2039957 - RNA, 19 nt, Human herpesvirus 6
ccgcugcggucgccgccuc

SEQ ID NO: 2039958 - RNA, 19 nt, Human herpesvirus 6
caucccuuaaaaaaacaca

SEQ ID NO: 2039959 - RNA, 17 nt, Human herpesvirus 6
gaaacaaccacaaacau

SEQ ID NO: 2039960 - RNA, 17 nt, Human herpesvirus 6
acucauuuuaacauuuu

SEQ ID NO: 2039961 - RNA, 22 nt, Human herpesvirus 6
aguuauacuggcaaagcaaaga

SEQ ID NO: 2039962 - RNA, 17 nt, Human herpesvirus 6
gaagucuucuugggcuc

SEQ ID NO: 2039963 - RNA, 14 nt, Human herpesvirus 6
uccguuuccuccuc

SEQ ID NO: 2039964 - RNA, 18 nt, Human herpesvirus 6
cuccucaacacucucagu

SEQ ID NO: 2039965 - RNA, 20 nt, Human herpesvirus 6
uuccgauacagcaccaucaa

SEQ ID NO: 2039966 - RNA, 13 nt, Human herpesvirus 6
agguguuaaacga

SEQ ID NO: 2039967 - RNA, 20 nt, Human herpesvirus 6
ucuaaaauuguaauuuugaa

SEQ ID NO: 2039968 - RNA, 19 nt, Human herpesvirus 6
uagauuuuauaacgacaaa

SEQ ID NO: 2039969 - RNA, 22 nt, Human herpesvirus 6
ucauaaucugcguuccucucuc

SEQ ID NO: 2039970 - RNA, 15 nt, Human herpesvirus 6
guuaaaacaguaaau

SEQ ID NO: 2039971 - RNA, 16 nt, Human herpesvirus 6
gggaccuucaggaaca

SEQ ID NO: 2039972 - RNA, 19 nt, Human herpesvirus 6
acucgaccccuuuauaaga

SEQ ID NO: 2039973 - RNA, 20 nt, Human herpesvirus 6
gagacagcggacagcggggu

SEQ ID NO: 2039974 - RNA, 15 nt, Human herpesvirus 6
auaagcagaagaguu

SEQ ID NO: 2039975 - RNA, 18 nt, Human herpesvirus 6
agcaaguugcuaccgcug

SEQ ID NO: 2039976 - RNA, 16 nt, Human herpesvirus 6
accuugucaauaaaca

SEQ ID NO: 2039977 - RNA, 18 nt, Human herpesvirus 6
cuuucuaagacgagaugu

SEQ ID NO: 2039978 - RNA, 14 nt, Human herpesvirus 6
guugugauuggauc

SEQ ID NO: 2039979 - RNA, 22 nt, Human herpesvirus 6
auaaucugaucgaaauacuucu

SEQ ID NO: 2039980 - RNA, 16 nt, Human herpesvirus 6
uggaugugcacuuucu

SEQ ID NO: 2039981 - RNA, 15 nt, Human herpesvirus 6
uuaauccauauuugg

SEQ ID NO: 2039982 - RNA, 12 nt, Human herpesvirus 6
gcgggaccuggc

SEQ ID NO: 2039983 - RNA, 20 nt, Human herpesvirus 6
uugacauaggaauucuuauu

SEQ ID NO: 2039984 - RNA, 19 nt, Human herpesvirus 6
acauccagaaaagcaaaca

SEQ ID NO: 2039985 - RNA, 17 nt, Human herpesvirus 6
auguagcauacgacaaa

SEQ ID NO: 2039986 - RNA, 22 nt, Human herpesvirus 6
auuugagagcuaauaugaacaa

SEQ ID NO: 2039987 - RNA, 22 nt, Human herpesvirus 6
acucuucggcauaaacagagac

SEQ ID NO: 2039988 - RNA, 15 nt, Human herpesvirus 6
uuugauuuuguacag

SEQ ID NO: 2039989 - RNA, 20 nt, Human herpesvirus 6
auguaguuaaugcugcugcu

SEQ ID NO: 2039990 - RNA, 17 nt, Human herpesvirus 6
uaaaaaccgacuuauau

SEQ ID NO: 2039991 - RNA, 16 nt, Human herpesvirus 6
cgcuccuccccugucc

SEQ ID NO: 2039992 - RNA, 17 nt, Human herpesvirus 6
gcggcaaccgcaguucc

SEQ ID NO: 2039993 - RNA, 21 nt, Human herpesvirus 6
gacaucgagauucuuuaaaga

SEQ ID NO: 2039994 - RNA, 20 nt, Human herpesvirus 6
ugauguggacguucugucug

SEQ ID NO: 2039995 - RNA, 20 nt, Human herpesvirus 6
ccggggacggacagggggau

SEQ ID NO: 2039996 - RNA, 18 nt, Human herpesvirus 6
acucaacugcuaguuuuu

SEQ ID NO: 2039997 - RNA, 23 nt, Human herpesvirus 6
uuuaaaauggauuagugaaaaga

SEQ ID NO: 2039998 - RNA, 12 nt, Human herpesvirus 6
caacggagaaaa

SEQ ID NO: 2039999 - RNA, 20 nt, Human herpesvirus 6
uauaaauccgauagccauac

SEQ ID NO: 2040000 - RNA, 23 nt, Human herpesvirus 6
ccuagacccugccuauacaggca

SEQ ID NO: 2040001 - RNA, 18 nt, Human herpesvirus 6
gcgccggugguaccuguc

SEQ ID NO: 2040002 - RNA, 14 nt, Human herpesvirus 6
ugcauaugucuguu

SEQ ID NO: 2040003 - RNA, 12 nt, Human herpesvirus 6
aaaucuggcaac

SEQ ID NO: 2040004 - RNA, 14 nt, Human herpesvirus 6
gcgccauaaaaaua

SEQ ID NO: 2040005 - RNA, 17 nt, Human herpesvirus 6
ugauguauggagauguu

SEQ ID NO: 2040006 - RNA, 20 nt, Human herpesvirus 6
cuugggugugcauugugaca

SEQ ID NO: 2040007 - RNA, 20 nt, Human herpesvirus 6
ucucgugguacaauaaaaac

SEQ ID NO: 2040008 - RNA, 15 nt, Human herpesvirus 6
uacggcagcggacca

SEQ ID NO: 2040009 - RNA, 18 nt, Human herpesvirus 6
acauucguauacuuccuc

SEQ ID NO: 2040010 - RNA, 14 nt, Human herpesvirus 6
cccggaguacacgu

SEQ ID NO: 2040011 - RNA, 16 nt, Human herpesvirus 6
uucgauguuuucaggu

SEQ ID NO: 2040012 - RNA, 20 nt, Human herpesvirus 6
caccggaugucgacuccucc

SEQ ID NO: 2040013 - RNA, 14 nt, Human herpesvirus 6
aucgguggcagagg

SEQ ID NO: 2040014 - RNA, 12 nt, Human herpesvirus 6
uacauauaguca

SEQ ID NO: 2040015 - RNA, 15 nt, Human herpesvirus 6
aagacggaaccauga

SEQ ID NO: 2040016 - RNA, 21 nt, Human herpesvirus 6
cucugaaauuugagaaaguug

SEQ ID NO: 2040017 - RNA, 13 nt, Human herpesvirus 6
aaaaaaauuccca

SEQ ID NO: 2040018 - RNA, 13 nt, Human herpesvirus 6
aucgauuuaaccu

SEQ ID NO: 2040019 - RNA, 19 nt, Human herpesvirus 6
auaaucgauuacaaaacaa

SEQ ID NO: 2040020 - RNA, 22 nt, Human herpesvirus 6
agcgacuuuuuaacaaaauggu

SEQ ID NO: 2040021 - RNA, 17 nt, Human herpesvirus 6
cggauccaacucgacua

SEQ ID NO: 2040022 - RNA, 17 nt, Human herpesvirus 6
uguaaauaaacaccagc

SEQ ID NO: 2040023 - RNA, 11 nt, Human herpesvirus 6
uaaaauuaaag

SEQ ID NO: 2040024 - RNA, 21 nt, Human herpesvirus 6
caaaaagcuuuaaagcagcua

SEQ ID NO: 2040025 - RNA, 16 nt, Human herpesvirus 6
cagaccacaccccugu

SEQ ID NO: 2040026 - RNA, 18 nt, Human herpesvirus 6
acuuuugcuuagucugua

SEQ ID NO: 2040027 - RNA, 20 nt, Human herpesvirus 6
uucgggacaaaaccgaggca

SEQ ID NO: 2040028 - RNA, 23 nt, Human herpesvirus 6
auuucuagcgaucauaaaacugc

SEQ ID NO: 2040029 - RNA, 14 nt, Human herpesvirus 6
cauagcagcaauag

SEQ ID NO: 2040030 - RNA, 14 nt, Human herpesvirus 6
uuuauaugcaggua

SEQ ID NO: 2040031 - RNA, 18 nt, Human herpesvirus 6
gaccugaucacagagaaa

SEQ ID NO: 2040032 - RNA, 17 nt, Human herpesvirus 6
acuuuguccuuacaaau

SEQ ID NO: 2040033 - RNA, 15 nt, Human herpesvirus 6
cauaacggaaaaaug

SEQ ID NO: 2040034 - RNA, 14 nt, Human herpesvirus 6
cagguggagcugug

SEQ ID NO: 2040035 - RNA, 15 nt, Human herpesvirus 6
uaggauuagaacaau

SEQ ID NO: 2040036 - RNA, 10 nt, Human herpesvirus 6
gccaaaauau

SEQ ID NO: 2040037 - RNA, 18 nt, Human herpesvirus 6
cauauauuggcaugugaa

SEQ ID NO: 2040038 - RNA, 11 nt, Human herpesvirus 6
aacaaguaaau

SEQ ID NO: 2040039 - RNA, 11 nt, Human herpesvirus 6
aaaaaaaaugu

SEQ ID NO: 2040040 - RNA, 22 nt, Human herpesvirus 6
ucucuguguguguugugcgcua

SEQ ID NO: 2040041 - RNA, 19 nt, Human herpesvirus 6
acguaagaaaaaaaacgaa

SEQ ID NO: 2040042 - RNA, 12 nt, Human herpesvirus 6
uuugaacuuuuu

SEQ ID NO: 2040043 - RNA, 14 nt, Human herpesvirus 6
gaaccaccagagac

SEQ ID NO: 2040044 - RNA, 12 nt, Human herpesvirus 6
cugauggaaacc

SEQ ID NO: 2040045 - RNA, 14 nt, Human herpesvirus 6
ucuaaacacagaug

SEQ ID NO: 2040046 - RNA, 18 nt, Human herpesvirus 6
ucgcccgauccgccccga

SEQ ID NO: 2040047 - RNA, 20 nt, Human herpesvirus 6
uauuguuaacauguacaaac

SEQ ID NO: 2040048 - RNA, 18 nt, Human herpesvirus 6
gaagaauuuauguucagc

SEQ ID NO: 2040049 - RNA, 17 nt, Human herpesvirus 6
ggcgacaaccgccgccg

SEQ ID NO: 2040050 - RNA, 19 nt, Human herpesvirus 6
uuguguuaaucggaauguc

SEQ ID NO: 2040051 - RNA, 20 nt, Human herpesvirus 6
gaauacgaggaggggagacg

SEQ ID NO: 2040052 - RNA, 15 nt, Human herpesvirus 6
uauccgcccuccccg

SEQ ID NO: 2040053 - RNA, 17 nt, Human herpesvirus 6
ggcagaucuaucacagg

SEQ ID NO: 2040054 - RNA, 19 nt, Human herpesvirus 6
gggcaaccgcaguuccugu

SEQ ID NO: 2040055 - RNA, 19 nt, Human herpesvirus 6
cccucgguccaaccccucc

SEQ ID NO: 2040056 - RNA, 14 nt, Human herpesvirus 6
cuuuaaagcagcua

SEQ ID NO: 2040057 - RNA, 20 nt, Human herpesvirus 6
cucgguccaaccccucccau

SEQ ID NO: 2040058 - RNA, 16 nt, Human herpesvirus 6
aaugagauguucuaaa

SEQ ID NO: 2040059 - RNA, 14 nt, Human herpesvirus 6
uaagcaaaaacaga

SEQ ID NO: 2040060 - RNA, 22 nt, Human herpesvirus 6
aacaccaauaaaauuuuuugca

SEQ ID NO: 2040061 - RNA, 15 nt, Human herpesvirus 6
gaaucauggugucuu

SEQ ID NO: 2040062 - RNA, 15 nt, Human herpesvirus 6
uauacggaaaagaug

SEQ ID NO: 2040063 - RNA, 21 nt, Human herpesvirus 6
cuauaaaaaauuucaaacugg

SEQ ID NO: 2040064 - RNA, 17 nt, Human herpesvirus 6
acauuuauaaaaggagu

SEQ ID NO: 2040065 - RNA, 12 nt, Human herpesvirus 6
uaacggagcccg

SEQ ID NO: 2040066 - RNA, 22 nt, Human herpesvirus 6
aaacaagauccaaucacaacaa

SEQ ID NO: 2040067 - RNA, 16 nt, Human herpesvirus 6
ugcagaacaucucaga

SEQ ID NO: 2040068 - RNA, 19 nt, Human herpesvirus 6
uguacaauauaauuucuua

SEQ ID NO: 2040069 - RNA, 16 nt, Human herpesvirus 6
gccgcugcggucgccg

SEQ ID NO: 2040070 - RNA, 14 nt, Human herpesvirus 6
uauaaaaaacugca

SEQ ID NO: 2040071 - RNA, 22 nt, Human herpesvirus 6
auuaaaugugaacauuauaaau

SEQ ID NO: 2040072 - RNA, 15 nt, Human herpesvirus 6
acaaauuuuaaaugc

SEQ ID NO: 2040073 - RNA, 12 nt, Human herpesvirus 6
cuccucaacacu

SEQ ID NO: 2040074 - RNA, 16 nt, Human herpesvirus 6
uugugauucugcauuu

SEQ ID NO: 2040075 - RNA, 12 nt, Human herpesvirus 6
ugucggccucug

SEQ ID NO: 2040076 - RNA, 17 nt, Human herpesvirus 6
agaaccugaaaucugag

SEQ ID NO: 2040077 - RNA, 17 nt, Human herpesvirus 6
uugaugaaauugugacu

SEQ ID NO: 2040078 - RNA, 17 nt, Human herpesvirus 6
cggaacaaggccaaacc

SEQ ID NO: 2040079 - RNA, 17 nt, Human herpesvirus 6
acauaguggcuaugaag

SEQ ID NO: 2040080 - RNA, 14 nt, Human herpesvirus 6
ucaaaaaaauuccc

SEQ ID NO: 2040081 - RNA, 12 nt, Human herpesvirus 6
uaccuguacaag

SEQ ID NO: 2040082 - RNA, 13 nt, Human herpesvirus 6
ccacgguggccug

SEQ ID NO: 2040083 - RNA, 23 nt, Human herpesvirus 6
uucaucaaucacucccuguuuuu

SEQ ID NO: 2040084 - RNA, 14 nt, Human herpesvirus 6
acucucucaguaau

SEQ ID NO: 2040085 - RNA, 14 nt, Human herpesvirus 6
ccuaccauguugcu

SEQ ID NO: 2040086 - RNA, 23 nt, Human herpesvirus 6
aggggcgcgagacagcggacagc

SEQ ID NO: 2040087 - RNA, 19 nt, Human herpesvirus 6
guggacguucugucugcag

SEQ ID NO: 2040088 - RNA, 19 nt, Human herpesvirus 6
uugggaccuucaggaacaa

SEQ ID NO: 2040089 - RNA, 13 nt, Human herpesvirus 6
acugauggcaggu

SEQ ID NO: 2040090 - RNA, 13 nt, Human herpesvirus 6
auaauauuuccau

SEQ ID NO: 2040091 - RNA, 21 nt, Human herpesvirus 6
uuauuagggauacguauauug

SEQ ID NO: 2040092 - RNA, 17 nt, Human herpesvirus 6
aucuauugucgaagaac

SEQ ID NO: 2040093 - RNA, 22 nt, Human herpesvirus 6
uccacucggauucaaagaaagu

SEQ ID NO: 2040094 - RNA, 12 nt, Human herpesvirus 6
acacaggacacg

SEQ ID NO: 2040095 - RNA, 20 nt, Human herpesvirus 6
gaaucaugagagccuucagu

SEQ ID NO: 2040096 - RNA, 20 nt, Human herpesvirus 6
uuuuaaccggaaaaaugaaa

SEQ ID NO: 2040097 - RNA, 16 nt, Human herpesvirus 6
ugaaaauaucauuaaa

SEQ ID NO: 2040098 - RNA, 16 nt, Human herpesvirus 6
gucuuuccugcacagg

SEQ ID NO: 2040099 - RNA, 20 nt, Human herpesvirus 6
ugauagcgucuuugcauauu

SEQ ID NO: 2040100 - RNA, 13 nt, Human herpesvirus 6
gucugugauuuua

SEQ ID NO: 2040101 - RNA, 15 nt, Human herpesvirus 6
gugauuccaguuaau

SEQ ID NO: 2040102 - RNA, 16 nt, Human herpesvirus 6
gccuggcacggugcca

SEQ ID NO: 2040103 - RNA, 21 nt, Human herpesvirus 6
auaauuuuauuaacuguaaaa

SEQ ID NO: 2040104 - RNA, 19 nt, Human herpesvirus 6
uauuuuuuuuuuauuuaca

SEQ ID NO: 2040105 - RNA, 16 nt, Human herpesvirus 6
cugccuauacaggcaa

SEQ ID NO: 2040106 - RNA, 22 nt, Human herpesvirus 6
uucaggcggaauguuuguuuuu

SEQ ID NO: 2040107 - RNA, 17 nt, Human herpesvirus 6
augcggacucugacgaa

SEQ ID NO: 2040108 - RNA, 15 nt, Human herpesvirus 6
gaacaucucagaucu

SEQ ID NO: 2040109 - RNA, 14 nt, Human herpesvirus 6
auugugacaaggaa

SEQ ID NO: 2040110 - RNA, 13 nt, Human herpesvirus 6
uguuuuguaugaa

SEQ ID NO: 2040111 - RNA, 17 nt, Human herpesvirus 6
uuugccaaaauaugcua

SEQ ID NO: 2040112 - RNA, 17 nt, Human herpesvirus 6
cauauuaggcugcagcc

SEQ ID NO: 2040113 - RNA, 15 nt, Human herpesvirus 6
acaacaaguaaauuc

SEQ ID NO: 2040114 - RNA, 18 nt, Human herpesvirus 6
cuuuucauaugaaaagcu

SEQ ID NO: 2040115 - RNA, 16 nt, Human herpesvirus 6
aauaauggcaugcauu

SEQ ID NO: 2040116 - RNA, 15 nt, Human herpesvirus 6
gcacaaaccaaaaug

SEQ ID NO: 2040117 - RNA, 23 nt, Human herpesvirus 6
caagaaaucauuuugaaaugucg

SEQ ID NO: 2040118 - RNA, 18 nt, Human herpesvirus 6
ggcccagagacgguguuu

SEQ ID NO: 2040119 - RNA, 21 nt, Human herpesvirus 6
ccgcgguuuggggucuuuccu

SEQ ID NO: 2040120 - RNA, 18 nt, Human herpesvirus 6
gugacuuauauauauauc

SEQ ID NO: 2040121 - RNA, 17 nt, Human herpesvirus 6
uaccacacgcuuacaca

SEQ ID NO: 2040122 - RNA, 23 nt, Human herpesvirus 6
gaucuaaauuucuacaaaaauac

SEQ ID NO: 2040123 - RNA, 17 nt, Human herpesvirus 6
cugcaugguccacagau

SEQ ID NO: 2040124 - RNA, 20 nt, Human herpesvirus 6
ugcaauuguuugugaugggu

SEQ ID NO: 2040125 - RNA, 16 nt, Human herpesvirus 6
gggucuuuccugccca

SEQ ID NO: 2040126 - RNA, 15 nt, Human herpesvirus 6
cuuaccauauauugg

SEQ ID NO: 2040127 - RNA, 18 nt, Human herpesvirus 6
agucccaucuauacaccc

SEQ ID NO: 2040128 - RNA, 20 nt, Human herpesvirus 6
ucaaugcguuggagcaagcg

SEQ ID NO: 2040129 - RNA, 19 nt, Human herpesvirus 6
cugggacccacgguggccu

SEQ ID NO: 2040130 - RNA, 22 nt, Human herpesvirus 6
gcaaucgaugugacaaaucugu

SEQ ID NO: 2040131 - RNA, 23 nt, Human herpesvirus 6
aacucauguugccucuggacacg

SEQ ID NO: 2040132 - RNA, 15 nt, Human herpesvirus 6
acuguguguugaaug

SEQ ID NO: 2040133 - RNA, 12 nt, Human herpesvirus 6
uaauguccagug

SEQ ID NO: 2040134 - RNA, 13 nt, Human herpesvirus 6
agaugccuguagg

SEQ ID NO: 2040135 - RNA, 23 nt, Human herpesvirus 6
uaugaauucguuacaaucucugu

SEQ ID NO: 2040136 - RNA, 13 nt, Human herpesvirus 6
uagacuuggugau

SEQ ID NO: 2040137 - RNA, 13 nt, Human herpesvirus 6
cagaccacacccc

SEQ ID NO: 2040138 - RNA, 15 nt, Human herpesvirus 6
gcuaggcagaucauc

SEQ ID NO: 2040139 - RNA, 17 nt, Human herpesvirus 6
aguucuaugucuagaug

SEQ ID NO: 2040140 - RNA, 15 nt, Human herpesvirus 6
cacaagcguacacua

SEQ ID NO: 2040141 - RNA, 14 nt, Human herpesvirus 6
uccagacaauaauc

SEQ ID NO: 2040142 - RNA, 16 nt, Human herpesvirus 6
gaacaggcggaagaac

SEQ ID NO: 2040143 - RNA, 13 nt, Human herpesvirus 6
uuccugcccaggc

SEQ ID NO: 2040144 - RNA, 11 nt, Human herpesvirus 6
ccugcacaggc

SEQ ID NO: 2040145 - RNA, 19 nt, Human herpesvirus 6
gaaaccaccggcuaacccu

SEQ ID NO: 2040146 - RNA, 20 nt, Human herpesvirus 6
gaccuggccgaguuuggaca

SEQ ID NO: 2040147 - RNA, 13 nt, Human herpesvirus 6
uugauaguacuua

SEQ ID NO: 2040148 - RNA, 18 nt, Human herpesvirus 6
acggugucacacagcaug

SEQ ID NO: 2040149 - RNA, 19 nt, Human herpesvirus 6
caccaccgcugacaaccuc

SEQ ID NO: 2040150 - RNA, 21 nt, Human herpesvirus 6
guuauaacacaacaaguaaau

SEQ ID NO: 2040151 - RNA, 21 nt, Human herpesvirus 6
cagcucaaacaaauggaaacu

SEQ ID NO: 2040152 - RNA, 18 nt, Human herpesvirus 6
uguugaguaauugaacau

SEQ ID NO: 2040153 - RNA, 14 nt, Human herpesvirus 6
agagaugaaagaca

SEQ ID NO: 2040154 - RNA, 13 nt, Human herpesvirus 6
aagaucagugggu

SEQ ID NO: 2040155 - RNA, 17 nt, Human herpesvirus 6
uuucgacaauccuaauu

SEQ ID NO: 2040156 - RNA, 19 nt, Human herpesvirus 6
uaaaauuaugccacaccca

SEQ ID NO: 2040157 - RNA, 22 nt, Human herpesvirus 6
gaauuucgucuccugggagcuc

SEQ ID NO: 2040158 - RNA, 15 nt, Human herpesvirus 6
augaacuacugagug

SEQ ID NO: 2040159 - RNA, 18 nt, Human herpesvirus 6
uauuuucgguguguauuu

SEQ ID NO: 2040160 - RNA, 14 nt, Human herpesvirus 6
cuuauauaggcacc

SEQ ID NO: 2040161 - RNA, 15 nt, Human herpesvirus 6
uaacccuaacccuaa

SEQ ID NO: 2040162 - RNA, 21 nt, Human herpesvirus 6
caaacuuuuugccgucacacu

SEQ ID NO: 2040163 - RNA, 20 nt, Human herpesvirus 6
uuauucggaguuuucaagau

SEQ ID NO: 2040164 - RNA, 19 nt, Human herpesvirus 6
aaacagacuuuacuucuac

SEQ ID NO: 2040165 - RNA, 13 nt, Human herpesvirus 6
uauauauuugcau

SEQ ID NO: 2040166 - RNA, 16 nt, Human herpesvirus 6
auuguuaacauguaca

SEQ ID NO: 2040167 - RNA, 15 nt, Human herpesvirus 6
cgauucagaccucau

SEQ ID NO: 2040168 - RNA, 17 nt, Human herpesvirus 6
uagauggaaaauugcaa

SEQ ID NO: 2040169 - RNA, 20 nt, Human herpesvirus 6
gaucugauucgacaaaucau

SEQ ID NO: 2040170 - RNA, 24 nt, Human herpesvirus 6
ccaucuaucgcgcaccgcuguggc

SEQ ID NO: 2040171 - RNA, 14 nt, Human herpesvirus 6
cucgaagccucgac

SEQ ID NO: 2040172 - RNA, 17 nt, Human herpesvirus 6
aggacgggaagaacagg

SEQ ID NO: 2040173 - RNA, 17 nt, Human herpesvirus 6
gcuauuuuuuuuaaugu

SEQ ID NO: 2040174 - RNA, 16 nt, Human herpesvirus 6
uuaaagaaucugcaga

SEQ ID NO: 2040175 - RNA, 11 nt, Human herpesvirus 6
ugcauacauaa

SEQ ID NO: 2040176 - RNA, 23 nt, Human herpesvirus 6
agccuguccgugacacacagaau

SEQ ID NO: 2040177 - RNA, 17 nt, Human herpesvirus 6
auuucuuacuaggaaag

SEQ ID NO: 2040178 - RNA, 12 nt, Human herpesvirus 6
cgauacccagcg

SEQ ID NO: 2040179 - RNA, 17 nt, Human herpesvirus 6
accccucccaucccccu

SEQ ID NO: 2040180 - RNA, 16 nt, Human herpesvirus 6
gaaaugaucaauacau

SEQ ID NO: 2040181 - RNA, 15 nt, Human herpesvirus 6
uaggaaguaaauaca

SEQ ID NO: 2040182 - RNA, 16 nt, Human herpesvirus 6
aguaacggaaaaauuu

SEQ ID NO: 2040183 - RNA, 16 nt, Human herpesvirus 6
caaauuacaaucaugu

SEQ ID NO: 2040184 - RNA, 19 nt, Human herpesvirus 6
aucuacugcaguccagaag

SEQ ID NO: 2040185 - RNA, 12 nt, Human herpesvirus 6
gccaaaggaaac

SEQ ID NO: 2040186 - RNA, 18 nt, Human herpesvirus 6
cgagaacucuaaaagcug

SEQ ID NO: 2040187 - RNA, 18 nt, Human herpesvirus 6
auaaguacauagaauuuc

SEQ ID NO: 2040188 - RNA, 21 nt, Human herpesvirus 6
uucauaaagauaaagaucagu

SEQ ID NO: 2040189 - RNA, 18 nt, Human herpesvirus 6
auuuucaaauuuauuugu

SEQ ID NO: 2040190 - RNA, 13 nt, Human herpesvirus 6
gaaugagauguuc

SEQ ID NO: 2040191 - RNA, 20 nt, Human herpesvirus 6
aucaucucgugcaaaagcug

SEQ ID NO: 2040192 - RNA, 23 nt, Human herpesvirus 6
aacauaaaacaacaacaauaaca

SEQ ID NO: 2040193 - RNA, 14 nt, Human herpesvirus 6
caggcaaacgagaa

SEQ ID NO: 2040194 - RNA, 23 nt, Human herpesvirus 6
gagacaccagccgguagagagug

SEQ ID NO: 2040195 - RNA, 13 nt, Human herpesvirus 6
cgucugggaccca

SEQ ID NO: 2040196 - RNA, 18 nt, Human herpesvirus 6
agcggaagugaaagcagu

SEQ ID NO: 2040197 - RNA, 20 nt, Human herpesvirus 6
ggguuggaccgaggggacag

SEQ ID NO: 2040198 - RNA, 14 nt, Human herpesvirus 6
gugacaucuuuuau

SEQ ID NO: 2040199 - RNA, 17 nt, Human herpesvirus 6
ugcagaucuaauucaca

SEQ ID NO: 2040200 - RNA, 19 nt, Human herpesvirus 6
gucuaucgcaaauucucuc

SEQ ID NO: 2040201 - RNA, 16 nt, Human herpesvirus 6
agggcggacggacggc

SEQ ID NO: 2040202 - RNA, 13 nt, Human herpesvirus 6
agacgagauguuu

SEQ ID NO: 2040203 - RNA, 17 nt, Human herpesvirus 6
acaaagaaucaaugaaa

SEQ ID NO: 2040204 - RNA, 13 nt, Human herpesvirus 6
uuuacugugauuu

SEQ ID NO: 2040205 - RNA, 22 nt, Human herpesvirus 6
cugcacaggcgaacgagaacuc

SEQ ID NO: 2040206 - RNA, 16 nt, Human herpesvirus 6
uucaauaaaaacucaa

SEQ ID NO: 2040207 - RNA, 18 nt, Human herpesvirus 6
cgaccugaucacagagaa

SEQ ID NO: 2040208 - RNA, 16 nt, Human herpesvirus 6
guauucagaguacuuu

SEQ ID NO: 2040209 - RNA, 20 nt, Human herpesvirus 6
aagccucgacguccaccugg

SEQ ID NO: 2040210 - RNA, 15 nt, Human herpesvirus 6
aacggagagcuuguu

SEQ ID NO: 2040211 - RNA, 20 nt, Human herpesvirus 6
auuucagguucuucaaaaaa

SEQ ID NO: 2040212 - RNA, 12 nt, Human herpesvirus 6
agcaucucaaaa

SEQ ID NO: 2040213 - RNA, 16 nt, Human herpesvirus 6
auggaggaauggaaaa

SEQ ID NO: 2040214 - RNA, 12 nt, Human herpesvirus 6
gaaugagauguu

SEQ ID NO: 2040215 - RNA, 13 nt, Human herpesvirus 6
caagaacagagag

SEQ ID NO: 2040216 - RNA, 14 nt, Human herpesvirus 6
acguauccucagaa

SEQ ID NO: 2040217 - RNA, 16 nt, Human herpesvirus 6
auuuuaccuuuggaaa

SEQ ID NO: 2040218 - RNA, 22 nt, Human herpesvirus 6
cgacaucgcgcgcgacgugcca

SEQ ID NO: 2040219 - RNA, 16 nt, Human herpesvirus 6
uuguacaaacuuuuug

SEQ ID NO: 2040220 - RNA, 14 nt, Human herpesvirus 6
acgauagcagcucu

SEQ ID NO: 2040221 - RNA, 15 nt, Human herpesvirus 6
aaguuucagagguuu

SEQ ID NO: 2040222 - RNA, 15 nt, Human herpesvirus 6
augaagauuugacau

SEQ ID NO: 2040223 - RNA, 16 nt, Human herpesvirus 6
ucuggugaauguuucu

SEQ ID NO: 2040224 - RNA, 15 nt, Human herpesvirus 6
gacuuggagagaacu

SEQ ID NO: 2040225 - RNA, 15 nt, Human herpesvirus 6
gacaaccuccgcaua

SEQ ID NO: 2040226 - RNA, 14 nt, Human herpesvirus 6
cguuaaaaaaaaug

SEQ ID NO: 2040227 - RNA, 22 nt, Human herpesvirus 6
gaugacagcgauacaauaacaa

SEQ ID NO: 2040228 - RNA, 20 nt, Human herpesvirus 6
cugucgaguaauuguggauu

SEQ ID NO: 2040229 - RNA, 18 nt, Human herpesvirus 6
cugggacccacgguggcc

SEQ ID NO: 2040230 - RNA, 19 nt, Human herpesvirus 6
aaguuggggucucaugacu

SEQ ID NO: 2040231 - RNA, 17 nt, Human herpesvirus 6
gagaggcucuaugaaga

SEQ ID NO: 2040232 - RNA, 15 nt, Human herpesvirus 6
acaggggaggagcgu

SEQ ID NO: 2040233 - RNA, 19 nt, Human herpesvirus 6
ggaggccuucaugagccag

SEQ ID NO: 2040234 - RNA, 20 nt, Human herpesvirus 6
auuuguaaaaaaacauucua

SEQ ID NO: 2040235 - RNA, 18 nt, Human herpesvirus 6
caguuucucgaaaaaaca

SEQ ID NO: 2040236 - RNA, 23 nt, Human herpesvirus 6
ucaacauuaaaaaaaauagcaga

SEQ ID NO: 2040237 - RNA, 16 nt, Human herpesvirus 6
acccgcguccuccauc

SEQ ID NO: 2040238 - RNA, 17 nt, Human herpesvirus 6
agaccguagcaaaauuc

SEQ ID NO: 2040239 - RNA, 17 nt, Human herpesvirus 6
guccucuuugaauuuua

SEQ ID NO: 2040240 - RNA, 14 nt, Human herpesvirus 6
cacguacuauuuuu

SEQ ID NO: 2040241 - RNA, 22 nt, Human herpesvirus 6
augaaaauaucauuaaauuguu

SEQ ID NO: 2040242 - RNA, 13 nt, Human herpesvirus 6
auugcgauucuaa

SEQ ID NO: 2040243 - RNA, 16 nt, Human herpesvirus 6
cagcacauaacugcau

SEQ ID NO: 2040244 - RNA, 11 nt, Human herpesvirus 6
aaauggcucag

SEQ ID NO: 2040245 - RNA, 19 nt, Human herpesvirus 6
cagcggaagugaaagcagu

SEQ ID NO: 2040246 - RNA, 20 nt, Human herpesvirus 6
ugacggcgacaaccgccgcc

SEQ ID NO: 2040247 - RNA, 11 nt, Human herpesvirus 6
acagauugcau

SEQ ID NO: 2040248 - RNA, 15 nt, Human herpesvirus 6
gugcuuuuaaaauua

SEQ ID NO: 2040249 - RNA, 22 nt, Human herpesvirus 6
ugugauucugcauuuauaucaa

SEQ ID NO: 2040250 - RNA, 15 nt, Human herpesvirus 6
gacccacgguggccu

SEQ ID NO: 2040251 - RNA, 13 nt, Human herpesvirus 6
gcgauuuaaacaa

SEQ ID NO: 2040252 - RNA, 14 nt, Human herpesvirus 6
gccugaaaaugaag

SEQ ID NO: 2040253 - RNA, 19 nt, Human herpesvirus 6
aaagucguuuuggagaaau

SEQ ID NO: 2040254 - RNA, 20 nt, Human herpesvirus 6
cagaagagaugaaagacaga

SEQ ID NO: 2040255 - RNA, 19 nt, Human herpesvirus 6
uugauaaugauauaguuuu

SEQ ID NO: 2040256 - RNA, 21 nt, Human herpesvirus 6
uagcagaaguuuacauagaaa

SEQ ID NO: 2040257 - RNA, 13 nt, Human herpesvirus 6
gugaauauaucaa

SEQ ID NO: 2040258 - RNA, 22 nt, Human herpesvirus 6
acagcacuuugcgcccauaccu

SEQ ID NO: 2040259 - RNA, 13 nt, Human herpesvirus 6
ccacagcagcagc

SEQ ID NO: 2040260 - RNA, 15 nt, Human herpesvirus 6
ucggcugacaacaaa

SEQ ID NO: 2040261 - RNA, 14 nt, Human herpesvirus 6
auaauuaugcauuu

SEQ ID NO: 2040262 - RNA, 22 nt, Human herpesvirus 6
ugucuauuuuuaaaccuguugu

SEQ ID NO: 2040263 - RNA, 22 nt, Human herpesvirus 6
aacaugagggacucggaaaagg

SEQ ID NO: 2040264 - RNA, 20 nt, Human herpesvirus 6
ccgguguuuagccuuuauuc

SEQ ID NO: 2040265 - RNA, 17 nt, Human herpesvirus 6
caguucguagaacggaa

SEQ ID NO: 2040266 - RNA, 21 nt, Human herpesvirus 6
cagagagaggagcauucacau

SEQ ID NO: 2040267 - RNA, 18 nt, Human herpesvirus 6
uuuccgaaaucaaugagu

SEQ ID NO: 2040268 - RNA, 13 nt, Human herpesvirus 6
ugugucaugauua

SEQ ID NO: 2040269 - RNA, 16 nt, Human herpesvirus 6
cgcggccguucucucu

SEQ ID NO: 2040270 - RNA, 18 nt, Human herpesvirus 6
uggcagaggggaagggaa

SEQ ID NO: 2040271 - RNA, 13 nt, Human herpesvirus 6
gaauagagauuuu

SEQ ID NO: 2040272 - RNA, 15 nt, Human herpesvirus 6
cugcggucgccgccu

SEQ ID NO: 2040273 - RNA, 15 nt, Human herpesvirus 6
gccaacgaaaagcau

SEQ ID NO: 2040274 - RNA, 15 nt, Human herpesvirus 6
auuuuuuauuuccac

SEQ ID NO: 2040275 - RNA, 23 nt, Human herpesvirus 6
ggguuggaccgaggggacagggg

SEQ ID NO: 2040276 - RNA, 22 nt, Human herpesvirus 6
ucucggaaaauuaaaagucagu

SEQ ID NO: 2040277 - RNA, 13 nt, Human herpesvirus 6
aaaguucaguaac

SEQ ID NO: 2040278 - RNA, 14 nt, Human herpesvirus 6
uuacauauagucaa

SEQ ID NO: 2040279 - RNA, 17 nt, Human herpesvirus 6
augcaacgcaucacaca

SEQ ID NO: 2040280 - RNA, 22 nt, Human herpesvirus 6
auguucgaugauuauucugucu

SEQ ID NO: 2040281 - RNA, 24 nt, Human herpesvirus 6
uugcauuuuggguugaguaugcuu

SEQ ID NO: 2040282 - RNA, 17 nt, Human herpesvirus 6
cgcuaucgcccugcucc

SEQ ID NO: 2040283 - RNA, 21 nt, Human herpesvirus 6
gagaucuggugaauguuucug

SEQ ID NO: 2040284 - RNA, 15 nt, Human herpesvirus 6
acccacgguggccug

SEQ ID NO: 2040285 - RNA, 16 nt, Human herpesvirus 6
acguggcagucugcuc

SEQ ID NO: 2040286 - RNA, 20 nt, Human herpesvirus 6
aaaguuuguguuuguaaaug

SEQ ID NO: 2040287 - RNA, 21 nt, Human herpesvirus 6
cagguaauauuccgaacgaga

SEQ ID NO: 2040288 - RNA, 13 nt, Human herpesvirus 6
ccgccaccaccgc

SEQ ID NO: 2040289 - RNA, 14 nt, Human herpesvirus 6
agguaacggagccc

SEQ ID NO: 2040290 - RNA, 17 nt, Human herpesvirus 6
ccuauagucaauguugu

SEQ ID NO: 2040291 - RNA, 23 nt, Human herpesvirus 6
ugucgugcgccuuguguaucugu

SEQ ID NO: 2040292 - RNA, 12 nt, Human herpesvirus 6
cgaauauguuuu

SEQ ID NO: 2040293 - RNA, 21 nt, Human herpesvirus 6
guuacaaguuucaauauauga

SEQ ID NO: 2040294 - RNA, 15 nt, Human herpesvirus 6
auuauuaacaaugaa

SEQ ID NO: 2040295 - RNA, 23 nt, Human herpesvirus 6
auauaacgauauauaaaaaacug

SEQ ID NO: 2040296 - RNA, 23 nt, Human herpesvirus 6
auacacugcaagaacugcgacuc

SEQ ID NO: 2040297 - RNA, 20 nt, Human herpesvirus 6
gaaaacucuaaaagcugcua

SEQ ID NO: 2040298 - RNA, 20 nt, Human herpesvirus 6
uguaguuuuuaaauccuguu

SEQ ID NO: 2040299 - RNA, 23 nt, Human herpesvirus 6
augcaagccaugacaagaaaggu

SEQ ID NO: 2040300 - RNA, 23 nt, Human herpesvirus 6
aguuuuuccgauacagcaccauc

SEQ ID NO: 2040301 - RNA, 22 nt, Human herpesvirus 6
caccgagggcggacggacggcu

SEQ ID NO: 2040302 - RNA, 16 nt, Human herpesvirus 6
cuguguuuauguuuca

SEQ ID NO: 2040303 - RNA, 12 nt, Human herpesvirus 6
cauugcuuucuc

SEQ ID NO: 2040304 - RNA, 17 nt, Human herpesvirus 6
uaaaauguguagugguc

SEQ ID NO: 2040305 - RNA, 18 nt, Human herpesvirus 6
cugccucgguuuuguccc

SEQ ID NO: 2040306 - RNA, 14 nt, Human herpesvirus 6
aauuguauucuuga

SEQ ID NO: 2040307 - RNA, 17 nt, Human herpesvirus 6
ggaccgaggggacaggg

SEQ ID NO: 2040308 - RNA, 14 nt, Human herpesvirus 6
cucacaagcugucc

SEQ ID NO: 2040309 - RNA, 19 nt, Human herpesvirus 6
acagaaaaaaaaauaagua

SEQ ID NO: 2040310 - RNA, 17 nt, Human herpesvirus 6
aucuguuggcggaaacg

SEQ ID NO: 2040311 - RNA, 16 nt, Human herpesvirus 6
agagauuuuggaagca

SEQ ID NO: 2040312 - RNA, 13 nt, Human herpesvirus 6
guuuuucauaaau

SEQ ID NO: 2040313 - RNA, 15 nt, Human herpesvirus 6
ugugcgauuuacugg

SEQ ID NO: 2040314 - RNA, 21 nt, Human herpesvirus 6
gugucaguucaacgcugucuu

SEQ ID NO: 2040315 - RNA, 15 nt, Human herpesvirus 6
ugggaaucaugugua

SEQ ID NO: 2040316 - RNA, 13 nt, Human herpesvirus 6
cugcaaaaggugg

SEQ ID NO: 2040317 - RNA, 15 nt, Human herpesvirus 6
aacgauaugucucug

SEQ ID NO: 2040318 - RNA, 14 nt, Human herpesvirus 6
auaaaaaauauuaa

SEQ ID NO: 2040319 - RNA, 22 nt, Human herpesvirus 6
aacaacaucuuaaaagaccacu

SEQ ID NO: 2040320 - RNA, 16 nt, Human herpesvirus 6
acagugauuagaaugu

SEQ ID NO: 2040321 - RNA, 19 nt, Human herpesvirus 6
aguuuuacaucaucgccuu

SEQ ID NO: 2040322 - RNA, 22 nt, Human herpesvirus 6
caaaugauuuuacaaagaccua

SEQ ID NO: 2040323 - RNA, 20 nt, Human herpesvirus 6
auacucaacccaaaaugcaa

SEQ ID NO: 2040324 - RNA, 15 nt, Human herpesvirus 6
cacccauuuccggag

SEQ ID NO: 2040325 - RNA, 15 nt, Human herpesvirus 6
gucauuucaucuauu

SEQ ID NO: 2040326 - RNA, 23 nt, Human herpesvirus 6
uacguuaaauaucuauuuaaaau

SEQ ID NO: 2040327 - RNA, 17 nt, Human herpesvirus 6
cuaagauugugcaguua

SEQ ID NO: 2040328 - RNA, 18 nt, Human herpesvirus 6
gauuauauauuugcauac

SEQ ID NO: 2040329 - RNA, 18 nt, Human herpesvirus 6
auauuggaauugggaagc

SEQ ID NO: 2040330 - RNA, 20 nt, Human herpesvirus 6
auaaugauauaguuuuugcu

SEQ ID NO: 2040331 - RNA, 15 nt, Human herpesvirus 6
uggguacaaugaaaa

SEQ ID NO: 2040332 - RNA, 17 nt, Human herpesvirus 6
gggucuuuccugcacag

SEQ ID NO: 2040333 - RNA, 16 nt, Human herpesvirus 6
aucuuccguacuguaa

SEQ ID NO: 2040334 - RNA, 18 nt, Human herpesvirus 6
aaucugaauuuaaugcaa

SEQ ID NO: 2040335 - RNA, 16 nt, Human herpesvirus 6
uacgaacagaaauuuc

SEQ ID NO: 2040336 - RNA, 20 nt, Human herpesvirus 6
auccuaaauaccaauuccuu

SEQ ID NO: 2040337 - RNA, 24 nt, Human herpesvirus 6
uuuuucucgagcuagagugacauc

SEQ ID NO: 2040338 - RNA, 20 nt, Human herpesvirus 6
agcguuggaaagcuuuaugg

SEQ ID NO: 2040339 - RNA, 22 nt, Human herpesvirus 6
gauccuguaauaguauugucug

SEQ ID NO: 2040340 - RNA, 14 nt, Human herpesvirus 6
auccucucuggaaa

SEQ ID NO: 2040341 - RNA, 15 nt, Human herpesvirus 6
aaacauaaaauguuu

SEQ ID NO: 2040342 - RNA, 22 nt, Human herpesvirus 6
aucuuaccguaaacaaauucuu

SEQ ID NO: 2040343 - RNA, 16 nt, Human herpesvirus 6
cgcaguuucuguuuuu

SEQ ID NO: 2040344 - RNA, 22 nt, Human herpesvirus 6
uccgcaucgggggaacuacaua

SEQ ID NO: 2040345 - RNA, 23 nt, Human herpesvirus 6
cuucccuuuuacaauacacagaa

SEQ ID NO: 2040346 - RNA, 18 nt, Human herpesvirus 6
ucacugucgaaauucacc

SEQ ID NO: 2040347 - RNA, 12 nt, Human herpesvirus 6
guuaauucucau

SEQ ID NO: 2040348 - RNA, 13 nt, Human herpesvirus 6
cuacguucgccuc

SEQ ID NO: 2040349 - RNA, 15 nt, Human herpesvirus 6
cuccugagaagcugg

SEQ ID NO: 2040350 - RNA, 21 nt, Human herpesvirus 6
auuucuuaccuuuuaagagug

SEQ ID NO: 2040351 - RNA, 23 nt, Human herpesvirus 6
ccuucaccugucucugcuuuaug

SEQ ID NO: 2040352 - RNA, 15 nt, Human herpesvirus 6
aaauagcagaaguuu

SEQ ID NO: 2040353 - RNA, 16 nt, Human herpesvirus 6
ccgcauaucgccccca

SEQ ID NO: 2040354 - RNA, 21 nt, Human herpesvirus 6
acgucugcgucgcccccccgc

SEQ ID NO: 2040355 - RNA, 16 nt, Human herpesvirus 6
aauuucuacaaaaaua

SEQ ID NO: 2040356 - RNA, 22 nt, Human herpesvirus 6
acauaguggcuaugaagccuuc

SEQ ID NO: 2040357 - RNA, 13 nt, Human herpesvirus 6
uuuguacacuuua

SEQ ID NO: 2040358 - RNA, 18 nt, Human herpesvirus 6
acgaucgcgaagccuguc

SEQ ID NO: 2040359 - RNA, 18 nt, Human herpesvirus 6
acggcagcggaagugaaa

SEQ ID NO: 2040360 - RNA, 21 nt, Human herpesvirus 6
caugauuaucauagacaaacc

SEQ ID NO: 2040361 - RNA, 15 nt, Human herpesvirus 6
aaugcacuguuugaa

SEQ ID NO: 2040362 - RNA, 14 nt, Human herpesvirus 6
uacaaagugaaaga

SEQ ID NO: 2040363 - RNA, 15 nt, Human herpesvirus 6
aacaauccauguuca

SEQ ID NO: 2040364 - RNA, 15 nt, Human herpesvirus 6
uuuccugcacaggcg

SEQ ID NO: 2040365 - RNA, 13 nt, Human herpesvirus 6
gggcacaaaacag

SEQ ID NO: 2040366 - RNA, 21 nt, Human herpesvirus 6
gggacccacgguggccuggca

SEQ ID NO: 2040367 - RNA, 16 nt, Human herpesvirus 6
aagucgacaaauuaua

SEQ ID NO: 2040368 - RNA, 18 nt, Human herpesvirus 6
ucugauauggcaaauuuu

SEQ ID NO: 2040369 - RNA, 17 nt, Human herpesvirus 6
cuuguguucuaucacau

SEQ ID NO: 2040370 - RNA, 21 nt, Human herpesvirus 6
uguuuuauguuaacaucguga

SEQ ID NO: 2040371 - RNA, 17 nt, Human herpesvirus 6
gaaaagaucaagcaagu

SEQ ID NO: 2040372 - RNA, 17 nt, Human herpesvirus 6
uacaucguuuguugaau

SEQ ID NO: 2040373 - RNA, 14 nt, Human herpesvirus 6
uccguaucacacuu

SEQ ID NO: 2040374 - RNA, 21 nt, Human herpesvirus 6
gccucuacggcaacgcuccuc

SEQ ID NO: 2040375 - RNA, 15 nt, Human herpesvirus 6
auugguuaaaaggaa

SEQ ID NO: 2040376 - RNA, 12 nt, Human herpesvirus 6
aggucagugggu

SEQ ID NO: 2040377 - RNA, 13 nt, Human herpesvirus 6
gcauucgguacuc

SEQ ID NO: 2040378 - RNA, 12 nt, Human herpesvirus 6
uguaauaagaaa

SEQ ID NO: 2040379 - RNA, 13 nt, Human herpesvirus 6
agucacacacagg

SEQ ID NO: 2040380 - RNA, 15 nt, Human herpesvirus 6
uauaucaaacuuuuu

SEQ ID NO: 2040381 - RNA, 23 nt, Human herpesvirus 6
acaagggcagggggggucucugu

SEQ ID NO: 2040382 - RNA, 17 nt, Human herpesvirus 6
uguaagauuaaauguga

SEQ ID NO: 2040383 - RNA, 21 nt, Human herpesvirus 6
ccagugcuuuaaucacaauga

SEQ ID NO: 2040384 - RNA, 16 nt, Human herpesvirus 6
acggauucgaucgaga

SEQ ID NO: 2040385 - RNA, 16 nt, Human herpesvirus 6
ugcucgccguauaagu

SEQ ID NO: 2040386 - RNA, 12 nt, Human herpesvirus 6
uucuaugucuag

SEQ ID NO: 2040387 - RNA, 16 nt, Human herpesvirus 6
aaucaaaaaaaugaua

SEQ ID NO: 2040388 - RNA, 16 nt, Human herpesvirus 6
cauguauuuauucacu

SEQ ID NO: 2040389 - RNA, 20 nt, Human herpesvirus 6
cauuaacagacgaggacgga

SEQ ID NO: 2040390 - RNA, 17 nt, Human herpesvirus 6
ccaaaugccucgugaga

SEQ ID NO: 2040391 - RNA, 23 nt, Human herpesvirus 6
cauuuccggagauuaaaacauca

SEQ ID NO: 2040392 - RNA, 13 nt, Human herpesvirus 6
caaaugauuuuac

SEQ ID NO: 2040393 - RNA, 18 nt, Human herpesvirus 6
caaaagacacaaucuucg

SEQ ID NO: 2040394 - RNA, 20 nt, Human herpesvirus 6
caaauucuuacauuuuguac

SEQ ID NO: 2040395 - RNA, 17 nt, Human herpesvirus 6
caaauccugacuacgau

SEQ ID NO: 2040396 - RNA, 13 nt, Human herpesvirus 6
caaacuacggaaa

SEQ ID NO: 2040397 - RNA, 21 nt, Human herpesvirus 6
auguaauaauugaugggaugc

SEQ ID NO: 2040398 - RNA, 22 nt, Human herpesvirus 6
auggcgaugaccgcuaaauuga

SEQ ID NO: 2040399 - RNA, 15 nt, Human herpesvirus 6
augcgagcaaaaaau

SEQ ID NO: 2040400 - RNA, 14 nt, Human herpesvirus 6
cgcccgauccgccc

SEQ ID NO: 2040401 - RNA, 19 nt, Human herpesvirus 6
aaacuaucggagagacgca

SEQ ID NO: 2040402 - RNA, 15 nt, Human herpesvirus 6
aaaccaucgcaaugc

SEQ ID NO: 2040403 - RNA, 23 nt, Human herpesvirus 6
aaauccuccuagggaauuuaauc

SEQ ID NO: 2040404 - RNA, 13 nt, Human herpesvirus 6
gcgcgcgugugug

SEQ ID NO: 2040405 - RNA, 18 nt, Human herpesvirus 6
ggcuaacccuaacccuaa

SEQ ID NO: 2040406 - RNA, 13 nt, Human herpesvirus 6
ggcucgaaucuaa

SEQ ID NO: 2040407 - RNA, 20 nt, Human herpesvirus 6
ucauuuguuuuuuaaagcac

SEQ ID NO: 2040408 - RNA, 22 nt, Human herpesvirus 6
ucauaaccucaucgcgacuaaa

SEQ ID NO: 2040409 - RNA, 12 nt, Human herpesvirus 6
ucauaugucucg

SEQ ID NO: 2040410 - RNA, 14 nt, Human herpesvirus 6
ucgcgauagucaug

SEQ ID NO: 2040411 - RNA, 22 nt, Human herpesvirus 6
cagaauuuguaaaaaaacauuc

SEQ ID NO: 2040412 - RNA, 14 nt, Human herpesvirus 6
cagaagacuuuaaa

SEQ ID NO: 2040413 - RNA, 20 nt, Human herpesvirus 6
ccgauuaauguguuuuucuu

SEQ ID NO: 2040414 - RNA, 16 nt, Human herpesvirus 6
caccucuaaaacaaga

SEQ ID NO: 2040415 - RNA, 14 nt, Human herpesvirus 6
cacgacaacacgcc

SEQ ID NO: 2040416 - RNA, 13 nt, Human herpesvirus 6
caccuuuaucgac

SEQ ID NO: 2040417 - RNA, 19 nt, Human herpesvirus 6
caccuggguuucgaagaau

SEQ ID NO: 2040418 - RNA, 19 nt, Human herpesvirus 6
agaaaugcacuguuugaaa

SEQ ID NO: 2040419 - RNA, 21 nt, Human herpesvirus 6
acuuuaucgauguagauaaau

SEQ ID NO: 2040420 - RNA, 19 nt, Human herpesvirus 6
acuuuuugccgucacacuc

SEQ ID NO: 2040421 - RNA, 19 nt, Human herpesvirus 6
acgugguuuuuuuuuucuu

SEQ ID NO: 2040422 - RNA, 16 nt, Human herpesvirus 6
agacacgucaacgugu

SEQ ID NO: 2040423 - RNA, 23 nt, Human herpesvirus 6
acguauauuguguaccuuguaau

SEQ ID NO: 2040424 - RNA, 15 nt, Human herpesvirus 6
acgccaguccguaaa

SEQ ID NO: 2040425 - RNA, 14 nt, Human herpesvirus 6
aacgucgaaacgaa

SEQ ID NO: 2040426 - RNA, 14 nt, Human herpesvirus 6
aagaauuauuuauc

SEQ ID NO: 2040427 - RNA, 19 nt, Human herpesvirus 6
aacugccaauuaccgguaa

SEQ ID NO: 2040428 - RNA, 20 nt, Human herpesvirus 6
aacuuuuugccgaagauagc

SEQ ID NO: 2040429 - RNA, 18 nt, Human herpesvirus 6
cuuauguuucuaacagag

SEQ ID NO: 2040430 - RNA, 13 nt, Human herpesvirus 6
cuuauauaggcac

SEQ ID NO: 2040431 - RNA, 17 nt, Human herpesvirus 6
cuguguuacaaacaugc

SEQ ID NO: 2040432 - RNA, 15 nt, Human herpesvirus 6
cuguuugaaacugag

SEQ ID NO: 2040433 - RNA, 14 nt, Human herpesvirus 6
cuguuuuucucgga

SEQ ID NO: 2040434 - RNA, 16 nt, Human herpesvirus 6
gcagauuuuuaaaagu

SEQ ID NO: 2040435 - RNA, 18 nt, Human herpesvirus 6
cugguaaauuuuaucgaa

SEQ ID NO: 2040436 - RNA, 18 nt, Human herpesvirus 6
cucuaccuggaaacaacg

SEQ ID NO: 2040437 - RNA, 14 nt, Human herpesvirus 6
cucugcaaaacaaa

SEQ ID NO: 2040438 - RNA, 17 nt, Human herpesvirus 6
gccaaaggaaaccaccg

SEQ ID NO: 2040439 - RNA, 20 nt, Human herpesvirus 6
gccaaaggaaaccaccggcu

SEQ ID NO: 2040440 - RNA, 23 nt, Human herpesvirus 6
gcgaccgaccccugccgagccug

SEQ ID NO: 2040441 - RNA, 13 nt, Human herpesvirus 6
gcgacaaccgccg

SEQ ID NO: 2040442 - RNA, 15 nt, Human herpesvirus 6
gccuguuccacgcgc

SEQ ID NO: 2040443 - RNA, 18 nt, Human herpesvirus 6
ggagagacgcaccacggc

SEQ ID NO: 2040444 - RNA, 20 nt, Human herpesvirus 6
guaauuucagucaauuuuac

SEQ ID NO: 2040445 - RNA, 20 nt, Human herpesvirus 6
ggagcccgcucggucucgca

SEQ ID NO: 2040446 - RNA, 13 nt, Human herpesvirus 6
gguuugucucgca

SEQ ID NO: 2040447 - RNA, 17 nt, Human herpesvirus 6
ccagauacuacacaaac

SEQ ID NO: 2040448 - RNA, 14 nt, Human herpesvirus 6
ccagauaaccucac

SEQ ID NO: 2040449 - RNA, 18 nt, Human herpesvirus 6
ccagauacauaaacaccc

SEQ ID NO: 2040450 - RNA, 16 nt, Human herpesvirus 6
cgacuauacgaaauaa

SEQ ID NO: 2040451 - RNA, 23 nt, Human herpesvirus 6
cgacccacuccuacuauccgccc

SEQ ID NO: 2040452 - RNA, 11 nt, Human herpesvirus 6
cgccgugugug

SEQ ID NO: 2040453 - RNA, 20 nt, Human herpesvirus 6
cgauacccagcgggcuccgu

SEQ ID NO: 2040454 - RNA, 21 nt, Human herpesvirus 6
cgaguuagcagaagaacagcu

SEQ ID NO: 2040455 - RNA, 12 nt, Human herpesvirus 6
cagugaaacgga

SEQ ID NO: 2040456 - RNA, 21 nt, Human herpesvirus 6
cagugaaggcugccaugaaac

SEQ ID NO: 2040457 - RNA, 20 nt, Human herpesvirus 6
caguaugucuccaaacagag

SEQ ID NO: 2040458 - RNA, 13 nt, Human herpesvirus 6
cagcggaagugaa

SEQ ID NO: 2040459 - RNA, 14 nt, Human herpesvirus 6
aucucuaugagacu

SEQ ID NO: 2040460 - RNA, 21 nt, Human herpesvirus 6
aucucuauugguuaaaaggaa

SEQ ID NO: 2040461 - RNA, 18 nt, Human herpesvirus 6
aucuucugggugggaaga

SEQ ID NO: 2040462 - RNA, 16 nt, Human herpesvirus 6
augaggggaacacgcc

SEQ ID NO: 2040463 - RNA, 17 nt, Human herpesvirus 6
augaucagcauucacuc

SEQ ID NO: 2040464 - RNA, 20 nt, Human herpesvirus 6
augauccgguauaucgagaa

SEQ ID NO: 2040465 - RNA, 14 nt, Human herpesvirus 6
caucucaaaaaaca

SEQ ID NO: 2040466 - RNA, 19 nt, Human herpesvirus 6
caugaucugcuugauauuu

SEQ ID NO: 2040467 - RNA, 15 nt, Human herpesvirus 6
caucugcaaaaaaca

SEQ ID NO: 2040468 - RNA, 21 nt, Human herpesvirus 6
cauacauuccuuaagaaugaa

SEQ ID NO: 2040469 - RNA, 18 nt, Human herpesvirus 6
caguucguagaacggaaa

SEQ ID NO: 2040470 - RNA, 18 nt, Human herpesvirus 6
caugcauuuuguauuuau

SEQ ID NO: 2040471 - RNA, 19 nt, Human herpesvirus 6
aucggagagacgcaccacg

SEQ ID NO: 2040472 - RNA, 19 nt, Human herpesvirus 6
aucguagguaauuuuuauu

SEQ ID NO: 2040473 - RNA, 12 nt, Human herpesvirus 6
agguuaucggaa

SEQ ID NO: 2040474 - RNA, 12 nt, Human herpesvirus 6
aggugaaaugaa

SEQ ID NO: 2040475 - RNA, 15 nt, Human herpesvirus 6
uccccagagaaaauu

SEQ ID NO: 2040476 - RNA, 18 nt, Human herpesvirus 6
ucguauaaauuuaacuaa

SEQ ID NO: 2040477 - RNA, 19 nt, Human herpesvirus 6
uuucaguauuaacuaguug

SEQ ID NO: 2040478 - RNA, 16 nt, Human herpesvirus 6
uuuaauaguuugccau

SEQ ID NO: 2040479 - RNA, 13 nt, Human herpesvirus 6
uuuaauuuugaaa

SEQ ID NO: 2040480 - RNA, 20 nt, Human herpesvirus 6
ucgugccaguucacacggac

SEQ ID NO: 2040481 - RNA, 13 nt, Human herpesvirus 6
uuugaaacggcgc

SEQ ID NO: 2040482 - RNA, 23 nt, Human herpesvirus 6
uuugaauuuauacugugugcgau

SEQ ID NO: 2040483 - RNA, 23 nt, Human herpesvirus 6
uuuuguauuauguaauacaucaa

SEQ ID NO: 2040484 - RNA, 15 nt, Human herpesvirus 6
uuuuagaaacauuug

SEQ ID NO: 2040485 - RNA, 18 nt, Human herpesvirus 6
uuuuaugaucgacauuug

SEQ ID NO: 2040486 - RNA, 22 nt, Human herpesvirus 6
uuuuauuuccacguacuauuuu

SEQ ID NO: 2040487 - RNA, 20 nt, Human herpesvirus 6
uuuuauuuuuuggcuauuug

SEQ ID NO: 2040488 - RNA, 16 nt, Human herpesvirus 6
gcaagacgccacgggc

SEQ ID NO: 2040489 - RNA, 19 nt, Human herpesvirus 6
ccgucuccguuccaaccuc

SEQ ID NO: 2040490 - RNA, 20 nt, Human herpesvirus 6
cgucuccgucuccucgcaau

SEQ ID NO: 2040491 - RNA, 21 nt, Human herpesvirus 6
gaggccaucuaucgcgcaccg

SEQ ID NO: 2040492 - RNA, 19 nt, Human herpesvirus 6
gauguagauaguuuugcgu

SEQ ID NO: 2040493 - RNA, 15 nt, Human herpesvirus 6
gauguagguuucgau

SEQ ID NO: 2040494 - RNA, 15 nt, Human herpesvirus 6
gauuuuuauucugcu

SEQ ID NO: 2040495 - RNA, 16 nt, Human herpesvirus 6
cuauccgcccuccccg

SEQ ID NO: 2040496 - RNA, 14 nt, Human herpesvirus 6
cuauggcuuccgga

SEQ ID NO: 2040497 - RNA, 12 nt, Human herpesvirus 6
cagaggaaauaa

SEQ ID NO: 2040498 - RNA, 23 nt, Human herpesvirus 6
cagagacgugaccggagaaaauc

SEQ ID NO: 2040499 - RNA, 16 nt, Human herpesvirus 6
cagagaaaaaacaaag

SEQ ID NO: 2040500 - RNA, 19 nt, Human herpesvirus 6
acuaacauagcgaauuuga

SEQ ID NO: 2040501 - RNA, 19 nt, Human herpesvirus 6
acuaagcaggaacccagau

SEQ ID NO: 2040502 - RNA, 11 nt, Human herpesvirus 6
acugaauuugc

SEQ ID NO: 2040503 - RNA, 15 nt, Human herpesvirus 6
acugcuaguuuuuuu

SEQ ID NO: 2040504 - RNA, 17 nt, Human herpesvirus 6
acuuauuuuuuuuucug

SEQ ID NO: 2040505 - RNA, 14 nt, Human herpesvirus 6
acuucaaacaccuc

SEQ ID NO: 2040506 - RNA, 20 nt, Human herpesvirus 6
acuucacgaucuacacaccg

SEQ ID NO: 2040507 - RNA, 19 nt, Human herpesvirus 6
acuuccgcgauacccagcg

SEQ ID NO: 2040508 - RNA, 13 nt, Human herpesvirus 6
uuggaauauauaa

SEQ ID NO: 2040509 - RNA, 20 nt, Human herpesvirus 6
uucucugcaaaacaaaggua

SEQ ID NO: 2040510 - RNA, 19 nt, Human herpesvirus 6
uucccaccuaauaaacugu

SEQ ID NO: 2040511 - RNA, 23 nt, Human herpesvirus 6
uuccaguuaauaagauguugcaa

SEQ ID NO: 2040512 - RNA, 20 nt, Human herpesvirus 6
uuccaagacauguacaucaa

SEQ ID NO: 2040513 - RNA, 21 nt, Human herpesvirus 6
uucaaaaaucgaaaucguaua

SEQ ID NO: 2040514 - RNA, 15 nt, Human herpesvirus 6
uuacuuaaacggaau

SEQ ID NO: 2040515 - RNA, 16 nt, Human herpesvirus 6
uuagaaauuacauaag

SEQ ID NO: 2040516 - RNA, 12 nt, Human herpesvirus 6
uuacauaacaua

SEQ ID NO: 2040517 - RNA, 15 nt, Human herpesvirus 6
uuacauauacauuug

SEQ ID NO: 2040518 - RNA, 19 nt, Human herpesvirus 6
uuaaugucacugucgaaua

SEQ ID NO: 2040519 - RNA, 17 nt, Human herpesvirus 6
uuaaguccguuuggaga

SEQ ID NO: 2040520 - RNA, 16 nt, Human herpesvirus 6
uuaaagauguguuaaa

SEQ ID NO: 2040521 - RNA, 20 nt, Human herpesvirus 6
uugaauaacaaacuauauug

SEQ ID NO: 2040522 - RNA, 16 nt, Human herpesvirus 6
uucuguaauuuugaaa

SEQ ID NO: 2040523 - RNA, 22 nt, Human herpesvirus 6
uucuuacaacaggcuugugaaa

SEQ ID NO: 2040524 - RNA, 16 nt, Human herpesvirus 6
uugcaagcagcggcga

SEQ ID NO: 2040525 - RNA, 14 nt, Human herpesvirus 6
uugcaguucucgga

SEQ ID NO: 2040526 - RNA, 20 nt, Human herpesvirus 6
uuccuuauaacacacagcua

SEQ ID NO: 2040527 - RNA, 15 nt, Human herpesvirus 6
uguaucguuugagau

SEQ ID NO: 2040528 - RNA, 19 nt, Human herpesvirus 6
ugugccguuuaugcgaauc

SEQ ID NO: 2040529 - RNA, 19 nt, Human herpesvirus 6
uuaaaagaauuuuuguagc

SEQ ID NO: 2040530 - RNA, 17 nt, Human herpesvirus 6
uguguuagcuuugcgau

SEQ ID NO: 2040531 - RNA, 20 nt, Human herpesvirus 6
uggccguuacaguuuccgcu

SEQ ID NO: 2040532 - RNA, 20 nt, Human herpesvirus 6
uaguacaguaugucuccaaa

SEQ ID NO: 2040533 - RNA, 16 nt, Human herpesvirus 6
uagcuauuaugugaau

SEQ ID NO: 2040534 - RNA, 19 nt, Human herpesvirus 6
uauaucucggacucauaga

SEQ ID NO: 2040535 - RNA, 16 nt, Human herpesvirus 6
uauauuggaauuggga

SEQ ID NO: 2040536 - RNA, 19 nt, Human herpesvirus 6
uauauuuuuaccgaaccau

SEQ ID NO: 2040537 - RNA, 14 nt, Human herpesvirus 6
ucuaaugguugaaa

SEQ ID NO: 2040538 - RNA, 20 nt, Human herpesvirus 6
ucuaacucgcgagacaaauc

SEQ ID NO: 2040539 - RNA, 20 nt, Human herpesvirus 6
ucguuauauuuuuuauuuuu

SEQ ID NO: 2040540 - RNA, 16 nt, Human herpesvirus 6
ucucgaaaaaacaacg

SEQ ID NO: 2040541 - RNA, 19 nt, Human herpesvirus 6
ucuagaauaucugcuaagu

SEQ ID NO: 2040542 - RNA, 16 nt, Human herpesvirus 6
ucuccucauggagaau

SEQ ID NO: 2040543 - RNA, 23 nt, Human herpesvirus 6
ugaaccgcguauguuuuaucgag

SEQ ID NO: 2040544 - RNA, 16 nt, Human herpesvirus 6
uagauggaaaauugca

SEQ ID NO: 2040545 - RNA, 13 nt, Human herpesvirus 6
uaccuauagucaa

SEQ ID NO: 2040546 - RNA, 16 nt, Human herpesvirus 6
uacuauuuuagucaca

SEQ ID NO: 2040547 - RNA, 17 nt, Human herpesvirus 6
gugucggcuacgacacg

SEQ ID NO: 2040548 - RNA, 18 nt, Human herpesvirus 6
gugguuguuguuauuguu

SEQ ID NO: 2040549 - RNA, 10 nt, Human herpesvirus 6
guuaguaaau

SEQ ID NO: 2040550 - RNA, 14 nt, Human herpesvirus 6
guuagcuuugcgau

SEQ ID NO: 2040551 - RNA, 13 nt, Human herpesvirus 6
guuaaauaauauu

SEQ ID NO: 2040552 - RNA, 15 nt, Human herpesvirus 6
guguguguaauuuuu

SEQ ID NO: 2040553 - RNA, 16 nt, Human herpesvirus 6
guguuagcuuugcgau

SEQ ID NO: 2040554 - RNA, 23 nt, Human herpesvirus 6
gacuacagacuccccaccgagau

SEQ ID NO: 2040555 - RNA, 16 nt, Human herpesvirus 6
gacgucgacgaaauaa

SEQ ID NO: 2040556 - RNA, 19 nt, Human herpesvirus 6
gacaucgcgcgcgacgugc

SEQ ID NO: 2040557 - RNA, 14 nt, Human herpesvirus 6
gaagacuuuaaagu

SEQ ID NO: 2040558 - RNA, 20 nt, Human herpesvirus 6
cuggcccgaggauuaucgau

SEQ ID NO: 2040559 - RNA, 16 nt, Human herpesvirus 6
cugcuggcugagauuc

SEQ ID NO: 2040560 - RNA, 13 nt, Human herpesvirus 6
cugcacuuucgau

SEQ ID NO: 2040561 - RNA, 15 nt, Human herpesvirus 6
cuuucaguauuaacu

SEQ ID NO: 2040562 - RNA, 18 nt, Human herpesvirus 6
cugagaguaaauauuucu

SEQ ID NO: 2040563 - RNA, 19 nt, Human herpesvirus 6
cugauuuuguuuucuacgu

SEQ ID NO: 2040564 - RNA, 13 nt, Human herpesvirus 6
cgucgccgcuucg

SEQ ID NO: 2040565 - RNA, 18 nt, Human herpesvirus 6
cgguccaaggauuaugau

SEQ ID NO: 2040566 - RNA, 17 nt, Human herpesvirus 6
cgucaugcaaaacagac

SEQ ID NO: 2040567 - RNA, 23 nt, Human herpesvirus 6
gcuuucaaaaccgucaaccgcca

SEQ ID NO: 2040568 - RNA, 18 nt, Human herpesvirus 6
gcuccgcgccccucgccc

SEQ ID NO: 2040569 - RNA, 19 nt, Human herpesvirus 6
gcguuccgacucgauuuga

SEQ ID NO: 2040570 - RNA, 20 nt, Human herpesvirus 6
gccuauacaggcaaccgccg

SEQ ID NO: 2040571 - RNA, 20 nt, Human herpesvirus 6
guauauuuuuuuuuauuuuu

SEQ ID NO: 2040572 - RNA, 18 nt, Human herpesvirus 6
guauacagcuaaacgccg

SEQ ID NO: 2040573 - RNA, 16 nt, Human herpesvirus 6
guacguugguaucagu

SEQ ID NO: 2040574 - RNA, 21 nt, Human herpesvirus 6
gucuaauuucgacaauccuaa

SEQ ID NO: 2040575 - RNA, 22 nt, Human herpesvirus 6
gccuaauuacgcuguccgccug

SEQ ID NO: 2040576 - RNA, 14 nt, Human herpesvirus 6
ccaucuauacaccc

SEQ ID NO: 2040577 - RNA, 15 nt, Human herpesvirus 6
ccccucccauccccc

SEQ ID NO: 2040578 - RNA, 18 nt, Human herpesvirus 6
ccccucgcccgauccgcc

SEQ ID NO: 2040579 - RNA, 19 nt, Human herpesvirus 6
cccacuccuacuauccgcc

SEQ ID NO: 2040580 - RNA, 14 nt, Human herpesvirus 6
cgaaaaucgccagg

SEQ ID NO: 2040581 - RNA, 13 nt, Human herpesvirus 6
ccuucaccgucuc

SEQ ID NO: 2040582 - RNA, 20 nt, Human herpesvirus 6
cgccgccguuacugucgcug

SEQ ID NO: 2040583 - RNA, 14 nt, Human herpesvirus 6
cgcguacacgaaaa

SEQ ID NO: 2040584 - RNA, 19 nt, Human herpesvirus 6
cggaauuuugagauuuaca

SEQ ID NO: 2040585 - RNA, 20 nt, Human herpesvirus 6
accgcaguuccuguuuuucu

SEQ ID NO: 2040586 - RNA, 20 nt, Human herpesvirus 6
accgcaguuucuguuuuucu

SEQ ID NO: 2040587 - RNA, 22 nt, Human herpesvirus 6
accgagagauuuacuguuucuu

SEQ ID NO: 2040588 - RNA, 16 nt, Human herpesvirus 6
accaccaacacaccug

SEQ ID NO: 2040589 - RNA, 19 nt, Human herpesvirus 6
accaauuccuuaauucuaa

SEQ ID NO: 2040590 - RNA, 21 nt, Human herpesvirus 6
acauuuauguuucuuauuagc

SEQ ID NO: 2040591 - RNA, 20 nt, Human herpesvirus 6
acagucguaguauccuuaac

SEQ ID NO: 2040592 - RNA, 20 nt, Human herpesvirus 6
acaguuauacuggcaaagca

SEQ ID NO: 2040593 - RNA, 18 nt, Human herpesvirus 6
acaguuuaccuauuuaca

SEQ ID NO: 2040594 - RNA, 22 nt, Human herpesvirus 6
acagucacacacagggugcuua

SEQ ID NO: 2040595 - RNA, 16 nt, Human herpesvirus 6
aaucuauugaagauaa

SEQ ID NO: 2040596 - RNA, 14 nt, Human herpesvirus 6
aaucaucaacguaa

SEQ ID NO: 2040597 - RNA, 15 nt, Human herpesvirus 6
aauauuuugaaaagg

SEQ ID NO: 2040598 - RNA, 21 nt, Human herpesvirus 6
acacugcaagguuucgaaugg

SEQ ID NO: 2040599 - RNA, 17 nt, Human herpesvirus 6
acacuugccaugcuagc

SEQ ID NO: 2040600 - RNA, 17 nt, Human herpesvirus 6
aagucuaaggugacucu

SEQ ID NO: 2040601 - RNA, 14 nt, Human herpesvirus 6
aagcucauuuucuc

SEQ ID NO: 2040602 - RNA, 17 nt, Human herpesvirus 6
caaguuugaauuuauac

SEQ ID NO: 2040603 - RNA, 23 nt, Human herpesvirus 6
caacgcugucuuuuuucccuaac

SEQ ID NO: 2040604 - RNA, 18 nt, Human herpesvirus 6
aucaccaccaacacaccu

SEQ ID NO: 2040605 - RNA, 18 nt, Human herpesvirus 6
aucagauuuggagaaaau

SEQ ID NO: 2040606 - RNA, 22 nt, Human herpesvirus 6
auauuaauuacauauagucaau

SEQ ID NO: 2040607 - RNA, 22 nt, Human herpesvirus 6
auauuaauuaccuauagucaau

SEQ ID NO: 2040608 - RNA, 15 nt, Human herpesvirus 6
aucgagaaaaggaca

SEQ ID NO: 2040609 - RNA, 15 nt, Human herpesvirus 6
auccgccccgauaaa

SEQ ID NO: 2040610 - RNA, 17 nt, Human herpesvirus 6
acgaucuacacaccguc

SEQ ID NO: 2040611 - RNA, 24 nt, Human herpesvirus 6
acgauuucugacucucucaguaau

SEQ ID NO: 2040612 - RNA, 15 nt, Human herpesvirus 6
auauauauaucagaa

SEQ ID NO: 2040613 - RNA, 22 nt, Human herpesvirus 6
cacacccauggcgagaaacgcc

SEQ ID NO: 2040614 - RNA, 19 nt, Human herpesvirus 6
caggacagcuucuauuacu

SEQ ID NO: 2040615 - RNA, 20 nt, Human herpesvirus 6
cacaauaagaaaacgagaga

SEQ ID NO: 2040616 - RNA, 23 nt, Human herpesvirus 6
aaaaauaaguacauagaauuucu

SEQ ID NO: 2040617 - RNA, 23 nt, Human herpesvirus 6
ccgccuuuucuuauauuuuucug

SEQ ID NO: 2040618 - RNA, 17 nt, Human herpesvirus 6
cuauugagauucuccgu

SEQ ID NO: 2040619 - RNA, 18 nt, Human herpesvirus 6
cucccaucccccuccccg

SEQ ID NO: 2040620 - RNA, 23 nt, Human herpesvirus 6
gauggccgguuacaauagucauu

SEQ ID NO: 2040621 - RNA, 19 nt, Human herpesvirus 6
gaucaguggguaccgcggu

SEQ ID NO: 2040622 - RNA, 20 nt, Human herpesvirus 6
gaugaauuaccuguuuuaga

SEQ ID NO: 2040623 - RNA, 21 nt, Human herpesvirus 6
uccgccccgauaaaaacaagu

SEQ ID NO: 2040624 - RNA, 15 nt, Human herpesvirus 6
uggauaaaacggcgu

SEQ ID NO: 2040625 - RNA, 23 nt, Human herpesvirus 6
guuccccaugucuugccucuccg

SEQ ID NO: 2040626 - RNA, 17 nt, Human herpesvirus 6
guuuaauaguuugccau

SEQ ID NO: 2040627 - RNA, 19 nt, Human herpesvirus 6
ucaaugcggguacuauaga

SEQ ID NO: 2040628 - RNA, 14 nt, Human herpesvirus 6
ucaauugucacuuu

SEQ ID NO: 2040629 - RNA, 21 nt, Human herpesvirus 6
uaugacgggcagguuaucgga

SEQ ID NO: 2040630 - RNA, 18 nt, Human herpesvirus 6
uaugacuguguguugaau

SEQ ID NO: 2040631 - RNA, 20 nt, Human herpesvirus 6
uaugcuaagcagaacggcgg

SEQ ID NO: 2040632 - RNA, 15 nt, Human herpesvirus 6
uaugauuuauagaau

SEQ ID NO: 2040633 - RNA, 19 nt, Human herpesvirus 6
uacaauagucauuaacgag

SEQ ID NO: 2040634 - RNA, 18 nt, Human herpesvirus 6
uacaaugaaaaaaaaauc

SEQ ID NO: 2040635 - RNA, 13 nt, Human herpesvirus 6
uacauauagucaa

SEQ ID NO: 2040636 - RNA, 20 nt, Human herpesvirus 6
uaauaaaucgcuuaaagcgu

SEQ ID NO: 2040637 - RNA, 14 nt, Human herpesvirus 6
uacacuuuaucgau

SEQ ID NO: 2040638 - RNA, 21 nt, Human herpesvirus 6
uaaaauaccgacaagaaaaua

SEQ ID NO: 2040639 - RNA, 17 nt, Human herpesvirus 6
uaaacaauuauguguca

SEQ ID NO: 2040640 - RNA, 22 nt, Human herpesvirus 6
uaaacuaugcaaacgaaaccau

SEQ ID NO: 2040641 - RNA, 12 nt, Human herpesvirus 6
guuuuuauuuua

SEQ ID NO: 2040642 - RNA, 20 nt, Human herpesvirus 6
guuuuuuggaauauauaaau

SEQ ID NO: 2040643 - RNA, 17 nt, Human herpesvirus 6
guuuuuuucguauaaau

SEQ ID NO: 2040644 - RNA, 23 nt, Human herpesvirus 6
uaaauauaucaaagauguacuca

SEQ ID NO: 2040645 - RNA, 15 nt, Human herpesvirus 6
uaaauuauuuuguga

SEQ ID NO: 2040646 - RNA, 18 nt, Human herpesvirus 6
uaacgacuucgacuucaa

SEQ ID NO: 2040647 - RNA, 13 nt, Human herpesvirus 6
uaagcgugacuua

SEQ ID NO: 2040648 - RNA, 19 nt, Human herpesvirus 6
uaacuguaaaaagugcuuu

SEQ ID NO: 2040649 - RNA, 20 nt, Human herpesvirus 6
ugacuguccgcaugagcgac

SEQ ID NO: 2040650 - RNA, 20 nt, Human herpesvirus 6
ugcauacauaaauuauuuuu

SEQ ID NO: 2040651 - RNA, 18 nt, Human herpesvirus 6
ugccaaaggaaaccaccg

SEQ ID NO: 2040652 - RNA, 13 nt, Human herpesvirus 6
ucagagaaacgga

SEQ ID NO: 2040653 - RNA, 22 nt, Human herpesvirus 6
ucagauugcggacauggugaaa

SEQ ID NO: 2040654 - RNA, 12 nt, Human herpesvirus 6
ugcguuaucgac

SEQ ID NO: 2040655 - RNA, 16 nt, Human herpesvirus 6
ggagucggcgugugug

SEQ ID NO: 2040656 - RNA, 18 nt, Human herpesvirus 6
gcuuccggaauaguucuu

SEQ ID NO: 2040657 - RNA, 20 nt, Human herpesvirus 6
gcuuaccguucaucauucca

SEQ ID NO: 2040658 - RNA, 19 nt, Human herpesvirus 6
gucaguggguaccgcgguu

SEQ ID NO: 2040659 - RNA, 13 nt, Human herpesvirus 6
gucagguuugaaa

SEQ ID NO: 2040660 - RNA, 22 nt, Human herpesvirus 6
gucccaucuauacacccugccg

SEQ ID NO: 2040661 - RNA, 17 nt, Human herpesvirus 6
gcggacgguuuauuuuu

SEQ ID NO: 2040662 - RNA, 20 nt, Human herpesvirus 6
cggcggauggagcccgcucg

SEQ ID NO: 2040663 - RNA, 17 nt, Human herpesvirus 6
cggccauuuaacggaac

SEQ ID NO: 2040664 - RNA, 14 nt, Human herpesvirus 6
gaauauugaaacgg

SEQ ID NO: 2040665 - RNA, 17 nt, Human herpesvirus 6
gaaguuagaaauuuuac

SEQ ID NO: 2040666 - RNA, 23 nt, Human herpesvirus 6
gaaguugguuuaaaauaucuguu

SEQ ID NO: 2040667 - RNA, 22 nt, Human herpesvirus 6
gaaucagaucacucagauuuca

SEQ ID NO: 2040668 - RNA, 15 nt, Human herpesvirus 6
gaauuguauauauag

SEQ ID NO: 2040669 - RNA, 22 nt, Human herpesvirus 6
gacaaaccucucgccgaccugu

SEQ ID NO: 2040670 - RNA, 18 nt, Human herpesvirus 6
gacaaagaaccggcgugu

SEQ ID NO: 2040671 - RNA, 22 nt, Human herpesvirus 6
gacucuaaauacggaccgagag

SEQ ID NO: 2040672 - RNA, 15 nt, Human herpesvirus 6
gacuguguguugaau

SEQ ID NO: 2040673 - RNA, 21 nt, Human herpesvirus 6
gaacauacaaaggaggugcgu

SEQ ID NO: 2040674 - RNA, 20 nt, Human herpesvirus 6
gaaauuugagaaaguuguac

SEQ ID NO: 2040675 - RNA, 16 nt, Human herpesvirus 6
gaaauuuuugacugau

SEQ ID NO: 2040676 - RNA, 20 nt, Human herpesvirus 6
gaaaaucucaaacgccgugu

SEQ ID NO: 2040677 - RNA, 19 nt, Human herpesvirus 6
cgguggccuggcacggugc

SEQ ID NO: 2040678 - RNA, 22 nt, Human herpesvirus 6
cgguuugucucgcaaacagcuu

SEQ ID NO: 2040679 - RNA, 23 nt, Human herpesvirus 6
gagagagcgugcacacaaacagu

SEQ ID NO: 2040680 - RNA, 17 nt, Human herpesvirus 6
gagaccuacacuuuucc

SEQ ID NO: 2040681 - RNA, 23 nt, Human herpesvirus 6
gagacgcacccuacaaucugucc

SEQ ID NO: 2040682 - RNA, 15 nt, Human herpesvirus 6
gcagcuuccacgcga

SEQ ID NO: 2040683 - RNA, 13 nt, Human herpesvirus 6
cauaggugauuuc

SEQ ID NO: 2040684 - RNA, 14 nt, Human herpesvirus 6
cauauaaacagauu

SEQ ID NO: 2040685 - RNA, 15 nt, Human herpesvirus 6
auuuuuuuaauaaau

SEQ ID NO: 2040686 - RNA, 20 nt, Human herpesvirus 6
cauaggaauucuuauuuacc

SEQ ID NO: 2040687 - RNA, 18 nt, Human herpesvirus 6
auuugacaauaaacauga

SEQ ID NO: 2040688 - RNA, 19 nt, Human herpesvirus 6
auuucaaacugguguaaau

SEQ ID NO: 2040689 - RNA, 20 nt, Human herpesvirus 6
auuucuuccuuucucugcgc

SEQ ID NO: 2040690 - RNA, 20 nt, Human herpesvirus 6
caucgcgcgcgacgugccac

SEQ ID NO: 2040691 - RNA, 17 nt, Human herpesvirus 6
caucagaauccagaaac

SEQ ID NO: 2040692 - RNA, 17 nt, Human herpesvirus 6
caucccuuaaaaaaaca

SEQ ID NO: 2040693 - RNA, 14 nt, Human herpesvirus 6
caucaaaucggaca

SEQ ID NO: 2040694 - RNA, 19 nt, Human herpesvirus 6
caucaugcugugagagaau

SEQ ID NO: 2040695 - RNA, 20 nt, Human herpesvirus 6
auucugcauuuauaucaaac

SEQ ID NO: 2040696 - RNA, 14 nt, Human herpesvirus 6
auugcauucugggc

SEQ ID NO: 2040697 - RNA, 13 nt, Human herpesvirus 6
auucguuacaauc

SEQ ID NO: 2040698 - RNA, 16 nt, Human herpesvirus 6
auucguuuuuuuucuu

SEQ ID NO: 2040699 - RNA, 14 nt, Human herpesvirus 6
auuguaaacgauau

SEQ ID NO: 2040700 - RNA, 21 nt, Human herpesvirus 6
auuguauauauagcuguaaau

SEQ ID NO: 2040701 - RNA, 19 nt, Human herpesvirus 6
auuucgguuucgucgcaaa

SEQ ID NO: 2040702 - RNA, 22 nt, Human herpesvirus 6
auuuaccuuccugagaguaaau

SEQ ID NO: 2040703 - RNA, 12 nt, Human herpesvirus 6
auuuaaacaaca

SEQ ID NO: 2040704 - RNA, 15 nt, Human herpesvirus 6
auuuaacaacaucuu

SEQ ID NO: 2040705 - RNA, 10 nt, Human herpesvirus 6
augucucgcg

SEQ ID NO: 2040706 - RNA, 14 nt, Human herpesvirus 6
auguucaauuacuc

SEQ ID NO: 2040707 - RNA, 13 nt, Human herpesvirus 6
auaauuuauggaa

SEQ ID NO: 2040708 - RNA, 14 nt, Human herpesvirus 6
auacacacccagca

SEQ ID NO: 2040709 - RNA, 19 nt, Human herpesvirus 6
auucaaaugcaguaaauga

SEQ ID NO: 2040710 - RNA, 19 nt, Human herpesvirus 6
auuagaauaauuauggaca

SEQ ID NO: 2040711 - RNA, 22 nt, Human herpesvirus 6
auuaaauguuacugaacuuugu

SEQ ID NO: 2040712 - RNA, 11 nt, Human herpesvirus 6
agauuaaaugu

SEQ ID NO: 2040713 - RNA, 13 nt, Human herpesvirus 6
agaggaauuggcg

SEQ ID NO: 2040714 - RNA, 14 nt, Human herpesvirus 6
agaggagaaaugau

SEQ ID NO: 2040715 - RNA, 20 nt, Human herpesvirus 6
agcgcgucguucgcuucuua

SEQ ID NO: 2040716 - RNA, 19 nt, Human herpesvirus 6
aguguucgcauuagaaaau

SEQ ID NO: 2040717 - RNA, 20 nt, Human herpesvirus 6
aguuauauucuucuguaaau

SEQ ID NO: 2040718 - RNA, 15 nt, Human herpesvirus 6
aguuuacauagaaau

SEQ ID NO: 2040719 - RNA, 19 nt, Human herpesvirus 6
aguuucaccauguccagga

SEQ ID NO: 2040720 - RNA, 22 nt, Human herpesvirus 6
aguuucggcaacugaauuugca

SEQ ID NO: 2040721 - RNA, 17 nt, Human herpesvirus 6
aguuuguguuuguaaau

SEQ ID NO: 2040722 - RNA, 18 nt, Human herpesvirus 6
auaaauugaugaaauugu

SEQ ID NO: 2040723 - RNA, 14 nt, Human herpesvirus 6
aguuuuugugcggc

SEQ ID NO: 2040724 - RNA, 22 nt, Human herpesvirus 6
auaaaaaguuugugcgaauugu

SEQ ID NO: 2040725 - RNA, 14 nt, Human herpesvirus 6
aauucuuauuuacc

SEQ ID NO: 2040726 - RNA, 14 nt, Human herpesvirus 6
aauuauagcgauaa

SEQ ID NO: 2040727 - RNA, 13 nt, Human herpesvirus 6
aauuuuaaaaaga

SEQ ID NO: 2040728 - RNA, 12 nt, Human herpesvirus 6
aauuuuaaaugc

SEQ ID NO: 2040729 - RNA, 15 nt, Human herpesvirus 6
acaacgcuccauaac

SEQ ID NO: 2040730 - RNA, 22 nt, Human herpesvirus 6
accccguugauuggaugaucgc

SEQ ID NO: 2040731 - RNA, 17 nt, Human herpesvirus 6
aauucauuguacgauaa

SEQ ID NO: 2040732 - RNA, 21 nt, Human herpesvirus 6
aacagggagugauugaugaaa

SEQ ID NO: 2040733 - RNA, 15 nt, Human herpesvirus 6
aacaguauaacggaa

SEQ ID NO: 2040734 - RNA, 23 nt, Human herpesvirus 6
aacgacuaccacaucaccgauaa

SEQ ID NO: 2040735 - RNA, 14 nt, Human herpesvirus 6
aacgauaugucucu

SEQ ID NO: 2040736 - RNA, 21 nt, Human herpesvirus 6
cucgauuuugugaaugagaca

SEQ ID NO: 2040737 - RNA, 20 nt, Human herpesvirus 6
cucgccgaacuagaaaaaca

SEQ ID NO: 2040738 - RNA, 17 nt, Human herpesvirus 6
gauacaucguuuguuga

SEQ ID NO: 2040739 - RNA, 21 nt, Human herpesvirus 6
gaguugggacuuggaaacgug

SEQ ID NO: 2040740 - RNA, 20 nt, Human herpesvirus 6
gaguccggcgcacgcacacg

SEQ ID NO: 2040741 - RNA, 20 nt, Human herpesvirus 6
ggcauagcagcaauaggcac

SEQ ID NO: 2040742 - RNA, 20 nt, Human
agggacucaucauuuccauu

SEQ ID NO: 2040743 - RNA, 23 nt, Human
agcccaaagugguauagaaaugc

SEQ ID NO: 2040744 - RNA, 20 nt, Human
agcccaaagugguauagaaa

SEQ ID NO: 2040745 - RNA, 19 nt, Human
agccuccugaguagcugga

SEQ ID NO: 2040746 - RNA, 11 nt, Human
agccuccugag

SEQ ID NO: 2040747 - RNA, 15 nt, Human
aucucucuucuuuuc

SEQ ID NO: 2040748 - RNA, 16 nt, Human
aguccacaguggaacc

SEQ ID NO: 2040749 - RNA, 23 nt, Human
aguuguuaauaaaaguacauguu

SEQ ID NO: 2040750 - RNA, 17 nt, Human
auaugcaguuuuccuua

SEQ ID NO: 2040751 - RNA, 24 nt, Human
acaacuugcacguauuuuaauagc

SEQ ID NO: 2040752 - RNA, 17 nt, Human
acauguuaaacuuacuu

SEQ ID NO: 2040753 - RNA, 20 nt, Human
agaaaagggaacugaacauu

SEQ ID NO: 2040754 - RNA, 15 nt, Human
acuuauuuauauaaa

SEQ ID NO: 2040755 - RNA, 19 nt, Human
acgugauuuugcuguagaa

SEQ ID NO: 2040756 - RNA, 14 nt, Human
aacuuuuuuuuaag

SEQ ID NO: 2040757 - RNA, 20 nt, Human
aacuuuuuuuuaaguuacac

SEQ ID NO: 2040758 - RNA, 14 nt, Human
aacugaauuuuguc

SEQ ID NO: 2040759 - RNA, 15 nt, Human
aacugaauuuugucu

SEQ ID NO: 2040760 - RNA, 23 nt, Human
aaagugagacuuugaggguguau

SEQ ID NO: 2040761 - RNA, 12 nt, Human
aaagugcuggga

SEQ ID NO: 2040762 - RNA, 21 nt, Human
aaagggaacugaacauuccag

SEQ ID NO: 2040763 - RNA, 16 nt, Human
aaagggaacugaacau

SEQ ID NO: 2040764 - RNA, 21 nt, Human
aagaaauuuccacucaggucu

SEQ ID NO: 2040765 - RNA, 15 nt, Human
aaguuguuaauaaaa

SEQ ID NO: 2040766 - RNA, 17 nt, Human
aagugguauagaaaugc

SEQ ID NO: 2040767 - RNA, 13 nt, Human
aagugguauagaa

SEQ ID NO: 2040768 - RNA, 21 nt, Human
cucgugguaggacuguagaaa

SEQ ID NO: 2040769 - RNA, 20 nt, Human
cugaguagcuggauuacagg

SEQ ID NO: 2040770 - RNA, 19 nt, Human
cugaguagcuggauuacag

SEQ ID NO: 2040771 - RNA, 13 nt, Human
cucaaacuccuga

SEQ ID NO: 2040772 - RNA, 14 nt, Human
cucaaacuccugac

SEQ ID NO: 2040773 - RNA, 14 nt, Human
cuacaguguacagu

SEQ ID NO: 2040774 - RNA, 13 nt, Human
cuacaguguacag

SEQ ID NO: 2040775 - RNA, 17 nt, Human
cgacugccaucuuggac

SEQ ID NO: 2040776 - RNA, 18 nt, Human
cgugauuuugcuguagaa

SEQ ID NO: 2040777 - RNA, 11 nt, Human
cccagcuguuu

SEQ ID NO: 2040778 - RNA, 23 nt, Human
ccgcaggauuugggcucuuggaa

SEQ ID NO: 2040779 - RNA, 16 nt, Human
cauguuggccaggcug

SEQ ID NO: 2040780 - RNA, 21 nt, Human
cagcuguuuaugcauagauaa

SEQ ID NO: 2040781 - RNA, 23 nt, Human
caccuacaguguacagucuugua

SEQ ID NO: 2040782 - RNA, 18 nt, Human
cacauuuuucagauauaa

SEQ ID NO: 2040783 - RNA, 14 nt, Human
cacauuuuucagau

SEQ ID NO: 2040784 - RNA, 22 nt, Human
caaguaauccaccugccucggc

SEQ ID NO: 2040785 - RNA, 13 nt, Human
auuuuuaaagaaa

SEQ ID NO: 2040786 - RNA, 20 nt, Human
auuuuuaaagaaaaguuuug

SEQ ID NO: 2040787 - RNA, 13 nt, Human
auuguacaguuuu

SEQ ID NO: 2040788 - RNA, 15 nt, Human
auuucagauuuguga

SEQ ID NO: 2040789 - RNA, 16 nt, Human
cugguuuuucaguuuu

SEQ ID NO: 2040790 - RNA, 15 nt, Human
cugguuuuucaguuu

SEQ ID NO: 2040791 - RNA, 14 nt, Human
cugguuuuucaguu

SEQ ID NO: 2040792 - RNA, 14 nt, Human
cuuuuuuuuaaguu

SEQ ID NO: 2040793 - RNA, 22 nt, Human
gauggaaaaaccacccccaaau

SEQ ID NO: 2040794 - RNA, 16 nt, Human
ggauuuuugucuugug

SEQ ID NO: 2040795 - RNA, 14 nt, Human
ggauuuuugucuug

SEQ ID NO: 2040796 - RNA, 21 nt, Human
aaaguauccugcuucugauau

SEQ ID NO: 2040797 - RNA, 20 nt, Human
aaagugguauagaaaugcug

SEQ ID NO: 2040798 - RNA, 17 nt, Human
aaagugguauagaaaug

SEQ ID NO: 2040799 - RNA, 16 nt, Human
aaagugguauagaaau

SEQ ID NO: 2040800 - RNA, 14 nt, Human
aaagcuagaaauga

SEQ ID NO: 2040801 - RNA, 15 nt, Human
guaaagcuagaaaug

SEQ ID NO: 2040802 - RNA, 16 nt, Human
guaaagcuagaaauga

SEQ ID NO: 2040803 - RNA, 13 nt, Human
gguauagaaaugc

SEQ ID NO: 2040804 - RNA, 15 nt, Human
aaaaucugcuaggga

SEQ ID NO: 2040805 - RNA, 14 nt, Human
uuuugcuguagaag

SEQ ID NO: 2040806 - RNA, 13 nt, Human
uuuugcuguagaa

SEQ ID NO: 2040807 - RNA, 19 nt, Human
uuuuguuucauauugaugu

SEQ ID NO: 2040808 - RNA, 12 nt, Human
uuuuguuucaua

SEQ ID NO: 2040809 - RNA, 20 nt, Human
auuaaguuguuaauaaaagu

SEQ ID NO: 2040810 - RNA, 19 nt, Human
auuaaguuguuaauaaaag

SEQ ID NO: 2040811 - RNA, 14 nt, Human
auuaaguuguuaau

SEQ ID NO: 2040812 - RNA, 21 nt, Human
auguuaaacuuacuuaguguu

SEQ ID NO: 2040813 - RNA, 20 nt, Human
uuuuaggccaaaaaaaugua

SEQ ID NO: 2040814 - RNA, 12 nt, Human
uuuucaguuuuc

SEQ ID NO: 2040815 - RNA, 14 nt, Human
uuuucaguuuucag

SEQ ID NO: 2040816 - RNA, 18 nt, Human
auucuccugccucagccu

SEQ ID NO: 2040817 - RNA, 22 nt, Human
auuuccacucaggucuguuuuc

SEQ ID NO: 2040818 - RNA, 16 nt, Human
auuuuacuuuuuccug

SEQ ID NO: 2040819 - RNA, 17 nt, Human
auuuuacuuuuuccugg

SEQ ID NO: 2040820 - RNA, 21 nt, Human
augagccaccgcgcccagccu

SEQ ID NO: 2040821 - RNA, 18 nt, Human
augagccaccgcgcccag

SEQ ID NO: 2040822 - RNA, 16 nt, Human
uuucucaaagaaauuu

SEQ ID NO: 2040823 - RNA, 15 nt, Human
uuucucaaagaaauu

SEQ ID NO: 2040824 - RNA, 14 nt, Human
uuucucaaagaaau

SEQ ID NO: 2040825 - RNA, 21 nt, Human
uuucuuuaguuuuugugaagu

SEQ ID NO: 2040826 - RNA, 19 nt, Human
uuuccuuaaauuaucuaaa

SEQ ID NO: 2040827 - RNA, 21 nt, Human
uuuaaagaaaaguuuuguaaa

SEQ ID NO: 2040828 - RNA, 17 nt, Human
uuuaaagaaaaguuuug

SEQ ID NO: 2040829 - RNA, 15 nt, Human
uuuaaagaaaaguuu

SEQ ID NO: 2040830 - RNA, 13 nt, Human
uuuaaagaaaagu

SEQ ID NO: 2040831 - RNA, 19 nt, Human
uuuauuaaauguagaaagu

SEQ ID NO: 2040832 - RNA, 15 nt, Human
uuucaguuuucagga

SEQ ID NO: 2040833 - RNA, 22 nt, Human
uucagauauaaaagacugacca

SEQ ID NO: 2040834 - RNA, 20 nt, Human
uucauaucuauuuauuaaau

SEQ ID NO: 2040835 - RNA, 16 nt, Human
aucaauucauaucuau

SEQ ID NO: 2040836 - RNA, 12 nt, Human
auauuguacagu

SEQ ID NO: 2040837 - RNA, 14 nt, Human
auauuguacaguuu

SEQ ID NO: 2040838 - RNA, 13 nt, Human
auauuguacaguu

SEQ ID NO: 2040839 - RNA, 21 nt, Human
auccugcuucugauaugcagu

SEQ ID NO: 2040840 - RNA, 19 nt, Human
auccugcuucugauaugca

SEQ ID NO: 2040841 - RNA, 13 nt, Human
auccaauuggaua

SEQ ID NO: 2040842 - RNA, 22 nt, Human
aggccaacccaaaauaagcagg

SEQ ID NO: 2040843 - RNA, 13 nt, Human
aggccaaaaaaau

SEQ ID NO: 2040844 - RNA, 16 nt, Human
uggccaaguucuuagu

SEQ ID NO: 2040845 - RNA, 17 nt, Human
ugccucagccuccugag

SEQ ID NO: 2040846 - RNA, 13 nt, Human
ugauucuccugcc

SEQ ID NO: 2040847 - RNA, 20 nt, Human
ugauuucagcaccuacagug

SEQ ID NO: 2040848 - RNA, 21 nt, Human
ugauuucagcaccuacagugu

SEQ ID NO: 2040849 - RNA, 16 nt, Human
aguguacagucuugua

SEQ ID NO: 2040850 - RNA, 15 nt, Human
aguguacagucuugu

SEQ ID NO: 2040851 - RNA, 13 nt, Human
aguguacagucuu

SEQ ID NO: 2040852 - RNA, 16 nt, Human
uguucuuaagacguga

SEQ ID NO: 2040853 - RNA, 17 nt, Human
aguguacagucuuguau

SEQ ID NO: 2040854 - RNA, 20 nt, Human
auaaccaaagcccaaagugg

SEQ ID NO: 2040855 - RNA, 20 nt, Human
uggugaacauugcaauagaa

SEQ ID NO: 2040856 - RNA, 15 nt, Human
uggugaacauugcaa

SEQ ID NO: 2040857 - RNA, 13 nt, Human
agucuuuuccaug

SEQ ID NO: 2040858 - RNA, 15 nt, Human
agucuuuuccaugaa

SEQ ID NO: 2040859 - RNA, 20 nt, Human
ugucucgugguaggacugua

SEQ ID NO: 2040860 - RNA, 19 nt, Human
ugucucgugguaggacugu

SEQ ID NO: 2040861 - RNA, 18 nt, Human
ugucucgugguaggacug

SEQ ID NO: 2040862 - RNA, 21 nt, Human
ugucucgugguaggacuguag

SEQ ID NO: 2040863 - RNA, 18 nt, Human
ugucuuguguuucuuuag

SEQ ID NO: 2040864 - RNA, 21 nt, Human
uguauuaaguuguuaauaaaa

SEQ ID NO: 2040865 - RNA, 17 nt, Human
aguagcuggauuacagg

SEQ ID NO: 2040866 - RNA, 23 nt, Human
ucuuuuuuuuuuuuuaaagacag

SEQ ID NO: 2040867 - RNA, 21 nt, Human
agcaccuacaguguacagucu

SEQ ID NO: 2040868 - RNA, 19 nt, Human
agcaccuacaguguacagu

SEQ ID NO: 2040869 - RNA, 15 nt, Human
agcaccuacagugua

SEQ ID NO: 2040870 - RNA, 14 nt, Human
agcaccuacagugu

SEQ ID NO: 2040871 - RNA, 22 nt, Human
agcaccuacaguguacagucuu

SEQ ID NO: 2040872 - RNA, 16 nt, Human
agaucguucucugccu

SEQ ID NO: 2040873 - RNA, 16 nt, Human
ugaccugccaggcaca

SEQ ID NO: 2040874 - RNA, 19 nt, Human
ugaccugccaggcacacug

SEQ ID NO: 2040875 - RNA, 19 nt, Human
ugacuauuuuucagaaucu

SEQ ID NO: 2040876 - RNA, 16 nt, Human
ucuguugcccaggcug

SEQ ID NO: 2040877 - RNA, 20 nt, Human
agaaagcccuuaggaagaau

SEQ ID NO: 2040878 - RNA, 22 nt, Human
agaaagcccuuaggaagaauuu

SEQ ID NO: 2040879 - RNA, 16 nt, Human
acugaacauuccagag

SEQ ID NO: 2040880 - RNA, 13 nt, Human
acugaacauucca

SEQ ID NO: 2040881 - RNA, 14 nt, Human
acugcaacuucugc

SEQ ID NO: 2040882 - RNA, 16 nt, Human
acugcaacuucugccu

SEQ ID NO: 2040883 - RNA, 18 nt, Human
acguaaagcuagaaauga

SEQ ID NO: 2040884 - RNA, 17 nt, Human
acguaaagcuagaaaug

SEQ ID NO: 2040885 - RNA, 20 nt, Human
acucaagacuuccagagccu

SEQ ID NO: 2040886 - RNA, 16 nt, Human
ucaguuuucaggagug

SEQ ID NO: 2040887 - RNA, 12 nt, Human
acccuucuuuuc

SEQ ID NO: 2040888 - RNA, 14 nt, Human
acauugcaauagaa

SEQ ID NO: 2040889 - RNA, 16 nt, Human
acauugcaauagaaau

SEQ ID NO: 2040890 - RNA, 15 nt, Human
acauugcaauagaaa

SEQ ID NO: 2040891 - RNA, 11 nt, Human
acauuuuguau

SEQ ID NO: 2040892 - RNA, 18 nt, Human
ucacguaaagcuagaaau

SEQ ID NO: 2040893 - RNA, 20 nt, Human
ucacguaaagcuagaaauga

SEQ ID NO: 2040894 - RNA, 19 nt, Human
ucacguaaagcuagaaaug

SEQ ID NO: 2040895 - RNA, 15 nt, Human
ucaccauguuggcca

SEQ ID NO: 2040896 - RNA, 21 nt, Human
ucaccauguuggccaggcugg

SEQ ID NO: 2040897 - RNA, 23 nt, Human
aauauuguacaguuuuuauugcu

SEQ ID NO: 2040898 - RNA, 17 nt, Human
aauauuguacaguuuuu

SEQ ID NO: 2040899 - RNA, 15 nt, Human
aauauuguacaguuu

SEQ ID NO: 2040900 - RNA, 14 nt, Human
aauauuguacaguu

SEQ ID NO: 2040901 - RNA, 12 nt, Human
aauauuccagag

SEQ ID NO: 2040902 - RNA, 20 nt, Human
uaacuagaacugaauuuugu

SEQ ID NO: 2040903 - RNA, 17 nt, Human
uaacuagaacugaauuu

SEQ ID NO: 2040904 - RNA, 14 nt, Human
uaacuagaacugaa

SEQ ID NO: 2040905 - RNA, 12 nt, Human
uaacuagaacug

SEQ ID NO: 2040906 - RNA, 18 nt, Human
uaacauggugugcuucuu

SEQ ID NO: 2040907 - RNA, 14 nt, Human
aauccuggggaaca

SEQ ID NO: 2040908 - RNA, 21 nt, Human
aauccuggggaacauagaacu

SEQ ID NO: 2040909 - RNA, 13 nt, Human
aaucuuucugcag

SEQ ID NO: 2040910 - RNA, 13 nt, Human
aaugacacagucu

SEQ ID NO: 2040911 - RNA, 19 nt, Human
uaauagcgucauaacuaga

SEQ ID NO: 2040912 - RNA, 14 nt, Human
aauugacuuauuua

SEQ ID NO: 2040913 - RNA, 21 nt, Human
uagugaaucacguaaagcuag

SEQ ID NO: 2040914 - RNA, 21 nt, Human
uagcuuacaagccagcuggag

SEQ ID NO: 2040915 - RNA, 14 nt, Human
uaggacuguagaaa

SEQ ID NO: 2040916 - RNA, 13 nt, Human
uaggacuguagaa

SEQ ID NO: 2040917 - RNA, 19 nt, Human
aagaaagcccuuaggaaga

SEQ ID NO: 2040918 - RNA, 19 nt, Human
gugaaguuuaauugacuua

SEQ ID NO: 2040919 - RNA, 17 nt, Human
aacguuuuuccuguucu

SEQ ID NO: 2040920 - RNA, 20 nt, Human
gucuuguguuucuuuaguuu

SEQ ID NO: 2040921 - RNA, 17 nt, Human
aaauuucucuacugucu

SEQ ID NO: 2040922 - RNA, 23 nt, Human
gucuaggcaggaccuguggccaa

SEQ ID NO: 2040923 - RNA, 20 nt, Human
uaaaaguacauguuaaacuu

SEQ ID NO: 2040924 - RNA, 21 nt, Human
aagugauucuccugccucagc

SEQ ID NO: 2040925 - RNA, 14 nt, Human
aaguuacacauuuu

SEQ ID NO: 2040926 - RNA, 16 nt, Human
guucuuaagacgugau

SEQ ID NO: 2040927 - RNA, 12 nt, Human
guuaauaaaagu

SEQ ID NO: 2040928 - RNA, 16 nt, Human
guguuucuuuaguuuu

SEQ ID NO: 2040929 - RNA, 13 nt, Human
guguuucuuuagu

SEQ ID NO: 2040930 - RNA, 23 nt, Human
aagauggcacuuauaaccaaagc

SEQ ID NO: 2040931 - RNA, 20 nt, Human
caaagugcugggauuacagg

SEQ ID NO: 2040932 - RNA, 19 nt, Human
caaagugcugggauuacag

SEQ ID NO: 2040933 - RNA, 14 nt, Human
caauauuguacagu

SEQ ID NO: 2040934 - RNA, 19 nt, Human
uuaugauuuuuaaagaaaa

SEQ ID NO: 2040935 - RNA, 16 nt, Human
uuaugauuuuuaaaga

SEQ ID NO: 2040936 - RNA, 13 nt, Human
uuccagagccuca

SEQ ID NO: 2040937 - RNA, 12 nt, Human
uucagauauaaa

SEQ ID NO: 2040938 - RNA, 15 nt, Human
uucagauauaaaaga

SEQ ID NO: 2040939 - RNA, 14 nt, Human
uucagauauaaaag

SEQ ID NO: 2040940 - RNA, 19 nt, Human
uucagauauaaaagacuga

SEQ ID NO: 2040941 - RNA, 23 nt, Human
uucuuaguugcuguaugucucgu

SEQ ID NO: 2040942 - RNA, 15 nt, Human
uucuuaguugcugua

SEQ ID NO: 2040943 - RNA, 14 nt, Human
uucuuaguugcugu

SEQ ID NO: 2040944 - RNA, 22 nt, Human
uucugauaugcaguuuuccuua

SEQ ID NO: 2040945 - RNA, 23 nt, Human
uuucagcaccuacaguguacagu

SEQ ID NO: 2040946 - RNA, 18 nt, Human
uuucagauauaaaagacu

SEQ ID NO: 2040947 - RNA, 16 nt, Human
uuucagauauaaaaga

SEQ ID NO: 2040948 - RNA, 14 nt, Human
uuucagauauaaaa

SEQ ID NO: 2040949 - RNA, 21 nt, Human
uuuaauagcgucauaacuaga

SEQ ID NO: 2040950 - RNA, 22 nt, Human
uuuaauagcgucauaacuagaa

SEQ ID NO: 2040951 - RNA, 18 nt, Human
uuuaaguuacacauuuuu

SEQ ID NO: 2040952 - RNA, 19 nt, Human
uuguuaauaaaaguacaug

SEQ ID NO: 2040953 - RNA, 14 nt, Human
uuguuaauaaaagu

SEQ ID NO: 2040954 - RNA, 21 nt, Human
uuguuaauaaaaguacauguu

SEQ ID NO: 2040955 - RNA, 19 nt, Human
uuguguuucuuuaguuuuu

SEQ ID NO: 2040956 - RNA, 21 nt, Human
uuggugaacauugcaauagaa

SEQ ID NO: 2040957 - RNA, 19 nt, Human
uugcacguauuuuaauagc

SEQ ID NO: 2040958 - RNA, 20 nt, Human
uuuuuaauaaagacaggguu

SEQ ID NO: 2040959 - RNA, 17 nt, Human
uuuuuaauaaagacagg

SEQ ID NO: 2040960 - RNA, 18 nt, Human
uuuuuaaguuacacauuu

SEQ ID NO: 2040961 - RNA, 15 nt, Human
uuuuucaguuuucag

SEQ ID NO: 2040962 - RNA, 12 nt, Human
uuuuucaguuuu

SEQ ID NO: 2040963 - RNA, 15 nt, Human
uuuucagauauaaaa

SEQ ID NO: 2040964 - RNA, 14 nt, Human
ugcaacuucugccu

SEQ ID NO: 2040965 - RNA, 13 nt, Human
ugcaacuucugcc

SEQ ID NO: 2040966 - RNA, 16 nt, Human
ugauuuugcuguagaa

SEQ ID NO: 2040967 - RNA, 14 nt, Human
ugauuuugcuguag

SEQ ID NO: 2040968 - RNA, 19 nt, Human
ugauuuugcuguagaagau

SEQ ID NO: 2040969 - RNA, 17 nt, Human
ugauuuugcuguagaag

SEQ ID NO: 2040970 - RNA, 19 nt, Human
ugauuuuuaaagaaaaguu

SEQ ID NO: 2040971 - RNA, 21 nt, Human
ugcaaugacacagucuuggcu

SEQ ID NO: 2040972 - RNA, 19 nt, Human
ugauaugcaguuuuccuua

SEQ ID NO: 2040973 - RNA, 23 nt, Human
uggccuccaaguccacaguggaa

SEQ ID NO: 2040974 - RNA, 13 nt, Human
uggccuccaaguc

SEQ ID NO: 2040975 - RNA, 19 nt, Human
ugucuaggcaggaccugug

SEQ ID NO: 2040976 - RNA, 17 nt, Human
ugucuaggcaggaccug

SEQ ID NO: 2040977 - RNA, 20 nt, Human
ugguggggcugccaggggag

SEQ ID NO: 2040978 - RNA, 16 nt, Human
ugguuuuucaguuuuc

SEQ ID NO: 2040979 - RNA, 13 nt, Human
uccccuucacucc

SEQ ID NO: 2040980 - RNA, 23 nt, Human
ucccguggaacguuuuuccuguu

SEQ ID NO: 2040981 - RNA, 22 nt, Human
ucccguggaacguuuuuccugu

SEQ ID NO: 2040982 - RNA, 16 nt, Human
ucccguggaacguuuu

SEQ ID NO: 2040983 - RNA, 14 nt, Human
uccugccucagccu

SEQ ID NO: 2040984 - RNA, 22 nt, Human
ucucaaagaaauuuccacucag

SEQ ID NO: 2040985 - RNA, 21 nt, Human
ucucaaagaaauuuccacuca

SEQ ID NO: 2040986 - RNA, 19 nt, Human
ucucaaagaaauuuccacu

SEQ ID NO: 2040987 - RNA, 22 nt, Human
ucgagguuucucaaagaaauuu

SEQ ID NO: 2040988 - RNA, 16 nt, Human
ucgagguuucucaaag

SEQ ID NO: 2040989 - RNA, 19 nt, Human
ucucgugguaggacuguag

SEQ ID NO: 2040990 - RNA, 21 nt, Human
ucucgugguaggacuguagaa

SEQ ID NO: 2040991 - RNA, 19 nt, Human
ucuucuuuuugcuucaaaa

SEQ ID NO: 2040992 - RNA, 20 nt, Human
ucaaagaaauuuccacucag

SEQ ID NO: 2040993 - RNA, 19 nt, Human
ucaaagaaauuuccacuca

SEQ ID NO: 2040994 - RNA, 13 nt, Human
ucaaagaaauuuc

SEQ ID NO: 2040995 - RNA, 12 nt, Human
ucaaagaaauuu

SEQ ID NO: 2040996 - RNA, 15 nt, Human
ucaaaugagaaaaug

SEQ ID NO: 2040997 - RNA, 13 nt, Human
uauuuauauaaau

SEQ ID NO: 2040998 - RNA, 18 nt, Human
ucaagugauucuccugcc

SEQ ID NO: 2040999 - RNA, 19 nt, Human
ucaagugauucuccugccu

SEQ ID NO: 2041000 - RNA, 21 nt, Human
uauugcuugcacaaaccaauu

SEQ ID NO: 2041001 - RNA, 19 nt, Human
uauugcuuguuggauuuuu

SEQ ID NO: 2041002 - RNA, 17 nt, Human
ucagauauaaaagacug

SEQ ID NO: 2041003 - RNA, 14 nt, Human
ucagauauaaaaga

SEQ ID NO: 2041004 - RNA, 20 nt, Human
ucagauauaaaagacugacc

SEQ ID NO: 2041005 - RNA, 18 nt, Human
ucagauauaaaagacuga

SEQ ID NO: 2041006 - RNA, 21 nt, Human
ucagccuccugaguagcugga

SEQ ID NO: 2041007 - RNA, 13 nt, Human
ucagccuccugag

SEQ ID NO: 2041008 - RNA, 20 nt, Human
ucagccuccugaguagcugg

SEQ ID NO: 2041009 - RNA, 21 nt, Human
ucagggagugggcuaagcacg

SEQ ID NO: 2041010 - RNA, 19 nt, Human
gcuggucucaaacuccuga

SEQ ID NO: 2041011 - RNA, 20 nt, Human
gcuggucucaaacuccugac

SEQ ID NO: 2041012 - RNA, 14 nt, Human
gcuuguuggauuuu

SEQ ID NO: 2041013 - RNA, 12 nt, Human
gccaaguucuua

SEQ ID NO: 2041014 - RNA, 17 nt, Human
gccaccgcgcccagccu

SEQ ID NO: 2041015 - RNA, 21 nt, Human
gauggcacuuauaaccaaagc

SEQ ID NO: 2041016 - RNA, 12 nt, Human
gaguagcuggau

SEQ ID NO: 2041017 - RNA, 18 nt, Human
gagccaccgcgcccagcc

SEQ ID NO: 2041018 - RNA, 20 nt, Human
gaggcggccccggccggggu

SEQ ID NO: 2041019 - RNA, 16 nt, Human
cucaagacuuccagag

SEQ ID NO: 2041020 - RNA, 14 nt, Human
cucaagacuuccag

SEQ ID NO: 2041021 - RNA, 23 nt, Human
cuccaaguccacaguggaaccag

SEQ ID NO: 2041022 - RNA, 13 nt, Human
cucauuaaaaaaa

SEQ ID NO: 2041023 - RNA, 20 nt, Human
cuccuuagaaguggaaguag

SEQ ID NO: 2041024 - RNA, 17 nt, Human
cuccuuagaaguggaag

SEQ ID NO: 2041025 - RNA, 13 nt, Human
cuccuuagaagug

SEQ ID NO: 2041026 - RNA, 21 nt, Human
cuccugccucagccuccugag

SEQ ID NO: 2041027 - RNA, 15 nt, Human
cugaacauuccagag

SEQ ID NO: 2041028 - RNA, 20 nt, Human
cucuuuguucuaaagaugga

SEQ ID NO: 2041029 - RNA, 22 nt, Human
cucuguugcccaggcuggagug

SEQ ID NO: 2041030 - RNA, 20 nt, Human
cucuguugcccaggcuggag

SEQ ID NO: 2041031 - RNA, 23 nt, Human
gaaaugcugguuuuucaguuuuc

SEQ ID NO: 2041032 - RNA, 18 nt, Human
gaaguuuaauugacuuau

SEQ ID NO: 2041033 - RNA, 18 nt, Human
cuuuguucuaaagaugga

SEQ ID NO: 2041034 - RNA, 21 nt, Human
cuuguuggauuuuugucuugu

SEQ ID NO: 2041035 - RNA, 21 nt, Human
cuuguguuucuuuaguuuuug

SEQ ID NO: 2041036 - RNA, 23 nt, Human
cuuguuggauuuuugucuugugu

SEQ ID NO: 2041037 - RNA, 15 nt, Human
cuuuaguuuuuguga

SEQ ID NO: 2041038 - RNA, 13 nt, Human
cuuuaguuuuugu

SEQ ID NO: 2041039 - RNA, 17 nt, Human
cuuuauuaaauguagaa

SEQ ID NO: 2041040 - RNA, 18 nt, Human
cuguucuuaagacgugau

SEQ ID NO: 2041041 - RNA, 16 nt, Human
cuuagaaguggaagua

SEQ ID NO: 2041042 - RNA, 17 nt, Human
cccgucgacguagaacc

SEQ ID NO: 2041043 - RNA, 14 nt, Human
ccuuagaaguggaa

SEQ ID NO: 2041044 - RNA, 19 nt, Human
ccagccucaucucuuuguu

SEQ ID NO: 2041045 - RNA, 21 nt, Human
cccaaagugguauagaaaugc

SEQ ID NO: 2041046 - RNA, 20 nt, Human
cccaaagugguauagaaaug

SEQ ID NO: 2041047 - RNA, 22 nt, Human
cauuuuacuuuuuccuggcuca

SEQ ID NO: 2041048 - RNA, 20 nt, Human
cauuuuacuuuuuccuggcu

SEQ ID NO: 2041049 - RNA, 17 nt, Human
cauuuuacuuuuuccug

SEQ ID NO: 2041050 - RNA, 22 nt, Human
cauuuacccuucuuuucugacu

SEQ ID NO: 2041051 - RNA, 22 nt, Human
cauuaaaaaaaaaaaaaaaagu

SEQ ID NO: 2041052 - RNA, 14 nt, Human
cauguguuccaagg

SEQ ID NO: 2041053 - RNA, 23 nt, Human
caggcuggucucaaacuccugac

SEQ ID NO: 2041054 - RNA, 17 nt, Human
caggaguggguugauuu

SEQ ID NO: 2041055 - RNA, 17 nt, Human
cagucuuguauuaaguu

SEQ ID NO: 2041056 - RNA, 16 nt, Human
cagucuuggcucacug

SEQ ID NO: 2041057 - RNA, 17 nt, Human
caggaccuguggccaag

SEQ ID NO: 2041058 - RNA, 18 nt, Human
cagcuggagaaauauggu

SEQ ID NO: 2041059 - RNA, 20 nt, Human
cagccuccugaguagcugga

SEQ ID NO: 2041060 - RNA, 23 nt, Human
cagagucucgcucuguugcccag

SEQ ID NO: 2041061 - RNA, 16 nt, Human
cacucaggucuguuuu

SEQ ID NO: 2041062 - RNA, 17 nt, Human
cacugcaacuucugccu

SEQ ID NO: 2041063 - RNA, 16 nt, Human
cacugcaacuucugcc

SEQ ID NO: 2041064 - RNA, 16 nt, Human
aguuguuaauaaaagu

SEQ ID NO: 2041065 - RNA, 11 nt, Human
auaaagacagg

SEQ ID NO: 2041066 - RNA, 22 nt, Human
auaaauuuuuuuuguuucauau

SEQ ID NO: 2041067 - RNA, 19 nt, Human
auaaauuuuuuuuguuuca

SEQ ID NO: 2041068 - RNA, 18 nt, Human
aggaguggguugauuuca

SEQ ID NO: 2041069 - RNA, 17 nt, Human
agacgugauuuugcugu

SEQ ID NO: 2041070 - RNA, 16 nt, Human
aaucucuccauucccg

SEQ ID NO: 2041071 - RNA, 20 nt, Human
aaugauccccagcuguuuau

SEQ ID NO: 2041072 - RNA, 19 nt, Human
aaugauccccagcuguuua

SEQ ID NO: 2041073 - RNA, 22 nt, Human
aaugauccccagcuguuuaugc

SEQ ID NO: 2041074 - RNA, 16 nt, Human
aaugauccccagcugu

SEQ ID NO: 2041075 - RNA, 12 nt, Human
aauguuuccuuu

SEQ ID NO: 2041076 - RNA, 13 nt, Human
aauguuuccuuua

SEQ ID NO: 2041077 - RNA, 15 nt, Human
aaguaguggagcccc

SEQ ID NO: 2041078 - RNA, 18 nt, Human
aaguauccugcuucugau

SEQ ID NO: 2041079 - RNA, 19 nt, Human
aaguccacaguggaaccag

SEQ ID NO: 2041080 - RNA, 14 nt, Human
aaguccacagugga

SEQ ID NO: 2041081 - RNA, 19 nt, Human
aaagcccuuaggaagaauu

SEQ ID NO: 2041082 - RNA, 18 nt, Human
aaauuuuuuuuguuucau

SEQ ID NO: 2041083 - RNA, 17 nt, Human
aaauuuuuuuuguuuca

SEQ ID NO: 2041084 - RNA, 15 nt, Human
accagcccagacccu

SEQ ID NO: 2041085 - RNA, 14 nt, Human
acacauuuuucaga

SEQ ID NO: 2041086 - RNA, 18 nt, Human
acuauuuuucagaaucuc

SEQ ID NO: 2041087 - RNA, 14 nt, Human
acuauuuuucagaa

SEQ ID NO: 2041088 - RNA, 17 nt, Human
cucgugguaggacugua

SEQ ID NO: 2041089 - RNA, 16 nt, Human
cucgugguaggacugu

SEQ ID NO: 2041090 - RNA, 15 nt, Human
cucgugguaggacug

SEQ ID NO: 2041091 - RNA, 21 nt, Human
cgagguuucucaaagaaauuu

SEQ ID NO: 2041092 - RNA, 22 nt, Human
cucaaagaaauuuccacucagg

SEQ ID NO: 2041093 - RNA, 14 nt, Human
cuauuuuucagaau

SEQ ID NO: 2041094 - RNA, 14 nt, Human
ccucaaaugagaaa

SEQ ID NO: 2041095 - RNA, 21 nt, Human
ccucgagguuucucaaagaaa

SEQ ID NO: 2041096 - RNA, 20 nt, Human
cccaggcuggagugcaauga

SEQ ID NO: 2041097 - RNA, 12 nt, Human
caagauuucaga

SEQ ID NO: 2041098 - RNA, 20 nt, Human
cagaaagguuuucuucuuuu

SEQ ID NO: 2041099 - RNA, 22 nt, Human
caaaugagaaaaugucuuuauu

SEQ ID NO: 2041100 - RNA, 16 nt, Human
auugcuuguuggauuu

SEQ ID NO: 2041101 - RNA, 14 nt, Human
auugcuugcacaaa

SEQ ID NO: 2041102 - RNA, 15 nt, Human
cagcaccuacagugu

SEQ ID NO: 2041103 - RNA, 20 nt, Human
cagcaccuacaguguacagu

SEQ ID NO: 2041104 - RNA, 22 nt, Human
cauagcuuacaagccagcugga

SEQ ID NO: 2041105 - RNA, 15 nt, Human
gccccugcucuggug

SEQ ID NO: 2041106 - RNA, 12 nt, Human
guagaagauggc

SEQ ID NO: 2041107 - RNA, 14 nt, Human
guacucauuaaaaa

SEQ ID NO: 2041108 - RNA, 16 nt, Human
aaaguacauguuaaac

SEQ ID NO: 2041109 - RNA, 15 nt, Human
guaauccaccugccu

SEQ ID NO: 2041110 - RNA, 19 nt, Human
aaagacugaccaauauugu

SEQ ID NO: 2041111 - RNA, 9 nt, Human
aaagacaga

SEQ ID NO: 2041112 - RNA, 17 nt, Human
gacaggguuucaccaug

SEQ ID NO: 2041113 - RNA, 21 nt, Human
gcaccuacaguguacagucuu

SEQ ID NO: 2041114 - RNA, 19 nt, Human
gcaccuacaguguacaguc

SEQ ID NO: 2041115 - RNA, 18 nt, Human
gcaccuacaguguacagu

SEQ ID NO: 2041116 - RNA, 23 nt, Human
cuuggguucaagugauucuccug

SEQ ID NO: 2041117 - RNA, 15 nt, Human
cuuaggaagaauuuu

SEQ ID NO: 2041118 - RNA, 20 nt, Human
cuuacauuuuacuuuuuccu

SEQ ID NO: 2041119 - RNA, 17 nt, Human
cuuacaagccagcugga

SEQ ID NO: 2041120 - RNA, 16 nt, Human
cuuacaagccagcugg

SEQ ID NO: 2041121 - RNA, 19 nt, Human
cuguagaaaagggaacuga

SEQ ID NO: 2041122 - RNA, 13 nt, Human
auuugucaacaaa

SEQ ID NO: 2041123 - RNA, 15 nt, Human
auuugucaacaaagu

SEQ ID NO: 2041124 - RNA, 16 nt, Human
auuuccacucaggucu

SEQ ID NO: 2041125 - RNA, 16 nt, Human
auuggauuugucuuug

SEQ ID NO: 2041126 - RNA, 21 nt, Human
auuguacaguuuuuauugcuu

SEQ ID NO: 2041127 - RNA, 15 nt, Human
auuguacaguuuuua

SEQ ID NO: 2041128 - RNA, 14 nt, Human
auuguacaguuuuu

SEQ ID NO: 2041129 - RNA, 20 nt, Human
auuuugcuguagaagauggc

SEQ ID NO: 2041130 - RNA, 18 nt, Human
auuuuguauauuuguauu

SEQ ID NO: 2041131 - RNA, 12 nt, Human
auuuugucuuua

SEQ ID NO: 2041132 - RNA, 16 nt, Human
auuuuucagauauaaa

SEQ ID NO: 2041133 - RNA, 14 nt, Human
auuuuugucuugug

SEQ ID NO: 2041134 - RNA, 19 nt, Human
auuccagagcguguaguga

SEQ ID NO: 2041135 - RNA, 19 nt, Human
auuaucuaaaaucugcuag

SEQ ID NO: 2041136 - RNA, 14 nt, Human
uuucugcagaaaca

SEQ ID NO: 2041137 - RNA, 17 nt, Human
auguaaaagacuuuuuu

SEQ ID NO: 2041138 - RNA, 19 nt, Human
uuugucuuuggugaacauu

SEQ ID NO: 2041139 - RNA, 21 nt, Human
uuugucuuguguuucuuuagu

SEQ ID NO: 2041140 - RNA, 16 nt, Human
augucucgugguagga

SEQ ID NO: 2041141 - RNA, 15 nt, Human
augucucgugguagg

SEQ ID NO: 2041142 - RNA, 19 nt, Human
augucucgugguaggacug

SEQ ID NO: 2041143 - RNA, 19 nt, Human
auguaugaggaauuucugu

SEQ ID NO: 2041144 - RNA, 18 nt, Human
aucaguagccagcaucug

SEQ ID NO: 2041145 - RNA, 21 nt, Human
uucuucuuuuugcuucaaaaa

SEQ ID NO: 2041146 - RNA, 17 nt, Human
uucuucuuuuugcuuca

SEQ ID NO: 2041147 - RNA, 23 nt, Human
uucuuaagacgugauuuugcugu

SEQ ID NO: 2041148 - RNA, 21 nt, Human
uucuuaagacgugauuuugcu

SEQ ID NO: 2041149 - RNA, 23 nt, Human
uucccguggaacguuuuuccugu

SEQ ID NO: 2041150 - RNA, 14 nt, Human
aucguucucugccu

SEQ ID NO: 2041151 - RNA, 20 nt, Human
aucugcuagggaauaucaau

SEQ ID NO: 2041152 - RNA, 13 nt, Human
aucuuucugcaga

SEQ ID NO: 2041153 - RNA, 21 nt, Human
uuaguuuuugugaaguuuaau

SEQ ID NO: 2041154 - RNA, 18 nt, Human
uuaguuuuugugaaguuu

SEQ ID NO: 2041155 - RNA, 18 nt, Human
auaacuuuuuuuuaaguu

SEQ ID NO: 2041156 - RNA, 20 nt, Human
uuacagggaugagccaccgc

SEQ ID NO: 2041157 - RNA, 16 nt, Human
uuaauaaaaguacaug

SEQ ID NO: 2041158 - RNA, 20 nt, Human
aguuuuuauugcuuguugga

SEQ ID NO: 2041159 - RNA, 13 nt, Human
auacgauaaauaa

SEQ ID NO: 2041160 - RNA, 22 nt, Human
auagaaaugcugguuuuucagu

SEQ ID NO: 2041161 - RNA, 19 nt, Human
auagaaaugcugguuuuuc

SEQ ID NO: 2041162 - RNA, 13 nt, Human
auagaaaugcugg

SEQ ID NO: 2041163 - RNA, 19 nt, Human
agucucgcucuguugccca

SEQ ID NO: 2041164 - RNA, 18 nt, Human
agugguauagaaaugcug

SEQ ID NO: 2041165 - RNA, 16 nt, Human
agugguauagaaaugc

SEQ ID NO: 2041166 - RNA, 15 nt, Human
agugguauagaaaug

SEQ ID NO: 2041167 - RNA, 14 nt, Human
agugguauagaaau

SEQ ID NO: 2041168 - RNA, 19 nt, Human
uguuaauaaaaguacaugu

SEQ ID NO: 2041169 - RNA, 18 nt, Human
uguuaauaaaaguacaug

SEQ ID NO: 2041170 - RNA, 13 nt, Human
uguuaauaaaagu

SEQ ID NO: 2041171 - RNA, 22 nt, Human
uguagugaaucacguaaagcua

SEQ ID NO: 2041172 - RNA, 12 nt, Human
uguacaguuuuu

SEQ ID NO: 2041173 - RNA, 16 nt, Human
agguuucucaaagaaa

SEQ ID NO: 2041174 - RNA, 19 nt, Human
agguuucucaaagaaauuu

SEQ ID NO: 2041175 - RNA, 21 nt, Human
uggcucacugcaacuucugcc

SEQ ID NO: 2041176 - RNA, 14 nt, Human
uggaaguaguggag

SEQ ID NO: 2041177 - RNA, 17 nt, Human
uggaaguaguggagccc

SEQ ID NO: 2041178 - RNA, 17 nt, Human
agcuggagaaauauggu

SEQ ID NO: 2041179 - RNA, 17 nt, Human
ugcacguauuuuaauag

SEQ ID NO: 2041180 - RNA, 12 nt, Human
ugcaguuuuccu

SEQ ID NO: 2041181 - RNA, 19 nt, Human
acuuugaggguguauauuu

SEQ ID NO: 2041182 - RNA, 15 nt, Human
acuuuuuuuuaaguu

SEQ ID NO: 2041183 - RNA, 15 nt, Human
agaaagaagaugaau

SEQ ID NO: 2041184 - RNA, 15 nt, Human
ucugcagaaacagaa

SEQ ID NO: 2041185 - RNA, 21 nt, Human
agaacucaugacggaagaguu

SEQ ID NO: 2041186 - RNA, 19 nt, Human
agacaggguuucaccaugu

SEQ ID NO: 2041187 - RNA, 19 nt, Human
agaccuaacgagaaauaga

SEQ ID NO: 2041188 - RNA, 21 nt, Human
agcaaaaccaaauauuccaga

SEQ ID NO: 2041189 - RNA, 21 nt, Human
ugacuuauuuauauaaauuuu

SEQ ID NO: 2041190 - RNA, 17 nt, Human
ugacuuauuuauauaaa

SEQ ID NO: 2041191 - RNA, 20 nt, Human
ugacuuauuuauauaaauuu

SEQ ID NO: 2041192 - RNA, 14 nt, Human
uccacagugacucc

SEQ ID NO: 2041193 - RNA, 20 nt, Human
uccacaguggaaccagccca

SEQ ID NO: 2041194 - RNA, 16 nt, Human
uccacaguggaaccag

SEQ ID NO: 2041195 - RNA, 19 nt, Human
uccugaguagcuggauuac

SEQ ID NO: 2041196 - RNA, 19 nt, Human
uccuguucuuaagacguga

SEQ ID NO: 2041197 - RNA, 23 nt, Human
acuguagaaaagggaacugaaca

SEQ ID NO: 2041198 - RNA, 17 nt, Human
acucaagacuuccagag

SEQ ID NO: 2041199 - RNA, 15 nt, Human
acuccugaccucaag

SEQ ID NO: 2041200 - RNA, 17 nt, Human
uauuguacaguuuuuau

SEQ ID NO: 2041201 - RNA, 15 nt, Human
uauuguacaguuuuu

SEQ ID NO: 2041202 - RNA, 14 nt, Human
uauuguacaguuuu

SEQ ID NO: 2041203 - RNA, 13 nt, Human
uauuguacaguuu

SEQ ID NO: 2041204 - RNA, 12 nt, Human
uauuguacaguu

SEQ ID NO: 2041205 - RNA, 11 nt, Human
uauuguacagu

SEQ ID NO: 2041206 - RNA, 14 nt, Human
acagucuuguauua

SEQ ID NO: 2041207 - RNA, 22 nt, Human
acagucuuguauuaaguuguua

SEQ ID NO: 2041208 - RNA, 18 nt, Human
acagucuuguauuaaguu

SEQ ID NO: 2041209 - RNA, 15 nt, Human
acagucuuguauuaa

SEQ ID NO: 2041210 - RNA, 16 nt, Human
aauuucucuacugucu

SEQ ID NO: 2041211 - RNA, 21 nt, Human
uagaaccucgagguuucucaa

SEQ ID NO: 2041212 - RNA, 22 nt, Human
uagaacugaauuuugucuuuau

SEQ ID NO: 2041213 - RNA, 17 nt, Human
uagaacugaauuuuguc

SEQ ID NO: 2041214 - RNA, 13 nt, Human
uagaacugaauuu

SEQ ID NO: 2041215 - RNA, 18 nt, Human
uagaagauggcacuuaua

SEQ ID NO: 2041216 - RNA, 15 nt, Human
acaagccagcuggag

SEQ ID NO: 2041217 - RNA, 13 nt, Human
acaagccagcugg

SEQ ID NO: 2041218 - RNA, 13 nt, Human
uaauuuuuuacua

SEQ ID NO: 2041219 - RNA, 22 nt, Human
uaauuuuuguguuuuuaauaaa

SEQ ID NO: 2041220 - RNA, 18 nt, Human
uacaagccagcuggagaa

SEQ ID NO: 2041221 - RNA, 12 nt, Human
uacagucuugua

SEQ ID NO: 2041222 - RNA, 13 nt, Human
uacagucuuguau

SEQ ID NO: 2041223 - RNA, 14 nt, Human
aaguuuaauugacu

SEQ ID NO: 2041224 - RNA, 17 nt, Human
aaguuacacauuuuuca

SEQ ID NO: 2041225 - RNA, 13 nt, Human
uaaagauggaaaa

SEQ ID NO: 2041226 - RNA, 9 nt, Human
uaaagacag

SEQ ID NO: 2041227 - RNA, 10 nt, Human
uaaagacaga

SEQ ID NO: 2041228 - RNA, 19 nt, Human
uaaacccaguaguggugac

SEQ ID NO: 2041229 - RNA, 13 nt, Human
uaaauaacuuuuu

SEQ ID NO: 2041230 - RNA, 19 nt, Human
uaaauuuuuuuuguuucau

SEQ ID NO: 2041231 - RNA, 22 nt, Human
aagaaaaguuuuguaaauuucu

SEQ ID NO: 2041232 - RNA, 21 nt, Human
aagaaaaguuuuguaaauuuc

SEQ ID NO: 2041233 - RNA, 16 nt, Human
aagaaaaguuuuguaa

SEQ ID NO: 2041234 - RNA, 15 nt, Human
aagaaaaguuuugua

SEQ ID NO: 2041235 - RNA, 14 nt, Human
aacuuggaaauagu

SEQ ID NO: 2041236 - RNA, 16 nt, Human
aagcaagauuucagau

SEQ ID NO: 2041237 - RNA, 16 nt, Human
aaccaaauauuccaga

SEQ ID NO: 2041238 - RNA, 16 nt, Human
gucucaaacuccugac

SEQ ID NO: 2041239 - RNA, 17 nt, Human
aacuagaacugaauuuu

SEQ ID NO: 2041240 - RNA, 15 nt, Human
aacugaacauuccag

SEQ ID NO: 2041241 - RNA, 14 nt, Human
caagugauucuccu

SEQ ID NO: 2041242 - RNA, 21 nt, Human
caagugauucuccugccucag

SEQ ID NO: 2041243 - RNA, 22 nt, Human
caagugauucuccugccucagc

SEQ ID NO: 2041244 - RNA, 16 nt, Human
caagugauucuccugc

SEQ ID NO: 2041245 - RNA, 21 nt, Human
caaugacacagucuuggcuca

SEQ ID NO: 2041246 - RNA, 19 nt, Human
caaugacacagucuuggcu

SEQ ID NO: 2041247 - RNA, 14 nt, Human
caaugacacagucu

SEQ ID NO: 2041248 - RNA, 13 nt, Human
uucugugcagcca

SEQ ID NO: 2041249 - RNA, 18 nt, Human
uugcagcgauuaauaaca

SEQ ID NO: 2041250 - RNA, 19 nt, Human
uugcagcgauuaauaacag

SEQ ID NO: 2041251 - RNA, 19 nt, Human
uugucuuuggugaacauug

SEQ ID NO: 2041252 - RNA, 17 nt, Human
uuuccacucaggucugu

SEQ ID NO: 2041253 - RNA, 21 nt, Human
uuugaggguguauauuuucug

SEQ ID NO: 2041254 - RNA, 15 nt, Human
uuaguugcuguaugu

SEQ ID NO: 2041255 - RNA, 13 nt, Human
uuaguugcuguau

SEQ ID NO: 2041256 - RNA, 14 nt, Human
uuaugcauagauaa

SEQ ID NO: 2041257 - RNA, 19 nt, Human
uuauugcagcgauuaauaa

SEQ ID NO: 2041258 - RNA, 18 nt, Human
uuccacucaggucuguuu

SEQ ID NO: 2041259 - RNA, 15 nt, Human
uucuaaagauggaaa

SEQ ID NO: 2041260 - RNA, 22 nt, Human
uuaggccaaaaaaauguaagau

SEQ ID NO: 2041261 - RNA, 20 nt, Human
uguuucauauugaugugugu

SEQ ID NO: 2041262 - RNA, 12 nt, Human
uuaaagacagag

SEQ ID NO: 2041263 - RNA, 11 nt, Human
uuaaagacaga

SEQ ID NO: 2041264 - RNA, 17 nt, Human
uggauuuuugucuugug

SEQ ID NO: 2041265 - RNA, 13 nt, Human
uggccaggcuggu

SEQ ID NO: 2041266 - RNA, 15 nt, Human
ugcugguuuuucagu

SEQ ID NO: 2041267 - RNA, 12 nt, Human
ugcugguuuuuc

SEQ ID NO: 2041268 - RNA, 18 nt, Human
ugcugguuuuucaguuuu

SEQ ID NO: 2041269 - RNA, 16 nt, Human
ugcugguuuuucaguu

SEQ ID NO: 2041270 - RNA, 18 nt, Human
ugaacauugcaauagaaa

SEQ ID NO: 2041271 - RNA, 12 nt, Human
ucuuguguuucu

SEQ ID NO: 2041272 - RNA, 20 nt, Human
ucgugguaggacuguagaaa

SEQ ID NO: 2041273 - RNA, 15 nt, Human
ucgugguaggacugu

SEQ ID NO: 2041274 - RNA, 14 nt, Human
ucgugguaggacug

SEQ ID NO: 2041275 - RNA, 14 nt, Human
uccuuagaagugga

SEQ ID NO: 2041276 - RNA, 15 nt, Human
uauugcuugcacaaa

SEQ ID NO: 2041277 - RNA, 22 nt, Human
uauugcagcgauuaauaacagg

SEQ ID NO: 2041278 - RNA, 15 nt, Human
uauuaaguuguuaau

SEQ ID NO: 2041279 - RNA, 18 nt, Human
uauguugguagauucuaa

SEQ ID NO: 2041280 - RNA, 18 nt, Human
uauacgauaaauaacuuu

SEQ ID NO: 2041281 - RNA, 23 nt, Human
uauauaaauuuuuuuuguuucau

SEQ ID NO: 2041282 - RNA, 23 nt, Human
uaugauuuuuaaagaaaaguuuu

SEQ ID NO: 2041283 - RNA, 12 nt, Human
uaugauuuuuaa

SEQ ID NO: 2041284 - RNA, 12 nt, Human
uaugaauaacau

SEQ ID NO: 2041285 - RNA, 14 nt, Human
guggccaaguucuu

SEQ ID NO: 2041286 - RNA, 22 nt, Human
guggaacguuuuuccuguucuu

SEQ ID NO: 2041287 - RNA, 16 nt, Human
gugagcuccuaagcca

SEQ ID NO: 2041288 - RNA, 18 nt, Human
gugaaucacguaaagcua

SEQ ID NO: 2041289 - RNA, 16 nt, Human
gugaaucacguaaagc

SEQ ID NO: 2041290 - RNA, 16 nt, Human
gugauuuugcuguaga

SEQ ID NO: 2041291 - RNA, 13 nt, Human
gugauucuccugc

SEQ ID NO: 2041292 - RNA, 13 nt, Human
gucucgugguagg

SEQ ID NO: 2041293 - RNA, 17 nt, Human
gucauaacuagaacuga

SEQ ID NO: 2041294 - RNA, 22 nt, Human
gucauaacuagaacugaauuuu

SEQ ID NO: 2041295 - RNA, 14 nt, Human
ggggcugccagggg

SEQ ID NO: 2041296 - RNA, 20 nt, Human
ggguuucaccauguuggcca

SEQ ID NO: 2041297 - RNA, 14 nt, Human
ggugaacauugcaa

SEQ ID NO: 2041298 - RNA, 19 nt, Human
guaagaucguucucugccu

SEQ ID NO: 2041299 - RNA, 15 nt, Human
guaaaagacuuuuuu

SEQ ID NO: 2041300 - RNA, 14 nt, Human
guacagucuuguau

SEQ ID NO: 2041301 - RNA, 13 nt, Human
guacagucuugua

SEQ ID NO: 2041302 - RNA, 16 nt, Human
guacagucuuguauua

SEQ ID NO: 2041303 - RNA, 13 nt, Human
guacaguuuuuau

SEQ ID NO: 2041304 - RNA, 12 nt, Human
guacaguuuuua

SEQ ID NO: 2041305 - RNA, 20 nt, Human
guagaaaagggaacugaaca

SEQ ID NO: 2041306 - RNA, 18 nt, Human
gccucagccuccugagua

SEQ ID NO: 2041307 - RNA, 16 nt, Human
gccucagccuccugag

SEQ ID NO: 2041308 - RNA, 20 nt, Human
ggagugcaaugacacagucu

SEQ ID NO: 2041309 - RNA, 15 nt, Human
gaguggguugauuuc

SEQ ID NO: 2041310 - RNA, 20 nt, Human
gagguuucucaaagaaauuu

SEQ ID NO: 2041311 - RNA, 18 nt, Human
gauuacaggcaugugcca

SEQ ID NO: 2041312 - RNA, 16 nt, Human
gauuuugcuguagaag

SEQ ID NO: 2041313 - RNA, 20 nt, Human
gauuacagggaugagccacc

SEQ ID NO: 2041314 - RNA, 18 nt, Human
gauuacagggaugagcca

SEQ ID NO: 2041315 - RNA, 21 nt, Human
gagccagcagccuggcucucc

SEQ ID NO: 2041316 - RNA, 19 nt, Human
cuggcaguggaacuaagaa

SEQ ID NO: 2041317 - RNA, 18 nt, Human
cuguggccaaguucuuag

SEQ ID NO: 2041318 - RNA, 16 nt, Human
cuguggccaaguucuu

SEQ ID NO: 2041319 - RNA, 20 nt, Human
cuucuccuuagaaguggaag

SEQ ID NO: 2041320 - RNA, 19 nt, Human
gaaaaguuuuguaaauuuc

SEQ ID NO: 2041321 - RNA, 13 nt, Human
ccugccucagccu

SEQ ID NO: 2041322 - RNA, 22 nt, Human
cuccaaguccacaguggaacca

SEQ ID NO: 2041323 - RNA, 15 nt, Human
ccuacaguguacagu

SEQ ID NO: 2041324 - RNA, 20 nt, Human
ccuacaguguacagucuugu

SEQ ID NO: 2041325 - RNA, 16 nt, Human
ccuacaguguacaguc

SEQ ID NO: 2041326 - RNA, 23 nt, Human
ccagagccucaaaugagaaaaug

SEQ ID NO: 2041327 - RNA, 20 nt, Human
ccagagccucaaaugagaaa

SEQ ID NO: 2041328 - RNA, 14 nt, Human
ccaggcuggucuca

SEQ ID NO: 2041329 - RNA, 19 nt, Human
accuguggccaaguucuua

SEQ ID NO: 2041330 - RNA, 18 nt, Human
accuguggccaaguucuu

SEQ ID NO: 2041331 - RNA, 14 nt, Human
acuaaucuuucugc

SEQ ID NO: 2041332 - RNA, 17 nt, Human
acuauugcuugcacaaa

SEQ ID NO: 2041333 - RNA, 13 nt, Human
acuucugccucuu

SEQ ID NO: 2041334 - RNA, 21 nt, Human
acugaccaauauuguacaguu

SEQ ID NO: 2041335 - RNA, 20 nt, Human
acugaccaauauuguacagu

SEQ ID NO: 2041336 - RNA, 22 nt, Human
acugaccaauauuguacaguuu

SEQ ID NO: 2041337 - RNA, 17 nt, Human
acaguguacagucuugu

SEQ ID NO: 2041338 - RNA, 15 nt, Human
acaguguacagucuu

SEQ ID NO: 2041339 - RNA, 18 nt, Human
acaguguacagucuugua

SEQ ID NO: 2041340 - RNA, 13 nt, Human
acaguguacaguc

SEQ ID NO: 2041341 - RNA, 12 nt, Human
acaguguacagu

SEQ ID NO: 2041342 - RNA, 14 nt, Human
aacuuacuuagugu

SEQ ID NO: 2041343 - RNA, 19 nt, Human
aauccaccugccucggccu

SEQ ID NO: 2041344 - RNA, 18 nt, Human
aauccaccugccucggcc

SEQ ID NO: 2041345 - RNA, 16 nt, Human
aauagaaauccaauug

SEQ ID NO: 2041346 - RNA, 17 nt, Human
aauagaaauggggaacu

SEQ ID NO: 2041347 - RNA, 22 nt, Human
aaguucuuaguugcuguauguc

SEQ ID NO: 2041348 - RNA, 15 nt, Human
aaguucuuaguugcu

SEQ ID NO: 2041349 - RNA, 18 nt, Human
aaagcccaaagugguaua

SEQ ID NO: 2041350 - RNA, 16 nt, Human
aggaccuguggccaag

SEQ ID NO: 2041351 - RNA, 22 nt, Human
aggcuggucucaaacuccugac

SEQ ID NO: 2041352 - RNA, 11 nt, Human
agacagagucu

SEQ ID NO: 2041353 - RNA, 17 nt, Human
agagccucaaaugagaa

SEQ ID NO: 2041354 - RNA, 14 nt, Human
agagccucaaauga

SEQ ID NO: 2041355 - RNA, 22 nt, Human
agacugaccaauauuguacagu

SEQ ID NO: 2041356 - RNA, 16 nt, Human
auaugcaguuuuccuu

SEQ ID NO: 2041357 - RNA, 22 nt, Human
cucagccuccugaguagcugga

SEQ ID NO: 2041358 - RNA, 14 nt, Human
cucagccuccugag

SEQ ID NO: 2041359 - RNA, 17 nt, Human
cggcucuggccuccaag

SEQ ID NO: 2041360 - RNA, 17 nt, Human
cuacaguguacagucuu

SEQ ID NO: 2041361 - RNA, 16 nt, Human
cuacaguguacagucu

SEQ ID NO: 2041362 - RNA, 15 nt, Human
cuacaguguacaguc

SEQ ID NO: 2041363 - RNA, 20 nt, Human
cuacaguguacagucuugua

SEQ ID NO: 2041364 - RNA, 15 nt, Human
cuagaacugaauuuu

SEQ ID NO: 2041365 - RNA, 23 nt, Human
cuagaaaugauccccagcuguuu

SEQ ID NO: 2041366 - RNA, 20 nt, Human
ccuucugaaaaaguauccug

SEQ ID NO: 2041367 - RNA, 21 nt, Human
ccuccaaguccacaguggaac

SEQ ID NO: 2041368 - RNA, 18 nt, Human
ccuccaaguccacagugg

SEQ ID NO: 2041369 - RNA, 14 nt, Human
ccucagccuccuga

SEQ ID NO: 2041370 - RNA, 19 nt, Human
ccugaguagcuggauuaca

SEQ ID NO: 2041371 - RNA, 15 nt, Human
ccugaguagcuggau

SEQ ID NO: 2041372 - RNA, 20 nt, Human
ccugaguagcuggauuacag

SEQ ID NO: 2041373 - RNA, 22 nt, Human
ccaaagugcugggauuacaggg

SEQ ID NO: 2041374 - RNA, 22 nt, Human
ccaaagugguauagaaaugcug

SEQ ID NO: 2041375 - RNA, 19 nt, Human
ccaaagugguauagaaaug

SEQ ID NO: 2041376 - RNA, 17 nt, Human
caaguccacaguggaac

SEQ ID NO: 2041377 - RNA, 23 nt, Human
caccugccucggccucccaaagu

SEQ ID NO: 2041378 - RNA, 17 nt, Human
caccuacaguguacagu

SEQ ID NO: 2041379 - RNA, 16 nt, Human
caccuacaguguacag

SEQ ID NO: 2041380 - RNA, 13 nt, Human
caccuacagugua

SEQ ID NO: 2041381 - RNA, 20 nt, Human
caccuacaguguacagucuu

SEQ ID NO: 2041382 - RNA, 19 nt, Human
auuagcauuugucaacaaa

SEQ ID NO: 2041383 - RNA, 11 nt, Human
gcuagaaauga

SEQ ID NO: 2041384 - RNA, 15 nt, Human
gccauguguuccaag

SEQ ID NO: 2041385 - RNA, 16 nt, Human
gccauguguuccaagg

SEQ ID NO: 2041386 - RNA, 17 nt, Human
ggaacugaacauuccag

SEQ ID NO: 2041387 - RNA, 22 nt, Human
gcuuacaagccagcuggagaaa

SEQ ID NO: 2041388 - RNA, 19 nt, Human
gcuuacaagccagcuggag

SEQ ID NO: 2041389 - RNA, 13 nt, Human
gcuuacaagccag

SEQ ID NO: 2041390 - RNA, 23 nt, Human
ggccuccaaguccacaguggaac

SEQ ID NO: 2041391 - RNA, 19 nt, Human
gguuucaccauguuggcca

SEQ ID NO: 2041392 - RNA, 13 nt, Human
aaaaugucuuuau

SEQ ID NO: 2041393 - RNA, 17 nt, Human
gauacgacaacuugcac

SEQ ID NO: 2041394 - RNA, 18 nt, Human
gauaugcaguuuuccuua

SEQ ID NO: 2041395 - RNA, 23 nt, Human
cuuuuuuuuuuuuuaaagacaga

SEQ ID NO: 2041396 - RNA, 22 nt, Human
cuuuuuuuuuuuuuaaagacag

SEQ ID NO: 2041397 - RNA, 13 nt, Human
cuggcucaucucu

SEQ ID NO: 2041398 - RNA, 16 nt, Human
uugaugugugucuagg

SEQ ID NO: 2041399 - RNA, 19 nt, Human
uugcacaaaccaauuaaac

SEQ ID NO: 2041400 - RNA, 17 nt, Human
augagaaaaugucuuua

SEQ ID NO: 2041401 - RNA, 13 nt, Human
augcugguuuuuc

SEQ ID NO: 2041402 - RNA, 22 nt, Human
uuuaugggucagaguuccgacu

SEQ ID NO: 2041403 - RNA, 15 nt, Human
augcaguuuuccuua

SEQ ID NO: 2041404 - RNA, 16 nt, Human
augauuuuuaaagaaa

SEQ ID NO: 2041405 - RNA, 14 nt, Human
augauuuuuaaaga

SEQ ID NO: 2041406 - RNA, 16 nt, Human
auauaaaagacugacc

SEQ ID NO: 2041407 - RNA, 12 nt, Human
auugcaauagaa

SEQ ID NO: 2041408 - RNA, 19 nt, Human
auuuacccuucuuuucuga

SEQ ID NO: 2041409 - RNA, 17 nt, Human
uuuucagauauaaaaga

SEQ ID NO: 2041410 - RNA, 21 nt, Human
uuuucagauauaaaagacuga

SEQ ID NO: 2041411 - RNA, 19 nt, Human
uuuucagauauaaaagacu

SEQ ID NO: 2041412 - RNA, 22 nt, Human
uuuucagauauaaaagacugac

SEQ ID NO: 2041413 - RNA, 22 nt, Human
uuuuaaguuacacauuuuucag

SEQ ID NO: 2041414 - RNA, 21 nt, Human
uuuuaaguuacacauuuuuca

SEQ ID NO: 2041415 - RNA, 16 nt, Human
auguuggccaggcugg

SEQ ID NO: 2041416 - RNA, 21 nt, Human
uuugcuguagaagauggcacu

SEQ ID NO: 2041417 - RNA, 13 nt, Human
uuugcuguagaag

SEQ ID NO: 2041418 - RNA, 15 nt, Human
uuugcuucaaaaaca

SEQ ID NO: 2041419 - RNA, 18 nt, Human
auaaucucuccauucccg

SEQ ID NO: 2041420 - RNA, 15 nt, Human
aguuuaauugacuua

SEQ ID NO: 2041421 - RNA, 14 nt, Human
aguuuaauugacuu

SEQ ID NO: 2041422 - RNA, 18 nt, Human
aguuuaauugacuuauuu

SEQ ID NO: 2041423 - RNA, 21 nt, Human
uuaauugacuuauuuauauaa

SEQ ID NO: 2041424 - RNA, 15 nt, Human
aguuuuguaaauuuc

SEQ ID NO: 2041425 - RNA, 12 nt, Human
aguuuuguaaau

SEQ ID NO: 2041426 - RNA, 15 nt, Human
aguuuuuauugcuug

SEQ ID NO: 2041427 - RNA, 16 nt, Human
aguggaaccagcccag

SEQ ID NO: 2041428 - RNA, 21 nt, Human
uguugcccaggcuggagugca

SEQ ID NO: 2041429 - RNA, 14 nt, Human
uguugcccaggcug

SEQ ID NO: 2041430 - RNA, 15 nt, Human
uguugcccaggcugg

SEQ ID NO: 2041431 - RNA, 22 nt, Human
agugauucuccugccucagccu

SEQ ID NO: 2041432 - RNA, 16 nt, Human
agugcaaugacacagu

SEQ ID NO: 2041433 - RNA, 18 nt, Human
agugcaaugacacagucu

SEQ ID NO: 2041434 - RNA, 20 nt, Human
ugugucuaggcaggaccugu

SEQ ID NO: 2041435 - RNA, 19 nt, Human
ugugucuaggcaggaccug

SEQ ID NO: 2041436 - RNA, 17 nt, Human
agugcugggauuacagg

SEQ ID NO: 2041437 - RNA, 20 nt, Human
uguaagaucguucucugccu

SEQ ID NO: 2041438 - RNA, 19 nt, Human
uguaagaucguucucugcc

SEQ ID NO: 2041439 - RNA, 14 nt, Human
aguaauccaccugc

SEQ ID NO: 2041440 - RNA, 17 nt, Human
ugguacucauuaaaaaa

SEQ ID NO: 2041441 - RNA, 18 nt, Human
uggucucaaacuccugac

SEQ ID NO: 2041442 - RNA, 21 nt, Human
ugcuucaaaaacauucuuaca

SEQ ID NO: 2041443 - RNA, 13 nt, Human
ugcuucaaaaaca

SEQ ID NO: 2041444 - RNA, 13 nt, Human
uggauuggauuug

SEQ ID NO: 2041445 - RNA, 12 nt, Human
agccucaucucu

SEQ ID NO: 2041446 - RNA, 19 nt, Human
ugauucuccugccucagcc

SEQ ID NO: 2041447 - RNA, 11 nt, Human
agcuagaaaug

SEQ ID NO: 2041448 - RNA, 12 nt, Human
agcuagaaauga

SEQ ID NO: 2041449 - RNA, 13 nt, Human
ugaguagcuggau

SEQ ID NO: 2041450 - RNA, 19 nt, Human
ugauauguugguagauucu

SEQ ID NO: 2041451 - RNA, 14 nt, Human
agcaagauuucaga

SEQ ID NO: 2041452 - RNA, 23 nt, Human
ugacacagucuuggcucacugca

SEQ ID NO: 2041453 - RNA, 22 nt, Human
ugacacagucuuggcucacugc

SEQ ID NO: 2041454 - RNA, 21 nt, Human
ucuuuauuaaauguagaaagu

SEQ ID NO: 2041455 - RNA, 17 nt, Human
ucuuuauuaaauguaga

SEQ ID NO: 2041456 - RNA, 16 nt, Human
ucuuuaugauuuuuaa

SEQ ID NO: 2041457 - RNA, 22 nt, Human
ucuuuggugaacauugcaauag

SEQ ID NO: 2041458 - RNA, 16 nt, Human
ucuuuggugaacauug

SEQ ID NO: 2041459 - RNA, 21 nt, Human
ucuuucugcagaaacagaaag

SEQ ID NO: 2041460 - RNA, 22 nt, Human
ugaaaaaguauccugcuucuga

SEQ ID NO: 2041461 - RNA, 21 nt, Human
agaacugaauuuugucuuuau

SEQ ID NO: 2041462 - RNA, 21 nt, Human
agaaaugcugguuuuucaguu

SEQ ID NO: 2041463 - RNA, 20 nt, Human
agaaaugcugguuuuucagu

SEQ ID NO: 2041464 - RNA, 14 nt, Human
ucucuccauucccg

SEQ ID NO: 2041465 - RNA, 17 nt, Human
ucucgcucuguugccca

SEQ ID NO: 2041466 - RNA, 21 nt, Human
ucuccuuagaaguggaaguag

SEQ ID NO: 2041467 - RNA, 15 nt, Human
ucuccuuagaagugg

SEQ ID NO: 2041468 - RNA, 23 nt, Human
acuuugaggguguauauuuucug

SEQ ID NO: 2041469 - RNA, 21 nt, Human
ucgcucuguugcccaggcugg

SEQ ID NO: 2041470 - RNA, 13 nt, Human
ucguucucugccu

SEQ ID NO: 2041471 - RNA, 18 nt, Human
ucacugcaacuucugccu

SEQ ID NO: 2041472 - RNA, 17 nt, Human
ucacugcaacuucugcc

SEQ ID NO: 2041473 - RNA, 13 nt, Human
ucauaacuagaac

SEQ ID NO: 2041474 - RNA, 15 nt, Human
ucauaacuagaacug

SEQ ID NO: 2041475 - RNA, 18 nt, Human
acauuuuacuuuuuccug

SEQ ID NO: 2041476 - RNA, 21 nt, Human
acauuuuucagauauaaaaga

SEQ ID NO: 2041477 - RNA, 19 nt, Human
ucaaguaauccaccugccu

SEQ ID NO: 2041478 - RNA, 17 nt, Human
ucaagcaagauuucaga

SEQ ID NO: 2041479 - RNA, 16 nt, Human
ucacagccacuuggga

SEQ ID NO: 2041480 - RNA, 20 nt, Human
ucccaaagugcugggauuac

SEQ ID NO: 2041481 - RNA, 23 nt, Human
acuagaacugaauuuugucuuua

SEQ ID NO: 2041482 - RNA, 19 nt, Human
acuagaacugaauuuuguc

SEQ ID NO: 2041483 - RNA, 18 nt, Human
acuagaacugaauuuugu

SEQ ID NO: 2041484 - RNA, 17 nt, Human
acuagaacugaauuuug

SEQ ID NO: 2041485 - RNA, 16 nt, Human
acuagaacugaauuuu

SEQ ID NO: 2041486 - RNA, 15 nt, Human
uaggcaggaccugug

SEQ ID NO: 2041487 - RNA, 14 nt, Human
uaggcaggaccugu

SEQ ID NO: 2041488 - RNA, 16 nt, Human
acagaaagguuuucuu

SEQ ID NO: 2041489 - RNA, 21 nt, Human
uaugucucgugguaggacugu

SEQ ID NO: 2041490 - RNA, 20 nt, Human
aaugagaaaaugucuuuauu

SEQ ID NO: 2041491 - RNA, 18 nt, Human
aaugcugguuuuucaguu

SEQ ID NO: 2041492 - RNA, 21 nt, Human
uaaguuacacauuuuucagau

SEQ ID NO: 2041493 - RNA, 20 nt, Human
aaucacguaaagcuagaaau

SEQ ID NO: 2041494 - RNA, 21 nt, Human
aaucacguaaagcuagaaaug

SEQ ID NO: 2041495 - RNA, 15 nt, Human
aaucacguaaagcua

SEQ ID NO: 2041496 - RNA, 18 nt, Human
aauagcgucauaacuaga

SEQ ID NO: 2041497 - RNA, 18 nt, Human
aagacuuccagagccuca

SEQ ID NO: 2041498 - RNA, 16 nt, Human
aagacuuccagagccu

SEQ ID NO: 2041499 - RNA, 22 nt, Human
aagacgugauuuugcuguagaa

SEQ ID NO: 2041500 - RNA, 16 nt, Human
aagacgugauuuugcu

SEQ ID NO: 2041501 - RNA, 23 nt, Human
aagacgugauuuugcuguagaag

SEQ ID NO: 2041502 - RNA, 17 nt, Human
aagaucguucucugccu

SEQ ID NO: 2041503 - RNA, 16 nt, Human
aagaucguucucugcc

SEQ ID NO: 2041504 - RNA, 13 nt, Human
uaaaagacuuuuu

SEQ ID NO: 2041505 - RNA, 21 nt, Human
aaguaauccaccugccucggc

SEQ ID NO: 2041506 - RNA, 18 nt, Human
aagugagacuuugagggu

SEQ ID NO: 2041507 - RNA, 14 nt, Human
guuuuucaguuuuc

SEQ ID NO: 2041508 - RNA, 19 nt, Human
guuuuuccuguucuuaaga

SEQ ID NO: 2041509 - RNA, 18 nt, Human
guuucucaaagaaauuuc

SEQ ID NO: 2041510 - RNA, 17 nt, Human
guuucucaaagaaauuu

SEQ ID NO: 2041511 - RNA, 14 nt, Human
guuucucaaagaaa

SEQ ID NO: 2041512 - RNA, 13 nt, Human
gucauaacuagaa

SEQ ID NO: 2041513 - RNA, 22 nt, Human
aaauguaagaucguucucugcc

SEQ ID NO: 2041514 - RNA, 14 nt, Human
aaauguaagaucgu

SEQ ID NO: 2041515 - RNA, 22 nt, Human
guauauuuguauuuaaaugaaa

SEQ ID NO: 2041516 - RNA, 16 nt, Human
gucuuuggugaacauu

SEQ ID NO: 2041517 - RNA, 22 nt, Human
aaccucgagguuucucaaagaa

SEQ ID NO: 2041518 - RNA, 21 nt, Human
aaccucgagguuucucaaaga

SEQ ID NO: 2041519 - RNA, 22 nt, Human
aacuucuccccugguagaaaga

SEQ ID NO: 2041520 - RNA, 19 nt, Human
cacaguggaaccagcccag

SEQ ID NO: 2041521 - RNA, 13 nt, Human
cacaguggaacca

SEQ ID NO: 2041522 - RNA, 19 nt, Human
caauagauauuuaccuuuu

SEQ ID NO: 2041523 - RNA, 19 nt, Human
caaagaaauuuccacucag

SEQ ID NO: 2041524 - RNA, 18 nt, Human
caaagaaauuuccacuca

SEQ ID NO: 2041525 - RNA, 12 nt, Human
caaagaaauuuc

SEQ ID NO: 2041526 - RNA, 20 nt, Human
uguguuuuuaauaaagacag

SEQ ID NO: 2041527 - RNA, 15 nt, Human
uguguuuuuaauaaa

SEQ ID NO: 2041528 - RNA, 22 nt, Human
ugugugucuaggcaggaccugu

SEQ ID NO: 2041529 - RNA, 18 nt, Human
uuaaagaaaaguuuugua

SEQ ID NO: 2041530 - RNA, 15 nt, Human
uuacacauuuuucag

SEQ ID NO: 2041531 - RNA, 23 nt, Human
uuacacauuuuucagauauaaaa

SEQ ID NO: 2041532 - RNA, 17 nt, Human
uuacacauuuuucagau

SEQ ID NO: 2041533 - RNA, 15 nt, Human
uuaaauguagaaagu

SEQ ID NO: 2041534 - RNA, 21 nt, Human
uguacagucuuguauuaaguu

SEQ ID NO: 2041535 - RNA, 13 nt, Human
ugcccaggcugga

SEQ ID NO: 2041536 - RNA, 20 nt, Human
ugcccaggcuggagugcaau

SEQ ID NO: 2041537 - RNA, 18 nt, Human
ugcccaggcuggagugca

SEQ ID NO: 2041538 - RNA, 21 nt, Human
ugggauuacagggaugagcca

SEQ ID NO: 2041539 - RNA, 16 nt, Human
ugguauagaaaugcug

SEQ ID NO: 2041540 - RNA, 14 nt, Human
ugguauagaaaugc

SEQ ID NO: 2041541 - RNA, 22 nt, Human
ugguauagaaaugcugguuuuu

SEQ ID NO: 2041542 - RNA, 13 nt, Human
ugguauagaaaug

SEQ ID NO: 2041543 - RNA, 21 nt, Human
uggaacguuuuuccuguucuu

SEQ ID NO: 2041544 - RNA, 22 nt, Human
ucagcaccuacaguguacaguc

SEQ ID NO: 2041545 - RNA, 21 nt, Human
ucagcaccuacaguguacagu

SEQ ID NO: 2041546 - RNA, 20 nt, Human
ucagcaccuacaguguacag

SEQ ID NO: 2041547 - RNA, 20 nt, Human
ucugccucacauagcuuaca

SEQ ID NO: 2041548 - RNA, 14 nt, Human
ugacucuuggcaca

SEQ ID NO: 2041549 - RNA, 19 nt, Human
ugacucuuggcacagcaug

SEQ ID NO: 2041550 - RNA, 17 nt, Human
ugaaucacguaaagcua

SEQ ID NO: 2041551 - RNA, 23 nt, Human
ugaaucacguaaagcuagaaaug

SEQ ID NO: 2041552 - RNA, 11 nt, Human
uauagaaaugc

SEQ ID NO: 2041553 - RNA, 15 nt, Human
uaagccaugggagac

SEQ ID NO: 2041554 - RNA, 11 nt, Human
uaauguuuccu

SEQ ID NO: 2041555 - RNA, 15 nt, Human
uaaauguagaaagug

SEQ ID NO: 2041556 - RNA, 22 nt, Human
uaaagaaaaguuuuguaaauuu

SEQ ID NO: 2041557 - RNA, 16 nt, Human
uaaagaaaaguuuugu

SEQ ID NO: 2041558 - RNA, 17 nt, Human
guuuuuaauaaagacag

SEQ ID NO: 2041559 - RNA, 15 nt, Human
guuguuaauaaaagu

SEQ ID NO: 2041560 - RNA, 14 nt, Human
guuuuguaaauuuc

SEQ ID NO: 2041561 - RNA, 12 nt, Human
guuuuguaaauu

SEQ ID NO: 2041562 - RNA, 24 nt, Human
guuuucaggaguggguugauuuca

SEQ ID NO: 2041563 - RNA, 16 nt, Human
guuucuuuaguuuuug

SEQ ID NO: 2041564 - RNA, 20 nt, Human
guuggauuuuugucuugugu

SEQ ID NO: 2041565 - RNA, 14 nt, Human
guuggauuuuuguc

SEQ ID NO: 2041566 - RNA, 23 nt, Human
guugauuucagcaccuacagugu

SEQ ID NO: 2041567 - RNA, 14 nt, Human
guucuaaagaugga

SEQ ID NO: 2041568 - RNA, 20 nt, Human
guucuaaagauggaaaaacc

SEQ ID NO: 2041569 - RNA, 17 nt, Human
guucuaaagauggaaaa

SEQ ID NO: 2041570 - RNA, 23 nt, Human
guucuaaagauggaaaaaccacc

SEQ ID NO: 2041571 - RNA, 12 nt, Human
gugggcuaagca

SEQ ID NO: 2041572 - RNA, 14 nt, Human
gugguauagaaaug

SEQ ID NO: 2041573 - RNA, 22 nt, Human
guguacagucuuguauuaaguu

SEQ ID NO: 2041574 - RNA, 16 nt, Human
guguacagucuuguau

SEQ ID NO: 2041575 - RNA, 13 nt, Human
guguacagucuug

SEQ ID NO: 2041576 - RNA, 17 nt, Human
guuacacauuuuucaga

SEQ ID NO: 2041577 - RNA, 16 nt, Human
guuacacauuuuucag

SEQ ID NO: 2041578 - RNA, 19 nt, Human
guuaaacuuacuuaguguu

SEQ ID NO: 2041579 - RNA, 19 nt, Human
gugucuaggcaggaccugu

SEQ ID NO: 2041580 - RNA, 19 nt, Human
gucucgugguaggacugua

SEQ ID NO: 2041581 - RNA, 22 nt, Human
guauuaaguuguuaauaaaagu

SEQ ID NO: 2041582 - RNA, 21 nt, Human
guccacaguggaaccagccca

SEQ ID NO: 2041583 - RNA, 19 nt, Human
guccacaguggaaccagcc

SEQ ID NO: 2041584 - RNA, 16 nt, Human
guccacaguggaacca

SEQ ID NO: 2041585 - RNA, 14 nt, Human
guauagaaaugcug

SEQ ID NO: 2041586 - RNA, 22 nt, Human
guauagaaaugcugguuuuuca

SEQ ID NO: 2041587 - RNA, 15 nt, Human
guauagaaaugcugg

SEQ ID NO: 2041588 - RNA, 23 nt, Human
guauagaaaugcugguuuuucag

SEQ ID NO: 2041589 - RNA, 14 nt, Human
uuuuaaagaaaagu

SEQ ID NO: 2041590 - RNA, 15 nt, Human
uuuuaaagaaaaguu

SEQ ID NO: 2041591 - RNA, 22 nt, Human
uuuggugaacauugcaauagaa

SEQ ID NO: 2041592 - RNA, 23 nt, Human
uuuggugaacauugcaauagaaa

SEQ ID NO: 2041593 - RNA, 13 nt, Human
uuuuuuguuucau

SEQ ID NO: 2041594 - RNA, 12 nt, Human
uuuuuuguuuca

SEQ ID NO: 2041595 - RNA, 17 nt, Human
uuuuuaaagacagaguc

SEQ ID NO: 2041596 - RNA, 20 nt, Human
uuuuuaaagaaaaguuuugu

SEQ ID NO: 2041597 - RNA, 12 nt, Human
uuuuuaaagaaa

SEQ ID NO: 2041598 - RNA, 13 nt, Human
uuuugucuugugu

SEQ ID NO: 2041599 - RNA, 13 nt, Human
gccagcuggagaa

SEQ ID NO: 2041600 - RNA, 15 nt, Human
gcccaggcuggagug

SEQ ID NO: 2041601 - RNA, 15 nt, Human
gauuuuugucuugug

SEQ ID NO: 2041602 - RNA, 22 nt, Human
gauuugucuuuggugaacauug

SEQ ID NO: 2041603 - RNA, 20 nt, Human
gauuugucuuuggugaacau

SEQ ID NO: 2041604 - RNA, 14 nt, Human
gauccccagcuguu

SEQ ID NO: 2041605 - RNA, 21 nt, Human
gauaaauaacuuuuuuuuaag

SEQ ID NO: 2041606 - RNA, 16 nt, Human
gauaaauaacuuuuuu

SEQ ID NO: 2041607 - RNA, 15 nt, Human
gcacguauuuuaaua

SEQ ID NO: 2041608 - RNA, 14 nt, Human
gcacguauuuuaau

SEQ ID NO: 2041609 - RNA, 19 nt, Human
gaaauuuccacucaggucu

SEQ ID NO: 2041610 - RNA, 20 nt, Human
gaaauuuccacucaggucug

SEQ ID NO: 2041611 - RNA, 24 nt, Human
cuuggcucacugcaacuucugccu

SEQ ID NO: 2041612 - RNA, 17 nt, Human
cuuguauuaaguuguua

SEQ ID NO: 2041613 - RNA, 13 nt, Human
cuuguauuaaguu

SEQ ID NO: 2041614 - RNA, 23 nt, Human
cuuguauuaaguuguuaauaaaa

SEQ ID NO: 2041615 - RNA, 22 nt, Human
cuuguauuaaguuguuaauaaa

SEQ ID NO: 2041616 - RNA, 19 nt, Human
cuugcacguauuuuaauag

SEQ ID NO: 2041617 - RNA, 20 nt, Human
cuguaugucucgugguagga

SEQ ID NO: 2041618 - RNA, 19 nt, Human
cucuuggguucaagugauu

SEQ ID NO: 2041619 - RNA, 21 nt, Human
cugaccaauauuguacaguuu

SEQ ID NO: 2041620 - RNA, 20 nt, Human
cugaccaauauuguacaguu

SEQ ID NO: 2041621 - RNA, 19 nt, Human
cugaccaauauuguacagu

SEQ ID NO: 2041622 - RNA, 18 nt, Human
cugaccaauauuguacag

SEQ ID NO: 2041623 - RNA, 15 nt, Human
cugaccaauauugua

SEQ ID NO: 2041624 - RNA, 22 nt, Human
cucccaaagugcugggauuaca

SEQ ID NO: 2041625 - RNA, 16 nt, Human
cgggguggauuggauu

SEQ ID NO: 2041626 - RNA, 15 nt, Human
cguggaacguuuuuc

SEQ ID NO: 2041627 - RNA, 20 nt, Human
cguggaacguuuuuccuguu

SEQ ID NO: 2041628 - RNA, 20 nt, Human
cucacauagcuuacaagcca

SEQ ID NO: 2041629 - RNA, 16 nt, Human
cuaggcaggaccugug

SEQ ID NO: 2041630 - RNA, 15 nt, Human
cuaggcaggaccugu

SEQ ID NO: 2041631 - RNA, 23 nt, Human
cuaagcacgggccauaugaauaa

SEQ ID NO: 2041632 - RNA, 20 nt, Human
cuaagcacgggccauaugaa

SEQ ID NO: 2041633 - RNA, 11 nt, Human
cccuucuuuuu

SEQ ID NO: 2041634 - RNA, 23 nt, Human
ccucccaaagugcugggauuaca

SEQ ID NO: 2041635 - RNA, 23 nt, Human
ccauguuggccaggcuggucuca

SEQ ID NO: 2041636 - RNA, 18 nt, Human
ccaauauuguacaguuuu

SEQ ID NO: 2041637 - RNA, 16 nt, Human
ccaauauuguacaguu

SEQ ID NO: 2041638 - RNA, 15 nt, Human
ccaauauuguacagu

SEQ ID NO: 2041639 - RNA, 14 nt, Human
ccaauauuguacag

SEQ ID NO: 2041640 - RNA, 14 nt, Human
cauugcaauagaaa

SEQ ID NO: 2041641 - RNA, 15 nt, Human
cauugcaauagaaau

SEQ ID NO: 2041642 - RNA, 13 nt, Human
cauugcaauagaa

SEQ ID NO: 2041643 - RNA, 16 nt, Human
caguggaaccagccca

SEQ ID NO: 2041644 - RNA, 15 nt, Human
caguguacagucuug

SEQ ID NO: 2041645 - RNA, 12 nt, Human
caguguacaguc

SEQ ID NO: 2041646 - RNA, 18 nt, Human
caguguacagucuuguau

SEQ ID NO: 2041647 - RNA, 17 nt, Human
caguguacagucuugua

SEQ ID NO: 2041648 - RNA, 15 nt, Human
caguuuuuauugcuu

SEQ ID NO: 2041649 - RNA, 13 nt, Human
cauaacuagaacu

SEQ ID NO: 2041650 - RNA, 15 nt, Human
aaagcccaaaguggu

SEQ ID NO: 2041651 - RNA, 22 nt, Human
aaaugcugguuuuucaguuuuc

SEQ ID NO: 2041652 - RNA, 12 nt, Human
aagacagagucu

SEQ ID NO: 2041653 - RNA, 13 nt, Human
aagcuagaaauga

SEQ ID NO: 2041654 - RNA, 12 nt, Human
aauaaagacagg

SEQ ID NO: 2041655 - RNA, 11 nt, Human
aauaaagacag

SEQ ID NO: 2041656 - RNA, 21 nt, Human
aauuuccacucaggucuguuu

SEQ ID NO: 2041657 - RNA, 22 nt, Human
aauuggauacgacaacuugcac

SEQ ID NO: 2041658 - RNA, 18 nt, Human
acaguggaaccagcccag

SEQ ID NO: 2041659 - RNA, 17 nt, Human
accuguggccaaguucu

SEQ ID NO: 2041660 - RNA, 20 nt, Human
acugauguaugaggaauuuc

SEQ ID NO: 2041661 - RNA, 22 nt, Human
aggcaugugccacccacccaac

SEQ ID NO: 2041662 - RNA, 12 nt, Human
agacugaccaau

SEQ ID NO: 2041663 - RNA, 21 nt, Human
agacugaccaauauuguacag

SEQ ID NO: 2041664 - RNA, 19 nt, Human
agaagauggcacuuauaac

SEQ ID NO: 2041665 - RNA, 18 nt, Human
agaagaugaaugagcaaa

SEQ ID NO: 2041666 - RNA, 15 nt, Human
agauauaaaagacug

SEQ ID NO: 2041667 - RNA, 19 nt, Human
aguuacacauuuuucagau

SEQ ID NO: 2041668 - RNA, 16 nt, Human
aguuacacauuuuuca

SEQ ID NO: 2041669 - RNA, 13 nt, Human
aguuacacauuuu

SEQ ID NO: 2041670 - RNA, 19 nt, Human
agugauucuccugccucag

SEQ ID NO: 2041671 - RNA, 22 nt, Human
cuaagaaagcccuuaggaagaa

SEQ ID NO: 2041672 - RNA, 22 nt, Human
cgcucuguugcccaggcuggag

SEQ ID NO: 2041673 - RNA, 19 nt, Human
cgcucuguugcccaggcug

SEQ ID NO: 2041674 - RNA, 16 nt, Human
cguaaagcuagaaaug

SEQ ID NO: 2041675 - RNA, 17 nt, Human
cguaaagcuagaaauga

SEQ ID NO: 2041676 - RNA, 15 nt, Human
ccucagccuccugag

SEQ ID NO: 2041677 - RNA, 16 nt, Human
ccucgagguuucucaa

SEQ ID NO: 2041678 - RNA, 11 nt, Human
caguuuuccuu

SEQ ID NO: 2041679 - RNA, 22 nt, Human
cagauauaaaagacugaccaau

SEQ ID NO: 2041680 - RNA, 15 nt, Human
auuuuuuuuguuuca

SEQ ID NO: 2041681 - RNA, 15 nt, Human
auuuauauaaauuuu

SEQ ID NO: 2041682 - RNA, 16 nt, Human
caauauuguacaguuu

SEQ ID NO: 2041683 - RNA, 15 nt, Human
caauauuguacaguu

SEQ ID NO: 2041684 - RNA, 18 nt, Human
caauauuguacaguuuuu

SEQ ID NO: 2041685 - RNA, 17 nt, Human
caauauuguacaguuuu

SEQ ID NO: 2041686 - RNA, 20 nt, Human
caauuggauacgacaacuug

SEQ ID NO: 2041687 - RNA, 17 nt, Human
gcucuggccuccaaguc

SEQ ID NO: 2041688 - RNA, 15 nt, Human
gcucuggccuccaag

SEQ ID NO: 2041689 - RNA, 14 nt, Human
gcugguuuuucagu

SEQ ID NO: 2041690 - RNA, 15 nt, Human
gcugguuuuucaguu

SEQ ID NO: 2041691 - RNA, 17 nt, Human
gcugggauuacagggau

SEQ ID NO: 2041692 - RNA, 13 nt, Human
ggccucccaaagu

SEQ ID NO: 2041693 - RNA, 18 nt, Human
aaaagggaacugaacauu

SEQ ID NO: 2041694 - RNA, 13 nt, Human
aaagcuagaaaug

SEQ ID NO: 2041695 - RNA, 11 nt, Human
aaacuccugac

SEQ ID NO: 2041696 - RNA, 11 nt, Human
gacuguagaaa

SEQ ID NO: 2041697 - RNA, 21 nt, Human
gaagggcuuggacucaagcaa

SEQ ID NO: 2041698 - RNA, 19 nt, Human
gagugcaaugacacagucu

SEQ ID NO: 2041699 - RNA, 18 nt, Human
gauucuccugccucagcc

SEQ ID NO: 2041700 - RNA, 18 nt, Human
gauguaaaagacuuuuuu

SEQ ID NO: 2041701 - RNA, 16 nt, Human
cuuuuaggccaaaaaa

SEQ ID NO: 2041702 - RNA, 18 nt, Human
cuuuuaggccaaaaaaau

SEQ ID NO: 2041703 - RNA, 15 nt, Human
cuuuggugaacauug

SEQ ID NO: 2041704 - RNA, 14 nt, Human
cugcaacuucugcc

SEQ ID NO: 2041705 - RNA, 15 nt, Human
cugcaacuucugccu

SEQ ID NO: 2041706 - RNA, 13 nt, Human
uuuguuucauauu

SEQ ID NO: 2041707 - RNA, 21 nt, Human
uuuugugaaguuuaauugacu

SEQ ID NO: 2041708 - RNA, 13 nt, Human
auuaaguuguuaa

SEQ ID NO: 2041709 - RNA, 21 nt, Human
uuuaaaugaaagugagacuuu

SEQ ID NO: 2041710 - RNA, 13 nt, Human
uuuaaaugaaagu

SEQ ID NO: 2041711 - RNA, 20 nt, Human
uuuacccuucuuuucugacu

SEQ ID NO: 2041712 - RNA, 15 nt, Human
uugcaauagaaaucc

SEQ ID NO: 2041713 - RNA, 22 nt, Human
uugcaauagaaauccaauugga

SEQ ID NO: 2041714 - RNA, 22 nt, Human
aucucuuuguucuaaagaugga

SEQ ID NO: 2041715 - RNA, 16 nt, Human
augaaagugagacuuu

SEQ ID NO: 2041716 - RNA, 14 nt, Human
uuguaaauuucucu

SEQ ID NO: 2041717 - RNA, 22 nt, Human
auauaaauuuuuuuuguuucau

SEQ ID NO: 2041718 - RNA, 17 nt, Human
auauaaauuuuuuuugu

SEQ ID NO: 2041719 - RNA, 22 nt, Human
uucagcaccuacaguguacagu

SEQ ID NO: 2041720 - RNA, 23 nt, Human
uucagcaccuacaguguacaguc

SEQ ID NO: 2041721 - RNA, 22 nt, Human
auagcuuacaagccagcuggag

SEQ ID NO: 2041722 - RNA, 20 nt, Human
uucaagugauucuccugccu

SEQ ID NO: 2041723 - RNA, 18 nt, Human
auagcgucauaacuagaa

SEQ ID NO: 2041724 - RNA, 20 nt, Human
auagcgucauaacuagaacu

SEQ ID NO: 2041725 - RNA, 20 nt, Human
uuccuguucuuaagacguga

SEQ ID NO: 2041726 - RNA, 21 nt, Human
aucacguaaagcuagaaauga

SEQ ID NO: 2041727 - RNA, 14 nt, Human
aucacguaaagcua

SEQ ID NO: 2041728 - RNA, 13 nt, Human
auauugaugugug

SEQ ID NO: 2041729 - RNA, 20 nt, Human
auauuuguauuuaaaugaaa

SEQ ID NO: 2041730 - RNA, 18 nt, Human
uguggccaaguucuuagu

SEQ ID NO: 2041731 - RNA, 18 nt, Human
agucuuguauuaaguugu

SEQ ID NO: 2041732 - RNA, 16 nt, Human
agucuuguauuaaguu

SEQ ID NO: 2041733 - RNA, 15 nt, Human
agucuuggcucacug

SEQ ID NO: 2041734 - RNA, 22 nt, Human
agucuuguauuaaguuguuaau

SEQ ID NO: 2041735 - RNA, 15 nt, Human
ugucuuguguuucuu

SEQ ID NO: 2041736 - RNA, 17 nt, Human
aguggaaguaguggagc

SEQ ID NO: 2041737 - RNA, 16 nt, Human
aguucuuaguugcugu

SEQ ID NO: 2041738 - RNA, 15 nt, Human
uuaaauuucuaccgc

SEQ ID NO: 2041739 - RNA, 21 nt, Human
aguucuuaguugcuguauguc

SEQ ID NO: 2041740 - RNA, 20 nt, Human
aguucuuaguugcuguaugu

SEQ ID NO: 2041741 - RNA, 14 nt, Human
auaaauaacuuuuu

SEQ ID NO: 2041742 - RNA, 12 nt, Human
auaaauaacuuu

SEQ ID NO: 2041743 - RNA, 19 nt, Human
auaacuagaacugaauuuu

SEQ ID NO: 2041744 - RNA, 21 nt, Human
auaaaaguacauguuaaacuu

SEQ ID NO: 2041745 - RNA, 15 nt, Human
auaaaaguacauguu

SEQ ID NO: 2041746 - RNA, 22 nt, Human
uuaaguuacacauuuuucagau

SEQ ID NO: 2041747 - RNA, 14 nt, Human
uuaauaaagacagg

SEQ ID NO: 2041748 - RNA, 13 nt, Human
uuaauaaagacag

SEQ ID NO: 2041749 - RNA, 14 nt, Human
aguacauguuaaac

SEQ ID NO: 2041750 - RNA, 21 nt, Human
uguagaaaagggaacugaaca

SEQ ID NO: 2041751 - RNA, 20 nt, Human
uguagaaaagggaacugaac

SEQ ID NO: 2041752 - RNA, 19 nt, Human
uguagaaaagggaacugaa

SEQ ID NO: 2041753 - RNA, 18 nt, Human
uguagaaaagggaacuga

SEQ ID NO: 2041754 - RNA, 23 nt, Human
uguagaaaagggaacugaacauu

SEQ ID NO: 2041755 - RNA, 18 nt, Human
uguaugucucgugguagg

SEQ ID NO: 2041756 - RNA, 19 nt, Human
agcuuacaagccagcugga

SEQ ID NO: 2041757 - RNA, 17 nt, Human
agcuuacaagccagcug

SEQ ID NO: 2041758 - RNA, 15 nt, Human
agcuuacaagccagc

SEQ ID NO: 2041759 - RNA, 13 nt, Human
agcuguuuaugca

SEQ ID NO: 2041760 - RNA, 17 nt, Human
uggagugcaaugacaca

SEQ ID NO: 2041761 - RNA, 21 nt, Human
aggaccuguggccaaguucuu

SEQ ID NO: 2041762 - RNA, 16 nt, Human
agcauuugucaacaaa

SEQ ID NO: 2041763 - RNA, 21 nt, Human
ugaccaauauuguacaguuuu

SEQ ID NO: 2041764 - RNA, 19 nt, Human
ugaccaauauuguacaguu

SEQ ID NO: 2041765 - RNA, 18 nt, Human
ugaccaauauuguacagu

SEQ ID NO: 2041766 - RNA, 17 nt, Human
ugaccaauauuguacag

SEQ ID NO: 2041767 - RNA, 15 nt, Human
ucuuuaguuuuugug

SEQ ID NO: 2041768 - RNA, 22 nt, Human
ucuuucugcagaaacagaaagg

SEQ ID NO: 2041769 - RNA, 15 nt, Human
agacuuccagagccu

SEQ ID NO: 2041770 - RNA, 22 nt, Human
agaaauuuccacucaggucugu

SEQ ID NO: 2041771 - RNA, 16 nt, Human
agaaauuuccacucag

SEQ ID NO: 2041772 - RNA, 21 nt, Human
uccuuuaauuuuuuacuauuu

SEQ ID NO: 2041773 - RNA, 20 nt, Human
accuacaguguacagucuug

SEQ ID NO: 2041774 - RNA, 18 nt, Human
accuacaguguacagucu

SEQ ID NO: 2041775 - RNA, 17 nt, Human
accuacaguguacaguc

SEQ ID NO: 2041776 - RNA, 16 nt, Human
accuacaguguacagu

SEQ ID NO: 2041777 - RNA, 15 nt, Human
accuacaguguacag

SEQ ID NO: 2041778 - RNA, 14 nt, Human
uccagagacuggga

SEQ ID NO: 2041779 - RNA, 17 nt, Human
uccacucaggucuguuu

SEQ ID NO: 2041780 - RNA, 19 nt, Human
uccaaguccacaguggaac

SEQ ID NO: 2041781 - RNA, 15 nt, Human
acaguuuuuauugcu

SEQ ID NO: 2041782 - RNA, 21 nt, Human
acauagcuuacaagccagcug

SEQ ID NO: 2041783 - RNA, 15 nt, Human
ucaagacuuccagag

SEQ ID NO: 2041784 - RNA, 16 nt, Human
acccccaaauuuucuu

SEQ ID NO: 2041785 - RNA, 17 nt, Human
ucagaaucucucuucuu

SEQ ID NO: 2041786 - RNA, 17 nt, Human
accaauauuguacaguu

SEQ ID NO: 2041787 - RNA, 16 nt, Human
accaauauuguacagu

SEQ ID NO: 2041788 - RNA, 14 nt, Human
accaauauuguaca

SEQ ID NO: 2041789 - RNA, 15 nt, Human
accaauauuguacag

SEQ ID NO: 2041790 - RNA, 19 nt, Human
accaauauuguacaguuuu

SEQ ID NO: 2041791 - RNA, 18 nt, Human
accaauauuguacaguuu

SEQ ID NO: 2041792 - RNA, 19 nt, Human
acacagucuuggcucacug

SEQ ID NO: 2041793 - RNA, 14 nt, Human
uauaaaagacugac

SEQ ID NO: 2041794 - RNA, 10 nt, Human
uaguuuuugu

SEQ ID NO: 2041795 - RNA, 20 nt, Human
acagauguaaaagacuuuuu

SEQ ID NO: 2041796 - RNA, 21 nt, Human
aauugacuuauuuauauaaau

SEQ ID NO: 2041797 - RNA, 13 nt, Human
uacuuuuuccugg

SEQ ID NO: 2041798 - RNA, 15 nt, Human
aaguuuuguaaauuu

SEQ ID NO: 2041799 - RNA, 12 nt, Human
aauaacuuuuuu

SEQ ID NO: 2041800 - RNA, 13 nt, Human
aauauuguacagu

SEQ ID NO: 2041801 - RNA, 17 nt, Human
uaauaaaaguacauguu

SEQ ID NO: 2041802 - RNA, 21 nt, Human
uaauagcgucauaacuagaac

SEQ ID NO: 2041803 - RNA, 14 nt, Human
aaugugacucaaga

SEQ ID NO: 2041804 - RNA, 19 nt, Human
uacacauuuuucagauaua

SEQ ID NO: 2041805 - RNA, 21 nt, Human
uacacauuuuucagauauaaa

SEQ ID NO: 2041806 - RNA, 17 nt, Human
uacacauuuuucagaua

SEQ ID NO: 2041807 - RNA, 15 nt, Human
uacacauuuuucaga

SEQ ID NO: 2041808 - RNA, 19 nt, Human
guggaaguaguggagcccc

SEQ ID NO: 2041809 - RNA, 15 nt, Human
aagcaagauuucaga

SEQ ID NO: 2041810 - RNA, 14 nt, Human
guucuucaucuaag

SEQ ID NO: 2041811 - RNA, 19 nt, Human
guucuuaguugcuguaugu

SEQ ID NO: 2041812 - RNA, 16 nt, Human
aacauugcaauagaaa

SEQ ID NO: 2041813 - RNA, 15 nt, Human
aacauugcaauagaa

SEQ ID NO: 2041814 - RNA, 14 nt, Human
aacauugcaauaga

SEQ ID NO: 2041815 - RNA, 17 nt, Human
aacauugcaauagaaau

SEQ ID NO: 2041816 - RNA, 23 nt, Human
aaaugauccccagcuguuuaugc

SEQ ID NO: 2041817 - RNA, 14 nt, Human
aaaugaaagugaga

SEQ ID NO: 2041818 - RNA, 17 nt, Human
guagcuggauuacaggc

SEQ ID NO: 2041819 - RNA, 15 nt, Human
guaggacuguagaaa

SEQ ID NO: 2041820 - RNA, 14 nt, Human
aaauuuccacucag

SEQ ID NO: 2041821 - RNA, 22 nt, Human
aaauuuccacucaggucuguuu

SEQ ID NO: 2041822 - RNA, 20 nt, Human
caagugauucuccugccuca

SEQ ID NO: 2041823 - RNA, 14 nt, Human
caagccagcuggag

SEQ ID NO: 2041824 - RNA, 17 nt, Human
caaagcccaaaguggua

SEQ ID NO: 2041825 - RNA, 19 nt, Human
caaagcccaaagugguaua

SEQ ID NO: 2041826 - RNA, 13 nt, Human
caaauauuccaga

SEQ ID NO: 2041827 - RNA, 17 nt, Human
caaauauuccagagacu

SEQ ID NO: 2041828 - RNA, 19 nt, Human
caaagugguauagaaaugc

SEQ ID NO: 2041829 - RNA, 18 nt, Human
caaagugguauagaaaug

SEQ ID NO: 2041830 - RNA, 19 nt, Human
caccauguuggccaggcug

SEQ ID NO: 2041831 - RNA, 23 nt, Human
uuguauuuaaaugaaagugagac

SEQ ID NO: 2041832 - RNA, 13 nt, Human
uuuauugcuuguu

SEQ ID NO: 2041833 - RNA, 12 nt, Human
uucaguuuucag

SEQ ID NO: 2041834 - RNA, 13 nt, Human
uucuaaagaugga

SEQ ID NO: 2041835 - RNA, 20 nt, Human
uucucaaagaaauuuccacu

SEQ ID NO: 2041836 - RNA, 19 nt, Human
uucucaaagaaauuuccac

SEQ ID NO: 2041837 - RNA, 15 nt, Human
uucucaaagaaauuu

SEQ ID NO: 2041838 - RNA, 13 nt, Human
uucucaaagaaau

SEQ ID NO: 2041839 - RNA, 20 nt, Human
uugcuguagaagauggcacu

SEQ ID NO: 2041840 - RNA, 18 nt, Human
uuggauuuuugucuugug

SEQ ID NO: 2041841 - RNA, 13 nt, Human
uuguacaguuuuu

SEQ ID NO: 2041842 - RNA, 12 nt, Human
uuguacaguuuu

SEQ ID NO: 2041843 - RNA, 16 nt, Human
uuguacaguuuuuauu

SEQ ID NO: 2041844 - RNA, 18 nt, Human
ugguaggacuguagaaaa

SEQ ID NO: 2041845 - RNA, 17 nt, Human
ugguaggacuguagaaa

SEQ ID NO: 2041846 - RNA, 12 nt, Human
uguacagucuug

SEQ ID NO: 2041847 - RNA, 15 nt, Human
uguacagucuuguau

SEQ ID NO: 2041848 - RNA, 14 nt, Human
uguacagucuugua

SEQ ID NO: 2041849 - RNA, 17 nt, Human
uguacagucuuguauua

SEQ ID NO: 2041850 - RNA, 15 nt, Human
uguauuuaaaugaaa

SEQ ID NO: 2041851 - RNA, 17 nt, Human
uguuggauuuuugucuu

SEQ ID NO: 2041852 - RNA, 20 nt, Human
uguuggauuuuugucuugug

SEQ ID NO: 2041853 - RNA, 14 nt, Human
uguuggccaggcug

SEQ ID NO: 2041854 - RNA, 20 nt, Human
uuaauagcgucauaacuaga

SEQ ID NO: 2041855 - RNA, 19 nt, Human
uggauacgacaacuugcac

SEQ ID NO: 2041856 - RNA, 14 nt, Human
ugcuuguuggauuu

SEQ ID NO: 2041857 - RNA, 20 nt, Human
uggaaaaaccacccccaaau

SEQ ID NO: 2041858 - RNA, 22 nt, Human
ucuuguauuaaguuguuaauaa

SEQ ID NO: 2041859 - RNA, 18 nt, Human
ucuuguauuaaguuguua

SEQ ID NO: 2041860 - RNA, 16 nt, Human
ucuuguauuaaguugu

SEQ ID NO: 2041861 - RNA, 16 nt, Human
ucuuuuuauacuauua

SEQ ID NO: 2041862 - RNA, 17 nt, Human
ugaacauugcaauagaa

SEQ ID NO: 2041863 - RNA, 15 nt, Human
ugaacauugcaauag

SEQ ID NO: 2041864 - RNA, 14 nt, Human
ugaacauuccagag

SEQ ID NO: 2041865 - RNA, 13 nt, Human
ugaacauuccaga

SEQ ID NO: 2041866 - RNA, 17 nt, Human
ucucaaagaaauuucca

SEQ ID NO: 2041867 - RNA, 14 nt, Human
ucucaaacuccuga

SEQ ID NO: 2041868 - RNA, 21 nt, Human
ucucuacugucucaguuuaca

SEQ ID NO: 2041869 - RNA, 17 nt, Human
ucucuuuguucuaaaga

SEQ ID NO: 2041870 - RNA, 21 nt, Human
ucccaaagugcugggauuaca

SEQ ID NO: 2041871 - RNA, 14 nt, Human
uccccagcuguuua

SEQ ID NO: 2041872 - RNA, 15 nt, Human
uccccagcuguuuau

SEQ ID NO: 2041873 - RNA, 15 nt, Human
ucaaaaacauucuua

SEQ ID NO: 2041874 - RNA, 12 nt, Human
guuuuucaguuu

SEQ ID NO: 2041875 - RNA, 15 nt, Human
uaaagcuagaaauga

SEQ ID NO: 2041876 - RNA, 14 nt, Human
uaaagcuagaaaug

SEQ ID NO: 2041877 - RNA, 18 nt, Human
uaagaucguucucugccu

SEQ ID NO: 2041878 - RNA, 13 nt, Human
uaauaaagacagg

SEQ ID NO: 2041879 - RNA, 15 nt, Human
uagaaagaagaugaa

SEQ ID NO: 2041880 - RNA, 15 nt, Human
uacgacaacuugcac

SEQ ID NO: 2041881 - RNA, 14 nt, Human
uacgacaacuugca

SEQ ID NO: 2041882 - RNA, 21 nt, Human
uacauuuuguauauuuguauu

SEQ ID NO: 2041883 - RNA, 16 nt, Human
uacaguguacagucuu

SEQ ID NO: 2041884 - RNA, 15 nt, Human
uacaguguacagucu

SEQ ID NO: 2041885 - RNA, 22 nt, Human
uacaguguacagucuuguauua

SEQ ID NO: 2041886 - RNA, 13 nt, Human
uacaguguacagu

SEQ ID NO: 2041887 - RNA, 22 nt, Human
uauccugcuucugauaugcagu

SEQ ID NO: 2041888 - RNA, 21 nt, Human
uauaaauuuuuuuuguuucau

SEQ ID NO: 2041889 - RNA, 17 nt, Human
uauaaauuuuuuuuguu

SEQ ID NO: 2041890 - RNA, 12 nt, Human
ggccaaguucuu

SEQ ID NO: 2041891 - RNA, 16 nt, Human
gcuggauuacaggcau

SEQ ID NO: 2041892 - RNA, 19 nt, Human
ggaaaaaccacccccaaau

SEQ ID NO: 2041893 - RNA, 17 nt, Human
ggucucaaacuccugac

SEQ ID NO: 2041894 - RNA, 12 nt, Human
gccgggguggau

SEQ ID NO: 2041895 - RNA, 19 nt, Human
gcccaaagugguauagaaa

SEQ ID NO: 2041896 - RNA, 18 nt, Human
gauauaaaagacugacca

SEQ ID NO: 2041897 - RNA, 23 nt, Human
gaaguaguggagccccugcucug

SEQ ID NO: 2041898 - RNA, 17 nt, Human
gaacauugcaauagaaa

SEQ ID NO: 2041899 - RNA, 15 nt, Human
gaacauugcaauaga

SEQ ID NO: 2041900 - RNA, 13 nt, Human
gaacauugcaaua

SEQ ID NO: 2041901 - RNA, 15 nt, Human
gaacguuuuuccugu

SEQ ID NO: 2041902 - RNA, 12 nt, Human
gaacguuuuucc

SEQ ID NO: 2041903 - RNA, 16 nt, Human
gacgugauuuugcugu

SEQ ID NO: 2041904 - RNA, 17 nt, Human
gacgugauuuugcugua

SEQ ID NO: 2041905 - RNA, 19 nt, Human
gaccuguggccaaguucuu

SEQ ID NO: 2041906 - RNA, 16 nt, Human
gacuuauuuauauaaa

SEQ ID NO: 2041907 - RNA, 22 nt, Human
gacugaccaauauuguacaguu

SEQ ID NO: 2041908 - RNA, 21 nt, Human
gacugaccaauauuguacagu

SEQ ID NO: 2041909 - RNA, 21 nt, Human
gaccaauauuguacaguuuuu

SEQ ID NO: 2041910 - RNA, 19 nt, Human
gaccaauauuguacaguuu

SEQ ID NO: 2041911 - RNA, 18 nt, Human
gaccaauauuguacaguu

SEQ ID NO: 2041912 - RNA, 17 nt, Human
gaccaauauuguacagu

SEQ ID NO: 2041913 - RNA, 18 nt, Human
gaaaagggaacugaacau

SEQ ID NO: 2041914 - RNA, 15 nt, Human
cuuucugcagaaaca

SEQ ID NO: 2041915 - RNA, 14 nt, Human
cuuacuuaguguua

SEQ ID NO: 2041916 - RNA, 21 nt, Human
cucuccauucccguggaacgu

SEQ ID NO: 2041917 - RNA, 24 nt, Human
cuccauucccguggaacguuuuuc

SEQ ID NO: 2041918 - RNA, 15 nt, Human
cucaggucuguuuuc

SEQ ID NO: 2041919 - RNA, 17 nt, Human
cucgagguuucucaaag

SEQ ID NO: 2041920 - RNA, 21 nt, Human
cuccugaguagcuggauuaca

SEQ ID NO: 2041921 - RNA, 18 nt, Human
cuggucucaaacuccuga

SEQ ID NO: 2041922 - RNA, 20 nt, Human
ccuguggccaaguucuuagu

SEQ ID NO: 2041923 - RNA, 12 nt, Human
cguucucugccu

SEQ ID NO: 2041924 - RNA, 17 nt, Human
cgucauaacuagaacug

SEQ ID NO: 2041925 - RNA, 16 nt, Human
cgucauaacuagaacu

SEQ ID NO: 2041926 - RNA, 14 nt, Human
cgucauaacuagaa

SEQ ID NO: 2041927 - RNA, 16 nt, Human
cgucgacguagaaccu

SEQ ID NO: 2041928 - RNA, 14 nt, Human
cggccucccaaagu

SEQ ID NO: 2041929 - RNA, 24 nt, Human
ccagcuggagaaauaugguacuca

SEQ ID NO: 2041930 - RNA, 16 nt, Human
ccacucaggucuguuu

SEQ ID NO: 2041931 - RNA, 11 nt, Human
ccacucagguc

SEQ ID NO: 2041932 - RNA, 20 nt, Human
ccacaguggaaccagcccag

SEQ ID NO: 2041933 - RNA, 17 nt, Human
ccaaauuuucuuuuuau

SEQ ID NO: 2041934 - RNA, 20 nt, Human
cauuuuucagauauaaaaga

SEQ ID NO: 2041935 - RNA, 18 nt, Human
cauuuuucagauauaaaa

SEQ ID NO: 2041936 - RNA, 23 nt, Human
gaaucacguaaagcuagaaauga

SEQ ID NO: 2041937 - RNA, 13 nt, Human
gguauagaaaugc

SEQ ID NO: 2041938 - RNA, 21 nt, Human
ggauuacagggaugagccacc

SEQ ID NO: 2041939 - RNA, 14 nt, Human
guccacaguggaac

SEQ ID NO: 2041940 - RNA, 22 nt, Human
guuaucaaaaaaaaaaaaaugu

SEQ ID NO: 2041941 - RNA, 19 nt, Human
aaaauuuaagcugcaaaaa

SEQ ID NO: 2041942 - RNA, 16 nt, Human
agcuguuuaugcauag

SEQ ID NO: 2041943 - RNA, 14 nt, Human
aaucuucaauaguu

SEQ ID NO: 2041944 - RNA, 16 nt, Human
uguuucuuuaguuuuu

SEQ ID NO: 2041945 - RNA, 18 nt, Human
ugcagcgauuaauaacag

SEQ ID NO: 2041946 - RNA, 21 nt, Human
ggauuacaggcaugugccacc

SEQ ID NO: 2041947 - RNA, 21 nt, Human
gagccucaaaugagaaaaugu

SEQ ID NO: 2041948 - RNA, 12 nt, Human
gccaaguucuua

SEQ ID NO: 2041949 - RNA, 16 nt, Human
uggcaguggaacuaag

SEQ ID NO: 2041950 - RNA, 23 nt, Human
gaccucaaguaauccaccugccu

SEQ ID NO: 2041951 - RNA, 13 nt, Human
aaagauggaaaaa

SEQ ID NO: 2041952 - RNA, 22 nt, Human
ugaaaucuuuuuuguucaaaga

SEQ ID NO: 2041953 - RNA, 21 nt, Human
agagaucuauauauguauaaa

SEQ ID NO: 2041954 - RNA, 20 nt, Human
caaauacuuuaauguauaaa

SEQ ID NO: 2041955 - RNA, 23 nt, Human
auaaccucaagucacaugagaau

SEQ ID NO: 2041956 - RNA, 16 nt, Human
caguuucuuucaaaga

SEQ ID NO: 2041957 - RNA, 11 nt, Human
cugaauagauu

SEQ ID NO: 2041958 - RNA, 15 nt, Human
ccauaugaauaacau

SEQ ID NO: 2041959 - RNA, 20 nt, Human
aauuuggguaugaacagauu

SEQ ID NO: 2041960 - RNA, 22 nt, Human
ucagaugcauccuuucauaaga

SEQ ID NO: 2041961 - RNA, 19 nt, Human
uagaaauggggaacuacug

SEQ ID NO: 2041962 - RNA, 11 nt, Human
aacguuuuucc

SEQ ID NO: 2041963 - RNA, 21 nt, Human
auauaucguucauuguaaaaa

SEQ ID NO: 2041964 - RNA, 20 nt, Human
agugaaucacguaaagcuag

SEQ ID NO: 2041965 - RNA, 20 nt, Human
aucuuuuuuguucaaagauu

SEQ ID NO: 2041966 - RNA, 21 nt, Human
aaauaugguacucauuaaaaa

SEQ ID NO: 2041967 - RNA, 15 nt, Human
aaugcugguuuuuca

SEQ ID NO: 2041968 - RNA, 15 nt, Human
gaucguucucugccu

SEQ ID NO: 2041969 - RNA, 15 nt, Human
cgucgacguagaacc

SEQ ID NO: 2041970 - RNA, 11 nt, Human herpesvirus 6B
uacguuuucaa

SEQ ID NO: 2041971 - RNA, 14 nt, Human herpesvirus 6B
uuauuuucuguauu

SEQ ID NO: 2041972 - RNA, 17 nt, Human herpesvirus 6B
gaaguguuaugaagaau

SEQ ID NO: 2041973 - RNA, 19 nt, Human herpesvirus 6B
aagugaaggcggagaugca

SEQ ID NO: 2041974 - RNA, 21 nt, Human herpesvirus 6B
cugaucucacgucacaguuuu

SEQ ID NO: 2041975 - RNA, 17 nt, Human herpesvirus 6B
ggaagauucugcagaau

SEQ ID NO: 2041976 - RNA, 16 nt, Human herpesvirus 6B
gccguuguuaaugaau

SEQ ID NO: 2041977 - RNA, 23 nt, Human herpesvirus 6B
ccgcaucgcguucgacaaagaac

SEQ ID NO: 2041978 - RNA, 18 nt, Human herpesvirus 6B
gucuccgauccgucagga

SEQ ID NO: 2041979 - RNA, 22 nt, Human herpesvirus 6B
auugaaggguguuuccacacag

SEQ ID NO: 2041980 - RNA, 22 nt, Human herpesvirus 6B
uuuauggagggaauugugucuu

SEQ ID NO: 2041981 - RNA, 12 nt, Human herpesvirus 6B
caauaaacauga

SEQ ID NO: 2041982 - RNA, 21 nt, Human herpesvirus 6B
cugccgaccugauccaugagc

SEQ ID NO: 2041983 - RNA, 21 nt, Human herpesvirus 6B
gcugucgcccgccucucuccg

SEQ ID NO: 2041984 - RNA, 17 nt, Human herpesvirus 6B
cucgucuguugcuguag

SEQ ID NO: 2041985 - RNA, 17 nt, Human herpesvirus 6B
ggacaaaaauucaucag

SEQ ID NO: 2041986 - RNA, 17 nt, Human herpesvirus 6B
acgccauacgggaaaag

SEQ ID NO: 2041987 - RNA, 13 nt, Human herpesvirus 6B
aaaagccccugcu

SEQ ID NO: 2041988 - RNA, 22 nt, Human herpesvirus 6B
aaaauguuuccaugacugugag

SEQ ID NO: 2041989 - RNA, 17 nt, Human herpesvirus 6B
caaggaagagaaugaau

SEQ ID NO: 2041990 - RNA, 23 nt, Human herpesvirus 6B
agguaucugccccccuucaucca

SEQ ID NO: 2041991 - RNA, 19 nt, Human herpesvirus 6B
uaaggaagaucgcuuuucu

SEQ ID NO: 2041992 - RNA, 14 nt, Human herpesvirus 6B
gaaagaaccaguga

SEQ ID NO: 2041993 - RNA, 12 nt, Human herpesvirus 6B
cugcaaaacaaa

SEQ ID NO: 2041994 - RNA, 19 nt, Human herpesvirus 6B
gucaagacgccuaguguua

SEQ ID NO: 2041995 - RNA, 13 nt, Human herpesvirus 6B
aauacgucagcuc

SEQ ID NO: 2041996 - RNA, 17 nt, Human herpesvirus 6B
gaggacgcaaagagaga

SEQ ID NO: 2041997 - RNA, 20 nt, Human herpesvirus 6B
uuucuaaaucugaaauguag

SEQ ID NO: 2041998 - RNA, 22 nt, Human herpesvirus 6B
aacacuuucuucgccuguaaag

SEQ ID NO: 2041999 - RNA, 13 nt, Human herpesvirus 6B
cgaugaaacuguc

SEQ ID NO: 2042000 - RNA, 15 nt, Human herpesvirus 6B
acacaaaaagacucu

SEQ ID NO: 2042001 - RNA, 18 nt, Human herpesvirus 6B
cuggcaugcguuacggag

SEQ ID NO: 2042002 - RNA, 14 nt, Human herpesvirus 6B
aacagaggaagaaa

SEQ ID NO: 2042003 - RNA, 17 nt, Human herpesvirus 6B
uggaugucaagucuaga

SEQ ID NO: 2042004 - RNA, 20 nt, Human herpesvirus 6B
cgcagaaucaagaaacacuu

SEQ ID NO: 2042005 - RNA, 20 nt, Human herpesvirus 6B
cucgggggacggagaggaag

SEQ ID NO: 2042006 - RNA, 19 nt, Human herpesvirus 6B
ccuuuggccuugauuguga

SEQ ID NO: 2042007 - RNA, 21 nt, Human herpesvirus 6B
gggucacuaucuucgcagaag

SEQ ID NO: 2042008 - RNA, 21 nt, Human herpesvirus 6B
augauagaagaucuaaugaau

SEQ ID NO: 2042009 - RNA, 15 nt, Human herpesvirus 6B
uccaaugaugaaacu

SEQ ID NO: 2042010 - RNA, 13 nt, Human herpesvirus 6B
cagaugaggagga

SEQ ID NO: 2042011 - RNA, 16 nt, Human herpesvirus 6B
gacaauuuaucgugcu

SEQ ID NO: 2042012 - RNA, 17 nt, Human herpesvirus 6B
aucuggauauguaucca

SEQ ID NO: 2042013 - RNA, 20 nt, Human herpesvirus 6B
aggcgcagcagcagcuccaa

SEQ ID NO: 2042014 - RNA, 20 nt, Human herpesvirus 6B
cgguuagaucuggggagaug

SEQ ID NO: 2042015 - RNA, 15 nt, Human herpesvirus 6B
auuugaacagagauu

SEQ ID NO: 2042016 - RNA, 14 nt, Human herpesvirus 6B
uauuuuaaaugaca

SEQ ID NO: 2042017 - RNA, 23 nt, Human herpesvirus 6B
gcacgaagaagggcagagagccg

SEQ ID NO: 2042018 - RNA, 15 nt, Human herpesvirus 6B
uuacaacugaaacuc

SEQ ID NO: 2042019 - RNA, 15 nt, Human herpesvirus 6B
uccgcggcgcugggc

SEQ ID NO: 2042020 - RNA, 12 nt, Human herpesvirus 6B
agccaaggggac

SEQ ID NO: 2042021 - RNA, 16 nt, Human herpesvirus 6B
auucuaauuauaaaug

SEQ ID NO: 2042022 - RNA, 22 nt, Human herpesvirus 6B
ucacaauaauuacucccauaga

SEQ ID NO: 2042023 - RNA, 22 nt, Human herpesvirus 6B
uugacggcgugcauauauauga

SEQ ID NO: 2042024 - RNA, 13 nt, Human herpesvirus 6B
cuuuaugugcaau

SEQ ID NO: 2042025 - RNA, 22 nt, Human herpesvirus 6B
caggcaccauguucgccucucc

SEQ ID NO: 2042026 - RNA, 22 nt, Human herpesvirus 6B
cccgggcgcggggcgcaccggc

SEQ ID NO: 2042027 - RNA, 14 nt, Human herpesvirus 6B
gcgagucugugcuu

SEQ ID NO: 2042028 - RNA, 23 nt, Human herpesvirus 6B
auuaauuuuuuguuucugaaaau

SEQ ID NO: 2042029 - RNA, 15 nt, Human herpesvirus 6B
uccuaaauaccauuu

SEQ ID NO: 2042030 - RNA, 23 nt, Human herpesvirus 6B
guccgcucauuuugauuuguaaa

SEQ ID NO: 2042031 - RNA, 13 nt, Human herpesvirus 6B
auucuuaaauuca

SEQ ID NO: 2042032 - RNA, 21 nt, Human herpesvirus 6B
ccucaaacuuuuagagacuuu

SEQ ID NO: 2042033 - RNA, 19 nt, Human herpesvirus 6B
agaagggcagagagccgca

SEQ ID NO: 2042034 - RNA, 15 nt, Human herpesvirus 6B
gaacgcguccuccgc

SEQ ID NO: 2042035 - RNA, 17 nt, Human herpesvirus 6B
acaauuuacacaggaug

SEQ ID NO: 2042036 - RNA, 16 nt, Human herpesvirus 6B
uccgugacacacagaa

SEQ ID NO: 2042037 - RNA, 23 nt, Human herpesvirus 6B
aaugucuucgagauuuuagaaua

SEQ ID NO: 2042038 - RNA, 13 nt, Human herpesvirus 6B
aacaguuucagau

SEQ ID NO: 2042039 - RNA, 13 nt, Human herpesvirus 6B
cuucaucuggagu

SEQ ID NO: 2042040 - RNA, 15 nt, Human herpesvirus 6B
gucauggaaaaauga

SEQ ID NO: 2042041 - RNA, 13 nt, Human herpesvirus 6B
cuguaaacaaauu

SEQ ID NO: 2042042 - RNA, 14 nt, Human herpesvirus 6B
uccgaguauggaga

SEQ ID NO: 2042043 - RNA, 13 nt, Human herpesvirus 6B
gagaucugaggac

SEQ ID NO: 2042044 - RNA, 16 nt, Human herpesvirus 6B
auaaaaaaaaauacua

SEQ ID NO: 2042045 - RNA, 21 nt, Human herpesvirus 6B
ucucgccgccucgccgcuccc

SEQ ID NO: 2042046 - RNA, 17 nt, Human herpesvirus 6B
cagagagccgcagaggc

SEQ ID NO: 2042047 - RNA, 14 nt, Human herpesvirus 6B
agcaagaaaaagag

SEQ ID NO: 2042048 - RNA, 18 nt, Human herpesvirus 6B
uccguuuuuucugcaaaa

SEQ ID NO: 2042049 - RNA, 22 nt, Human herpesvirus 6B
gacugcccuggggucuaagaua

SEQ ID NO: 2042050 - RNA, 19 nt, Human herpesvirus 6B
aauguugucaaucguguau

SEQ ID NO: 2042051 - RNA, 12 nt, Human herpesvirus 6B
aacuauguguua

SEQ ID NO: 2042052 - RNA, 16 nt, Human herpesvirus 6B
gcggggaucgggccug

SEQ ID NO: 2042053 - RNA, 15 nt, Human herpesvirus 6B
auguuauuguuccuu

SEQ ID NO: 2042054 - RNA, 13 nt, Human herpesvirus 6B
gacugacaaggua

SEQ ID NO: 2042055 - RNA, 15 nt, Human herpesvirus 6B
uucaaagugaauucc

SEQ ID NO: 2042056 - RNA, 19 nt, Human herpesvirus 6B
cugauaaacuccaaaaucu

SEQ ID NO: 2042057 - RNA, 15 nt, Human herpesvirus 6B
caugaaaacauucag

SEQ ID NO: 2042058 - RNA, 21 nt, Human herpesvirus 6B
ggagugcguaaucgcaagaaa

SEQ ID NO: 2042059 - RNA, 20 nt, Human herpesvirus 6B
agaugcagucuccacagggc

SEQ ID NO: 2042060 - RNA, 21 nt, Human herpesvirus 6B
auccaaugaugaaacuccuuc

SEQ ID NO: 2042061 - RNA, 15 nt, Human herpesvirus 6B
guaauuauugugaca

SEQ ID NO: 2042062 - RNA, 15 nt, Human herpesvirus 6B
uccccguccucgugc

SEQ ID NO: 2042063 - RNA, 14 nt, Human herpesvirus 6B
agacuaaauguucu

SEQ ID NO: 2042064 - RNA, 18 nt, Human herpesvirus 6B
uuacuuuguggaaaucua

SEQ ID NO: 2042065 - RNA, 18 nt, Human herpesvirus 6B
cacacagaauacaaaaac

SEQ ID NO: 2042066 - RNA, 21 nt, Human herpesvirus 6B
cauucagucucagcaaucacc

SEQ ID NO: 2042067 - RNA, 14 nt, Human herpesvirus 6B
aauuuuauugacug

SEQ ID NO: 2042068 - RNA, 14 nt, Human herpesvirus 6B
gacgucugggauca

SEQ ID NO: 2042069 - RNA, 21 nt, Human herpesvirus 6B
auuuuagaauaaaaaauagac

SEQ ID NO: 2042070 - RNA, 14 nt, Human herpesvirus 6B
ccucuugcaguggc

SEQ ID NO: 2042071 - RNA, 13 nt, Human herpesvirus 6B
ucuuagaaauuuu

SEQ ID NO: 2042072 - RNA, 21 nt, Human herpesvirus 6B
agcagaacggcgguaacgugg

SEQ ID NO: 2042073 - RNA, 11 nt, Human herpesvirus 6B
ggcccuuggug

SEQ ID NO: 2042074 - RNA, 15 nt, Human herpesvirus 6B
caaugcggaacacca

SEQ ID NO: 2042075 - RNA, 16 nt, Human herpesvirus 6B
ccaaagcuuucuguac

SEQ ID NO: 2042076 - RNA, 16 nt, Human herpesvirus 6B
auuauaaaaacacacc

SEQ ID NO: 2042077 - RNA, 21 nt, Human herpesvirus 6B
cacgacauggaacuucauagc

SEQ ID NO: 2042078 - RNA, 17 nt, Human herpesvirus 6B
agggaagucaaggaaac

SEQ ID NO: 2042079 - RNA, 23 nt, Human herpesvirus 6B
cauaauugugauaguuauuuugu

SEQ ID NO: 2042080 - RNA, 17 nt, Human herpesvirus 6B
ucugccgaaaagaaaga

SEQ ID NO: 2042081 - RNA, 18 nt, Human herpesvirus 6B
uuuacguuaaaagggaag

SEQ ID NO: 2042082 - RNA, 14 nt, Human herpesvirus 6B
ccaugacugugagg

SEQ ID NO: 2042083 - RNA, 19 nt, Human herpesvirus 6B
uuggaugccuacauaugcc

SEQ ID NO: 2042084 - RNA, 14 nt, Human herpesvirus 6B
ggagggcggagaag

SEQ ID NO: 2042085 - RNA, 13 nt, Human herpesvirus 6B
ugaacuguuucca

SEQ ID NO: 2042086 - RNA, 13 nt, Human herpesvirus 6B
cugaccccccaca

SEQ ID NO: 2042087 - RNA, 23 nt, Human herpesvirus 6B
caagaaaucacguugaaaugucg

SEQ ID NO: 2042088 - RNA, 15 nt, Human herpesvirus 6B
guuuuucacagaaug

SEQ ID NO: 2042089 - RNA, 19 nt, Human herpesvirus 6B
uugcuacaaaguucucaga

SEQ ID NO: 2042090 - RNA, 17 nt, Human herpesvirus 6B
gcauacacccugccgac

SEQ ID NO: 2042091 - RNA, 13 nt, Human herpesvirus 6B
agaaaggcggaga

SEQ ID NO: 2042092 - RNA, 13 nt, Human herpesvirus 6B
caagguucucagc

SEQ ID NO: 2042093 - RNA, 13 nt, Human herpesvirus 6B
gaaacugaagaaa

SEQ ID NO: 2042094 - RNA, 19 nt, Human herpesvirus 6B
aacuacgaagcugaaaauc

SEQ ID NO: 2042095 - RNA, 14 nt, Human herpesvirus 6B
ccugagagcaggag

SEQ ID NO: 2042096 - RNA, 18 nt, Human herpesvirus 6B
ggcgaccgugaugagaga

SEQ ID NO: 2042097 - RNA, 12 nt, Human herpesvirus 6B
aaacauucuuaa

SEQ ID NO: 2042098 - RNA, 12 nt, Human herpesvirus 6B
aaagaacauuug

SEQ ID NO: 2042099 - RNA, 17 nt, Human herpesvirus 6B
gaguugcacauguuucu

SEQ ID NO: 2042100 - RNA, 19 nt, Human herpesvirus 6B
auguauuggaauugggaag

SEQ ID NO: 2042101 - RNA, 15 nt, Human herpesvirus 6B
acugugaaaagugcu

SEQ ID NO: 2042102 - RNA, 24 nt, Human herpesvirus 6B
agcaacuugcugucggccgaagga

SEQ ID NO: 2042103 - RNA, 21 nt, Human herpesvirus 6B
acaccucguagcgaucuuuua

SEQ ID NO: 2042104 - RNA, 18 nt, Human herpesvirus 6B
accccccucuugcagugg

SEQ ID NO: 2042105 - RNA, 20 nt, Human herpesvirus 6B
cugucgcccgccucucuccg

SEQ ID NO: 2042106 - RNA, 23 nt, Human herpesvirus 6B
cgacgcagauuuacgacacgcuc

SEQ ID NO: 2042107 - RNA, 13 nt, Human herpesvirus 6B
cucacccccacuc

SEQ ID NO: 2042108 - RNA, 14 nt, Human herpesvirus 6B
gcgguucgacagag

SEQ ID NO: 2042109 - RNA, 15 nt, Human herpesvirus 6B
ggcggccccgcguca

SEQ ID NO: 2042110 - RNA, 23 nt, Human herpesvirus 6B
uucuucaagggccguaccuuucu

SEQ ID NO: 2042111 - RNA, 17 nt, Human herpesvirus 6B
agugggagagcggaaga

SEQ ID NO: 2042112 - RNA, 22 nt, Human herpesvirus 6B
gcugacgggggcacaucuguug

SEQ ID NO: 2042113 - RNA, 22 nt, Human herpesvirus 6B
gacggcgugcauauauaugaau

SEQ ID NO: 2042114 - RNA, 19 nt, Human herpesvirus 6B
acguggccgucuccugcaa

SEQ ID NO: 2042115 - RNA, 16 nt, Human herpesvirus 6B
gacucgccgaugaaac

SEQ ID NO: 2042116 - RNA, 23 nt, Human herpesvirus 6B
acuggagcuagagaaaauuauag

SEQ ID NO: 2042117 - RNA, 19 nt, Human herpesvirus 6B
cugauauggcaaauuucaa

SEQ ID NO: 2042118 - RNA, 20 nt, Human herpesvirus 6B
gaaagguguggugaaagaca

SEQ ID NO: 2042119 - RNA, 12 nt, Human herpesvirus 6B
caaaaaauguua

SEQ ID NO: 2042120 - RNA, 16 nt, Human herpesvirus 6B
gauccgucaggaccag

SEQ ID NO: 2042121 - RNA, 20 nt, Human herpesvirus 6B
ccuauucuaauuauaaaugu

SEQ ID NO: 2042122 - RNA, 17 nt, Human herpesvirus 6B
cgucauaauuuuccagc

SEQ ID NO: 2042123 - RNA, 17 nt, Human herpesvirus 6B
gaaaagaucaagcaagu

SEQ ID NO: 2042124 - RNA, 19 nt, Human herpesvirus 6B
gcugcguuccaugugucuc

SEQ ID NO: 2042125 - RNA, 16 nt, Human herpesvirus 6B
aguuguugcuuccgau

SEQ ID NO: 2042126 - RNA, 18 nt, Human herpesvirus 6B
cauuagcugcuaaaugug

SEQ ID NO: 2042127 - RNA, 23 nt, Human herpesvirus 6B
augaaugugagagauuuuucaau

SEQ ID NO: 2042128 - RNA, 13 nt, Human herpesvirus 6B
auccccagaagga

SEQ ID NO: 2042129 - RNA, 19 nt, Human herpesvirus 6B
ggaagaucaugacaaggau

SEQ ID NO: 2042130 - RNA, 15 nt, Human herpesvirus 6B
cagaggaagaaagga

SEQ ID NO: 2042131 - RNA, 16 nt, Human herpesvirus 6B
uggagauugauuccag

SEQ ID NO: 2042132 - RNA, 17 nt, Human herpesvirus 6B
uuaugaucggcauuugu

SEQ ID NO: 2042133 - RNA, 14 nt, Human herpesvirus 6B
gaaauuaauaagau

SEQ ID NO: 2042134 - RNA, 16 nt, Human herpesvirus 6B
augacucaagaauuac

SEQ ID NO: 2042135 - RNA, 18 nt, Human herpesvirus 6B
agcaggcuccccaggcgc

SEQ ID NO: 2042136 - RNA, 17 nt, Human herpesvirus 6B
ggaucgacgaccaggca

SEQ ID NO: 2042137 - RNA, 16 nt, Human herpesvirus 6B
aaauaucgucucuaac

SEQ ID NO: 2042138 - RNA, 21 nt, Human herpesvirus 6B
agcauccuguuuucccaccua

SEQ ID NO: 2042139 - RNA, 21 nt, Human herpesvirus 6B
gagcauaauaaucuaguaccu

SEQ ID NO: 2042140 - RNA, 17 nt, Human herpesvirus 6B
uagaucuggaagacugu

SEQ ID NO: 2042141 - RNA, 19 nt, Human herpesvirus 6B
guaagccuauugacaugau

SEQ ID NO: 2042142 - RNA, 20 nt, Human herpesvirus 6B
aagaacaugcagaagaacau

SEQ ID NO: 2042143 - RNA, 17 nt, Human herpesvirus 6B
gcuccgagcgggauccc

SEQ ID NO: 2042144 - RNA, 19 nt, Human herpesvirus 6B
gaucgaguuacauucguau

SEQ ID NO: 2042145 - RNA, 16 nt, Human herpesvirus 6B
agguguuaaacgaaaa

SEQ ID NO: 2042146 - RNA, 13 nt, Human herpesvirus 6B
aaagcgccugccu

SEQ ID NO: 2042147 - RNA, 18 nt, Human herpesvirus 6B
guguuuguuuuuagaagc

SEQ ID NO: 2042148 - RNA, 20 nt, Human herpesvirus 6B
cguucaggucaagcgccagg

SEQ ID NO: 2042149 - RNA, 14 nt, Human herpesvirus 6B
agauaauuacagau

SEQ ID NO: 2042150 - RNA, 13 nt, Human herpesvirus 6B
gacccaacagaag

SEQ ID NO: 2042151 - RNA, 14 nt, Human herpesvirus 6B
gcaggguguggccg

SEQ ID NO: 2042152 - RNA, 17 nt, Human herpesvirus 6B
uacaauacuuucacaca

SEQ ID NO: 2042153 - RNA, 15 nt, Human herpesvirus 6B
cagaaaagcaaacau

SEQ ID NO: 2042154 - RNA, 14 nt, Human herpesvirus 6B
gaugugcggagaaa

SEQ ID NO: 2042155 - RNA, 18 nt, Human herpesvirus 6B
gugggcgguagguucacu

SEQ ID NO: 2042156 - RNA, 16 nt, Human herpesvirus 6B
cucgccuaucuguauu

SEQ ID NO: 2042157 - RNA, 21 nt, Human herpesvirus 6B
cgguuaaagaaucugcagauu

SEQ ID NO: 2042158 - RNA, 14 nt, Human herpesvirus 6B
cugguaguucuuga

SEQ ID NO: 2042159 - RNA, 14 nt, Human herpesvirus 6B
auaaagaagaucac

SEQ ID NO: 2042160 - RNA, 15 nt, Human herpesvirus 6B
cggggccucccuccg

SEQ ID NO: 2042161 - RNA, 12 nt, Human herpesvirus 6B
ggaguauucgug

SEQ ID NO: 2042162 - RNA, 19 nt, Human herpesvirus 6B
gacacagacgucuacggua

SEQ ID NO: 2042163 - RNA, 14 nt, Human herpesvirus 6B
gcagggcgggcacg

SEQ ID NO: 2042164 - RNA, 15 nt, Human herpesvirus 6B
aguguuaugaagaau

SEQ ID NO: 2042165 - RNA, 15 nt, Human herpesvirus 6B
uccaaugaauacuuc

SEQ ID NO: 2042166 - RNA, 15 nt, Human herpesvirus 6B
cucuuuuccccccgc

SEQ ID NO: 2042167 - RNA, 23 nt, Human herpesvirus 6B
ggcgaagggacacgagaagaaca

SEQ ID NO: 2042168 - RNA, 18 nt, Human herpesvirus 6B
caacguuacgauuuucua

SEQ ID NO: 2042169 - RNA, 18 nt, Human herpesvirus 6B
agucguggcggagcaccc

SEQ ID NO: 2042170 - RNA, 23 nt, Human herpesvirus 6B
cgguccccccucccuccaucccc

SEQ ID NO: 2042171 - RNA, 17 nt, Human herpesvirus 6B
uagucguggcggagcac

SEQ ID NO: 2042172 - RNA, 17 nt, Human herpesvirus 6B
gcgucauuagaagguug

SEQ ID NO: 2042173 - RNA, 12 nt, Human herpesvirus 6B
aguauuuacuga

SEQ ID NO: 2042174 - RNA, 17 nt, Human herpesvirus 6B
agauuaauuaucauuau

SEQ ID NO: 2042175 - RNA, 21 nt, Human herpesvirus 6B
ucgcaagaaaagaaaaaacag

SEQ ID NO: 2042176 - RNA, 16 nt, Human herpesvirus 6B
auuucccaguuaauuu

SEQ ID NO: 2042177 - RNA, 21 nt, Human herpesvirus 6B
ccagcucuguucucucccacu

SEQ ID NO: 2042178 - RNA, 14 nt, Human herpesvirus 6B
cagaaaagcaaaca

SEQ ID NO: 2042179 - RNA, 23 nt, Human herpesvirus 6B
agauaucugaaacacuaagugcc

SEQ ID NO: 2042180 - RNA, 15 nt, Human herpesvirus 6B
uguaaaauguuucca

SEQ ID NO: 2042181 - RNA, 19 nt, Human herpesvirus 6B
ggauuuaguuucuuuggaa

SEQ ID NO: 2042182 - RNA, 12 nt, Human herpesvirus 6B
uaaugccacagg

SEQ ID NO: 2042183 - RNA, 17 nt, Human herpesvirus 6B
uuccuguuuuucucaua

SEQ ID NO: 2042184 - RNA, 14 nt, Human herpesvirus 6B
augacuuuucugaa

SEQ ID NO: 2042185 - RNA, 15 nt, Human herpesvirus 6B
aacagaguuuucaua

SEQ ID NO: 2042186 - RNA, 21 nt, Human herpesvirus 6B
acaagcagccuaaauuuucuu

SEQ ID NO: 2042187 - RNA, 18 nt, Human herpesvirus 6B
uaagauagauauuaugua

SEQ ID NO: 2042188 - RNA, 20 nt, Human herpesvirus 6B
uuggugacguuuagcuuugu

SEQ ID NO: 2042189 - RNA, 15 nt, Human herpesvirus 6B
uaacgaacaaaucuc

SEQ ID NO: 2042190 - RNA, 12 nt, Human herpesvirus 6B
ucagaugugaua

SEQ ID NO: 2042191 - RNA, 15 nt, Human herpesvirus 6B
gacuuuucugaaauu

SEQ ID NO: 2042192 - RNA, 19 nt, Human herpesvirus 6B
gauggauaagauuuaccac

SEQ ID NO: 2042193 - RNA, 14 nt, Human herpesvirus 6B
uuaagaugucgugu

SEQ ID NO: 2042194 - RNA, 15 nt, Human herpesvirus 6B
uaugauuuucaauau

SEQ ID NO: 2042195 - RNA, 14 nt, Human herpesvirus 6B
ugccguguaugaga

SEQ ID NO: 2042196 - RNA, 15 nt, Human herpesvirus 6B
gagagccgcagaggc

SEQ ID NO: 2042197 - RNA, 15 nt, Human herpesvirus 6B
uucgacauagagugu

SEQ ID NO: 2042198 - RNA, 23 nt, Human herpesvirus 6B
cuuugauaaaaccaucuauuugc

SEQ ID NO: 2042199 - RNA, 19 nt, Human herpesvirus 6B
aaagggaagucaaggaaac

SEQ ID NO: 2042200 - RNA, 17 nt, Human herpesvirus 6B
ucugaaaaguuagaguu

SEQ ID NO: 2042201 - RNA, 22 nt, Human herpesvirus 6B
uaauauuugcaagcagaccagu

SEQ ID NO: 2042202 - RNA, 16 nt, Human herpesvirus 6B
ucauguaaaauuaccu

SEQ ID NO: 2042203 - RNA, 22 nt, Human herpesvirus 6B
ggcaugcguuacggagauauac

SEQ ID NO: 2042204 - RNA, 13 nt, Human herpesvirus 6B
uccguccccgccg

SEQ ID NO: 2042205 - RNA, 19 nt, Human herpesvirus 6B
caggguguggccggcacgc

SEQ ID NO: 2042206 - RNA, 13 nt, Human herpesvirus 6B
cucaagaggguuu

SEQ ID NO: 2042207 - RNA, 16 nt, Human herpesvirus 6B
gccccgcgucaggugc

SEQ ID NO: 2042208 - RNA, 23 nt, Human herpesvirus 6B
auaucgagaguacggaagugccu

SEQ ID NO: 2042209 - RNA, 16 nt, Human herpesvirus 6B
aacgaugccuugggga

SEQ ID NO: 2042210 - RNA, 15 nt, Human herpesvirus 6B
caucuauuaucauuu

SEQ ID NO: 2042211 - RNA, 24 nt, Human herpesvirus 6B
agagaggaugcuuuuaguuucaaa

SEQ ID NO: 2042212 - RNA, 21 nt, Human herpesvirus 6B
uccuuauaaugugaacuaaau

SEQ ID NO: 2042213 - RNA, 13 nt, Human herpesvirus 6B
guguggcagcaau

SEQ ID NO: 2042214 - RNA, 18 nt, Human herpesvirus 6B
uaaaagcugcuaacggag

SEQ ID NO: 2042215 - RNA, 17 nt, Human herpesvirus 6B
gaaaggcggagacacau

SEQ ID NO: 2042216 - RNA, 17 nt, Human herpesvirus 6B
aguguuaaagaugcuga

SEQ ID NO: 2042217 - RNA, 14 nt, Human herpesvirus 6B
gaugccuguaggga

SEQ ID NO: 2042218 - RNA, 21 nt, Human herpesvirus 6B
augcuguugcuguuguuguag

SEQ ID NO: 2042219 - RNA, 13 nt, Human herpesvirus 6B
uucgagaaagagg

SEQ ID NO: 2042220 - RNA, 21 nt, Human herpesvirus 6B
caaacaacuguuguguuugaa

SEQ ID NO: 2042221 - RNA, 16 nt, Human herpesvirus 6B
uacuaugauagaagau

SEQ ID NO: 2042222 - RNA, 14 nt, Human herpesvirus 6B
gggcacggagaaca

SEQ ID NO: 2042223 - RNA, 21 nt, Human herpesvirus 6B
aguggcgcgcguuuuugguga

SEQ ID NO: 2042224 - RNA, 18 nt, Human herpesvirus 6B
auggaaaaggcggacagc

SEQ ID NO: 2042225 - RNA, 21 nt, Human herpesvirus 6B
ucgggccuggggacagacagg

SEQ ID NO: 2042226 - RNA, 16 nt, Human herpesvirus 6B
aggaaauaccaaagaa

SEQ ID NO: 2042227 - RNA, 22 nt, Human herpesvirus 6B
ugugggaaaauaauauuugcaa

SEQ ID NO: 2042228 - RNA, 18 nt, Human herpesvirus 6B
uauuaaugcuuauuucga

SEQ ID NO: 2042229 - RNA, 17 nt, Human herpesvirus 6B
uaguguuaaagaugcug

SEQ ID NO: 2042230 - RNA, 19 nt, Human herpesvirus 6B
caaguggaaguguaaaugu

SEQ ID NO: 2042231 - RNA, 13 nt, Human herpesvirus 6B
acccauuuaucug

SEQ ID NO: 2042232 - RNA, 18 nt, Human herpesvirus 6B
gaagaacagaggaagaaa

SEQ ID NO: 2042233 - RNA, 22 nt, Human herpesvirus 6B
uaaacauucuuaaauucaauuu

SEQ ID NO: 2042234 - RNA, 21 nt, Human herpesvirus 6B
cgucagcucuucacuuucuaa

SEQ ID NO: 2042235 - RNA, 11 nt, Human herpesvirus 6B
ggggggggccc

SEQ ID NO: 2042236 - RNA, 13 nt, Human herpesvirus 6B
ccaugcgaguaga

SEQ ID NO: 2042237 - RNA, 21 nt, Human herpesvirus 6B
ccuauucuaauuauaaaugua

SEQ ID NO: 2042238 - RNA, 20 nt, Human herpesvirus 6B
agaauuuucgaaaagaucag

SEQ ID NO: 2042239 - RNA, 18 nt, Human herpesvirus 6B
auuaauuuuuuguuucug

SEQ ID NO: 2042240 - RNA, 17 nt, Human herpesvirus 6B
gcucuccgcgcugcugg

SEQ ID NO: 2042241 - RNA, 13 nt, Human herpesvirus 6B
ugaaggcuacuau

SEQ ID NO: 2042242 - RNA, 22 nt, Human herpesvirus 6B
uaagugugcguuauuuucugua

SEQ ID NO: 2042243 - RNA, 22 nt, Human herpesvirus 6B
ccgguugucacacgucccuucu

SEQ ID NO: 2042244 - RNA, 24 nt, Human herpesvirus 6B
aauucugugaugggaaauguuguc

SEQ ID NO: 2042245 - RNA, 15 nt, Human herpesvirus 6B
gucucaguucaaaau

SEQ ID NO: 2042246 - RNA, 22 nt, Human herpesvirus 6B
uauaguuauucagauuucugua

SEQ ID NO: 2042247 - RNA, 23 nt, Human herpesvirus 6B
cacggcaacgcuccucccacgcc

SEQ ID NO: 2042248 - RNA, 17 nt, Human herpesvirus 6B
uuguagcucaguguuug

SEQ ID NO: 2042249 - RNA, 15 nt, Human herpesvirus 6B
gugaucaggaaauua

SEQ ID NO: 2042250 - RNA, 16 nt, Human herpesvirus 6B
gaugccaaagcuuucu

SEQ ID NO: 2042251 - RNA, 21 nt, Human herpesvirus 6B
aauugauugggucuuucccgu

SEQ ID NO: 2042252 - RNA, 16 nt, Human herpesvirus 6B
uuuacgcggcugauau

SEQ ID NO: 2042253 - RNA, 22 nt, Human herpesvirus 6B
aacuguucggauccaaugauga

SEQ ID NO: 2042254 - RNA, 16 nt, Human herpesvirus 6B
gaugaauugugcgugu

SEQ ID NO: 2042255 - RNA, 13 nt, Human herpesvirus 6B
ccucuugcagugg

SEQ ID NO: 2042256 - RNA, 13 nt, Human herpesvirus 6B
uugcauggcaugu

SEQ ID NO: 2042257 - RNA, 22 nt, Human herpesvirus 6B
aaaacagagccgcgguggaaau

SEQ ID NO: 2042258 - RNA, 18 nt, Human herpesvirus 6B
acaccagagaucagcaug

SEQ ID NO: 2042259 - RNA, 13 nt, Human herpesvirus 6B
aauaauuuacugu

SEQ ID NO: 2042260 - RNA, 18 nt, Human herpesvirus 6B
gucacacgucccuucucc

SEQ ID NO: 2042261 - RNA, 17 nt, Human herpesvirus 6B
acaauauaugaaauacu

SEQ ID NO: 2042262 - RNA, 16 nt, Human herpesvirus 6B
uguuuucauucugcua

SEQ ID NO: 2042263 - RNA, 19 nt, Human herpesvirus 6B
auucaguuuuuuguuucug

SEQ ID NO: 2042264 - RNA, 21 nt, Human herpesvirus 6B
aauaauucguuugauauagaa

SEQ ID NO: 2042265 - RNA, 18 nt, Human herpesvirus 6B
ugccgccgaagaaagagg

SEQ ID NO: 2042266 - RNA, 20 nt, Human herpesvirus 6B
uuuaaaaaugauaacuguuu

SEQ ID NO: 2042267 - RNA, 15 nt, Human herpesvirus 6B
cgggaucacgcaggc

SEQ ID NO: 2042268 - RNA, 13 nt, Human herpesvirus 6B
cagauuucccaaa

SEQ ID NO: 2042269 - RNA, 13 nt, Human herpesvirus 6B
ucaugaauuuaug

SEQ ID NO: 2042270 - RNA, 14 nt, Human herpesvirus 6B
uagaaguuaaucaa

SEQ ID NO: 2042271 - RNA, 14 nt, Human herpesvirus 6B
acaaagccacagcu

SEQ ID NO: 2042272 - RNA, 22 nt, Human herpesvirus 6B
aguggcgcgcguuuuuggugaa

SEQ ID NO: 2042273 - RNA, 15 nt, Human herpesvirus 6B
agacagauugaucau

SEQ ID NO: 2042274 - RNA, 21 nt, Human herpesvirus 6B
gagaucuggugaauguuucug

SEQ ID NO: 2042275 - RNA, 19 nt, Human herpesvirus 6B
gcaggggccguacgcgcca

SEQ ID NO: 2042276 - RNA, 18 nt, Human herpesvirus 6B
caaauaauuuuauugacu

SEQ ID NO: 2042277 - RNA, 15 nt, Human herpesvirus 6B
agccgacuauggaug

SEQ ID NO: 2042278 - RNA, 16 nt, Human herpesvirus 6B
ggaagaaaggaguuug

SEQ ID NO: 2042279 - RNA, 18 nt, Human herpesvirus 6B
uacgggaagguguuugau

SEQ ID NO: 2042280 - RNA, 20 nt, Human herpesvirus 6B
auuuagccuauuaagcagcc

SEQ ID NO: 2042281 - RNA, 21 nt, Human herpesvirus 6B
uagaacauaagggacagcagu

SEQ ID NO: 2042282 - RNA, 17 nt, Human herpesvirus 6B
ccucugcggcucucugc

SEQ ID NO: 2042283 - RNA, 15 nt, Human herpesvirus 6B
cuuaaaggcagcugg

SEQ ID NO: 2042284 - RNA, 15 nt, Human herpesvirus 6B
ccuuccgcuaccgcc

SEQ ID NO: 2042285 - RNA, 21 nt, Human herpesvirus 6B
aaaauugucuacaaucauuua

SEQ ID NO: 2042286 - RNA, 16 nt, Human herpesvirus 6B
aauuaaaguuuacugu

SEQ ID NO: 2042287 - RNA, 23 nt, Human herpesvirus 6B
gcagucaguaauaauauaaaaga

SEQ ID NO: 2042288 - RNA, 19 nt, Human herpesvirus 6B
guggaguauggugucugaa

SEQ ID NO: 2042289 - RNA, 23 nt, Human herpesvirus 6B
cauaagggacagcaguuuuuugg

SEQ ID NO: 2042290 - RNA, 16 nt, Human herpesvirus 6B
uuaugugaauucugug

SEQ ID NO: 2042291 - RNA, 14 nt, Human herpesvirus 6B
gcugucacacucug

SEQ ID NO: 2042292 - RNA, 15 nt, Human herpesvirus 6B
uaucaaacaacuguu

SEQ ID NO: 2042293 - RNA, 14 nt, Human herpesvirus 6B
cagaucuuucuaga

SEQ ID NO: 2042294 - RNA, 20 nt, Human herpesvirus 6B
acauccagaaaagcaaacau

SEQ ID NO: 2042295 - RNA, 12 nt, Human herpesvirus 6B
gggccagcccug

SEQ ID NO: 2042296 - RNA, 13 nt, Human herpesvirus 6B
ugaaaaaaaacug

SEQ ID NO: 2042297 - RNA, 14 nt, Human herpesvirus 6B
uagcacacgacaaa

SEQ ID NO: 2042298 - RNA, 19 nt, Human herpesvirus 6B
aggcuuuauggagauuuga

SEQ ID NO: 2042299 - RNA, 22 nt, Human herpesvirus 6B
uccacggcaacgcuccucccac

SEQ ID NO: 2042300 - RNA, 21 nt, Human herpesvirus 6B
uuauguuaauuccaagaugca

SEQ ID NO: 2042301 - RNA, 21 nt, Human herpesvirus 6B
cgggaccuggcgggcaccgag

SEQ ID NO: 2042302 - RNA, 15 nt, Human herpesvirus 6B
uucauuguaauucca

SEQ ID NO: 2042303 - RNA, 20 nt, Human herpesvirus 6B
caugaugaucugcuuuguuu

SEQ ID NO: 2042304 - RNA, 13 nt, Human herpesvirus 6B
ugcgucuuuugua

SEQ ID NO: 2042305 - RNA, 15 nt, Human herpesvirus 6B
cgagacggugauguu

SEQ ID NO: 2042306 - RNA, 9 nt, Human herpesvirus 6B
gaggaggag

SEQ ID NO: 2042307 - RNA, 23 nt, Human herpesvirus 6B
ucccuccguuaggaucagacaga

SEQ ID NO: 2042308 - RNA, 14 nt, Human herpesvirus 6B
gacauuagagaaau

SEQ ID NO: 2042309 - RNA, 14 nt, Human herpesvirus 6B
uaagcgugugguaa

SEQ ID NO: 2042310 - RNA, 16 nt, Human herpesvirus 6B
guauauggugaugaau

SEQ ID NO: 2042311 - RNA, 20 nt, Human herpesvirus 6B
gcaagcccggagaacugauc

SEQ ID NO: 2042312 - RNA, 17 nt, Human herpesvirus 6B
cguccauccaguugugu

SEQ ID NO: 2042313 - RNA, 22 nt, Human herpesvirus 6B
guccuauguuaacauugugaga

SEQ ID NO: 2042314 - RNA, 17 nt, Human herpesvirus 6B
aagaaugggauugucau

SEQ ID NO: 2042315 - RNA, 14 nt, Human herpesvirus 6B
cccucccgcagcuc

SEQ ID NO: 2042316 - RNA, 17 nt, Human herpesvirus 6B
ggaucccagaugcaguc

SEQ ID NO: 2042317 - RNA, 13 nt, Human herpesvirus 6B
gccauggguguca

SEQ ID NO: 2042318 - RNA, 12 nt, Human herpesvirus 6B
agauuucuguag

SEQ ID NO: 2042319 - RNA, 15 nt, Human herpesvirus 6B
uucuccacacuguuu

SEQ ID NO: 2042320 - RNA, 19 nt, Human herpesvirus 6B
uacuuacaucgauccaaaa

SEQ ID NO: 2042321 - RNA, 20 nt, Human herpesvirus 6B
ucuguuacaacaauauguaa

SEQ ID NO: 2042322 - RNA, 18 nt, Human herpesvirus 6B
uuucguuuacgaauucaa

SEQ ID NO: 2042323 - RNA, 15 nt, Human herpesvirus 6B
ugugaaaagugcuuu

SEQ ID NO: 2042324 - RNA, 22 nt, Human herpesvirus 6B
uuuguacucgcuuacgaucuuu

SEQ ID NO: 2042325 - RNA, 11 nt, Human herpesvirus 6B
ugaccuuuucc

SEQ ID NO: 2042326 - RNA, 18 nt, Human herpesvirus 6B
agaauagagauaaaugua

SEQ ID NO: 2042327 - RNA, 23 nt, Human herpesvirus 6B
gcuucacguccagcgcauccuua

SEQ ID NO: 2042328 - RNA, 18 nt, Human herpesvirus 6B
aauccuucauagccggga

SEQ ID NO: 2042329 - RNA, 18 nt, Human herpesvirus 6B
uacucugcaacuuuauuu

SEQ ID NO: 2042330 - RNA, 16 nt, Human herpesvirus 6B
augcuuuaaaaaugcu

SEQ ID NO: 2042331 - RNA, 14 nt, Human herpesvirus 6B
gagcauugaguaga

SEQ ID NO: 2042332 - RNA, 16 nt, Human herpesvirus 6B
gaggaaaugcagcagu

SEQ ID NO: 2042333 - RNA, 22 nt, Human herpesvirus 6B
aauuuccagggugaagacagaa

SEQ ID NO: 2042334 - RNA, 23 nt, Human herpesvirus 6B
agcaucgguuguguuagcuucgc

SEQ ID NO: 2042335 - RNA, 16 nt, Human herpesvirus 6B
aaacaaaauuaauuca

SEQ ID NO: 2042336 - RNA, 18 nt, Human herpesvirus 6B
gcauagacugaacacaaa

SEQ ID NO: 2042337 - RNA, 18 nt, Human herpesvirus 6B
cugcguuacaagcaugca

SEQ ID NO: 2042338 - RNA, 15 nt, Human herpesvirus 6B
uuugcgucagaguuu

SEQ ID NO: 2042339 - RNA, 20 nt, Human herpesvirus 6B
gaaccacaucuuuuccugcu

SEQ ID NO: 2042340 - RNA, 21 nt, Human herpesvirus 6B
uuuaacgcagauauauggauc

SEQ ID NO: 2042341 - RNA, 22 nt, Human herpesvirus 6B
auuccauguggccuuuuuguaa

SEQ ID NO: 2042342 - RNA, 18 nt, Human herpesvirus 6B
gugcccacugugguguuu

SEQ ID NO: 2042343 - RNA, 19 nt, Human herpesvirus 6B
aacuaaugcggaacauugu

SEQ ID NO: 2042344 - RNA, 16 nt, Human herpesvirus 6B
ugaaaucacuccgcau

SEQ ID NO: 2042345 - RNA, 22 nt, Human herpesvirus 6B
aucuugaaaagccccugcuuga

SEQ ID NO: 2042346 - RNA, 18 nt, Human herpesvirus 6B
augggaaauguugucaau

SEQ ID NO: 2042347 - RNA, 13 nt, Human herpesvirus 6B
cacauagagaaga

SEQ ID NO: 2042348 - RNA, 19 nt, Human herpesvirus 6B
cugcuccguucccuucucg

SEQ ID NO: 2042349 - RNA, 23 nt, Human herpesvirus 6B
cucagcauuguugagaauuuaac

SEQ ID NO: 2042350 - RNA, 13 nt, Human herpesvirus 6B
uaagcugcagaca

SEQ ID NO: 2042351 - RNA, 21 nt, Human herpesvirus 6B
cgcggagcacgcacgagaaca

SEQ ID NO: 2042352 - RNA, 17 nt, Human herpesvirus 6B
uacaagaaaagaaacaa

SEQ ID NO: 2042353 - RNA, 23 nt, Human herpesvirus 6B
uaagugugcguuauuuucuguau

SEQ ID NO: 2042354 - RNA, 21 nt, Human herpesvirus 6B
aaaauaauccucuuagacacu

SEQ ID NO: 2042355 - RNA, 16 nt, Human herpesvirus 6B
cguggccgucuccugc

SEQ ID NO: 2042356 - RNA, 22 nt, Human herpesvirus 6B
gugaucgcaaaagagaaggaaa

SEQ ID NO: 2042357 - RNA, 11 nt, Human herpesvirus 6B
uuauguuugau

SEQ ID NO: 2042358 - RNA, 14 nt, Human herpesvirus 6B
uggacaccaauaaa

SEQ ID NO: 2042359 - RNA, 18 nt, Human herpesvirus 6B
acaaauaauuuuauugac

SEQ ID NO: 2042360 - RNA, 20 nt, Human herpesvirus 6B
ccacugcggaguuuuauggc

SEQ ID NO: 2042361 - RNA, 22 nt, Human herpesvirus 6B
guuauuguguucugcucugugu

SEQ ID NO: 2042362 - RNA, 16 nt, Human herpesvirus 6B
uccggucaacuucuau

SEQ ID NO: 2042363 - RNA, 19 nt, Human herpesvirus 6B
caauaaaaaacuuauaauu

SEQ ID NO: 2042364 - RNA, 18 nt, Human herpesvirus 6B
auuuucuccuuuuuugac

SEQ ID NO: 2042365 - RNA, 17 nt, Human herpesvirus 6B
gaaucacuuaguugaua

SEQ ID NO: 2042366 - RNA, 16 nt, Human herpesvirus 6B
cgagccggacaggagg

SEQ ID NO: 2042367 - RNA, 16 nt, Human herpesvirus 6B
auaucuggauauguau

SEQ ID NO: 2042368 - RNA, 21 nt, Human herpesvirus 6B
uucuuaggaaacuuucaaaau

SEQ ID NO: 2042369 - RNA, 16 nt, Human herpesvirus 6B
gcaaacucaaagaaag

SEQ ID NO: 2042370 - RNA, 14 nt, Human herpesvirus 6B
gaacucucacggcc

SEQ ID NO: 2042371 - RNA, 16 nt, Human herpesvirus 6B
ccagauaggaaaaggu

SEQ ID NO: 2042372 - RNA, 19 nt, Human herpesvirus 6B
ugacggcgaugaaaaagau

SEQ ID NO: 2042373 - RNA, 18 nt, Human herpesvirus 6B
gcagaaucaagaaacacu

SEQ ID NO: 2042374 - RNA, 20 nt, Human herpesvirus 6B
cuugguguaccagacaaaac

SEQ ID NO: 2042375 - RNA, 14 nt, Human herpesvirus 6B
gauugauccuguaa

SEQ ID NO: 2042376 - RNA, 12 nt, Human herpesvirus 6B
aaucacaaauau

SEQ ID NO: 2042377 - RNA, 16 nt, Human herpesvirus 6B
uauuucguauguuuaa

SEQ ID NO: 2042378 - RNA, 13 nt, Human herpesvirus 6B
cgccauaauggaa

SEQ ID NO: 2042379 - RNA, 15 nt, Human herpesvirus 6B
gacugugaggugauu

SEQ ID NO: 2042380 - RNA, 15 nt, Human herpesvirus 6B
aagauuuuuggauuu

SEQ ID NO: 2042381 - RNA, 15 nt, Human herpesvirus 6B
ggccuggggacagac

SEQ ID NO: 2042382 - RNA, 18 nt, Human herpesvirus 6B
ugacggacuuggaaaagg

SEQ ID NO: 2042383 - RNA, 20 nt, Human herpesvirus 6B
cgcggccgucgcgcucgccg

SEQ ID NO: 2042384 - RNA, 15 nt, Human herpesvirus 6B
uuaaagauguguuaa

SEQ ID NO: 2042385 - RNA, 15 nt, Human herpesvirus 6B
aagcaaguuccauuu

SEQ ID NO: 2042386 - RNA, 12 nt, Human herpesvirus 6B
ccccccucuugc

SEQ ID NO: 2042387 - RNA, 14 nt, Human herpesvirus 6B
acacggcgaaagcc

SEQ ID NO: 2042388 - RNA, 13 nt, Human herpesvirus 6B
ggcgucgggcgac

SEQ ID NO: 2042389 - RNA, 13 nt, Human herpesvirus 6B
augcggagaagua

SEQ ID NO: 2042390 - RNA, 16 nt, Human herpesvirus 6B
ggagacugcacagaau

SEQ ID NO: 2042391 - RNA, 23 nt, Human herpesvirus 6B
ucgaguuguauuauaaaaacuaa

SEQ ID NO: 2042392 - RNA, 15 nt, Human herpesvirus 6B
aaaucauauauugaa

SEQ ID NO: 2042393 - RNA, 16 nt, Human herpesvirus 6B
gcagauauauggauca

SEQ ID NO: 2042394 - RNA, 17 nt, Human herpesvirus 6B
cgcuggucgccguggcc

SEQ ID NO: 2042395 - RNA, 16 nt, Human herpesvirus 6B
gcauggugauguguua

SEQ ID NO: 2042396 - RNA, 16 nt, Human herpesvirus 6B
uaaaacaucagaugaa

SEQ ID NO: 2042397 - RNA, 23 nt, Human herpesvirus 6B
auaccauuuuauacgaaaauaaa

SEQ ID NO: 2042398 - RNA, 16 nt, Human herpesvirus 6B
auuguguucugcucug

SEQ ID NO: 2042399 - RNA, 21 nt, Human herpesvirus 6B
ucuguaaaaggauaaauuccu

SEQ ID NO: 2042400 - RNA, 22 nt, Human herpesvirus 6B
aaccgaaaacacccugauggau

SEQ ID NO: 2042401 - RNA, 22 nt, Human herpesvirus 6B
acuaucuccuugaugauacuuu

SEQ ID NO: 2042402 - RNA, 17 nt, Human herpesvirus 6B
aaccaugcaucuugcaa

SEQ ID NO: 2042403 - RNA, 15 nt, Human herpesvirus 6B
agaggaagccggagc

SEQ ID NO: 2042404 - RNA, 22 nt, Human herpesvirus 6B
cacaaacgccuagagaacagau

SEQ ID NO: 2042405 - RNA, 15 nt, Human herpesvirus 6B
uuagagaaauuugug

SEQ ID NO: 2042406 - RNA, 14 nt, Human herpesvirus 6B
gcuuugguggaaaa

SEQ ID NO: 2042407 - RNA, 12 nt, Human herpesvirus 6B
cugccuuuggac

SEQ ID NO: 2042408 - RNA, 15 nt, Human herpesvirus 6B
accuaagcuggacag

SEQ ID NO: 2042409 - RNA, 18 nt, Human herpesvirus 6B
gccaaacauaucacagau

SEQ ID NO: 2042410 - RNA, 19 nt, Human herpesvirus 6B
gguucaaagauagacagug

SEQ ID NO: 2042411 - RNA, 22 nt, Human herpesvirus 6B
cgacacggagugcgacaggaga

SEQ ID NO: 2042412 - RNA, 21 nt, Human herpesvirus 6B
aucuuaaucagauaucugaaa

SEQ ID NO: 2042413 - RNA, 23 nt, Human herpesvirus 6B
aggcacaauucuaacuaaaauua

SEQ ID NO: 2042414 - RNA, 13 nt, Human herpesvirus 6B
aauuauaaaugua

SEQ ID NO: 2042415 - RNA, 21 nt, Human herpesvirus 6B
agcuuguuaugacaaaaccau

SEQ ID NO: 2042416 - RNA, 16 nt, Human herpesvirus 6B
acagcgcauaaauaaa

SEQ ID NO: 2042417 - RNA, 23 nt, Human herpesvirus 6B
ggaguaauuauugugacaaggua

SEQ ID NO: 2042418 - RNA, 23 nt, Human herpesvirus 6B
auuuaaaaagcaaggugaaacau

SEQ ID NO: 2042419 - RNA, 14 nt, Human herpesvirus 6B
agggcguuucucgc

SEQ ID NO: 2042420 - RNA, 22 nt, Human herpesvirus 6B
acggcgaggggacggacagagc

SEQ ID NO: 2042421 - RNA, 20 nt, Human herpesvirus 6B
uuacuguccguuauuguguu

SEQ ID NO: 2042422 - RNA, 15 nt, Human herpesvirus 6B
aucaagacuacucug

SEQ ID NO: 2042423 - RNA, 15 nt, Human herpesvirus 6B
auucaauuucuaaau

SEQ ID NO: 2042424 - RNA, 14 nt, Human herpesvirus 6B
ugaaaucuuuccug

SEQ ID NO: 2042425 - RNA, 17 nt, Human herpesvirus 6B
aggcgagauuuggugga

SEQ ID NO: 2042426 - RNA, 20 nt, Human herpesvirus 6B
aauucucugauugauccugu

SEQ ID NO: 2042427 - RNA, 15 nt, Human herpesvirus 6B
gaucacuuuguuucu

SEQ ID NO: 2042428 - RNA, 20 nt, Human herpesvirus 6B
cauucuugcagauuucacuu

SEQ ID NO: 2042429 - RNA, 20 nt, Human herpesvirus 6B
ccguuauuguguucugcucu

SEQ ID NO: 2042430 - RNA, 16 nt, Human herpesvirus 6B
agcuguucgguuuaau

SEQ ID NO: 2042431 - RNA, 21 nt, Human herpesvirus 6B
gaucuuauaaaugugagcagu

SEQ ID NO: 2042432 - RNA, 22 nt, Human herpesvirus 6B
ccgaagaaucugccgaucacca

SEQ ID NO: 2042433 - RNA, 18 nt, Human herpesvirus 6B
uguuagcaagcugggaaa

SEQ ID NO: 2042434 - RNA, 15 nt, Human herpesvirus 6B
ggagucggucuguuc

SEQ ID NO: 2042435 - RNA, 17 nt, Human herpesvirus 6B
gucuuacaucuaagcug

SEQ ID NO: 2042436 - RNA, 19 nt, Human herpesvirus 6B
cgagaaacggagagcgaca

SEQ ID NO: 2042437 - RNA, 18 nt, Human herpesvirus 6B
cagagauuuuuuaaauaa

SEQ ID NO: 2042438 - RNA, 22 nt, Human herpesvirus 6B
uuuuuaaacagauuuugaggau

SEQ ID NO: 2042439 - RNA, 14 nt, Human herpesvirus 6B
ccagccgcccuccc

SEQ ID NO: 2042440 - RNA, 16 nt, Human herpesvirus 6B
aacgcuucuaacaaua

SEQ ID NO: 2042441 - RNA, 21 nt, Human herpesvirus 6B
ugacguuuagcuuugugaacu

SEQ ID NO: 2042442 - RNA, 14 nt, Human herpesvirus 6B
aaagguuuuugcug

SEQ ID NO: 2042443 - RNA, 22 nt, Human herpesvirus 6B
ccguccccgccgcgcuggucgc

SEQ ID NO: 2042444 - RNA, 21 nt, Human herpesvirus 6B
agucuagagguuuucuuuccc

SEQ ID NO: 2042445 - RNA, 22 nt, Human herpesvirus 6B
ccguucccggggggggggggcc

SEQ ID NO: 2042446 - RNA, 12 nt, Human herpesvirus 6B
uaauuuacuguc

SEQ ID NO: 2042447 - RNA, 22 nt, Human herpesvirus 6B
acaaguggaaguguaaauguca

SEQ ID NO: 2042448 - RNA, 15 nt, Human herpesvirus 6B
aucaaaaaaaugaua

SEQ ID NO: 2042449 - RNA, 22 nt, Human herpesvirus 6B
aacgcaaagggaagccagccgc

SEQ ID NO: 2042450 - RNA, 15 nt, Human herpesvirus 6B
ccugaaaccccacaa

SEQ ID NO: 2042451 - RNA, 19 nt, Human herpesvirus 6B
agcagaugcuuaccggugu

SEQ ID NO: 2042452 - RNA, 14 nt, Human herpesvirus 6B
uucucgccgccucg

SEQ ID NO: 2042453 - RNA, 15 nt, Human herpesvirus 6B
uuauuauguuuuuac

SEQ ID NO: 2042454 - RNA, 18 nt, Human herpesvirus 6B
ggggcuucuaccguaguc

SEQ ID NO: 2042455 - RNA, 17 nt, Human herpesvirus 6B
cucaggucguauuauug

SEQ ID NO: 2042456 - RNA, 12 nt, Human herpesvirus 6B
auuauaaaugua

SEQ ID NO: 2042457 - RNA, 17 nt, Human herpesvirus 6B
cauuuuuuugaaaucac

SEQ ID NO: 2042458 - RNA, 18 nt, Human herpesvirus 6B
uuuguggcuauuugacaa

SEQ ID NO: 2042459 - RNA, 16 nt, Human herpesvirus 6B
guccaaugaauacuuc

SEQ ID NO: 2042460 - RNA, 17 nt, Human herpesvirus 6B
uccagcaagaaaaagag

SEQ ID NO: 2042461 - RNA, 23 nt, Human herpesvirus 6B
acauccagaaaagcaaacaugca

SEQ ID NO: 2042462 - RNA, 19 nt, Human herpesvirus 6B
aaaaguuagaguuggauuu

SEQ ID NO: 2042463 - RNA, 13 nt, Human herpesvirus 6B
ucauacauccaga

SEQ ID NO: 2042464 - RNA, 22 nt, Human herpesvirus 6B
gaaucagaucacucagauuuca

SEQ ID NO: 2042465 - RNA, 13 nt, Human herpesvirus 6B
agauguguggugu

SEQ ID NO: 2042466 - RNA, 22 nt, Human herpesvirus 6B
ggaucucgacacguccauaggc

SEQ ID NO: 2042467 - RNA, 13 nt, Human herpesvirus 6B
ggcgcagaaggag

SEQ ID NO: 2042468 - RNA, 15 nt, Human herpesvirus 6B
aucucgaugccaaag

SEQ ID NO: 2042469 - RNA, 19 nt, Human herpesvirus 6B
cgccgccuucucugucgcu

SEQ ID NO: 2042470 - RNA, 15 nt, Human herpesvirus 6B
cuagacgugucuuca

SEQ ID NO: 2042471 - RNA, 18 nt, Human herpesvirus 6B
ucgugugugaaaauuccu

SEQ ID NO: 2042472 - RNA, 15 nt, Human herpesvirus 6B
ggcacgcgccgucag

SEQ ID NO: 2042473 - RNA, 22 nt, Human herpesvirus 6B
ucuacguauaaaaguccucaaa

SEQ ID NO: 2042474 - RNA, 20 nt, Human herpesvirus 6B
agauucgggaugugcggaga

SEQ ID NO: 2042475 - RNA, 11 nt, Human herpesvirus 6B
ugaacagagau

SEQ ID NO: 2042476 - RNA, 19 nt, Human herpesvirus 6B
uguuaacauugugagaaca

SEQ ID NO: 2042477 - RNA, 21 nt, Human herpesvirus 6B
ucauacgacugacgauuucau

SEQ ID NO: 2042478 - RNA, 21 nt, Human herpesvirus 6B
cucuuuccacacuaucuucga

SEQ ID NO: 2042479 - RNA, 13 nt, Human herpesvirus 6B
uguuguguuugaa

SEQ ID NO: 2042480 - RNA, 14 nt, Human herpesvirus 6B
ucucugcaugucuu

SEQ ID NO: 2042481 - RNA, 21 nt, Human herpesvirus 6B
aauagucccauaaagcuuuca

SEQ ID NO: 2042482 - RNA, 13 nt, Human herpesvirus 6B
gcuuccggagaag

SEQ ID NO: 2042483 - RNA, 17 nt, Human herpesvirus 6B
uacgagaccuguuugag

SEQ ID NO: 2042484 - RNA, 15 nt, Human herpesvirus 6B
cucucacccccacuc

SEQ ID NO: 2042485 - RNA, 13 nt, Human herpesvirus 6B
uacguauaaaagu

SEQ ID NO: 2042486 - RNA, 22 nt, Human herpesvirus 6B
uucauagccgggagauuccucu

SEQ ID NO: 2042487 - RNA, 13 nt, Human herpesvirus 6B
ugaggauggauuc

SEQ ID NO: 2042488 - RNA, 17 nt, Human herpesvirus 6B
caccccccucuugcagu

SEQ ID NO: 2042489 - RNA, 13 nt, Human herpesvirus 6B
ggaagggcucugu

SEQ ID NO: 2042490 - RNA, 23 nt, Human herpesvirus 6B
uaaccugagaauuuucgaaaaga

SEQ ID NO: 2042491 - RNA, 23 nt, Human herpesvirus 6B
auucagaaaauuggugugcauua

SEQ ID NO: 2042492 - RNA, 18 nt, Human herpesvirus 6B
cgccgucgucgcucuccc

SEQ ID NO: 2042493 - RNA, 19 nt, Human herpesvirus 6B
gugauugaugagacggaau

SEQ ID NO: 2042494 - RNA, 17 nt, Human herpesvirus 6B
gaacaaaguaauaugau

SEQ ID NO: 2042495 - RNA, 20 nt, Human herpesvirus 6B
gccgcgugaggugacggagg

SEQ ID NO: 2042496 - RNA, 14 nt, Human herpesvirus 6B
auuacuuuugggau

SEQ ID NO: 2042497 - RNA, 20 nt, Human herpesvirus 6B
caacacggggugagagagcu

SEQ ID NO: 2042498 - RNA, 19 nt, Human herpesvirus 6B
uauucuaauuauaaaugua

SEQ ID NO: 2042499 - RNA, 18 nt, Human herpesvirus 6B
ugcaucuugcaagaaagc

SEQ ID NO: 2042500 - RNA, 11 nt, Human herpesvirus 6B
ccgccuucucu

SEQ ID NO: 2042501 - RNA, 19 nt, Human herpesvirus 6B
aguccaaugaauacuucuc

SEQ ID NO: 2042502 - RNA, 16 nt, Human herpesvirus 6B
uguucuuuugucauug

SEQ ID NO: 2042503 - RNA, 15 nt, Human herpesvirus 6B
agaucuugaaaagcc

SEQ ID NO: 2042504 - RNA, 14 nt, Human herpesvirus 6B
guuaaagaugcuga

SEQ ID NO: 2042505 - RNA, 17 nt, Human herpesvirus 6B
uguaucgauuuaaccuu

SEQ ID NO: 2042506 - RNA, 16 nt, Human herpesvirus 6B
ggggaccacugucguc

SEQ ID NO: 2042507 - RNA, 13 nt, Human herpesvirus 6B
uugcugucgcccg

SEQ ID NO: 2042508 - RNA, 22 nt, Human herpesvirus 6B
uagaauuuaacgauccuuuucu

SEQ ID NO: 2042509 - RNA, 18 nt, Human herpesvirus 6B
agacaaaaacaugugcuu

SEQ ID NO: 2042510 - RNA, 22 nt, Human herpesvirus 6B
agacauugguugauuuuuguaa

SEQ ID NO: 2042511 - RNA, 14 nt, Human herpesvirus 6B
caccccccucuugc

SEQ ID NO: 2042512 - RNA, 21 nt, Human herpesvirus 6B
gggacuccgagccggacagga

SEQ ID NO: 2042513 - RNA, 17 nt, Human herpesvirus 6B
cuaaaagauuguuuuca

SEQ ID NO: 2042514 - RNA, 18 nt, Human herpesvirus 6B
aaaauacuauguggaaau

SEQ ID NO: 2042515 - RNA, 15 nt, Human herpesvirus 6B
acgguaaagaugaga

SEQ ID NO: 2042516 - RNA, 21 nt, Human herpesvirus 6B
aacuagcuccuaaauaccauu

SEQ ID NO: 2042517 - RNA, 23 nt, Human herpesvirus 6B
augacauuuauuagcauucaagu

SEQ ID NO: 2042518 - RNA, 14 nt, Human herpesvirus 6B
gccgcuuaaaucaa

SEQ ID NO: 2042519 - RNA, 18 nt, Human herpesvirus 6B
ggacgcguucggucucug

SEQ ID NO: 2042520 - RNA, 13 nt, Human herpesvirus 6B
cccacgcccccuc

SEQ ID NO: 2042521 - RNA, 16 nt, Human herpesvirus 6B
auaucgauucuguaau

SEQ ID NO: 2042522 - RNA, 20 nt, Human herpesvirus 6B
uauuaugucgauacaauaaa

SEQ ID NO: 2042523 - RNA, 20 nt, Human herpesvirus 6B
uacauucaaucuguauaaga

SEQ ID NO: 2042524 - RNA, 24 nt, Human herpesvirus 6B
ugaacaucuauuaucauuuaugca

SEQ ID NO: 2042525 - RNA, 19 nt, Human herpesvirus 6B
gugacuaaugcgauuucac

SEQ ID NO: 2042526 - RNA, 14 nt, Human herpesvirus 6B
uaggguuaggguua

SEQ ID NO: 2042527 - RNA, 15 nt, Human herpesvirus 6B
gucucugugaagagg

SEQ ID NO: 2042528 - RNA, 17 nt, Human herpesvirus 6B
ccggcccguccaccguc

SEQ ID NO: 2042529 - RNA, 17 nt, Human herpesvirus 6B
acaaaaaaaaaaaacau

SEQ ID NO: 2042530 - RNA, 14 nt, Human herpesvirus 6B
aaagagaaggaaaa

SEQ ID NO: 2042531 - RNA, 18 nt, Human herpesvirus 6B
acuuuaucuuuugcaaag

SEQ ID NO: 2042532 - RNA, 19 nt, Human herpesvirus 6B
aacaacugccgccauauua

SEQ ID NO: 2042533 - RNA, 12 nt, Human herpesvirus 6B
guccguggaaaa

SEQ ID NO: 2042534 - RNA, 23 nt, Human herpesvirus 6B
cuuuugcaaagcuuugcacggcg

SEQ ID NO: 2042535 - RNA, 13 nt, Human herpesvirus 6B
auuaaaugugaac

SEQ ID NO: 2042536 - RNA, 20 nt, Human herpesvirus 6B
uuuugacaccucauaucaaa

SEQ ID NO: 2042537 - RNA, 17 nt, Human herpesvirus 6B
gacccaacagaagccac

SEQ ID NO: 2042538 - RNA, 14 nt, Human herpesvirus 6B
uuuaaaaacacacu

SEQ ID NO: 2042539 - RNA, 16 nt, Human herpesvirus 6B
uaauauuugcaagcag

SEQ ID NO: 2042540 - RNA, 13 nt, Human herpesvirus 6B
ugacagaaaucuu

SEQ ID NO: 2042541 - RNA, 14 nt, Human herpesvirus 6B
ccucccuccauccc

SEQ ID NO: 2042542 - RNA, 22 nt, Human herpesvirus 6B
aacgaagguucgacuauguuag

SEQ ID NO: 2042543 - RNA, 15 nt, Human herpesvirus 6B
ggaaguguaaauguc

SEQ ID NO: 2042544 - RNA, 12 nt, Human herpesvirus 6B
gguuugcuuugg

SEQ ID NO: 2042545 - RNA, 13 nt, Human herpesvirus 6B
cuagacacacaga

SEQ ID NO: 2042546 - RNA, 21 nt, Human herpesvirus 6B
cagauuaauuaucauuaugag

SEQ ID NO: 2042547 - RNA, 21 nt, Human herpesvirus 6B
ucccugcgggacgugaucugc

SEQ ID NO: 2042548 - RNA, 20 nt, Human herpesvirus 6B
cucuuaugguucuugagcag

SEQ ID NO: 2042549 - RNA, 18 nt, Human herpesvirus 6B
gccucgccgcucccgcuc

SEQ ID NO: 2042550 - RNA, 14 nt, Human herpesvirus 6B
cggcauuuguguuu

SEQ ID NO: 2042551 - RNA, 17 nt, Human herpesvirus 6B
gcguguaauuguugaaa

SEQ ID NO: 2042552 - RNA, 22 nt, Human herpesvirus 6B
gaaauguugccuuuguaaaaug

SEQ ID NO: 2042553 - RNA, 20 nt, Human herpesvirus 6B
cugucaguggcuugcugucg

SEQ ID NO: 2042554 - RNA, 22 nt, Human herpesvirus 6B
cuccauacccauuuaucugccg

SEQ ID NO: 2042555 - RNA, 14 nt, Human herpesvirus 6B
uaccaagaaaucac

SEQ ID NO: 2042556 - RNA, 16 nt, Human herpesvirus 6B
aaaugagcaacauuua

SEQ ID NO: 2042557 - RNA, 14 nt, Human herpesvirus 6B
agcaaauuuuacca

SEQ ID NO: 2042558 - RNA, 15 nt, Human herpesvirus 6B
aaacuaaauuuuaug

SEQ ID NO: 2042559 - RNA, 15 nt, Human herpesvirus 6B
cucaccuucagacuc

SEQ ID NO: 2042560 - RNA, 15 nt, Human herpesvirus 6B
uucagauuucuguag

SEQ ID NO: 2042561 - RNA, 17 nt, Human herpesvirus 6B
uugacgucugggaucau

SEQ ID NO: 2042562 - RNA, 14 nt, Human herpesvirus 6B
ucucucaacuuuua

SEQ ID NO: 2042563 - RNA, 18 nt, Human herpesvirus 6B
gcguuaucgacggcagcg

SEQ ID NO: 2042564 - RNA, 15 nt, Human herpesvirus 6B
cauuuaccagagaua

SEQ ID NO: 2042565 - RNA, 14 nt, Human herpesvirus 6B
agauuuaaaaauga

SEQ ID NO: 2042566 - RNA, 23 nt, Human herpesvirus 6B
uggauuaucagagagugacaucu

SEQ ID NO: 2042567 - RNA, 14 nt, Human herpesvirus 6B
agccacagcuuugc

SEQ ID NO: 2042568 - RNA, 20 nt, Human herpesvirus 6B
auguaaacacgaaacugcuu

SEQ ID NO: 2042569 - RNA, 21 nt, Human herpesvirus 6B
guucuugauguuagauaaaau

SEQ ID NO: 2042570 - RNA, 20 nt, Human herpesvirus 6B
caggagcaggcuccccaggc

SEQ ID NO: 2042571 - RNA, 17 nt, Human herpesvirus 6B
agccugaaggcuacuau

SEQ ID NO: 2042572 - RNA, 20 nt, Human herpesvirus 6B
cccugcgggacgugaucugc

SEQ ID NO: 2042573 - RNA, 18 nt, Human herpesvirus 6B
aaaucguaggcaucuuca

SEQ ID NO: 2042574 - RNA, 15 nt, Human herpesvirus 6B
ugcucgggaucacgc

SEQ ID NO: 2042575 - RNA, 19 nt, Human herpesvirus 6B
uacagcaaaaauuucaugc

SEQ ID NO: 2042576 - RNA, 16 nt, Human herpesvirus 6B
gcauggaaaaggcgga

SEQ ID NO: 2042577 - RNA, 16 nt, Human herpesvirus 6B
auauuggucaauguau

SEQ ID NO: 2042578 - RNA, 12 nt, Human herpesvirus 6B
cuccugcaauuu

SEQ ID NO: 2042579 - RNA, 22 nt, Human herpesvirus 6B
ugugaaaagugcuuuauccggc

SEQ ID NO: 2042580 - RNA, 14 nt, Human herpesvirus 6B
gauucuuuaaagau

SEQ ID NO: 2042581 - RNA, 11 nt, Human herpesvirus 6B
cugucuguucc

SEQ ID NO: 2042582 - RNA, 23 nt, Human herpesvirus 6B
agauauauggaucaaucuccaaa

SEQ ID NO: 2042583 - RNA, 18 nt, Human herpesvirus 6B
guucaugcgaauuaaaac

SEQ ID NO: 2042584 - RNA, 19 nt, Human herpesvirus 6B
gggcgcaccggcgacacgc

SEQ ID NO: 2042585 - RNA, 22 nt, Human herpesvirus 6B
auaaucuuguagcucaguguuu

SEQ ID NO: 2042586 - RNA, 19 nt, Human herpesvirus 6B
gcacucuccgaccagcacc

SEQ ID NO: 2042587 - RNA, 21 nt, Human herpesvirus 6B
cucauggaucaggucggcagg

SEQ ID NO: 2042588 - RNA, 17 nt, Human herpesvirus 6B
uuugacaccucauauca

SEQ ID NO: 2042589 - RNA, 17 nt, Human herpesvirus 6B
caggucaagcgccagga

SEQ ID NO: 2042590 - RNA, 21 nt, Human herpesvirus 6B
cagucgcggcggccccgcguc

SEQ ID NO: 2042591 - RNA, 17 nt, Human herpesvirus 6B
agguuacaaaggggcua

SEQ ID NO: 2042592 - RNA, 13 nt, Human herpesvirus 6B
caguauaaauucu

SEQ ID NO: 2042593 - RNA, 14 nt, Human herpesvirus 6B
ucuuuggaaaacgu

SEQ ID NO: 2042594 - RNA, 12 nt, Human herpesvirus 6B
cuuuaaaaauua

SEQ ID NO: 2042595 - RNA, 18 nt, Human herpesvirus 6B
auaauaucauucugauaa

SEQ ID NO: 2042596 - RNA, 13 nt, Human herpesvirus 6B
uuuucuauuaaaa

SEQ ID NO: 2042597 - RNA, 23 nt, Human herpesvirus 6B
cuauauuuucguugaagaauaag

SEQ ID NO: 2042598 - RNA, 12 nt, Human herpesvirus 6B
acuauguggaaa

SEQ ID NO: 2042599 - RNA, 16 nt, Human herpesvirus 6B
cucccgcagcuccuuc

SEQ ID NO: 2042600 - RNA, 16 nt, Human herpesvirus 6B
ggaauauauagaagaa

SEQ ID NO: 2042601 - RNA, 15 nt, Human herpesvirus 6B
ccgggacagcacccg

SEQ ID NO: 2042602 - RNA, 18 nt, Human herpesvirus 6B
ugauuggaaucacaaaau

SEQ ID NO: 2042603 - RNA, 17 nt, Human herpesvirus 6B
gucaugcaaaacagauu

SEQ ID NO: 2042604 - RNA, 20 nt, Human herpesvirus 6B
gaggaagucugaauuuaaug

SEQ ID NO: 2042605 - RNA, 15 nt, Human herpesvirus 6B
gcaggugcugcuaaa

SEQ ID NO: 2042606 - RNA, 22 nt, Human herpesvirus 6B
agagggagaaacggacacgcgc

SEQ ID NO: 2042607 - RNA, 15 nt, Human herpesvirus 6B
cuggcgaaaauuguu

SEQ ID NO: 2042608 - RNA, 14 nt, Human herpesvirus 6B
gcagaggccagacu

SEQ ID NO: 2042609 - RNA, 15 nt, Human herpesvirus 6B
uuaaauccuagaguu

SEQ ID NO: 2042610 - RNA, 19 nt, Human herpesvirus 6B
cugauuccuucaauguuuu

SEQ ID NO: 2042611 - RNA, 21 nt, Human herpesvirus 6B
uaacaucucagaucuagaucu

SEQ ID NO: 2042612 - RNA, 12 nt, Human herpesvirus 6B
ggcgccucccau

SEQ ID NO: 2042613 - RNA, 13 nt, Human herpesvirus 6B
cugccgcguggaa

SEQ ID NO: 2042614 - RNA, 15 nt, Human herpesvirus 6B
ucaucaaaugugauu

SEQ ID NO: 2042615 - RNA, 23 nt, Human herpesvirus 6B
auaugucguuucaugggagaaau

SEQ ID NO: 2042616 - RNA, 21 nt, Human herpesvirus 6B
acaaugcaugucgaacagcuu

SEQ ID NO: 2042617 - RNA, 20 nt, Human herpesvirus 6B
gggacggacagagcggagag

SEQ ID NO: 2042618 - RNA, 14 nt, Human herpesvirus 6B
auauaaaaaaagag

SEQ ID NO: 2042619 - RNA, 17 nt, Human herpesvirus 6B
auugcagguuggcgcuc

SEQ ID NO: 2042620 - RNA, 15 nt, Human herpesvirus 6B
gaaaauguguucuua

SEQ ID NO: 2042621 - RNA, 15 nt, Human herpesvirus 6B
cauauacccucgccc

SEQ ID NO: 2042622 - RNA, 21 nt, Human herpesvirus 6B
ugauuccguugugacagaauu

SEQ ID NO: 2042623 - RNA, 18 nt, Human herpesvirus 6B
gcgaugcgccacagggag

SEQ ID NO: 2042624 - RNA, 16 nt, Human herpesvirus 6B
gaccaggauagaaaaa

SEQ ID NO: 2042625 - RNA, 21 nt, Human herpesvirus 6B
ugaggugauuugaacagagau

SEQ ID NO: 2042626 - RNA, 16 nt, Human herpesvirus 6B
aggaggaagaggagga

SEQ ID NO: 2042627 - RNA, 20 nt, Human herpesvirus 6B
gguugucacacgucccuucu

SEQ ID NO: 2042628 - RNA, 15 nt, Human herpesvirus 6B
uauauugcucaaaau

SEQ ID NO: 2042629 - RNA, 15 nt, Human herpesvirus 6B
gaccacucgggccgg

SEQ ID NO: 2042630 - RNA, 15 nt, Human herpesvirus 6B
agcagagguaaagua

SEQ ID NO: 2042631 - RNA, 23 nt, Human herpesvirus 6B
ucuccguuacccgggagcuucac

SEQ ID NO: 2042632 - RNA, 22 nt, Human herpesvirus 6B
gggucuugguuuuauaagcuca

SEQ ID NO: 2042633 - RNA, 16 nt, Human herpesvirus 6B
gcguguuauggggaag

SEQ ID NO: 2042634 - RNA, 14 nt, Human herpesvirus 6B
uugcagcaucgccu

SEQ ID NO: 2042635 - RNA, 20 nt, Human herpesvirus 6B
gaauuaaagauuuaaaaaug

SEQ ID NO: 2042636 - RNA, 15 nt, Human herpesvirus 6B
caaaugagggagaug

SEQ ID NO: 2042637 - RNA, 16 nt, Human herpesvirus 6B
caaaucucaagaaaca

SEQ ID NO: 2042638 - RNA, 15 nt, Human herpesvirus 6B
cccuccaucccccuc

SEQ ID NO: 2042639 - RNA, 19 nt, Human herpesvirus 6B
agucuagacaugauauucu

SEQ ID NO: 2042640 - RNA, 20 nt, Human herpesvirus 6B
gugcguacacggccacccgc

SEQ ID NO: 2042641 - RNA, 16 nt, Human herpesvirus 6B
cuuuauuucuaaggag

SEQ ID NO: 2042642 - RNA, 18 nt, Human herpesvirus 6B
accugcuaacggagcaac

SEQ ID NO: 2042643 - RNA, 11 nt, Human herpesvirus 6B
ggaugaagaga

SEQ ID NO: 2042644 - RNA, 19 nt, Human herpesvirus 6B
gcgaucauaaaacugccaa

SEQ ID NO: 2042645 - RNA, 13 nt, Human herpesvirus 6B
ucguggaagacgu

SEQ ID NO: 2042646 - RNA, 19 nt, Human herpesvirus 6B
cguguucaaaaaugugguc

SEQ ID NO: 2042647 - RNA, 17 nt, Human herpesvirus 6B
uucaguauagacauuuu

SEQ ID NO: 2042648 - RNA, 14 nt, Human herpesvirus 6B
cugugcucuuuaua

SEQ ID NO: 2042649 - RNA, 22 nt, Human herpesvirus 6B
gccuccucuuuuccccccgccg

SEQ ID NO: 2042650 - RNA, 13 nt, Human herpesvirus 6B
ugaaacguuuucu

SEQ ID NO: 2042651 - RNA, 16 nt, Human herpesvirus 6B
cacgucguggcagaac

SEQ ID NO: 2042652 - RNA, 22 nt, Human herpesvirus 6B
uucuuugugcgucagcuuugac

SEQ ID NO: 2042653 - RNA, 17 nt, Human herpesvirus 6B
aucucgaugccaaagcu

SEQ ID NO: 2042654 - RNA, 16 nt, Human herpesvirus 6B
agaaaacuauauugcc

SEQ ID NO: 2042655 - RNA, 23 nt, Human herpesvirus 6B
acgccuccacggcaacgcuccuc

SEQ ID NO: 2042656 - RNA, 15 nt, Human herpesvirus 6B
aaaaucaucaaaugu

SEQ ID NO: 2042657 - RNA, 16 nt, Human herpesvirus 6B
aguuacuuugcuuuga

SEQ ID NO: 2042658 - RNA, 13 nt, Human herpesvirus 6B
ccauguucgccuc

SEQ ID NO: 2042659 - RNA, 17 nt, Human herpesvirus 6B
uauguaagaaauguuuu

SEQ ID NO: 2042660 - RNA, 16 nt, Human herpesvirus 6B
agcaaaccagacagaa

SEQ ID NO: 2042661 - RNA, 19 nt, Human herpesvirus 6B
uguaaaaaaaauucucuga

SEQ ID NO: 2042662 - RNA, 22 nt, Human herpesvirus 6B
ugcccacaccaucuucagcuca

SEQ ID NO: 2042663 - RNA, 14 nt, Human herpesvirus 6B
cauuuucugaaauc

SEQ ID NO: 2042664 - RNA, 12 nt, Human herpesvirus 6B
ucgauguuucca

SEQ ID NO: 2042665 - RNA, 18 nt, Human herpesvirus 6B
cagcuauacuacgagaaa

SEQ ID NO: 2042666 - RNA, 15 nt, Human herpesvirus 6B
gucugucagaaauau

SEQ ID NO: 2042667 - RNA, 16 nt, Human herpesvirus 6B
uucuaaaaguuuauua

SEQ ID NO: 2042668 - RNA, 13 nt, Human herpesvirus 6B
gugaaaagugcuu

SEQ ID NO: 2042669 - RNA, 18 nt, Human herpesvirus 6B
ucaaacagcgacaugaaa

SEQ ID NO: 2042670 - RNA, 20 nt, Human herpesvirus 6B
cugaucacagagaaaaaaca

SEQ ID NO: 2042671 - RNA, 17 nt, Human herpesvirus 6B
uaugugcaauuacagua

SEQ ID NO: 2042672 - RNA, 15 nt, Human herpesvirus 6B
uccauugcucuuucc

SEQ ID NO: 2042673 - RNA, 22 nt, Human herpesvirus 6B
aucucgaaauauaaaaccaaaa

SEQ ID NO: 2042674 - RNA, 19 nt, Human herpesvirus 6B
agaaugaauuugagaagau

SEQ ID NO: 2042675 - RNA, 16 nt, Human herpesvirus 6B
ugcauugcaagauuuu

SEQ ID NO: 2042676 - RNA, 17 nt, Human herpesvirus 6B
aggaggaggagagggag

SEQ ID NO: 2042677 - RNA, 16 nt, Human herpesvirus 6B
cuggaagcacggcuug

SEQ ID NO: 2042678 - RNA, 14 nt, Human herpesvirus 6B
gccucccauagagg

SEQ ID NO: 2042679 - RNA, 17 nt, Human herpesvirus 6B
cccaggcgcagcagcag

SEQ ID NO: 2042680 - RNA, 17 nt, Human herpesvirus 6B
cauauacgucuuuguuu

SEQ ID NO: 2042681 - RNA, 17 nt, Human herpesvirus 6B
gcgcaaaccaagguguu

SEQ ID NO: 2042682 - RNA, 17 nt, Human herpesvirus 6B
uacauaagcaugaaucu

SEQ ID NO: 2042683 - RNA, 20 nt, Human herpesvirus 6B
uauggcuaaugagucucugc

SEQ ID NO: 2042684 - RNA, 14 nt, Human herpesvirus 6B
uauugugacaaggu

SEQ ID NO: 2042685 - RNA, 13 nt, Human herpesvirus 6B
gcggcgcugggcu

SEQ ID NO: 2042686 - RNA, 17 nt, Human herpesvirus 6B
uuaugcaagacguuuuu

SEQ ID NO: 2042687 - RNA, 18 nt, Human herpesvirus 6B
uccaauaguagauuuuca

SEQ ID NO: 2042688 - RNA, 20 nt, Human herpesvirus 6B
gacaaggguaacgcaggaga

SEQ ID NO: 2042689 - RNA, 22 nt, Human herpesvirus 6B
gcuuaaaucaaaaaaaugauag

SEQ ID NO: 2042690 - RNA, 17 nt, Human herpesvirus 6B
aacuuuuuuaaauaaua

SEQ ID NO: 2042691 - RNA, 14 nt, Human herpesvirus 6B
ggaucaaucuccaa

SEQ ID NO: 2042692 - RNA, 17 nt, Human herpesvirus 6B
uauauuggcacguguac

SEQ ID NO: 2042693 - RNA, 18 nt, Human herpesvirus 6B
ucgaaaagucuauucaga

SEQ ID NO: 2042694 - RNA, 18 nt, Human herpesvirus 6B
aaaaagaacugucgcauc

SEQ ID NO: 2042695 - RNA, 21 nt, Human herpesvirus 6B
augucguguucuuuugucauu

SEQ ID NO: 2042696 - RNA, 14 nt, Human herpesvirus 6B
auguaguguggaau

SEQ ID NO: 2042697 - RNA, 20 nt, Human herpesvirus 6B
uaaacggagacugcacagaa

SEQ ID NO: 2042698 - RNA, 12 nt, Human herpesvirus 6B
gagaauagagau

SEQ ID NO: 2042699 - RNA, 20 nt, Human herpesvirus 6B
gaguaccgaauaaaacaagu

SEQ ID NO: 2042700 - RNA, 22 nt, Human herpesvirus 6B
cacugaaauuuacaaucaucug

SEQ ID NO: 2042701 - RNA, 23 nt, Human herpesvirus 6B
uaaaauaauuuuuguagcaauuu

SEQ ID NO: 2042702 - RNA, 15 nt, Human herpesvirus 6B
ggucuuuuugccaaa

SEQ ID NO: 2042703 - RNA, 13 nt, Human herpesvirus 6B
aaaguuuuugguu

SEQ ID NO: 2042704 - RNA, 14 nt, Human herpesvirus 6B
agugcuucugcucu

SEQ ID NO: 2042705 - RNA, 17 nt, Human herpesvirus 6B
ugccccccuucauccag

SEQ ID NO: 2042706 - RNA, 15 nt, Human herpesvirus 6B
uugucagauuuccca

SEQ ID NO: 2042707 - RNA, 21 nt, Human herpesvirus 6B
aauuucaagucuguuacuaau

SEQ ID NO: 2042708 - RNA, 22 nt, Human herpesvirus 6B
caaugucaaguuagaaauguug

SEQ ID NO: 2042709 - RNA, 21 nt, Human herpesvirus 6B
agaauagagauaaauguauaa

SEQ ID NO: 2042710 - RNA, 22 nt, Human herpesvirus 6B
gcgaagguaggaauggacauga

SEQ ID NO: 2042711 - RNA, 22 nt, Human herpesvirus 6B
agaaacgcaaagggaagccagc

SEQ ID NO: 2042712 - RNA, 23 nt, Human herpesvirus 6B
cacgcccccucgguccccccucc

SEQ ID NO: 2042713 - RNA, 19 nt, Human herpesvirus 6B
caugacugugaggugauuu

SEQ ID NO: 2042714 - RNA, 21 nt, Human herpesvirus 6B
ugucuuggaagagagaugcuu

SEQ ID NO: 2042715 - RNA, 14 nt, Human herpesvirus 6B
acuuaguugauaug

SEQ ID NO: 2042716 - RNA, 17 nt, Human herpesvirus 6B
guggaaguguaaauguc

SEQ ID NO: 2042717 - RNA, 16 nt, Human herpesvirus 6B
cauguucgccucuccc

SEQ ID NO: 2042718 - RNA, 19 nt, Human herpesvirus 6B
acgauagcagcucugcaau

SEQ ID NO: 2042719 - RNA, 17 nt, Human herpesvirus 6B
aaaucgauguagauguu

SEQ ID NO: 2042720 - RNA, 16 nt, Human herpesvirus 6B
auagauugcacgcugg

SEQ ID NO: 2042721 - RNA, 18 nt, Human herpesvirus 6B
ugcuccguucccuucucg

SEQ ID NO: 2042722 - RNA, 20 nt, Human herpesvirus 6B
auuuuggaagcauacgucug

SEQ ID NO: 2042723 - RNA, 18 nt, Human herpesvirus 6B
caacuugugccaaucagu

SEQ ID NO: 2042724 - RNA, 22 nt, Human herpesvirus 6B
ugauaugcuuuuuuuuguggau

SEQ ID NO: 2042725 - RNA, 13 nt, Human herpesvirus 6B
agauuacauguau

SEQ ID NO: 2042726 - RNA, 23 nt, Human herpesvirus 6B
ucaaauuuaccggugcaacgcau

SEQ ID NO: 2042727 - RNA, 18 nt, Human herpesvirus 6B
caccccccucuugcagug

SEQ ID NO: 2042728 - RNA, 23 nt, Human herpesvirus 6B
agacaugauauucuuuaugugca

SEQ ID NO: 2042729 - RNA, 15 nt, Human herpesvirus 6B
caacuuuauuugaaa

SEQ ID NO: 2042730 - RNA, 11 nt, Human herpesvirus 6B
aaagaacagaa

SEQ ID NO: 2042731 - RNA, 19 nt, Human herpesvirus 6B
uggcguuccgaauccugug

SEQ ID NO: 2042732 - RNA, 22 nt, Human herpesvirus 6B
ggcugauauacgauggacagaa

SEQ ID NO: 2042733 - RNA, 15 nt, Human herpesvirus 6B
ggccgucuccugcaa

SEQ ID NO: 2042734 - RNA, 18 nt, Human herpesvirus 6B
uaugaauggggcuacuac

SEQ ID NO: 2042735 - RNA, 16 nt, Human herpesvirus 6B
ucgcauggaauucaug

SEQ ID NO: 2042736 - RNA, 21 nt, Human herpesvirus 6B
acugugaggugauuugaacag

SEQ ID NO: 2042737 - RNA, 19 nt, Human herpesvirus 6B
gauguugucuucugugcuu

SEQ ID NO: 2042738 - RNA, 23 nt, Human herpesvirus 6B
uggagucuggccucugcggcucu

SEQ ID NO: 2042739 - RNA, 16 nt, Human herpesvirus 6B
acgcuccucccacgcc

SEQ ID NO: 2042740 - RNA, 22 nt, Human herpesvirus 6B
aaaggggauacuuuguuuucuu

SEQ ID NO: 2042741 - RNA, 19 nt, Human herpesvirus 6B
gaacauaagggacagcagu

SEQ ID NO: 2042742 - RNA, 18 nt, Human herpesvirus 6B
uaauaguuaaaaaauuga

SEQ ID NO: 2042743 - RNA, 23 nt, Human herpesvirus 6B
caugaauuuauguucagccuugc

SEQ ID NO: 2042744 - RNA, 18 nt, Human herpesvirus 6B
ugcaauuugaauucugcu

SEQ ID NO: 2042745 - RNA, 13 nt, Human herpesvirus 6B
ccgcagaagacuu

SEQ ID NO: 2042746 - RNA, 14 nt, Human herpesvirus 6B
acuucuucugcaga

SEQ ID NO: 2042747 - RNA, 13 nt, Human herpesvirus 6B
gaugaaguuccac

SEQ ID NO: 2042748 - RNA, 13 nt, Human herpesvirus 6B
gccgccuucucug

SEQ ID NO: 2042749 - RNA, 20 nt, Human herpesvirus 6B
uguuuucaaugguauucgaa

SEQ ID NO: 2042750 - RNA, 17 nt, Human herpesvirus 6B
cauaacaaguuuuuguc

SEQ ID NO: 2042751 - RNA, 14 nt, Human herpesvirus 6B
aagguuuugugaau

SEQ ID NO: 2042752 - RNA, 14 nt, Human herpesvirus 6B
aagagcgagaucua

SEQ ID NO: 2042753 - RNA, 14 nt, Human herpesvirus 6B
cccgcgucaggugc

SEQ ID NO: 2042754 - RNA, 19 nt, Human herpesvirus 6B
aagacguuuuuguguagaa

SEQ ID NO: 2042755 - RNA, 23 nt, Human herpesvirus 6B
uccuauguuaacauugugagaac

SEQ ID NO: 2042756 - RNA, 17 nt, Human herpesvirus 6B
guggcagggcuguuguc

SEQ ID NO: 2042757 - RNA, 18 nt, Human herpesvirus 6B
cuccgcgcugcuggggcu

SEQ ID NO: 2042758 - RNA, 21 nt, Human herpesvirus 6B
uugcagaacgagacuggacag

SEQ ID NO: 2042759 - RNA, 11 nt, Human herpesvirus 6B
aucacuuuguu

SEQ ID NO: 2042760 - RNA, 16 nt, Human herpesvirus 6B
aucuugccguuuugau

SEQ ID NO: 2042761 - RNA, 15 nt, Human herpesvirus 6B
uugauaaaaccaucu

SEQ ID NO: 2042762 - RNA, 17 nt, Human herpesvirus 6B
uuuucugccugcguuaa

SEQ ID NO: 2042763 - RNA, 15 nt, Human herpesvirus 6B
uaauuacauuaucca

SEQ ID NO: 2042764 - RNA, 19 nt, Human herpesvirus 6B
gguuuugucguuuguacau

SEQ ID NO: 2042765 - RNA, 14 nt, Human herpesvirus 6B
ggagcaggcucccc

SEQ ID NO: 2042766 - RNA, 15 nt, Human herpesvirus 6B
aauggaaagauugga

SEQ ID NO: 2042767 - RNA, 22 nt, Human herpesvirus 6B
uccuauacaugcggagaaguau

SEQ ID NO: 2042768 - RNA, 21 nt, Human herpesvirus 6B
cggcagauucuucggacgcgg

SEQ ID NO: 2042769 - RNA, 15 nt, Human herpesvirus 6B
uggcgcuuguaggag

SEQ ID NO: 2042770 - RNA, 23 nt, Human herpesvirus 6B
gaauucuuucuacguuagcuucc

SEQ ID NO: 2042771 - RNA, 19 nt, Human herpesvirus 6B
uagagaacagauagaaaau

SEQ ID NO: 2042772 - RNA, 14 nt, Human herpesvirus 6B
gaucuauuucccgu

SEQ ID NO: 2042773 - RNA, 22 nt, Human herpesvirus 6B
cgcgcugggacuccgagccgga

SEQ ID NO: 2042774 - RNA, 18 nt, Human herpesvirus 6B
auucugauuauuaucaca

SEQ ID NO: 2042775 - RNA, 23 nt, Human herpesvirus 6B
gaaugagggauucguaguuuaug

SEQ ID NO: 2042776 - RNA, 19 nt, Human herpesvirus 6B
cacggggauuuagugcagu

SEQ ID NO: 2042777 - RNA, 13 nt, Human herpesvirus 6B
ucuaaucaagaaa

SEQ ID NO: 2042778 - RNA, 13 nt, Human herpesvirus 6B
ugcagauucuguu

SEQ ID NO: 2042779 - RNA, 22 nt, Human herpesvirus 6B
uuuugugcuuaucaaauuacaa

SEQ ID NO: 2042780 - RNA, 12 nt, Human herpesvirus 6B
ugaaaaacagaa

SEQ ID NO: 2042781 - RNA, 18 nt, Human herpesvirus 6B
uucguaaauccgaaacac

SEQ ID NO: 2042782 - RNA, 20 nt, Human herpesvirus 6B
gaugcaagucgcgaagugcu

SEQ ID NO: 2042783 - RNA, 15 nt, Human herpesvirus 6B
cccuccauguugcaa

SEQ ID NO: 2042784 - RNA, 23 nt, Human herpesvirus 6B
gcugugcuuuguauguaucugaa

SEQ ID NO: 2042785 - RNA, 18 nt, Human herpesvirus 6B
augcgccacagggaggug

SEQ ID NO: 2042786 - RNA, 21 nt, Human herpesvirus 6B
agucaccgcauaucaccccca

SEQ ID NO: 2042787 - RNA, 19 nt, Human herpesvirus 6B
acucagauuucaggaaguu

SEQ ID NO: 2042788 - RNA, 20 nt, Human herpesvirus 6B
uuccugaugguuaaggaaaa

SEQ ID NO: 2042789 - RNA, 15 nt, Human herpesvirus 6B
gcagcggggaaggga

SEQ ID NO: 2042790 - RNA, 13 nt, Human herpesvirus 6B
uaacgcgguauau

SEQ ID NO: 2042791 - RNA, 16 nt, Human herpesvirus 6B
gucuccgauccgucag

SEQ ID NO: 2042792 - RNA, 18 nt, Human herpesvirus 6B
cacauaugccgaggcuua

SEQ ID NO: 2042793 - RNA, 18 nt, Human herpesvirus 6B
aucucgaugccaaagcuu

SEQ ID NO: 2042794 - RNA, 16 nt, Human herpesvirus 6B
gagugcgacaggagau

SEQ ID NO: 2042795 - RNA, 18 nt, Human herpesvirus 6B
ccgaucugugcgccuuua

SEQ ID NO: 2042796 - RNA, 20 nt, Human herpesvirus 6B
cugugauaaaucuaccugcc

SEQ ID NO: 2042797 - RNA, 20 nt, Human herpesvirus 6B
guuacccgucaugugcuauu

SEQ ID NO: 2042798 - RNA, 21 nt, Human herpesvirus 6B
cugccuuuaacccgaugagaa

SEQ ID NO: 2042799 - RNA, 13 nt, Human herpesvirus 6B
aauguuucuguau

SEQ ID NO: 2042800 - RNA, 15 nt, Human herpesvirus 6B
gcccucgucuguugc

SEQ ID NO: 2042801 - RNA, 17 nt, Human herpesvirus 6B
uccccucauacauccag

SEQ ID NO: 2042802 - RNA, 17 nt, Human herpesvirus 6B
ccgcgaugcgccacagg

SEQ ID NO: 2042803 - RNA, 17 nt, Human herpesvirus 6B
auggaaaacugcagauu

SEQ ID NO: 2042804 - RNA, 17 nt, Human herpesvirus 6B
acuaaugcgauuucacc

SEQ ID NO: 2042805 - RNA, 17 nt, Human herpesvirus 6B
guauucuucuuccccaa

SEQ ID NO: 2042806 - RNA, 13 nt, Human herpesvirus 6B
acuuuucugauga

SEQ ID NO: 2042807 - RNA, 12 nt, Human herpesvirus 6B
auuuaugugaau

SEQ ID NO: 2042808 - RNA, 17 nt, Human herpesvirus 6B
gaaccgaaauuuccggu

SEQ ID NO: 2042809 - RNA, 13 nt, Human herpesvirus 6B
gcagggaaagagc

SEQ ID NO: 2042810 - RNA, 18 nt, Human herpesvirus 6B
cgaccugaucacagagaa

SEQ ID NO: 2042811 - RNA, 22 nt, Human herpesvirus 6B
guugccuuuguaaaauguuucc

SEQ ID NO: 2042812 - RNA, 15 nt, Human herpesvirus 6B
ugacaauaaacauga

SEQ ID NO: 2042813 - RNA, 19 nt, Human herpesvirus 6B
gccgaagaaagaggcgccg

SEQ ID NO: 2042814 - RNA, 18 nt, Human herpesvirus 6B
gggaauuucauguuuacu

SEQ ID NO: 2042815 - RNA, 12 nt, Human herpesvirus 6B
agguuguccuug

SEQ ID NO: 2042816 - RNA, 15 nt, Human herpesvirus 6B
aguuucagaugauca

SEQ ID NO: 2042817 - RNA, 15 nt, Human herpesvirus 6B
uccgcaaguuuucag

SEQ ID NO: 2042818 - RNA, 16 nt, Human herpesvirus 6B
gcuccccaggcgcagc

SEQ ID NO: 2042819 - RNA, 14 nt, Human herpesvirus 6B
cuggggacagacag

SEQ ID NO: 2042820 - RNA, 18 nt, Human herpesvirus 6B
uguagauccuguuauucu

SEQ ID NO: 2042821 - RNA, 20 nt, Human herpesvirus 6B
cucugcaauuugguucagcu

SEQ ID NO: 2042822 - RNA, 15 nt, Human herpesvirus 6B
cgguuugugugggua

SEQ ID NO: 2042823 - RNA, 17 nt, Human herpesvirus 6B
cguacacggccacccgc

SEQ ID NO: 2042824 - RNA, 17 nt, Human herpesvirus 6B
ugcacgaauaaggagag

SEQ ID NO: 2042825 - RNA, 18 nt, Human herpesvirus 6B
augugcggagaaagggac

SEQ ID NO: 2042826 - RNA, 22 nt, Human herpesvirus 6B
auuuugaggaucacuaacuuca

SEQ ID NO: 2042827 - RNA, 15 nt, Human herpesvirus 6B
ucaaaaaaaaaugac

SEQ ID NO: 2042828 - RNA, 16 nt, Human herpesvirus 6B
uuagaaccgaaauuuc

SEQ ID NO: 2042829 - RNA, 22 nt, Human herpesvirus 6B
ucuuuaugucugucagaaauau

SEQ ID NO: 2042830 - RNA, 17 nt, Human herpesvirus 6B
uuuuucuccugaucuca

SEQ ID NO: 2042831 - RNA, 11 nt, Human herpesvirus 6B
uaagggacagc

SEQ ID NO: 2042832 - RNA, 17 nt, Human herpesvirus 6B
aucgcgaagccuguccg

SEQ ID NO: 2042833 - RNA, 20 nt, Human herpesvirus 6B
ggcccgugggggcagaacug

SEQ ID NO: 2042834 - RNA, 19 nt, Human herpesvirus 6B
uguaagguuucuaaaucug

SEQ ID NO: 2042835 - RNA, 14 nt, Human herpesvirus 6B
aauguucuucugaa

SEQ ID NO: 2042836 - RNA, 15 nt, Human herpesvirus 6B
agaucuuucuagaca

SEQ ID NO: 2042837 - RNA, 18 nt, Human herpesvirus 6B
uggaucuauguuuuucca

SEQ ID NO: 2042838 - RNA, 21 nt, Human herpesvirus 6B
ucugcgcgauauuuuuauggc

SEQ ID NO: 2042839 - RNA, 21 nt, Human herpesvirus 6B
agcgcaucaacuacuucuguu

SEQ ID NO: 2042840 - RNA, 18 nt, Human herpesvirus 6B
auugacggcgugcauaua

SEQ ID NO: 2042841 - RNA, 22 nt, Human herpesvirus 6B
aaaugacaaugugaaguucgau

SEQ ID NO: 2042842 - RNA, 17 nt, Human herpesvirus 6B
cugcgcagacggaaaga

SEQ ID NO: 2042843 - RNA, 20 nt, Human herpesvirus 6B
aaaacuauacuaugauagaa

SEQ ID NO: 2042844 - RNA, 15 nt, Human herpesvirus 6B
ggaacggugaagcgg

SEQ ID NO: 2042845 - RNA, 17 nt, Human herpesvirus 6B
ucucuacaugccacaga

SEQ ID NO: 2042846 - RNA, 15 nt, Human herpesvirus 6B
uauguauauaguuuu

SEQ ID NO: 2042847 - RNA, 22 nt, Human herpesvirus 6B
gccacauuagcugcuaaaugug

SEQ ID NO: 2042848 - RNA, 13 nt, Human herpesvirus 6B
ggcgggcacggag

SEQ ID NO: 2042849 - RNA, 15 nt, Human herpesvirus 6B
cauaagggacagcag

SEQ ID NO: 2042850 - RNA, 21 nt, Human herpesvirus 6B
agggaagccagccgcccuccc

SEQ ID NO: 2042851 - RNA, 23 nt, Human herpesvirus 6B
uaauucggugaugacucaagaau

SEQ ID NO: 2042852 - RNA, 17 nt, Human herpesvirus 6B
gaaaccccacaaagccu

SEQ ID NO: 2042853 - RNA, 20 nt, Human herpesvirus 6B
uaaaucggguaaauauguga

SEQ ID NO: 2042854 - RNA, 15 nt, Human herpesvirus 6B
gcacacgacaaauaa

SEQ ID NO: 2042855 - RNA, 22 nt, Human herpesvirus 6B
gggaagaucuaugagaauuaug

SEQ ID NO: 2042856 - RNA, 18 nt, Human herpesvirus 6B
ugauauacgauggacaga

SEQ ID NO: 2042857 - RNA, 22 nt, Human herpesvirus 6B
augaauuugcgucagaguuuga

SEQ ID NO: 2042858 - RNA, 21 nt, Human herpesvirus 6B
augugaacaguauaaauucuu

SEQ ID NO: 2042859 - RNA, 22 nt, Human herpesvirus 6B
uaaaaaaaaauacuauguggaa

SEQ ID NO: 2042860 - RNA, 17 nt, Human herpesvirus 6B
cucgccgucgucgcucu

SEQ ID NO: 2042861 - RNA, 18 nt, Human herpesvirus 6B
aacaaguuauuuaaaauc

SEQ ID NO: 2042862 - RNA, 16 nt, Human herpesvirus 6B
cgccgguuuccaugag

SEQ ID NO: 2042863 - RNA, 16 nt, Human herpesvirus 6B
gaaacgcaaagggaag

SEQ ID NO: 2042864 - RNA, 11 nt, Human herpesvirus 6B
aggagggaccc

SEQ ID NO: 2042865 - RNA, 13 nt, Human herpesvirus 6B
uuaacugucaugu

SEQ ID NO: 2042866 - RNA, 16 nt, Human herpesvirus 6B
aagagacgagaaguga

SEQ ID NO: 2042867 - RNA, 15 nt, Human herpesvirus 6B
ucuacaugccacaga

SEQ ID NO: 2042868 - RNA, 12 nt, Human herpesvirus 6B
uagagaacagau

SEQ ID NO: 2042869 - RNA, 16 nt, Human herpesvirus 6B
agaaagcguguucaaa

SEQ ID NO: 2042870 - RNA, 20 nt, Human herpesvirus 6B
acacucuauuauaaaaaugc

SEQ ID NO: 2042871 - RNA, 18 nt, Human herpesvirus 6B
cgcguuuuuggugaaaaa

SEQ ID NO: 2042872 - RNA, 17 nt, Human herpesvirus 6B
uuaauaaaggauguuug

SEQ ID NO: 2042873 - RNA, 16 nt, Human herpesvirus 6B
acaaagugcuguaaac

SEQ ID NO: 2042874 - RNA, 14 nt, Human herpesvirus 6B
aucuaugaugcugu

SEQ ID NO: 2042875 - RNA, 22 nt, Human herpesvirus 6B
ugcugcuggguguauguuucua

SEQ ID NO: 2042876 - RNA, 22 nt, Human herpesvirus 6B
agauugauuccagguggugguu

SEQ ID NO: 2042877 - RNA, 18 nt, Human herpesvirus 6B
caggacggggccucccuc

SEQ ID NO: 2042878 - RNA, 16 nt, Human herpesvirus 6B
aaaacgguaaagauga

SEQ ID NO: 2042879 - RNA, 15 nt, Human herpesvirus 6B
gccggagcccugaga

SEQ ID NO: 2042880 - RNA, 16 nt, Human herpesvirus 6B
aauuuggcagaaucuu

SEQ ID NO: 2042881 - RNA, 20 nt, Human herpesvirus 6B
cugagagcaggagcaggcuc

SEQ ID NO: 2042882 - RNA, 19 nt, Human herpesvirus 6B
auguucuucugaaaugguu

SEQ ID NO: 2042883 - RNA, 19 nt, Human herpesvirus 6B
aggcgaagauacuuucaau

SEQ ID NO: 2042884 - RNA, 16 nt, Human herpesvirus 6B
agcauucguuuagaga

SEQ ID NO: 2042885 - RNA, 16 nt, Human herpesvirus 6B
uucucagcauuguuga

SEQ ID NO: 2042886 - RNA, 11 nt, Human herpesvirus 6B
caaacagagau

SEQ ID NO: 2042887 - RNA, 13 nt, Human herpesvirus 6B
cuauguauuggaa

SEQ ID NO: 2042888 - RNA, 11 nt, Human herpesvirus 6B
ccgaacccggc

SEQ ID NO: 2042889 - RNA, 20 nt, Human herpesvirus 6B
uguauaagagucugcaucaa

SEQ ID NO: 2042890 - RNA, 20 nt, Human herpesvirus 6B
gaauuaugacugacaaggua

SEQ ID NO: 2042891 - RNA, 22 nt, Human herpesvirus 6B
uugcagaacgagacuggacagu

SEQ ID NO: 2042892 - RNA, 19 nt, Human herpesvirus 6B
gcgauugcugcuucuguaa

SEQ ID NO: 2042893 - RNA, 18 nt, Human herpesvirus 6B
acuccgagccggacagga

SEQ ID NO: 2042894 - RNA, 16 nt, Human herpesvirus 6B
cacccgaugaggaaaa

SEQ ID NO: 2042895 - RNA, 13 nt, Human herpesvirus 6B
aaaaaccuauuca

SEQ ID NO: 2042896 - RNA, 23 nt, Human herpesvirus 6B
acagaaaaaacaccagaagagcc

SEQ ID NO: 2042897 - RNA, 17 nt, Human herpesvirus 6B
uugacaaucuuggaaaa

SEQ ID NO: 2042898 - RNA, 17 nt, Human herpesvirus 6B
gaaauucuccuguaguu

SEQ ID NO: 2042899 - RNA, 19 nt, Human herpesvirus 6B
gugguuaaccguuaguaaa

SEQ ID NO: 2042900 - RNA, 17 nt, Human herpesvirus 6B
gaagugcuucugcucuc

SEQ ID NO: 2042901 - RNA, 13 nt, Human herpesvirus 6B
aauauuuugaaaa

SEQ ID NO: 2042902 - RNA, 12 nt, Human herpesvirus 6B
aaacuuaacaua

SEQ ID NO: 2042903 - RNA, 17 nt, Human herpesvirus 6B
gaggugauuugaacaga

SEQ ID NO: 2042904 - RNA, 23 nt, Human herpesvirus 6B
cauuuauuucguauguuuaacua

SEQ ID NO: 2042905 - RNA, 13 nt, Human herpesvirus 6B
cuguauuaauuuu

SEQ ID NO: 2042906 - RNA, 23 nt, Human herpesvirus 6B
aauguguucauagagcauccugu

SEQ ID NO: 2042907 - RNA, 20 nt, Human herpesvirus 6B
aggccaggcgauacaacauc

SEQ ID NO: 2042908 - RNA, 19 nt, Human herpesvirus 6B
caauucauuguacgauaau

SEQ ID NO: 2042909 - RNA, 12 nt, Human herpesvirus 6B
auaaacuauugu

SEQ ID NO: 2042910 - RNA, 19 nt, Human herpesvirus 6B
accagcucuguucucuccc

SEQ ID NO: 2042911 - RNA, 12 nt, Human herpesvirus 6B
ggcucggcaggg

SEQ ID NO: 2042912 - RNA, 15 nt, Human herpesvirus 6B
cugaugguuaaggaa

SEQ ID NO: 2042913 - RNA, 15 nt, Human herpesvirus 6B
agggucgaacccuga

SEQ ID NO: 2042914 - RNA, 14 nt, Human herpesvirus 6B
ugucaggaauguaa

SEQ ID NO: 2042915 - RNA, 18 nt, Human herpesvirus 6B
aaucucgaugccaaagcu

SEQ ID NO: 2042916 - RNA, 22 nt, Human herpesvirus 6B
guggcgcgcguuuuuggugaaa

SEQ ID NO: 2042917 - RNA, 23 nt, Human herpesvirus 6B
auacggcggcggaagugaaagca

SEQ ID NO: 2042918 - RNA, 19 nt, Human herpesvirus 6B
ccacaucuuuuccugcucu

SEQ ID NO: 2042919 - RNA, 22 nt, Human herpesvirus 6B
gauguauaauuuacacaauccu

SEQ ID NO: 2042920 - RNA, 14 nt, Human herpesvirus 6B
gaaaagugcuuuau

SEQ ID NO: 2042921 - RNA, 15 nt, Human herpesvirus 6B
aggugauuugaacag

SEQ ID NO: 2042922 - RNA, 23 nt, Human herpesvirus 6B
uauacucugcaacuuuauuugaa

SEQ ID NO: 2042923 - RNA, 14 nt, Human herpesvirus 6B
uggauauguaucca

SEQ ID NO: 2042924 - RNA, 16 nt, Human herpesvirus 6B
aggaauguaaugaauu

SEQ ID NO: 2042925 - RNA, 22 nt, Human herpesvirus 6B
auauaaaaccaaaaaaaaagug

SEQ ID NO: 2042926 - RNA, 15 nt, Human herpesvirus 6B
acucuuggauugcag

SEQ ID NO: 2042927 - RNA, 14 nt, Human herpesvirus 6B
gucucuuuaaacag

SEQ ID NO: 2042928 - RNA, 23 nt, Human herpesvirus 6B
agaauuuccagggugaagacaga

SEQ ID NO: 2042929 - RNA, 19 nt, Human herpesvirus 6B
ugucgguaaauauugucug

SEQ ID NO: 2042930 - RNA, 16 nt, Human herpesvirus 6B
acugcugcgaucuuug

SEQ ID NO: 2042931 - RNA, 15 nt, Human herpesvirus 6B
gcccgggcgcggggc

SEQ ID NO: 2042932 - RNA, 20 nt, Human herpesvirus 6B
caacgguguggagacaccuc

SEQ ID NO: 2042933 - RNA, 16 nt, Human herpesvirus 6B
uucccuccauguugca

SEQ ID NO: 2042934 - RNA, 20 nt, Human herpesvirus 6B
gaauccagauaaacaaaaau

SEQ ID NO: 2042935 - RNA, 17 nt, Human herpesvirus 6B
caagcucgaguucgaga

SEQ ID NO: 2042936 - RNA, 23 nt, Human herpesvirus 6B
acugcuugguggcggauggcuag

SEQ ID NO: 2042937 - RNA, 22 nt, Human herpesvirus 6B
agcucaagaggguuuuuuacaa

SEQ ID NO: 2042938 - RNA, 20 nt, Human herpesvirus 6B
acggcucucuucaggagaag

SEQ ID NO: 2042939 - RNA, 17 nt, Human herpesvirus 6B
auguauauaguuuucug

SEQ ID NO: 2042940 - RNA, 22 nt, Human herpesvirus 6B
auuuugauggucgauuguaauu

SEQ ID NO: 2042941 - RNA, 15 nt, Human herpesvirus 6B
ugcacgaauaaggag

SEQ ID NO: 2042942 - RNA, 15 nt, Human herpesvirus 6B
gcccugagagcagga

SEQ ID NO: 2042943 - RNA, 15 nt, Human herpesvirus 6B
agagcaggagcaggc

SEQ ID NO: 2042944 - RNA, 18 nt, Human herpesvirus 6B
uauaccgugacagcaacu

SEQ ID NO: 2042945 - RNA, 20 nt, Human herpesvirus 6B
gugcacgcacgucacgggca

SEQ ID NO: 2042946 - RNA, 13 nt, Human herpesvirus 6B
aaggcaacggcac

SEQ ID NO: 2042947 - RNA, 14 nt, Human herpesvirus 6B
auuugcaguuugug

SEQ ID NO: 2042948 - RNA, 15 nt, Human herpesvirus 6B
acgcaaagggaagcc

SEQ ID NO: 2042949 - RNA, 15 nt, Human herpesvirus 6B
cuucucgucucuucu

SEQ ID NO: 2042950 - RNA, 23 nt, Human herpesvirus 6B
aauuacucccauagaucuucccc

SEQ ID NO: 2042951 - RNA, 12 nt, Human herpesvirus 6B
aaugauuaguua

SEQ ID NO: 2042952 - RNA, 14 nt, Human herpesvirus 6B
cucuguucucuccc

SEQ ID NO: 2042953 - RNA, 14 nt, Human herpesvirus 6B
uugcaguuugugaa

SEQ ID NO: 2042954 - RNA, 18 nt, Human herpesvirus 6B
ugauuugaacagagauuu

SEQ ID NO: 2042955 - RNA, 19 nt, Human herpesvirus 6B
acuacauccuuuagaauac

SEQ ID NO: 2042956 - RNA, 17 nt, Human herpesvirus 6B
agcugacaucugcaaaa

SEQ ID NO: 2042957 - RNA, 13 nt, Human herpesvirus 6B
uucuuaaauucaa

SEQ ID NO: 2042958 - RNA, 16 nt, Human herpesvirus 6B
gcggacacgacaugug

SEQ ID NO: 2042959 - RNA, 18 nt, Human herpesvirus 6B
cgcgguggacggcgaggg

SEQ ID NO: 2042960 - RNA, 19 nt, Human herpesvirus 6B
uaaagauguguuaaagaau

SEQ ID NO: 2042961 - RNA, 21 nt, Human herpesvirus 6B
uguuaugcaguuguacucaaa

SEQ ID NO: 2042962 - RNA, 18 nt, Human herpesvirus 6B
auuuauuagcauucaagu

SEQ ID NO: 2042963 - RNA, 23 nt, Human herpesvirus 6B
uaauuuuuuguuucugaaaauaa

SEQ ID NO: 2042964 - RNA, 20 nt, Human herpesvirus 6B
aauguuuccaugacugugag

SEQ ID NO: 2042965 - RNA, 16 nt, Human herpesvirus 6B
aguugcggaagggcuc

SEQ ID NO: 2042966 - RNA, 14 nt, Human herpesvirus 6B
acggcgccucccau

SEQ ID NO: 2042967 - RNA, 13 nt, Human herpesvirus 6B
cuguuguuguagu

SEQ ID NO: 2042968 - RNA, 13 nt, Human herpesvirus 6B
cgccgugucuuuc

SEQ ID NO: 2042969 - RNA, 16 nt, Human herpesvirus 6B
uauaccaaacgugaaa

SEQ ID NO: 2042970 - RNA, 21 nt, Human herpesvirus 6B
ccgcacaguucguccagcagc

SEQ ID NO: 2042971 - RNA, 20 nt, Human herpesvirus 6B
agaucuucuucagaaagauu

SEQ ID NO: 2042972 - RNA, 20 nt, Human herpesvirus 6B
ugagaagauuugugugaacg

SEQ ID NO: 2042973 - RNA, 18 nt, Human herpesvirus 6B
uguaggacugaaggagau

SEQ ID NO: 2042974 - RNA, 19 nt, Human herpesvirus 6B
ccucccauagaggcgcgcg

SEQ ID NO: 2042975 - RNA, 23 nt, Human herpesvirus 6B
caagaaaagaaaaaacagagccg

SEQ ID NO: 2042976 - RNA, 14 nt, Human herpesvirus 6B
uaguuuuggaugaa

SEQ ID NO: 2042977 - RNA, 17 nt, Human herpesvirus 6B
uaauggagagaaauucu

SEQ ID NO: 2042978 - RNA, 14 nt, Human herpesvirus 6B
gaugcgaagggagu

SEQ ID NO: 2042979 - RNA, 16 nt, Human herpesvirus 6B
auaauuuuauugacug

SEQ ID NO: 2042980 - RNA, 18 nt, Human herpesvirus 6B
ucuaaucaagaaaccugu

SEQ ID NO: 2042981 - RNA, 16 nt, Human herpesvirus 6B
ucuccaucucuagaau

SEQ ID NO: 2042982 - RNA, 23 nt, Human herpesvirus 6B
cucgggggacggagaggaagccg

SEQ ID NO: 2042983 - RNA, 14 nt, Human herpesvirus 6B
ucgucgcucucccu

SEQ ID NO: 2042984 - RNA, 18 nt, Human herpesvirus 6B
ucgauucuguaauuuuga

SEQ ID NO: 2042985 - RNA, 15 nt, Human herpesvirus 6B
gaauucagcuggaca

SEQ ID NO: 2042986 - RNA, 12 nt, Human herpesvirus 6B
agacguuugcuu

SEQ ID NO: 2042987 - RNA, 14 nt, Human herpesvirus 6B
acaaaucugaaugu

SEQ ID NO: 2042988 - RNA, 17 nt, Human herpesvirus 6B
ggauguaaaugcagaca

SEQ ID NO: 2042989 - RNA, 18 nt, Human herpesvirus 6B
aaguggaaguguaaaugu

SEQ ID NO: 2042990 - RNA, 15 nt, Human herpesvirus 6B
cauacgaggaugaag

SEQ ID NO: 2042991 - RNA, 17 nt, Human herpesvirus 6B
gucuaugacuuuucuga

SEQ ID NO: 2042992 - RNA, 15 nt, Human herpesvirus 6B
acgcuugcuguaaag

SEQ ID NO: 2042993 - RNA, 16 nt, Human herpesvirus 6B
agaaucugcagauuuu

SEQ ID NO: 2042994 - RNA, 20 nt, Human herpesvirus 6B
acgcuugcuguaaaguauug

SEQ ID NO: 2042995 - RNA, 19 nt, Human herpesvirus 6B
ggccgaguuggccaagcug

SEQ ID NO: 2042996 - RNA, 17 nt, Human herpesvirus 6B
cucuauuguuuaaaagg

SEQ ID NO: 2042997 - RNA, 15 nt, Human herpesvirus 6B
cgucgcucucccucu

SEQ ID NO: 2042998 - RNA, 12 nt, Human herpesvirus 6B
uguauguuucua

SEQ ID NO: 2042999 - RNA, 22 nt, Human herpesvirus 6B
gagcggagaggcgcgggacagc

SEQ ID NO: 2043000 - RNA, 16 nt, Human herpesvirus 6B
cuaauuauaaauguag

SEQ ID NO: 2043001 - RNA, 21 nt, Human herpesvirus 6B
acaagcaggagaaaaauuuga

SEQ ID NO: 2043002 - RNA, 22 nt, Human herpesvirus 6B
auuaauuuuuuguuucugaaaa

SEQ ID NO: 2043003 - RNA, 13 nt, Human herpesvirus 6B
ucccgcagcuccu

SEQ ID NO: 2043004 - RNA, 21 nt, Human herpesvirus 6B
cagaucaucgccauagugaaa

SEQ ID NO: 2043005 - RNA, 13 nt, Human herpesvirus 6B
uugaauucugcuc

SEQ ID NO: 2043006 - RNA, 11 nt, Human herpesvirus 6B
uagauaugucg

SEQ ID NO: 2043007 - RNA, 23 nt, Human herpesvirus 6B
agauaugucguuucaugggagaa

SEQ ID NO: 2043008 - RNA, 19 nt, Human herpesvirus 6B
cgcagggaacggugaagcg

SEQ ID NO: 2043009 - RNA, 13 nt, Human herpesvirus 6B
cuguguauuguga

SEQ ID NO: 2043010 - RNA, 22 nt, Human herpesvirus 6B
augaaaucgauguagauguuuu

SEQ ID NO: 2043011 - RNA, 17 nt, Human herpesvirus 6B
aaauuucaaaaagaaug

SEQ ID NO: 2043012 - RNA, 14 nt, Human herpesvirus 6B
acauagaaaaauaa

SEQ ID NO: 2043013 - RNA, 13 nt, Human herpesvirus 6B
uuuugaaaucacu

SEQ ID NO: 2043014 - RNA, 15 nt, Human herpesvirus 6B
uguaguuaguuuuga

SEQ ID NO: 2043015 - RNA, 16 nt, Human herpesvirus 6B
accaaauuuuuaacuc

SEQ ID NO: 2043016 - RNA, 16 nt, Human herpesvirus 6B
aacgugacuguaucaa

SEQ ID NO: 2043017 - RNA, 15 nt, Human herpesvirus 6B
ucaucucccaugguu

SEQ ID NO: 2043018 - RNA, 13 nt, Human herpesvirus 6B
cuuugaaggacua

SEQ ID NO: 2043019 - RNA, 19 nt, Human herpesvirus 6B
acaagaaaacgagagaguu

SEQ ID NO: 2043020 - RNA, 20 nt, Human herpesvirus 6B
auaaaauuuugcgucgucug

SEQ ID NO: 2043021 - RNA, 22 nt, Human herpesvirus 6B
aaguccgauauugaagaacugg

SEQ ID NO: 2043022 - RNA, 15 nt, Human herpesvirus 6B
ugcugugcuuuguau

SEQ ID NO: 2043023 - RNA, 16 nt, Human herpesvirus 6B
cugaugacuuuucuga

SEQ ID NO: 2043024 - RNA, 19 nt, Human herpesvirus 6B
ugaaaucucuuuuaacaca

SEQ ID NO: 2043025 - RNA, 23 nt, Human herpesvirus 6B
ugauacuacguguaauguuuccu

SEQ ID NO: 2043026 - RNA, 12 nt, Human herpesvirus 6B
agaaucuccaaa

SEQ ID NO: 2043027 - RNA, 11 nt, Human herpesvirus 6B
gucuuuccuga

SEQ ID NO: 2043028 - RNA, 15 nt, Human herpesvirus 6B
ucuucauccucgaag

SEQ ID NO: 2043029 - RNA, 15 nt, Human herpesvirus 6B
uugauagcauuauua

SEQ ID NO: 2043030 - RNA, 13 nt, Human herpesvirus 6B
auaacuaugaauu

SEQ ID NO: 2043031 - RNA, 15 nt, Human herpesvirus 6B
guucggacucucguc

SEQ ID NO: 2043032 - RNA, 19 nt, Human herpesvirus 6B
uuuuggaaaauguaaacac

SEQ ID NO: 2043033 - RNA, 22 nt, Human herpesvirus 6B
gcagacauucuuguucgggcca

SEQ ID NO: 2043034 - RNA, 20 nt, Human herpesvirus 6B
cccggcuuucucgccgccuc

SEQ ID NO: 2043035 - RNA, 19 nt, Human herpesvirus 6B
gccugcagcgauauggaaa

SEQ ID NO: 2043036 - RNA, 13 nt, Human herpesvirus 6B
auguuauguaaag

SEQ ID NO: 2043037 - RNA, 20 nt, Human herpesvirus 6B
cggaucugccgcguggaagc

SEQ ID NO: 2043038 - RNA, 13 nt, Human herpesvirus 6B
cuuacgaucuuua

SEQ ID NO: 2043039 - RNA, 16 nt, Human herpesvirus 6B
gcaaaugaauguguuc

SEQ ID NO: 2043040 - RNA, 22 nt, Human herpesvirus 6B
agauaaucgucgaaaacaauuu

SEQ ID NO: 2043041 - RNA, 16 nt, Human herpesvirus 6B
gcauuucuaucuacaa

SEQ ID NO: 2043042 - RNA, 18 nt, Human herpesvirus 6B
uuguuaguguuaauucca

SEQ ID NO: 2043043 - RNA, 13 nt, Human herpesvirus 6B
ccucacccugaag

SEQ ID NO: 2043044 - RNA, 16 nt, Human herpesvirus 6B
gagccacuugagugag

SEQ ID NO: 2043045 - RNA, 19 nt, Human herpesvirus 6B
ccggggagugggaggagcc

SEQ ID NO: 2043046 - RNA, 12 nt, Human herpesvirus 6B
gaauaagaguuu

SEQ ID NO: 2043047 - RNA, 22 nt, Human herpesvirus 6B
gaacgauaugcugccauuauug

SEQ ID NO: 2043048 - RNA, 15 nt, Human herpesvirus 6B
uguucuuugaugaag

SEQ ID NO: 2043049 - RNA, 13 nt, Human herpesvirus 6B
cggcgcgcgccgu

SEQ ID NO: 2043050 - RNA, 13 nt, Human herpesvirus 6B
augucguuucaug

SEQ ID NO: 2043051 - RNA, 13 nt, Human herpesvirus 6B
ugcugucggccga

SEQ ID NO: 2043052 - RNA, 22 nt, Human herpesvirus 6B
ugaaugcuuaccgccuccgcag

SEQ ID NO: 2043053 - RNA, 21 nt, Human herpesvirus 6B
guagauacgaccccuuaugca

SEQ ID NO: 2043054 - RNA, 20 nt, Human herpesvirus 6B
uaucucaacguauugggaag

SEQ ID NO: 2043055 - RNA, 15 nt, Human herpesvirus 6B
gguuguuuuucuaaa

SEQ ID NO: 2043056 - RNA, 16 nt, Human herpesvirus 6B
aaaaaauagcagcaau

SEQ ID NO: 2043057 - RNA, 22 nt, Human herpesvirus 6B
ggaucagacagacgugcggaga

SEQ ID NO: 2043058 - RNA, 16 nt, Human herpesvirus 6B
guguuguguuugaaac

SEQ ID NO: 2043059 - RNA, 14 nt, Human herpesvirus 6B
gucuguugcuguag

SEQ ID NO: 2043060 - RNA, 21 nt, Human herpesvirus 6B
gggccuggggacagacagggg

SEQ ID NO: 2043061 - RNA, 20 nt, Human herpesvirus 6B
auucagaaaauuggugugca

SEQ ID NO: 2043062 - RNA, 13 nt, Human herpesvirus 6B
cacucauuugcaa

SEQ ID NO: 2043063 - RNA, 17 nt, Human herpesvirus 6B
uacucuggcugaaggaa

SEQ ID NO: 2043064 - RNA, 19 nt, Human herpesvirus 6B
uuuucacggaacaucaaaa

SEQ ID NO: 2043065 - RNA, 17 nt, Human herpesvirus 6B
gcagucuccacagggca

SEQ ID NO: 2043066 - RNA, 18 nt, Human herpesvirus 6B
uccccaggcgcagcagca

SEQ ID NO: 2043067 - RNA, 14 nt, Human herpesvirus 6B
cagagcggagaggc

SEQ ID NO: 2043068 - RNA, 19 nt, Human herpesvirus 6B
gacuuagcuagacgugucu

SEQ ID NO: 2043069 - RNA, 23 nt, Human herpesvirus 6B
augaggauggauuccugaugguu

SEQ ID NO: 2043070 - RNA, 18 nt, Human herpesvirus 6B
uaaaaauuauucuggcga

SEQ ID NO: 2043071 - RNA, 14 nt, Human herpesvirus 6B
gcgcgacggagaug

SEQ ID NO: 2043072 - RNA, 21 nt, Human herpesvirus 6B
ggacacgagaagaacaugcag

SEQ ID NO: 2043073 - RNA, 15 nt, Human herpesvirus 6B
cgccaggacggggcc

SEQ ID NO: 2043074 - RNA, 15 nt, Human herpesvirus 6B
cuaauuauaaaugua

SEQ ID NO: 2043075 - RNA, 22 nt, Human herpesvirus 6B
uauuaauuuuuuguuucugaaa

SEQ ID NO: 2043076 - RNA, 15 nt, Human herpesvirus 6B
gaagaagacgaagaa

SEQ ID NO: 2043077 - RNA, 21 nt, Human herpesvirus 6B
ccucgguccccccucccucca

SEQ ID NO: 2043078 - RNA, 13 nt, Human herpesvirus 6B
caaaaagaaaaca

SEQ ID NO: 2043079 - RNA, 19 nt, Human herpesvirus 6B
uuaacauacaacuuucacu

SEQ ID NO: 2043080 - RNA, 20 nt, Human herpesvirus 6B
auugcagagguaaugugaac

SEQ ID NO: 2043081 - RNA, 18 nt, Human herpesvirus 6B
acaucucauaauuugccu

SEQ ID NO: 2043082 - RNA, 23 nt, Human herpesvirus 6B
ccgcaguuucuguuuuucucaua

SEQ ID NO: 2043083 - RNA, 20 nt, Human herpesvirus 6B
ugugaggugauuugaacaga

SEQ ID NO: 2043084 - RNA, 16 nt, Human herpesvirus 6B
uaaaaguggagguaau

SEQ ID NO: 2043085 - RNA, 13 nt, Human herpesvirus 6B
agacgagauguuu

SEQ ID NO: 2043086 - RNA, 20 nt, Human herpesvirus 6B
cugcgguugaaaucuuuccu

SEQ ID NO: 2043087 - RNA, 19 nt, Human herpesvirus 6B
ccaaccaaaugccucgugg

SEQ ID NO: 2043088 - RNA, 14 nt, Human herpesvirus 6B
uuugcgucgucugu

SEQ ID NO: 2043089 - RNA, 16 nt, Human herpesvirus 6B
aucacuacgaaagaac

SEQ ID NO: 2043090 - RNA, 15 nt, Human herpesvirus 6B
uguguauuugugaac

SEQ ID NO: 2043091 - RNA, 11 nt, Human herpesvirus 6B
auauagacacc

SEQ ID NO: 2043092 - RNA, 20 nt, Human herpesvirus 6B
ggcgggcggacggcucgucu

SEQ ID NO: 2043093 - RNA, 16 nt, Human herpesvirus 6B
ggcagcggggaaggga

SEQ ID NO: 2043094 - RNA, 12 nt, Human herpesvirus 6B
uuaggacaauug

SEQ ID NO: 2043095 - RNA, 17 nt, Human herpesvirus 6B
gcguguuuuggaauuuc

SEQ ID NO: 2043096 - RNA, 19 nt, Human herpesvirus 6B
agcauaauccuuuucugug

SEQ ID NO: 2043097 - RNA, 12 nt, Human herpesvirus 6B
gcucaagaugaa

SEQ ID NO: 2043098 - RNA, 12 nt, Human herpesvirus 6B
augcuaaagcac

SEQ ID NO: 2043099 - RNA, 14 nt, Human herpesvirus 6B
aacucucacggcca

SEQ ID NO: 2043100 - RNA, 14 nt, Human herpesvirus 6B
agauggcaaaacaa

SEQ ID NO: 2043101 - RNA, 13 nt, Human herpesvirus 6B
uuccaguuguauu

SEQ ID NO: 2043102 - RNA, 18 nt, Human herpesvirus 6B
gugauuucacgugaaaua

SEQ ID NO: 2043103 - RNA, 18 nt, Human herpesvirus 6B
uguucgcuugugucaugu

SEQ ID NO: 2043104 - RNA, 19 nt, Human herpesvirus 6B
acaccguuguugaacgaga

SEQ ID NO: 2043105 - RNA, 14 nt, Human herpesvirus 6B
aauaaacaugauug

SEQ ID NO: 2043106 - RNA, 13 nt, Human herpesvirus 6B
uuggugugcauua

SEQ ID NO: 2043107 - RNA, 23 nt, Human herpesvirus 6B
acaguacaagaagggguuccuuc

SEQ ID NO: 2043108 - RNA, 23 nt, Human herpesvirus 6B
gguguccucguccguccccgccg

SEQ ID NO: 2043109 - RNA, 18 nt, Human herpesvirus 6B
cugcaauuugguucagcu

SEQ ID NO: 2043110 - RNA, 19 nt, Human herpesvirus 6B
auggcaaauuucaaaaaga

SEQ ID NO: 2043111 - RNA, 20 nt, Human herpesvirus 6B
gaaaaggugaucguggacag

SEQ ID NO: 2043112 - RNA, 13 nt, Human herpesvirus 6B
aaagaacagaauc

SEQ ID NO: 2043113 - RNA, 15 nt, Human herpesvirus 6B
uaucauuaaauuguu

SEQ ID NO: 2043114 - RNA, 23 nt, Human herpesvirus 6B
acuagugauuauggugccucagg

SEQ ID NO: 2043115 - RNA, 17 nt, Human herpesvirus 6B
acagggguaaauuugua

SEQ ID NO: 2043116 - RNA, 17 nt, Human herpesvirus 6B
aaaauuacuaaugugga

SEQ ID NO: 2043117 - RNA, 16 nt, Human herpesvirus 6B
caagucuagacaugau

SEQ ID NO: 2043118 - RNA, 18 nt, Human herpesvirus 6B
gaucagauuaucaaggcu

SEQ ID NO: 2043119 - RNA, 12 nt, Human herpesvirus 6B
gagaugaagagu

SEQ ID NO: 2043120 - RNA, 21 nt, Human herpesvirus 6B
uuaaaacucuaaaaccugcua

SEQ ID NO: 2043121 - RNA, 22 nt, Human herpesvirus 6B
agacaagggugugaaacuauga

SEQ ID NO: 2043122 - RNA, 19 nt, Human herpesvirus 6B
aagucaaaguccuggaaag

SEQ ID NO: 2043123 - RNA, 15 nt, Human herpesvirus 6B
uauugacugugaaaa

SEQ ID NO: 2043124 - RNA, 13 nt, Human herpesvirus 6B
aaaguucaguaag

SEQ ID NO: 2043125 - RNA, 18 nt, Human herpesvirus 6B
aauuuuauugacugugaa

SEQ ID NO: 2043126 - RNA, 14 nt, Human herpesvirus 6B
ucugagacagucaa

SEQ ID NO: 2043127 - RNA, 16 nt, Human herpesvirus 6B
caaucaucugguaaau

SEQ ID NO: 2043128 - RNA, 23 nt, Human herpesvirus 6B
cagaaucuaaaucgcgagacaga

SEQ ID NO: 2043129 - RNA, 13 nt, Human herpesvirus 6B
guauuggaugcuu

SEQ ID NO: 2043130 - RNA, 16 nt, Human herpesvirus 6B
aaugagauagaaguua

SEQ ID NO: 2043131 - RNA, 14 nt, Human herpesvirus 6B
agaguuugaauuac

SEQ ID NO: 2043132 - RNA, 20 nt, Human herpesvirus 6B
uugacugugaaaagugcuuu

SEQ ID NO: 2043133 - RNA, 22 nt, Human herpesvirus 6B
gagacugccgguaacgcugccg

SEQ ID NO: 2043134 - RNA, 20 nt, Human herpesvirus 6B
gagauccauaccgggacagc

SEQ ID NO: 2043135 - RNA, 14 nt, Human herpesvirus 6B
agaauuccaaggcu

SEQ ID NO: 2043136 - RNA, 18 nt, Human herpesvirus 6B
cguguuauuagacaccuc

SEQ ID NO: 2043137 - RNA, 16 nt, Human herpesvirus 6B
uaugucguuucauggg

SEQ ID NO: 2043138 - RNA, 22 nt, Human herpesvirus 6B
aauauggccugaccaacaugcc

SEQ ID NO: 2043139 - RNA, 15 nt, Human herpesvirus 6B
cgacauagaguguuu

SEQ ID NO: 2043140 - RNA, 16 nt, Human herpesvirus 6B
guuuaaagauguguua

SEQ ID NO: 2043141 - RNA, 23 nt, Human herpesvirus 6B
aauuuuauugacugugaaaagug

SEQ ID NO: 2043142 - RNA, 12 nt, Human herpesvirus 6B
gcuggucgccgu

SEQ ID NO: 2043143 - RNA, 19 nt, Human herpesvirus 6B
ggacagaaaaaacaccaga

SEQ ID NO: 2043144 - RNA, 19 nt, Human herpesvirus 6B
gcgacgacggggacuaccg

SEQ ID NO: 2043145 - RNA, 20 nt, Human herpesvirus 6B
caagcugggaaagaucgaga

SEQ ID NO: 2043146 - RNA, 16 nt, Human herpesvirus 6B
cguuuucgauuuagag

SEQ ID NO: 2043147 - RNA, 20 nt, Human herpesvirus 6B
cguuuuuggugaaaaacacg

SEQ ID NO: 2043148 - RNA, 17 nt, Human herpesvirus 6B
ugccguggcagaagaag

SEQ ID NO: 2043149 - RNA, 19 nt, Human herpesvirus 6B
aaacagauuuuacuucuac

SEQ ID NO: 2043150 - RNA, 21 nt, Human herpesvirus 6B
ugccuuuguaaaauguuucca

SEQ ID NO: 2043151 - RNA, 17 nt, Human herpesvirus 6B
auaccauuuuauacgaa

SEQ ID NO: 2043152 - RNA, 19 nt, Human herpesvirus 6B
acugcacagaaucgagauc

SEQ ID NO: 2043153 - RNA, 20 nt, Human herpesvirus 6B
ucgggccuggggacagacag

SEQ ID NO: 2043154 - RNA, 21 nt, Human herpesvirus 6B
uccgcgaugcgccacagggag

SEQ ID NO: 2043155 - RNA, 14 nt, Human herpesvirus 6B
ugccgucaccugca

SEQ ID NO: 2043156 - RNA, 21 nt, Human herpesvirus 6B
cgauauaaaaaaagagaaguu

SEQ ID NO: 2043157 - RNA, 18 nt, Human herpesvirus 6B
acugcgaauccgucuccg

SEQ ID NO: 2043158 - RNA, 13 nt, Human herpesvirus 6B
uagagauuuugga

SEQ ID NO: 2043159 - RNA, 15 nt, Human herpesvirus 6B
cguuccgaauccugu

SEQ ID NO: 2043160 - RNA, 17 nt, Human herpesvirus 6B
auucgaucgagaaucuu

SEQ ID NO: 2043161 - RNA, 23 nt, Human herpesvirus 6B
acuuaguugauaugaaugugaga

SEQ ID NO: 2043162 - RNA, 21 nt, Human herpesvirus 6B
ucuauucguucagaauguucc

SEQ ID NO: 2043163 - RNA, 20 nt, Human herpesvirus 6B
aucaagacuacucuggcuga

SEQ ID NO: 2043164 - RNA, 23 nt, Human herpesvirus 6B
ucucagcaaucaccaucaacaca

SEQ ID NO: 2043165 - RNA, 14 nt, Human herpesvirus 6B
cacugaaauuuaca

SEQ ID NO: 2043166 - RNA, 14 nt, Human herpesvirus 6B
aagacuuagcuaga

SEQ ID NO: 2043167 - RNA, 14 nt, Human herpesvirus 6B
cuaaaaucugcuaa

SEQ ID NO: 2043168 - RNA, 12 nt, Human herpesvirus 6B
cgcucauuuuga

SEQ ID NO: 2043169 - RNA, 20 nt, Human herpesvirus 6B
cguuugucuaugcaaugucu

SEQ ID NO: 2043170 - RNA, 19 nt, Human herpesvirus 6B
uccaaagucguugaauucu

SEQ ID NO: 2043171 - RNA, 14 nt, Human herpesvirus 6B
agaguuucauccug

SEQ ID NO: 2043172 - RNA, 15 nt, Human herpesvirus 6B
uuuucugcaaaacaa

SEQ ID NO: 2043173 - RNA, 20 nt, Human herpesvirus 6B
augaaagcacagaaaaagaa

SEQ ID NO: 2043174 - RNA, 17 nt, Human herpesvirus 6B
gaagaacagaggaagaa

SEQ ID NO: 2043175 - RNA, 16 nt, Human herpesvirus 6B
cgacagcgggugcuca

SEQ ID NO: 2043176 - RNA, 13 nt, Human herpesvirus 6B
gucugucuguucc

SEQ ID NO: 2043177 - RNA, 12 nt, Human herpesvirus 6B
gaacuauuucuu

SEQ ID NO: 2043178 - RNA, 23 nt, Human herpesvirus 6B
uuauaaaaaugcgcauaugacuc

SEQ ID NO: 2043179 - RNA, 21 nt, Human herpesvirus 6B
gauaaauguauaaaagagaaa

SEQ ID NO: 2043180 - RNA, 22 nt, Human herpesvirus 6B
cgucuccgauccgucaggacca

SEQ ID NO: 2043181 - RNA, 17 nt, Human herpesvirus 6B
caucaacacaccugccu

SEQ ID NO: 2043182 - RNA, 21 nt, Human herpesvirus 6B
cuaguacaaagauauuucuau

SEQ ID NO: 2043183 - RNA, 19 nt, Human herpesvirus 6B
cagaucaucgccauaguga

SEQ ID NO: 2043184 - RNA, 17 nt, Human herpesvirus 6B
acgucuccuucuaauau

SEQ ID NO: 2043185 - RNA, 17 nt, Human herpesvirus 6B
gugagggacuucgucuc

SEQ ID NO: 2043186 - RNA, 15 nt, Human herpesvirus 6B
agucuggccucugcg

SEQ ID NO: 2043187 - RNA, 23 nt, Human herpesvirus 6B
aguggcuugcugucgcccgccuc

SEQ ID NO: 2043188 - RNA, 22 nt, Human herpesvirus 6B
caccggcgacacgcgcggacca

SEQ ID NO: 2043189 - RNA, 15 nt, Human herpesvirus 6B
ugcuguaaaccagua

SEQ ID NO: 2043190 - RNA, 19 nt, Human herpesvirus 6B
cgccauaauggaagaaggc

SEQ ID NO: 2043191 - RNA, 13 nt, Human herpesvirus 6B
uguggaguuuucu

SEQ ID NO: 2043192 - RNA, 14 nt, Human herpesvirus 6B
gcacguaacaccag

SEQ ID NO: 2043193 - RNA, 22 nt, Human herpesvirus 6B
ugggucuaacggcaucagauuu

SEQ ID NO: 2043194 - RNA, 21 nt, Human herpesvirus 6B
caccccccucuugcaguggcg

SEQ ID NO: 2043195 - RNA, 22 nt, Human herpesvirus 6B
gggcuacuacguuaguaaggaa

SEQ ID NO: 2043196 - RNA, 23 nt, Human herpesvirus 6B
acaucgugaguuuucaugugaaa

SEQ ID NO: 2043197 - RNA, 17 nt, Human herpesvirus 6B
uugacgguuuauaugca

SEQ ID NO: 2043198 - RNA, 23 nt, Human herpesvirus 6B
acuccguauaugcuuuacuucug

SEQ ID NO: 2043199 - RNA, 16 nt, Human herpesvirus 6B
uauguggaaauuaaaa

SEQ ID NO: 2043200 - RNA, 16 nt, Human herpesvirus 6B
agaaucuccaaauggu

SEQ ID NO: 2043201 - RNA, 15 nt, Human herpesvirus 6B
uguuguucuuggaga

SEQ ID NO: 2043202 - RNA, 17 nt, Human herpesvirus 6B
ucucauaauuugccuga

SEQ ID NO: 2043203 - RNA, 17 nt, Human herpesvirus 6B
cgaggaauguguuucua

SEQ ID NO: 2043204 - RNA, 15 nt, Human herpesvirus 6B
gcauauauaugaauu

SEQ ID NO: 2043205 - RNA, 13 nt, Human herpesvirus 6B
cuggauacuauug

SEQ ID NO: 2043206 - RNA, 15 nt, Human herpesvirus 6B
cugaaucagaaacug

SEQ ID NO: 2043207 - RNA, 17 nt, Human herpesvirus 6B
uucauaagcucuacaca

SEQ ID NO: 2043208 - RNA, 20 nt, Human herpesvirus 6B
cggucgagaauacgcugugu

SEQ ID NO: 2043209 - RNA, 14 nt, Human herpesvirus 6B
acucgauuugauaa

SEQ ID NO: 2043210 - RNA, 22 nt, Human herpesvirus 6B
uauagauuauacgaaauuccga

SEQ ID NO: 2043211 - RNA, 12 nt, Human herpesvirus 6B
auguagcacacg

SEQ ID NO: 2043212 - RNA, 17 nt, Human herpesvirus 6B
cuuaaaugacacagaau

SEQ ID NO: 2043213 - RNA, 18 nt, Human herpesvirus 6B
ucuuuauaaacuuaaaag

SEQ ID NO: 2043214 - RNA, 23 nt, Human herpesvirus 6B
uccugugaugccuugauguuucc

SEQ ID NO: 2043215 - RNA, 21 nt, Human herpesvirus 6B
gaucugugcgccuuugcucag

SEQ ID NO: 2043216 - RNA, 13 nt, Human herpesvirus 6B
auuuuaaaaagaa

SEQ ID NO: 2043217 - RNA, 15 nt, Human herpesvirus 6B
cguggccgucuccug

SEQ ID NO: 2043218 - RNA, 23 nt, Human herpesvirus 6B
ugacuacggcgguuaacuguuuc

SEQ ID NO: 2043219 - RNA, 23 nt, Human herpesvirus 6B
caguuuuugaccggaauaaugaa

SEQ ID NO: 2043220 - RNA, 20 nt, Human herpesvirus 6B
ugcaucucgguuuaccuuuu

SEQ ID NO: 2043221 - RNA, 18 nt, Human herpesvirus 6B
ggagcacgcacgagaaca

SEQ ID NO: 2043222 - RNA, 19 nt, Human herpesvirus 6B
gacacggagugcgacagga

SEQ ID NO: 2043223 - RNA, 15 nt, Human herpesvirus 6B
aaccaucuauuugca

SEQ ID NO: 2043224 - RNA, 16 nt, Human herpesvirus 6B
ccuauguuaacauugu

SEQ ID NO: 2043225 - RNA, 12 nt, Human herpesvirus 6B
uaaaauguuucc

SEQ ID NO: 2043226 - RNA, 15 nt, Human herpesvirus 6B
caccuggcgcaccgc

SEQ ID NO: 2043227 - RNA, 16 nt, Human herpesvirus 6B
uacgaacagaaauuuc

SEQ ID NO: 2043228 - RNA, 12 nt, Human herpesvirus 6B
acugacaaggua

SEQ ID NO: 2043229 - RNA, 20 nt, Human herpesvirus 6B
cgcaguuucuguuuuucuca

SEQ ID NO: 2043230 - RNA, 19 nt, Human herpesvirus 6B
agaaacaaaauuaauucaa

SEQ ID NO: 2043231 - RNA, 15 nt, Human herpesvirus 6B
aaagggaagccagcc

SEQ ID NO: 2043232 - RNA, 13 nt, Human herpesvirus 6B
ggcacgagagccu

SEQ ID NO: 2043233 - RNA, 20 nt, Human herpesvirus 6B
uuuguuucagcguauucaga

SEQ ID NO: 2043234 - RNA, 12 nt, Human herpesvirus 6B
ggcgcuagugau

SEQ ID NO: 2043235 - RNA, 10 nt, Human herpesvirus 6B
cgguaaaaug

SEQ ID NO: 2043236 - RNA, 16 nt, Human herpesvirus 6B
agcugacaucugcaaa

SEQ ID NO: 2043237 - RNA, 22 nt, Human herpesvirus 6B
aucuucgaaucaaauucaaacu

SEQ ID NO: 2043238 - RNA, 22 nt, Human herpesvirus 6B
uguaucgaggaauguguuucua

SEQ ID NO: 2043239 - RNA, 16 nt, Human herpesvirus 6B
gucuguugcuguaguu

SEQ ID NO: 2043240 - RNA, 14 nt, Human herpesvirus 6B
gugugucggcuccg

SEQ ID NO: 2043241 - RNA, 19 nt, Human herpesvirus 6B
uauguccgcucauuuugau

SEQ ID NO: 2043242 - RNA, 15 nt, Human herpesvirus 6B
cugcccccacgggcc

SEQ ID NO: 2043243 - RNA, 23 nt, Human herpesvirus 6B
uuguucagagcugaugauuugaa

SEQ ID NO: 2043244 - RNA, 22 nt, Human herpesvirus 6B
cccggggaggcgacgacgggga

SEQ ID NO: 2043245 - RNA, 9 nt, Human herpesvirus 6B
uugcagugg

SEQ ID NO: 2043246 - RNA, 19 nt, Human herpesvirus 6B
cuguacgauuacuguccgu

SEQ ID NO: 2043247 - RNA, 13 nt, Human herpesvirus 6B
ggugauuuuccaa

SEQ ID NO: 2043248 - RNA, 17 nt, Human herpesvirus 6B
aguauuacgaauaccua

SEQ ID NO: 2043249 - RNA, 19 nt, Human herpesvirus 6B
uauuuuuucagcuuucaua

SEQ ID NO: 2043250 - RNA, 15 nt, Human herpesvirus 6B
uucaggagaagaaca

SEQ ID NO: 2043251 - RNA, 17 nt, Human herpesvirus 6B
gcagcagaggccggcac

SEQ ID NO: 2043252 - RNA, 20 nt, Human herpesvirus 6B
cggauuuuauuuuaucucau

SEQ ID NO: 2043253 - RNA, 14 nt, Human herpesvirus 6B
ccugagaccgagag

SEQ ID NO: 2043254 - RNA, 20 nt, Human herpesvirus 6B
aucacuuuauuucuaaggag

SEQ ID NO: 2043255 - RNA, 16 nt, Human herpesvirus 6B
uaaaauugaauuuaua

SEQ ID NO: 2043256 - RNA, 18 nt, Human herpesvirus 6B
aucuacugguaauaaaca

SEQ ID NO: 2043257 - RNA, 16 nt, Human herpesvirus 6B
acuuuauuugaaacug

SEQ ID NO: 2043258 - RNA, 18 nt, Human herpesvirus 6B
aaugggaugcauuauacu

SEQ ID NO: 2043259 - RNA, 15 nt, Human herpesvirus 6B
aagauuguucagagc

SEQ ID NO: 2043260 - RNA, 16 nt, Human herpesvirus 6B
aguuagugcaccgaga

SEQ ID NO: 2043261 - RNA, 14 nt, Human herpesvirus 6B
agacugcacagaau

SEQ ID NO: 2043262 - RNA, 15 nt, Human herpesvirus 6B
gaacagcgcauaaau

SEQ ID NO: 2043263 - RNA, 17 nt, Human herpesvirus 6B
uggcagccuaaacggag

SEQ ID NO: 2043264 - RNA, 20 nt, Human herpesvirus 6B
aaaacgaaacucuagaauua

SEQ ID NO: 2043265 - RNA, 19 nt, Human herpesvirus 6B
guccgcgaugcgccacagg

SEQ ID NO: 2043266 - RNA, 18 nt, Human herpesvirus 6B
gucccuucuccgucaccc

SEQ ID NO: 2043267 - RNA, 13 nt, Human herpesvirus 6B
auuagaucuucuu

SEQ ID NO: 2043268 - RNA, 18 nt, Human herpesvirus 6B
auuauauguugauugcug

SEQ ID NO: 2043269 - RNA, 14 nt, Human herpesvirus 6B
uuuaucgugcuugu

SEQ ID NO: 2043270 - RNA, 13 nt, Human herpesvirus 6B
cugcaaaaacaaa

SEQ ID NO: 2043271 - RNA, 23 nt, Human herpesvirus 6B
ugucuucgagauuuuagaauaaa

SEQ ID NO: 2043272 - RNA, 23 nt, Human herpesvirus 6B
aauguguucuuacaauguucuug

SEQ ID NO: 2043273 - RNA, 13 nt, Human herpesvirus 6B
gcucuguucucuc

SEQ ID NO: 2043274 - RNA, 18 nt, Human herpesvirus 6B
aguaucagcuaaaaauau

SEQ ID NO: 2043275 - RNA, 19 nt, Human herpesvirus 6B
ccgccuucucugucgcugc

SEQ ID NO: 2043276 - RNA, 12 nt, Human herpesvirus 6B
agacgccucagg

SEQ ID NO: 2043277 - RNA, 16 nt, Human herpesvirus 6B
cccggggagugggagg

SEQ ID NO: 2043278 - RNA, 17 nt, Human herpesvirus 6B
cacauuagcugcuaaau

SEQ ID NO: 2043279 - RNA, 21 nt, Human herpesvirus 6B
ccgccucucuccgccuccucu

SEQ ID NO: 2043280 - RNA, 12 nt, Human herpesvirus 6B
agcggccaggcc

SEQ ID NO: 2043281 - RNA, 15 nt, Human herpesvirus 6B
guuccaugugucucc

SEQ ID NO: 2043282 - RNA, 19 nt, Human herpesvirus 6B
aauaaugcucagaugugga

SEQ ID NO: 2043283 - RNA, 14 nt, Human herpesvirus 6B
auaagcagccgaau

SEQ ID NO: 2043284 - RNA, 14 nt, Human herpesvirus 6B
gagauagagccggc

SEQ ID NO: 2043285 - RNA, 15 nt, Human herpesvirus 6B
ccuaaaaucugcuaa

SEQ ID NO: 2043286 - RNA, 17 nt, Human herpesvirus 6B
ucgacuaacaauuuaua

SEQ ID NO: 2043287 - RNA, 20 nt, Human herpesvirus 6B
gcaccgagggcgggcggacg

SEQ ID NO: 2043288 - RNA, 18 nt, Human herpesvirus 6B
caaguugcggaagggcuc

SEQ ID NO: 2043289 - RNA, 18 nt, Human herpesvirus 6B
gagccgcagaggccagac

SEQ ID NO: 2043290 - RNA, 17 nt, Human herpesvirus 6B
ucggcauuuguguuuuu

SEQ ID NO: 2043291 - RNA, 17 nt, Human herpesvirus 6B
uacaguuucucgaaaau

SEQ ID NO: 2043292 - RNA, 14 nt, Human herpesvirus 6B
uuucauucaaugag

SEQ ID NO: 2043293 - RNA, 14 nt, Human herpesvirus 6B
uauaacagacauau

SEQ ID NO: 2043294 - RNA, 11 nt, Human herpesvirus 6B
cagagcacaca

SEQ ID NO: 2043295 - RNA, 17 nt, Human herpesvirus 6B
aaucuugagguggaaau

SEQ ID NO: 2043296 - RNA, 14 nt, Human herpesvirus 6B
guaguugaugcugu

SEQ ID NO: 2043297 - RNA, 15 nt, Human herpesvirus 6B
ucuagaugaaagagg

SEQ ID NO: 2043298 - RNA, 13 nt, Human herpesvirus 6B
aaaauauuuugaa

SEQ ID NO: 2043299 - RNA, 20 nt, Human herpesvirus 6B
augucaagucuagacaugau

SEQ ID NO: 2043300 - RNA, 14 nt, Human herpesvirus 6B
aaagugcuuuaucc

SEQ ID NO: 2043301 - RNA, 17 nt, Human herpesvirus 6B
cgaggaguuaaaacuaa

SEQ ID NO: 2043302 - RNA, 22 nt, Human herpesvirus 6B
gagucggcuguccaaacagaga

SEQ ID NO: 2043303 - RNA, 13 nt, Human herpesvirus 6B
aacaauaauugca

SEQ ID NO: 2043304 - RNA, 11 nt, Human herpesvirus 6B
cuuuccaagga

SEQ ID NO: 2043305 - RNA, 20 nt, Human herpesvirus 6B
gggucgucgaugcgaaggga

SEQ ID NO: 2043306 - RNA, 13 nt, Human herpesvirus 6B
ugugaucaagugg

SEQ ID NO: 2043307 - RNA, 20 nt, Human herpesvirus 6B
cuguaguuuuuuucugauga

SEQ ID NO: 2043308 - RNA, 19 nt, Human herpesvirus 6B
ucaagguugucagauuucc

SEQ ID NO: 2043309 - RNA, 20 nt, Human herpesvirus 6B
ugggggauggguuaggguua

SEQ ID NO: 2043310 - RNA, 23 nt, Human herpesvirus 6B
ccgcaguuccuguuuuucucaua

SEQ ID NO: 2043311 - RNA, 21 nt, Human herpesvirus 6B
ugugaaguucgauguuauugu

SEQ ID NO: 2043312 - RNA, 18 nt, Human herpesvirus 6B
uucgacaaagaacauuug

SEQ ID NO: 2043313 - RNA, 16 nt, Human herpesvirus 6B
cuauguuauguaaaga

SEQ ID NO: 2043314 - RNA, 18 nt, Human herpesvirus 6B
gcgggacgugaucugcgg

SEQ ID NO: 2043315 - RNA, 17 nt, Human herpesvirus 6B
ucaaaaugaccagagau

SEQ ID NO: 2043316 - RNA, 12 nt, Human herpesvirus 6B
uauugcuacaaa

SEQ ID NO: 2043317 - RNA, 15 nt, Human herpesvirus 6B
acgaacauucaaugg

SEQ ID NO: 2043318 - RNA, 22 nt, Human herpesvirus 6B
gagguuuuuucaccccccucuu

SEQ ID NO: 2043319 - RNA, 20 nt, Human herpesvirus 6B
gccucacuguaaaagggcuc

SEQ ID NO: 2043320 - RNA, 22 nt, Human herpesvirus 6B
guaaucucuagguaaacuucug

SEQ ID NO: 2043321 - RNA, 18 nt, Human herpesvirus 6B
ugguggcgaucuguauau

SEQ ID NO: 2043322 - RNA, 18 nt, Human herpesvirus 6B
agaggaagggauggcaga

SEQ ID NO: 2043323 - RNA, 12 nt, Human herpesvirus 6B
uugaagaacugg

SEQ ID NO: 2043324 - RNA, 13 nt, Human herpesvirus 6B
caaaaucugcuaa

SEQ ID NO: 2043325 - RNA, 13 nt, Human herpesvirus 6B
gcgacacgcgcgg

SEQ ID NO: 2043326 - RNA, 15 nt, Human herpesvirus 6B
cguggaagccgcugc

SEQ ID NO: 2043327 - RNA, 15 nt, Human herpesvirus 6B
uggcuaauagggaau

SEQ ID NO: 2043328 - RNA, 21 nt, Human herpesvirus 6B
ugaaagguguggugaaagaca

SEQ ID NO: 2043329 - RNA, 16 nt, Human herpesvirus 6B
gggccagcccugaaga

SEQ ID NO: 2043330 - RNA, 18 nt, Human herpesvirus 6B
ugauucuguuuucuacgu

SEQ ID NO: 2043331 - RNA, 16 nt, Human herpesvirus 6B
agguuucucucucacc

SEQ ID NO: 2043332 - RNA, 18 nt, Human herpesvirus 6B
cgcgacgccuccgccggg

SEQ ID NO: 2043333 - RNA, 15 nt, Human herpesvirus 6B
uugguauaagaaaga

SEQ ID NO: 2043334 - RNA, 18 nt, Human herpesvirus 6B
ucuaaugcaaagaugucg

SEQ ID NO: 2043335 - RNA, 14 nt, Human herpesvirus 6B
uguacgaaaacgac

SEQ ID NO: 2043336 - RNA, 23 nt, Human herpesvirus 6B
agcugcuaacggagcaaccgcag

SEQ ID NO: 2043337 - RNA, 19 nt, Human herpesvirus 6B
cuuuccauugcucuuucca

SEQ ID NO: 2043338 - RNA, 15 nt, Human herpesvirus 6B
uaacagaguuuucau

SEQ ID NO: 2043339 - RNA, 16 nt, Human herpesvirus 6B
acgacgaggaguuaaa

SEQ ID NO: 2043340 - RNA, 17 nt, Human herpesvirus 6B
uggcgcuuguaggagca

SEQ ID NO: 2043341 - RNA, 19 nt, Human herpesvirus 6B
uucaggcggcaugaauucc

SEQ ID NO: 2043342 - RNA, 16 nt, Human herpesvirus 6B
gcgccucccauagagg

SEQ ID NO: 2043343 - RNA, 15 nt, Human herpesvirus 6B
caacguuuucugcuc

SEQ ID NO: 2043344 - RNA, 17 nt, Human herpesvirus 6B
agaaauuuuuuagaaca

SEQ ID NO: 2043345 - RNA, 12 nt, Human herpesvirus 6B
gcugcuggguac

SEQ ID NO: 2043346 - RNA, 21 nt, Human herpesvirus 6B
ggagguuuuuucaccccccuc

SEQ ID NO: 2043347 - RNA, 16 nt, Human herpesvirus 6B
acggugauguugcgau

SEQ ID NO: 2043348 - RNA, 20 nt, Human herpesvirus 6B
uauuaauuuuuuguuucuga

SEQ ID NO: 2043349 - RNA, 12 nt, Human herpesvirus 6B
cggggcgcaccg

SEQ ID NO: 2043350 - RNA, 14 nt, Human herpesvirus 6B
ugcuguaaaccagu

SEQ ID NO: 2043351 - RNA, 20 nt, Human herpesvirus 6B
ucgucgaaaacaauuuccca

SEQ ID NO: 2043352 - RNA, 16 nt, Human herpesvirus 6B
aguuuuuuucugauga

SEQ ID NO: 2043353 - RNA, 23 nt, Human herpesvirus 6B
gaaaacacccugauggauuacaa

SEQ ID NO: 2043354 - RNA, 18 nt, Human herpesvirus 6B
gcuauuugacaauaaaca

SEQ ID NO: 2043355 - RNA, 18 nt, Human herpesvirus 6B
agaaguauuucgaucaga

SEQ ID NO: 2043356 - RNA, 13 nt, Human herpesvirus 6B
ggcgcgggacagc

SEQ ID NO: 2043357 - RNA, 14 nt, Human herpesvirus 6B
augaaauuuucaau

SEQ ID NO: 2043358 - RNA, 22 nt, Human herpesvirus 6B
uauuugacaauaaacaugauug

SEQ ID NO: 2043359 - RNA, 17 nt, Human herpesvirus 6B
gccaccucuucuccgcc

SEQ ID NO: 2043360 - RNA, 20 nt, Human herpesvirus 6B
uuguuacuuucauaacaagu

SEQ ID NO: 2043361 - RNA, 15 nt, Human herpesvirus 6B
aggaggaagaggagg

SEQ ID NO: 2043362 - RNA, 19 nt, Human herpesvirus 6B
ugugaggugauuugaacag

SEQ ID NO: 2043363 - RNA, 18 nt, Human herpesvirus 6B
acugugaaaagugcuuua

SEQ ID NO: 2043364 - RNA, 17 nt, Human herpesvirus 6B
aaguuuuggaaaaugua

SEQ ID NO: 2043365 - RNA, 19 nt, Human herpesvirus 6B
uaucucgaaaccaagacuu

SEQ ID NO: 2043366 - RNA, 15 nt, Human herpesvirus 6B
cagaauacaaaaacg

SEQ ID NO: 2043367 - RNA, 16 nt, Human herpesvirus 6B
auugauccagaauuau

SEQ ID NO: 2043368 - RNA, 15 nt, Human herpesvirus 6B
caccucgcaaagucu

SEQ ID NO: 2043369 - RNA, 23 nt, Human herpesvirus 6B
aaaucaaugaguugcacauguuu

SEQ ID NO: 2043370 - RNA, 21 nt, Human herpesvirus 6B
agaaagcguguucaaaaaugu

SEQ ID NO: 2043371 - RNA, 18 nt, Human herpesvirus 6B
cagaagauccaaacuaug

SEQ ID NO: 2043372 - RNA, 14 nt, Human herpesvirus 6B
cgggcagggcgggc

SEQ ID NO: 2043373 - RNA, 23 nt, Human herpesvirus 6B
uuuccccccgccgccuucucugu

SEQ ID NO: 2043374 - RNA, 22 nt, Human herpesvirus 6B
uauuuaacauccaaaauacacu

SEQ ID NO: 2043375 - RNA, 22 nt, Human herpesvirus 6B
aggagaauuugcaguuugugaa

SEQ ID NO: 2043376 - RNA, 13 nt, Human herpesvirus 6B
augacugugaggu

SEQ ID NO: 2043377 - RNA, 14 nt, Human herpesvirus 6B
uucagucucagcaa

SEQ ID NO: 2043378 - RNA, 22 nt, Human herpesvirus 6B
agacguuucuauggauaugagu

SEQ ID NO: 2043379 - RNA, 22 nt, Human herpesvirus 6B
uauaacagacauaugcaaucug

SEQ ID NO: 2043380 - RNA, 14 nt, Human herpesvirus 6B
ggucgccguggccg

SEQ ID NO: 2043381 - RNA, 18 nt, Human herpesvirus 6B
ucuauucaggaauauuua

SEQ ID NO: 2043382 - RNA, 14 nt, Human herpesvirus 6B
gaauugguuugcuu

SEQ ID NO: 2043383 - RNA, 18 nt, Human herpesvirus 6B
ugaugcuguugcuguugu

SEQ ID NO: 2043384 - RNA, 13 nt, Human herpesvirus 6B
gucuucugugcuu

SEQ ID NO: 2043385 - RNA, 23 nt, Human herpesvirus 6B
ggucgcguucuaacccaugaaaa

SEQ ID NO: 2043386 - RNA, 21 nt, Human herpesvirus 6B
guugggauggcagauugcaaa

SEQ ID NO: 2043387 - RNA, 14 nt, Human herpesvirus 6B
cccagaugcagucu

SEQ ID NO: 2043388 - RNA, 19 nt, Human herpesvirus 6B
guugcauggugauguguua

SEQ ID NO: 2043389 - RNA, 18 nt, Human herpesvirus 6B
cguggccgucuccugcaa

SEQ ID NO: 2043390 - RNA, 22 nt, Human herpesvirus 6B
acgucuccaucucuagaaucuu

SEQ ID NO: 2043391 - RNA, 21 nt, Human herpesvirus 6B
gcaguuacaauuacuaaauca

SEQ ID NO: 2043392 - RNA, 21 nt, Human herpesvirus 6B
uaaggaguuuaucguuuuuau

SEQ ID NO: 2043393 - RNA, 12 nt, Human herpesvirus 6B
uaaagcagcuag

SEQ ID NO: 2043394 - RNA, 11 nt, Human herpesvirus 6B
uguuguagugg

SEQ ID NO: 2043395 - RNA, 19 nt, Human herpesvirus 6B
auucaauggagucuucaca

SEQ ID NO: 2043396 - RNA, 21 nt, Human herpesvirus 6B
gauaauuucuuuggagggaau

SEQ ID NO: 2043397 - RNA, 11 nt, Human herpesvirus 6B
ccaacugagag

SEQ ID NO: 2043398 - RNA, 16 nt, Human herpesvirus 6B
auaggcucggcagggg

SEQ ID NO: 2043399 - RNA, 14 nt, Human herpesvirus 6B
cuuuauacgucaua

SEQ ID NO: 2043400 - RNA, 13 nt, Human herpesvirus 6B
gccgcgcggagcu

SEQ ID NO: 2043401 - RNA, 16 nt, Human herpesvirus 6B
gcucuccguuucucgg

SEQ ID NO: 2043402 - RNA, 20 nt, Human herpesvirus 6B
acucaguagaaugaaugaaa

SEQ ID NO: 2043403 - RNA, 12 nt, Human herpesvirus 6B
augcauagaagu

SEQ ID NO: 2043404 - RNA, 16 nt, Human herpesvirus 6B
ugugcacgaauaagga

SEQ ID NO: 2043405 - RNA, 18 nt, Human herpesvirus 6B
caucaacuacuucuguua

SEQ ID NO: 2043406 - RNA, 13 nt, Human herpesvirus 6B
aaagcugcuaacg

SEQ ID NO: 2043407 - RNA, 16 nt, Human herpesvirus 6B
cguuuuuucugcaaaa

SEQ ID NO: 2043408 - RNA, 15 nt, Human herpesvirus 6B
cuggcgaugcagaug

SEQ ID NO: 2043409 - RNA, 16 nt, Human herpesvirus 6B
cgcaguuucuguuuuu

SEQ ID NO: 2043410 - RNA, 15 nt, Human herpesvirus 6B
caagguaugaaacga

SEQ ID NO: 2043411 - RNA, 17 nt, Human herpesvirus 6B
cggauucauuuauucuc

SEQ ID NO: 2043412 - RNA, 18 nt, Human herpesvirus 6B
auauuucuaucuggaaau

SEQ ID NO: 2043413 - RNA, 24 nt, Human herpesvirus 6B
gcaugacacaucgugaguuuucau

SEQ ID NO: 2043414 - RNA, 15 nt, Human herpesvirus 6B
acaacgacugggaga

SEQ ID NO: 2043415 - RNA, 16 nt, Human herpesvirus 6B
ccuuguguauuuguga

SEQ ID NO: 2043416 - RNA, 14 nt, Human herpesvirus 6B
aaggucaaaaaacu

SEQ ID NO: 2043417 - RNA, 20 nt, Human herpesvirus 6B
aaacuaugaggaacugauga

SEQ ID NO: 2043418 - RNA, 21 nt, Human herpesvirus 6B
cgaugcgaagggaguaaggag

SEQ ID NO: 2043419 - RNA, 13 nt, Human herpesvirus 6B
cgcgccacagcgg

SEQ ID NO: 2043420 - RNA, 13 nt, Human herpesvirus 6B
ucguugcagaccg

SEQ ID NO: 2043421 - RNA, 9 nt, Human herpesvirus 6B
cuccaagga

SEQ ID NO: 2043422 - RNA, 13 nt, Human herpesvirus 6B
ugaaauacuguga

SEQ ID NO: 2043423 - RNA, 12 nt, Human herpesvirus 6B
gcagaagcuguc

SEQ ID NO: 2043424 - RNA, 20 nt, Human herpesvirus 6B
ugcguguaauuguugaaauu

SEQ ID NO: 2043425 - RNA, 17 nt, Human herpesvirus 6B
cuccgccggguaugagc

SEQ ID NO: 2043426 - RNA, 20 nt, Human herpesvirus 6B
aucucaagaaacaaguacua

SEQ ID NO: 2043427 - RNA, 14 nt, Human herpesvirus 6B
agcugacaucugca

SEQ ID NO: 2043428 - RNA, 22 nt, Human herpesvirus 6B
ccggcgacacgcgcggaccacu

SEQ ID NO: 2043429 - RNA, 17 nt, Human herpesvirus 6B
ggggaucgacgaccagg

SEQ ID NO: 2043430 - RNA, 17 nt, Human herpesvirus 6B
caugacugugaggugau

SEQ ID NO: 2043431 - RNA, 23 nt, Human herpesvirus 6B
ccgcugcagugugucggcuccga

SEQ ID NO: 2043432 - RNA, 12 nt, Human herpesvirus 6B
gccaugauuuug

SEQ ID NO: 2043433 - RNA, 19 nt, Human herpesvirus 6B
uacacagagugcaucuuua

SEQ ID NO: 2043434 - RNA, 13 nt, Human herpesvirus 6B
guuauuaugcugu

SEQ ID NO: 2043435 - RNA, 14 nt, Human herpesvirus 6B
gacggcagcgggga

SEQ ID NO: 2043436 - RNA, 18 nt, Human herpesvirus 6B
cguccguggaaaaacacu

SEQ ID NO: 2043437 - RNA, 15 nt, Human herpesvirus 6B
cagaaaugagcaaca

SEQ ID NO: 2043438 - RNA, 17 nt, Human herpesvirus 6B
uccaguuguauuuugcg

SEQ ID NO: 2043439 - RNA, 19 nt, Human herpesvirus 6B
cauuucuaucuacaaaaua

SEQ ID NO: 2043440 - RNA, 16 nt, Human herpesvirus 6B
gagguagcaacuugcu

SEQ ID NO: 2043441 - RNA, 13 nt, Human herpesvirus 6B
ccggccaauucau

SEQ ID NO: 2043442 - RNA, 13 nt, Human herpesvirus 6B
gaggcccagaggu

SEQ ID NO: 2043443 - RNA, 16 nt, Human herpesvirus 6B
ggagaggaagccggag

SEQ ID NO: 2043444 - RNA, 20 nt, Human herpesvirus 6B
cguccgcgaugcgccacagg

SEQ ID NO: 2043445 - RNA, 13 nt, Human herpesvirus 6B
uacuaauguggau

SEQ ID NO: 2043446 - RNA, 14 nt, Human herpesvirus 6B
accccccucuugca

SEQ ID NO: 2043447 - RNA, 20 nt, Human herpesvirus 6B
gugacgugcgugcacgcgcc

SEQ ID NO: 2043448 - RNA, 19 nt, Human herpesvirus 6B
ggauuuuauuuuaucucau

SEQ ID NO: 2043449 - RNA, 22 nt, Human herpesvirus 6B
guguauaacgauaauagaaaaa

SEQ ID NO: 2043450 - RNA, 17 nt, Human herpesvirus 6B
caaacucaaagaaagcu

SEQ ID NO: 2043451 - RNA, 15 nt, Human herpesvirus 6B
gcgaccucgcucucc

SEQ ID NO: 2043452 - RNA, 16 nt, Human herpesvirus 6B
cauaaacuauuguuua

SEQ ID NO: 2043453 - RNA, 20 nt, Human herpesvirus 6B
augacugugaggugauuuga

SEQ ID NO: 2043454 - RNA, 23 nt, Human herpesvirus 6B
uaccccggcuuucucgccgccuc

SEQ ID NO: 2043455 - RNA, 23 nt, Human herpesvirus 6B
gcgucuuaacguucguccggggu

SEQ ID NO: 2043456 - RNA, 16 nt, Human herpesvirus 6B
gaugcuuuuaguuuca

SEQ ID NO: 2043457 - RNA, 18 nt, Human herpesvirus 6B
uauuugaaacugaagaaa

SEQ ID NO: 2043458 - RNA, 15 nt, Human herpesvirus 6B
ccuaaauaccauuuu

SEQ ID NO: 2043459 - RNA, 20 nt, Human herpesvirus 6B
guugcuguaguugaugcugu

SEQ ID NO: 2043460 - RNA, 17 nt, Human herpesvirus 6B
cgguggugaucggcaga

SEQ ID NO: 2043461 - RNA, 16 nt, Human herpesvirus 6B
aggguaacgcaggaga

SEQ ID NO: 2043462 - RNA, 16 nt, Human herpesvirus 6B
cuuugggaugaagaga

SEQ ID NO: 2043463 - RNA, 13 nt, Human herpesvirus 6B
gggaucgggccug

SEQ ID NO: 2043464 - RNA, 16 nt, Human herpesvirus 6B
agugcugugcucuuua

SEQ ID NO: 2043465 - RNA, 20 nt, Human herpesvirus 6B
gacuuuucugaugacaauau

SEQ ID NO: 2043466 - RNA, 22 nt, Human herpesvirus 6B
auuuugggccguaaacuuauug

SEQ ID NO: 2043467 - RNA, 15 nt, Human herpesvirus 6B
guaaccugucuugga

SEQ ID NO: 2043468 - RNA, 17 nt, Human herpesvirus 6B
uuucaccccccucuugc

SEQ ID NO: 2043469 - RNA, 13 nt, Human herpesvirus 6B
uugagacguuuuu

SEQ ID NO: 2043470 - RNA, 23 nt, Human herpesvirus 6B
ccuauguuaacauugugagaaca

SEQ ID NO: 2043471 - RNA, 16 nt, Human herpesvirus 6B
ucugcguugcccuccc

SEQ ID NO: 2043472 - RNA, 13 nt, Human herpesvirus 6B
uggaaaauuuaua

SEQ ID NO: 2043473 - RNA, 17 nt, Human herpesvirus 6B
ugucuucauucuucgaa

SEQ ID NO: 2043474 - RNA, 22 nt, Human herpesvirus 6B
acucgacguguaucgauuuaac

SEQ ID NO: 2043475 - RNA, 16 nt, Human herpesvirus 6B
ggggagccguggugcg

SEQ ID NO: 2043476 - RNA, 21 nt, Human herpesvirus 6B
gagaguuuccgggcauguuuu

SEQ ID NO: 2043477 - RNA, 13 nt, Human herpesvirus 6B
aaaaaacaguuuc

SEQ ID NO: 2043478 - RNA, 17 nt, Human herpesvirus 6B
ucaccaugaaagcacag

SEQ ID NO: 2043479 - RNA, 15 nt, Human herpesvirus 6B
uuccagggugaagac

SEQ ID NO: 2043480 - RNA, 21 nt, Human herpesvirus 6B
cgggccuggggacagacaggg

SEQ ID NO: 2043481 - RNA, 10 nt, Human herpesvirus 6B
ucuugcagug

SEQ ID NO: 2043482 - RNA, 19 nt, Human herpesvirus 6B
gcgcguuuaucaugagaga

SEQ ID NO: 2043483 - RNA, 19 nt, Human herpesvirus 6B
uuaaaaucaaaaaaaucuc

SEQ ID NO: 2043484 - RNA, 14 nt, Human herpesvirus 6B
ggcggcggcggcug

SEQ ID NO: 2043485 - RNA, 14 nt, Human herpesvirus 6B
auaaacuuaaaaga

SEQ ID NO: 2043486 - RNA, 20 nt, Human herpesvirus 6B
cguguuauggggaagaucua

SEQ ID NO: 2043487 - RNA, 15 nt, Human herpesvirus 6B
ugaugacucaagaau

SEQ ID NO: 2043488 - RNA, 13 nt, Human herpesvirus 6B
uaaauggacggcg

SEQ ID NO: 2043489 - RNA, 12 nt, Human herpesvirus 6B
gacgggcagggc

SEQ ID NO: 2043490 - RNA, 18 nt, Human herpesvirus 6B
ucguaguuuaugaaaucg

SEQ ID NO: 2043491 - RNA, 20 nt, Human herpesvirus 6B
uuguacauguuaacaauaaa

SEQ ID NO: 2043492 - RNA, 22 nt, Human herpesvirus 6B
caucuugccguuuugaucuuug

SEQ ID NO: 2043493 - RNA, 17 nt, Human herpesvirus 6B
ugaacucucacggccau

SEQ ID NO: 2043494 - RNA, 15 nt, Human herpesvirus 6B
cgggcgacgggcagg

SEQ ID NO: 2043495 - RNA, 18 nt, Human herpesvirus 6B
uuucgugguugucuuugu

SEQ ID NO: 2043496 - RNA, 21 nt, Human herpesvirus 6B
guuuaaagugaguuuuggaaa

SEQ ID NO: 2043497 - RNA, 11 nt, Human herpesvirus 6B
augagagagca

SEQ ID NO: 2043498 - RNA, 12 nt, Human herpesvirus 6B
ccaacuuaauaa

SEQ ID NO: 2043499 - RNA, 13 nt, Human herpesvirus 6B
ucuccgucucagu

SEQ ID NO: 2043500 - RNA, 18 nt, Human herpesvirus 6B
acauucguauacuuccuc

SEQ ID NO: 2043501 - RNA, 12 nt, Human herpesvirus 6B
acuuagcuagac

SEQ ID NO: 2043502 - RNA, 19 nt, Human herpesvirus 6B
gaacagagacccuccuggc

SEQ ID NO: 2043503 - RNA, 13 nt, Human herpesvirus 6B
cuccgccuccucu

SEQ ID NO: 2043504 - RNA, 18 nt, Human herpesvirus 6B
cgaauuauguauguguua

SEQ ID NO: 2043505 - RNA, 15 nt, Human herpesvirus 6B
gacggcagcggggaa

SEQ ID NO: 2043506 - RNA, 16 nt, Human herpesvirus 6B
cguggcagaagaagag

SEQ ID NO: 2043507 - RNA, 16 nt, Human herpesvirus 6B
gaaaacuucuguuuua

SEQ ID NO: 2043508 - RNA, 14 nt, Human herpesvirus 6B
ccaggaaaaugugu

SEQ ID NO: 2043509 - RNA, 18 nt, Human herpesvirus 6B
aauaauugcauuuugggc

SEQ ID NO: 2043510 - RNA, 21 nt, Human herpesvirus 6B
auccuguaguuuuuuucugau

SEQ ID NO: 2043511 - RNA, 13 nt, Human herpesvirus 6B
gagagcuccgagc

SEQ ID NO: 2043512 - RNA, 13 nt, Human herpesvirus 6B
auuuuuuaaauaa

SEQ ID NO: 2043513 - RNA, 12 nt, Human herpesvirus 6B
guggaaauuaaa

SEQ ID NO: 2043514 - RNA, 18 nt, Human herpesvirus 6B
ugauacgaguaaaauuga

SEQ ID NO: 2043515 - RNA, 12 nt, Human herpesvirus 6B
cucucucaccug

SEQ ID NO: 2043516 - RNA, 13 nt, Human herpesvirus 6B
ucacauagagaag

SEQ ID NO: 2043517 - RNA, 19 nt, Human herpesvirus 6B
aaagauguguuaaagaaug

SEQ ID NO: 2043518 - RNA, 15 nt, Human herpesvirus 6B
guccuacagaagaaa

SEQ ID NO: 2043519 - RNA, 13 nt, Human herpesvirus 6B
uuuguuucugaaa

SEQ ID NO: 2043520 - RNA, 14 nt, Human herpesvirus 6B
uuauccggccaauu

SEQ ID NO: 2043521 - RNA, 17 nt, Human herpesvirus 6B
ucuaauuauaaauguag

SEQ ID NO: 2043522 - RNA, 17 nt, Human herpesvirus 6B
gugcuuguuuuggugga

SEQ ID NO: 2043523 - RNA, 14 nt, Human herpesvirus 6B
ccgaaccacaucuu

SEQ ID NO: 2043524 - RNA, 13 nt, Human herpesvirus 6B
ucgucauuccagu

SEQ ID NO: 2043525 - RNA, 22 nt, Human herpesvirus 6B
cagcaauuucggcaagaaagcc

SEQ ID NO: 2043526 - RNA, 19 nt, Human herpesvirus 6B
gauauaaauauuuacggga

SEQ ID NO: 2043527 - RNA, 23 nt, Human herpesvirus 6B
ggacggcguucguucggacucuc

SEQ ID NO: 2043528 - RNA, 13 nt, Human herpesvirus 6B
ucuggcugaagga

SEQ ID NO: 2043529 - RNA, 17 nt, Human herpesvirus 6B
uaucacuuuauuucuaa

SEQ ID NO: 2043530 - RNA, 20 nt, Human herpesvirus 6B
cacaguucguccagcagcgg

SEQ ID NO: 2043531 - RNA, 15 nt, Human herpesvirus 6B
ugcaaaaacaaauga

SEQ ID NO: 2043532 - RNA, 22 nt, Human herpesvirus 6B
cucugcggcucucugcccuucu

SEQ ID NO: 2043533 - RNA, 21 nt, Human herpesvirus 6B
gauugucauucugcauuuaua

SEQ ID NO: 2043534 - RNA, 19 nt, Human herpesvirus 6B
cgcgggaccuggcgggcac

SEQ ID NO: 2043535 - RNA, 21 nt, Human herpesvirus 6B
gaagaucuuuauggagggaau

SEQ ID NO: 2043536 - RNA, 17 nt, Human herpesvirus 6B
caguucacacagaugca

SEQ ID NO: 2043537 - RNA, 12 nt, Human herpesvirus 6B
aaacagaauaag

SEQ ID NO: 2043538 - RNA, 20 nt, Human herpesvirus 6B
agauauauugguagacagga

SEQ ID NO: 2043539 - RNA, 16 nt, Human herpesvirus 6B
ggcuccccaggcgcag

SEQ ID NO: 2043540 - RNA, 23 nt, Human herpesvirus 6B
augcaacgucgguucaauaacug

SEQ ID NO: 2043541 - RNA, 13 nt, Human herpesvirus 6B
caguggcaauaau

SEQ ID NO: 2043542 - RNA, 21 nt, Human herpesvirus 6B
ucgggccaagguaaaggaagg

SEQ ID NO: 2043543 - RNA, 12 nt, Human herpesvirus 6B
cucuugugcaaa

SEQ ID NO: 2043544 - RNA, 14 nt, Human herpesvirus 6B
aggaggaagaggag

SEQ ID NO: 2043545 - RNA, 14 nt, Human herpesvirus 6B
caucuaugaugcug

SEQ ID NO: 2043546 - RNA, 18 nt, Human herpesvirus 6B
gcgccgguuuccaugaga

SEQ ID NO: 2043547 - RNA, 20 nt, Human herpesvirus 6B
auucuccucaacuaaaucau

SEQ ID NO: 2043548 - RNA, 21 nt, Human herpesvirus 6B
ugaauccagauaaacaaaaau

SEQ ID NO: 2043549 - RNA, 21 nt, Human herpesvirus 6B
gccgccauauuaaaacccggc

SEQ ID NO: 2043550 - RNA, 14 nt, Human herpesvirus 6B
uauucauaacagau

SEQ ID NO: 2043551 - RNA, 20 nt, Human herpesvirus 6B
acgucauauccagaaaauac

SEQ ID NO: 2043552 - RNA, 21 nt, Human herpesvirus 6B
gagaguacggaagugccuucu

SEQ ID NO: 2043553 - RNA, 21 nt, Human herpesvirus 6B
ucacucacauagagaagaauc

SEQ ID NO: 2043554 - RNA, 20 nt, Human herpesvirus 6B
gcuuuauggagauuugacuu

SEQ ID NO: 2043555 - RNA, 19 nt, Human herpesvirus 6B
guaaucguuuuugauugua

SEQ ID NO: 2043556 - RNA, 20 nt, Human herpesvirus 6B
cucgacaaccaacgugauaa

SEQ ID NO: 2043557 - RNA, 20 nt, Human herpesvirus 6B
ggaauuuaaaucguaugagc

SEQ ID NO: 2043558 - RNA, 22 nt, Human herpesvirus 6B
cuugauaucuucgugcaauaac

SEQ ID NO: 2043559 - RNA, 21 nt, Human herpesvirus 6B
aauaauuacaaagccacagcu

SEQ ID NO: 2043560 - RNA, 15 nt, Human herpesvirus 6B
ucgcggcggccccgc

SEQ ID NO: 2043561 - RNA, 17 nt, Human herpesvirus 6B
uuuuaaacauucuuaaa

SEQ ID NO: 2043562 - RNA, 16 nt, Human herpesvirus 6B
ugacaauaaacaugau

SEQ ID NO: 2043563 - RNA, 15 nt, Human herpesvirus 6B
auuuaauaaaauaac

SEQ ID NO: 2043564 - RNA, 18 nt, Human herpesvirus 6B
augaaguuccacaucuau

SEQ ID NO: 2043565 - RNA, 16 nt, Human herpesvirus 6B
ugaacaaguggaagug

SEQ ID NO: 2043566 - RNA, 20 nt, Human herpesvirus 6B
cacccgcugucgucugagca

SEQ ID NO: 2043567 - RNA, 23 nt, Human herpesvirus 6B
ccgcaucgcaccgcagaucacgu

SEQ ID NO: 2043568 - RNA, 17 nt, Human herpesvirus 6B
uaacuguggguuuucag

SEQ ID NO: 2043569 - RNA, 21 nt, Human herpesvirus 6B
cuuccgcuaccgcccugcucc

SEQ ID NO: 2043570 - RNA, 14 nt, Human herpesvirus 6B
gcggcucucugccc

SEQ ID NO: 2043571 - RNA, 20 nt, Human herpesvirus 6B
cugguucaggauuuguaaaa

SEQ ID NO: 2043572 - RNA, 22 nt, Human herpesvirus 6B
uacauaugccgacuguuucuua

SEQ ID NO: 2043573 - RNA, 23 nt, Human herpesvirus 6B
cccugagagcaggagcaggcucc

SEQ ID NO: 2043574 - RNA, 20 nt, Human herpesvirus 6B
ucauuucgaucuaacuacau

SEQ ID NO: 2043575 - RNA, 16 nt, Human herpesvirus 6B
ucuggugaauguuucu

SEQ ID NO: 2043576 - RNA, 17 nt, Human herpesvirus 6B
aucuuugauaaaaccau

SEQ ID NO: 2043577 - RNA, 18 nt, Human herpesvirus 6B
gaggacgcaaagagagac

SEQ ID NO: 2043578 - RNA, 19 nt, Human herpesvirus 6B
gacaauaaacaugauugua

SEQ ID NO: 2043579 - RNA, 22 nt, Human herpesvirus 6B
auauuccucaagauaugggaaa

SEQ ID NO: 2043580 - RNA, 18 nt, Human herpesvirus 6B
cagacaaaacacaauaaa

SEQ ID NO: 2043581 - RNA, 16 nt, Human herpesvirus 6B
cacuguaaaagggcuc

SEQ ID NO: 2043582 - RNA, 17 nt, Human herpesvirus 6B
ccucccgcagcuccuuc

SEQ ID NO: 2043583 - RNA, 13 nt, Human herpesvirus 6B
ugcuuaaacugaa

SEQ ID NO: 2043584 - RNA, 21 nt, Human herpesvirus 6B
gaucucauaugcaucagaccu

SEQ ID NO: 2043585 - RNA, 19 nt, Human herpesvirus 6B
guacguggccgucuccugc

SEQ ID NO: 2043586 - RNA, 15 nt, Human herpesvirus 6B
uccgucaucuagaga

SEQ ID NO: 2043587 - RNA, 16 nt, Human herpesvirus 6B
gguggacaccaauaaa

SEQ ID NO: 2043588 - RNA, 13 nt, Human herpesvirus 6B
cagcagcagcucc

SEQ ID NO: 2043589 - RNA, 15 nt, Human herpesvirus 6B
caaaaugaccagaga

SEQ ID NO: 2043590 - RNA, 13 nt, Human herpesvirus 6B
cuuuuugccaaaa

SEQ ID NO: 2043591 - RNA, 17 nt, Human herpesvirus 6B
uucauagcguucaaaac

SEQ ID NO: 2043592 - RNA, 19 nt, Human herpesvirus 6B
gauagaggaauugcuuugu

SEQ ID NO: 2043593 - RNA, 23 nt, Human herpesvirus 6B
caugaaaucucuuuuaacacaca

SEQ ID NO: 2043594 - RNA, 17 nt, Human herpesvirus 6B
gauugaugaaagcuuca

SEQ ID NO: 2043595 - RNA, 17 nt, Human herpesvirus 6B
cugauuuguucuagugc

SEQ ID NO: 2043596 - RNA, 14 nt, Human herpesvirus 6B
aggcacugauuuga

SEQ ID NO: 2043597 - RNA, 16 nt, Human herpesvirus 6B
ugacacacagaauaca

SEQ ID NO: 2043598 - RNA, 19 nt, Human herpesvirus 6B
gugauaccgucuuugcaua

SEQ ID NO: 2043599 - RNA, 21 nt, Human herpesvirus 6B
ccacauuagcugcuaaaugug

SEQ ID NO: 2043600 - RNA, 22 nt, Human herpesvirus 6B
cuggcgggcaccgagggcgggc

SEQ ID NO: 2043601 - RNA, 18 nt, Human herpesvirus 6B
cacccauauacccucgcc

SEQ ID NO: 2043602 - RNA, 21 nt, Human herpesvirus 6B
ccgcuccggacccuccacgcc

SEQ ID NO: 2043603 - RNA, 17 nt, Human herpesvirus 6B
uaaauaauaguaaacuu

SEQ ID NO: 2043604 - RNA, 22 nt, Human herpesvirus 6B
uuuagccuauuaagcagccgcg

SEQ ID NO: 2043605 - RNA, 16 nt, Human herpesvirus 6B
aaauauggcagagcug

SEQ ID NO: 2043606 - RNA, 22 nt, Human herpesvirus 6B
gcaacuaagcuguaugacaucu

SEQ ID NO: 2043607 - RNA, 18 nt, Human herpesvirus 6B
guucgcgagucugugcuu

SEQ ID NO: 2043608 - RNA, 18 nt, Human herpesvirus 6B
ucaaggucaaaaaacuca

SEQ ID NO: 2043609 - RNA, 12 nt, Human herpesvirus 6B
uuucuuugacau

SEQ ID NO: 2043610 - RNA, 14 nt, Human herpesvirus 6B
gaaauauggcuaau

SEQ ID NO: 2043611 - RNA, 22 nt, Human herpesvirus 6B
ggauuccccucauacauccaga

SEQ ID NO: 2043612 - RNA, 18 nt, Human herpesvirus 6B
cguccucgugcucuccgc

SEQ ID NO: 2043613 - RNA, 17 nt, Human herpesvirus 6B
agggucagcagaagaag

SEQ ID NO: 2043614 - RNA, 15 nt, Human herpesvirus 6B
acagaaaaagaacug

SEQ ID NO: 2043615 - RNA, 10 nt, Human herpesvirus 6B
gccagccgcc

SEQ ID NO: 2043616 - RNA, 14 nt, Human herpesvirus 6B
ggaagagaaugaau

SEQ ID NO: 2043617 - RNA, 20 nt, Human herpesvirus 6B
uacagcuaagauuaacaacu

SEQ ID NO: 2043618 - RNA, 16 nt, Human herpesvirus 6B
cagaauuacaaacugg

SEQ ID NO: 2043619 - RNA, 15 nt, Human herpesvirus 6B
ccucgugcucuccgc

SEQ ID NO: 2043620 - RNA, 18 nt, Human herpesvirus 6B
uguuccgaauucuuacca

SEQ ID NO: 2043621 - RNA, 16 nt, Human herpesvirus 6B
agaaaauugacaauga

SEQ ID NO: 2043622 - RNA, 19 nt, Human herpesvirus 6B
cgggcagggcgggcacgga

SEQ ID NO: 2043623 - RNA, 20 nt, Human herpesvirus 6B
cguauacgaacaauauggcc

SEQ ID NO: 2043624 - RNA, 19 nt, Human herpesvirus 6B
cugaugacuuuucugauga

SEQ ID NO: 2043625 - RNA, 14 nt, Human herpesvirus 6B
ugcuccuguuucua

SEQ ID NO: 2043626 - RNA, 13 nt, Human herpesvirus 6B
guggcagaagaag

SEQ ID NO: 2043627 - RNA, 18 nt, Human herpesvirus 6B
cuccugugcguccuccuc

SEQ ID NO: 2043628 - RNA, 17 nt, Human herpesvirus 6B
ccagucagauaaugaau

SEQ ID NO: 2043629 - RNA, 16 nt, Human herpesvirus 6B
cuuggggauauugugg

SEQ ID NO: 2043630 - RNA, 22 nt, Human herpesvirus 6B
ggagggacccacacgcggggau

SEQ ID NO: 2043631 - RNA, 23 nt, Human herpesvirus 6B
agaauuccaaggcucuggcaaag

SEQ ID NO: 2043632 - RNA, 18 nt, Human herpesvirus 6B
caugugguaauacgugaa

SEQ ID NO: 2043633 - RNA, 16 nt, Human herpesvirus 6B
aacaucaaaaacaccg

SEQ ID NO: 2043634 - RNA, 21 nt, Human herpesvirus 6B
augagaauauauaaaaaaaac

SEQ ID NO: 2043635 - RNA, 14 nt, Human herpesvirus 6B
aaaauguguuaauu

SEQ ID NO: 2043636 - RNA, 14 nt, Human herpesvirus 6B
ugcucuuagagaua

SEQ ID NO: 2043637 - RNA, 21 nt, Human herpesvirus 6B
gaagaaauaccuuuggccuug

SEQ ID NO: 2043638 - RNA, 18 nt, Human herpesvirus 6B
ccauagaguuucgagaaa

SEQ ID NO: 2043639 - RNA, 21 nt, Human herpesvirus 6B
aagagcuuuaaagcagcuaga

SEQ ID NO: 2043640 - RNA, 16 nt, Human herpesvirus 6B
uuacaugaaaacauuc

SEQ ID NO: 2043641 - RNA, 19 nt, Human herpesvirus 6B
caaauguagcaaaugaaug

SEQ ID NO: 2043642 - RNA, 19 nt, Human herpesvirus 6B
uaaagaucacaacaaacau

SEQ ID NO: 2043643 - RNA, 15 nt, Human herpesvirus 6B
caguaaaaaagccga

SEQ ID NO: 2043644 - RNA, 15 nt, Human herpesvirus 6B
gguucagacugcugc

SEQ ID NO: 2043645 - RNA, 23 nt, Human herpesvirus 6B
agucuucauccucgaagaauugu

SEQ ID NO: 2043646 - RNA, 21 nt, Human herpesvirus 6B
caucgaugauuuuucugccua

SEQ ID NO: 2043647 - RNA, 19 nt, Human herpesvirus 6B
ucuuuccgaugugucugaa

SEQ ID NO: 2043648 - RNA, 20 nt, Human herpesvirus 6B
acgugacuguaucaaauuua

SEQ ID NO: 2043649 - RNA, 18 nt, Human herpesvirus 6B
ggaucgggccuggggaca

SEQ ID NO: 2043650 - RNA, 21 nt, Human herpesvirus 6B
aaaacgagcgacgguuuccaa

SEQ ID NO: 2043651 - RNA, 19 nt, Human herpesvirus 6B
gacgugcggagaugccgug

SEQ ID NO: 2043652 - RNA, 14 nt, Human herpesvirus 6B
uuauuguguucugc

SEQ ID NO: 2043653 - RNA, 14 nt, Human herpesvirus 6B
cagagugucucuca

SEQ ID NO: 2043654 - RNA, 13 nt, Human herpesvirus 6B
aagcuuucuguac

SEQ ID NO: 2043655 - RNA, 16 nt, Human herpesvirus 6B
cauugagguauuggau

SEQ ID NO: 2043656 - RNA, 19 nt, Human herpesvirus 6B
uucuugcgauuuugugaaa

SEQ ID NO: 2043657 - RNA, 17 nt, Human herpesvirus 6B
guuacccgggagcuuca

SEQ ID NO: 2043658 - RNA, 16 nt, Human herpesvirus 6B
uguaauuguugaaauu

SEQ ID NO: 2043659 - RNA, 22 nt, Human herpesvirus 6B
acuuuuugccgaagauagcucu

SEQ ID NO: 2043660 - RNA, 17 nt, Human herpesvirus 6B
aauguugucaaucgugu

SEQ ID NO: 2043661 - RNA, 18 nt, Human herpesvirus 6B
gaugccaaagcuuucugu

SEQ ID NO: 2043662 - RNA, 16 nt, Human herpesvirus 6B
cugagcaaagaaauga

SEQ ID NO: 2043663 - RNA, 22 nt, Human herpesvirus 6B
ccccacucgaaucgcgcaggcg

SEQ ID NO: 2043664 - RNA, 21 nt, Human herpesvirus 6B
aacacaauauaugaaauacug

SEQ ID NO: 2043665 - RNA, 14 nt, Human herpesvirus 6B
cgucguggcagaac

SEQ ID NO: 2043666 - RNA, 19 nt, Human herpesvirus 6B
cuccgcgagacgguacagc

SEQ ID NO: 2043667 - RNA, 22 nt, Human herpesvirus 6B
uaaagugccgugagugcuauuu

SEQ ID NO: 2043668 - RNA, 12 nt, Human herpesvirus 6B
ggucagaugcaa

SEQ ID NO: 2043669 - RNA, 15 nt, Human herpesvirus 6B
gucgcauagaucggg

SEQ ID NO: 2043670 - RNA, 23 nt, Human herpesvirus 6B
ucuuuauagagcaauucaucaaa

SEQ ID NO: 2043671 - RNA, 13 nt, Human herpesvirus 6B
gcggccaggccgc

SEQ ID NO: 2043672 - RNA, 16 nt, Human herpesvirus 6B
acccgcguccuccauc

SEQ ID NO: 2043673 - RNA, 18 nt, Human herpesvirus 6B
acuaagugugcguuauuu

SEQ ID NO: 2043674 - RNA, 16 nt, Human herpesvirus 6B
gugauauaguuauuca

SEQ ID NO: 2043675 - RNA, 16 nt, Human herpesvirus 6B
caugcgacagacaguc

SEQ ID NO: 2043676 - RNA, 15 nt, Human herpesvirus 6B
cucccauagaggcgc

SEQ ID NO: 2043677 - RNA, 16 nt, Human herpesvirus 6B
gccgccuucucugucg

SEQ ID NO: 2043678 - RNA, 17 nt, Human herpesvirus 6B
uaaacaugauuguaaua

SEQ ID NO: 2043679 - RNA, 20 nt, Human herpesvirus 6B
cuguggaccaugcagcugcc

SEQ ID NO: 2043680 - RNA, 19 nt, Human herpesvirus 6B
aacuacuucuguuacagca

SEQ ID NO: 2043681 - RNA, 17 nt, Human herpesvirus 6B
cuaaaucugaaauguag

SEQ ID NO: 2043682 - RNA, 12 nt, Human herpesvirus 6B
ccaacugagaga

SEQ ID NO: 2043683 - RNA, 12 nt, Human herpesvirus 6B
ggcgcagaauua

SEQ ID NO: 2043684 - RNA, 20 nt, Human herpesvirus 6B
aguguuacggggaccacugu

SEQ ID NO: 2043685 - RNA, 14 nt, Human herpesvirus 6B
aaugugagcaguuu

SEQ ID NO: 2043686 - RNA, 20 nt, Human herpesvirus 6B
guuuaucaugagagagcaaa

SEQ ID NO: 2043687 - RNA, 15 nt, Human herpesvirus 6B
guuguguuuguggac

SEQ ID NO: 2043688 - RNA, 16 nt, Human herpesvirus 6B
acgaucucauaugcau

SEQ ID NO: 2043689 - RNA, 17 nt, Human herpesvirus 6B
agaucuggauaaagaua

SEQ ID NO: 2043690 - RNA, 23 nt, Human herpesvirus 6B
aacgcaaagggaagccagccgcc

SEQ ID NO: 2043691 - RNA, 17 nt, Human herpesvirus 6B
agugcguaaucgcaaga

SEQ ID NO: 2043692 - RNA, 19 nt, Human herpesvirus 6B
aaagguuuuugcugucaca

SEQ ID NO: 2043693 - RNA, 18 nt, Human herpesvirus 6B
cggagcccugagagcagg

SEQ ID NO: 2043694 - RNA, 21 nt, Human herpesvirus 6B
gauacuacguguaauguuucc

SEQ ID NO: 2043695 - RNA, 18 nt, Human herpesvirus 6B
ugaccgaauuauguaugu

SEQ ID NO: 2043696 - RNA, 19 nt, Human herpesvirus 6B
ucgcaaaagagaaggaaaa

SEQ ID NO: 2043697 - RNA, 15 nt, Human herpesvirus 6B
uccaugcgaguagau

SEQ ID NO: 2043698 - RNA, 17 nt, Human herpesvirus 6B
gcuaaacuuuacaucaa

SEQ ID NO: 2043699 - RNA, 21 nt, Human herpesvirus 6B
aucuucuuggagucuggccuc

SEQ ID NO: 2043700 - RNA, 22 nt, Human herpesvirus 6B
ucugcauuuauaucaaacuuuu

SEQ ID NO: 2043701 - RNA, 13 nt, Human herpesvirus 6B
cuugcaagaaagc

SEQ ID NO: 2043702 - RNA, 24 nt, Human herpesvirus 6B
uuuaugaaaucgauguagauguuu

SEQ ID NO: 2043703 - RNA, 23 nt, Human herpesvirus 6B
uuaaaggauucgagaaacucugu

SEQ ID NO: 2043704 - RNA, 22 nt, Human herpesvirus 6B
acgucccucacaacaaagaacu

SEQ ID NO: 2043705 - RNA, 15 nt, Human herpesvirus 6B
gaagguaucaaagaa

SEQ ID NO: 2043706 - RNA, 11 nt, Human herpesvirus 6B
aacagugacag

SEQ ID NO: 2043707 - RNA, 16 nt, Human herpesvirus 6B
uaaugagauucuguug

SEQ ID NO: 2043708 - RNA, 17 nt, Human herpesvirus 6B
aucaaacuuuuuuugaa

SEQ ID NO: 2043709 - RNA, 22 nt, Human herpesvirus 6B
agaagccaccaauagugggaga

SEQ ID NO: 2043710 - RNA, 14 nt, Human herpesvirus 6B
ucucgaaaaugcug

SEQ ID NO: 2043711 - RNA, 17 nt, Human herpesvirus 6B
gaaaagguguuguguuu

SEQ ID NO: 2043712 - RNA, 18 nt, Human herpesvirus 6B
accgguuauaauauuaac

SEQ ID NO: 2043713 - RNA, 21 nt, Human herpesvirus 6B
ucggauccaacucuacuaaaa

SEQ ID NO: 2043714 - RNA, 15 nt, Human herpesvirus 6B
aggcuacuauaaaca

SEQ ID NO: 2043715 - RNA, 21 nt, Human herpesvirus 6B
ggaauggacaugacgaaggga

SEQ ID NO: 2043716 - RNA, 15 nt, Human herpesvirus 6B
gaacagauagaaaau

SEQ ID NO: 2043717 - RNA, 14 nt, Human herpesvirus 6B
agauagaaaauugu

SEQ ID NO: 2043718 - RNA, 21 nt, Human herpesvirus 6B
uuauuuacaaaagccugcaua

SEQ ID NO: 2043719 - RNA, 14 nt, Human herpesvirus 6B
auauacccucgccc

SEQ ID NO: 2043720 - RNA, 13 nt, Human herpesvirus 6B
acaacgugugaaa

SEQ ID NO: 2043721 - RNA, 20 nt, Human herpesvirus 6B
cuuagauaugucguuucaug

SEQ ID NO: 2043722 - RNA, 22 nt, Human herpesvirus 6B
gauaacucagauucgcaagacu

SEQ ID NO: 2043723 - RNA, 22 nt, Human herpesvirus 6B
cauaacuaugaauuagcagaag

SEQ ID NO: 2043724 - RNA, 14 nt, Human herpesvirus 6B
ucuaggacaguucc

SEQ ID NO: 2043725 - RNA, 18 nt, Human herpesvirus 6B
uguugaguaauuggacau

SEQ ID NO: 2043726 - RNA, 14 nt, Human herpesvirus 6B
uuuacuugucgugu

SEQ ID NO: 2043727 - RNA, 22 nt, Human herpesvirus 6B
acgacugacgauuucauuagaa

SEQ ID NO: 2043728 - RNA, 21 nt, Human herpesvirus 6B
acaaauaaguggugaugaaua

SEQ ID NO: 2043729 - RNA, 22 nt, Human herpesvirus 6B
uagaaaaauaagacuuagcuag

SEQ ID NO: 2043730 - RNA, 17 nt, Human herpesvirus 6B
gcaggcuccccaggcgc

SEQ ID NO: 2043731 - RNA, 17 nt, Human herpesvirus 6B
cacaaagugcuguaaac

SEQ ID NO: 2043732 - RNA, 14 nt, Human herpesvirus 6B
cuggagcuagagaa

SEQ ID NO: 2043733 - RNA, 22 nt, Human herpesvirus 6B
acgcgcggaccacucgggccgg

SEQ ID NO: 2043734 - RNA, 13 nt, Human herpesvirus 6B
aucggaagaggaa

SEQ ID NO: 2043735 - RNA, 15 nt, Human herpesvirus 6B
cugcagaucuggaua

SEQ ID NO: 2043736 - RNA, 13 nt, Human herpesvirus 6B
acgacaugugguu

SEQ ID NO: 2043737 - RNA, 14 nt, Human herpesvirus 6B
acaguuugaucccu

SEQ ID NO: 2043738 - RNA, 15 nt, Human herpesvirus 6B
uuuuauuuuaucuca

SEQ ID NO: 2043739 - RNA, 15 nt, Human herpesvirus 6B
aacuguuguucuugg

SEQ ID NO: 2043740 - RNA, 12 nt, Human herpesvirus 6B
agagcgacacgg

SEQ ID NO: 2043741 - RNA, 13 nt, Human herpesvirus 6B
ccugaaaccccac

SEQ ID NO: 2043742 - RNA, 23 nt, Human herpesvirus 6B
cucucgugccguugccuuggccg

SEQ ID NO: 2043743 - RNA, 14 nt, Human herpesvirus 6B
ccgcgggccagccc

SEQ ID NO: 2043744 - RNA, 19 nt, Human herpesvirus 6B
aauaccaaaaaauguuaaa

SEQ ID NO: 2043745 - RNA, 14 nt, Human herpesvirus 6B
ccguggcagaagaa

SEQ ID NO: 2043746 - RNA, 20 nt, Human herpesvirus 6B
agguuggcgcagagaaagga

SEQ ID NO: 2043747 - RNA, 19 nt, Human herpesvirus 6B
gccguugccuuggccgcgc

SEQ ID NO: 2043748 - RNA, 13 nt, Human herpesvirus 6B
ucuccaaaacacu

SEQ ID NO: 2043749 - RNA, 15 nt, Human herpesvirus 6B
aaaguuuacugugau

SEQ ID NO: 2043750 - RNA, 13 nt, Human herpesvirus 6B
acggagaggaagc

SEQ ID NO: 2043751 - RNA, 22 nt, Human herpesvirus 6B
guaccucuaugauacuuugaaa

SEQ ID NO: 2043752 - RNA, 13 nt, Human herpesvirus 6B
cuggccucugcgg

SEQ ID NO: 2043753 - RNA, 19 nt, Human herpesvirus 6B
ggcgcccgugguggccguc

SEQ ID NO: 2043754 - RNA, 15 nt, Human herpesvirus 6B
gaugaggaggaggga

SEQ ID NO: 2043755 - RNA, 12 nt, Human herpesvirus 6B
gcaguugucugg

SEQ ID NO: 2043756 - RNA, 17 nt, Human herpesvirus 6B
cgugacacggaaaacca

SEQ ID NO: 2043757 - RNA, 16 nt, Human herpesvirus 6B
caauguucuugacaaa

SEQ ID NO: 2043758 - RNA, 16 nt, Human herpesvirus 6B
aguugguucgaacaaa

SEQ ID NO: 2043759 - RNA, 15 nt, Human herpesvirus 6B
cuugauguuuccuga

SEQ ID NO: 2043760 - RNA, 14 nt, Human herpesvirus 6B
gaauccgcgggcca

SEQ ID NO: 2043761 - RNA, 18 nt, Human herpesvirus 6B
cucaaagaaagcuccgcg

SEQ ID NO: 2043762 - RNA, 23 nt, Human herpesvirus 6B
cuauaugucagauuauaaugaug

SEQ ID NO: 2043763 - RNA, 16 nt, Human herpesvirus 6B
ugacugaggaugugua

SEQ ID NO: 2043764 - RNA, 16 nt, Human herpesvirus 6B
ugaaaaacagaauaag

SEQ ID NO: 2043765 - RNA, 14 nt, Human herpesvirus 6B
uggaagaaggaaaa

SEQ ID NO: 2043766 - RNA, 23 nt, Human herpesvirus 6B
aagaagaucacuuuguuucugaa

SEQ ID NO: 2043767 - RNA, 23 nt, Human herpesvirus 6B
ucuucuacuuuaucuuuugcaaa

SEQ ID NO: 2043768 - RNA, 14 nt, Human herpesvirus 6B
cuuaccuuuuaaga

SEQ ID NO: 2043769 - RNA, 20 nt, Human herpesvirus 6B
ggagcaggcuccccaggcgc

SEQ ID NO: 2043770 - RNA, 12 nt, Human herpesvirus 6B
gaugcucucaga

SEQ ID NO: 2043771 - RNA, 18 nt, Human herpesvirus 6B
gcgcaggcgaagguagga

SEQ ID NO: 2043772 - RNA, 15 nt, Human herpesvirus 6B
auguucgccucuccc

SEQ ID NO: 2043773 - RNA, 12 nt, Human herpesvirus 6B
ccaaaagacuau

SEQ ID NO: 2043774 - RNA, 12 nt, Human herpesvirus 6B
cuuuaaagcagc

SEQ ID NO: 2043775 - RNA, 22 nt, Human herpesvirus 6B
guuacaagcaugcauuguguua

SEQ ID NO: 2043776 - RNA, 22 nt, Human herpesvirus 6B
cucgugugucucugugaagagg

SEQ ID NO: 2043777 - RNA, 18 nt, Human herpesvirus 6B
ucuuuuacguuaaaaggg

SEQ ID NO: 2043778 - RNA, 23 nt, Human herpesvirus 6B
gucuugcaaacagcuuuauuccc

SEQ ID NO: 2043779 - RNA, 23 nt, Human herpesvirus 6B
ugcccacauuuccuucaaaguga

SEQ ID NO: 2043780 - RNA, 17 nt, Human herpesvirus 6B
uauagcuauccuuauau

SEQ ID NO: 2043781 - RNA, 15 nt, Human herpesvirus 6B
cgaaucucaagcaca

SEQ ID NO: 2043782 - RNA, 20 nt, Human herpesvirus 6B
uauguuaacauugugagaac

SEQ ID NO: 2043783 - RNA, 16 nt, Human herpesvirus 6B
uccguucccuucucgu

SEQ ID NO: 2043784 - RNA, 16 nt, Human herpesvirus 6B
ccacgggccacgagag

SEQ ID NO: 2043785 - RNA, 23 nt, Human herpesvirus 6B
ccgcuuaaaucaaaaaaaugaua

SEQ ID NO: 2043786 - RNA, 18 nt, Human herpesvirus 6B
cacguccagcgcauccuu

SEQ ID NO: 2043787 - RNA, 18 nt, Human herpesvirus 6B
auuuguucgcacaaaaug

SEQ ID NO: 2043788 - RNA, 21 nt, Human herpesvirus 6B
gucuccgauccgucaggacca

SEQ ID NO: 2043789 - RNA, 22 nt, Human herpesvirus 6B
cccgcacaguucguccagcagc

SEQ ID NO: 2043790 - RNA, 20 nt, Human herpesvirus 6B
gcuuucucgccgccucgccg

SEQ ID NO: 2043791 - RNA, 21 nt, Human herpesvirus 6B
gaugcagucuccacagggcau

SEQ ID NO: 2043792 - RNA, 12 nt, Human herpesvirus 6B
cuuggaaaaggu

SEQ ID NO: 2043793 - RNA, 14 nt, Human herpesvirus 6B
agaggucuuugcuu

SEQ ID NO: 2043794 - RNA, 13 nt, Human herpesvirus 6B
aaaagguugagaa

SEQ ID NO: 2043795 - RNA, 16 nt, Human herpesvirus 6B
aguauguuuuguacaa

SEQ ID NO: 2043796 - RNA, 21 nt, Human herpesvirus 6B
auguaaacacgaaacugcuug

SEQ ID NO: 2043797 - RNA, 13 nt, Human herpesvirus 6B
aaauauuggauuu

SEQ ID NO: 2043798 - RNA, 16 nt, Human herpesvirus 6B
uguucgagcaacaguu

SEQ ID NO: 2043799 - RNA, 18 nt, Human herpesvirus 6B
gucacucacauagagaag

SEQ ID NO: 2043800 - RNA, 14 nt, Human herpesvirus 6B
ugcuucguuucuuc

SEQ ID NO: 2043801 - RNA, 16 nt, Human herpesvirus 6B
acagaauacaaaaacg

SEQ ID NO: 2043802 - RNA, 13 nt, Human herpesvirus 6B
aaauguagcaaau

SEQ ID NO: 2043803 - RNA, 14 nt, Human herpesvirus 6B
agccggccuuggaa

SEQ ID NO: 2043804 - RNA, 18 nt, Human herpesvirus 6B
cuuugaacaucuauuauc

SEQ ID NO: 2043805 - RNA, 13 nt, Human herpesvirus 6B
ugaaagcagucag

SEQ ID NO: 2043806 - RNA, 15 nt, Human herpesvirus 6B
uaacauugugagaac

SEQ ID NO: 2043807 - RNA, 22 nt, Human herpesvirus 6B
gcaaaaugaaguacaauacuuu

SEQ ID NO: 2043808 - RNA, 23 nt, Human herpesvirus 6B
uguaaagaucacaacaaacaugu

SEQ ID NO: 2043809 - RNA, 18 nt, Human herpesvirus 6B
cugggcgcagaaggagaa

SEQ ID NO: 2043810 - RNA, 13 nt, Human herpesvirus 6B
aaaaaguuaguuu

SEQ ID NO: 2043811 - RNA, 13 nt, Human herpesvirus 6B
aacagaaaggcca

SEQ ID NO: 2043812 - RNA, 15 nt, Human herpesvirus 6B
aaggcuuaggaugua

SEQ ID NO: 2043813 - RNA, 16 nt, Human herpesvirus 6B
uaaagguuagugggua

SEQ ID NO: 2043814 - RNA, 18 nt, Human herpesvirus 6B
gaauucagcuggacagaa

SEQ ID NO: 2043815 - RNA, 19 nt, Human herpesvirus 6B
aaaucucgaugccaaagcu

SEQ ID NO: 2043816 - RNA, 18 nt, Human herpesvirus 6B
gccuuguguauuugugaa

SEQ ID NO: 2043817 - RNA, 18 nt, Human herpesvirus 6B
acgaaagacguuugcuuu

SEQ ID NO: 2043818 - RNA, 21 nt, Human herpesvirus 6B
gagugcgacaggagauagagc

SEQ ID NO: 2043819 - RNA, 22 nt, Human herpesvirus 6B
cccgcgucuccgauccgucagg

SEQ ID NO: 2043820 - RNA, 22 nt, Human herpesvirus 6B
cuguuuacucugggaaccugug

SEQ ID NO: 2043821 - RNA, 22 nt, Human herpesvirus 6B
gacgggcguuaucgacggcagc

SEQ ID NO: 2043822 - RNA, 10 nt, Human herpesvirus 6B
gcuguaguug

SEQ ID NO: 2043823 - RNA, 14 nt, Human herpesvirus 6B
ucuccgccuccucu

SEQ ID NO: 2043824 - RNA, 14 nt, Human herpesvirus 6B
guuuuauggcuggg

SEQ ID NO: 2043825 - RNA, 14 nt, Human herpesvirus 6B
cgcagcuccuuccg

SEQ ID NO: 2043826 - RNA, 17 nt, Human herpesvirus 6B
ucaagaaaccuguuuuu

SEQ ID NO: 2043827 - RNA, 22 nt, Human herpesvirus 6B
cuuuucaguauagacauuuugu

SEQ ID NO: 2043828 - RNA, 13 nt, Human herpesvirus 6B
caagcccggagaa

SEQ ID NO: 2043829 - RNA, 15 nt, Human herpesvirus 6B
cagggaaagagcacg

SEQ ID NO: 2043830 - RNA, 16 nt, Human herpesvirus 6B
cggggaggaggaggaa

SEQ ID NO: 2043831 - RNA, 13 nt, Human herpesvirus 6B
uggugauguguua

SEQ ID NO: 2043832 - RNA, 11 nt, Human herpesvirus 6B
aucuauguuuu

SEQ ID NO: 2043833 - RNA, 23 nt, Human herpesvirus 6B
gucuccgauccgucaggaccagc

SEQ ID NO: 2043834 - RNA, 18 nt, Human herpesvirus 6B
auagguuauuuacaaaag

SEQ ID NO: 2043835 - RNA, 15 nt, Human herpesvirus 6B
acgcacgagaacacg

SEQ ID NO: 2043836 - RNA, 17 nt, Human herpesvirus 6B
auuugcaauuguuugug

SEQ ID NO: 2043837 - RNA, 22 nt, Human herpesvirus 6B
caggcuccccaggcgcagcagc

SEQ ID NO: 2043838 - RNA, 12 nt, Human herpesvirus 6B
aaugagccuggc

SEQ ID NO: 2043839 - RNA, 16 nt, Human herpesvirus 6B
uuucugcgacaaaaaa

SEQ ID NO: 2043840 - RNA, 14 nt, Human herpesvirus 6B
aucaacuauacuua

SEQ ID NO: 2043841 - RNA, 16 nt, Human herpesvirus 6B
aaaaaccguugcacuu

SEQ ID NO: 2043842 - RNA, 15 nt, Human herpesvirus 6B
aaaucacuccgcauc

SEQ ID NO: 2043843 - RNA, 13 nt, Human herpesvirus 6B
uucauuucuguag

SEQ ID NO: 2043844 - RNA, 17 nt, Human herpesvirus 6B
gcacacgucccuaugau

SEQ ID NO: 2043845 - RNA, 17 nt, Human herpesvirus 6B
gaugucgcgaagcucag

SEQ ID NO: 2043846 - RNA, 20 nt, Human herpesvirus 6B
cccuccguuaggaucagaca

SEQ ID NO: 2043847 - RNA, 18 nt, Human herpesvirus 6B
cuuuguccuauguuaaca

SEQ ID NO: 2043848 - RNA, 18 nt, Human herpesvirus 6B
ugccgcguggaagccgcu

SEQ ID NO: 2043849 - RNA, 16 nt, Human herpesvirus 6B
ccuuuguaaaauguuu

SEQ ID NO: 2043850 - RNA, 20 nt, Human herpesvirus 6B
gagaauaagaucuacagagu

SEQ ID NO: 2043851 - RNA, 13 nt, Human herpesvirus 6B
ugguagcaauaac

SEQ ID NO: 2043852 - RNA, 21 nt, Human herpesvirus 6B
cuaacggagcaaccgcaguuc

SEQ ID NO: 2043853 - RNA, 23 nt, Human herpesvirus 6B
accggagcuuauuuaugaaaauu

SEQ ID NO: 2043854 - RNA, 12 nt, Human herpesvirus 6B
aguggcagggcu

SEQ ID NO: 2043855 - RNA, 15 nt, Human herpesvirus 6B
gaaaucuuuccugcu

SEQ ID NO: 2043856 - RNA, 16 nt, Human herpesvirus 6B
acagauagaucuguuu

SEQ ID NO: 2043857 - RNA, 20 nt, Human herpesvirus 6B
cccguccucgugcucuccgc

SEQ ID NO: 2043858 - RNA, 16 nt, Human herpesvirus 6B
aucagauaucugaaac

SEQ ID NO: 2043859 - RNA, 19 nt, Human herpesvirus 6B
caauuucggcaagaaagcc

SEQ ID NO: 2043860 - RNA, 16 nt, Human herpesvirus 6B
gcugucggccgaagga

SEQ ID NO: 2043861 - RNA, 16 nt, Human herpesvirus 6B
ccucgccgcucccgcu

SEQ ID NO: 2043862 - RNA, 15 nt, Human herpesvirus 6B
cucccguccguggaa

SEQ ID NO: 2043863 - RNA, 15 nt, Human herpesvirus 6B
uaauauaaauucuua

SEQ ID NO: 2043864 - RNA, 14 nt, Human herpesvirus 6B
cgcgccgucagcgg

SEQ ID NO: 2043865 - RNA, 16 nt, Human herpesvirus 6B
caguucguccagcagc

SEQ ID NO: 2043866 - RNA, 23 nt, Human herpesvirus 6B
ucccggggggggggggcccgggc

SEQ ID NO: 2043867 - RNA, 15 nt, Human herpesvirus 6B
agcguguucagcauc

SEQ ID NO: 2043868 - RNA, 16 nt, Human herpesvirus 6B
gacaucaaugcgcuau

SEQ ID NO: 2043869 - RNA, 17 nt, Human herpesvirus 6B
gugucugaaaaauggug

SEQ ID NO: 2043870 - RNA, 23 nt, Human herpesvirus 6B
cuuaaauucaauuuaaaauaauu

SEQ ID NO: 2043871 - RNA, 21 nt, Human herpesvirus 6B
acuuuguguaaccugagaauu

SEQ ID NO: 2043872 - RNA, 20 nt, Human herpesvirus 6B
uuaaaggauucgagaaacuc

SEQ ID NO: 2043873 - RNA, 18 nt, Human herpesvirus 6B
caagaaugggaugcauua

SEQ ID NO: 2043874 - RNA, 12 nt, Human herpesvirus 6B
agacuugcuaac

SEQ ID NO: 2043875 - RNA, 15 nt, Human herpesvirus 6B
aauaauuuuuguagc

SEQ ID NO: 2043876 - RNA, 21 nt, Human herpesvirus 6B
ugcgaauuaaaacucuaaaac

SEQ ID NO: 2043877 - RNA, 23 nt, Human herpesvirus 6B
cugcaacuuuauuugaaacugaa

SEQ ID NO: 2043878 - RNA, 15 nt, Human herpesvirus 6B
uacauuguuucucua

SEQ ID NO: 2043879 - RNA, 22 nt, Human herpesvirus 6B
ccugccauagaguuucgagaaa

SEQ ID NO: 2043880 - RNA, 16 nt, Human herpesvirus 6B
ucagugucagcauugu

SEQ ID NO: 2043881 - RNA, 22 nt, Human herpesvirus 6B
ccggcccguccaccgucccucu

SEQ ID NO: 2043882 - RNA, 16 nt, Human herpesvirus 6B
agggaagucaaggaaa

SEQ ID NO: 2043883 - RNA, 13 nt, Human herpesvirus 6B
uuacgacacgcuc

SEQ ID NO: 2043884 - RNA, 18 nt, Human herpesvirus 6B
ccauguucgccucucccg

SEQ ID NO: 2043885 - RNA, 14 nt, Human herpesvirus 6B
cgcgguggacggcg

SEQ ID NO: 2043886 - RNA, 16 nt, Human herpesvirus 6B
ucuuugaugaagaggu

SEQ ID NO: 2043887 - RNA, 21 nt, Human herpesvirus 6B
cuacauuuuaguauuuaugcu

SEQ ID NO: 2043888 - RNA, 15 nt, Human herpesvirus 6B
uaugucgauacaaua

SEQ ID NO: 2043889 - RNA, 16 nt, Human herpesvirus 6B
gucauaauuuuccagc

SEQ ID NO: 2043890 - RNA, 13 nt, Human herpesvirus 6B
agaaugacagaua

SEQ ID NO: 2043891 - RNA, 23 nt, Human herpesvirus 6B
aacaaugaaaauucaguuuuuau

SEQ ID NO: 2043892 - RNA, 21 nt, Human herpesvirus 6B
cugucgcccgccucucuccgc

SEQ ID NO: 2043893 - RNA, 13 nt, Human herpesvirus 6B
auuuaaguaaacu

SEQ ID NO: 2043894 - RNA, 22 nt, Human herpesvirus 6B
ugaacaaguggaaguguaaaug

SEQ ID NO: 2043895 - RNA, 14 nt, Human herpesvirus 6B
uaggaucagacaga

SEQ ID NO: 2043896 - RNA, 14 nt, Human herpesvirus 6B
aaacauagaaucuc

SEQ ID NO: 2043897 - RNA, 20 nt, Human herpesvirus 6B
guaaugcguacacugaaauu

SEQ ID NO: 2043898 - RNA, 16 nt, Human herpesvirus 6B
gagacuggacaguguu

SEQ ID NO: 2043899 - RNA, 18 nt, Human herpesvirus 6B
gaguauucgugugugaaa

SEQ ID NO: 2043900 - RNA, 22 nt, Human herpesvirus 6B
aauuucagcggucgagaaagau

SEQ ID NO: 2043901 - RNA, 20 nt, Human herpesvirus 6B
augacacaucgugaguuuuc

SEQ ID NO: 2043902 - RNA, 15 nt, Human herpesvirus 6B
uauguaugaacaggu

SEQ ID NO: 2043903 - RNA, 15 nt, Human herpesvirus 6B
cacgcgagacaucgg

SEQ ID NO: 2043904 - RNA, 12 nt, Human herpesvirus 6B
gucugcaggacu

SEQ ID NO: 2043905 - RNA, 15 nt, Human herpesvirus 6B
cuuugaacagugaca

SEQ ID NO: 2043906 - RNA, 13 nt, Human herpesvirus 6B
uagaucuguuuaa

SEQ ID NO: 2043907 - RNA, 21 nt, Human herpesvirus 6B
uacugacaccacauaacaaaa

SEQ ID NO: 2043908 - RNA, 16 nt, Human herpesvirus 6B
gacuugcccacagcug

SEQ ID NO: 2043909 - RNA, 22 nt, Human herpesvirus 6B
guggccgcuuucuuggcgcccg

SEQ ID NO: 2043910 - RNA, 11 nt, Human herpesvirus 6B
agaaauguuuu

SEQ ID NO: 2043911 - RNA, 17 nt, Human herpesvirus 6B
aagcugcuaacggagca

SEQ ID NO: 2043912 - RNA, 23 nt, Human herpesvirus 6B
gggcuccucacccugaagggacc

SEQ ID NO: 2043913 - RNA, 17 nt, Human herpesvirus 6B
gcgucuuuuguaaagau

SEQ ID NO: 2043914 - RNA, 23 nt, Human herpesvirus 6B
guauuggggaugaagguggaaac

SEQ ID NO: 2043915 - RNA, 14 nt, Human herpesvirus 6B
gucacuaucuucgc

SEQ ID NO: 2043916 - RNA, 17 nt, Human herpesvirus 6B
gcggagaggcgcgggac

SEQ ID NO: 2043917 - RNA, 16 nt, Human herpesvirus 6B
cucuggcugaaggaau

SEQ ID NO: 2043918 - RNA, 13 nt, Human herpesvirus 6B
uuguacauguuaa

SEQ ID NO: 2043919 - RNA, 23 nt, Human herpesvirus 6B
cuccgcgggaccuggcgggcacc

SEQ ID NO: 2043920 - RNA, 22 nt, Human herpesvirus 6B
caggggccguacgcgccacagc

SEQ ID NO: 2043921 - RNA, 16 nt, Human herpesvirus 6B
uuaagagugauucaag

SEQ ID NO: 2043922 - RNA, 15 nt, Human herpesvirus 6B
gccaaucauaagaaa

SEQ ID NO: 2043923 - RNA, 16 nt, Human herpesvirus 6B
uggugaccgaauuaug

SEQ ID NO: 2043924 - RNA, 14 nt, Human herpesvirus 6B
ucguuucauaccuu

SEQ ID NO: 2043925 - RNA, 21 nt, Human herpesvirus 6B
aaaaucgauacgacucaguag

SEQ ID NO: 2043926 - RNA, 15 nt, Human herpesvirus 6B
aacaauuuugauuua

SEQ ID NO: 2043927 - RNA, 20 nt, Human herpesvirus 6B
caccgucccucucaccccca

SEQ ID NO: 2043928 - RNA, 19 nt, Human herpesvirus 6B
auugucuuuucuggaaaca

SEQ ID NO: 2043929 - RNA, 20 nt, Human herpesvirus 6B
cuaguuacggggaagaucua

SEQ ID NO: 2043930 - RNA, 13 nt, Human herpesvirus 6B
gaacagagauuuu

SEQ ID NO: 2043931 - RNA, 19 nt, Human herpesvirus 6B
ccgcguggaagccgcugca

SEQ ID NO: 2043932 - RNA, 16 nt, Human herpesvirus 6B
uccuuuucaguauaga

SEQ ID NO: 2043933 - RNA, 23 nt, Human herpesvirus 6B
guccuauucagaggugcugauga

SEQ ID NO: 2043934 - RNA, 18 nt, Human herpesvirus 6B
gaagaauccgcgggccag

SEQ ID NO: 2043935 - RNA, 14 nt, Human herpesvirus 6B
cucacauagagaag

SEQ ID NO: 2043936 - RNA, 21 nt, Human herpesvirus 6B
ugaagagguucagacugcugc

SEQ ID NO: 2043937 - RNA, 14 nt, Human herpesvirus 6B
ccaacuuguuuucu

SEQ ID NO: 2043938 - RNA, 17 nt, Human herpesvirus 6B
caacggcacgagagccu

SEQ ID NO: 2043939 - RNA, 17 nt, Human herpesvirus 6B
uggagucuggccucugc

SEQ ID NO: 2043940 - RNA, 19 nt, Human herpesvirus 6B
gugcguuauuuucuguauu

SEQ ID NO: 2043941 - RNA, 14 nt, Human herpesvirus 6B
gccugaccaacaug

SEQ ID NO: 2043942 - RNA, 15 nt, Human herpesvirus 6B
cgacaaaaaaauaaa

SEQ ID NO: 2043943 - RNA, 17 nt, Human herpesvirus 6B
uaauaaaccuaacagag

SEQ ID NO: 2043944 - RNA, 23 nt, Human herpesvirus 6B
ucauuccaguccaaugaauacuu

SEQ ID NO: 2043945 - RNA, 19 nt, Human herpesvirus 6B
ugacugugaaaagugcuuu

SEQ ID NO: 2043946 - RNA, 16 nt, Human herpesvirus 6B
cuucaaaaucugcuaa

SEQ ID NO: 2043947 - RNA, 22 nt, Human herpesvirus 6B
cggaauaaugaaauuuaagaag

SEQ ID NO: 2043948 - RNA, 14 nt, Human herpesvirus 6B
aaaauaauccucuu

SEQ ID NO: 2043949 - RNA, 16 nt, Human herpesvirus 6B
aaucaaaaaaaugaua

SEQ ID NO: 2043950 - RNA, 16 nt, Human herpesvirus 6B
gcucuggcaaaggugu

SEQ ID NO: 2043951 - RNA, 17 nt, Human herpesvirus 6B
uaaacagauuuuaugcc

SEQ ID NO: 2043952 - RNA, 21 nt, Human herpesvirus 6B
ucucagcauuguugagaauuu

SEQ ID NO: 2043953 - RNA, 20 nt, Human herpesvirus 6B
uggcacugaaucagaaacug

SEQ ID NO: 2043954 - RNA, 19 nt, Human herpesvirus 6B
ucuccgucucagugucacu

SEQ ID NO: 2043955 - RNA, 16 nt, Human herpesvirus 6B
gcauuguugagaauuu

SEQ ID NO: 2043956 - RNA, 17 nt, Human herpesvirus 6B
ucuuacuuuguggaaau

SEQ ID NO: 2043957 - RNA, 22 nt, Human herpesvirus 6B
cuaaacggagacugcacagaau

SEQ ID NO: 2043958 - RNA, 17 nt, Human herpesvirus 6B
ugucgcaucaauuacuc

SEQ ID NO: 2043959 - RNA, 16 nt, Human herpesvirus 6B
agaauacgcuguguuu

SEQ ID NO: 2043960 - RNA, 12 nt, Human herpesvirus 6B
gccgguuauuag

SEQ ID NO: 2043961 - RNA, 16 nt, Human herpesvirus 6B
cguccauaggcucggc

SEQ ID NO: 2043962 - RNA, 13 nt, Human herpesvirus 6B
uauaucuggauau

SEQ ID NO: 2043963 - RNA, 13 nt, Human herpesvirus 6B
ugcuugaaagagu

SEQ ID NO: 2043964 - RNA, 21 nt, Human herpesvirus 6B
aaucuguaagauuaaauguga

SEQ ID NO: 2043965 - RNA, 14 nt, Human herpesvirus 6B
ggccgaaggauggu

SEQ ID NO: 2043966 - RNA, 19 nt, Human herpesvirus 6B
aggauguuugugacucuga

SEQ ID NO: 2043967 - RNA, 18 nt, Human herpesvirus 6B
uuaauaguuaaaaaauug

SEQ ID NO: 2043968 - RNA, 15 nt, Human herpesvirus 6B
uuugacaauaaacau

SEQ ID NO: 2043969 - RNA, 14 nt, Human herpesvirus 6B
uuaagaagaaacaa

SEQ ID NO: 2043970 - RNA, 15 nt, Human herpesvirus 6B
aacggaaacaugaac

SEQ ID NO: 2043971 - RNA, 19 nt, Human herpesvirus 6B
cuaugagaaccacagccag

SEQ ID NO: 2043972 - RNA, 18 nt, Human herpesvirus 6B
aacguugaaaaaucucua

SEQ ID NO: 2043973 - RNA, 21 nt, Human herpesvirus 6B
cacgagagccuuaucgaaaga

SEQ ID NO: 2043974 - RNA, 16 nt, Human herpesvirus 6B
uugucauucugcauuu

SEQ ID NO: 2043975 - RNA, 20 nt, Human herpesvirus 6B
gguuuugucguuuguacaug

SEQ ID NO: 2043976 - RNA, 22 nt, Human herpesvirus 6B
guaguggucguuuucgugguug

SEQ ID NO: 2043977 - RNA, 18 nt, Human herpesvirus 6B
uaacaauguuaugcaguu

SEQ ID NO: 2043978 - RNA, 16 nt, Human herpesvirus 6B
uugcgagucugucagu

SEQ ID NO: 2043979 - RNA, 22 nt, Human herpesvirus 6B
gaagagguucagacugcugcug

SEQ ID NO: 2043980 - RNA, 13 nt, Human herpesvirus 6B
aaaauaagacuua

SEQ ID NO: 2043981 - RNA, 20 nt, Human herpesvirus 6B
cguggccgucuccugcaauu

SEQ ID NO: 2043982 - RNA, 14 nt, Human herpesvirus 6B
augucgaaucucaa

SEQ ID NO: 2043983 - RNA, 16 nt, Human herpesvirus 6B
gccgcgcuggucgccg

SEQ ID NO: 2043984 - RNA, 12 nt, Human herpesvirus 6B
agugaaagcagu

SEQ ID NO: 2043985 - RNA, 22 nt, Human herpesvirus 6B
cacagaauguauauagagguuu

SEQ ID NO: 2043986 - RNA, 22 nt, Human herpesvirus 6B
uauuuacugagcaaagaaauga

SEQ ID NO: 2043987 - RNA, 22 nt, Human herpesvirus 6B
aucaugauaaauuguuuccgaa

SEQ ID NO: 2043988 - RNA, 17 nt, Human herpesvirus 6B
gccaaagcuuucuguac

SEQ ID NO: 2043989 - RNA, 12 nt, Human herpesvirus 6B
aggcucuggcaa

SEQ ID NO: 2043990 - RNA, 19 nt, Human herpesvirus 6B
auuuucguugaagaauaag

SEQ ID NO: 2043991 - RNA, 19 nt, Human herpesvirus 6B
ccggagcccugagagcagg

SEQ ID NO: 2043992 - RNA, 19 nt, Human herpesvirus 6B
aggagaaaaauuugauaua

SEQ ID NO: 2043993 - RNA, 21 nt, Human herpesvirus 6B
ggcuauuugacaauaaacaug

SEQ ID NO: 2043994 - RNA, 11 nt, Human herpesvirus 6B
ugcagaagaac

SEQ ID NO: 2043995 - RNA, 13 nt, Human herpesvirus 6B
caguauuuacuga

SEQ ID NO: 2043996 - RNA, 16 nt, Human herpesvirus 6B
auuucccaaaacguga

SEQ ID NO: 2043997 - RNA, 19 nt, Human herpesvirus 6B
cuccguuaggaucagacag

SEQ ID NO: 2043998 - RNA, 14 nt, Human herpesvirus 6B
auuuuauuuugugg

SEQ ID NO: 2043999 - RNA, 13 nt, Human herpesvirus 6B
uguuuccagaaua

SEQ ID NO: 2044000 - RNA, 13 nt, Human herpesvirus 6B
ggcuuagcuacca

SEQ ID NO: 2044001 - RNA, 14 nt, Human herpesvirus 6B
gaacagaaauuucu

SEQ ID NO: 2044002 - RNA, 17 nt, Human herpesvirus 6B
ugcuuuggauccuuugu

SEQ ID NO: 2044003 - RNA, 20 nt, Human herpesvirus 6B
cucuuagauauccauuugcu

SEQ ID NO: 2044004 - RNA, 19 nt, Human herpesvirus 6B
auguagcacacgacaaaua

SEQ ID NO: 2044005 - RNA, 14 nt, Human herpesvirus 6B
aucaaagaacagaa

SEQ ID NO: 2044006 - RNA, 20 nt, Human herpesvirus 6B
gcccucucacgcgcauuaaa

SEQ ID NO: 2044007 - RNA, 16 nt, Human herpesvirus 6B
acucucuuucaguaau

SEQ ID NO: 2044008 - RNA, 16 nt, Human herpesvirus 6B
cacuuagacacggcca

SEQ ID NO: 2044009 - RNA, 22 nt, Human herpesvirus 6B
cauuuuuuaauccauauuugga

SEQ ID NO: 2044010 - RNA, 20 nt, Human herpesvirus 6B
cacggcgaaagccagggcgu

SEQ ID NO: 2044011 - RNA, 15 nt, Human herpesvirus 6B
cgaguuuagacagag

SEQ ID NO: 2044012 - RNA, 18 nt, Human herpesvirus 6B
cacggcaacgcuccuccc

SEQ ID NO: 2044013 - RNA, 21 nt, Human herpesvirus 6B
uuaaaaaugauaacuguuuuu

SEQ ID NO: 2044014 - RNA, 14 nt, Human herpesvirus 6B
aaagcagaucgagu

SEQ ID NO: 2044015 - RNA, 22 nt, Human herpesvirus 6B
auggguacaaugccaacacugu

SEQ ID NO: 2044016 - RNA, 23 nt, Human herpesvirus 6B
acucgaggaaacgcgcugggacu

SEQ ID NO: 2044017 - RNA, 14 nt, Human herpesvirus 6B
guugggggaugggu

SEQ ID NO: 2044018 - RNA, 16 nt, Human herpesvirus 6B
gacauuuaccagagau

SEQ ID NO: 2044019 - RNA, 17 nt, Human herpesvirus 6B
ugguggccgucugucug

SEQ ID NO: 2044020 - RNA, 13 nt, Human herpesvirus 6B
agaucacucagau

SEQ ID NO: 2044021 - RNA, 18 nt, Human herpesvirus 6B
uuuucugcucaacaaugu

SEQ ID NO: 2044022 - RNA, 18 nt, Human herpesvirus 6B
gacgaagaaacgaggacg

SEQ ID NO: 2044023 - RNA, 19 nt, Human herpesvirus 6B
uguugcgauugcugcuucu

SEQ ID NO: 2044024 - RNA, 18 nt, Human herpesvirus 6B
uuuuuggcauauacaaaa

SEQ ID NO: 2044025 - RNA, 14 nt, Human herpesvirus 6B
uuaggauguaaaug

SEQ ID NO: 2044026 - RNA, 22 nt, Human herpesvirus 6B
gacaugcucgggaucacgcagg

SEQ ID NO: 2044027 - RNA, 23 nt, Human herpesvirus 6B
uaaccggcgagguuaagaugucg

SEQ ID NO: 2044028 - RNA, 16 nt, Human herpesvirus 6B
ugaggcggugucuuca

SEQ ID NO: 2044029 - RNA, 20 nt, Human herpesvirus 6B
ugguuugcuucgucaacaau

SEQ ID NO: 2044030 - RNA, 18 nt, Human herpesvirus 6B
gucuccugcaauuugaau

SEQ ID NO: 2044031 - RNA, 17 nt, Human herpesvirus 6B
aaucguguuuucuuaug

SEQ ID NO: 2044032 - RNA, 18 nt, Human herpesvirus 6B
aucgugcuuguuuuggug

SEQ ID NO: 2044033 - RNA, 13 nt, Human herpesvirus 6B
aaaacccggagaa

SEQ ID NO: 2044034 - RNA, 15 nt, Human herpesvirus 6B
acaguucguccagca

SEQ ID NO: 2044035 - RNA, 20 nt, Human herpesvirus 6B
uuauuagcauucaaguccaa

SEQ ID NO: 2044036 - RNA, 18 nt, Human herpesvirus 6B
gaauuucauagauugcac

SEQ ID NO: 2044037 - RNA, 20 nt, Human herpesvirus 6B
cuuuagauggaaaacugcag

SEQ ID NO: 2044038 - RNA, 14 nt, Human herpesvirus 6B
cguugugacagaau

SEQ ID NO: 2044039 - RNA, 19 nt, Human herpesvirus 6B
cgugguggccgucugucug

SEQ ID NO: 2044040 - RNA, 13 nt, Human herpesvirus 6B
gggaggagaggga

SEQ ID NO: 2044041 - RNA, 11 nt, Human herpesvirus 6B
acaaagguuuu

SEQ ID NO: 2044042 - RNA, 17 nt, Human herpesvirus 6B
agaaucguaguuuuguu

SEQ ID NO: 2044043 - RNA, 16 nt, Human herpesvirus 6B
ucuggugagaaagacu

SEQ ID NO: 2044044 - RNA, 15 nt, Human herpesvirus 6B
gaagccggagcccug

SEQ ID NO: 2044045 - RNA, 21 nt, Human herpesvirus 6B
uuguguagaagacaucuuaaa

SEQ ID NO: 2044046 - RNA, 19 nt, Human herpesvirus 6B
uuagacagcugcauuauua

SEQ ID NO: 2044047 - RNA, 24 nt, Human herpesvirus 6B
ggccucccuccguuaggaucagac

SEQ ID NO: 2044048 - RNA, 12 nt, Human herpesvirus 6B
uauguacagaua

SEQ ID NO: 2044049 - RNA, 23 nt, Human herpesvirus 6B
uagcauucugccgaaaagaaaga

SEQ ID NO: 2044050 - RNA, 17 nt, Human herpesvirus 6B
guuggccaagcugucuc

SEQ ID NO: 2044051 - RNA, 14 nt, Human herpesvirus 6B
agauaagagaguuu

SEQ ID NO: 2044052 - RNA, 20 nt, Human herpesvirus 6B
auugcuaagaucugucucca

SEQ ID NO: 2044053 - RNA, 13 nt, Human herpesvirus 6B
aggauuuguaaaa

SEQ ID NO: 2044054 - RNA, 20 nt, Human herpesvirus 6B
aaucuauuaauuuugaagac

SEQ ID NO: 2044055 - RNA, 23 nt, Human herpesvirus 6B
gcaagauuuuagauuuaugaggc

SEQ ID NO: 2044056 - RNA, 16 nt, Human herpesvirus 6B
gauucuguugggugau

SEQ ID NO: 2044057 - RNA, 18 nt, Human herpesvirus 6B
aagacuuagcuagacgug

SEQ ID NO: 2044058 - RNA, 14 nt, Human herpesvirus 6B
acgccuauucuaau

SEQ ID NO: 2044059 - RNA, 19 nt, Human herpesvirus 6B
acagcuuguccgaaauaca

SEQ ID NO: 2044060 - RNA, 13 nt, Human herpesvirus 6B
ccaugacugugag

SEQ ID NO: 2044061 - RNA, 15 nt, Human herpesvirus 6B
acucgcaagaacuag

SEQ ID NO: 2044062 - RNA, 13 nt, Human herpesvirus 6B
agucuaaugcaaa

SEQ ID NO: 2044063 - RNA, 15 nt, Human herpesvirus 6B
aaaaucugcuaacgg

SEQ ID NO: 2044064 - RNA, 19 nt, Human herpesvirus 6B
cucucuucaggagaagaac

SEQ ID NO: 2044065 - RNA, 20 nt, Human herpesvirus 6B
ggaccaugcagcugcccgug

SEQ ID NO: 2044066 - RNA, 17 nt, Human herpesvirus 6B
caggcgcgucggcggga

SEQ ID NO: 2044067 - RNA, 12 nt, Human herpesvirus 6B
ccagcccugaag

SEQ ID NO: 2044068 - RNA, 15 nt, Human herpesvirus 6B
uauaucaaacuuuuu

SEQ ID NO: 2044069 - RNA, 20 nt, Human herpesvirus 6B
ggacuccgagccggacagga

SEQ ID NO: 2044070 - RNA, 22 nt, Human herpesvirus 6B
caccgucccucucacccccacu

SEQ ID NO: 2044071 - RNA, 21 nt, Human herpesvirus 6B
uaaauccuagaguuguuuuua

SEQ ID NO: 2044072 - RNA, 13 nt, Human herpesvirus 6B
cccuccguccagg

SEQ ID NO: 2044073 - RNA, 12 nt, Human herpesvirus 6B
agaagcugucug

SEQ ID NO: 2044074 - RNA, 19 nt, Human herpesvirus 6B
ggagcacgagccaagggga

SEQ ID NO: 2044075 - RNA, 20 nt, Human herpesvirus 6B
gaaaucuuuuucggauuuua

SEQ ID NO: 2044076 - RNA, 14 nt, Human herpesvirus 6B
augucgggccacau

SEQ ID NO: 2044077 - RNA, 20 nt, Human herpesvirus 6B
aucugcuuuguuuucuuaug

SEQ ID NO: 2044078 - RNA, 13 nt, Human herpesvirus 6B
agaucauggugau

SEQ ID NO: 2044079 - RNA, 17 nt, Human herpesvirus 6B
agcccugaagaagaugc

SEQ ID NO: 2044080 - RNA, 19 nt, Human herpesvirus 6B
gaugagcuucaauuguuuu

SEQ ID NO: 2044081 - RNA, 12 nt, Human herpesvirus 6B
uccgcagucucu

SEQ ID NO: 2044082 - RNA, 17 nt, Human herpesvirus 6B
guuacgucuuuggacug

SEQ ID NO: 2044083 - RNA, 19 nt, Human herpesvirus 6B
ugcagcgauauggaaacac

SEQ ID NO: 2044084 - RNA, 22 nt, Human herpesvirus 6B
gagcaugucggagguggcgaau

SEQ ID NO: 2044085 - RNA, 15 nt, Human herpesvirus 6B
caccagauaggaaaa

SEQ ID NO: 2044086 - RNA, 22 nt, Human herpesvirus 6B
acagaaaaaaaaauguuuuguc

SEQ ID NO: 2044087 - RNA, 15 nt, Human herpesvirus 6B
uaucaugagagagca

SEQ ID NO: 2044088 - RNA, 16 nt, Human herpesvirus 6B
agaaucgagaucguuu

SEQ ID NO: 2044089 - RNA, 17 nt, Human herpesvirus 6B
ccgaugacuaagaaaaa

SEQ ID NO: 2044090 - RNA, 23 nt, Human herpesvirus 6B
gcucgccgucgucgcucucccuc

SEQ ID NO: 2044091 - RNA, 15 nt, Human herpesvirus 6B
agaugcgggaguuga

SEQ ID NO: 2044092 - RNA, 16 nt, Human herpesvirus 6B
gccaaucauaagaaac

SEQ ID NO: 2044093 - RNA, 16 nt, Human herpesvirus 6B
aaaacgugagguguau

SEQ ID NO: 2044094 - RNA, 23 nt, Human herpesvirus 6B
gucuuuccuacccaggcuaacga

SEQ ID NO: 2044095 - RNA, 22 nt, Human herpesvirus 6B
gcacuuguagagacgaaagcag

SEQ ID NO: 2044096 - RNA, 12 nt, Human herpesvirus 6B
gccuugauuuuu

SEQ ID NO: 2044097 - RNA, 14 nt, Human herpesvirus 6B
gauugggaugucag

SEQ ID NO: 2044098 - RNA, 22 nt, Human herpesvirus 6B
uuuaaugacguaugauuuucaa

SEQ ID NO: 2044099 - RNA, 14 nt, Human herpesvirus 6B
uuuacugcaugcua

SEQ ID NO: 2044100 - RNA, 19 nt, Human herpesvirus 6B
ucauccugaccgacuuuga

SEQ ID NO: 2044101 - RNA, 19 nt, Human herpesvirus 6B
gugauaaaucuaccugccg

SEQ ID NO: 2044102 - RNA, 16 nt, Human herpesvirus 6B
caugaaaacauucaga

SEQ ID NO: 2044103 - RNA, 15 nt, Human herpesvirus 6B
aagggacagcaguuu

SEQ ID NO: 2044104 - RNA, 20 nt, Human herpesvirus 6B
cauagaguuucgagaaagag

SEQ ID NO: 2044105 - RNA, 21 nt, Human herpesvirus 6B
aaugacauuuauuagcauuca

SEQ ID NO: 2044106 - RNA, 13 nt, Human herpesvirus 6B
gugcaaaugcuca

SEQ ID NO: 2044107 - RNA, 21 nt, Human herpesvirus 6B
aacaugacggacuuggaaaag

SEQ ID NO: 2044108 - RNA, 20 nt, Human herpesvirus 6B
uaagagauuuacuguuucuu

SEQ ID NO: 2044109 - RNA, 19 nt, Human herpesvirus 6B
uuaugacaaaaccaucuuu

SEQ ID NO: 2044110 - RNA, 13 nt, Human herpesvirus 6B
uguucguucucua

SEQ ID NO: 2044111 - RNA, 14 nt, Human herpesvirus 6B
ucuccggcgucacu

SEQ ID NO: 2044112 - RNA, 17 nt, Human herpesvirus 6B
accccccucuugcagug

SEQ ID NO: 2044113 - RNA, 18 nt, Human herpesvirus 6B
gugaaacucgggggcagu

SEQ ID NO: 2044114 - RNA, 17 nt, Human herpesvirus 6B
uguauuaaaaugugaug

SEQ ID NO: 2044115 - RNA, 18 nt, Human herpesvirus 6B
ggaucagcucagcucuga

SEQ ID NO: 2044116 - RNA, 13 nt, Human herpesvirus 6B
aggcgcagcagca

SEQ ID NO: 2044117 - RNA, 19 nt, Human herpesvirus 6B
aagcagaggucuuugcuuu

SEQ ID NO: 2044118 - RNA, 22 nt, Human herpesvirus 6B
cguuuucugcucaacaauguuc

SEQ ID NO: 2044119 - RNA, 20 nt, Human herpesvirus 6B
ggcguuaucgacggcagcgg

SEQ ID NO: 2044120 - RNA, 22 nt, Human herpesvirus 6B
ucuuaaauucaauuuaaaauaa

SEQ ID NO: 2044121 - RNA, 20 nt, Human herpesvirus 6B
auuuugacaccucauaucaa

SEQ ID NO: 2044122 - RNA, 19 nt, Human herpesvirus 6B
gaaaagugcuuuauccggc

SEQ ID NO: 2044123 - RNA, 15 nt, Human herpesvirus 6B
aggggacggacagag

SEQ ID NO: 2044124 - RNA, 21 nt, Human herpesvirus 6B
ccugcaauuugaauucugcuc

SEQ ID NO: 2044125 - RNA, 22 nt, Human herpesvirus 6B
cuuagacgaaaauuguaacuuc

SEQ ID NO: 2044126 - RNA, 22 nt, Human herpesvirus 6B
gaaaauaaaguugaauugauag

SEQ ID NO: 2044127 - RNA, 14 nt, Human herpesvirus 6B
gcagacgugagaca

SEQ ID NO: 2044128 - RNA, 14 nt, Human herpesvirus 6B
ugaaauacugugag

SEQ ID NO: 2044129 - RNA, 13 nt, Human herpesvirus 6B
cgaugcuggccug

SEQ ID NO: 2044130 - RNA, 18 nt, Human herpesvirus 6B
uccccccgccgccuucuc

SEQ ID NO: 2044131 - RNA, 18 nt, Human herpesvirus 6B
acauuucgguuuaauaga

SEQ ID NO: 2044132 - RNA, 17 nt, Human herpesvirus 6B
aaaagucguuacaguaa

SEQ ID NO: 2044133 - RNA, 20 nt, Human herpesvirus 6B
agaguggcgauaauguuauc

SEQ ID NO: 2044134 - RNA, 19 nt, Human herpesvirus 6B
auuacagcuuguccgaaau

SEQ ID NO: 2044135 - RNA, 17 nt, Human herpesvirus 6B
aacaaguuauuuaaaau

SEQ ID NO: 2044136 - RNA, 20 nt, Human herpesvirus 6B
uagguuucagacacguuuau

SEQ ID NO: 2044137 - RNA, 18 nt, Human herpesvirus 6B
uaaaucaaaaaaaugaua

SEQ ID NO: 2044138 - RNA, 20 nt, Human herpesvirus 6B
uacuuuugggauuuuucaua

SEQ ID NO: 2044139 - RNA, 21 nt, Human herpesvirus 6B
auugcacgcugggcuucagua

SEQ ID NO: 2044140 - RNA, 22 nt, Human herpesvirus 6B
gaauauauagaagaagaaauac

SEQ ID NO: 2044141 - RNA, 22 nt, Human herpesvirus 6B
guuaauaguuacuuugauguua

SEQ ID NO: 2044142 - RNA, 18 nt, Human herpesvirus 6B
uuuacaaucaucugguaa

SEQ ID NO: 2044143 - RNA, 19 nt, Human herpesvirus 6B
gggagccguggugcgccug

SEQ ID NO: 2044144 - RNA, 14 nt, Human herpesvirus 6B
ucaaccugaaaaga

SEQ ID NO: 2044145 - RNA, 13 nt, Human herpesvirus 6B
uuccaaagauucu

SEQ ID NO: 2044146 - RNA, 13 nt, Human herpesvirus 6B
cuugaauguuuaa

SEQ ID NO: 2044147 - RNA, 20 nt, Human herpesvirus 6B
ucuccacagggcauagaaag

SEQ ID NO: 2044148 - RNA, 14 nt, Human herpesvirus 6B
ucuucauccucgaa

SEQ ID NO: 2044149 - RNA, 16 nt, Human herpesvirus 6B
auuugacuguagaaaa

SEQ ID NO: 2044150 - RNA, 13 nt, Human herpesvirus 6B
aguuucauccuga

SEQ ID NO: 2044151 - RNA, 21 nt, Human herpesvirus 6B
aauuuuuuucuccugaucuca

SEQ ID NO: 2044152 - RNA, 16 nt, Human herpesvirus 6B
caaagggaagccagcc

SEQ ID NO: 2044153 - RNA, 18 nt, Human herpesvirus 6B
uuucaccccccucuugca

SEQ ID NO: 2044154 - RNA, 22 nt, Human herpesvirus 6B
cugugaggugauuugaacagag

SEQ ID NO: 2044155 - RNA, 21 nt, Human herpesvirus 6B
guaaccugagaauuuucgaaa

SEQ ID NO: 2044156 - RNA, 19 nt, Human herpesvirus 6B
gaauguguucauagagcau

SEQ ID NO: 2044157 - RNA, 22 nt, Human herpesvirus 6B
gaagacaucuuaaauuucuaug

SEQ ID NO: 2044158 - RNA, 19 nt, Human herpesvirus 6B
cagaucuugaaaagccccu

SEQ ID NO: 2044159 - RNA, 14 nt, Human herpesvirus 6B
uauuaagaaugaau

SEQ ID NO: 2044160 - RNA, 14 nt, Human herpesvirus 6B
cuuaacaagagagg

SEQ ID NO: 2044161 - RNA, 11 nt, Human herpesvirus 6B
gauaaacugua

SEQ ID NO: 2044162 - RNA, 18 nt, Human herpesvirus 6B
cagagaucagcaugggca

SEQ ID NO: 2044163 - RNA, 13 nt, Human herpesvirus 6B
gaugccaaagcuu

SEQ ID NO: 2044164 - RNA, 14 nt, Human herpesvirus 6B
ugacugacaaggua

SEQ ID NO: 2044165 - RNA, 17 nt, Human herpesvirus 6B
ucccuccaucccccucc

SEQ ID NO: 2044166 - RNA, 14 nt, Human herpesvirus 6B
ucaagaaacacuuc

SEQ ID NO: 2044167 - RNA, 14 nt, Human herpesvirus 6B
cgucccuucuccgu

SEQ ID NO: 2044168 - RNA, 21 nt, Human herpesvirus 6B
uguaagcgaauugguuugcuu

SEQ ID NO: 2044169 - RNA, 20 nt, Human herpesvirus 6B
cggcggaagugaaagcaguc

SEQ ID NO: 2044170 - RNA, 20 nt, Human herpesvirus 6B
ugugauuccuucggggacag

SEQ ID NO: 2044171 - RNA, 19 nt, Human herpesvirus 6B
caucccuuaaaaaaacaca

SEQ ID NO: 2044172 - RNA, 15 nt, Human herpesvirus 6B
ccgcagaggcggcga

SEQ ID NO: 2044173 - RNA, 20 nt, Human herpesvirus 6B
acaaguacuacguguugcuu

SEQ ID NO: 2044174 - RNA, 17 nt, Human herpesvirus 6B
acaccgacacgucucca

SEQ ID NO: 2044175 - RNA, 20 nt, Human herpesvirus 6B
ccuguucgauguacaguuuc

SEQ ID NO: 2044176 - RNA, 15 nt, Human herpesvirus 6B
caauuugaauucugc

SEQ ID NO: 2044177 - RNA, 22 nt, Human herpesvirus 6B
auggauuacaagggaaauccua

SEQ ID NO: 2044178 - RNA, 14 nt, Human herpesvirus 6B
uuacgucuuuggac

SEQ ID NO: 2044179 - RNA, 20 nt, Human herpesvirus 6B
cacaguugcgugagcaagga

SEQ ID NO: 2044180 - RNA, 19 nt, Human herpesvirus 6B
auuucguauguuuaacuaa

SEQ ID NO: 2044181 - RNA, 20 nt, Human herpesvirus 6B
cuccgaaccacaucuuuucc

SEQ ID NO: 2044182 - RNA, 23 nt, Human herpesvirus 6B
uuccaaaagagaaagaacuuuug

SEQ ID NO: 2044183 - RNA, 13 nt, Human herpesvirus 6B
uccccucauacau

SEQ ID NO: 2044184 - RNA, 19 nt, Human herpesvirus 6B
ugcucuccgcgcugcuggg

SEQ ID NO: 2044185 - RNA, 17 nt, Human herpesvirus 6B
gacugcguuacaagcau

SEQ ID NO: 2044186 - RNA, 14 nt, Human herpesvirus 6B
caaguuuuuaugca

SEQ ID NO: 2044187 - RNA, 18 nt, Human herpesvirus 6B
caugugaacaaguggaag

SEQ ID NO: 2044188 - RNA, 20 nt, Human herpesvirus 6B
gaaaguuuuggaaaauguaa

SEQ ID NO: 2044189 - RNA, 13 nt, Human herpesvirus 6B
uacuguaaacaaa

SEQ ID NO: 2044190 - RNA, 13 nt, Human herpesvirus 6B
caggcuccccagg

SEQ ID NO: 2044191 - RNA, 16 nt, Human herpesvirus 6B
auggaaacacuuucuu

SEQ ID NO: 2044192 - RNA, 20 nt, Human herpesvirus 6B
agauucauaauaggcaauuu

SEQ ID NO: 2044193 - RNA, 16 nt, Human herpesvirus 6B
aagcccggagaacuga

SEQ ID NO: 2044194 - RNA, 14 nt, Human herpesvirus 6B
aaaagcgccugccu

SEQ ID NO: 2044195 - RNA, 22 nt, Human herpesvirus 6B
acuuccucgcgguauaaugcau

SEQ ID NO: 2044196 - RNA, 16 nt, Human herpesvirus 6B
cuuagaaccaaucugu

SEQ ID NO: 2044197 - RNA, 20 nt, Human herpesvirus 6B
uuccuucaggcgcaaaccaa

SEQ ID NO: 2044198 - RNA, 18 nt, Human herpesvirus 6B
auuuuuuugaaaucacuc

SEQ ID NO: 2044199 - RNA, 20 nt, Human herpesvirus 6B
cucgguccccccucccucca

SEQ ID NO: 2044200 - RNA, 21 nt, Human herpesvirus 6B
aauaacgguguugaguuuauc

SEQ ID NO: 2044201 - RNA, 16 nt, Human herpesvirus 6B
cuguaaaccaguaucu

SEQ ID NO: 2044202 - RNA, 20 nt, Human herpesvirus 6B
aggagccaacauacacacga

SEQ ID NO: 2044203 - RNA, 15 nt, Human herpesvirus 6B
aguuuucaugugaaa

SEQ ID NO: 2044204 - RNA, 23 nt, Human herpesvirus 6B
auucuguugggugaucauaggac

SEQ ID NO: 2044205 - RNA, 12 nt, Human herpesvirus 6B
uugugagaacag

SEQ ID NO: 2044206 - RNA, 15 nt, Human herpesvirus 6B
aacgcaggagaaacu

SEQ ID NO: 2044207 - RNA, 22 nt, Human herpesvirus 6B
accccuuaugcaacugcauuuu

SEQ ID NO: 2044208 - RNA, 18 nt, Human herpesvirus 6B
agaucacaacaaacaugu

SEQ ID NO: 2044209 - RNA, 20 nt, Human herpesvirus 6B
cgagccggacaggaggugcg

SEQ ID NO: 2044210 - RNA, 13 nt, Human herpesvirus 6B
gaauacagcugca

SEQ ID NO: 2044211 - RNA, 11 nt, Human herpesvirus 6B
gcccugagagc

SEQ ID NO: 2044212 - RNA, 16 nt, Human herpesvirus 6B
gcuaggcuuaaugaau

SEQ ID NO: 2044213 - RNA, 15 nt, Human herpesvirus 6B
gacucugucuuaguu

SEQ ID NO: 2044214 - RNA, 18 nt, Human herpesvirus 6B
aauaacgguguugaguuu

SEQ ID NO: 2044215 - RNA, 16 nt, Human herpesvirus 6B
gccaaagcuuucugua

SEQ ID NO: 2044216 - RNA, 12 nt, Human herpesvirus 6B
guugcuguaguu

SEQ ID NO: 2044217 - RNA, 13 nt, Human herpesvirus 6B
caggcgcagcagc

SEQ ID NO: 2044218 - RNA, 21 nt, Human herpesvirus 6B
agaauaaaccggaugugcaaa

SEQ ID NO: 2044219 - RNA, 23 nt, Human herpesvirus 6B
ucucacggccauuuaacggaacc

SEQ ID NO: 2044220 - RNA, 23 nt, Human herpesvirus 6B
cagggcauagaaagcggccaggc

SEQ ID NO: 2044221 - RNA, 14 nt, Human herpesvirus 6B
gaccucgcgggaag

SEQ ID NO: 2044222 - RNA, 17 nt, Human herpesvirus 6B
auguucuugacaaauaa

SEQ ID NO: 2044223 - RNA, 13 nt, Human herpesvirus 6B
ucuuccuucucgu

SEQ ID NO: 2044224 - RNA, 17 nt, Human herpesvirus 6B
caauaccaaaaaauguu

SEQ ID NO: 2044225 - RNA, 14 nt, Human herpesvirus 6B
agaguacggaagug

SEQ ID NO: 2044226 - RNA, 17 nt, Human herpesvirus 6B
auacgggaaaagaucaa

SEQ ID NO: 2044227 - RNA, 21 nt, Human herpesvirus 6B
gcugccauuauugauagcauu

SEQ ID NO: 2044228 - RNA, 15 nt, Human herpesvirus 6B
aucucuagguaaacu

SEQ ID NO: 2044229 - RNA, 19 nt, Human herpesvirus 6B
uagcaccccacaaaacuua

SEQ ID NO: 2044230 - RNA, 21 nt, Human herpesvirus 6B
gaaucucuguuccucaugaac

SEQ ID NO: 2044231 - RNA, 14 nt, Human herpesvirus 6B
cgauguacaguuuc

SEQ ID NO: 2044232 - RNA, 20 nt, Human herpesvirus 6B
aguaagccuauugacaugau

SEQ ID NO: 2044233 - RNA, 14 nt, Human herpesvirus 6B
agucucaaaaauua

SEQ ID NO: 2044234 - RNA, 15 nt, Human herpesvirus 6B
ucuucauucuucgaa

SEQ ID NO: 2044235 - RNA, 21 nt, Human herpesvirus 6B
aauaccaaaaaauguuaaaaa

SEQ ID NO: 2044236 - RNA, 20 nt, Human herpesvirus 6B
auuccguugugacagaauua

SEQ ID NO: 2044237 - RNA, 12 nt, Human herpesvirus 6B
uuacagaugucu

SEQ ID NO: 2044238 - RNA, 23 nt, Human herpesvirus 6B
auuucuagcgaucauaaaacugc

SEQ ID NO: 2044239 - RNA, 12 nt, Human herpesvirus 6B
cucuugcagugg

SEQ ID NO: 2044240 - RNA, 19 nt, Human herpesvirus 6B
ccgcggcgcugggcuccuc

SEQ ID NO: 2044241 - RNA, 23 nt, Human herpesvirus 6B
cgaggguuuuuuccgaaaacuag

SEQ ID NO: 2044242 - RNA, 19 nt, Human herpesvirus 6B
augucguuucaugggagaa

SEQ ID NO: 2044243 - RNA, 19 nt, Human herpesvirus 6B
gcagagccguuagaaaaau

SEQ ID NO: 2044244 - RNA, 22 nt, Human herpesvirus 6B
auuuggaagcgaaucgcuuaaa

SEQ ID NO: 2044245 - RNA, 13 nt, Human herpesvirus 6B
gccuauuucucuu

SEQ ID NO: 2044246 - RNA, 13 nt, Human herpesvirus 6B
cgauuaaugccac

SEQ ID NO: 2044247 - RNA, 14 nt, Human herpesvirus 6B
uacgaagacaagcc

SEQ ID NO: 2044248 - RNA, 19 nt, Human herpesvirus 6B
ggcgaggggacggacagag

SEQ ID NO: 2044249 - RNA, 18 nt, Human herpesvirus 6B
auggcagaucuugaaaag

SEQ ID NO: 2044250 - RNA, 16 nt, Human herpesvirus 6B
acuuuuuucuaaaacc

SEQ ID NO: 2044251 - RNA, 16 nt, Human herpesvirus 6B
augcaaucugugggaa

SEQ ID NO: 2044252 - RNA, 14 nt, Human herpesvirus 6B
gcucagauguggaa

SEQ ID NO: 2044253 - RNA, 21 nt, Human herpesvirus 6B
caauugcugcuggguguaugu

SEQ ID NO: 2044254 - RNA, 18 nt, Human herpesvirus 6B
aaugaugcauacagcaug

SEQ ID NO: 2044255 - RNA, 16 nt, Human herpesvirus 6B
ugggaaccugugaaca

SEQ ID NO: 2044256 - RNA, 20 nt, Human herpesvirus 6B
gcggaagggcucuguuacua

SEQ ID NO: 2044257 - RNA, 15 nt, Human herpesvirus 6B
acgccauccacccau

SEQ ID NO: 2044258 - RNA, 12 nt, Human herpesvirus 6B
ugaaugugcuuu

SEQ ID NO: 2044259 - RNA, 15 nt, Human herpesvirus 6B
uuaguaauuuggauu

SEQ ID NO: 2044260 - RNA, 22 nt, Human herpesvirus 6B
uguauuguagcagcuggcgaaa

SEQ ID NO: 2044261 - RNA, 21 nt, Human herpesvirus 6B
cuguucgauguacaguuucuc

SEQ ID NO: 2044262 - RNA, 15 nt, Human herpesvirus 6B
gguuagaucugggga

SEQ ID NO: 2044263 - RNA, 21 nt, Human herpesvirus 6B
uccagaagacugcuccaguca

SEQ ID NO: 2044264 - RNA, 11 nt, Human herpesvirus 6B
guauuuccugu

SEQ ID NO: 2044265 - RNA, 20 nt, Human herpesvirus 6B
cucaaacuuuuagagacuuu

SEQ ID NO: 2044266 - RNA, 21 nt, Human herpesvirus 6B
cugagauucgccaccuccgac

SEQ ID NO: 2044267 - RNA, 20 nt, Human herpesvirus 6B
guuagauaaugagauucugu

SEQ ID NO: 2044268 - RNA, 22 nt, Human herpesvirus 6B
aacacccgaugaggaaaaacgu

SEQ ID NO: 2044269 - RNA, 14 nt, Human herpesvirus 6B
acacuggcgaaggc

SEQ ID NO: 2044270 - RNA, 15 nt, Human herpesvirus 6B
aacaugauuguaaua

SEQ ID NO: 2044271 - RNA, 15 nt, Human herpesvirus 6B
accgacuuugaaauc

SEQ ID NO: 2044272 - RNA, 18 nt, Human herpesvirus 6B
cugauccaugagcacccg

SEQ ID NO: 2044273 - RNA, 21 nt, Human herpesvirus 6B
gaggugauugcuucauuucug

SEQ ID NO: 2044274 - RNA, 16 nt, Human herpesvirus 6B
ugguuugcuuuggauc

SEQ ID NO: 2044275 - RNA, 16 nt, Human herpesvirus 6B
gaagccggagcccuga

SEQ ID NO: 2044276 - RNA, 19 nt, Human herpesvirus 6B
acuuucuucgccuguaaag

SEQ ID NO: 2044277 - RNA, 18 nt, Human herpesvirus 6B
aggggcuaccgucuugga

SEQ ID NO: 2044278 - RNA, 12 nt, Human herpesvirus 6B
ugugauaugcaa

SEQ ID NO: 2044279 - RNA, 20 nt, Human herpesvirus 6B
uaugaacaggugcuucuuuu

SEQ ID NO: 2044280 - RNA, 19 nt, Human herpesvirus 6B
guagugcggcgguaaacaa

SEQ ID NO: 2044281 - RNA, 21 nt, Human herpesvirus 6B
cgcgcggaccacucgggccgg

SEQ ID NO: 2044282 - RNA, 13 nt, Human herpesvirus 6B
uuuauccggccaa

SEQ ID NO: 2044283 - RNA, 14 nt, Human herpesvirus 6B
cuuccccaagcaaa

SEQ ID NO: 2044284 - RNA, 20 nt, Human herpesvirus 6B
acauguuuuugauguuuuca

SEQ ID NO: 2044285 - RNA, 22 nt, Human herpesvirus 6B
gcuaagauuaacaacugccgcc

SEQ ID NO: 2044286 - RNA, 20 nt, Human herpesvirus 6B
acccaauuuugguacaauuu

SEQ ID NO: 2044287 - RNA, 16 nt, Human herpesvirus 6B
cuguaccccaagugaa

SEQ ID NO: 2044288 - RNA, 22 nt, Human herpesvirus 6B
ugucgcagaaucaagaaacacu

SEQ ID NO: 2044289 - RNA, 12 nt, Human herpesvirus 6B
uuuuggugaaaa

SEQ ID NO: 2044290 - RNA, 19 nt, Human herpesvirus 6B
uauugcuaaagaguaugac

SEQ ID NO: 2044291 - RNA, 17 nt, Human herpesvirus 6B
uaacgcggcaaccgcag

SEQ ID NO: 2044292 - RNA, 18 nt, Human herpesvirus 6B
ucgaaaugcauagaaguu

SEQ ID NO: 2044293 - RNA, 22 nt, Human herpesvirus 6B
ccaggcaccauguucgccucuc

SEQ ID NO: 2044294 - RNA, 21 nt, Human herpesvirus 6B
auuaaaaauaaaaaaaaugaa

SEQ ID NO: 2044295 - RNA, 18 nt, Human herpesvirus 6B
caaugacuggccaaucau

SEQ ID NO: 2044296 - RNA, 23 nt, Human herpesvirus 6B
uggucaagggcaagguucucagc

SEQ ID NO: 2044297 - RNA, 18 nt, Human herpesvirus 6B
gaagccuggaagaaggaa

SEQ ID NO: 2044298 - RNA, 16 nt, Human herpesvirus 6B
uccgucaucuagagaa

SEQ ID NO: 2044299 - RNA, 14 nt, Human herpesvirus 6B
gccuggggacagac

SEQ ID NO: 2044300 - RNA, 13 nt, Human herpesvirus 6B
cuucuuuuggaug

SEQ ID NO: 2044301 - RNA, 14 nt, Human herpesvirus 6B
aggucaaaaaacuc

SEQ ID NO: 2044302 - RNA, 20 nt, Human herpesvirus 6B
aacaaugaaaauucaguuuu

SEQ ID NO: 2044303 - RNA, 14 nt, Human herpesvirus 6B
agcgucaaacacuc

SEQ ID NO: 2044304 - RNA, 22 nt, Human herpesvirus 6B
gcuuguuuugguggacaccaau

SEQ ID NO: 2044305 - RNA, 19 nt, Human herpesvirus 6B
cucgccguuuuuguuugac

SEQ ID NO: 2044306 - RNA, 18 nt, Human herpesvirus 6B
ugcuggguguauguuucu

SEQ ID NO: 2044307 - RNA, 19 nt, Human herpesvirus 6B
aauuuccggucaacuucua

SEQ ID NO: 2044308 - RNA, 20 nt, Human herpesvirus 6B
uccucuuuuccccccgccgc

SEQ ID NO: 2044309 - RNA, 18 nt, Human herpesvirus 6B
uccuccgcaaguuuucag

SEQ ID NO: 2044310 - RNA, 14 nt, Human herpesvirus 6B
agccgcccuccccg

SEQ ID NO: 2044311 - RNA, 17 nt, Human herpesvirus 6B
auguagcacacgacaaa

SEQ ID NO: 2044312 - RNA, 22 nt, Human herpesvirus 6B
aaugacgaccauacguggugau

SEQ ID NO: 2044313 - RNA, 21 nt, Human herpesvirus 6B
uugcauauuauaaggucauuu

SEQ ID NO: 2044314 - RNA, 15 nt, Human herpesvirus 6B
ugacuacugugucca

SEQ ID NO: 2044315 - RNA, 18 nt, Human herpesvirus 6B
ccgcauacacccugccga

SEQ ID NO: 2044316 - RNA, 14 nt, Human herpesvirus 6B
ggagcuuuuucaaa

SEQ ID NO: 2044317 - RNA, 14 nt, Human herpesvirus 6B
uauaaauguagcac

SEQ ID NO: 2044318 - RNA, 18 nt, Human herpesvirus 6B
auuuauaccaaacgugaa

SEQ ID NO: 2044319 - RNA, 13 nt, Human herpesvirus 6B
acgcaaagggaag

SEQ ID NO: 2044320 - RNA, 20 nt, Human herpesvirus 6B
agggaggagagggagaaacg

SEQ ID NO: 2044321 - RNA, 17 nt, Human herpesvirus 6B
gugaucauaggacagag

SEQ ID NO: 2044322 - RNA, 15 nt, Human herpesvirus 6B
aauguucuucugaaa

SEQ ID NO: 2044323 - RNA, 15 nt, Human herpesvirus 6B
augacgaagggagug

SEQ ID NO: 2044324 - RNA, 14 nt, Human herpesvirus 6B
uggcgggcaccgag

SEQ ID NO: 2044325 - RNA, 13 nt, Human herpesvirus 6B
auggggcuacuac

SEQ ID NO: 2044326 - RNA, 21 nt, Human herpesvirus 6B
auuuggcagccucuugugcaa

SEQ ID NO: 2044327 - RNA, 19 nt, Human herpesvirus 6B
uauuuaaaccagucuucua

SEQ ID NO: 2044328 - RNA, 23 nt, Human herpesvirus 6B
acugugguguuugauuuucagag

SEQ ID NO: 2044329 - RNA, 20 nt, Human herpesvirus 6B
auuuaaaaaugauaacuguu

SEQ ID NO: 2044330 - RNA, 15 nt, Human herpesvirus 6B
agaauacgaacagaa

SEQ ID NO: 2044331 - RNA, 14 nt, Human herpesvirus 6B
uuagaagcauuugc

SEQ ID NO: 2044332 - RNA, 16 nt, Human herpesvirus 6B
gagacugcccuggggu

SEQ ID NO: 2044333 - RNA, 18 nt, Human herpesvirus 6B
uuugauguugucuucugu

SEQ ID NO: 2044334 - RNA, 16 nt, Human herpesvirus 6B
uguuguucuuggagac

SEQ ID NO: 2044335 - RNA, 19 nt, Human herpesvirus 6B
aguauuuaugcuucauaau

SEQ ID NO: 2044336 - RNA, 16 nt, Human herpesvirus 6B
aucaacacaccugccu

SEQ ID NO: 2044337 - RNA, 13 nt, Human herpesvirus 6B
uggggucuuuccu

SEQ ID NO: 2044338 - RNA, 17 nt, Human herpesvirus 6B
uuucuguuuuucucaua

SEQ ID NO: 2044339 - RNA, 22 nt, Human herpesvirus 6B
uaaaacggauaguuaaaaguug

SEQ ID NO: 2044340 - RNA, 21 nt, Human herpesvirus 6B
gugaguuuucaugugaaauua

SEQ ID NO: 2044341 - RNA, 15 nt, Human herpesvirus 6B
ucugcauuuauauca

SEQ ID NO: 2044342 - RNA, 22 nt, Human herpesvirus 6B
aaugagaaucguaguuuuguuc

SEQ ID NO: 2044343 - RNA, 14 nt, Human herpesvirus 6B
ucccucuucccucu

SEQ ID NO: 2044344 - RNA, 22 nt, Human herpesvirus 6B
uugaggaaaugcagcaguuuuu

SEQ ID NO: 2044345 - RNA, 23 nt, Human herpesvirus 6B
cucgccgccucgccgcucccgcu

SEQ ID NO: 2044346 - RNA, 15 nt, Human herpesvirus 6B
ggugacuacuguguc

SEQ ID NO: 2044347 - RNA, 14 nt, Human herpesvirus 6B
auuaaaguuuacug

SEQ ID NO: 2044348 - RNA, 18 nt, Human herpesvirus 6B
agaccaauuuagauucga

SEQ ID NO: 2044349 - RNA, 19 nt, Human herpesvirus 6B
caaaaaaaaaugacugaua

SEQ ID NO: 2044350 - RNA, 19 nt, Human herpesvirus 6B
guagaaacguuaauguuua

SEQ ID NO: 2044351 - RNA, 17 nt, Human herpesvirus 6B
uuaguugugcgucucuu

SEQ ID NO: 2044352 - RNA, 21 nt, Human herpesvirus 6B
guccuccgcaaguuuucagca

SEQ ID NO: 2044353 - RNA, 18 nt, Human herpesvirus 6B
acuaccgaugcucucaga

SEQ ID NO: 2044354 - RNA, 21 nt, Human herpesvirus 6B
guggaaacgguuucaaagagu

SEQ ID NO: 2044355 - RNA, 14 nt, Human herpesvirus 6B
uucgauuaugugag

SEQ ID NO: 2044356 - RNA, 12 nt, Human herpesvirus 6B
agaucaucgcca

SEQ ID NO: 2044357 - RNA, 16 nt, Human herpesvirus 6B
cgaaauauaaaaccaa

SEQ ID NO: 2044358 - RNA, 19 nt, Human herpesvirus 6B
gagggagaaacggacacgc

SEQ ID NO: 2044359 - RNA, 11 nt, Human herpesvirus 6B
uguccugagaa

SEQ ID NO: 2044360 - RNA, 15 nt, Human herpesvirus 6B
cagaucgagaauaau

SEQ ID NO: 2044361 - RNA, 21 nt, Human herpesvirus 6B
gcugcgggcuuaauaaaggau

SEQ ID NO: 2044362 - RNA, 17 nt, Human herpesvirus 6B
uauaaaugugagcaguu

SEQ ID NO: 2044363 - RNA, 17 nt, Human herpesvirus 6B
aaucgaugcuggccuga

SEQ ID NO: 2044364 - RNA, 17 nt, Human herpesvirus 6B
agggucgaacccugaga

SEQ ID NO: 2044365 - RNA, 19 nt, Human herpesvirus 6B
agugauuauggugccucag

SEQ ID NO: 2044366 - RNA, 12 nt, Human herpesvirus 6B
ggcgggcacgga

SEQ ID NO: 2044367 - RNA, 13 nt, Human herpesvirus 6B
gugucucaaccuu

SEQ ID NO: 2044368 - RNA, 19 nt, Human herpesvirus 6B
cguuacaguaaaaaagccg

SEQ ID NO: 2044369 - RNA, 18 nt, Human herpesvirus 6B
cagacaaauggaaacugg

SEQ ID NO: 2044370 - RNA, 18 nt, Human herpesvirus 6B
aaaauauuggauuuuacg

SEQ ID NO: 2044371 - RNA, 20 nt, Human herpesvirus 6B
cagggacgcuugcuguaaag

SEQ ID NO: 2044372 - RNA, 22 nt, Human herpesvirus 6B
uaccauuuuauacgaaaauaaa

SEQ ID NO: 2044373 - RNA, 14 nt, Human herpesvirus 6B
cgcagcagcagcuc

SEQ ID NO: 2044374 - RNA, 14 nt, Human herpesvirus 6B
acauagaguguuug

SEQ ID NO: 2044375 - RNA, 23 nt, Human herpesvirus 6B
gacagggggaucgacgaccaggc

SEQ ID NO: 2044376 - RNA, 14 nt, Human herpesvirus 6B
cgguccccccuccc

SEQ ID NO: 2044377 - RNA, 15 nt, Human herpesvirus 6B
uguuauaucuggaua

SEQ ID NO: 2044378 - RNA, 18 nt, Human herpesvirus 6B
cucggcgacgagccuugu

SEQ ID NO: 2044379 - RNA, 19 nt, Human herpesvirus 6B
gaaaugagcaacauuuaug

SEQ ID NO: 2044380 - RNA, 18 nt, Human herpesvirus 6B
acagagugcaucuuuaac

SEQ ID NO: 2044381 - RNA, 22 nt, Human herpesvirus 6B
ugagcagaagcugucuguguuu

SEQ ID NO: 2044382 - RNA, 18 nt, Human herpesvirus 6B
uaagacgagauguuucug

SEQ ID NO: 2044383 - RNA, 23 nt, Human herpesvirus 6B
guaucugccccccuucauccagc

SEQ ID NO: 2044384 - RNA, 17 nt, Human herpesvirus 6B
gcccucgucuguugcug

SEQ ID NO: 2044385 - RNA, 22 nt, Human herpesvirus 6B
gcugggacuccgagccggacag

SEQ ID NO: 2044386 - RNA, 15 nt, Human herpesvirus 6B
guguccugagaauga

SEQ ID NO: 2044387 - RNA, 18 nt, Human herpesvirus 6B
agaucuguuuaaugagaa

SEQ ID NO: 2044388 - RNA, 22 nt, Human herpesvirus 6B
gauugcgucacuguccaaagaa

SEQ ID NO: 2044389 - RNA, 22 nt, Human herpesvirus 6B
uucuucaaaaaaagaggaggaa

SEQ ID NO: 2044390 - RNA, 16 nt, Human herpesvirus 6B
auuuuaaacuuaacuu

SEQ ID NO: 2044391 - RNA, 13 nt, Human herpesvirus 6B
acacguuuaucca

SEQ ID NO: 2044392 - RNA, 15 nt, Human herpesvirus 6B
cucuugcaguggcgc

SEQ ID NO: 2044393 - RNA, 12 nt, Human herpesvirus 6B
acagaaauuuca

SEQ ID NO: 2044394 - RNA, 22 nt, Human herpesvirus 6B
aaacuagaugacuauuucuuua

SEQ ID NO: 2044395 - RNA, 16 nt, Human herpesvirus 6B
uauaguaagaggcuua

SEQ ID NO: 2044396 - RNA, 17 nt, Human herpesvirus 6B
ugugucggcuccgaaac

SEQ ID NO: 2044397 - RNA, 16 nt, Human herpesvirus 6B
guagcaagggagaaag

SEQ ID NO: 2044398 - RNA, 15 nt, Human herpesvirus 6B
aaaaugacugauauu

SEQ ID NO: 2044399 - RNA, 14 nt, Human herpesvirus 6B
cccaaacucuugca

SEQ ID NO: 2044400 - RNA, 16 nt, Human herpesvirus 6B
uaugauuuucaauauc

SEQ ID NO: 2044401 - RNA, 17 nt, Human herpesvirus 6B
gucuucauucuucgaau

SEQ ID NO: 2044402 - RNA, 12 nt, Human herpesvirus 6B
guauaauguaaa

SEQ ID NO: 2044403 - RNA, 23 nt, Human herpesvirus 6B
caguggcgcgcguuuuuggugaa

SEQ ID NO: 2044404 - RNA, 23 nt, Human herpesvirus 6B
cuugaauguuuaaaguuuuguga

SEQ ID NO: 2044405 - RNA, 14 nt, Human herpesvirus 6B
ggacggggccuccc

SEQ ID NO: 2044406 - RNA, 23 nt, Human herpesvirus 6B
gagcccauaacgauagcagcucu

SEQ ID NO: 2044407 - RNA, 20 nt, Human herpesvirus 6B
uaacauugugagaacagcgc

SEQ ID NO: 2044408 - RNA, 20 nt, Human herpesvirus 6B
cagaccguuaucggcauuga

SEQ ID NO: 2044409 - RNA, 19 nt, Human herpesvirus 6B
gcaccgccuccgccaccac

SEQ ID NO: 2044410 - RNA, 20 nt, Human herpesvirus 6B
uauuucugguuguguuaauc

SEQ ID NO: 2044411 - RNA, 17 nt, Human herpesvirus 6B
aaaacccggagaaucua

SEQ ID NO: 2044412 - RNA, 19 nt, Human herpesvirus 6B
caccccccucuugcagugg

SEQ ID NO: 2044413 - RNA, 15 nt, Human herpesvirus 6B
agacugcacagaauc

SEQ ID NO: 2044414 - RNA, 13 nt, Human herpesvirus 6B
cuguaagauuaaa

SEQ ID NO: 2044415 - RNA, 15 nt, Human herpesvirus 6B
aaacucuagaauuau

SEQ ID NO: 2044416 - RNA, 14 nt, Human herpesvirus 6B
cacggcgccuccca

SEQ ID NO: 2044417 - RNA, 13 nt, Human herpesvirus 6B
aguacaauacuuu

SEQ ID NO: 2044418 - RNA, 18 nt, Human herpesvirus 6B
caguaaaacauguagugg

SEQ ID NO: 2044419 - RNA, 21 nt, Human herpesvirus 6B
acaguauuuacugagcaaaga

SEQ ID NO: 2044420 - RNA, 20 nt, Human herpesvirus 6B
cuaagugugcguuauuuucu

SEQ ID NO: 2044421 - RNA, 21 nt, Human herpesvirus 6B
aacgaagguucgacuauguua

SEQ ID NO: 2044422 - RNA, 13 nt, Human herpesvirus 6B
cucuuccuucucg

SEQ ID NO: 2044423 - RNA, 19 nt, Human herpesvirus 6B
gccaguaucgcgagcacca

SEQ ID NO: 2044424 - RNA, 15 nt, Human herpesvirus 6B
cuuaagaagggcuuu

SEQ ID NO: 2044425 - RNA, 14 nt, Human herpesvirus 6B
uaaugaaauuuaag

SEQ ID NO: 2044426 - RNA, 13 nt, Human herpesvirus 6B
uuccccguccucg

SEQ ID NO: 2044427 - RNA, 21 nt, Human herpesvirus 6B
gcggggcgcaccggcgacacg

SEQ ID NO: 2044428 - RNA, 15 nt, Human herpesvirus 6B
uaacaauucucucaa

SEQ ID NO: 2044429 - RNA, 22 nt, Human herpesvirus 6B
uaacauagaaaaauaagacuua

SEQ ID NO: 2044430 - RNA, 16 nt, Human herpesvirus 6B
auguaucaaaguguau

SEQ ID NO: 2044431 - RNA, 20 nt, Human herpesvirus 6B
cuuuuuuucccgaaaaacuu

SEQ ID NO: 2044432 - RNA, 20 nt, Human herpesvirus 6B
ucucaaaaaggguuuucuga

SEQ ID NO: 2044433 - RNA, 15 nt, Human herpesvirus 6B
uuacaagggaaaucc

SEQ ID NO: 2044434 - RNA, 20 nt, Human herpesvirus 6B
acaaugccaacacuguuguu

SEQ ID NO: 2044435 - RNA, 20 nt, Human herpesvirus 6B
uuucgacgaucgcgaagccu

SEQ ID NO: 2044436 - RNA, 21 nt, Human herpesvirus 6B
aauuugaauucugcucguuug

SEQ ID NO: 2044437 - RNA, 24 nt, Human herpesvirus 6B
ucgauaucucaccuaugaauaucu

SEQ ID NO: 2044438 - RNA, 16 nt, Human herpesvirus 6B
ggacacgcgcggugga

SEQ ID NO: 2044439 - RNA, 17 nt, Human herpesvirus 6B
gccucaggguuggaguu

SEQ ID NO: 2044440 - RNA, 17 nt, Human herpesvirus 6B
gucucauguugauuuua

SEQ ID NO: 2044441 - RNA, 17 nt, Human herpesvirus 6B
aaggagaauuugcaguu

SEQ ID NO: 2044442 - RNA, 22 nt, Human herpesvirus 6B
gacacaucgugaguuuucaugu

SEQ ID NO: 2044443 - RNA, 21 nt, Human herpesvirus 6B
acgucauguacggacagguuu

SEQ ID NO: 2044444 - RNA, 16 nt, Human herpesvirus 6B
uaucaacuauacuuaa

SEQ ID NO: 2044445 - RNA, 16 nt, Human herpesvirus 6B
auggaagacagucaaa

SEQ ID NO: 2044446 - RNA, 12 nt, Human herpesvirus 6B
ugucgaaucuca

SEQ ID NO: 2044447 - RNA, 13 nt, Human herpesvirus 6B
cucacccagaguu

SEQ ID NO: 2044448 - RNA, 19 nt, Human herpesvirus 6B
caucgcaagcccggagaac

SEQ ID NO: 2044449 - RNA, 14 nt, Human herpesvirus 6B
cacgucguggcaga

SEQ ID NO: 2044450 - RNA, 18 nt, Human herpesvirus 6B
augcaggguguggccggc

SEQ ID NO: 2044451 - RNA, 13 nt, Human herpesvirus 6B
auaauuacagaug

SEQ ID NO: 2044452 - RNA, 13 nt, Human herpesvirus 6B
gagcucaaagaga

SEQ ID NO: 2044453 - RNA, 14 nt, Human herpesvirus 6B
gccagcccugaaga

SEQ ID NO: 2044454 - RNA, 22 nt, Human herpesvirus 6B
caggagaaacuuguaaggcuua

SEQ ID NO: 2044455 - RNA, 16 nt, Human herpesvirus 6B
ucaagggcaagguucu

SEQ ID NO: 2044456 - RNA, 22 nt, Human herpesvirus 6B
uccacaccaaaaaagacgguuc

SEQ ID NO: 2044457 - RNA, 13 nt, Human herpesvirus 6B
ugacguuugcaua

SEQ ID NO: 2044458 - RNA, 19 nt, Human herpesvirus 6B
auucugcauuuauaucaaa

SEQ ID NO: 2044459 - RNA, 17 nt, Human herpesvirus 6B
gcgcggagcacgcacga

SEQ ID NO: 2044460 - RNA, 13 nt, Human herpesvirus 6B
aauaauugcauuu

SEQ ID NO: 2044461 - RNA, 17 nt, Human herpesvirus 6B
aucuuauuccaguggag

SEQ ID NO: 2044462 - RNA, 21 nt, Human herpesvirus 6B
gacgguucaaacgguaaacau

SEQ ID NO: 2044463 - RNA, 16 nt, Human herpesvirus 6B
agaaauucuccuguag

SEQ ID NO: 2044464 - RNA, 20 nt, Human herpesvirus 6B
aaaaguuaguuuuggauggc

SEQ ID NO: 2044465 - RNA, 14 nt, Human herpesvirus 6B
acuuuaccucugcu

SEQ ID NO: 2044466 - RNA, 18 nt, Human herpesvirus 6B
gagcccugagagcaggag

SEQ ID NO: 2044467 - RNA, 16 nt, Human herpesvirus 6B
guccccgccgcgcugg

SEQ ID NO: 2044468 - RNA, 14 nt, Human herpesvirus 6B
aaaaucugcuaacg

SEQ ID NO: 2044469 - RNA, 23 nt, Human herpesvirus 6B
aucccagaugcagucuccacagg

SEQ ID NO: 2044470 - RNA, 24 nt, Human herpesvirus 6B
uaaacuguucuuucaaaaugacca

SEQ ID NO: 2044471 - RNA, 21 nt, Human herpesvirus 6B
uaacugguucaggauuuguaa

SEQ ID NO: 2044472 - RNA, 21 nt, Human herpesvirus 6B
cuaacaauaauugcauuuugg

SEQ ID NO: 2044473 - RNA, 18 nt, Human herpesvirus 6B
aaacgauuauugcuacaa

SEQ ID NO: 2044474 - RNA, 17 nt, Human herpesvirus 6B
uaauaucgaauucagcu

SEQ ID NO: 2044475 - RNA, 20 nt, Human herpesvirus 6B
cauucugcauuuauaucaaa

SEQ ID NO: 2044476 - RNA, 22 nt, Human herpesvirus 6B
ggcggagcacccggggaggcga

SEQ ID NO: 2044477 - RNA, 14 nt, Human herpesvirus 6B
aaaauuuuucugua

SEQ ID NO: 2044478 - RNA, 16 nt, Human herpesvirus 6B
gagaucagcaugggca

SEQ ID NO: 2044479 - RNA, 14 nt, Human herpesvirus 6B
uuacauaacauaga

SEQ ID NO: 2044480 - RNA, 17 nt, Human herpesvirus 6B
gaaauauccguuuaguu

SEQ ID NO: 2044481 - RNA, 13 nt, Human herpesvirus 6B
acuuuuucaauug

SEQ ID NO: 2044482 - RNA, 23 nt, Human herpesvirus 6B
ugagacgccuauucuaauuauaa

SEQ ID NO: 2044483 - RNA, 21 nt, Human herpesvirus 6B
uccagcagcggucugcaccuc

SEQ ID NO: 2044484 - RNA, 17 nt, Human herpesvirus 6B
gaugaaaguuuuggaaa

SEQ ID NO: 2044485 - RNA, 15 nt, Human herpesvirus 6B
ggacagacaggggga

SEQ ID NO: 2044486 - RNA, 14 nt, Human herpesvirus 6B
guuaaaauguguua

SEQ ID NO: 2044487 - RNA, 22 nt, Human herpesvirus 6B
agcuuuaucccaaaauauaauu

SEQ ID NO: 2044488 - RNA, 19 nt, Human herpesvirus 6B
cacuugucgccaaugcaau

SEQ ID NO: 2044489 - RNA, 15 nt, Human herpesvirus 6B
ucgggcgacgggcag

SEQ ID NO: 2044490 - RNA, 19 nt, Human herpesvirus 6B
gccauccacccauauaccc

SEQ ID NO: 2044491 - RNA, 14 nt, Human herpesvirus 6B
aucuccaaaagcgc

SEQ ID NO: 2044492 - RNA, 21 nt, Human herpesvirus 6B
cgccgucgucgcucucccucu

SEQ ID NO: 2044493 - RNA, 14 nt, Human herpesvirus 6B
gaaaucuuuccugc

SEQ ID NO: 2044494 - RNA, 21 nt, Human herpesvirus 6B
aauucuuaccuuuuaagagug

SEQ ID NO: 2044495 - RNA, 15 nt, Human herpesvirus 6B
ucacuuuuugaagag

SEQ ID NO: 2044496 - RNA, 16 nt, Human herpesvirus 6B
cuugcacggaaucucu

SEQ ID NO: 2044497 - RNA, 22 nt, Human herpesvirus 6B
gugauuccuucggggacaguga

SEQ ID NO: 2044498 - RNA, 13 nt, Human herpesvirus 6B
gggaggaggagga

SEQ ID NO: 2044499 - RNA, 21 nt, Human herpesvirus 6B
aguccaucgaguaucgugucu

SEQ ID NO: 2044500 - RNA, 12 nt, Human herpesvirus 6B
guuauaugaaug

SEQ ID NO: 2044501 - RNA, 17 nt, Human herpesvirus 6B
ucugcguugcccucccg

SEQ ID NO: 2044502 - RNA, 13 nt, Human herpesvirus 6B
agggcgggcggac

SEQ ID NO: 2044503 - RNA, 15 nt, Human herpesvirus 6B
ucauauauugaaauu

SEQ ID NO: 2044504 - RNA, 22 nt, Human herpesvirus 6B
gcacuuuuuucuaaaacccgga

SEQ ID NO: 2044505 - RNA, 14 nt, Human herpesvirus 6B
uaaaguuuacugug

SEQ ID NO: 2044506 - RNA, 19 nt, Human herpesvirus 6B
auugacggguauuuuacau

SEQ ID NO: 2044507 - RNA, 17 nt, Human herpesvirus 6B
cauugauaguggcuuca

SEQ ID NO: 2044508 - RNA, 14 nt, Human herpesvirus 6B
cgaccucgcucucc

SEQ ID NO: 2044509 - RNA, 13 nt, Human herpesvirus 6B
cggacagagcgga

SEQ ID NO: 2044510 - RNA, 14 nt, Human herpesvirus 6B
aucuccaaaacacu

SEQ ID NO: 2044511 - RNA, 22 nt, Human herpesvirus 6B
uaucugaaaucgcauuucucua

SEQ ID NO: 2044512 - RNA, 13 nt, Human herpesvirus 6B
gguucgacagaga

SEQ ID NO: 2044513 - RNA, 23 nt, Human herpesvirus 6B
agccuguccgugacacacagaau

SEQ ID NO: 2044514 - RNA, 17 nt, Human herpesvirus 6B
cuccgucgccgcuccgg

SEQ ID NO: 2044515 - RNA, 18 nt, Human herpesvirus 6B
ggaugcagcguuggaaag

SEQ ID NO: 2044516 - RNA, 21 nt, Human herpesvirus 6B
aacaaaucucaagaaacaagu

SEQ ID NO: 2044517 - RNA, 17 nt, Human herpesvirus 6B
aauuuaaacagaaauuu

SEQ ID NO: 2044518 - RNA, 17 nt, Human herpesvirus 6B
aagaagggcagagagcc

SEQ ID NO: 2044519 - RNA, 19 nt, Human herpesvirus 6B
gauauaguuauucagauuu

SEQ ID NO: 2044520 - RNA, 15 nt, Human herpesvirus 6B
aacauguauucuccu

SEQ ID NO: 2044521 - RNA, 16 nt, Human herpesvirus 6B
cuguaaaaaaaauucu

SEQ ID NO: 2044522 - RNA, 23 nt, Human herpesvirus 6B
ugauuccguugugacagaauuau

SEQ ID NO: 2044523 - RNA, 21 nt, Human herpesvirus 6B
cauugaguagagcuuugagca

SEQ ID NO: 2044524 - RNA, 13 nt, Human herpesvirus 6B
agggacgcuugcu

SEQ ID NO: 2044525 - RNA, 22 nt, Human herpesvirus 6B
acugugaggugauuugaacaga

SEQ ID NO: 2044526 - RNA, 18 nt, Human herpesvirus 6B
cuggccaaucauaagaaa

SEQ ID NO: 2044527 - RNA, 16 nt, Human herpesvirus 6B
aucaaacaacuguugu

SEQ ID NO: 2044528 - RNA, 23 nt, Human herpesvirus 6B
uuacauaacauagaaaaauaaga

SEQ ID NO: 2044529 - RNA, 16 nt, Human herpesvirus 6B
caaaaaaaugauagac

SEQ ID NO: 2044530 - RNA, 16 nt, Human herpesvirus 6B
uugacaauaaacauga

SEQ ID NO: 2044531 - RNA, 23 nt, Human herpesvirus 6B
gcuccauaaugguaugccugagc

SEQ ID NO: 2044532 - RNA, 22 nt, Human herpesvirus 6B
auuucguguaucggcagugcaa

SEQ ID NO: 2044533 - RNA, 13 nt, Human herpesvirus 6B
uuaaaagugcaac

SEQ ID NO: 2044534 - RNA, 19 nt, Human herpesvirus 6B
uucaccccccucuugcagu

SEQ ID NO: 2044535 - RNA, 21 nt, Human herpesvirus 6B
cuguucaugcgaauuaaaacu

SEQ ID NO: 2044536 - RNA, 16 nt, Human herpesvirus 6B
uauuaacaauuuugau

SEQ ID NO: 2044537 - RNA, 18 nt, Human herpesvirus 6B
uugaauguuuaaaguuuu

SEQ ID NO: 2044538 - RNA, 20 nt, Human herpesvirus 6B
uauuucgaucagauuaucaa

SEQ ID NO: 2044539 - RNA, 21 nt, Human herpesvirus 6B
ggaacacgucguggcagaaca

SEQ ID NO: 2044540 - RNA, 15 nt, Human herpesvirus 6B
uguucgccucucccg

SEQ ID NO: 2044541 - RNA, 17 nt, Human herpesvirus 6B
ugagggagaugaagagu

SEQ ID NO: 2044542 - RNA, 18 nt, Human herpesvirus 6B
cggcgaagggacacgaga

SEQ ID NO: 2044543 - RNA, 17 nt, Human herpesvirus 6B
auggauuacaagggaaa

SEQ ID NO: 2044544 - RNA, 11 nt, Human herpesvirus 6B
guaccaacaug

SEQ ID NO: 2044545 - RNA, 23 nt, Human herpesvirus 6B
cugauuuucagugucagcauugu

SEQ ID NO: 2044546 - RNA, 23 nt, Human herpesvirus 6B
aaaaagaauggaagcgugguaga

SEQ ID NO: 2044547 - RNA, 15 nt, Human herpesvirus 6B
ucacguacuuaugau

SEQ ID NO: 2044548 - RNA, 22 nt, Human herpesvirus 6B
ugcuacccggcgguuuugcgau

SEQ ID NO: 2044549 - RNA, 16 nt, Human herpesvirus 6B
gaucauaggacagagg

SEQ ID NO: 2044550 - RNA, 19 nt, Human herpesvirus 6B
ggccgaguuuagacagagu

SEQ ID NO: 2044551 - RNA, 23 nt, Human herpesvirus 6B
gcguuucucgccaugggugucag

SEQ ID NO: 2044552 - RNA, 17 nt, Human herpesvirus 6B
ggagugcgacaggagau

SEQ ID NO: 2044553 - RNA, 15 nt, Human herpesvirus 6B
auugugacaagguau

SEQ ID NO: 2044554 - RNA, 20 nt, Human herpesvirus 6B
accgagagccggaaaacaau

SEQ ID NO: 2044555 - RNA, 18 nt, Human herpesvirus 6B
auuagcauucaaguccaa

SEQ ID NO: 2044556 - RNA, 22 nt, Human herpesvirus 6B
agcgggguugcuauagcagcgc

SEQ ID NO: 2044557 - RNA, 16 nt, Human herpesvirus 6B
gccggucggggagggg

SEQ ID NO: 2044558 - RNA, 23 nt, Human herpesvirus 6B
gccuccgccggguaugagccgcc

SEQ ID NO: 2044559 - RNA, 16 nt, Human herpesvirus 6B
ggcgcuuccuguucua

SEQ ID NO: 2044560 - RNA, 19 nt, Human herpesvirus 6B
augucaacgaaaaaaugac

SEQ ID NO: 2044561 - RNA, 13 nt, Human herpesvirus 6B
cuccucccacgcc

SEQ ID NO: 2044562 - RNA, 21 nt, Human herpesvirus 6B
aaguuccacaucuaugaugcu

SEQ ID NO: 2044563 - RNA, 19 nt, Human herpesvirus 6B
uuuauuuucguauaaaaug

SEQ ID NO: 2044564 - RNA, 15 nt, Human herpesvirus 6B
cagcccugaagaaga

SEQ ID NO: 2044565 - RNA, 12 nt, Human herpesvirus 6B
aguauggaaacg

SEQ ID NO: 2044566 - RNA, 22 nt, Human herpesvirus 6B
ggacccgagguccgacacgccc

SEQ ID NO: 2044567 - RNA, 13 nt, Human herpesvirus 6B
acucaaagaaagc

SEQ ID NO: 2044568 - RNA, 17 nt, Human herpesvirus 6B
gaauguugauauggagc

SEQ ID NO: 2044569 - RNA, 13 nt, Human herpesvirus 6B
ucuccugcaauuu

SEQ ID NO: 2044570 - RNA, 15 nt, Human herpesvirus 6B
ccuggaagaaggaaa

SEQ ID NO: 2044571 - RNA, 15 nt, Human herpesvirus 6B
caaaaugggaauuuc

SEQ ID NO: 2044572 - RNA, 21 nt, Human herpesvirus 6B
uccucaaacuuuuagagacuu

SEQ ID NO: 2044573 - RNA, 20 nt, Human herpesvirus 6B
aggugauuuuuauuguaaac

SEQ ID NO: 2044574 - RNA, 16 nt, Human herpesvirus 6B
uauuagaucuucuuca

SEQ ID NO: 2044575 - RNA, 15 nt, Human herpesvirus 6B
gcauacagcaugaac

SEQ ID NO: 2044576 - RNA, 18 nt, Human herpesvirus 6B
ugagagcaggagcaggcu

SEQ ID NO: 2044577 - RNA, 19 nt, Human herpesvirus 6B
ugaauauucacaagaagau

SEQ ID NO: 2044578 - RNA, 14 nt, Human herpesvirus 6B
cgggccagcccuga

SEQ ID NO: 2044579 - RNA, 14 nt, Human herpesvirus 6B
ugcuaaaugugaua

SEQ ID NO: 2044580 - RNA, 17 nt, Human herpesvirus 6B
ccguucccuucucgucu

SEQ ID NO: 2044581 - RNA, 15 nt, Human herpesvirus 6B
ucgauccaaaagauu

SEQ ID NO: 2044582 - RNA, 16 nt, Human herpesvirus 6B
gauuguucgcuugugu

SEQ ID NO: 2044583 - RNA, 15 nt, Human herpesvirus 6B
cggcgaggggacgga

SEQ ID NO: 2044584 - RNA, 18 nt, Human herpesvirus 6B
agcaccccacaaaacuua

SEQ ID NO: 2044585 - RNA, 23 nt, Human herpesvirus 6B
auuaaaguuuucauaaaaacgac

SEQ ID NO: 2044586 - RNA, 17 nt, Human herpesvirus 6B
caacgugugaaaacuag

SEQ ID NO: 2044587 - RNA, 16 nt, Human herpesvirus 6B
ucuccugugcguccuc

SEQ ID NO: 2044588 - RNA, 18 nt, Human herpesvirus 6B
aaaaccaaaaaaaaagug

SEQ ID NO: 2044589 - RNA, 15 nt, Human herpesvirus 6B
cggcggcugucgccg

SEQ ID NO: 2044590 - RNA, 15 nt, Human herpesvirus 6B
gcacgaaccaaaaug

SEQ ID NO: 2044591 - RNA, 17 nt, Human herpesvirus 6B
uaagccuauugacauga

SEQ ID NO: 2044592 - RNA, 22 nt, Human herpesvirus 6B
guuugaguugggacuuggaaac

SEQ ID NO: 2044593 - RNA, 19 nt, Human herpesvirus 6B
gcgguggugaucggcagau

SEQ ID NO: 2044594 - RNA, 15 nt, Human herpesvirus 6B
ggcucucugcccuuc

SEQ ID NO: 2044595 - RNA, 17 nt, Human herpesvirus 6B
cuaauaaaauauaacgc

SEQ ID NO: 2044596 - RNA, 20 nt, Human herpesvirus 6B
uucacuaacaaaaaaaucgu

SEQ ID NO: 2044597 - RNA, 19 nt, Human herpesvirus 6B
auuucauagauugcacgcu

SEQ ID NO: 2044598 - RNA, 10 nt, Human herpesvirus 6B
uauguuucua

SEQ ID NO: 2044599 - RNA, 20 nt, Human herpesvirus 6B
cucaaggucaaaaaacucag

SEQ ID NO: 2044600 - RNA, 22 nt, Human herpesvirus 6B
gaauauuuaaugacguaugauu

SEQ ID NO: 2044601 - RNA, 21 nt, Human herpesvirus 6B
agacaguuuacuaaaaaagau

SEQ ID NO: 2044602 - RNA, 16 nt, Human herpesvirus 6B
aagauccaauggauuu

SEQ ID NO: 2044603 - RNA, 22 nt, Human herpesvirus 6B
auggaucaaucuccaaaacacu

SEQ ID NO: 2044604 - RNA, 20 nt, Human herpesvirus 6B
gccgcguggaagccgcugca

SEQ ID NO: 2044605 - RNA, 17 nt, Human herpesvirus 6B
aggaagaucaugacaag

SEQ ID NO: 2044606 - RNA, 19 nt, Human herpesvirus 6B
ugguuuuucgauguuucca

SEQ ID NO: 2044607 - RNA, 18 nt, Human herpesvirus 6B
auaacucuuggauugcag

SEQ ID NO: 2044608 - RNA, 16 nt, Human herpesvirus 6B
ugcucauggaucaggu

SEQ ID NO: 2044609 - RNA, 17 nt, Human herpesvirus 6B
aacgcuccucccacgcc

SEQ ID NO: 2044610 - RNA, 14 nt, Human herpesvirus 6B
uggauaugagugaa

SEQ ID NO: 2044611 - RNA, 15 nt, Human herpesvirus 6B
aggcaaaguauucuu

SEQ ID NO: 2044612 - RNA, 14 nt, Human herpesvirus 6B
acuaaauuuuaugc

SEQ ID NO: 2044613 - RNA, 11 nt, Human herpesvirus 6B
gucucuagacg

SEQ ID NO: 2044614 - RNA, 13 nt, Human herpesvirus 6B
uccaaucacgaaa

SEQ ID NO: 2044615 - RNA, 19 nt, Human herpesvirus 6B
cacguucuuugaacaguga

SEQ ID NO: 2044616 - RNA, 14 nt, Human herpesvirus 6B
cguccguccccgcc

SEQ ID NO: 2044617 - RNA, 15 nt, Human herpesvirus 6B
cuuugauccauuuuc

SEQ ID NO: 2044618 - RNA, 21 nt, Human herpesvirus 6B
ucaagcuucacgugauuugua

SEQ ID NO: 2044619 - RNA, 23 nt, Human herpesvirus 6B
ggggaggcgacgacggggacuac

SEQ ID NO: 2044620 - RNA, 19 nt, Human herpesvirus 6B
acacgucguggcagaacag

SEQ ID NO: 2044621 - RNA, 19 nt, Human herpesvirus 6B
aagaaguuguuuagaaagc

SEQ ID NO: 2044622 - RNA, 19 nt, Human herpesvirus 6B
aguguuugccaaccaaaug

SEQ ID NO: 2044623 - RNA, 18 nt, Human herpesvirus 6B
auaugcuuuuuuuugugg

SEQ ID NO: 2044624 - RNA, 18 nt, Human herpesvirus 6B
cuaaucaagaaaccuguu

SEQ ID NO: 2044625 - RNA, 16 nt, Human herpesvirus 6B
agacuggacaguguuu

SEQ ID NO: 2044626 - RNA, 15 nt, Human herpesvirus 6B
acgaaaacuuuuugc

SEQ ID NO: 2044627 - RNA, 14 nt, Human herpesvirus 6B
auggguuaggguua

SEQ ID NO: 2044628 - RNA, 21 nt, Human herpesvirus 6B
gccgauagcggccgggcgacg

SEQ ID NO: 2044629 - RNA, 21 nt, Human herpesvirus 6B
uggccaaucauaagaaacuca

SEQ ID NO: 2044630 - RNA, 19 nt, Human herpesvirus 6B
cuaaacugaagaauggaaa

SEQ ID NO: 2044631 - RNA, 15 nt, Human herpesvirus 6B
caauuuugauuuaaa

SEQ ID NO: 2044632 - RNA, 17 nt, Human herpesvirus 6B
uacgcuggaaacuaaac

SEQ ID NO: 2044633 - RNA, 13 nt, Human herpesvirus 6B
aaacggagacugc

SEQ ID NO: 2044634 - RNA, 21 nt, Human herpesvirus 6B
uauuucuuuuuaaaaucaaaa

SEQ ID NO: 2044635 - RNA, 17 nt, Human herpesvirus 6B
aaagguguggugaaaga

SEQ ID NO: 2044636 - RNA, 14 nt, Human herpesvirus 6B
uauuuuauuuugug

SEQ ID NO: 2044637 - RNA, 18 nt, Human herpesvirus 6B
ucccccgaacgccuccac

SEQ ID NO: 2044638 - RNA, 17 nt, Human herpesvirus 6B
acacaacuguuaccgaa

SEQ ID NO: 2044639 - RNA, 15 nt, Human herpesvirus 6B
agaucuggauaaaga

SEQ ID NO: 2044640 - RNA, 23 nt, Human herpesvirus 6B
aaagauuagauuaggggagagac

SEQ ID NO: 2044641 - RNA, 18 nt, Human herpesvirus 6B
agccuaaacggagacugc

SEQ ID NO: 2044642 - RNA, 17 nt, Human herpesvirus 6B
aauauugguauugauuu

SEQ ID NO: 2044643 - RNA, 15 nt, Human herpesvirus 6B
uucuuugaacaguga

SEQ ID NO: 2044644 - RNA, 13 nt, Human herpesvirus 6B
gagcacuugggga

SEQ ID NO: 2044645 - RNA, 20 nt, Human herpesvirus 6B
ugaauaucuuuauaaaucau

SEQ ID NO: 2044646 - RNA, 20 nt, Human herpesvirus 6B
acuacuguguccaguguuac

SEQ ID NO: 2044647 - RNA, 23 nt, Human herpesvirus 6B
agaaaaagaacugucgcaucaau

SEQ ID NO: 2044648 - RNA, 21 nt, Human herpesvirus 6B
uauauugcucaaaauuggcau

SEQ ID NO: 2044649 - RNA, 15 nt, Human herpesvirus 6B
uguaauuuugaaauu

SEQ ID NO: 2044650 - RNA, 19 nt, Human herpesvirus 6B
aaaucgguuaaagaaucug

SEQ ID NO: 2044651 - RNA, 16 nt, Human herpesvirus 6B
agguguauuugaaaug

SEQ ID NO: 2044652 - RNA, 21 nt, Human herpesvirus 6B
uccuuaaaugacacagaaucu

SEQ ID NO: 2044653 - RNA, 20 nt, Human herpesvirus 6B
gggaugugcggagaaaggga

SEQ ID NO: 2044654 - RNA, 19 nt, Human herpesvirus 6B
agaaagaacuuuuggaugu

SEQ ID NO: 2044655 - RNA, 14 nt, Human herpesvirus 6B
uuaacuguuucuuc

SEQ ID NO: 2044656 - RNA, 13 nt, Human herpesvirus 6B
guuauuagacacc

SEQ ID NO: 2044657 - RNA, 22 nt, Human herpesvirus 6B
gcagaugcuuaccgguguuuua

SEQ ID NO: 2044658 - RNA, 23 nt, Human herpesvirus 6B
ggggacagugauuaggauguuug

SEQ ID NO: 2044659 - RNA, 17 nt, Human herpesvirus 6B
gcgaugcgccacaggga

SEQ ID NO: 2044660 - RNA, 21 nt, Human herpesvirus 6B
cuccguuacccgggagcuuca

SEQ ID NO: 2044661 - RNA, 18 nt, Human herpesvirus 6B
cgauccaguggcaauaau

SEQ ID NO: 2044662 - RNA, 20 nt, Human herpesvirus 6B
uggccgcuuucuuggcgccc

SEQ ID NO: 2044663 - RNA, 23 nt, Human herpesvirus 6B
auugacuacggcgguuaacuguu

SEQ ID NO: 2044664 - RNA, 9 nt, Human herpesvirus 6B
aggagaggg

SEQ ID NO: 2044665 - RNA, 20 nt, Human herpesvirus 6B
caguuuuuuguuucuggggg

SEQ ID NO: 2044666 - RNA, 17 nt, Human herpesvirus 6B
aucgucgaaaacaauuu

SEQ ID NO: 2044667 - RNA, 14 nt, Human herpesvirus 6B
gcaguaucaaucac

SEQ ID NO: 2044668 - RNA, 16 nt, Human herpesvirus 6B
agaauaagaucuacag

SEQ ID NO: 2044669 - RNA, 14 nt, Human herpesvirus 6B
aggggacggacaga

SEQ ID NO: 2044670 - RNA, 16 nt, Human herpesvirus 6B
ccgaacgccuccacgg

SEQ ID NO: 2044671 - RNA, 16 nt, Human herpesvirus 6B
cggcacauacacacgc

SEQ ID NO: 2044672 - RNA, 21 nt, Human herpesvirus 6B
auuuuguggcuauuugacaau

SEQ ID NO: 2044673 - RNA, 16 nt, Human herpesvirus 6B
auaugcgaauguuaaa

SEQ ID NO: 2044674 - RNA, 16 nt, Human herpesvirus 6B
gguguuugcagauaag

SEQ ID NO: 2044675 - RNA, 22 nt, Human herpesvirus 6B
agaguacuuucguuuacgaauu

SEQ ID NO: 2044676 - RNA, 16 nt, Human herpesvirus 6B
acgcgccgacucucuc

SEQ ID NO: 2044677 - RNA, 23 nt, Human herpesvirus 6B
ccgaacgguauuuuuagaugucg

SEQ ID NO: 2044678 - RNA, 13 nt, Human herpesvirus 6B
gcgaugcggcagu

SEQ ID NO: 2044679 - RNA, 22 nt, Human herpesvirus 6B
uaugaaaguguauuuggaugaa

SEQ ID NO: 2044680 - RNA, 21 nt, Human herpesvirus 6B
agcaggcuccccaggcgcagc

SEQ ID NO: 2044681 - RNA, 16 nt, Human herpesvirus 6B
aauguauuguucgcug

SEQ ID NO: 2044682 - RNA, 14 nt, Human herpesvirus 6B
gcauauauaugaau

SEQ ID NO: 2044683 - RNA, 15 nt, Human herpesvirus 6B
ugacugugaggugau

SEQ ID NO: 2044684 - RNA, 14 nt, Human herpesvirus 6B
cauagagcauccug

SEQ ID NO: 2044685 - RNA, 17 nt, Human herpesvirus 6B
ggcagggcgggcacgga

SEQ ID NO: 2044686 - RNA, 18 nt, Human herpesvirus 6B
ggaagaggaagggauggc

SEQ ID NO: 2044687 - RNA, 18 nt, Human herpesvirus 6B
aguggaaguguaaauguc

SEQ ID NO: 2044688 - RNA, 18 nt, Human herpesvirus 6B
ucgccauagugaaagagu

SEQ ID NO: 2044689 - RNA, 10 nt, Human herpesvirus 6B
aaaaacacuc

SEQ ID NO: 2044690 - RNA, 18 nt, Human herpesvirus 6B
caggauuauaaaaacaca

SEQ ID NO: 2044691 - RNA, 15 nt, Human herpesvirus 6B
caucuuaaauuucua

SEQ ID NO: 2044692 - RNA, 11 nt, Human herpesvirus 6B
uguagaagaag

SEQ ID NO: 2044693 - RNA, 20 nt, Human herpesvirus 6B
agagggagaaacggacacgc

SEQ ID NO: 2044694 - RNA, 23 nt, Human herpesvirus 6B
auagguucuauucguucagaaug

SEQ ID NO: 2044695 - RNA, 17 nt, Human herpesvirus 6B
uaaggcucgguaguaua

SEQ ID NO: 2044696 - RNA, 17 nt, Human herpesvirus 6B
gauaucaauuccuguga

SEQ ID NO: 2044697 - RNA, 22 nt, Human herpesvirus 6B
auacauccagaaaagcaaacau

SEQ ID NO: 2044698 - RNA, 14 nt, Human herpesvirus 6B
ccaggcgcagcagc

SEQ ID NO: 2044699 - RNA, 13 nt, Human herpesvirus 6B
cagcaaucagcag

SEQ ID NO: 2044700 - RNA, 14 nt, Human herpesvirus 6B
uuauacgaaaauaa

SEQ ID NO: 2044701 - RNA, 15 nt, Human herpesvirus 6B
uuccaugacugugag

SEQ ID NO: 2044702 - RNA, 14 nt, Human herpesvirus 6B
cuccuggguacggc

SEQ ID NO: 2044703 - RNA, 14 nt, Human herpesvirus 6B
caggcuccccaggc

SEQ ID NO: 2044704 - RNA, 16 nt, Human herpesvirus 6B
cuguacacaaaaaccg

SEQ ID NO: 2044705 - RNA, 16 nt, Human herpesvirus 6B
uccaucccccuccccg

SEQ ID NO: 2044706 - RNA, 14 nt, Human herpesvirus 6B
uaagguuguuuucg

SEQ ID NO: 2044707 - RNA, 15 nt, Human herpesvirus 6B
acauugugagaacag

SEQ ID NO: 2044708 - RNA, 17 nt, Human herpesvirus 6B
uucaauaaaaaacuuau

SEQ ID NO: 2044709 - RNA, 17 nt, Human herpesvirus 6B
gugccuauuaaugcuua

SEQ ID NO: 2044710 - RNA, 19 nt, Human herpesvirus 6B
agcaauucuuuugcgaaga

SEQ ID NO: 2044711 - RNA, 18 nt, Human herpesvirus 6B
augcuggcgcugcauaga

SEQ ID NO: 2044712 - RNA, 16 nt, Human herpesvirus 6B
ggccagcccugaagaa

SEQ ID NO: 2044713 - RNA, 23 nt, Human herpesvirus 6B
ccagauaggaaaagguugagaaa

SEQ ID NO: 2044714 - RNA, 22 nt, Human herpesvirus 6B
auauugagacguuuuucacagu

SEQ ID NO: 2044715 - RNA, 13 nt, Human herpesvirus 6B
uaugaaugugaga

SEQ ID NO: 2044716 - RNA, 22 nt, Human herpesvirus 6B
ucaggaauguaaugaauuauua

SEQ ID NO: 2044717 - RNA, 21 nt, Human herpesvirus 6B
uguucagacacaugucuucaa

SEQ ID NO: 2044718 - RNA, 21 nt, Human herpesvirus 6B
caguugucugcggaaauaauu

SEQ ID NO: 2044719 - RNA, 14 nt, Human herpesvirus 6B
guuaggaucagaca

SEQ ID NO: 2044720 - RNA, 23 nt, Human herpesvirus 6B
auuuuuguagcaauuuuaaauau

SEQ ID NO: 2044721 - RNA, 22 nt, Human herpesvirus 6B
cuuugagugguuuuuuggauaa

SEQ ID NO: 2044722 - RNA, 12 nt, Human herpesvirus 6B
ggacucugucuu

SEQ ID NO: 2044723 - RNA, 23 nt, Human herpesvirus 6B
aagguguuugaucuagauaaagu

SEQ ID NO: 2044724 - RNA, 19 nt, Human herpesvirus 6B
gagccuuuaaccauguuuu

SEQ ID NO: 2044725 - RNA, 17 nt, Human herpesvirus 6B
cgucaggaccagcucug

SEQ ID NO: 2044726 - RNA, 21 nt, Human herpesvirus 6B
ggaagcauacgucuguggcga

SEQ ID NO: 2044727 - RNA, 14 nt, Human herpesvirus 6B
uuaaaauguguuaa

SEQ ID NO: 2044728 - RNA, 21 nt, Human herpesvirus 6B
aagacuuuuaucaaauuugca

SEQ ID NO: 2044729 - RNA, 13 nt, Human herpesvirus 6B
cucucuucaggag

SEQ ID NO: 2044730 - RNA, 14 nt, Human herpesvirus 6B
cuucagaaagauug

SEQ ID NO: 2044731 - RNA, 15 nt, Human herpesvirus 6B
ccaucaaucucuaug

SEQ ID NO: 2044732 - RNA, 16 nt, Human herpesvirus 6B
ucgauuuagagaauau

SEQ ID NO: 2044733 - RNA, 15 nt, Human herpesvirus 6B
ucuauuugcaagaau

SEQ ID NO: 2044734 - RNA, 14 nt, Human herpesvirus 6B
uugcugguuugcuu

SEQ ID NO: 2044735 - RNA, 18 nt, Human herpesvirus 6B
ucaucaaauccucuacgu

SEQ ID NO: 2044736 - RNA, 13 nt, Human herpesvirus 6B
ggacggacagagc

SEQ ID NO: 2044737 - RNA, 23 nt, Human herpesvirus 6B
cugugaggugauuugaacagaga

SEQ ID NO: 2044738 - RNA, 13 nt, Human herpesvirus 6B
uucuguaccccaa

SEQ ID NO: 2044739 - RNA, 16 nt, Human herpesvirus 6B
guaaauccgaaacaca

SEQ ID NO: 2044740 - RNA, 14 nt, Human herpesvirus 6B
gagguuuuuucacc

SEQ ID NO: 2044741 - RNA, 20 nt, Human herpesvirus 6B
gccgucgucgcucucccucu

SEQ ID NO: 2044742 - RNA, 13 nt, Human herpesvirus 6B
auaagaguguaaa

SEQ ID NO: 2044743 - RNA, 19 nt, Human herpesvirus 6B
ugcaaaauagguuaaaucu

SEQ ID NO: 2044744 - RNA, 12 nt, Human herpesvirus 6B
agcuggacagaa

SEQ ID NO: 2044745 - RNA, 13 nt, Human herpesvirus 6B
augccacagaaca

SEQ ID NO: 2044746 - RNA, 19 nt, Human herpesvirus 6B
cauacgacugacgauuuca

SEQ ID NO: 2044747 - RNA, 21 nt, Human herpesvirus 6B
gauuucuuuaucuuccuguac

SEQ ID NO: 2044748 - RNA, 15 nt, Human herpesvirus 6B
uccugagaggcugga

SEQ ID NO: 2044749 - RNA, 16 nt, Human herpesvirus 6B
ucagcucgccguuuuu

SEQ ID NO: 2044750 - RNA, 14 nt, Human herpesvirus 6B
ucauuuuuacucau

SEQ ID NO: 2044751 - RNA, 18 nt, Human herpesvirus 6B
uguauaauauaaauucuu

SEQ ID NO: 2044752 - RNA, 12 nt, Human herpesvirus 6B
uagagacuuugc

SEQ ID NO: 2044753 - RNA, 16 nt, Human herpesvirus 6B
augaugaucugcuuug

SEQ ID NO: 2044754 - RNA, 15 nt, Human herpesvirus 6B
uugauguugguugau

SEQ ID NO: 2044755 - RNA, 19 nt, Human herpesvirus 6B
guuaauuccaagaugcagu

SEQ ID NO: 2044756 - RNA, 19 nt, Human herpesvirus 6B
ucacuggacagggguaaau

SEQ ID NO: 2044757 - RNA, 15 nt, Human herpesvirus 6B
agggaggagagggag

SEQ ID NO: 2044758 - RNA, 14 nt, Human herpesvirus 6B
agguggaaacuguu

SEQ ID NO: 2044759 - RNA, 11 nt, Human herpesvirus 6B
auccuuuguuu

SEQ ID NO: 2044760 - RNA, 19 nt, Human herpesvirus 6B
aagaaaggaguuugcauuu

SEQ ID NO: 2044761 - RNA, 23 nt, Human herpesvirus 6B
agauuccgucaucuagagaauau

SEQ ID NO: 2044762 - RNA, 23 nt, Human herpesvirus 6B
cuucuuggagucuggccucugcg

SEQ ID NO: 2044763 - RNA, 10 nt, Human herpesvirus 6B
guuuuuugca

SEQ ID NO: 2044764 - RNA, 15 nt, Human herpesvirus 6B
ugucgcccgccucuc

SEQ ID NO: 2044765 - RNA, 12 nt, Human herpesvirus 6B
ugaauguuucug

SEQ ID NO: 2044766 - RNA, 15 nt, Human herpesvirus 6B
uuauauggaugcugg

SEQ ID NO: 2044767 - RNA, 19 nt, Human herpesvirus 6B
gagaauguucuucugaaau

SEQ ID NO: 2044768 - RNA, 13 nt, Human herpesvirus 6B
acaucuaugaugc

SEQ ID NO: 2044769 - RNA, 19 nt, Human herpesvirus 6B
ugauacgaguaaaauugaa

SEQ ID NO: 2044770 - RNA, 22 nt, Human herpesvirus 6B
uaggacaauuggauaaacaucg

SEQ ID NO: 2044771 - RNA, 15 nt, Human herpesvirus 6B
ucaacuauuuaacau

SEQ ID NO: 2044772 - RNA, 13 nt, Human herpesvirus 6B
acuuuuugaagag

SEQ ID NO: 2044773 - RNA, 16 nt, Human herpesvirus 6B
cggccauuuaacggaa

SEQ ID NO: 2044774 - RNA, 21 nt, Human herpesvirus 6B
auuucaggaaguucuucaaaa

SEQ ID NO: 2044775 - RNA, 18 nt, Human herpesvirus 6B
acaaccuauguacagaua

SEQ ID NO: 2044776 - RNA, 16 nt, Human herpesvirus 6B
agcagcuagagaaauu

SEQ ID NO: 2044777 - RNA, 18 nt, Human herpesvirus 6B
agagacccuccuggcgcu

SEQ ID NO: 2044778 - RNA, 16 nt, Human herpesvirus 6B
acauguauucuccuca

SEQ ID NO: 2044779 - RNA, 13 nt, Human herpesvirus 6B
aaaacuacagaga

SEQ ID NO: 2044780 - RNA, 15 nt, Human herpesvirus 6B
aguaaauuaaaguuu

SEQ ID NO: 2044781 - RNA, 21 nt, Human herpesvirus 6B
uacaagggcuuggggcuauag

SEQ ID NO: 2044782 - RNA, 13 nt, Human herpesvirus 6B
ucaugucuuacag

SEQ ID NO: 2044783 - RNA, 21 nt, Human herpesvirus 6B
auguacguggccgucuccugc

SEQ ID NO: 2044784 - RNA, 15 nt, Human herpesvirus 6B
caaaaaaauauugga

SEQ ID NO: 2044785 - RNA, 15 nt, Human herpesvirus 6B
auuuucugaaaucuu

SEQ ID NO: 2044786 - RNA, 20 nt, Human herpesvirus 6B
gagcauugaguagagcuuug

SEQ ID NO: 2044787 - RNA, 17 nt, Human herpesvirus 6B
aaaauuggugugcauua

SEQ ID NO: 2044788 - RNA, 16 nt, Human herpesvirus 6B
guugcgguuucggaaa

SEQ ID NO: 2044789 - RNA, 12 nt, Human herpesvirus 6B
acaguuuugugg

SEQ ID NO: 2044790 - RNA, 24 nt, Human herpesvirus 6B
caggaaauuaauaagauagauauu

SEQ ID NO: 2044791 - RNA, 13 nt, Human herpesvirus 6B
cucguugggaugg

SEQ ID NO: 2044792 - RNA, 18 nt, Human herpesvirus 6B
auuuaauaaauugcagcu

SEQ ID NO: 2044793 - RNA, 12 nt, Human herpesvirus 6B
ugcuucugcucu

SEQ ID NO: 2044794 - RNA, 20 nt, Human herpesvirus 6B
cucuucuugcgaccucgcuc

SEQ ID NO: 2044795 - RNA, 12 nt, Human herpesvirus 6B
aaagagaaguua

SEQ ID NO: 2044796 - RNA, 19 nt, Human herpesvirus 6B
aggaagccggagcccugag

SEQ ID NO: 2044797 - RNA, 14 nt, Human herpesvirus 6B
augguuaaggaaaa

SEQ ID NO: 2044798 - RNA, 12 nt, Human herpesvirus 6B
acaucuaugaug

SEQ ID NO: 2044799 - RNA, 17 nt, Human herpesvirus 6B
guacaaagguuuuugcu

SEQ ID NO: 2044800 - RNA, 15 nt, Human herpesvirus 6B
gguaacgcaggagaa

SEQ ID NO: 2044801 - RNA, 16 nt, Human herpesvirus 6B
uguuccgaaaacuuua

SEQ ID NO: 2044802 - RNA, 13 nt, Human herpesvirus 6B
uuucauacuguau

SEQ ID NO: 2044803 - RNA, 17 nt, Human herpesvirus 6B
cagaugcagucuccaca

SEQ ID NO: 2044804 - RNA, 14 nt, Human herpesvirus 6B
ugucacacucugaa

SEQ ID NO: 2044805 - RNA, 13 nt, Human herpesvirus 6B
cuacaaucauuua

SEQ ID NO: 2044806 - RNA, 22 nt, Human herpesvirus 6B
acaaggguaacgcaggagaaac

SEQ ID NO: 2044807 - RNA, 15 nt, Human herpesvirus 6B
ugacuuuucugauga

SEQ ID NO: 2044808 - RNA, 18 nt, Human herpesvirus 6B
uucaggcauuaaacugag

SEQ ID NO: 2044809 - RNA, 21 nt, Human herpesvirus 6B
uaccauuuuauacgaaaauaa

SEQ ID NO: 2044810 - RNA, 23 nt, Human herpesvirus 6B
agcuccauguucuauuuuagaga

SEQ ID NO: 2044811 - RNA, 19 nt, Human herpesvirus 6B
augguauuuaggagcuagu

SEQ ID NO: 2044812 - RNA, 20 nt, Human herpesvirus 6B
cuuaucagucucaaaaauua

SEQ ID NO: 2044813 - RNA, 14 nt, Human herpesvirus 6B
ucgagacuagauuu

SEQ ID NO: 2044814 - RNA, 23 nt, Human herpesvirus 6B
augcaaucugugggaaaauaaua

SEQ ID NO: 2044815 - RNA, 19 nt, Human herpesvirus 6B
aucuccggacagaaaauuu

SEQ ID NO: 2044816 - RNA, 13 nt, Human herpesvirus 6B
gccgucuccugca

SEQ ID NO: 2044817 - RNA, 21 nt, Human herpesvirus 6B
uaugaucgcuucauaguuguu

SEQ ID NO: 2044818 - RNA, 23 nt, Human herpesvirus 6B
caacgcagauuuuaaugaugugu

SEQ ID NO: 2044819 - RNA, 13 nt, Human herpesvirus 6B
gauaaacaucgcu

SEQ ID NO: 2044820 - RNA, 20 nt, Human herpesvirus 6B
gaagguaucaaagaacagaa

SEQ ID NO: 2044821 - RNA, 20 nt, Human herpesvirus 6B
cauucgauuaaugccacagg

SEQ ID NO: 2044822 - RNA, 14 nt, Human herpesvirus 6B
ucuaugggaguaau

SEQ ID NO: 2044823 - RNA, 22 nt, Human herpesvirus 6B
cucaagaugaaguuuggggaga

SEQ ID NO: 2044824 - RNA, 18 nt, Human herpesvirus 6B
cuguauaucuaugcuuuu

SEQ ID NO: 2044825 - RNA, 15 nt, Human herpesvirus 6B
aaacacggcgccucc

SEQ ID NO: 2044826 - RNA, 17 nt, Human herpesvirus 6B
ccaccuggcgcaccgcc

SEQ ID NO: 2044827 - RNA, 23 nt, Human herpesvirus 6B
uaacggaacccuagacacacaga

SEQ ID NO: 2044828 - RNA, 15 nt, Human herpesvirus 6B
uacuaaaggacuggc

SEQ ID NO: 2044829 - RNA, 19 nt, Human herpesvirus 6B
ucaaguuagaaauguugcc

SEQ ID NO: 2044830 - RNA, 20 nt, Human herpesvirus 6B
gauuccguugugacagaauu

SEQ ID NO: 2044831 - RNA, 19 nt, Human herpesvirus 6B
uuuucaccccccucuugca

SEQ ID NO: 2044832 - RNA, 22 nt, Human herpesvirus 6B
gccugaaggcuacuauaaacaa

SEQ ID NO: 2044833 - RNA, 21 nt, Human herpesvirus 6B
ugcuguaagguuucuaaaucu

SEQ ID NO: 2044834 - RNA, 17 nt, Human herpesvirus 6B
cgaacgcguccuccgcg

SEQ ID NO: 2044835 - RNA, 12 nt, Human herpesvirus 6B
agaugcaaaaua

SEQ ID NO: 2044836 - RNA, 13 nt, Human herpesvirus 6B
ccugauccaugag

SEQ ID NO: 2044837 - RNA, 13 nt, Human herpesvirus 6B
gcuauguaugaac

SEQ ID NO: 2044838 - RNA, 18 nt, Human herpesvirus 6B
ugcuaccggaacucacac

SEQ ID NO: 2044839 - RNA, 17 nt, Human herpesvirus 6B
acauacaacuuucacug

SEQ ID NO: 2044840 - RNA, 13 nt, Human herpesvirus 6B
uccauaaugguau

SEQ ID NO: 2044841 - RNA, 16 nt, Human herpesvirus 6B
augcuaauaaaauaua

SEQ ID NO: 2044842 - RNA, 18 nt, Human herpesvirus 6B
gggagcggcgcacggguu

SEQ ID NO: 2044843 - RNA, 12 nt, Human herpesvirus 6B
uuuauugacugu

SEQ ID NO: 2044844 - RNA, 18 nt, Human herpesvirus 6B
augauuccacucugcaga

SEQ ID NO: 2044845 - RNA, 16 nt, Human herpesvirus 6B
uaucuaugcuuuugua

SEQ ID NO: 2044846 - RNA, 18 nt, Human herpesvirus 6B
ggcuuaaaggcagcuggc

SEQ ID NO: 2044847 - RNA, 14 nt, Human herpesvirus 6B
gaccagcucuguuc

SEQ ID NO: 2044848 - RNA, 20 nt, Human herpesvirus 6B
acgauggacagaaaaaacac

SEQ ID NO: 2044849 - RNA, 18 nt, Human herpesvirus 6B
ugcugucacacucugaac

SEQ ID NO: 2044850 - RNA, 20 nt, Human herpesvirus 6B
aaacaaacguguauuaagaa

SEQ ID NO: 2044851 - RNA, 20 nt, Human herpesvirus 6B
uaugacuuuucugaaauucu

SEQ ID NO: 2044852 - RNA, 19 nt, Human herpesvirus 6B
gaucaacuccguauaugcu

SEQ ID NO: 2044853 - RNA, 13 nt, Human herpesvirus 6B
aaauggaguuaug

SEQ ID NO: 2044854 - RNA, 22 nt, Human herpesvirus 6B
cucccguccguggaaaaacacu

SEQ ID NO: 2044855 - RNA, 22 nt, Human herpesvirus 6B
acaugcaacccgccacucuaca

SEQ ID NO: 2044856 - RNA, 21 nt, Human herpesvirus 6B
auacuuccucgcgguauaaug

SEQ ID NO: 2044857 - RNA, 16 nt, Human herpesvirus 6B
ccagcucuguucucuc

SEQ ID NO: 2044858 - RNA, 14 nt, Human herpesvirus 6B
acaucgcuccauaa

SEQ ID NO: 2044859 - RNA, 24 nt, Human herpesvirus 6B
gagacggaauauauagaagaagaa

SEQ ID NO: 2044860 - RNA, 21 nt, Human herpesvirus 6B
accuugucacaauaauuacuc

SEQ ID NO: 2044861 - RNA, 21 nt, Human herpesvirus 6B
ugggcauuuuuuugaaaucac

SEQ ID NO: 2044862 - RNA, 17 nt, Human herpesvirus 6B
uuagagauuuuggaagc

SEQ ID NO: 2044863 - RNA, 23 nt, Human herpesvirus 6B
cauguguggcgcauguaugguug

SEQ ID NO: 2044864 - RNA, 17 nt, Human herpesvirus 6B
ucaccgaaauccccaga

SEQ ID NO: 2044865 - RNA, 13 nt, Human herpesvirus 6B
ugauccagaauua

SEQ ID NO: 2044866 - RNA, 22 nt, Human herpesvirus 6B
agucguuacaguaaaaaagccg

SEQ ID NO: 2044867 - RNA, 21 nt, Human herpesvirus 6B
ugggcuccucacccugaaggg

SEQ ID NO: 2044868 - RNA, 14 nt, Human herpesvirus 6B
gaagucuuuccugu

SEQ ID NO: 2044869 - RNA, 16 nt, Human herpesvirus 6B
uuaaagaaucugcaga

SEQ ID NO: 2044870 - RNA, 16 nt, Human herpesvirus 6B
gcacgucacgggcagc

SEQ ID NO: 2044871 - RNA, 12 nt, Human herpesvirus 6B
uguauuuggaug

SEQ ID NO: 2044872 - RNA, 19 nt, Human herpesvirus 6B
ugccgaaaauuugggugau

SEQ ID NO: 2044873 - RNA, 20 nt, Human herpesvirus 6B
cggaggcuacggcuaaggcg

SEQ ID NO: 2044874 - RNA, 21 nt, Human herpesvirus 6B
agacggaucugccgcguggaa

SEQ ID NO: 2044875 - RNA, 18 nt, Human herpesvirus 6B
gugaauugugcaagcugu

SEQ ID NO: 2044876 - RNA, 13 nt, Human herpesvirus 6B
cgggaagacgaua

SEQ ID NO: 2044877 - RNA, 19 nt, Human herpesvirus 6B
auggaucauaaagugucuu

SEQ ID NO: 2044878 - RNA, 15 nt, Human herpesvirus 6B
aggcaucuucauccc

SEQ ID NO: 2044879 - RNA, 23 nt, Human herpesvirus 6B
acucucuacguuuacaucaacua

SEQ ID NO: 2044880 - RNA, 18 nt, Human herpesvirus 6B
cuauguuaacauugugag

SEQ ID NO: 2044881 - RNA, 22 nt, Human herpesvirus 6B
uauuugaggcggugucuucaaa

SEQ ID NO: 2044882 - RNA, 17 nt, Human herpesvirus 6B
cguuuucaaugugaauc

SEQ ID NO: 2044883 - RNA, 15 nt, Human herpesvirus 6B
uguuuuuaguaauaa

SEQ ID NO: 2044884 - RNA, 16 nt, Human herpesvirus 6B
aggaaacgcgcuggga

SEQ ID NO: 2044885 - RNA, 14 nt, Human herpesvirus 6B
cuuacguguguauu

SEQ ID NO: 2044886 - RNA, 20 nt, Human herpesvirus 6B
agagacuuugcugauucugu

SEQ ID NO: 2044887 - RNA, 14 nt, Human herpesvirus 6B
auucugcuaugaug

SEQ ID NO: 2044888 - RNA, 15 nt, Human herpesvirus 6B
ggagaggaagccgga

SEQ ID NO: 2044889 - RNA, 12 nt, Human herpesvirus 6B
aggaagaggagg

SEQ ID NO: 2044890 - RNA, 12 nt, Human herpesvirus 6B
uguuuuugcuac

SEQ ID NO: 2044891 - RNA, 15 nt, Human herpesvirus 6B
guuuggacaggagca

SEQ ID NO: 2044892 - RNA, 12 nt, Human herpesvirus 6B
ugcguguagagu

SEQ ID NO: 2044893 - RNA, 19 nt, Human herpesvirus 6B
gaaugagggauucguaguu

SEQ ID NO: 2044894 - RNA, 17 nt, Human herpesvirus 6B
aucgagaauaauuuacu

SEQ ID NO: 2044895 - RNA, 13 nt, Human herpesvirus 6B
uauauagaagaag

SEQ ID NO: 2044896 - RNA, 13 nt, Human herpesvirus 6B
aacaaugcuuugg

SEQ ID NO: 2044897 - RNA, 16 nt, Human herpesvirus 6B
gggcuuaauaaaggau

SEQ ID NO: 2044898 - RNA, 14 nt, Human herpesvirus 6B
cuacguuagcuucc

SEQ ID NO: 2044899 - RNA, 23 nt, Human herpesvirus 6B
cuucaggagaagaacagaggaag

SEQ ID NO: 2044900 - RNA, 16 nt, Human herpesvirus 6B
uaugaugcuguagaaa

SEQ ID NO: 2044901 - RNA, 21 nt, Human herpesvirus 6B
cgcugucgucugagcagaggu

SEQ ID NO: 2044902 - RNA, 14 nt, Human herpesvirus 6B
agucgcgaagugcu

SEQ ID NO: 2044903 - RNA, 20 nt, Human herpesvirus 6B
ugcaguuugugaauauucag

SEQ ID NO: 2044904 - RNA, 15 nt, Human herpesvirus 6B
ucuccugaucucacg

SEQ ID NO: 2044905 - RNA, 11 nt, Human herpesvirus 6B
cccggggaggc

SEQ ID NO: 2044906 - RNA, 15 nt, Human herpesvirus 6B
uaucucgaaaugcau

SEQ ID NO: 2044907 - RNA, 19 nt, Human herpesvirus 6B
gaauucucauuuaaaagcg

SEQ ID NO: 2044908 - RNA, 17 nt, Human herpesvirus 6B
agacaaaaacaugugcu

SEQ ID NO: 2044909 - RNA, 16 nt, Human herpesvirus 6B
cccacacgcggggauc

SEQ ID NO: 2044910 - RNA, 12 nt, Human herpesvirus 6B
auuauaaaaaug

SEQ ID NO: 2044911 - RNA, 17 nt, Human herpesvirus 6B
aaaugacacagaaucua

SEQ ID NO: 2044912 - RNA, 19 nt, Human herpesvirus 6B
auuugacaauaaacaugau

SEQ ID NO: 2044913 - RNA, 20 nt, Human herpesvirus 6B
cguuauuugugcaaaaugug

SEQ ID NO: 2044914 - RNA, 19 nt, Human herpesvirus 6B
uguaaacaaauucuuacaa

SEQ ID NO: 2044915 - RNA, 20 nt, Human herpesvirus 6B
uccuuaucagucucaaaaau

SEQ ID NO: 2044916 - RNA, 19 nt, Human herpesvirus 6B
gccacguucuuugaacagu

SEQ ID NO: 2044917 - RNA, 14 nt, Human herpesvirus 6B
guguuuggacagga

SEQ ID NO: 2044918 - RNA, 14 nt, Human herpesvirus 6B
agagcggaagacga

SEQ ID NO: 2044919 - RNA, 16 nt, Human herpesvirus 6B
ugcucaugucaguauu

SEQ ID NO: 2044920 - RNA, 13 nt, Human herpesvirus 6B
uuauuugugcaaa

SEQ ID NO: 2044921 - RNA, 16 nt, Human herpesvirus 6B
ccgagcgggcuccguc

SEQ ID NO: 2044922 - RNA, 15 nt, Human herpesvirus 6B
gaagucuuuccugau

SEQ ID NO: 2044923 - RNA, 12 nt, Human herpesvirus 6B
uaccgacaagcc

SEQ ID NO: 2044924 - RNA, 20 nt, Human herpesvirus 6B
caucagaugaauugugcgug

SEQ ID NO: 2044925 - RNA, 15 nt, Human herpesvirus 6B
uaaaauugcuacuaa

SEQ ID NO: 2044926 - RNA, 22 nt, Human herpesvirus 6B
uccuguaguuuuuuucugauga

SEQ ID NO: 2044927 - RNA, 15 nt, Human herpesvirus 6B
cauaucaaacaacug

SEQ ID NO: 2044928 - RNA, 22 nt, Human herpesvirus 6B
uuugccaccagauaggaaaagg

SEQ ID NO: 2044929 - RNA, 14 nt, Human herpesvirus 6B
cgucccucucaccc

SEQ ID NO: 2044930 - RNA, 20 nt, Human herpesvirus 6B
auuaaagauugcaucgcugg

SEQ ID NO: 2044931 - RNA, 21 nt, Human herpesvirus 6B
aaucauccguucagcuuuaua

SEQ ID NO: 2044932 - RNA, 20 nt, Human herpesvirus 6B
cuguaaacaaauucuuacaa

SEQ ID NO: 2044933 - RNA, 14 nt, Human herpesvirus 6B
gcacgagccaaggg

SEQ ID NO: 2044934 - RNA, 14 nt, Human herpesvirus 6B
auugucauucugca

SEQ ID NO: 2044935 - RNA, 12 nt, Human herpesvirus 6B
auuuaccagaga

SEQ ID NO: 2044936 - RNA, 23 nt, Human herpesvirus 6B
aucucaaaaaggguuuucugaau

SEQ ID NO: 2044937 - RNA, 15 nt, Human herpesvirus 6B
uuuaccgguuuggug

SEQ ID NO: 2044938 - RNA, 18 nt, Human herpesvirus 6B
ggagagugcggggagaua

SEQ ID NO: 2044939 - RNA, 19 nt, Human herpesvirus 6B
ucuucuuggagucuggccu

SEQ ID NO: 2044940 - RNA, 13 nt, Human herpesvirus 6B
cucgcucuccugu

SEQ ID NO: 2044941 - RNA, 16 nt, Human herpesvirus 6B
cuaagcuggacagaaa

SEQ ID NO: 2044942 - RNA, 20 nt, Human herpesvirus 6B
auggaaaauuuauaaaaaac

SEQ ID NO: 2044943 - RNA, 23 nt, Human herpesvirus 6B
aaucucaagcacaaaaccaggaa

SEQ ID NO: 2044944 - RNA, 17 nt, Human herpesvirus 6B
ggcgcccgugguggccg

SEQ ID NO: 2044945 - RNA, 16 nt, Human herpesvirus 6B
agagauuuuggaagca

SEQ ID NO: 2044946 - RNA, 21 nt, Human herpesvirus 6B
uuugucguuuguacauguuaa

SEQ ID NO: 2044947 - RNA, 21 nt, Human herpesvirus 6B
ggcugauauacgauggacaga

SEQ ID NO: 2044948 - RNA, 17 nt, Human herpesvirus 6B
ugggcgcagaaggagaa

SEQ ID NO: 2044949 - RNA, 17 nt, Human herpesvirus 6B
caaaagacuauguagua

SEQ ID NO: 2044950 - RNA, 14 nt, Human herpesvirus 6B
aaaaccugcuaacg

SEQ ID NO: 2044951 - RNA, 23 nt, Human herpesvirus 6B
ccaacacuguuguuaaucuguuu

SEQ ID NO: 2044952 - RNA, 21 nt, Human herpesvirus 6B
uggguacaaugccaacacugu

SEQ ID NO: 2044953 - RNA, 15 nt, Human herpesvirus 6B
ggagugcgacaggag

SEQ ID NO: 2044954 - RNA, 17 nt, Human herpesvirus 6B
auccggccaauucauug

SEQ ID NO: 2044955 - RNA, 22 nt, Human herpesvirus 6B
aauacuauguggaaauuaaaaa

SEQ ID NO: 2044956 - RNA, 16 nt, Human herpesvirus 6B
cacgcgcggaccacuc

SEQ ID NO: 2044957 - RNA, 19 nt, Human herpesvirus 6B
cuagaaugccagguccagu

SEQ ID NO: 2044958 - RNA, 22 nt, Human herpesvirus 6B
aguuaccgugaugugggugugg

SEQ ID NO: 2044959 - RNA, 19 nt, Human herpesvirus 6B
aaaauauggaaacgaaugu

SEQ ID NO: 2044960 - RNA, 16 nt, Human herpesvirus 6B
ucgaugccaaagcuuu

SEQ ID NO: 2044961 - RNA, 14 nt, Human herpesvirus 6B
cucggcaggggccg

SEQ ID NO: 2044962 - RNA, 17 nt, Human herpesvirus 6B
uaaaauaacaugugaca

SEQ ID NO: 2044963 - RNA, 14 nt, Human herpesvirus 6B
ccagggugaagaca

SEQ ID NO: 2044964 - RNA, 19 nt, Human herpesvirus 6B
caaaauuaauucaaaugua

SEQ ID NO: 2044965 - RNA, 16 nt, Human herpesvirus 6B
acgaucaauauagagg

SEQ ID NO: 2044966 - RNA, 16 nt, Human herpesvirus 6B
aaacacggcgccuccc

SEQ ID NO: 2044967 - RNA, 20 nt, Human herpesvirus 6B
cuucgagauuuuagaauaaa

SEQ ID NO: 2044968 - RNA, 22 nt, Human herpesvirus 6B
accgcccugcuccguucccuuc

SEQ ID NO: 2044969 - RNA, 16 nt, Human herpesvirus 6B
aaauauaauucugacu

SEQ ID NO: 2044970 - RNA, 22 nt, Human herpesvirus 6B
cuguaguuuuuuucugaugacu

SEQ ID NO: 2044971 - RNA, 11 nt, Human herpesvirus 6B
acguuaaaagg

SEQ ID NO: 2044972 - RNA, 17 nt, Human herpesvirus 6B
auaaguugucauuguau

SEQ ID NO: 2044973 - RNA, 19 nt, Human herpesvirus 6B
gaauucguuacaaucucug

SEQ ID NO: 2044974 - RNA, 18 nt, Human herpesvirus 6B
gucucuggaagcacggcu

SEQ ID NO: 2044975 - RNA, 15 nt, Human herpesvirus 6B
ucgucaacaauaaua

SEQ ID NO: 2044976 - RNA, 20 nt, Human herpesvirus 6B
ucaaugcguuggagcaagcg

SEQ ID NO: 2044977 - RNA, 21 nt, Human herpesvirus 6B
ucacaaccaaacaguuucaga

SEQ ID NO: 2044978 - RNA, 13 nt, Human herpesvirus 6B
cucgaugccaaag

SEQ ID NO: 2044979 - RNA, 20 nt, Human herpesvirus 6B
gcacaauucuaacuaaaauu

SEQ ID NO: 2044980 - RNA, 15 nt, Human herpesvirus 6B
uaaagguuagugggu

SEQ ID NO: 2044981 - RNA, 14 nt, Human herpesvirus 6B
gaucugauuuugau

SEQ ID NO: 2044982 - RNA, 13 nt, Human herpesvirus 6B
agacauuuucuau

SEQ ID NO: 2044983 - RNA, 13 nt, Human herpesvirus 6B
guagcaaaugaau

SEQ ID NO: 2044984 - RNA, 20 nt, Human herpesvirus 6B
uucauaagcucuacacagag

SEQ ID NO: 2044985 - RNA, 15 nt, Human herpesvirus 6B
agugcuuuauccggc

SEQ ID NO: 2044986 - RNA, 15 nt, Human herpesvirus 6B
acguuaguaaggaag

SEQ ID NO: 2044987 - RNA, 15 nt, Human herpesvirus 6B
gguuuuugcugucac

SEQ ID NO: 2044988 - RNA, 17 nt, Human herpesvirus 6B
acucuuggauugcagau

SEQ ID NO: 2044989 - RNA, 16 nt, Human herpesvirus 6B
acaauaauuacuccca

SEQ ID NO: 2044990 - RNA, 21 nt, Human herpesvirus 6B
acaucaccaugaaagcacaga

SEQ ID NO: 2044991 - RNA, 15 nt, Human herpesvirus 6B
acuuuuuucuaaaac

SEQ ID NO: 2044992 - RNA, 14 nt, Human herpesvirus 6B
uaaaguuuugugau

SEQ ID NO: 2044993 - RNA, 20 nt, Human herpesvirus 6B
acacuguuguuaaucuguuu

SEQ ID NO: 2044994 - RNA, 14 nt, Human herpesvirus 6B
acgugaauuucaua

SEQ ID NO: 2044995 - RNA, 18 nt, Human herpesvirus 6B
cgaggucgccagauuggc

SEQ ID NO: 2044996 - RNA, 20 nt, Human herpesvirus 6B
cuuaaagaaaaaaagcagau

SEQ ID NO: 2044997 - RNA, 17 nt, Human herpesvirus 6B
aagaugagauuggagua

SEQ ID NO: 2044998 - RNA, 16 nt, Human herpesvirus 6B
gggcgucgucaacucc

SEQ ID NO: 2044999 - RNA, 13 nt, Human herpesvirus 6B
augcgaauuaaaa

SEQ ID NO: 2045000 - RNA, 18 nt, Human herpesvirus 6B
aggagcacgagccaaggg

SEQ ID NO: 2045001 - RNA, 22 nt, Human herpesvirus 6B
ggacagagcggagaggcgcggg

SEQ ID NO: 2045002 - RNA, 19 nt, Human herpesvirus 6B
uuguuucugaacuauuaaa

SEQ ID NO: 2045003 - RNA, 16 nt, Human herpesvirus 6B
cagggcauagaaagcg

SEQ ID NO: 2045004 - RNA, 23 nt, Human herpesvirus 6B
cgcauguuuauuucaaugcguuu

SEQ ID NO: 2045005 - RNA, 12 nt, Human herpesvirus 6B
acgggaaaagau

SEQ ID NO: 2045006 - RNA, 16 nt, Human herpesvirus 6B
uguucagcuucuucua

SEQ ID NO: 2045007 - RNA, 20 nt, Human herpesvirus 6B
ccuccucuuuuccccccgcc

SEQ ID NO: 2045008 - RNA, 10 nt, Human herpesvirus 6B
ccggccaauu

SEQ ID NO: 2045009 - RNA, 23 nt, Human herpesvirus 6B
ccgcgguugaagucuuuccuguu

SEQ ID NO: 2045010 - RNA, 19 nt, Human herpesvirus 6B
ugcagagguaaugugaacg

SEQ ID NO: 2045011 - RNA, 15 nt, Human herpesvirus 6B
aagagagauacaggu

SEQ ID NO: 2045012 - RNA, 15 nt, Human herpesvirus 6B
cgaccucgcucuccu

SEQ ID NO: 2045013 - RNA, 14 nt, Human herpesvirus 6B
aaaauuggcauuua

SEQ ID NO: 2045014 - RNA, 21 nt, Human herpesvirus 6B
ucaaacaacuguuguguuuga

SEQ ID NO: 2045015 - RNA, 13 nt, Human herpesvirus 6B
aaaggugugguga

SEQ ID NO: 2045016 - RNA, 22 nt, Human herpesvirus 6B
cugugaucaggaaauuaauaag

SEQ ID NO: 2045017 - RNA, 16 nt, Human herpesvirus 6B
uuuuuaaaaacacacu

SEQ ID NO: 2045018 - RNA, 14 nt, Human herpesvirus 6B
cauacauccagaaa

SEQ ID NO: 2045019 - RNA, 14 nt, Human herpesvirus 6B
gcaacuugcugucg

SEQ ID NO: 2045020 - RNA, 18 nt, Human herpesvirus 6B
auugugagaacagcgcau

SEQ ID NO: 2045021 - RNA, 16 nt, Human herpesvirus 6B
agcaauaacucuugga

SEQ ID NO: 2045022 - RNA, 16 nt, Human herpesvirus 6B
ugcuuuaaaaaugcuc

SEQ ID NO: 2045023 - RNA, 19 nt, Human herpesvirus 6B
cggauacgggugcuguccc

SEQ ID NO: 2045024 - RNA, 16 nt, Human herpesvirus 6B
ggacacgagaagaaca

SEQ ID NO: 2045025 - RNA, 19 nt, Human herpesvirus 6B
gcagaaguuuccgcgcugg

SEQ ID NO: 2045026 - RNA, 22 nt, Human herpesvirus 6B
agaaguuacuauuguauuuacu

SEQ ID NO: 2045027 - RNA, 21 nt, Human herpesvirus 6B
ucgugcgaaaaaacaguuucc

SEQ ID NO: 2045028 - RNA, 14 nt, Human herpesvirus 6B
ccccucuugcagug

SEQ ID NO: 2045029 - RNA, 14 nt, Human herpesvirus 6B
ucaaauauggcaga

SEQ ID NO: 2045030 - RNA, 13 nt, Human herpesvirus 6B
ucaaauguagcaa

SEQ ID NO: 2045031 - RNA, 12 nt, Human herpesvirus 6B
gauucaaaggau

SEQ ID NO: 2045032 - RNA, 16 nt, Human herpesvirus 6B
gccugcgcguggaaac

SEQ ID NO: 2045033 - RNA, 13 nt, Human herpesvirus 6B
ucggcaagaaagc

SEQ ID NO: 2045034 - RNA, 19 nt, Human herpesvirus 6B
gagacuuugcugauucugu

SEQ ID NO: 2045035 - RNA, 17 nt, Human herpesvirus 6B
auauacgauggacagaa

SEQ ID NO: 2045036 - RNA, 20 nt, Human herpesvirus 6B
gcuucaguaugucucaguuc

SEQ ID NO: 2045037 - RNA, 16 nt, Human herpesvirus 6B
ggaggaggaagaggag

SEQ ID NO: 2045038 - RNA, 20 nt, Human herpesvirus 6B
gccgucugucuguuccucag

SEQ ID NO: 2045039 - RNA, 22 nt, Human herpesvirus 6B
gcagaucuugaaaagccccugc

SEQ ID NO: 2045040 - RNA, 21 nt, Human herpesvirus 6B
caaagauauuucuaucuggaa

SEQ ID NO: 2045041 - RNA, 21 nt, Human herpesvirus 6B
caaaaaugcacaauuuagccu

SEQ ID NO: 2045042 - RNA, 20 nt, Human herpesvirus 6B
cacucgaggaaacgcgcugg

SEQ ID NO: 2045043 - RNA, 19 nt, Human herpesvirus 6B
aaugcagcaguuuuugugc

SEQ ID NO: 2045044 - RNA, 21 nt, Human herpesvirus 6B
aauaucaugauaaauuguuuc

SEQ ID NO: 2045045 - RNA, 16 nt, Human herpesvirus 6B
auaguaguugucguua

SEQ ID NO: 2045046 - RNA, 17 nt, Human herpesvirus 6B
cgugguggccgucuguc

SEQ ID NO: 2045047 - RNA, 15 nt, Human herpesvirus 6B
auuuggaugaaacgu

SEQ ID NO: 2045048 - RNA, 16 nt, Human herpesvirus 6B
cacucacauagagaag

SEQ ID NO: 2045049 - RNA, 22 nt, Human herpesvirus 6B
uccugcaauuugaauucugcuc

SEQ ID NO: 2045050 - RNA, 17 nt, Human herpesvirus 6B
uuuuucuucaggugucu

SEQ ID NO: 2045051 - RNA, 20 nt, Human herpesvirus 6B
aagcagaccaguuuacaagu

SEQ ID NO: 2045052 - RNA, 23 nt, Human herpesvirus 6B
uaucccucguacaagcuuaauaa

SEQ ID NO: 2045053 - RNA, 16 nt, Human herpesvirus 6B
cgggcgacgggcaggg

SEQ ID NO: 2045054 - RNA, 23 nt, Human herpesvirus 6B
uguuucuuugacauuuaccagag

SEQ ID NO: 2045055 - RNA, 14 nt, Human herpesvirus 6B
ucuaagcugguuac

SEQ ID NO: 2045056 - RNA, 21 nt, Human herpesvirus 6B
cgccuagagaacagauagaaa

SEQ ID NO: 2045057 - RNA, 15 nt, Human herpesvirus 6B
cggcgguuaacuguu

SEQ ID NO: 2045058 - RNA, 16 nt, Human herpesvirus 6B
acggauucgaucgaga

SEQ ID NO: 2045059 - RNA, 21 nt, Human herpesvirus 6B
cugcaauuugaauucugcucg

SEQ ID NO: 2045060 - RNA, 20 nt, Human herpesvirus 6B
gacuuagcuagacgugucuu

SEQ ID NO: 2045061 - RNA, 17 nt, Human herpesvirus 6B
aagaaugggaugcauua

SEQ ID NO: 2045062 - RNA, 15 nt, Human herpesvirus 6B
cggucgaaugagcuu

SEQ ID NO: 2045063 - RNA, 15 nt, Human herpesvirus 6B
acggcgucacacagc

SEQ ID NO: 2045064 - RNA, 17 nt, Human herpesvirus 6B
acagggcauagaaagcg

SEQ ID NO: 2045065 - RNA, 15 nt, Human herpesvirus 6B
auuuuucuuuacaga

SEQ ID NO: 2045066 - RNA, 14 nt, Human herpesvirus 6B
uauccagaagacug

SEQ ID NO: 2045067 - RNA, 20 nt, Human herpesvirus 6B
uguacguggccgucuccugc

SEQ ID NO: 2045068 - RNA, 18 nt, Human herpesvirus 6B
caaccuauguacagauag

SEQ ID NO: 2045069 - RNA, 18 nt, Human herpesvirus 6B
agcugcuaacggagcaac

SEQ ID NO: 2045070 - RNA, 17 nt, Human herpesvirus 6B
cucucacccccacucga

SEQ ID NO: 2045071 - RNA, 16 nt, Human herpesvirus 6B
aacaaagaacuuugug

SEQ ID NO: 2045072 - RNA, 17 nt, Human herpesvirus 6B
ugauaguuauuuuguau

SEQ ID NO: 2045073 - RNA, 11 nt, Human herpesvirus 6B
aaagggaaguc

SEQ ID NO: 2045074 - RNA, 15 nt, Human herpesvirus 6B
cgauagcuucagggc

SEQ ID NO: 2045075 - RNA, 22 nt, Human herpesvirus 6B
uuuauguaaacauagaaucucc

SEQ ID NO: 2045076 - RNA, 19 nt, Human herpesvirus 6B
cgugaaacacaagaagaau

SEQ ID NO: 2045077 - RNA, 18 nt, Human herpesvirus 6B
uggauuacgcuaggaaaa

SEQ ID NO: 2045078 - RNA, 20 nt, Human herpesvirus 6B
aagaaagaagacgcuuuuua

SEQ ID NO: 2045079 - RNA, 13 nt, Human herpesvirus 6B
gcauggaaaaggc

SEQ ID NO: 2045080 - RNA, 14 nt, Human herpesvirus 6B
gaaaaaaagcagau

SEQ ID NO: 2045081 - RNA, 13 nt, Human herpesvirus 6B
uuuuuuuuucaua

SEQ ID NO: 2045082 - RNA, 23 nt, Human herpesvirus 6B
uuaacaaugaaaauucaguuuuu

SEQ ID NO: 2045083 - RNA, 23 nt, Human herpesvirus 6B
cucuuaacaagagaggaugcuuu

SEQ ID NO: 2045084 - RNA, 16 nt, Human herpesvirus 6B
ugagacauuugauguu

SEQ ID NO: 2045085 - RNA, 15 nt, Human herpesvirus 6B
ggcgucaccaagaaa

SEQ ID NO: 2045086 - RNA, 15 nt, Human herpesvirus 6B
acgacuaucuccuug

SEQ ID NO: 2045087 - RNA, 16 nt, Human herpesvirus 6B
ugcuaagaucugucuc

SEQ ID NO: 2045088 - RNA, 22 nt, Human herpesvirus 6B
guggcaccgaauccggaauuua

SEQ ID NO: 2045089 - RNA, 15 nt, Human herpesvirus 6B
acaagcuuaauaagu

SEQ ID NO: 2045090 - RNA, 17 nt, Human herpesvirus 6B
aaaguaugcuuugaaau

SEQ ID NO: 2045091 - RNA, 15 nt, Human herpesvirus 6B
auguagcacacgaca

SEQ ID NO: 2045092 - RNA, 17 nt, Human herpesvirus 6B
gagcuuuaaagcagcua

SEQ ID NO: 2045093 - RNA, 15 nt, Human herpesvirus 6B
ccucucuccgccucc

SEQ ID NO: 2045094 - RNA, 18 nt, Human herpesvirus 6B
cggacuugcgagucuguc

SEQ ID NO: 2045095 - RNA, 12 nt, Human herpesvirus 6B
auauacaaaauu

SEQ ID NO: 2045096 - RNA, 21 nt, Human herpesvirus 6B
guugccuuuguaaaauguuuc

SEQ ID NO: 2045097 - RNA, 16 nt, Human herpesvirus 6B
acgaugugucggagac

SEQ ID NO: 2045098 - RNA, 17 nt, Human herpesvirus 6B
gaauauucuucgugaau

SEQ ID NO: 2045099 - RNA, 19 nt, Human herpesvirus 6B
acuaagugccguggcagaa

SEQ ID NO: 2045100 - RNA, 13 nt, Human herpesvirus 6B
gacuguagaaaac

SEQ ID NO: 2045101 - RNA, 15 nt, Human herpesvirus 6B
cgcacguaacaccag

SEQ ID NO: 2045102 - RNA, 17 nt, Human herpesvirus 6B
aucgagaaucuuccuuu

SEQ ID NO: 2045103 - RNA, 19 nt, Human herpesvirus 6B
agugacaguaacggcggcg

SEQ ID NO: 2045104 - RNA, 18 nt, Human herpesvirus 6B
aacagaaauuuaauugca

SEQ ID NO: 2045105 - RNA, 18 nt, Human herpesvirus 6B
gcaggcgcgucggcggga

SEQ ID NO: 2045106 - RNA, 24 nt, Human herpesvirus 6B
cccagucagauaaugaauuucaau

SEQ ID NO: 2045107 - RNA, 12 nt, Human herpesvirus 6B
uucugaaaucuu

SEQ ID NO: 2045108 - RNA, 14 nt, Human herpesvirus 6B
accagcucuguucu

SEQ ID NO: 2045109 - RNA, 17 nt, Human herpesvirus 6B
auaucaugauaaauugu

SEQ ID NO: 2045110 - RNA, 23 nt, Human herpesvirus 6B
auuuuuuaauccauauuuggaag

SEQ ID NO: 2045111 - RNA, 14 nt, Human herpesvirus 6B
aaauuuuuauguau

SEQ ID NO: 2045112 - RNA, 12 nt, Human herpesvirus 6B
cgaccagcacca

SEQ ID NO: 2045113 - RNA, 20 nt, Human herpesvirus 6B
ucaagggcaagguucucagc

SEQ ID NO: 2045114 - RNA, 20 nt, Human herpesvirus 6B
acgucccuucuccgucaccc

SEQ ID NO: 2045115 - RNA, 12 nt, Human herpesvirus 6B
aaggacuggcug

SEQ ID NO: 2045116 - RNA, 20 nt, Human herpesvirus 6B
cgggcucgaagcgacgcaag

SEQ ID NO: 2045117 - RNA, 16 nt, Human herpesvirus 6B
cucaaagaaagcuccg

SEQ ID NO: 2045118 - RNA, 19 nt, Human herpesvirus 6B
guugcccucccgcagcucc

SEQ ID NO: 2045119 - RNA, 12 nt, Human herpesvirus 6B
aaacgcuuuuuu

SEQ ID NO: 2045120 - RNA, 11 nt, Human herpesvirus 6B
ugggggauggg

SEQ ID NO: 2045121 - RNA, 17 nt, Human herpesvirus 6B
augaaacggaaaccgaa

SEQ ID NO: 2045122 - RNA, 20 nt, Human herpesvirus 6B
gacugaucuguagcgaauuu

SEQ ID NO: 2045123 - RNA, 17 nt, Human herpesvirus 6B
ccgucgucgcucucccu

SEQ ID NO: 2045124 - RNA, 13 nt, Human herpesvirus 6B
ucguccuccgcaa

SEQ ID NO: 2045125 - RNA, 13 nt, Human herpesvirus 6B
cagagagccgcag

SEQ ID NO: 2045126 - RNA, 16 nt, Human herpesvirus 6B
uguaguugaugcuguu

SEQ ID NO: 2045127 - RNA, 14 nt, Human herpesvirus 6B
aaaugaauguguuc

SEQ ID NO: 2045128 - RNA, 20 nt, Human herpesvirus 6B
uguuugaaacguugugcuga

SEQ ID NO: 2045129 - RNA, 12 nt, Human herpesvirus 6B
uccacagggcau

SEQ ID NO: 2045130 - RNA, 18 nt, Human herpesvirus 6B
uccucgucauaauuuucc

SEQ ID NO: 2045131 - RNA, 20 nt, Human herpesvirus 6B
gauacuacguguaauguuuc

SEQ ID NO: 2045132 - RNA, 19 nt, Human herpesvirus 6B
caaggguaacgcaggagaa

SEQ ID NO: 2045133 - RNA, 16 nt, Human herpesvirus 6B
caccagauaggaaaag

SEQ ID NO: 2045134 - RNA, 14 nt, Human herpesvirus 6B
accaacugagagac

SEQ ID NO: 2045135 - RNA, 19 nt, Human herpesvirus 6B
aauccacggauugacacaa

SEQ ID NO: 2045136 - RNA, 19 nt, Human herpesvirus 6B
uugaguuuaucgugcaauu

SEQ ID NO: 2045137 - RNA, 17 nt, Human herpesvirus 6B
uuugauuuucagaguuu

SEQ ID NO: 2045138 - RNA, 21 nt, Human herpesvirus 6B
auugaugggauguaaucaaug

SEQ ID NO: 2045139 - RNA, 19 nt, Human herpesvirus 6B
uccucuuuuccccccgccg

SEQ ID NO: 2045140 - RNA, 22 nt, Human herpesvirus 6B
uaaaauuuugcgucgucugugc

SEQ ID NO: 2045141 - RNA, 21 nt, Human herpesvirus 6B
caaugucgcagaaucaagaaa

SEQ ID NO: 2045142 - RNA, 23 nt, Human herpesvirus 6B
aaccgcaguuccuguuuuucuca

SEQ ID NO: 2045143 - RNA, 15 nt, Human herpesvirus 6B
cuugauuuuugagau

SEQ ID NO: 2045144 - RNA, 17 nt, Human herpesvirus 6B
uaugaaaucgauguaga

SEQ ID NO: 2045145 - RNA, 22 nt, Human herpesvirus 6B
guuuggugacggcgaugaaaaa

SEQ ID NO: 2045146 - RNA, 14 nt, Human herpesvirus 6B
ugugcaaaucagga

SEQ ID NO: 2045147 - RNA, 12 nt, Human herpesvirus 6B
gcgacgagaguc

SEQ ID NO: 2045148 - RNA, 16 nt, Human herpesvirus 6B
cccaggcgcagcagca

SEQ ID NO: 2045149 - RNA, 20 nt, Human herpesvirus 6B
ugacuauuucuuuaagcaag

SEQ ID NO: 2045150 - RNA, 17 nt, Human herpesvirus 6B
aguggcgauaauguuau

SEQ ID NO: 2045151 - RNA, 15 nt, Human herpesvirus 6B
guauguuuuguacaa

SEQ ID NO: 2045152 - RNA, 20 nt, Human herpesvirus 6B
ucacuaacuucaagaauucu

SEQ ID NO: 2045153 - RNA, 15 nt, Human herpesvirus 6B
aaacacuaagugccg

SEQ ID NO: 2045154 - RNA, 23 nt, Human herpesvirus 6B
uuucuagacaugagcgagaaugu

SEQ ID NO: 2045155 - RNA, 16 nt, Human herpesvirus 6B
agauuccucuguaaaa

SEQ ID NO: 2045156 - RNA, 13 nt, Human herpesvirus 6B
cauuucucuacau

SEQ ID NO: 2045157 - RNA, 11 nt, Human herpesvirus 6B
cuggacagaaa

SEQ ID NO: 2045158 - RNA, 23 nt, Human herpesvirus 6B
cguggcagaacagagacccuccu

SEQ ID NO: 2045159 - RNA, 15 nt, Human herpesvirus 6B
cugacugcguuacaa

SEQ ID NO: 2045160 - RNA, 12 nt, Human herpesvirus 6B
gcugcugggugu

SEQ ID NO: 2045161 - RNA, 18 nt, Human herpesvirus 6B
caucaucucucuuucaga

SEQ ID NO: 2045162 - RNA, 19 nt, Human herpesvirus 6B
cuuuuggcaggaagccugu

SEQ ID NO: 2045163 - RNA, 20 nt, Human herpesvirus 6B
uugcacuauuuuaaaugaca

SEQ ID NO: 2045164 - RNA, 17 nt, Human herpesvirus 6B
augaugaaacuccuucu

SEQ ID NO: 2045165 - RNA, 21 nt, Human herpesvirus 6B
guugucuucugugcuuuccaa

SEQ ID NO: 2045166 - RNA, 12 nt, Human herpesvirus 6B
cuguaaaguuug

SEQ ID NO: 2045167 - RNA, 23 nt, Human herpesvirus 6B
cuuacaaguauguuuuguacaaa

SEQ ID NO: 2045168 - RNA, 15 nt, Human herpesvirus 6B
acggagagucuucau

SEQ ID NO: 2045169 - RNA, 12 nt, Human herpesvirus 6B
gggccucccucc

SEQ ID NO: 2045170 - RNA, 15 nt, Human herpesvirus 6B
agaugucgggccaca

SEQ ID NO: 2045171 - RNA, 16 nt, Human herpesvirus 6B
uucgguuuugucguuu

SEQ ID NO: 2045172 - RNA, 22 nt, Human herpesvirus 6B
gggggcccgggcgcggggcgca

SEQ ID NO: 2045173 - RNA, 15 nt, Human herpesvirus 6B
ccaggcgcagcagca

SEQ ID NO: 2045174 - RNA, 16 nt, Human herpesvirus 6B
guguccucguccgucc

SEQ ID NO: 2045175 - RNA, 15 nt, Human herpesvirus 6B
auuuuuaaggauuga

SEQ ID NO: 2045176 - RNA, 22 nt, Human herpesvirus 6B
uacuucucuuuauagagcaauu

SEQ ID NO: 2045177 - RNA, 15 nt, Human herpesvirus 6B
aguguggaauuuaaa

SEQ ID NO: 2045178 - RNA, 20 nt, Human herpesvirus 6B
uagacaauuuaucgugcuug

SEQ ID NO: 2045179 - RNA, 18 nt, Human herpesvirus 6B
ugaaauuuucaauucgga

SEQ ID NO: 2045180 - RNA, 16 nt, Human herpesvirus 6B
aguaacggaaaaauuu

SEQ ID NO: 2045181 - RNA, 15 nt, Human herpesvirus 6B
auaaccuucugauuu

SEQ ID NO: 2045182 - RNA, 15 nt, Human herpesvirus 6B
uuuacgggauaaaga

SEQ ID NO: 2045183 - RNA, 13 nt, Human herpesvirus 6B
auguguucauaga

SEQ ID NO: 2045184 - RNA, 21 nt, Human herpesvirus 6B
gucuuugaucuuacuuaaccu

SEQ ID NO: 2045185 - RNA, 21 nt, Human herpesvirus 6B
acuucuugcgauuuugugaaa

SEQ ID NO: 2045186 - RNA, 16 nt, Human herpesvirus 6B
agcgcauccuuaaaug

SEQ ID NO: 2045187 - RNA, 19 nt, Human herpesvirus 6B
cauaaaaaagagauaaucu

SEQ ID NO: 2045188 - RNA, 13 nt, Human herpesvirus 6B
cggucucuggaag

SEQ ID NO: 2045189 - RNA, 23 nt, Human herpesvirus 6B
ggagaaguauuucgaucagauua

SEQ ID NO: 2045190 - RNA, 23 nt, Human herpesvirus 6B
uuuaugcagcucgggaaagauuu

SEQ ID NO: 2045191 - RNA, 20 nt, Human herpesvirus 6B
gcgagucugucaguggcuug

SEQ ID NO: 2045192 - RNA, 13 nt, Human herpesvirus 6B
cacuaacaaaaaa

SEQ ID NO: 2045193 - RNA, 18 nt, Human herpesvirus 6B
uaaaaucugcuaacggag

SEQ ID NO: 2045194 - RNA, 15 nt, Human herpesvirus 6B
gaaccauagguguuu

SEQ ID NO: 2045195 - RNA, 18 nt, Human herpesvirus 6B
uagaaaauugucuacaau

SEQ ID NO: 2045196 - RNA, 18 nt, Human herpesvirus 6B
uaaauguauaaaagagaa

SEQ ID NO: 2045197 - RNA, 17 nt, Human herpesvirus 6B
ugcuguaaaccaguauc

SEQ ID NO: 2045198 - RNA, 14 nt, Human herpesvirus 6B
ggagugcgacagga

SEQ ID NO: 2045199 - RNA, 15 nt, Human herpesvirus 6B
gcguccuccgcgaga

SEQ ID NO: 2045200 - RNA, 20 nt, Human herpesvirus 6B
acguacauaaacuauuguuu

SEQ ID NO: 2045201 - RNA, 23 nt, Human herpesvirus 6B
cgcauuucucuacaugccacaga

SEQ ID NO: 2045202 - RNA, 24 nt, Human herpesvirus 6B
gcgucuccgauccgucaggaccag

SEQ ID NO: 2045203 - RNA, 18 nt, Human herpesvirus 6B
agaacagcgcauaaauaa

SEQ ID NO: 2045204 - RNA, 14 nt, Human herpesvirus 6B
ggagugggaggagc

SEQ ID NO: 2045205 - RNA, 17 nt, Human herpesvirus 6B
cacuggcgaaggcccgu

SEQ ID NO: 2045206 - RNA, 22 nt, Human herpesvirus 6B
ccugagagcaggagcaggcucc

SEQ ID NO: 2045207 - RNA, 19 nt, Human herpesvirus 6B
cacgccauccacccauaua

SEQ ID NO: 2045208 - RNA, 20 nt, Human herpesvirus 6B
acugccgcaucgcaccgcag

SEQ ID NO: 2045209 - RNA, 16 nt, Human herpesvirus 6B
aaacugccgcuuaaau

SEQ ID NO: 2045210 - RNA, 14 nt, Human herpesvirus 6B
cggcgcgcgccguc

SEQ ID NO: 2045211 - RNA, 18 nt, Human herpesvirus 6B
agccgggagauuccucug

SEQ ID NO: 2045212 - RNA, 14 nt, Human herpesvirus 6B
aggucaagcgccag

SEQ ID NO: 2045213 - RNA, 19 nt, Human herpesvirus 6B
ccccggagcauacgcgccg

SEQ ID NO: 2045214 - RNA, 15 nt, Human herpesvirus 6B
cucgaugccaaagcu

SEQ ID NO: 2045215 - RNA, 19 nt, Human herpesvirus 6B
gccaguucacacagaugca

SEQ ID NO: 2045216 - RNA, 15 nt, Human herpesvirus 6B
ugauguugucuucug

SEQ ID NO: 2045217 - RNA, 14 nt, Human herpesvirus 6B
auggagaaaaacuu

SEQ ID NO: 2045218 - RNA, 18 nt, Human herpesvirus 6B
acgccuauucuaauuaua

SEQ ID NO: 2045219 - RNA, 15 nt, Human herpesvirus 6B
agcucuacacagagu

SEQ ID NO: 2045220 - RNA, 16 nt, Human herpesvirus 6B
uguauuugaaaugacg

SEQ ID NO: 2045221 - RNA, 20 nt, Human herpesvirus 6B
uaucacuuagacacggccag

SEQ ID NO: 2045222 - RNA, 19 nt, Human herpesvirus 6B
gcccugagagcaggagcag

SEQ ID NO: 2045223 - RNA, 11 nt, Human herpesvirus 6B
uauuuggaagc

SEQ ID NO: 2045224 - RNA, 16 nt, Human herpesvirus 6B
ucuacccaccuguccu

SEQ ID NO: 2045225 - RNA, 13 nt, Human herpesvirus 6B
acacaacacaucu

SEQ ID NO: 2045226 - RNA, 15 nt, Human herpesvirus 6B
agcuaucggacaggc

SEQ ID NO: 2045227 - RNA, 20 nt, Human herpesvirus 6B
cacggggauuuagugcagua

SEQ ID NO: 2045228 - RNA, 18 nt, Human herpesvirus 6B
ccugcuccguucccuucu

SEQ ID NO: 2045229 - RNA, 22 nt, Human herpesvirus 6B
uucuguaaccugucuuggaaga

SEQ ID NO: 2045230 - RNA, 19 nt, Human herpesvirus 6B
agagucuguuacaacaaua

SEQ ID NO: 2045231 - RNA, 18 nt, Human herpesvirus 6B
guuuagcaugggugagug

SEQ ID NO: 2045232 - RNA, 18 nt, Human herpesvirus 6B
uggcugggcgcagaagga

SEQ ID NO: 2045233 - RNA, 22 nt, Human herpesvirus 6B
uuaaggagcggacacgacaugu

SEQ ID NO: 2045234 - RNA, 15 nt, Human herpesvirus 6B
ucucgaaaauacaau

SEQ ID NO: 2045235 - RNA, 21 nt, Human herpesvirus 6B
caucucauaauuugccugagu

SEQ ID NO: 2045236 - RNA, 22 nt, Human herpesvirus 6B
guauuaauuuuuuguuucugaa

SEQ ID NO: 2045237 - RNA, 12 nt, Human herpesvirus 6B
acggcaggagca

SEQ ID NO: 2045238 - RNA, 21 nt, Human herpesvirus 6B
cccccucuugcaguggcgcgc

SEQ ID NO: 2045239 - RNA, 19 nt, Human herpesvirus 6B
aauuuuuuguuucugaaaa

SEQ ID NO: 2045240 - RNA, 17 nt, Human herpesvirus 6B
caaagucuuccgcggcg

SEQ ID NO: 2045241 - RNA, 14 nt, Human herpesvirus 6B
caucugcaaaaaca

SEQ ID NO: 2045242 - RNA, 18 nt, Human herpesvirus 6B
acaacacaauauaugaaa

SEQ ID NO: 2045243 - RNA, 13 nt, Human herpesvirus 6B
ucagcuggacaga

SEQ ID NO: 2045244 - RNA, 13 nt, Human herpesvirus 6B
cgcgggacagcgg

SEQ ID NO: 2045245 - RNA, 17 nt, Human herpesvirus 6B
uguaauuuuuagcaguc

SEQ ID NO: 2045246 - RNA, 23 nt, Human herpesvirus 6B
ccgagagaauagagauaaaugua

SEQ ID NO: 2045247 - RNA, 19 nt, Human herpesvirus 6B
acgugaaauaaaguuuaaa

SEQ ID NO: 2045248 - RNA, 16 nt, Human herpesvirus 6B
aagauucugcagaaug

SEQ ID NO: 2045249 - RNA, 20 nt, Human herpesvirus 6B
uccaaaagcgccugccuaca

SEQ ID NO: 2045250 - RNA, 11 nt, Human herpesvirus 6B
gaggaagagga

SEQ ID NO: 2045251 - RNA, 12 nt, Human herpesvirus 6B
gcuuuaaagcag

SEQ ID NO: 2045252 - RNA, 18 nt, Human herpesvirus 6B
accgguacgauuucuguu

SEQ ID NO: 2045253 - RNA, 19 nt, Human herpesvirus 6B
caccgucccucucaccccc

SEQ ID NO: 2045254 - RNA, 15 nt, Human herpesvirus 6B
guuucuacugcugcu

SEQ ID NO: 2045255 - RNA, 15 nt, Human herpesvirus 6B
gaaaugcagcaguuu

SEQ ID NO: 2045256 - RNA, 19 nt, Human herpesvirus 6B
guaucuuacaacacaauau

SEQ ID NO: 2045257 - RNA, 17 nt, Human herpesvirus 6B
cguccucgugcucuccg

SEQ ID NO: 2045258 - RNA, 14 nt, Human herpesvirus 6B
uguuugauuuucag

SEQ ID NO: 2045259 - RNA, 19 nt, Human herpesvirus 6B
agaaucaagaaacacuucu

SEQ ID NO: 2045260 - RNA, 16 nt, Human herpesvirus 6B
auguuuauuucaaugc

SEQ ID NO: 2045261 - RNA, 20 nt, Human herpesvirus 6B
aaguaugggcacaaagugcu

SEQ ID NO: 2045262 - RNA, 23 nt, Human herpesvirus 6B
cuaaaagacgcuugcuguuuucg

SEQ ID NO: 2045263 - RNA, 14 nt, Human herpesvirus 6B
gguuucuuuauccc

SEQ ID NO: 2045264 - RNA, 21 nt, Human herpesvirus 6B
aguaccucuaugauacuuuga

SEQ ID NO: 2045265 - RNA, 12 nt, Human herpesvirus 6B
cgaccucgcucu

SEQ ID NO: 2045266 - RNA, 19 nt, Human herpesvirus 6B
ucucuacaucaccaugaaa

SEQ ID NO: 2045267 - RNA, 15 nt, Human herpesvirus 6B
cccagaguuaaugca

SEQ ID NO: 2045268 - RNA, 18 nt, Human herpesvirus 6B
cagcaguaucaaucacug

SEQ ID NO: 2045269 - RNA, 11 nt, Human herpesvirus 6B
cuauucagagg

SEQ ID NO: 2045270 - RNA, 23 nt, Human herpesvirus 6B
aucggaagaggaagggauggcag

SEQ ID NO: 2045271 - RNA, 18 nt, Human herpesvirus 6B
auuagauaagagaguuuc

SEQ ID NO: 2045272 - RNA, 14 nt, Human herpesvirus 6B
agucggucuguucc

SEQ ID NO: 2045273 - RNA, 22 nt, Human herpesvirus 6B
acagcaguuuuuuggggaagcg

SEQ ID NO: 2045274 - RNA, 14 nt, Human herpesvirus 6B
aaaaauaagacuua

SEQ ID NO: 2045275 - RNA, 14 nt, Human herpesvirus 6B
caauuguauuguga

SEQ ID NO: 2045276 - RNA, 12 nt, Human herpesvirus 6B
cagaaaauguuc

SEQ ID NO: 2045277 - RNA, 22 nt, Human herpesvirus 6B
uuagaugucgggccacauuucg

SEQ ID NO: 2045278 - RNA, 17 nt, Human herpesvirus 6B
aggcggcgaccacagcg

SEQ ID NO: 2045279 - RNA, 12 nt, Human herpesvirus 6B
uuuuucauauuu

SEQ ID NO: 2045280 - RNA, 17 nt, Human herpesvirus 6B
uauuuaacauccaaaau

SEQ ID NO: 2045281 - RNA, 14 nt, Human herpesvirus 6B
aaaccaagguguuu

SEQ ID NO: 2045282 - RNA, 17 nt, Human herpesvirus 6B
ugcagccuaccauggcc

SEQ ID NO: 2045283 - RNA, 13 nt, Human herpesvirus 6B
ucuauucaggaau

SEQ ID NO: 2045284 - RNA, 16 nt, Human herpesvirus 6B
aacuauuaaaaaaccc

SEQ ID NO: 2045285 - RNA, 19 nt, Human herpesvirus 6B
guggccggcacgcgccguc

SEQ ID NO: 2045286 - RNA, 14 nt, Human herpesvirus 6B
uaugcgaauuaaaa

SEQ ID NO: 2045287 - RNA, 21 nt, Human herpesvirus 6B
aaugaguugcacauguuucug

SEQ ID NO: 2045288 - RNA, 16 nt, Human herpesvirus 6B
gauaucguuuuugcuu

SEQ ID NO: 2045289 - RNA, 16 nt, Human herpesvirus 6B
gagccggacaggaggu

SEQ ID NO: 2045290 - RNA, 18 nt, Human herpesvirus 6B
uguacaacgacugggaga

SEQ ID NO: 2045291 - RNA, 16 nt, Human herpesvirus 6B
agguucagacugcugc

SEQ ID NO: 2045292 - RNA, 18 nt, Human herpesvirus 6B
caauuucccaguuaauuu

SEQ ID NO: 2045293 - RNA, 14 nt, Human herpesvirus 6B
agcugaugauuuga

SEQ ID NO: 2045294 - RNA, 17 nt, Human herpesvirus 6B
augcaagucgcgaagug

SEQ ID NO: 2045295 - RNA, 14 nt, Human herpesvirus 6B
auugcucaaaauug

SEQ ID NO: 2045296 - RNA, 14 nt, Human herpesvirus 6B
gcagcagcagcucc

SEQ ID NO: 2045297 - RNA, 23 nt, Human herpesvirus 6B
cgucuacaucaaaauccaaagua

SEQ ID NO: 2045298 - RNA, 13 nt, Human herpesvirus 6B
uugauuuguaaaa

SEQ ID NO: 2045299 - RNA, 22 nt, Human herpesvirus 6B
cugcagauucggggggagacag

SEQ ID NO: 2045300 - RNA, 19 nt, Human herpesvirus 6B
gaggaaacgcgcugggacu

SEQ ID NO: 2045301 - RNA, 15 nt, Human herpesvirus 6B
auaucgauucuguaa

SEQ ID NO: 2045302 - RNA, 19 nt, Human herpesvirus 6B
cagagcugaugauuugaaa

SEQ ID NO: 2045303 - RNA, 17 nt, Human herpesvirus 6B
auagguaaacuguucuu

SEQ ID NO: 2045304 - RNA, 20 nt, Human herpesvirus 6B
acgcaggauuauaaaaacac

SEQ ID NO: 2045305 - RNA, 16 nt, Human herpesvirus 6B
guuagcccgugcagag

SEQ ID NO: 2045306 - RNA, 19 nt, Human herpesvirus 6B
cacuuaguugauaugaaug

SEQ ID NO: 2045307 - RNA, 14 nt, Human herpesvirus 6B
agcugcuaaaugug

SEQ ID NO: 2045308 - RNA, 19 nt, Human herpesvirus 6B
gaggugauuugaacagaga

SEQ ID NO: 2045309 - RNA, 12 nt, Human herpesvirus 6B
agaugaggagga

SEQ ID NO: 2045310 - RNA, 20 nt, Human herpesvirus 6B
gcgccugccuacacugcgaa

SEQ ID NO: 2045311 - RNA, 15 nt, Human herpesvirus 6B
agaucuuuauggagg

SEQ ID NO: 2045312 - RNA, 15 nt, Human herpesvirus 6B
auaacggcgcagaau

SEQ ID NO: 2045313 - RNA, 22 nt, Human herpesvirus 6B
uauuaagaaugaauuugagaag

SEQ ID NO: 2045314 - RNA, 15 nt, Human herpesvirus 6B
gugccggcgcgcaaa

SEQ ID NO: 2045315 - RNA, 19 nt, Human herpesvirus 6B
auguaaagaaacaaaauua

SEQ ID NO: 2045316 - RNA, 19 nt, Human herpesvirus 6B
auuucucuacaugccacag

SEQ ID NO: 2045317 - RNA, 20 nt, Human herpesvirus 6B
gcgauuuugugaaaggugug

SEQ ID NO: 2045318 - RNA, 14 nt, Human herpesvirus 6B
ucaaggaaacguug

SEQ ID NO: 2045319 - RNA, 18 nt, Human herpesvirus 6B
uacuguguauuguguacc

SEQ ID NO: 2045320 - RNA, 18 nt, Human herpesvirus 6B
cgccgccucgccgcuccc

SEQ ID NO: 2045321 - RNA, 17 nt, Human herpesvirus 6B
cuggugaauguuucuga

SEQ ID NO: 2045322 - RNA, 11 nt, Human herpesvirus 6B
guuaauguuua

SEQ ID NO: 2045323 - RNA, 21 nt, Human herpesvirus 6B
ucuuacgggcgcuuuugacgu

SEQ ID NO: 2045324 - RNA, 21 nt, Human herpesvirus 6B
aagauauuaugucgauacaau

SEQ ID NO: 2045325 - RNA, 15 nt, Human herpesvirus 6B
aguacaaagauauuu

SEQ ID NO: 2045326 - RNA, 20 nt, Human herpesvirus 6B
uucagugucagcauugucag

SEQ ID NO: 2045327 - RNA, 18 nt, Human herpesvirus 6B
uaaaauuuuuaaacagau

SEQ ID NO: 2045328 - RNA, 20 nt, Human herpesvirus 6B
cgggcguuaucgacggcagc

SEQ ID NO: 2045329 - RNA, 21 nt, Human herpesvirus 6B
ucucgaaaaugcugauuuuaa

SEQ ID NO: 2045330 - RNA, 19 nt, Human herpesvirus 6B
cuguuauucuacugugcau

SEQ ID NO: 2045331 - RNA, 19 nt, Human herpesvirus 6B
aaugauaacuguuuuuguc

SEQ ID NO: 2045332 - RNA, 15 nt, Human herpesvirus 6B
ccagaugcagucucc

SEQ ID NO: 2045333 - RNA, 18 nt, Human herpesvirus 6B
uuuugcgucgucugugca

SEQ ID NO: 2045334 - RNA, 20 nt, Human herpesvirus 6B
cgaaagcaguuuugcagcau

SEQ ID NO: 2045335 - RNA, 15 nt, Human herpesvirus 6B
aaaacggguuuauuu

SEQ ID NO: 2045336 - RNA, 20 nt, Human herpesvirus 6B
uccaucucuagaaucuuacu

SEQ ID NO: 2045337 - RNA, 13 nt, Human herpesvirus 6B
cggagcacccggg

SEQ ID NO: 2045338 - RNA, 13 nt, Human herpesvirus 6B
uuuuaugcaagac

SEQ ID NO: 2045339 - RNA, 12 nt, Human herpesvirus 6B
uaaccuucugau

SEQ ID NO: 2045340 - RNA, 13 nt, Human herpesvirus 6B
uugucauuucccu

SEQ ID NO: 2045341 - RNA, 21 nt, Human herpesvirus 6B
cugcuaaaagcuauguaugaa

SEQ ID NO: 2045342 - RNA, 18 nt, Human herpesvirus 6B
cguuuguacauguuaaca

SEQ ID NO: 2045343 - RNA, 17 nt, Human herpesvirus 6B
cggagcccugagagcag

SEQ ID NO: 2045344 - RNA, 18 nt, Human herpesvirus 6B
ucuuccuguacagaauuu

SEQ ID NO: 2045345 - RNA, 20 nt, Human herpesvirus 6B
uugauguugucuucugugcu

SEQ ID NO: 2045346 - RNA, 20 nt, Human herpesvirus 6B
uaucguagagcaguuucuuu

SEQ ID NO: 2045347 - RNA, 19 nt, Human herpesvirus 6B
uugucgguaaauauugucu

SEQ ID NO: 2045348 - RNA, 20 nt, Human herpesvirus 6B
uucgggaugugcggagaaag

SEQ ID NO: 2045349 - RNA, 19 nt, Human herpesvirus 6B
aauuaugacugacaaggua

SEQ ID NO: 2045350 - RNA, 16 nt, Human herpesvirus 6B
auuagauaagagaguu

SEQ ID NO: 2045351 - RNA, 12 nt, Human herpesvirus 6B
ggguguggccgg

SEQ ID NO: 2045352 - RNA, 24 nt, Human herpesvirus 6B
uggcagccuaaacggagacugcac

SEQ ID NO: 2045353 - RNA, 19 nt, Human herpesvirus 6B
ccagcucuguucucuccca

SEQ ID NO: 2045354 - RNA, 20 nt, Human herpesvirus 6B
aagagcacgaagaagggcag

SEQ ID NO: 2045355 - RNA, 14 nt, Human herpesvirus 6B
uaauguaaauguua

SEQ ID NO: 2045356 - RNA, 21 nt, Human herpesvirus 6B
cgugaugagagacaucuguuu

SEQ ID NO: 2045357 - RNA, 19 nt, Human herpesvirus 6B
cuccugugcguccuccucg

SEQ ID NO: 2045358 - RNA, 22 nt, Human herpesvirus 6B
ggacaaauaaguggugaugaau

SEQ ID NO: 2045359 - RNA, 15 nt, Human herpesvirus 6B
aagaggaagggaugg

SEQ ID NO: 2045360 - RNA, 19 nt, Human herpesvirus 6B
cuggaucggacggugaugg

SEQ ID NO: 2045361 - RNA, 13 nt, Human herpesvirus 6B
ccgcagcuccuuc

SEQ ID NO: 2045362 - RNA, 16 nt, Human herpesvirus 6B
cuugaaagaguacagg

SEQ ID NO: 2045363 - RNA, 17 nt, Human herpesvirus 6B
cauguucgccucucccg

SEQ ID NO: 2045364 - RNA, 13 nt, Human herpesvirus 6B
gucuggccucugc

SEQ ID NO: 2045365 - RNA, 19 nt, Human herpesvirus 6B
cugcguuccaugugucucc

SEQ ID NO: 2045366 - RNA, 20 nt, Human herpesvirus 6B
ccugcaauuugaauucugcu

SEQ ID NO: 2045367 - RNA, 13 nt, Human herpesvirus 6B
uucaauagcaguu

SEQ ID NO: 2045368 - RNA, 20 nt, Human herpesvirus 6B
ucgcaagcccggagaacuga

SEQ ID NO: 2045369 - RNA, 14 nt, Human herpesvirus 6B
auggaacuucauag

SEQ ID NO: 2045370 - RNA, 17 nt, Human herpesvirus 6B
uccuguuuucccaccua

SEQ ID NO: 2045371 - RNA, 14 nt, Human herpesvirus 6B
gacgggucggucug

SEQ ID NO: 2045372 - RNA, 20 nt, Human herpesvirus 6B
gcugucgcccgccucucucc

SEQ ID NO: 2045373 - RNA, 21 nt, Human herpesvirus 6B
gcuauuugacaauaaacauga

SEQ ID NO: 2045374 - RNA, 22 nt, Human herpesvirus 6B
ugaaaucgauguagauguuuug

SEQ ID NO: 2045375 - RNA, 21 nt, Human herpesvirus 6B
cuaagcucguuaguaauuugg

SEQ ID NO: 2045376 - RNA, 16 nt, Human herpesvirus 6B
uugaggcaacuuuuuu

SEQ ID NO: 2045377 - RNA, 23 nt, Human herpesvirus 6B
ucggggacagugauuaggauguu

SEQ ID NO: 2045378 - RNA, 19 nt, Human herpesvirus 6B
ccggcccguccaccguccc

SEQ ID NO: 2045379 - RNA, 23 nt, Human herpesvirus 6B
auucuuguucgggccaagguaaa

SEQ ID NO: 2045380 - RNA, 15 nt, Human herpesvirus 6B
agaaucuuaaaggau

SEQ ID NO: 2045381 - RNA, 14 nt, Human herpesvirus 6B
auagacgacgcaga

SEQ ID NO: 2045382 - RNA, 19 nt, Human herpesvirus 6B
gacccuccacgccccuccg

SEQ ID NO: 2045383 - RNA, 16 nt, Human herpesvirus 6B
ucugaaaauaaaguug

SEQ ID NO: 2045384 - RNA, 15 nt, Human herpesvirus 6B
cgugcacgcgccugu

SEQ ID NO: 2045385 - RNA, 19 nt, Human herpesvirus 6B
caaguuaaauuucguugua

SEQ ID NO: 2045386 - RNA, 22 nt, Human herpesvirus 6B
gacauugguugauuuuuguaaa

SEQ ID NO: 2045387 - RNA, 20 nt, Human herpesvirus 6B
auguccgaaguaaaaaagau

SEQ ID NO: 2045388 - RNA, 13 nt, Human herpesvirus 6B
uucucugucgcug

SEQ ID NO: 2045389 - RNA, 20 nt, Human herpesvirus 6B
ucuaacuacauuuuaguauu

SEQ ID NO: 2045390 - RNA, 20 nt, Human herpesvirus 6B
gaaaauacgucagcucuuca

SEQ ID NO: 2045391 - RNA, 22 nt, Human herpesvirus 6B
cuggcgcuuguaggagcacgag

SEQ ID NO: 2045392 - RNA, 18 nt, Human herpesvirus 6B
gugguggccgucugucug

SEQ ID NO: 2045393 - RNA, 17 nt, Human herpesvirus 6B
auucgcaagacuacaga

SEQ ID NO: 2045394 - RNA, 13 nt, Human herpesvirus 6B
ugacacaauuucu

SEQ ID NO: 2045395 - RNA, 23 nt, Human herpesvirus 6B
cugcagggaugugguaugagcug

SEQ ID NO: 2045396 - RNA, 15 nt, Human herpesvirus 6B
cagucuccacagggc

SEQ ID NO: 2045397 - RNA, 19 nt, Human herpesvirus 6B
ggagcuaguuacggggaag

SEQ ID NO: 2045398 - RNA, 19 nt, Human herpesvirus 6B
caaaagauuauggcaacau

SEQ ID NO: 2045399 - RNA, 20 nt, Human herpesvirus 6B
aacgauuuaugacagcaaug

SEQ ID NO: 2045400 - RNA, 16 nt, Human herpesvirus 6B
cgcgguugaagucuuu

SEQ ID NO: 2045401 - RNA, 21 nt, Human herpesvirus 6B
ugguuuuucgauguuuccagg

SEQ ID NO: 2045402 - RNA, 22 nt, Human herpesvirus 6B
agagcugaugauuugaaauguu

SEQ ID NO: 2045403 - RNA, 16 nt, Human herpesvirus 6B
caaauguagcaaauga

SEQ ID NO: 2045404 - RNA, 17 nt, Human herpesvirus 6B
guauauaguuuucugau

SEQ ID NO: 2045405 - RNA, 23 nt, Human herpesvirus 6B
auuggcccuuauauggaugcugg

SEQ ID NO: 2045406 - RNA, 22 nt, Human herpesvirus 6B
auuaauucaaauguagcaaaug

SEQ ID NO: 2045407 - RNA, 22 nt, Human herpesvirus 6B
cuauucaggaauauuuaguuua

SEQ ID NO: 2045408 - RNA, 15 nt, Human herpesvirus 6B
aguauucuucuuccc

SEQ ID NO: 2045409 - RNA, 18 nt, Human herpesvirus 6B
cugugaugggaaauguug

SEQ ID NO: 2045410 - RNA, 22 nt, Human herpesvirus 6B
guggaaaucuauuaauuuugaa

SEQ ID NO: 2045411 - RNA, 14 nt, Human herpesvirus 6B
ugaagucuuuccug

SEQ ID NO: 2045412 - RNA, 22 nt, Human herpesvirus 6B
ggcggcgaccacagcggcagcg

SEQ ID NO: 2045413 - RNA, 22 nt, Human herpesvirus 6B
gcucucguggcccgugggggca

SEQ ID NO: 2045414 - RNA, 21 nt, Human herpesvirus 6B
gaauccgcgggccagcccuga

SEQ ID NO: 2045415 - RNA, 17 nt, Human herpesvirus 6B
aaguauucuucuucccc

SEQ ID NO: 2045416 - RNA, 13 nt, Human herpesvirus 6B
caacuguuguguu

SEQ ID NO: 2045417 - RNA, 15 nt, Human herpesvirus 6B
aaagaaacaaagucu

SEQ ID NO: 2045418 - RNA, 17 nt, Human herpesvirus 6B
uacguggccgucuccug

SEQ ID NO: 2045419 - RNA, 17 nt, Human herpesvirus 6B
agaagaucuaaugaaug

SEQ ID NO: 2045420 - RNA, 15 nt, Human herpesvirus 6B
ugaaggguguuucca

SEQ ID NO: 2045421 - RNA, 21 nt, Human herpesvirus 6B
aaagcaaucgucuuugauuua

SEQ ID NO: 2045422 - RNA, 18 nt, Human herpesvirus 6B
auacgugaauuucauaga

SEQ ID NO: 2045423 - RNA, 22 nt, Human herpesvirus 6B
agacauuugauguugucuucug

SEQ ID NO: 2045424 - RNA, 22 nt, Human herpesvirus 6B
aauuuguaucucagaucuucga

SEQ ID NO: 2045425 - RNA, 17 nt, Human herpesvirus 6B
caaugaguuuuuugcaa

SEQ ID NO: 2045426 - RNA, 14 nt, Human herpesvirus 6B
ucgaugccaaagcu

SEQ ID NO: 2045427 - RNA, 16 nt, Human herpesvirus 6B
cggagucggucuguuc

SEQ ID NO: 2045428 - RNA, 18 nt, Human herpesvirus 6B
ucugccgucaccugcacu

SEQ ID NO: 2045429 - RNA, 17 nt, Human herpesvirus 6B
acauccaaaauacacua

SEQ ID NO: 2045430 - RNA, 14 nt, Human herpesvirus 6B
aguaccgaauaaaa

SEQ ID NO: 2045431 - RNA, 22 nt, Human herpesvirus 6B
ccugcaauuugaauucugcucg

SEQ ID NO: 2045432 - RNA, 14 nt, Human herpesvirus 6B
ugauuugaacagag

SEQ ID NO: 2045433 - RNA, 16 nt, Human herpesvirus 6B
uuugaucccuaauacu

SEQ ID NO: 2045434 - RNA, 16 nt, Human herpesvirus 6B
caaaaaaauauuggau

SEQ ID NO: 2045435 - RNA, 19 nt, Human herpesvirus 6B
cuaagaaaccgauuuacca

SEQ ID NO: 2045436 - RNA, 22 nt, Human herpesvirus 6B
cugggacuccgagccggacagg

SEQ ID NO: 2045437 - RNA, 23 nt, Human herpesvirus 6B
ucucccaugguuccgggauguag

SEQ ID NO: 2045438 - RNA, 23 nt, Human herpesvirus 6B
guaucuugcggcauguguaagaa

SEQ ID NO: 2045439 - RNA, 15 nt, Human herpesvirus 6B
gcauaauccuuuucu

SEQ ID NO: 2045440 - RNA, 14 nt, Human herpesvirus 6B
aaacuaacaugaca

SEQ ID NO: 2045441 - RNA, 13 nt, Human herpesvirus 6B
ucuguaaaaggau

SEQ ID NO: 2045442 - RNA, 13 nt, Human herpesvirus 6B
uuaguuuuggaug

SEQ ID NO: 2045443 - RNA, 14 nt, Human herpesvirus 6B
uguaugaggcuauu

SEQ ID NO: 2045444 - RNA, 18 nt, Human herpesvirus 6B
aaagucgcuucgaauguu

SEQ ID NO: 2045445 - RNA, 21 nt, Human herpesvirus 6B
ucauuaccaguagcacgaacc

SEQ ID NO: 2045446 - RNA, 21 nt, Human herpesvirus 6B
acucugcaacuuuauuugaaa

SEQ ID NO: 2045447 - RNA, 18 nt, Human herpesvirus 6B
cgggcgguucucgccagc

SEQ ID NO: 2045448 - RNA, 22 nt, Human herpesvirus 6B
cauguaaaauuaccucaucccu

SEQ ID NO: 2045449 - RNA, 22 nt, Human herpesvirus 6B
uacuguaaacaaauucuuacaa

SEQ ID NO: 2045450 - RNA, 15 nt, Human herpesvirus 6B
ugggaguaauuauug

SEQ ID NO: 2045451 - RNA, 17 nt, Human herpesvirus 6B
ccccucuugcaguggcg

SEQ ID NO: 2045452 - RNA, 18 nt, Human herpesvirus 6B
uccgcucuggcaugcguu

SEQ ID NO: 2045453 - RNA, 15 nt, Human herpesvirus 6B
gcagucgcggcggcc

SEQ ID NO: 2045454 - RNA, 16 nt, Human herpesvirus 6B
gucacucacauagaga

SEQ ID NO: 2045455 - RNA, 21 nt, Human herpesvirus 6B
gauaugucguuucaugggaga

SEQ ID NO: 2045456 - RNA, 11 nt, Human herpesvirus 6B
gcgagaugcag

SEQ ID NO: 2045457 - RNA, 17 nt, Human herpesvirus 6B
aagaagcagcagaugcu

SEQ ID NO: 2045458 - RNA, 23 nt, Human herpesvirus 6B
uccuuuguggcucuauucuacau

SEQ ID NO: 2045459 - RNA, 22 nt, Human herpesvirus 6B
uacaaugaguuuuuugcaauuu

SEQ ID NO: 2045460 - RNA, 20 nt, Human herpesvirus 6B
aauucaugccgccugaaacc

SEQ ID NO: 2045461 - RNA, 20 nt, Human herpesvirus 6B
cgaaguacacuucaugggca

SEQ ID NO: 2045462 - RNA, 21 nt, Human herpesvirus 6B
cggaagugcaugcgacagaca

SEQ ID NO: 2045463 - RNA, 20 nt, Human herpesvirus 6B
gcgacuauuuaacugggaaa

SEQ ID NO: 2045464 - RNA, 14 nt, Human herpesvirus 6B
gaacccuagacaca

SEQ ID NO: 2045465 - RNA, 14 nt, Human herpesvirus 6B
guaauuggacauug

SEQ ID NO: 2045466 - RNA, 18 nt, Human herpesvirus 6B
augucacaaaucuguaag

SEQ ID NO: 2045467 - RNA, 15 nt, Human herpesvirus 6B
cgcagacagauaucu

SEQ ID NO: 2045468 - RNA, 17 nt, Human herpesvirus 6B
cgggaucccagaugcag

SEQ ID NO: 2045469 - RNA, 18 nt, Human herpesvirus 6B
ugaaguguuaugaagaau

SEQ ID NO: 2045470 - RNA, 14 nt, Human herpesvirus 6B
aaauaauauuugca

SEQ ID NO: 2045471 - RNA, 22 nt, Human herpesvirus 6B
acccaauggcggacaaaaauuc

SEQ ID NO: 2045472 - RNA, 15 nt, Human herpesvirus 6B
cucggauuccgcaca

SEQ ID NO: 2045473 - RNA, 12 nt, Human herpesvirus 6B
ucagauguggaa

SEQ ID NO: 2045474 - RNA, 18 nt, Human herpesvirus 6B
ugugaacguguuuggaca

SEQ ID NO: 2045475 - RNA, 16 nt, Human herpesvirus 6B
ugaauugugcaagcug

SEQ ID NO: 2045476 - RNA, 15 nt, Human herpesvirus 6B
gaaauuuacaaucau

SEQ ID NO: 2045477 - RNA, 20 nt, Human herpesvirus 6B
ugacugauauuaacaauccg

SEQ ID NO: 2045478 - RNA, 13 nt, Human herpesvirus 6B
gaauaaugaaauu

SEQ ID NO: 2045479 - RNA, 22 nt, Human herpesvirus 6B
agcccgcucggucucgcacguc

SEQ ID NO: 2045480 - RNA, 9 nt, Human herpesvirus 6B
uuacuauug

SEQ ID NO: 2045481 - RNA, 12 nt, Human herpesvirus 6B
aaaugacucuaa

SEQ ID NO: 2045482 - RNA, 12 nt, Human herpesvirus 6B
gcucggcagggg

SEQ ID NO: 2045483 - RNA, 19 nt, Human herpesvirus 6B
gugacagcaacuaagcugu

SEQ ID NO: 2045484 - RNA, 23 nt, Human herpesvirus 6B
ccuccgcgagacgguacagcgcg

SEQ ID NO: 2045485 - RNA, 19 nt, Human herpesvirus 6B
cgcguggcggcgcgcgccg

SEQ ID NO: 2045486 - RNA, 13 nt, Human herpesvirus 6B
ucuaaaucugaaa

SEQ ID NO: 2045487 - RNA, 21 nt, Human herpesvirus 6B
caaaaaaaaaugacugauauu

SEQ ID NO: 2045488 - RNA, 20 nt, Human herpesvirus 6B
gaucgggccuggggacagac

SEQ ID NO: 2045489 - RNA, 16 nt, Human herpesvirus 6B
ccuccggcacugccgc

SEQ ID NO: 2045490 - RNA, 15 nt, Human herpesvirus 6B
ugccuuuguaaaaug

SEQ ID NO: 2045491 - RNA, 19 nt, Human herpesvirus 6B
cucauacccggcggaggcg

SEQ ID NO: 2045492 - RNA, 22 nt, Human herpesvirus 6B
gguugagaaaacaugacggacu

SEQ ID NO: 2045493 - RNA, 12 nt, Human herpesvirus 6B
cuguuguggauu

SEQ ID NO: 2045494 - RNA, 19 nt, Human herpesvirus 6B
uucuaagacgagauguuuc

SEQ ID NO: 2045495 - RNA, 20 nt, Human herpesvirus 6B
uucuuaccaagaaaucacgu

SEQ ID NO: 2045496 - RNA, 20 nt, Human herpesvirus 6B
cuuuacauaacauagaaaaa

SEQ ID NO: 2045497 - RNA, 13 nt, Human herpesvirus 6B
gcgcgcguugggg

SEQ ID NO: 2045498 - RNA, 18 nt, Human herpesvirus 6B
acauagaaaaauaagacu

SEQ ID NO: 2045499 - RNA, 14 nt, Human herpesvirus 6B
cuccgcgcugcugg

SEQ ID NO: 2045500 - RNA, 14 nt, Human herpesvirus 6B
agcauuaugauggc

SEQ ID NO: 2045501 - RNA, 17 nt, Human herpesvirus 6B
ucggcgugagacaauua

SEQ ID NO: 2045502 - RNA, 21 nt, Human herpesvirus 6B
gcacaaaaccaggaauccuau

SEQ ID NO: 2045503 - RNA, 17 nt, Human herpesvirus 6B
aaagucaaaguccugga

SEQ ID NO: 2045504 - RNA, 19 nt, Human herpesvirus 6B
aaaaccugcuaacggagca

SEQ ID NO: 2045505 - RNA, 22 nt, Human herpesvirus 6B
aacuucauacccgauguucucu

SEQ ID NO: 2045506 - RNA, 16 nt, Human herpesvirus 6B
gcggcucauacccggc

SEQ ID NO: 2045507 - RNA, 14 nt, Human herpesvirus 6B
ugcauuaaggaaaa

SEQ ID NO: 2045508 - RNA, 15 nt, Human herpesvirus 6B
ggaauacaccggaga

SEQ ID NO: 2045509 - RNA, 21 nt, Human herpesvirus 6B
aagauaacggcgcagaauuac

SEQ ID NO: 2045510 - RNA, 20 nt, Human herpesvirus 6B
gccgugagaaacgcaaaggg

SEQ ID NO: 2045511 - RNA, 18 nt, Human herpesvirus 6B
aagccagccgcccucccc

SEQ ID NO: 2045512 - RNA, 14 nt, Human herpesvirus 6B
uguucguugucuga

SEQ ID NO: 2045513 - RNA, 13 nt, Human herpesvirus 6B
uccugcaauuuga

SEQ ID NO: 2045514 - RNA, 16 nt, Human herpesvirus 6B
guuauaauauuaacaa

SEQ ID NO: 2045515 - RNA, 15 nt, Human herpesvirus 6B
gucguaacaugauuc

SEQ ID NO: 2045516 - RNA, 14 nt, Human herpesvirus 6B
ucuuuguccuaugu

SEQ ID NO: 2045517 - RNA, 12 nt, Human herpesvirus 6B
cagacgacagcg

SEQ ID NO: 2045518 - RNA, 23 nt, Human herpesvirus 6B
cuuuucaguauagacauuuugug

SEQ ID NO: 2045519 - RNA, 16 nt, Human herpesvirus 6B
cuccguucccuucucg

SEQ ID NO: 2045520 - RNA, 15 nt, Human herpesvirus 6B
cgcgccgugacacgg

SEQ ID NO: 2045521 - RNA, 13 nt, Human herpesvirus 6B
accucaucccuua

SEQ ID NO: 2045522 - RNA, 21 nt, Human herpesvirus 6B
cuaacgcggcaaccgcaguuc

SEQ ID NO: 2045523 - RNA, 21 nt, Human herpesvirus 6B
gaauaacagaugaggaggagg

SEQ ID NO: 2045524 - RNA, 22 nt, Human herpesvirus 6B
cccagaugcagucuccacaggg

SEQ ID NO: 2045525 - RNA, 14 nt, Human herpesvirus 6B
ugaacagagauuuu

SEQ ID NO: 2045526 - RNA, 17 nt, Human herpesvirus 6B
auuuuauuuuguggcua

SEQ ID NO: 2045527 - RNA, 17 nt, Human herpesvirus 6B
aaacauagaaucuccaa

SEQ ID NO: 2045528 - RNA, 23 nt, Human herpesvirus 6B
aagucuuauuuuucuauguuaug

SEQ ID NO: 2045529 - RNA, 18 nt, Human herpesvirus 6B
augacaaauuuucagcua

SEQ ID NO: 2045530 - RNA, 19 nt, Human herpesvirus 6B
agccccugcuugaaagagu

SEQ ID NO: 2045531 - RNA, 19 nt, Human herpesvirus 6B
gaaucgucgaaaaaaauga

SEQ ID NO: 2045532 - RNA, 15 nt, Human herpesvirus 6B
accacucgggccggu

SEQ ID NO: 2045533 - RNA, 21 nt, Human herpesvirus 6B
auaacgauaucguuuuugcuu

SEQ ID NO: 2045534 - RNA, 17 nt, Human herpesvirus 6B
augaaaucgauguagau

SEQ ID NO: 2045535 - RNA, 19 nt, Human herpesvirus 6B
gaaauguugccuuuguaaa

SEQ ID NO: 2045536 - RNA, 18 nt, Human herpesvirus 6B
aacacacacggagaauac

SEQ ID NO: 2045537 - RNA, 19 nt, Human herpesvirus 6B
guuccuccgcgggaccugg

SEQ ID NO: 2045538 - RNA, 12 nt, Human herpesvirus 6B
uuguucuuggag

SEQ ID NO: 2045539 - RNA, 21 nt, Human herpesvirus 6B
gacgugcggagaugccgugag

SEQ ID NO: 2045540 - RNA, 17 nt, Human herpesvirus 6B
ggaggaggaggaagagg

SEQ ID NO: 2045541 - RNA, 20 nt, Human herpesvirus 6B
ccugaugguuaaggaaaaag

SEQ ID NO: 2045542 - RNA, 23 nt, Human herpesvirus 6B
aaccgcaguuucuguuuuucuca

SEQ ID NO: 2045543 - RNA, 13 nt, Human herpesvirus 6B
auuaauuaucauu

SEQ ID NO: 2045544 - RNA, 14 nt, Human herpesvirus 6B
auagcuggauuauc

SEQ ID NO: 2045545 - RNA, 15 nt, Human herpesvirus 6B
uccccccucccucca

SEQ ID NO: 2045546 - RNA, 17 nt, Human herpesvirus 6B
aucgacgaccaggcacc

SEQ ID NO: 2045547 - RNA, 14 nt, Human herpesvirus 6B
agaagaagauauuu

SEQ ID NO: 2045548 - RNA, 22 nt, Human herpesvirus 6B
caccgagggcgggcggacggcu

SEQ ID NO: 2045549 - RNA, 21 nt, Human herpesvirus 6B
cauauuuaaaccagucuucua

SEQ ID NO: 2045550 - RNA, 21 nt, Human herpesvirus 6B
cucgccgucgucgcucucccu

SEQ ID NO: 2045551 - RNA, 16 nt, Human herpesvirus 6B
cugaucgguauuugcg

SEQ ID NO: 2045552 - RNA, 14 nt, Human herpesvirus 6B
ccgcaguuccuguu

SEQ ID NO: 2045553 - RNA, 18 nt, Human herpesvirus 6B
ucaagcgaagucaugaau

SEQ ID NO: 2045554 - RNA, 14 nt, Human herpesvirus 6B
aaaacaugugcuua

SEQ ID NO: 2045555 - RNA, 23 nt, Human herpesvirus 6B
uuugcccauugcagguuggcgcu

SEQ ID NO: 2045556 - RNA, 22 nt, Human herpesvirus 6B
uuagaaauguugccuuuguaaa

SEQ ID NO: 2045557 - RNA, 16 nt, Human herpesvirus 6B
aggcucggcaggggcc

SEQ ID NO: 2045558 - RNA, 14 nt, Human herpesvirus 6B
acuaugagauuggu

SEQ ID NO: 2045559 - RNA, 16 nt, Human herpesvirus 6B
caaagaugacaaauuu

SEQ ID NO: 2045560 - RNA, 11 nt, Human herpesvirus 6B
agagcauugag

SEQ ID NO: 2045561 - RNA, 14 nt, Human herpesvirus 6B
uaaucuauggugau

SEQ ID NO: 2045562 - RNA, 13 nt, Human herpesvirus 6B
auagagccggccu

SEQ ID NO: 2045563 - RNA, 14 nt, Human herpesvirus 6B
cuaaaaccugcuaa

SEQ ID NO: 2045564 - RNA, 21 nt, Human herpesvirus 6B
uccguuauuguguucugcucu

SEQ ID NO: 2045565 - RNA, 15 nt, Human herpesvirus 6B
uaucgacggcagcgg

SEQ ID NO: 2045566 - RNA, 18 nt, Human herpesvirus 6B
uacgauuuucuaauacua

SEQ ID NO: 2045567 - RNA, 22 nt, Human herpesvirus 6B
ugacuacggcgguuaacuguuu

SEQ ID NO: 2045568 - RNA, 15 nt, Human herpesvirus 6B
gcucucgcaagccag

SEQ ID NO: 2045569 - RNA, 16 nt, Human herpesvirus 6B
guaccgaauaaaacaa

SEQ ID NO: 2045570 - RNA, 22 nt, Human herpesvirus 6B
acuacauuuuaguauuuaugcu

SEQ ID NO: 2045571 - RNA, 15 nt, Human herpesvirus 6B
aagucguuacaguaa

SEQ ID NO: 2045572 - RNA, 11 nt, Human herpesvirus 6B
ucacacagcau

SEQ ID NO: 2045573 - RNA, 13 nt, Human herpesvirus 6B
uagaguuggauuu

SEQ ID NO: 2045574 - RNA, 20 nt, Human herpesvirus 6B
aguccuuaucagucucaaaa

SEQ ID NO: 2045575 - RNA, 19 nt, Human herpesvirus 6B
auacuacguguaauguuuc

SEQ ID NO: 2045576 - RNA, 22 nt, Human herpesvirus 6B
cuuacccaucuaugcgugugaa

SEQ ID NO: 2045577 - RNA, 15 nt, Human herpesvirus 6B
uucuugggaaaucaa

SEQ ID NO: 2045578 - RNA, 18 nt, Human herpesvirus 6B
agcccugagagcaggagc

SEQ ID NO: 2045579 - RNA, 22 nt, Human herpesvirus 6B
gcuguaguugaugcuguugcug

SEQ ID NO: 2045580 - RNA, 12 nt, Human herpesvirus 6B
ccguacccagga

SEQ ID NO: 2045581 - RNA, 14 nt, Human herpesvirus 6B
gguuguccuugguc

SEQ ID NO: 2045582 - RNA, 16 nt, Human herpesvirus 6B
cgguuaacuguuucuu

SEQ ID NO: 2045583 - RNA, 15 nt, Human herpesvirus 6B
uucucugcaugucuu

SEQ ID NO: 2045584 - RNA, 15 nt, Human herpesvirus 6B
gcagauuuuaaugau

SEQ ID NO: 2045585 - RNA, 16 nt, Human herpesvirus 6B
caauagcuaauuugca

SEQ ID NO: 2045586 - RNA, 18 nt, Human herpesvirus 6B
aacagauuuugaggauca

SEQ ID NO: 2045587 - RNA, 14 nt, Human herpesvirus 6B
aauuuugaaauugg

SEQ ID NO: 2045588 - RNA, 22 nt, Human herpesvirus 6B
gguucaccacugugauaugcaa

SEQ ID NO: 2045589 - RNA, 20 nt, Human herpesvirus 6B
augacaaggugaacucaucg

SEQ ID NO: 2045590 - RNA, 17 nt, Human herpesvirus 6B
ggcauguguaagaaaac

SEQ ID NO: 2045591 - RNA, 20 nt, Human herpesvirus 6B
augcuuaaacugaaucacuu

SEQ ID NO: 2045592 - RNA, 20 nt, Human herpesvirus 6B
ugacgggggcacaucuguug

SEQ ID NO: 2045593 - RNA, 14 nt, Human herpesvirus 6B
caaagguuuuguga

SEQ ID NO: 2045594 - RNA, 19 nt, Human herpesvirus 6B
ucgaagacauucaacauuc

SEQ ID NO: 2045595 - RNA, 21 nt, Human herpesvirus 6B
ugucgcugacgcaauacguaa

SEQ ID NO: 2045596 - RNA, 14 nt, Human herpesvirus 6B
ggaauggacaugac

SEQ ID NO: 2045597 - RNA, 21 nt, Human herpesvirus 6B
aaucacuguacggaacguuuc

SEQ ID NO: 2045598 - RNA, 12 nt, Human herpesvirus 6B
gaugccaaagcu

SEQ ID NO: 2045599 - RNA, 19 nt, Human herpesvirus 6B
caaaaggaaaagucaaagu

SEQ ID NO: 2045600 - RNA, 15 nt, Human herpesvirus 6B
ucuuaccaagaaauc

SEQ ID NO: 2045601 - RNA, 14 nt, Human herpesvirus 6B
aaaugaccagagau

SEQ ID NO: 2045602 - RNA, 16 nt, Human herpesvirus 6B
gacuguucuaaaggau

SEQ ID NO: 2045603 - RNA, 23 nt, Human herpesvirus 6B
ucaauguaugcgaggcuuuugau

SEQ ID NO: 2045604 - RNA, 18 nt, Human herpesvirus 6B
ccaugcagcugcccguga

SEQ ID NO: 2045605 - RNA, 16 nt, Human herpesvirus 6B
uggaagacgucgggaa

SEQ ID NO: 2045606 - RNA, 12 nt, Human herpesvirus 6B
aggaaaaagccu

SEQ ID NO: 2045607 - RNA, 16 nt, Human herpesvirus 6B
gccagcccugaagaag

SEQ ID NO: 2045608 - RNA, 15 nt, Human herpesvirus 6B
uugcugucacacucu

SEQ ID NO: 2045609 - RNA, 16 nt, Human herpesvirus 6B
cuuaggauguaaaugc

SEQ ID NO: 2045610 - RNA, 20 nt, Human herpesvirus 6B
gcaagucgcgaagugcuucu

SEQ ID NO: 2045611 - RNA, 20 nt, Human herpesvirus 6B
ucucgauugugauguacgug

SEQ ID NO: 2045612 - RNA, 22 nt, Human herpesvirus 6B
gaaccauagguguuugcagaua

SEQ ID NO: 2045613 - RNA, 22 nt, Human herpesvirus 6B
cggcgacacgcgcggaccacuc

SEQ ID NO: 2045614 - RNA, 12 nt, Human herpesvirus 6B
guaauuguuaac

SEQ ID NO: 2045615 - RNA, 21 nt, Human herpesvirus 6B
guguuauaacagacauaugca

SEQ ID NO: 2045616 - RNA, 14 nt, Human herpesvirus 6B
auuuucagugucag

SEQ ID NO: 2045617 - RNA, 17 nt, Human herpesvirus 6B
ccgacuuauuaucucac

SEQ ID NO: 2045618 - RNA, 16 nt, Human herpesvirus 6B
ugugaggugauuugaa

SEQ ID NO: 2045619 - RNA, 19 nt, Human herpesvirus 6B
augcagucuccacagggca

SEQ ID NO: 2045620 - RNA, 15 nt, Human herpesvirus 6B
aucuauuaucauuua

SEQ ID NO: 2045621 - RNA, 21 nt, Human herpesvirus 6B
uaaaaaagagauaaucuuuga

SEQ ID NO: 2045622 - RNA, 16 nt, Human herpesvirus 6B
ugcaagcagaccaguu

SEQ ID NO: 2045623 - RNA, 15 nt, Human herpesvirus 6B
gacagcgggugcuca

SEQ ID NO: 2045624 - RNA, 14 nt, Human herpesvirus 6B
agccagccaguauc

SEQ ID NO: 2045625 - RNA, 21 nt, Human herpesvirus 6B
gcccucccgcagcuccuuccg

SEQ ID NO: 2045626 - RNA, 18 nt, Human herpesvirus 6B
aacugaucgguauuugcg

SEQ ID NO: 2045627 - RNA, 19 nt, Human herpesvirus 6B
caacgcuaaauuuaucaaa

SEQ ID NO: 2045628 - RNA, 17 nt, Human herpesvirus 6B
acgcaaagggaagccag

SEQ ID NO: 2045629 - RNA, 21 nt, Human herpesvirus 6B
ucauucgauuaaugccacagg

SEQ ID NO: 2045630 - RNA, 13 nt, Human herpesvirus 6B
guaaccugagaau

SEQ ID NO: 2045631 - RNA, 16 nt, Human herpesvirus 6B
cgggcagggcgggcac

SEQ ID NO: 2045632 - RNA, 21 nt, Human herpesvirus 6B
ggccgcuuucuuggcgcccgu

SEQ ID NO: 2045633 - RNA, 12 nt, Human herpesvirus 6B
gccacauuagcu

SEQ ID NO: 2045634 - RNA, 19 nt, Human herpesvirus 6B
agaccgguacgauuucugu

SEQ ID NO: 2045635 - RNA, 14 nt, Human herpesvirus 6B
aaagucggucgaga

SEQ ID NO: 2045636 - RNA, 19 nt, Human herpesvirus 6B
ucccccgaacgccuccacg

SEQ ID NO: 2045637 - RNA, 14 nt, Human herpesvirus 6B
cuuuggaaaguuuu

SEQ ID NO: 2045638 - RNA, 20 nt, Human herpesvirus 6B
cgcucgggggacggagagga

SEQ ID NO: 2045639 - RNA, 21 nt, Human herpesvirus 6B
cuaucacuuagacacggccag

SEQ ID NO: 2045640 - RNA, 22 nt, Human herpesvirus 6B
auauuuguuaguguuaauucca

SEQ ID NO: 2045641 - RNA, 18 nt, Human herpesvirus 6B
acucaagaauuacugcug

SEQ ID NO: 2045642 - RNA, 20 nt, Human herpesvirus 6B
gaucagguauagagguuaua

SEQ ID NO: 2045643 - RNA, 14 nt, Human herpesvirus 6B
caaugagccuggcu

SEQ ID NO: 2045644 - RNA, 14 nt, Human herpesvirus 6B
ggcggcugucgccg

SEQ ID NO: 2045645 - RNA, 15 nt, Human herpesvirus 6B
agugaauugugcaag

SEQ ID NO: 2045646 - RNA, 20 nt, Human herpesvirus 6B
gauaagaauuuccaggguga

SEQ ID NO: 2045647 - RNA, 23 nt, Human herpesvirus 6B
aaaauguuuccaugacugugagg

SEQ ID NO: 2045648 - RNA, 15 nt, Human herpesvirus 6B
cagaaucaagaaaca

SEQ ID NO: 2045649 - RNA, 13 nt, Human herpesvirus 6B
ugaguuuuggaaa

SEQ ID NO: 2045650 - RNA, 13 nt, Human herpesvirus 6B
cuacgcggcaagu

SEQ ID NO: 2045651 - RNA, 20 nt, Human herpesvirus 6B
gagcucaaagagauuggaaa

SEQ ID NO: 2045652 - RNA, 13 nt, Human herpesvirus 6B
acgguggauuaug

SEQ ID NO: 2045653 - RNA, 15 nt, Human herpesvirus 6B
ccugugcguccuccu

SEQ ID NO: 2045654 - RNA, 20 nt, Human herpesvirus 6B
gcauucuuacggaagcaaaa

SEQ ID NO: 2045655 - RNA, 21 nt, Human herpesvirus 6B
cugauauacgauggacagaaa

SEQ ID NO: 2045656 - RNA, 21 nt, Human herpesvirus 6B
caaugcgguuugucuugcaaa

SEQ ID NO: 2045657 - RNA, 19 nt, Human herpesvirus 6B
gcaaaaaaauauuggauuu

SEQ ID NO: 2045658 - RNA, 22 nt, Human herpesvirus 6B
aaauauggcuaaugagucucug

SEQ ID NO: 2045659 - RNA, 19 nt, Human herpesvirus 6B
uguuucugaacuauuaaaa

SEQ ID NO: 2045660 - RNA, 16 nt, Human herpesvirus 6B
aauugacaaucuugga

SEQ ID NO: 2045661 - RNA, 23 nt, Human herpesvirus 6B
aagucguuacaguaaaaaagccg

SEQ ID NO: 2045662 - RNA, 17 nt, Human herpesvirus 6B
ugauaccgucuuugcau

SEQ ID NO: 2045663 - RNA, 13 nt, Human herpesvirus 6B
uacguuagcuucc

SEQ ID NO: 2045664 - RNA, 18 nt, Human herpesvirus 6B
gucucaaaaauuagaccg

SEQ ID NO: 2045665 - RNA, 22 nt, Human herpesvirus 6B
aucaauauagaggacgcaaaga

SEQ ID NO: 2045666 - RNA, 13 nt, Human herpesvirus 6B
ucaaaaucugcua

SEQ ID NO: 2045667 - RNA, 16 nt, Human herpesvirus 6B
gagauuuuuuaaauaa

SEQ ID NO: 2045668 - RNA, 16 nt, Human herpesvirus 6B
cggguaaauaugugaa

SEQ ID NO: 2045669 - RNA, 18 nt, Human herpesvirus 6B
ccguguuggcggauuaca

SEQ ID NO: 2045670 - RNA, 22 nt, Human herpesvirus 6B
uccgucaggaccagcucuguuc

SEQ ID NO: 2045671 - RNA, 16 nt, Human herpesvirus 6B
agcuuguuaugacaaa

SEQ ID NO: 2045672 - RNA, 11 nt, Human herpesvirus 6B
agauuuacaga

SEQ ID NO: 2045673 - RNA, 18 nt, Human herpesvirus 6B
aagauuuaaaaaugauaa

SEQ ID NO: 2045674 - RNA, 14 nt, Human herpesvirus 6B
guuucuuuggaaaa

SEQ ID NO: 2045675 - RNA, 17 nt, Human herpesvirus 6B
acaguucguccagcagc

SEQ ID NO: 2045676 - RNA, 12 nt, Human herpesvirus 6B
cuugcuguaaag

SEQ ID NO: 2045677 - RNA, 21 nt, Human herpesvirus 6B
gcaaguuuucagcaagagaga

SEQ ID NO: 2045678 - RNA, 24 nt, Human herpesvirus 6B
cuuuuauagauuguuacuuucaua

SEQ ID NO: 2045679 - RNA, 14 nt, Human herpesvirus 6B
aggagaauuugcag

SEQ ID NO: 2045680 - RNA, 17 nt, Human herpesvirus 6B
uuguuuauugcuuuugu

SEQ ID NO: 2045681 - RNA, 18 nt, Human herpesvirus 6B
uccucccacgcccccucg

SEQ ID NO: 2045682 - RNA, 21 nt, Human herpesvirus 6B
cacggagaacacuuagagggu

SEQ ID NO: 2045683 - RNA, 18 nt, Human herpesvirus 6B
cggacagagcggagaggc

SEQ ID NO: 2045684 - RNA, 13 nt, Human herpesvirus 6B
uaaaguauuggcu

SEQ ID NO: 2045685 - RNA, 22 nt, Human herpesvirus 6B
uaugcuuuuuuuuguggauggu

SEQ ID NO: 2045686 - RNA, 21 nt, Human herpesvirus 6B
agcaaauuuaguuaauucucg

SEQ ID NO: 2045687 - RNA, 15 nt, Human herpesvirus 6B
guucgacuauguuag

SEQ ID NO: 2045688 - RNA, 16 nt, Human herpesvirus 6B
gcaacggcacgagagc

SEQ ID NO: 2045689 - RNA, 19 nt, Human herpesvirus 6B
agcccugagagcaggagca

SEQ ID NO: 2045690 - RNA, 15 nt, Human herpesvirus 6B
aagcuggacagaaag

SEQ ID NO: 2045691 - RNA, 22 nt, Human herpesvirus 6B
gcagaaaacgauuauugcuaca

SEQ ID NO: 2045692 - RNA, 20 nt, Human herpesvirus 6B
cuggaagaaggaaaaaauuc

SEQ ID NO: 2045693 - RNA, 23 nt, Human herpesvirus 6B
ucuuaggaaacuuucaaaauuuu

SEQ ID NO: 2045694 - RNA, 23 nt, Human herpesvirus 6B
gcgcugggacuccgagccggaca

SEQ ID NO: 2045695 - RNA, 16 nt, Human herpesvirus 6B
cgugugucucugugaa

SEQ ID NO: 2045696 - RNA, 15 nt, Human herpesvirus 6B
ugcaauuugaauucu

SEQ ID NO: 2045697 - RNA, 22 nt, Human herpesvirus 6B
cuuugaaggacuaucugagaca

SEQ ID NO: 2045698 - RNA, 20 nt, Human herpesvirus 6B
gcccugcuccguucccuucu

SEQ ID NO: 2045699 - RNA, 16 nt, Human herpesvirus 6B
gauuuuuguaaaaaug

SEQ ID NO: 2045700 - RNA, 16 nt, Human herpesvirus 6B
acggcgagacuuugug

SEQ ID NO: 2045701 - RNA, 18 nt, Human herpesvirus 6B
auaugucagauuauaaug

SEQ ID NO: 2045702 - RNA, 18 nt, Human herpesvirus 6B
acaguucguccagcagcg

SEQ ID NO: 2045703 - RNA, 21 nt, Human herpesvirus 6B
acacuuucuucgccuguaaag

SEQ ID NO: 2045704 - RNA, 13 nt, Human herpesvirus 6B
uaaaaacacacug

SEQ ID NO: 2045705 - RNA, 19 nt, Human herpesvirus 6B
uacuacguguaauguuucc

SEQ ID NO: 2045706 - RNA, 11 nt, Human herpesvirus 6B
cugugcaaagc

SEQ ID NO: 2045707 - RNA, 13 nt, Human herpesvirus 6B
acauaacauagaa

SEQ ID NO: 2045708 - RNA, 14 nt, Human herpesvirus 6B
agaucgagaucuuu

SEQ ID NO: 2045709 - RNA, 21 nt, Human herpesvirus 6B
gacaaauaaguggugaugaau

SEQ ID NO: 2045710 - RNA, 23 nt, Human herpesvirus 6B
cgcauccuuaaaugacacagaau

SEQ ID NO: 2045711 - RNA, 17 nt, Human herpesvirus 6B
aauuuuaccuauuucua

SEQ ID NO: 2045712 - RNA, 19 nt, Human herpesvirus 6B
cacgcgcggaccacucggg

SEQ ID NO: 2045713 - RNA, 14 nt, Human herpesvirus 6B
ugaaacugaagaaa

SEQ ID NO: 2045714 - RNA, 17 nt, Human herpesvirus 6B
cgcaaagggaagccagc

SEQ ID NO: 2045715 - RNA, 21 nt, Human herpesvirus 6B
cacgcucguauuuuauuuugu

SEQ ID NO: 2045716 - RNA, 13 nt, Human herpesvirus 6B
gcgcccggagucg

SEQ ID NO: 2045717 - RNA, 17 nt, Human herpesvirus 6B
gguuuuucgauguuucc

SEQ ID NO: 2045718 - RNA, 19 nt, Human herpesvirus 6B
cgauaccgaaucggaagag

SEQ ID NO: 2045719 - RNA, 15 nt, Human herpesvirus 6B
uuauuuccucugaau

SEQ ID NO: 2045720 - RNA, 12 nt, Human herpesvirus 6B
aaucaugagagc

SEQ ID NO: 2045721 - RNA, 14 nt, Human herpesvirus 6B
uuguacaaagguuu

SEQ ID NO: 2045722 - RNA, 16 nt, Human herpesvirus 6B
uuuauucuauauggcc

SEQ ID NO: 2045723 - RNA, 20 nt, Human herpesvirus 6B
gcagauaagaauuuccaggg

SEQ ID NO: 2045724 - RNA, 15 nt, Human herpesvirus 6B
gccaacgcgacacgg

SEQ ID NO: 2045725 - RNA, 13 nt, Human herpesvirus 6B
acuucuaaaaugc

SEQ ID NO: 2045726 - RNA, 22 nt, Human herpesvirus 6B
ggcgcgaaaaggggucggauuu

SEQ ID NO: 2045727 - RNA, 16 nt, Human herpesvirus 6B
cagggcgggcacggag

SEQ ID NO: 2045728 - RNA, 12 nt, Human herpesvirus 6B
augaaaacauuc

SEQ ID NO: 2045729 - RNA, 23 nt, Human herpesvirus 6B
ccgcacaguucguccagcagcgg

SEQ ID NO: 2045730 - RNA, 20 nt, Human herpesvirus 6B
caauuucugacucucuuuca

SEQ ID NO: 2045731 - RNA, 20 nt, Human herpesvirus 6B
uacaucaacuauuuaacauc

SEQ ID NO: 2045732 - RNA, 18 nt, Human herpesvirus 6B
aaaucugcuaacggagca

SEQ ID NO: 2045733 - RNA, 18 nt, Human herpesvirus 6B
gacaaaaacaugugcuua

SEQ ID NO: 2045734 - RNA, 17 nt, Human herpesvirus 6B
agaucaagcaaguucca

SEQ ID NO: 2045735 - RNA, 16 nt, Human herpesvirus 6B
uguauaaggauggaua

SEQ ID NO: 2045736 - RNA, 23 nt, Human herpesvirus 6B
gcaaaugaauguguucauagagc

SEQ ID NO: 2045737 - RNA, 14 nt, Human herpesvirus 6B
aauauuuuuacugc

SEQ ID NO: 2045738 - RNA, 16 nt, Human herpesvirus 6B
ugccgcguggaagccg

SEQ ID NO: 2045739 - RNA, 13 nt, Human herpesvirus 6B
cauucugcauuua

SEQ ID NO: 2045740 - RNA, 21 nt, Human herpesvirus 6B
aaugacuuggccgaguuuaga

SEQ ID NO: 2045741 - RNA, 17 nt, Human herpesvirus 6B
uaauuccuuguguugaa

SEQ ID NO: 2045742 - RNA, 18 nt, Human herpesvirus 6B
acuguauggcaaaaccaa

SEQ ID NO: 2045743 - RNA, 20 nt, Human herpesvirus 6B
auguaucccgagaaaaaagc

SEQ ID NO: 2045744 - RNA, 16 nt, Human herpesvirus 6B
ccucgaagaauugucu

SEQ ID NO: 2045745 - RNA, 14 nt, Human herpesvirus 6B
guugcguguggaaa

SEQ ID NO: 2045746 - RNA, 18 nt, Human herpesvirus 6B
cgcggggaucgggccugg

SEQ ID NO: 2045747 - RNA, 22 nt, Human herpesvirus 6B
aagcgccugccuacacugcgaa

SEQ ID NO: 2045748 - RNA, 18 nt, Human herpesvirus 6B
uaacauccaaaauacacu

SEQ ID NO: 2045749 - RNA, 18 nt, Human herpesvirus 6B
cauugugagaacagcgca

SEQ ID NO: 2045750 - RNA, 13 nt, Human herpesvirus 6B
uucagagucuguu

SEQ ID NO: 2045751 - RNA, 15 nt, Human herpesvirus 6B
auuccaauugcugcu

SEQ ID NO: 2045752 - RNA, 15 nt, Human herpesvirus 6B
acaacgguguggaga

SEQ ID NO: 2045753 - RNA, 13 nt, Human herpesvirus 6B
cuuuuuaacaaaa

SEQ ID NO: 2045754 - RNA, 23 nt, Human herpesvirus 6B
ucugauuuucagugucagcauug

SEQ ID NO: 2045755 - RNA, 20 nt, Human herpesvirus 6B
ugaugccuugauguuuccug

SEQ ID NO: 2045756 - RNA, 20 nt, Human herpesvirus 6B
aucgcgguguccucguccgu

SEQ ID NO: 2045757 - RNA, 16 nt, Human herpesvirus 6B
cuagcaaugauacauc

SEQ ID NO: 2045758 - RNA, 17 nt, Human herpesvirus 6B
caaauaaguggugauga

SEQ ID NO: 2045759 - RNA, 12 nt, Human herpesvirus 6B
cuuaccaagaaa

SEQ ID NO: 2045760 - RNA, 20 nt, Human herpesvirus 6B
auacacacgcgcggagcacg

SEQ ID NO: 2045761 - RNA, 15 nt, Human herpesvirus 6B
gacagcuuggccaac

SEQ ID NO: 2045762 - RNA, 10 nt, Human herpesvirus 6B
auuuuacugg

SEQ ID NO: 2045763 - RNA, 22 nt, Human herpesvirus 6B
acagcgugaugaggcccagagg

SEQ ID NO: 2045764 - RNA, 20 nt, Human herpesvirus 6B
ucgggaugugcggagaaagg

SEQ ID NO: 2045765 - RNA, 23 nt, Human herpesvirus 6B
ucgcauuucucuacaugccacag

SEQ ID NO: 2045766 - RNA, 20 nt, Human herpesvirus 6B
uuaaauuguuuuaaacauuc

SEQ ID NO: 2045767 - RNA, 15 nt, Human herpesvirus 6B
aaggacuaucugaga

SEQ ID NO: 2045768 - RNA, 20 nt, Human herpesvirus 6B
cuguuuuucucauaaaguua

SEQ ID NO: 2045769 - RNA, 22 nt, Human herpesvirus 6B
cacguccauaggcucggcaggg

SEQ ID NO: 2045770 - RNA, 16 nt, Human herpesvirus 6B
gcccgggcgcggggcg

SEQ ID NO: 2045771 - RNA, 14 nt, Human herpesvirus 6B
ggacuaccgaugcu

SEQ ID NO: 2045772 - RNA, 15 nt, Human herpesvirus 6B
cacggcgccucccau

SEQ ID NO: 2045773 - RNA, 14 nt, Human herpesvirus 6B
cccucuugcagugg

SEQ ID NO: 2045774 - RNA, 18 nt, Human herpesvirus 6B
gugcaccgagaaauagug

SEQ ID NO: 2045775 - RNA, 22 nt, Human herpesvirus 6B
gccagcaauuucggcaagaaag

SEQ ID NO: 2045776 - RNA, 14 nt, Human herpesvirus 6B
acagaaaaaaauuu

SEQ ID NO: 2045777 - RNA, 18 nt, Human herpesvirus 6B
ucgacauagaguguuugg

SEQ ID NO: 2045778 - RNA, 20 nt, Human herpesvirus 6B
uaacucuuggauugcagaua

SEQ ID NO: 2045779 - RNA, 15 nt, Human herpesvirus 6B
ugucguuuguacaug

SEQ ID NO: 2045780 - RNA, 13 nt, Human herpesvirus 6B
auuuaccagagau

SEQ ID NO: 2045781 - RNA, 24 nt, Human herpesvirus 6B
gcaacaaagagcuuuaaagcagcu

SEQ ID NO: 2045782 - RNA, 23 nt, Human herpesvirus 6B
auuuugcgucgucugugcaaagc

SEQ ID NO: 2045783 - RNA, 15 nt, Human herpesvirus 6B
uucagcuaaucacuu

SEQ ID NO: 2045784 - RNA, 18 nt, Human herpesvirus 6B
uggcauucuugcagauuu

SEQ ID NO: 2045785 - RNA, 16 nt, Human herpesvirus 6B
uccgaaaacuagauga

SEQ ID NO: 2045786 - RNA, 17 nt, Human herpesvirus 6B
gguuuaccuuuuugcug

SEQ ID NO: 2045787 - RNA, 14 nt, Human herpesvirus 6B
ucgaugaaaguuuu

SEQ ID NO: 2045788 - RNA, 20 nt, Human herpesvirus 6B
guugacgacgcccuggcuuu

SEQ ID NO: 2045789 - RNA, 13 nt, Human herpesvirus 6B
guauaagaaagac

SEQ ID NO: 2045790 - RNA, 19 nt, Human herpesvirus 6B
ugacuuggccgaguuuaga

SEQ ID NO: 2045791 - RNA, 16 nt, Human herpesvirus 6B
ucuuugacuauuucga

SEQ ID NO: 2045792 - RNA, 15 nt, Human herpesvirus 6B
gcaugaacgguaguu

SEQ ID NO: 2045793 - RNA, 18 nt, Human herpesvirus 6B
agacuaaacuuaacuuau

SEQ ID NO: 2045794 - RNA, 16 nt, Human herpesvirus 6B
auuaggggacagagcc

SEQ ID NO: 2045795 - RNA, 22 nt, Human herpesvirus 6B
cgggcagacgugagacauuuga

SEQ ID NO: 2045796 - RNA, 23 nt, Human herpesvirus 6B
gacuuagcuagacgugucuucau

SEQ ID NO: 2045797 - RNA, 15 nt, Human herpesvirus 6B
cacuucuucugcaga

SEQ ID NO: 2045798 - RNA, 19 nt, Human herpesvirus 6B
cggggagagaauugccgau

SEQ ID NO: 2045799 - RNA, 15 nt, Human herpesvirus 6B
guaauuuugaaauug

SEQ ID NO: 2045800 - RNA, 16 nt, Human herpesvirus 6B
guaucuggcuggucaa

SEQ ID NO: 2045801 - RNA, 12 nt, Human herpesvirus 6B
auauucaguuuu

SEQ ID NO: 2045802 - RNA, 15 nt, Human herpesvirus 6B
augcaggugcugcua

SEQ ID NO: 2045803 - RNA, 22 nt, Human herpesvirus 6B
cugcucguuuguuuuuuucugc

SEQ ID NO: 2045804 - RNA, 23 nt, Human herpesvirus 6B
aagaauccgcgggccagcccuga

SEQ ID NO: 2045805 - RNA, 16 nt, Human herpesvirus 6B
ccgucgucgcucuccc

SEQ ID NO: 2045806 - RNA, 15 nt, Human herpesvirus 6B
ucgcgauauucagag

SEQ ID NO: 2045807 - RNA, 19 nt, Human herpesvirus 6B
acggaauauauagaagaag

SEQ ID NO: 2045808 - RNA, 23 nt, Human herpesvirus 6B
ugaaacuaugaggaacugaugag

SEQ ID NO: 2045809 - RNA, 15 nt, Human herpesvirus 6B
ucguuuguacauguu

SEQ ID NO: 2045810 - RNA, 18 nt, Human herpesvirus 6B
gagaguucauuuguuccg

SEQ ID NO: 2045811 - RNA, 12 nt, Human herpesvirus 6B
ccgugaaggaau

SEQ ID NO: 2045812 - RNA, 12 nt, Human herpesvirus 6B
uaaaaucugcua

SEQ ID NO: 2045813 - RNA, 20 nt, Human herpesvirus 6B
acauaugcaaucugugggaa

SEQ ID NO: 2045814 - RNA, 13 nt, Human herpesvirus 6B
ucgauguagaugu

SEQ ID NO: 2045815 - RNA, 23 nt, Human herpesvirus 6B
uagcuugcgauuccgaagauugc

SEQ ID NO: 2045816 - RNA, 20 nt, Human herpesvirus 6B
guuacaguaaaaaagccgaa

SEQ ID NO: 2045817 - RNA, 23 nt, Human herpesvirus 6B
cacacgcggggaucgggccuggg

SEQ ID NO: 2045818 - RNA, 17 nt, Human herpesvirus 6B
cgcucuccugugcgucc

SEQ ID NO: 2045819 - RNA, 19 nt, Human herpesvirus 6B
aaucuccugagaggcugga

SEQ ID NO: 2045820 - RNA, 23 nt, Human herpesvirus 6B
gccgaccugauccaugagcaccc

SEQ ID NO: 2045821 - RNA, 18 nt, Human herpesvirus 6B
acaccgcagacaucacaa

SEQ ID NO: 2045822 - RNA, 18 nt, Human herpesvirus 6B
uuacgagaccuguuugag

SEQ ID NO: 2045823 - RNA, 11 nt, Human herpesvirus 6B
cuugcaguggc

SEQ ID NO: 2045824 - RNA, 13 nt, Human herpesvirus 6B
cauggugaaacuu

SEQ ID NO: 2045825 - RNA, 22 nt, Human herpesvirus 6B
uuauugacugugaaaagugcuu

SEQ ID NO: 2045826 - RNA, 21 nt, Human herpesvirus 6B
ucgauacaacgugugaaaacu

SEQ ID NO: 2045827 - RNA, 18 nt, Human herpesvirus 6B
uaaacuccaaaaucuuua

SEQ ID NO: 2045828 - RNA, 22 nt, Human herpesvirus 6B
ucucgugccguugccuuggccg

SEQ ID NO: 2045829 - RNA, 16 nt, Human herpesvirus 6B
auuuuaacgguuuugc

SEQ ID NO: 2045830 - RNA, 21 nt, Human herpesvirus 6B
aucacuuaguugauaugaaug

SEQ ID NO: 2045831 - RNA, 13 nt, Human herpesvirus 6B
aauugugucuuug

SEQ ID NO: 2045832 - RNA, 11 nt, Human herpesvirus 6B
uaauauuugca

SEQ ID NO: 2045833 - RNA, 22 nt, Human herpesvirus 6B
auguacguggccgucuccugca

SEQ ID NO: 2045834 - RNA, 16 nt, Human herpesvirus 6B
ugccuugauguuuccu

SEQ ID NO: 2045835 - RNA, 13 nt, Human herpesvirus 6B
caaacaguuucag

SEQ ID NO: 2045836 - RNA, 13 nt, Human herpesvirus 6B
cgaauaaggagag

SEQ ID NO: 2045837 - RNA, 18 nt, Human herpesvirus 6B
cgauugcugcuucuguaa

SEQ ID NO: 2045838 - RNA, 19 nt, Human herpesvirus 6B
caaugauacuacguguaau

SEQ ID NO: 2045839 - RNA, 21 nt, Human herpesvirus 6B
uuccucgcgguauaaugcaug

SEQ ID NO: 2045840 - RNA, 18 nt, Human herpesvirus 6B
agaaauuuaauugcaauu

SEQ ID NO: 2045841 - RNA, 15 nt, Human herpesvirus 6B
cugagagcaggagca

SEQ ID NO: 2045842 - RNA, 23 nt, Human herpesvirus 6B
cgcaaagagagaccaauuuagau

SEQ ID NO: 2045843 - RNA, 15 nt, Human herpesvirus 6B
gugaucguggacagu

SEQ ID NO: 2045844 - RNA, 19 nt, Human herpesvirus 6B
cuaagcuguaugacaucua

SEQ ID NO: 2045845 - RNA, 23 nt, Human herpesvirus 6B
gcucuccguuaaagaaacagauc

SEQ ID NO: 2045846 - RNA, 19 nt, Human herpesvirus 6B
gaaaauacgucagcucuuc

SEQ ID NO: 2045847 - RNA, 14 nt, Human herpesvirus 6B
ucaaauguagcaaa

SEQ ID NO: 2045848 - RNA, 20 nt, Human herpesvirus 6B
cugucuguguuucagaaggc

SEQ ID NO: 2045849 - RNA, 18 nt, Human herpesvirus 6B
gagaaaccgaaaugugcu

SEQ ID NO: 2045850 - RNA, 15 nt, Human herpesvirus 6B
acgcccccaccuggc

SEQ ID NO: 2045851 - RNA, 14 nt, Human herpesvirus 6B
uauuuucuguauua

SEQ ID NO: 2045852 - RNA, 18 nt, Human herpesvirus 6B
guccgugacacacagaau

SEQ ID NO: 2045853 - RNA, 20 nt, Human herpesvirus 6B
auucuuaccaagaaaucacg

SEQ ID NO: 2045854 - RNA, 15 nt, Human herpesvirus 6B
uuuaccuuuuugcug

SEQ ID NO: 2045855 - RNA, 17 nt, Human herpesvirus 6B
ggcuuacugcggagaac

SEQ ID NO: 2045856 - RNA, 14 nt, Human herpesvirus 6B
cccggaguacacgu

SEQ ID NO: 2045857 - RNA, 22 nt, Human herpesvirus 6B
uuucuaaaacccggagaaucua

SEQ ID NO: 2045858 - RNA, 15 nt, Human herpesvirus 6B
gacuuauuaucucac

SEQ ID NO: 2045859 - RNA, 16 nt, Human herpesvirus 6B
agaaacguuaauguuu

SEQ ID NO: 2045860 - RNA, 19 nt, Human herpesvirus 6B
cugaugauuugaaauguuc

SEQ ID NO: 2045861 - RNA, 13 nt, Human herpesvirus 6B
ucucuacaucacc

SEQ ID NO: 2045862 - RNA, 15 nt, Human herpesvirus 6B
aggagagggagaaac

SEQ ID NO: 2045863 - RNA, 18 nt, Human herpesvirus 6B
caguuaaucauucgauua

SEQ ID NO: 2045864 - RNA, 15 nt, Human herpesvirus 6B
ggacccuccacgccc

SEQ ID NO: 2045865 - RNA, 13 nt, Human herpesvirus 6B
cucucacggccau

SEQ ID NO: 2045866 - RNA, 18 nt, Human herpesvirus 6B
uucugcucguuuguuuuu

SEQ ID NO: 2045867 - RNA, 14 nt, Human herpesvirus 6B
gaacaccagcaugu

SEQ ID NO: 2045868 - RNA, 23 nt, Human herpesvirus 6B
uacguggccgucuccugcaauuu

SEQ ID NO: 2045869 - RNA, 15 nt, Human herpesvirus 6B
uccauauuuggaagc

SEQ ID NO: 2045870 - RNA, 17 nt, Human herpesvirus 6B
aaacugcuugcgauugu

SEQ ID NO: 2045871 - RNA, 18 nt, Human herpesvirus 6B
acacggccacccgcgucu

SEQ ID NO: 2045872 - RNA, 19 nt, Human herpesvirus 6B
cucguaccccggcuuucuc

SEQ ID NO: 2045873 - RNA, 20 nt, Human herpesvirus 6B
uuuuucacagaauguauaua

SEQ ID NO: 2045874 - RNA, 16 nt, Human herpesvirus 6B
gggaauuuggcagaau

SEQ ID NO: 2045875 - RNA, 18 nt, Human herpesvirus 6B
ccagcucuguucucuccc

SEQ ID NO: 2045876 - RNA, 15 nt, Human herpesvirus 6B
caccgaauuuauuca

SEQ ID NO: 2045877 - RNA, 16 nt, Human herpesvirus 6B
uauuuucguauaaaau

SEQ ID NO: 2045878 - RNA, 23 nt, Human herpesvirus 6B
auauggaucaaucuccaaaacac

SEQ ID NO: 2045879 - RNA, 23 nt, Human herpesvirus 6B
cuugugcaaaaaucucuuauggu

SEQ ID NO: 2045880 - RNA, 21 nt, Human herpesvirus 6B
acaguauaaauucuuuugugc

SEQ ID NO: 2045881 - RNA, 16 nt, Human herpesvirus 6B
guuuuguaggacugaa

SEQ ID NO: 2045882 - RNA, 20 nt, Human herpesvirus 6B
auggcaaauuucaaaaagaa

SEQ ID NO: 2045883 - RNA, 14 nt, Human herpesvirus 6B
cccgggcgcggggc

SEQ ID NO: 2045884 - RNA, 13 nt, Human herpesvirus 6B
uacuaaagcaauc

SEQ ID NO: 2045885 - RNA, 12 nt, Human herpesvirus 6B
acaauaauuacu

SEQ ID NO: 2045886 - RNA, 15 nt, Human herpesvirus 6B
ugcaaaacagauuuu

SEQ ID NO: 2045887 - RNA, 16 nt, Human herpesvirus 6B
aauaaguggugaugaa

SEQ ID NO: 2045888 - RNA, 16 nt, Human herpesvirus 6B
aacugauacuguucaa

SEQ ID NO: 2045889 - RNA, 22 nt, Human herpesvirus 6B
ccgucgcgcucgccgucgucgc

SEQ ID NO: 2045890 - RNA, 20 nt, Human herpesvirus 6B
gcacaguucguccagcagcg

SEQ ID NO: 2045891 - RNA, 15 nt, Human herpesvirus 6B
uuaaaugacacagaa

SEQ ID NO: 2045892 - RNA, 12 nt, Human herpesvirus 6B
caaacagagaua

SEQ ID NO: 2045893 - RNA, 16 nt, Human herpesvirus 6B
agacaguuuacuaaaa

SEQ ID NO: 2045894 - RNA, 18 nt, Human herpesvirus 6B
uaaugacguaugauuuuc

SEQ ID NO: 2045895 - RNA, 12 nt, Human herpesvirus 6B
uauaaugugaac

SEQ ID NO: 2045896 - RNA, 12 nt, Human herpesvirus 6B
aaaauaagcaag

SEQ ID NO: 2045897 - RNA, 13 nt, Human herpesvirus 6B
cgggacagcaccc

SEQ ID NO: 2045898 - RNA, 22 nt, Human herpesvirus 6B
gcacccguauccgcgagacagc

SEQ ID NO: 2045899 - RNA, 15 nt, Human herpesvirus 6B
gaauuaugacugaca

SEQ ID NO: 2045900 - RNA, 23 nt, Human herpesvirus 6B
augcgguugucuuguuagacaag

SEQ ID NO: 2045901 - RNA, 14 nt, Human herpesvirus 6B
uucauuguacgaua

SEQ ID NO: 2045902 - RNA, 22 nt, Human herpesvirus 6B
ucauuucgaucuaacuacauuu

SEQ ID NO: 2045903 - RNA, 19 nt, Human herpesvirus 6B
gaaccacaucuuuuccugc

SEQ ID NO: 2045904 - RNA, 19 nt, Human herpesvirus 6B
acugugaaaagugcuuuau

SEQ ID NO: 2045905 - RNA, 13 nt, Human herpesvirus 6B
uaaggucaaauau

SEQ ID NO: 2045906 - RNA, 12 nt, Human herpesvirus 6B
augucaaaauuu

SEQ ID NO: 2045907 - RNA, 20 nt, Human herpesvirus 6B
caaaguccuggaaagcaucc

SEQ ID NO: 2045908 - RNA, 18 nt, Human herpesvirus 6B
ggaauuauauguugauug

SEQ ID NO: 2045909 - RNA, 15 nt, Human herpesvirus 6B
aucgauucuguaauu

SEQ ID NO: 2045910 - RNA, 23 nt, Human herpesvirus 6B
uuauaaaugugagcaguuuuuua

SEQ ID NO: 2045911 - RNA, 18 nt, Human herpesvirus 6B
ucgugggaauuauauguu

SEQ ID NO: 2045912 - RNA, 14 nt, Human herpesvirus 6B
cguccucagagaaa

SEQ ID NO: 2045913 - RNA, 18 nt, Human herpesvirus 6B
cuguaguuuuuuucugau

SEQ ID NO: 2045914 - RNA, 18 nt, Human herpesvirus 6B
ggaaagauuuuuggauuu

SEQ ID NO: 2045915 - RNA, 14 nt, Human herpesvirus 6B
ucacucagauuuca

SEQ ID NO: 2045916 - RNA, 19 nt, Human herpesvirus 6B
gacuccgagccggacagga

SEQ ID NO: 2045917 - RNA, 18 nt, Human herpesvirus 6B
cgcccuccccgcacaguu

SEQ ID NO: 2045918 - RNA, 17 nt, Human herpesvirus 6B
gauuuuuguaaaaaugg

SEQ ID NO: 2045919 - RNA, 15 nt, Human herpesvirus 6B
aaaauucuaccguag

SEQ ID NO: 2045920 - RNA, 16 nt, Human herpesvirus 6B
ugauaaaacucaccca

SEQ ID NO: 2045921 - RNA, 20 nt, Human herpesvirus 6B
gaucccaaacaaacguguau

SEQ ID NO: 2045922 - RNA, 13 nt, Human herpesvirus 6B
ccaaaaaauguua

SEQ ID NO: 2045923 - RNA, 18 nt, Human herpesvirus 6B
gugcaguaucuggcuggu

SEQ ID NO: 2045924 - RNA, 12 nt, Human herpesvirus 6B
agacagaaauuu

SEQ ID NO: 2045925 - RNA, 23 nt, Human herpesvirus 6B
gacaguaacggcggcggcggcug

SEQ ID NO: 2045926 - RNA, 11 nt, Human herpesvirus 6B
uucaaaaugac

SEQ ID NO: 2045927 - RNA, 22 nt, Human herpesvirus 6B
aaaucaaggaagagaaugaauc

SEQ ID NO: 2045928 - RNA, 12 nt, Human herpesvirus 6B
guaaaagggcuc

SEQ ID NO: 2045929 - RNA, 17 nt, Human herpesvirus 6B
guuuuugauuguaagag

SEQ ID NO: 2045930 - RNA, 12 nt, Human herpesvirus 6B
ugcaucuugcaa

SEQ ID NO: 2045931 - RNA, 15 nt, Human herpesvirus 6B
cggugguuucugcuc

SEQ ID NO: 2045932 - RNA, 16 nt, Human herpesvirus 6B
uucaaugcguuucuuc

SEQ ID NO: 2045933 - RNA, 15 nt, Human herpesvirus 6B
cguagggacugcgag

SEQ ID NO: 2045934 - RNA, 15 nt, Human herpesvirus 6B
aauaugauggacaaa

SEQ ID NO: 2045935 - RNA, 17 nt, Human herpesvirus 6B
caaagggaagccagccg

SEQ ID NO: 2045936 - RNA, 13 nt, Human herpesvirus 6B
uuacggggaagau

SEQ ID NO: 2045937 - RNA, 14 nt, Human herpesvirus 6B
augaguggaguuga

SEQ ID NO: 2045938 - RNA, 17 nt, Human herpesvirus 6B
cuuccgcggcgcugggc

SEQ ID NO: 2045939 - RNA, 15 nt, Human herpesvirus 6B
gaugacuuuucugau

SEQ ID NO: 2045940 - RNA, 19 nt, Human herpesvirus 6B
acgugggguaaaaauguua

SEQ ID NO: 2045941 - RNA, 14 nt, Human herpesvirus 6B
gcaacuaagcugua

SEQ ID NO: 2045942 - RNA, 17 nt, Human herpesvirus 6B
uguaguuaguuuugaua

SEQ ID NO: 2045943 - RNA, 17 nt, Human herpesvirus 6B
auagaaagcggccaggc

SEQ ID NO: 2045944 - RNA, 14 nt, Human herpesvirus 6B
gaccgagacgguga

SEQ ID NO: 2045945 - RNA, 17 nt, Human herpesvirus 6B
acaccaaugaucacaca

SEQ ID NO: 2045946 - RNA, 13 nt, Human herpesvirus 6B
auugaauccucuu

SEQ ID NO: 2045947 - RNA, 17 nt, Human herpesvirus 6B
ucgauuaaugccacagg

SEQ ID NO: 2045948 - RNA, 14 nt, Human herpesvirus 6B
ccaggauagaaaaa

SEQ ID NO: 2045949 - RNA, 15 nt, Human herpesvirus 6B
uuauuucauuggaua

SEQ ID NO: 2045950 - RNA, 19 nt, Human herpesvirus 6B
uauaugaaaugucugagca

SEQ ID NO: 2045951 - RNA, 20 nt, Human herpesvirus 6B
ugcagaaccucgcauugaua

SEQ ID NO: 2045952 - RNA, 15 nt, Human herpesvirus 6B
aauaaaucaugugaa

SEQ ID NO: 2045953 - RNA, 18 nt, Human herpesvirus 6B
gcaagcaaacgcucgccg

SEQ ID NO: 2045954 - RNA, 22 nt, Human herpesvirus 6B
uuuucugccugcguuaagugaa

SEQ ID NO: 2045955 - RNA, 17 nt, Human herpesvirus 6B
cuugcacuuuuuucuaa

SEQ ID NO: 2045956 - RNA, 20 nt, Human herpesvirus 6B
guccuuggggucuuuuugcc

SEQ ID NO: 2045957 - RNA, 18 nt, Human herpesvirus 6B
aagaguguaaauguagaa

SEQ ID NO: 2045958 - RNA, 21 nt, Human herpesvirus 6B
ucuucacaaccaaacaguuuc

SEQ ID NO: 2045959 - RNA, 17 nt, Human herpesvirus 6B
gagaaaggaagaaauuc

SEQ ID NO: 2045960 - RNA, 13 nt, Human herpesvirus 6B
auuguacgauaau

SEQ ID NO: 2045961 - RNA, 23 nt, Human herpesvirus 6B
ccuagguuuucgaaacgggagaa

SEQ ID NO: 2045962 - RNA, 12 nt, Human herpesvirus 6B
ucuggugagaaa

SEQ ID NO: 2045963 - RNA, 21 nt, Human herpesvirus 6B
uaugagauugguuguuuuucu

SEQ ID NO: 2045964 - RNA, 14 nt, Human herpesvirus 6B
ggccgucuccugca

SEQ ID NO: 2045965 - RNA, 17 nt, Human herpesvirus 6B
ucgauaaggcucucgug

SEQ ID NO: 2045966 - RNA, 15 nt, Human herpesvirus 6B
auaauccuuuucugu

SEQ ID NO: 2045967 - RNA, 19 nt, Human herpesvirus 6B
gauaucucaccuaugaaua

SEQ ID NO: 2045968 - RNA, 21 nt, Human herpesvirus 6B
agcauccacccugauucucuu

SEQ ID NO: 2045969 - RNA, 18 nt, Human herpesvirus 6B
uaucaaacuuuuuuugaa

SEQ ID NO: 2045970 - RNA, 17 nt, Human herpesvirus 6B
gaagagguggcggcuca

SEQ ID NO: 2045971 - RNA, 14 nt, Human herpesvirus 6B
ccugccuacacugc

SEQ ID NO: 2045972 - RNA, 16 nt, Human herpesvirus 6B
uaggacugaaggagau

SEQ ID NO: 2045973 - RNA, 21 nt, Human herpesvirus 6B
uauaagucuaaugcaaagaug

SEQ ID NO: 2045974 - RNA, 17 nt, Human herpesvirus 6B
caggagcaggcucccca

SEQ ID NO: 2045975 - RNA, 20 nt, Human herpesvirus 6B
aguggcgcgcguuuuuggug

SEQ ID NO: 2045976 - RNA, 14 nt, Human herpesvirus 6B
gggaucgggccugg

SEQ ID NO: 2045977 - RNA, 11 nt, Human herpesvirus 6B
ccauauuugcc

SEQ ID NO: 2045978 - RNA, 12 nt, Human herpesvirus 6B
aauuuagacgaa

SEQ ID NO: 2045979 - RNA, 19 nt, Human herpesvirus 6B
ggagugaaacgauguguua

SEQ ID NO: 2045980 - RNA, 18 nt, Human herpesvirus 6B
agcugaugauuugaaaug

SEQ ID NO: 2045981 - RNA, 18 nt, Human herpesvirus 6B
uuugcgcaauucuucucu

SEQ ID NO: 2045982 - RNA, 14 nt, Human herpesvirus 6B
augcacacguguau

SEQ ID NO: 2045983 - RNA, 19 nt, Human herpesvirus 6B
uguacauguuaacaauaaa

SEQ ID NO: 2045984 - RNA, 20 nt, Human herpesvirus 6B
gagcggagaggcgcgggaca

SEQ ID NO: 2045985 - RNA, 21 nt, Human herpesvirus 6B
gcggcugauauacgauggaca

SEQ ID NO: 2045986 - RNA, 22 nt, Human herpesvirus 6B
agaaaauuggugugcauuaucg

SEQ ID NO: 2045987 - RNA, 15 nt, Human herpesvirus 6B
caucacguauggauc

SEQ ID NO: 2045988 - RNA, 22 nt, Human herpesvirus 6B
acgaaagacguuugcuuuuuua

SEQ ID NO: 2045989 - RNA, 19 nt, Human herpesvirus 6B
ucuuuaugucugucagaaa

SEQ ID NO: 2045990 - RNA, 19 nt, Human herpesvirus 6B
gaaaccaagacuugcauga

SEQ ID NO: 2045991 - RNA, 14 nt, Human herpesvirus 6B
ccuguuuucccacc

SEQ ID NO: 2045992 - RNA, 16 nt, Human herpesvirus 6B
cgaaaccaagacuugc

SEQ ID NO: 2045993 - RNA, 22 nt, Human herpesvirus 6B
agaaucuaaaucgcgagacaga

SEQ ID NO: 2045994 - RNA, 19 nt, Human herpesvirus 6B
ugaauuugcgucagaguuu

SEQ ID NO: 2045995 - RNA, 12 nt, Human herpesvirus 6B
augauaacuguu

SEQ ID NO: 2045996 - RNA, 21 nt, Human herpesvirus 6B
acaccaucuucagcucagaca

SEQ ID NO: 2045997 - RNA, 17 nt, Human herpesvirus 6B
gcgguuagaucugggga

SEQ ID NO: 2045998 - RNA, 15 nt, Human herpesvirus 6B
aagacuugcagauga

SEQ ID NO: 2045999 - RNA, 18 nt, Human herpesvirus 6B
guucuuugaacagugaca

SEQ ID NO: 2046000 - RNA, 12 nt, Human herpesvirus 6B
aaaacuacagag

SEQ ID NO: 2046001 - RNA, 15 nt, Human herpesvirus 6B
uugguacaauuuuua

SEQ ID NO: 2046002 - RNA, 20 nt, Human herpesvirus 6B
aaucuguaagauuaaaugug

SEQ ID NO: 2046003 - RNA, 16 nt, Human herpesvirus 6B
aaccuguuuccagaau

SEQ ID NO: 2046004 - RNA, 14 nt, Human herpesvirus 6B
aauggaagaaggcu

SEQ ID NO: 2046005 - RNA, 21 nt, Human herpesvirus 6B
aguauggugucugaaaaaugg

SEQ ID NO: 2046006 - RNA, 14 nt, Human herpesvirus 6B
cgaugcgccacagg

SEQ ID NO: 2046007 - RNA, 22 nt, Human herpesvirus 6B
caggaacgaggauuuuuucugc

SEQ ID NO: 2046008 - RNA, 15 nt, Human herpesvirus 6B
auguuuacugcaugc

SEQ ID NO: 2046009 - RNA, 23 nt, Human herpesvirus 6B
uaauucaaauguagcaaaugaau

SEQ ID NO: 2046010 - RNA, 22 nt, Human herpesvirus 6B
acaaccaaacaguuucagauga

SEQ ID NO: 2046011 - RNA, 13 nt, Human herpesvirus 6B
ugggacuccgagc

SEQ ID NO: 2046012 - RNA, 20 nt, Human herpesvirus 6B
gaaucagaucacucagauuu

SEQ ID NO: 2046013 - RNA, 15 nt, Human herpesvirus 6B
agaagauauuucccu

SEQ ID NO: 2046014 - RNA, 16 nt, Human herpesvirus 6B
cugcauacagaaauug

SEQ ID NO: 2046015 - RNA, 23 nt, Human herpesvirus 6B
cauuugcugacccgauguggaac

SEQ ID NO: 2046016 - RNA, 19 nt, Human herpesvirus 6B
agaaauuuaauugcaauuu

SEQ ID NO: 2046017 - RNA, 14 nt, Human herpesvirus 6B
gagcuccauguucu

SEQ ID NO: 2046018 - RNA, 12 nt, Human herpesvirus 6B
uaauuuuccagc

SEQ ID NO: 2046019 - RNA, 14 nt, Human herpesvirus 6B
auagagcauccugu

SEQ ID NO: 2046020 - RNA, 12 nt, Human herpesvirus 6B
guuacaguaaaa

SEQ ID NO: 2046021 - RNA, 12 nt, Human herpesvirus 6B
gcagacaucaca

SEQ ID NO: 2046022 - RNA, 15 nt, Human herpesvirus 6B
ccacagcggcagcgg

SEQ ID NO: 2046023 - RNA, 23 nt, Human herpesvirus 6B
ugaauggaguaaauuaaaguuua

SEQ ID NO: 2046024 - RNA, 18 nt, Human herpesvirus 6B
gaucuucuucagaaagau

SEQ ID NO: 2046025 - RNA, 16 nt, Human herpesvirus 6B
gccgucaccugcacug

SEQ ID NO: 2046026 - RNA, 15 nt, Human herpesvirus 6B
augacuaucaaaaua

SEQ ID NO: 2046027 - RNA, 14 nt, Human herpesvirus 6B
auuugaacagagau

SEQ ID NO: 2046028 - RNA, 18 nt, Human herpesvirus 6B
caagaaaagaaaaaacag

SEQ ID NO: 2046029 - RNA, 17 nt, Human herpesvirus 6B
aauuccucuauacucug

SEQ ID NO: 2046030 - RNA, 20 nt, Human herpesvirus 6B
gaccacucgggccggucggg

SEQ ID NO: 2046031 - RNA, 20 nt, Human herpesvirus 6B
agauaacggcgcagaauuac

SEQ ID NO: 2046032 - RNA, 15 nt, Human herpesvirus 6B
gcgcgacggagaugc

SEQ ID NO: 2046033 - RNA, 19 nt, Human herpesvirus 6B
agcucgaguucgagaagau

SEQ ID NO: 2046034 - RNA, 12 nt, Human herpesvirus 6B
guccaaugcucu

SEQ ID NO: 2046035 - RNA, 19 nt, Human herpesvirus 6B
cgcggaccacucgggccgg

SEQ ID NO: 2046036 - RNA, 18 nt, Human herpesvirus 6B
cuagagguuuucuuuccc

SEQ ID NO: 2046037 - RNA, 23 nt, Human herpesvirus 6B
gacgguucaggcucuuugggaaa

SEQ ID NO: 2046038 - RNA, 18 nt, Human herpesvirus 6B
aacgugggguaaaaaugu

SEQ ID NO: 2046039 - RNA, 20 nt, Human herpesvirus 6B
auuaauuuuuuguuucugaa

SEQ ID NO: 2046040 - RNA, 18 nt, Human herpesvirus 6B
cgauccgucaggaccagc

SEQ ID NO: 2046041 - RNA, 15 nt, Human herpesvirus 6B
guugaaaucuuuccu

SEQ ID NO: 2046042 - RNA, 20 nt, Human herpesvirus 6B
acgaggauuuuuucugccug

SEQ ID NO: 2046043 - RNA, 12 nt, Human herpesvirus 6B
acucucuuucag

SEQ ID NO: 2046044 - RNA, 15 nt, Human herpesvirus 6B
gcccucccgcagcuc

SEQ ID NO: 2046045 - RNA, 18 nt, Human herpesvirus 6B
accucaaaaaugcacaau

SEQ ID NO: 2046046 - RNA, 18 nt, Human herpesvirus 6B
cgacacgcgcggaccacu

SEQ ID NO: 2046047 - RNA, 15 nt, Human herpesvirus 6B
agacaauuauguuug

SEQ ID NO: 2046048 - RNA, 16 nt, Human herpesvirus 6B
ugaugaucugcuuugu

SEQ ID NO: 2046049 - RNA, 13 nt, Human herpesvirus 6B
auucagcuggaca

SEQ ID NO: 2046050 - RNA, 20 nt, Human herpesvirus 6B
ucguuucgaaugauagcguu

SEQ ID NO: 2046051 - RNA, 15 nt, Human herpesvirus 6B
gacgaauugaguaga

SEQ ID NO: 2046052 - RNA, 13 nt, Human herpesvirus 6B
cguauuauugugu

SEQ ID NO: 2046053 - RNA, 15 nt, Human herpesvirus 6B
uggacggcgagggga

SEQ ID NO: 2046054 - RNA, 15 nt, Human herpesvirus 6B
guuauggggaagauc

SEQ ID NO: 2046055 - RNA, 19 nt, Human herpesvirus 6B
agaccgcuauggcagaaag

SEQ ID NO: 2046056 - RNA, 15 nt, Human herpesvirus 6B
aucgagacugcccug

SEQ ID NO: 2046057 - RNA, 22 nt, Human herpesvirus 6B
aagaaagcguguucaaaaaugu

SEQ ID NO: 2046058 - RNA, 22 nt, Human herpesvirus 6B
guaccccggcuuucucgccgcc

SEQ ID NO: 2046059 - RNA, 12 nt, Human herpesvirus 6B
cugauaaacucc

SEQ ID NO: 2046060 - RNA, 21 nt, Human herpesvirus 6B
gacagcaguuuuuuggggaag

SEQ ID NO: 2046061 - RNA, 22 nt, Human herpesvirus 6B
uuacuuacaucgauccaaaaga

SEQ ID NO: 2046062 - RNA, 19 nt, Human herpesvirus 6B
accgcuauggcagaaagcu

SEQ ID NO: 2046063 - RNA, 19 nt, Human herpesvirus 6B
guauucgaaaaauauuuua

SEQ ID NO: 2046064 - RNA, 20 nt, Human herpesvirus 6B
uuuguauccgagcauuauga

SEQ ID NO: 2046065 - RNA, 21 nt, Human herpesvirus 6B
cgaaaacacccugauggauua

SEQ ID NO: 2046066 - RNA, 13 nt, Human herpesvirus 6B
gggacggagagga

SEQ ID NO: 2046067 - RNA, 20 nt, Human herpesvirus 6B
acguccgugaugauucaaua

SEQ ID NO: 2046068 - RNA, 15 nt, Human herpesvirus 6B
cauaugcaaucugug

SEQ ID NO: 2046069 - RNA, 16 nt, Human herpesvirus 6B
aagaggaagggauggc

SEQ ID NO: 2046070 - RNA, 17 nt, Human herpesvirus 6B
gucuugcaaacagcuuu

SEQ ID NO: 2046071 - RNA, 12 nt, Human herpesvirus 6B
aacaguuguagc

SEQ ID NO: 2046072 - RNA, 18 nt, Human herpesvirus 6B
ugaacaguauaaauucuu

SEQ ID NO: 2046073 - RNA, 17 nt, Human herpesvirus 6B
ucaagacgccuaguguu

SEQ ID NO: 2046074 - RNA, 20 nt, Human herpesvirus 6B
aaaaauugacaaucuuggaa

SEQ ID NO: 2046075 - RNA, 23 nt, Human herpesvirus 6B
caaugauuuuguuuauugcuuuu

SEQ ID NO: 2046076 - RNA, 15 nt, Human herpesvirus 6B
uuaauccauauuugg

SEQ ID NO: 2046077 - RNA, 12 nt, Human herpesvirus 6B
cuaagcuggaca

SEQ ID NO: 2046078 - RNA, 17 nt, Human herpesvirus 6B
uccauuuucugaaaucu

SEQ ID NO: 2046079 - RNA, 21 nt, Human herpesvirus 6B
uuccuuguguugaagaacaaa

SEQ ID NO: 2046080 - RNA, 21 nt, Human herpesvirus 6B
aacugaggacguccuguucga

SEQ ID NO: 2046081 - RNA, 20 nt, Human herpesvirus 6B
cgggccuggggacagacagg

SEQ ID NO: 2046082 - RNA, 13 nt, Human herpesvirus 6B
uuuacuguuuuga

SEQ ID NO: 2046083 - RNA, 16 nt, Human herpesvirus 6B
uuauaagauuuacaga

SEQ ID NO: 2046084 - RNA, 23 nt, Human herpesvirus 6B
auauccguuuaguuacuuugcuu

SEQ ID NO: 2046085 - RNA, 21 nt, Human herpesvirus 6B
agcaucgauaccagaaaaugu

SEQ ID NO: 2046086 - RNA, 15 nt, Human herpesvirus 6B
acuccaaaaucuuua

SEQ ID NO: 2046087 - RNA, 20 nt, Human herpesvirus 6B
cagauagaaaauugucuaca

SEQ ID NO: 2046088 - RNA, 12 nt, Human herpesvirus 6B
ucaugugaaauu

SEQ ID NO: 2046089 - RNA, 17 nt, Human herpesvirus 6B
uuugcguuauuugugca

SEQ ID NO: 2046090 - RNA, 10 nt, Human herpesvirus 6B
cuugcagugg

SEQ ID NO: 2046091 - RNA, 11 nt, Human herpesvirus 6B
uuuucaagaau

SEQ ID NO: 2046092 - RNA, 19 nt, Human herpesvirus 6B
aucggaauguugguaaacu

SEQ ID NO: 2046093 - RNA, 17 nt, Human herpesvirus 6B
agcucuuuguucugcug

SEQ ID NO: 2046094 - RNA, 16 nt, Human herpesvirus 6B
gaacacgucguggcag

SEQ ID NO: 2046095 - RNA, 13 nt, Human herpesvirus 6B
aaccaaguguuuu

SEQ ID NO: 2046096 - RNA, 20 nt, Human herpesvirus 6B
agagaauagagauaaaugua

SEQ ID NO: 2046097 - RNA, 11 nt, Human herpesvirus 6B
uuugcugucac

SEQ ID NO: 2046098 - RNA, 12 nt, Human herpesvirus 6B
caggagaagaac

SEQ ID NO: 2046099 - RNA, 21 nt, Human herpesvirus 6B
gcaccgcagaucacgucccgc

SEQ ID NO: 2046100 - RNA, 22 nt, Human herpesvirus 6B
caguaugucucaguucaaaauu

SEQ ID NO: 2046101 - RNA, 21 nt, Human herpesvirus 6B
caugccgccugaaaccccaca

SEQ ID NO: 2046102 - RNA, 22 nt, Human herpesvirus 6B
guucuuucaaaaugaccagaga

SEQ ID NO: 2046103 - RNA, 22 nt, Human herpesvirus 6B
ccaugccauugaauacacgugu

SEQ ID NO: 2046104 - RNA, 20 nt, Human herpesvirus 6B
aucaaggucuaucucuuggc

SEQ ID NO: 2046105 - RNA, 20 nt, Human herpesvirus 6B
uucagaaaauuggugugcau

SEQ ID NO: 2046106 - RNA, 16 nt, Human herpesvirus 6B
cuuacaaguauguuuu

SEQ ID NO: 2046107 - RNA, 14 nt, Human herpesvirus 6B
cuauguuaacauug

SEQ ID NO: 2046108 - RNA, 18 nt, Human herpesvirus 6B
cauaagcucuacacagag

SEQ ID NO: 2046109 - RNA, 17 nt, Human herpesvirus 6B
ccccauacacacccagc

SEQ ID NO: 2046110 - RNA, 13 nt, Human herpesvirus 6B
aaucacaaaauga

SEQ ID NO: 2046111 - RNA, 23 nt, Human herpesvirus 6B
auggaagaaggcuaucacuuaga

SEQ ID NO: 2046112 - RNA, 21 nt, Human herpesvirus 6B
cggagcccugagagcaggagc

SEQ ID NO: 2046113 - RNA, 22 nt, Human herpesvirus 6B
cacucgggccggucggggaggg

SEQ ID NO: 2046114 - RNA, 20 nt, Human herpesvirus 6B
auguaauguauuguucgcug

SEQ ID NO: 2046115 - RNA, 22 nt, Human herpesvirus 6B
acggaauauauagaagaagaaa

SEQ ID NO: 2046116 - RNA, 21 nt, Human herpesvirus 6B
cgaauuauguauguguuaaua

SEQ ID NO: 2046117 - RNA, 15 nt, Human herpesvirus 6B
guaugagcguuuaua

SEQ ID NO: 2046118 - RNA, 14 nt, Human herpesvirus 6B
gaaaguuuuggaaa

SEQ ID NO: 2046119 - RNA, 22 nt, Human herpesvirus 6B
ggaacccuagacacacagaaaa

SEQ ID NO: 2046120 - RNA, 15 nt, Human herpesvirus 6B
cgcugggcuccucac

SEQ ID NO: 2046121 - RNA, 17 nt, Human herpesvirus 6B
auuugcauuaaggaaaa

SEQ ID NO: 2046122 - RNA, 16 nt, Human herpesvirus 6B
auaaagcuuucauuuc

SEQ ID NO: 2046123 - RNA, 23 nt, Human herpesvirus 6B
uccugcaauuugaauucugcucg

SEQ ID NO: 2046124 - RNA, 12 nt, Human herpesvirus 6B
gacgauuucauu

SEQ ID NO: 2046125 - RNA, 15 nt, Human herpesvirus 6B
acaagggcuuggggc

SEQ ID NO: 2046126 - RNA, 22 nt, Human herpesvirus 6B
uacagacuccucaccgaaaucc

SEQ ID NO: 2046127 - RNA, 13 nt, Human herpesvirus 6B
uccucgaagaauu

SEQ ID NO: 2046128 - RNA, 11 nt, Human herpesvirus 6B
acgggcagggc

SEQ ID NO: 2046129 - RNA, 20 nt, Human herpesvirus 6B
caauccggaguuaaucucuu

SEQ ID NO: 2046130 - RNA, 12 nt, Human herpesvirus 6B
cacaaaucugua

SEQ ID NO: 2046131 - RNA, 14 nt, Human herpesvirus 6B
gaauuacugcugcg

SEQ ID NO: 2046132 - RNA, 16 nt, Human herpesvirus 6B
cgacgcccauagaaga

SEQ ID NO: 2046133 - RNA, 19 nt, Human herpesvirus 6B
uuauccccaaacucuugca

SEQ ID NO: 2046134 - RNA, 18 nt, Human herpesvirus 6B
guccgacacgcccccacc

SEQ ID NO: 2046135 - RNA, 14 nt, Human herpesvirus 6B
cuacaucaaaaucc

SEQ ID NO: 2046136 - RNA, 13 nt, Human herpesvirus 6B
cgagccggacagg

SEQ ID NO: 2046137 - RNA, 18 nt, Human herpesvirus 6B
ccauaggcucggcagggg

SEQ ID NO: 2046138 - RNA, 19 nt, Human herpesvirus 6B
gacaguauuuacugagcaa

SEQ ID NO: 2046139 - RNA, 15 nt, Human herpesvirus 6B
ccguucaacaagucc

SEQ ID NO: 2046140 - RNA, 15 nt, Human herpesvirus 6B
caaaagcgccugccu

SEQ ID NO: 2046141 - RNA, 14 nt, Human herpesvirus 6B
acaaccaaguguuu

SEQ ID NO: 2046142 - RNA, 19 nt, Human herpesvirus 6B
agggaauaacagaugagga

SEQ ID NO: 2046143 - RNA, 18 nt, Human herpesvirus 6B
uauuuuaaagauuuucua

SEQ ID NO: 2046144 - RNA, 22 nt, Human herpesvirus 6B
guuuaaagugaguuuuggaaau

SEQ ID NO: 2046145 - RNA, 18 nt, Human herpesvirus 6B
ccguccucgugcucuccg

SEQ ID NO: 2046146 - RNA, 20 nt, Human herpesvirus 6B
auaaacaugauuguaauaaa

SEQ ID NO: 2046147 - RNA, 15 nt, Human herpesvirus 6B
guucagagcugauga

SEQ ID NO: 2046148 - RNA, 19 nt, Human herpesvirus 6B
aaagucguuuuggagaaau

SEQ ID NO: 2046149 - RNA, 18 nt, Human herpesvirus 6B
aggcggacagcgugauga

SEQ ID NO: 2046150 - RNA, 17 nt, Human herpesvirus 6B
cgcauucacuggaggcg

SEQ ID NO: 2046151 - RNA, 15 nt, Human herpesvirus 6B
agacgccuauucuaa

SEQ ID NO: 2046152 - RNA, 13 nt, Human herpesvirus 6B
ucguucuuugcac

SEQ ID NO: 2046153 - RNA, 22 nt, Human herpesvirus 6B
augaauuugagaagauaauuac

SEQ ID NO: 2046154 - RNA, 19 nt, Human herpesvirus 6B
gcaugaaguguuaugaaga

SEQ ID NO: 2046155 - RNA, 12 nt, Human herpesvirus 6B
augccuugggga

SEQ ID NO: 2046156 - RNA, 22 nt, Human herpesvirus 6B
aaacgugagguguauuugaaau

SEQ ID NO: 2046157 - RNA, 17 nt, Human herpesvirus 6B
gacaucaggcaaagaug

SEQ ID NO: 2046158 - RNA, 14 nt, Human herpesvirus 6B
gcgucgggcgguuc

SEQ ID NO: 2046159 - RNA, 17 nt, Human herpesvirus 6B
aggauauugagacguuu

SEQ ID NO: 2046160 - RNA, 14 nt, Human herpesvirus 6B
uccauauuuggaag

SEQ ID NO: 2046161 - RNA, 23 nt, Human herpesvirus 6B
uaucugaaaucgcauuucucuac

SEQ ID NO: 2046162 - RNA, 17 nt, Human herpesvirus 6B
agcuagacgugucuuca

SEQ ID NO: 2046163 - RNA, 20 nt, Human herpesvirus 6B
gaaaaagccugaaggcuacu

SEQ ID NO: 2046164 - RNA, 14 nt, Human herpesvirus 6B
ggauaaauuccucu

SEQ ID NO: 2046165 - RNA, 13 nt, Human herpesvirus 6B
uguaaaaaaagau

SEQ ID NO: 2046166 - RNA, 19 nt, Human herpesvirus 6B
uauguaaagaaacaaaauu

SEQ ID NO: 2046167 - RNA, 13 nt, Human herpesvirus 6B
auguaucugaaaa

SEQ ID NO: 2046168 - RNA, 17 nt, Human herpesvirus 6B
uggaaagauuggaaucu

SEQ ID NO: 2046169 - RNA, 15 nt, Human herpesvirus 6B
aaguuuaaguucuca

SEQ ID NO: 2046170 - RNA, 22 nt, Human herpesvirus 6B
uuuugcagaaugaauguaacug

SEQ ID NO: 2046171 - RNA, 15 nt, Human herpesvirus 6B
gaugcauuguugaaa

SEQ ID NO: 2046172 - RNA, 15 nt, Human herpesvirus 6B
cuaagcuggacagaa

SEQ ID NO: 2046173 - RNA, 21 nt, Human herpesvirus 6B
uguuuucaaugguauucgaaa

SEQ ID NO: 2046174 - RNA, 19 nt, Human herpesvirus 6B
ugucugagcauuguguauu

SEQ ID NO: 2046175 - RNA, 16 nt, Human herpesvirus 6B
uuaugacugacaaggu

SEQ ID NO: 2046176 - RNA, 16 nt, Human herpesvirus 6B
uguaggacugaaggag

SEQ ID NO: 2046177 - RNA, 18 nt, Human herpesvirus 6B
auggacagaaaaaacacc

SEQ ID NO: 2046178 - RNA, 22 nt, Human herpesvirus 6B
auccgcuaagagauuuacuguu

SEQ ID NO: 2046179 - RNA, 21 nt, Human herpesvirus 6B
uaaagucgcuucgaauguuga

SEQ ID NO: 2046180 - RNA, 21 nt, Human herpesvirus 6B
uaacagacauaugcaaucugu

SEQ ID NO: 2046181 - RNA, 14 nt, Human herpesvirus 6B
uucuaucuacaaaa

SEQ ID NO: 2046182 - RNA, 14 nt, Human herpesvirus 6B
gaucucauaugcau

SEQ ID NO: 2046183 - RNA, 19 nt, Human herpesvirus 6B
acuugcuaacuaucaugug

SEQ ID NO: 2046184 - RNA, 15 nt, Human herpesvirus 6B
ugcuuguuuuggugg

SEQ ID NO: 2046185 - RNA, 16 nt, Human herpesvirus 6B
caaccaaacaguuuca

SEQ ID NO: 2046186 - RNA, 18 nt, Human herpesvirus 6B
ccgcgucuccgauccguc

SEQ ID NO: 2046187 - RNA, 19 nt, Human herpesvirus 6B
acacguuauuuauuuaacg

SEQ ID NO: 2046188 - RNA, 16 nt, Human herpesvirus 6B
gccguggugcgccugu

SEQ ID NO: 2046189 - RNA, 16 nt, Human herpesvirus 6B
auccuuauaucugaaa

SEQ ID NO: 2046190 - RNA, 14 nt, Human herpesvirus 6B
cuguacacaaaaac

SEQ ID NO: 2046191 - RNA, 21 nt, Human herpesvirus 6B
agauuauggcaacauacccuu

SEQ ID NO: 2046192 - RNA, 19 nt, Human herpesvirus 6B
uauguauaauauaaauucu

SEQ ID NO: 2046193 - RNA, 21 nt, Human herpesvirus 6B
cauuugauguugucuucugug

SEQ ID NO: 2046194 - RNA, 18 nt, Human herpesvirus 6B
aaaauaccugacuguucu

SEQ ID NO: 2046195 - RNA, 23 nt, Human herpesvirus 6B
caacuuaaaauuuuuaaacagau

SEQ ID NO: 2046196 - RNA, 14 nt, Human herpesvirus 6B
gacgagauguuucu

SEQ ID NO: 2046197 - RNA, 19 nt, Human herpesvirus 6B
uuucgugcgaaaaaacagu

SEQ ID NO: 2046198 - RNA, 21 nt, Human herpesvirus 6B
aacuaucuuacuguaaacaaa

SEQ ID NO: 2046199 - RNA, 19 nt, Human herpesvirus 6B
auucaaguccaaugcucug

SEQ ID NO: 2046200 - RNA, 13 nt, Human herpesvirus 6B
gauuuucuagaug

SEQ ID NO: 2046201 - RNA, 16 nt, Human herpesvirus 6B
ugaaaagccccugcuu

SEQ ID NO: 2046202 - RNA, 14 nt, Human herpesvirus 6B
gcgcagcagcagcu

SEQ ID NO: 2046203 - RNA, 16 nt, Human herpesvirus 6B
gugagcagaagcuguc

SEQ ID NO: 2046204 - RNA, 18 nt, Human herpesvirus 6B
cgccauccacccauauac

SEQ ID NO: 2046205 - RNA, 9 nt, Human herpesvirus 6B
gggaggaga

SEQ ID NO: 2046206 - RNA, 16 nt, Human herpesvirus 6B
uccagggugaagacag

SEQ ID NO: 2046207 - RNA, 13 nt, Human herpesvirus 6B
gagucuguuacaa

SEQ ID NO: 2046208 - RNA, 18 nt, Human herpesvirus 6B
ccuggcgggcaccgaggg

SEQ ID NO: 2046209 - RNA, 21 nt, Human herpesvirus 6B
gagugaauugugcaagcugua

SEQ ID NO: 2046210 - RNA, 13 nt, Human herpesvirus 6B
cgucacacagcau

SEQ ID NO: 2046211 - RNA, 17 nt, Human herpesvirus 6B
aaggcuuaggauguaaa

SEQ ID NO: 2046212 - RNA, 17 nt, Human herpesvirus 6B
ggaggagagggaggaga

SEQ ID NO: 2046213 - RNA, 16 nt, Human herpesvirus 6B
cucauguugauuuuag

SEQ ID NO: 2046214 - RNA, 18 nt, Human herpesvirus 6B
gguauucauaaaauuuug

SEQ ID NO: 2046215 - RNA, 19 nt, Human herpesvirus 6B
caucgcgguguccucgucc

SEQ ID NO: 2046216 - RNA, 15 nt, Human herpesvirus 6B
uccaggaguaaugau

SEQ ID NO: 2046217 - RNA, 14 nt, Human herpesvirus 6B
cuucgugcaauaac

SEQ ID NO: 2046218 - RNA, 20 nt, Human herpesvirus 6B
auagagaagaauccgcgggc

SEQ ID NO: 2046219 - RNA, 10 nt, Human herpesvirus 6B
gaggaggagg

SEQ ID NO: 2046220 - RNA, 19 nt, Human herpesvirus 6B
ccagugauucugcuaugau

SEQ ID NO: 2046221 - RNA, 22 nt, Human herpesvirus 6B
cucgccgucgucgcucucccuc

SEQ ID NO: 2046222 - RNA, 16 nt, Human herpesvirus 6B
accgucaagaaguugu

SEQ ID NO: 2046223 - RNA, 12 nt, Human herpesvirus 6B
uuuuuguuugac

SEQ ID NO: 2046224 - RNA, 18 nt, Human herpesvirus 6B
gaagccggagcccugaga

SEQ ID NO: 2046225 - RNA, 19 nt, Human herpesvirus 6B
ugaugccuugauguuuccu

SEQ ID NO: 2046226 - RNA, 14 nt, Human herpesvirus 6B
gagcaauucaucaa

SEQ ID NO: 2046227 - RNA, 12 nt, Human herpesvirus 6B
acuuauuucauu

SEQ ID NO: 2046228 - RNA, 18 nt, Human herpesvirus 6B
agguuucuaaaucugaaa

SEQ ID NO: 2046229 - RNA, 16 nt, Human herpesvirus 6B
acggacagagcggaga

SEQ ID NO: 2046230 - RNA, 18 nt, Human herpesvirus 6B
gguugucagauuucccaa

SEQ ID NO: 2046231 - RNA, 22 nt, Human herpesvirus 6B
auuuaacgauccuuuucucaca

SEQ ID NO: 2046232 - RNA, 14 nt, Human herpesvirus 6B
gguuuucagacaug

SEQ ID NO: 2046233 - RNA, 22 nt, Human herpesvirus 6B
gcaccgagggcgggcggacggc

SEQ ID NO: 2046234 - RNA, 20 nt, Human herpesvirus 6B
gaauguugguaaacuuacca

SEQ ID NO: 2046235 - RNA, 14 nt, Human herpesvirus 6B
auugagcucuugga

SEQ ID NO: 2046236 - RNA, 15 nt, Human herpesvirus 6B
ugaucggaacaaauu

SEQ ID NO: 2046237 - RNA, 19 nt, Human herpesvirus 6B
cuugaucacuucuucugca

SEQ ID NO: 2046238 - RNA, 13 nt, Human herpesvirus 6B
guguucauagagc

SEQ ID NO: 2046239 - RNA, 19 nt, Human herpesvirus 6B
aacaaagagcuuuaaagca

SEQ ID NO: 2046240 - RNA, 21 nt, Human herpesvirus 6B
auuauuguguguccugagaau

SEQ ID NO: 2046241 - RNA, 15 nt, Human herpesvirus 6B
auaccgugacagcaa

SEQ ID NO: 2046242 - RNA, 18 nt, Human herpesvirus 6B
acaugacggacuuggaaa

SEQ ID NO: 2046243 - RNA, 20 nt, Human herpesvirus 6B
ugacugcguuacaagcaugc

SEQ ID NO: 2046244 - RNA, 23 nt, Human herpesvirus 6B
gcaugacacaucgugaguuuuca

SEQ ID NO: 2046245 - RNA, 19 nt, Human herpesvirus 6B
uuguuccacgguggauuau

SEQ ID NO: 2046246 - RNA, 20 nt, Human herpesvirus 6B
cggcguuacuuuaccucugc

SEQ ID NO: 2046247 - RNA, 13 nt, Human herpesvirus 6B
aggaagaggagga

SEQ ID NO: 2046248 - RNA, 23 nt, Human herpesvirus 6B
ggcaacguuuucugcucaacaau

SEQ ID NO: 2046249 - RNA, 22 nt, Human herpesvirus 6B
uuuaucccucguacaagcuuaa

SEQ ID NO: 2046250 - RNA, 16 nt, Human herpesvirus 6B
uuaggacaugugguaa

SEQ ID NO: 2046251 - RNA, 22 nt, Human herpesvirus 6B
ucacaagaagaugcuuuaaaaa

SEQ ID NO: 2046252 - RNA, 15 nt, Human herpesvirus 6B
acccaugaaaaucau

SEQ ID NO: 2046253 - RNA, 15 nt, Human herpesvirus 6B
augacucaagaauua

SEQ ID NO: 2046254 - RNA, 16 nt, Human herpesvirus 6B
gcacucuccgaccagc

SEQ ID NO: 2046255 - RNA, 13 nt, Human herpesvirus 6B
ugggggauggguu

SEQ ID NO: 2046256 - RNA, 18 nt, Human herpesvirus 6B
uaaaaccaucuauuugca

SEQ ID NO: 2046257 - RNA, 22 nt, Human herpesvirus 6B
ggggcgucgggcgacgggcagg

SEQ ID NO: 2046258 - RNA, 15 nt, Human herpesvirus 6B
aagccggagcccuga

SEQ ID NO: 2046259 - RNA, 14 nt, Human herpesvirus 6B
acuugaagagaguu

SEQ ID NO: 2046260 - RNA, 13 nt, Human herpesvirus 6B
acuacagcuaaga

SEQ ID NO: 2046261 - RNA, 13 nt, Human herpesvirus 6B
cuucacgugauuu

SEQ ID NO: 2046262 - RNA, 12 nt, Human herpesvirus 6B
ggcgcaccgccu

SEQ ID NO: 2046263 - RNA, 21 nt, Human herpesvirus 6B
cuaacgacggaauuuacuguu

SEQ ID NO: 2046264 - RNA, 15 nt, Human herpesvirus 6B
auaacaucucagauc

SEQ ID NO: 2046265 - RNA, 19 nt, Human herpesvirus 6B
aagguguuaaacgaaaacu

SEQ ID NO: 2046266 - RNA, 11 nt, Human herpesvirus 6B
ugccgugagaa

SEQ ID NO: 2046267 - RNA, 12 nt, Human herpesvirus 6B
cauuuucugaaa

SEQ ID NO: 2046268 - RNA, 13 nt, Human herpesvirus 6B
agucugucagugg

SEQ ID NO: 2046269 - RNA, 20 nt, Human herpesvirus 6B
uucagagcugaugauuugaa

SEQ ID NO: 2046270 - RNA, 16 nt, Human herpesvirus 6B
ccugacgguuagauuu

SEQ ID NO: 2046271 - RNA, 13 nt, Human herpesvirus 6B
uaacuucaagaau

SEQ ID NO: 2046272 - RNA, 15 nt, Human herpesvirus 6B
gaucuuauaaaugug

SEQ ID NO: 2046273 - RNA, 18 nt, Human herpesvirus 6B
cuccguuccaaccuccuc

SEQ ID NO: 2046274 - RNA, 16 nt, Human herpesvirus 6B
gucugugcuuggaagu

SEQ ID NO: 2046275 - RNA, 18 nt, Human herpesvirus 6B
ccugaugguuaaggaaaa

SEQ ID NO: 2046276 - RNA, 16 nt, Human herpesvirus 6B
cuuuguccuauguuaa

SEQ ID NO: 2046277 - RNA, 15 nt, Human herpesvirus 6B
gauguguuaaagaau

SEQ ID NO: 2046278 - RNA, 21 nt, Human herpesvirus 6B
gggcuuaauaaaggauguuug

SEQ ID NO: 2046279 - RNA, 20 nt, Human herpesvirus 6B
cauagacugaacacaaaaac

SEQ ID NO: 2046280 - RNA, 18 nt, Human herpesvirus 6B
cggcgcugggcuccucac

SEQ ID NO: 2046281 - RNA, 17 nt, Human herpesvirus 6B
uucacacgguucugauu

SEQ ID NO: 2046282 - RNA, 22 nt, Human herpesvirus 6B
auuucuuuuuaaaaucaaaaaa

SEQ ID NO: 2046283 - RNA, 14 nt, Human herpesvirus 6B
accuaagcuggaca

SEQ ID NO: 2046284 - RNA, 19 nt, Human herpesvirus 6B
ugcgucucuuuaaacagau

SEQ ID NO: 2046285 - RNA, 17 nt, Human herpesvirus 6B
auggaucaaucuccaaa

SEQ ID NO: 2046286 - RNA, 18 nt, Human herpesvirus 6B
uacguggccgucuccugc

SEQ ID NO: 2046287 - RNA, 20 nt, Human herpesvirus 6B
cgccaacgcuaaauuuauca

SEQ ID NO: 2046288 - RNA, 17 nt, Human herpesvirus 6B
agaacgagacuggacag

SEQ ID NO: 2046289 - RNA, 15 nt, Human herpesvirus 6B
ugaauuugagaagau

SEQ ID NO: 2046290 - RNA, 13 nt, Human herpesvirus 6B
uauguaucugaaa

SEQ ID NO: 2046291 - RNA, 23 nt, Human herpesvirus 6B
auucuuacaaguauguuuuguac

SEQ ID NO: 2046292 - RNA, 11 nt, Human herpesvirus 6B
uugcugucaca

SEQ ID NO: 2046293 - RNA, 12 nt, Human herpesvirus 6B
uguuucuuagaa

SEQ ID NO: 2046294 - RNA, 13 nt, Human herpesvirus 6B
caacuugcugucg

SEQ ID NO: 2046295 - RNA, 20 nt, Human herpesvirus 6B
uaaaguccuaucugaguugu

SEQ ID NO: 2046296 - RNA, 14 nt, Human herpesvirus 6B
uggaaaacugcaga

SEQ ID NO: 2046297 - RNA, 10 nt, Human herpesvirus 6B
ucagcagaag

SEQ ID NO: 2046298 - RNA, 16 nt, Human herpesvirus 6B
uaacgauguugcacga

SEQ ID NO: 2046299 - RNA, 17 nt, Human herpesvirus 6B
auacggaaguugaaaaa

SEQ ID NO: 2046300 - RNA, 20 nt, Human herpesvirus 6B
agcaaaugaauguguucaua

SEQ ID NO: 2046301 - RNA, 18 nt, Human herpesvirus 6B
uauugcuaagaucugucu

SEQ ID NO: 2046302 - RNA, 14 nt, Human herpesvirus 6B
ccuuuaaccauguu

SEQ ID NO: 2046303 - RNA, 16 nt, Human herpesvirus 6B
uggcuuggccagccac

SEQ ID NO: 2046304 - RNA, 13 nt, Human herpesvirus 6B
ucuguuaauuccu

SEQ ID NO: 2046305 - RNA, 12 nt, Human herpesvirus 6B
gacaggcgcacc

SEQ ID NO: 2046306 - RNA, 14 nt, Human herpesvirus 6B
gcuauacuacgaga

SEQ ID NO: 2046307 - RNA, 19 nt, Human herpesvirus 6B
ucaccuaugaauaucuuua

SEQ ID NO: 2046308 - RNA, 20 nt, Human herpesvirus 6B
ugugauaguuauuuuguaua

SEQ ID NO: 2046309 - RNA, 20 nt, Human herpesvirus 6B
gaguauuuuaaagauuuucu

SEQ ID NO: 2046310 - RNA, 12 nt, Human herpesvirus 6B
ucauuucuguag

SEQ ID NO: 2046311 - RNA, 13 nt, Human herpesvirus 6B
auauauaugaauu

SEQ ID NO: 2046312 - RNA, 13 nt, Human herpesvirus 6B
ggagaccaugcca

SEQ ID NO: 2046313 - RNA, 14 nt, Human herpesvirus 6B
agugcaagcucuuc

SEQ ID NO: 2046314 - RNA, 20 nt, Human herpesvirus 6B
uuaagcaacugauuaagauu

SEQ ID NO: 2046315 - RNA, 16 nt, Human herpesvirus 6B
auuugguacccuugca

SEQ ID NO: 2046316 - RNA, 17 nt, Human herpesvirus 6B
agacauucaacauuccc

SEQ ID NO: 2046317 - RNA, 20 nt, Human herpesvirus 6B
uccauaccgggacagcaccc

SEQ ID NO: 2046318 - RNA, 16 nt, Human herpesvirus 6B
agcuuucauaagcucu

SEQ ID NO: 2046319 - RNA, 18 nt, Human herpesvirus 6B
auacgucagcucuucacu

SEQ ID NO: 2046320 - RNA, 16 nt, Human herpesvirus 6B
acggauugacacaaug

SEQ ID NO: 2046321 - RNA, 19 nt, Human herpesvirus 6B
uguuuuguacaaagguuuu

SEQ ID NO: 2046322 - RNA, 11 nt, Human herpesvirus 6B
gucuuuguccu

SEQ ID NO: 2046323 - RNA, 20 nt, Human herpesvirus 6B
auuccugaugguuaaggaaa

SEQ ID NO: 2046324 - RNA, 13 nt, Human herpesvirus 6B
acagaaaauuuca

SEQ ID NO: 2046325 - RNA, 15 nt, Human herpesvirus 6B
gguguaccagacaaa

SEQ ID NO: 2046326 - RNA, 17 nt, Human herpesvirus 6B
gaauucagcuggacaga

SEQ ID NO: 2046327 - RNA, 17 nt, Human herpesvirus 6B
auugaguagagcuuuga

SEQ ID NO: 2046328 - RNA, 19 nt, Human herpesvirus 6B
cgcauguaugguugcgaaa

SEQ ID NO: 2046329 - RNA, 18 nt, Human herpesvirus 6B
gucauauccagaaaauac

SEQ ID NO: 2046330 - RNA, 19 nt, Human herpesvirus 6B
auugcucaaaauuggcauu

SEQ ID NO: 2046331 - RNA, 19 nt, Human herpesvirus 6B
accccccucuugcaguggc

SEQ ID NO: 2046332 - RNA, 14 nt, Human herpesvirus 6B
cucauuugcaauug

SEQ ID NO: 2046333 - RNA, 23 nt, Human herpesvirus 6B
aagagugauucaagguggagguu

SEQ ID NO: 2046334 - RNA, 16 nt, Human herpesvirus 6B
agugugcguuauuuuc

SEQ ID NO: 2046335 - RNA, 17 nt, Human herpesvirus 6B
auuugugcaaaaugugg

SEQ ID NO: 2046336 - RNA, 19 nt, Human herpesvirus 6B
auaaugugaacuaaauaau

SEQ ID NO: 2046337 - RNA, 14 nt, Human herpesvirus 6B
caauaaacaugauu

SEQ ID NO: 2046338 - RNA, 15 nt, Human herpesvirus 6B
uucuccgcccuccug

SEQ ID NO: 2046339 - RNA, 23 nt, Human herpesvirus 6B
acggccacccgcgucuccgaucc

SEQ ID NO: 2046340 - RNA, 19 nt, Human herpesvirus 6B
aagggucgaagacauucaa

SEQ ID NO: 2046341 - RNA, 23 nt, Human herpesvirus 6B
accugcuaacggagcaaccgcag

SEQ ID NO: 2046342 - RNA, 14 nt, Human herpesvirus 6B
gcuuuuaguuucaa

SEQ ID NO: 2046343 - RNA, 19 nt, Human herpesvirus 6B
gcaggcuccccaggcgcag

SEQ ID NO: 2046344 - RNA, 14 nt, Human herpesvirus 6B
uuaauaucugucaa

SEQ ID NO: 2046345 - RNA, 12 nt, Human herpesvirus 6B
cguggugugcac

SEQ ID NO: 2046346 - RNA, 22 nt, Human herpesvirus 6B
uagacgugucuucauucuucga

SEQ ID NO: 2046347 - RNA, 14 nt, Human herpesvirus 6B
caacacggggugag

SEQ ID NO: 2046348 - RNA, 21 nt, Human herpesvirus 6B
aauauuuuuucagcuuucaua

SEQ ID NO: 2046349 - RNA, 19 nt, Human herpesvirus 6B
ucacacagcaugaacucuc

SEQ ID NO: 2046350 - RNA, 21 nt, Human herpesvirus 6B
gcauuuggcagccuaaacgga

SEQ ID NO: 2046351 - RNA, 15 nt, Human herpesvirus 6B
cauugagguauugga

SEQ ID NO: 2046352 - RNA, 14 nt, Human herpesvirus 6B
ugaccagagauucu

SEQ ID NO: 2046353 - RNA, 14 nt, Human herpesvirus 6B
gcucucccucuucc

SEQ ID NO: 2046354 - RNA, 16 nt, Human herpesvirus 6B
gcugauucuguuuucu

SEQ ID NO: 2046355 - RNA, 14 nt, Human herpesvirus 6B
aauuucuuuggagg

SEQ ID NO: 2046356 - RNA, 15 nt, Human herpesvirus 6B
agaauacgaagacaa

SEQ ID NO: 2046357 - RNA, 14 nt, Human herpesvirus 6B
agucugucaguggc

SEQ ID NO: 2046358 - RNA, 15 nt, Human herpesvirus 6B
augguagcaauaacu

SEQ ID NO: 2046359 - RNA, 16 nt, Human herpesvirus 6B
uugcgaucuauauaaa

SEQ ID NO: 2046360 - RNA, 16 nt, Human herpesvirus 6B
gaugcagcguuggaaa

SEQ ID NO: 2046361 - RNA, 16 nt, Human herpesvirus 6B
caauccaauaauugau

SEQ ID NO: 2046362 - RNA, 16 nt, Human herpesvirus 6B
cucgcccguucccggg

SEQ ID NO: 2046363 - RNA, 21 nt, Human herpesvirus 6B
uuuuacggaggaauggaagac

SEQ ID NO: 2046364 - RNA, 19 nt, Human herpesvirus 6B
aaagauauauugguagaca

SEQ ID NO: 2046365 - RNA, 13 nt, Human herpesvirus 6B
aaacauaaaaugu

SEQ ID NO: 2046366 - RNA, 16 nt, Human herpesvirus 6B
gauguacguggccguc

SEQ ID NO: 2046367 - RNA, 15 nt, Human herpesvirus 6B
aaauaaaguugaauu

SEQ ID NO: 2046368 - RNA, 19 nt, Human herpesvirus 6B
auuuuaaaaagaacgugaa

SEQ ID NO: 2046369 - RNA, 16 nt, Human herpesvirus 6B
cuacaaaguucucaga

SEQ ID NO: 2046370 - RNA, 23 nt, Human herpesvirus 6B
uuuccauugcucuuuccacacua

SEQ ID NO: 2046371 - RNA, 23 nt, Human herpesvirus 6B
ucguccgcgaugcgccacaggga

SEQ ID NO: 2046372 - RNA, 23 nt, Human herpesvirus 6B
uccgcggcgcugggcuccucacc

SEQ ID NO: 2046373 - RNA, 11 nt, Human herpesvirus 6B
uuacuguuuug

SEQ ID NO: 2046374 - RNA, 17 nt, Human herpesvirus 6B
gagaagaacagaggaag

SEQ ID NO: 2046375 - RNA, 16 nt, Human herpesvirus 6B
auaagucgugggaauu

SEQ ID NO: 2046376 - RNA, 18 nt, Human herpesvirus 6B
gugucuccggcgucacuc

SEQ ID NO: 2046377 - RNA, 18 nt, Human herpesvirus 6B
aucuucaucccuguucag

SEQ ID NO: 2046378 - RNA, 17 nt, Human herpesvirus 6B
aaacagauuuugaggau

SEQ ID NO: 2046379 - RNA, 17 nt, Human herpesvirus 6B
cguuuuccaacuuaaua

SEQ ID NO: 2046380 - RNA, 13 nt, Human herpesvirus 6B
aaagugcuguaaa

SEQ ID NO: 2046381 - RNA, 13 nt, Human herpesvirus 6B
agagacgaagucc

SEQ ID NO: 2046382 - RNA, 20 nt, Human herpesvirus 6B
agggaauaacagaugaggag

SEQ ID NO: 2046383 - RNA, 19 nt, Human herpesvirus 6B
acaagccuuuuuauaugca

SEQ ID NO: 2046384 - RNA, 20 nt, Human herpesvirus 6B
gaucaaucuccaaaacacuc

SEQ ID NO: 2046385 - RNA, 22 nt, Human herpesvirus 6B
gauccuguaauaguauugucug

SEQ ID NO: 2046386 - RNA, 13 nt, Human herpesvirus 6B
aaucaaucuuucu

SEQ ID NO: 2046387 - RNA, 21 nt, Human herpesvirus 6B
agcaauucuuuugcgaagaau

SEQ ID NO: 2046388 - RNA, 21 nt, Human herpesvirus 6B
guuuagggucgaacccugaga

SEQ ID NO: 2046389 - RNA, 17 nt, Human herpesvirus 6B
gugaaccuuauguucau

SEQ ID NO: 2046390 - RNA, 13 nt, Human herpesvirus 6B
ugagauacauguu

SEQ ID NO: 2046391 - RNA, 18 nt, Human herpesvirus 6B
uuccagguuuuucauaac

SEQ ID NO: 2046392 - RNA, 14 nt, Human herpesvirus 6B
aggaaaauguguuc

SEQ ID NO: 2046393 - RNA, 13 nt, Human herpesvirus 6B
agucucaaaaauu

SEQ ID NO: 2046394 - RNA, 14 nt, Human herpesvirus 6B
gcccugcuccguuc

SEQ ID NO: 2046395 - RNA, 14 nt, Human herpesvirus 6B
cuuuucugaugacu

SEQ ID NO: 2046396 - RNA, 14 nt, Human herpesvirus 6B
cuaaaagcugcuaa

SEQ ID NO: 2046397 - RNA, 20 nt, Human herpesvirus 6B
auuauggaaguagaauacug

SEQ ID NO: 2046398 - RNA, 21 nt, Human herpesvirus 6B
agcucguuaguaauuuggauu

SEQ ID NO: 2046399 - RNA, 13 nt, Human herpesvirus 6B
gguguggccggca

SEQ ID NO: 2046400 - RNA, 16 nt, Human herpesvirus 6B
caguuucagaugauca

SEQ ID NO: 2046401 - RNA, 15 nt, Human herpesvirus 6B
guaagauuaaaugug

SEQ ID NO: 2046402 - RNA, 16 nt, Human herpesvirus 6B
aauuuuuuguuucuga

SEQ ID NO: 2046403 - RNA, 15 nt, Human herpesvirus 6B
aaagaaaaaacagag

SEQ ID NO: 2046404 - RNA, 11 nt, Human herpesvirus 6B
aucaugagaga

SEQ ID NO: 2046405 - RNA, 22 nt, Human herpesvirus 6B
gagaauuaugacugacaaggua

SEQ ID NO: 2046406 - RNA, 23 nt, Human herpesvirus 6B
cuguuuaaagugaguuuuggaaa

SEQ ID NO: 2046407 - RNA, 18 nt, Human herpesvirus 6B
cacugugauaugcaaacu

SEQ ID NO: 2046408 - RNA, 15 nt, Human herpesvirus 6B
ccguccucgugcucu

SEQ ID NO: 2046409 - RNA, 16 nt, Human herpesvirus 6B
cccgguauggaucuca

SEQ ID NO: 2046410 - RNA, 21 nt, Human herpesvirus 6B
cgagaacccuaaaaucugcua

SEQ ID NO: 2046411 - RNA, 13 nt, Human herpesvirus 6B
gcucauggaucag

SEQ ID NO: 2046412 - RNA, 18 nt, Human herpesvirus 6B
ccaagugucucauggaaa

SEQ ID NO: 2046413 - RNA, 15 nt, Human herpesvirus 6B
uuaccaagaaaucac

SEQ ID NO: 2046414 - RNA, 15 nt, Human herpesvirus 6B
aggcggagacacaua

SEQ ID NO: 2046415 - RNA, 20 nt, Human herpesvirus 6B
auucagcuggacagaaauga

SEQ ID NO: 2046416 - RNA, 22 nt, Human herpesvirus 6B
uccccccgccgccuucucuguc

SEQ ID NO: 2046417 - RNA, 20 nt, Human herpesvirus 6B
auuuuaaaugacaaugugaa

SEQ ID NO: 2046418 - RNA, 12 nt, Human herpesvirus 6B
cccuccaucccc

SEQ ID NO: 2046419 - RNA, 19 nt, Human herpesvirus 6B
acgauguuacgucuuugga

SEQ ID NO: 2046420 - RNA, 13 nt, Human herpesvirus 6B
gauuaauuaucau

SEQ ID NO: 2046421 - RNA, 15 nt, Human herpesvirus 6B
gauccauuuucugaa

SEQ ID NO: 2046422 - RNA, 17 nt, Human herpesvirus 6B
agcauuauaaaacgcuu

SEQ ID NO: 2046423 - RNA, 22 nt, Human herpesvirus 6B
ccacggcaacgcuccucccacg

SEQ ID NO: 2046424 - RNA, 16 nt, Human herpesvirus 6B
uuugaggcaacuuuuu

SEQ ID NO: 2046425 - RNA, 15 nt, Human herpesvirus 6B
aaaaggguuuucuga

SEQ ID NO: 2046426 - RNA, 14 nt, Human herpesvirus 6B
cucucccucuuccc

SEQ ID NO: 2046427 - RNA, 15 nt, Human herpesvirus 6B
gacaagggugugaaa

SEQ ID NO: 2046428 - RNA, 21 nt, Human herpesvirus 6B
cgcacucuccgaccagcacca

SEQ ID NO: 2046429 - RNA, 13 nt, Human herpesvirus 6B
cacaaaaacaggg

SEQ ID NO: 2046430 - RNA, 22 nt, Human herpesvirus 6B
uauauucaguuuuuuguuucug

SEQ ID NO: 2046431 - RNA, 17 nt, Human herpesvirus 6B
agaagcagcagaugcuu

SEQ ID NO: 2046432 - RNA, 12 nt, Human herpesvirus 6B
cuuucaaugucc

SEQ ID NO: 2046433 - RNA, 18 nt, Human herpesvirus 6B
acucuauuauaaaaaugc

SEQ ID NO: 2046434 - RNA, 14 nt, Human herpesvirus 6B
gacgcaaagagaga

SEQ ID NO: 2046435 - RNA, 15 nt, Human herpesvirus 6B
auucugugacauguu

SEQ ID NO: 2046436 - RNA, 23 nt, Human herpesvirus 6B
cucuuuguuuuuuuuuuucugug

SEQ ID NO: 2046437 - RNA, 14 nt, Human herpesvirus 6B
aacgacugggagaa

SEQ ID NO: 2046438 - RNA, 13 nt, Human herpesvirus 6B
cuuuguucugcug

SEQ ID NO: 2046439 - RNA, 11 nt, Human herpesvirus 6B
ggaggagaggg

SEQ ID NO: 2046440 - RNA, 17 nt, Human herpesvirus 6B
cuuuuugaugacuuaua

SEQ ID NO: 2046441 - RNA, 13 nt, Human herpesvirus 6B
guaaggcuuagga

SEQ ID NO: 2046442 - RNA, 12 nt, Human herpesvirus 6B
gaaucacaaaau

SEQ ID NO: 2046443 - RNA, 21 nt, Human herpesvirus 6B
caauaacucuuggauugcaga

SEQ ID NO: 2046444 - RNA, 23 nt, Human herpesvirus 6B
auccuuagcgcgaucguagacgu

SEQ ID NO: 2046445 - RNA, 15 nt, Human herpesvirus 6B
cgaagucaugaauuu

SEQ ID NO: 2046446 - RNA, 21 nt, Human herpesvirus 6B
gucgcggccgucgcgcucgcc

SEQ ID NO: 2046447 - RNA, 22 nt, Human herpesvirus 6B
cgauuacuguccguuauugugu

SEQ ID NO: 2046448 - RNA, 22 nt, Human herpesvirus 6B
acgacaucaaugcgcuaugcca

SEQ ID NO: 2046449 - RNA, 21 nt, Human herpesvirus 6B
uuguuuuuuucugcgacaaaa

SEQ ID NO: 2046450 - RNA, 13 nt, Human herpesvirus 6B
gaaaagugcuuua

SEQ ID NO: 2046451 - RNA, 18 nt, Human herpesvirus 6B
uauuguguaccuuguaau

SEQ ID NO: 2046452 - RNA, 13 nt, Human herpesvirus 6B
agccucuugugca

SEQ ID NO: 2046453 - RNA, 17 nt, Human herpesvirus 6B
aguagugcaaccaugca

SEQ ID NO: 2046454 - RNA, 17 nt, Human herpesvirus 6B
gaaagggacguccccgg

SEQ ID NO: 2046455 - RNA, 21 nt, Human herpesvirus 6B
cagcgugaugaggcccagagg

SEQ ID NO: 2046456 - RNA, 16 nt, Human herpesvirus 6B
ucguuaaaaacguuuu

SEQ ID NO: 2046457 - RNA, 16 nt, Human herpesvirus 6B
guggccgucuccugca

SEQ ID NO: 2046458 - RNA, 17 nt, Human herpesvirus 6B
cggcaacgcuccuccca

SEQ ID NO: 2046459 - RNA, 14 nt, Human herpesvirus 6B
guacauguuaacaa

SEQ ID NO: 2046460 - RNA, 16 nt, Human herpesvirus 6B
ugcauaacaucucaga

SEQ ID NO: 2046461 - RNA, 16 nt, Human herpesvirus 6B
gaaaaugcugauuuua

SEQ ID NO: 2046462 - RNA, 14 nt, Human herpesvirus 6B
ccaugcagcugccc

SEQ ID NO: 2046463 - RNA, 17 nt, Human herpesvirus 6B
aggcaauuuaaacagaa

SEQ ID NO: 2046464 - RNA, 14 nt, Human herpesvirus 6B
gggaaaucaaggaa

SEQ ID NO: 2046465 - RNA, 11 nt, Human herpesvirus 6B
gcuggacagaa

SEQ ID NO: 2046466 - RNA, 15 nt, Human herpesvirus 6B
cuuaucaacuauacu

SEQ ID NO: 2046467 - RNA, 20 nt, Human herpesvirus 6B
cggaaaaauuauagacuugc

SEQ ID NO: 2046468 - RNA, 21 nt, Human herpesvirus 6B
uaaaaauguuaccgaaauauc

SEQ ID NO: 2046469 - RNA, 18 nt, Human herpesvirus 6B
aguauggugucugaaaaa

SEQ ID NO: 2046470 - RNA, 22 nt, Human herpesvirus 6B
ucaaucuccaaaacacuccgcu

SEQ ID NO: 2046471 - RNA, 20 nt, Human herpesvirus 6B
cugguuacgcagaauccugu

SEQ ID NO: 2046472 - RNA, 16 nt, Human herpesvirus 6B
caaaaucguguuuucu

SEQ ID NO: 2046473 - RNA, 16 nt, Human herpesvirus 6B
auugacaugauguuuc

SEQ ID NO: 2046474 - RNA, 15 nt, Human herpesvirus 6B
acucgacuucuuuca

SEQ ID NO: 2046475 - RNA, 18 nt, Human herpesvirus 6B
uagcaauuuuaaauauua

SEQ ID NO: 2046476 - RNA, 21 nt, Human herpesvirus 6B
uuaucagagagugacaucuua

SEQ ID NO: 2046477 - RNA, 20 nt, Human herpesvirus 6B
uccaaagucguugaauucuc

SEQ ID NO: 2046478 - RNA, 22 nt, Human herpesvirus 6B
gccucucuccgccuccucuuuu

SEQ ID NO: 2046479 - RNA, 20 nt, Human herpesvirus 6B
gagaucuggugaauguuucu

SEQ ID NO: 2046480 - RNA, 16 nt, Human herpesvirus 6B
ggcucucgugccguug

SEQ ID NO: 2046481 - RNA, 20 nt, Human herpesvirus 6B
ccucauagauuucauacugu

SEQ ID NO: 2046482 - RNA, 15 nt, Human herpesvirus 6B
aauucuuaccaagaa

SEQ ID NO: 2046483 - RNA, 18 nt, Human herpesvirus 6B
gaaccacagccagaagca

SEQ ID NO: 2046484 - RNA, 18 nt, Human herpesvirus 6B
cacaucgugaguuuucau

SEQ ID NO: 2046485 - RNA, 19 nt, Human herpesvirus 6B
uuauaaauucucugcaugu

SEQ ID NO: 2046486 - RNA, 14 nt, Human herpesvirus 6B
cgucacacagcaug

SEQ ID NO: 2046487 - RNA, 14 nt, Human herpesvirus 6B
cugcguuaagugaa

SEQ ID NO: 2046488 - RNA, 17 nt, Human herpesvirus 6B
ggacggacagagcggag

SEQ ID NO: 2046489 - RNA, 19 nt, Human herpesvirus 6B
uuugauaucgauucuguaa

SEQ ID NO: 2046490 - RNA, 19 nt, Human herpesvirus 6B
ggacucucgucgcccggcc

SEQ ID NO: 2046491 - RNA, 22 nt, Human herpesvirus 6B
gcggaugucgcgaagcucagcu

SEQ ID NO: 2046492 - RNA, 17 nt, Human herpesvirus 6B
uucauaguuguuuuuua

SEQ ID NO: 2046493 - RNA, 13 nt, Human herpesvirus 6B
gacagaaaugagc

SEQ ID NO: 2046494 - RNA, 20 nt, Human herpesvirus 6B
acguugggauugcugcuuga

SEQ ID NO: 2046495 - RNA, 18 nt, Human herpesvirus 6B
auuguugauagguaaacu

SEQ ID NO: 2046496 - RNA, 15 nt, Human herpesvirus 6B
guaccgcgguugaag

SEQ ID NO: 2046497 - RNA, 17 nt, Human herpesvirus 6B
uacgcauugacggguau

SEQ ID NO: 2046498 - RNA, 13 nt, Human herpesvirus 6B
gagagcgggcaca

SEQ ID NO: 2046499 - RNA, 15 nt, Human herpesvirus 6B
cuguucacauuguga

SEQ ID NO: 2046500 - RNA, 13 nt, Human herpesvirus 6B
cuuuauccggcca

SEQ ID NO: 2046501 - RNA, 12 nt, Human herpesvirus 6B
augacuuuucug

SEQ ID NO: 2046502 - RNA, 15 nt, Human herpesvirus 6B
auaagauuuacagac

SEQ ID NO: 2046503 - RNA, 19 nt, Human herpesvirus 6B
cauuuauuucguauguuua

SEQ ID NO: 2046504 - RNA, 23 nt, Human herpesvirus 6B
cauuuugauaucgauucuguaau

SEQ ID NO: 2046505 - RNA, 13 nt, Human herpesvirus 6B
guacgauuucugu

SEQ ID NO: 2046506 - RNA, 18 nt, Human herpesvirus 6B
augcgaccuacggccaga

SEQ ID NO: 2046507 - RNA, 15 nt, Human herpesvirus 6B
ccuaagcuggacaga

SEQ ID NO: 2046508 - RNA, 13 nt, Human herpesvirus 6B
gaucacgcaggcc

SEQ ID NO: 2046509 - RNA, 19 nt, Human herpesvirus 6B
guguugcgauugcugcuuc

SEQ ID NO: 2046510 - RNA, 20 nt, Human herpesvirus 6B
gccuccucuuuuccccccgc

SEQ ID NO: 2046511 - RNA, 23 nt, Human herpesvirus 6B
gucgcccgccucucuccgccucc

SEQ ID NO: 2046512 - RNA, 13 nt, Human herpesvirus 6B
aggcggacagcgu

SEQ ID NO: 2046513 - RNA, 22 nt, Human herpesvirus 6B
aauccgcgggccagcccugaag

SEQ ID NO: 2046514 - RNA, 19 nt, Human herpesvirus 6B
cuuauugaggaaaugcagc

SEQ ID NO: 2046515 - RNA, 22 nt, Human herpesvirus 6B
auaaaccuaacagaguuuucau

SEQ ID NO: 2046516 - RNA, 14 nt, Human herpesvirus 6B
cguugucuauuuuu

SEQ ID NO: 2046517 - RNA, 14 nt, Human herpesvirus 6B
gauccaaugaugaa

SEQ ID NO: 2046518 - RNA, 14 nt, Human herpesvirus 6B
auggugucugaaaa

SEQ ID NO: 2046519 - RNA, 19 nt, Human herpesvirus 6B
auuuaguuuauguuaaaaa

SEQ ID NO: 2046520 - RNA, 14 nt, Human herpesvirus 6B
guugccuuggccgc

SEQ ID NO: 2046521 - RNA, 20 nt, Human herpesvirus 6B
cuaucaacuuucuccgcaca

SEQ ID NO: 2046522 - RNA, 15 nt, Human herpesvirus 6B
auauugcaugcauug

SEQ ID NO: 2046523 - RNA, 21 nt, Human herpesvirus 6B
ccgggcgcggggcgcaccggc

SEQ ID NO: 2046524 - RNA, 15 nt, Human herpesvirus 6B
aguugaugcuguugc

SEQ ID NO: 2046525 - RNA, 19 nt, Human herpesvirus 6B
augccgccugaaaccccac

SEQ ID NO: 2046526 - RNA, 17 nt, Human herpesvirus 6B
aaaugagaaggacacaa

SEQ ID NO: 2046527 - RNA, 19 nt, Human herpesvirus 6B
caggcuccccaggcgcagc

SEQ ID NO: 2046528 - RNA, 16 nt, Human herpesvirus 6B
aaacucaaagaaagcu

SEQ ID NO: 2046529 - RNA, 13 nt, Human herpesvirus 6B
cagauuuuacugg

SEQ ID NO: 2046530 - RNA, 17 nt, Human herpesvirus 6B
cagcggucgagaaagau

SEQ ID NO: 2046531 - RNA, 18 nt, Human herpesvirus 6B
cuacccaccuguccuuuc

SEQ ID NO: 2046532 - RNA, 20 nt, Human herpesvirus 6B
ggggagguuuuuucaccccc

SEQ ID NO: 2046533 - RNA, 20 nt, Human herpesvirus 6B
uauaagucuaaugcaaagau

SEQ ID NO: 2046534 - RNA, 13 nt, Human herpesvirus 6B
uaaugcaaagaug

SEQ ID NO: 2046535 - RNA, 18 nt, Human herpesvirus 6B
gaugcgccacagggaggu

SEQ ID NO: 2046536 - RNA, 14 nt, Human herpesvirus 6B
ccaaaagagaaaga

SEQ ID NO: 2046537 - RNA, 20 nt, Human herpesvirus 6B
gaaaacgguaaagaugagau

SEQ ID NO: 2046538 - RNA, 16 nt, Human herpesvirus 6B
gaaauaccaaagaaau

SEQ ID NO: 2046539 - RNA, 20 nt, Human herpesvirus 6B
aaaaauauugguauugauuu

SEQ ID NO: 2046540 - RNA, 15 nt, Human herpesvirus 6B
ugaguuuuuugcaau

SEQ ID NO: 2046541 - RNA, 11 nt, Human herpesvirus 6B
aaauaaaguuu

SEQ ID NO: 2046542 - RNA, 17 nt, Human herpesvirus 6B
augucucgaaaaagaca

SEQ ID NO: 2046543 - RNA, 15 nt, Human herpesvirus 6B
gugcacauagaaaac

SEQ ID NO: 2046544 - RNA, 16 nt, Human herpesvirus 6B
acgucuuuggacugaa

SEQ ID NO: 2046545 - RNA, 18 nt, Human herpesvirus 6B
gcauucauaauugugaua

SEQ ID NO: 2046546 - RNA, 19 nt, Human herpesvirus 6B
aaggaaaaagccuugauuu

SEQ ID NO: 2046547 - RNA, 20 nt, Human herpesvirus 6B
auuugaaauguucguucucu

SEQ ID NO: 2046548 - RNA, 16 nt, Human herpesvirus 6B
ugacaugauguuuccu

SEQ ID NO: 2046549 - RNA, 13 nt, Human herpesvirus 6B
caugcaaaacaga

SEQ ID NO: 2046550 - RNA, 20 nt, Human herpesvirus 6B
agaucacaacaaacauguau

SEQ ID NO: 2046551 - RNA, 15 nt, Human herpesvirus 6B
guucacacagaugca

SEQ ID NO: 2046552 - RNA, 19 nt, Human herpesvirus 6B
augaauuaccugucuuaga

SEQ ID NO: 2046553 - RNA, 21 nt, Human herpesvirus 6B
aacgcuuuuuuauuauguuuu

SEQ ID NO: 2046554 - RNA, 16 nt, Human herpesvirus 6B
cggcagcggggaaggg

SEQ ID NO: 2046555 - RNA, 14 nt, Human herpesvirus 6B
uucaucgaauccaa

SEQ ID NO: 2046556 - RNA, 17 nt, Human herpesvirus 6B
ccccggcuuucucgccg

SEQ ID NO: 2046557 - RNA, 17 nt, Human herpesvirus 6B
caggcgcagcagcagcu

SEQ ID NO: 2046558 - RNA, 23 nt, Human herpesvirus 6B
gaugugucccucgauaacuauac

SEQ ID NO: 2046559 - RNA, 18 nt, Human herpesvirus 6B
accauguucgccucuccc

SEQ ID NO: 2046560 - RNA, 12 nt, Human herpesvirus 6B
uaaaguuuucau

SEQ ID NO: 2046561 - RNA, 22 nt, Human herpesvirus 6B
aguuagugcaccgagaaauagu

SEQ ID NO: 2046562 - RNA, 15 nt, Human herpesvirus 6B
aaaagucguuacagu

SEQ ID NO: 2046563 - RNA, 19 nt, Human herpesvirus 6B
agggacccacacgcgggga

SEQ ID NO: 2046564 - RNA, 14 nt, Human herpesvirus 6B
augacuaucaaaau

SEQ ID NO: 2046565 - RNA, 16 nt, Human herpesvirus 6B
ucuugcggcaugugua

SEQ ID NO: 2046566 - RNA, 17 nt, Human herpesvirus 6B
uuuuggaauuucauuca

SEQ ID NO: 2046567 - RNA, 16 nt, Human herpesvirus 6B
uaugagacuuacaguu

SEQ ID NO: 2046568 - RNA, 17 nt, Human herpesvirus 6B
gaugccuugauguuucc

SEQ ID NO: 2046569 - RNA, 13 nt, Human herpesvirus 6B
cagcuaaucacuu

SEQ ID NO: 2046570 - RNA, 14 nt, Human herpesvirus 6B
cuguccgugacaca

SEQ ID NO: 2046571 - RNA, 16 nt, Human herpesvirus 6B
uggguuaucuuagaaa

SEQ ID NO: 2046572 - RNA, 17 nt, Human herpesvirus 6B
aggugcguacacggcca

SEQ ID NO: 2046573 - RNA, 20 nt, Human herpesvirus 6B
auuaaaaauaaaaaaaauga

SEQ ID NO: 2046574 - RNA, 20 nt, Human herpesvirus 6B
ugaaaauaucauuaaauugu

SEQ ID NO: 2046575 - RNA, 20 nt, Human herpesvirus 6B
cugcguuacaagcaugcauu

SEQ ID NO: 2046576 - RNA, 17 nt, Human herpesvirus 6B
cacgagccaaggggacg

SEQ ID NO: 2046577 - RNA, 20 nt, Human herpesvirus 6B
gcguucggucucuggaagca

SEQ ID NO: 2046578 - RNA, 19 nt, Human herpesvirus 6B
uggacagaaaaaacaccag

SEQ ID NO: 2046579 - RNA, 16 nt, Human herpesvirus 6B
aaucugugggaaaaua

SEQ ID NO: 2046580 - RNA, 16 nt, Human herpesvirus 6B
caggaaguucuucaaa

SEQ ID NO: 2046581 - RNA, 14 nt, Human herpesvirus 6B
auccauuuucugaa

SEQ ID NO: 2046582 - RNA, 19 nt, Human herpesvirus 6B
uuucaaaaugaccagagau

SEQ ID NO: 2046583 - RNA, 23 nt, Human herpesvirus 6B
uuuguuccagauguagguuucaa

SEQ ID NO: 2046584 - RNA, 15 nt, Human herpesvirus 6B
auaucugaaacacua

SEQ ID NO: 2046585 - RNA, 13 nt, Human herpesvirus 6B
cgggcgacgagag

SEQ ID NO: 2046586 - RNA, 21 nt, Human herpesvirus 6B
cugcguuccaugugucuccgg

SEQ ID NO: 2046587 - RNA, 13 nt, Human herpesvirus 6B
cuccacgccccuc

SEQ ID NO: 2046588 - RNA, 15 nt, Human herpesvirus 6B
uacaaaguucucaga

SEQ ID NO: 2046589 - RNA, 20 nt, Human herpesvirus 6B
ggccggucggggaggggagg

SEQ ID NO: 2046590 - RNA, 22 nt, Human herpesvirus 6B
auaacaugugacacaauuucug

SEQ ID NO: 2046591 - RNA, 14 nt, Human herpesvirus 6B
cgauguuuccaggu

SEQ ID NO: 2046592 - RNA, 18 nt, Human herpesvirus 6B
caguuguacucaaaguau

SEQ ID NO: 2046593 - RNA, 21 nt, Human herpesvirus 6B
ggaucugccgcguggaagccg

SEQ ID NO: 2046594 - RNA, 19 nt, Human herpesvirus 6B
gcauccuguuuucccaccu

SEQ ID NO: 2046595 - RNA, 16 nt, Human herpesvirus 6B
auucauuuauucucca

SEQ ID NO: 2046596 - RNA, 13 nt, Human herpesvirus 6B
aagcgccugccua

SEQ ID NO: 2046597 - RNA, 21 nt, Human herpesvirus 6B
guuaaaguccuaucugaguug

SEQ ID NO: 2046598 - RNA, 22 nt, Human herpesvirus 6B
aagugaaggcggagaugcaaaa

SEQ ID NO: 2046599 - RNA, 23 nt, Human herpesvirus 6B
caaauaauuuuauugacugugaa

SEQ ID NO: 2046600 - RNA, 22 nt, Human herpesvirus 6B
auucuuuugugcuuaucaaauu

SEQ ID NO: 2046601 - RNA, 16 nt, Human herpesvirus 6B
gugcccacuguggugu

SEQ ID NO: 2046602 - RNA, 16 nt, Human herpesvirus 6B
agcgcuguauguuaug

SEQ ID NO: 2046603 - RNA, 22 nt, Human herpesvirus 6B
aaggcagcuggcaaugcaaagc

SEQ ID NO: 2046604 - RNA, 16 nt, Human herpesvirus 6B
acggcaaacucaaaga

SEQ ID NO: 2046605 - RNA, 23 nt, Human herpesvirus 6B
uuuaucccaaaauauaauucuga

SEQ ID NO: 2046606 - RNA, 15 nt, Human herpesvirus 6B
cgcgccgucagcggc

SEQ ID NO: 2046607 - RNA, 17 nt, Human herpesvirus 6B
auuuucuguauuaauuu

SEQ ID NO: 2046608 - RNA, 15 nt, Human herpesvirus 6B
uagaaauuuuuugca

SEQ ID NO: 2046609 - RNA, 14 nt, Human herpesvirus 6B
agucguggcggagc

SEQ ID NO: 2046610 - RNA, 13 nt, Human herpesvirus 6B
uguaauguuuccu

SEQ ID NO: 2046611 - RNA, 16 nt, Human herpesvirus 6B
uauuuaacauccaaaa

SEQ ID NO: 2046612 - RNA, 19 nt, Human herpesvirus 6B
gcacaguucguccagcagc

SEQ ID NO: 2046613 - RNA, 13 nt, Human herpesvirus 6B
uaguacaaagaua

SEQ ID NO: 2046614 - RNA, 19 nt, Human herpesvirus 6B
cuuugacauuuaccagaga

SEQ ID NO: 2046615 - RNA, 14 nt, Human herpesvirus 6B
gagcacgcacgaga

SEQ ID NO: 2046616 - RNA, 18 nt, Human herpesvirus 6B
agucaacaugauuuccga

SEQ ID NO: 2046617 - RNA, 11 nt, Human herpesvirus 6B
aagaaggaaaa

SEQ ID NO: 2046618 - RNA, 15 nt, Human herpesvirus 6B
agugacaaaauuuuu

SEQ ID NO: 2046619 - RNA, 15 nt, Human herpesvirus 6B
agcugcuaaauguga

SEQ ID NO: 2046620 - RNA, 16 nt, Human herpesvirus 6B
uaacuaucaugugugg

SEQ ID NO: 2046621 - RNA, 21 nt, Human herpesvirus 6B
acgucugcguugcccucccgc

SEQ ID NO: 2046622 - RNA, 14 nt, Human herpesvirus 6B
acuuacaucuuggu

SEQ ID NO: 2046623 - RNA, 16 nt, Human herpesvirus 6B
ccuaacagaguuuuca

SEQ ID NO: 2046624 - RNA, 20 nt, Human herpesvirus 6B
aaugucugagcauuguguau

SEQ ID NO: 2046625 - RNA, 20 nt, Human herpesvirus 6B
cguguucaaaaaugugguca

SEQ ID NO: 2046626 - RNA, 16 nt, Human herpesvirus 6B
ccgaagaaagaggcgc

SEQ ID NO: 2046627 - RNA, 18 nt, Human herpesvirus 6B
aggugauuugaacagaga

SEQ ID NO: 2046628 - RNA, 23 nt, Human herpesvirus 6B
caauaaaaaacuuauaauuggaa

SEQ ID NO: 2046629 - RNA, 23 nt, Human herpesvirus 6B
gauaaacuguacgccauacggga

SEQ ID NO: 2046630 - RNA, 17 nt, Human herpesvirus 6B
ugacauuuaccagagau

SEQ ID NO: 2046631 - RNA, 21 nt, Human herpesvirus 6B
agacagaguucgguccaagga

SEQ ID NO: 2046632 - RNA, 13 nt, Human herpesvirus 6B
cccucccgcagcu

SEQ ID NO: 2046633 - RNA, 12 nt, Human herpesvirus 6B
cgacaaagaaca

SEQ ID NO: 2046634 - RNA, 22 nt, Human herpesvirus 6B
ccacauuagcugcuaaauguga

SEQ ID NO: 2046635 - RNA, 12 nt, Human herpesvirus 6B
aaaauaaaguug

SEQ ID NO: 2046636 - RNA, 21 nt, Human herpesvirus 6B
aauacuauguggaaauuaaaa

SEQ ID NO: 2046637 - RNA, 15 nt, Human herpesvirus 6B
ugacaaguagagaga

SEQ ID NO: 2046638 - RNA, 14 nt, Human herpesvirus 6B
aggaacaaaaggaa

SEQ ID NO: 2046639 - RNA, 18 nt, Human herpesvirus 6B
guaaccugucuuggaaga

SEQ ID NO: 2046640 - RNA, 14 nt, Human herpesvirus 6B
gauacaaaugaggg

SEQ ID NO: 2046641 - RNA, 16 nt, Human herpesvirus 6B
auguguucuuacaaug

SEQ ID NO: 2046642 - RNA, 18 nt, Human herpesvirus 6B
gauauacgauggacagaa

SEQ ID NO: 2046643 - RNA, 13 nt, Human herpesvirus 6B
uagagccggccuu

SEQ ID NO: 2046644 - RNA, 17 nt, Human herpesvirus 6B
uaaaagauuguuuucau

SEQ ID NO: 2046645 - RNA, 17 nt, Human herpesvirus 6B
acaugagcgagaauguu

SEQ ID NO: 2046646 - RNA, 17 nt, Human herpesvirus 6B
uuaaacgaaaacuuuuu

SEQ ID NO: 2046647 - RNA, 15 nt, Human herpesvirus 6B
ucgacauagaguguu

SEQ ID NO: 2046648 - RNA, 19 nt, Human herpesvirus 6B
agguguuguguuugaaacg

SEQ ID NO: 2046649 - RNA, 15 nt, Human herpesvirus 6B
ucucuaaucaagaaa

SEQ ID NO: 2046650 - RNA, 21 nt, Human herpesvirus 6B
uuguggcuauuugacaauaaa

SEQ ID NO: 2046651 - RNA, 23 nt, Human herpesvirus 6B
cuuguucgggccaagguaaagga

SEQ ID NO: 2046652 - RNA, 16 nt, Human herpesvirus 6B
aguuuugugauccugu

SEQ ID NO: 2046653 - RNA, 20 nt, Human herpesvirus 6B
gguaauaaaccuaacagagu

SEQ ID NO: 2046654 - RNA, 17 nt, Human herpesvirus 6B
augaaaacauucagaaa

SEQ ID NO: 2046655 - RNA, 22 nt, Human herpesvirus 6B
accaagaaucguuaaaugagau

SEQ ID NO: 2046656 - RNA, 13 nt, Human herpesvirus 6B
auuacaagggaaa

SEQ ID NO: 2046657 - RNA, 19 nt, Human herpesvirus 6B
uuuuuaaauaauaguaaac

SEQ ID NO: 2046658 - RNA, 15 nt, Human herpesvirus 6B
cuuaacauacaacuu

SEQ ID NO: 2046659 - RNA, 14 nt, Human herpesvirus 6B
auuguguucugcuc

SEQ ID NO: 2046660 - RNA, 16 nt, Human herpesvirus 6B
acuguacacaaaaacc

SEQ ID NO: 2046661 - RNA, 21 nt, Human herpesvirus 6B
aauaaucucuggcuucauuuc

SEQ ID NO: 2046662 - RNA, 22 nt, Human herpesvirus 6B
aucaccaucaacacaccugccu

SEQ ID NO: 2046663 - RNA, 19 nt, Human herpesvirus 6B
cagagccuagaccaagaau

SEQ ID NO: 2046664 - RNA, 18 nt, Human herpesvirus 6B
gucuucgcauaauagaca

SEQ ID NO: 2046665 - RNA, 19 nt, Human herpesvirus 6B
aguguaaauguagaagaag

SEQ ID NO: 2046666 - RNA, 20 nt, Human herpesvirus 6B
auuuuaguauuuaugcuuca

SEQ ID NO: 2046667 - RNA, 13 nt, Human herpesvirus 6B
uccaaaauacacu

SEQ ID NO: 2046668 - RNA, 14 nt, Human herpesvirus 6B
auacagguuugcuc

SEQ ID NO: 2046669 - RNA, 14 nt, Human herpesvirus 6B
aaaugacacagaau

SEQ ID NO: 2046670 - RNA, 15 nt, Human herpesvirus 6B
uguuagauaaaauga

SEQ ID NO: 2046671 - RNA, 12 nt, Human herpesvirus 6B
gcgggaccuggc

SEQ ID NO: 2046672 - RNA, 18 nt, Human herpesvirus 6B
aaauuaacugucaugucu

SEQ ID NO: 2046673 - RNA, 15 nt, Human herpesvirus 6B
guuagauucggaaac

SEQ ID NO: 2046674 - RNA, 12 nt, Human herpesvirus 6B
cggaauuuacug

SEQ ID NO: 2046675 - RNA, 15 nt, Human herpesvirus 6B
uaacgguuuugcaga

SEQ ID NO: 2046676 - RNA, 22 nt, Human herpesvirus 6B
uaaaagugcaacaaagagcuuu

SEQ ID NO: 2046677 - RNA, 15 nt, Human herpesvirus 6B
agguuuuuucacccc

SEQ ID NO: 2046678 - RNA, 18 nt, Human herpesvirus 6B
uuguccuauguuaacauu

SEQ ID NO: 2046679 - RNA, 19 nt, Human herpesvirus 6B
aacgagaagacaguuuacu

SEQ ID NO: 2046680 - RNA, 15 nt, Human herpesvirus 6B
auggacagaaaaaac

SEQ ID NO: 2046681 - RNA, 17 nt, Human herpesvirus 6B
ggacaauaaauugauuc

SEQ ID NO: 2046682 - RNA, 11 nt, Human herpesvirus 6B
ucuugcaagaa

SEQ ID NO: 2046683 - RNA, 23 nt, Human herpesvirus 6B
acuuucguuuacgaauucaaugu

SEQ ID NO: 2046684 - RNA, 22 nt, Human herpesvirus 6B
augaagagguucagacugcugc

SEQ ID NO: 2046685 - RNA, 11 nt, Human herpesvirus 6B
caauuccugug

SEQ ID NO: 2046686 - RNA, 19 nt, Human herpesvirus 6B
uucucgccgccucgccgcu

SEQ ID NO: 2046687 - RNA, 13 nt, Human herpesvirus 6B
aggagaagaacag

SEQ ID NO: 2046688 - RNA, 23 nt, Human herpesvirus 6B
uccgcuauggccuauugcauggc

SEQ ID NO: 2046689 - RNA, 22 nt, Human herpesvirus 6B
aucuaugaugcuguagaaacgu

SEQ ID NO: 2046690 - RNA, 20 nt, Human herpesvirus 6B
auaccuuuggccuugauugu

SEQ ID NO: 2046691 - RNA, 22 nt, Human herpesvirus 6B
ccuguccgugacacacagaaua

SEQ ID NO: 2046692 - RNA, 17 nt, Human herpesvirus 6B
cugucuccagcaagaaa

SEQ ID NO: 2046693 - RNA, 24 nt, Human herpesvirus 6B
gucauucgcguggcggcgcgcgcc

SEQ ID NO: 2046694 - RNA, 16 nt, Human herpesvirus 6B
ccccaggcgcagcagc

SEQ ID NO: 2046695 - RNA, 14 nt, Human herpesvirus 6B
cuguaaaagggcuc

SEQ ID NO: 2046696 - RNA, 22 nt, Human herpesvirus 6B
gaacaagagacgaaagacguuu

SEQ ID NO: 2046697 - RNA, 20 nt, Human herpesvirus 6B
uugcgucuaaaaauauggaa

SEQ ID NO: 2046698 - RNA, 18 nt, Human herpesvirus 6B
aauauauuuguugaaaga

SEQ ID NO: 2046699 - RNA, 20 nt, Human herpesvirus 6B
ccgucugucuguuccucaga

SEQ ID NO: 2046700 - RNA, 18 nt, Human herpesvirus 6B
acaacgguguggagacac

SEQ ID NO: 2046701 - RNA, 13 nt, Human herpesvirus 6B
ccgggcgacgaga

SEQ ID NO: 2046702 - RNA, 18 nt, Human herpesvirus 6B
cuccaaauggucccguaa

SEQ ID NO: 2046703 - RNA, 22 nt, Human herpesvirus 6B
cauagccgggagauuccucugu

SEQ ID NO: 2046704 - RNA, 20 nt, Human herpesvirus 6B
acuguaaaaaaaauucucug

SEQ ID NO: 2046705 - RNA, 13 nt, Human herpesvirus 6B
acgucugcguugc

SEQ ID NO: 2046706 - RNA, 15 nt, Human herpesvirus 6B
aaaaucugcuaacgc

SEQ ID NO: 2046707 - RNA, 14 nt, Human herpesvirus 6B
uuacaaguauguuu

SEQ ID NO: 2046708 - RNA, 20 nt, Human herpesvirus 6B
ccaaggcaacggcacgagag

SEQ ID NO: 2046709 - RNA, 11 nt, Human herpesvirus 6B
augauagcuug

SEQ ID NO: 2046710 - RNA, 15 nt, Human herpesvirus 6B
ugacgccugugugcc

SEQ ID NO: 2046711 - RNA, 20 nt, Human herpesvirus 6B
agcaugggugaguguauuau

SEQ ID NO: 2046712 - RNA, 23 nt, Human herpesvirus 6B
gcaggcuccccaggcgcagcagc

SEQ ID NO: 2046713 - RNA, 22 nt, Human herpesvirus 6B
augaaaucucuuuuaacacaca

SEQ ID NO: 2046714 - RNA, 19 nt, Human herpesvirus 6B
uugcaauuuggcugcguug

SEQ ID NO: 2046715 - RNA, 22 nt, Human herpesvirus 6B
uucuaccguagaccguuuuuua

SEQ ID NO: 2046716 - RNA, 14 nt, Human herpesvirus 6B
uguucauagagcau

SEQ ID NO: 2046717 - RNA, 15 nt, Human herpesvirus 6B
ucguuuugcaacuua

SEQ ID NO: 2046718 - RNA, 11 nt, Human herpesvirus 6B
gucuuuccugu

SEQ ID NO: 2046719 - RNA, 17 nt, Human herpesvirus 6B
cuguauaucuaugcuuu

SEQ ID NO: 2046720 - RNA, 13 nt, Human herpesvirus 6B
aaugagcaacauu

SEQ ID NO: 2046721 - RNA, 12 nt, Human herpesvirus 6B
gugccuacggga

SEQ ID NO: 2046722 - RNA, 15 nt, Human herpesvirus 6B
agucuccacagggca

SEQ ID NO: 2046723 - RNA, 18 nt, Human herpesvirus 6B
auccuguuuucccaccua

SEQ ID NO: 2046724 - RNA, 20 nt, Human herpesvirus 6B
aaucggguaaauaugugaaa

SEQ ID NO: 2046725 - RNA, 13 nt, Human herpesvirus 6B
ugagcaacauuua

SEQ ID NO: 2046726 - RNA, 14 nt, Human herpesvirus 6B
uuauguauguguua

SEQ ID NO: 2046727 - RNA, 17 nt, Human herpesvirus 6B
cgaaauuauuuuuaaug

SEQ ID NO: 2046728 - RNA, 14 nt, Human herpesvirus 6B
uagcaaaugaaugu

SEQ ID NO: 2046729 - RNA, 21 nt, Human herpesvirus 6B
cugcucaugucaguauuucgc

SEQ ID NO: 2046730 - RNA, 18 nt, Human herpesvirus 6B
cucuaccgucagaggcuu

SEQ ID NO: 2046731 - RNA, 16 nt, Human herpesvirus 6B
acaaggaucucgaaau

SEQ ID NO: 2046732 - RNA, 15 nt, Human herpesvirus 6B
cacgcgcggagcacg

SEQ ID NO: 2046733 - RNA, 12 nt, Human herpesvirus 6B
ccgcgggccagc

SEQ ID NO: 2046734 - RNA, 19 nt, Human herpesvirus 6B
gguugucuuguuagacaag

SEQ ID NO: 2046735 - RNA, 22 nt, Human herpesvirus 6B
acgauuuucuauuaaaaagacu

SEQ ID NO: 2046736 - RNA, 23 nt, Human herpesvirus 6B
ggcuccucacccugaagggaccg

SEQ ID NO: 2046737 - RNA, 20 nt, Human herpesvirus 6B
uucacagcaguuaucucaaa

SEQ ID NO: 2046738 - RNA, 19 nt, Human herpesvirus 6B
gacaccacauaacaaaaaa

SEQ ID NO: 2046739 - RNA, 14 nt, Human herpesvirus 6B
uauaugaaaugucu

SEQ ID NO: 2046740 - RNA, 16 nt, Human herpesvirus 6B
gaaaucuuuccugcua

SEQ ID NO: 2046741 - RNA, 16 nt, Human herpesvirus 6B
cuguuuuucucauaaa

SEQ ID NO: 2046742 - RNA, 14 nt, Human herpesvirus 6B
uauguuuuguacaa

SEQ ID NO: 2046743 - RNA, 20 nt, Human herpesvirus 6B
caauaucguccucagagaaa

SEQ ID NO: 2046744 - RNA, 22 nt, Human herpesvirus 6B
aacuccggaaaagaaaaguugu

SEQ ID NO: 2046745 - RNA, 20 nt, Human herpesvirus 6B
ucugccccccuucauccagc

SEQ ID NO: 2046746 - RNA, 20 nt, Human herpesvirus 6B
ugguguuguguuuguggaca

SEQ ID NO: 2046747 - RNA, 17 nt, Human herpesvirus 6B
uccucccacgcccccuc

SEQ ID NO: 2046748 - RNA, 19 nt, Human herpesvirus 6B
cggagcccugagagcagga

SEQ ID NO: 2046749 - RNA, 15 nt, Human herpesvirus 6B
agggcagagagccgc

SEQ ID NO: 2046750 - RNA, 15 nt, Human herpesvirus 6B
uccucugaauuucaa

SEQ ID NO: 2046751 - RNA, 20 nt, Human herpesvirus 6B
ucuauauaaaucggguaaau

SEQ ID NO: 2046752 - RNA, 16 nt, Human herpesvirus 6B
uaugcggccagucucg

SEQ ID NO: 2046753 - RNA, 21 nt, Human herpesvirus 6B
uaauuuuuuguuucugaaaau

SEQ ID NO: 2046754 - RNA, 18 nt, Human herpesvirus 6B
aaucaucugguaaauugu

SEQ ID NO: 2046755 - RNA, 23 nt, Human herpesvirus 6B
cagaagcugucuguguuucagaa

SEQ ID NO: 2046756 - RNA, 15 nt, Human herpesvirus 6B
ugcacaguugcaugg

SEQ ID NO: 2046757 - RNA, 18 nt, Human herpesvirus 6B
gcagaggucuuugcuuug

SEQ ID NO: 2046758 - RNA, 23 nt, Human herpesvirus 6B
gccccuccguccaggacccgagg

SEQ ID NO: 2046759 - RNA, 14 nt, Human herpesvirus 6B
uuucguccauccag

SEQ ID NO: 2046760 - RNA, 23 nt, Human herpesvirus 6B
ucuccgucaccguguccacggca

SEQ ID NO: 2046761 - RNA, 19 nt, Human herpesvirus 6B
uggaaaucuauuaauuuug

SEQ ID NO: 2046762 - RNA, 11 nt, Human herpesvirus 6B
uuuuucacccc

SEQ ID NO: 2046763 - RNA, 16 nt, Human herpesvirus 6B
ucguucuuaacauauu

SEQ ID NO: 2046764 - RNA, 17 nt, Human herpesvirus 6B
uucccucuuccuucucg

SEQ ID NO: 2046765 - RNA, 14 nt, Human herpesvirus 6B
ugguucuugagcag

SEQ ID NO: 2046766 - RNA, 17 nt, Human herpesvirus 6B
ggucgaacccugagacc

SEQ ID NO: 2046767 - RNA, 19 nt, Human herpesvirus 6B
gugaauugugcaagcugua

SEQ ID NO: 2046768 - RNA, 20 nt, Human herpesvirus 6B
aguccaaugaauacuucucu

SEQ ID NO: 2046769 - RNA, 16 nt, Human herpesvirus 6B
uccaaacuauguguua

SEQ ID NO: 2046770 - RNA, 13 nt, Human herpesvirus 6B
uccuguuuuccca

SEQ ID NO: 2046771 - RNA, 19 nt, Human herpesvirus 6B
gucaugugcuauuguaaga

SEQ ID NO: 2046772 - RNA, 22 nt, Human herpesvirus 6B
aauuuaaaguuacaucugucua

SEQ ID NO: 2046773 - RNA, 17 nt, Human herpesvirus 6B
uaaaucgcgagacagau

SEQ ID NO: 2046774 - RNA, 16 nt, Human herpesvirus 6B
ugugaaguucgauguu

SEQ ID NO: 2046775 - RNA, 17 nt, Human herpesvirus 6B
uugauguuuccugaauu

SEQ ID NO: 2046776 - RNA, 16 nt, Human herpesvirus 6B
acacggggugagagag

SEQ ID NO: 2046777 - RNA, 23 nt, Human herpesvirus 6B
uggaaguggcguggauaggaacu

SEQ ID NO: 2046778 - RNA, 16 nt, Human herpesvirus 6B
ucaguaaacuuacgua

SEQ ID NO: 2046779 - RNA, 19 nt, Human herpesvirus 6B
ccucaacuaaaucaugucu

SEQ ID NO: 2046780 - RNA, 15 nt, Human herpesvirus 6B
ucgccggcccgucca

SEQ ID NO: 2046781 - RNA, 13 nt, Human herpesvirus 6B
uuaaucggaaugu

SEQ ID NO: 2046782 - RNA, 18 nt, Human herpesvirus 6B
auuuaacauccaaaauac

SEQ ID NO: 2046783 - RNA, 21 nt, Human herpesvirus 6B
aauaauauaaaagaaacucuu

SEQ ID NO: 2046784 - RNA, 13 nt, Human herpesvirus 6B
uuuccuugacagu

SEQ ID NO: 2046785 - RNA, 12 nt, Human herpesvirus 6B
auuuaaugcaaa

SEQ ID NO: 2046786 - RNA, 18 nt, Human herpesvirus 6B
ccugagucggcuguccaa

SEQ ID NO: 2046787 - RNA, 19 nt, Human herpesvirus 6B
ggacuugcgagucugucag

SEQ ID NO: 2046788 - RNA, 19 nt, Human herpesvirus 6B
gacuacucuggcugaagga

SEQ ID NO: 2046789 - RNA, 13 nt, Human herpesvirus 6B
uguguuguuuccu

SEQ ID NO: 2046790 - RNA, 13 nt, Human herpesvirus 6B
guaacaccagaga

SEQ ID NO: 2046791 - RNA, 14 nt, Human herpesvirus 6B
uagcgguuucuagg

SEQ ID NO: 2046792 - RNA, 18 nt, Human herpesvirus 6B
uuuaaacuccggaaaaga

SEQ ID NO: 2046793 - RNA, 22 nt, Human herpesvirus 6B
auaacagaugaggaggagggac

SEQ ID NO: 2046794 - RNA, 12 nt, Human herpesvirus 6B
gauuugaacaga

SEQ ID NO: 2046795 - RNA, 18 nt, Human herpesvirus 6B
caggaccagcucuguucu

SEQ ID NO: 2046796 - RNA, 23 nt, Human herpesvirus 6B
aggacaagccgacuauggaugau

SEQ ID NO: 2046797 - RNA, 11 nt, Human herpesvirus 6B
ccugaaaagac

SEQ ID NO: 2046798 - RNA, 21 nt, Human herpesvirus 6B
agguuucuaaaucugaaaugu

SEQ ID NO: 2046799 - RNA, 14 nt, Human herpesvirus 6B
aaacaugauuguaa

SEQ ID NO: 2046800 - RNA, 15 nt, Human herpesvirus 6B
gugagcagaagcugu

SEQ ID NO: 2046801 - RNA, 20 nt, Human herpesvirus 6B
uauggugaugaauugaacau

SEQ ID NO: 2046802 - RNA, 16 nt, Human herpesvirus 6B
ugauaaguugucauug

SEQ ID NO: 2046803 - RNA, 15 nt, Human herpesvirus 6B
uuuggcauauacaaa

SEQ ID NO: 2046804 - RNA, 15 nt, Human herpesvirus 6B
acucugcuaaaauug

SEQ ID NO: 2046805 - RNA, 19 nt, Human herpesvirus 6B
aggguuccuccgcgggacc

SEQ ID NO: 2046806 - RNA, 15 nt, Human herpesvirus 6B
cgaaaaucauauauu

SEQ ID NO: 2046807 - RNA, 21 nt, Human herpesvirus 6B
ccgcgaugcgccacagggagg

SEQ ID NO: 2046808 - RNA, 14 nt, Human herpesvirus 6B
acugaaucagaaac

SEQ ID NO: 2046809 - RNA, 20 nt, Human herpesvirus 6B
gaaacggugguuucugcucc

SEQ ID NO: 2046810 - RNA, 23 nt, Human herpesvirus 6B
ccaaggauuaugaucauacgagg

SEQ ID NO: 2046811 - RNA, 21 nt, Human herpesvirus 6B
acugcaugcuaauaaaauaua

SEQ ID NO: 2046812 - RNA, 12 nt, Human herpesvirus 6B
uuuggcagaauc

SEQ ID NO: 2046813 - RNA, 10 nt, Human herpesvirus 6B
aaggcucucg

SEQ ID NO: 2046814 - RNA, 14 nt, Human herpesvirus 6B
aucauauauugaaa

SEQ ID NO: 2046815 - RNA, 18 nt, Human herpesvirus 6B
aauuauugugacaaggua

SEQ ID NO: 2046816 - RNA, 22 nt, Human herpesvirus 6B
aucuuccuuuucaguauagaca

SEQ ID NO: 2046817 - RNA, 15 nt, Human herpesvirus 6B
gaauccgcgggccag

SEQ ID NO: 2046818 - RNA, 15 nt, Human herpesvirus 6B
ucacggcuagaugug

SEQ ID NO: 2046819 - RNA, 20 nt, Human herpesvirus 6B
cagaacagagacccuccugg

SEQ ID NO: 2046820 - RNA, 19 nt, Human herpesvirus 6B
cauugagccggcugauaag

SEQ ID NO: 2046821 - RNA, 14 nt, Human herpesvirus 6B
acauagaaucucca

SEQ ID NO: 2046822 - RNA, 16 nt, Human herpesvirus 6B
gcgaagugcuucugcu

SEQ ID NO: 2046823 - RNA, 17 nt, Human herpesvirus 6B
ucuucgugcaauaacga

SEQ ID NO: 2046824 - RNA, 18 nt, Human herpesvirus 6B
acguggccgucuccugca

SEQ ID NO: 2046825 - RNA, 19 nt, Human herpesvirus 6B
uauucacaagaagaugcuu

SEQ ID NO: 2046826 - RNA, 20 nt, Human herpesvirus 6B
gcucuccgcgcugcuggggc

SEQ ID NO: 2046827 - RNA, 17 nt, Human herpesvirus 6B
gaagccgcugcagugug

SEQ ID NO: 2046828 - RNA, 17 nt, Human herpesvirus 6B
ucuauuuuuuauuagua

SEQ ID NO: 2046829 - RNA, 23 nt, Human herpesvirus 6B
guaaacuucugcuauuuuuuuaa

SEQ ID NO: 2046830 - RNA, 15 nt, Human herpesvirus 6B
aagacguuuuugugu

SEQ ID NO: 2046831 - RNA, 19 nt, Human herpesvirus 6B
uucuccucaacuaaaucau

SEQ ID NO: 2046832 - RNA, 21 nt, Human herpesvirus 6B
aacaaaaggucagaugcaaaa

SEQ ID NO: 2046833 - RNA, 15 nt, Human herpesvirus 6B
aaauuuguaacaaug

SEQ ID NO: 2046834 - RNA, 15 nt, Human herpesvirus 6B
auaagcagaagaguu

SEQ ID NO: 2046835 - RNA, 20 nt, Human herpesvirus 6B
acggcagcggggaagggaau

SEQ ID NO: 2046836 - RNA, 21 nt, Human herpesvirus 6B
gggugaucauaggacagagga

SEQ ID NO: 2046837 - RNA, 16 nt, Human herpesvirus 6B
auugggaagauucugc

SEQ ID NO: 2046838 - RNA, 16 nt, Human herpesvirus 6B
cagaaaugagcaacau

SEQ ID NO: 2046839 - RNA, 18 nt, Human herpesvirus 6B
uaaccuaagcuggacaga

SEQ ID NO: 2046840 - RNA, 21 nt, Human herpesvirus 6B
gacagaguucgguccaaggau

SEQ ID NO: 2046841 - RNA, 19 nt, Human herpesvirus 6B
gaauaugaauaugccguau

SEQ ID NO: 2046842 - RNA, 20 nt, Human herpesvirus 6B
auccaaaguaggcacacaug

SEQ ID NO: 2046843 - RNA, 15 nt, Human herpesvirus 6B
caccaugaaagcaca

SEQ ID NO: 2046844 - RNA, 14 nt, Human herpesvirus 6B
guuugaucuagaua

SEQ ID NO: 2046845 - RNA, 17 nt, Human herpesvirus 6B
ggagaggaagccggagc

SEQ ID NO: 2046846 - RNA, 13 nt, Human herpesvirus 6B
guguuuuguaagu

SEQ ID NO: 2046847 - RNA, 20 nt, Human herpesvirus 6B
gcggauuagguaucugcccc

SEQ ID NO: 2046848 - RNA, 17 nt, Human herpesvirus 6B
ucauaggcacuuaccca

SEQ ID NO: 2046849 - RNA, 17 nt, Human herpesvirus 6B
uucagaaggcuguguuu

SEQ ID NO: 2046850 - RNA, 20 nt, Human herpesvirus 6B
gcaagucgccucacuguaaa

SEQ ID NO: 2046851 - RNA, 22 nt, Human herpesvirus 6B
acauucuuguucgggccaaggu

SEQ ID NO: 2046852 - RNA, 11 nt, Human herpesvirus 6B
ugcccaagaac

SEQ ID NO: 2046853 - RNA, 17 nt, Human herpesvirus 6B
cagacgugcggagaugc

SEQ ID NO: 2046854 - RNA, 13 nt, Human herpesvirus 6B
cccccucuugcag

SEQ ID NO: 2046855 - RNA, 21 nt, Human herpesvirus 6B
uguuuuguaggacugaaggag

SEQ ID NO: 2046856 - RNA, 11 nt, Human herpesvirus 6B
gacggaauuua

SEQ ID NO: 2046857 - RNA, 18 nt, Human herpesvirus 6B
guuagagauuuuggaagc

SEQ ID NO: 2046858 - RNA, 15 nt, Human herpesvirus 6B
ggaauaaugaaauuu

SEQ ID NO: 2046859 - RNA, 16 nt, Human herpesvirus 6B
cuauuugacaauaaac

SEQ ID NO: 2046860 - RNA, 13 nt, Human herpesvirus 6B
uuauaaguguuac

SEQ ID NO: 2046861 - RNA, 16 nt, Human herpesvirus 6B
aggacggggccucccu

SEQ ID NO: 2046862 - RNA, 12 nt, Human herpesvirus 6B
uguucucuccca

SEQ ID NO: 2046863 - RNA, 19 nt, Human herpesvirus 6B
gacuaucaaaauaaaaauu

SEQ ID NO: 2046864 - RNA, 15 nt, Human herpesvirus 6B
caaugaauacuucuc

SEQ ID NO: 2046865 - RNA, 18 nt, Human herpesvirus 6B
augauccaauguuucugu

SEQ ID NO: 2046866 - RNA, 13 nt, Human herpesvirus 6B
ugugcuuggaagu

SEQ ID NO: 2046867 - RNA, 18 nt, Human herpesvirus 6B
uaagaaaaccgaaaacac

SEQ ID NO: 2046868 - RNA, 23 nt, Human herpesvirus 6B
aacucgggggcagucggaaaauc

SEQ ID NO: 2046869 - RNA, 23 nt, Human herpesvirus 6B
gaccgcagucgcggcggccccgc

SEQ ID NO: 2046870 - RNA, 18 nt, Human herpesvirus 6B
gaguauggugucugaaaa

SEQ ID NO: 2046871 - RNA, 15 nt, Human herpesvirus 6B
ccuccguccaggacc

SEQ ID NO: 2046872 - RNA, 20 nt, Human herpesvirus 6B
auucugcuugcacuauuuua

SEQ ID NO: 2046873 - RNA, 20 nt, Human herpesvirus 6B
ugggaagauucugcagaaug

SEQ ID NO: 2046874 - RNA, 24 nt, Human herpesvirus 6B
gaacauuguucuaaaagauuguuu

SEQ ID NO: 2046875 - RNA, 21 nt, Human herpesvirus 6B
cucaguagaaugaaugaaaca

SEQ ID NO: 2046876 - RNA, 20 nt, Human herpesvirus 6B
gccgugucuuucgauaaggc

SEQ ID NO: 2046877 - RNA, 18 nt, Human herpesvirus 6B
uagacuaaacuuaacuua

SEQ ID NO: 2046878 - RNA, 15 nt, Human herpesvirus 6B
caacgcauagaagcc

SEQ ID NO: 2046879 - RNA, 22 nt, Human herpesvirus 6B
uacggagauauaccgugacagc

SEQ ID NO: 2046880 - RNA, 22 nt, Human herpesvirus 6B
aguggguaccgcgguugaaguc

SEQ ID NO: 2046881 - RNA, 15 nt, Human herpesvirus 6B
gcauaacuaugaauu

SEQ ID NO: 2046882 - RNA, 17 nt, Human herpesvirus 6B
gucacucacauagagaa

SEQ ID NO: 2046883 - RNA, 23 nt, Human herpesvirus 6B
uuacaucaacuauuuaacaucca

SEQ ID NO: 2046884 - RNA, 19 nt, Human herpesvirus 6B
aucuguauaucuaugcuuu

SEQ ID NO: 2046885 - RNA, 20 nt, Human herpesvirus 6B
ccuacgggaagguguuugau

SEQ ID NO: 2046886 - RNA, 24 nt, Human herpesvirus 6B
ucccuccguuaggaucagacagac

SEQ ID NO: 2046887 - RNA, 15 nt, Human herpesvirus 6B
agguccgacacgccc

SEQ ID NO: 2046888 - RNA, 18 nt, Human herpesvirus 6B
guaccccaagugaaauuc

SEQ ID NO: 2046889 - RNA, 22 nt, Human herpesvirus 6B
cggagauauaccgugacagcaa

SEQ ID NO: 2046890 - RNA, 17 nt, Human herpesvirus 6B
gaagaauugucuuuucg

SEQ ID NO: 2046891 - RNA, 20 nt, Human herpesvirus 6B
uacccaucguucuuaacaua

SEQ ID NO: 2046892 - RNA, 23 nt, Human herpesvirus 6B
uucaacauccuauuaagauucuc

SEQ ID NO: 2046893 - RNA, 16 nt, Human herpesvirus 6B
cgcagcagcagcucca

SEQ ID NO: 2046894 - RNA, 20 nt, Human herpesvirus 6B
uucuauauggcccucucacg

SEQ ID NO: 2046895 - RNA, 12 nt, Human herpesvirus 6B
caauagcaguug

SEQ ID NO: 2046896 - RNA, 16 nt, Human herpesvirus 6B
gaguauggagaaaaac

SEQ ID NO: 2046897 - RNA, 19 nt, Human herpesvirus 6B
uugggaccuucaggaacaa

SEQ ID NO: 2046898 - RNA, 23 nt, Human herpesvirus 6B
aguuagaugcuuaacuuacuuaa

SEQ ID NO: 2046899 - RNA, 18 nt, Human herpesvirus 6B
auucucugcaugucuuua

SEQ ID NO: 2046900 - RNA, 15 nt, Human herpesvirus 6B
cugacaucugcaaaa

SEQ ID NO: 2046901 - RNA, 20 nt, Human herpesvirus 6B
cguugcccucccgcagcucc

SEQ ID NO: 2046902 - RNA, 23 nt, Human herpesvirus 6B
cgaaacgugggguaaaaauguua

SEQ ID NO: 2046903 - RNA, 16 nt, Human herpesvirus 6B
uacuacgagaaaaggu

SEQ ID NO: 2046904 - RNA, 19 nt, Human herpesvirus 6B
uggccgaguuuagacagag

SEQ ID NO: 2046905 - RNA, 14 nt, Human herpesvirus 6B
auuuauguaaacau

SEQ ID NO: 2046906 - RNA, 16 nt, Human herpesvirus 6B
agaucgcuuuucugga

SEQ ID NO: 2046907 - RNA, 18 nt, Human herpesvirus 6B
aucauuucgauaucucac

SEQ ID NO: 2046908 - RNA, 16 nt, Human herpesvirus 6B
caaugaauacuucucu

SEQ ID NO: 2046909 - RNA, 16 nt, Human herpesvirus 6B
gggucgaacccugaga

SEQ ID NO: 2046910 - RNA, 17 nt, Human herpesvirus 6B
caacacuguuguuaauc

SEQ ID NO: 2046911 - RNA, 20 nt, Human herpesvirus 6B
aaccacagccagaagcaauu

SEQ ID NO: 2046912 - RNA, 23 nt, Human herpesvirus 6B
acuguucggauccaaugaugaaa

SEQ ID NO: 2046913 - RNA, 17 nt, Human herpesvirus 6B
auugaauacgacuuugg

SEQ ID NO: 2046914 - RNA, 15 nt, Human herpesvirus 6B
augucucaguucaaa

SEQ ID NO: 2046915 - RNA, 18 nt, Human herpesvirus 6B
caguuuuuuuuucauaug

SEQ ID NO: 2046916 - RNA, 14 nt, Human herpesvirus 6B
gcgcggggcgcacc

SEQ ID NO: 2046917 - RNA, 16 nt, Human herpesvirus 6B
gcuaaguguugacuga

SEQ ID NO: 2046918 - RNA, 14 nt, Human herpesvirus 6B
agaaaaagaacugu

SEQ ID NO: 2046919 - RNA, 19 nt, Human herpesvirus 6B
cuuccgaguauggugucuu

SEQ ID NO: 2046920 - RNA, 16 nt, Human herpesvirus 6B
accaucuauuugcaag

SEQ ID NO: 2046921 - RNA, 17 nt, Human herpesvirus 6B
cagggcauagaaagcgg

SEQ ID NO: 2046922 - RNA, 20 nt, Human herpesvirus 6B
agcaauuucggcaagaaagc

SEQ ID NO: 2046923 - RNA, 14 nt, Human herpesvirus 6B
agaaaagaaacaau

SEQ ID NO: 2046924 - RNA, 12 nt, Human herpesvirus 6B
accgaaaugugc

SEQ ID NO: 2046925 - RNA, 13 nt, Human herpesvirus 6B
gugaguuuuggaa

SEQ ID NO: 2046926 - RNA, 10 nt, Human herpesvirus 6B
cauaaaguua

SEQ ID NO: 2046927 - RNA, 16 nt, Human herpesvirus 6B
ucugauaaacuccaaa

SEQ ID NO: 2046928 - RNA, 13 nt, Human herpesvirus 6B
ugaagucuuuccu

SEQ ID NO: 2046929 - RNA, 17 nt, Human herpesvirus 6B
aggaggaaaagaagaag

SEQ ID NO: 2046930 - RNA, 13 nt, Human herpesvirus 6B
cgggccacgagag

SEQ ID NO: 2046931 - RNA, 18 nt, Human herpesvirus 6B
cgcggcgacgucgcggcc

SEQ ID NO: 2046932 - RNA, 17 nt, Human herpesvirus 6B
aguauucgugugugaaa

SEQ ID NO: 2046933 - RNA, 18 nt, Human herpesvirus 6B
uucuaauuauaaauguag

SEQ ID NO: 2046934 - RNA, 16 nt, Human herpesvirus 6B
uacauuguuucucuaa

SEQ ID NO: 2046935 - RNA, 15 nt, Human herpesvirus 6B
gggcauuuuuuugaa

SEQ ID NO: 2046936 - RNA, 13 nt, Human herpesvirus 6B
auuucgguuuaau

SEQ ID NO: 2046937 - RNA, 21 nt, Human herpesvirus 6B
ugucacaauaauuacucccau

SEQ ID NO: 2046938 - RNA, 20 nt, Human herpesvirus 6B
cccaggcgcagcagcagcuc

SEQ ID NO: 2046939 - RNA, 12 nt, Human herpesvirus 6B
uggaacugcuug

SEQ ID NO: 2046940 - RNA, 14 nt, Human herpesvirus 6B
uuuauauuaaugau

SEQ ID NO: 2046941 - RNA, 19 nt, Human herpesvirus 6B
gcggcaugaguggaguuga

SEQ ID NO: 2046942 - RNA, 22 nt, Human herpesvirus 6B
ucguuaugacgaucaauauaga

SEQ ID NO: 2046943 - RNA, 19 nt, Human herpesvirus 6B
aauauuuuuucagcuuuca

SEQ ID NO: 2046944 - RNA, 20 nt, Human herpesvirus 6B
uugaauccucuuagauaucc

SEQ ID NO: 2046945 - RNA, 17 nt, Human herpesvirus 6B
gaaauguugucaaucgu

SEQ ID NO: 2046946 - RNA, 17 nt, Human herpesvirus 6B
ugaaucccgugaaggaa

SEQ ID NO: 2046947 - RNA, 19 nt, Human herpesvirus 6B
uccuuaucagucucaaaaa

SEQ ID NO: 2046948 - RNA, 20 nt, Human herpesvirus 6B
auaauuuuauugacugugaa

SEQ ID NO: 2046949 - RNA, 15 nt, Human herpesvirus 6B
agguguuugcagaua

SEQ ID NO: 2046950 - RNA, 14 nt, Human herpesvirus 6B
uccaugacugugag

SEQ ID NO: 2046951 - RNA, 19 nt, Human herpesvirus 6B
acgucuccaucucuagaau

SEQ ID NO: 2046952 - RNA, 15 nt, Human herpesvirus 6B
auggauaagauuuac

SEQ ID NO: 2046953 - RNA, 16 nt, Human herpesvirus 6B
cuugaaccaagucacc

SEQ ID NO: 2046954 - RNA, 15 nt, Human herpesvirus 6B
caguaaaacauguag

SEQ ID NO: 2046955 - RNA, 14 nt, Human herpesvirus 6B
gaaacaaaauuaau

SEQ ID NO: 2046956 - RNA, 18 nt, Human herpesvirus 6B
cuucuuggagucuggccu

SEQ ID NO: 2046957 - RNA, 18 nt, Human herpesvirus 6B
gcacccguauccgcgaga

SEQ ID NO: 2046958 - RNA, 14 nt, Human herpesvirus 6B
cauguucuauuuua

SEQ ID NO: 2046959 - RNA, 13 nt, Human herpesvirus 6B
uuuaugucuguca

SEQ ID NO: 2046960 - RNA, 16 nt, Human herpesvirus 6B
ugccuucuguucacau

SEQ ID NO: 2046961 - RNA, 15 nt, Human herpesvirus 6B
gaugaggcccagagg

SEQ ID NO: 2046962 - RNA, 22 nt, Human herpesvirus 6B
ggagucggucuguuccccgucc

SEQ ID NO: 2046963 - RNA, 13 nt, Human herpesvirus 6B
agacaucguggac

SEQ ID NO: 2046964 - RNA, 18 nt, Human herpesvirus 6B
acagaaucuucuuugugc

SEQ ID NO: 2046965 - RNA, 19 nt, Human herpesvirus 6B
caggccgaguuggccaagc

SEQ ID NO: 2046966 - RNA, 16 nt, Human herpesvirus 6B
auaauuacagaugucu

SEQ ID NO: 2046967 - RNA, 13 nt, Human herpesvirus 6B
aucaaauucaaac

SEQ ID NO: 2046968 - RNA, 20 nt, Human herpesvirus 6B
aauguagcacacgacaaaua

SEQ ID NO: 2046969 - RNA, 22 nt, Human herpesvirus 6B
ucucgauugugauguacguggc

SEQ ID NO: 2046970 - RNA, 16 nt, Human herpesvirus 6B
gaaagaggggaauuug

SEQ ID NO: 2046971 - RNA, 12 nt, Human herpesvirus 6B
cacaccaccgca

SEQ ID NO: 2046972 - RNA, 20 nt, Human herpesvirus 6B
ugcgaccucgcucuccugug

SEQ ID NO: 2046973 - RNA, 18 nt, Human herpesvirus 6B
agcuaaaauugcuacuaa

SEQ ID NO: 2046974 - RNA, 14 nt, Human herpesvirus 6B
cuggauuaucagag

SEQ ID NO: 2046975 - RNA, 17 nt, Human herpesvirus 6B
cuuccgcuaccgcccug

SEQ ID NO: 2046976 - RNA, 23 nt, Human herpesvirus 6B
gucuaugacuuuucugaaauucu

SEQ ID NO: 2046977 - RNA, 16 nt, Human herpesvirus 6B
cuauuuaacugggaaa

SEQ ID NO: 2046978 - RNA, 19 nt, Human herpesvirus 6B
acuggagcuagagaaaauu

SEQ ID NO: 2046979 - RNA, 22 nt, Human herpesvirus 6B
ggcggaggcgucgcggugguga

SEQ ID NO: 2046980 - RNA, 19 nt, Human herpesvirus 6B
ucuuggauugcagauaaga

SEQ ID NO: 2046981 - RNA, 22 nt, Human herpesvirus 6B
acugcggagaacgggcaacucc

SEQ ID NO: 2046982 - RNA, 14 nt, Human herpesvirus 6B
gaaagcgcgccaca

SEQ ID NO: 2046983 - RNA, 13 nt, Human herpesvirus 6B
aaauugucuacaa

SEQ ID NO: 2046984 - RNA, 17 nt, Human herpesvirus 6B
gagccuuuaaccauguu

SEQ ID NO: 2046985 - RNA, 15 nt, Human herpesvirus 6B
ugcgucagaguuuga

SEQ ID NO: 2046986 - RNA, 14 nt, Human herpesvirus 6B
auagagauaaaugu

SEQ ID NO: 2046987 - RNA, 12 nt, Human herpesvirus 6B
uuccagauguag

SEQ ID NO: 2046988 - RNA, 14 nt, Human herpesvirus 6B
ggguguauguuucu

SEQ ID NO: 2046989 - RNA, 14 nt, Human herpesvirus 6B
uugaauucugcucg

SEQ ID NO: 2046990 - RNA, 23 nt, Human herpesvirus 6B
gccuauucuaauuauaaauguag

SEQ ID NO: 2046991 - RNA, 17 nt, Human herpesvirus 6B
uguuaugcaguuguacu

SEQ ID NO: 2046992 - RNA, 14 nt, Human herpesvirus 6B
uccagguuuuucau

SEQ ID NO: 2046993 - RNA, 11 nt, Human herpesvirus 6B
ucgaaagagau

SEQ ID NO: 2046994 - RNA, 16 nt, Human herpesvirus 6B
uuaaugagaggacagu

SEQ ID NO: 2046995 - RNA, 22 nt, Human herpesvirus 6B
uggaaacguguuugucuguaug

SEQ ID NO: 2046996 - RNA, 14 nt, Human herpesvirus 6B
auuucuuguagcuu

SEQ ID NO: 2046997 - RNA, 13 nt, Human herpesvirus 6B
aaauuacaugaaa

SEQ ID NO: 2046998 - RNA, 15 nt, Human herpesvirus 6B
ucuaugagacuguuu

SEQ ID NO: 2046999 - RNA, 21 nt, Human herpesvirus 6B
guagaagacaucuuaaauuuc

SEQ ID NO: 2047000 - RNA, 16 nt, Human herpesvirus 6B
aaaguuuuggaaaaug

SEQ ID NO: 2047001 - RNA, 12 nt, Human herpesvirus 6B
uggcugaaggaa

SEQ ID NO: 2047002 - RNA, 20 nt, Human herpesvirus 6B
ugcaaaaucguguuuucuua

SEQ ID NO: 2047003 - RNA, 21 nt, Human herpesvirus 6B
aagcgacuuuuuaacaaaaug

SEQ ID NO: 2047004 - RNA, 18 nt, Human herpesvirus 6B
cagauuucccaaaacgug

SEQ ID NO: 2047005 - RNA, 20 nt, Human herpesvirus 6B
aaauuuguucgcacaaaaug

SEQ ID NO: 2047006 - RNA, 15 nt, Human herpesvirus 6B
uuauucuacugugca

SEQ ID NO: 2047007 - RNA, 19 nt, Human herpesvirus 6B
gggccggucggggagggga

SEQ ID NO: 2047008 - RNA, 13 nt, Human herpesvirus 6B
acggcagcgggga

SEQ ID NO: 2047009 - RNA, 16 nt, Human herpesvirus 6B
ccuggaagaaggaaaa

SEQ ID NO: 2047010 - RNA, 18 nt, Human herpesvirus 6B
gcaauuugaauucugcuc

SEQ ID NO: 2047011 - RNA, 21 nt, Human herpesvirus 6B
agaugcugaauaauuacaaag

SEQ ID NO: 2047012 - RNA, 21 nt, Human herpesvirus 6B
aucaaugucacaaaucuguaa

SEQ ID NO: 2047013 - RNA, 15 nt, Human herpesvirus 6B
gauauaguuauucag

SEQ ID NO: 2047014 - RNA, 21 nt, Human herpesvirus 6B
aauuuccggucaacuucuaua

SEQ ID NO: 2047015 - RNA, 14 nt, Human herpesvirus 6B
agcaggagaaaaau

SEQ ID NO: 2047016 - RNA, 16 nt, Human herpesvirus 6B
acggcagcggggaagg

SEQ ID NO: 2047017 - RNA, 20 nt, Human herpesvirus 6B
caugacggacuuggaaaagg

SEQ ID NO: 2047018 - RNA, 19 nt, Human herpesvirus 6B
cuuuuuuccucgaugguag

SEQ ID NO: 2047019 - RNA, 17 nt, Human herpesvirus 6B
caaaaugaccagagauu

SEQ ID NO: 2047020 - RNA, 16 nt, Human herpesvirus 6B
cauuucuccacacugu

SEQ ID NO: 2047021 - RNA, 22 nt, Human herpesvirus 6B
auacuacguguaauguuuccuu

SEQ ID NO: 2047022 - RNA, 18 nt, Human herpesvirus 6B
uucagacucgacguguau

SEQ ID NO: 2047023 - RNA, 15 nt, Human herpesvirus 6B
cggaagugcaugcga

SEQ ID NO: 2047024 - RNA, 13 nt, Human herpesvirus 6B
cacacgacaaaua

SEQ ID NO: 2047025 - RNA, 20 nt, Human herpesvirus 6B
gggacuccgagccggacagg

SEQ ID NO: 2047026 - RNA, 19 nt, Human herpesvirus 6B
aguaugggcacaaagugcu

SEQ ID NO: 2047027 - RNA, 18 nt, Human herpesvirus 6B
aaccaucuauuugcaaga

SEQ ID NO: 2047028 - RNA, 11 nt, Human herpesvirus 6B
uuacaaguaug

SEQ ID NO: 2047029 - RNA, 14 nt, Human herpesvirus 6B
cacugaaucagaaa

SEQ ID NO: 2047030 - RNA, 11 nt, Human herpesvirus 6B
uaacauauucg

SEQ ID NO: 2047031 - RNA, 23 nt, Human herpesvirus 6B
auaugcuuuuuuuuguggauggu

SEQ ID NO: 2047032 - RNA, 23 nt, Human herpesvirus 6B
aguauuuaugcuucauaauguau

SEQ ID NO: 2047033 - RNA, 16 nt, Human herpesvirus 6B
cgacccaacagaagcc

SEQ ID NO: 2047034 - RNA, 18 nt, Human herpesvirus 6B
gcgaggggacggacagag

SEQ ID NO: 2047035 - RNA, 15 nt, Human herpesvirus 6B
auucugauaaacucc

SEQ ID NO: 2047036 - RNA, 17 nt, Human herpesvirus 6B
gauaacggcgcagaauu

SEQ ID NO: 2047037 - RNA, 16 nt, Human herpesvirus 6B
cagcuuuauucccaug

SEQ ID NO: 2047038 - RNA, 16 nt, Human herpesvirus 6B
cugccgcaucgcaccg

SEQ ID NO: 2047039 - RNA, 17 nt, Human herpesvirus 6B
uuacaugaaaacauuca

SEQ ID NO: 2047040 - RNA, 20 nt, Human herpesvirus 6B
ucggaugguauaauguaaaa

SEQ ID NO: 2047041 - RNA, 15 nt, Human herpesvirus 6B
gaaucccuugucugg

SEQ ID NO: 2047042 - RNA, 19 nt, Human herpesvirus 6B
cgaaaacuagaugacuauu

SEQ ID NO: 2047043 - RNA, 23 nt, Human herpesvirus 6B
agccguuucguucccucucaaac

SEQ ID NO: 2047044 - RNA, 21 nt, Human herpesvirus 6B
cuugcaaacagcuuuauuccc

SEQ ID NO: 2047045 - RNA, 18 nt, Human herpesvirus 6B
cguuacaagcaugcauug

SEQ ID NO: 2047046 - RNA, 19 nt, Human herpesvirus 6B
uccuuaaaugacacagaau

SEQ ID NO: 2047047 - RNA, 20 nt, Human herpesvirus 6B
uucguccggggugaaaucua

SEQ ID NO: 2047048 - RNA, 18 nt, Human herpesvirus 6B
aauuuaugugaauucugu

SEQ ID NO: 2047049 - RNA, 16 nt, Human herpesvirus 6B
cacgggccacgagagc

SEQ ID NO: 2047050 - RNA, 16 nt, Human herpesvirus 6B
aauaauagguuauuua

SEQ ID NO: 2047051 - RNA, 20 nt, Human herpesvirus 6B
uugugaacaaguuauuuaaa

SEQ ID NO: 2047052 - RNA, 19 nt, Human herpesvirus 6B
uuguuaucuuauguauaua

SEQ ID NO: 2047053 - RNA, 23 nt, Human herpesvirus 6B
ucccgcucgggggacggagagga

SEQ ID NO: 2047054 - RNA, 16 nt, Human herpesvirus 6B
aaacauagaaucucca

SEQ ID NO: 2047055 - RNA, 14 nt, Human herpesvirus 6B
caugacgaagggag

SEQ ID NO: 2047056 - RNA, 17 nt, Human herpesvirus 6B
gaugagaacuucaaaau

SEQ ID NO: 2047057 - RNA, 20 nt, Human herpesvirus 6B
uccgccuccucuuuuccccc

SEQ ID NO: 2047058 - RNA, 19 nt, Human herpesvirus 6B
uauauuuucguugaagaau

SEQ ID NO: 2047059 - RNA, 17 nt, Human herpesvirus 6B
cgcagauuuacgacacg

SEQ ID NO: 2047060 - RNA, 17 nt, Human herpesvirus 6B
gaguuuagcauggguga

SEQ ID NO: 2047061 - RNA, 13 nt, Human herpesvirus 6B
gaucacucagauu

SEQ ID NO: 2047062 - RNA, 11 nt, Human herpesvirus 6B
aacaauuuccc

SEQ ID NO: 2047063 - RNA, 22 nt, Human herpesvirus 6B
cuuuacauaacauagaaaaaua

SEQ ID NO: 2047064 - RNA, 14 nt, Human herpesvirus 6B
aaugacacagaauc

SEQ ID NO: 2047065 - RNA, 18 nt, Human herpesvirus 6B
cgcuaucggcggacgacg

SEQ ID NO: 2047066 - RNA, 21 nt, Human herpesvirus 6B
ugcgaauuaaaacucuaaaag

SEQ ID NO: 2047067 - RNA, 22 nt, Human herpesvirus 6B
cugaaaaguuagaguuggauuu

SEQ ID NO: 2047068 - RNA, 22 nt, Human herpesvirus 6B
agggcauagaaagcggccaggc

SEQ ID NO: 2047069 - RNA, 13 nt, Human herpesvirus 6B
cuguccgugagac

SEQ ID NO: 2047070 - RNA, 22 nt, Human herpesvirus 6B
agggauucguaguuuaugaaau

SEQ ID NO: 2047071 - RNA, 13 nt, Human herpesvirus 6B
uugagaaaacaug

SEQ ID NO: 2047072 - RNA, 19 nt, Human herpesvirus 6B
agcgcaucugccgaaagcu

SEQ ID NO: 2047073 - RNA, 15 nt, Human herpesvirus 6B
uuagaucuucuucag

SEQ ID NO: 2047074 - RNA, 21 nt, Human herpesvirus 6B
gugaggugauuugaacagaga

SEQ ID NO: 2047075 - RNA, 15 nt, Human herpesvirus 6B
gauccgucaggacca

SEQ ID NO: 2047076 - RNA, 16 nt, Human herpesvirus 6B
agugaguuuuggaaau

SEQ ID NO: 2047077 - RNA, 12 nt, Human herpesvirus 6B
cuuauaaaugug

SEQ ID NO: 2047078 - RNA, 13 nt, Human herpesvirus 6B
cuaggaaaacuac

SEQ ID NO: 2047079 - RNA, 11 nt, Human herpesvirus 6B
cagcaugucau

SEQ ID NO: 2047080 - RNA, 16 nt, Human herpesvirus 6B
cauagaguuucgagaa

SEQ ID NO: 2047081 - RNA, 23 nt, Human herpesvirus 6B
aauucucugcaugucuuuagaug

SEQ ID NO: 2047082 - RNA, 19 nt, Human herpesvirus 6B
caauuggcgauuuggguua

SEQ ID NO: 2047083 - RNA, 20 nt, Human herpesvirus 6B
ccgcgcugcuggggcucugu

SEQ ID NO: 2047084 - RNA, 12 nt, Human herpesvirus 6B
uuuaugcuucau

SEQ ID NO: 2047085 - RNA, 15 nt, Human herpesvirus 6B
ucaaacacucaugag

SEQ ID NO: 2047086 - RNA, 15 nt, Human herpesvirus 6B
acauuagagaaauuu

SEQ ID NO: 2047087 - RNA, 15 nt, Human herpesvirus 6B
guugaagucuuuccu

SEQ ID NO: 2047088 - RNA, 18 nt, Human herpesvirus 6B
uguuuuuuucaagaaugg

SEQ ID NO: 2047089 - RNA, 19 nt, Human herpesvirus 6B
guuuguggacaaugauacu

SEQ ID NO: 2047090 - RNA, 23 nt, Human herpesvirus 6B
agaacuaggcaaaguauucuucu

SEQ ID NO: 2047091 - RNA, 18 nt, Human herpesvirus 6B
cuugcgauuguucugcga

SEQ ID NO: 2047092 - RNA, 20 nt, Human herpesvirus 6B
ucuuaaucagauaucugaaa

SEQ ID NO: 2047093 - RNA, 11 nt, Human herpesvirus 6B
cgccucucccg

SEQ ID NO: 2047094 - RNA, 12 nt, Human herpesvirus 6B
uguagcagcugg

SEQ ID NO: 2047095 - RNA, 23 nt, Human herpesvirus 6B
uauucgccggacgaauugaguag

SEQ ID NO: 2047096 - RNA, 18 nt, Human herpesvirus 6B
aacauucggcggcauuua

SEQ ID NO: 2047097 - RNA, 22 nt, Human herpesvirus 6B
cuuauguaguguggaauuuaaa

SEQ ID NO: 2047098 - RNA, 11 nt, Human herpesvirus 6B
aaguugucauu

SEQ ID NO: 2047099 - RNA, 22 nt, Human herpesvirus 6B
acugcuccagucauaggcacuu

SEQ ID NO: 2047100 - RNA, 17 nt, Human herpesvirus 6B
agacugcugcuguggag

SEQ ID NO: 2047101 - RNA, 16 nt, Human herpesvirus 6B
ccgggcgcggggcgca

SEQ ID NO: 2047102 - RNA, 16 nt, Human herpesvirus 6B
acccuagacacacaga

SEQ ID NO: 2047103 - RNA, 15 nt, Human herpesvirus 6B
auuuacuguuuugac

SEQ ID NO: 2047104 - RNA, 15 nt, Human herpesvirus 6B
ggagucuggccucug

SEQ ID NO: 2047105 - RNA, 18 nt, Human herpesvirus 6B
auaccuaguacaaagaua

SEQ ID NO: 2047106 - RNA, 15 nt, Human herpesvirus 6B
gaugucgggccacau

SEQ ID NO: 2047107 - RNA, 22 nt, Human herpesvirus 6B
acuaaaauuacgucuuuuaugc

SEQ ID NO: 2047108 - RNA, 14 nt, Human herpesvirus 6B
acggagaguuuaua

SEQ ID NO: 2047109 - RNA, 23 nt, Human herpesvirus 6B
ccgcagaggcggcgaccacagcg

SEQ ID NO: 2047110 - RNA, 16 nt, Human herpesvirus 6B
ccgucucagugucacu

SEQ ID NO: 2047111 - RNA, 21 nt, Human herpesvirus 6B
ucauuuaugcagcucgggaaa

SEQ ID NO: 2047112 - RNA, 12 nt, Human herpesvirus 6B
uaguaaggaaga

SEQ ID NO: 2047113 - RNA, 16 nt, Human herpesvirus 6B
acacucauuugcaauu

SEQ ID NO: 2047114 - RNA, 15 nt, Human herpesvirus 6B
aaaauaagacuuagc

SEQ ID NO: 2047115 - RNA, 17 nt, Human herpesvirus 6B
gaauagagauaaaugua

SEQ ID NO: 2047116 - RNA, 23 nt, Human herpesvirus 6B
uauuaaaaugugaugaaacggaa

SEQ ID NO: 2047117 - RNA, 14 nt, Human herpesvirus 6B
ucuagaaugccagg

SEQ ID NO: 2047118 - RNA, 13 nt, Human herpesvirus 6B
gaccagcucuguu

SEQ ID NO: 2047119 - RNA, 14 nt, Human herpesvirus 6B
ggcgcugggcuccu

SEQ ID NO: 2047120 - RNA, 19 nt, Human herpesvirus 6B
ucaugauaaauuguuuccg

SEQ ID NO: 2047121 - RNA, 15 nt, Human herpesvirus 6B
cgacgggcagggcgg

SEQ ID NO: 2047122 - RNA, 15 nt, Human herpesvirus 6B
ugucuggcuguaucu

SEQ ID NO: 2047123 - RNA, 23 nt, Human herpesvirus 6B
ccauugaauacacguguggcagc

SEQ ID NO: 2047124 - RNA, 19 nt, Human herpesvirus 6B
gacgucaguggacaaauaa

SEQ ID NO: 2047125 - RNA, 14 nt, Human herpesvirus 6B
cucccgcagcuccu

SEQ ID NO: 2047126 - RNA, 13 nt, Human herpesvirus 6B
cccaggcgcagca

SEQ ID NO: 2047127 - RNA, 14 nt, Human herpesvirus 6B
ccgggcgacgagag

SEQ ID NO: 2047128 - RNA, 16 nt, Human herpesvirus 6B
ccaucaacacaccugc

SEQ ID NO: 2047129 - RNA, 15 nt, Human herpesvirus 6B
ggugauuugaacaga

SEQ ID NO: 2047130 - RNA, 20 nt, Human herpesvirus 6B
ucuccaaaagcgccugccua

SEQ ID NO: 2047131 - RNA, 15 nt, Human herpesvirus 6B
ugcccucccgcagcu

SEQ ID NO: 2047132 - RNA, 22 nt, Human herpesvirus 6B
agguucuauucguucagaaugu

SEQ ID NO: 2047133 - RNA, 17 nt, Human herpesvirus 6B
cuauguuaacauuguga

SEQ ID NO: 2047134 - RNA, 23 nt, Human herpesvirus 6B
cacggcgccucccauagaggcgc

SEQ ID NO: 2047135 - RNA, 17 nt, Human herpesvirus 6B
acauuuggcagcgcuug

SEQ ID NO: 2047136 - RNA, 15 nt, Human herpesvirus 6B
ucugagacagucaau

SEQ ID NO: 2047137 - RNA, 12 nt, Human herpesvirus 6B
gcgcagaaggag

SEQ ID NO: 2047138 - RNA, 16 nt, Human herpesvirus 6B
acagaaaaaacaccag

SEQ ID NO: 2047139 - RNA, 14 nt, Human herpesvirus 6B
gcuccguucccuuc

SEQ ID NO: 2047140 - RNA, 21 nt, Human herpesvirus 6B
aauccaaaguaggcacacaug

SEQ ID NO: 2047141 - RNA, 23 nt, Human herpesvirus 6B
ugaacauguuuuugauguuuuca

SEQ ID NO: 2047142 - RNA, 14 nt, Human herpesvirus 6B
accucgcucuccug

SEQ ID NO: 2047143 - RNA, 18 nt, Human herpesvirus 6B
uaaaaccugcuaacggag

SEQ ID NO: 2047144 - RNA, 20 nt, Human herpesvirus 6B
ucaagaaaccuguuuuugcu

SEQ ID NO: 2047145 - RNA, 18 nt, Human herpesvirus 6B
ccuccaucccccuccccg

SEQ ID NO: 2047146 - RNA, 20 nt, Human herpesvirus 6B
guaauuauugugacaaggua

SEQ ID NO: 2047147 - RNA, 12 nt, Human herpesvirus 6B
uuuugaaaaggu

SEQ ID NO: 2047148 - RNA, 16 nt, Human herpesvirus 6B
gaggacggugagaaga

SEQ ID NO: 2047149 - RNA, 15 nt, Human herpesvirus 6B
cauguuaacaauaaa

SEQ ID NO: 2047150 - RNA, 20 nt, Human herpesvirus 6B
cauaagcucuacacagagug

SEQ ID NO: 2047151 - RNA, 16 nt, Human herpesvirus 6B
ggaggaggaggagagg

SEQ ID NO: 2047152 - RNA, 20 nt, Human herpesvirus 6B
ccuaugaaaguguauuugga

SEQ ID NO: 2047153 - RNA, 13 nt, Human herpesvirus 6B
agugcuucugcuc

SEQ ID NO: 2047154 - RNA, 20 nt, Human herpesvirus 6B
ugcaaugucuucgagauuuu

SEQ ID NO: 2047155 - RNA, 22 nt, Human herpesvirus 6B
aagcuauguaugaacaggugcu

SEQ ID NO: 2047156 - RNA, 18 nt, Human herpesvirus 6B
uucuagaugcauuguuga

SEQ ID NO: 2047157 - RNA, 20 nt, Human herpesvirus 6B
auguaaacauagaaucucca

SEQ ID NO: 2047158 - RNA, 20 nt, Human herpesvirus 6B
caggguguaugcggccaguc

SEQ ID NO: 2047159 - RNA, 14 nt, Human herpesvirus 6B
gcccuccuggguac

SEQ ID NO: 2047160 - RNA, 16 nt, Human herpesvirus 6B
aaacagcgacaugaaa

SEQ ID NO: 2047161 - RNA, 14 nt, Human herpesvirus 6B
cgccauggguguca

SEQ ID NO: 2047162 - RNA, 15 nt, Human herpesvirus 6B
gaccgaauuauguau

SEQ ID NO: 2047163 - RNA, 21 nt, Human herpesvirus 6B
aauuuuuuguuucugaaaaua

SEQ ID NO: 2047164 - RNA, 22 nt, Human herpesvirus 6B
uguaucaaaguguauacauuca

SEQ ID NO: 2047165 - RNA, 16 nt, Human herpesvirus 6B
gaauauuuaguuuaug

SEQ ID NO: 2047166 - RNA, 12 nt, Human herpesvirus 6B
caacggagaaaa

SEQ ID NO: 2047167 - RNA, 14 nt, Human herpesvirus 6B
accuggcgcaccgc

SEQ ID NO: 2047168 - RNA, 22 nt, Human herpesvirus 6B
caccugccuagaauucucuccc

SEQ ID NO: 2047169 - RNA, 20 nt, Human herpesvirus 6B
aauaauuuuauugacuguga

SEQ ID NO: 2047170 - RNA, 12 nt, Human herpesvirus 6B
gugagugcuauu

SEQ ID NO: 2047171 - RNA, 22 nt, Human herpesvirus 6B
gacggcgaggggacggacagag

SEQ ID NO: 2047172 - RNA, 13 nt, Human herpesvirus 6B
agugcuuuauccg

SEQ ID NO: 2047173 - RNA, 14 nt, Human herpesvirus 6B
agaucuaaugaaug

SEQ ID NO: 2047174 - RNA, 19 nt, Human herpesvirus 6B
acauccagaaaagcaaaca

SEQ ID NO: 2047175 - RNA, 16 nt, Human herpesvirus 6B
aaucuccaaaacacuc

SEQ ID NO: 2047176 - RNA, 13 nt, Human herpesvirus 6B
uuaggauguuugg

SEQ ID NO: 2047177 - RNA, 17 nt, Human herpesvirus 6B
aucacuuagacacggcc

SEQ ID NO: 2047178 - RNA, 11 nt, Human herpesvirus 6B
gugacaaggua

SEQ ID NO: 2047179 - RNA, 12 nt, Human herpesvirus 6B
ucuucggacgcg

SEQ ID NO: 2047180 - RNA, 13 nt, Human herpesvirus 6B
uggauaaacaucg

SEQ ID NO: 2047181 - RNA, 15 nt, Human herpesvirus 6B
cuuaaucagauaucu

SEQ ID NO: 2047182 - RNA, 21 nt, Human herpesvirus 6B
ggcgacacgcgcggaccacuc

SEQ ID NO: 2047183 - RNA, 15 nt, Human herpesvirus 6B
cuauuuugacaccuc

SEQ ID NO: 2047184 - RNA, 17 nt, Human herpesvirus 6B
augaauuucaaugacug

SEQ ID NO: 2047185 - RNA, 14 nt, Human herpesvirus 6B
aguucuucaaaaaa

SEQ ID NO: 2047186 - RNA, 13 nt, Human herpesvirus 6B
ccucuauacucug

SEQ ID NO: 2047187 - RNA, 23 nt, Human herpesvirus 6B
gcauauuauuaacaaugaaaauu

SEQ ID NO: 2047188 - RNA, 19 nt, Human herpesvirus 6B
uucuccgucaccccccucg

SEQ ID NO: 2047189 - RNA, 19 nt, Human herpesvirus 6B
auuaaacuaacaugacaaa

SEQ ID NO: 2047190 - RNA, 16 nt, Human herpesvirus 6B
gcgauauggaaacacu

SEQ ID NO: 2047191 - RNA, 13 nt, Human herpesvirus 6B
auaaauuccucuc

SEQ ID NO: 2047192 - RNA, 13 nt, Human herpesvirus 6B
uucacuaacaaaa

SEQ ID NO: 2047193 - RNA, 18 nt, Human herpesvirus 6B
uuuuauuuuguggcuauu

SEQ ID NO: 2047194 - RNA, 13 nt, Human herpesvirus 6B
ccaaagcuuucug

SEQ ID NO: 2047195 - RNA, 22 nt, Human herpesvirus 6B
aaacgacuaucuccuugaugau

SEQ ID NO: 2047196 - RNA, 18 nt, Human herpesvirus 6B
gggaucgacgaccaggca

SEQ ID NO: 2047197 - RNA, 15 nt, Human herpesvirus 6B
cgaauaagccuuugc

SEQ ID NO: 2047198 - RNA, 14 nt, Human herpesvirus 6B
gcaaagggaagcca

SEQ ID NO: 2047199 - RNA, 21 nt, Human herpesvirus 6B
gcaagaaagcguguucaaaaa

SEQ ID NO: 2047200 - RNA, 17 nt, Human herpesvirus 6B
cuaccgcccugcuccgu

SEQ ID NO: 2047201 - RNA, 20 nt, Human herpesvirus 6B
uauaucaaacuuuuuuugaa

SEQ ID NO: 2047202 - RNA, 18 nt, Human herpesvirus 6B
agauguguuaaagaaugc

SEQ ID NO: 2047203 - RNA, 12 nt, Human herpesvirus 6B
cuggggacagac

SEQ ID NO: 2047204 - RNA, 11 nt, Human herpesvirus 6B
cgauaucucac

SEQ ID NO: 2047205 - RNA, 16 nt, Human herpesvirus 6B
cgauucccuccgggac

SEQ ID NO: 2047206 - RNA, 17 nt, Human herpesvirus 6B
aaugacuaucaaaauaa

SEQ ID NO: 2047207 - RNA, 14 nt, Human herpesvirus 6B
augccacagguaca

SEQ ID NO: 2047208 - RNA, 22 nt, Human herpesvirus 6B
agucuggccucugcggcucucu

SEQ ID NO: 2047209 - RNA, 13 nt, Human herpesvirus 6B
ccuauucaaaagu

SEQ ID NO: 2047210 - RNA, 18 nt, Human herpesvirus 6B
gaauuauuuccucugaau

SEQ ID NO: 2047211 - RNA, 19 nt, Human herpesvirus 6B
guacaaagguuuuugcugu

SEQ ID NO: 2047212 - RNA, 13 nt, Human herpesvirus 6B
acauguuaacaau

SEQ ID NO: 2047213 - RNA, 19 nt, Human herpesvirus 6B
uucaauagcaguugucugc

SEQ ID NO: 2047214 - RNA, 19 nt, Human herpesvirus 6B
uuacuguccgcuucccagc

SEQ ID NO: 2047215 - RNA, 17 nt, Human herpesvirus 6B
uucucgaccacgguuaa

SEQ ID NO: 2047216 - RNA, 19 nt, Human herpesvirus 6B
cagcuaagauuaacaacug

SEQ ID NO: 2047217 - RNA, 12 nt, Human herpesvirus 6B
acgggcagggcg

SEQ ID NO: 2047218 - RNA, 17 nt, Human herpesvirus 6B
gcuugguguaccagaca

SEQ ID NO: 2047219 - RNA, 23 nt, Human herpesvirus 6B
cggcgaagggacacgagaagaac

SEQ ID NO: 2047220 - RNA, 16 nt, Human herpesvirus 6B
ccguacgcgccacagc

SEQ ID NO: 2047221 - RNA, 11 nt, Human herpesvirus 6B
ggagcacgagc

SEQ ID NO: 2047222 - RNA, 20 nt, Human herpesvirus 6B
ucucgguuuauacuugaaga

SEQ ID NO: 2047223 - RNA, 16 nt, Human herpesvirus 6B
caagggaaauccuaua

SEQ ID NO: 2047224 - RNA, 23 nt, Human herpesvirus 6B
uugucgcugacgcaauacguaaa

SEQ ID NO: 2047225 - RNA, 14 nt, Human herpesvirus 6B
ugaauucugcucgu

SEQ ID NO: 2047226 - RNA, 19 nt, Human herpesvirus 6B
gcguugcccucccgcagcu

SEQ ID NO: 2047227 - RNA, 16 nt, Human herpesvirus 6B
caguugcauggugaug

SEQ ID NO: 2047228 - RNA, 16 nt, Human herpesvirus 6B
ccuguuucuacugcug

SEQ ID NO: 2047229 - RNA, 19 nt, Human herpesvirus 6B
aguucaaaauuuuucugua

SEQ ID NO: 2047230 - RNA, 22 nt, Human herpesvirus 6B
uauggugccgagcaaaccugaa

SEQ ID NO: 2047231 - RNA, 20 nt, Human herpesvirus 6B
agagaaguggaacugcuugg

SEQ ID NO: 2047232 - RNA, 18 nt, Human herpesvirus 6B
guccucguccguccccgc

SEQ ID NO: 2047233 - RNA, 19 nt, Human herpesvirus 6B
cugagaccgagagaauaga

SEQ ID NO: 2047234 - RNA, 18 nt, Human herpesvirus 6B
gaacuguuuccagagcac

SEQ ID NO: 2047235 - RNA, 20 nt, Human herpesvirus 6B
cggagcccugagagcaggag

SEQ ID NO: 2047236 - RNA, 11 nt, Human herpesvirus 6B
auaagaaugcu

SEQ ID NO: 2047237 - RNA, 17 nt, Human herpesvirus 6B
gaaagacguuugcuuuu

SEQ ID NO: 2047238 - RNA, 22 nt, Human herpesvirus 6B
ucaagcucgaguucgagaagau

SEQ ID NO: 2047239 - RNA, 19 nt, Human herpesvirus 6B
uucaaaauuuuucuguaag

SEQ ID NO: 2047240 - RNA, 10 nt, Human herpesvirus 6B
ccuguuucua

SEQ ID NO: 2047241 - RNA, 19 nt, Human herpesvirus 6B
acuuucuaagacgagaugu

SEQ ID NO: 2047242 - RNA, 11 nt, Human herpesvirus 6B
caacaauaaua

SEQ ID NO: 2047243 - RNA, 19 nt, Human herpesvirus 6B
uguuuucccaccuaauaaa

SEQ ID NO: 2047244 - RNA, 20 nt, Human herpesvirus 6B
ugacuguaccauugucaaca

SEQ ID NO: 2047245 - RNA, 16 nt, Human herpesvirus 6B
cuaugcaaugucuucg

SEQ ID NO: 2047246 - RNA, 15 nt, Human herpesvirus 6B
ugguaauaaacagac

SEQ ID NO: 2047247 - RNA, 22 nt, Human herpesvirus 6B
cuaaaaauauugguauugauuu

SEQ ID NO: 2047248 - RNA, 23 nt, Human herpesvirus 6B
uggauauguauccagucuauucu

SEQ ID NO: 2047249 - RNA, 20 nt, Human herpesvirus 6B
uaacgauauugauccagaau

SEQ ID NO: 2047250 - RNA, 20 nt, Human herpesvirus 6B
gaugacaaggugaacucauc

SEQ ID NO: 2047251 - RNA, 13 nt, Human herpesvirus 6B
cacgcgcggacca

SEQ ID NO: 2047252 - RNA, 13 nt, Human herpesvirus 6B
ucgcaaaagagaa

SEQ ID NO: 2047253 - RNA, 12 nt, Human herpesvirus 6B
acuaauguggau

SEQ ID NO: 2047254 - RNA, 12 nt, Human herpesvirus 6B
aauacagcugca

SEQ ID NO: 2047255 - RNA, 21 nt, Human herpesvirus 6B
cacggagaauaccgacaagcc

SEQ ID NO: 2047256 - RNA, 21 nt, Human herpesvirus 6B
uacuuuuuucaauaaugcuca

SEQ ID NO: 2047257 - RNA, 17 nt, Human herpesvirus 6B
auaaaguuaaagaucag

SEQ ID NO: 2047258 - RNA, 21 nt, Human herpesvirus 6B
uuguuuucuguaggcaacuua

SEQ ID NO: 2047259 - RNA, 17 nt, Human herpesvirus 6B
gaaccugugaacaaauu

SEQ ID NO: 2047260 - RNA, 23 nt, Human herpesvirus 6B
cuccugagaggcuggaaaaauuu

SEQ ID NO: 2047261 - RNA, 21 nt, Human herpesvirus 6B
aaauguuuccaugacugugag

SEQ ID NO: 2047262 - RNA, 22 nt, Human herpesvirus 6B
cgcagggaaagagcacgaagaa

SEQ ID NO: 2047263 - RNA, 19 nt, Human herpesvirus 6B
gaaaagccccugcuugaaa

SEQ ID NO: 2047264 - RNA, 17 nt, Human herpesvirus 6B
uaauccauauuuggaag

SEQ ID NO: 2047265 - RNA, 16 nt, Human herpesvirus 6B
agaggcgcgggacagc

SEQ ID NO: 2047266 - RNA, 13 nt, Human herpesvirus 6B
uuuauaugcauuu

SEQ ID NO: 2047267 - RNA, 17 nt, Human herpesvirus 6B
guuguucuuugaugaag

SEQ ID NO: 2047268 - RNA, 21 nt, Human herpesvirus 6B
gaaaauuguuuuugauaugau

SEQ ID NO: 2047269 - RNA, 12 nt, Human herpesvirus 6B
gauguuuccagg

SEQ ID NO: 2047270 - RNA, 15 nt, Human herpesvirus 6B
cuuuuuuucccgaaa

SEQ ID NO: 2047271 - RNA, 23 nt, Human herpesvirus 6B
acaacugccgccauauuaaaacc

SEQ ID NO: 2047272 - RNA, 14 nt, Human herpesvirus 6B
cuggacagaaaguc

SEQ ID NO: 2047273 - RNA, 13 nt, Human herpesvirus 6B
cauuuuauacgaa

SEQ ID NO: 2047274 - RNA, 14 nt, Human herpesvirus 6B
uucagcaguaucaa

SEQ ID NO: 2047275 - RNA, 17 nt, Human herpesvirus 6B
ucuugcacggaaucucu

SEQ ID NO: 2047276 - RNA, 21 nt, Human herpesvirus 6B
aagauugcgucuuuuguaaag

SEQ ID NO: 2047277 - RNA, 15 nt, Human herpesvirus 6B
acgcggcaaccgcag

SEQ ID NO: 2047278 - RNA, 15 nt, Human herpesvirus 6B
caguauagacauuuu

SEQ ID NO: 2047279 - RNA, 16 nt, Human herpesvirus 6B
uuuugaagguaucaaa

SEQ ID NO: 2047280 - RNA, 18 nt, Human herpesvirus 6B
gacaucuuaaauuucuau

SEQ ID NO: 2047281 - RNA, 16 nt, Human herpesvirus 6B
cacccccauacacacc

SEQ ID NO: 2047282 - RNA, 14 nt, Human herpesvirus 6B
auaaauguagcaca

SEQ ID NO: 2047283 - RNA, 13 nt, Human herpesvirus 6B
auugacugugaaa

SEQ ID NO: 2047284 - RNA, 17 nt, Human herpesvirus 6B
uaaugguaugccugagc

SEQ ID NO: 2047285 - RNA, 14 nt, Human herpesvirus 6B
agacguuguuugac

SEQ ID NO: 2047286 - RNA, 14 nt, Human herpesvirus 6B
cagaaaaagaacug

SEQ ID NO: 2047287 - RNA, 16 nt, Human herpesvirus 6B
uacaucguuuguugaa

SEQ ID NO: 2047288 - RNA, 14 nt, Human herpesvirus 6B
uaaacagauuuuga

SEQ ID NO: 2047289 - RNA, 23 nt, Human herpesvirus 6B
cacaaugucgcagaaucaagaaa

SEQ ID NO: 2047290 - RNA, 20 nt, Human herpesvirus 6B
ggcaacuccccauucaacau

SEQ ID NO: 2047291 - RNA, 15 nt, Human herpesvirus 6B
aaauguggucaugga

SEQ ID NO: 2047292 - RNA, 19 nt, Human herpesvirus 6B
ucaugccgccgaagaaaga

SEQ ID NO: 2047293 - RNA, 12 nt, Human herpesvirus 6B
gaaagagggaag

SEQ ID NO: 2047294 - RNA, 16 nt, Human herpesvirus 6B
gaaaggcggagacaca

SEQ ID NO: 2047295 - RNA, 18 nt, Human herpesvirus 6B
agggacgcuugcuguaaa

SEQ ID NO: 2047296 - RNA, 19 nt, Human herpesvirus 6B
uguuuauugcuuuuguuau

SEQ ID NO: 2047297 - RNA, 22 nt, Human herpesvirus 6B
acuucuucugcagaucuggaua

SEQ ID NO: 2047298 - RNA, 12 nt, Human herpesvirus 6B
cugucacacucu

SEQ ID NO: 2047299 - RNA, 15 nt, Human herpesvirus 6B
cgucauuccagucca

SEQ ID NO: 2047300 - RNA, 13 nt, Human herpesvirus 6B
uauaaaucauaaa

SEQ ID NO: 2047301 - RNA, 15 nt, Human herpesvirus 6B
cagguuucuccgcac

SEQ ID NO: 2047302 - RNA, 16 nt, Human herpesvirus 6B
auauuauuaacaauga

SEQ ID NO: 2047303 - RNA, 16 nt, Human herpesvirus 6B
gggcgacgggcagggc

SEQ ID NO: 2047304 - RNA, 18 nt, Human herpesvirus 6B
ccuaaauaccauuuuaua

SEQ ID NO: 2047305 - RNA, 22 nt, Human herpesvirus 6B
uuuuaaaagugcaacaaagagc

SEQ ID NO: 2047306 - RNA, 14 nt, Human herpesvirus 6B
cugcuuuguuuucu

SEQ ID NO: 2047307 - RNA, 16 nt, Human herpesvirus 6B
agauuaaauucagaua

SEQ ID NO: 2047308 - RNA, 13 nt, Human herpesvirus 6B
cacaacacaucua

SEQ ID NO: 2047309 - RNA, 15 nt, Human herpesvirus 6B
ugacauuagagaaau

SEQ ID NO: 2047310 - RNA, 22 nt, Human herpesvirus 6B
cauguuuuuacuugauaaacug

SEQ ID NO: 2047311 - RNA, 17 nt, Human herpesvirus 6B
uagcuagacgugucuuc

SEQ ID NO: 2047312 - RNA, 14 nt, Human herpesvirus 6B
ugauauagaacaau

SEQ ID NO: 2047313 - RNA, 11 nt, Human herpesvirus 6B
uuuucugcaaa

SEQ ID NO: 2047314 - RNA, 13 nt, Human herpesvirus 6B
gccauccacccau

SEQ ID NO: 2047315 - RNA, 17 nt, Human herpesvirus 6B
cccaacagaagccacca

SEQ ID NO: 2047316 - RNA, 16 nt, Human herpesvirus 6B
agaucuugaaaagccc

SEQ ID NO: 2047317 - RNA, 18 nt, Human herpesvirus 6B
gcugguccuucgacauag

SEQ ID NO: 2047318 - RNA, 20 nt, Human herpesvirus 6B
gaauaaaacaaguuaaauuu

SEQ ID NO: 2047319 - RNA, 20 nt, Human herpesvirus 6B
uuuagaugucgggccacauu

SEQ ID NO: 2047320 - RNA, 14 nt, Human herpesvirus 6B
uugaugcuguugcu

SEQ ID NO: 2047321 - RNA, 13 nt, Human herpesvirus 6B
augguauggaaaa

SEQ ID NO: 2047322 - RNA, 14 nt, Human herpesvirus 6B
caacauguauucuc

SEQ ID NO: 2047323 - RNA, 24 nt, Human herpesvirus 6B
guguuaaucggaauguugguaaac

SEQ ID NO: 2047324 - RNA, 14 nt, Human herpesvirus 6B
acgacucaguagaa

SEQ ID NO: 2047325 - RNA, 17 nt, Human herpesvirus 6B
gcgaaucgcuuaaagaa

SEQ ID NO: 2047326 - RNA, 21 nt, Human herpesvirus 6B
aguaacggaaaaauuuuacaa

SEQ ID NO: 2047327 - RNA, 12 nt, Human herpesvirus 6B
aaggcggacagc

SEQ ID NO: 2047328 - RNA, 15 nt, Human herpesvirus 6B
cugagaccgagagaa

SEQ ID NO: 2047329 - RNA, 13 nt, Human herpesvirus 6B
uguuuugcuacgu

SEQ ID NO: 2047330 - RNA, 23 nt, Human herpesvirus 6B
ugagcaugacacaucgugaguuu

SEQ ID NO: 2047331 - RNA, 21 nt, Human herpesvirus 6B
agauucuccgucucaguguca

SEQ ID NO: 2047332 - RNA, 14 nt, Human herpesvirus 6B
cagaagagccaaca

SEQ ID NO: 2047333 - RNA, 15 nt, Human herpesvirus 6B
aaucaagaaacacuu

SEQ ID NO: 2047334 - RNA, 13 nt, Human herpesvirus 6B
gauuuagugcagu

SEQ ID NO: 2047335 - RNA, 15 nt, Human herpesvirus 6B
ugauguugcgauaua

SEQ ID NO: 2047336 - RNA, 14 nt, Human herpesvirus 6B
auccgcgggccagc

SEQ ID NO: 2047337 - RNA, 23 nt, Human herpesvirus 6B
gaaacacuuucuucgccuguaaa

SEQ ID NO: 2047338 - RNA, 14 nt, Human herpesvirus 6B
gcucucgaugaaag

SEQ ID NO: 2047339 - RNA, 18 nt, Human herpesvirus 6B
cuuccgcggcgcugggcu

SEQ ID NO: 2047340 - RNA, 23 nt, Human herpesvirus 6B
uccgcaaguuuucagcaagagag

SEQ ID NO: 2047341 - RNA, 12 nt, Human herpesvirus 6B
ucucucccuacg

SEQ ID NO: 2047342 - RNA, 17 nt, Human herpesvirus 6B
gaggacggugagaagau

SEQ ID NO: 2047343 - RNA, 22 nt, Human herpesvirus 6B
cgcgguggacggcgaggggacg

SEQ ID NO: 2047344 - RNA, 19 nt, Human herpesvirus 6B
agaaauguugccuuuguaa

SEQ ID NO: 2047345 - RNA, 13 nt, Human herpesvirus 6B
ccuagacacacag

SEQ ID NO: 2047346 - RNA, 13 nt, Human herpesvirus 6B
aucuacaaaauag

SEQ ID NO: 2047347 - RNA, 18 nt, Human herpesvirus 6B
caaaagccugcauaugau

SEQ ID NO: 2047348 - RNA, 18 nt, Human herpesvirus 6B
caggcuagcaugguguga

SEQ ID NO: 2047349 - RNA, 12 nt, Human herpesvirus 6B
auggugaaaaua

SEQ ID NO: 2047350 - RNA, 16 nt, Human herpesvirus 6B
uguauuguguaccuug

SEQ ID NO: 2047351 - RNA, 17 nt, Human herpesvirus 6B
aaucucaagaaacaagu

SEQ ID NO: 2047352 - RNA, 18 nt, Human herpesvirus 6B
aucuuccuguacagaauu

SEQ ID NO: 2047353 - RNA, 15 nt, Human herpesvirus 6B
cgagccggacaggag

SEQ ID NO: 2047354 - RNA, 14 nt, Human herpesvirus 6B
cgccgccuucucug

SEQ ID NO: 2047355 - RNA, 17 nt, Human herpesvirus 6B
gcgcguugggggauggg

SEQ ID NO: 2047356 - RNA, 22 nt, Human herpesvirus 6B
ugcugcuucuguaaccugucuu

SEQ ID NO: 2047357 - RNA, 14 nt, Human herpesvirus 6B
gcgcugcuggggcu

SEQ ID NO: 2047358 - RNA, 19 nt, Human herpesvirus 6B
auacaaaauuguauugagc

SEQ ID NO: 2047359 - RNA, 20 nt, Human herpesvirus 6B
auauucacaagaagaugcuu

SEQ ID NO: 2047360 - RNA, 17 nt, Human herpesvirus 6B
cgugcucuccgcgcugc

SEQ ID NO: 2047361 - RNA, 12 nt, Human herpesvirus 6B
gacaucuguuua

SEQ ID NO: 2047362 - RNA, 16 nt, Human herpesvirus 6B
caggagaagaacagag

SEQ ID NO: 2047363 - RNA, 14 nt, Human herpesvirus 6B
uaagaauuuccagg

SEQ ID NO: 2047364 - RNA, 15 nt, Human herpesvirus 6B
auaagggacagcagu

SEQ ID NO: 2047365 - RNA, 18 nt, Human herpesvirus 6B
agucgccucacuguaaaa

SEQ ID NO: 2047366 - RNA, 19 nt, Human herpesvirus 6B
gucccaacuuguuuucugu

SEQ ID NO: 2047367 - RNA, 19 nt, Human herpesvirus 6B
gucccgguauggaucucac

SEQ ID NO: 2047368 - RNA, 19 nt, Human herpesvirus 6B
aucgaauucagcuggacag

SEQ ID NO: 2047369 - RNA, 23 nt, Human herpesvirus 6B
auuacagaugucuauaugucaga

SEQ ID NO: 2047370 - RNA, 17 nt, Human herpesvirus 6B
cugaucacagagaaaaa

SEQ ID NO: 2047371 - RNA, 12 nt, Human herpesvirus 6B
acgcgccacagc

SEQ ID NO: 2047372 - RNA, 21 nt, Human herpesvirus 6B
cgcccgccucucuccgccucc

SEQ ID NO: 2047373 - RNA, 22 nt, Human herpesvirus 6B
cuuugggaccuucaggaacaaa

SEQ ID NO: 2047374 - RNA, 19 nt, Human herpesvirus 6B
ugcaauuugaauucugcuc

SEQ ID NO: 2047375 - RNA, 20 nt, Human herpesvirus 6B
cgugggggcagaacugagau

SEQ ID NO: 2047376 - RNA, 21 nt, Human herpesvirus 6B
acgcgacacggugagucgcau

SEQ ID NO: 2047377 - RNA, 16 nt, Human herpesvirus 6B
guuaauggagagaaau

SEQ ID NO: 2047378 - RNA, 20 nt, Human herpesvirus 6B
gacagucaauuucuaaagau

SEQ ID NO: 2047379 - RNA, 23 nt, Human herpesvirus 6B
gucacgcggaccgacgacaaagg

SEQ ID NO: 2047380 - RNA, 18 nt, Human herpesvirus 6B
agaugcauuguugaaaug

SEQ ID NO: 2047381 - RNA, 13 nt, Human herpesvirus 6B
uucguuuucccgc

SEQ ID NO: 2047382 - RNA, 16 nt, Human herpesvirus 6B
ggacggacagagcgga

SEQ ID NO: 2047383 - RNA, 12 nt, Human herpesvirus 6B
uauggggaagau

SEQ ID NO: 2047384 - RNA, 16 nt, Human herpesvirus 6B
uagaccguucaacaag

SEQ ID NO: 2047385 - RNA, 20 nt, Human herpesvirus 6B
aacggcggcggcggcugucg

SEQ ID NO: 2047386 - RNA, 13 nt, Human herpesvirus 6B
uguguugaagaac

SEQ ID NO: 2047387 - RNA, 22 nt, Human herpesvirus 6B
acaccgugucaaaaaaaaauga

SEQ ID NO: 2047388 - RNA, 16 nt, Human herpesvirus 6B
gugaaacgauguguua

SEQ ID NO: 2047389 - RNA, 15 nt, Human herpesvirus 6B
auccaucguuuguaa

SEQ ID NO: 2047390 - RNA, 17 nt, Human herpesvirus 6B
ucgggccuggggacaga

SEQ ID NO: 2047391 - RNA, 20 nt, Human herpesvirus 6B
cauacauccagaaaagcaaa

SEQ ID NO: 2047392 - RNA, 21 nt, Human herpesvirus 6B
ucuuccggaauuuugagacuu

SEQ ID NO: 2047393 - RNA, 16 nt, Human herpesvirus 6B
caauauaugaaauacu

SEQ ID NO: 2047394 - RNA, 19 nt, Human herpesvirus 6B
ucuaauuauaaauguagca

SEQ ID NO: 2047395 - RNA, 17 nt, Human herpesvirus 6B
aaagauccaauggauuu

SEQ ID NO: 2047396 - RNA, 16 nt, Human herpesvirus 6B
cccacuccaacacggg

SEQ ID NO: 2047397 - RNA, 21 nt, Human herpesvirus 6B
cccgccucucuccgccuccuc

SEQ ID NO: 2047398 - RNA, 22 nt, Human herpesvirus 6B
gggcauagaaagcggccaggcc

SEQ ID NO: 2047399 - RNA, 12 nt, Human herpesvirus 6B
uucgauguuucc

SEQ ID NO: 2047400 - RNA, 15 nt, Human herpesvirus 6B
uuuuuugaaaucacu

SEQ ID NO: 2047401 - RNA, 19 nt, Human herpesvirus 6B
agcagcgcccgaugccaac

SEQ ID NO: 2047402 - RNA, 20 nt, Human herpesvirus 6B
cggacagagcggagaggcgc

SEQ ID NO: 2047403 - RNA, 13 nt, Human herpesvirus 6B
cagauuucuguag

SEQ ID NO: 2047404 - RNA, 17 nt, Human herpesvirus 6B
cgcugggcuccucaccc

SEQ ID NO: 2047405 - RNA, 12 nt, Human herpesvirus 6B
caguuagugcac

SEQ ID NO: 2047406 - RNA, 17 nt, Human herpesvirus 6B
ugggcaauuguuuucca

SEQ ID NO: 2047407 - RNA, 17 nt, Human herpesvirus 6B
aucaugcacacguguau

SEQ ID NO: 2047408 - RNA, 17 nt, Human herpesvirus 6B
ccaguugaacuaugcau

SEQ ID NO: 2047409 - RNA, 18 nt, Human herpesvirus 6B
uguaauaguauugucuga

SEQ ID NO: 2047410 - RNA, 19 nt, Human herpesvirus 6B
cguugcccucccgcagcuc

SEQ ID NO: 2047411 - RNA, 13 nt, Human herpesvirus 6B
guguauuaaaaug

SEQ ID NO: 2047412 - RNA, 14 nt, Human herpesvirus 6B
uuauaucaacgaug

SEQ ID NO: 2047413 - RNA, 22 nt, Human herpesvirus 6B
ucagcaagagagauacagguuu

SEQ ID NO: 2047414 - RNA, 14 nt, Human herpesvirus 6B
caugucuuacagcu

SEQ ID NO: 2047415 - RNA, 21 nt, Human herpesvirus 6B
ugaauacgacuuuggaaaguu

SEQ ID NO: 2047416 - RNA, 14 nt, Human herpesvirus 6B
gaagugaaagcagu

SEQ ID NO: 2047417 - RNA, 14 nt, Human herpesvirus 6B
guggaaauuaaaaa

SEQ ID NO: 2047418 - RNA, 21 nt, Human herpesvirus 6B
ucaggcauuaaacugaggcag

SEQ ID NO: 2047419 - RNA, 18 nt, Human herpesvirus 6B
gcggcauguguaagaaaa

SEQ ID NO: 2047420 - RNA, 19 nt, Human herpesvirus 6B
acagcuuugcagaacgaga

SEQ ID NO: 2047421 - RNA, 20 nt, Human herpesvirus 6B
aaauauuuugaaaagguguu

SEQ ID NO: 2047422 - RNA, 22 nt, Human herpesvirus 6B
gauugagucuccggaguuuauu

SEQ ID NO: 2047423 - RNA, 14 nt, Human herpesvirus 6B
gaggaugcuuugcu

SEQ ID NO: 2047424 - RNA, 17 nt, Human herpesvirus 6B
auuggaaucacaaaaug

SEQ ID NO: 2047425 - RNA, 19 nt, Human herpesvirus 6B
aguaugucucgaaaaagac

SEQ ID NO: 2047426 - RNA, 12 nt, Human herpesvirus 6B
aaggaagagaau

SEQ ID NO: 2047427 - RNA, 22 nt, Human herpesvirus 6B
ccgcggcgcugggcuccucacc

SEQ ID NO: 2047428 - RNA, 13 nt, Human herpesvirus 6B
ccgucuccugcaa

SEQ ID NO: 2047429 - RNA, 15 nt, Human herpesvirus 6B
augacugacaaggua

SEQ ID NO: 2047430 - RNA, 13 nt, Human herpesvirus 6B
ccgugacacacag

SEQ ID NO: 2047431 - RNA, 15 nt, Human herpesvirus 6B
gcaaaagagaaggaa

SEQ ID NO: 2047432 - RNA, 18 nt, Human herpesvirus 6B
aaaagauuauggcaacau

SEQ ID NO: 2047433 - RNA, 14 nt, Human herpesvirus 6B
ugcucuggaucuaa

SEQ ID NO: 2047434 - RNA, 14 nt, Human herpesvirus 6B
gacgugcggagaug

SEQ ID NO: 2047435 - RNA, 19 nt, Human herpesvirus 6B
gggaagccagccgcccucc

SEQ ID NO: 2047436 - RNA, 17 nt, Human herpesvirus 6B
cgguauuuuuagauguc

SEQ ID NO: 2047437 - RNA, 21 nt, Human herpesvirus 6B
gagcucaaagagauuggaaaa

SEQ ID NO: 2047438 - RNA, 16 nt, Human herpesvirus 6B
acaccggagaccgagc

SEQ ID NO: 2047439 - RNA, 17 nt, Human herpesvirus 6B
uuuuauugacugugaaa

SEQ ID NO: 2047440 - RNA, 23 nt, Human herpesvirus 6B
uuuucugcaaaacaaaaguagca

SEQ ID NO: 2047441 - RNA, 21 nt, Human herpesvirus 6B
acacuguuguuaaucuguuua

SEQ ID NO: 2047442 - RNA, 18 nt, Human herpesvirus 6B
uauggagaaaaacuuuua

SEQ ID NO: 2047443 - RNA, 19 nt, Human herpesvirus 6B
ucaccccccucuugcagug

SEQ ID NO: 2047444 - RNA, 14 nt, Human herpesvirus 6B
ugauacuuugaaag

SEQ ID NO: 2047445 - RNA, 16 nt, Human herpesvirus 6B
uacacacgaggucggu

SEQ ID NO: 2047446 - RNA, 21 nt, Human herpesvirus 6B
cuguuuuguaggacugaagga

SEQ ID NO: 2047447 - RNA, 19 nt, Human herpesvirus 6B
ggcuccucacccugaaggg

SEQ ID NO: 2047448 - RNA, 20 nt, Human herpesvirus 6B
caaccuaacgacuacagaag

SEQ ID NO: 2047449 - RNA, 14 nt, Human herpesvirus 6B
cucacgaauuuaaa

SEQ ID NO: 2047450 - RNA, 14 nt, Human herpesvirus 6B
gagggaaugaugaa

SEQ ID NO: 2047451 - RNA, 17 nt, Human herpesvirus 6B
gcucucccucuucccuc

SEQ ID NO: 2047452 - RNA, 16 nt, Human herpesvirus 6B
uaaaagcuauguauga

SEQ ID NO: 2047453 - RNA, 16 nt, Human herpesvirus 6B
aauacgaagacaagcc

SEQ ID NO: 2047454 - RNA, 19 nt, Human herpesvirus 6B
ugauugucuuuucuggaaa

SEQ ID NO: 2047455 - RNA, 14 nt, Human herpesvirus 6B
uauuugaaacugaa

SEQ ID NO: 2047456 - RNA, 14 nt, Human herpesvirus 6B
ugaguuaacagaua

SEQ ID NO: 2047457 - RNA, 16 nt, Human herpesvirus 6B
uaaaauugcuacuaau

SEQ ID NO: 2047458 - RNA, 13 nt, Human herpesvirus 6B
uacggcaggagca

SEQ ID NO: 2047459 - RNA, 16 nt, Human herpesvirus 6B
ugguauugauuucuau

SEQ ID NO: 2047460 - RNA, 15 nt, Human herpesvirus 6B
guuacggggaagauc

SEQ ID NO: 2047461 - RNA, 13 nt, Human herpesvirus 6B
gaaugguaugaau

SEQ ID NO: 2047462 - RNA, 17 nt, Human herpesvirus 6B
aaguuucggcaacugaa

SEQ ID NO: 2047463 - RNA, 16 nt, Human herpesvirus 6B
auccauuuucugaaau

SEQ ID NO: 2047464 - RNA, 21 nt, Human herpesvirus 6B
gaaauaccaaagaaauuuauu

SEQ ID NO: 2047465 - RNA, 20 nt, Human herpesvirus 6B
agcgaucauaaaacugccaa

SEQ ID NO: 2047466 - RNA, 12 nt, Human herpesvirus 6B
agauacagguuu

SEQ ID NO: 2047467 - RNA, 14 nt, Human herpesvirus 6B
uccacucaugccgc

SEQ ID NO: 2047468 - RNA, 18 nt, Human herpesvirus 6B
gcaaucgucuuugauuua

SEQ ID NO: 2047469 - RNA, 15 nt, Human herpesvirus 6B
cucugcccuucuucg

SEQ ID NO: 2047470 - RNA, 20 nt, Human herpesvirus 6B
cauagagcauccuguuuucc

SEQ ID NO: 2047471 - RNA, 17 nt, Human herpesvirus 6B
aaaaucucgaugccaaa

SEQ ID NO: 2047472 - RNA, 17 nt, Human herpesvirus 6B
augaguuuuuugcaauu

SEQ ID NO: 2047473 - RNA, 20 nt, Human herpesvirus 6B
gcgcauggaaaaggcggaca

SEQ ID NO: 2047474 - RNA, 18 nt, Human herpesvirus 6B
aauuuuuuguuucugaaa

SEQ ID NO: 2047475 - RNA, 23 nt, Human herpesvirus 6B
gugcuuuggaccuugaauguuua

SEQ ID NO: 2047476 - RNA, 16 nt, Human herpesvirus 6B
aauaauuuuauugacu

SEQ ID NO: 2047477 - RNA, 14 nt, Human herpesvirus 6B
ggcgacguaaggau

SEQ ID NO: 2047478 - RNA, 20 nt, Human herpesvirus 6B
cuuuguuuaauaugugggcg

SEQ ID NO: 2047479 - RNA, 21 nt, Human herpesvirus 6B
cuaagaaauauugcaugcauu

SEQ ID NO: 2047480 - RNA, 15 nt, Human herpesvirus 6B
uugcauuaaggaaaa

SEQ ID NO: 2047481 - RNA, 11 nt, Human herpesvirus 6B
aaagauugcau

SEQ ID NO: 2047482 - RNA, 21 nt, Human herpesvirus 6B
aaaugucacucacauagagaa

SEQ ID NO: 2047483 - RNA, 13 nt, Human herpesvirus 6B
ugaaaaagguucg

SEQ ID NO: 2047484 - RNA, 18 nt, Human herpesvirus 6B
acuacagcuaagauuaac

SEQ ID NO: 2047485 - RNA, 18 nt, Human herpesvirus 6B
aaguauacggaagugcau

SEQ ID NO: 2047486 - RNA, 22 nt, Human herpesvirus 6B
gugguaauacgugaauuucaua

SEQ ID NO: 2047487 - RNA, 17 nt, Human herpesvirus 6B
ggccgucgcgcucgccg

SEQ ID NO: 2047488 - RNA, 23 nt, Human herpesvirus 6B
ugcaaaaguaugcuuugaaaucu

SEQ ID NO: 2047489 - RNA, 23 nt, Human herpesvirus 6B
ucuuccgcggcgcugggcuccuc

SEQ ID NO: 2047490 - RNA, 20 nt, Human herpesvirus 6B
gacagcgugaugaggcccag

SEQ ID NO: 2047491 - RNA, 18 nt, Human herpesvirus 6B
cccguccucgugcucucc

SEQ ID NO: 2047492 - RNA, 16 nt, Human herpesvirus 6B
cuuauauuaaagauug

SEQ ID NO: 2047493 - RNA, 17 nt, Human herpesvirus 6B
cgggcgcggggcgcacc

SEQ ID NO: 2047494 - RNA, 19 nt, Human herpesvirus 6B
uuaagaugucgcuguuuuu

SEQ ID NO: 2047495 - RNA, 22 nt, Human herpesvirus 6B
aauuuauucacguuuacauaag

SEQ ID NO: 2047496 - RNA, 13 nt, Human herpesvirus 6B
cuuaguuuuggau

SEQ ID NO: 2047497 - RNA, 22 nt, Human herpesvirus 6B
uaaauaccauuuuauacgaaaa

SEQ ID NO: 2047498 - RNA, 12 nt, Human herpesvirus 6B
gcuauuugacaa

SEQ ID NO: 2047499 - RNA, 17 nt, Human herpesvirus 6B
cagacgugagacauuug

SEQ ID NO: 2047500 - RNA, 21 nt, Human herpesvirus 6B
cugugaggugauuugaacaga

SEQ ID NO: 2047501 - RNA, 19 nt, Human herpesvirus 6B
gacgccuaguguuaaagau

SEQ ID NO: 2047502 - RNA, 20 nt, Human herpesvirus 6B
auuaccgguaaagaacccau

SEQ ID NO: 2047503 - RNA, 14 nt, Human herpesvirus 6B
cguugaugaaauaa

SEQ ID NO: 2047504 - RNA, 13 nt, Human herpesvirus 6B
gugaggugauuug

SEQ ID NO: 2047505 - RNA, 13 nt, Human herpesvirus 6B
uaggacugaagga

SEQ ID NO: 2047506 - RNA, 19 nt, Human herpesvirus 6B
uauauuaaugaucauagua

SEQ ID NO: 2047507 - RNA, 19 nt, Human herpesvirus 6B
aaacugaagaauggaaaga

SEQ ID NO: 2047508 - RNA, 15 nt, Human herpesvirus 6B
guauaauauaaauuc

SEQ ID NO: 2047509 - RNA, 20 nt, Human herpesvirus 6B
ucacaaccaaacaguuucag

SEQ ID NO: 2047510 - RNA, 13 nt, Human herpesvirus 6B
gauaucaaagcuc

SEQ ID NO: 2047511 - RNA, 15 nt, Human herpesvirus 6B
gcgccgucagcggca

SEQ ID NO: 2047512 - RNA, 19 nt, Human herpesvirus 6B
caccgaaauccccagaagg

SEQ ID NO: 2047513 - RNA, 19 nt, Human herpesvirus 6B
ccgcagggaaagagcacga

SEQ ID NO: 2047514 - RNA, 16 nt, Human herpesvirus 6B
uuaguuucuuuggaaa

SEQ ID NO: 2047515 - RNA, 16 nt, Human herpesvirus 6B
ucgcguggcggcgcgc

SEQ ID NO: 2047516 - RNA, 15 nt, Human herpesvirus 6B
agcaaugucaaguua

SEQ ID NO: 2047517 - RNA, 16 nt, Human herpesvirus 6B
uaaagugaguuuugga

SEQ ID NO: 2047518 - RNA, 13 nt, Human herpesvirus 6B
acaaaaccaggaa

SEQ ID NO: 2047519 - RNA, 16 nt, Human herpesvirus 6B
uaauuuuuuguuucug

SEQ ID NO: 2047520 - RNA, 17 nt, Human herpesvirus 6B
ugaaguuccacaucuau

SEQ ID NO: 2047521 - RNA, 14 nt, Human herpesvirus 6B
aacagaaucuucuu

SEQ ID NO: 2047522 - RNA, 14 nt, Human herpesvirus 6B
cucguggcccgugg

SEQ ID NO: 2047523 - RNA, 22 nt, Human herpesvirus 6B
uccauuuucugaaaucuuugau

SEQ ID NO: 2047524 - RNA, 23 nt, Human herpesvirus 6B
ccacuccaacacggggugagaga

SEQ ID NO: 2047525 - RNA, 19 nt, Human herpesvirus 6B
ucuaaaucugaaauguaga

SEQ ID NO: 2047526 - RNA, 22 nt, Human herpesvirus 6B
uucugaauacgagaacgguuaa

SEQ ID NO: 2047527 - RNA, 13 nt, Human herpesvirus 6B
gaaagcacagaaa

SEQ ID NO: 2047528 - RNA, 13 nt, Human herpesvirus 6B
aagaacuucauuu

SEQ ID NO: 2047529 - RNA, 21 nt, Human herpesvirus 6B
ugggacuccgagccggacagg

SEQ ID NO: 2047530 - RNA, 15 nt, Human herpesvirus 6B
gugucguucagguca

SEQ ID NO: 2047531 - RNA, 19 nt, Human herpesvirus 6B
aaaccaggaauccuauuca

SEQ ID NO: 2047532 - RNA, 20 nt, Human herpesvirus 6B
gcugaguggacauuggacuu

SEQ ID NO: 2047533 - RNA, 21 nt, Human herpesvirus 6B
cuggguaucuccggacagaaa

SEQ ID NO: 2047534 - RNA, 13 nt, Human herpesvirus 6B
uguauguuucuau

SEQ ID NO: 2047535 - RNA, 22 nt, Human herpesvirus 6B
aguguauacauucaaucuguau

SEQ ID NO: 2047536 - RNA, 14 nt, Human herpesvirus 6B
cucuugcaguggcg

SEQ ID NO: 2047537 - RNA, 22 nt, Human herpesvirus 6B
agccacuugagugagcagaagc

SEQ ID NO: 2047538 - RNA, 16 nt, Human herpesvirus 6B
ggcgggcacggagaac

SEQ ID NO: 2047539 - RNA, 14 nt, Human herpesvirus 6B
ugucacaauaauua

SEQ ID NO: 2047540 - RNA, 16 nt, Human herpesvirus 6B
auguggucauggaaaa

SEQ ID NO: 2047541 - RNA, 20 nt, Human herpesvirus 6B
aaaacuaaaacaucagauga

SEQ ID NO: 2047542 - RNA, 14 nt, Human herpesvirus 6B
gcguguuuuggaau

SEQ ID NO: 2047543 - RNA, 20 nt, Human herpesvirus 6B
uauuguguguacaacgacug

SEQ ID NO: 2047544 - RNA, 21 nt, Human herpesvirus 6B
uaacauagaaaaauaagacuu

SEQ ID NO: 2047545 - RNA, 18 nt, Human herpesvirus 6B
gauaugggaaaagggagu

SEQ ID NO: 2047546 - RNA, 23 nt, Human herpesvirus 6B
ccccaggcgcagcagcagcucca

SEQ ID NO: 2047547 - RNA, 20 nt, Human herpesvirus 6B
agaaucuuccuuuucaguau

SEQ ID NO: 2047548 - RNA, 21 nt, Human herpesvirus 6B
ugacuguagaaaacgauuucu

SEQ ID NO: 2047549 - RNA, 16 nt, Human herpesvirus 6B
aggccggcacauacac

SEQ ID NO: 2047550 - RNA, 13 nt, Human herpesvirus 6B
accuuagcucuaa

SEQ ID NO: 2047551 - RNA, 19 nt, Human herpesvirus 6B
aaagcaguuuugcagcauc

SEQ ID NO: 2047552 - RNA, 11 nt, Human herpesvirus 6B
guguuauucag

SEQ ID NO: 2047553 - RNA, 21 nt, Human herpesvirus 6B
gauagcauaauccuuuucugu

SEQ ID NO: 2047554 - RNA, 20 nt, Human herpesvirus 6B
ugauggguuuggccaugccg

SEQ ID NO: 2047555 - RNA, 12 nt, Human herpesvirus 6B
gcaguuugugaa

SEQ ID NO: 2047556 - RNA, 14 nt, Human herpesvirus 6B
auuaaaguuuucau

SEQ ID NO: 2047557 - RNA, 18 nt, Human herpesvirus 6B
uucuuuggaaaacgucaa

SEQ ID NO: 2047558 - RNA, 22 nt, Human herpesvirus 6B
guggaaguguaaaugucacuca

SEQ ID NO: 2047559 - RNA, 18 nt, Human herpesvirus 6B
guuacuuuaccucugcuc

SEQ ID NO: 2047560 - RNA, 21 nt, Human herpesvirus 6B
accggagcuuauuuaugaaaa

SEQ ID NO: 2047561 - RNA, 20 nt, Human herpesvirus 6B
gauaugagugaauugugcaa

SEQ ID NO: 2047562 - RNA, 16 nt, Human herpesvirus 6B
cgcaguuccuguuuuu

SEQ ID NO: 2047563 - RNA, 17 nt, Human herpesvirus 6B
ucaauuucuaaagauuu

SEQ ID NO: 2047564 - RNA, 23 nt, Human herpesvirus 6B
aguccaaugaauacuucucuuua

SEQ ID NO: 2047565 - RNA, 14 nt, Human herpesvirus 6B
auuugugcaaaaug

SEQ ID NO: 2047566 - RNA, 18 nt, Human herpesvirus 6B
uugaauacgacuuuggaa

SEQ ID NO: 2047567 - RNA, 17 nt, Human herpesvirus 6B
guaaacuguucuuucaa

SEQ ID NO: 2047568 - RNA, 13 nt, Human herpesvirus 6B
cucucuccgccuc

SEQ ID NO: 2047569 - RNA, 16 nt, Human herpesvirus 6B
cuuucuuuuauuuaaa

SEQ ID NO: 2047570 - RNA, 14 nt, Human herpesvirus 6B
acaacaucucauaa

SEQ ID NO: 2047571 - RNA, 18 nt, Human herpesvirus 6B
aucugcuaacggagcaac

SEQ ID NO: 2047572 - RNA, 18 nt, Human herpesvirus 6B
gaccugaucacagagaaa

SEQ ID NO: 2047573 - RNA, 21 nt, Human herpesvirus 6B
uaucucaaauuuuccaaacau

SEQ ID NO: 2047574 - RNA, 16 nt, Human herpesvirus 6B
ggauucgaucgagaau

SEQ ID NO: 2047575 - RNA, 21 nt, Human herpesvirus 6B
augaauguguucauagagcau

SEQ ID NO: 2047576 - RNA, 15 nt, Human herpesvirus 6B
ugccagguccaguca

SEQ ID NO: 2047577 - RNA, 12 nt, Human herpesvirus 6B
ccucgcucuccu

SEQ ID NO: 2047578 - RNA, 18 nt, Human herpesvirus 6B
agcaauaacucuuggauu

SEQ ID NO: 2047579 - RNA, 19 nt, Human herpesvirus 6B
uuuuugaugacuuauaaua

SEQ ID NO: 2047580 - RNA, 19 nt, Human herpesvirus 6B
ccucagaaccaucuuuuca

SEQ ID NO: 2047581 - RNA, 15 nt, Human herpesvirus 6B
ucucuacguuuacau

SEQ ID NO: 2047582 - RNA, 12 nt, Human herpesvirus 6B
acgggauaaaga

SEQ ID NO: 2047583 - RNA, 20 nt, Human herpesvirus 6B
ugcauacaugggaggccagg

SEQ ID NO: 2047584 - RNA, 21 nt, Human herpesvirus 6B
cuuucaauguccgaaguaaaa

SEQ ID NO: 2047585 - RNA, 20 nt, Human herpesvirus 6B
cgcaguuccuguuuuucuca

SEQ ID NO: 2047586 - RNA, 16 nt, Human herpesvirus 6B
caaauucuaucuuaua

SEQ ID NO: 2047587 - RNA, 20 nt, Human herpesvirus 6B
guuuucaaugguauucgaaa

SEQ ID NO: 2047588 - RNA, 22 nt, Human herpesvirus 6B
acacgccauccacccauauacc

SEQ ID NO: 2047589 - RNA, 14 nt, Human herpesvirus 6B
uguuucuguaugaa

SEQ ID NO: 2047590 - RNA, 23 nt, Human herpesvirus 6B
uaauaaaaacgaaacucuagaau

SEQ ID NO: 2047591 - RNA, 15 nt, Human herpesvirus 6B
auuugguuugacauu

SEQ ID NO: 2047592 - RNA, 16 nt, Human herpesvirus 6B
uaucguccucagagaa

SEQ ID NO: 2047593 - RNA, 14 nt, Human herpesvirus 6B
auugugacaaggua

SEQ ID NO: 2047594 - RNA, 18 nt, Human herpesvirus 6B
ucucuauaaccaccugca

SEQ ID NO: 2047595 - RNA, 19 nt, Human herpesvirus 6B
ucggaacaaauucugcuug

SEQ ID NO: 2047596 - RNA, 17 nt, Human herpesvirus 6B
aguuaacggagagucuu

SEQ ID NO: 2047597 - RNA, 18 nt, Human herpesvirus 6B
cgaagacauucaacauuc

SEQ ID NO: 2047598 - RNA, 16 nt, Human herpesvirus 6B
acgcgcggaccacucg

SEQ ID NO: 2047599 - RNA, 14 nt, Human herpesvirus 6B
uuuaacgcagauau

SEQ ID NO: 2047600 - RNA, 13 nt, Human herpesvirus 6B
gucuuugcuuugg

SEQ ID NO: 2047601 - RNA, 18 nt, Human herpesvirus 6B
uccgcgaugcgccacagg

SEQ ID NO: 2047602 - RNA, 23 nt, Human herpesvirus 6B
uguacugguaauucaauuucuaa

SEQ ID NO: 2047603 - RNA, 20 nt, Human herpesvirus 6B
gcggggcgcaccggcgacac

SEQ ID NO: 2047604 - RNA, 13 nt, Human herpesvirus 6B
uauauggugaugu

SEQ ID NO: 2047605 - RNA, 12 nt, Human herpesvirus 6B
ggacugaaggag

SEQ ID NO: 2047606 - RNA, 19 nt, Human herpesvirus 6B
ugcugucacacucugaacu

SEQ ID NO: 2047607 - RNA, 11 nt, Human herpesvirus 6B
auuuucuguau

SEQ ID NO: 2047608 - RNA, 12 nt, Human herpesvirus 6B
augaauuucaau

SEQ ID NO: 2047609 - RNA, 23 nt, Human herpesvirus 6B
uaucuuacuguaaacaaauucuu

SEQ ID NO: 2047610 - RNA, 13 nt, Human herpesvirus 6B
cgaccaggcacca

SEQ ID NO: 2047611 - RNA, 19 nt, Human herpesvirus 6B
uuuguccuauguuaacauu

SEQ ID NO: 2047612 - RNA, 16 nt, Human herpesvirus 6B
uauauagaagaagaaa

SEQ ID NO: 2047613 - RNA, 18 nt, Human herpesvirus 6B
guugcagauuugcggaaa

SEQ ID NO: 2047614 - RNA, 16 nt, Human herpesvirus 6B
uuuuccaacuuaauaa

SEQ ID NO: 2047615 - RNA, 15 nt, Human herpesvirus 6B
uggccgucuccugca

SEQ ID NO: 2047616 - RNA, 23 nt, Human herpesvirus 6B
uuauggacaacgguguggagaca

SEQ ID NO: 2047617 - RNA, 22 nt, Human herpesvirus 6B
gcggaguuuuauggcuggguau

SEQ ID NO: 2047618 - RNA, 15 nt, Human herpesvirus 6B
cucacgucguccgcc

SEQ ID NO: 2047619 - RNA, 19 nt, Human herpesvirus 6B
uagucaggauucggaucac

SEQ ID NO: 2047620 - RNA, 16 nt, Human herpesvirus 6B
uuugucguuuguacau

SEQ ID NO: 2047621 - RNA, 22 nt, Human herpesvirus 6B
agaagaaacaaguugcggaagg

SEQ ID NO: 2047622 - RNA, 22 nt, Human herpesvirus 6B
aggagaagaacagaggaagaaa

SEQ ID NO: 2047623 - RNA, 15 nt, Human herpesvirus 6B
cuguucuaaaaguuu

SEQ ID NO: 2047624 - RNA, 17 nt, Human herpesvirus 6B
uagagcauccuguuuuc

SEQ ID NO: 2047625 - RNA, 17 nt, Human herpesvirus 6B
cggcgaauuuaugugaa

SEQ ID NO: 2047626 - RNA, 20 nt, Human herpesvirus 6B
ugcuuaaacugaaucacuua

SEQ ID NO: 2047627 - RNA, 18 nt, Human herpesvirus 6B
cggcagcggggaagggaa

SEQ ID NO: 2047628 - RNA, 14 nt, Human herpesvirus 6B
gaugcauacagcau

SEQ ID NO: 2047629 - RNA, 23 nt, Human herpesvirus 6B
cacaucgugaaaacgcuucagau

SEQ ID NO: 2047630 - RNA, 15 nt, Human herpesvirus 6B
gagaauuccaaggcu

SEQ ID NO: 2047631 - RNA, 14 nt, Human herpesvirus 6B
caugggagaaauaa

SEQ ID NO: 2047632 - RNA, 19 nt, Human herpesvirus 6B
auuguaauuccaauugcug

SEQ ID NO: 2047633 - RNA, 17 nt, Human herpesvirus 6B
uacuuuguuuucuuggg

SEQ ID NO: 2047634 - RNA, 19 nt, Human herpesvirus 6B
aguaccucuaugauacuuu

SEQ ID NO: 2047635 - RNA, 14 nt, Human herpesvirus 6B
cuccagcuauuuug

SEQ ID NO: 2047636 - RNA, 21 nt, Human herpesvirus 6B
cacgcccccaccuggcgcacc

SEQ ID NO: 2047637 - RNA, 22 nt, Human herpesvirus 6B
ucaaacagcgacaugaaaucuc

SEQ ID NO: 2047638 - RNA, 22 nt, Human herpesvirus 6B
aguguuauaucuggauauguau

SEQ ID NO: 2047639 - RNA, 15 nt, Human herpesvirus 6B
gaaagcgcgccacau

SEQ ID NO: 2047640 - RNA, 12 nt, Human herpesvirus 6B
caacaucucaua

SEQ ID NO: 2047641 - RNA, 15 nt, Human herpesvirus 6B
ucgaaacgaaagcug

SEQ ID NO: 2047642 - RNA, 18 nt, Human herpesvirus 6B
aaguauguuuuguacaaa

SEQ ID NO: 2047643 - RNA, 15 nt, Human herpesvirus 6B
aaaaauauuggauuu

SEQ ID NO: 2047644 - RNA, 22 nt, Human herpesvirus 6B
auagaucuucggcgcugauucc

SEQ ID NO: 2047645 - RNA, 19 nt, Human herpesvirus 6B
ccucgaugguagcaauaac

SEQ ID NO: 2047646 - RNA, 14 nt, Human herpesvirus 6B
ugucugagcauugu

SEQ ID NO: 2047647 - RNA, 11 nt, Human herpesvirus 6B
gaaaacaaugc

SEQ ID NO: 2047648 - RNA, 14 nt, Human herpesvirus 6B
uaguaagaggcuua

SEQ ID NO: 2047649 - RNA, 17 nt, Human herpesvirus 6B
guuagcaagcugggaaa

SEQ ID NO: 2047650 - RNA, 21 nt, Human herpesvirus 6B
aguucacuaacaaaaaaaucg

SEQ ID NO: 2047651 - RNA, 12 nt, Human herpesvirus 6B
ugaaaacuagua

SEQ ID NO: 2047652 - RNA, 15 nt, Human herpesvirus 6B
ccucgucuguugcug

SEQ ID NO: 2047653 - RNA, 14 nt, Human herpesvirus 6B
ccgcgggaccuggc

SEQ ID NO: 2047654 - RNA, 16 nt, Human herpesvirus 6B
uaugaagaauugacuu

SEQ ID NO: 2047655 - RNA, 15 nt, Human herpesvirus 6B
agaauuugcaguuug

SEQ ID NO: 2047656 - RNA, 17 nt, Human herpesvirus 6B
cggggaggaggaggaag

SEQ ID NO: 2047657 - RNA, 13 nt, Human herpesvirus 6B
ccugaucacagag

SEQ ID NO: 2047658 - RNA, 20 nt, Human herpesvirus 6B
accaaacaguuucagaugau

SEQ ID NO: 2047659 - RNA, 15 nt, Human herpesvirus 6B
gggacuuauuucauu

SEQ ID NO: 2047660 - RNA, 18 nt, Human herpesvirus 6B
agcuuugagcaugacaca

SEQ ID NO: 2047661 - RNA, 14 nt, Human herpesvirus 6B
cggcacgcgccguc

SEQ ID NO: 2047662 - RNA, 16 nt, Human herpesvirus 6B
ucauucgcguggcggc

SEQ ID NO: 2047663 - RNA, 12 nt, Human herpesvirus 6B
aaaaacagaaua

SEQ ID NO: 2047664 - RNA, 21 nt, Human herpesvirus 6B
cauuucucuacaugccacaga

SEQ ID NO: 2047665 - RNA, 20 nt, Human herpesvirus 6B
gcacgagaacacgcgagaca

SEQ ID NO: 2047666 - RNA, 21 nt, Human herpesvirus 6B
aauacgccgucguaugucaau

SEQ ID NO: 2047667 - RNA, 15 nt, Human herpesvirus 6B
cuuacgagaggcuuu

SEQ ID NO: 2047668 - RNA, 17 nt, Human herpesvirus 6B
guauuguagcagcuggc

SEQ ID NO: 2047669 - RNA, 16 nt, Human herpesvirus 6B
acucacauagagaaga

SEQ ID NO: 2047670 - RNA, 15 nt, Human herpesvirus 6B
ugcgccacagggagg

SEQ ID NO: 2047671 - RNA, 17 nt, Human herpesvirus 6B
ucauucgcguggcggcg

SEQ ID NO: 2047672 - RNA, 15 nt, Human herpesvirus 6B
ucucacgaaaguuuu

SEQ ID NO: 2047673 - RNA, 20 nt, Human herpesvirus 6B
ggagcccugagagcaggagc

SEQ ID NO: 2047674 - RNA, 19 nt, Human herpesvirus 6B
gauuuucagugucagcauu

SEQ ID NO: 2047675 - RNA, 23 nt, Human herpesvirus 6B
uucaaaaaaagaggaggaaaaga

SEQ ID NO: 2047676 - RNA, 18 nt, Human herpesvirus 6B
cgcggcgcugggcuccuc

SEQ ID NO: 2047677 - RNA, 23 nt, Human herpesvirus 6B
uacagguuugcucgucuguacag

SEQ ID NO: 2047678 - RNA, 16 nt, Human herpesvirus 6B
cucgggggacggagag

SEQ ID NO: 2047679 - RNA, 22 nt, Human herpesvirus 6B
cgcuaagagauuuacuguuucu

SEQ ID NO: 2047680 - RNA, 19 nt, Human herpesvirus 6B
agauaucguagagcaguuu

SEQ ID NO: 2047681 - RNA, 14 nt, Human herpesvirus 6B
acaauaauuacucc

SEQ ID NO: 2047682 - RNA, 22 nt, Human herpesvirus 6B
cuaaagaguaugacagaaaucu

SEQ ID NO: 2047683 - RNA, 19 nt, Human herpesvirus 6B
guggaaauuaacugucaug

SEQ ID NO: 2047684 - RNA, 18 nt, Human herpesvirus 6B
ggcgcaccacggcucccc

SEQ ID NO: 2047685 - RNA, 14 nt, Human herpesvirus 6B
ccauggcgacucaa

SEQ ID NO: 2047686 - RNA, 13 nt, Human herpesvirus 6B
uucuccuguaguu

SEQ ID NO: 2047687 - RNA, 19 nt, Human herpesvirus 6B
gucauucgcguggcggcgc

SEQ ID NO: 2047688 - RNA, 15 nt, Human herpesvirus 6B
uacaaugagccuggc

SEQ ID NO: 2047689 - RNA, 15 nt, Human herpesvirus 6B
cuuguuaugacaaaa

SEQ ID NO: 2047690 - RNA, 17 nt, Human herpesvirus 6B
auuuuuuugaaaucacu

SEQ ID NO: 2047691 - RNA, 23 nt, Human herpesvirus 6B
aaaauaagaaaggcggagacaca

SEQ ID NO: 2047692 - RNA, 17 nt, Human herpesvirus 6B
acagaaaugagcaacau

SEQ ID NO: 2047693 - RNA, 21 nt, Human herpesvirus 6B
agacgaguccuacagaagaaa

SEQ ID NO: 2047694 - RNA, 16 nt, Human herpesvirus 6B
ugaauuagcagaagau

SEQ ID NO: 2047695 - RNA, 23 nt, Human herpesvirus 6B
agaggguuccuccgcgggaccug

SEQ ID NO: 2047696 - RNA, 21 nt, Human herpesvirus 6B
ucuuggcgguuuuuuaauucu

SEQ ID NO: 2047697 - RNA, 12 nt, Human herpesvirus 6B
ggcaucagauuu

SEQ ID NO: 2047698 - RNA, 18 nt, Human herpesvirus 6B
uaauugguauaagaaaga

SEQ ID NO: 2047699 - RNA, 18 nt, Human herpesvirus 6B
gcagauuuacgacacgcu

SEQ ID NO: 2047700 - RNA, 11 nt, Human herpesvirus 6B
ugagcaaagaa

SEQ ID NO: 2047701 - RNA, 18 nt, Human herpesvirus 6B
ggcugauaaguugucauu

SEQ ID NO: 2047702 - RNA, 20 nt, Human herpesvirus 6B
ugcaacccgccacucuacaa

SEQ ID NO: 2047703 - RNA, 13 nt, Human herpesvirus 6B
cagcuggacagaa

SEQ ID NO: 2047704 - RNA, 20 nt, Human herpesvirus 6B
aaggaaucgguaaacuucag

SEQ ID NO: 2047705 - RNA, 19 nt, Human herpesvirus 6B
aggcaugugauugucuuuu

SEQ ID NO: 2047706 - RNA, 14 nt, Human herpesvirus 6B
ucccucucaaacag

SEQ ID NO: 2047707 - RNA, 15 nt, Human herpesvirus 6B
aucucuacaacguga

SEQ ID NO: 2047708 - RNA, 15 nt, Human herpesvirus 6B
aucacgaaagaaugu

SEQ ID NO: 2047709 - RNA, 20 nt, Human herpesvirus 6B
auuuuucugccuauuucucu

SEQ ID NO: 2047710 - RNA, 17 nt, Human herpesvirus 6B
gcucgggggacggagag

SEQ ID NO: 2047711 - RNA, 22 nt, Human herpesvirus 6B
auugcugcuggguguauguuuc

SEQ ID NO: 2047712 - RNA, 14 nt, Human herpesvirus 6B
auagaggaauugcu

SEQ ID NO: 2047713 - RNA, 21 nt, Human herpesvirus 6B
aaaaccccacggagaaaucuu

SEQ ID NO: 2047714 - RNA, 16 nt, Human herpesvirus 6B
aagaagaugcuuuaaa

SEQ ID NO: 2047715 - RNA, 18 nt, Human herpesvirus 6B
gcuuucuguaccccaagu

SEQ ID NO: 2047716 - RNA, 13 nt, Human herpesvirus 6B
gaaggguugcaga

SEQ ID NO: 2047717 - RNA, 15 nt, Human herpesvirus 6B
ugauuuucagaguuu

SEQ ID NO: 2047718 - RNA, 16 nt, Human herpesvirus 6B
ucucgaugccaaagcu

SEQ ID NO: 2047719 - RNA, 21 nt, Human herpesvirus 6B
accucgcucuccugugcgucc

SEQ ID NO: 2047720 - RNA, 18 nt, Human herpesvirus 6B
acucauuugcaauuguuu

SEQ ID NO: 2047721 - RNA, 15 nt, Human herpesvirus 6B
uucaauuguuuuuua

SEQ ID NO: 2047722 - RNA, 15 nt, Human herpesvirus 6B
guuggcgcucucgug

SEQ ID NO: 2047723 - RNA, 19 nt, Human herpesvirus 6B
cacgcggggaucgggccug

SEQ ID NO: 2047724 - RNA, 16 nt, Human herpesvirus 6B
ugaagaaacgauuucu

SEQ ID NO: 2047725 - RNA, 15 nt, Human herpesvirus 6B
auuauaaugaugcau

SEQ ID NO: 2047726 - RNA, 23 nt, Human herpesvirus 6B
ucgguccccccucccuccauccc

SEQ ID NO: 2047727 - RNA, 22 nt, Human herpesvirus 6B
auaacgauagcagcucugcaau

SEQ ID NO: 2047728 - RNA, 21 nt, Human herpesvirus 6B
ugccucaggguuggaguuuag

SEQ ID NO: 2047729 - RNA, 20 nt, Human herpesvirus 6B
caacuaacuucacagggaaa

SEQ ID NO: 2047730 - RNA, 14 nt, Human herpesvirus 6B
uuaguuuuggauga

SEQ ID NO: 2047731 - RNA, 17 nt, Human herpesvirus 6B
uaagacgagauguuucu

SEQ ID NO: 2047732 - RNA, 22 nt, Human herpesvirus 6B
gaaaacaugacggacuuggaaa

SEQ ID NO: 2047733 - RNA, 13 nt, Human herpesvirus 6B
uguuguucuugga

SEQ ID NO: 2047734 - RNA, 12 nt, Human herpesvirus 6B
auacuugaagag

SEQ ID NO: 2047735 - RNA, 14 nt, Human herpesvirus 6B
cuuugaacagugac

SEQ ID NO: 2047736 - RNA, 19 nt, Human herpesvirus 6B
aggcaacggcacgagagcc

SEQ ID NO: 2047737 - RNA, 16 nt, Human herpesvirus 6B
gccuggggacagacag

SEQ ID NO: 2047738 - RNA, 21 nt, Human herpesvirus 6B
gauacuauugcuaagaucugu

SEQ ID NO: 2047739 - RNA, 14 nt, Human herpesvirus 6B
caguaaaacaugua

SEQ ID NO: 2047740 - RNA, 11 nt, Human herpesvirus 6B
cgaucuguaua

SEQ ID NO: 2047741 - RNA, 16 nt, Human herpesvirus 6B
ucugccgaaaagaaag

SEQ ID NO: 2047742 - RNA, 17 nt, Human herpesvirus 6B
auuuacaaaacaaauau

SEQ ID NO: 2047743 - RNA, 18 nt, Human herpesvirus 6B
aacaaagucuuuggcuug

SEQ ID NO: 2047744 - RNA, 18 nt, Human herpesvirus 6B
ucagauaucugaaacacu

SEQ ID NO: 2047745 - RNA, 19 nt, Human herpesvirus 6B
ccucuugcaguggcgcgcg

SEQ ID NO: 2047746 - RNA, 21 nt, Human herpesvirus 6B
uggcgcuuguaggagcacgag

SEQ ID NO: 2047747 - RNA, 17 nt, Human herpesvirus 6B
aagacauugguugauuu

SEQ ID NO: 2047748 - RNA, 13 nt, Human herpesvirus 6B
ugacugugaggug

SEQ ID NO: 2047749 - RNA, 16 nt, Human herpesvirus 6B
aagaugacaaauuuuc

SEQ ID NO: 2047750 - RNA, 18 nt, Human herpesvirus 6B
augguucgauugcgcgau

SEQ ID NO: 2047751 - RNA, 14 nt, Human herpesvirus 6B
aguuucuuuggaaa

SEQ ID NO: 2047752 - RNA, 18 nt, Human herpesvirus 6B
ggcaaccgcaguuccugu

SEQ ID NO: 2047753 - RNA, 13 nt, Human herpesvirus 6B
guauucuacggga

SEQ ID NO: 2047754 - RNA, 18 nt, Human herpesvirus 6B
agacacggcgaaagccag

SEQ ID NO: 2047755 - RNA, 18 nt, Human herpesvirus 6B
caaagguuuuugcuguca

SEQ ID NO: 2047756 - RNA, 18 nt, Human herpesvirus 6B
gacccuccuggcgcuugu

SEQ ID NO: 2047757 - RNA, 17 nt, Human herpesvirus 6B
cuuaagaagggcuuuaa

SEQ ID NO: 2047758 - RNA, 18 nt, Human herpesvirus 6B
gaaucccuugucuggcug

SEQ ID NO: 2047759 - RNA, 10 nt, Human herpesvirus 6B
ccacugugau

SEQ ID NO: 2047760 - RNA, 20 nt, Human herpesvirus 6B
cuaacuguuguucuuggaga

SEQ ID NO: 2047761 - RNA, 17 nt, Human herpesvirus 6B
agacuggacaguguuuu

SEQ ID NO: 2047762 - RNA, 14 nt, Human herpesvirus 6B
cgugucuucauucu

SEQ ID NO: 2047763 - RNA, 14 nt, Human herpesvirus 6B
cccucgcccguucc

SEQ ID NO: 2047764 - RNA, 12 nt, Human herpesvirus 6B
aacguacauaaa

SEQ ID NO: 2047765 - RNA, 22 nt, Human herpesvirus 6B
cccggcuuucucgccgccucgc

SEQ ID NO: 2047766 - RNA, 15 nt, Human herpesvirus 6B
auaggacagaggaau

SEQ ID NO: 2047767 - RNA, 12 nt, Human herpesvirus 6B
uaaaucugaaau

SEQ ID NO: 2047768 - RNA, 19 nt, Human herpesvirus 6B
agaguauuuuaaagauuuu

SEQ ID NO: 2047769 - RNA, 14 nt, Human herpesvirus 6B
gcgacaaaaaaaua

SEQ ID NO: 2047770 - RNA, 17 nt, Human herpesvirus 6B
ucauaauugugauaguu

SEQ ID NO: 2047771 - RNA, 17 nt, Human herpesvirus 6B
guaccgcgguugaaguc

SEQ ID NO: 2047772 - RNA, 17 nt, Human herpesvirus 6B
cauaccgggacagcacc

SEQ ID NO: 2047773 - RNA, 13 nt, Human herpesvirus 6B
ccaacuuaauaaa

SEQ ID NO: 2047774 - RNA, 16 nt, Human herpesvirus 6B
gucaacgaaaaaauga

SEQ ID NO: 2047775 - RNA, 15 nt, Human herpesvirus 6B
aauagagaaaaauaa

SEQ ID NO: 2047776 - RNA, 20 nt, Human herpesvirus 6B
cgauuuggguuaucuuagaa

SEQ ID NO: 2047777 - RNA, 14 nt, Human herpesvirus 6B
ugaaauaaaguuua

SEQ ID NO: 2047778 - RNA, 14 nt, Human herpesvirus 6B
gcagcggggaaggg

SEQ ID NO: 2047779 - RNA, 21 nt, Human herpesvirus 6B
uguacugguaauucaauuucu

SEQ ID NO: 2047780 - RNA, 23 nt, Human herpesvirus 6B
aucuggugagaaagacuucuugc

SEQ ID NO: 2047781 - RNA, 12 nt, Human herpesvirus 6B
aucgggccuggg

SEQ ID NO: 2047782 - RNA, 15 nt, Human herpesvirus 6B
uucacguuuacauaa

SEQ ID NO: 2047783 - RNA, 18 nt, Human herpesvirus 6B
gucaagguugucagauuu

SEQ ID NO: 2047784 - RNA, 23 nt, Human herpesvirus 6B
ucacucgaggaaacgcgcuggga

SEQ ID NO: 2047785 - RNA, 17 nt, Human herpesvirus 6B
ugaugauuugaaauguu

SEQ ID NO: 2047786 - RNA, 15 nt, Human herpesvirus 6B
ucucauaauuugccu

SEQ ID NO: 2047787 - RNA, 14 nt, Human herpesvirus 6B
guuugcuuuggauc

SEQ ID NO: 2047788 - RNA, 20 nt, Human herpesvirus 6B
gagaacuucaaaaucugcua

SEQ ID NO: 2047789 - RNA, 19 nt, Human herpesvirus 6B
aucgcgguguccucguccg

SEQ ID NO: 2047790 - RNA, 18 nt, Human herpesvirus 6B
aaacgauuucuuuaucuu

SEQ ID NO: 2047791 - RNA, 14 nt, Human herpesvirus 6B
agcgccaggacggg

SEQ ID NO: 2047792 - RNA, 20 nt, Human herpesvirus 6B
aagucuuccgcggcgcuggg

SEQ ID NO: 2047793 - RNA, 15 nt, Human herpesvirus 6B
gcgaccacagcggca

SEQ ID NO: 2047794 - RNA, 22 nt, Human herpesvirus 6B
acagaacaccugcuuuugguua

SEQ ID NO: 2047795 - RNA, 15 nt, Human herpesvirus 6B
ugucgggccacauuu

SEQ ID NO: 2047796 - RNA, 16 nt, Human herpesvirus 6B
auuguaagacuaaaug

SEQ ID NO: 2047797 - RNA, 14 nt, Human herpesvirus 6B
uacagacuccucac

SEQ ID NO: 2047798 - RNA, 16 nt, Human herpesvirus 6B
aacugcuuaacuugca

SEQ ID NO: 2047799 - RNA, 15 nt, Human herpesvirus 6B
ggagaacgggcaacu

SEQ ID NO: 2047800 - RNA, 16 nt, Human herpesvirus 6B
uccaaguuuuuaugca

SEQ ID NO: 2047801 - RNA, 21 nt, Human herpesvirus 6B
uccaauguccauuuuuuccca

SEQ ID NO: 2047802 - RNA, 14 nt, Human herpesvirus 6B
ggagaggcgcggga

SEQ ID NO: 2047803 - RNA, 16 nt, Human herpesvirus 6B
cgucgccuccaaggag

SEQ ID NO: 2047804 - RNA, 20 nt, Human herpesvirus 6B
uagacgaaaauuguaacuuc

SEQ ID NO: 2047805 - RNA, 19 nt, Human herpesvirus 6B
aacugagauauuuuaaaug

SEQ ID NO: 2047806 - RNA, 22 nt, Human herpesvirus 6B
gucgacucuuuccgaugugucu

SEQ ID NO: 2047807 - RNA, 21 nt, Human herpesvirus 6B
guacguggccgucuccugcaa

SEQ ID NO: 2047808 - RNA, 14 nt, Human herpesvirus 6B
gaggagagggagga

SEQ ID NO: 2047809 - RNA, 16 nt, Human herpesvirus 6B
aagucgccucacugua

SEQ ID NO: 2047810 - RNA, 22 nt, Human herpesvirus 6B
augaaaauaucauuaaauuguu

SEQ ID NO: 2047811 - RNA, 13 nt, Human herpesvirus 6B
uguauuuggauga

SEQ ID NO: 2047812 - RNA, 20 nt, Human herpesvirus 6B
ucgcuaaguguugacugauc

SEQ ID NO: 2047813 - RNA, 21 nt, Human herpesvirus 6B
caaaaauccaggaguaaugau

SEQ ID NO: 2047814 - RNA, 19 nt, Human herpesvirus 6B
cagaugcagucuccacagg

SEQ ID NO: 2047815 - RNA, 22 nt, Human herpesvirus 6B
ucaguaugucucaguucaaaau

SEQ ID NO: 2047816 - RNA, 23 nt, Human herpesvirus 6B
gagugguuuuuuggauaagcaga

SEQ ID NO: 2047817 - RNA, 14 nt, Human herpesvirus 6B
ugacgcaaacacag

SEQ ID NO: 2047818 - RNA, 19 nt, Human herpesvirus 6B
ugcaaaaacaaaugaaagu

SEQ ID NO: 2047819 - RNA, 14 nt, Human herpesvirus 6B
uuucauauuuuuaa

SEQ ID NO: 2047820 - RNA, 19 nt, Human herpesvirus 6B
aggcuaucacuuagacacg

SEQ ID NO: 2047821 - RNA, 11 nt, Human herpesvirus 6B
acuucuaaaau

SEQ ID NO: 2047822 - RNA, 14 nt, Human herpesvirus 6B
auaaacaugauugu

SEQ ID NO: 2047823 - RNA, 12 nt, Human herpesvirus 6B
gcggaagggcuc

SEQ ID NO: 2047824 - RNA, 21 nt, Human herpesvirus 6B
uggauuacaagggaaauccua

SEQ ID NO: 2047825 - RNA, 17 nt, Human herpesvirus 6B
caccagauaggaaaagg

SEQ ID NO: 2047826 - RNA, 15 nt, Human herpesvirus 6B
auuguagcucucgca

SEQ ID NO: 2047827 - RNA, 17 nt, Human herpesvirus 6B
gcaaagaugcagauucu

SEQ ID NO: 2047828 - RNA, 17 nt, Human herpesvirus 6B
ugaaaucuuuccugcua

SEQ ID NO: 2047829 - RNA, 17 nt, Human herpesvirus 6B
cacgugaaauaaaguuu

SEQ ID NO: 2047830 - RNA, 21 nt, Human herpesvirus 6B
aacucuugcacggaaucucua

SEQ ID NO: 2047831 - RNA, 22 nt, Human herpesvirus 6B
ugcugucgcccgccucucuccg

SEQ ID NO: 2047832 - RNA, 21 nt, Human herpesvirus 6B
cagggggaucgacgaccaggc

SEQ ID NO: 2047833 - RNA, 15 nt, Human herpesvirus 6B
caaagauagacagug

SEQ ID NO: 2047834 - RNA, 14 nt, Human herpesvirus 6B
cacggcgaaagcca

SEQ ID NO: 2047835 - RNA, 19 nt, Human herpesvirus 6B
uuugauccauuuucugaaa

SEQ ID NO: 2047836 - RNA, 22 nt, Human herpesvirus 6B
cugaacggggugauuuuccaaa

SEQ ID NO: 2047837 - RNA, 13 nt, Human herpesvirus 6B
uaagacuuagcua

SEQ ID NO: 2047838 - RNA, 19 nt, Human herpesvirus 6B
ucuuucaaaaugaccagag

SEQ ID NO: 2047839 - RNA, 20 nt, Human herpesvirus 6B
cuguucacauugugacggcu

SEQ ID NO: 2047840 - RNA, 17 nt, Human herpesvirus 6B
aggggacggacagagcg

SEQ ID NO: 2047841 - RNA, 19 nt, Human herpesvirus 6B
auucgauuaaugccacagg

SEQ ID NO: 2047842 - RNA, 14 nt, Human herpesvirus 6B
uuagguaucugccc

SEQ ID NO: 2047843 - RNA, 17 nt, Human herpesvirus 6B
auuugauguugucuucu

SEQ ID NO: 2047844 - RNA, 19 nt, Human herpesvirus 6B
ggcgcagggaacggugaag

SEQ ID NO: 2047845 - RNA, 17 nt, Human herpesvirus 6B
auuugguggaugucaag

SEQ ID NO: 2047846 - RNA, 19 nt, Human herpesvirus 6B
gauuaugcgaauuaaaacu

SEQ ID NO: 2047847 - RNA, 14 nt, Human herpesvirus 6B
ccugauggauuaca

SEQ ID NO: 2047848 - RNA, 19 nt, Human herpesvirus 6B
cuccugucauuuuuacuca

SEQ ID NO: 2047849 - RNA, 16 nt, Human herpesvirus 6B
auaaugugaacuaaau

SEQ ID NO: 2047850 - RNA, 16 nt, Human herpesvirus 6B
uaaucaucccaauaaa

SEQ ID NO: 2047851 - RNA, 19 nt, Human herpesvirus 6B
ucgcagaaucaagaaacac

SEQ ID NO: 2047852 - RNA, 16 nt, Human herpesvirus 6B
cagcaauccaauaauu

SEQ ID NO: 2047853 - RNA, 16 nt, Human herpesvirus 6B
cauggaauucaugccg

SEQ ID NO: 2047854 - RNA, 19 nt, Human herpesvirus 6B
agaucaucgccauagugaa

SEQ ID NO: 2047855 - RNA, 15 nt, Human herpesvirus 6B
ccgcugacagucacc

SEQ ID NO: 2047856 - RNA, 19 nt, Human herpesvirus 6B
uuucuccuuuuuugacguu

SEQ ID NO: 2047857 - RNA, 19 nt, Human herpesvirus 6B
cgucuccgauccgucagga

SEQ ID NO: 2047858 - RNA, 19 nt, Human herpesvirus 6B
aguuuugcagcaucgccuu

SEQ ID NO: 2047859 - RNA, 15 nt, Human herpesvirus 6B
uggagguaaucuaug

SEQ ID NO: 2047860 - RNA, 14 nt, Human herpesvirus 6B
cugacuuagauaug

SEQ ID NO: 2047861 - RNA, 22 nt, Human herpesvirus 6B
cuguucggauccaaugaugaaa

SEQ ID NO: 2047862 - RNA, 21 nt, Human herpesvirus 6B
caaaucuguaagauuaaaugu

SEQ ID NO: 2047863 - RNA, 13 nt, Human herpesvirus 6B
cccgccucucucc

SEQ ID NO: 2047864 - RNA, 17 nt, Human herpesvirus 6B
cucgguauaucuucuug

SEQ ID NO: 2047865 - RNA, 18 nt, Human herpesvirus 6B
gagaaacggagagcgaca

SEQ ID NO: 2047866 - RNA, 16 nt, Human herpesvirus 6B
uuuugcgaagaauugg

SEQ ID NO: 2047867 - RNA, 15 nt, Human herpesvirus 6B
ucgguaaacuucaga

SEQ ID NO: 2047868 - RNA, 16 nt, Human herpesvirus 6B
agggcgggcggacggc

SEQ ID NO: 2047869 - RNA, 15 nt, Human herpesvirus 6B
gggauaaauauuucu

SEQ ID NO: 2047870 - RNA, 20 nt, Human herpesvirus 6B
agaguaccgaauaaaacaag

SEQ ID NO: 2047871 - RNA, 12 nt, Human herpesvirus 6B
auguaaauguua

SEQ ID NO: 2047872 - RNA, 22 nt, Human herpesvirus 6B
uugaaaagguguuguguuugaa

SEQ ID NO: 2047873 - RNA, 15 nt, Human herpesvirus 6B
aaacauaaaauguuu

SEQ ID NO: 2047874 - RNA, 15 nt, Human herpesvirus 6B
cgucugucuguuccu

SEQ ID NO: 2047875 - RNA, 21 nt, Human herpesvirus 6B
uucuggguauuuccuguuuug

SEQ ID NO: 2047876 - RNA, 14 nt, Human herpesvirus 6B
ucauuguaauucca

SEQ ID NO: 2047877 - RNA, 19 nt, Human herpesvirus 6B
gaaaacgcagcaugaugau

SEQ ID NO: 2047878 - RNA, 23 nt, Human herpesvirus 6B
ucgaaaaugcugauuuuaaacua

SEQ ID NO: 2047879 - RNA, 18 nt, Human herpesvirus 6B
gacuuuucugaugacaau

SEQ ID NO: 2047880 - RNA, 19 nt, Human herpesvirus 6B
caagcacaaaaccaggaau

SEQ ID NO: 2047881 - RNA, 16 nt, Human herpesvirus 6B
acaccgaauuuauuca

SEQ ID NO: 2047882 - RNA, 17 nt, Human herpesvirus 6B
uugaacaucuauuauca

SEQ ID NO: 2047883 - RNA, 14 nt, Human herpesvirus 6B
uggggacagacagg

SEQ ID NO: 2047884 - RNA, 17 nt, Human herpesvirus 6B
auauaaagacuuacaga

SEQ ID NO: 2047885 - RNA, 15 nt, Human herpesvirus 6B
acaaauaaaaaauuc

SEQ ID NO: 2047886 - RNA, 22 nt, Human herpesvirus 6B
aauuuguggaacaagagacgaa

SEQ ID NO: 2047887 - RNA, 17 nt, Human herpesvirus 6B
uuacggcgcgaaacaug

SEQ ID NO: 2047888 - RNA, 23 nt, Human herpesvirus 6B
acaaauaauuuuauugacuguga

SEQ ID NO: 2047889 - RNA, 13 nt, Human herpesvirus 6B
uagacacacagaa

SEQ ID NO: 2047890 - RNA, 16 nt, Human herpesvirus 6B
agcgaagucaugaauu

SEQ ID NO: 2047891 - RNA, 15 nt, Human herpesvirus 6B
ugauaaguugucauu

SEQ ID NO: 2047892 - RNA, 12 nt, Human herpesvirus 6B
cccuccccgcac

SEQ ID NO: 2047893 - RNA, 15 nt, Human herpesvirus 6B
cacagcggcagcgga

SEQ ID NO: 2047894 - RNA, 21 nt, Human herpesvirus 6B
ucuacguauaaaaguccucaa

SEQ ID NO: 2047895 - RNA, 17 nt, Human herpesvirus 6B
caagccugcgcguggaa

SEQ ID NO: 2047896 - RNA, 19 nt, Human herpesvirus 6B
agacuuugcugauucuguu

SEQ ID NO: 2047897 - RNA, 15 nt, Human herpesvirus 6B
aacagaugaggagga

SEQ ID NO: 2047898 - RNA, 14 nt, Human herpesvirus 6B
guccaaggauuaug

SEQ ID NO: 2047899 - RNA, 23 nt, Human herpesvirus 6B
gcucucgaugaaaguuuuggaaa

SEQ ID NO: 2047900 - RNA, 13 nt, Human herpesvirus 6B
aaaucucuauugu

SEQ ID NO: 2047901 - RNA, 15 nt, Human herpesvirus 6B
acacgucccuucucc

SEQ ID NO: 2047902 - RNA, 16 nt, Human herpesvirus 6B
auugcugaguggacau

SEQ ID NO: 2047903 - RNA, 22 nt, Human herpesvirus 6B
cggaagacguuucuauggauau

SEQ ID NO: 2047904 - RNA, 14 nt, Human herpesvirus 6B
guacgcgccacagc

SEQ ID NO: 2047905 - RNA, 18 nt, Human herpesvirus 6B
agaugcaaccgaugacaa

SEQ ID NO: 2047906 - RNA, 17 nt, Human herpesvirus 6B
ucauaauuugccugagu

SEQ ID NO: 2047907 - RNA, 21 nt, Human herpesvirus 6B
gaaacucuuauggcaagcacu

SEQ ID NO: 2047908 - RNA, 15 nt, Human herpesvirus 6B
gaccaacaugccgau

SEQ ID NO: 2047909 - RNA, 13 nt, Human herpesvirus 6B
gugccguggcaga

SEQ ID NO: 2047910 - RNA, 22 nt, Human herpesvirus 6B
cgccguccauuuaaccuccggc

SEQ ID NO: 2047911 - RNA, 14 nt, Human herpesvirus 6B
ggcggcgcgcgccg

SEQ ID NO: 2047912 - RNA, 15 nt, Human herpesvirus 6B
aguuuuggaaaaugu

SEQ ID NO: 2047913 - RNA, 20 nt, Human herpesvirus 6B
uugcaguggcgcgcguuuuu

SEQ ID NO: 2047914 - RNA, 20 nt, Human herpesvirus 6B
uucaccccccucuugcagug

SEQ ID NO: 2047915 - RNA, 21 nt, Human herpesvirus 6B
ugcaaaaacaaaugaaagucu

SEQ ID NO: 2047916 - RNA, 13 nt, Human herpesvirus 6B
gcgacaggagaua

SEQ ID NO: 2047917 - RNA, 18 nt, Human herpesvirus 6B
aacguccgugaugauuca

SEQ ID NO: 2047918 - RNA, 15 nt, Human herpesvirus 6B
gagcaaagaaaugac

SEQ ID NO: 2047919 - RNA, 20 nt, Human herpesvirus 6B
aggagugaaacgauguguua

SEQ ID NO: 2047920 - RNA, 22 nt, Human herpesvirus 6B
uuaaaagggaagucaaggaaac

SEQ ID NO: 2047921 - RNA, 22 nt, Human herpesvirus 6B
guuaacggagagucuucauccu

SEQ ID NO: 2047922 - RNA, 15 nt, Human herpesvirus 6B
uaugcaacugcauuu

SEQ ID NO: 2047923 - RNA, 17 nt, Human herpesvirus 6B
gucaagguugucagauu

SEQ ID NO: 2047924 - RNA, 14 nt, Human herpesvirus 6B
ccgaaaagaaagaa

SEQ ID NO: 2047925 - RNA, 15 nt, Human herpesvirus 6B
ugauauggagcagau

SEQ ID NO: 2047926 - RNA, 21 nt, Human herpesvirus 6B
aggguaacgcaggagaaacuu

SEQ ID NO: 2047927 - RNA, 16 nt, Human herpesvirus 6B
ucagauuucuguaguu

SEQ ID NO: 2047928 - RNA, 23 nt, Human herpesvirus 6B
gcucgggggacggagaggaagcc

SEQ ID NO: 2047929 - RNA, 17 nt, Human herpesvirus 6B
aggugauuugaacagag

SEQ ID NO: 2047930 - RNA, 20 nt, Human herpesvirus 6B
guucaggucaagcgccagga

SEQ ID NO: 2047931 - RNA, 22 nt, Human herpesvirus 6B
uaauguaucaaaguguauacau

SEQ ID NO: 2047932 - RNA, 20 nt, Human herpesvirus 6B
uuacgacacgcucguauuuu

SEQ ID NO: 2047933 - RNA, 20 nt, Human herpesvirus 6B
aacuuuagacagcugcauua

SEQ ID NO: 2047934 - RNA, 13 nt, Human herpesvirus 6B
cucagagaaaguu

SEQ ID NO: 2047935 - RNA, 23 nt, Human herpesvirus 6B
uguggcuauuugacaauaaacau

SEQ ID NO: 2047936 - RNA, 13 nt, Human herpesvirus 6B
cggcacgcgccgu

SEQ ID NO: 2047937 - RNA, 19 nt, Human herpesvirus 6B
caucgucuccuauauuuuc

SEQ ID NO: 2047938 - RNA, 20 nt, Human herpesvirus 6B
uucuauuaaaaagacuaaag

SEQ ID NO: 2047939 - RNA, 16 nt, Human herpesvirus 6B
cugguuugcuuuggau

SEQ ID NO: 2047940 - RNA, 22 nt, Human herpesvirus 6B
gugaggugauuugaacagagau

SEQ ID NO: 2047941 - RNA, 16 nt, Human herpesvirus 6B
ucaacacaccugccua

SEQ ID NO: 2047942 - RNA, 19 nt, Human herpesvirus 6B
cuucauccucgaagaauug

SEQ ID NO: 2047943 - RNA, 13 nt, Human herpesvirus 6B
gaagauauuuccc

SEQ ID NO: 2047944 - RNA, 23 nt, Human herpesvirus 6B
aaaggaguuugcauuuggugauu

SEQ ID NO: 2047945 - RNA, 16 nt, Human herpesvirus 6B
agccggagcccugaga

SEQ ID NO: 2047946 - RNA, 14 nt, Human herpesvirus 6B
aucggaagaggaag

SEQ ID NO: 2047947 - RNA, 21 nt, Human herpesvirus 6B
agaacagaggaagaaaggagu

SEQ ID NO: 2047948 - RNA, 20 nt, Human herpesvirus 6B
gcaccggcgacacgcgcgga

SEQ ID NO: 2047949 - RNA, 14 nt, Human herpesvirus 6B
uaauggagagaaau

SEQ ID NO: 2047950 - RNA, 17 nt, Human herpesvirus 6B
uggaaaagaucaacaaa

SEQ ID NO: 2047951 - RNA, 20 nt, Human herpesvirus 6B
acucgcuuacgaucuuuacg

SEQ ID NO: 2047952 - RNA, 17 nt, Human herpesvirus 6B
ucgaaauauaaaaccaa

SEQ ID NO: 2047953 - RNA, 18 nt, Human herpesvirus 6B
cggaagacgaugcagggu

SEQ ID NO: 2047954 - RNA, 16 nt, Human herpesvirus 6B
uuaacugggaaaucug

SEQ ID NO: 2047955 - RNA, 19 nt, Human herpesvirus 6B
acuaucaaaauaaaaauuu

SEQ ID NO: 2047956 - RNA, 15 nt, Human herpesvirus 6B
acucuacuaaaagac

SEQ ID NO: 2047957 - RNA, 17 nt, Human herpesvirus 6B
uacaucccgaguauaac

SEQ ID NO: 2047958 - RNA, 20 nt, Human herpesvirus 6B
cgacucuuuccgaugugucu

SEQ ID NO: 2047959 - RNA, 19 nt, Human herpesvirus 6B
auucuuguucgggccaagg

SEQ ID NO: 2047960 - RNA, 13 nt, Human herpesvirus 6B
guucguuaaaaac

SEQ ID NO: 2047961 - RNA, 15 nt, Human herpesvirus 6B
gcaacgcagauuuua

SEQ ID NO: 2047962 - RNA, 20 nt, Human herpesvirus 6B
uaaaaaagauuuuguuucua

SEQ ID NO: 2047963 - RNA, 17 nt, Human herpesvirus 6B
guccaguaagacagcac

SEQ ID NO: 2047964 - RNA, 15 nt, Human herpesvirus 6B
agagcggagaggcgc

SEQ ID NO: 2047965 - RNA, 15 nt, Human herpesvirus 6B
aggcgaacuaagaaa

SEQ ID NO: 2047966 - RNA, 14 nt, Human herpesvirus 6B
uuuaggacaugugg

SEQ ID NO: 2047967 - RNA, 14 nt, Human herpesvirus 6B
cagaaucuucuuug

SEQ ID NO: 2047968 - RNA, 19 nt, Human herpesvirus 6B
uuuauguugugaucaagug

SEQ ID NO: 2047969 - RNA, 20 nt, Human herpesvirus 6B
agcucuguucucucccacuc

SEQ ID NO: 2047970 - RNA, 14 nt, Human herpesvirus 6B
cagaugaggaggag

SEQ ID NO: 2047971 - RNA, 21 nt, Human herpesvirus 6B
agagguuuuaccuguugguua

SEQ ID NO: 2047972 - RNA, 24 nt, Human herpesvirus 6B
gccgucugucuguuccucagauuc

SEQ ID NO: 2047973 - RNA, 18 nt, Human herpesvirus 6B
augcagaucgagaauaau

SEQ ID NO: 2047974 - RNA, 22 nt, Human herpesvirus 6B
uguauuaauuuuuuguuucuga

SEQ ID NO: 2047975 - RNA, 12 nt, Human herpesvirus 6B
cgcccguucccg

SEQ ID NO: 2047976 - RNA, 15 nt, Human herpesvirus 6B
gagaaaggaagaaau

SEQ ID NO: 2047977 - RNA, 20 nt, Human herpesvirus 6B
ucuccugugcguccuccucg

SEQ ID NO: 2047978 - RNA, 15 nt, Human herpesvirus 6B
auuucuaucuacaaa

SEQ ID NO: 2047979 - RNA, 15 nt, Human herpesvirus 6B
caggguguggccggc

SEQ ID NO: 2047980 - RNA, 15 nt, Human herpesvirus 6B
ucaccccccucuugc

SEQ ID NO: 2047981 - RNA, 17 nt, Human herpesvirus 6B
uaguugaugcuguugcu

SEQ ID NO: 2047982 - RNA, 18 nt, Human herpesvirus 6B
guacuacguguugcuuuu

SEQ ID NO: 2047983 - RNA, 16 nt, Human herpesvirus 6B
cagauaauaaauaucc

SEQ ID NO: 2047984 - RNA, 21 nt, Human herpesvirus 6B
gauggaucggaagacguuucu

SEQ ID NO: 2047985 - RNA, 20 nt, Human herpesvirus 6B
aauaagccgaguuugauaau

SEQ ID NO: 2047986 - RNA, 22 nt, Human herpesvirus 6B
gucaagggcaagguucucagca

SEQ ID NO: 2047987 - RNA, 18 nt, Human herpesvirus 6B
aguuuugugauccuguaa

SEQ ID NO: 2047988 - RNA, 13 nt, Human herpesvirus 6B
agaaguuacaaga

SEQ ID NO: 2047989 - RNA, 14 nt, Human herpesvirus 6B
auuauaaugaugca

SEQ ID NO: 2047990 - RNA, 20 nt, Human herpesvirus 6B
cuccgcgggaccuggcgggc

SEQ ID NO: 2047991 - RNA, 22 nt, Human herpesvirus 6B
auacaccggagaccgagcggcg

SEQ ID NO: 2047992 - RNA, 17 nt, Human herpesvirus 6B
auaauuuuauugacugu

SEQ ID NO: 2047993 - RNA, 19 nt, Human herpesvirus 6B
agauuccgucaucuagaga

SEQ ID NO: 2047994 - RNA, 18 nt, Human herpesvirus 6B
gcaauuuaaacagaaauu

SEQ ID NO: 2047995 - RNA, 19 nt, Human herpesvirus 6B
gcagauuuacgacacgcuc

SEQ ID NO: 2047996 - RNA, 15 nt, Human herpesvirus 6B
ugcuuuuaguuucaa

SEQ ID NO: 2047997 - RNA, 12 nt, Human herpesvirus 6B
agagaaggaaaa

SEQ ID NO: 2047998 - RNA, 22 nt, Human herpesvirus 6B
cagauuuuacuggugauuuaaa

SEQ ID NO: 2047999 - RNA, 17 nt, Human herpesvirus 6B
gucgcagaaucaagaaa

SEQ ID NO: 2048000 - RNA, 13 nt, Human herpesvirus 6B
acauccaaaauac

SEQ ID NO: 2048001 - RNA, 13 nt, Human herpesvirus 6B
cuuugcggugcau

SEQ ID NO: 2048002 - RNA, 24 nt, Human herpesvirus 6B
gacugcggggcgucgggcgacggg

SEQ ID NO: 2048003 - RNA, 23 nt, Human herpesvirus 6B
caaacguguauuaagaaugaauu

SEQ ID NO: 2048004 - RNA, 13 nt, Human herpesvirus 6B
ggggggggggccc

SEQ ID NO: 2048005 - RNA, 13 nt, Human herpesvirus 6B
uuuauaaacuuaa

SEQ ID NO: 2048006 - RNA, 23 nt, Human herpesvirus 6B
agcgcacuauauacuauagaagc

SEQ ID NO: 2048007 - RNA, 14 nt, Human herpesvirus 6B
ucggggggagacag

SEQ ID NO: 2048008 - RNA, 21 nt, Human herpesvirus 6B
gccucccuccguuaggaucag

SEQ ID NO: 2048009 - RNA, 22 nt, Human herpesvirus 6B
aggcguagaccuuugcgcaggc

SEQ ID NO: 2048010 - RNA, 11 nt, Human herpesvirus 6B
augauagaaga

SEQ ID NO: 2048011 - RNA, 22 nt, Human herpesvirus 6B
ucugcaucaagcuucacgugau

SEQ ID NO: 2048012 - RNA, 22 nt, Human herpesvirus 6B
augagaucguccggugcauaua

SEQ ID NO: 2048013 - RNA, 22 nt, Human herpesvirus 6B
gaacuggaccagugauucugcu

SEQ ID NO: 2048014 - RNA, 19 nt, Human herpesvirus 6B
ggcgcaaaccaagguguuu

SEQ ID NO: 2048015 - RNA, 20 nt, Human herpesvirus 6B
cuuauugaggaaaugcagca

SEQ ID NO: 2048016 - RNA, 22 nt, Human herpesvirus 6B
cgcucgggggacggagaggaag

SEQ ID NO: 2048017 - RNA, 15 nt, Human herpesvirus 6B
agccggagcccugag

SEQ ID NO: 2048018 - RNA, 14 nt, Human herpesvirus 6B
acacgcccccaccu

SEQ ID NO: 2048019 - RNA, 23 nt, Human herpesvirus 6B
ucuaaauggcucguucagcagua

SEQ ID NO: 2048020 - RNA, 19 nt, Human herpesvirus 6B
uaauagaaaaaucaucaaa

SEQ ID NO: 2048021 - RNA, 19 nt, Human herpesvirus 6B
uuuacucgugugucucugu

SEQ ID NO: 2048022 - RNA, 12 nt, Human herpesvirus 6B
aaucaaggaaga

SEQ ID NO: 2048023 - RNA, 12 nt, Human herpesvirus 6B
uuuuucuguaag

SEQ ID NO: 2048024 - RNA, 14 nt, Human herpesvirus 6B
aaaauauuggauuu

SEQ ID NO: 2048025 - RNA, 21 nt, Human herpesvirus 6B
augagaauguucuucugaaau

SEQ ID NO: 2048026 - RNA, 22 nt, Human herpesvirus 6B
gagacuuuguguaaccugagaa

SEQ ID NO: 2048027 - RNA, 14 nt, Human herpesvirus 6B
auaguuauucagau

SEQ ID NO: 2048028 - RNA, 14 nt, Human herpesvirus 6B
uaauucaaauguag

SEQ ID NO: 2048029 - RNA, 18 nt, Human herpesvirus 6B
guaaauuuguaucucaga

SEQ ID NO: 2048030 - RNA, 20 nt, Human herpesvirus 6B
acaaaauuuuuuauggucug

SEQ ID NO: 2048031 - RNA, 17 nt, Human herpesvirus 6B
ccucacccugaagggac

SEQ ID NO: 2048032 - RNA, 15 nt, Human herpesvirus 6B
gggacuccgagccgg

SEQ ID NO: 2048033 - RNA, 15 nt, Human herpesvirus 6B
uucaaaaucugcuaa

SEQ ID NO: 2048034 - RNA, 19 nt, Human herpesvirus 6B
auguaaacacgaaacugcu

SEQ ID NO: 2048035 - RNA, 21 nt, Human herpesvirus 6B
ucuguggcauauuuaaaccag

SEQ ID NO: 2048036 - RNA, 16 nt, Human herpesvirus 6B
uuugcagucgguauuu

SEQ ID NO: 2048037 - RNA, 13 nt, Human herpesvirus 6B
augguuaaggaaa

SEQ ID NO: 2048038 - RNA, 18 nt, Human herpesvirus 6B
agggaagccagccgcccu

SEQ ID NO: 2048039 - RNA, 18 nt, Human herpesvirus 6B
uucaaccuguuuccagaa

SEQ ID NO: 2048040 - RNA, 23 nt, Human herpesvirus 6B
uaauuucagcuuugaacaucuau

SEQ ID NO: 2048041 - RNA, 18 nt, Human herpesvirus 6B
aguugggacuuggaaacg

SEQ ID NO: 2048042 - RNA, 15 nt, Human herpesvirus 6B
cccucgucuguugcu

SEQ ID NO: 2048043 - RNA, 21 nt, Human herpesvirus 6B
aacgagaauuccaaggcucug

SEQ ID NO: 2048044 - RNA, 22 nt, Human herpesvirus 6B
uggccuauugcauggcauguga

SEQ ID NO: 2048045 - RNA, 16 nt, Human herpesvirus 6B
aaucaaauucaaacuu

SEQ ID NO: 2048046 - RNA, 17 nt, Human herpesvirus 6B
caacaacccuuauuuua

SEQ ID NO: 2048047 - RNA, 23 nt, Human herpesvirus 6B
aagugccgugagugcuauuugca

SEQ ID NO: 2048048 - RNA, 23 nt, Human herpesvirus 6B
uggauuccauccgcuaagagauu

SEQ ID NO: 2048049 - RNA, 13 nt, Human herpesvirus 6B
gagagcaggagca

SEQ ID NO: 2048050 - RNA, 18 nt, Human herpesvirus 6B
gccgccuucucugucgcu

SEQ ID NO: 2048051 - RNA, 14 nt, Human herpesvirus 6B
cuagauaacucaga

SEQ ID NO: 2048052 - RNA, 14 nt, Human herpesvirus 6B
aaggaugguagggu

SEQ ID NO: 2048053 - RNA, 17 nt, Human herpesvirus 6B
cggcgcugggcuccuca

SEQ ID NO: 2048054 - RNA, 18 nt, Human herpesvirus 6B
cgguguccucguccgucc

SEQ ID NO: 2048055 - RNA, 11 nt, Human herpesvirus 6B
cuauucuaauu

SEQ ID NO: 2048056 - RNA, 12 nt, Human herpesvirus 6B
uggacaggagca

SEQ ID NO: 2048057 - RNA, 14 nt, Human herpesvirus 6B
gaaucggaagagga

SEQ ID NO: 2048058 - RNA, 22 nt, Human herpesvirus 6B
gacggaauauauagaagaagaa

SEQ ID NO: 2048059 - RNA, 15 nt, Human herpesvirus 6B
aagaucuacagagua

SEQ ID NO: 2048060 - RNA, 16 nt, Human herpesvirus 6B
uggaaguguaaauguc

SEQ ID NO: 2048061 - RNA, 23 nt, Human herpesvirus 6B
caacugagagacggaucugccgc

SEQ ID NO: 2048062 - RNA, 16 nt, Human herpesvirus 6B
gcgcggggcgcaccgg

SEQ ID NO: 2048063 - RNA, 17 nt, Human herpesvirus 6B
cuuauggcaagcacuga

SEQ ID NO: 2048064 - RNA, 15 nt, Human herpesvirus 6B
aucggcccuugguga

SEQ ID NO: 2048065 - RNA, 12 nt, Human herpesvirus 6B
gaucugcuuugu

SEQ ID NO: 2048066 - RNA, 13 nt, Human herpesvirus 6B
gauuucuguaguu

SEQ ID NO: 2048067 - RNA, 17 nt, Human herpesvirus 6B
uuuuuggcauauacaaa

SEQ ID NO: 2048068 - RNA, 14 nt, Human herpesvirus 6B
uccucacccugaag

SEQ ID NO: 2048069 - RNA, 13 nt, Human herpesvirus 6B
auguguaagaaaa

SEQ ID NO: 2048070 - RNA, 21 nt, Human herpesvirus 6B
ggcuugcugucgcccgccucu

SEQ ID NO: 2048071 - RNA, 21 nt, Human herpesvirus 6B
cauacgacugacgauuucauu

SEQ ID NO: 2048072 - RNA, 17 nt, Human herpesvirus 6B
gucacuuauauaaaaua

SEQ ID NO: 2048073 - RNA, 23 nt, Human herpesvirus 6B
ggcggagcacccggggaggcgac

SEQ ID NO: 2048074 - RNA, 16 nt, Human herpesvirus 6B
ccuacggccagagaca

SEQ ID NO: 2048075 - RNA, 22 nt, Human herpesvirus 6B
uugguuguuuuucuaaacugaa

SEQ ID NO: 2048076 - RNA, 22 nt, Human herpesvirus 6B
ccaacggucaagggugaugagg

SEQ ID NO: 2048077 - RNA, 16 nt, Human herpesvirus 6B
gaguaugacagaaauc

SEQ ID NO: 2048078 - RNA, 16 nt, Human herpesvirus 6B
uguuagauaaaaugaa

SEQ ID NO: 2048079 - RNA, 15 nt, Human herpesvirus 6B
agaugcaaaacuguu

SEQ ID NO: 2048080 - RNA, 19 nt, Human herpesvirus 6B
cuuagacacuguaauuugg

SEQ ID NO: 2048081 - RNA, 14 nt, Human herpesvirus 6B
acuguucuuucaaa

SEQ ID NO: 2048082 - RNA, 13 nt, Human herpesvirus 6B
ugcaugcauugcg

SEQ ID NO: 2048083 - RNA, 13 nt, Human herpesvirus 6B
guuucuuuggaaa

SEQ ID NO: 2048084 - RNA, 16 nt, Human herpesvirus 6B
cuacuguguauugugu

SEQ ID NO: 2048085 - RNA, 21 nt, Human herpesvirus 6B
ccauagaguuucgagaaagag

SEQ ID NO: 2048086 - RNA, 16 nt, Human herpesvirus 6B
cacccugaagggaccg

SEQ ID NO: 2048087 - RNA, 13 nt, Human herpesvirus 6B
guucuugagcagg

SEQ ID NO: 2048088 - RNA, 19 nt, Human herpesvirus 6B
uguugcuguaguugaugcu

SEQ ID NO: 2048089 - RNA, 14 nt, Human herpesvirus 6B
ccagaauauaucga

SEQ ID NO: 2048090 - RNA, 21 nt, Human herpesvirus 6B
ccgagacggugauguugcgau

SEQ ID NO: 2048091 - RNA, 15 nt, Human herpesvirus 6B
ggcugggcgcagaag

SEQ ID NO: 2048092 - RNA, 19 nt, Human herpesvirus 6B
gagcaaccgcaguuccugu

SEQ ID NO: 2048093 - RNA, 15 nt, Human herpesvirus 6B
cucuaaucaagaaac

SEQ ID NO: 2048094 - RNA, 15 nt, Human herpesvirus 6B
uggauuauguuaauu

SEQ ID NO: 2048095 - RNA, 23 nt, Human herpesvirus 6B
aaacggagacugcacagaaucga

SEQ ID NO: 2048096 - RNA, 16 nt, Human herpesvirus 6B
acauucguauacuucc

SEQ ID NO: 2048097 - RNA, 18 nt, Human herpesvirus 6B
caaggguaccaaauguuc

SEQ ID NO: 2048098 - RNA, 21 nt, Human herpesvirus 6B
gccgucgucgcucucccucuu

SEQ ID NO: 2048099 - RNA, 23 nt, Human herpesvirus 6B
ccagcaauuucggcaagaaagcc

SEQ ID NO: 2048100 - RNA, 17 nt, Human herpesvirus 6B
aaaaaagauauauuggu

SEQ ID NO: 2048101 - RNA, 24 nt, Human herpesvirus 6B
cuguuccccguccucgugcucucc

SEQ ID NO: 2048102 - RNA, 21 nt, Human herpesvirus 6B
guuuauuuucucgacaucgcu

SEQ ID NO: 2048103 - RNA, 17 nt, Human herpesvirus 6B
auauggaucaaucucca

SEQ ID NO: 2048104 - RNA, 18 nt, Human herpesvirus 6B
cguuagacaaaaacaugu

SEQ ID NO: 2048105 - RNA, 21 nt, Human herpesvirus 6B
aaaauguuuccaugacuguga

SEQ ID NO: 2048106 - RNA, 18 nt, Human herpesvirus 6B
cacacuggcgaaggcccg

SEQ ID NO: 2048107 - RNA, 15 nt, Human herpesvirus 6B
gucacacgucccuuc

SEQ ID NO: 2048108 - RNA, 22 nt, Human herpesvirus 6B
gcuuaggauguaaaugcagaca

SEQ ID NO: 2048109 - RNA, 13 nt, Human herpesvirus 6B
aacgcaaagggaa

SEQ ID NO: 2048110 - RNA, 14 nt, Human herpesvirus 6B
aagaaucugccgau

SEQ ID NO: 2048111 - RNA, 15 nt, Human herpesvirus 6B
ugauuccuucaaugu

SEQ ID NO: 2048112 - RNA, 15 nt, Human herpesvirus 6B
augauucaauagcag

SEQ ID NO: 2048113 - RNA, 23 nt, Human herpesvirus 6B
cugaauggaguaaauuaaaguuu

SEQ ID NO: 2048114 - RNA, 17 nt, Human herpesvirus 6B
auugaauuuauaucaca

SEQ ID NO: 2048115 - RNA, 14 nt, Human herpesvirus 6B
gcugguuugcuuug

SEQ ID NO: 2048116 - RNA, 13 nt, Human herpesvirus 6B
accaagaaaucac

SEQ ID NO: 2048117 - RNA, 17 nt, Human herpesvirus 6B
aguugcacauguuucug

SEQ ID NO: 2048118 - RNA, 20 nt, Human herpesvirus 6B
uugucuuuguccuauguuaa

SEQ ID NO: 2048119 - RNA, 13 nt, Human herpesvirus 6B
gcucgggaucacg

SEQ ID NO: 2048120 - RNA, 22 nt, Human herpesvirus 6B
uaucaagcucgaguucgagaag

SEQ ID NO: 2048121 - RNA, 16 nt, Human herpesvirus 6B
cugagagcaggagcag

SEQ ID NO: 2048122 - RNA, 19 nt, Human herpesvirus 6B
caaagaugacaaauuuuca

SEQ ID NO: 2048123 - RNA, 20 nt, Human herpesvirus 6B
gaagacauuaauacugguuu

SEQ ID NO: 2048124 - RNA, 18 nt, Human herpesvirus 6B
accagcucuguucucucc

SEQ ID NO: 2048125 - RNA, 22 nt, Human herpesvirus 6B
cgcugggcuccucacccugaag

SEQ ID NO: 2048126 - RNA, 12 nt, Human herpesvirus 6B
uucacagcaguu

SEQ ID NO: 2048127 - RNA, 14 nt, Human herpesvirus 6B
gccaggccgcgucg

SEQ ID NO: 2048128 - RNA, 15 nt, Human herpesvirus 6B
cgaaucggaagagga

SEQ ID NO: 2048129 - RNA, 17 nt, Human herpesvirus 6B
gcaugcgacagacaguc

SEQ ID NO: 2048130 - RNA, 16 nt, Human herpesvirus 6B
agcaggagaaaaauuu

SEQ ID NO: 2048131 - RNA, 14 nt, Human herpesvirus 6B
gucugagcagaggu

SEQ ID NO: 2048132 - RNA, 20 nt, Human herpesvirus 6B
cgcauuucucuacaugccac

SEQ ID NO: 2048133 - RNA, 21 nt, Human herpesvirus 6B
ccugagaauuuucgaaaagau

SEQ ID NO: 2048134 - RNA, 16 nt, Human herpesvirus 6B
ugauuuuccaaagauu

SEQ ID NO: 2048135 - RNA, 23 nt, Human herpesvirus 6B
cacagcaugaacucucacggcca

SEQ ID NO: 2048136 - RNA, 20 nt, Human herpesvirus 6B
cacggagugcgacaggagau

SEQ ID NO: 2048137 - RNA, 21 nt, Human herpesvirus 6B
uaugagaauguucuucugaaa

SEQ ID NO: 2048138 - RNA, 13 nt, Human herpesvirus 6B
gcuccgcgcggcc

SEQ ID NO: 2048139 - RNA, 13 nt, Human herpesvirus 6B
auauuuuuacugc

SEQ ID NO: 2048140 - RNA, 15 nt, Human herpesvirus 6B
gaagaacaugcagaa

SEQ ID NO: 2048141 - RNA, 15 nt, Human herpesvirus 6B
uguuuaacuaauaaa

SEQ ID NO: 2048142 - RNA, 14 nt, Human herpesvirus 6B
uccgaccagcacca

SEQ ID NO: 2048143 - RNA, 16 nt, Human herpesvirus 6B
auagaaagaaccagug

SEQ ID NO: 2048144 - RNA, 16 nt, Human herpesvirus 6B
aaugguuucaaagucg

SEQ ID NO: 2048145 - RNA, 14 nt, Human herpesvirus 6B
caagcgccaggacg

SEQ ID NO: 2048146 - RNA, 19 nt, Human herpesvirus 6B
gugcuuguuuugguggaca

SEQ ID NO: 2048147 - RNA, 16 nt, Human herpesvirus 6B
gauuguuacuagugau

SEQ ID NO: 2048148 - RNA, 22 nt, Human herpesvirus 6B
aaauccuagaguuguuuuuagu

SEQ ID NO: 2048149 - RNA, 19 nt, Human herpesvirus 6B
gaaaaaucucuauuguuua

SEQ ID NO: 2048150 - RNA, 15 nt, Human herpesvirus 6B
agguggcugcauaua

SEQ ID NO: 2048151 - RNA, 16 nt, Human herpesvirus 6B
uuuuuaauccauauuu

SEQ ID NO: 2048152 - RNA, 17 nt, Human herpesvirus 6B
aaguuagaguuggauuu

SEQ ID NO: 2048153 - RNA, 13 nt, Human herpesvirus 6B
cuauguuaacauu

SEQ ID NO: 2048154 - RNA, 10 nt, Human herpesvirus 6B
ucaaggaaac

SEQ ID NO: 2048155 - RNA, 14 nt, Human herpesvirus 6B
cgugguugucuuug

SEQ ID NO: 2048156 - RNA, 19 nt, Human herpesvirus 6B
ccugaaaccccacaaagcc

SEQ ID NO: 2048157 - RNA, 23 nt, Human herpesvirus 6B
agaacugucgcaucaauuacucg

SEQ ID NO: 2048158 - RNA, 14 nt, Human herpesvirus 6B
ccgccucucuccgc

SEQ ID NO: 2048159 - RNA, 21 nt, Human herpesvirus 6B
uguacgccauacgggaaaaga

SEQ ID NO: 2048160 - RNA, 22 nt, Human herpesvirus 6B
ucugauuauuaucacaaaguuu

SEQ ID NO: 2048161 - RNA, 12 nt, Human herpesvirus 6B
guguugaagaac

SEQ ID NO: 2048162 - RNA, 15 nt, Human herpesvirus 6B
gucaagcgccaggac

SEQ ID NO: 2048163 - RNA, 14 nt, Human herpesvirus 6B
augacuuuucugau

SEQ ID NO: 2048164 - RNA, 12 nt, Human herpesvirus 6B
aauaauuacaaa

SEQ ID NO: 2048165 - RNA, 19 nt, Human herpesvirus 6B
cucugcaacuuuauuugaa

SEQ ID NO: 2048166 - RNA, 13 nt, Human herpesvirus 6B
agauccaauggau

SEQ ID NO: 2048167 - RNA, 17 nt, Human herpesvirus 6B
uaaauaucaugauaaau

SEQ ID NO: 2048168 - RNA, 18 nt, Human herpesvirus 6B
aacugauacuguucaagu

SEQ ID NO: 2048169 - RNA, 21 nt, Human herpesvirus 6B
cuguuaauuccuuguguugaa

SEQ ID NO: 2048170 - RNA, 17 nt, Human herpesvirus 6B
uuaaacucgacuucuuu

SEQ ID NO: 2048171 - RNA, 14 nt, Human herpesvirus 6B
caacgcuccuccca

SEQ ID NO: 2048172 - RNA, 17 nt, Human herpesvirus 6B
auuuaacauccaaaaua

SEQ ID NO: 2048173 - RNA, 20 nt, Human herpesvirus 6B
uaaaacucuaaaagcugcua

SEQ ID NO: 2048174 - RNA, 15 nt, Human herpesvirus 6B
aacucaaagaaagcu

SEQ ID NO: 2048175 - RNA, 13 nt, Human herpesvirus 6B
auaagacuuagcu

SEQ ID NO: 2048176 - RNA, 13 nt, Human herpesvirus 6B
ccaaaagagaaag

SEQ ID NO: 2048177 - RNA, 21 nt, Human herpesvirus 6B
cugaacuguuuccagagcaca

SEQ ID NO: 2048178 - RNA, 19 nt, Human herpesvirus 6B
ucagcuucuucuacuuuau

SEQ ID NO: 2048179 - RNA, 20 nt, Human herpesvirus 6B
uggaugucaagucuagacau

SEQ ID NO: 2048180 - RNA, 18 nt, Human herpesvirus 6B
ggacagaaaugagcaaca

SEQ ID NO: 2048181 - RNA, 14 nt, Human herpesvirus 6B
cuacgguaaucguu

SEQ ID NO: 2048182 - RNA, 20 nt, Human herpesvirus 6B
acaccucauaucaaacaacu

SEQ ID NO: 2048183 - RNA, 16 nt, Human herpesvirus 6B
cagaggaagaaaggag

SEQ ID NO: 2048184 - RNA, 22 nt, Human herpesvirus 6B
aaacuggauacuauugcuaaga

SEQ ID NO: 2048185 - RNA, 19 nt, Human herpesvirus 6B
caagguaaaggaaggcgua

SEQ ID NO: 2048186 - RNA, 18 nt, Human herpesvirus 6B
uacaugaaaacauucaga

SEQ ID NO: 2048187 - RNA, 11 nt, Human herpesvirus 6B
aucggaagagg

SEQ ID NO: 2048188 - RNA, 16 nt, Human herpesvirus 6B
caauaucguccucaga

SEQ ID NO: 2048189 - RNA, 19 nt, Human herpesvirus 6B
gggcauagaaagcggccag

SEQ ID NO: 2048190 - RNA, 20 nt, Human herpesvirus 6B
uccucguccguccccgccgc

SEQ ID NO: 2048191 - RNA, 15 nt, Human herpesvirus 6B
uagaagaagaaauac

SEQ ID NO: 2048192 - RNA, 14 nt, Human herpesvirus 6B
cuacaugccacaga

SEQ ID NO: 2048193 - RNA, 14 nt, Human herpesvirus 6B
uaaugaauuucaau

SEQ ID NO: 2048194 - RNA, 21 nt, Human herpesvirus 6B
aaauauuggauuuuacgcaaa

SEQ ID NO: 2048195 - RNA, 19 nt, Human herpesvirus 6B
aaagucguuacaguaaaaa

SEQ ID NO: 2048196 - RNA, 18 nt, Human herpesvirus 6B
aaaggucagaugcaaaaa

SEQ ID NO: 2048197 - RNA, 12 nt, Human herpesvirus 6B
aaagguguuaaa

SEQ ID NO: 2048198 - RNA, 22 nt, Human herpesvirus 6B
aaagauggaaaauuuauaaaaa

SEQ ID NO: 2048199 - RNA, 21 nt, Human herpesvirus 6B
auggaucggaagacguuucua

SEQ ID NO: 2048200 - RNA, 14 nt, Human herpesvirus 6B
auggcguuccgaau

SEQ ID NO: 2048201 - RNA, 15 nt, Human herpesvirus 6B
caaaaaauguuaaaa

SEQ ID NO: 2048202 - RNA, 20 nt, Human herpesvirus 6B
caaagauagacagugaaaaa

SEQ ID NO: 2048203 - RNA, 19 nt, Human herpesvirus 6B
caagccgugcuuccagaga

SEQ ID NO: 2048204 - RNA, 20 nt, Human herpesvirus 6B
caagucgccucacuguaaaa

SEQ ID NO: 2048205 - RNA, 18 nt, Human herpesvirus 6B
ccaaaguaggcacacaug

SEQ ID NO: 2048206 - RNA, 11 nt, Human herpesvirus 6B
cauguuuacug

SEQ ID NO: 2048207 - RNA, 19 nt, Human herpesvirus 6B
ccauaccgggacagcaccc

SEQ ID NO: 2048208 - RNA, 20 nt, Human herpesvirus 6B
ucaguguuugccaaccaaau

SEQ ID NO: 2048209 - RNA, 19 nt, Human herpesvirus 6B
uccaaguuuuuaugcaacg

SEQ ID NO: 2048210 - RNA, 22 nt, Human herpesvirus 6B
ggggacggacagagcggagagg

SEQ ID NO: 2048211 - RNA, 19 nt, Human herpesvirus 6B
ggggaggaggaggaagagg

SEQ ID NO: 2048212 - RNA, 17 nt, Human herpesvirus 6B
acgcguguuuuggaauu

SEQ ID NO: 2048213 - RNA, 16 nt, Human herpesvirus 6B
agacaagggugugaaa

SEQ ID NO: 2048214 - RNA, 22 nt, Human herpesvirus 6B
agacaugagcgagaauguugaa

SEQ ID NO: 2048215 - RNA, 21 nt, Human herpesvirus 6B
acuuuguguaaccugagaauu

SEQ ID NO: 2048216 - RNA, 17 nt, Human herpesvirus 6B
ccgcaucgcaccgcaga

SEQ ID NO: 2048217 - RNA, 19 nt, Human herpesvirus 6B
cagaaguuauagugaaaaa

SEQ ID NO: 2048218 - RNA, 19 nt, Human herpesvirus 6B
aagacuuagcuagacgugu

SEQ ID NO: 2048219 - RNA, 19 nt, Human herpesvirus 6B
aagaugucgcuguuuuuca

SEQ ID NO: 2048220 - RNA, 22 nt, Human herpesvirus 6B
aagauugcgucuuuuguaaaga

SEQ ID NO: 2048221 - RNA, 23 nt, Human herpesvirus 6B
aguauguauaauauaaauucuua

SEQ ID NO: 2048222 - RNA, 14 nt, Human herpesvirus 6B
aguauaaauucuuu

SEQ ID NO: 2048223 - RNA, 12 nt, Human herpesvirus 6B
aguaaaaaagcc

SEQ ID NO: 2048224 - RNA, 19 nt, Human herpesvirus 6B
agccuugauuuuugagauu

SEQ ID NO: 2048225 - RNA, 19 nt, Human herpesvirus 6B
caucuaugcgugugaaagu

SEQ ID NO: 2048226 - RNA, 14 nt, Human herpesvirus 6B
caugauuguaauaa

SEQ ID NO: 2048227 - RNA, 21 nt, Human herpesvirus 6B
cgccuccgccaccaccgcuga

SEQ ID NO: 2048228 - RNA, 17 nt, Human herpesvirus 6B
cggagcaaccgcaguuc

SEQ ID NO: 2048229 - RNA, 15 nt, Human herpesvirus 6B
cggcaaccgcaguuc

SEQ ID NO: 2048230 - RNA, 18 nt, Human herpesvirus 6B
cgaagcgacgcaagccgu

SEQ ID NO: 2048231 - RNA, 18 nt, Human herpesvirus 6B
cgagacgguacagcgcgu

SEQ ID NO: 2048232 - RNA, 21 nt, Human herpesvirus 6B
cgagacuggccgcauacaccc

SEQ ID NO: 2048233 - RNA, 22 nt, Human herpesvirus 6B
cgagaguccgaacgaacgccgu

SEQ ID NO: 2048234 - RNA, 16 nt, Human herpesvirus 6B
cgagauucuuuaaaga

SEQ ID NO: 2048235 - RNA, 20 nt, Human herpesvirus 6B
ccagaguuaaugcauacaug

SEQ ID NO: 2048236 - RNA, 20 nt, Human herpesvirus 6B
guaaucucuagguaaacuuc

SEQ ID NO: 2048237 - RNA, 18 nt, Human herpesvirus 6B
gcgacgggcagggcgggc

SEQ ID NO: 2048238 - RNA, 22 nt, Human herpesvirus 6B
gcccuccuggguacggcaaacu

SEQ ID NO: 2048239 - RNA, 20 nt, Human herpesvirus 6B
gcauagaucgggacugcuug

SEQ ID NO: 2048240 - RNA, 19 nt, Human herpesvirus 6B
cuuagauaugucguuucau

SEQ ID NO: 2048241 - RNA, 15 nt, Human herpesvirus 6B
cuucaauguuuuuca

SEQ ID NO: 2048242 - RNA, 16 nt, Human herpesvirus 6B
gaccguaucccucccu

SEQ ID NO: 2048243 - RNA, 19 nt, Human herpesvirus 6B
uuuuauagccggugucauc

SEQ ID NO: 2048244 - RNA, 18 nt, Human herpesvirus 6B
acugaucgguauuugcga

SEQ ID NO: 2048245 - RNA, 12 nt, Human herpesvirus 6B
acuaccgaugcu

SEQ ID NO: 2048246 - RNA, 14 nt, Human herpesvirus 6B
cagagagccgcaga

SEQ ID NO: 2048247 - RNA, 20 nt, Human herpesvirus 6B
cacgguagucguggcggagc

SEQ ID NO: 2048248 - RNA, 22 nt, Human herpesvirus 6B
cagaucuucgauuacuguaaaa

SEQ ID NO: 2048249 - RNA, 11 nt, Human herpesvirus 6B
gauuguucgcu

SEQ ID NO: 2048250 - RNA, 12 nt, Human herpesvirus 6B
gauucgacauca

SEQ ID NO: 2048251 - RNA, 20 nt, Human herpesvirus 6B
gauuuuucugccuauuucuc

SEQ ID NO: 2048252 - RNA, 21 nt, Human herpesvirus 6B
gauuuuugcgcaauucuucuc

SEQ ID NO: 2048253 - RNA, 20 nt, Human herpesvirus 6B
cgugaaaacgcuucagauuc

SEQ ID NO: 2048254 - RNA, 19 nt, Human herpesvirus 6B
gcacagaaucgagaucguu

SEQ ID NO: 2048255 - RNA, 13 nt, Human herpesvirus 6B
uugcuguuuacga

SEQ ID NO: 2048256 - RNA, 18 nt, Human herpesvirus 6B
uugcauucaguauuacga

SEQ ID NO: 2048257 - RNA, 16 nt, Human herpesvirus 6B
uuccuguccgugagac

SEQ ID NO: 2048258 - RNA, 16 nt, Human herpesvirus 6B
uucuaauuauaaaugu

SEQ ID NO: 2048259 - RNA, 17 nt, Human herpesvirus 6B
uucuuugacuauuucga

SEQ ID NO: 2048260 - RNA, 19 nt, Human herpesvirus 6B
uguuuccagagcacacaua

SEQ ID NO: 2048261 - RNA, 12 nt, Human herpesvirus 6B
uuaaucauucga

SEQ ID NO: 2048262 - RNA, 16 nt, Human herpesvirus 6B
uuacgugccguguuac

SEQ ID NO: 2048263 - RNA, 13 nt, Human herpesvirus 6B
uuacucauacaga

SEQ ID NO: 2048264 - RNA, 19 nt, Human herpesvirus 6B
uuaugcaacugcauuuucu

SEQ ID NO: 2048265 - RNA, 20 nt, Human herpesvirus 6B
uuaccagagauacgugauac

SEQ ID NO: 2048266 - RNA, 14 nt, Human herpesvirus 6B
uuauugacugugaa

SEQ ID NO: 2048267 - RNA, 18 nt, Human herpesvirus 6B
uuaucaaauuugcauuca

SEQ ID NO: 2048268 - RNA, 20 nt, Human herpesvirus 6B
ugguaauccaugaacuacag

SEQ ID NO: 2048269 - RNA, 21 nt, Human herpesvirus 6B
uguaauuuggaucugugcgcc

SEQ ID NO: 2048270 - RNA, 13 nt, Human herpesvirus 6B
guuaaaagggaag

SEQ ID NO: 2048271 - RNA, 21 nt, Human herpesvirus 6B
guuacauuugguuugacauua

SEQ ID NO: 2048272 - RNA, 20 nt, Human herpesvirus 6B
guuaguggguaccgcgguug

SEQ ID NO: 2048273 - RNA, 17 nt, Human herpesvirus 6B
uagaacauaagggacag

SEQ ID NO: 2048274 - RNA, 10 nt, Human herpesvirus 6B
uacuuccugu

SEQ ID NO: 2048275 - RNA, 16 nt, Human herpesvirus 6B
ugauaaacuguacgcc

SEQ ID NO: 2048276 - RNA, 18 nt, Human herpesvirus 6B
gugaaaaacacggcgccu

SEQ ID NO: 2048277 - RNA, 21 nt, Human herpesvirus 6B
gugcaacaaagagcuuuaaag

SEQ ID NO: 2048278 - RNA, 20 nt, Human herpesvirus 6B
gugaccguaucccucccugc

SEQ ID NO: 2048279 - RNA, 17 nt, Human herpesvirus 6B
gcguguaauuguugaaa

SEQ ID NO: 2048280 - RNA, 18 nt, Human herpesvirus 6B
cggggcgcaccggcgaca

SEQ ID NO: 2048281 - RNA, 19 nt, Human herpesvirus 6B
cuuuccgcccuccguuuca

SEQ ID NO: 2048282 - RNA, 14 nt, Human herpesvirus 6B
cuuugauaaaacca

SEQ ID NO: 2048283 - RNA, 18 nt, Human herpesvirus 6B
ccugauccaugagcaccc

SEQ ID NO: 2048284 - RNA, 20 nt, Human herpesvirus 6B
cgacgcagauuuacgacacg

SEQ ID NO: 2048285 - RNA, 14 nt, Human herpesvirus 6B
caggauuuguaaaa

SEQ ID NO: 2048286 - RNA, 15 nt, Human herpesvirus 6B
caggauuuguaaaaa

SEQ ID NO: 2048287 - RNA, 19 nt, Human herpesvirus 6B
cagcugcaugguccacaga

SEQ ID NO: 2048288 - RNA, 13 nt, Human herpesvirus 6B
caauucauuguac

SEQ ID NO: 2048289 - RNA, 18 nt, Human herpesvirus 6B
caauguccgaaguaaaaa

SEQ ID NO: 2048290 - RNA, 15 nt, Human herpesvirus 6B
auacggaaguugaaa

SEQ ID NO: 2048291 - RNA, 21 nt, Human herpesvirus 6B
agggacccacacgcggggauc

SEQ ID NO: 2048292 - RNA, 20 nt, Human herpesvirus 6B
aucaucgccauagugaaaga

SEQ ID NO: 2048293 - RNA, 19 nt, Human herpesvirus 6B
auauuauaaggucauuuua

SEQ ID NO: 2048294 - RNA, 21 nt, Human herpesvirus 6B
auaucugaaaucgcauuucuc

SEQ ID NO: 2048295 - RNA, 14 nt, Human herpesvirus 6B
auauggcgaaugcc

SEQ ID NO: 2048296 - RNA, 23 nt, Human herpesvirus 6B
aucaugauaaauuguuuccgaau

SEQ ID NO: 2048297 - RNA, 21 nt, Human herpesvirus 6B
caagucgccucacuguaaaag

SEQ ID NO: 2048298 - RNA, 23 nt, Human herpesvirus 6B
caacgugugaaaacuaguaaaaa

SEQ ID NO: 2048299 - RNA, 19 nt, Human herpesvirus 6B
aagguaugaaacgaaugcc

SEQ ID NO: 2048300 - RNA, 15 nt, Human herpesvirus 6B
acagacagggggauc

SEQ ID NO: 2048301 - RNA, 13 nt, Human herpesvirus 6B
acagcaguuuuuu

SEQ ID NO: 2048302 - RNA, 16 nt, Human herpesvirus 6B
aauccuggauuucgac

SEQ ID NO: 2048303 - RNA, 17 nt, Human herpesvirus 6B
aaugcagcaguuuuugu

SEQ ID NO: 2048304 - RNA, 20 nt, Human herpesvirus 6B
acauuucgguuuaauagauu

SEQ ID NO: 2048305 - RNA, 15 nt, Human herpesvirus 6B
ucgcccguucccggg

SEQ ID NO: 2048306 - RNA, 21 nt, Human herpesvirus 6B
uccggccaauucauuguacga

SEQ ID NO: 2048307 - RNA, 19 nt, Human herpesvirus 6B
gcgcgugaccguaucccuc

SEQ ID NO: 2048308 - RNA, 13 nt, Human herpesvirus 6B
uaaauaaucaacu

SEQ ID NO: 2048309 - RNA, 19 nt, Human herpesvirus 6B
uaaacuuaacuuaucaacu

SEQ ID NO: 2048310 - RNA, 9 nt, Human herpesvirus 6B
uaugagaau

SEQ ID NO: 2048311 - RNA, 14 nt, Human herpesvirus 6B
ucaauuucuaaaga

SEQ ID NO: 2048312 - RNA, 19 nt, Human herpesvirus 6B
uggaaacacuuucuucgcc

SEQ ID NO: 2048313 - RNA, 14 nt, Human herpesvirus 6B
ugccggcgcgcaaa

SEQ ID NO: 2048314 - RNA, 20 nt, Human herpesvirus 6B
ucacgcggaccgacgacaaa

SEQ ID NO: 2048315 - RNA, 19 nt, Human herpesvirus 6B
ucagcggguaccgcgguug

SEQ ID NO: 2048316 - RNA, 23 nt, Human herpesvirus 6B
ugagacaucgagauucuuuaaag

SEQ ID NO: 2048317 - RNA, 12 nt, Human herpesvirus 6B
gcuuggccaacu

SEQ ID NO: 2048318 - RNA, 22 nt, Human herpesvirus 6B
ggaggggaauacaccggagacc

SEQ ID NO: 2048319 - RNA, 15 nt, Human herpesvirus 6B
ggauuacaagggaaa

SEQ ID NO: 2048320 - RNA, 12 nt, Human herpesvirus 6B
ggcaaccgcagu

SEQ ID NO: 2048321 - RNA, 14 nt, Human herpesvirus 6B
gagaaagagggaag

SEQ ID NO: 2048322 - RNA, 12 nt, Human herpesvirus 6B
gccaauucauug

SEQ ID NO: 2048323 - RNA, 22 nt, Human herpesvirus 6B
cgguuugucuugcaaacagcuu

SEQ ID NO: 2048324 - RNA, 16 nt, Human herpesvirus 6B
gaaacauaaacgcaaa

SEQ ID NO: 2048325 - RNA, 22 nt, Human herpesvirus 6B
gaacaaaaggucagaugcaaaa

SEQ ID NO: 2048326 - RNA, 20 nt, Human herpesvirus 6B
gacagaucagcauuuggcag

SEQ ID NO: 2048327 - RNA, 22 nt, Human herpesvirus 6B
gaagggauggcagaucuugaaa

SEQ ID NO: 2048328 - RNA, 15 nt, Human herpesvirus 6B
cggcggauggagccc

SEQ ID NO: 2048329 - RNA, 19 nt, Human herpesvirus 6B
auuguguguccugagaaug

SEQ ID NO: 2048330 - RNA, 14 nt, Human herpesvirus 6B
auuaucgacauaca

SEQ ID NO: 2048331 - RNA, 22 nt, Human herpesvirus 6B
auuuuuuauuaguauccuucuc

SEQ ID NO: 2048332 - RNA, 14 nt, Human herpesvirus 6B
cauauaaacagauu

SEQ ID NO: 2048333 - RNA, 22 nt, Human herpesvirus 6B
cauauauugaaauuuguaacaa

SEQ ID NO: 2048334 - RNA, 20 nt, Human herpesvirus 6B
aauuccauacggucgaauga

SEQ ID NO: 2048335 - RNA, 19 nt, Human herpesvirus 6B
aauuccauaugucgaaugc

SEQ ID NO: 2048336 - RNA, 16 nt, Human herpesvirus 6B
aauguuccaauugauu

SEQ ID NO: 2048337 - RNA, 19 nt, Human herpesvirus 6B
aauggauuuuagauucgac

SEQ ID NO: 2048338 - RNA, 20 nt, Human herpesvirus 6B
aauuuuaaauauuaauaguu

SEQ ID NO: 2048339 - RNA, 16 nt, Human herpesvirus 6B
aauuaaucauuucgau

SEQ ID NO: 2048340 - RNA, 22 nt, Human herpesvirus 6B
aauuuguucgcacaaaaugauu

SEQ ID NO: 2048341 - RNA, 14 nt, Human herpesvirus 6B
aauuuaaaauaauu

SEQ ID NO: 2048342 - RNA, 14 nt, Human herpesvirus 6B
aauuuauauucgac

SEQ ID NO: 2048343 - RNA, 14 nt, Human herpesvirus 6B
acaauguuccgaaa

SEQ ID NO: 2048344 - RNA, 15 nt, Human herpesvirus 6B
auaaaguggccauaa

SEQ ID NO: 2048345 - RNA, 15 nt, Human herpesvirus 6B
auaaaucgccauaau

SEQ ID NO: 2048346 - RNA, 16 nt, Human herpesvirus 6B
aggaacugaugagaaa

SEQ ID NO: 2048347 - RNA, 20 nt, Human herpesvirus 6B
agcgcccgaugccaacgcga

SEQ ID NO: 2048348 - RNA, 13 nt, Human herpesvirus 6B
agaggcgcgggac

SEQ ID NO: 2048349 - RNA, 20 nt, Human herpesvirus 6B
agaggguuccuccgcgggac

SEQ ID NO: 2048350 - RNA, 17 nt, Human herpesvirus 6B
acgacgcagauuuacga

SEQ ID NO: 2048351 - RNA, 19 nt, Human herpesvirus 6B
aacgauuuucuauuaaaaa

SEQ ID NO: 2048352 - RNA, 21 nt, Human herpesvirus 6B
aaccgcaguuccuguuuuucu

SEQ ID NO: 2048353 - RNA, 21 nt, Human herpesvirus 6B
aaccgcaguuucuguuuuucu

SEQ ID NO: 2048354 - RNA, 15 nt, Human herpesvirus 6B
aaccauguuuuuacu

SEQ ID NO: 2048355 - RNA, 14 nt, Human herpesvirus 6B
aaccacguuuuucc

SEQ ID NO: 2048356 - RNA, 20 nt, Human herpesvirus 6B
ucggcgaauguacacaguca

SEQ ID NO: 2048357 - RNA, 14 nt, Human herpesvirus 6B
gcgcgcgcgcguug

SEQ ID NO: 2048358 - RNA, 14 nt, Human herpesvirus 6B
gcgcaccggcgaca

SEQ ID NO: 2048359 - RNA, 19 nt, Human herpesvirus 6B
gauaccgaaucggaagagg

SEQ ID NO: 2048360 - RNA, 15 nt, Human herpesvirus 6B
gcaccgagggcgggc

SEQ ID NO: 2048361 - RNA, 13 nt, Human herpesvirus 6B
gagcaaccgcagu

SEQ ID NO: 2048362 - RNA, 23 nt, Human herpesvirus 6B
ccggcgacacgcgcggaccacuc

SEQ ID NO: 2048363 - RNA, 12 nt, Human
aaaaaauuuaaa

SEQ ID NO: 2048364 - RNA, 19 nt, Human
aaaaacagcauugcuuucu

SEQ ID NO: 2048365 - RNA, 20 nt, Human
aaaaacagcauugcuuucug

SEQ ID NO: 2048366 - RNA, 21 nt, Human
aaaaacagcauugcuuucuga

SEQ ID NO: 2048367 - RNA, 19 nt, Human
aaaaacagccucacagaag

SEQ ID NO: 2048368 - RNA, 16 nt, Human
aaaaaauuuccaguga

SEQ ID NO: 2048369 - RNA, 11 nt, Human
aaaaaauuuug

SEQ ID NO: 2048370 - RNA, 19 nt, Human
aaaaaauuuuguaauuuuc

SEQ ID NO: 2048371 - RNA, 14 nt, Human
aaaaacacaaaagu

SEQ ID NO: 2048372 - RNA, 11 nt, Human
aaaaagaaugu

SEQ ID NO: 2048373 - RNA, 13 nt, Human
aaaaagaauguca

SEQ ID NO: 2048374 - RNA, 22 nt, Human
aaaaagauggccuuugcuuaug

SEQ ID NO: 2048375 - RNA, 18 nt, Human
aaaaacaauauuuauugu

SEQ ID NO: 2048376 - RNA, 12 nt, Human
aaaaacugaaug

SEQ ID NO: 2048377 - RNA, 19 nt, Human
aaaaacuucaguaaguacg

SEQ ID NO: 2048378 - RNA, 12 nt, Human
aaaaacuuguaa

SEQ ID NO: 2048379 - RNA, 18 nt, Human
aaaaacuuguaaaugcug

SEQ ID NO: 2048380 - RNA, 12 nt, Human
aaaaacuuuuau

SEQ ID NO: 2048381 - RNA, 17 nt, Human
aaaaacuuuuauaaauu

SEQ ID NO: 2048382 - RNA, 21 nt, Human
aaaaagaaucugcauuuagca

SEQ ID NO: 2048383 - RNA, 12 nt, Human
aaaacaaagaag

SEQ ID NO: 2048384 - RNA, 10 nt, Human
aaaacaaaau

SEQ ID NO: 2048385 - RNA, 12 nt, Human
aaaacaaaaaac

SEQ ID NO: 2048386 - RNA, 14 nt, Human
aaaacaaaaaacaa

SEQ ID NO: 2048387 - RNA, 15 nt, Human
aaaacaaaaaacaau

SEQ ID NO: 2048388 - RNA, 14 nt, Human
aaaaauuuuguaau

SEQ ID NO: 2048389 - RNA, 19 nt, Human
aaaaauuuuguaauuuucu

SEQ ID NO: 2048390 - RNA, 23 nt, Human
aaaacaaaaauucacaagcugcc

SEQ ID NO: 2048391 - RNA, 12 nt, Human
aaaacaacaaaa

SEQ ID NO: 2048392 - RNA, 13 nt, Human
aaaacaacaaaaa

SEQ ID NO: 2048393 - RNA, 21 nt, Human
aaaaauuuaagcauuguuugc

SEQ ID NO: 2048394 - RNA, 22 nt, Human
aaaaauuuaagcauuguuugcu

SEQ ID NO: 2048395 - RNA, 23 nt, Human
aaaaauuguuucaaaauaaaaac

SEQ ID NO: 2048396 - RNA, 14 nt, Human
aaaaauuuaagcau

SEQ ID NO: 2048397 - RNA, 15 nt, Human
aaaaauuuaagcauu

SEQ ID NO: 2048398 - RNA, 16 nt, Human
aaaaauuuaagcauug

SEQ ID NO: 2048399 - RNA, 18 nt, Human
aaaaauuuaagcauuguu

SEQ ID NO: 2048400 - RNA, 20 nt, Human
aaaaauuuaagcauuguuug

SEQ ID NO: 2048401 - RNA, 12 nt, Human
aaaaauuugaac

SEQ ID NO: 2048402 - RNA, 20 nt, Human
aaaaauuugaaccaaaacau

SEQ ID NO: 2048403 - RNA, 23 nt, Human
aaaaauuuggaauucuguucauu

SEQ ID NO: 2048404 - RNA, 21 nt, Human
aaaaauuuuuggauugacagu

SEQ ID NO: 2048405 - RNA, 22 nt, Human
aaaaauuuuuggauugacagua

SEQ ID NO: 2048406 - RNA, 22 nt, Human
aaaaauuuuauaaaauuaagca

SEQ ID NO: 2048407 - RNA, 15 nt, Human
aaaacaauauuguuu

SEQ ID NO: 2048408 - RNA, 17 nt, Human
aaaacaauauuguuucu

SEQ ID NO: 2048409 - RNA, 18 nt, Human
aaaacaauauuguuucua

SEQ ID NO: 2048410 - RNA, 14 nt, Human
aaaacaauauuuau

SEQ ID NO: 2048411 - RNA, 17 nt, Human
aaaacaauauuuauugu

SEQ ID NO: 2048412 - RNA, 19 nt, Human
aaaacaauauuuauuguau

SEQ ID NO: 2048413 - RNA, 20 nt, Human
aaaacaauauuuauuguauu

SEQ ID NO: 2048414 - RNA, 23 nt, Human
aaaacaauauuuauuguauuuua

SEQ ID NO: 2048415 - RNA, 13 nt, Human
aaaacaaugaaga

SEQ ID NO: 2048416 - RNA, 18 nt, Human
aaaacaagaaaguuuccc

SEQ ID NO: 2048417 - RNA, 17 nt, Human
aaaacaagaaaguuucc

SEQ ID NO: 2048418 - RNA, 18 nt, Human
aaaacaacuucuuuguaa

SEQ ID NO: 2048419 - RNA, 13 nt, Human
aagugguauagaa

SEQ ID NO: 2048420 - RNA, 17 nt, Human
aagugguauagaaaugc

SEQ ID NO: 2048421 - RNA, 15 nt, Human
aaguuguuaauaaaa

SEQ ID NO: 2048422 - RNA, 17 nt, Human
aaguuguuaacuaaauu

SEQ ID NO: 2048423 - RNA, 15 nt, Human
aaguuguuucauuga

SEQ ID NO: 2048424 - RNA, 22 nt, Human
aauaaacuguccucuuucagaa

SEQ ID NO: 2048425 - RNA, 17 nt, Human
aauaaacuguguuuacu

SEQ ID NO: 2048426 - RNA, 22 nt, Human
aauaaguuaacuauuuuauuuu

SEQ ID NO: 2048427 - RNA, 23 nt, Human
aauaaaauuaaagcugaaaacug

SEQ ID NO: 2048428 - RNA, 21 nt, Human
aauaaaaugugauuuuucuga

SEQ ID NO: 2048429 - RNA, 12 nt, Human
aauaaaauuaag

SEQ ID NO: 2048430 - RNA, 14 nt, Human
aauaaaauuaagaa

SEQ ID NO: 2048431 - RNA, 17 nt, Human
aauaaaauuaagaaugu

SEQ ID NO: 2048432 - RNA, 13 nt, Human
aauaaaaugugau

SEQ ID NO: 2048433 - RNA, 14 nt, Human
aauaaaaugugauu

SEQ ID NO: 2048434 - RNA, 13 nt, Human
aauaaucggccca

SEQ ID NO: 2048435 - RNA, 16 nt, Human
aauaaucggcccacag

SEQ ID NO: 2048436 - RNA, 15 nt, Human
aauaaacuauuggaa

SEQ ID NO: 2048437 - RNA, 22 nt, Human
aauaaugaauggacucaaacug

SEQ ID NO: 2048438 - RNA, 14 nt, Human
aauaaucuuugggu

SEQ ID NO: 2048439 - RNA, 13 nt, Human
aauaauaaacuuu

SEQ ID NO: 2048440 - RNA, 15 nt, Human
aauaaugucuuguua

SEQ ID NO: 2048441 - RNA, 18 nt, Human
aauaaugucuuguuaaua

SEQ ID NO: 2048442 - RNA, 20 nt, Human
aauaaugucuuguuaauauu

SEQ ID NO: 2048443 - RNA, 23 nt, Human
aauaaugucuuguuaauauucuu

SEQ ID NO: 2048444 - RNA, 19 nt, Human
aauaauguacaucuggccu

SEQ ID NO: 2048445 - RNA, 22 nt, Human
aagugcugggauuacaggugug

SEQ ID NO: 2048446 - RNA, 16 nt, Human
aagucucugcuggccc

SEQ ID NO: 2048447 - RNA, 21 nt, Human
aagucucugcuggcccagcca

SEQ ID NO: 2048448 - RNA, 11 nt, Human
aagucucugug

SEQ ID NO: 2048449 - RNA, 12 nt, Human
aagucucuguga

SEQ ID NO: 2048450 - RNA, 14 nt, Human
aagucucugugaau

SEQ ID NO: 2048451 - RNA, 14 nt, Human
aagucuccuucccc

SEQ ID NO: 2048452 - RNA, 17 nt, Human
aagucucuagguucuga

SEQ ID NO: 2048453 - RNA, 13 nt, Human
aagucucuauuua

SEQ ID NO: 2048454 - RNA, 14 nt, Human
aagucucuauuuaa

SEQ ID NO: 2048455 - RNA, 15 nt, Human
aagucucuauuuaaa

SEQ ID NO: 2048456 - RNA, 18 nt, Human
aagucucuauuuaaauuc

SEQ ID NO: 2048457 - RNA, 19 nt, Human
aagucucuauuuaaauucu

SEQ ID NO: 2048458 - RNA, 20 nt, Human
aagucucuauuuaaauucuu

SEQ ID NO: 2048459 - RNA, 15 nt, Human
aagucucugcuggcc

SEQ ID NO: 2048460 - RNA, 20 nt, Human
aagucccaccgguugcuucu

SEQ ID NO: 2048461 - RNA, 23 nt, Human
aagucccaccgguugcuucuggg

SEQ ID NO: 2048462 - RNA, 14 nt, Human
aaguccccaggccc

SEQ ID NO: 2048463 - RNA, 18 nt, Human
aaguccccaggccccagg

SEQ ID NO: 2048464 - RNA, 21 nt, Human
aaguccccaggccccaggaag

SEQ ID NO: 2048465 - RNA, 23 nt, Human
aaguccccaggccccaggaagcc

SEQ ID NO: 2048466 - RNA, 19 nt, Human
aagucccugacucucugug

SEQ ID NO: 2048467 - RNA, 22 nt, Human
aaguccccaggccccaggaagc

SEQ ID NO: 2048468 - RNA, 16 nt, Human
aagucuccagcccacg

SEQ ID NO: 2048469 - RNA, 16 nt, Human
aagucuuagauguaua

SEQ ID NO: 2048470 - RNA, 11 nt, Human
aaguacuucuu

SEQ ID NO: 2048471 - RNA, 18 nt, Human
aaguauauaaauuggcuu

SEQ ID NO: 2048472 - RNA, 12 nt, Human
aaguaucagaaa

SEQ ID NO: 2048473 - RNA, 13 nt, Human
aaguaucagaaag

SEQ ID NO: 2048474 - RNA, 22 nt, Human
aaguauauaauuuuuuuauguu

SEQ ID NO: 2048475 - RNA, 11 nt, Human
aaguauauaua

SEQ ID NO: 2048476 - RNA, 16 nt, Human
aaguauauauagaauc

SEQ ID NO: 2048477 - RNA, 13 nt, Human
aaguauauauuua

SEQ ID NO: 2048478 - RNA, 13 nt, Human
aaguaugugagug

SEQ ID NO: 2048479 - RNA, 18 nt, Human
aaguaugugagugugucc

SEQ ID NO: 2048480 - RNA, 19 nt, Human
aaguccaggucgggcucag

SEQ ID NO: 2048481 - RNA, 21 nt, Human
aaguccaggucgggcucagcu

SEQ ID NO: 2048482 - RNA, 16 nt, Human
aaguaucauggaaaua

SEQ ID NO: 2048483 - RNA, 17 nt, Human
aaguaucauggaaauau

SEQ ID NO: 2048484 - RNA, 21 nt, Human
aaguaucauggaaauauuaug

SEQ ID NO: 2048485 - RNA, 17 nt, Human
aaguaugagggaaaaug

SEQ ID NO: 2048486 - RNA, 21 nt, Human
aaguaugagggaaaaugagua

SEQ ID NO: 2048487 - RNA, 19 nt, Human
aaguaucuucguucuuguu

SEQ ID NO: 2048488 - RNA, 20 nt, Human
aagguuaauguucaucaucc

SEQ ID NO: 2048489 - RNA, 17 nt, Human
aagguucuuacugcuug

SEQ ID NO: 2048490 - RNA, 21 nt, Human
aagguucuucccuuuuacaua

SEQ ID NO: 2048491 - RNA, 17 nt, Human
aagguuguauugcauau

SEQ ID NO: 2048492 - RNA, 13 nt, Human
aagguuguauugc

SEQ ID NO: 2048493 - RNA, 22 nt, Human
aagguugacaauaaaugugcuu

SEQ ID NO: 2048494 - RNA, 22 nt, Human
aaggugggccuugcuaccucaa

SEQ ID NO: 2048495 - RNA, 18 nt, Human
aaggugggcugagcccug

SEQ ID NO: 2048496 - RNA, 19 nt, Human
aaggugggcugagcccugg

SEQ ID NO: 2048497 - RNA, 17 nt, Human
aaggugggccuugcuac

SEQ ID NO: 2048498 - RNA, 16 nt, Human
aaggugggcugagccc

SEQ ID NO: 2048499 - RNA, 15 nt, Human
aagguuaauaaagua

SEQ ID NO: 2048500 - RNA, 16 nt, Human
aagguuaauaaaguaa

SEQ ID NO: 2048501 - RNA, 11 nt, Human
aaggugggagg

SEQ ID NO: 2048502 - RNA, 20 nt, Human
aaggugcuguugucauugcu

SEQ ID NO: 2048503 - RNA, 21 nt, Human
aaggugcuguugucauugcuu

SEQ ID NO: 2048504 - RNA, 22 nt, Human
aaggugcuguugucauugcuuu

SEQ ID NO: 2048505 - RNA, 23 nt, Human
aaggugcuguugucauugcuuua

SEQ ID NO: 2048506 - RNA, 20 nt, Human
aagguggacuggaaggggcc

SEQ ID NO: 2048507 - RNA, 14 nt, Human
aagguggaguggau

SEQ ID NO: 2048508 - RNA, 15 nt, Human
aagguggaguggaug

SEQ ID NO: 2048509 - RNA, 21 nt, Human
aagaaauuuccacucaggucu

SEQ ID NO: 2048510 - RNA, 17 nt, Human
aagaaauuuaaaagaca

SEQ ID NO: 2048511 - RNA, 21 nt, Human
aagaacacaaagcggggggag

SEQ ID NO: 2048512 - RNA, 14 nt, Human
aagaacaacggcaa

SEQ ID NO: 2048513 - RNA, 14 nt, Human
aagaacaagaauuu

SEQ ID NO: 2048514 - RNA, 12 nt, Human
aagaacauagaa

SEQ ID NO: 2048515 - RNA, 13 nt, Human
aagaaaugcacaa

SEQ ID NO: 2048516 - RNA, 14 nt, Human
aagaaaugcacaau

SEQ ID NO: 2048517 - RNA, 16 nt, Human
aagaaaugcacaaugu

SEQ ID NO: 2048518 - RNA, 19 nt, Human
aagaaaugcacaaugucuu

SEQ ID NO: 2048519 - RNA, 15 nt, Human
aagaaauucccugga

SEQ ID NO: 2048520 - RNA, 16 nt, Human
aagaacauagaacucu

SEQ ID NO: 2048521 - RNA, 18 nt, Human
aagaacauccaaggagaa

SEQ ID NO: 2048522 - RNA, 16 nt, Human
aagauugcuuaaaaua

SEQ ID NO: 2048523 - RNA, 17 nt, Human
aagauuuaauuugccaa

SEQ ID NO: 2048524 - RNA, 18 nt, Human
aagauuuaauuugccaaa

SEQ ID NO: 2048525 - RNA, 23 nt, Human
aagauuuaauuugccaaaauaau

SEQ ID NO: 2048526 - RNA, 14 nt, Human
aagauuuauuuugu

SEQ ID NO: 2048527 - RNA, 23 nt, Human
aagauuuauuuuguuaaaaucuc

SEQ ID NO: 2048528 - RNA, 17 nt, Human
aagauuuggaauaaagu

SEQ ID NO: 2048529 - RNA, 15 nt, Human
aagauuugcccauuu

SEQ ID NO: 2048530 - RNA, 21 nt, Human
aagauuugcccauuuacacuu

SEQ ID NO: 2048531 - RNA, 16 nt, Human
aagauuugcuuuaauu

SEQ ID NO: 2048532 - RNA, 13 nt, Human
aagauuucuugag

SEQ ID NO: 2048533 - RNA, 21 nt, Human
aagauuuguacuacaguucuu

SEQ ID NO: 2048534 - RNA, 14 nt, Human
aagcagaggaagga

SEQ ID NO: 2048535 - RNA, 13 nt, Human
aagauuuuaaauu

SEQ ID NO: 2048536 - RNA, 16 nt, Human
aagcaggaagcucaga

SEQ ID NO: 2048537 - RNA, 11 nt, Human
aagcaggaagc

SEQ ID NO: 2048538 - RNA, 12 nt, Human
aagcaggaagcu

SEQ ID NO: 2048539 - RNA, 13 nt, Human
aagcaggaagcuc

SEQ ID NO: 2048540 - RNA, 11 nt, Human
aagccagacag

SEQ ID NO: 2048541 - RNA, 13 nt, Human
aagccagaagcug

SEQ ID NO: 2048542 - RNA, 14 nt, Human
aagccagaagcuga

SEQ ID NO: 2048543 - RNA, 17 nt, Human
aagccagaagcugagca

SEQ ID NO: 2048544 - RNA, 20 nt, Human
aagccagaagcugagcacca

SEQ ID NO: 2048545 - RNA, 12 nt, Human
aagccagaagcu

SEQ ID NO: 2048546 - RNA, 21 nt, Human
aagccagcugcagcugggcug

SEQ ID NO: 2048547 - RNA, 15 nt, Human
aagccagcugccgac

SEQ ID NO: 2048548 - RNA, 21 nt, Human
aagccagcugccgaccagagc

SEQ ID NO: 2048549 - RNA, 23 nt, Human
aagccagcugccgaccagagccc

SEQ ID NO: 2048550 - RNA, 12 nt, Human
aagccauguuua

SEQ ID NO: 2048551 - RNA, 14 nt, Human
aagccauguuuaag

SEQ ID NO: 2048552 - RNA, 15 nt, Human
aagccauguuuaaga

SEQ ID NO: 2048553 - RNA, 16 nt, Human
aagccauguuuaagau

SEQ ID NO: 2048554 - RNA, 17 nt, Human
aagccauguuuaagauu

SEQ ID NO: 2048555 - RNA, 18 nt, Human
aagccauguuuaagauuu

SEQ ID NO: 2048556 - RNA, 19 nt, Human
aagccauguuuaagauuua

SEQ ID NO: 2048557 - RNA, 22 nt, Human
aagccauguuuaagauuuaauu

SEQ ID NO: 2048558 - RNA, 18 nt, Human
aagccauaauuguucuua

SEQ ID NO: 2048559 - RNA, 18 nt, Human
aagccaucauguaaauua

SEQ ID NO: 2048560 - RNA, 11 nt, Human
aagcuaaagag

SEQ ID NO: 2048561 - RNA, 17 nt, Human
aagcuaauaaaauauca

SEQ ID NO: 2048562 - RNA, 21 nt, Human
aagcugcacccucaggcaggu

SEQ ID NO: 2048563 - RNA, 20 nt, Human
aagcugcacccucaggcagg

SEQ ID NO: 2048564 - RNA, 22 nt, Human
aagcugcacccucaggcaggug

SEQ ID NO: 2048565 - RNA, 18 nt, Human
aagcuaauaaaauaucau

SEQ ID NO: 2048566 - RNA, 20 nt, Human
aagcuaauaaaauaucauuc

SEQ ID NO: 2048567 - RNA, 14 nt, Human
aagcugccucccug

SEQ ID NO: 2048568 - RNA, 15 nt, Human
aagcugccucccugu

SEQ ID NO: 2048569 - RNA, 17 nt, Human
aagcugccucccugucc

SEQ ID NO: 2048570 - RNA, 18 nt, Human
aagcugccucccugucca

SEQ ID NO: 2048571 - RNA, 19 nt, Human
aagcugccucccuguccac

SEQ ID NO: 2048572 - RNA, 20 nt, Human
aagcugccucccuguccacc

SEQ ID NO: 2048573 - RNA, 22 nt, Human
aagcugccucccuguccacccc

SEQ ID NO: 2048574 - RNA, 14 nt, Human
aagcugccuguagu

SEQ ID NO: 2048575 - RNA, 17 nt, Human
aaggauugugauauuuu

SEQ ID NO: 2048576 - RNA, 15 nt, Human
aaggacugcauggua

SEQ ID NO: 2048577 - RNA, 21 nt, Human
aaggacugcaugguaauuuau

SEQ ID NO: 2048578 - RNA, 22 nt, Human
aaggacugcaugguaauuuaua

SEQ ID NO: 2048579 - RNA, 22 nt, Human
aaggacugccgaccgaggcugg

SEQ ID NO: 2048580 - RNA, 21 nt, Human
aaggacccggaggggccuggc

SEQ ID NO: 2048581 - RNA, 18 nt, Human
aaggacccggaggggccu

SEQ ID NO: 2048582 - RNA, 13 nt, Human
aaggaccccucac

SEQ ID NO: 2048583 - RNA, 15 nt, Human
aaggaccccucaccu

SEQ ID NO: 2048584 - RNA, 20 nt, Human
aaggaccccucaccuugcaa

SEQ ID NO: 2048585 - RNA, 22 nt, Human
aagcuggccgaggguccuggcu

SEQ ID NO: 2048586 - RNA, 21 nt, Human
aagcuggccgaggguccuggc

SEQ ID NO: 2048587 - RNA, 11 nt, Human
aagcugggcag

SEQ ID NO: 2048588 - RNA, 15 nt, Human
aagcugcuaaaucuc

SEQ ID NO: 2048589 - RNA, 22 nt, Human
aagcugcuaaaucuccuauuuu

SEQ ID NO: 2048590 - RNA, 22 nt, Human
aagcugccuguaguuaggaaau

SEQ ID NO: 2048591 - RNA, 15 nt, Human
aagcugccuguaguu

SEQ ID NO: 2048592 - RNA, 16 nt, Human
aagcugccuguaguua

SEQ ID NO: 2048593 - RNA, 19 nt, Human
aagcugccuguaguuagga

SEQ ID NO: 2048594 - RNA, 21 nt, Human
aagcugccuguaguuaggaaa

SEQ ID NO: 2048595 - RNA, 18 nt, Human
aaggacauugcggacagc

SEQ ID NO: 2048596 - RNA, 19 nt, Human
aaggaccaacaagggcagu

SEQ ID NO: 2048597 - RNA, 12 nt, Human
aaggaccaggac

SEQ ID NO: 2048598 - RNA, 13 nt, Human
aaggaccaggacu

SEQ ID NO: 2048599 - RNA, 13 nt, Human
aagcugggcaggu

SEQ ID NO: 2048600 - RNA, 15 nt, Human
aaggcaccagccggg

SEQ ID NO: 2048601 - RNA, 19 nt, Human
aaggcacccacaaauaaau

SEQ ID NO: 2048602 - RNA, 20 nt, Human
aaggcacccacaaauaaaug

SEQ ID NO: 2048603 - RNA, 15 nt, Human
aaggcacaauauggg

SEQ ID NO: 2048604 - RNA, 22 nt, Human
aaggcaccuauaaaacagguca

SEQ ID NO: 2048605 - RNA, 21 nt, Human
aaugaugauccuaggcauuug

SEQ ID NO: 2048606 - RNA, 21 nt, Human
aaugaagauaccaucagcaaa

SEQ ID NO: 2048607 - RNA, 17 nt, Human
aaugaaccccacugggu

SEQ ID NO: 2048608 - RNA, 22 nt, Human
aaucugcuuuuuaaagaaugcu

SEQ ID NO: 2048609 - RNA, 17 nt, Human
aaucugcauuuagcaca

SEQ ID NO: 2048610 - RNA, 20 nt, Human
aaucugcauuuagcacaaaa

SEQ ID NO: 2048611 - RNA, 19 nt, Human
aaucugccuauugcagcug

SEQ ID NO: 2048612 - RNA, 23 nt, Human
aaugaaccacaucuugcucugcu

SEQ ID NO: 2048613 - RNA, 17 nt, Human
aaugaaccacaucuugc

SEQ ID NO: 2048614 - RNA, 16 nt, Human
aaugaaccacaucuug

SEQ ID NO: 2048615 - RNA, 19 nt, Human
aauccauguuaguuuuuac

SEQ ID NO: 2048616 - RNA, 22 nt, Human
aauccauguuaguuuuuacuuu

SEQ ID NO: 2048617 - RNA, 17 nt, Human
aaugaucuuuucaaguu

SEQ ID NO: 2048618 - RNA, 12 nt, Human
aaugaugaugac

SEQ ID NO: 2048619 - RNA, 23 nt, Human
aaugaugaugacgacgacaacga

SEQ ID NO: 2048620 - RNA, 17 nt, Human
aaugaugaugauaauga

SEQ ID NO: 2048621 - RNA, 18 nt, Human
aaugaugaugauaaugau

SEQ ID NO: 2048622 - RNA, 12 nt, Human
aaugaugcacau

SEQ ID NO: 2048623 - RNA, 13 nt, Human
aaugaugcacauu

SEQ ID NO: 2048624 - RNA, 18 nt, Human
aaugaugcacauuucaug

SEQ ID NO: 2048625 - RNA, 21 nt, Human
aaugaugauguggaagaacuu

SEQ ID NO: 2048626 - RNA, 11 nt, Human
aauauaauuau

SEQ ID NO: 2048627 - RNA, 14 nt, Human
aauauaauuaucgg

SEQ ID NO: 2048628 - RNA, 23 nt, Human
aauauaaggaaagcaauaaauga

SEQ ID NO: 2048629 - RNA, 18 nt, Human
aauauaaggaaagcaaua

SEQ ID NO: 2048630 - RNA, 19 nt, Human
aauauaaggaaagcaauaa

SEQ ID NO: 2048631 - RNA, 21 nt, Human
aauauaaggaaagcaauaaau

SEQ ID NO: 2048632 - RNA, 17 nt, Human
aauauggacucaguuuu

SEQ ID NO: 2048633 - RNA, 12 nt, Human
aauauaauuguu

SEQ ID NO: 2048634 - RNA, 13 nt, Human
aauauacacacag

SEQ ID NO: 2048635 - RNA, 18 nt, Human
aauauaauuuuuuagaga

SEQ ID NO: 2048636 - RNA, 22 nt, Human
aauauaacugccuuaaaacuuu

SEQ ID NO: 2048637 - RNA, 14 nt, Human
aaucaacugaaagu

SEQ ID NO: 2048638 - RNA, 16 nt, Human
aaucaacugaaagugu

SEQ ID NO: 2048639 - RNA, 17 nt, Human
aaucaacugaaaguguu

SEQ ID NO: 2048640 - RNA, 18 nt, Human
aaucaacugaaaguguuu

SEQ ID NO: 2048641 - RNA, 20 nt, Human
aaucaacugaaaguguuucc

SEQ ID NO: 2048642 - RNA, 14 nt, Human
aaucaacucuaaua

SEQ ID NO: 2048643 - RNA, 15 nt, Human
aaucaacagggcagc

SEQ ID NO: 2048644 - RNA, 22 nt, Human
aaucaaauuuguaggguuucua

SEQ ID NO: 2048645 - RNA, 20 nt, Human
aaucaaauuuguaggguuuc

SEQ ID NO: 2048646 - RNA, 12 nt, Human
aauauuaugcaa

SEQ ID NO: 2048647 - RNA, 17 nt, Human
aauauuaugcaaauucc

SEQ ID NO: 2048648 - RNA, 19 nt, Human
aauauuaugcaaauuccca

SEQ ID NO: 2048649 - RNA, 20 nt, Human
aauauuaugcaaauucccag

SEQ ID NO: 2048650 - RNA, 21 nt, Human
aauauuaugcaaauucccaga

SEQ ID NO: 2048651 - RNA, 20 nt, Human
aauauuaucuuuguaauuau

SEQ ID NO: 2048652 - RNA, 20 nt, Human
aaugucucuuuaaugucaca

SEQ ID NO: 2048653 - RNA, 22 nt, Human
aaugucuaguuguaacaccaug

SEQ ID NO: 2048654 - RNA, 16 nt, Human
aauggugcucauuuca

SEQ ID NO: 2048655 - RNA, 18 nt, Human
aauggugcucauuucaug

SEQ ID NO: 2048656 - RNA, 22 nt, Human
aaugguggggaacuauaaagaa

SEQ ID NO: 2048657 - RNA, 21 nt, Human
aauggugguuguuucuuccaa

SEQ ID NO: 2048658 - RNA, 23 nt, Human
aauggugguuguuucuuccaaga

SEQ ID NO: 2048659 - RNA, 22 nt, Human
aauggugaaaauaaaauaaagc

SEQ ID NO: 2048660 - RNA, 22 nt, Human
aauggucuuucuaaugugugaa

SEQ ID NO: 2048661 - RNA, 15 nt, Human
aauggucgcccagga

SEQ ID NO: 2048662 - RNA, 16 nt, Human
aauggucgcccaggag

SEQ ID NO: 2048663 - RNA, 22 nt, Human
aaugggaacugccucuuuccug

SEQ ID NO: 2048664 - RNA, 13 nt, Human
aaugguaaaauug

SEQ ID NO: 2048665 - RNA, 15 nt, Human
aaugguaaaauugca

SEQ ID NO: 2048666 - RNA, 17 nt, Human
aaugguaaaauugcaug

SEQ ID NO: 2048667 - RNA, 16 nt, Human
aaugguauaaauuuca

SEQ ID NO: 2048668 - RNA, 19 nt, Human
aaugguagucuaaccaaau

SEQ ID NO: 2048669 - RNA, 22 nt, Human
aaugguagucuaaccaaaugca

SEQ ID NO: 2048670 - RNA, 24 nt, Human
aaugguagucuaaccaaaugcauc

SEQ ID NO: 2048671 - RNA, 18 nt, Human
aauggcuuuggucucuug

SEQ ID NO: 2048672 - RNA, 21 nt, Human
aauggcuuuggucucuugcuu

SEQ ID NO: 2048673 - RNA, 12 nt, Human
aauuaaagaaaa

SEQ ID NO: 2048674 - RNA, 13 nt, Human
aauuaaagaaaau

SEQ ID NO: 2048675 - RNA, 14 nt, Human
aauuaaagaaaaua

SEQ ID NO: 2048676 - RNA, 17 nt, Human
aauuaaagaaaauaaaa

SEQ ID NO: 2048677 - RNA, 18 nt, Human
aauuaaagaaaauaaaau

SEQ ID NO: 2048678 - RNA, 14 nt, Human
aauuaaauaaaaua

SEQ ID NO: 2048679 - RNA, 17 nt, Human
aauuaaauaaaauaacc

SEQ ID NO: 2048680 - RNA, 14 nt, Human
aauuaaauauaugu

SEQ ID NO: 2048681 - RNA, 16 nt, Human
aauuaaauauauguau

SEQ ID NO: 2048682 - RNA, 19 nt, Human
aauuaaauauauguaugua

SEQ ID NO: 2048683 - RNA, 23 nt, Human
aauuaaauauauguauguaaaaa

SEQ ID NO: 2048684 - RNA, 11 nt, Human
aauuaaaugua

SEQ ID NO: 2048685 - RNA, 12 nt, Human
aauuaaauguag

SEQ ID NO: 2048686 - RNA, 14 nt, Human
aauuaaauuaggaa

SEQ ID NO: 2048687 - RNA, 19 nt, Human
aauguuugccucugccucu

SEQ ID NO: 2048688 - RNA, 13 nt, Human
aaugucuuguuaa

SEQ ID NO: 2048689 - RNA, 12 nt, Human
aauguuugcuau

SEQ ID NO: 2048690 - RNA, 19 nt, Human
aaugucuugguacuugcug

SEQ ID NO: 2048691 - RNA, 17 nt, Human
aaugucuuguaagcaaa

SEQ ID NO: 2048692 - RNA, 17 nt, Human
aauguuuuauacuguuu

SEQ ID NO: 2048693 - RNA, 18 nt, Human
aauguuugccucugccuc

SEQ ID NO: 2048694 - RNA, 17 nt, Human
aaugucuguuaacuuaa

SEQ ID NO: 2048695 - RNA, 23 nt, Human
aaugucuguagcuccucaacuca

SEQ ID NO: 2048696 - RNA, 16 nt, Human
aauguuuuuaaauaua

SEQ ID NO: 2048697 - RNA, 17 nt, Human
aauguuuuuaaauauau

SEQ ID NO: 2048698 - RNA, 22 nt, Human
aaugucuggagaauaauucuuu

SEQ ID NO: 2048699 - RNA, 15 nt, Human
aauguuuuucugcca

SEQ ID NO: 2048700 - RNA, 21 nt, Human
aauguuuuucugccagggagc

SEQ ID NO: 2048701 - RNA, 17 nt, Human
aauuaaaaaauuuccag

SEQ ID NO: 2048702 - RNA, 11 nt, Human
aauuaaaacaa

SEQ ID NO: 2048703 - RNA, 12 nt, Human
aauuaaaacaau

SEQ ID NO: 2048704 - RNA, 14 nt, Human
aauuaaaacaaugu

SEQ ID NO: 2048705 - RNA, 20 nt, Human
aauuaaaacaaugucaaggu

SEQ ID NO: 2048706 - RNA, 21 nt, Human
aauuaaaacaaugucaaggug

SEQ ID NO: 2048707 - RNA, 14 nt, Human
aauuaaacaauuua

SEQ ID NO: 2048708 - RNA, 19 nt, Human
aauuaaacaauuuauuuua

SEQ ID NO: 2048709 - RNA, 21 nt, Human
aauuaguuguguacucuggcc

SEQ ID NO: 2048710 - RNA, 16 nt, Human
aaagggaacugaacau

SEQ ID NO: 2048711 - RNA, 21 nt, Human
aaagggaacugaacauuccag

SEQ ID NO: 2048712 - RNA, 14 nt, Human
aaagggaaacuauu

SEQ ID NO: 2048713 - RNA, 12 nt, Human
aaagucucuauu

SEQ ID NO: 2048714 - RNA, 13 nt, Human
aaagucucuauuu

SEQ ID NO: 2048715 - RNA, 14 nt, Human
aaagucucuauuua

SEQ ID NO: 2048716 - RNA, 15 nt, Human
aaagucucuauuuaa

SEQ ID NO: 2048717 - RNA, 17 nt, Human
aaagucucuauuuaaau

SEQ ID NO: 2048718 - RNA, 20 nt, Human
aaagucucuauuuaaauucu

SEQ ID NO: 2048719 - RNA, 21 nt, Human
aaagucucuauuuaaauucuu

SEQ ID NO: 2048720 - RNA, 23 nt, Human
aaagucucuauuuaaauucuuuu

SEQ ID NO: 2048721 - RNA, 20 nt, Human
aaagggaacaggaaaagaaa

SEQ ID NO: 2048722 - RNA, 12 nt, Human
aaagggacauga

SEQ ID NO: 2048723 - RNA, 14 nt, Human
aaagucuccagccc

SEQ ID NO: 2048724 - RNA, 15 nt, Human
aaagucuccagccca

SEQ ID NO: 2048725 - RNA, 23 nt, Human
aaagucuugugacuagugcugaa

SEQ ID NO: 2048726 - RNA, 17 nt, Human
aaagucuucaagggcug

SEQ ID NO: 2048727 - RNA, 15 nt, Human
aaagucuugugacua

SEQ ID NO: 2048728 - RNA, 13 nt, Human
aaagucuugcugu

SEQ ID NO: 2048729 - RNA, 20 nt, Human
aaagucuugcuguggucucu

SEQ ID NO: 2048730 - RNA, 23 nt, Human
aaagucuugcuguggucucuuug

SEQ ID NO: 2048731 - RNA, 18 nt, Human
aaagucuugugacuagug

SEQ ID NO: 2048732 - RNA, 19 nt, Human
aaagucuugugacuagugc

SEQ ID NO: 2048733 - RNA, 21 nt, Human
aaagucuugugacuagugcug

SEQ ID NO: 2048734 - RNA, 22 nt, Human
aaagucuugugacuagugcuga

SEQ ID NO: 2048735 - RNA, 13 nt, Human
aaagugaagcaaa

SEQ ID NO: 2048736 - RNA, 15 nt, Human
aaagugaauaaaaau

SEQ ID NO: 2048737 - RNA, 12 nt, Human
aaagugaauuug

SEQ ID NO: 2048738 - RNA, 23 nt, Human
aaagugaagcaaaucagaaacuu

SEQ ID NO: 2048739 - RNA, 15 nt, Human
aaagugaauuugaau

SEQ ID NO: 2048740 - RNA, 17 nt, Human
aaagugaauuugaauga

SEQ ID NO: 2048741 - RNA, 19 nt, Human
aaagugaauuugaaugaaa

SEQ ID NO: 2048742 - RNA, 20 nt, Human
aaagugaauuugaaugaaaa

SEQ ID NO: 2048743 - RNA, 19 nt, Human
aaagucugcauuacauucc

SEQ ID NO: 2048744 - RNA, 12 nt, Human
aaagugcuggga

SEQ ID NO: 2048745 - RNA, 14 nt, Human
aaagugcugggauu

SEQ ID NO: 2048746 - RNA, 16 nt, Human
aaauaaaagugaucaa

SEQ ID NO: 2048747 - RNA, 14 nt, Human
aaauaaaauaaagc

SEQ ID NO: 2048748 - RNA, 12 nt, Human
aaauaaaauaua

SEQ ID NO: 2048749 - RNA, 13 nt, Human
aaauaaaauauaa

SEQ ID NO: 2048750 - RNA, 15 nt, Human
aaauaaaauauaauu

SEQ ID NO: 2048751 - RNA, 13 nt, Human
aaauaaaauaacc

SEQ ID NO: 2048752 - RNA, 23 nt, Human
aaagugagacuuugaggguguau

SEQ ID NO: 2048753 - RNA, 19 nt, Human
aaagugagcaugcuuucug

SEQ ID NO: 2048754 - RNA, 15 nt, Human
aaagugauaauuucu

SEQ ID NO: 2048755 - RNA, 21 nt, Human
aaagugaauuugaaugaaaaa

SEQ ID NO: 2048756 - RNA, 22 nt, Human
aaagugaauuugaaugaaaaau

SEQ ID NO: 2048757 - RNA, 11 nt, Human
aaagugcuggg

SEQ ID NO: 2048758 - RNA, 18 nt, Human
aaauaaaggauuucuaga

SEQ ID NO: 2048759 - RNA, 13 nt, Human
aaauaaaguauau

SEQ ID NO: 2048760 - RNA, 15 nt, Human
aaauaaagcaucuca

SEQ ID NO: 2048761 - RNA, 22 nt, Human
aaauaaaauuaaagcugaaaac

SEQ ID NO: 2048762 - RNA, 15 nt, Human
aaauaaaauuaagaa

SEQ ID NO: 2048763 - RNA, 13 nt, Human
aaauaaaauuaug

SEQ ID NO: 2048764 - RNA, 19 nt, Human
aaauaaauuugguucuaau

SEQ ID NO: 2048765 - RNA, 15 nt, Human
aaauaaaguauauau

SEQ ID NO: 2048766 - RNA, 22 nt, Human
aaauacuguuuuuaacaacuau

SEQ ID NO: 2048767 - RNA, 14 nt, Human
aaauacuuauucau

SEQ ID NO: 2048768 - RNA, 15 nt, Human
aaauacuuauucauu

SEQ ID NO: 2048769 - RNA, 17 nt, Human
aaauacuuauucauugu

SEQ ID NO: 2048770 - RNA, 18 nt, Human
aaauagaaaacaggaaaa

SEQ ID NO: 2048771 - RNA, 16 nt, Human
aaauagaaccacuaug

SEQ ID NO: 2048772 - RNA, 22 nt, Human
aaauagaagaauacaaacauau

SEQ ID NO: 2048773 - RNA, 15 nt, Human
aaauagacaguauau

SEQ ID NO: 2048774 - RNA, 16 nt, Human
aaauagacaguauauu

SEQ ID NO: 2048775 - RNA, 19 nt, Human
aaauagacaguauauuuau

SEQ ID NO: 2048776 - RNA, 16 nt, Human
aaauaguaaaaauaaa

SEQ ID NO: 2048777 - RNA, 13 nt, Human
aaauaguaaaaau

SEQ ID NO: 2048778 - RNA, 18 nt, Human
aaauauaaagcaucuaaa

SEQ ID NO: 2048779 - RNA, 19 nt, Human
aaauauaaagcaucuaaac

SEQ ID NO: 2048780 - RNA, 20 nt, Human
aaauauaaagcaucuaaacu

SEQ ID NO: 2048781 - RNA, 14 nt, Human
aaauauaauugaca

SEQ ID NO: 2048782 - RNA, 17 nt, Human
aaaucuuggcacagaaa

SEQ ID NO: 2048783 - RNA, 17 nt, Human
aaauggaaguggcaaua

SEQ ID NO: 2048784 - RNA, 14 nt, Human
aaagaaaauaaaau

SEQ ID NO: 2048785 - RNA, 14 nt, Human
aaagaaagaaggaa

SEQ ID NO: 2048786 - RNA, 17 nt, Human
aaacugcauuagaaauu

SEQ ID NO: 2048787 - RNA, 14 nt, Human
aaacugaagccaga

SEQ ID NO: 2048788 - RNA, 14 nt, Human
aaacugcauuagaa

SEQ ID NO: 2048789 - RNA, 14 nt, Human
aaacugaauggaag

SEQ ID NO: 2048790 - RNA, 16 nt, Human
aaagauacauuuguau

SEQ ID NO: 2048791 - RNA, 19 nt, Human
aaagauacauuuguauguu

SEQ ID NO: 2048792 - RNA, 16 nt, Human
aaagauacgacuuuau

SEQ ID NO: 2048793 - RNA, 20 nt, Human
aaagauacgacuuuauuuuc

SEQ ID NO: 2048794 - RNA, 22 nt, Human
aaagauacgacuuuauuuucug

SEQ ID NO: 2048795 - RNA, 11 nt, Human
aaagagguuuu

SEQ ID NO: 2048796 - RNA, 19 nt, Human
aaagaaauucccuggacca

SEQ ID NO: 2048797 - RNA, 17 nt, Human
aaagaaagccucagaga

SEQ ID NO: 2048798 - RNA, 18 nt, Human
aaagaaagccucagagaa

SEQ ID NO: 2048799 - RNA, 20 nt, Human
aaacagaggccauggcagaa

SEQ ID NO: 2048800 - RNA, 22 nt, Human
aaacagagacaggcccaagaga

SEQ ID NO: 2048801 - RNA, 16 nt, Human
aaacagagaugugaua

SEQ ID NO: 2048802 - RNA, 20 nt, Human
aaacagauuuggugaauuug

SEQ ID NO: 2048803 - RNA, 22 nt, Human
aaacagauuuggugaauuugaa

SEQ ID NO: 2048804 - RNA, 23 nt, Human
aaacagauuuggugaauuugaau

SEQ ID NO: 2048805 - RNA, 15 nt, Human
aaacagagacaggcc

SEQ ID NO: 2048806 - RNA, 16 nt, Human
aaacagagacaggccc

SEQ ID NO: 2048807 - RNA, 24 nt, Human
aaacacuugcggauauucuggacu

SEQ ID NO: 2048808 - RNA, 22 nt, Human
aaaauuggacauuaagcaucac

SEQ ID NO: 2048809 - RNA, 19 nt, Human
aaaauuggcauuaaaacuu

SEQ ID NO: 2048810 - RNA, 20 nt, Human
aaaauuggcuaguugaaucu

SEQ ID NO: 2048811 - RNA, 13 nt, Human
aaaauucagugga

SEQ ID NO: 2048812 - RNA, 23 nt, Human
aaaacacagacauucugccaggc

SEQ ID NO: 2048813 - RNA, 15 nt, Human
aacugaauuuugucu

SEQ ID NO: 2048814 - RNA, 15 nt, Human
aacugacaaaucaag

SEQ ID NO: 2048815 - RNA, 18 nt, Human
aacugacaaaucaaguuu

SEQ ID NO: 2048816 - RNA, 19 nt, Human
aacugacaaaucaaguuuc

SEQ ID NO: 2048817 - RNA, 23 nt, Human
aacugacacaugcugaacaucac

SEQ ID NO: 2048818 - RNA, 19 nt, Human
aacugaccagccuccaugc

SEQ ID NO: 2048819 - RNA, 14 nt, Human
aacugaccagccuc

SEQ ID NO: 2048820 - RNA, 20 nt, Human
aacuuaaaaagucugcauua

SEQ ID NO: 2048821 - RNA, 13 nt, Human
aacugauucauaa

SEQ ID NO: 2048822 - RNA, 13 nt, Human
aacuuaaauaaua

SEQ ID NO: 2048823 - RNA, 14 nt, Human
aacuuaaauaauaa

SEQ ID NO: 2048824 - RNA, 19 nt, Human
aacuuagcauguguugaaa

SEQ ID NO: 2048825 - RNA, 21 nt, Human
aacuuaggcaugcacagcugu

SEQ ID NO: 2048826 - RNA, 23 nt, Human
aacuuagugcggacaaguuuuaa

SEQ ID NO: 2048827 - RNA, 13 nt, Human
aacuuaaaauauu

SEQ ID NO: 2048828 - RNA, 14 nt, Human
aacuuaaaauauuu

SEQ ID NO: 2048829 - RNA, 16 nt, Human
aacuuaaaauauuuua

SEQ ID NO: 2048830 - RNA, 15 nt, Human
aacuuaaauaaaugu

SEQ ID NO: 2048831 - RNA, 19 nt, Human
aacuuaaauaaaugucauu

SEQ ID NO: 2048832 - RNA, 22 nt, Human
aacuuagugcggacaaguuuua

SEQ ID NO: 2048833 - RNA, 19 nt, Human
aacuuauccuaaaacaaau

SEQ ID NO: 2048834 - RNA, 17 nt, Human
aacuuaucuuacaaagu

SEQ ID NO: 2048835 - RNA, 19 nt, Human
aacuuaucuuacaaagugu

SEQ ID NO: 2048836 - RNA, 14 nt, Human
aacugaauuuuguc

SEQ ID NO: 2048837 - RNA, 18 nt, Human
aacucaguuuuaacuaga

SEQ ID NO: 2048838 - RNA, 15 nt, Human
aacucaguuuuaacu

SEQ ID NO: 2048839 - RNA, 15 nt, Human
aacucaggacuccag

SEQ ID NO: 2048840 - RNA, 16 nt, Human
aacucaggacuccagc

SEQ ID NO: 2048841 - RNA, 18 nt, Human
aacucaggacuccagccc

SEQ ID NO: 2048842 - RNA, 20 nt, Human
aacucaggacuccagcccau

SEQ ID NO: 2048843 - RNA, 20 nt, Human
aacucaccugcuggccccuc

SEQ ID NO: 2048844 - RNA, 21 nt, Human
aacucaccugcuggccccuca

SEQ ID NO: 2048845 - RNA, 14 nt, Human
aacucaauauuuuc

SEQ ID NO: 2048846 - RNA, 20 nt, Human
aacucaauauuuuccaugaa

SEQ ID NO: 2048847 - RNA, 21 nt, Human
aacucaauauuuuccaugaaa

SEQ ID NO: 2048848 - RNA, 12 nt, Human
aacucaauauuu

SEQ ID NO: 2048849 - RNA, 13 nt, Human
aacucaauauuuu

SEQ ID NO: 2048850 - RNA, 15 nt, Human
aacucaccauguaaa

SEQ ID NO: 2048851 - RNA, 16 nt, Human
aacucaccauguaaaa

SEQ ID NO: 2048852 - RNA, 21 nt, Human
aacucaccauguaaaagaguc

SEQ ID NO: 2048853 - RNA, 21 nt, Human
aacucaccuaauguuuaugag

SEQ ID NO: 2048854 - RNA, 17 nt, Human
aacucaccucucaaggu

SEQ ID NO: 2048855 - RNA, 12 nt, Human
aacucaccugcu

SEQ ID NO: 2048856 - RNA, 16 nt, Human
aacucaccugcuggcc

SEQ ID NO: 2048857 - RNA, 22 nt, Human
aacucaccugcuggccccucac

SEQ ID NO: 2048858 - RNA, 22 nt, Human
aacuucaagugcaugcucucug

SEQ ID NO: 2048859 - RNA, 20 nt, Human
aacuuuuuuuuaaguuacac

SEQ ID NO: 2048860 - RNA, 19 nt, Human
aacuuuuuugaaauaauaa

SEQ ID NO: 2048861 - RNA, 14 nt, Human
aacuuuuuuuuaag

SEQ ID NO: 2048862 - RNA, 14 nt, Human
aagaaaugacacuu

SEQ ID NO: 2048863 - RNA, 14 nt, Human
aagaaaugaaauuu

SEQ ID NO: 2048864 - RNA, 16 nt, Human
aagaaaugaaauuuua

SEQ ID NO: 2048865 - RNA, 18 nt, Human
aagaaaugaaauuuuacc

SEQ ID NO: 2048866 - RNA, 20 nt, Human
aagaaaugaaauuuuaccaa

SEQ ID NO: 2048867 - RNA, 18 nt, Human
aacuuuucuauuaaaagu

SEQ ID NO: 2048868 - RNA, 16 nt, Human
aacuuuuauaaauuaa

SEQ ID NO: 2048869 - RNA, 17 nt, Human
aacuuuuauaaauuaaa

SEQ ID NO: 2048870 - RNA, 18 nt, Human
aacuuuuauaaauuaaau

SEQ ID NO: 2048871 - RNA, 19 nt, Human
aacuuuuauaaauuaaaua

SEQ ID NO: 2048872 - RNA, 20 nt, Human
aacuuuuauaaauuaaauau

SEQ ID NO: 2048873 - RNA, 22 nt, Human
aacuuuuauaaauuaaauauau

SEQ ID NO: 2048874 - RNA, 15 nt, Human
aacuuuugugugaaa

SEQ ID NO: 2048875 - RNA, 21 nt, Human
aacuuuucuuaaaaaguuaua

SEQ ID NO: 2048876 - RNA, 14 nt, Human
aacuuuuguaaaua

SEQ ID NO: 2048877 - RNA, 14 nt, Human
aacuuucucuugua

SEQ ID NO: 2048878 - RNA, 16 nt, Human
aacaacuucuuuguaa

SEQ ID NO: 2048879 - RNA, 17 nt, Human
aacaacuucuuuguaau

SEQ ID NO: 2048880 - RNA, 15 nt, Human
aacaagaaaguuucc

SEQ ID NO: 2048881 - RNA, 12 nt, Human
aacaagaaaaca

SEQ ID NO: 2048882 - RNA, 13 nt, Human
aacaagaaaacau

SEQ ID NO: 2048883 - RNA, 14 nt, Human
aacaagaaaacaua

SEQ ID NO: 2048884 - RNA, 12 nt, Human
aacaagaaagga

SEQ ID NO: 2048885 - RNA, 16 nt, Human
aacaagaaaggagagu

SEQ ID NO: 2048886 - RNA, 17 nt, Human
aacaagaaaggagaguc

SEQ ID NO: 2048887 - RNA, 14 nt, Human
aacaacuacuacuu

SEQ ID NO: 2048888 - RNA, 16 nt, Human
aacaacuaggcuucag

SEQ ID NO: 2048889 - RNA, 17 nt, Human
aacaaagaagacaacau

SEQ ID NO: 2048890 - RNA, 12 nt, Human
aacaaagccaga

SEQ ID NO: 2048891 - RNA, 14 nt, Human
aacaaagccagaag

SEQ ID NO: 2048892 - RNA, 17 nt, Human
aacaaagccagaagcug

SEQ ID NO: 2048893 - RNA, 11 nt, Human
aacaaagccag

SEQ ID NO: 2048894 - RNA, 16 nt, Human
aacaagaaaguuuccc

SEQ ID NO: 2048895 - RNA, 21 nt, Human
aacaacuuucucuuguaaacg

SEQ ID NO: 2048896 - RNA, 22 nt, Human
aacaccaagacuugaaggugcc

SEQ ID NO: 2048897 - RNA, 18 nt, Human
aaauuggauuagccugga

SEQ ID NO: 2048898 - RNA, 14 nt, Human
aaauuggcauuaaa

SEQ ID NO: 2048899 - RNA, 17 nt, Human
aaauuggcauuaaaacu

SEQ ID NO: 2048900 - RNA, 18 nt, Human
aaauuggcauuaaaacuu

SEQ ID NO: 2048901 - RNA, 16 nt, Human
aaauuggcuaguugaa

SEQ ID NO: 2048902 - RNA, 19 nt, Human
aaauuggcuaguugaaucu

SEQ ID NO: 2048903 - RNA, 15 nt, Human
aaauugggaaaggag

SEQ ID NO: 2048904 - RNA, 20 nt, Human
aaauugggaaaggaguagaa

SEQ ID NO: 2048905 - RNA, 16 nt, Human
aaauugcuugaaagaa

SEQ ID NO: 2048906 - RNA, 13 nt, Human
aaauugcuugaaa

SEQ ID NO: 2048907 - RNA, 18 nt, Human
aaauugcauuuccugaca

SEQ ID NO: 2048908 - RNA, 16 nt, Human
aaauugcaugcugcuu

SEQ ID NO: 2048909 - RNA, 17 nt, Human
aaauugcaugcugcuuu

SEQ ID NO: 2048910 - RNA, 18 nt, Human
aaauugcaugcugcuuua

SEQ ID NO: 2048911 - RNA, 19 nt, Human
aaauugcaugcugcuuuaa

SEQ ID NO: 2048912 - RNA, 21 nt, Human
aaauugcaugcugcuuuaauu

SEQ ID NO: 2048913 - RNA, 22 nt, Human
aaauugcauggguuuuguaggu

SEQ ID NO: 2048914 - RNA, 23 nt, Human
aaauugcauggguuuuguaggua

SEQ ID NO: 2048915 - RNA, 17 nt, Human
aacaaacuguguaacug

SEQ ID NO: 2048916 - RNA, 20 nt, Human
aacaaacuguguaacugccc

SEQ ID NO: 2048917 - RNA, 11 nt, Human
aacaaaaauuu

SEQ ID NO: 2048918 - RNA, 14 nt, Human
aacaaaaauuugaa

SEQ ID NO: 2048919 - RNA, 14 nt, Human
aacaaaaagcuucc

SEQ ID NO: 2048920 - RNA, 16 nt, Human
aacaaaaagcuucccc

SEQ ID NO: 2048921 - RNA, 22 nt, Human
aacaccuucagaggcugaggug

SEQ ID NO: 2048922 - RNA, 19 nt, Human
aacagcugaggucucuuga

SEQ ID NO: 2048923 - RNA, 21 nt, Human
aacagcugaggucucuugagg

SEQ ID NO: 2048924 - RNA, 20 nt, Human
aacagcugaggucucuugag

SEQ ID NO: 2048925 - RNA, 12 nt, Human
aacaucaauguu

SEQ ID NO: 2048926 - RNA, 13 nt, Human
aacaucaauguuc

SEQ ID NO: 2048927 - RNA, 14 nt, Human
aacaucaauguuca

SEQ ID NO: 2048928 - RNA, 14 nt, Human
aacagcucaggcug

SEQ ID NO: 2048929 - RNA, 14 nt, Human
aacaugaugaaacc

SEQ ID NO: 2048930 - RNA, 19 nt, Human
aacaugcaauuuugcauuu

SEQ ID NO: 2048931 - RNA, 22 nt, Human
aacaugcaauuuugcauuugaa

SEQ ID NO: 2048932 - RNA, 22 nt, Human
aacaugccugccccaaacaaau

SEQ ID NO: 2048933 - RNA, 21 nt, Human
aacaugccugccccaaacaaa

SEQ ID NO: 2048934 - RNA, 18 nt, Human
aacaucaguuacucugaa

SEQ ID NO: 2048935 - RNA, 19 nt, Human
aacaucaguuacucugaag

SEQ ID NO: 2048936 - RNA, 21 nt, Human
aacaucaguuacucugaaggg

SEQ ID NO: 2048937 - RNA, 13 nt, Human
aacaucacacaca

SEQ ID NO: 2048938 - RNA, 18 nt, Human
aacaucaauguucauugu

SEQ ID NO: 2048939 - RNA, 19 nt, Human
aacaucaauguucauugua

SEQ ID NO: 2048940 - RNA, 17 nt, Human
aacaucacugaaaugcu

SEQ ID NO: 2048941 - RNA, 12 nt, Human
aacccugccccu

SEQ ID NO: 2048942 - RNA, 14 nt, Human
aacccugccccugc

SEQ ID NO: 2048943 - RNA, 11 nt, Human
aacccugcccc

SEQ ID NO: 2048944 - RNA, 14 nt, Human
aaccaguguagccu

SEQ ID NO: 2048945 - RNA, 14 nt, Human
aaccagucugaagu

SEQ ID NO: 2048946 - RNA, 15 nt, Human
aaccagucugaaguu

SEQ ID NO: 2048947 - RNA, 21 nt, Human
aaccagucugaaguuucauuu

SEQ ID NO: 2048948 - RNA, 22 nt, Human
aaccagucugaaguuucauuua

SEQ ID NO: 2048949 - RNA, 23 nt, Human
aaccagucugaaguuucauuuau

SEQ ID NO: 2048950 - RNA, 12 nt, Human
aaccacugcuuc

SEQ ID NO: 2048951 - RNA, 13 nt, Human
aaccacugcuucc

SEQ ID NO: 2048952 - RNA, 20 nt, Human
aaccacugcuuccauuuaau

SEQ ID NO: 2048953 - RNA, 23 nt, Human
aacauguaauuaaguacuaugua

SEQ ID NO: 2048954 - RNA, 14 nt, Human
aacauguaauuaag

SEQ ID NO: 2048955 - RNA, 21 nt, Human
aacauguaauuaaguacuaug

SEQ ID NO: 2048956 - RNA, 21 nt, Human
aaccacgucugucuucacagc

SEQ ID NO: 2048957 - RNA, 15 nt, Human
aacccuguuuuauac

SEQ ID NO: 2048958 - RNA, 19 nt, Human
aacccugccccugccccgu

SEQ ID NO: 2048959 - RNA, 19 nt, Human
acgugauuuugcuguagaa

SEQ ID NO: 2048960 - RNA, 23 nt, Human
acgccacugcacuccagccuggg

SEQ ID NO: 2048961 - RNA, 16 nt, Human
acgugcacgcacacug

SEQ ID NO: 2048962 - RNA, 21 nt, Human
acgugcaccuguacucaggag

SEQ ID NO: 2048963 - RNA, 23 nt, Human
acgugcaccuguacucaggaggc

SEQ ID NO: 2048964 - RNA, 20 nt, Human
acgugcaccuguacucagga

SEQ ID NO: 2048965 - RNA, 18 nt, Human
acuaagauguucacugug

SEQ ID NO: 2048966 - RNA, 22 nt, Human
acuaauaaaagcauaaaugcaa

SEQ ID NO: 2048967 - RNA, 18 nt, Human
acgccacugcacuauagc

SEQ ID NO: 2048968 - RNA, 14 nt, Human
acgccacugcacuc

SEQ ID NO: 2048969 - RNA, 20 nt, Human
acgccacugcacuccagccu

SEQ ID NO: 2048970 - RNA, 21 nt, Human
acgccacugcacuccagccug

SEQ ID NO: 2048971 - RNA, 22 nt, Human
acgccacugcacuccagccugg

SEQ ID NO: 2048972 - RNA, 18 nt, Human
acgauuuagaaagaagcc

SEQ ID NO: 2048973 - RNA, 22 nt, Human
acgauguggcccuggccugcug

SEQ ID NO: 2048974 - RNA, 16 nt, Human
acgauguggcccuggc

SEQ ID NO: 2048975 - RNA, 17 nt, Human
acgauguggcccuggcc

SEQ ID NO: 2048976 - RNA, 18 nt, Human
acgauguggcccuggccu

SEQ ID NO: 2048977 - RNA, 19 nt, Human
acgauguggcccuggccug

SEQ ID NO: 2048978 - RNA, 14 nt, Human
acgauguggcccug

SEQ ID NO: 2048979 - RNA, 14 nt, Human
acgaugaaaaacuu

SEQ ID NO: 2048980 - RNA, 14 nt, Human
accuuggcugcagg

SEQ ID NO: 2048981 - RNA, 21 nt, Human
accuuuauuccuucauuucau

SEQ ID NO: 2048982 - RNA, 23 nt, Human
accuuuauuccuucauuucaucu

SEQ ID NO: 2048983 - RNA, 12 nt, Human
accuuggcucaa

SEQ ID NO: 2048984 - RNA, 19 nt, Human
accugucaaacaaagccag

SEQ ID NO: 2048985 - RNA, 20 nt, Human
accugucaaacaaagccaga

SEQ ID NO: 2048986 - RNA, 24 nt, Human
accugucaaacaaagccagaagcu

SEQ ID NO: 2048987 - RNA, 12 nt, Human
accugucaauac

SEQ ID NO: 2048988 - RNA, 14 nt, Human
accugucaauacua

SEQ ID NO: 2048989 - RNA, 12 nt, Human
accuuggcugca

SEQ ID NO: 2048990 - RNA, 14 nt, Human
accuuggcucaagu

SEQ ID NO: 2048991 - RNA, 17 nt, Human
accugcccccuucuccc

SEQ ID NO: 2048992 - RNA, 15 nt, Human
accugcccccuucuc

SEQ ID NO: 2048993 - RNA, 16 nt, Human
accugcccccuucucc

SEQ ID NO: 2048994 - RNA, 17 nt, Human
accuguagucccagcua

SEQ ID NO: 2048995 - RNA, 18 nt, Human
accuguagucccagcuac

SEQ ID NO: 2048996 - RNA, 12 nt, Human
accuguacucag

SEQ ID NO: 2048997 - RNA, 14 nt, Human
accuguacuggaga

SEQ ID NO: 2048998 - RNA, 15 nt, Human
accuguacuggagag

SEQ ID NO: 2048999 - RNA, 14 nt, Human
accuguagucccag

SEQ ID NO: 2049000 - RNA, 17 nt, Human
accuuuauuuuagaauu

SEQ ID NO: 2049001 - RNA, 17 nt, Human
accuuucaaauuucaca

SEQ ID NO: 2049002 - RNA, 21 nt, Human
accucugcacaagcugcaccc

SEQ ID NO: 2049003 - RNA, 13 nt, Human
accucuuccccag

SEQ ID NO: 2049004 - RNA, 14 nt, Human
accucuuccccaga

SEQ ID NO: 2049005 - RNA, 16 nt, Human
accucugcacaagcug

SEQ ID NO: 2049006 - RNA, 18 nt, Human
accucugcacaagcugca

SEQ ID NO: 2049007 - RNA, 12 nt, Human
accugcccccuu

SEQ ID NO: 2049008 - RNA, 15 nt, Human
accugcccccuggug

SEQ ID NO: 2049009 - RNA, 18 nt, Human
accugcccccuucuccca

SEQ ID NO: 2049010 - RNA, 13 nt, Human
accugcccccugg

SEQ ID NO: 2049011 - RNA, 13 nt, Human
accugccccaucc

SEQ ID NO: 2049012 - RNA, 14 nt, Human
accugccccauccc

SEQ ID NO: 2049013 - RNA, 19 nt, Human
accucuuccggagauguag

SEQ ID NO: 2049014 - RNA, 22 nt, Human
accucuuccccagaaaggagac

SEQ ID NO: 2049015 - RNA, 23 nt, Human
accucuuccccagaaaggagacu

SEQ ID NO: 2049016 - RNA, 13 nt, Human
accugcccaaccu

SEQ ID NO: 2049017 - RNA, 21 nt, Human
accugcccaaccugcucuccu

SEQ ID NO: 2049018 - RNA, 20 nt, Human
accugcccagaucccagaag

SEQ ID NO: 2049019 - RNA, 15 nt, Human
accugcccaucacag

SEQ ID NO: 2049020 - RNA, 22 nt, Human
accugcccagaucccagaagga

SEQ ID NO: 2049021 - RNA, 15 nt, Human
acuagccucuccagg

SEQ ID NO: 2049022 - RNA, 21 nt, Human
acuagggauucaggcugcuug

SEQ ID NO: 2049023 - RNA, 16 nt, Human
acuagggauucaggcu

SEQ ID NO: 2049024 - RNA, 17 nt, Human
acuagggauucaggcug

SEQ ID NO: 2049025 - RNA, 18 nt, Human
acuagggauucaggcugc

SEQ ID NO: 2049026 - RNA, 19 nt, Human
acuagggauucaggcugcu

SEQ ID NO: 2049027 - RNA, 15 nt, Human
acuaguuacacaucu

SEQ ID NO: 2049028 - RNA, 18 nt, Human
acuaguuacacaucuuca

SEQ ID NO: 2049029 - RNA, 22 nt, Human
acuaguuacacaucuucaacag

SEQ ID NO: 2049030 - RNA, 21 nt, Human
acuaggcaguuagagaugccu

SEQ ID NO: 2049031 - RNA, 16 nt, Human
acuaggacucugaggc

SEQ ID NO: 2049032 - RNA, 17 nt, Human
acuaggacucugaggcu

SEQ ID NO: 2049033 - RNA, 19 nt, Human
acuagcuaucuagguggag

SEQ ID NO: 2049034 - RNA, 23 nt, Human
acuagcuagaagugggccaggac

SEQ ID NO: 2049035 - RNA, 22 nt, Human
acuagcuggaauuuuuuauucu

SEQ ID NO: 2049036 - RNA, 23 nt, Human
acuagcuggaauuuuuuauucuu

SEQ ID NO: 2049037 - RNA, 24 nt, Human
acuagcuggaauuuuuuauucuug

SEQ ID NO: 2049038 - RNA, 14 nt, Human
acuagcuuacauga

SEQ ID NO: 2049039 - RNA, 19 nt, Human
acuagcuuacaugagaaca

SEQ ID NO: 2049040 - RNA, 20 nt, Human
acuagcuuacaugagaacag

SEQ ID NO: 2049041 - RNA, 13 nt, Human
acucaguuuguca

SEQ ID NO: 2049042 - RNA, 14 nt, Human
acucaguuugucag

SEQ ID NO: 2049043 - RNA, 15 nt, Human
acucaguuugucaga

SEQ ID NO: 2049044 - RNA, 19 nt, Human
acucaguuugucagacuuu

SEQ ID NO: 2049045 - RNA, 13 nt, Human
acucagggcccca

SEQ ID NO: 2049046 - RNA, 14 nt, Human
acucagggccccag

SEQ ID NO: 2049047 - RNA, 21 nt, Human
acucagcccugggccccacca

SEQ ID NO: 2049048 - RNA, 12 nt, Human
acuccccugcac

SEQ ID NO: 2049049 - RNA, 16 nt, Human
acuccccugcacugga

SEQ ID NO: 2049050 - RNA, 22 nt, Human
acuccccugcacuggaguccag

SEQ ID NO: 2049051 - RNA, 14 nt, Human
acucccccaggugg

SEQ ID NO: 2049052 - RNA, 22 nt, Human
acucaguuugucagacuuuaaa

SEQ ID NO: 2049053 - RNA, 13 nt, Human
acucaguuuucuu

SEQ ID NO: 2049054 - RNA, 22 nt, Human
acucaguuuuaacuagaauuua

SEQ ID NO: 2049055 - RNA, 15 nt, Human
acucaguuuuaacua

SEQ ID NO: 2049056 - RNA, 18 nt, Human
acuauaaagguugacaau

SEQ ID NO: 2049057 - RNA, 20 nt, Human
acuauaaagaaguaacaaaa

SEQ ID NO: 2049058 - RNA, 23 nt, Human
acuaguuuuuagaaaagaaagca

SEQ ID NO: 2049059 - RNA, 18 nt, Human
acucaaaagcugggcagg

SEQ ID NO: 2049060 - RNA, 11 nt, Human
acuauaaugua

SEQ ID NO: 2049061 - RNA, 17 nt, Human
acucaaacucuuaaaac

SEQ ID NO: 2049062 - RNA, 16 nt, Human
acucaaacucuuaaaa

SEQ ID NO: 2049063 - RNA, 13 nt, Human
acucaaacacaga

SEQ ID NO: 2049064 - RNA, 15 nt, Human
acucaaacacagaga

SEQ ID NO: 2049065 - RNA, 21 nt, Human
acucaaacugccuuggcuuca

SEQ ID NO: 2049066 - RNA, 17 nt, Human
acucaaaggguggaaua

SEQ ID NO: 2049067 - RNA, 20 nt, Human
acucaaaguuaaccuaccug

SEQ ID NO: 2049068 - RNA, 13 nt, Human
acucagcagcccu

SEQ ID NO: 2049069 - RNA, 15 nt, Human
acuaggaaaauugga

SEQ ID NO: 2049070 - RNA, 21 nt, Human
acucagauggaaccgcaggaa

SEQ ID NO: 2049071 - RNA, 22 nt, Human
acucagauggaaccgcaggaag

SEQ ID NO: 2049072 - RNA, 23 nt, Human
acucagauggaaccgcaggaagc

SEQ ID NO: 2049073 - RNA, 22 nt, Human
acucagaugucucuggcgugug

SEQ ID NO: 2049074 - RNA, 14 nt, Human
acucagcagcccuc

SEQ ID NO: 2049075 - RNA, 15 nt, Human
acucagcagcccucc

SEQ ID NO: 2049076 - RNA, 15 nt, Human
acucagcccugaggu

SEQ ID NO: 2049077 - RNA, 17 nt, Human
acucagcagcccuccuc

SEQ ID NO: 2049078 - RNA, 12 nt, Human
acucagcccugg

SEQ ID NO: 2049079 - RNA, 13 nt, Human
acucagcccuggg

SEQ ID NO: 2049080 - RNA, 14 nt, Human
acucagcccugggc

SEQ ID NO: 2049081 - RNA, 15 nt, Human
acucagcccugggcc

SEQ ID NO: 2049082 - RNA, 16 nt, Human
acucagcccugggccc

SEQ ID NO: 2049083 - RNA, 22 nt, Human
acucagcccugggccccaccac

SEQ ID NO: 2049084 - RNA, 13 nt, Human
acucccuccucac

SEQ ID NO: 2049085 - RNA, 13 nt, Human
acucccuucuccu

SEQ ID NO: 2049086 - RNA, 20 nt, Human
acuccccuugagcugagaug

SEQ ID NO: 2049087 - RNA, 15 nt, Human
acuccccuugagcug

SEQ ID NO: 2049088 - RNA, 17 nt, Human
acuccccuugagcugag

SEQ ID NO: 2049089 - RNA, 15 nt, Human
acucuauagacucua

SEQ ID NO: 2049090 - RNA, 18 nt, Human
acucuauagacucuagga

SEQ ID NO: 2049091 - RNA, 19 nt, Human
acucugggaaauaagagag

SEQ ID NO: 2049092 - RNA, 13 nt, Human
acucugggaaaua

SEQ ID NO: 2049093 - RNA, 12 nt, Human
acucuggccucu

SEQ ID NO: 2049094 - RNA, 13 nt, Human
acucuggccucug

SEQ ID NO: 2049095 - RNA, 14 nt, Human
acucuggccucugu

SEQ ID NO: 2049096 - RNA, 16 nt, Human
acucuggccucuguca

SEQ ID NO: 2049097 - RNA, 17 nt, Human
acucugggcugcuaccc

SEQ ID NO: 2049098 - RNA, 16 nt, Human
acucugugucaggugg

SEQ ID NO: 2049099 - RNA, 17 nt, Human
acucuguggggccuugg

SEQ ID NO: 2049100 - RNA, 15 nt, Human
acucuguggccaaag

SEQ ID NO: 2049101 - RNA, 16 nt, Human
acucuguggggccuug

SEQ ID NO: 2049102 - RNA, 11 nt, Human
acucuuaaaac

SEQ ID NO: 2049103 - RNA, 18 nt, Human
acucuuaaaacccaagug

SEQ ID NO: 2049104 - RNA, 20 nt, Human
acucuguuccuucacauccu

SEQ ID NO: 2049105 - RNA, 22 nt, Human
acucuguuccuucacauccugu

SEQ ID NO: 2049106 - RNA, 17 nt, Human
acucuguuccuucacau

SEQ ID NO: 2049107 - RNA, 12 nt, Human
acucuguuccug

SEQ ID NO: 2049108 - RNA, 15 nt, Human
acucuguuccuggcu

SEQ ID NO: 2049109 - RNA, 16 nt, Human
acucuguuccuggcuc

SEQ ID NO: 2049110 - RNA, 14 nt, Human
acucuguuccuuca

SEQ ID NO: 2049111 - RNA, 13 nt, Human
acucuaccucaua

SEQ ID NO: 2049112 - RNA, 22 nt, Human
acucuaccucauaucaguuugc

SEQ ID NO: 2049113 - RNA, 21 nt, Human
acucuacccucuuagaaaaac

SEQ ID NO: 2049114 - RNA, 13 nt, Human
acucuacccucuu

SEQ ID NO: 2049115 - RNA, 18 nt, Human
acucuacccucuuagaaa

SEQ ID NO: 2049116 - RNA, 15 nt, Human
acuuauuuauauaaa

SEQ ID NO: 2049117 - RNA, 17 nt, Human
acuucacacacaggcaa

SEQ ID NO: 2049118 - RNA, 19 nt, Human
acuucacacacaggcaacu

SEQ ID NO: 2049119 - RNA, 13 nt, Human
acuucacacugca

SEQ ID NO: 2049120 - RNA, 14 nt, Human
acuucacacugcaa

SEQ ID NO: 2049121 - RNA, 15 nt, Human
acuucacacugcaag

SEQ ID NO: 2049122 - RNA, 16 nt, Human
acuucacacugcaaga

SEQ ID NO: 2049123 - RNA, 19 nt, Human
acuucacacugcaagagcc

SEQ ID NO: 2049124 - RNA, 23 nt, Human
acuucacacugcaagagccuugg

SEQ ID NO: 2049125 - RNA, 13 nt, Human
acuuauugcuuug

SEQ ID NO: 2049126 - RNA, 14 nt, Human
acuuauugcuuuga

SEQ ID NO: 2049127 - RNA, 15 nt, Human
acuuauugcuuugaa

SEQ ID NO: 2049128 - RNA, 16 nt, Human
acuuauugcuuugaaa

SEQ ID NO: 2049129 - RNA, 18 nt, Human
acuuauugcuuugaaacu

SEQ ID NO: 2049130 - RNA, 16 nt, Human
acuguuuauucaacaa

SEQ ID NO: 2049131 - RNA, 12 nt, Human
acuguuuguuau

SEQ ID NO: 2049132 - RNA, 20 nt, Human
acuguuuacaagaaaaaaug

SEQ ID NO: 2049133 - RNA, 15 nt, Human
acuucuuuuauaacu

SEQ ID NO: 2049134 - RNA, 22 nt, Human
acuucuuuuauaacuaguccuu

SEQ ID NO: 2049135 - RNA, 19 nt, Human
acuucugccauauucuguu

SEQ ID NO: 2049136 - RNA, 18 nt, Human
acuucugccauauucugu

SEQ ID NO: 2049137 - RNA, 16 nt, Human
acuucugaccacacuu

SEQ ID NO: 2049138 - RNA, 18 nt, Human
acuuguaaaugugguaaa

SEQ ID NO: 2049139 - RNA, 14 nt, Human
acuuguaaaugcug

SEQ ID NO: 2049140 - RNA, 14 nt, Human
acuuguaaguugcu

SEQ ID NO: 2049141 - RNA, 20 nt, Human
acuuguaaaugugguaaaga

SEQ ID NO: 2049142 - RNA, 12 nt, Human
acugucuucagu

SEQ ID NO: 2049143 - RNA, 12 nt, Human
acugucuuucag

SEQ ID NO: 2049144 - RNA, 23 nt, Human
acugugaucaggcuauguaugga

SEQ ID NO: 2049145 - RNA, 10 nt, Human
acugucuuaa

SEQ ID NO: 2049146 - RNA, 11 nt, Human
acugucuuaau

SEQ ID NO: 2049147 - RNA, 14 nt, Human
acugucuuaauuaa

SEQ ID NO: 2049148 - RNA, 17 nt, Human
acugucuuaauuaagua

SEQ ID NO: 2049149 - RNA, 19 nt, Human
acugucuuaauuaaguaaa

SEQ ID NO: 2049150 - RNA, 13 nt, Human
acugugaugccac

SEQ ID NO: 2049151 - RNA, 20 nt, Human
acugugaugccacacagagu

SEQ ID NO: 2049152 - RNA, 22 nt, Human
acugugaugccacacagagugg

SEQ ID NO: 2049153 - RNA, 16 nt, Human
acugugccaugugcca

SEQ ID NO: 2049154 - RNA, 20 nt, Human
acugguggcccgacagccug

SEQ ID NO: 2049155 - RNA, 22 nt, Human
acugguggcccgacagccuggc

SEQ ID NO: 2049156 - RNA, 21 nt, Human
acugguggcccgacagccugg

SEQ ID NO: 2049157 - RNA, 23 nt, Human
acugguggcccgacagccuggca

SEQ ID NO: 2049158 - RNA, 14 nt, Human
acugguguccagcu

SEQ ID NO: 2049159 - RNA, 20 nt, Human
acuggugggaucugugccca

SEQ ID NO: 2049160 - RNA, 14 nt, Human
acuggacucaggau

SEQ ID NO: 2049161 - RNA, 20 nt, Human
acuggacucaggaugcccag

SEQ ID NO: 2049162 - RNA, 21 nt, Human
acuggacucaggaugcccagg

SEQ ID NO: 2049163 - RNA, 23 nt, Human
acuggacucaggaugcccagggc

SEQ ID NO: 2049164 - RNA, 22 nt, Human
acuggacuugagcuuggcagcu

SEQ ID NO: 2049165 - RNA, 18 nt, Human
acuggguggggugaggac

SEQ ID NO: 2049166 - RNA, 20 nt, Human
acuggguggggugaggacca

SEQ ID NO: 2049167 - RNA, 22 nt, Human
acuggguggggugaggaccacu

SEQ ID NO: 2049168 - RNA, 13 nt, Human
acuggguugacuu

SEQ ID NO: 2049169 - RNA, 20 nt, Human
acuggguugacuuucaggua

SEQ ID NO: 2049170 - RNA, 20 nt, Human
acuggguuucucuguauagu

SEQ ID NO: 2049171 - RNA, 17 nt, Human
acugccccgugcagacu

SEQ ID NO: 2049172 - RNA, 18 nt, Human
acugccccgugcagacug

SEQ ID NO: 2049173 - RNA, 19 nt, Human
acugccccgugcagacugg

SEQ ID NO: 2049174 - RNA, 23 nt, Human
acugccccgugcagacuggaggg

SEQ ID NO: 2049175 - RNA, 14 nt, Human
acugcccgagcugg

SEQ ID NO: 2049176 - RNA, 15 nt, Human
acugcccgagcuggu

SEQ ID NO: 2049177 - RNA, 16 nt, Human
acugcccgagcuggug

SEQ ID NO: 2049178 - RNA, 18 nt, Human
acugcccgagcuggugca

SEQ ID NO: 2049179 - RNA, 14 nt, Human
acuggaagcacagc

SEQ ID NO: 2049180 - RNA, 21 nt, Human
acugcccgagcuggugcauua

SEQ ID NO: 2049181 - RNA, 15 nt, Human
acuggaagcacagcu

SEQ ID NO: 2049182 - RNA, 16 nt, Human
acuggaagcacagcuu

SEQ ID NO: 2049183 - RNA, 12 nt, Human
acuggaagcaca

SEQ ID NO: 2049184 - RNA, 14 nt, Human
acuggaagcacaga

SEQ ID NO: 2049185 - RNA, 19 nt, Human
acugcccgagcuggugcau

SEQ ID NO: 2049186 - RNA, 20 nt, Human
acugcccgagcuggugcauu

SEQ ID NO: 2049187 - RNA, 13 nt, Human
acugaaggagaag

SEQ ID NO: 2049188 - RNA, 14 nt, Human
acugaaggagaagg

SEQ ID NO: 2049189 - RNA, 21 nt, Human
acugaaggagaaggugcccca

SEQ ID NO: 2049190 - RNA, 13 nt, Human
acugaagcuuuuu

SEQ ID NO: 2049191 - RNA, 14 nt, Human
acugaagcuuuuua

SEQ ID NO: 2049192 - RNA, 11 nt, Human
acugaaggaga

SEQ ID NO: 2049193 - RNA, 14 nt, Human
acugaaggcuuuca

SEQ ID NO: 2049194 - RNA, 20 nt, Human
acugaaggcuuucagggccu

SEQ ID NO: 2049195 - RNA, 17 nt, Human
acugaagguaaaauuga

SEQ ID NO: 2049196 - RNA, 22 nt, Human
acugccacacgucugacccucu

SEQ ID NO: 2049197 - RNA, 21 nt, Human
acugccaaagggaaauaucau

SEQ ID NO: 2049198 - RNA, 20 nt, Human
agaaaagggaacugaacauu

SEQ ID NO: 2049199 - RNA, 17 nt, Human
acuuuucuuaaaaaguu

SEQ ID NO: 2049200 - RNA, 15 nt, Human
agaaaaguaagcccu

SEQ ID NO: 2049201 - RNA, 12 nt, Human
acuuuucguuaa

SEQ ID NO: 2049202 - RNA, 16 nt, Human
acuuuucguuaacauu

SEQ ID NO: 2049203 - RNA, 17 nt, Human
acuuuucguuaacauug

SEQ ID NO: 2049204 - RNA, 22 nt, Human
acuuuucguuaacauugaccaa

SEQ ID NO: 2049205 - RNA, 17 nt, Human
acuuuucuauuaaaagu

SEQ ID NO: 2049206 - RNA, 15 nt, Human
acuuuucuccaugag

SEQ ID NO: 2049207 - RNA, 11 nt, Human
acuuuucugua

SEQ ID NO: 2049208 - RNA, 12 nt, Human
acuuuuccuucc

SEQ ID NO: 2049209 - RNA, 13 nt, Human
acuuuuccuuccc

SEQ ID NO: 2049210 - RNA, 23 nt, Human
acuuuuccuucccucaaagcuuc

SEQ ID NO: 2049211 - RNA, 15 nt, Human
acuuuuauaaauuaa

SEQ ID NO: 2049212 - RNA, 16 nt, Human
acuuuuauaaauuaaa

SEQ ID NO: 2049213 - RNA, 17 nt, Human
acuuuuauaaauuaaau

SEQ ID NO: 2049214 - RNA, 18 nt, Human
acuuuuauaaauuaaaua

SEQ ID NO: 2049215 - RNA, 21 nt, Human
acuuuuauaaauuaaauauau

SEQ ID NO: 2049216 - RNA, 13 nt, Human
agaaaauaaaauu

SEQ ID NO: 2049217 - RNA, 18 nt, Human
agaaaauaaaauuaagaa

SEQ ID NO: 2049218 - RNA, 19 nt, Human
agaaaauaaaauuaagaau

SEQ ID NO: 2049219 - RNA, 21 nt, Human
agaaaauaaaauuaagaaugu

SEQ ID NO: 2049220 - RNA, 22 nt, Human
agaaaauaaaauuaagaauguu

SEQ ID NO: 2049221 - RNA, 19 nt, Human
agaaaauguaaauaaagga

SEQ ID NO: 2049222 - RNA, 12 nt, Human
agaaacaaaccc

SEQ ID NO: 2049223 - RNA, 13 nt, Human
agaaaauugaauu

SEQ ID NO: 2049224 - RNA, 14 nt, Human
agaaaauugaauuu

SEQ ID NO: 2049225 - RNA, 16 nt, Human
agaaaauugaauuuaa

SEQ ID NO: 2049226 - RNA, 17 nt, Human
agaaaauugaauuuaac

SEQ ID NO: 2049227 - RNA, 18 nt, Human
agaaaauugaauuuaaca

SEQ ID NO: 2049228 - RNA, 19 nt, Human
agaaaauugaauuuaacaa

SEQ ID NO: 2049229 - RNA, 20 nt, Human
agaaaauugaauuuaacaau

SEQ ID NO: 2049230 - RNA, 22 nt, Human
agaaaauugaauuuaacaaugc

SEQ ID NO: 2049231 - RNA, 23 nt, Human
acuuuccuucauucaacccaccu

SEQ ID NO: 2049232 - RNA, 16 nt, Human
acuuuccacccccucc

SEQ ID NO: 2049233 - RNA, 18 nt, Human
acuuuccacccccucccu

SEQ ID NO: 2049234 - RNA, 19 nt, Human
acuuuccacccccucccug

SEQ ID NO: 2049235 - RNA, 20 nt, Human
acuuuccacccccucccugg

SEQ ID NO: 2049236 - RNA, 18 nt, Human
acuuucagugaaagcauc

SEQ ID NO: 2049237 - RNA, 13 nt, Human
acuuucauugcca

SEQ ID NO: 2049238 - RNA, 16 nt, Human
acuuucauugccagug

SEQ ID NO: 2049239 - RNA, 17 nt, Human
acuuucauugccagugu

SEQ ID NO: 2049240 - RNA, 18 nt, Human
acuuucauugccaguguc

SEQ ID NO: 2049241 - RNA, 20 nt, Human
acuuucauugccagugucuu

SEQ ID NO: 2049242 - RNA, 21 nt, Human
acuuucauugccagugucuuu

SEQ ID NO: 2049243 - RNA, 19 nt, Human
acuuucauuaaagcauuua

SEQ ID NO: 2049244 - RNA, 11 nt, Human
agaaaggagac

SEQ ID NO: 2049245 - RNA, 12 nt, Human
agaaaggagagu

SEQ ID NO: 2049246 - RNA, 18 nt, Human
agaaaggagagucuugca

SEQ ID NO: 2049247 - RNA, 19 nt, Human
agaaaggagagucuugcag

SEQ ID NO: 2049248 - RNA, 23 nt, Human
agaaaggaggggauagagagaga

SEQ ID NO: 2049249 - RNA, 20 nt, Human
agaaaggaggggauagagag

SEQ ID NO: 2049250 - RNA, 15 nt, Human
agaaauaaaguuucu

SEQ ID NO: 2049251 - RNA, 18 nt, Human
agaaauaaaguuucuguu

SEQ ID NO: 2049252 - RNA, 21 nt, Human
agaaauaaaguuggugacaga

SEQ ID NO: 2049253 - RNA, 19 nt, Human
agaaauaaaguuggugaca

SEQ ID NO: 2049254 - RNA, 17 nt, Human
acauguuaaacuuacuu

SEQ ID NO: 2049255 - RNA, 16 nt, Human
acauguuacugaccag

SEQ ID NO: 2049256 - RNA, 19 nt, Human
acauguuacugaccagcaa

SEQ ID NO: 2049257 - RNA, 17 nt, Human
acauguuacugaccagc

SEQ ID NO: 2049258 - RNA, 21 nt, Human
acauguuuuucuucucccuca

SEQ ID NO: 2049259 - RNA, 15 nt, Human
acauguucccuucuc

SEQ ID NO: 2049260 - RNA, 15 nt, Human
acauguugguauuua

SEQ ID NO: 2049261 - RNA, 18 nt, Human
acauguugguauuuaucu

SEQ ID NO: 2049262 - RNA, 20 nt, Human
acauguugguauuuaucuau

SEQ ID NO: 2049263 - RNA, 12 nt, Human
acauuaaagcag

SEQ ID NO: 2049264 - RNA, 13 nt, Human
acauuaaagcagu

SEQ ID NO: 2049265 - RNA, 14 nt, Human
acauuaaagcaguc

SEQ ID NO: 2049266 - RNA, 15 nt, Human
acauuaaaacaauau

SEQ ID NO: 2049267 - RNA, 22 nt, Human
acauuaaaacaauauuguuucu

SEQ ID NO: 2049268 - RNA, 12 nt, Human
acauuaaauaau

SEQ ID NO: 2049269 - RNA, 12 nt, Human
acauuaaacaca

SEQ ID NO: 2049270 - RNA, 23 nt, Human
acauccuguguuucuagggaaau

SEQ ID NO: 2049271 - RNA, 12 nt, Human
acauccuugugg

SEQ ID NO: 2049272 - RNA, 15 nt, Human
acauccuuguggcac

SEQ ID NO: 2049273 - RNA, 18 nt, Human
acauccuuguggcacauu

SEQ ID NO: 2049274 - RNA, 20 nt, Human
acauccuuguggcacauuuu

SEQ ID NO: 2049275 - RNA, 14 nt, Human
acauccuguguuuc

SEQ ID NO: 2049276 - RNA, 16 nt, Human
acauccuguguuucua

SEQ ID NO: 2049277 - RNA, 14 nt, Human
acaucgcccuccac

SEQ ID NO: 2049278 - RNA, 20 nt, Human
acauccauuucaucuauuuc

SEQ ID NO: 2049279 - RNA, 20 nt, Human
acaucccacucacaacagcu

SEQ ID NO: 2049280 - RNA, 23 nt, Human
acauaaauaaauuaaauaaaaua

SEQ ID NO: 2049281 - RNA, 19 nt, Human
acauccaggcaauggccua

SEQ ID NO: 2049282 - RNA, 23 nt, Human
acauccaaggagaaacagagaca

SEQ ID NO: 2049283 - RNA, 13 nt, Human
acauccaaggaga

SEQ ID NO: 2049284 - RNA, 14 nt, Human
acauccaaggagaa

SEQ ID NO: 2049285 - RNA, 22 nt, Human
acauccaaggagaaacagagac

SEQ ID NO: 2049286 - RNA, 18 nt, Human
acauaaagguuauuuucu

SEQ ID NO: 2049287 - RNA, 22 nt, Human
acauaaagguuauuuucuccug

SEQ ID NO: 2049288 - RNA, 23 nt, Human
acauaaagguuauuuucuccuga

SEQ ID NO: 2049289 - RNA, 13 nt, Human
acauaaaggauaa

SEQ ID NO: 2049290 - RNA, 17 nt, Human
acauaaaggauaaacuu

SEQ ID NO: 2049291 - RNA, 21 nt, Human
acauaaaggugguaugugugu

SEQ ID NO: 2049292 - RNA, 13 nt, Human
acauaaauuagag

SEQ ID NO: 2049293 - RNA, 16 nt, Human
acauccaagcuuccuu

SEQ ID NO: 2049294 - RNA, 12 nt, Human
acauaaaaaguu

SEQ ID NO: 2049295 - RNA, 13 nt, Human
acauaaaaaguua

SEQ ID NO: 2049296 - RNA, 17 nt, Human
acauaaaaaguuaaaaa

SEQ ID NO: 2049297 - RNA, 22 nt, Human
acauaaaaaguuaaaaaaaaua

SEQ ID NO: 2049298 - RNA, 13 nt, Human
accaaggaccccu

SEQ ID NO: 2049299 - RNA, 16 nt, Human
accaaggaccccucac

SEQ ID NO: 2049300 - RNA, 20 nt, Human
accacgauguggcccuggcc

SEQ ID NO: 2049301 - RNA, 21 nt, Human
accacgauguggcccuggccu

SEQ ID NO: 2049302 - RNA, 22 nt, Human
accacgauguggcccuggccug

SEQ ID NO: 2049303 - RNA, 17 nt, Human
accaagcucacaguucc

SEQ ID NO: 2049304 - RNA, 14 nt, Human
accaagcugcugug

SEQ ID NO: 2049305 - RNA, 20 nt, Human
accaagcugugacccucaau

SEQ ID NO: 2049306 - RNA, 18 nt, Human
accaagcucacaguuccu

SEQ ID NO: 2049307 - RNA, 19 nt, Human
accaagcucacaguuccuc

SEQ ID NO: 2049308 - RNA, 23 nt, Human
accacuaaaagaucgcaguuugc

SEQ ID NO: 2049309 - RNA, 13 nt, Human
accagcagccugg

SEQ ID NO: 2049310 - RNA, 14 nt, Human
accagcagccugga

SEQ ID NO: 2049311 - RNA, 17 nt, Human
accagcagccuggaccc

SEQ ID NO: 2049312 - RNA, 17 nt, Human
accacuacaugcagccc

SEQ ID NO: 2049313 - RNA, 14 nt, Human
acauuuggguaaau

SEQ ID NO: 2049314 - RNA, 17 nt, Human
acauuuggguaaaucau

SEQ ID NO: 2049315 - RNA, 18 nt, Human
acauuuggguaaaucaug

SEQ ID NO: 2049316 - RNA, 11 nt, Human
accaacuggaa

SEQ ID NO: 2049317 - RNA, 13 nt, Human
accaacuggaagc

SEQ ID NO: 2049318 - RNA, 17 nt, Human
accaacuggaagcacag

SEQ ID NO: 2049319 - RNA, 18 nt, Human
accaacuggaagcacaga

SEQ ID NO: 2049320 - RNA, 19 nt, Human
accaacuggcccucuucuu

SEQ ID NO: 2049321 - RNA, 20 nt, Human
accaacuggcccucuucuua

SEQ ID NO: 2049322 - RNA, 14 nt, Human
accaacugggccca

SEQ ID NO: 2049323 - RNA, 18 nt, Human
accccgaccaccugccca

SEQ ID NO: 2049324 - RNA, 13 nt, Human
accccgagcccua

SEQ ID NO: 2049325 - RNA, 14 nt, Human
accccgagcccuac

SEQ ID NO: 2049326 - RNA, 15 nt, Human
accccaaagccccuu

SEQ ID NO: 2049327 - RNA, 16 nt, Human
accccaaagccccuug

SEQ ID NO: 2049328 - RNA, 18 nt, Human
accccaaagccccuugcu

SEQ ID NO: 2049329 - RNA, 18 nt, Human
acccccuucucugcccau

SEQ ID NO: 2049330 - RNA, 21 nt, Human
acccccuucucugcccauucc

SEQ ID NO: 2049331 - RNA, 22 nt, Human
acccccuucucugcccauuccc

SEQ ID NO: 2049332 - RNA, 16 nt, Human
acccccuucucugcuc

SEQ ID NO: 2049333 - RNA, 17 nt, Human
acccccuucucugcucc

SEQ ID NO: 2049334 - RNA, 18 nt, Human
acccccuucucugcucca

SEQ ID NO: 2049335 - RNA, 19 nt, Human
acccccuucucugcuccac

SEQ ID NO: 2049336 - RNA, 20 nt, Human
acccccuucucugcuccacc

SEQ ID NO: 2049337 - RNA, 23 nt, Human
acccccuucucugcuccaccaca

SEQ ID NO: 2049338 - RNA, 22 nt, Human
accccuaaagagauacuuugau

SEQ ID NO: 2049339 - RNA, 17 nt, Human
accccgugaagcaucca

SEQ ID NO: 2049340 - RNA, 22 nt, Human
accccgucugggguucagcccc

SEQ ID NO: 2049341 - RNA, 23 nt, Human
accccgucugggguucagccccu

SEQ ID NO: 2049342 - RNA, 13 nt, Human
accccgggcucuc

SEQ ID NO: 2049343 - RNA, 15 nt, Human
accccgggcucucug

SEQ ID NO: 2049344 - RNA, 16 nt, Human
accccgggcucucugc

SEQ ID NO: 2049345 - RNA, 17 nt, Human
accccgggcucucugcu

SEQ ID NO: 2049346 - RNA, 18 nt, Human
accccgggcucucugcug

SEQ ID NO: 2049347 - RNA, 21 nt, Human
accccgggcucucugcuguac

SEQ ID NO: 2049348 - RNA, 16 nt, Human
acccaagugggggcag

SEQ ID NO: 2049349 - RNA, 15 nt, Human
acccaaggaggaaaa

SEQ ID NO: 2049350 - RNA, 21 nt, Human
acccaucugcaccccccuggg

SEQ ID NO: 2049351 - RNA, 22 nt, Human
acccaucugcaccccccugggc

SEQ ID NO: 2049352 - RNA, 14 nt, Human
acccauccuagaga

SEQ ID NO: 2049353 - RNA, 19 nt, Human
acccaucgguguccauuua

SEQ ID NO: 2049354 - RNA, 21 nt, Human
acccaucgguguccauuuaua

SEQ ID NO: 2049355 - RNA, 16 nt, Human
acccaucuaccccugg

SEQ ID NO: 2049356 - RNA, 17 nt, Human
acccaucuaccccugga

SEQ ID NO: 2049357 - RNA, 13 nt, Human
acccaucugcacc

SEQ ID NO: 2049358 - RNA, 20 nt, Human
acccaucugcaccccccugg

SEQ ID NO: 2049359 - RNA, 22 nt, Human
acccaauuaaguccuacuuuac

SEQ ID NO: 2049360 - RNA, 20 nt, Human
acccacaaaaguacaauuua

SEQ ID NO: 2049361 - RNA, 19 nt, Human
acccaugaagacaggacag

SEQ ID NO: 2049362 - RNA, 20 nt, Human
acccaugaagacaggacagu

SEQ ID NO: 2049363 - RNA, 13 nt, Human
acccaugaggcaa

SEQ ID NO: 2049364 - RNA, 20 nt, Human
acccaugaggcaaugucagg

SEQ ID NO: 2049365 - RNA, 18 nt, Human
acccaugaugagcuccuc

SEQ ID NO: 2049366 - RNA, 17 nt, Human
accaucaugucuggcua

SEQ ID NO: 2049367 - RNA, 16 nt, Human
accaucaugucuggcu

SEQ ID NO: 2049368 - RNA, 14 nt, Human
accaucaugucugg

SEQ ID NO: 2049369 - RNA, 20 nt, Human
accccucaacaccucugcac

SEQ ID NO: 2049370 - RNA, 24 nt, Human
acaacuugcacguauuuuaauagc

SEQ ID NO: 2049371 - RNA, 17 nt, Human
acaacuucaagugcaug

SEQ ID NO: 2049372 - RNA, 19 nt, Human
acaacuaggcuucagcaua

SEQ ID NO: 2049373 - RNA, 15 nt, Human
acaaguaaaacugug

SEQ ID NO: 2049374 - RNA, 16 nt, Human
acaaguaaaacugugg

SEQ ID NO: 2049375 - RNA, 16 nt, Human
acaacuuucucuugua

SEQ ID NO: 2049376 - RNA, 18 nt, Human
acaacuuucucuuguaaa

SEQ ID NO: 2049377 - RNA, 17 nt, Human
acaacuucuaauugcca

SEQ ID NO: 2049378 - RNA, 14 nt, Human
acaacuucuuugua

SEQ ID NO: 2049379 - RNA, 21 nt, Human
acaagucauuuuaacuuuauc

SEQ ID NO: 2049380 - RNA, 23 nt, Human
acaagucauuuuaacuuuaucac

SEQ ID NO: 2049381 - RNA, 23 nt, Human
acaaguaugaauaaagacaccua

SEQ ID NO: 2049382 - RNA, 21 nt, Human
acaaguaugaauaaagacacc

SEQ ID NO: 2049383 - RNA, 12 nt, Human
acaagugccacu

SEQ ID NO: 2049384 - RNA, 22 nt, Human
acaagugacuguaucuguguag

SEQ ID NO: 2049385 - RNA, 18 nt, Human
acaagugaaaaacaucca

SEQ ID NO: 2049386 - RNA, 20 nt, Human
acaaguagaugccugaacuu

SEQ ID NO: 2049387 - RNA, 18 nt, Human
acaagugacuguaucugu

SEQ ID NO: 2049388 - RNA, 19 nt, Human
acaagugacuguaucugug

SEQ ID NO: 2049389 - RNA, 20 nt, Human
acaagugacuguaucugugu

SEQ ID NO: 2049390 - RNA, 17 nt, Human
acaagugagacaaaaag

SEQ ID NO: 2049391 - RNA, 19 nt, Human
acaagugagacaaaaagca

SEQ ID NO: 2049392 - RNA, 21 nt, Human
acaagugagacaaaaagcacu

SEQ ID NO: 2049393 - RNA, 23 nt, Human
aauuauaacuuaaaauauuuuau

SEQ ID NO: 2049394 - RNA, 14 nt, Human
aauuauaaggacug

SEQ ID NO: 2049395 - RNA, 15 nt, Human
aauuauaaggacugc

SEQ ID NO: 2049396 - RNA, 16 nt, Human
aauuauaaggacugca

SEQ ID NO: 2049397 - RNA, 17 nt, Human
aauuauaaggacugcau

SEQ ID NO: 2049398 - RNA, 18 nt, Human
aauuauaaggacugcaug

SEQ ID NO: 2049399 - RNA, 17 nt, Human
aauuauaacuuaaaaua

SEQ ID NO: 2049400 - RNA, 20 nt, Human
aauuuuauagcucaguuuau

SEQ ID NO: 2049401 - RNA, 16 nt, Human
aauuuuaucucuuauu

SEQ ID NO: 2049402 - RNA, 12 nt, Human
aauuuuauuccu

SEQ ID NO: 2049403 - RNA, 12 nt, Human
aauuuuaugaac

SEQ ID NO: 2049404 - RNA, 19 nt, Human
aauuuuaugaacugcaugu

SEQ ID NO: 2049405 - RNA, 20 nt, Human
aauuuuaugaacugcaugua

SEQ ID NO: 2049406 - RNA, 22 nt, Human
aauuuuaugaacugcauguaua

SEQ ID NO: 2049407 - RNA, 12 nt, Human
aauuuuaugaau

SEQ ID NO: 2049408 - RNA, 19 nt, Human
aauuuuauagcucaguuua

SEQ ID NO: 2049409 - RNA, 19 nt, Human
acaaagacaaauucuguuu

SEQ ID NO: 2049410 - RNA, 22 nt, Human
acaaagacaaauucuguuucuu

SEQ ID NO: 2049411 - RNA, 18 nt, Human
acaacuaugauuuggaaa

SEQ ID NO: 2049412 - RNA, 15 nt, Human
acaaacgggcucagc

SEQ ID NO: 2049413 - RNA, 18 nt, Human
acaaagacaaauucuguu

SEQ ID NO: 2049414 - RNA, 18 nt, Human
acaaagaagacaacauua

SEQ ID NO: 2049415 - RNA, 14 nt, Human
acaaaccagaagca

SEQ ID NO: 2049416 - RNA, 23 nt, Human
acaaaccugaaaagauguugugu

SEQ ID NO: 2049417 - RNA, 20 nt, Human
acaaaauguaggguuauaau

SEQ ID NO: 2049418 - RNA, 15 nt, Human
acaaaauggaauuca

SEQ ID NO: 2049419 - RNA, 22 nt, Human
acaaaauggaauucauucuggu

SEQ ID NO: 2049420 - RNA, 21 nt, Human
aauuuucuuuuuaauaaaaag

SEQ ID NO: 2049421 - RNA, 21 nt, Human
aauuuugaauaaauaaaugua

SEQ ID NO: 2049422 - RNA, 12 nt, Human
acaccagagccc

SEQ ID NO: 2049423 - RNA, 12 nt, Human
acacagcucugu

SEQ ID NO: 2049424 - RNA, 11 nt, Human
acacagcucug

SEQ ID NO: 2049425 - RNA, 14 nt, Human
acacagaaaccaau

SEQ ID NO: 2049426 - RNA, 23 nt, Human
acacagacauucugccaggcccc

SEQ ID NO: 2049427 - RNA, 16 nt, Human
acacagacuauugaca

SEQ ID NO: 2049428 - RNA, 20 nt, Human
acacagacuauugacaucag

SEQ ID NO: 2049429 - RNA, 15 nt, Human
acacuaaccacgcug

SEQ ID NO: 2049430 - RNA, 14 nt, Human
acacuaaccacgcu

SEQ ID NO: 2049431 - RNA, 14 nt, Human
acacggaggcaucu

SEQ ID NO: 2049432 - RNA, 15 nt, Human
acacggacacucaaa

SEQ ID NO: 2049433 - RNA, 14 nt, Human
acaaugugucugag

SEQ ID NO: 2049434 - RNA, 12 nt, Human
acaauuuauuuu

SEQ ID NO: 2049435 - RNA, 14 nt, Human
acaauuuauuuuau

SEQ ID NO: 2049436 - RNA, 15 nt, Human
acaauuuauuuuauu

SEQ ID NO: 2049437 - RNA, 20 nt, Human
acaauuuauuuuauuuuagc

SEQ ID NO: 2049438 - RNA, 12 nt, Human
acaauuuuguac

SEQ ID NO: 2049439 - RNA, 15 nt, Human
acaauuuuguacaaa

SEQ ID NO: 2049440 - RNA, 18 nt, Human
acacaaacgggcucagca

SEQ ID NO: 2049441 - RNA, 12 nt, Human
acacaaagagag

SEQ ID NO: 2049442 - RNA, 22 nt, Human
acacaaagagaguuaaucaacu

SEQ ID NO: 2049443 - RNA, 21 nt, Human
acacugcugcuccagugcagg

SEQ ID NO: 2049444 - RNA, 18 nt, Human
acacugcuaggugggcca

SEQ ID NO: 2049445 - RNA, 13 nt, Human
acacugucuugaa

SEQ ID NO: 2049446 - RNA, 23 nt, Human
acacugcuaggugggccagcccc

SEQ ID NO: 2049447 - RNA, 20 nt, Human
acacugucaaacaucuggaa

SEQ ID NO: 2049448 - RNA, 12 nt, Human
acagaacacugu

SEQ ID NO: 2049449 - RNA, 14 nt, Human
acagaacacugucu

SEQ ID NO: 2049450 - RNA, 16 nt, Human
acagaagaaggcagca

SEQ ID NO: 2049451 - RNA, 17 nt, Human
acagaagucaugaagcc

SEQ ID NO: 2049452 - RNA, 20 nt, Human
acagaagaaggcagcaggug

SEQ ID NO: 2049453 - RNA, 19 nt, Human
acacugaaguuaacagaga

SEQ ID NO: 2049454 - RNA, 18 nt, Human
acacugaauauuuauauu

SEQ ID NO: 2049455 - RNA, 23 nt, Human
acacugaauauuuauauuucacu

SEQ ID NO: 2049456 - RNA, 17 nt, Human
acacugaccauccacuc

SEQ ID NO: 2049457 - RNA, 14 nt, Human
acacugaggcaggg

SEQ ID NO: 2049458 - RNA, 16 nt, Human
acacugaggcagggaa

SEQ ID NO: 2049459 - RNA, 17 nt, Human
acacugaggcagggaag

SEQ ID NO: 2049460 - RNA, 22 nt, Human
acagcaggguagucugguuucu

SEQ ID NO: 2049461 - RNA, 11 nt, Human
acagcaggugu

SEQ ID NO: 2049462 - RNA, 19 nt, Human
acagagucucacuguugcc

SEQ ID NO: 2049463 - RNA, 17 nt, Human
acagagucucacuguug

SEQ ID NO: 2049464 - RNA, 18 nt, Human
acagaauacuagccagag

SEQ ID NO: 2049465 - RNA, 14 nt, Human
acagagucucacug

SEQ ID NO: 2049466 - RNA, 12 nt, Human
acagagucucac

SEQ ID NO: 2049467 - RNA, 15 nt, Human
acagaauaaugaaug

SEQ ID NO: 2049468 - RNA, 18 nt, Human
acagaagucaugaagccc

SEQ ID NO: 2049469 - RNA, 17 nt, Human
acagcauggugcaugcc

SEQ ID NO: 2049470 - RNA, 15 nt, Human
acagcauugcuuucu

SEQ ID NO: 2049471 - RNA, 12 nt, Human
acagcauugcuu

SEQ ID NO: 2049472 - RNA, 13 nt, Human
acagcauugcuuu

SEQ ID NO: 2049473 - RNA, 13 nt, Human
acagcauguguau

SEQ ID NO: 2049474 - RNA, 19 nt, Human
acagcauucuugucacaau

SEQ ID NO: 2049475 - RNA, 23 nt, Human
acagcauucuugucacaauaaau

SEQ ID NO: 2049476 - RNA, 11 nt, Human
acagcauugcu

SEQ ID NO: 2049477 - RNA, 19 nt, Human
acagccacggccaggccag

SEQ ID NO: 2049478 - RNA, 16 nt, Human
acagcccaaagaagga

SEQ ID NO: 2049479 - RNA, 17 nt, Human
acagcccaaagaaggaa

SEQ ID NO: 2049480 - RNA, 18 nt, Human
acagcccaaagaaggaaa

SEQ ID NO: 2049481 - RNA, 16 nt, Human
acaggcaagcaccucc

SEQ ID NO: 2049482 - RNA, 15 nt, Human
acaggcaagcaccuc

SEQ ID NO: 2049483 - RNA, 18 nt, Human
acaggcaagcaccuccug

SEQ ID NO: 2049484 - RNA, 19 nt, Human
acaggcaagcaccuccugc

SEQ ID NO: 2049485 - RNA, 12 nt, Human
acaggggcuggu

SEQ ID NO: 2049486 - RNA, 19 nt, Human
acaggggcuggugggcacc

SEQ ID NO: 2049487 - RNA, 17 nt, Human
acaggggaauauuuuau

SEQ ID NO: 2049488 - RNA, 19 nt, Human
acaggggaauauuuuauuc

SEQ ID NO: 2049489 - RNA, 20 nt, Human
acaggggaauauuuuauuca

SEQ ID NO: 2049490 - RNA, 22 nt, Human
acaggggaauauuuuauucaag

SEQ ID NO: 2049491 - RNA, 16 nt, Human
acaggucucagaaucu

SEQ ID NO: 2049492 - RNA, 14 nt, Human
acaggucuccucuu

SEQ ID NO: 2049493 - RNA, 18 nt, Human
acaggucuccucuuaaaa

SEQ ID NO: 2049494 - RNA, 23 nt, Human
acaggugugaaccaccacaccca

SEQ ID NO: 2049495 - RNA, 20 nt, Human
acaggugugaaccaccacac

SEQ ID NO: 2049496 - RNA, 23 nt, Human
acaggucaauacaguacaggcag

SEQ ID NO: 2049497 - RNA, 22 nt, Human
acaggucaauacaguacaggca

SEQ ID NO: 2049498 - RNA, 14 nt, Human
acaggguccugcua

SEQ ID NO: 2049499 - RNA, 17 nt, Human
acaggguagcagguacc

SEQ ID NO: 2049500 - RNA, 17 nt, Human
acaggguaaauuauuca

SEQ ID NO: 2049501 - RNA, 14 nt, Human
acagcuccuucugu

SEQ ID NO: 2049502 - RNA, 13 nt, Human
acagcuccuucug

SEQ ID NO: 2049503 - RNA, 12 nt, Human
acagcuccuucu

SEQ ID NO: 2049504 - RNA, 17 nt, Human
auaugcaguuuuccuua

SEQ ID NO: 2049505 - RNA, 13 nt, Human
auauccugagcca

SEQ ID NO: 2049506 - RNA, 14 nt, Human
auauccugagccau

SEQ ID NO: 2049507 - RNA, 15 nt, Human
auauccugagccauc

SEQ ID NO: 2049508 - RNA, 18 nt, Human
auauuagaaguguuaacu

SEQ ID NO: 2049509 - RNA, 18 nt, Human
auauggacucaguuuucu

SEQ ID NO: 2049510 - RNA, 14 nt, Human
auaugcuuauacac

SEQ ID NO: 2049511 - RNA, 16 nt, Human
auaugcuuauacacuu

SEQ ID NO: 2049512 - RNA, 19 nt, Human
auaugcuuauacacuuaca

SEQ ID NO: 2049513 - RNA, 12 nt, Human
auauccauguac

SEQ ID NO: 2049514 - RNA, 14 nt, Human
auauccauguacug

SEQ ID NO: 2049515 - RNA, 15 nt, Human
auauccauguacugu

SEQ ID NO: 2049516 - RNA, 17 nt, Human
auauccauguacuguag

SEQ ID NO: 2049517 - RNA, 18 nt, Human
auauccauguacuguagu

SEQ ID NO: 2049518 - RNA, 19 nt, Human
auauuuagauuguuaaaau

SEQ ID NO: 2049519 - RNA, 20 nt, Human
auauuauacuaagaaaagau

SEQ ID NO: 2049520 - RNA, 15 nt, Human
auauuagcauuuagu

SEQ ID NO: 2049521 - RNA, 22 nt, Human
auauuagcauuuaguccaaugu

SEQ ID NO: 2049522 - RNA, 20 nt, Human
auauuagcuuuacuguuugu

SEQ ID NO: 2049523 - RNA, 21 nt, Human
auauuagcuuuacuguuuguu

SEQ ID NO: 2049524 - RNA, 22 nt, Human
auauuauaauuuuuuucaauau

SEQ ID NO: 2049525 - RNA, 19 nt, Human
auauuagucauagaagaac

SEQ ID NO: 2049526 - RNA, 17 nt, Human
auauuauaacuuaaaaa

SEQ ID NO: 2049527 - RNA, 15 nt, Human
auauuaggaaaauau

SEQ ID NO: 2049528 - RNA, 14 nt, Human
auauuuauuaccuc

SEQ ID NO: 2049529 - RNA, 15 nt, Human
auauuuauaacucau

SEQ ID NO: 2049530 - RNA, 11 nt, Human
auauuuauaac

SEQ ID NO: 2049531 - RNA, 16 nt, Human
auauuuauaacagcau

SEQ ID NO: 2049532 - RNA, 13 nt, Human
auauuuauaacuc

SEQ ID NO: 2049533 - RNA, 16 nt, Human
auauuuauuaccucug

SEQ ID NO: 2049534 - RNA, 14 nt, Human
auauaauuaucgga

SEQ ID NO: 2049535 - RNA, 21 nt, Human
auauaauuaucggaagcagug

SEQ ID NO: 2049536 - RNA, 11 nt, Human
auauaauuaug

SEQ ID NO: 2049537 - RNA, 14 nt, Human
auauaauuauguua

SEQ ID NO: 2049538 - RNA, 19 nt, Human
auauaauuauguuauugaa

SEQ ID NO: 2049539 - RNA, 16 nt, Human
auaguaugguggcugg

SEQ ID NO: 2049540 - RNA, 15 nt, Human
auaguaugguggcug

SEQ ID NO: 2049541 - RNA, 17 nt, Human
auaguagcauacauuua

SEQ ID NO: 2049542 - RNA, 16 nt, Human
auaguauauuaaaaau

SEQ ID NO: 2049543 - RNA, 17 nt, Human
auaguauauuaaaaaug

SEQ ID NO: 2049544 - RNA, 20 nt, Human
auaguauauuaaaaauggua

SEQ ID NO: 2049545 - RNA, 22 nt, Human
auacuucagcucacacaugaga

SEQ ID NO: 2049546 - RNA, 18 nt, Human
auauagcuugaaacauag

SEQ ID NO: 2049547 - RNA, 18 nt, Human
auauacauucaaacuuaa

SEQ ID NO: 2049548 - RNA, 14 nt, Human
auauaccauuuauc

SEQ ID NO: 2049549 - RNA, 18 nt, Human
auauaauuguuuuuuauc

SEQ ID NO: 2049550 - RNA, 21 nt, Human
auauaauuguuuuuuaucuuu

SEQ ID NO: 2049551 - RNA, 22 nt, Human
auauaauuguuuuuuaucuuuu

SEQ ID NO: 2049552 - RNA, 14 nt, Human
auauacauaacagg

SEQ ID NO: 2049553 - RNA, 20 nt, Human
auauaauuuuuuagagagcu

SEQ ID NO: 2049554 - RNA, 22 nt, Human
auauacuaagauguucacugug

SEQ ID NO: 2049555 - RNA, 21 nt, Human
auauagcuauuuuuauggaau

SEQ ID NO: 2049556 - RNA, 14 nt, Human
auaccugucaauac

SEQ ID NO: 2049557 - RNA, 16 nt, Human
auaccccgugaagcau

SEQ ID NO: 2049558 - RNA, 16 nt, Human
auaccucuuugaaaga

SEQ ID NO: 2049559 - RNA, 17 nt, Human
auaccucuuugaaagaa

SEQ ID NO: 2049560 - RNA, 14 nt, Human
auacacacacaaag

SEQ ID NO: 2049561 - RNA, 17 nt, Human
auacacacacaaagaga

SEQ ID NO: 2049562 - RNA, 19 nt, Human
auacacacacaaagagagu

SEQ ID NO: 2049563 - RNA, 19 nt, Human
auaccccuuacuuagcaug

SEQ ID NO: 2049564 - RNA, 15 nt, Human
auacacaacacacac

SEQ ID NO: 2049565 - RNA, 22 nt, Human
auacuuagcaaaguuuuaccug

SEQ ID NO: 2049566 - RNA, 21 nt, Human
auacuuauauuuuuaauaaaa

SEQ ID NO: 2049567 - RNA, 14 nt, Human
auacuuauucauug

SEQ ID NO: 2049568 - RNA, 15 nt, Human
auacuuauucauugu

SEQ ID NO: 2049569 - RNA, 22 nt, Human
auaaguuaacuauuuuauuuuc

SEQ ID NO: 2049570 - RNA, 10 nt, Human
auaaugucuu

SEQ ID NO: 2049571 - RNA, 13 nt, Human
auaaugucuuguu

SEQ ID NO: 2049572 - RNA, 16 nt, Human
auaaugucuuguuaau

SEQ ID NO: 2049573 - RNA, 17 nt, Human
auaaugucuuguuaaua

SEQ ID NO: 2049574 - RNA, 19 nt, Human
auaaugucuuguuaauauu

SEQ ID NO: 2049575 - RNA, 20 nt, Human
auaaugucuuguuaauauuc

SEQ ID NO: 2049576 - RNA, 19 nt, Human
auaaguacuguguacagaa

SEQ ID NO: 2049577 - RNA, 21 nt, Human
auaaguccuugcaagaaucag

SEQ ID NO: 2049578 - RNA, 23 nt, Human
auaacacuauaaagguugacaau

SEQ ID NO: 2049579 - RNA, 16 nt, Human
auaacaguaaaugugc

SEQ ID NO: 2049580 - RNA, 16 nt, Human
auaacaggguaaauua

SEQ ID NO: 2049581 - RNA, 18 nt, Human
auaacaggguaaauuauu

SEQ ID NO: 2049582 - RNA, 19 nt, Human
auaacaggguaaauuauuc

SEQ ID NO: 2049583 - RNA, 20 nt, Human
auaacaggguaaauuauuca

SEQ ID NO: 2049584 - RNA, 22 nt, Human
auaacaggguaaauuauucagu

SEQ ID NO: 2049585 - RNA, 20 nt, Human
auaacagcuaccaugacaac

SEQ ID NO: 2049586 - RNA, 16 nt, Human
auaacagaaugcacca

SEQ ID NO: 2049587 - RNA, 23 nt, Human
aguuguuaauaaaaguacauguu

SEQ ID NO: 2049588 - RNA, 20 nt, Human
aguugaauggccugccuuga

SEQ ID NO: 2049589 - RNA, 17 nt, Human
aguuguaucucuuuuga

SEQ ID NO: 2049590 - RNA, 22 nt, Human
aguuguaucucuuuugaaucca

SEQ ID NO: 2049591 - RNA, 14 nt, Human
aguuguaucucuuu

SEQ ID NO: 2049592 - RNA, 15 nt, Human
aguuguaucucuuuu

SEQ ID NO: 2049593 - RNA, 16 nt, Human
aguuguaucucuuuug

SEQ ID NO: 2049594 - RNA, 19 nt, Human
aguugucaagucucugcug

SEQ ID NO: 2049595 - RNA, 20 nt, Human
agugaucaauaaaaugugau

SEQ ID NO: 2049596 - RNA, 15 nt, Human
agugucuuucuuugg

SEQ ID NO: 2049597 - RNA, 21 nt, Human
agugucuuucuuuggugccuu

SEQ ID NO: 2049598 - RNA, 22 nt, Human
agugucuuucuuuggugccuuu

SEQ ID NO: 2049599 - RNA, 23 nt, Human
agugucuuucuuuggugccuuuc

SEQ ID NO: 2049600 - RNA, 19 nt, Human
agugucuucacggcaggac

SEQ ID NO: 2049601 - RNA, 13 nt, Human
agugucuuccaua

SEQ ID NO: 2049602 - RNA, 14 nt, Human
agugucuuccauaa

SEQ ID NO: 2049603 - RNA, 15 nt, Human
agugucuuccauaau

SEQ ID NO: 2049604 - RNA, 15 nt, Human
agugugaaauagaca

SEQ ID NO: 2049605 - RNA, 23 nt, Human
agugugacaaggauugcuacugu

SEQ ID NO: 2049606 - RNA, 16 nt, Human
aguuaacuauuuuauu

SEQ ID NO: 2049607 - RNA, 14 nt, Human
aguuaacuuucaga

SEQ ID NO: 2049608 - RNA, 14 nt, Human
aguuaagaaaaaaa

SEQ ID NO: 2049609 - RNA, 17 nt, Human
aguuaagaaaaaaauaa

SEQ ID NO: 2049610 - RNA, 18 nt, Human
aguuaagaaaaaaauaau

SEQ ID NO: 2049611 - RNA, 20 nt, Human
aguuaagaaaaaaauaauuu

SEQ ID NO: 2049612 - RNA, 16 nt, Human
aguccacaguggaacc

SEQ ID NO: 2049613 - RNA, 12 nt, Human
aguccaccugag

SEQ ID NO: 2049614 - RNA, 18 nt, Human
aguccaaugucuuuuuaa

SEQ ID NO: 2049615 - RNA, 17 nt, Human
aguccaccugagcugcc

SEQ ID NO: 2049616 - RNA, 16 nt, Human
aguccugccucagccu

SEQ ID NO: 2049617 - RNA, 13 nt, Human
aguccugccuggc

SEQ ID NO: 2049618 - RNA, 14 nt, Human
aguccugccuggcc

SEQ ID NO: 2049619 - RNA, 15 nt, Human
aguccugccuggcca

SEQ ID NO: 2049620 - RNA, 16 nt, Human
aguccugccuggccag

SEQ ID NO: 2049621 - RNA, 17 nt, Human
aguccugccuggccagg

SEQ ID NO: 2049622 - RNA, 20 nt, Human
aguccugccuggccaggcag

SEQ ID NO: 2049623 - RNA, 21 nt, Human
aguccugccuggccaggcaga

SEQ ID NO: 2049624 - RNA, 14 nt, Human
agugacaaggcccc

SEQ ID NO: 2049625 - RNA, 15 nt, Human
agugacaaggcccca

SEQ ID NO: 2049626 - RNA, 16 nt, Human
agugacaaggccccag

SEQ ID NO: 2049627 - RNA, 18 nt, Human
agugacaaggccccagag

SEQ ID NO: 2049628 - RNA, 20 nt, Human
agugacaaggccccagagac

SEQ ID NO: 2049629 - RNA, 21 nt, Human
agugacaaggccccagagacu

SEQ ID NO: 2049630 - RNA, 23 nt, Human
agugacaaggccccagagacuca

SEQ ID NO: 2049631 - RNA, 14 nt, Human
aguccugcucucua

SEQ ID NO: 2049632 - RNA, 20 nt, Human
aguccugcucucuacccagc

SEQ ID NO: 2049633 - RNA, 23 nt, Human
agugacacuucagagagcuggua

SEQ ID NO: 2049634 - RNA, 15 nt, Human
agugacacuucagag

SEQ ID NO: 2049635 - RNA, 18 nt, Human
agugacacuucagagagc

SEQ ID NO: 2049636 - RNA, 20 nt, Human
agugacacuucagagagcug

SEQ ID NO: 2049637 - RNA, 21 nt, Human
agugacacuucagagagcugg

SEQ ID NO: 2049638 - RNA, 22 nt, Human
agugacacuucagagagcuggu

SEQ ID NO: 2049639 - RNA, 16 nt, Human
agugaucaauaaaaug

SEQ ID NO: 2049640 - RNA, 17 nt, Human
agugaucaauaaaaugu

SEQ ID NO: 2049641 - RNA, 19 nt, Human
agugaucaauaaaauguga

SEQ ID NO: 2049642 - RNA, 13 nt, Human
agugauccuccca

SEQ ID NO: 2049643 - RNA, 16 nt, Human
agucaagugaaaaagg

SEQ ID NO: 2049644 - RNA, 16 nt, Human
agucaaggaguggcuu

SEQ ID NO: 2049645 - RNA, 20 nt, Human
agucaagugaaaaaggagga

SEQ ID NO: 2049646 - RNA, 17 nt, Human
aguccaaugucuuuuua

SEQ ID NO: 2049647 - RNA, 22 nt, Human
agucauuaugagaggcaaugau

SEQ ID NO: 2049648 - RNA, 15 nt, Human
aucucucuucuuuuc

SEQ ID NO: 2049649 - RNA, 23 nt, Human
aucucucuacuccuaccucagcc

SEQ ID NO: 2049650 - RNA, 15 nt, Human
aucucucucuguugu

SEQ ID NO: 2049651 - RNA, 17 nt, Human
aucucucucuguugugu

SEQ ID NO: 2049652 - RNA, 21 nt, Human
aucucucucuguuguguucgu

SEQ ID NO: 2049653 - RNA, 22 nt, Human
aucucucugaauccuaagggcu

SEQ ID NO: 2049654 - RNA, 21 nt, Human
aucucuagaauuuuaagugcu

SEQ ID NO: 2049655 - RNA, 20 nt, Human
aucucuacuaaaaauacaaa

SEQ ID NO: 2049656 - RNA, 15 nt, Human
aucucuagaauuuua

SEQ ID NO: 2049657 - RNA, 16 nt, Human
aucucuagaauuuuaa

SEQ ID NO: 2049658 - RNA, 18 nt, Human
aucucuagaauuuuaagu

SEQ ID NO: 2049659 - RNA, 18 nt, Human
aucucuacuaaaaauaca

SEQ ID NO: 2049660 - RNA, 21 nt, Human
aucucucuacuccuaccucag

SEQ ID NO: 2049661 - RNA, 22 nt, Human
aucucucuacuccuaccucagc

SEQ ID NO: 2049662 - RNA, 17 nt, Human
aucugggacccuuuccu

SEQ ID NO: 2049663 - RNA, 20 nt, Human
aucugggacccuuuccuucc

SEQ ID NO: 2049664 - RNA, 22 nt, Human
aucugggacccuuuccuuccuu

SEQ ID NO: 2049665 - RNA, 23 nt, Human
aucugggacccuuuccuuccuuc

SEQ ID NO: 2049666 - RNA, 22 nt, Human
aucuucauaucuaucagaguau

SEQ ID NO: 2049667 - RNA, 19 nt, Human
aucuuccaacucaaacucu

SEQ ID NO: 2049668 - RNA, 14 nt, Human
aucuucaguuuuau

SEQ ID NO: 2049669 - RNA, 20 nt, Human
aucuucaguuuuaucuuuaa

SEQ ID NO: 2049670 - RNA, 22 nt, Human
aucuucaguuuuaucuuuaauc

SEQ ID NO: 2049671 - RNA, 13 nt, Human
aucuucacuucua

SEQ ID NO: 2049672 - RNA, 23 nt, Human
aucuucacuucuaaaugcauauc

SEQ ID NO: 2049673 - RNA, 17 nt, Human
aucuugaaaugaaagua

SEQ ID NO: 2049674 - RNA, 16 nt, Human
aucuucucacucccuu

SEQ ID NO: 2049675 - RNA, 17 nt, Human
aucuucuuuauaauucu

SEQ ID NO: 2049676 - RNA, 15 nt, Human
aucuucuccaucugg

SEQ ID NO: 2049677 - RNA, 19 nt, Human
aucuucuccaucuggcagg

SEQ ID NO: 2049678 - RNA, 14 nt, Human
aucuucucuggcga

SEQ ID NO: 2049679 - RNA, 22 nt, Human
aucuucuccaucuggcagggug

SEQ ID NO: 2049680 - RNA, 17 nt, Human
aucuucucuuugacaau

SEQ ID NO: 2049681 - RNA, 13 nt, Human
augaaaacaugua

SEQ ID NO: 2049682 - RNA, 22 nt, Human
augaaaauacaacuuaaauaau

SEQ ID NO: 2049683 - RNA, 13 nt, Human
augaaaauacaac

SEQ ID NO: 2049684 - RNA, 17 nt, Human
augaaaauacaacuuaa

SEQ ID NO: 2049685 - RNA, 19 nt, Human
augaaaacguuuuauugug

SEQ ID NO: 2049686 - RNA, 18 nt, Human
augaaaacguuuuauugu

SEQ ID NO: 2049687 - RNA, 20 nt, Human
augaaaacguuuuauugugu

SEQ ID NO: 2049688 - RNA, 17 nt, Human
augacucacaugaugca

SEQ ID NO: 2049689 - RNA, 19 nt, Human
augacuagaggcagggagg

SEQ ID NO: 2049690 - RNA, 18 nt, Human
augacuagaaagugaaua

SEQ ID NO: 2049691 - RNA, 20 nt, Human
augacuagaaagugaauaaa

SEQ ID NO: 2049692 - RNA, 15 nt, Human
augacuagaggcagg

SEQ ID NO: 2049693 - RNA, 21 nt, Human
augaccugugaccagcacugu

SEQ ID NO: 2049694 - RNA, 19 nt, Human
augaccugugaccagcacu

SEQ ID NO: 2049695 - RNA, 22 nt, Human
augacuagaggcagggagggga

SEQ ID NO: 2049696 - RNA, 11 nt, Human
augaccccucc

SEQ ID NO: 2049697 - RNA, 23 nt, Human
augacccugcgaaggggcccugg

SEQ ID NO: 2049698 - RNA, 22 nt, Human
augaccucaccauuuuuguucu

SEQ ID NO: 2049699 - RNA, 16 nt, Human
augagcucauguagca

SEQ ID NO: 2049700 - RNA, 13 nt, Human
augagcuccagac

SEQ ID NO: 2049701 - RNA, 13 nt, Human
augagccuggcaa

SEQ ID NO: 2049702 - RNA, 14 nt, Human
augagccuggcaag

SEQ ID NO: 2049703 - RNA, 14 nt, Human
augagcuccagacc

SEQ ID NO: 2049704 - RNA, 12 nt, Human
auccuuuucucc

SEQ ID NO: 2049705 - RNA, 16 nt, Human
auccuuuucuccuauc

SEQ ID NO: 2049706 - RNA, 15 nt, Human
auccuuuucugcaga

SEQ ID NO: 2049707 - RNA, 23 nt, Human
aucgaugggggagucugaagcag

SEQ ID NO: 2049708 - RNA, 15 nt, Human
aucgaggaaccagag

SEQ ID NO: 2049709 - RNA, 20 nt, Human
aucgaugggggaugcuucau

SEQ ID NO: 2049710 - RNA, 21 nt, Human
aucgaugggggaugcuucaug

SEQ ID NO: 2049711 - RNA, 23 nt, Human
aucgaugggggaugcuucaugug

SEQ ID NO: 2049712 - RNA, 15 nt, Human
auccuuuuucuuuau

SEQ ID NO: 2049713 - RNA, 13 nt, Human
aucgaugcagugc

SEQ ID NO: 2049714 - RNA, 11 nt, Human
auccuccccuu

SEQ ID NO: 2049715 - RNA, 13 nt, Human
auccuccccuucc

SEQ ID NO: 2049716 - RNA, 15 nt, Human
auccuccccuucccu

SEQ ID NO: 2049717 - RNA, 18 nt, Human
auccuccccuucccugca

SEQ ID NO: 2049718 - RNA, 19 nt, Human
auccuccccuucccugcaa

SEQ ID NO: 2049719 - RNA, 15 nt, Human
auccuccguccagcc

SEQ ID NO: 2049720 - RNA, 16 nt, Human
auccuccguccagccg

SEQ ID NO: 2049721 - RNA, 14 nt, Human
auccacccagccca

SEQ ID NO: 2049722 - RNA, 13 nt, Human
auccacccagccc

SEQ ID NO: 2049723 - RNA, 15 nt, Human
auccacccagcccau

SEQ ID NO: 2049724 - RNA, 20 nt, Human
aucccgauucacccugucca

SEQ ID NO: 2049725 - RNA, 15 nt, Human
aucccgauucacccu

SEQ ID NO: 2049726 - RNA, 20 nt, Human
auccacccaccucagccucc

SEQ ID NO: 2049727 - RNA, 18 nt, Human
auccacccaccucagccu

SEQ ID NO: 2049728 - RNA, 22 nt, Human
aucccgccucuucuucuucaga

SEQ ID NO: 2049729 - RNA, 16 nt, Human
aucccgcucuuuuccu

SEQ ID NO: 2049730 - RNA, 17 nt, Human
aucccgcucuuuuccua

SEQ ID NO: 2049731 - RNA, 19 nt, Human
aucccuagucuucaagcag

SEQ ID NO: 2049732 - RNA, 21 nt, Human
aucccuagucuucaagcagau

SEQ ID NO: 2049733 - RNA, 14 nt, Human
aucccuaugcugcc

SEQ ID NO: 2049734 - RNA, 19 nt, Human
aucccuaugcugccuaggc

SEQ ID NO: 2049735 - RNA, 17 nt, Human
aucccuaugggauucag

SEQ ID NO: 2049736 - RNA, 12 nt, Human
aucaccuccccu

SEQ ID NO: 2049737 - RNA, 15 nt, Human
aucaccucaggccag

SEQ ID NO: 2049738 - RNA, 15 nt, Human
aucaccuccccuccu

SEQ ID NO: 2049739 - RNA, 12 nt, Human
aucaccugaggu

SEQ ID NO: 2049740 - RNA, 13 nt, Human
aucaccuccccuc

SEQ ID NO: 2049741 - RNA, 14 nt, Human
aucaccucaggcca

SEQ ID NO: 2049742 - RNA, 13 nt, Human
aucagccagugac

SEQ ID NO: 2049743 - RNA, 15 nt, Human
aucagccacauucua

SEQ ID NO: 2049744 - RNA, 16 nt, Human
aucagccuacaggccu

SEQ ID NO: 2049745 - RNA, 20 nt, Human
aucagccuaggggucaggga

SEQ ID NO: 2049746 - RNA, 23 nt, Human
aucagcccugcccuucagcaucc

SEQ ID NO: 2049747 - RNA, 24 nt, Human
aucagcccugcccuucagcauccu

SEQ ID NO: 2049748 - RNA, 11 nt, Human
aucagccucuu

SEQ ID NO: 2049749 - RNA, 13 nt, Human
aucagccucuuaa

SEQ ID NO: 2049750 - RNA, 15 nt, Human
aucagccucuuaaag

SEQ ID NO: 2049751 - RNA, 11 nt, Human
aucagccuggg

SEQ ID NO: 2049752 - RNA, 20 nt, Human
aucagccugggcaaugugau

SEQ ID NO: 2049753 - RNA, 21 nt, Human
aucagccugggcaaugugaua

SEQ ID NO: 2049754 - RNA, 12 nt, Human
aucagcugcuac

SEQ ID NO: 2049755 - RNA, 13 nt, Human
aucagcugcuacu

SEQ ID NO: 2049756 - RNA, 23 nt, Human
aucagcugcuacuacuccuguag

SEQ ID NO: 2049757 - RNA, 19 nt, Human
aucauggagguuugaagau

SEQ ID NO: 2049758 - RNA, 21 nt, Human
aucaucuauugcuggcaaaga

SEQ ID NO: 2049759 - RNA, 15 nt, Human
aucauggcucacugc

SEQ ID NO: 2049760 - RNA, 18 nt, Human
aucauggcucacugcagc

SEQ ID NO: 2049761 - RNA, 20 nt, Human
aucauggcucacugcagccu

SEQ ID NO: 2049762 - RNA, 19 nt, Human
aucauggcuaagcuuaaaa

SEQ ID NO: 2049763 - RNA, 21 nt, Human
aucauggcuaagcuuaaaaaa

SEQ ID NO: 2049764 - RNA, 22 nt, Human
aucauggcuaagcuuaaaaaaa

SEQ ID NO: 2049765 - RNA, 15 nt, Human
aucauguacauuucu

SEQ ID NO: 2049766 - RNA, 14 nt, Human
aucauguacauuuc

SEQ ID NO: 2049767 - RNA, 14 nt, Human
aucauguaaauuac

SEQ ID NO: 2049768 - RNA, 13 nt, Human
aucauguacauuu

SEQ ID NO: 2049769 - RNA, 19 nt, Human
augggaaggagggagguau

SEQ ID NO: 2049770 - RNA, 14 nt, Human
augggaaggaggga

SEQ ID NO: 2049771 - RNA, 17 nt, Human
augggaaggagggaggu

SEQ ID NO: 2049772 - RNA, 18 nt, Human
auggcugacuuugcucuu

SEQ ID NO: 2049773 - RNA, 17 nt, Human
auggagcgcaccugccc

SEQ ID NO: 2049774 - RNA, 23 nt, Human
auggagcgcaccugcccccuggu

SEQ ID NO: 2049775 - RNA, 14 nt, Human
auggauggcuucua

SEQ ID NO: 2049776 - RNA, 12 nt, Human
auggaugugcuu

SEQ ID NO: 2049777 - RNA, 15 nt, Human
auggaaauauuaugc

SEQ ID NO: 2049778 - RNA, 17 nt, Human
auggaaauauuaugcaa

SEQ ID NO: 2049779 - RNA, 22 nt, Human
auggaaauauuaugcaaauucc

SEQ ID NO: 2049780 - RNA, 12 nt, Human
auggaaaaggaa

SEQ ID NO: 2049781 - RNA, 11 nt, Human
augcuugccua

SEQ ID NO: 2049782 - RNA, 16 nt, Human
augcuugccuagggcc

SEQ ID NO: 2049783 - RNA, 20 nt, Human
augcuugccuagggccuggu

SEQ ID NO: 2049784 - RNA, 21 nt, Human
augcuugccuagggccugguc

SEQ ID NO: 2049785 - RNA, 23 nt, Human
augcuugccuagggccuggucca

SEQ ID NO: 2049786 - RNA, 16 nt, Human
augcuugaaugccacg

SEQ ID NO: 2049787 - RNA, 18 nt, Human
augcuugaugguuuaugu

SEQ ID NO: 2049788 - RNA, 12 nt, Human
augcacagcugu

SEQ ID NO: 2049789 - RNA, 15 nt, Human
augcauuguugaggu

SEQ ID NO: 2049790 - RNA, 16 nt, Human
augcauuguugaggug

SEQ ID NO: 2049791 - RNA, 13 nt, Human
augcauuugaggu

SEQ ID NO: 2049792 - RNA, 17 nt, Human
augcauuugaggucaag

SEQ ID NO: 2049793 - RNA, 17 nt, Human
augccugguggcagcug

SEQ ID NO: 2049794 - RNA, 16 nt, Human
augccugguggcagcu

SEQ ID NO: 2049795 - RNA, 15 nt, Human
augccugguggcagc

SEQ ID NO: 2049796 - RNA, 19 nt, Human
augcaaugacaucuucaaa

SEQ ID NO: 2049797 - RNA, 12 nt, Human
augcaaugagau

SEQ ID NO: 2049798 - RNA, 23 nt, Human
augcaaugagauagaagauguuu

SEQ ID NO: 2049799 - RNA, 13 nt, Human
augcaaugugcua

SEQ ID NO: 2049800 - RNA, 16 nt, Human
augcaaugugcuacug

SEQ ID NO: 2049801 - RNA, 17 nt, Human
augcaaugugcuacuga

SEQ ID NO: 2049802 - RNA, 18 nt, Human
augcaaugugcuacugau

SEQ ID NO: 2049803 - RNA, 14 nt, Human
augcaauauguauu

SEQ ID NO: 2049804 - RNA, 13 nt, Human
augcaauauguau

SEQ ID NO: 2049805 - RNA, 19 nt, Human
augaugugggucaaggaau

SEQ ID NO: 2049806 - RNA, 12 nt, Human
augccuuuguaa

SEQ ID NO: 2049807 - RNA, 14 nt, Human
augccuuuuauuuc

SEQ ID NO: 2049808 - RNA, 23 nt, Human
augcauuugaggucaaguaagaa

SEQ ID NO: 2049809 - RNA, 13 nt, Human
augccuuuguaag

SEQ ID NO: 2049810 - RNA, 15 nt, Human
augccuuuguaaguu

SEQ ID NO: 2049811 - RNA, 16 nt, Human
augccuuuguaaguua

SEQ ID NO: 2049812 - RNA, 19 nt, Human
augucuuggguaggcggga

SEQ ID NO: 2049813 - RNA, 13 nt, Human
augucuugguacu

SEQ ID NO: 2049814 - RNA, 15 nt, Human
augucuugguacuug

SEQ ID NO: 2049815 - RNA, 18 nt, Human
augucuugguacuugcug

SEQ ID NO: 2049816 - RNA, 23 nt, Human
augucuugguacuugcugcuauu

SEQ ID NO: 2049817 - RNA, 18 nt, Human
augucuuguaagcaaaag

SEQ ID NO: 2049818 - RNA, 17 nt, Human
auguaaguaaaugucug

SEQ ID NO: 2049819 - RNA, 16 nt, Human
auguaauaaugugaau

SEQ ID NO: 2049820 - RNA, 19 nt, Human
auguaauaaaaaguauaug

SEQ ID NO: 2049821 - RNA, 14 nt, Human
auguaauaauguga

SEQ ID NO: 2049822 - RNA, 17 nt, Human
auguaagcucuacugag

SEQ ID NO: 2049823 - RNA, 20 nt, Human
auggugaaaccccaucucua

SEQ ID NO: 2049824 - RNA, 21 nt, Human
auggugaaaccccaucucuac

SEQ ID NO: 2049825 - RNA, 24 nt, Human
auggugaaaccccgucucuacuaa

SEQ ID NO: 2049826 - RNA, 13 nt, Human
auguaagaaucau

SEQ ID NO: 2049827 - RNA, 15 nt, Human
auguaagaaucauug

SEQ ID NO: 2049828 - RNA, 16 nt, Human
auguaagagcuuuaca

SEQ ID NO: 2049829 - RNA, 19 nt, Human
auguaagagcuuuacaaaa

SEQ ID NO: 2049830 - RNA, 20 nt, Human
auguaagagcuuuacaaaaa

SEQ ID NO: 2049831 - RNA, 21 nt, Human
auguaagagcuuuacaaaaag

SEQ ID NO: 2049832 - RNA, 22 nt, Human
auguaagagcuuuacaaaaaga

SEQ ID NO: 2049833 - RNA, 23 nt, Human
auguaagagcuuuacaaaaagac

SEQ ID NO: 2049834 - RNA, 14 nt, Human
auguacaauauuuu

SEQ ID NO: 2049835 - RNA, 19 nt, Human
auguacaauauuuuaagca

SEQ ID NO: 2049836 - RNA, 20 nt, Human
auguacaauauuuuaagcau

SEQ ID NO: 2049837 - RNA, 21 nt, Human
auguacaauauuuuaagcauu

SEQ ID NO: 2049838 - RNA, 16 nt, Human
augucaacuuuaugca

SEQ ID NO: 2049839 - RNA, 17 nt, Human
augucaaggugcuguug

SEQ ID NO: 2049840 - RNA, 20 nt, Human
augucaaggugcuguuguca

SEQ ID NO: 2049841 - RNA, 21 nt, Human
augucaaggugcuguugucau

SEQ ID NO: 2049842 - RNA, 14 nt, Human
augucagauuccuu

SEQ ID NO: 2049843 - RNA, 15 nt, Human
augucagauuccuuu

SEQ ID NO: 2049844 - RNA, 16 nt, Human
augucagauuccuuuc

SEQ ID NO: 2049845 - RNA, 18 nt, Human
augucagauuccuuuccc

SEQ ID NO: 2049846 - RNA, 16 nt, Human
augucagacuggcugg

SEQ ID NO: 2049847 - RNA, 16 nt, Human
augucacuaaagcagg

SEQ ID NO: 2049848 - RNA, 22 nt, Human
augucacuaaagcaggccuuuu

SEQ ID NO: 2049849 - RNA, 19 nt, Human
augucagaaaaacaauaag

SEQ ID NO: 2049850 - RNA, 23 nt, Human
augucagaaaaacaauaagagcg

SEQ ID NO: 2049851 - RNA, 17 nt, Human
augucacaggcaggucc

SEQ ID NO: 2049852 - RNA, 16 nt, Human
augucacaggcagguc

SEQ ID NO: 2049853 - RNA, 14 nt, Human
augucacaggcagg

SEQ ID NO: 2049854 - RNA, 15 nt, Human
augucacaggcaggu

SEQ ID NO: 2049855 - RNA, 20 nt, Human
auguguauuuccagugcaau

SEQ ID NO: 2049856 - RNA, 17 nt, Human
auguguauuuuauuaca

SEQ ID NO: 2049857 - RNA, 21 nt, Human
augugucacuacucacagucu

SEQ ID NO: 2049858 - RNA, 16 nt, Human
auguguccaucccagc

SEQ ID NO: 2049859 - RNA, 18 nt, Human
auguucucugaggacacu

SEQ ID NO: 2049860 - RNA, 18 nt, Human
auguucugacauuaacag

SEQ ID NO: 2049861 - RNA, 19 nt, Human
auguucugacauuaacagu

SEQ ID NO: 2049862 - RNA, 20 nt, Human
auguucugacauuaacaguu

SEQ ID NO: 2049863 - RNA, 13 nt, Human
augugucuucaau

SEQ ID NO: 2049864 - RNA, 20 nt, Human
auguucuuaguggauguucu

SEQ ID NO: 2049865 - RNA, 22 nt, Human
auguucugacccugcuucaaau

SEQ ID NO: 2049866 - RNA, 14 nt, Human
auguucugacauua

SEQ ID NO: 2049867 - RNA, 15 nt, Human
auguucugacauuaa

SEQ ID NO: 2049868 - RNA, 16 nt, Human
auguucugacauuaac

SEQ ID NO: 2049869 - RNA, 17 nt, Human
auguucugacauuaaca

SEQ ID NO: 2049870 - RNA, 15 nt, Human
auguuuuaaggcuuc

SEQ ID NO: 2049871 - RNA, 20 nt, Human
auguuuuaaauauagaauuu

SEQ ID NO: 2049872 - RNA, 18 nt, Human
auguuuuaagaggcaggg

SEQ ID NO: 2049873 - RNA, 16 nt, Human
auguuuuaagaggcag

SEQ ID NO: 2049874 - RNA, 11 nt, Human
auuaaauuaug

SEQ ID NO: 2049875 - RNA, 14 nt, Human
auguguaaguauuc

SEQ ID NO: 2049876 - RNA, 15 nt, Human
augugguuacacacu

SEQ ID NO: 2049877 - RNA, 15 nt, Human
auguggugggacagg

SEQ ID NO: 2049878 - RNA, 21 nt, Human
auguggugggacagggaccca

SEQ ID NO: 2049879 - RNA, 20 nt, Human
augugguugcaaggccgcug

SEQ ID NO: 2049880 - RNA, 16 nt, Human
augugggucaaggaau

SEQ ID NO: 2049881 - RNA, 11 nt, Human
agccuccugag

SEQ ID NO: 2049882 - RNA, 19 nt, Human
agccgucagccaaauguaa

SEQ ID NO: 2049883 - RNA, 22 nt, Human
agccucccgaguagcugggacu

SEQ ID NO: 2049884 - RNA, 12 nt, Human
agccucccugaa

SEQ ID NO: 2049885 - RNA, 22 nt, Human
agccucccucugaccugcaggc

SEQ ID NO: 2049886 - RNA, 11 nt, Human
agccucccuga

SEQ ID NO: 2049887 - RNA, 13 nt, Human
agccucccucuga

SEQ ID NO: 2049888 - RNA, 14 nt, Human
agccucccucugac

SEQ ID NO: 2049889 - RNA, 15 nt, Human
agccucccucugacc

SEQ ID NO: 2049890 - RNA, 21 nt, Human
agccucccucugaccugcagg

SEQ ID NO: 2049891 - RNA, 17 nt, Human
agccucccgaguagcug

SEQ ID NO: 2049892 - RNA, 22 nt, Human
agccucccgaauagcugggacu

SEQ ID NO: 2049893 - RNA, 20 nt, Human
agccucccgaauagcuggga

SEQ ID NO: 2049894 - RNA, 19 nt, Human
agccucccgaauagcuggg

SEQ ID NO: 2049895 - RNA, 18 nt, Human
agccucccgaauagcugg

SEQ ID NO: 2049896 - RNA, 20 nt, Human
agccucccaaagugcuggga

SEQ ID NO: 2049897 - RNA, 17 nt, Human
agccucccaaagugcug

SEQ ID NO: 2049898 - RNA, 16 nt, Human
agccgucagccaaaug

SEQ ID NO: 2049899 - RNA, 19 nt, Human
agccucccaaagugcuggg

SEQ ID NO: 2049900 - RNA, 18 nt, Human
agccucccaaagugcugg

SEQ ID NO: 2049901 - RNA, 19 nt, Human
agccggagugacagaguaa

SEQ ID NO: 2049902 - RNA, 15 nt, Human
agccggggccugccu

SEQ ID NO: 2049903 - RNA, 18 nt, Human
agccggggccugccuagc

SEQ ID NO: 2049904 - RNA, 19 nt, Human
agccggggccugccuagca

SEQ ID NO: 2049905 - RNA, 21 nt, Human
agccgagaucacgccacugca

SEQ ID NO: 2049906 - RNA, 19 nt, Human
agccgagauugcaccacug

SEQ ID NO: 2049907 - RNA, 20 nt, Human
agccgagauugcaccacugc

SEQ ID NO: 2049908 - RNA, 14 nt, Human
agccgcagccuccc

SEQ ID NO: 2049909 - RNA, 18 nt, Human
agccgcagccucccucug

SEQ ID NO: 2049910 - RNA, 16 nt, Human
agccgcaucccagacu

SEQ ID NO: 2049911 - RNA, 16 nt, Human
agccgcaucuucucca

SEQ ID NO: 2049912 - RNA, 17 nt, Human
agccgcaucuucuccau

SEQ ID NO: 2049913 - RNA, 19 nt, Human
agccuccugaguagcugga

SEQ ID NO: 2049914 - RNA, 20 nt, Human
agcccaaagugguauagaaa

SEQ ID NO: 2049915 - RNA, 23 nt, Human
agcccaaagugguauagaaaugc

SEQ ID NO: 2049916 - RNA, 16 nt, Human
agcccaaagcuguugg

SEQ ID NO: 2049917 - RNA, 19 nt, Human
agccccacccucagaugca

SEQ ID NO: 2049918 - RNA, 13 nt, Human
agccccagcacca

SEQ ID NO: 2049919 - RNA, 21 nt, Human
agccccagcaccaccaggucu

SEQ ID NO: 2049920 - RNA, 12 nt, Human
agccccagcacu

SEQ ID NO: 2049921 - RNA, 15 nt, Human
agccccagcacuaac

SEQ ID NO: 2049922 - RNA, 14 nt, Human
agccccagcccagc

SEQ ID NO: 2049923 - RNA, 15 nt, Human
agccccagcccagcc

SEQ ID NO: 2049924 - RNA, 17 nt, Human
agccccagcccagccca

SEQ ID NO: 2049925 - RNA, 23 nt, Human
agccccagcccagcccagcugcu

SEQ ID NO: 2049926 - RNA, 20 nt, Human
agccgagaucacgccacugc

SEQ ID NO: 2049927 - RNA, 19 nt, Human
agccgagaucacgccacug

SEQ ID NO: 2049928 - RNA, 21 nt, Human
agcccugaggugaaagggagc

SEQ ID NO: 2049929 - RNA, 22 nt, Human
agcccugaggugaaagggagcu

SEQ ID NO: 2049930 - RNA, 15 nt, Human
agcccugagcuuucu

SEQ ID NO: 2049931 - RNA, 23 nt, Human
agccccauaauuuuuuuuuuccu

SEQ ID NO: 2049932 - RNA, 17 nt, Human
agccccaucagcuccag

SEQ ID NO: 2049933 - RNA, 23 nt, Human
agccccagggucuucccuaccuc

SEQ ID NO: 2049934 - RNA, 16 nt, Human
agccccagugcccaca

SEQ ID NO: 2049935 - RNA, 13 nt, Human
agccccaggcagg

SEQ ID NO: 2049936 - RNA, 16 nt, Human
agccccaggcaggcug

SEQ ID NO: 2049937 - RNA, 20 nt, Human
agccccaggcaggcugugcg

SEQ ID NO: 2049938 - RNA, 18 nt, Human
agccccagggucuucccu

SEQ ID NO: 2049939 - RNA, 20 nt, Human
agccccagggucuucccuac

SEQ ID NO: 2049940 - RNA, 22 nt, Human
agccccagggucuucccuaccu

SEQ ID NO: 2049941 - RNA, 15 nt, Human
agccccacugcccuu

SEQ ID NO: 2049942 - RNA, 17 nt, Human
agcaguuguuauuacau

SEQ ID NO: 2049943 - RNA, 13 nt, Human
agcaugaaaaagc

SEQ ID NO: 2049944 - RNA, 14 nt, Human
agcaugaaaaagca

SEQ ID NO: 2049945 - RNA, 20 nt, Human
agcaucuucacuucuaaaug

SEQ ID NO: 2049946 - RNA, 23 nt, Human
agcaucuucacuucuaaaugcau

SEQ ID NO: 2049947 - RNA, 19 nt, Human
agcaucuucucacucccuu

SEQ ID NO: 2049948 - RNA, 23 nt, Human
agccaaagcuaggccuggccaga

SEQ ID NO: 2049949 - RNA, 20 nt, Human
agccaaagcuaggccuggcc

SEQ ID NO: 2049950 - RNA, 19 nt, Human
agccaaagcuaggccuggc

SEQ ID NO: 2049951 - RNA, 15 nt, Human
agcaugaagacagag

SEQ ID NO: 2049952 - RNA, 12 nt, Human
agcaugaagaca

SEQ ID NO: 2049953 - RNA, 13 nt, Human
agcaugcacaaag

SEQ ID NO: 2049954 - RNA, 14 nt, Human
agcaugcacaaagu

SEQ ID NO: 2049955 - RNA, 16 nt, Human
agcaugcacaaagugu

SEQ ID NO: 2049956 - RNA, 18 nt, Human
agcaugcacaaaguguau

SEQ ID NO: 2049957 - RNA, 19 nt, Human
agcaugcacaaaguguauu

SEQ ID NO: 2049958 - RNA, 21 nt, Human
agcaugcacaaaguguauuca

SEQ ID NO: 2049959 - RNA, 18 nt, Human
agccauuaccauggagac

SEQ ID NO: 2049960 - RNA, 20 nt, Human
agccauuaccauggagacaa

SEQ ID NO: 2049961 - RNA, 16 nt, Human
agcccaaagaaggaaa

SEQ ID NO: 2049962 - RNA, 16 nt, Human
agcagugagucucuuc

SEQ ID NO: 2049963 - RNA, 14 nt, Human
agcagugagccgca

SEQ ID NO: 2049964 - RNA, 22 nt, Human
agcagugagccgcaucuucucc

SEQ ID NO: 2049965 - RNA, 21 nt, Human
agcagucuacccaccucagcc

SEQ ID NO: 2049966 - RNA, 23 nt, Human
agcagucuacccaccucagccuc

SEQ ID NO: 2049967 - RNA, 13 nt, Human
agcagccagcucu

SEQ ID NO: 2049968 - RNA, 14 nt, Human
agcagccagcucuc

SEQ ID NO: 2049969 - RNA, 15 nt, Human
agcagccagcucuca

SEQ ID NO: 2049970 - RNA, 23 nt, Human
agcagccagcucucagccaacga

SEQ ID NO: 2049971 - RNA, 16 nt, Human
agcagccagcucucag

SEQ ID NO: 2049972 - RNA, 17 nt, Human
agcagccagcucucagc

SEQ ID NO: 2049973 - RNA, 18 nt, Human
agcagccagcucucagcc

SEQ ID NO: 2049974 - RNA, 19 nt, Human
agcagccagcucucagcca

SEQ ID NO: 2049975 - RNA, 12 nt, Human
agcagcccuccu

SEQ ID NO: 2049976 - RNA, 13 nt, Human
agcagcccuccuc

SEQ ID NO: 2049977 - RNA, 14 nt, Human
agcagcccuccuca

SEQ ID NO: 2049978 - RNA, 19 nt, Human
agcacuaaggugugcucug

SEQ ID NO: 2049979 - RNA, 16 nt, Human
agcacuaaagcagugg

SEQ ID NO: 2049980 - RNA, 17 nt, Human
agcacuaaagcagugga

SEQ ID NO: 2049981 - RNA, 20 nt, Human
agcacuaaagcaguggacac

SEQ ID NO: 2049982 - RNA, 23 nt, Human
agcacuaaagcaguggacaccag

SEQ ID NO: 2049983 - RNA, 20 nt, Human
agcacuaaggugugcucuga

SEQ ID NO: 2049984 - RNA, 16 nt, Human
agcacuaacguaaaua

SEQ ID NO: 2049985 - RNA, 17 nt, Human
agcacgugguaaaacac

SEQ ID NO: 2049986 - RNA, 16 nt, Human
agcacguuuaaaguuc

SEQ ID NO: 2049987 - RNA, 17 nt, Human
agcacguuuaaaguucu

SEQ ID NO: 2049988 - RNA, 18 nt, Human
agcacguuuaaaguucug

SEQ ID NO: 2049989 - RNA, 13 nt, Human
agcacuaaagcag

SEQ ID NO: 2049990 - RNA, 14 nt, Human
agcacuaaagcagu

SEQ ID NO: 2049991 - RNA, 19 nt, Human
agaugggacugggagggcc

SEQ ID NO: 2049992 - RNA, 15 nt, Human
agaugggacugggag

SEQ ID NO: 2049993 - RNA, 21 nt, Human
agauguaagagcuuuacaaaa

SEQ ID NO: 2049994 - RNA, 14 nt, Human
agacggauugcauu

SEQ ID NO: 2049995 - RNA, 16 nt, Human
agacggcacccaccca

SEQ ID NO: 2049996 - RNA, 19 nt, Human
agacggagucccaccuugg

SEQ ID NO: 2049997 - RNA, 15 nt, Human
agaccauagugacca

SEQ ID NO: 2049998 - RNA, 20 nt, Human
agaccacaggguucaaaaug

SEQ ID NO: 2049999 - RNA, 21 nt, Human
agaccacaggguucaaaaugu

SEQ ID NO: 2050000 - RNA, 14 nt, Human
agaccaaccugacc

SEQ ID NO: 2050001 - RNA, 13 nt, Human
agaccaagcuugu

SEQ ID NO: 2050002 - RNA, 17 nt, Human
agaccaagacucugaaa

SEQ ID NO: 2050003 - RNA, 16 nt, Human
agaccaagcuugucca

SEQ ID NO: 2050004 - RNA, 14 nt, Human
agaccaaggcggga

SEQ ID NO: 2050005 - RNA, 17 nt, Human
agaccaaggcgggagca

SEQ ID NO: 2050006 - RNA, 23 nt, Human
agaccaaggcgggagcaucucuu

SEQ ID NO: 2050007 - RNA, 20 nt, Human
agacacaaacaaacaagcua

SEQ ID NO: 2050008 - RNA, 21 nt, Human
agacugcaagugagcaaaccu

SEQ ID NO: 2050009 - RNA, 20 nt, Human
agagccugguugcccaggga

SEQ ID NO: 2050010 - RNA, 21 nt, Human
agagcccuguaucaacccaga

SEQ ID NO: 2050011 - RNA, 17 nt, Human
agagccugcugcauggg

SEQ ID NO: 2050012 - RNA, 13 nt, Human
agagccugcugga

SEQ ID NO: 2050013 - RNA, 16 nt, Human
agagccugcuggaucu

SEQ ID NO: 2050014 - RNA, 18 nt, Human
agagccuggugcugcugc

SEQ ID NO: 2050015 - RNA, 16 nt, Human
agagccuggugcugcu

SEQ ID NO: 2050016 - RNA, 10 nt, Human
agagccuggu

SEQ ID NO: 2050017 - RNA, 17 nt, Human
agagccccacacggagg

SEQ ID NO: 2050018 - RNA, 15 nt, Human
agagccccacacgga

SEQ ID NO: 2050019 - RNA, 21 nt, Human
agagccccgcaaaacccacug

SEQ ID NO: 2050020 - RNA, 22 nt, Human
agagccccgcaaaacccacuga

SEQ ID NO: 2050021 - RNA, 16 nt, Human
agagaguggcuccucc

SEQ ID NO: 2050022 - RNA, 14 nt, Human
agagaguggcuccu

SEQ ID NO: 2050023 - RNA, 23 nt, Human
agagaggguggugaccucugccu

SEQ ID NO: 2050024 - RNA, 14 nt, Human
agagaggagaaaca

SEQ ID NO: 2050025 - RNA, 16 nt, Human
agagaggagaaacaca

SEQ ID NO: 2050026 - RNA, 18 nt, Human
agagaggagaaacacauc

SEQ ID NO: 2050027 - RNA, 22 nt, Human
agagaggucaagcccaggagga

SEQ ID NO: 2050028 - RNA, 23 nt, Human
agagaggucaagcccaggaggac

SEQ ID NO: 2050029 - RNA, 15 nt, Human
agagaaggggaggag

SEQ ID NO: 2050030 - RNA, 14 nt, Human
agagaaggcagcag

SEQ ID NO: 2050031 - RNA, 12 nt, Human
agagaaggcagg

SEQ ID NO: 2050032 - RNA, 13 nt, Human
agagaaggcagga

SEQ ID NO: 2050033 - RNA, 20 nt, Human
agagaaggcaggaaugugug

SEQ ID NO: 2050034 - RNA, 22 nt, Human
agagaaggggaagcacucgugu

SEQ ID NO: 2050035 - RNA, 12 nt, Human
agagaaggggag

SEQ ID NO: 2050036 - RNA, 14 nt, Human
agagaggaaucaga

SEQ ID NO: 2050037 - RNA, 17 nt, Human
agagaggaaucagacuu

SEQ ID NO: 2050038 - RNA, 18 nt, Human
agagaggacgugggcggc

SEQ ID NO: 2050039 - RNA, 13 nt, Human
agagaaggaaugu

SEQ ID NO: 2050040 - RNA, 16 nt, Human
agagaaggaaugucuu

SEQ ID NO: 2050041 - RNA, 20 nt, Human
agagaaggaaugucuuuggu

SEQ ID NO: 2050042 - RNA, 14 nt, Human
agagaagccuuggu

SEQ ID NO: 2050043 - RNA, 18 nt, Human
agagaaaguacuucucca

SEQ ID NO: 2050044 - RNA, 12 nt, Human
agagaaagggga

SEQ ID NO: 2050045 - RNA, 10 nt, Human
agagaagaga

SEQ ID NO: 2050046 - RNA, 21 nt, Human
agagaagagauugugguuuca

SEQ ID NO: 2050047 - RNA, 14 nt, Human
agauaguacauaaa

SEQ ID NO: 2050048 - RNA, 18 nt, Human
agauaguacauaaaggug

SEQ ID NO: 2050049 - RNA, 17 nt, Human
agauaguagcauacauu

SEQ ID NO: 2050050 - RNA, 15 nt, Human
agauaguuacuauau

SEQ ID NO: 2050051 - RNA, 21 nt, Human
agaugagcccagcccuguucu

SEQ ID NO: 2050052 - RNA, 23 nt, Human
agauggcugugccucugccuguc

SEQ ID NO: 2050053 - RNA, 17 nt, Human
agaugagaauucagcug

SEQ ID NO: 2050054 - RNA, 19 nt, Human
agaugagaauucagcugcc

SEQ ID NO: 2050055 - RNA, 20 nt, Human
agaugagaauucagcugccc

SEQ ID NO: 2050056 - RNA, 14 nt, Human
agaugacugagucc

SEQ ID NO: 2050057 - RNA, 15 nt, Human
agaugacugaguccu

SEQ ID NO: 2050058 - RNA, 14 nt, Human
agaugaccccuccc

SEQ ID NO: 2050059 - RNA, 19 nt, Human
agaucugugccccaugccu

SEQ ID NO: 2050060 - RNA, 12 nt, Human
agaucugugccc

SEQ ID NO: 2050061 - RNA, 13 nt, Human
agaucugugcccc

SEQ ID NO: 2050062 - RNA, 14 nt, Human
agaucugugcccca

SEQ ID NO: 2050063 - RNA, 16 nt, Human
agaucugugccccaug

SEQ ID NO: 2050064 - RNA, 11 nt, Human
agauagaaaua

SEQ ID NO: 2050065 - RNA, 15 nt, Human
agauagaaauaaaua

SEQ ID NO: 2050066 - RNA, 18 nt, Human
agauagaaauaaauagcu

SEQ ID NO: 2050067 - RNA, 22 nt, Human
agauagaaauaaauagcuauau

SEQ ID NO: 2050068 - RNA, 13 nt, Human
agauagaagaaaa

SEQ ID NO: 2050069 - RNA, 14 nt, Human
agauagaagaaaaa

SEQ ID NO: 2050070 - RNA, 14 nt, Human
agaguuaaucaacu

SEQ ID NO: 2050071 - RNA, 19 nt, Human
agaguuaaucaacugaaag

SEQ ID NO: 2050072 - RNA, 21 nt, Human
agauacuuggaccgaguagag

SEQ ID NO: 2050073 - RNA, 22 nt, Human
agauacuuggggggcugaggug

SEQ ID NO: 2050074 - RNA, 12 nt, Human
agaguuaagaau

SEQ ID NO: 2050075 - RNA, 13 nt, Human
agaguuaagaaug

SEQ ID NO: 2050076 - RNA, 14 nt, Human
agaguuaagaaugu

SEQ ID NO: 2050077 - RNA, 20 nt, Human
agaguuaauauauagaaggg

SEQ ID NO: 2050078 - RNA, 23 nt, Human
agaggguggugaccucugccuga

SEQ ID NO: 2050079 - RNA, 18 nt, Human
agaggggcuuucuggaga

SEQ ID NO: 2050080 - RNA, 15 nt, Human
agaggggcagaacag

SEQ ID NO: 2050081 - RNA, 16 nt, Human
agaggggcagaacagc

SEQ ID NO: 2050082 - RNA, 23 nt, Human
agaguuaaauagaguauaugcac

SEQ ID NO: 2050083 - RNA, 13 nt, Human
agaggguuccugu

SEQ ID NO: 2050084 - RNA, 22 nt, Human
agaggggaacagacuggaagca

SEQ ID NO: 2050085 - RNA, 22 nt, Human
agaggggaaaccaguguagccu

SEQ ID NO: 2050086 - RNA, 19 nt, Human
agaggggaauaauagaaga

SEQ ID NO: 2050087 - RNA, 20 nt, Human
agaggggaauaauagaagaa

SEQ ID NO: 2050088 - RNA, 13 nt, Human
agaggagaggggc

SEQ ID NO: 2050089 - RNA, 20 nt, Human
agggacucaucauuuccauu

SEQ ID NO: 2050090 - RNA, 17 nt, Human
agggacuaggagcacug

SEQ ID NO: 2050091 - RNA, 20 nt, Human
aggcugucuucucaggcucu

SEQ ID NO: 2050092 - RNA, 21 nt, Human
aggcugucuucucaggcucug

SEQ ID NO: 2050093 - RNA, 22 nt, Human
aggcugucuucucaggcucugc

SEQ ID NO: 2050094 - RNA, 23 nt, Human
aggcugucuucucaggcucugcc

SEQ ID NO: 2050095 - RNA, 15 nt, Human
aggcugugggccuca

SEQ ID NO: 2050096 - RNA, 18 nt, Human
aggcugugggccucaagg

SEQ ID NO: 2050097 - RNA, 18 nt, Human
aggcugccucucccauca

SEQ ID NO: 2050098 - RNA, 19 nt, Human
aggcugccugagcaccucc

SEQ ID NO: 2050099 - RNA, 23 nt, Human
aggcugccugagcaccucccagc

SEQ ID NO: 2050100 - RNA, 23 nt, Human
aggcuauacuugucuuguucacc

SEQ ID NO: 2050101 - RNA, 14 nt, Human
aggcucuucuccuu

SEQ ID NO: 2050102 - RNA, 15 nt, Human
aggcucuuucugggc

SEQ ID NO: 2050103 - RNA, 18 nt, Human
aggcucuuucugggccaa

SEQ ID NO: 2050104 - RNA, 20 nt, Human
aggcucuuucugggccaagu

SEQ ID NO: 2050105 - RNA, 13 nt, Human
aggcugaaagagg

SEQ ID NO: 2050106 - RNA, 15 nt, Human
aggcugaccaagaga

SEQ ID NO: 2050107 - RNA, 17 nt, Human
aggcugaccaagagaga

SEQ ID NO: 2050108 - RNA, 14 nt, Human
aggcugaccaagag

SEQ ID NO: 2050109 - RNA, 16 nt, Human
aggcugaaagaggcca

SEQ ID NO: 2050110 - RNA, 17 nt, Human
aggcugaaagaggccaa

SEQ ID NO: 2050111 - RNA, 18 nt, Human
aggcugaccaagagagaa

SEQ ID NO: 2050112 - RNA, 22 nt, Human
aggcugaggggaggaucacugg

SEQ ID NO: 2050113 - RNA, 15 nt, Human
aggcugcagcgagcu

SEQ ID NO: 2050114 - RNA, 13 nt, Human
aggcagacagcag

SEQ ID NO: 2050115 - RNA, 14 nt, Human
aggcagacagcagc

SEQ ID NO: 2050116 - RNA, 15 nt, Human
aggcagacagcagcu

SEQ ID NO: 2050117 - RNA, 18 nt, Human
aggcagacagcagcucag

SEQ ID NO: 2050118 - RNA, 19 nt, Human
aggcagacagcagcucagg

SEQ ID NO: 2050119 - RNA, 20 nt, Human
aggcagacagcagcucaggc

SEQ ID NO: 2050120 - RNA, 21 nt, Human
aggcagacagcagcucaggca

SEQ ID NO: 2050121 - RNA, 17 nt, Human
agggcacaccgggcacu

SEQ ID NO: 2050122 - RNA, 21 nt, Human
agggcacaccgggcacucaga

SEQ ID NO: 2050123 - RNA, 20 nt, Human
agggcacaccgggcacucag

SEQ ID NO: 2050124 - RNA, 19 nt, Human
agggcgggaggauguucug

SEQ ID NO: 2050125 - RNA, 21 nt, Human
aggggauagagagagaccacu

SEQ ID NO: 2050126 - RNA, 16 nt, Human
agggcgugacucaccc

SEQ ID NO: 2050127 - RNA, 19 nt, Human
aggggcaaacaccugcuga

SEQ ID NO: 2050128 - RNA, 19 nt, Human
aggggauguauccaugggg

SEQ ID NO: 2050129 - RNA, 22 nt, Human
aggggauguauccaugggggca

SEQ ID NO: 2050130 - RNA, 15 nt, Human
agggcgugacucacc

SEQ ID NO: 2050131 - RNA, 14 nt, Human
aggggaugggaggu

SEQ ID NO: 2050132 - RNA, 15 nt, Human
aggggcacagggucu

SEQ ID NO: 2050133 - RNA, 14 nt, Human
aggggcagaacagc

SEQ ID NO: 2050134 - RNA, 18 nt, Human
aggggcaacgaagaaaaa

SEQ ID NO: 2050135 - RNA, 19 nt, Human
aggggcaacgaagaaaaaa

SEQ ID NO: 2050136 - RNA, 20 nt, Human
aggggcaacgaagaaaaaaa

SEQ ID NO: 2050137 - RNA, 17 nt, Human
aggggcagaaaaacucu

SEQ ID NO: 2050138 - RNA, 12 nt, Human
aggggcccuggu

SEQ ID NO: 2050139 - RNA, 14 nt, Human
aggggcccguggga

SEQ ID NO: 2050140 - RNA, 15 nt, Human
agguacagagaagga

SEQ ID NO: 2050141 - RNA, 16 nt, Human
agguacagagaaggaa

SEQ ID NO: 2050142 - RNA, 17 nt, Human
agguaccccagcucugc

SEQ ID NO: 2050143 - RNA, 19 nt, Human
agguaccccagcucugcuu

SEQ ID NO: 2050144 - RNA, 20 nt, Human
agguaccccagcucugcuug

SEQ ID NO: 2050145 - RNA, 21 nt, Human
agguaccccagcucugcuugc

SEQ ID NO: 2050146 - RNA, 21 nt, Human
agguaccacugauuuggagau

SEQ ID NO: 2050147 - RNA, 13 nt, Human
agguucagcuugu

SEQ ID NO: 2050148 - RNA, 16 nt, Human
agguucacuaaagcag

SEQ ID NO: 2050149 - RNA, 15 nt, Human
agguucaugcccaag

SEQ ID NO: 2050150 - RNA, 21 nt, Human
agguucaugccaccauggcca

SEQ ID NO: 2050151 - RNA, 14 nt, Human
agguuaauguucau

SEQ ID NO: 2050152 - RNA, 15 nt, Human
agguuaauaaaguaa

SEQ ID NO: 2050153 - RNA, 15 nt, Human
agguggcagcccugu

SEQ ID NO: 2050154 - RNA, 13 nt, Human
agguggcagcccu

SEQ ID NO: 2050155 - RNA, 14 nt, Human
agguggcagcccug

SEQ ID NO: 2050156 - RNA, 17 nt, Human
aggugcugccauccagg

SEQ ID NO: 2050157 - RNA, 16 nt, Human
aggugcugccauccag

SEQ ID NO: 2050158 - RNA, 16 nt, Human
agguccuucugcugga

SEQ ID NO: 2050159 - RNA, 16 nt, Human
agguccugggggccug

SEQ ID NO: 2050160 - RNA, 17 nt, Human
agguccugggggccuga

SEQ ID NO: 2050161 - RNA, 18 nt, Human
agguccugggggccugac

SEQ ID NO: 2050162 - RNA, 19 nt, Human
agguccugggggccugacc

SEQ ID NO: 2050163 - RNA, 21 nt, Human
agguccugggggccugaccuc

SEQ ID NO: 2050164 - RNA, 22 nt, Human
agguccugggggccugaccucc

SEQ ID NO: 2050165 - RNA, 21 nt, Human
aggucgaccccaaagccccuu

SEQ ID NO: 2050166 - RNA, 14 nt, Human
aggucgaggcagga

SEQ ID NO: 2050167 - RNA, 12 nt, Human
aggugcugggag

SEQ ID NO: 2050168 - RNA, 13 nt, Human
aggugcugggagg

SEQ ID NO: 2050169 - RNA, 14 nt, Human
aggugcuguuguca

SEQ ID NO: 2050170 - RNA, 19 nt, Human
aggugcuguugucauugcu

SEQ ID NO: 2050171 - RNA, 21 nt, Human
aggugcuguugucauugcuuu

SEQ ID NO: 2050172 - RNA, 23 nt, Human
aggugcuguugucauugcuuuac

SEQ ID NO: 2050173 - RNA, 15 nt, Human
aggugcugggaggga

SEQ ID NO: 2050174 - RNA, 23 nt, Human
aggugcuuauucucaaagcagga

SEQ ID NO: 2050175 - RNA, 13 nt, Human
agguggaaaaaca

SEQ ID NO: 2050176 - RNA, 18 nt, Human
agguggaaaaacaucuga

SEQ ID NO: 2050177 - RNA, 15 nt, Human
agguggaagcccucc

SEQ ID NO: 2050178 - RNA, 16 nt, Human
agguggaagcccuccu

SEQ ID NO: 2050179 - RNA, 11 nt, Human
agguggaagcc

SEQ ID NO: 2050180 - RNA, 13 nt, Human
agguggaagcccu

SEQ ID NO: 2050181 - RNA, 14 nt, Human
agguggaagcccuc

SEQ ID NO: 2050182 - RNA, 17 nt, Human
aggacccggaggggccu

SEQ ID NO: 2050183 - RNA, 15 nt, Human
aggaccccucaccuu

SEQ ID NO: 2050184 - RNA, 23 nt, Human
aggaccccucaccuugcaacaca

SEQ ID NO: 2050185 - RNA, 14 nt, Human
aggaccucagguga

SEQ ID NO: 2050186 - RNA, 20 nt, Human
aggaccucaggugagaagca

SEQ ID NO: 2050187 - RNA, 16 nt, Human
aggagaagaaggaaau

SEQ ID NO: 2050188 - RNA, 20 nt, Human
aggagaagaaggaaaugaau

SEQ ID NO: 2050189 - RNA, 11 nt, Human
aggaccucugg

SEQ ID NO: 2050190 - RNA, 12 nt, Human
aggaccucuggg

SEQ ID NO: 2050191 - RNA, 13 nt, Human
aggaccucugggc

SEQ ID NO: 2050192 - RNA, 14 nt, Human
aggaccucugggcu

SEQ ID NO: 2050193 - RNA, 14 nt, Human
aggagaaccacuac

SEQ ID NO: 2050194 - RNA, 15 nt, Human
aggagaaccacuaca

SEQ ID NO: 2050195 - RNA, 15 nt, Human
aggagagcuagcagc

SEQ ID NO: 2050196 - RNA, 12 nt, Human
aggagagccugg

SEQ ID NO: 2050197 - RNA, 13 nt, Human
aggagagccuggu

SEQ ID NO: 2050198 - RNA, 14 nt, Human
aggagaggggcaca

SEQ ID NO: 2050199 - RNA, 16 nt, Human
aggagaggggcacagg

SEQ ID NO: 2050200 - RNA, 18 nt, Human
aggagaggggcacagggu

SEQ ID NO: 2050201 - RNA, 13 nt, Human
aggagaggggcag

SEQ ID NO: 2050202 - RNA, 18 nt, Human
aggagaggggcagaacag

SEQ ID NO: 2050203 - RNA, 19 nt, Human
aggagaggggcagaacagc

SEQ ID NO: 2050204 - RNA, 20 nt, Human
aggaccccuccaugugggcu

SEQ ID NO: 2050205 - RNA, 13 nt, Human
aggaccccucacc

SEQ ID NO: 2050206 - RNA, 17 nt, Human
aggaccaaaaaaauaag

SEQ ID NO: 2050207 - RNA, 18 nt, Human
aggaccaacaagggcagu

SEQ ID NO: 2050208 - RNA, 19 nt, Human
aggaccaacaagggcagug

SEQ ID NO: 2050209 - RNA, 12 nt, Human
aggaccacuccu

SEQ ID NO: 2050210 - RNA, 16 nt, Human
aggaccacuccuguac

SEQ ID NO: 2050211 - RNA, 22 nt, Human
aggaccacuccuguacacugaa

SEQ ID NO: 2050212 - RNA, 20 nt, Human
aggaacgguaaauuucugug

SEQ ID NO: 2050213 - RNA, 23 nt, Human
aggcagaagaauugaacccagga

SEQ ID NO: 2050214 - RNA, 16 nt, Human
aggcacuguacuaggc

SEQ ID NO: 2050215 - RNA, 22 nt, Human
aggcagaagaauugaacccagg

SEQ ID NO: 2050216 - RNA, 22 nt, Human
aggcacugcugcccagccucca

SEQ ID NO: 2050217 - RNA, 16 nt, Human
aggcacugcugcccag

SEQ ID NO: 2050218 - RNA, 14 nt, Human
aggcacugcugccc

SEQ ID NO: 2050219 - RNA, 20 nt, Human
aggauguucugggacacagu

SEQ ID NO: 2050220 - RNA, 14 nt, Human
aggagggucaggaa

SEQ ID NO: 2050221 - RNA, 17 nt, Human
aggagggucaggaagga

SEQ ID NO: 2050222 - RNA, 18 nt, Human
aggagggucaggaaggau

SEQ ID NO: 2050223 - RNA, 17 nt, Human
aggaggggauagagaga

SEQ ID NO: 2050224 - RNA, 16 nt, Human
aggauucuuccucccu

SEQ ID NO: 2050225 - RNA, 12 nt, Human
aggauucuuccu

SEQ ID NO: 2050226 - RNA, 13 nt, Human
aggauucuaugag

SEQ ID NO: 2050227 - RNA, 15 nt, Human
aggauucuaugaggc

SEQ ID NO: 2050228 - RNA, 16 nt, Human
aggauucuaugaggca

SEQ ID NO: 2050229 - RNA, 14 nt, Human
aggauucuccuuuu

SEQ ID NO: 2050230 - RNA, 16 nt, Human
agcugacaaaauuuug

SEQ ID NO: 2050231 - RNA, 19 nt, Human
agcugacaaaauuuugcuc

SEQ ID NO: 2050232 - RNA, 21 nt, Human
agcuccuccuugucuuggcag

SEQ ID NO: 2050233 - RNA, 22 nt, Human
agcuccuccuugucuuggcagc

SEQ ID NO: 2050234 - RNA, 17 nt, Human
agcuccucugggcagga

SEQ ID NO: 2050235 - RNA, 19 nt, Human
agcuccucugggcaggacc

SEQ ID NO: 2050236 - RNA, 20 nt, Human
agcuccucugggcaggaccu

SEQ ID NO: 2050237 - RNA, 13 nt, Human
agcuccucuuccu

SEQ ID NO: 2050238 - RNA, 22 nt, Human
agcuccuggucuugagaugucu

SEQ ID NO: 2050239 - RNA, 16 nt, Human
agcuccugggaaggcu

SEQ ID NO: 2050240 - RNA, 23 nt, Human
agcuccugggaaggcuacucacc

SEQ ID NO: 2050241 - RNA, 20 nt, Human
agcuccuggucuugagaugu

SEQ ID NO: 2050242 - RNA, 23 nt, Human
agcuccucaacucaccuaauguu

SEQ ID NO: 2050243 - RNA, 16 nt, Human
agcuccucaacucacc

SEQ ID NO: 2050244 - RNA, 21 nt, Human
agcuggucccacucaguccau

SEQ ID NO: 2050245 - RNA, 19 nt, Human
agcuggugcauuacagaga

SEQ ID NO: 2050246 - RNA, 20 nt, Human
agcuggugcauuacagagag

SEQ ID NO: 2050247 - RNA, 21 nt, Human
agcuggugcauuacagagagg

SEQ ID NO: 2050248 - RNA, 22 nt, Human
agcuggugcauuacagagagga

SEQ ID NO: 2050249 - RNA, 10 nt, Human
agcuggugca

SEQ ID NO: 2050250 - RNA, 12 nt, Human
agcuggugcauu

SEQ ID NO: 2050251 - RNA, 13 nt, Human
agcuggugcauua

SEQ ID NO: 2050252 - RNA, 14 nt, Human
agcuggugcauuac

SEQ ID NO: 2050253 - RNA, 17 nt, Human
agcuggugcauuacaga

SEQ ID NO: 2050254 - RNA, 18 nt, Human
agcuggugcauuacagag

SEQ ID NO: 2050255 - RNA, 22 nt, Human
agcugggugucaagagggucug

SEQ ID NO: 2050256 - RNA, 17 nt, Human
agcugggugucaagagg

SEQ ID NO: 2050257 - RNA, 22 nt, Human
agcugggugaguggggagacac

SEQ ID NO: 2050258 - RNA, 16 nt, Human
agcugcucugucuucu

SEQ ID NO: 2050259 - RNA, 12 nt, Human
agcugcucugcc

SEQ ID NO: 2050260 - RNA, 13 nt, Human
agcugcucugccc

SEQ ID NO: 2050261 - RNA, 14 nt, Human
agcugcucugccca

SEQ ID NO: 2050262 - RNA, 15 nt, Human
agcugcucugcccag

SEQ ID NO: 2050263 - RNA, 16 nt, Human
agcugcucugcccaga

SEQ ID NO: 2050264 - RNA, 17 nt, Human
agcugcucugcccagag

SEQ ID NO: 2050265 - RNA, 18 nt, Human
agcugcucugcccagagc

SEQ ID NO: 2050266 - RNA, 19 nt, Human
agcugcucugcccagagcu

SEQ ID NO: 2050267 - RNA, 20 nt, Human
agcugcucugcccagagcug

SEQ ID NO: 2050268 - RNA, 21 nt, Human
agcugcucugcccagagcugg

SEQ ID NO: 2050269 - RNA, 21 nt, Human
agcugaggucucuugagggag

SEQ ID NO: 2050270 - RNA, 23 nt, Human
agcugaggucucuugagggagcu

SEQ ID NO: 2050271 - RNA, 18 nt, Human
agcugaggucucuugagg

SEQ ID NO: 2050272 - RNA, 23 nt, Human
agcugacccagccccuugagaaa

SEQ ID NO: 2050273 - RNA, 16 nt, Human
agcugacccagccccu

SEQ ID NO: 2050274 - RNA, 15 nt, Human
agcugcuccccuccc

SEQ ID NO: 2050275 - RNA, 13 nt, Human
agcugcuccccuc

SEQ ID NO: 2050276 - RNA, 14 nt, Human
agcugcuccccucc

SEQ ID NO: 2050277 - RNA, 19 nt, Human
agcugcuccccucccuccu

SEQ ID NO: 2050278 - RNA, 12 nt, Human
agcugcuccccu

SEQ ID NO: 2050279 - RNA, 14 nt, Human
agcuggugcccgga

SEQ ID NO: 2050280 - RNA, 22 nt, Human
agcuguaagaagagacugggaa

SEQ ID NO: 2050281 - RNA, 23 nt, Human
agcuguaagaagagacugggaag

SEQ ID NO: 2050282 - RNA, 20 nt, Human
agcuguaggugugcgggacc

SEQ ID NO: 2050283 - RNA, 11 nt, Human
agcuguaucaa

SEQ ID NO: 2050284 - RNA, 15 nt, Human
agcugagugagcuga

SEQ ID NO: 2050285 - RNA, 15 nt, Human
agcuucagccaggag

SEQ ID NO: 2050286 - RNA, 17 nt, Human
agcuucauauaccagca

SEQ ID NO: 2050287 - RNA, 20 nt, Human
agcuucagccaggagcuggg

SEQ ID NO: 2050288 - RNA, 19 nt, Human
agcuucagccaggagcugg

SEQ ID NO: 2050289 - RNA, 17 nt, Human
agcuucagccaggagcu

SEQ ID NO: 2050290 - RNA, 19 nt, Human
agcuucucauccugcaggc

SEQ ID NO: 2050291 - RNA, 23 nt, Human
agcuuccuuuguuuuuuuuuccu

SEQ ID NO: 2050292 - RNA, 23 nt, Human
agcuucuagugauuucuggggcc

SEQ ID NO: 2050293 - RNA, 12 nt, Human
aggaaaaaggac

SEQ ID NO: 2050294 - RNA, 14 nt, Human
aggaaaaaggacag

SEQ ID NO: 2050295 - RNA, 20 nt, Human
aggaaaaaggacaggcagaa

SEQ ID NO: 2050296 - RNA, 22 nt, Human
aggaaaaaggacaggcagaaag

SEQ ID NO: 2050297 - RNA, 23 nt, Human
aggaaaaaguaucauggaaauau

SEQ ID NO: 2050298 - RNA, 14 nt, Human
aggaaaucucaccc

SEQ ID NO: 2050299 - RNA, 19 nt, Human
aggaaccuggaccaaagcu

SEQ ID NO: 2050300 - RNA, 20 nt, Human
aggaaccuggaccaaagcug

SEQ ID NO: 2050301 - RNA, 16 nt, Human
aggaacgguaaauuuc

SEQ ID NO: 2050302 - RNA, 22 nt, Human
aggaaaucuuguccagagacaa

SEQ ID NO: 2050303 - RNA, 16 nt, Human
aggaaaugaauuucuc

SEQ ID NO: 2050304 - RNA, 16 nt, Human
aggaaaucucacccca

SEQ ID NO: 2050305 - RNA, 16 nt, Human
agcuucuuaaaugaga

SEQ ID NO: 2050306 - RNA, 18 nt, Human
agcuucuuaaaugagaag

SEQ ID NO: 2050307 - RNA, 20 nt, Human
agcuucuuaauauaacugcc

SEQ ID NO: 2050308 - RNA, 21 nt, Human
agcuucuuaauauaacugccu

SEQ ID NO: 2050309 - RNA, 22 nt, Human
agcuucuuaauauaacugccuu

SEQ ID NO: 2050310 - RNA, 23 nt, Human
agcuucuuaauauaacugccuua

SEQ ID NO: 2050311 - RNA, 13 nt, Human
agcuuuucccuuc

SEQ ID NO: 2050312 - RNA, 16 nt, Human
agcuuuucccuucuuu

SEQ ID NO: 2050313 - RNA, 17 nt, Human
cuccuaaaguagacuuc

SEQ ID NO: 2050314 - RNA, 23 nt, Human
cuccucuucaacugaccagccuc

SEQ ID NO: 2050315 - RNA, 18 nt, Human
cuccucuucaacugacca

SEQ ID NO: 2050316 - RNA, 19 nt, Human
cuccucuuaaaaaauaaaa

SEQ ID NO: 2050317 - RNA, 20 nt, Human
cuccucuuaaaaaauaaaaa

SEQ ID NO: 2050318 - RNA, 21 nt, Human
cuccucuuaaaaaauaaaaac

SEQ ID NO: 2050319 - RNA, 23 nt, Human
cuccucuuaaaaaauaaaaacug

SEQ ID NO: 2050320 - RNA, 18 nt, Human
cuccucucuaaccuccuu

SEQ ID NO: 2050321 - RNA, 19 nt, Human
cuccucucuaaccuccuuu

SEQ ID NO: 2050322 - RNA, 16 nt, Human
cuccuggcccacugca

SEQ ID NO: 2050323 - RNA, 18 nt, Human
cuccuggcccacugcauc

SEQ ID NO: 2050324 - RNA, 12 nt, Human
cuccugggaagg

SEQ ID NO: 2050325 - RNA, 22 nt, Human
cuccugggaaggcuacucaccu

SEQ ID NO: 2050326 - RNA, 23 nt, Human
cuccugggaaggcuacucaccuu

SEQ ID NO: 2050327 - RNA, 13 nt, Human
cuccugggccccu

SEQ ID NO: 2050328 - RNA, 17 nt, Human
cucccccauccuccccu

SEQ ID NO: 2050329 - RNA, 13 nt, Human
cuccccccacugc

SEQ ID NO: 2050330 - RNA, 14 nt, Human
cuccccccacugca

SEQ ID NO: 2050331 - RNA, 15 nt, Human
cuccccccacugcag

SEQ ID NO: 2050332 - RNA, 16 nt, Human
cuccccccacugcagg

SEQ ID NO: 2050333 - RNA, 15 nt, Human
cucccccauccuccc

SEQ ID NO: 2050334 - RNA, 12 nt, Human
cucccccauccu

SEQ ID NO: 2050335 - RNA, 11 nt, Human
cucccccaucc

SEQ ID NO: 2050336 - RNA, 21 nt, Human
cucccccaacccccaccccac

SEQ ID NO: 2050337 - RNA, 23 nt, Human
cucccccaacccccaccccacac

SEQ ID NO: 2050338 - RNA, 14 nt, Human
cucccccacccccu

SEQ ID NO: 2050339 - RNA, 19 nt, Human
cucccccacccccucccca

SEQ ID NO: 2050340 - RNA, 15 nt, Human
cucgaacuggcugca

SEQ ID NO: 2050341 - RNA, 14 nt, Human
cucgaacuggcugc

SEQ ID NO: 2050342 - RNA, 13 nt, Human
cucgaacuggcug

SEQ ID NO: 2050343 - RNA, 22 nt, Human
cuccuggggguucuuucuuccu

SEQ ID NO: 2050344 - RNA, 20 nt, Human
cuccuggggguucuuucuuc

SEQ ID NO: 2050345 - RNA, 18 nt, Human
cuccuggggguucuuucu

SEQ ID NO: 2050346 - RNA, 14 nt, Human
cuccuggggguucu

SEQ ID NO: 2050347 - RNA, 23 nt, Human
cuccuggggguucuuucuuccuc

SEQ ID NO: 2050348 - RNA, 14 nt, Human
cucgaacuccuggg

SEQ ID NO: 2050349 - RNA, 15 nt, Human
cucgaacuccugggc

SEQ ID NO: 2050350 - RNA, 17 nt, Human
cucgaacuccugggcuc

SEQ ID NO: 2050351 - RNA, 20 nt, Human
cuccugggccccucccuacc

SEQ ID NO: 2050352 - RNA, 22 nt, Human
cuccugggccccucccuaccuc

SEQ ID NO: 2050353 - RNA, 23 nt, Human
cuccugggccccucccuaccuca

SEQ ID NO: 2050354 - RNA, 21 nt, Human
cucgugguaggacuguagaaa

SEQ ID NO: 2050355 - RNA, 18 nt, Human
cucguuagggaagagaaa

SEQ ID NO: 2050356 - RNA, 22 nt, Human
cucguuagggaagagaaacagg

SEQ ID NO: 2050357 - RNA, 16 nt, Human
cucucaggcaugccug

SEQ ID NO: 2050358 - RNA, 14 nt, Human
cucucaggaucaag

SEQ ID NO: 2050359 - RNA, 12 nt, Human
cucucaccuccu

SEQ ID NO: 2050360 - RNA, 14 nt, Human
cucuaucucacagc

SEQ ID NO: 2050361 - RNA, 18 nt, Human
cucuaucucacagcacac

SEQ ID NO: 2050362 - RNA, 11 nt, Human
cucuauauuua

SEQ ID NO: 2050363 - RNA, 22 nt, Human
cucuauauuuagauuguuaaaa

SEQ ID NO: 2050364 - RNA, 17 nt, Human
cucuaaaauagccacuu

SEQ ID NO: 2050365 - RNA, 14 nt, Human
cuccaaccuggaca

SEQ ID NO: 2050366 - RNA, 14 nt, Human
cuccaagcuccauc

SEQ ID NO: 2050367 - RNA, 19 nt, Human
cuccaagcuccaucuccac

SEQ ID NO: 2050368 - RNA, 18 nt, Human
cuccaagcuccaucucca

SEQ ID NO: 2050369 - RNA, 16 nt, Human
cuccacuggauggagg

SEQ ID NO: 2050370 - RNA, 16 nt, Human
cucagucucaggagca

SEQ ID NO: 2050371 - RNA, 21 nt, Human
cucaugccaaccccgcccuag

SEQ ID NO: 2050372 - RNA, 18 nt, Human
cucaucuuagugccugag

SEQ ID NO: 2050373 - RNA, 13 nt, Human
cucaucugucugg

SEQ ID NO: 2050374 - RNA, 23 nt, Human
cucaucugucuggaggggagcuc

SEQ ID NO: 2050375 - RNA, 12 nt, Human
cucaucugugau

SEQ ID NO: 2050376 - RNA, 14 nt, Human
cucagucucaggag

SEQ ID NO: 2050377 - RNA, 15 nt, Human
cucagucucaggagc

SEQ ID NO: 2050378 - RNA, 18 nt, Human
cucaguagucagacugga

SEQ ID NO: 2050379 - RNA, 13 nt, Human
cucagucucagga

SEQ ID NO: 2050380 - RNA, 20 nt, Human
cucagguuugccugagggcg

SEQ ID NO: 2050381 - RNA, 14 nt, Human
cucaguaaaaugaa

SEQ ID NO: 2050382 - RNA, 21 nt, Human
cuccacuucuuguuccccacu

SEQ ID NO: 2050383 - RNA, 23 nt, Human
cucccacccccuucucugcucca

SEQ ID NO: 2050384 - RNA, 16 nt, Human
cuccccaugugccugc

SEQ ID NO: 2050385 - RNA, 20 nt, Human
cuccccaugugccugcacca

SEQ ID NO: 2050386 - RNA, 21 nt, Human
cuccccaugugccugcaccag

SEQ ID NO: 2050387 - RNA, 23 nt, Human
cuccccaugugccugcaccagga

SEQ ID NO: 2050388 - RNA, 21 nt, Human
cuccccauuagagucagccuu

SEQ ID NO: 2050389 - RNA, 18 nt, Human
cuccagggccacgugcca

SEQ ID NO: 2050390 - RNA, 19 nt, Human
cuccagggccacgugccag

SEQ ID NO: 2050391 - RNA, 23 nt, Human
cuccagggccacgugccaggccc

SEQ ID NO: 2050392 - RNA, 13 nt, Human
cucccaccacagc

SEQ ID NO: 2050393 - RNA, 14 nt, Human
cucccaccacagca

SEQ ID NO: 2050394 - RNA, 19 nt, Human
cucccaccacagcaggugu

SEQ ID NO: 2050395 - RNA, 12 nt, Human
cucccaccccac

SEQ ID NO: 2050396 - RNA, 13 nt, Human
cucccaccccacc

SEQ ID NO: 2050397 - RNA, 19 nt, Human
cucccaccccacccccuuc

SEQ ID NO: 2050398 - RNA, 22 nt, Human
cucccaccccacccccuucagu

SEQ ID NO: 2050399 - RNA, 23 nt, Human
cucccaccccacccccuucagug

SEQ ID NO: 2050400 - RNA, 15 nt, Human
cucccacccccaucu

SEQ ID NO: 2050401 - RNA, 19 nt, Human
cucccacccccaucucucc

SEQ ID NO: 2050402 - RNA, 20 nt, Human
cucccacccccaucucuccc

SEQ ID NO: 2050403 - RNA, 22 nt, Human
cucccacccccaucucucccuc

SEQ ID NO: 2050404 - RNA, 18 nt, Human
cucccacccccuucucug

SEQ ID NO: 2050405 - RNA, 22 nt, Human
cucccacccccuucucugcucc

SEQ ID NO: 2050406 - RNA, 17 nt, Human
cucuucaggccucccuc

SEQ ID NO: 2050407 - RNA, 13 nt, Human
cucuucaggccuc

SEQ ID NO: 2050408 - RNA, 14 nt, Human
cucuucaggccucc

SEQ ID NO: 2050409 - RNA, 15 nt, Human
cucuucaggccuccc

SEQ ID NO: 2050410 - RNA, 16 nt, Human
cucuucaggccucccu

SEQ ID NO: 2050411 - RNA, 17 nt, Human
cucuucaacugaccagc

SEQ ID NO: 2050412 - RNA, 16 nt, Human
cucuucaacugaccag

SEQ ID NO: 2050413 - RNA, 20 nt, Human
cucuucaacugaccagccuc

SEQ ID NO: 2050414 - RNA, 15 nt, Human
cucuuauuuuacaau

SEQ ID NO: 2050415 - RNA, 14 nt, Human
cucuucaaucucuu

SEQ ID NO: 2050416 - RNA, 11 nt, Human
cucuucagaaa

SEQ ID NO: 2050417 - RNA, 13 nt, Human
cucuuauugccca

SEQ ID NO: 2050418 - RNA, 21 nt, Human
cucuguccagggcccugagcu

SEQ ID NO: 2050419 - RNA, 22 nt, Human
cucuguccagggcccugagcuc

SEQ ID NO: 2050420 - RNA, 20 nt, Human
cucuuauugcccacgcugga

SEQ ID NO: 2050421 - RNA, 19 nt, Human
cucuuauugcccacgcugg

SEQ ID NO: 2050422 - RNA, 15 nt, Human
cucuuauugcccacg

SEQ ID NO: 2050423 - RNA, 14 nt, Human
cucuuauugcccac

SEQ ID NO: 2050424 - RNA, 20 nt, Human
cucuggugacaccagccuuu

SEQ ID NO: 2050425 - RNA, 16 nt, Human
cucuggugacaccagc

SEQ ID NO: 2050426 - RNA, 18 nt, Human
cucuggugacaccagccu

SEQ ID NO: 2050427 - RNA, 19 nt, Human
cucuggugacaccagccuu

SEQ ID NO: 2050428 - RNA, 19 nt, Human
cucuggucuccucuuuguu

SEQ ID NO: 2050429 - RNA, 22 nt, Human
cucuggucuccucuuuguuuug

SEQ ID NO: 2050430 - RNA, 12 nt, Human
cucuguccaggc

SEQ ID NO: 2050431 - RNA, 13 nt, Human
cucugucagaugg

SEQ ID NO: 2050432 - RNA, 17 nt, Human
cucugguagacacagga

SEQ ID NO: 2050433 - RNA, 16 nt, Human
cucugucauaucuuca

SEQ ID NO: 2050434 - RNA, 14 nt, Human
cucuguccagggcc

SEQ ID NO: 2050435 - RNA, 20 nt, Human
cucuguccagggcccugagc

SEQ ID NO: 2050436 - RNA, 23 nt, Human
cucugucagaugggaagacauga

SEQ ID NO: 2050437 - RNA, 16 nt, Human
cucugcugacagacac

SEQ ID NO: 2050438 - RNA, 14 nt, Human
cucugcugacagac

SEQ ID NO: 2050439 - RNA, 13 nt, Human
cucugcugacaga

SEQ ID NO: 2050440 - RNA, 14 nt, Human
cucugcugaagguu

SEQ ID NO: 2050441 - RNA, 15 nt, Human
cucugguaaccucuu

SEQ ID NO: 2050442 - RNA, 20 nt, Human
cucugcuccucuccccagca

SEQ ID NO: 2050443 - RNA, 18 nt, Human
cucugcuccucuccccag

SEQ ID NO: 2050444 - RNA, 13 nt, Human
cucugcuccucuc

SEQ ID NO: 2050445 - RNA, 21 nt, Human
cucucaggcaugccuguguga

SEQ ID NO: 2050446 - RNA, 18 nt, Human
cucucaggcaugccugug

SEQ ID NO: 2050447 - RNA, 19 nt, Human
cucucaggcaugccugugu

SEQ ID NO: 2050448 - RNA, 20 nt, Human
cucucaggcaugccugugug

SEQ ID NO: 2050449 - RNA, 20 nt, Human
cucuccccucuuauguaccu

SEQ ID NO: 2050450 - RNA, 16 nt, Human
cucuccccuucucugu

SEQ ID NO: 2050451 - RNA, 15 nt, Human
cucuccccugcccug

SEQ ID NO: 2050452 - RNA, 16 nt, Human
cucuccccugcccugc

SEQ ID NO: 2050453 - RNA, 17 nt, Human
cucuccccugcccugcu

SEQ ID NO: 2050454 - RNA, 18 nt, Human
cucuccccugcccugcug

SEQ ID NO: 2050455 - RNA, 15 nt, Human
cugacaaaucaaguu

SEQ ID NO: 2050456 - RNA, 16 nt, Human
cugacaaaucaaguuu

SEQ ID NO: 2050457 - RNA, 23 nt, Human
cugacaaaucaaguuuccaagca

SEQ ID NO: 2050458 - RNA, 23 nt, Human
cugaaggacauugcggacagcca

SEQ ID NO: 2050459 - RNA, 18 nt, Human
cugaaggacccuucagag

SEQ ID NO: 2050460 - RNA, 12 nt, Human
cugaaggagaag

SEQ ID NO: 2050461 - RNA, 13 nt, Human
cugaagccugcag

SEQ ID NO: 2050462 - RNA, 15 nt, Human
cugaagccugcagga

SEQ ID NO: 2050463 - RNA, 12 nt, Human
cugaagccgcca

SEQ ID NO: 2050464 - RNA, 18 nt, Human
cugaagccgccaggaccg

SEQ ID NO: 2050465 - RNA, 13 nt, Human
cugaaacaggaga

SEQ ID NO: 2050466 - RNA, 15 nt, Human
cugaaacuaaugaaa

SEQ ID NO: 2050467 - RNA, 16 nt, Human
cugaaacuaaugaaag

SEQ ID NO: 2050468 - RNA, 14 nt, Human
cugaaacaggagag

SEQ ID NO: 2050469 - RNA, 17 nt, Human
cugaaacuuacacacaa

SEQ ID NO: 2050470 - RNA, 20 nt, Human
cugaaacuucaagcaccagg

SEQ ID NO: 2050471 - RNA, 14 nt, Human
cugaaagaaacagu

SEQ ID NO: 2050472 - RNA, 15 nt, Human
cugaaagaaacaguu

SEQ ID NO: 2050473 - RNA, 16 nt, Human
cugaaagaaacaguua

SEQ ID NO: 2050474 - RNA, 19 nt, Human
cugaaagaaacaguuaacu

SEQ ID NO: 2050475 - RNA, 20 nt, Human
cugaaagaaacaguuaacuu

SEQ ID NO: 2050476 - RNA, 21 nt, Human
cugaaagaaacaguuaacuuu

SEQ ID NO: 2050477 - RNA, 22 nt, Human
cucuuuuccuuugguccuucaa

SEQ ID NO: 2050478 - RNA, 14 nt, Human
cucuuuucugcauc

SEQ ID NO: 2050479 - RNA, 15 nt, Human
cucuuuucugcauca

SEQ ID NO: 2050480 - RNA, 23 nt, Human
cucuuuuccuacuuuuccuuccc

SEQ ID NO: 2050481 - RNA, 13 nt, Human
cucuuuucucuuu

SEQ ID NO: 2050482 - RNA, 20 nt, Human
cucuuuugaauccaugcuug

SEQ ID NO: 2050483 - RNA, 11 nt, Human
cucuuuuuaag

SEQ ID NO: 2050484 - RNA, 21 nt, Human
cucuuuuuccaucauaauucu

SEQ ID NO: 2050485 - RNA, 22 nt, Human
cugacaaccaccgcuccccagc

SEQ ID NO: 2050486 - RNA, 13 nt, Human
cugacaacuugaa

SEQ ID NO: 2050487 - RNA, 21 nt, Human
cugacaaccaccgcuccccag

SEQ ID NO: 2050488 - RNA, 20 nt, Human
cugacaaccaccgcucccca

SEQ ID NO: 2050489 - RNA, 12 nt, Human
cugaccugcagg

SEQ ID NO: 2050490 - RNA, 13 nt, Human
cugaccugcaggc

SEQ ID NO: 2050491 - RNA, 22 nt, Human
cugagaggacuuuucuuugugg

SEQ ID NO: 2050492 - RNA, 21 nt, Human
cugagaggacuuuucuuugug

SEQ ID NO: 2050493 - RNA, 19 nt, Human
cugagaguauuuaggcaga

SEQ ID NO: 2050494 - RNA, 20 nt, Human
cugagaguauuuaggcagau

SEQ ID NO: 2050495 - RNA, 13 nt, Human
cugagagaucugc

SEQ ID NO: 2050496 - RNA, 15 nt, Human
cugagagaucugcug

SEQ ID NO: 2050497 - RNA, 16 nt, Human
cugagagaucugcugu

SEQ ID NO: 2050498 - RNA, 14 nt, Human
cugagacugcggga

SEQ ID NO: 2050499 - RNA, 15 nt, Human
cugagagacccaagg

SEQ ID NO: 2050500 - RNA, 17 nt, Human
cugagagacccaaggag

SEQ ID NO: 2050501 - RNA, 19 nt, Human
cugagagacccaaggagga

SEQ ID NO: 2050502 - RNA, 20 nt, Human
cugagagacccaaggaggaa

SEQ ID NO: 2050503 - RNA, 20 nt, Human
cugaguagcuggauuacagg

SEQ ID NO: 2050504 - RNA, 21 nt, Human
cugaguaucuccucgcaagcu

SEQ ID NO: 2050505 - RNA, 22 nt, Human
cugaguaucuccucgcaagcug

SEQ ID NO: 2050506 - RNA, 13 nt, Human
cugaguaugugga

SEQ ID NO: 2050507 - RNA, 18 nt, Human
cugaguauguggaaggca

SEQ ID NO: 2050508 - RNA, 14 nt, Human
cugagucaccagga

SEQ ID NO: 2050509 - RNA, 15 nt, Human
cugagucaccaggaa

SEQ ID NO: 2050510 - RNA, 17 nt, Human
cugagucaccaggaaug

SEQ ID NO: 2050511 - RNA, 20 nt, Human
cugagucacccaugaagaca

SEQ ID NO: 2050512 - RNA, 19 nt, Human
cugaguagcuggauuacag

SEQ ID NO: 2050513 - RNA, 12 nt, Human
cugaggugggag

SEQ ID NO: 2050514 - RNA, 19 nt, Human
cugaggugaaagggagcua

SEQ ID NO: 2050515 - RNA, 17 nt, Human
cugaggugaaagggagc

SEQ ID NO: 2050516 - RNA, 16 nt, Human
cugaggucucuugagg

SEQ ID NO: 2050517 - RNA, 19 nt, Human
cugaggucucuugagggag

SEQ ID NO: 2050518 - RNA, 21 nt, Human
cugaggucucuugagggagcu

SEQ ID NO: 2050519 - RNA, 15 nt, Human
cugaggacugcacca

SEQ ID NO: 2050520 - RNA, 23 nt, Human
cugaggacugcaccauugcugcu

SEQ ID NO: 2050521 - RNA, 11 nt, Human
cugaggagaaa

SEQ ID NO: 2050522 - RNA, 14 nt, Human
cugaggagcagcag

SEQ ID NO: 2050523 - RNA, 14 nt, Human
cugaggaccagcca

SEQ ID NO: 2050524 - RNA, 22 nt, Human
cugaggacuuaaaauauuccug

SEQ ID NO: 2050525 - RNA, 14 nt, Human
cugaggaauccaga

SEQ ID NO: 2050526 - RNA, 16 nt, Human
cugaggaaaggccagc

SEQ ID NO: 2050527 - RNA, 17 nt, Human
cugaggaaaggccagcu

SEQ ID NO: 2050528 - RNA, 18 nt, Human
cugaggaaaggccagcug

SEQ ID NO: 2050529 - RNA, 19 nt, Human
cugaggaaaggccagcugg

SEQ ID NO: 2050530 - RNA, 20 nt, Human
cugaggaaaggccagcuggc

SEQ ID NO: 2050531 - RNA, 22 nt, Human
cugaggaaaggccagcuggcag

SEQ ID NO: 2050532 - RNA, 20 nt, Human
cugaggaauccagacccggc

SEQ ID NO: 2050533 - RNA, 17 nt, Human
cugaggaauccagaccc

SEQ ID NO: 2050534 - RNA, 20 nt, Human
cugaggacacuaaccacgcu

SEQ ID NO: 2050535 - RNA, 21 nt, Human
cugaggaauccagacccggcu

SEQ ID NO: 2050536 - RNA, 23 nt, Human
cugaggacacuaaccacgcugga

SEQ ID NO: 2050537 - RNA, 21 nt, Human
cugagaucaaaacgguuuuac

SEQ ID NO: 2050538 - RNA, 14 nt, Human
cugagaucgugccg

SEQ ID NO: 2050539 - RNA, 23 nt, Human
cugagauggaacccuuuuggccc

SEQ ID NO: 2050540 - RNA, 15 nt, Human
cugagauggcccucu

SEQ ID NO: 2050541 - RNA, 17 nt, Human
cugagauggcccucugg

SEQ ID NO: 2050542 - RNA, 18 nt, Human
cugagauggcccucuggu

SEQ ID NO: 2050543 - RNA, 14 nt, Human
cugagcuuucugcu

SEQ ID NO: 2050544 - RNA, 15 nt, Human
cugagcuuucugcua

SEQ ID NO: 2050545 - RNA, 21 nt, Human
cugagcuuuggacacacacag

SEQ ID NO: 2050546 - RNA, 22 nt, Human
cugagcuuuggacacacacagc

SEQ ID NO: 2050547 - RNA, 23 nt, Human
cugagcuuuggacacacacagcu

SEQ ID NO: 2050548 - RNA, 21 nt, Human
cugagcuuuggacgcacacag

SEQ ID NO: 2050549 - RNA, 22 nt, Human
cugagcuuuggacgcacacagc

SEQ ID NO: 2050550 - RNA, 23 nt, Human
cugagcuuuggacgcacacagcu

SEQ ID NO: 2050551 - RNA, 15 nt, Human
cugaggaaaggccag

SEQ ID NO: 2050552 - RNA, 18 nt, Human
cgugauuuugcuguagaa

SEQ ID NO: 2050553 - RNA, 17 nt, Human
cgugaugccucccuguu

SEQ ID NO: 2050554 - RNA, 23 nt, Human
cgugauguaggguaaggugccuu

SEQ ID NO: 2050555 - RNA, 18 nt, Human
cgugcaaaacaugcuacc

SEQ ID NO: 2050556 - RNA, 14 nt, Human
cgugcacacaccag

SEQ ID NO: 2050557 - RNA, 13 nt, Human
cgugaucuuggcu

SEQ ID NO: 2050558 - RNA, 22 nt, Human
cguggugauuuagcaggaagcu

SEQ ID NO: 2050559 - RNA, 20 nt, Human
cguguaaccauggacccaau

SEQ ID NO: 2050560 - RNA, 21 nt, Human
cgguuuggggagcagagacac

SEQ ID NO: 2050561 - RNA, 16 nt, Human
cgguuuuacugcagcu

SEQ ID NO: 2050562 - RNA, 17 nt, Human
cgggccacagagaaagu

SEQ ID NO: 2050563 - RNA, 21 nt, Human
cgggcaugguggcgcaagccu

SEQ ID NO: 2050564 - RNA, 12 nt, Human
cgggccaaggac

SEQ ID NO: 2050565 - RNA, 14 nt, Human
cgggccaaggacug

SEQ ID NO: 2050566 - RNA, 20 nt, Human
cgggccaaggacugccgacc

SEQ ID NO: 2050567 - RNA, 11 nt, Human
cgggcucagca

SEQ ID NO: 2050568 - RNA, 19 nt, Human
cgggcgagucacugccucu

SEQ ID NO: 2050569 - RNA, 17 nt, Human
cgggcgagucacugccu

SEQ ID NO: 2050570 - RNA, 15 nt, Human
cgggcucagcaaaag

SEQ ID NO: 2050571 - RNA, 13 nt, Human
cgguguggagaag

SEQ ID NO: 2050572 - RNA, 15 nt, Human
cggggacagcuccuu

SEQ ID NO: 2050573 - RNA, 18 nt, Human
cgguguggagaagcggcu

SEQ ID NO: 2050574 - RNA, 16 nt, Human
cggugugggcuguguc

SEQ ID NO: 2050575 - RNA, 14 nt, Human
cgggcugcccugcc

SEQ ID NO: 2050576 - RNA, 14 nt, Human
cggggacagcuccu

SEQ ID NO: 2050577 - RNA, 14 nt, Human
cgggccacagagaa

SEQ ID NO: 2050578 - RNA, 12 nt, Human
cgggccacagag

SEQ ID NO: 2050579 - RNA, 16 nt, Human
cggcuccaggcuccuu

SEQ ID NO: 2050580 - RNA, 15 nt, Human
cggcuccaggcuccu

SEQ ID NO: 2050581 - RNA, 14 nt, Human
cggcuccaggcucc

SEQ ID NO: 2050582 - RNA, 13 nt, Human
cggcuccaggcuc

SEQ ID NO: 2050583 - RNA, 12 nt, Human
cggcuccaggcu

SEQ ID NO: 2050584 - RNA, 17 nt, Human
cggcucacugcagccuc

SEQ ID NO: 2050585 - RNA, 16 nt, Human
cggcucacugcagccu

SEQ ID NO: 2050586 - RNA, 14 nt, Human
cggcucacugcagc

SEQ ID NO: 2050587 - RNA, 15 nt, Human
cggcucacugcagcc

SEQ ID NO: 2050588 - RNA, 20 nt, Human
cggagucccaccuuggcugc

SEQ ID NO: 2050589 - RNA, 18 nt, Human
cggagucccaccuuggcu

SEQ ID NO: 2050590 - RNA, 20 nt, Human
cggagcuaacacuggccccu

SEQ ID NO: 2050591 - RNA, 11 nt, Human
cggaggagaag

SEQ ID NO: 2050592 - RNA, 19 nt, Human
cggaggagaagaaggaaau

SEQ ID NO: 2050593 - RNA, 12 nt, Human
cggaggcaaaag

SEQ ID NO: 2050594 - RNA, 21 nt, Human
cggaggcaaaaggcagugggg

SEQ ID NO: 2050595 - RNA, 16 nt, Human
cggagucccaccuugg

SEQ ID NO: 2050596 - RNA, 21 nt, Human
cggagcuaacacuggccccua

SEQ ID NO: 2050597 - RNA, 19 nt, Human
cgcugcaaccuguugauag

SEQ ID NO: 2050598 - RNA, 13 nt, Human
cgcugauauaugu

SEQ ID NO: 2050599 - RNA, 16 nt, Human
cgccuguaaucccagc

SEQ ID NO: 2050600 - RNA, 17 nt, Human
cgccuguaaucccagca

SEQ ID NO: 2050601 - RNA, 20 nt, Human
cgccuguaaucccagcacuu

SEQ ID NO: 2050602 - RNA, 18 nt, Human
cgccuguaaucccagcac

SEQ ID NO: 2050603 - RNA, 18 nt, Human
cgccuguaaucccagcag

SEQ ID NO: 2050604 - RNA, 20 nt, Human
cgccuguaaucccagcuacu

SEQ ID NO: 2050605 - RNA, 17 nt, Human
cgacugccaucuuggac

SEQ ID NO: 2050606 - RNA, 17 nt, Human
cgacugcccggcagggu

SEQ ID NO: 2050607 - RNA, 22 nt, Human
cgacggugggcauuugugaggc

SEQ ID NO: 2050608 - RNA, 20 nt, Human
cgaccgaggcuggagcuggc

SEQ ID NO: 2050609 - RNA, 19 nt, Human
cgaccgaggcuggagcugg

SEQ ID NO: 2050610 - RNA, 15 nt, Human
cgaccgaggcuggag

SEQ ID NO: 2050611 - RNA, 20 nt, Human
cgacucuauagacucuagga

SEQ ID NO: 2050612 - RNA, 18 nt, Human
cgacucuauagacucuag

SEQ ID NO: 2050613 - RNA, 14 nt, Human
cgacagccuggcac

SEQ ID NO: 2050614 - RNA, 22 nt, Human
cgacagagggaagaaaagagcu

SEQ ID NO: 2050615 - RNA, 13 nt, Human
cgacagccuggca

SEQ ID NO: 2050616 - RNA, 12 nt, Human
cgacagccuggc

SEQ ID NO: 2050617 - RNA, 16 nt, Human
cgacagagcgagacuu

SEQ ID NO: 2050618 - RNA, 18 nt, Human
cgacaaccgaugcuccag

SEQ ID NO: 2050619 - RNA, 21 nt, Human
cgacaaccgaugcuccagcca

SEQ ID NO: 2050620 - RNA, 15 nt, Human
cgacaaccgaugcuc

SEQ ID NO: 2050621 - RNA, 13 nt, Human
cgacaaagcugcu

SEQ ID NO: 2050622 - RNA, 17 nt, Human
cgacaaagcugcuaaau

SEQ ID NO: 2050623 - RNA, 21 nt, Human
cgacaaagcugcuaaaucucc

SEQ ID NO: 2050624 - RNA, 15 nt, Human
ccuuuuuacuccccu

SEQ ID NO: 2050625 - RNA, 23 nt, Human
ccuuuuuacuccccuugagcuga

SEQ ID NO: 2050626 - RNA, 17 nt, Human
ccuuucauccccaccuu

SEQ ID NO: 2050627 - RNA, 12 nt, Human
ccuuucagggaa

SEQ ID NO: 2050628 - RNA, 20 nt, Human
ccuuucagggaauuucagga

SEQ ID NO: 2050629 - RNA, 14 nt, Human
ccuuuuuacucccc

SEQ ID NO: 2050630 - RNA, 22 nt, Human
ccuuuugagggacaaauuuaaa

SEQ ID NO: 2050631 - RNA, 15 nt, Human
ccuuucacaaccuuc

SEQ ID NO: 2050632 - RNA, 21 nt, Human
ccuuucacagagcagagucug

SEQ ID NO: 2050633 - RNA, 21 nt, Human
ccuuucacaaaauuuuauucc

SEQ ID NO: 2050634 - RNA, 22 nt, Human
ccuuucacaaaauuuuauuccu

SEQ ID NO: 2050635 - RNA, 16 nt, Human
ccuuuacccucaucug

SEQ ID NO: 2050636 - RNA, 18 nt, Human
ccuuuacccucaucuguc

SEQ ID NO: 2050637 - RNA, 16 nt, Human
ccuugcuguccuaggc

SEQ ID NO: 2050638 - RNA, 22 nt, Human
ccuugcucuccccugcccugcu

SEQ ID NO: 2050639 - RNA, 22 nt, Human
ccuugcccagggcucagccugg

SEQ ID NO: 2050640 - RNA, 18 nt, Human
ccuugcccggauucuggg

SEQ ID NO: 2050641 - RNA, 19 nt, Human
ccuugcccggauucuggga

SEQ ID NO: 2050642 - RNA, 21 nt, Human
ccuugcccagggcucagccug

SEQ ID NO: 2050643 - RNA, 22 nt, Human
cgcaggauucuuccucccuccc

SEQ ID NO: 2050644 - RNA, 13 nt, Human
cgcaggaagcugc

SEQ ID NO: 2050645 - RNA, 15 nt, Human
cgcaggaagcugcuc

SEQ ID NO: 2050646 - RNA, 19 nt, Human
cgaucauggcucacugcag

SEQ ID NO: 2050647 - RNA, 20 nt, Human
cgaucauggcucacugcagc

SEQ ID NO: 2050648 - RNA, 21 nt, Human
cgaucauggcucacugcagcc

SEQ ID NO: 2050649 - RNA, 23 nt, Human
cgaucauggcucacugcagccuc

SEQ ID NO: 2050650 - RNA, 15 nt, Human
cgauccaccugucuc

SEQ ID NO: 2050651 - RNA, 16 nt, Human
cgcaugcagcagcuug

SEQ ID NO: 2050652 - RNA, 15 nt, Human
cgcaugcccucaauc

SEQ ID NO: 2050653 - RNA, 18 nt, Human
cgcauggaguguguauug

SEQ ID NO: 2050654 - RNA, 22 nt, Human
cgcauggaguguguauuguucc

SEQ ID NO: 2050655 - RNA, 16 nt, Human
cgcaugcggcccagga

SEQ ID NO: 2050656 - RNA, 14 nt, Human
cgcaugcggcccag

SEQ ID NO: 2050657 - RNA, 14 nt, Human
cgcauuccaggcuc

SEQ ID NO: 2050658 - RNA, 15 nt, Human
cgcauuccaggcucc

SEQ ID NO: 2050659 - RNA, 12 nt, Human
cgcauucccuga

SEQ ID NO: 2050660 - RNA, 23 nt, Human
cgcauggaguguguauuguuccc

SEQ ID NO: 2050661 - RNA, 13 nt, Human
cgcauucccugag

SEQ ID NO: 2050662 - RNA, 22 nt, Human
cgagucacugccucucccuggc

SEQ ID NO: 2050663 - RNA, 15 nt, Human
cgagucacugccucu

SEQ ID NO: 2050664 - RNA, 18 nt, Human
cgagucacugccucuccc

SEQ ID NO: 2050665 - RNA, 16 nt, Human
cgagucaauccccuca

SEQ ID NO: 2050666 - RNA, 20 nt, Human
cgagucaauccccucauuca

SEQ ID NO: 2050667 - RNA, 12 nt, Human
cgagucacugcc

SEQ ID NO: 2050668 - RNA, 14 nt, Human
cgagucacugccuc

SEQ ID NO: 2050669 - RNA, 16 nt, Human
cgccuaugaucccagc

SEQ ID NO: 2050670 - RNA, 17 nt, Human
cgccucaaugugguugc

SEQ ID NO: 2050671 - RNA, 22 nt, Human
cgccucaaugugguugcaaggc

SEQ ID NO: 2050672 - RNA, 23 nt, Human
cgccagaacugcuuuaucccacg

SEQ ID NO: 2050673 - RNA, 20 nt, Human
cgccuaguggggucucccuc

SEQ ID NO: 2050674 - RNA, 21 nt, Human
cgccuaguggggucucccucu

SEQ ID NO: 2050675 - RNA, 22 nt, Human
cgccacuacacuccagccugag

SEQ ID NO: 2050676 - RNA, 15 nt, Human
cgccacucgcuuccc

SEQ ID NO: 2050677 - RNA, 18 nt, Human
cgccaaagaaugccuuga

SEQ ID NO: 2050678 - RNA, 21 nt, Human
cgccacugcacucuagccgga

SEQ ID NO: 2050679 - RNA, 23 nt, Human
cgccacucgcuucccccauagcc

SEQ ID NO: 2050680 - RNA, 13 nt, Human
cgccacugcacuc

SEQ ID NO: 2050681 - RNA, 21 nt, Human
cgccacugcacuccagccugg

SEQ ID NO: 2050682 - RNA, 22 nt, Human
cgccacugcacuccagccuggg

SEQ ID NO: 2050683 - RNA, 23 nt, Human
cgccacugcacuccagccugggc

SEQ ID NO: 2050684 - RNA, 13 nt, Human
cgccucugcauuc

SEQ ID NO: 2050685 - RNA, 13 nt, Human
cgccucugcuggc

SEQ ID NO: 2050686 - RNA, 19 nt, Human
cgccucuucuucuucagaa

SEQ ID NO: 2050687 - RNA, 11 nt, Human
cgccuggcaga

SEQ ID NO: 2050688 - RNA, 20 nt, Human
cgccuggcagaacugagcuc

SEQ ID NO: 2050689 - RNA, 17 nt, Human
cgccugcuugucccugc

SEQ ID NO: 2050690 - RNA, 13 nt, Human
cuacaguguacag

SEQ ID NO: 2050691 - RNA, 22 nt, Human
cuacaguugaaaaacagcugag

SEQ ID NO: 2050692 - RNA, 20 nt, Human
cuacaguuguuuuuugaaaa

SEQ ID NO: 2050693 - RNA, 22 nt, Human
cuacaguuguuuuuugaaaaca

SEQ ID NO: 2050694 - RNA, 19 nt, Human
cuacaguugaaaaacagcu

SEQ ID NO: 2050695 - RNA, 21 nt, Human
cuacaguugaaaaacagcuga

SEQ ID NO: 2050696 - RNA, 21 nt, Human
cuaauuuaucuugucucuggg

SEQ ID NO: 2050697 - RNA, 14 nt, Human
cuacucacucaagu

SEQ ID NO: 2050698 - RNA, 15 nt, Human
cuacucacucaaguu

SEQ ID NO: 2050699 - RNA, 16 nt, Human
cuacucacucaaguuc

SEQ ID NO: 2050700 - RNA, 22 nt, Human
cuacucacucaaguucaaggac

SEQ ID NO: 2050701 - RNA, 13 nt, Human
cuacucagaagcc

SEQ ID NO: 2050702 - RNA, 16 nt, Human
cuacucagaagccuga

SEQ ID NO: 2050703 - RNA, 17 nt, Human
cuacucagaagccugag

SEQ ID NO: 2050704 - RNA, 19 nt, Human
cuacucagaagccugaggc

SEQ ID NO: 2050705 - RNA, 21 nt, Human
cuacucagaagccugaggcug

SEQ ID NO: 2050706 - RNA, 17 nt, Human
cuacguuaccaggcagg

SEQ ID NO: 2050707 - RNA, 21 nt, Human
cuacgcucuccuuucuuucua

SEQ ID NO: 2050708 - RNA, 13 nt, Human
cuaccuuuucucu

SEQ ID NO: 2050709 - RNA, 14 nt, Human
cuaccuuuucucuu

SEQ ID NO: 2050710 - RNA, 14 nt, Human
cuacgcucuccuuu

SEQ ID NO: 2050711 - RNA, 14 nt, Human
cuaccuguaacuuu

SEQ ID NO: 2050712 - RNA, 15 nt, Human
cuacaucgcccucca

SEQ ID NO: 2050713 - RNA, 17 nt, Human
cuacaucgcccuccaca

SEQ ID NO: 2050714 - RNA, 22 nt, Human
cuacaugcaaggcacuguacua

SEQ ID NO: 2050715 - RNA, 14 nt, Human
cuacaugcagccca

SEQ ID NO: 2050716 - RNA, 15 nt, Human
cuacaugcagcccau

SEQ ID NO: 2050717 - RNA, 17 nt, Human
cuacaugcagcccaugc

SEQ ID NO: 2050718 - RNA, 21 nt, Human
cuacaugcagcccaugcccac

SEQ ID NO: 2050719 - RNA, 23 nt, Human
cuacaugcagcccaugcccaccu

SEQ ID NO: 2050720 - RNA, 16 nt, Human
cguguguguugucuga

SEQ ID NO: 2050721 - RNA, 20 nt, Human
cguguggcucacguguguga

SEQ ID NO: 2050722 - RNA, 20 nt, Human
cgugugugugcguccugucg

SEQ ID NO: 2050723 - RNA, 17 nt, Human
cguguguccaugugugu

SEQ ID NO: 2050724 - RNA, 22 nt, Human
cgugugugcaagugucugugug

SEQ ID NO: 2050725 - RNA, 23 nt, Human
cuaagugauccucccaccucagc

SEQ ID NO: 2050726 - RNA, 17 nt, Human
cuaaguguuucauaaau

SEQ ID NO: 2050727 - RNA, 21 nt, Human
cuaagugguacuaacuuuccu

SEQ ID NO: 2050728 - RNA, 18 nt, Human
cuaauucuaaccagagca

SEQ ID NO: 2050729 - RNA, 24 nt, Human
cuaauucuaaccagagcaagcuuu

SEQ ID NO: 2050730 - RNA, 13 nt, Human
cuaauugccaugu

SEQ ID NO: 2050731 - RNA, 19 nt, Human
cuagaauuuuaagugcuuu

SEQ ID NO: 2050732 - RNA, 13 nt, Human
cuagacaacccug

SEQ ID NO: 2050733 - RNA, 15 nt, Human
cuagacaacccugca

SEQ ID NO: 2050734 - RNA, 16 nt, Human
cuagacaacccugcaa

SEQ ID NO: 2050735 - RNA, 17 nt, Human
cuagaauuucauuuauu

SEQ ID NO: 2050736 - RNA, 15 nt, Human
cuagaauuuauucaa

SEQ ID NO: 2050737 - RNA, 23 nt, Human
cuagaauuuauucaauuccucug

SEQ ID NO: 2050738 - RNA, 22 nt, Human
cuagaauuuauucaauuccucu

SEQ ID NO: 2050739 - RNA, 19 nt, Human
cuagaagugggccaggaca

SEQ ID NO: 2050740 - RNA, 20 nt, Human
cuagaagugggccaggacag

SEQ ID NO: 2050741 - RNA, 21 nt, Human
cuagaagugggccaggacagg

SEQ ID NO: 2050742 - RNA, 17 nt, Human
cuagaagugggccagga

SEQ ID NO: 2050743 - RNA, 13 nt, Human
cuagaagggaagg

SEQ ID NO: 2050744 - RNA, 20 nt, Human
cuagaagggccaguccugcc

SEQ ID NO: 2050745 - RNA, 23 nt, Human
cuagaagggccaguccugccugg

SEQ ID NO: 2050746 - RNA, 22 nt, Human
cuagaagauuuugaaauuuuua

SEQ ID NO: 2050747 - RNA, 18 nt, Human
cuagaacaucccugccag

SEQ ID NO: 2050748 - RNA, 20 nt, Human
cuacucaggaggcugaggca

SEQ ID NO: 2050749 - RNA, 23 nt, Human
cuacucaggaggcugaggcagaa

SEQ ID NO: 2050750 - RNA, 13 nt, Human
cuacucaggaggc

SEQ ID NO: 2050751 - RNA, 15 nt, Human
cuacucaggaggcug

SEQ ID NO: 2050752 - RNA, 16 nt, Human
cuacucaggaggcuga

SEQ ID NO: 2050753 - RNA, 15 nt, Human
cuacucagcagcccu

SEQ ID NO: 2050754 - RNA, 16 nt, Human
cuacucagcagcccuc

SEQ ID NO: 2050755 - RNA, 17 nt, Human
cuacucagcagcccucc

SEQ ID NO: 2050756 - RNA, 18 nt, Human
cuacucagcagcccuccu

SEQ ID NO: 2050757 - RNA, 19 nt, Human
cuacucagcagcccuccuc

SEQ ID NO: 2050758 - RNA, 20 nt, Human
cuacucagcagcccuccuca

SEQ ID NO: 2050759 - RNA, 21 nt, Human
cuacucagcagcccuccucac

SEQ ID NO: 2050760 - RNA, 22 nt, Human
cuacucagcagcccuccucacc

SEQ ID NO: 2050761 - RNA, 14 nt, Human
cucaaacuccugac

SEQ ID NO: 2050762 - RNA, 13 nt, Human
cucaaacuccuga

SEQ ID NO: 2050763 - RNA, 20 nt, Human
cucaaacucuugaccucagg

SEQ ID NO: 2050764 - RNA, 18 nt, Human
cucaaaccuccaaaagcc

SEQ ID NO: 2050765 - RNA, 20 nt, Human
cucaaaccuccaaaagcccu

SEQ ID NO: 2050766 - RNA, 11 nt, Human
cucaauauuuu

SEQ ID NO: 2050767 - RNA, 18 nt, Human
cucaauauuccugaauga

SEQ ID NO: 2050768 - RNA, 16 nt, Human
cucaauauuccugaau

SEQ ID NO: 2050769 - RNA, 13 nt, Human
cucaauuguuuuu

SEQ ID NO: 2050770 - RNA, 15 nt, Human
cucaauuguuuuugu

SEQ ID NO: 2050771 - RNA, 15 nt, Human
cucaaugcacugaca

SEQ ID NO: 2050772 - RNA, 13 nt, Human
cucaaugcacuga

SEQ ID NO: 2050773 - RNA, 13 nt, Human
cucaauauuuucc

SEQ ID NO: 2050774 - RNA, 16 nt, Human
cuauuaagcaguaaaa

SEQ ID NO: 2050775 - RNA, 20 nt, Human
cuauuaagcaguaaaaacug

SEQ ID NO: 2050776 - RNA, 21 nt, Human
cuauuaagcaguaaaaacugu

SEQ ID NO: 2050777 - RNA, 22 nt, Human
cuauuaagcaguaaaaacuguu

SEQ ID NO: 2050778 - RNA, 12 nt, Human
cuauuuuuguag

SEQ ID NO: 2050779 - RNA, 13 nt, Human
cuauuuuuguaga

SEQ ID NO: 2050780 - RNA, 14 nt, Human
cuauuuuuguagaa

SEQ ID NO: 2050781 - RNA, 15 nt, Human
cuauuuuuguagaag

SEQ ID NO: 2050782 - RNA, 18 nt, Human
cucaaaagcugggcaggu

SEQ ID NO: 2050783 - RNA, 17 nt, Human
cucaaaaaaagaaaaag

SEQ ID NO: 2050784 - RNA, 17 nt, Human
cuauuuuuuuaaaauca

SEQ ID NO: 2050785 - RNA, 19 nt, Human
cuauuuuuuuaaaaucacu

SEQ ID NO: 2050786 - RNA, 20 nt, Human
cuauuuuuuuaaaaucacua

SEQ ID NO: 2050787 - RNA, 21 nt, Human
cuauuuuuuuaaaaucacuaa

SEQ ID NO: 2050788 - RNA, 14 nt, Human
cucaaacacagaga

SEQ ID NO: 2050789 - RNA, 16 nt, Human
cucaaaaugacagcca

SEQ ID NO: 2050790 - RNA, 20 nt, Human
cucaaaagcacccuugacgu

SEQ ID NO: 2050791 - RNA, 18 nt, Human
cuaucaugucaaacguga

SEQ ID NO: 2050792 - RNA, 14 nt, Human
cuaucuaaauguug

SEQ ID NO: 2050793 - RNA, 20 nt, Human
cuaucuagguggaguugaaa

SEQ ID NO: 2050794 - RNA, 22 nt, Human
cuaucuagguggaguugaaaga

SEQ ID NO: 2050795 - RNA, 16 nt, Human
cuagcaugaagacaga

SEQ ID NO: 2050796 - RNA, 16 nt, Human
cuagcaucucaugagu

SEQ ID NO: 2050797 - RNA, 23 nt, Human
ccgcaggauuugggcucuuggaa

SEQ ID NO: 2050798 - RNA, 12 nt, Human
ccgcaggaagcu

SEQ ID NO: 2050799 - RNA, 13 nt, Human
ccgcaggaagcug

SEQ ID NO: 2050800 - RNA, 14 nt, Human
ccgcaggaagcugc

SEQ ID NO: 2050801 - RNA, 15 nt, Human
ccgcaggaagcugcu

SEQ ID NO: 2050802 - RNA, 19 nt, Human
ccgcaggaagcugcuccgu

SEQ ID NO: 2050803 - RNA, 17 nt, Human
ccgcaguuccugucccu

SEQ ID NO: 2050804 - RNA, 12 nt, Human
ccgcaucuucuc

SEQ ID NO: 2050805 - RNA, 15 nt, Human
ccgcaucuucuccau

SEQ ID NO: 2050806 - RNA, 16 nt, Human
ccgcaucuucuccauc

SEQ ID NO: 2050807 - RNA, 19 nt, Human
ccgcaucuucuccaucugg

SEQ ID NO: 2050808 - RNA, 20 nt, Human
ccgcaucuucuccaucuggc

SEQ ID NO: 2050809 - RNA, 22 nt, Human
ccgcaucuucuccaucuggcag

SEQ ID NO: 2050810 - RNA, 14 nt, Human
ccgcaugcagcagc

SEQ ID NO: 2050811 - RNA, 20 nt, Human
ccgcaugcagcagcuugcug

SEQ ID NO: 2050812 - RNA, 17 nt, Human
ccgcaugcggcccagga

SEQ ID NO: 2050813 - RNA, 16 nt, Human
ccgcaugcggcccagg

SEQ ID NO: 2050814 - RNA, 14 nt, Human
ccgcauucccugag

SEQ ID NO: 2050815 - RNA, 14 nt, Human
ccgcauuccaggcu

SEQ ID NO: 2050816 - RNA, 15 nt, Human
ccgcauuccaggcuc

SEQ ID NO: 2050817 - RNA, 16 nt, Human
ccgcauuccaggcucc

SEQ ID NO: 2050818 - RNA, 13 nt, Human
ccgcauucccuga

SEQ ID NO: 2050819 - RNA, 15 nt, Human
cccuucgcuccugug

SEQ ID NO: 2050820 - RNA, 14 nt, Human
cccuucgcuccugu

SEQ ID NO: 2050821 - RNA, 23 nt, Human
cccugucuaggucaguacccacc

SEQ ID NO: 2050822 - RNA, 17 nt, Human
cccuucgcguauuucag

SEQ ID NO: 2050823 - RNA, 18 nt, Human
cccuucucugcccauucc

SEQ ID NO: 2050824 - RNA, 19 nt, Human
cccuucucugcccauuccc

SEQ ID NO: 2050825 - RNA, 13 nt, Human
cccuucucugcuc

SEQ ID NO: 2050826 - RNA, 14 nt, Human
cccuucucugcucc

SEQ ID NO: 2050827 - RNA, 15 nt, Human
cccuucucugcucca

SEQ ID NO: 2050828 - RNA, 16 nt, Human
cccuucucugcuccac

SEQ ID NO: 2050829 - RNA, 17 nt, Human
cccuucucugcuccacc

SEQ ID NO: 2050830 - RNA, 20 nt, Human
cccuucucugcuccaccaca

SEQ ID NO: 2050831 - RNA, 23 nt, Human
cccuucucugcuccaccacaucc

SEQ ID NO: 2050832 - RNA, 14 nt, Human
ccgcagccucccuc

SEQ ID NO: 2050833 - RNA, 13 nt, Human
ccggccccugcug

SEQ ID NO: 2050834 - RNA, 13 nt, Human
cccuucgcuccug

SEQ ID NO: 2050835 - RNA, 19 nt, Human
cccugucuccucucucugu

SEQ ID NO: 2050836 - RNA, 20 nt, Human
cccugucucaaaaaaagaaa

SEQ ID NO: 2050837 - RNA, 23 nt, Human
cccugucucaaaaaaagaaaaag

SEQ ID NO: 2050838 - RNA, 17 nt, Human
ccucccaccucagccuc

SEQ ID NO: 2050839 - RNA, 15 nt, Human
ccucccaccucagcc

SEQ ID NO: 2050840 - RNA, 12 nt, Human
ccucccaccccc

SEQ ID NO: 2050841 - RNA, 13 nt, Human
ccucccaccccca

SEQ ID NO: 2050842 - RNA, 17 nt, Human
ccucccacccccaucuc

SEQ ID NO: 2050843 - RNA, 13 nt, Human
ccucccacccccu

SEQ ID NO: 2050844 - RNA, 23 nt, Human
ccucauuuuugaauacaggcaua

SEQ ID NO: 2050845 - RNA, 19 nt, Human
ccucaugguggguucaggg

SEQ ID NO: 2050846 - RNA, 16 nt, Human
ccuccccaacccugcc

SEQ ID NO: 2050847 - RNA, 21 nt, Human
ccuccccaacccugccccugc

SEQ ID NO: 2050848 - RNA, 20 nt, Human
ccucccacccccuucucugc

SEQ ID NO: 2050849 - RNA, 21 nt, Human
ccucccacccccuucucugcu

SEQ ID NO: 2050850 - RNA, 16 nt, Human
ccucaaaagcacccuu

SEQ ID NO: 2050851 - RNA, 15 nt, Human
ccucaaagcuuccau

SEQ ID NO: 2050852 - RNA, 18 nt, Human
ccucaaagcuuccauucc

SEQ ID NO: 2050853 - RNA, 20 nt, Human
ccucaaagcuuccauuccac

SEQ ID NO: 2050854 - RNA, 11 nt, Human
ccucagccugu

SEQ ID NO: 2050855 - RNA, 12 nt, Human
ccucagccugug

SEQ ID NO: 2050856 - RNA, 22 nt, Human
ccucagccuuccccuugcccag

SEQ ID NO: 2050857 - RNA, 16 nt, Human
ccucagccugugcugc

SEQ ID NO: 2050858 - RNA, 13 nt, Human
ccucaggacccuc

SEQ ID NO: 2050859 - RNA, 15 nt, Human
ccucaggacccucgc

SEQ ID NO: 2050860 - RNA, 16 nt, Human
ccucaggacccucgcu

SEQ ID NO: 2050861 - RNA, 17 nt, Human
ccucaggacccucgcug

SEQ ID NO: 2050862 - RNA, 18 nt, Human
ccucaggacccucgcugg

SEQ ID NO: 2050863 - RNA, 19 nt, Human
ccucaggacccucgcuggc

SEQ ID NO: 2050864 - RNA, 21 nt, Human
ccucaggacccucgcuggccc

SEQ ID NO: 2050865 - RNA, 22 nt, Human
ccucaggacccucgcuggcccc

SEQ ID NO: 2050866 - RNA, 23 nt, Human
ccucaggacccucgcuggccccc

SEQ ID NO: 2050867 - RNA, 20 nt, Human
ccucagcugccucacuuccu

SEQ ID NO: 2050868 - RNA, 19 nt, Human
ccucagcugccucacuucc

SEQ ID NO: 2050869 - RNA, 14 nt, Human
ccggccccugcugg

SEQ ID NO: 2050870 - RNA, 19 nt, Human
ccugccucgaacuggcugc

SEQ ID NO: 2050871 - RNA, 23 nt, Human
ccugccucgaacuggcugcaaag

SEQ ID NO: 2050872 - RNA, 21 nt, Human
ccugccucgaacuggcugcaa

SEQ ID NO: 2050873 - RNA, 23 nt, Human
ccugcugccgccucccagccugg

SEQ ID NO: 2050874 - RNA, 13 nt, Human
ccugcugccuccc

SEQ ID NO: 2050875 - RNA, 15 nt, Human
ccugcugccucccca

SEQ ID NO: 2050876 - RNA, 16 nt, Human
ccugcugccuccccaa

SEQ ID NO: 2050877 - RNA, 17 nt, Human
ccugcugccuccccaac

SEQ ID NO: 2050878 - RNA, 21 nt, Human
ccugcugccuccccaacccug

SEQ ID NO: 2050879 - RNA, 19 nt, Human
ccugcugccuccccaaccc

SEQ ID NO: 2050880 - RNA, 20 nt, Human
ccugcugccuccccaacccu

SEQ ID NO: 2050881 - RNA, 23 nt, Human
ccugcugccuccccaacccugcc

SEQ ID NO: 2050882 - RNA, 17 nt, Human
ccugccccagggcuccc

SEQ ID NO: 2050883 - RNA, 13 nt, Human
ccugccccauccc

SEQ ID NO: 2050884 - RNA, 15 nt, Human
ccugcccccacaccu

SEQ ID NO: 2050885 - RNA, 16 nt, Human
ccugcccccacaccug

SEQ ID NO: 2050886 - RNA, 18 nt, Human
ccugcccccacaccuggc

SEQ ID NO: 2050887 - RNA, 19 nt, Human
ccugcccccacaccuggcc

SEQ ID NO: 2050888 - RNA, 20 nt, Human
ccugcccccacaccuggccc

SEQ ID NO: 2050889 - RNA, 21 nt, Human
ccugcccccacaccuggcccu

SEQ ID NO: 2050890 - RNA, 22 nt, Human
ccugcccccacaccuggcccug

SEQ ID NO: 2050891 - RNA, 18 nt, Human
ccugcccagaucccagaa

SEQ ID NO: 2050892 - RNA, 12 nt, Human
ccugcccaggag

SEQ ID NO: 2050893 - RNA, 20 nt, Human
ccugcccaggagagccagcc

SEQ ID NO: 2050894 - RNA, 22 nt, Human
ccugcccaggagagccagcccu

SEQ ID NO: 2050895 - RNA, 23 nt, Human
ccugcccaggagagccagcccuc

SEQ ID NO: 2050896 - RNA, 14 nt, Human
ccugcccaccuguc

SEQ ID NO: 2050897 - RNA, 22 nt, Human
ccugcccacccguggagauggg

SEQ ID NO: 2050898 - RNA, 13 nt, Human
ccugcccaccugu

SEQ ID NO: 2050899 - RNA, 13 nt, Human
ccugcccaggccc

SEQ ID NO: 2050900 - RNA, 12 nt, Human
ccugcccacccg

SEQ ID NO: 2050901 - RNA, 13 nt, Human
ccugcccacccgu

SEQ ID NO: 2050902 - RNA, 19 nt, Human
ccugcacuugcagacucua

SEQ ID NO: 2050903 - RNA, 18 nt, Human
ccugcacuugcagacucu

SEQ ID NO: 2050904 - RNA, 19 nt, Human
ccugcagaggggaaaccag

SEQ ID NO: 2050905 - RNA, 17 nt, Human
ccugcacuugcagacuc

SEQ ID NO: 2050906 - RNA, 16 nt, Human
ccugcacuugcagacu

SEQ ID NO: 2050907 - RNA, 15 nt, Human
ccugagucaccagga

SEQ ID NO: 2050908 - RNA, 13 nt, Human
ccugagucaccag

SEQ ID NO: 2050909 - RNA, 14 nt, Human
ccugagucaccagg

SEQ ID NO: 2050910 - RNA, 15 nt, Human
ccugagucacccaug

SEQ ID NO: 2050911 - RNA, 18 nt, Human
ccugagucacccaugaag

SEQ ID NO: 2050912 - RNA, 13 nt, Human
ccucuuucccucc

SEQ ID NO: 2050913 - RNA, 20 nt, Human
ccugaccacgcuuucuagcu

SEQ ID NO: 2050914 - RNA, 19 nt, Human
ccugaccaacauggagaaa

SEQ ID NO: 2050915 - RNA, 22 nt, Human
ccugcagccccgcgccuccuuc

SEQ ID NO: 2050916 - RNA, 14 nt, Human
ccugcagcagagcc

SEQ ID NO: 2050917 - RNA, 15 nt, Human
ccugcagcagagccu

SEQ ID NO: 2050918 - RNA, 21 nt, Human
ccugcagcagagccuggaaga

SEQ ID NO: 2050919 - RNA, 11 nt, Human
ccucuuucccu

SEQ ID NO: 2050920 - RNA, 16 nt, Human
ccucuuucagaaaaca

SEQ ID NO: 2050921 - RNA, 17 nt, Human
ccucuuucagaaaacag

SEQ ID NO: 2050922 - RNA, 21 nt, Human
ccucuuucagaaaacagaaaa

SEQ ID NO: 2050923 - RNA, 23 nt, Human
ccucuuucagaaaacagaaaaaa

SEQ ID NO: 2050924 - RNA, 21 nt, Human
ccuguccuucucucaccuccu

SEQ ID NO: 2050925 - RNA, 12 nt, Human
ccuguccuugca

SEQ ID NO: 2050926 - RNA, 16 nt, Human
ccugucggagcccugu

SEQ ID NO: 2050927 - RNA, 21 nt, Human
ccugucggagcccugucuccu

SEQ ID NO: 2050928 - RNA, 17 nt, Human
ccugucggagcccuguc

SEQ ID NO: 2050929 - RNA, 13 nt, Human
ccuguaaucccag

SEQ ID NO: 2050930 - RNA, 15 nt, Human
ccuguaaucccagca

SEQ ID NO: 2050931 - RNA, 18 nt, Human
ccuguaaucccagcacuu

SEQ ID NO: 2050932 - RNA, 19 nt, Human
ccuguccugaccugucuca

SEQ ID NO: 2050933 - RNA, 16 nt, Human
ccuguaaucccagcac

SEQ ID NO: 2050934 - RNA, 14 nt, Human
ccuguaaucccagc

SEQ ID NO: 2050935 - RNA, 17 nt, Human
ccugguuucacuggccc

SEQ ID NO: 2050936 - RNA, 18 nt, Human
ccugguuucacuggccca

SEQ ID NO: 2050937 - RNA, 17 nt, Human
ccugguggccucugccc

SEQ ID NO: 2050938 - RNA, 14 nt, Human
ccuggugggccucc

SEQ ID NO: 2050939 - RNA, 18 nt, Human
ccuggugggccuccucug

SEQ ID NO: 2050940 - RNA, 20 nt, Human
ccuggugggccuccucuguc

SEQ ID NO: 2050941 - RNA, 21 nt, Human
ccugguggcagugggagcugc

SEQ ID NO: 2050942 - RNA, 15 nt, Human
ccugggggccugacc

SEQ ID NO: 2050943 - RNA, 16 nt, Human
ccugggggccugaccu

SEQ ID NO: 2050944 - RNA, 17 nt, Human
ccugggggccugaccuc

SEQ ID NO: 2050945 - RNA, 19 nt, Human
ccugggggccugaccuccc

SEQ ID NO: 2050946 - RNA, 22 nt, Human
ccugggggccugaccucccccu

SEQ ID NO: 2050947 - RNA, 23 nt, Human
ccugggggccugaccucccccuc

SEQ ID NO: 2050948 - RNA, 16 nt, Human
ccugggggaagcccug

SEQ ID NO: 2050949 - RNA, 17 nt, Human
ccugggggaagcccugg

SEQ ID NO: 2050950 - RNA, 19 nt, Human
ccugggggaagcccuggau

SEQ ID NO: 2050951 - RNA, 18 nt, Human
ccugggggaagcccugga

SEQ ID NO: 2050952 - RNA, 12 nt, Human
ccuggggccucg

SEQ ID NO: 2050953 - RNA, 22 nt, Human
ccuggggccucggagccucauc

SEQ ID NO: 2050954 - RNA, 13 nt, Human
ccuggggccucuu

SEQ ID NO: 2050955 - RNA, 23 nt, Human
ccuggggcagucaccugcccaga

SEQ ID NO: 2050956 - RNA, 19 nt, Human
ccugugaaauaguucaaag

SEQ ID NO: 2050957 - RNA, 17 nt, Human
ccugugaccagcacugu

SEQ ID NO: 2050958 - RNA, 16 nt, Human
ccugugaccagcacug

SEQ ID NO: 2050959 - RNA, 22 nt, Human
ccugucggagcccugucuccuc

SEQ ID NO: 2050960 - RNA, 21 nt, Human
ccugucuaggucaguacccac

SEQ ID NO: 2050961 - RNA, 22 nt, Human
ccugucuaggucaguacccacc

SEQ ID NO: 2050962 - RNA, 23 nt, Human
ccugucuaggucaguacccaccu

SEQ ID NO: 2050963 - RNA, 14 nt, Human
ccugucugccagcc

SEQ ID NO: 2050964 - RNA, 15 nt, Human
ccugucugccagcca

SEQ ID NO: 2050965 - RNA, 16 nt, Human
ccugucugccagccag

SEQ ID NO: 2050966 - RNA, 17 nt, Human
ccugucugccagccagc

SEQ ID NO: 2050967 - RNA, 19 nt, Human
ccugucugccagccagcag

SEQ ID NO: 2050968 - RNA, 20 nt, Human
ccugucugccagccagcagc

SEQ ID NO: 2050969 - RNA, 11 nt, Human
ccugggggccu

SEQ ID NO: 2050970 - RNA, 18 nt, Human
ccugucucauccccaggg

SEQ ID NO: 2050971 - RNA, 17 nt, Human
ccugucucauccccagg

SEQ ID NO: 2050972 - RNA, 13 nt, Human
ccugucucagccu

SEQ ID NO: 2050973 - RNA, 14 nt, Human
ccugucucagccuc

SEQ ID NO: 2050974 - RNA, 15 nt, Human
ccugucucagccucc

SEQ ID NO: 2050975 - RNA, 16 nt, Human
ccugucucagccuccc

SEQ ID NO: 2050976 - RNA, 14 nt, Human
ccugucuuuaagga

SEQ ID NO: 2050977 - RNA, 17 nt, Human
ccugucuuuaaggaaaa

SEQ ID NO: 2050978 - RNA, 22 nt, Human
ccugucuuccugcauucaccca

SEQ ID NO: 2050979 - RNA, 15 nt, Human
ccugucuuccugcau

SEQ ID NO: 2050980 - RNA, 19 nt, Human
ccugucuuccugcauucac

SEQ ID NO: 2050981 - RNA, 21 nt, Human
ccugucugccagccagcagcc

SEQ ID NO: 2050982 - RNA, 23 nt, Human
ccugucugccagccagcagccag

SEQ ID NO: 2050983 - RNA, 23 nt, Human
ccugggccccaccaccuaggcca

SEQ ID NO: 2050984 - RNA, 21 nt, Human
ccugggccccaccaccuaggc

SEQ ID NO: 2050985 - RNA, 13 nt, Human
ccugggccccucc

SEQ ID NO: 2050986 - RNA, 15 nt, Human
ccugggccccucccu

SEQ ID NO: 2050987 - RNA, 18 nt, Human
ccugggccccucccuacc

SEQ ID NO: 2050988 - RNA, 19 nt, Human
ccugggccccucccuaccu

SEQ ID NO: 2050989 - RNA, 20 nt, Human
ccugggccccucccuaccuc

SEQ ID NO: 2050990 - RNA, 22 nt, Human
ccugggccccucccuaccucaa

SEQ ID NO: 2050991 - RNA, 11 nt, Human
cccagcuguuu

SEQ ID NO: 2050992 - RNA, 23 nt, Human
cccagcugugcucuggacaggca

SEQ ID NO: 2050993 - RNA, 21 nt, Human
cccagcugugcucuggacagg

SEQ ID NO: 2050994 - RNA, 12 nt, Human
cccaggaagccg

SEQ ID NO: 2050995 - RNA, 16 nt, Human
cccaggcuggucucaa

SEQ ID NO: 2050996 - RNA, 21 nt, Human
cccagggcuacccucccccag

SEQ ID NO: 2050997 - RNA, 14 nt, Human
cccagggcucagcc

SEQ ID NO: 2050998 - RNA, 15 nt, Human
cccagggcucagccu

SEQ ID NO: 2050999 - RNA, 16 nt, Human
cccagggcucagccug

SEQ ID NO: 2051000 - RNA, 21 nt, Human
cccaggcuggcgugcaguggu

SEQ ID NO: 2051001 - RNA, 22 nt, Human
cccaggaaugaagauaccauca

SEQ ID NO: 2051002 - RNA, 22 nt, Human
cccaggaauuugaagcugcagu

SEQ ID NO: 2051003 - RNA, 15 nt, Human
cccagcaggugggga

SEQ ID NO: 2051004 - RNA, 19 nt, Human
cccagccauuaccauggag

SEQ ID NO: 2051005 - RNA, 20 nt, Human
cccagccauuaccauggaga

SEQ ID NO: 2051006 - RNA, 22 nt, Human
cccagccauuaccauggagaca

SEQ ID NO: 2051007 - RNA, 16 nt, Human
cccagcccaaagcugu

SEQ ID NO: 2051008 - RNA, 14 nt, Human
cccagcccacuucu

SEQ ID NO: 2051009 - RNA, 21 nt, Human
cccagcacuuugggaggcuga

SEQ ID NO: 2051010 - RNA, 13 nt, Human
cccagcagggccu

SEQ ID NO: 2051011 - RNA, 19 nt, Human
cccagcagggccucaaagu

SEQ ID NO: 2051012 - RNA, 16 nt, Human
cccagcagguggggag

SEQ ID NO: 2051013 - RNA, 15 nt, Human
cccagcacuuuggga

SEQ ID NO: 2051014 - RNA, 17 nt, Human
ccauuucuauuuauuua

SEQ ID NO: 2051015 - RNA, 14 nt, Human
ccauuucuauuuau

SEQ ID NO: 2051016 - RNA, 13 nt, Human
ccauuucuauuua

SEQ ID NO: 2051017 - RNA, 12 nt, Human
ccauuucuauuu

SEQ ID NO: 2051018 - RNA, 23 nt, Human
ccauuucuagaacaucccugcca

SEQ ID NO: 2051019 - RNA, 22 nt, Human
cccauucugccugcccaggccc

SEQ ID NO: 2051020 - RNA, 21 nt, Human
cccauucugccugcccaggcc

SEQ ID NO: 2051021 - RNA, 20 nt, Human
cccauucugccugcccaggc

SEQ ID NO: 2051022 - RNA, 20 nt, Human
cccauuucuauuuauuuacu

SEQ ID NO: 2051023 - RNA, 20 nt, Human
cccauuucuagaacaucccu

SEQ ID NO: 2051024 - RNA, 19 nt, Human
cccauuucuauuuauuuac

SEQ ID NO: 2051025 - RNA, 20 nt, Human
ccccagcaagugagagcugg

SEQ ID NO: 2051026 - RNA, 19 nt, Human
ccccagcaagugagagcug

SEQ ID NO: 2051027 - RNA, 17 nt, Human
ccccagcaagugagagc

SEQ ID NO: 2051028 - RNA, 23 nt, Human
ccccagauugcaacaggcugggc

SEQ ID NO: 2051029 - RNA, 22 nt, Human
ccccagauugcaacaggcuggg

SEQ ID NO: 2051030 - RNA, 21 nt, Human
ccccagauugcaacaggcugg

SEQ ID NO: 2051031 - RNA, 16 nt, Human
cccauuuacacuuuug

SEQ ID NO: 2051032 - RNA, 18 nt, Human
cccauuucacaccugaaa

SEQ ID NO: 2051033 - RNA, 17 nt, Human
cccauuucuauuuauuu

SEQ ID NO: 2051034 - RNA, 16 nt, Human
cccauuucuauuuauu

SEQ ID NO: 2051035 - RNA, 15 nt, Human
cccauuucuauuuau

SEQ ID NO: 2051036 - RNA, 18 nt, Human
cccauuucuaaaggccuc

SEQ ID NO: 2051037 - RNA, 21 nt, Human
cccauuucuaaaggccucuuc

SEQ ID NO: 2051038 - RNA, 23 nt, Human
cccaguuugcagaaaagcaccug

SEQ ID NO: 2051039 - RNA, 23 nt, Human
cccauaauuuuuuuuuuccuuuu

SEQ ID NO: 2051040 - RNA, 22 nt, Human
cccauaauuuuuuuuuuccuuu

SEQ ID NO: 2051041 - RNA, 19 nt, Human
cccauaauuuucuucaugc

SEQ ID NO: 2051042 - RNA, 15 nt, Human
cccaguuugcagaaa

SEQ ID NO: 2051043 - RNA, 16 nt, Human
cccaguuugcagaaaa

SEQ ID NO: 2051044 - RNA, 22 nt, Human
cccaguuugcagaaaagcaccu

SEQ ID NO: 2051045 - RNA, 20 nt, Human
cccagggcucagccuggugg

SEQ ID NO: 2051046 - RNA, 17 nt, Human
cccagggcucagccugg

SEQ ID NO: 2051047 - RNA, 18 nt, Human
cccagggcucagccuggu

SEQ ID NO: 2051048 - RNA, 17 nt, Human
ccccuucgcuccugugu

SEQ ID NO: 2051049 - RNA, 15 nt, Human
ccccuucgcuccugu

SEQ ID NO: 2051050 - RNA, 14 nt, Human
ccccuucgcuccug

SEQ ID NO: 2051051 - RNA, 19 nt, Human
ccccuucuacacucuccug

SEQ ID NO: 2051052 - RNA, 20 nt, Human
ccccuucuacacucuccugg

SEQ ID NO: 2051053 - RNA, 21 nt, Human
ccccuucuacacucuccuggg

SEQ ID NO: 2051054 - RNA, 22 nt, Human
ccccuucuacacucuccugggc

SEQ ID NO: 2051055 - RNA, 23 nt, Human
ccccuucuacacucuccugggcc

SEQ ID NO: 2051056 - RNA, 19 nt, Human
ccccuucgcuccugugucu

SEQ ID NO: 2051057 - RNA, 16 nt, Human
ccccuucucccacacu

SEQ ID NO: 2051058 - RNA, 13 nt, Human
ccccuucucccac

SEQ ID NO: 2051059 - RNA, 21 nt, Human
ccccugagacaaauggaggcc

SEQ ID NO: 2051060 - RNA, 18 nt, Human
ccccugaccucacuguga

SEQ ID NO: 2051061 - RNA, 22 nt, Human
ccccugcacuggaguccagucu

SEQ ID NO: 2051062 - RNA, 14 nt, Human
ccccauucugccug

SEQ ID NO: 2051063 - RNA, 13 nt, Human
ccccauucugccu

SEQ ID NO: 2051064 - RNA, 15 nt, Human
ccccauucugccugc

SEQ ID NO: 2051065 - RNA, 20 nt, Human
ccccaugaagccacagccca

SEQ ID NO: 2051066 - RNA, 13 nt, Human
ccccaugccaaag

SEQ ID NO: 2051067 - RNA, 22 nt, Human
ccccaugccaaagcuagggugg

SEQ ID NO: 2051068 - RNA, 12 nt, Human
cccggcugcgga

SEQ ID NO: 2051069 - RNA, 22 nt, Human
cccucaaggacaaagucuccag

SEQ ID NO: 2051070 - RNA, 23 nt, Human
cccucaaggacaaagucuccagc

SEQ ID NO: 2051071 - RNA, 16 nt, Human
cccuauggggaugguc

SEQ ID NO: 2051072 - RNA, 18 nt, Human
cccuauggggauggucca

SEQ ID NO: 2051073 - RNA, 13 nt, Human
cccuaugcugccu

SEQ ID NO: 2051074 - RNA, 17 nt, Human
cccuauggaagcauauu

SEQ ID NO: 2051075 - RNA, 13 nt, Human
cccucagagccac

SEQ ID NO: 2051076 - RNA, 19 nt, Human
ccagcagccuggacccugu

SEQ ID NO: 2051077 - RNA, 20 nt, Human
ccagcagccuggacccugug

SEQ ID NO: 2051078 - RNA, 15 nt, Human
ccagcagccuggacc

SEQ ID NO: 2051079 - RNA, 14 nt, Human
ccagcagccuggac

SEQ ID NO: 2051080 - RNA, 19 nt, Human
ccagcagaucccagcucac

SEQ ID NO: 2051081 - RNA, 21 nt, Human
ccagcagaucccagcucacgu

SEQ ID NO: 2051082 - RNA, 15 nt, Human
ccagcucagucccau

SEQ ID NO: 2051083 - RNA, 12 nt, Human
ccagcucagcag

SEQ ID NO: 2051084 - RNA, 15 nt, Human
ccagcucagcaguga

SEQ ID NO: 2051085 - RNA, 15 nt, Human
ccagcucacgucaca

SEQ ID NO: 2051086 - RNA, 14 nt, Human
ccagcucacgucac

SEQ ID NO: 2051087 - RNA, 13 nt, Human
ccagcucagaggg

SEQ ID NO: 2051088 - RNA, 21 nt, Human
ccagcuaaggacauuucccag

SEQ ID NO: 2051089 - RNA, 23 nt, Human
ccagcuaaggacauuucccaggg

SEQ ID NO: 2051090 - RNA, 16 nt, Human
ccagcuuaucucaggg

SEQ ID NO: 2051091 - RNA, 17 nt, Human
ccagcucagucuucccu

SEQ ID NO: 2051092 - RNA, 18 nt, Human
ccagcucagucuucccua

SEQ ID NO: 2051093 - RNA, 22 nt, Human
ccagcucagucccaucagagag

SEQ ID NO: 2051094 - RNA, 22 nt, Human
ccaggaacacccgacuccucaa

SEQ ID NO: 2051095 - RNA, 15 nt, Human
ccagcagaucccagc

SEQ ID NO: 2051096 - RNA, 16 nt, Human
ccagcagaucccagcu

SEQ ID NO: 2051097 - RNA, 17 nt, Human
ccagcagaucccagcuc

SEQ ID NO: 2051098 - RNA, 18 nt, Human
ccagcagaucccagcuca

SEQ ID NO: 2051099 - RNA, 21 nt, Human
ccacucugcuuugacugagca

SEQ ID NO: 2051100 - RNA, 14 nt, Human
ccacucugccucug

SEQ ID NO: 2051101 - RNA, 16 nt, Human
ccacucugccucugcc

SEQ ID NO: 2051102 - RNA, 17 nt, Human
ccacucuccccacacua

SEQ ID NO: 2051103 - RNA, 18 nt, Human
ccaggaggucgaccccaa

SEQ ID NO: 2051104 - RNA, 20 nt, Human
ccaggaguucgaggcugcag

SEQ ID NO: 2051105 - RNA, 21 nt, Human
ccaggaguguggccacguggg

SEQ ID NO: 2051106 - RNA, 17 nt, Human
ccaggcaacuugggaac

SEQ ID NO: 2051107 - RNA, 13 nt, Human
ccaggcaauggcc

SEQ ID NO: 2051108 - RNA, 19 nt, Human
ccaggcaauggccuaaacu

SEQ ID NO: 2051109 - RNA, 23 nt, Human
ccaggcaauggccuaaacuucag

SEQ ID NO: 2051110 - RNA, 14 nt, Human
ccagucccccugcc

SEQ ID NO: 2051111 - RNA, 19 nt, Human
ccauuucuaaaggccucuu

SEQ ID NO: 2051112 - RNA, 21 nt, Human
ccauuucuaaaggccucuucc

SEQ ID NO: 2051113 - RNA, 14 nt, Human
ccauuuauagaaua

SEQ ID NO: 2051114 - RNA, 19 nt, Human
ccauuuaguucuuuguuau

SEQ ID NO: 2051115 - RNA, 12 nt, Human
ccauuuacacuu

SEQ ID NO: 2051116 - RNA, 13 nt, Human
ccauuuacacuuu

SEQ ID NO: 2051117 - RNA, 18 nt, Human
ccauuuacacuuuugaga

SEQ ID NO: 2051118 - RNA, 14 nt, Human
ccauugaaaaugua

SEQ ID NO: 2051119 - RNA, 13 nt, Human
ccauucuuugcuu

SEQ ID NO: 2051120 - RNA, 15 nt, Human
ccauucuuugcuuga

SEQ ID NO: 2051121 - RNA, 20 nt, Human
ccauucuuugcuugaacaca

SEQ ID NO: 2051122 - RNA, 22 nt, Human
ccauucuuugcuugaacacagu

SEQ ID NO: 2051123 - RNA, 15 nt, Human
ccaugggccuccugu

SEQ ID NO: 2051124 - RNA, 14 nt, Human
ccaugggccuccug

SEQ ID NO: 2051125 - RNA, 20 nt, Human
ccauaauuuuuuuuuuccuu

SEQ ID NO: 2051126 - RNA, 12 nt, Human
ccaucccacacc

SEQ ID NO: 2051127 - RNA, 14 nt, Human
ccaucccacacccu

SEQ ID NO: 2051128 - RNA, 16 nt, Human
ccaucccacacccugg

SEQ ID NO: 2051129 - RNA, 13 nt, Human
ccaucccaccucu

SEQ ID NO: 2051130 - RNA, 23 nt, Human
ccaguuugcagaaaagcaccugc

SEQ ID NO: 2051131 - RNA, 14 nt, Human
ccaguuugcagaaa

SEQ ID NO: 2051132 - RNA, 13 nt, Human
ccaugggccuccu

SEQ ID NO: 2051133 - RNA, 19 nt, Human
ccaugagccucagcauccu

SEQ ID NO: 2051134 - RNA, 18 nt, Human
ccaugagccucagcaucc

SEQ ID NO: 2051135 - RNA, 14 nt, Human
ccaugagccucagc

SEQ ID NO: 2051136 - RNA, 16 nt, Human
ccauccccuguagagu

SEQ ID NO: 2051137 - RNA, 22 nt, Human
ccauccccuguagagugggagc

SEQ ID NO: 2051138 - RNA, 17 nt, Human
ccauccccuauggacca

SEQ ID NO: 2051139 - RNA, 21 nt, Human
ccauccuaaucauccaaugcu

SEQ ID NO: 2051140 - RNA, 22 nt, Human
ccauccuaaucauccaaugcuc

SEQ ID NO: 2051141 - RNA, 23 nt, Human
ccauccuaaucauccaaugcuca

SEQ ID NO: 2051142 - RNA, 15 nt, Human
auuucagauuuguga

SEQ ID NO: 2051143 - RNA, 14 nt, Human
auuucaucuauuuc

SEQ ID NO: 2051144 - RNA, 15 nt, Human
auuucaucuauuucu

SEQ ID NO: 2051145 - RNA, 16 nt, Human
auuucaucuauuucug

SEQ ID NO: 2051146 - RNA, 14 nt, Human
auuucagaugcuuu

SEQ ID NO: 2051147 - RNA, 16 nt, Human
auuucagaugcuuuag

SEQ ID NO: 2051148 - RNA, 18 nt, Human
auuuaucagugacagagu

SEQ ID NO: 2051149 - RNA, 17 nt, Human
auuuaucagugacagag

SEQ ID NO: 2051150 - RNA, 15 nt, Human
auuucaagaccuucu

SEQ ID NO: 2051151 - RNA, 19 nt, Human
auuuaucacacaaagcaga

SEQ ID NO: 2051152 - RNA, 16 nt, Human
auuuaucacacuucug

SEQ ID NO: 2051153 - RNA, 14 nt, Human
auuuaucacacaaa

SEQ ID NO: 2051154 - RNA, 17 nt, Human
auuuaucacacaaagca

SEQ ID NO: 2051155 - RNA, 14 nt, Human
auuuaucagugaca

SEQ ID NO: 2051156 - RNA, 15 nt, Human
auuuaucagugacag

SEQ ID NO: 2051157 - RNA, 13 nt, Human
auuuauauuucac

SEQ ID NO: 2051158 - RNA, 18 nt, Human
auuuauauuuuuauuuua

SEQ ID NO: 2051159 - RNA, 13 nt, Human
auuuauauuuuug

SEQ ID NO: 2051160 - RNA, 16 nt, Human
auuuauaguuuauaca

SEQ ID NO: 2051161 - RNA, 17 nt, Human
auuuauaguuuauacag

SEQ ID NO: 2051162 - RNA, 18 nt, Human
auuuauaguuuauacagu

SEQ ID NO: 2051163 - RNA, 20 nt, Human
auuuauaguuuauacaguuu

SEQ ID NO: 2051164 - RNA, 14 nt, Human
auuuauacuauuua

SEQ ID NO: 2051165 - RNA, 14 nt, Human
auuuaaugaaagac

SEQ ID NO: 2051166 - RNA, 18 nt, Human
auuuaaucuuuuuuaugu

SEQ ID NO: 2051167 - RNA, 13 nt, Human
auuuaauuaaaaa

SEQ ID NO: 2051168 - RNA, 12 nt, Human
auuuauaauuuu

SEQ ID NO: 2051169 - RNA, 19 nt, Human
auuuauaauuuuaagauuc

SEQ ID NO: 2051170 - RNA, 14 nt, Human
auuuauaauguuag

SEQ ID NO: 2051171 - RNA, 16 nt, Human
auuuauaauguuagua

SEQ ID NO: 2051172 - RNA, 20 nt, Human
auuuauaauguuaguagaaa

SEQ ID NO: 2051173 - RNA, 14 nt, Human
auuuauaauguuug

SEQ ID NO: 2051174 - RNA, 19 nt, Human
auuuaauauagcuauuuuu

SEQ ID NO: 2051175 - RNA, 14 nt, Human
auuuaauauagcua

SEQ ID NO: 2051176 - RNA, 16 nt, Human
auuuaauauagcuauu

SEQ ID NO: 2051177 - RNA, 17 nt, Human
auuuaauauagcuauuu

SEQ ID NO: 2051178 - RNA, 15 nt, Human
auuucuccauacgca

SEQ ID NO: 2051179 - RNA, 11 nt, Human
auuucucccag

SEQ ID NO: 2051180 - RNA, 20 nt, Human
auuucaucuauuucugagaa

SEQ ID NO: 2051181 - RNA, 18 nt, Human
auuucuauuuuuguagaa

SEQ ID NO: 2051182 - RNA, 18 nt, Human
auuucaucuauuucugag

SEQ ID NO: 2051183 - RNA, 19 nt, Human
auuucaucuauuucugaga

SEQ ID NO: 2051184 - RNA, 13 nt, Human
auuguacaguuuu

SEQ ID NO: 2051185 - RNA, 19 nt, Human
auuguacacaccuuauauu

SEQ ID NO: 2051186 - RNA, 20 nt, Human
auuguacagaaucauugcuu

SEQ ID NO: 2051187 - RNA, 21 nt, Human
auuguacagaaucauugcuua

SEQ ID NO: 2051188 - RNA, 13 nt, Human
auuguacaaccug

SEQ ID NO: 2051189 - RNA, 21 nt, Human
auuguucccagugacacuuca

SEQ ID NO: 2051190 - RNA, 13 nt, Human
auuguuccuaagu

SEQ ID NO: 2051191 - RNA, 16 nt, Human
auuguuccuaaguucu

SEQ ID NO: 2051192 - RNA, 17 nt, Human
auuguuccuaaguucuu

SEQ ID NO: 2051193 - RNA, 19 nt, Human
auuguuccuaaguucuuag

SEQ ID NO: 2051194 - RNA, 20 nt, Human
auuguuccuaaguucuuaga

SEQ ID NO: 2051195 - RNA, 23 nt, Human
auuguuccuaaguucuuagauau

SEQ ID NO: 2051196 - RNA, 19 nt, Human
auuguucuuaguuugcagu

SEQ ID NO: 2051197 - RNA, 16 nt, Human
auuguucccagugaca

SEQ ID NO: 2051198 - RNA, 19 nt, Human
auuguucccagugacacuu

SEQ ID NO: 2051199 - RNA, 22 nt, Human
auuguuccaagacauugucaau

SEQ ID NO: 2051200 - RNA, 19 nt, Human
auuguuucaaaauaaaaac

SEQ ID NO: 2051201 - RNA, 19 nt, Human
auuguuuauuuaucaguga

SEQ ID NO: 2051202 - RNA, 21 nt, Human
auuguuuauuuaucagugaca

SEQ ID NO: 2051203 - RNA, 15 nt, Human
auuguuuauuuauca

SEQ ID NO: 2051204 - RNA, 17 nt, Human
auuguuuauuuaucagu

SEQ ID NO: 2051205 - RNA, 18 nt, Human
auuguuuauuuaucagug

SEQ ID NO: 2051206 - RNA, 21 nt, Human
auuguuuaaguguuguaaaua

SEQ ID NO: 2051207 - RNA, 21 nt, Human
auugaucauuuuccccccacu

SEQ ID NO: 2051208 - RNA, 19 nt, Human
auugaucauuuucccccca

SEQ ID NO: 2051209 - RNA, 20 nt, Human
auugaucauuuuccccccac

SEQ ID NO: 2051210 - RNA, 17 nt, Human
auuguaaaacugaggca

SEQ ID NO: 2051211 - RNA, 14 nt, Human
auuccugcagccug

SEQ ID NO: 2051212 - RNA, 15 nt, Human
auuccugcagccugg

SEQ ID NO: 2051213 - RNA, 17 nt, Human
auuccugcagccuggag

SEQ ID NO: 2051214 - RNA, 10 nt, Human
auucucucuc

SEQ ID NO: 2051215 - RNA, 16 nt, Human
auucucucuccugucc

SEQ ID NO: 2051216 - RNA, 17 nt, Human
auucucucuccugucca

SEQ ID NO: 2051217 - RNA, 15 nt, Human
auucucucuccugua

SEQ ID NO: 2051218 - RNA, 12 nt, Human
auucucucuccu

SEQ ID NO: 2051219 - RNA, 15 nt, Human
auucucucuccuguc

SEQ ID NO: 2051220 - RNA, 13 nt, Human
auuccugcagccu

SEQ ID NO: 2051221 - RNA, 13 nt, Human
auuccugaaagaa

SEQ ID NO: 2051222 - RNA, 17 nt, Human
auuccugaaugaaauau

SEQ ID NO: 2051223 - RNA, 19 nt, Human
auuccugaaugaaauauca

SEQ ID NO: 2051224 - RNA, 17 nt, Human
auucuugucacaauaaa

SEQ ID NO: 2051225 - RNA, 18 nt, Human
auucuugucacaauaaau

SEQ ID NO: 2051226 - RNA, 12 nt, Human
auucuugugaau

SEQ ID NO: 2051227 - RNA, 13 nt, Human
auucuugugaaua

SEQ ID NO: 2051228 - RNA, 17 nt, Human
auucuugugaauaugua

SEQ ID NO: 2051229 - RNA, 19 nt, Human
auucuugugaauauguaca

SEQ ID NO: 2051230 - RNA, 12 nt, Human
auucuuguauau

SEQ ID NO: 2051231 - RNA, 17 nt, Human
auugagaauuuuaaauu

SEQ ID NO: 2051232 - RNA, 21 nt, Human
auugagaauuuuaaauuauaa

SEQ ID NO: 2051233 - RNA, 14 nt, Human
auugagacaaaaau

SEQ ID NO: 2051234 - RNA, 15 nt, Human
auugagacaaaaauu

SEQ ID NO: 2051235 - RNA, 16 nt, Human
auugagacaaaaauua

SEQ ID NO: 2051236 - RNA, 18 nt, Human
auugagacaaaaauuauc

SEQ ID NO: 2051237 - RNA, 19 nt, Human
auugagacaaaaauuaucu

SEQ ID NO: 2051238 - RNA, 20 nt, Human
auugagacaaaaauuaucua

SEQ ID NO: 2051239 - RNA, 22 nt, Human
auugagagaauggaaaacagac

SEQ ID NO: 2051240 - RNA, 18 nt, Human
auugaucauuuucccccc

SEQ ID NO: 2051241 - RNA, 16 nt, Human
auugagaaagaaacua

SEQ ID NO: 2051242 - RNA, 19 nt, Human
auugagaagcguauguuuu

SEQ ID NO: 2051243 - RNA, 22 nt, Human
auugagaacugcauauguuucg

SEQ ID NO: 2051244 - RNA, 14 nt, Human
auugagaacugcau

SEQ ID NO: 2051245 - RNA, 18 nt, Human
auugagaacugcauaugu

SEQ ID NO: 2051246 - RNA, 13 nt, Human
auugagaauuuua

SEQ ID NO: 2051247 - RNA, 19 nt, Human
auucaagaaaaguaagccc

SEQ ID NO: 2051248 - RNA, 16 nt, Human
auucaagaaagccagu

SEQ ID NO: 2051249 - RNA, 22 nt, Human
auucaagaaagccagucuuaac

SEQ ID NO: 2051250 - RNA, 23 nt, Human
auucaagaaagccagucuuaaca

SEQ ID NO: 2051251 - RNA, 15 nt, Human
auuauguguguuuug

SEQ ID NO: 2051252 - RNA, 22 nt, Human
auucaauuuucuuuaaccaguc

SEQ ID NO: 2051253 - RNA, 19 nt, Human
auucaauuuauucaagaaa

SEQ ID NO: 2051254 - RNA, 15 nt, Human
auuaaauuuaauuag

SEQ ID NO: 2051255 - RNA, 20 nt, Human
auucauauuuacuucuuaua

SEQ ID NO: 2051256 - RNA, 18 nt, Human
auucauauuuacuucuua

SEQ ID NO: 2051257 - RNA, 19 nt, Human
auucauauuuacuucuuau

SEQ ID NO: 2051258 - RNA, 18 nt, Human
auucauauuuaugaaucu

SEQ ID NO: 2051259 - RNA, 22 nt, Human
auuccucugggaauguuacauu

SEQ ID NO: 2051260 - RNA, 13 nt, Human
auuccucugggaa

SEQ ID NO: 2051261 - RNA, 12 nt, Human
auuccucuggga

SEQ ID NO: 2051262 - RNA, 17 nt, Human
auucaucucucuuuaau

SEQ ID NO: 2051263 - RNA, 22 nt, Human
auucaucucucuuuaauauaaa

SEQ ID NO: 2051264 - RNA, 20 nt, Human
auuuuuaaagaaaaguuuug

SEQ ID NO: 2051265 - RNA, 13 nt, Human
auuuuuaaagaaa

SEQ ID NO: 2051266 - RNA, 17 nt, Human
auuuuuaaaguauauau

SEQ ID NO: 2051267 - RNA, 19 nt, Human
auuuuuaaauguaaaacau

SEQ ID NO: 2051268 - RNA, 21 nt, Human
auuuuuaagcaaaauauuauu

SEQ ID NO: 2051269 - RNA, 18 nt, Human
auuuugauccaagcuggu

SEQ ID NO: 2051270 - RNA, 15 nt, Human
auuuucuuugaaauu

SEQ ID NO: 2051271 - RNA, 16 nt, Human
auuuucuuuuguaaau

SEQ ID NO: 2051272 - RNA, 17 nt, Human
auuuucuuuuguaaaug

SEQ ID NO: 2051273 - RNA, 17 nt, Human
auuuugaccuacucuca

SEQ ID NO: 2051274 - RNA, 18 nt, Human
auuuugaccuacucucau

SEQ ID NO: 2051275 - RNA, 19 nt, Human
auuuucuuuuguaaauguu

SEQ ID NO: 2051276 - RNA, 20 nt, Human
auuuucuuuuuaauaaaaag

SEQ ID NO: 2051277 - RNA, 22 nt, Human
auuuucuuuaaccagucugaag

SEQ ID NO: 2051278 - RNA, 19 nt, Human
auuuucuugaugacuggaa

SEQ ID NO: 2051279 - RNA, 21 nt, Human
auuuucuugaugacuggaauu

SEQ ID NO: 2051280 - RNA, 21 nt, Human
auuuucuuccaagcaaaggug

SEQ ID NO: 2051281 - RNA, 15 nt, Human
auuuuaucucuuauu

SEQ ID NO: 2051282 - RNA, 15 nt, Human
auuuuauacauuaac

SEQ ID NO: 2051283 - RNA, 12 nt, Human
auuuuauaauuu

SEQ ID NO: 2051284 - RNA, 19 nt, Human
auuuuauauuagaaguguu

SEQ ID NO: 2051285 - RNA, 20 nt, Human
auuuuauauuagaaguguua

SEQ ID NO: 2051286 - RNA, 15 nt, Human
caaaaaaaauuuaaa

SEQ ID NO: 2051287 - RNA, 17 nt, Human
caaaaaaaauuuaaaaa

SEQ ID NO: 2051288 - RNA, 20 nt, Human
caaaaaaaguugaaggccuu

SEQ ID NO: 2051289 - RNA, 16 nt, Human
caaaaaaauaaggugu

SEQ ID NO: 2051290 - RNA, 11 nt, Human
caaaagccucu

SEQ ID NO: 2051291 - RNA, 13 nt, Human
caaaagccucuca

SEQ ID NO: 2051292 - RNA, 20 nt, Human
auuuuuaccuuuuuccuucc

SEQ ID NO: 2051293 - RNA, 22 nt, Human
auuuuuacagaauugcuuguuu

SEQ ID NO: 2051294 - RNA, 14 nt, Human
auuuuuacagaauu

SEQ ID NO: 2051295 - RNA, 16 nt, Human
auuuuuacagaauugc

SEQ ID NO: 2051296 - RNA, 20 nt, Human
auuuuuaauguuuuuaaaua

SEQ ID NO: 2051297 - RNA, 16 nt, Human
caaaaguaucgggggc

SEQ ID NO: 2051298 - RNA, 17 nt, Human
caaaaguaucgggggcu

SEQ ID NO: 2051299 - RNA, 18 nt, Human
caaaaguaucgggggcug

SEQ ID NO: 2051300 - RNA, 22 nt, Human
caaaaguaucgggggcuggggc

SEQ ID NO: 2051301 - RNA, 20 nt, Human
caaaagguucacuaaagcag

SEQ ID NO: 2051302 - RNA, 15 nt, Human
caaaagcugggcagg

SEQ ID NO: 2051303 - RNA, 19 nt, Human
caaaagucaaaaggugccu

SEQ ID NO: 2051304 - RNA, 13 nt, Human
caaaagugcuuug

SEQ ID NO: 2051305 - RNA, 14 nt, Human
caaaagugcuuugg

SEQ ID NO: 2051306 - RNA, 15 nt, Human
caaaagugcuuugga

SEQ ID NO: 2051307 - RNA, 17 nt, Human
caacuaugauuuggaaa

SEQ ID NO: 2051308 - RNA, 22 nt, Human
caacuaugauuuggaaaauaaa

SEQ ID NO: 2051309 - RNA, 19 nt, Human
caacuaugauuuggaaaau

SEQ ID NO: 2051310 - RNA, 18 nt, Human
caacuaugauuuggaaaa

SEQ ID NO: 2051311 - RNA, 17 nt, Human
caacccccagccugcua

SEQ ID NO: 2051312 - RNA, 16 nt, Human
caacccccagccugcu

SEQ ID NO: 2051313 - RNA, 15 nt, Human
caacccccagccugc

SEQ ID NO: 2051314 - RNA, 19 nt, Human
caacccaucuaccccugga

SEQ ID NO: 2051315 - RNA, 20 nt, Human
caacccaucuaccccuggau

SEQ ID NO: 2051316 - RNA, 22 nt, Human
caacccaugaugagcuccucuu

SEQ ID NO: 2051317 - RNA, 16 nt, Human
caacccaaaccuggag

SEQ ID NO: 2051318 - RNA, 17 nt, Human
caacccaaaccuggaga

SEQ ID NO: 2051319 - RNA, 18 nt, Human
caacccaaaccuggagau

SEQ ID NO: 2051320 - RNA, 14 nt, Human
caaccauuccccau

SEQ ID NO: 2051321 - RNA, 22 nt, Human
caaccaccgcuccccagcccag

SEQ ID NO: 2051322 - RNA, 14 nt, Human
caaccacuguaaaa

SEQ ID NO: 2051323 - RNA, 17 nt, Human
caaccacuguaaaauga

SEQ ID NO: 2051324 - RNA, 21 nt, Human
caaccacuguaaaaugaaauu

SEQ ID NO: 2051325 - RNA, 19 nt, Human
caaccacuguaaaaugaaa

SEQ ID NO: 2051326 - RNA, 22 nt, Human
caagaaggguuuuccacccugg

SEQ ID NO: 2051327 - RNA, 22 nt, Human
caacuaugauaugguaaaaguu

SEQ ID NO: 2051328 - RNA, 23 nt, Human
caagaaggguuuuccacccugga

SEQ ID NO: 2051329 - RNA, 19 nt, Human
caagaagucaaaguaaaac

SEQ ID NO: 2051330 - RNA, 12 nt, Human
caagaaggcugg

SEQ ID NO: 2051331 - RNA, 13 nt, Human
caagaaggcuggg

SEQ ID NO: 2051332 - RNA, 14 nt, Human
caagaaggcugggg

SEQ ID NO: 2051333 - RNA, 14 nt, Human
caagauuaaaugua

SEQ ID NO: 2051334 - RNA, 15 nt, Human
caagaccccugucuu

SEQ ID NO: 2051335 - RNA, 14 nt, Human
caagacccugucuc

SEQ ID NO: 2051336 - RNA, 15 nt, Human
caagacccugucucu

SEQ ID NO: 2051337 - RNA, 15 nt, Human
caagacacaucccua

SEQ ID NO: 2051338 - RNA, 13 nt, Human
caagacagaugcc

SEQ ID NO: 2051339 - RNA, 22 nt, Human
caagacagaugccccagagcug

SEQ ID NO: 2051340 - RNA, 16 nt, Human
caagacagaugcccca

SEQ ID NO: 2051341 - RNA, 21 nt, Human
caagacagaugccccagagcu

SEQ ID NO: 2051342 - RNA, 22 nt, Human
caagaauuugaucguuccaguu

SEQ ID NO: 2051343 - RNA, 22 nt, Human
caagaauuucuugguaagaagc

SEQ ID NO: 2051344 - RNA, 23 nt, Human
caagaauuucuugguaagaagcc

SEQ ID NO: 2051345 - RNA, 20 nt, Human
caaccaccgcuccccagccc

SEQ ID NO: 2051346 - RNA, 21 nt, Human
caaccaccgcuccccagccca

SEQ ID NO: 2051347 - RNA, 19 nt, Human
caaccaccgcuccccagcc

SEQ ID NO: 2051348 - RNA, 17 nt, Human
caaccaccgcuccccag

SEQ ID NO: 2051349 - RNA, 17 nt, Human
caacaaaaagcuucccc

SEQ ID NO: 2051350 - RNA, 10 nt, Human
caacaaaaau

SEQ ID NO: 2051351 - RNA, 12 nt, Human
caacaaaaauuu

SEQ ID NO: 2051352 - RNA, 13 nt, Human
caacaaaaauuug

SEQ ID NO: 2051353 - RNA, 23 nt, Human
caacaaaaauuugaaccaaaaca

SEQ ID NO: 2051354 - RNA, 10 nt, Human
caacaaaaaa

SEQ ID NO: 2051355 - RNA, 13 nt, Human
caacaaaaaauaa

SEQ ID NO: 2051356 - RNA, 16 nt, Human
caacaaaaagcuuccc

SEQ ID NO: 2051357 - RNA, 15 nt, Human
caaauuuuggccaaa

SEQ ID NO: 2051358 - RNA, 13 nt, Human
caaauuuuggcca

SEQ ID NO: 2051359 - RNA, 21 nt, Human
caaaucugccuauugcagcug

SEQ ID NO: 2051360 - RNA, 21 nt, Human
caaaucugcuuuuuaaagaau

SEQ ID NO: 2051361 - RNA, 23 nt, Human
caaaucuaagggaaaaagccuug

SEQ ID NO: 2051362 - RNA, 17 nt, Human
caaaucagcugcuacua

SEQ ID NO: 2051363 - RNA, 21 nt, Human
caaaguaaaacuugcugccug

SEQ ID NO: 2051364 - RNA, 22 nt, Human
caacaccucugcacaagcugca

SEQ ID NO: 2051365 - RNA, 22 nt, Human
caacaccuucagaggcugaggu

SEQ ID NO: 2051366 - RNA, 23 nt, Human
caacaccuucagaggcugaggug

SEQ ID NO: 2051367 - RNA, 22 nt, Human
caaguaauccaccugccucggc

SEQ ID NO: 2051368 - RNA, 23 nt, Human
caagauucccagagacaggaaaa

SEQ ID NO: 2051369 - RNA, 18 nt, Human
caagauucccagagacag

SEQ ID NO: 2051370 - RNA, 19 nt, Human
caagauucccagagacagg

SEQ ID NO: 2051371 - RNA, 14 nt, Human
caagauucccagag

SEQ ID NO: 2051372 - RNA, 15 nt, Human
caagauucccagaga

SEQ ID NO: 2051373 - RNA, 16 nt, Human
caagauucccagagac

SEQ ID NO: 2051374 - RNA, 17 nt, Human
caagauucccagagaca

SEQ ID NO: 2051375 - RNA, 13 nt, Human
caagauucccaga

SEQ ID NO: 2051376 - RNA, 11 nt, Human
caaguaauugu

SEQ ID NO: 2051377 - RNA, 23 nt, Human
caaguaauugugaaaaaguuaaa

SEQ ID NO: 2051378 - RNA, 16 nt, Human
caaguacugcuguaaa

SEQ ID NO: 2051379 - RNA, 13 nt, Human
caaguacugcugu

SEQ ID NO: 2051380 - RNA, 14 nt, Human
caaguacugcugua

SEQ ID NO: 2051381 - RNA, 18 nt, Human
caaguagaugccugaacu

SEQ ID NO: 2051382 - RNA, 20 nt, Human
caaguagaugccugaacuug

SEQ ID NO: 2051383 - RNA, 17 nt, Human
caaguauguuuuagcau

SEQ ID NO: 2051384 - RNA, 13 nt, Human
caaguucuauuua

SEQ ID NO: 2051385 - RNA, 14 nt, Human
caaguuggacuggg

SEQ ID NO: 2051386 - RNA, 15 nt, Human
caaguugcgacggag

SEQ ID NO: 2051387 - RNA, 20 nt, Human
caaguugcgacggagagaaa

SEQ ID NO: 2051388 - RNA, 23 nt, Human
caaguugcgacggagagaaaaaa

SEQ ID NO: 2051389 - RNA, 14 nt, Human
caauaaaaaucaua

SEQ ID NO: 2051390 - RNA, 17 nt, Human
caauaaaccucuuuucu

SEQ ID NO: 2051391 - RNA, 11 nt, Human
caauaaacuau

SEQ ID NO: 2051392 - RNA, 17 nt, Human
caauuguuuuuguugug

SEQ ID NO: 2051393 - RNA, 12 nt, Human
caauuuaaagca

SEQ ID NO: 2051394 - RNA, 15 nt, Human
cacaagauucccaga

SEQ ID NO: 2051395 - RNA, 16 nt, Human
cacaagauucccagag

SEQ ID NO: 2051396 - RNA, 17 nt, Human
cacaagauucccagaga

SEQ ID NO: 2051397 - RNA, 18 nt, Human
cacaagauucccagagac

SEQ ID NO: 2051398 - RNA, 19 nt, Human
cacaagauucccagagaca

SEQ ID NO: 2051399 - RNA, 22 nt, Human
cacaagauucccagagacagga

SEQ ID NO: 2051400 - RNA, 23 nt, Human
caaugcuggcuguuggcuggggg

SEQ ID NO: 2051401 - RNA, 22 nt, Human
caaugcuggcuguuggcugggg

SEQ ID NO: 2051402 - RNA, 19 nt, Human
caauauuuauuauuuucac

SEQ ID NO: 2051403 - RNA, 17 nt, Human
caauucuuacaaacaug

SEQ ID NO: 2051404 - RNA, 18 nt, Human
caauucuuacaaacaugu

SEQ ID NO: 2051405 - RNA, 19 nt, Human
caauucuuacaaacaugug

SEQ ID NO: 2051406 - RNA, 17 nt, Human
caauuguguggucagug

SEQ ID NO: 2051407 - RNA, 13 nt, Human
caauggaagauuu

SEQ ID NO: 2051408 - RNA, 14 nt, Human
caauggaagauuug

SEQ ID NO: 2051409 - RNA, 17 nt, Human
caauggaagauuugccc

SEQ ID NO: 2051410 - RNA, 21 nt, Human
caaugcuuugccccugagaca

SEQ ID NO: 2051411 - RNA, 13 nt, Human
caauauuuauugu

SEQ ID NO: 2051412 - RNA, 14 nt, Human
caauauuuauugua

SEQ ID NO: 2051413 - RNA, 16 nt, Human
caauauuuauuguauu

SEQ ID NO: 2051414 - RNA, 22 nt, Human
caauauuuauuguauuuuagua

SEQ ID NO: 2051415 - RNA, 14 nt, Human
cacauuuuucagau

SEQ ID NO: 2051416 - RNA, 18 nt, Human
cacaucuugcucugcuga

SEQ ID NO: 2051417 - RNA, 19 nt, Human
cacaucuugcucugcugac

SEQ ID NO: 2051418 - RNA, 18 nt, Human
cacauuuccccagaccug

SEQ ID NO: 2051419 - RNA, 17 nt, Human
cacauuugauucugugu

SEQ ID NO: 2051420 - RNA, 18 nt, Human
cacauuuuucagauauaa

SEQ ID NO: 2051421 - RNA, 18 nt, Human
cacauuuuuuuuuuuaau

SEQ ID NO: 2051422 - RNA, 19 nt, Human
cacauuuuuuuuuuuaauu

SEQ ID NO: 2051423 - RNA, 21 nt, Human
cacauuuuuuuuuuuaauuuu

SEQ ID NO: 2051424 - RNA, 22 nt, Human
cacauuuuuuuuuuuaauuuug

SEQ ID NO: 2051425 - RNA, 17 nt, Human
cacaucuugcucugcug

SEQ ID NO: 2051426 - RNA, 16 nt, Human
cacaucuugcucugcu

SEQ ID NO: 2051427 - RNA, 14 nt, Human
cacauccuccgucc

SEQ ID NO: 2051428 - RNA, 18 nt, Human
cacauccuccguccagcc

SEQ ID NO: 2051429 - RNA, 17 nt, Human
cacauccuguguuucua

SEQ ID NO: 2051430 - RNA, 20 nt, Human
cacauccggaggagaagaag

SEQ ID NO: 2051431 - RNA, 24 nt, Human
cacaucagcuccacuuucagugaa

SEQ ID NO: 2051432 - RNA, 16 nt, Human
cacauccccgcuggcu

SEQ ID NO: 2051433 - RNA, 18 nt, Human
cacauccccgcuggcugg

SEQ ID NO: 2051434 - RNA, 18 nt, Human
cacaucagcuagcaaaag

SEQ ID NO: 2051435 - RNA, 19 nt, Human
cacaucagcuagcaaaaga

SEQ ID NO: 2051436 - RNA, 23 nt, Human
cacccaggagccccgaggccuuc

SEQ ID NO: 2051437 - RNA, 20 nt, Human
cacccaggagccccgaggcc

SEQ ID NO: 2051438 - RNA, 19 nt, Human
cacccagcccacuucugcc

SEQ ID NO: 2051439 - RNA, 12 nt, Human
cacccagcccau

SEQ ID NO: 2051440 - RNA, 13 nt, Human
cacccagcccauu

SEQ ID NO: 2051441 - RNA, 24 nt, Human
cacccaggagccccgaggccuucu

SEQ ID NO: 2051442 - RNA, 15 nt, Human
cacccagcccauucu

SEQ ID NO: 2051443 - RNA, 22 nt, Human
cacccagcccauucucucuccu

SEQ ID NO: 2051444 - RNA, 11 nt, Human
cacccaggagg

SEQ ID NO: 2051445 - RNA, 21 nt, Human
caccagcccuuagcagggaaa

SEQ ID NO: 2051446 - RNA, 15 nt, Human
caccagcagccugga

SEQ ID NO: 2051447 - RNA, 14 nt, Human
caccagccugcacu

SEQ ID NO: 2051448 - RNA, 20 nt, Human
caccagccuuucucccaggc

SEQ ID NO: 2051449 - RNA, 22 nt, Human
caccagccuuucucccaggcca

SEQ ID NO: 2051450 - RNA, 16 nt, Human
caccagccggggaaga

SEQ ID NO: 2051451 - RNA, 13 nt, Human
caccagccugcac

SEQ ID NO: 2051452 - RNA, 14 nt, Human
caccaacaucccau

SEQ ID NO: 2051453 - RNA, 14 nt, Human
caccagcagccugg

SEQ ID NO: 2051454 - RNA, 12 nt, Human
caccagcagccu

SEQ ID NO: 2051455 - RNA, 21 nt, Human
caccaggcugcucagggcugg

SEQ ID NO: 2051456 - RNA, 14 nt, Human
caccaggcugcuca

SEQ ID NO: 2051457 - RNA, 17 nt, Human
cacccagcccacuucug

SEQ ID NO: 2051458 - RNA, 16 nt, Human
cacccagcccacuucu

SEQ ID NO: 2051459 - RNA, 19 nt, Human
cacaguauuacuucugcua

SEQ ID NO: 2051460 - RNA, 18 nt, Human
cacaguauuacuucugcu

SEQ ID NO: 2051461 - RNA, 16 nt, Human
cacaguauuacuucug

SEQ ID NO: 2051462 - RNA, 14 nt, Human
cacagcucuguguu

SEQ ID NO: 2051463 - RNA, 10 nt, Human
cacagcucuu

SEQ ID NO: 2051464 - RNA, 23 nt, Human
cacagcucuguccugggagugag

SEQ ID NO: 2051465 - RNA, 20 nt, Human
cacagcucuguccugggagu

SEQ ID NO: 2051466 - RNA, 19 nt, Human
cacagcucccaccccaccc

SEQ ID NO: 2051467 - RNA, 22 nt, Human
cacagcucccaccccacccccu

SEQ ID NO: 2051468 - RNA, 14 nt, Human
cacagcucccaccc

SEQ ID NO: 2051469 - RNA, 15 nt, Human
cacagcucccacccc

SEQ ID NO: 2051470 - RNA, 16 nt, Human
cacagcucccacccca

SEQ ID NO: 2051471 - RNA, 17 nt, Human
cacagcucccaccccac

SEQ ID NO: 2051472 - RNA, 16 nt, Human
cacagcucaggaacua

SEQ ID NO: 2051473 - RNA, 15 nt, Human
cacagcuaccucuuc

SEQ ID NO: 2051474 - RNA, 20 nt, Human
cacagggcauccaacugaga

SEQ ID NO: 2051475 - RNA, 14 nt, Human
cacagggccccaga

SEQ ID NO: 2051476 - RNA, 19 nt, Human
cacagggccccagaaggca

SEQ ID NO: 2051477 - RNA, 22 nt, Human
cacagggccccagaaggcaggg

SEQ ID NO: 2051478 - RNA, 13 nt, Human
cacagggcagagc

SEQ ID NO: 2051479 - RNA, 14 nt, Human
cacagggcagagcc

SEQ ID NO: 2051480 - RNA, 17 nt, Human
cacagggcagagccggg

SEQ ID NO: 2051481 - RNA, 13 nt, Human
cacagggcuaaga

SEQ ID NO: 2051482 - RNA, 21 nt, Human
cacaggguucaaaaugucugu

SEQ ID NO: 2051483 - RNA, 14 nt, Human
cacaggguugggcc

SEQ ID NO: 2051484 - RNA, 16 nt, Human
cacaggguugggccca

SEQ ID NO: 2051485 - RNA, 23 nt, Human
cacagguaugaccuucuaggaag

SEQ ID NO: 2051486 - RNA, 23 nt, Human
cacaggguugggcccagaucugg

SEQ ID NO: 2051487 - RNA, 18 nt, Human
cacaggguugggcccaga

SEQ ID NO: 2051488 - RNA, 22 nt, Human
cacaggguugggcccagaucug

SEQ ID NO: 2051489 - RNA, 19 nt, Human
cacagaagugcuuucuucu

SEQ ID NO: 2051490 - RNA, 20 nt, Human
cacagcggggccccagggcu

SEQ ID NO: 2051491 - RNA, 23 nt, Human
caccuacaguguacagucuugua

SEQ ID NO: 2051492 - RNA, 16 nt, Human
caccuaagucucugug

SEQ ID NO: 2051493 - RNA, 17 nt, Human
caccuaagucucuguga

SEQ ID NO: 2051494 - RNA, 15 nt, Human
caccuaagucucugu

SEQ ID NO: 2051495 - RNA, 21 nt, Human
caccguuggggauuggggaag

SEQ ID NO: 2051496 - RNA, 14 nt, Human
caccguucauucag

SEQ ID NO: 2051497 - RNA, 12 nt, Human
caccuauuuuag

SEQ ID NO: 2051498 - RNA, 21 nt, Human
caccuacuacaucgcccucca

SEQ ID NO: 2051499 - RNA, 18 nt, Human
caccuaccuucaaagcug

SEQ ID NO: 2051500 - RNA, 19 nt, Human
caccuaccuucaaagcuga

SEQ ID NO: 2051501 - RNA, 20 nt, Human
caccuacuacaucgcccucc

SEQ ID NO: 2051502 - RNA, 14 nt, Human
caccuauuucaaaa

SEQ ID NO: 2051503 - RNA, 12 nt, Human
caccuuuauuaa

SEQ ID NO: 2051504 - RNA, 14 nt, Human
caccuuuauuaaaa

SEQ ID NO: 2051505 - RNA, 15 nt, Human
caccuuuauuaaaau

SEQ ID NO: 2051506 - RNA, 17 nt, Human
caccuuuauuaaaaucu

SEQ ID NO: 2051507 - RNA, 18 nt, Human
caccuuuauuaaaaucuu

SEQ ID NO: 2051508 - RNA, 13 nt, Human
caccuuggcucaa

SEQ ID NO: 2051509 - RNA, 22 nt, Human
caccuugcagcucuccccuucu

SEQ ID NO: 2051510 - RNA, 18 nt, Human
caccuugcaacacacaga

SEQ ID NO: 2051511 - RNA, 21 nt, Human
caccuugcaacacacagacac

SEQ ID NO: 2051512 - RNA, 19 nt, Human
caccuugacagggcacacc

SEQ ID NO: 2051513 - RNA, 15 nt, Human
caccuugcagcucuc

SEQ ID NO: 2051514 - RNA, 13 nt, Human
caccuugcagcuc

SEQ ID NO: 2051515 - RNA, 22 nt, Human
caccugccauuugcacccuccg

SEQ ID NO: 2051516 - RNA, 17 nt, Human
caccugccauuugcacc

SEQ ID NO: 2051517 - RNA, 16 nt, Human
caccuugcaacacaca

SEQ ID NO: 2051518 - RNA, 17 nt, Human
caccuugcaacacacag

SEQ ID NO: 2051519 - RNA, 17 nt, Human
cacuacucacagucucu

SEQ ID NO: 2051520 - RNA, 23 nt, Human
cacuacggaauaguuggcuagga

SEQ ID NO: 2051521 - RNA, 15 nt, Human
cacuaauacaccagg

SEQ ID NO: 2051522 - RNA, 20 nt, Human
cacggcaggacaacgaggaa

SEQ ID NO: 2051523 - RNA, 17 nt, Human
cacuaauuugauguuua

SEQ ID NO: 2051524 - RNA, 21 nt, Human
cacggaggcaucugcacccuc

SEQ ID NO: 2051525 - RNA, 20 nt, Human
cacggauccauguagcagga

SEQ ID NO: 2051526 - RNA, 23 nt, Human
cacggauccauguagcaggacug

SEQ ID NO: 2051527 - RNA, 16 nt, Human
cacggccaggccagag

SEQ ID NO: 2051528 - RNA, 15 nt, Human
cacggccaggccaga

SEQ ID NO: 2051529 - RNA, 14 nt, Human
cacggccaggccag

SEQ ID NO: 2051530 - RNA, 15 nt, Human
cacuccccaccuuca

SEQ ID NO: 2051531 - RNA, 14 nt, Human
cacuccccaccuuc

SEQ ID NO: 2051532 - RNA, 14 nt, Human
cacuagccucucca

SEQ ID NO: 2051533 - RNA, 16 nt, Human
cacuagccucuccagg

SEQ ID NO: 2051534 - RNA, 17 nt, Human
cacuagccucuccagga

SEQ ID NO: 2051535 - RNA, 16 nt, Human
cacuaggacucugagg

SEQ ID NO: 2051536 - RNA, 21 nt, Human
cacuagccucuccaggaaugc

SEQ ID NO: 2051537 - RNA, 17 nt, Human
cacuaggacucugaggc

SEQ ID NO: 2051538 - RNA, 18 nt, Human
cacuaggacucugaggcu

SEQ ID NO: 2051539 - RNA, 19 nt, Human
cacucuuauugcccacgcu

SEQ ID NO: 2051540 - RNA, 18 nt, Human
cacucuuauugcccacgc

SEQ ID NO: 2051541 - RNA, 17 nt, Human
cacucuuauugcccacg

SEQ ID NO: 2051542 - RNA, 13 nt, Human
cacuccccugcac

SEQ ID NO: 2051543 - RNA, 21 nt, Human
cacugaaacuucaagcaccag

SEQ ID NO: 2051544 - RNA, 20 nt, Human
cacugaaauauacacacagc

SEQ ID NO: 2051545 - RNA, 21 nt, Human
cacugaaaugccuuacuuugu

SEQ ID NO: 2051546 - RNA, 22 nt, Human
cacugaaaugccuuacuuugua

SEQ ID NO: 2051547 - RNA, 16 nt, Human
cacugaaauauacaca

SEQ ID NO: 2051548 - RNA, 19 nt, Human
cacuuagaaauugcauuuc

SEQ ID NO: 2051549 - RNA, 17 nt, Human
cacuuagaaauugcauu

SEQ ID NO: 2051550 - RNA, 22 nt, Human
cacuuaccuucaauaaaguauc

SEQ ID NO: 2051551 - RNA, 12 nt, Human
cacuguuucucu

SEQ ID NO: 2051552 - RNA, 14 nt, Human
cacuguuucucugc

SEQ ID NO: 2051553 - RNA, 18 nt, Human
cacuguuucucugcuguu

SEQ ID NO: 2051554 - RNA, 17 nt, Human
cacuguuuacaagaaaa

SEQ ID NO: 2051555 - RNA, 18 nt, Human
cacuguuuacaagaaaaa

SEQ ID NO: 2051556 - RNA, 17 nt, Human
cacuguugcccaggcug

SEQ ID NO: 2051557 - RNA, 20 nt, Human
cacuuagaaauugcauuucc

SEQ ID NO: 2051558 - RNA, 16 nt, Human
cacuugguuggguccu

SEQ ID NO: 2051559 - RNA, 19 nt, Human
cacuugguuggguccucac

SEQ ID NO: 2051560 - RNA, 20 nt, Human
cacuuguaauuuuguaucuu

SEQ ID NO: 2051561 - RNA, 20 nt, Human
cacuugguuggguccucaca

SEQ ID NO: 2051562 - RNA, 21 nt, Human
cacuugguuggguccucacau

SEQ ID NO: 2051563 - RNA, 16 nt, Human
cacuguugcccaggcu

SEQ ID NO: 2051564 - RNA, 15 nt, Human
cacuguugcccaggc

SEQ ID NO: 2051565 - RNA, 21 nt, Human
cacugguggcccgacagccug

SEQ ID NO: 2051566 - RNA, 13 nt, Human
cacugguggcccg

SEQ ID NO: 2051567 - RNA, 22 nt, Human
cacugguggcccgacagccugg

SEQ ID NO: 2051568 - RNA, 14 nt, Human
cacuguugcccagg

SEQ ID NO: 2051569 - RNA, 21 nt, Human
cacuggggaaauaacagcugu

SEQ ID NO: 2051570 - RNA, 17 nt, Human
cacuuucacauagaugu

SEQ ID NO: 2051571 - RNA, 14 nt, Human
cacuuuauuuacuu

SEQ ID NO: 2051572 - RNA, 15 nt, Human
cacuuuauuuacuuc

SEQ ID NO: 2051573 - RNA, 17 nt, Human
cacuuuauuuacuucgu

SEQ ID NO: 2051574 - RNA, 14 nt, Human
cacuuucauugcca

SEQ ID NO: 2051575 - RNA, 16 nt, Human
cacuuucauugccagu

SEQ ID NO: 2051576 - RNA, 17 nt, Human
cacuuucauugccagug

SEQ ID NO: 2051577 - RNA, 20 nt, Human
cacuuucauugccagugucu

SEQ ID NO: 2051578 - RNA, 21 nt, Human
cacuuucauugccagugucuu

SEQ ID NO: 2051579 - RNA, 22 nt, Human
cacuuucauugccagugucuuu

SEQ ID NO: 2051580 - RNA, 23 nt, Human
cacuuucauugccagugucuuuc

SEQ ID NO: 2051581 - RNA, 22 nt, Human
cacuuuccccgugggccauggc

SEQ ID NO: 2051582 - RNA, 17 nt, Human
cacuuucagugaaagca

SEQ ID NO: 2051583 - RNA, 14 nt, Human
cacuuucaggaaca

SEQ ID NO: 2051584 - RNA, 17 nt, Human
cacuuucaggaacacuc

SEQ ID NO: 2051585 - RNA, 18 nt, Human
cacuuucagugaaagcau

SEQ ID NO: 2051586 - RNA, 19 nt, Human
cacuuucagugaaagcauc

SEQ ID NO: 2051587 - RNA, 19 nt, Human
cagaaguuugucaagucaa

SEQ ID NO: 2051588 - RNA, 22 nt, Human
cagaauaaaguucugaguguuu

SEQ ID NO: 2051589 - RNA, 20 nt, Human
cagaauacuagccagagcuc

SEQ ID NO: 2051590 - RNA, 14 nt, Human
cagaauaaugaaug

SEQ ID NO: 2051591 - RNA, 23 nt, Human
cagaauaaugaauggacucaaac

SEQ ID NO: 2051592 - RNA, 17 nt, Human
cagaauaaucuuugggu

SEQ ID NO: 2051593 - RNA, 14 nt, Human
cagaauaguauuuu

SEQ ID NO: 2051594 - RNA, 16 nt, Human
cagaaauuagccgggc

SEQ ID NO: 2051595 - RNA, 14 nt, Human
cagaacagcagagg

SEQ ID NO: 2051596 - RNA, 14 nt, Human
cagaacacauucuu

SEQ ID NO: 2051597 - RNA, 11 nt, Human
cagaacacugu

SEQ ID NO: 2051598 - RNA, 12 nt, Human
cagaacagcaga

SEQ ID NO: 2051599 - RNA, 21 nt, Human
cagaacagcagagguucuuuu

SEQ ID NO: 2051600 - RNA, 19 nt, Human
cagaagucaugaagcccaa

SEQ ID NO: 2051601 - RNA, 18 nt, Human
cagaacacacuccaucag

SEQ ID NO: 2051602 - RNA, 22 nt, Human
cagaaauuuaauucauguuucu

SEQ ID NO: 2051603 - RNA, 23 nt, Human
cagaaauuuaauucauguuucuu

SEQ ID NO: 2051604 - RNA, 21 nt, Human
cagcuguuuaugcauagauaa

SEQ ID NO: 2051605 - RNA, 23 nt, Human
cagcuguugagccccuccuaguu

SEQ ID NO: 2051606 - RNA, 14 nt, Human
cagcuguuugucau

SEQ ID NO: 2051607 - RNA, 15 nt, Human
cagcuguuugucaua

SEQ ID NO: 2051608 - RNA, 20 nt, Human
cagcugugcucuggacaggc

SEQ ID NO: 2051609 - RNA, 19 nt, Human
cagcugugcucuggacagg

SEQ ID NO: 2051610 - RNA, 24 nt, Human
cagcugugcucuggacaggcaugu

SEQ ID NO: 2051611 - RNA, 18 nt, Human
cagcugauuuuaacaaua

SEQ ID NO: 2051612 - RNA, 19 nt, Human
cagcugagggugagugggu

SEQ ID NO: 2051613 - RNA, 19 nt, Human
cagcugaggucucuugagg

SEQ ID NO: 2051614 - RNA, 20 nt, Human
cagcugaggucucuugaggg

SEQ ID NO: 2051615 - RNA, 12 nt, Human
cagcugauuuua

SEQ ID NO: 2051616 - RNA, 12 nt, Human
cagcugccugca

SEQ ID NO: 2051617 - RNA, 22 nt, Human
cagcugccuggaagagcagccc

SEQ ID NO: 2051618 - RNA, 15 nt, Human
cagcugauuuuaaca

SEQ ID NO: 2051619 - RNA, 17 nt, Human
cagcugauuuuaacaau

SEQ ID NO: 2051620 - RNA, 22 nt, Human
cagcucccccgacggugggcau

SEQ ID NO: 2051621 - RNA, 22 nt, Human
cagcucccaccccacccccuuc

SEQ ID NO: 2051622 - RNA, 23 nt, Human
cagcucccaccccacccccuuca

SEQ ID NO: 2051623 - RNA, 20 nt, Human
cagcucccuaggagaccaag

SEQ ID NO: 2051624 - RNA, 18 nt, Human
cagcucccuaggagacca

SEQ ID NO: 2051625 - RNA, 19 nt, Human
cagcucccuaggagaccaa

SEQ ID NO: 2051626 - RNA, 15 nt, Human
cagcucccuaggaga

SEQ ID NO: 2051627 - RNA, 14 nt, Human
cagcucccucugcc

SEQ ID NO: 2051628 - RNA, 15 nt, Human
cagcucccucugccu

SEQ ID NO: 2051629 - RNA, 16 nt, Human
cagcucccucugccug

SEQ ID NO: 2051630 - RNA, 16 nt, Human
caggaaaagcugcuga

SEQ ID NO: 2051631 - RNA, 15 nt, Human
caggaaaagcugcug

SEQ ID NO: 2051632 - RNA, 18 nt, Human
caggaaaagcugcugaca

SEQ ID NO: 2051633 - RNA, 23 nt, Human
caggaaaacugacagaggagggc

SEQ ID NO: 2051634 - RNA, 21 nt, Human
cagcggggacagcuccuucug

SEQ ID NO: 2051635 - RNA, 18 nt, Human
cagcggggccccagggcu

SEQ ID NO: 2051636 - RNA, 19 nt, Human
cagcggggacagcuccuuc

SEQ ID NO: 2051637 - RNA, 18 nt, Human
cagcggggacagcuccuu

SEQ ID NO: 2051638 - RNA, 22 nt, Human
cagcgccuaguggggucucccu

SEQ ID NO: 2051639 - RNA, 23 nt, Human
cagcgccuaguggggucucccuc

SEQ ID NO: 2051640 - RNA, 12 nt, Human
cagccugcucca

SEQ ID NO: 2051641 - RNA, 14 nt, Human
cagccugcguggcu

SEQ ID NO: 2051642 - RNA, 15 nt, Human
cagccugcguggcug

SEQ ID NO: 2051643 - RNA, 16 nt, Human
cagccugcguggcuga

SEQ ID NO: 2051644 - RNA, 17 nt, Human
cagccugcguggcugac

SEQ ID NO: 2051645 - RNA, 18 nt, Human
cagccugcguggcugacc

SEQ ID NO: 2051646 - RNA, 19 nt, Human
cagccugcguggcugaccc

SEQ ID NO: 2051647 - RNA, 21 nt, Human
cagccugcguggcugaccccc

SEQ ID NO: 2051648 - RNA, 23 nt, Human
cagccugcguggcugaccccccu

SEQ ID NO: 2051649 - RNA, 19 nt, Human
cagccugcuaauuccccag

SEQ ID NO: 2051650 - RNA, 19 nt, Human
cagccucugagccccuggg

SEQ ID NO: 2051651 - RNA, 21 nt, Human
cagccucugagccccugggac

SEQ ID NO: 2051652 - RNA, 18 nt, Human
cagccucugagccccugg

SEQ ID NO: 2051653 - RNA, 17 nt, Human
cagccucugaaaaccaa

SEQ ID NO: 2051654 - RNA, 12 nt, Human
cagccucugaag

SEQ ID NO: 2051655 - RNA, 20 nt, Human
cagccucugaaguuggacag

SEQ ID NO: 2051656 - RNA, 21 nt, Human
cagccucugaaguuggacagc

SEQ ID NO: 2051657 - RNA, 20 nt, Human
cagccgcuccugucugccag

SEQ ID NO: 2051658 - RNA, 21 nt, Human
cagccgcuccugucugccagc

SEQ ID NO: 2051659 - RNA, 22 nt, Human
cagccgcuccugucugccagcc

SEQ ID NO: 2051660 - RNA, 23 nt, Human
cagccgcuccugucugccagcca

SEQ ID NO: 2051661 - RNA, 20 nt, Human
cagcccuuugggaggcugag

SEQ ID NO: 2051662 - RNA, 23 nt, Human
cagcccuuugggaggcugaggcg

SEQ ID NO: 2051663 - RNA, 19 nt, Human
cagcccuuugggaggcuga

SEQ ID NO: 2051664 - RNA, 14 nt, Human
cagccgcuccuguc

SEQ ID NO: 2051665 - RNA, 16 nt, Human
cagccgcuccugucug

SEQ ID NO: 2051666 - RNA, 17 nt, Human
cagccgcuccugucugc

SEQ ID NO: 2051667 - RNA, 18 nt, Human
cagccgcuccugucugcc

SEQ ID NO: 2051668 - RNA, 19 nt, Human
cagccgcuccugucugcca

SEQ ID NO: 2051669 - RNA, 20 nt, Human
cagcccuugagcuccccaaa

SEQ ID NO: 2051670 - RNA, 12 nt, Human
cagccagcucuc

SEQ ID NO: 2051671 - RNA, 15 nt, Human
cagccagcucucagc

SEQ ID NO: 2051672 - RNA, 16 nt, Human
cagccagcucucagcc

SEQ ID NO: 2051673 - RNA, 21 nt, Human
cagccagcucucagccaacga

SEQ ID NO: 2051674 - RNA, 17 nt, Human
cagccagcucucagcca

SEQ ID NO: 2051675 - RNA, 18 nt, Human
cagccagcucucagccaa

SEQ ID NO: 2051676 - RNA, 20 nt, Human
cagcaucauggagguuugaa

SEQ ID NO: 2051677 - RNA, 19 nt, Human
cagcagugagucucuucag

SEQ ID NO: 2051678 - RNA, 21 nt, Human
cagcagugagucucuucagaa

SEQ ID NO: 2051679 - RNA, 14 nt, Human
cagcaguuguuauu

SEQ ID NO: 2051680 - RNA, 17 nt, Human
cagcaguuugggagguc

SEQ ID NO: 2051681 - RNA, 14 nt, Human
cagcauaagggagc

SEQ ID NO: 2051682 - RNA, 17 nt, Human
cagcauaagggagcgua

SEQ ID NO: 2051683 - RNA, 17 nt, Human
cagcauagaaguaacuu

SEQ ID NO: 2051684 - RNA, 12 nt, Human
cagauugaaaag

SEQ ID NO: 2051685 - RNA, 14 nt, Human
cagauugaaaagga

SEQ ID NO: 2051686 - RNA, 17 nt, Human
cagauugcaacaggcug

SEQ ID NO: 2051687 - RNA, 11 nt, Human
cagauccuacc

SEQ ID NO: 2051688 - RNA, 12 nt, Human
cagauccuaccc

SEQ ID NO: 2051689 - RNA, 20 nt, Human
cagaucauagauuucugauu

SEQ ID NO: 2051690 - RNA, 21 nt, Human
cagaucauagauuucugauuu

SEQ ID NO: 2051691 - RNA, 23 nt, Human
cagaucauagauuucugauuuua

SEQ ID NO: 2051692 - RNA, 17 nt, Human
cagaguaagcugcuuuu

SEQ ID NO: 2051693 - RNA, 14 nt, Human
cagaaucauugcuu

SEQ ID NO: 2051694 - RNA, 15 nt, Human
cagaaucauugcuua

SEQ ID NO: 2051695 - RNA, 20 nt, Human
cagaaucauugcuuaugaca

SEQ ID NO: 2051696 - RNA, 21 nt, Human
cagaaucgcuccaccuugcag

SEQ ID NO: 2051697 - RNA, 17 nt, Human
cagaaguguuucaugca

SEQ ID NO: 2051698 - RNA, 23 nt, Human
cagagggguggguuccucuuccc

SEQ ID NO: 2051699 - RNA, 22 nt, Human
cagaucacagcuucagccagga

SEQ ID NO: 2051700 - RNA, 18 nt, Human
cagaucacagcuucagcc

SEQ ID NO: 2051701 - RNA, 14 nt, Human
cagaucacgagguc

SEQ ID NO: 2051702 - RNA, 18 nt, Human
cagagguugcagugagcu

SEQ ID NO: 2051703 - RNA, 17 nt, Human
cagagguugcagugugg

SEQ ID NO: 2051704 - RNA, 18 nt, Human
cagagguagggcugccac

SEQ ID NO: 2051705 - RNA, 16 nt, Human
caggggaauauuuuau

SEQ ID NO: 2051706 - RNA, 17 nt, Human
caggggaauauuuuauu

SEQ ID NO: 2051707 - RNA, 18 nt, Human
caggggaauauuuuauuc

SEQ ID NO: 2051708 - RNA, 19 nt, Human
caggggaauauuuuauuca

SEQ ID NO: 2051709 - RNA, 23 nt, Human
caggggaauauuuuauucaaggu

SEQ ID NO: 2051710 - RNA, 21 nt, Human
cagggcugacacguccacccc

SEQ ID NO: 2051711 - RNA, 20 nt, Human
caggggaaaaucagccugcu

SEQ ID NO: 2051712 - RNA, 19 nt, Human
caggggaaaaucagccugc

SEQ ID NO: 2051713 - RNA, 23 nt, Human
cagggcucagcggggacagcucc

SEQ ID NO: 2051714 - RNA, 21 nt, Human
cagggcucagcggggacagcu

SEQ ID NO: 2051715 - RNA, 17 nt, Human
cagggauggggccacag

SEQ ID NO: 2051716 - RNA, 18 nt, Human
cagggauggggccacagc

SEQ ID NO: 2051717 - RNA, 19 nt, Human
cagggauggggccacagcc

SEQ ID NO: 2051718 - RNA, 15 nt, Human
cagggagcugggaca

SEQ ID NO: 2051719 - RNA, 23 nt, Human
cagggaugccaucugugggcacg

SEQ ID NO: 2051720 - RNA, 22 nt, Human
cagggagcggaaagcagcucaa

SEQ ID NO: 2051721 - RNA, 18 nt, Human
cagggagcggaaagcagc

SEQ ID NO: 2051722 - RNA, 19 nt, Human
cagggagcggaaagcagcu

SEQ ID NO: 2051723 - RNA, 20 nt, Human
caggcugggcuucaguggca

SEQ ID NO: 2051724 - RNA, 22 nt, Human
caggcugggcuucaguggcagc

SEQ ID NO: 2051725 - RNA, 21 nt, Human
caggcugggcuucaguggcag

SEQ ID NO: 2051726 - RNA, 13 nt, Human
cagggagcggaaa

SEQ ID NO: 2051727 - RNA, 16 nt, Human
cagggagcggaaagca

SEQ ID NO: 2051728 - RNA, 17 nt, Human
cagggagcggaaagcag

SEQ ID NO: 2051729 - RNA, 16 nt, Human
caggccagagggagug

SEQ ID NO: 2051730 - RNA, 15 nt, Human
caggcacacuucuuc

SEQ ID NO: 2051731 - RNA, 15 nt, Human
caggcaauggccuaa

SEQ ID NO: 2051732 - RNA, 22 nt, Human
caggcaauggccuaaacuucag

SEQ ID NO: 2051733 - RNA, 14 nt, Human
caggcagagaauca

SEQ ID NO: 2051734 - RNA, 15 nt, Human
caggcagagaaucau

SEQ ID NO: 2051735 - RNA, 23 nt, Human
caggcagagaaucauacuuagca

SEQ ID NO: 2051736 - RNA, 15 nt, Human
caggccagagggagu

SEQ ID NO: 2051737 - RNA, 13 nt, Human
caggccagaggga

SEQ ID NO: 2051738 - RNA, 18 nt, Human
caggcagauacaggaaaa

SEQ ID NO: 2051739 - RNA, 15 nt, Human
caggccacuugauga

SEQ ID NO: 2051740 - RNA, 16 nt, Human
caggugccccucucuc

SEQ ID NO: 2051741 - RNA, 18 nt, Human
caggugccccucucucca

SEQ ID NO: 2051742 - RNA, 22 nt, Human
caggugccccucucuccaucag

SEQ ID NO: 2051743 - RNA, 23 nt, Human
cagguugucugaagucacugcac

SEQ ID NO: 2051744 - RNA, 18 nt, Human
cagguuguaguaaagaaa

SEQ ID NO: 2051745 - RNA, 22 nt, Human
cagguugucugaagucacugca

SEQ ID NO: 2051746 - RNA, 21 nt, Human
cagguuggugggggccucggu

SEQ ID NO: 2051747 - RNA, 15 nt, Human
cagguuuuguaaaga

SEQ ID NO: 2051748 - RNA, 14 nt, Human
cagguuuaagcugu

SEQ ID NO: 2051749 - RNA, 19 nt, Human
cagguuguaguaaagaaau

SEQ ID NO: 2051750 - RNA, 23 nt, Human
caggugauccacccaccucagcc

SEQ ID NO: 2051751 - RNA, 22 nt, Human
caggugauccacccaccucagc

SEQ ID NO: 2051752 - RNA, 21 nt, Human
caggugauccacccaccucag

SEQ ID NO: 2051753 - RNA, 17 nt, Human
cagucaccugcccagau

SEQ ID NO: 2051754 - RNA, 13 nt, Human
caguaaagagaaa

SEQ ID NO: 2051755 - RNA, 14 nt, Human
caguaaagagaaac

SEQ ID NO: 2051756 - RNA, 15 nt, Human
caguaaagagaaacu

SEQ ID NO: 2051757 - RNA, 16 nt, Human
caguaaagagaaacuu

SEQ ID NO: 2051758 - RNA, 17 nt, Human
caguaaagagaaacuuu

SEQ ID NO: 2051759 - RNA, 18 nt, Human
caguaaagagaaacuuug

SEQ ID NO: 2051760 - RNA, 19 nt, Human
caguaaagagaaacuuugu

SEQ ID NO: 2051761 - RNA, 20 nt, Human
caguaaagagaaacuuugug

SEQ ID NO: 2051762 - RNA, 23 nt, Human
caguaaagagaaacuuugugcua

SEQ ID NO: 2051763 - RNA, 17 nt, Human
cagucaaggaguggcuu

SEQ ID NO: 2051764 - RNA, 12 nt, Human
cagugcaucuca

SEQ ID NO: 2051765 - RNA, 17 nt, Human
cagucuggaaugcagug

SEQ ID NO: 2051766 - RNA, 15 nt, Human
cagucuggaaugcag

SEQ ID NO: 2051767 - RNA, 23 nt, Human
cagucugcuuauccuuccacgga

SEQ ID NO: 2051768 - RNA, 18 nt, Human
cagucugcugcccuccau

SEQ ID NO: 2051769 - RNA, 21 nt, Human
cagucugcugcccuccauccc

SEQ ID NO: 2051770 - RNA, 22 nt, Human
cagucugcugcccuccaucccg

SEQ ID NO: 2051771 - RNA, 18 nt, Human
cagugcaucucagcccac

SEQ ID NO: 2051772 - RNA, 17 nt, Human
cagugcaucucagccca

SEQ ID NO: 2051773 - RNA, 16 nt, Human
cagugcaucucagccc

SEQ ID NO: 2051774 - RNA, 15 nt, Human
cagugcaucucagcc

SEQ ID NO: 2051775 - RNA, 15 nt, Human
cagucucuuuaaucu

SEQ ID NO: 2051776 - RNA, 19 nt, Human
cagucucuuuaaucuucag

SEQ ID NO: 2051777 - RNA, 20 nt, Human
cagucucuuuaaucuucagu

SEQ ID NO: 2051778 - RNA, 22 nt, Human
cagucucuuuaaucuucaguuu

SEQ ID NO: 2051779 - RNA, 13 nt, Human
cagucugaaguuu

SEQ ID NO: 2051780 - RNA, 14 nt, Human
cagucugcugcccu

SEQ ID NO: 2051781 - RNA, 15 nt, Human
cagucugcugcccuc

SEQ ID NO: 2051782 - RNA, 23 nt, Human
cagugggagcugccuguucagcu

SEQ ID NO: 2051783 - RNA, 20 nt, Human
cagugggagcugccuguuca

SEQ ID NO: 2051784 - RNA, 17 nt, Human
cagugcccacaggauca

SEQ ID NO: 2051785 - RNA, 15 nt, Human
cagugcccacaggau

SEQ ID NO: 2051786 - RNA, 13 nt, Human
cagugcccacagg

SEQ ID NO: 2051787 - RNA, 21 nt, Human
caguggugcgaucuggguuca

SEQ ID NO: 2051788 - RNA, 20 nt, Human
caguggugcgaucuggguuc

SEQ ID NO: 2051789 - RNA, 16 nt, Human
cauguuggccaggcug

SEQ ID NO: 2051790 - RNA, 20 nt, Human
cauguugguauuuaucuauu

SEQ ID NO: 2051791 - RNA, 15 nt, Human
cauguuggccaggcu

SEQ ID NO: 2051792 - RNA, 14 nt, Human
cauguuggccaggc

SEQ ID NO: 2051793 - RNA, 14 nt, Human
cauguuaugauaaa

SEQ ID NO: 2051794 - RNA, 20 nt, Human
cauguuaugauaaaaaauuu

SEQ ID NO: 2051795 - RNA, 21 nt, Human
cauguuaugauaaaaaauuuu

SEQ ID NO: 2051796 - RNA, 22 nt, Human
cauguuaugauaaaaaauuuug

SEQ ID NO: 2051797 - RNA, 23 nt, Human
cauguuaugauaaaaaauuuugu

SEQ ID NO: 2051798 - RNA, 17 nt, Human
cauguuacugaccagca

SEQ ID NO: 2051799 - RNA, 14 nt, Human
cauguuaggaaaau

SEQ ID NO: 2051800 - RNA, 18 nt, Human
cauguuaggaaaauuuca

SEQ ID NO: 2051801 - RNA, 19 nt, Human
cauguuaggaaaauuucac

SEQ ID NO: 2051802 - RNA, 23 nt, Human
caugucccuaccgagucucuucu

SEQ ID NO: 2051803 - RNA, 17 nt, Human
caugucccuacaccccu

SEQ ID NO: 2051804 - RNA, 19 nt, Human
caugucaaacgugaaaaug

SEQ ID NO: 2051805 - RNA, 14 nt, Human
caugucaaacguga

SEQ ID NO: 2051806 - RNA, 22 nt, Human
caugucccuaccgagucucuuc

SEQ ID NO: 2051807 - RNA, 16 nt, Human
caugucccuaccgagu

SEQ ID NO: 2051808 - RNA, 23 nt, Human
cauguagcaaucagauuuuccug

SEQ ID NO: 2051809 - RNA, 14 nt, Human
cauguagcaggacu

SEQ ID NO: 2051810 - RNA, 20 nt, Human
cauguagcaggacugaauug

SEQ ID NO: 2051811 - RNA, 23 nt, Human
cauucuagguaggggcccacuuc

SEQ ID NO: 2051812 - RNA, 13 nt, Human
cauuauauugcaa

SEQ ID NO: 2051813 - RNA, 15 nt, Human
cauuauauugcaaug

SEQ ID NO: 2051814 - RNA, 16 nt, Human
cauuauauugcaauga

SEQ ID NO: 2051815 - RNA, 20 nt, Human
cauuauaacugaaggagaag

SEQ ID NO: 2051816 - RNA, 18 nt, Human
cauuauaacugaaggaga

SEQ ID NO: 2051817 - RNA, 13 nt, Human
cauuauaaacgug

SEQ ID NO: 2051818 - RNA, 11 nt, Human
cauguuuaaga

SEQ ID NO: 2051819 - RNA, 13 nt, Human
cauguuuaagauu

SEQ ID NO: 2051820 - RNA, 14 nt, Human
cauguuuaagauuu

SEQ ID NO: 2051821 - RNA, 16 nt, Human
cauguuuaagauuuaa

SEQ ID NO: 2051822 - RNA, 19 nt, Human
cauguuuaagauuuaauuu

SEQ ID NO: 2051823 - RNA, 16 nt, Human
cauggcuaaggcacca

SEQ ID NO: 2051824 - RNA, 18 nt, Human
cauggcuaaggcaccagc

SEQ ID NO: 2051825 - RNA, 19 nt, Human
cauggcuaaggcaccagcc

SEQ ID NO: 2051826 - RNA, 22 nt, Human
cauggcuaaggcaccagccggg

SEQ ID NO: 2051827 - RNA, 22 nt, Human
cauggcuaagcuuaaaaaaaac

SEQ ID NO: 2051828 - RNA, 14 nt, Human
cauggcucacugca

SEQ ID NO: 2051829 - RNA, 15 nt, Human
cauggcucacugcag

SEQ ID NO: 2051830 - RNA, 16 nt, Human
cauggcucacugcagc

SEQ ID NO: 2051831 - RNA, 20 nt, Human
cauggcuccagucugcugcc

SEQ ID NO: 2051832 - RNA, 22 nt, Human
cauggcuccagucugcugcccu

SEQ ID NO: 2051833 - RNA, 13 nt, Human
cauggcuccaguc

SEQ ID NO: 2051834 - RNA, 14 nt, Human
cauggcuccagucu

SEQ ID NO: 2051835 - RNA, 15 nt, Human
cauggcuccagucug

SEQ ID NO: 2051836 - RNA, 13 nt, Human
caugcucucugca

SEQ ID NO: 2051837 - RNA, 20 nt, Human
caugcuaccugaucccacuc

SEQ ID NO: 2051838 - RNA, 22 nt, Human
caugcuaccugaucccacuccu

SEQ ID NO: 2051839 - RNA, 19 nt, Human
caugcugaaggcugaaaga

SEQ ID NO: 2051840 - RNA, 21 nt, Human
caugcucucugcagccagccc

SEQ ID NO: 2051841 - RNA, 14 nt, Human
caugcucucugcag

SEQ ID NO: 2051842 - RNA, 15 nt, Human
caugcucucugcagc

SEQ ID NO: 2051843 - RNA, 16 nt, Human
caugcucucugcagcc

SEQ ID NO: 2051844 - RNA, 19 nt, Human
caugcucucugcagccagc

SEQ ID NO: 2051845 - RNA, 20 nt, Human
caugcucucugcagccagcc

SEQ ID NO: 2051846 - RNA, 23 nt, Human
caugcucucugcagccagcccag

SEQ ID NO: 2051847 - RNA, 18 nt, Human
caugcuggacaggucugg

SEQ ID NO: 2051848 - RNA, 20 nt, Human
caugcuggacaggucuggga

SEQ ID NO: 2051849 - RNA, 22 nt, Human
caugcuggacaggucugggaga

SEQ ID NO: 2051850 - RNA, 12 nt, Human
caugcugcuuua

SEQ ID NO: 2051851 - RNA, 13 nt, Human
caugcugcuuuaa

SEQ ID NO: 2051852 - RNA, 14 nt, Human
caugcugcuuuaau

SEQ ID NO: 2051853 - RNA, 18 nt, Human
caugcugcuuuaauugug

SEQ ID NO: 2051854 - RNA, 20 nt, Human
caugcugcuuuaauugugaa

SEQ ID NO: 2051855 - RNA, 21 nt, Human
caugcugcuuuaauugugaau

SEQ ID NO: 2051856 - RNA, 20 nt, Human
caugcuggggcaagucccug

SEQ ID NO: 2051857 - RNA, 19 nt, Human
caugcuggcucccagggcc

SEQ ID NO: 2051858 - RNA, 20 nt, Human
caugcuggcucccagggcca

SEQ ID NO: 2051859 - RNA, 22 nt, Human
caugcuggcucccagggccaug

SEQ ID NO: 2051860 - RNA, 22 nt, Human
caugauguuaaccagaauaaag

SEQ ID NO: 2051861 - RNA, 19 nt, Human
caugauguuaaccagaaua

SEQ ID NO: 2051862 - RNA, 19 nt, Human
caucacuggagcaccaggc

SEQ ID NO: 2051863 - RNA, 18 nt, Human
cauauucuguuggccagu

SEQ ID NO: 2051864 - RNA, 17 nt, Human
cauauucuguuggccag

SEQ ID NO: 2051865 - RNA, 17 nt, Human
cauauuccugcagccug

SEQ ID NO: 2051866 - RNA, 18 nt, Human
cauauuccugcagccugg

SEQ ID NO: 2051867 - RNA, 21 nt, Human
cauauuccugcagccuggagg

SEQ ID NO: 2051868 - RNA, 22 nt, Human
cauauguuucgcugauauaugu

SEQ ID NO: 2051869 - RNA, 22 nt, Human
cauauuccugcagccuggaggc

SEQ ID NO: 2051870 - RNA, 15 nt, Human
cauccuggcacccgg

SEQ ID NO: 2051871 - RNA, 12 nt, Human
caucccuacccc

SEQ ID NO: 2051872 - RNA, 14 nt, Human
caucccuacccccu

SEQ ID NO: 2051873 - RNA, 16 nt, Human
caucccgcucuuuucc

SEQ ID NO: 2051874 - RNA, 17 nt, Human
caucccgcucuuuuccu

SEQ ID NO: 2051875 - RNA, 18 nt, Human
caucccgcucuuuuccua

SEQ ID NO: 2051876 - RNA, 20 nt, Human
caucccgugcaaaacaugcu

SEQ ID NO: 2051877 - RNA, 21 nt, Human
caucccgugcaaaacaugcua

SEQ ID NO: 2051878 - RNA, 12 nt, Human
caucacuucccu

SEQ ID NO: 2051879 - RNA, 14 nt, Human
caucacuucccuac

SEQ ID NO: 2051880 - RNA, 21 nt, Human
cauccccuguagagugggagc

SEQ ID NO: 2051881 - RNA, 23 nt, Human
caucccgacauggacccggagcu

SEQ ID NO: 2051882 - RNA, 22 nt, Human
cauccuggcacccggccccugc

SEQ ID NO: 2051883 - RNA, 22 nt, Human
caucggugaaacuaacagauaa

SEQ ID NO: 2051884 - RNA, 17 nt, Human
caucgguccugucuccc

SEQ ID NO: 2051885 - RNA, 22 nt, Human
caucgguccugucuccccucug

SEQ ID NO: 2051886 - RNA, 21 nt, Human
caucggugaaacuaacagaua

SEQ ID NO: 2051887 - RNA, 17 nt, Human
caucgguguccauuuau

SEQ ID NO: 2051888 - RNA, 18 nt, Human
caucgguguccauuuaua

SEQ ID NO: 2051889 - RNA, 15 nt, Human
caucguaggugauuu

SEQ ID NO: 2051890 - RNA, 18 nt, Human
caucguaggugauuugaa

SEQ ID NO: 2051891 - RNA, 21 nt, Human
caucguauaacacaauaugaa

SEQ ID NO: 2051892 - RNA, 16 nt, Human
caucuggaaaauaaaa

SEQ ID NO: 2051893 - RNA, 17 nt, Human
caucuggaaaauaaaag

SEQ ID NO: 2051894 - RNA, 22 nt, Human
caucuggaaaauaaaaggucua

SEQ ID NO: 2051895 - RNA, 15 nt, Human
caucugugauucccu

SEQ ID NO: 2051896 - RNA, 17 nt, Human
caucugugggcacgcug

SEQ ID NO: 2051897 - RNA, 14 nt, Human
caucuguguccugg

SEQ ID NO: 2051898 - RNA, 17 nt, Human
ccaaucaagauaaagga

SEQ ID NO: 2051899 - RNA, 17 nt, Human
ccaauauuuaccagacc

SEQ ID NO: 2051900 - RNA, 14 nt, Human
ccaauauuuguaga

SEQ ID NO: 2051901 - RNA, 18 nt, Human
ccaauauuucucagacau

SEQ ID NO: 2051902 - RNA, 22 nt, Human
ccaagcuggagugcaguggugc

SEQ ID NO: 2051903 - RNA, 15 nt, Human
ccaaugauggucacc

SEQ ID NO: 2051904 - RNA, 19 nt, Human
ccaaugaggucugaaaugg

SEQ ID NO: 2051905 - RNA, 13 nt, Human
ccaagcucugcuc

SEQ ID NO: 2051906 - RNA, 17 nt, Human
ccaagcucugcuccucu

SEQ ID NO: 2051907 - RNA, 12 nt, Human
ccaagcucugcu

SEQ ID NO: 2051908 - RNA, 14 nt, Human
ccaagcuccuuggg

SEQ ID NO: 2051909 - RNA, 15 nt, Human
ccaagcuccuuggga

SEQ ID NO: 2051910 - RNA, 17 nt, Human
ccaagcuccuugggagg

SEQ ID NO: 2051911 - RNA, 19 nt, Human
ccaagcuccuugggaggcc

SEQ ID NO: 2051912 - RNA, 18 nt, Human
ccaagcucugcuccucuc

SEQ ID NO: 2051913 - RNA, 22 nt, Human
ccaagcuccuugggaggcccca

SEQ ID NO: 2051914 - RNA, 22 nt, Human
ccaacugagaaaacgaaacugc

SEQ ID NO: 2051915 - RNA, 15 nt, Human
ccaacuccuggaagc

SEQ ID NO: 2051916 - RNA, 19 nt, Human
ccaacuccuggaagcugug

SEQ ID NO: 2051917 - RNA, 22 nt, Human
ccaacuccuggaagcugugucc

SEQ ID NO: 2051918 - RNA, 14 nt, Human
ccaacugcugcccc

SEQ ID NO: 2051919 - RNA, 15 nt, Human
ccaacugcugcccca

SEQ ID NO: 2051920 - RNA, 15 nt, Human
ccaacuggaagcaca

SEQ ID NO: 2051921 - RNA, 16 nt, Human
ccaacuggaagcacag

SEQ ID NO: 2051922 - RNA, 17 nt, Human
ccaacuggaagcacaga

SEQ ID NO: 2051923 - RNA, 16 nt, Human
ccaacuggcccucuuc

SEQ ID NO: 2051924 - RNA, 18 nt, Human
ccaacuggcccucuucuu

SEQ ID NO: 2051925 - RNA, 16 nt, Human
ccaacugggcccaaga

SEQ ID NO: 2051926 - RNA, 17 nt, Human
ccaacugggcccaagac

SEQ ID NO: 2051927 - RNA, 18 nt, Human
ccaaauguaauugaauaa

SEQ ID NO: 2051928 - RNA, 22 nt, Human
ccaaauguaauugaauaaaguu

SEQ ID NO: 2051929 - RNA, 13 nt, Human
cauuugugugugu

SEQ ID NO: 2051930 - RNA, 19 nt, Human
cauuugugugugugcaagu

SEQ ID NO: 2051931 - RNA, 11 nt, Human
cauuugugagg

SEQ ID NO: 2051932 - RNA, 15 nt, Human
cauuugugaggccca

SEQ ID NO: 2051933 - RNA, 12 nt, Human
cauuugugaggc

SEQ ID NO: 2051934 - RNA, 14 nt, Human
cauuuguauguugu

SEQ ID NO: 2051935 - RNA, 15 nt, Human
cauuuguauguugug

SEQ ID NO: 2051936 - RNA, 23 nt, Human
cauuuguauguugugaagauguu

SEQ ID NO: 2051937 - RNA, 22 nt, Human
cauuugugugugugcaagugug

SEQ ID NO: 2051938 - RNA, 15 nt, Human
ccacccuuugggggg

SEQ ID NO: 2051939 - RNA, 23 nt, Human
ccacccuuuggggggggcccgcc

SEQ ID NO: 2051940 - RNA, 21 nt, Human
ccacgcccucauuacggcucc

SEQ ID NO: 2051941 - RNA, 23 nt, Human
ccacgcccucauuacggcuccuc

SEQ ID NO: 2051942 - RNA, 18 nt, Human
ccacagaugccuccaccc

SEQ ID NO: 2051943 - RNA, 13 nt, Human
ccacagcucccac

SEQ ID NO: 2051944 - RNA, 15 nt, Human
ccacagcucccaccc

SEQ ID NO: 2051945 - RNA, 16 nt, Human
ccacagcucccacccc

SEQ ID NO: 2051946 - RNA, 17 nt, Human
ccacagcucccacccca

SEQ ID NO: 2051947 - RNA, 17 nt, Human
ccacagccucugccugu

SEQ ID NO: 2051948 - RNA, 17 nt, Human
ccacagcagccucugaa

SEQ ID NO: 2051949 - RNA, 19 nt, Human
ccacagcagccucugaagu

SEQ ID NO: 2051950 - RNA, 20 nt, Human
ccacagcagccucugaaguu

SEQ ID NO: 2051951 - RNA, 12 nt, Human
ccacagcaggug

SEQ ID NO: 2051952 - RNA, 20 nt, Human
ccacccuuggaggcugucuu

SEQ ID NO: 2051953 - RNA, 19 nt, Human
ccacccuuggccugucuca

SEQ ID NO: 2051954 - RNA, 16 nt, Human
ccacccuuggccuguc

SEQ ID NO: 2051955 - RNA, 17 nt, Human
ccacccuuggccugucu

SEQ ID NO: 2051956 - RNA, 12 nt, Human
ccacccuuggcc

SEQ ID NO: 2051957 - RNA, 13 nt, Human
ccacccuuggccu

SEQ ID NO: 2051958 - RNA, 14 nt, Human
ccacccuuggccug

SEQ ID NO: 2051959 - RNA, 15 nt, Human
ccacccuuggccugu

SEQ ID NO: 2051960 - RNA, 14 nt, Human
ccacccuuccccuc

SEQ ID NO: 2051961 - RNA, 18 nt, Human
ccaccauauucagugcug

SEQ ID NO: 2051962 - RNA, 22 nt, Human
ccaccauauucagugcuguggc

SEQ ID NO: 2051963 - RNA, 23 nt, Human
ccaccauauucagugcuguggcc

SEQ ID NO: 2051964 - RNA, 19 nt, Human
ccacagcucccaccccacc

SEQ ID NO: 2051965 - RNA, 17 nt, Human
ccaccacacccagccca

SEQ ID NO: 2051966 - RNA, 17 nt, Human
ccaccacaccgcagaag

SEQ ID NO: 2051967 - RNA, 23 nt, Human
ccacagccagaaccccgagcccu

SEQ ID NO: 2051968 - RNA, 11 nt, Human
ccaccacccaa

SEQ ID NO: 2051969 - RNA, 14 nt, Human
ccaccaccccagcu

SEQ ID NO: 2051970 - RNA, 14 nt, Human
ccacucucauuccc

SEQ ID NO: 2051971 - RNA, 16 nt, Human
ccacucucauucccca

SEQ ID NO: 2051972 - RNA, 17 nt, Human
ccacucucauuccccag

SEQ ID NO: 2051973 - RNA, 18 nt, Human
ccacucucauuccccagg

SEQ ID NO: 2051974 - RNA, 19 nt, Human
ccacucucauuccccaggu

SEQ ID NO: 2051975 - RNA, 12 nt, Human
ccacucucccca

SEQ ID NO: 2051976 - RNA, 13 nt, Human
ccacucuccccac

SEQ ID NO: 2051977 - RNA, 14 nt, Human
ccacucuccccaca

SEQ ID NO: 2051978 - RNA, 15 nt, Human
ccacucuccccacac

SEQ ID NO: 2051979 - RNA, 16 nt, Human
ccacucuccccacacu

SEQ ID NO: 2051980 - RNA, 21 nt, Human
ccacucuacccucccaccccc

SEQ ID NO: 2051981 - RNA, 19 nt, Human
ccacucuacccucccaccc

SEQ ID NO: 2051982 - RNA, 20 nt, Human
ccacucuacccucccacccc

SEQ ID NO: 2051983 - RNA, 18 nt, Human
ccacucuacccucccacc

SEQ ID NO: 2051984 - RNA, 12 nt, Human
ccacuccuccaa

SEQ ID NO: 2051985 - RNA, 16 nt, Human
ccacuccuccaaagga

SEQ ID NO: 2051986 - RNA, 13 nt, Human
cuggcagccgugc

SEQ ID NO: 2051987 - RNA, 18 nt, Human
cuggcucuguggcuugcu

SEQ ID NO: 2051988 - RNA, 14 nt, Human
cuggcucuguggcu

SEQ ID NO: 2051989 - RNA, 15 nt, Human
cuggcucuguggcuu

SEQ ID NO: 2051990 - RNA, 17 nt, Human
cugggacuacaggugug

SEQ ID NO: 2051991 - RNA, 21 nt, Human
cugggacuacaggcacccacc

SEQ ID NO: 2051992 - RNA, 17 nt, Human
cugggacuacaggcacc

SEQ ID NO: 2051993 - RNA, 18 nt, Human
cuggcucccacaggcccu

SEQ ID NO: 2051994 - RNA, 19 nt, Human
cuggcucccacaggcccuu

SEQ ID NO: 2051995 - RNA, 22 nt, Human
cuggcucccacaggcccuuccu

SEQ ID NO: 2051996 - RNA, 14 nt, Human
cuggcucccagggc

SEQ ID NO: 2051997 - RNA, 15 nt, Human
cuggcucccagggcc

SEQ ID NO: 2051998 - RNA, 16 nt, Human
cuggcucccagggcca

SEQ ID NO: 2051999 - RNA, 18 nt, Human
cuggcucccagggccaug

SEQ ID NO: 2052000 - RNA, 16 nt, Human
cuggcccucaguuucc

SEQ ID NO: 2052001 - RNA, 19 nt, Human
cuggcccucaccccugccc

SEQ ID NO: 2052002 - RNA, 21 nt, Human
cuggcccucaccccugcccug

SEQ ID NO: 2052003 - RNA, 22 nt, Human
cuggcccucaccccugcccugg

SEQ ID NO: 2052004 - RNA, 23 nt, Human
cuggcccucaccccugcccuggg

SEQ ID NO: 2052005 - RNA, 22 nt, Human
cuggcccgucauguuccucaaa

SEQ ID NO: 2052006 - RNA, 17 nt, Human
cuggcccucaccccugc

SEQ ID NO: 2052007 - RNA, 18 nt, Human
cuggcagccgugccuuca

SEQ ID NO: 2052008 - RNA, 17 nt, Human
cuggcagccgugccuuc

SEQ ID NO: 2052009 - RNA, 20 nt, Human
cuggaucuccauucucucag

SEQ ID NO: 2052010 - RNA, 13 nt, Human
cuggaucucccag

SEQ ID NO: 2052011 - RNA, 16 nt, Human
cuggaucucccagggc

SEQ ID NO: 2052012 - RNA, 17 nt, Human
cuggaucucccagggcu

SEQ ID NO: 2052013 - RNA, 18 nt, Human
cuggaucucccagggcua

SEQ ID NO: 2052014 - RNA, 19 nt, Human
cuggaucucccagggcuac

SEQ ID NO: 2052015 - RNA, 19 nt, Human
cuggauccaucaggccacu

SEQ ID NO: 2052016 - RNA, 15 nt, Human
cugcuucagcuugcu

SEQ ID NO: 2052017 - RNA, 23 nt, Human
cugcuucagccucccgaguagcu

SEQ ID NO: 2052018 - RNA, 19 nt, Human
cuggaaaauaaaaggucua

SEQ ID NO: 2052019 - RNA, 17 nt, Human
cuggauccaucaggcca

SEQ ID NO: 2052020 - RNA, 13 nt, Human
cuggaucaguccu

SEQ ID NO: 2052021 - RNA, 17 nt, Human
cuggaucaguccuuuga

SEQ ID NO: 2052022 - RNA, 20 nt, Human
cuggaucaguccuuugauca

SEQ ID NO: 2052023 - RNA, 21 nt, Human
cuggaucaguccuuugaucag

SEQ ID NO: 2052024 - RNA, 15 nt, Human
cuggagaacuagaga

SEQ ID NO: 2052025 - RNA, 14 nt, Human
cuggagaacuagag

SEQ ID NO: 2052026 - RNA, 20 nt, Human
cuggacuccucuguccaggc

SEQ ID NO: 2052027 - RNA, 23 nt, Human
cuggaaaggcucagucucaggag

SEQ ID NO: 2052028 - RNA, 13 nt, Human
cuggaaaggcuca

SEQ ID NO: 2052029 - RNA, 14 nt, Human
cuggaaaggcucag

SEQ ID NO: 2052030 - RNA, 15 nt, Human
cuggaaaggcucagu

SEQ ID NO: 2052031 - RNA, 17 nt, Human
cuggaaaggcucagucu

SEQ ID NO: 2052032 - RNA, 20 nt, Human
cuggaaaggcucagucucag

SEQ ID NO: 2052033 - RNA, 21 nt, Human
cuggaaaggcucagucucagg

SEQ ID NO: 2052034 - RNA, 22 nt, Human
cuggaaaggcucagucucagga

SEQ ID NO: 2052035 - RNA, 23 nt, Human
cuggacuccucuguccaggcacu

SEQ ID NO: 2052036 - RNA, 22 nt, Human
cuggacuccucuguccaggcac

SEQ ID NO: 2052037 - RNA, 18 nt, Human
cugcugagggaccagcca

SEQ ID NO: 2052038 - RNA, 17 nt, Human
cugcugagggaccagcc

SEQ ID NO: 2052039 - RNA, 15 nt, Human
cugcugagagaccca

SEQ ID NO: 2052040 - RNA, 16 nt, Human
cugcugagagacccaa

SEQ ID NO: 2052041 - RNA, 21 nt, Human
cugcugagagacccaaggagg

SEQ ID NO: 2052042 - RNA, 22 nt, Human
cugcugagagacccaaggagga

SEQ ID NO: 2052043 - RNA, 13 nt, Human
cugcuauuuccca

SEQ ID NO: 2052044 - RNA, 17 nt, Human
cugcuauuucccaagcu

SEQ ID NO: 2052045 - RNA, 18 nt, Human
cugcuauuucccaagcug

SEQ ID NO: 2052046 - RNA, 19 nt, Human
cugcuauuucccaagcugg

SEQ ID NO: 2052047 - RNA, 21 nt, Human
cugcuauuucccaagcuggag

SEQ ID NO: 2052048 - RNA, 23 nt, Human
cugcuauuucccaagcuggagug

SEQ ID NO: 2052049 - RNA, 24 nt, Human
cugcuauuucccaagcuggagugc

SEQ ID NO: 2052050 - RNA, 13 nt, Human
cugcuauuuuacu

SEQ ID NO: 2052051 - RNA, 15 nt, Human
cugcuauuuuacugu

SEQ ID NO: 2052052 - RNA, 17 nt, Human
cugcuauuuuacugucu

SEQ ID NO: 2052053 - RNA, 20 nt, Human
cugcuauuuuacugucuuaa

SEQ ID NO: 2052054 - RNA, 21 nt, Human
cugcuauuuuacugucuuaau

SEQ ID NO: 2052055 - RNA, 17 nt, Human
cugcuaucaaagagguu

SEQ ID NO: 2052056 - RNA, 16 nt, Human
cugcuauccugccaaa

SEQ ID NO: 2052057 - RNA, 14 nt, Human
cugcuaugcuugaa

SEQ ID NO: 2052058 - RNA, 15 nt, Human
cugcuaugcuugaau

SEQ ID NO: 2052059 - RNA, 16 nt, Human
cugcugaauaauaaac

SEQ ID NO: 2052060 - RNA, 22 nt, Human
cugcugaaugauuuccaaagag

SEQ ID NO: 2052061 - RNA, 23 nt, Human
cugcugaaugauuuccaaagaga

SEQ ID NO: 2052062 - RNA, 19 nt, Human
cugccuguucccauucuug

SEQ ID NO: 2052063 - RNA, 15 nt, Human
cugccuguucccauu

SEQ ID NO: 2052064 - RNA, 13 nt, Human
cugccugucuccu

SEQ ID NO: 2052065 - RNA, 15 nt, Human
cugccugugagccag

SEQ ID NO: 2052066 - RNA, 16 nt, Human
cugccugugagccagu

SEQ ID NO: 2052067 - RNA, 17 nt, Human
cugccugugagccaguc

SEQ ID NO: 2052068 - RNA, 18 nt, Human
cugccugugagccagucu

SEQ ID NO: 2052069 - RNA, 21 nt, Human
cugccugugcacggccagcug

SEQ ID NO: 2052070 - RNA, 12 nt, Human
cugccugugcug

SEQ ID NO: 2052071 - RNA, 23 nt, Human
cugccuguucagcuccagcucac

SEQ ID NO: 2052072 - RNA, 20 nt, Human
cugccuguucagcuccagcu

SEQ ID NO: 2052073 - RNA, 22 nt, Human
cugcuacucuguuccuucacau

SEQ ID NO: 2052074 - RNA, 17 nt, Human
cugcuacucuguuccuu

SEQ ID NO: 2052075 - RNA, 18 nt, Human
cugcuacucuguuccuuc

SEQ ID NO: 2052076 - RNA, 18 nt, Human
cugcuaccucacuggggu

SEQ ID NO: 2052077 - RNA, 13 nt, Human
cugcuagaaaugg

SEQ ID NO: 2052078 - RNA, 14 nt, Human
cugcuagcacuugg

SEQ ID NO: 2052079 - RNA, 21 nt, Human
cugcuagcacuuggagccaag

SEQ ID NO: 2052080 - RNA, 22 nt, Human
cugcuagcacuuggagccaagg

SEQ ID NO: 2052081 - RNA, 14 nt, Human
cugccucgaacugg

SEQ ID NO: 2052082 - RNA, 20 nt, Human
cugccucgaacuggcugcaa

SEQ ID NO: 2052083 - RNA, 19 nt, Human
cugccucgaacuggcugca

SEQ ID NO: 2052084 - RNA, 19 nt, Human
cugccugucccucucaggc

SEQ ID NO: 2052085 - RNA, 20 nt, Human
cugccugucccucucaggca

SEQ ID NO: 2052086 - RNA, 23 nt, Human
cugccugucccucucaggcaugc

SEQ ID NO: 2052087 - RNA, 12 nt, Human
cugccugucucc

SEQ ID NO: 2052088 - RNA, 16 nt, Human
cugccugucccucuca

SEQ ID NO: 2052089 - RNA, 18 nt, Human
cugccugucccucucagg

SEQ ID NO: 2052090 - RNA, 22 nt, Human
cugccuguaguuaggaaauaaa

SEQ ID NO: 2052091 - RNA, 17 nt, Human
cugccuguaguuaggaa

SEQ ID NO: 2052092 - RNA, 18 nt, Human
cugccuguaguuaggaaa

SEQ ID NO: 2052093 - RNA, 19 nt, Human
cugccuguaguuaggaaau

SEQ ID NO: 2052094 - RNA, 20 nt, Human
cugccuguaguuaggaaaua

SEQ ID NO: 2052095 - RNA, 21 nt, Human
cugccuguaguuaggaaauaa

SEQ ID NO: 2052096 - RNA, 16 nt, Human
cugcccuucagcaucc

SEQ ID NO: 2052097 - RNA, 12 nt, Human
cugcccccuggu

SEQ ID NO: 2052098 - RNA, 13 nt, Human
cugcccccuggug

SEQ ID NO: 2052099 - RNA, 14 nt, Human
cugcccccuggugg

SEQ ID NO: 2052100 - RNA, 22 nt, Human
cugcccccugguggacaguccu

SEQ ID NO: 2052101 - RNA, 14 nt, Human
cugcccccuucucc

SEQ ID NO: 2052102 - RNA, 16 nt, Human
cugcccccuucuccca

SEQ ID NO: 2052103 - RNA, 17 nt, Human
cugcccccuucucccac

SEQ ID NO: 2052104 - RNA, 18 nt, Human
cugcccccuucucccaca

SEQ ID NO: 2052105 - RNA, 15 nt, Human
cugcccuggugcugc

SEQ ID NO: 2052106 - RNA, 23 nt, Human
cugcccugguccagggaagcugg

SEQ ID NO: 2052107 - RNA, 14 nt, Human
cugcccuggugcug

SEQ ID NO: 2052108 - RNA, 13 nt, Human
cugcccuggugcu

SEQ ID NO: 2052109 - RNA, 12 nt, Human
cugcccuggugc

SEQ ID NO: 2052110 - RNA, 20 nt, Human
cugcccugguccagggaagc

SEQ ID NO: 2052111 - RNA, 21 nt, Human
cugcccugguccagggaagcu

SEQ ID NO: 2052112 - RNA, 19 nt, Human
cugcccccuucucccacac

SEQ ID NO: 2052113 - RNA, 20 nt, Human
cugcccccuucucccacacu

SEQ ID NO: 2052114 - RNA, 22 nt, Human
cugcccccuucucccacacugc

SEQ ID NO: 2052115 - RNA, 24 nt, Human
cugcccugggauguccacagaugc

SEQ ID NO: 2052116 - RNA, 14 nt, Human
cugcccugguccag

SEQ ID NO: 2052117 - RNA, 15 nt, Human
cugcccugguccagg

SEQ ID NO: 2052118 - RNA, 23 nt, Human
cugcccuggugcugccacacuuc

SEQ ID NO: 2052119 - RNA, 18 nt, Human
cuguugcccuuucuguac

SEQ ID NO: 2052120 - RNA, 20 nt, Human
cuguugcccuuucuguacca

SEQ ID NO: 2052121 - RNA, 21 nt, Human
cuguugcccuuucuguaccau

SEQ ID NO: 2052122 - RNA, 12 nt, Human
cuguugccucau

SEQ ID NO: 2052123 - RNA, 14 nt, Human
cuguugccucaucu

SEQ ID NO: 2052124 - RNA, 15 nt, Human
cuguuguguucguuc

SEQ ID NO: 2052125 - RNA, 17 nt, Human
cuguuguguucguucuu

SEQ ID NO: 2052126 - RNA, 22 nt, Human
cuguuguguacguggagaggga

SEQ ID NO: 2052127 - RNA, 15 nt, Human
cuguuggccagugug

SEQ ID NO: 2052128 - RNA, 16 nt, Human
cuguugucauugcuuu

SEQ ID NO: 2052129 - RNA, 17 nt, Human
cuguugucauugcuuua

SEQ ID NO: 2052130 - RNA, 18 nt, Human
cuguugucauugcuuuac

SEQ ID NO: 2052131 - RNA, 12 nt, Human
cuguuggccagu

SEQ ID NO: 2052132 - RNA, 13 nt, Human
cuuaaaagccauc

SEQ ID NO: 2052133 - RNA, 17 nt, Human
cuuaaaagccaucaugu

SEQ ID NO: 2052134 - RNA, 21 nt, Human
cuuaaaagccaucauguaaau

SEQ ID NO: 2052135 - RNA, 17 nt, Human
cuguuguuguuaaugaa

SEQ ID NO: 2052136 - RNA, 22 nt, Human
cuguuguuguuaaugaaaaugu

SEQ ID NO: 2052137 - RNA, 23 nt, Human
cuguuguuguuaaugaaaauguc

SEQ ID NO: 2052138 - RNA, 15 nt, Human
cuuaaaacuuuucaa

SEQ ID NO: 2052139 - RNA, 12 nt, Human
cuuaaaacuccu

SEQ ID NO: 2052140 - RNA, 13 nt, Human
cuguuguuguuaa

SEQ ID NO: 2052141 - RNA, 17 nt, Human
cuguuguuauggaaacu

SEQ ID NO: 2052142 - RNA, 22 nt, Human
cuuaaaauagcaacacucuaua

SEQ ID NO: 2052143 - RNA, 14 nt, Human
cuuaaacugugugg

SEQ ID NO: 2052144 - RNA, 15 nt, Human
cuuaaacugugugga

SEQ ID NO: 2052145 - RNA, 23 nt, Human
cuuaaacuguguggacugugaug

SEQ ID NO: 2052146 - RNA, 18 nt, Human
cugugaacgauuuagaaa

SEQ ID NO: 2052147 - RNA, 15 nt, Human
cugugcucuggacag

SEQ ID NO: 2052148 - RNA, 17 nt, Human
cugugcucuggacaggc

SEQ ID NO: 2052149 - RNA, 15 nt, Human
cugugagcaagaagu

SEQ ID NO: 2052150 - RNA, 22 nt, Human
cugugaacgauuuagaaagaag

SEQ ID NO: 2052151 - RNA, 12 nt, Human
cuguucagcugg

SEQ ID NO: 2052152 - RNA, 22 nt, Human
cuguucagcuccagcucaccag

SEQ ID NO: 2052153 - RNA, 19 nt, Human
cuguucagcuccagcucac

SEQ ID NO: 2052154 - RNA, 18 nt, Human
cuguucagcuccagcuca

SEQ ID NO: 2052155 - RNA, 16 nt, Human
cuguucagcuccagcu

SEQ ID NO: 2052156 - RNA, 13 nt, Human
cuguucacucuac

SEQ ID NO: 2052157 - RNA, 15 nt, Human
cuguucagcuccagc

SEQ ID NO: 2052158 - RNA, 12 nt, Human
cuguucacccac

SEQ ID NO: 2052159 - RNA, 14 nt, Human
cuguucacccacag

SEQ ID NO: 2052160 - RNA, 18 nt, Human
cuguucacccacagggcu

SEQ ID NO: 2052161 - RNA, 19 nt, Human
cugugcucuggacaggcau

SEQ ID NO: 2052162 - RNA, 18 nt, Human
cugugcucuggacaggca

SEQ ID NO: 2052163 - RNA, 13 nt, Human
cugugagccaguc

SEQ ID NO: 2052164 - RNA, 14 nt, Human
cugugagccagucu

SEQ ID NO: 2052165 - RNA, 13 nt, Human
cuguguauuuaau

SEQ ID NO: 2052166 - RNA, 17 nt, Human
cuguguauuuaauugua

SEQ ID NO: 2052167 - RNA, 20 nt, Human
cuguguauuuaauuguaaac

SEQ ID NO: 2052168 - RNA, 21 nt, Human
cuguguauuuaauuguaaacu

SEQ ID NO: 2052169 - RNA, 22 nt, Human
cuguguauuuaauuguaaacug

SEQ ID NO: 2052170 - RNA, 23 nt, Human
cuguguauuuaauuguaaacugu

SEQ ID NO: 2052171 - RNA, 13 nt, Human
cuguguauguaca

SEQ ID NO: 2052172 - RNA, 14 nt, Human
cuguguauguacau

SEQ ID NO: 2052173 - RNA, 15 nt, Human
cuguguauguacaua

SEQ ID NO: 2052174 - RNA, 18 nt, Human
cuguguauguacauauau

SEQ ID NO: 2052175 - RNA, 22 nt, Human
cugugucagguggggcagcuug

SEQ ID NO: 2052176 - RNA, 22 nt, Human
cugugucauuuggcuuuccagu

SEQ ID NO: 2052177 - RNA, 14 nt, Human
cuguguccaacucc

SEQ ID NO: 2052178 - RNA, 16 nt, Human
cuguguccaacuccag

SEQ ID NO: 2052179 - RNA, 17 nt, Human
cuguguccaacuccagu

SEQ ID NO: 2052180 - RNA, 18 nt, Human
cuguguccaacuccagua

SEQ ID NO: 2052181 - RNA, 19 nt, Human
cuguguccaacuccaguac

SEQ ID NO: 2052182 - RNA, 17 nt, Human
cuguuacugucuucagu

SEQ ID NO: 2052183 - RNA, 15 nt, Human
cuguuagcuguuauu

SEQ ID NO: 2052184 - RNA, 16 nt, Human
cuguuagcuguuauuu

SEQ ID NO: 2052185 - RNA, 13 nt, Human
cuguuagaacacu

SEQ ID NO: 2052186 - RNA, 14 nt, Human
cuguuagaacacua

SEQ ID NO: 2052187 - RNA, 15 nt, Human
cuguuagaacacuau

SEQ ID NO: 2052188 - RNA, 16 nt, Human
cuguuagaacacuauu

SEQ ID NO: 2052189 - RNA, 17 nt, Human
cuguuagaacacuauuu

SEQ ID NO: 2052190 - RNA, 18 nt, Human
cuguuagaacacuauuuu

SEQ ID NO: 2052191 - RNA, 19 nt, Human
cuguuagaacacuauuuuc

SEQ ID NO: 2052192 - RNA, 21 nt, Human
cuguuagaacacuauuuucag

SEQ ID NO: 2052193 - RNA, 22 nt, Human
cuguuagaacacuauuuucaga

SEQ ID NO: 2052194 - RNA, 23 nt, Human
cuguuagaacacuauuuucagaa

SEQ ID NO: 2052195 - RNA, 12 nt, Human
cuggucucucua

SEQ ID NO: 2052196 - RNA, 12 nt, Human
cuguccuuaccc

SEQ ID NO: 2052197 - RNA, 17 nt, Human
cuguccuuacccaucug

SEQ ID NO: 2052198 - RNA, 19 nt, Human
cuguccuuacccaucugca

SEQ ID NO: 2052199 - RNA, 15 nt, Human
cuguccuucucucac

SEQ ID NO: 2052200 - RNA, 22 nt, Human
cuguccuuuccaguggccuggc

SEQ ID NO: 2052201 - RNA, 16 nt, Human
cuguccuugcacacuc

SEQ ID NO: 2052202 - RNA, 20 nt, Human
cuguccuucucucaccuccu

SEQ ID NO: 2052203 - RNA, 23 nt, Human
cuguccuucucucaccuccuaaa

SEQ ID NO: 2052204 - RNA, 18 nt, Human
cuguaggaagguuaaugu

SEQ ID NO: 2052205 - RNA, 16 nt, Human
cugucaguaugacauu

SEQ ID NO: 2052206 - RNA, 18 nt, Human
cuguagcauuacaguggg

SEQ ID NO: 2052207 - RNA, 17 nt, Human
cuguagcauuacagugg

SEQ ID NO: 2052208 - RNA, 20 nt, Human
cuguccugggagugagcugg

SEQ ID NO: 2052209 - RNA, 14 nt, Human
cuguccugggagug

SEQ ID NO: 2052210 - RNA, 13 nt, Human
cuguccugggagu

SEQ ID NO: 2052211 - RNA, 14 nt, Human
cugucauuugagca

SEQ ID NO: 2052212 - RNA, 18 nt, Human
cugucagugcagcccgug

SEQ ID NO: 2052213 - RNA, 19 nt, Human
cugucagugcagcccgugu

SEQ ID NO: 2052214 - RNA, 14 nt, Human
cugucagucugcuu

SEQ ID NO: 2052215 - RNA, 15 nt, Human
cugucagugcagccc

SEQ ID NO: 2052216 - RNA, 14 nt, Human
cugguuuuucaguu

SEQ ID NO: 2052217 - RNA, 15 nt, Human
cugguuuuucaguuu

SEQ ID NO: 2052218 - RNA, 16 nt, Human
cugguuuuucaguuuu

SEQ ID NO: 2052219 - RNA, 18 nt, Human
cugguuuuccuaaaugca

SEQ ID NO: 2052220 - RNA, 13 nt, Human
cuguaagcucuuu

SEQ ID NO: 2052221 - RNA, 20 nt, Human
cuguacuucaaguuaaagug

SEQ ID NO: 2052222 - RNA, 17 nt, Human
cuguacuugaugacaga

SEQ ID NO: 2052223 - RNA, 18 nt, Human
cuguagauugcuucugua

SEQ ID NO: 2052224 - RNA, 19 nt, Human
cuguagauugcuucuguag

SEQ ID NO: 2052225 - RNA, 21 nt, Human
cuguagauugcuucuguagua

SEQ ID NO: 2052226 - RNA, 15 nt, Human
cuguagagugggagc

SEQ ID NO: 2052227 - RNA, 16 nt, Human
cuguaaauuauuuuaa

SEQ ID NO: 2052228 - RNA, 17 nt, Human
cuguaaauuauuuuaaa

SEQ ID NO: 2052229 - RNA, 18 nt, Human
cuguaaauuauuuuaaau

SEQ ID NO: 2052230 - RNA, 20 nt, Human
cuguaaauuauuuuaaauua

SEQ ID NO: 2052231 - RNA, 22 nt, Human
cuguaaauuauuuuaaauuaua

SEQ ID NO: 2052232 - RNA, 15 nt, Human
cuguaaaaacugugg

SEQ ID NO: 2052233 - RNA, 23 nt, Human
cuguaagaagagacugggaagau

SEQ ID NO: 2052234 - RNA, 17 nt, Human
cuguaagaagagacugg

SEQ ID NO: 2052235 - RNA, 20 nt, Human
cuguaagaagagacugggaa

SEQ ID NO: 2052236 - RNA, 22 nt, Human
cuguaagaagagacugggaaga

SEQ ID NO: 2052237 - RNA, 16 nt, Human
cuguaagacugauaau

SEQ ID NO: 2052238 - RNA, 16 nt, Human
cuuccauuccacaucc

SEQ ID NO: 2052239 - RNA, 14 nt, Human
cuucccaacugcaa

SEQ ID NO: 2052240 - RNA, 15 nt, Human
cuucccaacugcaag

SEQ ID NO: 2052241 - RNA, 16 nt, Human
cuucccaacugcaagu

SEQ ID NO: 2052242 - RNA, 16 nt, Human
cuuccauuugugugug

SEQ ID NO: 2052243 - RNA, 17 nt, Human
cuuccaugagaacagca

SEQ ID NO: 2052244 - RNA, 12 nt, Human
cuuccauuuaua

SEQ ID NO: 2052245 - RNA, 21 nt, Human
cuuccaugagaacagcagggu

SEQ ID NO: 2052246 - RNA, 15 nt, Human
cuuacaugagaacag

SEQ ID NO: 2052247 - RNA, 16 nt, Human
cuuacaugagaacaga

SEQ ID NO: 2052248 - RNA, 17 nt, Human
cuuacaugagaacagac

SEQ ID NO: 2052249 - RNA, 14 nt, Human
cuuacauguuuucu

SEQ ID NO: 2052250 - RNA, 21 nt, Human
cuuacauguuuucuuugcuuu

SEQ ID NO: 2052251 - RNA, 15 nt, Human
cuuccaucucgccac

SEQ ID NO: 2052252 - RNA, 17 nt, Human
cuuccaucccuaccccc

SEQ ID NO: 2052253 - RNA, 19 nt, Human
cuuccaucccuacccccua

SEQ ID NO: 2052254 - RNA, 12 nt, Human
cuuccaucccua

SEQ ID NO: 2052255 - RNA, 14 nt, Human
cuuccaucccuacc

SEQ ID NO: 2052256 - RNA, 15 nt, Human
cuuccaucccuaccc

SEQ ID NO: 2052257 - RNA, 16 nt, Human
cuuccaucccuacccc

SEQ ID NO: 2052258 - RNA, 20 nt, Human
cuuacauuagcaguuugcuu

SEQ ID NO: 2052259 - RNA, 14 nt, Human
cuuacaugcauuug

SEQ ID NO: 2052260 - RNA, 12 nt, Human
cuuccucccucc

SEQ ID NO: 2052261 - RNA, 13 nt, Human
cuuccucccuccc

SEQ ID NO: 2052262 - RNA, 14 nt, Human
cuuccucccucccu

SEQ ID NO: 2052263 - RNA, 18 nt, Human
cuuccucccucccucuuu

SEQ ID NO: 2052264 - RNA, 16 nt, Human
cuucuaauugccaugu

SEQ ID NO: 2052265 - RNA, 14 nt, Human
cuucuaaucugcua

SEQ ID NO: 2052266 - RNA, 16 nt, Human
cuucuaaucugcuaug

SEQ ID NO: 2052267 - RNA, 21 nt, Human
cuucuaaucugcuaugcuuga

SEQ ID NO: 2052268 - RNA, 22 nt, Human
cuucuaaucugcuaugcuugaa

SEQ ID NO: 2052269 - RNA, 13 nt, Human
cuuccucugcuga

SEQ ID NO: 2052270 - RNA, 12 nt, Human
cuuccucugcug

SEQ ID NO: 2052271 - RNA, 11 nt, Human
cuuccucugcu

SEQ ID NO: 2052272 - RNA, 21 nt, Human
cuuccucuccacugccuucga

SEQ ID NO: 2052273 - RNA, 19 nt, Human
cuuccucuccacugccuuc

SEQ ID NO: 2052274 - RNA, 17 nt, Human
cuuccucuccacugccu

SEQ ID NO: 2052275 - RNA, 16 nt, Human
cuuccucuccacugcc

SEQ ID NO: 2052276 - RNA, 21 nt, Human
cuucucugcuccaccacaucc

SEQ ID NO: 2052277 - RNA, 22 nt, Human
cuucucugcuccaccacauccu

SEQ ID NO: 2052278 - RNA, 22 nt, Human
cuucucuguauuccuagaaacu

SEQ ID NO: 2052279 - RNA, 13 nt, Human
cuucucugcccau

SEQ ID NO: 2052280 - RNA, 15 nt, Human
cuucucugcccauuc

SEQ ID NO: 2052281 - RNA, 16 nt, Human
cuucucugcccauucc

SEQ ID NO: 2052282 - RNA, 17 nt, Human
cuucucugcccauuccc

SEQ ID NO: 2052283 - RNA, 19 nt, Human
cuucucugcccauucccca

SEQ ID NO: 2052284 - RNA, 21 nt, Human
cuucucugcccauuccccagc

SEQ ID NO: 2052285 - RNA, 22 nt, Human
cuucucugcccauuccccagcc

SEQ ID NO: 2052286 - RNA, 23 nt, Human
cuucucugcccauuccccagccu

SEQ ID NO: 2052287 - RNA, 11 nt, Human
cuucucugcuc

SEQ ID NO: 2052288 - RNA, 12 nt, Human
cuucucugcucc

SEQ ID NO: 2052289 - RNA, 13 nt, Human
cuucucugcucca

SEQ ID NO: 2052290 - RNA, 14 nt, Human
cuucucugcuccac

SEQ ID NO: 2052291 - RNA, 15 nt, Human
cuucucugcuccacc

SEQ ID NO: 2052292 - RNA, 16 nt, Human
cuucucugcuccacca

SEQ ID NO: 2052293 - RNA, 23 nt, Human
cuucuauggacugguuguugcca

SEQ ID NO: 2052294 - RNA, 18 nt, Human
cuucuacugagccuucag

SEQ ID NO: 2052295 - RNA, 13 nt, Human
cuucuacacucuc

SEQ ID NO: 2052296 - RNA, 14 nt, Human
cuucuacacucucc

SEQ ID NO: 2052297 - RNA, 17 nt, Human
cuucuacacucuccugg

SEQ ID NO: 2052298 - RNA, 18 nt, Human
cuucuacacucuccuggg

SEQ ID NO: 2052299 - RNA, 15 nt, Human
cuucuaccaacugga

SEQ ID NO: 2052300 - RNA, 17 nt, Human
cuucuaccaacuggaag

SEQ ID NO: 2052301 - RNA, 18 nt, Human
cuucuaccaacuggaagc

SEQ ID NO: 2052302 - RNA, 15 nt, Human
cuucuaauugccaug

SEQ ID NO: 2052303 - RNA, 13 nt, Human
cuucuucuucaga

SEQ ID NO: 2052304 - RNA, 14 nt, Human
cuucuucuucagaa

SEQ ID NO: 2052305 - RNA, 22 nt, Human
cuucucuuuaacucaggacucc

SEQ ID NO: 2052306 - RNA, 19 nt, Human
cuucuucugucaucuaccu

SEQ ID NO: 2052307 - RNA, 15 nt, Human
cuucuuacaugcauu

SEQ ID NO: 2052308 - RNA, 13 nt, Human
cuucuuauacauu

SEQ ID NO: 2052309 - RNA, 16 nt, Human
cuucuuauacauuuga

SEQ ID NO: 2052310 - RNA, 14 nt, Human
cuucuuauucucac

SEQ ID NO: 2052311 - RNA, 17 nt, Human
cuucuuauucucacucc

SEQ ID NO: 2052312 - RNA, 21 nt, Human
cuucuucggggaacuccugga

SEQ ID NO: 2052313 - RNA, 17 nt, Human
cuuucacccacagaaag

SEQ ID NO: 2052314 - RNA, 18 nt, Human
cuuucacccacagaaaga

SEQ ID NO: 2052315 - RNA, 19 nt, Human
cuuucacccacagaaagag

SEQ ID NO: 2052316 - RNA, 20 nt, Human
cuuucacccacagaaagaga

SEQ ID NO: 2052317 - RNA, 17 nt, Human
cuuucacaguaccaucu

SEQ ID NO: 2052318 - RNA, 19 nt, Human
cuuucacaguaccaucuga

SEQ ID NO: 2052319 - RNA, 16 nt, Human
cuuucacauagauguc

SEQ ID NO: 2052320 - RNA, 14 nt, Human
cuuucacacuucca

SEQ ID NO: 2052321 - RNA, 15 nt, Human
cuuucacacuuccac

SEQ ID NO: 2052322 - RNA, 16 nt, Human
cuuucacacuuccacc

SEQ ID NO: 2052323 - RNA, 19 nt, Human
cuuucacacuuccaccagc

SEQ ID NO: 2052324 - RNA, 20 nt, Human
cuuucacacuuccaccagcc

SEQ ID NO: 2052325 - RNA, 21 nt, Human
cuuucacacuuccaccagccu

SEQ ID NO: 2052326 - RNA, 23 nt, Human
cuuucacacuuccaccagccugc

SEQ ID NO: 2052327 - RNA, 20 nt, Human
cuuuaaugucacaggcaggu

SEQ ID NO: 2052328 - RNA, 19 nt, Human
cuuuaaugucacaggcagg

SEQ ID NO: 2052329 - RNA, 18 nt, Human
cuuuaaugucacaggcag

SEQ ID NO: 2052330 - RNA, 17 nt, Human
cuuuaaugucacaggca

SEQ ID NO: 2052331 - RNA, 22 nt, Human
cuuuaaugucacaggcaggucc

SEQ ID NO: 2052332 - RNA, 14 nt, Human
cuuuaagacauacu

SEQ ID NO: 2052333 - RNA, 12 nt, Human
cuuuaaggaaaa

SEQ ID NO: 2052334 - RNA, 23 nt, Human
cuuuaagacauacuccuuccauc

SEQ ID NO: 2052335 - RNA, 15 nt, Human
cuugguccuugauuu

SEQ ID NO: 2052336 - RNA, 22 nt, Human
cuuggucuaacuuuugugugaa

SEQ ID NO: 2052337 - RNA, 20 nt, Human
cuuggucugauuucaggaua

SEQ ID NO: 2052338 - RNA, 13 nt, Human
cuugguuauacau

SEQ ID NO: 2052339 - RNA, 17 nt, Human
cuugguuauacaugaca

SEQ ID NO: 2052340 - RNA, 19 nt, Human
cuugguuauacaugacacu

SEQ ID NO: 2052341 - RNA, 13 nt, Human
cuugucuguagau

SEQ ID NO: 2052342 - RNA, 14 nt, Human
cuugucucugggcu

SEQ ID NO: 2052343 - RNA, 13 nt, Human
cuugucucugggc

SEQ ID NO: 2052344 - RNA, 11 nt, Human
cuugucuuaaa

SEQ ID NO: 2052345 - RNA, 18 nt, Human
cuugucuuaaauaaaaga

SEQ ID NO: 2052346 - RNA, 14 nt, Human
cuugucuuguucac

SEQ ID NO: 2052347 - RNA, 17 nt, Human
cuugguucaucaguguu

SEQ ID NO: 2052348 - RNA, 17 nt, Human
cuugguucccuugugug

SEQ ID NO: 2052349 - RNA, 21 nt, Human
cuugauggcuccgaacacccu

SEQ ID NO: 2052350 - RNA, 16 nt, Human
cuugauggucagacac

SEQ ID NO: 2052351 - RNA, 22 nt, Human
cuugauggucagacacaaacaa

SEQ ID NO: 2052352 - RNA, 16 nt, Human
cuugaugguuuauguu

SEQ ID NO: 2052353 - RNA, 15 nt, Human
cuugauguguuaucu

SEQ ID NO: 2052354 - RNA, 20 nt, Human
cuugaugucuuuguuaagac

SEQ ID NO: 2052355 - RNA, 22 nt, Human
cuugauuuaucacacaaagcag

SEQ ID NO: 2052356 - RNA, 21 nt, Human
cuugauuuaucacacaaagca

SEQ ID NO: 2052357 - RNA, 15 nt, Human
cuugccgaaacugga

SEQ ID NO: 2052358 - RNA, 17 nt, Human
cuugccgaaacuggaag

SEQ ID NO: 2052359 - RNA, 18 nt, Human
cuugccgaaacuggaagu

SEQ ID NO: 2052360 - RNA, 20 nt, Human
cuugccgaaacuggaaguua

SEQ ID NO: 2052361 - RNA, 17 nt, Human
cuugccuccauggugcc

SEQ ID NO: 2052362 - RNA, 19 nt, Human
cuugccuccauggugccuc

SEQ ID NO: 2052363 - RNA, 20 nt, Human
cuugccuccauggugccucu

SEQ ID NO: 2052364 - RNA, 21 nt, Human
cuugccuccauggugccucug

SEQ ID NO: 2052365 - RNA, 22 nt, Human
cuugccuccauggugccucugg

SEQ ID NO: 2052366 - RNA, 12 nt, Human
cuugccuccugu

SEQ ID NO: 2052367 - RNA, 15 nt, Human
cuugccuccugugua

SEQ ID NO: 2052368 - RNA, 14 nt, Human
gaaacuuacacaca

SEQ ID NO: 2052369 - RNA, 15 nt, Human
gaaacuuacacacaa

SEQ ID NO: 2052370 - RNA, 15 nt, Human
gaaacuguugccaga

SEQ ID NO: 2052371 - RNA, 17 nt, Human
gaaacuguugccagaga

SEQ ID NO: 2052372 - RNA, 21 nt, Human
gaaacuguugccagagaugga

SEQ ID NO: 2052373 - RNA, 23 nt, Human
gaaacuguugccagagauggagg

SEQ ID NO: 2052374 - RNA, 16 nt, Human
gaaacuuaucuuacaa

SEQ ID NO: 2052375 - RNA, 19 nt, Human
gaaacuuaucuuacaaagu

SEQ ID NO: 2052376 - RNA, 21 nt, Human
gaaacuuaucuuacaaagugu

SEQ ID NO: 2052377 - RNA, 17 nt, Human
gaaacuucaagcaccag

SEQ ID NO: 2052378 - RNA, 22 nt, Human
gaaacuucaagcaccagggaag

SEQ ID NO: 2052379 - RNA, 18 nt, Human
gaaagaaguggggacaga

SEQ ID NO: 2052380 - RNA, 16 nt, Human
gaaagaagaaaagguu

SEQ ID NO: 2052381 - RNA, 13 nt, Human
gaaacuuccaaga

SEQ ID NO: 2052382 - RNA, 11 nt, Human
gaaagaaggaa

SEQ ID NO: 2052383 - RNA, 13 nt, Human
gaaagaaggaaga

SEQ ID NO: 2052384 - RNA, 14 nt, Human
gaaagacagagcug

SEQ ID NO: 2052385 - RNA, 16 nt, Human
gaaagacagagcuggg

SEQ ID NO: 2052386 - RNA, 17 nt, Human
gaaacuuguuagaaaug

SEQ ID NO: 2052387 - RNA, 20 nt, Human
gaaacuuguuagaaaugcaa

SEQ ID NO: 2052388 - RNA, 19 nt, Human
gaacaacuaggcuucagca

SEQ ID NO: 2052389 - RNA, 21 nt, Human
gaacaacuaggcuucagcaua

SEQ ID NO: 2052390 - RNA, 13 nt, Human
gaacaagccuaaa

SEQ ID NO: 2052391 - RNA, 16 nt, Human
gaacaaccucggcucc

SEQ ID NO: 2052392 - RNA, 20 nt, Human
gaacaaccucggcuccugga

SEQ ID NO: 2052393 - RNA, 21 nt, Human
gaacaaccucggcuccuggac

SEQ ID NO: 2052394 - RNA, 15 nt, Human
gaacaacuacuguga

SEQ ID NO: 2052395 - RNA, 22 nt, Human
gaaauuuuucagaugcuucugg

SEQ ID NO: 2052396 - RNA, 17 nt, Human
gaaauuuuucagaugcu

SEQ ID NO: 2052397 - RNA, 20 nt, Human
gaaauuuuucagaugcuucu

SEQ ID NO: 2052398 - RNA, 14 nt, Human
gaaaugaauaauuu

SEQ ID NO: 2052399 - RNA, 18 nt, Human
gaaaugaauaauuuccca

SEQ ID NO: 2052400 - RNA, 19 nt, Human
gaaaugaauaauuucccaa

SEQ ID NO: 2052401 - RNA, 19 nt, Human
gaaauuuuuauuaaauuau

SEQ ID NO: 2052402 - RNA, 13 nt, Human
gaaaugaauaauu

SEQ ID NO: 2052403 - RNA, 18 nt, Human
gaaauuuuuauuaaauua

SEQ ID NO: 2052404 - RNA, 13 nt, Human
gaaaugaaauuuu

SEQ ID NO: 2052405 - RNA, 16 nt, Human
gaaaugaaauuuuacc

SEQ ID NO: 2052406 - RNA, 17 nt, Human
gaaaugaaauuuuacca

SEQ ID NO: 2052407 - RNA, 19 nt, Human
gaaaugaaauuuuaccaag

SEQ ID NO: 2052408 - RNA, 21 nt, Human
gaaaguacuucuccacccugc

SEQ ID NO: 2052409 - RNA, 14 nt, Human
gaaaguaauuucuu

SEQ ID NO: 2052410 - RNA, 15 nt, Human
gaaaguaauuucuuc

SEQ ID NO: 2052411 - RNA, 16 nt, Human
gaaaguaauuucuucu

SEQ ID NO: 2052412 - RNA, 19 nt, Human
gaaaguaauuucuucucaa

SEQ ID NO: 2052413 - RNA, 16 nt, Human
gaaagguuuacauugu

SEQ ID NO: 2052414 - RNA, 14 nt, Human
gaaagguuuacauu

SEQ ID NO: 2052415 - RNA, 18 nt, Human
gaaagacuaucuaaaugu

SEQ ID NO: 2052416 - RNA, 21 nt, Human
gaaagacggauugcauuagaa

SEQ ID NO: 2052417 - RNA, 16 nt, Human
gaaagacagcuucuca

SEQ ID NO: 2052418 - RNA, 17 nt, Human
gaaagacagcuucucau

SEQ ID NO: 2052419 - RNA, 14 nt, Human
gaaaauuuuaaaaa

SEQ ID NO: 2052420 - RNA, 22 nt, Human
gaaaauuaggauuucaugauuu

SEQ ID NO: 2052421 - RNA, 18 nt, Human
gaaaauuaggauuucaug

SEQ ID NO: 2052422 - RNA, 15 nt, Human
gaaaauuaacacugc

SEQ ID NO: 2052423 - RNA, 13 nt, Human
gaaaauuaacacu

SEQ ID NO: 2052424 - RNA, 18 nt, Human
gaaaauguuuuguaagaa

SEQ ID NO: 2052425 - RNA, 19 nt, Human
gaaaauguuuuguaagaaa

SEQ ID NO: 2052426 - RNA, 22 nt, Human
gaaaauguuuuguaagaaacca

SEQ ID NO: 2052427 - RNA, 20 nt, Human
gaaaauguuuuucugccagg

SEQ ID NO: 2052428 - RNA, 15 nt, Human
gaaaagccauguuua

SEQ ID NO: 2052429 - RNA, 16 nt, Human
gaaaagccauguuuaa

SEQ ID NO: 2052430 - RNA, 17 nt, Human
gaaaagccauguuuaag

SEQ ID NO: 2052431 - RNA, 18 nt, Human
gaaaagccauguuuaaga

SEQ ID NO: 2052432 - RNA, 19 nt, Human
gaaaagccauguuuaagau

SEQ ID NO: 2052433 - RNA, 20 nt, Human
gaaaagccauguuuaagauu

SEQ ID NO: 2052434 - RNA, 21 nt, Human
gaaaagccauguuuaagauuu

SEQ ID NO: 2052435 - RNA, 16 nt, Human
gaaaagcaccugccga

SEQ ID NO: 2052436 - RNA, 17 nt, Human
gaaaagcaccugccgac

SEQ ID NO: 2052437 - RNA, 16 nt, Human
gaaaacugacagagga

SEQ ID NO: 2052438 - RNA, 19 nt, Human
gaaaacugcaacuuguaaa

SEQ ID NO: 2052439 - RNA, 21 nt, Human
gaaaacuacauuuuaacaugg

SEQ ID NO: 2052440 - RNA, 20 nt, Human
gaaaacuagagcucuaagcc

SEQ ID NO: 2052441 - RNA, 20 nt, Human
gaaaacuugaauucauagaa

SEQ ID NO: 2052442 - RNA, 21 nt, Human
gaaaacuugaauucauagaaa

SEQ ID NO: 2052443 - RNA, 11 nt, Human
cuuuugcuaaa

SEQ ID NO: 2052444 - RNA, 17 nt, Human
cuuuugucuaugggacu

SEQ ID NO: 2052445 - RNA, 16 nt, Human
cuuuuggucuguguga

SEQ ID NO: 2052446 - RNA, 15 nt, Human
cuuuuggucugugug

SEQ ID NO: 2052447 - RNA, 17 nt, Human
cuuuuggguuucugccc

SEQ ID NO: 2052448 - RNA, 19 nt, Human
cuuuuggguuucugcccug

SEQ ID NO: 2052449 - RNA, 20 nt, Human
cuuuuggguuucugcccugc

SEQ ID NO: 2052450 - RNA, 14 nt, Human
cuuuuuuuuaaguu

SEQ ID NO: 2052451 - RNA, 23 nt, Human
cuuuuguguacaguguguaaagu

SEQ ID NO: 2052452 - RNA, 14 nt, Human
cuuuuguguacagu

SEQ ID NO: 2052453 - RNA, 15 nt, Human
gaaaaaauacauuuu

SEQ ID NO: 2052454 - RNA, 17 nt, Human
gaaaaaauacauuuuau

SEQ ID NO: 2052455 - RNA, 21 nt, Human
gaaaaaaaaagucagacugcu

SEQ ID NO: 2052456 - RNA, 10 nt, Human
gaaaaaauac

SEQ ID NO: 2052457 - RNA, 13 nt, Human
gaaaaaauacauu

SEQ ID NO: 2052458 - RNA, 14 nt, Human
gaaaaaauacauuu

SEQ ID NO: 2052459 - RNA, 19 nt, Human
gaaaaaauauuuuccugcc

SEQ ID NO: 2052460 - RNA, 20 nt, Human
gaaugaugauccuaggcauu

SEQ ID NO: 2052461 - RNA, 13 nt, Human
gaaugaugaagcu

SEQ ID NO: 2052462 - RNA, 23 nt, Human
gaaugauucuaauuuuuaagcaa

SEQ ID NO: 2052463 - RNA, 16 nt, Human
gaaugauuuccaaaga

SEQ ID NO: 2052464 - RNA, 20 nt, Human
gaaugauuuccaaagagaaa

SEQ ID NO: 2052465 - RNA, 17 nt, Human
gaauguuugccucugcc

SEQ ID NO: 2052466 - RNA, 16 nt, Human
gaauguuugccucugc

SEQ ID NO: 2052467 - RNA, 15 nt, Human
gaauguuugccucug

SEQ ID NO: 2052468 - RNA, 22 nt, Human
gaaugauuuccaaagagaaaaa

SEQ ID NO: 2052469 - RNA, 19 nt, Human
gaauguuugccucugccuc

SEQ ID NO: 2052470 - RNA, 18 nt, Human
gaauguuugccucugccu

SEQ ID NO: 2052471 - RNA, 12 nt, Human
gaauuaaaacaa

SEQ ID NO: 2052472 - RNA, 13 nt, Human
gaauuaaaacaau

SEQ ID NO: 2052473 - RNA, 15 nt, Human
gaauuaaaacaaugu

SEQ ID NO: 2052474 - RNA, 20 nt, Human
gaauuaaauuaggaauaaau

SEQ ID NO: 2052475 - RNA, 21 nt, Human
gaauuaaauuaggaauaaaua

SEQ ID NO: 2052476 - RNA, 22 nt, Human
gaauuacauguaaaacauuauc

SEQ ID NO: 2052477 - RNA, 18 nt, Human
gaauuaaguuagggaaug

SEQ ID NO: 2052478 - RNA, 21 nt, Human
gaauuaaguuagggaauggca

SEQ ID NO: 2052479 - RNA, 13 nt, Human
gaauuaaauuuaa

SEQ ID NO: 2052480 - RNA, 15 nt, Human
gaauuaaccuggugc

SEQ ID NO: 2052481 - RNA, 16 nt, Human
gaauuaaccuggugcu

SEQ ID NO: 2052482 - RNA, 18 nt, Human
gaauuaaccuggugcugg

SEQ ID NO: 2052483 - RNA, 19 nt, Human
gaauuaaccuggugcugga

SEQ ID NO: 2052484 - RNA, 22 nt, Human
gaauuaaccuggugcuggauau

SEQ ID NO: 2052485 - RNA, 16 nt, Human
gaauuaagaggauaca

SEQ ID NO: 2052486 - RNA, 21 nt, Human
gaauuacauguaaaacauuau

SEQ ID NO: 2052487 - RNA, 19 nt, Human
gaauuaaugacagagccag

SEQ ID NO: 2052488 - RNA, 21 nt, Human
gacacagcucuucuccaggcu

SEQ ID NO: 2052489 - RNA, 20 nt, Human
gacacagcucuucuccaggc

SEQ ID NO: 2052490 - RNA, 19 nt, Human
gacacagcucuucuccagg

SEQ ID NO: 2052491 - RNA, 12 nt, Human
gacacagcucuu

SEQ ID NO: 2052492 - RNA, 14 nt, Human
gacaaagucuccag

SEQ ID NO: 2052493 - RNA, 16 nt, Human
gacaaagucuccagcc

SEQ ID NO: 2052494 - RNA, 17 nt, Human
gacaaagucuccagccc

SEQ ID NO: 2052495 - RNA, 19 nt, Human
gacaaagucuccagcccac

SEQ ID NO: 2052496 - RNA, 15 nt, Human
gacacagaacacaga

SEQ ID NO: 2052497 - RNA, 12 nt, Human
gacaaacccuuc

SEQ ID NO: 2052498 - RNA, 21 nt, Human
gacaaagacaaauucuguuuc

SEQ ID NO: 2052499 - RNA, 14 nt, Human
gacaaagacaaauu

SEQ ID NO: 2052500 - RNA, 17 nt, Human
gacaaaggacauuuguu

SEQ ID NO: 2052501 - RNA, 16 nt, Human
gacaaagcugcuaaau

SEQ ID NO: 2052502 - RNA, 18 nt, Human
gacaaagcugcuaaaucu

SEQ ID NO: 2052503 - RNA, 19 nt, Human
gacaaagcugcuaaaucuc

SEQ ID NO: 2052504 - RNA, 20 nt, Human
gacaaagcugcuaaaucucc

SEQ ID NO: 2052505 - RNA, 20 nt, Human
gacaaagccaaacucugcca

SEQ ID NO: 2052506 - RNA, 16 nt, Human
gaauuauuuuuuuucu

SEQ ID NO: 2052507 - RNA, 22 nt, Human
gaauuuuuuucaucuucucugg

SEQ ID NO: 2052508 - RNA, 16 nt, Human
gacaaaaacagccuca

SEQ ID NO: 2052509 - RNA, 17 nt, Human
gacaaaaacagccucac

SEQ ID NO: 2052510 - RNA, 18 nt, Human
gacaaaaacagccucaca

SEQ ID NO: 2052511 - RNA, 20 nt, Human
gacaaaaacagccucacaga

SEQ ID NO: 2052512 - RNA, 15 nt, Human
gacaaaccagaagca

SEQ ID NO: 2052513 - RNA, 20 nt, Human
gaauuuuuuucaucuucucu

SEQ ID NO: 2052514 - RNA, 17 nt, Human
gaauuuuuuauucuugu

SEQ ID NO: 2052515 - RNA, 18 nt, Human
gaauuuuuuauucuugug

SEQ ID NO: 2052516 - RNA, 19 nt, Human
gaauuuuuuauucuuguga

SEQ ID NO: 2052517 - RNA, 22 nt, Human
gaauuuuuuauucuugugaaua

SEQ ID NO: 2052518 - RNA, 16 nt, Human
gaauuuuuuucaucuu

SEQ ID NO: 2052519 - RNA, 15 nt, Human
gaauguuuuccuucu

SEQ ID NO: 2052520 - RNA, 21 nt, Human
gaauauaccccuuaguguuug

SEQ ID NO: 2052521 - RNA, 11 nt, Human
gaauauauuau

SEQ ID NO: 2052522 - RNA, 12 nt, Human
gaauauauuaua

SEQ ID NO: 2052523 - RNA, 18 nt, Human
gaauaugauuaguaaaga

SEQ ID NO: 2052524 - RNA, 19 nt, Human
gaauaugacggaagaacau

SEQ ID NO: 2052525 - RNA, 19 nt, Human
gaauaugagcuuuauguaa

SEQ ID NO: 2052526 - RNA, 22 nt, Human
gaauaugaacggugagcauugu

SEQ ID NO: 2052527 - RNA, 14 nt, Human
gaauaugacagcug

SEQ ID NO: 2052528 - RNA, 15 nt, Human
gaauaugacggaaga

SEQ ID NO: 2052529 - RNA, 17 nt, Human
gaauaugacggaagaac

SEQ ID NO: 2052530 - RNA, 19 nt, Human
gaauaugauuaguaaagaa

SEQ ID NO: 2052531 - RNA, 23 nt, Human
gacauugcggacagccacggcca

SEQ ID NO: 2052532 - RNA, 17 nt, Human
gacauugcggacagcca

SEQ ID NO: 2052533 - RNA, 15 nt, Human
gacacuucagagagc

SEQ ID NO: 2052534 - RNA, 17 nt, Human
gacacuucagagagcug

SEQ ID NO: 2052535 - RNA, 18 nt, Human
gacacuucagagagcugg

SEQ ID NO: 2052536 - RNA, 19 nt, Human
gacacuucagagagcuggu

SEQ ID NO: 2052537 - RNA, 20 nt, Human
gacacuucagagagcuggua

SEQ ID NO: 2052538 - RNA, 23 nt, Human
gacacuucagagagcugguaguu

SEQ ID NO: 2052539 - RNA, 23 nt, Human
gacacuggcucauauuccugcag

SEQ ID NO: 2052540 - RNA, 21 nt, Human
gacacuuuucaugugugauuu

SEQ ID NO: 2052541 - RNA, 17 nt, Human
gacacuugauacuuguu

SEQ ID NO: 2052542 - RNA, 18 nt, Human
gacagcuccuucuguccu

SEQ ID NO: 2052543 - RNA, 17 nt, Human
gacagcuccuucugucc

SEQ ID NO: 2052544 - RNA, 16 nt, Human
gacagcuccuucuguc

SEQ ID NO: 2052545 - RNA, 19 nt, Human
gacagcuccuucuguccua

SEQ ID NO: 2052546 - RNA, 15 nt, Human
gacauguucccuucu

SEQ ID NO: 2052547 - RNA, 16 nt, Human
gacauguucccuucuc

SEQ ID NO: 2052548 - RNA, 14 nt, Human
gacaugugguggga

SEQ ID NO: 2052549 - RNA, 16 nt, Human
gacauguggugggaca

SEQ ID NO: 2052550 - RNA, 22 nt, Human
gacauguggugggacagggacc

SEQ ID NO: 2052551 - RNA, 13 nt, Human
gacauguggaaag

SEQ ID NO: 2052552 - RNA, 18 nt, Human
gacauguggaaagugaau

SEQ ID NO: 2052553 - RNA, 19 nt, Human
gacauguggaaagugaauu

SEQ ID NO: 2052554 - RNA, 23 nt, Human
gacauguggaaagugaauuugaa

SEQ ID NO: 2052555 - RNA, 14 nt, Human
gaccuccagcuguu

SEQ ID NO: 2052556 - RNA, 12 nt, Human
gaccucccccuc

SEQ ID NO: 2052557 - RNA, 14 nt, Human
gaccucccccuccu

SEQ ID NO: 2052558 - RNA, 15 nt, Human
gaccucccccuccuu

SEQ ID NO: 2052559 - RNA, 16 nt, Human
gaccucccccuccuuc

SEQ ID NO: 2052560 - RNA, 17 nt, Human
gaccucccccuccuucc

SEQ ID NO: 2052561 - RNA, 19 nt, Human
gaccucccccuccuuccca

SEQ ID NO: 2052562 - RNA, 13 nt, Human
gaccucugccuga

SEQ ID NO: 2052563 - RNA, 13 nt, Human
gaccucguccucc

SEQ ID NO: 2052564 - RNA, 15 nt, Human
gaccucguccucccc

SEQ ID NO: 2052565 - RNA, 20 nt, Human
gaccccucuggccaggaugg

SEQ ID NO: 2052566 - RNA, 16 nt, Human
gaccccucuggccagg

SEQ ID NO: 2052567 - RNA, 18 nt, Human
gaccccucuggccaggau

SEQ ID NO: 2052568 - RNA, 17 nt, Human
gacccggaggggccugg

SEQ ID NO: 2052569 - RNA, 23 nt, Human
gacccggagcuaacacuggcccc

SEQ ID NO: 2052570 - RNA, 13 nt, Human
gaccccucuggcc

SEQ ID NO: 2052571 - RNA, 15 nt, Human
gaccccucuggccag

SEQ ID NO: 2052572 - RNA, 20 nt, Human
gacccggaggggccuggcag

SEQ ID NO: 2052573 - RNA, 19 nt, Human
gacccggaggggccuggca

SEQ ID NO: 2052574 - RNA, 18 nt, Human
gacccggaggggccuggc

SEQ ID NO: 2052575 - RNA, 15 nt, Human
gacccucuccacccc

SEQ ID NO: 2052576 - RNA, 16 nt, Human
gacccucuccacccca

SEQ ID NO: 2052577 - RNA, 17 nt, Human
gacccucuccaccccau

SEQ ID NO: 2052578 - RNA, 20 nt, Human
gacccucugacccuagcucu

SEQ ID NO: 2052579 - RNA, 21 nt, Human
gaccucaggugauccacccac

SEQ ID NO: 2052580 - RNA, 20 nt, Human
gaccucaggugauccaccca

SEQ ID NO: 2052581 - RNA, 19 nt, Human
gaccucaggugauccaccc

SEQ ID NO: 2052582 - RNA, 21 nt, Human
gaccucaggugagaagcagag

SEQ ID NO: 2052583 - RNA, 18 nt, Human
gaccucaggugagaagca

SEQ ID NO: 2052584 - RNA, 19 nt, Human
gaccucaggugagaagcag

SEQ ID NO: 2052585 - RNA, 13 nt, Human
gagcaggggcagg

SEQ ID NO: 2052586 - RNA, 16 nt, Human
gagcaggggcagggug

SEQ ID NO: 2052587 - RNA, 16 nt, Human
gagcaguccugccuca

SEQ ID NO: 2052588 - RNA, 20 nt, Human
gagcaguccugccucagccu

SEQ ID NO: 2052589 - RNA, 19 nt, Human
gagcaucucuugaggccag

SEQ ID NO: 2052590 - RNA, 20 nt, Human
gagcaucucuugaggccagg

SEQ ID NO: 2052591 - RNA, 22 nt, Human
gagcaucucuugaggccaggag

SEQ ID NO: 2052592 - RNA, 23 nt, Human
gagcaucucuugaggccaggagu

SEQ ID NO: 2052593 - RNA, 18 nt, Human
gagcaucucuugaggcca

SEQ ID NO: 2052594 - RNA, 17 nt, Human
gagccccgaggccuucu

SEQ ID NO: 2052595 - RNA, 17 nt, Human
gagccccacccucagau

SEQ ID NO: 2052596 - RNA, 12 nt, Human
gagccccuccua

SEQ ID NO: 2052597 - RNA, 14 nt, Human
gagccccgaggccu

SEQ ID NO: 2052598 - RNA, 13 nt, Human
gagccccgaggcc

SEQ ID NO: 2052599 - RNA, 16 nt, Human
gagccccacccucaga

SEQ ID NO: 2052600 - RNA, 14 nt, Human
gagccccacacgga

SEQ ID NO: 2052601 - RNA, 16 nt, Human
gagccccacacggagg

SEQ ID NO: 2052602 - RNA, 19 nt, Human
gagcuguuuauggccucag

SEQ ID NO: 2052603 - RNA, 18 nt, Human
gagcuguuuauggccuca

SEQ ID NO: 2052604 - RNA, 16 nt, Human
gagcuguuuauggccu

SEQ ID NO: 2052605 - RNA, 17 nt, Human
gagcuguuuauggccuc

SEQ ID NO: 2052606 - RNA, 13 nt, Human
gagcccuggcagg

SEQ ID NO: 2052607 - RNA, 23 nt, Human
gagcccuggcaggaugacccugc

SEQ ID NO: 2052608 - RNA, 14 nt, Human
gagcccugguggca

SEQ ID NO: 2052609 - RNA, 13 nt, Human
gagcccugguggc

SEQ ID NO: 2052610 - RNA, 16 nt, Human
gagcuggcgucugucu

SEQ ID NO: 2052611 - RNA, 18 nt, Human
gaggggcaacgaagaaaa

SEQ ID NO: 2052612 - RNA, 20 nt, Human
gaggggcaacgaagaaaaaa

SEQ ID NO: 2052613 - RNA, 18 nt, Human
gaggggcagaacagccgc

SEQ ID NO: 2052614 - RNA, 22 nt, Human
gaggggacuauuuaugaaggca

SEQ ID NO: 2052615 - RNA, 13 nt, Human
gaggggagcucug

SEQ ID NO: 2052616 - RNA, 18 nt, Human
gaggggagcucugucugu

SEQ ID NO: 2052617 - RNA, 21 nt, Human
gaggggaggaucacuggagcc

SEQ ID NO: 2052618 - RNA, 21 nt, Human
gaggggacgcugguagagaug

SEQ ID NO: 2052619 - RNA, 15 nt, Human
gagggcccuaccuga

SEQ ID NO: 2052620 - RNA, 20 nt, Human
gaggcugaaagaggccaaug

SEQ ID NO: 2052621 - RNA, 16 nt, Human
gaggcugaggcaagag

SEQ ID NO: 2052622 - RNA, 16 nt, Human
gaggcucuuucugggc

SEQ ID NO: 2052623 - RNA, 22 nt, Human
gaggcugagccuacagaugaac

SEQ ID NO: 2052624 - RNA, 12 nt, Human
gaggcugaggca

SEQ ID NO: 2052625 - RNA, 13 nt, Human
gaggcugaggcag

SEQ ID NO: 2052626 - RNA, 14 nt, Human
gaggcugaggcaga

SEQ ID NO: 2052627 - RNA, 13 nt, Human
gagggcccaggca

SEQ ID NO: 2052628 - RNA, 16 nt, Human
gagggcccaggcaggc

SEQ ID NO: 2052629 - RNA, 18 nt, Human
gaggacaugauggagcgc

SEQ ID NO: 2052630 - RNA, 13 nt, Human
gaggaccacuccu

SEQ ID NO: 2052631 - RNA, 22 nt, Human
gaggaccacuccuguacacuga

SEQ ID NO: 2052632 - RNA, 23 nt, Human
gaggacuuuucuuuguggcuucc

SEQ ID NO: 2052633 - RNA, 20 nt, Human
gaggacuuuucuuuguggcu

SEQ ID NO: 2052634 - RNA, 16 nt, Human
gaggacuuuucuuugu

SEQ ID NO: 2052635 - RNA, 23 nt, Human
gaggacuguugacauccaagcuu

SEQ ID NO: 2052636 - RNA, 15 nt, Human
gaggacgugggcggc

SEQ ID NO: 2052637 - RNA, 16 nt, Human
gaggacgugggcggca

SEQ ID NO: 2052638 - RNA, 18 nt, Human
gaggacgugggcggcaga

SEQ ID NO: 2052639 - RNA, 20 nt, Human
gaggacgugggcggcagaga

SEQ ID NO: 2052640 - RNA, 22 nt, Human
gaggacgugggcggcagagagg

SEQ ID NO: 2052641 - RNA, 23 nt, Human
gaggacugccccgugcagacugg

SEQ ID NO: 2052642 - RNA, 13 nt, Human
gaggagaaacaca

SEQ ID NO: 2052643 - RNA, 9 nt, Human
gaggagaaa

SEQ ID NO: 2052644 - RNA, 12 nt, Human
gaggagaagaau

SEQ ID NO: 2052645 - RNA, 20 nt, Human
gaggagaagaauuuucagac

SEQ ID NO: 2052646 - RNA, 22 nt, Human
gaggagacuagauuuaugaaua

SEQ ID NO: 2052647 - RNA, 22 nt, Human
gaggagaagaauuuucagaccc

SEQ ID NO: 2052648 - RNA, 18 nt, Human
gaggcagggucucacucu

SEQ ID NO: 2052649 - RNA, 14 nt, Human
gaggagagccuggu

SEQ ID NO: 2052650 - RNA, 20 nt, Human
gaggcagggucucacucugu

SEQ ID NO: 2052651 - RNA, 19 nt, Human
gaggcagggucucacucug

SEQ ID NO: 2052652 - RNA, 22 nt, Human
gaggcagggucucacucugucg

SEQ ID NO: 2052653 - RNA, 21 nt, Human
gagauugugccacuucacucc

SEQ ID NO: 2052654 - RNA, 17 nt, Human
gagauuggacggccuga

SEQ ID NO: 2052655 - RNA, 15 nt, Human
gagauuauguucuuu

SEQ ID NO: 2052656 - RNA, 14 nt, Human
gagauucagacugu

SEQ ID NO: 2052657 - RNA, 18 nt, Human
gagagggaaacgugcccu

SEQ ID NO: 2052658 - RNA, 12 nt, Human
gagaugccuccc

SEQ ID NO: 2052659 - RNA, 22 nt, Human
gagaugccuccaccgcugccua

SEQ ID NO: 2052660 - RNA, 23 nt, Human
gagaugccuccaccgcugccuaa

SEQ ID NO: 2052661 - RNA, 20 nt, Human
gagagcugggugucaagagg

SEQ ID NO: 2052662 - RNA, 14 nt, Human
gagagcuggggaag

SEQ ID NO: 2052663 - RNA, 13 nt, Human
gagagcuggugcc

SEQ ID NO: 2052664 - RNA, 14 nt, Human
gagagcuggugccc

SEQ ID NO: 2052665 - RNA, 17 nt, Human
gagagcuggugcccgga

SEQ ID NO: 2052666 - RNA, 23 nt, Human
gagagcuggggaagcuucuuaaa

SEQ ID NO: 2052667 - RNA, 18 nt, Human
gagagcuguucccaaauu

SEQ ID NO: 2052668 - RNA, 23 nt, Human
gagagcuuucuguccuuuuggca

SEQ ID NO: 2052669 - RNA, 19 nt, Human
gagaggaaugccuguguga

SEQ ID NO: 2052670 - RNA, 14 nt, Human
gagaggagaaacac

SEQ ID NO: 2052671 - RNA, 15 nt, Human
gagaggagaaacaca

SEQ ID NO: 2052672 - RNA, 16 nt, Human
gagaggacgugggcgg

SEQ ID NO: 2052673 - RNA, 17 nt, Human
gagaggacgugggcggc

SEQ ID NO: 2052674 - RNA, 15 nt, Human
gagaggcaauggcca

SEQ ID NO: 2052675 - RNA, 14 nt, Human
gagaggcaaugauu

SEQ ID NO: 2052676 - RNA, 19 nt, Human
gagagggacagcccacuga

SEQ ID NO: 2052677 - RNA, 12 nt, Human
gagaggccauga

SEQ ID NO: 2052678 - RNA, 13 nt, Human
gagagcugggugu

SEQ ID NO: 2052679 - RNA, 15 nt, Human
gagagcuagcagcag

SEQ ID NO: 2052680 - RNA, 21 nt, Human
gagagcuagcagcagggaggg

SEQ ID NO: 2052681 - RNA, 20 nt, Human
gagaccgucgggggcugagg

SEQ ID NO: 2052682 - RNA, 16 nt, Human
gagagcgccugccccu

SEQ ID NO: 2052683 - RNA, 22 nt, Human
gagagcgccugccccucccaga

SEQ ID NO: 2052684 - RNA, 15 nt, Human
gagacucagagggag

SEQ ID NO: 2052685 - RNA, 18 nt, Human
gagacuccgucucaagga

SEQ ID NO: 2052686 - RNA, 16 nt, Human
gagacuccaugagaag

SEQ ID NO: 2052687 - RNA, 17 nt, Human
gagacucagggccccag

SEQ ID NO: 2052688 - RNA, 21 nt, Human
gagacucagggccccagcacu

SEQ ID NO: 2052689 - RNA, 18 nt, Human
gacuuuuugguggaugua

SEQ ID NO: 2052690 - RNA, 21 nt, Human
gacuuuuugguggauguaaau

SEQ ID NO: 2052691 - RNA, 23 nt, Human
gacuuuuugguggauguaaauaa

SEQ ID NO: 2052692 - RNA, 14 nt, Human
gagaaaaaagaagu

SEQ ID NO: 2052693 - RNA, 22 nt, Human
gagaaggggaggaccucugggc

SEQ ID NO: 2052694 - RNA, 15 nt, Human
gagaaggggaggagg

SEQ ID NO: 2052695 - RNA, 23 nt, Human
gagaaggcaggaauguguggcag

SEQ ID NO: 2052696 - RNA, 15 nt, Human
gagaagggauggagg

SEQ ID NO: 2052697 - RNA, 12 nt, Human
gagaaggcagga

SEQ ID NO: 2052698 - RNA, 13 nt, Human
gagaaggcaggaa

SEQ ID NO: 2052699 - RNA, 20 nt, Human
gagaagugccccugcugccu

SEQ ID NO: 2052700 - RNA, 22 nt, Human
gagaagugccccugcugccucc

SEQ ID NO: 2052701 - RNA, 14 nt, Human
gagaagucaaacau

SEQ ID NO: 2052702 - RNA, 18 nt, Human
gagaagucaaacauuuca

SEQ ID NO: 2052703 - RNA, 16 nt, Human
gagaagugccccugcu

SEQ ID NO: 2052704 - RNA, 17 nt, Human
gagaagugccccugcug

SEQ ID NO: 2052705 - RNA, 17 nt, Human
gagaaggggaagcacuc

SEQ ID NO: 2052706 - RNA, 19 nt, Human
gagaagggggucaaagcaa

SEQ ID NO: 2052707 - RNA, 22 nt, Human
gagaagggggucaaagcaagga

SEQ ID NO: 2052708 - RNA, 15 nt, Human
gagaagguccuuaau

SEQ ID NO: 2052709 - RNA, 19 nt, Human
gagaccuggcacuggaugc

SEQ ID NO: 2052710 - RNA, 19 nt, Human
gagacggagucccaccuug

SEQ ID NO: 2052711 - RNA, 16 nt, Human
gagacggagucccacc

SEQ ID NO: 2052712 - RNA, 14 nt, Human
gagacggaguccca

SEQ ID NO: 2052713 - RNA, 23 nt, Human
gagaaugaaagggcccagagagg

SEQ ID NO: 2052714 - RNA, 15 nt, Human
gagaaugaaagggcc

SEQ ID NO: 2052715 - RNA, 23 nt, Human
gagaauauuagcuuuacuguuug

SEQ ID NO: 2052716 - RNA, 16 nt, Human
gagaauaauucuuuga

SEQ ID NO: 2052717 - RNA, 13 nt, Human
gagaauagaagga

SEQ ID NO: 2052718 - RNA, 14 nt, Human
gagaauagaaggaa

SEQ ID NO: 2052719 - RNA, 16 nt, Human
gagaauagaaggaaac

SEQ ID NO: 2052720 - RNA, 22 nt, Human
gagaauagaaggaaacuagcuu

SEQ ID NO: 2052721 - RNA, 23 nt, Human
gagaagugccccugcugccuccc

SEQ ID NO: 2052722 - RNA, 19 nt, Human
gcaagugagagcugggugu

SEQ ID NO: 2052723 - RNA, 18 nt, Human
gcaagugagagcugggug

SEQ ID NO: 2052724 - RNA, 20 nt, Human
gcacucagaagacacugaug

SEQ ID NO: 2052725 - RNA, 10 nt, Human
gcagaaacag

SEQ ID NO: 2052726 - RNA, 11 nt, Human
gcagaaacaga

SEQ ID NO: 2052727 - RNA, 23 nt, Human
gcagaaagcaaaugugaccugug

SEQ ID NO: 2052728 - RNA, 13 nt, Human
gcagaaagcagag

SEQ ID NO: 2052729 - RNA, 16 nt, Human
gcagaaagcagaggcu

SEQ ID NO: 2052730 - RNA, 17 nt, Human
gcagaaagcagaggcug

SEQ ID NO: 2052731 - RNA, 18 nt, Human
gcagaaagcagaggcugg

SEQ ID NO: 2052732 - RNA, 16 nt, Human
gcagaaaauugccuaa

SEQ ID NO: 2052733 - RNA, 21 nt, Human
gcagaaaagcaccugccgacc

SEQ ID NO: 2052734 - RNA, 20 nt, Human
gcagaaaagcaccugccgac

SEQ ID NO: 2052735 - RNA, 15 nt, Human
gcagaaaagcaccug

SEQ ID NO: 2052736 - RNA, 16 nt, Human
gcagaaaagcaccugc

SEQ ID NO: 2052737 - RNA, 17 nt, Human
gcagaaaagcaccugcc

SEQ ID NO: 2052738 - RNA, 18 nt, Human
gcagaaaagcaccugccg

SEQ ID NO: 2052739 - RNA, 12 nt, Human
gcacuccagccu

SEQ ID NO: 2052740 - RNA, 14 nt, Human
gcacuccagccugg

SEQ ID NO: 2052741 - RNA, 15 nt, Human
gcacuccagccuggg

SEQ ID NO: 2052742 - RNA, 14 nt, Human
gcagaacugagcuc

SEQ ID NO: 2052743 - RNA, 16 nt, Human
gcagaacugagcuccu

SEQ ID NO: 2052744 - RNA, 21 nt, Human
gcagaacguauugguccagcu

SEQ ID NO: 2052745 - RNA, 20 nt, Human
gcagaacaguuaagcagccg

SEQ ID NO: 2052746 - RNA, 14 nt, Human
gcagaacccuggug

SEQ ID NO: 2052747 - RNA, 16 nt, Human
gcagaacccuggugag

SEQ ID NO: 2052748 - RNA, 23 nt, Human
gcagaacagccgcuccugucugc

SEQ ID NO: 2052749 - RNA, 18 nt, Human
gcagaacugagcuccucu

SEQ ID NO: 2052750 - RNA, 12 nt, Human
gcagaggcagcg

SEQ ID NO: 2052751 - RNA, 13 nt, Human
gcagccaagcucc

SEQ ID NO: 2052752 - RNA, 17 nt, Human
gcagccaagcuccuugg

SEQ ID NO: 2052753 - RNA, 20 nt, Human
gcagccaagcuccuugggag

SEQ ID NO: 2052754 - RNA, 15 nt, Human
gcagcaucugcuaau

SEQ ID NO: 2052755 - RNA, 19 nt, Human
gcagcaucuucacuucuaa

SEQ ID NO: 2052756 - RNA, 21 nt, Human
gcagccaaacccaugaggcaa

SEQ ID NO: 2052757 - RNA, 17 nt, Human
gcagcaugaccugugac

SEQ ID NO: 2052758 - RNA, 14 nt, Human
gcagcauaugagga

SEQ ID NO: 2052759 - RNA, 17 nt, Human
gcagcagugagucucuu

SEQ ID NO: 2052760 - RNA, 21 nt, Human
gcagcagugagucucuucaga

SEQ ID NO: 2052761 - RNA, 22 nt, Human
gcagaggcuggaggcagggccu

SEQ ID NO: 2052762 - RNA, 16 nt, Human
gcagagggcagaggcu

SEQ ID NO: 2052763 - RNA, 18 nt, Human
gcagagggcagaggcugg

SEQ ID NO: 2052764 - RNA, 19 nt, Human
gcagagggcagaggcugga

SEQ ID NO: 2052765 - RNA, 11 nt, Human
gcagaggcugg

SEQ ID NO: 2052766 - RNA, 19 nt, Human
gcagaggcuggaggcaggg

SEQ ID NO: 2052767 - RNA, 21 nt, Human
gcagaggcuggaggcagggcc

SEQ ID NO: 2052768 - RNA, 12 nt, Human
gcagaggcuggc

SEQ ID NO: 2052769 - RNA, 14 nt, Human
gcagaggcuggccu

SEQ ID NO: 2052770 - RNA, 17 nt, Human
gcagaggcuggccucag

SEQ ID NO: 2052771 - RNA, 18 nt, Human
gcagaggcuggccucaga

SEQ ID NO: 2052772 - RNA, 19 nt, Human
gcagaggcuggccucagac

SEQ ID NO: 2052773 - RNA, 15 nt, Human
gcagcucuccccuuc

SEQ ID NO: 2052774 - RNA, 18 nt, Human
gcagcccaccccucaaca

SEQ ID NO: 2052775 - RNA, 13 nt, Human
gcacuccagccug

SEQ ID NO: 2052776 - RNA, 15 nt, Human
gcagccagcucucag

SEQ ID NO: 2052777 - RNA, 16 nt, Human
gcagccagcucucagc

SEQ ID NO: 2052778 - RNA, 17 nt, Human
gcagccagcucucagcc

SEQ ID NO: 2052779 - RNA, 18 nt, Human
gcagccagcucucagcca

SEQ ID NO: 2052780 - RNA, 12 nt, Human
gcagccaggcug

SEQ ID NO: 2052781 - RNA, 13 nt, Human
gcagccaggcugc

SEQ ID NO: 2052782 - RNA, 14 nt, Human
gcagccaggcugcc

SEQ ID NO: 2052783 - RNA, 17 nt, Human
gcagccaggcugccaag

SEQ ID NO: 2052784 - RNA, 13 nt, Human
gcagccagcccag

SEQ ID NO: 2052785 - RNA, 15 nt, Human
gcagccagcccagcc

SEQ ID NO: 2052786 - RNA, 16 nt, Human
gcagccagcccagccc

SEQ ID NO: 2052787 - RNA, 17 nt, Human
gcagccagcccagccca

SEQ ID NO: 2052788 - RNA, 13 nt, Human
gcagccagcucuc

SEQ ID NO: 2052789 - RNA, 21 nt, Human
gcagccagcccagcccagcug

SEQ ID NO: 2052790 - RNA, 23 nt, Human
gcagccagcccagcccagcuggu

SEQ ID NO: 2052791 - RNA, 21 nt, Human
gcagugaugcuggaugcuccu

SEQ ID NO: 2052792 - RNA, 14 nt, Human
gcaguuggccagag

SEQ ID NO: 2052793 - RNA, 22 nt, Human
gcaguuggccagagagccuggu

SEQ ID NO: 2052794 - RNA, 20 nt, Human
gcagcugagaaaaugaguga

SEQ ID NO: 2052795 - RNA, 14 nt, Human
gcagcugccagaga

SEQ ID NO: 2052796 - RNA, 15 nt, Human
gcagcugccagagaa

SEQ ID NO: 2052797 - RNA, 14 nt, Human
gcagcugauuuuaa

SEQ ID NO: 2052798 - RNA, 15 nt, Human
gcagcugauuuuaac

SEQ ID NO: 2052799 - RNA, 17 nt, Human
gcagcugauuuuaacaa

SEQ ID NO: 2052800 - RNA, 18 nt, Human
gcagcugauuuuaacaau

SEQ ID NO: 2052801 - RNA, 16 nt, Human
gcagucuacccaccuc

SEQ ID NO: 2052802 - RNA, 18 nt, Human
gcagucucggguggcuag

SEQ ID NO: 2052803 - RNA, 15 nt, Human
gcagucucucuuacc

SEQ ID NO: 2052804 - RNA, 22 nt, Human
gcagucucucuuacccuucugu

SEQ ID NO: 2052805 - RNA, 16 nt, Human
gcagucuggaggggca

SEQ ID NO: 2052806 - RNA, 12 nt, Human
gcagucuggagg

SEQ ID NO: 2052807 - RNA, 13 nt, Human
gcagucuggaggg

SEQ ID NO: 2052808 - RNA, 14 nt, Human
gcagucuggagggg

SEQ ID NO: 2052809 - RNA, 15 nt, Human
gcagucuggaggggc

SEQ ID NO: 2052810 - RNA, 21 nt, Human
gcagugaauugugaccaaguu

SEQ ID NO: 2052811 - RNA, 14 nt, Human
gcagugaauuguga

SEQ ID NO: 2052812 - RNA, 18 nt, Human
gcagugacgugcaccugu

SEQ ID NO: 2052813 - RNA, 18 nt, Human
gcagugacuguggccaug

SEQ ID NO: 2052814 - RNA, 22 nt, Human
gcagugacuguggccauggucc

SEQ ID NO: 2052815 - RNA, 20 nt, Human
gcagugagccaagauugcgc

SEQ ID NO: 2052816 - RNA, 21 nt, Human
gcagugagccgcaucuucucc

SEQ ID NO: 2052817 - RNA, 14 nt, Human
gcagugagcugaga

SEQ ID NO: 2052818 - RNA, 14 nt, Human
gcagugagcugugu

SEQ ID NO: 2052819 - RNA, 22 nt, Human
gcagugagggguauaucugggc

SEQ ID NO: 2052820 - RNA, 18 nt, Human
gcagugagucucuucaga

SEQ ID NO: 2052821 - RNA, 12 nt, Human
gcauccaggcac

SEQ ID NO: 2052822 - RNA, 17 nt, Human
gcauccauguguggacu

SEQ ID NO: 2052823 - RNA, 12 nt, Human
gcauccauuccu

SEQ ID NO: 2052824 - RNA, 14 nt, Human
gcauccauuccuca

SEQ ID NO: 2052825 - RNA, 15 nt, Human
gcauccauuccucag

SEQ ID NO: 2052826 - RNA, 16 nt, Human
gcauccauuccucagg

SEQ ID NO: 2052827 - RNA, 18 nt, Human
gcauccauuccucaggga

SEQ ID NO: 2052828 - RNA, 21 nt, Human
gcauccauuccucagggacag

SEQ ID NO: 2052829 - RNA, 17 nt, Human
gcauccguaguucccug

SEQ ID NO: 2052830 - RNA, 19 nt, Human
gcauccguaguucccugaa

SEQ ID NO: 2052831 - RNA, 18 nt, Human
gcauccguaguucccuga

SEQ ID NO: 2052832 - RNA, 15 nt, Human
gcauccucaguuccu

SEQ ID NO: 2052833 - RNA, 20 nt, Human
gcauccucaguuccugcagc

SEQ ID NO: 2052834 - RNA, 21 nt, Human
gcauccucaguuccugcagca

SEQ ID NO: 2052835 - RNA, 20 nt, Human
gcaucccaguggccucaacc

SEQ ID NO: 2052836 - RNA, 23 nt, Human
gcaucccaguggccucaacccuc

SEQ ID NO: 2052837 - RNA, 14 nt, Human
gcaucccaguggcc

SEQ ID NO: 2052838 - RNA, 15 nt, Human
gcaucccaguggccu

SEQ ID NO: 2052839 - RNA, 16 nt, Human
gcaucccaguggccuc

SEQ ID NO: 2052840 - RNA, 17 nt, Human
gcaucccaguggccuca

SEQ ID NO: 2052841 - RNA, 13 nt, Human
gcaucccagggga

SEQ ID NO: 2052842 - RNA, 14 nt, Human
gcaucccaggggac

SEQ ID NO: 2052843 - RNA, 15 nt, Human
gcaucccaggggacc

SEQ ID NO: 2052844 - RNA, 16 nt, Human
gcaucccaggggacca

SEQ ID NO: 2052845 - RNA, 19 nt, Human
gcaucccaggggaccacac

SEQ ID NO: 2052846 - RNA, 21 nt, Human
gcaucccaggggaccacaccu

SEQ ID NO: 2052847 - RNA, 17 nt, Human
gcaucccugaggcugga

SEQ ID NO: 2052848 - RNA, 20 nt, Human
gcaucccugaggcuggacuc

SEQ ID NO: 2052849 - RNA, 12 nt, Human
gcaucuaaacuu

SEQ ID NO: 2052850 - RNA, 15 nt, Human
gcaucuaaacuuuaa

SEQ ID NO: 2052851 - RNA, 16 nt, Human
gcaucuaaacuuuaau

SEQ ID NO: 2052852 - RNA, 19 nt, Human
gcaucuaaacuuuaauaug

SEQ ID NO: 2052853 - RNA, 20 nt, Human
gcaucuaaacuuuaauaugu

SEQ ID NO: 2052854 - RNA, 21 nt, Human
gcaucuaaacuuuaauaugua

SEQ ID NO: 2052855 - RNA, 22 nt, Human
gcauggcguagagggugcugcc

SEQ ID NO: 2052856 - RNA, 23 nt, Human
gcauggcguagagggugcugccc

SEQ ID NO: 2052857 - RNA, 13 nt, Human
gcauggcuccagu

SEQ ID NO: 2052858 - RNA, 14 nt, Human
gcauggcuccaguc

SEQ ID NO: 2052859 - RNA, 13 nt, Human
gcauccuggcacc

SEQ ID NO: 2052860 - RNA, 15 nt, Human
gcauggcuccagucu

SEQ ID NO: 2052861 - RNA, 21 nt, Human
gcauggcuccagucugcugcc

SEQ ID NO: 2052862 - RNA, 22 nt, Human
gcauggcuccagucugcugccc

SEQ ID NO: 2052863 - RNA, 22 nt, Human
gcaugguauuugagacauucca

SEQ ID NO: 2052864 - RNA, 21 nt, Human
gcaugggugaagggagagcca

SEQ ID NO: 2052865 - RNA, 18 nt, Human
gcaugggggccucagggc

SEQ ID NO: 2052866 - RNA, 15 nt, Human
gcauggguuuuguag

SEQ ID NO: 2052867 - RNA, 16 nt, Human
gcauggguuuuguagg

SEQ ID NO: 2052868 - RNA, 19 nt, Human
gcaugguggcgcaagccug

SEQ ID NO: 2052869 - RNA, 13 nt, Human
gcaugguggcaug

SEQ ID NO: 2052870 - RNA, 14 nt, Human
gcauggugcaugcc

SEQ ID NO: 2052871 - RNA, 15 nt, Human
gcauuuacuuugugu

SEQ ID NO: 2052872 - RNA, 12 nt, Human
gcauguguauuu

SEQ ID NO: 2052873 - RNA, 20 nt, Human
gcauguguauuuccagugca

SEQ ID NO: 2052874 - RNA, 21 nt, Human
gcauguguauuuccagugcaa

SEQ ID NO: 2052875 - RNA, 17 nt, Human
gcaaccuguaagacuga

SEQ ID NO: 2052876 - RNA, 20 nt, Human
gcaaccuccgccucuugggu

SEQ ID NO: 2052877 - RNA, 19 nt, Human
gcaaccuccgccucuuggg

SEQ ID NO: 2052878 - RNA, 16 nt, Human
gcaacccccagccugc

SEQ ID NO: 2052879 - RNA, 15 nt, Human
gcaacccccagccug

SEQ ID NO: 2052880 - RNA, 14 nt, Human
gcaacccccagccu

SEQ ID NO: 2052881 - RNA, 20 nt, Human
gcaaccacaggcagcauuua

SEQ ID NO: 2052882 - RNA, 15 nt, Human
gcaaccagagcacug

SEQ ID NO: 2052883 - RNA, 16 nt, Human
gcaaccagagcacugu

SEQ ID NO: 2052884 - RNA, 17 nt, Human
gcaaccagagcacugua

SEQ ID NO: 2052885 - RNA, 18 nt, Human
gcaaccagagcacuguau

SEQ ID NO: 2052886 - RNA, 19 nt, Human
gcaaccagagcacuguaua

SEQ ID NO: 2052887 - RNA, 18 nt, Human
gcaaaauuauagaaguuu

SEQ ID NO: 2052888 - RNA, 23 nt, Human
gcaaaauuauagaaguuuagauu

SEQ ID NO: 2052889 - RNA, 13 nt, Human
gcaacaggcuggg

SEQ ID NO: 2052890 - RNA, 15 nt, Human
gcaacaggcugggcu

SEQ ID NO: 2052891 - RNA, 14 nt, Human
gcaacaggcugggc

SEQ ID NO: 2052892 - RNA, 21 nt, Human
gcaaaaggcaguggggcuggg

SEQ ID NO: 2052893 - RNA, 21 nt, Human
gcaaaagguucacuaaagcag

SEQ ID NO: 2052894 - RNA, 20 nt, Human
gcaaaagguucacuaaagca

SEQ ID NO: 2052895 - RNA, 19 nt, Human
gcaacaggcugggcuucag

SEQ ID NO: 2052896 - RNA, 16 nt, Human
gcaacaggcugggcuu

SEQ ID NO: 2052897 - RNA, 17 nt, Human
gcaacaguagcauagga

SEQ ID NO: 2052898 - RNA, 23 nt, Human
gcaacaugcuucaugaaaauccu

SEQ ID NO: 2052899 - RNA, 18 nt, Human
gcaacaucuagcaaaugu

SEQ ID NO: 2052900 - RNA, 15 nt, Human
gcaagugagagcugg

SEQ ID NO: 2052901 - RNA, 16 nt, Human
gcaagugagagcuggg

SEQ ID NO: 2052902 - RNA, 12 nt, Human
gauucuucugcu

SEQ ID NO: 2052903 - RNA, 15 nt, Human
gauucuucugcuuca

SEQ ID NO: 2052904 - RNA, 13 nt, Human
gauucuucugcuu

SEQ ID NO: 2052905 - RNA, 20 nt, Human
gauucuucugcuucagccuc

SEQ ID NO: 2052906 - RNA, 19 nt, Human
gauuuaauaacauaacaaa

SEQ ID NO: 2052907 - RNA, 19 nt, Human
gauuuacagccucacuuga

SEQ ID NO: 2052908 - RNA, 14 nt, Human
gauuuaauuugcca

SEQ ID NO: 2052909 - RNA, 15 nt, Human
gauuuaauuugccaa

SEQ ID NO: 2052910 - RNA, 16 nt, Human
gauuuaauuugccaaa

SEQ ID NO: 2052911 - RNA, 20 nt, Human
gauuuaauuugccaaaauaa

SEQ ID NO: 2052912 - RNA, 23 nt, Human
gauuuaauuugccaaaauaaugu

SEQ ID NO: 2052913 - RNA, 14 nt, Human
gauuuauuuuguua

SEQ ID NO: 2052914 - RNA, 17 nt, Human
gcaaaaacgaaagcugg

SEQ ID NO: 2052915 - RNA, 17 nt, Human
gcaaaagaugcuucuca

SEQ ID NO: 2052916 - RNA, 22 nt, Human
gcaaaagaugcuucucacugcc

SEQ ID NO: 2052917 - RNA, 14 nt, Human
gcaaaaaggcagga

SEQ ID NO: 2052918 - RNA, 15 nt, Human
gauuucaagccugcc

SEQ ID NO: 2052919 - RNA, 18 nt, Human
gauggaaccgcaggaagc

SEQ ID NO: 2052920 - RNA, 19 nt, Human
gauggaaccgcaggaagcu

SEQ ID NO: 2052921 - RNA, 20 nt, Human
gauggaaccgcaggaagcug

SEQ ID NO: 2052922 - RNA, 22 nt, Human
gauggaaccgcaggaagcugcu

SEQ ID NO: 2052923 - RNA, 21 nt, Human
gauggaaguugcagugagcug

SEQ ID NO: 2052924 - RNA, 17 nt, Human
gauacaugucuuucucc

SEQ ID NO: 2052925 - RNA, 21 nt, Human
gauacauuuguauguugugaa

SEQ ID NO: 2052926 - RNA, 19 nt, Human
gauaccaagaugccaucug

SEQ ID NO: 2052927 - RNA, 20 nt, Human
gauacuggaaguuuugcauu

SEQ ID NO: 2052928 - RNA, 16 nt, Human
gauacuggaaguuuug

SEQ ID NO: 2052929 - RNA, 19 nt, Human
gauacuggaaguuuugcau

SEQ ID NO: 2052930 - RNA, 15 nt, Human
gauacugcccggggc

SEQ ID NO: 2052931 - RNA, 17 nt, Human
gauaccagguugaaaga

SEQ ID NO: 2052932 - RNA, 20 nt, Human
gauaccagguugaaagaccu

SEQ ID NO: 2052933 - RNA, 21 nt, Human
gauaccaucagcaaagaauuu

SEQ ID NO: 2052934 - RNA, 17 nt, Human
gauacucugucagaugg

SEQ ID NO: 2052935 - RNA, 14 nt, Human
gauacuggaaguuu

SEQ ID NO: 2052936 - RNA, 19 nt, Human
gauccaagcuggucccacu

SEQ ID NO: 2052937 - RNA, 17 nt, Human
gauccaagcugguccca

SEQ ID NO: 2052938 - RNA, 16 nt, Human
gauccaagcugguccc

SEQ ID NO: 2052939 - RNA, 12 nt, Human
gauccaagcugg

SEQ ID NO: 2052940 - RNA, 21 nt, Human
gaucaaaaucuguagagcagg

SEQ ID NO: 2052941 - RNA, 16 nt, Human
gaucaaauucuacaac

SEQ ID NO: 2052942 - RNA, 19 nt, Human
gauccacccaccucagccu

SEQ ID NO: 2052943 - RNA, 18 nt, Human
gauccacccaccucagcc

SEQ ID NO: 2052944 - RNA, 21 nt, Human
gauccaagcuggucccacuca

SEQ ID NO: 2052945 - RNA, 14 nt, Human
gauccacacacaga

SEQ ID NO: 2052946 - RNA, 15 nt, Human
gauccacacacagag

SEQ ID NO: 2052947 - RNA, 21 nt, Human
gauccacccaccucagccucc

SEQ ID NO: 2052948 - RNA, 20 nt, Human
gauccacccaccucagccuc

SEQ ID NO: 2052949 - RNA, 22 nt, Human
gauccacccaccucagccuccc

SEQ ID NO: 2052950 - RNA, 18 nt, Human
gauccacacacagaggaa

SEQ ID NO: 2052951 - RNA, 16 nt, Human
gauccacacacagagg

SEQ ID NO: 2052952 - RNA, 17 nt, Human
gauccacacacagagga

SEQ ID NO: 2052953 - RNA, 19 nt, Human
gauccacacacagaggaag

SEQ ID NO: 2052954 - RNA, 14 nt, Human
gauagaaauaaaua

SEQ ID NO: 2052955 - RNA, 16 nt, Human
gauagaaauaaauagc

SEQ ID NO: 2052956 - RNA, 20 nt, Human
gauagaaauaaauagcuaua

SEQ ID NO: 2052957 - RNA, 17 nt, Human
gauagaagaaaaaagaa

SEQ ID NO: 2052958 - RNA, 14 nt, Human
gauagaagaacugc

SEQ ID NO: 2052959 - RNA, 16 nt, Human
gauagaagaacugcaa

SEQ ID NO: 2052960 - RNA, 14 nt, Human
gauagaagauguuu

SEQ ID NO: 2052961 - RNA, 16 nt, Human
gauagaagauguuugc

SEQ ID NO: 2052962 - RNA, 17 nt, Human
gauagaagauguuugcu

SEQ ID NO: 2052963 - RNA, 18 nt, Human
gauacuuugauauuuuca

SEQ ID NO: 2052964 - RNA, 13 nt, Human
gauacuuuacaug

SEQ ID NO: 2052965 - RNA, 20 nt, Human
gauacuggcaaagcagaaaa

SEQ ID NO: 2052966 - RNA, 15 nt, Human
gauacuuguuuucaa

SEQ ID NO: 2052967 - RNA, 19 nt, Human
gauauuuauggggggagaa

SEQ ID NO: 2052968 - RNA, 17 nt, Human
gauauugugaaguacau

SEQ ID NO: 2052969 - RNA, 13 nt, Human
gauauuuaagaaa

SEQ ID NO: 2052970 - RNA, 15 nt, Human
gauauuuaagaaaau

SEQ ID NO: 2052971 - RNA, 16 nt, Human
gauauuuaagaaaaua

SEQ ID NO: 2052972 - RNA, 20 nt, Human
gauauuuaagaaaauacaau

SEQ ID NO: 2052973 - RNA, 23 nt, Human
gauauuuaagaaaauacaauaaa

SEQ ID NO: 2052974 - RNA, 16 nt, Human
gauauugugaaguaca

SEQ ID NO: 2052975 - RNA, 23 nt, Human
gauauuuauauuuuuauuuuauu

SEQ ID NO: 2052976 - RNA, 19 nt, Human
gauauuuucaacgcagccc

SEQ ID NO: 2052977 - RNA, 12 nt, Human
gauauuuucaaa

SEQ ID NO: 2052978 - RNA, 18 nt, Human
gauauuuucaaauuguau

SEQ ID NO: 2052979 - RNA, 19 nt, Human
gauauuuucaaauuguauc

SEQ ID NO: 2052980 - RNA, 20 nt, Human
gauauuuucaaauuguaucu

SEQ ID NO: 2052981 - RNA, 16 nt, Human
gauauuuccaucauua

SEQ ID NO: 2052982 - RNA, 17 nt, Human
gauauuuccaucauuaa

SEQ ID NO: 2052983 - RNA, 23 nt, Human
gauauuuucaacgcagcccugcu

SEQ ID NO: 2052984 - RNA, 22 nt, Human
gauauuuucaacgcagcccugc

SEQ ID NO: 2052985 - RNA, 21 nt, Human
gauauuuucaacgcagcccug

SEQ ID NO: 2052986 - RNA, 20 nt, Human
gaucaaaagguuaauaaagu

SEQ ID NO: 2052987 - RNA, 20 nt, Human
gauauuuucuuccaagcaaa

SEQ ID NO: 2052988 - RNA, 23 nt, Human
gaucaaaagguuaauaaaguaau

SEQ ID NO: 2052989 - RNA, 22 nt, Human
gaucaaaccccgaccaccugcc

SEQ ID NO: 2052990 - RNA, 19 nt, Human
gaucucuugagccugggag

SEQ ID NO: 2052991 - RNA, 12 nt, Human
gaucugaacaga

SEQ ID NO: 2052992 - RNA, 19 nt, Human
gaucugaacagaaauacca

SEQ ID NO: 2052993 - RNA, 22 nt, Human
gaucccacuccuaggacauguu

SEQ ID NO: 2052994 - RNA, 17 nt, Human
gaucugaugcaagcaag

SEQ ID NO: 2052995 - RNA, 13 nt, Human
gaucugacugcac

SEQ ID NO: 2052996 - RNA, 14 nt, Human
gaucugacugcacg

SEQ ID NO: 2052997 - RNA, 18 nt, Human
gaucucuugagccuggga

SEQ ID NO: 2052998 - RNA, 17 nt, Human
gaucccagcucacguca

SEQ ID NO: 2052999 - RNA, 19 nt, Human
gaucccagcucacgucaca

SEQ ID NO: 2053000 - RNA, 14 nt, Human
gauccaccugucuc

SEQ ID NO: 2053001 - RNA, 18 nt, Human
gauccaccugucucagcc

SEQ ID NO: 2053002 - RNA, 19 nt, Human
gauccaccugucucagccu

SEQ ID NO: 2053003 - RNA, 22 nt, Human
gauggaaaaaccacccccaaau

SEQ ID NO: 2053004 - RNA, 15 nt, Human
gauggaaaaggaaga

SEQ ID NO: 2053005 - RNA, 17 nt, Human
gauggaaaaggaagacu

SEQ ID NO: 2053006 - RNA, 14 nt, Human
gauggaaacaaagu

SEQ ID NO: 2053007 - RNA, 15 nt, Human
gauggaaacaaagug

SEQ ID NO: 2053008 - RNA, 16 nt, Human
gauggaaacaaagugg

SEQ ID NO: 2053009 - RNA, 20 nt, Human
gauggaacccuuuuggcccc

SEQ ID NO: 2053010 - RNA, 22 nt, Human
gauggaacccuuuuggcccccg

SEQ ID NO: 2053011 - RNA, 17 nt, Human
gauggaaccgcaggaag

SEQ ID NO: 2053012 - RNA, 20 nt, Human
gaugauuugcuaucaaaaua

SEQ ID NO: 2053013 - RNA, 15 nt, Human
gaugcuucugggaga

SEQ ID NO: 2053014 - RNA, 24 nt, Human
gaugcuugccuagggccuggucca

SEQ ID NO: 2053015 - RNA, 13 nt, Human
gaugauuguacag

SEQ ID NO: 2053016 - RNA, 13 nt, Human
gaugauccuaggc

SEQ ID NO: 2053017 - RNA, 14 nt, Human
gaugauccuaggca

SEQ ID NO: 2053018 - RNA, 20 nt, Human
gaugaucagcuguuugucau

SEQ ID NO: 2053019 - RNA, 22 nt, Human
gaugauccaugaguuugcccug

SEQ ID NO: 2053020 - RNA, 23 nt, Human
gaugauccaugaguuugcccugg

SEQ ID NO: 2053021 - RNA, 19 nt, Human
gaugaucagcuguuuguca

SEQ ID NO: 2053022 - RNA, 22 nt, Human
gcccaggccccugccacccugg

SEQ ID NO: 2053023 - RNA, 13 nt, Human
gcccacuggauca

SEQ ID NO: 2053024 - RNA, 21 nt, Human
gcccaggccccugccacccug

SEQ ID NO: 2053025 - RNA, 20 nt, Human
gcccaggccccugccacccu

SEQ ID NO: 2053026 - RNA, 12 nt, Human
gcccaggccccu

SEQ ID NO: 2053027 - RNA, 11 nt, Human
gcccaggcccc

SEQ ID NO: 2053028 - RNA, 14 nt, Human
gcccaggcaggcca

SEQ ID NO: 2053029 - RNA, 15 nt, Human
gcccaggagagccag

SEQ ID NO: 2053030 - RNA, 11 nt, Human
gcccaggcagg

SEQ ID NO: 2053031 - RNA, 15 nt, Human
gcccaggauggcuuu

SEQ ID NO: 2053032 - RNA, 10 nt, Human
gcccaggaga

SEQ ID NO: 2053033 - RNA, 11 nt, Human
gcccaggagac

SEQ ID NO: 2053034 - RNA, 18 nt, Human
gcccaggagagccagccc

SEQ ID NO: 2053035 - RNA, 20 nt, Human
gcccaggaauuugaagcugc

SEQ ID NO: 2053036 - RNA, 18 nt, Human
gcauuuacuuuguguuca

SEQ ID NO: 2053037 - RNA, 17 nt, Human
gcauuuacuuugaauuu

SEQ ID NO: 2053038 - RNA, 16 nt, Human
gcauuuagcacaaaaa

SEQ ID NO: 2053039 - RNA, 13 nt, Human
gccauuaccaugg

SEQ ID NO: 2053040 - RNA, 16 nt, Human
gccauuaccauggaga

SEQ ID NO: 2053041 - RNA, 14 nt, Human
gccauugcacucca

SEQ ID NO: 2053042 - RNA, 15 nt, Human
gccauugcacuccag

SEQ ID NO: 2053043 - RNA, 18 nt, Human
gccauugcacuccagccu

SEQ ID NO: 2053044 - RNA, 19 nt, Human
gccauugcacuccagccug

SEQ ID NO: 2053045 - RNA, 21 nt, Human
gccauugcacuccagccuggg

SEQ ID NO: 2053046 - RNA, 17 nt, Human
gccauugccaccaggag

SEQ ID NO: 2053047 - RNA, 18 nt, Human
gccauugccaccaggaga

SEQ ID NO: 2053048 - RNA, 19 nt, Human
gccauugccaccaggagaa

SEQ ID NO: 2053049 - RNA, 18 nt, Human
gccauuaccauggagaca

SEQ ID NO: 2053050 - RNA, 23 nt, Human
gcccacuucaggguucuccucuc

SEQ ID NO: 2053051 - RNA, 13 nt, Human
gcccacuucaggg

SEQ ID NO: 2053052 - RNA, 13 nt, Human
gcccacuucugcc

SEQ ID NO: 2053053 - RNA, 21 nt, Human
gcccacgcuggagugcaguga

SEQ ID NO: 2053054 - RNA, 19 nt, Human
gcccacgcuggagugcagu

SEQ ID NO: 2053055 - RNA, 23 nt, Human
gcccacgcuggagugcagugagc

SEQ ID NO: 2053056 - RNA, 17 nt, Human
gccccaaacaaauaugc

SEQ ID NO: 2053057 - RNA, 19 nt, Human
gccccaaacaaauaugcaa

SEQ ID NO: 2053058 - RNA, 18 nt, Human
gccccaaacaaauaugca

SEQ ID NO: 2053059 - RNA, 20 nt, Human
gccccaaacgggcugcccug

SEQ ID NO: 2053060 - RNA, 15 nt, Human
gccccaaaggaagcu

SEQ ID NO: 2053061 - RNA, 18 nt, Human
gccccaacccaaaccugg

SEQ ID NO: 2053062 - RNA, 19 nt, Human
gccccaacccaaaccugga

SEQ ID NO: 2053063 - RNA, 20 nt, Human
gccccaacccaaaccuggag

SEQ ID NO: 2053064 - RNA, 21 nt, Human
gccccaacccaaaccuggaga

SEQ ID NO: 2053065 - RNA, 22 nt, Human
gccccaacccaaaccuggagau

SEQ ID NO: 2053066 - RNA, 14 nt, Human
gccccaacuccugg

SEQ ID NO: 2053067 - RNA, 15 nt, Human
gccccaacuccugga

SEQ ID NO: 2053068 - RNA, 16 nt, Human
gccccaacuccuggaa

SEQ ID NO: 2053069 - RNA, 17 nt, Human
gccccaacuccuggaag

SEQ ID NO: 2053070 - RNA, 18 nt, Human
gccccaacuccuggaagc

SEQ ID NO: 2053071 - RNA, 11 nt, Human
gccccaccacc

SEQ ID NO: 2053072 - RNA, 13 nt, Human
gccccaccaccua

SEQ ID NO: 2053073 - RNA, 12 nt, Human
gccccacccagg

SEQ ID NO: 2053074 - RNA, 15 nt, Human
gccccacccaggagg

SEQ ID NO: 2053075 - RNA, 12 nt, Human
gcccccagacgc

SEQ ID NO: 2053076 - RNA, 14 nt, Human
gccccaccaccuag

SEQ ID NO: 2053077 - RNA, 15 nt, Human
gccccaccaccuagg

SEQ ID NO: 2053078 - RNA, 18 nt, Human
gccccaccaccuaggcca

SEQ ID NO: 2053079 - RNA, 20 nt, Human
gccccaccaccuaggccacu

SEQ ID NO: 2053080 - RNA, 23 nt, Human
gccccaccaccuaggccacuccu

SEQ ID NO: 2053081 - RNA, 11 nt, Human
gccccacccag

SEQ ID NO: 2053082 - RNA, 16 nt, Human
gccccugcugguucag

SEQ ID NO: 2053083 - RNA, 15 nt, Human
gccccugcugguuca

SEQ ID NO: 2053084 - RNA, 12 nt, Human
gccccugcuggu

SEQ ID NO: 2053085 - RNA, 18 nt, Human
gcccccagcuguggguac

SEQ ID NO: 2053086 - RNA, 13 nt, Human
gccucgaacuggc

SEQ ID NO: 2053087 - RNA, 16 nt, Human
gccucgaacuggcugc

SEQ ID NO: 2053088 - RNA, 14 nt, Human
gccucugggacugg

SEQ ID NO: 2053089 - RNA, 23 nt, Human
gccuccucucucaguuuuuauau

SEQ ID NO: 2053090 - RNA, 20 nt, Human
gccuccucuaacaggggcug

SEQ ID NO: 2053091 - RNA, 22 nt, Human
gccuccucuaacaggggcuggu

SEQ ID NO: 2053092 - RNA, 13 nt, Human
gccuccucugucc

SEQ ID NO: 2053093 - RNA, 16 nt, Human
gccuccucuguccagg

SEQ ID NO: 2053094 - RNA, 22 nt, Human
gccucaucuauaacaugcauuu

SEQ ID NO: 2053095 - RNA, 18 nt, Human
gccuccaccccccagaac

SEQ ID NO: 2053096 - RNA, 12 nt, Human
gccuccaccgcu

SEQ ID NO: 2053097 - RNA, 18 nt, Human
gccuccaccgcugccuaa

SEQ ID NO: 2053098 - RNA, 17 nt, Human
gccuagcacucacaugc

SEQ ID NO: 2053099 - RNA, 18 nt, Human
gccuagcacucacaugcu

SEQ ID NO: 2053100 - RNA, 23 nt, Human
gccuagcacucacaugcuggaca

SEQ ID NO: 2053101 - RNA, 17 nt, Human
gccuacaggagugagca

SEQ ID NO: 2053102 - RNA, 14 nt, Human
gccuacagaugaac

SEQ ID NO: 2053103 - RNA, 22 nt, Human
gccuaaucccugggcauugcuu

SEQ ID NO: 2053104 - RNA, 17 nt, Human
gccuagauccacacaca

SEQ ID NO: 2053105 - RNA, 20 nt, Human
gccuagauccacacacagag

SEQ ID NO: 2053106 - RNA, 23 nt, Human
gccuagauccacacacagaggaa

SEQ ID NO: 2053107 - RNA, 17 nt, Human
gcccgucuucagccuag

SEQ ID NO: 2053108 - RNA, 18 nt, Human
gcccgucuucagccuagc

SEQ ID NO: 2053109 - RNA, 14 nt, Human
gcccgucuucagcc

SEQ ID NO: 2053110 - RNA, 15 nt, Human
gcccgucuucagccu

SEQ ID NO: 2053111 - RNA, 16 nt, Human
gcccgucuucagccua

SEQ ID NO: 2053112 - RNA, 16 nt, Human
gcccuguggaagggac

SEQ ID NO: 2053113 - RNA, 17 nt, Human
gcccuguggaagggacu

SEQ ID NO: 2053114 - RNA, 23 nt, Human
gcccuguggaagggacuaggagc

SEQ ID NO: 2053115 - RNA, 21 nt, Human
gcccuuccaugucgccucugc

SEQ ID NO: 2053116 - RNA, 12 nt, Human
gcccuuccaugu

SEQ ID NO: 2053117 - RNA, 21 nt, Human
gcccuucagcauccucaguuc

SEQ ID NO: 2053118 - RNA, 16 nt, Human
gcccuucacaguguuu

SEQ ID NO: 2053119 - RNA, 12 nt, Human
gcccuuccucuc

SEQ ID NO: 2053120 - RNA, 22 nt, Human
gcccuuccaugucgccucugca

SEQ ID NO: 2053121 - RNA, 15 nt, Human
gcccuuccucuccac

SEQ ID NO: 2053122 - RNA, 14 nt, Human
gcccuuccucucca

SEQ ID NO: 2053123 - RNA, 22 nt, Human
gccgcuccugucugccagccag

SEQ ID NO: 2053124 - RNA, 20 nt, Human
gccgcuccugucugccagcc

SEQ ID NO: 2053125 - RNA, 21 nt, Human
gccgcuccugucugccagcca

SEQ ID NO: 2053126 - RNA, 15 nt, Human
gccgcuccugucugc

SEQ ID NO: 2053127 - RNA, 19 nt, Human
gccgcuccugucugccagc

SEQ ID NO: 2053128 - RNA, 22 nt, Human
gccggcacccacaagugccacu

SEQ ID NO: 2053129 - RNA, 16 nt, Human
gccuacaggagugagc

SEQ ID NO: 2053130 - RNA, 14 nt, Human
gccuaaucccuggg

SEQ ID NO: 2053131 - RNA, 16 nt, Human
gccuaaucccugggca

SEQ ID NO: 2053132 - RNA, 23 nt, Human
gccuaaucccugggcauugcuuu

SEQ ID NO: 2053133 - RNA, 18 nt, Human
gcucaggggcguguggcu

SEQ ID NO: 2053134 - RNA, 15 nt, Human
gcucagaagugacca

SEQ ID NO: 2053135 - RNA, 12 nt, Human
gcucagaacaca

SEQ ID NO: 2053136 - RNA, 14 nt, Human
gcucagaacacauu

SEQ ID NO: 2053137 - RNA, 18 nt, Human
gcucaagcaauccuccug

SEQ ID NO: 2053138 - RNA, 23 nt, Human
gcucaagcaauccuccugaguga

SEQ ID NO: 2053139 - RNA, 13 nt, Human
gcucaggaggcuu

SEQ ID NO: 2053140 - RNA, 15 nt, Human
gcucaggaggcuugg

SEQ ID NO: 2053141 - RNA, 13 nt, Human
gcucaggaguuug

SEQ ID NO: 2053142 - RNA, 16 nt, Human
gcucaggaggcuugga

SEQ ID NO: 2053143 - RNA, 17 nt, Human
gcucaggaggcuuggaa

SEQ ID NO: 2053144 - RNA, 20 nt, Human
gcuaggaccccuccaugugg

SEQ ID NO: 2053145 - RNA, 22 nt, Human
gcuaggaccccuccaugugggc

SEQ ID NO: 2053146 - RNA, 20 nt, Human
gcuaggugggccagccccuc

SEQ ID NO: 2053147 - RNA, 21 nt, Human
gcuaggugggccagccccucc

SEQ ID NO: 2053148 - RNA, 17 nt, Human
gcuaggugggccagccc

SEQ ID NO: 2053149 - RNA, 18 nt, Human
gcuaggugggccagcccc

SEQ ID NO: 2053150 - RNA, 19 nt, Human
gcuaggugggccagccccu

SEQ ID NO: 2053151 - RNA, 15 nt, Human
gcuaggguggcccuu

SEQ ID NO: 2053152 - RNA, 19 nt, Human
gcuaggugcuaauuaauaa

SEQ ID NO: 2053153 - RNA, 14 nt, Human
gcuaggugggccag

SEQ ID NO: 2053154 - RNA, 14 nt, Human
gcuaggguggcccu

SEQ ID NO: 2053155 - RNA, 16 nt, Human
gcuaguugggcuuccu

SEQ ID NO: 2053156 - RNA, 14 nt, Human
gcuaguugggcuuc

SEQ ID NO: 2053157 - RNA, 14 nt, Human
gcuaguugaaucua

SEQ ID NO: 2053158 - RNA, 18 nt, Human
gcuauucaguaauaacuc

SEQ ID NO: 2053159 - RNA, 16 nt, Human
gcuauuucccaagcug

SEQ ID NO: 2053160 - RNA, 21 nt, Human
gcuauuucccaagcuggagug

SEQ ID NO: 2053161 - RNA, 12 nt, Human
gcucaaaggcac

SEQ ID NO: 2053162 - RNA, 14 nt, Human
gcucaaaggcacag

SEQ ID NO: 2053163 - RNA, 16 nt, Human
gcucaaaggcacagug

SEQ ID NO: 2053164 - RNA, 21 nt, Human
gcucaaaggcacagugaaggc

SEQ ID NO: 2053165 - RNA, 18 nt, Human
gcuaagugaaaaggucau

SEQ ID NO: 2053166 - RNA, 13 nt, Human
gcuaagugaaaag

SEQ ID NO: 2053167 - RNA, 22 nt, Human
gcuaagugauccucccaccuca

SEQ ID NO: 2053168 - RNA, 18 nt, Human
gcuaagugauccucccac

SEQ ID NO: 2053169 - RNA, 23 nt, Human
gcgauucuucugcuucagccucc

SEQ ID NO: 2053170 - RNA, 18 nt, Human
gccuucguuaacugugua

SEQ ID NO: 2053171 - RNA, 13 nt, Human
gcgcaaaacugaa

SEQ ID NO: 2053172 - RNA, 12 nt, Human
gcgcaagccugu

SEQ ID NO: 2053173 - RNA, 13 nt, Human
gcgcaagccugua

SEQ ID NO: 2053174 - RNA, 23 nt, Human
gcgcaagccuguaaucccagcua

SEQ ID NO: 2053175 - RNA, 21 nt, Human
gcgcaagccuguaaucccagc

SEQ ID NO: 2053176 - RNA, 22 nt, Human
gcgcaagccuguaaucccagcu

SEQ ID NO: 2053177 - RNA, 22 nt, Human
gcgauucuucugcuucagccuc

SEQ ID NO: 2053178 - RNA, 14 nt, Human
gccuugaagccacu

SEQ ID NO: 2053179 - RNA, 15 nt, Human
gccuugaagccacug

SEQ ID NO: 2053180 - RNA, 17 nt, Human
gccuggcuccgcugugu

SEQ ID NO: 2053181 - RNA, 19 nt, Human
gccuggcuccgcugugugg

SEQ ID NO: 2053182 - RNA, 19 nt, Human
gccucugucauaucuucac

SEQ ID NO: 2053183 - RNA, 21 nt, Human
gccucugucauaucuucacaa

SEQ ID NO: 2053184 - RNA, 13 nt, Human
gccucugggccuc

SEQ ID NO: 2053185 - RNA, 15 nt, Human
gccucgaacuccugg

SEQ ID NO: 2053186 - RNA, 16 nt, Human
gccucgaacuccuggg

SEQ ID NO: 2053187 - RNA, 19 nt, Human
gccucgaacuccugggcuc

SEQ ID NO: 2053188 - RNA, 20 nt, Human
gccucgaacuccugggcuca

SEQ ID NO: 2053189 - RNA, 21 nt, Human
gccucgaacuccugggcucaa

SEQ ID NO: 2053190 - RNA, 13 nt, Human
gccuggcuucugg

SEQ ID NO: 2053191 - RNA, 16 nt, Human
gccugggcaacagagc

SEQ ID NO: 2053192 - RNA, 19 nt, Human
gccugggcaacagagcaag

SEQ ID NO: 2053193 - RNA, 20 nt, Human
gccugggcaacagagcaaga

SEQ ID NO: 2053194 - RNA, 20 nt, Human
gccugggcaacacagcgaga

SEQ ID NO: 2053195 - RNA, 22 nt, Human
gccugggcaacauagugagacc

SEQ ID NO: 2053196 - RNA, 12 nt, Human
gccugggcaaga

SEQ ID NO: 2053197 - RNA, 14 nt, Human
gccugugcugcccg

SEQ ID NO: 2053198 - RNA, 15 nt, Human
gccugugcugcccgu

SEQ ID NO: 2053199 - RNA, 19 nt, Human
gccugugccucugggacug

SEQ ID NO: 2053200 - RNA, 13 nt, Human
gccugugcuguga

SEQ ID NO: 2053201 - RNA, 14 nt, Human
gccugugcugugac

SEQ ID NO: 2053202 - RNA, 18 nt, Human
gccuguggcaguaaagag

SEQ ID NO: 2053203 - RNA, 19 nt, Human
gccuguggcaguaaagaga

SEQ ID NO: 2053204 - RNA, 22 nt, Human
gccuguggcaguaaagagaaac

SEQ ID NO: 2053205 - RNA, 22 nt, Human
gccuguggcaucuuugccuugg

SEQ ID NO: 2053206 - RNA, 16 nt, Human
gccugugcugcccguc

SEQ ID NO: 2053207 - RNA, 23 nt, Human
gccugugcugcccgucuucagcc

SEQ ID NO: 2053208 - RNA, 17 nt, Human
gccuguucagcuccagc

SEQ ID NO: 2053209 - RNA, 16 nt, Human
gccuguucagcuccag

SEQ ID NO: 2053210 - RNA, 14 nt, Human
gccuguucagcucc

SEQ ID NO: 2053211 - RNA, 15 nt, Human
gccuguucagcucca

SEQ ID NO: 2053212 - RNA, 16 nt, Human
gccuucucugaaggac

SEQ ID NO: 2053213 - RNA, 15 nt, Human
gccuucucugaagga

SEQ ID NO: 2053214 - RNA, 21 nt, Human
gccuucuugugaucuugcucu

SEQ ID NO: 2053215 - RNA, 22 nt, Human
gccuucuucggggaacuccugg

SEQ ID NO: 2053216 - RNA, 23 nt, Human
gccuucuucggggaacuccugga

SEQ ID NO: 2053217 - RNA, 18 nt, Human
gccuucuuauucucacuc

SEQ ID NO: 2053218 - RNA, 19 nt, Human
gccuucuuauucucacucc

SEQ ID NO: 2053219 - RNA, 20 nt, Human
gccuucuuauucucacucca

SEQ ID NO: 2053220 - RNA, 21 nt, Human
gccuucuuauucucacuccac

SEQ ID NO: 2053221 - RNA, 23 nt, Human
gccuucuuauucucacuccacca

SEQ ID NO: 2053222 - RNA, 12 nt, Human
gcggcagagagg

SEQ ID NO: 2053223 - RNA, 22 nt, Human
gcggcugagucaugaucucccu

SEQ ID NO: 2053224 - RNA, 23 nt, Human
gcggcugagucaugaucucccug

SEQ ID NO: 2053225 - RNA, 21 nt, Human
gcggcuacucagcagcccucc

SEQ ID NO: 2053226 - RNA, 22 nt, Human
gcggcuacucagcagcccuccu

SEQ ID NO: 2053227 - RNA, 13 nt, Human
gcggcuacucagc

SEQ ID NO: 2053228 - RNA, 19 nt, Human
gcggcuacucagcagcccu

SEQ ID NO: 2053229 - RNA, 20 nt, Human
gcggcuacucagcagcccuc

SEQ ID NO: 2053230 - RNA, 16 nt, Human
gcggccuuuggcuuca

SEQ ID NO: 2053231 - RNA, 20 nt, Human
gcggccuuuguugcucagca

SEQ ID NO: 2053232 - RNA, 14 nt, Human
gcggcaggagggag

SEQ ID NO: 2053233 - RNA, 22 nt, Human
gcggcaggagggagguuuguga

SEQ ID NO: 2053234 - RNA, 18 nt, Human
gcguuagaaugaggagga

SEQ ID NO: 2053235 - RNA, 16 nt, Human
gcguuacuaauuggcc

SEQ ID NO: 2053236 - RNA, 22 nt, Human
gcguuagaaugaggaggaagga

SEQ ID NO: 2053237 - RNA, 14 nt, Human
gcuaaggcaccagc

SEQ ID NO: 2053238 - RNA, 15 nt, Human
gcuaaggcaccagcc

SEQ ID NO: 2053239 - RNA, 19 nt, Human
gcgggaccgguacagaaag

SEQ ID NO: 2053240 - RNA, 20 nt, Human
gcgggaccgguacagaaagg

SEQ ID NO: 2053241 - RNA, 23 nt, Human
gcgggacgagacccuacaggaga

SEQ ID NO: 2053242 - RNA, 15 nt, Human
gcggcuggcagccca

SEQ ID NO: 2053243 - RNA, 15 nt, Human
gcggcuggugcaggg

SEQ ID NO: 2053244 - RNA, 13 nt, Human
gcgggaaggaggg

SEQ ID NO: 2053245 - RNA, 14 nt, Human
gcgggaaggagggu

SEQ ID NO: 2053246 - RNA, 19 nt, Human
gcuguaucccaugagccuc

SEQ ID NO: 2053247 - RNA, 17 nt, Human
gcuguaucccaugagcc

SEQ ID NO: 2053248 - RNA, 13 nt, Human
gcuguaggugugc

SEQ ID NO: 2053249 - RNA, 18 nt, Human
gcugugaguguaagugug

SEQ ID NO: 2053250 - RNA, 22 nt, Human
gcugugaguguaagugugagua

SEQ ID NO: 2053251 - RNA, 20 nt, Human
gcuguuggcugggggccuca

SEQ ID NO: 2053252 - RNA, 16 nt, Human
gcuguuggcugggggc

SEQ ID NO: 2053253 - RNA, 15 nt, Human
gcuguuggcuggggg

SEQ ID NO: 2053254 - RNA, 13 nt, Human
gcugugcucugga

SEQ ID NO: 2053255 - RNA, 14 nt, Human
gcugugcuaugaau

SEQ ID NO: 2053256 - RNA, 15 nt, Human
gcugugcuaugaauu

SEQ ID NO: 2053257 - RNA, 16 nt, Human
gcugugcuaugaauuu

SEQ ID NO: 2053258 - RNA, 15 nt, Human
gcugugccucugccu

SEQ ID NO: 2053259 - RNA, 14 nt, Human
gcugugccucugcc

SEQ ID NO: 2053260 - RNA, 16 nt, Human
gcugugccucugccug

SEQ ID NO: 2053261 - RNA, 21 nt, Human
gcugugcgcugacaaccaccg

SEQ ID NO: 2053262 - RNA, 16 nt, Human
gcugugcucuggacag

SEQ ID NO: 2053263 - RNA, 15 nt, Human
gcugugcucuggaca

SEQ ID NO: 2053264 - RNA, 18 nt, Human
gcugugcucuggacaggc

SEQ ID NO: 2053265 - RNA, 13 nt, Human
gcugguaguuagu

SEQ ID NO: 2053266 - RNA, 21 nt, Human
gcugguagagauggaggagga

SEQ ID NO: 2053267 - RNA, 23 nt, Human
gcugguagagauggaggaggagg

SEQ ID NO: 2053268 - RNA, 15 nt, Human
gcugguaagggccaa

SEQ ID NO: 2053269 - RNA, 18 nt, Human
gcugguaagggccaaguc

SEQ ID NO: 2053270 - RNA, 23 nt, Human
gcugguaagggccaagucccacc

SEQ ID NO: 2053271 - RNA, 14 nt, Human
gcugguagagaugg

SEQ ID NO: 2053272 - RNA, 15 nt, Human
gcugguagagaugga

SEQ ID NO: 2053273 - RNA, 17 nt, Human
gcugguagagauggagg

SEQ ID NO: 2053274 - RNA, 18 nt, Human
gcugguagagauggagga

SEQ ID NO: 2053275 - RNA, 23 nt, Human
gcuggcuguuggcugggggccuc

SEQ ID NO: 2053276 - RNA, 20 nt, Human
gcuggcuguuggcugggggc

SEQ ID NO: 2053277 - RNA, 19 nt, Human
gcuggcugcccagaccccu

SEQ ID NO: 2053278 - RNA, 14 nt, Human
gcugggcagguugg

SEQ ID NO: 2053279 - RNA, 12 nt, Human
gcugggcccaga

SEQ ID NO: 2053280 - RNA, 14 nt, Human
gcugggcccagaag

SEQ ID NO: 2053281 - RNA, 13 nt, Human
gcugggcccagag

SEQ ID NO: 2053282 - RNA, 14 nt, Human
gcugggcccagagg

SEQ ID NO: 2053283 - RNA, 15 nt, Human
gcugggcccagaggc

SEQ ID NO: 2053284 - RNA, 16 nt, Human
gcugggcccagaggca

SEQ ID NO: 2053285 - RNA, 18 nt, Human
gcugggcccagaggcaca

SEQ ID NO: 2053286 - RNA, 19 nt, Human
gcugggcccagaggcacag

SEQ ID NO: 2053287 - RNA, 20 nt, Human
gcugggcccagaggcacagc

SEQ ID NO: 2053288 - RNA, 21 nt, Human
gcugggcccagaggcacagcc

SEQ ID NO: 2053289 - RNA, 22 nt, Human
gcugcucuuaugccauuuguuu

SEQ ID NO: 2053290 - RNA, 14 nt, Human
gcuggcgugcagug

SEQ ID NO: 2053291 - RNA, 11 nt, Human
gcuggcugccu

SEQ ID NO: 2053292 - RNA, 13 nt, Human
gcuggcugcagug

SEQ ID NO: 2053293 - RNA, 14 nt, Human
gcuggcugcaguga

SEQ ID NO: 2053294 - RNA, 20 nt, Human
gcuggcugccuuagaaccuu

SEQ ID NO: 2053295 - RNA, 14 nt, Human
gcuggcugccuuag

SEQ ID NO: 2053296 - RNA, 19 nt, Human
gcuggcuguuggcuggggg

SEQ ID NO: 2053297 - RNA, 18 nt, Human
gcuggcuguuggcugggg

SEQ ID NO: 2053298 - RNA, 21 nt, Human
gcuggcggcuacucagcagcc

SEQ ID NO: 2053299 - RNA, 18 nt, Human
gcuggcgugcaguggugc

SEQ ID NO: 2053300 - RNA, 15 nt, Human
gcuggcgugcagugg

SEQ ID NO: 2053301 - RNA, 16 nt, Human
gcugagaggagagaga

SEQ ID NO: 2053302 - RNA, 22 nt, Human
gcugagaggcagacuucccuga

SEQ ID NO: 2053303 - RNA, 17 nt, Human
gcugagcaccaggggau

SEQ ID NO: 2053304 - RNA, 23 nt, Human
gcugagggugagugggugaauaa

SEQ ID NO: 2053305 - RNA, 14 nt, Human
gcugaggugggagg

SEQ ID NO: 2053306 - RNA, 17 nt, Human
gcugaggucucuugagg

SEQ ID NO: 2053307 - RNA, 15 nt, Human
gcugaggugagagga

SEQ ID NO: 2053308 - RNA, 19 nt, Human
gcugaggugagaggaucag

SEQ ID NO: 2053309 - RNA, 11 nt, Human
gcugagcccug

SEQ ID NO: 2053310 - RNA, 12 nt, Human
gcugagcccugg

SEQ ID NO: 2053311 - RNA, 14 nt, Human
gcugaggcaauucu

SEQ ID NO: 2053312 - RNA, 19 nt, Human
gcugaggauuucaagccug

SEQ ID NO: 2053313 - RNA, 20 nt, Human
gcugaggauuucaagccugc

SEQ ID NO: 2053314 - RNA, 18 nt, Human
gcugaggauuucaagccu

SEQ ID NO: 2053315 - RNA, 15 nt, Human
gcugaggcaauucua

SEQ ID NO: 2053316 - RNA, 13 nt, Human
gcugaggcagaag

SEQ ID NO: 2053317 - RNA, 15 nt, Human
gcugaggcagaagaa

SEQ ID NO: 2053318 - RNA, 16 nt, Human
gcugaggcagaagaau

SEQ ID NO: 2053319 - RNA, 15 nt, Human
gcugaggcaggagga

SEQ ID NO: 2053320 - RNA, 18 nt, Human
gcugcacccucaggcagg

SEQ ID NO: 2053321 - RNA, 19 nt, Human
gcugcacccucaggcaggu

SEQ ID NO: 2053322 - RNA, 20 nt, Human
gcugcaagugacaucucuuu

SEQ ID NO: 2053323 - RNA, 13 nt, Human
gcugccuccccaa

SEQ ID NO: 2053324 - RNA, 12 nt, Human
gcugccucccug

SEQ ID NO: 2053325 - RNA, 19 nt, Human
gcugccucccuguccaccc

SEQ ID NO: 2053326 - RNA, 21 nt, Human
gcugccuccccaacccugccc

SEQ ID NO: 2053327 - RNA, 23 nt, Human
gcugccuccccaacccugccccu

SEQ ID NO: 2053328 - RNA, 15 nt, Human
gcugccuccccaacc

SEQ ID NO: 2053329 - RNA, 17 nt, Human
gcugccuccccaacccu

SEQ ID NO: 2053330 - RNA, 19 nt, Human
gcugccuccccaacccugc

SEQ ID NO: 2053331 - RNA, 20 nt, Human
gcugccuccccaacccugcc

SEQ ID NO: 2053332 - RNA, 18 nt, Human
gcugccucucgguggcca

SEQ ID NO: 2053333 - RNA, 16 nt, Human
gcugccucucccauca

SEQ ID NO: 2053334 - RNA, 13 nt, Human
gcugccuguucag

SEQ ID NO: 2053335 - RNA, 12 nt, Human
gcugccuguuca

SEQ ID NO: 2053336 - RNA, 20 nt, Human
gcugccuguaguuaggaaau

SEQ ID NO: 2053337 - RNA, 17 nt, Human
gcugccuguucagcucc

SEQ ID NO: 2053338 - RNA, 15 nt, Human
gcugccugagcaccu

SEQ ID NO: 2053339 - RNA, 18 nt, Human
gcugccugagcaccuccc

SEQ ID NO: 2053340 - RNA, 22 nt, Human
gcugccugagcaccucccagcc

SEQ ID NO: 2053341 - RNA, 23 nt, Human
gcugccugagcaccucccagccc

SEQ ID NO: 2053342 - RNA, 12 nt, Human
gcugccuguagu

SEQ ID NO: 2053343 - RNA, 13 nt, Human
gcugccuguaguu

SEQ ID NO: 2053344 - RNA, 15 nt, Human
gcugccuguaguuag

SEQ ID NO: 2053345 - RNA, 16 nt, Human
gcugccuguaguuagg

SEQ ID NO: 2053346 - RNA, 19 nt, Human
gcugccuguaguuaggaaa

SEQ ID NO: 2053347 - RNA, 12 nt, Human
gcugccucacuu

SEQ ID NO: 2053348 - RNA, 19 nt, Human
gcugcccuccaucccgaca

SEQ ID NO: 2053349 - RNA, 21 nt, Human
gcugcccuccaucccgacaug

SEQ ID NO: 2053350 - RNA, 14 nt, Human
gcugcccuccaucc

SEQ ID NO: 2053351 - RNA, 16 nt, Human
gcugcccuaggcuccg

SEQ ID NO: 2053352 - RNA, 15 nt, Human
gcugcccuccauccc

SEQ ID NO: 2053353 - RNA, 15 nt, Human
gcugcccuaggcucc

SEQ ID NO: 2053354 - RNA, 21 nt, Human
gcugcccgucuucagccuagc

SEQ ID NO: 2053355 - RNA, 16 nt, Human
gcugcccgucuucagc

SEQ ID NO: 2053356 - RNA, 19 nt, Human
gcugcccgucuucagccua

SEQ ID NO: 2053357 - RNA, 20 nt, Human
gcugcccgucuucagccuag

SEQ ID NO: 2053358 - RNA, 17 nt, Human
gcugccccuggcucuga

SEQ ID NO: 2053359 - RNA, 14 nt, Human
gcugccccucccug

SEQ ID NO: 2053360 - RNA, 18 nt, Human
gcugccccucccugccag

SEQ ID NO: 2053361 - RNA, 22 nt, Human
gcugccccucccugccagcacc

SEQ ID NO: 2053362 - RNA, 14 nt, Human
gcugcccccgcuca

SEQ ID NO: 2053363 - RNA, 21 nt, Human
gcugcccccgcucaugggccc

SEQ ID NO: 2053364 - RNA, 20 nt, Human
ggaaaggccagcuggcagca

SEQ ID NO: 2053365 - RNA, 22 nt, Human
ggaaaggccagcuggcagcaga

SEQ ID NO: 2053366 - RNA, 12 nt, Human
ggaaaggcucag

SEQ ID NO: 2053367 - RNA, 18 nt, Human
ggaaaucucaccccaucc

SEQ ID NO: 2053368 - RNA, 19 nt, Human
ggaaaggcucagucucagg

SEQ ID NO: 2053369 - RNA, 14 nt, Human
ggaagcccagcucc

SEQ ID NO: 2053370 - RNA, 16 nt, Human
ggaagcccagcuccag

SEQ ID NO: 2053371 - RNA, 22 nt, Human
ggacagugcuucagccugaggc

SEQ ID NO: 2053372 - RNA, 23 nt, Human
ggacagugcuucagccugaggcu

SEQ ID NO: 2053373 - RNA, 18 nt, Human
ggacagugcuucagccug

SEQ ID NO: 2053374 - RNA, 19 nt, Human
ggacagugcuucagccuga

SEQ ID NO: 2053375 - RNA, 20 nt, Human
ggacagugcuucagccugag

SEQ ID NO: 2053376 - RNA, 21 nt, Human
ggacagugcuucagccugagg

SEQ ID NO: 2053377 - RNA, 14 nt, Human
ggacagugcuucag

SEQ ID NO: 2053378 - RNA, 19 nt, Human
ggacaguccugggagaacc

SEQ ID NO: 2053379 - RNA, 16 nt, Human
ggacagugcuucagcc

SEQ ID NO: 2053380 - RNA, 17 nt, Human
ggacagugcuucagccu

SEQ ID NO: 2053381 - RNA, 13 nt, Human
ggacaguccuggg

SEQ ID NO: 2053382 - RNA, 14 nt, Human
ggacaguccuggga

SEQ ID NO: 2053383 - RNA, 15 nt, Human
ggacaguccugggag

SEQ ID NO: 2053384 - RNA, 16 nt, Human
ggacaguccugggaga

SEQ ID NO: 2053385 - RNA, 14 nt, Human
ggacauauucauuu

SEQ ID NO: 2053386 - RNA, 17 nt, Human
ggacagggaggugaccc

SEQ ID NO: 2053387 - RNA, 22 nt, Human
ggacaggcccggcgcgguggcu

SEQ ID NO: 2053388 - RNA, 11 nt, Human
ggacaggcccg

SEQ ID NO: 2053389 - RNA, 22 nt, Human
ggacagggcauggccagguggc

SEQ ID NO: 2053390 - RNA, 15 nt, Human
ggacagggcauggcc

SEQ ID NO: 2053391 - RNA, 15 nt, Human
ggacaggucugggag

SEQ ID NO: 2053392 - RNA, 20 nt, Human
ggacaggucugggagaggca

SEQ ID NO: 2053393 - RNA, 13 nt, Human
ggacacagcucuu

SEQ ID NO: 2053394 - RNA, 13 nt, Human
ggacaccaggagu

SEQ ID NO: 2053395 - RNA, 22 nt, Human
ggaaucaagaugucagacuggc

SEQ ID NO: 2053396 - RNA, 13 nt, Human
ggaauauuuuauu

SEQ ID NO: 2053397 - RNA, 15 nt, Human
ggaauauuuuauuca

SEQ ID NO: 2053398 - RNA, 19 nt, Human
ggaauauuuuauucaaggu

SEQ ID NO: 2053399 - RNA, 16 nt, Human
ggaaucaacagggcag

SEQ ID NO: 2053400 - RNA, 17 nt, Human
ggaaucaacagggcagc

SEQ ID NO: 2053401 - RNA, 18 nt, Human
ggaaucaacagggcagca

SEQ ID NO: 2053402 - RNA, 12 nt, Human
ggacacagcucu

SEQ ID NO: 2053403 - RNA, 13 nt, Human
ggacacacaaggu

SEQ ID NO: 2053404 - RNA, 21 nt, Human
ggacacacaaggugcaaauca

SEQ ID NO: 2053405 - RNA, 13 nt, Human
ggaauaugagcuu

SEQ ID NO: 2053406 - RNA, 22 nt, Human
ggaauauuccccuaucucuaga

SEQ ID NO: 2053407 - RNA, 23 nt, Human
ggaauauaaggaaagcaauaaau

SEQ ID NO: 2053408 - RNA, 12 nt, Human
ggaauacagugu

SEQ ID NO: 2053409 - RNA, 14 nt, Human
ggaauagcauguca

SEQ ID NO: 2053410 - RNA, 17 nt, Human
ggaauagcaugucacua

SEQ ID NO: 2053411 - RNA, 20 nt, Human
ggaagcggagguugcaggga

SEQ ID NO: 2053412 - RNA, 22 nt, Human
ggaagcggagguugcagggagc

SEQ ID NO: 2053413 - RNA, 16 nt, Human
ggaagccgugcccugc

SEQ ID NO: 2053414 - RNA, 23 nt, Human
ggaagcgaugaauuuggagacuc

SEQ ID NO: 2053415 - RNA, 18 nt, Human
gcuuuggacacacacagc

SEQ ID NO: 2053416 - RNA, 19 nt, Human
gcuuuggacacacacagcu

SEQ ID NO: 2053417 - RNA, 22 nt, Human
gcuuuggacacacacagcuucu

SEQ ID NO: 2053418 - RNA, 21 nt, Human
gcuuugcuuaugguaauaaaa

SEQ ID NO: 2053419 - RNA, 14 nt, Human
gcuuuggaagccau

SEQ ID NO: 2053420 - RNA, 22 nt, Human
gcuuuccuuuuucccaauaaau

SEQ ID NO: 2053421 - RNA, 18 nt, Human
gcuuugcccaaccucagc

SEQ ID NO: 2053422 - RNA, 19 nt, Human
gcuuugcccaaccucagca

SEQ ID NO: 2053423 - RNA, 22 nt, Human
gcuuugccuuccacgcugucuc

SEQ ID NO: 2053424 - RNA, 13 nt, Human
gcuuugccuucca

SEQ ID NO: 2053425 - RNA, 18 nt, Human
gcuuugccuuccacgcug

SEQ ID NO: 2053426 - RNA, 24 nt, Human
gcuuugccuuccacgcugucucca

SEQ ID NO: 2053427 - RNA, 13 nt, Human
gcuguuuccauag

SEQ ID NO: 2053428 - RNA, 11 nt, Human
gcuguuuccuu

SEQ ID NO: 2053429 - RNA, 14 nt, Human
gcuguuuauggccu

SEQ ID NO: 2053430 - RNA, 15 nt, Human
gcuguuuauggccuc

SEQ ID NO: 2053431 - RNA, 16 nt, Human
gcuguuuauggccuca

SEQ ID NO: 2053432 - RNA, 23 nt, Human
gcuguuuauggccucagcugccu

SEQ ID NO: 2053433 - RNA, 17 nt, Human
gcuguuuauggccucag

SEQ ID NO: 2053434 - RNA, 22 nt, Human
gcuguuuauggccucagcugcc

SEQ ID NO: 2053435 - RNA, 12 nt, Human
gcuuaaugaaaa

SEQ ID NO: 2053436 - RNA, 23 nt, Human
gcuuucuacccagcgagcccugg

SEQ ID NO: 2053437 - RNA, 20 nt, Human
gcuuugcauuccuacaaaga

SEQ ID NO: 2053438 - RNA, 22 nt, Human
gcuuugcauuccuacaaagaug

SEQ ID NO: 2053439 - RNA, 16 nt, Human
gcuuugauuccaucuc

SEQ ID NO: 2053440 - RNA, 17 nt, Human
gcuuugauuccaucucc

SEQ ID NO: 2053441 - RNA, 20 nt, Human
gcuuugauuccaucuccuug

SEQ ID NO: 2053442 - RNA, 21 nt, Human
gcuuugauuuagauugaguaa

SEQ ID NO: 2053443 - RNA, 22 nt, Human
gcuuucuacccagcgagcccug

SEQ ID NO: 2053444 - RNA, 19 nt, Human
gcuuucuacccagcgagcc

SEQ ID NO: 2053445 - RNA, 13 nt, Human
gcuuucuacccag

SEQ ID NO: 2053446 - RNA, 23 nt, Human
gcuuuccuggagagucucacucc

SEQ ID NO: 2053447 - RNA, 23 nt, Human
gcuugggcuuccauuugugugug

SEQ ID NO: 2053448 - RNA, 18 nt, Human
gcuuuuccccggucccuu

SEQ ID NO: 2053449 - RNA, 19 nt, Human
gcuuuucccuaagccaagg

SEQ ID NO: 2053450 - RNA, 22 nt, Human
gcuuuuccccggucccuugaga

SEQ ID NO: 2053451 - RNA, 15 nt, Human
gcuuuugcuggucac

SEQ ID NO: 2053452 - RNA, 19 nt, Human
gcuuuugcuggucacugcc

SEQ ID NO: 2053453 - RNA, 21 nt, Human
gcuuuugcuggucacugccau

SEQ ID NO: 2053454 - RNA, 22 nt, Human
gcuuuugcuggucacugccaug

SEQ ID NO: 2053455 - RNA, 13 nt, Human
ggaaaaaaacuuu

SEQ ID NO: 2053456 - RNA, 14 nt, Human
ggaaaaaaacuuuu

SEQ ID NO: 2053457 - RNA, 23 nt, Human
ggaaaaaaacuuuuauaaauuaa

SEQ ID NO: 2053458 - RNA, 15 nt, Human
gcuuuuuaauauuga

SEQ ID NO: 2053459 - RNA, 20 nt, Human
ggaaacagcuaaugggacac

SEQ ID NO: 2053460 - RNA, 14 nt, Human
ggaaaaaaaugacu

SEQ ID NO: 2053461 - RNA, 14 nt, Human
ggaaacagucauuu

SEQ ID NO: 2053462 - RNA, 15 nt, Human
ggaaacaggaccaca

SEQ ID NO: 2053463 - RNA, 22 nt, Human
ggaaacucaccugcuggccccu

SEQ ID NO: 2053464 - RNA, 21 nt, Human
ggaaacucaccugcuggcccc

SEQ ID NO: 2053465 - RNA, 17 nt, Human
ggaaacuggaugagguc

SEQ ID NO: 2053466 - RNA, 14 nt, Human
ggaaagcagcucaa

SEQ ID NO: 2053467 - RNA, 22 nt, Human
ggaaagcagcucaaaggcacag

SEQ ID NO: 2053468 - RNA, 15 nt, Human
ggaaagcagcucaaa

SEQ ID NO: 2053469 - RNA, 19 nt, Human
ggaaagcagcucaaaggca

SEQ ID NO: 2053470 - RNA, 18 nt, Human
ggaaagcaucaccucagg

SEQ ID NO: 2053471 - RNA, 19 nt, Human
ggaaagcaucaccucaggc

SEQ ID NO: 2053472 - RNA, 13 nt, Human
ggaaagccucugc

SEQ ID NO: 2053473 - RNA, 21 nt, Human
ggaaaggaguagaaaaagcag

SEQ ID NO: 2053474 - RNA, 15 nt, Human
ggaaaggccagcugg

SEQ ID NO: 2053475 - RNA, 18 nt, Human
ggaaaggccagcuggcag

SEQ ID NO: 2053476 - RNA, 16 nt, Human
ggaaaggauauuuucu

SEQ ID NO: 2053477 - RNA, 14 nt, Human
ggaaagccucugcu

SEQ ID NO: 2053478 - RNA, 16 nt, Human
ggaaagccucugcugc

SEQ ID NO: 2053479 - RNA, 21 nt, Human
ggaaacuuccaagaccugacu

SEQ ID NO: 2053480 - RNA, 15 nt, Human
ggaaagcaauaaaug

SEQ ID NO: 2053481 - RNA, 18 nt, Human
ggaaacuguugccagaga

SEQ ID NO: 2053482 - RNA, 17 nt, Human
ggaaacuguugccagag

SEQ ID NO: 2053483 - RNA, 16 nt, Human
ggaaagaaagaaggaa

SEQ ID NO: 2053484 - RNA, 23 nt, Human
ggaaagaauuccuacaauauaua

SEQ ID NO: 2053485 - RNA, 15 nt, Human
ggcucacugcagccu

SEQ ID NO: 2053486 - RNA, 14 nt, Human
ggcucacugcagcc

SEQ ID NO: 2053487 - RNA, 13 nt, Human
ggcucacugcagc

SEQ ID NO: 2053488 - RNA, 20 nt, Human
ggcuccccuuuuucuuccuc

SEQ ID NO: 2053489 - RNA, 22 nt, Human
ggcucgucggggggacagcucc

SEQ ID NO: 2053490 - RNA, 12 nt, Human
ggcugcccuggu

SEQ ID NO: 2053491 - RNA, 14 nt, Human
ggcuggcagguaug

SEQ ID NO: 2053492 - RNA, 24 nt, Human
ggcugacuagaagggccaguccug

SEQ ID NO: 2053493 - RNA, 19 nt, Human
ggcugacuagaagggccag

SEQ ID NO: 2053494 - RNA, 22 nt, Human
ggcugacuagaagggccagucc

SEQ ID NO: 2053495 - RNA, 13 nt, Human
ggcugaccccccu

SEQ ID NO: 2053496 - RNA, 17 nt, Human
ggcugaccccccucagg

SEQ ID NO: 2053497 - RNA, 21 nt, Human
ggcugaccuugaacuccuggg

SEQ ID NO: 2053498 - RNA, 17 nt, Human
ggcugacccagucccug

SEQ ID NO: 2053499 - RNA, 18 nt, Human
ggcugacccagucccugg

SEQ ID NO: 2053500 - RNA, 19 nt, Human
ggcugacccagucccuggg

SEQ ID NO: 2053501 - RNA, 22 nt, Human
ggcugacccagucccuggggga

SEQ ID NO: 2053502 - RNA, 13 nt, Human
ggcugaaagacag

SEQ ID NO: 2053503 - RNA, 21 nt, Human
ggcugagacugcgggaugguc

SEQ ID NO: 2053504 - RNA, 12 nt, Human
ggcugcccugcc

SEQ ID NO: 2053505 - RNA, 13 nt, Human
ggcugcccugcca

SEQ ID NO: 2053506 - RNA, 22 nt, Human
ggcugcccuggaggaaccgaaa

SEQ ID NO: 2053507 - RNA, 15 nt, Human
ggcuggccucagacu

SEQ ID NO: 2053508 - RNA, 11 nt, Human
aaaaaaacuuu

SEQ ID NO: 2053509 - RNA, 13 nt, Human
aaaaaaacuuuua

SEQ ID NO: 2053510 - RNA, 13 nt, Human
aaaaaaagacaag

SEQ ID NO: 2053511 - RNA, 11 nt, Human
aaaaaaauaag

SEQ ID NO: 2053512 - RNA, 12 nt, Human
aaaaaaauaaua

SEQ ID NO: 2053513 - RNA, 12 nt, Human
aaaaaaaugaca

SEQ ID NO: 2053514 - RNA, 12 nt, Human
aaaaaaaugacu

SEQ ID NO: 2053515 - RNA, 13 nt, Human
aaaaaaaugacua

SEQ ID NO: 2053516 - RNA, 12 nt, Human
aaaaaaauuggc

SEQ ID NO: 2053517 - RNA, 22 nt, Human
aaaaaacugcugacuguuuucu

SEQ ID NO: 2053518 - RNA, 21 nt, Human
aaaaagcagcuaccagguguu

SEQ ID NO: 2053519 - RNA, 17 nt, Human
aaaaagcacuaguauaa

SEQ ID NO: 2053520 - RNA, 13 nt, Human
aaaaagcagacag

SEQ ID NO: 2053521 - RNA, 21 nt, Human
aaaaagcagacagaagucacu

SEQ ID NO: 2053522 - RNA, 13 nt, Human
aaaaagcagcuac

SEQ ID NO: 2053523 - RNA, 15 nt, Human
aaaaaacagaggcca

SEQ ID NO: 2053524 - RNA, 11 nt, Human
aaaaaacuuuu

SEQ ID NO: 2053525 - RNA, 21 nt, Human
aaaaauaaaaacugacuccuu

SEQ ID NO: 2053526 - RNA, 14 nt, Human
aaaaauacaugcau

SEQ ID NO: 2053527 - RNA, 14 nt, Human
aaaaauacauuuua

SEQ ID NO: 2053528 - RNA, 12 nt, Human
aaaaauaauuuu

SEQ ID NO: 2053529 - RNA, 15 nt, Human
aaaaauacauuuuau

SEQ ID NO: 2053530 - RNA, 14 nt, Human
aaaaauacucuaau

SEQ ID NO: 2053531 - RNA, 15 nt, Human
aaaaauacucuaauu

SEQ ID NO: 2053532 - RNA, 16 nt, Human
aaaaauacucuaauuc

SEQ ID NO: 2053533 - RNA, 17 nt, Human
aaaaauacucuaauucu

SEQ ID NO: 2053534 - RNA, 19 nt, Human
aaaaauacucuaauucuaa

SEQ ID NO: 2053535 - RNA, 22 nt, Human
aaaaauacucuaauucuaacca

SEQ ID NO: 2053536 - RNA, 14 nt, Human
ggcuggguuggagg

SEQ ID NO: 2053537 - RNA, 12 nt, Human
aaaaaguuuaaa

SEQ ID NO: 2053538 - RNA, 14 nt, Human
aaaaaguuuaaaau

SEQ ID NO: 2053539 - RNA, 16 nt, Human
aaaaaguuuaaaaugu

SEQ ID NO: 2053540 - RNA, 18 nt, Human
aaaaaguuugccagaagu

SEQ ID NO: 2053541 - RNA, 17 nt, Human
aaaaaguuugccagaag

SEQ ID NO: 2053542 - RNA, 12 nt, Human
aaaaaggcagga

SEQ ID NO: 2053543 - RNA, 14 nt, Human
aaaaaggaggaaga

SEQ ID NO: 2053544 - RNA, 17 nt, Human
ggccgccugcgggcugc

SEQ ID NO: 2053545 - RNA, 15 nt, Human
ggcccucaccccugc

SEQ ID NO: 2053546 - RNA, 18 nt, Human
ggcccucaccccugcccu

SEQ ID NO: 2053547 - RNA, 20 nt, Human
ggcccucaccccugcccugg

SEQ ID NO: 2053548 - RNA, 21 nt, Human
ggcccucaccccugcccuggg

SEQ ID NO: 2053549 - RNA, 22 nt, Human
ggcccucaccccugcccuggga

SEQ ID NO: 2053550 - RNA, 17 nt, Human
ggccucagguuugccug

SEQ ID NO: 2053551 - RNA, 11 nt, Human
ggccucagggc

SEQ ID NO: 2053552 - RNA, 17 nt, Human
ggccucagcugccucac

SEQ ID NO: 2053553 - RNA, 22 nt, Human
ggccucagcugccucacuuccu

SEQ ID NO: 2053554 - RNA, 13 nt, Human
ggccucagcugcc

SEQ ID NO: 2053555 - RNA, 15 nt, Human
ggccucagcugccuc

SEQ ID NO: 2053556 - RNA, 16 nt, Human
ggccucagcugccuca

SEQ ID NO: 2053557 - RNA, 13 nt, Human
ggccucagugcca

SEQ ID NO: 2053558 - RNA, 20 nt, Human
ggccucaguggacuuuccac

SEQ ID NO: 2053559 - RNA, 22 nt, Human
ggccucaguggacuuuccaccc

SEQ ID NO: 2053560 - RNA, 16 nt, Human
ggccagaugcaccagc

SEQ ID NO: 2053561 - RNA, 15 nt, Human
ggccagaugcaccag

SEQ ID NO: 2053562 - RNA, 22 nt, Human
ggccagagggagugacagaggc

SEQ ID NO: 2053563 - RNA, 21 nt, Human
ggccagaugcacaucccugga

SEQ ID NO: 2053564 - RNA, 20 nt, Human
ggccagaugcacaucccugg

SEQ ID NO: 2053565 - RNA, 23 nt, Human
ggccagaugcacaucccuggaag

SEQ ID NO: 2053566 - RNA, 13 nt, Human
ggccccagcacua

SEQ ID NO: 2053567 - RNA, 16 nt, Human
ggccccagcacuaaag

SEQ ID NO: 2053568 - RNA, 21 nt, Human
ggccccagcacuaaagcagug

SEQ ID NO: 2053569 - RNA, 15 nt, Human
ggcccgucauguucc

SEQ ID NO: 2053570 - RNA, 21 nt, Human
ggccagaucuguuaagugguu

SEQ ID NO: 2053571 - RNA, 22 nt, Human
ggccugaugcucccuccccugc

SEQ ID NO: 2053572 - RNA, 23 nt, Human
ggccugaugcucccuccccugcc

SEQ ID NO: 2053573 - RNA, 15 nt, Human
ggccugaugcucccu

SEQ ID NO: 2053574 - RNA, 17 nt, Human
ggccugaugcucccucc

SEQ ID NO: 2053575 - RNA, 18 nt, Human
ggccugaugcucccuccc

SEQ ID NO: 2053576 - RNA, 20 nt, Human
ggccugaugcucccuccccu

SEQ ID NO: 2053577 - RNA, 13 nt, Human
ggccugcacuaau

SEQ ID NO: 2053578 - RNA, 13 nt, Human
ggccugccagacg

SEQ ID NO: 2053579 - RNA, 15 nt, Human
ggccuggcagccgug

SEQ ID NO: 2053580 - RNA, 14 nt, Human
ggccuggcagccgu

SEQ ID NO: 2053581 - RNA, 19 nt, Human
ggccuggcauggcaccugu

SEQ ID NO: 2053582 - RNA, 15 nt, Human
ggccuggccagaugc

SEQ ID NO: 2053583 - RNA, 12 nt, Human
ggccuggccaga

SEQ ID NO: 2053584 - RNA, 18 nt, Human
ggccuuacaccucguuag

SEQ ID NO: 2053585 - RNA, 16 nt, Human
ggccuggccagaugca

SEQ ID NO: 2053586 - RNA, 11 nt, Human
ggccugccugu

SEQ ID NO: 2053587 - RNA, 17 nt, Human
ggccugccuagcacuca

SEQ ID NO: 2053588 - RNA, 18 nt, Human
ggccugccuugaagccac

SEQ ID NO: 2053589 - RNA, 17 nt, Human
ggccugcugggcucucc

SEQ ID NO: 2053590 - RNA, 19 nt, Human
ggccugcugggcucuccac

SEQ ID NO: 2053591 - RNA, 19 nt, Human
ggcuaagagcuagcgcugc

SEQ ID NO: 2053592 - RNA, 15 nt, Human
ggcuaacuggaagca

SEQ ID NO: 2053593 - RNA, 17 nt, Human
ggcgugacucacccaag

SEQ ID NO: 2053594 - RNA, 15 nt, Human
ggcgugaggauggga

SEQ ID NO: 2053595 - RNA, 22 nt, Human
ggcgcaagccuguaaucccagc

SEQ ID NO: 2053596 - RNA, 15 nt, Human
ggcgugacucaccca

SEQ ID NO: 2053597 - RNA, 14 nt, Human
ggcgcaagccugua

SEQ ID NO: 2053598 - RNA, 16 nt, Human
ggccuuccccagccuc

SEQ ID NO: 2053599 - RNA, 15 nt, Human
ggcgagucacugccu

SEQ ID NO: 2053600 - RNA, 21 nt, Human
ggcgaggggaggguggcaggu

SEQ ID NO: 2053601 - RNA, 16 nt, Human
ggcgagucacugccuc

SEQ ID NO: 2053602 - RNA, 17 nt, Human
ggcgauccaccugucuc

SEQ ID NO: 2053603 - RNA, 18 nt, Human
ggcgauccaccugucuca

SEQ ID NO: 2053604 - RNA, 22 nt, Human
ggcgauccaccugucucagccu

SEQ ID NO: 2053605 - RNA, 15 nt, Human
ggccuuccccagccu

SEQ ID NO: 2053606 - RNA, 17 nt, Human
ggccuuccccagccucu

SEQ ID NO: 2053607 - RNA, 20 nt, Human
ggcuaagagcuagcgcugcc

SEQ ID NO: 2053608 - RNA, 14 nt, Human
ggcuaacuggaagc

SEQ ID NO: 2053609 - RNA, 19 nt, Human
ggcuaagaguguccuagga

SEQ ID NO: 2053610 - RNA, 15 nt, Human
ggcuaaggcaccagc

SEQ ID NO: 2053611 - RNA, 16 nt, Human
ggcuaaggcaccagcc

SEQ ID NO: 2053612 - RNA, 20 nt, Human
ggcuaagugauccucccacc

SEQ ID NO: 2053613 - RNA, 16 nt, Human
ggcuaauguacugcau

SEQ ID NO: 2053614 - RNA, 16 nt, Human
ggcuacucagcagccc

SEQ ID NO: 2053615 - RNA, 23 nt, Human
ggcuacucacucaaguucaagga

SEQ ID NO: 2053616 - RNA, 15 nt, Human
ggcuacucagcagcc

SEQ ID NO: 2053617 - RNA, 12 nt, Human
ggcuacccuccc

SEQ ID NO: 2053618 - RNA, 17 nt, Human
ggcuacucagcagcccu

SEQ ID NO: 2053619 - RNA, 18 nt, Human
ggcuacucagcagcccuc

SEQ ID NO: 2053620 - RNA, 20 nt, Human
ggcuacucagcagcccuccu

SEQ ID NO: 2053621 - RNA, 21 nt, Human
ggcuacucagcagcccuccuc

SEQ ID NO: 2053622 - RNA, 20 nt, Human
ggcuagaggccagccccacc

SEQ ID NO: 2053623 - RNA, 16 nt, Human
ggcuagaggccagccc

SEQ ID NO: 2053624 - RNA, 18 nt, Human
ggcuagaggccagcccca

SEQ ID NO: 2053625 - RNA, 15 nt, Human
ggagggggagggggu

SEQ ID NO: 2053626 - RNA, 19 nt, Human
ggaggguuggggaggggcg

SEQ ID NO: 2053627 - RNA, 19 nt, Human
ggagggugggagagcccag

SEQ ID NO: 2053628 - RNA, 17 nt, Human
ggagguggcagcccugu

SEQ ID NO: 2053629 - RNA, 15 nt, Human
ggaggguggcaggug

SEQ ID NO: 2053630 - RNA, 15 nt, Human
ggagggucaggaagg

SEQ ID NO: 2053631 - RNA, 16 nt, Human
ggagggucaggaagga

SEQ ID NO: 2053632 - RNA, 13 nt, Human
ggagguggcuggg

SEQ ID NO: 2053633 - RNA, 20 nt, Human
ggaggcggagcuugcaguga

SEQ ID NO: 2053634 - RNA, 16 nt, Human
ggaggcuauguggagu

SEQ ID NO: 2053635 - RNA, 14 nt, Human
ggagggucaggaag

SEQ ID NO: 2053636 - RNA, 12 nt, Human
ggaggcuggagg

SEQ ID NO: 2053637 - RNA, 20 nt, Human
ggaggcuggaggaagggggg

SEQ ID NO: 2053638 - RNA, 13 nt, Human
ggaggcuggcagg

SEQ ID NO: 2053639 - RNA, 16 nt, Human
ggaggcuugucagagc

SEQ ID NO: 2053640 - RNA, 17 nt, Human
ggaggcuugucagagcu

SEQ ID NO: 2053641 - RNA, 18 nt, Human
ggaggcuugucagagcug

SEQ ID NO: 2053642 - RNA, 19 nt, Human
ggaggcuugucagagcugg

SEQ ID NO: 2053643 - RNA, 20 nt, Human
ggaggcuugucagagcuggg

SEQ ID NO: 2053644 - RNA, 22 nt, Human
ggaggcuugucagagcugggag

SEQ ID NO: 2053645 - RNA, 12 nt, Human
ggagugggacag

SEQ ID NO: 2053646 - RNA, 18 nt, Human
ggagugggacagagucug

SEQ ID NO: 2053647 - RNA, 16 nt, Human
ggaguguguauuguuc

SEQ ID NO: 2053648 - RNA, 17 nt, Human
ggaguguguauuguucc

SEQ ID NO: 2053649 - RNA, 17 nt, Human
ggagugggacagagucu

SEQ ID NO: 2053650 - RNA, 21 nt, Human
ggaguucaagaccagccuggc

SEQ ID NO: 2053651 - RNA, 15 nt, Human
ggaguuagaggccag

SEQ ID NO: 2053652 - RNA, 16 nt, Human
ggaguuagaggccagc

SEQ ID NO: 2053653 - RNA, 18 nt, Human
ggaguuagaggccagccu

SEQ ID NO: 2053654 - RNA, 19 nt, Human
ggaguuagaggccagccug

SEQ ID NO: 2053655 - RNA, 21 nt, Human
ggaguuagaggccagccuggc

SEQ ID NO: 2053656 - RNA, 15 nt, Human
ggaguguuucauggg

SEQ ID NO: 2053657 - RNA, 18 nt, Human
ggaguguguauuguuccc

SEQ ID NO: 2053658 - RNA, 19 nt, Human
ggaguguguauuguuccca

SEQ ID NO: 2053659 - RNA, 18 nt, Human
ggaucucuugagccuggg

SEQ ID NO: 2053660 - RNA, 17 nt, Human
ggaucucccagggcuac

SEQ ID NO: 2053661 - RNA, 23 nt, Human
ggaucucucuagugauggucaga

SEQ ID NO: 2053662 - RNA, 18 nt, Human
ggaguucgagaccagccu

SEQ ID NO: 2053663 - RNA, 19 nt, Human
ggaucggaggcuugucaga

SEQ ID NO: 2053664 - RNA, 23 nt, Human
ggaucggaggcuugucagagcug

SEQ ID NO: 2053665 - RNA, 12 nt, Human
ggaucuaccagc

SEQ ID NO: 2053666 - RNA, 13 nt, Human
ggaucuaccagca

SEQ ID NO: 2053667 - RNA, 18 nt, Human
ggaucuaccagcauaaau

SEQ ID NO: 2053668 - RNA, 20 nt, Human
ggauuguaucaaguggcaug

SEQ ID NO: 2053669 - RNA, 20 nt, Human
ggaugguccuggggcucugu

SEQ ID NO: 2053670 - RNA, 22 nt, Human
ggaugguccuggggcucugugc

SEQ ID NO: 2053671 - RNA, 23 nt, Human
ggaugguacuagggggaagugac

SEQ ID NO: 2053672 - RNA, 14 nt, Human
ggaugguccugggg

SEQ ID NO: 2053673 - RNA, 16 nt, Human
ggaugguccuggggcu

SEQ ID NO: 2053674 - RNA, 20 nt, Human
ggaucuuucacccacagaaa

SEQ ID NO: 2053675 - RNA, 22 nt, Human
ggaucuuucacccacagaaaga

SEQ ID NO: 2053676 - RNA, 14 nt, Human
ggcagccugccugg

SEQ ID NO: 2053677 - RNA, 12 nt, Human
ggcaggggcgga

SEQ ID NO: 2053678 - RNA, 15 nt, Human
ggcagggguggagga

SEQ ID NO: 2053679 - RNA, 23 nt, Human
ggcagggguggaggagagccugg

SEQ ID NO: 2053680 - RNA, 22 nt, Human
ggcaucacagggcagagccggg

SEQ ID NO: 2053681 - RNA, 23 nt, Human
ggcaucacagggcagagccggga

SEQ ID NO: 2053682 - RNA, 18 nt, Human
ggcaucaccuuaggcagg

SEQ ID NO: 2053683 - RNA, 20 nt, Human
ggcaucaccuuaggcaggga

SEQ ID NO: 2053684 - RNA, 23 nt, Human
ggcaucaccuuaggcagggaagu

SEQ ID NO: 2053685 - RNA, 23 nt, Human
ggcaucaugcaucuuacugaagg

SEQ ID NO: 2053686 - RNA, 14 nt, Human
ggcauuugcugaau

SEQ ID NO: 2053687 - RNA, 14 nt, Human
ggcaucuccugugc

SEQ ID NO: 2053688 - RNA, 22 nt, Human
ggccagagagccuggugcugcu

SEQ ID NO: 2053689 - RNA, 18 nt, Human
ggccagagagccuggugc

SEQ ID NO: 2053690 - RNA, 21 nt, Human
ggccagagagccuggugcugc

SEQ ID NO: 2053691 - RNA, 19 nt, Human
ggccagagggagugacaga

SEQ ID NO: 2053692 - RNA, 17 nt, Human
ggccagagggagugaca

SEQ ID NO: 2053693 - RNA, 11 nt, Human
ggccaaggacu

SEQ ID NO: 2053694 - RNA, 13 nt, Human
ggccaaggacugc

SEQ ID NO: 2053695 - RNA, 15 nt, Human
ggccaaggacugccg

SEQ ID NO: 2053696 - RNA, 17 nt, Human
ggccaaggacugccgac

SEQ ID NO: 2053697 - RNA, 14 nt, Human
ggccagaccagagc

SEQ ID NO: 2053698 - RNA, 15 nt, Human
ggccagaccagagcu

SEQ ID NO: 2053699 - RNA, 16 nt, Human
ggccagaccagagcuc

SEQ ID NO: 2053700 - RNA, 18 nt, Human
ggccagaccagagcucug

SEQ ID NO: 2053701 - RNA, 19 nt, Human
ggccagaccagagcucugg

SEQ ID NO: 2053702 - RNA, 23 nt, Human
ggccagaccagagcucuggagcc

SEQ ID NO: 2053703 - RNA, 13 nt, Human
ggccaagaggcug

SEQ ID NO: 2053704 - RNA, 18 nt, Human
ggcacaccgggcacucag

SEQ ID NO: 2053705 - RNA, 14 nt, Human
ggcacauggaggag

SEQ ID NO: 2053706 - RNA, 21 nt, Human
ggcacauuuccccagaccuga

SEQ ID NO: 2053707 - RNA, 16 nt, Human
ggcaccaaagccacca

SEQ ID NO: 2053708 - RNA, 16 nt, Human
ggcaccaagcccacag

SEQ ID NO: 2053709 - RNA, 22 nt, Human
ggcaccacugcacuccagccug

SEQ ID NO: 2053710 - RNA, 16 nt, Human
ggcacauuuccccaga

SEQ ID NO: 2053711 - RNA, 20 nt, Human
ggcacauuuccccagaccug

SEQ ID NO: 2053712 - RNA, 12 nt, Human
ggcacauuuuuu

SEQ ID NO: 2053713 - RNA, 13 nt, Human
ggcacauuuuuuu

SEQ ID NO: 2053714 - RNA, 18 nt, Human
ggcacauuuuuuuuuuua

SEQ ID NO: 2053715 - RNA, 23 nt, Human
ggcacauuuuuuuuuuuaauuuu

SEQ ID NO: 2053716 - RNA, 14 nt, Human
ggauuuuugucuug

SEQ ID NO: 2053717 - RNA, 16 nt, Human
ggauuuuugucuugug

SEQ ID NO: 2053718 - RNA, 15 nt, Human
ggcaaaaaggcagga

SEQ ID NO: 2053719 - RNA, 13 nt, Human
ggauuucucccag

SEQ ID NO: 2053720 - RNA, 15 nt, Human
ggcaaaaaaauuaaa

SEQ ID NO: 2053721 - RNA, 18 nt, Human
ggcaggaggaucacuuga

SEQ ID NO: 2053722 - RNA, 24 nt, Human
ggcaggaggauugcuugagcccag

SEQ ID NO: 2053723 - RNA, 14 nt, Human
ggcaggagggaggu

SEQ ID NO: 2053724 - RNA, 14 nt, Human
ggcaggagggcccu

SEQ ID NO: 2053725 - RNA, 15 nt, Human
ggcaggaugacccug

SEQ ID NO: 2053726 - RNA, 18 nt, Human
ggcagggaaaggcucuga

SEQ ID NO: 2053727 - RNA, 23 nt, Human
ggcagggaaggggaggcagccgg

SEQ ID NO: 2053728 - RNA, 15 nt, Human
ggcagggcaucuccu

SEQ ID NO: 2053729 - RNA, 13 nt, Human
ggcagggagggga

SEQ ID NO: 2053730 - RNA, 15 nt, Human
ggcagggaggcacca

SEQ ID NO: 2053731 - RNA, 21 nt, Human
ggcagccccauucugccugcc

SEQ ID NO: 2053732 - RNA, 20 nt, Human
ggcagccccauucugccugc

SEQ ID NO: 2053733 - RNA, 16 nt, Human
ggcagccccauucugc

SEQ ID NO: 2053734 - RNA, 13 nt, Human
ggcagccccagca

SEQ ID NO: 2053735 - RNA, 14 nt, Human
ggcagccccagcac

SEQ ID NO: 2053736 - RNA, 23 nt, Human
ggcagccccagcaccaccagguc

SEQ ID NO: 2053737 - RNA, 16 nt, Human
ggcagccugcguggcu

SEQ ID NO: 2053738 - RNA, 19 nt, Human
ggcagccugcguggcugac

SEQ ID NO: 2053739 - RNA, 22 nt, Human
ggcagccugcguggcugacccc

SEQ ID NO: 2053740 - RNA, 11 nt, Human
ggcagccugga

SEQ ID NO: 2053741 - RNA, 22 nt, Human
ggcagccccauucugccugccc

SEQ ID NO: 2053742 - RNA, 19 nt, Human
ggcagccaaacccaugagg

SEQ ID NO: 2053743 - RNA, 20 nt, Human
ggcagccaaacccaugaggc

SEQ ID NO: 2053744 - RNA, 16 nt, Human
ggcagccaaacccaug

SEQ ID NO: 2053745 - RNA, 18 nt, Human
ggcagccaaacccaugag

SEQ ID NO: 2053746 - RNA, 17 nt, Human
ggcagcauagcaagaca

SEQ ID NO: 2053747 - RNA, 19 nt, Human
ggcagcauagcaagacaca

SEQ ID NO: 2053748 - RNA, 15 nt, Human
aaaaucugcuaggga

SEQ ID NO: 2053749 - RNA, 16 nt, Human
aaaaucucucucuguu

SEQ ID NO: 2053750 - RNA, 12 nt, Human
aaaaucugucca

SEQ ID NO: 2053751 - RNA, 18 nt, Human
aaaaucuguagagcaggg

SEQ ID NO: 2053752 - RNA, 13 nt, Human
aaaaugacaauga

SEQ ID NO: 2053753 - RNA, 13 nt, Human
aaaaugacagaug

SEQ ID NO: 2053754 - RNA, 15 nt, Human
aaaaugacagauguu

SEQ ID NO: 2053755 - RNA, 17 nt, Human
aaaaugacagauguuga

SEQ ID NO: 2053756 - RNA, 14 nt, Human
aaaaugacauccca

SEQ ID NO: 2053757 - RNA, 18 nt, Human
aaaaugacagauguugaa

SEQ ID NO: 2053758 - RNA, 21 nt, Human
aaaaugacuaaaaauauuaua

SEQ ID NO: 2053759 - RNA, 21 nt, Human
aaaaugcuguauuagucacag

SEQ ID NO: 2053760 - RNA, 23 nt, Human
aaaaugcuguauuagucacagag

SEQ ID NO: 2053761 - RNA, 17 nt, Human
aaaaugcccuuaaauca

SEQ ID NO: 2053762 - RNA, 14 nt, Human
aaaaugauuuuacu

SEQ ID NO: 2053763 - RNA, 23 nt, Human
aaaaugauuuuacuuagcaaugu

SEQ ID NO: 2053764 - RNA, 15 nt, Human
aaaaugagaacaugu

SEQ ID NO: 2053765 - RNA, 18 nt, Human
aaaaugagaacauguugg

SEQ ID NO: 2053766 - RNA, 20 nt, Human
aaaaugagaacauguuggua

SEQ ID NO: 2053767 - RNA, 23 nt, Human
aaaaugagaacauguugguauuu

SEQ ID NO: 2053768 - RNA, 15 nt, Human
aaaaugccaaucucu

SEQ ID NO: 2053769 - RNA, 18 nt, Human
aaaaugcaacaacaugua

SEQ ID NO: 2053770 - RNA, 15 nt, Human
aaaauauuccugcau

SEQ ID NO: 2053771 - RNA, 13 nt, Human
aaaauaugauauu

SEQ ID NO: 2053772 - RNA, 13 nt, Human
aaaauaucauuca

SEQ ID NO: 2053773 - RNA, 14 nt, Human
aaaauaucauucag

SEQ ID NO: 2053774 - RNA, 16 nt, Human
aaaauaucauucagca

SEQ ID NO: 2053775 - RNA, 14 nt, Human
aaaauagaagaaua

SEQ ID NO: 2053776 - RNA, 16 nt, Human
aaaauauuuuccugcc

SEQ ID NO: 2053777 - RNA, 13 nt, Human
aaaauauuuuaua

SEQ ID NO: 2053778 - RNA, 17 nt, Human
aaaauauuuuauaauuu

SEQ ID NO: 2053779 - RNA, 18 nt, Human
aaaauauuuuauaauuuu

SEQ ID NO: 2053780 - RNA, 11 nt, Human
aaaauaugcau

SEQ ID NO: 2053781 - RNA, 12 nt, Human
aaaauacauuuu

SEQ ID NO: 2053782 - RNA, 13 nt, Human
aaaauacauuuua

SEQ ID NO: 2053783 - RNA, 15 nt, Human
aaaauacaguauucu

SEQ ID NO: 2053784 - RNA, 14 nt, Human
aaaauaauuuuaug

SEQ ID NO: 2053785 - RNA, 15 nt, Human
aaaauaauuuuauga

SEQ ID NO: 2053786 - RNA, 18 nt, Human
aaaauaauuuuaugaacu

SEQ ID NO: 2053787 - RNA, 14 nt, Human
aaaauacaauaaac

SEQ ID NO: 2053788 - RNA, 15 nt, Human
aaaauacaauaaacu

SEQ ID NO: 2053789 - RNA, 14 nt, Human
aaaauacauuuuau

SEQ ID NO: 2053790 - RNA, 16 nt, Human
aaaauaacuucaagca

SEQ ID NO: 2053791 - RNA, 12 nt, Human
aaaauaauaaau

SEQ ID NO: 2053792 - RNA, 13 nt, Human
aaaauaauaaauu

SEQ ID NO: 2053793 - RNA, 16 nt, Human
aaaauaauaaauugca

SEQ ID NO: 2053794 - RNA, 13 nt, Human
aaaauaauaauaa

SEQ ID NO: 2053795 - RNA, 22 nt, Human
aaaauaauugauuucaagaccu

SEQ ID NO: 2053796 - RNA, 16 nt, Human
aaaauaauugauuuca

SEQ ID NO: 2053797 - RNA, 12 nt, Human
aaaauaauuuua

SEQ ID NO: 2053798 - RNA, 11 nt, Human
aaaauaauaaa

SEQ ID NO: 2053799 - RNA, 13 nt, Human
aaaauaaugucuu

SEQ ID NO: 2053800 - RNA, 18 nt, Human
aaaauaaugucuuguuaa

SEQ ID NO: 2053801 - RNA, 20 nt, Human
aaaauaaugucuuguuaaua

SEQ ID NO: 2053802 - RNA, 23 nt, Human
aaaauaaugucuuguuaauauuc

SEQ ID NO: 2053803 - RNA, 11 nt, Human
aaaaggcagga

SEQ ID NO: 2053804 - RNA, 19 nt, Human
aaaaggacaggcagaaaga

SEQ ID NO: 2053805 - RNA, 20 nt, Human
aaaaggacaggcagaaagag

SEQ ID NO: 2053806 - RNA, 21 nt, Human
aaaaggacaggcagaaagagu

SEQ ID NO: 2053807 - RNA, 17 nt, Human
aaaagguuaauaaagua

SEQ ID NO: 2053808 - RNA, 19 nt, Human
aaaagguucacuaaagcag

SEQ ID NO: 2053809 - RNA, 19 nt, Human
aaaagguucuuacugcuug

SEQ ID NO: 2053810 - RNA, 22 nt, Human
aaaaggugccugugaggcaggg

SEQ ID NO: 2053811 - RNA, 16 nt, Human
aaaauaaccccaaaau

SEQ ID NO: 2053812 - RNA, 20 nt, Human
aaaaggugccugugaggcag

SEQ ID NO: 2053813 - RNA, 16 nt, Human
aaaagguuaauaaagu

SEQ ID NO: 2053814 - RNA, 16 nt, Human
aaaaggacaccuuuua

SEQ ID NO: 2053815 - RNA, 22 nt, Human
aaaaggagccaauuuaaagaaa

SEQ ID NO: 2053816 - RNA, 18 nt, Human
gggcccaagacagaugcc

SEQ ID NO: 2053817 - RNA, 12 nt, Human
gggccagaggca

SEQ ID NO: 2053818 - RNA, 16 nt, Human
gggcgugacucaccca

SEQ ID NO: 2053819 - RNA, 21 nt, Human
gggcggugagaggggaacaga

SEQ ID NO: 2053820 - RNA, 23 nt, Human
gggccugccuagcacucacaugc

SEQ ID NO: 2053821 - RNA, 22 nt, Human
gggccucgguguggagaagcgg

SEQ ID NO: 2053822 - RNA, 17 nt, Human
gggccucggagccucau

SEQ ID NO: 2053823 - RNA, 14 nt, Human
gggccucagugcca

SEQ ID NO: 2053824 - RNA, 13 nt, Human
gggccucagugcc

SEQ ID NO: 2053825 - RNA, 15 nt, Human
gggccucagugccac

SEQ ID NO: 2053826 - RNA, 16 nt, Human
gggccucaaggacuug

SEQ ID NO: 2053827 - RNA, 13 nt, Human
gggccucacucca

SEQ ID NO: 2053828 - RNA, 14 nt, Human
gggccucacuccag

SEQ ID NO: 2053829 - RNA, 19 nt, Human
gggccucagggcagccugc

SEQ ID NO: 2053830 - RNA, 15 nt, Human
gggccucggagccuc

SEQ ID NO: 2053831 - RNA, 11 nt, Human
gggcuggggca

SEQ ID NO: 2053832 - RNA, 22 nt, Human
gggcuggggcaggaggggagug

SEQ ID NO: 2053833 - RNA, 13 nt, Human
gggcugggcagcu

SEQ ID NO: 2053834 - RNA, 14 nt, Human
gggcugggcagcug

SEQ ID NO: 2053835 - RNA, 16 nt, Human
aaaaugguaaaauugc

SEQ ID NO: 2053836 - RNA, 17 nt, Human
aaaaugguaaaauugca

SEQ ID NO: 2053837 - RNA, 21 nt, Human
gggcugcccuggugcugccac

SEQ ID NO: 2053838 - RNA, 17 nt, Human
gggcugcugaccuccac

SEQ ID NO: 2053839 - RNA, 15 nt, Human
gggcugcuccuccag

SEQ ID NO: 2053840 - RNA, 16 nt, Human
gggcugcuccuccagg

SEQ ID NO: 2053841 - RNA, 18 nt, Human
gggcugcuccuccagggc

SEQ ID NO: 2053842 - RNA, 19 nt, Human
gggcugcuccuccagggcc

SEQ ID NO: 2053843 - RNA, 11 nt, Human
gggcugcuccu

SEQ ID NO: 2053844 - RNA, 14 nt, Human
gggcugcuccucau

SEQ ID NO: 2053845 - RNA, 11 nt, Human
gggcucagccu

SEQ ID NO: 2053846 - RNA, 12 nt, Human
gggcucagccug

SEQ ID NO: 2053847 - RNA, 13 nt, Human
gggcucagccugg

SEQ ID NO: 2053848 - RNA, 19 nt, Human
gggcucagcggggacagcu

SEQ ID NO: 2053849 - RNA, 17 nt, Human
gggcucagcggggacag

SEQ ID NO: 2053850 - RNA, 18 nt, Human
gggcuaguugggcuuccu

SEQ ID NO: 2053851 - RNA, 22 nt, Human
gggcucagcaaaagaugcuucu

SEQ ID NO: 2053852 - RNA, 15 nt, Human
gggcuaguugggcuu

SEQ ID NO: 2053853 - RNA, 14 nt, Human
gggcucagcucugg

SEQ ID NO: 2053854 - RNA, 18 nt, Human
gggcucagcucuggcuca

SEQ ID NO: 2053855 - RNA, 22 nt, Human
gggcucagcucuggcucacaga

SEQ ID NO: 2053856 - RNA, 23 nt, Human
gggcucagcucuggcucacagac

SEQ ID NO: 2053857 - RNA, 16 nt, Human
gggcucagccuggugg

SEQ ID NO: 2053858 - RNA, 20 nt, Human
gggcucagccuggugggccu

SEQ ID NO: 2053859 - RNA, 21 nt, Human
gggcucagcggggacagcucc

SEQ ID NO: 2053860 - RNA, 21 nt, Human
gggcuccccuucgcguauuuc

SEQ ID NO: 2053861 - RNA, 18 nt, Human
gggcuccccuuucgccca

SEQ ID NO: 2053862 - RNA, 20 nt, Human
gggcuccccuuucgcccaca

SEQ ID NO: 2053863 - RNA, 13 nt, Human
gguauagaaaugc

SEQ ID NO: 2053864 - RNA, 22 nt, Human
gguauaucauuauaacugaagg

SEQ ID NO: 2053865 - RNA, 14 nt, Human
gguaucaggugcug

SEQ ID NO: 2053866 - RNA, 23 nt, Human
gguauaucugggcuggccaguug

SEQ ID NO: 2053867 - RNA, 15 nt, Human
gguauaucugggcug

SEQ ID NO: 2053868 - RNA, 13 nt, Human
gguauauucauuu

SEQ ID NO: 2053869 - RNA, 18 nt, Human
gguaucaaacagcucagg

SEQ ID NO: 2053870 - RNA, 21 nt, Human
gguaucaaacagcucaggcug

SEQ ID NO: 2053871 - RNA, 23 nt, Human
gguaagaagccgggaacagacaa

SEQ ID NO: 2053872 - RNA, 17 nt, Human
gguaagagaauguuaua

SEQ ID NO: 2053873 - RNA, 13 nt, Human
gguaagcuuccag

SEQ ID NO: 2053874 - RNA, 18 nt, Human
gguaagcuuccaggaaaa

SEQ ID NO: 2053875 - RNA, 13 nt, Human
gguaaggugccuu

SEQ ID NO: 2053876 - RNA, 13 nt, Human
gguagggguuggg

SEQ ID NO: 2053877 - RNA, 21 nt, Human
gguaggaauagcaugucacua

SEQ ID NO: 2053878 - RNA, 16 nt, Human
ggucauagcagugcuu

SEQ ID NO: 2053879 - RNA, 19 nt, Human
ggucagugaggcccaggga

SEQ ID NO: 2053880 - RNA, 14 nt, Human
ggucaguggcucuu

SEQ ID NO: 2053881 - RNA, 19 nt, Human
gguaucauuuucugcauuu

SEQ ID NO: 2053882 - RNA, 12 nt, Human
gguauccugccc

SEQ ID NO: 2053883 - RNA, 15 nt, Human
gguauccugcccagu

SEQ ID NO: 2053884 - RNA, 17 nt, Human
gguauccugcccagugu

SEQ ID NO: 2053885 - RNA, 18 nt, Human
gguauccugcccaguguu

SEQ ID NO: 2053886 - RNA, 19 nt, Human
gguaucaggugcugccauc

SEQ ID NO: 2053887 - RNA, 12 nt, Human
ggucaguaccca

SEQ ID NO: 2053888 - RNA, 17 nt, Human
ggucaguacccaccuga

SEQ ID NO: 2053889 - RNA, 20 nt, Human
ggucaguacccaccugagcu

SEQ ID NO: 2053890 - RNA, 21 nt, Human
ggucaguacccaccugagcuu

SEQ ID NO: 2053891 - RNA, 22 nt, Human
aaacuugauguguuaucucuua

SEQ ID NO: 2053892 - RNA, 21 nt, Human
aaacuuuagaguagcaugaga

SEQ ID NO: 2053893 - RNA, 23 nt, Human
aaacuuccaugaggccaaacguu

SEQ ID NO: 2053894 - RNA, 19 nt, Human
aaacuugaauucauagaaa

SEQ ID NO: 2053895 - RNA, 17 nt, Human
gguccagcuugcucuuc

SEQ ID NO: 2053896 - RNA, 18 nt, Human
gguccagcuugcucuuca

SEQ ID NO: 2053897 - RNA, 23 nt, Human
aaacuuccagugcaacacugaag

SEQ ID NO: 2053898 - RNA, 13 nt, Human
gguaaaauucuaa

SEQ ID NO: 2053899 - RNA, 14 nt, Human
gguaaaauucuaaa

SEQ ID NO: 2053900 - RNA, 14 nt, Human
gguaaaauugcaug

SEQ ID NO: 2053901 - RNA, 13 nt, Human
gguaaaacacuug

SEQ ID NO: 2053902 - RNA, 13 nt, Human
gguaaauuucugu

SEQ ID NO: 2053903 - RNA, 11 nt, Human
gguaaauuauu

SEQ ID NO: 2053904 - RNA, 20 nt, Human
ggguuuugccauguuggcca

SEQ ID NO: 2053905 - RNA, 16 nt, Human
ggguuuuccacccugg

SEQ ID NO: 2053906 - RNA, 17 nt, Human
ggguuuuccacccugga

SEQ ID NO: 2053907 - RNA, 23 nt, Human
ggguuuugccauguuggccaggc

SEQ ID NO: 2053908 - RNA, 18 nt, Human
ggguguaacaggucuccu

SEQ ID NO: 2053909 - RNA, 19 nt, Human
ggguguaacaggucuccuc

SEQ ID NO: 2053910 - RNA, 23 nt, Human
ggguguauuuauuuuccucccca

SEQ ID NO: 2053911 - RNA, 14 nt, Human
aaacuuacacacaa

SEQ ID NO: 2053912 - RNA, 21 nt, Human
aaacuuagugcggacaaguuu

SEQ ID NO: 2053913 - RNA, 14 nt, Human
aaacuuaucuuaca

SEQ ID NO: 2053914 - RNA, 16 nt, Human
aaacuuaucuuacaaa

SEQ ID NO: 2053915 - RNA, 20 nt, Human
aaacuuaucuuacaaagugu

SEQ ID NO: 2053916 - RNA, 16 nt, Human
ggguggcuagucagag

SEQ ID NO: 2053917 - RNA, 18 nt, Human
ggguggcuagucagagag

SEQ ID NO: 2053918 - RNA, 16 nt, Human
aaacuucaagcaccag

SEQ ID NO: 2053919 - RNA, 20 nt, Human
aaacgcauggaguguguauu

SEQ ID NO: 2053920 - RNA, 17 nt, Human
aaacguuuuguuugaaa

SEQ ID NO: 2053921 - RNA, 14 nt, Human
aaacguuucaguaa

SEQ ID NO: 2053922 - RNA, 21 nt, Human
aaacguuucaguaauaaaaca

SEQ ID NO: 2053923 - RNA, 22 nt, Human
aaacguuucaguaauaaaacau

SEQ ID NO: 2053924 - RNA, 16 nt, Human
aaacguuuuauugugu

SEQ ID NO: 2053925 - RNA, 21 nt, Human
aaacguuuuauuguguuuuua

SEQ ID NO: 2053926 - RNA, 14 nt, Human
aaacuguucucuau

SEQ ID NO: 2053927 - RNA, 23 nt, Human
aaacuguucucuauuagacuuua

SEQ ID NO: 2053928 - RNA, 16 nt, Human
aaacuguugccagaga

SEQ ID NO: 2053929 - RNA, 22 nt, Human
aaacuguugccagagauggagg

SEQ ID NO: 2053930 - RNA, 14 nt, Human
aaacuuaagaaaca

SEQ ID NO: 2053931 - RNA, 18 nt, Human
aaacuuaaccgcaucaga

SEQ ID NO: 2053932 - RNA, 20 nt, Human
aaacuuaaccgcaucagaag

SEQ ID NO: 2053933 - RNA, 19 nt, Human
aaacuguuaauaguucagg

SEQ ID NO: 2053934 - RNA, 19 nt, Human
aaacauuuugucauauaag

SEQ ID NO: 2053935 - RNA, 22 nt, Human
aaacauuuucacacaauacaau

SEQ ID NO: 2053936 - RNA, 16 nt, Human
aaacauuuucacacaa

SEQ ID NO: 2053937 - RNA, 14 nt, Human
aaacauuuucacac

SEQ ID NO: 2053938 - RNA, 13 nt, Human
aaacauuuucaca

SEQ ID NO: 2053939 - RNA, 23 nt, Human
ggguccuucccucuccccaagac

SEQ ID NO: 2053940 - RNA, 18 nt, Human
ggguccuggcuccugagg

SEQ ID NO: 2053941 - RNA, 16 nt, Human
ggguccuucccucucc

SEQ ID NO: 2053942 - RNA, 18 nt, Human
ggguccuucccucucccc

SEQ ID NO: 2053943 - RNA, 13 nt, Human
ggguccuggcucc

SEQ ID NO: 2053944 - RNA, 18 nt, Human
gggucagggaccaaggac

SEQ ID NO: 2053945 - RNA, 23 nt, Human
gggucaaguuauuaauuucuuca

SEQ ID NO: 2053946 - RNA, 12 nt, Human
gggucaaggaau

SEQ ID NO: 2053947 - RNA, 13 nt, Human
gggucaaguuauu

SEQ ID NO: 2053948 - RNA, 10 nt, Human
ggguauccug

SEQ ID NO: 2053949 - RNA, 18 nt, Human
aaaccuuauuguaccucu

SEQ ID NO: 2053950 - RNA, 17 nt, Human
aaaccuuauuguaccuc

SEQ ID NO: 2053951 - RNA, 16 nt, Human
aaaccuuauuguaccu

SEQ ID NO: 2053952 - RNA, 14 nt, Human
aaacgaaggccucu

SEQ ID NO: 2053953 - RNA, 19 nt, Human
aaacgagucaauccccuca

SEQ ID NO: 2053954 - RNA, 16 nt, Human
aaacgaaacugcucua

SEQ ID NO: 2053955 - RNA, 13 nt, Human
aaacgaaagcugg

SEQ ID NO: 2053956 - RNA, 14 nt, Human
aaacgaaagcuggg

SEQ ID NO: 2053957 - RNA, 14 nt, Human
aaaccugauguuaa

SEQ ID NO: 2053958 - RNA, 19 nt, Human
aaaccugauguuaaaauuc

SEQ ID NO: 2053959 - RNA, 15 nt, Human
aaaccuggaugucac

SEQ ID NO: 2053960 - RNA, 11 nt, Human
aaaccuggaga

SEQ ID NO: 2053961 - RNA, 12 nt, Human
aaaccuggagau

SEQ ID NO: 2053962 - RNA, 16 nt, Human
aaaccacuagaacucu

SEQ ID NO: 2053963 - RNA, 12 nt, Human
aaaccagaagca

SEQ ID NO: 2053964 - RNA, 21 nt, Human
aaacauuuuguggucauuaag

SEQ ID NO: 2053965 - RNA, 22 nt, Human
ggggccaugagcuccagacccc

SEQ ID NO: 2053966 - RNA, 14 nt, Human
ggggccaugaggcc

SEQ ID NO: 2053967 - RNA, 11 nt, Human
gggcugggugu

SEQ ID NO: 2053968 - RNA, 20 nt, Human
ggggccaugagcuccagacc

SEQ ID NO: 2053969 - RNA, 21 nt, Human
ggggccaugagcuccagaccc

SEQ ID NO: 2053970 - RNA, 10 nt, Human
ggggccccuu

SEQ ID NO: 2053971 - RNA, 21 nt, Human
ggggccccuuuuuacuccccu

SEQ ID NO: 2053972 - RNA, 22 nt, Human
ggggccccuuuuuacuccccuu

SEQ ID NO: 2053973 - RNA, 16 nt, Human
ggggcccgccuggcag

SEQ ID NO: 2053974 - RNA, 21 nt, Human
ggggcccgccuggcagaacug

SEQ ID NO: 2053975 - RNA, 23 nt, Human
ggggcccgccuggcagaacugag

SEQ ID NO: 2053976 - RNA, 14 nt, Human
ggggccccagggcu

SEQ ID NO: 2053977 - RNA, 16 nt, Human
ggggccaugaggccuc

SEQ ID NO: 2053978 - RNA, 18 nt, Human
aaaauguauguguaagua

SEQ ID NO: 2053979 - RNA, 17 nt, Human
aaaaugguguuuucaug

SEQ ID NO: 2053980 - RNA, 20 nt, Human
aaaaugguguuuucauguaa

SEQ ID NO: 2053981 - RNA, 23 nt, Human
aaaaugguguuuucauguaaaua

SEQ ID NO: 2053982 - RNA, 12 nt, Human
aaaaugucugua

SEQ ID NO: 2053983 - RNA, 21 nt, Human
aaaaugucuguagcuccucaa

SEQ ID NO: 2053984 - RNA, 18 nt, Human
gggguagcuagaggaacc

SEQ ID NO: 2053985 - RNA, 19 nt, Human
gggguagcuagaggaacca

SEQ ID NO: 2053986 - RNA, 22 nt, Human
ggggucagggaccaaggacccc

SEQ ID NO: 2053987 - RNA, 17 nt, Human
ggggucaaagcaaggau

SEQ ID NO: 2053988 - RNA, 19 nt, Human
ggggguugcaguggagagg

SEQ ID NO: 2053989 - RNA, 22 nt, Human
gggguaaaauuccuuagcuuag

SEQ ID NO: 2053990 - RNA, 13 nt, Human
gggggcuggggca

SEQ ID NO: 2053991 - RNA, 15 nt, Human
gggggccaacaccag

SEQ ID NO: 2053992 - RNA, 17 nt, Human
gggggccaccuccccag

SEQ ID NO: 2053993 - RNA, 14 nt, Human
gggggcagggcaug

SEQ ID NO: 2053994 - RNA, 20 nt, Human
gggggcugccuggcccccag

SEQ ID NO: 2053995 - RNA, 17 nt, Human
gggggaucacagccucu

SEQ ID NO: 2053996 - RNA, 11 nt, Human
gggggcagagg

SEQ ID NO: 2053997 - RNA, 12 nt, Human
gggggcagaggg

SEQ ID NO: 2053998 - RNA, 13 nt, Human
gggggcagagggc

SEQ ID NO: 2053999 - RNA, 16 nt, Human
guaaagcuagaaauga

SEQ ID NO: 2054000 - RNA, 15 nt, Human
guaaagcuagaaaug

SEQ ID NO: 2054001 - RNA, 13 nt, Human
guaaacugcccug

SEQ ID NO: 2054002 - RNA, 14 nt, Human
guaaacugcccugu

SEQ ID NO: 2054003 - RNA, 15 nt, Human
guaaacuauuuaucu

SEQ ID NO: 2054004 - RNA, 16 nt, Human
guaaacuauuuaucug

SEQ ID NO: 2054005 - RNA, 21 nt, Human
guaaacuauuuaucuguguuu

SEQ ID NO: 2054006 - RNA, 19 nt, Human
guaaacuguacuagucugu

SEQ ID NO: 2054007 - RNA, 12 nt, Human
guaacaagaaaa

SEQ ID NO: 2054008 - RNA, 14 nt, Human
guaacaagaaaaca

SEQ ID NO: 2054009 - RNA, 15 nt, Human
guaacaagaaaacau

SEQ ID NO: 2054010 - RNA, 16 nt, Human
guaacaagaaaacaua

SEQ ID NO: 2054011 - RNA, 13 nt, Human
guaacaagaaagg

SEQ ID NO: 2054012 - RNA, 14 nt, Human
guaacaagaaagga

SEQ ID NO: 2054013 - RNA, 16 nt, Human
guaacaagaaaggaga

SEQ ID NO: 2054014 - RNA, 14 nt, Human
guaacaagagugau

SEQ ID NO: 2054015 - RNA, 21 nt, Human
guaacaagagugauucuugcu

SEQ ID NO: 2054016 - RNA, 20 nt, Human
guaacaggaaaauuuuaaaa

SEQ ID NO: 2054017 - RNA, 16 nt, Human
guaacagcugaggucu

SEQ ID NO: 2054018 - RNA, 14 nt, Human
guaacauaugcaaa

SEQ ID NO: 2054019 - RNA, 15 nt, Human
guaacauaugcaaac

SEQ ID NO: 2054020 - RNA, 19 nt, Human
guaacauaugcaaacauaa

SEQ ID NO: 2054021 - RNA, 16 nt, Human
guaacaagccacccca

SEQ ID NO: 2054022 - RNA, 19 nt, Human
guaacaggaaaauuuuaaa

SEQ ID NO: 2054023 - RNA, 22 nt, Human
aaaguuaaacauugaaguaaug

SEQ ID NO: 2054024 - RNA, 15 nt, Human
aaaguuaaaaaaaau

SEQ ID NO: 2054025 - RNA, 22 nt, Human
aaaguuaaaaaaaauaauaaau

SEQ ID NO: 2054026 - RNA, 16 nt, Human
aaaguuaaacauugaa

SEQ ID NO: 2054027 - RNA, 20 nt, Human
aaaguuaaccuaccuguaac

SEQ ID NO: 2054028 - RNA, 17 nt, Human
aaaguuacaaauugcuu

SEQ ID NO: 2054029 - RNA, 19 nt, Human
aaaguguuggcuaaugaag

SEQ ID NO: 2054030 - RNA, 11 nt, Human
aaaguguuuuc

SEQ ID NO: 2054031 - RNA, 14 nt, Human
aaaguguuuucaga

SEQ ID NO: 2054032 - RNA, 15 nt, Human
aaaguguuuucagag

SEQ ID NO: 2054033 - RNA, 16 nt, Human
aaaguguuuucagagc

SEQ ID NO: 2054034 - RNA, 15 nt, Human
aaaguguuuccuuca

SEQ ID NO: 2054035 - RNA, 16 nt, Human
aaaguguauuuuauaa

SEQ ID NO: 2054036 - RNA, 19 nt, Human
aaaguguauuuuauaaaau

SEQ ID NO: 2054037 - RNA, 20 nt, Human
aaaguguauuuuauaaaauu

SEQ ID NO: 2054038 - RNA, 21 nt, Human
aaaguguauuuuauaaaauua

SEQ ID NO: 2054039 - RNA, 12 nt, Human
guaaaauugcau

SEQ ID NO: 2054040 - RNA, 13 nt, Human
guaaaauugcaug

SEQ ID NO: 2054041 - RNA, 14 nt, Human
guaaaauugcaugg

SEQ ID NO: 2054042 - RNA, 12 nt, Human
guaaaauucuaa

SEQ ID NO: 2054043 - RNA, 13 nt, Human
guaaaauucuaaa

SEQ ID NO: 2054044 - RNA, 14 nt, Human
guaaaauucuaaau

SEQ ID NO: 2054045 - RNA, 22 nt, Human
guaaaauucuaaauaaaauaua

SEQ ID NO: 2054046 - RNA, 16 nt, Human
guaaaauugaaaggca

SEQ ID NO: 2054047 - RNA, 20 nt, Human
guaaacaaacuguguaacug

SEQ ID NO: 2054048 - RNA, 16 nt, Human
guaaacgcugucccua

SEQ ID NO: 2054049 - RNA, 20 nt, Human
guaaacgcugucccuaguaa

SEQ ID NO: 2054050 - RNA, 16 nt, Human
guaaacguuucaguaa

SEQ ID NO: 2054051 - RNA, 21 nt, Human
guaaacguuucaguaauaaaa

SEQ ID NO: 2054052 - RNA, 23 nt, Human
guaaacguuucaguaauaaaaca

SEQ ID NO: 2054053 - RNA, 23 nt, Human
guaaacuaaugaguuucuuuuau

SEQ ID NO: 2054054 - RNA, 16 nt, Human
guaaucccagcuacuu

SEQ ID NO: 2054055 - RNA, 20 nt, Human
guaaucccagcuacuuggga

SEQ ID NO: 2054056 - RNA, 20 nt, Human
guaaucauuucuugggcccu

SEQ ID NO: 2054057 - RNA, 23 nt, Human
guaauccuagcacuuugggaggc

SEQ ID NO: 2054058 - RNA, 13 nt, Human
guacaaggcaugg

SEQ ID NO: 2054059 - RNA, 22 nt, Human
guacaauaaguguuuuuguauu

SEQ ID NO: 2054060 - RNA, 12 nt, Human
guacaauauuua

SEQ ID NO: 2054061 - RNA, 13 nt, Human
guacaauauuuaa

SEQ ID NO: 2054062 - RNA, 14 nt, Human
guacaaaagggaca

SEQ ID NO: 2054063 - RNA, 16 nt, Human
guacaaaagggacaug

SEQ ID NO: 2054064 - RNA, 14 nt, Human
guacaaaauaaagu

SEQ ID NO: 2054065 - RNA, 21 nt, Human
guacaaaauaaaguuacauug

SEQ ID NO: 2054066 - RNA, 16 nt, Human
guaauaaacuguguuu

SEQ ID NO: 2054067 - RNA, 13 nt, Human
guaauaaacucau

SEQ ID NO: 2054068 - RNA, 16 nt, Human
guaauaaugugaauca

SEQ ID NO: 2054069 - RNA, 17 nt, Human
guaauaaugugaaucau

SEQ ID NO: 2054070 - RNA, 21 nt, Human
guaagugugaguaagagcugg

SEQ ID NO: 2054071 - RNA, 20 nt, Human
guaagugugaguaagagcug

SEQ ID NO: 2054072 - RNA, 23 nt, Human
guaaguugaauggccugccuuga

SEQ ID NO: 2054073 - RNA, 18 nt, Human
guaaccugagauggcccu

SEQ ID NO: 2054074 - RNA, 20 nt, Human
guaaccugagauggcccucu

SEQ ID NO: 2054075 - RNA, 21 nt, Human
guaaccugagauggcccucug

SEQ ID NO: 2054076 - RNA, 15 nt, Human
aaauaucagacuagu

SEQ ID NO: 2054077 - RNA, 18 nt, Human
aaauaucaguuacucagc

SEQ ID NO: 2054078 - RNA, 20 nt, Human
aaauaucaguuacucagccc

SEQ ID NO: 2054079 - RNA, 13 nt, Human
aaauaucauucag

SEQ ID NO: 2054080 - RNA, 14 nt, Human
aaauaucauucagc

SEQ ID NO: 2054081 - RNA, 15 nt, Human
aaauaucauucagca

SEQ ID NO: 2054082 - RNA, 17 nt, Human
aaauaucauucagcaac

SEQ ID NO: 2054083 - RNA, 18 nt, Human
aaauaucauuuauuuuuu

SEQ ID NO: 2054084 - RNA, 16 nt, Human
aaauaucauucagcaa

SEQ ID NO: 2054085 - RNA, 14 nt, Human
aaauaucaaucauu

SEQ ID NO: 2054086 - RNA, 18 nt, Human
aaauaucaaucauuuucc

SEQ ID NO: 2054087 - RNA, 20 nt, Human
aaauaucaaucauuuuccuu

SEQ ID NO: 2054088 - RNA, 22 nt, Human
aaauaucaaucauuuuccuuuu

SEQ ID NO: 2054089 - RNA, 12 nt, Human
aaauauauguau

SEQ ID NO: 2054090 - RNA, 14 nt, Human
aaauauauguaugu

SEQ ID NO: 2054091 - RNA, 15 nt, Human
aaauauauguaugua

SEQ ID NO: 2054092 - RNA, 16 nt, Human
aaauauauguauguaa

SEQ ID NO: 2054093 - RNA, 19 nt, Human
aaauauauguauguaaaaa

SEQ ID NO: 2054094 - RNA, 20 nt, Human
aaauauauguauguaaaaau

SEQ ID NO: 2054095 - RNA, 23 nt, Human
aaauauauauguguguguauguu

SEQ ID NO: 2054096 - RNA, 17 nt, Human
aaauauauauguugauu

SEQ ID NO: 2054097 - RNA, 17 nt, Human
aaauauauucucuuugg

SEQ ID NO: 2054098 - RNA, 14 nt, Human
guacaauauuuaaa

SEQ ID NO: 2054099 - RNA, 18 nt, Human
guacaauauuuaaaauuu

SEQ ID NO: 2054100 - RNA, 14 nt, Human
guacaauauuuuaa

SEQ ID NO: 2054101 - RNA, 15 nt, Human
guacaauauuuuaag

SEQ ID NO: 2054102 - RNA, 16 nt, Human
guacaauauuuuaagc

SEQ ID NO: 2054103 - RNA, 17 nt, Human
guacaauauuuuaagca

SEQ ID NO: 2054104 - RNA, 18 nt, Human
guacaauauuuuaagcau

SEQ ID NO: 2054105 - RNA, 19 nt, Human
guacaauauuuuaagcauu

SEQ ID NO: 2054106 - RNA, 20 nt, Human
guacaauauuuuaagcauua

SEQ ID NO: 2054107 - RNA, 22 nt, Human
guacaauauuuuaagcauuacu

SEQ ID NO: 2054108 - RNA, 24 nt, Human
guacaauauuuuaagcauuacucu

SEQ ID NO: 2054109 - RNA, 16 nt, Human
guacacacacauacac

SEQ ID NO: 2054110 - RNA, 14 nt, Human
guacacacuuuauu

SEQ ID NO: 2054111 - RNA, 15 nt, Human
guacacacuuuauuu

SEQ ID NO: 2054112 - RNA, 15 nt, Human
guacacagacuauug

SEQ ID NO: 2054113 - RNA, 17 nt, Human
aaauaccagugugguuu

SEQ ID NO: 2054114 - RNA, 13 nt, Human
aaauauagaauuu

SEQ ID NO: 2054115 - RNA, 16 nt, Human
aaauauagaauuuuua

SEQ ID NO: 2054116 - RNA, 21 nt, Human
aaauacgccagaacugcuuua

SEQ ID NO: 2054117 - RNA, 20 nt, Human
aaauauuccugcauuuguga

SEQ ID NO: 2054118 - RNA, 19 nt, Human
aaauauuaagaaagacuau

SEQ ID NO: 2054119 - RNA, 15 nt, Human
aaauauugaugaaaa

SEQ ID NO: 2054120 - RNA, 19 nt, Human
aaaucagccugcuccagcu

SEQ ID NO: 2054121 - RNA, 21 nt, Human
aaaucagccugcuccagcugu

SEQ ID NO: 2054122 - RNA, 23 nt, Human
aaaucagccugcuccagcuguuc

SEQ ID NO: 2054123 - RNA, 20 nt, Human
aaauauguuagcaaagaguu

SEQ ID NO: 2054124 - RNA, 16 nt, Human
aaauauguugaugaaa

SEQ ID NO: 2054125 - RNA, 19 nt, Human
aaauauguugaugaaaaau

SEQ ID NO: 2054126 - RNA, 19 nt, Human
aaauauguccauaucuaac

SEQ ID NO: 2054127 - RNA, 21 nt, Human
aaauauguccauaucuaacca

SEQ ID NO: 2054128 - RNA, 10 nt, Human
aaauaugcaa

SEQ ID NO: 2054129 - RNA, 12 nt, Human
aaauaugcaucu

SEQ ID NO: 2054130 - RNA, 12 nt, Human
aaauaucugaaa

SEQ ID NO: 2054131 - RNA, 14 nt, Human
aaauaucugaaaau

SEQ ID NO: 2054132 - RNA, 17 nt, Human
aaauaucugaaaaugua

SEQ ID NO: 2054133 - RNA, 18 nt, Human
aaauaucugaaaauguau

SEQ ID NO: 2054134 - RNA, 19 nt, Human
aaauaucugaaaauguaug

SEQ ID NO: 2054135 - RNA, 21 nt, Human
aaauaucugaaaauguaugug

SEQ ID NO: 2054136 - RNA, 22 nt, Human
aaauaucugaaaauguaugugu

SEQ ID NO: 2054137 - RNA, 23 nt, Human
aaauaucugaaaauguaugugua

SEQ ID NO: 2054138 - RNA, 19 nt, Human
aaauaugauauugcauaug

SEQ ID NO: 2054139 - RNA, 14 nt, Human
aaagcuagaaauga

SEQ ID NO: 2054140 - RNA, 16 nt, Human
aaagcuaggccuggcc

SEQ ID NO: 2054141 - RNA, 14 nt, Human
aaagcuaggccugg

SEQ ID NO: 2054142 - RNA, 19 nt, Human
aaagcagaauaguauuuuu

SEQ ID NO: 2054143 - RNA, 13 nt, Human
aaagcagcaucug

SEQ ID NO: 2054144 - RNA, 12 nt, Human
aaagcagaaaau

SEQ ID NO: 2054145 - RNA, 22 nt, Human
aaagcagaacaguuaagcagcc

SEQ ID NO: 2054146 - RNA, 22 nt, Human
aaagcaguagaaauaauaugca

SEQ ID NO: 2054147 - RNA, 17 nt, Human
aaagcaguaacugacaa

SEQ ID NO: 2054148 - RNA, 17 nt, Human
aaagcugacgaggcugg

SEQ ID NO: 2054149 - RNA, 19 nt, Human
aaagcugacgaggcugggc

SEQ ID NO: 2054150 - RNA, 15 nt, Human
aaagcugaagccgcc

SEQ ID NO: 2054151 - RNA, 19 nt, Human
aaagcugauuacugucaau

SEQ ID NO: 2054152 - RNA, 22 nt, Human
aaagcugauuacugucaauaaa

SEQ ID NO: 2054153 - RNA, 18 nt, Human
aaagcagucacuuuuccu

SEQ ID NO: 2054154 - RNA, 23 nt, Human
aaagcuguggccagcuuguuauu

SEQ ID NO: 2054155 - RNA, 14 nt, Human
gguggacccaggga

SEQ ID NO: 2054156 - RNA, 14 nt, Human
gguggcaccagcag

SEQ ID NO: 2054157 - RNA, 20 nt, Human
gguggcaccagcagccugga

SEQ ID NO: 2054158 - RNA, 21 nt, Human
aaagcagaggcuggccucaga

SEQ ID NO: 2054159 - RNA, 23 nt, Human
aaagcagaggcuggccucagacu

SEQ ID NO: 2054160 - RNA, 18 nt, Human
gguggcagcccuguaggg

SEQ ID NO: 2054161 - RNA, 15 nt, Human
gguggcagcccugua

SEQ ID NO: 2054162 - RNA, 14 nt, Human
aaacuuuauuuuau

SEQ ID NO: 2054163 - RNA, 15 nt, Human
aaacuuuauuuuaua

SEQ ID NO: 2054164 - RNA, 19 nt, Human
aaacuuuauuuuauauaau

SEQ ID NO: 2054165 - RNA, 21 nt, Human
aaacuuuauuuuauauaauaa

SEQ ID NO: 2054166 - RNA, 14 nt, Human
ggugcugcuucccu

SEQ ID NO: 2054167 - RNA, 21 nt, Human
ggugcugcuucccucugccug

SEQ ID NO: 2054168 - RNA, 16 nt, Human
ggugcuggauauuuuc

SEQ ID NO: 2054169 - RNA, 14 nt, Human
gguggacaguccug

SEQ ID NO: 2054170 - RNA, 15 nt, Human
gguggacaguccugg

SEQ ID NO: 2054171 - RNA, 16 nt, Human
gguggacaguccuggg

SEQ ID NO: 2054172 - RNA, 17 nt, Human
gguggacaguccuggga

SEQ ID NO: 2054173 - RNA, 18 nt, Human
gguggacaguccugggag

SEQ ID NO: 2054174 - RNA, 12 nt, Human
gguggacccagg

SEQ ID NO: 2054175 - RNA, 20 nt, Human
aaagggcccagagagggugg

SEQ ID NO: 2054176 - RNA, 20 nt, Human
aaagggcagggcaucuccug

SEQ ID NO: 2054177 - RNA, 18 nt, Human
aaaggggcagaaaaacuc

SEQ ID NO: 2054178 - RNA, 13 nt, Human
aaaggggggaggg

SEQ ID NO: 2054179 - RNA, 14 nt, Human
aaaggggggagggg

SEQ ID NO: 2054180 - RNA, 18 nt, Human
aaaggggggagggggagg

SEQ ID NO: 2054181 - RNA, 18 nt, Human
aaagguuauuuucuccug

SEQ ID NO: 2054182 - RNA, 17 nt, Human
aaagguucacuaaagca

SEQ ID NO: 2054183 - RNA, 18 nt, Human
aaaggggucccauagagg

SEQ ID NO: 2054184 - RNA, 17 nt, Human
aaaggugguaugugugu

SEQ ID NO: 2054185 - RNA, 19 nt, Human
aaaggugguaugugugugu

SEQ ID NO: 2054186 - RNA, 21 nt, Human
aaaggugguauguguguguau

SEQ ID NO: 2054187 - RNA, 18 nt, Human
aaagguggugaggcaaua

SEQ ID NO: 2054188 - RNA, 22 nt, Human
aaaggugguauguguguguaug

SEQ ID NO: 2054189 - RNA, 21 nt, Human
aaaggugccugugaggcaggg

SEQ ID NO: 2054190 - RNA, 19 nt, Human
aaagguggacuggaagggg

SEQ ID NO: 2054191 - RNA, 12 nt, Human
gguggcuggguu

SEQ ID NO: 2054192 - RNA, 18 nt, Human
gguggcuggguuggaggg

SEQ ID NO: 2054193 - RNA, 18 nt, Human
ggugggcugagcccuggc

SEQ ID NO: 2054194 - RNA, 15 nt, Human
ggugggcugagcccu

SEQ ID NO: 2054195 - RNA, 17 nt, Human
ggugggcugagcccugg

SEQ ID NO: 2054196 - RNA, 15 nt, Human
ggugggagagcccag

SEQ ID NO: 2054197 - RNA, 16 nt, Human
ggugggagagcccagc

SEQ ID NO: 2054198 - RNA, 13 nt, Human
ggugggcugagcc

SEQ ID NO: 2054199 - RNA, 20 nt, Human
ggugggaggaucucuugagc

SEQ ID NO: 2054200 - RNA, 16 nt, Human
aaagugguauagaaau

SEQ ID NO: 2054201 - RNA, 17 nt, Human
aaagugguauagaaaug

SEQ ID NO: 2054202 - RNA, 20 nt, Human
aaagugguauagaaaugcug

SEQ ID NO: 2054203 - RNA, 21 nt, Human
aaaguauccugcuucugauau

SEQ ID NO: 2054204 - RNA, 15 nt, Human
aaaguaucgggggcu

SEQ ID NO: 2054205 - RNA, 19 nt, Human
aaaguaucgggggcugggg

SEQ ID NO: 2054206 - RNA, 20 nt, Human
aaaguaucgggggcuggggc

SEQ ID NO: 2054207 - RNA, 14 nt, Human
aaaguagauuaaga

SEQ ID NO: 2054208 - RNA, 20 nt, Human
aaaguagaagucuuagaugu

SEQ ID NO: 2054209 - RNA, 22 nt, Human
aaaguagaagucuuagauguau

SEQ ID NO: 2054210 - RNA, 22 nt, Human
aaaguaauuucuucucaaaggg

SEQ ID NO: 2054211 - RNA, 13 nt, Human
gguuuguauauug

SEQ ID NO: 2054212 - RNA, 19 nt, Human
gguuuggggagcagagaca

SEQ ID NO: 2054213 - RNA, 19 nt, Human
gguuuguguuugaguuuua

SEQ ID NO: 2054214 - RNA, 18 nt, Human
gguuuuaauugaaggaaa

SEQ ID NO: 2054215 - RNA, 19 nt, Human
aaaguaagcccuugaagau

SEQ ID NO: 2054216 - RNA, 19 nt, Human
aaaguaaguaccacucagg

SEQ ID NO: 2054217 - RNA, 15 nt, Human
gguuuuauauuuuua

SEQ ID NO: 2054218 - RNA, 12 nt, Human
gguuucuagcau

SEQ ID NO: 2054219 - RNA, 14 nt, Human
gguucccccagccc

SEQ ID NO: 2054220 - RNA, 15 nt, Human
gguucccccagcccu

SEQ ID NO: 2054221 - RNA, 13 nt, Human
gguucccccagcc

SEQ ID NO: 2054222 - RNA, 16 nt, Human
gguucccccagcccug

SEQ ID NO: 2054223 - RNA, 21 nt, Human
gguuccggaauccuguccuca

SEQ ID NO: 2054224 - RNA, 23 nt, Human
gguucguggaaagggugcugcuu

SEQ ID NO: 2054225 - RNA, 18 nt, Human
gguucuacaaucuauuua

SEQ ID NO: 2054226 - RNA, 13 nt, Human
gguguuuauacag

SEQ ID NO: 2054227 - RNA, 11 nt, Human
gguguggggga

SEQ ID NO: 2054228 - RNA, 13 nt, Human
ggugugggggaag

SEQ ID NO: 2054229 - RNA, 17 nt, Human
gguguugacaugugcuu

SEQ ID NO: 2054230 - RNA, 13 nt, Human
gguguguuuuugg

SEQ ID NO: 2054231 - RNA, 14 nt, Human
gguguguuuuuggg

SEQ ID NO: 2054232 - RNA, 22 nt, Human
gguguguuuuugggaugucuua

SEQ ID NO: 2054233 - RNA, 14 nt, Human
gguguguguagcca

SEQ ID NO: 2054234 - RNA, 13 nt, Human
gguggggcugcuc

SEQ ID NO: 2054235 - RNA, 17 nt, Human
gguggggcugcuccucc

SEQ ID NO: 2054236 - RNA, 18 nt, Human
gguggggcugcuccucca

SEQ ID NO: 2054237 - RNA, 22 nt, Human
gguggggcugcuccuccagggc

SEQ ID NO: 2054238 - RNA, 13 nt, Human
ggugggggccucg

SEQ ID NO: 2054239 - RNA, 14 nt, Human
gguguggagaagcg

SEQ ID NO: 2054240 - RNA, 23 nt, Human
gguguggagaagcggcuggcagc

SEQ ID NO: 2054241 - RNA, 12 nt, Human
gguguggagaag

SEQ ID NO: 2054242 - RNA, 23 nt, Human
aagauggcacuuauaaccaaagc

SEQ ID NO: 2054243 - RNA, 15 nt, Human
aagauggaugugcuu

SEQ ID NO: 2054244 - RNA, 14 nt, Human
aagauggauucuca

SEQ ID NO: 2054245 - RNA, 16 nt, Human
aagauggauucucaga

SEQ ID NO: 2054246 - RNA, 17 nt, Human
aagauggauucucagau

SEQ ID NO: 2054247 - RNA, 21 nt, Human
aagauggauucucagauauuu

SEQ ID NO: 2054248 - RNA, 21 nt, Human
aagauggauugguguaaaagg

SEQ ID NO: 2054249 - RNA, 16 nt, Human
aagauggcugugccuc

SEQ ID NO: 2054250 - RNA, 17 nt, Human
aagauggcugacuuugc

SEQ ID NO: 2054251 - RNA, 23 nt, Human
aagaucaaaagguuaauaaagua

SEQ ID NO: 2054252 - RNA, 20 nt, Human
aagaucaaaagguuaauaaa

SEQ ID NO: 2054253 - RNA, 14 nt, Human
aagcaaaauauuau

SEQ ID NO: 2054254 - RNA, 13 nt, Human
aagcaaaauauua

SEQ ID NO: 2054255 - RNA, 18 nt, Human
aagcaaaugugaccugug

SEQ ID NO: 2054256 - RNA, 18 nt, Human
aagcaaaaacgaaagcug

SEQ ID NO: 2054257 - RNA, 20 nt, Human
aagcaaaaacgaaagcuggg

SEQ ID NO: 2054258 - RNA, 14 nt, Human
aagcaaauguuaca

SEQ ID NO: 2054259 - RNA, 19 nt, Human
gugucagguggggcagcuu

SEQ ID NO: 2054260 - RNA, 23 nt, Human
gugucacuacucacagucucuuu

SEQ ID NO: 2054261 - RNA, 18 nt, Human
gugugaaagucagaugcc

SEQ ID NO: 2054262 - RNA, 23 nt, Human
gugugaaccaccacacccagccc

SEQ ID NO: 2054263 - RNA, 13 nt, Human
gugucuguauuua

SEQ ID NO: 2054264 - RNA, 14 nt, Human
gugucuguauuuau

SEQ ID NO: 2054265 - RNA, 18 nt, Human
gugucagguggggcagcu

SEQ ID NO: 2054266 - RNA, 14 nt, Human
gugucagguggggc

SEQ ID NO: 2054267 - RNA, 22 nt, Human
gugucaccugaagacucauucu

SEQ ID NO: 2054268 - RNA, 15 nt, Human
aagagguauaaagcu

SEQ ID NO: 2054269 - RNA, 18 nt, Human
guguaugugcgugugugc

SEQ ID NO: 2054270 - RNA, 22 nt, Human
guguauguuugcacacuugugu

SEQ ID NO: 2054271 - RNA, 18 nt, Human
guguauguuugcacacuu

SEQ ID NO: 2054272 - RNA, 14 nt, Human
gugucaccugaaga

SEQ ID NO: 2054273 - RNA, 12 nt, Human
guguauuguucc

SEQ ID NO: 2054274 - RNA, 19 nt, Human
guguauucuaguuuuguca

SEQ ID NO: 2054275 - RNA, 14 nt, Human
gugcugcugcugcu

SEQ ID NO: 2054276 - RNA, 15 nt, Human
gugcugcugcugcug

SEQ ID NO: 2054277 - RNA, 19 nt, Human
gugguucuacaaucuauuu

SEQ ID NO: 2054278 - RNA, 18 nt, Human
gugguuuaguguaaaaau

SEQ ID NO: 2054279 - RNA, 19 nt, Human
gugguuuaguguaaaaaug

SEQ ID NO: 2054280 - RNA, 20 nt, Human
gugguuuaguguaaaaauga

SEQ ID NO: 2054281 - RNA, 19 nt, Human
gugguuuucuuuugccaug

SEQ ID NO: 2054282 - RNA, 12 nt, Human
guguaaaaauga

SEQ ID NO: 2054283 - RNA, 15 nt, Human
guguaaaaaugagaa

SEQ ID NO: 2054284 - RNA, 16 nt, Human
guguaaaaaugagaac

SEQ ID NO: 2054285 - RNA, 20 nt, Human
guguaaaaaugagaacaugu

SEQ ID NO: 2054286 - RNA, 16 nt, Human
gugguuuuugagccau

SEQ ID NO: 2054287 - RNA, 12 nt, Human
guguaacagcug

SEQ ID NO: 2054288 - RNA, 15 nt, Human
guguaacagcugagg

SEQ ID NO: 2054289 - RNA, 21 nt, Human
guguaacagcugaggucucuu

SEQ ID NO: 2054290 - RNA, 20 nt, Human
guguaacugcccaaagcagc

SEQ ID NO: 2054291 - RNA, 18 nt, Human
guguaacuggcaguuuuc

SEQ ID NO: 2054292 - RNA, 17 nt, Human
guguaacaggucuccuc

SEQ ID NO: 2054293 - RNA, 19 nt, Human
guguaacaggucuccucuu

SEQ ID NO: 2054294 - RNA, 15 nt, Human
guguaacauaugcaa

SEQ ID NO: 2054295 - RNA, 21 nt, Human
guguaaccugagauggcccuc

SEQ ID NO: 2054296 - RNA, 23 nt, Human
guguaaccugagauggcccucug

SEQ ID NO: 2054297 - RNA, 17 nt, Human
aagagggagaagcauga

SEQ ID NO: 2054298 - RNA, 18 nt, Human
aagagggagaagcaugaa

SEQ ID NO: 2054299 - RNA, 15 nt, Human
aagaggccaaugccc

SEQ ID NO: 2054300 - RNA, 14 nt, Human
aagaggcagggucu

SEQ ID NO: 2054301 - RNA, 19 nt, Human
guguaacugcccaaagcag

SEQ ID NO: 2054302 - RNA, 11 nt, Human
aagaggcaggg

SEQ ID NO: 2054303 - RNA, 13 nt, Human
aagauaggcucug

SEQ ID NO: 2054304 - RNA, 14 nt, Human
aagauaggcucugc

SEQ ID NO: 2054305 - RNA, 15 nt, Human
aagauaggcucugca

SEQ ID NO: 2054306 - RNA, 16 nt, Human
aagauaggcucugcac

SEQ ID NO: 2054307 - RNA, 17 nt, Human
aagauaggcucugcaca

SEQ ID NO: 2054308 - RNA, 18 nt, Human
aagauaggcucugcacag

SEQ ID NO: 2054309 - RNA, 22 nt, Human
aagagggucugaggaauccaga

SEQ ID NO: 2054310 - RNA, 13 nt, Human
guguuucuuuagu

SEQ ID NO: 2054311 - RNA, 16 nt, Human
guguuucuuuaguuuu

SEQ ID NO: 2054312 - RNA, 17 nt, Human
aagcacagaaaacuaga

SEQ ID NO: 2054313 - RNA, 19 nt, Human
aagcacagaaggaggagga

SEQ ID NO: 2054314 - RNA, 15 nt, Human
aagcacagugccugc

SEQ ID NO: 2054315 - RNA, 17 nt, Human
aagcaccuccugccucg

SEQ ID NO: 2054316 - RNA, 14 nt, Human
aagcaccccaugcc

SEQ ID NO: 2054317 - RNA, 19 nt, Human
aagcaccgccuccaaaugc

SEQ ID NO: 2054318 - RNA, 12 nt, Human
aagcacccuuga

SEQ ID NO: 2054319 - RNA, 12 nt, Human
aagcaccugccg

SEQ ID NO: 2054320 - RNA, 13 nt, Human
aagcaccugccga

SEQ ID NO: 2054321 - RNA, 17 nt, Human
aagcaccugccgaccuc

SEQ ID NO: 2054322 - RNA, 20 nt, Human
aagcaccugccgaccucguc

SEQ ID NO: 2054323 - RNA, 21 nt, Human
aagcacgugguaaaacacuug

SEQ ID NO: 2054324 - RNA, 21 nt, Human
aagcacuccucccugauguac

SEQ ID NO: 2054325 - RNA, 23 nt, Human
aagcacuccucccugauguacag

SEQ ID NO: 2054326 - RNA, 12 nt, Human
aagcacucgugu

SEQ ID NO: 2054327 - RNA, 16 nt, Human
aagcaccuccugccuc

SEQ ID NO: 2054328 - RNA, 15 nt, Human
aagcaccuccugccu

SEQ ID NO: 2054329 - RNA, 14 nt, Human
aagcaccuccugcc

SEQ ID NO: 2054330 - RNA, 13 nt, Human
aagcaccuccugc

SEQ ID NO: 2054331 - RNA, 16 nt, Human
aagcacaucugcauuu

SEQ ID NO: 2054332 - RNA, 20 nt, Human
aagccaaagcuaggccuggc

SEQ ID NO: 2054333 - RNA, 14 nt, Human
aagccaagcagcca

SEQ ID NO: 2054334 - RNA, 16 nt, Human
aagccaagcagccaag

SEQ ID NO: 2054335 - RNA, 17 nt, Human
aagccaagcagccaagc

SEQ ID NO: 2054336 - RNA, 18 nt, Human
aagccaaagcuaggccug

SEQ ID NO: 2054337 - RNA, 17 nt, Human
aagccaaagcuaggccu

SEQ ID NO: 2054338 - RNA, 13 nt, Human
aagccaagggccu

SEQ ID NO: 2054339 - RNA, 16 nt, Human
aagccaagggccucuu

SEQ ID NO: 2054340 - RNA, 22 nt, Human
aagccaagucagcuuugccuuc

SEQ ID NO: 2054341 - RNA, 16 nt, Human
aagcauggagaacagu

SEQ ID NO: 2054342 - RNA, 22 nt, Human
aagcauuguuugcuuauuguuc

SEQ ID NO: 2054343 - RNA, 23 nt, Human
aagcauuguuugcuuauuguucc

SEQ ID NO: 2054344 - RNA, 11 nt, Human
aagcauuguuu

SEQ ID NO: 2054345 - RNA, 14 nt, Human
aagcauuguuugcu

SEQ ID NO: 2054346 - RNA, 20 nt, Human
aagcauuguuugcuuauugu

SEQ ID NO: 2054347 - RNA, 21 nt, Human
aagcauuguuugcuuauuguu

SEQ ID NO: 2054348 - RNA, 16 nt, Human
aagcauuuacuuugaa

SEQ ID NO: 2054349 - RNA, 16 nt, Human
aagccaaagacuuagu

SEQ ID NO: 2054350 - RNA, 17 nt, Human
aagcauauuguuauuau

SEQ ID NO: 2054351 - RNA, 23 nt, Human
aagcauauuguuauuauauaauu

SEQ ID NO: 2054352 - RNA, 14 nt, Human
aagcaucaaacucu

SEQ ID NO: 2054353 - RNA, 14 nt, Human
aagcaucacaaaug

SEQ ID NO: 2054354 - RNA, 15 nt, Human
aagcaucacaaauga

SEQ ID NO: 2054355 - RNA, 21 nt, Human
aagcaucacaaaugauauuaa

SEQ ID NO: 2054356 - RNA, 15 nt, Human
aagcaucaccucagg

SEQ ID NO: 2054357 - RNA, 16 nt, Human
aagcaucaccucaggc

SEQ ID NO: 2054358 - RNA, 18 nt, Human
aagcaucaccucaggcca

SEQ ID NO: 2054359 - RNA, 19 nt, Human
aagcaucaccucaggccag

SEQ ID NO: 2054360 - RNA, 23 nt, Human
aagcaucaccucaggccaggugc

SEQ ID NO: 2054361 - RNA, 15 nt, Human
aagcaucaaacucuu

SEQ ID NO: 2054362 - RNA, 13 nt, Human
aagcaugaaaaag

SEQ ID NO: 2054363 - RNA, 16 nt, Human
aagcauguaggagaau

SEQ ID NO: 2054364 - RNA, 17 nt, Human
aagcaugucucaauagu

SEQ ID NO: 2054365 - RNA, 13 nt, Human
aagcauguggcau

SEQ ID NO: 2054366 - RNA, 19 nt, Human
aagcauguggcauguucau

SEQ ID NO: 2054367 - RNA, 12 nt, Human
guuaauaaaagu

SEQ ID NO: 2054368 - RNA, 16 nt, Human
guuaauauucuuucaa

SEQ ID NO: 2054369 - RNA, 17 nt, Human
guuaauauucuuucaau

SEQ ID NO: 2054370 - RNA, 12 nt, Human
aagcccagcucc

SEQ ID NO: 2054371 - RNA, 13 nt, Human
aagcccagcucca

SEQ ID NO: 2054372 - RNA, 14 nt, Human
aagcccagcuccag

SEQ ID NO: 2054373 - RNA, 15 nt, Human
aagcccagcuccagg

SEQ ID NO: 2054374 - RNA, 21 nt, Human
aagcccagcuccagggccaga

SEQ ID NO: 2054375 - RNA, 16 nt, Human
aagcccaaccuccuga

SEQ ID NO: 2054376 - RNA, 18 nt, Human
aagcccaauauuauaauu

SEQ ID NO: 2054377 - RNA, 17 nt, Human
aagcccaaccuccugac

SEQ ID NO: 2054378 - RNA, 22 nt, Human
aagcccaaccuccugaccuguc

SEQ ID NO: 2054379 - RNA, 20 nt, Human
aagccauucuaaggaaauua

SEQ ID NO: 2054380 - RNA, 17 nt, Human
guuacugaucaugcauu

SEQ ID NO: 2054381 - RNA, 18 nt, Human
guuacugaucaugcauug

SEQ ID NO: 2054382 - RNA, 19 nt, Human
guuacugaucaugcauugu

SEQ ID NO: 2054383 - RNA, 17 nt, Human
guuaaucaacugaaagu

SEQ ID NO: 2054384 - RNA, 13 nt, Human
guuagagaugccu

SEQ ID NO: 2054385 - RNA, 18 nt, Human
guuagagaugccucccug

SEQ ID NO: 2054386 - RNA, 16 nt, Human
guuacuguuauagagg

SEQ ID NO: 2054387 - RNA, 10 nt, Human
guuauuuaaa

SEQ ID NO: 2054388 - RNA, 22 nt, Human
guuagaguccaacguggggcag

SEQ ID NO: 2054389 - RNA, 16 nt, Human
aagccucccacgacug

SEQ ID NO: 2054390 - RNA, 19 nt, Human
aagccuccauuuaguucuu

SEQ ID NO: 2054391 - RNA, 15 nt, Human
aagccuccuccagcc

SEQ ID NO: 2054392 - RNA, 20 nt, Human
aagccuccauuuaguucuuu

SEQ ID NO: 2054393 - RNA, 22 nt, Human
aagccuccauuuaguucuuugu

SEQ ID NO: 2054394 - RNA, 17 nt, Human
aagccuguaaucccagc

SEQ ID NO: 2054395 - RNA, 15 nt, Human
aagcuaggugcuaau

SEQ ID NO: 2054396 - RNA, 22 nt, Human
aagcuaggguggcccuugcagu

SEQ ID NO: 2054397 - RNA, 15 nt, Human
aagcuaggguggccc

SEQ ID NO: 2054398 - RNA, 19 nt, Human
aagcuaggguggcccuugc

SEQ ID NO: 2054399 - RNA, 16 nt, Human
aagccuucauugccuu

SEQ ID NO: 2054400 - RNA, 16 nt, Human
aagccuuccacacuca

SEQ ID NO: 2054401 - RNA, 23 nt, Human
guuauuuucuuugaaauuguuua

SEQ ID NO: 2054402 - RNA, 15 nt, Human
guucagcugcuucuc

SEQ ID NO: 2054403 - RNA, 13 nt, Human
guuauuuucuccu

SEQ ID NO: 2054404 - RNA, 23 nt, Human
guucagcuuguaaauagcucagg

SEQ ID NO: 2054405 - RNA, 15 nt, Human
guucaggagucccaa

SEQ ID NO: 2054406 - RNA, 18 nt, Human
guucaggagucccaagga

SEQ ID NO: 2054407 - RNA, 22 nt, Human
guucaggguuggccccugcccg

SEQ ID NO: 2054408 - RNA, 21 nt, Human
guucaggguuggccccugccc

SEQ ID NO: 2054409 - RNA, 20 nt, Human
guucaggagucccaaggaaa

SEQ ID NO: 2054410 - RNA, 21 nt, Human
guucaggagucccaaggaaag

SEQ ID NO: 2054411 - RNA, 20 nt, Human
guucaggguuggccccugcc

SEQ ID NO: 2054412 - RNA, 21 nt, Human
aagccgugauuuucauugcug

SEQ ID NO: 2054413 - RNA, 14 nt, Human
aagccguggcuucc

SEQ ID NO: 2054414 - RNA, 13 nt, Human
aagccguggcuuc

SEQ ID NO: 2054415 - RNA, 15 nt, Human
aagccguggcuuccc

SEQ ID NO: 2054416 - RNA, 14 nt, Human
aagccgugcccugc

SEQ ID NO: 2054417 - RNA, 18 nt, Human
guucagguaacaggcaga

SEQ ID NO: 2054418 - RNA, 17 nt, Human
guucagguaacaggcag

SEQ ID NO: 2054419 - RNA, 14 nt, Human
guucaguaccacau

SEQ ID NO: 2054420 - RNA, 19 nt, Human
guucaggggacucagcccu

SEQ ID NO: 2054421 - RNA, 13 nt, Human
guucagguagcug

SEQ ID NO: 2054422 - RNA, 15 nt, Human
guucaggggacucag

SEQ ID NO: 2054423 - RNA, 18 nt, Human
guucaggggacucagccc

SEQ ID NO: 2054424 - RNA, 22 nt, Human
guucaguaacagggccuugcua

SEQ ID NO: 2054425 - RNA, 13 nt, Human
guucagucuuuca

SEQ ID NO: 2054426 - RNA, 16 nt, Human
guucuuaagacgugau

SEQ ID NO: 2054427 - RNA, 15 nt, Human
guucucucuauggua

SEQ ID NO: 2054428 - RNA, 18 nt, Human
guucucucuaugguaaag

SEQ ID NO: 2054429 - RNA, 23 nt, Human
guucucucuaugguaaagauauu

SEQ ID NO: 2054430 - RNA, 13 nt, Human
guucucucugccu

SEQ ID NO: 2054431 - RNA, 17 nt, Human
guucucucugccuguga

SEQ ID NO: 2054432 - RNA, 22 nt, Human
guucucucugccugugagccag

SEQ ID NO: 2054433 - RNA, 16 nt, Human
guucuguuuuguuuug

SEQ ID NO: 2054434 - RNA, 23 nt, Human
guucuguuuuguuuuguuuuuua

SEQ ID NO: 2054435 - RNA, 14 nt, Human
guucucugaggaca

SEQ ID NO: 2054436 - RNA, 12 nt, Human
guucucugagga

SEQ ID NO: 2054437 - RNA, 15 nt, Human
guucucucuucucca

SEQ ID NO: 2054438 - RNA, 19 nt, Human
guucuucuaccacccacca

SEQ ID NO: 2054439 - RNA, 14 nt, Human
guucuucgaggugg

SEQ ID NO: 2054440 - RNA, 19 nt, Human
guucuugccacugcacucc

SEQ ID NO: 2054441 - RNA, 22 nt, Human
guugaccuaagauuuauuuugu

SEQ ID NO: 2054442 - RNA, 23 nt, Human
guugauagcaagugaauuuuucu

SEQ ID NO: 2054443 - RNA, 19 nt, Human
guugacuugacagaacacu

SEQ ID NO: 2054444 - RNA, 20 nt, Human
guugacuugacagaacacug

SEQ ID NO: 2054445 - RNA, 12 nt, Human
guugagaaauga

SEQ ID NO: 2054446 - RNA, 14 nt, Human
guugacuuucaggu

SEQ ID NO: 2054447 - RNA, 22 nt, Human
guugauagcaagugaauuuuuc

SEQ ID NO: 2054448 - RNA, 17 nt, Human
aagcucugcuccucucc

SEQ ID NO: 2054449 - RNA, 17 nt, Human
aagcucagacugguuga

SEQ ID NO: 2054450 - RNA, 13 nt, Human
aagcucagcccac

SEQ ID NO: 2054451 - RNA, 14 nt, Human
aagcucagcccacc

SEQ ID NO: 2054452 - RNA, 17 nt, Human
aagcucuugaagacacu

SEQ ID NO: 2054453 - RNA, 21 nt, Human
aagcucuggugacaccagccu

SEQ ID NO: 2054454 - RNA, 20 nt, Human
aagcucuggugacaccagcc

SEQ ID NO: 2054455 - RNA, 20 nt, Human
aagcucuugaagacacugaa

SEQ ID NO: 2054456 - RNA, 19 nt, Human
aagcucuugaagacacuga

SEQ ID NO: 2054457 - RNA, 19 nt, Human
aagcucacaguuccucgcc

SEQ ID NO: 2054458 - RNA, 20 nt, Human
aagcucacaguuccucgccc

SEQ ID NO: 2054459 - RNA, 22 nt, Human
aagcucacaguuccucgcccug

SEQ ID NO: 2054460 - RNA, 23 nt, Human
aagcucacaguuccucgcccugg

SEQ ID NO: 2054461 - RNA, 14 nt, Human
aagcuuaguauaaa

SEQ ID NO: 2054462 - RNA, 23 nt, Human
aagcuuccuuuguuuuuuuuucc

SEQ ID NO: 2054463 - RNA, 22 nt, Human
aagcuucgaggcccagcgaccu

SEQ ID NO: 2054464 - RNA, 20 nt, Human
aagcuucuuaaaugagaagg

SEQ ID NO: 2054465 - RNA, 22 nt, Human
aagcuucuuaaaugagaaggaa

SEQ ID NO: 2054466 - RNA, 16 nt, Human
aagcuuccauuccaca

SEQ ID NO: 2054467 - RNA, 21 nt, Human
aagcuuggcuguagaaggaga

SEQ ID NO: 2054468 - RNA, 15 nt, Human
aagcuuaaaaaaaac

SEQ ID NO: 2054469 - RNA, 16 nt, Human
aagcuuaaaaaaaacu

SEQ ID NO: 2054470 - RNA, 16 nt, Human
aagcucuuugaaacaa

SEQ ID NO: 2054471 - RNA, 21 nt, Human
aagcucuugaagacacugaaa

SEQ ID NO: 2054472 - RNA, 15 nt, Human
guucccccagcccug

SEQ ID NO: 2054473 - RNA, 16 nt, Human
guucccccagcccugu

SEQ ID NO: 2054474 - RNA, 17 nt, Human
guucccccagcccugug

SEQ ID NO: 2054475 - RNA, 20 nt, Human
guucccccagcccuguggaa

SEQ ID NO: 2054476 - RNA, 13 nt, Human
guucccccagccc

SEQ ID NO: 2054477 - RNA, 14 nt, Human
guucccccagcccu

SEQ ID NO: 2054478 - RNA, 13 nt, Human
guucccuuugcuc

SEQ ID NO: 2054479 - RNA, 17 nt, Human
guucccuuugcuccacc

SEQ ID NO: 2054480 - RNA, 18 nt, Human
guucccuuugcuccaccc

SEQ ID NO: 2054481 - RNA, 20 nt, Human
guucccuuugcuccacccca

SEQ ID NO: 2054482 - RNA, 19 nt, Human
guuccggaauccuguccuc

SEQ ID NO: 2054483 - RNA, 22 nt, Human
guuccggaauccuguccucagc

SEQ ID NO: 2054484 - RNA, 17 nt, Human
guucccugaaaacccag

SEQ ID NO: 2054485 - RNA, 18 nt, Human
guucccugaaaacccaga

SEQ ID NO: 2054486 - RNA, 19 nt, Human
guucccugaaaacccagag

SEQ ID NO: 2054487 - RNA, 20 nt, Human
guucccugaaaacccagaga

SEQ ID NO: 2054488 - RNA, 21 nt, Human
guucccugaaaacccagagag

SEQ ID NO: 2054489 - RNA, 13 nt, Human
guucccuucuccu

SEQ ID NO: 2054490 - RNA, 12 nt, Human
guucccuuggcc

SEQ ID NO: 2054491 - RNA, 13 nt, Human
guucccuuggccu

SEQ ID NO: 2054492 - RNA, 14 nt, Human
guucccuuggccuc

SEQ ID NO: 2054493 - RNA, 15 nt, Human
guucccuuggccuca

SEQ ID NO: 2054494 - RNA, 16 nt, Human
guucccuuggccucag

SEQ ID NO: 2054495 - RNA, 14 nt, Human
aaguuacacauuuu

SEQ ID NO: 2054496 - RNA, 13 nt, Human
aaguuagcucagg

SEQ ID NO: 2054497 - RNA, 23 nt, Human
aaguuaagaauguucuuauguug

SEQ ID NO: 2054498 - RNA, 20 nt, Human
aaguuacaaauugcuugaaa

SEQ ID NO: 2054499 - RNA, 11 nt, Human
aaguuaagaau

SEQ ID NO: 2054500 - RNA, 13 nt, Human
aaguuaacagaga

SEQ ID NO: 2054501 - RNA, 13 nt, Human
aagugugugugcg

SEQ ID NO: 2054502 - RNA, 11 nt, Human
aagugugugug

SEQ ID NO: 2054503 - RNA, 17 nt, Human
aaguguguuuccuucag

SEQ ID NO: 2054504 - RNA, 21 nt, Human
aaguguguuuccuucagugca

SEQ ID NO: 2054505 - RNA, 14 nt, Human
aaguuagcucagga

SEQ ID NO: 2054506 - RNA, 15 nt, Human
aaguuagcucaggag

SEQ ID NO: 2054507 - RNA, 18 nt, Human
aaguuauaaaucaauguc

SEQ ID NO: 2054508 - RNA, 19 nt, Human
aaguuauaaaucaauguca

SEQ ID NO: 2054509 - RNA, 20 nt, Human
aaguuauaaaucaaugucac

SEQ ID NO: 2054510 - RNA, 14 nt, Human
aaguuauuuauuuu

SEQ ID NO: 2054511 - RNA, 14 nt, Human
aaguuauuaauauu

SEQ ID NO: 2054512 - RNA, 16 nt, Human
aaguuauauaaagaga

SEQ ID NO: 2054513 - RNA, 19 nt, Human
aaguuauauaaagagaaaa

SEQ ID NO: 2054514 - RNA, 20 nt, Human
aaguuauauaaagagaaaau

SEQ ID NO: 2054515 - RNA, 21 nt, Human
aaguuauauaaagagaaaauu

SEQ ID NO: 2054516 - RNA, 22 nt, Human
aaguuauauaaagagaaaauug

SEQ ID NO: 2054517 - RNA, 23 nt, Human
aaguuauauaaagagaaaauuga

SEQ ID NO: 2054518 - RNA, 15 nt, Human
aaguguccgagaacu

SEQ ID NO: 2054519 - RNA, 17 nt, Human
aaguguccgagaacuaa

SEQ ID NO: 2054520 - RNA, 19 nt, Human
aagugucucaguccaccug

SEQ ID NO: 2054521 - RNA, 14 nt, Human
aagugucugugugc

SEQ ID NO: 2054522 - RNA, 12 nt, Human
aagugccccugc

SEQ ID NO: 2054523 - RNA, 13 nt, Human
aagugccccugcu

SEQ ID NO: 2054524 - RNA, 21 nt, Human
aagugccagucuugugucugc

SEQ ID NO: 2054525 - RNA, 16 nt, Human
aagugcaugcucucug

SEQ ID NO: 2054526 - RNA, 21 nt, Human
aagugccacugcccgagcugg

SEQ ID NO: 2054527 - RNA, 22 nt, Human
aagugccacugcccgagcuggu

SEQ ID NO: 2054528 - RNA, 23 nt, Human
aagugccacugcccgagcuggug

SEQ ID NO: 2054529 - RNA, 12 nt, Human
aaguguguaugu

SEQ ID NO: 2054530 - RNA, 22 nt, Human
aaguguguaugugcgugugugc

SEQ ID NO: 2054531 - RNA, 13 nt, Human
aagugugguagag

SEQ ID NO: 2054532 - RNA, 13 nt, Human
aagugugagcaaa

SEQ ID NO: 2054533 - RNA, 11 nt, Human
aagugugagua

SEQ ID NO: 2054534 - RNA, 18 nt, Human
aagugugaguaagagcug

SEQ ID NO: 2054535 - RNA, 19 nt, Human
aagugugaguaagagcugg

SEQ ID NO: 2054536 - RNA, 20 nt, Human
aagugugaguaagagcuggu

SEQ ID NO: 2054537 - RNA, 21 nt, Human
aagugugaguaagagcuggug

SEQ ID NO: 2054538 - RNA, 20 nt, Human
aaguucccuacuuccuguga

SEQ ID NO: 2054539 - RNA, 14 nt, Human
aaguuccucuagug

SEQ ID NO: 2054540 - RNA, 17 nt, Human
aaguucccuacuuccug

SEQ ID NO: 2054541 - RNA, 14 nt, Human
aaguucccuacuuc

SEQ ID NO: 2054542 - RNA, 17 nt, Human
aaguuuccccaccagug

SEQ ID NO: 2054543 - RNA, 22 nt, Human
aaguuuccaagcaaauguuaca

SEQ ID NO: 2054544 - RNA, 24 nt, Human
aaguuuccaagcaaauguuacaua

SEQ ID NO: 2054545 - RNA, 20 nt, Human
aaguuccuuauguauauuua

SEQ ID NO: 2054546 - RNA, 13 nt, Human
aaguuauuucuug

SEQ ID NO: 2054547 - RNA, 15 nt, Human
aaguuauuucuuguu

SEQ ID NO: 2054548 - RNA, 19 nt, Human
aaguuauuucuuguuuguu

SEQ ID NO: 2054549 - RNA, 11 nt, Human
aaguucaagga

SEQ ID NO: 2054550 - RNA, 15 nt, Human
aaguucaaggaccaa

SEQ ID NO: 2054551 - RNA, 16 nt, Human
uaaaaugguguuuuca

SEQ ID NO: 2054552 - RNA, 20 nt, Human
aaguuugagaucagccuggg

SEQ ID NO: 2054553 - RNA, 15 nt, Human
uaaaauguauaaguu

SEQ ID NO: 2054554 - RNA, 16 nt, Human
uaaaauguauaaguug

SEQ ID NO: 2054555 - RNA, 12 nt, Human
uaaaauugcaug

SEQ ID NO: 2054556 - RNA, 13 nt, Human
uaaaauugcaugg

SEQ ID NO: 2054557 - RNA, 21 nt, Human
uaaaauugcauggguuuugua

SEQ ID NO: 2054558 - RNA, 22 nt, Human
uaaaauugcauggguuuuguag

SEQ ID NO: 2054559 - RNA, 13 nt, Human
uaaaauugaaagg

SEQ ID NO: 2054560 - RNA, 12 nt, Human
uaaaauucuaaa

SEQ ID NO: 2054561 - RNA, 13 nt, Human
uaaaauucuaaau

SEQ ID NO: 2054562 - RNA, 14 nt, Human
uaaaauucuaaaua

SEQ ID NO: 2054563 - RNA, 18 nt, Human
uaaaaugugauuuuucug

SEQ ID NO: 2054564 - RNA, 19 nt, Human
uaaaaugugauuuuucuga

SEQ ID NO: 2054565 - RNA, 21 nt, Human
aagugauucuccugccucagc

SEQ ID NO: 2054566 - RNA, 12 nt, Human
aagugcaggcug

SEQ ID NO: 2054567 - RNA, 13 nt, Human
aagugcaggcugg

SEQ ID NO: 2054568 - RNA, 17 nt, Human
aagugcaggcuggcacc

SEQ ID NO: 2054569 - RNA, 21 nt, Human
aagugcaggcuggcaccgccu

SEQ ID NO: 2054570 - RNA, 23 nt, Human
aagugauccucccaccucagccu

SEQ ID NO: 2054571 - RNA, 14 nt, Human
uaaaauaucauuca

SEQ ID NO: 2054572 - RNA, 15 nt, Human
uaaaauaucauucag

SEQ ID NO: 2054573 - RNA, 17 nt, Human
uaaaauaucauucagca

SEQ ID NO: 2054574 - RNA, 16 nt, Human
uaaaauaucauucagc

SEQ ID NO: 2054575 - RNA, 23 nt, Human
aagugaucaauaaaaugugauuu

SEQ ID NO: 2054576 - RNA, 20 nt, Human
aagugauccucccaccucag

SEQ ID NO: 2054577 - RNA, 19 nt, Human
aagugauccucccaccuca

SEQ ID NO: 2054578 - RNA, 13 nt, Human
aagugauccuccc

SEQ ID NO: 2054579 - RNA, 16 nt, Human
uaaaauauaauuguuu

SEQ ID NO: 2054580 - RNA, 22 nt, Human
uaaaauauaauuguuuuuuauc

SEQ ID NO: 2054581 - RNA, 19 nt, Human
uaaaauauauauguugauu

SEQ ID NO: 2054582 - RNA, 17 nt, Human
uaaaauauauuucagau

SEQ ID NO: 2054583 - RNA, 21 nt, Human
uaaaauagcaacacucuauau

SEQ ID NO: 2054584 - RNA, 23 nt, Human
uaaaauagccacuuaccuucaau

SEQ ID NO: 2054585 - RNA, 15 nt, Human
uaaaauagccacuua

SEQ ID NO: 2054586 - RNA, 21 nt, Human
uaaaauagccacuuaccuuca

SEQ ID NO: 2054587 - RNA, 20 nt, Human
uaaaaguacauguuaaacuu

SEQ ID NO: 2054588 - RNA, 13 nt, Human
uaaaagugaucaa

SEQ ID NO: 2054589 - RNA, 15 nt, Human
uaaaagugaucaaua

SEQ ID NO: 2054590 - RNA, 20 nt, Human
uaaaauaaccccgggcaaga

SEQ ID NO: 2054591 - RNA, 21 nt, Human
uaaaauaacuaguguugcuug

SEQ ID NO: 2054592 - RNA, 13 nt, Human
uaaaauaaauaaa

SEQ ID NO: 2054593 - RNA, 13 nt, Human
uaaaauaaaguau

SEQ ID NO: 2054594 - RNA, 17 nt, Human
uaaaauaaaguauauau

SEQ ID NO: 2054595 - RNA, 24 nt, Human
uaaaauaacuaguguugcuuggac

SEQ ID NO: 2054596 - RNA, 21 nt, Human
uaaaagaaagccucagagaau

SEQ ID NO: 2054597 - RNA, 17 nt, Human
uaaaagaaaugcacaau

SEQ ID NO: 2054598 - RNA, 20 nt, Human
uaaaagaaaugcacaauguc

SEQ ID NO: 2054599 - RNA, 21 nt, Human
uaaaagaaaugcacaaugucu

SEQ ID NO: 2054600 - RNA, 22 nt, Human
uaaaagaaaugcacaaugucuu

SEQ ID NO: 2054601 - RNA, 23 nt, Human
uaaaagaaaugcacaaugucuug

SEQ ID NO: 2054602 - RNA, 22 nt, Human
uaaaagaaagccucagagaauu

SEQ ID NO: 2054603 - RNA, 23 nt, Human
uaaaacuuuuuauauuuuauaca

SEQ ID NO: 2054604 - RNA, 13 nt, Human
uaaaacuuuuuau

SEQ ID NO: 2054605 - RNA, 16 nt, Human
uaaaacuuugcugcca

SEQ ID NO: 2054606 - RNA, 16 nt, Human
uaaaaaguauauguua

SEQ ID NO: 2054607 - RNA, 20 nt, Human
uaaaaagggcagggcaucuc

SEQ ID NO: 2054608 - RNA, 19 nt, Human
uaaaaaggcaccuauaaaa

SEQ ID NO: 2054609 - RNA, 12 nt, Human
uaaaaauacaaa

SEQ ID NO: 2054610 - RNA, 14 nt, Human
uaaaaauacaaaca

SEQ ID NO: 2054611 - RNA, 15 nt, Human
uaaaaauacaaacaa

SEQ ID NO: 2054612 - RNA, 16 nt, Human
uaaaaagucugcauua

SEQ ID NO: 2054613 - RNA, 23 nt, Human
uaaaaagucugcauuacauuccu

SEQ ID NO: 2054614 - RNA, 16 nt, Human
aagucagguccaauuu

SEQ ID NO: 2054615 - RNA, 15 nt, Human
aagucagguccaauu

SEQ ID NO: 2054616 - RNA, 18 nt, Human
aagucagcucuucuccau

SEQ ID NO: 2054617 - RNA, 19 nt, Human
aagucagcuuugccuucca

SEQ ID NO: 2054618 - RNA, 22 nt, Human
uaaaaaugagguacucuccugg

SEQ ID NO: 2054619 - RNA, 13 nt, Human
uaaaaaugagaac

SEQ ID NO: 2054620 - RNA, 14 nt, Human
uaaaaaugagaaca

SEQ ID NO: 2054621 - RNA, 18 nt, Human
uaaaaaugagaacauguu

SEQ ID NO: 2054622 - RNA, 15 nt, Human
uaaaaaugagguacu

SEQ ID NO: 2054623 - RNA, 13 nt, Human
uaaaacccaagug

SEQ ID NO: 2054624 - RNA, 16 nt, Human
uaaaacuggcaucuga

SEQ ID NO: 2054625 - RNA, 19 nt, Human
uaaaacuggcaucugacac

SEQ ID NO: 2054626 - RNA, 13 nt, Human
uaaaacugucccu

SEQ ID NO: 2054627 - RNA, 14 nt, Human
uaaaacuuugcugc

SEQ ID NO: 2054628 - RNA, 15 nt, Human
uaaaacuuugcugcc

SEQ ID NO: 2054629 - RNA, 16 nt, Human
aagucagacugcuggg

SEQ ID NO: 2054630 - RNA, 17 nt, Human
aagucagacugcuggga

SEQ ID NO: 2054631 - RNA, 20 nt, Human
aagucagacugcugggacug

SEQ ID NO: 2054632 - RNA, 16 nt, Human
aagucaaaaggugccu

SEQ ID NO: 2054633 - RNA, 19 nt, Human
aagucaaaaggugccugug

SEQ ID NO: 2054634 - RNA, 23 nt, Human
aagucaaagacauucugacaucu

SEQ ID NO: 2054635 - RNA, 22 nt, Human
aagucacugcacagugcaucuc

SEQ ID NO: 2054636 - RNA, 22 nt, Human
aagucaaaguaaaacuugcugc

SEQ ID NO: 2054637 - RNA, 14 nt, Human
aagucaaaguaaaa

SEQ ID NO: 2054638 - RNA, 21 nt, Human
aaguauucuuauuuaaugaaa

SEQ ID NO: 2054639 - RNA, 23 nt, Human
aaguauucuuauuuaaugaaaga

SEQ ID NO: 2054640 - RNA, 20 nt, Human
aaguacuucuccacccugcu

SEQ ID NO: 2054641 - RNA, 19 nt, Human
aaguacuucuccacccugc

SEQ ID NO: 2054642 - RNA, 18 nt, Human
aaguacuucuccacccug

SEQ ID NO: 2054643 - RNA, 19 nt, Human
aaguacuaagcgcuagagg

SEQ ID NO: 2054644 - RNA, 16 nt, Human
aaguacuguguacaga

SEQ ID NO: 2054645 - RNA, 16 nt, Human
aaguaauuucuucuca

SEQ ID NO: 2054646 - RNA, 22 nt, Human
aaguaauuucuucucaaagggu

SEQ ID NO: 2054647 - RNA, 16 nt, Human
aaguaauugugaaaaa

SEQ ID NO: 2054648 - RNA, 17 nt, Human
guuuuaucucugucuac

SEQ ID NO: 2054649 - RNA, 19 nt, Human
guuuugauuuaauaacaua

SEQ ID NO: 2054650 - RNA, 11 nt, Human
aaguaauuauc

SEQ ID NO: 2054651 - RNA, 13 nt, Human
aaguaauuaucgg

SEQ ID NO: 2054652 - RNA, 15 nt, Human
aaguaauuaucggga

SEQ ID NO: 2054653 - RNA, 22 nt, Human
aaguaauuaucgggaacagugu

SEQ ID NO: 2054654 - RNA, 23 nt, Human
aaguaauuaucgggaacaguguu

SEQ ID NO: 2054655 - RNA, 13 nt, Human
aaguacuauguau

SEQ ID NO: 2054656 - RNA, 19 nt, Human
guuuuaacuagaauuuauu

SEQ ID NO: 2054657 - RNA, 13 nt, Human
guuuuauuguguu

SEQ ID NO: 2054658 - RNA, 11 nt, Human
guuuuaugaua

SEQ ID NO: 2054659 - RNA, 19 nt, Human
guuuuauauuuuuauagac

SEQ ID NO: 2054660 - RNA, 16 nt, Human
guuuuaauugaaggaa

SEQ ID NO: 2054661 - RNA, 17 nt, Human
guuuuaauugaaggaaa

SEQ ID NO: 2054662 - RNA, 19 nt, Human
guuuuaauugaaggaaaga

SEQ ID NO: 2054663 - RNA, 20 nt, Human
guuuuaauugaaggaaagau

SEQ ID NO: 2054664 - RNA, 22 nt, Human
guuuugauguuuguggccucag

SEQ ID NO: 2054665 - RNA, 23 nt, Human
guuuugauguuuguggccucaga

SEQ ID NO: 2054666 - RNA, 23 nt, Human
guuuugagguuuccuucagacag

SEQ ID NO: 2054667 - RNA, 21 nt, Human
guuuugauguuuguggccuca

SEQ ID NO: 2054668 - RNA, 13 nt, Human
guuugcuuauugu

SEQ ID NO: 2054669 - RNA, 14 nt, Human
guuugcuuauuguu

SEQ ID NO: 2054670 - RNA, 15 nt, Human
guuugcuuauuguuc

SEQ ID NO: 2054671 - RNA, 16 nt, Human
guuugcuuauuguucc

SEQ ID NO: 2054672 - RNA, 17 nt, Human
guuugcuuauuguucca

SEQ ID NO: 2054673 - RNA, 19 nt, Human
guuugcuucaacugucucc

SEQ ID NO: 2054674 - RNA, 18 nt, Human
guuugcuuauuguuccaa

SEQ ID NO: 2054675 - RNA, 18 nt, Human
aaguaagaaagugaagca

SEQ ID NO: 2054676 - RNA, 20 nt, Human
aaguaagaaagugaagcaaa

SEQ ID NO: 2054677 - RNA, 20 nt, Human
guuugcuuuguaugcacuuu

SEQ ID NO: 2054678 - RNA, 19 nt, Human
guuuuaaauuuauuucaaa

SEQ ID NO: 2054679 - RNA, 12 nt, Human
guuuuaaaauua

SEQ ID NO: 2054680 - RNA, 14 nt, Human
guuuuaaaauuaaa

SEQ ID NO: 2054681 - RNA, 15 nt, Human
guuucaauucagugc

SEQ ID NO: 2054682 - RNA, 23 nt, Human
guuucaaccaagucaugugcauu

SEQ ID NO: 2054683 - RNA, 15 nt, Human
guuuauuacuuauuu

SEQ ID NO: 2054684 - RNA, 16 nt, Human
guuuauuacuuauuug

SEQ ID NO: 2054685 - RNA, 17 nt, Human
guuuauuacuuauuugg

SEQ ID NO: 2054686 - RNA, 17 nt, Human
guuuaugcaaggaagga

SEQ ID NO: 2054687 - RNA, 21 nt, Human
guuuaugauaauaaaggcacc

SEQ ID NO: 2054688 - RNA, 13 nt, Human
guuuauggccuca

SEQ ID NO: 2054689 - RNA, 14 nt, Human
guuuauggccucag

SEQ ID NO: 2054690 - RNA, 15 nt, Human
guuuauggccucagc

SEQ ID NO: 2054691 - RNA, 18 nt, Human
guuuauggccucagcugc

SEQ ID NO: 2054692 - RNA, 22 nt, Human
guuuauggccucagcugccuca

SEQ ID NO: 2054693 - RNA, 23 nt, Human
guuuauggccucagcugccucac

SEQ ID NO: 2054694 - RNA, 13 nt, Human
guuuaugagccag

SEQ ID NO: 2054695 - RNA, 13 nt, Human
guuguuuguaaau

SEQ ID NO: 2054696 - RNA, 15 nt, Human
guuguuuguaaauaa

SEQ ID NO: 2054697 - RNA, 20 nt, Human
guuguuuguaaauaagagau

SEQ ID NO: 2054698 - RNA, 19 nt, Human
guuguuuuuugaaaacaug

SEQ ID NO: 2054699 - RNA, 20 nt, Human
guuuaaaaaaguuuaaaaug

SEQ ID NO: 2054700 - RNA, 21 nt, Human
guuuaaaaaaguuuaaaaugu

SEQ ID NO: 2054701 - RNA, 22 nt, Human
guuuaaaaaaguuuaaaaugua

SEQ ID NO: 2054702 - RNA, 23 nt, Human
guuuaaaaaaguuuaaaauguau

SEQ ID NO: 2054703 - RNA, 12 nt, Human
guuuaaguguug

SEQ ID NO: 2054704 - RNA, 21 nt, Human
guuuaagugacugauggcuaa

SEQ ID NO: 2054705 - RNA, 16 nt, Human
guuuaaaguguauuau

SEQ ID NO: 2054706 - RNA, 19 nt, Human
guuuaaaguguauuauaac

SEQ ID NO: 2054707 - RNA, 21 nt, Human
guuuaaaguguauuauaacag

SEQ ID NO: 2054708 - RNA, 23 nt, Human
guuuaaaguguauuauaacagug

SEQ ID NO: 2054709 - RNA, 13 nt, Human
guuuaaaguucug

SEQ ID NO: 2054710 - RNA, 17 nt, Human
guuuaaaguucugugua

SEQ ID NO: 2054711 - RNA, 20 nt, Human
guuuaaaguucuguguauuu

SEQ ID NO: 2054712 - RNA, 21 nt, Human
guuuaaaguucuguguauuua

SEQ ID NO: 2054713 - RNA, 17 nt, Human
aaggaaaauaguaaugu

SEQ ID NO: 2054714 - RNA, 16 nt, Human
aaggcugggggaagaa

SEQ ID NO: 2054715 - RNA, 14 nt, Human
aaggcugggggaag

SEQ ID NO: 2054716 - RNA, 19 nt, Human
aaggcugggggaagaagcu

SEQ ID NO: 2054717 - RNA, 22 nt, Human
aaggcugggggaagaagcucuc

SEQ ID NO: 2054718 - RNA, 22 nt, Human
aaggcuguccuuacccaucugc

SEQ ID NO: 2054719 - RNA, 20 nt, Human
guuucacugacuuagaacca

SEQ ID NO: 2054720 - RNA, 21 nt, Human
guuucacuuucacauagaugu

SEQ ID NO: 2054721 - RNA, 21 nt, Human
aagggcuuacacguggaggaa

SEQ ID NO: 2054722 - RNA, 12 nt, Human
aagguaguuuuu

SEQ ID NO: 2054723 - RNA, 22 nt, Human
aagguaguuuuuaccuaccaca

SEQ ID NO: 2054724 - RNA, 20 nt, Human
aagguagcccuggccagagg

SEQ ID NO: 2054725 - RNA, 18 nt, Human
aagggggcaucuggccuu

SEQ ID NO: 2054726 - RNA, 21 nt, Human
aagggggguugcaguggagag

SEQ ID NO: 2054727 - RNA, 13 nt, Human
aaggggggagggg

SEQ ID NO: 2054728 - RNA, 16 nt, Human
aaggggggagggggag

SEQ ID NO: 2054729 - RNA, 11 nt, Human
aagguauaauu

SEQ ID NO: 2054730 - RNA, 23 nt, Human
aagguuucagaaagaagugggga

SEQ ID NO: 2054731 - RNA, 17 nt, Human
aagguuuguauauuguc

SEQ ID NO: 2054732 - RNA, 16 nt, Human
aagguuucugaaaauu

SEQ ID NO: 2054733 - RNA, 15 nt, Human
aaguaacuugucuua

SEQ ID NO: 2054734 - RNA, 18 nt, Human
aaguaacuugucuuaaau

SEQ ID NO: 2054735 - RNA, 22 nt, Human
aaguaacuugucuuaaauaaaa

SEQ ID NO: 2054736 - RNA, 17 nt, Human
aaguaacaagagugauu

SEQ ID NO: 2054737 - RNA, 20 nt, Human
aaguaacaagagugauucuu

SEQ ID NO: 2054738 - RNA, 15 nt, Human
aaguaaaugucugug

SEQ ID NO: 2054739 - RNA, 18 nt, Human
aaguaaaugucuguggcc

SEQ ID NO: 2054740 - RNA, 23 nt, Human
gucuaggcaggaccuguggccaa

SEQ ID NO: 2054741 - RNA, 12 nt, Human
gucuagggagag

SEQ ID NO: 2054742 - RNA, 14 nt, Human
gucuagggagagac

SEQ ID NO: 2054743 - RNA, 21 nt, Human
gucuaggagcugggaggaaaa

SEQ ID NO: 2054744 - RNA, 13 nt, Human
gucuaggagcugg

SEQ ID NO: 2054745 - RNA, 19 nt, Human
gucuagcagagcaggggca

SEQ ID NO: 2054746 - RNA, 22 nt, Human
gucuaugggacucaaugcacug

SEQ ID NO: 2054747 - RNA, 22 nt, Human
gucuaggucaguacccaccuga

SEQ ID NO: 2054748 - RNA, 22 nt, Human
gucuaguuccugaugacccagg

SEQ ID NO: 2054749 - RNA, 12 nt, Human
gucgccucugca

SEQ ID NO: 2054750 - RNA, 14 nt, Human
gucgauauuuccau

SEQ ID NO: 2054751 - RNA, 14 nt, Human
guccucuuuucuga

SEQ ID NO: 2054752 - RNA, 16 nt, Human
guccucuuucagaaaa

SEQ ID NO: 2054753 - RNA, 17 nt, Human
guccucuuucagaaaac

SEQ ID NO: 2054754 - RNA, 18 nt, Human
guccucuuucagaaaaca

SEQ ID NO: 2054755 - RNA, 19 nt, Human
guccucuuucagaaaacag

SEQ ID NO: 2054756 - RNA, 20 nt, Human
guccucuuucagaaaacaga

SEQ ID NO: 2054757 - RNA, 23 nt, Human
guccucuuucagaaaacagaaaa

SEQ ID NO: 2054758 - RNA, 15 nt, Human
guccucuuucaaagg

SEQ ID NO: 2054759 - RNA, 12 nt, Human
gucgaggcagga

SEQ ID NO: 2054760 - RNA, 16 nt, Human
gucgaggacagggagg

SEQ ID NO: 2054761 - RNA, 14 nt, Human
guccuuucccucca

SEQ ID NO: 2054762 - RNA, 15 nt, Human
guccuuucccuccac

SEQ ID NO: 2054763 - RNA, 15 nt, Human
guccuuuucacuaca

SEQ ID NO: 2054764 - RNA, 18 nt, Human
guccuuuucacuacacca

SEQ ID NO: 2054765 - RNA, 15 nt, Human
guccuuuccaguggc

SEQ ID NO: 2054766 - RNA, 22 nt, Human
guccuuuccaguggccuggcuc

SEQ ID NO: 2054767 - RNA, 23 nt, Human
guccuuuccaguggccuggcucc

SEQ ID NO: 2054768 - RNA, 13 nt, Human
guccuuucccucc

SEQ ID NO: 2054769 - RNA, 21 nt, Human
aacauucgaucucauucagua

SEQ ID NO: 2054770 - RNA, 17 nt, Human
guccucguagccaucuc

SEQ ID NO: 2054771 - RNA, 18 nt, Human
aacauugggaaaucuuau

SEQ ID NO: 2054772 - RNA, 22 nt, Human
guccuccucggaucaccgagag

SEQ ID NO: 2054773 - RNA, 21 nt, Human
guccuccucggaucaccgaga

SEQ ID NO: 2054774 - RNA, 19 nt, Human
aacauuccguuuacauuuu

SEQ ID NO: 2054775 - RNA, 22 nt, Human
aacauuccguuuacauuuuaga

SEQ ID NO: 2054776 - RNA, 17 nt, Human
aacauguauaauauuuu

SEQ ID NO: 2054777 - RNA, 20 nt, Human
aacauagacuagagaaaccg

SEQ ID NO: 2054778 - RNA, 21 nt, Human
aacauagugagaccccugucu

SEQ ID NO: 2054779 - RNA, 12 nt, Human
aacauaaagguu

SEQ ID NO: 2054780 - RNA, 13 nt, Human
aacauaaaaaguu

SEQ ID NO: 2054781 - RNA, 22 nt, Human
aacauaaaaaguuaaaaaaaau

SEQ ID NO: 2054782 - RNA, 14 nt, Human
aacauauaauauau

SEQ ID NO: 2054783 - RNA, 17 nt, Human
aacauauaauauauguu

SEQ ID NO: 2054784 - RNA, 21 nt, Human
aacauauaauauauguuuuaa

SEQ ID NO: 2054785 - RNA, 16 nt, Human
gucccuuccaggccau

SEQ ID NO: 2054786 - RNA, 16 nt, Human
gucccuugagaccuca

SEQ ID NO: 2054787 - RNA, 21 nt, Human
guccgguggaaggccuucuuu

SEQ ID NO: 2054788 - RNA, 17 nt, Human
guccgguguccuuuuca

SEQ ID NO: 2054789 - RNA, 14 nt, Human
gucccuugagaccu

SEQ ID NO: 2054790 - RNA, 24 nt, Human
guccgguguccuuuucacuacacc

SEQ ID NO: 2054791 - RNA, 19 nt, Human
gucccuuccccucccuggc

SEQ ID NO: 2054792 - RNA, 20 nt, Human
gucccuuccccucccuggcu

SEQ ID NO: 2054793 - RNA, 22 nt, Human
gucccuuccccucccuggcucc

SEQ ID NO: 2054794 - RNA, 19 nt, Human
gucccuucucuuaauuuaa

SEQ ID NO: 2054795 - RNA, 17 nt, Human
aacagucaaaacagaga

SEQ ID NO: 2054796 - RNA, 17 nt, Human
aaauuucucuacugucu

SEQ ID NO: 2054797 - RNA, 18 nt, Human
aaauuugaaccaaaacau

SEQ ID NO: 2054798 - RNA, 10 nt, Human
aaauuugaau

SEQ ID NO: 2054799 - RNA, 19 nt, Human
aacacaaacgggcucagca

SEQ ID NO: 2054800 - RNA, 20 nt, Human
aaauuugaauggguccauuu

SEQ ID NO: 2054801 - RNA, 12 nt, Human
aacacacagaca

SEQ ID NO: 2054802 - RNA, 16 nt, Human
aacacaccaggcugug

SEQ ID NO: 2054803 - RNA, 14 nt, Human
aacacacauaaagg

SEQ ID NO: 2054804 - RNA, 15 nt, Human
aacacacauaaagga

SEQ ID NO: 2054805 - RNA, 18 nt, Human
aacacacauaaaggauaa

SEQ ID NO: 2054806 - RNA, 15 nt, Human
aacacaccaggcugu

SEQ ID NO: 2054807 - RNA, 18 nt, Human
aacacagcaauuccucag

SEQ ID NO: 2054808 - RNA, 16 nt, Human
aacacagcauguguau

SEQ ID NO: 2054809 - RNA, 18 nt, Human
aacacagcauguguauuu

SEQ ID NO: 2054810 - RNA, 21 nt, Human
aacacacacacacacaacaaa

SEQ ID NO: 2054811 - RNA, 13 nt, Human
aacacaauguuau

SEQ ID NO: 2054812 - RNA, 17 nt, Human
aacacaauguuauucgu

SEQ ID NO: 2054813 - RNA, 14 nt, Human
aacacacaaaggua

SEQ ID NO: 2054814 - RNA, 15 nt, Human
aacacaaggugggca

SEQ ID NO: 2054815 - RNA, 23 nt, Human
aacacaaguagaugccugaacuu

SEQ ID NO: 2054816 - RNA, 20 nt, Human
gucagucugcuuauccuucc

SEQ ID NO: 2054817 - RNA, 19 nt, Human
aacacaaagcggggggagg

SEQ ID NO: 2054818 - RNA, 23 nt, Human
aacacugguggaggauggaaagg

SEQ ID NO: 2054819 - RNA, 17 nt, Human
gucauuugagcagggcu

SEQ ID NO: 2054820 - RNA, 21 nt, Human
aacacucacauuuauucugcu

SEQ ID NO: 2054821 - RNA, 12 nt, Human
aacacuauuuuc

SEQ ID NO: 2054822 - RNA, 15 nt, Human
aacacuauuuucaga

SEQ ID NO: 2054823 - RNA, 16 nt, Human
aacacuauuuucagaa

SEQ ID NO: 2054824 - RNA, 17 nt, Human
aacacuauuuucagaau

SEQ ID NO: 2054825 - RNA, 18 nt, Human
aacacuauuuucagaauc

SEQ ID NO: 2054826 - RNA, 19 nt, Human
aacacuauuuucagaaucu

SEQ ID NO: 2054827 - RNA, 19 nt, Human
aacacagcgagacuccguc

SEQ ID NO: 2054828 - RNA, 15 nt, Human
aacacuggccccuag

SEQ ID NO: 2054829 - RNA, 12 nt, Human
aacacuggcccc

SEQ ID NO: 2054830 - RNA, 13 nt, Human
aacacuggccccu

SEQ ID NO: 2054831 - RNA, 23 nt, Human
aacacaccaggcugugggccuca

SEQ ID NO: 2054832 - RNA, 17 nt, Human
aacacugggggagggga

SEQ ID NO: 2054833 - RNA, 16 nt, Human
aacacugggggagggg

SEQ ID NO: 2054834 - RNA, 20 nt, Human
guccaaccuaaccccuuucc

SEQ ID NO: 2054835 - RNA, 21 nt, Human
guccaaccuaaccccuuuccu

SEQ ID NO: 2054836 - RNA, 20 nt, Human
guccaacccgaggcccgcau

SEQ ID NO: 2054837 - RNA, 14 nt, Human
guccaaccuaaccc

SEQ ID NO: 2054838 - RNA, 17 nt, Human
guccaaccuaaccccuu

SEQ ID NO: 2054839 - RNA, 22 nt, Human
guccaaauguccuccagaagcc

SEQ ID NO: 2054840 - RNA, 21 nt, Human
guccaaacugccuaagcccuc

SEQ ID NO: 2054841 - RNA, 14 nt, Human
guccaaacugccua

SEQ ID NO: 2054842 - RNA, 19 nt, Human
gucauuugagcagggcuca

SEQ ID NO: 2054843 - RNA, 14 nt, Human
guccaaaggaggcu

SEQ ID NO: 2054844 - RNA, 16 nt, Human
guccaaaggaggcugg

SEQ ID NO: 2054845 - RNA, 20 nt, Human
guccaaaggaggcuggcagg

SEQ ID NO: 2054846 - RNA, 12 nt, Human
guccaucccagc

SEQ ID NO: 2054847 - RNA, 11 nt, Human
gucccacagcu

SEQ ID NO: 2054848 - RNA, 12 nt, Human
gucccacagcuu

SEQ ID NO: 2054849 - RNA, 15 nt, Human
gucccacagcuuggg

SEQ ID NO: 2054850 - RNA, 22 nt, Human
gucccaaggcaaggggugccug

SEQ ID NO: 2054851 - RNA, 19 nt, Human
gucccgucaggacguugag

SEQ ID NO: 2054852 - RNA, 12 nt, Human
gucccuuccccu

SEQ ID NO: 2054853 - RNA, 13 nt, Human
gucccuuccccuc

SEQ ID NO: 2054854 - RNA, 14 nt, Human
gucccuuccccucc

SEQ ID NO: 2054855 - RNA, 17 nt, Human
gucccuuccccucccug

SEQ ID NO: 2054856 - RNA, 18 nt, Human
gucccuuccccucccugg

SEQ ID NO: 2054857 - RNA, 15 nt, Human
gucccggggcuccac

SEQ ID NO: 2054858 - RNA, 13 nt, Human
guccccagcccac

SEQ ID NO: 2054859 - RNA, 15 nt, Human
guccccagcccacug

SEQ ID NO: 2054860 - RNA, 16 nt, Human
gucacuguuucucugc

SEQ ID NO: 2054861 - RNA, 20 nt, Human
gucacuuaccuagauuuaca

SEQ ID NO: 2054862 - RNA, 13 nt, Human
gucacuguuucuc

SEQ ID NO: 2054863 - RNA, 15 nt, Human
gucacuguuucucug

SEQ ID NO: 2054864 - RNA, 17 nt, Human
gucaggaaggaugagca

SEQ ID NO: 2054865 - RNA, 18 nt, Human
gucaggaaggaugagcau

SEQ ID NO: 2054866 - RNA, 17 nt, Human
gucaggaacagaaggau

SEQ ID NO: 2054867 - RNA, 15 nt, Human
gucaggaacagaagg

SEQ ID NO: 2054868 - RNA, 16 nt, Human
gucaggaacagaagga

SEQ ID NO: 2054869 - RNA, 22 nt, Human
gucagguggggcagcuugaggg

SEQ ID NO: 2054870 - RNA, 18 nt, Human
gucagguggggcagcuug

SEQ ID NO: 2054871 - RNA, 17 nt, Human
gucagguggggcagcuu

SEQ ID NO: 2054872 - RNA, 16 nt, Human
gucagguggggcagcu

SEQ ID NO: 2054873 - RNA, 14 nt, Human
gucagugaggccca

SEQ ID NO: 2054874 - RNA, 23 nt, Human
gucagugaggcccagggagaggc

SEQ ID NO: 2054875 - RNA, 15 nt, Human
gucaguggcucuuuu

SEQ ID NO: 2054876 - RNA, 22 nt, Human
gucagugggaacgugacugccc

SEQ ID NO: 2054877 - RNA, 16 nt, Human
gucagugcagcccgug

SEQ ID NO: 2054878 - RNA, 23 nt, Human
gucagugcagcccguguggcccc

SEQ ID NO: 2054879 - RNA, 19 nt, Human
gucagguuauacuccuccu

SEQ ID NO: 2054880 - RNA, 22 nt, Human
gucagucaugauggcaccacug

SEQ ID NO: 2054881 - RNA, 13 nt, Human
gucaguacccacc

SEQ ID NO: 2054882 - RNA, 18 nt, Human
gucaguacccaccugagc

SEQ ID NO: 2054883 - RNA, 19 nt, Human
gucaguacccaccugagcu

SEQ ID NO: 2054884 - RNA, 20 nt, Human
gucaguacccaccugagcuu

SEQ ID NO: 2054885 - RNA, 15 nt, Human
gucacaucacaggac

SEQ ID NO: 2054886 - RNA, 14 nt, Human
gucacauacaauua

SEQ ID NO: 2054887 - RNA, 22 nt, Human
gucaccaaaucagcugcuacua

SEQ ID NO: 2054888 - RNA, 19 nt, Human
gucacaggacucugccucc

SEQ ID NO: 2054889 - RNA, 12 nt, Human
gucacaggcagg

SEQ ID NO: 2054890 - RNA, 18 nt, Human
gucacaggacucugccuc

SEQ ID NO: 2054891 - RNA, 17 nt, Human
gucacaggacucugccu

SEQ ID NO: 2054892 - RNA, 21 nt, Human
gucacaaauccuaaaagaagc

SEQ ID NO: 2054893 - RNA, 20 nt, Human
aaauuuaauauagcuauuuu

SEQ ID NO: 2054894 - RNA, 12 nt, Human
aaauuuaagcau

SEQ ID NO: 2054895 - RNA, 13 nt, Human
aaauuuaagcauu

SEQ ID NO: 2054896 - RNA, 14 nt, Human
aaauuuaagcauug

SEQ ID NO: 2054897 - RNA, 15 nt, Human
aaauuuaagcauugu

SEQ ID NO: 2054898 - RNA, 16 nt, Human
aaauuuaagcauuguu

SEQ ID NO: 2054899 - RNA, 17 nt, Human
aaauuuaagcauuguuu

SEQ ID NO: 2054900 - RNA, 17 nt, Human
gucaccaagcucacagu

SEQ ID NO: 2054901 - RNA, 12 nt, Human
gucacaugcuug

SEQ ID NO: 2054902 - RNA, 15 nt, Human
gucaccaagcccagu

SEQ ID NO: 2054903 - RNA, 12 nt, Human
gucaccaagccc

SEQ ID NO: 2054904 - RNA, 23 nt, Human
gucacugcacagugcaucucagc

SEQ ID NO: 2054905 - RNA, 20 nt, Human
gucacugcacagugcaucuc

SEQ ID NO: 2054906 - RNA, 16 nt, Human
gucacugacacacacg

SEQ ID NO: 2054907 - RNA, 16 nt, Human
gucacugccauggagg

SEQ ID NO: 2054908 - RNA, 20 nt, Human
gucacugccauggaggcaca

SEQ ID NO: 2054909 - RNA, 12 nt, Human
gucacugccucu

SEQ ID NO: 2054910 - RNA, 20 nt, Human
gucacugccucucccuggcc

SEQ ID NO: 2054911 - RNA, 22 nt, Human
gucacugccucucccuggcccu

SEQ ID NO: 2054912 - RNA, 23 nt, Human
gucacugccucucccuggcccuc

SEQ ID NO: 2054913 - RNA, 18 nt, Human
guauuuaucuauuguaag

SEQ ID NO: 2054914 - RNA, 19 nt, Human
guauuuaucuauuguaaga

SEQ ID NO: 2054915 - RNA, 20 nt, Human
guauuuaucuauuguaagau

SEQ ID NO: 2054916 - RNA, 17 nt, Human
guauuuauauauuuaua

SEQ ID NO: 2054917 - RNA, 15 nt, Human
guauuuauauauuua

SEQ ID NO: 2054918 - RNA, 16 nt, Human
guauuuauauauuuau

SEQ ID NO: 2054919 - RNA, 12 nt, Human
guauuuauauau

SEQ ID NO: 2054920 - RNA, 13 nt, Human
guauuuauauauu

SEQ ID NO: 2054921 - RNA, 16 nt, Human
guauugugauuaucaa

SEQ ID NO: 2054922 - RNA, 18 nt, Human
guauuguucccagugaca

SEQ ID NO: 2054923 - RNA, 11 nt, Human
guauuguuccc

SEQ ID NO: 2054924 - RNA, 14 nt, Human
guauuguucccagu

SEQ ID NO: 2054925 - RNA, 15 nt, Human
aaaugugauuuuucu

SEQ ID NO: 2054926 - RNA, 16 nt, Human
aaaugugauuuuucug

SEQ ID NO: 2054927 - RNA, 17 nt, Human
aaaugugauuuuucuga

SEQ ID NO: 2054928 - RNA, 21 nt, Human
aaaugucucuuuaaugucaca

SEQ ID NO: 2054929 - RNA, 19 nt, Human
aaaugucuggagaauaauu

SEQ ID NO: 2054930 - RNA, 16 nt, Human
aaaugucuguggccuu

SEQ ID NO: 2054931 - RNA, 22 nt, Human
aaaugucuguggccuuguucuc

SEQ ID NO: 2054932 - RNA, 23 nt, Human
aaaugucuguggccuuguucucu

SEQ ID NO: 2054933 - RNA, 14 nt, Human
aaauguaucuuauu

SEQ ID NO: 2054934 - RNA, 15 nt, Human
aaauguauaccugua

SEQ ID NO: 2054935 - RNA, 18 nt, Human
aaauguauaccuguaacu

SEQ ID NO: 2054936 - RNA, 17 nt, Human
aaauguaucuuauucac

SEQ ID NO: 2054937 - RNA, 18 nt, Human
aaauguaugauuacauca

SEQ ID NO: 2054938 - RNA, 16 nt, Human
aaaucauguacauuuc

SEQ ID NO: 2054939 - RNA, 10 nt, Human
aaaucauguu

SEQ ID NO: 2054940 - RNA, 13 nt, Human
aaaucauguuaug

SEQ ID NO: 2054941 - RNA, 16 nt, Human
aaaucauguuaugaua

SEQ ID NO: 2054942 - RNA, 18 nt, Human
aaaucauguuaugauaaa

SEQ ID NO: 2054943 - RNA, 17 nt, Human
aaaucauguacauuucu

SEQ ID NO: 2054944 - RNA, 18 nt, Human
guauucuaguuuugucaa

SEQ ID NO: 2054945 - RNA, 13 nt, Human
aaauuuaaaacaa

SEQ ID NO: 2054946 - RNA, 14 nt, Human
aaauuuaaaacaaa

SEQ ID NO: 2054947 - RNA, 16 nt, Human
aaauuuaaaacaaaca

SEQ ID NO: 2054948 - RNA, 18 nt, Human
aaauuuaaaacaaacaac

SEQ ID NO: 2054949 - RNA, 23 nt, Human
aaauuuaaaagacacuguuuaca

SEQ ID NO: 2054950 - RNA, 12 nt, Human
aaauuuaaaaaa

SEQ ID NO: 2054951 - RNA, 22 nt, Human
aaauuguaucuagugcagcuga

SEQ ID NO: 2054952 - RNA, 15 nt, Human
aaauucuacaacaca

SEQ ID NO: 2054953 - RNA, 19 nt, Human
aaauucuauaggaacauau

SEQ ID NO: 2054954 - RNA, 22 nt, Human
aaauucuauaggaacauaugaa

SEQ ID NO: 2054955 - RNA, 23 nt, Human
aaauucuauaggaacauaugaaa

SEQ ID NO: 2054956 - RNA, 21 nt, Human
aaauucuauucugaucuuauu

SEQ ID NO: 2054957 - RNA, 19 nt, Human
aaauucuauuacaguaugu

SEQ ID NO: 2054958 - RNA, 20 nt, Human
aaauucucagucaguaauug

SEQ ID NO: 2054959 - RNA, 16 nt, Human
aaauucacaagcugcc

SEQ ID NO: 2054960 - RNA, 18 nt, Human
aaauucacaaguuguguu

SEQ ID NO: 2054961 - RNA, 19 nt, Human
aaauucacaaguuguguuu

SEQ ID NO: 2054962 - RNA, 16 nt, Human
aaauuccccacccuga

SEQ ID NO: 2054963 - RNA, 22 nt, Human
aaauuccuuagcuuagaccuca

SEQ ID NO: 2054964 - RNA, 22 nt, Human
aaauucuaaauaaaauauaauu

SEQ ID NO: 2054965 - RNA, 21 nt, Human
aaauucgcugcaaccuguuga

SEQ ID NO: 2054966 - RNA, 23 nt, Human
aaauuccuuagcuuagaccucag

SEQ ID NO: 2054967 - RNA, 16 nt, Human
aaauucacaauagaaa

SEQ ID NO: 2054968 - RNA, 17 nt, Human
aaauuccagaaaggaua

SEQ ID NO: 2054969 - RNA, 21 nt, Human
aaauuccagaaaggauauuua

SEQ ID NO: 2054970 - RNA, 20 nt, Human
aaauucccagauuugaagac

SEQ ID NO: 2054971 - RNA, 13 nt, Human
aaauuccacugga

SEQ ID NO: 2054972 - RNA, 15 nt, Human
aaauuagccgggcgu

SEQ ID NO: 2054973 - RNA, 18 nt, Human
aaauguggcauuugugau

SEQ ID NO: 2054974 - RNA, 15 nt, Human
aaauguggcuccugg

SEQ ID NO: 2054975 - RNA, 19 nt, Human
aaauuaggauuucaugauu

SEQ ID NO: 2054976 - RNA, 13 nt, Human
aaauuaucuauuu

SEQ ID NO: 2054977 - RNA, 14 nt, Human
aaauuaucuauuug

SEQ ID NO: 2054978 - RNA, 16 nt, Human
aaauuaucuauuugua

SEQ ID NO: 2054979 - RNA, 20 nt, Human
aaauuaucuauuuguauaua

SEQ ID NO: 2054980 - RNA, 18 nt, Human
aaauuaggauuucaugau

SEQ ID NO: 2054981 - RNA, 19 nt, Human
aaauuagcugugugaaaua

SEQ ID NO: 2054982 - RNA, 18 nt, Human
aaauuaggaauaaauaaa

SEQ ID NO: 2054983 - RNA, 17 nt, Human
aaauuagcugugugaaa

SEQ ID NO: 2054984 - RNA, 18 nt, Human
aaauuagcugugugaaau

SEQ ID NO: 2054985 - RNA, 14 nt, Human
aaauuaggaauaaa

SEQ ID NO: 2054986 - RNA, 15 nt, Human
aaauuaggaauaaau

SEQ ID NO: 2054987 - RNA, 16 nt, Human
aaauuaggaauaaaua

SEQ ID NO: 2054988 - RNA, 20 nt, Human
aaauuauguuacaucuguuu

SEQ ID NO: 2054989 - RNA, 20 nt, Human
gucuuguguuucuuuaguuu

SEQ ID NO: 2054990 - RNA, 16 nt, Human
gucuuguuaauauucu

SEQ ID NO: 2054991 - RNA, 21 nt, Human
gucuuguuaauauucuuucaa

SEQ ID NO: 2054992 - RNA, 22 nt, Human
gucuuguuaauauucuuucaau

SEQ ID NO: 2054993 - RNA, 22 nt, Human
gucuuguuuuuuuuuuccacuu

SEQ ID NO: 2054994 - RNA, 14 nt, Human
gucuuauuuauuau

SEQ ID NO: 2054995 - RNA, 14 nt, Human
gucuuauuuuuaga

SEQ ID NO: 2054996 - RNA, 15 nt, Human
gucuuauuuuuagau

SEQ ID NO: 2054997 - RNA, 21 nt, Human
gucuucaauuuguauaaaaug

SEQ ID NO: 2054998 - RNA, 14 nt, Human
gucuucaagggcug

SEQ ID NO: 2054999 - RNA, 15 nt, Human
gucuucaagggcugc

SEQ ID NO: 2055000 - RNA, 14 nt, Human
gucuucaagggcuu

SEQ ID NO: 2055001 - RNA, 13 nt, Human
gucuugugacuag

SEQ ID NO: 2055002 - RNA, 19 nt, Human
gucuugugacuagugcuga

SEQ ID NO: 2055003 - RNA, 20 nt, Human
gucuugugacuagugcugaa

SEQ ID NO: 2055004 - RNA, 21 nt, Human
gucuugugacuagugcugaag

SEQ ID NO: 2055005 - RNA, 16 nt, Human
gucuggaaugcagugg

SEQ ID NO: 2055006 - RNA, 15 nt, Human
gucuggaaugcagug

SEQ ID NO: 2055007 - RNA, 18 nt, Human
gucuggaaugcaguggua

SEQ ID NO: 2055008 - RNA, 13 nt, Human
gucuuaaauaaaa

SEQ ID NO: 2055009 - RNA, 16 nt, Human
gucuuaaauaaaagaa

SEQ ID NO: 2055010 - RNA, 20 nt, Human
gucuuaaauaaaagaaaugc

SEQ ID NO: 2055011 - RNA, 11 nt, Human
gucugaaaugg

SEQ ID NO: 2055012 - RNA, 13 nt, Human
gucugaauguucu

SEQ ID NO: 2055013 - RNA, 14 nt, Human
gucugaagcagaug

SEQ ID NO: 2055014 - RNA, 14 nt, Human
gucucaaaaaaaca

SEQ ID NO: 2055015 - RNA, 17 nt, Human
gucucaaaaaaagaaaa

SEQ ID NO: 2055016 - RNA, 14 nt, Human
gucugacaggcaau

SEQ ID NO: 2055017 - RNA, 13 nt, Human
gucugacaggcaa

SEQ ID NO: 2055018 - RNA, 12 nt, Human
gucugacaggca

SEQ ID NO: 2055019 - RNA, 14 nt, Human
gucugaauguucug

SEQ ID NO: 2055020 - RNA, 15 nt, Human
gucugaauguucuga

SEQ ID NO: 2055021 - RNA, 17 nt, Human
gucugaauguucugaca

SEQ ID NO: 2055022 - RNA, 18 nt, Human
gucugaauguucugacau

SEQ ID NO: 2055023 - RNA, 20 nt, Human
gucugaauguucugacauua

SEQ ID NO: 2055024 - RNA, 18 nt, Human
gucugacaggcaaugcug

SEQ ID NO: 2055025 - RNA, 15 nt, Human
gucugacaggcaaug

SEQ ID NO: 2055026 - RNA, 20 nt, Human
gucugacaggcaaugcuggc

SEQ ID NO: 2055027 - RNA, 16 nt, Human
gucugcuucugcaccu

SEQ ID NO: 2055028 - RNA, 21 nt, Human
gucugcuucugcaccuuaucu

SEQ ID NO: 2055029 - RNA, 23 nt, Human
gucugcuucugcaccuuaucuua

SEQ ID NO: 2055030 - RNA, 17 nt, Human
aacguuuuuccuguucu

SEQ ID NO: 2055031 - RNA, 15 nt, Human
aacguuuugaacuaa

SEQ ID NO: 2055032 - RNA, 20 nt, Human
aacguuuugaacuaauaaaa

SEQ ID NO: 2055033 - RNA, 13 nt, Human
aacguuuuauugu

SEQ ID NO: 2055034 - RNA, 18 nt, Human
aacguuucaguaauaaaa

SEQ ID NO: 2055035 - RNA, 21 nt, Human
aacguuucaguaauaaaacau

SEQ ID NO: 2055036 - RNA, 15 nt, Human
aacguuuuauugugu

SEQ ID NO: 2055037 - RNA, 13 nt, Human
aacgugcccucug

SEQ ID NO: 2055038 - RNA, 18 nt, Human
aacguuuuguuugaaaaa

SEQ ID NO: 2055039 - RNA, 17 nt, Human
aacuagggaagauaaua

SEQ ID NO: 2055040 - RNA, 15 nt, Human
aacuauguugauaaa

SEQ ID NO: 2055041 - RNA, 15 nt, Human
aacuaguccuuuacu

SEQ ID NO: 2055042 - RNA, 20 nt, Human
aacuagugguggcucugaga

SEQ ID NO: 2055043 - RNA, 12 nt, Human
aacuauguacaa

SEQ ID NO: 2055044 - RNA, 13 nt, Human
aacuauguacaau

SEQ ID NO: 2055045 - RNA, 15 nt, Human
aacuauguacaauau

SEQ ID NO: 2055046 - RNA, 16 nt, Human
aacuauguacaauauu

SEQ ID NO: 2055047 - RNA, 19 nt, Human
aacuauguacaauauuuua

SEQ ID NO: 2055048 - RNA, 20 nt, Human
aacuauguacaauauuuuaa

SEQ ID NO: 2055049 - RNA, 22 nt, Human
aacuauguacaauauuuuaagc

SEQ ID NO: 2055050 - RNA, 23 nt, Human
aaccuggucacaggacucugccu

SEQ ID NO: 2055051 - RNA, 15 nt, Human
aaccuuauuguaccu

SEQ ID NO: 2055052 - RNA, 19 nt, Human
aaccuuauuguaccucucu

SEQ ID NO: 2055053 - RNA, 18 nt, Human
aaccuuauuguaccucuc

SEQ ID NO: 2055054 - RNA, 17 nt, Human
aaccuuauuguaccucu

SEQ ID NO: 2055055 - RNA, 16 nt, Human
aaccuuauuguaccuc

SEQ ID NO: 2055056 - RNA, 15 nt, Human
gucuuucuuuggugc

SEQ ID NO: 2055057 - RNA, 19 nt, Human
gucuuucuuuggugccuuu

SEQ ID NO: 2055058 - RNA, 13 nt, Human
gucuuucuggaga

SEQ ID NO: 2055059 - RNA, 13 nt, Human
aacguggcccaga

SEQ ID NO: 2055060 - RNA, 12 nt, Human
aacgugaaaaug

SEQ ID NO: 2055061 - RNA, 15 nt, Human
aacgugaugaucagc

SEQ ID NO: 2055062 - RNA, 20 nt, Human
aacgugaugaucagcuguuu

SEQ ID NO: 2055063 - RNA, 19 nt, Human
aaccuuccaucucgccacc

SEQ ID NO: 2055064 - RNA, 13 nt, Human
aaccuuccugucu

SEQ ID NO: 2055065 - RNA, 21 nt, Human
aaccuuccugucuucauccuu

SEQ ID NO: 2055066 - RNA, 13 nt, Human
aaccuuccaucuc

SEQ ID NO: 2055067 - RNA, 17 nt, Human
aaccuuccaucucgcca

SEQ ID NO: 2055068 - RNA, 23 nt, Human
aaccuucugcccauccugucugu

SEQ ID NO: 2055069 - RNA, 19 nt, Human
gugaaguuuaauugacuua

SEQ ID NO: 2055070 - RNA, 18 nt, Human
aacuccuggaaauaucag

SEQ ID NO: 2055071 - RNA, 23 nt, Human
gugaauaauacaguaucucaggg

SEQ ID NO: 2055072 - RNA, 15 nt, Human
aacuccaccaaccca

SEQ ID NO: 2055073 - RNA, 23 nt, Human
aacuccaccaacccaucagaagg

SEQ ID NO: 2055074 - RNA, 16 nt, Human
aacuccucauuguaaa

SEQ ID NO: 2055075 - RNA, 18 nt, Human
gugacaguggauugcauu

SEQ ID NO: 2055076 - RNA, 14 nt, Human
gugacaucaguggc

SEQ ID NO: 2055077 - RNA, 15 nt, Human
gugacaucaguggca

SEQ ID NO: 2055078 - RNA, 18 nt, Human
gugacaucaguggcaugg

SEQ ID NO: 2055079 - RNA, 21 nt, Human
gugacagugagguccuggggg

SEQ ID NO: 2055080 - RNA, 15 nt, Human
gugacagugccuggg

SEQ ID NO: 2055081 - RNA, 17 nt, Human
gugacagugccugggaa

SEQ ID NO: 2055082 - RNA, 23 nt, Human
gugacagugccugggaauguauu

SEQ ID NO: 2055083 - RNA, 17 nt, Human
gugacagaguucacuau

SEQ ID NO: 2055084 - RNA, 18 nt, Human
gugacagaguucacuaua

SEQ ID NO: 2055085 - RNA, 22 nt, Human
gugacagagugagacucugucu

SEQ ID NO: 2055086 - RNA, 20 nt, Human
gugacagagugagacucugu

SEQ ID NO: 2055087 - RNA, 23 nt, Human
gugacagaggcagccccauucug

SEQ ID NO: 2055088 - RNA, 16 nt, Human
gugagacucugucuca

SEQ ID NO: 2055089 - RNA, 14 nt, Human
gugagacucugucu

SEQ ID NO: 2055090 - RNA, 16 nt, Human
gugagacccugucucu

SEQ ID NO: 2055091 - RNA, 16 nt, Human
gugagacccccacacc

SEQ ID NO: 2055092 - RNA, 17 nt, Human
gugagacccccacaccu

SEQ ID NO: 2055093 - RNA, 22 nt, Human
gugagacccugucucaaaaaaa

SEQ ID NO: 2055094 - RNA, 14 nt, Human
gugagacccccaca

SEQ ID NO: 2055095 - RNA, 15 nt, Human
gugagacccccacac

SEQ ID NO: 2055096 - RNA, 16 nt, Human
gugacuucagcucugu

SEQ ID NO: 2055097 - RNA, 15 nt, Human
gugacuguaucugug

SEQ ID NO: 2055098 - RNA, 19 nt, Human
gugacuguaucuguguaga

SEQ ID NO: 2055099 - RNA, 18 nt, Human
gugacuguggcacacgcc

SEQ ID NO: 2055100 - RNA, 11 nt, Human
aacucuuugcc

SEQ ID NO: 2055101 - RNA, 16 nt, Human
aacugcauuggcuuug

SEQ ID NO: 2055102 - RNA, 20 nt, Human
aacugcauugagaacugcau

SEQ ID NO: 2055103 - RNA, 16 nt, Human
aacugcauuagaaauu

SEQ ID NO: 2055104 - RNA, 14 nt, Human
aacugcauugagaa

SEQ ID NO: 2055105 - RNA, 23 nt, Human
aacucuucccccucucccaguug

SEQ ID NO: 2055106 - RNA, 22 nt, Human
aacucucuccacccuauaugua

SEQ ID NO: 2055107 - RNA, 16 nt, Human
gugagaccccugucuc

SEQ ID NO: 2055108 - RNA, 21 nt, Human
gugaggcuuaacaaugucuug

SEQ ID NO: 2055109 - RNA, 12 nt, Human
aacucucuccac

SEQ ID NO: 2055110 - RNA, 18 nt, Human
gugagacucugucucaaa

SEQ ID NO: 2055111 - RNA, 19 nt, Human
gugagucaccaagcccagu

SEQ ID NO: 2055112 - RNA, 17 nt, Human
gugagucaccaagccca

SEQ ID NO: 2055113 - RNA, 18 nt, Human
gugagagcgaggcugagc

SEQ ID NO: 2055114 - RNA, 19 nt, Human
aagaaagcccuuaggaaga

SEQ ID NO: 2055115 - RNA, 16 nt, Human
aagaaagccagucuua

SEQ ID NO: 2055116 - RNA, 19 nt, Human
aagaaagccagucuuaaca

SEQ ID NO: 2055117 - RNA, 23 nt, Human
aagaaagagcaacaauccaucuc

SEQ ID NO: 2055118 - RNA, 16 nt, Human
aagaaacccgacagag

SEQ ID NO: 2055119 - RNA, 18 nt, Human
aagaaacccgacagaggg

SEQ ID NO: 2055120 - RNA, 12 nt, Human
aagaaacacuga

SEQ ID NO: 2055121 - RNA, 11 nt, Human
aagaaacccaa

SEQ ID NO: 2055122 - RNA, 13 nt, Human
aagaaacaaaccc

SEQ ID NO: 2055123 - RNA, 16 nt, Human
aagaaacaaacccguu

SEQ ID NO: 2055124 - RNA, 22 nt, Human
aagaaacacacugaggcaggga

SEQ ID NO: 2055125 - RNA, 21 nt, Human
aacuuuagcagaaucaaaaug

SEQ ID NO: 2055126 - RNA, 12 nt, Human
aagaaaaaauac

SEQ ID NO: 2055127 - RNA, 14 nt, Human
aagaaaaaauacau

SEQ ID NO: 2055128 - RNA, 16 nt, Human
aagaaaaaauacauuu

SEQ ID NO: 2055129 - RNA, 17 nt, Human
aagaaaaaugagccugg

SEQ ID NO: 2055130 - RNA, 18 nt, Human
aagaaaaaugagccuggc

SEQ ID NO: 2055131 - RNA, 19 nt, Human
aagaaaaaauauuuucccu

SEQ ID NO: 2055132 - RNA, 22 nt, Human
aacuuuagaguagcaugagaga

SEQ ID NO: 2055133 - RNA, 13 nt, Human
aagaaaaagaaaa

SEQ ID NO: 2055134 - RNA, 18 nt, Human
aagaaaaagaaaaagaaa

SEQ ID NO: 2055135 - RNA, 18 nt, Human
gugcauuuuugugaaaug

SEQ ID NO: 2055136 - RNA, 22 nt, Human
gugcauuuuugugaaaugaaaa

SEQ ID NO: 2055137 - RNA, 15 nt, Human
gugcucccuaccacc

SEQ ID NO: 2055138 - RNA, 18 nt, Human
gugcucccuaccaccucc

SEQ ID NO: 2055139 - RNA, 13 nt, Human
gugcucagggcug

SEQ ID NO: 2055140 - RNA, 14 nt, Human
gugcucuggacagg

SEQ ID NO: 2055141 - RNA, 13 nt, Human
gugcucuggacag

SEQ ID NO: 2055142 - RNA, 16 nt, Human
gugcucugaucaucca

SEQ ID NO: 2055143 - RNA, 21 nt, Human
gugcuacaugacgacaaagcu

SEQ ID NO: 2055144 - RNA, 16 nt, Human
gugcuacugauuguuu

SEQ ID NO: 2055145 - RNA, 16 nt, Human
aagaauacaaacauau

SEQ ID NO: 2055146 - RNA, 14 nt, Human
aagaagcaaauuuu

SEQ ID NO: 2055147 - RNA, 21 nt, Human
aagaauaauaugcugccaaau

SEQ ID NO: 2055148 - RNA, 11 nt, Human
aagaaaacacu

SEQ ID NO: 2055149 - RNA, 17 nt, Human
aagaagaugacuuccca

SEQ ID NO: 2055150 - RNA, 17 nt, Human
gugcauuuucccagaua

SEQ ID NO: 2055151 - RNA, 16 nt, Human
gugcauuuuugugaaa

SEQ ID NO: 2055152 - RNA, 18 nt, Human
gugcacgcacacugucug

SEQ ID NO: 2055153 - RNA, 18 nt, Human
gugcaccuguacucagga

SEQ ID NO: 2055154 - RNA, 21 nt, Human
gugcaccuguacucaggaggc

SEQ ID NO: 2055155 - RNA, 15 nt, Human
gugcacccacucugc

SEQ ID NO: 2055156 - RNA, 21 nt, Human
gugcacaugcacgugugugca

SEQ ID NO: 2055157 - RNA, 13 nt, Human
gugaucuccauau

SEQ ID NO: 2055158 - RNA, 15 nt, Human
gugaucugaacagaa

SEQ ID NO: 2055159 - RNA, 18 nt, Human
gugaucuugcucuaucuc

SEQ ID NO: 2055160 - RNA, 24 nt, Human
gugaucuugcucuaucucacagca

SEQ ID NO: 2055161 - RNA, 22 nt, Human
gugaucuuggcuuacugcagcc

SEQ ID NO: 2055162 - RNA, 23 nt, Human
gugaugguuccccuguucacucu

SEQ ID NO: 2055163 - RNA, 12 nt, Human
gugaucugggaa

SEQ ID NO: 2055164 - RNA, 12 nt, Human
gugaucuccaua

SEQ ID NO: 2055165 - RNA, 14 nt, Human
gugauguuuguccu

SEQ ID NO: 2055166 - RNA, 22 nt, Human
gugaugguuccccuguucacuc

SEQ ID NO: 2055167 - RNA, 13 nt, Human
gugauuaaggucu

SEQ ID NO: 2055168 - RNA, 20 nt, Human
gugcaagugugugcaugugu

SEQ ID NO: 2055169 - RNA, 15 nt, Human
gugcaagugugugca

SEQ ID NO: 2055170 - RNA, 22 nt, Human
gugcaagugugugcacaugugu

SEQ ID NO: 2055171 - RNA, 14 nt, Human
gugcaagugugugc

SEQ ID NO: 2055172 - RNA, 11 nt, Human
aacugaaaaca

SEQ ID NO: 2055173 - RNA, 14 nt, Human
aacugcccugucua

SEQ ID NO: 2055174 - RNA, 21 nt, Human
aacugucaaagaaucaaucca

SEQ ID NO: 2055175 - RNA, 17 nt, Human
aacuguccucuuucaga

SEQ ID NO: 2055176 - RNA, 19 nt, Human
aacuguccucuuucagaaa

SEQ ID NO: 2055177 - RNA, 20 nt, Human
aacuguccucuuucagaaaa

SEQ ID NO: 2055178 - RNA, 21 nt, Human
aacuguccucuuucagaaaac

SEQ ID NO: 2055179 - RNA, 14 nt, Human
aacugcccaaagca

SEQ ID NO: 2055180 - RNA, 14 nt, Human
aacugcauuagaaa

SEQ ID NO: 2055181 - RNA, 13 nt, Human
aacuguguaugua

SEQ ID NO: 2055182 - RNA, 15 nt, Human
aacuguguauguaca

SEQ ID NO: 2055183 - RNA, 17 nt, Human
aacuguguauguacaua

SEQ ID NO: 2055184 - RNA, 18 nt, Human
aacuguguggacugugau

SEQ ID NO: 2055185 - RNA, 21 nt, Human
aacugucuccuaccucugcuc

SEQ ID NO: 2055186 - RNA, 13 nt, Human
aacuguguaacug

SEQ ID NO: 2055187 - RNA, 17 nt, Human
aacuucuaauugccaug

SEQ ID NO: 2055188 - RNA, 15 nt, Human
aacuucuaauugcca

SEQ ID NO: 2055189 - RNA, 16 nt, Human
aacuucuaauugccau

SEQ ID NO: 2055190 - RNA, 20 nt, Human
aacuucgaaagcaucauuau

SEQ ID NO: 2055191 - RNA, 22 nt, Human
aacuguguaacugcccaaagca

SEQ ID NO: 2055192 - RNA, 22 nt, Human
aacuucagagggaaaguaaaua

SEQ ID NO: 2055193 - RNA, 24 nt, Human
aacuucuuuguaaucguuaugugu

SEQ ID NO: 2055194 - RNA, 19 nt, Human
aacuugagcgugaaucugu

SEQ ID NO: 2055195 - RNA, 22 nt, Human
aacuugagcgugaaucuguauc

SEQ ID NO: 2055196 - RNA, 15 nt, Human
aacuugagcauguua

SEQ ID NO: 2055197 - RNA, 13 nt, Human
uaggacuguagaa

SEQ ID NO: 2055198 - RNA, 14 nt, Human
uaggacuguagaaa

SEQ ID NO: 2055199 - RNA, 18 nt, Human
uaggacucugaggcucuu

SEQ ID NO: 2055200 - RNA, 22 nt, Human
uaggagaauugcuugaaccugg

SEQ ID NO: 2055201 - RNA, 14 nt, Human
uaggagagaaggua

SEQ ID NO: 2055202 - RNA, 19 nt, Human
uaggagacacauccagcaa

SEQ ID NO: 2055203 - RNA, 14 nt, Human
uaggagaccaaggc

SEQ ID NO: 2055204 - RNA, 21 nt, Human
uaggagaccaaggcgggagca

SEQ ID NO: 2055205 - RNA, 14 nt, Human
uaggagcugggagg

SEQ ID NO: 2055206 - RNA, 18 nt, Human
uaggagcugggaggaaaa

SEQ ID NO: 2055207 - RNA, 12 nt, Human
uaggagcaugag

SEQ ID NO: 2055208 - RNA, 21 nt, Human
uaggagagagaucaugagaaa

SEQ ID NO: 2055209 - RNA, 16 nt, Human
uaggagauaccagguu

SEQ ID NO: 2055210 - RNA, 22 nt, Human
uaggagauaccagguugaaaga

SEQ ID NO: 2055211 - RNA, 21 nt, Human
uagcuuacaagccagcuggag

SEQ ID NO: 2055212 - RNA, 20 nt, Human
uagcuguuauuucuauuuuu

SEQ ID NO: 2055213 - RNA, 17 nt, Human
uagcuguuauuucuauu

SEQ ID NO: 2055214 - RNA, 13 nt, Human
uagcuguugagcu

SEQ ID NO: 2055215 - RNA, 17 nt, Human
uagcuguugagcuguuu

SEQ ID NO: 2055216 - RNA, 16 nt, Human
uagcuguugagcuguu

SEQ ID NO: 2055217 - RNA, 14 nt, Human
uagcugugugaaau

SEQ ID NO: 2055218 - RNA, 14 nt, Human
uagcuguggugagg

SEQ ID NO: 2055219 - RNA, 18 nt, Human
uagcuguggugagguggg

SEQ ID NO: 2055220 - RNA, 23 nt, Human
uaggaaaucuuguccagagacaa

SEQ ID NO: 2055221 - RNA, 20 nt, Human
uaggaaauaaaaccuuucaa

SEQ ID NO: 2055222 - RNA, 14 nt, Human
uaggacucugaggc

SEQ ID NO: 2055223 - RNA, 15 nt, Human
uaggacucugaggcu

SEQ ID NO: 2055224 - RNA, 16 nt, Human
uaggacucugaggcuc

SEQ ID NO: 2055225 - RNA, 15 nt, Human
uagggaccuggggaa

SEQ ID NO: 2055226 - RNA, 16 nt, Human
uagggaccuggggaag

SEQ ID NO: 2055227 - RNA, 18 nt, Human
uagggaccuggggaagca

SEQ ID NO: 2055228 - RNA, 13 nt, Human
uagggacuuaaaa

SEQ ID NO: 2055229 - RNA, 14 nt, Human
uagggacuuaaaaa

SEQ ID NO: 2055230 - RNA, 21 nt, Human
uagggaauggcacagcccaaa

SEQ ID NO: 2055231 - RNA, 17 nt, Human
uagggaaggccaccugc

SEQ ID NO: 2055232 - RNA, 20 nt, Human
uaggcagauugaaaaggaca

SEQ ID NO: 2055233 - RNA, 13 nt, Human
uaggcagcagcuu

SEQ ID NO: 2055234 - RNA, 16 nt, Human
uaggcauuugcugaau

SEQ ID NO: 2055235 - RNA, 20 nt, Human
uaggcauuugcugaauacag

SEQ ID NO: 2055236 - RNA, 13 nt, Human
uaggcacccaucc

SEQ ID NO: 2055237 - RNA, 18 nt, Human
uaggcacccauccuagag

SEQ ID NO: 2055238 - RNA, 19 nt, Human
uaggcacccauccuagaga

SEQ ID NO: 2055239 - RNA, 10 nt, Human
acaauaaacu

SEQ ID NO: 2055240 - RNA, 20 nt, Human
acaagacuuuccccauacuc

SEQ ID NO: 2055241 - RNA, 12 nt, Human
acaauaauuuca

SEQ ID NO: 2055242 - RNA, 13 nt, Human
acaauaauuucag

SEQ ID NO: 2055243 - RNA, 21 nt, Human
acaauaaguuaacuauuuuau

SEQ ID NO: 2055244 - RNA, 22 nt, Human
acaauaacuacuguguuccugg

SEQ ID NO: 2055245 - RNA, 18 nt, Human
acaauaacuacuguguuc

SEQ ID NO: 2055246 - RNA, 19 nt, Human
acaauaacuacuguguucc

SEQ ID NO: 2055247 - RNA, 20 nt, Human
acaauaacuacuguguuccu

SEQ ID NO: 2055248 - RNA, 21 nt, Human
acaauaacuacuguguuccug

SEQ ID NO: 2055249 - RNA, 12 nt, Human
acaauaaaugua

SEQ ID NO: 2055250 - RNA, 13 nt, Human
acaauaaauguau

SEQ ID NO: 2055251 - RNA, 16 nt, Human
acaauaaauguauuca

SEQ ID NO: 2055252 - RNA, 18 nt, Human
acaauaaauguauucaaa

SEQ ID NO: 2055253 - RNA, 19 nt, Human
acaauaaauguauucaaau

SEQ ID NO: 2055254 - RNA, 20 nt, Human
acaauaaauguauucaaaua

SEQ ID NO: 2055255 - RNA, 15 nt, Human
acaauaaaugugcuu

SEQ ID NO: 2055256 - RNA, 16 nt, Human
acaauaacuacugugu

SEQ ID NO: 2055257 - RNA, 17 nt, Human
acaauaacuacuguguu

SEQ ID NO: 2055258 - RNA, 14 nt, Human
acaauaaaugugca

SEQ ID NO: 2055259 - RNA, 19 nt, Human
acaaucaugaaauaugcau

SEQ ID NO: 2055260 - RNA, 18 nt, Human
acaaucaugaaauaugca

SEQ ID NO: 2055261 - RNA, 11 nt, Human
acaaucuauuu

SEQ ID NO: 2055262 - RNA, 17 nt, Human
acaaucuauuuauugga

SEQ ID NO: 2055263 - RNA, 14 nt, Human
uagcuauauccaug

SEQ ID NO: 2055264 - RNA, 15 nt, Human
uagcuauauccaugu

SEQ ID NO: 2055265 - RNA, 13 nt, Human
uagcuagaggaac

SEQ ID NO: 2055266 - RNA, 14 nt, Human
uagcuagaggaacc

SEQ ID NO: 2055267 - RNA, 15 nt, Human
uagcuagaggaacca

SEQ ID NO: 2055268 - RNA, 16 nt, Human
uagcuauauccaugua

SEQ ID NO: 2055269 - RNA, 17 nt, Human
uagcuauauccauguac

SEQ ID NO: 2055270 - RNA, 18 nt, Human
uagcuauauccauguacu

SEQ ID NO: 2055271 - RNA, 19 nt, Human
uagcuauauccauguacug

SEQ ID NO: 2055272 - RNA, 20 nt, Human
uagcuauauccauguacugu

SEQ ID NO: 2055273 - RNA, 21 nt, Human
uagcuauauccauguacugua

SEQ ID NO: 2055274 - RNA, 22 nt, Human
uagcuauauccauguacuguag

SEQ ID NO: 2055275 - RNA, 15 nt, Human
uagcuacaggaagca

SEQ ID NO: 2055276 - RNA, 20 nt, Human
uagcuacaggaagcacccca

SEQ ID NO: 2055277 - RNA, 13 nt, Human
uagcuaauggaaa

SEQ ID NO: 2055278 - RNA, 21 nt, Human
acaaagauguuugucagauau

SEQ ID NO: 2055279 - RNA, 22 nt, Human
acaaagauguuugucagauaug

SEQ ID NO: 2055280 - RNA, 23 nt, Human
acaaagauguuugucagauauga

SEQ ID NO: 2055281 - RNA, 24 nt, Human
acaaagauguuugucagauaugau

SEQ ID NO: 2055282 - RNA, 21 nt, Human
acaaagcagaauaguauuuuu

SEQ ID NO: 2055283 - RNA, 18 nt, Human
acaaaggcuuauuaauuu

SEQ ID NO: 2055284 - RNA, 15 nt, Human
aauuguuaagauaug

SEQ ID NO: 2055285 - RNA, 16 nt, Human
uagagcacacuguagc

SEQ ID NO: 2055286 - RNA, 17 nt, Human
uagagcacacuguagca

SEQ ID NO: 2055287 - RNA, 13 nt, Human
uagagaugccucc

SEQ ID NO: 2055288 - RNA, 14 nt, Human
uagagaugccuccc

SEQ ID NO: 2055289 - RNA, 15 nt, Human
uagagaugccucccu

SEQ ID NO: 2055290 - RNA, 16 nt, Human
uagagaugccucccug

SEQ ID NO: 2055291 - RNA, 14 nt, Human
uagagauggaggag

SEQ ID NO: 2055292 - RNA, 19 nt, Human
uagagauggaggaggaggc

SEQ ID NO: 2055293 - RNA, 19 nt, Human
uagagauggggaaagaauu

SEQ ID NO: 2055294 - RNA, 17 nt, Human
uagagauaguacauaaa

SEQ ID NO: 2055295 - RNA, 17 nt, Human
uagagaugacugagucc

SEQ ID NO: 2055296 - RNA, 15 nt, Human
uagaggccagccugg

SEQ ID NO: 2055297 - RNA, 20 nt, Human
uagaggccagccccacccag

SEQ ID NO: 2055298 - RNA, 16 nt, Human
uagaggccagccuggc

SEQ ID NO: 2055299 - RNA, 15 nt, Human
uagauauaugcucug

SEQ ID NO: 2055300 - RNA, 18 nt, Human
uagaggccagccccaccc

SEQ ID NO: 2055301 - RNA, 19 nt, Human
uagaggcagggaggggacu

SEQ ID NO: 2055302 - RNA, 23 nt, Human
uagaugagcccagcccuguucug

SEQ ID NO: 2055303 - RNA, 20 nt, Human
uagaugagaauucagcugcc

SEQ ID NO: 2055304 - RNA, 22 nt, Human
uagaugagaauucagcugcccc

SEQ ID NO: 2055305 - RNA, 19 nt, Human
uagauauaugcucugcaug

SEQ ID NO: 2055306 - RNA, 15 nt, Human
uagauaucuuuuuau

SEQ ID NO: 2055307 - RNA, 19 nt, Human
uagauaucuuuuuauugau

SEQ ID NO: 2055308 - RNA, 20 nt, Human
uagauaucuuuuuauugaug

SEQ ID NO: 2055309 - RNA, 21 nt, Human
uagauaucuuuuuauugaugu

SEQ ID NO: 2055310 - RNA, 22 nt, Human
uagauaucuuuuuauugaugug

SEQ ID NO: 2055311 - RNA, 23 nt, Human
uagccacuuaccuucaauaaagu

SEQ ID NO: 2055312 - RNA, 14 nt, Human
uagccaauguggga

SEQ ID NO: 2055313 - RNA, 20 nt, Human
uagccacaaaauugggaaag

SEQ ID NO: 2055314 - RNA, 18 nt, Human
uagccacuuaccuucaau

SEQ ID NO: 2055315 - RNA, 22 nt, Human
uagccacuuaccuucaauaaag

SEQ ID NO: 2055316 - RNA, 11 nt, Human
acaacagaagu

SEQ ID NO: 2055317 - RNA, 13 nt, Human
acaacagaaguca

SEQ ID NO: 2055318 - RNA, 11 nt, Human
acaacaaaaau

SEQ ID NO: 2055319 - RNA, 13 nt, Human
acaacaaaaauuu

SEQ ID NO: 2055320 - RNA, 10 nt, Human
acaacaaaaa

SEQ ID NO: 2055321 - RNA, 14 nt, Human
acaacaaaaaauaa

SEQ ID NO: 2055322 - RNA, 17 nt, Human
acaacaaaaagcuuccc

SEQ ID NO: 2055323 - RNA, 12 nt, Human
uagcauguaaug

SEQ ID NO: 2055324 - RNA, 14 nt, Human
uagaugcugacugu

SEQ ID NO: 2055325 - RNA, 23 nt, Human
uagaugcugacuguacuccuccc

SEQ ID NO: 2055326 - RNA, 20 nt, Human
uagccaaaaaugucuaaaag

SEQ ID NO: 2055327 - RNA, 20 nt, Human
uagccaaggugggcugagcc

SEQ ID NO: 2055328 - RNA, 21 nt, Human
uagccaaggugggcugagccc

SEQ ID NO: 2055329 - RNA, 23 nt, Human
uagccaaggugggcugagcccug

SEQ ID NO: 2055330 - RNA, 22 nt, Human
uagcauuuugcuaaaugugaau

SEQ ID NO: 2055331 - RNA, 16 nt, Human
uagcauuuugcuaaau

SEQ ID NO: 2055332 - RNA, 17 nt, Human
uagcaugucacuaaagc

SEQ ID NO: 2055333 - RNA, 21 nt, Human
uagugaaucacguaaagcuag

SEQ ID NO: 2055334 - RNA, 23 nt, Human
uagugaauuaucccuuuucuuga

SEQ ID NO: 2055335 - RNA, 20 nt, Human
uaguguuuggguauauucau

SEQ ID NO: 2055336 - RNA, 23 nt, Human
uaguuaauauugugaagaaaaau

SEQ ID NO: 2055337 - RNA, 24 nt, Human
uagugaaaccccaucucuacugaa

SEQ ID NO: 2055338 - RNA, 16 nt, Human
uagucccuuccccucc

SEQ ID NO: 2055339 - RNA, 20 nt, Human
uagucccuuccccucccugg

SEQ ID NO: 2055340 - RNA, 22 nt, Human
uagucccuuccccucccuggcu

SEQ ID NO: 2055341 - RNA, 23 nt, Human
uagucccuuccccucccuggcuc

SEQ ID NO: 2055342 - RNA, 20 nt, Human
uaguaccuucagauccuacc

SEQ ID NO: 2055343 - RNA, 14 nt, Human
uaguaccuuugcuc

SEQ ID NO: 2055344 - RNA, 16 nt, Human
uaguaccuuugcucuu

SEQ ID NO: 2055345 - RNA, 13 nt, Human
uaguacccaccug

SEQ ID NO: 2055346 - RNA, 14 nt, Human
uaguacccaccuga

SEQ ID NO: 2055347 - RNA, 17 nt, Human
uaguacccaccugagcu

SEQ ID NO: 2055348 - RNA, 15 nt, Human
uagucccagcuacuc

SEQ ID NO: 2055349 - RNA, 14 nt, Human
uagucccuuccccu

SEQ ID NO: 2055350 - RNA, 15 nt, Human
uagucccuuccccuc

SEQ ID NO: 2055351 - RNA, 20 nt, Human
uagucccagcuacucaggag

SEQ ID NO: 2055352 - RNA, 16 nt, Human
uaguacuauaucuguu

SEQ ID NO: 2055353 - RNA, 17 nt, Human
uaguacuauaucuguuu

SEQ ID NO: 2055354 - RNA, 23 nt, Human
uaguacuauaucuguuuuacugc

SEQ ID NO: 2055355 - RNA, 14 nt, Human
uagucccagcuacu

SEQ ID NO: 2055356 - RNA, 21 nt, Human
uagucccagcuacucagaagc

SEQ ID NO: 2055357 - RNA, 12 nt, Human
uaguaaagaaau

SEQ ID NO: 2055358 - RNA, 13 nt, Human
uaguaaagaaaug

SEQ ID NO: 2055359 - RNA, 14 nt, Human
uaguaaagaaauga

SEQ ID NO: 2055360 - RNA, 13 nt, Human
uaguaaagaaauu

SEQ ID NO: 2055361 - RNA, 12 nt, Human
acacauaaagga

SEQ ID NO: 2055362 - RNA, 13 nt, Human
acacauaaaggau

SEQ ID NO: 2055363 - RNA, 14 nt, Human
acacauaaaggaua

SEQ ID NO: 2055364 - RNA, 18 nt, Human
acacauaaaggauaaacu

SEQ ID NO: 2055365 - RNA, 15 nt, Human
acacaguugcuguca

SEQ ID NO: 2055366 - RNA, 22 nt, Human
acacaguugcugucauaagaau

SEQ ID NO: 2055367 - RNA, 23 nt, Human
uaguacagguaaggugagggaau

SEQ ID NO: 2055368 - RNA, 12 nt, Human
uaguacauaaag

SEQ ID NO: 2055369 - RNA, 21 nt, Human
uaguacauaaaggugguaugu

SEQ ID NO: 2055370 - RNA, 16 nt, Human
acacaguauuacuucu

SEQ ID NO: 2055371 - RNA, 13 nt, Human
acacacuuuauuu

SEQ ID NO: 2055372 - RNA, 18 nt, Human
acacaguauuacuucugc

SEQ ID NO: 2055373 - RNA, 22 nt, Human
acacaguauuacuucugcuaca

SEQ ID NO: 2055374 - RNA, 19 nt, Human
acacaguauuacuucugcu

SEQ ID NO: 2055375 - RNA, 22 nt, Human
acacagugcugaccagacagcc

SEQ ID NO: 2055376 - RNA, 19 nt, Human
acaaugugaaaagaaaaau

SEQ ID NO: 2055377 - RNA, 22 nt, Human
acaaugucaaggugcuguuguc

SEQ ID NO: 2055378 - RNA, 17 nt, Human
acaaugugaaaagaaaa

SEQ ID NO: 2055379 - RNA, 13 nt, Human
acacacacacaca

SEQ ID NO: 2055380 - RNA, 22 nt, Human
acacacaaauuaucuuaaaacu

SEQ ID NO: 2055381 - RNA, 13 nt, Human
acacacaacaaaa

SEQ ID NO: 2055382 - RNA, 14 nt, Human
acacacaacaaaaa

SEQ ID NO: 2055383 - RNA, 15 nt, Human
acacacaacaaaaau

SEQ ID NO: 2055384 - RNA, 14 nt, Human
acacacacaaagag

SEQ ID NO: 2055385 - RNA, 16 nt, Human
acacacacaaagagag

SEQ ID NO: 2055386 - RNA, 12 nt, Human
acacaauguuau

SEQ ID NO: 2055387 - RNA, 13 nt, Human
acacaauguuauu

SEQ ID NO: 2055388 - RNA, 16 nt, Human
acacaauguuauucgu

SEQ ID NO: 2055389 - RNA, 14 nt, Human
acacaaugugucug

SEQ ID NO: 2055390 - RNA, 14 nt, Human
acacaauaugaaua

SEQ ID NO: 2055391 - RNA, 11 nt, Human
acaaugucuug

SEQ ID NO: 2055392 - RNA, 22 nt, Human
acacacaaaauguacccaguau

SEQ ID NO: 2055393 - RNA, 14 nt, Human
acacacaacaauua

SEQ ID NO: 2055394 - RNA, 22 nt, Human
uagggaggaccuuaucugugcg

SEQ ID NO: 2055395 - RNA, 21 nt, Human
acacacgcgugcacacaccag

SEQ ID NO: 2055396 - RNA, 20 nt, Human
acacaccagagcccaccuug

SEQ ID NO: 2055397 - RNA, 15 nt, Human
acacaccagagccca

SEQ ID NO: 2055398 - RNA, 14 nt, Human
acacaccagagccc

SEQ ID NO: 2055399 - RNA, 22 nt, Human
acacacacgcgugcacacacca

SEQ ID NO: 2055400 - RNA, 17 nt, Human
acacacaccacacauac

SEQ ID NO: 2055401 - RNA, 15 nt, Human
acacacacacacaca

SEQ ID NO: 2055402 - RNA, 14 nt, Human
acacacaaagagag

SEQ ID NO: 2055403 - RNA, 14 nt, Human
acacacagcucugu

SEQ ID NO: 2055404 - RNA, 13 nt, Human
acacacagcucug

SEQ ID NO: 2055405 - RNA, 17 nt, Human
acacacagcucuguccu

SEQ ID NO: 2055406 - RNA, 22 nt, Human
acacauauaaacaucacacaca

SEQ ID NO: 2055407 - RNA, 14 nt, Human
acacauauaaacau

SEQ ID NO: 2055408 - RNA, 13 nt, Human
acacauagauuca

SEQ ID NO: 2055409 - RNA, 17 nt, Human
acacauagauucaccug

SEQ ID NO: 2055410 - RNA, 19 nt, Human
acacauagauucaccugua

SEQ ID NO: 2055411 - RNA, 22 nt, Human
acacauagauucaccuguaaaa

SEQ ID NO: 2055412 - RNA, 17 nt, Human
acacauagcauguaaug

SEQ ID NO: 2055413 - RNA, 18 nt, Human
uaguucauccaauccuca

SEQ ID NO: 2055414 - RNA, 20 nt, Human
uaguucauccaauccucacu

SEQ ID NO: 2055415 - RNA, 15 nt, Human
uaguuacuauaugcc

SEQ ID NO: 2055416 - RNA, 14 nt, Human
uaguuacucauuca

SEQ ID NO: 2055417 - RNA, 14 nt, Human
uaguucauccaauc

SEQ ID NO: 2055418 - RNA, 20 nt, Human
uauaaaaaccccaaacuguu

SEQ ID NO: 2055419 - RNA, 15 nt, Human
uauaaaaaaaaugaa

SEQ ID NO: 2055420 - RNA, 16 nt, Human
uauaaaaaaaaugaaa

SEQ ID NO: 2055421 - RNA, 17 nt, Human
uauaaaaaaaaugaaau

SEQ ID NO: 2055422 - RNA, 19 nt, Human
uauaaaaaaaaugaaaugu

SEQ ID NO: 2055423 - RNA, 23 nt, Human
uauaaaaaaaaugaaauguuuua

SEQ ID NO: 2055424 - RNA, 23 nt, Human
acaccauguuugagcucagaccc

SEQ ID NO: 2055425 - RNA, 17 nt, Human
acacccgacuccucaaa

SEQ ID NO: 2055426 - RNA, 22 nt, Human
acacccucgaagcgcgccacuc

SEQ ID NO: 2055427 - RNA, 12 nt, Human
acacccucuccc

SEQ ID NO: 2055428 - RNA, 13 nt, Human
acacccucuccca

SEQ ID NO: 2055429 - RNA, 16 nt, Human
acacccucucccagga

SEQ ID NO: 2055430 - RNA, 22 nt, Human
acacucacauuuauucugcuca

SEQ ID NO: 2055431 - RNA, 20 nt, Human
acacucacauuuauucugcu

SEQ ID NO: 2055432 - RNA, 13 nt, Human
acacuauuuucag

SEQ ID NO: 2055433 - RNA, 14 nt, Human
acacuauuuucaga

SEQ ID NO: 2055434 - RNA, 15 nt, Human
acacuauuuucagaa

SEQ ID NO: 2055435 - RNA, 16 nt, Human
acacuauuuucagaau

SEQ ID NO: 2055436 - RNA, 19 nt, Human
acacuauuuucagaaucug

SEQ ID NO: 2055437 - RNA, 20 nt, Human
acacuauuuuuuuuucuuuu

SEQ ID NO: 2055438 - RNA, 15 nt, Human
acacucaaaagcugg

SEQ ID NO: 2055439 - RNA, 22 nt, Human
acacuaugguauuugaguguuu

SEQ ID NO: 2055440 - RNA, 16 nt, Human
acacuauucacuaaaa

SEQ ID NO: 2055441 - RNA, 19 nt, Human
acacuaugguauuugagug

SEQ ID NO: 2055442 - RNA, 18 nt, Human
acacuaugguauuugagu

SEQ ID NO: 2055443 - RNA, 17 nt, Human
acacuaugguauuugag

SEQ ID NO: 2055444 - RNA, 15 nt, Human
acacuaaccuggguu

SEQ ID NO: 2055445 - RNA, 15 nt, Human
acacuagucugugug

SEQ ID NO: 2055446 - RNA, 20 nt, Human
acacuagucugugugcugug

SEQ ID NO: 2055447 - RNA, 17 nt, Human
acacccucucccaggac

SEQ ID NO: 2055448 - RNA, 14 nt, Human
acaccgggccugga

SEQ ID NO: 2055449 - RNA, 16 nt, Human
acaccgggcacucaga

SEQ ID NO: 2055450 - RNA, 21 nt, Human
acaccucugcacaagcugcac

SEQ ID NO: 2055451 - RNA, 20 nt, Human
acacuaaccacgcuggaccu

SEQ ID NO: 2055452 - RNA, 15 nt, Human
acaccuuuuaacuca

SEQ ID NO: 2055453 - RNA, 17 nt, Human
acaccuuuuaacucacc

SEQ ID NO: 2055454 - RNA, 15 nt, Human
acaccuguacuggag

SEQ ID NO: 2055455 - RNA, 16 nt, Human
acaccuguacuggaga

SEQ ID NO: 2055456 - RNA, 16 nt, Human
acaccuguagucccag

SEQ ID NO: 2055457 - RNA, 17 nt, Human
acaccuguagucccagc

SEQ ID NO: 2055458 - RNA, 19 nt, Human
acaccuguagucccagcua

SEQ ID NO: 2055459 - RNA, 11 nt, Human
acaccuggccc

SEQ ID NO: 2055460 - RNA, 12 nt, Human
acaccuggcccu

SEQ ID NO: 2055461 - RNA, 14 nt, Human
acaccuggcccugg

SEQ ID NO: 2055462 - RNA, 15 nt, Human
acaccuggcccuggg

SEQ ID NO: 2055463 - RNA, 17 nt, Human
acaccuggcccuggggc

SEQ ID NO: 2055464 - RNA, 18 nt, Human
acaccuggcccuggggcc

SEQ ID NO: 2055465 - RNA, 19 nt, Human
acaccuggcccuggggccu

SEQ ID NO: 2055466 - RNA, 20 nt, Human
acaccuggcccuggggccug

SEQ ID NO: 2055467 - RNA, 21 nt, Human
acaccuguagucccagcuacu

SEQ ID NO: 2055468 - RNA, 15 nt, Human
acaccuuauauuuac

SEQ ID NO: 2055469 - RNA, 18 nt, Human
uaugaacggugagcauug

SEQ ID NO: 2055470 - RNA, 15 nt, Human
uaugaacugcaugua

SEQ ID NO: 2055471 - RNA, 15 nt, Human
uaugguaaagauauu

SEQ ID NO: 2055472 - RNA, 12 nt, Human
acagccuggcac

SEQ ID NO: 2055473 - RNA, 22 nt, Human
uauggguguguguuugugugag

SEQ ID NO: 2055474 - RNA, 21 nt, Human
uauggguaucaaacagcucag

SEQ ID NO: 2055475 - RNA, 23 nt, Human
uauggggggccaacaccagggau

SEQ ID NO: 2055476 - RNA, 20 nt, Human
uauggggcugaacggggaga

SEQ ID NO: 2055477 - RNA, 19 nt, Human
uauggggggccaacaccag

SEQ ID NO: 2055478 - RNA, 21 nt, Human
uaugaacauagacuagagaaa

SEQ ID NO: 2055479 - RNA, 20 nt, Human
uaugcugccaaauuuuggcc

SEQ ID NO: 2055480 - RNA, 22 nt, Human
uaugcugccaaauuuuggccaa

SEQ ID NO: 2055481 - RNA, 16 nt, Human
uaugcugccaaauuuu

SEQ ID NO: 2055482 - RNA, 16 nt, Human
uaugcuacuacaaaaa

SEQ ID NO: 2055483 - RNA, 15 nt, Human
uaugcuuauacacuu

SEQ ID NO: 2055484 - RNA, 13 nt, Human
uaugcuguauuuu

SEQ ID NO: 2055485 - RNA, 15 nt, Human
uaugcuguauuuucu

SEQ ID NO: 2055486 - RNA, 16 nt, Human
uaugcuguauuuucuu

SEQ ID NO: 2055487 - RNA, 20 nt, Human
uaugcuguauuuucuuuuua

SEQ ID NO: 2055488 - RNA, 22 nt, Human
uaugaaauuuaauauagcuauu

SEQ ID NO: 2055489 - RNA, 20 nt, Human
uaugaaauuuaauauagcua

SEQ ID NO: 2055490 - RNA, 14 nt, Human
uaucuuuugagaac

SEQ ID NO: 2055491 - RNA, 15 nt, Human
uaucuuuuuauugau

SEQ ID NO: 2055492 - RNA, 16 nt, Human
uaucuuuuuauugaug

SEQ ID NO: 2055493 - RNA, 17 nt, Human
uaucuuuuuauugaugu

SEQ ID NO: 2055494 - RNA, 18 nt, Human
uaucuuuuuauugaugug

SEQ ID NO: 2055495 - RNA, 19 nt, Human
uaucuuuuuauugaugugc

SEQ ID NO: 2055496 - RNA, 17 nt, Human
uaucuuuguaauuauuu

SEQ ID NO: 2055497 - RNA, 13 nt, Human
uaucuuuucuaca

SEQ ID NO: 2055498 - RNA, 14 nt, Human
uaucuuuucuacag

SEQ ID NO: 2055499 - RNA, 16 nt, Human
uaucuuuucuacagca

SEQ ID NO: 2055500 - RNA, 19 nt, Human
uaucuuuucuacagcaaau

SEQ ID NO: 2055501 - RNA, 19 nt, Human
acagccgucagccaaaugu

SEQ ID NO: 2055502 - RNA, 16 nt, Human
acagccggggccugcc

SEQ ID NO: 2055503 - RNA, 18 nt, Human
acagccggggccugccua

SEQ ID NO: 2055504 - RNA, 17 nt, Human
acagccgucagccaaau

SEQ ID NO: 2055505 - RNA, 19 nt, Human
acagccgcuccugucugcc

SEQ ID NO: 2055506 - RNA, 20 nt, Human
acagccgcuccugucugcca

SEQ ID NO: 2055507 - RNA, 23 nt, Human
acagccgcuccugucugccagcc

SEQ ID NO: 2055508 - RNA, 24 nt, Human
acagccgcuccugucugccagcca

SEQ ID NO: 2055509 - RNA, 14 nt, Human
acagccucacagaa

SEQ ID NO: 2055510 - RNA, 18 nt, Human
acagccucacuugaaugu

SEQ ID NO: 2055511 - RNA, 20 nt, Human
acagccgucagccaaaugua

SEQ ID NO: 2055512 - RNA, 17 nt, Human
acagccucacagaagaa

SEQ ID NO: 2055513 - RNA, 23 nt, Human
acagccgcagccucccucugacc

SEQ ID NO: 2055514 - RNA, 14 nt, Human
acagccgcuccugu

SEQ ID NO: 2055515 - RNA, 18 nt, Human
acagccgcuccugucugc

SEQ ID NO: 2055516 - RNA, 19 nt, Human
acagauaggccuucuugug

SEQ ID NO: 2055517 - RNA, 22 nt, Human
acagaucucugcuuuggaaauc

SEQ ID NO: 2055518 - RNA, 17 nt, Human
acagaucuccaaagcuu

SEQ ID NO: 2055519 - RNA, 20 nt, Human
acagaucauagauuucugau

SEQ ID NO: 2055520 - RNA, 21 nt, Human
acagaucauagauuucugauu

SEQ ID NO: 2055521 - RNA, 14 nt, Human
acagagacaccugc

SEQ ID NO: 2055522 - RNA, 23 nt, Human
acagagaacuagugguggcucug

SEQ ID NO: 2055523 - RNA, 15 nt, Human
acagagacaccugca

SEQ ID NO: 2055524 - RNA, 20 nt, Human
acagaugcaaugugcuacug

SEQ ID NO: 2055525 - RNA, 19 nt, Human
acagaugaacucuuucugg

SEQ ID NO: 2055526 - RNA, 16 nt, Human
acagaugcaaugugcu

SEQ ID NO: 2055527 - RNA, 17 nt, Human
acagaugcaaugugcua

SEQ ID NO: 2055528 - RNA, 13 nt, Human
acagauugcugcu

SEQ ID NO: 2055529 - RNA, 16 nt, Human
acagauugcugcuucu

SEQ ID NO: 2055530 - RNA, 17 nt, Human
acagauugcugcuucug

SEQ ID NO: 2055531 - RNA, 20 nt, Human
uaucauuuauuuuuuacauu

SEQ ID NO: 2055532 - RNA, 14 nt, Human
uaucauuuucugca

SEQ ID NO: 2055533 - RNA, 21 nt, Human
uaucauuuucugcauuuaacc

SEQ ID NO: 2055534 - RNA, 21 nt, Human
uauauuuauaacucaucauaa

SEQ ID NO: 2055535 - RNA, 16 nt, Human
uaucaacccagaaaca

SEQ ID NO: 2055536 - RNA, 17 nt, Human
uaucaacccagaaacac

SEQ ID NO: 2055537 - RNA, 12 nt, Human
uaucaagcuaau

SEQ ID NO: 2055538 - RNA, 23 nt, Human
uaucaagccaguacgugcuaaca

SEQ ID NO: 2055539 - RNA, 13 nt, Human
uaucaagcuaaua

SEQ ID NO: 2055540 - RNA, 15 nt, Human
uaucaagcuaauaaa

SEQ ID NO: 2055541 - RNA, 23 nt, Human
uaucaagcuaauaaaauaucauu

SEQ ID NO: 2055542 - RNA, 21 nt, Human
uaucaaggucguuuuuuucau

SEQ ID NO: 2055543 - RNA, 19 nt, Human
uauccacccagcccauucu

SEQ ID NO: 2055544 - RNA, 20 nt, Human
uauccacccagcccauucuc

SEQ ID NO: 2055545 - RNA, 21 nt, Human
uauccacuguuuauucaacaa

SEQ ID NO: 2055546 - RNA, 14 nt, Human
uaucccuuccuuuu

SEQ ID NO: 2055547 - RNA, 18 nt, Human
uauccggacagagcacgu

SEQ ID NO: 2055548 - RNA, 16 nt, Human
uaucccuuuucuugac

SEQ ID NO: 2055549 - RNA, 17 nt, Human
acagagaaagagagaga

SEQ ID NO: 2055550 - RNA, 18 nt, Human
acagagaaaguacuucuc

SEQ ID NO: 2055551 - RNA, 11 nt, Human
acagagaaagu

SEQ ID NO: 2055552 - RNA, 15 nt, Human
acagagaaggcagga

SEQ ID NO: 2055553 - RNA, 12 nt, Human
acagagaaggaa

SEQ ID NO: 2055554 - RNA, 13 nt, Human
acagagaaggaau

SEQ ID NO: 2055555 - RNA, 15 nt, Human
acagagaaggaaugu

SEQ ID NO: 2055556 - RNA, 19 nt, Human
acagagaaggaaugucuuu

SEQ ID NO: 2055557 - RNA, 21 nt, Human
acagagaaggaaugucuuugg

SEQ ID NO: 2055558 - RNA, 22 nt, Human
acagagaaggaaugucuuuggu

SEQ ID NO: 2055559 - RNA, 16 nt, Human
acagagaaggcagcag

SEQ ID NO: 2055560 - RNA, 14 nt, Human
acagagaaggcagg

SEQ ID NO: 2055561 - RNA, 16 nt, Human
acagagaaggcaggaa

SEQ ID NO: 2055562 - RNA, 13 nt, Human
uaucuaucuuaua

SEQ ID NO: 2055563 - RNA, 13 nt, Human
uaucuauuguaag

SEQ ID NO: 2055564 - RNA, 14 nt, Human
uaucuauuguaaga

SEQ ID NO: 2055565 - RNA, 15 nt, Human
uaucuauuguaagau

SEQ ID NO: 2055566 - RNA, 18 nt, Human
uaucuauuguaagauaaa

SEQ ID NO: 2055567 - RNA, 19 nt, Human
uaucuauuguaagauaaaa

SEQ ID NO: 2055568 - RNA, 19 nt, Human
uaucuauuuguauauauac

SEQ ID NO: 2055569 - RNA, 20 nt, Human
uaucuauuuguauauauaca

SEQ ID NO: 2055570 - RNA, 16 nt, Human
uauauuagcauuuagu

SEQ ID NO: 2055571 - RNA, 23 nt, Human
uauauuagcauuuaguccaaugu

SEQ ID NO: 2055572 - RNA, 14 nt, Human
uauauuaucaugca

SEQ ID NO: 2055573 - RNA, 20 nt, Human
uauauuaucaugcaaaugcu

SEQ ID NO: 2055574 - RNA, 21 nt, Human
uauauuuagauuguuaaaaua

SEQ ID NO: 2055575 - RNA, 12 nt, Human
uauauuuauaac

SEQ ID NO: 2055576 - RNA, 14 nt, Human
uauauuuauaacuc

SEQ ID NO: 2055577 - RNA, 15 nt, Human
uauauuuauaacuca

SEQ ID NO: 2055578 - RNA, 16 nt, Human
uauauuuauaacucau

SEQ ID NO: 2055579 - RNA, 19 nt, Human
uauauugucagauauuuuu

SEQ ID NO: 2055580 - RNA, 21 nt, Human
uauaauuuuuuucaauauuua

SEQ ID NO: 2055581 - RNA, 15 nt, Human
uauaauuuuuuaaag

SEQ ID NO: 2055582 - RNA, 18 nt, Human
uauaauuuuuuucaauau

SEQ ID NO: 2055583 - RNA, 20 nt, Human
uauaauuuuuuuauguuuug

SEQ ID NO: 2055584 - RNA, 22 nt, Human
uauaauuuuuuuauguuuuguu

SEQ ID NO: 2055585 - RNA, 19 nt, Human
uauaauuuuuaaaguauau

SEQ ID NO: 2055586 - RNA, 19 nt, Human
uauaauuuuuuagagagcu

SEQ ID NO: 2055587 - RNA, 17 nt, Human
acagaaauuagccgggc

SEQ ID NO: 2055588 - RNA, 22 nt, Human
acaggcauguucucugaggaca

SEQ ID NO: 2055589 - RNA, 20 nt, Human
acaggcauguucucugagga

SEQ ID NO: 2055590 - RNA, 19 nt, Human
acaggcauguucucugagg

SEQ ID NO: 2055591 - RNA, 18 nt, Human
acaggcauguucucugag

SEQ ID NO: 2055592 - RNA, 15 nt, Human
acaggcauguucucu

SEQ ID NO: 2055593 - RNA, 22 nt, Human
uaugugaauauggacucaguuu

SEQ ID NO: 2055594 - RNA, 12 nt, Human
uaugugaaugau

SEQ ID NO: 2055595 - RNA, 22 nt, Human
uaugugaaugaucucucugaau

SEQ ID NO: 2055596 - RNA, 19 nt, Human
uaugugacaauuuuguaca

SEQ ID NO: 2055597 - RNA, 20 nt, Human
acaggauagauaacucuuug

SEQ ID NO: 2055598 - RNA, 13 nt, Human
uaugugagugugu

SEQ ID NO: 2055599 - RNA, 15 nt, Human
uauguuuuguuucug

SEQ ID NO: 2055600 - RNA, 18 nt, Human
uauguuuuguuucugaaa

SEQ ID NO: 2055601 - RNA, 16 nt, Human
uaugugugaggagcug

SEQ ID NO: 2055602 - RNA, 21 nt, Human
uaugugugaggagcugcuggc

SEQ ID NO: 2055603 - RNA, 18 nt, Human
uauguguaugugccauuu

SEQ ID NO: 2055604 - RNA, 15 nt, Human
uaugugugaggagcu

SEQ ID NO: 2055605 - RNA, 23 nt, Human
uaugugaguguguguuugugcug

SEQ ID NO: 2055606 - RNA, 14 nt, Human
uauguuuuugugua

SEQ ID NO: 2055607 - RNA, 18 nt, Human
uauguuuuuguguauuug

SEQ ID NO: 2055608 - RNA, 18 nt, Human
uauguuuuuuauuaugcu

SEQ ID NO: 2055609 - RNA, 17 nt, Human
acaggaaaagcugcuga

SEQ ID NO: 2055610 - RNA, 16 nt, Human
acaggaaaagcugcug

SEQ ID NO: 2055611 - RNA, 15 nt, Human
acaggaaaagcugcu

SEQ ID NO: 2055612 - RNA, 15 nt, Human
acaggaagcacccca

SEQ ID NO: 2055613 - RNA, 20 nt, Human
acaggaagcaccccaugcca

SEQ ID NO: 2055614 - RNA, 17 nt, Human
acaggaagucuucaggg

SEQ ID NO: 2055615 - RNA, 11 nt, Human
acagccuggca

SEQ ID NO: 2055616 - RNA, 16 nt, Human
acagcggggccccagg

SEQ ID NO: 2055617 - RNA, 20 nt, Human
acagcuuucaugauuagcaa

SEQ ID NO: 2055618 - RNA, 19 nt, Human
acagcuuuuaguacccacc

SEQ ID NO: 2055619 - RNA, 21 nt, Human
acagcuuuuaguacccaccug

SEQ ID NO: 2055620 - RNA, 22 nt, Human
acagcuuuuaguacccaccuga

SEQ ID NO: 2055621 - RNA, 23 nt, Human
acagcuuuuaguacccaccugag

SEQ ID NO: 2055622 - RNA, 14 nt, Human
acaggaaaaaaacu

SEQ ID NO: 2055623 - RNA, 16 nt, Human
acaggaaaaaaacuuu

SEQ ID NO: 2055624 - RNA, 17 nt, Human
acaggaaaaaaacuuuu

SEQ ID NO: 2055625 - RNA, 22 nt, Human
acaggaaaaaaacuuuuauaaa

SEQ ID NO: 2055626 - RNA, 23 nt, Human
acaggaaaaaaacuuuuauaaau

SEQ ID NO: 2055627 - RNA, 13 nt, Human
acaggcaggucca

SEQ ID NO: 2055628 - RNA, 14 nt, Human
acaggaucagucug

SEQ ID NO: 2055629 - RNA, 16 nt, Human
acaggagugagcacua

SEQ ID NO: 2055630 - RNA, 16 nt, Human
acaggcagguccaggg

SEQ ID NO: 2055631 - RNA, 14 nt, Human
acaggcagguccag

SEQ ID NO: 2055632 - RNA, 14 nt, Human
acaggcauguucuc

SEQ ID NO: 2055633 - RNA, 14 nt, Human
acaggaccagauuu

SEQ ID NO: 2055634 - RNA, 14 nt, Human
acaggacucugccu

SEQ ID NO: 2055635 - RNA, 20 nt, Human
acaggacagugcuucagccu

SEQ ID NO: 2055636 - RNA, 22 nt, Human
acaggacagugcuucagccuga

SEQ ID NO: 2055637 - RNA, 20 nt, Human
acaggacagcauggugcaug

SEQ ID NO: 2055638 - RNA, 22 nt, Human
acaggacagcauggugcaugcc

SEQ ID NO: 2055639 - RNA, 17 nt, Human
acaggacagugcuucag

SEQ ID NO: 2055640 - RNA, 23 nt, Human
acaggcugggcuucaguggcagc

SEQ ID NO: 2055641 - RNA, 22 nt, Human
acaggcugggcuucaguggcag

SEQ ID NO: 2055642 - RNA, 12 nt, Human
acaggcugggcu

SEQ ID NO: 2055643 - RNA, 12 nt, Human
acagggacccac

SEQ ID NO: 2055644 - RNA, 16 nt, Human
acagggagcugggaca

SEQ ID NO: 2055645 - RNA, 12 nt, Human
acaguacaggca

SEQ ID NO: 2055646 - RNA, 20 nt, Human
acaguacaggcagcacagag

SEQ ID NO: 2055647 - RNA, 13 nt, Human
acaguacaggcag

SEQ ID NO: 2055648 - RNA, 14 nt, Human
acaguacaggcagc

SEQ ID NO: 2055649 - RNA, 16 nt, Human
acaguacaggcagcac

SEQ ID NO: 2055650 - RNA, 18 nt, Human
acaguacaggcagcacag

SEQ ID NO: 2055651 - RNA, 20 nt, Human
acagggcacaccgggcacuc

SEQ ID NO: 2055652 - RNA, 12 nt, Human
acagggcacacc

SEQ ID NO: 2055653 - RNA, 15 nt, Human
acaguaccaucugaa

SEQ ID NO: 2055654 - RNA, 17 nt, Human
acagucacaugcuugau

SEQ ID NO: 2055655 - RNA, 22 nt, Human
acagucaaggaguggcuuacua

SEQ ID NO: 2055656 - RNA, 17 nt, Human
acaguagugagaagaau

SEQ ID NO: 2055657 - RNA, 18 nt, Human
acaguagugagaagaaua

SEQ ID NO: 2055658 - RNA, 20 nt, Human
acaguagugagaagaauauu

SEQ ID NO: 2055659 - RNA, 21 nt, Human
acaguagugagaagaauauug

SEQ ID NO: 2055660 - RNA, 18 nt, Human
uauucaccauguaaaaca

SEQ ID NO: 2055661 - RNA, 19 nt, Human
uauucaccauguaaaacaa

SEQ ID NO: 2055662 - RNA, 20 nt, Human
uauucaccauguaaaacaaa

SEQ ID NO: 2055663 - RNA, 18 nt, Human
uauucaauuccucuggga

SEQ ID NO: 2055664 - RNA, 17 nt, Human
uauucaauuccucuggg

SEQ ID NO: 2055665 - RNA, 16 nt, Human
uauucaauuccucugg

SEQ ID NO: 2055666 - RNA, 15 nt, Human
uauucaauuccucug

SEQ ID NO: 2055667 - RNA, 14 nt, Human
uauucaauuccucu

SEQ ID NO: 2055668 - RNA, 14 nt, Human
acaggcucaauauu

SEQ ID NO: 2055669 - RNA, 18 nt, Human
uauucaguugguaagcuu

SEQ ID NO: 2055670 - RNA, 23 nt, Human
uauucaguugguaagcuuccagg

SEQ ID NO: 2055671 - RNA, 21 nt, Human
uauucagugcuguggccuggg

SEQ ID NO: 2055672 - RNA, 16 nt, Human
uauucaguuaagaaaa

SEQ ID NO: 2055673 - RNA, 17 nt, Human
uauucaguuaagaaaaa

SEQ ID NO: 2055674 - RNA, 18 nt, Human
uauucaguuaagaaaaaa

SEQ ID NO: 2055675 - RNA, 21 nt, Human
uauucaguuaagaaaaaaaua

SEQ ID NO: 2055676 - RNA, 14 nt, Human
uauucaguaaaaaa

SEQ ID NO: 2055677 - RNA, 20 nt, Human
uauucaguaauaacucuacc

SEQ ID NO: 2055678 - RNA, 15 nt, Human
uauucagugcugugg

SEQ ID NO: 2055679 - RNA, 18 nt, Human
uauucagugcuguggccu

SEQ ID NO: 2055680 - RNA, 22 nt, Human
uauucagugcuguggccugggc

SEQ ID NO: 2055681 - RNA, 10 nt, Human
uauuaaaauc

SEQ ID NO: 2055682 - RNA, 13 nt, Human
uauuaaaaucuua

SEQ ID NO: 2055683 - RNA, 13 nt, Human
uauuacuucugcu

SEQ ID NO: 2055684 - RNA, 14 nt, Human
uauuacuuauuugg

SEQ ID NO: 2055685 - RNA, 14 nt, Human
uauuacuucugcua

SEQ ID NO: 2055686 - RNA, 18 nt, Human
uauuagucauagaagaac

SEQ ID NO: 2055687 - RNA, 14 nt, Human
uauuagcuuuacug

SEQ ID NO: 2055688 - RNA, 16 nt, Human
uauuagcuuuacuguu

SEQ ID NO: 2055689 - RNA, 14 nt, Human
aauugacuuauuua

SEQ ID NO: 2055690 - RNA, 12 nt, Human
uacuguaguuuu

SEQ ID NO: 2055691 - RNA, 14 nt, Human
uacuguacuuaaua

SEQ ID NO: 2055692 - RNA, 13 nt, Human
uacuguaguuuuu

SEQ ID NO: 2055693 - RNA, 15 nt, Human
uacuguaguuuuucu

SEQ ID NO: 2055694 - RNA, 20 nt, Human
aauugccauguacaguaugu

SEQ ID NO: 2055695 - RNA, 22 nt, Human
aauugaucauuuuccccccacu

SEQ ID NO: 2055696 - RNA, 20 nt, Human
aauugcauuuuuuaaaacaa

SEQ ID NO: 2055697 - RNA, 21 nt, Human
aauugcauuuuuuaaaacaag

SEQ ID NO: 2055698 - RNA, 14 nt, Human
aauugccaaagcug

SEQ ID NO: 2055699 - RNA, 12 nt, Human
aauugcauuucc

SEQ ID NO: 2055700 - RNA, 13 nt, Human
aauugauaauaaa

SEQ ID NO: 2055701 - RNA, 14 nt, Human
aauugauaauaaac

SEQ ID NO: 2055702 - RNA, 15 nt, Human
aauugauaauaaacu

SEQ ID NO: 2055703 - RNA, 22 nt, Human
aauugauaauaaacuguccucu

SEQ ID NO: 2055704 - RNA, 19 nt, Human
aauugaggucugcucggcc

SEQ ID NO: 2055705 - RNA, 12 nt, Human
uacucuguguca

SEQ ID NO: 2055706 - RNA, 17 nt, Human
uacuggaaguuuugcau

SEQ ID NO: 2055707 - RNA, 14 nt, Human
uacuggagaagucu

SEQ ID NO: 2055708 - RNA, 12 nt, Human
uacucuggccuc

SEQ ID NO: 2055709 - RNA, 15 nt, Human
uacucugucagaugg

SEQ ID NO: 2055710 - RNA, 12 nt, Human
uacucugucucc

SEQ ID NO: 2055711 - RNA, 13 nt, Human
uacucugucuccc

SEQ ID NO: 2055712 - RNA, 19 nt, Human
uacucugaagggcaucaug

SEQ ID NO: 2055713 - RNA, 22 nt, Human
uacucugaagggcaucaugcau

SEQ ID NO: 2055714 - RNA, 21 nt, Human
uacucugaaauuguaacuaaa

SEQ ID NO: 2055715 - RNA, 12 nt, Human
uacucugaaggg

SEQ ID NO: 2055716 - RNA, 18 nt, Human
uacuggaaguuuugcauu

SEQ ID NO: 2055717 - RNA, 23 nt, Human
uacuggaaguuuugcauuuaugg

SEQ ID NO: 2055718 - RNA, 23 nt, Human
uacugggaaagggauuuucagcc

SEQ ID NO: 2055719 - RNA, 20 nt, Human
uacuacuguggaaaaauauu

SEQ ID NO: 2055720 - RNA, 22 nt, Human
uacuacuguggaaaaauauuua

SEQ ID NO: 2055721 - RNA, 20 nt, Human
uacuaucaugucaaacguga

SEQ ID NO: 2055722 - RNA, 13 nt, Human
uacuacuccugua

SEQ ID NO: 2055723 - RNA, 17 nt, Human
uacuacuccuguaggaa

SEQ ID NO: 2055724 - RNA, 14 nt, Human
uacuauguaucaau

SEQ ID NO: 2055725 - RNA, 15 nt, Human
uacuauggaguacca

SEQ ID NO: 2055726 - RNA, 22 nt, Human
uacucuccuggaaauauuaaga

SEQ ID NO: 2055727 - RNA, 23 nt, Human
uacucuccuggaaauauuaagaa

SEQ ID NO: 2055728 - RNA, 16 nt, Human
uacuauaucuguuuua

SEQ ID NO: 2055729 - RNA, 20 nt, Human
uacuauaucuguuuuacugc

SEQ ID NO: 2055730 - RNA, 13 nt, Human
uacuauccuggcu

SEQ ID NO: 2055731 - RNA, 20 nt, Human
uacuauccuggcuuugccca

SEQ ID NO: 2055732 - RNA, 12 nt, Human
uacuauguauca

SEQ ID NO: 2055733 - RNA, 13 nt, Human
uacuauguaucaa

SEQ ID NO: 2055734 - RNA, 22 nt, Human
uacgccaggggaaaaucagccu

SEQ ID NO: 2055735 - RNA, 14 nt, Human
aauuccucugggaa

SEQ ID NO: 2055736 - RNA, 13 nt, Human
aauuccucuggga

SEQ ID NO: 2055737 - RNA, 13 nt, Human
aauucccuggacc

SEQ ID NO: 2055738 - RNA, 20 nt, Human
aauuccuagauaaaaagaug

SEQ ID NO: 2055739 - RNA, 23 nt, Human
aauucccuaucuuuuaguuuuag

SEQ ID NO: 2055740 - RNA, 10 nt, Human
aauucccuau

SEQ ID NO: 2055741 - RNA, 22 nt, Human
aauucccuaucuuuuaguuuua

SEQ ID NO: 2055742 - RNA, 13 nt, Human
aauuauucaguua

SEQ ID NO: 2055743 - RNA, 17 nt, Human
aauuauucaguuaagaa

SEQ ID NO: 2055744 - RNA, 18 nt, Human
aauuauucaguuaagaaa

SEQ ID NO: 2055745 - RNA, 20 nt, Human
aauuauucaguuaagaaaaa

SEQ ID NO: 2055746 - RNA, 14 nt, Human
aauuagguuaacua

SEQ ID NO: 2055747 - RNA, 22 nt, Human
aauuagguuaacuauguacaau

SEQ ID NO: 2055748 - RNA, 17 nt, Human
aauuagggguugcuaag

SEQ ID NO: 2055749 - RNA, 20 nt, Human
aauuagggguugcuaagaag

SEQ ID NO: 2055750 - RNA, 16 nt, Human
aauuagguuuuguaca

SEQ ID NO: 2055751 - RNA, 17 nt, Human
aauuagguuuuguacaa

SEQ ID NO: 2055752 - RNA, 17 nt, Human
aauuaguauuuauuuaa

SEQ ID NO: 2055753 - RNA, 18 nt, Human
aauuaguauuuauuuaau

SEQ ID NO: 2055754 - RNA, 12 nt, Human
aauuauuuuaau

SEQ ID NO: 2055755 - RNA, 16 nt, Human
aauuauuuuaauuagg

SEQ ID NO: 2055756 - RNA, 17 nt, Human
aauuauuuuaauuaggu

SEQ ID NO: 2055757 - RNA, 17 nt, Human
aauuauuuuuaauaugu

SEQ ID NO: 2055758 - RNA, 17 nt, Human
aauuauuuuuacaguuc

SEQ ID NO: 2055759 - RNA, 19 nt, Human
aauuauuuuuuuucuuuua

SEQ ID NO: 2055760 - RNA, 16 nt, Human
aauuauuuuuuuucuu

SEQ ID NO: 2055761 - RNA, 13 nt, Human
aauucaaaaaugu

SEQ ID NO: 2055762 - RNA, 14 nt, Human
aauucaaaaaugua

SEQ ID NO: 2055763 - RNA, 16 nt, Human
aauucaaaaauguaca

SEQ ID NO: 2055764 - RNA, 17 nt, Human
aauucaaaaauguacaa

SEQ ID NO: 2055765 - RNA, 22 nt, Human
aauucaaaaauguacaaaauaa

SEQ ID NO: 2055766 - RNA, 17 nt, Human
aauucauucuggucucu

SEQ ID NO: 2055767 - RNA, 15 nt, Human
aauucacaagcugcc

SEQ ID NO: 2055768 - RNA, 16 nt, Human
aauucacaagcugccu

SEQ ID NO: 2055769 - RNA, 18 nt, Human
aauucacaagcugccucc

SEQ ID NO: 2055770 - RNA, 18 nt, Human
aauucaacccuuugcccc

SEQ ID NO: 2055771 - RNA, 14 nt, Human
aauucaacccuuug

SEQ ID NO: 2055772 - RNA, 21 nt, Human
aauucaaccacuguaaaauga

SEQ ID NO: 2055773 - RNA, 14 nt, Human
aauuccaaaggaau

SEQ ID NO: 2055774 - RNA, 13 nt, Human
aauuccacuggac

SEQ ID NO: 2055775 - RNA, 14 nt, Human
aauuccacuggacu

SEQ ID NO: 2055776 - RNA, 22 nt, Human
aauuccacugucaagaaagagc

SEQ ID NO: 2055777 - RNA, 14 nt, Human
aauuccacugucaa

SEQ ID NO: 2055778 - RNA, 21 nt, Human
aauuccacuggacuugagcuu

SEQ ID NO: 2055779 - RNA, 12 nt, Human
aauuccccagau

SEQ ID NO: 2055780 - RNA, 14 nt, Human
aauuccccacccug

SEQ ID NO: 2055781 - RNA, 20 nt, Human
aauuccagaaaggauauuua

SEQ ID NO: 2055782 - RNA, 21 nt, Human
aauucccagcugucuguguca

SEQ ID NO: 2055783 - RNA, 16 nt, Human
aauucccauuuugcaa

SEQ ID NO: 2055784 - RNA, 17 nt, Human
aauucccauuuugcaaa

SEQ ID NO: 2055785 - RNA, 19 nt, Human
aauucccauuuugcaaaau

SEQ ID NO: 2055786 - RNA, 21 nt, Human
aauucccauuuugcaaaauuu

SEQ ID NO: 2055787 - RNA, 22 nt, Human
aauucccauuuugcaaaauuuc

SEQ ID NO: 2055788 - RNA, 15 nt, Human
aauuacuacaaaauu

SEQ ID NO: 2055789 - RNA, 17 nt, Human
aauuacuacaaaauuug

SEQ ID NO: 2055790 - RNA, 15 nt, Human
uaccuguauucccag

SEQ ID NO: 2055791 - RNA, 13 nt, Human
uaccugugaaaua

SEQ ID NO: 2055792 - RNA, 14 nt, Human
aauuagccgggcgu

SEQ ID NO: 2055793 - RNA, 15 nt, Human
aauuagccaagugug

SEQ ID NO: 2055794 - RNA, 16 nt, Human
aauuacuacaaaauuu

SEQ ID NO: 2055795 - RNA, 16 nt, Human
aauuagcugugugaaa

SEQ ID NO: 2055796 - RNA, 17 nt, Human
aauuaggaagugauuau

SEQ ID NO: 2055797 - RNA, 21 nt, Human
aauuaggaaguguaacagcug

SEQ ID NO: 2055798 - RNA, 20 nt, Human
aauuaggaauaaauaaaaau

SEQ ID NO: 2055799 - RNA, 22 nt, Human
aauuaggaaguguaacagcuga

SEQ ID NO: 2055800 - RNA, 17 nt, Human
uacauugcuggucuugu

SEQ ID NO: 2055801 - RNA, 19 nt, Human
uacauugcuggucuuguaa

SEQ ID NO: 2055802 - RNA, 21 nt, Human
uacauugcuggucuuguaaga

SEQ ID NO: 2055803 - RNA, 22 nt, Human
uacauugcuggucuuguaagag

SEQ ID NO: 2055804 - RNA, 10 nt, Human
uaccaccucc

SEQ ID NO: 2055805 - RNA, 14 nt, Human
uaccacucaggcca

SEQ ID NO: 2055806 - RNA, 16 nt, Human
uacauguggcccaaca

SEQ ID NO: 2055807 - RNA, 13 nt, Human
uacaugugggagc

SEQ ID NO: 2055808 - RNA, 13 nt, Human
aauuaaugacaga

SEQ ID NO: 2055809 - RNA, 11 nt, Human
aauuaagaaug

SEQ ID NO: 2055810 - RNA, 16 nt, Human
aauuaagaauguucuc

SEQ ID NO: 2055811 - RNA, 21 nt, Human
aauguucucucuucuccaccu

SEQ ID NO: 2055812 - RNA, 12 nt, Human
aauguucugaca

SEQ ID NO: 2055813 - RNA, 14 nt, Human
aauguucugacauu

SEQ ID NO: 2055814 - RNA, 15 nt, Human
aauguucugacauua

SEQ ID NO: 2055815 - RNA, 17 nt, Human
aauguucugacauuaac

SEQ ID NO: 2055816 - RNA, 19 nt, Human
aauguucugacauuaacag

SEQ ID NO: 2055817 - RNA, 20 nt, Human
aauguucugacauuaacagu

SEQ ID NO: 2055818 - RNA, 12 nt, Human
aauuaaccuggu

SEQ ID NO: 2055819 - RNA, 20 nt, Human
aauuaacauugggaaaucuu

SEQ ID NO: 2055820 - RNA, 18 nt, Human
aauuaaccuggugcugga

SEQ ID NO: 2055821 - RNA, 13 nt, Human
aauuaaccuggug

SEQ ID NO: 2055822 - RNA, 14 nt, Human
aauuaaccuggugc

SEQ ID NO: 2055823 - RNA, 15 nt, Human
aauuaaccuggugcu

SEQ ID NO: 2055824 - RNA, 16 nt, Human
aauuaaccuggugcug

SEQ ID NO: 2055825 - RNA, 14 nt, Human
aauguuaaagucag

SEQ ID NO: 2055826 - RNA, 15 nt, Human
aauguuaaagucagu

SEQ ID NO: 2055827 - RNA, 16 nt, Human
uacaggugugagucac

SEQ ID NO: 2055828 - RNA, 17 nt, Human
uacagauugcugcuucu

SEQ ID NO: 2055829 - RNA, 13 nt, Human
uacauaugaaauu

SEQ ID NO: 2055830 - RNA, 13 nt, Human
uacauaugcuuua

SEQ ID NO: 2055831 - RNA, 14 nt, Human
uacauaugcuuuaa

SEQ ID NO: 2055832 - RNA, 17 nt, Human
uacauaugcuuuaagaa

SEQ ID NO: 2055833 - RNA, 21 nt, Human
uacauaugcuuuaagaaucga

SEQ ID NO: 2055834 - RNA, 15 nt, Human
uacauauguaaaaua

SEQ ID NO: 2055835 - RNA, 16 nt, Human
uacauauguaaaauaa

SEQ ID NO: 2055836 - RNA, 20 nt, Human
uacauauguaaaauaaaauu

SEQ ID NO: 2055837 - RNA, 19 nt, Human
uacagaugucccauuuuca

SEQ ID NO: 2055838 - RNA, 23 nt, Human
uacauacacauauauacacacac

SEQ ID NO: 2055839 - RNA, 14 nt, Human
uacauauauauauu

SEQ ID NO: 2055840 - RNA, 17 nt, Human
uacauauguaaaauaaa

SEQ ID NO: 2055841 - RNA, 14 nt, Human
aauguauuauucug

SEQ ID NO: 2055842 - RNA, 16 nt, Human
aauguauuauucugca

SEQ ID NO: 2055843 - RNA, 19 nt, Human
aaugugaaaagaaaaauga

SEQ ID NO: 2055844 - RNA, 17 nt, Human
aaugugccuaguucuuu

SEQ ID NO: 2055845 - RNA, 19 nt, Human
aaugugcuacugauuguuu

SEQ ID NO: 2055846 - RNA, 13 nt, Human
aaugugcccccag

SEQ ID NO: 2055847 - RNA, 16 nt, Human
aaugugauuuuucuga

SEQ ID NO: 2055848 - RNA, 14 nt, Human
aauguauaaguuga

SEQ ID NO: 2055849 - RNA, 13 nt, Human
aauguauaccugu

SEQ ID NO: 2055850 - RNA, 17 nt, Human
aauguauaccuguaacu

SEQ ID NO: 2055851 - RNA, 20 nt, Human
aauguauaccuguaacugca

SEQ ID NO: 2055852 - RNA, 19 nt, Human
aauguauguguaaguauuc

SEQ ID NO: 2055853 - RNA, 20 nt, Human
aauguauguguaaguauucu

SEQ ID NO: 2055854 - RNA, 13 nt, Human
aauguaucaggaa

SEQ ID NO: 2055855 - RNA, 15 nt, Human
aauguaucaggaaau

SEQ ID NO: 2055856 - RNA, 14 nt, Human
aauguaucaggaaa

SEQ ID NO: 2055857 - RNA, 17 nt, Human
aauguauuauucugcag

SEQ ID NO: 2055858 - RNA, 13 nt, Human
uacagauaggccu

SEQ ID NO: 2055859 - RNA, 17 nt, Human
uacagauaggccuucuu

SEQ ID NO: 2055860 - RNA, 19 nt, Human
uacagauaggccuucuugu

SEQ ID NO: 2055861 - RNA, 20 nt, Human
uacagauaggccuucuugug

SEQ ID NO: 2055862 - RNA, 13 nt, Human
uacagacguaugc

SEQ ID NO: 2055863 - RNA, 17 nt, Human
aauguaagaaucauugu

SEQ ID NO: 2055864 - RNA, 23 nt, Human
aauguaagaaucauuguaaacau

SEQ ID NO: 2055865 - RNA, 15 nt, Human
uacacuaaaagguga

SEQ ID NO: 2055866 - RNA, 14 nt, Human
aauggacucaaacu

SEQ ID NO: 2055867 - RNA, 12 nt, Human
aauggcagccuu

SEQ ID NO: 2055868 - RNA, 17 nt, Human
aauggcacagcccaaag

SEQ ID NO: 2055869 - RNA, 20 nt, Human
aauggcacagcccaaagaag

SEQ ID NO: 2055870 - RNA, 16 nt, Human
aauggcagccuuggca

SEQ ID NO: 2055871 - RNA, 19 nt, Human
aauggcacagcccaaagaa

SEQ ID NO: 2055872 - RNA, 14 nt, Human
aauggccugccuug

SEQ ID NO: 2055873 - RNA, 20 nt, Human
aauggccugccuugaagcca

SEQ ID NO: 2055874 - RNA, 19 nt, Human
aauggcgugaacccgggag

SEQ ID NO: 2055875 - RNA, 22 nt, Human
aauggccugccuugaagccacu

SEQ ID NO: 2055876 - RNA, 22 nt, Human
aaugcuguauuagucacagaga

SEQ ID NO: 2055877 - RNA, 16 nt, Human
aaugcuguugccucau

SEQ ID NO: 2055878 - RNA, 20 nt, Human
aaugcuuaucaucuaaagau

SEQ ID NO: 2055879 - RNA, 21 nt, Human
aaugcuuccugacaaucaacu

SEQ ID NO: 2055880 - RNA, 22 nt, Human
aaugcagcgaaccaauauuugu

SEQ ID NO: 2055881 - RNA, 21 nt, Human
aaugccauggacagaagaagg

SEQ ID NO: 2055882 - RNA, 13 nt, Human
aaugccauucucu

SEQ ID NO: 2055883 - RNA, 19 nt, Human
uaauagcgucauaacuaga

SEQ ID NO: 2055884 - RNA, 14 nt, Human
uaauauuugcugac

SEQ ID NO: 2055885 - RNA, 15 nt, Human
aaucuuauauuccau

SEQ ID NO: 2055886 - RNA, 22 nt, Human
uaaucuuuggguaacuucaaaa

SEQ ID NO: 2055887 - RNA, 20 nt, Human
uaaucccagcuacucaggag

SEQ ID NO: 2055888 - RNA, 12 nt, Human
uaaucuuugggu

SEQ ID NO: 2055889 - RNA, 13 nt, Human
uaaugaaaauguc

SEQ ID NO: 2055890 - RNA, 14 nt, Human
uaaugaaaauguca

SEQ ID NO: 2055891 - RNA, 15 nt, Human
uaaugaaaaugucag

SEQ ID NO: 2055892 - RNA, 17 nt, Human
uaaugaaugaaacauuu

SEQ ID NO: 2055893 - RNA, 15 nt, Human
uaauauuuuuaauua

SEQ ID NO: 2055894 - RNA, 14 nt, Human
uaauauuuuuaauu

SEQ ID NO: 2055895 - RNA, 19 nt, Human
uaaucccagcuacuuggga

SEQ ID NO: 2055896 - RNA, 19 nt, Human
uaaucccagcacuuuggga

SEQ ID NO: 2055897 - RNA, 11 nt, Human
uaaucagccuc

SEQ ID NO: 2055898 - RNA, 20 nt, Human
uaaucagcaagaauuugauc

SEQ ID NO: 2055899 - RNA, 21 nt, Human
uaaucagcaagaauuugaucg

SEQ ID NO: 2055900 - RNA, 13 nt, Human
aaugacacagucu

SEQ ID NO: 2055901 - RNA, 13 nt, Human
aaugaauuuuguu

SEQ ID NO: 2055902 - RNA, 17 nt, Human
aaugaauuuuuaugaua

SEQ ID NO: 2055903 - RNA, 17 nt, Human
aaugaaugcauaaaaug

SEQ ID NO: 2055904 - RNA, 19 nt, Human
aaugaauggacucaaacug

SEQ ID NO: 2055905 - RNA, 13 nt, Human
aaucuuucugcag

SEQ ID NO: 2055906 - RNA, 17 nt, Human
aaugaaacauuuuguca

SEQ ID NO: 2055907 - RNA, 16 nt, Human
aaugaaagacuguaca

SEQ ID NO: 2055908 - RNA, 17 nt, Human
aaugaaagacuguacaa

SEQ ID NO: 2055909 - RNA, 18 nt, Human
uaaugucacaggcagguc

SEQ ID NO: 2055910 - RNA, 15 nt, Human
uaaugucaccaccuu

SEQ ID NO: 2055911 - RNA, 21 nt, Human
uaaugucaccaccuucccagc

SEQ ID NO: 2055912 - RNA, 22 nt, Human
uaaugucaccaccuucccagcu

SEQ ID NO: 2055913 - RNA, 15 nt, Human
uaaugaaugcauaaa

SEQ ID NO: 2055914 - RNA, 15 nt, Human
uaaugaauggacuca

SEQ ID NO: 2055915 - RNA, 15 nt, Human
uaauguacaucuggc

SEQ ID NO: 2055916 - RNA, 13 nt, Human
uaauguacugcau

SEQ ID NO: 2055917 - RNA, 13 nt, Human
uaaugucuuguua

SEQ ID NO: 2055918 - RNA, 14 nt, Human
uaaugucuuguuaa

SEQ ID NO: 2055919 - RNA, 15 nt, Human
uaaugucuuguuaau

SEQ ID NO: 2055920 - RNA, 20 nt, Human
uaaugucuuguuaauauucu

SEQ ID NO: 2055921 - RNA, 22 nt, Human
uaaugucuuguuaauauucuuu

SEQ ID NO: 2055922 - RNA, 17 nt, Human
uaaugugggaagaaaca

SEQ ID NO: 2055923 - RNA, 18 nt, Human
uaaugugggaagaaacaa

SEQ ID NO: 2055924 - RNA, 22 nt, Human
uaaugugggaagaaacaaaccc

SEQ ID NO: 2055925 - RNA, 11 nt, Human
uaauguuacug

SEQ ID NO: 2055926 - RNA, 14 nt, Human
uaauguuacugauc

SEQ ID NO: 2055927 - RNA, 12 nt, Human
uaauguuacuga

SEQ ID NO: 2055928 - RNA, 13 nt, Human
uaauguuacugau

SEQ ID NO: 2055929 - RNA, 21 nt, Human
aauccuggggaacauagaacu

SEQ ID NO: 2055930 - RNA, 14 nt, Human
aauccuggggaaca

SEQ ID NO: 2055931 - RNA, 15 nt, Human
aauccuaaaagaagc

SEQ ID NO: 2055932 - RNA, 15 nt, Human
aauccuguccucagc

SEQ ID NO: 2055933 - RNA, 18 nt, Human
aauccuguccucagcuuc

SEQ ID NO: 2055934 - RNA, 21 nt, Human
aauccuguccucagcuucuua

SEQ ID NO: 2055935 - RNA, 18 nt, Human
aaucgaggaaccagagcc

SEQ ID NO: 2055936 - RNA, 20 nt, Human
aaucgaugggggaugcuuca

SEQ ID NO: 2055937 - RNA, 21 nt, Human
aaucgaugggggaugcuucau

SEQ ID NO: 2055938 - RNA, 23 nt, Human
aaucgcuccaccuugcagcucuc

SEQ ID NO: 2055939 - RNA, 13 nt, Human
aaucgauggggga

SEQ ID NO: 2055940 - RNA, 17 nt, Human
aaucgaggaaccagagc

SEQ ID NO: 2055941 - RNA, 19 nt, Human
aaucgaggaaccagagcca

SEQ ID NO: 2055942 - RNA, 14 nt, Human
aauccugugugguu

SEQ ID NO: 2055943 - RNA, 21 nt, Human
aauccugugugguuuagugua

SEQ ID NO: 2055944 - RNA, 22 nt, Human
aauccugugugguuuaguguaa

SEQ ID NO: 2055945 - RNA, 23 nt, Human
aauccugugugguuuaguguaaa

SEQ ID NO: 2055946 - RNA, 14 nt, Human
aauccuguugaaaa

SEQ ID NO: 2055947 - RNA, 16 nt, Human
aauccuguugaaaagc

SEQ ID NO: 2055948 - RNA, 20 nt, Human
aauccuuuuucuuuauaaac

SEQ ID NO: 2055949 - RNA, 21 nt, Human
aauccgaccacuaauugccaa

SEQ ID NO: 2055950 - RNA, 12 nt, Human
aaucauuauuua

SEQ ID NO: 2055951 - RNA, 19 nt, Human
aaucauuauuuauuaaauu

SEQ ID NO: 2055952 - RNA, 20 nt, Human
aaucauuauuuauuaaauuu

SEQ ID NO: 2055953 - RNA, 22 nt, Human
aaucauuauuuauuaaauuuuu

SEQ ID NO: 2055954 - RNA, 17 nt, Human
aaucauuaagacaacug

SEQ ID NO: 2055955 - RNA, 18 nt, Human
aaucuguguagacgaagg

SEQ ID NO: 2055956 - RNA, 16 nt, Human
aaucuuagcugccaag

SEQ ID NO: 2055957 - RNA, 19 nt, Human
aaucuuaggggagagcuuu

SEQ ID NO: 2055958 - RNA, 12 nt, Human
aaucuaagggaa

SEQ ID NO: 2055959 - RNA, 13 nt, Human
aaucuaagggaaa

SEQ ID NO: 2055960 - RNA, 20 nt, Human
uaauaaacuguccucuuuca

SEQ ID NO: 2055961 - RNA, 14 nt, Human
uaauaaacuguguu

SEQ ID NO: 2055962 - RNA, 15 nt, Human
uaauaaacuguguuu

SEQ ID NO: 2055963 - RNA, 19 nt, Human
aaucauaguacucuuugua

SEQ ID NO: 2055964 - RNA, 22 nt, Human
aaucauaguacucuuuguagca

SEQ ID NO: 2055965 - RNA, 16 nt, Human
aaucaugaaauaugca

SEQ ID NO: 2055966 - RNA, 17 nt, Human
aaucaugaaauaugcau

SEQ ID NO: 2055967 - RNA, 22 nt, Human
uaauaaacauccuucaagaacu

SEQ ID NO: 2055968 - RNA, 12 nt, Human
uaauaaacucau

SEQ ID NO: 2055969 - RNA, 15 nt, Human
uaaguugaggcauuu

SEQ ID NO: 2055970 - RNA, 17 nt, Human
uaaguugaauggccugc

SEQ ID NO: 2055971 - RNA, 14 nt, Human
uaaguucuuagaua

SEQ ID NO: 2055972 - RNA, 17 nt, Human
uaaguucuuagauaucu

SEQ ID NO: 2055973 - RNA, 19 nt, Human
uaaguucuuagauaucuuu

SEQ ID NO: 2055974 - RNA, 20 nt, Human
uaaguucuuagauaucuuuu

SEQ ID NO: 2055975 - RNA, 16 nt, Human
uaaguuggcuucuguu

SEQ ID NO: 2055976 - RNA, 20 nt, Human
uaaguuggcuucuguuucua

SEQ ID NO: 2055977 - RNA, 22 nt, Human
uaaguuggcuucuguuucuagu

SEQ ID NO: 2055978 - RNA, 13 nt, Human
uaaguacuaugua

SEQ ID NO: 2055979 - RNA, 16 nt, Human
uaaguacuauguauca

SEQ ID NO: 2055980 - RNA, 17 nt, Human
uaaguacuauguaucaa

SEQ ID NO: 2055981 - RNA, 19 nt, Human
uaaguacuauguaucaaug

SEQ ID NO: 2055982 - RNA, 20 nt, Human
uaaguauucuuauuuaauga

SEQ ID NO: 2055983 - RNA, 14 nt, Human
uaaguauucaagaa

SEQ ID NO: 2055984 - RNA, 16 nt, Human
uaaguauucaagaaag

SEQ ID NO: 2055985 - RNA, 19 nt, Human
uaaguauucuuauuuaaug

SEQ ID NO: 2055986 - RNA, 14 nt, Human
uaaguaaaugucug

SEQ ID NO: 2055987 - RNA, 16 nt, Human
uaaguaaaugucugug

SEQ ID NO: 2055988 - RNA, 12 nt, Human
uaaguaaacuaa

SEQ ID NO: 2055989 - RNA, 14 nt, Human
uaaguaaacuaaug

SEQ ID NO: 2055990 - RNA, 13 nt, Human
uaaguaaacugcc

SEQ ID NO: 2055991 - RNA, 16 nt, Human
uaagcuuaaaaaaaac

SEQ ID NO: 2055992 - RNA, 17 nt, Human
uaagcuuaaaaaaaacu

SEQ ID NO: 2055993 - RNA, 16 nt, Human
uaagcuuaugucagac

SEQ ID NO: 2055994 - RNA, 14 nt, Human
uaagcuuauuuaau

SEQ ID NO: 2055995 - RNA, 18 nt, Human
uaagcuuauuuaauuaaa

SEQ ID NO: 2055996 - RNA, 16 nt, Human
uaagcuuccaggaaaa

SEQ ID NO: 2055997 - RNA, 17 nt, Human
uaagcuuccaggaaaaa

SEQ ID NO: 2055998 - RNA, 20 nt, Human
uaagcuuccaggaaaaagga

SEQ ID NO: 2055999 - RNA, 22 nt, Human
uaagcuuccaggaaaaaggaca

SEQ ID NO: 2056000 - RNA, 22 nt, Human
uaagcuuccaggcugcauagaa

SEQ ID NO: 2056001 - RNA, 23 nt, Human
uaagcuuccaggcugcauagaag

SEQ ID NO: 2056002 - RNA, 17 nt, Human
uaaggaaaaaaagacaa

SEQ ID NO: 2056003 - RNA, 18 nt, Human
uaacauggugugcuucuu

SEQ ID NO: 2056004 - RNA, 12 nt, Human
uaacuagaacug

SEQ ID NO: 2056005 - RNA, 14 nt, Human
uaacuagaacugaa

SEQ ID NO: 2056006 - RNA, 16 nt, Human
uaacgaaguugggcaa

SEQ ID NO: 2056007 - RNA, 19 nt, Human
uaacgaaguugggcaauau

SEQ ID NO: 2056008 - RNA, 14 nt, Human
uaacgacuucaggg

SEQ ID NO: 2056009 - RNA, 23 nt, Human
uaacgacuucagggcagggcucu

SEQ ID NO: 2056010 - RNA, 17 nt, Human
uaacuagaacugaauuu

SEQ ID NO: 2056011 - RNA, 20 nt, Human
uaacuagaacugaauuuugu

SEQ ID NO: 2056012 - RNA, 18 nt, Human
uaacuagaauuuauucaa

SEQ ID NO: 2056013 - RNA, 17 nt, Human
uaacuagaauuuauuca

SEQ ID NO: 2056014 - RNA, 15 nt, Human
uaacuagaauuuauu

SEQ ID NO: 2056015 - RNA, 17 nt, Human
uaacuuccaauuuacau

SEQ ID NO: 2056016 - RNA, 16 nt, Human
uaacuuaauaguauuu

SEQ ID NO: 2056017 - RNA, 16 nt, Human
uaacuuaaaauauuuu

SEQ ID NO: 2056018 - RNA, 18 nt, Human
uaacuuaaaaaaaugaca

SEQ ID NO: 2056019 - RNA, 15 nt, Human
uaacuuuggguuaaa

SEQ ID NO: 2056020 - RNA, 19 nt, Human
uaagacagucccaucaaaa

SEQ ID NO: 2056021 - RNA, 20 nt, Human
uaagacauacuccuuccauc

SEQ ID NO: 2056022 - RNA, 16 nt, Human
uaacuuggagccccag

SEQ ID NO: 2056023 - RNA, 15 nt, Human
uaacuuuaucacauu

SEQ ID NO: 2056024 - RNA, 17 nt, Human
uaacuuuaucacauuau

SEQ ID NO: 2056025 - RNA, 21 nt, Human
uaacuuuaucacauuauuugc

SEQ ID NO: 2056026 - RNA, 19 nt, Human
uaacuuucauuaaagcauu

SEQ ID NO: 2056027 - RNA, 23 nt, Human
uaacuuucauuaaagcauuuacu

SEQ ID NO: 2056028 - RNA, 13 nt, Human
uaacuuucagaag

SEQ ID NO: 2056029 - RNA, 23 nt, Human
uaacuuucagaagagaugggcuu

SEQ ID NO: 2056030 - RNA, 22 nt, Human
uaacuugagaguagaugguuug

SEQ ID NO: 2056031 - RNA, 21 nt, Human
aauagugguucuuggaaaaau

SEQ ID NO: 2056032 - RNA, 16 nt, Human
uaacagugugguaguu

SEQ ID NO: 2056033 - RNA, 14 nt, Human
uaacagugccauug

SEQ ID NO: 2056034 - RNA, 17 nt, Human
uaacagugccauugucu

SEQ ID NO: 2056035 - RNA, 18 nt, Human
uaacagugccauugucuu

SEQ ID NO: 2056036 - RNA, 19 nt, Human
uaacagugccauugucuuu

SEQ ID NO: 2056037 - RNA, 20 nt, Human
uaacagugccauugucuuua

SEQ ID NO: 2056038 - RNA, 21 nt, Human
uaacagugccauugucuuuau

SEQ ID NO: 2056039 - RNA, 22 nt, Human
uaacagugccauugucuuuaua

SEQ ID NO: 2056040 - RNA, 23 nt, Human
uaacagugccauugucuuuauau

SEQ ID NO: 2056041 - RNA, 21 nt, Human
aauaucaguuacucagcccug

SEQ ID NO: 2056042 - RNA, 19 nt, Human
uaacagucuuacugcaggc

SEQ ID NO: 2056043 - RNA, 19 nt, Human
aauaucaguuacucagccc

SEQ ID NO: 2056044 - RNA, 22 nt, Human
aauaucaguuacucagcccugg

SEQ ID NO: 2056045 - RNA, 21 nt, Human
uaacaguucacuugcagugga

SEQ ID NO: 2056046 - RNA, 13 nt, Human
uaacaguuuucca

SEQ ID NO: 2056047 - RNA, 14 nt, Human
uaacaguuuuccau

SEQ ID NO: 2056048 - RNA, 15 nt, Human
uaacaguuuuccaug

SEQ ID NO: 2056049 - RNA, 16 nt, Human
uaacaguuuuccauga

SEQ ID NO: 2056050 - RNA, 17 nt, Human
uaacaguuuuccaugaa

SEQ ID NO: 2056051 - RNA, 19 nt, Human
uaacaguuuuccaugaaaa

SEQ ID NO: 2056052 - RNA, 21 nt, Human
uaacaguuuuccaugaaaacg

SEQ ID NO: 2056053 - RNA, 15 nt, Human
aauaucagacuagug

SEQ ID NO: 2056054 - RNA, 20 nt, Human
uaacaguuuuccaugaaaac

SEQ ID NO: 2056055 - RNA, 13 nt, Human
uaacauauaauau

SEQ ID NO: 2056056 - RNA, 20 nt, Human
uaacauauaauauauguuuu

SEQ ID NO: 2056057 - RNA, 23 nt, Human
uaacauccaauaggaaugcuaac

SEQ ID NO: 2056058 - RNA, 24 nt, Human
uaacauccaauaggaaugcuaaca

SEQ ID NO: 2056059 - RNA, 23 nt, Human
uaacauggacaugaucuucuuua

SEQ ID NO: 2056060 - RNA, 17 nt, Human
uaacauguaauuaagua

SEQ ID NO: 2056061 - RNA, 18 nt, Human
uaacauggacaugaucuu

SEQ ID NO: 2056062 - RNA, 16 nt, Human
uaacaucuucuuuccu

SEQ ID NO: 2056063 - RNA, 13 nt, Human
aauaguuggcuag

SEQ ID NO: 2056064 - RNA, 14 nt, Human
aauaguguguucug

SEQ ID NO: 2056065 - RNA, 15 nt, Human
aauaguguguucuga

SEQ ID NO: 2056066 - RNA, 17 nt, Human
aauaguguguucugauu

SEQ ID NO: 2056067 - RNA, 13 nt, Human
aauaguguguucu

SEQ ID NO: 2056068 - RNA, 14 nt, Human
aauaguuguugauu

SEQ ID NO: 2056069 - RNA, 23 nt, Human
uaaaauuuauugcuugauacuuu

SEQ ID NO: 2056070 - RNA, 12 nt, Human
aauauuccagag

SEQ ID NO: 2056071 - RNA, 20 nt, Human
aauauuccccuaucucuaga

SEQ ID NO: 2056072 - RNA, 12 nt, Human
aauauuccugaa

SEQ ID NO: 2056073 - RNA, 15 nt, Human
aauauuccugcauuu

SEQ ID NO: 2056074 - RNA, 15 nt, Human
aauauuccugaauga

SEQ ID NO: 2056075 - RNA, 20 nt, Human
aauaugcaucuaauaaaaaa

SEQ ID NO: 2056076 - RNA, 18 nt, Human
uaagagaagcuacuuugu

SEQ ID NO: 2056077 - RNA, 17 nt, Human
uaagagaaaauguaaau

SEQ ID NO: 2056078 - RNA, 14 nt, Human
uaagagaauguuau

SEQ ID NO: 2056079 - RNA, 23 nt, Human
uaagagaauguuauagugaauua

SEQ ID NO: 2056080 - RNA, 14 nt, Human
aauauuguacaguu

SEQ ID NO: 2056081 - RNA, 20 nt, Human
aauauugagaaagaaacuaa

SEQ ID NO: 2056082 - RNA, 16 nt, Human
aauauugagaaagaaa

SEQ ID NO: 2056083 - RNA, 19 nt, Human
aauauugagaaagaaacua

SEQ ID NO: 2056084 - RNA, 14 nt, Human
aauauucuuucaau

SEQ ID NO: 2056085 - RNA, 19 nt, Human
aauauucuuucaauaacga

SEQ ID NO: 2056086 - RNA, 15 nt, Human
aauauuguacaguuu

SEQ ID NO: 2056087 - RNA, 17 nt, Human
aauauuguacaguuuuu

SEQ ID NO: 2056088 - RNA, 23 nt, Human
aauauuguacaguuuuuauugcu

SEQ ID NO: 2056089 - RNA, 23 nt, Human
aauauugugaagaaaaauaaagu

SEQ ID NO: 2056090 - RNA, 17 nt, Human
aauauuuaagauaguuu

SEQ ID NO: 2056091 - RNA, 16 nt, Human
aauauuuaaggagaug

SEQ ID NO: 2056092 - RNA, 17 nt, Human
aauauuuaaggagaugu

SEQ ID NO: 2056093 - RNA, 22 nt, Human
aauauuuaaggagauguaagag

SEQ ID NO: 2056094 - RNA, 15 nt, Human
aauauuuacauauga

SEQ ID NO: 2056095 - RNA, 15 nt, Human
uaagauggauucuca

SEQ ID NO: 2056096 - RNA, 17 nt, Human
uaagauggauucucaga

SEQ ID NO: 2056097 - RNA, 18 nt, Human
uaagauggauucucagau

SEQ ID NO: 2056098 - RNA, 20 nt, Human
uaagauggauucucagauau

SEQ ID NO: 2056099 - RNA, 22 nt, Human
uaagauggauucucagauauuu

SEQ ID NO: 2056100 - RNA, 21 nt, Human
uaagauuccagagaguggcuc

SEQ ID NO: 2056101 - RNA, 14 nt, Human
uaagauuccuuuuc

SEQ ID NO: 2056102 - RNA, 16 nt, Human
uaagauuccuuuucuu

SEQ ID NO: 2056103 - RNA, 14 nt, Human
uaagauuccagaga

SEQ ID NO: 2056104 - RNA, 11 nt, Human
aauauuuauaa

SEQ ID NO: 2056105 - RNA, 16 nt, Human
uaagaugugucuucaa

SEQ ID NO: 2056106 - RNA, 21 nt, Human
uaagauggauucucagauauu

SEQ ID NO: 2056107 - RNA, 19 nt, Human
aauauuugucgauauuucc

SEQ ID NO: 2056108 - RNA, 20 nt, Human
aauauuugucgauauuucca

SEQ ID NO: 2056109 - RNA, 22 nt, Human
aauauuugucgauauuuccauc

SEQ ID NO: 2056110 - RNA, 12 nt, Human
aauauuugcuga

SEQ ID NO: 2056111 - RNA, 13 nt, Human
uaagcaagagaga

SEQ ID NO: 2056112 - RNA, 18 nt, Human
uaagcaagagagauguuu

SEQ ID NO: 2056113 - RNA, 22 nt, Human
uaagcuguuacugucuucagua

SEQ ID NO: 2056114 - RNA, 16 nt, Human
uaagcuguuuccauag

SEQ ID NO: 2056115 - RNA, 11 nt, Human
uaagcuguuuc

SEQ ID NO: 2056116 - RNA, 12 nt, Human
uaagcugcuuuu

SEQ ID NO: 2056117 - RNA, 16 nt, Human
uaagauuuauuuuguu

SEQ ID NO: 2056118 - RNA, 23 nt, Human
uaagcaacaucuagcaaauguua

SEQ ID NO: 2056119 - RNA, 23 nt, Human
uaagcaaagggagcacuggguug

SEQ ID NO: 2056120 - RNA, 14 nt, Human
uaagauuuaauuug

SEQ ID NO: 2056121 - RNA, 17 nt, Human
uaagauuuaauuugcca

SEQ ID NO: 2056122 - RNA, 18 nt, Human
uaagauuuaauuugccaa

SEQ ID NO: 2056123 - RNA, 21 nt, Human
uaagauuuaauuugccaaaau

SEQ ID NO: 2056124 - RNA, 12 nt, Human
uaagauuuaccc

SEQ ID NO: 2056125 - RNA, 13 nt, Human
uaagauuuaccca

SEQ ID NO: 2056126 - RNA, 22 nt, Human
uaagauuuacccagaaugucag

SEQ ID NO: 2056127 - RNA, 19 nt, Human
uaagauuuagagaugaauu

SEQ ID NO: 2056128 - RNA, 13 nt, Human
uaagauuuugaaa

SEQ ID NO: 2056129 - RNA, 17 nt, Human
uaagauuuugaaaacua

SEQ ID NO: 2056130 - RNA, 22 nt, Human
uaagauuuugaaaacuacauuu

SEQ ID NO: 2056131 - RNA, 21 nt, Human
ucaccauguuggccaggcugg

SEQ ID NO: 2056132 - RNA, 15 nt, Human
ucacccacagggcua

SEQ ID NO: 2056133 - RNA, 22 nt, Human
ucacccacagggcuaagagcua

SEQ ID NO: 2056134 - RNA, 15 nt, Human
ucacccacagaaaga

SEQ ID NO: 2056135 - RNA, 16 nt, Human
ucacccacagaaagag

SEQ ID NO: 2056136 - RNA, 17 nt, Human
ucacccacagaaagaga

SEQ ID NO: 2056137 - RNA, 11 nt, Human
ucacccacagg

SEQ ID NO: 2056138 - RNA, 12 nt, Human
ucacccacaggg

SEQ ID NO: 2056139 - RNA, 14 nt, Human
ucacccacagggcu

SEQ ID NO: 2056140 - RNA, 16 nt, Human
ucacccagacagcucc

SEQ ID NO: 2056141 - RNA, 17 nt, Human
ucacccagacagcuccc

SEQ ID NO: 2056142 - RNA, 19 nt, Human
ucaccccaucccacacccu

SEQ ID NO: 2056143 - RNA, 19 nt, Human
ucacccccaaggggcaguc

SEQ ID NO: 2056144 - RNA, 13 nt, Human
ucacccccaaggg

SEQ ID NO: 2056145 - RNA, 15 nt, Human
ucaccauguuggcca

SEQ ID NO: 2056146 - RNA, 16 nt, Human
ucaccauguaaaacaa

SEQ ID NO: 2056147 - RNA, 17 nt, Human
ucaccauguaaaacaaa

SEQ ID NO: 2056148 - RNA, 19 nt, Human
ucaccauguaaaacaaaaa

SEQ ID NO: 2056149 - RNA, 20 nt, Human
ucaccauguaaaacaaaaaa

SEQ ID NO: 2056150 - RNA, 21 nt, Human
ucaccauguaaaacaaaaaac

SEQ ID NO: 2056151 - RNA, 23 nt, Human
ucaccauguaaaacaaaaaacaa

SEQ ID NO: 2056152 - RNA, 14 nt, Human
ucacauagugaaag

SEQ ID NO: 2056153 - RNA, 16 nt, Human
ucacauagugaaaguu

SEQ ID NO: 2056154 - RNA, 17 nt, Human
ucaccaucucaggccac

SEQ ID NO: 2056155 - RNA, 21 nt, Human
ucaccaucucaggccaccugc

SEQ ID NO: 2056156 - RNA, 23 nt, Human
ucaccaucucaggccaccugccc

SEQ ID NO: 2056157 - RNA, 16 nt, Human
ucacauagaugucccu

SEQ ID NO: 2056158 - RNA, 17 nt, Human
ucacauagaugucccuu

SEQ ID NO: 2056159 - RNA, 18 nt, Human
ucacauacaauuauuuuu

SEQ ID NO: 2056160 - RNA, 17 nt, Human
ucacauagagugaucuu

SEQ ID NO: 2056161 - RNA, 15 nt, Human
ucacauagauguccc

SEQ ID NO: 2056162 - RNA, 18 nt, Human
ucacauaaaauagauuuu

SEQ ID NO: 2056163 - RNA, 15 nt, Human
ucacauaacagaaug

SEQ ID NO: 2056164 - RNA, 16 nt, Human
ucacauaacagaaugc

SEQ ID NO: 2056165 - RNA, 14 nt, Human
accacagcccuguc

SEQ ID NO: 2056166 - RNA, 15 nt, Human
accacagcccuguca

SEQ ID NO: 2056167 - RNA, 16 nt, Human
accacagcccugucag

SEQ ID NO: 2056168 - RNA, 17 nt, Human
accacagcccugucagu

SEQ ID NO: 2056169 - RNA, 13 nt, Human
accacagcccugu

SEQ ID NO: 2056170 - RNA, 19 nt, Human
accacaucuugcucugcug

SEQ ID NO: 2056171 - RNA, 18 nt, Human
accacaucuugcucugcu

SEQ ID NO: 2056172 - RNA, 22 nt, Human
accacaggguucaaaaugucug

SEQ ID NO: 2056173 - RNA, 23 nt, Human
accacaggguucaaaaugucugu

SEQ ID NO: 2056174 - RNA, 17 nt, Human
accacaggguucaaaau

SEQ ID NO: 2056175 - RNA, 17 nt, Human
accacaucuugcucugc

SEQ ID NO: 2056176 - RNA, 22 nt, Human
accacagguucaugccaccaug

SEQ ID NO: 2056177 - RNA, 18 nt, Human
accacaugugcacaugca

SEQ ID NO: 2056178 - RNA, 20 nt, Human
accaccacacccagcccacu

SEQ ID NO: 2056179 - RNA, 15 nt, Human
accaccacacccagc

SEQ ID NO: 2056180 - RNA, 14 nt, Human
accaaagccaccag

SEQ ID NO: 2056181 - RNA, 11 nt, Human
accaaagcuga

SEQ ID NO: 2056182 - RNA, 21 nt, Human
accaaagcugacgaggcuggg

SEQ ID NO: 2056183 - RNA, 23 nt, Human
accaaagcugacgaggcugggcc

SEQ ID NO: 2056184 - RNA, 22 nt, Human
ucacaaaauuuuauuccuauau

SEQ ID NO: 2056185 - RNA, 14 nt, Human
ucacaaaauuuuau

SEQ ID NO: 2056186 - RNA, 20 nt, Human
ucaauuuauucaagaaaagu

SEQ ID NO: 2056187 - RNA, 16 nt, Human
ucaauuuauugcacaa

SEQ ID NO: 2056188 - RNA, 17 nt, Human
ucaauuuauugcacaaa

SEQ ID NO: 2056189 - RNA, 23 nt, Human
ucaauuuauugcacaaaauauaa

SEQ ID NO: 2056190 - RNA, 13 nt, Human
ucaauuuccaaga

SEQ ID NO: 2056191 - RNA, 18 nt, Human
ucaauuuccaagagcuga

SEQ ID NO: 2056192 - RNA, 20 nt, Human
ucaauuuccaagagcugagg

SEQ ID NO: 2056193 - RNA, 16 nt, Human
ucaauuuguauaaaau

SEQ ID NO: 2056194 - RNA, 13 nt, Human
ucaauuugucauu

SEQ ID NO: 2056195 - RNA, 14 nt, Human
ucaauuugucauuu

SEQ ID NO: 2056196 - RNA, 15 nt, Human
ucaauuugucauuuu

SEQ ID NO: 2056197 - RNA, 17 nt, Human
ucaauuugucauuuuga

SEQ ID NO: 2056198 - RNA, 18 nt, Human
ucaauuugucauuuugaa

SEQ ID NO: 2056199 - RNA, 20 nt, Human
ucaauuugucauuuugaagc

SEQ ID NO: 2056200 - RNA, 21 nt, Human
ucaauuuguucagucuuucau

SEQ ID NO: 2056201 - RNA, 14 nt, Human
ucacaaccuucugu

SEQ ID NO: 2056202 - RNA, 13 nt, Human
ucacaacccaucu

SEQ ID NO: 2056203 - RNA, 12 nt, Human
ucacaaaggaau

SEQ ID NO: 2056204 - RNA, 21 nt, Human
ucacaaaggaauggaggcucu

SEQ ID NO: 2056205 - RNA, 18 nt, Human
ucacacugcaagagccuu

SEQ ID NO: 2056206 - RNA, 21 nt, Human
ucacacugcaagagccuuggu

SEQ ID NO: 2056207 - RNA, 18 nt, Human
ucacacuuccaccagccu

SEQ ID NO: 2056208 - RNA, 19 nt, Human
ucacacuuccaccagccug

SEQ ID NO: 2056209 - RNA, 16 nt, Human
ucacacuucugugaga

SEQ ID NO: 2056210 - RNA, 20 nt, Human
ucacacugcaagagccuugg

SEQ ID NO: 2056211 - RNA, 21 nt, Human
ucacagaugugugauucacag

SEQ ID NO: 2056212 - RNA, 22 nt, Human
ucacacuucugugagaccccca

SEQ ID NO: 2056213 - RNA, 23 nt, Human
ucacacuucugugagacccccac

SEQ ID NO: 2056214 - RNA, 23 nt, Human
ucacagaugugugauucacagug

SEQ ID NO: 2056215 - RNA, 20 nt, Human
ucacacuuccaccagccugc

SEQ ID NO: 2056216 - RNA, 16 nt, Human
ucacagcacacucagc

SEQ ID NO: 2056217 - RNA, 13 nt, Human
ucacagccucuga

SEQ ID NO: 2056218 - RNA, 19 nt, Human
ucacguaaagcuagaaaug

SEQ ID NO: 2056219 - RNA, 20 nt, Human
ucacguaaagcuagaaauga

SEQ ID NO: 2056220 - RNA, 13 nt, Human
ucacgucacacuu

SEQ ID NO: 2056221 - RNA, 12 nt, Human
ucacguguguga

SEQ ID NO: 2056222 - RNA, 16 nt, Human
ucacgugugugacuca

SEQ ID NO: 2056223 - RNA, 17 nt, Human
ucacgugugugacucag

SEQ ID NO: 2056224 - RNA, 23 nt, Human
accaccacuuaugccccuagaag

SEQ ID NO: 2056225 - RNA, 12 nt, Human
ucacuaacauua

SEQ ID NO: 2056226 - RNA, 14 nt, Human
ucacuaacauuaua

SEQ ID NO: 2056227 - RNA, 15 nt, Human
ucacuaacauuauau

SEQ ID NO: 2056228 - RNA, 16 nt, Human
ucacuaacauuauauu

SEQ ID NO: 2056229 - RNA, 19 nt, Human
ucacuaacauuauauugca

SEQ ID NO: 2056230 - RNA, 21 nt, Human
ucacuaacauuauauugcaau

SEQ ID NO: 2056231 - RNA, 22 nt, Human
ucacuaacauuauauugcaaug

SEQ ID NO: 2056232 - RNA, 18 nt, Human
ucacguaaagcuagaaau

SEQ ID NO: 2056233 - RNA, 19 nt, Human
ucaccuggggugugggagg

SEQ ID NO: 2056234 - RNA, 13 nt, Human
ucaccuguaaaac

SEQ ID NO: 2056235 - RNA, 14 nt, Human
ucaccuguaaaacu

SEQ ID NO: 2056236 - RNA, 16 nt, Human
ucaccuguaaaacuuu

SEQ ID NO: 2056237 - RNA, 17 nt, Human
ucaccuguaaaacuuua

SEQ ID NO: 2056238 - RNA, 18 nt, Human
ucaccuguaaaacuuuau

SEQ ID NO: 2056239 - RNA, 19 nt, Human
ucaccuguaaaacuuuauu

SEQ ID NO: 2056240 - RNA, 14 nt, Human
accaggacucccuc

SEQ ID NO: 2056241 - RNA, 15 nt, Human
accaggacucccucc

SEQ ID NO: 2056242 - RNA, 16 nt, Human
accaggacucccuccu

SEQ ID NO: 2056243 - RNA, 20 nt, Human
ucaccugggcaccuggggag

SEQ ID NO: 2056244 - RNA, 22 nt, Human
accagcgugugacuacuccccc

SEQ ID NO: 2056245 - RNA, 15 nt, Human
accacuaugaagcua

SEQ ID NO: 2056246 - RNA, 17 nt, Human
accacuaggacucugag

SEQ ID NO: 2056247 - RNA, 13 nt, Human
accacuagaacuc

SEQ ID NO: 2056248 - RNA, 20 nt, Human
accacuagaacucuccaucu

SEQ ID NO: 2056249 - RNA, 16 nt, Human
accagcuuagauuuua

SEQ ID NO: 2056250 - RNA, 20 nt, Human
accaggaauguuaaagucag

SEQ ID NO: 2056251 - RNA, 17 nt, Human
accaggacaggaccaga

SEQ ID NO: 2056252 - RNA, 14 nt, Human
accaggacaggacc

SEQ ID NO: 2056253 - RNA, 15 nt, Human
accaggacaggacca

SEQ ID NO: 2056254 - RNA, 14 nt, Human
ucacugcagccucg

SEQ ID NO: 2056255 - RNA, 15 nt, Human
ucacugcagccucga

SEQ ID NO: 2056256 - RNA, 15 nt, Human
ucacugcagccucaa

SEQ ID NO: 2056257 - RNA, 23 nt, Human
ucacuguugcccaggcuggcgug

SEQ ID NO: 2056258 - RNA, 14 nt, Human
ucacugcagccuca

SEQ ID NO: 2056259 - RNA, 13 nt, Human
ucacuauaaaugg

SEQ ID NO: 2056260 - RNA, 22 nt, Human
ucacuacccaucgguguccauu

SEQ ID NO: 2056261 - RNA, 17 nt, Human
ucacuauaaaugguguu

SEQ ID NO: 2056262 - RNA, 13 nt, Human
ucacuaugcauuu

SEQ ID NO: 2056263 - RNA, 15 nt, Human
ucacuaugcauuuua

SEQ ID NO: 2056264 - RNA, 13 nt, Human
accagucugaagu

SEQ ID NO: 2056265 - RNA, 14 nt, Human
accagucugaaguu

SEQ ID NO: 2056266 - RNA, 19 nt, Human
accagucugaaguuucauu

SEQ ID NO: 2056267 - RNA, 21 nt, Human
accagucugaaguuucauuua

SEQ ID NO: 2056268 - RNA, 23 nt, Human
accagucugaaguuucauuuaug

SEQ ID NO: 2056269 - RNA, 18 nt, Human
accaguauacaagauaag

SEQ ID NO: 2056270 - RNA, 19 nt, Human
accagucaucagcuauuca

SEQ ID NO: 2056271 - RNA, 10 nt, Human
ucacuugagu

SEQ ID NO: 2056272 - RNA, 22 nt, Human
ucacuugaggucaggaguuccu

SEQ ID NO: 2056273 - RNA, 14 nt, Human
ucacuguuucucug

SEQ ID NO: 2056274 - RNA, 17 nt, Human
ucacuguuucucugcug

SEQ ID NO: 2056275 - RNA, 14 nt, Human
ucacuugagcccag

SEQ ID NO: 2056276 - RNA, 18 nt, Human
ucacuguuucucugcugu

SEQ ID NO: 2056277 - RNA, 13 nt, Human
ucacuugaaugug

SEQ ID NO: 2056278 - RNA, 11 nt, Human
acauuuuguau

SEQ ID NO: 2056279 - RNA, 17 nt, Human
accaaaauuauuucaga

SEQ ID NO: 2056280 - RNA, 12 nt, Human
accaaaaugaca

SEQ ID NO: 2056281 - RNA, 16 nt, Human
accaaaaugacaauga

SEQ ID NO: 2056282 - RNA, 16 nt, Human
accaaaauuauuucag

SEQ ID NO: 2056283 - RNA, 15 nt, Human
accaaaagaacaaga

SEQ ID NO: 2056284 - RNA, 15 nt, Human
acauugcaauagaaa

SEQ ID NO: 2056285 - RNA, 16 nt, Human
acauugcaauagaaau

SEQ ID NO: 2056286 - RNA, 14 nt, Human
acauugcaauagaa

SEQ ID NO: 2056287 - RNA, 16 nt, Human
acauugaccaagaacu

SEQ ID NO: 2056288 - RNA, 17 nt, Human
acauugaccaagaacug

SEQ ID NO: 2056289 - RNA, 18 nt, Human
acauugaccaagaacugc

SEQ ID NO: 2056290 - RNA, 19 nt, Human
acauugaccaagaacugca

SEQ ID NO: 2056291 - RNA, 20 nt, Human
acauugaccaagaacugcau

SEQ ID NO: 2056292 - RNA, 12 nt, Human
acauugucugcg

SEQ ID NO: 2056293 - RNA, 12 nt, Human
acauugucaaua

SEQ ID NO: 2056294 - RNA, 13 nt, Human
acauugucaauaa

SEQ ID NO: 2056295 - RNA, 14 nt, Human
acauugucaauaaa

SEQ ID NO: 2056296 - RNA, 20 nt, Human
acauuuucacacaauacaau

SEQ ID NO: 2056297 - RNA, 15 nt, Human
acauuuucacacaau

SEQ ID NO: 2056298 - RNA, 13 nt, Human
acauuuucacaca

SEQ ID NO: 2056299 - RNA, 16 nt, Human
acauugcagucugcuu

SEQ ID NO: 2056300 - RNA, 22 nt, Human
ucaaguccucuuuucugagagg

SEQ ID NO: 2056301 - RNA, 22 nt, Human
ucaaguccuuaccucuuccgga

SEQ ID NO: 2056302 - RNA, 20 nt, Human
ucaaguccugccucuuaaau

SEQ ID NO: 2056303 - RNA, 18 nt, Human
ucaaguccuuaccucuuc

SEQ ID NO: 2056304 - RNA, 19 nt, Human
ucaaguccugccucuuaaa

SEQ ID NO: 2056305 - RNA, 14 nt, Human
ucaagucucugcug

SEQ ID NO: 2056306 - RNA, 16 nt, Human
ucaagucucugcuggc

SEQ ID NO: 2056307 - RNA, 17 nt, Human
ucaagucucugcuggcc

SEQ ID NO: 2056308 - RNA, 19 nt, Human
ucaagucucugcuggccca

SEQ ID NO: 2056309 - RNA, 22 nt, Human
ucaacugucuccuaccucugcu

SEQ ID NO: 2056310 - RNA, 20 nt, Human
ucaacuugagcauguuacug

SEQ ID NO: 2056311 - RNA, 16 nt, Human
ucaacuugagcauguu

SEQ ID NO: 2056312 - RNA, 14 nt, Human
ucaacuuuaugcag

SEQ ID NO: 2056313 - RNA, 17 nt, Human
ucaauauuccugaauga

SEQ ID NO: 2056314 - RNA, 18 nt, Human
ucaauauuccugaaugaa

SEQ ID NO: 2056315 - RNA, 21 nt, Human
ucaauauuccugaaugaaaua

SEQ ID NO: 2056316 - RNA, 22 nt, Human
ucaauauuccugaaugaaauau

SEQ ID NO: 2056317 - RNA, 14 nt, Human
ucaauauuccugaa

SEQ ID NO: 2056318 - RNA, 12 nt, Human
ucaagucuuccc

SEQ ID NO: 2056319 - RNA, 17 nt, Human
ucaagucugugccugga

SEQ ID NO: 2056320 - RNA, 20 nt, Human
ucaagucugugccuggagcu

SEQ ID NO: 2056321 - RNA, 21 nt, Human
ucaagucugugccuggagcuc

SEQ ID NO: 2056322 - RNA, 12 nt, Human
acauugaaagag

SEQ ID NO: 2056323 - RNA, 15 nt, Human
acauugaaguaauga

SEQ ID NO: 2056324 - RNA, 18 nt, Human
acauugaaguaaugaauu

SEQ ID NO: 2056325 - RNA, 19 nt, Human
acauugaaguaaugaauuu

SEQ ID NO: 2056326 - RNA, 20 nt, Human
acauugaaguaaugaauuuu

SEQ ID NO: 2056327 - RNA, 20 nt, Human
ucaauccugugugguuuagu

SEQ ID NO: 2056328 - RNA, 21 nt, Human
ucaaucugaagauacaugucu

SEQ ID NO: 2056329 - RNA, 13 nt, Human
ucaauauuuauua

SEQ ID NO: 2056330 - RNA, 12 nt, Human
ucaauauuuauu

SEQ ID NO: 2056331 - RNA, 20 nt, Human
ucaauauuuauuauuuucac

SEQ ID NO: 2056332 - RNA, 11 nt, Human
ucaauauuuau

SEQ ID NO: 2056333 - RNA, 10 nt, Human
ucaauauuua

SEQ ID NO: 2056334 - RNA, 13 nt, Human
acaugaauaugau

SEQ ID NO: 2056335 - RNA, 15 nt, Human
acaugaaugcacacu

SEQ ID NO: 2056336 - RNA, 19 nt, Human
acaugaaguguguuuccuu

SEQ ID NO: 2056337 - RNA, 21 nt, Human
acaugaaguguguuuccuuca

SEQ ID NO: 2056338 - RNA, 17 nt, Human
acagucauuugcgcaca

SEQ ID NO: 2056339 - RNA, 21 nt, Human
acagucauuugcgcacaacuu

SEQ ID NO: 2056340 - RNA, 15 nt, Human
acauguaauuaagua

SEQ ID NO: 2056341 - RNA, 21 nt, Human
acauggugaaaccucaucucu

SEQ ID NO: 2056342 - RNA, 16 nt, Human
acauggguagcuucug

SEQ ID NO: 2056343 - RNA, 21 nt, Human
acaugguaaacgcugucccua

SEQ ID NO: 2056344 - RNA, 13 nt, Human
acaugggaguuua

SEQ ID NO: 2056345 - RNA, 16 nt, Human
acauggggaggaagga

SEQ ID NO: 2056346 - RNA, 20 nt, Human
acauggggaguguuucaugg

SEQ ID NO: 2056347 - RNA, 17 nt, Human
acaugggguuggcuggg

SEQ ID NO: 2056348 - RNA, 20 nt, Human
acaugggguuggcugggccc

SEQ ID NO: 2056349 - RNA, 21 nt, Human
acaugggguuggcugggccca

SEQ ID NO: 2056350 - RNA, 16 nt, Human
acaugggguuuucaau

SEQ ID NO: 2056351 - RNA, 18 nt, Human
acaugggguuuucaauuu

SEQ ID NO: 2056352 - RNA, 22 nt, Human
acaugggguuuucaauuuugca

SEQ ID NO: 2056353 - RNA, 17 nt, Human
acauguaauuaaguacu

SEQ ID NO: 2056354 - RNA, 19 nt, Human
acauguaauuaaguacuau

SEQ ID NO: 2056355 - RNA, 21 nt, Human
acauguaauuaaguacuaugu

SEQ ID NO: 2056356 - RNA, 22 nt, Human
acauguaauuaaguacuaugua

SEQ ID NO: 2056357 - RNA, 22 nt, Human
acaugggaaacuuccaagaccu

SEQ ID NO: 2056358 - RNA, 20 nt, Human
acauggcuugccacagcucu

SEQ ID NO: 2056359 - RNA, 17 nt, Human
acauggaacucauuccu

SEQ ID NO: 2056360 - RNA, 14 nt, Human
acauggaagggaag

SEQ ID NO: 2056361 - RNA, 20 nt, Human
acaugcuucaugaaaauccu

SEQ ID NO: 2056362 - RNA, 21 nt, Human
acaugcuucaugaaaauccua

SEQ ID NO: 2056363 - RNA, 23 nt, Human
acaugcuucaugaaaauccuacc

SEQ ID NO: 2056364 - RNA, 14 nt, Human
acauggcuuaguuu

SEQ ID NO: 2056365 - RNA, 19 nt, Human
acauggcuuaguuuucaua

SEQ ID NO: 2056366 - RNA, 12 nt, Human
ucaaauuucaca

SEQ ID NO: 2056367 - RNA, 15 nt, Human
ucaaccaauguagaa

SEQ ID NO: 2056368 - RNA, 14 nt, Human
ucaacaacuacuac

SEQ ID NO: 2056369 - RNA, 20 nt, Human
ucaaccccaccacuucuuuu

SEQ ID NO: 2056370 - RNA, 18 nt, Human
ucaacccccauuucuauu

SEQ ID NO: 2056371 - RNA, 18 nt, Human
ucaaccauuccccauggg

SEQ ID NO: 2056372 - RNA, 14 nt, Human
ucaacccagaaaca

SEQ ID NO: 2056373 - RNA, 15 nt, Human
ucaacccagaaacac

SEQ ID NO: 2056374 - RNA, 15 nt, Human
ucaaccauuccccau

SEQ ID NO: 2056375 - RNA, 23 nt, Human
ucaaccacuguaaaaugaaauua

SEQ ID NO: 2056376 - RNA, 14 nt, Human
ucaaccagcagaug

SEQ ID NO: 2056377 - RNA, 13 nt, Human
ucaaauuuaaagg

SEQ ID NO: 2056378 - RNA, 20 nt, Human
acauucugacaucuuaguau

SEQ ID NO: 2056379 - RNA, 14 nt, Human
acauucgaucucau

SEQ ID NO: 2056380 - RNA, 16 nt, Human
acauucgaucucauuc

SEQ ID NO: 2056381 - RNA, 19 nt, Human
acauucgaucucauucagu

SEQ ID NO: 2056382 - RNA, 21 nt, Human
acauucgaucucauucaguau

SEQ ID NO: 2056383 - RNA, 23 nt, Human
acauucgaucucauucaguauua

SEQ ID NO: 2056384 - RNA, 23 nt, Human
acauguaauuaaguacuauguau

SEQ ID NO: 2056385 - RNA, 23 nt, Human
acauuccgacaaccgaugcucca

SEQ ID NO: 2056386 - RNA, 16 nt, Human
acauuccguuuacauu

SEQ ID NO: 2056387 - RNA, 23 nt, Human
acauuccguuuacauuuuagaca

SEQ ID NO: 2056388 - RNA, 12 nt, Human
acccuucuuuuc

SEQ ID NO: 2056389 - RNA, 13 nt, Human
acccuucuuucca

SEQ ID NO: 2056390 - RNA, 20 nt, Human
acccuucuuuccauuucucu

SEQ ID NO: 2056391 - RNA, 13 nt, Human
acccuucugugcc

SEQ ID NO: 2056392 - RNA, 14 nt, Human
acccuucugugccc

SEQ ID NO: 2056393 - RNA, 16 nt, Human
acccuucugugcccag

SEQ ID NO: 2056394 - RNA, 17 nt, Human
acccuucugugcccagc

SEQ ID NO: 2056395 - RNA, 18 nt, Human
acccuucugugcccagcu

SEQ ID NO: 2056396 - RNA, 21 nt, Human
acccuucugugcccagcucag

SEQ ID NO: 2056397 - RNA, 23 nt, Human
acccuuuccuuccuucccuggcu

SEQ ID NO: 2056398 - RNA, 21 nt, Human
acccuuuccuuccuucccugg

SEQ ID NO: 2056399 - RNA, 22 nt, Human
acccuuuccuuccuucccuggc

SEQ ID NO: 2056400 - RNA, 15 nt, Human
acccuuuccuuccuu

SEQ ID NO: 2056401 - RNA, 17 nt, Human
acccuuuccuuccuucc

SEQ ID NO: 2056402 - RNA, 18 nt, Human
acccuuuccuuccuuccc

SEQ ID NO: 2056403 - RNA, 19 nt, Human
acccuuuccuuccuucccu

SEQ ID NO: 2056404 - RNA, 14 nt, Human
acccuuuccuuccu

SEQ ID NO: 2056405 - RNA, 13 nt, Human
acccuugaaaaga

SEQ ID NO: 2056406 - RNA, 21 nt, Human
acccuuuuggguuucugcccu

SEQ ID NO: 2056407 - RNA, 19 nt, Human
acccuuuuggguuucugcc

SEQ ID NO: 2056408 - RNA, 16 nt, Human
acccuugaaaagacau

SEQ ID NO: 2056409 - RNA, 21 nt, Human
acccgggaggcggagcuugca

SEQ ID NO: 2056410 - RNA, 12 nt, Human
acccucgcuggc

SEQ ID NO: 2056411 - RNA, 14 nt, Human
acccucgcuggccc

SEQ ID NO: 2056412 - RNA, 15 nt, Human
acccucgcuggcccc

SEQ ID NO: 2056413 - RNA, 16 nt, Human
acccucgcuggccccc

SEQ ID NO: 2056414 - RNA, 17 nt, Human
acccucgcuggccccca

SEQ ID NO: 2056415 - RNA, 20 nt, Human
acccucgcuggcccccacug

SEQ ID NO: 2056416 - RNA, 22 nt, Human
acccucgcuggcccccacuggc

SEQ ID NO: 2056417 - RNA, 20 nt, Human
acccucguggccuuccccag

SEQ ID NO: 2056418 - RNA, 14 nt, Human
acccucguggccuu

SEQ ID NO: 2056419 - RNA, 16 nt, Human
acccugaaagcccuga

SEQ ID NO: 2056420 - RNA, 18 nt, Human
acccugaaagcccugagc

SEQ ID NO: 2056421 - RNA, 14 nt, Human
acccucuccacccc

SEQ ID NO: 2056422 - RNA, 15 nt, Human
acccucuccacccca

SEQ ID NO: 2056423 - RNA, 16 nt, Human
acccucuccaccccau

SEQ ID NO: 2056424 - RNA, 14 nt, Human
acccucucccagga

SEQ ID NO: 2056425 - RNA, 15 nt, Human
acccucucccaggac

SEQ ID NO: 2056426 - RNA, 15 nt, Human
acccucugacccuag

SEQ ID NO: 2056427 - RNA, 21 nt, Human
acccugaauuuggccugcacu

SEQ ID NO: 2056428 - RNA, 20 nt, Human
acccggccccugcugguuca

SEQ ID NO: 2056429 - RNA, 17 nt, Human
acccggccccugcuggu

SEQ ID NO: 2056430 - RNA, 22 nt, Human
acccggccccugcugguucagg

SEQ ID NO: 2056431 - RNA, 21 nt, Human
acccggcgguccccuccgcca

SEQ ID NO: 2056432 - RNA, 16 nt, Human
acccggccccugcugg

SEQ ID NO: 2056433 - RNA, 15 nt, Human
acccggccccugcug

SEQ ID NO: 2056434 - RNA, 21 nt, Human
acccggaggggccuggcagcc

SEQ ID NO: 2056435 - RNA, 18 nt, Human
acccggaggggccuggca

SEQ ID NO: 2056436 - RNA, 14 nt, Human
acccggccccugcu

SEQ ID NO: 2056437 - RNA, 22 nt, Human
ucagguaacaggcagauacagg

SEQ ID NO: 2056438 - RNA, 21 nt, Human
ucagguaacaggcagauacag

SEQ ID NO: 2056439 - RNA, 23 nt, Human
ucagguaacaggcagauacagga

SEQ ID NO: 2056440 - RNA, 21 nt, Human
ucaggguucuccucuccccuc

SEQ ID NO: 2056441 - RNA, 16 nt, Human
ucaggguuggccccug

SEQ ID NO: 2056442 - RNA, 15 nt, Human
ucaggguucuccucu

SEQ ID NO: 2056443 - RNA, 12 nt, Human
ucagggggccag

SEQ ID NO: 2056444 - RNA, 13 nt, Human
ucagggggccagg

SEQ ID NO: 2056445 - RNA, 12 nt, Human
ucagggcugaca

SEQ ID NO: 2056446 - RNA, 18 nt, Human
ucagcuuuuugucuuuuc

SEQ ID NO: 2056447 - RNA, 22 nt, Human
ucagggcugacacguccacccc

SEQ ID NO: 2056448 - RNA, 16 nt, Human
ucaggggacucagccc

SEQ ID NO: 2056449 - RNA, 18 nt, Human
ucaggggacucagcccug

SEQ ID NO: 2056450 - RNA, 16 nt, Human
ucaggggagucccguc

SEQ ID NO: 2056451 - RNA, 20 nt, Human
ucaggggagucccgucagga

SEQ ID NO: 2056452 - RNA, 22 nt, Human
ucagcuuguaaauagcucaggu

SEQ ID NO: 2056453 - RNA, 21 nt, Human
ucagcuuguaaauagcucagg

SEQ ID NO: 2056454 - RNA, 15 nt, Human
ucagcuccagcucac

SEQ ID NO: 2056455 - RNA, 14 nt, Human
ucagcuccagcuca

SEQ ID NO: 2056456 - RNA, 15 nt, Human
ucagcuuugccuucc

SEQ ID NO: 2056457 - RNA, 16 nt, Human
ucagcuuugccuucca

SEQ ID NO: 2056458 - RNA, 22 nt, Human
ucagcuuugccuuccacgcugu

SEQ ID NO: 2056459 - RNA, 12 nt, Human
accccugcccug

SEQ ID NO: 2056460 - RNA, 13 nt, Human
accccugcccugg

SEQ ID NO: 2056461 - RNA, 14 nt, Human
accccugcccuggg

SEQ ID NO: 2056462 - RNA, 15 nt, Human
accccugcccuggga

SEQ ID NO: 2056463 - RNA, 16 nt, Human
accccugcccuugucc

SEQ ID NO: 2056464 - RNA, 13 nt, Human
accccucuggcca

SEQ ID NO: 2056465 - RNA, 14 nt, Human
accccucuggccag

SEQ ID NO: 2056466 - RNA, 15 nt, Human
accccucuggccagg

SEQ ID NO: 2056467 - RNA, 16 nt, Human
accccucuaccaagcu

SEQ ID NO: 2056468 - RNA, 18 nt, Human
accccucuaccaagcugu

SEQ ID NO: 2056469 - RNA, 23 nt, Human
accccuccuuccuugaccagcag

SEQ ID NO: 2056470 - RNA, 14 nt, Human
acccccucuagaaa

SEQ ID NO: 2056471 - RNA, 21 nt, Human
accccuccuuccuugaccagc

SEQ ID NO: 2056472 - RNA, 22 nt, Human
accccuccuuccuugaccagca

SEQ ID NO: 2056473 - RNA, 18 nt, Human
accccucuggccaggaug

SEQ ID NO: 2056474 - RNA, 19 nt, Human
accccauagugaccggcug

SEQ ID NO: 2056475 - RNA, 18 nt, Human
accccaucucuacaaaaa

SEQ ID NO: 2056476 - RNA, 21 nt, Human
accccauagugaccggcugcu

SEQ ID NO: 2056477 - RNA, 15 nt, Human
accccaucccacacc

SEQ ID NO: 2056478 - RNA, 17 nt, Human
acccccucccuggccug

SEQ ID NO: 2056479 - RNA, 20 nt, Human
acccccucccuggccuguuc

SEQ ID NO: 2056480 - RNA, 22 nt, Human
acccccucccuggccuguucug

SEQ ID NO: 2056481 - RNA, 23 nt, Human
ucagcggggacagcuccuucugu

SEQ ID NO: 2056482 - RNA, 21 nt, Human
ucagcggggacagcuccuucu

SEQ ID NO: 2056483 - RNA, 20 nt, Human
ucagcggggacagcuccuuc

SEQ ID NO: 2056484 - RNA, 19 nt, Human
ucagcggggacagcuccuu

SEQ ID NO: 2056485 - RNA, 18 nt, Human
ucagcuaaagcccaaccu

SEQ ID NO: 2056486 - RNA, 12 nt, Human
ucagcuccagcu

SEQ ID NO: 2056487 - RNA, 18 nt, Human
ucagcuccacuuucagug

SEQ ID NO: 2056488 - RNA, 15 nt, Human
ucagcuacuaaugau

SEQ ID NO: 2056489 - RNA, 20 nt, Human
ucagcuacuaaugauguuuu

SEQ ID NO: 2056490 - RNA, 24 nt, Human
ucagccuucccccucccagggcca

SEQ ID NO: 2056491 - RNA, 21 nt, Human
ucagccuuccccuugcccagg

SEQ ID NO: 2056492 - RNA, 22 nt, Human
ucagccuuccccuugcccaggg

SEQ ID NO: 2056493 - RNA, 23 nt, Human
ucagccuuccccuugcccagggc

SEQ ID NO: 2056494 - RNA, 17 nt, Human
ucagccugugcugcccg

SEQ ID NO: 2056495 - RNA, 21 nt, Human
ucagccuucccccucccaggg

SEQ ID NO: 2056496 - RNA, 22 nt, Human
ucagccuucccccucccagggc

SEQ ID NO: 2056497 - RNA, 12 nt, Human
ucagccugugcu

SEQ ID NO: 2056498 - RNA, 16 nt, Human
ucagccugugcugccc

SEQ ID NO: 2056499 - RNA, 21 nt, Human
accccuggcuuuucacugcug

SEQ ID NO: 2056500 - RNA, 20 nt, Human
accccuggcuuuucacugcu

SEQ ID NO: 2056501 - RNA, 19 nt, Human
accccuggcuuuucacugc

SEQ ID NO: 2056502 - RNA, 18 nt, Human
accccuggcuuuucacug

SEQ ID NO: 2056503 - RNA, 17 nt, Human
accccuggcuuuucacu

SEQ ID NO: 2056504 - RNA, 17 nt, Human
ucagccuggugggccuc

SEQ ID NO: 2056505 - RNA, 18 nt, Human
ucagccuggugggccucc

SEQ ID NO: 2056506 - RNA, 19 nt, Human
ucagccuggugggccuccu

SEQ ID NO: 2056507 - RNA, 12 nt, Human
ucagauuugaac

SEQ ID NO: 2056508 - RNA, 21 nt, Human
ucagauuugaacucuucaauc

SEQ ID NO: 2056509 - RNA, 23 nt, Human
accaguguguggcuuucagagcc

SEQ ID NO: 2056510 - RNA, 21 nt, Human
accagugugguuuguguuuga

SEQ ID NO: 2056511 - RNA, 13 nt, Human
accauaacccagg

SEQ ID NO: 2056512 - RNA, 23 nt, Human
accauaacccaggaaugaagaua

SEQ ID NO: 2056513 - RNA, 15 nt, Human
ucagcaaaagaugcu

SEQ ID NO: 2056514 - RNA, 15 nt, Human
ucagauuuuccugug

SEQ ID NO: 2056515 - RNA, 16 nt, Human
ucagauuuuccugugg

SEQ ID NO: 2056516 - RNA, 12 nt, Human
accccagccuaa

SEQ ID NO: 2056517 - RNA, 13 nt, Human
accccagcauccu

SEQ ID NO: 2056518 - RNA, 13 nt, Human
accccagagugug

SEQ ID NO: 2056519 - RNA, 23 nt, Human
acccaggagguggagguugcagu

SEQ ID NO: 2056520 - RNA, 11 nt, Human
accccacacuu

SEQ ID NO: 2056521 - RNA, 22 nt, Human
accccaccacgauguggcccug

SEQ ID NO: 2056522 - RNA, 21 nt, Human
accccacacuuguuccagcuc

SEQ ID NO: 2056523 - RNA, 12 nt, Human
accccacccccu

SEQ ID NO: 2056524 - RNA, 21 nt, Human
accccacccccuucagugccc

SEQ ID NO: 2056525 - RNA, 22 nt, Human
accccacccccuucagugccca

SEQ ID NO: 2056526 - RNA, 17 nt, Human
ucagcccucccugcccc

SEQ ID NO: 2056527 - RNA, 23 nt, Human
acccaggaggcagagguugcagu

SEQ ID NO: 2056528 - RNA, 19 nt, Human
acccaggagggagggggcu

SEQ ID NO: 2056529 - RNA, 11 nt, Human
acccaggaggu

SEQ ID NO: 2056530 - RNA, 14 nt, Human
acccaggaggugga

SEQ ID NO: 2056531 - RNA, 20 nt, Human
acccaggagguggagguugc

SEQ ID NO: 2056532 - RNA, 21 nt, Human
acccaggagguggagguugca

SEQ ID NO: 2056533 - RNA, 23 nt, Human
acccaggagccccgaggccuucu

SEQ ID NO: 2056534 - RNA, 19 nt, Human
acccaggagccccgaggcc

SEQ ID NO: 2056535 - RNA, 16 nt, Human
ucagcccucccugccc

SEQ ID NO: 2056536 - RNA, 15 nt, Human
ucagcccucccugcc

SEQ ID NO: 2056537 - RNA, 14 nt, Human
ucagcccucccugc

SEQ ID NO: 2056538 - RNA, 13 nt, Human
ucagcccucccug

SEQ ID NO: 2056539 - RNA, 14 nt, Human
ucagcccucagaau

SEQ ID NO: 2056540 - RNA, 13 nt, Human
ucagccaggagcu

SEQ ID NO: 2056541 - RNA, 12 nt, Human
ucagccaggagc

SEQ ID NO: 2056542 - RNA, 16 nt, Human
ucaguuuucaggagug

SEQ ID NO: 2056543 - RNA, 14 nt, Human
ucagugggagaaaa

SEQ ID NO: 2056544 - RNA, 14 nt, Human
ucaguuuuaucuuu

SEQ ID NO: 2056545 - RNA, 16 nt, Human
ucagugggagaaaaca

SEQ ID NO: 2056546 - RNA, 13 nt, Human
ucaguuuuaacua

SEQ ID NO: 2056547 - RNA, 11 nt, Human
ucaguggcagc

SEQ ID NO: 2056548 - RNA, 21 nt, Human
ucaguggacuuuccacccccu

SEQ ID NO: 2056549 - RNA, 23 nt, Human
ucaguggacuuuccacccccucc

SEQ ID NO: 2056550 - RNA, 12 nt, Human
ucagugcuucuu

SEQ ID NO: 2056551 - RNA, 19 nt, Human
ucaguggacuuuccacccc

SEQ ID NO: 2056552 - RNA, 15 nt, Human
ucagugcuucgcaga

SEQ ID NO: 2056553 - RNA, 12 nt, Human
ucaguggcagcu

SEQ ID NO: 2056554 - RNA, 22 nt, Human
ucagugggaacgugacugcccc

SEQ ID NO: 2056555 - RNA, 23 nt, Human
ucagugggaacgugacugcccca

SEQ ID NO: 2056556 - RNA, 12 nt, Human
ucagugggagaa

SEQ ID NO: 2056557 - RNA, 13 nt, Human
ucagugggagaaa

SEQ ID NO: 2056558 - RNA, 19 nt, Human
ucaguggcauggcuccagu

SEQ ID NO: 2056559 - RNA, 20 nt, Human
ucaguggcauggcuccaguc

SEQ ID NO: 2056560 - RNA, 15 nt, Human
ucagugggaacguga

SEQ ID NO: 2056561 - RNA, 19 nt, Human
ucagugggaacgugacugc

SEQ ID NO: 2056562 - RNA, 12 nt, Human
ucagugccacua

SEQ ID NO: 2056563 - RNA, 13 nt, Human
ucaguaucaggcc

SEQ ID NO: 2056564 - RNA, 16 nt, Human
ucaguauaauuuuuua

SEQ ID NO: 2056565 - RNA, 9 nt, Human
ucagugccc

SEQ ID NO: 2056566 - RNA, 16 nt, Human
ucagugcccaacuguu

SEQ ID NO: 2056567 - RNA, 13 nt, Human
ucagugcccacca

SEQ ID NO: 2056568 - RNA, 22 nt, Human
ucagugcccaccaacaucccau

SEQ ID NO: 2056569 - RNA, 18 nt, Human
ucauauaagauucauauu

SEQ ID NO: 2056570 - RNA, 16 nt, Human
ucauauaccagcaaua

SEQ ID NO: 2056571 - RNA, 17 nt, Human
ucauauaccagcaauau

SEQ ID NO: 2056572 - RNA, 14 nt, Human
ucauauauauacau

SEQ ID NO: 2056573 - RNA, 14 nt, Human
ucauauauaucuau

SEQ ID NO: 2056574 - RNA, 18 nt, Human
ucauauauggggggccaa

SEQ ID NO: 2056575 - RNA, 22 nt, Human
ucauauauggggggccaacacc

SEQ ID NO: 2056576 - RNA, 21 nt, Human
ucauaguaugguggcuggguu

SEQ ID NO: 2056577 - RNA, 19 nt, Human
ucauaguaugguggcuggg

SEQ ID NO: 2056578 - RNA, 18 nt, Human
ucauaguaugguggcugg

SEQ ID NO: 2056579 - RNA, 15 nt, Human
ucauaguaugguggc

SEQ ID NO: 2056580 - RNA, 14 nt, Human
ucauaaccuagccu

SEQ ID NO: 2056581 - RNA, 16 nt, Human
ucauaaaauaaaguau

SEQ ID NO: 2056582 - RNA, 12 nt, Human
ucauaaaauaaa

SEQ ID NO: 2056583 - RNA, 16 nt, Human
ucauaacagugccauu

SEQ ID NO: 2056584 - RNA, 17 nt, Human
ucauaacagugccauug

SEQ ID NO: 2056585 - RNA, 20 nt, Human
ucauaacagugccauugucu

SEQ ID NO: 2056586 - RNA, 22 nt, Human
ucauaacagugccauugucuuu

SEQ ID NO: 2056587 - RNA, 23 nt, Human
ucauaacagugccauugucuuua

SEQ ID NO: 2056588 - RNA, 15 nt, Human
ucauaucuucacaau

SEQ ID NO: 2056589 - RNA, 15 nt, Human
ucauauuuacuucuu

SEQ ID NO: 2056590 - RNA, 23 nt, Human
ucauauuuacuucuuauacauuu

SEQ ID NO: 2056591 - RNA, 17 nt, Human
accgagucucuucucca

SEQ ID NO: 2056592 - RNA, 16 nt, Human
accgagucucuucucc

SEQ ID NO: 2056593 - RNA, 17 nt, Human
accgaggcuggagcugg

SEQ ID NO: 2056594 - RNA, 18 nt, Human
accgaggcuggagcuggc

SEQ ID NO: 2056595 - RNA, 11 nt, Human
ucaugauuuuu

SEQ ID NO: 2056596 - RNA, 12 nt, Human
ucaugaagccca

SEQ ID NO: 2056597 - RNA, 15 nt, Human
ucaugaaauaugcau

SEQ ID NO: 2056598 - RNA, 14 nt, Human
ucaugaaauaugca

SEQ ID NO: 2056599 - RNA, 12 nt, Human
ucaugaacacau

SEQ ID NO: 2056600 - RNA, 22 nt, Human
ucaugaacacaucagcuagcaa

SEQ ID NO: 2056601 - RNA, 20 nt, Human
ucaucuaccauuuucugguu

SEQ ID NO: 2056602 - RNA, 22 nt, Human
ucaucuaccauuuucugguucu

SEQ ID NO: 2056603 - RNA, 16 nt, Human
ucaucuaccuuuucuc

SEQ ID NO: 2056604 - RNA, 17 nt, Human
ucaucuaccuuuucucu

SEQ ID NO: 2056605 - RNA, 18 nt, Human
ucaucuaccuuuucucuu

SEQ ID NO: 2056606 - RNA, 20 nt, Human
ucaucguaggugauuugaag

SEQ ID NO: 2056607 - RNA, 12 nt, Human
ucaucccacucc

SEQ ID NO: 2056608 - RNA, 13 nt, Human
ucauccuuuucuc

SEQ ID NO: 2056609 - RNA, 14 nt, Human
ucauccuuuucucc

SEQ ID NO: 2056610 - RNA, 19 nt, Human
ucauccuuuucuccuaucu

SEQ ID NO: 2056611 - RNA, 22 nt, Human
ucauccuuuucuccuaucuuca

SEQ ID NO: 2056612 - RNA, 19 nt, Human
accuccugcccaggagagc

SEQ ID NO: 2056613 - RNA, 20 nt, Human
accuccugcccaggagagcc

SEQ ID NO: 2056614 - RNA, 21 nt, Human
accuccugcccaggagagcca

SEQ ID NO: 2056615 - RNA, 17 nt, Human
ucaugcauagucccagc

SEQ ID NO: 2056616 - RNA, 18 nt, Human
ucaugcauagucccagcu

SEQ ID NO: 2056617 - RNA, 20 nt, Human
ucaugcaaaugcuguauucu

SEQ ID NO: 2056618 - RNA, 13 nt, Human
ucaugcaaugaca

SEQ ID NO: 2056619 - RNA, 15 nt, Human
ucaugcaaugacauc

SEQ ID NO: 2056620 - RNA, 16 nt, Human
ucaugcaaugacaucu

SEQ ID NO: 2056621 - RNA, 19 nt, Human
ucauguggaauauaaagau

SEQ ID NO: 2056622 - RNA, 18 nt, Human
ucauguggaauauaaaga

SEQ ID NO: 2056623 - RNA, 16 nt, Human
ucauguuucuuaaaug

SEQ ID NO: 2056624 - RNA, 11 nt, Human
ucauguuucuu

SEQ ID NO: 2056625 - RNA, 15 nt, Human
ucauguuucuuaaau

SEQ ID NO: 2056626 - RNA, 18 nt, Human
accuaccuguaacuuuuu

SEQ ID NO: 2056627 - RNA, 17 nt, Human
accuaccuucaaagcug

SEQ ID NO: 2056628 - RNA, 18 nt, Human
accuaccuucaaagcuga

SEQ ID NO: 2056629 - RNA, 19 nt, Human
accucacgcaccucccauc

SEQ ID NO: 2056630 - RNA, 22 nt, Human
accucacgcaccucccauccua

SEQ ID NO: 2056631 - RNA, 15 nt, Human
accucacgcaccucc

SEQ ID NO: 2056632 - RNA, 16 nt, Human
accucacgcaccuccc

SEQ ID NO: 2056633 - RNA, 17 nt, Human
accucacgcaccuccca

SEQ ID NO: 2056634 - RNA, 18 nt, Human
accucacgcaccucccau

SEQ ID NO: 2056635 - RNA, 19 nt, Human
accucacccgaggcugccc

SEQ ID NO: 2056636 - RNA, 16 nt, Human
accuauuuuagacaaa

SEQ ID NO: 2056637 - RNA, 14 nt, Human
accuauuugacaua

SEQ ID NO: 2056638 - RNA, 17 nt, Human
accuagggaggaccuua

SEQ ID NO: 2056639 - RNA, 24 nt, Human
accuagggaggaccuuaucugugc

SEQ ID NO: 2056640 - RNA, 17 nt, Human
accuaggccacuccucc

SEQ ID NO: 2056641 - RNA, 18 nt, Human
accuaggccacuccucca

SEQ ID NO: 2056642 - RNA, 15 nt, Human
accuagggaggaccu

SEQ ID NO: 2056643 - RNA, 12 nt, Human
accuauguuugc

SEQ ID NO: 2056644 - RNA, 17 nt, Human
accuauuucaaaaauuu

SEQ ID NO: 2056645 - RNA, 18 nt, Human
accuauuucaaaaauuug

SEQ ID NO: 2056646 - RNA, 20 nt, Human
accuauuucaaaaauuugga

SEQ ID NO: 2056647 - RNA, 20 nt, Human
accuagggauguucuggccc

SEQ ID NO: 2056648 - RNA, 21 nt, Human
accuccccuauccacccagcc

SEQ ID NO: 2056649 - RNA, 23 nt, Human
accuccccuauccacccagccca

SEQ ID NO: 2056650 - RNA, 13 nt, Human
accuccccuccuu

SEQ ID NO: 2056651 - RNA, 17 nt, Human
accuccccuccuugccu

SEQ ID NO: 2056652 - RNA, 19 nt, Human
accuccccuccuugccucc

SEQ ID NO: 2056653 - RNA, 20 nt, Human
accuccccuccuugccuccu

SEQ ID NO: 2056654 - RNA, 21 nt, Human
accuccccuccuugccuccug

SEQ ID NO: 2056655 - RNA, 22 nt, Human
accuccccuccuugccuccugu

SEQ ID NO: 2056656 - RNA, 14 nt, Human
accucccccuccuu

SEQ ID NO: 2056657 - RNA, 15 nt, Human
accucccccuccuuc

SEQ ID NO: 2056658 - RNA, 16 nt, Human
accucccccuccuucc

SEQ ID NO: 2056659 - RNA, 21 nt, Human
accucccccuccuucccagcu

SEQ ID NO: 2056660 - RNA, 22 nt, Human
accucccccuccuucccagcug

SEQ ID NO: 2056661 - RNA, 14 nt, Human
accuccccuaucca

SEQ ID NO: 2056662 - RNA, 17 nt, Human
accuccccuauccaccc

SEQ ID NO: 2056663 - RNA, 18 nt, Human
accuccccuauccaccca

SEQ ID NO: 2056664 - RNA, 19 nt, Human
accuccccuauccacccag

SEQ ID NO: 2056665 - RNA, 20 nt, Human
accuccccuauccacccagc

SEQ ID NO: 2056666 - RNA, 16 nt, Human
accuccugcaauaaaa

SEQ ID NO: 2056667 - RNA, 12 nt, Human
accuccugccca

SEQ ID NO: 2056668 - RNA, 13 nt, Human
accuccugcccag

SEQ ID NO: 2056669 - RNA, 14 nt, Human
accuccugcccagg

SEQ ID NO: 2056670 - RNA, 15 nt, Human
accuccugcccagga

SEQ ID NO: 2056671 - RNA, 16 nt, Human
accuccugcccaggag

SEQ ID NO: 2056672 - RNA, 17 nt, Human
accuccugcccaggaga

SEQ ID NO: 2056673 - RNA, 18 nt, Human
accuccugcccaggagag

SEQ ID NO: 2056674 - RNA, 15 nt, Human
accuccacagcuucc

SEQ ID NO: 2056675 - RNA, 13 nt, Human
accuccagcuguu

SEQ ID NO: 2056676 - RNA, 12 nt, Human
accucccagccc

SEQ ID NO: 2056677 - RNA, 13 nt, Human
accucccagcccc

SEQ ID NO: 2056678 - RNA, 16 nt, Human
accucccagccccugc

SEQ ID NO: 2056679 - RNA, 21 nt, Human
accucccagccccugccccuc

SEQ ID NO: 2056680 - RNA, 15 nt, Human
accucccauccuaau

SEQ ID NO: 2056681 - RNA, 20 nt, Human
accucccacaaaggagagcu

SEQ ID NO: 2056682 - RNA, 12 nt, Human
accucccaccuu

SEQ ID NO: 2056683 - RNA, 14 nt, Human
accucccaccuuug

SEQ ID NO: 2056684 - RNA, 15 nt, Human
accucccaccuuugg

SEQ ID NO: 2056685 - RNA, 16 nt, Human
accucccaccuuuggu

SEQ ID NO: 2056686 - RNA, 20 nt, Human
acucaagacuuccagagccu

SEQ ID NO: 2056687 - RNA, 15 nt, Human
acuaugguauuugag

SEQ ID NO: 2056688 - RNA, 17 nt, Human
acucaagaggcugaggc

SEQ ID NO: 2056689 - RNA, 18 nt, Human
acucaagaggcugaggca

SEQ ID NO: 2056690 - RNA, 16 nt, Human
acuaugguauuugagu

SEQ ID NO: 2056691 - RNA, 14 nt, Human
acucaagaggcuga

SEQ ID NO: 2056692 - RNA, 15 nt, Human
acucaagaggcugag

SEQ ID NO: 2056693 - RNA, 16 nt, Human
acuauguugcccaggc

SEQ ID NO: 2056694 - RNA, 15 nt, Human
acuauguugcccagg

SEQ ID NO: 2056695 - RNA, 14 nt, Human
acuauguugcccag

SEQ ID NO: 2056696 - RNA, 22 nt, Human
acucaagugucucaguccaccu

SEQ ID NO: 2056697 - RNA, 23 nt, Human
acucaagugucucaguccaccug

SEQ ID NO: 2056698 - RNA, 17 nt, Human
acucacaacagcugccu

SEQ ID NO: 2056699 - RNA, 16 nt, Human
acucaaugcacugaca

SEQ ID NO: 2056700 - RNA, 11 nt, Human
acucaagccaa

SEQ ID NO: 2056701 - RNA, 14 nt, Human
acucaagccaagca

SEQ ID NO: 2056702 - RNA, 16 nt, Human
acucaagccaagcagc

SEQ ID NO: 2056703 - RNA, 17 nt, Human
acucaagccaagcagcc

SEQ ID NO: 2056704 - RNA, 19 nt, Human
acucaagccaagcagccaa

SEQ ID NO: 2056705 - RNA, 22 nt, Human
acucaagccaagcagccaagcu

SEQ ID NO: 2056706 - RNA, 16 nt, Human
acuaucuaaauguuga

SEQ ID NO: 2056707 - RNA, 21 nt, Human
acuaucuaaauguugaaagau

SEQ ID NO: 2056708 - RNA, 14 nt, Human
acuaucaaacugaa

SEQ ID NO: 2056709 - RNA, 19 nt, Human
acuaucaaacugaagccag

SEQ ID NO: 2056710 - RNA, 22 nt, Human
acuauagccuaggugacagagu

SEQ ID NO: 2056711 - RNA, 20 nt, Human
acuauagccuaggugacaga

SEQ ID NO: 2056712 - RNA, 14 nt, Human
acuagaggcaggga

SEQ ID NO: 2056713 - RNA, 15 nt, Human
acuagaggcagggag

SEQ ID NO: 2056714 - RNA, 16 nt, Human
acuagaccuccagcug

SEQ ID NO: 2056715 - RNA, 16 nt, Human
acuagacguucauuug

SEQ ID NO: 2056716 - RNA, 18 nt, Human
acuauagccuaggugaca

SEQ ID NO: 2056717 - RNA, 16 nt, Human
acuagaggcagggagg

SEQ ID NO: 2056718 - RNA, 23 nt, Human
uccccacccugaaagcccugagc

SEQ ID NO: 2056719 - RNA, 15 nt, Human
ucccauugucuucug

SEQ ID NO: 2056720 - RNA, 19 nt, Human
ucccauugucuucugaccu

SEQ ID NO: 2056721 - RNA, 22 nt, Human
ucccauugucuucugaccucua

SEQ ID NO: 2056722 - RNA, 21 nt, Human
ucccauuucuaaaggccucuu

SEQ ID NO: 2056723 - RNA, 24 nt, Human
ucccauuucuaaaggccucuuccu

SEQ ID NO: 2056724 - RNA, 12 nt, Human
uccccacccuga

SEQ ID NO: 2056725 - RNA, 14 nt, Human
ucccauuucuuaau

SEQ ID NO: 2056726 - RNA, 19 nt, Human
ucccauuuucagacugcuu

SEQ ID NO: 2056727 - RNA, 21 nt, Human
ucccauuuucagacugcuuua

SEQ ID NO: 2056728 - RNA, 22 nt, Human
ucccauuuucagacugcuuuaa

SEQ ID NO: 2056729 - RNA, 23 nt, Human
ucccauuuucagacugcuuuaaa

SEQ ID NO: 2056730 - RNA, 13 nt, Human
ucccauuuugcaa

SEQ ID NO: 2056731 - RNA, 21 nt, Human
ucccauuuugcaaaauuucca

SEQ ID NO: 2056732 - RNA, 22 nt, Human
ucccauuuugcaaaauuuccag

SEQ ID NO: 2056733 - RNA, 13 nt, Human
ucccagcuacuca

SEQ ID NO: 2056734 - RNA, 22 nt, Human
ucccagcuacucaagaggcuga

SEQ ID NO: 2056735 - RNA, 14 nt, Human
ucccagcuacucag

SEQ ID NO: 2056736 - RNA, 16 nt, Human
ucccagcuacucagaa

SEQ ID NO: 2056737 - RNA, 19 nt, Human
ucccagcuacucagaagcc

SEQ ID NO: 2056738 - RNA, 21 nt, Human
ucccagcuacucagaagccug

SEQ ID NO: 2056739 - RNA, 23 nt, Human
ucccagcuacucagaagccugag

SEQ ID NO: 2056740 - RNA, 10 nt, Human
ucccagccug

SEQ ID NO: 2056741 - RNA, 18 nt, Human
ucccagcggcuggugcag

SEQ ID NO: 2056742 - RNA, 19 nt, Human
ucccagcggcuggugcagg

SEQ ID NO: 2056743 - RNA, 20 nt, Human
ucccagcggcuggugcaggg

SEQ ID NO: 2056744 - RNA, 21 nt, Human
ucccagcggcuggugcagggc

SEQ ID NO: 2056745 - RNA, 22 nt, Human
ucccagcggcuggugcagggcc

SEQ ID NO: 2056746 - RNA, 23 nt, Human
ucccagcggcuggugcagggccu

SEQ ID NO: 2056747 - RNA, 13 nt, Human
ucccagccccugc

SEQ ID NO: 2056748 - RNA, 19 nt, Human
ucccagccccugccccuca

SEQ ID NO: 2056749 - RNA, 22 nt, Human
ucccagcccuuugggaggcuga

SEQ ID NO: 2056750 - RNA, 16 nt, Human
ucccagcucacgucac

SEQ ID NO: 2056751 - RNA, 17 nt, Human
ucccagcucacgucaca

SEQ ID NO: 2056752 - RNA, 21 nt, Human
ucccagcucuagacaacccug

SEQ ID NO: 2056753 - RNA, 20 nt, Human
ucccagcucuagacaacccu

SEQ ID NO: 2056754 - RNA, 16 nt, Human
ucccagcuacuuggga

SEQ ID NO: 2056755 - RNA, 17 nt, Human
ucccagcuacucaggag

SEQ ID NO: 2056756 - RNA, 15 nt, Human
ucccagcuacucagg

SEQ ID NO: 2056757 - RNA, 16 nt, Human
ucccagcuacucagga

SEQ ID NO: 2056758 - RNA, 16 nt, Human
ucccagcuacucggga

SEQ ID NO: 2056759 - RNA, 18 nt, Human
ucccagcuacuugggagg

SEQ ID NO: 2056760 - RNA, 17 nt, Human
ucccagcuacuugggag

SEQ ID NO: 2056761 - RNA, 19 nt, Human
ucccagcuacuugggaggc

SEQ ID NO: 2056762 - RNA, 20 nt, Human
acuacugcuaccacaacuau

SEQ ID NO: 2056763 - RNA, 13 nt, Human
acuacuguguucc

SEQ ID NO: 2056764 - RNA, 22 nt, Human
acuacuguggaaaaauauuuaa

SEQ ID NO: 2056765 - RNA, 15 nt, Human
acuacuguguuccug

SEQ ID NO: 2056766 - RNA, 18 nt, Human
acuacuguggaaaaauau

SEQ ID NO: 2056767 - RNA, 19 nt, Human
acuacuguggaaaaauauu

SEQ ID NO: 2056768 - RNA, 20 nt, Human
acuacuguggaaaaauauuu

SEQ ID NO: 2056769 - RNA, 21 nt, Human
acuacuguggaaaaauauuua

SEQ ID NO: 2056770 - RNA, 21 nt, Human
acuacuguguuccuggcaaua

SEQ ID NO: 2056771 - RNA, 16 nt, Human
acuacuguguuccugg

SEQ ID NO: 2056772 - RNA, 18 nt, Human
acuacuguguuccuggca

SEQ ID NO: 2056773 - RNA, 19 nt, Human
acuagacucccaagcugga

SEQ ID NO: 2056774 - RNA, 20 nt, Human
acuagacuugaggaaaccag

SEQ ID NO: 2056775 - RNA, 11 nt, Human
acuagagaaac

SEQ ID NO: 2056776 - RNA, 12 nt, Human
acuagagaaacc

SEQ ID NO: 2056777 - RNA, 11 nt, Human
ucccccagccc

SEQ ID NO: 2056778 - RNA, 15 nt, Human
uccccagguggcuga

SEQ ID NO: 2056779 - RNA, 18 nt, Human
uccccagguggcugaccc

SEQ ID NO: 2056780 - RNA, 19 nt, Human
uccccagguggcugaccca

SEQ ID NO: 2056781 - RNA, 20 nt, Human
uccccagguggcugacccag

SEQ ID NO: 2056782 - RNA, 17 nt, Human
uccccaggggucccagc

SEQ ID NO: 2056783 - RNA, 18 nt, Human
uccccaggggucccagcc

SEQ ID NO: 2056784 - RNA, 20 nt, Human
uccccaggggucccagccac

SEQ ID NO: 2056785 - RNA, 22 nt, Human
uccccaggggucccagccaccc

SEQ ID NO: 2056786 - RNA, 23 nt, Human
uccccaggggucccagccacccc

SEQ ID NO: 2056787 - RNA, 10 nt, Human
uccccagggg

SEQ ID NO: 2056788 - RNA, 14 nt, Human
uccccaggggagag

SEQ ID NO: 2056789 - RNA, 23 nt, Human
uccccaggggagagggucuggag

SEQ ID NO: 2056790 - RNA, 18 nt, Human
ucccauuuuggaaguuuu

SEQ ID NO: 2056791 - RNA, 19 nt, Human
ucccauuuuggaaguuuuc

SEQ ID NO: 2056792 - RNA, 17 nt, Human
acguaaagcuagaaaug

SEQ ID NO: 2056793 - RNA, 18 nt, Human
acguaaagcuagaaauga

SEQ ID NO: 2056794 - RNA, 18 nt, Human
acggugggcauuugugag

SEQ ID NO: 2056795 - RNA, 19 nt, Human
acggugggcauuugugagg

SEQ ID NO: 2056796 - RNA, 14 nt, Human
acgucaaacaugaa

SEQ ID NO: 2056797 - RNA, 16 nt, Human
acgucaaacaugaagu

SEQ ID NO: 2056798 - RNA, 17 nt, Human
acgucaaacaugaagug

SEQ ID NO: 2056799 - RNA, 17 nt, Human
acgucaagucuccuucc

SEQ ID NO: 2056800 - RNA, 22 nt, Human
acguaaaucuguucaaggaauc

SEQ ID NO: 2056801 - RNA, 18 nt, Human
acguaaccacggaaaaga

SEQ ID NO: 2056802 - RNA, 16 nt, Human
uccagugucucggagg

SEQ ID NO: 2056803 - RNA, 15 nt, Human
acguuaccaggcagg

SEQ ID NO: 2056804 - RNA, 13 nt, Human
acguucaccccuc

SEQ ID NO: 2056805 - RNA, 23 nt, Human
acgugugugacucagaugucucu

SEQ ID NO: 2056806 - RNA, 15 nt, Human
acguccugccaccug

SEQ ID NO: 2056807 - RNA, 16 nt, Human
acguccugccaccugg

SEQ ID NO: 2056808 - RNA, 22 nt, Human
acguguguuucuagagccugcu

SEQ ID NO: 2056809 - RNA, 12 nt, Human
acgucccuccac

SEQ ID NO: 2056810 - RNA, 22 nt, Human
acgucccuccacguucaccccu

SEQ ID NO: 2056811 - RNA, 18 nt, Human
acuaacaaccaaagacua

SEQ ID NO: 2056812 - RNA, 21 nt, Human
acuacaaaaaaguuguuaacu

SEQ ID NO: 2056813 - RNA, 13 nt, Human
acuacaaaauuug

SEQ ID NO: 2056814 - RNA, 14 nt, Human
acuacaaaauuuga

SEQ ID NO: 2056815 - RNA, 16 nt, Human
acuacaaaauuugaaa

SEQ ID NO: 2056816 - RNA, 18 nt, Human
acuacaaaauuugaaauu

SEQ ID NO: 2056817 - RNA, 15 nt, Human
acuacacauucaaua

SEQ ID NO: 2056818 - RNA, 19 nt, Human
acuacacauucaauaagca

SEQ ID NO: 2056819 - RNA, 17 nt, Human
acuaauuugauguuuac

SEQ ID NO: 2056820 - RNA, 16 nt, Human
acuaacagauaagcaa

SEQ ID NO: 2056821 - RNA, 13 nt, Human
acuaacagauaag

SEQ ID NO: 2056822 - RNA, 15 nt, Human
acuaaaugcccugcu

SEQ ID NO: 2056823 - RNA, 17 nt, Human
acuaaagcaguagaaau

SEQ ID NO: 2056824 - RNA, 20 nt, Human
acuaaaucuguaagcucuuu

SEQ ID NO: 2056825 - RNA, 23 nt, Human
acuaaaucuguaagcucuuugaa

SEQ ID NO: 2056826 - RNA, 17 nt, Human
acuaaagcaggccuuuu

SEQ ID NO: 2056827 - RNA, 20 nt, Human
acuaaagcaggccuuuugau

SEQ ID NO: 2056828 - RNA, 12 nt, Human
acuaaagagaga

SEQ ID NO: 2056829 - RNA, 14 nt, Human
acuaaagagagaau

SEQ ID NO: 2056830 - RNA, 16 nt, Human
acuaaagagagaaugu

SEQ ID NO: 2056831 - RNA, 21 nt, Human
acuaaagagagaauguagaua

SEQ ID NO: 2056832 - RNA, 13 nt, Human
acguuuaaagugu

SEQ ID NO: 2056833 - RNA, 14 nt, Human
acguuuaaagugua

SEQ ID NO: 2056834 - RNA, 13 nt, Human
acguuuaaaguuc

SEQ ID NO: 2056835 - RNA, 14 nt, Human
acguuuaaaguucu

SEQ ID NO: 2056836 - RNA, 15 nt, Human
acguuuaaaguucug

SEQ ID NO: 2056837 - RNA, 18 nt, Human
acguuuaaaguucugugu

SEQ ID NO: 2056838 - RNA, 22 nt, Human
acguuuaaaguucuguguauuu

SEQ ID NO: 2056839 - RNA, 18 nt, Human
ucccagauacuugggggg

SEQ ID NO: 2056840 - RNA, 15 nt, Human
ucccagagugcuggg

SEQ ID NO: 2056841 - RNA, 16 nt, Human
ucccagauacuugggg

SEQ ID NO: 2056842 - RNA, 17 nt, Human
ucccagaacacacucca

SEQ ID NO: 2056843 - RNA, 19 nt, Human
ucccagaacacacuccauc

SEQ ID NO: 2056844 - RNA, 20 nt, Human
ucccagaacacacuccauca

SEQ ID NO: 2056845 - RNA, 18 nt, Human
ucccagaaggaccuccug

SEQ ID NO: 2056846 - RNA, 20 nt, Human
ucccagaaggaccuccugag

SEQ ID NO: 2056847 - RNA, 20 nt, Human
ucccagagacaggaaaaucc

SEQ ID NO: 2056848 - RNA, 17 nt, Human
ucccagagacaggaaaa

SEQ ID NO: 2056849 - RNA, 18 nt, Human
ucccagagacaggaaaau

SEQ ID NO: 2056850 - RNA, 13 nt, Human
ucccagacuugcu

SEQ ID NO: 2056851 - RNA, 16 nt, Human
ucccagagacaggaaa

SEQ ID NO: 2056852 - RNA, 23 nt, Human
acuacaccauguuugagcucaga

SEQ ID NO: 2056853 - RNA, 15 nt, Human
acuacacuccagccu

SEQ ID NO: 2056854 - RNA, 17 nt, Human
acuacacuccagccuga

SEQ ID NO: 2056855 - RNA, 18 nt, Human
acuacacuccagccugag

SEQ ID NO: 2056856 - RNA, 19 nt, Human
acuacacuccagccugagc

SEQ ID NO: 2056857 - RNA, 20 nt, Human
acuacacuccagccugagca

SEQ ID NO: 2056858 - RNA, 14 nt, Human
acgaacccaccugc

SEQ ID NO: 2056859 - RNA, 19 nt, Human
uccaggcgaugugcaagug

SEQ ID NO: 2056860 - RNA, 14 nt, Human
acgaaacugcucua

SEQ ID NO: 2056861 - RNA, 22 nt, Human
uccaggcuccuuuagcgcccag

SEQ ID NO: 2056862 - RNA, 12 nt, Human
uccaggcuccuu

SEQ ID NO: 2056863 - RNA, 10 nt, Human
uccaggcucc

SEQ ID NO: 2056864 - RNA, 22 nt, Human
uccaggccugugaggugcagag

SEQ ID NO: 2056865 - RNA, 22 nt, Human
uccaggcaauggccuaaacuuc

SEQ ID NO: 2056866 - RNA, 12 nt, Human
uccagaccccca

SEQ ID NO: 2056867 - RNA, 13 nt, Human
uccagacccccac

SEQ ID NO: 2056868 - RNA, 13 nt, Human
uccagacacuuuu

SEQ ID NO: 2056869 - RNA, 13 nt, Human
uccagaccccugg

SEQ ID NO: 2056870 - RNA, 14 nt, Human
uccagacccccacc

SEQ ID NO: 2056871 - RNA, 16 nt, Human
uccagacccccacccc

SEQ ID NO: 2056872 - RNA, 17 nt, Human
uccagacccccaccccu

SEQ ID NO: 2056873 - RNA, 20 nt, Human
uccagacccccaccccuucc

SEQ ID NO: 2056874 - RNA, 21 nt, Human
uccagacccccaccccuuccc

SEQ ID NO: 2056875 - RNA, 22 nt, Human
uccagacccccaccccuucccc

SEQ ID NO: 2056876 - RNA, 14 nt, Human
uccagacccccagc

SEQ ID NO: 2056877 - RNA, 15 nt, Human
uccagacccccagca

SEQ ID NO: 2056878 - RNA, 16 nt, Human
uccagacccccagcaa

SEQ ID NO: 2056879 - RNA, 21 nt, Human
uccagacccccagcaacccuc

SEQ ID NO: 2056880 - RNA, 16 nt, Human
uccagccgccauugcc

SEQ ID NO: 2056881 - RNA, 18 nt, Human
uccagccgccauugccac

SEQ ID NO: 2056882 - RNA, 19 nt, Human
uccagccgccauugccacc

SEQ ID NO: 2056883 - RNA, 20 nt, Human
uccagccgccauugccacca

SEQ ID NO: 2056884 - RNA, 21 nt, Human
uccagccgccauugccaccag

SEQ ID NO: 2056885 - RNA, 22 nt, Human
uccagccgccauugccaccagg

SEQ ID NO: 2056886 - RNA, 23 nt, Human
uccagccgccauugccaccagga

SEQ ID NO: 2056887 - RNA, 11 nt, Human
uccagccuggg

SEQ ID NO: 2056888 - RNA, 21 nt, Human
uccacuccuuccugccaccug

SEQ ID NO: 2056889 - RNA, 21 nt, Human
uccacugugccaugugccagg

SEQ ID NO: 2056890 - RNA, 18 nt, Human
uccagaauggucuuucua

SEQ ID NO: 2056891 - RNA, 16 nt, Human
uccagaauugaccuuu

SEQ ID NO: 2056892 - RNA, 19 nt, Human
uccacugucacuguuucuc

SEQ ID NO: 2056893 - RNA, 22 nt, Human
uccacugucacuguuucucugc

SEQ ID NO: 2056894 - RNA, 23 nt, Human
uccacucuacccucccacccccu

SEQ ID NO: 2056895 - RNA, 20 nt, Human
uccacucuacccucccaccc

SEQ ID NO: 2056896 - RNA, 21 nt, Human
uccacucuacccucccacccc

SEQ ID NO: 2056897 - RNA, 17 nt, Human
uccacucuacccuccca

SEQ ID NO: 2056898 - RNA, 18 nt, Human
uccacucuacccucccac

SEQ ID NO: 2056899 - RNA, 14 nt, Human
accuuuuuaucucc

SEQ ID NO: 2056900 - RNA, 14 nt, Human
accuuuuuccuucc

SEQ ID NO: 2056901 - RNA, 13 nt, Human
uccacuccuuccu

SEQ ID NO: 2056902 - RNA, 14 nt, Human
uccacuccuuccug

SEQ ID NO: 2056903 - RNA, 15 nt, Human
accuuuuuccuuccu

SEQ ID NO: 2056904 - RNA, 14 nt, Human
accuuuuauuacau

SEQ ID NO: 2056905 - RNA, 15 nt, Human
accuuuuauccacuu

SEQ ID NO: 2056906 - RNA, 11 nt, Human
accuuuucucu

SEQ ID NO: 2056907 - RNA, 20 nt, Human
accuugaacuggguacuugu

SEQ ID NO: 2056908 - RNA, 18 nt, Human
accuugaacuccugggcu

SEQ ID NO: 2056909 - RNA, 18 nt, Human
accuugaacacuggggga

SEQ ID NO: 2056910 - RNA, 21 nt, Human
accuugaacacugggggaggg

SEQ ID NO: 2056911 - RNA, 23 nt, Human
ucauuccccagguggcugaccca

SEQ ID NO: 2056912 - RNA, 12 nt, Human
ucauuccccagg

SEQ ID NO: 2056913 - RNA, 14 nt, Human
ucauuccccaggug

SEQ ID NO: 2056914 - RNA, 17 nt, Human
ucauuccuaacacagca

SEQ ID NO: 2056915 - RNA, 14 nt, Human
ucauuccugaaaga

SEQ ID NO: 2056916 - RNA, 18 nt, Human
ucauuccuaacacagcau

SEQ ID NO: 2056917 - RNA, 16 nt, Human
ucauuccugaaagaaa

SEQ ID NO: 2056918 - RNA, 20 nt, Human
ucauuccugaaagaaacagu

SEQ ID NO: 2056919 - RNA, 21 nt, Human
ucauuccugaaagaaacaguu

SEQ ID NO: 2056920 - RNA, 22 nt, Human
ucauuccugaaagaaacaguua

SEQ ID NO: 2056921 - RNA, 13 nt, Human
ucauuccugccug

SEQ ID NO: 2056922 - RNA, 17 nt, Human
ucauuccugccugucuc

SEQ ID NO: 2056923 - RNA, 19 nt, Human
ucauuccugccugucuccu

SEQ ID NO: 2056924 - RNA, 19 nt, Human
accuuuuaaauccuguuga

SEQ ID NO: 2056925 - RNA, 20 nt, Human
accuuuuaaauccuguugaa

SEQ ID NO: 2056926 - RNA, 21 nt, Human
accuuuuaaauccuguugaaa

SEQ ID NO: 2056927 - RNA, 22 nt, Human
accuuuuaaauccuguugaaaa

SEQ ID NO: 2056928 - RNA, 23 nt, Human
accuuuuaaauccuguugaaaag

SEQ ID NO: 2056929 - RNA, 14 nt, Human
accuuuuaacucac

SEQ ID NO: 2056930 - RNA, 18 nt, Human
acgcgguacaaaggaaaa

SEQ ID NO: 2056931 - RNA, 12 nt, Human
acgcggccgaga

SEQ ID NO: 2056932 - RNA, 17 nt, Human
acgccugcuugucccug

SEQ ID NO: 2056933 - RNA, 21 nt, Human
acgccugcuugucccugccca

SEQ ID NO: 2056934 - RNA, 16 nt, Human
acgccuguaaucccag

SEQ ID NO: 2056935 - RNA, 17 nt, Human
acgccuguaaucccagc

SEQ ID NO: 2056936 - RNA, 20 nt, Human
acgccuguaaucccagcacu

SEQ ID NO: 2056937 - RNA, 18 nt, Human
acgccuguaaucccagca

SEQ ID NO: 2056938 - RNA, 19 nt, Human
acgccuguaaucccagcac

SEQ ID NO: 2056939 - RNA, 21 nt, Human
acgccuguaaucccagcacuu

SEQ ID NO: 2056940 - RNA, 16 nt, Human
acgccuguaguccuag

SEQ ID NO: 2056941 - RNA, 19 nt, Human
acgccuguaaucccagcag

SEQ ID NO: 2056942 - RNA, 14 nt, Human
acgccuuguucuug

SEQ ID NO: 2056943 - RNA, 18 nt, Human
acgccuuguucuuggcca

SEQ ID NO: 2056944 - RNA, 15 nt, Human
acgaacccaccugcu

SEQ ID NO: 2056945 - RNA, 16 nt, Human
acgaacccaccugcug

SEQ ID NO: 2056946 - RNA, 16 nt, Human
acgccuaugaucccag

SEQ ID NO: 2056947 - RNA, 17 nt, Human
acgccuaugaucccagc

SEQ ID NO: 2056948 - RNA, 18 nt, Human
acgccuaugaucccagca

SEQ ID NO: 2056949 - RNA, 16 nt, Human
acgcucccucccccug

SEQ ID NO: 2056950 - RNA, 17 nt, Human
acgcucccucccccugc

SEQ ID NO: 2056951 - RNA, 19 nt, Human
acgcucccucccccugccc

SEQ ID NO: 2056952 - RNA, 13 nt, Human
acgcuggaccuug

SEQ ID NO: 2056953 - RNA, 22 nt, Human
acgcucuccuuucuuucuaacu

SEQ ID NO: 2056954 - RNA, 16 nt, Human
acgcuggagugcagug

SEQ ID NO: 2056955 - RNA, 15 nt, Human
acgcuggagugcagu

SEQ ID NO: 2056956 - RNA, 23 nt, Human
acgcuggaccuugaacuggguac

SEQ ID NO: 2056957 - RNA, 20 nt, Human
acgcuggaccuugaacuggg

SEQ ID NO: 2056958 - RNA, 18 nt, Human
acgcuggagugcagugag

SEQ ID NO: 2056959 - RNA, 17 nt, Human
acgcuggagugcaguga

SEQ ID NO: 2056960 - RNA, 23 nt, Human
acggagucccaccuuggcugcag

SEQ ID NO: 2056961 - RNA, 20 nt, Human
acggauccauguagcaggac

SEQ ID NO: 2056962 - RNA, 18 nt, Human
acggcuuuuacuuaaacc

SEQ ID NO: 2056963 - RNA, 21 nt, Human
acggauccauguagcaggacu

SEQ ID NO: 2056964 - RNA, 12 nt, Human
acggccaggcca

SEQ ID NO: 2056965 - RNA, 18 nt, Human
acggcucacugcagccuc

SEQ ID NO: 2056966 - RNA, 17 nt, Human
acggcucacugcagccu

SEQ ID NO: 2056967 - RNA, 16 nt, Human
acggcucacugcagcc

SEQ ID NO: 2056968 - RNA, 18 nt, Human
uccagugcaacacugaag

SEQ ID NO: 2056969 - RNA, 18 nt, Human
uccagugagcuuaucaug

SEQ ID NO: 2056970 - RNA, 14 nt, Human
uccagugcaauugu

SEQ ID NO: 2056971 - RNA, 16 nt, Human
uccaguggccuggcuc

SEQ ID NO: 2056972 - RNA, 17 nt, Human
uccaguggccuggcucc

SEQ ID NO: 2056973 - RNA, 20 nt, Human
uccaguggccuggcuccgcu

SEQ ID NO: 2056974 - RNA, 22 nt, Human
uccaguggccuggcuccgcugu

SEQ ID NO: 2056975 - RNA, 23 nt, Human
uccaguggccuggcuccgcugug

SEQ ID NO: 2056976 - RNA, 19 nt, Human
uccaguggaagaagaaaac

SEQ ID NO: 2056977 - RNA, 22 nt, Human
uccaguggaagaagaaaacacu

SEQ ID NO: 2056978 - RNA, 13 nt, Human
uccagucugcugc

SEQ ID NO: 2056979 - RNA, 14 nt, Human
uccagucugcugcc

SEQ ID NO: 2056980 - RNA, 15 nt, Human
uccagucugcugccc

SEQ ID NO: 2056981 - RNA, 17 nt, Human
uccaguaccuuugucac

SEQ ID NO: 2056982 - RNA, 15 nt, Human
uccaguacuggagcu

SEQ ID NO: 2056983 - RNA, 21 nt, Human
uccaguacuggagcuucucuu

SEQ ID NO: 2056984 - RNA, 13 nt, Human
uccaguccugcuc

SEQ ID NO: 2056985 - RNA, 14 nt, Human
uccaguccugcucu

SEQ ID NO: 2056986 - RNA, 15 nt, Human
uccaguccugcucuc

SEQ ID NO: 2056987 - RNA, 16 nt, Human
uccaguccugcucucu

SEQ ID NO: 2056988 - RNA, 17 nt, Human
uccaguccugcucucua

SEQ ID NO: 2056989 - RNA, 21 nt, Human
uccaguccugcucucuaccca

SEQ ID NO: 2056990 - RNA, 16 nt, Human
acugcaacuucugccu

SEQ ID NO: 2056991 - RNA, 20 nt, Human
acugcaacuuguaaaugugg

SEQ ID NO: 2056992 - RNA, 14 nt, Human
acugcaacuucugc

SEQ ID NO: 2056993 - RNA, 14 nt, Human
acugagcagacugg

SEQ ID NO: 2056994 - RNA, 23 nt, Human
acugagcagacuggugagcagac

SEQ ID NO: 2056995 - RNA, 13 nt, Human
acugagcagacug

SEQ ID NO: 2056996 - RNA, 12 nt, Human
acugagcagacu

SEQ ID NO: 2056997 - RNA, 18 nt, Human
acugagcauagugguggg

SEQ ID NO: 2056998 - RNA, 14 nt, Human
acugcaccgggcca

SEQ ID NO: 2056999 - RNA, 20 nt, Human
acugcacuauagccuaggug

SEQ ID NO: 2057000 - RNA, 16 nt, Human
acugcaccgggccaca

SEQ ID NO: 2057001 - RNA, 15 nt, Human
acugcaauagagacu

SEQ ID NO: 2057002 - RNA, 16 nt, Human
acugcaauagagacug

SEQ ID NO: 2057003 - RNA, 17 nt, Human
acugcaauagagacugu

SEQ ID NO: 2057004 - RNA, 18 nt, Human
acugcaauagagacugua

SEQ ID NO: 2057005 - RNA, 19 nt, Human
acugcaauagagacuguag

SEQ ID NO: 2057006 - RNA, 23 nt, Human
acugcacagugcaucucagccca

SEQ ID NO: 2057007 - RNA, 22 nt, Human
acugcacagugcaucucagccc

SEQ ID NO: 2057008 - RNA, 18 nt, Human
acugcaagagccuuggug

SEQ ID NO: 2057009 - RNA, 20 nt, Human
acugcaagugagcaaaccug

SEQ ID NO: 2057010 - RNA, 15 nt, Human
acugcaagagccuug

SEQ ID NO: 2057011 - RNA, 16 nt, Human
acugcaagagccuugg

SEQ ID NO: 2057012 - RNA, 17 nt, Human
acugcaagagccuuggu

SEQ ID NO: 2057013 - RNA, 15 nt, Human
acugcaagucacaaa

SEQ ID NO: 2057014 - RNA, 17 nt, Human
acugcaagucacaaagg

SEQ ID NO: 2057015 - RNA, 18 nt, Human
acugcaagucacaaagga

SEQ ID NO: 2057016 - RNA, 19 nt, Human
acugcaagucacaaaggaa

SEQ ID NO: 2057017 - RNA, 20 nt, Human
acugcaagucacaaaggaau

SEQ ID NO: 2057018 - RNA, 21 nt, Human
acugcaagucacaaaggaaug

SEQ ID NO: 2057019 - RNA, 17 nt, Human
acugcacucuagccgga

SEQ ID NO: 2057020 - RNA, 18 nt, Human
acugcacucuagccggag

SEQ ID NO: 2057021 - RNA, 14 nt, Human
uccugaugacccag

SEQ ID NO: 2057022 - RNA, 15 nt, Human
uccugaugacccagg

SEQ ID NO: 2057023 - RNA, 16 nt, Human
uccugaugacccaggc

SEQ ID NO: 2057024 - RNA, 17 nt, Human
uccugaugacccaggcu

SEQ ID NO: 2057025 - RNA, 20 nt, Human
uccugaugacccaggcugcc

SEQ ID NO: 2057026 - RNA, 22 nt, Human
uccugaugacccaggcugccug

SEQ ID NO: 2057027 - RNA, 16 nt, Human
acugcacuccagccug

SEQ ID NO: 2057028 - RNA, 21 nt, Human
acugcacuauagccuagguga

SEQ ID NO: 2057029 - RNA, 14 nt, Human
acugcacuccagcc

SEQ ID NO: 2057030 - RNA, 16 nt, Human
acugcacguggcuucu

SEQ ID NO: 2057031 - RNA, 19 nt, Human
acugcacguggcuucugau

SEQ ID NO: 2057032 - RNA, 20 nt, Human
acugcacguggcuucugaug

SEQ ID NO: 2057033 - RNA, 15 nt, Human
acugcacuccagccu

SEQ ID NO: 2057034 - RNA, 17 nt, Human
acugcacuccagccugg

SEQ ID NO: 2057035 - RNA, 18 nt, Human
acugcacuccagccuggg

SEQ ID NO: 2057036 - RNA, 19 nt, Human
acugcacuccagccugggc

SEQ ID NO: 2057037 - RNA, 20 nt, Human
acugcacuccagccugggca

SEQ ID NO: 2057038 - RNA, 20 nt, Human
acugcacuccagccugggcg

SEQ ID NO: 2057039 - RNA, 21 nt, Human
acugcacuccagccugggcga

SEQ ID NO: 2057040 - RNA, 19 nt, Human
acugcacuccagccugggu

SEQ ID NO: 2057041 - RNA, 20 nt, Human
acugcacuccagccugggug

SEQ ID NO: 2057042 - RNA, 15 nt, Human
uccuggaaauauuaa

SEQ ID NO: 2057043 - RNA, 23 nt, Human
uccugcgggcuuuuccccggucc

SEQ ID NO: 2057044 - RNA, 21 nt, Human
uccuggaagcuguguccuugc

SEQ ID NO: 2057045 - RNA, 14 nt, Human
uccuggaagcugug

SEQ ID NO: 2057046 - RNA, 22 nt, Human
uccuggaaaggcucagucucag

SEQ ID NO: 2057047 - RNA, 16 nt, Human
uccuggaaaggcucag

SEQ ID NO: 2057048 - RNA, 19 nt, Human
uccuggaaaggcucagucu

SEQ ID NO: 2057049 - RNA, 17 nt, Human
uccugggagugagcugg

SEQ ID NO: 2057050 - RNA, 14 nt, Human
uccugggagugagc

SEQ ID NO: 2057051 - RNA, 12 nt, Human
uccugggaguga

SEQ ID NO: 2057052 - RNA, 19 nt, Human
uccugggagaaccucaggc

SEQ ID NO: 2057053 - RNA, 20 nt, Human
uccugggagaaccucaggcu

SEQ ID NO: 2057054 - RNA, 17 nt, Human
uccugggagaaccucag

SEQ ID NO: 2057055 - RNA, 18 nt, Human
uccugggagaaccucagg

SEQ ID NO: 2057056 - RNA, 15 nt, Human
uccuggcuuugccca

SEQ ID NO: 2057057 - RNA, 16 nt, Human
uccuggcuuugcccaa

SEQ ID NO: 2057058 - RNA, 17 nt, Human
uccuggcuuugcccaac

SEQ ID NO: 2057059 - RNA, 23 nt, Human
uccuggcuuugcccaaccucagc

SEQ ID NO: 2057060 - RNA, 13 nt, Human
uccuggcucagcc

SEQ ID NO: 2057061 - RNA, 16 nt, Human
uccuggcucagccuca

SEQ ID NO: 2057062 - RNA, 13 nt, Human
uccuggcuccuga

SEQ ID NO: 2057063 - RNA, 16 nt, Human
uccuggcuccugaggg

SEQ ID NO: 2057064 - RNA, 14 nt, Human
uccugccugugcug

SEQ ID NO: 2057065 - RNA, 20 nt, Human
uccugcgggcuuuuccccgg

SEQ ID NO: 2057066 - RNA, 12 nt, Human
uccugcgggcuu

SEQ ID NO: 2057067 - RNA, 12 nt, Human
uccugccugugc

SEQ ID NO: 2057068 - RNA, 14 nt, Human
uccugccuggccag

SEQ ID NO: 2057069 - RNA, 16 nt, Human
uccugccuggccaggc

SEQ ID NO: 2057070 - RNA, 14 nt, Human
uccugccuggucuc

SEQ ID NO: 2057071 - RNA, 17 nt, Human
uccugccuggucuccug

SEQ ID NO: 2057072 - RNA, 18 nt, Human
uccugccuggucuccugc

SEQ ID NO: 2057073 - RNA, 21 nt, Human
uccugccuggucuccugcccc

SEQ ID NO: 2057074 - RNA, 23 nt, Human
uccugccuggucuccugccccca

SEQ ID NO: 2057075 - RNA, 20 nt, Human
uccugccugucuccuuugca

SEQ ID NO: 2057076 - RNA, 17 nt, Human
uccugcagccuggaggc

SEQ ID NO: 2057077 - RNA, 14 nt, Human
uccugcagccugga

SEQ ID NO: 2057078 - RNA, 12 nt, Human
uccugccuggcc

SEQ ID NO: 2057079 - RNA, 13 nt, Human
uccugccuggcca

SEQ ID NO: 2057080 - RNA, 13 nt, Human
acugaacauucca

SEQ ID NO: 2057081 - RNA, 16 nt, Human
acugaacauuccagag

SEQ ID NO: 2057082 - RNA, 18 nt, Human
acucuuuuuguuuuuugu

SEQ ID NO: 2057083 - RNA, 19 nt, Human
acugaacauguacacuggu

SEQ ID NO: 2057084 - RNA, 12 nt, Human
acucuuguaaga

SEQ ID NO: 2057085 - RNA, 13 nt, Human
acucuuguaagau

SEQ ID NO: 2057086 - RNA, 14 nt, Human
acucuuguaagauu

SEQ ID NO: 2057087 - RNA, 15 nt, Human
acucuuguaagauuu

SEQ ID NO: 2057088 - RNA, 16 nt, Human
acucuuguaagauuuu

SEQ ID NO: 2057089 - RNA, 18 nt, Human
acucuuguaagauuuuga

SEQ ID NO: 2057090 - RNA, 19 nt, Human
acucuuguaagauuuugaa

SEQ ID NO: 2057091 - RNA, 20 nt, Human
acucuuguaagauuuugaaa

SEQ ID NO: 2057092 - RNA, 21 nt, Human
acucuuguaagauuuugaaaa

SEQ ID NO: 2057093 - RNA, 22 nt, Human
acucuuguaagauuuugaaaac

SEQ ID NO: 2057094 - RNA, 23 nt, Human
acucuuguaagauuuugaaaacu

SEQ ID NO: 2057095 - RNA, 14 nt, Human
uccugaaugaaaua

SEQ ID NO: 2057096 - RNA, 19 nt, Human
uccugaaugaaauaucaga

SEQ ID NO: 2057097 - RNA, 18 nt, Human
acucugcccuacucacuc

SEQ ID NO: 2057098 - RNA, 19 nt, Human
uccugaaacuuacacacaa

SEQ ID NO: 2057099 - RNA, 18 nt, Human
uccugaaagaaacaguua

SEQ ID NO: 2057100 - RNA, 21 nt, Human
uccugaaagaaacaguuaacu

SEQ ID NO: 2057101 - RNA, 19 nt, Human
uccucuuuccaucuacccu

SEQ ID NO: 2057102 - RNA, 11 nt, Human
uccucccuccc

SEQ ID NO: 2057103 - RNA, 14 nt, Human
uccucccucccucu

SEQ ID NO: 2057104 - RNA, 11 nt, Human
uccucuuucca

SEQ ID NO: 2057105 - RNA, 12 nt, Human
uccucuuuccau

SEQ ID NO: 2057106 - RNA, 14 nt, Human
acugacuccuuaga

SEQ ID NO: 2057107 - RNA, 15 nt, Human
acugacccacagccu

SEQ ID NO: 2057108 - RNA, 20 nt, Human
acugacccacagccucugcc

SEQ ID NO: 2057109 - RNA, 18 nt, Human
acugacccucccuuccug

SEQ ID NO: 2057110 - RNA, 17 nt, Human
acugaccggaggcaaaa

SEQ ID NO: 2057111 - RNA, 23 nt, Human
acugagaaaacgaaacugcucua

SEQ ID NO: 2057112 - RNA, 16 nt, Human
acugagagaucugcug

SEQ ID NO: 2057113 - RNA, 17 nt, Human
acugagagaucugcugu

SEQ ID NO: 2057114 - RNA, 21 nt, Human
acugagcaagacccugucucu

SEQ ID NO: 2057115 - RNA, 17 nt, Human
acucuuaggaagagaaa

SEQ ID NO: 2057116 - RNA, 14 nt, Human
acucuugaccucag

SEQ ID NO: 2057117 - RNA, 20 nt, Human
acucuuaggaagagaaacca

SEQ ID NO: 2057118 - RNA, 19 nt, Human
acucuuaggaagagaaacc

SEQ ID NO: 2057119 - RNA, 16 nt, Human
acucuugaccucaggu

SEQ ID NO: 2057120 - RNA, 15 nt, Human
acucuugaccucagg

SEQ ID NO: 2057121 - RNA, 15 nt, Human
acucuuaguuacuca

SEQ ID NO: 2057122 - RNA, 22 nt, Human
uccucacccugauuucuugcuu

SEQ ID NO: 2057123 - RNA, 21 nt, Human
uccucccaggcgccccuuccc

SEQ ID NO: 2057124 - RNA, 19 nt, Human
uccucccaggcgccccuuc

SEQ ID NO: 2057125 - RNA, 13 nt, Human
uccucccaggcgc

SEQ ID NO: 2057126 - RNA, 22 nt, Human
uccucauaguaugguggcuggg

SEQ ID NO: 2057127 - RNA, 24 nt, Human
uccucagggacagagacaccugca

SEQ ID NO: 2057128 - RNA, 13 nt, Human
uccucaggcugcu

SEQ ID NO: 2057129 - RNA, 19 nt, Human
uccucaggcugcuggagga

SEQ ID NO: 2057130 - RNA, 16 nt, Human
uccucagggacagaga

SEQ ID NO: 2057131 - RNA, 18 nt, Human
uccucagggacagagaca

SEQ ID NO: 2057132 - RNA, 22 nt, Human
uccucagggacagagacaccug

SEQ ID NO: 2057133 - RNA, 17 nt, Human
uccucacucccagucca

SEQ ID NO: 2057134 - RNA, 12 nt, Human
uccucacuccca

SEQ ID NO: 2057135 - RNA, 13 nt, Human
uccucacucccag

SEQ ID NO: 2057136 - RNA, 14 nt, Human
uccucacucccagu

SEQ ID NO: 2057137 - RNA, 12 nt, Human
uccucaccucug

SEQ ID NO: 2057138 - RNA, 13 nt, Human
uccucaccucugg

SEQ ID NO: 2057139 - RNA, 15 nt, Human
uccucaccucuggac

SEQ ID NO: 2057140 - RNA, 16 nt, Human
uccucaccucuggacu

SEQ ID NO: 2057141 - RNA, 20 nt, Human
uccucaccucuggacuggcu

SEQ ID NO: 2057142 - RNA, 21 nt, Human
uccucaccucuggacuggcua

SEQ ID NO: 2057143 - RNA, 22 nt, Human
uccucaccucuggacuggcuag

SEQ ID NO: 2057144 - RNA, 23 nt, Human
uccucaccucuggacuggcuaga

SEQ ID NO: 2057145 - RNA, 13 nt, Human
acuccuuccugcc

SEQ ID NO: 2057146 - RNA, 20 nt, Human
acuccuuccugccaccugcu

SEQ ID NO: 2057147 - RNA, 15 nt, Human
acuccugggcucaag

SEQ ID NO: 2057148 - RNA, 21 nt, Human
acuccugggcucaagcagucu

SEQ ID NO: 2057149 - RNA, 16 nt, Human
acuccuggggccucuu

SEQ ID NO: 2057150 - RNA, 21 nt, Human
acuccuggggccucuuggguc

SEQ ID NO: 2057151 - RNA, 21 nt, Human
acuccuuccugccaccugcug

SEQ ID NO: 2057152 - RNA, 14 nt, Human
acucuccccucuua

SEQ ID NO: 2057153 - RNA, 22 nt, Human
acucuccgcggugguuguuggg

SEQ ID NO: 2057154 - RNA, 18 nt, Human
acucuccuggaaauauua

SEQ ID NO: 2057155 - RNA, 12 nt, Human
acucugccuccu

SEQ ID NO: 2057156 - RNA, 13 nt, Human
acucugccagcca

SEQ ID NO: 2057157 - RNA, 16 nt, Human
acucugccagccacau

SEQ ID NO: 2057158 - RNA, 16 nt, Human
acucugaguuuaccau

SEQ ID NO: 2057159 - RNA, 21 nt, Human
acucugaguuuaccauuugua

SEQ ID NO: 2057160 - RNA, 22 nt, Human
acucugaguuuaccauuuguaa

SEQ ID NO: 2057161 - RNA, 12 nt, Human
acucugauguaa

SEQ ID NO: 2057162 - RNA, 14 nt, Human
acucugauguaaau

SEQ ID NO: 2057163 - RNA, 17 nt, Human
acucugauguaaaugaa

SEQ ID NO: 2057164 - RNA, 16 nt, Human
acucugccuccucuuc

SEQ ID NO: 2057165 - RNA, 21 nt, Human
acucucuccacccuauaugua

SEQ ID NO: 2057166 - RNA, 13 nt, Human
acucucuccaccc

SEQ ID NO: 2057167 - RNA, 20 nt, Human
acucucuccacccuauaugu

SEQ ID NO: 2057168 - RNA, 11 nt, Human
acucuccuggg

SEQ ID NO: 2057169 - RNA, 12 nt, Human
acucuccugggc

SEQ ID NO: 2057170 - RNA, 13 nt, Human
acucuccugggcc

SEQ ID NO: 2057171 - RNA, 14 nt, Human
acucuccugggccc

SEQ ID NO: 2057172 - RNA, 15 nt, Human
acucuccugggcccc

SEQ ID NO: 2057173 - RNA, 16 nt, Human
acucuccugggccccu

SEQ ID NO: 2057174 - RNA, 17 nt, Human
acucuccugggccccuc

SEQ ID NO: 2057175 - RNA, 18 nt, Human
acucuccugggccccucc

SEQ ID NO: 2057176 - RNA, 21 nt, Human
acucugaggcucuuucugggc

SEQ ID NO: 2057177 - RNA, 23 nt, Human
acucugaggcucuuucugggcca

SEQ ID NO: 2057178 - RNA, 20 nt, Human
acuccucaaaagcaaaugag

SEQ ID NO: 2057179 - RNA, 21 nt, Human
acuccucaaaagcaaaugaga

SEQ ID NO: 2057180 - RNA, 14 nt, Human
acuccaugagaagc

SEQ ID NO: 2057181 - RNA, 17 nt, Human
acuccaugagaagccgu

SEQ ID NO: 2057182 - RNA, 14 nt, Human
acuccaucagcuua

SEQ ID NO: 2057183 - RNA, 19 nt, Human
acuccaucucaaaaaauaa

SEQ ID NO: 2057184 - RNA, 16 nt, Human
acucacaugcuggaca

SEQ ID NO: 2057185 - RNA, 18 nt, Human
acucacaugcuggacagg

SEQ ID NO: 2057186 - RNA, 21 nt, Human
acuccagaccccuggcuuuuc

SEQ ID NO: 2057187 - RNA, 19 nt, Human
acuccagaccccuggcuuu

SEQ ID NO: 2057188 - RNA, 18 nt, Human
acuccagaccccuggcuu

SEQ ID NO: 2057189 - RNA, 13 nt, Human
acuccagaucugc

SEQ ID NO: 2057190 - RNA, 15 nt, Human
acuccagaucugcac

SEQ ID NO: 2057191 - RNA, 16 nt, Human
acucacagagacacag

SEQ ID NO: 2057192 - RNA, 17 nt, Human
acucacagagacacagg

SEQ ID NO: 2057193 - RNA, 18 nt, Human
acucacagagacacaggg

SEQ ID NO: 2057194 - RNA, 15 nt, Human
acuccagaccccugg

SEQ ID NO: 2057195 - RNA, 13 nt, Human
acuccagaccccu

SEQ ID NO: 2057196 - RNA, 11 nt, Human
acuccuggccu

SEQ ID NO: 2057197 - RNA, 16 nt, Human
acuccucccugaugua

SEQ ID NO: 2057198 - RNA, 17 nt, Human
acuccucccugauguac

SEQ ID NO: 2057199 - RNA, 20 nt, Human
acuccucccugauguacagu

SEQ ID NO: 2057200 - RNA, 12 nt, Human
acuccucccagg

SEQ ID NO: 2057201 - RNA, 19 nt, Human
acuccucauuguaaacaaa

SEQ ID NO: 2057202 - RNA, 14 nt, Human
acuccuggccucaa

SEQ ID NO: 2057203 - RNA, 13 nt, Human
acuccuggccuca

SEQ ID NO: 2057204 - RNA, 12 nt, Human
acuccuggccuc

SEQ ID NO: 2057205 - RNA, 13 nt, Human
uccuaggcauuug

SEQ ID NO: 2057206 - RNA, 12 nt, Human
uccuagcugugu

SEQ ID NO: 2057207 - RNA, 14 nt, Human
uccuagcugugugc

SEQ ID NO: 2057208 - RNA, 15 nt, Human
uccuagcugugugca

SEQ ID NO: 2057209 - RNA, 21 nt, Human
uccuagcuugggaggcuuccc

SEQ ID NO: 2057210 - RNA, 22 nt, Human
uccuagcuugggaggcuucccc

SEQ ID NO: 2057211 - RNA, 18 nt, Human
uccuaggaguauccucau

SEQ ID NO: 2057212 - RNA, 15 nt, Human
uccguaguucccuga

SEQ ID NO: 2057213 - RNA, 14 nt, Human
uccguaguucccug

SEQ ID NO: 2057214 - RNA, 15 nt, Human
uccuacucuguguca

SEQ ID NO: 2057215 - RNA, 13 nt, Human
uccguauuucaga

SEQ ID NO: 2057216 - RNA, 14 nt, Human
uccuacucuguguc

SEQ ID NO: 2057217 - RNA, 13 nt, Human
uccuacucugugu

SEQ ID NO: 2057218 - RNA, 18 nt, Human
uccggugugccugcagcc

SEQ ID NO: 2057219 - RNA, 19 nt, Human
uccggugugccugcagccc

SEQ ID NO: 2057220 - RNA, 15 nt, Human
ucccuuugaaaugaa

SEQ ID NO: 2057221 - RNA, 18 nt, Human
uccgguggaaggccuucu

SEQ ID NO: 2057222 - RNA, 12 nt, Human
uccggugugccu

SEQ ID NO: 2057223 - RNA, 15 nt, Human
uccggugugccugca

SEQ ID NO: 2057224 - RNA, 17 nt, Human
uccggugugccugcagc

SEQ ID NO: 2057225 - RNA, 16 nt, Human
ucccuuggccucagaa

SEQ ID NO: 2057226 - RNA, 12 nt, Human
ucccuuggccuc

SEQ ID NO: 2057227 - RNA, 13 nt, Human
ucccuuggccuca

SEQ ID NO: 2057228 - RNA, 14 nt, Human
ucccuuggccucag

SEQ ID NO: 2057229 - RNA, 12 nt, Human
acuccuggaaau

SEQ ID NO: 2057230 - RNA, 13 nt, Human
acuccuggaagcu

SEQ ID NO: 2057231 - RNA, 16 nt, Human
acuccuggaagcugug

SEQ ID NO: 2057232 - RNA, 22 nt, Human
agaaagcccuuaggaagaauuu

SEQ ID NO: 2057233 - RNA, 20 nt, Human
agaaagcccuuaggaagaau

SEQ ID NO: 2057234 - RNA, 15 nt, Human
agaaagccucagaga

SEQ ID NO: 2057235 - RNA, 21 nt, Human
agaaagccucagagaauugcu

SEQ ID NO: 2057236 - RNA, 14 nt, Human
agaaauaugugguu

SEQ ID NO: 2057237 - RNA, 15 nt, Human
agaaauaugugguuu

SEQ ID NO: 2057238 - RNA, 16 nt, Human
agaaaugcaaauucuc

SEQ ID NO: 2057239 - RNA, 18 nt, Human
agaaaugcaaauucucaa

SEQ ID NO: 2057240 - RNA, 13 nt, Human
agaaaugcacaau

SEQ ID NO: 2057241 - RNA, 19 nt, Human
agaaaugcacaaugucuug

SEQ ID NO: 2057242 - RNA, 13 nt, Human
agaaaugaaauuu

SEQ ID NO: 2057243 - RNA, 14 nt, Human
agaaaugaaauuuu

SEQ ID NO: 2057244 - RNA, 18 nt, Human
agaaaugaaauuuuacca

SEQ ID NO: 2057245 - RNA, 19 nt, Human
agaaaugaaauuuuaccaa

SEQ ID NO: 2057246 - RNA, 20 nt, Human
agaaaugaaauuuuaccaag

SEQ ID NO: 2057247 - RNA, 23 nt, Human
agaaaugaaauuuuaccaaguua

SEQ ID NO: 2057248 - RNA, 12 nt, Human
agaaaugaauaa

SEQ ID NO: 2057249 - RNA, 19 nt, Human
agaaaugaauaauuuccca

SEQ ID NO: 2057250 - RNA, 23 nt, Human
agaaaugaccaauauuauacuaa

SEQ ID NO: 2057251 - RNA, 14 nt, Human
ucuccuuucaggga

SEQ ID NO: 2057252 - RNA, 15 nt, Human
ucuccuuucuuucua

SEQ ID NO: 2057253 - RNA, 16 nt, Human
ucuccuuucacaaccu

SEQ ID NO: 2057254 - RNA, 19 nt, Human
ucuccuuagucuucucaua

SEQ ID NO: 2057255 - RNA, 14 nt, Human
acuuuugugugaaa

SEQ ID NO: 2057256 - RNA, 17 nt, Human
ucuccuuugcaggcuca

SEQ ID NO: 2057257 - RNA, 21 nt, Human
agaaagccaaaucaaaauaug

SEQ ID NO: 2057258 - RNA, 21 nt, Human
ucugaaggacauugcggacag

SEQ ID NO: 2057259 - RNA, 22 nt, Human
agaaaugcauccauuccucagg

SEQ ID NO: 2057260 - RNA, 18 nt, Human
agaaaugcauccauuccu

SEQ ID NO: 2057261 - RNA, 22 nt, Human
ucugaaggacauugcggacagc

SEQ ID NO: 2057262 - RNA, 12 nt, Human
ucugaauguaau

SEQ ID NO: 2057263 - RNA, 14 nt, Human
ucugaauguaauuu

SEQ ID NO: 2057264 - RNA, 16 nt, Human
ucugaauguaauuugu

SEQ ID NO: 2057265 - RNA, 20 nt, Human
ucugaauguaauuuguguaa

SEQ ID NO: 2057266 - RNA, 21 nt, Human
ucugaauguaauuuguguaau

SEQ ID NO: 2057267 - RNA, 23 nt, Human
ucugaauguaauuuguguaauaa

SEQ ID NO: 2057268 - RNA, 12 nt, Human
ucugaauguucu

SEQ ID NO: 2057269 - RNA, 13 nt, Human
ucugaauguucug

SEQ ID NO: 2057270 - RNA, 14 nt, Human
ucugaauguucuga

SEQ ID NO: 2057271 - RNA, 16 nt, Human
ucugaauguucugaca

SEQ ID NO: 2057272 - RNA, 17 nt, Human
ucugaauguucugacau

SEQ ID NO: 2057273 - RNA, 19 nt, Human
ucugaauguucugacauua

SEQ ID NO: 2057274 - RNA, 22 nt, Human
ucugaauguucugacauuaaca

SEQ ID NO: 2057275 - RNA, 12 nt, Human
ucugacucccaa

SEQ ID NO: 2057276 - RNA, 19 nt, Human
ucugacucccaaagagcug

SEQ ID NO: 2057277 - RNA, 15 nt, Human
ucugacacacagcuc

SEQ ID NO: 2057278 - RNA, 14 nt, Human
ucugacacacagcu

SEQ ID NO: 2057279 - RNA, 13 nt, Human
ucugacacacagc

SEQ ID NO: 2057280 - RNA, 23 nt, Human
ucugaauguucugacauuaacag

SEQ ID NO: 2057281 - RNA, 14 nt, Human
ucugaauuccaagu

SEQ ID NO: 2057282 - RNA, 13 nt, Human
ucugcaggcaggg

SEQ ID NO: 2057283 - RNA, 21 nt, Human
ucugaugcaagcaagaaacac

SEQ ID NO: 2057284 - RNA, 14 nt, Human
ucugcaggcagggc

SEQ ID NO: 2057285 - RNA, 16 nt, Human
ucugaugcaagcaaga

SEQ ID NO: 2057286 - RNA, 12 nt, Human
ucugaugaaucu

SEQ ID NO: 2057287 - RNA, 13 nt, Human
ucugaugaaucuu

SEQ ID NO: 2057288 - RNA, 14 nt, Human
ucugaugaaucuug

SEQ ID NO: 2057289 - RNA, 17 nt, Human
ucugaucguucuuucua

SEQ ID NO: 2057290 - RNA, 21 nt, Human
ucugaucauccacugugccau

SEQ ID NO: 2057291 - RNA, 17 nt, Human
ucugaucauccacugug

SEQ ID NO: 2057292 - RNA, 20 nt, Human
agaaagccagucuuaacauu

SEQ ID NO: 2057293 - RNA, 22 nt, Human
ucugacucuccgcggugguugu

SEQ ID NO: 2057294 - RNA, 14 nt, Human
ucugacugcacgug

SEQ ID NO: 2057295 - RNA, 20 nt, Human
ucugacugcacguggcuucu

SEQ ID NO: 2057296 - RNA, 23 nt, Human
ucugagaaggggaggaccucugg

SEQ ID NO: 2057297 - RNA, 17 nt, Human
ucugagaagguccuuaa

SEQ ID NO: 2057298 - RNA, 18 nt, Human
ucugagaagguccuuaau

SEQ ID NO: 2057299 - RNA, 20 nt, Human
ucugagaagguccuuaauga

SEQ ID NO: 2057300 - RNA, 16 nt, Human
ucugagucaacuccuu

SEQ ID NO: 2057301 - RNA, 23 nt, Human
ucugaguaucuccucgcaagcug

SEQ ID NO: 2057302 - RNA, 18 nt, Human
ucugaguaucuccucgca

SEQ ID NO: 2057303 - RNA, 20 nt, Human
agaaauugcauuuccugaca

SEQ ID NO: 2057304 - RNA, 17 nt, Human
agaaauugcauuuccug

SEQ ID NO: 2057305 - RNA, 23 nt, Human
agaaauuccuugauucacaauga

SEQ ID NO: 2057306 - RNA, 22 nt, Human
agaacuggacucaggaugccca

SEQ ID NO: 2057307 - RNA, 22 nt, Human
agaacugcuuuaucccacggaa

SEQ ID NO: 2057308 - RNA, 23 nt, Human
agaacugcauggaccuaacauuc

SEQ ID NO: 2057309 - RNA, 15 nt, Human
agaacuggacucagg

SEQ ID NO: 2057310 - RNA, 16 nt, Human
agaacuggacucagga

SEQ ID NO: 2057311 - RNA, 17 nt, Human
agaacuggacucaggau

SEQ ID NO: 2057312 - RNA, 20 nt, Human
agaacuggacucaggaugcc

SEQ ID NO: 2057313 - RNA, 17 nt, Human
agaagaauugaacccag

SEQ ID NO: 2057314 - RNA, 20 nt, Human
agaagaauugaacccaggag

SEQ ID NO: 2057315 - RNA, 14 nt, Human
agaagaauauuguu

SEQ ID NO: 2057316 - RNA, 20 nt, Human
agaagaauauuguuccuaag

SEQ ID NO: 2057317 - RNA, 22 nt, Human
agaagaauauuguuccuaaguu

SEQ ID NO: 2057318 - RNA, 19 nt, Human
agaagaauugaacccagga

SEQ ID NO: 2057319 - RNA, 22 nt, Human
agaagaauuuucagaccccagc

SEQ ID NO: 2057320 - RNA, 23 nt, Human
agaagaauuuucagaccccagcg

SEQ ID NO: 2057321 - RNA, 13 nt, Human
agaagaacaucca

SEQ ID NO: 2057322 - RNA, 12 nt, Human
agaagaaaugaa

SEQ ID NO: 2057323 - RNA, 13 nt, Human
agaagaaaugaaa

SEQ ID NO: 2057324 - RNA, 14 nt, Human
agaagaaaugaaau

SEQ ID NO: 2057325 - RNA, 17 nt, Human
agaagaaaugaaauuuu

SEQ ID NO: 2057326 - RNA, 18 nt, Human
agaagaaaugaaauuuua

SEQ ID NO: 2057327 - RNA, 19 nt, Human
agaagaaaugaaauuuuac

SEQ ID NO: 2057328 - RNA, 20 nt, Human
agaagaauacaaacauauuu

SEQ ID NO: 2057329 - RNA, 19 nt, Human
agaagaacuagagguuuua

SEQ ID NO: 2057330 - RNA, 23 nt, Human
agaagaacuagagguuuuaugau

SEQ ID NO: 2057331 - RNA, 18 nt, Human
agaagauuuugaaauuuu

SEQ ID NO: 2057332 - RNA, 17 nt, Human
agaagcaacagaaaaaa

SEQ ID NO: 2057333 - RNA, 21 nt, Human
agaagcccaauauuauaauuu

SEQ ID NO: 2057334 - RNA, 17 nt, Human
agaagccaaaagauugg

SEQ ID NO: 2057335 - RNA, 13 nt, Human
ucugcuucagcuu

SEQ ID NO: 2057336 - RNA, 14 nt, Human
ucugcuucagcuug

SEQ ID NO: 2057337 - RNA, 20 nt, Human
ucugcuugccgaaacuggaa

SEQ ID NO: 2057338 - RNA, 18 nt, Human
ucugcuugcucuuguccu

SEQ ID NO: 2057339 - RNA, 13 nt, Human
ucugcuucagccu

SEQ ID NO: 2057340 - RNA, 23 nt, Human
ucugcuccacccuuggccugucu

SEQ ID NO: 2057341 - RNA, 20 nt, Human
ucugcuccacccuuggccug

SEQ ID NO: 2057342 - RNA, 21 nt, Human
ucugcuccacccuuggccugu

SEQ ID NO: 2057343 - RNA, 15 nt, Human
ucugcuucagccucc

SEQ ID NO: 2057344 - RNA, 14 nt, Human
ucugcuucagccuc

SEQ ID NO: 2057345 - RNA, 10 nt, Human
ucugcuccac

SEQ ID NO: 2057346 - RNA, 12 nt, Human
ucugcuccacca

SEQ ID NO: 2057347 - RNA, 14 nt, Human
ucugcuccaccaca

SEQ ID NO: 2057348 - RNA, 20 nt, Human
ucugcuccaccacauccucc

SEQ ID NO: 2057349 - RNA, 12 nt, Human
ucugcuccaccc

SEQ ID NO: 2057350 - RNA, 14 nt, Human
ucugcuccacccuu

SEQ ID NO: 2057351 - RNA, 15 nt, Human
ucugcuccacccuug

SEQ ID NO: 2057352 - RNA, 16 nt, Human
ucugcuccacccuugg

SEQ ID NO: 2057353 - RNA, 17 nt, Human
ucugcuccacccuuggc

SEQ ID NO: 2057354 - RNA, 18 nt, Human
ucugcuccacccuuggcc

SEQ ID NO: 2057355 - RNA, 19 nt, Human
ucugcuccacccuuggccu

SEQ ID NO: 2057356 - RNA, 20 nt, Human
ucugcucacauaucugucau

SEQ ID NO: 2057357 - RNA, 19 nt, Human
ucugcucacauaucuguca

SEQ ID NO: 2057358 - RNA, 21 nt, Human
ucugcuaacuuggagccccag

SEQ ID NO: 2057359 - RNA, 22 nt, Human
ucugccugcccaggccccugcc

SEQ ID NO: 2057360 - RNA, 21 nt, Human
ucugccugcccaggccccugc

SEQ ID NO: 2057361 - RNA, 12 nt, Human
ucugccuguccc

SEQ ID NO: 2057362 - RNA, 22 nt, Human
ucugcgugguuccuuucucagc

SEQ ID NO: 2057363 - RNA, 15 nt, Human
ucugcgucuguguug

SEQ ID NO: 2057364 - RNA, 18 nt, Human
ucugcccucccuccuucc

SEQ ID NO: 2057365 - RNA, 14 nt, Human
ucugcccugcccac

SEQ ID NO: 2057366 - RNA, 18 nt, Human
ucugcccugcccuagcuc

SEQ ID NO: 2057367 - RNA, 16 nt, Human
ucuguugcccaggcug

SEQ ID NO: 2057368 - RNA, 18 nt, Human
ucuguugccacaacccug

SEQ ID NO: 2057369 - RNA, 17 nt, Human
ucuguuggccaguguga

SEQ ID NO: 2057370 - RNA, 12 nt, Human
ucuguuggccag

SEQ ID NO: 2057371 - RNA, 12 nt, Human
ucuguugaaguu

SEQ ID NO: 2057372 - RNA, 16 nt, Human
agaauucuuacauguu

SEQ ID NO: 2057373 - RNA, 17 nt, Human
agaauucuuacauguuu

SEQ ID NO: 2057374 - RNA, 19 nt, Human
agaauucuuacauguuuuc

SEQ ID NO: 2057375 - RNA, 20 nt, Human
agaauucuuacauguuuucu

SEQ ID NO: 2057376 - RNA, 23 nt, Human
agaauucuuacauguuuucuuug

SEQ ID NO: 2057377 - RNA, 14 nt, Human
agaauucuuucaag

SEQ ID NO: 2057378 - RNA, 17 nt, Human
agaauucuucaggugga

SEQ ID NO: 2057379 - RNA, 13 nt, Human
agaauucuuucaa

SEQ ID NO: 2057380 - RNA, 16 nt, Human
agaauugaacccagga

SEQ ID NO: 2057381 - RNA, 17 nt, Human
agaauugaacccaggag

SEQ ID NO: 2057382 - RNA, 15 nt, Human
ucuguuguguucguu

SEQ ID NO: 2057383 - RNA, 12 nt, Human
ucuguuguuuuu

SEQ ID NO: 2057384 - RNA, 17 nt, Human
ucuguuuaaaguagauu

SEQ ID NO: 2057385 - RNA, 18 nt, Human
ucugucagaugggaagac

SEQ ID NO: 2057386 - RNA, 19 nt, Human
ucugucagaugggaagaca

SEQ ID NO: 2057387 - RNA, 23 nt, Human
ucugggccaaguuccucuagugc

SEQ ID NO: 2057388 - RNA, 18 nt, Human
ucugggccaagucaaaga

SEQ ID NO: 2057389 - RNA, 23 nt, Human
ucuguauuugaaucagccuacag

SEQ ID NO: 2057390 - RNA, 21 nt, Human
ucugugaacgauuuagaaaga

SEQ ID NO: 2057391 - RNA, 17 nt, Human
ucugugaacgauuuaga

SEQ ID NO: 2057392 - RNA, 17 nt, Human
ucugugaaaugcuggca

SEQ ID NO: 2057393 - RNA, 20 nt, Human
ucugugaaaugcuggcauuu

SEQ ID NO: 2057394 - RNA, 16 nt, Human
agacacaggcccggcu

SEQ ID NO: 2057395 - RNA, 17 nt, Human
agacacaggauagauaa

SEQ ID NO: 2057396 - RNA, 23 nt, Human
agacacaggauagauaacucuuu

SEQ ID NO: 2057397 - RNA, 13 nt, Human
agacacaggcccg

SEQ ID NO: 2057398 - RNA, 12 nt, Human
agacacaggccc

SEQ ID NO: 2057399 - RNA, 13 nt, Human
agacacacacaca

SEQ ID NO: 2057400 - RNA, 21 nt, Human
agaauuuuaagugcuuuguaa

SEQ ID NO: 2057401 - RNA, 22 nt, Human
agaauuuuaagugcuuuguaau

SEQ ID NO: 2057402 - RNA, 12 nt, Human
agacacacacac

SEQ ID NO: 2057403 - RNA, 22 nt, Human
agaauugaacccaggaggugga

SEQ ID NO: 2057404 - RNA, 18 nt, Human
agaauugaacccaggagg

SEQ ID NO: 2057405 - RNA, 19 nt, Human
agaauugaacccaggaggu

SEQ ID NO: 2057406 - RNA, 20 nt, Human
agaauugauauacacggaug

SEQ ID NO: 2057407 - RNA, 21 nt, Human
agaauugaucauuuucccccc

SEQ ID NO: 2057408 - RNA, 22 nt, Human
agaauugaucauuuucccccca

SEQ ID NO: 2057409 - RNA, 16 nt, Human
agaauuuuaagugcuu

SEQ ID NO: 2057410 - RNA, 13 nt, Human
agaauuuuaaauu

SEQ ID NO: 2057411 - RNA, 15 nt, Human
agaauuuuaaauuau

SEQ ID NO: 2057412 - RNA, 18 nt, Human
agaauuuuaaauuauaac

SEQ ID NO: 2057413 - RNA, 20 nt, Human
agacacuucuaaaugaagug

SEQ ID NO: 2057414 - RNA, 15 nt, Human
agacacuugauacuu

SEQ ID NO: 2057415 - RNA, 18 nt, Human
agacacuguuuacaagaa

SEQ ID NO: 2057416 - RNA, 19 nt, Human
agacacuguuuacaagaaa

SEQ ID NO: 2057417 - RNA, 20 nt, Human
agacacuguuuacaagaaaa

SEQ ID NO: 2057418 - RNA, 22 nt, Human
agacacuguuuacaagaaaaaa

SEQ ID NO: 2057419 - RNA, 22 nt, Human
agacagagccccacccucagau

SEQ ID NO: 2057420 - RNA, 24 nt, Human
agacagagccccacccucagaugc

SEQ ID NO: 2057421 - RNA, 17 nt, Human
agacaccuugacagggc

SEQ ID NO: 2057422 - RNA, 19 nt, Human
agacaccguucauucaggc

SEQ ID NO: 2057423 - RNA, 12 nt, Human
agacaccucaga

SEQ ID NO: 2057424 - RNA, 14 nt, Human
agacaccucagagc

SEQ ID NO: 2057425 - RNA, 15 nt, Human
agacaccucagagcc

SEQ ID NO: 2057426 - RNA, 16 nt, Human
agacaccucagagccc

SEQ ID NO: 2057427 - RNA, 14 nt, Human
agacaccugcaccu

SEQ ID NO: 2057428 - RNA, 16 nt, Human
agacaccugcaccucc

SEQ ID NO: 2057429 - RNA, 17 nt, Human
agacaccugcaccuccc

SEQ ID NO: 2057430 - RNA, 21 nt, Human
agacaccugcaccucccccca

SEQ ID NO: 2057431 - RNA, 18 nt, Human
agacaccuugacagggca

SEQ ID NO: 2057432 - RNA, 20 nt, Human
agacaccugcaccucccccc

SEQ ID NO: 2057433 - RNA, 19 nt, Human
agacacugaccauccacuc

SEQ ID NO: 2057434 - RNA, 15 nt, Human
agacacagggcaucc

SEQ ID NO: 2057435 - RNA, 21 nt, Human
agacacagggcauccaacuga

SEQ ID NO: 2057436 - RNA, 21 nt, Human
agaauugauuucccuucuucu

SEQ ID NO: 2057437 - RNA, 17 nt, Human
agacacauccagcaauu

SEQ ID NO: 2057438 - RNA, 13 nt, Human
agaauucagcugc

SEQ ID NO: 2057439 - RNA, 14 nt, Human
agaauucagcugcc

SEQ ID NO: 2057440 - RNA, 15 nt, Human
agaauucagcugccc

SEQ ID NO: 2057441 - RNA, 16 nt, Human
agaauucagcugcccc

SEQ ID NO: 2057442 - RNA, 17 nt, Human
agaauucagcugccccc

SEQ ID NO: 2057443 - RNA, 14 nt, Human
ucugggcaggaccu

SEQ ID NO: 2057444 - RNA, 18 nt, Human
ucugggcaggaccucaga

SEQ ID NO: 2057445 - RNA, 19 nt, Human
ucugggcaggaccucagag

SEQ ID NO: 2057446 - RNA, 12 nt, Human
ucugggccaagu

SEQ ID NO: 2057447 - RNA, 16 nt, Human
ucugggccaaguuccu

SEQ ID NO: 2057448 - RNA, 19 nt, Human
ucugggccaaguuccucua

SEQ ID NO: 2057449 - RNA, 14 nt, Human
agaauguuuuccuu

SEQ ID NO: 2057450 - RNA, 16 nt, Human
agaauguuuuccuucu

SEQ ID NO: 2057451 - RNA, 14 nt, Human
agaaugucagaaaa

SEQ ID NO: 2057452 - RNA, 15 nt, Human
agaaugucagaaaaa

SEQ ID NO: 2057453 - RNA, 17 nt, Human
agaaugucagaaaaaca

SEQ ID NO: 2057454 - RNA, 15 nt, Human
agaaugucagauucc

SEQ ID NO: 2057455 - RNA, 18 nt, Human
agaaugucagauuccuuu

SEQ ID NO: 2057456 - RNA, 19 nt, Human
agaaugucagauuccuuuc

SEQ ID NO: 2057457 - RNA, 21 nt, Human
agaaugucagauuccuuuccc

SEQ ID NO: 2057458 - RNA, 14 nt, Human
agaaucauacuuag

SEQ ID NO: 2057459 - RNA, 16 nt, Human
agaaucagugcaaaga

SEQ ID NO: 2057460 - RNA, 14 nt, Human
agaaucauuauuua

SEQ ID NO: 2057461 - RNA, 17 nt, Human
agaaucauuauuuauua

SEQ ID NO: 2057462 - RNA, 20 nt, Human
agaaucauuauuuauuaaau

SEQ ID NO: 2057463 - RNA, 21 nt, Human
agaaucauuauuuauuaaauu

SEQ ID NO: 2057464 - RNA, 22 nt, Human
agaaucauuauuuauuaaauuu

SEQ ID NO: 2057465 - RNA, 13 nt, Human
agaaucauugcuu

SEQ ID NO: 2057466 - RNA, 14 nt, Human
agaaucauugcuua

SEQ ID NO: 2057467 - RNA, 13 nt, Human
agaaucauuguaa

SEQ ID NO: 2057468 - RNA, 11 nt, Human
agaauauuuau

SEQ ID NO: 2057469 - RNA, 14 nt, Human
agaauauuguuccu

SEQ ID NO: 2057470 - RNA, 15 nt, Human
agaauauuguuccua

SEQ ID NO: 2057471 - RNA, 16 nt, Human
agaauauuguuccuaa

SEQ ID NO: 2057472 - RNA, 20 nt, Human
agaauauuguuccuaaguuc

SEQ ID NO: 2057473 - RNA, 21 nt, Human
agaauauuguuccuaaguucu

SEQ ID NO: 2057474 - RNA, 22 nt, Human
agaauauuguuccuaaguucuu

SEQ ID NO: 2057475 - RNA, 23 nt, Human
agaauauuagcuuuacuguuugu

SEQ ID NO: 2057476 - RNA, 22 nt, Human
agaauauuuauuaccucugaua

SEQ ID NO: 2057477 - RNA, 13 nt, Human
agaaucagccuag

SEQ ID NO: 2057478 - RNA, 19 nt, Human
agaauauuuauuaccucug

SEQ ID NO: 2057479 - RNA, 16 nt, Human
agaauauuuauuaccu

SEQ ID NO: 2057480 - RNA, 15 nt, Human
agaauggggugcaug

SEQ ID NO: 2057481 - RNA, 14 nt, Human
agaaucccuguuca

SEQ ID NO: 2057482 - RNA, 15 nt, Human
agaaucccuguucau

SEQ ID NO: 2057483 - RNA, 16 nt, Human
agaaucccuguucauu

SEQ ID NO: 2057484 - RNA, 18 nt, Human
ucugcuuugacugagcag

SEQ ID NO: 2057485 - RNA, 23 nt, Human
agaaguggaccaggacaggacca

SEQ ID NO: 2057486 - RNA, 18 nt, Human
agaagggaaggggagagg

SEQ ID NO: 2057487 - RNA, 16 nt, Human
agaaggcuggggcuau

SEQ ID NO: 2057488 - RNA, 12 nt, Human
agaagggaaaca

SEQ ID NO: 2057489 - RNA, 14 nt, Human
agaagggaaacagu

SEQ ID NO: 2057490 - RNA, 15 nt, Human
agaagggaaacaguc

SEQ ID NO: 2057491 - RNA, 16 nt, Human
agaagggaaacaguca

SEQ ID NO: 2057492 - RNA, 17 nt, Human
agaaggccaagaggcug

SEQ ID NO: 2057493 - RNA, 13 nt, Human
agaaggccaagag

SEQ ID NO: 2057494 - RNA, 15 nt, Human
agaaggcagggaaag

SEQ ID NO: 2057495 - RNA, 13 nt, Human
agaaggcagcagg

SEQ ID NO: 2057496 - RNA, 20 nt, Human
agaaguggggacagagcaga

SEQ ID NO: 2057497 - RNA, 17 nt, Human
agaagugggccaggaca

SEQ ID NO: 2057498 - RNA, 18 nt, Human
agaagugggccaggacag

SEQ ID NO: 2057499 - RNA, 19 nt, Human
agaagugggccaggacagg

SEQ ID NO: 2057500 - RNA, 23 nt, Human
agaagugggccaggacaggcccg

SEQ ID NO: 2057501 - RNA, 16 nt, Human
agaaguguuucaugca

SEQ ID NO: 2057502 - RNA, 15 nt, Human
agaaguuaagcaaca

SEQ ID NO: 2057503 - RNA, 19 nt, Human
agaaguguccgagaacuaa

SEQ ID NO: 2057504 - RNA, 18 nt, Human
agaaguuuagauuuuaau

SEQ ID NO: 2057505 - RNA, 19 nt, Human
agaaguuaagcaacaucua

SEQ ID NO: 2057506 - RNA, 19 nt, Human
agaauauuagcuuuacugu

SEQ ID NO: 2057507 - RNA, 20 nt, Human
agaauauuagcuuuacuguu

SEQ ID NO: 2057508 - RNA, 21 nt, Human
agaauauuagcuuuacuguuu

SEQ ID NO: 2057509 - RNA, 16 nt, Human
agaauagaugcugacu

SEQ ID NO: 2057510 - RNA, 12 nt, Human
agaauagaagga

SEQ ID NO: 2057511 - RNA, 13 nt, Human
agaauagaaggaa

SEQ ID NO: 2057512 - RNA, 14 nt, Human
agaauagaaggaaa

SEQ ID NO: 2057513 - RNA, 15 nt, Human
agaauagaaggaaac

SEQ ID NO: 2057514 - RNA, 16 nt, Human
agaauagaaggaaacu

SEQ ID NO: 2057515 - RNA, 17 nt, Human
agaauagaaggaaacua

SEQ ID NO: 2057516 - RNA, 20 nt, Human
agaauagaaggaaacuagcu

SEQ ID NO: 2057517 - RNA, 22 nt, Human
agaauaauaugcugccaaauuu

SEQ ID NO: 2057518 - RNA, 14 nt, Human
agaauaauaagagg

SEQ ID NO: 2057519 - RNA, 23 nt, Human
agaauaauaugcugccaaauuuu

SEQ ID NO: 2057520 - RNA, 21 nt, Human
ucuauuaccacugaagauaga

SEQ ID NO: 2057521 - RNA, 14 nt, Human
ucuauuagacuuua

SEQ ID NO: 2057522 - RNA, 18 nt, Human
ucuauuagacuuuagaaa

SEQ ID NO: 2057523 - RNA, 19 nt, Human
ucuauuagacuuuagaaau

SEQ ID NO: 2057524 - RNA, 22 nt, Human
ucuauggguaucaaacagcuca

SEQ ID NO: 2057525 - RNA, 19 nt, Human
ucuauucucuccucagacu

SEQ ID NO: 2057526 - RNA, 23 nt, Human
ucuaugggacucaaugcacugac

SEQ ID NO: 2057527 - RNA, 16 nt, Human
ucuauagacucuagga

SEQ ID NO: 2057528 - RNA, 13 nt, Human
ucuaugguaaaga

SEQ ID NO: 2057529 - RNA, 17 nt, Human
ucuaugguaaagauauu

SEQ ID NO: 2057530 - RNA, 22 nt, Human
ucuaugguaaagauauuauuca

SEQ ID NO: 2057531 - RNA, 13 nt, Human
ucuauagacucua

SEQ ID NO: 2057532 - RNA, 19 nt, Human
ucucacuauguugcccagg

SEQ ID NO: 2057533 - RNA, 17 nt, Human
ucucacuauguugccca

SEQ ID NO: 2057534 - RNA, 15 nt, Human
ucucaccccauccca

SEQ ID NO: 2057535 - RNA, 21 nt, Human
ucucaccccaucccacacccu

SEQ ID NO: 2057536 - RNA, 17 nt, Human
ucucaccccaucccaca

SEQ ID NO: 2057537 - RNA, 19 nt, Human
ucucaccccaucccacacc

SEQ ID NO: 2057538 - RNA, 22 nt, Human
ucuauuuguauauauacauaac

SEQ ID NO: 2057539 - RNA, 12 nt, Human
ucuauuuuaauu

SEQ ID NO: 2057540 - RNA, 13 nt, Human
ucuauuuauugga

SEQ ID NO: 2057541 - RNA, 22 nt, Human
ucuauuuauuuacugagcuucu

SEQ ID NO: 2057542 - RNA, 15 nt, Human
ucuauuuauuuacug

SEQ ID NO: 2057543 - RNA, 13 nt, Human
ucuauuuagcaug

SEQ ID NO: 2057544 - RNA, 17 nt, Human
ucuauugcuggcaaaga

SEQ ID NO: 2057545 - RNA, 16 nt, Human
ucuauugggauuuucu

SEQ ID NO: 2057546 - RNA, 15 nt, Human
ucuauuggguucauu

SEQ ID NO: 2057547 - RNA, 14 nt, Human
ucuauuuaagugua

SEQ ID NO: 2057548 - RNA, 22 nt, Human
ucuauugcuggcaaagacagaa

SEQ ID NO: 2057549 - RNA, 14 nt, Human
ucuaguugaggagu

SEQ ID NO: 2057550 - RNA, 19 nt, Human
ucuaguugaggaguuuccu

SEQ ID NO: 2057551 - RNA, 20 nt, Human
ucuaguugaggaguuuccua

SEQ ID NO: 2057552 - RNA, 21 nt, Human
ucuaguugaggaguuuccuaa

SEQ ID NO: 2057553 - RNA, 15 nt, Human
ucuauaacaugcauu

SEQ ID NO: 2057554 - RNA, 19 nt, Human
ucuagaauuuuaagugcuu

SEQ ID NO: 2057555 - RNA, 13 nt, Human
ucuagacaacccu

SEQ ID NO: 2057556 - RNA, 17 nt, Human
ucuagacaacccugcaa

SEQ ID NO: 2057557 - RNA, 22 nt, Human
acuuccccgcauuccaggcucc

SEQ ID NO: 2057558 - RNA, 17 nt, Human
acuucauagauuuccuu

SEQ ID NO: 2057559 - RNA, 19 nt, Human
ucuagagccugcuggaucu

SEQ ID NO: 2057560 - RNA, 20 nt, Human
ucuagagccgugaugccucc

SEQ ID NO: 2057561 - RNA, 14 nt, Human
ucuagagagggaau

SEQ ID NO: 2057562 - RNA, 22 nt, Human
ucuagagagggaauucucuugg

SEQ ID NO: 2057563 - RNA, 23 nt, Human
ucuagagagggaauucucuuggc

SEQ ID NO: 2057564 - RNA, 16 nt, Human
ucuagagauaguacau

SEQ ID NO: 2057565 - RNA, 20 nt, Human
ucuagagauaguacauaaag

SEQ ID NO: 2057566 - RNA, 20 nt, Human
ucuacagcuaaucagcauuc

SEQ ID NO: 2057567 - RNA, 16 nt, Human
ucuacagaugucccau

SEQ ID NO: 2057568 - RNA, 17 nt, Human
ucuacagaugucccauu

SEQ ID NO: 2057569 - RNA, 14 nt, Human
ucuacagcaaauuu

SEQ ID NO: 2057570 - RNA, 16 nt, Human
ucuacagcaaauuuau

SEQ ID NO: 2057571 - RNA, 17 nt, Human
ucuacagcaaauuuaua

SEQ ID NO: 2057572 - RNA, 18 nt, Human
ucuacagcaaauuuauaa

SEQ ID NO: 2057573 - RNA, 19 nt, Human
ucuacagcaaauuuauaau

SEQ ID NO: 2057574 - RNA, 22 nt, Human
ucuacagcaaauuuauaauuuu

SEQ ID NO: 2057575 - RNA, 19 nt, Human
ucuaauagaacucaguuuu

SEQ ID NO: 2057576 - RNA, 23 nt, Human
ucuacagcuaaucagcauucuca

SEQ ID NO: 2057577 - RNA, 19 nt, Human
ucuacccagcgagcccugg

SEQ ID NO: 2057578 - RNA, 21 nt, Human
ucuacagaggccaugggccuc

SEQ ID NO: 2057579 - RNA, 18 nt, Human
uccugggagugagcuggu

SEQ ID NO: 2057580 - RNA, 23 nt, Human
uccugggagaaccucaggcuucc

SEQ ID NO: 2057581 - RNA, 21 nt, Human
ucuacccuggcacuauaaugu

SEQ ID NO: 2057582 - RNA, 13 nt, Human
ucuacccagccca

SEQ ID NO: 2057583 - RNA, 14 nt, Human
ucuacccagcccau

SEQ ID NO: 2057584 - RNA, 15 nt, Human
ucuacccagcccauc

SEQ ID NO: 2057585 - RNA, 16 nt, Human
ucuacccagcccaucu

SEQ ID NO: 2057586 - RNA, 17 nt, Human
ucuacccagcccaucuu

SEQ ID NO: 2057587 - RNA, 20 nt, Human
ucuacccagcccaucuugcc

SEQ ID NO: 2057588 - RNA, 21 nt, Human
ucuacccagcccaucuugccu

SEQ ID NO: 2057589 - RNA, 20 nt, Human
ucuacccagcgagcccuggu

SEQ ID NO: 2057590 - RNA, 19 nt, Human
ucuacccuggcacuauaau

SEQ ID NO: 2057591 - RNA, 14 nt, Human
ucuacccuggcacu

SEQ ID NO: 2057592 - RNA, 23 nt, Human
acuucaggguucuccucuccccu

SEQ ID NO: 2057593 - RNA, 21 nt, Human
acuucaggguucuccucuccc

SEQ ID NO: 2057594 - RNA, 22 nt, Human
acuucaggguucuccucucccc

SEQ ID NO: 2057595 - RNA, 16 nt, Human
acuuauuaucuucagg

SEQ ID NO: 2057596 - RNA, 15 nt, Human
acuuauucauugugg

SEQ ID NO: 2057597 - RNA, 20 nt, Human
acuuauucauugugguuauu

SEQ ID NO: 2057598 - RNA, 15 nt, Human
acuuagguguggggg

SEQ ID NO: 2057599 - RNA, 17 nt, Human
acuuaguauauuuucuu

SEQ ID NO: 2057600 - RNA, 18 nt, Human
acuuaggcaugcacagcu

SEQ ID NO: 2057601 - RNA, 21 nt, Human
acuuaggcaugcacagcugua

SEQ ID NO: 2057602 - RNA, 23 nt, Human
acuuauguuacugguguccagcu

SEQ ID NO: 2057603 - RNA, 23 nt, Human
acuuacagauaggccuucuugug

SEQ ID NO: 2057604 - RNA, 14 nt, Human
acuuagcuuaucaa

SEQ ID NO: 2057605 - RNA, 16 nt, Human
acuuagcuuaucaauu

SEQ ID NO: 2057606 - RNA, 17 nt, Human
acuuagcuuaucaauuu

SEQ ID NO: 2057607 - RNA, 19 nt, Human
acuuagcuuaucaauuugu

SEQ ID NO: 2057608 - RNA, 20 nt, Human
acuuagcuuaucaauuuguc

SEQ ID NO: 2057609 - RNA, 21 nt, Human
acuuagcuuaucaauuuguca

SEQ ID NO: 2057610 - RNA, 22 nt, Human
acuuagcuuaucaauuugucau

SEQ ID NO: 2057611 - RNA, 21 nt, Human
acuuagcuugaaggaucuguu

SEQ ID NO: 2057612 - RNA, 18 nt, Human
acuuacacaucuuccaca

SEQ ID NO: 2057613 - RNA, 17 nt, Human
acuuacacuuuaugcac

SEQ ID NO: 2057614 - RNA, 21 nt, Human
acuuaacagaugcaaugugcu

SEQ ID NO: 2057615 - RNA, 14 nt, Human
acuuaacagaugca

SEQ ID NO: 2057616 - RNA, 17 nt, Human
acuuaaauuuuaauuua

SEQ ID NO: 2057617 - RNA, 16 nt, Human
acuuaaccgcaucaga

SEQ ID NO: 2057618 - RNA, 17 nt, Human
acuuaaccgcaucagaa

SEQ ID NO: 2057619 - RNA, 18 nt, Human
acuuaaccgcaucagaag

SEQ ID NO: 2057620 - RNA, 16 nt, Human
acuuaaccggaguucg

SEQ ID NO: 2057621 - RNA, 14 nt, Human
acuuaaauguuacc

SEQ ID NO: 2057622 - RNA, 18 nt, Human
acuguugccagagaugga

SEQ ID NO: 2057623 - RNA, 18 nt, Human
acuuaaauaucaaucauu

SEQ ID NO: 2057624 - RNA, 13 nt, Human
acuuaaaugaaag

SEQ ID NO: 2057625 - RNA, 14 nt, Human
acuguugccagaga

SEQ ID NO: 2057626 - RNA, 16 nt, Human
acuuacacuuuaugca

SEQ ID NO: 2057627 - RNA, 16 nt, Human
acuuaagaaacacuga

SEQ ID NO: 2057628 - RNA, 19 nt, Human
acuugcacgcccaugugug

SEQ ID NO: 2057629 - RNA, 21 nt, Human
acuugaugaguguaacaagaa

SEQ ID NO: 2057630 - RNA, 22 nt, Human
acuugaugaguguaacaagaaa

SEQ ID NO: 2057631 - RNA, 16 nt, Human
acuugauggucagaca

SEQ ID NO: 2057632 - RNA, 22 nt, Human
acuugauggucagacacaaaca

SEQ ID NO: 2057633 - RNA, 23 nt, Human
acuugauggucagacacaaacaa

SEQ ID NO: 2057634 - RNA, 23 nt, Human
ucucacuauguugcccaggcagg

SEQ ID NO: 2057635 - RNA, 22 nt, Human
ucucacuauguugcccaggcag

SEQ ID NO: 2057636 - RNA, 21 nt, Human
ucucacuauguugcccaggca

SEQ ID NO: 2057637 - RNA, 20 nt, Human
ucucacuauguugcccaggc

SEQ ID NO: 2057638 - RNA, 22 nt, Human
acuugcagacucuacagaggcc

SEQ ID NO: 2057639 - RNA, 19 nt, Human
acuugcagacucuacagag

SEQ ID NO: 2057640 - RNA, 23 nt, Human
acuugcagacucuacagaggcca

SEQ ID NO: 2057641 - RNA, 12 nt, Human
ucucacuccacc

SEQ ID NO: 2057642 - RNA, 21 nt, Human
acuugcugaaucggaaucucu

SEQ ID NO: 2057643 - RNA, 22 nt, Human
acuuguggacacagcucuucuc

SEQ ID NO: 2057644 - RNA, 19 nt, Human
acuuguggacacagcucuu

SEQ ID NO: 2057645 - RNA, 15 nt, Human
acuugucuuuuucug

SEQ ID NO: 2057646 - RNA, 17 nt, Human
acuugucuuuuucugga

SEQ ID NO: 2057647 - RNA, 17 nt, Human
acuugcugccugaagaa

SEQ ID NO: 2057648 - RNA, 23 nt, Human
acuugcugccugaagaacaguaa

SEQ ID NO: 2057649 - RNA, 14 nt, Human
acuugcugcuauuu

SEQ ID NO: 2057650 - RNA, 15 nt, Human
acuugcugcuauuuu

SEQ ID NO: 2057651 - RNA, 17 nt, Human
acuugcugcuauuuuac

SEQ ID NO: 2057652 - RNA, 16 nt, Human
acuugucuuuuucugg

SEQ ID NO: 2057653 - RNA, 15 nt, Human
ucucagccaacgagu

SEQ ID NO: 2057654 - RNA, 21 nt, Human
ucucagccgcuucugacugcu

SEQ ID NO: 2057655 - RNA, 21 nt, Human
ucucagcaaugauuacucuuu

SEQ ID NO: 2057656 - RNA, 11 nt, Human
ucucagccucc

SEQ ID NO: 2057657 - RNA, 18 nt, Human
ucucaggcaugccugugu

SEQ ID NO: 2057658 - RNA, 20 nt, Human
ucucaggcaugccuguguga

SEQ ID NO: 2057659 - RNA, 21 nt, Human
ucucaggcaugccugugugac

SEQ ID NO: 2057660 - RNA, 13 nt, Human
ucucaggccaccu

SEQ ID NO: 2057661 - RNA, 18 nt, Human
ucucaggccaccugcccc

SEQ ID NO: 2057662 - RNA, 19 nt, Human
ucucaggccaccugccccc

SEQ ID NO: 2057663 - RNA, 20 nt, Human
ucucaggaucaagaaagugu

SEQ ID NO: 2057664 - RNA, 21 nt, Human
ucucaggaccuagggauguuc

SEQ ID NO: 2057665 - RNA, 16 nt, Human
ucucaggaccuaggga

SEQ ID NO: 2057666 - RNA, 15 nt, Human
ucucaggagcauggg

SEQ ID NO: 2057667 - RNA, 14 nt, Human
ucucauuugucaca

SEQ ID NO: 2057668 - RNA, 16 nt, Human
ucucauuugucacaca

SEQ ID NO: 2057669 - RNA, 21 nt, Human
ucucaggccaccugcccccuu

SEQ ID NO: 2057670 - RNA, 14 nt, Human
agaaaaaauacauu

SEQ ID NO: 2057671 - RNA, 16 nt, Human
agaaaaaauacauuuu

SEQ ID NO: 2057672 - RNA, 18 nt, Human
agaaaaaauacauuuuau

SEQ ID NO: 2057673 - RNA, 18 nt, Human
agaaaaaauaacacacau

SEQ ID NO: 2057674 - RNA, 11 nt, Human
agaaaaaauac

SEQ ID NO: 2057675 - RNA, 17 nt, Human
agaaaaaauauuuuccc

SEQ ID NO: 2057676 - RNA, 17 nt, Human
ucuccuuagucuucuca

SEQ ID NO: 2057677 - RNA, 22 nt, Human
agaaaaaauacauuuuauauua

SEQ ID NO: 2057678 - RNA, 18 nt, Human
ucuccuuagucuucucau

SEQ ID NO: 2057679 - RNA, 21 nt, Human
acuuuuuauauuuuauacauu

SEQ ID NO: 2057680 - RNA, 14 nt, Human
agaaaaaagaaugu

SEQ ID NO: 2057681 - RNA, 16 nt, Human
agaaaaaagaauguca

SEQ ID NO: 2057682 - RNA, 22 nt, Human
agaaaaaagaaugucagaaaaa

SEQ ID NO: 2057683 - RNA, 17 nt, Human
acuuuuuauauuuuaua

SEQ ID NO: 2057684 - RNA, 22 nt, Human
acuuuggugcgggcacaauaaa

SEQ ID NO: 2057685 - RNA, 23 nt, Human
acuuuggugcgggcacaauaaau

SEQ ID NO: 2057686 - RNA, 17 nt, Human
acuuuggaaguuugugu

SEQ ID NO: 2057687 - RNA, 18 nt, Human
acuuuggaaguuuguguu

SEQ ID NO: 2057688 - RNA, 21 nt, Human
acuuuggaaguuuguguucug

SEQ ID NO: 2057689 - RNA, 23 nt, Human
ucuccgaccagacaccuugacag

SEQ ID NO: 2057690 - RNA, 17 nt, Human
ucuccgaccagacaccu

SEQ ID NO: 2057691 - RNA, 12 nt, Human
ucuccucacuga

SEQ ID NO: 2057692 - RNA, 14 nt, Human
ucuccucagacugc

SEQ ID NO: 2057693 - RNA, 12 nt, Human
ucuccacccugc

SEQ ID NO: 2057694 - RNA, 23 nt, Human
ucuccccagcaagugagagcugg

SEQ ID NO: 2057695 - RNA, 17 nt, Human
ucuccuccauacucagg

SEQ ID NO: 2057696 - RNA, 18 nt, Human
ucuccuccauacucagga

SEQ ID NO: 2057697 - RNA, 19 nt, Human
acuuucuguugccacaacc

SEQ ID NO: 2057698 - RNA, 19 nt, Human
ugacuauuuuucagaaucu

SEQ ID NO: 2057699 - RNA, 21 nt, Human
ugacucguauaugucucaggu

SEQ ID NO: 2057700 - RNA, 16 nt, Human
ugacuuaacugcauuu

SEQ ID NO: 2057701 - RNA, 22 nt, Human
ugacuguuuuuuaaacuaggaa

SEQ ID NO: 2057702 - RNA, 21 nt, Human
ugacuguuuucucuugagagg

SEQ ID NO: 2057703 - RNA, 13 nt, Human
ugacucucuguga

SEQ ID NO: 2057704 - RNA, 15 nt, Human
ugacucucugugacc

SEQ ID NO: 2057705 - RNA, 14 nt, Human
ugacuagugcugaa

SEQ ID NO: 2057706 - RNA, 15 nt, Human
ugacuagugcugaag

SEQ ID NO: 2057707 - RNA, 17 nt, Human
ugacuagugcugaagcu

SEQ ID NO: 2057708 - RNA, 18 nt, Human
ugacuagugcugaagcuu

SEQ ID NO: 2057709 - RNA, 22 nt, Human
ugacuagugcugaagcuuauua

SEQ ID NO: 2057710 - RNA, 21 nt, Human
ugacuagugcugaagcuuauu

SEQ ID NO: 2057711 - RNA, 16 nt, Human
ugacuaucaaacugaa

SEQ ID NO: 2057712 - RNA, 22 nt, Human
ugacuaucaaacugaagccaga

SEQ ID NO: 2057713 - RNA, 20 nt, Human
ugacuauugaaguugcagau

SEQ ID NO: 2057714 - RNA, 19 nt, Human
ugaccugccaggcacacug

SEQ ID NO: 2057715 - RNA, 16 nt, Human
ugaccugccaggcaca

SEQ ID NO: 2057716 - RNA, 20 nt, Human
ugaccugccccgcccagcug

SEQ ID NO: 2057717 - RNA, 13 nt, Human
ugaccugccccgc

SEQ ID NO: 2057718 - RNA, 19 nt, Human
ugaccugccccgcccagcu

SEQ ID NO: 2057719 - RNA, 17 nt, Human
agaugugauaaggauca

SEQ ID NO: 2057720 - RNA, 13 nt, Human
agaugucuuuagg

SEQ ID NO: 2057721 - RNA, 23 nt, Human
agaugucuuuaggcagcagcuuu

SEQ ID NO: 2057722 - RNA, 15 nt, Human
agaugucuuuaggca

SEQ ID NO: 2057723 - RNA, 12 nt, Human
ugaccugucacc

SEQ ID NO: 2057724 - RNA, 14 nt, Human
ugacuuaugggccc

SEQ ID NO: 2057725 - RNA, 16 nt, Human
agauuagaucuuuuaa

SEQ ID NO: 2057726 - RNA, 15 nt, Human
agauuagaucuuuua

SEQ ID NO: 2057727 - RNA, 21 nt, Human
agauuacccccucauuguuua

SEQ ID NO: 2057728 - RNA, 13 nt, Human
agauucauauuua

SEQ ID NO: 2057729 - RNA, 16 nt, Human
agauucauauuuacuu

SEQ ID NO: 2057730 - RNA, 19 nt, Human
agauuccagagaguggcuc

SEQ ID NO: 2057731 - RNA, 22 nt, Human
agauuccagagaguggcuccuc

SEQ ID NO: 2057732 - RNA, 21 nt, Human
agauuccagagaguggcuccu

SEQ ID NO: 2057733 - RNA, 19 nt, Human
agauucauauuuacuucuu

SEQ ID NO: 2057734 - RNA, 12 nt, Human
agauucccagag

SEQ ID NO: 2057735 - RNA, 13 nt, Human
agauucccagaga

SEQ ID NO: 2057736 - RNA, 14 nt, Human
agauuguuaaaaua

SEQ ID NO: 2057737 - RNA, 15 nt, Human
agauuguuaaaauaa

SEQ ID NO: 2057738 - RNA, 14 nt, Human
agauucccagagac

SEQ ID NO: 2057739 - RNA, 15 nt, Human
agauuucagucuuuu

SEQ ID NO: 2057740 - RNA, 17 nt, Human
agauuucagucuuuucc

SEQ ID NO: 2057741 - RNA, 13 nt, Human
agauuuguuuugu

SEQ ID NO: 2057742 - RNA, 14 nt, Human
agauuuguuuugug

SEQ ID NO: 2057743 - RNA, 21 nt, Human
agauuuuaauuuugaauaaau

SEQ ID NO: 2057744 - RNA, 17 nt, Human
agauuuuacaaaagaug

SEQ ID NO: 2057745 - RNA, 18 nt, Human
agauuuuacaaaagaugu

SEQ ID NO: 2057746 - RNA, 19 nt, Human
agauuuuacaaaagaugua

SEQ ID NO: 2057747 - RNA, 20 nt, Human
agauuuuacaaaagauguau

SEQ ID NO: 2057748 - RNA, 17 nt, Human
agauuuuaauuuugaau

SEQ ID NO: 2057749 - RNA, 14 nt, Human
agauuuuaauuuug

SEQ ID NO: 2057750 - RNA, 16 nt, Human
agauuuuaaucaaauu

SEQ ID NO: 2057751 - RNA, 18 nt, Human
agauuuuaaucaaauuug

SEQ ID NO: 2057752 - RNA, 15 nt, Human
agauuuuaaucaaau

SEQ ID NO: 2057753 - RNA, 22 nt, Human
agauuuuaaauucacaauagaa

SEQ ID NO: 2057754 - RNA, 13 nt, Human
agauuuuaaauuc

SEQ ID NO: 2057755 - RNA, 19 nt, Human
agauuuuaaauucacaaua

SEQ ID NO: 2057756 - RNA, 16 nt, Human
agaucguucucugccu

SEQ ID NO: 2057757 - RNA, 20 nt, Human
agaucuaagccuuuccauaa

SEQ ID NO: 2057758 - RNA, 17 nt, Human
agaucguuaguaucuaa

SEQ ID NO: 2057759 - RNA, 16 nt, Human
agaucguuaguaucua

SEQ ID NO: 2057760 - RNA, 13 nt, Human
agaucuccaaagc

SEQ ID NO: 2057761 - RNA, 14 nt, Human
agaucuccaaagcu

SEQ ID NO: 2057762 - RNA, 15 nt, Human
agaucuccaaagcuu

SEQ ID NO: 2057763 - RNA, 21 nt, Human
agaucuccaaagcuuuccugg

SEQ ID NO: 2057764 - RNA, 22 nt, Human
agaucuccaaagcuuuccugga

SEQ ID NO: 2057765 - RNA, 19 nt, Human
agaucuaggugaggauuga

SEQ ID NO: 2057766 - RNA, 15 nt, Human
agaugcaaggaccag

SEQ ID NO: 2057767 - RNA, 23 nt, Human
ugaccaacauggagaaacccugu

SEQ ID NO: 2057768 - RNA, 22 nt, Human
ugaccaaccuuuucccaaccau

SEQ ID NO: 2057769 - RNA, 14 nt, Human
ugaccaagaacugc

SEQ ID NO: 2057770 - RNA, 15 nt, Human
ugaccaagaacugca

SEQ ID NO: 2057771 - RNA, 16 nt, Human
ugaccaagaacugcau

SEQ ID NO: 2057772 - RNA, 18 nt, Human
ugaccaagaacugcaugg

SEQ ID NO: 2057773 - RNA, 19 nt, Human
ugaccaagaacugcaugga

SEQ ID NO: 2057774 - RNA, 15 nt, Human
ugaccaagagagaaa

SEQ ID NO: 2057775 - RNA, 14 nt, Human
ugaccaagcaggaa

SEQ ID NO: 2057776 - RNA, 16 nt, Human
ugaccaagagagaaag

SEQ ID NO: 2057777 - RNA, 17 nt, Human
ugaccaagagagaaaga

SEQ ID NO: 2057778 - RNA, 18 nt, Human
ugaccaagagagaaagaa

SEQ ID NO: 2057779 - RNA, 15 nt, Human
ugaccaagcaggaag

SEQ ID NO: 2057780 - RNA, 16 nt, Human
ugaccaagcaggaagc

SEQ ID NO: 2057781 - RNA, 17 nt, Human
ugaccaagcaggaagcu

SEQ ID NO: 2057782 - RNA, 18 nt, Human
ugaccaagcaggaagcuc

SEQ ID NO: 2057783 - RNA, 19 nt, Human
ugaccaagcaggaagcuca

SEQ ID NO: 2057784 - RNA, 21 nt, Human
ugaccaagcaggaagcucaga

SEQ ID NO: 2057785 - RNA, 13 nt, Human
ugaccaaguuaua

SEQ ID NO: 2057786 - RNA, 16 nt, Human
ugaccaaguuauaaau

SEQ ID NO: 2057787 - RNA, 20 nt, Human
ugaccaaguuauaaaucaau

SEQ ID NO: 2057788 - RNA, 22 nt, Human
agaucccagaaggaccuccuga

SEQ ID NO: 2057789 - RNA, 13 nt, Human
agaucccagcuca

SEQ ID NO: 2057790 - RNA, 21 nt, Human
agauccccaaaacaggccagg

SEQ ID NO: 2057791 - RNA, 15 nt, Human
agauccuaccccuga

SEQ ID NO: 2057792 - RNA, 15 nt, Human
agaucccgccucuuc

SEQ ID NO: 2057793 - RNA, 19 nt, Human
agaucccgccucuucuucu

SEQ ID NO: 2057794 - RNA, 22 nt, Human
agaucccgccucuucuucuuca

SEQ ID NO: 2057795 - RNA, 12 nt, Human
agaugccagagc

SEQ ID NO: 2057796 - RNA, 13 nt, Human
agaugccagagca

SEQ ID NO: 2057797 - RNA, 21 nt, Human
agaugccagagcaaagggcca

SEQ ID NO: 2057798 - RNA, 17 nt, Human
agaugcaaggaccagga

SEQ ID NO: 2057799 - RNA, 18 nt, Human
agaugcaaggaccaggac

SEQ ID NO: 2057800 - RNA, 13 nt, Human
agaugcacaugag

SEQ ID NO: 2057801 - RNA, 18 nt, Human
agaugcaaugugcuacug

SEQ ID NO: 2057802 - RNA, 20 nt, Human
agaugcaaggaccaggacuc

SEQ ID NO: 2057803 - RNA, 16 nt, Human
agaugcacaugagcug

SEQ ID NO: 2057804 - RNA, 19 nt, Human
agaugcaaugugcuacuga

SEQ ID NO: 2057805 - RNA, 12 nt, Human
agauguauccuu

SEQ ID NO: 2057806 - RNA, 17 nt, Human
agauguauccuuccaau

SEQ ID NO: 2057807 - RNA, 22 nt, Human
ugacagggcacaccgggcacuc

SEQ ID NO: 2057808 - RNA, 21 nt, Human
ugacagggcacaccgggcacu

SEQ ID NO: 2057809 - RNA, 19 nt, Human
ugacaggcaaugcuggcug

SEQ ID NO: 2057810 - RNA, 17 nt, Human
ugacaggcaaugcuggc

SEQ ID NO: 2057811 - RNA, 13 nt, Human
ugacagcugugcu

SEQ ID NO: 2057812 - RNA, 16 nt, Human
ugacagcugugcugua

SEQ ID NO: 2057813 - RNA, 11 nt, Human
ugacagccucc

SEQ ID NO: 2057814 - RNA, 12 nt, Human
ugacagccuccc

SEQ ID NO: 2057815 - RNA, 13 nt, Human
ugacacugagaac

SEQ ID NO: 2057816 - RNA, 21 nt, Human
ugacauuaacaguuuuccaug

SEQ ID NO: 2057817 - RNA, 17 nt, Human
ugacauuaacaguuuuc

SEQ ID NO: 2057818 - RNA, 19 nt, Human
ugacauuaacaguuuucca

SEQ ID NO: 2057819 - RNA, 22 nt, Human
ugacauuaacaguuuuccauga

SEQ ID NO: 2057820 - RNA, 13 nt, Human
ugacauuaacagu

SEQ ID NO: 2057821 - RNA, 13 nt, Human
ugaaugcggccca

SEQ ID NO: 2057822 - RNA, 22 nt, Human
ugacagagugagacucugucuc

SEQ ID NO: 2057823 - RNA, 19 nt, Human
ugacagauguugaaugccc

SEQ ID NO: 2057824 - RNA, 15 nt, Human
ugacagaguucacua

SEQ ID NO: 2057825 - RNA, 22 nt, Human
agcaccuacaguguacagucuu

SEQ ID NO: 2057826 - RNA, 17 nt, Human
agcaccuagccucgcuc

SEQ ID NO: 2057827 - RNA, 14 nt, Human
agcaccuacagugu

SEQ ID NO: 2057828 - RNA, 15 nt, Human
agcaccuacagugua

SEQ ID NO: 2057829 - RNA, 19 nt, Human
agcaccuacaguguacagu

SEQ ID NO: 2057830 - RNA, 21 nt, Human
agcaccuacaguguacagucu

SEQ ID NO: 2057831 - RNA, 16 nt, Human
agcaccuccugccucg

SEQ ID NO: 2057832 - RNA, 14 nt, Human
agcaccuccugccu

SEQ ID NO: 2057833 - RNA, 13 nt, Human
agcaccuccugcc

SEQ ID NO: 2057834 - RNA, 13 nt, Human
agcaccucccagc

SEQ ID NO: 2057835 - RNA, 14 nt, Human
agcaccucccagcc

SEQ ID NO: 2057836 - RNA, 16 nt, Human
agcaccucccagcccc

SEQ ID NO: 2057837 - RNA, 17 nt, Human
agcaccucccagccccu

SEQ ID NO: 2057838 - RNA, 18 nt, Human
agcaccucccagccccug

SEQ ID NO: 2057839 - RNA, 22 nt, Human
agcaccucccagccccugcccc

SEQ ID NO: 2057840 - RNA, 20 nt, Human
agcacccagcaacuccaacu

SEQ ID NO: 2057841 - RNA, 20 nt, Human
agcacccccacgcccucauu

SEQ ID NO: 2057842 - RNA, 19 nt, Human
agcaccccaugccaaagcu

SEQ ID NO: 2057843 - RNA, 14 nt, Human
agcaagugaauuuu

SEQ ID NO: 2057844 - RNA, 13 nt, Human
agcaauaaaugaa

SEQ ID NO: 2057845 - RNA, 14 nt, Human
agcaauaaaugaau

SEQ ID NO: 2057846 - RNA, 15 nt, Human
agcaauaaaugaaug

SEQ ID NO: 2057847 - RNA, 17 nt, Human
agcaagugagagcuggg

SEQ ID NO: 2057848 - RNA, 14 nt, Human
agcaagguggagug

SEQ ID NO: 2057849 - RNA, 19 nt, Human
agcaagguggaguggaugc

SEQ ID NO: 2057850 - RNA, 16 nt, Human
agcaauauuuaaggag

SEQ ID NO: 2057851 - RNA, 17 nt, Human
agcaauauuuaaggaga

SEQ ID NO: 2057852 - RNA, 18 nt, Human
agcaauauuuaaggagau

SEQ ID NO: 2057853 - RNA, 21 nt, Human
agcaaucagauuuuccugugg

SEQ ID NO: 2057854 - RNA, 17 nt, Human
agcaauccauguuaguu

SEQ ID NO: 2057855 - RNA, 20 nt, Human
agcaauccauguuaguuuuu

SEQ ID NO: 2057856 - RNA, 21 nt, Human
agcacagcuucauuuccugug

SEQ ID NO: 2057857 - RNA, 22 nt, Human
agcaauccauguuaguuuuuac

SEQ ID NO: 2057858 - RNA, 23 nt, Human
agcaauccauguuaguuuuuacu

SEQ ID NO: 2057859 - RNA, 16 nt, Human
agcaagugagacccug

SEQ ID NO: 2057860 - RNA, 16 nt, Human
agcaagugagagcugg

SEQ ID NO: 2057861 - RNA, 15 nt, Human
agcaagugagagcug

SEQ ID NO: 2057862 - RNA, 15 nt, Human
agcaaggggcucugc

SEQ ID NO: 2057863 - RNA, 16 nt, Human
agcaaggggcucugcc

SEQ ID NO: 2057864 - RNA, 15 nt, Human
agcaaggaucuuuca

SEQ ID NO: 2057865 - RNA, 17 nt, Human
agcaagcuuuuuuauuu

SEQ ID NO: 2057866 - RNA, 16 nt, Human
ugagcauguuacugac

SEQ ID NO: 2057867 - RNA, 21 nt, Human
ugagcauuguggcugucagca

SEQ ID NO: 2057868 - RNA, 13 nt, Human
ugagccacugcac

SEQ ID NO: 2057869 - RNA, 12 nt, Human
ugagccacugca

SEQ ID NO: 2057870 - RNA, 16 nt, Human
ugagcaaaccugcccc

SEQ ID NO: 2057871 - RNA, 17 nt, Human
ugagcaaaccugcccca

SEQ ID NO: 2057872 - RNA, 18 nt, Human
ugagcaaaccugccccau

SEQ ID NO: 2057873 - RNA, 19 nt, Human
ugagcaaaccugccccauc

SEQ ID NO: 2057874 - RNA, 20 nt, Human
ugagcaaaccugccccaucc

SEQ ID NO: 2057875 - RNA, 21 nt, Human
ugagcaaaccugccccauccc

SEQ ID NO: 2057876 - RNA, 18 nt, Human
ugagcaaacuaacuugac

SEQ ID NO: 2057877 - RNA, 15 nt, Human
ugagcauguuacuga

SEQ ID NO: 2057878 - RNA, 14 nt, Human
ugagccacugcacc

SEQ ID NO: 2057879 - RNA, 22 nt, Human
ugagcauuguggcugucagcag

SEQ ID NO: 2057880 - RNA, 23 nt, Human
ugagcauuguggcugucagcagg

SEQ ID NO: 2057881 - RNA, 20 nt, Human
agcaagcauuuauguuuauu

SEQ ID NO: 2057882 - RNA, 14 nt, Human
ugagccaaagagaa

SEQ ID NO: 2057883 - RNA, 21 nt, Human
ugagacagaguuuucacucuu

SEQ ID NO: 2057884 - RNA, 11 nt, Human
ugagacagagu

SEQ ID NO: 2057885 - RNA, 17 nt, Human
ugagaaggaauuugagu

SEQ ID NO: 2057886 - RNA, 16 nt, Human
ugagaagccgugggug

SEQ ID NO: 2057887 - RNA, 17 nt, Human
ugagaagccgugggugg

SEQ ID NO: 2057888 - RNA, 13 nt, Human
agauuuuccugug

SEQ ID NO: 2057889 - RNA, 14 nt, Human
agauuuuccugugg

SEQ ID NO: 2057890 - RNA, 20 nt, Human
ugagacucugucucaaaaaa

SEQ ID NO: 2057891 - RNA, 22 nt, Human
ugagacugcgggaugguccugg

SEQ ID NO: 2057892 - RNA, 23 nt, Human
ugagacugcgggaugguccuggg

SEQ ID NO: 2057893 - RNA, 21 nt, Human
ugagacuggauacugcccggg

SEQ ID NO: 2057894 - RNA, 18 nt, Human
ugagacugggucucgcuu

SEQ ID NO: 2057895 - RNA, 14 nt, Human
ugagacuuuuuggu

SEQ ID NO: 2057896 - RNA, 15 nt, Human
ugagacuuuuuggug

SEQ ID NO: 2057897 - RNA, 22 nt, Human
ugagacuuuuugguggauguaa

SEQ ID NO: 2057898 - RNA, 14 nt, Human
ugagagaauggaaa

SEQ ID NO: 2057899 - RNA, 19 nt, Human
ugagagaauggaaaacaga

SEQ ID NO: 2057900 - RNA, 17 nt, Human
ugagagaucugcuguca

SEQ ID NO: 2057901 - RNA, 23 nt, Human
ugagagcaguuugguuucuagca

SEQ ID NO: 2057902 - RNA, 21 nt, Human
ugagagcaguuugguuucuag

SEQ ID NO: 2057903 - RNA, 23 nt, Human
ugagagaauggaaaacagacuca

SEQ ID NO: 2057904 - RNA, 18 nt, Human
ugagagaauuguaucauu

SEQ ID NO: 2057905 - RNA, 19 nt, Human
ugagagaauuguaucauuu

SEQ ID NO: 2057906 - RNA, 21 nt, Human
ugagagacccaaggaggaaaa

SEQ ID NO: 2057907 - RNA, 20 nt, Human
ugagagacccaaggaggaaa

SEQ ID NO: 2057908 - RNA, 14 nt, Human
ugagagagacaaga

SEQ ID NO: 2057909 - RNA, 15 nt, Human
ugagagagacaagaa

SEQ ID NO: 2057910 - RNA, 14 nt, Human
ugagagcugggugu

SEQ ID NO: 2057911 - RNA, 15 nt, Human
ugagagcgaggcuga

SEQ ID NO: 2057912 - RNA, 19 nt, Human
ugagagcgaggcugagccu

SEQ ID NO: 2057913 - RNA, 20 nt, Human
ugagaggcaaugauuguuaa

SEQ ID NO: 2057914 - RNA, 23 nt, Human
ugagaggacuuuucuuuguggcu

SEQ ID NO: 2057915 - RNA, 12 nt, Human
ugagauggcccu

SEQ ID NO: 2057916 - RNA, 15 nt, Human
ugagauggcccucug

SEQ ID NO: 2057917 - RNA, 16 nt, Human
ugagauggcccucugg

SEQ ID NO: 2057918 - RNA, 17 nt, Human
ugagauggcccucuggu

SEQ ID NO: 2057919 - RNA, 18 nt, Human
ugagauggcccucuggua

SEQ ID NO: 2057920 - RNA, 21 nt, Human
ugagauggaacccuuuuggcc

SEQ ID NO: 2057921 - RNA, 15 nt, Human
ugagauuauuuuaau

SEQ ID NO: 2057922 - RNA, 23 nt, Human
ucuuuuuuuuuuuuuaaagacag

SEQ ID NO: 2057923 - RNA, 16 nt, Human
ucuuuuuuugugaugu

SEQ ID NO: 2057924 - RNA, 14 nt, Human
ucuuuuuuugugau

SEQ ID NO: 2057925 - RNA, 12 nt, Human
ugaaaauacaac

SEQ ID NO: 2057926 - RNA, 19 nt, Human
ugaaaauacaacuuaaaua

SEQ ID NO: 2057927 - RNA, 18 nt, Human
ugaaaauuaacacugcuu

SEQ ID NO: 2057928 - RNA, 14 nt, Human
ugaaaauuaacacu

SEQ ID NO: 2057929 - RNA, 13 nt, Human
ugaaaauguuuuu

SEQ ID NO: 2057930 - RNA, 15 nt, Human
ugaaaauuaacacug

SEQ ID NO: 2057931 - RNA, 16 nt, Human
ugaaaauuaacacugc

SEQ ID NO: 2057932 - RNA, 11 nt, Human
ugaaaauguua

SEQ ID NO: 2057933 - RNA, 18 nt, Human
ugaaaauagguauacagu

SEQ ID NO: 2057934 - RNA, 23 nt, Human
ugaaaauacaacuuaaauaauaa

SEQ ID NO: 2057935 - RNA, 23 nt, Human
ugaaaaugcaacaacauguauaa

SEQ ID NO: 2057936 - RNA, 20 nt, Human
ugaaaaugcaacaacaugua

SEQ ID NO: 2057937 - RNA, 21 nt, Human
ugaaaaugcaacaacauguau

SEQ ID NO: 2057938 - RNA, 18 nt, Human
ugaaaaugcaacaacaug

SEQ ID NO: 2057939 - RNA, 13 nt, Human
ugaaaauccuacc

SEQ ID NO: 2057940 - RNA, 15 nt, Human
ugaaaauccuaccaa

SEQ ID NO: 2057941 - RNA, 20 nt, Human
ugaaaauggaaguggcaaua

SEQ ID NO: 2057942 - RNA, 22 nt, Human
ugaaaauguaaguaaaugucug

SEQ ID NO: 2057943 - RNA, 23 nt, Human
agagacugggaagauaggcucug

SEQ ID NO: 2057944 - RNA, 13 nt, Human
agagacugggaag

SEQ ID NO: 2057945 - RNA, 13 nt, Human
agagacuguagau

SEQ ID NO: 2057946 - RNA, 14 nt, Human
agagacuguagauu

SEQ ID NO: 2057947 - RNA, 15 nt, Human
agagacuguagauug

SEQ ID NO: 2057948 - RNA, 22 nt, Human
agagacuguagauugcuucugu

SEQ ID NO: 2057949 - RNA, 20 nt, Human
agagaccgucgggggcugag

SEQ ID NO: 2057950 - RNA, 21 nt, Human
agagaccgucgggggcugagg

SEQ ID NO: 2057951 - RNA, 13 nt, Human
agagauacagagg

SEQ ID NO: 2057952 - RNA, 19 nt, Human
agagauaccaagaugccau

SEQ ID NO: 2057953 - RNA, 20 nt, Human
agagauaccaagaugccauc

SEQ ID NO: 2057954 - RNA, 22 nt, Human
agagauaccaagaugccaucug

SEQ ID NO: 2057955 - RNA, 14 nt, Human
agagaguuaaucaa

SEQ ID NO: 2057956 - RNA, 15 nt, Human
agagaguuaaucaac

SEQ ID NO: 2057957 - RNA, 22 nt, Human
agagaguuaaucaacugaaagu

SEQ ID NO: 2057958 - RNA, 17 nt, Human
agagaguggcuccuccc

SEQ ID NO: 2057959 - RNA, 13 nt, Human
agagaucugcugu

SEQ ID NO: 2057960 - RNA, 14 nt, Human
agagaucugcuguc

SEQ ID NO: 2057961 - RNA, 19 nt, Human
agagaugaagagugagagg

SEQ ID NO: 2057962 - RNA, 17 nt, Human
agagauauggcagcgaa

SEQ ID NO: 2057963 - RNA, 17 nt, Human
agagaugacugaguccu

SEQ ID NO: 2057964 - RNA, 14 nt, Human
agagaugccuccac

SEQ ID NO: 2057965 - RNA, 12 nt, Human
agagaugccucc

SEQ ID NO: 2057966 - RNA, 12 nt, Human
agagaugaauua

SEQ ID NO: 2057967 - RNA, 18 nt, Human
agagaugacugaguccuc

SEQ ID NO: 2057968 - RNA, 13 nt, Human
agagaugccuccc

SEQ ID NO: 2057969 - RNA, 14 nt, Human
agagaugccucccu

SEQ ID NO: 2057970 - RNA, 16 nt, Human
agagaugccuccaccg

SEQ ID NO: 2057971 - RNA, 17 nt, Human
agagaugccuccaccgc

SEQ ID NO: 2057972 - RNA, 21 nt, Human
agagaugccuccaccgcugcc

SEQ ID NO: 2057973 - RNA, 23 nt, Human
agagaugccuccaccgcugccua

SEQ ID NO: 2057974 - RNA, 17 nt, Human
agagacccuuguuugau

SEQ ID NO: 2057975 - RNA, 16 nt, Human
ugaaagagaaccaguu

SEQ ID NO: 2057976 - RNA, 18 nt, Human
ugaaagagaaccaguuuc

SEQ ID NO: 2057977 - RNA, 12 nt, Human
agagacccaagg

SEQ ID NO: 2057978 - RNA, 13 nt, Human
agagacccaagga

SEQ ID NO: 2057979 - RNA, 14 nt, Human
agagacccaaggag

SEQ ID NO: 2057980 - RNA, 16 nt, Human
agagacccaaggagga

SEQ ID NO: 2057981 - RNA, 21 nt, Human
agagacccaaggaggaaaaac

SEQ ID NO: 2057982 - RNA, 21 nt, Human
agagacccccggaacaagccu

SEQ ID NO: 2057983 - RNA, 13 nt, Human
ugaaagagaacca

SEQ ID NO: 2057984 - RNA, 18 nt, Human
ugaaagacuguacaaagu

SEQ ID NO: 2057985 - RNA, 19 nt, Human
ugaaagacuguacaaagua

SEQ ID NO: 2057986 - RNA, 22 nt, Human
ugaaagacuguacaaaguagaa

SEQ ID NO: 2057987 - RNA, 14 nt, Human
ugaaagaaacaguu

SEQ ID NO: 2057988 - RNA, 20 nt, Human
ugaaagaaacaguuaacuuu

SEQ ID NO: 2057989 - RNA, 22 nt, Human
ugaaagaaacaguuaacuuuca

SEQ ID NO: 2057990 - RNA, 20 nt, Human
ugaaagaaaauaugcaucua

SEQ ID NO: 2057991 - RNA, 16 nt, Human
ugaaagacuguacaaa

SEQ ID NO: 2057992 - RNA, 21 nt, Human
agacucuaggacauaaauuag

SEQ ID NO: 2057993 - RNA, 21 nt, Human
agacuccagcuggguuggaaa

SEQ ID NO: 2057994 - RNA, 16 nt, Human
agacucccaagcugga

SEQ ID NO: 2057995 - RNA, 18 nt, Human
agacuccgucucaaggaa

SEQ ID NO: 2057996 - RNA, 16 nt, Human
agacucugaaaucuca

SEQ ID NO: 2057997 - RNA, 20 nt, Human
agacucugaaaucucagaau

SEQ ID NO: 2057998 - RNA, 11 nt, Human
agacuggccug

SEQ ID NO: 2057999 - RNA, 16 nt, Human
agacuggccugaggag

SEQ ID NO: 2058000 - RNA, 18 nt, Human
agacuggccugaggagca

SEQ ID NO: 2058001 - RNA, 14 nt, Human
agacuggcuggcug

SEQ ID NO: 2058002 - RNA, 20 nt, Human
agacuggcuggcugcaguga

SEQ ID NO: 2058003 - RNA, 21 nt, Human
agacugggaagauaggcucug

SEQ ID NO: 2058004 - RNA, 22 nt, Human
agacugggaagauaggcucugc

SEQ ID NO: 2058005 - RNA, 23 nt, Human
agacugggaagauaggcucugca

SEQ ID NO: 2058006 - RNA, 15 nt, Human
ucuuuaaugucacag

SEQ ID NO: 2058007 - RNA, 22 nt, Human
agacaggcaagcaccuccugcc

SEQ ID NO: 2058008 - RNA, 18 nt, Human
agacaggaccugacuauu

SEQ ID NO: 2058009 - RNA, 14 nt, Human
agacaggagaaaug

SEQ ID NO: 2058010 - RNA, 20 nt, Human
agacaggcaagcaccuccug

SEQ ID NO: 2058011 - RNA, 19 nt, Human
ucuuuaaugucacaggcag

SEQ ID NO: 2058012 - RNA, 18 nt, Human
ucuuuaaugucacaggca

SEQ ID NO: 2058013 - RNA, 20 nt, Human
ucuuucccugcuuaaugaaa

SEQ ID NO: 2058014 - RNA, 19 nt, Human
ucuuucuaaugugugaauc

SEQ ID NO: 2058015 - RNA, 18 nt, Human
ucuuucuccuuagucuuc

SEQ ID NO: 2058016 - RNA, 21 nt, Human
ucuuucuccuuagucuucuca

SEQ ID NO: 2058017 - RNA, 24 nt, Human
ucuuucuccuuagucuucucauag

SEQ ID NO: 2058018 - RNA, 14 nt, Human
ucuuuguggcuucc

SEQ ID NO: 2058019 - RNA, 23 nt, Human
ucuuuguaaugucaccaccuucc

SEQ ID NO: 2058020 - RNA, 14 nt, Human
ucuuuguaauuauu

SEQ ID NO: 2058021 - RNA, 21 nt, Human
agagacaccugcaccuccccc

SEQ ID NO: 2058022 - RNA, 22 nt, Human
agagacaccugcaccucccccc

SEQ ID NO: 2058023 - RNA, 13 nt, Human
agagacaccugca

SEQ ID NO: 2058024 - RNA, 14 nt, Human
agagacaccugcac

SEQ ID NO: 2058025 - RNA, 15 nt, Human
agagacaccugcacc

SEQ ID NO: 2058026 - RNA, 16 nt, Human
agagacaccugcaccu

SEQ ID NO: 2058027 - RNA, 18 nt, Human
agagacaccugcaccucc

SEQ ID NO: 2058028 - RNA, 19 nt, Human
agagacaccugcaccuccc

SEQ ID NO: 2058029 - RNA, 20 nt, Human
agagacaccugcaccucccc

SEQ ID NO: 2058030 - RNA, 14 nt, Human
agacuguacaaagu

SEQ ID NO: 2058031 - RNA, 18 nt, Human
agacuggugagcagacug

SEQ ID NO: 2058032 - RNA, 23 nt, Human
agacuggugagcagacugguggg

SEQ ID NO: 2058033 - RNA, 20 nt, Human
ugaagaauuauuuuuuuucu

SEQ ID NO: 2058034 - RNA, 21 nt, Human
ugaagaauuauuuuuuuucuu

SEQ ID NO: 2058035 - RNA, 13 nt, Human
ugaagaacaguaa

SEQ ID NO: 2058036 - RNA, 11 nt, Human
ugaacuccugg

SEQ ID NO: 2058037 - RNA, 15 nt, Human
ugaagaacaguaacu

SEQ ID NO: 2058038 - RNA, 20 nt, Human
ugaagaacaguaacugccau

SEQ ID NO: 2058039 - RNA, 16 nt, Human
ugaacggggagaaaag

SEQ ID NO: 2058040 - RNA, 13 nt, Human
ugaacggccuugc

SEQ ID NO: 2058041 - RNA, 14 nt, Human
ugaacggccuugcu

SEQ ID NO: 2058042 - RNA, 13 nt, Human
ugaacggggagaa

SEQ ID NO: 2058043 - RNA, 15 nt, Human
ugaacggggagaaaa

SEQ ID NO: 2058044 - RNA, 15 nt, Human
ugaacggugagcauu

SEQ ID NO: 2058045 - RNA, 16 nt, Human
ugaacuaauaaaagca

SEQ ID NO: 2058046 - RNA, 13 nt, Human
ugaacccaggagg

SEQ ID NO: 2058047 - RNA, 14 nt, Human
ugaacccaggaggu

SEQ ID NO: 2058048 - RNA, 19 nt, Human
ugaacccaggagguggagg

SEQ ID NO: 2058049 - RNA, 13 nt, Human
ugaacccuugcuu

SEQ ID NO: 2058050 - RNA, 15 nt, Human
ugaacccuugcuugc

SEQ ID NO: 2058051 - RNA, 21 nt, Human
ugaaccaucauuauaaacgug

SEQ ID NO: 2058052 - RNA, 12 nt, Human
ugaacccaggag

SEQ ID NO: 2058053 - RNA, 22 nt, Human
ugaaccaccacacccagcccac

SEQ ID NO: 2058054 - RNA, 21 nt, Human
ugaaccaccacacccagccca

SEQ ID NO: 2058055 - RNA, 16 nt, Human
agagauugugguuuca

SEQ ID NO: 2058056 - RNA, 16 nt, Human
agagaugccucccuga

SEQ ID NO: 2058057 - RNA, 12 nt, Human
agagauggagga

SEQ ID NO: 2058058 - RNA, 13 nt, Human
agagauggaggag

SEQ ID NO: 2058059 - RNA, 14 nt, Human
agagauggaggagg

SEQ ID NO: 2058060 - RNA, 15 nt, Human
agagauggaggagga

SEQ ID NO: 2058061 - RNA, 13 nt, Human
ugaaauacuacuu

SEQ ID NO: 2058062 - RNA, 21 nt, Human
ugaaauaccaaccugaagaca

SEQ ID NO: 2058063 - RNA, 14 nt, Human
ugaaauaccagugu

SEQ ID NO: 2058064 - RNA, 16 nt, Human
ugaaauaccagugugg

SEQ ID NO: 2058065 - RNA, 22 nt, Human
ugaaauuuaauauagcuauuuu

SEQ ID NO: 2058066 - RNA, 13 nt, Human
ugaaauagucugu

SEQ ID NO: 2058067 - RNA, 16 nt, Human
ugaaauagucugugug

SEQ ID NO: 2058068 - RNA, 17 nt, Human
ugaaauagucuguguga

SEQ ID NO: 2058069 - RNA, 18 nt, Human
ugaaauagucugugugaa

SEQ ID NO: 2058070 - RNA, 20 nt, Human
ugaaauuuuuauuaaauuau

SEQ ID NO: 2058071 - RNA, 19 nt, Human
ugaaauuuuuauuaaauua

SEQ ID NO: 2058072 - RNA, 13 nt, Human
ugaaauaagagaa

SEQ ID NO: 2058073 - RNA, 14 nt, Human
ugaacaaaaaaaug

SEQ ID NO: 2058074 - RNA, 18 nt, Human
ugaacaaaaaauaaaaau

SEQ ID NO: 2058075 - RNA, 15 nt, Human
ugaaguaagcaaaga

SEQ ID NO: 2058076 - RNA, 14 nt, Human
ugaaguaaugaauu

SEQ ID NO: 2058077 - RNA, 20 nt, Human
ugaaguaaugaauuuuuaug

SEQ ID NO: 2058078 - RNA, 13 nt, Human
ugaaguacauauu

SEQ ID NO: 2058079 - RNA, 20 nt, Human
ugaaguacauauuaggaaaa

SEQ ID NO: 2058080 - RNA, 15 nt, Human
ugaaguauacuguau

SEQ ID NO: 2058081 - RNA, 13 nt, Human
ugaagucacacag

SEQ ID NO: 2058082 - RNA, 19 nt, Human
ugaauaaauucuauaggaa

SEQ ID NO: 2058083 - RNA, 21 nt, Human
ugaauaaauucuauaggaaca

SEQ ID NO: 2058084 - RNA, 15 nt, Human
ugaauaaccacuuaa

SEQ ID NO: 2058085 - RNA, 12 nt, Human
ugaauaauacag

SEQ ID NO: 2058086 - RNA, 14 nt, Human
ugaauaauuuccca

SEQ ID NO: 2058087 - RNA, 15 nt, Human
ugaauaauuucccaa

SEQ ID NO: 2058088 - RNA, 22 nt, Human
ugaauaauuucccaauuaggaa

SEQ ID NO: 2058089 - RNA, 13 nt, Human
ugaauaauacagu

SEQ ID NO: 2058090 - RNA, 23 nt, Human
ugaauauuugucgauauuuccau

SEQ ID NO: 2058091 - RNA, 11 nt, Human
ugaauauuuau

SEQ ID NO: 2058092 - RNA, 17 nt, Human
ugaauauuuauaacagc

SEQ ID NO: 2058093 - RNA, 18 nt, Human
ugaauauuuauaacagca

SEQ ID NO: 2058094 - RNA, 19 nt, Human
ugaauauuuauaacagcau

SEQ ID NO: 2058095 - RNA, 19 nt, Human
ugaauauuuauauuucacu

SEQ ID NO: 2058096 - RNA, 19 nt, Human
ugaauacagggcaugcauu

SEQ ID NO: 2058097 - RNA, 20 nt, Human
ugaauauuuauauuucacua

SEQ ID NO: 2058098 - RNA, 17 nt, Human
ugaaguaacuugucuua

SEQ ID NO: 2058099 - RNA, 18 nt, Human
ugaaguaacuugucuuaa

SEQ ID NO: 2058100 - RNA, 19 nt, Human
ugaaguaacuugucuuaaa

SEQ ID NO: 2058101 - RNA, 14 nt, Human
ugaaguaagcaaag

SEQ ID NO: 2058102 - RNA, 13 nt, Human
ugaaguaagcaaa

SEQ ID NO: 2058103 - RNA, 13 nt, Human
ugaagcaaacaca

SEQ ID NO: 2058104 - RNA, 15 nt, Human
ugaagcaaacacauu

SEQ ID NO: 2058105 - RNA, 14 nt, Human
ugaagcaaacacau

SEQ ID NO: 2058106 - RNA, 23 nt, Human
ugaagggaaggaagaggaagagu

SEQ ID NO: 2058107 - RNA, 14 nt, Human
ugaagggagagcca

SEQ ID NO: 2058108 - RNA, 18 nt, Human
ugaagggaaaggauauuu

SEQ ID NO: 2058109 - RNA, 21 nt, Human
ugaagggaaaggauauuuucu

SEQ ID NO: 2058110 - RNA, 22 nt, Human
ugaagggaaaggauauuuucuu

SEQ ID NO: 2058111 - RNA, 18 nt, Human
ugaagguuucugaaaauu

SEQ ID NO: 2058112 - RNA, 16 nt, Human
ugaagggagagccagc

SEQ ID NO: 2058113 - RNA, 17 nt, Human
ugaagggagagccagcu

SEQ ID NO: 2058114 - RNA, 19 nt, Human
ugaagggagagccagcucc

SEQ ID NO: 2058115 - RNA, 15 nt, Human
agaguaaaaacugaa

SEQ ID NO: 2058116 - RNA, 15 nt, Human
agaguaagcugcuuu

SEQ ID NO: 2058117 - RNA, 16 nt, Human
agaguaagcugcuuuu

SEQ ID NO: 2058118 - RNA, 22 nt, Human
agagggaugaggugcugggagg

SEQ ID NO: 2058119 - RNA, 23 nt, Human
agagggaugaggugcugggaggg

SEQ ID NO: 2058120 - RNA, 15 nt, Human
agagggagugacaga

SEQ ID NO: 2058121 - RNA, 16 nt, Human
agaggcuggaggcagg

SEQ ID NO: 2058122 - RNA, 20 nt, Human
agagggagugacagaggcag

SEQ ID NO: 2058123 - RNA, 22 nt, Human
agaggcugccucucccaucacu

SEQ ID NO: 2058124 - RNA, 17 nt, Human
agagcuggugucugauu

SEQ ID NO: 2058125 - RNA, 16 nt, Human
agagcugguugggaag

SEQ ID NO: 2058126 - RNA, 22 nt, Human
agagcugguugggaagacaugg

SEQ ID NO: 2058127 - RNA, 11 nt, Human
agagcuggugu

SEQ ID NO: 2058128 - RNA, 15 nt, Human
agagcuggugucuga

SEQ ID NO: 2058129 - RNA, 23 nt, Human
agaggcagccccauucugccugc

SEQ ID NO: 2058130 - RNA, 21 nt, Human
agaggcagggucucacucugu

SEQ ID NO: 2058131 - RNA, 22 nt, Human
agaggcagccccauucugccug

SEQ ID NO: 2058132 - RNA, 21 nt, Human
agaggcagccccauucugccu

SEQ ID NO: 2058133 - RNA, 13 nt, Human
agaggccaaugcc

SEQ ID NO: 2058134 - RNA, 14 nt, Human
agaggccagccugg

SEQ ID NO: 2058135 - RNA, 23 nt, Human
agaggccagccccacccaggagg

SEQ ID NO: 2058136 - RNA, 15 nt, Human
agaggccagccuggc

SEQ ID NO: 2058137 - RNA, 19 nt, Human
agaggccaugauucgccca

SEQ ID NO: 2058138 - RNA, 16 nt, Human
agaggccagccccacc

SEQ ID NO: 2058139 - RNA, 17 nt, Human
agaggccagccccaccc

SEQ ID NO: 2058140 - RNA, 18 nt, Human
agaggccagccccaccca

SEQ ID NO: 2058141 - RNA, 21 nt, Human
agaggccagccccacccagga

SEQ ID NO: 2058142 - RNA, 17 nt, Human
aguagcuggauuacagg

SEQ ID NO: 2058143 - RNA, 22 nt, Human
aguagcugggacuacaggcacc

SEQ ID NO: 2058144 - RNA, 21 nt, Human
aguagcugggacuacaggcac

SEQ ID NO: 2058145 - RNA, 19 nt, Human
aguagcugggacuacaggc

SEQ ID NO: 2058146 - RNA, 14 nt, Human
aguauguucaaagu

SEQ ID NO: 2058147 - RNA, 20 nt, Human
aguauuauaggccaaacugg

SEQ ID NO: 2058148 - RNA, 14 nt, Human
agucacaucacagg

SEQ ID NO: 2058149 - RNA, 17 nt, Human
agucacucaauuguuuu

SEQ ID NO: 2058150 - RNA, 15 nt, Human
agucacaucacagga

SEQ ID NO: 2058151 - RNA, 15 nt, Human
ugucagcauagaagu

SEQ ID NO: 2058152 - RNA, 22 nt, Human
agucacagagauaauucuagcu

SEQ ID NO: 2058153 - RNA, 21 nt, Human
uguauuaaguuguuaauaaaa

SEQ ID NO: 2058154 - RNA, 15 nt, Human
uguauuacauaaaua

SEQ ID NO: 2058155 - RNA, 18 nt, Human
uguauuacauaaauaaau

SEQ ID NO: 2058156 - RNA, 21 nt, Human
uguauuacauaaauaaauuaa

SEQ ID NO: 2058157 - RNA, 15 nt, Human
uguauuagucacaga

SEQ ID NO: 2058158 - RNA, 18 nt, Human
uguauuaggacuggcuuu

SEQ ID NO: 2058159 - RNA, 19 nt, Human
uguauuaggacuggcuuug

SEQ ID NO: 2058160 - RNA, 23 nt, Human
uguauuaggacuggcuuuguccc

SEQ ID NO: 2058161 - RNA, 21 nt, Human
uguauuaggugucauuuccau

SEQ ID NO: 2058162 - RNA, 18 nt, Human
ugucaaacuguagaaaug

SEQ ID NO: 2058163 - RNA, 14 nt, Human
uguauuauaacagu

SEQ ID NO: 2058164 - RNA, 15 nt, Human
uguauuauaacagug

SEQ ID NO: 2058165 - RNA, 14 nt, Human
ugucaaagaaucaa

SEQ ID NO: 2058166 - RNA, 15 nt, Human
ugucaacuaugauau

SEQ ID NO: 2058167 - RNA, 15 nt, Human
ugucaacuuuaugca

SEQ ID NO: 2058168 - RNA, 14 nt, Human
aguagcugggacua

SEQ ID NO: 2058169 - RNA, 13 nt, Human
aguagcugggacu

SEQ ID NO: 2058170 - RNA, 15 nt, Human
uguagagccaggguc

SEQ ID NO: 2058171 - RNA, 12 nt, Human
uguagagccagg

SEQ ID NO: 2058172 - RNA, 16 nt, Human
uguagagcagggcaag

SEQ ID NO: 2058173 - RNA, 20 nt, Human
agguuuguauauugucagau

SEQ ID NO: 2058174 - RNA, 13 nt, Human
agguuuguauauu

SEQ ID NO: 2058175 - RNA, 16 nt, Human
uguauccaugggggca

SEQ ID NO: 2058176 - RNA, 19 nt, Human
uguauccaugggggcaggg

SEQ ID NO: 2058177 - RNA, 12 nt, Human
agguuuguauau

SEQ ID NO: 2058178 - RNA, 16 nt, Human
uguaucccaugagccu

SEQ ID NO: 2058179 - RNA, 15 nt, Human
uguaucccaugagcc

SEQ ID NO: 2058180 - RNA, 14 nt, Human
uguauguguaagua

SEQ ID NO: 2058181 - RNA, 17 nt, Human
uguccugguuagcagag

SEQ ID NO: 2058182 - RNA, 20 nt, Human
uguccuuacccaucugcacc

SEQ ID NO: 2058183 - RNA, 18 nt, Human
ugucccuuucuuggccag

SEQ ID NO: 2058184 - RNA, 16 nt, Human
ugucccuuucuuggcc

SEQ ID NO: 2058185 - RNA, 17 nt, Human
ugucccuuucuuggcca

SEQ ID NO: 2058186 - RNA, 20 nt, Human
ugucccuuucugugugaaga

SEQ ID NO: 2058187 - RNA, 14 nt, Human
ugucccugcacuug

SEQ ID NO: 2058188 - RNA, 21 nt, Human
ugucccuaguaaaaauacaaa

SEQ ID NO: 2058189 - RNA, 14 nt, Human
ugucccuaggucag

SEQ ID NO: 2058190 - RNA, 17 nt, Human
ugucccuaugcauauca

SEQ ID NO: 2058191 - RNA, 21 nt, Human
ugucccucacuguugaauuuu

SEQ ID NO: 2058192 - RNA, 11 nt, Human
ugucccucuca

SEQ ID NO: 2058193 - RNA, 14 nt, Human
ugucccucucaggc

SEQ ID NO: 2058194 - RNA, 21 nt, Human
ugucccucucggaaggcuggc

SEQ ID NO: 2058195 - RNA, 15 nt, Human
ugucccucucaggca

SEQ ID NO: 2058196 - RNA, 15 nt, Human
ugucccucucucugg

SEQ ID NO: 2058197 - RNA, 16 nt, Human
ugucccucucucugga

SEQ ID NO: 2058198 - RNA, 22 nt, Human
ugucccuaccgagucucuucuc

SEQ ID NO: 2058199 - RNA, 21 nt, Human
ugucccuaccgagucucuucu

SEQ ID NO: 2058200 - RNA, 20 nt, Human
ugucccuaccgagucucuuc

SEQ ID NO: 2058201 - RNA, 13 nt, Human
uguccagggcccu

SEQ ID NO: 2058202 - RNA, 19 nt, Human
ugucccuacaccccucccc

SEQ ID NO: 2058203 - RNA, 21 nt, Human
uguccaggcacugcugcccag

SEQ ID NO: 2058204 - RNA, 20 nt, Human
uguccaggcacugcugccca

SEQ ID NO: 2058205 - RNA, 19 nt, Human
uguccaggcacugcugccc

SEQ ID NO: 2058206 - RNA, 15 nt, Human
uguccaccuggcccc

SEQ ID NO: 2058207 - RNA, 17 nt, Human
uguccacccccgccucc

SEQ ID NO: 2058208 - RNA, 11 nt, Human
uguccaccugg

SEQ ID NO: 2058209 - RNA, 12 nt, Human
uguccaccuggc

SEQ ID NO: 2058210 - RNA, 13 nt, Human
uguccaccuggcc

SEQ ID NO: 2058211 - RNA, 14 nt, Human
uguccaccuggccc

SEQ ID NO: 2058212 - RNA, 18 nt, Human
ugucagcuacuaaugaug

SEQ ID NO: 2058213 - RNA, 19 nt, Human
ugucagcuacuaaugaugu

SEQ ID NO: 2058214 - RNA, 21 nt, Human
ugucagcuacuaaugauguuu

SEQ ID NO: 2058215 - RNA, 18 nt, Human
ugucagcaucuucucacu

SEQ ID NO: 2058216 - RNA, 20 nt, Human
uguccacagaugccuccacc

SEQ ID NO: 2058217 - RNA, 17 nt, Human
uguccacauagguuuag

SEQ ID NO: 2058218 - RNA, 14 nt, Human
uguccacagaugcc

SEQ ID NO: 2058219 - RNA, 18 nt, Human
uguccacagaugccucca

SEQ ID NO: 2058220 - RNA, 19 nt, Human
uguccacagaugccuccac

SEQ ID NO: 2058221 - RNA, 20 nt, Human
agucccaccuuggcugcagg

SEQ ID NO: 2058222 - RNA, 23 nt, Human
agucccaccuuggcugcagggag

SEQ ID NO: 2058223 - RNA, 21 nt, Human
agucccaccuuggcugcaggg

SEQ ID NO: 2058224 - RNA, 21 nt, Human
aguccauauuucaauuuccaa

SEQ ID NO: 2058225 - RNA, 15 nt, Human
aguccagucucuucu

SEQ ID NO: 2058226 - RNA, 21 nt, Human
agucaucuugaccaagcagga

SEQ ID NO: 2058227 - RNA, 17 nt, Human
aguccaggucgggcuca

SEQ ID NO: 2058228 - RNA, 18 nt, Human
aguccaggucgggcucag

SEQ ID NO: 2058229 - RNA, 21 nt, Human
aguccaggucgggcucagcuc

SEQ ID NO: 2058230 - RNA, 22 nt, Human
aguccaggucgggcucagcucu

SEQ ID NO: 2058231 - RNA, 23 nt, Human
aguccaggucgggcucagcucug

SEQ ID NO: 2058232 - RNA, 20 nt, Human
agucaucuugaccaagcagg

SEQ ID NO: 2058233 - RNA, 14 nt, Human
agucaugaacacau

SEQ ID NO: 2058234 - RNA, 19 nt, Human
agucaugaacacaucagcu

SEQ ID NO: 2058235 - RNA, 22 nt, Human
agucaugaacacaucagcuagc

SEQ ID NO: 2058236 - RNA, 13 nt, Human
agucaugaagccc

SEQ ID NO: 2058237 - RNA, 14 nt, Human
agucaugaagccca

SEQ ID NO: 2058238 - RNA, 21 nt, Human
agucaugaagcccaagugaaa

SEQ ID NO: 2058239 - RNA, 13 nt, Human
aguccccaggccc

SEQ ID NO: 2058240 - RNA, 16 nt, Human
aguccccaggccccag

SEQ ID NO: 2058241 - RNA, 17 nt, Human
aguccccaggccccagg

SEQ ID NO: 2058242 - RNA, 19 nt, Human
aguccccaggccccaggaa

SEQ ID NO: 2058243 - RNA, 21 nt, Human
aguccccaggccccaggaagc

SEQ ID NO: 2058244 - RNA, 23 nt, Human
aguccauauuucaauuuccaaga

SEQ ID NO: 2058245 - RNA, 13 nt, Human
uguccuuucccuc

SEQ ID NO: 2058246 - RNA, 17 nt, Human
uguccuuucccuccacu

SEQ ID NO: 2058247 - RNA, 21 nt, Human
uguccuucucucaccuccuaa

SEQ ID NO: 2058248 - RNA, 18 nt, Human
uguccuucucucaccucc

SEQ ID NO: 2058249 - RNA, 19 nt, Human
uguccuucucucaccuccu

SEQ ID NO: 2058250 - RNA, 14 nt, Human
uguccuuggggaca

SEQ ID NO: 2058251 - RNA, 13 nt, Human
uguccuugcaccu

SEQ ID NO: 2058252 - RNA, 15 nt, Human
uguccuugcaccugc

SEQ ID NO: 2058253 - RNA, 16 nt, Human
uguccuugcaccugca

SEQ ID NO: 2058254 - RNA, 14 nt, Human
agucagguccaauu

SEQ ID NO: 2058255 - RNA, 14 nt, Human
agucagaugcccag

SEQ ID NO: 2058256 - RNA, 23 nt, Human
agucagaugcccagagggcccag

SEQ ID NO: 2058257 - RNA, 21 nt, Human
agucagucaugauggcaccac

SEQ ID NO: 2058258 - RNA, 19 nt, Human
agucagucugcacuuaaau

SEQ ID NO: 2058259 - RNA, 20 nt, Human
agucagugcccaacuguuau

SEQ ID NO: 2058260 - RNA, 18 nt, Human
agucaucguaggugauuu

SEQ ID NO: 2058261 - RNA, 22 nt, Human
agucaucguaggugauuugaag

SEQ ID NO: 2058262 - RNA, 14 nt, Human
agucaucucaacca

SEQ ID NO: 2058263 - RNA, 15 nt, Human
agucaucucaaccau

SEQ ID NO: 2058264 - RNA, 17 nt, Human
agucaucuccaucagcu

SEQ ID NO: 2058265 - RNA, 18 nt, Human
agucaucuccaucagcug

SEQ ID NO: 2058266 - RNA, 19 nt, Human
agucaucuccaucagcugu

SEQ ID NO: 2058267 - RNA, 20 nt, Human
agucaucuccaucagcugua

SEQ ID NO: 2058268 - RNA, 18 nt, Human
ugucuuguguuucuuuag

SEQ ID NO: 2058269 - RNA, 16 nt, Human
ugucuuguguuuuugu

SEQ ID NO: 2058270 - RNA, 21 nt, Human
ugucuuguguuuuugucuuau

SEQ ID NO: 2058271 - RNA, 15 nt, Human
ugucuuguuaauauu

SEQ ID NO: 2058272 - RNA, 17 nt, Human
ugucuuguuaauauucu

SEQ ID NO: 2058273 - RNA, 18 nt, Human
ugucuuguuaauauucuu

SEQ ID NO: 2058274 - RNA, 19 nt, Human
ugucuuguuaauauucuuu

SEQ ID NO: 2058275 - RNA, 23 nt, Human
ugucuugcuauggggagaaaaga

SEQ ID NO: 2058276 - RNA, 15 nt, Human
ugugaaccaccacac

SEQ ID NO: 2058277 - RNA, 12 nt, Human
ugucuuuauaug

SEQ ID NO: 2058278 - RNA, 15 nt, Human
ugucuuucagauaca

SEQ ID NO: 2058279 - RNA, 16 nt, Human
ugucuuucagauacau

SEQ ID NO: 2058280 - RNA, 14 nt, Human
ugucuuuaaggaaa

SEQ ID NO: 2058281 - RNA, 15 nt, Human
ugucuuuaaggaaaa

SEQ ID NO: 2058282 - RNA, 19 nt, Human
ugucuuuaggcagcagcuu

SEQ ID NO: 2058283 - RNA, 21 nt, Human
ugucuuuaggcagcagcuuuu

SEQ ID NO: 2058284 - RNA, 23 nt, Human
ugugaaccaccacacccagccca

SEQ ID NO: 2058285 - RNA, 22 nt, Human
ugugaaccaccacacccagccc

SEQ ID NO: 2058286 - RNA, 17 nt, Human
ugugaaccaccacaccc

SEQ ID NO: 2058287 - RNA, 16 nt, Human
ugugaaccaccacacc

SEQ ID NO: 2058288 - RNA, 19 nt, Human
ugucuuucagauacauggu

SEQ ID NO: 2058289 - RNA, 20 nt, Human
ugucuuucagauacaugguu

SEQ ID NO: 2058290 - RNA, 21 nt, Human
ugugaacgauuuagaaagaag

SEQ ID NO: 2058291 - RNA, 13 nt, Human
ugucuuccugcau

SEQ ID NO: 2058292 - RNA, 17 nt, Human
ugucuuccugcauucac

SEQ ID NO: 2058293 - RNA, 18 nt, Human
ugucuuccugcauucacc

SEQ ID NO: 2058294 - RNA, 16 nt, Human
ugucuucucaggcucu

SEQ ID NO: 2058295 - RNA, 21 nt, Human
ugucuucucaggcucugcccu

SEQ ID NO: 2058296 - RNA, 22 nt, Human
ugucuucucaggcucugcccug

SEQ ID NO: 2058297 - RNA, 20 nt, Human
ugucuucaauuuguauaaaa

SEQ ID NO: 2058298 - RNA, 21 nt, Human
ugucuucaauuuguauaaaau

SEQ ID NO: 2058299 - RNA, 19 nt, Human
ugucuucacagcucugugu

SEQ ID NO: 2058300 - RNA, 15 nt, Human
ugucuucauagcaga

SEQ ID NO: 2058301 - RNA, 19 nt, Human
ugucuucauccuuagcaac

SEQ ID NO: 2058302 - RNA, 21 nt, Human
ugucuucauccuuagcaacag

SEQ ID NO: 2058303 - RNA, 12 nt, Human
ugucuuccauaa

SEQ ID NO: 2058304 - RNA, 13 nt, Human
ugucuuccauaau

SEQ ID NO: 2058305 - RNA, 14 nt, Human
ugucuuccauaaug

SEQ ID NO: 2058306 - RNA, 17 nt, Human
ugucuuccauaauguau

SEQ ID NO: 2058307 - RNA, 21 nt, Human
ugucuugcaauggcagccuug

SEQ ID NO: 2058308 - RNA, 20 nt, Human
ugucuugcaauggcagccuu

SEQ ID NO: 2058309 - RNA, 18 nt, Human
ugucuugcaauggcagcc

SEQ ID NO: 2058310 - RNA, 17 nt, Human
ugucuugcaauggcagc

SEQ ID NO: 2058311 - RNA, 23 nt, Human
ugucuucucaggcucugcccugc

SEQ ID NO: 2058312 - RNA, 15 nt, Human
ugucuugcaauggca

SEQ ID NO: 2058313 - RNA, 21 nt, Human
ugucucgugguaggacuguag

SEQ ID NO: 2058314 - RNA, 18 nt, Human
ugucucgugguaggacug

SEQ ID NO: 2058315 - RNA, 19 nt, Human
ugucucgugguaggacugu

SEQ ID NO: 2058316 - RNA, 20 nt, Human
ugucucgugguaggacugua

SEQ ID NO: 2058317 - RNA, 13 nt, Human
ugucucucagaau

SEQ ID NO: 2058318 - RNA, 12 nt, Human
agucccugcccc

SEQ ID NO: 2058319 - RNA, 15 nt, Human
ugucuccucucucug

SEQ ID NO: 2058320 - RNA, 13 nt, Human
agucccgucagga

SEQ ID NO: 2058321 - RNA, 11 nt, Human
ugucuccugca

SEQ ID NO: 2058322 - RNA, 19 nt, Human
ugucuccuuugcaggcuca

SEQ ID NO: 2058323 - RNA, 14 nt, Human
ugucuuauuuuuag

SEQ ID NO: 2058324 - RNA, 15 nt, Human
ugucuuauuuuuaga

SEQ ID NO: 2058325 - RNA, 16 nt, Human
ugucuuauuuuuagau

SEQ ID NO: 2058326 - RNA, 17 nt, Human
ugucuuauuuuuagaug

SEQ ID NO: 2058327 - RNA, 23 nt, Human
ugucuuauuuuuagaugguuaca

SEQ ID NO: 2058328 - RNA, 13 nt, Human
ugucuuaauuaag

SEQ ID NO: 2058329 - RNA, 14 nt, Human
ugucuuaauuaagu

SEQ ID NO: 2058330 - RNA, 16 nt, Human
ugucuuaauuaaguaa

SEQ ID NO: 2058331 - RNA, 18 nt, Human
ugucuuaauuaaguaaac

SEQ ID NO: 2058332 - RNA, 20 nt, Human
ugucuuaauuaaguaaacua

SEQ ID NO: 2058333 - RNA, 21 nt, Human
ugucuuaauuaaguaaacuaa

SEQ ID NO: 2058334 - RNA, 22 nt, Human
ugucuuaauuaaguaaacuaau

SEQ ID NO: 2058335 - RNA, 21 nt, Human
ugucucuuuaaugucacaggc

SEQ ID NO: 2058336 - RNA, 22 nt, Human
ugucucuuuaaugucacaggca

SEQ ID NO: 2058337 - RNA, 18 nt, Human
ugucucuuuucucuuucu

SEQ ID NO: 2058338 - RNA, 14 nt, Human
ugucucuuuucucu

SEQ ID NO: 2058339 - RNA, 23 nt, Human
ugucucugggcuuggggcuuccu

SEQ ID NO: 2058340 - RNA, 20 nt, Human
ugucucuuaaaaaaauaaaa

SEQ ID NO: 2058341 - RNA, 18 nt, Human
ugucucuggcgugugggu

SEQ ID NO: 2058342 - RNA, 19 nt, Human
ugucucuggcgugugggua

SEQ ID NO: 2058343 - RNA, 15 nt, Human
agucuuuuccaugaa

SEQ ID NO: 2058344 - RNA, 13 nt, Human
agucuuuuccaug

SEQ ID NO: 2058345 - RNA, 20 nt, Human
agucuucucauagcauuaac

SEQ ID NO: 2058346 - RNA, 21 nt, Human
agucuucucauagcauuaacu

SEQ ID NO: 2058347 - RNA, 12 nt, Human
agucuucucaua

SEQ ID NO: 2058348 - RNA, 13 nt, Human
agucuucucauag

SEQ ID NO: 2058349 - RNA, 18 nt, Human
agucuucucauagcauua

SEQ ID NO: 2058350 - RNA, 11 nt, Human
agugaaaaagg

SEQ ID NO: 2058351 - RNA, 17 nt, Human
agugaaaaaggaggaag

SEQ ID NO: 2058352 - RNA, 20 nt, Human
agugaaaaaggaggaagaga

SEQ ID NO: 2058353 - RNA, 23 nt, Human
agugaaaaaggaggaagagaaaa

SEQ ID NO: 2058354 - RNA, 17 nt, Human
agucuucccuagggcug

SEQ ID NO: 2058355 - RNA, 18 nt, Human
agucuucccuagggcugg

SEQ ID NO: 2058356 - RNA, 19 nt, Human
agucuucccuagggcuggg

SEQ ID NO: 2058357 - RNA, 20 nt, Human
agucuucccuagggcugggu

SEQ ID NO: 2058358 - RNA, 22 nt, Human
agucuucccuagggcugggugu

SEQ ID NO: 2058359 - RNA, 13 nt, Human
agucuucccugau

SEQ ID NO: 2058360 - RNA, 12 nt, Human
agucucugugaa

SEQ ID NO: 2058361 - RNA, 11 nt, Human
agucucuguga

SEQ ID NO: 2058362 - RNA, 16 nt, Human
agucucugcuggccca

SEQ ID NO: 2058363 - RNA, 17 nt, Human
agucucugcuggcccag

SEQ ID NO: 2058364 - RNA, 17 nt, Human
agucuuaacauuucuaa

SEQ ID NO: 2058365 - RNA, 24 nt, Human
agucuuagacuugaaauacuacuu

SEQ ID NO: 2058366 - RNA, 12 nt, Human
agucuccagccc

SEQ ID NO: 2058367 - RNA, 18 nt, Human
agucuccagcccacguuc

SEQ ID NO: 2058368 - RNA, 14 nt, Human
ugugagccagucua

SEQ ID NO: 2058369 - RNA, 14 nt, Human
ugugaagauguuug

SEQ ID NO: 2058370 - RNA, 16 nt, Human
ugugaagauguuugca

SEQ ID NO: 2058371 - RNA, 17 nt, Human
ugugaagauguuugcaa

SEQ ID NO: 2058372 - RNA, 22 nt, Human
ugugaagaugauauacuauuuu

SEQ ID NO: 2058373 - RNA, 18 nt, Human
ugugaagagggagaagca

SEQ ID NO: 2058374 - RNA, 22 nt, Human
ugugaagaucacguuccuuccc

SEQ ID NO: 2058375 - RNA, 14 nt, Human
ugugagcaagaagu

SEQ ID NO: 2058376 - RNA, 19 nt, Human
ugugagcaagcauuuaugu

SEQ ID NO: 2058377 - RNA, 12 nt, Human
agugagcaugcu

SEQ ID NO: 2058378 - RNA, 21 nt, Human
agugagcaugcuuucugaacu

SEQ ID NO: 2058379 - RNA, 13 nt, Human
agugagagagaca

SEQ ID NO: 2058380 - RNA, 18 nt, Human
agugagagagacaagaag

SEQ ID NO: 2058381 - RNA, 14 nt, Human
agugagagcugggu

SEQ ID NO: 2058382 - RNA, 12 nt, Human
agugaaaacuag

SEQ ID NO: 2058383 - RNA, 14 nt, Human
agugaaaauaggua

SEQ ID NO: 2058384 - RNA, 13 nt, Human
agugagacucugu

SEQ ID NO: 2058385 - RNA, 21 nt, Human
agugagacccugucucaaaaa

SEQ ID NO: 2058386 - RNA, 17 nt, Human
agugagacccugucuca

SEQ ID NO: 2058387 - RNA, 16 nt, Human
agugaaagcuagagau

SEQ ID NO: 2058388 - RNA, 14 nt, Human
agugaaagcaucac

SEQ ID NO: 2058389 - RNA, 17 nt, Human
agugagacucugucuca

SEQ ID NO: 2058390 - RNA, 16 nt, Human
agugagacucugucuc

SEQ ID NO: 2058391 - RNA, 22 nt, Human
agugagacucugucucaaaaaa

SEQ ID NO: 2058392 - RNA, 18 nt, Human
agugagaccccugucucc

SEQ ID NO: 2058393 - RNA, 16 nt, Human
agugagacccugucuc

SEQ ID NO: 2058394 - RNA, 17 nt, Human
agugagacccugucucu

SEQ ID NO: 2058395 - RNA, 15 nt, Human
uggugaacauugcaa

SEQ ID NO: 2058396 - RNA, 20 nt, Human
uggugaacauugcaauagaa

SEQ ID NO: 2058397 - RNA, 19 nt, Human
aggguggugaccucugccu

SEQ ID NO: 2058398 - RNA, 18 nt, Human
aggguggugaccucugcc

SEQ ID NO: 2058399 - RNA, 17 nt, Human
aggguggugaccucugc

SEQ ID NO: 2058400 - RNA, 15 nt, Human
aggguugggcuggug

SEQ ID NO: 2058401 - RNA, 13 nt, Human
aggguugggcugg

SEQ ID NO: 2058402 - RNA, 14 nt, Human
aggguuggccccug

SEQ ID NO: 2058403 - RNA, 13 nt, Human
aggguuggccccu

SEQ ID NO: 2058404 - RNA, 14 nt, Human
aggguucaaaaugu

SEQ ID NO: 2058405 - RNA, 18 nt, Human
aggguucaaaaugucugu

SEQ ID NO: 2058406 - RNA, 16 nt, Human
aggguucagagacuca

SEQ ID NO: 2058407 - RNA, 18 nt, Human
aggguucagagacucagg

SEQ ID NO: 2058408 - RNA, 22 nt, Human
aggguucaaaaugucuguagcu

SEQ ID NO: 2058409 - RNA, 15 nt, Human
aggguucccccagcc

SEQ ID NO: 2058410 - RNA, 17 nt, Human
aggguucccccagcccu

SEQ ID NO: 2058411 - RNA, 18 nt, Human
aggguucccccagcccug

SEQ ID NO: 2058412 - RNA, 23 nt, Human
aggguuccuguagaccuagggag

SEQ ID NO: 2058413 - RNA, 17 nt, Human
aggguucuccucucccc

SEQ ID NO: 2058414 - RNA, 21 nt, Human
aggguuccuguagaccuaggg

SEQ ID NO: 2058415 - RNA, 19 nt, Human
aggguucccccagcccugu

SEQ ID NO: 2058416 - RNA, 20 nt, Human
aggguucuccucuccccucu

SEQ ID NO: 2058417 - RNA, 21 nt, Human
aggguugaguuacuuccuauc

SEQ ID NO: 2058418 - RNA, 12 nt, Human
uggucuguguga

SEQ ID NO: 2058419 - RNA, 13 nt, Human
uggucugaauguu

SEQ ID NO: 2058420 - RNA, 18 nt, Human
uggucugacccacugcuu

SEQ ID NO: 2058421 - RNA, 13 nt, Human
uggucucugccau

SEQ ID NO: 2058422 - RNA, 22 nt, Human
uggucucugcugaagguuguaa

SEQ ID NO: 2058423 - RNA, 13 nt, Human
uggucucuugcuu

SEQ ID NO: 2058424 - RNA, 12 nt, Human
uggucugaaugu

SEQ ID NO: 2058425 - RNA, 16 nt, Human
uggucugauuucagga

SEQ ID NO: 2058426 - RNA, 15 nt, Human
uggucugcaggcagg

SEQ ID NO: 2058427 - RNA, 14 nt, Human
uggucugcaggcag

SEQ ID NO: 2058428 - RNA, 21 nt, Human
aggucaaggcugcagugagcc

SEQ ID NO: 2058429 - RNA, 17 nt, Human
aggucaacagagaaggc

SEQ ID NO: 2058430 - RNA, 19 nt, Human
aggucaacagagaaggcag

SEQ ID NO: 2058431 - RNA, 21 nt, Human
aggucaacagagaaggcagga

SEQ ID NO: 2058432 - RNA, 19 nt, Human
aggucaagaagaagaugga

SEQ ID NO: 2058433 - RNA, 16 nt, Human
aggucaagcccaggag

SEQ ID NO: 2058434 - RNA, 18 nt, Human
aggucaagcccaggagga

SEQ ID NO: 2058435 - RNA, 19 nt, Human
aggucaaggccugucccug

SEQ ID NO: 2058436 - RNA, 20 nt, Human
aggucaaggccugucccugg

SEQ ID NO: 2058437 - RNA, 21 nt, Human
aggucaaggccugucccuggc

SEQ ID NO: 2058438 - RNA, 17 nt, Human
aggucaaguaagaagac

SEQ ID NO: 2058439 - RNA, 18 nt, Human
aggucaaguaagaagaca

SEQ ID NO: 2058440 - RNA, 19 nt, Human
aggucaaguaagaagacau

SEQ ID NO: 2058441 - RNA, 15 nt, Human
aggucaguacccacc

SEQ ID NO: 2058442 - RNA, 17 nt, Human
aggucaguacccaccug

SEQ ID NO: 2058443 - RNA, 18 nt, Human
aggucaguacccaccuga

SEQ ID NO: 2058444 - RNA, 19 nt, Human
aggucaguacccaccugag

SEQ ID NO: 2058445 - RNA, 15 nt, Human
aggucaggaguucga

SEQ ID NO: 2058446 - RNA, 17 nt, Human
aggucauagcugagauu

SEQ ID NO: 2058447 - RNA, 21 nt, Human
aggucuugaacuccuggccuc

SEQ ID NO: 2058448 - RNA, 20 nt, Human
aggucuugaacuccuggccu

SEQ ID NO: 2058449 - RNA, 14 nt, Human
aggugaaagggagc

SEQ ID NO: 2058450 - RNA, 16 nt, Human
aggugaaagggagcua

SEQ ID NO: 2058451 - RNA, 21 nt, Human
aggugaaagggagcuaucagg

SEQ ID NO: 2058452 - RNA, 22 nt, Human
aggucuugaacuccuggccuca

SEQ ID NO: 2058453 - RNA, 21 nt, Human
aggugaaaaaagcuuuuauga

SEQ ID NO: 2058454 - RNA, 16 nt, Human
agguccaauuuguaaa

SEQ ID NO: 2058455 - RNA, 21 nt, Human
aggucuuuugacauguggaaa

SEQ ID NO: 2058456 - RNA, 17 nt, Human
agguaugcaaucaaauc

SEQ ID NO: 2058457 - RNA, 20 nt, Human
agguaugaccuucuaggaag

SEQ ID NO: 2058458 - RNA, 13 nt, Human
agguaugaauaag

SEQ ID NO: 2058459 - RNA, 21 nt, Human
agguaucauuuucugcauuua

SEQ ID NO: 2058460 - RNA, 22 nt, Human
agguaugaccuucuaggaagcu

SEQ ID NO: 2058461 - RNA, 23 nt, Human
agguaugaccuucuaggaagcuc

SEQ ID NO: 2058462 - RNA, 16 nt, Human
agguaugaggucuagg

SEQ ID NO: 2058463 - RNA, 14 nt, Human
aggucaacagagaa

SEQ ID NO: 2058464 - RNA, 19 nt, Human
agguagcugaaaggggaag

SEQ ID NO: 2058465 - RNA, 19 nt, Human
agguagcugccccuggcuc

SEQ ID NO: 2058466 - RNA, 21 nt, Human
agguagcccuggccagaggcu

SEQ ID NO: 2058467 - RNA, 19 nt, Human
agguagcccuggccagagg

SEQ ID NO: 2058468 - RNA, 20 nt, Human
agguagcccuggccagaggc

SEQ ID NO: 2058469 - RNA, 14 nt, Human
agguagcugccccu

SEQ ID NO: 2058470 - RNA, 19 nt, Human
agguaggagaauugcuuga

SEQ ID NO: 2058471 - RNA, 21 nt, Human
aggguuguuaauggugcaaau

SEQ ID NO: 2058472 - RNA, 17 nt, Human
aggguugggcugguguc

SEQ ID NO: 2058473 - RNA, 15 nt, Human
aggguuggggagggg

SEQ ID NO: 2058474 - RNA, 17 nt, Human
aggguuggggaggggcg

SEQ ID NO: 2058475 - RNA, 15 nt, Human
aggguuuaucuuuug

SEQ ID NO: 2058476 - RNA, 16 nt, Human
agguagcccuggccag

SEQ ID NO: 2058477 - RNA, 13 nt, Human
aggggaggcagcc

SEQ ID NO: 2058478 - RNA, 21 nt, Human
aggggaggcagccggcaccca

SEQ ID NO: 2058479 - RNA, 23 nt, Human
aggggacgcugguagagauggag

SEQ ID NO: 2058480 - RNA, 14 nt, Human
aggggaggagggcg

SEQ ID NO: 2058481 - RNA, 19 nt, Human
aggggaggaucacuggagc

SEQ ID NO: 2058482 - RNA, 14 nt, Human
aggggacgcuggua

SEQ ID NO: 2058483 - RNA, 17 nt, Human
aggggaggaccucuggg

SEQ ID NO: 2058484 - RNA, 13 nt, Human
aggggaggagggc

SEQ ID NO: 2058485 - RNA, 16 nt, Human
aggggauagagagaga

SEQ ID NO: 2058486 - RNA, 15 nt, Human
aggggcuggacuggc

SEQ ID NO: 2058487 - RNA, 18 nt, Human
aggggcuggacuggcugu

SEQ ID NO: 2058488 - RNA, 19 nt, Human
aggggaggguggcagguga

SEQ ID NO: 2058489 - RNA, 16 nt, Human
aggggaggguggcagg

SEQ ID NO: 2058490 - RNA, 10 nt, Human
aggggcuggu

SEQ ID NO: 2058491 - RNA, 14 nt, Human
aggggcuuucugga

SEQ ID NO: 2058492 - RNA, 16 nt, Human
aggggcuuucuggaga

SEQ ID NO: 2058493 - RNA, 17 nt, Human
aggggcuuucuggagag

SEQ ID NO: 2058494 - RNA, 20 nt, Human
aggggcuuucuggagaggag

SEQ ID NO: 2058495 - RNA, 15 nt, Human
aggguaaggugccuu

SEQ ID NO: 2058496 - RNA, 18 nt, Human
aggggucuccaggaggag

SEQ ID NO: 2058497 - RNA, 19 nt, Human
aggggucuccaggaggaga

SEQ ID NO: 2058498 - RNA, 19 nt, Human
aggggucccagccaccccg

SEQ ID NO: 2058499 - RNA, 15 nt, Human
aggggucccagccac

SEQ ID NO: 2058500 - RNA, 18 nt, Human
aggggucccagccacccc

SEQ ID NO: 2058501 - RNA, 12 nt, Human
aggggggagggg

SEQ ID NO: 2058502 - RNA, 17 nt, Human
aggggggagggggaggg

SEQ ID NO: 2058503 - RNA, 17 nt, Human
aggggggcugccuggcc

SEQ ID NO: 2058504 - RNA, 20 nt, Human
agggggguugcaguggagag

SEQ ID NO: 2058505 - RNA, 14 nt, Human
aggggucagggacc

SEQ ID NO: 2058506 - RNA, 20 nt, Human
aggggucagggaccaaggac

SEQ ID NO: 2058507 - RNA, 24 nt, Human
aggggucagggaccaaggaccccu

SEQ ID NO: 2058508 - RNA, 16 nt, Human
aggguaucaggugcug

SEQ ID NO: 2058509 - RNA, 18 nt, Human
aggguaucaggugcugcc

SEQ ID NO: 2058510 - RNA, 17 nt, Human
aggguagucugguuucu

SEQ ID NO: 2058511 - RNA, 23 nt, Human
aggguaccuugaacacuggggga

SEQ ID NO: 2058512 - RNA, 19 nt, Human
aggguaccuugaacacugg

SEQ ID NO: 2058513 - RNA, 19 nt, Human
aggguacuaaggaaucuuu

SEQ ID NO: 2058514 - RNA, 15 nt, Human
aggguagcagguacc

SEQ ID NO: 2058515 - RNA, 16 nt, Human
uggucaucuuuuucuc

SEQ ID NO: 2058516 - RNA, 15 nt, Human
ugguccagcuugcuc

SEQ ID NO: 2058517 - RNA, 17 nt, Human
ugguccagggaagcugg

SEQ ID NO: 2058518 - RNA, 19 nt, Human
ugguccagggaagcuggcc

SEQ ID NO: 2058519 - RNA, 22 nt, Human
ugguccagcuugcucuucagug

SEQ ID NO: 2058520 - RNA, 22 nt, Human
ugguaauuuaagauuccagaga

SEQ ID NO: 2058521 - RNA, 14 nt, Human
ugguaaaauugcau

SEQ ID NO: 2058522 - RNA, 16 nt, Human
ugguaaaauugcaugg

SEQ ID NO: 2058523 - RNA, 19 nt, Human
ugguaaacgcugucccuag

SEQ ID NO: 2058524 - RNA, 23 nt, Human
ugguaauuuauaguuuauacagu

SEQ ID NO: 2058525 - RNA, 23 nt, Human
uggucaccaaaucagcugcuacu

SEQ ID NO: 2058526 - RNA, 21 nt, Human
uggucaccaaaucagcugcua

SEQ ID NO: 2058527 - RNA, 16 nt, Human
ugguacauggccagug

SEQ ID NO: 2058528 - RNA, 15 nt, Human
ugguacauggccagu

SEQ ID NO: 2058529 - RNA, 22 nt, Human
ugggucuuguuuuuuuuuucca

SEQ ID NO: 2058530 - RNA, 22 nt, Human
ugggucuucagggggccaggug

SEQ ID NO: 2058531 - RNA, 18 nt, Human
ugggugaaagaaaucaug

SEQ ID NO: 2058532 - RNA, 20 nt, Human
ugggugaaagaaaucauguu

SEQ ID NO: 2058533 - RNA, 15 nt, Human
ugggugaagacagag

SEQ ID NO: 2058534 - RNA, 14 nt, Human
uggguggaugccug

SEQ ID NO: 2058535 - RNA, 19 nt, Human
uggguggaaccaggaaccu

SEQ ID NO: 2058536 - RNA, 14 nt, Human
ugguaaaacacuug

SEQ ID NO: 2058537 - RNA, 15 nt, Human
uggguuuuuguuacc

SEQ ID NO: 2058538 - RNA, 22 nt, Human
uggguuuuuguuaccuuuaugg

SEQ ID NO: 2058539 - RNA, 23 nt, Human
uggguggaugccugguggcagcu

SEQ ID NO: 2058540 - RNA, 14 nt, Human
uggguuuucuuccc

SEQ ID NO: 2058541 - RNA, 24 nt, Human
uggguuuucuucccaucacuggag

SEQ ID NO: 2058542 - RNA, 18 nt, Human
uggguuuuguagguacuu

SEQ ID NO: 2058543 - RNA, 13 nt, Human
agggugaggaugg

SEQ ID NO: 2058544 - RNA, 20 nt, Human
aggguacuuccacugaugga

SEQ ID NO: 2058545 - RNA, 22 nt, Human
agggugcugccccaugaagcca

SEQ ID NO: 2058546 - RNA, 17 nt, Human
agggugcugcuucccuc

SEQ ID NO: 2058547 - RNA, 21 nt, Human
agggugcugcuucccucugcc

SEQ ID NO: 2058548 - RNA, 21 nt, Human
uguacauuuccaaauucacaa

SEQ ID NO: 2058549 - RNA, 22 nt, Human
uguacauuuccaaauucacaag

SEQ ID NO: 2058550 - RNA, 13 nt, Human
uguacauuucuga

SEQ ID NO: 2058551 - RNA, 10 nt, Human
uguacauuuc

SEQ ID NO: 2058552 - RNA, 18 nt, Human
uguacauuuccaaauuca

SEQ ID NO: 2058553 - RNA, 16 nt, Human
uguacauuucugaaau

SEQ ID NO: 2058554 - RNA, 16 nt, Human
uguacuuaauaaauuc

SEQ ID NO: 2058555 - RNA, 20 nt, Human
uguacuuaauaaauucagau

SEQ ID NO: 2058556 - RNA, 21 nt, Human
uguacuuaauaaauucagaua

SEQ ID NO: 2058557 - RNA, 22 nt, Human
uguacuuaauaaauucagauau

SEQ ID NO: 2058558 - RNA, 14 nt, Human
uguacuucaaguua

SEQ ID NO: 2058559 - RNA, 16 nt, Human
uguacuugaugacaga

SEQ ID NO: 2058560 - RNA, 13 nt, Human
uguagaaggcaca

SEQ ID NO: 2058561 - RNA, 22 nt, Human
uguagaaguaggaagugaaaau

SEQ ID NO: 2058562 - RNA, 17 nt, Human
uguagaaggagacagag

SEQ ID NO: 2058563 - RNA, 21 nt, Human
uguagaaggagacagagcugg

SEQ ID NO: 2058564 - RNA, 21 nt, Human
uguagaccuagggaggaccuu

SEQ ID NO: 2058565 - RNA, 15 nt, Human
uguaaggaaugcuug

SEQ ID NO: 2058566 - RNA, 19 nt, Human
uguaaggaaugcuuggaau

SEQ ID NO: 2058567 - RNA, 15 nt, Human
uguaagcucuuugaa

SEQ ID NO: 2058568 - RNA, 19 nt, Human
uguaagcucuuugaaacaa

SEQ ID NO: 2058569 - RNA, 13 nt, Human
uguaauuugugua

SEQ ID NO: 2058570 - RNA, 15 nt, Human
uguaauuuguguaau

SEQ ID NO: 2058571 - RNA, 17 nt, Human
uguaauuuguguaauaa

SEQ ID NO: 2058572 - RNA, 20 nt, Human
uguaauuuguguaauaaagu

SEQ ID NO: 2058573 - RNA, 21 nt, Human
uguaauuuuaaauaaaaguga

SEQ ID NO: 2058574 - RNA, 12 nt, Human
uguaauuuucuu

SEQ ID NO: 2058575 - RNA, 17 nt, Human
uguacaaaauaaaguua

SEQ ID NO: 2058576 - RNA, 14 nt, Human
uguacaaaauggaa

SEQ ID NO: 2058577 - RNA, 20 nt, Human
uguacaaaauggaauucauu

SEQ ID NO: 2058578 - RNA, 19 nt, Human
uguacaaaguagaagucuu

SEQ ID NO: 2058579 - RNA, 23 nt, Human
uguacaaaguagaagucuuagau

SEQ ID NO: 2058580 - RNA, 20 nt, Human
uguacauauuugagacuagu

SEQ ID NO: 2058581 - RNA, 19 nt, Human
uguacauauguaaaauaaa

SEQ ID NO: 2058582 - RNA, 21 nt, Human
uguacauauguaaaauaaaau

SEQ ID NO: 2058583 - RNA, 13 nt, Human
uguacauauguaa

SEQ ID NO: 2058584 - RNA, 15 nt, Human
uguacauauguaaaa

SEQ ID NO: 2058585 - RNA, 16 nt, Human
uguacauauguaaaau

SEQ ID NO: 2058586 - RNA, 18 nt, Human
uguacauauguaaaauaa

SEQ ID NO: 2058587 - RNA, 20 nt, Human
aggugugagucaccaagccc

SEQ ID NO: 2058588 - RNA, 14 nt, Human
aggugugagucacc

SEQ ID NO: 2058589 - RNA, 15 nt, Human
agguggucugaaugu

SEQ ID NO: 2058590 - RNA, 16 nt, Human
agguggucugaauguu

SEQ ID NO: 2058591 - RNA, 17 nt, Human
agguggucugaauguuc

SEQ ID NO: 2058592 - RNA, 18 nt, Human
agguggucugaauguucu

SEQ ID NO: 2058593 - RNA, 22 nt, Human
aggugugaaccaccacacccag

SEQ ID NO: 2058594 - RNA, 19 nt, Human
agguggguuuucuucccau

SEQ ID NO: 2058595 - RNA, 21 nt, Human
agguggguuuucuucccauca

SEQ ID NO: 2058596 - RNA, 22 nt, Human
agguggguuuucuucccaucac

SEQ ID NO: 2058597 - RNA, 15 nt, Human
aggugguaugugugu

SEQ ID NO: 2058598 - RNA, 18 nt, Human
aggugguaugugugugua

SEQ ID NO: 2058599 - RNA, 14 nt, Human
agguggucugaaug

SEQ ID NO: 2058600 - RNA, 23 nt, Human
aggugugaaccaccacacccagc

SEQ ID NO: 2058601 - RNA, 13 nt, Human
agguggggcagcu

SEQ ID NO: 2058602 - RNA, 11 nt, Human
agguggggagg

SEQ ID NO: 2058603 - RNA, 22 nt, Human
agguggggaggggguuuggggg

SEQ ID NO: 2058604 - RNA, 23 nt, Human
agguggggaggggguuugggggc

SEQ ID NO: 2058605 - RNA, 13 nt, Human
agguggggaguca

SEQ ID NO: 2058606 - RNA, 14 nt, Human
agguggggcagcuu

SEQ ID NO: 2058607 - RNA, 23 nt, Human
agguggguuuucuucccaucacu

SEQ ID NO: 2058608 - RNA, 22 nt, Human
agguggggucuuugugagagug

SEQ ID NO: 2058609 - RNA, 21 nt, Human
agguggggucuuugugagagu

SEQ ID NO: 2058610 - RNA, 23 nt, Human
agguguuuaacggcacuguggcc

SEQ ID NO: 2058611 - RNA, 14 nt, Human
agguuuaacauaaa

SEQ ID NO: 2058612 - RNA, 15 nt, Human
agguuuaacauaaag

SEQ ID NO: 2058613 - RNA, 17 nt, Human
agguuuaacauaaaggu

SEQ ID NO: 2058614 - RNA, 20 nt, Human
agguugucugaagucacugc

SEQ ID NO: 2058615 - RNA, 12 nt, Human
agguugucugug

SEQ ID NO: 2058616 - RNA, 16 nt, Human
agguugucugaaguca

SEQ ID NO: 2058617 - RNA, 22 nt, Human
agguguucaagaccagccugac

SEQ ID NO: 2058618 - RNA, 17 nt, Human
agguguucuacacucau

SEQ ID NO: 2058619 - RNA, 20 nt, Human
agguguucuacacucaucuu

SEQ ID NO: 2058620 - RNA, 18 nt, Human
uguaagaaaccaaucaag

SEQ ID NO: 2058621 - RNA, 22 nt, Human
uguaagaaaccaaucaagauaa

SEQ ID NO: 2058622 - RNA, 24 nt, Human
uguaagaaaccaaucaagauaaag

SEQ ID NO: 2058623 - RNA, 22 nt, Human
uguaagcucuacugaggugcua

SEQ ID NO: 2058624 - RNA, 17 nt, Human
uguaagaaacacacuga

SEQ ID NO: 2058625 - RNA, 22 nt, Human
uguaagaaacacacugaggcag

SEQ ID NO: 2058626 - RNA, 23 nt, Human
aggugauccacccaccucagccu

SEQ ID NO: 2058627 - RNA, 21 nt, Human
aggugauccacccaccucagc

SEQ ID NO: 2058628 - RNA, 13 nt, Human
uguaaauauuuau

SEQ ID NO: 2058629 - RNA, 12 nt, Human
uguaaauauuua

SEQ ID NO: 2058630 - RNA, 21 nt, Human
uguaaauacacauagcaugua

SEQ ID NO: 2058631 - RNA, 17 nt, Human
ugguuuuaauugaagga

SEQ ID NO: 2058632 - RNA, 20 nt, Human
ugguuuuaauugaaggaaag

SEQ ID NO: 2058633 - RNA, 21 nt, Human
ugguuuuaauugaaggaaaga

SEQ ID NO: 2058634 - RNA, 16 nt, Human
ugguuuuccuaaaugc

SEQ ID NO: 2058635 - RNA, 22 nt, Human
ugguuuuccuaaaugcagugaa

SEQ ID NO: 2058636 - RNA, 23 nt, Human
ugguuugagcuuagugaaauuac

SEQ ID NO: 2058637 - RNA, 15 nt, Human
ugguuugcaaggaag

SEQ ID NO: 2058638 - RNA, 17 nt, Human
ugguuugcaaggaagcc

SEQ ID NO: 2058639 - RNA, 17 nt, Human
ugguuugagcuuaguga

SEQ ID NO: 2058640 - RNA, 15 nt, Human
ugguuugcagagcuu

SEQ ID NO: 2058641 - RNA, 16 nt, Human
ugguuucacuggccca

SEQ ID NO: 2058642 - RNA, 13 nt, Human
ugguuuaguguaa

SEQ ID NO: 2058643 - RNA, 14 nt, Human
ugguuuaguguaaa

SEQ ID NO: 2058644 - RNA, 20 nt, Human
ugguuuaguguaaaaaugag

SEQ ID NO: 2058645 - RNA, 21 nt, Human
ugguuuaguguaaaaaugaga

SEQ ID NO: 2058646 - RNA, 16 nt, Human
ugguuucuagacuugu

SEQ ID NO: 2058647 - RNA, 12 nt, Human
ugguuucuccag

SEQ ID NO: 2058648 - RNA, 20 nt, Human
ugguuuccacgaugaaaaac

SEQ ID NO: 2058649 - RNA, 13 nt, Human
ugguuuccuuccu

SEQ ID NO: 2058650 - RNA, 15 nt, Human
ugguuucuagcauga

SEQ ID NO: 2058651 - RNA, 19 nt, Human
ugguggcagauuuuacaaa

SEQ ID NO: 2058652 - RNA, 17 nt, Human
ugguuucauaggagaca

SEQ ID NO: 2058653 - RNA, 18 nt, Human
ugguuucacuggcccaag

SEQ ID NO: 2058654 - RNA, 13 nt, Human
ugguuucagcaau

SEQ ID NO: 2058655 - RNA, 22 nt, Human
ugguuucagcaauauuuaagga

SEQ ID NO: 2058656 - RNA, 16 nt, Human
ugguuuccaaggagcu

SEQ ID NO: 2058657 - RNA, 17 nt, Human
ugguuuccaaggagcug

SEQ ID NO: 2058658 - RNA, 22 nt, Human
ugguuuccaaggagcugagaau

SEQ ID NO: 2058659 - RNA, 23 nt, Human
ugguuuccaaggagcugagaaua

SEQ ID NO: 2058660 - RNA, 21 nt, Human
ugguuuccacgaugaaaaacu

SEQ ID NO: 2058661 - RNA, 17 nt, Human
ugguguuuuaaagagaa

SEQ ID NO: 2058662 - RNA, 21 nt, Human
ugguguuuuaaagagaaugua

SEQ ID NO: 2058663 - RNA, 17 nt, Human
ugguguugcagaagguu

SEQ ID NO: 2058664 - RNA, 21 nt, Human
ugguuaaguuggcuucuguuu

SEQ ID NO: 2058665 - RNA, 16 nt, Human
ugguuauuuuuauaca

SEQ ID NO: 2058666 - RNA, 17 nt, Human
ugguuauuuuuauacag

SEQ ID NO: 2058667 - RNA, 18 nt, Human
ugguuauuuuuauacagu

SEQ ID NO: 2058668 - RNA, 19 nt, Human
ugguuauuuuuauacagua

SEQ ID NO: 2058669 - RNA, 22 nt, Human
ugguuauuuagggaacugcuug

SEQ ID NO: 2058670 - RNA, 23 nt, Human
ugguucaggguuggccccugccc

SEQ ID NO: 2058671 - RNA, 23 nt, Human
ugguuuaaaagacacacuugucc

SEQ ID NO: 2058672 - RNA, 14 nt, Human
ugguuguuucuucc

SEQ ID NO: 2058673 - RNA, 15 nt, Human
ugguuguuucuucca

SEQ ID NO: 2058674 - RNA, 20 nt, Human
ugguuguuucuuccaagacu

SEQ ID NO: 2058675 - RNA, 22 nt, Human
ugguucaggguuggccccugcc

SEQ ID NO: 2058676 - RNA, 20 nt, Human
ugguucaggguuggccccug

SEQ ID NO: 2058677 - RNA, 12 nt, Human
ugguggcagcug

SEQ ID NO: 2058678 - RNA, 16 nt, Human
ugguguggcaaagccu

SEQ ID NO: 2058679 - RNA, 13 nt, Human
ugguguugcagaa

SEQ ID NO: 2058680 - RNA, 20 nt, Human
auaaccaaagcccaaagugg

SEQ ID NO: 2058681 - RNA, 12 nt, Human
auaaccacugcu

SEQ ID NO: 2058682 - RNA, 14 nt, Human
auaaccaauguuua

SEQ ID NO: 2058683 - RNA, 15 nt, Human
auaaccaauguuuaa

SEQ ID NO: 2058684 - RNA, 20 nt, Human
auaaccaauguuuaaaaaag

SEQ ID NO: 2058685 - RNA, 22 nt, Human
auaaccacuuaaaaaaugucca

SEQ ID NO: 2058686 - RNA, 14 nt, Human
auaaccacugcuuc

SEQ ID NO: 2058687 - RNA, 13 nt, Human
auaaccacuuaaa

SEQ ID NO: 2058688 - RNA, 22 nt, Human
auaacucuguggcauuauugca

SEQ ID NO: 2058689 - RNA, 12 nt, Human
auaacucuuugg

SEQ ID NO: 2058690 - RNA, 13 nt, Human
auaacucuuugga

SEQ ID NO: 2058691 - RNA, 22 nt, Human
auaacucuuuggauagcauguc

SEQ ID NO: 2058692 - RNA, 14 nt, Human
auaacugaaggaga

SEQ ID NO: 2058693 - RNA, 18 nt, Human
auaacugccuuaaaacuu

SEQ ID NO: 2058694 - RNA, 16 nt, Human
auaacugaaggagaag

SEQ ID NO: 2058695 - RNA, 18 nt, Human
auaacugaaggagaaggu

SEQ ID NO: 2058696 - RNA, 12 nt, Human
auaacugacaaa

SEQ ID NO: 2058697 - RNA, 16 nt, Human
auaacugacaaaucaa

SEQ ID NO: 2058698 - RNA, 17 nt, Human
auaacugacaaaucaag

SEQ ID NO: 2058699 - RNA, 18 nt, Human
auaacugacaaaucaagu

SEQ ID NO: 2058700 - RNA, 21 nt, Human
auaacugacaaaucaaguuuc

SEQ ID NO: 2058701 - RNA, 12 nt, Human
auaaauaaaugu

SEQ ID NO: 2058702 - RNA, 16 nt, Human
auaaauaaaugcaaua

SEQ ID NO: 2058703 - RNA, 15 nt, Human
auaaauaaauaaaua

SEQ ID NO: 2058704 - RNA, 21 nt, Human
auaaaugucauuaaaauaaau

SEQ ID NO: 2058705 - RNA, 13 nt, Human
auaaauuauaagu

SEQ ID NO: 2058706 - RNA, 11 nt, Human
auaaauuaaau

SEQ ID NO: 2058707 - RNA, 12 nt, Human
auaaauuaaaua

SEQ ID NO: 2058708 - RNA, 19 nt, Human
auaaauuaaauauauguau

SEQ ID NO: 2058709 - RNA, 13 nt, Human
uuacaugcauuug

SEQ ID NO: 2058710 - RNA, 23 nt, Human
uuaccauuuugggguacccacug

SEQ ID NO: 2058711 - RNA, 12 nt, Human
uuacccuucugu

SEQ ID NO: 2058712 - RNA, 16 nt, Human
uuacccuucugugccc

SEQ ID NO: 2058713 - RNA, 17 nt, Human
uuacccuucugugccca

SEQ ID NO: 2058714 - RNA, 19 nt, Human
uuacccuucugugcccagc

SEQ ID NO: 2058715 - RNA, 20 nt, Human
uuacccuucugugcccagcu

SEQ ID NO: 2058716 - RNA, 21 nt, Human
uuacccuucugugcccagcuc

SEQ ID NO: 2058717 - RNA, 22 nt, Human
uuacccuucugugcccagcuca

SEQ ID NO: 2058718 - RNA, 13 nt, Human
uuaccauuuguaa

SEQ ID NO: 2058719 - RNA, 14 nt, Human
uuaccauuuguaau

SEQ ID NO: 2058720 - RNA, 15 nt, Human
uuaccauuuguaaua

SEQ ID NO: 2058721 - RNA, 20 nt, Human
uuaccauuuguaauaaagua

SEQ ID NO: 2058722 - RNA, 23 nt, Human
uuaccauuuguaauaaaguauau

SEQ ID NO: 2058723 - RNA, 17 nt, Human
uuacccaauaagauaca

SEQ ID NO: 2058724 - RNA, 15 nt, Human
uuacaugagaacaga

SEQ ID NO: 2058725 - RNA, 17 nt, Human
uuacaugagaacagacu

SEQ ID NO: 2058726 - RNA, 21 nt, Human
uuacaucuguuuuaaauuuau

SEQ ID NO: 2058727 - RNA, 15 nt, Human
uuacaucuuucacau

SEQ ID NO: 2058728 - RNA, 15 nt, Human
auaaacucauuucua

SEQ ID NO: 2058729 - RNA, 20 nt, Human
auaaacgugaugaucagcug

SEQ ID NO: 2058730 - RNA, 22 nt, Human
auaaacagcuucaugccuuugu

SEQ ID NO: 2058731 - RNA, 18 nt, Human
auaaacuauuggaaagua

SEQ ID NO: 2058732 - RNA, 17 nt, Human
auaaacuguccucuuuc

SEQ ID NO: 2058733 - RNA, 12 nt, Human
auaaacugugug

SEQ ID NO: 2058734 - RNA, 14 nt, Human
auaaacugugugca

SEQ ID NO: 2058735 - RNA, 16 nt, Human
auaaacuguguuuacu

SEQ ID NO: 2058736 - RNA, 23 nt, Human
auaaacuuagugcggacaaguuu

SEQ ID NO: 2058737 - RNA, 13 nt, Human
auaaauaaaacau

SEQ ID NO: 2058738 - RNA, 15 nt, Human
auaaauaaaaaugga

SEQ ID NO: 2058739 - RNA, 17 nt, Human
auaaauaaaaauggaua

SEQ ID NO: 2058740 - RNA, 14 nt, Human
auaaaguaucuaca

SEQ ID NO: 2058741 - RNA, 16 nt, Human
auaaaguauuccaccu

SEQ ID NO: 2058742 - RNA, 18 nt, Human
auaaaguauuccaccuua

SEQ ID NO: 2058743 - RNA, 20 nt, Human
auaaaguauuccaccuuaaa

SEQ ID NO: 2058744 - RNA, 23 nt, Human
auaaaguauuccaccuuaaauua

SEQ ID NO: 2058745 - RNA, 21 nt, Human
aguuugguuguguaagagaau

SEQ ID NO: 2058746 - RNA, 16 nt, Human
aguuuuccuaaaugua

SEQ ID NO: 2058747 - RNA, 17 nt, Human
aguuuuccuaaauguau

SEQ ID NO: 2058748 - RNA, 18 nt, Human
aguuuuccuaaauguaua

SEQ ID NO: 2058749 - RNA, 12 nt, Human
aguuuuccuucu

SEQ ID NO: 2058750 - RNA, 14 nt, Human
aguuuuccuucuca

SEQ ID NO: 2058751 - RNA, 18 nt, Human
aguuuuccuucucaucug

SEQ ID NO: 2058752 - RNA, 22 nt, Human
aguuuuccuucucaucugugau

SEQ ID NO: 2058753 - RNA, 23 nt, Human
aguuuuccuucucaucugugauu

SEQ ID NO: 2058754 - RNA, 16 nt, Human
auaaacaucacacaca

SEQ ID NO: 2058755 - RNA, 22 nt, Human
auaaacaguggaauauaaggaa

SEQ ID NO: 2058756 - RNA, 17 nt, Human
auaaacaucacacacac

SEQ ID NO: 2058757 - RNA, 21 nt, Human
auaaacauccuucaagaacuc

SEQ ID NO: 2058758 - RNA, 15 nt, Human
auaauaaauugcaug

SEQ ID NO: 2058759 - RNA, 13 nt, Human
auaauaagcuaaa

SEQ ID NO: 2058760 - RNA, 15 nt, Human
auaauaagcuaaaga

SEQ ID NO: 2058761 - RNA, 20 nt, Human
auaaguuucacugacuuaga

SEQ ID NO: 2058762 - RNA, 10 nt, Human
auaagcaaaa

SEQ ID NO: 2058763 - RNA, 22 nt, Human
auaaguuaacuuccaauuuaca

SEQ ID NO: 2058764 - RNA, 21 nt, Human
uuaccucugauaccucaaccc

SEQ ID NO: 2058765 - RNA, 11 nt, Human
uuaccucugau

SEQ ID NO: 2058766 - RNA, 13 nt, Human
uuaccuaauuaga

SEQ ID NO: 2058767 - RNA, 23 nt, Human
auaagcaaagggagcacuggguu

SEQ ID NO: 2058768 - RNA, 12 nt, Human
auaagcaagaga

SEQ ID NO: 2058769 - RNA, 14 nt, Human
auaagcaagagaga

SEQ ID NO: 2058770 - RNA, 15 nt, Human
auaagcaagagagau

SEQ ID NO: 2058771 - RNA, 17 nt, Human
auaagcaagagagaugu

SEQ ID NO: 2058772 - RNA, 17 nt, Human
auaaguuaacuuccaau

SEQ ID NO: 2058773 - RNA, 16 nt, Human
auaagcagauuuaaca

SEQ ID NO: 2058774 - RNA, 16 nt, Human
auaagcaagagagaug

SEQ ID NO: 2058775 - RNA, 14 nt, Human
auaauucuacuuug

SEQ ID NO: 2058776 - RNA, 16 nt, Human
auaauuaugacaguua

SEQ ID NO: 2058777 - RNA, 14 nt, Human
auaauuaugacagu

SEQ ID NO: 2058778 - RNA, 12 nt, Human
auaauucccuau

SEQ ID NO: 2058779 - RNA, 17 nt, Human
auaauucccuaucuuuu

SEQ ID NO: 2058780 - RNA, 19 nt, Human
auaauucccuaucuuuuag

SEQ ID NO: 2058781 - RNA, 17 nt, Human
auaauuauccagaguuu

SEQ ID NO: 2058782 - RNA, 16 nt, Human
auaauuaucggaagca

SEQ ID NO: 2058783 - RNA, 19 nt, Human
auaauuaucggaagcagug

SEQ ID NO: 2058784 - RNA, 20 nt, Human
auaauuaucggaagcagugc

SEQ ID NO: 2058785 - RNA, 21 nt, Human
auaauuaucggaagcagugcc

SEQ ID NO: 2058786 - RNA, 22 nt, Human
auaauuaucggaagcagugccu

SEQ ID NO: 2058787 - RNA, 21 nt, Human
auaaucagcaagaauuugauc

SEQ ID NO: 2058788 - RNA, 13 nt, Human
auaaucagccucu

SEQ ID NO: 2058789 - RNA, 17 nt, Human
auaauacagccaaagau

SEQ ID NO: 2058790 - RNA, 21 nt, Human
auaauacagccaaagauaauc

SEQ ID NO: 2058791 - RNA, 12 nt, Human
auaauaauacaa

SEQ ID NO: 2058792 - RNA, 13 nt, Human
auaauaauacaag

SEQ ID NO: 2058793 - RNA, 19 nt, Human
auaauacaguaucucaggg

SEQ ID NO: 2058794 - RNA, 14 nt, Human
auaaucagccucuu

SEQ ID NO: 2058795 - RNA, 15 nt, Human
auaaucagccucuua

SEQ ID NO: 2058796 - RNA, 16 nt, Human
auaaucagccucuuaa

SEQ ID NO: 2058797 - RNA, 17 nt, Human
auaaucagccucuuaaa

SEQ ID NO: 2058798 - RNA, 13 nt, Human
auaaucuuugggu

SEQ ID NO: 2058799 - RNA, 14 nt, Human
uuagauuauauuga

SEQ ID NO: 2058800 - RNA, 22 nt, Human
uuagauuauauugagacaaaaa

SEQ ID NO: 2058801 - RNA, 13 nt, Human
uuagaugguuaca

SEQ ID NO: 2058802 - RNA, 16 nt, Human
uuagaugguuacacug

SEQ ID NO: 2058803 - RNA, 17 nt, Human
uuagaugguuacacugu

SEQ ID NO: 2058804 - RNA, 18 nt, Human
uuagaugguuacacuguu

SEQ ID NO: 2058805 - RNA, 13 nt, Human
uuagauuuuaauc

SEQ ID NO: 2058806 - RNA, 18 nt, Human
uuagcaggaagcugugag

SEQ ID NO: 2058807 - RNA, 18 nt, Human
uuagcacguuuaaaguuc

SEQ ID NO: 2058808 - RNA, 22 nt, Human
uuagcacguuuaaaguucugug

SEQ ID NO: 2058809 - RNA, 20 nt, Human
auaauucccuaucuuuuagu

SEQ ID NO: 2058810 - RNA, 14 nt, Human
uuauaguuuauaca

SEQ ID NO: 2058811 - RNA, 15 nt, Human
uuauaguuuauacag

SEQ ID NO: 2058812 - RNA, 17 nt, Human
uuauaguuuauacaguu

SEQ ID NO: 2058813 - RNA, 17 nt, Human
uuauauaaagagaaaau

SEQ ID NO: 2058814 - RNA, 19 nt, Human
uuauauaaagagaaaauug

SEQ ID NO: 2058815 - RNA, 22 nt, Human
uuauauaaagagaaaauugaau

SEQ ID NO: 2058816 - RNA, 15 nt, Human
uuauauaauuauguu

SEQ ID NO: 2058817 - RNA, 16 nt, Human
uuauauaauuauguua

SEQ ID NO: 2058818 - RNA, 17 nt, Human
uuauauaauuauguuau

SEQ ID NO: 2058819 - RNA, 13 nt, Human
auaauuuucuuca

SEQ ID NO: 2058820 - RNA, 17 nt, Human
auaauuuucuucaugca

SEQ ID NO: 2058821 - RNA, 22 nt, Human
auaauuuucuucaugcaaugac

SEQ ID NO: 2058822 - RNA, 23 nt, Human
auaauuuucuucaugcaaugaca

SEQ ID NO: 2058823 - RNA, 16 nt, Human
auaauuuugcauaaaa

SEQ ID NO: 2058824 - RNA, 21 nt, Human
auaauuuugcauaaaauugga

SEQ ID NO: 2058825 - RNA, 19 nt, Human
auaauuuuaugaaugucuu

SEQ ID NO: 2058826 - RNA, 13 nt, Human
auaauuuuaagau

SEQ ID NO: 2058827 - RNA, 12 nt, Human
auaauuuuauga

SEQ ID NO: 2058828 - RNA, 13 nt, Human
auaauuuuaugaa

SEQ ID NO: 2058829 - RNA, 15 nt, Human
auaauuuuaugaaug

SEQ ID NO: 2058830 - RNA, 20 nt, Human
uuauagugguguuuuaaaga

SEQ ID NO: 2058831 - RNA, 13 nt, Human
uuauauagcuuga

SEQ ID NO: 2058832 - RNA, 14 nt, Human
uuauauagcuugaa

SEQ ID NO: 2058833 - RNA, 18 nt, Human
uuauauagcuugaaacau

SEQ ID NO: 2058834 - RNA, 18 nt, Human
uuauauaguuuacuauuu

SEQ ID NO: 2058835 - RNA, 15 nt, Human
auaauuuuuaaagua

SEQ ID NO: 2058836 - RNA, 22 nt, Human
auaauuuuuuucaauauuuauu

SEQ ID NO: 2058837 - RNA, 21 nt, Human
auaauuuuuuucaauauuuau

SEQ ID NO: 2058838 - RNA, 20 nt, Human
auaauuuuuuucaauauuua

SEQ ID NO: 2058839 - RNA, 18 nt, Human
auaauuuuuaaaguauau

SEQ ID NO: 2058840 - RNA, 19 nt, Human
auaauuuuuaaaguauaua

SEQ ID NO: 2058841 - RNA, 21 nt, Human
auaauuuuuaaaguauauauu

SEQ ID NO: 2058842 - RNA, 23 nt, Human
auaauuuuuaaaguauauauuua

SEQ ID NO: 2058843 - RNA, 17 nt, Human
uuauaacagcauucuug

SEQ ID NO: 2058844 - RNA, 16 nt, Human
uuauaacucaucauaa

SEQ ID NO: 2058845 - RNA, 17 nt, Human
uuauaacucaucauaaa

SEQ ID NO: 2058846 - RNA, 18 nt, Human
uuauaacucaucauaaaa

SEQ ID NO: 2058847 - RNA, 18 nt, Human
uuauaacugaaggagaag

SEQ ID NO: 2058848 - RNA, 19 nt, Human
uuauaacucaucauaaaau

SEQ ID NO: 2058849 - RNA, 20 nt, Human
uuauaacucaucauaaaaua

SEQ ID NO: 2058850 - RNA, 21 nt, Human
uuauaacucaucauaaaauaa

SEQ ID NO: 2058851 - RNA, 22 nt, Human
uuauaacucaucauaaaauaaa

SEQ ID NO: 2058852 - RNA, 16 nt, Human
uuauacaugacacuga

SEQ ID NO: 2058853 - RNA, 20 nt, Human
uuauacaugacacugaaaug

SEQ ID NO: 2058854 - RNA, 22 nt, Human
uuauacaugacacugaaaugcc

SEQ ID NO: 2058855 - RNA, 23 nt, Human
uuauacaugacacugaaaugccu

SEQ ID NO: 2058856 - RNA, 13 nt, Human
uuauaacuuaaaa

SEQ ID NO: 2058857 - RNA, 15 nt, Human
uuauaacuuaaaaaa

SEQ ID NO: 2058858 - RNA, 17 nt, Human
uuauaacuuaaaauauu

SEQ ID NO: 2058859 - RNA, 14 nt, Human
uuagccccauaauu

SEQ ID NO: 2058860 - RNA, 16 nt, Human
uuagcaguuugcuuug

SEQ ID NO: 2058861 - RNA, 17 nt, Human
uuagcagugauuuuuau

SEQ ID NO: 2058862 - RNA, 12 nt, Human
uuagcaguucug

SEQ ID NO: 2058863 - RNA, 16 nt, Human
uuagcaguucugcaaa

SEQ ID NO: 2058864 - RNA, 18 nt, Human
uuagcaguucugcaaaua

SEQ ID NO: 2058865 - RNA, 21 nt, Human
uuagcaguucugcaaauagaa

SEQ ID NO: 2058866 - RNA, 21 nt, Human
uuagccguggugauuuagcag

SEQ ID NO: 2058867 - RNA, 13 nt, Human
uuagccgggcgug

SEQ ID NO: 2058868 - RNA, 15 nt, Human
uuagccucccugaaa

SEQ ID NO: 2058869 - RNA, 11 nt, Human
uuauaaauuaa

SEQ ID NO: 2058870 - RNA, 12 nt, Human
uuauaaauuaaa

SEQ ID NO: 2058871 - RNA, 13 nt, Human
uuauaaauuaaau

SEQ ID NO: 2058872 - RNA, 15 nt, Human
uuauaaauuaaauau

SEQ ID NO: 2058873 - RNA, 18 nt, Human
uuauaaauuaaauauaug

SEQ ID NO: 2058874 - RNA, 16 nt, Human
uuauagaaguuuagau

SEQ ID NO: 2058875 - RNA, 14 nt, Human
uuauagaaaguuca

SEQ ID NO: 2058876 - RNA, 15 nt, Human
uuauagacaaauaau

SEQ ID NO: 2058877 - RNA, 23 nt, Human
uuauagaauauuuauuaccucug

SEQ ID NO: 2058878 - RNA, 15 nt, Human
uuauagaauauuuau

SEQ ID NO: 2058879 - RNA, 15 nt, Human
uuagcagaaucaaaa

SEQ ID NO: 2058880 - RNA, 22 nt, Human
uuauacuguacuuaauaaauuc

SEQ ID NO: 2058881 - RNA, 16 nt, Human
uuauacuaagaaaaga

SEQ ID NO: 2058882 - RNA, 12 nt, Human
uuauacuaagaa

SEQ ID NO: 2058883 - RNA, 17 nt, Human
uuauaggucacuccugg

SEQ ID NO: 2058884 - RNA, 18 nt, Human
uuauaggucacuccuggg

SEQ ID NO: 2058885 - RNA, 21 nt, Human
uuauagugaauuaucccuuuu

SEQ ID NO: 2058886 - RNA, 16 nt, Human
uuauagccgaaaugau

SEQ ID NO: 2058887 - RNA, 16 nt, Human
uuauagcucaguuuau

SEQ ID NO: 2058888 - RNA, 21 nt, Human
auacagggcaugcauuuugca

SEQ ID NO: 2058889 - RNA, 16 nt, Human
auacaggggaauauuu

SEQ ID NO: 2058890 - RNA, 18 nt, Human
auacaggggaauauuuua

SEQ ID NO: 2058891 - RNA, 19 nt, Human
auacaggggaauauuuuau

SEQ ID NO: 2058892 - RNA, 20 nt, Human
auacaggggaauauuuuauu

SEQ ID NO: 2058893 - RNA, 22 nt, Human
auacaggaaaagcugcugacag

SEQ ID NO: 2058894 - RNA, 20 nt, Human
auacaggaaaagcugcugac

SEQ ID NO: 2058895 - RNA, 19 nt, Human
auacaggaaaagcugcuga

SEQ ID NO: 2058896 - RNA, 14 nt, Human
auacaggaaaagcu

SEQ ID NO: 2058897 - RNA, 19 nt, Human
auacaaaggcuuauuaauu

SEQ ID NO: 2058898 - RNA, 19 nt, Human
auacaaacauauuuguuaa

SEQ ID NO: 2058899 - RNA, 18 nt, Human
auacagccaaagauaauc

SEQ ID NO: 2058900 - RNA, 14 nt, Human
auacaguauucugu

SEQ ID NO: 2058901 - RNA, 15 nt, Human
auacaguauucugua

SEQ ID NO: 2058902 - RNA, 15 nt, Human
auacaguacaggcag

SEQ ID NO: 2058903 - RNA, 16 nt, Human
auacaguacaggcagc

SEQ ID NO: 2058904 - RNA, 19 nt, Human
auacaguacaggcagcaca

SEQ ID NO: 2058905 - RNA, 15 nt, Human
auacaguacaguggu

SEQ ID NO: 2058906 - RNA, 16 nt, Human
auacaguacagugguu

SEQ ID NO: 2058907 - RNA, 10 nt, Human
auacaguagu

SEQ ID NO: 2058908 - RNA, 17 nt, Human
auacaguagugagaaga

SEQ ID NO: 2058909 - RNA, 19 nt, Human
auacaguagugagaagaau

SEQ ID NO: 2058910 - RNA, 20 nt, Human
auacaguagugagaagaaua

SEQ ID NO: 2058911 - RNA, 15 nt, Human
auacaguuuuaaaga

SEQ ID NO: 2058912 - RNA, 16 nt, Human
auacaguuuuaaagaa

SEQ ID NO: 2058913 - RNA, 17 nt, Human
auacaguuuuaaagaau

SEQ ID NO: 2058914 - RNA, 23 nt, Human
auacaguuuuaaagaaucauuau

SEQ ID NO: 2058915 - RNA, 15 nt, Human
auacaguuuuccuaa

SEQ ID NO: 2058916 - RNA, 20 nt, Human
auacaguuuuccuaaaugua

SEQ ID NO: 2058917 - RNA, 21 nt, Human
auacaguuuuccuaaauguau

SEQ ID NO: 2058918 - RNA, 14 nt, Human
auacaugacacuga

SEQ ID NO: 2058919 - RNA, 15 nt, Human
auacaugacacugaa

SEQ ID NO: 2058920 - RNA, 16 nt, Human
auacaugacacugaaa

SEQ ID NO: 2058921 - RNA, 19 nt, Human
auacaugacacugaaaugc

SEQ ID NO: 2058922 - RNA, 15 nt, Human
auacauuuauaaugu

SEQ ID NO: 2058923 - RNA, 20 nt, Human
auacauuuauaauguuugcu

SEQ ID NO: 2058924 - RNA, 21 nt, Human
auacauuuauaauguuugcua

SEQ ID NO: 2058925 - RNA, 23 nt, Human
auacauuuauaauguuugcuauu

SEQ ID NO: 2058926 - RNA, 16 nt, Human
auacauuugauaaagu

SEQ ID NO: 2058927 - RNA, 12 nt, Human
auacauuuguau

SEQ ID NO: 2058928 - RNA, 17 nt, Human
auacauuuguauguugu

SEQ ID NO: 2058929 - RNA, 21 nt, Human
auacauuuguauguugugaag

SEQ ID NO: 2058930 - RNA, 19 nt, Human
auaccaaaauuauuucaga

SEQ ID NO: 2058931 - RNA, 18 nt, Human
auaccaaaauuauuucag

SEQ ID NO: 2058932 - RNA, 20 nt, Human
auaccaaaauuauuucagaa

SEQ ID NO: 2058933 - RNA, 13 nt, Human
uuaucaagcuaau

SEQ ID NO: 2058934 - RNA, 20 nt, Human
uuaucaagcuaauaaaauau

SEQ ID NO: 2058935 - RNA, 18 nt, Human
uuaucacugacacaaaaa

SEQ ID NO: 2058936 - RNA, 15 nt, Human
uuaucacuuuucugu

SEQ ID NO: 2058937 - RNA, 20 nt, Human
auacuaagauguucacugug

SEQ ID NO: 2058938 - RNA, 11 nt, Human
uuaucaugcaa

SEQ ID NO: 2058939 - RNA, 16 nt, Human
uuaucagugacagagu

SEQ ID NO: 2058940 - RNA, 17 nt, Human
uuaucagugacagaguu

SEQ ID NO: 2058941 - RNA, 16 nt, Human
uuaucaugcaaaugcu

SEQ ID NO: 2058942 - RNA, 13 nt, Human
uuaucaugcuguc

SEQ ID NO: 2058943 - RNA, 16 nt, Human
uuaucaugcugucuuu

SEQ ID NO: 2058944 - RNA, 14 nt, Human
auacuaagaaaaga

SEQ ID NO: 2058945 - RNA, 23 nt, Human
auaccagcuacuccggaggcuga

SEQ ID NO: 2058946 - RNA, 18 nt, Human
auaccagcuuagauuuua

SEQ ID NO: 2058947 - RNA, 17 nt, Human
auaccaggccgccccag

SEQ ID NO: 2058948 - RNA, 14 nt, Human
auaccagguugaaa

SEQ ID NO: 2058949 - RNA, 16 nt, Human
auaccagguugaaaga

SEQ ID NO: 2058950 - RNA, 12 nt, Human
auaccagugugg

SEQ ID NO: 2058951 - RNA, 11 nt, Human
auaccaucagc

SEQ ID NO: 2058952 - RNA, 17 nt, Human
auaccaucagcaaagaa

SEQ ID NO: 2058953 - RNA, 16 nt, Human
auacuagccagagcuc

SEQ ID NO: 2058954 - RNA, 18 nt, Human
auacuagccagagcuccu

SEQ ID NO: 2058955 - RNA, 22 nt, Human
auacuagccagagcuccuccuu

SEQ ID NO: 2058956 - RNA, 20 nt, Human
auacuauuuaguuuuuguaa

SEQ ID NO: 2058957 - RNA, 23 nt, Human
auacuauuuaguuuuuguaauuu

SEQ ID NO: 2058958 - RNA, 17 nt, Human
aguguacagucuuguau

SEQ ID NO: 2058959 - RNA, 13 nt, Human
aguguaccauaau

SEQ ID NO: 2058960 - RNA, 22 nt, Human
agugguguuuuaaagagaaugu

SEQ ID NO: 2058961 - RNA, 23 nt, Human
aguguacauggaauaacauguaa

SEQ ID NO: 2058962 - RNA, 19 nt, Human
aguguagauuuguuuugug

SEQ ID NO: 2058963 - RNA, 16 nt, Human
aguguagccccaagaa

SEQ ID NO: 2058964 - RNA, 17 nt, Human
aguguagccccaagaag

SEQ ID NO: 2058965 - RNA, 21 nt, Human
aguguagccccaagaaggcug

SEQ ID NO: 2058966 - RNA, 22 nt, Human
aguguagccccaagaaggcugg

SEQ ID NO: 2058967 - RNA, 13 nt, Human
aguguagccuugc

SEQ ID NO: 2058968 - RNA, 18 nt, Human
aguguaggcuuuacuuag

SEQ ID NO: 2058969 - RNA, 19 nt, Human
aguguaggcuuuacuuagc

SEQ ID NO: 2058970 - RNA, 22 nt, Human
aguguaggcuuuacuuagcuua

SEQ ID NO: 2058971 - RNA, 12 nt, Human
uguuaugauaaa

SEQ ID NO: 2058972 - RNA, 15 nt, Human
uguuaugauaaaaaa

SEQ ID NO: 2058973 - RNA, 19 nt, Human
uguuaugauaaaaaauuuu

SEQ ID NO: 2058974 - RNA, 21 nt, Human
uguuaugauaaaaaauuuugu

SEQ ID NO: 2058975 - RNA, 15 nt, Human
aguguagccuugccc

SEQ ID NO: 2058976 - RNA, 17 nt, Human
aguguagccuugcccgg

SEQ ID NO: 2058977 - RNA, 18 nt, Human
aguguagccuugcccgga

SEQ ID NO: 2058978 - RNA, 19 nt, Human
uguuauuuucuuugaaauu

SEQ ID NO: 2058979 - RNA, 18 nt, Human
uguuauuuucuguugaag

SEQ ID NO: 2058980 - RNA, 16 nt, Human
uguuauuuuuguuucu

SEQ ID NO: 2058981 - RNA, 21 nt, Human
uguuauuuuuguuucuuccaa

SEQ ID NO: 2058982 - RNA, 16 nt, Human
uguucccauucuugca

SEQ ID NO: 2058983 - RNA, 18 nt, Human
uguuauggcuuaaugaca

SEQ ID NO: 2058984 - RNA, 14 nt, Human
uguuauggaaacug

SEQ ID NO: 2058985 - RNA, 16 nt, Human
uguucuuaagacguga

SEQ ID NO: 2058986 - RNA, 18 nt, Human
uguucuguuuuguuuugu

SEQ ID NO: 2058987 - RNA, 13 nt, Human
uguucugggacac

SEQ ID NO: 2058988 - RNA, 12 nt, Human
uguucugggaca

SEQ ID NO: 2058989 - RNA, 22 nt, Human
uguuccccacugacagccuccc

SEQ ID NO: 2058990 - RNA, 15 nt, Human
uguucugggacacag

SEQ ID NO: 2058991 - RNA, 14 nt, Human
uguucugggacaca

SEQ ID NO: 2058992 - RNA, 13 nt, Human
aguguacagucuu

SEQ ID NO: 2058993 - RNA, 15 nt, Human
aguguacagucuugu

SEQ ID NO: 2058994 - RNA, 16 nt, Human
aguguacagucuugua

SEQ ID NO: 2058995 - RNA, 21 nt, Human
aguguacauggaauaacaugu

SEQ ID NO: 2058996 - RNA, 22 nt, Human
aguguacauggaauaacaugua

SEQ ID NO: 2058997 - RNA, 20 nt, Human
agugguucuacaaucuauuu

SEQ ID NO: 2058998 - RNA, 21 nt, Human
agugguucuacaaucuauuua

SEQ ID NO: 2058999 - RNA, 22 nt, Human
agugguuucauaggagacacau

SEQ ID NO: 2059000 - RNA, 22 nt, Human
aguguaacauaugcaaacauaa

SEQ ID NO: 2059001 - RNA, 13 nt, Human
aguguaaguguga

SEQ ID NO: 2059002 - RNA, 13 nt, Human
aguguaaaaauga

SEQ ID NO: 2059003 - RNA, 14 nt, Human
aguguaaaaaugag

SEQ ID NO: 2059004 - RNA, 15 nt, Human
aguguaaaaaugaga

SEQ ID NO: 2059005 - RNA, 16 nt, Human
aguguaaaaaugagaa

SEQ ID NO: 2059006 - RNA, 17 nt, Human
aguguaaaaaugagaac

SEQ ID NO: 2059007 - RNA, 16 nt, Human
aguggugcgaucuggg

SEQ ID NO: 2059008 - RNA, 13 nt, Human
aguggucuuucug

SEQ ID NO: 2059009 - RNA, 15 nt, Human
aguggucuuucugga

SEQ ID NO: 2059010 - RNA, 16 nt, Human
aguggucuuucuggag

SEQ ID NO: 2059011 - RNA, 18 nt, Human
aguggucuuucuggagag

SEQ ID NO: 2059012 - RNA, 20 nt, Human
aguggucuuucuggagaggu

SEQ ID NO: 2059013 - RNA, 19 nt, Human
agugggugaauaauacagu

SEQ ID NO: 2059014 - RNA, 21 nt, Human
aguggguuucacaagugaaaa

SEQ ID NO: 2059015 - RNA, 15 nt, Human
aguggguuucacaag

SEQ ID NO: 2059016 - RNA, 11 nt, Human
aguggcagcug

SEQ ID NO: 2059017 - RNA, 15 nt, Human
ugugcaacagacaag

SEQ ID NO: 2059018 - RNA, 14 nt, Human
ugugcaacagacaa

SEQ ID NO: 2059019 - RNA, 13 nt, Human
ugugcaaaaauuu

SEQ ID NO: 2059020 - RNA, 14 nt, Human
ugugcaaaaauuuu

SEQ ID NO: 2059021 - RNA, 15 nt, Human
ugugcaaaaauuuuu

SEQ ID NO: 2059022 - RNA, 17 nt, Human
ugugcaaaaauuuuugg

SEQ ID NO: 2059023 - RNA, 18 nt, Human
ugugcaaaaauuuuugga

SEQ ID NO: 2059024 - RNA, 12 nt, Human
ugugcaaauccu

SEQ ID NO: 2059025 - RNA, 13 nt, Human
aguggcagcugcu

SEQ ID NO: 2059026 - RNA, 12 nt, Human
aguggcagcugc

SEQ ID NO: 2059027 - RNA, 20 nt, Human
aguggcagcugcuuuugucu

SEQ ID NO: 2059028 - RNA, 14 nt, Human
aguggcagcugcuu

SEQ ID NO: 2059029 - RNA, 18 nt, Human
agugggggaucacagccu

SEQ ID NO: 2059030 - RNA, 13 nt, Human
agugggugaauaa

SEQ ID NO: 2059031 - RNA, 18 nt, Human
agugggugaauaauacag

SEQ ID NO: 2059032 - RNA, 12 nt, Human
aguggggcuggg

SEQ ID NO: 2059033 - RNA, 14 nt, Human
uguuguaaauauuu

SEQ ID NO: 2059034 - RNA, 15 nt, Human
uguuguaaagaguug

SEQ ID NO: 2059035 - RNA, 21 nt, Human
uguuguaaauauuuauguaaa

SEQ ID NO: 2059036 - RNA, 13 nt, Human
uguugucagcuga

SEQ ID NO: 2059037 - RNA, 19 nt, Human
aguucgagaccagccuggc

SEQ ID NO: 2059038 - RNA, 18 nt, Human
aguucgagaccagccugg

SEQ ID NO: 2059039 - RNA, 21 nt, Human
aguucgagaccagccuggcca

SEQ ID NO: 2059040 - RNA, 18 nt, Human
aguuauuucuuguuuguu

SEQ ID NO: 2059041 - RNA, 13 nt, Human
aguucaaacaaga

SEQ ID NO: 2059042 - RNA, 21 nt, Human
aguuauuuuuauuuauuuaaa

SEQ ID NO: 2059043 - RNA, 17 nt, Human
aguucccuacuuccugu

SEQ ID NO: 2059044 - RNA, 14 nt, Human
aguucccugaaaac

SEQ ID NO: 2059045 - RNA, 19 nt, Human
aguucccugaaaacccaga

SEQ ID NO: 2059046 - RNA, 20 nt, Human
aguucccugaaaacccagag

SEQ ID NO: 2059047 - RNA, 24 nt, Human
aguucccugaaaacccagagagga

SEQ ID NO: 2059048 - RNA, 21 nt, Human
aguucccugaaaacccagaga

SEQ ID NO: 2059049 - RNA, 13 nt, Human
aguucccuuggcc

SEQ ID NO: 2059050 - RNA, 20 nt, Human
aguuccugucccuucucuua

SEQ ID NO: 2059051 - RNA, 15 nt, Human
aguucccuuggccuc

SEQ ID NO: 2059052 - RNA, 16 nt, Human
aguucccuuggccuca

SEQ ID NO: 2059053 - RNA, 17 nt, Human
aguucccuuggccucag

SEQ ID NO: 2059054 - RNA, 18 nt, Human
aguucccuuggccucaga

SEQ ID NO: 2059055 - RNA, 20 nt, Human
aguuccuugaucuguauaua

SEQ ID NO: 2059056 - RNA, 14 nt, Human
aguuccuuauguau

SEQ ID NO: 2059057 - RNA, 20 nt, Human
aguuccuucagcuuccauuu

SEQ ID NO: 2059058 - RNA, 21 nt, Human
aguuccugucccuucucuuaa

SEQ ID NO: 2059059 - RNA, 23 nt, Human
aguuccugucccuucucuuaauu

SEQ ID NO: 2059060 - RNA, 17 nt, Human
aguucgagaccagccug

SEQ ID NO: 2059061 - RNA, 14 nt, Human
aguucgagaccagc

SEQ ID NO: 2059062 - RNA, 18 nt, Human
aguucgagaccaaccuga

SEQ ID NO: 2059063 - RNA, 21 nt, Human
aguucgaugggcccaauucuu

SEQ ID NO: 2059064 - RNA, 17 nt, Human
aguuauugacaaacucu

SEQ ID NO: 2059065 - RNA, 18 nt, Human
aguuauugacaaacucuc

SEQ ID NO: 2059066 - RNA, 17 nt, Human
aguuauuaauuucuuca

SEQ ID NO: 2059067 - RNA, 15 nt, Human
aguuaugugaaugau

SEQ ID NO: 2059068 - RNA, 13 nt, Human
aguuaugugaaug

SEQ ID NO: 2059069 - RNA, 14 nt, Human
aguuaugugaauga

SEQ ID NO: 2059070 - RNA, 21 nt, Human
aguuauggccuauacacuauu

SEQ ID NO: 2059071 - RNA, 18 nt, Human
aguuauggccuauacacu

SEQ ID NO: 2059072 - RNA, 12 nt, Human
aguuauaaauca

SEQ ID NO: 2059073 - RNA, 15 nt, Human
aguguuguuuguaaa

SEQ ID NO: 2059074 - RNA, 18 nt, Human
aguguuguuuguaaauaa

SEQ ID NO: 2059075 - RNA, 19 nt, Human
aguguuguuuguaaauaag

SEQ ID NO: 2059076 - RNA, 20 nt, Human
aguguuguuuguaaauaaga

SEQ ID NO: 2059077 - RNA, 21 nt, Human
aguguuguuuguaaauaagag

SEQ ID NO: 2059078 - RNA, 22 nt, Human
aguguuguuuguaaauaagaga

SEQ ID NO: 2059079 - RNA, 14 nt, Human
aguguuucaugggu

SEQ ID NO: 2059080 - RNA, 15 nt, Human
aguguuucccauaau

SEQ ID NO: 2059081 - RNA, 16 nt, Human
aguguuucccauaauu

SEQ ID NO: 2059082 - RNA, 19 nt, Human
aguguuucgacagcugauu

SEQ ID NO: 2059083 - RNA, 15 nt, Human
aguuaguagcauguu

SEQ ID NO: 2059084 - RNA, 18 nt, Human
aguuagguuuaacauaaa

SEQ ID NO: 2059085 - RNA, 19 nt, Human
aguuagguuuaacauaaag

SEQ ID NO: 2059086 - RNA, 23 nt, Human
aguuagguuuaacauaaagguua

SEQ ID NO: 2059087 - RNA, 14 nt, Human
aguuaguagcaugu

SEQ ID NO: 2059088 - RNA, 16 nt, Human
aguuaguagcauguug

SEQ ID NO: 2059089 - RNA, 17 nt, Human
aguuaguagcauguuga

SEQ ID NO: 2059090 - RNA, 16 nt, Human
aguuaguuucuuuggg

SEQ ID NO: 2059091 - RNA, 17 nt, Human
aguuaguuucuuuggga

SEQ ID NO: 2059092 - RNA, 17 nt, Human
aguuaggaaauaaaacc

SEQ ID NO: 2059093 - RNA, 17 nt, Human
aguuagggaauggcaca

SEQ ID NO: 2059094 - RNA, 18 nt, Human
aguuaggcuauucacaac

SEQ ID NO: 2059095 - RNA, 18 nt, Human
aguuaggaaauaaaaccu

SEQ ID NO: 2059096 - RNA, 20 nt, Human
aguuaggaaauaaaaccuuu

SEQ ID NO: 2059097 - RNA, 21 nt, Human
aguuaggaaauaaaaccuuuc

SEQ ID NO: 2059098 - RNA, 22 nt, Human
aguuaggaaauaaaaccuuuca

SEQ ID NO: 2059099 - RNA, 13 nt, Human
aguucuguguauu

SEQ ID NO: 2059100 - RNA, 16 nt, Human
aguucuguguauuuaa

SEQ ID NO: 2059101 - RNA, 21 nt, Human
aguucuguguauuuaauugua

SEQ ID NO: 2059102 - RNA, 22 nt, Human
aguucuguguauuuaauuguaa

SEQ ID NO: 2059103 - RNA, 13 nt, Human
aguugauucagcu

SEQ ID NO: 2059104 - RNA, 15 nt, Human
aguugauguugcauu

SEQ ID NO: 2059105 - RNA, 16 nt, Human
aguugauguugcauuu

SEQ ID NO: 2059106 - RNA, 23 nt, Human
aguugauucagcucugcaagaau

SEQ ID NO: 2059107 - RNA, 21 nt, Human
aguugauuuuacaauugaaau

SEQ ID NO: 2059108 - RNA, 23 nt, Human
aguugauuuuacaauugaaauga

SEQ ID NO: 2059109 - RNA, 14 nt, Human
aguugauucagcuc

SEQ ID NO: 2059110 - RNA, 15 nt, Human
aguugauucagcucu

SEQ ID NO: 2059111 - RNA, 17 nt, Human
aguugauucagcucugc

SEQ ID NO: 2059112 - RNA, 18 nt, Human
aguugauucagcucugca

SEQ ID NO: 2059113 - RNA, 15 nt, Human
uguuugcucagaaca

SEQ ID NO: 2059114 - RNA, 17 nt, Human
uguuugcucagaacaca

SEQ ID NO: 2059115 - RNA, 23 nt, Human
uguuugcucagaacacauucuuu

SEQ ID NO: 2059116 - RNA, 20 nt, Human
uguuugcucagcuucuccaa

SEQ ID NO: 2059117 - RNA, 11 nt, Human
uguuuggcugg

SEQ ID NO: 2059118 - RNA, 15 nt, Human
uguuuggggaugaga

SEQ ID NO: 2059119 - RNA, 12 nt, Human
uguuuggcuggg

SEQ ID NO: 2059120 - RNA, 19 nt, Human
uguuuggggaugagaaagg

SEQ ID NO: 2059121 - RNA, 14 nt, Human
uguugucagcugaa

SEQ ID NO: 2059122 - RNA, 15 nt, Human
uguugucagcaucuu

SEQ ID NO: 2059123 - RNA, 17 nt, Human
uguugucagcaucuucu

SEQ ID NO: 2059124 - RNA, 15 nt, Human
uguugucauugcuuu

SEQ ID NO: 2059125 - RNA, 16 nt, Human
uguugucauugcuuua

SEQ ID NO: 2059126 - RNA, 17 nt, Human
uguugucauugcuuuac

SEQ ID NO: 2059127 - RNA, 19 nt, Human
uguugucauugcuuuacug

SEQ ID NO: 2059128 - RNA, 20 nt, Human
uguugucauugcuuuacugg

SEQ ID NO: 2059129 - RNA, 16 nt, Human
uguuugccucugccuc

SEQ ID NO: 2059130 - RNA, 14 nt, Human
uguuugccucugcc

SEQ ID NO: 2059131 - RNA, 22 nt, Human
uguuuucaaaccaguauacaag

SEQ ID NO: 2059132 - RNA, 23 nt, Human
uguuuucaaaccaguauacaaga

SEQ ID NO: 2059133 - RNA, 15 nt, Human
uguuuucagacucag

SEQ ID NO: 2059134 - RNA, 15 nt, Human
uguuuucaguguaca

SEQ ID NO: 2059135 - RNA, 14 nt, Human
uguuuuaggagcau

SEQ ID NO: 2059136 - RNA, 14 nt, Human
uguuuuacugcuuu

SEQ ID NO: 2059137 - RNA, 16 nt, Human
uguuuuacugcuuuua

SEQ ID NO: 2059138 - RNA, 19 nt, Human
uguuuuagaaugaugcaca

SEQ ID NO: 2059139 - RNA, 24 nt, Human
uguuuuagaaugaugcacauuuca

SEQ ID NO: 2059140 - RNA, 17 nt, Human
uguuuucaguguacaug

SEQ ID NO: 2059141 - RNA, 15 nt, Human
uguuuucucuugaga

SEQ ID NO: 2059142 - RNA, 20 nt, Human
aguuuccucaggcugcugga

SEQ ID NO: 2059143 - RNA, 23 nt, Human
aguuuccucaggcugcuggagga

SEQ ID NO: 2059144 - RNA, 15 nt, Human
aguuucucagcuccc

SEQ ID NO: 2059145 - RNA, 16 nt, Human
aguuucucagcuccca

SEQ ID NO: 2059146 - RNA, 12 nt, Human
uuaaauaaaugu

SEQ ID NO: 2059147 - RNA, 21 nt, Human
uuaaauuauaacuuaaaauau

SEQ ID NO: 2059148 - RNA, 16 nt, Human
aguuucaauucagugc

SEQ ID NO: 2059149 - RNA, 18 nt, Human
aguuuccucaggcugcug

SEQ ID NO: 2059150 - RNA, 22 nt, Human
aguuucaaguauccuuguugac

SEQ ID NO: 2059151 - RNA, 21 nt, Human
aguuuuauugagaauuuuaaa

SEQ ID NO: 2059152 - RNA, 16 nt, Human
aguuuuauugagaauu

SEQ ID NO: 2059153 - RNA, 22 nt, Human
aguuuucacucuuauugcccac

SEQ ID NO: 2059154 - RNA, 16 nt, Human
aguuuucagaaccucu

SEQ ID NO: 2059155 - RNA, 12 nt, Human
aguuuuccauga

SEQ ID NO: 2059156 - RNA, 13 nt, Human
aguuuuccaugaa

SEQ ID NO: 2059157 - RNA, 16 nt, Human
aguuuuccaugaaaac

SEQ ID NO: 2059158 - RNA, 21 nt, Human
aguuuuccauggucacagaga

SEQ ID NO: 2059159 - RNA, 21 nt, Human
aguuuuccaugaaaacguuuu

SEQ ID NO: 2059160 - RNA, 22 nt, Human
aguuuucagaaccucuucccca

SEQ ID NO: 2059161 - RNA, 17 nt, Human
aguuuucagaaccucuu

SEQ ID NO: 2059162 - RNA, 18 nt, Human
aguuuucagaaccucuuc

SEQ ID NO: 2059163 - RNA, 20 nt, Human
aguuuucagaaccucuuccc

SEQ ID NO: 2059164 - RNA, 21 nt, Human
aguuuucagaaccucuucccc

SEQ ID NO: 2059165 - RNA, 23 nt, Human
aguuuguacagacguaugcuuau

SEQ ID NO: 2059166 - RNA, 22 nt, Human
aguuuguaugccaagugagaag

SEQ ID NO: 2059167 - RNA, 14 nt, Human
aguuugucagacuu

SEQ ID NO: 2059168 - RNA, 16 nt, Human
aguuugguuucuagca

SEQ ID NO: 2059169 - RNA, 22 nt, Human
aguuuguacagacguaugcuua

SEQ ID NO: 2059170 - RNA, 20 nt, Human
aguuuggggguuuugcuguu

SEQ ID NO: 2059171 - RNA, 17 nt, Human
aguugcacacucacugg

SEQ ID NO: 2059172 - RNA, 20 nt, Human
aguugcaauugaauuaaauu

SEQ ID NO: 2059173 - RNA, 18 nt, Human
aguugcaauugaauuaaa

SEQ ID NO: 2059174 - RNA, 19 nt, Human
aguugcaauugaauuaaau

SEQ ID NO: 2059175 - RNA, 17 nt, Human
uuaaaacaacacucaca

SEQ ID NO: 2059176 - RNA, 20 nt, Human
uuaaaaauaauagagcccca

SEQ ID NO: 2059177 - RNA, 16 nt, Human
uuaaaaagucugcauu

SEQ ID NO: 2059178 - RNA, 17 nt, Human
uuaaaaagucugcauua

SEQ ID NO: 2059179 - RNA, 21 nt, Human
uuaaaaagucugcauuacauu

SEQ ID NO: 2059180 - RNA, 22 nt, Human
uuaaaaagucugcauuacauuc

SEQ ID NO: 2059181 - RNA, 20 nt, Human
uuaaaaaguuauaaccaacu

SEQ ID NO: 2059182 - RNA, 18 nt, Human
uuaaaaaguggaaaaaua

SEQ ID NO: 2059183 - RNA, 13 nt, Human
uuaaaaaacuugu

SEQ ID NO: 2059184 - RNA, 12 nt, Human
uuaaauuauaag

SEQ ID NO: 2059185 - RNA, 13 nt, Human
uuaaauuauaagg

SEQ ID NO: 2059186 - RNA, 14 nt, Human
uuaaauuauaagga

SEQ ID NO: 2059187 - RNA, 15 nt, Human
uuaaauuauaaggac

SEQ ID NO: 2059188 - RNA, 17 nt, Human
uuaaauuauaaggacug

SEQ ID NO: 2059189 - RNA, 18 nt, Human
uuaaauuauaaggacugc

SEQ ID NO: 2059190 - RNA, 19 nt, Human
uuaaauuauaaggacugca

SEQ ID NO: 2059191 - RNA, 20 nt, Human
uuaaauuauaaggacugcau

SEQ ID NO: 2059192 - RNA, 13 nt, Human
uuaaauaaaucau

SEQ ID NO: 2059193 - RNA, 15 nt, Human
uuaaauaaaucauaa

SEQ ID NO: 2059194 - RNA, 20 nt, Human
uuaaauaaaagaaaugcaca

SEQ ID NO: 2059195 - RNA, 21 nt, Human
uuaaauaaaagaaaugcacaa

SEQ ID NO: 2059196 - RNA, 22 nt, Human
uuaaauaaaagaaaugcacaau

SEQ ID NO: 2059197 - RNA, 12 nt, Human
uuaaaacaaaca

SEQ ID NO: 2059198 - RNA, 13 nt, Human
uuaaauaaaagug

SEQ ID NO: 2059199 - RNA, 14 nt, Human
uuaaauaaaaguga

SEQ ID NO: 2059200 - RNA, 20 nt, Human
uuaaauaaaagugaucaaua

SEQ ID NO: 2059201 - RNA, 12 nt, Human
uuaaauaaaaua

SEQ ID NO: 2059202 - RNA, 15 nt, Human
uuaaauaaaauaacc

SEQ ID NO: 2059203 - RNA, 20 nt, Human
uuaaaauauauauguugauu

SEQ ID NO: 2059204 - RNA, 12 nt, Human
uuaaaauauauu

SEQ ID NO: 2059205 - RNA, 22 nt, Human
uuaaaaauuggcuaguugaauc

SEQ ID NO: 2059206 - RNA, 12 nt, Human
uuaaaauauuuu

SEQ ID NO: 2059207 - RNA, 14 nt, Human
uuaaaauauuuuau

SEQ ID NO: 2059208 - RNA, 12 nt, Human
uuaaaaucacua

SEQ ID NO: 2059209 - RNA, 17 nt, Human
uuaaaaucacuaacauu

SEQ ID NO: 2059210 - RNA, 19 nt, Human
uuaaaaucacuaacauuau

SEQ ID NO: 2059211 - RNA, 20 nt, Human
uuaaaaucacuaacauuaua

SEQ ID NO: 2059212 - RNA, 21 nt, Human
uuaaaaucacuaacauuauau

SEQ ID NO: 2059213 - RNA, 23 nt, Human
uuaaaaucacuaacauuauauug

SEQ ID NO: 2059214 - RNA, 19 nt, Human
uuaaaauauuccugcauuu

SEQ ID NO: 2059215 - RNA, 16 nt, Human
uuaaaauauuccugca

SEQ ID NO: 2059216 - RNA, 17 nt, Human
uuaaaccgccaaggcug

SEQ ID NO: 2059217 - RNA, 20 nt, Human
uuaaacccuggaucaguccu

SEQ ID NO: 2059218 - RNA, 14 nt, Human
uuaaaccuauacuc

SEQ ID NO: 2059219 - RNA, 17 nt, Human
uuaaaccuauacucacu

SEQ ID NO: 2059220 - RNA, 21 nt, Human
ugauuucagcaccuacagugu

SEQ ID NO: 2059221 - RNA, 20 nt, Human
ugauuucagcaccuacagug

SEQ ID NO: 2059222 - RNA, 20 nt, Human
ugauuuagcaggaagcugug

SEQ ID NO: 2059223 - RNA, 17 nt, Human
ugauuuagauugaguaa

SEQ ID NO: 2059224 - RNA, 20 nt, Human
ugauuuagauugaguaagau

SEQ ID NO: 2059225 - RNA, 17 nt, Human
ugauuuagcaggaagcu

SEQ ID NO: 2059226 - RNA, 19 nt, Human
ugauuucaggauacucugu

SEQ ID NO: 2059227 - RNA, 11 nt, Human
ugauuucagga

SEQ ID NO: 2059228 - RNA, 18 nt, Human
ugauuucaggauacucug

SEQ ID NO: 2059229 - RNA, 23 nt, Human
ugauuucaggauacucugucaga

SEQ ID NO: 2059230 - RNA, 17 nt, Human
ugauuucuuguaacauc

SEQ ID NO: 2059231 - RNA, 13 nt, Human
ugauucuccugcc

SEQ ID NO: 2059232 - RNA, 23 nt, Human
ugauucccaagcucugcuccucu

SEQ ID NO: 2059233 - RNA, 22 nt, Human
ugauucccaagcucugcuccuc

SEQ ID NO: 2059234 - RNA, 18 nt, Human
ugauucccuccugcuacu

SEQ ID NO: 2059235 - RNA, 17 nt, Human
ugauucccuccugcuac

SEQ ID NO: 2059236 - RNA, 13 nt, Human
agcccagcuggug

SEQ ID NO: 2059237 - RNA, 16 nt, Human
agcccagcugguggga

SEQ ID NO: 2059238 - RNA, 21 nt, Human
agcccagccauuaccauggag

SEQ ID NO: 2059239 - RNA, 15 nt, Human
agcccagcagggccu

SEQ ID NO: 2059240 - RNA, 20 nt, Human
agcccagcagggccucaaag

SEQ ID NO: 2059241 - RNA, 20 nt, Human
agcccagcuggugggaagcg

SEQ ID NO: 2059242 - RNA, 13 nt, Human
agccaucauggau

SEQ ID NO: 2059243 - RNA, 12 nt, Human
agccaucaugua

SEQ ID NO: 2059244 - RNA, 21 nt, Human
agccaggcugccaaggccaga

SEQ ID NO: 2059245 - RNA, 20 nt, Human
agccagggauggggccacag

SEQ ID NO: 2059246 - RNA, 21 nt, Human
agccagggauggggccacagc

SEQ ID NO: 2059247 - RNA, 22 nt, Human
agccagggauggggccacagcc

SEQ ID NO: 2059248 - RNA, 23 nt, Human
agccagggauggggccacagcca

SEQ ID NO: 2059249 - RNA, 13 nt, Human
agccagcucucag

SEQ ID NO: 2059250 - RNA, 14 nt, Human
agccagcucucagc

SEQ ID NO: 2059251 - RNA, 15 nt, Human
agccagcucucagcc

SEQ ID NO: 2059252 - RNA, 16 nt, Human
agccagcucucagcca

SEQ ID NO: 2059253 - RNA, 18 nt, Human
agccaggcucaggccaug

SEQ ID NO: 2059254 - RNA, 20 nt, Human
agccaggcugccaaggccag

SEQ ID NO: 2059255 - RNA, 15 nt, Human
agcccacuucugcca

SEQ ID NO: 2059256 - RNA, 14 nt, Human
agcccacuucugcc

SEQ ID NO: 2059257 - RNA, 13 nt, Human
agcccacuucugc

SEQ ID NO: 2059258 - RNA, 12 nt, Human
agcccacuggau

SEQ ID NO: 2059259 - RNA, 14 nt, Human
agcccacuggauca

SEQ ID NO: 2059260 - RNA, 20 nt, Human
agcccacuggaucagaaaga

SEQ ID NO: 2059261 - RNA, 18 nt, Human
agccauggacucuacacu

SEQ ID NO: 2059262 - RNA, 18 nt, Human
agccaugaggaguugcug

SEQ ID NO: 2059263 - RNA, 19 nt, Human
agccaugaggaguugcugu

SEQ ID NO: 2059264 - RNA, 20 nt, Human
agccaugaggaguugcuguu

SEQ ID NO: 2059265 - RNA, 20 nt, Human
agccaugacuugagaaacaa

SEQ ID NO: 2059266 - RNA, 22 nt, Human
agccaucggugaaacuaacaga

SEQ ID NO: 2059267 - RNA, 22 nt, Human
agccaucucucuacuccuaccu

SEQ ID NO: 2059268 - RNA, 12 nt, Human
agccagcccucc

SEQ ID NO: 2059269 - RNA, 13 nt, Human
agccagcccuccc

SEQ ID NO: 2059270 - RNA, 15 nt, Human
agccagcccucccug

SEQ ID NO: 2059271 - RNA, 16 nt, Human
agccagcccucccugu

SEQ ID NO: 2059272 - RNA, 18 nt, Human
agccagcccucccugucc

SEQ ID NO: 2059273 - RNA, 20 nt, Human
agccagcccucccuguccuc

SEQ ID NO: 2059274 - RNA, 22 nt, Human
agccagcccucccuguccuccu

SEQ ID NO: 2059275 - RNA, 23 nt, Human
agccagcccucccuguccuccuc

SEQ ID NO: 2059276 - RNA, 12 nt, Human
agccagcccagc

SEQ ID NO: 2059277 - RNA, 14 nt, Human
agccagcccagccc

SEQ ID NO: 2059278 - RNA, 15 nt, Human
agccagcccagccca

SEQ ID NO: 2059279 - RNA, 16 nt, Human
agccagcccagcccag

SEQ ID NO: 2059280 - RNA, 17 nt, Human
agccagcccagcccagc

SEQ ID NO: 2059281 - RNA, 18 nt, Human
agccagcccagcccagcu

SEQ ID NO: 2059282 - RNA, 19 nt, Human
agccacugcaccgggccac

SEQ ID NO: 2059283 - RNA, 18 nt, Human
agccacugcaccgggcca

SEQ ID NO: 2059284 - RNA, 20 nt, Human
agccacugcaccgggccaca

SEQ ID NO: 2059285 - RNA, 15 nt, Human
agccacucaggaggc

SEQ ID NO: 2059286 - RNA, 22 nt, Human
agccacucaggaggcugaggca

SEQ ID NO: 2059287 - RNA, 22 nt, Human
agccacguuccuuacugcagaa

SEQ ID NO: 2059288 - RNA, 23 nt, Human
agccacguuccuuacugcagaau

SEQ ID NO: 2059289 - RNA, 16 nt, Human
agccacugcaccgggc

SEQ ID NO: 2059290 - RNA, 17 nt, Human
agccacguuccuuacug

SEQ ID NO: 2059291 - RNA, 18 nt, Human
agccacguuccuuacugc

SEQ ID NO: 2059292 - RNA, 20 nt, Human
agccacguuccuuacugcag

SEQ ID NO: 2059293 - RNA, 21 nt, Human
agccacguuccuuacugcaga

SEQ ID NO: 2059294 - RNA, 14 nt, Human
ugauuaaugcuaaa

SEQ ID NO: 2059295 - RNA, 16 nt, Human
ugauggugaugaaaug

SEQ ID NO: 2059296 - RNA, 15 nt, Human
ugauggugaugaaau

SEQ ID NO: 2059297 - RNA, 17 nt, Human
ugauggugaugaaaugu

SEQ ID NO: 2059298 - RNA, 19 nt, Human
ugauuaaccacuucagcug

SEQ ID NO: 2059299 - RNA, 15 nt, Human
ugaugacccaggcug

SEQ ID NO: 2059300 - RNA, 22 nt, Human
ugaugacccaggcugccugagc

SEQ ID NO: 2059301 - RNA, 20 nt, Human
ugaugaagaaaagugggcca

SEQ ID NO: 2059302 - RNA, 14 nt, Human
ugaugacagacacu

SEQ ID NO: 2059303 - RNA, 15 nt, Human
ugaugacuggaauuu

SEQ ID NO: 2059304 - RNA, 17 nt, Human
ugaugacuggaauuuuu

SEQ ID NO: 2059305 - RNA, 20 nt, Human
ugaugacuggaauuuuuauu

SEQ ID NO: 2059306 - RNA, 23 nt, Human
ugaugacuggaauuuuuauuaug

SEQ ID NO: 2059307 - RNA, 18 nt, Human
ugaugaagaaaagugggc

SEQ ID NO: 2059308 - RNA, 21 nt, Human
ugauccucccaccucagccuc

SEQ ID NO: 2059309 - RNA, 16 nt, Human
ugauccucccaccuca

SEQ ID NO: 2059310 - RNA, 22 nt, Human
ugauccucccaccucagccucc

SEQ ID NO: 2059311 - RNA, 17 nt, Human
ugauccuccaacuucau

SEQ ID NO: 2059312 - RNA, 21 nt, Human
agcaccugccgaccucguccu

SEQ ID NO: 2059313 - RNA, 22 nt, Human
ugauccuaaugaaugcauaaaa

SEQ ID NO: 2059314 - RNA, 22 nt, Human
agcaccugccgaccucguccuc

SEQ ID NO: 2059315 - RNA, 15 nt, Human
ugauccucccaccuc

SEQ ID NO: 2059316 - RNA, 11 nt, Human
agcaccugccg

SEQ ID NO: 2059317 - RNA, 15 nt, Human
agcaccugccgaccu

SEQ ID NO: 2059318 - RNA, 16 nt, Human
agcaccugccgaccuc

SEQ ID NO: 2059319 - RNA, 19 nt, Human
agcaccugccgaccucguc

SEQ ID NO: 2059320 - RNA, 20 nt, Human
agcaccugccgaccucgucc

SEQ ID NO: 2059321 - RNA, 14 nt, Human
ugauggaaacaaag

SEQ ID NO: 2059322 - RNA, 15 nt, Human
ugauggaaacaaagu

SEQ ID NO: 2059323 - RNA, 17 nt, Human
ugauggaaacaaagugg

SEQ ID NO: 2059324 - RNA, 23 nt, Human
ugauggaaacaaaguggaaggaa

SEQ ID NO: 2059325 - RNA, 15 nt, Human
ugaugagcuccucuu

SEQ ID NO: 2059326 - RNA, 21 nt, Human
ugaugcuuguaacaagaaaac

SEQ ID NO: 2059327 - RNA, 22 nt, Human
ugaugcuuguaacaagaaaaca

SEQ ID NO: 2059328 - RNA, 23 nt, Human
ugaugcuuguaacaagaaaacau

SEQ ID NO: 2059329 - RNA, 15 nt, Human
ugcacucuagccgga

SEQ ID NO: 2059330 - RNA, 16 nt, Human
ugcagacucaauaaaa

SEQ ID NO: 2059331 - RNA, 19 nt, Human
ugcagacucaauaaaauca

SEQ ID NO: 2059332 - RNA, 22 nt, Human
ugcagacaggcaagcaccuccu

SEQ ID NO: 2059333 - RNA, 17 nt, Human
agccgagaucacgccac

SEQ ID NO: 2059334 - RNA, 21 nt, Human
agcccuuagcagggaaacagc

SEQ ID NO: 2059335 - RNA, 12 nt, Human
agcccuuggguu

SEQ ID NO: 2059336 - RNA, 16 nt, Human
agcccuuagcagggaa

SEQ ID NO: 2059337 - RNA, 18 nt, Human
agcccugucuccucucuc

SEQ ID NO: 2059338 - RNA, 12 nt, Human
agcccuguggaa

SEQ ID NO: 2059339 - RNA, 11 nt, Human
agcccugucuc

SEQ ID NO: 2059340 - RNA, 17 nt, Human
ugcagacucuacagagg

SEQ ID NO: 2059341 - RNA, 16 nt, Human
ugcagacucuacagag

SEQ ID NO: 2059342 - RNA, 18 nt, Human
ugcagacucuacagaggc

SEQ ID NO: 2059343 - RNA, 14 nt, Human
ugcagacucaguuu

SEQ ID NO: 2059344 - RNA, 15 nt, Human
ugcagacucaguuug

SEQ ID NO: 2059345 - RNA, 20 nt, Human
agcccugucagugcagcccg

SEQ ID NO: 2059346 - RNA, 19 nt, Human
ugcagacucaguuugucag

SEQ ID NO: 2059347 - RNA, 20 nt, Human
ugcagacucaguuugucaga

SEQ ID NO: 2059348 - RNA, 17 nt, Human
agcccugucagugcagc

SEQ ID NO: 2059349 - RNA, 19 nt, Human
agcccugucagugcagccc

SEQ ID NO: 2059350 - RNA, 21 nt, Human
agccuccaagcuccaucucca

SEQ ID NO: 2059351 - RNA, 17 nt, Human
agccucauccgaggcag

SEQ ID NO: 2059352 - RNA, 18 nt, Human
agccucauccgaggcagg

SEQ ID NO: 2059353 - RNA, 20 nt, Human
agccuccacugccucuggaa

SEQ ID NO: 2059354 - RNA, 17 nt, Human
agccuccaugcugccuc

SEQ ID NO: 2059355 - RNA, 23 nt, Human
agccucugaaaaccaauguucuc

SEQ ID NO: 2059356 - RNA, 17 nt, Human
agccucucuuccuaucc

SEQ ID NO: 2059357 - RNA, 20 nt, Human
agccucucuuccuaucccau

SEQ ID NO: 2059358 - RNA, 21 nt, Human
agccucucuuccuaucccauc

SEQ ID NO: 2059359 - RNA, 16 nt, Human
agccucugccugugca

SEQ ID NO: 2059360 - RNA, 18 nt, Human
agccucugagccccuggg

SEQ ID NO: 2059361 - RNA, 19 nt, Human
agccucugaaguuggacag

SEQ ID NO: 2059362 - RNA, 20 nt, Human
agccucugaaguuggacagc

SEQ ID NO: 2059363 - RNA, 23 nt, Human
ugcagccucaaccuccugggcua

SEQ ID NO: 2059364 - RNA, 22 nt, Human
ugcagccucaaccuccugggcu

SEQ ID NO: 2059365 - RNA, 21 nt, Human
ugcagccucaaccuccugggc

SEQ ID NO: 2059366 - RNA, 20 nt, Human
ugcagccucaaccuccuggg

SEQ ID NO: 2059367 - RNA, 20 nt, Human
agccucuggcuagaggccag

SEQ ID NO: 2059368 - RNA, 12 nt, Human
agccucuggcua

SEQ ID NO: 2059369 - RNA, 13 nt, Human
agccucuggcuag

SEQ ID NO: 2059370 - RNA, 14 nt, Human
agccucuggcuaga

SEQ ID NO: 2059371 - RNA, 15 nt, Human
agccucuggcuagag

SEQ ID NO: 2059372 - RNA, 12 nt, Human
agccucugcugc

SEQ ID NO: 2059373 - RNA, 13 nt, Human
agccucugcugcc

SEQ ID NO: 2059374 - RNA, 14 nt, Human
agccucugcugcca

SEQ ID NO: 2059375 - RNA, 18 nt, Human
agccucugcugccauggc

SEQ ID NO: 2059376 - RNA, 14 nt, Human
agccucauccgagg

SEQ ID NO: 2059377 - RNA, 22 nt, Human
agccucacuugaaugugucacu

SEQ ID NO: 2059378 - RNA, 18 nt, Human
agccgagaucacgccacu

SEQ ID NO: 2059379 - RNA, 19 nt, Human
agccucaaccuccugggcu

SEQ ID NO: 2059380 - RNA, 20 nt, Human
agccucaaccuccugggcua

SEQ ID NO: 2059381 - RNA, 21 nt, Human
agcccuuugggaggcugaggc

SEQ ID NO: 2059382 - RNA, 22 nt, Human
agcccuuugggaggcugaggcg

SEQ ID NO: 2059383 - RNA, 15 nt, Human
agccucacagaagaa

SEQ ID NO: 2059384 - RNA, 16 nt, Human
agccucacuugaaugu

SEQ ID NO: 2059385 - RNA, 17 nt, Human
agccucacuugaaugug

SEQ ID NO: 2059386 - RNA, 22 nt, Human
ugcaaguauguuuuagcaugug

SEQ ID NO: 2059387 - RNA, 17 nt, Human
ugcaagucacaaaggaa

SEQ ID NO: 2059388 - RNA, 18 nt, Human
ugcaagucacaaaggaau

SEQ ID NO: 2059389 - RNA, 18 nt, Human
ugcaaguaugugagugug

SEQ ID NO: 2059390 - RNA, 22 nt, Human
ugcaaguaugugagugugucca

SEQ ID NO: 2059391 - RNA, 19 nt, Human
ugcaaguauguuuuagcau

SEQ ID NO: 2059392 - RNA, 21 nt, Human
ugcaaguauguuuuagcaugu

SEQ ID NO: 2059393 - RNA, 15 nt, Human
ugcaaguaugugagu

SEQ ID NO: 2059394 - RNA, 16 nt, Human
ugauuuguuuuagaau

SEQ ID NO: 2059395 - RNA, 17 nt, Human
agcccaggaggacugcc

SEQ ID NO: 2059396 - RNA, 12 nt, Human
agcccaggagga

SEQ ID NO: 2059397 - RNA, 14 nt, Human
ugcaauagagacug

SEQ ID NO: 2059398 - RNA, 16 nt, Human
ugcaauagagacugua

SEQ ID NO: 2059399 - RNA, 19 nt, Human
ugcaauagagacuguagau

SEQ ID NO: 2059400 - RNA, 18 nt, Human
ugcaagugucugugugca

SEQ ID NO: 2059401 - RNA, 21 nt, Human
ugcaaguguaugcacgugugc

SEQ ID NO: 2059402 - RNA, 16 nt, Human
ugcaagugucugugug

SEQ ID NO: 2059403 - RNA, 17 nt, Human
ugcaagugucugugugc

SEQ ID NO: 2059404 - RNA, 16 nt, Human
ugcaagugacaucucu

SEQ ID NO: 2059405 - RNA, 20 nt, Human
ugcaagugagcaaaccugcc

SEQ ID NO: 2059406 - RNA, 22 nt, Human
ugcaagugagcaaaccugcccc

SEQ ID NO: 2059407 - RNA, 23 nt, Human
ugcaagugagcaaaccugcccca

SEQ ID NO: 2059408 - RNA, 22 nt, Human
agccccauucugccugcccagg

SEQ ID NO: 2059409 - RNA, 21 nt, Human
agccccauucugccugcccag

SEQ ID NO: 2059410 - RNA, 20 nt, Human
agccccauucugccugccca

SEQ ID NO: 2059411 - RNA, 22 nt, Human
agcccauucucucuccugucca

SEQ ID NO: 2059412 - RNA, 20 nt, Human
agcccauucucucuccuguc

SEQ ID NO: 2059413 - RNA, 21 nt, Human
agcccauucucucuccugucc

SEQ ID NO: 2059414 - RNA, 16 nt, Human
agcccauucucucucc

SEQ ID NO: 2059415 - RNA, 17 nt, Human
agcccauucucucuccu

SEQ ID NO: 2059416 - RNA, 18 nt, Human
agcccauucucucuccug

SEQ ID NO: 2059417 - RNA, 19 nt, Human
agcccauucucucuccugu

SEQ ID NO: 2059418 - RNA, 15 nt, Human
agcccauucucucuc

SEQ ID NO: 2059419 - RNA, 16 nt, Human
agcccaggguuccccc

SEQ ID NO: 2059420 - RNA, 10 nt, Human
agcccagggu

SEQ ID NO: 2059421 - RNA, 11 nt, Human
agcccaggagu

SEQ ID NO: 2059422 - RNA, 19 nt, Human
agcccaggaguuugaggcu

SEQ ID NO: 2059423 - RNA, 18 nt, Human
agcccagggagcggaaag

SEQ ID NO: 2059424 - RNA, 19 nt, Human
agcccagggagcggaaagc

SEQ ID NO: 2059425 - RNA, 20 nt, Human
agcccagggagcggaaagca

SEQ ID NO: 2059426 - RNA, 21 nt, Human
agcccagggagcggaaagcag

SEQ ID NO: 2059427 - RNA, 22 nt, Human
agcccagggagcggaaagcagc

SEQ ID NO: 2059428 - RNA, 23 nt, Human
agcccagggagcggaaagcagcu

SEQ ID NO: 2059429 - RNA, 23 nt, Human
agccccauucugccugcccaggc

SEQ ID NO: 2059430 - RNA, 17 nt, Human
agcccccaggcugcugg

SEQ ID NO: 2059431 - RNA, 18 nt, Human
agcccccaggcugcugga

SEQ ID NO: 2059432 - RNA, 23 nt, Human
agcccccgccccgccccacauuc

SEQ ID NO: 2059433 - RNA, 22 nt, Human
agcccccgccccgccccacauu

SEQ ID NO: 2059434 - RNA, 10 nt, Human
agccccucuu

SEQ ID NO: 2059435 - RNA, 16 nt, Human
agccccucuugccccc

SEQ ID NO: 2059436 - RNA, 17 nt, Human
agccccucuugcccccc

SEQ ID NO: 2059437 - RNA, 20 nt, Human
agccccucuugccccccacc

SEQ ID NO: 2059438 - RNA, 23 nt, Human
agccccucuugccccccacccca

SEQ ID NO: 2059439 - RNA, 21 nt, Human
agccccucuugccccccaccc

SEQ ID NO: 2059440 - RNA, 22 nt, Human
agccccucuugccccccacccc

SEQ ID NO: 2059441 - RNA, 19 nt, Human
agcccgcacccccacccuu

SEQ ID NO: 2059442 - RNA, 21 nt, Human
agcccgcacccccacccuuug

SEQ ID NO: 2059443 - RNA, 12 nt, Human
agcccgcaugca

SEQ ID NO: 2059444 - RNA, 14 nt, Human
agcccgcaugcagc

SEQ ID NO: 2059445 - RNA, 16 nt, Human
agcccgcaugcagcag

SEQ ID NO: 2059446 - RNA, 17 nt, Human
agcccgcaugcagcagc

SEQ ID NO: 2059447 - RNA, 18 nt, Human
agcccgcaugcagcagcu

SEQ ID NO: 2059448 - RNA, 20 nt, Human
agcccgcaugcagcagcuug

SEQ ID NO: 2059449 - RNA, 21 nt, Human
agcccgcaugcagcagcuugc

SEQ ID NO: 2059450 - RNA, 16 nt, Human
agcccgcacccccacc

SEQ ID NO: 2059451 - RNA, 17 nt, Human
agcccgcacccccaccc

SEQ ID NO: 2059452 - RNA, 18 nt, Human
agcccgcacccccacccu

SEQ ID NO: 2059453 - RNA, 19 nt, Human
agcccgaggcaccaguguc

SEQ ID NO: 2059454 - RNA, 15 nt, Human
agcccgcacccccac

SEQ ID NO: 2059455 - RNA, 13 nt, Human
agccccugccccu

SEQ ID NO: 2059456 - RNA, 14 nt, Human
agccccugccccuc

SEQ ID NO: 2059457 - RNA, 14 nt, Human
agcccggaugcuuc

SEQ ID NO: 2059458 - RNA, 17 nt, Human
agcccugcuuugggcug

SEQ ID NO: 2059459 - RNA, 20 nt, Human
agcccugcuuugggcugccc

SEQ ID NO: 2059460 - RNA, 19 nt, Human
agcccugcuuugggcugcc

SEQ ID NO: 2059461 - RNA, 12 nt, Human
agcccuggcagg

SEQ ID NO: 2059462 - RNA, 13 nt, Human
agcccuggcagga

SEQ ID NO: 2059463 - RNA, 17 nt, Human
agcccuggcaggaugac

SEQ ID NO: 2059464 - RNA, 13 nt, Human
agcccuggccaga

SEQ ID NO: 2059465 - RNA, 21 nt, Human
agcccuggcaggaugacccug

SEQ ID NO: 2059466 - RNA, 23 nt, Human
agcccuggauuucagaaagagca

SEQ ID NO: 2059467 - RNA, 14 nt, Human
agcccuggccagag

SEQ ID NO: 2059468 - RNA, 15 nt, Human
agcccuggccagagg

SEQ ID NO: 2059469 - RNA, 16 nt, Human
agcccuggccagaggc

SEQ ID NO: 2059470 - RNA, 17 nt, Human
agcccuggccagaggcu

SEQ ID NO: 2059471 - RNA, 16 nt, Human
agcccugguggcagug

SEQ ID NO: 2059472 - RNA, 15 nt, Human
agcccugguggcagu

SEQ ID NO: 2059473 - RNA, 14 nt, Human
agcccugguggcag

SEQ ID NO: 2059474 - RNA, 18 nt, Human
ugcacacaccagagccca

SEQ ID NO: 2059475 - RNA, 17 nt, Human
ugcacacaccagagccc

SEQ ID NO: 2059476 - RNA, 21 nt, Human
ugcacacaccagagcccaccu

SEQ ID NO: 2059477 - RNA, 17 nt, Human
ugccucagccuccugag

SEQ ID NO: 2059478 - RNA, 12 nt, Human
ugccucagaacg

SEQ ID NO: 2059479 - RNA, 18 nt, Human
ugccucaguaaaaugaac

SEQ ID NO: 2059480 - RNA, 15 nt, Human
ugccuccccaacccu

SEQ ID NO: 2059481 - RNA, 16 nt, Human
ugccuccccaacccug

SEQ ID NO: 2059482 - RNA, 18 nt, Human
ugccuccccaacccugcc

SEQ ID NO: 2059483 - RNA, 14 nt, Human
ugccucagccuccg

SEQ ID NO: 2059484 - RNA, 18 nt, Human
ugccuccccggcucgagc

SEQ ID NO: 2059485 - RNA, 19 nt, Human
ugccuccccaacccugccc

SEQ ID NO: 2059486 - RNA, 20 nt, Human
ugccuccccaacccugcccc

SEQ ID NO: 2059487 - RNA, 21 nt, Human
ugccuccccaacccugccccu

SEQ ID NO: 2059488 - RNA, 22 nt, Human
ugccuccccaacccugccccug

SEQ ID NO: 2059489 - RNA, 23 nt, Human
ugccuccccaacccugccccugc

SEQ ID NO: 2059490 - RNA, 17 nt, Human
ugcccuucacaguguuu

SEQ ID NO: 2059491 - RNA, 23 nt, Human
ugcccuucagcauccucaguucc

SEQ ID NO: 2059492 - RNA, 20 nt, Human
ugccgcccgagguggcugcc

SEQ ID NO: 2059493 - RNA, 23 nt, Human
ugccgcccgagguggcugccugg

SEQ ID NO: 2059494 - RNA, 16 nt, Human
ugccgccucaaugugg

SEQ ID NO: 2059495 - RNA, 13 nt, Human
ugccgccucccag

SEQ ID NO: 2059496 - RNA, 14 nt, Human
ugccgccucccagc

SEQ ID NO: 2059497 - RNA, 16 nt, Human
ugccgccucccagccu

SEQ ID NO: 2059498 - RNA, 16 nt, Human
agcucuucuccaggcu

SEQ ID NO: 2059499 - RNA, 15 nt, Human
agcucuucuccaggc

SEQ ID NO: 2059500 - RNA, 10 nt, Human
ugccugcuga

SEQ ID NO: 2059501 - RNA, 23 nt, Human
ugccugcugaaugauuuccaaag

SEQ ID NO: 2059502 - RNA, 14 nt, Human
ugccugcuuuagaa

SEQ ID NO: 2059503 - RNA, 10 nt, Human
agcugccugu

SEQ ID NO: 2059504 - RNA, 22 nt, Human
agcugcuuuugucuaugggacu

SEQ ID NO: 2059505 - RNA, 13 nt, Human
agcugccuguuca

SEQ ID NO: 2059506 - RNA, 14 nt, Human
agcugccuguaguu

SEQ ID NO: 2059507 - RNA, 15 nt, Human
agcugccuguaguua

SEQ ID NO: 2059508 - RNA, 18 nt, Human
agcugccuguaguuagga

SEQ ID NO: 2059509 - RNA, 19 nt, Human
agcugccuguaguuaggaa

SEQ ID NO: 2059510 - RNA, 20 nt, Human
agcugccuguaguuaggaaa

SEQ ID NO: 2059511 - RNA, 22 nt, Human
agcugccuguaguuaggaaaua

SEQ ID NO: 2059512 - RNA, 23 nt, Human
agcugccuguaguuaggaaauaa

SEQ ID NO: 2059513 - RNA, 24 nt, Human
agcugcuuuugucuaugggacuca

SEQ ID NO: 2059514 - RNA, 23 nt, Human
agcugcuuuugucuaugggacuc

SEQ ID NO: 2059515 - RNA, 15 nt, Human
agcugggacuacagg

SEQ ID NO: 2059516 - RNA, 17 nt, Human
ugccugcggucaaggcc

SEQ ID NO: 2059517 - RNA, 18 nt, Human
ugccugcggucaaggcca

SEQ ID NO: 2059518 - RNA, 19 nt, Human
ugccugcggucaaggccag

SEQ ID NO: 2059519 - RNA, 19 nt, Human
ugccugcggaguugugcac

SEQ ID NO: 2059520 - RNA, 19 nt, Human
ugccugcccaggccccugc

SEQ ID NO: 2059521 - RNA, 18 nt, Human
ugccugcccaggccccug

SEQ ID NO: 2059522 - RNA, 17 nt, Human
ugccugcccaggccccu

SEQ ID NO: 2059523 - RNA, 12 nt, Human
ugccucugccuc

SEQ ID NO: 2059524 - RNA, 11 nt, Human
ugccucugccu

SEQ ID NO: 2059525 - RNA, 16 nt, Human
ugccucugacacacag

SEQ ID NO: 2059526 - RNA, 14 nt, Human
ugccucugacacac

SEQ ID NO: 2059527 - RNA, 22 nt, Human
agcuccccaaaaaccucacccg

SEQ ID NO: 2059528 - RNA, 14 nt, Human
agcuccccaccacc

SEQ ID NO: 2059529 - RNA, 17 nt, Human
agcuccccaccacccca

SEQ ID NO: 2059530 - RNA, 20 nt, Human
agcuccccaccaccccagcu

SEQ ID NO: 2059531 - RNA, 21 nt, Human
agcuccccaccaccccagcug

SEQ ID NO: 2059532 - RNA, 20 nt, Human
agcuccccgcuucugccugc

SEQ ID NO: 2059533 - RNA, 21 nt, Human
agcuccccgcuucugccugca

SEQ ID NO: 2059534 - RNA, 23 nt, Human
agcuccuucuguccuacucugug

SEQ ID NO: 2059535 - RNA, 22 nt, Human
agcuccuucuguccuacucugu

SEQ ID NO: 2059536 - RNA, 22 nt, Human
agcuccuugagggcaagagcca

SEQ ID NO: 2059537 - RNA, 12 nt, Human
agcuccuuggga

SEQ ID NO: 2059538 - RNA, 21 nt, Human
agcuccuugagggcaagagcc

SEQ ID NO: 2059539 - RNA, 15 nt, Human
agcuccuugggaggc

SEQ ID NO: 2059540 - RNA, 19 nt, Human
agcuccuugggaggcccca

SEQ ID NO: 2059541 - RNA, 20 nt, Human
agcuccuugggaggccccac

SEQ ID NO: 2059542 - RNA, 23 nt, Human
agcucccaccccacccccuucag

SEQ ID NO: 2059543 - RNA, 13 nt, Human
agcucccacccca

SEQ ID NO: 2059544 - RNA, 15 nt, Human
agcucccaccccacc

SEQ ID NO: 2059545 - RNA, 17 nt, Human
agcucccaccccacccc

SEQ ID NO: 2059546 - RNA, 21 nt, Human
agcuccaucuccacuccagau

SEQ ID NO: 2059547 - RNA, 17 nt, Human
ugcccuagagcacacug

SEQ ID NO: 2059548 - RNA, 19 nt, Human
agcuccagcucaccagccc

SEQ ID NO: 2059549 - RNA, 18 nt, Human
agcuccagcucaccagcc

SEQ ID NO: 2059550 - RNA, 21 nt, Human
agcuccagcucaccagcccca

SEQ ID NO: 2059551 - RNA, 19 nt, Human
agcuccagacccccagcaa

SEQ ID NO: 2059552 - RNA, 13 nt, Human
agcuccagggcca

SEQ ID NO: 2059553 - RNA, 15 nt, Human
agcuccagggccaga

SEQ ID NO: 2059554 - RNA, 14 nt, Human
agcuccaguccugc

SEQ ID NO: 2059555 - RNA, 20 nt, Human
agcucugaggacugcaccau

SEQ ID NO: 2059556 - RNA, 21 nt, Human
agcucugcagagcaggaaaca

SEQ ID NO: 2059557 - RNA, 16 nt, Human
agcucuagacaacccu

SEQ ID NO: 2059558 - RNA, 17 nt, Human
agcucuagacaacccug

SEQ ID NO: 2059559 - RNA, 19 nt, Human
agcucuagacaacccugca

SEQ ID NO: 2059560 - RNA, 20 nt, Human
agcucuagacaacccugcaa

SEQ ID NO: 2059561 - RNA, 13 nt, Human
agcucuucaggcc

SEQ ID NO: 2059562 - RNA, 15 nt, Human
agcucuucaggccuc

SEQ ID NO: 2059563 - RNA, 16 nt, Human
agcucuucaggccucc

SEQ ID NO: 2059564 - RNA, 17 nt, Human
agcucuucaggccuccc

SEQ ID NO: 2059565 - RNA, 18 nt, Human
agcucuucaggccucccu

SEQ ID NO: 2059566 - RNA, 12 nt, Human
agcucugucugu

SEQ ID NO: 2059567 - RNA, 14 nt, Human
agcucugucugucc

SEQ ID NO: 2059568 - RNA, 18 nt, Human
agcucuguguugccaugu

SEQ ID NO: 2059569 - RNA, 23 nt, Human
agcucuguguugccaugugugcu

SEQ ID NO: 2059570 - RNA, 14 nt, Human
agcucuggagccac

SEQ ID NO: 2059571 - RNA, 16 nt, Human
agcucuggagccaccu

SEQ ID NO: 2059572 - RNA, 17 nt, Human
agcucuggagccaccug

SEQ ID NO: 2059573 - RNA, 18 nt, Human
agcucuggagccaccugu

SEQ ID NO: 2059574 - RNA, 19 nt, Human
agcucuggagccaccuguc

SEQ ID NO: 2059575 - RNA, 12 nt, Human
agcucuggcuca

SEQ ID NO: 2059576 - RNA, 15 nt, Human
agcucuggcucacag

SEQ ID NO: 2059577 - RNA, 19 nt, Human
agcucuggcucacagacug

SEQ ID NO: 2059578 - RNA, 20 nt, Human
agcucuggcucacagacugg

SEQ ID NO: 2059579 - RNA, 15 nt, Human
agcucuguguugcca

SEQ ID NO: 2059580 - RNA, 16 nt, Human
agcucuguguugccau

SEQ ID NO: 2059581 - RNA, 15 nt, Human
ugcccuacucacucu

SEQ ID NO: 2059582 - RNA, 13 nt, Human
ugcccuccauccc

SEQ ID NO: 2059583 - RNA, 14 nt, Human
ugcccuccaucccg

SEQ ID NO: 2059584 - RNA, 17 nt, Human
ugcccuccaucccgaca

SEQ ID NO: 2059585 - RNA, 20 nt, Human
ugcccuccaucccgacaugg

SEQ ID NO: 2059586 - RNA, 15 nt, Human
ugcccucccuccuuc

SEQ ID NO: 2059587 - RNA, 16 nt, Human
ugcccucccuccuucc

SEQ ID NO: 2059588 - RNA, 19 nt, Human
ugcccucgggcgagucacu

SEQ ID NO: 2059589 - RNA, 20 nt, Human
ugcccucgggcgagucacug

SEQ ID NO: 2059590 - RNA, 22 nt, Human
ugcccucgggcgagucacugcc

SEQ ID NO: 2059591 - RNA, 23 nt, Human
ugcccucgggcgagucacugccu

SEQ ID NO: 2059592 - RNA, 14 nt, Human
agcuccagaccccc

SEQ ID NO: 2059593 - RNA, 16 nt, Human
agcuccagacccccag

SEQ ID NO: 2059594 - RNA, 17 nt, Human
agcuccagacccccagc

SEQ ID NO: 2059595 - RNA, 18 nt, Human
agcuccagacccccagca

SEQ ID NO: 2059596 - RNA, 23 nt, Human
agcuccagacccccagcaacccu

SEQ ID NO: 2059597 - RNA, 17 nt, Human
agcuccagcucaccagc

SEQ ID NO: 2059598 - RNA, 13 nt, Human
agcuccagcucac

SEQ ID NO: 2059599 - RNA, 22 nt, Human
agcuccacacccucucccagga

SEQ ID NO: 2059600 - RNA, 23 nt, Human
agcuccacacccucucccaggac

SEQ ID NO: 2059601 - RNA, 21 nt, Human
agcuccacacccucucccagg

SEQ ID NO: 2059602 - RNA, 11 nt, Human
ugcccucuguu

SEQ ID NO: 2059603 - RNA, 21 nt, Human
ugcauucugccgugugcccuc

SEQ ID NO: 2059604 - RNA, 16 nt, Human
ugcauucacccagaca

SEQ ID NO: 2059605 - RNA, 14 nt, Human
ugcauucacccaga

SEQ ID NO: 2059606 - RNA, 20 nt, Human
ugcauucacccagacagcuc

SEQ ID NO: 2059607 - RNA, 18 nt, Human
ugcauuuaccggcagugc

SEQ ID NO: 2059608 - RNA, 14 nt, Human
ugcauuuagcacaa

SEQ ID NO: 2059609 - RNA, 22 nt, Human
ugcauuuagcacaaaaaaaauu

SEQ ID NO: 2059610 - RNA, 13 nt, Human
agcggaaagcagc

SEQ ID NO: 2059611 - RNA, 14 nt, Human
agcggaaagcagcu

SEQ ID NO: 2059612 - RNA, 17 nt, Human
agcggaaagcagcucaa

SEQ ID NO: 2059613 - RNA, 23 nt, Human
agcggaaagcagcucaaaggcac

SEQ ID NO: 2059614 - RNA, 12 nt, Human
agcgcaccugcc

SEQ ID NO: 2059615 - RNA, 14 nt, Human
agcgcaccugcccc

SEQ ID NO: 2059616 - RNA, 17 nt, Human
agcgcaccugcccccug

SEQ ID NO: 2059617 - RNA, 21 nt, Human
agcgcaccugcccccuggugg

SEQ ID NO: 2059618 - RNA, 18 nt, Human
agcgcaccugcccccugg

SEQ ID NO: 2059619 - RNA, 19 nt, Human
agcgcaccugcccccuggu

SEQ ID NO: 2059620 - RNA, 20 nt, Human
agcgcugccgcaccccagag

SEQ ID NO: 2059621 - RNA, 21 nt, Human
agcgcugccgcaccccagagu

SEQ ID NO: 2059622 - RNA, 22 nt, Human
ugcagcucuccccuucucugua

SEQ ID NO: 2059623 - RNA, 20 nt, Human
ugcagcucuccccuucucug

SEQ ID NO: 2059624 - RNA, 19 nt, Human
agccuucccccucccaggg

SEQ ID NO: 2059625 - RNA, 20 nt, Human
agccuuccccuugcccaggg

SEQ ID NO: 2059626 - RNA, 22 nt, Human
agccuuccccuugcccagggcu

SEQ ID NO: 2059627 - RNA, 22 nt, Human
agcgauucuucugcuucagccu

SEQ ID NO: 2059628 - RNA, 21 nt, Human
agccuugcccggauucuggga

SEQ ID NO: 2059629 - RNA, 20 nt, Human
agcggggacagcuccuucug

SEQ ID NO: 2059630 - RNA, 19 nt, Human
agcggggacagcuccuucu

SEQ ID NO: 2059631 - RNA, 23 nt, Human
agcggcuggcagcccaccccuca

SEQ ID NO: 2059632 - RNA, 22 nt, Human
agcggggacagcuccuucuguc

SEQ ID NO: 2059633 - RNA, 21 nt, Human
agcggggccccagggcuaccc

SEQ ID NO: 2059634 - RNA, 17 nt, Human
agcggcuggugcagggc

SEQ ID NO: 2059635 - RNA, 19 nt, Human
agcggcuggugcagggccu

SEQ ID NO: 2059636 - RNA, 13 nt, Human
agcggcuggcagc

SEQ ID NO: 2059637 - RNA, 11 nt, Human
ugccagugccu

SEQ ID NO: 2059638 - RNA, 13 nt, Human
ugccagugccuua

SEQ ID NO: 2059639 - RNA, 15 nt, Human
ugccagugccuuacc

SEQ ID NO: 2059640 - RNA, 20 nt, Human
ugccagucccccugccccag

SEQ ID NO: 2059641 - RNA, 18 nt, Human
ugccagcuuaucucaggg

SEQ ID NO: 2059642 - RNA, 19 nt, Human
ugccacugccucuuccucc

SEQ ID NO: 2059643 - RNA, 18 nt, Human
ugccacugccucuuccuc

SEQ ID NO: 2059644 - RNA, 20 nt, Human
ugccacugccucuuccuccc

SEQ ID NO: 2059645 - RNA, 22 nt, Human
ugccacugcccgagcuggugca

SEQ ID NO: 2059646 - RNA, 15 nt, Human
ugccagagauggagg

SEQ ID NO: 2059647 - RNA, 21 nt, Human
ugccagagauggagguucucu

SEQ ID NO: 2059648 - RNA, 19 nt, Human
ugccagagcaaagggccag

SEQ ID NO: 2059649 - RNA, 20 nt, Human
ugccagagcaaagggccagg

SEQ ID NO: 2059650 - RNA, 23 nt, Human
ugccagagcaaagggccaggaag

SEQ ID NO: 2059651 - RNA, 20 nt, Human
ugccacugcccgagcuggug

SEQ ID NO: 2059652 - RNA, 21 nt, Human
ugccacugcccgagcuggugc

SEQ ID NO: 2059653 - RNA, 17 nt, Human
ugccacugccucuuccu

SEQ ID NO: 2059654 - RNA, 13 nt, Human
ugccacugccucu

SEQ ID NO: 2059655 - RNA, 21 nt, Human
ugccagaugccuuuauggcug

SEQ ID NO: 2059656 - RNA, 11 nt, Human
ugccagccaca

SEQ ID NO: 2059657 - RNA, 11 nt, Human
ugccagccagc

SEQ ID NO: 2059658 - RNA, 12 nt, Human
ugccagccagca

SEQ ID NO: 2059659 - RNA, 16 nt, Human
ugccagcacccccacg

SEQ ID NO: 2059660 - RNA, 17 nt, Human
ugccagcacccccacgc

SEQ ID NO: 2059661 - RNA, 15 nt, Human
ugccagccagcagcc

SEQ ID NO: 2059662 - RNA, 23 nt, Human
ugccccgaacauguuuuucuucu

SEQ ID NO: 2059663 - RNA, 13 nt, Human
ugccccgcccagc

SEQ ID NO: 2059664 - RNA, 17 nt, Human
ugccccgcuuugcggac

SEQ ID NO: 2059665 - RNA, 17 nt, Human
ugcccccacaccuggcc

SEQ ID NO: 2059666 - RNA, 18 nt, Human
ugcccccacaccuggccc

SEQ ID NO: 2059667 - RNA, 19 nt, Human
ugcccccacaccuggcccu

SEQ ID NO: 2059668 - RNA, 22 nt, Human
ugcccccacaccuggcccuggg

SEQ ID NO: 2059669 - RNA, 15 nt, Human
ugccccaugccuguc

SEQ ID NO: 2059670 - RNA, 23 nt, Human
ugccccaugccuguccagccugg

SEQ ID NO: 2059671 - RNA, 19 nt, Human
ugcccaggagagccagccc

SEQ ID NO: 2059672 - RNA, 20 nt, Human
ugcccaggagagccagcccu

SEQ ID NO: 2059673 - RNA, 21 nt, Human
ugccccaugaagccacagccc

SEQ ID NO: 2059674 - RNA, 23 nt, Human
ugccccaugaagccacagcccag

SEQ ID NO: 2059675 - RNA, 12 nt, Human
ugccccaugccu

SEQ ID NO: 2059676 - RNA, 22 nt, Human
ugcccccgcucaugggccccuc

SEQ ID NO: 2059677 - RNA, 18 nt, Human
ugccccccuugccagaca

SEQ ID NO: 2059678 - RNA, 18 nt, Human
ugcccaggccccugccac

SEQ ID NO: 2059679 - RNA, 17 nt, Human
ugcccaggccccugcca

SEQ ID NO: 2059680 - RNA, 15 nt, Human
ugcccaggccccugc

SEQ ID NO: 2059681 - RNA, 16 nt, Human
ugcccaggagagccag

SEQ ID NO: 2059682 - RNA, 17 nt, Human
ugcccaggagagccagc

SEQ ID NO: 2059683 - RNA, 18 nt, Human
ugcccaggagagccagcc

SEQ ID NO: 2059684 - RNA, 21 nt, Human
ugcccaggagagccagcccuc

SEQ ID NO: 2059685 - RNA, 15 nt, Human
ugcccagcucagucu

SEQ ID NO: 2059686 - RNA, 21 nt, Human
ugcccagcucagucuucccua

SEQ ID NO: 2059687 - RNA, 12 nt, Human
ugcccagcucag

SEQ ID NO: 2059688 - RNA, 17 nt, Human
ugcccagcucagagggu

SEQ ID NO: 2059689 - RNA, 15 nt, Human
ugcccaaaucugccu

SEQ ID NO: 2059690 - RNA, 21 nt, Human
ugccauuuuggguuaggagaa

SEQ ID NO: 2059691 - RNA, 23 nt, Human
ugcccaaagcagcacuuauaaau

SEQ ID NO: 2059692 - RNA, 17 nt, Human
agcucaggugucccugc

SEQ ID NO: 2059693 - RNA, 13 nt, Human
ugccauugucuuu

SEQ ID NO: 2059694 - RNA, 14 nt, Human
ugccauugucuuua

SEQ ID NO: 2059695 - RNA, 16 nt, Human
ugccauugucuuuaua

SEQ ID NO: 2059696 - RNA, 17 nt, Human
ugccauugucuuuauau

SEQ ID NO: 2059697 - RNA, 18 nt, Human
ugccauugucuuuauaug

SEQ ID NO: 2059698 - RNA, 22 nt, Human
ugccauuugcacccuccgccuu

SEQ ID NO: 2059699 - RNA, 19 nt, Human
ugccauuugcacccuccgc

SEQ ID NO: 2059700 - RNA, 21 nt, Human
ugccauuugcacccuccgccu

SEQ ID NO: 2059701 - RNA, 16 nt, Human
ugccauuugcacccuc

SEQ ID NO: 2059702 - RNA, 17 nt, Human
ugccauuugcacccucc

SEQ ID NO: 2059703 - RNA, 17 nt, Human
agcucaggaggcuugga

SEQ ID NO: 2059704 - RNA, 19 nt, Human
agcuauucaguaauaacuc

SEQ ID NO: 2059705 - RNA, 21 nt, Human
agcuauucaguugguaagcuu

SEQ ID NO: 2059706 - RNA, 22 nt, Human
agcgugaaggccgagaagcaag

SEQ ID NO: 2059707 - RNA, 23 nt, Human
agcgugaaggccgagaagcaaga

SEQ ID NO: 2059708 - RNA, 14 nt, Human
agcuacaggaagca

SEQ ID NO: 2059709 - RNA, 22 nt, Human
agcuacaggaagcaccccaugc

SEQ ID NO: 2059710 - RNA, 21 nt, Human
agcuaggugcuaauuaauaaa

SEQ ID NO: 2059711 - RNA, 22 nt, Human
agcuacccaggaggcugaggug

SEQ ID NO: 2059712 - RNA, 21 nt, Human
agcuaggccuggccagaugca

SEQ ID NO: 2059713 - RNA, 13 nt, Human
agcuaccaugaca

SEQ ID NO: 2059714 - RNA, 14 nt, Human
agcuaccaugacaa

SEQ ID NO: 2059715 - RNA, 17 nt, Human
agcuauauccauguacu

SEQ ID NO: 2059716 - RNA, 18 nt, Human
agcuauccggacagagca

SEQ ID NO: 2059717 - RNA, 14 nt, Human
agcuaucaggaaca

SEQ ID NO: 2059718 - RNA, 20 nt, Human
agcuauauccauguacugua

SEQ ID NO: 2059719 - RNA, 22 nt, Human
agcuauauccauguacuguagu

SEQ ID NO: 2059720 - RNA, 18 nt, Human
agcuauauuuaaguauuc

SEQ ID NO: 2059721 - RNA, 22 nt, Human
agcuauauuuaaguauucaaga

SEQ ID NO: 2059722 - RNA, 15 nt, Human
agcuaucuaggugga

SEQ ID NO: 2059723 - RNA, 18 nt, Human
agcuaucuagguggaguu

SEQ ID NO: 2059724 - RNA, 18 nt, Human
agcuaucuauauggaauu

SEQ ID NO: 2059725 - RNA, 17 nt, Human
agcuaucucucagugaa

SEQ ID NO: 2059726 - RNA, 16 nt, Human
uggccaaguucuuagu

SEQ ID NO: 2059727 - RNA, 17 nt, Human
uggccaggcuggucuca

SEQ ID NO: 2059728 - RNA, 15 nt, Human
uggccaggcuggucu

SEQ ID NO: 2059729 - RNA, 15 nt, Human
uggcauggcuccagu

SEQ ID NO: 2059730 - RNA, 16 nt, Human
uggcauggcuccaguc

SEQ ID NO: 2059731 - RNA, 14 nt, Human
uggcauggcaccug

SEQ ID NO: 2059732 - RNA, 16 nt, Human
uggcauggcaccuguc

SEQ ID NO: 2059733 - RNA, 17 nt, Human
uggcauggcuccagucu

SEQ ID NO: 2059734 - RNA, 13 nt, Human
aggccugccuguu

SEQ ID NO: 2059735 - RNA, 23 nt, Human
aggccugccagacggcacccacc

SEQ ID NO: 2059736 - RNA, 15 nt, Human
uggcaugccuuccag

SEQ ID NO: 2059737 - RNA, 19 nt, Human
uggcaugccuuccagcacc

SEQ ID NO: 2059738 - RNA, 12 nt, Human
aggccucugggc

SEQ ID NO: 2059739 - RNA, 18 nt, Human
aggccucugggccuccuc

SEQ ID NO: 2059740 - RNA, 15 nt, Human
aggccucccucucuc

SEQ ID NO: 2059741 - RNA, 22 nt, Human
aggccucccucucucuucugcu

SEQ ID NO: 2059742 - RNA, 13 nt, Human
aggccucccucaa

SEQ ID NO: 2059743 - RNA, 13 nt, Human
aggccucagugga

SEQ ID NO: 2059744 - RNA, 23 nt, Human
aggccucaguggacuuuccaccc

SEQ ID NO: 2059745 - RNA, 15 nt, Human
aggccucaguggacu

SEQ ID NO: 2059746 - RNA, 16 nt, Human
aggccucaguggacuu

SEQ ID NO: 2059747 - RNA, 14 nt, Human
aggccuccagcuca

SEQ ID NO: 2059748 - RNA, 15 nt, Human
aggccuccagcucag

SEQ ID NO: 2059749 - RNA, 16 nt, Human
aggccuccagcucagc

SEQ ID NO: 2059750 - RNA, 17 nt, Human
aggccuccagcucagca

SEQ ID NO: 2059751 - RNA, 18 nt, Human
aggccuccagcucagcag

SEQ ID NO: 2059752 - RNA, 20 nt, Human
aggccuccagcucagcagug

SEQ ID NO: 2059753 - RNA, 12 nt, Human
uggccuggccag

SEQ ID NO: 2059754 - RNA, 18 nt, Human
uggccuggccaggagcuc

SEQ ID NO: 2059755 - RNA, 21 nt, Human
uggccuggccaggagcucuuc

SEQ ID NO: 2059756 - RNA, 13 nt, Human
uggccuggccagg

SEQ ID NO: 2059757 - RNA, 15 nt, Human
uggccuggccaggag

SEQ ID NO: 2059758 - RNA, 16 nt, Human
uggccuggccaggagc

SEQ ID NO: 2059759 - RNA, 17 nt, Human
uggccuggccaggagcu

SEQ ID NO: 2059760 - RNA, 21 nt, Human
aggccuggccagaugcaccag

SEQ ID NO: 2059761 - RNA, 17 nt, Human
aggccuggccagaugca

SEQ ID NO: 2059762 - RNA, 16 nt, Human
aggccuggccagaugc

SEQ ID NO: 2059763 - RNA, 15 nt, Human
aggccuggccagaug

SEQ ID NO: 2059764 - RNA, 23 nt, Human
aggccuggccagaugcaccagcc

SEQ ID NO: 2059765 - RNA, 22 nt, Human
aggccuggccagaugcaccagc

SEQ ID NO: 2059766 - RNA, 13 nt, Human
uggccgggcacag

SEQ ID NO: 2059767 - RNA, 14 nt, Human
uggccgggcacagc

SEQ ID NO: 2059768 - RNA, 15 nt, Human
uggccgggcacagcu

SEQ ID NO: 2059769 - RNA, 16 nt, Human
uggccgggcacagcug

SEQ ID NO: 2059770 - RNA, 19 nt, Human
uggccgggcacagcugugg

SEQ ID NO: 2059771 - RNA, 17 nt, Human
uggcccgacagccuggc

SEQ ID NO: 2059772 - RNA, 16 nt, Human
uggcccgacagccugg

SEQ ID NO: 2059773 - RNA, 15 nt, Human
uggcccgacagccug

SEQ ID NO: 2059774 - RNA, 14 nt, Human
uggcccgacagccu

SEQ ID NO: 2059775 - RNA, 19 nt, Human
uggcccgacagccuggcac

SEQ ID NO: 2059776 - RNA, 18 nt, Human
uggcccgacagccuggca

SEQ ID NO: 2059777 - RNA, 16 nt, Human
uggccccuucacuucu

SEQ ID NO: 2059778 - RNA, 21 nt, Human
uggccccugcccggcugcgga

SEQ ID NO: 2059779 - RNA, 14 nt, Human
uggccccugccuug

SEQ ID NO: 2059780 - RNA, 11 nt, Human
uggccccuuca

SEQ ID NO: 2059781 - RNA, 13 nt, Human
uggccccuucacu

SEQ ID NO: 2059782 - RNA, 21 nt, Human
uggccccuucacuucugacca

SEQ ID NO: 2059783 - RNA, 13 nt, Human
aggccaaaaaaau

SEQ ID NO: 2059784 - RNA, 15 nt, Human
uggacgcacacagcu

SEQ ID NO: 2059785 - RNA, 16 nt, Human
uggaccuugagaccac

SEQ ID NO: 2059786 - RNA, 22 nt, Human
aggccaacccaaaauaagcagg

SEQ ID NO: 2059787 - RNA, 18 nt, Human
aggccaaggugggaggau

SEQ ID NO: 2059788 - RNA, 21 nt, Human
aggccaaacuggcaaacuuca

SEQ ID NO: 2059789 - RNA, 19 nt, Human
uggaugccugguggcagcu

SEQ ID NO: 2059790 - RNA, 18 nt, Human
uggaugccugguggcagc

SEQ ID NO: 2059791 - RNA, 20 nt, Human
uggaugccugguggcagcug

SEQ ID NO: 2059792 - RNA, 15 nt, Human
uggaugccugguggc

SEQ ID NO: 2059793 - RNA, 14 nt, Human
uggaguccagucuc

SEQ ID NO: 2059794 - RNA, 15 nt, Human
uggaguccagucucu

SEQ ID NO: 2059795 - RNA, 22 nt, Human
uggagucaugguccgguguccu

SEQ ID NO: 2059796 - RNA, 14 nt, Human
aggccaagugcagg

SEQ ID NO: 2059797 - RNA, 15 nt, Human
aggccaagugcaggc

SEQ ID NO: 2059798 - RNA, 21 nt, Human
aggccaagugcaggcuggcac

SEQ ID NO: 2059799 - RNA, 15 nt, Human
uggcacccggccccu

SEQ ID NO: 2059800 - RNA, 16 nt, Human
uggcacccggccccug

SEQ ID NO: 2059801 - RNA, 20 nt, Human
uggcagauaaucagccucuu

SEQ ID NO: 2059802 - RNA, 21 nt, Human
uggcagauaaucagccucuua

SEQ ID NO: 2059803 - RNA, 19 nt, Human
uggcagauaaucagccucu

SEQ ID NO: 2059804 - RNA, 12 nt, Human
uggauguucuga

SEQ ID NO: 2059805 - RNA, 12 nt, Human
uggauguaaaua

SEQ ID NO: 2059806 - RNA, 18 nt, Human
uggcaccagcagccugga

SEQ ID NO: 2059807 - RNA, 22 nt, Human
aggccaccauauucagugcugu

SEQ ID NO: 2059808 - RNA, 13 nt, Human
uggcagccuuggc

SEQ ID NO: 2059809 - RNA, 21 nt, Human
aggccacaccaucuccuuuca

SEQ ID NO: 2059810 - RNA, 22 nt, Human
aggccacaccaucuccuuucag

SEQ ID NO: 2059811 - RNA, 13 nt, Human
aggccacggcagc

SEQ ID NO: 2059812 - RNA, 21 nt, Human
aggccaccugcccccuucucc

SEQ ID NO: 2059813 - RNA, 22 nt, Human
aggccaccugcccccuucuccc

SEQ ID NO: 2059814 - RNA, 13 nt, Human
aggccacuccucc

SEQ ID NO: 2059815 - RNA, 14 nt, Human
aggccacuccucca

SEQ ID NO: 2059816 - RNA, 19 nt, Human
aggccacuccuccaaagga

SEQ ID NO: 2059817 - RNA, 23 nt, Human
uggcagccgugccuucagcucua

SEQ ID NO: 2059818 - RNA, 22 nt, Human
uggcagccgugccuucagcucu

SEQ ID NO: 2059819 - RNA, 22 nt, Human
uggcagccuacuagggaccugg

SEQ ID NO: 2059820 - RNA, 14 nt, Human
uggcagccccagca

SEQ ID NO: 2059821 - RNA, 15 nt, Human
uggcagccccagcac

SEQ ID NO: 2059822 - RNA, 11 nt, Human
uggcagcccug

SEQ ID NO: 2059823 - RNA, 12 nt, Human
uggcagcccugu

SEQ ID NO: 2059824 - RNA, 16 nt, Human
uggcagccgugccuuc

SEQ ID NO: 2059825 - RNA, 14 nt, Human
uggcagcccuguag

SEQ ID NO: 2059826 - RNA, 17 nt, Human
uggcagcccuguaggga

SEQ ID NO: 2059827 - RNA, 20 nt, Human
aggcuggaguggaguggcgu

SEQ ID NO: 2059828 - RNA, 22 nt, Human
aggcuggauuuugaauuuucuu

SEQ ID NO: 2059829 - RNA, 16 nt, Human
aggcuggaggcagggc

SEQ ID NO: 2059830 - RNA, 17 nt, Human
aggcuggaggcagggcc

SEQ ID NO: 2059831 - RNA, 18 nt, Human
aggcuggaggcagggccu

SEQ ID NO: 2059832 - RNA, 19 nt, Human
aggcuggaggcagggccuu

SEQ ID NO: 2059833 - RNA, 23 nt, Human
aggcuggaggcagggccuugccc

SEQ ID NO: 2059834 - RNA, 13 nt, Human
aggcuggagccca

SEQ ID NO: 2059835 - RNA, 15 nt, Human
aggcuggagcccagg

SEQ ID NO: 2059836 - RNA, 18 nt, Human
aggcuggagcccagggag

SEQ ID NO: 2059837 - RNA, 12 nt, Human
aggcuggagcug

SEQ ID NO: 2059838 - RNA, 14 nt, Human
aggcuggagcuggc

SEQ ID NO: 2059839 - RNA, 17 nt, Human
aggcuggagcuggcguc

SEQ ID NO: 2059840 - RNA, 18 nt, Human
aggcuggagcuggcgucu

SEQ ID NO: 2059841 - RNA, 15 nt, Human
aggcuggaggaaggg

SEQ ID NO: 2059842 - RNA, 13 nt, Human
aggcuggaggcag

SEQ ID NO: 2059843 - RNA, 14 nt, Human
aggcuggaggcagg

SEQ ID NO: 2059844 - RNA, 15 nt, Human
aggcuggaggcaggg

SEQ ID NO: 2059845 - RNA, 19 nt, Human
aggcuggcaccgccuucuc

SEQ ID NO: 2059846 - RNA, 20 nt, Human
aggcuggcaccgccuucucu

SEQ ID NO: 2059847 - RNA, 15 nt, Human
aggcuggcagguaug

SEQ ID NO: 2059848 - RNA, 13 nt, Human
aggcuggccucag

SEQ ID NO: 2059849 - RNA, 14 nt, Human
aggcuggccucaga

SEQ ID NO: 2059850 - RNA, 15 nt, Human
aggcuggccucagac

SEQ ID NO: 2059851 - RNA, 16 nt, Human
aggcuggccucagacu

SEQ ID NO: 2059852 - RNA, 17 nt, Human
aggcuggcgugcagugg

SEQ ID NO: 2059853 - RNA, 13 nt, Human
aggcuggcgugca

SEQ ID NO: 2059854 - RNA, 17 nt, Human
aggcugcucagggcugg

SEQ ID NO: 2059855 - RNA, 16 nt, Human
aggcugcucagggcug

SEQ ID NO: 2059856 - RNA, 15 nt, Human
aggcugcucagggcu

SEQ ID NO: 2059857 - RNA, 23 nt, Human
aggcucugcccugcccuagcucc

SEQ ID NO: 2059858 - RNA, 14 nt, Human
aggcucugcccugc

SEQ ID NO: 2059859 - RNA, 17 nt, Human
aggcucugcccugcccu

SEQ ID NO: 2059860 - RNA, 16 nt, Human
aggcugcucugccugu

SEQ ID NO: 2059861 - RNA, 13 nt, Human
aggcugcuggagg

SEQ ID NO: 2059862 - RNA, 14 nt, Human
aggcugcuggagga

SEQ ID NO: 2059863 - RNA, 15 nt, Human
aggcugcuggaggaa

SEQ ID NO: 2059864 - RNA, 16 nt, Human
aggcugcuggaggaaa

SEQ ID NO: 2059865 - RNA, 13 nt, Human
aggcugcuuggga

SEQ ID NO: 2059866 - RNA, 14 nt, Human
aggcuggacuccag

SEQ ID NO: 2059867 - RNA, 15 nt, Human
aggcuggacuccaga

SEQ ID NO: 2059868 - RNA, 16 nt, Human
aggcuggacuccagau

SEQ ID NO: 2059869 - RNA, 17 nt, Human
aggcuggacuccagauc

SEQ ID NO: 2059870 - RNA, 21 nt, Human
aggcuggacuccagaucugca

SEQ ID NO: 2059871 - RNA, 22 nt, Human
aggcuggacuccagaucugcac

SEQ ID NO: 2059872 - RNA, 17 nt, Human
aggccugggugcuggcu

SEQ ID NO: 2059873 - RNA, 15 nt, Human
aggccugucccuggc

SEQ ID NO: 2059874 - RNA, 16 nt, Human
aggccugucccuggcc

SEQ ID NO: 2059875 - RNA, 17 nt, Human
aggccugucccuggcca

SEQ ID NO: 2059876 - RNA, 22 nt, Human
aggccugucccuggccaucucu

SEQ ID NO: 2059877 - RNA, 23 nt, Human
aggccugucccuggccaucucug

SEQ ID NO: 2059878 - RNA, 23 nt, Human
aggccugggugcuggcugcccag

SEQ ID NO: 2059879 - RNA, 22 nt, Human
aggccuguccugaccugucuca

SEQ ID NO: 2059880 - RNA, 16 nt, Human
aggccugggucugugu

SEQ ID NO: 2059881 - RNA, 17 nt, Human
aggccugggucuguguc

SEQ ID NO: 2059882 - RNA, 19 nt, Human
aggccugggucugugucuc

SEQ ID NO: 2059883 - RNA, 21 nt, Human
aggccugggucugugucucuu

SEQ ID NO: 2059884 - RNA, 12 nt, Human
aggccugggugc

SEQ ID NO: 2059885 - RNA, 16 nt, Human
aggccugggugcuggc

SEQ ID NO: 2059886 - RNA, 19 nt, Human
aggcuccuuuagcgcccag

SEQ ID NO: 2059887 - RNA, 13 nt, Human
aggcuccuuccug

SEQ ID NO: 2059888 - RNA, 15 nt, Human
aggcuccuuccuguc

SEQ ID NO: 2059889 - RNA, 16 nt, Human
aggcuccuuccugucu

SEQ ID NO: 2059890 - RNA, 23 nt, Human
aggcuccuuccugucuuccugca

SEQ ID NO: 2059891 - RNA, 18 nt, Human
aggcucuaaccacacagc

SEQ ID NO: 2059892 - RNA, 20 nt, Human
aggcucuaaccacacagccu

SEQ ID NO: 2059893 - RNA, 23 nt, Human
aggcucuaaccacacagccuaca

SEQ ID NO: 2059894 - RNA, 18 nt, Human
aggcucugaaagccagcu

SEQ ID NO: 2059895 - RNA, 11 nt, Human
aggcucugccc

SEQ ID NO: 2059896 - RNA, 12 nt, Human
aggcucugcccu

SEQ ID NO: 2059897 - RNA, 13 nt, Human
aggcucugcacag

SEQ ID NO: 2059898 - RNA, 15 nt, Human
aggcucugcacagau

SEQ ID NO: 2059899 - RNA, 17 nt, Human
aggcucugcacagaugg

SEQ ID NO: 2059900 - RNA, 13 nt, Human
aggcucugcccug

SEQ ID NO: 2059901 - RNA, 20 nt, Human
aggcuggcgugcaguggugc

SEQ ID NO: 2059902 - RNA, 18 nt, Human
aggcuggcgugcaguggu

SEQ ID NO: 2059903 - RNA, 13 nt, Human
aggcuggcuggcc

SEQ ID NO: 2059904 - RNA, 22 nt, Human
aggcuggcuggcccgucauguu

SEQ ID NO: 2059905 - RNA, 14 nt, Human
aggcuggcuugucc

SEQ ID NO: 2059906 - RNA, 22 nt, Human
aggcuggcuuguccccuccuca

SEQ ID NO: 2059907 - RNA, 20 nt, Human
aggcuggcuuguccccuccu

SEQ ID NO: 2059908 - RNA, 15 nt, Human
uggcuagaguccuca

SEQ ID NO: 2059909 - RNA, 16 nt, Human
uggcuagaguccucac

SEQ ID NO: 2059910 - RNA, 18 nt, Human
uggcuagaguccucacuc

SEQ ID NO: 2059911 - RNA, 21 nt, Human
uggcuagaguccucacuccca

SEQ ID NO: 2059912 - RNA, 22 nt, Human
uggcuauuagagaucaaccccu

SEQ ID NO: 2059913 - RNA, 16 nt, Human
uggcuauuuaaagaca

SEQ ID NO: 2059914 - RNA, 16 nt, Human
uggcuagucagagaga

SEQ ID NO: 2059915 - RNA, 15 nt, Human
uggcuaguccuuguu

SEQ ID NO: 2059916 - RNA, 18 nt, Human
uggcucaaguccucuuuu

SEQ ID NO: 2059917 - RNA, 12 nt, Human
uggcugcaaagg

SEQ ID NO: 2059918 - RNA, 20 nt, Human
uggcugaggauuucaagccu

SEQ ID NO: 2059919 - RNA, 14 nt, Human
uggcugcagggagu

SEQ ID NO: 2059920 - RNA, 13 nt, Human
uggcugcagggag

SEQ ID NO: 2059921 - RNA, 13 nt, Human
uggcugauaaaag

SEQ ID NO: 2059922 - RNA, 19 nt, Human
uggcugauaaaagauacau

SEQ ID NO: 2059923 - RNA, 15 nt, Human
uggcugcagggaguc

SEQ ID NO: 2059924 - RNA, 13 nt, Human
uggcugcccacac

SEQ ID NO: 2059925 - RNA, 20 nt, Human
uggcugcccagaccccucug

SEQ ID NO: 2059926 - RNA, 23 nt, Human
uggcugcccagaccccucuggcc

SEQ ID NO: 2059927 - RNA, 21 nt, Human
uggcugcccagaccccucugg

SEQ ID NO: 2059928 - RNA, 15 nt, Human
uggcugcuagcacuu

SEQ ID NO: 2059929 - RNA, 13 nt, Human
uggcugcuagcac

SEQ ID NO: 2059930 - RNA, 14 nt, Human
uggcugcuagcacu

SEQ ID NO: 2059931 - RNA, 16 nt, Human
uggcugcggcacccuu

SEQ ID NO: 2059932 - RNA, 17 nt, Human
uggcugcggcacccuug

SEQ ID NO: 2059933 - RNA, 14 nt, Human
uggcugccuggagc

SEQ ID NO: 2059934 - RNA, 15 nt, Human
uggcugccuggagcc

SEQ ID NO: 2059935 - RNA, 16 nt, Human
uggcugccuggagccc

SEQ ID NO: 2059936 - RNA, 17 nt, Human
uggcuuaaaacaacacu

SEQ ID NO: 2059937 - RNA, 15 nt, Human
uggcuguuggcuggg

SEQ ID NO: 2059938 - RNA, 13 nt, Human
uggcuguuggcug

SEQ ID NO: 2059939 - RNA, 22 nt, Human
uggcuucacggaagagccuugc

SEQ ID NO: 2059940 - RNA, 20 nt, Human
uggcuuacuacaugugggag

SEQ ID NO: 2059941 - RNA, 23 nt, Human
uggcuuacuacaugugggagcuu

SEQ ID NO: 2059942 - RNA, 23 nt, Human
uggcuucacggaagagccuugcg

SEQ ID NO: 2059943 - RNA, 22 nt, Human
uggcuuccagaaaaccccagca

SEQ ID NO: 2059944 - RNA, 23 nt, Human
uggcuuccagaaaaccccagcau

SEQ ID NO: 2059945 - RNA, 13 nt, Human
ugggaacuagacu

SEQ ID NO: 2059946 - RNA, 24 nt, Human
ugggaacgcagaugauccaugagu

SEQ ID NO: 2059947 - RNA, 16 nt, Human
ugggaacgugacugcc

SEQ ID NO: 2059948 - RNA, 18 nt, Human
ugggaacgugacugcccc

SEQ ID NO: 2059949 - RNA, 17 nt, Human
ugggaacucccaagaac

SEQ ID NO: 2059950 - RNA, 22 nt, Human
ugggaacucccaagaacagcag

SEQ ID NO: 2059951 - RNA, 12 nt, Human
ugggaagaaaca

SEQ ID NO: 2059952 - RNA, 14 nt, Human
ugggaagaaacaaa

SEQ ID NO: 2059953 - RNA, 13 nt, Human
ugggaagacauga

SEQ ID NO: 2059954 - RNA, 21 nt, Human
ugggaagacauggggaggaag

SEQ ID NO: 2059955 - RNA, 21 nt, Human
ugggaagggagagcggggcag

SEQ ID NO: 2059956 - RNA, 15 nt, Human
ugggaagggguuucu

SEQ ID NO: 2059957 - RNA, 13 nt, Human
ugggaagggagag

SEQ ID NO: 2059958 - RNA, 22 nt, Human
ugggaagauaggcucugcacag

SEQ ID NO: 2059959 - RNA, 17 nt, Human
ugggaagauaggcucug

SEQ ID NO: 2059960 - RNA, 20 nt, Human
ugggaagauaggcucugcac

SEQ ID NO: 2059961 - RNA, 12 nt, Human
ugggaaggacuu

SEQ ID NO: 2059962 - RNA, 13 nt, Human
ugggaaggacuug

SEQ ID NO: 2059963 - RNA, 22 nt, Human
ugggaaggacuuggcgcgcccu

SEQ ID NO: 2059964 - RNA, 12 nt, Human
ugggaaggaggg

SEQ ID NO: 2059965 - RNA, 16 nt, Human
uggcuucccgcucagc

SEQ ID NO: 2059966 - RNA, 15 nt, Human
uggcuucccgcucag

SEQ ID NO: 2059967 - RNA, 17 nt, Human
uggcuucccgcucagcc

SEQ ID NO: 2059968 - RNA, 16 nt, Human
ugggaaaggaguagaa

SEQ ID NO: 2059969 - RNA, 17 nt, Human
ugggaaauaagagagaa

SEQ ID NO: 2059970 - RNA, 17 nt, Human
ugggaaaggaguagaaa

SEQ ID NO: 2059971 - RNA, 20 nt, Human
ugggaaagggauuuucagcc

SEQ ID NO: 2059972 - RNA, 16 nt, Human
ugggaaccuuccuguc

SEQ ID NO: 2059973 - RNA, 21 nt, Human
ugggaacgcagaugauccaug

SEQ ID NO: 2059974 - RNA, 20 nt, Human
aggacugaauuguccccagu

SEQ ID NO: 2059975 - RNA, 17 nt, Human
aggacugaauugucccc

SEQ ID NO: 2059976 - RNA, 19 nt, Human
aggacugaauuguccccag

SEQ ID NO: 2059977 - RNA, 21 nt, Human
aggacuguuuuuuccugagcu

SEQ ID NO: 2059978 - RNA, 18 nt, Human
aggacuguuuuuuccuga

SEQ ID NO: 2059979 - RNA, 22 nt, Human
aggacuguuuuuuccugagcuu

SEQ ID NO: 2059980 - RNA, 20 nt, Human
aggacuuggucugauuucag

SEQ ID NO: 2059981 - RNA, 23 nt, Human
aggacuugcccucgugguggaaa

SEQ ID NO: 2059982 - RNA, 16 nt, Human
aggacuuggucugauu

SEQ ID NO: 2059983 - RNA, 18 nt, Human
aggacauugcggacagcc

SEQ ID NO: 2059984 - RNA, 17 nt, Human
aggacauugcggacagc

SEQ ID NO: 2059985 - RNA, 15 nt, Human
aggacauugcggaca

SEQ ID NO: 2059986 - RNA, 16 nt, Human
aggacauguucccuuc

SEQ ID NO: 2059987 - RNA, 23 nt, Human
aggacauugcggacagccacggc

SEQ ID NO: 2059988 - RNA, 19 nt, Human
aggacauugcggacagcca

SEQ ID NO: 2059989 - RNA, 15 nt, Human
aggacauuucccagg

SEQ ID NO: 2059990 - RNA, 19 nt, Human
aggacucugccuccucuuc

SEQ ID NO: 2059991 - RNA, 23 nt, Human
aggacuuggucugauuucaggau

SEQ ID NO: 2059992 - RNA, 12 nt, Human
aggagaaacaca

SEQ ID NO: 2059993 - RNA, 23 nt, Human
aggacuuuucuuuguggcuuccu

SEQ ID NO: 2059994 - RNA, 21 nt, Human
aggacuuuauagaucagccag

SEQ ID NO: 2059995 - RNA, 20 nt, Human
aggacuuuauagaucagcca

SEQ ID NO: 2059996 - RNA, 14 nt, Human
aggagaugggccuu

SEQ ID NO: 2059997 - RNA, 14 nt, Human
aggagaaacacauc

SEQ ID NO: 2059998 - RNA, 13 nt, Human
aggagaaacacau

SEQ ID NO: 2059999 - RNA, 14 nt, Human
aggagaaacagaga

SEQ ID NO: 2060000 - RNA, 17 nt, Human
aggagauggggacaggg

SEQ ID NO: 2060001 - RNA, 17 nt, Human
aggagauguaagagcuu

SEQ ID NO: 2060002 - RNA, 22 nt, Human
aggagauguaagagcuuuacaa

SEQ ID NO: 2060003 - RNA, 16 nt, Human
aggagaaacagagaca

SEQ ID NO: 2060004 - RNA, 18 nt, Human
aggagaaacagagacagg

SEQ ID NO: 2060005 - RNA, 22 nt, Human
aggagccccgaggccuucucug

SEQ ID NO: 2060006 - RNA, 19 nt, Human
aggagcaggagccugagcc

SEQ ID NO: 2060007 - RNA, 21 nt, Human
ugcuuugggcugcccuggugc

SEQ ID NO: 2060008 - RNA, 20 nt, Human
ugcuuugggcugcccuggug

SEQ ID NO: 2060009 - RNA, 19 nt, Human
ugcuuugggcugcccuggu

SEQ ID NO: 2060010 - RNA, 18 nt, Human
ugcuuugggcugcccugg

SEQ ID NO: 2060011 - RNA, 17 nt, Human
ugcuuugggcugcccug

SEQ ID NO: 2060012 - RNA, 15 nt, Human
uggaaauacacagug

SEQ ID NO: 2060013 - RNA, 14 nt, Human
uggaaauacacagu

SEQ ID NO: 2060014 - RNA, 15 nt, Human
uggaaauauuaagaa

SEQ ID NO: 2060015 - RNA, 22 nt, Human
ugcuuuuccuuggggcaggcag

SEQ ID NO: 2060016 - RNA, 14 nt, Human
uggaaagccucugc

SEQ ID NO: 2060017 - RNA, 15 nt, Human
uggaaagccucugcu

SEQ ID NO: 2060018 - RNA, 16 nt, Human
uggaaagccucugcug

SEQ ID NO: 2060019 - RNA, 18 nt, Human
uggaaagccucugcugcc

SEQ ID NO: 2060020 - RNA, 19 nt, Human
ugcuugccuagggccuggu

SEQ ID NO: 2060021 - RNA, 22 nt, Human
ugcuugccuagggccuggucca

SEQ ID NO: 2060022 - RNA, 19 nt, Human
ugcuugccugcguuuugga

SEQ ID NO: 2060023 - RNA, 18 nt, Human
ugcuugccgaaacuggaa

SEQ ID NO: 2060024 - RNA, 20 nt, Human
ugcuugccgaaacuggaagu

SEQ ID NO: 2060025 - RNA, 14 nt, Human
ugcuugccuagggc

SEQ ID NO: 2060026 - RNA, 19 nt, Human
aggauuuugauccaagcug

SEQ ID NO: 2060027 - RNA, 13 nt, Human
aggaugcccaggg

SEQ ID NO: 2060028 - RNA, 14 nt, Human
aggaugcccagggc

SEQ ID NO: 2060029 - RNA, 22 nt, Human
aggaugcccagggccacucugc

SEQ ID NO: 2060030 - RNA, 17 nt, Human
aggcaacucaucuuagg

SEQ ID NO: 2060031 - RNA, 17 nt, Human
aggcaacugaacaaaaa

SEQ ID NO: 2060032 - RNA, 18 nt, Human
aggcaacugaacaaaaaa

SEQ ID NO: 2060033 - RNA, 19 nt, Human
aggcaacugaacaaaaaaa

SEQ ID NO: 2060034 - RNA, 14 nt, Human
aggcaacugaggca

SEQ ID NO: 2060035 - RNA, 15 nt, Human
aggcaacugaggcag

SEQ ID NO: 2060036 - RNA, 16 nt, Human
aggcaacugaggcaga

SEQ ID NO: 2060037 - RNA, 11 nt, Human
uggaauugcuu

SEQ ID NO: 2060038 - RNA, 16 nt, Human
uggaauugcuuaccaa

SEQ ID NO: 2060039 - RNA, 18 nt, Human
uggaauugcuuaccaaag

SEQ ID NO: 2060040 - RNA, 23 nt, Human
uggaauugcuuaccaaaggauag

SEQ ID NO: 2060041 - RNA, 17 nt, Human
aggcaacugaggcagac

SEQ ID NO: 2060042 - RNA, 19 nt, Human
aggcaacugaggcagacag

SEQ ID NO: 2060043 - RNA, 13 nt, Human
uggaccgaguaga

SEQ ID NO: 2060044 - RNA, 17 nt, Human
uggaccgaguagaggca

SEQ ID NO: 2060045 - RNA, 15 nt, Human
uggaccucaccaagc

SEQ ID NO: 2060046 - RNA, 17 nt, Human
uggaccucgugcuuuaa

SEQ ID NO: 2060047 - RNA, 13 nt, Human
uggaccuaacauu

SEQ ID NO: 2060048 - RNA, 15 nt, Human
uggaccuaacauucg

SEQ ID NO: 2060049 - RNA, 17 nt, Human
uggaccuaacauucgau

SEQ ID NO: 2060050 - RNA, 18 nt, Human
uggacacagcucuucucc

SEQ ID NO: 2060051 - RNA, 23 nt, Human
aggcaaaaggcaguggggcuggg

SEQ ID NO: 2060052 - RNA, 16 nt, Human
uggacacagcucuucu

SEQ ID NO: 2060053 - RNA, 15 nt, Human
uggacacagcucuuc

SEQ ID NO: 2060054 - RNA, 17 nt, Human
uggaccaguggugccuu

SEQ ID NO: 2060055 - RNA, 20 nt, Human
uggacccagggaugacaugu

SEQ ID NO: 2060056 - RNA, 13 nt, Human
uggaccaggacag

SEQ ID NO: 2060057 - RNA, 14 nt, Human
uggaccaggacagg

SEQ ID NO: 2060058 - RNA, 18 nt, Human
uggaccaggacaggacca

SEQ ID NO: 2060059 - RNA, 19 nt, Human
uggaccaggacaggaccag

SEQ ID NO: 2060060 - RNA, 20 nt, Human
aggaucuguuuuuaaaaauc

SEQ ID NO: 2060061 - RNA, 23 nt, Human
aggaucuguuuuuaaaaaucaua

SEQ ID NO: 2060062 - RNA, 22 nt, Human
aggaucuuucacccacagaaag

SEQ ID NO: 2060063 - RNA, 23 nt, Human
aggaucuuucacccacagaaaga

SEQ ID NO: 2060064 - RNA, 21 nt, Human
aggaucucuugagccugggag

SEQ ID NO: 2060065 - RNA, 22 nt, Human
aggaucucuugagccugggagg

SEQ ID NO: 2060066 - RNA, 18 nt, Human
aggauaaacuuuuagaaa

SEQ ID NO: 2060067 - RNA, 21 nt, Human
aggauaaacuuuuagaaacuu

SEQ ID NO: 2060068 - RNA, 18 nt, Human
aggauaacacaaguaaaa

SEQ ID NO: 2060069 - RNA, 20 nt, Human
uggaaauauuaagaaagacu

SEQ ID NO: 2060070 - RNA, 22 nt, Human
uggaaauaucaguuacucagcc

SEQ ID NO: 2060071 - RNA, 13 nt, Human
uggaaauauuaug

SEQ ID NO: 2060072 - RNA, 15 nt, Human
uggaaauauuaugca

SEQ ID NO: 2060073 - RNA, 16 nt, Human
uggaaauauuaugcaa

SEQ ID NO: 2060074 - RNA, 19 nt, Human
uggaaauauuaugcaaauu

SEQ ID NO: 2060075 - RNA, 23 nt, Human
uggaaauauuaugcaaauuccca

SEQ ID NO: 2060076 - RNA, 20 nt, Human
aggaggcuuggaaagcauca

SEQ ID NO: 2060077 - RNA, 20 nt, Human
aggaggcagagguugcagug

SEQ ID NO: 2060078 - RNA, 12 nt, Human
aggagcugcugg

SEQ ID NO: 2060079 - RNA, 13 nt, Human
aggagcugcuggc

SEQ ID NO: 2060080 - RNA, 17 nt, Human
aggagcugcuggcuugc

SEQ ID NO: 2060081 - RNA, 12 nt, Human
aggaggaggagg

SEQ ID NO: 2060082 - RNA, 14 nt, Human
aggagcugcuggcu

SEQ ID NO: 2060083 - RNA, 16 nt, Human
aggagcugcuggcuug

SEQ ID NO: 2060084 - RNA, 23 nt, Human
aggaggaggcaauugggauggcg

SEQ ID NO: 2060085 - RNA, 21 nt, Human
aggaggagguuuaggucaaga

SEQ ID NO: 2060086 - RNA, 20 nt, Human
aggaggauugcuugagccca

SEQ ID NO: 2060087 - RNA, 21 nt, Human
aggaggauugcuugagcccag

SEQ ID NO: 2060088 - RNA, 23 nt, Human
aggaggauugcuugagcccagga

SEQ ID NO: 2060089 - RNA, 14 nt, Human
aggaggcagaaagc

SEQ ID NO: 2060090 - RNA, 20 nt, Human
aggaggcagaaagcagaggc

SEQ ID NO: 2060091 - RNA, 22 nt, Human
aggaggcagaaagcagaggcug

SEQ ID NO: 2060092 - RNA, 12 nt, Human
aggaauugacuu

SEQ ID NO: 2060093 - RNA, 23 nt, Human
aggaaggagacucaccucugccu

SEQ ID NO: 2060094 - RNA, 15 nt, Human
aggaaggagagccug

SEQ ID NO: 2060095 - RNA, 17 nt, Human
aggaaggagagccugcu

SEQ ID NO: 2060096 - RNA, 15 nt, Human
aggaaggagaggaga

SEQ ID NO: 2060097 - RNA, 21 nt, Human
aggaaggagagaaggggagga

SEQ ID NO: 2060098 - RNA, 18 nt, Human
aggaaggagagccugcug

SEQ ID NO: 2060099 - RNA, 18 nt, Human
aggaagcugugagagcag

SEQ ID NO: 2060100 - RNA, 13 nt, Human
aggaagcuuucuc

SEQ ID NO: 2060101 - RNA, 17 nt, Human
aggaagcuuucucugcu

SEQ ID NO: 2060102 - RNA, 18 nt, Human
aggaagcuuucucugcuu

SEQ ID NO: 2060103 - RNA, 19 nt, Human
aggaagcuuucucugcuuc

SEQ ID NO: 2060104 - RNA, 20 nt, Human
aggaagcuuucucugcuuca

SEQ ID NO: 2060105 - RNA, 21 nt, Human
aggaagcuuucucugcuucag

SEQ ID NO: 2060106 - RNA, 22 nt, Human
aggaagcuuucucugcuucagc

SEQ ID NO: 2060107 - RNA, 18 nt, Human
aggaagcaccccaugcca

SEQ ID NO: 2060108 - RNA, 18 nt, Human
agcugggacuacaggcac

SEQ ID NO: 2060109 - RNA, 16 nt, Human
agcugggacuacaggc

SEQ ID NO: 2060110 - RNA, 19 nt, Human
agcugggacuacaggcacc

SEQ ID NO: 2060111 - RNA, 15 nt, Human
ugcuccaccacaucc

SEQ ID NO: 2060112 - RNA, 16 nt, Human
ugcuccagcuguucag

SEQ ID NO: 2060113 - RNA, 19 nt, Human
ugcuccagcuguucagcug

SEQ ID NO: 2060114 - RNA, 15 nt, Human
ugcuccagccaaccc

SEQ ID NO: 2060115 - RNA, 17 nt, Human
ugcuccagccaaccccu

SEQ ID NO: 2060116 - RNA, 18 nt, Human
ugcuccagccaaccccug

SEQ ID NO: 2060117 - RNA, 20 nt, Human
ugcuccagccaaccccugug

SEQ ID NO: 2060118 - RNA, 23 nt, Human
ugcuccagccaaccccuguggag

SEQ ID NO: 2060119 - RNA, 22 nt, Human
ugcuccagccaaccccugugga

SEQ ID NO: 2060120 - RNA, 22 nt, Human
ugcuccacccuuggccugucuc

SEQ ID NO: 2060121 - RNA, 23 nt, Human
ugcuccacccuuggccugucuca

SEQ ID NO: 2060122 - RNA, 15 nt, Human
ugcuccaccccacuc

SEQ ID NO: 2060123 - RNA, 16 nt, Human
ugcuccaccccacuca

SEQ ID NO: 2060124 - RNA, 17 nt, Human
ugcuccaccccacucac

SEQ ID NO: 2060125 - RNA, 16 nt, Human
ugcuccacccuuggcc

SEQ ID NO: 2060126 - RNA, 17 nt, Human
ugcuccacccuuggccu

SEQ ID NO: 2060127 - RNA, 18 nt, Human
ugcuccacccuuggccug

SEQ ID NO: 2060128 - RNA, 19 nt, Human
ugcuccacccuuggccugu

SEQ ID NO: 2060129 - RNA, 15 nt, Human
ugcugaccuccacag

SEQ ID NO: 2060130 - RNA, 16 nt, Human
ugcugaccuccacagc

SEQ ID NO: 2060131 - RNA, 18 nt, Human
ugcucugcuggucuucaa

SEQ ID NO: 2060132 - RNA, 13 nt, Human
ugcucccccaucc

SEQ ID NO: 2060133 - RNA, 20 nt, Human
ugcucccuccccugcccugg

SEQ ID NO: 2060134 - RNA, 14 nt, Human
ugcucccccacccc

SEQ ID NO: 2060135 - RNA, 16 nt, Human
ugcucccccacccccu

SEQ ID NO: 2060136 - RNA, 21 nt, Human
ugcucccccacccccucccca

SEQ ID NO: 2060137 - RNA, 23 nt, Human
ugcucccccacccccuccccagg

SEQ ID NO: 2060138 - RNA, 15 nt, Human
ugcucccccauccuc

SEQ ID NO: 2060139 - RNA, 19 nt, Human
ugcucccuccccugcccug

SEQ ID NO: 2060140 - RNA, 18 nt, Human
ugcuccgccucugcuggc

SEQ ID NO: 2060141 - RNA, 22 nt, Human
ugcucugcugacagacacaggc

SEQ ID NO: 2060142 - RNA, 21 nt, Human
ugcucugcugacagacacagg

SEQ ID NO: 2060143 - RNA, 18 nt, Human
ugcuuaugaauauuuaua

SEQ ID NO: 2060144 - RNA, 19 nt, Human
ugcuuaugaauauuuauaa

SEQ ID NO: 2060145 - RNA, 20 nt, Human
ugcuuaugaauauuuauaac

SEQ ID NO: 2060146 - RNA, 13 nt, Human
ugcuuauacacuu

SEQ ID NO: 2060147 - RNA, 18 nt, Human
ugcugugaccauuuauaa

SEQ ID NO: 2060148 - RNA, 19 nt, Human
ugcugugaccauuuauaau

SEQ ID NO: 2060149 - RNA, 18 nt, Human
ugcugugaacaagugaac

SEQ ID NO: 2060150 - RNA, 23 nt, Human
ugcugugaacaagugaacacauu

SEQ ID NO: 2060151 - RNA, 15 nt, Human
ugcuucacaacccau

SEQ ID NO: 2060152 - RNA, 17 nt, Human
ugcuucacaacccaucu

SEQ ID NO: 2060153 - RNA, 14 nt, Human
ugcuucagccuccc

SEQ ID NO: 2060154 - RNA, 13 nt, Human
ugcuucagccucc

SEQ ID NO: 2060155 - RNA, 19 nt, Human
aggacacuaaccacgcugg

SEQ ID NO: 2060156 - RNA, 23 nt, Human
aggacacuaaccacgcuggaccu

SEQ ID NO: 2060157 - RNA, 21 nt, Human
ugcuucauagcugguuccugc

SEQ ID NO: 2060158 - RNA, 12 nt, Human
ugcuucagccug

SEQ ID NO: 2060159 - RNA, 14 nt, Human
ugcuucagccugag

SEQ ID NO: 2060160 - RNA, 15 nt, Human
ugcuucagccugagg

SEQ ID NO: 2060161 - RNA, 17 nt, Human
ugcuucagccugaggcu

SEQ ID NO: 2060162 - RNA, 22 nt, Human
ugcuucagccugaggcugagac

SEQ ID NO: 2060163 - RNA, 23 nt, Human
ugcuucagccugaggcugagacu

SEQ ID NO: 2060164 - RNA, 14 nt, Human
ugcuucagcuugcu

SEQ ID NO: 2060165 - RNA, 15 nt, Human
ugcuucagcuugcuu

SEQ ID NO: 2060166 - RNA, 22 nt, Human
aggacagccuguggcggugccu

SEQ ID NO: 2060167 - RNA, 23 nt, Human
aggacagccuguggcggugccug

SEQ ID NO: 2060168 - RNA, 18 nt, Human
aggacaggaccagauuuu

SEQ ID NO: 2060169 - RNA, 16 nt, Human
aggacaggcagaaaga

SEQ ID NO: 2060170 - RNA, 17 nt, Human
aggacaggcagaaagag

SEQ ID NO: 2060171 - RNA, 14 nt, Human
aggacaggcaggug

SEQ ID NO: 2060172 - RNA, 12 nt, Human
aggacaggcccg

SEQ ID NO: 2060173 - RNA, 22 nt, Human
aggacagggaggugaccccagg

SEQ ID NO: 2060174 - RNA, 21 nt, Human
aggacaugauggagcgcaccu

SEQ ID NO: 2060175 - RNA, 21 nt, Human
ugcuggcugccuuagaaccuu

SEQ ID NO: 2060176 - RNA, 12 nt, Human
ugcuggccccuc

SEQ ID NO: 2060177 - RNA, 13 nt, Human
ugcuggccccuca

SEQ ID NO: 2060178 - RNA, 15 nt, Human
ugcuggccccucacc

SEQ ID NO: 2060179 - RNA, 14 nt, Human
ugcuggcugccuua

SEQ ID NO: 2060180 - RNA, 15 nt, Human
ugcuggcugccuuag

SEQ ID NO: 2060181 - RNA, 18 nt, Human
ugcuggcuguuggcuggg

SEQ ID NO: 2060182 - RNA, 19 nt, Human
aggaauuugaagcugcagu

SEQ ID NO: 2060183 - RNA, 16 nt, Human
ugcucuggaagagagg

SEQ ID NO: 2060184 - RNA, 15 nt, Human
aggaauuucugagug

SEQ ID NO: 2060185 - RNA, 14 nt, Human
ugcuguauuuucuu

SEQ ID NO: 2060186 - RNA, 18 nt, Human
ugcuguauuuucuuuuua

SEQ ID NO: 2060187 - RNA, 14 nt, Human
ugcugucuaugugg

SEQ ID NO: 2060188 - RNA, 23 nt, Human
ugcuguccuaggccacaccaucu

SEQ ID NO: 2060189 - RNA, 18 nt, Human
ugcuguccgguggagauc

SEQ ID NO: 2060190 - RNA, 14 nt, Human
ugcuguccuaggcc

SEQ ID NO: 2060191 - RNA, 16 nt, Human
ugcuguccuaggccac

SEQ ID NO: 2060192 - RNA, 13 nt, Human
ugcuggagcggcu

SEQ ID NO: 2060193 - RNA, 15 nt, Human
ugcugggacuggcca

SEQ ID NO: 2060194 - RNA, 17 nt, Human
ugcugggacuggccagg

SEQ ID NO: 2060195 - RNA, 13 nt, Human
auccaauuggaua

SEQ ID NO: 2060196 - RNA, 15 nt, Human
auccacacacagagg

SEQ ID NO: 2060197 - RNA, 22 nt, Human
auccaagacagaauaaugaaug

SEQ ID NO: 2060198 - RNA, 16 nt, Human
auccacacacagagga

SEQ ID NO: 2060199 - RNA, 20 nt, Human
auccacacacagaggaagag

SEQ ID NO: 2060200 - RNA, 23 nt, Human
auccacacacagaggaagagcag

SEQ ID NO: 2060201 - RNA, 17 nt, Human
auccagguucagcuugu

SEQ ID NO: 2060202 - RNA, 16 nt, Human
auccaguacauuuaau

SEQ ID NO: 2060203 - RNA, 18 nt, Human
auccaguacauuuaauug

SEQ ID NO: 2060204 - RNA, 19 nt, Human
auccaguacauuuaauuga

SEQ ID NO: 2060205 - RNA, 16 nt, Human
uucugccugcccaggc

SEQ ID NO: 2060206 - RNA, 15 nt, Human
uucugccugcccagg

SEQ ID NO: 2060207 - RNA, 18 nt, Human
auccaaccccccaccugc

SEQ ID NO: 2060208 - RNA, 20 nt, Human
auccaaccccccaccugcca

SEQ ID NO: 2060209 - RNA, 18 nt, Human
aucccaugagccucagca

SEQ ID NO: 2060210 - RNA, 17 nt, Human
aucccaugagccucagc

SEQ ID NO: 2060211 - RNA, 16 nt, Human
aucccugaggcuggac

SEQ ID NO: 2060212 - RNA, 18 nt, Human
aucccugaggcuggacuc

SEQ ID NO: 2060213 - RNA, 20 nt, Human
aucccugaggcuggacucca

SEQ ID NO: 2060214 - RNA, 21 nt, Human
aucccagcacuuugggaggcc

SEQ ID NO: 2060215 - RNA, 16 nt, Human
aucccaugagccucag

SEQ ID NO: 2060216 - RNA, 22 nt, Human
aucccagcacuuugggaggcug

SEQ ID NO: 2060217 - RNA, 19 nt, Human
aucccagcacuuugggagg

SEQ ID NO: 2060218 - RNA, 20 nt, Human
aucccacggaaaaugccaau

SEQ ID NO: 2060219 - RNA, 23 nt, Human
aucccacggaaaaugccaaucuc

SEQ ID NO: 2060220 - RNA, 18 nt, Human
aucccacucacaacagcu

SEQ ID NO: 2060221 - RNA, 12 nt, Human
aucccacuccua

SEQ ID NO: 2060222 - RNA, 16 nt, Human
aucccacuugccccug

SEQ ID NO: 2060223 - RNA, 16 nt, Human
auccaugggggcaggg

SEQ ID NO: 2060224 - RNA, 19 nt, Human
auccaugggggcagggcau

SEQ ID NO: 2060225 - RNA, 19 nt, Human
auccaugaguuugcccugg

SEQ ID NO: 2060226 - RNA, 23 nt, Human
uucuucgagguggaucacagagg

SEQ ID NO: 2060227 - RNA, 20 nt, Human
uucuucggggaacuccugga

SEQ ID NO: 2060228 - RNA, 11 nt, Human
uucuucucccu

SEQ ID NO: 2060229 - RNA, 16 nt, Human
uucuugccaaugaggu

SEQ ID NO: 2060230 - RNA, 12 nt, Human
uucuuugauuau

SEQ ID NO: 2060231 - RNA, 17 nt, Human
uucuuugagacuggguc

SEQ ID NO: 2060232 - RNA, 21 nt, Human
uucuugccuacuaugccagau

SEQ ID NO: 2060233 - RNA, 14 nt, Human
uucuuacauguuuu

SEQ ID NO: 2060234 - RNA, 14 nt, Human
uucuuacaugcauu

SEQ ID NO: 2060235 - RNA, 16 nt, Human
uucuuacaugcauuug

SEQ ID NO: 2060236 - RNA, 13 nt, Human
uucuuacauguuu

SEQ ID NO: 2060237 - RNA, 22 nt, Human
uucuuacuauuaagcaguaaaa

SEQ ID NO: 2060238 - RNA, 13 nt, Human
uucuuacugcuug

SEQ ID NO: 2060239 - RNA, 16 nt, Human
uucuuagauaucuuuu

SEQ ID NO: 2060240 - RNA, 18 nt, Human
uucuuagauaucuuuuua

SEQ ID NO: 2060241 - RNA, 17 nt, Human
uucuuagccuguggcag

SEQ ID NO: 2060242 - RNA, 18 nt, Human
uucuuagccuguggcagu

SEQ ID NO: 2060243 - RNA, 23 nt, Human
uucuuagccuguggcaguaaaga

SEQ ID NO: 2060244 - RNA, 14 nt, Human
uucuuacugcuugg

SEQ ID NO: 2060245 - RNA, 23 nt, Human
uucuuacuugaugaguguaacaa

SEQ ID NO: 2060246 - RNA, 21 nt, Human
uucuuaaaugggcuacuuugu

SEQ ID NO: 2060247 - RNA, 14 nt, Human
uucuguuuguuaaa

SEQ ID NO: 2060248 - RNA, 11 nt, Human
uucuguuucuu

SEQ ID NO: 2060249 - RNA, 14 nt, Human
uucuguuucuaguu

SEQ ID NO: 2060250 - RNA, 15 nt, Human
uucuguuucuaguug

SEQ ID NO: 2060251 - RNA, 20 nt, Human
uucuguuucuauucucuccu

SEQ ID NO: 2060252 - RNA, 22 nt, Human
uucuguuucuauucucuccuca

SEQ ID NO: 2060253 - RNA, 14 nt, Human
aucccugccagcuc

SEQ ID NO: 2060254 - RNA, 15 nt, Human
aucccugccagcucu

SEQ ID NO: 2060255 - RNA, 17 nt, Human
uucuccuuucacaaccu

SEQ ID NO: 2060256 - RNA, 21 nt, Human
uucucccguucacguugccua

SEQ ID NO: 2060257 - RNA, 20 nt, Human
aucauuguuuggcauugaaa

SEQ ID NO: 2060258 - RNA, 20 nt, Human
uucucuaaaauagccacuua
